United States Patent Application Publication US 2007/0042381 A1 - sequence listing, part 49

SEQ ID NO: 2200219 - RNA, 16 nt, Human
uuggcauguguauguu

SEQ ID NO: 2200220 - RNA, 13 nt, Human
uuggcugggccca

SEQ ID NO: 2200221 - RNA, 23 nt, Human
uuggcuggaugaaauuuucuaga

SEQ ID NO: 2200222 - RNA, 21 nt, Human
uuggcuggaugaaauuuucua

SEQ ID NO: 2200223 - RNA, 16 nt, Human
uuggcugcuuggccuu

SEQ ID NO: 2200224 - RNA, 20 nt, Human
uuggcuggaugaaauuuucu

SEQ ID NO: 2200225 - RNA, 18 nt, Human
uuggcugggggccucagu

SEQ ID NO: 2200226 - RNA, 15 nt, Human
uuggcugcuuggccu

SEQ ID NO: 2200227 - RNA, 16 nt, Human
uuggcugcugaaggcu

SEQ ID NO: 2200228 - RNA, 18 nt, Human
uuggcugggcccagaagg

SEQ ID NO: 2200229 - RNA, 17 nt, Human
uuggcugggcccagaag

SEQ ID NO: 2200230 - RNA, 16 nt, Human
uuggcugggcccagaa

SEQ ID NO: 2200231 - RNA, 21 nt, Human
uuggcuguagaaggagacaga

SEQ ID NO: 2200232 - RNA, 17 nt, Human
uuggcugugaggccccu

SEQ ID NO: 2200233 - RNA, 14 nt, Human
uuggcugugucuaa

SEQ ID NO: 2200234 - RNA, 15 nt, Human
uuggcugugucuaaa

SEQ ID NO: 2200235 - RNA, 17 nt, Human
uuggcugugucuaaacu

SEQ ID NO: 2200236 - RNA, 18 nt, Human
uuggcugugucuaaacug

SEQ ID NO: 2200237 - RNA, 20 nt, Human
uuggcugugucuaaacugca

SEQ ID NO: 2200238 - RNA, 21 nt, Human
uuggcugugucuaaacugcau

SEQ ID NO: 2200239 - RNA, 21 nt, Human
uuggcugggggccucagugcc

SEQ ID NO: 2200240 - RNA, 22 nt, Human
uuggcugggggccucagugcca

SEQ ID NO: 2200241 - RNA, 22 nt, Human
uuguaaaguguggucccaacag

SEQ ID NO: 2200242 - RNA, 23 nt, Human
uuguaaaguguggucccaacagg

SEQ ID NO: 2200243 - RNA, 18 nt, Human
uuguaaauaaaggaacca

SEQ ID NO: 2200244 - RNA, 13 nt, Human
uuggucccugggg

SEQ ID NO: 2200245 - RNA, 16 nt, Human
uuguaaaggaauuuaa

SEQ ID NO: 2200246 - RNA, 15 nt, Human
uugguccucuugccu

SEQ ID NO: 2200247 - RNA, 22 nt, Human
uugguaaauuuccccaacagug

SEQ ID NO: 2200248 - RNA, 23 nt, Human
uuggucccgugcagcuucugucc

SEQ ID NO: 2200249 - RNA, 13 nt, Human
uugguccugcugc

SEQ ID NO: 2200250 - RNA, 12 nt, Human
uugguccugcug

SEQ ID NO: 2200251 - RNA, 22 nt, Human
uuggucccccuuccauggacuu

SEQ ID NO: 2200252 - RNA, 16 nt, Human
uuggucccccuuccau

SEQ ID NO: 2200253 - RNA, 19 nt, Human
uuguacacaccuuauauuu

SEQ ID NO: 2200254 - RNA, 23 nt, Human
uuguacaauugaacuuaaauaaa

SEQ ID NO: 2200255 - RNA, 14 nt, Human
uuguacaaauaaag

SEQ ID NO: 2200256 - RNA, 19 nt, Human
uuguaaauauuuauguaaa

SEQ ID NO: 2200257 - RNA, 13 nt, Human
uuguacacuuuuu

SEQ ID NO: 2200258 - RNA, 15 nt, Human
uuguacacuuuuuug

SEQ ID NO: 2200259 - RNA, 11 nt, Human
uuguacacuuu

SEQ ID NO: 2200260 - RNA, 12 nt, Human
uuguacagacaa

SEQ ID NO: 2200261 - RNA, 13 nt, Human
uuguacagacaac

SEQ ID NO: 2200262 - RNA, 16 nt, Human
uuguaaauauuuaugu

SEQ ID NO: 2200263 - RNA, 13 nt, Human
uuguaaauauuua

SEQ ID NO: 2200264 - RNA, 12 nt, Human
uuguaaauauuu

SEQ ID NO: 2200265 - RNA, 11 nt, Human
uuguaaaugug

SEQ ID NO: 2200266 - RNA, 18 nt, Human
uuguaaaugugcuuuuaa

SEQ ID NO: 2200267 - RNA, 14 nt, Human
uuguaaaugugcuu

SEQ ID NO: 2200268 - RNA, 16 nt, Human
uuguacaguuuuuauu

SEQ ID NO: 2200269 - RNA, 19 nt, Human
uuguagaauguauuguacc

SEQ ID NO: 2200270 - RNA, 12 nt, Human
uuguacaguuuu

SEQ ID NO: 2200271 - RNA, 13 nt, Human
uuguacaguuuuu

SEQ ID NO: 2200272 - RNA, 19 nt, Human
uuguacagacguaugcuua

SEQ ID NO: 2200273 - RNA, 18 nt, Human
uuguacagacguaugcuu

SEQ ID NO: 2200274 - RNA, 21 nt, Human
uuguacagacguaugcuuauu

SEQ ID NO: 2200275 - RNA, 16 nt, Human
uuguacagcuguuuaa

SEQ ID NO: 2200276 - RNA, 11 nt, Human
uuguacaguuc

SEQ ID NO: 2200277 - RNA, 15 nt, Human
uuguacaguucaguu

SEQ ID NO: 2200278 - RNA, 16 nt, Human
uuguacaguucaguuc

SEQ ID NO: 2200279 - RNA, 11 nt, Human
uuguacaguuu

SEQ ID NO: 2200280 - RNA, 15 nt, Human
uuguacaguuugcug

SEQ ID NO: 2200281 - RNA, 16 nt, Human
uuguacaguuugcugu

SEQ ID NO: 2200282 - RNA, 17 nt, Human
uuguacaguuugcugua

SEQ ID NO: 2200283 - RNA, 20 nt, Human
uuguacaguuugcuguacua

SEQ ID NO: 2200284 - RNA, 18 nt, Human
uuguacaguuuguuuaca

SEQ ID NO: 2200285 - RNA, 20 nt, Human
uuguacaguuuguuuacaca

SEQ ID NO: 2200286 - RNA, 14 nt, Human
uuguagagccaggg

SEQ ID NO: 2200287 - RNA, 15 nt, Human
uuguagagccagggu

SEQ ID NO: 2200288 - RNA, 20 nt, Human
uuguagaauguauuguaccu

SEQ ID NO: 2200289 - RNA, 22 nt, Human
uuguagaauguauuguaccuuu

SEQ ID NO: 2200290 - RNA, 19 nt, Human
uuguaucacaaaucuuaac

SEQ ID NO: 2200291 - RNA, 14 nt, Human
uuguaucucuuuug

SEQ ID NO: 2200292 - RNA, 13 nt, Human
uuguaucucuuuu

SEQ ID NO: 2200293 - RNA, 20 nt, Human
uuguaucucugaagcauguu

SEQ ID NO: 2200294 - RNA, 21 nt, Human
uuguaucucugaagcauguuu

SEQ ID NO: 2200295 - RNA, 13 nt, Human
uuguauuagaugu

SEQ ID NO: 2200296 - RNA, 15 nt, Human
uuguauuagauguuc

SEQ ID NO: 2200297 - RNA, 16 nt, Human
uuguauuagauguucu

SEQ ID NO: 2200298 - RNA, 17 nt, Human
uuguauuagauguucuc

SEQ ID NO: 2200299 - RNA, 14 nt, Human
uuguauucagaguu

SEQ ID NO: 2200300 - RNA, 21 nt, Human
uuguauucucuccuguaccuc

SEQ ID NO: 2200301 - RNA, 21 nt, Human
uuguaucuagugcagcugauu

SEQ ID NO: 2200302 - RNA, 20 nt, Human
uuguaucuagugcagcugau

SEQ ID NO: 2200303 - RNA, 18 nt, Human
uuguaucuagugcagcug

SEQ ID NO: 2200304 - RNA, 17 nt, Human
uuguaucuagugcagcu

SEQ ID NO: 2200305 - RNA, 13 nt, Human
uuguaucuagugc

SEQ ID NO: 2200306 - RNA, 22 nt, Human
uuguaucguauagcuguauuga

SEQ ID NO: 2200307 - RNA, 18 nt, Human
uuguaucguauagcugua

SEQ ID NO: 2200308 - RNA, 20 nt, Human
uuguaucguauagcuguauu

SEQ ID NO: 2200309 - RNA, 14 nt, Human
uuguauuacaaauc

SEQ ID NO: 2200310 - RNA, 19 nt, Human
uuguaucauuugaacaacu

SEQ ID NO: 2200311 - RNA, 22 nt, Human
uuguaucagaggccuauaauga

SEQ ID NO: 2200312 - RNA, 18 nt, Human
uuguaucgauguuaugua

SEQ ID NO: 2200313 - RNA, 21 nt, Human
uuguaucgauguuauguaaaa

SEQ ID NO: 2200314 - RNA, 15 nt, Human
uuguaucguauagcu

SEQ ID NO: 2200315 - RNA, 17 nt, Human
uuguaucguauagcugu

SEQ ID NO: 2200316 - RNA, 15 nt, Human
uuguaucagaggccu

SEQ ID NO: 2200317 - RNA, 21 nt, Human
uuguagaugaaaaagcaugua

SEQ ID NO: 2200318 - RNA, 12 nt, Human
uuguagaugaaa

SEQ ID NO: 2200319 - RNA, 19 nt, Human
uuguagaugaaaaagcaug

SEQ ID NO: 2200320 - RNA, 20 nt, Human
uguggggaucucaggggcug

SEQ ID NO: 2200321 - RNA, 14 nt, Human
ugugggcugugagu

SEQ ID NO: 2200322 - RNA, 13 nt, Human
ugugggcugugag

SEQ ID NO: 2200323 - RNA, 22 nt, Human
ugugggcugcacucugugccca

SEQ ID NO: 2200324 - RNA, 20 nt, Human
ugugggcugcacucugugcc

SEQ ID NO: 2200325 - RNA, 21 nt, Human
ugugggcugcacucugugccc

SEQ ID NO: 2200326 - RNA, 13 nt, Human
ugugggcugcacu

SEQ ID NO: 2200327 - RNA, 14 nt, Human
ugugggcugcacuc

SEQ ID NO: 2200328 - RNA, 16 nt, Human
ugugggcugcacucug

SEQ ID NO: 2200329 - RNA, 19 nt, Human
ugugggaaugcggcaagaa

SEQ ID NO: 2200330 - RNA, 18 nt, Human
ugugggaaugcggcaaga

SEQ ID NO: 2200331 - RNA, 15 nt, Human
ugugggaagggagag

SEQ ID NO: 2200332 - RNA, 15 nt, Human
ugugggaaggccagc

SEQ ID NO: 2200333 - RNA, 12 nt, Human
ugugggaacaga

SEQ ID NO: 2200334 - RNA, 23 nt, Human
ugugggaacgagaggggaagagu

SEQ ID NO: 2200335 - RNA, 12 nt, Human
ugugggaagggg

SEQ ID NO: 2200336 - RNA, 18 nt, Human
uguggcugggggcaggag

SEQ ID NO: 2200337 - RNA, 15 nt, Human
uguggcugggggcag

SEQ ID NO: 2200338 - RNA, 14 nt, Human
uguggcugcuagca

SEQ ID NO: 2200339 - RNA, 22 nt, Human
uguggcugaggaggccuccauc

SEQ ID NO: 2200340 - RNA, 14 nt, Human
uguggcugcagcag

SEQ ID NO: 2200341 - RNA, 14 nt, Human
uguggcuccuuccc

SEQ ID NO: 2200342 - RNA, 15 nt, Human
uguggcuccuuccca

SEQ ID NO: 2200343 - RNA, 20 nt, Human
uguggcuccuaucuguguuu

SEQ ID NO: 2200344 - RNA, 13 nt, Human
uguggcugaggag

SEQ ID NO: 2200345 - RNA, 16 nt, Human
uguggcugaggaggcc

SEQ ID NO: 2200346 - RNA, 21 nt, Human
uguggcugaggaggccuccau

SEQ ID NO: 2200347 - RNA, 15 nt, Human
uguggcugucagcag

SEQ ID NO: 2200348 - RNA, 16 nt, Human
uguggcugcagcagcg

SEQ ID NO: 2200349 - RNA, 21 nt, Human
uguggcugggggcaggagggc

SEQ ID NO: 2200350 - RNA, 21 nt, Human
uguggcugucagcaggaagca

SEQ ID NO: 2200351 - RNA, 19 nt, Human
uguggcugucagcaggaag

SEQ ID NO: 2200352 - RNA, 22 nt, Human
uguggcuucuuaaucuuuucac

SEQ ID NO: 2200353 - RNA, 17 nt, Human
uguggcuuucuuucuuu

SEQ ID NO: 2200354 - RNA, 19 nt, Human
uguggcuuucagccucugg

SEQ ID NO: 2200355 - RNA, 17 nt, Human
uguggcuuucagccucu

SEQ ID NO: 2200356 - RNA, 15 nt, Human
ugugggucaaggaau

SEQ ID NO: 2200357 - RNA, 21 nt, Human
uguggguacagagaggucaag

SEQ ID NO: 2200358 - RNA, 21 nt, Human
ugugggguuuuuggagaaggu

SEQ ID NO: 2200359 - RNA, 22 nt, Human
uguggggugugcacaucucugc

SEQ ID NO: 2200360 - RNA, 15 nt, Human
uguggggugaaaagu

SEQ ID NO: 2200361 - RNA, 16 nt, Human
ugugggggucugugug

SEQ ID NO: 2200362 - RNA, 16 nt, Human
uguggggauuucuccc

SEQ ID NO: 2200363 - RNA, 15 nt, Human
uguggggccagguca

SEQ ID NO: 2200364 - RNA, 12 nt, Human
uguggggccuug

SEQ ID NO: 2200365 - RNA, 13 nt, Human
ugugggggcugca

SEQ ID NO: 2200366 - RNA, 20 nt, Human
uguggggcugguagcucagg

SEQ ID NO: 2200367 - RNA, 23 nt, Human
ugugggggaagagcacagcccuc

SEQ ID NO: 2200368 - RNA, 15 nt, Human
uguggguaccuguau

SEQ ID NO: 2200369 - RNA, 20 nt, Human
uguguacaucccauguaaca

SEQ ID NO: 2200370 - RNA, 23 nt, Human
uguguacaucccauguaacagaa

SEQ ID NO: 2200371 - RNA, 20 nt, Human
ugugggucugugugugugua

SEQ ID NO: 2200372 - RNA, 16 nt, Human
ugugggucugugugug

SEQ ID NO: 2200373 - RNA, 14 nt, Human
ugugggucugugug

SEQ ID NO: 2200374 - RNA, 16 nt, Human
uguguacguggagagg

SEQ ID NO: 2200375 - RNA, 15 nt, Human
uguguacguggagag

SEQ ID NO: 2200376 - RNA, 15 nt, Human
uguguacccaaacgu

SEQ ID NO: 2200377 - RNA, 24 nt, Human
uguguacaucccauguaacagaaa

SEQ ID NO: 2200378 - RNA, 19 nt, Human
uguguacauggcagaguuu

SEQ ID NO: 2200379 - RNA, 15 nt, Human
uguggaaaagaaaca

SEQ ID NO: 2200380 - RNA, 20 nt, Human
uguggaaaagaaacacgcac

SEQ ID NO: 2200381 - RNA, 19 nt, Human
uguggaaaagccaagaggc

SEQ ID NO: 2200382 - RNA, 16 nt, Human
uguggaaaaauauuua

SEQ ID NO: 2200383 - RNA, 14 nt, Human
uguggaaaaauauu

SEQ ID NO: 2200384 - RNA, 16 nt, Human
uguggaaaaaugagag

SEQ ID NO: 2200385 - RNA, 19 nt, Human
uguggaaaaaugagagaag

SEQ ID NO: 2200386 - RNA, 20 nt, Human
uguggaaaaaugagagaagg

SEQ ID NO: 2200387 - RNA, 13 nt, Human
uguggaaaacaga

SEQ ID NO: 2200388 - RNA, 12 nt, Human
uguggaaagccu

SEQ ID NO: 2200389 - RNA, 17 nt, Human
uguggaaaaugaaaauu

SEQ ID NO: 2200390 - RNA, 23 nt, Human
uguggaaaagccaagaggcugca

SEQ ID NO: 2200391 - RNA, 21 nt, Human
uguggaaaagccaagaggcug

SEQ ID NO: 2200392 - RNA, 23 nt, Human
uguggaaagugaauuugaaugaa

SEQ ID NO: 2200393 - RNA, 12 nt, Human
uguggaaagugu

SEQ ID NO: 2200394 - RNA, 22 nt, Human
uguggaaagugaauuugaauga

SEQ ID NO: 2200395 - RNA, 19 nt, Human
uguggaaagugaauuugaa

SEQ ID NO: 2200396 - RNA, 16 nt, Human
uguggaaagugaauuu

SEQ ID NO: 2200397 - RNA, 21 nt, Human
uguggaaagucacaggucaca

SEQ ID NO: 2200398 - RNA, 20 nt, Human
uguggaaagccucugcugcc

SEQ ID NO: 2200399 - RNA, 19 nt, Human
uguggaaagccucugcugc

SEQ ID NO: 2200400 - RNA, 17 nt, Human
uguggaaagccucugcu

SEQ ID NO: 2200401 - RNA, 15 nt, Human
uguggaaagccucug

SEQ ID NO: 2200402 - RNA, 14 nt, Human
uguggaaagccucu

SEQ ID NO: 2200403 - RNA, 14 nt, Human
uguggacacagcuc

SEQ ID NO: 2200404 - RNA, 13 nt, Human
uguggacacagcu

SEQ ID NO: 2200405 - RNA, 21 nt, Human
uguggagaagcggcuggcagc

SEQ ID NO: 2200406 - RNA, 12 nt, Human
uguggagaagcg

SEQ ID NO: 2200407 - RNA, 23 nt, Human
uguggagaaacuguagucucagg

SEQ ID NO: 2200408 - RNA, 16 nt, Human
uguggacuuuguucac

SEQ ID NO: 2200409 - RNA, 13 nt, Human
uguggagaaagga

SEQ ID NO: 2200410 - RNA, 23 nt, Human
uguggagaaauaaaaauaccucu

SEQ ID NO: 2200411 - RNA, 15 nt, Human
uguggcuccccucua

SEQ ID NO: 2200412 - RNA, 19 nt, Human
uguggagaagccacaggcc

SEQ ID NO: 2200413 - RNA, 23 nt, Human
uguggcuccccucuauuuagcau

SEQ ID NO: 2200414 - RNA, 17 nt, Human
uguggcuccuaucugug

SEQ ID NO: 2200415 - RNA, 18 nt, Human
uguggcuccuaucugugu

SEQ ID NO: 2200416 - RNA, 19 nt, Human
uguggcuccuaucuguguu

SEQ ID NO: 2200417 - RNA, 21 nt, Human
uguggcuccuggggguucuuu

SEQ ID NO: 2200418 - RNA, 15 nt, Human
uguggacacagcucu

SEQ ID NO: 2200419 - RNA, 16 nt, Human
uguggacacagcucuu

SEQ ID NO: 2200420 - RNA, 15 nt, Human
uguggacugugaugc

SEQ ID NO: 2200421 - RNA, 14 nt, Human
uguggacugugaug

SEQ ID NO: 2200422 - RNA, 21 nt, Human
uguggaaaguguaaagcauuc

SEQ ID NO: 2200423 - RNA, 21 nt, Human
uguggacuaaaagauauaagu

SEQ ID NO: 2200424 - RNA, 19 nt, Human
uguggaaaguguaaagcau

SEQ ID NO: 2200425 - RNA, 20 nt, Human
uguggaaaguguaaagcauu

SEQ ID NO: 2200426 - RNA, 14 nt, Human
uguggaaaguguaa

SEQ ID NO: 2200427 - RNA, 15 nt, Human
uguggaaaguguaaa

SEQ ID NO: 2200428 - RNA, 16 nt, Human
uguggaaaguguaaag

SEQ ID NO: 2200429 - RNA, 17 nt, Human
uguggaaaguguaaagc

SEQ ID NO: 2200430 - RNA, 19 nt, Human
ugugcauagagccacguau

SEQ ID NO: 2200431 - RNA, 22 nt, Human
ugugcaguucuaguuugcauuc

SEQ ID NO: 2200432 - RNA, 19 nt, Human
ugugcaguucuaguuugca

SEQ ID NO: 2200433 - RNA, 12 nt, Human
ugugcaguguug

SEQ ID NO: 2200434 - RNA, 14 nt, Human
ugugcaguguagcc

SEQ ID NO: 2200435 - RNA, 13 nt, Human
ugugcaguucuag

SEQ ID NO: 2200436 - RNA, 18 nt, Human
ugugcagucacuggaggu

SEQ ID NO: 2200437 - RNA, 17 nt, Human
ugugcaguccugggaug

SEQ ID NO: 2200438 - RNA, 20 nt, Human
ugugcaguccugggaugugg

SEQ ID NO: 2200439 - RNA, 20 nt, Human
ugugcagugaagguugcuga

SEQ ID NO: 2200440 - RNA, 13 nt, Human
ugugcauggguga

SEQ ID NO: 2200441 - RNA, 15 nt, Human
ugugcaugggagcaa

SEQ ID NO: 2200442 - RNA, 13 nt, Human
ugugcauauugua

SEQ ID NO: 2200443 - RNA, 15 nt, Human
ugugcauauuguaca

SEQ ID NO: 2200444 - RNA, 17 nt, Human
ugugcauauuguacacu

SEQ ID NO: 2200445 - RNA, 19 nt, Human
ugugcauauuguacacuuu

SEQ ID NO: 2200446 - RNA, 22 nt, Human
ugugcaugugugcgagugugug

SEQ ID NO: 2200447 - RNA, 23 nt, Human
ugugcauguaugucuuggacacu

SEQ ID NO: 2200448 - RNA, 19 nt, Human
ugugcaugggugaagggag

SEQ ID NO: 2200449 - RNA, 15 nt, Human
ugugcaugguggcac

SEQ ID NO: 2200450 - RNA, 20 nt, Human
ugugcauguaugucuuggac

SEQ ID NO: 2200451 - RNA, 16 nt, Human
ugugccucugggacug

SEQ ID NO: 2200452 - RNA, 15 nt, Human
ugugccucugggacu

SEQ ID NO: 2200453 - RNA, 13 nt, Human
ugugccucuggga

SEQ ID NO: 2200454 - RNA, 13 nt, Human
ugugccucugccu

SEQ ID NO: 2200455 - RNA, 22 nt, Human
ugugcauguguguaagugugug

SEQ ID NO: 2200456 - RNA, 14 nt, Human
ugugccucugccug

SEQ ID NO: 2200457 - RNA, 15 nt, Human
ugugcacaauucugu

SEQ ID NO: 2200458 - RNA, 18 nt, Human
ugugcacaugugugcgug

SEQ ID NO: 2200459 - RNA, 14 nt, Human
ugugcaccaggguu

SEQ ID NO: 2200460 - RNA, 13 nt, Human
ugugcaccagggu

SEQ ID NO: 2200461 - RNA, 14 nt, Human
ugugcacccauggg

SEQ ID NO: 2200462 - RNA, 18 nt, Human
ugugcacccucuauccca

SEQ ID NO: 2200463 - RNA, 16 nt, Human
ugugcacaugcacgug

SEQ ID NO: 2200464 - RNA, 22 nt, Human
ugugcacaugcacgugugugca

SEQ ID NO: 2200465 - RNA, 23 nt, Human
ugugcagacucaauaaaaucaug

SEQ ID NO: 2200466 - RNA, 21 nt, Human
ugugcaccuuaccaacuuucu

SEQ ID NO: 2200467 - RNA, 22 nt, Human
ugugcaccuuaccaacuuucug

SEQ ID NO: 2200468 - RNA, 22 nt, Human
ugugcagccccgccuccaggcc

SEQ ID NO: 2200469 - RNA, 19 nt, Human
ugugcagccgcugagcgag

SEQ ID NO: 2200470 - RNA, 23 nt, Human
ugugcagccccgccuccaggcca

SEQ ID NO: 2200471 - RNA, 17 nt, Human
ugugcagguuuguuaca

SEQ ID NO: 2200472 - RNA, 17 nt, Human
ugugcagucacuggagg

SEQ ID NO: 2200473 - RNA, 23 nt, Human
ugugcagguggggagacugggcu

SEQ ID NO: 2200474 - RNA, 16 nt, Human
ugugcagguggggaga

SEQ ID NO: 2200475 - RNA, 22 nt, Human
ugugcagccuguccugggcugg

SEQ ID NO: 2200476 - RNA, 23 nt, Human
ugugcuaaccacgucugucuuca

SEQ ID NO: 2200477 - RNA, 21 nt, Human
ugugcuaccuggguccuuuuc

SEQ ID NO: 2200478 - RNA, 14 nt, Human
ugugcuacuuugcc

SEQ ID NO: 2200479 - RNA, 17 nt, Human
ugugcuacugauuguuu

SEQ ID NO: 2200480 - RNA, 20 nt, Human
ugugcguguguccaugugug

SEQ ID NO: 2200481 - RNA, 21 nt, Human
ugugcguguguccaugugugu

SEQ ID NO: 2200482 - RNA, 15 nt, Human
ugugcgugcaugugc

SEQ ID NO: 2200483 - RNA, 22 nt, Human
ugugcgugaaacacaccaggcu

SEQ ID NO: 2200484 - RNA, 16 nt, Human
ugugcgugaaacacac

SEQ ID NO: 2200485 - RNA, 15 nt, Human
ugugcgugaaacaca

SEQ ID NO: 2200486 - RNA, 20 nt, Human
ugugcgugcuugaguguguu

SEQ ID NO: 2200487 - RNA, 13 nt, Human
ugugcuuauguuu

SEQ ID NO: 2200488 - RNA, 19 nt, Human
ugugcuucgggcccuuccc

SEQ ID NO: 2200489 - RNA, 22 nt, Human
ugugcuuauguaugagguacaa

SEQ ID NO: 2200490 - RNA, 16 nt, Human
ugugcuuuuaaaugca

SEQ ID NO: 2200491 - RNA, 16 nt, Human
ugugcuuuuccuauuu

SEQ ID NO: 2200492 - RNA, 14 nt, Human
ugugcuuuuccuau

SEQ ID NO: 2200493 - RNA, 15 nt, Human
ugugcuuuucuccaa

SEQ ID NO: 2200494 - RNA, 14 nt, Human
ugugcuucuuucuu

SEQ ID NO: 2200495 - RNA, 21 nt, Human
ugugcuucuuucuuugggaau

SEQ ID NO: 2200496 - RNA, 21 nt, Human
ugugcuucuaauauuuauugc

SEQ ID NO: 2200497 - RNA, 23 nt, Human
ugugcuucuaauauuuauugcuu

SEQ ID NO: 2200498 - RNA, 14 nt, Human
ugugcgugaaacac

SEQ ID NO: 2200499 - RNA, 13 nt, Human
ugugcgugaaaca

SEQ ID NO: 2200500 - RNA, 20 nt, Human
ugugcgugcauguguguuca

SEQ ID NO: 2200501 - RNA, 20 nt, Human
ugugccuggguggacauggc

SEQ ID NO: 2200502 - RNA, 17 nt, Human
ugugccucugggacugg

SEQ ID NO: 2200503 - RNA, 12 nt, Human
ugugccugcagc

SEQ ID NO: 2200504 - RNA, 15 nt, Human
ugugccucugccugu

SEQ ID NO: 2200505 - RNA, 13 nt, Human
ugugccugcagcc

SEQ ID NO: 2200506 - RNA, 15 nt, Human
ugugccugacccuac

SEQ ID NO: 2200507 - RNA, 13 nt, Human
ugugccuggcuca

SEQ ID NO: 2200508 - RNA, 15 nt, Human
ugugccuggcucaga

SEQ ID NO: 2200509 - RNA, 13 nt, Human
ugucugccagggc

SEQ ID NO: 2200510 - RNA, 19 nt, Human
ugucugccagccagcagcc

SEQ ID NO: 2200511 - RNA, 18 nt, Human
ugucugccagccagcagc

SEQ ID NO: 2200512 - RNA, 11 nt, Human
ugucugcccuu

SEQ ID NO: 2200513 - RNA, 16 nt, Human
ugucugcccuucaccc

SEQ ID NO: 2200514 - RNA, 14 nt, Human
ugucugccucuuag

SEQ ID NO: 2200515 - RNA, 15 nt, Human
ugucugccucuuaga

SEQ ID NO: 2200516 - RNA, 21 nt, Human
ugucugcgugguuccuuucuc

SEQ ID NO: 2200517 - RNA, 19 nt, Human
ugucuggcugaggauuuca

SEQ ID NO: 2200518 - RNA, 14 nt, Human
ugucuggcugcaga

SEQ ID NO: 2200519 - RNA, 17 nt, Human
ugucuggcugcagagca

SEQ ID NO: 2200520 - RNA, 16 nt, Human
ugucuggcugcagagc

SEQ ID NO: 2200521 - RNA, 14 nt, Human
ugucucacacuggc

SEQ ID NO: 2200522 - RNA, 17 nt, Human
ugucucaguccaccuga

SEQ ID NO: 2200523 - RNA, 18 nt, Human
ugucugcaggauugauua

SEQ ID NO: 2200524 - RNA, 21 nt, Human
ugucugcauuucgguggcuag

SEQ ID NO: 2200525 - RNA, 13 nt, Human
ugucugcauuucg

SEQ ID NO: 2200526 - RNA, 16 nt, Human
ugucugccagccagca

SEQ ID NO: 2200527 - RNA, 15 nt, Human
ugucugccagccagc

SEQ ID NO: 2200528 - RNA, 16 nt, Human
ugucugccaauuuuug

SEQ ID NO: 2200529 - RNA, 22 nt, Human
ugucucaguccaugaagaugua

SEQ ID NO: 2200530 - RNA, 21 nt, Human
ugucucaguccaugaagaugu

SEQ ID NO: 2200531 - RNA, 19 nt, Human
ugucucaagagggcacugg

SEQ ID NO: 2200532 - RNA, 15 nt, Human
uguccccacacuccu

SEQ ID NO: 2200533 - RNA, 16 nt, Human
uguccccacacuccua

SEQ ID NO: 2200534 - RNA, 18 nt, Human
uguccccaaaccugcaag

SEQ ID NO: 2200535 - RNA, 20 nt, Human
ugucccauuucuaaaggccu

SEQ ID NO: 2200536 - RNA, 19 nt, Human
uguccccaaauccgaaccu

SEQ ID NO: 2200537 - RNA, 14 nt, Human
uguccccaaauccg

SEQ ID NO: 2200538 - RNA, 22 nt, Human
uguccccaaauccgaaccuccu

SEQ ID NO: 2200539 - RNA, 21 nt, Human
uguccccaaauccgaaccucc

SEQ ID NO: 2200540 - RNA, 11 nt, Human
uguccccacac

SEQ ID NO: 2200541 - RNA, 12 nt, Human
uguccccacacu

SEQ ID NO: 2200542 - RNA, 14 nt, Human
uguccccacacucc

SEQ ID NO: 2200543 - RNA, 23 nt, Human
ugucucaagagggcacugguggc

SEQ ID NO: 2200544 - RNA, 14 nt, Human
ugucucaaugcuca

SEQ ID NO: 2200545 - RNA, 15 nt, Human
ugucucaaugcucau

SEQ ID NO: 2200546 - RNA, 20 nt, Human
ugucucaagagggcacuggu

SEQ ID NO: 2200547 - RNA, 21 nt, Human
ugucucaagagggcacuggug

SEQ ID NO: 2200548 - RNA, 16 nt, Human
ugucucaggucccugc

SEQ ID NO: 2200549 - RNA, 17 nt, Human
ugucucaggucccugca

SEQ ID NO: 2200550 - RNA, 16 nt, Human
ugucucaaugcucaua

SEQ ID NO: 2200551 - RNA, 17 nt, Human
ugucucaaugcucauaa

SEQ ID NO: 2200552 - RNA, 19 nt, Human
ugucucaaugcucauaacg

SEQ ID NO: 2200553 - RNA, 22 nt, Human
ugucucaaugcucauaacggau

SEQ ID NO: 2200554 - RNA, 23 nt, Human
ugucuggcugaggauuucaagcc

SEQ ID NO: 2200555 - RNA, 11 nt, Human
ugucugggcug

SEQ ID NO: 2200556 - RNA, 12 nt, Human
ugucugggcuga

SEQ ID NO: 2200557 - RNA, 13 nt, Human
ugucugguggccc

SEQ ID NO: 2200558 - RNA, 14 nt, Human
ugucugguggcccc

SEQ ID NO: 2200559 - RNA, 16 nt, Human
ugucugguggccccgu

SEQ ID NO: 2200560 - RNA, 17 nt, Human
ugucuuuggacccugag

SEQ ID NO: 2200561 - RNA, 18 nt, Human
ugucuuuggacccugagg

SEQ ID NO: 2200562 - RNA, 16 nt, Human
ugucuuuuuucacuac

SEQ ID NO: 2200563 - RNA, 14 nt, Human
ugucuuuuuucuaa

SEQ ID NO: 2200564 - RNA, 19 nt, Human
ugucuuuggacccugaggc

SEQ ID NO: 2200565 - RNA, 22 nt, Human
ugucuuuggacccugaggccca

SEQ ID NO: 2200566 - RNA, 20 nt, Human
ugugaaaaaaaaaaugcuga

SEQ ID NO: 2200567 - RNA, 17 nt, Human
ugugaaaaaaaaaaugc

SEQ ID NO: 2200568 - RNA, 18 nt, Human
ugucuuuuuuuuaaugug

SEQ ID NO: 2200569 - RNA, 21 nt, Human
ugucuuuuuuuuaaugugcug

SEQ ID NO: 2200570 - RNA, 21 nt, Human
ugucuggugguggcaccaucu

SEQ ID NO: 2200571 - RNA, 13 nt, Human
ugugaaacauguu

SEQ ID NO: 2200572 - RNA, 19 nt, Human
ugucaucagaagauaacuu

SEQ ID NO: 2200573 - RNA, 20 nt, Human
ugugaaaccuuuuuuaagau

SEQ ID NO: 2200574 - RNA, 22 nt, Human
ugugaaaccuuuuuuaagauuu

SEQ ID NO: 2200575 - RNA, 19 nt, Human
ugugaaacuggcacugaau

SEQ ID NO: 2200576 - RNA, 13 nt, Human
ugugaaaggaaag

SEQ ID NO: 2200577 - RNA, 14 nt, Human
ugugaaaggaaaga

SEQ ID NO: 2200578 - RNA, 20 nt, Human
ugugaaguuuacauuguaaa

SEQ ID NO: 2200579 - RNA, 14 nt, Human
ugugaaguuuacau

SEQ ID NO: 2200580 - RNA, 21 nt, Human
ugugcaagugugugcaugugu

SEQ ID NO: 2200581 - RNA, 12 nt, Human
ugugcaagugug

SEQ ID NO: 2200582 - RNA, 20 nt, Human
ugugcaagugucugugugca

SEQ ID NO: 2200583 - RNA, 19 nt, Human
ugugcaagugucugugugc

SEQ ID NO: 2200584 - RNA, 15 nt, Human
ugugcaagugucugu

SEQ ID NO: 2200585 - RNA, 16 nt, Human
ugugcaaguguaugca

SEQ ID NO: 2200586 - RNA, 18 nt, Human
ugugcaaguaugugagug

SEQ ID NO: 2200587 - RNA, 17 nt, Human
ugugcaaguaugugagu

SEQ ID NO: 2200588 - RNA, 13 nt, Human
ugugauauaagug

SEQ ID NO: 2200589 - RNA, 14 nt, Human
ugugcaagagaggg

SEQ ID NO: 2200590 - RNA, 18 nt, Human
ugugauaaggaucagaac

SEQ ID NO: 2200591 - RNA, 22 nt, Human
ugugauacccauagcuuccaug

SEQ ID NO: 2200592 - RNA, 14 nt, Human
ugugauagcacuuu

SEQ ID NO: 2200593 - RNA, 17 nt, Human
ugugauagcacuuucua

SEQ ID NO: 2200594 - RNA, 15 nt, Human
ugugauagcacuuuc

SEQ ID NO: 2200595 - RNA, 21 nt, Human
ugugauacaaugcugugcccu

SEQ ID NO: 2200596 - RNA, 23 nt, Human
ugugaguuuaccuuguauacugu

SEQ ID NO: 2200597 - RNA, 21 nt, Human
ugugaguuuaguaaggcugug

SEQ ID NO: 2200598 - RNA, 22 nt, Human
ugugaguuuaccuuguauacug

SEQ ID NO: 2200599 - RNA, 19 nt, Human
ugugaguaagagcuggugu

SEQ ID NO: 2200600 - RNA, 15 nt, Human
ugugaguaagagcug

SEQ ID NO: 2200601 - RNA, 23 nt, Human
ugugaguacuacaguccucccau

SEQ ID NO: 2200602 - RNA, 19 nt, Human
ugugaguacuacaguccuc

SEQ ID NO: 2200603 - RNA, 20 nt, Human
ugugaguacuacaguccucc

SEQ ID NO: 2200604 - RNA, 21 nt, Human
ugugaggugcagagugcccag

SEQ ID NO: 2200605 - RNA, 18 nt, Human
ugugaggggcucucucau

SEQ ID NO: 2200606 - RNA, 18 nt, Human
ugugaguacuacaguccu

SEQ ID NO: 2200607 - RNA, 22 nt, Human
ugugacccagcacugcccaaag

SEQ ID NO: 2200608 - RNA, 17 nt, Human
ugugacccccagcuccg

SEQ ID NO: 2200609 - RNA, 20 nt, Human
ugugacccccagcuccggcc

SEQ ID NO: 2200610 - RNA, 16 nt, Human
ugugacccccagcucc

SEQ ID NO: 2200611 - RNA, 15 nt, Human
ugugacccccagcuc

SEQ ID NO: 2200612 - RNA, 17 nt, Human
ugugacaugcgggcugg

SEQ ID NO: 2200613 - RNA, 18 nt, Human
ugugacauauuaugucuu

SEQ ID NO: 2200614 - RNA, 16 nt, Human
ugugacaggcagcaga

SEQ ID NO: 2200615 - RNA, 18 nt, Human
ugugacagauuauacaga

SEQ ID NO: 2200616 - RNA, 15 nt, Human
ugugacaggcagcag

SEQ ID NO: 2200617 - RNA, 17 nt, Human
ugugacaggcagcagag

SEQ ID NO: 2200618 - RNA, 19 nt, Human
ugugacaauuuuguacaaa

SEQ ID NO: 2200619 - RNA, 17 nt, Human
ugugacacauaugcacc

SEQ ID NO: 2200620 - RNA, 22 nt, Human
ugugacacauaugcaccuugug

SEQ ID NO: 2200621 - RNA, 16 nt, Human
ugugaauggauuggau

SEQ ID NO: 2200622 - RNA, 19 nt, Human
ugugacaugcgggcugggc

SEQ ID NO: 2200623 - RNA, 21 nt, Human
ugugacaugcgggcugggcag

SEQ ID NO: 2200624 - RNA, 16 nt, Human
ugugacauggugccug

SEQ ID NO: 2200625 - RNA, 17 nt, Human
ugugacauggugccuga

SEQ ID NO: 2200626 - RNA, 18 nt, Human
ugugacauggugccugag

SEQ ID NO: 2200627 - RNA, 20 nt, Human
ugugacauggugccugagag

SEQ ID NO: 2200628 - RNA, 14 nt, Human
ugugacauguaaca

SEQ ID NO: 2200629 - RNA, 22 nt, Human
ugugacauggugccugagaggc

SEQ ID NO: 2200630 - RNA, 12 nt, Human
ugugacauguaa

SEQ ID NO: 2200631 - RNA, 17 nt, Human
ugugaccagcacugucu

SEQ ID NO: 2200632 - RNA, 14 nt, Human
ugugaccagcacug

SEQ ID NO: 2200633 - RNA, 19 nt, Human
ugugaccagucugacccuu

SEQ ID NO: 2200634 - RNA, 15 nt, Human
ugugaccagggguga

SEQ ID NO: 2200635 - RNA, 21 nt, Human
ugugacccagauccucacaac

SEQ ID NO: 2200636 - RNA, 17 nt, Human
ugugacccagcacugcc

SEQ ID NO: 2200637 - RNA, 20 nt, Human
ugugacccagcacugcccaa

SEQ ID NO: 2200638 - RNA, 22 nt, Human
ugugaccacugcagaagacagu

SEQ ID NO: 2200639 - RNA, 14 nt, Human
ugugaaucagaccc

SEQ ID NO: 2200640 - RNA, 21 nt, Human
ugugaauauuuccauauggau

SEQ ID NO: 2200641 - RNA, 23 nt, Human
ugugaauauuuccauauggauuu

SEQ ID NO: 2200642 - RNA, 16 nt, Human
ugugaaucauuuuacc

SEQ ID NO: 2200643 - RNA, 12 nt, Human
ugugaauaaauu

SEQ ID NO: 2200644 - RNA, 20 nt, Human
ugugaauauggacucaguuu

SEQ ID NO: 2200645 - RNA, 22 nt, Human
ugugaauagaacucugaaauga

SEQ ID NO: 2200646 - RNA, 18 nt, Human
ugugaaucagacccuacc

SEQ ID NO: 2200647 - RNA, 15 nt, Human
ugugaaucagacccu

SEQ ID NO: 2200648 - RNA, 14 nt, Human
ugugaaugaacacu

SEQ ID NO: 2200649 - RNA, 23 nt, Human
ugugaaugaacacucuuuugcuu

SEQ ID NO: 2200650 - RNA, 17 nt, Human
ugugaaugaacacucuu

SEQ ID NO: 2200651 - RNA, 17 nt, Human
ugugaaugccacugccu

SEQ ID NO: 2200652 - RNA, 21 nt, Human
ugugacaaggauugcuacugu

SEQ ID NO: 2200653 - RNA, 13 nt, Human
ugugaauggauug

SEQ ID NO: 2200654 - RNA, 15 nt, Human
ugugaauggauugga

SEQ ID NO: 2200655 - RNA, 23 nt, Human
ugugaauuucuucacuguugaaa

SEQ ID NO: 2200656 - RNA, 15 nt, Human
uguaaucccagcacu

SEQ ID NO: 2200657 - RNA, 13 nt, Human
uguaaucccagca

SEQ ID NO: 2200658 - RNA, 21 nt, Human
uguaaucauuucuugggcccu

SEQ ID NO: 2200659 - RNA, 17 nt, Human
uguaaucauauaauaaa

SEQ ID NO: 2200660 - RNA, 16 nt, Human
uguaaucccagcacuu

SEQ ID NO: 2200661 - RNA, 23 nt, Human
uguaaucccagcacuuugggagg

SEQ ID NO: 2200662 - RNA, 22 nt, Human
uguaaucccagcacuuugggag

SEQ ID NO: 2200663 - RNA, 16 nt, Human
uguaaucccagcuacu

SEQ ID NO: 2200664 - RNA, 20 nt, Human
uguaaugaaacaccuucucu

SEQ ID NO: 2200665 - RNA, 19 nt, Human
uguaaugaaccgcugaaua

SEQ ID NO: 2200666 - RNA, 14 nt, Human
uguaaucaguuuua

SEQ ID NO: 2200667 - RNA, 15 nt, Human
uguaaucacagcuac

SEQ ID NO: 2200668 - RNA, 23 nt, Human
uguaacugcauugagaacugcau

SEQ ID NO: 2200669 - RNA, 18 nt, Human
uguaacucuaaaagaucc

SEQ ID NO: 2200670 - RNA, 19 nt, Human
uguaacucuaaaagauccu

SEQ ID NO: 2200671 - RNA, 20 nt, Human
uguaacucuaaaagauccuu

SEQ ID NO: 2200672 - RNA, 13 nt, Human
uguaacuccacca

SEQ ID NO: 2200673 - RNA, 12 nt, Human
uguaacucuaaa

SEQ ID NO: 2200674 - RNA, 16 nt, Human
uguaacucuaaaagau

SEQ ID NO: 2200675 - RNA, 17 nt, Human
uguaacucuaaaagauc

SEQ ID NO: 2200676 - RNA, 12 nt, Human
uguaacuccacc

SEQ ID NO: 2200677 - RNA, 21 nt, Human
uguaacuggcaguuuuccauu

SEQ ID NO: 2200678 - RNA, 12 nt, Human
uguaacugcuga

SEQ ID NO: 2200679 - RNA, 23 nt, Human
uguaacugucagccgggcccuga

SEQ ID NO: 2200680 - RNA, 16 nt, Human
uguaaauuuaugugau

SEQ ID NO: 2200681 - RNA, 19 nt, Human
uguaaccucuucagaggcc

SEQ ID NO: 2200682 - RNA, 15 nt, Human
uguaaauuuauguga

SEQ ID NO: 2200683 - RNA, 22 nt, Human
uguaaauugaaucaguauaaac

SEQ ID NO: 2200684 - RNA, 17 nt, Human
uguaaauugaaucagua

SEQ ID NO: 2200685 - RNA, 16 nt, Human
uguaacguugcugugg

SEQ ID NO: 2200686 - RNA, 17 nt, Human
uguaacguugcuguggg

SEQ ID NO: 2200687 - RNA, 18 nt, Human
uguaacguugcuguggga

SEQ ID NO: 2200688 - RNA, 19 nt, Human
uguaacuauaguccagcuu

SEQ ID NO: 2200689 - RNA, 21 nt, Human
uguaacuauaguccagcuuug

SEQ ID NO: 2200690 - RNA, 20 nt, Human
uguaacguugcugugggaac

SEQ ID NO: 2200691 - RNA, 18 nt, Human
uguaacuaggcucagaga

SEQ ID NO: 2200692 - RNA, 21 nt, Human
uguaacuaggcucagagaugu

SEQ ID NO: 2200693 - RNA, 15 nt, Human
uguaaaugcaucugu

SEQ ID NO: 2200694 - RNA, 22 nt, Human
uguaaaugcugucaacuaugau

SEQ ID NO: 2200695 - RNA, 18 nt, Human
uguaaaugcaucuguccu

SEQ ID NO: 2200696 - RNA, 17 nt, Human
uguaaaugguguacaua

SEQ ID NO: 2200697 - RNA, 11 nt, Human
uguaaauguau

SEQ ID NO: 2200698 - RNA, 15 nt, Human
uguaaaugguguaca

SEQ ID NO: 2200699 - RNA, 16 nt, Human
uguaaaugguguacau

SEQ ID NO: 2200700 - RNA, 18 nt, Human
uguaaaugguguacauaa

SEQ ID NO: 2200701 - RNA, 13 nt, Human
uguaaauuaacuu

SEQ ID NO: 2200702 - RNA, 17 nt, Human
uguaaauuaacuuuuau

SEQ ID NO: 2200703 - RNA, 16 nt, Human
uguaaauuaacuuuua

SEQ ID NO: 2200704 - RNA, 15 nt, Human
uguaaauuaacuuuu

SEQ ID NO: 2200705 - RNA, 14 nt, Human
uguaaauuaacuuu

SEQ ID NO: 2200706 - RNA, 17 nt, Human
ugguaggacuguagaaa

SEQ ID NO: 2200707 - RNA, 18 nt, Human
ugguaggacuguagaaaa

SEQ ID NO: 2200708 - RNA, 19 nt, Human
ugguagggggaaaaugugu

SEQ ID NO: 2200709 - RNA, 22 nt, Human
ugguaggaucagcccucauuuu

SEQ ID NO: 2200710 - RNA, 16 nt, Human
ugguaggcauuuccua

SEQ ID NO: 2200711 - RNA, 22 nt, Human
ugguaguacuccugcaaaauuu

SEQ ID NO: 2200712 - RNA, 22 nt, Human
ugguaguaaucacaguuggccu

SEQ ID NO: 2200713 - RNA, 17 nt, Human
ugguagggacuuaaaaa

SEQ ID NO: 2200714 - RNA, 18 nt, Human
ugguaguuaguagcaugu

SEQ ID NO: 2200715 - RNA, 17 nt, Human
ugguaguuaguagcaug

SEQ ID NO: 2200716 - RNA, 20 nt, Human
ugguaguuaguagcauguug

SEQ ID NO: 2200717 - RNA, 21 nt, Human
uguaaacaaaauuuaguuuuu

SEQ ID NO: 2200718 - RNA, 17 nt, Human
uguaaaauuucacuuaa

SEQ ID NO: 2200719 - RNA, 17 nt, Human
uguaaaauguugaauaa

SEQ ID NO: 2200720 - RNA, 14 nt, Human
uguaaaauuguaua

SEQ ID NO: 2200721 - RNA, 20 nt, Human
uguaaaaugugaagugaaug

SEQ ID NO: 2200722 - RNA, 19 nt, Human
uguaaacagugccugcuga

SEQ ID NO: 2200723 - RNA, 17 nt, Human
uguaaacagugccugcu

SEQ ID NO: 2200724 - RNA, 16 nt, Human
uguaaacagugccugc

SEQ ID NO: 2200725 - RNA, 14 nt, Human
uguaaacagugccu

SEQ ID NO: 2200726 - RNA, 12 nt, Human
uguaaacagugc

SEQ ID NO: 2200727 - RNA, 20 nt, Human
uguaaacaggagacaggaag

SEQ ID NO: 2200728 - RNA, 22 nt, Human
uguaaaccacaaggcuguugca

SEQ ID NO: 2200729 - RNA, 13 nt, Human
uguaaaccaaagc

SEQ ID NO: 2200730 - RNA, 14 nt, Human
uguaaaccaaagcc

SEQ ID NO: 2200731 - RNA, 14 nt, Human
uguaaacauguguu

SEQ ID NO: 2200732 - RNA, 22 nt, Human
uguaaacauguguuuuaauucc

SEQ ID NO: 2200733 - RNA, 12 nt, Human
uguaaaccaaag

SEQ ID NO: 2200734 - RNA, 20 nt, Human
uguacucgcuugugcagaaa

SEQ ID NO: 2200735 - RNA, 12 nt, Human
uguacugaaaaa

SEQ ID NO: 2200736 - RNA, 23 nt, Human
uguacucgcuugugcagaaaaca

SEQ ID NO: 2200737 - RNA, 13 nt, Human
uguacucuuccga

SEQ ID NO: 2200738 - RNA, 17 nt, Human
uguacugagccuuguaa

SEQ ID NO: 2200739 - RNA, 14 nt, Human
uguacucuuccgaa

SEQ ID NO: 2200740 - RNA, 20 nt, Human
uguacugaaaaaugguaauu

SEQ ID NO: 2200741 - RNA, 22 nt, Human
uguacugagccuuguaauucua

SEQ ID NO: 2200742 - RNA, 19 nt, Human
uguacugagccuuguaauu

SEQ ID NO: 2200743 - RNA, 20 nt, Human
uguacugagccuuguaauuc

SEQ ID NO: 2200744 - RNA, 22 nt, Human
uguacugauuuuuguaagacaa

SEQ ID NO: 2200745 - RNA, 17 nt, Human
uguagauaauacaguuc

SEQ ID NO: 2200746 - RNA, 21 nt, Human
uguagaguuaagaagcuguug

SEQ ID NO: 2200747 - RNA, 12 nt, Human
uguagaguuaag

SEQ ID NO: 2200748 - RNA, 13 nt, Human
uguagaguuaaga

SEQ ID NO: 2200749 - RNA, 14 nt, Human
uguagaguuaagaa

SEQ ID NO: 2200750 - RNA, 15 nt, Human
uguagaguuaagaag

SEQ ID NO: 2200751 - RNA, 16 nt, Human
uguagaguuaagaagc

SEQ ID NO: 2200752 - RNA, 17 nt, Human
uguagaguuaagaagcu

SEQ ID NO: 2200753 - RNA, 18 nt, Human
uguagaguuaagaagcug

SEQ ID NO: 2200754 - RNA, 19 nt, Human
uguagaguuaagaagcugu

SEQ ID NO: 2200755 - RNA, 12 nt, Human
uguacuacaauu

SEQ ID NO: 2200756 - RNA, 19 nt, Human
uguacuagagaucugguuu

SEQ ID NO: 2200757 - RNA, 18 nt, Human
uguacucaggaggcugag

SEQ ID NO: 2200758 - RNA, 12 nt, Human
uguacuccuccc

SEQ ID NO: 2200759 - RNA, 13 nt, Human
uguacuccuccca

SEQ ID NO: 2200760 - RNA, 16 nt, Human
uguacguuuguaugug

SEQ ID NO: 2200761 - RNA, 15 nt, Human
uguacguggagaggg

SEQ ID NO: 2200762 - RNA, 12 nt, Human
uguacguggaga

SEQ ID NO: 2200763 - RNA, 17 nt, Human
uguaccuggugaccccu

SEQ ID NO: 2200764 - RNA, 17 nt, Human
uguaccuguuccuuaga

SEQ ID NO: 2200765 - RNA, 14 nt, Human
uguacguggagagg

SEQ ID NO: 2200766 - RNA, 19 nt, Human
uguacguuuguaugugugu

SEQ ID NO: 2200767 - RNA, 20 nt, Human
uguacguuuguaugugugua

SEQ ID NO: 2200768 - RNA, 17 nt, Human
uguacgucugacaggca

SEQ ID NO: 2200769 - RNA, 16 nt, Human
uguacgucugacaggc

SEQ ID NO: 2200770 - RNA, 20 nt, Human
uguaaugucaccaccuuccc

SEQ ID NO: 2200771 - RNA, 14 nt, Human
uguacaguagauuu

SEQ ID NO: 2200772 - RNA, 19 nt, Human
uguaaugucaccaccuucc

SEQ ID NO: 2200773 - RNA, 16 nt, Human
uguaaugucaccaccu

SEQ ID NO: 2200774 - RNA, 13 nt, Human
uguaaugucacca

SEQ ID NO: 2200775 - RNA, 20 nt, Human
uguaaugguaucuuaaagug

SEQ ID NO: 2200776 - RNA, 21 nt, Human
uguaaugaaucuaagcagcau

SEQ ID NO: 2200777 - RNA, 20 nt, Human
uguaaugaaucuaagcagca

SEQ ID NO: 2200778 - RNA, 13 nt, Human
uguaaugaucaua

SEQ ID NO: 2200779 - RNA, 23 nt, Human
uguacagucugucaugaacaugu

SEQ ID NO: 2200780 - RNA, 14 nt, Human
uguacagucuugua

SEQ ID NO: 2200781 - RNA, 15 nt, Human
uguacagucuuguau

SEQ ID NO: 2200782 - RNA, 12 nt, Human
uguacagucuug

SEQ ID NO: 2200783 - RNA, 14 nt, Human
uguacagucuguca

SEQ ID NO: 2200784 - RNA, 15 nt, Human
uguacagucugucau

SEQ ID NO: 2200785 - RNA, 16 nt, Human
uguacagucugucaug

SEQ ID NO: 2200786 - RNA, 18 nt, Human
uguacagucugucaugaa

SEQ ID NO: 2200787 - RNA, 20 nt, Human
uguacaguagauuuuccaaa

SEQ ID NO: 2200788 - RNA, 17 nt, Human
uguacaguagauuuucc

SEQ ID NO: 2200789 - RNA, 18 nt, Human
uguacaguagauuuucca

SEQ ID NO: 2200790 - RNA, 21 nt, Human
uguacccaguauucuagguag

SEQ ID NO: 2200791 - RNA, 14 nt, Human
uguaccccccaacc

SEQ ID NO: 2200792 - RNA, 16 nt, Human
uguaccccccaacccc

SEQ ID NO: 2200793 - RNA, 14 nt, Human
uguaccauuugccu

SEQ ID NO: 2200794 - RNA, 15 nt, Human
uguaccgcaauguga

SEQ ID NO: 2200795 - RNA, 20 nt, Human
uguaccccccaaccccugag

SEQ ID NO: 2200796 - RNA, 23 nt, Human
uguaccccccaaccccugaggaa

SEQ ID NO: 2200797 - RNA, 14 nt, Human
uguacccccgccca

SEQ ID NO: 2200798 - RNA, 15 nt, Human
uguacccccgcccag

SEQ ID NO: 2200799 - RNA, 16 nt, Human
uguacccccgcccagg

SEQ ID NO: 2200800 - RNA, 17 nt, Human
uguacccccgcccaggc

SEQ ID NO: 2200801 - RNA, 19 nt, Human
uguacccccgcccaggcug

SEQ ID NO: 2200802 - RNA, 22 nt, Human
uguacccccgcccaggcuggcc

SEQ ID NO: 2200803 - RNA, 16 nt, Human
uguacccuuccuacag

SEQ ID NO: 2200804 - RNA, 18 nt, Human
uguaccugcccccaaucc

SEQ ID NO: 2200805 - RNA, 18 nt, Human
uguaccuggugaccccuu

SEQ ID NO: 2200806 - RNA, 23 nt, Human
uguaccucuugagccuugaacuu

SEQ ID NO: 2200807 - RNA, 14 nt, Human
uguaccucuugagc

SEQ ID NO: 2200808 - RNA, 22 nt, Human
uguaccucuugagccuugaacu

SEQ ID NO: 2200809 - RNA, 23 nt, Human
ugucauaccaggccgccccagcc

SEQ ID NO: 2200810 - RNA, 15 nt, Human
ugucauaagaaugaa

SEQ ID NO: 2200811 - RNA, 14 nt, Human
ugucauaagaauga

SEQ ID NO: 2200812 - RNA, 17 nt, Human
ugucauaagaaugaaua

SEQ ID NO: 2200813 - RNA, 16 nt, Human
ugucauaagaaugaau

SEQ ID NO: 2200814 - RNA, 15 nt, Human
ugucaguggaagaag

SEQ ID NO: 2200815 - RNA, 16 nt, Human
ugucagugcagcccgu

SEQ ID NO: 2200816 - RNA, 13 nt, Human
ugucagugccgcc

SEQ ID NO: 2200817 - RNA, 16 nt, Human
ugucagugccgccgcc

SEQ ID NO: 2200818 - RNA, 23 nt, Human
ugucagugccgccgccucgccca

SEQ ID NO: 2200819 - RNA, 14 nt, Human
ugucagugcagccc

SEQ ID NO: 2200820 - RNA, 22 nt, Human
ugucagucacagccaccccuga

SEQ ID NO: 2200821 - RNA, 18 nt, Human
ugucagucacagccaccc

SEQ ID NO: 2200822 - RNA, 17 nt, Human
ugucagucacagccacc

SEQ ID NO: 2200823 - RNA, 16 nt, Human
ugucagucacagccac

SEQ ID NO: 2200824 - RNA, 12 nt, Human
ugucagugugac

SEQ ID NO: 2200825 - RNA, 20 nt, Human
ugucagugugacugaucucu

SEQ ID NO: 2200826 - RNA, 18 nt, Human
uguauuuguuaaugguuu

SEQ ID NO: 2200827 - RNA, 18 nt, Human
uguauuugugacuaauug

SEQ ID NO: 2200828 - RNA, 20 nt, Human
uguauuugugacuaauugua

SEQ ID NO: 2200829 - RNA, 20 nt, Human
uguauuuguuaaugguuuga

SEQ ID NO: 2200830 - RNA, 14 nt, Human
uguauuugcuuuuu

SEQ ID NO: 2200831 - RNA, 12 nt, Human
uguauuugugac

SEQ ID NO: 2200832 - RNA, 13 nt, Human
uguauuugugacu

SEQ ID NO: 2200833 - RNA, 14 nt, Human
uguauuugugacua

SEQ ID NO: 2200834 - RNA, 15 nt, Human
uguauuugugacuaa

SEQ ID NO: 2200835 - RNA, 16 nt, Human
uguauuugugacuaau

SEQ ID NO: 2200836 - RNA, 22 nt, Human
uguauuugugacuaauuguaua

SEQ ID NO: 2200837 - RNA, 16 nt, Human
ugucacuacucacagu

SEQ ID NO: 2200838 - RNA, 22 nt, Human
ugucacuacucacagucucuuu

SEQ ID NO: 2200839 - RNA, 16 nt, Human
ugucacucauugcuga

SEQ ID NO: 2200840 - RNA, 15 nt, Human
ugucacucauugcug

SEQ ID NO: 2200841 - RNA, 15 nt, Human
ugucacugcaggcac

SEQ ID NO: 2200842 - RNA, 15 nt, Human
ugucagucacagcca

SEQ ID NO: 2200843 - RNA, 14 nt, Human
ugucagucacagcc

SEQ ID NO: 2200844 - RNA, 23 nt, Human
ugucacucauugcugagccucug

SEQ ID NO: 2200845 - RNA, 22 nt, Human
ugucacucauugcugagccucu

SEQ ID NO: 2200846 - RNA, 21 nt, Human
ugucacucauugcugagccuc

SEQ ID NO: 2200847 - RNA, 16 nt, Human
ugucauagaaauuaca

SEQ ID NO: 2200848 - RNA, 15 nt, Human
ugucauagaaauuac

SEQ ID NO: 2200849 - RNA, 22 nt, Human
ugucauauauggggggccaaca

SEQ ID NO: 2200850 - RNA, 20 nt, Human
ugucauauauggggggccaa

SEQ ID NO: 2200851 - RNA, 19 nt, Human
ugucauauauuacuagcau

SEQ ID NO: 2200852 - RNA, 21 nt, Human
ugucauauguaggugucugca

SEQ ID NO: 2200853 - RNA, 18 nt, Human
ugucauauauuacuagca

SEQ ID NO: 2200854 - RNA, 13 nt, Human
ugucauuaaaggu

SEQ ID NO: 2200855 - RNA, 17 nt, Human
ugucauuaaagguauca

SEQ ID NO: 2200856 - RNA, 19 nt, Human
ugucauuaaaauaaauaaa

SEQ ID NO: 2200857 - RNA, 17 nt, Human
ugucaucagaagauaac

SEQ ID NO: 2200858 - RNA, 23 nt, Human
ugucauuaaauggggcucacaaa

SEQ ID NO: 2200859 - RNA, 22 nt, Human
ugucaucaauugaauggucagc

SEQ ID NO: 2200860 - RNA, 15 nt, Human
ugucaucaauugaau

SEQ ID NO: 2200861 - RNA, 13 nt, Human
ugucaucagaacu

SEQ ID NO: 2200862 - RNA, 15 nt, Human
ugucaucagaagaua

SEQ ID NO: 2200863 - RNA, 16 nt, Human
ugucaucagaagauaa

SEQ ID NO: 2200864 - RNA, 20 nt, Human
uguccaugcgcucagggcca

SEQ ID NO: 2200865 - RNA, 22 nt, Human
uguccaugcgcucagggccaug

SEQ ID NO: 2200866 - RNA, 18 nt, Human
ugucauugcuguuguccc

SEQ ID NO: 2200867 - RNA, 19 nt, Human
ugucauuaccagacgguuc

SEQ ID NO: 2200868 - RNA, 21 nt, Human
ugucauuagccugaguagaaa

SEQ ID NO: 2200869 - RNA, 15 nt, Human
ugucauucagaaaaa

SEQ ID NO: 2200870 - RNA, 13 nt, Human
ugucauuagccug

SEQ ID NO: 2200871 - RNA, 14 nt, Human
ugucauuagccuga

SEQ ID NO: 2200872 - RNA, 17 nt, Human
ugucauuagccugagua

SEQ ID NO: 2200873 - RNA, 20 nt, Human
ugucauuagccugaguagaa

SEQ ID NO: 2200874 - RNA, 16 nt, Human
uguccaugugugugca

SEQ ID NO: 2200875 - RNA, 14 nt, Human
uguccauugacaug

SEQ ID NO: 2200876 - RNA, 15 nt, Human
uguccauugacaugu

SEQ ID NO: 2200877 - RNA, 16 nt, Human
uguccauugacaugua

SEQ ID NO: 2200878 - RNA, 15 nt, Human
uguccaugugugugc

SEQ ID NO: 2200879 - RNA, 13 nt, Human
uguccaugugugu

SEQ ID NO: 2200880 - RNA, 12 nt, Human
uguccaugugug

SEQ ID NO: 2200881 - RNA, 20 nt, Human
uguccaugugguucuucaaa

SEQ ID NO: 2200882 - RNA, 17 nt, Human
uguccauuguccaaucc

SEQ ID NO: 2200883 - RNA, 14 nt, Human
uguccauuguccaa

SEQ ID NO: 2200884 - RNA, 18 nt, Human
uguccauugacauguaca

SEQ ID NO: 2200885 - RNA, 19 nt, Human
uguccauugacauguacag

SEQ ID NO: 2200886 - RNA, 20 nt, Human
uguccauugacauguacaga

SEQ ID NO: 2200887 - RNA, 22 nt, Human
uguccauugacauguacagaga

SEQ ID NO: 2200888 - RNA, 20 nt, Human
ugucccacucaagccaagca

SEQ ID NO: 2200889 - RNA, 17 nt, Human
ugucccacucaagccaa

SEQ ID NO: 2200890 - RNA, 15 nt, Human
ugucccacuaucugg

SEQ ID NO: 2200891 - RNA, 16 nt, Human
ugucccacuaucuggg

SEQ ID NO: 2200892 - RNA, 23 nt, Human
ugucccaaaaagaaaggagggga

SEQ ID NO: 2200893 - RNA, 22 nt, Human
ugucccauggacacuccagugc

SEQ ID NO: 2200894 - RNA, 18 nt, Human
ugucccauggacacucca

SEQ ID NO: 2200895 - RNA, 19 nt, Human
ugucccauggacacuccag

SEQ ID NO: 2200896 - RNA, 18 nt, Human
ugucccaugaucccugug

SEQ ID NO: 2200897 - RNA, 21 nt, Human
ugucccaugacccaccccugu

SEQ ID NO: 2200898 - RNA, 17 nt, Human
ugucccauggacacucc

SEQ ID NO: 2200899 - RNA, 16 nt, Human
ugucccaugaucccug

SEQ ID NO: 2200900 - RNA, 17 nt, Human
ugucccaugaucccugu

SEQ ID NO: 2200901 - RNA, 17 nt, Human
ugucccaugacccaccc

SEQ ID NO: 2200902 - RNA, 18 nt, Human
ugucccaugacccacccc

SEQ ID NO: 2200903 - RNA, 19 nt, Human
ugucccaugacccaccccu

SEQ ID NO: 2200904 - RNA, 20 nt, Human
ugucccaugacccaccccug

SEQ ID NO: 2200905 - RNA, 20 nt, Human
ugucccagaggcugccccac

SEQ ID NO: 2200906 - RNA, 16 nt, Human
ugucccagguccucac

SEQ ID NO: 2200907 - RNA, 14 nt, Human
ugucccagguccuc

SEQ ID NO: 2200908 - RNA, 16 nt, Human
ugucccaugacccacc

SEQ ID NO: 2200909 - RNA, 14 nt, Human
ugucccaugaccca

SEQ ID NO: 2200910 - RNA, 17 nt, Human
ugucccagguccucacu

SEQ ID NO: 2200911 - RNA, 15 nt, Human
uguauaauauuuuua

SEQ ID NO: 2200912 - RNA, 20 nt, Human
uguauaauucaaagcaccaa

SEQ ID NO: 2200913 - RNA, 23 nt, Human
uguauaaguggaggcacuuuagg

SEQ ID NO: 2200914 - RNA, 21 nt, Human
uguauaaguggaggcacuuua

SEQ ID NO: 2200915 - RNA, 16 nt, Human
uguauaaguccuugca

SEQ ID NO: 2200916 - RNA, 16 nt, Human
uguauaaguggaggca

SEQ ID NO: 2200917 - RNA, 20 nt, Human
uguauaaguggaggcacuuu

SEQ ID NO: 2200918 - RNA, 19 nt, Human
uguauaaguggaggcacuu

SEQ ID NO: 2200919 - RNA, 19 nt, Human
uguauaaguccuugcaaga

SEQ ID NO: 2200920 - RNA, 17 nt, Human
uguauaaguaagaaaau

SEQ ID NO: 2200921 - RNA, 18 nt, Human
uguauaaguaagaaaaua

SEQ ID NO: 2200922 - RNA, 20 nt, Human
uguauaaguaagaaaauauu

SEQ ID NO: 2200923 - RNA, 20 nt, Human
uguagcaaccuucugcauuc

SEQ ID NO: 2200924 - RNA, 19 nt, Human
uguagcacuuacugguagg

SEQ ID NO: 2200925 - RNA, 15 nt, Human
uguagcacuuacugg

SEQ ID NO: 2200926 - RNA, 20 nt, Human
uguagcaaaacgcauggagu

SEQ ID NO: 2200927 - RNA, 22 nt, Human
uguagcaaaauucuuaaguaug

SEQ ID NO: 2200928 - RNA, 19 nt, Human
uguaucccaugagccucag

SEQ ID NO: 2200929 - RNA, 23 nt, Human
uguaucccaugagccucagcauc

SEQ ID NO: 2200930 - RNA, 20 nt, Human
uguauccccccccuguauag

SEQ ID NO: 2200931 - RNA, 21 nt, Human
uguauccccccccuguauagu

SEQ ID NO: 2200932 - RNA, 16 nt, Human
uguaucccaugagccu

SEQ ID NO: 2200933 - RNA, 22 nt, Human
uguauccccccccuguauaguu

SEQ ID NO: 2200934 - RNA, 20 nt, Human
uguauccugaggcugagaga

SEQ ID NO: 2200935 - RNA, 12 nt, Human
uguauccugggg

SEQ ID NO: 2200936 - RNA, 13 nt, Human
uguauccuggggc

SEQ ID NO: 2200937 - RNA, 14 nt, Human
uguauccuggggcu

SEQ ID NO: 2200938 - RNA, 15 nt, Human
uguauacaugccagu

SEQ ID NO: 2200939 - RNA, 13 nt, Human
uguauaauuguau

SEQ ID NO: 2200940 - RNA, 13 nt, Human
uguauacaugcca

SEQ ID NO: 2200941 - RNA, 15 nt, Human
uguauaauuguaucg

SEQ ID NO: 2200942 - RNA, 16 nt, Human
uguauacaacccuggc

SEQ ID NO: 2200943 - RNA, 18 nt, Human
uguauuuaacagggaggg

SEQ ID NO: 2200944 - RNA, 21 nt, Human
uguauuguaccuuuuaacacc

SEQ ID NO: 2200945 - RNA, 15 nt, Human
uguauuuaauuuuga

SEQ ID NO: 2200946 - RNA, 20 nt, Human
uguauuuacgcuuugauuca

SEQ ID NO: 2200947 - RNA, 16 nt, Human
uguauuuaugugugag

SEQ ID NO: 2200948 - RNA, 21 nt, Human
uguauuuauauuuugugcuau

SEQ ID NO: 2200949 - RNA, 23 nt, Human
uguauuuacgcuuugauucauag

SEQ ID NO: 2200950 - RNA, 21 nt, Human
uguauuuacgcuuugauucau

SEQ ID NO: 2200951 - RNA, 14 nt, Human
uguauuuauaaaua

SEQ ID NO: 2200952 - RNA, 21 nt, Human
uguauuuauaaauauauuuaa

SEQ ID NO: 2200953 - RNA, 19 nt, Human
uguauugcauauauacaua

SEQ ID NO: 2200954 - RNA, 15 nt, Human
uguauugcacauugu

SEQ ID NO: 2200955 - RNA, 19 nt, Human
uguauugcacauuguaaaa

SEQ ID NO: 2200956 - RNA, 15 nt, Human
uguauugaaucaugu

SEQ ID NO: 2200957 - RNA, 20 nt, Human
uguauugaaucauguaguau

SEQ ID NO: 2200958 - RNA, 14 nt, Human
uguauugcacauug

SEQ ID NO: 2200959 - RNA, 16 nt, Human
uguauugaaucaugua

SEQ ID NO: 2200960 - RNA, 23 nt, Human
uguauugaugacaguaguaccaa

SEQ ID NO: 2200961 - RNA, 11 nt, Human
uguauuguacc

SEQ ID NO: 2200962 - RNA, 19 nt, Human
uguauuguaccuuuuaaca

SEQ ID NO: 2200963 - RNA, 19 nt, Human
uguauuguaaacauguguu

SEQ ID NO: 2200964 - RNA, 13 nt, Human
uguauuggccugg

SEQ ID NO: 2200965 - RNA, 15 nt, Human
uguauuguaaacaug

SEQ ID NO: 2200966 - RNA, 14 nt, Human
uguauuggccugga

SEQ ID NO: 2200967 - RNA, 18 nt, Human
uguaugcacgugugcaca

SEQ ID NO: 2200968 - RNA, 12 nt, Human
uguaugcagcua

SEQ ID NO: 2200969 - RNA, 17 nt, Human
uguaugcagcuaucugg

SEQ ID NO: 2200970 - RNA, 14 nt, Human
uguaugcacuuugu

SEQ ID NO: 2200971 - RNA, 22 nt, Human
uguauugaacuuggaaagaaau

SEQ ID NO: 2200972 - RNA, 23 nt, Human
uguauucuuugauguuaacacau

SEQ ID NO: 2200973 - RNA, 18 nt, Human
uguaugcagcuaucuggu

SEQ ID NO: 2200974 - RNA, 17 nt, Human
uguaugcaacaggcacu

SEQ ID NO: 2200975 - RNA, 18 nt, Human
uguaucuaugcauuuucu

SEQ ID NO: 2200976 - RNA, 21 nt, Human
uguaucuagugcagcugauuu

SEQ ID NO: 2200977 - RNA, 19 nt, Human
uguaucuagugcagcugau

SEQ ID NO: 2200978 - RNA, 17 nt, Human
uguaucuagugcagcug

SEQ ID NO: 2200979 - RNA, 15 nt, Human
uguaucuaccucacu

SEQ ID NO: 2200980 - RNA, 22 nt, Human
uguaucguauagcuguauugaa

SEQ ID NO: 2200981 - RNA, 21 nt, Human
uguaucguauagcuguauuga

SEQ ID NO: 2200982 - RNA, 20 nt, Human
uguaucuacaucuuuuuuca

SEQ ID NO: 2200983 - RNA, 16 nt, Human
uguaugauucccagcc

SEQ ID NO: 2200984 - RNA, 18 nt, Human
uguaucggagacagugau

SEQ ID NO: 2200985 - RNA, 19 nt, Human
uguaucguaaccagccaga

SEQ ID NO: 2200986 - RNA, 15 nt, Human
uguaucguauagcug

SEQ ID NO: 2200987 - RNA, 16 nt, Human
uguaucguauagcugu

SEQ ID NO: 2200988 - RNA, 17 nt, Human
uguaucguauagcugua

SEQ ID NO: 2200989 - RNA, 18 nt, Human
uguaucguauagcuguau

SEQ ID NO: 2200990 - RNA, 19 nt, Human
uguaucguauagcuguauu

SEQ ID NO: 2200991 - RNA, 15 nt, Human
uguaucggaugcuuu

SEQ ID NO: 2200992 - RNA, 17 nt, Human
uguaucggagacaguga

SEQ ID NO: 2200993 - RNA, 15 nt, Human
uguaucggagacagu

SEQ ID NO: 2200994 - RNA, 19 nt, Human
uguauccuggggcucccuu

SEQ ID NO: 2200995 - RNA, 15 nt, Human
uguauccuggggcuc

SEQ ID NO: 2200996 - RNA, 18 nt, Human
uguauccuggggcucccu

SEQ ID NO: 2200997 - RNA, 13 nt, Human
uguguauuuaaca

SEQ ID NO: 2200998 - RNA, 15 nt, Human
uguguauuguuccca

SEQ ID NO: 2200999 - RNA, 14 nt, Human
uguguauuguuccc

SEQ ID NO: 2201000 - RNA, 13 nt, Human
uguguauuguucc

SEQ ID NO: 2201001 - RNA, 12 nt, Human
uguguauuguuc

SEQ ID NO: 2201002 - RNA, 18 nt, Human
uguguauuuaacagggag

SEQ ID NO: 2201003 - RNA, 20 nt, Human
uguguauuuaacagggaggg

SEQ ID NO: 2201004 - RNA, 22 nt, Human
uguguauuuaacagggagggga

SEQ ID NO: 2201005 - RNA, 15 nt, Human
ugugucacuggcugc

SEQ ID NO: 2201006 - RNA, 17 nt, Human
ugugucacuggcugccu

SEQ ID NO: 2201007 - RNA, 18 nt, Human
ugugucacuggcugccuc

SEQ ID NO: 2201008 - RNA, 13 nt, Human
ugugucacuggcu

SEQ ID NO: 2201009 - RNA, 16 nt, Human
ugugucaaugggcaau

SEQ ID NO: 2201010 - RNA, 19 nt, Human
uguguauuuccagugcaau

SEQ ID NO: 2201011 - RNA, 15 nt, Human
uguguauuuacgcuu

SEQ ID NO: 2201012 - RNA, 17 nt, Human
ugugugaggagcugcug

SEQ ID NO: 2201013 - RNA, 17 nt, Human
ugugugagcaagcauuu

SEQ ID NO: 2201014 - RNA, 22 nt, Human
ugugugaaugaacacucuuuug

SEQ ID NO: 2201015 - RNA, 18 nt, Human
ugugugaaugaacacucu

SEQ ID NO: 2201016 - RNA, 17 nt, Human
ugugugaaugaacacuc

SEQ ID NO: 2201017 - RNA, 16 nt, Human
ugugugaaugaacacu

SEQ ID NO: 2201018 - RNA, 12 nt, Human
ugugugaaugaa

SEQ ID NO: 2201019 - RNA, 22 nt, Human
ugugucacuggcugccuccacu

SEQ ID NO: 2201020 - RNA, 23 nt, Human
ugugucacuggcugccuccacuc

SEQ ID NO: 2201021 - RNA, 13 nt, Human
uguguagaguuaa

SEQ ID NO: 2201022 - RNA, 16 nt, Human
uguguagacaaauauu

SEQ ID NO: 2201023 - RNA, 21 nt, Human
uguguagacaaauauuuggag

SEQ ID NO: 2201024 - RNA, 16 nt, Human
uguguagaguuaagaa

SEQ ID NO: 2201025 - RNA, 18 nt, Human
uguguagaguuaagaagc

SEQ ID NO: 2201026 - RNA, 19 nt, Human
uguguagaguuaagaagcu

SEQ ID NO: 2201027 - RNA, 16 nt, Human
uguguagggcgggagg

SEQ ID NO: 2201028 - RNA, 21 nt, Human
uguguagaguuaagaagcugu

SEQ ID NO: 2201029 - RNA, 15 nt, Human
uguguauacaugcca

SEQ ID NO: 2201030 - RNA, 21 nt, Human
uguguauagaugcaagauauu

SEQ ID NO: 2201031 - RNA, 23 nt, Human
uguguaugugggggucugugugu

SEQ ID NO: 2201032 - RNA, 14 nt, Human
uguguauuaaaaaa

SEQ ID NO: 2201033 - RNA, 22 nt, Human
uguguauguguacgugugugug

SEQ ID NO: 2201034 - RNA, 14 nt, Human
uguguauuccaaga

SEQ ID NO: 2201035 - RNA, 21 nt, Human
uguguauccauuaucaugugu

SEQ ID NO: 2201036 - RNA, 19 nt, Human
uguguauuaaaaaaaacaa

SEQ ID NO: 2201037 - RNA, 21 nt, Human
uguguauuaaaaaaaacaaaa

SEQ ID NO: 2201038 - RNA, 19 nt, Human
uguguauucauugaaguca

SEQ ID NO: 2201039 - RNA, 16 nt, Human
uguguauccauuauca

SEQ ID NO: 2201040 - RNA, 18 nt, Human
uguguauccauuaucaug

SEQ ID NO: 2201041 - RNA, 19 nt, Human
uguguauccauuaucaugu

SEQ ID NO: 2201042 - RNA, 13 nt, Human
uguguaugugggg

SEQ ID NO: 2201043 - RNA, 14 nt, Human
uguguauguggggg

SEQ ID NO: 2201044 - RNA, 13 nt, Human
uguguuuaugugu

SEQ ID NO: 2201045 - RNA, 22 nt, Human
uguguuuaggaacuacugagga

SEQ ID NO: 2201046 - RNA, 13 nt, Human
uguguuuauuguc

SEQ ID NO: 2201047 - RNA, 15 nt, Human
uguguuuaugugugu

SEQ ID NO: 2201048 - RNA, 12 nt, Human
uguguuuaaaua

SEQ ID NO: 2201049 - RNA, 13 nt, Human
uguguuguugcuu

SEQ ID NO: 2201050 - RNA, 14 nt, Human
uguguuguugcuuu

SEQ ID NO: 2201051 - RNA, 13 nt, Human
uguguuuaaauaa

SEQ ID NO: 2201052 - RNA, 14 nt, Human
uguguuuaaauaaa

SEQ ID NO: 2201053 - RNA, 15 nt, Human
uguguuuaaauaaag

SEQ ID NO: 2201054 - RNA, 20 nt, Human
uguguuuacuuuauguuacu

SEQ ID NO: 2201055 - RNA, 18 nt, Human
uguguuuaaauaaaguau

SEQ ID NO: 2201056 - RNA, 22 nt, Human
uguguuuaaauaaaguaucaug

SEQ ID NO: 2201057 - RNA, 13 nt, Human
uguguugugauag

SEQ ID NO: 2201058 - RNA, 22 nt, Human
uguguguccacgacugucucca

SEQ ID NO: 2201059 - RNA, 23 nt, Human
uguguugugugugggagugugua

SEQ ID NO: 2201060 - RNA, 14 nt, Human
uguguugugugugg

SEQ ID NO: 2201061 - RNA, 13 nt, Human
uguguguaugcua

SEQ ID NO: 2201062 - RNA, 11 nt, Human
uguguguaugu

SEQ ID NO: 2201063 - RNA, 20 nt, Human
ugugugguuugguguguucc

SEQ ID NO: 2201064 - RNA, 14 nt, Human
uguguguauacaug

SEQ ID NO: 2201065 - RNA, 18 nt, Human
ugugugcgagugugugca

SEQ ID NO: 2201066 - RNA, 19 nt, Human
uguguguauguuugcacac

SEQ ID NO: 2201067 - RNA, 14 nt, Human
uguguguaugugua

SEQ ID NO: 2201068 - RNA, 20 nt, Human
ugugugguggguucuuugga

SEQ ID NO: 2201069 - RNA, 19 nt, Human
uguguguccaaaacugccu

SEQ ID NO: 2201070 - RNA, 16 nt, Human
uguguguccaaaacug

SEQ ID NO: 2201071 - RNA, 20 nt, Human
ugugugaggagcugcuggcu

SEQ ID NO: 2201072 - RNA, 13 nt, Human
ugugugcagugaa

SEQ ID NO: 2201073 - RNA, 19 nt, Human
ugugugcagacucaauaaa

SEQ ID NO: 2201074 - RNA, 20 nt, Human
ugugugcaugugugugcuca

SEQ ID NO: 2201075 - RNA, 21 nt, Human
ugugugccauagaguuuaaca

SEQ ID NO: 2201076 - RNA, 23 nt, Human
ugugugccauagaguuuaacaca

SEQ ID NO: 2201077 - RNA, 14 nt, Human
ugugugcaugugug

SEQ ID NO: 2201078 - RNA, 24 nt, Human
ugugugccauagaguuuaacacaa

SEQ ID NO: 2201079 - RNA, 20 nt, Human
uguguuuguucuuuuuauug

SEQ ID NO: 2201080 - RNA, 14 nt, Human
uguguuuguuccua

SEQ ID NO: 2201081 - RNA, 17 nt, Human
uguguuuucauaauaaa

SEQ ID NO: 2201082 - RNA, 13 nt, Human
uguguuuucugaa

SEQ ID NO: 2201083 - RNA, 10 nt, Human
uguguuuguu

SEQ ID NO: 2201084 - RNA, 13 nt, Human
uguguuuguguga

SEQ ID NO: 2201085 - RNA, 11 nt, Human
uguguuugugu

SEQ ID NO: 2201086 - RNA, 15 nt, Human
uguguuuguguauuu

SEQ ID NO: 2201087 - RNA, 19 nt, Human
uguguuugucauuagccug

SEQ ID NO: 2201088 - RNA, 18 nt, Human
uguguuugguucuggggc

SEQ ID NO: 2201089 - RNA, 14 nt, Human
uguguuugucauua

SEQ ID NO: 2201090 - RNA, 17 nt, Human
uguguuugucauuagcc

SEQ ID NO: 2201091 - RNA, 20 nt, Human
uguuaaacuagcauaucugc

SEQ ID NO: 2201092 - RNA, 22 nt, Human
uguuaaacuagcauaucugccu

SEQ ID NO: 2201093 - RNA, 23 nt, Human
uguuaaacuagcauaucugccuu

SEQ ID NO: 2201094 - RNA, 18 nt, Human
uguuaaacuagcauaucu

SEQ ID NO: 2201095 - RNA, 19 nt, Human
uguuaaacuagcauaucug

SEQ ID NO: 2201096 - RNA, 14 nt, Human
uguguuuucugaau

SEQ ID NO: 2201097 - RNA, 23 nt, Human
uguguuuucugaauaacauuugu

SEQ ID NO: 2201098 - RNA, 16 nt, Human
uguuacugucuucagu

SEQ ID NO: 2201099 - RNA, 15 nt, Human
uguuacugucuucag

SEQ ID NO: 2201100 - RNA, 12 nt, Human
uguuacuuaccu

SEQ ID NO: 2201101 - RNA, 15 nt, Human
uguuacuguaauucc

SEQ ID NO: 2201102 - RNA, 14 nt, Human
uguuacuuaccuaa

SEQ ID NO: 2201103 - RNA, 18 nt, Human
uguuacuuaccuaaacag

SEQ ID NO: 2201104 - RNA, 12 nt, Human
uguuacaucaca

SEQ ID NO: 2201105 - RNA, 15 nt, Human
uguuacauuauuauc

SEQ ID NO: 2201106 - RNA, 13 nt, Human
uguuacauuuuua

SEQ ID NO: 2201107 - RNA, 18 nt, Human
uguuaccaugucacugug

SEQ ID NO: 2201108 - RNA, 19 nt, Human
uguuaccaugucacugugg

SEQ ID NO: 2201109 - RNA, 22 nt, Human
uguuacauuuuuaagugcugca

SEQ ID NO: 2201110 - RNA, 18 nt, Human
uguuagaguccaacgugg

SEQ ID NO: 2201111 - RNA, 21 nt, Human
uguuagagguuuuaaagugau

SEQ ID NO: 2201112 - RNA, 22 nt, Human
uguuagagguuuuaaagugauu

SEQ ID NO: 2201113 - RNA, 18 nt, Human
uguuagacucuuacuuuu

SEQ ID NO: 2201114 - RNA, 22 nt, Human
uguuagaggaucccucucugga

SEQ ID NO: 2201115 - RNA, 20 nt, Human
uguuagagguuuuaaaguga

SEQ ID NO: 2201116 - RNA, 19 nt, Human
uguuagaaaauggacacug

SEQ ID NO: 2201117 - RNA, 23 nt, Human
uguuagaguccaacguggggcag

SEQ ID NO: 2201118 - RNA, 21 nt, Human
uguuagauagaauuuccaaua

SEQ ID NO: 2201119 - RNA, 15 nt, Human
uguuaguucccaaca

SEQ ID NO: 2201120 - RNA, 17 nt, Human
uguuaguuauagauguc

SEQ ID NO: 2201121 - RNA, 12 nt, Human
uguuaguuccca

SEQ ID NO: 2201122 - RNA, 13 nt, Human
uguuaguucccaa

SEQ ID NO: 2201123 - RNA, 14 nt, Human
uguuaguucccaac

SEQ ID NO: 2201124 - RNA, 18 nt, Human
uguuauaacucugcacua

SEQ ID NO: 2201125 - RNA, 23 nt, Human
uguuauaacucugcacuacuccu

SEQ ID NO: 2201126 - RNA, 14 nt, Human
uguuauaacuacuc

SEQ ID NO: 2201127 - RNA, 14 nt, Human
uguuauaacucugc

SEQ ID NO: 2201128 - RNA, 15 nt, Human
uguuauaacucugca

SEQ ID NO: 2201129 - RNA, 17 nt, Human
uguuauaacucugcacu

SEQ ID NO: 2201130 - RNA, 12 nt, Human
uguuauaaucuu

SEQ ID NO: 2201131 - RNA, 15 nt, Human
uguucagcuccagcu

SEQ ID NO: 2201132 - RNA, 16 nt, Human
uguucagcuccagcuc

SEQ ID NO: 2201133 - RNA, 11 nt, Human
uguucagcugg

SEQ ID NO: 2201134 - RNA, 18 nt, Human
uguucagcuccagcucac

SEQ ID NO: 2201135 - RNA, 23 nt, Human
uguucaagaccagccugaccaac

SEQ ID NO: 2201136 - RNA, 16 nt, Human
uguucaauguuuaaug

SEQ ID NO: 2201137 - RNA, 16 nt, Human
uguucacagccagacu

SEQ ID NO: 2201138 - RNA, 14 nt, Human
uguucagcuccagc

SEQ ID NO: 2201139 - RNA, 22 nt, Human
uguucacaccuagcgucaguau

SEQ ID NO: 2201140 - RNA, 15 nt, Human
uguucacacucucac

SEQ ID NO: 2201141 - RNA, 16 nt, Human
uguucacacucucaca

SEQ ID NO: 2201142 - RNA, 19 nt, Human
uguucacacucucacaugu

SEQ ID NO: 2201143 - RNA, 22 nt, Human
uguucacacucucacauguuua

SEQ ID NO: 2201144 - RNA, 16 nt, Human
uguucaccaucggcag

SEQ ID NO: 2201145 - RNA, 20 nt, Human
uguucuuuccaaaguacacu

SEQ ID NO: 2201146 - RNA, 17 nt, Human
uguugaaaauguucaga

SEQ ID NO: 2201147 - RNA, 14 nt, Human
uguugaaaauguuc

SEQ ID NO: 2201148 - RNA, 22 nt, Human
uguucuuucuggcuaugcauuu

SEQ ID NO: 2201149 - RNA, 20 nt, Human
uguucuuucuggcuaugcau

SEQ ID NO: 2201150 - RNA, 11 nt, Human
uguugaaagau

SEQ ID NO: 2201151 - RNA, 24 nt, Human
uguugaaagguaauuugagagaaa

SEQ ID NO: 2201152 - RNA, 14 nt, Human
uguugaaauuaugu

SEQ ID NO: 2201153 - RNA, 22 nt, Human
uguugaaaauuauuuuaaacaa

SEQ ID NO: 2201154 - RNA, 15 nt, Human
uguugaaauuaugua

SEQ ID NO: 2201155 - RNA, 16 nt, Human
uguucuuucuggaguc

SEQ ID NO: 2201156 - RNA, 21 nt, Human
uguugaaaauuauuuuaaaca

SEQ ID NO: 2201157 - RNA, 22 nt, Human
uguucugauuagaaaugaccaa

SEQ ID NO: 2201158 - RNA, 23 nt, Human
uguucugcaaaaauauuuauaaa

SEQ ID NO: 2201159 - RNA, 17 nt, Human
uguucugcacacagcac

SEQ ID NO: 2201160 - RNA, 14 nt, Human
uguucuuucuggcu

SEQ ID NO: 2201161 - RNA, 19 nt, Human
uguucugauuagaaaugac

SEQ ID NO: 2201162 - RNA, 16 nt, Human
uguucugauuagaaau

SEQ ID NO: 2201163 - RNA, 14 nt, Human
uguucugauuagaa

SEQ ID NO: 2201164 - RNA, 22 nt, Human
uguucugacauuaacaguuuuc

SEQ ID NO: 2201165 - RNA, 20 nt, Human
uguucugacauuaacaguuu

SEQ ID NO: 2201166 - RNA, 19 nt, Human
uguucugacauuaacaguu

SEQ ID NO: 2201167 - RNA, 15 nt, Human
uguucugauaaugaa

SEQ ID NO: 2201168 - RNA, 18 nt, Human
uguucugacccugcuuca

SEQ ID NO: 2201169 - RNA, 17 nt, Human
uguucugacauuaacag

SEQ ID NO: 2201170 - RNA, 16 nt, Human
uguucugacauuaaca

SEQ ID NO: 2201171 - RNA, 15 nt, Human
uguucugacauuaac

SEQ ID NO: 2201172 - RNA, 13 nt, Human
uguucugacauua

SEQ ID NO: 2201173 - RNA, 15 nt, Human
uguucugaacugugg

SEQ ID NO: 2201174 - RNA, 18 nt, Human
uguucugaauaauuucuu

SEQ ID NO: 2201175 - RNA, 13 nt, Human
uguucugaacugu

SEQ ID NO: 2201176 - RNA, 15 nt, Human
uguucugacccugcu

SEQ ID NO: 2201177 - RNA, 19 nt, Human
uguucucugcccuccaaga

SEQ ID NO: 2201178 - RNA, 23 nt, Human
uguucucuugggaacugaacuca

SEQ ID NO: 2201179 - RNA, 21 nt, Human
uguucauuguaauguuacuga

SEQ ID NO: 2201180 - RNA, 20 nt, Human
uguucauuguaauguuacug

SEQ ID NO: 2201181 - RNA, 19 nt, Human
uguucauuguaauguuacu

SEQ ID NO: 2201182 - RNA, 18 nt, Human
uguucauuguaauguuac

SEQ ID NO: 2201183 - RNA, 16 nt, Human
uguucauuguaauguu

SEQ ID NO: 2201184 - RNA, 14 nt, Human
uguucauuguaaug

SEQ ID NO: 2201185 - RNA, 13 nt, Human
uguucauuguaau

SEQ ID NO: 2201186 - RNA, 23 nt, Human
uguucauuguaauguuacugauc

SEQ ID NO: 2201187 - RNA, 22 nt, Human
uguucauuguaauguuacugau

SEQ ID NO: 2201188 - RNA, 11 nt, Human
uguucauuucc

SEQ ID NO: 2201189 - RNA, 13 nt, Human
uguucauuuccuc

SEQ ID NO: 2201190 - RNA, 22 nt, Human
uguucauuuagauugaaaacuu

SEQ ID NO: 2201191 - RNA, 12 nt, Human
uguucauuguaa

SEQ ID NO: 2201192 - RNA, 22 nt, Human
uguucauuaaagcaugaauggu

SEQ ID NO: 2201193 - RNA, 15 nt, Human
uguucaguguaaaua

SEQ ID NO: 2201194 - RNA, 13 nt, Human
uguucaguguaau

SEQ ID NO: 2201195 - RNA, 15 nt, Human
uguucaguguaauuu

SEQ ID NO: 2201196 - RNA, 17 nt, Human
uguucaguguaauuucu

SEQ ID NO: 2201197 - RNA, 17 nt, Human
uguucagugucccgggc

SEQ ID NO: 2201198 - RNA, 21 nt, Human
uguucaguguaauuucuuugc

SEQ ID NO: 2201199 - RNA, 22 nt, Human
uguucaguguaauuucuuugcc

SEQ ID NO: 2201200 - RNA, 15 nt, Human
uguucaguuacagaa

SEQ ID NO: 2201201 - RNA, 16 nt, Human
uguucaguuacagaaa

SEQ ID NO: 2201202 - RNA, 17 nt, Human
uguucaguuacagaaag

SEQ ID NO: 2201203 - RNA, 18 nt, Human
uguucaguuacagaaagu

SEQ ID NO: 2201204 - RNA, 13 nt, Human
uguucauaaauaa

SEQ ID NO: 2201205 - RNA, 22 nt, Human
uguucuccuagacugacccuga

SEQ ID NO: 2201206 - RNA, 16 nt, Human
uguucuccgucccugc

SEQ ID NO: 2201207 - RNA, 20 nt, Human
uguucucagcucccccuguc

SEQ ID NO: 2201208 - RNA, 17 nt, Human
uguucucagcucccccu

SEQ ID NO: 2201209 - RNA, 18 nt, Human
uguucucagcucccccug

SEQ ID NO: 2201210 - RNA, 21 nt, Human
uguucuauuucagugccaaua

SEQ ID NO: 2201211 - RNA, 14 nt, Human
uguucucagcuccc

SEQ ID NO: 2201212 - RNA, 15 nt, Human
uguucucagcucccc

SEQ ID NO: 2201213 - RNA, 12 nt, Human
uguucuauagcu

SEQ ID NO: 2201214 - RNA, 22 nt, Human
uguucuaguuuucaguuuguau

SEQ ID NO: 2201215 - RNA, 16 nt, Human
uguucuauucaucuca

SEQ ID NO: 2201216 - RNA, 13 nt, Human
uguucucugagga

SEQ ID NO: 2201217 - RNA, 16 nt, Human
uguucucugaggacac

SEQ ID NO: 2201218 - RNA, 18 nt, Human
uguucucugaggacacua

SEQ ID NO: 2201219 - RNA, 12 nt, Human
uguucucugccc

SEQ ID NO: 2201220 - RNA, 14 nt, Human
uguuggccaggcug

SEQ ID NO: 2201221 - RNA, 18 nt, Human
uguuggccaggcugcucu

SEQ ID NO: 2201222 - RNA, 13 nt, Human
uguuggccaggcu

SEQ ID NO: 2201223 - RNA, 12 nt, Human
uguuguuucuuu

SEQ ID NO: 2201224 - RNA, 15 nt, Human
uguuguuucuuucua

SEQ ID NO: 2201225 - RNA, 13 nt, Human
uguuguuuuacua

SEQ ID NO: 2201226 - RNA, 18 nt, Human
uguuguuuuacuaaagaa

SEQ ID NO: 2201227 - RNA, 12 nt, Human
uguuguuugcca

SEQ ID NO: 2201228 - RNA, 13 nt, Human
uguuguuucuuuc

SEQ ID NO: 2201229 - RNA, 14 nt, Human
uguuguuucuuucu

SEQ ID NO: 2201230 - RNA, 12 nt, Human
uguuguuuguau

SEQ ID NO: 2201231 - RNA, 11 nt, Human
uguuguuuugu

SEQ ID NO: 2201232 - RNA, 20 nt, Human
uguuguuuuguuuuaaauac

SEQ ID NO: 2201233 - RNA, 16 nt, Human
uguuuacacacgugca

SEQ ID NO: 2201234 - RNA, 19 nt, Human
uguuuacacucuuuguaag

SEQ ID NO: 2201235 - RNA, 14 nt, Human
uguuuacagaggac

SEQ ID NO: 2201236 - RNA, 17 nt, Human
uguuuacagauccccaa

SEQ ID NO: 2201237 - RNA, 21 nt, Human
uguuuacagaggacaguauuu

SEQ ID NO: 2201238 - RNA, 15 nt, Human
uguuuacaagaaaaa

SEQ ID NO: 2201239 - RNA, 16 nt, Human
uguuuacacucuuugu

SEQ ID NO: 2201240 - RNA, 18 nt, Human
uguuuacacucuuuguaa

SEQ ID NO: 2201241 - RNA, 17 nt, Human
uguuuaauauuuaaaca

SEQ ID NO: 2201242 - RNA, 14 nt, Human
uguuuaauauuuaa

SEQ ID NO: 2201243 - RNA, 15 nt, Human
uguuuaauauuuaaa

SEQ ID NO: 2201244 - RNA, 13 nt, Human
uguuuaaaaucau

SEQ ID NO: 2201245 - RNA, 14 nt, Human
uguuuaaaaucauu

SEQ ID NO: 2201246 - RNA, 14 nt, Human
uguuuaaaaggauu

SEQ ID NO: 2201247 - RNA, 17 nt, Human
uguuggauuuuugucuu

SEQ ID NO: 2201248 - RNA, 17 nt, Human
uguuggauuuauaaaug

SEQ ID NO: 2201249 - RNA, 19 nt, Human
uguuggauuuauaaaugcu

SEQ ID NO: 2201250 - RNA, 23 nt, Human
uguuggauuuauaaaugcuauuu

SEQ ID NO: 2201251 - RNA, 20 nt, Human
uguuggauuuguuuaaaagg

SEQ ID NO: 2201252 - RNA, 20 nt, Human
uguuggauaaaucagugguu

SEQ ID NO: 2201253 - RNA, 19 nt, Human
uguuggauaaaucaguggu

SEQ ID NO: 2201254 - RNA, 11 nt, Human
uguuggaucuu

SEQ ID NO: 2201255 - RNA, 14 nt, Human
uguuggaucuucaa

SEQ ID NO: 2201256 - RNA, 21 nt, Human
uguuggaucuucaauggcuuu

SEQ ID NO: 2201257 - RNA, 11 nt, Human
uguuggccagg

SEQ ID NO: 2201258 - RNA, 13 nt, Human
uguuggaaaagaa

SEQ ID NO: 2201259 - RNA, 14 nt, Human
uguuggagccugca

SEQ ID NO: 2201260 - RNA, 21 nt, Human
uguugcuuuugugaacuuuuu

SEQ ID NO: 2201261 - RNA, 21 nt, Human
uguuggagaagaacugaaauc

SEQ ID NO: 2201262 - RNA, 14 nt, Human
uguugcuuggacua

SEQ ID NO: 2201263 - RNA, 15 nt, Human
uguugcuuacaauuu

SEQ ID NO: 2201264 - RNA, 16 nt, Human
uguugcuuacaauuuu

SEQ ID NO: 2201265 - RNA, 16 nt, Human
uguugcuuagucacuu

SEQ ID NO: 2201266 - RNA, 20 nt, Human
uguugcuuagucacuuauuu

SEQ ID NO: 2201267 - RNA, 14 nt, Human
uguugcugccucau

SEQ ID NO: 2201268 - RNA, 16 nt, Human
uguugcuguugauguu

SEQ ID NO: 2201269 - RNA, 13 nt, Human
uguugcuuacaau

SEQ ID NO: 2201270 - RNA, 14 nt, Human
uguugcuuacaauu

SEQ ID NO: 2201271 - RNA, 17 nt, Human
uguugagccaggccugg

SEQ ID NO: 2201272 - RNA, 18 nt, Human
uguugagaauugugcuca

SEQ ID NO: 2201273 - RNA, 23 nt, Human
uguugagaaucccaaauuugauu

SEQ ID NO: 2201274 - RNA, 21 nt, Human
uguugaaauuauguauguuua

SEQ ID NO: 2201275 - RNA, 22 nt, Human
uguugaaauuauguauguuuac

SEQ ID NO: 2201276 - RNA, 22 nt, Human
uguugauaaauuccacuggacu

SEQ ID NO: 2201277 - RNA, 19 nt, Human
uguugauaaauuccacugg

SEQ ID NO: 2201278 - RNA, 21 nt, Human
uguugagguggucugaauguu

SEQ ID NO: 2201279 - RNA, 20 nt, Human
uguugagguggucugaaugu

SEQ ID NO: 2201280 - RNA, 23 nt, Human
uguugagguggucugaauguucu

SEQ ID NO: 2201281 - RNA, 13 nt, Human
uguugagcuguuu

SEQ ID NO: 2201282 - RNA, 19 nt, Human
uguugagguggucugaaug

SEQ ID NO: 2201283 - RNA, 16 nt, Human
uguugagccuuuuccc

SEQ ID NO: 2201284 - RNA, 18 nt, Human
uguugagccuuuucccuc

SEQ ID NO: 2201285 - RNA, 13 nt, Human
uguugcugccaac

SEQ ID NO: 2201286 - RNA, 14 nt, Human
uguugcugccaacc

SEQ ID NO: 2201287 - RNA, 13 nt, Human
uguugcugccuca

SEQ ID NO: 2201288 - RNA, 14 nt, Human
uguugcugaauagg

SEQ ID NO: 2201289 - RNA, 23 nt, Human
uguugcugaauaggcgaucacaa

SEQ ID NO: 2201290 - RNA, 15 nt, Human
uguuuugguuugcua

SEQ ID NO: 2201291 - RNA, 20 nt, Human
uguuuuggggaugagagggu

SEQ ID NO: 2201292 - RNA, 16 nt, Human
uguuuugguaucuguu

SEQ ID NO: 2201293 - RNA, 22 nt, Human
uguuuugguaucuguucuuuaa

SEQ ID NO: 2201294 - RNA, 20 nt, Human
uguuuuuaugaagaaaaaau

SEQ ID NO: 2201295 - RNA, 13 nt, Human
uguuuuucacauu

SEQ ID NO: 2201296 - RNA, 13 nt, Human
uguuuuucaugaa

SEQ ID NO: 2201297 - RNA, 20 nt, Human
uguuuuaaacauagaaaguu

SEQ ID NO: 2201298 - RNA, 22 nt, Human
uguuuuaaauacgcacuacaug

SEQ ID NO: 2201299 - RNA, 23 nt, Human
uguuuuaaaaugagaaaucuaaa

SEQ ID NO: 2201300 - RNA, 20 nt, Human
uguuuugcuuuuucugacuc

SEQ ID NO: 2201301 - RNA, 18 nt, Human
uguuuuggcugaaauucu

SEQ ID NO: 2201302 - RNA, 23 nt, Human
uguuuuggcugaaauucuccugg

SEQ ID NO: 2201303 - RNA, 16 nt, Human
uguuuugcuuuuucug

SEQ ID NO: 2201304 - RNA, 17 nt, Human
uguuuugcuuuuucuga

SEQ ID NO: 2201305 - RNA, 18 nt, Human
uguuuugcuuuuucugac

SEQ ID NO: 2201306 - RNA, 13 nt, Human
uguuuuugucuua

SEQ ID NO: 2201307 - RNA, 20 nt, Human
uguuuuuccuuguauuuaaa

SEQ ID NO: 2201308 - RNA, 11 nt, Human
uguuuuucauu

SEQ ID NO: 2201309 - RNA, 14 nt, Human
uguuuuucaugaaa

SEQ ID NO: 2201310 - RNA, 20 nt, Human
uuaaaacaauauuguuucua

SEQ ID NO: 2201311 - RNA, 19 nt, Human
uguuuuuugaaaacauggu

SEQ ID NO: 2201312 - RNA, 16 nt, Human
uguuuuuugaaaacau

SEQ ID NO: 2201313 - RNA, 14 nt, Human
uguuuuuugaaaac

SEQ ID NO: 2201314 - RNA, 12 nt, Human
uguuuuuucuaa

SEQ ID NO: 2201315 - RNA, 21 nt, Human
uguuuuuuagaucaaauacuu

SEQ ID NO: 2201316 - RNA, 15 nt, Human
uguuuuuucugccac

SEQ ID NO: 2201317 - RNA, 17 nt, Human
uguuuuuuccugagcuu

SEQ ID NO: 2201318 - RNA, 17 nt, Human
uguuuuuuagaucaaau

SEQ ID NO: 2201319 - RNA, 22 nt, Human
uguuuguuucucccccugggcu

SEQ ID NO: 2201320 - RNA, 12 nt, Human
uguuuuaaaaaa

SEQ ID NO: 2201321 - RNA, 23 nt, Human
uguuuuaaaauaaaaauucugaa

SEQ ID NO: 2201322 - RNA, 20 nt, Human
uguuuuaaaaagaaacaaga

SEQ ID NO: 2201323 - RNA, 12 nt, Human
uguuuuaaaaag

SEQ ID NO: 2201324 - RNA, 17 nt, Human
uguuuguuuccuuuguu

SEQ ID NO: 2201325 - RNA, 18 nt, Human
uguuuuaaaaugagaaau

SEQ ID NO: 2201326 - RNA, 15 nt, Human
uguuucucugcuguu

SEQ ID NO: 2201327 - RNA, 14 nt, Human
uguuucucugcugu

SEQ ID NO: 2201328 - RNA, 13 nt, Human
uguuucucugcug

SEQ ID NO: 2201329 - RNA, 16 nt, Human
uguuuguugucagcug

SEQ ID NO: 2201330 - RNA, 17 nt, Human
uguuuguugucagcuga

SEQ ID NO: 2201331 - RNA, 14 nt, Human
uguuucucuuuccu

SEQ ID NO: 2201332 - RNA, 20 nt, Human
uguuuacagggagccuccug

SEQ ID NO: 2201333 - RNA, 21 nt, Human
uguuuacagggagccuccugc

SEQ ID NO: 2201334 - RNA, 19 nt, Human
uguuucuauugacuucaau

SEQ ID NO: 2201335 - RNA, 15 nt, Human
uguuucuagggaaau

SEQ ID NO: 2201336 - RNA, 23 nt, Human
uguuuacagggagccuccugccc

SEQ ID NO: 2201337 - RNA, 16 nt, Human
uguuucucccccuggg

SEQ ID NO: 2201338 - RNA, 15 nt, Human
uguuucucccccugg

SEQ ID NO: 2201339 - RNA, 22 nt, Human
uguuuacagggagccuccugcc

SEQ ID NO: 2201340 - RNA, 23 nt, Human
uguuucucccccugggcucugcc

SEQ ID NO: 2201341 - RNA, 17 nt, Human
uguuucucccccugggc

SEQ ID NO: 2201342 - RNA, 15 nt, Human
uguuucucccucuca

SEQ ID NO: 2201343 - RNA, 17 nt, Human
uguuucuccuucugaaa

SEQ ID NO: 2201344 - RNA, 20 nt, Human
uguuuccuggcacugcuucc

SEQ ID NO: 2201345 - RNA, 20 nt, Human
uguuuacagcacuacucugu

SEQ ID NO: 2201346 - RNA, 21 nt, Human
uguuuacagcacuacucugug

SEQ ID NO: 2201347 - RNA, 22 nt, Human
uguuuacagcacuacucugugc

SEQ ID NO: 2201348 - RNA, 23 nt, Human
uguuuacagcacuacucugugcc

SEQ ID NO: 2201349 - RNA, 17 nt, Human
uguuuacagggagccuc

SEQ ID NO: 2201350 - RNA, 21 nt, Human
uguuuccuggcacugcuucca

SEQ ID NO: 2201351 - RNA, 22 nt, Human
uguuuccuggcacugcuuccag

SEQ ID NO: 2201352 - RNA, 13 nt, Human
uuaaauggacaga

SEQ ID NO: 2201353 - RNA, 20 nt, Human
uuaaauggaaaaaaugaugu

SEQ ID NO: 2201354 - RNA, 21 nt, Human
uuaaauggguagagaaacacu

SEQ ID NO: 2201355 - RNA, 23 nt, Human
uuaaaugggcuacuuuguccuuu

SEQ ID NO: 2201356 - RNA, 17 nt, Human
uuaaauguaaagauauu

SEQ ID NO: 2201357 - RNA, 13 nt, Human
uuaaauguaaaga

SEQ ID NO: 2201358 - RNA, 17 nt, Human
uuaaaugcccagccccu

SEQ ID NO: 2201359 - RNA, 18 nt, Human
uuaaaugcccagccccuu

SEQ ID NO: 2201360 - RNA, 15 nt, Human
uuaacauucauagag

SEQ ID NO: 2201361 - RNA, 17 nt, Human
uuaacauauuuacuaag

SEQ ID NO: 2201362 - RNA, 16 nt, Human
uuaaauguaaauaauc

SEQ ID NO: 2201363 - RNA, 23 nt, Human
uuaaagcaacugucuauuucugc

SEQ ID NO: 2201364 - RNA, 14 nt, Human
uuaaagcuguuauu

SEQ ID NO: 2201365 - RNA, 15 nt, Human
uuaaauauaauaugc

SEQ ID NO: 2201366 - RNA, 18 nt, Human
uuaaauaggauauuaaca

SEQ ID NO: 2201367 - RNA, 18 nt, Human
uuaaauaguaaaaauaaa

SEQ ID NO: 2201368 - RNA, 12 nt, Human
uuaaauauaauu

SEQ ID NO: 2201369 - RNA, 13 nt, Human
uuaaauauaauuc

SEQ ID NO: 2201370 - RNA, 14 nt, Human
uuaaauauaauucu

SEQ ID NO: 2201371 - RNA, 16 nt, Human
uuaaauauaauucugu

SEQ ID NO: 2201372 - RNA, 17 nt, Human
uuaaauauaauucugua

SEQ ID NO: 2201373 - RNA, 18 nt, Human
uuaaauauaauucuguaa

SEQ ID NO: 2201374 - RNA, 19 nt, Human
uuaaauauaauucuguaaa

SEQ ID NO: 2201375 - RNA, 20 nt, Human
uuaaauauaauucuguaaau

SEQ ID NO: 2201376 - RNA, 16 nt, Human
uuaaaugcaccuggaa

SEQ ID NO: 2201377 - RNA, 18 nt, Human
uuaaaugcaccuggaaua

SEQ ID NO: 2201378 - RNA, 17 nt, Human
uuaaaugcaccuggaau

SEQ ID NO: 2201379 - RNA, 14 nt, Human
uuaaagcaaaggag

SEQ ID NO: 2201380 - RNA, 21 nt, Human
uuaaagauuuaucaaaucagu

SEQ ID NO: 2201381 - RNA, 19 nt, Human
uuaaagcuaaaguaucugu

SEQ ID NO: 2201382 - RNA, 14 nt, Human
uuaaagccuccuca

SEQ ID NO: 2201383 - RNA, 13 nt, Human
uuaaagauguucc

SEQ ID NO: 2201384 - RNA, 14 nt, Human
uuaaagauuuauca

SEQ ID NO: 2201385 - RNA, 17 nt, Human
uuaaagauuuaucaaau

SEQ ID NO: 2201386 - RNA, 18 nt, Human
uuaaagcugccuguaguu

SEQ ID NO: 2201387 - RNA, 17 nt, Human
uuaaagcugccuguagu

SEQ ID NO: 2201388 - RNA, 15 nt, Human
uuaaagcugccugua

SEQ ID NO: 2201389 - RNA, 14 nt, Human
uuaaagcugccugu

SEQ ID NO: 2201390 - RNA, 20 nt, Human
uuaaagcuuauuaaaacuca

SEQ ID NO: 2201391 - RNA, 14 nt, Human
uuaaagacuuuuau

SEQ ID NO: 2201392 - RNA, 20 nt, Human
uuaaacuuaaucuaaaugga

SEQ ID NO: 2201393 - RNA, 14 nt, Human
uuaaagagagguua

SEQ ID NO: 2201394 - RNA, 20 nt, Human
uuaaagagagguuauagagu

SEQ ID NO: 2201395 - RNA, 13 nt, Human
uuaaagagagguu

SEQ ID NO: 2201396 - RNA, 14 nt, Human
uuaaaagacacugu

SEQ ID NO: 2201397 - RNA, 16 nt, Human
uuaaaagacaagacuu

SEQ ID NO: 2201398 - RNA, 17 nt, Human
uuaaaagacaagacuuc

SEQ ID NO: 2201399 - RNA, 21 nt, Human
uuaaaagaaugggcaguuaca

SEQ ID NO: 2201400 - RNA, 22 nt, Human
uuaaaagaaugggcaguuacau

SEQ ID NO: 2201401 - RNA, 12 nt, Human
uuaaaagacaag

SEQ ID NO: 2201402 - RNA, 15 nt, Human
uuaaaagacaagacu

SEQ ID NO: 2201403 - RNA, 18 nt, Human
uuaaaagauaaauauuau

SEQ ID NO: 2201404 - RNA, 18 nt, Human
uuaaacuuaaucuaaaug

SEQ ID NO: 2201405 - RNA, 16 nt, Human
uuaaacuuaaucuaaa

SEQ ID NO: 2201406 - RNA, 14 nt, Human
uuaaaacagacacu

SEQ ID NO: 2201407 - RNA, 21 nt, Human
uuaaaacagacacuggcaugg

SEQ ID NO: 2201408 - RNA, 13 nt, Human
uuaaaagaaugau

SEQ ID NO: 2201409 - RNA, 13 nt, Human
uuaaaacauguaa

SEQ ID NO: 2201410 - RNA, 14 nt, Human
uuaaaacauguaau

SEQ ID NO: 2201411 - RNA, 14 nt, Human
uuaaaaccaaagag

SEQ ID NO: 2201412 - RNA, 13 nt, Human
uuaaaagaauggg

SEQ ID NO: 2201413 - RNA, 20 nt, Human
uuaaaagaaugggcaguuac

SEQ ID NO: 2201414 - RNA, 19 nt, Human
uuaaaagaaugauuaugaa

SEQ ID NO: 2201415 - RNA, 20 nt, Human
uuaccuuuuuauuugcaugu

SEQ ID NO: 2201416 - RNA, 15 nt, Human
uuaccuuuuuugaua

SEQ ID NO: 2201417 - RNA, 17 nt, Human
uuaccuuuuuugauaaa

SEQ ID NO: 2201418 - RNA, 23 nt, Human
uuaccuuuuuugauaaaguuucu

SEQ ID NO: 2201419 - RNA, 22 nt, Human
uuaccuuuuuuauacauaaaca

SEQ ID NO: 2201420 - RNA, 20 nt, Human
uuaccuuuuuuauacauaaa

SEQ ID NO: 2201421 - RNA, 19 nt, Human
uuaccuuuuuuauacauaa

SEQ ID NO: 2201422 - RNA, 16 nt, Human
uuacggacacccccuc

SEQ ID NO: 2201423 - RNA, 12 nt, Human
uuacgugagcca

SEQ ID NO: 2201424 - RNA, 20 nt, Human
uuacgguuuuccagguuuaa

SEQ ID NO: 2201425 - RNA, 20 nt, Human
uuacgcacacguacuuaaau

SEQ ID NO: 2201426 - RNA, 18 nt, Human
uuacgcccaacccuuccc

SEQ ID NO: 2201427 - RNA, 13 nt, Human
uuacgcuuugauu

SEQ ID NO: 2201428 - RNA, 16 nt, Human
uuacgcuuugauucau

SEQ ID NO: 2201429 - RNA, 15 nt, Human
uuacgcuuugauuca

SEQ ID NO: 2201430 - RNA, 22 nt, Human
uuaccagacgguucaccagccu

SEQ ID NO: 2201431 - RNA, 21 nt, Human
uuaccagacgguucaccagcc

SEQ ID NO: 2201432 - RNA, 17 nt, Human
uuaccagaagcuuccau

SEQ ID NO: 2201433 - RNA, 14 nt, Human
uuaccacucaggca

SEQ ID NO: 2201434 - RNA, 12 nt, Human
uuaccacucagg

SEQ ID NO: 2201435 - RNA, 21 nt, Human
uuaccacuuguguuuugcaag

SEQ ID NO: 2201436 - RNA, 14 nt, Human
uuaccagcagagca

SEQ ID NO: 2201437 - RNA, 18 nt, Human
uuaccuuuuuauuugcau

SEQ ID NO: 2201438 - RNA, 15 nt, Human
uuaccuuuuuauuug

SEQ ID NO: 2201439 - RNA, 24 nt, Human
uuaccagauuuuuacacauguauc

SEQ ID NO: 2201440 - RNA, 21 nt, Human
uuaccagauuuuuacacaugu

SEQ ID NO: 2201441 - RNA, 18 nt, Human
uuaccagauaaugcuacu

SEQ ID NO: 2201442 - RNA, 19 nt, Human
uuaccagauaaugcuacuu

SEQ ID NO: 2201443 - RNA, 23 nt, Human
uuacauuuuuaagugcugcauuu

SEQ ID NO: 2201444 - RNA, 22 nt, Human
uuacauuuuuaagugcugcauu

SEQ ID NO: 2201445 - RNA, 21 nt, Human
uuacauuuuuaagugcugcau

SEQ ID NO: 2201446 - RNA, 20 nt, Human
uuacauuuuuaagugcugca

SEQ ID NO: 2201447 - RNA, 18 nt, Human
uuacagagaggagaaaca

SEQ ID NO: 2201448 - RNA, 17 nt, Human
uuacagagaggagaaac

SEQ ID NO: 2201449 - RNA, 14 nt, Human
uuacagagaggaga

SEQ ID NO: 2201450 - RNA, 22 nt, Human
uuacagagaggagaaacacauc

SEQ ID NO: 2201451 - RNA, 20 nt, Human
uuacagagaggagaaacaca

SEQ ID NO: 2201452 - RNA, 16 nt, Human
uuacagaggaaguuau

SEQ ID NO: 2201453 - RNA, 15 nt, Human
uuacagaggacagua

SEQ ID NO: 2201454 - RNA, 17 nt, Human
uuacaaucauugcugaa

SEQ ID NO: 2201455 - RNA, 22 nt, Human
uuacaaucauugcugaaaaugg

SEQ ID NO: 2201456 - RNA, 23 nt, Human
uuacaaucauugcugaaaauggu

SEQ ID NO: 2201457 - RNA, 20 nt, Human
uuacagagacagaaagcaga

SEQ ID NO: 2201458 - RNA, 21 nt, Human
uuacaauaaaacuuugcugcc

SEQ ID NO: 2201459 - RNA, 16 nt, Human
uuacaaguguauauca

SEQ ID NO: 2201460 - RNA, 13 nt, Human
uuaauucauguuu

SEQ ID NO: 2201461 - RNA, 15 nt, Human
uuaauucacucccac

SEQ ID NO: 2201462 - RNA, 14 nt, Human
uuacaaguguauau

SEQ ID NO: 2201463 - RNA, 16 nt, Human
uuaauucaccaaagua

SEQ ID NO: 2201464 - RNA, 22 nt, Human
uuaauucagcacugauuucaca

SEQ ID NO: 2201465 - RNA, 14 nt, Human
uuaauuauuguaca

SEQ ID NO: 2201466 - RNA, 21 nt, Human
uuaauuauuauuuguguuuua

SEQ ID NO: 2201467 - RNA, 23 nt, Human
uuacaauaaaaucuugaaaaugc

SEQ ID NO: 2201468 - RNA, 12 nt, Human
uuacaaucaaag

SEQ ID NO: 2201469 - RNA, 22 nt, Human
uuacauguuuucuuugcuuuaa

SEQ ID NO: 2201470 - RNA, 14 nt, Human
uuacauuaauguua

SEQ ID NO: 2201471 - RNA, 16 nt, Human
uuacauuaauguuaau

SEQ ID NO: 2201472 - RNA, 14 nt, Human
uuacauuuccuaaa

SEQ ID NO: 2201473 - RNA, 14 nt, Human
uuacauuuguauaa

SEQ ID NO: 2201474 - RNA, 15 nt, Human
uuacauuuguauaaa

SEQ ID NO: 2201475 - RNA, 18 nt, Human
uuacauguuuucuuugcu

SEQ ID NO: 2201476 - RNA, 12 nt, Human
uuacauguuuuc

SEQ ID NO: 2201477 - RNA, 17 nt, Human
uuacauguauuauuuca

SEQ ID NO: 2201478 - RNA, 22 nt, Human
uuacaugguuaagguaaaguaa

SEQ ID NO: 2201479 - RNA, 23 nt, Human
uuacagauaguaucuagcaauca

SEQ ID NO: 2201480 - RNA, 12 nt, Human
uuacauggcucu

SEQ ID NO: 2201481 - RNA, 20 nt, Human
uuacagaugaauguauuuau

SEQ ID NO: 2201482 - RNA, 16 nt, Human
uuaauauggggaugca

SEQ ID NO: 2201483 - RNA, 22 nt, Human
uuaauauggggaugcagcauua

SEQ ID NO: 2201484 - RNA, 13 nt, Human
uuaauauggcucu

SEQ ID NO: 2201485 - RNA, 17 nt, Human
uuaauaugaaaacuuau

SEQ ID NO: 2201486 - RNA, 16 nt, Human
uuaauaugaaaacuua

SEQ ID NO: 2201487 - RNA, 15 nt, Human
uuaauaugaaaacuu

SEQ ID NO: 2201488 - RNA, 14 nt, Human
uuaauaugaaaacu

SEQ ID NO: 2201489 - RNA, 12 nt, Human
uuaauaugaaaa

SEQ ID NO: 2201490 - RNA, 23 nt, Human
uuaauauguuaaccucaguguca

SEQ ID NO: 2201491 - RNA, 15 nt, Human
uuaaugccuuuaaag

SEQ ID NO: 2201492 - RNA, 18 nt, Human
uuaaugccuuuaaaguau

SEQ ID NO: 2201493 - RNA, 14 nt, Human
uuaauaguguuaau

SEQ ID NO: 2201494 - RNA, 15 nt, Human
uuaauaguguuaauc

SEQ ID NO: 2201495 - RNA, 16 nt, Human
uuaauaguguuaauca

SEQ ID NO: 2201496 - RNA, 17 nt, Human
uuaauaguguuaaucaa

SEQ ID NO: 2201497 - RNA, 18 nt, Human
uuaauaguguuaaucaau

SEQ ID NO: 2201498 - RNA, 21 nt, Human
uuaauaguguuaaucaauuua

SEQ ID NO: 2201499 - RNA, 20 nt, Human
uuaauagcuuuuauuguaua

SEQ ID NO: 2201500 - RNA, 22 nt, Human
uuaauagcuuuuauuguauaaa

SEQ ID NO: 2201501 - RNA, 15 nt, Human
uuaauaucaucagua

SEQ ID NO: 2201502 - RNA, 19 nt, Human
uuaauaguguuaaucaauu

SEQ ID NO: 2201503 - RNA, 18 nt, Human
uuaauaucaucaguauug

SEQ ID NO: 2201504 - RNA, 22 nt, Human
uuaauauaaaguaguccuguga

SEQ ID NO: 2201505 - RNA, 23 nt, Human
uuaauauaaaguaguccugugaa

SEQ ID NO: 2201506 - RNA, 19 nt, Human
uuaauaucccuacauguau

SEQ ID NO: 2201507 - RNA, 20 nt, Human
uuaauaucccuacauguauu

SEQ ID NO: 2201508 - RNA, 17 nt, Human
uuaaugucacaggcagg

SEQ ID NO: 2201509 - RNA, 22 nt, Human
uuaaugucaauucuugccaaau

SEQ ID NO: 2201510 - RNA, 22 nt, Human
uuaauggacaugagauaauguu

SEQ ID NO: 2201511 - RNA, 23 nt, Human
uuaauggcaaggcagcccugucu

SEQ ID NO: 2201512 - RNA, 22 nt, Human
uuaauggccggcuggaaaugcu

SEQ ID NO: 2201513 - RNA, 14 nt, Human
uuaauggaaauguu

SEQ ID NO: 2201514 - RNA, 18 nt, Human
uuaaugcuuuuauauuuu

SEQ ID NO: 2201515 - RNA, 15 nt, Human
uuaaugcuucuuuca

SEQ ID NO: 2201516 - RNA, 19 nt, Human
uuaauggacaugagauaau

SEQ ID NO: 2201517 - RNA, 18 nt, Human
uuaaugucacaggcaggu

SEQ ID NO: 2201518 - RNA, 16 nt, Human
uuaauuagugcuaagu

SEQ ID NO: 2201519 - RNA, 18 nt, Human
uuaauuagugcuaagugu

SEQ ID NO: 2201520 - RNA, 20 nt, Human
uuaauuagugcuaaguguga

SEQ ID NO: 2201521 - RNA, 14 nt, Human
uuaauuauuauucu

SEQ ID NO: 2201522 - RNA, 17 nt, Human
uuaauuauuauucuuca

SEQ ID NO: 2201523 - RNA, 14 nt, Human
uuaauuauuauuua

SEQ ID NO: 2201524 - RNA, 14 nt, Human
uuaauuauuauuug

SEQ ID NO: 2201525 - RNA, 21 nt, Human
uuaauuagugcuaagugugaa

SEQ ID NO: 2201526 - RNA, 23 nt, Human
uuaauuauaccauggugaauuaa

SEQ ID NO: 2201527 - RNA, 15 nt, Human
uuaauuaucuuuucu

SEQ ID NO: 2201528 - RNA, 22 nt, Human
uuaauuaugccuuuuuugauca

SEQ ID NO: 2201529 - RNA, 18 nt, Human
uuaauagcuuuuauugua

SEQ ID NO: 2201530 - RNA, 18 nt, Human
uuaagggaagaauuccag

SEQ ID NO: 2201531 - RNA, 18 nt, Human
uuaauaauguuucaaaca

SEQ ID NO: 2201532 - RNA, 20 nt, Human
uuaaggauugugauauuuuu

SEQ ID NO: 2201533 - RNA, 15 nt, Human
uuaaggauuuuaugc

SEQ ID NO: 2201534 - RNA, 13 nt, Human
uuaaggauuuuau

SEQ ID NO: 2201535 - RNA, 22 nt, Human
uuaaggaugcuuguacauaaug

SEQ ID NO: 2201536 - RNA, 23 nt, Human
uuaaggcugaggaaaggccagcu

SEQ ID NO: 2201537 - RNA, 20 nt, Human
uuaaggauuuuaugcuuuaa

SEQ ID NO: 2201538 - RNA, 18 nt, Human
uuaaggauuuuaugcuuu

SEQ ID NO: 2201539 - RNA, 16 nt, Human
uuaauaauguuucaaa

SEQ ID NO: 2201540 - RNA, 12 nt, Human
uuaagcuuauuu

SEQ ID NO: 2201541 - RNA, 14 nt, Human
uuaagcuguuucca

SEQ ID NO: 2201542 - RNA, 14 nt, Human
uuaacauucuguaa

SEQ ID NO: 2201543 - RNA, 21 nt, Human
uuaaggaagacaaugugaaaa

SEQ ID NO: 2201544 - RNA, 19 nt, Human
uuaaggacaaaaaugaacu

SEQ ID NO: 2201545 - RNA, 20 nt, Human
uuaaggaaacucuuaucuca

SEQ ID NO: 2201546 - RNA, 12 nt, Human
uuaaggaaacaa

SEQ ID NO: 2201547 - RNA, 14 nt, Human
uuaaggaaacaaua

SEQ ID NO: 2201548 - RNA, 14 nt, Human
uuaaggaaacucuu

SEQ ID NO: 2201549 - RNA, 16 nt, Human
uuaaggaaacucuuau

SEQ ID NO: 2201550 - RNA, 20 nt, Human
uuaaggaugcuuguacauaa

SEQ ID NO: 2201551 - RNA, 19 nt, Human
uuaaggaugcuuguacaua

SEQ ID NO: 2201552 - RNA, 18 nt, Human
uuaaggaugcuuguacau

SEQ ID NO: 2201553 - RNA, 17 nt, Human
uuaaggaugcuuguaca

SEQ ID NO: 2201554 - RNA, 19 nt, Human
ugcguaugucuguuaccau

SEQ ID NO: 2201555 - RNA, 14 nt, Human
ugcguaugucuguu

SEQ ID NO: 2201556 - RNA, 17 nt, Human
ugcguaacuggcugugu

SEQ ID NO: 2201557 - RNA, 23 nt, Human
ugcguacguuuccugagaagugu

SEQ ID NO: 2201558 - RNA, 20 nt, Human
ugcguacguuuccugagaag

SEQ ID NO: 2201559 - RNA, 15 nt, Human
ugcguacguuuccug

SEQ ID NO: 2201560 - RNA, 16 nt, Human
ugcguaacuggcugug

SEQ ID NO: 2201561 - RNA, 21 nt, Human
ugcgguuuguuggaucuucaa

SEQ ID NO: 2201562 - RNA, 15 nt, Human
ugcgugcauaccacu

SEQ ID NO: 2201563 - RNA, 16 nt, Human
ugcguggacucugcac

SEQ ID NO: 2201564 - RNA, 17 nt, Human
ugcguggacucugcaca

SEQ ID NO: 2201565 - RNA, 19 nt, Human
ugcguggcauagcccagac

SEQ ID NO: 2201566 - RNA, 18 nt, Human
ugcguggacucugcacau

SEQ ID NO: 2201567 - RNA, 22 nt, Human
ugcguggacucugcacaugucu

SEQ ID NO: 2201568 - RNA, 13 nt, Human
ugcgugucguggg

SEQ ID NO: 2201569 - RNA, 18 nt, Human
ugcuagaacucccuuuca

SEQ ID NO: 2201570 - RNA, 19 nt, Human
ugcuagaacucccuuucaa

SEQ ID NO: 2201571 - RNA, 20 nt, Human
ugcuagcacuuggagccaag

SEQ ID NO: 2201572 - RNA, 16 nt, Human
ugcuaggaacacuccu

SEQ ID NO: 2201573 - RNA, 17 nt, Human
ugcuaggaacacuccuu

SEQ ID NO: 2201574 - RNA, 19 nt, Human
ugcuaggaacacuccuuca

SEQ ID NO: 2201575 - RNA, 18 nt, Human
ugcuagcacuuggagcca

SEQ ID NO: 2201576 - RNA, 19 nt, Human
ugcuagaugugcaaaugca

SEQ ID NO: 2201577 - RNA, 20 nt, Human
ugcuagaugugcaaaugcaa

SEQ ID NO: 2201578 - RNA, 18 nt, Human
ugcgugugcgugcaugug

SEQ ID NO: 2201579 - RNA, 17 nt, Human
ugcuagacacauuuuua

SEQ ID NO: 2201580 - RNA, 21 nt, Human
ugcuagaacucccuuucaaca

SEQ ID NO: 2201581 - RNA, 20 nt, Human
ugcuagaacucccuuucaac

SEQ ID NO: 2201582 - RNA, 21 nt, Human
ugcucagcuucuccuguguga

SEQ ID NO: 2201583 - RNA, 23 nt, Human
ugcucaggacucagaagccucug

SEQ ID NO: 2201584 - RNA, 17 nt, Human
ugcucaggacucagaag

SEQ ID NO: 2201585 - RNA, 14 nt, Human
ugcucaggacucag

SEQ ID NO: 2201586 - RNA, 14 nt, Human
ugcucaggagcccu

SEQ ID NO: 2201587 - RNA, 20 nt, Human
ugcucagcuucuccugugug

SEQ ID NO: 2201588 - RNA, 15 nt, Human
ugcucagcuucuccu

SEQ ID NO: 2201589 - RNA, 12 nt, Human
ugcucagcuucu

SEQ ID NO: 2201590 - RNA, 20 nt, Human
ugcucagcucugggccauuc

SEQ ID NO: 2201591 - RNA, 18 nt, Human
ugcucagcucugggccau

SEQ ID NO: 2201592 - RNA, 20 nt, Human
ugcuaggugggccagccccu

SEQ ID NO: 2201593 - RNA, 19 nt, Human
ugcuaggugggccagcccc

SEQ ID NO: 2201594 - RNA, 17 nt, Human
ugcuaggugggccagcc

SEQ ID NO: 2201595 - RNA, 15 nt, Human
ugcuaggugggccag

SEQ ID NO: 2201596 - RNA, 16 nt, Human
ugcuagguuaauucca

SEQ ID NO: 2201597 - RNA, 23 nt, Human
ugcuaggugggccagccccuccc

SEQ ID NO: 2201598 - RNA, 21 nt, Human
ugcuaggugggccagccccuc

SEQ ID NO: 2201599 - RNA, 23 nt, Human
ugcuagguuaauuccaauuauau

SEQ ID NO: 2201600 - RNA, 14 nt, Human
ugcuaggugggcca

SEQ ID NO: 2201601 - RNA, 22 nt, Human
ugcuaggucucggacuaagccu

SEQ ID NO: 2201602 - RNA, 14 nt, Human
ugcuaggucucgga

SEQ ID NO: 2201603 - RNA, 21 nt, Human
ugcuagggguuuuaggucucu

SEQ ID NO: 2201604 - RNA, 22 nt, Human
ugcuagggaaacuucccguccc

SEQ ID NO: 2201605 - RNA, 20 nt, Human
ugcuagggguuuuaggucuc

SEQ ID NO: 2201606 - RNA, 21 nt, Human
ugcuaggcgagugccaggacu

SEQ ID NO: 2201607 - RNA, 16 nt, Human
ugcuagcucugagcca

SEQ ID NO: 2201608 - RNA, 18 nt, Human
ugcuagcucugagccagu

SEQ ID NO: 2201609 - RNA, 22 nt, Human
ugcuaggcgagugccaggacuc

SEQ ID NO: 2201610 - RNA, 17 nt, Human
ugcuagggaaacuuccc

SEQ ID NO: 2201611 - RNA, 22 nt, Human
ugcucaucauuccuugagaaaa

SEQ ID NO: 2201612 - RNA, 17 nt, Human
ugcucaucauucucugu

SEQ ID NO: 2201613 - RNA, 15 nt, Human
ugcucaucauucucu

SEQ ID NO: 2201614 - RNA, 23 nt, Human
ugcucaucauucucugucucauc

SEQ ID NO: 2201615 - RNA, 21 nt, Human
ugcucaucauucucugucuca

SEQ ID NO: 2201616 - RNA, 20 nt, Human
ugcucaucauucucugucuc

SEQ ID NO: 2201617 - RNA, 19 nt, Human
ugcucaucauucucugucu

SEQ ID NO: 2201618 - RNA, 11 nt, Human
ugcucauggaa

SEQ ID NO: 2201619 - RNA, 13 nt, Human
ugcucaucugcug

SEQ ID NO: 2201620 - RNA, 14 nt, Human
ugcucaucugcugg

SEQ ID NO: 2201621 - RNA, 15 nt, Human
ugcucaucugcuggu

SEQ ID NO: 2201622 - RNA, 19 nt, Human
ugcuccucuccccagcaag

SEQ ID NO: 2201623 - RNA, 16 nt, Human
ugcucaucugcugguc

SEQ ID NO: 2201624 - RNA, 18 nt, Human
ugcucaucugcugguccg

SEQ ID NO: 2201625 - RNA, 14 nt, Human
ugcuccuggagccu

SEQ ID NO: 2201626 - RNA, 20 nt, Human
ugcuccuggagccuuugaau

SEQ ID NO: 2201627 - RNA, 21 nt, Human
ugcuccuggagccuuugaaua

SEQ ID NO: 2201628 - RNA, 15 nt, Human
ugcugaguugguguu

SEQ ID NO: 2201629 - RNA, 21 nt, Human
ugcugaugaacucuuaaucaa

SEQ ID NO: 2201630 - RNA, 16 nt, Human
ugcugaauuuucacau

SEQ ID NO: 2201631 - RNA, 17 nt, Human
ugcugaauuuucacaug

SEQ ID NO: 2201632 - RNA, 22 nt, Human
ugcugaauuuucacaugaacau

SEQ ID NO: 2201633 - RNA, 23 nt, Human
ugcugaauuuucacaugaacaua

SEQ ID NO: 2201634 - RNA, 14 nt, Human
ugcugaauuuucac

SEQ ID NO: 2201635 - RNA, 20 nt, Human
ugcugaauguugggacugcu

SEQ ID NO: 2201636 - RNA, 18 nt, Human
ugcugaauauacagcagg

SEQ ID NO: 2201637 - RNA, 18 nt, Human
ugcugaauguugggacug

SEQ ID NO: 2201638 - RNA, 15 nt, Human
ugcugacagacacag

SEQ ID NO: 2201639 - RNA, 16 nt, Human
ugcugacagacacagg

SEQ ID NO: 2201640 - RNA, 19 nt, Human
ugcugacagacacaggccc

SEQ ID NO: 2201641 - RNA, 13 nt, Human
ugcugauguucag

SEQ ID NO: 2201642 - RNA, 17 nt, Human
ugcugauguccucacca

SEQ ID NO: 2201643 - RNA, 14 nt, Human
ugcugauguucagu

SEQ ID NO: 2201644 - RNA, 15 nt, Human
ugcugauguucagug

SEQ ID NO: 2201645 - RNA, 16 nt, Human
ugcugauguucagugu

SEQ ID NO: 2201646 - RNA, 17 nt, Human
ugcugauguucagugua

SEQ ID NO: 2201647 - RNA, 18 nt, Human
ugcugauguucaguguaa

SEQ ID NO: 2201648 - RNA, 20 nt, Human
ugcugauguucaguguaauu

SEQ ID NO: 2201649 - RNA, 21 nt, Human
ugcugauguucaguguaauuu

SEQ ID NO: 2201650 - RNA, 20 nt, Human
ugcugauggugcaaugaccu

SEQ ID NO: 2201651 - RNA, 23 nt, Human
ugcugauggugcaaugaccuuuc

SEQ ID NO: 2201652 - RNA, 17 nt, Human
ugcugauucucccguuc

SEQ ID NO: 2201653 - RNA, 23 nt, Human
ugcugauguucaguguaauuucu

SEQ ID NO: 2201654 - RNA, 21 nt, Human
ugcugcagaggggcaggcccu

SEQ ID NO: 2201655 - RNA, 22 nt, Human
ugcugcagaggggcaggcccug

SEQ ID NO: 2201656 - RNA, 22 nt, Human
ugcugcaccaacccagccgcug

SEQ ID NO: 2201657 - RNA, 23 nt, Human
ugcugcagaggggcaggcccugc

SEQ ID NO: 2201658 - RNA, 21 nt, Human
ugcugcaggacuugagaagac

SEQ ID NO: 2201659 - RNA, 15 nt, Human
ugcugcaguugccag

SEQ ID NO: 2201660 - RNA, 16 nt, Human
ugcugcaguugccagu

SEQ ID NO: 2201661 - RNA, 13 nt, Human
ugcugcaggggcu

SEQ ID NO: 2201662 - RNA, 17 nt, Human
ugcugcaggggcucugg

SEQ ID NO: 2201663 - RNA, 18 nt, Human
ugcugcaggggcucugga

SEQ ID NO: 2201664 - RNA, 19 nt, Human
ugcugcaggggcucuggag

SEQ ID NO: 2201665 - RNA, 21 nt, Human
ugcuccuuccaacaggagcug

SEQ ID NO: 2201666 - RNA, 20 nt, Human
ugcuccugggcuacaaggac

SEQ ID NO: 2201667 - RNA, 19 nt, Human
ugcuccuuccaacaggagc

SEQ ID NO: 2201668 - RNA, 19 nt, Human
ugcuccuggcccacugcau

SEQ ID NO: 2201669 - RNA, 14 nt, Human
ugcuccuugggccc

SEQ ID NO: 2201670 - RNA, 12 nt, Human
ugcuccuugggc

SEQ ID NO: 2201671 - RNA, 19 nt, Human
ugcuccuugggcccuuuga

SEQ ID NO: 2201672 - RNA, 18 nt, Human
ugcuccuugggcccuuug

SEQ ID NO: 2201673 - RNA, 16 nt, Human
ugcuccuugggcccuu

SEQ ID NO: 2201674 - RNA, 15 nt, Human
ugcuccuugggcccu

SEQ ID NO: 2201675 - RNA, 15 nt, Human
ugcuccuuguuccua

SEQ ID NO: 2201676 - RNA, 16 nt, Human
ugcucuuucucugcca

SEQ ID NO: 2201677 - RNA, 14 nt, Human
ugcuccuuguuccu

SEQ ID NO: 2201678 - RNA, 21 nt, Human
ugcuccuugggcccuuugagu

SEQ ID NO: 2201679 - RNA, 17 nt, Human
ugcucuuucucugccag

SEQ ID NO: 2201680 - RNA, 18 nt, Human
ugcucuuucucugccagu

SEQ ID NO: 2201681 - RNA, 21 nt, Human
ugcucuuucucugccagugac

SEQ ID NO: 2201682 - RNA, 22 nt, Human
ugcucuuucucugccagugaca

SEQ ID NO: 2201683 - RNA, 23 nt, Human
ugcugaauacagaggcaacugca

SEQ ID NO: 2201684 - RNA, 18 nt, Human
ugcugaauacagaggcaa

SEQ ID NO: 2201685 - RNA, 14 nt, Human
ugcugaaaauggua

SEQ ID NO: 2201686 - RNA, 19 nt, Human
ugcugaaaacuagcucgug

SEQ ID NO: 2201687 - RNA, 17 nt, Human
ugcugaaacaacaaaua

SEQ ID NO: 2201688 - RNA, 13 nt, Human
ugcugaagggacc

SEQ ID NO: 2201689 - RNA, 22 nt, Human
ugcugaagggaccuugaagggu

SEQ ID NO: 2201690 - RNA, 22 nt, Human
ugcugaaugguuuucaaaauaa

SEQ ID NO: 2201691 - RNA, 18 nt, Human
ugcugaaugguuuucaaa

SEQ ID NO: 2201692 - RNA, 17 nt, Human
ugcugaaugguuuucaa

SEQ ID NO: 2201693 - RNA, 22 nt, Human
ugcugaagguggggauugccca

SEQ ID NO: 2201694 - RNA, 11 nt, Human
ugcugaauagg

SEQ ID NO: 2201695 - RNA, 18 nt, Human
ugcugaauaggcgaucac

SEQ ID NO: 2201696 - RNA, 21 nt, Human
ugcugaauaggcgaucacaac

SEQ ID NO: 2201697 - RNA, 17 nt, Human
ugcgcccaguccuucca

SEQ ID NO: 2201698 - RNA, 18 nt, Human
ugcgcccaguccuuccac

SEQ ID NO: 2201699 - RNA, 21 nt, Human
ugcgcccccuccgcccugcca

SEQ ID NO: 2201700 - RNA, 21 nt, Human
ugcgccauugcacuccagccu

SEQ ID NO: 2201701 - RNA, 13 nt, Human
ugcgcccaccccg

SEQ ID NO: 2201702 - RNA, 17 nt, Human
ugcgcccaccccgcucu

SEQ ID NO: 2201703 - RNA, 20 nt, Human
ugcgcccaccccgcucugca

SEQ ID NO: 2201704 - RNA, 18 nt, Human
ugcgccauugcacuccag

SEQ ID NO: 2201705 - RNA, 21 nt, Human
ugcgauucuggauaaagccac

SEQ ID NO: 2201706 - RNA, 19 nt, Human
ugcgauuuugccugugucu

SEQ ID NO: 2201707 - RNA, 17 nt, Human
ugcgccauugcacucca

SEQ ID NO: 2201708 - RNA, 17 nt, Human
ugcgcaggcuggcccug

SEQ ID NO: 2201709 - RNA, 16 nt, Human
ugcgcaggcuggcccu

SEQ ID NO: 2201710 - RNA, 13 nt, Human
ugcgcaggcuggc

SEQ ID NO: 2201711 - RNA, 13 nt, Human
ugcgccuacagga

SEQ ID NO: 2201712 - RNA, 23 nt, Human
ugcgcccccuccgcccugccacu

SEQ ID NO: 2201713 - RNA, 14 nt, Human
ugcgcccugggcuc

SEQ ID NO: 2201714 - RNA, 15 nt, Human
ugcgcccuuaccuuc

SEQ ID NO: 2201715 - RNA, 16 nt, Human
ugcgcccuuaccuucc

SEQ ID NO: 2201716 - RNA, 15 nt, Human
ugcgccgagucuguc

SEQ ID NO: 2201717 - RNA, 23 nt, Human
ugcggugcuaucucccccagccc

SEQ ID NO: 2201718 - RNA, 17 nt, Human
ugcgccgagucugucuc

SEQ ID NO: 2201719 - RNA, 24 nt, Human
ugcgccgagucugucucugucaug

SEQ ID NO: 2201720 - RNA, 21 nt, Human
ugcgguggcucacgccuguaa

SEQ ID NO: 2201721 - RNA, 23 nt, Human
ugccuucuccagacaaaccagaa

SEQ ID NO: 2201722 - RNA, 12 nt, Human
ugccuucugucc

SEQ ID NO: 2201723 - RNA, 17 nt, Human
ugccuucuguccuggug

SEQ ID NO: 2201724 - RNA, 22 nt, Human
ugccuucucaacuccaaacuga

SEQ ID NO: 2201725 - RNA, 22 nt, Human
ugcgcacaaggcugaccaagag

SEQ ID NO: 2201726 - RNA, 13 nt, Human
ugcgauucuggau

SEQ ID NO: 2201727 - RNA, 15 nt, Human
ugcgauucuggauaa

SEQ ID NO: 2201728 - RNA, 23 nt, Human
ugcgauucuggauaaagccacug

SEQ ID NO: 2201729 - RNA, 21 nt, Human
ugccuucuuauucucacucca

SEQ ID NO: 2201730 - RNA, 18 nt, Human
ugccuucuguccuggugu

SEQ ID NO: 2201731 - RNA, 20 nt, Human
ugccuucuguccugguguca

SEQ ID NO: 2201732 - RNA, 13 nt, Human
ugccuucuucacc

SEQ ID NO: 2201733 - RNA, 18 nt, Human
ugcgaucuucagagcagg

SEQ ID NO: 2201734 - RNA, 22 nt, Human
ugcgauggcgugggcugcguga

SEQ ID NO: 2201735 - RNA, 12 nt, Human
ugcgauucugga

SEQ ID NO: 2201736 - RNA, 19 nt, Human
ugccuuccuccugggcccu

SEQ ID NO: 2201737 - RNA, 17 nt, Human
ugccuuccuccugggcc

SEQ ID NO: 2201738 - RNA, 20 nt, Human
ugccuuccuccugggcccuc

SEQ ID NO: 2201739 - RNA, 15 nt, Human
ugccuuccuguuuuu

SEQ ID NO: 2201740 - RNA, 19 nt, Human
ugccuuccuguuuuucaca

SEQ ID NO: 2201741 - RNA, 16 nt, Human
ugccuucccuagcuuu

SEQ ID NO: 2201742 - RNA, 20 nt, Human
ugccuucgcgguggaaggcc

SEQ ID NO: 2201743 - RNA, 12 nt, Human
ugccuuccuugc

SEQ ID NO: 2201744 - RNA, 17 nt, Human
ugccuucucaacuccaa

SEQ ID NO: 2201745 - RNA, 13 nt, Human
ugccuucgcuucu

SEQ ID NO: 2201746 - RNA, 14 nt, Human
ugccuucgcuucuu

SEQ ID NO: 2201747 - RNA, 16 nt, Human
ugccuucgcuucuugc

SEQ ID NO: 2201748 - RNA, 17 nt, Human
ugccuucgcuucuugcc

SEQ ID NO: 2201749 - RNA, 20 nt, Human
ugccuuccacgcugucucca

SEQ ID NO: 2201750 - RNA, 19 nt, Human
ugccuuccacgcugucucc

SEQ ID NO: 2201751 - RNA, 17 nt, Human
ugccuuccacgcugucu

SEQ ID NO: 2201752 - RNA, 14 nt, Human
ugccuuccacgcug

SEQ ID NO: 2201753 - RNA, 22 nt, Human
ugccuuccacgcugucuccaga

SEQ ID NO: 2201754 - RNA, 21 nt, Human
ugccuuccacgcugucuccag

SEQ ID NO: 2201755 - RNA, 23 nt, Human
ugccuuccacgcugucuccagac

SEQ ID NO: 2201756 - RNA, 21 nt, Human
ugccuuccauaauuaugacag

SEQ ID NO: 2201757 - RNA, 17 nt, Human
ugccuuccauaauuaug

SEQ ID NO: 2201758 - RNA, 14 nt, Human
ugccuuccauaauu

SEQ ID NO: 2201759 - RNA, 13 nt, Human
ugccuuccauaau

SEQ ID NO: 2201760 - RNA, 18 nt, Human
ugccuuccagcacccugc

SEQ ID NO: 2201761 - RNA, 16 nt, Human
ugccuuccuccugggc

SEQ ID NO: 2201762 - RNA, 15 nt, Human
ugccuuccuccuggg

SEQ ID NO: 2201763 - RNA, 14 nt, Human
ugccuuccuccugg

SEQ ID NO: 2201764 - RNA, 13 nt, Human
ugccuucccuagc

SEQ ID NO: 2201765 - RNA, 14 nt, Human
ugccuucccuagcu

SEQ ID NO: 2201766 - RNA, 20 nt, Human
ugccuuccaugucggccucu

SEQ ID NO: 2201767 - RNA, 21 nt, Human
ugccuuccaugucggccucua

SEQ ID NO: 2201768 - RNA, 15 nt, Human
ugccuuccccugggc

SEQ ID NO: 2201769 - RNA, 20 nt, Human
ugccuuccccugggcccuga

SEQ ID NO: 2201770 - RNA, 17 nt, Human
ugccuucccuagcuuua

SEQ ID NO: 2201771 - RNA, 13 nt, Human
ugccuucagcucu

SEQ ID NO: 2201772 - RNA, 20 nt, Human
ugccuucaacuaaaaacaaa

SEQ ID NO: 2201773 - RNA, 14 nt, Human
ugccuucaauaaau

SEQ ID NO: 2201774 - RNA, 22 nt, Human
ugccuggccuggcacacaucag

SEQ ID NO: 2201775 - RNA, 16 nt, Human
ugccuuauuaaaguuc

SEQ ID NO: 2201776 - RNA, 23 nt, Human
ugccuuauuagagugucuuucca

SEQ ID NO: 2201777 - RNA, 21 nt, Human
ugccuuauuagagugucuuuc

SEQ ID NO: 2201778 - RNA, 13 nt, Human
ugccuuccacgcu

SEQ ID NO: 2201779 - RNA, 19 nt, Human
ugccuucauuaccuuuuuu

SEQ ID NO: 2201780 - RNA, 12 nt, Human
ugccuucauuug

SEQ ID NO: 2201781 - RNA, 16 nt, Human
ugccuucagauguucu

SEQ ID NO: 2201782 - RNA, 17 nt, Human
ugccuucauuaccuuuu

SEQ ID NO: 2201783 - RNA, 17 nt, Human
ugccuucagcucuacag

SEQ ID NO: 2201784 - RNA, 18 nt, Human
ugccuucagcucuacagc

SEQ ID NO: 2201785 - RNA, 20 nt, Human
ugccuggccaggcagaucug

SEQ ID NO: 2201786 - RNA, 15 nt, Human
ugccuggcaggcugu

SEQ ID NO: 2201787 - RNA, 16 nt, Human
ugccuggccaggcaga

SEQ ID NO: 2201788 - RNA, 14 nt, Human
ugccuggccaggca

SEQ ID NO: 2201789 - RNA, 12 nt, Human
ugccuggccagg

SEQ ID NO: 2201790 - RNA, 23 nt, Human
ugccuggcaggcugucuggccag

SEQ ID NO: 2201791 - RNA, 19 nt, Human
ugccugcacaaacucacca

SEQ ID NO: 2201792 - RNA, 15 nt, Human
ugccugcagagagaa

SEQ ID NO: 2201793 - RNA, 16 nt, Human
ugccugcagagagaag

SEQ ID NO: 2201794 - RNA, 16 nt, Human
ugccuggcccccagcu

SEQ ID NO: 2201795 - RNA, 17 nt, Human
ugccuggcccccugucc

SEQ ID NO: 2201796 - RNA, 16 nt, Human
ugccuggccuggcaca

SEQ ID NO: 2201797 - RNA, 19 nt, Human
ugccuggcccccuguccuc

SEQ ID NO: 2201798 - RNA, 17 nt, Human
ugccuggccuggcacac

SEQ ID NO: 2201799 - RNA, 20 nt, Human
ugccuggccuggcacacauc

SEQ ID NO: 2201800 - RNA, 18 nt, Human
ugccuuauggaacacucu

SEQ ID NO: 2201801 - RNA, 20 nt, Human
ugccuuauggaacacucuga

SEQ ID NO: 2201802 - RNA, 21 nt, Human
ugccuuauggaacacucugag

SEQ ID NO: 2201803 - RNA, 22 nt, Human
ugccuuauggaacacucugaga

SEQ ID NO: 2201804 - RNA, 17 nt, Human
ugccuaggaauucccag

SEQ ID NO: 2201805 - RNA, 12 nt, Human
ugccuacugcau

SEQ ID NO: 2201806 - RNA, 21 nt, Human
ugccuaauaaacauccuucaa

SEQ ID NO: 2201807 - RNA, 18 nt, Human
ugccuaauaaacauccuu

SEQ ID NO: 2201808 - RNA, 17 nt, Human
ugccuaaguggcugcug

SEQ ID NO: 2201809 - RNA, 15 nt, Human
ugccuaaguggcugc

SEQ ID NO: 2201810 - RNA, 14 nt, Human
ugccuaaguggcug

SEQ ID NO: 2201811 - RNA, 18 nt, Human
ugccuagggccuggucca

SEQ ID NO: 2201812 - RNA, 17 nt, Human
ugccuagggccuggucc

SEQ ID NO: 2201813 - RNA, 18 nt, Human
ugccuaggcugaccuuga

SEQ ID NO: 2201814 - RNA, 14 nt, Human
ugccuaggcugacc

SEQ ID NO: 2201815 - RNA, 18 nt, Human
ugccuaggauugugccug

SEQ ID NO: 2201816 - RNA, 17 nt, Human
ugccuccccucuccuuc

SEQ ID NO: 2201817 - RNA, 22 nt, Human
ugcccagaucccagaaggaccu

SEQ ID NO: 2201818 - RNA, 17 nt, Human
ugcccagaucccagaag

SEQ ID NO: 2201819 - RNA, 16 nt, Human
ugcccagaucccagaa

SEQ ID NO: 2201820 - RNA, 11 nt, Human
ugcccagcccc

SEQ ID NO: 2201821 - RNA, 23 nt, Human
ugcccaggcuggcgugcaguggu

SEQ ID NO: 2201822 - RNA, 22 nt, Human
ugcccagggccacucugccucu

SEQ ID NO: 2201823 - RNA, 21 nt, Human
ugcccagggccacucugccuc

SEQ ID NO: 2201824 - RNA, 19 nt, Human
ugcccagggccacucugcc

SEQ ID NO: 2201825 - RNA, 17 nt, Human
ugcccaggcuggucuca

SEQ ID NO: 2201826 - RNA, 16 nt, Human
ugcccagggcucagcc

SEQ ID NO: 2201827 - RNA, 15 nt, Human
ugcccagggcucagc

SEQ ID NO: 2201828 - RNA, 14 nt, Human
ugcccagggcucag

SEQ ID NO: 2201829 - RNA, 11 nt, Human
ugcccagggcu

SEQ ID NO: 2201830 - RNA, 18 nt, Human
ugcccagggcucagccug

SEQ ID NO: 2201831 - RNA, 17 nt, Human
ugcccagggcucagccu

SEQ ID NO: 2201832 - RNA, 19 nt, Human
ugcccagggcucagccugg

SEQ ID NO: 2201833 - RNA, 19 nt, Human
ugccuaaggcugaacuugu

SEQ ID NO: 2201834 - RNA, 14 nt, Human
ugccugcagagaga

SEQ ID NO: 2201835 - RNA, 21 nt, Human
ugccugauucggcugucucag

SEQ ID NO: 2201836 - RNA, 15 nt, Human
ugccugauugccaag

SEQ ID NO: 2201837 - RNA, 20 nt, Human
ugccugauugccaagcucag

SEQ ID NO: 2201838 - RNA, 17 nt, Human
ugccugcacaaacucac

SEQ ID NO: 2201839 - RNA, 15 nt, Human
ugccugauauaaaug

SEQ ID NO: 2201840 - RNA, 22 nt, Human
ugccugauauuucccuccccug

SEQ ID NO: 2201841 - RNA, 18 nt, Human
ugccugauccagccucuc

SEQ ID NO: 2201842 - RNA, 15 nt, Human
ugccugauggaccug

SEQ ID NO: 2201843 - RNA, 18 nt, Human
ugccugauucggcugucu

SEQ ID NO: 2201844 - RNA, 19 nt, Human
ugccugauucggcugucuc

SEQ ID NO: 2201845 - RNA, 20 nt, Human
ugccugauucggcugucuca

SEQ ID NO: 2201846 - RNA, 19 nt, Human
ugccugagucacccaugaa

SEQ ID NO: 2201847 - RNA, 16 nt, Human
ugccugagugccuggc

SEQ ID NO: 2201848 - RNA, 14 nt, Human
ugccugauauaaau

SEQ ID NO: 2201849 - RNA, 14 nt, Human
ugccugagggugga

SEQ ID NO: 2201850 - RNA, 11 nt, Human
ugccugagggu

SEQ ID NO: 2201851 - RNA, 18 nt, Human
ugccugaggguggagacu

SEQ ID NO: 2201852 - RNA, 15 nt, Human
ugccugaggucugua

SEQ ID NO: 2201853 - RNA, 16 nt, Human
ugccugaggucuguac

SEQ ID NO: 2201854 - RNA, 18 nt, Human
ugccugaggucuguacgu

SEQ ID NO: 2201855 - RNA, 19 nt, Human
ugccugaaguuggagugag

SEQ ID NO: 2201856 - RNA, 15 nt, Human
ugccugaauauuugu

SEQ ID NO: 2201857 - RNA, 14 nt, Human
ugccucugugcugu

SEQ ID NO: 2201858 - RNA, 16 nt, Human
ugccucugugcugugu

SEQ ID NO: 2201859 - RNA, 22 nt, Human
ugccugaagucacacagugagu

SEQ ID NO: 2201860 - RNA, 18 nt, Human
ugccugaagucacacagu

SEQ ID NO: 2201861 - RNA, 17 nt, Human
ugccugaagucacacag

SEQ ID NO: 2201862 - RNA, 14 nt, Human
ugccucugggacug

SEQ ID NO: 2201863 - RNA, 13 nt, Human
ugccucugucccc

SEQ ID NO: 2201864 - RNA, 14 nt, Human
ugccucuguccccu

SEQ ID NO: 2201865 - RNA, 15 nt, Human
ugccucuguccccuu

SEQ ID NO: 2201866 - RNA, 11 nt, Human
ugccucugugc

SEQ ID NO: 2201867 - RNA, 12 nt, Human
ugccucugugcu

SEQ ID NO: 2201868 - RNA, 13 nt, Human
ugccucugugcug

SEQ ID NO: 2201869 - RNA, 16 nt, Human
ugccucuguccccuuc

SEQ ID NO: 2201870 - RNA, 17 nt, Human
ugccucuguccccuucu

SEQ ID NO: 2201871 - RNA, 20 nt, Human
ugccucuguccccuucucuc

SEQ ID NO: 2201872 - RNA, 21 nt, Human
ugccucuguccccuucucuca

SEQ ID NO: 2201873 - RNA, 16 nt, Human
ugccuccuuugugagg

SEQ ID NO: 2201874 - RNA, 18 nt, Human
ugccuccccucuccuucc

SEQ ID NO: 2201875 - RNA, 17 nt, Human
ugccuccuuccaccucc

SEQ ID NO: 2201876 - RNA, 19 nt, Human
ugccuccuuccaccucccu

SEQ ID NO: 2201877 - RNA, 17 nt, Human
ugccuccuuugugagga

SEQ ID NO: 2201878 - RNA, 18 nt, Human
ugccuccuuugugaggaa

SEQ ID NO: 2201879 - RNA, 13 nt, Human
ugcagccagccca

SEQ ID NO: 2201880 - RNA, 12 nt, Human
ugcagccagccc

SEQ ID NO: 2201881 - RNA, 13 nt, Human
ugcagccagaccu

SEQ ID NO: 2201882 - RNA, 14 nt, Human
ugcagccagaccua

SEQ ID NO: 2201883 - RNA, 21 nt, Human
ugcagccagaccuauuccucc

SEQ ID NO: 2201884 - RNA, 23 nt, Human
ugcagccagaccuauuccuccug

SEQ ID NO: 2201885 - RNA, 23 nt, Human
ugcagccagcccagcccagcugg

SEQ ID NO: 2201886 - RNA, 21 nt, Human
ugcagccagcccagcccagcu

SEQ ID NO: 2201887 - RNA, 19 nt, Human
ugcagccagcccagcccag

SEQ ID NO: 2201888 - RNA, 17 nt, Human
ugcagccagcccagccc

SEQ ID NO: 2201889 - RNA, 16 nt, Human
ugcagccagcccagcc

SEQ ID NO: 2201890 - RNA, 15 nt, Human
ugcagccagcccagc

SEQ ID NO: 2201891 - RNA, 14 nt, Human
ugcagccagcccag

SEQ ID NO: 2201892 - RNA, 13 nt, Human
ugcagcccaugcc

SEQ ID NO: 2201893 - RNA, 22 nt, Human
ugcagccagcccagcccagcug

SEQ ID NO: 2201894 - RNA, 12 nt, Human
ugcagcccaugc

SEQ ID NO: 2201895 - RNA, 13 nt, Human
ugcagcuuuaaaa

SEQ ID NO: 2201896 - RNA, 16 nt, Human
ugcagcaauaaagcag

SEQ ID NO: 2201897 - RNA, 17 nt, Human
ugcagcauguugcugag

SEQ ID NO: 2201898 - RNA, 20 nt, Human
ugcagaguuuccaaaaccag

SEQ ID NO: 2201899 - RNA, 18 nt, Human
ugcagcauguugcugagg

SEQ ID NO: 2201900 - RNA, 20 nt, Human
ugcagcauguugcugaggag

SEQ ID NO: 2201901 - RNA, 21 nt, Human
ugcagcauguugcugaggagu

SEQ ID NO: 2201902 - RNA, 23 nt, Human
ugcagcauguugcugaggaguga

SEQ ID NO: 2201903 - RNA, 15 nt, Human
ugcagcaauaaagca

SEQ ID NO: 2201904 - RNA, 14 nt, Human
ugcagcaauaaagc

SEQ ID NO: 2201905 - RNA, 14 nt, Human
ugcaggaccucagg

SEQ ID NO: 2201906 - RNA, 16 nt, Human
ugcagcuuuacaugca

SEQ ID NO: 2201907 - RNA, 22 nt, Human
ugcagcuuuaaaaaauuaaucu

SEQ ID NO: 2201908 - RNA, 17 nt, Human
ugcaggaaauggcugug

SEQ ID NO: 2201909 - RNA, 15 nt, Human
ugcagcuuuacaugc

SEQ ID NO: 2201910 - RNA, 16 nt, Human
ugcaggaccucaggug

SEQ ID NO: 2201911 - RNA, 15 nt, Human
ugcaggaccucaggu

SEQ ID NO: 2201912 - RNA, 17 nt, Human
ugcaggaauaaggccuu

SEQ ID NO: 2201913 - RNA, 16 nt, Human
ugcaggaauaaggccu

SEQ ID NO: 2201914 - RNA, 15 nt, Human
ugcaggaccugccug

SEQ ID NO: 2201915 - RNA, 18 nt, Human
ugcaggaccucaggugag

SEQ ID NO: 2201916 - RNA, 15 nt, Human
ugcagagugcccaga

SEQ ID NO: 2201917 - RNA, 14 nt, Human
ugcagagugcccag

SEQ ID NO: 2201918 - RNA, 17 nt, Human
ugcagagucagcagaac

SEQ ID NO: 2201919 - RNA, 17 nt, Human
ugcagaguccugcacag

SEQ ID NO: 2201920 - RNA, 15 nt, Human
ugcagagucagcaga

SEQ ID NO: 2201921 - RNA, 14 nt, Human
ugcagagucagcag

SEQ ID NO: 2201922 - RNA, 13 nt, Human
ugcagagucagca

SEQ ID NO: 2201923 - RNA, 16 nt, Human
ugcagauaaacaguag

SEQ ID NO: 2201924 - RNA, 18 nt, Human
ugcagagugcccagaacu

SEQ ID NO: 2201925 - RNA, 17 nt, Human
ugcagauaaacaguagu

SEQ ID NO: 2201926 - RNA, 15 nt, Human
ugcacuuuguucugg

SEQ ID NO: 2201927 - RNA, 18 nt, Human
ugcacuuuguucuggcuc

SEQ ID NO: 2201928 - RNA, 19 nt, Human
ugcacuuuguucuggcucu

SEQ ID NO: 2201929 - RNA, 20 nt, Human
ugcacuuuguucuggcucuu

SEQ ID NO: 2201930 - RNA, 17 nt, Human
ugcacuuggccucugga

SEQ ID NO: 2201931 - RNA, 15 nt, Human
ugcacuuggccucug

SEQ ID NO: 2201932 - RNA, 14 nt, Human
ugcacuuggccucu

SEQ ID NO: 2201933 - RNA, 16 nt, Human
ugcacuuggcugcaua

SEQ ID NO: 2201934 - RNA, 17 nt, Human
ugcacuugugauuauuu

SEQ ID NO: 2201935 - RNA, 20 nt, Human
ugcacuugugauuauuuauu

SEQ ID NO: 2201936 - RNA, 21 nt, Human
ugcacuugcagacucuacaga

SEQ ID NO: 2201937 - RNA, 16 nt, Human
ugcacuugcagacucu

SEQ ID NO: 2201938 - RNA, 18 nt, Human
ugcaccugcauccguagu

SEQ ID NO: 2201939 - RNA, 18 nt, Human
ugcacggugggccuugcu

SEQ ID NO: 2201940 - RNA, 22 nt, Human
ugcaccugccagccuggcuucu

SEQ ID NO: 2201941 - RNA, 23 nt, Human
ugcacggugggccuugcugggga

SEQ ID NO: 2201942 - RNA, 21 nt, Human
ugcacggugggccuugcuggg

SEQ ID NO: 2201943 - RNA, 16 nt, Human
ugcacguacacacaca

SEQ ID NO: 2201944 - RNA, 16 nt, Human
ugaaggcuggguucug

SEQ ID NO: 2201945 - RNA, 19 nt, Human
ugaagucucugaagugaaa

SEQ ID NO: 2201946 - RNA, 21 nt, Human
ugaagucgucuuaacucacca

SEQ ID NO: 2201947 - RNA, 16 nt, Human
ugaagucguugugagg

SEQ ID NO: 2201948 - RNA, 17 nt, Human
ugaagucguugugaggg

SEQ ID NO: 2201949 - RNA, 11 nt, Human
ugaagucugaa

SEQ ID NO: 2201950 - RNA, 12 nt, Human
ugaagucugaaa

SEQ ID NO: 2201951 - RNA, 13 nt, Human
ugaagucugaaau

SEQ ID NO: 2201952 - RNA, 17 nt, Human
ugaagucuuuguacaga

SEQ ID NO: 2201953 - RNA, 20 nt, Human
ugaagucuuuguacagacaa

SEQ ID NO: 2201954 - RNA, 23 nt, Human
ugcacacuugugugugggcugug

SEQ ID NO: 2201955 - RNA, 14 nt, Human
ugcacacuuugcca

SEQ ID NO: 2201956 - RNA, 22 nt, Human
ugcacacuuugccauauuuuca

SEQ ID NO: 2201957 - RNA, 21 nt, Human
ugcacacuugugugugggcug

SEQ ID NO: 2201958 - RNA, 14 nt, Human
ugaagucugaaauu

SEQ ID NO: 2201959 - RNA, 22 nt, Human
ugaagucuuuguacagacaaca

SEQ ID NO: 2201960 - RNA, 19 nt, Human
ugcacagacgucccuccac

SEQ ID NO: 2201961 - RNA, 12 nt, Human
ugcacagagcuc

SEQ ID NO: 2201962 - RNA, 13 nt, Human
ugcacagagcucu

SEQ ID NO: 2201963 - RNA, 14 nt, Human
ugcacagagcucuc

SEQ ID NO: 2201964 - RNA, 16 nt, Human
ugcacagagcucucca

SEQ ID NO: 2201965 - RNA, 18 nt, Human
ugcacagagcucuccagc

SEQ ID NO: 2201966 - RNA, 20 nt, Human
ugcacagagcucuccagcuc

SEQ ID NO: 2201967 - RNA, 22 nt, Human
ugcacagaguuguuacauuuuu

SEQ ID NO: 2201968 - RNA, 21 nt, Human
ugcacagaguuguuacauuuu

SEQ ID NO: 2201969 - RNA, 23 nt, Human
ugcacagauggauuugccugugc

SEQ ID NO: 2201970 - RNA, 19 nt, Human
ugcacagauggauuugccu

SEQ ID NO: 2201971 - RNA, 19 nt, Human
ugcacagagcucuccagcu

SEQ ID NO: 2201972 - RNA, 23 nt, Human
ugcacagaguuguuacauuuuua

SEQ ID NO: 2201973 - RNA, 17 nt, Human
ugcacagcuaacaugga

SEQ ID NO: 2201974 - RNA, 16 nt, Human
ugcacagcggccccug

SEQ ID NO: 2201975 - RNA, 18 nt, Human
ugcacagcggccccugca

SEQ ID NO: 2201976 - RNA, 17 nt, Human
ugcacagcguccugucc

SEQ ID NO: 2201977 - RNA, 23 nt, Human
ugcacagcuaacauggaaguacu

SEQ ID NO: 2201978 - RNA, 18 nt, Human
ugcacagcuaacauggaa

SEQ ID NO: 2201979 - RNA, 20 nt, Human
ugcacagcuaacauggaagu

SEQ ID NO: 2201980 - RNA, 18 nt, Human
ugcacagugcaucucagc

SEQ ID NO: 2201981 - RNA, 15 nt, Human
ugcacagggcagcug

SEQ ID NO: 2201982 - RNA, 16 nt, Human
ugcacagggcagcugg

SEQ ID NO: 2201983 - RNA, 17 nt, Human
ugcacagggcagcuggg

SEQ ID NO: 2201984 - RNA, 18 nt, Human
ugcacagggcagcugggc

SEQ ID NO: 2201985 - RNA, 12 nt, Human
ugcacagggcag

SEQ ID NO: 2201986 - RNA, 14 nt, Human
ugcacagggagacg

SEQ ID NO: 2201987 - RNA, 16 nt, Human
ugcacagggagacgua

SEQ ID NO: 2201988 - RNA, 19 nt, Human
ugcacagugcaucucagcc

SEQ ID NO: 2201989 - RNA, 20 nt, Human
ugcacagugcaucucagccc

SEQ ID NO: 2201990 - RNA, 15 nt, Human
ugcacauacuugaga

SEQ ID NO: 2201991 - RNA, 22 nt, Human
ugcacauagcuaucaagugugc

SEQ ID NO: 2201992 - RNA, 21 nt, Human
ugcacauacgcaccacaucuc

SEQ ID NO: 2201993 - RNA, 24 nt, Human
ugcacaguuuucuggcuggagccu

SEQ ID NO: 2201994 - RNA, 22 nt, Human
ugcacaguuagcaaacuuugua

SEQ ID NO: 2201995 - RNA, 23 nt, Human
ugcacaguuuucuggcuggagcc

SEQ ID NO: 2201996 - RNA, 19 nt, Human
ugcacauauggacucugca

SEQ ID NO: 2201997 - RNA, 14 nt, Human
ugcacaucucugcu

SEQ ID NO: 2201998 - RNA, 15 nt, Human
ugcacaucucugcuu

SEQ ID NO: 2201999 - RNA, 19 nt, Human
ugcacaucugugucuuguu

SEQ ID NO: 2202000 - RNA, 18 nt, Human
ugcacaucugugucuugu

SEQ ID NO: 2202001 - RNA, 16 nt, Human
ugcacaucugugucuu

SEQ ID NO: 2202002 - RNA, 15 nt, Human
ugcacaucugugucu

SEQ ID NO: 2202003 - RNA, 14 nt, Human
ugcacauauggacu

SEQ ID NO: 2202004 - RNA, 15 nt, Human
ugcacauauggacuc

SEQ ID NO: 2202005 - RNA, 17 nt, Human
ugcacauauggacucug

SEQ ID NO: 2202006 - RNA, 18 nt, Human
ugcacauauggacucugc

SEQ ID NO: 2202007 - RNA, 15 nt, Human
ugcacaucaaaauau

SEQ ID NO: 2202008 - RNA, 20 nt, Human
ugcaccugccagccuggcuu

SEQ ID NO: 2202009 - RNA, 19 nt, Human
ugcaccugccagccuggcu

SEQ ID NO: 2202010 - RNA, 18 nt, Human
ugcaccugccagccuggc

SEQ ID NO: 2202011 - RNA, 17 nt, Human
ugcaccugccagccugg

SEQ ID NO: 2202012 - RNA, 16 nt, Human
ugcaccugccagccug

SEQ ID NO: 2202013 - RNA, 15 nt, Human
ugcaccugccagccu

SEQ ID NO: 2202014 - RNA, 11 nt, Human
ugcaccugcau

SEQ ID NO: 2202015 - RNA, 20 nt, Human
ugcaccuccccccacugcag

SEQ ID NO: 2202016 - RNA, 19 nt, Human
ugcaccuccccccacugca

SEQ ID NO: 2202017 - RNA, 18 nt, Human
ugcaccuccccccacugc

SEQ ID NO: 2202018 - RNA, 17 nt, Human
ugcaccuccccccacug

SEQ ID NO: 2202019 - RNA, 16 nt, Human
ugcaccuccccccacu

SEQ ID NO: 2202020 - RNA, 15 nt, Human
ugcaccuccccccac

SEQ ID NO: 2202021 - RNA, 14 nt, Human
ugcaccucccccca

SEQ ID NO: 2202022 - RNA, 20 nt, Human
ugccaaaaaaagacagggcu

SEQ ID NO: 2202023 - RNA, 17 nt, Human
ugcauuacagagaggag

SEQ ID NO: 2202024 - RNA, 16 nt, Human
ugcauuacagagagga

SEQ ID NO: 2202025 - RNA, 23 nt, Human
ugcauuuuguuugguauuguauu

SEQ ID NO: 2202026 - RNA, 17 nt, Human
ugcauuuuugugaaaug

SEQ ID NO: 2202027 - RNA, 16 nt, Human
ugcauuuuugugaaau

SEQ ID NO: 2202028 - RNA, 14 nt, Human
ugcauuuuugugaa

SEQ ID NO: 2202029 - RNA, 18 nt, Human
ugcauuacagagaggaga

SEQ ID NO: 2202030 - RNA, 19 nt, Human
ugcauuuuugugaaaugaa

SEQ ID NO: 2202031 - RNA, 23 nt, Human
ugccaaccuguaauaaauaugag

SEQ ID NO: 2202032 - RNA, 21 nt, Human
ugccaaccuguaauaaauaug

SEQ ID NO: 2202033 - RNA, 22 nt, Human
ugccaaccuguaauaaauauga

SEQ ID NO: 2202034 - RNA, 16 nt, Human
ugccaaccucuggagc

SEQ ID NO: 2202035 - RNA, 18 nt, Human
ugccaaccuguaauaaau

SEQ ID NO: 2202036 - RNA, 19 nt, Human
ugccaaccuguaauaaaua

SEQ ID NO: 2202037 - RNA, 20 nt, Human
ugccaaccuguaauaaauau

SEQ ID NO: 2202038 - RNA, 21 nt, Human
ugccaacuucuucagagcuga

SEQ ID NO: 2202039 - RNA, 23 nt, Human
ugccaacuguuguaacuaggcuc

SEQ ID NO: 2202040 - RNA, 14 nt, Human
ugccaagacaugau

SEQ ID NO: 2202041 - RNA, 21 nt, Human
ugcauuauauuuauuacugua

SEQ ID NO: 2202042 - RNA, 20 nt, Human
ugcauuauauuuauuacugu

SEQ ID NO: 2202043 - RNA, 15 nt, Human
ugcauuacagagagg

SEQ ID NO: 2202044 - RNA, 12 nt, Human
ugcauuacagag

SEQ ID NO: 2202045 - RNA, 11 nt, Human
ugcauuacaga

SEQ ID NO: 2202046 - RNA, 21 nt, Human
ugcauuaaauucacaaacuuu

SEQ ID NO: 2202047 - RNA, 20 nt, Human
ugcauuaaauucacaaacuu

SEQ ID NO: 2202048 - RNA, 15 nt, Human
ugcauuauauuuauu

SEQ ID NO: 2202049 - RNA, 14 nt, Human
ugcaugugugugcu

SEQ ID NO: 2202050 - RNA, 13 nt, Human
ugcaugugugugc

SEQ ID NO: 2202051 - RNA, 12 nt, Human
ugcaugugugcg

SEQ ID NO: 2202052 - RNA, 11 nt, Human
ugcaugugugu

SEQ ID NO: 2202053 - RNA, 19 nt, Human
ugcauguuacauaagauaa

SEQ ID NO: 2202054 - RNA, 19 nt, Human
ugcauuaaauucacaaacu

SEQ ID NO: 2202055 - RNA, 17 nt, Human
ugcauuaaauucacaaa

SEQ ID NO: 2202056 - RNA, 16 nt, Human
ugcauuaaauucacaa

SEQ ID NO: 2202057 - RNA, 15 nt, Human
ugcauuaaauucaca

SEQ ID NO: 2202058 - RNA, 14 nt, Human
ugcauuaaauucac

SEQ ID NO: 2202059 - RNA, 13 nt, Human
ugcauuaaauuca

SEQ ID NO: 2202060 - RNA, 15 nt, Human
ugcaucguuucaucu

SEQ ID NO: 2202061 - RNA, 18 nt, Human
ugcaucgagucaaaacuc

SEQ ID NO: 2202062 - RNA, 22 nt, Human
ugcaucgagucaaaacucaaau

SEQ ID NO: 2202063 - RNA, 17 nt, Human
ugcaugugacucugaag

SEQ ID NO: 2202064 - RNA, 20 nt, Human
ugcaugugacucugaagcug

SEQ ID NO: 2202065 - RNA, 16 nt, Human
ugcaugugacucugaa

SEQ ID NO: 2202066 - RNA, 15 nt, Human
ugcaugugacucuga

SEQ ID NO: 2202067 - RNA, 14 nt, Human
ugcaugugacucug

SEQ ID NO: 2202068 - RNA, 13 nt, Human
ugcaugugacucu

SEQ ID NO: 2202069 - RNA, 16 nt, Human
ugcauguccuguaaag

SEQ ID NO: 2202070 - RNA, 14 nt, Human
ugcaucguggagac

SEQ ID NO: 2202071 - RNA, 15 nt, Human
ugcaucguggagaca

SEQ ID NO: 2202072 - RNA, 21 nt, Human
ugcaugucgugaccaacuaga

SEQ ID NO: 2202073 - RNA, 12 nt, Human
ugcaugugaaga

SEQ ID NO: 2202074 - RNA, 16 nt, Human
ugcaugugaagaaagg

SEQ ID NO: 2202075 - RNA, 18 nt, Human
ugcauccauuccucaggg

SEQ ID NO: 2202076 - RNA, 17 nt, Human
ugcauccauuccucagg

SEQ ID NO: 2202077 - RNA, 16 nt, Human
ugcauccauuccucag

SEQ ID NO: 2202078 - RNA, 14 nt, Human
ugcauccauuccuc

SEQ ID NO: 2202079 - RNA, 18 nt, Human
ugcauccuccgccucccg

SEQ ID NO: 2202080 - RNA, 21 nt, Human
ugcauccuccgccucccgggu

SEQ ID NO: 2202081 - RNA, 16 nt, Human
ugcauccaaaggugcu

SEQ ID NO: 2202082 - RNA, 18 nt, Human
ugcauccaaaggugcuca

SEQ ID NO: 2202083 - RNA, 13 nt, Human
ugcauccaacucc

SEQ ID NO: 2202084 - RNA, 16 nt, Human
ugcauccaacuccagg

SEQ ID NO: 2202085 - RNA, 17 nt, Human
ugcauccaacuccagga

SEQ ID NO: 2202086 - RNA, 23 nt, Human
ugcaggaguuaaaaagggcaggg

SEQ ID NO: 2202087 - RNA, 16 nt, Human
ugcaggcagccaggcc

SEQ ID NO: 2202088 - RNA, 22 nt, Human
ugcaggagcaguaucaugaagc

SEQ ID NO: 2202089 - RNA, 18 nt, Human
ugcaggacuugagaagac

SEQ ID NO: 2202090 - RNA, 15 nt, Human
ugcaggacuugagaa

SEQ ID NO: 2202091 - RNA, 13 nt, Human
ugcaggacuugag

SEQ ID NO: 2202092 - RNA, 19 nt, Human
ugcaggaccugccuguagc

SEQ ID NO: 2202093 - RNA, 18 nt, Human
ugcaggaccugccuguag

SEQ ID NO: 2202094 - RNA, 17 nt, Human
ugcaggaccugccugua

SEQ ID NO: 2202095 - RNA, 16 nt, Human
ugcaggaccugccugu

SEQ ID NO: 2202096 - RNA, 17 nt, Human
ugcaggcagccaggcca

SEQ ID NO: 2202097 - RNA, 18 nt, Human
ugcaggcagccaggccac

SEQ ID NO: 2202098 - RNA, 19 nt, Human
ugcaggcagccaggccaca

SEQ ID NO: 2202099 - RNA, 22 nt, Human
ugcaucagcugcugaaacaaca

SEQ ID NO: 2202100 - RNA, 18 nt, Human
ugccaguaacgcgucuuc

SEQ ID NO: 2202101 - RNA, 21 nt, Human
ugccaguaacgcgucuuccug

SEQ ID NO: 2202102 - RNA, 24 nt, Human
ugccagguuuuuggucugacccac

SEQ ID NO: 2202103 - RNA, 22 nt, Human
ugccaguaggcucaacuaggga

SEQ ID NO: 2202104 - RNA, 22 nt, Human
ugccaguaacgcgucuuccuga

SEQ ID NO: 2202105 - RNA, 23 nt, Human
ugccaguaacgcgucuuccugag

SEQ ID NO: 2202106 - RNA, 14 nt, Human
ugccagucaccccg

SEQ ID NO: 2202107 - RNA, 11 nt, Human
ugccauccuca

SEQ ID NO: 2202108 - RNA, 19 nt, Human
ugccauccucaaacacugc

SEQ ID NO: 2202109 - RNA, 23 nt, Human
ugccauccucaaacacugcaggc

SEQ ID NO: 2202110 - RNA, 15 nt, Human
ugccaagcacagugc

SEQ ID NO: 2202111 - RNA, 17 nt, Human
ugccacccaccucccug

SEQ ID NO: 2202112 - RNA, 19 nt, Human
ugccacccaccucccugcc

SEQ ID NO: 2202113 - RNA, 18 nt, Human
ugccacccaccucccugc

SEQ ID NO: 2202114 - RNA, 21 nt, Human
ugccacccaccucccugccuc

SEQ ID NO: 2202115 - RNA, 20 nt, Human
ugccacccaccucccugccu

SEQ ID NO: 2202116 - RNA, 22 nt, Human
ugccacccaccucccugccucc

SEQ ID NO: 2202117 - RNA, 12 nt, Human
ugccacccuacc

SEQ ID NO: 2202118 - RNA, 23 nt, Human
ugccaccccacccucccuggagu

SEQ ID NO: 2202119 - RNA, 14 nt, Human
ugccaccccacccu

SEQ ID NO: 2202120 - RNA, 15 nt, Human
ugccaccccacccuc

SEQ ID NO: 2202121 - RNA, 16 nt, Human
ugccaccccacccucc

SEQ ID NO: 2202122 - RNA, 17 nt, Human
ugccaccccacccuccc

SEQ ID NO: 2202123 - RNA, 19 nt, Human
ugccaccccacccucccug

SEQ ID NO: 2202124 - RNA, 20 nt, Human
ugccaccccacccucccugg

SEQ ID NO: 2202125 - RNA, 21 nt, Human
ugccaccccacccucccugga

SEQ ID NO: 2202126 - RNA, 22 nt, Human
ugccaccccacccucccuggag

SEQ ID NO: 2202127 - RNA, 12 nt, Human
ugccagggagcu

SEQ ID NO: 2202128 - RNA, 11 nt, Human
ugccagggagc

SEQ ID NO: 2202129 - RNA, 15 nt, Human
ugccagggagacaga

SEQ ID NO: 2202130 - RNA, 18 nt, Human
ugccagggagacagagcu

SEQ ID NO: 2202131 - RNA, 22 nt, Human
ugccagggcaaugaugaaugag

SEQ ID NO: 2202132 - RNA, 17 nt, Human
ugccagggcaaugauga

SEQ ID NO: 2202133 - RNA, 12 nt, Human
ugccagggcagg

SEQ ID NO: 2202134 - RNA, 11 nt, Human
ugccagggcag

SEQ ID NO: 2202135 - RNA, 11 nt, Human
ugccagggaca

SEQ ID NO: 2202136 - RNA, 22 nt, Human
ugccagggacagaggggguggc

SEQ ID NO: 2202137 - RNA, 18 nt, Human
ugccauggacagaagaag

SEQ ID NO: 2202138 - RNA, 20 nt, Human
ugccauggacagaagaaggc

SEQ ID NO: 2202139 - RNA, 16 nt, Human
ugccaugcagggccuc

SEQ ID NO: 2202140 - RNA, 13 nt, Human
ugccaucuuccca

SEQ ID NO: 2202141 - RNA, 18 nt, Human
ugccaucugugggcacgc

SEQ ID NO: 2202142 - RNA, 16 nt, Human
ugccaucugugggcac

SEQ ID NO: 2202143 - RNA, 22 nt, Human
ugccaucugcgugacaauaaaa

SEQ ID NO: 2202144 - RNA, 23 nt, Human
ugccauggacagaagaaggcagc

SEQ ID NO: 2202145 - RNA, 16 nt, Human
ugccauggaggcacac

SEQ ID NO: 2202146 - RNA, 17 nt, Human
ugccauggaggcacaca

SEQ ID NO: 2202147 - RNA, 18 nt, Human
ugccauggaggcacacag

SEQ ID NO: 2202148 - RNA, 23 nt, Human
ugccauggaggcacacagcugca

SEQ ID NO: 2202149 - RNA, 17 nt, Human
ugccauggcgugucccu

SEQ ID NO: 2202150 - RNA, 18 nt, Human
ugccaugggcuucacugu

SEQ ID NO: 2202151 - RNA, 19 nt, Human
ugccaugggcuucacugua

SEQ ID NO: 2202152 - RNA, 20 nt, Human
ugccaugggcuucacuguau

SEQ ID NO: 2202153 - RNA, 23 nt, Human
ugcccaccaacaucccauugccc

SEQ ID NO: 2202154 - RNA, 17 nt, Human
ugcccaccaacauccca

SEQ ID NO: 2202155 - RNA, 12 nt, Human
ugcccaccccac

SEQ ID NO: 2202156 - RNA, 13 nt, Human
ugcccaccccacc

SEQ ID NO: 2202157 - RNA, 23 nt, Human
ugcccacaucccaggcuucaccc

SEQ ID NO: 2202158 - RNA, 21 nt, Human
ugcccacaggccgcccugcgg

SEQ ID NO: 2202159 - RNA, 22 nt, Human
ugccaugggcuucacuguauaa

SEQ ID NO: 2202160 - RNA, 23 nt, Human
ugccaugggcuucacuguauaaa

SEQ ID NO: 2202161 - RNA, 16 nt, Human
ugcccacaucccaggc

SEQ ID NO: 2202162 - RNA, 19 nt, Human
ugcccacccguggagaugg

SEQ ID NO: 2202163 - RNA, 15 nt, Human
ugcccagaguugcug

SEQ ID NO: 2202164 - RNA, 23 nt, Human
ugcccagagggcccaggcaggcc

SEQ ID NO: 2202165 - RNA, 21 nt, Human
ugcccagagggcccaggcagg

SEQ ID NO: 2202166 - RNA, 20 nt, Human
ugcccagagggcccaggcag

SEQ ID NO: 2202167 - RNA, 10 nt, Human
ugcccagccc

SEQ ID NO: 2202168 - RNA, 20 nt, Human
ugcccacccguggagauggg

SEQ ID NO: 2202169 - RNA, 18 nt, Human
ugcccaccuggccucugc

SEQ ID NO: 2202170 - RNA, 15 nt, Human
ugcccaccuggccuc

SEQ ID NO: 2202171 - RNA, 17 nt, Human
ugcccaccuggccucug

SEQ ID NO: 2202172 - RNA, 16 nt, Human
ugcccaccccaccccc

SEQ ID NO: 2202173 - RNA, 17 nt, Human
ugcccaccccaccccca

SEQ ID NO: 2202174 - RNA, 19 nt, Human
ugcccaccccacccccacc

SEQ ID NO: 2202175 - RNA, 11 nt, Human
ugcccaccccc

SEQ ID NO: 2202176 - RNA, 13 nt, Human
ugcccacccccuc

SEQ ID NO: 2202177 - RNA, 14 nt, Human
ugcccacccccuca

SEQ ID NO: 2202178 - RNA, 15 nt, Human
ugcccacccccucaa

SEQ ID NO: 2202179 - RNA, 18 nt, Human
ugcccacccccucaagcc

SEQ ID NO: 2202180 - RNA, 24 nt, Human
ugcccacccccucaagccaauccc

SEQ ID NO: 2202181 - RNA, 13 nt, Human
ugcccacccccug

SEQ ID NO: 2202182 - RNA, 14 nt, Human
ugcccacccccugc

SEQ ID NO: 2202183 - RNA, 15 nt, Human
ugcccacccccugcc

SEQ ID NO: 2202184 - RNA, 16 nt, Human
ugcccacccccugccc

SEQ ID NO: 2202185 - RNA, 18 nt, Human
ugcccacccccugcccug

SEQ ID NO: 2202186 - RNA, 19 nt, Human
ugcccacccccugcccugc

SEQ ID NO: 2202187 - RNA, 20 nt, Human
ugcccacccccugcccugca

SEQ ID NO: 2202188 - RNA, 24 nt, Human
uggccagagcugggaggcauggcc

SEQ ID NO: 2202189 - RNA, 23 nt, Human
uggccuugcagcacucacacagg

SEQ ID NO: 2202190 - RNA, 20 nt, Human
uggccuuucauauuuuagcu

SEQ ID NO: 2202191 - RNA, 14 nt, Human
uggccagaggcuug

SEQ ID NO: 2202192 - RNA, 20 nt, Human
uggccagagcugggaggcau

SEQ ID NO: 2202193 - RNA, 23 nt, Human
uggccagagcugggaggcauggc

SEQ ID NO: 2202194 - RNA, 14 nt, Human
uggccagagcuggg

SEQ ID NO: 2202195 - RNA, 15 nt, Human
uggccagagcuggga

SEQ ID NO: 2202196 - RNA, 17 nt, Human
uggccagagcugggagg

SEQ ID NO: 2202197 - RNA, 18 nt, Human
uggccagagcugggaggc

SEQ ID NO: 2202198 - RNA, 15 nt, Human
uggccagaugcacca

SEQ ID NO: 2202199 - RNA, 18 nt, Human
uggccuucggccuccauc

SEQ ID NO: 2202200 - RNA, 17 nt, Human
uggccuucggccuccau

SEQ ID NO: 2202201 - RNA, 22 nt, Human
uggcgucugucuucaagggcuu

SEQ ID NO: 2202202 - RNA, 20 nt, Human
uggcgucugucuucaagggc

SEQ ID NO: 2202203 - RNA, 17 nt, Human
uggcgucugucuucaag

SEQ ID NO: 2202204 - RNA, 15 nt, Human
uggcgucugucuuca

SEQ ID NO: 2202205 - RNA, 13 nt, Human
uggcgucugucuu

SEQ ID NO: 2202206 - RNA, 22 nt, Human
uggcgugcaguggugcgaucug

SEQ ID NO: 2202207 - RNA, 15 nt, Human
uggcgcugccccugg

SEQ ID NO: 2202208 - RNA, 14 nt, Human
uggcgcugccccug

SEQ ID NO: 2202209 - RNA, 13 nt, Human
uggcgcuaggcau

SEQ ID NO: 2202210 - RNA, 18 nt, Human
uggcgccgucuccagggg

SEQ ID NO: 2202211 - RNA, 15 nt, Human
uggcgccgucuccag

SEQ ID NO: 2202212 - RNA, 17 nt, Human
uggcgccgucuccaggg

SEQ ID NO: 2202213 - RNA, 15 nt, Human
uggcgcagugccucu

SEQ ID NO: 2202214 - RNA, 17 nt, Human
uggcgcagugccucugg

SEQ ID NO: 2202215 - RNA, 18 nt, Human
uggcgcagugccucuggu

SEQ ID NO: 2202216 - RNA, 13 nt, Human
uggcgcagugccu

SEQ ID NO: 2202217 - RNA, 17 nt, Human
uggcgagaggaggggcc

SEQ ID NO: 2202218 - RNA, 13 nt, Human
uggccuuuuccua

SEQ ID NO: 2202219 - RNA, 16 nt, Human
uggccuuuuccuauuu

SEQ ID NO: 2202220 - RNA, 18 nt, Human
uggcgugucccucucgga

SEQ ID NO: 2202221 - RNA, 20 nt, Human
uggcucagguggggucacuc

SEQ ID NO: 2202222 - RNA, 22 nt, Human
uggcucauauuccugcagccug

SEQ ID NO: 2202223 - RNA, 21 nt, Human
uggcucauauuccugcagccu

SEQ ID NO: 2202224 - RNA, 19 nt, Human
uggcucauauuccugcagc

SEQ ID NO: 2202225 - RNA, 22 nt, Human
uggcucagguggggucacucug

SEQ ID NO: 2202226 - RNA, 23 nt, Human
uggcuccugaggggcaucugccc

SEQ ID NO: 2202227 - RNA, 21 nt, Human
uggcuccugaggggcaucugc

SEQ ID NO: 2202228 - RNA, 20 nt, Human
uggcuccaaacccucgaggc

SEQ ID NO: 2202229 - RNA, 18 nt, Human
uggcuccaaacccucgag

SEQ ID NO: 2202230 - RNA, 16 nt, Human
uggcuccaaacccucg

SEQ ID NO: 2202231 - RNA, 19 nt, Human
uggcuccuucccaucgcug

SEQ ID NO: 2202232 - RNA, 17 nt, Human
uggcuccuucccaucgc

SEQ ID NO: 2202233 - RNA, 18 nt, Human
uggcucgaaucucugugc

SEQ ID NO: 2202234 - RNA, 19 nt, Human
uggcucgaaucucugugcc

SEQ ID NO: 2202235 - RNA, 20 nt, Human
uggcucgaaucucugugccu

SEQ ID NO: 2202236 - RNA, 16 nt, Human
uggcucucagaaggua

SEQ ID NO: 2202237 - RNA, 13 nt, Human
uggcucuccaagu

SEQ ID NO: 2202238 - RNA, 14 nt, Human
uggcucuggagaca

SEQ ID NO: 2202239 - RNA, 19 nt, Human
uggcucucauugacuuccu

SEQ ID NO: 2202240 - RNA, 21 nt, Human
uggcucuggagacagccccag

SEQ ID NO: 2202241 - RNA, 21 nt, Human
uggcucgaaucucugugccuu

SEQ ID NO: 2202242 - RNA, 13 nt, Human
uggcucuuccagg

SEQ ID NO: 2202243 - RNA, 15 nt, Human
uggcucuuccaggcu

SEQ ID NO: 2202244 - RNA, 22 nt, Human
uggcucuggagacagccccaga

SEQ ID NO: 2202245 - RNA, 16 nt, Human
uggcugggcccagaag

SEQ ID NO: 2202246 - RNA, 16 nt, Human
uggcucuuccaggcug

SEQ ID NO: 2202247 - RNA, 17 nt, Human
uggcugggggcaggagg

SEQ ID NO: 2202248 - RNA, 16 nt, Human
uggcugggggcaggag

SEQ ID NO: 2202249 - RNA, 20 nt, Human
uggcuggggccuaucagugu

SEQ ID NO: 2202250 - RNA, 21 nt, Human
uggcuggggccuaucagugug

SEQ ID NO: 2202251 - RNA, 22 nt, Human
uggcuggggccuaucagugugc

SEQ ID NO: 2202252 - RNA, 12 nt, Human
uggcugggggcc

SEQ ID NO: 2202253 - RNA, 23 nt, Human
ugggagcugccuguucagcucca

SEQ ID NO: 2202254 - RNA, 16 nt, Human
ugggagcugaggccac

SEQ ID NO: 2202255 - RNA, 22 nt, Human
ugggagcuccucuccuggagga

SEQ ID NO: 2202256 - RNA, 23 nt, Human
ugggagcuccucuccuggaggau

SEQ ID NO: 2202257 - RNA, 18 nt, Human
ugggagcuccucuccugg

SEQ ID NO: 2202258 - RNA, 19 nt, Human
ugggagcuccucuccugga

SEQ ID NO: 2202259 - RNA, 20 nt, Human
ugggagcuccucuccuggag

SEQ ID NO: 2202260 - RNA, 21 nt, Human
ugggagcuccucuccuggagg

SEQ ID NO: 2202261 - RNA, 23 nt, Human
ugggagccgggucugccucuucu

SEQ ID NO: 2202262 - RNA, 20 nt, Human
ugggagccugcaaacucacu

SEQ ID NO: 2202263 - RNA, 22 nt, Human
ugggagccugcaaacucacugc

SEQ ID NO: 2202264 - RNA, 16 nt, Human
ugggagcuccacucug

SEQ ID NO: 2202265 - RNA, 19 nt, Human
ugggagcuccacucugcuu

SEQ ID NO: 2202266 - RNA, 22 nt, Human
ugggagcuccacucugcuucuc

SEQ ID NO: 2202267 - RNA, 20 nt, Human
ugggagcgugggaggcggga

SEQ ID NO: 2202268 - RNA, 13 nt, Human
ugggagcuccucu

SEQ ID NO: 2202269 - RNA, 14 nt, Human
ugggagcuccucuc

SEQ ID NO: 2202270 - RNA, 15 nt, Human
ugggagcuccucucc

SEQ ID NO: 2202271 - RNA, 16 nt, Human
ugggagcuccucuccu

SEQ ID NO: 2202272 - RNA, 17 nt, Human
ugggagcuccucuccug

SEQ ID NO: 2202273 - RNA, 21 nt, Human
ugggagcagcgguuuggggag

SEQ ID NO: 2202274 - RNA, 23 nt, Human
ugggagcagcccgcugaguggac

SEQ ID NO: 2202275 - RNA, 13 nt, Human
ugggagcaggaga

SEQ ID NO: 2202276 - RNA, 14 nt, Human
ugggagcaggagau

SEQ ID NO: 2202277 - RNA, 22 nt, Human
ugggagcaggagauugagaagg

SEQ ID NO: 2202278 - RNA, 23 nt, Human
ugggagcaggagauugagaagga

SEQ ID NO: 2202279 - RNA, 16 nt, Human
ugggagccccaggguc

SEQ ID NO: 2202280 - RNA, 14 nt, Human
ugggagccccaggg

SEQ ID NO: 2202281 - RNA, 13 nt, Human
ugggagccccagg

SEQ ID NO: 2202282 - RNA, 12 nt, Human
ugggagccaggg

SEQ ID NO: 2202283 - RNA, 23 nt, Human
ugggagccccagggucuucccua

SEQ ID NO: 2202284 - RNA, 22 nt, Human
ugggagccccagggucuucccu

SEQ ID NO: 2202285 - RNA, 18 nt, Human
ugggagccgggucugccu

SEQ ID NO: 2202286 - RNA, 14 nt, Human
ugggagccgggucu

SEQ ID NO: 2202287 - RNA, 16 nt, Human
ugggacagggcauggc

SEQ ID NO: 2202288 - RNA, 22 nt, Human
ugggaauguauuauucugcagc

SEQ ID NO: 2202289 - RNA, 10 nt, Human
ugggaauguu

SEQ ID NO: 2202290 - RNA, 16 nt, Human
ugggacaugggaaagg

SEQ ID NO: 2202291 - RNA, 19 nt, Human
ugggacauuugcucaugga

SEQ ID NO: 2202292 - RNA, 20 nt, Human
ugggacauuugcucauggaa

SEQ ID NO: 2202293 - RNA, 18 nt, Human
ugggacccuuuccuuccu

SEQ ID NO: 2202294 - RNA, 17 nt, Human
ugggacccuuuccuucc

SEQ ID NO: 2202295 - RNA, 14 nt, Human
ugggacccuuuccu

SEQ ID NO: 2202296 - RNA, 13 nt, Human
ugggacccuuucc

SEQ ID NO: 2202297 - RNA, 23 nt, Human
ugggaccgccagauggggccucu

SEQ ID NO: 2202298 - RNA, 19 nt, Human
ugggaccgccagauggggc

SEQ ID NO: 2202299 - RNA, 21 nt, Human
ugggaccgccagauggggccu

SEQ ID NO: 2202300 - RNA, 12 nt, Human
ugggagcacugg

SEQ ID NO: 2202301 - RNA, 13 nt, Human
ugggagcacugga

SEQ ID NO: 2202302 - RNA, 23 nt, Human
ugggagcacuggagugcagggag

SEQ ID NO: 2202303 - RNA, 19 nt, Human
ugggaccacgugagaucau

SEQ ID NO: 2202304 - RNA, 17 nt, Human
ugggaccaaaccuagcc

SEQ ID NO: 2202305 - RNA, 16 nt, Human
ugggaccaaaccuagc

SEQ ID NO: 2202306 - RNA, 15 nt, Human
uggcuuuucacugcu

SEQ ID NO: 2202307 - RNA, 22 nt, Human
ugggaaugaaugucagugugac

SEQ ID NO: 2202308 - RNA, 14 nt, Human
uggcuuuucacugc

SEQ ID NO: 2202309 - RNA, 22 nt, Human
uggcuuuuauuaaugcacuuuc

SEQ ID NO: 2202310 - RNA, 15 nt, Human
ugggaaugagacaua

SEQ ID NO: 2202311 - RNA, 17 nt, Human
ugggaaugaggcuugcu

SEQ ID NO: 2202312 - RNA, 18 nt, Human
ugggaaugaggcuugcug

SEQ ID NO: 2202313 - RNA, 22 nt, Human
ugggaaugaggcuugcugagag

SEQ ID NO: 2202314 - RNA, 14 nt, Human
ugggaaugaggugg

SEQ ID NO: 2202315 - RNA, 17 nt, Human
ugggaaugaggugggag

SEQ ID NO: 2202316 - RNA, 16 nt, Human
ugggaaugcggcaaga

SEQ ID NO: 2202317 - RNA, 21 nt, Human
ugggaauguauuauucugcag

SEQ ID NO: 2202318 - RNA, 18 nt, Human
ugggacagucaccucaug

SEQ ID NO: 2202319 - RNA, 20 nt, Human
ugggacagucaccucaugga

SEQ ID NO: 2202320 - RNA, 21 nt, Human
ugggacagucaccucauggaa

SEQ ID NO: 2202321 - RNA, 14 nt, Human
uggcugggggccuc

SEQ ID NO: 2202322 - RNA, 22 nt, Human
uggcugguuagagguucccuuu

SEQ ID NO: 2202323 - RNA, 15 nt, Human
uggcugggggccuca

SEQ ID NO: 2202324 - RNA, 17 nt, Human
uggcugucagcaggaag

SEQ ID NO: 2202325 - RNA, 12 nt, Human
uggcuguccagu

SEQ ID NO: 2202326 - RNA, 14 nt, Human
uggcugucagcagg

SEQ ID NO: 2202327 - RNA, 17 nt, Human
uggcuguaucuuguuuu

SEQ ID NO: 2202328 - RNA, 20 nt, Human
uggcuguagaaggagacaga

SEQ ID NO: 2202329 - RNA, 18 nt, Human
uggcuguccagugcccau

SEQ ID NO: 2202330 - RNA, 15 nt, Human
uggcuguccagugcc

SEQ ID NO: 2202331 - RNA, 17 nt, Human
uggcuguccagugccca

SEQ ID NO: 2202332 - RNA, 20 nt, Human
uggcuuugugauucaaucug

SEQ ID NO: 2202333 - RNA, 17 nt, Human
uggcuuuuauuaaugca

SEQ ID NO: 2202334 - RNA, 15 nt, Human
uggcuuuuagacaga

SEQ ID NO: 2202335 - RNA, 16 nt, Human
uggcuuuuagacagau

SEQ ID NO: 2202336 - RNA, 20 nt, Human
uggcuuuuauuaaugcacuu

SEQ ID NO: 2202337 - RNA, 21 nt, Human
uggcuuuuauuaaugcacuuu

SEQ ID NO: 2202338 - RNA, 22 nt, Human
uggguccaaauaaaaacuaaau

SEQ ID NO: 2202339 - RNA, 13 nt, Human
uggguccaaauaa

SEQ ID NO: 2202340 - RNA, 14 nt, Human
uggguccaaauaaa

SEQ ID NO: 2202341 - RNA, 16 nt, Human
uggguccaaauaaaaa

SEQ ID NO: 2202342 - RNA, 18 nt, Human
uggguccaaauaaaaacu

SEQ ID NO: 2202343 - RNA, 12 nt, Human
ugggucagucug

SEQ ID NO: 2202344 - RNA, 23 nt, Human
ugggucaguguccaaagcagggu

SEQ ID NO: 2202345 - RNA, 13 nt, Human
ugggucaggcagg

SEQ ID NO: 2202346 - RNA, 13 nt, Human
uggguagcuguaa

SEQ ID NO: 2202347 - RNA, 20 nt, Human
uggggugggccucugguuug

SEQ ID NO: 2202348 - RNA, 22 nt, Human
uggguagcuguaaggcaugaag

SEQ ID NO: 2202349 - RNA, 12 nt, Human
uggguauaaaag

SEQ ID NO: 2202350 - RNA, 18 nt, Human
ugggucaccccuccagga

SEQ ID NO: 2202351 - RNA, 21 nt, Human
ugggguggggggggugcuggg

SEQ ID NO: 2202352 - RNA, 22 nt, Human
ugggguggggggggugcugggc

SEQ ID NO: 2202353 - RNA, 17 nt, Human
uggguagacacacauga

SEQ ID NO: 2202354 - RNA, 16 nt, Human
uggguagacacacaug

SEQ ID NO: 2202355 - RNA, 17 nt, Human
uggggcaggcuggcugg

SEQ ID NO: 2202356 - RNA, 14 nt, Human
uggggcaggcagug

SEQ ID NO: 2202357 - RNA, 12 nt, Human
uggggcaggcag

SEQ ID NO: 2202358 - RNA, 22 nt, Human
uggggcagucaccugcccagau

SEQ ID NO: 2202359 - RNA, 17 nt, Human
uggggcaguagaagguc

SEQ ID NO: 2202360 - RNA, 11 nt, Human
uggggcagugg

SEQ ID NO: 2202361 - RNA, 19 nt, Human
ugggguggggggggugcug

SEQ ID NO: 2202362 - RNA, 17 nt, Human
ugggguggggaccucag

SEQ ID NO: 2202363 - RNA, 11 nt, Human
uggguucauua

SEQ ID NO: 2202364 - RNA, 22 nt, Human
uggguucagaaaugcugccugc

SEQ ID NO: 2202365 - RNA, 20 nt, Human
uggguucauuauuggaauua

SEQ ID NO: 2202366 - RNA, 18 nt, Human
uggguucauuauuggaau

SEQ ID NO: 2202367 - RNA, 16 nt, Human
uggguucauuauugga

SEQ ID NO: 2202368 - RNA, 13 nt, Human
uggguucauuauu

SEQ ID NO: 2202369 - RNA, 21 nt, Human
uggguuccagcaauucuccug

SEQ ID NO: 2202370 - RNA, 20 nt, Human
uggguucccuuuccuuccau

SEQ ID NO: 2202371 - RNA, 21 nt, Human
uggguuccucuuccccacucc

SEQ ID NO: 2202372 - RNA, 13 nt, Human
uggguuccucuuc

SEQ ID NO: 2202373 - RNA, 22 nt, Human
uggguuccuuccucugagccuu

SEQ ID NO: 2202374 - RNA, 21 nt, Human
uggguuccuuccucugagccu

SEQ ID NO: 2202375 - RNA, 22 nt, Human
uggguuucacaagugaaaaaca

SEQ ID NO: 2202376 - RNA, 16 nt, Human
uggguuggugcuucua

SEQ ID NO: 2202377 - RNA, 16 nt, Human
uggguuucauauuucu

SEQ ID NO: 2202378 - RNA, 15 nt, Human
uggguuggugcacag

SEQ ID NO: 2202379 - RNA, 19 nt, Human
uggguuggugcacagugau

SEQ ID NO: 2202380 - RNA, 20 nt, Human
uggguuggugcacagugauu

SEQ ID NO: 2202381 - RNA, 15 nt, Human
uggguuggcgcaccc

SEQ ID NO: 2202382 - RNA, 17 nt, Human
uggguuggcgcacccuc

SEQ ID NO: 2202383 - RNA, 22 nt, Human
uggguuggcgcacccuccccuc

SEQ ID NO: 2202384 - RNA, 23 nt, Human
uggguuggcgcacccuccccucc

SEQ ID NO: 2202385 - RNA, 14 nt, Human
uggguugacuuuca

SEQ ID NO: 2202386 - RNA, 17 nt, Human
uggguucuuuggaagga

SEQ ID NO: 2202387 - RNA, 22 nt, Human
uggguucugccugccagcugca

SEQ ID NO: 2202388 - RNA, 21 nt, Human
uggguucugccugccagcugc

SEQ ID NO: 2202389 - RNA, 23 nt, Human
uggguucuuuggaaggagugaga

SEQ ID NO: 2202390 - RNA, 17 nt, Human
uggguuggaaaacagua

SEQ ID NO: 2202391 - RNA, 21 nt, Human
ugggugucaagagggucugag

SEQ ID NO: 2202392 - RNA, 23 nt, Human
ugggugucaagagggucugagga

SEQ ID NO: 2202393 - RNA, 22 nt, Human
uggguguauuuauuuuccuccc

SEQ ID NO: 2202394 - RNA, 21 nt, Human
uggguccaggggccccuccag

SEQ ID NO: 2202395 - RNA, 17 nt, Human
uggguccaugggcagag

SEQ ID NO: 2202396 - RNA, 14 nt, Human
uggguccaugggca

SEQ ID NO: 2202397 - RNA, 18 nt, Human
uggguccaggggccccuc

SEQ ID NO: 2202398 - RNA, 19 nt, Human
uggguccaggggccccucc

SEQ ID NO: 2202399 - RNA, 21 nt, Human
uggguccaggggaugggaggu

SEQ ID NO: 2202400 - RNA, 20 nt, Human
uggguccaggggaugggagg

SEQ ID NO: 2202401 - RNA, 15 nt, Human
uggguccaggggaug

SEQ ID NO: 2202402 - RNA, 23 nt, Human
uggguucaagcgauucuucugcu

SEQ ID NO: 2202403 - RNA, 14 nt, Human
uggguguggcgcag

SEQ ID NO: 2202404 - RNA, 18 nt, Human
uggguguccaaaggaaga

SEQ ID NO: 2202405 - RNA, 24 nt, Human
uggguucaggggacucagcccuga

SEQ ID NO: 2202406 - RNA, 20 nt, Human
uggguucagaaaugcugccu

SEQ ID NO: 2202407 - RNA, 21 nt, Human
uggguucagaaaugcugccug

SEQ ID NO: 2202408 - RNA, 15 nt, Human
uggguuaugaauauu

SEQ ID NO: 2202409 - RNA, 15 nt, Human
uggguuauucuggag

SEQ ID NO: 2202410 - RNA, 16 nt, Human
uggguuauucuggagu

SEQ ID NO: 2202411 - RNA, 17 nt, Human
uggguuauucuggaguu

SEQ ID NO: 2202412 - RNA, 16 nt, Human
uggguucacugcaacc

SEQ ID NO: 2202413 - RNA, 14 nt, Human
ugggcggggccuug

SEQ ID NO: 2202414 - RNA, 15 nt, Human
ugggcggggccuugc

SEQ ID NO: 2202415 - RNA, 17 nt, Human
ugggcgugagaccugcc

SEQ ID NO: 2202416 - RNA, 19 nt, Human
ugggcgugagaccugcccc

SEQ ID NO: 2202417 - RNA, 18 nt, Human
ugggcgugagaccugccc

SEQ ID NO: 2202418 - RNA, 18 nt, Human
ugggcuucaguggcagcu

SEQ ID NO: 2202419 - RNA, 19 nt, Human
ugggcuucaguggcagcug

SEQ ID NO: 2202420 - RNA, 13 nt, Human
ugggcggcagaga

SEQ ID NO: 2202421 - RNA, 15 nt, Human
ugggcggcagagagg

SEQ ID NO: 2202422 - RNA, 19 nt, Human
ugggcggcagagaggacug

SEQ ID NO: 2202423 - RNA, 12 nt, Human
ugggcggcugag

SEQ ID NO: 2202424 - RNA, 14 nt, Human
ugggcggcugagag

SEQ ID NO: 2202425 - RNA, 15 nt, Human
ugggcggcugagagc

SEQ ID NO: 2202426 - RNA, 16 nt, Human
ugggcggcugagagcc

SEQ ID NO: 2202427 - RNA, 18 nt, Human
ugggcggcugagagcccc

SEQ ID NO: 2202428 - RNA, 21 nt, Human
ugggcggcugagagccccagc

SEQ ID NO: 2202429 - RNA, 13 nt, Human
ugggcgggcagca

SEQ ID NO: 2202430 - RNA, 18 nt, Human
ugggcgggcagcacagca

SEQ ID NO: 2202431 - RNA, 19 nt, Human
ugggcgggcagcacagcaa

SEQ ID NO: 2202432 - RNA, 17 nt, Human
ugggcgcccuggaagcc

SEQ ID NO: 2202433 - RNA, 15 nt, Human
ugggcggcacagccu

SEQ ID NO: 2202434 - RNA, 15 nt, Human
ugggcgcccuggaag

SEQ ID NO: 2202435 - RNA, 16 nt, Human
ugggcgcccuggaagc

SEQ ID NO: 2202436 - RNA, 20 nt, Human
ugggcgcccuggaagccggc

SEQ ID NO: 2202437 - RNA, 20 nt, Human
ugggcuucaguggcagcugc

SEQ ID NO: 2202438 - RNA, 15 nt, Human
ugggcuuggccugcu

SEQ ID NO: 2202439 - RNA, 16 nt, Human
ugggcuuggccugcug

SEQ ID NO: 2202440 - RNA, 16 nt, Human
ugggcggggccuugcg

SEQ ID NO: 2202441 - RNA, 19 nt, Human
ugggcuuggggaccagagc

SEQ ID NO: 2202442 - RNA, 19 nt, Human
ugggcuuggccugcuguga

SEQ ID NO: 2202443 - RNA, 17 nt, Human
ugggcuuggccugcugu

SEQ ID NO: 2202444 - RNA, 18 nt, Human
ugggcuuggccugcugug

SEQ ID NO: 2202445 - RNA, 16 nt, Human
uggggcagcuugaggg

SEQ ID NO: 2202446 - RNA, 21 nt, Human
ugggcuuggggaccagagcug

SEQ ID NO: 2202447 - RNA, 14 nt, Human
ugggccuccugugu

SEQ ID NO: 2202448 - RNA, 22 nt, Human
ugggcauggggugggccucugg

SEQ ID NO: 2202449 - RNA, 16 nt, Human
ugggcaucuguucugg

SEQ ID NO: 2202450 - RNA, 17 nt, Human
ugggcaucuguucuggu

SEQ ID NO: 2202451 - RNA, 21 nt, Human
ugggcauacuaauaaaguaug

SEQ ID NO: 2202452 - RNA, 16 nt, Human
ugggcauagaugcagg

SEQ ID NO: 2202453 - RNA, 22 nt, Human
ugggcauagaugcaggugagcc

SEQ ID NO: 2202454 - RNA, 15 nt, Human
ugggcaucuguucug

SEQ ID NO: 2202455 - RNA, 13 nt, Human
ugggcauggggug

SEQ ID NO: 2202456 - RNA, 15 nt, Human
ugggcaugggguggg

SEQ ID NO: 2202457 - RNA, 20 nt, Human
ugggcauggggugggccucu

SEQ ID NO: 2202458 - RNA, 21 nt, Human
ugggcauggggugggccucug

SEQ ID NO: 2202459 - RNA, 16 nt, Human
ugggccuccugugugu

SEQ ID NO: 2202460 - RNA, 22 nt, Human
ugggccuccugugugugcgccu

SEQ ID NO: 2202461 - RNA, 20 nt, Human
ugggccuccucuguccaggg

SEQ ID NO: 2202462 - RNA, 18 nt, Human
ugggccuccucuguccag

SEQ ID NO: 2202463 - RNA, 18 nt, Human
ugggccuucagggaguga

SEQ ID NO: 2202464 - RNA, 13 nt, Human
ugggccuugcuac

SEQ ID NO: 2202465 - RNA, 12 nt, Human
ugggccuugcug

SEQ ID NO: 2202466 - RNA, 15 nt, Human
ugggccuucagggag

SEQ ID NO: 2202467 - RNA, 14 nt, Human
ugggccuugcuggg

SEQ ID NO: 2202468 - RNA, 15 nt, Human
ugggaggaaauuuga

SEQ ID NO: 2202469 - RNA, 12 nt, Human
ugggaggaagca

SEQ ID NO: 2202470 - RNA, 11 nt, Human
ugggaggaagc

SEQ ID NO: 2202471 - RNA, 20 nt, Human
ugggaggaaaagaaaagagg

SEQ ID NO: 2202472 - RNA, 12 nt, Human
ugggaggaaaag

SEQ ID NO: 2202473 - RNA, 20 nt, Human
ugggagcuugauucucagca

SEQ ID NO: 2202474 - RNA, 16 nt, Human
ugggagcuugggaaug

SEQ ID NO: 2202475 - RNA, 19 nt, Human
ugggagcugguuagaaaug

SEQ ID NO: 2202476 - RNA, 24 nt, Human
ugggagcugccuguucagcuccag

SEQ ID NO: 2202477 - RNA, 17 nt, Human
ugggagcugaaaaauca

SEQ ID NO: 2202478 - RNA, 18 nt, Human
ugggagcugguuagaaau

SEQ ID NO: 2202479 - RNA, 20 nt, Human
ugggagcugguuagaaaugc

SEQ ID NO: 2202480 - RNA, 13 nt, Human
ugggaggaagcag

SEQ ID NO: 2202481 - RNA, 14 nt, Human
ugggaggaagcaga

SEQ ID NO: 2202482 - RNA, 15 nt, Human
ugggaggaagcagaa

SEQ ID NO: 2202483 - RNA, 16 nt, Human
ugggaggaagcagaau

SEQ ID NO: 2202484 - RNA, 17 nt, Human
ugggaggaagcagaaua

SEQ ID NO: 2202485 - RNA, 18 nt, Human
ugggaggaagcagaauaa

SEQ ID NO: 2202486 - RNA, 19 nt, Human
ugggaggaagcagaauaaa

SEQ ID NO: 2202487 - RNA, 24 nt, Human
ugggaggaagcagguugaggggcu

SEQ ID NO: 2202488 - RNA, 19 nt, Human
ugggaggacggugcaaccc

SEQ ID NO: 2202489 - RNA, 20 nt, Human
ugggaggaagcagaauaaag

SEQ ID NO: 2202490 - RNA, 21 nt, Human
ugggaggaagcagaauaaagc

SEQ ID NO: 2202491 - RNA, 22 nt, Human
ugggaggaagcagaauaaagca

SEQ ID NO: 2202492 - RNA, 23 nt, Human
ugggaggaagcagaauaaagcaa

SEQ ID NO: 2202493 - RNA, 15 nt, Human
ugggcaguuacaugc

SEQ ID NO: 2202494 - RNA, 14 nt, Human
ugggaggagggaga

SEQ ID NO: 2202495 - RNA, 20 nt, Human
ugggaggacggugcaaccca

SEQ ID NO: 2202496 - RNA, 13 nt, Human
ugggaggagggag

SEQ ID NO: 2202497 - RNA, 17 nt, Human
ugggcaguuacaugcau

SEQ ID NO: 2202498 - RNA, 18 nt, Human
ugggcaguuuuucuguau

SEQ ID NO: 2202499 - RNA, 22 nt, Human
ugggcaguuuuucuguauuuua

SEQ ID NO: 2202500 - RNA, 16 nt, Human
ugggcauacuaauaaa

SEQ ID NO: 2202501 - RNA, 17 nt, Human
ugcuugaacccaggaga

SEQ ID NO: 2202502 - RNA, 19 nt, Human
ugcuuguucccucucccug

SEQ ID NO: 2202503 - RNA, 16 nt, Human
ugcuuguucccucucc

SEQ ID NO: 2202504 - RNA, 21 nt, Human
ugcuugaaagaaaauaugcau

SEQ ID NO: 2202505 - RNA, 14 nt, Human
ugcuugaaagaaaa

SEQ ID NO: 2202506 - RNA, 18 nt, Human
ugcuuguuaacugagugc

SEQ ID NO: 2202507 - RNA, 19 nt, Human
ugcuucuuucuuugggaau

SEQ ID NO: 2202508 - RNA, 17 nt, Human
ugcuucuuucauuuucu

SEQ ID NO: 2202509 - RNA, 16 nt, Human
ugcuugaaaaaugugc

SEQ ID NO: 2202510 - RNA, 17 nt, Human
ugcuugaaaaaugugca

SEQ ID NO: 2202511 - RNA, 22 nt, Human
ugcuugaaaaaugugcaaaaca

SEQ ID NO: 2202512 - RNA, 23 nt, Human
ugcuucuucuccuauguguaagg

SEQ ID NO: 2202513 - RNA, 15 nt, Human
ugcuucuuucauuuu

SEQ ID NO: 2202514 - RNA, 16 nt, Human
ugcuucuucucaggca

SEQ ID NO: 2202515 - RNA, 21 nt, Human
ugcuucuucuccuauguguaa

SEQ ID NO: 2202516 - RNA, 14 nt, Human
ugcuucuuggaguc

SEQ ID NO: 2202517 - RNA, 14 nt, Human
ugcuuguuggauuu

SEQ ID NO: 2202518 - RNA, 15 nt, Human
ugcuuguugggauuc

SEQ ID NO: 2202519 - RNA, 19 nt, Human
ugcuuguugggauuccuga

SEQ ID NO: 2202520 - RNA, 22 nt, Human
ugcuuguugggauuccugaccc

SEQ ID NO: 2202521 - RNA, 23 nt, Human
ugcuuguuugcucaccuggggug

SEQ ID NO: 2202522 - RNA, 23 nt, Human
ugcuuguugggauuccugaccca

SEQ ID NO: 2202523 - RNA, 14 nt, Human
ugcuuguuuacagc

SEQ ID NO: 2202524 - RNA, 14 nt, Human
ugcuuguuuccuag

SEQ ID NO: 2202525 - RNA, 23 nt, Human
ugcuuuaaaaacuauuuaacuug

SEQ ID NO: 2202526 - RNA, 13 nt, Human
ugcuuuaaaaacu

SEQ ID NO: 2202527 - RNA, 16 nt, Human
ugcuuuaaaaacuauu

SEQ ID NO: 2202528 - RNA, 12 nt, Human
ugcuuuaaacau

SEQ ID NO: 2202529 - RNA, 13 nt, Human
ugcuuuagcuuga

SEQ ID NO: 2202530 - RNA, 22 nt, Human
ugcuuuagcuugaaaaggugac

SEQ ID NO: 2202531 - RNA, 17 nt, Human
ugcuuuaggcucacggc

SEQ ID NO: 2202532 - RNA, 13 nt, Human
ugcuuuaugcuga

SEQ ID NO: 2202533 - RNA, 15 nt, Human
ugcuuuaugccuucu

SEQ ID NO: 2202534 - RNA, 12 nt, Human
ugcuuuauaaau

SEQ ID NO: 2202535 - RNA, 14 nt, Human
ugcuuuauaaauaa

SEQ ID NO: 2202536 - RNA, 19 nt, Human
ugcuuucaucuuggucaca

SEQ ID NO: 2202537 - RNA, 20 nt, Human
ugcuuucagauuaaaauugu

SEQ ID NO: 2202538 - RNA, 14 nt, Human
ugcuuuccaaagcc

SEQ ID NO: 2202539 - RNA, 20 nt, Human
ugcuuuccacaccuggcacu

SEQ ID NO: 2202540 - RNA, 12 nt, Human
ugcuuuccagcu

SEQ ID NO: 2202541 - RNA, 13 nt, Human
ugcuuuccagcuc

SEQ ID NO: 2202542 - RNA, 14 nt, Human
ugcuuuccagcuca

SEQ ID NO: 2202543 - RNA, 17 nt, Human
ugcuuuuuuguuuuggc

SEQ ID NO: 2202544 - RNA, 17 nt, Human
ugcuuuaugcugaaaca

SEQ ID NO: 2202545 - RNA, 15 nt, Human
ugcuuuaugcugaaa

SEQ ID NO: 2202546 - RNA, 14 nt, Human
ugcuuuaugcugaa

SEQ ID NO: 2202547 - RNA, 14 nt, Human
ugcuuuauuccaga

SEQ ID NO: 2202548 - RNA, 17 nt, Human
ugcuuuauuccagaaug

SEQ ID NO: 2202549 - RNA, 15 nt, Human
ugcuuuauuccagaa

SEQ ID NO: 2202550 - RNA, 14 nt, Human
ugcugccuccagaa

SEQ ID NO: 2202551 - RNA, 13 nt, Human
ugcugccucaugc

SEQ ID NO: 2202552 - RNA, 18 nt, Human
ugcuuccagugaggcucu

SEQ ID NO: 2202553 - RNA, 19 nt, Human
ugcugccgccucccagccu

SEQ ID NO: 2202554 - RNA, 17 nt, Human
ugcugccgccucccagc

SEQ ID NO: 2202555 - RNA, 16 nt, Human
ugcugccgccucccag

SEQ ID NO: 2202556 - RNA, 23 nt, Human
ugcugccgccccacccagauggg

SEQ ID NO: 2202557 - RNA, 21 nt, Human
ugcugccgccucccagccugg

SEQ ID NO: 2202558 - RNA, 20 nt, Human
ugcugccgccucccagccug

SEQ ID NO: 2202559 - RNA, 18 nt, Human
ugcugccuaggcugaccu

SEQ ID NO: 2202560 - RNA, 13 nt, Human
ugcugccuaggcu

SEQ ID NO: 2202561 - RNA, 22 nt, Human
ugcugccuccccaacccugccc

SEQ ID NO: 2202562 - RNA, 15 nt, Human
ugcuucgggcccuuc

SEQ ID NO: 2202563 - RNA, 19 nt, Human
ugcugccuccccaacccug

SEQ ID NO: 2202564 - RNA, 18 nt, Human
ugcuucgggcccuuccca

SEQ ID NO: 2202565 - RNA, 17 nt, Human
ugcugccuccccaaccc

SEQ ID NO: 2202566 - RNA, 14 nt, Human
ugcugccuccccaa

SEQ ID NO: 2202567 - RNA, 13 nt, Human
ugcugccucccca

SEQ ID NO: 2202568 - RNA, 12 nt, Human
ugcugccucccc

SEQ ID NO: 2202569 - RNA, 21 nt, Human
ugcuuccagugaggcucugcc

SEQ ID NO: 2202570 - RNA, 19 nt, Human
ugcuuccagugaggcucug

SEQ ID NO: 2202571 - RNA, 20 nt, Human
ugcuuccagugaggcucugc

SEQ ID NO: 2202572 - RNA, 22 nt, Human
ugcuucuaauauuuauugcuuu

SEQ ID NO: 2202573 - RNA, 12 nt, Human
ugcuucucacug

SEQ ID NO: 2202574 - RNA, 14 nt, Human
ugcuucucugacuu

SEQ ID NO: 2202575 - RNA, 17 nt, Human
ugcuucucugacuucug

SEQ ID NO: 2202576 - RNA, 19 nt, Human
ugcuucucugacuucugcc

SEQ ID NO: 2202577 - RNA, 20 nt, Human
ugcuucucugacuucugccu

SEQ ID NO: 2202578 - RNA, 14 nt, Human
ugcuucuucucagg

SEQ ID NO: 2202579 - RNA, 13 nt, Human
ugcuucugggaga

SEQ ID NO: 2202580 - RNA, 16 nt, Human
ugcuucuucagagacu

SEQ ID NO: 2202581 - RNA, 23 nt, Human
ugcuucucugacuucugccugga

SEQ ID NO: 2202582 - RNA, 21 nt, Human
ugcuucucugacuucugccug

SEQ ID NO: 2202583 - RNA, 22 nt, Human
ugcuucucugacuucugccugg

SEQ ID NO: 2202584 - RNA, 14 nt, Human
ugcuucuguuuuau

SEQ ID NO: 2202585 - RNA, 12 nt, Human
uggaacccagac

SEQ ID NO: 2202586 - RNA, 15 nt, Human
uggaacccagacuca

SEQ ID NO: 2202587 - RNA, 14 nt, Human
uggaacccagacuc

SEQ ID NO: 2202588 - RNA, 17 nt, Human
uggaacccagacucaga

SEQ ID NO: 2202589 - RNA, 16 nt, Human
uggaacccagacucag

SEQ ID NO: 2202590 - RNA, 22 nt, Human
uggaacccagacucagacauug

SEQ ID NO: 2202591 - RNA, 16 nt, Human
uggaaaauaaauuauu

SEQ ID NO: 2202592 - RNA, 15 nt, Human
uggaaaauaaauuau

SEQ ID NO: 2202593 - RNA, 23 nt, Human
uggaaaaacaucugaaagccacg

SEQ ID NO: 2202594 - RNA, 20 nt, Human
uggaaaaaccacccccaaau

SEQ ID NO: 2202595 - RNA, 11 nt, Human
uggaaaauaaa

SEQ ID NO: 2202596 - RNA, 15 nt, Human
uggaaaauaaaucaa

SEQ ID NO: 2202597 - RNA, 22 nt, Human
uggaaaaaaugauguucauuua

SEQ ID NO: 2202598 - RNA, 12 nt, Human
uggaaaaaguga

SEQ ID NO: 2202599 - RNA, 17 nt, Human
uggaaaaagugauggag

SEQ ID NO: 2202600 - RNA, 20 nt, Human
uggaaccgcaggaagcugcu

SEQ ID NO: 2202601 - RNA, 16 nt, Human
uggaaccucagccugg

SEQ ID NO: 2202602 - RNA, 15 nt, Human
uggaaccucagccug

SEQ ID NO: 2202603 - RNA, 13 nt, Human
uggaacucugcuu

SEQ ID NO: 2202604 - RNA, 23 nt, Human
uggaaccgcaggaagcugcuccg

SEQ ID NO: 2202605 - RNA, 19 nt, Human
uggaaccgcaggaagcugc

SEQ ID NO: 2202606 - RNA, 17 nt, Human
uggaaccgcaggaagcu

SEQ ID NO: 2202607 - RNA, 16 nt, Human
uggaaccgcaggaagc

SEQ ID NO: 2202608 - RNA, 21 nt, Human
uggaacccuuuuggcccccga

SEQ ID NO: 2202609 - RNA, 19 nt, Human
uggaacccuuuuggccccc

SEQ ID NO: 2202610 - RNA, 18 nt, Human
uggaacccuuuuggcccc

SEQ ID NO: 2202611 - RNA, 14 nt, Human
uggaacucucgagc

SEQ ID NO: 2202612 - RNA, 11 nt, Human
uggaagacagc

SEQ ID NO: 2202613 - RNA, 12 nt, Human
uggaagacagcu

SEQ ID NO: 2202614 - RNA, 16 nt, Human
uggaacuuacauuguu

SEQ ID NO: 2202615 - RNA, 23 nt, Human
uggaacugucucucaugaaccuc

SEQ ID NO: 2202616 - RNA, 13 nt, Human
uggaagacagaga

SEQ ID NO: 2202617 - RNA, 15 nt, Human
uggaaguuuucagga

SEQ ID NO: 2202618 - RNA, 13 nt, Human
uggaaguuuucag

SEQ ID NO: 2202619 - RNA, 15 nt, Human
uggaauacaguguua

SEQ ID NO: 2202620 - RNA, 14 nt, Human
uggaauacaguguu

SEQ ID NO: 2202621 - RNA, 14 nt, Human
uggaauacaugaaa

SEQ ID NO: 2202622 - RNA, 22 nt, Human
uggaauacaguguuauuuucuu

SEQ ID NO: 2202623 - RNA, 14 nt, Human
uggaauacauuucu

SEQ ID NO: 2202624 - RNA, 15 nt, Human
uggaauacaugaaau

SEQ ID NO: 2202625 - RNA, 22 nt, Human
uggaauacuaaaaaucaugaga

SEQ ID NO: 2202626 - RNA, 20 nt, Human
uggaauacuaaaaaucauga

SEQ ID NO: 2202627 - RNA, 18 nt, Human
uggaauacuuuuuguuau

SEQ ID NO: 2202628 - RNA, 13 nt, Human
uggaauacuuuuu

SEQ ID NO: 2202629 - RNA, 12 nt, Human
uggaauacuuuu

SEQ ID NO: 2202630 - RNA, 21 nt, Human
uggaagugugugaucuguggg

SEQ ID NO: 2202631 - RNA, 23 nt, Human
uggaagugugggucugugugugu

SEQ ID NO: 2202632 - RNA, 20 nt, Human
uggaagacagagaccuccug

SEQ ID NO: 2202633 - RNA, 23 nt, Human
uggaagacagagaccuccugccu

SEQ ID NO: 2202634 - RNA, 11 nt, Human
uggaaguugca

SEQ ID NO: 2202635 - RNA, 16 nt, Human
uggaaguugcauggca

SEQ ID NO: 2202636 - RNA, 18 nt, Human
uggaaguugcauggcauc

SEQ ID NO: 2202637 - RNA, 14 nt, Human
uggaagacagcucu

SEQ ID NO: 2202638 - RNA, 21 nt, Human
uggaagugugggucugugugu

SEQ ID NO: 2202639 - RNA, 23 nt, Human
uggaauauuccccuaucucuaga

SEQ ID NO: 2202640 - RNA, 20 nt, Human
uggaauauuguccauugucc

SEQ ID NO: 2202641 - RNA, 15 nt, Human
uggaauauuguccau

SEQ ID NO: 2202642 - RNA, 21 nt, Human
uggaauaguauccuccagguu

SEQ ID NO: 2202643 - RNA, 17 nt, Human
uggaauaguauccucca

SEQ ID NO: 2202644 - RNA, 18 nt, Human
uggaauaguauccuccag

SEQ ID NO: 2202645 - RNA, 19 nt, Human
uggaauaguauccuccagg

SEQ ID NO: 2202646 - RNA, 20 nt, Human
uggaauaguauccuccaggu

SEQ ID NO: 2202647 - RNA, 12 nt, Human
uggaaucuggag

SEQ ID NO: 2202648 - RNA, 19 nt, Human
uggaaucuaccaacuguuu

SEQ ID NO: 2202649 - RNA, 13 nt, Human
uggaaucuggaga

SEQ ID NO: 2202650 - RNA, 23 nt, Human
uggaaucaggaauauuuuccaaa

SEQ ID NO: 2202651 - RNA, 21 nt, Human
uggaaucaggaauauuuucca

SEQ ID NO: 2202652 - RNA, 22 nt, Human
uggaaucaggaauauuuuccaa

SEQ ID NO: 2202653 - RNA, 14 nt, Human
uggaauguaaucaa

SEQ ID NO: 2202654 - RNA, 21 nt, Human
uggaauguggccccugaacaa

SEQ ID NO: 2202655 - RNA, 15 nt, Human
uggaaucuggagagc

SEQ ID NO: 2202656 - RNA, 21 nt, Human
uggaaugguuauaaaagugau

SEQ ID NO: 2202657 - RNA, 18 nt, Human
uggaaucuggagaccagg

SEQ ID NO: 2202658 - RNA, 17 nt, Human
uggaaucuggagaccag

SEQ ID NO: 2202659 - RNA, 20 nt, Human
uggaauuaaccuggugcugg

SEQ ID NO: 2202660 - RNA, 19 nt, Human
uggaauuaaccuggugcug

SEQ ID NO: 2202661 - RNA, 18 nt, Human
uggaauuaaccuggugcu

SEQ ID NO: 2202662 - RNA, 17 nt, Human
uggaauuaaccuggugc

SEQ ID NO: 2202663 - RNA, 16 nt, Human
uggaauuaaccuggug

SEQ ID NO: 2202664 - RNA, 23 nt, Human
uggaauguggccccugaacaaga

SEQ ID NO: 2202665 - RNA, 21 nt, Human
uggaauuaaccuggugcugga

SEQ ID NO: 2202666 - RNA, 15 nt, Human
uggaauuauuuuaaa

SEQ ID NO: 2202667 - RNA, 22 nt, Human
uggauacugcccggggcagcug

SEQ ID NO: 2202668 - RNA, 17 nt, Human
uggauacugcccggggc

SEQ ID NO: 2202669 - RNA, 18 nt, Human
uggauaaugcuguugccu

SEQ ID NO: 2202670 - RNA, 18 nt, Human
uggauacauacaccagca

SEQ ID NO: 2202671 - RNA, 16 nt, Human
uggauaggagccugcu

SEQ ID NO: 2202672 - RNA, 16 nt, Human
uggauauaguuuuacu

SEQ ID NO: 2202673 - RNA, 18 nt, Human
uggaucuucaauggcuuu

SEQ ID NO: 2202674 - RNA, 12 nt, Human
uggauauaaaua

SEQ ID NO: 2202675 - RNA, 13 nt, Human
uggauauaaauau

SEQ ID NO: 2202676 - RNA, 17 nt, Human
uggauauaaauauauau

SEQ ID NO: 2202677 - RNA, 12 nt, Human
uggaugauguuu

SEQ ID NO: 2202678 - RNA, 21 nt, Human
uggaugauggucuucagccuc

SEQ ID NO: 2202679 - RNA, 20 nt, Human
uggaugauggucuucagccu

SEQ ID NO: 2202680 - RNA, 17 nt, Human
uggaugagcccucagaa

SEQ ID NO: 2202681 - RNA, 20 nt, Human
uggaugagacuuccaaaccu

SEQ ID NO: 2202682 - RNA, 20 nt, Human
uggaugaccagaacaagguu

SEQ ID NO: 2202683 - RNA, 15 nt, Human
uggaugagcccucag

SEQ ID NO: 2202684 - RNA, 13 nt, Human
uggaugaccagaa

SEQ ID NO: 2202685 - RNA, 22 nt, Human
uggaugaagauucuccugugcu

SEQ ID NO: 2202686 - RNA, 23 nt, Human
uggaugaagauucuccugugcua

SEQ ID NO: 2202687 - RNA, 14 nt, Human
uggaugaaauuuuc

SEQ ID NO: 2202688 - RNA, 14 nt, Human
uggauauaaauaua

SEQ ID NO: 2202689 - RNA, 15 nt, Human
uggaugaaauuuucu

SEQ ID NO: 2202690 - RNA, 17 nt, Human
uggaugaaauuuucuag

SEQ ID NO: 2202691 - RNA, 18 nt, Human
uggaugaaauuuucuaga

SEQ ID NO: 2202692 - RNA, 19 nt, Human
uggaugaagauucuccugu

SEQ ID NO: 2202693 - RNA, 22 nt, Human
uggaggcacacagcugcagaga

SEQ ID NO: 2202694 - RNA, 14 nt, Human
uggaggcacuuuag

SEQ ID NO: 2202695 - RNA, 22 nt, Human
uggaggcagggccuugcccaga

SEQ ID NO: 2202696 - RNA, 14 nt, Human
uggaggcagggccu

SEQ ID NO: 2202697 - RNA, 13 nt, Human
uggaggcacuuua

SEQ ID NO: 2202698 - RNA, 18 nt, Human
uggaggcacacagcugca

SEQ ID NO: 2202699 - RNA, 19 nt, Human
uggaggcacacagcugcag

SEQ ID NO: 2202700 - RNA, 15 nt, Human
uggagcaaagcugau

SEQ ID NO: 2202701 - RNA, 22 nt, Human
uggagauuugaaggucugcaag

SEQ ID NO: 2202702 - RNA, 15 nt, Human
uggaggccagccagu

SEQ ID NO: 2202703 - RNA, 14 nt, Human
uggaggccagccag

SEQ ID NO: 2202704 - RNA, 22 nt, Human
uggaggcaugugaugagaggaa

SEQ ID NO: 2202705 - RNA, 22 nt, Human
uggaggccauugugugagccua

SEQ ID NO: 2202706 - RNA, 12 nt, Human
uggaggcccagu

SEQ ID NO: 2202707 - RNA, 21 nt, Human
uggaggccgggugcucagggc

SEQ ID NO: 2202708 - RNA, 19 nt, Human
uggaggccgggugcucagg

SEQ ID NO: 2202709 - RNA, 15 nt, Human
uggaggcccaguuca

SEQ ID NO: 2202710 - RNA, 23 nt, Human
uggaggcugucuucucaggcucu

SEQ ID NO: 2202711 - RNA, 13 nt, Human
uggaggcuuccug

SEQ ID NO: 2202712 - RNA, 22 nt, Human
uggaggcugucuucucaggcuc

SEQ ID NO: 2202713 - RNA, 14 nt, Human
uggaggcugucuuc

SEQ ID NO: 2202714 - RNA, 15 nt, Human
uggaggcuuccugcg

SEQ ID NO: 2202715 - RNA, 16 nt, Human
uggaggcuuccugcgu

SEQ ID NO: 2202716 - RNA, 17 nt, Human
uggaggcuuccugcguc

SEQ ID NO: 2202717 - RNA, 13 nt, Human
uggaggcugucuu

SEQ ID NO: 2202718 - RNA, 18 nt, Human
uggagaugggaugcuugc

SEQ ID NO: 2202719 - RNA, 13 nt, Human
uggagaugucuuc

SEQ ID NO: 2202720 - RNA, 16 nt, Human
uggagaugggaugcuu

SEQ ID NO: 2202721 - RNA, 14 nt, Human
uggagaugcagagg

SEQ ID NO: 2202722 - RNA, 13 nt, Human
uggagaugcagag

SEQ ID NO: 2202723 - RNA, 23 nt, Human
uggagaguucaauggcugcugaa

SEQ ID NO: 2202724 - RNA, 19 nt, Human
uggagaguucaauggcugc

SEQ ID NO: 2202725 - RNA, 21 nt, Human
uggagaguucaauggcugcug

SEQ ID NO: 2202726 - RNA, 13 nt, Human
uggagauguuuag

SEQ ID NO: 2202727 - RNA, 11 nt, Human
uggagauguuu

SEQ ID NO: 2202728 - RNA, 19 nt, Human
uggagauuugaaggucugc

SEQ ID NO: 2202729 - RNA, 22 nt, Human
uggagaugucuucguacaguuc

SEQ ID NO: 2202730 - RNA, 23 nt, Human
uggagaugucuucguacaguucu

SEQ ID NO: 2202731 - RNA, 19 nt, Human
uggagauguuuuagaguua

SEQ ID NO: 2202732 - RNA, 20 nt, Human
uggagagugcaacaguagca

SEQ ID NO: 2202733 - RNA, 17 nt, Human
uggagagugcaacagua

SEQ ID NO: 2202734 - RNA, 15 nt, Human
uggagaguaaaaacu

SEQ ID NO: 2202735 - RNA, 21 nt, Human
uggagagggaugaggugcugg

SEQ ID NO: 2202736 - RNA, 22 nt, Human
uggagagguuauaggucacucc

SEQ ID NO: 2202737 - RNA, 13 nt, Human
uggagagggauga

SEQ ID NO: 2202738 - RNA, 19 nt, Human
uggagagggaugaggugcu

SEQ ID NO: 2202739 - RNA, 18 nt, Human
uggagaggcccucuggag

SEQ ID NO: 2202740 - RNA, 23 nt, Human
uggagaggagggaugcugccuga

SEQ ID NO: 2202741 - RNA, 16 nt, Human
uggagaggcccucugg

SEQ ID NO: 2202742 - RNA, 21 nt, Human
uggagaggagggaugcugccu

SEQ ID NO: 2202743 - RNA, 20 nt, Human
uggagaggcccggccucuca

SEQ ID NO: 2202744 - RNA, 18 nt, Human
uggagagccagaaccugg

SEQ ID NO: 2202745 - RNA, 19 nt, Human
uggagagccagaaccugga

SEQ ID NO: 2202746 - RNA, 20 nt, Human
uggagagccagaaccuggag

SEQ ID NO: 2202747 - RNA, 22 nt, Human
uggagaggagggaugcugccug

SEQ ID NO: 2202748 - RNA, 21 nt, Human
uggagagcccggcgccccugc

SEQ ID NO: 2202749 - RNA, 12 nt, Human
uggacaggcaug

SEQ ID NO: 2202750 - RNA, 16 nt, Human
uggacaggcauguucu

SEQ ID NO: 2202751 - RNA, 14 nt, Human
uggacagccccacc

SEQ ID NO: 2202752 - RNA, 17 nt, Human
uggaauuauuuuaaaag

SEQ ID NO: 2202753 - RNA, 13 nt, Human
uggagagagggga

SEQ ID NO: 2202754 - RNA, 12 nt, Human
uggagagagggg

SEQ ID NO: 2202755 - RNA, 23 nt, Human
uggagagaaguuucuggcccugg

SEQ ID NO: 2202756 - RNA, 15 nt, Human
uggagagaaggccuc

SEQ ID NO: 2202757 - RNA, 21 nt, Human
uggagagaaggccucccuagc

SEQ ID NO: 2202758 - RNA, 11 nt, Human
uggagagaagu

SEQ ID NO: 2202759 - RNA, 13 nt, Human
uggagagaaguuu

SEQ ID NO: 2202760 - RNA, 12 nt, Human
uggagagaaggc

SEQ ID NO: 2202761 - RNA, 21 nt, Human
uggagagaaacaauaaagaga

SEQ ID NO: 2202762 - RNA, 22 nt, Human
uggagagaaacaauaaagagau

SEQ ID NO: 2202763 - RNA, 12 nt, Human
uggagagaaaac

SEQ ID NO: 2202764 - RNA, 21 nt, Human
uggagacuuagggcaccaggg

SEQ ID NO: 2202765 - RNA, 17 nt, Human
uggagacugucucaaga

SEQ ID NO: 2202766 - RNA, 16 nt, Human
uggagacuuagggcac

SEQ ID NO: 2202767 - RNA, 21 nt, Human
uggcagaacugagcuccucug

SEQ ID NO: 2202768 - RNA, 20 nt, Human
uggcagaacugagcuccucu

SEQ ID NO: 2202769 - RNA, 16 nt, Human
uggcagaacugagcuc

SEQ ID NO: 2202770 - RNA, 23 nt, Human
uggcagaaagcaaaugugaccug

SEQ ID NO: 2202771 - RNA, 14 nt, Human
uggcagaacugagc

SEQ ID NO: 2202772 - RNA, 13 nt, Human
uggcagaagacac

SEQ ID NO: 2202773 - RNA, 14 nt, Human
uggcagaagacacc

SEQ ID NO: 2202774 - RNA, 18 nt, Human
uggcagaagacaccagag

SEQ ID NO: 2202775 - RNA, 20 nt, Human
uggcagaagacaccagagca

SEQ ID NO: 2202776 - RNA, 22 nt, Human
uggcagaagacaccagagcaga

SEQ ID NO: 2202777 - RNA, 11 nt, Human
uggcacuuuga

SEQ ID NO: 2202778 - RNA, 16 nt, Human
uggcacuuugaagggg

SEQ ID NO: 2202779 - RNA, 16 nt, Human
uggcacuuuuucauuu

SEQ ID NO: 2202780 - RNA, 21 nt, Human
uggcacuuuuucauuugccua

SEQ ID NO: 2202781 - RNA, 14 nt, Human
uggcacuugcaucu

SEQ ID NO: 2202782 - RNA, 16 nt, Human
uggcacuugcaucugu

SEQ ID NO: 2202783 - RNA, 17 nt, Human
uggcacuugcaucugug

SEQ ID NO: 2202784 - RNA, 23 nt, Human
uggcagcugcgguccacccagga

SEQ ID NO: 2202785 - RNA, 21 nt, Human
uggcagaagacaccagagcag

SEQ ID NO: 2202786 - RNA, 20 nt, Human
uggcaggauggccuggccag

SEQ ID NO: 2202787 - RNA, 21 nt, Human
uggcagcugcgguccacccag

SEQ ID NO: 2202788 - RNA, 22 nt, Human
uggcagcugcgguccacccagg

SEQ ID NO: 2202789 - RNA, 19 nt, Human
uggcacugcauacaaucug

SEQ ID NO: 2202790 - RNA, 17 nt, Human
uggcacugagccccccc

SEQ ID NO: 2202791 - RNA, 18 nt, Human
uggcacugagccccccca

SEQ ID NO: 2202792 - RNA, 13 nt, Human
uggcacugccaug

SEQ ID NO: 2202793 - RNA, 12 nt, Human
uggcacugcugu

SEQ ID NO: 2202794 - RNA, 21 nt, Human
uggcacuuagcuaucagaaga

SEQ ID NO: 2202795 - RNA, 18 nt, Human
uggcacugcuuccaguga

SEQ ID NO: 2202796 - RNA, 14 nt, Human
uggcacugcuucca

SEQ ID NO: 2202797 - RNA, 16 nt, Human
uggcacugcuuccagu

SEQ ID NO: 2202798 - RNA, 23 nt, Human
uggaugcagugcucgcuguugcu

SEQ ID NO: 2202799 - RNA, 20 nt, Human
uggaugccaauauuaaaucu

SEQ ID NO: 2202800 - RNA, 20 nt, Human
uggaugcauguuuuccagcu

SEQ ID NO: 2202801 - RNA, 22 nt, Human
uggaugcauguuuuccagcucc

SEQ ID NO: 2202802 - RNA, 15 nt, Human
uggaugcauuucucu

SEQ ID NO: 2202803 - RNA, 21 nt, Human
uggaugccaauauuaaaucug

SEQ ID NO: 2202804 - RNA, 14 nt, Human
uggaugccuggugg

SEQ ID NO: 2202805 - RNA, 16 nt, Human
uggcacugagcccccc

SEQ ID NO: 2202806 - RNA, 13 nt, Human
uggaugccugauu

SEQ ID NO: 2202807 - RNA, 14 nt, Human
uggcagugggagcu

SEQ ID NO: 2202808 - RNA, 15 nt, Human
uggcagugggagcug

SEQ ID NO: 2202809 - RNA, 16 nt, Human
uggcagugggagcugc

SEQ ID NO: 2202810 - RNA, 19 nt, Human
uggcagugggagcugccug

SEQ ID NO: 2202811 - RNA, 12 nt, Human
uggcaggcuggc

SEQ ID NO: 2202812 - RNA, 13 nt, Human
uggcaggcuggcc

SEQ ID NO: 2202813 - RNA, 14 nt, Human
uggcaggcuggcca

SEQ ID NO: 2202814 - RNA, 23 nt, Human
uggcaggcagcgccaagcaaccu

SEQ ID NO: 2202815 - RNA, 15 nt, Human
uggcaggcagcgcca

SEQ ID NO: 2202816 - RNA, 19 nt, Human
uggcaggcagcgccaagca

SEQ ID NO: 2202817 - RNA, 15 nt, Human
uggcaggcuggccag

SEQ ID NO: 2202818 - RNA, 18 nt, Human
uggcaggcuggccagucc

SEQ ID NO: 2202819 - RNA, 23 nt, Human
uggccagagagccuggugcugcu

SEQ ID NO: 2202820 - RNA, 13 nt, Human
uggccagagagcc

SEQ ID NO: 2202821 - RNA, 20 nt, Human
uggccagaagggggccauga

SEQ ID NO: 2202822 - RNA, 19 nt, Human
uggccacugcacagagcuc

SEQ ID NO: 2202823 - RNA, 12 nt, Human
uggccagacaca

SEQ ID NO: 2202824 - RNA, 18 nt, Human
uggccagacacaggcccu

SEQ ID NO: 2202825 - RNA, 13 nt, Human
uggccagacacag

SEQ ID NO: 2202826 - RNA, 14 nt, Human
uggccacugcacag

SEQ ID NO: 2202827 - RNA, 17 nt, Human
uggccacugcacagagc

SEQ ID NO: 2202828 - RNA, 18 nt, Human
uggccacugcacagagcu

SEQ ID NO: 2202829 - RNA, 20 nt, Human
uggccacuccgagagguggg

SEQ ID NO: 2202830 - RNA, 23 nt, Human
uggccacuccgagaggugggcca

SEQ ID NO: 2202831 - RNA, 21 nt, Human
uggccacuugggucuucccug

SEQ ID NO: 2202832 - RNA, 20 nt, Human
uggccacugcacagagcucu

SEQ ID NO: 2202833 - RNA, 16 nt, Human
uggccagaagucaagc

SEQ ID NO: 2202834 - RNA, 20 nt, Human
uggcagugggagcugccugu

SEQ ID NO: 2202835 - RNA, 12 nt, Human
uggcagugguuu

SEQ ID NO: 2202836 - RNA, 22 nt, Human
uggccacuccagaccccuggcu

SEQ ID NO: 2202837 - RNA, 14 nt, Human
uggccacuccgaga

SEQ ID NO: 2202838 - RNA, 18 nt, Human
uggccacuccgagaggug

SEQ ID NO: 2202839 - RNA, 12 nt, Human
ucugugucugug

SEQ ID NO: 2202840 - RNA, 12 nt, Human
ucugugucucuu

SEQ ID NO: 2202841 - RNA, 11 nt, Human
ucugugucucu

SEQ ID NO: 2202842 - RNA, 15 nt, Human
ucugugucuguguuu

SEQ ID NO: 2202843 - RNA, 13 nt, Human
ucugugucugugu

SEQ ID NO: 2202844 - RNA, 12 nt, Human
ucugugucuugu

SEQ ID NO: 2202845 - RNA, 21 nt, Human
ucugugucuuucacagcuccu

SEQ ID NO: 2202846 - RNA, 21 nt, Human
ucuguguguguguaugugggg

SEQ ID NO: 2202847 - RNA, 19 nt, Human
ucuguguguguguaugugg

SEQ ID NO: 2202848 - RNA, 18 nt, Human
ucuguguguguguaugug

SEQ ID NO: 2202849 - RNA, 15 nt, Human
ucuguguguguguau

SEQ ID NO: 2202850 - RNA, 22 nt, Human
ucugugucagguggggcagcuu

SEQ ID NO: 2202851 - RNA, 20 nt, Human
ucugugguuuuccccucccu

SEQ ID NO: 2202852 - RNA, 21 nt, Human
ucugugguuuuccccucccug

SEQ ID NO: 2202853 - RNA, 22 nt, Human
ucugugguuuuccccucccugg

SEQ ID NO: 2202854 - RNA, 23 nt, Human
ucugugguuuuccccucccuggg

SEQ ID NO: 2202855 - RNA, 18 nt, Human
ucuguguccuucccugca

SEQ ID NO: 2202856 - RNA, 14 nt, Human
ucuguguacaaaga

SEQ ID NO: 2202857 - RNA, 11 nt, Human
ucuguguccuu

SEQ ID NO: 2202858 - RNA, 15 nt, Human
ucuguguccuucccu

SEQ ID NO: 2202859 - RNA, 17 nt, Human
ucuguguccuucccugc

SEQ ID NO: 2202860 - RNA, 19 nt, Human
ucugugguuuuccccuccc

SEQ ID NO: 2202861 - RNA, 23 nt, Human
ucuguggguuucuaaagcugcca

SEQ ID NO: 2202862 - RNA, 20 nt, Human
ucugucccuucugucccuca

SEQ ID NO: 2202863 - RNA, 19 nt, Human
ucugucccuucugucccuc

SEQ ID NO: 2202864 - RNA, 15 nt, Human
ucugucccucacagc

SEQ ID NO: 2202865 - RNA, 14 nt, Human
ucugucccucacag

SEQ ID NO: 2202866 - RNA, 17 nt, Human
ucuguacgucugacagg

SEQ ID NO: 2202867 - RNA, 18 nt, Human
ucuguacauagccuauau

SEQ ID NO: 2202868 - RNA, 14 nt, Human
ucuguacauagccu

SEQ ID NO: 2202869 - RNA, 19 nt, Human
ucuguccgagcuuugaaaa

SEQ ID NO: 2202870 - RNA, 23 nt, Human
ucugucccuucugucccucacag

SEQ ID NO: 2202871 - RNA, 22 nt, Human
ucugucccuucugucccucaca

SEQ ID NO: 2202872 - RNA, 20 nt, Human
ucuguccguuuacuccaagg

SEQ ID NO: 2202873 - RNA, 15 nt, Human
ucugucccuuggagc

SEQ ID NO: 2202874 - RNA, 22 nt, Human
ucuguggguuucuaaagcugcc

SEQ ID NO: 2202875 - RNA, 15 nt, Human
ucuguguuuuugaaa

SEQ ID NO: 2202876 - RNA, 14 nt, Human
ucuguguuuugaau

SEQ ID NO: 2202877 - RNA, 13 nt, Human
ucuguguuuuaau

SEQ ID NO: 2202878 - RNA, 16 nt, Human
ucuguguuuuugaaau

SEQ ID NO: 2202879 - RNA, 19 nt, Human
ucuguuaccaugucacugu

SEQ ID NO: 2202880 - RNA, 21 nt, Human
ucuguuaccaugucacugugg

SEQ ID NO: 2202881 - RNA, 20 nt, Human
ucuguguguuuaugugugug

SEQ ID NO: 2202882 - RNA, 19 nt, Human
ucuguguguuuaugugugu

SEQ ID NO: 2202883 - RNA, 14 nt, Human
ucuguguugccaag

SEQ ID NO: 2202884 - RNA, 16 nt, Human
ucuguguugccaagcu

SEQ ID NO: 2202885 - RNA, 21 nt, Human
ucuguguuggcccaagcucuu

SEQ ID NO: 2202886 - RNA, 23 nt, Human
ucuguguuggcccaagcucuugu

SEQ ID NO: 2202887 - RNA, 22 nt, Human
ucuguguguguguauguggggg

SEQ ID NO: 2202888 - RNA, 11 nt, Human
ucugugucuuu

SEQ ID NO: 2202889 - RNA, 16 nt, Human
ucuguguguuuaugug

SEQ ID NO: 2202890 - RNA, 15 nt, Human
ucuguguguuuaugu

SEQ ID NO: 2202891 - RNA, 18 nt, Human
ucuuaaaaaguggaaaaa

SEQ ID NO: 2202892 - RNA, 13 nt, Human
ucuguuuuccuuu

SEQ ID NO: 2202893 - RNA, 16 nt, Human
ucuguuuuccuuucuc

SEQ ID NO: 2202894 - RNA, 17 nt, Human
ucuguuuuccuuucuca

SEQ ID NO: 2202895 - RNA, 12 nt, Human
ucuguucagugu

SEQ ID NO: 2202896 - RNA, 17 nt, Human
ucuguuuuaugacuuca

SEQ ID NO: 2202897 - RNA, 13 nt, Human
ucuguuuuaugac

SEQ ID NO: 2202898 - RNA, 16 nt, Human
ucuguuuuaugacuuc

SEQ ID NO: 2202899 - RNA, 15 nt, Human
ucuguuuuaugacuu

SEQ ID NO: 2202900 - RNA, 22 nt, Human
ucuguuuuauaauuuugugaag

SEQ ID NO: 2202901 - RNA, 13 nt, Human
ucuguucaccuuc

SEQ ID NO: 2202902 - RNA, 19 nt, Human
ucuguucacuuuuccuccc

SEQ ID NO: 2202903 - RNA, 22 nt, Human
ucuguucacuuuuccucccuca

SEQ ID NO: 2202904 - RNA, 21 nt, Human
ucuguucacuuuuccucccuc

SEQ ID NO: 2202905 - RNA, 18 nt, Human
ucuguuauauaaaugguu

SEQ ID NO: 2202906 - RNA, 15 nt, Human
ucuguuauauaaaug

SEQ ID NO: 2202907 - RNA, 15 nt, Human
ucuguuauuaacaaa

SEQ ID NO: 2202908 - RNA, 18 nt, Human
ucuguuauuuagacucau

SEQ ID NO: 2202909 - RNA, 17 nt, Human
ucuguuaugcugugaca

SEQ ID NO: 2202910 - RNA, 18 nt, Human
ucugggaaauaagagaga

SEQ ID NO: 2202911 - RNA, 17 nt, Human
ucugggaaaauacccca

SEQ ID NO: 2202912 - RNA, 23 nt, Human
ucuggcuuucuccgacugcuagg

SEQ ID NO: 2202913 - RNA, 17 nt, Human
ucuggcucuuccaggcu

SEQ ID NO: 2202914 - RNA, 15 nt, Human
ucuggcucuuccagg

SEQ ID NO: 2202915 - RNA, 16 nt, Human
ucuggcucuuccaggc

SEQ ID NO: 2202916 - RNA, 13 nt, Human
ucugggacacagu

SEQ ID NO: 2202917 - RNA, 22 nt, Human
ucugggaaaugagaaggcagcc

SEQ ID NO: 2202918 - RNA, 22 nt, Human
ucugggaaauggcuugaagcca

SEQ ID NO: 2202919 - RNA, 18 nt, Human
ucugggaacugugccuuu

SEQ ID NO: 2202920 - RNA, 14 nt, Human
ucugggaagggaag

SEQ ID NO: 2202921 - RNA, 12 nt, Human
ucugggacacag

SEQ ID NO: 2202922 - RNA, 15 nt, Human
ucuguaaucucguuu

SEQ ID NO: 2202923 - RNA, 20 nt, Human
ucuguaaucucguuucaaaa

SEQ ID NO: 2202924 - RNA, 23 nt, Human
ucuguacagagcccacgccccca

SEQ ID NO: 2202925 - RNA, 15 nt, Human
ucuguaagcugaagu

SEQ ID NO: 2202926 - RNA, 14 nt, Human
ucugguuuugcuau

SEQ ID NO: 2202927 - RNA, 13 nt, Human
ucuguaaaaucuu

SEQ ID NO: 2202928 - RNA, 14 nt, Human
ucuguaaaaucuuu

SEQ ID NO: 2202929 - RNA, 17 nt, Human
ucuguaaaaucuuucuu

SEQ ID NO: 2202930 - RNA, 11 nt, Human
ucuguaaaauc

SEQ ID NO: 2202931 - RNA, 12 nt, Human
ucuguaaaaucu

SEQ ID NO: 2202932 - RNA, 15 nt, Human
ucugguuucaccgag

SEQ ID NO: 2202933 - RNA, 18 nt, Human
ucugguuugacuccgcug

SEQ ID NO: 2202934 - RNA, 22 nt, Human
ucugguuugacuccgcuggagg

SEQ ID NO: 2202935 - RNA, 13 nt, Human
ucugguuuggggc

SEQ ID NO: 2202936 - RNA, 23 nt, Human
ucugguuuggggcgaggcagagg

SEQ ID NO: 2202937 - RNA, 13 nt, Human
ucugguuuuaaca

SEQ ID NO: 2202938 - RNA, 15 nt, Human
ucugguuuuaacaau

SEQ ID NO: 2202939 - RNA, 15 nt, Human
ucugguuuugcuauu

SEQ ID NO: 2202940 - RNA, 16 nt, Human
ucuggcuagaggccag

SEQ ID NO: 2202941 - RNA, 22 nt, Human
ucuggcgacaguuuuccuucuc

SEQ ID NO: 2202942 - RNA, 18 nt, Human
ucuggcgacaguuuuccu

SEQ ID NO: 2202943 - RNA, 14 nt, Human
ucuggccuuuuccu

SEQ ID NO: 2202944 - RNA, 14 nt, Human
ucuggcuaugcauu

SEQ ID NO: 2202945 - RNA, 21 nt, Human
ucuggcuagaggccagcccca

SEQ ID NO: 2202946 - RNA, 17 nt, Human
ucuggcuagaggccagc

SEQ ID NO: 2202947 - RNA, 17 nt, Human
ucuggcuaugcauuuga

SEQ ID NO: 2202948 - RNA, 22 nt, Human
ucuggcuagaggccagccccac

SEQ ID NO: 2202949 - RNA, 13 nt, Human
ucuggcucugucu

SEQ ID NO: 2202950 - RNA, 15 nt, Human
ucuggaggggccccu

SEQ ID NO: 2202951 - RNA, 17 nt, Human
ucuggaggggccccugc

SEQ ID NO: 2202952 - RNA, 23 nt, Human
ucuggaggggccccugcuucucc

SEQ ID NO: 2202953 - RNA, 14 nt, Human
ucuggaggggaggg

SEQ ID NO: 2202954 - RNA, 21 nt, Human
ucuggaggggagggggauccg

SEQ ID NO: 2202955 - RNA, 13 nt, Human
ucuggagcccuug

SEQ ID NO: 2202956 - RNA, 12 nt, Human
ucuggagcccuu

SEQ ID NO: 2202957 - RNA, 20 nt, Human
ucuggagagcuagaaccugg

SEQ ID NO: 2202958 - RNA, 16 nt, Human
ucuggagcccuugggu

SEQ ID NO: 2202959 - RNA, 12 nt, Human
ucuggagacagc

SEQ ID NO: 2202960 - RNA, 20 nt, Human
ucuggagaagcucccaggaa

SEQ ID NO: 2202961 - RNA, 22 nt, Human
ucuggagaagcucccaggaaca

SEQ ID NO: 2202962 - RNA, 18 nt, Human
ucugcacccuccacccug

SEQ ID NO: 2202963 - RNA, 19 nt, Human
ucugcacccuccacccugu

SEQ ID NO: 2202964 - RNA, 21 nt, Human
ucugcacccuccacccugucc

SEQ ID NO: 2202965 - RNA, 19 nt, Human
ucuggagaagcucccagga

SEQ ID NO: 2202966 - RNA, 21 nt, Human
ucugcaccccuucucuccucc

SEQ ID NO: 2202967 - RNA, 22 nt, Human
ucugcaccccuucucuccuccc

SEQ ID NO: 2202968 - RNA, 12 nt, Human
ucugcacccucc

SEQ ID NO: 2202969 - RNA, 13 nt, Human
ucugcacccucca

SEQ ID NO: 2202970 - RNA, 14 nt, Human
ucugcacccuccac

SEQ ID NO: 2202971 - RNA, 15 nt, Human
ucugcacccuccacc

SEQ ID NO: 2202972 - RNA, 16 nt, Human
ucugcacccuccaccc

SEQ ID NO: 2202973 - RNA, 17 nt, Human
ucugcacccuccacccu

SEQ ID NO: 2202974 - RNA, 18 nt, Human
ucugcaccccccugggcu

SEQ ID NO: 2202975 - RNA, 17 nt, Human
ucugcaccccccugggc

SEQ ID NO: 2202976 - RNA, 16 nt, Human
ucugcaccccccuggg

SEQ ID NO: 2202977 - RNA, 15 nt, Human
ucugcaccccuucuc

SEQ ID NO: 2202978 - RNA, 18 nt, Human
ucugcaccccuucucucc

SEQ ID NO: 2202979 - RNA, 19 nt, Human
ucugcaccccuucucuccu

SEQ ID NO: 2202980 - RNA, 20 nt, Human
ucugcaccccuucucuccuc

SEQ ID NO: 2202981 - RNA, 15 nt, Human
ucugcaccccccugg

SEQ ID NO: 2202982 - RNA, 15 nt, Human
ucugcacccaggggu

SEQ ID NO: 2202983 - RNA, 13 nt, Human
ucugcacccaggg

SEQ ID NO: 2202984 - RNA, 21 nt, Human
ucugcacaugucuuguacaug

SEQ ID NO: 2202985 - RNA, 22 nt, Human
ucugcacaugucuuguacaugu

SEQ ID NO: 2202986 - RNA, 23 nt, Human
ucuggagcccacuguacuugcuc

SEQ ID NO: 2202987 - RNA, 13 nt, Human
ucuggagagcuag

SEQ ID NO: 2202988 - RNA, 14 nt, Human
ucuggagagcuaga

SEQ ID NO: 2202989 - RNA, 21 nt, Human
ucuggagaccagggagccuuu

SEQ ID NO: 2202990 - RNA, 12 nt, Human
ucuggagagaaa

SEQ ID NO: 2202991 - RNA, 15 nt, Human
ucuggagagaaacaa

SEQ ID NO: 2202992 - RNA, 20 nt, Human
ucuggagaccagggagccuu

SEQ ID NO: 2202993 - RNA, 19 nt, Human
ucuggagaccagggagccu

SEQ ID NO: 2202994 - RNA, 15 nt, Human
ucuggagaccaggga

SEQ ID NO: 2202995 - RNA, 23 nt, Human
ucuggagaagcucccaggaacaa

SEQ ID NO: 2202996 - RNA, 15 nt, Human
ucuggagacagcccc

SEQ ID NO: 2202997 - RNA, 16 nt, Human
ucuggagacagcccca

SEQ ID NO: 2202998 - RNA, 17 nt, Human
ucuggagacagccccag

SEQ ID NO: 2202999 - RNA, 18 nt, Human
ucuggagacagccccaga

SEQ ID NO: 2203000 - RNA, 20 nt, Human
ucuggagacagccccagagc

SEQ ID NO: 2203001 - RNA, 22 nt, Human
ucuggagacagccccagagcag

SEQ ID NO: 2203002 - RNA, 24 nt, Human
ucuggagacagccccagagcaggg

SEQ ID NO: 2203003 - RNA, 20 nt, Human
ucuugacgagugugaagcuu

SEQ ID NO: 2203004 - RNA, 21 nt, Human
ucuugaccaagcaggaagcuc

SEQ ID NO: 2203005 - RNA, 11 nt, Human
ucuugacccua

SEQ ID NO: 2203006 - RNA, 12 nt, Human
ucuugccucugu

SEQ ID NO: 2203007 - RNA, 22 nt, Human
ucuugccucuguccccuucucu

SEQ ID NO: 2203008 - RNA, 13 nt, Human
ucuugccucugug

SEQ ID NO: 2203009 - RNA, 16 nt, Human
ucuugccucugucccc

SEQ ID NO: 2203010 - RNA, 21 nt, Human
ucuugccucuguccccuucuc

SEQ ID NO: 2203011 - RNA, 14 nt, Human
ucuugccucugugc

SEQ ID NO: 2203012 - RNA, 15 nt, Human
ucuugccucugugcu

SEQ ID NO: 2203013 - RNA, 16 nt, Human
ucuugccucugugcug

SEQ ID NO: 2203014 - RNA, 19 nt, Human
ucuugccucugugcugugu

SEQ ID NO: 2203015 - RNA, 18 nt, Human
ucuugaauuucuaaaaaa

SEQ ID NO: 2203016 - RNA, 20 nt, Human
ucuugacaccagcuguucug

SEQ ID NO: 2203017 - RNA, 21 nt, Human
ucuugacaccagcuguucugu

SEQ ID NO: 2203018 - RNA, 23 nt, Human
ucuugaauuuaauaaucuguagg

SEQ ID NO: 2203019 - RNA, 21 nt, Human
ucuugaauuuaauaaucugua

SEQ ID NO: 2203020 - RNA, 19 nt, Human
ucuugaccaagcaggaagc

SEQ ID NO: 2203021 - RNA, 19 nt, Human
ucuugacauucaaggcauu

SEQ ID NO: 2203022 - RNA, 22 nt, Human
ucuugacaccagcuguucuguc

SEQ ID NO: 2203023 - RNA, 21 nt, Human
ucuugaauuguaaggaaugau

SEQ ID NO: 2203024 - RNA, 14 nt, Human
ucuucuccaggaug

SEQ ID NO: 2203025 - RNA, 13 nt, Human
ucuugaauuuaau

SEQ ID NO: 2203026 - RNA, 15 nt, Human
ucuugaacugagcuu

SEQ ID NO: 2203027 - RNA, 15 nt, Human
ucuucuccaggcugu

SEQ ID NO: 2203028 - RNA, 16 nt, Human
ucuugaacuccuggcc

SEQ ID NO: 2203029 - RNA, 17 nt, Human
ucuugaacuccuggccu

SEQ ID NO: 2203030 - RNA, 18 nt, Human
ucuugaacuccuggccuc

SEQ ID NO: 2203031 - RNA, 13 nt, Human
ucuucuccaggcu

SEQ ID NO: 2203032 - RNA, 14 nt, Human
ucuucuccaggcug

SEQ ID NO: 2203033 - RNA, 12 nt, Human
ucuucuccaggc

SEQ ID NO: 2203034 - RNA, 16 nt, Human
ucuucuccacuggaug

SEQ ID NO: 2203035 - RNA, 21 nt, Human
ucuucucagaaggcaaaugac

SEQ ID NO: 2203036 - RNA, 16 nt, Human
ucuuguauuaaguugu

SEQ ID NO: 2203037 - RNA, 12 nt, Human
ucuugccuucag

SEQ ID NO: 2203038 - RNA, 18 nt, Human
ucuuguauuaaguuguua

SEQ ID NO: 2203039 - RNA, 22 nt, Human
ucuuguauuaaguuguuaauaa

SEQ ID NO: 2203040 - RNA, 22 nt, Human
ucuuguccaugugguucuucaa

SEQ ID NO: 2203041 - RNA, 23 nt, Human
ucuuguccaugugguucuucaaa

SEQ ID NO: 2203042 - RNA, 22 nt, Human
ucuuguauuaagaaugaaauac

SEQ ID NO: 2203043 - RNA, 12 nt, Human
ucuugcucugcu

SEQ ID NO: 2203044 - RNA, 13 nt, Human
ucuugcucugcug

SEQ ID NO: 2203045 - RNA, 11 nt, Human
ucuugcucugc

SEQ ID NO: 2203046 - RNA, 18 nt, Human
ucuuguuuuuuuuuucca

SEQ ID NO: 2203047 - RNA, 21 nt, Human
ucuuguuuuuuuuuuccacuu

SEQ ID NO: 2203048 - RNA, 22 nt, Human
ucuuguuuuuccacuacugcua

SEQ ID NO: 2203049 - RNA, 23 nt, Human
ucuuguccccucuugacccaucu

SEQ ID NO: 2203050 - RNA, 12 nt, Human
ucuugucucugg

SEQ ID NO: 2203051 - RNA, 13 nt, Human
ucuugucucuggg

SEQ ID NO: 2203052 - RNA, 14 nt, Human
ucuugucucugggc

SEQ ID NO: 2203053 - RNA, 15 nt, Human
ucuugucucugggcu

SEQ ID NO: 2203054 - RNA, 21 nt, Human
ucuugugacauauuaugucuu

SEQ ID NO: 2203055 - RNA, 15 nt, Human
ucuugugaaggcagg

SEQ ID NO: 2203056 - RNA, 15 nt, Human
ucuucagggggccag

SEQ ID NO: 2203057 - RNA, 16 nt, Human
ucuucagguggaaaaa

SEQ ID NO: 2203058 - RNA, 21 nt, Human
ucuucaggguccugagauuua

SEQ ID NO: 2203059 - RNA, 19 nt, Human
ucuucagugggagaaaaca

SEQ ID NO: 2203060 - RNA, 14 nt, Human
ucuucagguucuua

SEQ ID NO: 2203061 - RNA, 23 nt, Human
ucuucagguggaaaaacaucuga

SEQ ID NO: 2203062 - RNA, 16 nt, Human
ucuucaguaagccgug

SEQ ID NO: 2203063 - RNA, 24 nt, Human
ucuuccaagcaaaggugaagagac

SEQ ID NO: 2203064 - RNA, 18 nt, Human
ucuuccaagcaaagguga

SEQ ID NO: 2203065 - RNA, 21 nt, Human
ucuuccacaagagcccaggcc

SEQ ID NO: 2203066 - RNA, 23 nt, Human
ucuucuagagccgugaugccucc

SEQ ID NO: 2203067 - RNA, 12 nt, Human
ucuucuaaaugg

SEQ ID NO: 2203068 - RNA, 15 nt, Human
ucuucuaauuucaaa

SEQ ID NO: 2203069 - RNA, 20 nt, Human
ucuucuaauuucaaaaauau

SEQ ID NO: 2203070 - RNA, 22 nt, Human
ucuucuaaacuuccccaucuuc

SEQ ID NO: 2203071 - RNA, 13 nt, Human
ucuucuaaacuuc

SEQ ID NO: 2203072 - RNA, 11 nt, Human
ucuuccagaag

SEQ ID NO: 2203073 - RNA, 16 nt, Human
ucuuccagaaguguga

SEQ ID NO: 2203074 - RNA, 17 nt, Human
ucuuccagaagugugau

SEQ ID NO: 2203075 - RNA, 18 nt, Human
ucuuccagaagugugauu

SEQ ID NO: 2203076 - RNA, 19 nt, Human
ucuuccagaagugugauug

SEQ ID NO: 2203077 - RNA, 20 nt, Human
ucuuccagaagugugauugg

SEQ ID NO: 2203078 - RNA, 13 nt, Human
ucuuccagaaucc

SEQ ID NO: 2203079 - RNA, 14 nt, Human
ucuuccaggcuggg

SEQ ID NO: 2203080 - RNA, 13 nt, Human
ucuucuccacugg

SEQ ID NO: 2203081 - RNA, 23 nt, Human
ucuucucagaaggcaaaugacuu

SEQ ID NO: 2203082 - RNA, 19 nt, Human
ucuucuccacuuucuagcc

SEQ ID NO: 2203083 - RNA, 21 nt, Human
ucuucuccacuuucuagccag

SEQ ID NO: 2203084 - RNA, 16 nt, Human
ucuucuauuuuauucc

SEQ ID NO: 2203085 - RNA, 15 nt, Human
ucuucuauuuuauuc

SEQ ID NO: 2203086 - RNA, 13 nt, Human
ucuucuauuuugu

SEQ ID NO: 2203087 - RNA, 13 nt, Human
ucuucucaagugc

SEQ ID NO: 2203088 - RNA, 15 nt, Human
ucuucucaagugccu

SEQ ID NO: 2203089 - RNA, 16 nt, Human
ucuucucaagugccuu

SEQ ID NO: 2203090 - RNA, 17 nt, Human
ucuucucaagugccuua

SEQ ID NO: 2203091 - RNA, 17 nt, Human
ucuucuagguucuaaaa

SEQ ID NO: 2203092 - RNA, 13 nt, Human
ucuuauagaaagu

SEQ ID NO: 2203093 - RNA, 19 nt, Human
ucuuauagaauauuuauua

SEQ ID NO: 2203094 - RNA, 20 nt, Human
ucuuauagaauauuuauuac

SEQ ID NO: 2203095 - RNA, 13 nt, Human
ucuuauaaauaug

SEQ ID NO: 2203096 - RNA, 14 nt, Human
ucuuauaaauauga

SEQ ID NO: 2203097 - RNA, 21 nt, Human
ucuuauaaauaugaagcucac

SEQ ID NO: 2203098 - RNA, 22 nt, Human
ucuuauagucaauguuucuuuu

SEQ ID NO: 2203099 - RNA, 20 nt, Human
ucuuauauauauuucuuugu

SEQ ID NO: 2203100 - RNA, 14 nt, Human
ucuuaugcaauuuc

SEQ ID NO: 2203101 - RNA, 17 nt, Human
ucuuaugcuuauaauau

SEQ ID NO: 2203102 - RNA, 15 nt, Human
ucuucaguaagccgu

SEQ ID NO: 2203103 - RNA, 15 nt, Human
ucuucagggcacugc

SEQ ID NO: 2203104 - RNA, 13 nt, Human
ucuucagggcacu

SEQ ID NO: 2203105 - RNA, 13 nt, Human
ucuuaugggcugg

SEQ ID NO: 2203106 - RNA, 22 nt, Human
ucuuauggaauugauuugcauu

SEQ ID NO: 2203107 - RNA, 21 nt, Human
ucuuauggaauugauuugcau

SEQ ID NO: 2203108 - RNA, 18 nt, Human
ucuuauggaauugauuug

SEQ ID NO: 2203109 - RNA, 17 nt, Human
ucuuauggaauugauuu

SEQ ID NO: 2203110 - RNA, 15 nt, Human
ucuuauggaauugau

SEQ ID NO: 2203111 - RNA, 14 nt, Human
ucuuauggaauuga

SEQ ID NO: 2203112 - RNA, 14 nt, Human
ucuuauacauuuga

SEQ ID NO: 2203113 - RNA, 15 nt, Human
ucuuauacauuugau

SEQ ID NO: 2203114 - RNA, 20 nt, Human
ucuuaaaauauauuucagau

SEQ ID NO: 2203115 - RNA, 19 nt, Human
ucuuaaaauauauuucaga

SEQ ID NO: 2203116 - RNA, 15 nt, Human
ucuuaguucucacug

SEQ ID NO: 2203117 - RNA, 16 nt, Human
ucuuaguucucacugu

SEQ ID NO: 2203118 - RNA, 16 nt, Human
ucuuaguuuggauucu

SEQ ID NO: 2203119 - RNA, 21 nt, Human
ucuuaguuuggauucuuaugu

SEQ ID NO: 2203120 - RNA, 23 nt, Human
ucuuaguuuggauucuuauguag

SEQ ID NO: 2203121 - RNA, 11 nt, Human
ucuuauaaaua

SEQ ID NO: 2203122 - RNA, 12 nt, Human
ucuuauaaauau

SEQ ID NO: 2203123 - RNA, 20 nt, Human
ucuuaaaacauuaugaguuu

SEQ ID NO: 2203124 - RNA, 13 nt, Human
ucuuaaaaagugg

SEQ ID NO: 2203125 - RNA, 23 nt, Human
ucuuaaaaguugugauuccagau

SEQ ID NO: 2203126 - RNA, 14 nt, Human
ucuuaaaauaacuu

SEQ ID NO: 2203127 - RNA, 15 nt, Human
ucuuaaaauaacuua

SEQ ID NO: 2203128 - RNA, 21 nt, Human
ucuuaaaauaacuuauaucau

SEQ ID NO: 2203129 - RNA, 16 nt, Human
ucuuaguggauguucu

SEQ ID NO: 2203130 - RNA, 14 nt, Human
ucuuagugugugca

SEQ ID NO: 2203131 - RNA, 19 nt, Human
ugaaaugcagagucaauga

SEQ ID NO: 2203132 - RNA, 23 nt, Human
ugaaaugaggucagagccugcag

SEQ ID NO: 2203133 - RNA, 21 nt, Human
ugaaaugaggucagagccugc

SEQ ID NO: 2203134 - RNA, 22 nt, Human
ugaaaugaggucagagccugca

SEQ ID NO: 2203135 - RNA, 19 nt, Human
ugaaaugaggucagagccu

SEQ ID NO: 2203136 - RNA, 20 nt, Human
ugaaaugaggucagagccug

SEQ ID NO: 2203137 - RNA, 20 nt, Human
ugaaaugaaaacauguaaua

SEQ ID NO: 2203138 - RNA, 19 nt, Human
ugaaaugaaaacauguaau

SEQ ID NO: 2203139 - RNA, 14 nt, Human
ugaaaugaaaacau

SEQ ID NO: 2203140 - RNA, 13 nt, Human
ugaaaugaaaaca

SEQ ID NO: 2203141 - RNA, 19 nt, Human
ugaaaugaccucaagaugu

SEQ ID NO: 2203142 - RNA, 16 nt, Human
ugaaaugaauauuuaa

SEQ ID NO: 2203143 - RNA, 16 nt, Human
ugaaaucucagaauuc

SEQ ID NO: 2203144 - RNA, 19 nt, Human
ugaaaucuuacagcugggu

SEQ ID NO: 2203145 - RNA, 19 nt, Human
ugaaaucucagaauuccuu

SEQ ID NO: 2203146 - RNA, 17 nt, Human
ugaaaucuuuuugcuuu

SEQ ID NO: 2203147 - RNA, 22 nt, Human
ugaaauccuggguuuucuuaac

SEQ ID NO: 2203148 - RNA, 14 nt, Human
ugaaauccugcuuc

SEQ ID NO: 2203149 - RNA, 15 nt, Human
ugaaaucauucauuu

SEQ ID NO: 2203150 - RNA, 14 nt, Human
ugaaaggagcccuu

SEQ ID NO: 2203151 - RNA, 15 nt, Human
ugaaagggcccagag

SEQ ID NO: 2203152 - RNA, 16 nt, Human
ugaaagggcccagaga

SEQ ID NO: 2203153 - RNA, 17 nt, Human
ugaaagggcccagagag

SEQ ID NO: 2203154 - RNA, 18 nt, Human
ugaaagggcccagagagg

SEQ ID NO: 2203155 - RNA, 23 nt, Human
ugaaaagaggggaccagaagcca

SEQ ID NO: 2203156 - RNA, 13 nt, Human
ugaaaagaggugu

SEQ ID NO: 2203157 - RNA, 22 nt, Human
ugaaaagacuccaaagaaaugu

SEQ ID NO: 2203158 - RNA, 18 nt, Human
ugaaacccugucucuacu

SEQ ID NO: 2203159 - RNA, 22 nt, Human
ugaaaagaggugugcaagagag

SEQ ID NO: 2203160 - RNA, 16 nt, Human
ugaaaagauaaauuau

SEQ ID NO: 2203161 - RNA, 23 nt, Human
ugaaacccugucucuacuaaaaa

SEQ ID NO: 2203162 - RNA, 22 nt, Human
ugaaagauggcugugccucugc

SEQ ID NO: 2203163 - RNA, 23 nt, Human
ugaaagauggcugugccucugcc

SEQ ID NO: 2203164 - RNA, 21 nt, Human
ugaaagauggcugugccucug

SEQ ID NO: 2203165 - RNA, 21 nt, Human
ugaaaccuuuuuuaagauuuu

SEQ ID NO: 2203166 - RNA, 23 nt, Human
ugaaaccuuuuuuaagauuuuuc

SEQ ID NO: 2203167 - RNA, 17 nt, Human
ugaaaccuuauuuuuuc

SEQ ID NO: 2203168 - RNA, 18 nt, Human
ugaaaccuuauuuuuucc

SEQ ID NO: 2203169 - RNA, 20 nt, Human
ugaaaccuuauuuuuuccca

SEQ ID NO: 2203170 - RNA, 18 nt, Human
ugaaaccuuuagggcagc

SEQ ID NO: 2203171 - RNA, 20 nt, Human
ugaaaccuuuagggcagcuu

SEQ ID NO: 2203172 - RNA, 21 nt, Human
ugaaaccuuuagggcagcuug

SEQ ID NO: 2203173 - RNA, 22 nt, Human
ugaaaccuuuagggcagcuugc

SEQ ID NO: 2203174 - RNA, 16 nt, Human
ugaaaccuuuuuuaag

SEQ ID NO: 2203175 - RNA, 17 nt, Human
ugaaaccuuuuuuaaga

SEQ ID NO: 2203176 - RNA, 18 nt, Human
ugaaaccuuuuuuaagau

SEQ ID NO: 2203177 - RNA, 19 nt, Human
ugaaaccuuuuuuaagauu

SEQ ID NO: 2203178 - RNA, 20 nt, Human
ugaaaccuuuuuuaagauuu

SEQ ID NO: 2203179 - RNA, 11 nt, Human
ugaaagcugug

SEQ ID NO: 2203180 - RNA, 12 nt, Human
ugaaaggaaaga

SEQ ID NO: 2203181 - RNA, 18 nt, Human
ugaaaggaagcuccacug

SEQ ID NO: 2203182 - RNA, 17 nt, Human
ugaaaggaaagaggcuc

SEQ ID NO: 2203183 - RNA, 23 nt, Human
ugaaagcagggacuugaacccau

SEQ ID NO: 2203184 - RNA, 19 nt, Human
ugaaagcagggacuugaac

SEQ ID NO: 2203185 - RNA, 18 nt, Human
ugaaagcagggacuugaa

SEQ ID NO: 2203186 - RNA, 21 nt, Human
ugaaagauucagguauguugc

SEQ ID NO: 2203187 - RNA, 15 nt, Human
ucuuuuguaauuuaa

SEQ ID NO: 2203188 - RNA, 14 nt, Human
ucuuuuuaugcauu

SEQ ID NO: 2203189 - RNA, 13 nt, Human
ucuuuuuauugaa

SEQ ID NO: 2203190 - RNA, 14 nt, Human
ucuuuuuauugaau

SEQ ID NO: 2203191 - RNA, 15 nt, Human
ucuuuuuauugaauc

SEQ ID NO: 2203192 - RNA, 12 nt, Human
ucuuuuucaguu

SEQ ID NO: 2203193 - RNA, 14 nt, Human
ucuuuuucuggacu

SEQ ID NO: 2203194 - RNA, 12 nt, Human
ucuuuuucuucu

SEQ ID NO: 2203195 - RNA, 15 nt, Human
ucuuuuucuucuucc

SEQ ID NO: 2203196 - RNA, 17 nt, Human
ucuuuuucuucuucccu

SEQ ID NO: 2203197 - RNA, 16 nt, Human
ucuuuuugcuuugcuu

SEQ ID NO: 2203198 - RNA, 19 nt, Human
ucuuuuuuaaaugaagaaa

SEQ ID NO: 2203199 - RNA, 19 nt, Human
ucuuuuugacucuugcaau

SEQ ID NO: 2203200 - RNA, 13 nt, Human
ucuuuuugcuguu

SEQ ID NO: 2203201 - RNA, 16 nt, Human
ucuuuuuuagcauaaa

SEQ ID NO: 2203202 - RNA, 15 nt, Human
ucuuuuuuagcauaa

SEQ ID NO: 2203203 - RNA, 13 nt, Human
ucuuuuuuaugug

SEQ ID NO: 2203204 - RNA, 20 nt, Human
ucuuuuuuagcauaaaauuu

SEQ ID NO: 2203205 - RNA, 13 nt, Human
ucuuuuuucaaaa

SEQ ID NO: 2203206 - RNA, 19 nt, Human
ugaaaacguuuuauugugu

SEQ ID NO: 2203207 - RNA, 19 nt, Human
ugaaaacucauuacuuuuc

SEQ ID NO: 2203208 - RNA, 19 nt, Human
ugaaaacuuuaugcuaagu

SEQ ID NO: 2203209 - RNA, 17 nt, Human
ugaaaacuuuucucaga

SEQ ID NO: 2203210 - RNA, 18 nt, Human
ugaaaagacaucaagcac

SEQ ID NO: 2203211 - RNA, 17 nt, Human
ugaaaagacaucaagca

SEQ ID NO: 2203212 - RNA, 19 nt, Human
ugaaaagacuccaaagaaa

SEQ ID NO: 2203213 - RNA, 17 nt, Human
ugaaaagacuccaaaga

SEQ ID NO: 2203214 - RNA, 16 nt, Human
ugaaaagacuccaaag

SEQ ID NO: 2203215 - RNA, 15 nt, Human
ugaaaagacuccaaa

SEQ ID NO: 2203216 - RNA, 21 nt, Human
ucuuucacacuuccaccagcc

SEQ ID NO: 2203217 - RNA, 20 nt, Human
ucuuucacacuuccaccagc

SEQ ID NO: 2203218 - RNA, 14 nt, Human
ucuuucacagcucc

SEQ ID NO: 2203219 - RNA, 15 nt, Human
ucuuucacagcuccu

SEQ ID NO: 2203220 - RNA, 21 nt, Human
ucuuucaagugaaucuaaaag

SEQ ID NO: 2203221 - RNA, 10 nt, Human
ucuuucacau

SEQ ID NO: 2203222 - RNA, 20 nt, Human
ucuuucacagcuccucccac

SEQ ID NO: 2203223 - RNA, 18 nt, Human
ucuuucacagcuccuccc

SEQ ID NO: 2203224 - RNA, 19 nt, Human
ucuuucacagcuccuccca

SEQ ID NO: 2203225 - RNA, 16 nt, Human
ucuuuucuugccucug

SEQ ID NO: 2203226 - RNA, 20 nt, Human
ucuuuucuugccucuguccc

SEQ ID NO: 2203227 - RNA, 23 nt, Human
ucuuuucuuuagagcauugccau

SEQ ID NO: 2203228 - RNA, 16 nt, Human
ucuuuucuuuagagca

SEQ ID NO: 2203229 - RNA, 23 nt, Human
ucuuucacacuuccaccagccug

SEQ ID NO: 2203230 - RNA, 17 nt, Human
ucuuuucucugugcuuc

SEQ ID NO: 2203231 - RNA, 13 nt, Human
ucuuuucucugug

SEQ ID NO: 2203232 - RNA, 19 nt, Human
ucuuuucuggaauguaauc

SEQ ID NO: 2203233 - RNA, 16 nt, Human
ucuuuuuauacuauua

SEQ ID NO: 2203234 - RNA, 22 nt, Human
ucuuuugguaaagacuggcuuu

SEQ ID NO: 2203235 - RNA, 16 nt, Human
ucuuuuggggaaguga

SEQ ID NO: 2203236 - RNA, 20 nt, Human
ucuuuuggggaagugaggaa

SEQ ID NO: 2203237 - RNA, 21 nt, Human
ucuuuugcccuucacaguguu

SEQ ID NO: 2203238 - RNA, 20 nt, Human
ucuuuugacauguggaaagu

SEQ ID NO: 2203239 - RNA, 11 nt, Human
ucuuuugaccu

SEQ ID NO: 2203240 - RNA, 16 nt, Human
ucuuuugauuauguuu

SEQ ID NO: 2203241 - RNA, 13 nt, Human
ucuuuugcuuuug

SEQ ID NO: 2203242 - RNA, 17 nt, Human
ucuuuugcaugaugauc

SEQ ID NO: 2203243 - RNA, 18 nt, Human
ucuuuugcuuuuggcaaa

SEQ ID NO: 2203244 - RNA, 13 nt, Human
ucuuuuggcuucc

SEQ ID NO: 2203245 - RNA, 17 nt, Human
ucuuuugacauguggaa

SEQ ID NO: 2203246 - RNA, 15 nt, Human
ucuuuugacaugugg

SEQ ID NO: 2203247 - RNA, 14 nt, Human
ucuuuugacaugug

SEQ ID NO: 2203248 - RNA, 13 nt, Human
ucuuuugacaugu

SEQ ID NO: 2203249 - RNA, 20 nt, Human
ucuuuugaauccaugcuugg

SEQ ID NO: 2203250 - RNA, 19 nt, Human
ucuuuugaauccaugcuug

SEQ ID NO: 2203251 - RNA, 23 nt, Human
ucuuuugaauauucccaagccca

SEQ ID NO: 2203252 - RNA, 14 nt, Human
ucuuuugaaacaau

SEQ ID NO: 2203253 - RNA, 15 nt, Human
ucuuuugaaacaaua

SEQ ID NO: 2203254 - RNA, 19 nt, Human
ucuuuugccguuauuaaaa

SEQ ID NO: 2203255 - RNA, 17 nt, Human
ucuuuugccguuauuaa

SEQ ID NO: 2203256 - RNA, 21 nt, Human
ugaaggcucgagcaugccugg

SEQ ID NO: 2203257 - RNA, 21 nt, Human
ugaaguccaagcauuuagaug

SEQ ID NO: 2203258 - RNA, 22 nt, Human
ugaaguccaagcauuuagaugu

SEQ ID NO: 2203259 - RNA, 20 nt, Human
ugaaggcucgagcaugccug

SEQ ID NO: 2203260 - RNA, 17 nt, Human
ugaaggcaaaauugcaa

SEQ ID NO: 2203261 - RNA, 16 nt, Human
ugaaggcaaaauugca

SEQ ID NO: 2203262 - RNA, 17 nt, Human
ugaaggaggugagggau

SEQ ID NO: 2203263 - RNA, 20 nt, Human
ugaaggagauuuuccuuccu

SEQ ID NO: 2203264 - RNA, 13 nt, Human
ugaaggaggugag

SEQ ID NO: 2203265 - RNA, 15 nt, Human
ugaaggaugccaaga

SEQ ID NO: 2203266 - RNA, 14 nt, Human
ugaaggcaaaauug

SEQ ID NO: 2203267 - RNA, 21 nt, Human
ugaagagggagaagcaugaaa

SEQ ID NO: 2203268 - RNA, 12 nt, Human
ugaagaggggca

SEQ ID NO: 2203269 - RNA, 13 nt, Human
ugaagaggggcag

SEQ ID NO: 2203270 - RNA, 14 nt, Human
ugaagaggggcagc

SEQ ID NO: 2203271 - RNA, 15 nt, Human
ugaagaggggcagcc

SEQ ID NO: 2203272 - RNA, 16 nt, Human
ugaagaggggcagccc

SEQ ID NO: 2203273 - RNA, 17 nt, Human
ugaagaggggcagcccu

SEQ ID NO: 2203274 - RNA, 18 nt, Human
ugaagaggggcagcccuu

SEQ ID NO: 2203275 - RNA, 17 nt, Human
ugaagagggagaaggga

SEQ ID NO: 2203276 - RNA, 18 nt, Human
ugaagagggagaagcaug

SEQ ID NO: 2203277 - RNA, 23 nt, Human
ugaagaggcgggccagccaggcg

SEQ ID NO: 2203278 - RNA, 18 nt, Human
ugaagaggcgggccagcc

SEQ ID NO: 2203279 - RNA, 19 nt, Human
ugaagaggcgggccagcca

SEQ ID NO: 2203280 - RNA, 20 nt, Human
ugaagaggcgggccagccag

SEQ ID NO: 2203281 - RNA, 21 nt, Human
ugaagaggcgggccagccagg

SEQ ID NO: 2203282 - RNA, 19 nt, Human
ugaagaucguuaguaucua

SEQ ID NO: 2203283 - RNA, 22 nt, Human
ugaagauaucuugaaaugaaag

SEQ ID NO: 2203284 - RNA, 22 nt, Human
ugaagaucauauacgugaaaau

SEQ ID NO: 2203285 - RNA, 21 nt, Human
ugaagauaucuugaaaugaaa

SEQ ID NO: 2203286 - RNA, 16 nt, Human
ugaagauaucuugaaa

SEQ ID NO: 2203287 - RNA, 15 nt, Human
ugaagauauuuuucc

SEQ ID NO: 2203288 - RNA, 23 nt, Human
ugaagauauaacuauugcccagg

SEQ ID NO: 2203289 - RNA, 19 nt, Human
ugaagaggggcagcccuug

SEQ ID NO: 2203290 - RNA, 20 nt, Human
ugaagaggggcagcccuugc

SEQ ID NO: 2203291 - RNA, 16 nt, Human
ugaagaggugagagua

SEQ ID NO: 2203292 - RNA, 15 nt, Human
ugaagaggugagcac

SEQ ID NO: 2203293 - RNA, 16 nt, Human
ugaagaugggaacgca

SEQ ID NO: 2203294 - RNA, 19 nt, Human
ugaagauggcauccuguga

SEQ ID NO: 2203295 - RNA, 21 nt, Human
ugaagauggcauccugugaag

SEQ ID NO: 2203296 - RNA, 21 nt, Human
ugaagaugcugaaacaggaga

SEQ ID NO: 2203297 - RNA, 21 nt, Human
ugaagaugcagcaaaauguga

SEQ ID NO: 2203298 - RNA, 17 nt, Human
ugaagauggcauccugu

SEQ ID NO: 2203299 - RNA, 18 nt, Human
ugaagauggcauccugug

SEQ ID NO: 2203300 - RNA, 12 nt, Human
ugaagaugaaca

SEQ ID NO: 2203301 - RNA, 13 nt, Human
ugaagaugaucau

SEQ ID NO: 2203302 - RNA, 15 nt, Human
ugaagaugcagcuca

SEQ ID NO: 2203303 - RNA, 20 nt, Human
ugaaggagagcccuucauuu

SEQ ID NO: 2203304 - RNA, 22 nt, Human
ugaagauggcauccugugaagu

SEQ ID NO: 2203305 - RNA, 22 nt, Human
ugaaggagaggcaacauccaaa

SEQ ID NO: 2203306 - RNA, 11 nt, Human
ugaaggagccc

SEQ ID NO: 2203307 - RNA, 23 nt, Human
ugaaggagccccauuccugggaa

SEQ ID NO: 2203308 - RNA, 22 nt, Human
ugaaggagccccauuccuggga

SEQ ID NO: 2203309 - RNA, 15 nt, Human
ugaagaggcgggcca

SEQ ID NO: 2203310 - RNA, 16 nt, Human
ugaagaggcgggccag

SEQ ID NO: 2203311 - RNA, 17 nt, Human
ugaagaggcgggccagc

SEQ ID NO: 2203312 - RNA, 18 nt, Human
ugaagaggaucggaggcu

SEQ ID NO: 2203313 - RNA, 22 nt, Human
ugaagaggaaaaugaauaauac

SEQ ID NO: 2203314 - RNA, 13 nt, Human
ugaagaggaaggg

SEQ ID NO: 2203315 - RNA, 24 nt, Human
ugaagagaaccgagcaaagaucaa

SEQ ID NO: 2203316 - RNA, 20 nt, Human
ugaagaggaaaaugaauaau

SEQ ID NO: 2203317 - RNA, 23 nt, Human
ugaagagaaccgagcaaagauca

SEQ ID NO: 2203318 - RNA, 17 nt, Human
ugaagacuuuucuuuca

SEQ ID NO: 2203319 - RNA, 22 nt, Human
ugaagacuuuucuuucagccaa

SEQ ID NO: 2203320 - RNA, 14 nt, Human
ugaagacagaggga

SEQ ID NO: 2203321 - RNA, 14 nt, Human
ugaagacaggacag

SEQ ID NO: 2203322 - RNA, 14 nt, Human
ugaagacaggaugg

SEQ ID NO: 2203323 - RNA, 20 nt, Human
ugaagaccacauccacacac

SEQ ID NO: 2203324 - RNA, 12 nt, Human
ugaagacauaaa

SEQ ID NO: 2203325 - RNA, 14 nt, Human
ugaagacuuuucuu

SEQ ID NO: 2203326 - RNA, 18 nt, Human
ugaagacuggaagcuaau

SEQ ID NO: 2203327 - RNA, 14 nt, Human
ugaacugggaccuu

SEQ ID NO: 2203328 - RNA, 23 nt, Human
ugaacuggacccuguugcuaagc

SEQ ID NO: 2203329 - RNA, 21 nt, Human
ugaacuggacccuguugcuaa

SEQ ID NO: 2203330 - RNA, 22 nt, Human
ugaacuggacccuguugcuaag

SEQ ID NO: 2203331 - RNA, 19 nt, Human
ugaacuggguacuugugga

SEQ ID NO: 2203332 - RNA, 14 nt, Human
ugaacuuggcgcug

SEQ ID NO: 2203333 - RNA, 12 nt, Human
ugaacuugguuc

SEQ ID NO: 2203334 - RNA, 22 nt, Human
ugaacuuguaaaggaauuuaaa

SEQ ID NO: 2203335 - RNA, 14 nt, Human
ugaagacagagcua

SEQ ID NO: 2203336 - RNA, 16 nt, Human
ugaagacagagcuaca

SEQ ID NO: 2203337 - RNA, 14 nt, Human
ugaacugaacucug

SEQ ID NO: 2203338 - RNA, 17 nt, Human
ugaacucuuugaaugac

SEQ ID NO: 2203339 - RNA, 19 nt, Human
ugaacucuuugaaugacaa

SEQ ID NO: 2203340 - RNA, 20 nt, Human
ugaacucuuugaaugacaaa

SEQ ID NO: 2203341 - RNA, 18 nt, Human
ugaacucuucaaucucuu

SEQ ID NO: 2203342 - RNA, 21 nt, Human
ugaacucuuaaucaaauagca

SEQ ID NO: 2203343 - RNA, 12 nt, Human
ugaacucuuaga

SEQ ID NO: 2203344 - RNA, 19 nt, Human
ugaacucuuagaaaugaag

SEQ ID NO: 2203345 - RNA, 20 nt, Human
ugaaccacaucuugcucugc

SEQ ID NO: 2203346 - RNA, 21 nt, Human
ugaaccacaucuugcucugcu

SEQ ID NO: 2203347 - RNA, 15 nt, Human
ugaacucuucaaucu

SEQ ID NO: 2203348 - RNA, 22 nt, Human
ugaaccacaucuugcucugcug

SEQ ID NO: 2203349 - RNA, 12 nt, Human
ugaacugaaguu

SEQ ID NO: 2203350 - RNA, 13 nt, Human
ugaacugaaguuu

SEQ ID NO: 2203351 - RNA, 15 nt, Human
ugaacugaaguuuca

SEQ ID NO: 2203352 - RNA, 17 nt, Human
ugaacugaaguuucaca

SEQ ID NO: 2203353 - RNA, 13 nt, Human
ugaacugacaggc

SEQ ID NO: 2203354 - RNA, 19 nt, Human
ugaacugaacucugacaac

SEQ ID NO: 2203355 - RNA, 17 nt, Human
ugaacugaacucugaca

SEQ ID NO: 2203356 - RNA, 13 nt, Human
ugaacugauaaag

SEQ ID NO: 2203357 - RNA, 15 nt, Human
ugaacugagcuugga

SEQ ID NO: 2203358 - RNA, 12 nt, Human
ugaacugagcuu

SEQ ID NO: 2203359 - RNA, 21 nt, Human
ugaacugauaguuacuguugu

SEQ ID NO: 2203360 - RNA, 23 nt, Human
ugaacugauaguuacuguuguga

SEQ ID NO: 2203361 - RNA, 17 nt, Human
ugaacuggacccuguug

SEQ ID NO: 2203362 - RNA, 18 nt, Human
ugaacuggacccuguugc

SEQ ID NO: 2203363 - RNA, 19 nt, Human
ugaacuggacccuguugcu

SEQ ID NO: 2203364 - RNA, 20 nt, Human
ugaacuggacccuguugcua

SEQ ID NO: 2203365 - RNA, 15 nt, Human
ugaacugauaaagau

SEQ ID NO: 2203366 - RNA, 16 nt, Human
ugaacugagcuuggaa

SEQ ID NO: 2203367 - RNA, 21 nt, Human
ugaacugacaggcagccugga

SEQ ID NO: 2203368 - RNA, 23 nt, Human
ugaacugacaggcagccuggaca

SEQ ID NO: 2203369 - RNA, 18 nt, Human
ugaacugauaguuacugu

SEQ ID NO: 2203370 - RNA, 19 nt, Human
ugaacugauaguuacuguu

SEQ ID NO: 2203371 - RNA, 14 nt, Human
ugaacacucaugcu

SEQ ID NO: 2203372 - RNA, 16 nt, Human
ugaacacucaugcuga

SEQ ID NO: 2203373 - RNA, 23 nt, Human
ugaacacacuguguccuggugcu

SEQ ID NO: 2203374 - RNA, 14 nt, Human
ugaacacaucagcu

SEQ ID NO: 2203375 - RNA, 14 nt, Human
ugaacacacugugu

SEQ ID NO: 2203376 - RNA, 15 nt, Human
ugaacacacuguguc

SEQ ID NO: 2203377 - RNA, 18 nt, Human
ugaacacacuguguccug

SEQ ID NO: 2203378 - RNA, 19 nt, Human
ugaacacaaacuguaaaua

SEQ ID NO: 2203379 - RNA, 16 nt, Human
ugaaaugcuggcauuu

SEQ ID NO: 2203380 - RNA, 15 nt, Human
ugaaaugcugcauuu

SEQ ID NO: 2203381 - RNA, 17 nt, Human
ugaaaugcugcauuuua

SEQ ID NO: 2203382 - RNA, 13 nt, Human
ugaaaugcugcau

SEQ ID NO: 2203383 - RNA, 19 nt, Human
ugaaauggacuuuuguaca

SEQ ID NO: 2203384 - RNA, 18 nt, Human
ugaaaugcaucauucuug

SEQ ID NO: 2203385 - RNA, 16 nt, Human
ugaaaugcucuccuuu

SEQ ID NO: 2203386 - RNA, 17 nt, Human
ugaaaugcucuccuuuc

SEQ ID NO: 2203387 - RNA, 19 nt, Human
ugaacauacuggcugguga

SEQ ID NO: 2203388 - RNA, 18 nt, Human
ugaacacuggcaacaaca

SEQ ID NO: 2203389 - RNA, 20 nt, Human
ugaacagaaaacauucugau

SEQ ID NO: 2203390 - RNA, 22 nt, Human
ugaacacugggggaggggacau

SEQ ID NO: 2203391 - RNA, 17 nt, Human
ugaacacugggggaggg

SEQ ID NO: 2203392 - RNA, 16 nt, Human
ugaacacugggggagg

SEQ ID NO: 2203393 - RNA, 14 nt, Human
ugaacacuggggga

SEQ ID NO: 2203394 - RNA, 23 nt, Human
ugaacacuccaauuaaggauuuu

SEQ ID NO: 2203395 - RNA, 22 nt, Human
ugaacacuccaauuaaggauuu

SEQ ID NO: 2203396 - RNA, 19 nt, Human
ugaacacuccaauuaagga

SEQ ID NO: 2203397 - RNA, 18 nt, Human
ugaacacuccaauuaagg

SEQ ID NO: 2203398 - RNA, 17 nt, Human
ugaacacucaugcugaa

SEQ ID NO: 2203399 - RNA, 18 nt, Human
ugaacacucaugcugaaa

SEQ ID NO: 2203400 - RNA, 13 nt, Human
ugaacauuccaga

SEQ ID NO: 2203401 - RNA, 13 nt, Human
ugaacauguacug

SEQ ID NO: 2203402 - RNA, 17 nt, Human
ugaacauauuguugaaa

SEQ ID NO: 2203403 - RNA, 17 nt, Human
ugaacauccuuccuucc

SEQ ID NO: 2203404 - RNA, 14 nt, Human
ugaacauggacucu

SEQ ID NO: 2203405 - RNA, 18 nt, Human
ugaacauccuuccuuccc

SEQ ID NO: 2203406 - RNA, 20 nt, Human
ugaacauccuuccuucccac

SEQ ID NO: 2203407 - RNA, 14 nt, Human
ugaacauuccagag

SEQ ID NO: 2203408 - RNA, 16 nt, Human
uccuuuuuuauacaca

SEQ ID NO: 2203409 - RNA, 14 nt, Human
uccuuuuuguuauu

SEQ ID NO: 2203410 - RNA, 18 nt, Human
uccuuuuuuauacacaua

SEQ ID NO: 2203411 - RNA, 21 nt, Human
uccuuuuuuuccaucuuuaca

SEQ ID NO: 2203412 - RNA, 14 nt, Human
uccuuuuucuuuau

SEQ ID NO: 2203413 - RNA, 20 nt, Human
uccuuuuucucccucuggau

SEQ ID NO: 2203414 - RNA, 19 nt, Human
uccuuuuucuuuauaaacu

SEQ ID NO: 2203415 - RNA, 13 nt, Human
uccuuuuuguuau

SEQ ID NO: 2203416 - RNA, 14 nt, Human
uccuuuuucucccu

SEQ ID NO: 2203417 - RNA, 15 nt, Human
ucgaguuacagacaa

SEQ ID NO: 2203418 - RNA, 14 nt, Human
ucgauacugcgacu

SEQ ID NO: 2203419 - RNA, 17 nt, Human
ucgauucauauugaaua

SEQ ID NO: 2203420 - RNA, 17 nt, Human
ucgaguuacagacaaag

SEQ ID NO: 2203421 - RNA, 17 nt, Human
uccuugcaccugcaucc

SEQ ID NO: 2203422 - RNA, 20 nt, Human
uccuuggcucccauucacuc

SEQ ID NO: 2203423 - RNA, 14 nt, Human
uccuugggaggaag

SEQ ID NO: 2203424 - RNA, 15 nt, Human
uccuuggcuggugca

SEQ ID NO: 2203425 - RNA, 15 nt, Human
uccuugggaggaagc

SEQ ID NO: 2203426 - RNA, 16 nt, Human
uccuugggaggaagca

SEQ ID NO: 2203427 - RNA, 17 nt, Human
uccuugggaggaagcag

SEQ ID NO: 2203428 - RNA, 18 nt, Human
uccuugggaggaagcaga

SEQ ID NO: 2203429 - RNA, 22 nt, Human
uccuugggaggccccacugggg

SEQ ID NO: 2203430 - RNA, 21 nt, Human
uccuugggaggccccacuggg

SEQ ID NO: 2203431 - RNA, 20 nt, Human
uccuugggaggccccacugg

SEQ ID NO: 2203432 - RNA, 23 nt, Human
uccuugggaggaagcagaauaaa

SEQ ID NO: 2203433 - RNA, 19 nt, Human
uccuugggaggaagcagaa

SEQ ID NO: 2203434 - RNA, 20 nt, Human
uccuugggaggaagcagaau

SEQ ID NO: 2203435 - RNA, 21 nt, Human
uccuugggaggaagcagaaua

SEQ ID NO: 2203436 - RNA, 22 nt, Human
uccuugggaggaagcagaauaa

SEQ ID NO: 2203437 - RNA, 16 nt, Human
uccuugggcccuuuga

SEQ ID NO: 2203438 - RNA, 14 nt, Human
uccuugggcccuuu

SEQ ID NO: 2203439 - RNA, 13 nt, Human
uccuugggcccuu

SEQ ID NO: 2203440 - RNA, 13 nt, Human
uccuugggcacuu

SEQ ID NO: 2203441 - RNA, 17 nt, Human
uccuugggcacuuuuua

SEQ ID NO: 2203442 - RNA, 16 nt, Human
uccuuggggcaggcag

SEQ ID NO: 2203443 - RNA, 15 nt, Human
uccuuggggcaggca

SEQ ID NO: 2203444 - RNA, 14 nt, Human
uccuuggggcaggc

SEQ ID NO: 2203445 - RNA, 14 nt, Human
uccuuuuggaguca

SEQ ID NO: 2203446 - RNA, 23 nt, Human
uccuuuuggagucagacagaugu

SEQ ID NO: 2203447 - RNA, 17 nt, Human
uccuuuuguguacagug

SEQ ID NO: 2203448 - RNA, 13 nt, Human
uccuuuugcuuga

SEQ ID NO: 2203449 - RNA, 18 nt, Human
uccuuuuguguacagugu

SEQ ID NO: 2203450 - RNA, 20 nt, Human
uccuuuuuaaauucaguccu

SEQ ID NO: 2203451 - RNA, 14 nt, Human
ucgcuucccccaua

SEQ ID NO: 2203452 - RNA, 16 nt, Human
ucgcuucauguaacua

SEQ ID NO: 2203453 - RNA, 15 nt, Human
ucgcuguugcugaau

SEQ ID NO: 2203454 - RNA, 17 nt, Human
ucgcuguugcugaauag

SEQ ID NO: 2203455 - RNA, 12 nt, Human
ucgcuguugcug

SEQ ID NO: 2203456 - RNA, 14 nt, Human
ucgcuguugcugaa

SEQ ID NO: 2203457 - RNA, 13 nt, Human
ucgcuguguguua

SEQ ID NO: 2203458 - RNA, 21 nt, Human
ucgcuguguguuaguucccaa

SEQ ID NO: 2203459 - RNA, 19 nt, Human
ucgcuucccccauagccac

SEQ ID NO: 2203460 - RNA, 17 nt, Human
ucgcuucccccauagcc

SEQ ID NO: 2203461 - RNA, 16 nt, Human
ucgcuucccccauagc

SEQ ID NO: 2203462 - RNA, 15 nt, Human
ucgcuucccccauag

SEQ ID NO: 2203463 - RNA, 15 nt, Human
ucgcuuccgcauccu

SEQ ID NO: 2203464 - RNA, 14 nt, Human
ucgcuucuugccuc

SEQ ID NO: 2203465 - RNA, 15 nt, Human
ucgcuucuugccucu

SEQ ID NO: 2203466 - RNA, 16 nt, Human
ucgcuucuugccucug

SEQ ID NO: 2203467 - RNA, 23 nt, Human
ucggaagcagugccuuccauaau

SEQ ID NO: 2203468 - RNA, 22 nt, Human
ucggaagcagugccuuccauaa

SEQ ID NO: 2203469 - RNA, 16 nt, Human
ucggaagcagugccuu

SEQ ID NO: 2203470 - RNA, 15 nt, Human
ucggaagcagugccu

SEQ ID NO: 2203471 - RNA, 19 nt, Human
ucggaaggcuggcugggca

SEQ ID NO: 2203472 - RNA, 10 nt, Human
ucggaccagc

SEQ ID NO: 2203473 - RNA, 17 nt, Human
ucggaccuuucagcugu

SEQ ID NO: 2203474 - RNA, 19 nt, Human
ucggacuaagccuaccugc

SEQ ID NO: 2203475 - RNA, 22 nt, Human
ucggacuaagccuaccugcucu

SEQ ID NO: 2203476 - RNA, 23 nt, Human
ucggacuaagccuaccugcucuc

SEQ ID NO: 2203477 - RNA, 13 nt, Human
ucggaagcagugc

SEQ ID NO: 2203478 - RNA, 22 nt, Human
ucggaacugcaugcugcuggac

SEQ ID NO: 2203479 - RNA, 18 nt, Human
ucggaacugcaugcugcu

SEQ ID NO: 2203480 - RNA, 19 nt, Human
ucggaacccaagcuuagaa

SEQ ID NO: 2203481 - RNA, 20 nt, Human
ucggaacccaagcuuagaac

SEQ ID NO: 2203482 - RNA, 17 nt, Human
ucgcuucuugccucugu

SEQ ID NO: 2203483 - RNA, 12 nt, Human
ucgcccaggaga

SEQ ID NO: 2203484 - RNA, 22 nt, Human
ucgcccaccgcaugcccccucg

SEQ ID NO: 2203485 - RNA, 19 nt, Human
ucgcccaggcuggagugca

SEQ ID NO: 2203486 - RNA, 18 nt, Human
ucgcccaaagccagacag

SEQ ID NO: 2203487 - RNA, 14 nt, Human
ucgcccaccgcaug

SEQ ID NO: 2203488 - RNA, 17 nt, Human
ucgcccaaagccagaca

SEQ ID NO: 2203489 - RNA, 14 nt, Human
ucgccaugccgggg

SEQ ID NO: 2203490 - RNA, 11 nt, Human
ucgcccaggag

SEQ ID NO: 2203491 - RNA, 16 nt, Human
ucgcccaccgcaugcc

SEQ ID NO: 2203492 - RNA, 21 nt, Human
ucgcccaccgcaugcccccuc

SEQ ID NO: 2203493 - RNA, 14 nt, Human
ucgcccaggcugga

SEQ ID NO: 2203494 - RNA, 12 nt, Human
ucgcccaggcug

SEQ ID NO: 2203495 - RNA, 13 nt, Human
ucgcaagcugggu

SEQ ID NO: 2203496 - RNA, 13 nt, Human
ucgcacagucucu

SEQ ID NO: 2203497 - RNA, 14 nt, Human
ucgcacagucucuc

SEQ ID NO: 2203498 - RNA, 21 nt, Human
ucgcaccacuguguauuuaac

SEQ ID NO: 2203499 - RNA, 16 nt, Human
ucgcacagucucucuc

SEQ ID NO: 2203500 - RNA, 16 nt, Human
ucgcaccauucugacu

SEQ ID NO: 2203501 - RNA, 17 nt, Human
ucgcaauguaagacucg

SEQ ID NO: 2203502 - RNA, 15 nt, Human
ucgauuucuccagga

SEQ ID NO: 2203503 - RNA, 13 nt, Human
ucgauuuuguauc

SEQ ID NO: 2203504 - RNA, 17 nt, Human
ucgauuuuguaucugca

SEQ ID NO: 2203505 - RNA, 18 nt, Human
ucgcaccuaccaucaggg

SEQ ID NO: 2203506 - RNA, 12 nt, Human
ucgcaccuacca

SEQ ID NO: 2203507 - RNA, 17 nt, Human
ucgcaccauucugacuc

SEQ ID NO: 2203508 - RNA, 12 nt, Human
ucgcagagaggc

SEQ ID NO: 2203509 - RNA, 14 nt, Human
ucgcagagaggcca

SEQ ID NO: 2203510 - RNA, 19 nt, Human
ucgcagagaggccaggugc

SEQ ID NO: 2203511 - RNA, 21 nt, Human
ucgcagagaggccaggugcag

SEQ ID NO: 2203512 - RNA, 13 nt, Human
ucgccaugccggg

SEQ ID NO: 2203513 - RNA, 14 nt, Human
uccuuaaugauccg

SEQ ID NO: 2203514 - RNA, 17 nt, Human
uccuuaauucacuccca

SEQ ID NO: 2203515 - RNA, 18 nt, Human
uccuuaauucacucccac

SEQ ID NO: 2203516 - RNA, 19 nt, Human
uccuuaauucacucccaca

SEQ ID NO: 2203517 - RNA, 17 nt, Human
uccuuaauccagcugau

SEQ ID NO: 2203518 - RNA, 13 nt, Human
uccugucagugcc

SEQ ID NO: 2203519 - RNA, 14 nt, Human
uccugucagugccg

SEQ ID NO: 2203520 - RNA, 12 nt, Human
uccugucagugc

SEQ ID NO: 2203521 - RNA, 22 nt, Human
uccuuauguauauuuaaaagaa

SEQ ID NO: 2203522 - RNA, 16 nt, Human
uccuucaaagcaaaug

SEQ ID NO: 2203523 - RNA, 14 nt, Human
uccuuaccagcaga

SEQ ID NO: 2203524 - RNA, 22 nt, Human
uccuuacaaguuagaaaacaua

SEQ ID NO: 2203525 - RNA, 21 nt, Human
uccuuacaaguuagaaaacau

SEQ ID NO: 2203526 - RNA, 23 nt, Human
uccuucaagaacucugggcugcu

SEQ ID NO: 2203527 - RNA, 21 nt, Human
uccuucaagaacucugggcug

SEQ ID NO: 2203528 - RNA, 20 nt, Human
uccuucaagaacucugggcu

SEQ ID NO: 2203529 - RNA, 19 nt, Human
uccuucaagaacucugggc

SEQ ID NO: 2203530 - RNA, 23 nt, Human
uccuucaaguuagcucaggaggc

SEQ ID NO: 2203531 - RNA, 20 nt, Human
uccuucaaguuagcucagga

SEQ ID NO: 2203532 - RNA, 19 nt, Human
uccuucaaguuagcucagg

SEQ ID NO: 2203533 - RNA, 18 nt, Human
uccuucaaguuagcucag

SEQ ID NO: 2203534 - RNA, 12 nt, Human
uccuucuguccu

SEQ ID NO: 2203535 - RNA, 19 nt, Human
uccuucuguccuacucugu

SEQ ID NO: 2203536 - RNA, 20 nt, Human
uccuucugugaaaguacauu

SEQ ID NO: 2203537 - RNA, 20 nt, Human
uccuucaagaucauguaccc

SEQ ID NO: 2203538 - RNA, 15 nt, Human
uccuucugccuuuuu

SEQ ID NO: 2203539 - RNA, 14 nt, Human
uccuugcaccugca

SEQ ID NO: 2203540 - RNA, 24 nt, Human
uccuugcaccccucacucuggccu

SEQ ID NO: 2203541 - RNA, 21 nt, Human
uccuugcaccccucacucugg

SEQ ID NO: 2203542 - RNA, 22 nt, Human
uccuugcaccccucacucuggc

SEQ ID NO: 2203543 - RNA, 22 nt, Human
uccuugcacacuccccugcacu

SEQ ID NO: 2203544 - RNA, 14 nt, Human
uccuugcaccccuc

SEQ ID NO: 2203545 - RNA, 15 nt, Human
uccuugcaccccuca

SEQ ID NO: 2203546 - RNA, 20 nt, Human
uccuugcaccccucacucug

SEQ ID NO: 2203547 - RNA, 15 nt, Human
uccuugcaucaauuu

SEQ ID NO: 2203548 - RNA, 22 nt, Human
uccuugauuuuagccuucucug

SEQ ID NO: 2203549 - RNA, 21 nt, Human
uccuugcacacuccccugcac

SEQ ID NO: 2203550 - RNA, 22 nt, Human
uccuucuuucuaguucagcugc

SEQ ID NO: 2203551 - RNA, 23 nt, Human
uccuugauuuuagccuucucugu

SEQ ID NO: 2203552 - RNA, 22 nt, Human
uccuugaucuguauauacaaua

SEQ ID NO: 2203553 - RNA, 16 nt, Human
uccuugaucuguauau

SEQ ID NO: 2203554 - RNA, 12 nt, Human
uccuucugccuu

SEQ ID NO: 2203555 - RNA, 17 nt, Human
uccuucuugccuucaga

SEQ ID NO: 2203556 - RNA, 16 nt, Human
uccuucuuguaguagu

SEQ ID NO: 2203557 - RNA, 20 nt, Human
uccuggucuugagaugucuu

SEQ ID NO: 2203558 - RNA, 21 nt, Human
uccuggugccaauuucaaguu

SEQ ID NO: 2203559 - RNA, 15 nt, Human
uccuggugcucucug

SEQ ID NO: 2203560 - RNA, 14 nt, Human
uccuggugcucucu

SEQ ID NO: 2203561 - RNA, 17 nt, Human
uccuggucuugagaugu

SEQ ID NO: 2203562 - RNA, 20 nt, Human
uccuggugccaauuucaagu

SEQ ID NO: 2203563 - RNA, 16 nt, Human
uccuggccaucccaca

SEQ ID NO: 2203564 - RNA, 15 nt, Human
uccuggccaucccac

SEQ ID NO: 2203565 - RNA, 20 nt, Human
uccuggccaucccacaagug

SEQ ID NO: 2203566 - RNA, 17 nt, Human
uccuggcccacugcauc

SEQ ID NO: 2203567 - RNA, 14 nt, Human
uccuggccauccca

SEQ ID NO: 2203568 - RNA, 11 nt, Human
uccuggccauc

SEQ ID NO: 2203569 - RNA, 20 nt, Human
uccuggcaguuuaaaaaaau

SEQ ID NO: 2203570 - RNA, 17 nt, Human
uccuggcaguuuaaaaa

SEQ ID NO: 2203571 - RNA, 10 nt, Human
ucccucccuu

SEQ ID NO: 2203572 - RNA, 22 nt, Human
uccuggcaugggaaugaauguc

SEQ ID NO: 2203573 - RNA, 19 nt, Human
uccuguaaaugguguacau

SEQ ID NO: 2203574 - RNA, 19 nt, Human
uccuguaaagguuacaagc

SEQ ID NO: 2203575 - RNA, 22 nt, Human
uccuguaaaaaaaaaaaaguua

SEQ ID NO: 2203576 - RNA, 15 nt, Human
uccugguucccguuu

SEQ ID NO: 2203577 - RNA, 21 nt, Human
uccugguucccguuucuccac

SEQ ID NO: 2203578 - RNA, 23 nt, Human
uccugguucccguuucuccaccu

SEQ ID NO: 2203579 - RNA, 14 nt, Human
uccuggugugaagg

SEQ ID NO: 2203580 - RNA, 21 nt, Human
uccuguaguugcguggacucu

SEQ ID NO: 2203581 - RNA, 22 nt, Human
uccuguaguugcguggacucug

SEQ ID NO: 2203582 - RNA, 23 nt, Human
uccuguaguugcguggacucugc

SEQ ID NO: 2203583 - RNA, 13 nt, Human
uccuguauguugu

SEQ ID NO: 2203584 - RNA, 15 nt, Human
uccuguauucacccg

SEQ ID NO: 2203585 - RNA, 15 nt, Human
uccugguguggaaga

SEQ ID NO: 2203586 - RNA, 14 nt, Human
uccuggugucacuu

SEQ ID NO: 2203587 - RNA, 21 nt, Human
uccuggugucacuuacuguuu

SEQ ID NO: 2203588 - RNA, 16 nt, Human
uccuggugcucucugc

SEQ ID NO: 2203589 - RNA, 18 nt, Human
uccuggugcucucugcca

SEQ ID NO: 2203590 - RNA, 19 nt, Human
uccuggugcucucugccac

SEQ ID NO: 2203591 - RNA, 20 nt, Human
uccuggugcucucugccacu

SEQ ID NO: 2203592 - RNA, 16 nt, Human
uccugguggguccagg

SEQ ID NO: 2203593 - RNA, 22 nt, Human
uccugguggguccaggggcccc

SEQ ID NO: 2203594 - RNA, 17 nt, Human
uccugguggguccaggg

SEQ ID NO: 2203595 - RNA, 19 nt, Human
uccugguggguccaggggc

SEQ ID NO: 2203596 - RNA, 14 nt, Human
ucucaaacuccuga

SEQ ID NO: 2203597 - RNA, 23 nt, Human
ucucaaaccuguuuaaauauuuc

SEQ ID NO: 2203598 - RNA, 23 nt, Human
ucucaaaccuugaugugccugug

SEQ ID NO: 2203599 - RNA, 19 nt, Human
ucucaaaccuguuuaaaua

SEQ ID NO: 2203600 - RNA, 23 nt, Human
ucucaaacacaguuacacuugug

SEQ ID NO: 2203601 - RNA, 20 nt, Human
ucucaaaccaagcaaaggaa

SEQ ID NO: 2203602 - RNA, 24 nt, Human
ucuaguauuccagaccugaagaau

SEQ ID NO: 2203603 - RNA, 16 nt, Human
ucuaguccuauucuau

SEQ ID NO: 2203604 - RNA, 19 nt, Human
ucuaguccuauucuauugc

SEQ ID NO: 2203605 - RNA, 13 nt, Human
ucucaaacacagu

SEQ ID NO: 2203606 - RNA, 19 nt, Human
ucucaaacacaguuacacu

SEQ ID NO: 2203607 - RNA, 22 nt, Human
ucucaaacacaguuacacuugu

SEQ ID NO: 2203608 - RNA, 17 nt, Human
ucuagggagagacccuu

SEQ ID NO: 2203609 - RNA, 20 nt, Human
ucuagggaccccuccucccu

SEQ ID NO: 2203610 - RNA, 17 nt, Human
ucuagggaccccuccuc

SEQ ID NO: 2203611 - RNA, 18 nt, Human
ucuagggaccccuccucc

SEQ ID NO: 2203612 - RNA, 19 nt, Human
ucuaggggucaggcuccau

SEQ ID NO: 2203613 - RNA, 18 nt, Human
ucuaggguuauugcauuu

SEQ ID NO: 2203614 - RNA, 22 nt, Human
ucuaguacuugggagaccugua

SEQ ID NO: 2203615 - RNA, 22 nt, Human
ucucaaacucuugaccucaggu

SEQ ID NO: 2203616 - RNA, 13 nt, Human
ucucaaacucuug

SEQ ID NO: 2203617 - RNA, 21 nt, Human
ucucaaacucuugaccucagg

SEQ ID NO: 2203618 - RNA, 13 nt, Human
ucucaaccauccc

SEQ ID NO: 2203619 - RNA, 17 nt, Human
ucucaacccaggagcau

SEQ ID NO: 2203620 - RNA, 17 nt, Human
ucucaaccaccuuucag

SEQ ID NO: 2203621 - RNA, 21 nt, Human
ucucaacccuuuugucugccu

SEQ ID NO: 2203622 - RNA, 23 nt, Human
ucucaacccuuuugucugccucu

SEQ ID NO: 2203623 - RNA, 21 nt, Human
ucucaaccuaccaccccuucc

SEQ ID NO: 2203624 - RNA, 22 nt, Human
ucucaaccuaccaccccuuccu

SEQ ID NO: 2203625 - RNA, 21 nt, Human
ucucaacaaagcacaguguua

SEQ ID NO: 2203626 - RNA, 19 nt, Human
ucucaacaaagcacagugu

SEQ ID NO: 2203627 - RNA, 14 nt, Human
ucucaaacuggggc

SEQ ID NO: 2203628 - RNA, 21 nt, Human
ucucaaauuuggauugcuaau

SEQ ID NO: 2203629 - RNA, 17 nt, Human
ucucacuguugcccagg

SEQ ID NO: 2203630 - RNA, 23 nt, Human
ucucaaccuaccaccccuuccug

SEQ ID NO: 2203631 - RNA, 13 nt, Human
ucucacuugugcc

SEQ ID NO: 2203632 - RNA, 13 nt, Human
ucucacuuguuuc

SEQ ID NO: 2203633 - RNA, 17 nt, Human
ucucacuuuucuccaug

SEQ ID NO: 2203634 - RNA, 15 nt, Human
ucucacuuuucucca

SEQ ID NO: 2203635 - RNA, 20 nt, Human
ucucacuuuucuccaugagu

SEQ ID NO: 2203636 - RNA, 19 nt, Human
ucucagaagguauuccuuu

SEQ ID NO: 2203637 - RNA, 12 nt, Human
ucucagaaucua

SEQ ID NO: 2203638 - RNA, 13 nt, Human
ucucagaagggag

SEQ ID NO: 2203639 - RNA, 14 nt, Human
ucucagaagggagg

SEQ ID NO: 2203640 - RNA, 15 nt, Human
ucucagaagggaggc

SEQ ID NO: 2203641 - RNA, 18 nt, Human
ucucagaagggaggcugg

SEQ ID NO: 2203642 - RNA, 22 nt, Human
ucucagaaggcaaaugacuuug

SEQ ID NO: 2203643 - RNA, 21 nt, Human
ucucagaaggcaaaugacuuu

SEQ ID NO: 2203644 - RNA, 20 nt, Human
ucucagaaggcaaaugacuu

SEQ ID NO: 2203645 - RNA, 19 nt, Human
ucucagaaggcaaaugacu

SEQ ID NO: 2203646 - RNA, 21 nt, Human
ucucagaaucucaaauaacua

SEQ ID NO: 2203647 - RNA, 17 nt, Human
ucucagaaucucaaaua

SEQ ID NO: 2203648 - RNA, 16 nt, Human
ucucagggcuccugcc

SEQ ID NO: 2203649 - RNA, 19 nt, Human
ucucagaaucuacccaaag

SEQ ID NO: 2203650 - RNA, 20 nt, Human
ucucagaaucuacccaaagg

SEQ ID NO: 2203651 - RNA, 17 nt, Human
ucucagggcuccugccu

SEQ ID NO: 2203652 - RNA, 23 nt, Human
ucucagggcuccugccuucuguc

SEQ ID NO: 2203653 - RNA, 17 nt, Human
ucucaggggccagagga

SEQ ID NO: 2203654 - RNA, 20 nt, Human
ucucaggggccagaggaacu

SEQ ID NO: 2203655 - RNA, 16 nt, Human
ucucaggggcuguuug

SEQ ID NO: 2203656 - RNA, 17 nt, Human
ucucaggggcuguuuga

SEQ ID NO: 2203657 - RNA, 15 nt, Human
ucucagggucucugc

SEQ ID NO: 2203658 - RNA, 16 nt, Human
ucucagggucucugcu

SEQ ID NO: 2203659 - RNA, 17 nt, Human
ucucagggucucugcug

SEQ ID NO: 2203660 - RNA, 18 nt, Human
ucucagggucucugcugc

SEQ ID NO: 2203661 - RNA, 20 nt, Human
ucucagggucucugcugccg

SEQ ID NO: 2203662 - RNA, 18 nt, Human
ucucacuguugcccaggc

SEQ ID NO: 2203663 - RNA, 19 nt, Human
ucucacuguugcccaggcu

SEQ ID NO: 2203664 - RNA, 20 nt, Human
ucucacuguugcccaggcug

SEQ ID NO: 2203665 - RNA, 21 nt, Human
ucucacuguugcccaggcugg

SEQ ID NO: 2203666 - RNA, 18 nt, Human
ucucacucugucgcccag

SEQ ID NO: 2203667 - RNA, 22 nt, Human
ucucacucugucgcccagucug

SEQ ID NO: 2203668 - RNA, 16 nt, Human
ucucacucugucgccc

SEQ ID NO: 2203669 - RNA, 17 nt, Human
ucucacucugucgccca

SEQ ID NO: 2203670 - RNA, 15 nt, Human
ucuacacucaucuua

SEQ ID NO: 2203671 - RNA, 17 nt, Human
ucuacacuccagugaga

SEQ ID NO: 2203672 - RNA, 12 nt, Human
ucuacacugugc

SEQ ID NO: 2203673 - RNA, 14 nt, Human
ucuacacugugcug

SEQ ID NO: 2203674 - RNA, 19 nt, Human
ucuacugaggugcuauguu

SEQ ID NO: 2203675 - RNA, 18 nt, Human
ucuacugaggugcuaugu

SEQ ID NO: 2203676 - RNA, 21 nt, Human
ucuacacugugcugagucuga

SEQ ID NO: 2203677 - RNA, 15 nt, Human
ucuacacugugcuga

SEQ ID NO: 2203678 - RNA, 22 nt, Human
ucuagggaaaaaccagcgugug

SEQ ID NO: 2203679 - RNA, 20 nt, Human
ucuagaauguguuuucugaa

SEQ ID NO: 2203680 - RNA, 23 nt, Human
ucuagaagccaagggaaaggggu

SEQ ID NO: 2203681 - RNA, 16 nt, Human
ucuagaaguuguuugu

SEQ ID NO: 2203682 - RNA, 20 nt, Human
ucuagaaguuguuugucauc

SEQ ID NO: 2203683 - RNA, 13 nt, Human
ucuagggaaauga

SEQ ID NO: 2203684 - RNA, 19 nt, Human
ucuagaauuuaucacacuu

SEQ ID NO: 2203685 - RNA, 19 nt, Human
ucuagggaaaaaccagcgu

SEQ ID NO: 2203686 - RNA, 17 nt, Human
ucuagggaaaugaaaga

SEQ ID NO: 2203687 - RNA, 15 nt, Human
ucuagggaccccucc

SEQ ID NO: 2203688 - RNA, 16 nt, Human
ucuagggaccccuccu

SEQ ID NO: 2203689 - RNA, 21 nt, Human
ucuagaacaucccugccagcu

SEQ ID NO: 2203690 - RNA, 17 nt, Human
ucuagaagccaagggaa

SEQ ID NO: 2203691 - RNA, 20 nt, Human
ucuagaagccaagggaaagg

SEQ ID NO: 2203692 - RNA, 21 nt, Human
ucuagaagccaagggaaaggg

SEQ ID NO: 2203693 - RNA, 21 nt, Human
ucuagaagacugucagcuucc

SEQ ID NO: 2203694 - RNA, 20 nt, Human
ucuagaagacugucagcuuc

SEQ ID NO: 2203695 - RNA, 18 nt, Human
ucuagaacuugacccccu

SEQ ID NO: 2203696 - RNA, 20 nt, Human
ucuagaacaucccugccagc

SEQ ID NO: 2203697 - RNA, 19 nt, Human
ucuagaacaucccugccag

SEQ ID NO: 2203698 - RNA, 22 nt, Human
ucuacugaggugcuauguucuu

SEQ ID NO: 2203699 - RNA, 14 nt, Human
ucuacacugugaac

SEQ ID NO: 2203700 - RNA, 13 nt, Human
ucuacacugugaa

SEQ ID NO: 2203701 - RNA, 21 nt, Human
ucuacucuuaaguuucucagc

SEQ ID NO: 2203702 - RNA, 22 nt, Human
ucuacucuuaaguuucucagcu

SEQ ID NO: 2203703 - RNA, 15 nt, Human
ucuacucuuuuuguu

SEQ ID NO: 2203704 - RNA, 17 nt, Human
ucuagaacacaggcaaa

SEQ ID NO: 2203705 - RNA, 15 nt, Human
ucuaacucagaaaca

SEQ ID NO: 2203706 - RNA, 19 nt, Human
ucuaacuagaaaucugcca

SEQ ID NO: 2203707 - RNA, 13 nt, Human
ucuaacucagcaa

SEQ ID NO: 2203708 - RNA, 20 nt, Human
ucuaaccucaucuucuucac

SEQ ID NO: 2203709 - RNA, 18 nt, Human
ucuaaccucaucuucuuc

SEQ ID NO: 2203710 - RNA, 13 nt, Human
ucuaaccucaucu

SEQ ID NO: 2203711 - RNA, 14 nt, Human
ucuaaccugugacc

SEQ ID NO: 2203712 - RNA, 15 nt, Human
ucuaaccugauggca

SEQ ID NO: 2203713 - RNA, 16 nt, Human
ucuaacuucaccauau

SEQ ID NO: 2203714 - RNA, 15 nt, Human
ucuaacuucaccaua

SEQ ID NO: 2203715 - RNA, 22 nt, Human
ucuaacuucaccauauuaccac

SEQ ID NO: 2203716 - RNA, 21 nt, Human
ucuacacuaagagagaaugag

SEQ ID NO: 2203717 - RNA, 16 nt, Human
ucuaaccccaggcccc

SEQ ID NO: 2203718 - RNA, 14 nt, Human
ucuaaauugaauaa

SEQ ID NO: 2203719 - RNA, 15 nt, Human
ucuaaauugaauaau

SEQ ID NO: 2203720 - RNA, 19 nt, Human
ucuaacaaaaaaauauauu

SEQ ID NO: 2203721 - RNA, 23 nt, Human
ucuaacccuaggcaucacaugcu

SEQ ID NO: 2203722 - RNA, 17 nt, Human
ucuaaauugaauaaugg

SEQ ID NO: 2203723 - RNA, 17 nt, Human
ucuaaccccaggccccg

SEQ ID NO: 2203724 - RNA, 14 nt, Human
ucuaacccucccau

SEQ ID NO: 2203725 - RNA, 15 nt, Human
ucuaacccucccaug

SEQ ID NO: 2203726 - RNA, 20 nt, Human
ucuaacccucccauggcacc

SEQ ID NO: 2203727 - RNA, 21 nt, Human
ucuaacccucccauggcaccu

SEQ ID NO: 2203728 - RNA, 22 nt, Human
ucuaaauuugaauguuaagcag

SEQ ID NO: 2203729 - RNA, 23 nt, Human
ucuaaauuugaauguuaagcaga

SEQ ID NO: 2203730 - RNA, 23 nt, Human
ucuaaaugcauauccugagccau

SEQ ID NO: 2203731 - RNA, 14 nt, Human
ucuaaaugcauauc

SEQ ID NO: 2203732 - RNA, 23 nt, Human
ucuaaaugggaaaguauucugua

SEQ ID NO: 2203733 - RNA, 13 nt, Human
ucuaaauugaaua

SEQ ID NO: 2203734 - RNA, 13 nt, Human
ucuaaauuugaau

SEQ ID NO: 2203735 - RNA, 17 nt, Human
ucuaaauuugaauguua

SEQ ID NO: 2203736 - RNA, 13 nt, Human
ucuaaaugaagug

SEQ ID NO: 2203737 - RNA, 22 nt, Human
ucuaaaucuccaaaauaaaacu

SEQ ID NO: 2203738 - RNA, 14 nt, Human
ucuccucuuguaaa

SEQ ID NO: 2203739 - RNA, 15 nt, Human
ucuccucuuguaaau

SEQ ID NO: 2203740 - RNA, 13 nt, Human
ucuccucuuguaa

SEQ ID NO: 2203741 - RNA, 22 nt, Human
ucuccucuugccacugccucuu

SEQ ID NO: 2203742 - RNA, 15 nt, Human
ucucccugacccugu

SEQ ID NO: 2203743 - RNA, 19 nt, Human
ucucccucuggcccugccu

SEQ ID NO: 2203744 - RNA, 15 nt, Human
ucucccucuucucaa

SEQ ID NO: 2203745 - RNA, 21 nt, Human
ucucccucuucucaagugccu

SEQ ID NO: 2203746 - RNA, 22 nt, Human
ucucccucuucucaagugccuu

SEQ ID NO: 2203747 - RNA, 16 nt, Human
ucuccugacccagucc

SEQ ID NO: 2203748 - RNA, 23 nt, Human
ucuccucuuguaaauaaagcccu

SEQ ID NO: 2203749 - RNA, 21 nt, Human
ucuccucuuguaaauaaagcc

SEQ ID NO: 2203750 - RNA, 16 nt, Human
ucuccucuuuuaucuu

SEQ ID NO: 2203751 - RNA, 20 nt, Human
ucucccucuggcccugccuu

SEQ ID NO: 2203752 - RNA, 18 nt, Human
ucucccucuggcccugcc

SEQ ID NO: 2203753 - RNA, 17 nt, Human
ucucccucuggcccugc

SEQ ID NO: 2203754 - RNA, 16 nt, Human
ucucccucuggcccug

SEQ ID NO: 2203755 - RNA, 15 nt, Human
ucucccucuggcccu

SEQ ID NO: 2203756 - RNA, 14 nt, Human
ucucccucuggccc

SEQ ID NO: 2203757 - RNA, 12 nt, Human
ucucccucuggc

SEQ ID NO: 2203758 - RNA, 21 nt, Human
ucucccucuccugccuacuca

SEQ ID NO: 2203759 - RNA, 16 nt, Human
ucucccucuggaucaa

SEQ ID NO: 2203760 - RNA, 18 nt, Human
ucucccucuccugccuac

SEQ ID NO: 2203761 - RNA, 17 nt, Human
ucucccucuccugccua

SEQ ID NO: 2203762 - RNA, 16 nt, Human
ucucccucuccugccu

SEQ ID NO: 2203763 - RNA, 15 nt, Human
ucucccucuccugcc

SEQ ID NO: 2203764 - RNA, 14 nt, Human
ucucccucuccugc

SEQ ID NO: 2203765 - RNA, 23 nt, Human
ucucccucucacugucugagagu

SEQ ID NO: 2203766 - RNA, 12 nt, Human
ucucccucucac

SEQ ID NO: 2203767 - RNA, 17 nt, Human
ucucccucucacugucu

SEQ ID NO: 2203768 - RNA, 23 nt, Human
ucucccucaacaagggagagacc

SEQ ID NO: 2203769 - RNA, 15 nt, Human
ucucccgguucuucc

SEQ ID NO: 2203770 - RNA, 16 nt, Human
ucucccgguucuucca

SEQ ID NO: 2203771 - RNA, 13 nt, Human
ucucccgucaggg

SEQ ID NO: 2203772 - RNA, 20 nt, Human
ucucccgucagggcccaagu

SEQ ID NO: 2203773 - RNA, 22 nt, Human
ucucccgucagggcccaagucc

SEQ ID NO: 2203774 - RNA, 17 nt, Human
ucuccugccuacucacg

SEQ ID NO: 2203775 - RNA, 13 nt, Human
ucuccugccugua

SEQ ID NO: 2203776 - RNA, 20 nt, Human
ucuccugccuguagcaguga

SEQ ID NO: 2203777 - RNA, 22 nt, Human
ucuccugccuguagcagugaga

SEQ ID NO: 2203778 - RNA, 19 nt, Human
ucuccugccucagccuccc

SEQ ID NO: 2203779 - RNA, 20 nt, Human
ucuccugccuuccuccuggg

SEQ ID NO: 2203780 - RNA, 18 nt, Human
ucuccugccuuccuccug

SEQ ID NO: 2203781 - RNA, 17 nt, Human
ucuccugccuuccuccu

SEQ ID NO: 2203782 - RNA, 16 nt, Human
ucuccugccuuccucc

SEQ ID NO: 2203783 - RNA, 15 nt, Human
ucuccugccuacuca

SEQ ID NO: 2203784 - RNA, 14 nt, Human
ucuccugccuacuc

SEQ ID NO: 2203785 - RNA, 12 nt, Human
ucuccugccuac

SEQ ID NO: 2203786 - RNA, 11 nt, Human
ucuccugccua

SEQ ID NO: 2203787 - RNA, 17 nt, Human
ucuccugacccaguccc

SEQ ID NO: 2203788 - RNA, 22 nt, Human
ucuccugccucagccucccaaa

SEQ ID NO: 2203789 - RNA, 12 nt, Human
ucucagguucuc

SEQ ID NO: 2203790 - RNA, 19 nt, Human
ucucagggucucugcugcc

SEQ ID NO: 2203791 - RNA, 15 nt, Human
ucucaggucccugca

SEQ ID NO: 2203792 - RNA, 15 nt, Human
ucucagucaguaauu

SEQ ID NO: 2203793 - RNA, 14 nt, Human
ucucagucaugcau

SEQ ID NO: 2203794 - RNA, 16 nt, Human
ucucagucaugcauaa

SEQ ID NO: 2203795 - RNA, 17 nt, Human
ucucaguacuuuggagg

SEQ ID NO: 2203796 - RNA, 22 nt, Human
ucucagugguuaagauuccuaa

SEQ ID NO: 2203797 - RNA, 21 nt, Human
ucucagugucaaugcagcccc

SEQ ID NO: 2203798 - RNA, 14 nt, Human
ucucccccagcccc

SEQ ID NO: 2203799 - RNA, 18 nt, Human
ucucaguguugagccuuu

SEQ ID NO: 2203800 - RNA, 22 nt, Human
ucucaguguugagccuuuuccc

SEQ ID NO: 2203801 - RNA, 20 nt, Human
ucucaguggcuucaucuguc

SEQ ID NO: 2203802 - RNA, 21 nt, Human
ucucaguuccgauuucccagg

SEQ ID NO: 2203803 - RNA, 15 nt, Human
ucucccccagcccca

SEQ ID NO: 2203804 - RNA, 17 nt, Human
ucucccccagccccauc

SEQ ID NO: 2203805 - RNA, 14 nt, Human
ucucccccugggcu

SEQ ID NO: 2203806 - RNA, 13 nt, Human
ucucccccugggc

SEQ ID NO: 2203807 - RNA, 12 nt, Human
ucucccccuggg

SEQ ID NO: 2203808 - RNA, 20 nt, Human
ucucccccccggggcugggu

SEQ ID NO: 2203809 - RNA, 21 nt, Human
ucucccccccggggcuggguu

SEQ ID NO: 2203810 - RNA, 20 nt, Human
ucuccccugcccccaggacu

SEQ ID NO: 2203811 - RNA, 21 nt, Human
ucuccccugcccccaggacug

SEQ ID NO: 2203812 - RNA, 22 nt, Human
ucuccccugcccccaggacugg

SEQ ID NO: 2203813 - RNA, 23 nt, Human
ucuccccugcccccaggacuggg

SEQ ID NO: 2203814 - RNA, 17 nt, Human
ucuccccugcccugcug

SEQ ID NO: 2203815 - RNA, 15 nt, Human
ucuccccugcccugc

SEQ ID NO: 2203816 - RNA, 14 nt, Human
ucuccccugcccug

SEQ ID NO: 2203817 - RNA, 16 nt, Human
ucuccccugcccccag

SEQ ID NO: 2203818 - RNA, 13 nt, Human
ucucccgcugcug

SEQ ID NO: 2203819 - RNA, 14 nt, Human
ucucccgcugcugc

SEQ ID NO: 2203820 - RNA, 20 nt, Human
ucucccggagguuggguggg

SEQ ID NO: 2203821 - RNA, 15 nt, Human
ucucccgcugcugcu

SEQ ID NO: 2203822 - RNA, 16 nt, Human
ucucccgcugcugcug

SEQ ID NO: 2203823 - RNA, 22 nt, Human
ucucccccagccccauccucug

SEQ ID NO: 2203824 - RNA, 16 nt, Human
ucuccccccccccucc

SEQ ID NO: 2203825 - RNA, 13 nt, Human
ucucccccccggg

SEQ ID NO: 2203826 - RNA, 13 nt, Human
ucucccccagccc

SEQ ID NO: 2203827 - RNA, 18 nt, Human
ucucccccagccccaucc

SEQ ID NO: 2203828 - RNA, 20 nt, Human
ucucccccagccccauccuc

SEQ ID NO: 2203829 - RNA, 16 nt, Human
ucucugagcugugcag

SEQ ID NO: 2203830 - RNA, 16 nt, Human
ucucugagcucugcau

SEQ ID NO: 2203831 - RNA, 15 nt, Human
ucucugagcugugca

SEQ ID NO: 2203832 - RNA, 14 nt, Human
ucucugagcaguga

SEQ ID NO: 2203833 - RNA, 19 nt, Human
ucucugacuucugccugga

SEQ ID NO: 2203834 - RNA, 17 nt, Human
ucucugacuucugccug

SEQ ID NO: 2203835 - RNA, 18 nt, Human
ucucugacuucugccugg

SEQ ID NO: 2203836 - RNA, 13 nt, Human
ucucugaggacac

SEQ ID NO: 2203837 - RNA, 20 nt, Human
ucucugauuuucaaagcuuu

SEQ ID NO: 2203838 - RNA, 19 nt, Human
ucucugauuuucaaagcuu

SEQ ID NO: 2203839 - RNA, 20 nt, Human
ucucucuucugcuccacccu

SEQ ID NO: 2203840 - RNA, 19 nt, Human
ucucucuucugcuccaccc

SEQ ID NO: 2203841 - RNA, 17 nt, Human
ucucucuucugcuccac

SEQ ID NO: 2203842 - RNA, 16 nt, Human
ucucucuucugcucca

SEQ ID NO: 2203843 - RNA, 14 nt, Human
ucucucuucugcuc

SEQ ID NO: 2203844 - RNA, 11 nt, Human
ucucucuucug

SEQ ID NO: 2203845 - RNA, 13 nt, Human
ucucugacuucug

SEQ ID NO: 2203846 - RNA, 14 nt, Human
ucucugacuucugc

SEQ ID NO: 2203847 - RNA, 16 nt, Human
ucucugacuucugccu

SEQ ID NO: 2203848 - RNA, 14 nt, Human
ucucucuucugccu

SEQ ID NO: 2203849 - RNA, 11 nt, Human
ucucucuuucc

SEQ ID NO: 2203850 - RNA, 20 nt, Human
ucucucuacuccuaccucag

SEQ ID NO: 2203851 - RNA, 19 nt, Human
ucucucuacuccuaccuca

SEQ ID NO: 2203852 - RNA, 20 nt, Human
ucucucguaacugguuucau

SEQ ID NO: 2203853 - RNA, 18 nt, Human
ucucucgguuccacgucc

SEQ ID NO: 2203854 - RNA, 23 nt, Human
ucucucgguuccacgucccccug

SEQ ID NO: 2203855 - RNA, 15 nt, Human
ucucucgugaguaua

SEQ ID NO: 2203856 - RNA, 11 nt, Human
ucucucugugg

SEQ ID NO: 2203857 - RNA, 20 nt, Human
ucucucuggggccacacaga

SEQ ID NO: 2203858 - RNA, 17 nt, Human
ucucucugugcugugga

SEQ ID NO: 2203859 - RNA, 21 nt, Human
ucucucugugcuguggaagca

SEQ ID NO: 2203860 - RNA, 22 nt, Human
ucucucuacuccuaccucagcc

SEQ ID NO: 2203861 - RNA, 11 nt, Human
ucucucucacc

SEQ ID NO: 2203862 - RNA, 17 nt, Human
ucucucucaauuuuugg

SEQ ID NO: 2203863 - RNA, 14 nt, Human
ucucuauuuaauau

SEQ ID NO: 2203864 - RNA, 15 nt, Human
ucucuauuuaauauu

SEQ ID NO: 2203865 - RNA, 20 nt, Human
ucucuaucauuuaauaauau

SEQ ID NO: 2203866 - RNA, 22 nt, Human
ucucuaucauuuaauaauauac

SEQ ID NO: 2203867 - RNA, 18 nt, Human
ucucuaucauuaaaguuc

SEQ ID NO: 2203868 - RNA, 23 nt, Human
ucucucggaguaucugggaacug

SEQ ID NO: 2203869 - RNA, 15 nt, Human
ucucucgguuccacg

SEQ ID NO: 2203870 - RNA, 23 nt, Human
ucucucggcuccccauguguccu

SEQ ID NO: 2203871 - RNA, 15 nt, Human
ucucucggcucccca

SEQ ID NO: 2203872 - RNA, 20 nt, Human
ucucucggcuccccaugugu

SEQ ID NO: 2203873 - RNA, 17 nt, Human
ucucuauuuaauauuua

SEQ ID NO: 2203874 - RNA, 17 nt, Human
ucucuagaauuuuaagu

SEQ ID NO: 2203875 - RNA, 13 nt, Human
ucucuagaauuuu

SEQ ID NO: 2203876 - RNA, 21 nt, Human
ucucuacuccuaccucagccu

SEQ ID NO: 2203877 - RNA, 20 nt, Human
ucucuacuccuaccucagcc

SEQ ID NO: 2203878 - RNA, 19 nt, Human
ucucuacuccuaccucagc

SEQ ID NO: 2203879 - RNA, 15 nt, Human
ucucuacaaaaagca

SEQ ID NO: 2203880 - RNA, 20 nt, Human
ucucuacagacuucuccaga

SEQ ID NO: 2203881 - RNA, 13 nt, Human
ucuccuguaccuc

SEQ ID NO: 2203882 - RNA, 22 nt, Human
ucucuagaauuuuaagugcuuu

SEQ ID NO: 2203883 - RNA, 12 nt, Human
ucucuagccacu

SEQ ID NO: 2203884 - RNA, 23 nt, Human
ucucuagcuggugguuucacggu

SEQ ID NO: 2203885 - RNA, 24 nt, Human
ucucuagcuggugguuucacggug

SEQ ID NO: 2203886 - RNA, 16 nt, Human
ucucuauagcaccagg

SEQ ID NO: 2203887 - RNA, 22 nt, Human
ucucuauagcaccagggcucac

SEQ ID NO: 2203888 - RNA, 13 nt, Human
ucucuaucauuaa

SEQ ID NO: 2203889 - RNA, 12 nt, Human
ucucuaucauuu

SEQ ID NO: 2203890 - RNA, 13 nt, Human
ucucuaucauuua

SEQ ID NO: 2203891 - RNA, 14 nt, Human
ucucuaucauuaaa

SEQ ID NO: 2203892 - RNA, 15 nt, Human
ucucuaucauuaaag

SEQ ID NO: 2203893 - RNA, 16 nt, Human
ucucuaucauuaaagu

SEQ ID NO: 2203894 - RNA, 17 nt, Human
ucucuaucauuaaaguu

SEQ ID NO: 2203895 - RNA, 14 nt, Human
ucucuaucauuuaa

SEQ ID NO: 2203896 - RNA, 15 nt, Human
ucucuaucauuuaau

SEQ ID NO: 2203897 - RNA, 16 nt, Human
ucucuaucauuuaaua

SEQ ID NO: 2203898 - RNA, 17 nt, Human
ucucuaucauuuaauaa

SEQ ID NO: 2203899 - RNA, 19 nt, Human
ucucuaguuugauuaaauu

SEQ ID NO: 2203900 - RNA, 18 nt, Human
ucucuaguuugauuaaau

SEQ ID NO: 2203901 - RNA, 13 nt, Human
ucucuaggaaaua

SEQ ID NO: 2203902 - RNA, 19 nt, Human
ucucuaggaaauauuuauu

SEQ ID NO: 2203903 - RNA, 18 nt, Human
ucugagcucugcauuugu

SEQ ID NO: 2203904 - RNA, 15 nt, Human
ucugagcugcucuga

SEQ ID NO: 2203905 - RNA, 17 nt, Human
ucugagcugcucugaau

SEQ ID NO: 2203906 - RNA, 19 nt, Human
ucugagcagugaaugauuc

SEQ ID NO: 2203907 - RNA, 22 nt, Human
ucugagcauuagauuucucauu

SEQ ID NO: 2203908 - RNA, 16 nt, Human
ucugaggaauccagac

SEQ ID NO: 2203909 - RNA, 17 nt, Human
ucugaggaauccagacc

SEQ ID NO: 2203910 - RNA, 20 nt, Human
ucugaggacacuaaccacgc

SEQ ID NO: 2203911 - RNA, 23 nt, Human
ucugaggacacuaaccacgcugg

SEQ ID NO: 2203912 - RNA, 23 nt, Human
ucugauucccaagcucugcuccu

SEQ ID NO: 2203913 - RNA, 15 nt, Human
ucugauuggacauuu

SEQ ID NO: 2203914 - RNA, 16 nt, Human
ucugauuggacauuuu

SEQ ID NO: 2203915 - RNA, 19 nt, Human
ucugauuggacauuuucuu

SEQ ID NO: 2203916 - RNA, 20 nt, Human
ucugauuggacauuuucuuc

SEQ ID NO: 2203917 - RNA, 21 nt, Human
ucugauuggacauuuucuuca

SEQ ID NO: 2203918 - RNA, 23 nt, Human
ucugauuggacauuuucuucaga

SEQ ID NO: 2203919 - RNA, 13 nt, Human
ucugauuggcuca

SEQ ID NO: 2203920 - RNA, 17 nt, Human
ucugauuggcucaccca

SEQ ID NO: 2203921 - RNA, 18 nt, Human
ucugauuggcucacccaa

SEQ ID NO: 2203922 - RNA, 20 nt, Human
ucugauuguaacguugcugu

SEQ ID NO: 2203923 - RNA, 21 nt, Human
ucugauuguaacguugcugug

SEQ ID NO: 2203924 - RNA, 22 nt, Human
ucugauuguaacguugcugugg

SEQ ID NO: 2203925 - RNA, 23 nt, Human
ucugauuguaacguugcuguggg

SEQ ID NO: 2203926 - RNA, 14 nt, Human
ucugcacaagcugc

SEQ ID NO: 2203927 - RNA, 16 nt, Human
ucugcaauuccccucu

SEQ ID NO: 2203928 - RNA, 18 nt, Human
ucugcaauuccccucugc

SEQ ID NO: 2203929 - RNA, 20 nt, Human
ucugcaauuccccucugcug

SEQ ID NO: 2203930 - RNA, 19 nt, Human
ucugcacaagcugcacccu

SEQ ID NO: 2203931 - RNA, 20 nt, Human
ucugcacaugucuuguacau

SEQ ID NO: 2203932 - RNA, 21 nt, Human
ucugcaauuccccucugcugc

SEQ ID NO: 2203933 - RNA, 22 nt, Human
ucugcaauuccccucugcugcu

SEQ ID NO: 2203934 - RNA, 21 nt, Human
ucugaacuuggcgcugccccu

SEQ ID NO: 2203935 - RNA, 20 nt, Human
ucugaacuuggcgcugcccc

SEQ ID NO: 2203936 - RNA, 22 nt, Human
ucugacauuaacaguuuuccau

SEQ ID NO: 2203937 - RNA, 21 nt, Human
ucugacauuaacaguuuucca

SEQ ID NO: 2203938 - RNA, 19 nt, Human
ucugacauuaacaguuuuc

SEQ ID NO: 2203939 - RNA, 18 nt, Human
ucugacauuaacaguuuu

SEQ ID NO: 2203940 - RNA, 23 nt, Human
ucugacauuaacaguuuuccaug

SEQ ID NO: 2203941 - RNA, 13 nt, Human
ucugacauucuca

SEQ ID NO: 2203942 - RNA, 16 nt, Human
ucugacauuaacaguu

SEQ ID NO: 2203943 - RNA, 15 nt, Human
ucugacauuaacagu

SEQ ID NO: 2203944 - RNA, 22 nt, Human
ucugacaugauuccuuccuguu

SEQ ID NO: 2203945 - RNA, 19 nt, Human
ucugacaugauuccuuccu

SEQ ID NO: 2203946 - RNA, 18 nt, Human
ucugacaugauuccuucc

SEQ ID NO: 2203947 - RNA, 16 nt, Human
ucugacaucucugcaa

SEQ ID NO: 2203948 - RNA, 18 nt, Human
ucugaccacacuuccugu

SEQ ID NO: 2203949 - RNA, 13 nt, Human
ucugaccacacuu

SEQ ID NO: 2203950 - RNA, 13 nt, Human
ucugaccacgugc

SEQ ID NO: 2203951 - RNA, 12 nt, Human
ucugaccacacu

SEQ ID NO: 2203952 - RNA, 21 nt, Human
ucugacauucucaggaagccc

SEQ ID NO: 2203953 - RNA, 22 nt, Human
ucugacauucucaggaagcccc

SEQ ID NO: 2203954 - RNA, 22 nt, Human
ucugaccacacuuccuguccag

SEQ ID NO: 2203955 - RNA, 13 nt, Human
ucugaccagcagc

SEQ ID NO: 2203956 - RNA, 11 nt, Human
ucugacccagu

SEQ ID NO: 2203957 - RNA, 16 nt, Human
ucugaccagcagcgcc

SEQ ID NO: 2203958 - RNA, 14 nt, Human
ucugacccaugcug

SEQ ID NO: 2203959 - RNA, 15 nt, Human
ucugacccagugccc

SEQ ID NO: 2203960 - RNA, 14 nt, Human
ucugacccagugcc

SEQ ID NO: 2203961 - RNA, 13 nt, Human
ucugacccagugc

SEQ ID NO: 2203962 - RNA, 14 nt, Human
ucugacccagugag

SEQ ID NO: 2203963 - RNA, 15 nt, Human
ucugacccagugaga

SEQ ID NO: 2203964 - RNA, 20 nt, Human
ucugagauuauuuuaaucua

SEQ ID NO: 2203965 - RNA, 23 nt, Human
ucugacccagugcccccacugac

SEQ ID NO: 2203966 - RNA, 21 nt, Human
ucugacccagugagauuacag

SEQ ID NO: 2203967 - RNA, 22 nt, Human
ucugacccagugcccccacuga

SEQ ID NO: 2203968 - RNA, 19 nt, Human
ucugacccagugcccccac

SEQ ID NO: 2203969 - RNA, 17 nt, Human
ucugagcaagagcuggc

SEQ ID NO: 2203970 - RNA, 15 nt, Human
ucugagcaagagcug

SEQ ID NO: 2203971 - RNA, 16 nt, Human
ucugagcaagagcugg

SEQ ID NO: 2203972 - RNA, 15 nt, Human
ucugagcacacuuua

SEQ ID NO: 2203973 - RNA, 20 nt, Human
ucugagcauuagauuucuca

SEQ ID NO: 2203974 - RNA, 15 nt, Human
ucugacccaugcugc

SEQ ID NO: 2203975 - RNA, 16 nt, Human
ucugacccaugcugcc

SEQ ID NO: 2203976 - RNA, 17 nt, Human
ucugacccaugcugccc

SEQ ID NO: 2203977 - RNA, 18 nt, Human
ucugacccaugcugcccu

SEQ ID NO: 2203978 - RNA, 13 nt, Human
ucucuucucuguu

SEQ ID NO: 2203979 - RNA, 20 nt, Human
ucucuuugaauuuucugugu

SEQ ID NO: 2203980 - RNA, 12 nt, Human
ucucuuccugua

SEQ ID NO: 2203981 - RNA, 13 nt, Human
ucucuucuccacu

SEQ ID NO: 2203982 - RNA, 14 nt, Human
ucucuucuccacug

SEQ ID NO: 2203983 - RNA, 15 nt, Human
ucucuucuccacugg

SEQ ID NO: 2203984 - RNA, 16 nt, Human
ucucuucuccacugga

SEQ ID NO: 2203985 - RNA, 19 nt, Human
ucucuuccuccgaggccag

SEQ ID NO: 2203986 - RNA, 11 nt, Human
ucucuuccuac

SEQ ID NO: 2203987 - RNA, 11 nt, Human
ucucuuccugu

SEQ ID NO: 2203988 - RNA, 11 nt, Human
ucucuucucca

SEQ ID NO: 2203989 - RNA, 20 nt, Human
ucucuuccuuuuaucaguag

SEQ ID NO: 2203990 - RNA, 18 nt, Human
ucucugcaccguacugug

SEQ ID NO: 2203991 - RNA, 11 nt, Human
ucucugcaccc

SEQ ID NO: 2203992 - RNA, 19 nt, Human
ucucugcaaucuucucaga

SEQ ID NO: 2203993 - RNA, 19 nt, Human
ucucugcagccagcccagc

SEQ ID NO: 2203994 - RNA, 18 nt, Human
ucucugcagccagcccag

SEQ ID NO: 2203995 - RNA, 17 nt, Human
ucucugcagccagccca

SEQ ID NO: 2203996 - RNA, 16 nt, Human
ucucugcagccagccc

SEQ ID NO: 2203997 - RNA, 15 nt, Human
ucucugcagccagcc

SEQ ID NO: 2203998 - RNA, 11 nt, Human
ucucugcagcc

SEQ ID NO: 2203999 - RNA, 20 nt, Human
ucucugcagccagcccagcc

SEQ ID NO: 2204000 - RNA, 11 nt, Human
ucucugcaggu

SEQ ID NO: 2204001 - RNA, 14 nt, Human
ucucuucagguucu

SEQ ID NO: 2204002 - RNA, 13 nt, Human
ucucuucagguuc

SEQ ID NO: 2204003 - RNA, 16 nt, Human
ucucuucagguucuua

SEQ ID NO: 2204004 - RNA, 15 nt, Human
ucucuucagguucuu

SEQ ID NO: 2204005 - RNA, 18 nt, Human
ucucuucacagucacauu

SEQ ID NO: 2204006 - RNA, 23 nt, Human
ucucuucagguucuuagugucac

SEQ ID NO: 2204007 - RNA, 14 nt, Human
ucucuucauacuuu

SEQ ID NO: 2204008 - RNA, 17 nt, Human
ucucuuccauaugaccu

SEQ ID NO: 2204009 - RNA, 21 nt, Human
ucucuuccauaugaccucaug

SEQ ID NO: 2204010 - RNA, 13 nt, Human
ucucuuccccucu

SEQ ID NO: 2204011 - RNA, 14 nt, Human
ucucuuccccucuc

SEQ ID NO: 2204012 - RNA, 15 nt, Human
ucucuuccccucuca

SEQ ID NO: 2204013 - RNA, 17 nt, Human
ucucuuccccucucaga

SEQ ID NO: 2204014 - RNA, 17 nt, Human
ucugaaaauuaacacug

SEQ ID NO: 2204015 - RNA, 17 nt, Human
ucucuuuuuggaggugc

SEQ ID NO: 2204016 - RNA, 13 nt, Human
ucugaaaauguga

SEQ ID NO: 2204017 - RNA, 14 nt, Human
ucugaaaauguaug

SEQ ID NO: 2204018 - RNA, 23 nt, Human
ucugaaaauguauguguaaguau

SEQ ID NO: 2204019 - RNA, 18 nt, Human
ucugaaaauuaacacugc

SEQ ID NO: 2204020 - RNA, 19 nt, Human
ucugaaaauuaacacugcu

SEQ ID NO: 2204021 - RNA, 14 nt, Human
ucugaaagccacgu

SEQ ID NO: 2204022 - RNA, 13 nt, Human
ucugaaagggacg

SEQ ID NO: 2204023 - RNA, 21 nt, Human
ucugaaaugugauaaguucuu

SEQ ID NO: 2204024 - RNA, 21 nt, Human
ucugaacucaaacugaggaau

SEQ ID NO: 2204025 - RNA, 17 nt, Human
ucugaacucaaacugag

SEQ ID NO: 2204026 - RNA, 16 nt, Human
ucugaacucaaacuga

SEQ ID NO: 2204027 - RNA, 14 nt, Human
ucugaacucaaacu

SEQ ID NO: 2204028 - RNA, 12 nt, Human
ucugaacucaaa

SEQ ID NO: 2204029 - RNA, 12 nt, Human
ucugaaaucuga

SEQ ID NO: 2204030 - RNA, 16 nt, Human
ucugaaaucugaagac

SEQ ID NO: 2204031 - RNA, 13 nt, Human
ucugaaaugaaga

SEQ ID NO: 2204032 - RNA, 15 nt, Human
ucugaaaucugaaga

SEQ ID NO: 2204033 - RNA, 14 nt, Human
ucugaaaugugaua

SEQ ID NO: 2204034 - RNA, 17 nt, Human
ucucuuuguucuaaaga

SEQ ID NO: 2204035 - RNA, 16 nt, Human
ucucuuugggaauguu

SEQ ID NO: 2204036 - RNA, 15 nt, Human
ucucuuuucaaaaca

SEQ ID NO: 2204037 - RNA, 16 nt, Human
ucucuuuucaaaacau

SEQ ID NO: 2204038 - RNA, 21 nt, Human
ucucuuuguucucagcucccc

SEQ ID NO: 2204039 - RNA, 23 nt, Human
ucucuuuguucucagcucccccu

SEQ ID NO: 2204040 - RNA, 13 nt, Human
ucucuuuguucuc

SEQ ID NO: 2204041 - RNA, 14 nt, Human
ucucuuuguucuca

SEQ ID NO: 2204042 - RNA, 17 nt, Human
ucucuuuguucucagcu

SEQ ID NO: 2204043 - RNA, 19 nt, Human
ucucuuuguucucagcucc

SEQ ID NO: 2204044 - RNA, 23 nt, Human
ucucuuuugaauccaugcuuggg

SEQ ID NO: 2204045 - RNA, 22 nt, Human
ucucuuuugaauccaugcuugg

SEQ ID NO: 2204046 - RNA, 20 nt, Human
ucucuuuugaauccaugcuu

SEQ ID NO: 2204047 - RNA, 20 nt, Human
ucucuuuugaaacaauacuc

SEQ ID NO: 2204048 - RNA, 18 nt, Human
ucucuuuucuuuagagca

SEQ ID NO: 2204049 - RNA, 19 nt, Human
ucucuuuucuuuagagcau

SEQ ID NO: 2204050 - RNA, 20 nt, Human
ucucuuuucuuuagagcauu

SEQ ID NO: 2204051 - RNA, 17 nt, Human
ucucuuuugaaacaaua

SEQ ID NO: 2204052 - RNA, 16 nt, Human
ucucuuuucucuuucu

SEQ ID NO: 2204053 - RNA, 13 nt, Human
ucucuuuucuuua

SEQ ID NO: 2204054 - RNA, 12 nt, Human
ucucuuuucucu

SEQ ID NO: 2204055 - RNA, 16 nt, Human
ucugaaaauguaugug

SEQ ID NO: 2204056 - RNA, 13 nt, Human
ucucuuuuucagu

SEQ ID NO: 2204057 - RNA, 14 nt, Human
ucucuuuuugacuc

SEQ ID NO: 2204058 - RNA, 21 nt, Human
ucucuuuuugacucuugcaau

SEQ ID NO: 2204059 - RNA, 13 nt, Human
ucucuuuuuggag

SEQ ID NO: 2204060 - RNA, 18 nt, Human
ucucuuuuugcuuucgaa

SEQ ID NO: 2204061 - RNA, 15 nt, Human
ucagcagcccuccuc

SEQ ID NO: 2204062 - RNA, 14 nt, Human
ucagcagcccuccu

SEQ ID NO: 2204063 - RNA, 12 nt, Human
ucagcagcccuc

SEQ ID NO: 2204064 - RNA, 18 nt, Human
ucagcagcccuccucacc

SEQ ID NO: 2204065 - RNA, 17 nt, Human
ucagcagcccuccucac

SEQ ID NO: 2204066 - RNA, 16 nt, Human
ucagcagcccuccuca

SEQ ID NO: 2204067 - RNA, 17 nt, Human
ucagcagccucccugaa

SEQ ID NO: 2204068 - RNA, 20 nt, Human
ucagcagcgaccaccccugc

SEQ ID NO: 2204069 - RNA, 22 nt, Human
ucagcagcgaccaccccugccu

SEQ ID NO: 2204070 - RNA, 24 nt, Human
ucagucugauucccaagcucugcu

SEQ ID NO: 2204071 - RNA, 13 nt, Human
ucagucugguggg

SEQ ID NO: 2204072 - RNA, 16 nt, Human
ucagucuggugggagg

SEQ ID NO: 2204073 - RNA, 17 nt, Human
ucagucuggugggagga

SEQ ID NO: 2204074 - RNA, 20 nt, Human
ucaguggggcccauggaugu

SEQ ID NO: 2204075 - RNA, 19 nt, Human
ucagucuggugggaggacg

SEQ ID NO: 2204076 - RNA, 14 nt, Human
ucagcaggaagcaa

SEQ ID NO: 2204077 - RNA, 17 nt, Human
ucagcaggaagcaacga

SEQ ID NO: 2204078 - RNA, 23 nt, Human
ucagcagcgaccaccccugccuc

SEQ ID NO: 2204079 - RNA, 15 nt, Human
ucagucuggcccuuc

SEQ ID NO: 2204080 - RNA, 18 nt, Human
ucaguuacucagcccugg

SEQ ID NO: 2204081 - RNA, 17 nt, Human
ucaguuacucagcccug

SEQ ID NO: 2204082 - RNA, 16 nt, Human
ucaguuacucagcccu

SEQ ID NO: 2204083 - RNA, 15 nt, Human
ucaguuacucagccc

SEQ ID NO: 2204084 - RNA, 13 nt, Human
ucagugucucaca

SEQ ID NO: 2204085 - RNA, 14 nt, Human
ucagugucucacac

SEQ ID NO: 2204086 - RNA, 15 nt, Human
ucagugucucacacu

SEQ ID NO: 2204087 - RNA, 21 nt, Human
ucagugucucacacuggcgua

SEQ ID NO: 2204088 - RNA, 17 nt, Human
ucagugugacugaucuc

SEQ ID NO: 2204089 - RNA, 20 nt, Human
ucagugucauuuaugaaaag

SEQ ID NO: 2204090 - RNA, 22 nt, Human
ucagugucaaauaaacacugug

SEQ ID NO: 2204091 - RNA, 19 nt, Human
ucagugucaaauaaacacu

SEQ ID NO: 2204092 - RNA, 21 nt, Human
ucagugucaaauaaacacugu

SEQ ID NO: 2204093 - RNA, 16 nt, Human
ucaguguccaaagcag

SEQ ID NO: 2204094 - RNA, 13 nt, Human
ucagugucccggg

SEQ ID NO: 2204095 - RNA, 17 nt, Human
ucagugucccgggcccg

SEQ ID NO: 2204096 - RNA, 19 nt, Human
ucaguguccucuugcucaa

SEQ ID NO: 2204097 - RNA, 13 nt, Human
ucagugugacuga

SEQ ID NO: 2204098 - RNA, 11 nt, Human
ucaguguacau

SEQ ID NO: 2204099 - RNA, 18 nt, Human
ucaguguaauuucuuugc

SEQ ID NO: 2204100 - RNA, 19 nt, Human
ucaguguaauuucuuugcc

SEQ ID NO: 2204101 - RNA, 16 nt, Human
ucaguguauuuguauu

SEQ ID NO: 2204102 - RNA, 14 nt, Human
ucagugucaaauaa

SEQ ID NO: 2204103 - RNA, 15 nt, Human
ucagugucaaauaaa

SEQ ID NO: 2204104 - RNA, 17 nt, Human
ucagugucaaauaaaca

SEQ ID NO: 2204105 - RNA, 20 nt, Human
ucagugguuauuuagggaac

SEQ ID NO: 2204106 - RNA, 21 nt, Human
ucagugguccacaucccggga

SEQ ID NO: 2204107 - RNA, 23 nt, Human
ucaguguaaauaguuacuccagu

SEQ ID NO: 2204108 - RNA, 16 nt, Human
ucaguguaagcccugc

SEQ ID NO: 2204109 - RNA, 14 nt, Human
ucaguguaauuucu

SEQ ID NO: 2204110 - RNA, 15 nt, Human
ucaguguaauuucuu

SEQ ID NO: 2204111 - RNA, 23 nt, Human
ucagugguuggcaauuguuucaa

SEQ ID NO: 2204112 - RNA, 16 nt, Human
ucaguugcaauaauac

SEQ ID NO: 2204113 - RNA, 14 nt, Human
ucaguuggcugacu

SEQ ID NO: 2204114 - RNA, 17 nt, Human
ucaguugcaauaauacu

SEQ ID NO: 2204115 - RNA, 18 nt, Human
ucaguuguagaauguauu

SEQ ID NO: 2204116 - RNA, 21 nt, Human
ucaguuguagaauguauugua

SEQ ID NO: 2204117 - RNA, 13 nt, Human
ucauaaugacuua

SEQ ID NO: 2204118 - RNA, 17 nt, Human
ucaguuacucugaaggg

SEQ ID NO: 2204119 - RNA, 16 nt, Human
ucaguuacucugaagg

SEQ ID NO: 2204120 - RNA, 15 nt, Human
ucaguuacucuucag

SEQ ID NO: 2204121 - RNA, 19 nt, Human
ucaguuacucagcccuggg

SEQ ID NO: 2204122 - RNA, 18 nt, Human
ucaguuagagcugacaca

SEQ ID NO: 2204123 - RNA, 22 nt, Human
ucaguuagagcugacacaaacc

SEQ ID NO: 2204124 - RNA, 23 nt, Human
ucaguugagcuucauauaccagc

SEQ ID NO: 2204125 - RNA, 15 nt, Human
ucaguucccuuggcc

SEQ ID NO: 2204126 - RNA, 19 nt, Human
ucaguucucuugauuuuca

SEQ ID NO: 2204127 - RNA, 14 nt, Human
ucaguucccagaau

SEQ ID NO: 2204128 - RNA, 16 nt, Human
ucaguucccagaauca

SEQ ID NO: 2204129 - RNA, 17 nt, Human
ucaguucccagaaucaa

SEQ ID NO: 2204130 - RNA, 18 nt, Human
ucaguucccagaaucaaa

SEQ ID NO: 2204131 - RNA, 20 nt, Human
ucaguucagaaucacuucug

SEQ ID NO: 2204132 - RNA, 14 nt, Human
ucauacacuuccuu

SEQ ID NO: 2204133 - RNA, 13 nt, Human
ucauacccacccc

SEQ ID NO: 2204134 - RNA, 15 nt, Human
ucauaauuauuauuu

SEQ ID NO: 2204135 - RNA, 17 nt, Human
ucaguuguuaguguguc

SEQ ID NO: 2204136 - RNA, 12 nt, Human
ucauaaugugaa

SEQ ID NO: 2204137 - RNA, 22 nt, Human
ucauacaaggcccaggaggcuu

SEQ ID NO: 2204138 - RNA, 13 nt, Human
ucauaaugugaag

SEQ ID NO: 2204139 - RNA, 14 nt, Human
ucauaaugugaagu

SEQ ID NO: 2204140 - RNA, 15 nt, Human
ucauaaugugaagug

SEQ ID NO: 2204141 - RNA, 17 nt, Human
ucauaaugugaaguguu

SEQ ID NO: 2204142 - RNA, 18 nt, Human
ucauaaugugaaguguua

SEQ ID NO: 2204143 - RNA, 19 nt, Human
ucauaaugugaaguguuaa

SEQ ID NO: 2204144 - RNA, 12 nt, Human
ucauaauucuaa

SEQ ID NO: 2204145 - RNA, 16 nt, Human
ucaucucucuuuaaua

SEQ ID NO: 2204146 - RNA, 13 nt, Human
ucaucucuuagcu

SEQ ID NO: 2204147 - RNA, 16 nt, Human
ucaucucucugcccaa

SEQ ID NO: 2204148 - RNA, 14 nt, Human
ucaucucucugccc

SEQ ID NO: 2204149 - RNA, 22 nt, Human
ucauaguacucuuuguagcaaa

SEQ ID NO: 2204150 - RNA, 23 nt, Human
ucaucuccugccuuccuccuggg

SEQ ID NO: 2204151 - RNA, 11 nt, Human
ucaucucuccu

SEQ ID NO: 2204152 - RNA, 15 nt, Human
ucaucucuccuccaa

SEQ ID NO: 2204153 - RNA, 23 nt, Human
ucaucucuccuccaagacacugu

SEQ ID NO: 2204154 - RNA, 14 nt, Human
ucaucucuguccca

SEQ ID NO: 2204155 - RNA, 14 nt, Human
ucaucucuucuuuu

SEQ ID NO: 2204156 - RNA, 14 nt, Human
ucaucucuuagcuc

SEQ ID NO: 2204157 - RNA, 19 nt, Human
ucaucucuuagcuccccuc

SEQ ID NO: 2204158 - RNA, 20 nt, Human
ucaucucuuagcuccccucc

SEQ ID NO: 2204159 - RNA, 21 nt, Human
ucaucucuuagcuccccucca

SEQ ID NO: 2204160 - RNA, 15 nt, Human
ucaucugucaagugg

SEQ ID NO: 2204161 - RNA, 17 nt, Human
ucaucugucccuccggg

SEQ ID NO: 2204162 - RNA, 12 nt, Human
ucaucugucccu

SEQ ID NO: 2204163 - RNA, 16 nt, Human
ucaucugggggagugg

SEQ ID NO: 2204164 - RNA, 18 nt, Human
ucaucugggggaguggaa

SEQ ID NO: 2204165 - RNA, 13 nt, Human
ucaucuguaacuc

SEQ ID NO: 2204166 - RNA, 19 nt, Human
ucaucugggggaguggaau

SEQ ID NO: 2204167 - RNA, 20 nt, Human
ucaucugggggaguggaaua

SEQ ID NO: 2204168 - RNA, 12 nt, Human
ucaucuguguga

SEQ ID NO: 2204169 - RNA, 14 nt, Human
ucaucugugugaaa

SEQ ID NO: 2204170 - RNA, 17 nt, Human
ucaucugugugaaaaug

SEQ ID NO: 2204171 - RNA, 12 nt, Human
ucaucugugcac

SEQ ID NO: 2204172 - RNA, 18 nt, Human
ucaucugucccuccggga

SEQ ID NO: 2204173 - RNA, 17 nt, Human
ucaucuguuuuucuuuu

SEQ ID NO: 2204174 - RNA, 12 nt, Human
ucaucuuacugu

SEQ ID NO: 2204175 - RNA, 13 nt, Human
ucaugccccccuc

SEQ ID NO: 2204176 - RNA, 19 nt, Human
ucaucugugugaaaauggg

SEQ ID NO: 2204177 - RNA, 21 nt, Human
ucauagggucucuucagguuc

SEQ ID NO: 2204178 - RNA, 16 nt, Human
ucauagguauuucaaa

SEQ ID NO: 2204179 - RNA, 18 nt, Human
ucauaggucacuggcucu

SEQ ID NO: 2204180 - RNA, 23 nt, Human
ucauaggucacuggcucuccaag

SEQ ID NO: 2204181 - RNA, 20 nt, Human
ucauagggucucuucagguu

SEQ ID NO: 2204182 - RNA, 18 nt, Human
ucauagggucucuucagg

SEQ ID NO: 2204183 - RNA, 17 nt, Human
ucauagggucucuucag

SEQ ID NO: 2204184 - RNA, 22 nt, Human
ucauaccaggccgccccagccu

SEQ ID NO: 2204185 - RNA, 16 nt, Human
ucauagguugccaaua

SEQ ID NO: 2204186 - RNA, 20 nt, Human
ucauagguugccaauaauac

SEQ ID NO: 2204187 - RNA, 20 nt, Human
ucauaguacucuuuguagca

SEQ ID NO: 2204188 - RNA, 21 nt, Human
ucauaguaacuucuuauggaa

SEQ ID NO: 2204189 - RNA, 22 nt, Human
ucaucuccugccuuccuccugg

SEQ ID NO: 2204190 - RNA, 21 nt, Human
ucaucuccugccuuccuccug

SEQ ID NO: 2204191 - RNA, 18 nt, Human
ucauaguaacuucuuaug

SEQ ID NO: 2204192 - RNA, 16 nt, Human
ucauaguaacuucuua

SEQ ID NO: 2204193 - RNA, 15 nt, Human
ucauaguaacuucuu

SEQ ID NO: 2204194 - RNA, 14 nt, Human
ucauaguaacuucu

SEQ ID NO: 2204195 - RNA, 15 nt, Human
ucauaccaaugaaaa

SEQ ID NO: 2204196 - RNA, 21 nt, Human
ucauacccacccccacccaag

SEQ ID NO: 2204197 - RNA, 20 nt, Human
ucauacccacccccacccaa

SEQ ID NO: 2204198 - RNA, 14 nt, Human
ucauacccaccccc

SEQ ID NO: 2204199 - RNA, 15 nt, Human
ucauacccaccccca

SEQ ID NO: 2204200 - RNA, 18 nt, Human
ucaugccuggcuucgcaa

SEQ ID NO: 2204201 - RNA, 14 nt, Human
ucaugccuguaauc

SEQ ID NO: 2204202 - RNA, 13 nt, Human
ucaugccuggcuu

SEQ ID NO: 2204203 - RNA, 15 nt, Human
ucaugccuggcuucg

SEQ ID NO: 2204204 - RNA, 17 nt, Human
ucaugccuggcuucgca

SEQ ID NO: 2204205 - RNA, 20 nt, Human
ucaugguguaauaagacaua

SEQ ID NO: 2204206 - RNA, 15 nt, Human
ucaugccuguaaucc

SEQ ID NO: 2204207 - RNA, 21 nt, Human
ucaugguguaauaagacauaa

SEQ ID NO: 2204208 - RNA, 22 nt, Human
ucaugcuaauuauauaauauuu

SEQ ID NO: 2204209 - RNA, 15 nt, Human
ucaugcuaucucugu

SEQ ID NO: 2204210 - RNA, 15 nt, Human
ucaugcccuccucuc

SEQ ID NO: 2204211 - RNA, 15 nt, Human
ucaugcccugugcaa

SEQ ID NO: 2204212 - RNA, 14 nt, Human
ucaugcccuccucu

SEQ ID NO: 2204213 - RNA, 13 nt, Human
ucaugcccuccuc

SEQ ID NO: 2204214 - RNA, 16 nt, Human
ucaugccccuggcugg

SEQ ID NO: 2204215 - RNA, 22 nt, Human
ucaugccccccucaaaccuccu

SEQ ID NO: 2204216 - RNA, 15 nt, Human
ucaugcccccuuuca

SEQ ID NO: 2204217 - RNA, 18 nt, Human
ucaugcccccuuucagau

SEQ ID NO: 2204218 - RNA, 21 nt, Human
ucaugcccccuuucagauguc

SEQ ID NO: 2204219 - RNA, 16 nt, Human
ucauguaaacugugca

SEQ ID NO: 2204220 - RNA, 17 nt, Human
ucauguaaacugugcac

SEQ ID NO: 2204221 - RNA, 14 nt, Human
ucauguaaacugug

SEQ ID NO: 2204222 - RNA, 13 nt, Human
ucauguaaacugu

SEQ ID NO: 2204223 - RNA, 22 nt, Human
ucaugguguaauaagacauaac

SEQ ID NO: 2204224 - RNA, 16 nt, Human
ucauguaaauuuugua

SEQ ID NO: 2204225 - RNA, 17 nt, Human
ucauguaaauuuuguau

SEQ ID NO: 2204226 - RNA, 16 nt, Human
ucauuaggugugacug

SEQ ID NO: 2204227 - RNA, 16 nt, Human
ucauuauuugcagaga

SEQ ID NO: 2204228 - RNA, 18 nt, Human
ucauguaagcugaaaaua

SEQ ID NO: 2204229 - RNA, 19 nt, Human
ucauguaagcugaaaauau

SEQ ID NO: 2204230 - RNA, 22 nt, Human
ucauuaggugugacugaauuuc

SEQ ID NO: 2204231 - RNA, 21 nt, Human
ucauuaggugugacugaauuu

SEQ ID NO: 2204232 - RNA, 18 nt, Human
ucauuaggugugacugaa

SEQ ID NO: 2204233 - RNA, 15 nt, Human
ucauguaauccucaa

SEQ ID NO: 2204234 - RNA, 14 nt, Human
uccacuuggucugu

SEQ ID NO: 2204235 - RNA, 17 nt, Human
uccaccugagcugccau

SEQ ID NO: 2204236 - RNA, 23 nt, Human
uccagaaaugucuaaaugcugaa

SEQ ID NO: 2204237 - RNA, 16 nt, Human
uccagaagccucuggc

SEQ ID NO: 2204238 - RNA, 20 nt, Human
uccagaagaauauucaggac

SEQ ID NO: 2204239 - RNA, 21 nt, Human
uccagaagaauauucaggacu

SEQ ID NO: 2204240 - RNA, 16 nt, Human
uccagaagaauauuca

SEQ ID NO: 2204241 - RNA, 17 nt, Human
uccagaagaauauucag

SEQ ID NO: 2204242 - RNA, 18 nt, Human
uccagaagaauauucagg

SEQ ID NO: 2204243 - RNA, 19 nt, Human
uccagaagaauauucagga

SEQ ID NO: 2204244 - RNA, 22 nt, Human
uccagaacucacuggggccuac

SEQ ID NO: 2204245 - RNA, 14 nt, Human
uccaccugagcugc

SEQ ID NO: 2204246 - RNA, 18 nt, Human
uccaccucuucacccccc

SEQ ID NO: 2204247 - RNA, 16 nt, Human
uccaccuccuucucug

SEQ ID NO: 2204248 - RNA, 13 nt, Human
uccaccugccagg

SEQ ID NO: 2204249 - RNA, 13 nt, Human
uccacuuggucug

SEQ ID NO: 2204250 - RNA, 12 nt, Human
uccacuuggucu

SEQ ID NO: 2204251 - RNA, 21 nt, Human
uccagaagggguuuggucugg

SEQ ID NO: 2204252 - RNA, 18 nt, Human
uccagaucugcagucacu

SEQ ID NO: 2204253 - RNA, 22 nt, Human
uccagaagaauauucaggacuu

SEQ ID NO: 2204254 - RNA, 23 nt, Human
uccagccaaagccuccuccagcc

SEQ ID NO: 2204255 - RNA, 14 nt, Human
uccagcaguuuuca

SEQ ID NO: 2204256 - RNA, 12 nt, Human
uccagcagggaa

SEQ ID NO: 2204257 - RNA, 19 nt, Human
uccagaagccucuggcuag

SEQ ID NO: 2204258 - RNA, 18 nt, Human
uccagaagccucuggcua

SEQ ID NO: 2204259 - RNA, 17 nt, Human
uccagaagccucuggcu

SEQ ID NO: 2204260 - RNA, 14 nt, Human
uccagauccuggaa

SEQ ID NO: 2204261 - RNA, 16 nt, Human
uccagauccuggaaau

SEQ ID NO: 2204262 - RNA, 17 nt, Human
uccagauccuggaaauc

SEQ ID NO: 2204263 - RNA, 18 nt, Human
uccaccucgacguuuaca

SEQ ID NO: 2204264 - RNA, 12 nt, Human
uccaccuccuuc

SEQ ID NO: 2204265 - RNA, 13 nt, Human
uccaccuccuucu

SEQ ID NO: 2204266 - RNA, 12 nt, Human
uccaccugccag

SEQ ID NO: 2204267 - RNA, 16 nt, Human
uccaccucagccuugg

SEQ ID NO: 2204268 - RNA, 14 nt, Human
uccaccucagccuu

SEQ ID NO: 2204269 - RNA, 13 nt, Human
uccaccucagccu

SEQ ID NO: 2204270 - RNA, 12 nt, Human
uccaccucagcc

SEQ ID NO: 2204271 - RNA, 11 nt, Human
uccaccucagc

SEQ ID NO: 2204272 - RNA, 16 nt, Human
uccaccucaccccacu

SEQ ID NO: 2204273 - RNA, 21 nt, Human
uccaccuaguggcuguccagu

SEQ ID NO: 2204274 - RNA, 14 nt, Human
uccaccucacccca

SEQ ID NO: 2204275 - RNA, 17 nt, Human
uccaccucagccuugga

SEQ ID NO: 2204276 - RNA, 13 nt, Human
uccaccuccaucu

SEQ ID NO: 2204277 - RNA, 14 nt, Human
uccaccuccaucuu

SEQ ID NO: 2204278 - RNA, 13 nt, Human
uccaccucccucc

SEQ ID NO: 2204279 - RNA, 20 nt, Human
uccacccuuggccugucuca

SEQ ID NO: 2204280 - RNA, 19 nt, Human
uccaccgcugccuaagugg

SEQ ID NO: 2204281 - RNA, 14 nt, Human
uccaccgcugccua

SEQ ID NO: 2204282 - RNA, 22 nt, Human
uccacccugucccccagcucug

SEQ ID NO: 2204283 - RNA, 13 nt, Human
uccaccgcugccu

SEQ ID NO: 2204284 - RNA, 15 nt, Human
uccaccgcugccuaa

SEQ ID NO: 2204285 - RNA, 12 nt, Human
uccaccucaccc

SEQ ID NO: 2204286 - RNA, 17 nt, Human
uccaccuaguggcuguc

SEQ ID NO: 2204287 - RNA, 20 nt, Human
uccaccuaguggcuguccag

SEQ ID NO: 2204288 - RNA, 14 nt, Human
uccaccuacaugag

SEQ ID NO: 2204289 - RNA, 19 nt, Human
uccacccuuggccugucuc

SEQ ID NO: 2204290 - RNA, 17 nt, Human
uccacccuuggccuguc

SEQ ID NO: 2204291 - RNA, 16 nt, Human
uccacccuuggccugu

SEQ ID NO: 2204292 - RNA, 15 nt, Human
uccacccuuggccug

SEQ ID NO: 2204293 - RNA, 14 nt, Human
uccacccuuggccu

SEQ ID NO: 2204294 - RNA, 13 nt, Human
uccacccuuggcc

SEQ ID NO: 2204295 - RNA, 17 nt, Human
uccacccugucccccag

SEQ ID NO: 2204296 - RNA, 18 nt, Human
uccacccugucccccagc

SEQ ID NO: 2204297 - RNA, 20 nt, Human
uccacccugucccccagcuc

SEQ ID NO: 2204298 - RNA, 21 nt, Human
uccacccugucccccagcucu

SEQ ID NO: 2204299 - RNA, 14 nt, Human
uccacaagagccca

SEQ ID NO: 2204300 - RNA, 16 nt, Human
uccacccuguccccca

SEQ ID NO: 2204301 - RNA, 21 nt, Human
uccacaagacagaagcugaag

SEQ ID NO: 2204302 - RNA, 21 nt, Human
uccacaaauuauuaaugaaaa

SEQ ID NO: 2204303 - RNA, 11 nt, Human
uccaagcaaag

SEQ ID NO: 2204304 - RNA, 20 nt, Human
uccaagcauuuagauguaua

SEQ ID NO: 2204305 - RNA, 14 nt, Human
uccacaacacacag

SEQ ID NO: 2204306 - RNA, 14 nt, Human
uccacaaauuauua

SEQ ID NO: 2204307 - RNA, 20 nt, Human
uccacaaauuauuaaugaaa

SEQ ID NO: 2204308 - RNA, 20 nt, Human
uccacaaaauaaccaauccu

SEQ ID NO: 2204309 - RNA, 12 nt, Human
uccacaaaauaa

SEQ ID NO: 2204310 - RNA, 22 nt, Human
uccaauuuucuggaauacauga

SEQ ID NO: 2204311 - RNA, 23 nt, Human
uccaaaggaagucuaggagcugg

SEQ ID NO: 2204312 - RNA, 17 nt, Human
uccaaagccaaugugaa

SEQ ID NO: 2204313 - RNA, 13 nt, Human
uccaaagcagggu

SEQ ID NO: 2204314 - RNA, 18 nt, Human
uccaaacuuggauuuuug

SEQ ID NO: 2204315 - RNA, 15 nt, Human
uccaaagcagacagc

SEQ ID NO: 2204316 - RNA, 14 nt, Human
uccaaagcagacag

SEQ ID NO: 2204317 - RNA, 19 nt, Human
uccaaaggaggcuggcagg

SEQ ID NO: 2204318 - RNA, 15 nt, Human
uccaaaggaggcugg

SEQ ID NO: 2204319 - RNA, 13 nt, Human
uccaaaggaggcu

SEQ ID NO: 2204320 - RNA, 20 nt, Human
uccaagaagcccaggaaagg

SEQ ID NO: 2204321 - RNA, 23 nt, Human
uccaaaggaaucuccaguuuuca

SEQ ID NO: 2204322 - RNA, 21 nt, Human
uccaaaggcauuuuauugcuu

SEQ ID NO: 2204323 - RNA, 21 nt, Human
uccaaaggccauggagagcug

SEQ ID NO: 2204324 - RNA, 22 nt, Human
uccaagaagcccaggaaaggcu

SEQ ID NO: 2204325 - RNA, 19 nt, Human
uccaagaaucuaucugcuu

SEQ ID NO: 2204326 - RNA, 12 nt, Human
uccaagaaugcu

SEQ ID NO: 2204327 - RNA, 13 nt, Human
uccaagaaugcug

SEQ ID NO: 2204328 - RNA, 14 nt, Human
uccaagaaugcuga

SEQ ID NO: 2204329 - RNA, 12 nt, Human
uccaagaaucua

SEQ ID NO: 2204330 - RNA, 18 nt, Human
uccaagaaucuaucugcu

SEQ ID NO: 2204331 - RNA, 18 nt, Human
uccaagacagaauaauga

SEQ ID NO: 2204332 - RNA, 18 nt, Human
uccaagacaguauacagu

SEQ ID NO: 2204333 - RNA, 17 nt, Human
uccaagacaugucuguu

SEQ ID NO: 2204334 - RNA, 15 nt, Human
uccaagaaugcugaa

SEQ ID NO: 2204335 - RNA, 16 nt, Human
uccaagaaugcugaaa

SEQ ID NO: 2204336 - RNA, 17 nt, Human
uccaagaaugcugaaac

SEQ ID NO: 2204337 - RNA, 15 nt, Human
uccaagacacugugg

SEQ ID NO: 2204338 - RNA, 17 nt, Human
uccaagacauugucaau

SEQ ID NO: 2204339 - RNA, 15 nt, Human
uccaagacauuguca

SEQ ID NO: 2204340 - RNA, 11 nt, Human
uccaagacauu

SEQ ID NO: 2204341 - RNA, 22 nt, Human
uccaagacaugucuguucuaca

SEQ ID NO: 2204342 - RNA, 20 nt, Human
uccaagacaugucuguucua

SEQ ID NO: 2204343 - RNA, 16 nt, Human
uccaagacauugucaa

SEQ ID NO: 2204344 - RNA, 19 nt, Human
uccaagaccuguugguucc

SEQ ID NO: 2204345 - RNA, 19 nt, Human
uccaagaccuucuccuuca

SEQ ID NO: 2204346 - RNA, 22 nt, Human
uccaagauauuuuaaaaucugu

SEQ ID NO: 2204347 - RNA, 18 nt, Human
uccaagauauuuuaaaau

SEQ ID NO: 2204348 - RNA, 16 nt, Human
uccaagagucugauga

SEQ ID NO: 2204349 - RNA, 17 nt, Human
uccaagagucugaugau

SEQ ID NO: 2204350 - RNA, 18 nt, Human
uccaagauaccuaaaaga

SEQ ID NO: 2204351 - RNA, 13 nt, Human
uccaagcaaaugu

SEQ ID NO: 2204352 - RNA, 17 nt, Human
uccaagcauuuagaugu

SEQ ID NO: 2204353 - RNA, 23 nt, Human
uccaagcauaccaacacgagcag

SEQ ID NO: 2204354 - RNA, 19 nt, Human
uccaaagcacauugaaaga

SEQ ID NO: 2204355 - RNA, 23 nt, Human
uccaaagaguagaauugcauuga

SEQ ID NO: 2204356 - RNA, 22 nt, Human
uccaaacuuggauuuuugacuc

SEQ ID NO: 2204357 - RNA, 22 nt, Human
uccaaagaguagaauugcauug

SEQ ID NO: 2204358 - RNA, 12 nt, Human
uccaaagaaaug

SEQ ID NO: 2204359 - RNA, 20 nt, Human
uccaaacugccuaagcccuc

SEQ ID NO: 2204360 - RNA, 23 nt, Human
uccaaaaguggccucuuugucua

SEQ ID NO: 2204361 - RNA, 19 nt, Human
uccaaacugaagcagccuc

SEQ ID NO: 2204362 - RNA, 23 nt, Human
uccaaacugacucuuaagaagac

SEQ ID NO: 2204363 - RNA, 19 nt, Human
uccaaacuaccuuccaguu

SEQ ID NO: 2204364 - RNA, 19 nt, Human
uccaaaaguggccucuuug

SEQ ID NO: 2204365 - RNA, 16 nt, Human
uccaaaagcuuuuuau

SEQ ID NO: 2204366 - RNA, 17 nt, Human
uccaaaauaaaacuuuu

SEQ ID NO: 2204367 - RNA, 16 nt, Human
uccaaaauaaaacuuu

SEQ ID NO: 2204368 - RNA, 13 nt, Human
uccaaaagcuuuu

SEQ ID NO: 2204369 - RNA, 22 nt, Human
uccaaaagauugcugaaauuuu

SEQ ID NO: 2204370 - RNA, 20 nt, Human
uccaaaagauugcugaaauu

SEQ ID NO: 2204371 - RNA, 19 nt, Human
uccaaaagauugcugaaau

SEQ ID NO: 2204372 - RNA, 14 nt, Human
ucauucagaaaaaa

SEQ ID NO: 2204373 - RNA, 23 nt, Human
ucauguaaauuuuguaugaaaaa

SEQ ID NO: 2204374 - RNA, 13 nt, Human
ucauucaggaaaa

SEQ ID NO: 2204375 - RNA, 12 nt, Human
ucauucaggaaa

SEQ ID NO: 2204376 - RNA, 13 nt, Human
ucauucagaaaaa

SEQ ID NO: 2204377 - RNA, 15 nt, Human
ucauucaugcuacug

SEQ ID NO: 2204378 - RNA, 15 nt, Human
ucauucauucuuagc

SEQ ID NO: 2204379 - RNA, 16 nt, Human
ucauucauuuauucau

SEQ ID NO: 2204380 - RNA, 16 nt, Human
uccaaaagauugcuga

SEQ ID NO: 2204381 - RNA, 13 nt, Human
ucauuucuugggc

SEQ ID NO: 2204382 - RNA, 14 nt, Human
ucauuucuuugagu

SEQ ID NO: 2204383 - RNA, 22 nt, Human
ucauuucugcaucagcugcuga

SEQ ID NO: 2204384 - RNA, 16 nt, Human
ucauuucugcaucagc

SEQ ID NO: 2204385 - RNA, 15 nt, Human
ucccauuccugaaga

SEQ ID NO: 2204386 - RNA, 17 nt, Human
ucccauuccugaagaac

SEQ ID NO: 2204387 - RNA, 14 nt, Human
ucccauuccugaag

SEQ ID NO: 2204388 - RNA, 13 nt, Human
ucccauuccugaa

SEQ ID NO: 2204389 - RNA, 21 nt, Human
ucccauguagcccccuggccu

SEQ ID NO: 2204390 - RNA, 15 nt, Human
ucccauguagccccc

SEQ ID NO: 2204391 - RNA, 13 nt, Human
ucccauguagccc

SEQ ID NO: 2204392 - RNA, 17 nt, Human
ucccauguaacagaaag

SEQ ID NO: 2204393 - RNA, 18 nt, Human
ucccauguaacagaaagg

SEQ ID NO: 2204394 - RNA, 17 nt, Human
ucccauucacucuucca

SEQ ID NO: 2204395 - RNA, 19 nt, Human
ucccauguaacagaaaggg

SEQ ID NO: 2204396 - RNA, 19 nt, Human
ucccauucacucuuccaga

SEQ ID NO: 2204397 - RNA, 16 nt, Human
uccccagaccugagcu

SEQ ID NO: 2204398 - RNA, 22 nt, Human
uccccagacuccaccaagccug

SEQ ID NO: 2204399 - RNA, 17 nt, Human
uccccagaaaggagacu

SEQ ID NO: 2204400 - RNA, 21 nt, Human
uccccacuuguccgcugggug

SEQ ID NO: 2204401 - RNA, 13 nt, Human
uccccagaccuga

SEQ ID NO: 2204402 - RNA, 13 nt, Human
ucccauugcccug

SEQ ID NO: 2204403 - RNA, 15 nt, Human
ucccauugcccuggu

SEQ ID NO: 2204404 - RNA, 14 nt, Human
ucccauugcccugg

SEQ ID NO: 2204405 - RNA, 16 nt, Human
ucccauugucccucug

SEQ ID NO: 2204406 - RNA, 13 nt, Human
ucccauugucccu

SEQ ID NO: 2204407 - RNA, 22 nt, Human
uccccacuugagaauuacccuu

SEQ ID NO: 2204408 - RNA, 19 nt, Human
uccccacuuguccgcuggg

SEQ ID NO: 2204409 - RNA, 21 nt, Human
ucccaggcucucaacagggga

SEQ ID NO: 2204410 - RNA, 22 nt, Human
ucccaggaugagcaucccagga

SEQ ID NO: 2204411 - RNA, 16 nt, Human
ucccaucuccacuguu

SEQ ID NO: 2204412 - RNA, 13 nt, Human
ucccaucugcacc

SEQ ID NO: 2204413 - RNA, 14 nt, Human
ucccaucucuuccu

SEQ ID NO: 2204414 - RNA, 19 nt, Human
ucccaucugcaccccuucu

SEQ ID NO: 2204415 - RNA, 23 nt, Human
ucccaucucacacaugagcauca

SEQ ID NO: 2204416 - RNA, 16 nt, Human
ucccaggcugagccuc

SEQ ID NO: 2204417 - RNA, 20 nt, Human
ucccaucucacacaugagca

SEQ ID NO: 2204418 - RNA, 12 nt, Human
ucccaugcccug

SEQ ID NO: 2204419 - RNA, 14 nt, Human
ucccauggacacuc

SEQ ID NO: 2204420 - RNA, 15 nt, Human
ucccauggacacucc

SEQ ID NO: 2204421 - RNA, 20 nt, Human
ucccauggacacuccagugc

SEQ ID NO: 2204422 - RNA, 19 nt, Human
ucccaucugggaguccccu

SEQ ID NO: 2204423 - RNA, 23 nt, Human
ucccaucugggaguccccuuuuc

SEQ ID NO: 2204424 - RNA, 13 nt, Human
ucccaucugggag

SEQ ID NO: 2204425 - RNA, 14 nt, Human
ucccaucugggagu

SEQ ID NO: 2204426 - RNA, 17 nt, Human
ucccaucugggaguccc

SEQ ID NO: 2204427 - RNA, 15 nt, Human
ucccauguaacagaa

SEQ ID NO: 2204428 - RNA, 16 nt, Human
ucccauguaacagaaa

SEQ ID NO: 2204429 - RNA, 14 nt, Human
ucccauggggaggg

SEQ ID NO: 2204430 - RNA, 21 nt, Human
ucccauggagccccagccccc

SEQ ID NO: 2204431 - RNA, 18 nt, Human
ucccauggcuuaaugcuu

SEQ ID NO: 2204432 - RNA, 21 nt, Human
ucccauggacacuccagugcc

SEQ ID NO: 2204433 - RNA, 22 nt, Human
ucccauggacacuccagugcca

SEQ ID NO: 2204434 - RNA, 13 nt, Human
ucccauggagccc

SEQ ID NO: 2204435 - RNA, 15 nt, Human
ucccauggagcccca

SEQ ID NO: 2204436 - RNA, 16 nt, Human
ucccauggagccccag

SEQ ID NO: 2204437 - RNA, 17 nt, Human
ucccauggagccccagc

SEQ ID NO: 2204438 - RNA, 18 nt, Human
ucccauggagccccagcc

SEQ ID NO: 2204439 - RNA, 19 nt, Human
ucccauggagccccagccc

SEQ ID NO: 2204440 - RNA, 16 nt, Human
ucccaggaugagcauc

SEQ ID NO: 2204441 - RNA, 17 nt, Human
ucccaggagcugcccag

SEQ ID NO: 2204442 - RNA, 18 nt, Human
ucccaggagcugcccaga

SEQ ID NO: 2204443 - RNA, 23 nt, Human
ucccaggagcugcccagaguugc

SEQ ID NO: 2204444 - RNA, 22 nt, Human
ucccaggaguggaggaggccug

SEQ ID NO: 2204445 - RNA, 22 nt, Human
ucccaggagacaguucaagaaa

SEQ ID NO: 2204446 - RNA, 16 nt, Human
ucccaggagacaguuc

SEQ ID NO: 2204447 - RNA, 20 nt, Human
ucccaggcauuccccaggag

SEQ ID NO: 2204448 - RNA, 21 nt, Human
ucccaggcauuccccaggagg

SEQ ID NO: 2204449 - RNA, 20 nt, Human
ucccaggcgccccuuccccc

SEQ ID NO: 2204450 - RNA, 18 nt, Human
ucccaggcgccccuuccc

SEQ ID NO: 2204451 - RNA, 21 nt, Human
ucccaggcgccccuucccccu

SEQ ID NO: 2204452 - RNA, 15 nt, Human
ucccaggcugagccu

SEQ ID NO: 2204453 - RNA, 22 nt, Human
ucccaggcauuccccaggaggc

SEQ ID NO: 2204454 - RNA, 24 nt, Human
ucccaggaugagcaucccaggauc

SEQ ID NO: 2204455 - RNA, 13 nt, Human
ucccaccucagcc

SEQ ID NO: 2204456 - RNA, 18 nt, Human
ucccaaggaaagccccag

SEQ ID NO: 2204457 - RNA, 22 nt, Human
ucccaagcugggccccagccca

SEQ ID NO: 2204458 - RNA, 20 nt, Human
ucccaaggcugcgucuggag

SEQ ID NO: 2204459 - RNA, 22 nt, Human
ucccaaggcucugagcaaaugu

SEQ ID NO: 2204460 - RNA, 18 nt, Human
ucccaagggauggugccc

SEQ ID NO: 2204461 - RNA, 21 nt, Human
ucccaagggauggugcccugu

SEQ ID NO: 2204462 - RNA, 13 nt, Human
ucccaggacccug

SEQ ID NO: 2204463 - RNA, 17 nt, Human
ucccaccuagcagcacc

SEQ ID NO: 2204464 - RNA, 16 nt, Human
ucccaccuagcagcac

SEQ ID NO: 2204465 - RNA, 16 nt, Human
ucccaggacccugaag

SEQ ID NO: 2204466 - RNA, 14 nt, Human
ucccaggacccuga

SEQ ID NO: 2204467 - RNA, 19 nt, Human
ucccaggacccugaagggg

SEQ ID NO: 2204468 - RNA, 15 nt, Human
ucccaggagacaguu

SEQ ID NO: 2204469 - RNA, 14 nt, Human
ucccaccucagccu

SEQ ID NO: 2204470 - RNA, 15 nt, Human
ucccaccucagccuc

SEQ ID NO: 2204471 - RNA, 16 nt, Human
ucccaagcucagaggc

SEQ ID NO: 2204472 - RNA, 22 nt, Human
ucccaaauuugauugauuugaa

SEQ ID NO: 2204473 - RNA, 20 nt, Human
ucccaaauuugauugauuug

SEQ ID NO: 2204474 - RNA, 16 nt, Human
ucccaacucaccccag

SEQ ID NO: 2204475 - RNA, 14 nt, Human
ucccaacucacccc

SEQ ID NO: 2204476 - RNA, 15 nt, Human
ucccaacucacccca

SEQ ID NO: 2204477 - RNA, 17 nt, Human
uccauguagcaggacug

SEQ ID NO: 2204478 - RNA, 16 nt, Human
ucccaaauuucauacc

SEQ ID NO: 2204479 - RNA, 13 nt, Human
ucccaacucaccc

SEQ ID NO: 2204480 - RNA, 14 nt, Human
ucccaaaugagcca

SEQ ID NO: 2204481 - RNA, 19 nt, Human
ucccaaauuugauugauuu

SEQ ID NO: 2204482 - RNA, 17 nt, Human
ucccaaauuugauugau

SEQ ID NO: 2204483 - RNA, 12 nt, Human
ucccaagcuggg

SEQ ID NO: 2204484 - RNA, 13 nt, Human
ucccaagcugggc

SEQ ID NO: 2204485 - RNA, 14 nt, Human
ucccaagcugggcc

SEQ ID NO: 2204486 - RNA, 15 nt, Human
ucccaagcugggccc

SEQ ID NO: 2204487 - RNA, 16 nt, Human
ucccaagcugggcccc

SEQ ID NO: 2204488 - RNA, 17 nt, Human
ucccaagcucugcuccu

SEQ ID NO: 2204489 - RNA, 13 nt, Human
ucccaaggaaagc

SEQ ID NO: 2204490 - RNA, 12 nt, Human
ucccaaggaaag

SEQ ID NO: 2204491 - RNA, 17 nt, Human
ucccaagcugggcccca

SEQ ID NO: 2204492 - RNA, 18 nt, Human
ucccaagcugggccccag

SEQ ID NO: 2204493 - RNA, 19 nt, Human
ucccaagcugggccccagc

SEQ ID NO: 2204494 - RNA, 21 nt, Human
ucccaagcugggccccagccc

SEQ ID NO: 2204495 - RNA, 22 nt, Human
ucccaaggaaagccccagcacu

SEQ ID NO: 2204496 - RNA, 18 nt, Human
ucccaaggcucugagcaa

SEQ ID NO: 2204497 - RNA, 12 nt, Human
ucccaagcucug

SEQ ID NO: 2204498 - RNA, 13 nt, Human
ucccaagcucugc

SEQ ID NO: 2204499 - RNA, 14 nt, Human
ucccaagcucugcu

SEQ ID NO: 2204500 - RNA, 15 nt, Human
ucccaagcucugcuc

SEQ ID NO: 2204501 - RNA, 20 nt, Human
uccauggcccugcaaaagga

SEQ ID NO: 2204502 - RNA, 14 nt, Human
uccauggauuuugg

SEQ ID NO: 2204503 - RNA, 18 nt, Human
uccaucccuacccccuaa

SEQ ID NO: 2204504 - RNA, 13 nt, Human
uccauggacuuug

SEQ ID NO: 2204505 - RNA, 14 nt, Human
uccauggacuuugu

SEQ ID NO: 2204506 - RNA, 15 nt, Human
uccauggacuuuguu

SEQ ID NO: 2204507 - RNA, 21 nt, Human
ucccaaagugcugggauuaca

SEQ ID NO: 2204508 - RNA, 15 nt, Human
uccauguagcaggac

SEQ ID NO: 2204509 - RNA, 14 nt, Human
uccauguagcagga

SEQ ID NO: 2204510 - RNA, 21 nt, Human
uccauguacuguaguuuuucu

SEQ ID NO: 2204511 - RNA, 20 nt, Human
uccauguacuguaguuuuuc

SEQ ID NO: 2204512 - RNA, 16 nt, Human
uccauguacuguaguu

SEQ ID NO: 2204513 - RNA, 14 nt, Human
uccauguacuguag

SEQ ID NO: 2204514 - RNA, 17 nt, Human
uccaugggggcagggca

SEQ ID NO: 2204515 - RNA, 15 nt, Human
uccaugggggcaggg

SEQ ID NO: 2204516 - RNA, 16 nt, Human
uccauggggaagggau

SEQ ID NO: 2204517 - RNA, 15 nt, Human
uccaugggguaggag

SEQ ID NO: 2204518 - RNA, 13 nt, Human
uccauguacugua

SEQ ID NO: 2204519 - RNA, 12 nt, Human
uccagcuccaac

SEQ ID NO: 2204520 - RNA, 18 nt, Human
uccagcuccaaccugcaa

SEQ ID NO: 2204521 - RNA, 16 nt, Human
uccagcuccaaccugc

SEQ ID NO: 2204522 - RNA, 19 nt, Human
uccagcuccaaccugcaaa

SEQ ID NO: 2204523 - RNA, 22 nt, Human
uccagcuccaagaccuguuggu

SEQ ID NO: 2204524 - RNA, 18 nt, Human
uccagcuccucauccagg

SEQ ID NO: 2204525 - RNA, 23 nt, Human
uccagcucaccagccccagugcc

SEQ ID NO: 2204526 - RNA, 20 nt, Human
uccagcucaccccccacacu

SEQ ID NO: 2204527 - RNA, 21 nt, Human
uccagcucaccccccacacuc

SEQ ID NO: 2204528 - RNA, 14 nt, Human
uccaucccuacccc

SEQ ID NO: 2204529 - RNA, 14 nt, Human
uccaucccaucauc

SEQ ID NO: 2204530 - RNA, 20 nt, Human
uccaucccgaaaaucucucg

SEQ ID NO: 2204531 - RNA, 15 nt, Human
uccaucccaggacac

SEQ ID NO: 2204532 - RNA, 21 nt, Human
uccaucccaggacaccacacc

SEQ ID NO: 2204533 - RNA, 22 nt, Human
uccaucccaggacaccacaccc

SEQ ID NO: 2204534 - RNA, 12 nt, Human
uccaucccagag

SEQ ID NO: 2204535 - RNA, 13 nt, Human
uccaucccagagg

SEQ ID NO: 2204536 - RNA, 16 nt, Human
uccauccaggccauuc

SEQ ID NO: 2204537 - RNA, 16 nt, Human
uccaucauguccccaa

SEQ ID NO: 2204538 - RNA, 15 nt, Human
uccauccacauggga

SEQ ID NO: 2204539 - RNA, 21 nt, Human
uccauccaaggccagguucuc

SEQ ID NO: 2204540 - RNA, 13 nt, Human
uccauccaaggcc

SEQ ID NO: 2204541 - RNA, 23 nt, Human
uccagcuccucauccagggcucu

SEQ ID NO: 2204542 - RNA, 15 nt, Human
uccaucaugucccca

SEQ ID NO: 2204543 - RNA, 24 nt, Human
uccccugcccugguccagggaagc

SEQ ID NO: 2204544 - RNA, 17 nt, Human
uccccugcccuggucca

SEQ ID NO: 2204545 - RNA, 15 nt, Human
uccccugcugcaggg

SEQ ID NO: 2204546 - RNA, 17 nt, Human
uccccugcugcaggggc

SEQ ID NO: 2204547 - RNA, 18 nt, Human
uccccugcugcaggggcu

SEQ ID NO: 2204548 - RNA, 21 nt, Human
uccccugcugcaggggcucug

SEQ ID NO: 2204549 - RNA, 23 nt, Human
uccccugcugcaggggcucugga

SEQ ID NO: 2204550 - RNA, 22 nt, Human
uccccugccccuuuacggacac

SEQ ID NO: 2204551 - RNA, 15 nt, Human
uccccugcccugcug

SEQ ID NO: 2204552 - RNA, 12 nt, Human
uccccugcccug

SEQ ID NO: 2204553 - RNA, 15 nt, Human
uccccugcccugguc

SEQ ID NO: 2204554 - RNA, 13 nt, Human
uccccugcccugg

SEQ ID NO: 2204555 - RNA, 23 nt, Human
uccccugcccugcugccgccucc

SEQ ID NO: 2204556 - RNA, 16 nt, Human
uccccugcccugcugc

SEQ ID NO: 2204557 - RNA, 14 nt, Human
uccccugcugggug

SEQ ID NO: 2204558 - RNA, 15 nt, Human
uccccugcugggugu

SEQ ID NO: 2204559 - RNA, 20 nt, Human
uccccugcuggguguggcgc

SEQ ID NO: 2204560 - RNA, 21 nt, Human
uccccugcuggguguggcgca

SEQ ID NO: 2204561 - RNA, 22 nt, Human
uccccuguagagugggagcuga

SEQ ID NO: 2204562 - RNA, 23 nt, Human
uccccuguccccgcacugggcuu

SEQ ID NO: 2204563 - RNA, 15 nt, Human
uccccuguucacucu

SEQ ID NO: 2204564 - RNA, 12 nt, Human
uccccugugggg

SEQ ID NO: 2204565 - RNA, 20 nt, Human
uccccuguggggaucucagg

SEQ ID NO: 2204566 - RNA, 14 nt, Human
uccccugugcaguc

SEQ ID NO: 2204567 - RNA, 17 nt, Human
uccccuggacugggagg

SEQ ID NO: 2204568 - RNA, 15 nt, Human
uccccugggcccuga

SEQ ID NO: 2204569 - RNA, 19 nt, Human
uccccuggggacagcaagg

SEQ ID NO: 2204570 - RNA, 19 nt, Human
uccccuguagagugggagc

SEQ ID NO: 2204571 - RNA, 15 nt, Human
uccccuggacuggga

SEQ ID NO: 2204572 - RNA, 16 nt, Human
uccccuggacugggag

SEQ ID NO: 2204573 - RNA, 18 nt, Human
uccccuggaacugucucu

SEQ ID NO: 2204574 - RNA, 20 nt, Human
uccccuggaacugucucuca

SEQ ID NO: 2204575 - RNA, 24 nt, Human
uccccugcuggguguggcgcagca

SEQ ID NO: 2204576 - RNA, 13 nt, Human
uccccuucacucc

SEQ ID NO: 2204577 - RNA, 19 nt, Human
uccccuuccaucccagagg

SEQ ID NO: 2204578 - RNA, 18 nt, Human
uccccuuccacugagggc

SEQ ID NO: 2204579 - RNA, 17 nt, Human
uccccuuccacugaggg

SEQ ID NO: 2204580 - RNA, 13 nt, Human
uccccuuccacug

SEQ ID NO: 2204581 - RNA, 13 nt, Human
uccccuucccugc

SEQ ID NO: 2204582 - RNA, 15 nt, Human
uccccuucccugcaa

SEQ ID NO: 2204583 - RNA, 22 nt, Human
uccccuuccuaauuccacagcu

SEQ ID NO: 2204584 - RNA, 21 nt, Human
uccccuuccuaauuccacagc

SEQ ID NO: 2204585 - RNA, 20 nt, Human
ucccuaagccaagggccucu

SEQ ID NO: 2204586 - RNA, 15 nt, Human
ucccuaagccaaggg

SEQ ID NO: 2204587 - RNA, 18 nt, Human
ucccuaaagaaaaaaaau

SEQ ID NO: 2204588 - RNA, 15 nt, Human
uccccuucucaucac

SEQ ID NO: 2204589 - RNA, 16 nt, Human
uccccuuccucacugc

SEQ ID NO: 2204590 - RNA, 19 nt, Human
uccccuucucaucacuccc

SEQ ID NO: 2204591 - RNA, 13 nt, Human
ucccuaaacugua

SEQ ID NO: 2204592 - RNA, 11 nt, Human
ucccuaauaaa

SEQ ID NO: 2204593 - RNA, 12 nt, Human
ucccuaauaaag

SEQ ID NO: 2204594 - RNA, 15 nt, Human
ucccucccucuuucc

SEQ ID NO: 2204595 - RNA, 15 nt, Human
ucccuacuuccugug

SEQ ID NO: 2204596 - RNA, 16 nt, Human
ucccuacuuccuguga

SEQ ID NO: 2204597 - RNA, 17 nt, Human
ucccucccucuuucccu

SEQ ID NO: 2204598 - RNA, 17 nt, Human
ucccuaccucaggcagg

SEQ ID NO: 2204599 - RNA, 15 nt, Human
ucccuaccucaggca

SEQ ID NO: 2204600 - RNA, 15 nt, Human
ucccuacuguaauuu

SEQ ID NO: 2204601 - RNA, 13 nt, Human
ucccuaccucagg

SEQ ID NO: 2204602 - RNA, 13 nt, Human
ucccuaauaaagc

SEQ ID NO: 2204603 - RNA, 20 nt, Human
ucccccucccccacugccau

SEQ ID NO: 2204604 - RNA, 13 nt, Human
ucccccucuggcu

SEQ ID NO: 2204605 - RNA, 12 nt, Human
ucccccucuguc

SEQ ID NO: 2204606 - RNA, 18 nt, Human
ucccccucccccuucucc

SEQ ID NO: 2204607 - RNA, 20 nt, Human
ucccccucccccuucuccca

SEQ ID NO: 2204608 - RNA, 18 nt, Human
ucccccugccagugccuu

SEQ ID NO: 2204609 - RNA, 17 nt, Human
ucccccugccagugccu

SEQ ID NO: 2204610 - RNA, 16 nt, Human
ucccccugccagugcc

SEQ ID NO: 2204611 - RNA, 15 nt, Human
ucccccucuguccag

SEQ ID NO: 2204612 - RNA, 13 nt, Human
ucccccugcccca

SEQ ID NO: 2204613 - RNA, 12 nt, Human
ucccccugcccu

SEQ ID NO: 2204614 - RNA, 15 nt, Human
ucccccugcccucgu

SEQ ID NO: 2204615 - RNA, 20 nt, Human
ucccccugcccucguggcca

SEQ ID NO: 2204616 - RNA, 22 nt, Human
ucccccugcccucguggccagc

SEQ ID NO: 2204617 - RNA, 19 nt, Human
ucccccgccgcuuuucucc

SEQ ID NO: 2204618 - RNA, 22 nt, Human
ucccccgggaggggcccgcuug

SEQ ID NO: 2204619 - RNA, 16 nt, Human
ucccccuccaccugcu

SEQ ID NO: 2204620 - RNA, 17 nt, Human
ucccccucccagggcca

SEQ ID NO: 2204621 - RNA, 19 nt, Human
ucccccucccagggccagg

SEQ ID NO: 2204622 - RNA, 18 nt, Human
ucccccucccagggccag

SEQ ID NO: 2204623 - RNA, 20 nt, Human
ucccccgcaaugugccccca

SEQ ID NO: 2204624 - RNA, 21 nt, Human
ucccccgcaaugugcccccag

SEQ ID NO: 2204625 - RNA, 14 nt, Human
uccccccucaccag

SEQ ID NO: 2204626 - RNA, 14 nt, Human
ucccccgccacucc

SEQ ID NO: 2204627 - RNA, 19 nt, Human
ucccccauccuccccuucc

SEQ ID NO: 2204628 - RNA, 12 nt, Human
uccccccucacc

SEQ ID NO: 2204629 - RNA, 17 nt, Human
ucccccaucucuucugg

SEQ ID NO: 2204630 - RNA, 11 nt, Human
uccccagagaa

SEQ ID NO: 2204631 - RNA, 10 nt, Human
uccccagaga

SEQ ID NO: 2204632 - RNA, 12 nt, Human
uccccagccucu

SEQ ID NO: 2204633 - RNA, 14 nt, Human
uccccagcuguuua

SEQ ID NO: 2204634 - RNA, 22 nt, Human
uccccagcucaccccuggagga

SEQ ID NO: 2204635 - RNA, 23 nt, Human
uccccagccuuugaucagguggg

SEQ ID NO: 2204636 - RNA, 17 nt, Human
uccccagcucaccccug

SEQ ID NO: 2204637 - RNA, 22 nt, Human
uccccagcgucccagucucugg

SEQ ID NO: 2204638 - RNA, 15 nt, Human
uccccagcuguuuau

SEQ ID NO: 2204639 - RNA, 15 nt, Human
ucccccagcccugug

SEQ ID NO: 2204640 - RNA, 14 nt, Human
ucccccagcccugu

SEQ ID NO: 2204641 - RNA, 13 nt, Human
ucccccagcccug

SEQ ID NO: 2204642 - RNA, 12 nt, Human
ucccccagcccu

SEQ ID NO: 2204643 - RNA, 13 nt, Human
uccccaggaggcc

SEQ ID NO: 2204644 - RNA, 21 nt, Human
ucccccauccuccccuucccu

SEQ ID NO: 2204645 - RNA, 18 nt, Human
ucccccauccuccccuuc

SEQ ID NO: 2204646 - RNA, 17 nt, Human
ucccccauccuccccuu

SEQ ID NO: 2204647 - RNA, 15 nt, Human
ucccccauagccacc

SEQ ID NO: 2204648 - RNA, 14 nt, Human
ucccccauagccac

SEQ ID NO: 2204649 - RNA, 17 nt, Human
ucccccagcccugugga

SEQ ID NO: 2204650 - RNA, 16 nt, Human
ucccccagcccugugg

SEQ ID NO: 2204651 - RNA, 12 nt, Human
ucccccagccuc

SEQ ID NO: 2204652 - RNA, 18 nt, Human
ucccccagcucuggugag

SEQ ID NO: 2204653 - RNA, 12 nt, Human
ucccccauagcc

SEQ ID NO: 2204654 - RNA, 13 nt, Human
uccccgccuguuc

SEQ ID NO: 2204655 - RNA, 14 nt, Human
uccccgccuguucc

SEQ ID NO: 2204656 - RNA, 15 nt, Human
uccccugccagggca

SEQ ID NO: 2204657 - RNA, 14 nt, Human
uccccugccagggc

SEQ ID NO: 2204658 - RNA, 12 nt, Human
uccccugccagg

SEQ ID NO: 2204659 - RNA, 19 nt, Human
uccccugccaccaggccac

SEQ ID NO: 2204660 - RNA, 13 nt, Human
uccccugccacca

SEQ ID NO: 2204661 - RNA, 14 nt, Human
uccccugccaccag

SEQ ID NO: 2204662 - RNA, 16 nt, Human
uccccugccaccaggc

SEQ ID NO: 2204663 - RNA, 17 nt, Human
uccccugccaccaggcc

SEQ ID NO: 2204664 - RNA, 13 nt, Human
uccccugccauuu

SEQ ID NO: 2204665 - RNA, 20 nt, Human
uccccugccagggcagggcc

SEQ ID NO: 2204666 - RNA, 23 nt, Human
uccccugcccccagaccuuuuau

SEQ ID NO: 2204667 - RNA, 15 nt, Human
uccccugcccccagg

SEQ ID NO: 2204668 - RNA, 13 nt, Human
uccccugccccca

SEQ ID NO: 2204669 - RNA, 14 nt, Human
uccccugcccccag

SEQ ID NO: 2204670 - RNA, 20 nt, Human
uccccugcccccaggacugg

SEQ ID NO: 2204671 - RNA, 22 nt, Human
uccccugcccccaggacugggc

SEQ ID NO: 2204672 - RNA, 16 nt, Human
uccccugcccccagga

SEQ ID NO: 2204673 - RNA, 17 nt, Human
uccccugcccccaggac

SEQ ID NO: 2204674 - RNA, 18 nt, Human
uccccugcccccaggacu

SEQ ID NO: 2204675 - RNA, 19 nt, Human
uccccugcccccaggacug

SEQ ID NO: 2204676 - RNA, 20 nt, Human
uccccgcacugggcuugggg

SEQ ID NO: 2204677 - RNA, 20 nt, Human
uccccgagggaugaugccac

SEQ ID NO: 2204678 - RNA, 24 nt, Human
uccccgaaacaggcuacucuccuc

SEQ ID NO: 2204679 - RNA, 19 nt, Human
uccccgaaggugcuggagg

SEQ ID NO: 2204680 - RNA, 21 nt, Human
uccccgagggaugaugccaca

SEQ ID NO: 2204681 - RNA, 22 nt, Human
uccccgagggaugaugccacac

SEQ ID NO: 2204682 - RNA, 18 nt, Human
uccccgaguuuccccaga

SEQ ID NO: 2204683 - RNA, 20 nt, Human
uccccgcagugugcacuaag

SEQ ID NO: 2204684 - RNA, 19 nt, Human
uccccgcagugugcacuaa

SEQ ID NO: 2204685 - RNA, 21 nt, Human
uccccgcaccccccaagcugu

SEQ ID NO: 2204686 - RNA, 14 nt, Human
uccccgcacccccc

SEQ ID NO: 2204687 - RNA, 22 nt, Human
uccccgcagugugcacuaaggg

SEQ ID NO: 2204688 - RNA, 21 nt, Human
uccccgcagugugcacuaagg

SEQ ID NO: 2204689 - RNA, 13 nt, Human
uccccgcccuuuu

SEQ ID NO: 2204690 - RNA, 15 nt, Human
uccccgcccuuuuuu

SEQ ID NO: 2204691 - RNA, 19 nt, Human
ucccccuuuucugcauuuu

SEQ ID NO: 2204692 - RNA, 17 nt, Human
ucccccuugccacccca

SEQ ID NO: 2204693 - RNA, 23 nt, Human
ucccccuugccaccccacccucc

SEQ ID NO: 2204694 - RNA, 10 nt, Human
ucccccuucu

SEQ ID NO: 2204695 - RNA, 12 nt, Human
ucccccuucucc

SEQ ID NO: 2204696 - RNA, 13 nt, Human
ucccccuucuccc

SEQ ID NO: 2204697 - RNA, 15 nt, Human
ucccccuucucccac

SEQ ID NO: 2204698 - RNA, 12 nt, Human
ucccccuugcca

SEQ ID NO: 2204699 - RNA, 13 nt, Human
ucccccuugccac

SEQ ID NO: 2204700 - RNA, 14 nt, Human
ucccccuugccacc

SEQ ID NO: 2204701 - RNA, 16 nt, Human
ucccccuugccacccc

SEQ ID NO: 2204702 - RNA, 21 nt, Human
ucccccuuccauggacuuugu

SEQ ID NO: 2204703 - RNA, 19 nt, Human
ucccccugcuuccaccuca

SEQ ID NO: 2204704 - RNA, 23 nt, Human
ucccccugcccucguggccagcc

SEQ ID NO: 2204705 - RNA, 17 nt, Human
ucccccugcuuccaccu

SEQ ID NO: 2204706 - RNA, 21 nt, Human
ucccccuggccaccacccccc

SEQ ID NO: 2204707 - RNA, 23 nt, Human
ucccccuggccaccaccccccac

SEQ ID NO: 2204708 - RNA, 23 nt, Human
ucagagugcaagccccugcucca

SEQ ID NO: 2204709 - RNA, 17 nt, Human
ucagaguggaaugcuuc

SEQ ID NO: 2204710 - RNA, 22 nt, Human
ucagaguugaugguuguacaua

SEQ ID NO: 2204711 - RNA, 15 nt, Human
ucagcaaacucuuuu

SEQ ID NO: 2204712 - RNA, 13 nt, Human
ucagauaacuguu

SEQ ID NO: 2204713 - RNA, 21 nt, Human
ucagaguugcugcaaaccuga

SEQ ID NO: 2204714 - RNA, 15 nt, Human
ucagauaacuguuau

SEQ ID NO: 2204715 - RNA, 16 nt, Human
ucagaguccaggcccc

SEQ ID NO: 2204716 - RNA, 14 nt, Human
ucagaguccaggcc

SEQ ID NO: 2204717 - RNA, 14 nt, Human
ucagagggaggaau

SEQ ID NO: 2204718 - RNA, 17 nt, Human
ucagaguccaggcccca

SEQ ID NO: 2204719 - RNA, 21 nt, Human
ucagagggaaaguaaauauuu

SEQ ID NO: 2204720 - RNA, 16 nt, Human
ucagaggcgcacugug

SEQ ID NO: 2204721 - RNA, 13 nt, Human
ucagaguccaggc

SEQ ID NO: 2204722 - RNA, 15 nt, Human
ucagagcugggaggg

SEQ ID NO: 2204723 - RNA, 14 nt, Human
ucagaggauggcca

SEQ ID NO: 2204724 - RNA, 18 nt, Human
ucagaggauggccagugu

SEQ ID NO: 2204725 - RNA, 19 nt, Human
ucagaggauggccaguguc

SEQ ID NO: 2204726 - RNA, 18 nt, Human
ucagaggcacaaaagggu

SEQ ID NO: 2204727 - RNA, 20 nt, Human
ucagaggauggccagugucu

SEQ ID NO: 2204728 - RNA, 22 nt, Human
ucagaggcccucgcugccagcu

SEQ ID NO: 2204729 - RNA, 15 nt, Human
ucagaggccuauaau

SEQ ID NO: 2204730 - RNA, 20 nt, Human
ucagaggccuauaaugaagc

SEQ ID NO: 2204731 - RNA, 21 nt, Human
ucagaggcccucgcugccagc

SEQ ID NO: 2204732 - RNA, 18 nt, Human
ucagaggcccucgcugcc

SEQ ID NO: 2204733 - RNA, 18 nt, Human
ucagcacgauuucuguuu

SEQ ID NO: 2204734 - RNA, 23 nt, Human
ucagcaaauuaauuggcagcaga

SEQ ID NO: 2204735 - RNA, 21 nt, Human
ucagcaaauuaauuggcagca

SEQ ID NO: 2204736 - RNA, 16 nt, Human
ucagcaacucgcuuua

SEQ ID NO: 2204737 - RNA, 23 nt, Human
ucagcacuugggggaucuguugu

SEQ ID NO: 2204738 - RNA, 14 nt, Human
ucagcacugucccu

SEQ ID NO: 2204739 - RNA, 21 nt, Human
ucagcacugucccuugccuca

SEQ ID NO: 2204740 - RNA, 20 nt, Human
ucagcacugauuucacaaca

SEQ ID NO: 2204741 - RNA, 12 nt, Human
ucagcacugucc

SEQ ID NO: 2204742 - RNA, 13 nt, Human
ucagcacuguccc

SEQ ID NO: 2204743 - RNA, 19 nt, Human
ucagcacgauuucuguuua

SEQ ID NO: 2204744 - RNA, 13 nt, Human
ucagcacaaggcc

SEQ ID NO: 2204745 - RNA, 17 nt, Human
ucagcacugauuucaca

SEQ ID NO: 2204746 - RNA, 14 nt, Human
ucagaccagcucuu

SEQ ID NO: 2204747 - RNA, 14 nt, Human
ucagaccacggcuc

SEQ ID NO: 2204748 - RNA, 20 nt, Human
ucagacauguuuuccgugaa

SEQ ID NO: 2204749 - RNA, 14 nt, Human
ucagacuagugaca

SEQ ID NO: 2204750 - RNA, 19 nt, Human
ucagacucccauuccugaa

SEQ ID NO: 2204751 - RNA, 22 nt, Human
ucagacucccauuccugaagaa

SEQ ID NO: 2204752 - RNA, 21 nt, Human
ucagacucccauuccugaaga

SEQ ID NO: 2204753 - RNA, 22 nt, Human
ucagacauagaauuaacacaug

SEQ ID NO: 2204754 - RNA, 15 nt, Human
ucagacauguuuucc

SEQ ID NO: 2204755 - RNA, 14 nt, Human
ucagacauguuuuc

SEQ ID NO: 2204756 - RNA, 22 nt, Human
ucagacauccauguuuguaaaa

SEQ ID NO: 2204757 - RNA, 14 nt, Human
ucagaaaugcugcc

SEQ ID NO: 2204758 - RNA, 21 nt, Human
ucagacauccauguuuguaaa

SEQ ID NO: 2204759 - RNA, 21 nt, Human
ucagacugcugggacuggcca

SEQ ID NO: 2204760 - RNA, 17 nt, Human
ucagacugcugggacug

SEQ ID NO: 2204761 - RNA, 16 nt, Human
ucagacugcugggacu

SEQ ID NO: 2204762 - RNA, 15 nt, Human
ucagacugcugggac

SEQ ID NO: 2204763 - RNA, 14 nt, Human
ucagacugcuggga

SEQ ID NO: 2204764 - RNA, 13 nt, Human
ucagacugcuggg

SEQ ID NO: 2204765 - RNA, 19 nt, Human
ucagacugaacauguacac

SEQ ID NO: 2204766 - RNA, 14 nt, Human
ucagacugcaugua

SEQ ID NO: 2204767 - RNA, 14 nt, Human
ucagacugaacaug

SEQ ID NO: 2204768 - RNA, 12 nt, Human
ucagaaauaugu

SEQ ID NO: 2204769 - RNA, 15 nt, Human
ucagaaaugcugccu

SEQ ID NO: 2204770 - RNA, 19 nt, Human
ucagacauagaauuaacac

SEQ ID NO: 2204771 - RNA, 19 nt, Human
ucagacagcugccugggau

SEQ ID NO: 2204772 - RNA, 20 nt, Human
ucagacagcugccugggauc

SEQ ID NO: 2204773 - RNA, 15 nt, Human
ucagacagcugccug

SEQ ID NO: 2204774 - RNA, 16 nt, Human
ucagacagcugccugg

SEQ ID NO: 2204775 - RNA, 17 nt, Human
ucagacagcugccuggg

SEQ ID NO: 2204776 - RNA, 18 nt, Human
ucagacagcugccuggga

SEQ ID NO: 2204777 - RNA, 22 nt, Human
ucacucugucgcccagucugga

SEQ ID NO: 2204778 - RNA, 13 nt, Human
ucacucugcugcu

SEQ ID NO: 2204779 - RNA, 14 nt, Human
ucacucugcugcuu

SEQ ID NO: 2204780 - RNA, 13 nt, Human
ucacucuggccuc

SEQ ID NO: 2204781 - RNA, 19 nt, Human
ucacucugucgcccagucu

SEQ ID NO: 2204782 - RNA, 12 nt, Human
ucacucugucgc

SEQ ID NO: 2204783 - RNA, 16 nt, Human
ucacucugucgcccag

SEQ ID NO: 2204784 - RNA, 20 nt, Human
ucacugcuuaacuucacaua

SEQ ID NO: 2204785 - RNA, 18 nt, Human
ucacugcuuaacuucaca

SEQ ID NO: 2204786 - RNA, 17 nt, Human
ucacugcuuaacuucac

SEQ ID NO: 2204787 - RNA, 15 nt, Human
ucacugcuuaacuuc

SEQ ID NO: 2204788 - RNA, 13 nt, Human
ucacuuguacaaa

SEQ ID NO: 2204789 - RNA, 15 nt, Human
ucacuuguacaaaau

SEQ ID NO: 2204790 - RNA, 14 nt, Human
ucacuuguacaaaa

SEQ ID NO: 2204791 - RNA, 14 nt, Human
ucacuggcugccuc

SEQ ID NO: 2204792 - RNA, 15 nt, Human
ucacuggcugccucc

SEQ ID NO: 2204793 - RNA, 17 nt, Human
ucacuggcugccuccac

SEQ ID NO: 2204794 - RNA, 18 nt, Human
ucacuggcugccuccacu

SEQ ID NO: 2204795 - RNA, 20 nt, Human
ucacuggcugccuccacucc

SEQ ID NO: 2204796 - RNA, 20 nt, Human
ucacuugaugugccauuuua

SEQ ID NO: 2204797 - RNA, 17 nt, Human
ucacuugucaauaaaau

SEQ ID NO: 2204798 - RNA, 17 nt, Human
ucacuuguacaaaauaa

SEQ ID NO: 2204799 - RNA, 16 nt, Human
ucacuuguacaaaaua

SEQ ID NO: 2204800 - RNA, 20 nt, Human
ucacuuggugauauguccua

SEQ ID NO: 2204801 - RNA, 14 nt, Human
ucacuggaugaaga

SEQ ID NO: 2204802 - RNA, 19 nt, Human
ucacuggaugaagauucuc

SEQ ID NO: 2204803 - RNA, 16 nt, Human
ucacuggcaaugaaaa

SEQ ID NO: 2204804 - RNA, 21 nt, Human
ucacuggccacaguuguuuga

SEQ ID NO: 2204805 - RNA, 14 nt, Human
ucacucuggccuca

SEQ ID NO: 2204806 - RNA, 17 nt, Human
ucacuggagcccaggag

SEQ ID NO: 2204807 - RNA, 19 nt, Human
ucacuggaguuacauuaau

SEQ ID NO: 2204808 - RNA, 21 nt, Human
ucacuggaguuacauuaaugu

SEQ ID NO: 2204809 - RNA, 22 nt, Human
ucacuggaguuacauuaauguu

SEQ ID NO: 2204810 - RNA, 13 nt, Human
ucacuggaugaaa

SEQ ID NO: 2204811 - RNA, 22 nt, Human
ucacuggcgacacguagcagcu

SEQ ID NO: 2204812 - RNA, 20 nt, Human
ucacuggcgacacguagcag

SEQ ID NO: 2204813 - RNA, 14 nt, Human
ucacuggcucucca

SEQ ID NO: 2204814 - RNA, 15 nt, Human
ucacuggccaucccu

SEQ ID NO: 2204815 - RNA, 11 nt, Human
ucacuggcucu

SEQ ID NO: 2204816 - RNA, 15 nt, Human
ucacuggcucuccaa

SEQ ID NO: 2204817 - RNA, 16 nt, Human
ucacuggcucuccaag

SEQ ID NO: 2204818 - RNA, 17 nt, Human
ucacuggcucuccaagu

SEQ ID NO: 2204819 - RNA, 22 nt, Human
ucacuggcucuccaagugccag

SEQ ID NO: 2204820 - RNA, 19 nt, Human
ucacuggcucuccaagugc

SEQ ID NO: 2204821 - RNA, 20 nt, Human
ucacuggcucuccaagugcc

SEQ ID NO: 2204822 - RNA, 23 nt, Human
ucagaaagugugcuuuaugcuga

SEQ ID NO: 2204823 - RNA, 13 nt, Human
ucagaaauacaga

SEQ ID NO: 2204824 - RNA, 16 nt, Human
ucagaaauacagauuu

SEQ ID NO: 2204825 - RNA, 20 nt, Human
ucagaaauacagauuuugau

SEQ ID NO: 2204826 - RNA, 23 nt, Human
ucagaaagagcaagucuggaucu

SEQ ID NO: 2204827 - RNA, 17 nt, Human
ucagaaagcauuacauu

SEQ ID NO: 2204828 - RNA, 12 nt, Human
ucagaaaggaau

SEQ ID NO: 2204829 - RNA, 14 nt, Human
ucagaaagagcaag

SEQ ID NO: 2204830 - RNA, 14 nt, Human
ucagaaaagggaag

SEQ ID NO: 2204831 - RNA, 19 nt, Human
ucagaaaauauuauguguu

SEQ ID NO: 2204832 - RNA, 20 nt, Human
ucagaaaauauuauguguuu

SEQ ID NO: 2204833 - RNA, 17 nt, Human
ucagaaaaaaauaaaug

SEQ ID NO: 2204834 - RNA, 17 nt, Human
ucacuuuuuuuuuccaa

SEQ ID NO: 2204835 - RNA, 19 nt, Human
ucacuuuuuuuuuccaaaa

SEQ ID NO: 2204836 - RNA, 21 nt, Human
ucacuuuuuuuuuccaaaaaa

SEQ ID NO: 2204837 - RNA, 17 nt, Human
ucagaaaauauuaugug

SEQ ID NO: 2204838 - RNA, 18 nt, Human
ucacuuuugacaaaggca

SEQ ID NO: 2204839 - RNA, 18 nt, Human
ucacuuuuccucccucag

SEQ ID NO: 2204840 - RNA, 13 nt, Human
ucacuuuuccucc

SEQ ID NO: 2204841 - RNA, 16 nt, Human
ucacuuuuuuccacau

SEQ ID NO: 2204842 - RNA, 15 nt, Human
ucacuuuuuuuuucc

SEQ ID NO: 2204843 - RNA, 15 nt, Human
ucacuuuuuuccaca

SEQ ID NO: 2204844 - RNA, 13 nt, Human
ucacuuuuuucca

SEQ ID NO: 2204845 - RNA, 14 nt, Human
ucacuuugcucugg

SEQ ID NO: 2204846 - RNA, 14 nt, Human
ucacuuucucaguu

SEQ ID NO: 2204847 - RNA, 17 nt, Human
ucacuugugcaguguug

SEQ ID NO: 2204848 - RNA, 14 nt, Human
ucacuuucuagauu

SEQ ID NO: 2204849 - RNA, 15 nt, Human
ucacuuugcucuggg

SEQ ID NO: 2204850 - RNA, 17 nt, Human
ucacuuugcucugggug

SEQ ID NO: 2204851 - RNA, 13 nt, Human
ucacuuuuaggga

SEQ ID NO: 2204852 - RNA, 16 nt, Human
ucacuuugcucugggu

SEQ ID NO: 2204853 - RNA, 22 nt, Human
ucacuuuuauuuagcaccaggg

SEQ ID NO: 2204854 - RNA, 12 nt, Human
ucacuuuuauuu

SEQ ID NO: 2204855 - RNA, 12 nt, Human
ucacuuuuccuc

SEQ ID NO: 2204856 - RNA, 22 nt, Human
ucacuuuuagggagagucauau

SEQ ID NO: 2204857 - RNA, 13 nt, Human
ucacuuuucagug

SEQ ID NO: 2204858 - RNA, 14 nt, Human
ucacuuuucaguga

SEQ ID NO: 2204859 - RNA, 16 nt, Human
ucacuuuucagugaug

SEQ ID NO: 2204860 - RNA, 23 nt, Human
ucacuccugagaccccuggccuc

SEQ ID NO: 2204861 - RNA, 21 nt, Human
ucacuccugagaccccuggcc

SEQ ID NO: 2204862 - RNA, 22 nt, Human
ucacuccugagaccccuggccu

SEQ ID NO: 2204863 - RNA, 19 nt, Human
ucacuccugagaccccugg

SEQ ID NO: 2204864 - RNA, 20 nt, Human
ucacuccugagaccccuggc

SEQ ID NO: 2204865 - RNA, 20 nt, Human
ucacgggcaugggcacuccc

SEQ ID NO: 2204866 - RNA, 17 nt, Human
ucacggugccagguuuu

SEQ ID NO: 2204867 - RNA, 11 nt, Human
ucacuccuggg

SEQ ID NO: 2204868 - RNA, 13 nt, Human
ucacuccuggggc

SEQ ID NO: 2204869 - RNA, 12 nt, Human
ucacuccugggg

SEQ ID NO: 2204870 - RNA, 23 nt, Human
ucacggcaggacaacgaggaagc

SEQ ID NO: 2204871 - RNA, 17 nt, Human
ucacgggacuauuucca

SEQ ID NO: 2204872 - RNA, 18 nt, Human
ucacgggcaguagcugug

SEQ ID NO: 2204873 - RNA, 19 nt, Human
ucacgggcaugggcacucc

SEQ ID NO: 2204874 - RNA, 22 nt, Human
ucacgggagauuucuuguugcu

SEQ ID NO: 2204875 - RNA, 18 nt, Human
ucacuccuaccugguaau

SEQ ID NO: 2204876 - RNA, 20 nt, Human
ucacuccuggggccucuugg

SEQ ID NO: 2204877 - RNA, 10 nt, Human
ucacuccugu

SEQ ID NO: 2204878 - RNA, 20 nt, Human
ucacuccuguuacuuaccua

SEQ ID NO: 2204879 - RNA, 13 nt, Human
ucacuccuugaaa

SEQ ID NO: 2204880 - RNA, 15 nt, Human
ucacucgcccccggg

SEQ ID NO: 2204881 - RNA, 14 nt, Human
ucacucggcacccu

SEQ ID NO: 2204882 - RNA, 17 nt, Human
ucacucggcacccugca

SEQ ID NO: 2204883 - RNA, 17 nt, Human
ucacggaagagccuugc

SEQ ID NO: 2204884 - RNA, 16 nt, Human
ucacggaagagccuug

SEQ ID NO: 2204885 - RNA, 14 nt, Human
ucacggaagagccu

SEQ ID NO: 2204886 - RNA, 16 nt, Human
ucacgcuuuccugaau

SEQ ID NO: 2204887 - RNA, 15 nt, Human
ucacgcuuuccugaa

SEQ ID NO: 2204888 - RNA, 14 nt, Human
ucacgcuuuccuga

SEQ ID NO: 2204889 - RNA, 14 nt, Human
ucacgcuucuucuu

SEQ ID NO: 2204890 - RNA, 22 nt, Human
ucacggcaggacaacgaggaag

SEQ ID NO: 2204891 - RNA, 16 nt, Human
ucacggaaguuuucaa

SEQ ID NO: 2204892 - RNA, 15 nt, Human
ucacggaaguuuuca

SEQ ID NO: 2204893 - RNA, 22 nt, Human
ucacgcuuuccugaauccaaac

SEQ ID NO: 2204894 - RNA, 17 nt, Human
ucacgcuuuccugaauc

SEQ ID NO: 2204895 - RNA, 13 nt, Human
ucacggcucacug

SEQ ID NO: 2204896 - RNA, 15 nt, Human
ucacggcucacugca

SEQ ID NO: 2204897 - RNA, 20 nt, Human
ucacggcucacugcagccuc

SEQ ID NO: 2204898 - RNA, 19 nt, Human
ucacucuacuuagcauguc

SEQ ID NO: 2204899 - RNA, 20 nt, Human
ucacucuacuuagcaugucc

SEQ ID NO: 2204900 - RNA, 12 nt, Human
ucacucuccuug

SEQ ID NO: 2204901 - RNA, 14 nt, Human
ucacucuccuuggu

SEQ ID NO: 2204902 - RNA, 15 nt, Human
ucacucucugaagau

SEQ ID NO: 2204903 - RNA, 23 nt, Human
ucacucuccuuggugucgggcau

SEQ ID NO: 2204904 - RNA, 12 nt, Human
ucacucuggcag

SEQ ID NO: 2204905 - RNA, 13 nt, Human
ucacucuggcagc

SEQ ID NO: 2204906 - RNA, 14 nt, Human
ucacucuggcagcu

SEQ ID NO: 2204907 - RNA, 15 nt, Human
ucacucuggcagcuc

SEQ ID NO: 2204908 - RNA, 16 nt, Human
ucacucuggcagcuca

SEQ ID NO: 2204909 - RNA, 17 nt, Human
ucacucuggcagcucag

SEQ ID NO: 2204910 - RNA, 18 nt, Human
ucacucuggcagcucaga

SEQ ID NO: 2204911 - RNA, 19 nt, Human
ucacucuggcagcucagag

SEQ ID NO: 2204912 - RNA, 20 nt, Human
ucacucuggcagcucagaga

SEQ ID NO: 2204913 - RNA, 22 nt, Human
ucacucuggcagcucagagagg

SEQ ID NO: 2204914 - RNA, 23 nt, Human
ucacagggacugaaaaccucucc

SEQ ID NO: 2204915 - RNA, 15 nt, Human
ucacagggcagagcc

SEQ ID NO: 2204916 - RNA, 20 nt, Human
ucacaggcgaggccuggagu

SEQ ID NO: 2204917 - RNA, 19 nt, Human
ucacagggcagagccggga

SEQ ID NO: 2204918 - RNA, 18 nt, Human
ucacagggcagagccggg

SEQ ID NO: 2204919 - RNA, 17 nt, Human
ucacagggccccagaag

SEQ ID NO: 2204920 - RNA, 16 nt, Human
ucacagggccccagaa

SEQ ID NO: 2204921 - RNA, 14 nt, Human
ucacagggccaacu

SEQ ID NO: 2204922 - RNA, 22 nt, Human
ucacagggccaacuugagggcc

SEQ ID NO: 2204923 - RNA, 20 nt, Human
ucacagggcaugccccggcc

SEQ ID NO: 2204924 - RNA, 12 nt, Human
ucacagggccaa

SEQ ID NO: 2204925 - RNA, 15 nt, Human
ucaccuagaaauuga

SEQ ID NO: 2204926 - RNA, 12 nt, Human
ucacaggcaggu

SEQ ID NO: 2204927 - RNA, 15 nt, Human
ucacaggcaggucca

SEQ ID NO: 2204928 - RNA, 19 nt, Human
ucacaggccccaggaaagg

SEQ ID NO: 2204929 - RNA, 18 nt, Human
ucacaggcgaggccugga

SEQ ID NO: 2204930 - RNA, 19 nt, Human
ucacaggcagguccagggu

SEQ ID NO: 2204931 - RNA, 18 nt, Human
ucaccucaggccaggugc

SEQ ID NO: 2204932 - RNA, 22 nt, Human
ucaccuucguuuacuaugccug

SEQ ID NO: 2204933 - RNA, 13 nt, Human
ucaccucaugccc

SEQ ID NO: 2204934 - RNA, 20 nt, Human
ucaccuauuuccauucaaca

SEQ ID NO: 2204935 - RNA, 14 nt, Human
ucaccuuucccauc

SEQ ID NO: 2204936 - RNA, 12 nt, Human
ucaccuuugucc

SEQ ID NO: 2204937 - RNA, 21 nt, Human
ucaccuugcaacacacagaca

SEQ ID NO: 2204938 - RNA, 19 nt, Human
ucaccuugcaacacacaga

SEQ ID NO: 2204939 - RNA, 18 nt, Human
ucaccuugcaacacacag

SEQ ID NO: 2204940 - RNA, 20 nt, Human
ucaccucaugcccacccccu

SEQ ID NO: 2204941 - RNA, 19 nt, Human
ucaccuuggcaccagacac

SEQ ID NO: 2204942 - RNA, 18 nt, Human
ucaccuuggcaccagaca

SEQ ID NO: 2204943 - RNA, 13 nt, Human
ucaccuuuauucu

SEQ ID NO: 2204944 - RNA, 23 nt, Human
ucaccuuggcaccagacacccag

SEQ ID NO: 2204945 - RNA, 20 nt, Human
ucacgccuguaauccuagca

SEQ ID NO: 2204946 - RNA, 16 nt, Human
ucacgccugugcagug

SEQ ID NO: 2204947 - RNA, 13 nt, Human
ucacgccugugca

SEQ ID NO: 2204948 - RNA, 21 nt, Human
ucacgccuguaaucccagcag

SEQ ID NO: 2204949 - RNA, 23 nt, Human
ucacgccuguaaucccagcacuu

SEQ ID NO: 2204950 - RNA, 12 nt, Human
ucacgcuccccg

SEQ ID NO: 2204951 - RNA, 16 nt, Human
ucacgcuccccgccug

SEQ ID NO: 2204952 - RNA, 21 nt, Human
ucacgcuccccgccuguuccc

SEQ ID NO: 2204953 - RNA, 21 nt, Human
ucacgccuaugaucccagcac

SEQ ID NO: 2204954 - RNA, 19 nt, Human
ucacgccuaugaucccagc

SEQ ID NO: 2204955 - RNA, 20 nt, Human
ucacgccuguaaucccagca

SEQ ID NO: 2204956 - RNA, 21 nt, Human
ucacgccuguaaucccagcac

SEQ ID NO: 2204957 - RNA, 19 nt, Human
ucacgccuguaaucccagc

SEQ ID NO: 2204958 - RNA, 19 nt, Human
ucacgccuguaauccuagc

SEQ ID NO: 2204959 - RNA, 22 nt, Human
ucacgccacugcacuccagccu

SEQ ID NO: 2204960 - RNA, 17 nt, Human
ucacgcaccucccaucc

SEQ ID NO: 2204961 - RNA, 16 nt, Human
ucacgccacugcacua

SEQ ID NO: 2204962 - RNA, 13 nt, Human
ucacgccacugca

SEQ ID NO: 2204963 - RNA, 14 nt, Human
ucacgccacugcac

SEQ ID NO: 2204964 - RNA, 22 nt, Human
ucaccuuuguccccaccgcaga

SEQ ID NO: 2204965 - RNA, 16 nt, Human
ucacgcaccucccauc

SEQ ID NO: 2204966 - RNA, 15 nt, Human
ucacgcaccucccau

SEQ ID NO: 2204967 - RNA, 14 nt, Human
ucacgcaccugggu

SEQ ID NO: 2204968 - RNA, 19 nt, Human
ucacgaauauuaugcccag

SEQ ID NO: 2204969 - RNA, 18 nt, Human
ucacgauugucaucagga

SEQ ID NO: 2204970 - RNA, 21 nt, Human
ucacgauugucaucaggagaa

SEQ ID NO: 2204971 - RNA, 20 nt, Human
ucacgaauauuaugcccagu

SEQ ID NO: 2204972 - RNA, 16 nt, Human
ucacgaaguguugcau

SEQ ID NO: 2204973 - RNA, 22 nt, Human
ucacgaaguguugcauggaugu

SEQ ID NO: 2204974 - RNA, 14 nt, Human
ucaccuuugucccc

SEQ ID NO: 2204975 - RNA, 15 nt, Human
ucaccuuugucccca

SEQ ID NO: 2204976 - RNA, 17 nt, Human
ucaccuuuguccccacc

SEQ ID NO: 2204977 - RNA, 18 nt, Human
ucaccuuuguccccaccg

SEQ ID NO: 2204978 - RNA, 16 nt, Human
ucaagcccgcggggac

SEQ ID NO: 2204979 - RNA, 19 nt, Human
ucaagcccaggaggacugc

SEQ ID NO: 2204980 - RNA, 16 nt, Human
ucaagccaagcagcca

SEQ ID NO: 2204981 - RNA, 15 nt, Human
ucaagccaagcagcc

SEQ ID NO: 2204982 - RNA, 13 nt, Human
ucaagcccugcag

SEQ ID NO: 2204983 - RNA, 14 nt, Human
ucaagccucugguc

SEQ ID NO: 2204984 - RNA, 12 nt, Human
ucaagcccugca

SEQ ID NO: 2204985 - RNA, 17 nt, Human
ucaagccaagcagccaa

SEQ ID NO: 2204986 - RNA, 14 nt, Human
ucaagccaagcagc

SEQ ID NO: 2204987 - RNA, 20 nt, Human
ucaagcagucuacccaccuc

SEQ ID NO: 2204988 - RNA, 19 nt, Human
ucaagcagucuacccaccu

SEQ ID NO: 2204989 - RNA, 23 nt, Human
ucaagcagucgugccugugucca

SEQ ID NO: 2204990 - RNA, 19 nt, Human
ucaagcagucgugccugug

SEQ ID NO: 2204991 - RNA, 20 nt, Human
ucaagcagucgugccugugu

SEQ ID NO: 2204992 - RNA, 21 nt, Human
ucaagcagucgugccuguguc

SEQ ID NO: 2204993 - RNA, 22 nt, Human
ucaagcagucgugccugugucc

SEQ ID NO: 2204994 - RNA, 14 nt, Human
ucaagccugccuag

SEQ ID NO: 2204995 - RNA, 15 nt, Human
ucaagcgauucuucu

SEQ ID NO: 2204996 - RNA, 15 nt, Human
ucaagcgauucuccu

SEQ ID NO: 2204997 - RNA, 16 nt, Human
ucaagcgauucuucug

SEQ ID NO: 2204998 - RNA, 16 nt, Human
ucaagcuagaaggcca

SEQ ID NO: 2204999 - RNA, 18 nt, Human
ucaagcuagaaggccaca

SEQ ID NO: 2205000 - RNA, 19 nt, Human
ucaagcuagaaggccacau

SEQ ID NO: 2205001 - RNA, 17 nt, Human
ucaagcgauucuucugc

SEQ ID NO: 2205002 - RNA, 21 nt, Human
ucaagcugugagacaguggga

SEQ ID NO: 2205003 - RNA, 20 nt, Human
ucaaggauccugagccagau

SEQ ID NO: 2205004 - RNA, 22 nt, Human
ucaagugcaugcucucugcagc

SEQ ID NO: 2205005 - RNA, 21 nt, Human
ucaagugcaugcucucugcag

SEQ ID NO: 2205006 - RNA, 20 nt, Human
ucaagugcaugcucucugca

SEQ ID NO: 2205007 - RNA, 19 nt, Human
ucaagugcaugcucucugc

SEQ ID NO: 2205008 - RNA, 22 nt, Human
ucaagugauucuccugccucag

SEQ ID NO: 2205009 - RNA, 18 nt, Human
ucaaggauccugagccag

SEQ ID NO: 2205010 - RNA, 19 nt, Human
ucaaggauccugagccaga

SEQ ID NO: 2205011 - RNA, 20 nt, Human
ucaagcuagaaggccacaug

SEQ ID NO: 2205012 - RNA, 14 nt, Human
ucaagcuccuccuc

SEQ ID NO: 2205013 - RNA, 13 nt, Human
ucaagcuccuccu

SEQ ID NO: 2205014 - RNA, 20 nt, Human
ucaagcuccuccucccugca

SEQ ID NO: 2205015 - RNA, 18 nt, Human
ucaagcuccuccucccug

SEQ ID NO: 2205016 - RNA, 16 nt, Human
ucaagcuccuccuccc

SEQ ID NO: 2205017 - RNA, 15 nt, Human
ucaagcuccuccucc

SEQ ID NO: 2205018 - RNA, 15 nt, Human
ucaacguauuguuuc

SEQ ID NO: 2205019 - RNA, 20 nt, Human
ucaacuaaaaaaaaaaaagu

SEQ ID NO: 2205020 - RNA, 19 nt, Human
ucaacuaaaaaaaaaaaag

SEQ ID NO: 2205021 - RNA, 12 nt, Human
ucaaccuccugg

SEQ ID NO: 2205022 - RNA, 23 nt, Human
ucaacgcuuaaaggugucuuccu

SEQ ID NO: 2205023 - RNA, 20 nt, Human
ucaaccuacuuucauacuga

SEQ ID NO: 2205024 - RNA, 13 nt, Human
ucaaccuccugga

SEQ ID NO: 2205025 - RNA, 13 nt, Human
ucaaccuccuggg

SEQ ID NO: 2205026 - RNA, 14 nt, Human
ucaaccuccugggc

SEQ ID NO: 2205027 - RNA, 19 nt, Human
ucaacucaccuaauguuua

SEQ ID NO: 2205028 - RNA, 16 nt, Human
ucaacucagacuaguu

SEQ ID NO: 2205029 - RNA, 20 nt, Human
ucaacucagacuaguuuagu

SEQ ID NO: 2205030 - RNA, 19 nt, Human
ucaacucauaagacuuugg

SEQ ID NO: 2205031 - RNA, 23 nt, Human
ucaagcagcgaccgcccccuccu

SEQ ID NO: 2205032 - RNA, 15 nt, Human
ucaacucauggagau

SEQ ID NO: 2205033 - RNA, 16 nt, Human
ucaagcagucgugccu

SEQ ID NO: 2205034 - RNA, 17 nt, Human
ucaagcagucgugccug

SEQ ID NO: 2205035 - RNA, 18 nt, Human
ucaagcagucgugccugu

SEQ ID NO: 2205036 - RNA, 16 nt, Human
ucaacucaccuaaugu

SEQ ID NO: 2205037 - RNA, 19 nt, Human
ucaacuccaaacugacucu

SEQ ID NO: 2205038 - RNA, 18 nt, Human
ucaacccuuuugucugcc

SEQ ID NO: 2205039 - RNA, 20 nt, Human
ucaacccuuuugucugccuc

SEQ ID NO: 2205040 - RNA, 21 nt, Human
ucaacccuuuugucugccucu

SEQ ID NO: 2205041 - RNA, 13 nt, Human
ucaaccuaaccac

SEQ ID NO: 2205042 - RNA, 15 nt, Human
ucaaccuaccacccc

SEQ ID NO: 2205043 - RNA, 18 nt, Human
ucaaccuaccaccccuuc

SEQ ID NO: 2205044 - RNA, 20 nt, Human
ucaaccuaccaccccuuccu

SEQ ID NO: 2205045 - RNA, 21 nt, Human
ucaaccuaccaccccuuccug

SEQ ID NO: 2205046 - RNA, 22 nt, Human
ucaaccuaccaccccuuccugu

SEQ ID NO: 2205047 - RNA, 23 nt, Human
ucaaccuaccaccccuuccuguc

SEQ ID NO: 2205048 - RNA, 16 nt, Human
ucaaacuuuacuaugg

SEQ ID NO: 2205049 - RNA, 15 nt, Human
ucaaacugaggaauu

SEQ ID NO: 2205050 - RNA, 23 nt, Human
ucaaacugaaugaaacccccaca

SEQ ID NO: 2205051 - RNA, 22 nt, Human
ucaaacucuugaccucagguga

SEQ ID NO: 2205052 - RNA, 16 nt, Human
ucaaacugaagccaga

SEQ ID NO: 2205053 - RNA, 13 nt, Human
ucaaacuuuacua

SEQ ID NO: 2205054 - RNA, 15 nt, Human
ucaaacuuuacuaug

SEQ ID NO: 2205055 - RNA, 23 nt, Human
ucacacagugggugguggaucug

SEQ ID NO: 2205056 - RNA, 21 nt, Human
ucacacaugagcaucaggcca

SEQ ID NO: 2205057 - RNA, 22 nt, Human
ucacacagugagucgaggacag

SEQ ID NO: 2205058 - RNA, 23 nt, Human
ucacacagugagucgaggacagg

SEQ ID NO: 2205059 - RNA, 11 nt, Human
ucacaggcagg

SEQ ID NO: 2205060 - RNA, 23 nt, Human
ucacaggacagcccuucuuucca

SEQ ID NO: 2205061 - RNA, 19 nt, Human
ucacaggaaguagaggagg

SEQ ID NO: 2205062 - RNA, 14 nt, Human
ucacaggaaguaga

SEQ ID NO: 2205063 - RNA, 19 nt, Human
ucacacaauacaauaaguu

SEQ ID NO: 2205064 - RNA, 10 nt, Human
ucacacacac

SEQ ID NO: 2205065 - RNA, 23 nt, Human
ucacaaugaaaugcucuccuuuc

SEQ ID NO: 2205066 - RNA, 16 nt, Human
ucacaauagaaacuca

SEQ ID NO: 2205067 - RNA, 21 nt, Human
ucacacaguauuacuucugcu

SEQ ID NO: 2205068 - RNA, 22 nt, Human
ucacacaguauuacuucugcua

SEQ ID NO: 2205069 - RNA, 13 nt, Human
ucacacagugagu

SEQ ID NO: 2205070 - RNA, 20 nt, Human
ucacaauaaaaauggcucag

SEQ ID NO: 2205071 - RNA, 20 nt, Human
ucacaaguuguguuugauau

SEQ ID NO: 2205072 - RNA, 19 nt, Human
ucaauuacaggaaguacug

SEQ ID NO: 2205073 - RNA, 13 nt, Human
ucacaauacuguu

SEQ ID NO: 2205074 - RNA, 15 nt, Human
ucacaauaauuuucu

SEQ ID NO: 2205075 - RNA, 16 nt, Human
ucacaauaauuuucua

SEQ ID NO: 2205076 - RNA, 14 nt, Human
ucacaauagaaacu

SEQ ID NO: 2205077 - RNA, 22 nt, Human
ucacaaugaaaugcucuccuuu

SEQ ID NO: 2205078 - RNA, 17 nt, Human
ucaaugguuugcaagga

SEQ ID NO: 2205079 - RNA, 19 nt, Human
ucaaugguuuaacauauaa

SEQ ID NO: 2205080 - RNA, 11 nt, Human
ucaauuaauaa

SEQ ID NO: 2205081 - RNA, 16 nt, Human
ucaauuaaauguaggu

SEQ ID NO: 2205082 - RNA, 14 nt, Human
ucaaugggcaauga

SEQ ID NO: 2205083 - RNA, 18 nt, Human
ucaauggcgcagugccuc

SEQ ID NO: 2205084 - RNA, 22 nt, Human
ucaauggcugcugaagcugccu

SEQ ID NO: 2205085 - RNA, 12 nt, Human
ucaauggcuuuu

SEQ ID NO: 2205086 - RNA, 14 nt, Human
ucaaugggaaauac

SEQ ID NO: 2205087 - RNA, 22 nt, Human
ucaaugggaaauacuacuccug

SEQ ID NO: 2205088 - RNA, 17 nt, Human
ucaaugggcaaugacag

SEQ ID NO: 2205089 - RNA, 13 nt, Human
ucaauuacaggaa

SEQ ID NO: 2205090 - RNA, 18 nt, Human
ucaauuacaggaaguacu

SEQ ID NO: 2205091 - RNA, 18 nt, Human
ucaaugcacugacauugu

SEQ ID NO: 2205092 - RNA, 17 nt, Human
ucaaugcuauaacuaug

SEQ ID NO: 2205093 - RNA, 14 nt, Human
ucaaugcucauaac

SEQ ID NO: 2205094 - RNA, 20 nt, Human
ucaauggauuugaugcuguu

SEQ ID NO: 2205095 - RNA, 12 nt, Human
ucaaugcucaua

SEQ ID NO: 2205096 - RNA, 13 nt, Human
ucaaugcucauaa

SEQ ID NO: 2205097 - RNA, 13 nt, Human
ucaaugcagccag

SEQ ID NO: 2205098 - RNA, 15 nt, Human
ucaaugcagccagac

SEQ ID NO: 2205099 - RNA, 19 nt, Human
ucaaugcagccagaccuau

SEQ ID NO: 2205100 - RNA, 20 nt, Human
ucaauacaguacaggcagca

SEQ ID NO: 2205101 - RNA, 19 nt, Human
ucaauacaguacaggcagc

SEQ ID NO: 2205102 - RNA, 18 nt, Human
ucaauacaguacaggcag

SEQ ID NO: 2205103 - RNA, 17 nt, Human
ucaauacaguacaggca

SEQ ID NO: 2205104 - RNA, 13 nt, Human
ucaauaggaaaaa

SEQ ID NO: 2205105 - RNA, 14 nt, Human
ucaaguuaaaguga

SEQ ID NO: 2205106 - RNA, 21 nt, Human
ucaagugucucaguccaccug

SEQ ID NO: 2205107 - RNA, 16 nt, Human
ucaagugucucagucc

SEQ ID NO: 2205108 - RNA, 15 nt, Human
ucaagugucauaugu

SEQ ID NO: 2205109 - RNA, 15 nt, Human
ucaaguuagcucagg

SEQ ID NO: 2205110 - RNA, 21 nt, Human
ucaaguuauugacaaacucuc

SEQ ID NO: 2205111 - RNA, 18 nt, Human
ucaagugggaucugucac

SEQ ID NO: 2205112 - RNA, 16 nt, Human
ucaaguggggcucgcc

SEQ ID NO: 2205113 - RNA, 18 nt, Human
ucaaguggggcucgccau

SEQ ID NO: 2205114 - RNA, 23 nt, Human
ucaagugcccucuccgagcuggu

SEQ ID NO: 2205115 - RNA, 12 nt, Human
ucaagugccuua

SEQ ID NO: 2205116 - RNA, 14 nt, Human
ucaaugcacugaca

SEQ ID NO: 2205117 - RNA, 13 nt, Human
ucaaugaucuagg

SEQ ID NO: 2205118 - RNA, 15 nt, Human
ucaaugaucuagguu

SEQ ID NO: 2205119 - RNA, 17 nt, Human
ucaaugaucuagguuua

SEQ ID NO: 2205120 - RNA, 19 nt, Human
ucaaugaucuagguuuaac

SEQ ID NO: 2205121 - RNA, 21 nt, Human
ucaaugaucuagguuuaacuc

SEQ ID NO: 2205122 - RNA, 22 nt, Human
ucaaugaucuagguuuaacuca

SEQ ID NO: 2205123 - RNA, 12 nt, Human
ucaaugaucuag

SEQ ID NO: 2205124 - RNA, 14 nt, Human
ucaauaggaaaaac

SEQ ID NO: 2205125 - RNA, 23 nt, Human
uauuuauuaaaugcccagccccu

SEQ ID NO: 2205126 - RNA, 18 nt, Human
uaucugacaucucugcaa

SEQ ID NO: 2205127 - RNA, 20 nt, Human
uaucugaaaauguaugugua

SEQ ID NO: 2205128 - RNA, 23 nt, Human
uaucucuuuugaauccaugcuug

SEQ ID NO: 2205129 - RNA, 21 nt, Human
uaucugaaggagauuuuccuu

SEQ ID NO: 2205130 - RNA, 15 nt, Human
uaucugaaaauguau

SEQ ID NO: 2205131 - RNA, 14 nt, Human
uaucugaaaaugua

SEQ ID NO: 2205132 - RNA, 15 nt, Human
uauuuauuaccucug

SEQ ID NO: 2205133 - RNA, 16 nt, Human
uauuuauuaccucuga

SEQ ID NO: 2205134 - RNA, 13 nt, Human
uauuuauuacugu

SEQ ID NO: 2205135 - RNA, 13 nt, Human
uauuuauuaccuc

SEQ ID NO: 2205136 - RNA, 13 nt, Human
uauuuauuaagau

SEQ ID NO: 2205137 - RNA, 24 nt, Human
uauuuauucagcuucauuuguguc

SEQ ID NO: 2205138 - RNA, 20 nt, Human
uauuuauuccauauucaugu

SEQ ID NO: 2205139 - RNA, 14 nt, Human
uauuuauuacuaug

SEQ ID NO: 2205140 - RNA, 22 nt, Human
uauuuauuguuuauuuaucagu

SEQ ID NO: 2205141 - RNA, 13 nt, Human
uauuuauuuaaaa

SEQ ID NO: 2205142 - RNA, 11 nt, Human
uauuuauuuaa

SEQ ID NO: 2205143 - RNA, 15 nt, Human
uauuuauuuaaaaga

SEQ ID NO: 2205144 - RNA, 16 nt, Human
uauuuauuuaaaagau

SEQ ID NO: 2205145 - RNA, 16 nt, Human
uauuucuaugagaaaa

SEQ ID NO: 2205146 - RNA, 22 nt, Human
uauuucuaugaaauauuauguu

SEQ ID NO: 2205147 - RNA, 16 nt, Human
uauuuauuguuuauuu

SEQ ID NO: 2205148 - RNA, 13 nt, Human
uauuuauugcuuu

SEQ ID NO: 2205149 - RNA, 14 nt, Human
uauuuauugcuuua

SEQ ID NO: 2205150 - RNA, 21 nt, Human
uauuucuaugaaauauuaugu

SEQ ID NO: 2205151 - RNA, 19 nt, Human
uauuucucugauuugcaaa

SEQ ID NO: 2205152 - RNA, 11 nt, Human
uauuucugaga

SEQ ID NO: 2205153 - RNA, 21 nt, Human
uauuucugagaagguccuuaa

SEQ ID NO: 2205154 - RNA, 16 nt, Human
uauuucugagaagguc

SEQ ID NO: 2205155 - RNA, 22 nt, Human
uauuucucagacuuuggaaaau

SEQ ID NO: 2205156 - RNA, 21 nt, Human
uauuucucaacaaagcacagu

SEQ ID NO: 2205157 - RNA, 18 nt, Human
uauuucuauuuccuggaa

SEQ ID NO: 2205158 - RNA, 19 nt, Human
uauuucucaacaaagcaca

SEQ ID NO: 2205159 - RNA, 20 nt, Human
uauuucuuaaacaaauguau

SEQ ID NO: 2205160 - RNA, 22 nt, Human
uauuucugcugaauuuucacau

SEQ ID NO: 2205161 - RNA, 17 nt, Human
uauuucugcauauguug

SEQ ID NO: 2205162 - RNA, 13 nt, Human
uauuucugcugaa

SEQ ID NO: 2205163 - RNA, 19 nt, Human
uauuuauuuaaaagauuca

SEQ ID NO: 2205164 - RNA, 16 nt, Human
uauuucugcugaauuu

SEQ ID NO: 2205165 - RNA, 14 nt, Human
uauuugagaauaua

SEQ ID NO: 2205166 - RNA, 23 nt, Human
uauuucuuacaggcacaaaauga

SEQ ID NO: 2205167 - RNA, 16 nt, Human
uauuucuuauauaugu

SEQ ID NO: 2205168 - RNA, 19 nt, Human
uauuucuuaaaucuaguaa

SEQ ID NO: 2205169 - RNA, 21 nt, Human
uauuucugcugaauuuucaca

SEQ ID NO: 2205170 - RNA, 15 nt, Human
uauuugagaguucua

SEQ ID NO: 2205171 - RNA, 16 nt, Human
uauuugagaguucuaa

SEQ ID NO: 2205172 - RNA, 16 nt, Human
uauuugagacuaguuu

SEQ ID NO: 2205173 - RNA, 19 nt, Human
uauuucuuauauaugugaa

SEQ ID NO: 2205174 - RNA, 18 nt, Human
uauuugagaguucuaaau

SEQ ID NO: 2205175 - RNA, 19 nt, Human
uauuugagaguucuaaauu

SEQ ID NO: 2205176 - RNA, 18 nt, Human
uauuuuaggcagggauuu

SEQ ID NO: 2205177 - RNA, 13 nt, Human
uauuuuacuuuua

SEQ ID NO: 2205178 - RNA, 23 nt, Human
uauuugggccugcuccagaccug

SEQ ID NO: 2205179 - RNA, 14 nt, Human
uauuuuacuuuuau

SEQ ID NO: 2205180 - RNA, 21 nt, Human
uauuuuaggcagggauuugag

SEQ ID NO: 2205181 - RNA, 22 nt, Human
uauuuuaggcagggauuugagg

SEQ ID NO: 2205182 - RNA, 14 nt, Human
uauuuuaguuucug

SEQ ID NO: 2205183 - RNA, 16 nt, Human
uauuuuaguuucuguu

SEQ ID NO: 2205184 - RNA, 18 nt, Human
uauuuuaguuucuguucu

SEQ ID NO: 2205185 - RNA, 20 nt, Human
uauuuuaguuucuguucugu

SEQ ID NO: 2205186 - RNA, 21 nt, Human
uauuuuaguuucuguucugug

SEQ ID NO: 2205187 - RNA, 14 nt, Human
uauuuggaauuuau

SEQ ID NO: 2205188 - RNA, 15 nt, Human
uauuugcuuuuugcu

SEQ ID NO: 2205189 - RNA, 11 nt, Human
uauuuggaauu

SEQ ID NO: 2205190 - RNA, 11 nt, Human
uauuugcuuuu

SEQ ID NO: 2205191 - RNA, 20 nt, Human
uauuuggaauuuauauacaa

SEQ ID NO: 2205192 - RNA, 21 nt, Human
uauuuggaauuuauauacaac

SEQ ID NO: 2205193 - RNA, 14 nt, Human
uauuugggaaguga

SEQ ID NO: 2205194 - RNA, 15 nt, Human
uauuugggaagugaa

SEQ ID NO: 2205195 - RNA, 20 nt, Human
uauuuuuguuucuuccaaag

SEQ ID NO: 2205196 - RNA, 13 nt, Human
uauuuuuuaagua

SEQ ID NO: 2205197 - RNA, 13 nt, Human
uauuuuuuauugu

SEQ ID NO: 2205198 - RNA, 17 nt, Human
uauuuuuuauuguuuuc

SEQ ID NO: 2205199 - RNA, 12 nt, Human
uauuuuuucaga

SEQ ID NO: 2205200 - RNA, 16 nt, Human
uauuuuuuauauauac

SEQ ID NO: 2205201 - RNA, 21 nt, Human
uauuuuuuaaguauuuauaua

SEQ ID NO: 2205202 - RNA, 15 nt, Human
uauuuuuuaaguauu

SEQ ID NO: 2205203 - RNA, 15 nt, Human
uauuuuuuaauuauu

SEQ ID NO: 2205204 - RNA, 12 nt, Human
uauuuuuuaauu

SEQ ID NO: 2205205 - RNA, 14 nt, Human
uauuuucuuugaaa

SEQ ID NO: 2205206 - RNA, 14 nt, Human
uauuuucuuuaaug

SEQ ID NO: 2205207 - RNA, 21 nt, Human
uauuuucaugacuuuuccaug

SEQ ID NO: 2205208 - RNA, 14 nt, Human
uauuuucuguucua

SEQ ID NO: 2205209 - RNA, 16 nt, Human
uauuuucuuuuguaaa

SEQ ID NO: 2205210 - RNA, 16 nt, Human
uauuuugaaugugaag

SEQ ID NO: 2205211 - RNA, 23 nt, Human
uauuuugaaucaauaauauauuu

SEQ ID NO: 2205212 - RNA, 16 nt, Human
uauuuugaaucaauaa

SEQ ID NO: 2205213 - RNA, 22 nt, Human
uauuuugaaucaauaauauauu

SEQ ID NO: 2205214 - RNA, 12 nt, Human
uauuuugaauca

SEQ ID NO: 2205215 - RNA, 13 nt, Human
uauuuugaaucaa

SEQ ID NO: 2205216 - RNA, 15 nt, Human
uauuuugaaucaaua

SEQ ID NO: 2205217 - RNA, 16 nt, Human
uauuuuauacauuaac

SEQ ID NO: 2205218 - RNA, 23 nt, Human
uauuuuaucuuugauucuccuuc

SEQ ID NO: 2205219 - RNA, 15 nt, Human
uauuuuauccucugg

SEQ ID NO: 2205220 - RNA, 14 nt, Human
uauuuuaugcaaau

SEQ ID NO: 2205221 - RNA, 15 nt, Human
uauuuuauguugcau

SEQ ID NO: 2205222 - RNA, 16 nt, Human
uauuuuauguugcaua

SEQ ID NO: 2205223 - RNA, 14 nt, Human
uauuuucaccauuu

SEQ ID NO: 2205224 - RNA, 13 nt, Human
uauuuucaccauu

SEQ ID NO: 2205225 - RNA, 21 nt, Human
uauuuucaaggcccucagcau

SEQ ID NO: 2205226 - RNA, 17 nt, Human
uauuuucaguauuuugg

SEQ ID NO: 2205227 - RNA, 18 nt, Human
uauuuucauacagcauua

SEQ ID NO: 2205228 - RNA, 16 nt, Human
uauuuucaagaaacug

SEQ ID NO: 2205229 - RNA, 13 nt, Human
uauuuucaagaaa

SEQ ID NO: 2205230 - RNA, 21 nt, Human
uauuuucaacgcagcccugcu

SEQ ID NO: 2205231 - RNA, 22 nt, Human
ucaaaccuguuuaaauauuuca

SEQ ID NO: 2205232 - RNA, 14 nt, Human
ucaaacucuuaaaa

SEQ ID NO: 2205233 - RNA, 15 nt, Human
ucaaacgugaaaaug

SEQ ID NO: 2205234 - RNA, 16 nt, Human
ucaaacgugaaaaugc

SEQ ID NO: 2205235 - RNA, 18 nt, Human
ucaaaccuguuuaaauau

SEQ ID NO: 2205236 - RNA, 19 nt, Human
ucaaaccuguuuaaauauu

SEQ ID NO: 2205237 - RNA, 18 nt, Human
ucaaaacggggcagccaa

SEQ ID NO: 2205238 - RNA, 15 nt, Human
ucaaaaccuuuugaa

SEQ ID NO: 2205239 - RNA, 16 nt, Human
ucaaaacuacaaauca

SEQ ID NO: 2205240 - RNA, 20 nt, Human
ucaaaaccuuucaaauauca

SEQ ID NO: 2205241 - RNA, 14 nt, Human
ucaaaacucaaaug

SEQ ID NO: 2205242 - RNA, 22 nt, Human
ucaaaacgguuuuacugcagcu

SEQ ID NO: 2205243 - RNA, 18 nt, Human
ucaaaacucauuuccuau

SEQ ID NO: 2205244 - RNA, 15 nt, Human
ucaaaacucaaaugc

SEQ ID NO: 2205245 - RNA, 17 nt, Human
ucaaaccuguuuaaaua

SEQ ID NO: 2205246 - RNA, 23 nt, Human
ucaaacggccucacuaggcuucu

SEQ ID NO: 2205247 - RNA, 13 nt, Human
ucaaaacugcacu

SEQ ID NO: 2205248 - RNA, 15 nt, Human
ucaaaaacauucuua

SEQ ID NO: 2205249 - RNA, 23 nt, Human
ucaaaaacacaguguuuuuguaa

SEQ ID NO: 2205250 - RNA, 13 nt, Human
ucaaaaacuguau

SEQ ID NO: 2205251 - RNA, 23 nt, Human
uauuuuuuucuaccuugaggucu

SEQ ID NO: 2205252 - RNA, 17 nt, Human
ucaaaaacuuuggaguc

SEQ ID NO: 2205253 - RNA, 22 nt, Human
ucaaaaacuuuggaguccccuc

SEQ ID NO: 2205254 - RNA, 23 nt, Human
ucaaaaagucuacgcucuccuuu

SEQ ID NO: 2205255 - RNA, 12 nt, Human
ucaaaaaguguu

SEQ ID NO: 2205256 - RNA, 14 nt, Human
ucaaaaaguguuua

SEQ ID NO: 2205257 - RNA, 15 nt, Human
ucaaaaaguguuuau

SEQ ID NO: 2205258 - RNA, 19 nt, Human
ucaaaacccaucugggcuc

SEQ ID NO: 2205259 - RNA, 23 nt, Human
ucaaaaaguguuuauuuuucaua

SEQ ID NO: 2205260 - RNA, 19 nt, Human
ucaaaaaguguuuauuuuu

SEQ ID NO: 2205261 - RNA, 13 nt, Human
ucaaaaauauaac

SEQ ID NO: 2205262 - RNA, 15 nt, Human
uauuuuuuucuaccu

SEQ ID NO: 2205263 - RNA, 14 nt, Human
uauuuuuuucuacc

SEQ ID NO: 2205264 - RNA, 13 nt, Human
uauuuuuucagac

SEQ ID NO: 2205265 - RNA, 14 nt, Human
uauuuuuucagacc

SEQ ID NO: 2205266 - RNA, 15 nt, Human
uauuuuuuuacuaau

SEQ ID NO: 2205267 - RNA, 13 nt, Human
ucaaaaaaugagc

SEQ ID NO: 2205268 - RNA, 13 nt, Human
uauuuuuuucuga

SEQ ID NO: 2205269 - RNA, 14 nt, Human
guuuccuucagugc

SEQ ID NO: 2205270 - RNA, 23 nt, Human
guuuccuuucauuuacuguggcu

SEQ ID NO: 2205271 - RNA, 17 nt, Human
guuuccuuucauuuacu

SEQ ID NO: 2205272 - RNA, 20 nt, Human
guuuccuuucauuuacugug

SEQ ID NO: 2205273 - RNA, 20 nt, Human
guuucgugaaguauacugua

SEQ ID NO: 2205274 - RNA, 15 nt, Human
guuucguggggaggu

SEQ ID NO: 2205275 - RNA, 18 nt, Human
guuucgaaguugaugcaa

SEQ ID NO: 2205276 - RNA, 13 nt, Human
guuucgagaagcu

SEQ ID NO: 2205277 - RNA, 21 nt, Human
guuucgagaagcugcucugga

SEQ ID NO: 2205278 - RNA, 23 nt, Human
guuucguggggaggucuaaucua

SEQ ID NO: 2205279 - RNA, 17 nt, Human
guuucgagaagcugcuc

SEQ ID NO: 2205280 - RNA, 14 nt, Human
guuucguuucugua

SEQ ID NO: 2205281 - RNA, 15 nt, Human
guuucguuucuguau

SEQ ID NO: 2205282 - RNA, 16 nt, Human
guuucguuucuguaua

SEQ ID NO: 2205283 - RNA, 20 nt, Human
guuucuaaagcugccagccg

SEQ ID NO: 2205284 - RNA, 19 nt, Human
guuucuuuccugccuucuu

SEQ ID NO: 2205285 - RNA, 21 nt, Human
guuucuuuccugccuucuucu

SEQ ID NO: 2205286 - RNA, 18 nt, Human
guuucuuucuaguggucu

SEQ ID NO: 2205287 - RNA, 16 nt, Human
guuucuaaagcugcca

SEQ ID NO: 2205288 - RNA, 14 nt, Human
guuucuaaagcugc

SEQ ID NO: 2205289 - RNA, 15 nt, Human
guuucuaaagcugcc

SEQ ID NO: 2205290 - RNA, 13 nt, Human
guuugaauauaaa

SEQ ID NO: 2205291 - RNA, 17 nt, Human
guuugaaggaaacaguu

SEQ ID NO: 2205292 - RNA, 17 nt, Human
guuugaaggaggugagg

SEQ ID NO: 2205293 - RNA, 19 nt, Human
guuugaauauaaacacuau

SEQ ID NO: 2205294 - RNA, 17 nt, Human
guuugaauauaaacacu

SEQ ID NO: 2205295 - RNA, 14 nt, Human
guuugaauguuaaa

SEQ ID NO: 2205296 - RNA, 12 nt, Human
guuugaacuuca

SEQ ID NO: 2205297 - RNA, 15 nt, Human
guuugaagccugccc

SEQ ID NO: 2205298 - RNA, 21 nt, Human
guuugaagccugcccuugucu

SEQ ID NO: 2205299 - RNA, 14 nt, Human
guuugaagccugga

SEQ ID NO: 2205300 - RNA, 15 nt, Human
guuugaaggaaacag

SEQ ID NO: 2205301 - RNA, 16 nt, Human
guuugaaggaaacagu

SEQ ID NO: 2205302 - RNA, 16 nt, Human
guuugaaccaagaacu

SEQ ID NO: 2205303 - RNA, 17 nt, Human
guuucuuuguaaugaaa

SEQ ID NO: 2205304 - RNA, 23 nt, Human
guuucuuucuaguggucuuugua

SEQ ID NO: 2205305 - RNA, 14 nt, Human
guuucuuuguaaug

SEQ ID NO: 2205306 - RNA, 17 nt, Human
guuugagauggacacac

SEQ ID NO: 2205307 - RNA, 16 nt, Human
guuugagcucagaccc

SEQ ID NO: 2205308 - RNA, 20 nt, Human
guuugagcucugcagcccag

SEQ ID NO: 2205309 - RNA, 15 nt, Human
guuugagcucagacc

SEQ ID NO: 2205310 - RNA, 13 nt, Human
guuugagcucaga

SEQ ID NO: 2205311 - RNA, 23 nt, Human
guuugaggauauauuuucacuuu

SEQ ID NO: 2205312 - RNA, 18 nt, Human
guuugagcugccuucccu

SEQ ID NO: 2205313 - RNA, 23 nt, Human
guuugagcucugcagcccaggga

SEQ ID NO: 2205314 - RNA, 13 nt, Human
guuugagcugccu

SEQ ID NO: 2205315 - RNA, 14 nt, Human
guuugagcugccuu

SEQ ID NO: 2205316 - RNA, 15 nt, Human
guuugagcugccuuc

SEQ ID NO: 2205317 - RNA, 16 nt, Human
guuugaggcugcagcg

SEQ ID NO: 2205318 - RNA, 16 nt, Human
guuugagguuuuuaag

SEQ ID NO: 2205319 - RNA, 19 nt, Human
guuugagguuuuuaagccu

SEQ ID NO: 2205320 - RNA, 14 nt, Human
guuugguucugggg

SEQ ID NO: 2205321 - RNA, 20 nt, Human
guuugaugcauuaaaagaaa

SEQ ID NO: 2205322 - RNA, 22 nt, Human
guuugauuaaauucuugcaaag

SEQ ID NO: 2205323 - RNA, 19 nt, Human
guuugauuaaauucuugca

SEQ ID NO: 2205324 - RNA, 17 nt, Human
guuugauuaaauucuug

SEQ ID NO: 2205325 - RNA, 18 nt, Human
guuugucugucuucauag

SEQ ID NO: 2205326 - RNA, 15 nt, Human
guuugucugucuuca

SEQ ID NO: 2205327 - RNA, 15 nt, Human
guuugucuucucccc

SEQ ID NO: 2205328 - RNA, 16 nt, Human
guuugucuucucccca

SEQ ID NO: 2205329 - RNA, 17 nt, Human
guuugucuucuccccag

SEQ ID NO: 2205330 - RNA, 14 nt, Human
guuuguggccucag

SEQ ID NO: 2205331 - RNA, 13 nt, Human
guuuguggccuca

SEQ ID NO: 2205332 - RNA, 18 nt, Human
guuuguuccccaagacau

SEQ ID NO: 2205333 - RNA, 12 nt, Human
guuuguggccuc

SEQ ID NO: 2205334 - RNA, 13 nt, Human
guuugugcuucua

SEQ ID NO: 2205335 - RNA, 19 nt, Human
guuuguggaaaaugaaaau

SEQ ID NO: 2205336 - RNA, 17 nt, Human
guuuguaaauuaacuuu

SEQ ID NO: 2205337 - RNA, 13 nt, Human
guuuguaaaacua

SEQ ID NO: 2205338 - RNA, 19 nt, Human
guuuguaaauuaacuuuua

SEQ ID NO: 2205339 - RNA, 23 nt, Human
guuuagcagcagccuuuaaugca

SEQ ID NO: 2205340 - RNA, 20 nt, Human
guuuaggauguugaaaaagu

SEQ ID NO: 2205341 - RNA, 17 nt, Human
guuuacuuuucagggca

SEQ ID NO: 2205342 - RNA, 19 nt, Human
guuuacuuuucagggcauc

SEQ ID NO: 2205343 - RNA, 17 nt, Human
guuuagcagcagccuuu

SEQ ID NO: 2205344 - RNA, 12 nt, Human
guuuagcaaaua

SEQ ID NO: 2205345 - RNA, 16 nt, Human
guuuaguaaucauauu

SEQ ID NO: 2205346 - RNA, 21 nt, Human
guuuaggcugguggcccagga

SEQ ID NO: 2205347 - RNA, 16 nt, Human
guuuaguaaggcugug

SEQ ID NO: 2205348 - RNA, 18 nt, Human
guuuaggcugguggccca

SEQ ID NO: 2205349 - RNA, 16 nt, Human
guuuacuuaaagauuu

SEQ ID NO: 2205350 - RNA, 22 nt, Human
guuuacuuaaagauuuaucaaa

SEQ ID NO: 2205351 - RNA, 18 nt, Human
guuuacuuaucuuaugcc

SEQ ID NO: 2205352 - RNA, 14 nt, Human
guuuacuuaaagau

SEQ ID NO: 2205353 - RNA, 19 nt, Human
gguugggagaaugucagua

SEQ ID NO: 2205354 - RNA, 17 nt, Human
guuuagaaagcuugccc

SEQ ID NO: 2205355 - RNA, 13 nt, Human
guuuagaaagcuu

SEQ ID NO: 2205356 - RNA, 16 nt, Human
gguugcaaggccgcug

SEQ ID NO: 2205357 - RNA, 13 nt, Human
gguugcagggagc

SEQ ID NO: 2205358 - RNA, 21 nt, Human
gguuggccccugcccggcugc

SEQ ID NO: 2205359 - RNA, 15 nt, Human
gguuggcugggccca

SEQ ID NO: 2205360 - RNA, 11 nt, Human
gguuggcuggc

SEQ ID NO: 2205361 - RNA, 19 nt, Human
gguuggcugggcccagaag

SEQ ID NO: 2205362 - RNA, 18 nt, Human
gguuggcgcacccucccc

SEQ ID NO: 2205363 - RNA, 20 nt, Human
gguuggcgcacccuccccuc

SEQ ID NO: 2205364 - RNA, 14 nt, Human
gguugcaaccacug

SEQ ID NO: 2205365 - RNA, 14 nt, Human
gguuggcaguaagg

SEQ ID NO: 2205366 - RNA, 15 nt, Human
gguuggcgcacccuc

SEQ ID NO: 2205367 - RNA, 17 nt, Human
gguuggcgcacccuccc

SEQ ID NO: 2205368 - RNA, 20 nt, Human
guuuccagacuuccuugaga

SEQ ID NO: 2205369 - RNA, 22 nt, Human
guuuccacgaugaaaaacuucc

SEQ ID NO: 2205370 - RNA, 19 nt, Human
guuucauuucuacugugac

SEQ ID NO: 2205371 - RNA, 19 nt, Human
guuuccagacuuccuugag

SEQ ID NO: 2205372 - RNA, 16 nt, Human
guuuccaaccuggagu

SEQ ID NO: 2205373 - RNA, 16 nt, Human
guuuccacagccugca

SEQ ID NO: 2205374 - RNA, 23 nt, Human
guuuccaauguuuagcaaauaca

SEQ ID NO: 2205375 - RNA, 20 nt, Human
guuucauuuagucaugugac

SEQ ID NO: 2205376 - RNA, 21 nt, Human
guuucauuuagucaugugacc

SEQ ID NO: 2205377 - RNA, 20 nt, Human
guuucauugcgaaucuuuuu

SEQ ID NO: 2205378 - RNA, 19 nt, Human
guuucauucuccugccugu

SEQ ID NO: 2205379 - RNA, 19 nt, Human
guuucauuuagucauguga

SEQ ID NO: 2205380 - RNA, 11 nt, Human
guuucauugac

SEQ ID NO: 2205381 - RNA, 10 nt, Human
guuucaggug

SEQ ID NO: 2205382 - RNA, 19 nt, Human
guuucaggauacaugugcc

SEQ ID NO: 2205383 - RNA, 23 nt, Human
guuucaggagagaguugaaccua

SEQ ID NO: 2205384 - RNA, 22 nt, Human
guuucaggagagaguugaaccu

SEQ ID NO: 2205385 - RNA, 18 nt, Human
guuucagcgacuccguug

SEQ ID NO: 2205386 - RNA, 18 nt, Human
guuuaguaaggcugugua

SEQ ID NO: 2205387 - RNA, 16 nt, Human
guuucagauauauauc

SEQ ID NO: 2205388 - RNA, 17 nt, Human
guuucagauauauauca

SEQ ID NO: 2205389 - RNA, 21 nt, Human
guuucagauauauaucauauu

SEQ ID NO: 2205390 - RNA, 18 nt, Human
guuucagaaauguguuau

SEQ ID NO: 2205391 - RNA, 14 nt, Human
guuucagaaaugug

SEQ ID NO: 2205392 - RNA, 16 nt, Human
guuuccugcaggccag

SEQ ID NO: 2205393 - RNA, 22 nt, Human
guuuccugcccugggaggcagu

SEQ ID NO: 2205394 - RNA, 16 nt, Human
guuuccuuauauuaug

SEQ ID NO: 2205395 - RNA, 21 nt, Human
guuuccuggcacugcuuccag

SEQ ID NO: 2205396 - RNA, 22 nt, Human
guuuccuggcacugcuuccagu

SEQ ID NO: 2205397 - RNA, 14 nt, Human
guuuccugcaggcc

SEQ ID NO: 2205398 - RNA, 22 nt, Human
guuuccugaaacaacuuggaaa

SEQ ID NO: 2205399 - RNA, 13 nt, Human
guuucccauaauu

SEQ ID NO: 2205400 - RNA, 17 nt, Human
guuuccugcccugggag

SEQ ID NO: 2205401 - RNA, 13 nt, Human
guuuccugcccug

SEQ ID NO: 2205402 - RNA, 16 nt, Human
guuuccuggcacugcu

SEQ ID NO: 2205403 - RNA, 20 nt, Human
guuuccuggcacugcuucca

SEQ ID NO: 2205404 - RNA, 19 nt, Human
guuuuguggaggagcucag

SEQ ID NO: 2205405 - RNA, 18 nt, Human
guuuugugauguuugucc

SEQ ID NO: 2205406 - RNA, 24 nt, Human
guuuugucaaacuguagaaaugau

SEQ ID NO: 2205407 - RNA, 17 nt, Human
guuuugucaaacuguag

SEQ ID NO: 2205408 - RNA, 14 nt, Human
guuuugucuugaau

SEQ ID NO: 2205409 - RNA, 17 nt, Human
guuuuguuuuaaaauua

SEQ ID NO: 2205410 - RNA, 24 nt, Human
guuuugugacuauauagagauguu

SEQ ID NO: 2205411 - RNA, 19 nt, Human
guuuucucuugagagggug

SEQ ID NO: 2205412 - RNA, 12 nt, Human
guuuucucuuga

SEQ ID NO: 2205413 - RNA, 15 nt, Human
guuuuguauucucug

SEQ ID NO: 2205414 - RNA, 12 nt, Human
guuuuguauucu

SEQ ID NO: 2205415 - RNA, 19 nt, Human
guuuucucucggcucccca

SEQ ID NO: 2205416 - RNA, 17 nt, Human
guuuucugaaaauauaa

SEQ ID NO: 2205417 - RNA, 15 nt, Human
guuuuuaacucaaua

SEQ ID NO: 2205418 - RNA, 18 nt, Human
guuuuuaaauagaguuug

SEQ ID NO: 2205419 - RNA, 19 nt, Human
guuuuuaacucaauauuuu

SEQ ID NO: 2205420 - RNA, 21 nt, Human
guuuuuaccuaccacaguguc

SEQ ID NO: 2205421 - RNA, 23 nt, Human
guuuuuaaauagaguuugcuauu

SEQ ID NO: 2205422 - RNA, 16 nt, Human
guuuuuacuacaguug

SEQ ID NO: 2205423 - RNA, 22 nt, Human
guuuuuaccuaccacagugucu

SEQ ID NO: 2205424 - RNA, 17 nt, Human
guuuuuaccucugucuu

SEQ ID NO: 2205425 - RNA, 13 nt, Human
guuuuuaaaaguu

SEQ ID NO: 2205426 - RNA, 15 nt, Human
guuuuuaaaaguuuc

SEQ ID NO: 2205427 - RNA, 16 nt, Human
guuuuuaaaaguuuca

SEQ ID NO: 2205428 - RNA, 18 nt, Human
guuuuuaaaaguuucaau

SEQ ID NO: 2205429 - RNA, 17 nt, Human
guuuuuaaaauaucuuu

SEQ ID NO: 2205430 - RNA, 18 nt, Human
guuuuuauaaaaaauggu

SEQ ID NO: 2205431 - RNA, 17 nt, Human
guuuuuacuuucuguug

SEQ ID NO: 2205432 - RNA, 14 nt, Human
guuuuuacuccagu

SEQ ID NO: 2205433 - RNA, 19 nt, Human
guuuuuauggcuuuugugc

SEQ ID NO: 2205434 - RNA, 23 nt, Human
guuuuuauggcuuuugugcauua

SEQ ID NO: 2205435 - RNA, 22 nt, Human
guuuuuauggcuuuugugcauu

SEQ ID NO: 2205436 - RNA, 17 nt, Human
guuuuccuuucucaccg

SEQ ID NO: 2205437 - RNA, 19 nt, Human
guuuuccuuugucaucauu

SEQ ID NO: 2205438 - RNA, 19 nt, Human
guuuucgaagcucagccca

SEQ ID NO: 2205439 - RNA, 18 nt, Human
guuuucgaagcucagccc

SEQ ID NO: 2205440 - RNA, 17 nt, Human
guuuucgaagcucagcc

SEQ ID NO: 2205441 - RNA, 23 nt, Human
guuuucgaagcucagcccacccc

SEQ ID NO: 2205442 - RNA, 20 nt, Human
guuuucgaagcucagcccac

SEQ ID NO: 2205443 - RNA, 23 nt, Human
guuuucgcaccuaccaucaggga

SEQ ID NO: 2205444 - RNA, 17 nt, Human
guuuucucucggcuccc

SEQ ID NO: 2205445 - RNA, 21 nt, Human
guuuucuccucccaggaacug

SEQ ID NO: 2205446 - RNA, 18 nt, Human
guuuucuccucccaggaa

SEQ ID NO: 2205447 - RNA, 16 nt, Human
guuuucuccucccagg

SEQ ID NO: 2205448 - RNA, 13 nt, Human
guuuucuccuccc

SEQ ID NO: 2205449 - RNA, 16 nt, Human
guuuuccuuucucacc

SEQ ID NO: 2205450 - RNA, 16 nt, Human
guuuuccacccuggaa

SEQ ID NO: 2205451 - RNA, 14 nt, Human
guuuuccacccugg

SEQ ID NO: 2205452 - RNA, 16 nt, Human
guuuucauuugguuca

SEQ ID NO: 2205453 - RNA, 17 nt, Human
guuuucauuugguucau

SEQ ID NO: 2205454 - RNA, 23 nt, Human
guuuucauggugaaaauguacug

SEQ ID NO: 2205455 - RNA, 21 nt, Human
guuuucauggugaaaauguac

SEQ ID NO: 2205456 - RNA, 22 nt, Human
guuuucauggugaaaauguacu

SEQ ID NO: 2205457 - RNA, 10 nt, Human
guuuucaugg

SEQ ID NO: 2205458 - RNA, 16 nt, Human
guuuucauuaucucaa

SEQ ID NO: 2205459 - RNA, 16 nt, Human
guuuucaguguacaug

SEQ ID NO: 2205460 - RNA, 18 nt, Human
guuuucaggcuagaugua

SEQ ID NO: 2205461 - RNA, 17 nt, Human
guuuucaguguacaugg

SEQ ID NO: 2205462 - RNA, 22 nt, Human
guuuucauaauaaaacuuuaaa

SEQ ID NO: 2205463 - RNA, 14 nt, Human
guuuucaucaagac

SEQ ID NO: 2205464 - RNA, 14 nt, Human
guuuucauaauaaa

SEQ ID NO: 2205465 - RNA, 16 nt, Human
guuuucaguuuguaua

SEQ ID NO: 2205466 - RNA, 19 nt, Human
guuuguuggaucuucaaug

SEQ ID NO: 2205467 - RNA, 16 nt, Human
guuuguugugaggauu

SEQ ID NO: 2205468 - RNA, 20 nt, Human
guuuguuucucccccugggc

SEQ ID NO: 2205469 - RNA, 19 nt, Human
guuuguuucucccccuggg

SEQ ID NO: 2205470 - RNA, 21 nt, Human
guuuguuucucccccugggcu

SEQ ID NO: 2205471 - RNA, 24 nt, Human
guuuucaggaguggguugauuuca

SEQ ID NO: 2205472 - RNA, 18 nt, Human
guuuguuucucccccugg

SEQ ID NO: 2205473 - RNA, 10 nt, Human
guuuguuuca

SEQ ID NO: 2205474 - RNA, 17 nt, Human
uaaaaaaauuuaagugc

SEQ ID NO: 2205475 - RNA, 11 nt, Human
uaaaaaacaac

SEQ ID NO: 2205476 - RNA, 19 nt, Human
uaaaaaacaaagaagacaa

SEQ ID NO: 2205477 - RNA, 14 nt, Human
uaaaaaacaaagaa

SEQ ID NO: 2205478 - RNA, 12 nt, Human
uaaaaaacacug

SEQ ID NO: 2205479 - RNA, 23 nt, Human
uaaaaaacugcugacuguuuucu

SEQ ID NO: 2205480 - RNA, 20 nt, Human
uaaaaaacugcugacuguuu

SEQ ID NO: 2205481 - RNA, 15 nt, Human
uaaaaaagcugugug

SEQ ID NO: 2205482 - RNA, 19 nt, Human
uaaaaaagauauauuaaaa

SEQ ID NO: 2205483 - RNA, 15 nt, Human
uaaaaaacuuguaaa

SEQ ID NO: 2205484 - RNA, 21 nt, Human
uaaaaaacuaucuuuuugcuu

SEQ ID NO: 2205485 - RNA, 16 nt, Human
uaaaaaagaaacauuu

SEQ ID NO: 2205486 - RNA, 22 nt, Human
uaaaaacagcauugcuuucuga

SEQ ID NO: 2205487 - RNA, 20 nt, Human
uaaaaacagcauugcuuucu

SEQ ID NO: 2205488 - RNA, 14 nt, Human
uaaaaaccaagaag

SEQ ID NO: 2205489 - RNA, 17 nt, Human
uaaaaacuauuuaacuu

SEQ ID NO: 2205490 - RNA, 17 nt, Human
uaaaaacugacuccuua

SEQ ID NO: 2205491 - RNA, 16 nt, Human
uaaaaacugacuccuu

SEQ ID NO: 2205492 - RNA, 14 nt, Human
uaaaaacuuugcua

SEQ ID NO: 2205493 - RNA, 11 nt, Human
uaaaaaugcaa

SEQ ID NO: 2205494 - RNA, 17 nt, Human
uaaaaagaaaagauaaa

SEQ ID NO: 2205495 - RNA, 23 nt, Human
uaaaaagaaaagauaaagaugau

SEQ ID NO: 2205496 - RNA, 17 nt, Human
uaaaaacagcauugcuu

SEQ ID NO: 2205497 - RNA, 19 nt, Human
uaaaaacagcauugcuuuc

SEQ ID NO: 2205498 - RNA, 18 nt, Human
uaaaaacagcauugcuuu

SEQ ID NO: 2205499 - RNA, 13 nt, Human
uaaaaaaugucca

SEQ ID NO: 2205500 - RNA, 10 nt, Human
uaaaaacaaa

SEQ ID NO: 2205501 - RNA, 17 nt, Human
uaaaaaauaaucuauuu

SEQ ID NO: 2205502 - RNA, 15 nt, Human
uaaaaaauggaaaga

SEQ ID NO: 2205503 - RNA, 15 nt, Human
uaaaaaauggugccu

SEQ ID NO: 2205504 - RNA, 17 nt, Human
uaaaaaauggugccuga

SEQ ID NO: 2205505 - RNA, 17 nt, Human
uaaaaaaauaaaacauu

SEQ ID NO: 2205506 - RNA, 18 nt, Human
uaaaaaaaggcauuguuu

SEQ ID NO: 2205507 - RNA, 18 nt, Human
uaaaaaaauaaaacauuu

SEQ ID NO: 2205508 - RNA, 19 nt, Human
uaaaaaaauaaaacauuuu

SEQ ID NO: 2205509 - RNA, 13 nt, Human
uaaaaaaaugaca

SEQ ID NO: 2205510 - RNA, 20 nt, Human
uaaaaaaauaauaauaaugu

SEQ ID NO: 2205511 - RNA, 13 nt, Human
uaaaaaaauuggu

SEQ ID NO: 2205512 - RNA, 12 nt, Human
uaaaaaaauuua

SEQ ID NO: 2205513 - RNA, 15 nt, Human
uaaaaaaauuuaagu

SEQ ID NO: 2205514 - RNA, 16 nt, Human
uaaaaaaauuuaagug

SEQ ID NO: 2205515 - RNA, 11 nt, Human
uaaaaaacacu

SEQ ID NO: 2205516 - RNA, 12 nt, Human
uaaaaaaaagaa

SEQ ID NO: 2205517 - RNA, 14 nt, Human
uaaaaaaaagaaaa

SEQ ID NO: 2205518 - RNA, 11 nt, Human
uaaaaaaaaga

SEQ ID NO: 2205519 - RNA, 22 nt, Human
uaaaaaaaacaaaaagaacaaa

SEQ ID NO: 2205520 - RNA, 18 nt, Human
uaaaaaaaaaugccuuug

SEQ ID NO: 2205521 - RNA, 17 nt, Human
uaaaaaaaaaugccuuu

SEQ ID NO: 2205522 - RNA, 13 nt, Human
uaaaaaaaacaaa

SEQ ID NO: 2205523 - RNA, 17 nt, Human
uaaaaaaaacaaaaaga

SEQ ID NO: 2205524 - RNA, 18 nt, Human
uaaaaaaaacaaaaagaa

SEQ ID NO: 2205525 - RNA, 19 nt, Human
uaaaaaaaacaaaaagaac

SEQ ID NO: 2205526 - RNA, 21 nt, Human
uaaaaaaaacaaaaagaacaa

SEQ ID NO: 2205527 - RNA, 17 nt, Human
uaaaaaaaagaaaaaag

SEQ ID NO: 2205528 - RNA, 16 nt, Human
uaaaaaaaagaaaaaa

SEQ ID NO: 2205529 - RNA, 15 nt, Human
uaaaaaaaagaaaaa

SEQ ID NO: 2205530 - RNA, 21 nt, Human
uaaaaaaacaaucauuugcuu

SEQ ID NO: 2205531 - RNA, 14 nt, Human
uaaaaaaaauaguu

SEQ ID NO: 2205532 - RNA, 16 nt, Human
uaaaaaaaauaguuga

SEQ ID NO: 2205533 - RNA, 23 nt, Human
uaaaaaaaauaguugagccagca

SEQ ID NO: 2205534 - RNA, 12 nt, Human
guuuuucaguuu

SEQ ID NO: 2205535 - RNA, 23 nt, Human
guuuuucaauuaaacggauuauu

SEQ ID NO: 2205536 - RNA, 19 nt, Human
uaaaaaaaaagaucuguuu

SEQ ID NO: 2205537 - RNA, 14 nt, Human
uaaaaaaaaaggca

SEQ ID NO: 2205538 - RNA, 16 nt, Human
uaaaaaaaaaggcaua

SEQ ID NO: 2205539 - RNA, 22 nt, Human
uaaaaaaaaaggcauauugcuu

SEQ ID NO: 2205540 - RNA, 15 nt, Human
uaaaaaaaaaugccu

SEQ ID NO: 2205541 - RNA, 16 nt, Human
uaaaaaaaaaugccuu

SEQ ID NO: 2205542 - RNA, 16 nt, Human
guuuuucacauuuucc

SEQ ID NO: 2205543 - RNA, 14 nt, Human
guuuuucacauuuu

SEQ ID NO: 2205544 - RNA, 12 nt, Human
guuuuucacauu

SEQ ID NO: 2205545 - RNA, 13 nt, Human
guuuuucaauuaa

SEQ ID NO: 2205546 - RNA, 14 nt, Human
guuuuucaauuaaa

SEQ ID NO: 2205547 - RNA, 15 nt, Human
guuuuucaauuaaac

SEQ ID NO: 2205548 - RNA, 16 nt, Human
guuuuucaauuaaacg

SEQ ID NO: 2205549 - RNA, 17 nt, Human
guuuuucaauuaaacgg

SEQ ID NO: 2205550 - RNA, 18 nt, Human
guuuuucaauuaaacgga

SEQ ID NO: 2205551 - RNA, 19 nt, Human
guuuuucaauuaaacggau

SEQ ID NO: 2205552 - RNA, 21 nt, Human
guuuuucaauuaaacggauua

SEQ ID NO: 2205553 - RNA, 18 nt, Human
guuuuuauggggcugaac

SEQ ID NO: 2205554 - RNA, 16 nt, Human
guuuuuauggggcuga

SEQ ID NO: 2205555 - RNA, 21 nt, Human
guuuuuaugaagaaaaaauac

SEQ ID NO: 2205556 - RNA, 23 nt, Human
guuuuuauaaaaaauggugccug

SEQ ID NO: 2205557 - RNA, 16 nt, Human
guuuuuauuccuugug

SEQ ID NO: 2205558 - RNA, 14 nt, Human
guuuuuauuaguac

SEQ ID NO: 2205559 - RNA, 12 nt, Human
guuuuucaauua

SEQ ID NO: 2205560 - RNA, 18 nt, Human
uaaaaucuuucuuucuua

SEQ ID NO: 2205561 - RNA, 19 nt, Human
uaaaaucuuucuuucuuag

SEQ ID NO: 2205562 - RNA, 20 nt, Human
uaaaaucuuucuuucuuaga

SEQ ID NO: 2205563 - RNA, 21 nt, Human
uaaaaucuuucuuucuuagaa

SEQ ID NO: 2205564 - RNA, 22 nt, Human
uaaaaucuuucuuucuuagaaa

SEQ ID NO: 2205565 - RNA, 14 nt, Human
uaaaaugaaauuac

SEQ ID NO: 2205566 - RNA, 15 nt, Human
uaaaaucuuuucuau

SEQ ID NO: 2205567 - RNA, 13 nt, Human
uaaaaugagaaau

SEQ ID NO: 2205568 - RNA, 20 nt, Human
uaaaaugagguucaacuguu

SEQ ID NO: 2205569 - RNA, 14 nt, Human
uaaaaugauuguaa

SEQ ID NO: 2205570 - RNA, 15 nt, Human
uaaaaugauuguaaa

SEQ ID NO: 2205571 - RNA, 16 nt, Human
uaaaaugauuguaaaa

SEQ ID NO: 2205572 - RNA, 17 nt, Human
uaaaaugauuguaaaau

SEQ ID NO: 2205573 - RNA, 18 nt, Human
uaaaaugauuguaaaaua

SEQ ID NO: 2205574 - RNA, 20 nt, Human
uaaaaugauuguaaaauagc

SEQ ID NO: 2205575 - RNA, 21 nt, Human
uaaaaugaccaguaauuguga

SEQ ID NO: 2205576 - RNA, 17 nt, Human
uaaaaugaggacauguu

SEQ ID NO: 2205577 - RNA, 15 nt, Human
uaaaaugagaaaucu

SEQ ID NO: 2205578 - RNA, 16 nt, Human
uaaaaugagaaaucua

SEQ ID NO: 2205579 - RNA, 15 nt, Human
uaaaauccucaaucc

SEQ ID NO: 2205580 - RNA, 21 nt, Human
uaaaaucagccaauuauguua

SEQ ID NO: 2205581 - RNA, 22 nt, Human
uaaaaucagccaauuauguuaa

SEQ ID NO: 2205582 - RNA, 19 nt, Human
uaaaauccauacauuugug

SEQ ID NO: 2205583 - RNA, 18 nt, Human
uaaaauccauacauuugu

SEQ ID NO: 2205584 - RNA, 20 nt, Human
uaaaauauuuugaaucaaua

SEQ ID NO: 2205585 - RNA, 17 nt, Human
uaaaauauuuuugaaag

SEQ ID NO: 2205586 - RNA, 13 nt, Human
uaaaaucagccaa

SEQ ID NO: 2205587 - RNA, 14 nt, Human
uaaaaucagccaau

SEQ ID NO: 2205588 - RNA, 15 nt, Human
uaaaaucagccaauu

SEQ ID NO: 2205589 - RNA, 17 nt, Human
uaaaaucagccaauuau

SEQ ID NO: 2205590 - RNA, 13 nt, Human
uaaaauauuuauu

SEQ ID NO: 2205591 - RNA, 14 nt, Human
uaaaauauuuugaa

SEQ ID NO: 2205592 - RNA, 16 nt, Human
uaaaauauuuugaauc

SEQ ID NO: 2205593 - RNA, 13 nt, Human
uaaaauauuuuca

SEQ ID NO: 2205594 - RNA, 18 nt, Human
uaaaagcauaaaugcaaa

SEQ ID NO: 2205595 - RNA, 17 nt, Human
uaaaagcauaaaugcaa

SEQ ID NO: 2205596 - RNA, 14 nt, Human
uaaaaggaaaagca

SEQ ID NO: 2205597 - RNA, 16 nt, Human
uaaaaggaaaagcaaa

SEQ ID NO: 2205598 - RNA, 17 nt, Human
uaaaagggacugagaaa

SEQ ID NO: 2205599 - RNA, 19 nt, Human
uaaaagggacugagaaauu

SEQ ID NO: 2205600 - RNA, 20 nt, Human
uaaaagggacugagaaauuu

SEQ ID NO: 2205601 - RNA, 21 nt, Human
uaaaagggacugagaaauuua

SEQ ID NO: 2205602 - RNA, 15 nt, Human
uaaaagcauaaaugc

SEQ ID NO: 2205603 - RNA, 22 nt, Human
uaaaagauggggucuguaaaau

SEQ ID NO: 2205604 - RNA, 20 nt, Human
uaaaagauggggucuguaaa

SEQ ID NO: 2205605 - RNA, 21 nt, Human
uaaaagauggggucuguaaaa

SEQ ID NO: 2205606 - RNA, 18 nt, Human
uaaaagauggggucugua

SEQ ID NO: 2205607 - RNA, 19 nt, Human
uaaaagauggggucuguaa

SEQ ID NO: 2205608 - RNA, 16 nt, Human
uaaaagaugcaaugua

SEQ ID NO: 2205609 - RNA, 14 nt, Human
uaaaagauccuuuu

SEQ ID NO: 2205610 - RNA, 14 nt, Human
uaaaagaugaaaau

SEQ ID NO: 2205611 - RNA, 13 nt, Human
uaaaagaucgcag

SEQ ID NO: 2205612 - RNA, 22 nt, Human
uaaaagauauaagugcuguaua

SEQ ID NO: 2205613 - RNA, 15 nt, Human
uaaaaaugguuuaaa

SEQ ID NO: 2205614 - RNA, 19 nt, Human
uaaaaauggcucagaugcc

SEQ ID NO: 2205615 - RNA, 17 nt, Human
uaaaaaugggacuucuu

SEQ ID NO: 2205616 - RNA, 18 nt, Human
uaaaaaugggacuucuuu

SEQ ID NO: 2205617 - RNA, 19 nt, Human
uaaaaaugggacuucuuuu

SEQ ID NO: 2205618 - RNA, 20 nt, Human
uaaaaaugggacuucuuuuc

SEQ ID NO: 2205619 - RNA, 23 nt, Human
uaaaaaugggacuucuuuucaca

SEQ ID NO: 2205620 - RNA, 16 nt, Human
uaaaaaugcaaauccu

SEQ ID NO: 2205621 - RNA, 20 nt, Human
uaaaaaugcaaauccuaugu

SEQ ID NO: 2205622 - RNA, 19 nt, Human
uaaaaaugcaaauccuaug

SEQ ID NO: 2205623 - RNA, 19 nt, Human
uaaacaaauguaugauuac

SEQ ID NO: 2205624 - RNA, 17 nt, Human
uaaacaaauucauauuc

SEQ ID NO: 2205625 - RNA, 19 nt, Human
uaaacaaauucauauucug

SEQ ID NO: 2205626 - RNA, 21 nt, Human
uaaacaaauucauauucuguc

SEQ ID NO: 2205627 - RNA, 22 nt, Human
uaaacaaauucauauucugucu

SEQ ID NO: 2205628 - RNA, 18 nt, Human
uaaacaagaccacguuuc

SEQ ID NO: 2205629 - RNA, 12 nt, Human
uaaacaaaugua

SEQ ID NO: 2205630 - RNA, 18 nt, Human
uaaaaugcaacaugugua

SEQ ID NO: 2205631 - RNA, 19 nt, Human
uaaaaugcaugauuuugua

SEQ ID NO: 2205632 - RNA, 16 nt, Human
uaaaaugcaugauuuu

SEQ ID NO: 2205633 - RNA, 21 nt, Human
uaaaaugccucaguguauuug

SEQ ID NO: 2205634 - RNA, 17 nt, Human
uaaaaugccucagugua

SEQ ID NO: 2205635 - RNA, 20 nt, Human
uaaaaugccucaguguauuu

SEQ ID NO: 2205636 - RNA, 17 nt, Human
uaaaaugcaacaugugu

SEQ ID NO: 2205637 - RNA, 20 nt, Human
uaaaaugcaacauguguacu

SEQ ID NO: 2205638 - RNA, 18 nt, Human
uaaaaugauuuuaucugu

SEQ ID NO: 2205639 - RNA, 15 nt, Human
uaaaaugauuuuauc

SEQ ID NO: 2205640 - RNA, 17 nt, Human
uaaaaugauuuuaucug

SEQ ID NO: 2205641 - RNA, 22 nt, Human
uaaaaugauuguaaaauagcuu

SEQ ID NO: 2205642 - RNA, 14 nt, Human
uaaaaugauuuuau

SEQ ID NO: 2205643 - RNA, 18 nt, Human
uaaacaauaucagacuuu

SEQ ID NO: 2205644 - RNA, 21 nt, Human
uaaacaaugcugauuugguga

SEQ ID NO: 2205645 - RNA, 20 nt, Human
uaaacaagauuuuaaagaca

SEQ ID NO: 2205646 - RNA, 21 nt, Human
uaaacaagauuuuaaagacau

SEQ ID NO: 2205647 - RNA, 20 nt, Human
uaaacaagaaucagucuauc

SEQ ID NO: 2205648 - RNA, 15 nt, Human
uaaacaagauuuuaa

SEQ ID NO: 2205649 - RNA, 23 nt, Human
uaaacaagaccacguuucuaaag

SEQ ID NO: 2205650 - RNA, 21 nt, Human
uaaacacucuugaaaaaugca

SEQ ID NO: 2205651 - RNA, 11 nt, Human
uaaacacugug

SEQ ID NO: 2205652 - RNA, 23 nt, Human
uaaacagacuauuuaacuugagg

SEQ ID NO: 2205653 - RNA, 21 nt, Human
uaaacagauauaaauggcugg

SEQ ID NO: 2205654 - RNA, 16 nt, Human
uaaacagauauaaaug

SEQ ID NO: 2205655 - RNA, 12 nt, Human
uaaacagugccu

SEQ ID NO: 2205656 - RNA, 23 nt, Human
uaaacagugagccugaauuuugu

SEQ ID NO: 2205657 - RNA, 20 nt, Human
uaaacagugagccugaauuu

SEQ ID NO: 2205658 - RNA, 20 nt, Human
uaaacagggcaucuccagga

SEQ ID NO: 2205659 - RNA, 18 nt, Human
uaaacagugccugcugaa

SEQ ID NO: 2205660 - RNA, 13 nt, Human
uaaacaguucuug

SEQ ID NO: 2205661 - RNA, 17 nt, Human
uaaacagugccugcuga

SEQ ID NO: 2205662 - RNA, 13 nt, Human
uaaacagugccug

SEQ ID NO: 2205663 - RNA, 18 nt, Human
uaaacaggagacaggaag

SEQ ID NO: 2205664 - RNA, 12 nt, Human
uaaacaggccca

SEQ ID NO: 2205665 - RNA, 13 nt, Human
uaaacaggcccag

SEQ ID NO: 2205666 - RNA, 14 nt, Human
uaaacaggcccagc

SEQ ID NO: 2205667 - RNA, 15 nt, Human
uaaacaggcccagca

SEQ ID NO: 2205668 - RNA, 23 nt, Human
uaaacaggcccagcauugcuggu

SEQ ID NO: 2205669 - RNA, 19 nt, Human
uaaacagggcaucuccagg

SEQ ID NO: 2205670 - RNA, 15 nt, Human
uaaacagauuuuuac

SEQ ID NO: 2205671 - RNA, 18 nt, Human
uaaacagauuuuuacaaa

SEQ ID NO: 2205672 - RNA, 19 nt, Human
uaaacagauuuuuacaaau

SEQ ID NO: 2205673 - RNA, 20 nt, Human
uaaacagauuuuuacaaaug

SEQ ID NO: 2205674 - RNA, 13 nt, Human
uaaacagcagugu

SEQ ID NO: 2205675 - RNA, 17 nt, Human
uaaacagcaguguuccc

SEQ ID NO: 2205676 - RNA, 22 nt, Human
uaaacagcaguguuccccaucu

SEQ ID NO: 2205677 - RNA, 20 nt, Human
uaaacugguauuuuaucuuu

SEQ ID NO: 2205678 - RNA, 23 nt, Human
uaaacugcccccucugcccugcg

SEQ ID NO: 2205679 - RNA, 22 nt, Human
uaaacugcccccucugcccugc

SEQ ID NO: 2205680 - RNA, 15 nt, Human
uaaacauaauucuug

SEQ ID NO: 2205681 - RNA, 20 nt, Human
uaaacauaauucuuguauau

SEQ ID NO: 2205682 - RNA, 17 nt, Human
uaaacauaaauaaauau

SEQ ID NO: 2205683 - RNA, 21 nt, Human
uaaacugcccccucugcccug

SEQ ID NO: 2205684 - RNA, 20 nt, Human
uaaacugcccccucugcccu

SEQ ID NO: 2205685 - RNA, 18 nt, Human
uaaacuuuagaguagcau

SEQ ID NO: 2205686 - RNA, 15 nt, Human
uaaacuuagaauaaa

SEQ ID NO: 2205687 - RNA, 13 nt, Human
uaaacuuucacac

SEQ ID NO: 2205688 - RNA, 12 nt, Human
uaaacuuucaca

SEQ ID NO: 2205689 - RNA, 22 nt, Human
uaaacuuuaccuuuuuuauaca

SEQ ID NO: 2205690 - RNA, 20 nt, Human
uaaacuuuacccaaaaacua

SEQ ID NO: 2205691 - RNA, 16 nt, Human
uaaacuuuaccuuuuu

SEQ ID NO: 2205692 - RNA, 19 nt, Human
uaaacuuaaucuaaaugga

SEQ ID NO: 2205693 - RNA, 18 nt, Human
uaaacuuaaucuaaaugg

SEQ ID NO: 2205694 - RNA, 13 nt, Human
uaaacuuaaucua

SEQ ID NO: 2205695 - RNA, 14 nt, Human
uaaacuuaaucuaa

SEQ ID NO: 2205696 - RNA, 10 nt, Human
uaaauauuua

SEQ ID NO: 2205697 - RNA, 17 nt, Human
uaaauauuuauguagau

SEQ ID NO: 2205698 - RNA, 16 nt, Human
uaaauauuuauguaga

SEQ ID NO: 2205699 - RNA, 21 nt, Human
uaaauauuuacauaugaaauu

SEQ ID NO: 2205700 - RNA, 19 nt, Human
uaaauauuuacauaugaaa

SEQ ID NO: 2205701 - RNA, 18 nt, Human
uaaauauuuacauaugaa

SEQ ID NO: 2205702 - RNA, 17 nt, Human
uaaauauuuacauauga

SEQ ID NO: 2205703 - RNA, 11 nt, Human
uaaauauuuac

SEQ ID NO: 2205704 - RNA, 15 nt, Human
uaaauauuuccuuaa

SEQ ID NO: 2205705 - RNA, 14 nt, Human
uaaauauuuccuua

SEQ ID NO: 2205706 - RNA, 13 nt, Human
uaaauauuuccuu

SEQ ID NO: 2205707 - RNA, 12 nt, Human
uaaauauuuccu

SEQ ID NO: 2205708 - RNA, 14 nt, Human
uaaauauuucaaga

SEQ ID NO: 2205709 - RNA, 12 nt, Human
uaaauauuucaa

SEQ ID NO: 2205710 - RNA, 13 nt, Human
uaaauauuucaag

SEQ ID NO: 2205711 - RNA, 18 nt, Human
uaaauauguuagcaaaga

SEQ ID NO: 2205712 - RNA, 21 nt, Human
uaaauauguuagcaaagaguu

SEQ ID NO: 2205713 - RNA, 21 nt, Human
uaaauaugccucuccuuugua

SEQ ID NO: 2205714 - RNA, 23 nt, Human
uaaauaugccucuccuuuguaua

SEQ ID NO: 2205715 - RNA, 14 nt, Human
uaaauaugcaguga

SEQ ID NO: 2205716 - RNA, 16 nt, Human
uaaauaugcagugaua

SEQ ID NO: 2205717 - RNA, 17 nt, Human
uaaauaugcagugauau

SEQ ID NO: 2205718 - RNA, 19 nt, Human
uaaauaugccucuccuuug

SEQ ID NO: 2205719 - RNA, 13 nt, Human
uaaauauucuaua

SEQ ID NO: 2205720 - RNA, 18 nt, Human
uaaauauguuuuuuagau

SEQ ID NO: 2205721 - RNA, 19 nt, Human
uaaauauucuauuuucauu

SEQ ID NO: 2205722 - RNA, 15 nt, Human
uaaauauucuauaug

SEQ ID NO: 2205723 - RNA, 19 nt, Human
uaaauauucuauaugaauu

SEQ ID NO: 2205724 - RNA, 19 nt, Human
uaaaucagccguguaacca

SEQ ID NO: 2205725 - RNA, 20 nt, Human
uaaaucagacuaugaaguuu

SEQ ID NO: 2205726 - RNA, 14 nt, Human
uaaaucaaugucac

SEQ ID NO: 2205727 - RNA, 13 nt, Human
uaaaucaauaaag

SEQ ID NO: 2205728 - RNA, 23 nt, Human
uaaaucaaugucacuuaaaggcu

SEQ ID NO: 2205729 - RNA, 19 nt, Human
uaaaucaaguuggcuucua

SEQ ID NO: 2205730 - RNA, 22 nt, Human
uaaauauuuuuucuuuucuauu

SEQ ID NO: 2205731 - RNA, 14 nt, Human
uaaaucauuaauac

SEQ ID NO: 2205732 - RNA, 11 nt, Human
uaaaucagugg

SEQ ID NO: 2205733 - RNA, 22 nt, Human
uaaauaucuguacuucuucgau

SEQ ID NO: 2205734 - RNA, 13 nt, Human
uaaauaugcagug

SEQ ID NO: 2205735 - RNA, 19 nt, Human
uaaauaugaagcucaccug

SEQ ID NO: 2205736 - RNA, 18 nt, Human
uaaauaucuucugauuug

SEQ ID NO: 2205737 - RNA, 17 nt, Human
uaaauaucuucugauuu

SEQ ID NO: 2205738 - RNA, 16 nt, Human
uaaauauauuuuaaga

SEQ ID NO: 2205739 - RNA, 22 nt, Human
uaaauauauuuuaagacgaaac

SEQ ID NO: 2205740 - RNA, 21 nt, Human
uaaauauauauauauauaaaa

SEQ ID NO: 2205741 - RNA, 21 nt, Human
uaaauauaucuauauuauugu

SEQ ID NO: 2205742 - RNA, 17 nt, Human
uaaauauauuuaagaua

SEQ ID NO: 2205743 - RNA, 22 nt, Human
uaaauauauuuaagauaauuau

SEQ ID NO: 2205744 - RNA, 18 nt, Human
uaaauauaugcuaagucu

SEQ ID NO: 2205745 - RNA, 19 nt, Human
uaaauaaaagugaucaaua

SEQ ID NO: 2205746 - RNA, 20 nt, Human
uaaauaaaagcagcaucugc

SEQ ID NO: 2205747 - RNA, 19 nt, Human
uaaauaaaagcagcaucug

SEQ ID NO: 2205748 - RNA, 15 nt, Human
uaaauaaaagcagca

SEQ ID NO: 2205749 - RNA, 21 nt, Human
uaaauaaaagaaaaaauaucu

SEQ ID NO: 2205750 - RNA, 14 nt, Human
uaaauaaaagcagc

SEQ ID NO: 2205751 - RNA, 17 nt, Human
uaaauaaaagugaucaa

SEQ ID NO: 2205752 - RNA, 13 nt, Human
uaaauaaaaugac

SEQ ID NO: 2205753 - RNA, 15 nt, Human
uaaauaaaaugacca

SEQ ID NO: 2205754 - RNA, 13 nt, Human
uaaauaaacccuu

SEQ ID NO: 2205755 - RNA, 22 nt, Human
uaaauaaaccucaaaaugucua

SEQ ID NO: 2205756 - RNA, 13 nt, Human
uaaauaaaauuug

SEQ ID NO: 2205757 - RNA, 14 nt, Human
uaaauaaaauuugu

SEQ ID NO: 2205758 - RNA, 20 nt, Human
uaaauaaaauuuguugcaua

SEQ ID NO: 2205759 - RNA, 12 nt, Human
uaaauauauaaa

SEQ ID NO: 2205760 - RNA, 14 nt, Human
uaaauauauaaaaa

SEQ ID NO: 2205761 - RNA, 13 nt, Human
uaaauauauaaau

SEQ ID NO: 2205762 - RNA, 15 nt, Human
uaaauauauaaauau

SEQ ID NO: 2205763 - RNA, 16 nt, Human
uaaauauauaaauaua

SEQ ID NO: 2205764 - RNA, 17 nt, Human
uaaauauauaaauauau

SEQ ID NO: 2205765 - RNA, 11 nt, Human
uaaauauauau

SEQ ID NO: 2205766 - RNA, 13 nt, Human
uaaauauauauaa

SEQ ID NO: 2205767 - RNA, 19 nt, Human
uaaauauauauaaauauau

SEQ ID NO: 2205768 - RNA, 21 nt, Human
uaaauauauauaaauauauau

SEQ ID NO: 2205769 - RNA, 14 nt, Human
uaaauauauauaaa

SEQ ID NO: 2205770 - RNA, 15 nt, Human
uaaauauauauaaac

SEQ ID NO: 2205771 - RNA, 17 nt, Human
uaaauauauauaaaccu

SEQ ID NO: 2205772 - RNA, 18 nt, Human
uaaauauauauaaaccua

SEQ ID NO: 2205773 - RNA, 19 nt, Human
uaaauauauauaaaccuaa

SEQ ID NO: 2205774 - RNA, 17 nt, Human
uaaauauauauaaauau

SEQ ID NO: 2205775 - RNA, 18 nt, Human
uaaauauauauaaauaua

SEQ ID NO: 2205776 - RNA, 22 nt, Human
uaaauaaaacauuuucacacaa

SEQ ID NO: 2205777 - RNA, 21 nt, Human
uaaauaaaacauuuucacaca

SEQ ID NO: 2205778 - RNA, 14 nt, Human
uaaauaaaacccuu

SEQ ID NO: 2205779 - RNA, 13 nt, Human
uaaauaaaagaaa

SEQ ID NO: 2205780 - RNA, 14 nt, Human
uaaauaaaaaugga

SEQ ID NO: 2205781 - RNA, 17 nt, Human
uaaauaaaaauaauccu

SEQ ID NO: 2205782 - RNA, 13 nt, Human
uaaaguuucuguu

SEQ ID NO: 2205783 - RNA, 20 nt, Human
uaaaguugaagcuaagauuu

SEQ ID NO: 2205784 - RNA, 17 nt, Human
uaaaguguccauugaca

SEQ ID NO: 2205785 - RNA, 13 nt, Human
uaaaguuucucag

SEQ ID NO: 2205786 - RNA, 14 nt, Human
uaaaguuucucaga

SEQ ID NO: 2205787 - RNA, 14 nt, Human
uaaaguuuguugaa

SEQ ID NO: 2205788 - RNA, 17 nt, Human
uaaaguuugcuuagaaa

SEQ ID NO: 2205789 - RNA, 14 nt, Human
uaaaguuugcuuag

SEQ ID NO: 2205790 - RNA, 20 nt, Human
uaaaguguauuuuuuuacua

SEQ ID NO: 2205791 - RNA, 21 nt, Human
uaaaguguauuuuuuuacuaa

SEQ ID NO: 2205792 - RNA, 22 nt, Human
uaaaggaugugauuguggaaug

SEQ ID NO: 2205793 - RNA, 16 nt, Human
uaaaggaugugauugu

SEQ ID NO: 2205794 - RNA, 19 nt, Human
uaaaggcaccaucuaauag

SEQ ID NO: 2205795 - RNA, 17 nt, Human
uaaaggauguugguguu

SEQ ID NO: 2205796 - RNA, 23 nt, Human
uaaaguguauuuuuuuacuaaua

SEQ ID NO: 2205797 - RNA, 22 nt, Human
uaaaguguauuuuuuuacuaau

SEQ ID NO: 2205798 - RNA, 14 nt, Human
uaaagcuagaaaug

SEQ ID NO: 2205799 - RNA, 20 nt, Human
uaaagcuaaaaugauuuuau

SEQ ID NO: 2205800 - RNA, 23 nt, Human
uaaagcuaaaaugauuuuaucug

SEQ ID NO: 2205801 - RNA, 19 nt, Human
uaaagcuacugauuuccuu

SEQ ID NO: 2205802 - RNA, 17 nt, Human
uaaagcucgaaaacaau

SEQ ID NO: 2205803 - RNA, 14 nt, Human
uaaaggaauuuaaa

SEQ ID NO: 2205804 - RNA, 19 nt, Human
uaaacuuagaauaaaauug

SEQ ID NO: 2205805 - RNA, 16 nt, Human
uaaaggaguuaagagu

SEQ ID NO: 2205806 - RNA, 22 nt, Human
uaaaggagaaggcaugaaauug

SEQ ID NO: 2205807 - RNA, 20 nt, Human
uaaaggaguuaagaguagca

SEQ ID NO: 2205808 - RNA, 17 nt, Human
uaaaggagaaggcauga

SEQ ID NO: 2205809 - RNA, 18 nt, Human
uaaagcucgaaaacaauu

SEQ ID NO: 2205810 - RNA, 15 nt, Human
uaaagcuagaaauga

SEQ ID NO: 2205811 - RNA, 15 nt, Human
uaaagcuaaaauaac

SEQ ID NO: 2205812 - RNA, 16 nt, Human
uaaagccugcuuuuua

SEQ ID NO: 2205813 - RNA, 13 nt, Human
uaaagcauuuaua

SEQ ID NO: 2205814 - RNA, 21 nt, Human
uaaagccugcuuuuuaagugu

SEQ ID NO: 2205815 - RNA, 20 nt, Human
uaaagccuguauucucaaac

SEQ ID NO: 2205816 - RNA, 12 nt, Human
uaaagcauuuau

SEQ ID NO: 2205817 - RNA, 13 nt, Human
uaaagcaguggac

SEQ ID NO: 2205818 - RNA, 19 nt, Human
uaaagcaguggacaccagg

SEQ ID NO: 2205819 - RNA, 22 nt, Human
uaaagcaugaaugguauggaac

SEQ ID NO: 2205820 - RNA, 23 nt, Human
uaaagcauucaauuuauucaaga

SEQ ID NO: 2205821 - RNA, 12 nt, Human
uaaagcauucca

SEQ ID NO: 2205822 - RNA, 13 nt, Human
uaaagcauuccaa

SEQ ID NO: 2205823 - RNA, 15 nt, Human
uaaagcauuccaaca

SEQ ID NO: 2205824 - RNA, 16 nt, Human
uaaagcauuccaacaa

SEQ ID NO: 2205825 - RNA, 20 nt, Human
uaaacuuuuuucuuacuguc

SEQ ID NO: 2205826 - RNA, 19 nt, Human
uaaccacaaagcacaguuu

SEQ ID NO: 2205827 - RNA, 23 nt, Human
uaaccacaaagcacaguuugaac

SEQ ID NO: 2205828 - RNA, 18 nt, Human
uaaccacaucaauauugu

SEQ ID NO: 2205829 - RNA, 21 nt, Human
uaaccaccuaccuuacaguga

SEQ ID NO: 2205830 - RNA, 22 nt, Human
uaaccacaucaauauugucauu

SEQ ID NO: 2205831 - RNA, 24 nt, Human
uaaccacaucaauauugucauucc

SEQ ID NO: 2205832 - RNA, 14 nt, Human
uaaccagcagaaau

SEQ ID NO: 2205833 - RNA, 13 nt, Human
uaaccacggaaaa

SEQ ID NO: 2205834 - RNA, 15 nt, Human
uaaccagcuguaaca

SEQ ID NO: 2205835 - RNA, 20 nt, Human
uaaccagccagauccucuug

SEQ ID NO: 2205836 - RNA, 20 nt, Human
uaacccuuugguuuuuuucu

SEQ ID NO: 2205837 - RNA, 19 nt, Human
uaaccagcagaaaugccuu

SEQ ID NO: 2205838 - RNA, 16 nt, Human
uaaccagcagaaaugc

SEQ ID NO: 2205839 - RNA, 21 nt, Human
uaaccaaaggugaaggaauau

SEQ ID NO: 2205840 - RNA, 11 nt, Human
uaaccaaaggu

SEQ ID NO: 2205841 - RNA, 17 nt, Human
uaaccaaaggugaagga

SEQ ID NO: 2205842 - RNA, 18 nt, Human
uaaccaaaggugaaggaa

SEQ ID NO: 2205843 - RNA, 12 nt, Human
uaacauuauuua

SEQ ID NO: 2205844 - RNA, 12 nt, Human
uaacauuaccuu

SEQ ID NO: 2205845 - RNA, 13 nt, Human
uaacauuaccuua

SEQ ID NO: 2205846 - RNA, 17 nt, Human
uaacauuaccuuacugu

SEQ ID NO: 2205847 - RNA, 19 nt, Human
uaacauuaccuuacugugg

SEQ ID NO: 2205848 - RNA, 23 nt, Human
uaacaggcucaauauuccugaau

SEQ ID NO: 2205849 - RNA, 22 nt, Human
uaacaggcucaauauuccugaa

SEQ ID NO: 2205850 - RNA, 19 nt, Human
uaacaggcagauacaggaa

SEQ ID NO: 2205851 - RNA, 14 nt, Human
uaacaggcuucugg

SEQ ID NO: 2205852 - RNA, 12 nt, Human
uaacugcaauuu

SEQ ID NO: 2205853 - RNA, 20 nt, Human
uaacugcaauuuuaauugau

SEQ ID NO: 2205854 - RNA, 16 nt, Human
uaacugcauuuuuaga

SEQ ID NO: 2205855 - RNA, 17 nt, Human
uaacugcauugagaacu

SEQ ID NO: 2205856 - RNA, 14 nt, Human
uaacuccagugaag

SEQ ID NO: 2205857 - RNA, 17 nt, Human
uaacugagugccuuuug

SEQ ID NO: 2205858 - RNA, 23 nt, Human
uaacugccaucaagaugagagaa

SEQ ID NO: 2205859 - RNA, 18 nt, Human
uaacugccuuaaaacuuu

SEQ ID NO: 2205860 - RNA, 23 nt, Human
uaacuggcaguuuuccauugguu

SEQ ID NO: 2205861 - RNA, 24 nt, Human
uaacuggcaguuuuccauugguuu

SEQ ID NO: 2205862 - RNA, 13 nt, Human
uaacugguauaga

SEQ ID NO: 2205863 - RNA, 20 nt, Human
uaacuuuuauaaacuuuacc

SEQ ID NO: 2205864 - RNA, 20 nt, Human
uaaccucagugucauuuaug

SEQ ID NO: 2205865 - RNA, 19 nt, Human
uaaccucagugucauuuau

SEQ ID NO: 2205866 - RNA, 14 nt, Human
uaaccucaucuucu

SEQ ID NO: 2205867 - RNA, 15 nt, Human
uaaccucagcucugg

SEQ ID NO: 2205868 - RNA, 16 nt, Human
uaaccucagcucuggg

SEQ ID NO: 2205869 - RNA, 17 nt, Human
uaaccucagcucuggga

SEQ ID NO: 2205870 - RNA, 19 nt, Human
uaaccucagcucugggaga

SEQ ID NO: 2205871 - RNA, 13 nt, Human
uaacucagaucac

SEQ ID NO: 2205872 - RNA, 14 nt, Human
uaacucagaucacu

SEQ ID NO: 2205873 - RNA, 20 nt, Human
uaacucagaucacuacugca

SEQ ID NO: 2205874 - RNA, 22 nt, Human
uaacucagaaacaucaguuacu

SEQ ID NO: 2205875 - RNA, 18 nt, Human
uaaccucaucuucuucac

SEQ ID NO: 2205876 - RNA, 20 nt, Human
uaaccuaugauauuuucugu

SEQ ID NO: 2205877 - RNA, 20 nt, Human
uaaccuauaugauuuauagu

SEQ ID NO: 2205878 - RNA, 22 nt, Human
uaaccuauaugauuuauaguuu

SEQ ID NO: 2205879 - RNA, 22 nt, Human
uaaccuauuuugaaaaauuccu

SEQ ID NO: 2205880 - RNA, 13 nt, Human
uaaccucagcucu

SEQ ID NO: 2205881 - RNA, 14 nt, Human
uaaccucagcucug

SEQ ID NO: 2205882 - RNA, 20 nt, Human
uaaccguccucgagcaacug

SEQ ID NO: 2205883 - RNA, 14 nt, Human
uaacucaucauaaa

SEQ ID NO: 2205884 - RNA, 21 nt, Human
uaacucagaucacuacugcag

SEQ ID NO: 2205885 - RNA, 23 nt, Human
uaacucagaucacuacugcaguc

SEQ ID NO: 2205886 - RNA, 19 nt, Human
uaacucauaccuuuaaagg

SEQ ID NO: 2205887 - RNA, 16 nt, Human
uaacucaucauaaaau

SEQ ID NO: 2205888 - RNA, 15 nt, Human
uaacucaucauaaaa

SEQ ID NO: 2205889 - RNA, 17 nt, Human
uaacucaucauaaaaua

SEQ ID NO: 2205890 - RNA, 14 nt, Human
uaacucaucuguca

SEQ ID NO: 2205891 - RNA, 22 nt, Human
uaacuccaccaacccaucagaa

SEQ ID NO: 2205892 - RNA, 16 nt, Human
uaacuccaccaaccca

SEQ ID NO: 2205893 - RNA, 11 nt, Human
uaacuccacca

SEQ ID NO: 2205894 - RNA, 16 nt, Human
uaacugagugccuuuu

SEQ ID NO: 2205895 - RNA, 23 nt, Human
uaacucauacugugcuggagcca

SEQ ID NO: 2205896 - RNA, 15 nt, Human
uaacucaucugucac

SEQ ID NO: 2205897 - RNA, 13 nt, Human
uaacaauguuaag

SEQ ID NO: 2205898 - RNA, 12 nt, Human
uaacaauguuaa

SEQ ID NO: 2205899 - RNA, 14 nt, Human
uaacaauguuaagg

SEQ ID NO: 2205900 - RNA, 15 nt, Human
uaacaauguuaagga

SEQ ID NO: 2205901 - RNA, 16 nt, Human
uaacaauguuaaggaa

SEQ ID NO: 2205902 - RNA, 19 nt, Human
uaacaauguuaaggaaacu

SEQ ID NO: 2205903 - RNA, 21 nt, Human
uaacaauguuaaggaaacucu

SEQ ID NO: 2205904 - RNA, 22 nt, Human
uaacaauguuaaggaaacucuu

SEQ ID NO: 2205905 - RNA, 23 nt, Human
uaacaauguuaaggaaacucuua

SEQ ID NO: 2205906 - RNA, 14 nt, Human
uaacaauuccucua

SEQ ID NO: 2205907 - RNA, 15 nt, Human
uaacaauugugaagu

SEQ ID NO: 2205908 - RNA, 13 nt, Human
uaacaauuccucu

SEQ ID NO: 2205909 - RNA, 13 nt, Human
uaacaauuuccuu

SEQ ID NO: 2205910 - RNA, 15 nt, Human
uaacaauuuccuuua

SEQ ID NO: 2205911 - RNA, 21 nt, Human
uaacaauuuccuuuauauuua

SEQ ID NO: 2205912 - RNA, 14 nt, Human
uaacaauuucuguc

SEQ ID NO: 2205913 - RNA, 23 nt, Human
uaaauuguccguguucauacauu

SEQ ID NO: 2205914 - RNA, 18 nt, Human
uaaauuguauauucacuu

SEQ ID NO: 2205915 - RNA, 19 nt, Human
uaaauuguauauucacuuu

SEQ ID NO: 2205916 - RNA, 13 nt, Human
uaaauuguauauu

SEQ ID NO: 2205917 - RNA, 14 nt, Human
uaaauuguauauuc

SEQ ID NO: 2205918 - RNA, 17 nt, Human
uaaauuguauauucacu

SEQ ID NO: 2205919 - RNA, 12 nt, Human
uaaauuguuuga

SEQ ID NO: 2205920 - RNA, 15 nt, Human
uaaauugcuccuuga

SEQ ID NO: 2205921 - RNA, 15 nt, Human
uaaauugcuguguau

SEQ ID NO: 2205922 - RNA, 16 nt, Human
uaaauugauguugcug

SEQ ID NO: 2205923 - RNA, 16 nt, Human
uaacaggauuagacag

SEQ ID NO: 2205924 - RNA, 21 nt, Human
uaacaggaagaucuuaaauuu

SEQ ID NO: 2205925 - RNA, 12 nt, Human
uaacagcugugg

SEQ ID NO: 2205926 - RNA, 12 nt, Human
uaacagcugagg

SEQ ID NO: 2205927 - RNA, 15 nt, Human
uaacagcugaggucu

SEQ ID NO: 2205928 - RNA, 19 nt, Human
uaacagcugaauuaucuau

SEQ ID NO: 2205929 - RNA, 15 nt, Human
uaacagcugaauuau

SEQ ID NO: 2205930 - RNA, 12 nt, Human
uaacagcugaau

SEQ ID NO: 2205931 - RNA, 23 nt, Human
uaacagcuccuugggaggaagca

SEQ ID NO: 2205932 - RNA, 14 nt, Human
uaacagcucaggau

SEQ ID NO: 2205933 - RNA, 13 nt, Human
uaacagcucagga

SEQ ID NO: 2205934 - RNA, 11 nt, Human
uaacagcuccu

SEQ ID NO: 2205935 - RNA, 15 nt, Human
uaacagcuccuuggg

SEQ ID NO: 2205936 - RNA, 16 nt, Human
uaacagcuccuuggga

SEQ ID NO: 2205937 - RNA, 17 nt, Human
uaacagcuccuugggag

SEQ ID NO: 2205938 - RNA, 20 nt, Human
uaacagcuccuugggaggaa

SEQ ID NO: 2205939 - RNA, 22 nt, Human
uaacagcuccuugggaggaagc

SEQ ID NO: 2205940 - RNA, 15 nt, Human
uaacagaugcaaugu

SEQ ID NO: 2205941 - RNA, 12 nt, Human
uaacagaugcaa

SEQ ID NO: 2205942 - RNA, 18 nt, Human
uaacagauaagcaagaga

SEQ ID NO: 2205943 - RNA, 11 nt, Human
uaacagacauu

SEQ ID NO: 2205944 - RNA, 14 nt, Human
uaacagacauuguu

SEQ ID NO: 2205945 - RNA, 18 nt, Human
uaacagacauuguuuugc

SEQ ID NO: 2205946 - RNA, 18 nt, Human
uaacagaacagcuucagg

SEQ ID NO: 2205947 - RNA, 19 nt, Human
uaacagaacagcuucaggu

SEQ ID NO: 2205948 - RNA, 20 nt, Human
uaacagaacagcuucagguu

SEQ ID NO: 2205949 - RNA, 21 nt, Human
uaacagaacagcuucagguua

SEQ ID NO: 2205950 - RNA, 22 nt, Human
uaacagaacagcuucagguuau

SEQ ID NO: 2205951 - RNA, 19 nt, Human
uaacagccaggaguguuaa

SEQ ID NO: 2205952 - RNA, 21 nt, Human
uaacagaugcaaugugcuacu

SEQ ID NO: 2205953 - RNA, 22 nt, Human
uaacagauuuugggguuguguu

SEQ ID NO: 2205954 - RNA, 11 nt, Human
uaacacauuau

SEQ ID NO: 2205955 - RNA, 21 nt, Human
uaacacagugccuucaauaaa

SEQ ID NO: 2205956 - RNA, 14 nt, Human
uaacacauguccuu

SEQ ID NO: 2205957 - RNA, 12 nt, Human
uaacagaaaugu

SEQ ID NO: 2205958 - RNA, 12 nt, Human
uaacagaacagc

SEQ ID NO: 2205959 - RNA, 14 nt, Human
uaacagaacagcuu

SEQ ID NO: 2205960 - RNA, 16 nt, Human
uaacagaacagcuuca

SEQ ID NO: 2205961 - RNA, 17 nt, Human
uaacagaacagcuucag

SEQ ID NO: 2205962 - RNA, 15 nt, Human
uaacagaaauguaca

SEQ ID NO: 2205963 - RNA, 14 nt, Human
uaacagaaauguac

SEQ ID NO: 2205964 - RNA, 15 nt, Human
uaacacacagcuccc

SEQ ID NO: 2205965 - RNA, 17 nt, Human
uaacacacagcucccau

SEQ ID NO: 2205966 - RNA, 18 nt, Human
uaacacaaguccugugaa

SEQ ID NO: 2205967 - RNA, 12 nt, Human
uaacacacagcu

SEQ ID NO: 2205968 - RNA, 13 nt, Human
uaacacacagcua

SEQ ID NO: 2205969 - RNA, 14 nt, Human
uaacacacagcucc

SEQ ID NO: 2205970 - RNA, 16 nt, Human
uaacaauuucuguccu

SEQ ID NO: 2205971 - RNA, 22 nt, Human
uaacaauuucuguccuucagau

SEQ ID NO: 2205972 - RNA, 18 nt, Human
uaacaauuuuaaugcuau

SEQ ID NO: 2205973 - RNA, 16 nt, Human
uaacacaagccacaga

SEQ ID NO: 2205974 - RNA, 17 nt, Human
uaacacaagccacagaa

SEQ ID NO: 2205975 - RNA, 17 nt, Human
uaacacaaguccuguga

SEQ ID NO: 2205976 - RNA, 23 nt, Human
uaacacaaguccugugaauuucu

SEQ ID NO: 2205977 - RNA, 17 nt, Human
uaacacagcauguguau

SEQ ID NO: 2205978 - RNA, 19 nt, Human
uaacacagugccuucaaua

SEQ ID NO: 2205979 - RNA, 20 nt, Human
uaacacagugccuucaauaa

SEQ ID NO: 2205980 - RNA, 13 nt, Human
uaacagaaaugua

SEQ ID NO: 2205981 - RNA, 18 nt, Human
uaagaucguucucugccu

SEQ ID NO: 2205982 - RNA, 19 nt, Human
uaagauauuuuucaugauu

SEQ ID NO: 2205983 - RNA, 19 nt, Human
uaagauaugggacauuuuu

SEQ ID NO: 2205984 - RNA, 21 nt, Human
uaagauaugggacauuuuuga

SEQ ID NO: 2205985 - RNA, 14 nt, Human
uaagauauuuuuca

SEQ ID NO: 2205986 - RNA, 15 nt, Human
uaagauauuuuucau

SEQ ID NO: 2205987 - RNA, 17 nt, Human
uaagauauuuuucauga

SEQ ID NO: 2205988 - RNA, 18 nt, Human
uaagauauuuuucaugau

SEQ ID NO: 2205989 - RNA, 13 nt, Human
uaagaguguuuaa

SEQ ID NO: 2205990 - RNA, 21 nt, Human
uaagaguuaguuucuuuggga

SEQ ID NO: 2205991 - RNA, 12 nt, Human
uaagauaauaau

SEQ ID NO: 2205992 - RNA, 14 nt, Human
uaagauaauaauau

SEQ ID NO: 2205993 - RNA, 15 nt, Human
uaagauaauaauaua

SEQ ID NO: 2205994 - RNA, 22 nt, Human
uaagauaauaauauauguuuac

SEQ ID NO: 2205995 - RNA, 12 nt, Human
uaagauaauuau

SEQ ID NO: 2205996 - RNA, 18 nt, Human
uaagauaauaguuuacau

SEQ ID NO: 2205997 - RNA, 23 nt, Human
uaagauaauaguuuacauguagu

SEQ ID NO: 2205998 - RNA, 13 nt, Human
uaagauaauuaua

SEQ ID NO: 2205999 - RNA, 17 nt, Human
uaagauaaaugugcuga

SEQ ID NO: 2206000 - RNA, 16 nt, Human
uaagauaaaugugcug

SEQ ID NO: 2206001 - RNA, 14 nt, Human
uaagauaaaugugc

SEQ ID NO: 2206002 - RNA, 19 nt, Human
uaagagugggggagagcag

SEQ ID NO: 2206003 - RNA, 12 nt, Human
uaagaguguaga

SEQ ID NO: 2206004 - RNA, 13 nt, Human
uaagaguguagaa

SEQ ID NO: 2206005 - RNA, 16 nt, Human
uaagaguguagaagca

SEQ ID NO: 2206006 - RNA, 18 nt, Human
uaagaguguagaagcauu

SEQ ID NO: 2206007 - RNA, 19 nt, Human
uaagaguguagaagcauuc

SEQ ID NO: 2206008 - RNA, 22 nt, Human
uaagaguguagaagcauuccuu

SEQ ID NO: 2206009 - RNA, 23 nt, Human
uaagaguguagaagcauuccuuc

SEQ ID NO: 2206010 - RNA, 21 nt, Human
uaagaguagaaacugcaggga

SEQ ID NO: 2206011 - RNA, 20 nt, Human
uaagagggcacacacugugu

SEQ ID NO: 2206012 - RNA, 18 nt, Human
uaagagugaaaauugucu

SEQ ID NO: 2206013 - RNA, 14 nt, Human
uaagagugcugggc

SEQ ID NO: 2206014 - RNA, 17 nt, Human
uaagagggcacacacug

SEQ ID NO: 2206015 - RNA, 18 nt, Human
uaagagggcacacacugu

SEQ ID NO: 2206016 - RNA, 12 nt, Human
uaagagggaggg

SEQ ID NO: 2206017 - RNA, 22 nt, Human
uaagagggagggagggcuccag

SEQ ID NO: 2206018 - RNA, 23 nt, Human
uaagagggagggagggcuccaga

SEQ ID NO: 2206019 - RNA, 23 nt, Human
uaagagggauuagggagagaaga

SEQ ID NO: 2206020 - RNA, 24 nt, Human
uaagaaagacuaucuaaauguuga

SEQ ID NO: 2206021 - RNA, 19 nt, Human
uaacuuuuauaaacuuuac

SEQ ID NO: 2206022 - RNA, 13 nt, Human
uaacugugaaguu

SEQ ID NO: 2206023 - RNA, 22 nt, Human
uaacuuuuauaaacuuuaccuu

SEQ ID NO: 2206024 - RNA, 21 nt, Human
uaacuuuuauaaacuuuaccu

SEQ ID NO: 2206025 - RNA, 22 nt, Human
uaagaaagugaagcaaaucaga

SEQ ID NO: 2206026 - RNA, 18 nt, Human
uaagaaagugaagcaaau

SEQ ID NO: 2206027 - RNA, 15 nt, Human
uaagaaagugaagca

SEQ ID NO: 2206028 - RNA, 16 nt, Human
uaagaaauacuguaca

SEQ ID NO: 2206029 - RNA, 16 nt, Human
uaagaaauaaaacugu

SEQ ID NO: 2206030 - RNA, 19 nt, Human
uaagaaauaaaacuguuaa

SEQ ID NO: 2206031 - RNA, 22 nt, Human
uaagaaauaaaacuguuaaagu

SEQ ID NO: 2206032 - RNA, 18 nt, Human
uaagaaauacuguacaau

SEQ ID NO: 2206033 - RNA, 19 nt, Human
uaagaaaucaaagagagaa

SEQ ID NO: 2206034 - RNA, 22 nt, Human
uaagaaccuuuugagugccuua

SEQ ID NO: 2206035 - RNA, 12 nt, Human
uaagaagagacu

SEQ ID NO: 2206036 - RNA, 15 nt, Human
uaagaagacaugaac

SEQ ID NO: 2206037 - RNA, 14 nt, Human
uaagaagacaugaa

SEQ ID NO: 2206038 - RNA, 13 nt, Human
uaagaagcuguug

SEQ ID NO: 2206039 - RNA, 15 nt, Human
uaagagagagagaca

SEQ ID NO: 2206040 - RNA, 19 nt, Human
uaagaagagacugggaaga

SEQ ID NO: 2206041 - RNA, 14 nt, Human
uaagaagagacugg

SEQ ID NO: 2206042 - RNA, 13 nt, Human
uaagaagaaacua

SEQ ID NO: 2206043 - RNA, 22 nt, Human
uaagaagaaaauugcugugccu

SEQ ID NO: 2206044 - RNA, 22 nt, Human
uaagaacugcuuucuuucguuu

SEQ ID NO: 2206045 - RNA, 21 nt, Human
uaagaagaaaauugcugugcc

SEQ ID NO: 2206046 - RNA, 19 nt, Human
uaagaacugcuuucuuucg

SEQ ID NO: 2206047 - RNA, 21 nt, Human
uaagaacuacaaacaaaauuu

SEQ ID NO: 2206048 - RNA, 16 nt, Human
uaagagcuagcgcugc

SEQ ID NO: 2206049 - RNA, 22 nt, Human
uaagagccauauaaguuugaag

SEQ ID NO: 2206050 - RNA, 22 nt, Human
uaagagccauuuaggggccacu

SEQ ID NO: 2206051 - RNA, 20 nt, Human
uaagagcuagcgcugccgca

SEQ ID NO: 2206052 - RNA, 18 nt, Human
uaagagcuagcgcugccg

SEQ ID NO: 2206053 - RNA, 19 nt, Human
uaagagcaccuuccucacu

SEQ ID NO: 2206054 - RNA, 20 nt, Human
uaagagcaccuuccucacuu

SEQ ID NO: 2206055 - RNA, 22 nt, Human
uaagagcaccuuccucacuucc

SEQ ID NO: 2206056 - RNA, 15 nt, Human
uaagagcaccuuccu

SEQ ID NO: 2206057 - RNA, 17 nt, Human
uaagagcuggugucuga

SEQ ID NO: 2206058 - RNA, 14 nt, Human
uaagaggcugauaa

SEQ ID NO: 2206059 - RNA, 15 nt, Human
uaagaggcugauaau

SEQ ID NO: 2206060 - RNA, 14 nt, Human
uaagagcugguguc

SEQ ID NO: 2206061 - RNA, 22 nt, Human
uaagaggcagggucucacucug

SEQ ID NO: 2206062 - RNA, 16 nt, Human
uaaggaugggaaggag

SEQ ID NO: 2206063 - RNA, 12 nt, Human
uaaggaugggaa

SEQ ID NO: 2206064 - RNA, 17 nt, Human
uaaggaugucacagggc

SEQ ID NO: 2206065 - RNA, 19 nt, Human
uaaggaugucacagggcca

SEQ ID NO: 2206066 - RNA, 18 nt, Human
uaaggaugggaaggaggg

SEQ ID NO: 2206067 - RNA, 18 nt, Human
uaaggaugcuuguacaua

SEQ ID NO: 2206068 - RNA, 20 nt, Human
uaaggauggagccagcucug

SEQ ID NO: 2206069 - RNA, 19 nt, Human
uaaggauggagccagcucu

SEQ ID NO: 2206070 - RNA, 23 nt, Human
uaagcgaauguguacaaagugua

SEQ ID NO: 2206071 - RNA, 13 nt, Human
uaaggcaugaagg

SEQ ID NO: 2206072 - RNA, 20 nt, Human
uaaggaugucacagggccaa

SEQ ID NO: 2206073 - RNA, 15 nt, Human
uaaggcaaucauggu

SEQ ID NO: 2206074 - RNA, 23 nt, Human
uaaggaugcuuguacauaaugcg

SEQ ID NO: 2206075 - RNA, 22 nt, Human
uaaggaugcuuguacauaaugc

SEQ ID NO: 2206076 - RNA, 21 nt, Human
uaaggaugcuuguacauaaug

SEQ ID NO: 2206077 - RNA, 20 nt, Human
uaaggaugcuuguacauaau

SEQ ID NO: 2206078 - RNA, 15 nt, Human
uaagccuuuccauaa

SEQ ID NO: 2206079 - RNA, 12 nt, Human
uaagccuugucg

SEQ ID NO: 2206080 - RNA, 16 nt, Human
uaagccuuuccauaag

SEQ ID NO: 2206081 - RNA, 21 nt, Human
uaagccuuuggaaacagcucg

SEQ ID NO: 2206082 - RNA, 19 nt, Human
uaaggaugcuuguacauaa

SEQ ID NO: 2206083 - RNA, 21 nt, Human
uaagccuccauuuaguucuuu

SEQ ID NO: 2206084 - RNA, 20 nt, Human
uaagccuccauuuaguucuu

SEQ ID NO: 2206085 - RNA, 19 nt, Human
uaagccuccauuuaguucu

SEQ ID NO: 2206086 - RNA, 17 nt, Human
uaagccuccauuuaguu

SEQ ID NO: 2206087 - RNA, 17 nt, Human
uaagccuuuggaaacag

SEQ ID NO: 2206088 - RNA, 14 nt, Human
uaagccuuuggaaa

SEQ ID NO: 2206089 - RNA, 14 nt, Human
uaagccuccauuua

SEQ ID NO: 2206090 - RNA, 20 nt, Human
uaagccucauauuuaaagac

SEQ ID NO: 2206091 - RNA, 17 nt, Human
uaagccaucuugguaaa

SEQ ID NO: 2206092 - RNA, 20 nt, Human
uaagccacuuaaaauguuca

SEQ ID NO: 2206093 - RNA, 16 nt, Human
uaagccacaagaaauu

SEQ ID NO: 2206094 - RNA, 21 nt, Human
uaagccagacaucaacagaua

SEQ ID NO: 2206095 - RNA, 20 nt, Human
uaagccagacaucaacagau

SEQ ID NO: 2206096 - RNA, 17 nt, Human
uaagcauuguuugcuua

SEQ ID NO: 2206097 - RNA, 15 nt, Human
uaagcauuguuugcu

SEQ ID NO: 2206098 - RNA, 12 nt, Human
uaagcauuguuu

SEQ ID NO: 2206099 - RNA, 18 nt, Human
uaagcauuggguggguaa

SEQ ID NO: 2206100 - RNA, 20 nt, Human
uaagcauuccaacuaucuca

SEQ ID NO: 2206101 - RNA, 16 nt, Human
uaagcauuccaacuau

SEQ ID NO: 2206102 - RNA, 18 nt, Human
uaagcauuccaacuaucu

SEQ ID NO: 2206103 - RNA, 21 nt, Human
uaagcauuguuugcuuauugu

SEQ ID NO: 2206104 - RNA, 20 nt, Human
uaagcauuguuugcuuauug

SEQ ID NO: 2206105 - RNA, 19 nt, Human
uaagcauuguuugcuuauu

SEQ ID NO: 2206106 - RNA, 18 nt, Human
uaagcauuguuugcuuau

SEQ ID NO: 2206107 - RNA, 23 nt, Human
uaagcauuguuugcuuauuguuc

SEQ ID NO: 2206108 - RNA, 14 nt, Human
uaagccaagggccu

SEQ ID NO: 2206109 - RNA, 15 nt, Human
uaagccaauuuuucu

SEQ ID NO: 2206110 - RNA, 10 nt, Human
uaagccaagg

SEQ ID NO: 2206111 - RNA, 13 nt, Human
uaagccagacauc

SEQ ID NO: 2206112 - RNA, 19 nt, Human
uaagccacuuaaaauguuc

SEQ ID NO: 2206113 - RNA, 17 nt, Human
uaagccacuuaaaaugu

SEQ ID NO: 2206114 - RNA, 18 nt, Human
uaagccaauuuuucugca

SEQ ID NO: 2206115 - RNA, 19 nt, Human
uaagccaauuuuucugcac

SEQ ID NO: 2206116 - RNA, 22 nt, Human
uaagccacaagaaauuugauuu

SEQ ID NO: 2206117 - RNA, 19 nt, Human
uaagcauuaccacucaggc

SEQ ID NO: 2206118 - RNA, 21 nt, Human
uaagcauuaccacucaggcau

SEQ ID NO: 2206119 - RNA, 18 nt, Human
uaagcauuaccacucagg

SEQ ID NO: 2206120 - RNA, 15 nt, Human
uaagcaugcacaaau

SEQ ID NO: 2206121 - RNA, 16 nt, Human
uaagcaucaaacucuu

SEQ ID NO: 2206122 - RNA, 15 nt, Human
uaagcaucaaacucu

SEQ ID NO: 2206123 - RNA, 13 nt, Human
uaagaucucagug

SEQ ID NO: 2206124 - RNA, 19 nt, Human
uaagaucucagugguuaag

SEQ ID NO: 2206125 - RNA, 15 nt, Human
uaagaugacauugcu

SEQ ID NO: 2206126 - RNA, 20 nt, Human
uaauuuguaguguuggagaa

SEQ ID NO: 2206127 - RNA, 14 nt, Human
uaauuguuguuucu

SEQ ID NO: 2206128 - RNA, 15 nt, Human
uaauuguuguuucuu

SEQ ID NO: 2206129 - RNA, 18 nt, Human
uaauuugugauacaaugc

SEQ ID NO: 2206130 - RNA, 15 nt, Human
uaauuugugauacaa

SEQ ID NO: 2206131 - RNA, 14 nt, Human
uaauuugugauaca

SEQ ID NO: 2206132 - RNA, 23 nt, Human
uaauuuguaguguuggagaagaa

SEQ ID NO: 2206133 - RNA, 21 nt, Human
uaauuuguacauauguaaaau

SEQ ID NO: 2206134 - RNA, 13 nt, Human
uaauuuguaucug

SEQ ID NO: 2206135 - RNA, 14 nt, Human
uaauuuuaaccaaa

SEQ ID NO: 2206136 - RNA, 14 nt, Human
uaauuuuaaacaaa

SEQ ID NO: 2206137 - RNA, 22 nt, Human
uaauuugugauacaaugcugug

SEQ ID NO: 2206138 - RNA, 19 nt, Human
uaauuugugauacaaugcu

SEQ ID NO: 2206139 - RNA, 19 nt, Human
uaauuuuagugacagcucu

SEQ ID NO: 2206140 - RNA, 23 nt, Human
uaauuuuaaccaaaacaugucuc

SEQ ID NO: 2206141 - RNA, 12 nt, Human
uaauuuuaauau

SEQ ID NO: 2206142 - RNA, 13 nt, Human
uaauuuuaaauaa

SEQ ID NO: 2206143 - RNA, 22 nt, Human
uaauuuuaaccaaaacaugucu

SEQ ID NO: 2206144 - RNA, 13 nt, Human
uaauuuuaagaaa

SEQ ID NO: 2206145 - RNA, 18 nt, Human
uaauuuuaugaaugucuu

SEQ ID NO: 2206146 - RNA, 17 nt, Human
uaauuuuccuaauaaag

SEQ ID NO: 2206147 - RNA, 21 nt, Human
uaauuuucuagauuuucuacu

SEQ ID NO: 2206148 - RNA, 19 nt, Human
uaauugauuucaagaccuu

SEQ ID NO: 2206149 - RNA, 11 nt, Human
uaauugcacuc

SEQ ID NO: 2206150 - RNA, 14 nt, Human
uaauugauuucaag

SEQ ID NO: 2206151 - RNA, 19 nt, Human
uaauugaucaaauucauuu

SEQ ID NO: 2206152 - RNA, 12 nt, Human
uaauugcauuca

SEQ ID NO: 2206153 - RNA, 13 nt, Human
uaauugcauucau

SEQ ID NO: 2206154 - RNA, 22 nt, Human
uaauugcauucaucuuguguuu

SEQ ID NO: 2206155 - RNA, 15 nt, Human
uaauugcuuacauuu

SEQ ID NO: 2206156 - RNA, 16 nt, Human
uaauugcuuacauuuu

SEQ ID NO: 2206157 - RNA, 21 nt, Human
uaauugcuuacauuuuuacaa

SEQ ID NO: 2206158 - RNA, 23 nt, Human
uaauugcuuacauuuuuacaaua

SEQ ID NO: 2206159 - RNA, 15 nt, Human
uaauuggcagcagau

SEQ ID NO: 2206160 - RNA, 12 nt, Human
uaauuggcagca

SEQ ID NO: 2206161 - RNA, 14 nt, Human
uaauuggcagcaga

SEQ ID NO: 2206162 - RNA, 18 nt, Human
uaauugguccgaucuuug

SEQ ID NO: 2206163 - RNA, 12 nt, Human
uaauugcuuuga

SEQ ID NO: 2206164 - RNA, 20 nt, Human
uaauuggaagaaauuccugu

SEQ ID NO: 2206165 - RNA, 21 nt, Human
uaauuggaagaaauuccugua

SEQ ID NO: 2206166 - RNA, 22 nt, Human
uaauuggaaaggcagcucuaaa

SEQ ID NO: 2206167 - RNA, 20 nt, Human
uaauuguuaagauaugaugu

SEQ ID NO: 2206168 - RNA, 22 nt, Human
uaauuguucauuuugagcugaa

SEQ ID NO: 2206169 - RNA, 16 nt, Human
uaauuguugcuaaucu

SEQ ID NO: 2206170 - RNA, 16 nt, Human
uaauuguauaacaggu

SEQ ID NO: 2206171 - RNA, 17 nt, Human
uaauuguauaacagguu

SEQ ID NO: 2206172 - RNA, 18 nt, Human
uaauuguauaacagguua

SEQ ID NO: 2206173 - RNA, 13 nt, Human
uaauuguaucgua

SEQ ID NO: 2206174 - RNA, 15 nt, Human
uaauuguaucguaua

SEQ ID NO: 2206175 - RNA, 19 nt, Human
uaauuguaucguauagcug

SEQ ID NO: 2206176 - RNA, 20 nt, Human
uaauuguaucguauagcugu

SEQ ID NO: 2206177 - RNA, 21 nt, Human
uaauuguaucguauagcugua

SEQ ID NO: 2206178 - RNA, 23 nt, Human
uaauuguaucguauagcuguauu

SEQ ID NO: 2206179 - RNA, 21 nt, Human
uaauugugaaaaaguuaaaca

SEQ ID NO: 2206180 - RNA, 21 nt, Human
uaauuaaauaaaaaucugugg

SEQ ID NO: 2206181 - RNA, 12 nt, Human
uaauuaaagugu

SEQ ID NO: 2206182 - RNA, 16 nt, Human
uaauuaaaguguccau

SEQ ID NO: 2206183 - RNA, 18 nt, Human
uaauguuuaugagccaga

SEQ ID NO: 2206184 - RNA, 13 nt, Human
uaauuaaaugcuc

SEQ ID NO: 2206185 - RNA, 22 nt, Human
uaauuaaauaaaucauuaauac

SEQ ID NO: 2206186 - RNA, 23 nt, Human
uaauuaaauuuugaguucuacau

SEQ ID NO: 2206187 - RNA, 17 nt, Human
uaauuaaaacacaacau

SEQ ID NO: 2206188 - RNA, 20 nt, Human
uaauuaaaagaauauuuuaa

SEQ ID NO: 2206189 - RNA, 15 nt, Human
uaauuaaucaugaau

SEQ ID NO: 2206190 - RNA, 21 nt, Human
uaauuaaucaugaauguguaa

SEQ ID NO: 2206191 - RNA, 17 nt, Human
uaauuaaugaaauaucu

SEQ ID NO: 2206192 - RNA, 21 nt, Human
uaaugcauguuaggaaaauuu

SEQ ID NO: 2206193 - RNA, 22 nt, Human
uaaugccggugagaauaagaga

SEQ ID NO: 2206194 - RNA, 21 nt, Human
uaaugccuuacucuucuugaa

SEQ ID NO: 2206195 - RNA, 22 nt, Human
uaaugccuuuaaaguaugaauc

SEQ ID NO: 2206196 - RNA, 15 nt, Human
uaaugccuuacucuu

SEQ ID NO: 2206197 - RNA, 22 nt, Human
uaaugcgcaggcuggcccugcc

SEQ ID NO: 2206198 - RNA, 19 nt, Human
uaaugcgcaggcuggcccu

SEQ ID NO: 2206199 - RNA, 14 nt, Human
uaaugcgugcauac

SEQ ID NO: 2206200 - RNA, 22 nt, Human
uaauguuuaugagccagacaaa

SEQ ID NO: 2206201 - RNA, 17 nt, Human
uaauguuuaugagccag

SEQ ID NO: 2206202 - RNA, 16 nt, Human
uaauguuuaugagcca

SEQ ID NO: 2206203 - RNA, 15 nt, Human
uaauguuuaugagcc

SEQ ID NO: 2206204 - RNA, 15 nt, Human
uaauguuucaaacau

SEQ ID NO: 2206205 - RNA, 23 nt, Human
uaaugcgcaggcuggcccugccc

SEQ ID NO: 2206206 - RNA, 14 nt, Human
uaauguuucaaaca

SEQ ID NO: 2206207 - RNA, 20 nt, Human
uaauucuucaccuuaggaau

SEQ ID NO: 2206208 - RNA, 16 nt, Human
uaauucuuguauauua

SEQ ID NO: 2206209 - RNA, 15 nt, Human
uaauucuuguauauu

SEQ ID NO: 2206210 - RNA, 19 nt, Human
uaauucuuugaccuguugg

SEQ ID NO: 2206211 - RNA, 20 nt, Human
uaauugacaggauuauugga

SEQ ID NO: 2206212 - RNA, 22 nt, Human
uaauugacaggauuauuggaaa

SEQ ID NO: 2206213 - RNA, 18 nt, Human
uaauugaucaaauucauu

SEQ ID NO: 2206214 - RNA, 10 nt, Human
uaauucugua

SEQ ID NO: 2206215 - RNA, 12 nt, Human
uaauucuguaaa

SEQ ID NO: 2206216 - RNA, 13 nt, Human
uaauucuguaaau

SEQ ID NO: 2206217 - RNA, 15 nt, Human
uaauucuguaaaugu

SEQ ID NO: 2206218 - RNA, 12 nt, Human
uaauucuguaca

SEQ ID NO: 2206219 - RNA, 16 nt, Human
uaauucucuuucaaag

SEQ ID NO: 2206220 - RNA, 13 nt, Human
uaauucucuugaa

SEQ ID NO: 2206221 - RNA, 17 nt, Human
uaauucuguacugauuu

SEQ ID NO: 2206222 - RNA, 23 nt, Human
uaauucuguacugauuuuuguaa

SEQ ID NO: 2206223 - RNA, 14 nt, Human
uaauucuguacaua

SEQ ID NO: 2206224 - RNA, 21 nt, Human
uaauucuguacauagccuaua

SEQ ID NO: 2206225 - RNA, 14 nt, Human
uaauucuguacuga

SEQ ID NO: 2206226 - RNA, 15 nt, Human
uaauucuguacugau

SEQ ID NO: 2206227 - RNA, 18 nt, Human
uaauucuuagcucauucu

SEQ ID NO: 2206228 - RNA, 12 nt, Human
uaauuagagcag

SEQ ID NO: 2206229 - RNA, 12 nt, Human
uaauucucuuga

SEQ ID NO: 2206230 - RNA, 17 nt, Human
uaauuacauauuugcau

SEQ ID NO: 2206231 - RNA, 16 nt, Human
uaauuaccaaccuguu

SEQ ID NO: 2206232 - RNA, 21 nt, Human
uaauuaccaaccuguuaccua

SEQ ID NO: 2206233 - RNA, 17 nt, Human
uaauuaccaaccuguua

SEQ ID NO: 2206234 - RNA, 21 nt, Human
uaauuaaugaaauaucuguau

SEQ ID NO: 2206235 - RNA, 19 nt, Human
uaauuaaugaaauaucugu

SEQ ID NO: 2206236 - RNA, 20 nt, Human
uaauuaaugaaauaucugua

SEQ ID NO: 2206237 - RNA, 20 nt, Human
uaauauauuuguguauuuaa

SEQ ID NO: 2206238 - RNA, 13 nt, Human
uaauauauuuucu

SEQ ID NO: 2206239 - RNA, 19 nt, Human
uaauauauuuguguauuua

SEQ ID NO: 2206240 - RNA, 14 nt, Human
uaauauauugcugc

SEQ ID NO: 2206241 - RNA, 16 nt, Human
uaauauggggaugcag

SEQ ID NO: 2206242 - RNA, 20 nt, Human
uaauauguuaaccucagugu

SEQ ID NO: 2206243 - RNA, 21 nt, Human
uaauauguuaaccucaguguc

SEQ ID NO: 2206244 - RNA, 17 nt, Human
uaauauggguucuuuuu

SEQ ID NO: 2206245 - RNA, 22 nt, Human
uaauauauuuuuauauuuaguu

SEQ ID NO: 2206246 - RNA, 19 nt, Human
uaauaugggcauuguaguu

SEQ ID NO: 2206247 - RNA, 20 nt, Human
uaauaugggcauuguaguua

SEQ ID NO: 2206248 - RNA, 17 nt, Human
uaauauauuuucuguuu

SEQ ID NO: 2206249 - RNA, 21 nt, Human
uaauauauuuucuguuuucuu

SEQ ID NO: 2206250 - RNA, 14 nt, Human
uaauauauguuuac

SEQ ID NO: 2206251 - RNA, 12 nt, Human
uaauauauugcu

SEQ ID NO: 2206252 - RNA, 17 nt, Human
uaauauaucccagaaau

SEQ ID NO: 2206253 - RNA, 13 nt, Human
uaauauauguuua

SEQ ID NO: 2206254 - RNA, 17 nt, Human
uaauauauaucugcugu

SEQ ID NO: 2206255 - RNA, 22 nt, Human
uaauauaaguuucuuugcuuca

SEQ ID NO: 2206256 - RNA, 16 nt, Human
uaauauacuauauuua

SEQ ID NO: 2206257 - RNA, 13 nt, Human
uaauauacuugug

SEQ ID NO: 2206258 - RNA, 15 nt, Human
uaauauacuugugga

SEQ ID NO: 2206259 - RNA, 17 nt, Human
uaauauacuuguggacu

SEQ ID NO: 2206260 - RNA, 21 nt, Human
uaauauacuuguggacuaaaa

SEQ ID NO: 2206261 - RNA, 16 nt, Human
uaaucggcccacagcu

SEQ ID NO: 2206262 - RNA, 15 nt, Human
uaaucggcccacagc

SEQ ID NO: 2206263 - RNA, 18 nt, Human
uaaucgcuuaaagauguu

SEQ ID NO: 2206264 - RNA, 16 nt, Human
uaaucgaccugccucg

SEQ ID NO: 2206265 - RNA, 16 nt, Human
uaaucguuaugugugu

SEQ ID NO: 2206266 - RNA, 15 nt, Human
uaaucguuaugugug

SEQ ID NO: 2206267 - RNA, 22 nt, Human
uaaucggcccacagcucccacc

SEQ ID NO: 2206268 - RNA, 16 nt, Human
uaaucguguccccuau

SEQ ID NO: 2206269 - RNA, 14 nt, Human
uaaucgaccugccu

SEQ ID NO: 2206270 - RNA, 13 nt, Human
uaaucgaccugcc

SEQ ID NO: 2206271 - RNA, 20 nt, Human
uaauccuucuaguuucccac

SEQ ID NO: 2206272 - RNA, 23 nt, Human
uaauauguuaaccucagugucau

SEQ ID NO: 2206273 - RNA, 14 nt, Human
uaauauuaaaaaua

SEQ ID NO: 2206274 - RNA, 18 nt, Human
uaauauuaaaaauaugga

SEQ ID NO: 2206275 - RNA, 19 nt, Human
uaauccuucuaguuuccca

SEQ ID NO: 2206276 - RNA, 21 nt, Human
uaauccuucuaguuucccaca

SEQ ID NO: 2206277 - RNA, 23 nt, Human
uaauccucucaaccaccuuucag

SEQ ID NO: 2206278 - RNA, 22 nt, Human
uaauauuaaaaauauggaacuu

SEQ ID NO: 2206279 - RNA, 22 nt, Human
uaaugaugaugggaauugugug

SEQ ID NO: 2206280 - RNA, 20 nt, Human
uaaucuucaguuuuaucuuu

SEQ ID NO: 2206281 - RNA, 19 nt, Human
uaaugauaaguaaaugcua

SEQ ID NO: 2206282 - RNA, 21 nt, Human
uaaucuuauuagggagaaaau

SEQ ID NO: 2206283 - RNA, 13 nt, Human
uaaucuuauuagg

SEQ ID NO: 2206284 - RNA, 16 nt, Human
uaaucuucaguuuuau

SEQ ID NO: 2206285 - RNA, 13 nt, Human
uaaucuucaguuu

SEQ ID NO: 2206286 - RNA, 17 nt, Human
uaaugcauguuaggaaa

SEQ ID NO: 2206287 - RNA, 16 nt, Human
uaaugcauguuaggaa

SEQ ID NO: 2206288 - RNA, 22 nt, Human
uaaugcaucuagauuauggagc

SEQ ID NO: 2206289 - RNA, 19 nt, Human
uaaugccacuaaauugaca

SEQ ID NO: 2206290 - RNA, 17 nt, Human
uaaugaugucguuugaa

SEQ ID NO: 2206291 - RNA, 23 nt, Human
uaaugaugucguuugaaucacag

SEQ ID NO: 2206292 - RNA, 11 nt, Human
uaaugauguuu

SEQ ID NO: 2206293 - RNA, 12 nt, Human
uaaugcacuuuc

SEQ ID NO: 2206294 - RNA, 13 nt, Human
uaaugcacuuucu

SEQ ID NO: 2206295 - RNA, 14 nt, Human
uaaugcacuuucua

SEQ ID NO: 2206296 - RNA, 20 nt, Human
uaaucugauggcuucuccag

SEQ ID NO: 2206297 - RNA, 13 nt, Human
uaaucuguguaca

SEQ ID NO: 2206298 - RNA, 16 nt, Human
uaaucucguuucaaaa

SEQ ID NO: 2206299 - RNA, 17 nt, Human
uaaucucguuucaaaaa

SEQ ID NO: 2206300 - RNA, 20 nt, Human
uaaucuuaggggagagcuuu

SEQ ID NO: 2206301 - RNA, 19 nt, Human
uaaucuuaggggagagcuu

SEQ ID NO: 2206302 - RNA, 21 nt, Human
uaaucugauggcuucuccagg

SEQ ID NO: 2206303 - RNA, 14 nt, Human
uaaucuguguacaa

SEQ ID NO: 2206304 - RNA, 19 nt, Human
uaaucuguguacaaagaaa

SEQ ID NO: 2206305 - RNA, 18 nt, Human
uaaucuccucuuuuaucu

SEQ ID NO: 2206306 - RNA, 15 nt, Human
uaaucucguuucaaa

SEQ ID NO: 2206307 - RNA, 13 nt, Human
uaaucuccacagu

SEQ ID NO: 2206308 - RNA, 22 nt, Human
uaaucuauuggguucauuauug

SEQ ID NO: 2206309 - RNA, 20 nt, Human
uaaucuauuggguucauuau

SEQ ID NO: 2206310 - RNA, 17 nt, Human
uaaucuauuucuaugag

SEQ ID NO: 2206311 - RNA, 19 nt, Human
uaaucuauuucuaugagaa

SEQ ID NO: 2206312 - RNA, 19 nt, Human
uaaucucguuucaaaaaca

SEQ ID NO: 2206313 - RNA, 19 nt, Human
uaaucuauuggguucauua

SEQ ID NO: 2206314 - RNA, 19 nt, Human
uaaucguuauguguguaua

SEQ ID NO: 2206315 - RNA, 18 nt, Human
uaaucguuauguguguau

SEQ ID NO: 2206316 - RNA, 17 nt, Human
uaaucguuaugugugua

SEQ ID NO: 2206317 - RNA, 18 nt, Human
uaaucuauuggguucauu

SEQ ID NO: 2206318 - RNA, 11 nt, Human
uaaucuaaaug

SEQ ID NO: 2206319 - RNA, 15 nt, Human
uaauacacacaguua

SEQ ID NO: 2206320 - RNA, 22 nt, Human
uaauacaacauguagcugaguu

SEQ ID NO: 2206321 - RNA, 21 nt, Human
uaauaguucagguaacaggca

SEQ ID NO: 2206322 - RNA, 19 nt, Human
uaauaguuuacauguagua

SEQ ID NO: 2206323 - RNA, 14 nt, Human
uaauauaaaguugg

SEQ ID NO: 2206324 - RNA, 19 nt, Human
uaauauaaaguuggaugcg

SEQ ID NO: 2206325 - RNA, 21 nt, Human
uaauauaaaguaguccuguga

SEQ ID NO: 2206326 - RNA, 21 nt, Human
uaauauaaaaagcuuccauga

SEQ ID NO: 2206327 - RNA, 16 nt, Human
uaauauaacugccuua

SEQ ID NO: 2206328 - RNA, 21 nt, Human
uaauauaacugccuuaaaacu

SEQ ID NO: 2206329 - RNA, 22 nt, Human
uaauauaacugccuuaaaacuu

SEQ ID NO: 2206330 - RNA, 23 nt, Human
uaauauaacugccuuaaaacuuu

SEQ ID NO: 2206331 - RNA, 18 nt, Human
uaauauaagaagcuuuca

SEQ ID NO: 2206332 - RNA, 22 nt, Human
uaauauaagaagcuuucaguau

SEQ ID NO: 2206333 - RNA, 13 nt, Human
uaauaauauacuu

SEQ ID NO: 2206334 - RNA, 14 nt, Human
uaauaauauacuug

SEQ ID NO: 2206335 - RNA, 14 nt, Human
uaauaauaauguuu

SEQ ID NO: 2206336 - RNA, 16 nt, Human
uaauaauauacuugug

SEQ ID NO: 2206337 - RNA, 19 nt, Human
uaauaauauacuuguggac

SEQ ID NO: 2206338 - RNA, 15 nt, Human
uaauaauguuucaaa

SEQ ID NO: 2206339 - RNA, 21 nt, Human
uaauaauauacuuguggacua

SEQ ID NO: 2206340 - RNA, 17 nt, Human
uaauaauuauuauuaaa

SEQ ID NO: 2206341 - RNA, 13 nt, Human
uaauaaagacagg

SEQ ID NO: 2206342 - RNA, 19 nt, Human
uaauaaacuuuuuuuugag

SEQ ID NO: 2206343 - RNA, 21 nt, Human
uaauaaacuuuuuuuugagaa

SEQ ID NO: 2206344 - RNA, 13 nt, Human
uaaguggcugcug

SEQ ID NO: 2206345 - RNA, 20 nt, Human
uaagugggguugcaaccacu

SEQ ID NO: 2206346 - RNA, 21 nt, Human
uaagugggguugcaaccacug

SEQ ID NO: 2206347 - RNA, 17 nt, Human
uaauaaacuuuaauaua

SEQ ID NO: 2206348 - RNA, 18 nt, Human
uaauaaacuuagaauaaa

SEQ ID NO: 2206349 - RNA, 23 nt, Human
uaauaaacuuagaauaaaauugu

SEQ ID NO: 2206350 - RNA, 15 nt, Human
uaagugcuuuguaau

SEQ ID NO: 2206351 - RNA, 13 nt, Human
uaagugcuuugua

SEQ ID NO: 2206352 - RNA, 23 nt, Human
uaagugcuguauaaaaucagcca

SEQ ID NO: 2206353 - RNA, 19 nt, Human
uaaguggaggcacuuuagg

SEQ ID NO: 2206354 - RNA, 17 nt, Human
uaaguggaggcacuuua

SEQ ID NO: 2206355 - RNA, 16 nt, Human
uaaguggaggcacuuu

SEQ ID NO: 2206356 - RNA, 15 nt, Human
uaaguggaggcacuu

SEQ ID NO: 2206357 - RNA, 20 nt, Human
uaagugguacuaacuuuccu

SEQ ID NO: 2206358 - RNA, 20 nt, Human
uaaggccgaagaaggguccu

SEQ ID NO: 2206359 - RNA, 16 nt, Human
uaaggccgaagaaggg

SEQ ID NO: 2206360 - RNA, 15 nt, Human
uaaggcaugaaggau

SEQ ID NO: 2206361 - RNA, 19 nt, Human
uaaggccauuauuguacuu

SEQ ID NO: 2206362 - RNA, 16 nt, Human
uaaggcguggagcugc

SEQ ID NO: 2206363 - RNA, 17 nt, Human
uaaggcguggagcugcc

SEQ ID NO: 2206364 - RNA, 15 nt, Human
uaagugcuguauaaa

SEQ ID NO: 2206365 - RNA, 17 nt, Human
uaagugcuguauaaaau

SEQ ID NO: 2206366 - RNA, 20 nt, Human
uaaggcguggagcugccuga

SEQ ID NO: 2206367 - RNA, 14 nt, Human
uaagugcuguauaa

SEQ ID NO: 2206368 - RNA, 18 nt, Human
uaagugcuguauaaaauc

SEQ ID NO: 2206369 - RNA, 19 nt, Human
uaagugcuguauaaaauca

SEQ ID NO: 2206370 - RNA, 20 nt, Human
uaagugcuguauaaaaucag

SEQ ID NO: 2206371 - RNA, 22 nt, Human
uaagugcuguauaaaaucagcc

SEQ ID NO: 2206372 - RNA, 16 nt, Human
uaauaaagaugcucuu

SEQ ID NO: 2206373 - RNA, 14 nt, Human
uaauaaagaugcuc

SEQ ID NO: 2206374 - RNA, 17 nt, Human
uaauaaagaucauguaa

SEQ ID NO: 2206375 - RNA, 16 nt, Human
uaauaaagaucaugua

SEQ ID NO: 2206376 - RNA, 11 nt, Human
uaauaaagcug

SEQ ID NO: 2206377 - RNA, 15 nt, Human
uaauaaauucagaua

SEQ ID NO: 2206378 - RNA, 16 nt, Human
uaauaaauuauuuauu

SEQ ID NO: 2206379 - RNA, 17 nt, Human
uaauaaauguacauuaa

SEQ ID NO: 2206380 - RNA, 19 nt, Human
uaauaaauguacauuaauu

SEQ ID NO: 2206381 - RNA, 15 nt, Human
uaauaaaucugguag

SEQ ID NO: 2206382 - RNA, 15 nt, Human
uaauaaagcuacuga

SEQ ID NO: 2206383 - RNA, 16 nt, Human
uaauaaagcuacugau

SEQ ID NO: 2206384 - RNA, 17 nt, Human
uaauaaagaugcucuuu

SEQ ID NO: 2206385 - RNA, 12 nt, Human
uaauaacauuac

SEQ ID NO: 2206386 - RNA, 15 nt, Human
uaauaacauuaccuu

SEQ ID NO: 2206387 - RNA, 20 nt, Human
uaauaacauuaccuuacugu

SEQ ID NO: 2206388 - RNA, 13 nt, Human
uaauaaauucaga

SEQ ID NO: 2206389 - RNA, 17 nt, Human
uaauaacagugcauauu

SEQ ID NO: 2206390 - RNA, 21 nt, Human
uaauaacauuaccuuacugug

SEQ ID NO: 2206391 - RNA, 15 nt, Human
uaauaacugugaagu

SEQ ID NO: 2206392 - RNA, 15 nt, Human
uaauaagguugaaca

SEQ ID NO: 2206393 - RNA, 19 nt, Human
uacuugggaagcugaggcg

SEQ ID NO: 2206394 - RNA, 21 nt, Human
uacuugggagaccuguaauca

SEQ ID NO: 2206395 - RNA, 17 nt, Human
uacuugggaagcugagg

SEQ ID NO: 2206396 - RNA, 18 nt, Human
uacuugcuggcucucaga

SEQ ID NO: 2206397 - RNA, 20 nt, Human
uacuugcucuugaugccugg

SEQ ID NO: 2206398 - RNA, 12 nt, Human
uacuugggaggc

SEQ ID NO: 2206399 - RNA, 23 nt, Human
uacuugggagaccuguaaucaua

SEQ ID NO: 2206400 - RNA, 19 nt, Human
uacuugggccauagcuccu

SEQ ID NO: 2206401 - RNA, 22 nt, Human
uacuuuaagcacuacauaaacu

SEQ ID NO: 2206402 - RNA, 19 nt, Human
uacuuguggacacagcucu

SEQ ID NO: 2206403 - RNA, 15 nt, Human
uacuuguggacacag

SEQ ID NO: 2206404 - RNA, 18 nt, Human
uacuuguggacacagcuc

SEQ ID NO: 2206405 - RNA, 23 nt, Human
uacuugccuuauuagagugucuu

SEQ ID NO: 2206406 - RNA, 21 nt, Human
uacuugcucuugaugccuggc

SEQ ID NO: 2206407 - RNA, 14 nt, Human
uacuugaccuccua

SEQ ID NO: 2206408 - RNA, 17 nt, Human
uacuuaccauaugugcu

SEQ ID NO: 2206409 - RNA, 16 nt, Human
uacuuaccuaaacaga

SEQ ID NO: 2206410 - RNA, 19 nt, Human
uacuuacaugcauuacugc

SEQ ID NO: 2206411 - RNA, 22 nt, Human
uacuuaccuaaacagauauaaa

SEQ ID NO: 2206412 - RNA, 16 nt, Human
uacuuagaggaaauaa

SEQ ID NO: 2206413 - RNA, 23 nt, Human
uacuuacaugcauuacugcaugc

SEQ ID NO: 2206414 - RNA, 15 nt, Human
uacuuaauccaaugg

SEQ ID NO: 2206415 - RNA, 18 nt, Human
uacuuaauuccuuucuca

SEQ ID NO: 2206416 - RNA, 13 nt, Human
uacuuaauuucuu

SEQ ID NO: 2206417 - RNA, 15 nt, Human
uacuuagcagcuauc

SEQ ID NO: 2206418 - RNA, 18 nt, Human
uacuuagcaaaguuuuac

SEQ ID NO: 2206419 - RNA, 22 nt, Human
uacuugaagggccagagccagg

SEQ ID NO: 2206420 - RNA, 21 nt, Human
uacuugaagggccagagccag

SEQ ID NO: 2206421 - RNA, 14 nt, Human
uacuguguguguga

SEQ ID NO: 2206422 - RNA, 18 nt, Human
uacugugugugugaauga

SEQ ID NO: 2206423 - RNA, 17 nt, Human
uacugugugugugaaug

SEQ ID NO: 2206424 - RNA, 21 nt, Human
uacugugugugugaaugaaca

SEQ ID NO: 2206425 - RNA, 19 nt, Human
uacugugugugugaaugaa

SEQ ID NO: 2206426 - RNA, 15 nt, Human
uacuguggcuucuua

SEQ ID NO: 2206427 - RNA, 23 nt, Human
uacuguguacagaauucugcuac

SEQ ID NO: 2206428 - RNA, 22 nt, Human
uacuguguacagaauucugcua

SEQ ID NO: 2206429 - RNA, 19 nt, Human
uacuuaauaaauucagaua

SEQ ID NO: 2206430 - RNA, 17 nt, Human
uacuuaauaaauucaga

SEQ ID NO: 2206431 - RNA, 14 nt, Human
uacuuaauaaauuc

SEQ ID NO: 2206432 - RNA, 17 nt, Human
uacuguuguccuauggg

SEQ ID NO: 2206433 - RNA, 14 nt, Human
uacuguugugaccu

SEQ ID NO: 2206434 - RNA, 16 nt, Human
uacuguucugugucuu

SEQ ID NO: 2206435 - RNA, 18 nt, Human
uacuguucucuucuugaa

SEQ ID NO: 2206436 - RNA, 12 nt, Human
uacuguucucuu

SEQ ID NO: 2206437 - RNA, 14 nt, Human
uacuguucuguguc

SEQ ID NO: 2206438 - RNA, 17 nt, Human
uacuguucugugucuuu

SEQ ID NO: 2206439 - RNA, 12 nt, Human
uacuguauuuga

SEQ ID NO: 2206440 - RNA, 23 nt, Human
uacuguauuuuguauuguuucaa

SEQ ID NO: 2206441 - RNA, 17 nt, Human
uacuguauuuuguauug

SEQ ID NO: 2206442 - RNA, 22 nt, Human
uacuguauuuuuaccuuuuucc

SEQ ID NO: 2206443 - RNA, 18 nt, Human
uacugucaaaauaauuuu

SEQ ID NO: 2206444 - RNA, 19 nt, Human
uacugucaaaauaauuuua

SEQ ID NO: 2206445 - RNA, 21 nt, Human
uacuguaucaugacaaagacu

SEQ ID NO: 2206446 - RNA, 14 nt, Human
uacugauuguuuca

SEQ ID NO: 2206447 - RNA, 19 nt, Human
uacugcagcuuuacaugca

SEQ ID NO: 2206448 - RNA, 22 nt, Human
uacugcagcuuuacaugcaauu

SEQ ID NO: 2206449 - RNA, 23 nt, Human
uacugcagcuuuacaugcaauuu

SEQ ID NO: 2206450 - RNA, 10 nt, Human
uacugcaggg

SEQ ID NO: 2206451 - RNA, 12 nt, Human
uacugcagggcc

SEQ ID NO: 2206452 - RNA, 14 nt, Human
uacugcagggccag

SEQ ID NO: 2206453 - RNA, 15 nt, Human
uacugcauacuuuuu

SEQ ID NO: 2206454 - RNA, 13 nt, Human
uacugcauacuuu

SEQ ID NO: 2206455 - RNA, 16 nt, Human
uacugcagggccagga

SEQ ID NO: 2206456 - RNA, 18 nt, Human
uacugcagggccaggacu

SEQ ID NO: 2206457 - RNA, 19 nt, Human
uacugcagggccaggacug

SEQ ID NO: 2206458 - RNA, 17 nt, Human
uacugcauaugaaagga

SEQ ID NO: 2206459 - RNA, 22 nt, Human
uacugcauacuuuuuaaaugua

SEQ ID NO: 2206460 - RNA, 21 nt, Human
uacugcauacuuuuuaaaugu

SEQ ID NO: 2206461 - RNA, 18 nt, Human
uacugcauacuuuuuaaa

SEQ ID NO: 2206462 - RNA, 17 nt, Human
uacugcauacuuuuuaa

SEQ ID NO: 2206463 - RNA, 14 nt, Human
uagaacaucccugc

SEQ ID NO: 2206464 - RNA, 18 nt, Human
uagaacaucccugccagc

SEQ ID NO: 2206465 - RNA, 22 nt, Human
uagaacauggagagcuagaacc

SEQ ID NO: 2206466 - RNA, 16 nt, Human
uagaaccaagaagggc

SEQ ID NO: 2206467 - RNA, 17 nt, Human
uagaaccaagaagggcu

SEQ ID NO: 2206468 - RNA, 23 nt, Human
uagaaccaagaagggcuagaacc

SEQ ID NO: 2206469 - RNA, 23 nt, Human
uagaacagagaaagaggaagcuu

SEQ ID NO: 2206470 - RNA, 17 nt, Human
uagaacagauaaucagu

SEQ ID NO: 2206471 - RNA, 18 nt, Human
uagaaauuagcuguguga

SEQ ID NO: 2206472 - RNA, 14 nt, Human
uagaaauuuccaga

SEQ ID NO: 2206473 - RNA, 23 nt, Human
uagaaauuuauuuccuaguucug

SEQ ID NO: 2206474 - RNA, 19 nt, Human
uagaaauuacacccaaaga

SEQ ID NO: 2206475 - RNA, 22 nt, Human
uagaaauuaccagaguuguucu

SEQ ID NO: 2206476 - RNA, 22 nt, Human
uagaaauuuuucagaugcuucu

SEQ ID NO: 2206477 - RNA, 19 nt, Human
uagaaauuuuucagaugcu

SEQ ID NO: 2206478 - RNA, 15 nt, Human
uagaaauuuccagag

SEQ ID NO: 2206479 - RNA, 16 nt, Human
uagaaauuuccagaga

SEQ ID NO: 2206480 - RNA, 16 nt, Human
uagaacaaaggacaga

SEQ ID NO: 2206481 - RNA, 20 nt, Human
uagaacaaaggacagaguau

SEQ ID NO: 2206482 - RNA, 14 nt, Human
uagaacacagaaag

SEQ ID NO: 2206483 - RNA, 15 nt, Human
uagaacacaggcaaa

SEQ ID NO: 2206484 - RNA, 15 nt, Human
uagaacacagaaagc

SEQ ID NO: 2206485 - RNA, 18 nt, Human
uagaaaugaccaauauua

SEQ ID NO: 2206486 - RNA, 19 nt, Human
uagaaaugaugauguggaa

SEQ ID NO: 2206487 - RNA, 15 nt, Human
uagaaaugguuguau

SEQ ID NO: 2206488 - RNA, 12 nt, Human
uagaaaucauuu

SEQ ID NO: 2206489 - RNA, 22 nt, Human
uagaaauagcuccguggagcag

SEQ ID NO: 2206490 - RNA, 14 nt, Human
uagaaauaugauuu

SEQ ID NO: 2206491 - RNA, 16 nt, Human
uagaaaugguuguauu

SEQ ID NO: 2206492 - RNA, 17 nt, Human
uagaaaugguuguauua

SEQ ID NO: 2206493 - RNA, 19 nt, Human
uagaaaugguuguauuaga

SEQ ID NO: 2206494 - RNA, 20 nt, Human
uagaaaugguuguauuagau

SEQ ID NO: 2206495 - RNA, 23 nt, Human
uagaaaugguuguauuagauguu

SEQ ID NO: 2206496 - RNA, 19 nt, Human
uagaaauguaacuuuugua

SEQ ID NO: 2206497 - RNA, 23 nt, Human
uagaaauaucugaaaauguaugu

SEQ ID NO: 2206498 - RNA, 21 nt, Human
uagaaauaucugaaaauguau

SEQ ID NO: 2206499 - RNA, 20 nt, Human
uagaaauaucugaaaaugua

SEQ ID NO: 2206500 - RNA, 15 nt, Human
uagaaauauaauuga

SEQ ID NO: 2206501 - RNA, 15 nt, Human
uagaaaggggcccag

SEQ ID NO: 2206502 - RNA, 19 nt, Human
uagaaauaaaggaugugau

SEQ ID NO: 2206503 - RNA, 20 nt, Human
uagaaaguucaaaaagucua

SEQ ID NO: 2206504 - RNA, 15 nt, Human
uagaaauaauaugca

SEQ ID NO: 2206505 - RNA, 16 nt, Human
uagaaauaagugguua

SEQ ID NO: 2206506 - RNA, 22 nt, Human
uagaaauaagugguuauuucuc

SEQ ID NO: 2206507 - RNA, 16 nt, Human
uagaaauaauaugcau

SEQ ID NO: 2206508 - RNA, 23 nt, Human
uagaaauaagugguuauuucuca

SEQ ID NO: 2206509 - RNA, 21 nt, Human
uagaaauagcuccguggagca

SEQ ID NO: 2206510 - RNA, 16 nt, Human
uagaaauaaauagcua

SEQ ID NO: 2206511 - RNA, 11 nt, Human
uagaaauaagu

SEQ ID NO: 2206512 - RNA, 12 nt, Human
uagaaauaagug

SEQ ID NO: 2206513 - RNA, 19 nt, Human
uagaaauaaauagcuauau

SEQ ID NO: 2206514 - RNA, 20 nt, Human
uagaaauaaaggaugugauu

SEQ ID NO: 2206515 - RNA, 22 nt, Human
uagaaagccaaaucaaaauaug

SEQ ID NO: 2206516 - RNA, 15 nt, Human
uagaaagcaggggcu

SEQ ID NO: 2206517 - RNA, 23 nt, Human
uagaaagccuguuccccucacug

SEQ ID NO: 2206518 - RNA, 13 nt, Human
uagaaaggccuuu

SEQ ID NO: 2206519 - RNA, 14 nt, Human
uagaaaggccuuua

SEQ ID NO: 2206520 - RNA, 15 nt, Human
uagaaaggccuuuaa

SEQ ID NO: 2206521 - RNA, 16 nt, Human
uagaaaggccuuuaaa

SEQ ID NO: 2206522 - RNA, 15 nt, Human
uagaaagcauuugaa

SEQ ID NO: 2206523 - RNA, 16 nt, Human
uagaaagcauuugaau

SEQ ID NO: 2206524 - RNA, 17 nt, Human
uagaaagcauuugaaug

SEQ ID NO: 2206525 - RNA, 18 nt, Human
uagaaagcauuugaaugc

SEQ ID NO: 2206526 - RNA, 19 nt, Human
uagaaagcauuugaaugca

SEQ ID NO: 2206527 - RNA, 20 nt, Human
uagaaagcauuugaaugcau

SEQ ID NO: 2206528 - RNA, 21 nt, Human
uagaaagcauuugaaugcauu

SEQ ID NO: 2206529 - RNA, 22 nt, Human
uagaaagcauuugaaugcauuu

SEQ ID NO: 2206530 - RNA, 17 nt, Human
uagaaagacagagcugg

SEQ ID NO: 2206531 - RNA, 21 nt, Human
uagaaagaagcccaauauuau

SEQ ID NO: 2206532 - RNA, 23 nt, Human
uagaaagaagcccaauauuauaa

SEQ ID NO: 2206533 - RNA, 15 nt, Human
uagaaagaagaugaa

SEQ ID NO: 2206534 - RNA, 14 nt, Human
uagaaagaagccca

SEQ ID NO: 2206535 - RNA, 15 nt, Human
uagaaacuuccaaau

SEQ ID NO: 2206536 - RNA, 13 nt, Human
uagaaagcauuug

SEQ ID NO: 2206537 - RNA, 14 nt, Human
uagaaagcauuuga

SEQ ID NO: 2206538 - RNA, 14 nt, Human
uagaaagcaggggc

SEQ ID NO: 2206539 - RNA, 22 nt, Human
uagaaagcaggggcuacaagag

SEQ ID NO: 2206540 - RNA, 15 nt, Human
uacuuuaccaccccc

SEQ ID NO: 2206541 - RNA, 19 nt, Human
uacuuuaccacccccacac

SEQ ID NO: 2206542 - RNA, 16 nt, Human
uacuuuacucauuuuu

SEQ ID NO: 2206543 - RNA, 17 nt, Human
uacuuuauguuacuaca

SEQ ID NO: 2206544 - RNA, 20 nt, Human
uacuuuauguuacuacaugc

SEQ ID NO: 2206545 - RNA, 20 nt, Human
uacuuuauuuauacacuguc

SEQ ID NO: 2206546 - RNA, 20 nt, Human
uacuuucauccugacucugc

SEQ ID NO: 2206547 - RNA, 18 nt, Human
uacugaucaugcauuguu

SEQ ID NO: 2206548 - RNA, 18 nt, Human
uacugauucacugcaugg

SEQ ID NO: 2206549 - RNA, 23 nt, Human
uacugauguuccuagugaaagag

SEQ ID NO: 2206550 - RNA, 17 nt, Human
uacugaucaugcauugu

SEQ ID NO: 2206551 - RNA, 16 nt, Human
uacugaucaugcauug

SEQ ID NO: 2206552 - RNA, 16 nt, Human
uacugauauauuuuac

SEQ ID NO: 2206553 - RNA, 14 nt, Human
uacugauauauuuu

SEQ ID NO: 2206554 - RNA, 16 nt, Human
uacugaguuacauugu

SEQ ID NO: 2206555 - RNA, 16 nt, Human
uacugauaaagaaaga

SEQ ID NO: 2206556 - RNA, 22 nt, Human
uacugaggccuaaaaguaaaca

SEQ ID NO: 2206557 - RNA, 23 nt, Human
uacugagggaccaacugggccca

SEQ ID NO: 2206558 - RNA, 18 nt, Human
uacugagcuucucuguga

SEQ ID NO: 2206559 - RNA, 14 nt, Human
uacugagcuucucu

SEQ ID NO: 2206560 - RNA, 17 nt, Human
uacugagcuucucugug

SEQ ID NO: 2206561 - RNA, 19 nt, Human
uacugagccuuguaauucu

SEQ ID NO: 2206562 - RNA, 23 nt, Human
uacugagccuuguaauucuaaau

SEQ ID NO: 2206563 - RNA, 15 nt, Human
uacugaggugcuaug

SEQ ID NO: 2206564 - RNA, 15 nt, Human
uacugagccuuguaa

SEQ ID NO: 2206565 - RNA, 18 nt, Human
uacugagccuuguaauuc

SEQ ID NO: 2206566 - RNA, 17 nt, Human
uacuccucuuuacacug

SEQ ID NO: 2206567 - RNA, 14 nt, Human
uacuccucugcagu

SEQ ID NO: 2206568 - RNA, 16 nt, Human
uacuccucugcagugc

SEQ ID NO: 2206569 - RNA, 21 nt, Human
uacuccucugcagugccuugg

SEQ ID NO: 2206570 - RNA, 22 nt, Human
uacuccucugcagugccuuggg

SEQ ID NO: 2206571 - RNA, 11 nt, Human
uacucaugugu

SEQ ID NO: 2206572 - RNA, 12 nt, Human
uacuccucugca

SEQ ID NO: 2206573 - RNA, 13 nt, Human
uacuccucugcag

SEQ ID NO: 2206574 - RNA, 22 nt, Human
uacuccugcaaaauuuuauagc

SEQ ID NO: 2206575 - RNA, 17 nt, Human
uacuccuguaauuccua

SEQ ID NO: 2206576 - RNA, 19 nt, Human
uacuccuguaauuccuacc

SEQ ID NO: 2206577 - RNA, 22 nt, Human
uacuccuguaauuccuaccucc

SEQ ID NO: 2206578 - RNA, 17 nt, Human
uacuccugcaaaauuuu

SEQ ID NO: 2206579 - RNA, 16 nt, Human
uacuccugcaaaauuu

SEQ ID NO: 2206580 - RNA, 14 nt, Human
uacuccugcaaaau

SEQ ID NO: 2206581 - RNA, 12 nt, Human
uacuccugcaaa

SEQ ID NO: 2206582 - RNA, 12 nt, Human
uacucccaucug

SEQ ID NO: 2206583 - RNA, 14 nt, Human
uacucccaucugug

SEQ ID NO: 2206584 - RNA, 16 nt, Human
uacucccaucugugaa

SEQ ID NO: 2206585 - RNA, 17 nt, Human
uacucccaucugugaaa

SEQ ID NO: 2206586 - RNA, 18 nt, Human
uacuacaugugggagcuu

SEQ ID NO: 2206587 - RNA, 17 nt, Human
uacuacaucgcccucca

SEQ ID NO: 2206588 - RNA, 13 nt, Human
uacuacaugcacu

SEQ ID NO: 2206589 - RNA, 14 nt, Human
uacuaccuugaaaa

SEQ ID NO: 2206590 - RNA, 13 nt, Human
uacuaccuugaaa

SEQ ID NO: 2206591 - RNA, 20 nt, Human
uacuacaguccucccaucuc

SEQ ID NO: 2206592 - RNA, 20 nt, Human
uacuacaguuuguuaguaug

SEQ ID NO: 2206593 - RNA, 15 nt, Human
uacucacagucucuu

SEQ ID NO: 2206594 - RNA, 20 nt, Human
uacuaccuugaaaauaagaa

SEQ ID NO: 2206595 - RNA, 16 nt, Human
uacuaccuugaaaaua

SEQ ID NO: 2206596 - RNA, 12 nt, Human
uacucaccucac

SEQ ID NO: 2206597 - RNA, 18 nt, Human
uacuacuagaugucuuua

SEQ ID NO: 2206598 - RNA, 17 nt, Human
uacuacuagaugucuuu

SEQ ID NO: 2206599 - RNA, 21 nt, Human
uacucacagucucuuuaaucu

SEQ ID NO: 2206600 - RNA, 20 nt, Human
uacucacuuucuagauuaag

SEQ ID NO: 2206601 - RNA, 14 nt, Human
uacucaccucaccc

SEQ ID NO: 2206602 - RNA, 16 nt, Human
uacucagcccugggcc

SEQ ID NO: 2206603 - RNA, 15 nt, Human
uacucagcccugggc

SEQ ID NO: 2206604 - RNA, 14 nt, Human
uacucagcccuggg

SEQ ID NO: 2206605 - RNA, 13 nt, Human
uacucagcccugg

SEQ ID NO: 2206606 - RNA, 12 nt, Human
uacucagcccug

SEQ ID NO: 2206607 - RNA, 23 nt, Human
uacucagcagcccuccucacccc

SEQ ID NO: 2206608 - RNA, 20 nt, Human
uacucagcagcccuccucac

SEQ ID NO: 2206609 - RNA, 19 nt, Human
uacucagcagcccuccuca

SEQ ID NO: 2206610 - RNA, 23 nt, Human
uacucagcccugggccccaccac

SEQ ID NO: 2206611 - RNA, 22 nt, Human
uacucagcccugggccccacca

SEQ ID NO: 2206612 - RNA, 13 nt, Human
uacucaggaagaa

SEQ ID NO: 2206613 - RNA, 22 nt, Human
uacucaggaggcugaggcagaa

SEQ ID NO: 2206614 - RNA, 12 nt, Human
uacucaggaggc

SEQ ID NO: 2206615 - RNA, 14 nt, Human
uacucaggaagaac

SEQ ID NO: 2206616 - RNA, 17 nt, Human
uacucaugaucuuguga

SEQ ID NO: 2206617 - RNA, 16 nt, Human
uacucaugaucuugug

SEQ ID NO: 2206618 - RNA, 23 nt, Human
uacucauauauaucuaucuuaua

SEQ ID NO: 2206619 - RNA, 17 nt, Human
uacucauccuuguauaa

SEQ ID NO: 2206620 - RNA, 21 nt, Human
uacucauauauaucuaucuua

SEQ ID NO: 2206621 - RNA, 19 nt, Human
uacucauauauaucuaucu

SEQ ID NO: 2206622 - RNA, 20 nt, Human
uacucauaaugugaaguguu

SEQ ID NO: 2206623 - RNA, 21 nt, Human
uacucauaaugugaaguguua

SEQ ID NO: 2206624 - RNA, 15 nt, Human
uacucaggaggcuga

SEQ ID NO: 2206625 - RNA, 14 nt, Human
uacucauaauguga

SEQ ID NO: 2206626 - RNA, 15 nt, Human
uacucauaaugugaa

SEQ ID NO: 2206627 - RNA, 19 nt, Human
uacucauaaugugaagugu

SEQ ID NO: 2206628 - RNA, 17 nt, Human
uacucagaagccugagg

SEQ ID NO: 2206629 - RNA, 16 nt, Human
uacucagaagccugag

SEQ ID NO: 2206630 - RNA, 19 nt, Human
uacucagaagccugaggcu

SEQ ID NO: 2206631 - RNA, 14 nt, Human
uacucagaauuaag

SEQ ID NO: 2206632 - RNA, 16 nt, Human
uacucagaauucucua

SEQ ID NO: 2206633 - RNA, 18 nt, Human
uacucagcagcccuccuc

SEQ ID NO: 2206634 - RNA, 17 nt, Human
uacucagcagcccuccu

SEQ ID NO: 2206635 - RNA, 16 nt, Human
uacucagcagcccucc

SEQ ID NO: 2206636 - RNA, 15 nt, Human
uacucagcagcccuc

SEQ ID NO: 2206637 - RNA, 14 nt, Human
uacucagcagcccu

SEQ ID NO: 2206638 - RNA, 22 nt, Human
uacucagaauucucuaguuuga

SEQ ID NO: 2206639 - RNA, 14 nt, Human
uacgaauacuuuug

SEQ ID NO: 2206640 - RNA, 22 nt, Human
uaccuuuuuuauacauaaacaa

SEQ ID NO: 2206641 - RNA, 23 nt, Human
uaccuuuguucccaaauuucaua

SEQ ID NO: 2206642 - RNA, 17 nt, Human
uacgacuuuauuuucug

SEQ ID NO: 2206643 - RNA, 14 nt, Human
uacuaacuaaacuc

SEQ ID NO: 2206644 - RNA, 15 nt, Human
uacgacuuuauuuuc

SEQ ID NO: 2206645 - RNA, 14 nt, Human
uacgacuuuauuuu

SEQ ID NO: 2206646 - RNA, 15 nt, Human
uacuaacuaaacucu

SEQ ID NO: 2206647 - RNA, 19 nt, Human
uacuaaccagcagaaaugc

SEQ ID NO: 2206648 - RNA, 18 nt, Human
uacuaaccagcagaaaug

SEQ ID NO: 2206649 - RNA, 17 nt, Human
uacuaaccagcagaaau

SEQ ID NO: 2206650 - RNA, 18 nt, Human
uacuacacauucaauaag

SEQ ID NO: 2206651 - RNA, 18 nt, Human
uacuacaaaauuugaaau

SEQ ID NO: 2206652 - RNA, 13 nt, Human
uacuacaaaauuu

SEQ ID NO: 2206653 - RNA, 12 nt, Human
uacuacaguccu

SEQ ID NO: 2206654 - RNA, 17 nt, Human
uacuacaguccucccau

SEQ ID NO: 2206655 - RNA, 22 nt, Human
uacuaauaaaauuuaaaagucu

SEQ ID NO: 2206656 - RNA, 17 nt, Human
uacuaauagacaauuua

SEQ ID NO: 2206657 - RNA, 15 nt, Human
uacuaauagacaauu

SEQ ID NO: 2206658 - RNA, 16 nt, Human
uaccuuuaugguuucu

SEQ ID NO: 2206659 - RNA, 14 nt, Human
uaccuuuaugguuu

SEQ ID NO: 2206660 - RNA, 12 nt, Human
uaccuuugucac

SEQ ID NO: 2206661 - RNA, 18 nt, Human
uaccuuuuuuauacauaa

SEQ ID NO: 2206662 - RNA, 20 nt, Human
uaccuuuuuuauacauaaac

SEQ ID NO: 2206663 - RNA, 19 nt, Human
uaccuuuuuuauacauaaa

SEQ ID NO: 2206664 - RNA, 18 nt, Human
uaccuugugacccagcac

SEQ ID NO: 2206665 - RNA, 20 nt, Human
uaccuuguauacuguaggca

SEQ ID NO: 2206666 - RNA, 14 nt, Human
uaccuuguauacug

SEQ ID NO: 2206667 - RNA, 16 nt, Human
uaccuuguauacugua

SEQ ID NO: 2206668 - RNA, 22 nt, Human
uaccuugguucccccacugauc

SEQ ID NO: 2206669 - RNA, 13 nt, Human
uaccuugguuccc

SEQ ID NO: 2206670 - RNA, 19 nt, Human
uaccuuugacaaagguaaa

SEQ ID NO: 2206671 - RNA, 20 nt, Human
uaccuuuguauucucuccug

SEQ ID NO: 2206672 - RNA, 21 nt, Human
uacccauucguggugaucaau

SEQ ID NO: 2206673 - RNA, 22 nt, Human
uacccauccccgcagugugcac

SEQ ID NO: 2206674 - RNA, 18 nt, Human
uacccaugacuuuauaug

SEQ ID NO: 2206675 - RNA, 14 nt, Human
uaccuuccuucccu

SEQ ID NO: 2206676 - RNA, 15 nt, Human
uaccuuccuucccug

SEQ ID NO: 2206677 - RNA, 16 nt, Human
uaccuuccuucccugg

SEQ ID NO: 2206678 - RNA, 18 nt, Human
uaccuugaacacuggggg

SEQ ID NO: 2206679 - RNA, 22 nt, Human
uaccuugaaaauaagaauagaa

SEQ ID NO: 2206680 - RNA, 14 nt, Human
uaccuucucccuca

SEQ ID NO: 2206681 - RNA, 14 nt, Human
uaccuucuguaguu

SEQ ID NO: 2206682 - RNA, 15 nt, Human
uaccuugaggucuuu

SEQ ID NO: 2206683 - RNA, 22 nt, Human
uaccuucucccucauuucagga

SEQ ID NO: 2206684 - RNA, 15 nt, Human
uacccaccucagccu

SEQ ID NO: 2206685 - RNA, 14 nt, Human
uacccaccucagcc

SEQ ID NO: 2206686 - RNA, 21 nt, Human
uacccacguucucacacccac

SEQ ID NO: 2206687 - RNA, 16 nt, Human
uacccagggccugcag

SEQ ID NO: 2206688 - RNA, 22 nt, Human
uacccaguaacucaucugucac

SEQ ID NO: 2206689 - RNA, 19 nt, Human
uacccaguaacucaucugu

SEQ ID NO: 2206690 - RNA, 17 nt, Human
uacccauccccgcagug

SEQ ID NO: 2206691 - RNA, 15 nt, Human
uacccauauccccuc

SEQ ID NO: 2206692 - RNA, 12 nt, Human
uacccauauccc

SEQ ID NO: 2206693 - RNA, 22 nt, Human
uacccaucccauaugccugggc

SEQ ID NO: 2206694 - RNA, 15 nt, Human
uaccaaucauuuuaa

SEQ ID NO: 2206695 - RNA, 19 nt, Human
uaccaaucauuuuaauuau

SEQ ID NO: 2206696 - RNA, 20 nt, Human
uaccaaucauuuuaauuauu

SEQ ID NO: 2206697 - RNA, 22 nt, Human
uaccaaucauuuuaauuauuau

SEQ ID NO: 2206698 - RNA, 13 nt, Human
uaccaaugaaaaa

SEQ ID NO: 2206699 - RNA, 17 nt, Human
uaccaaugaaaaaaugu

SEQ ID NO: 2206700 - RNA, 15 nt, Human
uaccaaugaaaaaau

SEQ ID NO: 2206701 - RNA, 13 nt, Human
uaccaaugcaugc

SEQ ID NO: 2206702 - RNA, 13 nt, Human
uaccaaugcugca

SEQ ID NO: 2206703 - RNA, 11 nt, Human
uaccaaugcau

SEQ ID NO: 2206704 - RNA, 12 nt, Human
uaccaaugcaug

SEQ ID NO: 2206705 - RNA, 14 nt, Human
uaccaaugcaugca

SEQ ID NO: 2206706 - RNA, 13 nt, Human
uaccacagacaua

SEQ ID NO: 2206707 - RNA, 16 nt, Human
uaccaaguuucaggua

SEQ ID NO: 2206708 - RNA, 21 nt, Human
uaccaaguuucagguauuaag

SEQ ID NO: 2206709 - RNA, 14 nt, Human
uaccaacuuucugu

SEQ ID NO: 2206710 - RNA, 15 nt, Human
uaccaacuuucugua

SEQ ID NO: 2206711 - RNA, 17 nt, Human
uaccaacuuucuguaaa

SEQ ID NO: 2206712 - RNA, 19 nt, Human
uaccaacuuucuguaaacu

SEQ ID NO: 2206713 - RNA, 22 nt, Human
uaccaauagauuccccauugcc

SEQ ID NO: 2206714 - RNA, 23 nt, Human
uaccauuuugggguacccacugc

SEQ ID NO: 2206715 - RNA, 20 nt, Human
uaccauuuuuuaaggaaaca

SEQ ID NO: 2206716 - RNA, 21 nt, Human
uaccauuuauacaaauuagaa

SEQ ID NO: 2206717 - RNA, 16 nt, Human
uaccauuucagagagg

SEQ ID NO: 2206718 - RNA, 15 nt, Human
uaccauuugccuccc

SEQ ID NO: 2206719 - RNA, 18 nt, Human
uaccauuuauacaaauua

SEQ ID NO: 2206720 - RNA, 17 nt, Human
uaccauuuauacaaauu

SEQ ID NO: 2206721 - RNA, 15 nt, Human
uaccauuuauacaaa

SEQ ID NO: 2206722 - RNA, 14 nt, Human
uaccauuuauacaa

SEQ ID NO: 2206723 - RNA, 15 nt, Human
uaccauuucagagag

SEQ ID NO: 2206724 - RNA, 12 nt, Human
uaccauuucaga

SEQ ID NO: 2206725 - RNA, 14 nt, Human
uaccacagugucug

SEQ ID NO: 2206726 - RNA, 19 nt, Human
uaccaaugcuuuuaucaaa

SEQ ID NO: 2206727 - RNA, 12 nt, Human
uaccacagcagc

SEQ ID NO: 2206728 - RNA, 15 nt, Human
uaccaccacgcccgg

SEQ ID NO: 2206729 - RNA, 23 nt, Human
uaccacaggaaccacaagacugc

SEQ ID NO: 2206730 - RNA, 13 nt, Human
uaccacagugucu

SEQ ID NO: 2206731 - RNA, 20 nt, Human
uacccacguucucacaccca

SEQ ID NO: 2206732 - RNA, 11 nt, Human
uacccacugcu

SEQ ID NO: 2206733 - RNA, 12 nt, Human
uacccacugcuc

SEQ ID NO: 2206734 - RNA, 13 nt, Human
uacccacugcucu

SEQ ID NO: 2206735 - RNA, 14 nt, Human
uacccacugcucug

SEQ ID NO: 2206736 - RNA, 16 nt, Human
uacccagcgagcccug

SEQ ID NO: 2206737 - RNA, 18 nt, Human
uacccagcgagcccuggu

SEQ ID NO: 2206738 - RNA, 22 nt, Human
uacccaggugcuaggaacacuc

SEQ ID NO: 2206739 - RNA, 12 nt, Human
uacccaccccca

SEQ ID NO: 2206740 - RNA, 15 nt, Human
uacccacccccaccc

SEQ ID NO: 2206741 - RNA, 17 nt, Human
uacccaaauccucucca

SEQ ID NO: 2206742 - RNA, 13 nt, Human
uacccaaccacuc

SEQ ID NO: 2206743 - RNA, 21 nt, Human
uacccaaccacucaaauuaau

SEQ ID NO: 2206744 - RNA, 12 nt, Human
uacccaagcaaa

SEQ ID NO: 2206745 - RNA, 11 nt, Human
uacccaaagga

SEQ ID NO: 2206746 - RNA, 22 nt, Human
uacccaaaggauacuguaacac

SEQ ID NO: 2206747 - RNA, 21 nt, Human
uaccauuuuuuaaggaaacaa

SEQ ID NO: 2206748 - RNA, 23 nt, Human
uacccacccccacccaagggccu

SEQ ID NO: 2206749 - RNA, 18 nt, Human
uacccacaccucugccag

SEQ ID NO: 2206750 - RNA, 17 nt, Human
uacccacaccucugcca

SEQ ID NO: 2206751 - RNA, 19 nt, Human
uacccacaccucugccaga

SEQ ID NO: 2206752 - RNA, 17 nt, Human
uacccacccccacccaa

SEQ ID NO: 2206753 - RNA, 19 nt, Human
uacccacccccacccaagg

SEQ ID NO: 2206754 - RNA, 17 nt, Human
uaccaaaugcuuuaaaa

SEQ ID NO: 2206755 - RNA, 18 nt, Human
uaccaaaccgccagcgaa

SEQ ID NO: 2206756 - RNA, 12 nt, Human
uaccaaccuguu

SEQ ID NO: 2206757 - RNA, 20 nt, Human
uaccaaaugcuuuaaaaacu

SEQ ID NO: 2206758 - RNA, 20 nt, Human
uaccaacuguuuagggcccu

SEQ ID NO: 2206759 - RNA, 13 nt, Human
uaccaacuuucug

SEQ ID NO: 2206760 - RNA, 23 nt, Human
uaccaaaauuauuucagaaaugu

SEQ ID NO: 2206761 - RNA, 16 nt, Human
uaccaacacgagcagg

SEQ ID NO: 2206762 - RNA, 17 nt, Human
uaccaaaauuauuucag

SEQ ID NO: 2206763 - RNA, 18 nt, Human
uaccaaaauuauuucaga

SEQ ID NO: 2206764 - RNA, 14 nt, Human
uacauuuuauauua

SEQ ID NO: 2206765 - RNA, 14 nt, Human
uacaugauucauuu

SEQ ID NO: 2206766 - RNA, 16 nt, Human
uacaugcaauuuauua

SEQ ID NO: 2206767 - RNA, 19 nt, Human
uacaugcaauuuauuaaaa

SEQ ID NO: 2206768 - RNA, 15 nt, Human
uacaugauucauuuu

SEQ ID NO: 2206769 - RNA, 22 nt, Human
uacaugagguacugagagugaa

SEQ ID NO: 2206770 - RNA, 21 nt, Human
uacaugagguacugagaguga

SEQ ID NO: 2206771 - RNA, 17 nt, Human
uacauuuguauaaaaua

SEQ ID NO: 2206772 - RNA, 11 nt, Human
uacauuugugu

SEQ ID NO: 2206773 - RNA, 16 nt, Human
uacauuuguauaaaau

SEQ ID NO: 2206774 - RNA, 23 nt, Human
uacauuuggagacacaacuauuu

SEQ ID NO: 2206775 - RNA, 20 nt, Human
uacaugcaauuuauuaaaau

SEQ ID NO: 2206776 - RNA, 19 nt, Human
uacauaagauaaaugugcu

SEQ ID NO: 2206777 - RNA, 18 nt, Human
uacauaagauaaaugugc

SEQ ID NO: 2206778 - RNA, 18 nt, Human
uacaguuccuagguauaa

SEQ ID NO: 2206779 - RNA, 12 nt, Human
uacaguucaguu

SEQ ID NO: 2206780 - RNA, 19 nt, Human
uacaguguuauuuucuuug

SEQ ID NO: 2206781 - RNA, 14 nt, Human
uacaguguucuguu

SEQ ID NO: 2206782 - RNA, 15 nt, Human
uacaguguucuguuu

SEQ ID NO: 2206783 - RNA, 16 nt, Human
uacaguguuauuuucu

SEQ ID NO: 2206784 - RNA, 19 nt, Human
uacaguuacucagaauucu

SEQ ID NO: 2206785 - RNA, 13 nt, Human
uacaguuaaguuu

SEQ ID NO: 2206786 - RNA, 23 nt, Human
uacaguuacucagaauucucuag

SEQ ID NO: 2206787 - RNA, 18 nt, Human
uacaugaauugcauuuua

SEQ ID NO: 2206788 - RNA, 15 nt, Human
uacaucuuucacauu

SEQ ID NO: 2206789 - RNA, 14 nt, Human
uacaucuuucacau

SEQ ID NO: 2206790 - RNA, 14 nt, Human
uacaucuucugccu

SEQ ID NO: 2206791 - RNA, 17 nt, Human
uacaucuucugccuuag

SEQ ID NO: 2206792 - RNA, 19 nt, Human
uacaugacucagcauaccu

SEQ ID NO: 2206793 - RNA, 17 nt, Human
uacaugagaacaaacag

SEQ ID NO: 2206794 - RNA, 21 nt, Human
uacaugacauuuauuuuucau

SEQ ID NO: 2206795 - RNA, 16 nt, Human
uacaugacauuuauuu

SEQ ID NO: 2206796 - RNA, 16 nt, Human
uacaugagaaggaacu

SEQ ID NO: 2206797 - RNA, 18 nt, Human
uacaugagaacaaacaga

SEQ ID NO: 2206798 - RNA, 15 nt, Human
uacaucgcccuccac

SEQ ID NO: 2206799 - RNA, 15 nt, Human
uacauccucaugcag

SEQ ID NO: 2206800 - RNA, 14 nt, Human
uacaucgcccucca

SEQ ID NO: 2206801 - RNA, 19 nt, Human
uacaucuauuuuggauugu

SEQ ID NO: 2206802 - RNA, 18 nt, Human
uacaucuauuuuggauug

SEQ ID NO: 2206803 - RNA, 23 nt, Human
uacaucuauuuuggauuguauau

SEQ ID NO: 2206804 - RNA, 22 nt, Human
uacaucuauuuuggauuguaua

SEQ ID NO: 2206805 - RNA, 20 nt, Human
uacaucuauuuuggauugua

SEQ ID NO: 2206806 - RNA, 22 nt, Human
uacauaagauaaaugugcugaa

SEQ ID NO: 2206807 - RNA, 15 nt, Human
uacauaaguaauuca

SEQ ID NO: 2206808 - RNA, 22 nt, Human
uacaguucaguuccucuuugca

SEQ ID NO: 2206809 - RNA, 22 nt, Human
uacauaagcggcguaaguuuaa

SEQ ID NO: 2206810 - RNA, 22 nt, Human
uacauccucaugcagccgugau

SEQ ID NO: 2206811 - RNA, 18 nt, Human
uacacaccuuauauuuac

SEQ ID NO: 2206812 - RNA, 17 nt, Human
uacacacugcauguuug

SEQ ID NO: 2206813 - RNA, 17 nt, Human
uacacaccuaagggaca

SEQ ID NO: 2206814 - RNA, 22 nt, Human
uacacaccuaagggacauguuu

SEQ ID NO: 2206815 - RNA, 23 nt, Human
uacacacacacacacagccacac

SEQ ID NO: 2206816 - RNA, 22 nt, Human
uacacacacacacacagccaca

SEQ ID NO: 2206817 - RNA, 21 nt, Human
uacacacacacgcgugcacac

SEQ ID NO: 2206818 - RNA, 15 nt, Human
uacacacacauacac

SEQ ID NO: 2206819 - RNA, 17 nt, Human
uacacaaugguuuucuu

SEQ ID NO: 2206820 - RNA, 15 nt, Human
uacacaaguaaacau

SEQ ID NO: 2206821 - RNA, 16 nt, Human
uacacaaguaaacauu

SEQ ID NO: 2206822 - RNA, 21 nt, Human
uacacaaugguuuucuugugu

SEQ ID NO: 2206823 - RNA, 23 nt, Human
uacacaaugguuuucuugugugu

SEQ ID NO: 2206824 - RNA, 12 nt, Human
uacacugugaac

SEQ ID NO: 2206825 - RNA, 16 nt, Human
uacacuguauuuguau

SEQ ID NO: 2206826 - RNA, 21 nt, Human
uacacugguuugagcuuagug

SEQ ID NO: 2206827 - RNA, 22 nt, Human
uacacuggaggagagaagaaug

SEQ ID NO: 2206828 - RNA, 19 nt, Human
uacacuggaggagagaaga

SEQ ID NO: 2206829 - RNA, 21 nt, Human
uacacuggaggagagaagaau

SEQ ID NO: 2206830 - RNA, 14 nt, Human
uacacuguuucaaa

SEQ ID NO: 2206831 - RNA, 16 nt, Human
uacacugugcugaguc

SEQ ID NO: 2206832 - RNA, 22 nt, Human
uacacacugcauguuugugauu

SEQ ID NO: 2206833 - RNA, 22 nt, Human
uacacagaucacagcuucagcc

SEQ ID NO: 2206834 - RNA, 18 nt, Human
uacacagaaauacaguua

SEQ ID NO: 2206835 - RNA, 18 nt, Human
uacacagagcaggacugc

SEQ ID NO: 2206836 - RNA, 23 nt, Human
uaauuuucuucaugcaaugacau

SEQ ID NO: 2206837 - RNA, 14 nt, Human
uaauuuucuucaug

SEQ ID NO: 2206838 - RNA, 12 nt, Human
uaauuuucuacc

SEQ ID NO: 2206839 - RNA, 15 nt, Human
uaauuuugaauaaau

SEQ ID NO: 2206840 - RNA, 12 nt, Human
uaauuuugacac

SEQ ID NO: 2206841 - RNA, 21 nt, Human
uaauuuugacacuauaucugu

SEQ ID NO: 2206842 - RNA, 13 nt, Human
uaauuuugaaaaa

SEQ ID NO: 2206843 - RNA, 17 nt, Human
uaauuuugaaaaacugc

SEQ ID NO: 2206844 - RNA, 14 nt, Human
uaauuuuguauuuu

SEQ ID NO: 2206845 - RNA, 13 nt, Human
uaauuuuguauuu

SEQ ID NO: 2206846 - RNA, 21 nt, Human
uaauuuuguauuuuccaagug

SEQ ID NO: 2206847 - RNA, 15 nt, Human
uaauuuuguauuuuc

SEQ ID NO: 2206848 - RNA, 18 nt, Human
uaauuuuguauuuuccaa

SEQ ID NO: 2206849 - RNA, 14 nt, Human
uaauuuugguugua

SEQ ID NO: 2206850 - RNA, 17 nt, Human
uaauuuugguuguauuc

SEQ ID NO: 2206851 - RNA, 18 nt, Human
uaauuuugguuguauucu

SEQ ID NO: 2206852 - RNA, 21 nt, Human
uaauuuugguuguauucuuug

SEQ ID NO: 2206853 - RNA, 22 nt, Human
uaauuuugguuguauucuuuga

SEQ ID NO: 2206854 - RNA, 24 nt, Human
uacaagaugaaggagaggcaacau

SEQ ID NO: 2206855 - RNA, 23 nt, Human
uacaagagcagccuguggcaucu

SEQ ID NO: 2206856 - RNA, 20 nt, Human
uacaagagcagccuguggca

SEQ ID NO: 2206857 - RNA, 19 nt, Human
uacaagagcuuaacagugu

SEQ ID NO: 2206858 - RNA, 19 nt, Human
uacaagagcagccuguggc

SEQ ID NO: 2206859 - RNA, 16 nt, Human
uacaagagcagccugu

SEQ ID NO: 2206860 - RNA, 15 nt, Human
uacaagacacaguga

SEQ ID NO: 2206861 - RNA, 14 nt, Human
uacacaaguaaaca

SEQ ID NO: 2206862 - RNA, 23 nt, Human
uacacaaaacaaaugccacacau

SEQ ID NO: 2206863 - RNA, 21 nt, Human
uacaauuuuuuuaauuuugua

SEQ ID NO: 2206864 - RNA, 22 nt, Human
uacaauuuuuuuaauuuuguau

SEQ ID NO: 2206865 - RNA, 23 nt, Human
uacaauuuuuuaucaugcauguc

SEQ ID NO: 2206866 - RNA, 13 nt, Human
uacaagauuagaa

SEQ ID NO: 2206867 - RNA, 20 nt, Human
uacaauuuuuuuaauuuugu

SEQ ID NO: 2206868 - RNA, 17 nt, Human
uacaauuuuuuaucaug

SEQ ID NO: 2206869 - RNA, 21 nt, Human
uacaagauuagaagcugaaaa

SEQ ID NO: 2206870 - RNA, 13 nt, Human
uacaguguacagu

SEQ ID NO: 2206871 - RNA, 21 nt, Human
uacagugguuuuauacugaag

SEQ ID NO: 2206872 - RNA, 15 nt, Human
uacaggcagcacaga

SEQ ID NO: 2206873 - RNA, 19 nt, Human
uacaggcaccgagaauguu

SEQ ID NO: 2206874 - RNA, 14 nt, Human
uacaggcaccgaga

SEQ ID NO: 2206875 - RNA, 23 nt, Human
uacaggauuugaacucagaucug

SEQ ID NO: 2206876 - RNA, 20 nt, Human
uacaggauuugaacucagau

SEQ ID NO: 2206877 - RNA, 14 nt, Human
uacaggcacaaaau

SEQ ID NO: 2206878 - RNA, 22 nt, Human
uacaguguacagucuuguauua

SEQ ID NO: 2206879 - RNA, 20 nt, Human
uacaggcaccgagaauguug

SEQ ID NO: 2206880 - RNA, 22 nt, Human
uacagugguuuuauacugaagg

SEQ ID NO: 2206881 - RNA, 15 nt, Human
uacaguguacagucu

SEQ ID NO: 2206882 - RNA, 16 nt, Human
uacaguguacagucuu

SEQ ID NO: 2206883 - RNA, 21 nt, Human
uacaggaagcaccccaugcca

SEQ ID NO: 2206884 - RNA, 19 nt, Human
uacagcuuugaucccugac

SEQ ID NO: 2206885 - RNA, 20 nt, Human
uacagcuuugugacuguaua

SEQ ID NO: 2206886 - RNA, 22 nt, Human
uacagcuuugugacuguauaua

SEQ ID NO: 2206887 - RNA, 19 nt, Human
uacaggaaaagcugcugac

SEQ ID NO: 2206888 - RNA, 16 nt, Human
uacaggcacccaccau

SEQ ID NO: 2206889 - RNA, 14 nt, Human
uacaggauuugaaa

SEQ ID NO: 2206890 - RNA, 18 nt, Human
uacagccaaagauaaucu

SEQ ID NO: 2206891 - RNA, 22 nt, Human
uacagccaaagauaaucucuca

SEQ ID NO: 2206892 - RNA, 17 nt, Human
uacagcacuacucugug

SEQ ID NO: 2206893 - RNA, 16 nt, Human
uacagcauuacaaauu

SEQ ID NO: 2206894 - RNA, 21 nt, Human
uacagcauuacaaauugcuua

SEQ ID NO: 2206895 - RNA, 22 nt, Human
uacagcauuacaaauugcuuac

SEQ ID NO: 2206896 - RNA, 19 nt, Human
uacagcacuacucugugcc

SEQ ID NO: 2206897 - RNA, 22 nt, Human
uacagcuugaccgugaggccag

SEQ ID NO: 2206898 - RNA, 17 nt, Human
uacagcccaccuggcuu

SEQ ID NO: 2206899 - RNA, 21 nt, Human
uacagcuugaccgugaggcca

SEQ ID NO: 2206900 - RNA, 18 nt, Human
uacagcuuucaugauuag

SEQ ID NO: 2206901 - RNA, 19 nt, Human
uacagccccuuuuucauau

SEQ ID NO: 2206902 - RNA, 14 nt, Human
uacagcgagaggca

SEQ ID NO: 2206903 - RNA, 23 nt, Human
uacagcuugaccgugaggccaga

SEQ ID NO: 2206904 - RNA, 17 nt, Human
uacaggaaaagcugcug

SEQ ID NO: 2206905 - RNA, 18 nt, Human
uacaggaaaagcugcuga

SEQ ID NO: 2206906 - RNA, 18 nt, Human
uacagaaauuagccgggc

SEQ ID NO: 2206907 - RNA, 24 nt, Human
uacagaaaguggugcucaguugua

SEQ ID NO: 2206908 - RNA, 22 nt, Human
uacagaaaguggugcucaguug

SEQ ID NO: 2206909 - RNA, 19 nt, Human
uacagaacacgcuuucaca

SEQ ID NO: 2206910 - RNA, 17 nt, Human
uacagaaauuagccggg

SEQ ID NO: 2206911 - RNA, 14 nt, Human
uacagaaagcugcc

SEQ ID NO: 2206912 - RNA, 10 nt, Human
uacagaaagu

SEQ ID NO: 2206913 - RNA, 20 nt, Human
uacagaaaguggugcucagu

SEQ ID NO: 2206914 - RNA, 23 nt, Human
uacagaacccauuccauuuaucu

SEQ ID NO: 2206915 - RNA, 19 nt, Human
uacagaacucuuucaaaac

SEQ ID NO: 2206916 - RNA, 17 nt, Human
uacagaacucuuucaaa

SEQ ID NO: 2206917 - RNA, 16 nt, Human
uacagaacucuuucaa

SEQ ID NO: 2206918 - RNA, 18 nt, Human
uacagaauucugcuaccu

SEQ ID NO: 2206919 - RNA, 21 nt, Human
uacagaauucugcuaccucac

SEQ ID NO: 2206920 - RNA, 13 nt, Human
uacagaauuuuau

SEQ ID NO: 2206921 - RNA, 24 nt, Human
uacagcaaggagauuuacaacugg

SEQ ID NO: 2206922 - RNA, 14 nt, Human
uacagcacuacucu

SEQ ID NO: 2206923 - RNA, 20 nt, Human
uacagaauugugucugcagg

SEQ ID NO: 2206924 - RNA, 15 nt, Human
uacagcacuacucug

SEQ ID NO: 2206925 - RNA, 18 nt, Human
uacagaauugugucugca

SEQ ID NO: 2206926 - RNA, 19 nt, Human
uacagaauugugucugcag

SEQ ID NO: 2206927 - RNA, 21 nt, Human
uacagaauugugucugcagga

SEQ ID NO: 2206928 - RNA, 21 nt, Human
uacagaaagauggaugugcuu

SEQ ID NO: 2206929 - RNA, 13 nt, Human
uacagaaagcugc

SEQ ID NO: 2206930 - RNA, 18 nt, Human
uacacuuuuuuggggaua

SEQ ID NO: 2206931 - RNA, 13 nt, Human
uacacuuuaugca

SEQ ID NO: 2206932 - RNA, 22 nt, Human
uacacugggagaggugccagca

SEQ ID NO: 2206933 - RNA, 21 nt, Human
uacacuuuaugccggaugugc

SEQ ID NO: 2206934 - RNA, 22 nt, Human
uacacuuuaugccggaugugcu

SEQ ID NO: 2206935 - RNA, 23 nt, Human
uacacuuuaugccggaugugcuu

SEQ ID NO: 2206936 - RNA, 19 nt, Human
uacacuguuucaaacuuua

SEQ ID NO: 2206937 - RNA, 18 nt, Human
uacacuguuucaaacuuu

SEQ ID NO: 2206938 - RNA, 17 nt, Human
uacacuguuucaaacuu

SEQ ID NO: 2206939 - RNA, 12 nt, Human
uagcccaggaga

SEQ ID NO: 2206940 - RNA, 13 nt, Human
uagcccaggagag

SEQ ID NO: 2206941 - RNA, 14 nt, Human
uagcccaggagaga

SEQ ID NO: 2206942 - RNA, 15 nt, Human
uagcccaggagagag

SEQ ID NO: 2206943 - RNA, 16 nt, Human
uagcccaggagagaga

SEQ ID NO: 2206944 - RNA, 15 nt, Human
uagcccacucugcuc

SEQ ID NO: 2206945 - RNA, 23 nt, Human
uagcccacacuugagaggaugaa

SEQ ID NO: 2206946 - RNA, 18 nt, Human
uagcccaaugaaaugaau

SEQ ID NO: 2206947 - RNA, 19 nt, Human
uagcccagguccucugaua

SEQ ID NO: 2206948 - RNA, 22 nt, Human
uagcccaggagagagaaagcca

SEQ ID NO: 2206949 - RNA, 17 nt, Human
uagcccaggagagagaa

SEQ ID NO: 2206950 - RNA, 18 nt, Human
uagcccaggagagagaaa

SEQ ID NO: 2206951 - RNA, 12 nt, Human
uagcccaucccu

SEQ ID NO: 2206952 - RNA, 14 nt, Human
uagcccaucccugc

SEQ ID NO: 2206953 - RNA, 15 nt, Human
uagcccaucccugcc

SEQ ID NO: 2206954 - RNA, 16 nt, Human
uagcccaucccugccu

SEQ ID NO: 2206955 - RNA, 17 nt, Human
uagcccaucccugccug

SEQ ID NO: 2206956 - RNA, 18 nt, Human
uagcccaucccugccugg

SEQ ID NO: 2206957 - RNA, 20 nt, Human
uagcccaucccugccugguc

SEQ ID NO: 2206958 - RNA, 21 nt, Human
uagcccaucccugccugguca

SEQ ID NO: 2206959 - RNA, 22 nt, Human
uagccauuccugguacccagcc

SEQ ID NO: 2206960 - RNA, 18 nt, Human
uagccauuccugguaccc

SEQ ID NO: 2206961 - RNA, 19 nt, Human
uagccauuccugguaccca

SEQ ID NO: 2206962 - RNA, 21 nt, Human
uagcauacauuuauaauguuu

SEQ ID NO: 2206963 - RNA, 13 nt, Human
uagccaugggacc

SEQ ID NO: 2206964 - RNA, 14 nt, Human
uagccaugggacca

SEQ ID NO: 2206965 - RNA, 14 nt, Human
uagcccaaaaccaa

SEQ ID NO: 2206966 - RNA, 22 nt, Human
uagcaggugguccugagaccug

SEQ ID NO: 2206967 - RNA, 15 nt, Human
uagcauacauuuaua

SEQ ID NO: 2206968 - RNA, 13 nt, Human
uagccaugaccuu

SEQ ID NO: 2206969 - RNA, 17 nt, Human
uagccuauauuuacagu

SEQ ID NO: 2206970 - RNA, 14 nt, Human
uagccgaccucagc

SEQ ID NO: 2206971 - RNA, 15 nt, Human
uagccgaccucagcc

SEQ ID NO: 2206972 - RNA, 13 nt, Human
uagccgaccucag

SEQ ID NO: 2206973 - RNA, 15 nt, Human
uagcccuuucugugu

SEQ ID NO: 2206974 - RNA, 17 nt, Human
uagcccuuucugugugc

SEQ ID NO: 2206975 - RNA, 13 nt, Human
uagcccuuucugu

SEQ ID NO: 2206976 - RNA, 14 nt, Human
uagcccuuucugug

SEQ ID NO: 2206977 - RNA, 13 nt, Human
uagccucccugaa

SEQ ID NO: 2206978 - RNA, 17 nt, Human
uagccuccugaccugag

SEQ ID NO: 2206979 - RNA, 15 nt, Human
uagccugaguagaaa

SEQ ID NO: 2206980 - RNA, 12 nt, Human
uagccucccuga

SEQ ID NO: 2206981 - RNA, 22 nt, Human
uagcccauggacuucacauaag

SEQ ID NO: 2206982 - RNA, 16 nt, Human
uagccccacaggaggu

SEQ ID NO: 2206983 - RNA, 14 nt, Human
uagcccgccugcca

SEQ ID NO: 2206984 - RNA, 15 nt, Human
uagcccgccugccag

SEQ ID NO: 2206985 - RNA, 16 nt, Human
uagcccgccugccagu

SEQ ID NO: 2206986 - RNA, 19 nt, Human
uagcccgccugccaguccu

SEQ ID NO: 2206987 - RNA, 18 nt, Human
uagcccuggccagaggcu

SEQ ID NO: 2206988 - RNA, 16 nt, Human
uagcccuggccagagg

SEQ ID NO: 2206989 - RNA, 18 nt, Human
uagcccucacccuggggc

SEQ ID NO: 2206990 - RNA, 20 nt, Human
uagcccgccugccaguccua

SEQ ID NO: 2206991 - RNA, 11 nt, Human
uagcugggacu

SEQ ID NO: 2206992 - RNA, 15 nt, Human
uagcugcuacaaaga

SEQ ID NO: 2206993 - RNA, 16 nt, Human
uagcugcuacaaagaa

SEQ ID NO: 2206994 - RNA, 19 nt, Human
uagcugcuacaaagaagac

SEQ ID NO: 2206995 - RNA, 20 nt, Human
uagcugcuacaaagaagaca

SEQ ID NO: 2206996 - RNA, 23 nt, Human
uagcugcuacaaagaagacaugu

SEQ ID NO: 2206997 - RNA, 21 nt, Human
uagcugcuacaaagaagacau

SEQ ID NO: 2206998 - RNA, 19 nt, Human
uagcuggaacuacaggcuc

SEQ ID NO: 2206999 - RNA, 20 nt, Human
uagcucuuaauuguucauuu

SEQ ID NO: 2207000 - RNA, 12 nt, Human
uagcugcuacaa

SEQ ID NO: 2207001 - RNA, 13 nt, Human
uagcugcuacaaa

SEQ ID NO: 2207002 - RNA, 18 nt, Human
uagcugggacuacaggug

SEQ ID NO: 2207003 - RNA, 22 nt, Human
uagcugggagaaagagagagcu

SEQ ID NO: 2207004 - RNA, 20 nt, Human
uagcugggacuacaggcacc

SEQ ID NO: 2207005 - RNA, 21 nt, Human
uagcucuaggagggcuggcaa

SEQ ID NO: 2207006 - RNA, 17 nt, Human
uagcucuauguuuacaa

SEQ ID NO: 2207007 - RNA, 17 nt, Human
uagcucugagccaguuc

SEQ ID NO: 2207008 - RNA, 20 nt, Human
uagcuccuguggccccaccc

SEQ ID NO: 2207009 - RNA, 22 nt, Human
uagcuccuguggccccacccug

SEQ ID NO: 2207010 - RNA, 12 nt, Human
uagcuccugugg

SEQ ID NO: 2207011 - RNA, 13 nt, Human
uagcuccuguggc

SEQ ID NO: 2207012 - RNA, 14 nt, Human
uagcuccuguggcc

SEQ ID NO: 2207013 - RNA, 16 nt, Human
uagcuccuguggcccc

SEQ ID NO: 2207014 - RNA, 20 nt, Human
uagcuccacacccucuccca

SEQ ID NO: 2207015 - RNA, 19 nt, Human
uagccuccuucgcaggcau

SEQ ID NO: 2207016 - RNA, 20 nt, Human
uagccucgccgucugugaau

SEQ ID NO: 2207017 - RNA, 21 nt, Human
uagcuccccgcuucugccugc

SEQ ID NO: 2207018 - RNA, 14 nt, Human
uagcuccccuccaa

SEQ ID NO: 2207019 - RNA, 14 nt, Human
uagcucccuguucu

SEQ ID NO: 2207020 - RNA, 13 nt, Human
uagcuccccuccu

SEQ ID NO: 2207021 - RNA, 14 nt, Human
uagcuccccuccuc

SEQ ID NO: 2207022 - RNA, 15 nt, Human
uagcuccccuccucu

SEQ ID NO: 2207023 - RNA, 20 nt, Human
uagcuccccuccucuccccu

SEQ ID NO: 2207024 - RNA, 17 nt, Human
uagccugccucuucucu

SEQ ID NO: 2207025 - RNA, 22 nt, Human
uagcucauucuccuuguguuac

SEQ ID NO: 2207026 - RNA, 14 nt, Human
uaggccaugaaaaa

SEQ ID NO: 2207027 - RNA, 14 nt, Human
uaggccucagccag

SEQ ID NO: 2207028 - RNA, 20 nt, Human
uaggccaugaaaaaaaugau

SEQ ID NO: 2207029 - RNA, 13 nt, Human
uaggccuggccag

SEQ ID NO: 2207030 - RNA, 14 nt, Human
uaggccuggccaga

SEQ ID NO: 2207031 - RNA, 18 nt, Human
uaggccucagccagagaa

SEQ ID NO: 2207032 - RNA, 16 nt, Human
uaggccucagccagag

SEQ ID NO: 2207033 - RNA, 22 nt, Human
uaggccucagccagagaagcua

SEQ ID NO: 2207034 - RNA, 14 nt, Human
uaggccuggcacag

SEQ ID NO: 2207035 - RNA, 17 nt, Human
uaggccuggcacagugu

SEQ ID NO: 2207036 - RNA, 12 nt, Human
uaggaauaaaua

SEQ ID NO: 2207037 - RNA, 19 nt, Human
uaggccaaauuuguagugc

SEQ ID NO: 2207038 - RNA, 15 nt, Human
uaggccacuccucca

SEQ ID NO: 2207039 - RNA, 14 nt, Human
uaggccacuccucc

SEQ ID NO: 2207040 - RNA, 13 nt, Human
uaggccacuccuc

SEQ ID NO: 2207041 - RNA, 17 nt, Human
uaggccguuccuucaaa

SEQ ID NO: 2207042 - RNA, 13 nt, Human
uaggccaugggac

SEQ ID NO: 2207043 - RNA, 15 nt, Human
uaggaagguuaaugu

SEQ ID NO: 2207044 - RNA, 15 nt, Human
uaggaagggaccaag

SEQ ID NO: 2207045 - RNA, 18 nt, Human
uaggaagggaccaaggca

SEQ ID NO: 2207046 - RNA, 17 nt, Human
uaggaaguguaacagcu

SEQ ID NO: 2207047 - RNA, 16 nt, Human
uaggaaguaaauuaua

SEQ ID NO: 2207048 - RNA, 21 nt, Human
uaggaaguguaacagcugagg

SEQ ID NO: 2207049 - RNA, 20 nt, Human
uaggaaguguaacagcugag

SEQ ID NO: 2207050 - RNA, 19 nt, Human
uaggaaguguaacagcuga

SEQ ID NO: 2207051 - RNA, 18 nt, Human
uaggaaguguaacagcug

SEQ ID NO: 2207052 - RNA, 22 nt, Human
uaggaaguguaacagcugaggu

SEQ ID NO: 2207053 - RNA, 14 nt, Human
uaggaauuguguuu

SEQ ID NO: 2207054 - RNA, 20 nt, Human
uaggaauugacccacaagaa

SEQ ID NO: 2207055 - RNA, 23 nt, Human
uaggaauugacccacaagaaaug

SEQ ID NO: 2207056 - RNA, 13 nt, Human
uaggaagaauuuu

SEQ ID NO: 2207057 - RNA, 15 nt, Human
uaggaagaauuuuaa

SEQ ID NO: 2207058 - RNA, 17 nt, Human
uaggaagaauuuuaaaa

SEQ ID NO: 2207059 - RNA, 13 nt, Human
uaggaagacuuug

SEQ ID NO: 2207060 - RNA, 14 nt, Human
uaggaagacuuugg

SEQ ID NO: 2207061 - RNA, 15 nt, Human
uaggaagacuuugga

SEQ ID NO: 2207062 - RNA, 14 nt, Human
uaggaagagaaacc

SEQ ID NO: 2207063 - RNA, 18 nt, Human
uaggaagaauuuuaaaaa

SEQ ID NO: 2207064 - RNA, 21 nt, Human
uaggaagaauuuuaaaaauga

SEQ ID NO: 2207065 - RNA, 15 nt, Human
uaggaagagaaacca

SEQ ID NO: 2207066 - RNA, 19 nt, Human
uaggaagagaaaccaggga

SEQ ID NO: 2207067 - RNA, 22 nt, Human
uaggaagaauuuuaaaaaugaa

SEQ ID NO: 2207068 - RNA, 22 nt, Human
uaggaagaguagcauuucauuc

SEQ ID NO: 2207069 - RNA, 16 nt, Human
uaggaagacuuuggaa

SEQ ID NO: 2207070 - RNA, 17 nt, Human
uaggaagacuuuggaaa

SEQ ID NO: 2207071 - RNA, 16 nt, Human
uaggaacauaugaaaa

SEQ ID NO: 2207072 - RNA, 20 nt, Human
uaggaacgguaaauuucugu

SEQ ID NO: 2207073 - RNA, 19 nt, Human
uaggaaaugaaugugugug

SEQ ID NO: 2207074 - RNA, 17 nt, Human
uaggaacacuccuucac

SEQ ID NO: 2207075 - RNA, 21 nt, Human
uaggaacuuaaauaaugugaa

SEQ ID NO: 2207076 - RNA, 18 nt, Human
uaggaacugcugggcuug

SEQ ID NO: 2207077 - RNA, 15 nt, Human
uaggaacugcugggc

SEQ ID NO: 2207078 - RNA, 13 nt, Human
uaggaacacuccu

SEQ ID NO: 2207079 - RNA, 14 nt, Human
uaggaacacuccuu

SEQ ID NO: 2207080 - RNA, 23 nt, Human
uaggaaauggcuuugugauucaa

SEQ ID NO: 2207081 - RNA, 22 nt, Human
uaggaaauggcuuugugauuca

SEQ ID NO: 2207082 - RNA, 18 nt, Human
uaggaaaugaaugugugu

SEQ ID NO: 2207083 - RNA, 15 nt, Human
uagcugggauuacag

SEQ ID NO: 2207084 - RNA, 18 nt, Human
uagcugggggugggccag

SEQ ID NO: 2207085 - RNA, 23 nt, Human
uagauguucucuaucauuuaaua

SEQ ID NO: 2207086 - RNA, 20 nt, Human
uagauucuacauauucuuua

SEQ ID NO: 2207087 - RNA, 18 nt, Human
uagauuaagagauggguu

SEQ ID NO: 2207088 - RNA, 16 nt, Human
uagauuguuaaaauaa

SEQ ID NO: 2207089 - RNA, 18 nt, Human
uagauugaaaacuuuucu

SEQ ID NO: 2207090 - RNA, 20 nt, Human
uagauugaaaacuuuucuca

SEQ ID NO: 2207091 - RNA, 21 nt, Human
uagauugaaaacuuuucucag

SEQ ID NO: 2207092 - RNA, 21 nt, Human
uagauugagaaguuuuguaca

SEQ ID NO: 2207093 - RNA, 23 nt, Human
uagauugaaaacuuuucucagau

SEQ ID NO: 2207094 - RNA, 16 nt, Human
uagcacuuugggaggc

SEQ ID NO: 2207095 - RNA, 11 nt, Human
uagcagacagg

SEQ ID NO: 2207096 - RNA, 23 nt, Human
uagcagaagguugcaccuccccc

SEQ ID NO: 2207097 - RNA, 17 nt, Human
uagcagguaccacugau

SEQ ID NO: 2207098 - RNA, 15 nt, Human
uagcaggugguccug

SEQ ID NO: 2207099 - RNA, 14 nt, Human
uagcagggaaaaua

SEQ ID NO: 2207100 - RNA, 21 nt, Human
uagcagggaaaauauauaucu

SEQ ID NO: 2207101 - RNA, 23 nt, Human
uagcaggugguccugagaccuga

SEQ ID NO: 2207102 - RNA, 20 nt, Human
uagcagggcauggcugggaa

SEQ ID NO: 2207103 - RNA, 18 nt, Human
uagcagauuuuaauuuug

SEQ ID NO: 2207104 - RNA, 19 nt, Human
uagcagcaccguucugugc

SEQ ID NO: 2207105 - RNA, 20 nt, Human
uagcagcaccguucugugca

SEQ ID NO: 2207106 - RNA, 20 nt, Human
uagcagcagccuuuaaugca

SEQ ID NO: 2207107 - RNA, 14 nt, Human
uagcagauuuuaau

SEQ ID NO: 2207108 - RNA, 20 nt, Human
uagcagauuuuaauuuugaa

SEQ ID NO: 2207109 - RNA, 19 nt, Human
uagcagacaggccccguga

SEQ ID NO: 2207110 - RNA, 13 nt, Human
uagcagacaggcc

SEQ ID NO: 2207111 - RNA, 15 nt, Human
uagcagacaguguuu

SEQ ID NO: 2207112 - RNA, 18 nt, Human
uagcagagagacuuucag

SEQ ID NO: 2207113 - RNA, 19 nt, Human
uagcagagaaugaaagggc

SEQ ID NO: 2207114 - RNA, 23 nt, Human
uagcagagaaugaaagggcccag

SEQ ID NO: 2207115 - RNA, 23 nt, Human
uagaugucccuuucuuggccagu

SEQ ID NO: 2207116 - RNA, 21 nt, Human
uagaugucuagguacuucagg

SEQ ID NO: 2207117 - RNA, 22 nt, Human
uagaugucccuuucuuggccag

SEQ ID NO: 2207118 - RNA, 21 nt, Human
uagaugucccuuucuuggcca

SEQ ID NO: 2207119 - RNA, 18 nt, Human
uagaugucccuuucuugg

SEQ ID NO: 2207120 - RNA, 20 nt, Human
uagauguauguacuucaugc

SEQ ID NO: 2207121 - RNA, 23 nt, Human
uagauguagauaaacucagaaau

SEQ ID NO: 2207122 - RNA, 16 nt, Human
uagauguauguacuuc

SEQ ID NO: 2207123 - RNA, 22 nt, Human
uagaugugcauuuuugugaaau

SEQ ID NO: 2207124 - RNA, 21 nt, Human
uagaugugauuuaauaguguu

SEQ ID NO: 2207125 - RNA, 23 nt, Human
uagaugugauuuaauaguguuaa

SEQ ID NO: 2207126 - RNA, 11 nt, Human
uagaugugugg

SEQ ID NO: 2207127 - RNA, 21 nt, Human
uagaugucuuuaggcagcagc

SEQ ID NO: 2207128 - RNA, 13 nt, Human
uagaugugauuua

SEQ ID NO: 2207129 - RNA, 15 nt, Human
uagaugugauuuaau

SEQ ID NO: 2207130 - RNA, 19 nt, Human
uagaugugauuuaauagug

SEQ ID NO: 2207131 - RNA, 18 nt, Human
uagauguuccaguaaucu

SEQ ID NO: 2207132 - RNA, 17 nt, Human
uagauguucagauugcu

SEQ ID NO: 2207133 - RNA, 22 nt, Human
uagauguucagauugcuuugau

SEQ ID NO: 2207134 - RNA, 21 nt, Human
uagauguucuaagucuuucca

SEQ ID NO: 2207135 - RNA, 14 nt, Human
uagauguucucuau

SEQ ID NO: 2207136 - RNA, 18 nt, Human
uagauguucucuaucauu

SEQ ID NO: 2207137 - RNA, 19 nt, Human
uagauguucucuaucauuu

SEQ ID NO: 2207138 - RNA, 21 nt, Human
uagauguucucuaucauuuaa

SEQ ID NO: 2207139 - RNA, 22 nt, Human
uagauguucucuaucauuuaau

SEQ ID NO: 2207140 - RNA, 19 nt, Human
uagaugguuugagccugag

SEQ ID NO: 2207141 - RNA, 15 nt, Human
uagauggugcugaga

SEQ ID NO: 2207142 - RNA, 14 nt, Human
uagauggugcugag

SEQ ID NO: 2207143 - RNA, 14 nt, Human
uagauggugaaauu

SEQ ID NO: 2207144 - RNA, 15 nt, Human
uagauggugaaauuu

SEQ ID NO: 2207145 - RNA, 21 nt, Human
uagaugggagggaggcucagg

SEQ ID NO: 2207146 - RNA, 23 nt, Human
uagaugggaaugaagcuugugua

SEQ ID NO: 2207147 - RNA, 20 nt, Human
uagaugggcauggggugggc

SEQ ID NO: 2207148 - RNA, 16 nt, Human
uagaugggucuggcug

SEQ ID NO: 2207149 - RNA, 20 nt, Human
uagaugggucuggcugagcu

SEQ ID NO: 2207150 - RNA, 22 nt, Human
uagaugggucuggcugagcuga

SEQ ID NO: 2207151 - RNA, 20 nt, Human
uagauguagauaaacucaga

SEQ ID NO: 2207152 - RNA, 19 nt, Human
uagauggugcugagaagcu

SEQ ID NO: 2207153 - RNA, 16 nt, Human
uagauggugcugagaa

SEQ ID NO: 2207154 - RNA, 12 nt, Human
uagauguauaua

SEQ ID NO: 2207155 - RNA, 15 nt, Human
uagauaaacucagaa

SEQ ID NO: 2207156 - RNA, 18 nt, Human
uagauaaauaaauauaug

SEQ ID NO: 2207157 - RNA, 23 nt, Human
uagauaacaagaccucagugccu

SEQ ID NO: 2207158 - RNA, 18 nt, Human
uagauaauacaccacuac

SEQ ID NO: 2207159 - RNA, 18 nt, Human
uagauacaugcuuuuuaa

SEQ ID NO: 2207160 - RNA, 17 nt, Human
uagaugggaaugaagcu

SEQ ID NO: 2207161 - RNA, 18 nt, Human
uagaugggaaugaagcuu

SEQ ID NO: 2207162 - RNA, 19 nt, Human
uagaugggaaugaagcuug

SEQ ID NO: 2207163 - RNA, 22 nt, Human
uagaugggaaugaagcuugugu

SEQ ID NO: 2207164 - RNA, 13 nt, Human
uagaguuuaacac

SEQ ID NO: 2207165 - RNA, 12 nt, Human
uagaguuuaaca

SEQ ID NO: 2207166 - RNA, 12 nt, Human
uagauaaacuca

SEQ ID NO: 2207167 - RNA, 17 nt, Human
uagaguuugcuauuaga

SEQ ID NO: 2207168 - RNA, 17 nt, Human
uagaguuuagcuggaaa

SEQ ID NO: 2207169 - RNA, 18 nt, Human
uagaguuuagcuggaaaa

SEQ ID NO: 2207170 - RNA, 19 nt, Human
uagaguccaacguggggca

SEQ ID NO: 2207171 - RNA, 22 nt, Human
uagaguccaacguggggcagca

SEQ ID NO: 2207172 - RNA, 23 nt, Human
uagagucaucuccaucagcugua

SEQ ID NO: 2207173 - RNA, 22 nt, Human
uagagucaucuccaucagcugu

SEQ ID NO: 2207174 - RNA, 21 nt, Human
uagagucaucuccaucagcug

SEQ ID NO: 2207175 - RNA, 21 nt, Human
uagaguagaagauuugaugcu

SEQ ID NO: 2207176 - RNA, 14 nt, Human
uagagucagccuuc

SEQ ID NO: 2207177 - RNA, 13 nt, Human
uagagucagccuu

SEQ ID NO: 2207178 - RNA, 14 nt, Human
uagaguauaugcac

SEQ ID NO: 2207179 - RNA, 19 nt, Human
uagaguagaagauuugaug

SEQ ID NO: 2207180 - RNA, 16 nt, Human
uagagguuuuguuguu

SEQ ID NO: 2207181 - RNA, 15 nt, Human
uagagguuuuaaagu

SEQ ID NO: 2207182 - RNA, 19 nt, Human
uagagguuuuaaagugauu

SEQ ID NO: 2207183 - RNA, 19 nt, Human
uagagguuuuguuguuuua

SEQ ID NO: 2207184 - RNA, 21 nt, Human
uagagguucaaagauauuuug

SEQ ID NO: 2207185 - RNA, 16 nt, Human
uagagguucaaagaua

SEQ ID NO: 2207186 - RNA, 19 nt, Human
uagagguucaaagauauuu

SEQ ID NO: 2207187 - RNA, 19 nt, Human
uagagagggagaagaaguc

SEQ ID NO: 2207188 - RNA, 16 nt, Human
uagagagggagaagaa

SEQ ID NO: 2207189 - RNA, 13 nt, Human
uagagaggaaaag

SEQ ID NO: 2207190 - RNA, 13 nt, Human
uagagagcuauuu

SEQ ID NO: 2207191 - RNA, 16 nt, Human
uagagaacuguggccg

SEQ ID NO: 2207192 - RNA, 19 nt, Human
uagagacgggguuucacca

SEQ ID NO: 2207193 - RNA, 16 nt, Human
uagagagagaccacuu

SEQ ID NO: 2207194 - RNA, 15 nt, Human
uagaaccacuaugaa

SEQ ID NO: 2207195 - RNA, 20 nt, Human
uagaaccaccaacaagcaag

SEQ ID NO: 2207196 - RNA, 22 nt, Human
uagaaccaccaacaagcaagcu

SEQ ID NO: 2207197 - RNA, 12 nt, Human
uagaaccaggca

SEQ ID NO: 2207198 - RNA, 16 nt, Human
uagaaccacuaugaag

SEQ ID NO: 2207199 - RNA, 22 nt, Human
uagaacccggcaggcuagaacc

SEQ ID NO: 2207200 - RNA, 23 nt, Human
uagaaccaggcaacuugggaacu

SEQ ID NO: 2207201 - RNA, 13 nt, Human
uagaaccuagaag

SEQ ID NO: 2207202 - RNA, 14 nt, Human
uagaaccuagaagg

SEQ ID NO: 2207203 - RNA, 16 nt, Human
uagaaccuagaagggc

SEQ ID NO: 2207204 - RNA, 17 nt, Human
uagaaccuagaagggcu

SEQ ID NO: 2207205 - RNA, 23 nt, Human
uagaaccuagaagggcuagaacc

SEQ ID NO: 2207206 - RNA, 23 nt, Human
uagaaccuagagaagcuaaaacc

SEQ ID NO: 2207207 - RNA, 14 nt, Human
uagacccucucaag

SEQ ID NO: 2207208 - RNA, 13 nt, Human
uagaccucagccu

SEQ ID NO: 2207209 - RNA, 12 nt, Human
uagaccucagcc

SEQ ID NO: 2207210 - RNA, 11 nt, Human
uagaccucagc

SEQ ID NO: 2207211 - RNA, 22 nt, Human
uagaccuagggaggaccuuauc

SEQ ID NO: 2207212 - RNA, 19 nt, Human
uagaccuagggaggaccuu

SEQ ID NO: 2207213 - RNA, 12 nt, Human
uagacccugggu

SEQ ID NO: 2207214 - RNA, 16 nt, Human
uagacccugggugggc

SEQ ID NO: 2207215 - RNA, 20 nt, Human
uagacccugggugggcucug

SEQ ID NO: 2207216 - RNA, 20 nt, Human
uagaccucagccugugcugc

SEQ ID NO: 2207217 - RNA, 16 nt, Human
uagaccucagccugug

SEQ ID NO: 2207218 - RNA, 15 nt, Human
uagaccucagccugu

SEQ ID NO: 2207219 - RNA, 14 nt, Human
uagaccucagccug

SEQ ID NO: 2207220 - RNA, 22 nt, Human
uagaccucagccugugcugccc

SEQ ID NO: 2207221 - RNA, 21 nt, Human
uagaccucagccugugcugcc

SEQ ID NO: 2207222 - RNA, 11 nt, Human
uagacuuucug

SEQ ID NO: 2207223 - RNA, 12 nt, Human
uagacuuucugu

SEQ ID NO: 2207224 - RNA, 16 nt, Human
uagagaacgcagcccu

SEQ ID NO: 2207225 - RNA, 17 nt, Human
uagagaacgcagcccua

SEQ ID NO: 2207226 - RNA, 19 nt, Human
uagagaacgcagcccuaga

SEQ ID NO: 2207227 - RNA, 18 nt, Human
uagacuugugcugaucgu

SEQ ID NO: 2207228 - RNA, 15 nt, Human
uagacuugaaauacu

SEQ ID NO: 2207229 - RNA, 16 nt, Human
uauauuuguguauuua

SEQ ID NO: 2207230 - RNA, 14 nt, Human
uauauuucuuuguu

SEQ ID NO: 2207231 - RNA, 20 nt, Human
uauauuuguguauuuaacag

SEQ ID NO: 2207232 - RNA, 13 nt, Human
uauauuuuaagaa

SEQ ID NO: 2207233 - RNA, 13 nt, Human
uauauuuuaagac

SEQ ID NO: 2207234 - RNA, 14 nt, Human
uauauuuuaauuug

SEQ ID NO: 2207235 - RNA, 16 nt, Human
uauauuuuacaauuuu

SEQ ID NO: 2207236 - RNA, 14 nt, Human
uauauuuuaagacg

SEQ ID NO: 2207237 - RNA, 13 nt, Human
uauauuugaaaua

SEQ ID NO: 2207238 - RNA, 23 nt, Human
uauauuugugauagcacuuucua

SEQ ID NO: 2207239 - RNA, 22 nt, Human
uauauuugugauagcacuuucu

SEQ ID NO: 2207240 - RNA, 14 nt, Human
uauauuugaaauau

SEQ ID NO: 2207241 - RNA, 16 nt, Human
uauauuucacuauuuu

SEQ ID NO: 2207242 - RNA, 21 nt, Human
uauauuucccugaaggaacca

SEQ ID NO: 2207243 - RNA, 12 nt, Human
uauauguaugug

SEQ ID NO: 2207244 - RNA, 20 nt, Human
uauauuuauuacuguaagaa

SEQ ID NO: 2207245 - RNA, 23 nt, Human
uauauuuauuacuguaagaaaau

SEQ ID NO: 2207246 - RNA, 16 nt, Human
uauauggcaagaaagc

SEQ ID NO: 2207247 - RNA, 16 nt, Human
uauaugccaugaugga

SEQ ID NO: 2207248 - RNA, 18 nt, Human
uauauggcagaguuguaa

SEQ ID NO: 2207249 - RNA, 19 nt, Human
uauauggcagaguuguaaa

SEQ ID NO: 2207250 - RNA, 20 nt, Human
uauauggcagaguuguaaau

SEQ ID NO: 2207251 - RNA, 22 nt, Human
uauauggcagaguuguaaauau

SEQ ID NO: 2207252 - RNA, 17 nt, Human
uauauggccucaagauc

SEQ ID NO: 2207253 - RNA, 23 nt, Human
uauauggcagaguuguaaauaua

SEQ ID NO: 2207254 - RNA, 12 nt, Human
uauauguacaug

SEQ ID NO: 2207255 - RNA, 13 nt, Human
uauauguacuugu

SEQ ID NO: 2207256 - RNA, 19 nt, Human
uauauguacuugucaaaga

SEQ ID NO: 2207257 - RNA, 21 nt, Human
uauaugcacuuauaauuuucc

SEQ ID NO: 2207258 - RNA, 22 nt, Human
uauauggaugauucagaaauug

SEQ ID NO: 2207259 - RNA, 19 nt, Human
uauaugaggacuugugucu

SEQ ID NO: 2207260 - RNA, 13 nt, Human
uauaugauggggg

SEQ ID NO: 2207261 - RNA, 21 nt, Human
uauauagauuauaacuugucu

SEQ ID NO: 2207262 - RNA, 15 nt, Human
uauaugauuuauagu

SEQ ID NO: 2207263 - RNA, 16 nt, Human
uauaugauuuauaguu

SEQ ID NO: 2207264 - RNA, 21 nt, Human
uauaugauuuauaguuuguac

SEQ ID NO: 2207265 - RNA, 13 nt, Human
uauauagagaugu

SEQ ID NO: 2207266 - RNA, 14 nt, Human
uauauagagauguu

SEQ ID NO: 2207267 - RNA, 16 nt, Human
uauauagagauguuuu

SEQ ID NO: 2207268 - RNA, 19 nt, Human
uauauagagauguuuuuaa

SEQ ID NO: 2207269 - RNA, 22 nt, Human
uauaugaauuuaaauauaauuc

SEQ ID NO: 2207270 - RNA, 15 nt, Human
uauauacauauauau

SEQ ID NO: 2207271 - RNA, 20 nt, Human
uauauacaaccugcuugggu

SEQ ID NO: 2207272 - RNA, 14 nt, Human
uauauacaguaacu

SEQ ID NO: 2207273 - RNA, 17 nt, Human
uauauacaguaacuuua

SEQ ID NO: 2207274 - RNA, 22 nt, Human
uauauacaguaacuuuaugugu

SEQ ID NO: 2207275 - RNA, 22 nt, Human
uauauacaauaacauaauuugu

SEQ ID NO: 2207276 - RNA, 18 nt, Human
uauauacgcaucuauaaa

SEQ ID NO: 2207277 - RNA, 20 nt, Human
uauauacccguacaacgugu

SEQ ID NO: 2207278 - RNA, 21 nt, Human
uauauacauuuaugaauuaaa

SEQ ID NO: 2207279 - RNA, 23 nt, Human
uauauacaguaacuuuaugugua

SEQ ID NO: 2207280 - RNA, 22 nt, Human
uauacuuaaauggaaaaaauga

SEQ ID NO: 2207281 - RNA, 17 nt, Human
uauacuuguggacuaaa

SEQ ID NO: 2207282 - RNA, 21 nt, Human
uauacuuguggacuaaaagau

SEQ ID NO: 2207283 - RNA, 16 nt, Human
uauacuguacuuaaua

SEQ ID NO: 2207284 - RNA, 15 nt, Human
uauacuguaauuuag

SEQ ID NO: 2207285 - RNA, 22 nt, Human
uauacuguaaagaaagagagaa

SEQ ID NO: 2207286 - RNA, 14 nt, Human
uauacuguaauuua

SEQ ID NO: 2207287 - RNA, 13 nt, Human
uauacuguauuaa

SEQ ID NO: 2207288 - RNA, 17 nt, Human
uauacuguauuaagagu

SEQ ID NO: 2207289 - RNA, 17 nt, Human
uauacucuuuuuucaug

SEQ ID NO: 2207290 - RNA, 23 nt, Human
uauacuguaaagaaagagagaaa

SEQ ID NO: 2207291 - RNA, 22 nt, Human
uauacuguaauuuaguuauuga

SEQ ID NO: 2207292 - RNA, 23 nt, Human
uauauaauacugacugagaauau

SEQ ID NO: 2207293 - RNA, 23 nt, Human
uauauaaguguacauaugugcug

SEQ ID NO: 2207294 - RNA, 15 nt, Human
uauauaaugguuuca

SEQ ID NO: 2207295 - RNA, 22 nt, Human
uauacuuguggacuaaaagaua

SEQ ID NO: 2207296 - RNA, 23 nt, Human
uauacuuguggacuaaaagauau

SEQ ID NO: 2207297 - RNA, 19 nt, Human
uauauaaguguacauaugu

SEQ ID NO: 2207298 - RNA, 22 nt, Human
uauauaauuacauauuugcaua

SEQ ID NO: 2207299 - RNA, 14 nt, Human
uauauaauucugua

SEQ ID NO: 2207300 - RNA, 16 nt, Human
uauauaauucuguaca

SEQ ID NO: 2207301 - RNA, 17 nt, Human
uauauaauucuguacau

SEQ ID NO: 2207302 - RNA, 19 nt, Human
uauauaaugguuucaaaga

SEQ ID NO: 2207303 - RNA, 17 nt, Human
uauauacaauaacauaa

SEQ ID NO: 2207304 - RNA, 16 nt, Human
uauauacaauaacaua

SEQ ID NO: 2207305 - RNA, 19 nt, Human
uauauacaaccugcuuggg

SEQ ID NO: 2207306 - RNA, 21 nt, Human
uauauuuuauacauuaacuuc

SEQ ID NO: 2207307 - RNA, 20 nt, Human
uauauuuuuauauuuaguua

SEQ ID NO: 2207308 - RNA, 15 nt, Human
uauauuuuucacagu

SEQ ID NO: 2207309 - RNA, 18 nt, Human
uauauuuuuauauuuagu

SEQ ID NO: 2207310 - RNA, 18 nt, Human
uauauuuuugguugucaa

SEQ ID NO: 2207311 - RNA, 19 nt, Human
uauauuuuugguugucaau

SEQ ID NO: 2207312 - RNA, 12 nt, Human
uauauuuuuguc

SEQ ID NO: 2207313 - RNA, 19 nt, Human
uauauuuuuuguuaaauga

SEQ ID NO: 2207314 - RNA, 17 nt, Human
uaucaggugcugccauc

SEQ ID NO: 2207315 - RNA, 15 nt, Human
uaucaggucucccac

SEQ ID NO: 2207316 - RNA, 23 nt, Human
uaucaggucucccacgugggaga

SEQ ID NO: 2207317 - RNA, 16 nt, Human
uaucaggugcccaucc

SEQ ID NO: 2207318 - RNA, 23 nt, Human
uaucaggugcccaucccuggaag

SEQ ID NO: 2207319 - RNA, 14 nt, Human
uaucagucucugag

SEQ ID NO: 2207320 - RNA, 13 nt, Human
uaucagccugagu

SEQ ID NO: 2207321 - RNA, 19 nt, Human
uaucagccugagucuccug

SEQ ID NO: 2207322 - RNA, 11 nt, Human
uaucagccugu

SEQ ID NO: 2207323 - RNA, 13 nt, Human
uaucagccugucu

SEQ ID NO: 2207324 - RNA, 19 nt, Human
uaucagccugucucuucca

SEQ ID NO: 2207325 - RNA, 22 nt, Human
uaucagccugucucuuccauau

SEQ ID NO: 2207326 - RNA, 19 nt, Human
uaucagcggccccuugacu

SEQ ID NO: 2207327 - RNA, 14 nt, Human
uaucagcuucagaa

SEQ ID NO: 2207328 - RNA, 21 nt, Human
uaucaggacccagaggaaggg

SEQ ID NO: 2207329 - RNA, 20 nt, Human
uaucaggacccagaggaagg

SEQ ID NO: 2207330 - RNA, 20 nt, Human
uaucagcggccccuugacuc

SEQ ID NO: 2207331 - RNA, 21 nt, Human
uaucaguugagcuucauauac

SEQ ID NO: 2207332 - RNA, 20 nt, Human
uaucaguuacucagcccugg

SEQ ID NO: 2207333 - RNA, 19 nt, Human
uaucaguuacucagcccug

SEQ ID NO: 2207334 - RNA, 18 nt, Human
uaucaguuacucagcccu

SEQ ID NO: 2207335 - RNA, 17 nt, Human
uaucaguuacucagccc

SEQ ID NO: 2207336 - RNA, 16 nt, Human
uaucaguuacucagcc

SEQ ID NO: 2207337 - RNA, 17 nt, Human
uaucagugugcccccca

SEQ ID NO: 2207338 - RNA, 21 nt, Human
uaucaguuacucagcccuggg

SEQ ID NO: 2207339 - RNA, 14 nt, Human
uaucaguugcaaua

SEQ ID NO: 2207340 - RNA, 21 nt, Human
uaucaguugcaauaauacuuc

SEQ ID NO: 2207341 - RNA, 22 nt, Human
uaucaucaguauugaagcauuu

SEQ ID NO: 2207342 - RNA, 15 nt, Human
uaucaguugcaauaa

SEQ ID NO: 2207343 - RNA, 17 nt, Human
uaucagugacagaguuc

SEQ ID NO: 2207344 - RNA, 16 nt, Human
uaucagugacagaguu

SEQ ID NO: 2207345 - RNA, 15 nt, Human
uaucagugacagagu

SEQ ID NO: 2207346 - RNA, 22 nt, Human
uaucagugacagaguucacuau

SEQ ID NO: 2207347 - RNA, 20 nt, Human
uaucagugacagaguucacu

SEQ ID NO: 2207348 - RNA, 23 nt, Human
uaucagugcucgagacacaguga

SEQ ID NO: 2207349 - RNA, 15 nt, Human
uaucaguuacucagc

SEQ ID NO: 2207350 - RNA, 17 nt, Human
uaucaguguaagcccug

SEQ ID NO: 2207351 - RNA, 13 nt, Human
uaucagugugccc

SEQ ID NO: 2207352 - RNA, 15 nt, Human
uaucagugugccccc

SEQ ID NO: 2207353 - RNA, 16 nt, Human
uaucaugucaaacgug

SEQ ID NO: 2207354 - RNA, 16 nt, Human
uaucaugacaaagacu

SEQ ID NO: 2207355 - RNA, 11 nt, Human
uaucaugaagc

SEQ ID NO: 2207356 - RNA, 19 nt, Human
uaucaucuggauaggagcc

SEQ ID NO: 2207357 - RNA, 16 nt, Human
uaucauccacauuguu

SEQ ID NO: 2207358 - RNA, 17 nt, Human
uaucauccacauuguuu

SEQ ID NO: 2207359 - RNA, 22 nt, Human
uaucauccacauuguuuuaaaa

SEQ ID NO: 2207360 - RNA, 22 nt, Human
uauccugcuucugauaugcagu

SEQ ID NO: 2207361 - RNA, 16 nt, Human
uauccugccucagccc

SEQ ID NO: 2207362 - RNA, 20 nt, Human
uauccugccucagcccgcca

SEQ ID NO: 2207363 - RNA, 10 nt, Human
uauccugggg

SEQ ID NO: 2207364 - RNA, 22 nt, Human
uauccugggggacccaauguag

SEQ ID NO: 2207365 - RNA, 19 nt, Human
uauccugugacauguaaca

SEQ ID NO: 2207366 - RNA, 14 nt, Human
uaucgaaauaacaa

SEQ ID NO: 2207367 - RNA, 22 nt, Human
uauccuggggcucccuucaucu

SEQ ID NO: 2207368 - RNA, 11 nt, Human
uauccugccuc

SEQ ID NO: 2207369 - RNA, 12 nt, Human
uauccugccuca

SEQ ID NO: 2207370 - RNA, 15 nt, Human
uauccugccucagcc

SEQ ID NO: 2207371 - RNA, 18 nt, Human
uauccugccaaaaucauu

SEQ ID NO: 2207372 - RNA, 17 nt, Human
uaucauguguaaucaau

SEQ ID NO: 2207373 - RNA, 19 nt, Human
uaucauguguaaucaauaa

SEQ ID NO: 2207374 - RNA, 21 nt, Human
uaucaugucaaacgugaaaau

SEQ ID NO: 2207375 - RNA, 11 nt, Human
uaucaugugua

SEQ ID NO: 2207376 - RNA, 13 nt, Human
uaucauguguaau

SEQ ID NO: 2207377 - RNA, 14 nt, Human
uaucauguguaauc

SEQ ID NO: 2207378 - RNA, 17 nt, Human
uaucaugugaaaucauu

SEQ ID NO: 2207379 - RNA, 22 nt, Human
uaucaugugaaaucauucauuu

SEQ ID NO: 2207380 - RNA, 22 nt, Human
uaucucuuuugaauccaugcuu

SEQ ID NO: 2207381 - RNA, 23 nt, Human
uaucuaaacuggauucacagcuc

SEQ ID NO: 2207382 - RNA, 14 nt, Human
uaucgggaacagug

SEQ ID NO: 2207383 - RNA, 14 nt, Human
uaucuaaaagaaau

SEQ ID NO: 2207384 - RNA, 15 nt, Human
uaucuaaauguugaa

SEQ ID NO: 2207385 - RNA, 15 nt, Human
uaucggaagcagugc

SEQ ID NO: 2207386 - RNA, 14 nt, Human
uaucggaagcagug

SEQ ID NO: 2207387 - RNA, 18 nt, Human
uaucgcuucauguaacua

SEQ ID NO: 2207388 - RNA, 16 nt, Human
uaucggagacagugau

SEQ ID NO: 2207389 - RNA, 19 nt, Human
uaucgucacugcuuaacuu

SEQ ID NO: 2207390 - RNA, 16 nt, Human
uaucgaucucuuauuu

SEQ ID NO: 2207391 - RNA, 19 nt, Human
uaucgauguuauguaaaag

SEQ ID NO: 2207392 - RNA, 20 nt, Human
uaucgcaccacuguguauuu

SEQ ID NO: 2207393 - RNA, 23 nt, Human
uaucgacuuguuuuugcacaugu

SEQ ID NO: 2207394 - RNA, 20 nt, Human
uaucgaaauaacaauguuaa

SEQ ID NO: 2207395 - RNA, 21 nt, Human
uaucgaaauaacaauguuaag

SEQ ID NO: 2207396 - RNA, 15 nt, Human
uaucgaaauaacaau

SEQ ID NO: 2207397 - RNA, 16 nt, Human
uaucgaaauaacaaug

SEQ ID NO: 2207398 - RNA, 18 nt, Human
uaucgaaauaacaauguu

SEQ ID NO: 2207399 - RNA, 19 nt, Human
uaucgaaauaacaauguua

SEQ ID NO: 2207400 - RNA, 17 nt, Human
uauaaauuuuuuuuguu

SEQ ID NO: 2207401 - RNA, 16 nt, Human
uauaaauuuauuuacu

SEQ ID NO: 2207402 - RNA, 15 nt, Human
uauaaauuuauuuac

SEQ ID NO: 2207403 - RNA, 21 nt, Human
uauaaauuuuuuuuguuucau

SEQ ID NO: 2207404 - RNA, 16 nt, Human
uauaaaucaaugucac

SEQ ID NO: 2207405 - RNA, 20 nt, Human
uauaaaucaaugucacuuaa

SEQ ID NO: 2207406 - RNA, 19 nt, Human
uauaaaucgcuuuugauaa

SEQ ID NO: 2207407 - RNA, 18 nt, Human
uauaaaucgcuuuugaua

SEQ ID NO: 2207408 - RNA, 14 nt, Human
uauaaauuuauuua

SEQ ID NO: 2207409 - RNA, 21 nt, Human
uauaaauuccucuuugcuuug

SEQ ID NO: 2207410 - RNA, 18 nt, Human
uauaaugaaugaaacauu

SEQ ID NO: 2207411 - RNA, 22 nt, Human
uauaaauuuauuuacugcuagu

SEQ ID NO: 2207412 - RNA, 20 nt, Human
uauaaugaaugaaacauuuu

SEQ ID NO: 2207413 - RNA, 23 nt, Human
uauaaugaagcuuuauacgugua

SEQ ID NO: 2207414 - RNA, 14 nt, Human
uauaaugaagcuuu

SEQ ID NO: 2207415 - RNA, 14 nt, Human
uauaaugaggauga

SEQ ID NO: 2207416 - RNA, 17 nt, Human
uaguuuuaguugcagaa

SEQ ID NO: 2207417 - RNA, 16 nt, Human
uaguuuuaguugcaga

SEQ ID NO: 2207418 - RNA, 14 nt, Human
uaguuuuaguugca

SEQ ID NO: 2207419 - RNA, 22 nt, Human
uaguuuuacuuuuaaacugugu

SEQ ID NO: 2207420 - RNA, 20 nt, Human
uaguuuuacuuuuaaacugu

SEQ ID NO: 2207421 - RNA, 15 nt, Human
uaguuuuauaugcuu

SEQ ID NO: 2207422 - RNA, 19 nt, Human
uauaaauaggagaggauga

SEQ ID NO: 2207423 - RNA, 10 nt, Human
uauaaauaua

SEQ ID NO: 2207424 - RNA, 12 nt, Human
uauaaauauaua

SEQ ID NO: 2207425 - RNA, 15 nt, Human
uauaaaucaauguca

SEQ ID NO: 2207426 - RNA, 10 nt, Human
uauaaauaug

SEQ ID NO: 2207427 - RNA, 15 nt, Human
uauaaauauauuuaa

SEQ ID NO: 2207428 - RNA, 14 nt, Human
uauaaauauauaua

SEQ ID NO: 2207429 - RNA, 13 nt, Human
uauaaauauauau

SEQ ID NO: 2207430 - RNA, 17 nt, Human
uauaaauauauauaaau

SEQ ID NO: 2207431 - RNA, 19 nt, Human
uauaaauauauauaaauau

SEQ ID NO: 2207432 - RNA, 21 nt, Human
uauaaauauauauaaauauau

SEQ ID NO: 2207433 - RNA, 22 nt, Human
uauaaauauauauaaauauaua

SEQ ID NO: 2207434 - RNA, 23 nt, Human
uauaaauauauauaaauauauau

SEQ ID NO: 2207435 - RNA, 14 nt, Human
uaguuuuacuuuua

SEQ ID NO: 2207436 - RNA, 19 nt, Human
uaguuuguguguugucucu

SEQ ID NO: 2207437 - RNA, 23 nt, Human
uaguuuuaaaaaaauaaaacauu

SEQ ID NO: 2207438 - RNA, 13 nt, Human
uaguuugguucac

SEQ ID NO: 2207439 - RNA, 17 nt, Human
uaguuuguacaugcauu

SEQ ID NO: 2207440 - RNA, 14 nt, Human
uaguuuguauaacu

SEQ ID NO: 2207441 - RNA, 17 nt, Human
uaguuuguauaacuucu

SEQ ID NO: 2207442 - RNA, 18 nt, Human
uaguuuguauaacuucuu

SEQ ID NO: 2207443 - RNA, 18 nt, Human
uaguuugcauuccugaua

SEQ ID NO: 2207444 - RNA, 11 nt, Human
uaguuuggauu

SEQ ID NO: 2207445 - RNA, 21 nt, Human
uaguuugauuauucaguguca

SEQ ID NO: 2207446 - RNA, 11 nt, Human
uaguuugcauu

SEQ ID NO: 2207447 - RNA, 17 nt, Human
uaguuugcauuccugau

SEQ ID NO: 2207448 - RNA, 18 nt, Human
uaguuucuguucugugga

SEQ ID NO: 2207449 - RNA, 17 nt, Human
uauaauucuacuuugag

SEQ ID NO: 2207450 - RNA, 23 nt, Human
uauaaugguuucaaagauucaaa

SEQ ID NO: 2207451 - RNA, 16 nt, Human
uauaaugguuucaaag

SEQ ID NO: 2207452 - RNA, 17 nt, Human
uauaaugguuucaaaga

SEQ ID NO: 2207453 - RNA, 18 nt, Human
uauaaugguuucaaagau

SEQ ID NO: 2207454 - RNA, 19 nt, Human
uauaaugguuucaaagauu

SEQ ID NO: 2207455 - RNA, 20 nt, Human
uauaauucacauuguauuca

SEQ ID NO: 2207456 - RNA, 20 nt, Human
uauaauguaagcucuacuga

SEQ ID NO: 2207457 - RNA, 19 nt, Human
uauaauguaagcucuacug

SEQ ID NO: 2207458 - RNA, 14 nt, Human
uauaauguaagcuc

SEQ ID NO: 2207459 - RNA, 16 nt, Human
uauaauggaguuaacg

SEQ ID NO: 2207460 - RNA, 15 nt, Human
uauaaugguugacug

SEQ ID NO: 2207461 - RNA, 18 nt, Human
uauaaugaaugagagaau

SEQ ID NO: 2207462 - RNA, 19 nt, Human
uauacccguacaacguguc

SEQ ID NO: 2207463 - RNA, 17 nt, Human
uauacccccugcaaagc

SEQ ID NO: 2207464 - RNA, 23 nt, Human
uauacccaugaacuuaaaaugaa

SEQ ID NO: 2207465 - RNA, 12 nt, Human
uauaccugauuu

SEQ ID NO: 2207466 - RNA, 13 nt, Human
uauaauucccuau

SEQ ID NO: 2207467 - RNA, 13 nt, Human
uauaauucuguaa

SEQ ID NO: 2207468 - RNA, 12 nt, Human
uauaauucugua

SEQ ID NO: 2207469 - RNA, 20 nt, Human
uauacucuuauagacaacau

SEQ ID NO: 2207470 - RNA, 18 nt, Human
uauacucuagaugaaguu

SEQ ID NO: 2207471 - RNA, 22 nt, Human
uauacucuuucuguauauacuu

SEQ ID NO: 2207472 - RNA, 19 nt, Human
uauacucuuucuguauaua

SEQ ID NO: 2207473 - RNA, 17 nt, Human
uauacucuuucuguaua

SEQ ID NO: 2207474 - RNA, 16 nt, Human
uauacucuuucuguau

SEQ ID NO: 2207475 - RNA, 16 nt, Human
uauacuauauuuaugg

SEQ ID NO: 2207476 - RNA, 17 nt, Human
uauacucacuuucuaga

SEQ ID NO: 2207477 - RNA, 22 nt, Human
uauaccugggcauacuaauaaa

SEQ ID NO: 2207478 - RNA, 13 nt, Human
uauaccugugccu

SEQ ID NO: 2207479 - RNA, 20 nt, Human
uauaccugauuuuuuuuccu

SEQ ID NO: 2207480 - RNA, 14 nt, Human
uauaccugugccuc

SEQ ID NO: 2207481 - RNA, 15 nt, Human
uaguuuacuauuuua

SEQ ID NO: 2207482 - RNA, 22 nt, Human
uaguuuaccugaauaaauggua

SEQ ID NO: 2207483 - RNA, 18 nt, Human
uaguuucagauauauauc

SEQ ID NO: 2207484 - RNA, 21 nt, Human
uaguuguaccgcaaugugacu

SEQ ID NO: 2207485 - RNA, 17 nt, Human
uaguugugggugggaga

SEQ ID NO: 2207486 - RNA, 18 nt, Human
uaguugugaccuuagugu

SEQ ID NO: 2207487 - RNA, 22 nt, Human
uaguugugaccuuaguguuucu

SEQ ID NO: 2207488 - RNA, 17 nt, Human
uaguugucuuuccuggc

SEQ ID NO: 2207489 - RNA, 12 nt, Human
uaguuugcaguu

SEQ ID NO: 2207490 - RNA, 23 nt, Human
uaguuugauuaaauucuugcaaa

SEQ ID NO: 2207491 - RNA, 14 nt, Human
uaguuucuguucug

SEQ ID NO: 2207492 - RNA, 15 nt, Human
uaguuucuguucugu

SEQ ID NO: 2207493 - RNA, 16 nt, Human
uaguuucuguucugug

SEQ ID NO: 2207494 - RNA, 17 nt, Human
uaguuucuguucugugg

SEQ ID NO: 2207495 - RNA, 13 nt, Human
uaguuucuccaag

SEQ ID NO: 2207496 - RNA, 15 nt, Human
uaguggauguucuga

SEQ ID NO: 2207497 - RNA, 15 nt, Human
uaguggauggaaggg

SEQ ID NO: 2207498 - RNA, 11 nt, Human
uaguguaaaau

SEQ ID NO: 2207499 - RNA, 19 nt, Human
uaguggucuuuguaagagu

SEQ ID NO: 2207500 - RNA, 21 nt, Human
uaguggucuuuguaagagugu

SEQ ID NO: 2207501 - RNA, 18 nt, Human
uaguggauggaaggggcu

SEQ ID NO: 2207502 - RNA, 17 nt, Human
uaguggauuacugccau

SEQ ID NO: 2207503 - RNA, 15 nt, Human
uaguugcuccgccuc

SEQ ID NO: 2207504 - RNA, 17 nt, Human
uagugucacuuaccuag

SEQ ID NO: 2207505 - RNA, 16 nt, Human
uaguugcuccgccucu

SEQ ID NO: 2207506 - RNA, 15 nt, Human
uaguugguguucaaa

SEQ ID NO: 2207507 - RNA, 13 nt, Human
uaguugcuugccu

SEQ ID NO: 2207508 - RNA, 20 nt, Human
uaguguaggucagcgugcuu

SEQ ID NO: 2207509 - RNA, 23 nt, Human
uaguggucuuuguaagaguguag

SEQ ID NO: 2207510 - RNA, 13 nt, Human
uaguguaaaauaa

SEQ ID NO: 2207511 - RNA, 19 nt, Human
uaguguaaaauaagaauga

SEQ ID NO: 2207512 - RNA, 22 nt, Human
uaguguaaaauaagaaugauuu

SEQ ID NO: 2207513 - RNA, 21 nt, Human
uaggcgggcggucagggguuc

SEQ ID NO: 2207514 - RNA, 16 nt, Human
uaggcgggaaggaggg

SEQ ID NO: 2207515 - RNA, 23 nt, Human
uaggcgaucacaacgugcauugu

SEQ ID NO: 2207516 - RNA, 13 nt, Human
uaggcgaucacaa

SEQ ID NO: 2207517 - RNA, 14 nt, Human
uaggcgagugccag

SEQ ID NO: 2207518 - RNA, 18 nt, Human
uaggcgagugccaggacu

SEQ ID NO: 2207519 - RNA, 15 nt, Human
uaggcuacaauuuuc

SEQ ID NO: 2207520 - RNA, 20 nt, Human
uaggcuacaauuuucuccca

SEQ ID NO: 2207521 - RNA, 13 nt, Human
uagugaugguucc

SEQ ID NO: 2207522 - RNA, 21 nt, Human
uagucacauggccuaugcaca

SEQ ID NO: 2207523 - RNA, 15 nt, Human
uagucaagcuccucc

SEQ ID NO: 2207524 - RNA, 14 nt, Human
uagucaagcuccuc

SEQ ID NO: 2207525 - RNA, 13 nt, Human
uagucaagcuccu

SEQ ID NO: 2207526 - RNA, 15 nt, Human
uagucaagauugugu

SEQ ID NO: 2207527 - RNA, 23 nt, Human
uagucaagaaaaauuauuguaua

SEQ ID NO: 2207528 - RNA, 18 nt, Human
uagucaaauugugugaaa

SEQ ID NO: 2207529 - RNA, 19 nt, Human
uagugcucgcuuucuaugu

SEQ ID NO: 2207530 - RNA, 13 nt, Human
uagugcugcugaa

SEQ ID NO: 2207531 - RNA, 22 nt, Human
uagugcugcugaagaugaauca

SEQ ID NO: 2207532 - RNA, 12 nt, Human
uagugcugugaa

SEQ ID NO: 2207533 - RNA, 21 nt, Human
uagugcuuaaaaaucauugau

SEQ ID NO: 2207534 - RNA, 17 nt, Human
uagugcugugaaaaaaa

SEQ ID NO: 2207535 - RNA, 16 nt, Human
uagugcugugaaaaaa

SEQ ID NO: 2207536 - RNA, 13 nt, Human
uagugcugugaaa

SEQ ID NO: 2207537 - RNA, 23 nt, Human
uagugcuuuccuuuuuuaaaaau

SEQ ID NO: 2207538 - RNA, 14 nt, Human
uagugaugguuccc

SEQ ID NO: 2207539 - RNA, 18 nt, Human
uagugaugguuccccugu

SEQ ID NO: 2207540 - RNA, 15 nt, Human
uagugcuaaguguga

SEQ ID NO: 2207541 - RNA, 17 nt, Human
uagugcuaagugugaac

SEQ ID NO: 2207542 - RNA, 18 nt, Human
uagugcuaagugugaacu

SEQ ID NO: 2207543 - RNA, 19 nt, Human
uagugcuaagugugaacug

SEQ ID NO: 2207544 - RNA, 14 nt, Human
uagugcuaagugug

SEQ ID NO: 2207545 - RNA, 16 nt, Human
uagucacacguggucu

SEQ ID NO: 2207546 - RNA, 14 nt, Human
uagugcaaaucaua

SEQ ID NO: 2207547 - RNA, 10 nt, Human
ggagacuaga

SEQ ID NO: 2207548 - RNA, 22 nt, Human
ggagacguacguaucagcggcc

SEQ ID NO: 2207549 - RNA, 20 nt, Human
ggagaccgggguauccuggg

SEQ ID NO: 2207550 - RNA, 21 nt, Human
ggagagcuagcagcagggagg

SEQ ID NO: 2207551 - RNA, 17 nt, Human
ggagagcuagcagcagg

SEQ ID NO: 2207552 - RNA, 19 nt, Human
ggagacuagauugccuuug

SEQ ID NO: 2207553 - RNA, 14 nt, Human
ggagacuagauugc

SEQ ID NO: 2207554 - RNA, 22 nt, Human
ggagacuagauuuaugaauaca

SEQ ID NO: 2207555 - RNA, 16 nt, Human
ggagacuaagcccugu

SEQ ID NO: 2207556 - RNA, 17 nt, Human
ggagacuaucagcccaa

SEQ ID NO: 2207557 - RNA, 13 nt, Human
ggagagcuggagc

SEQ ID NO: 2207558 - RNA, 17 nt, Human
ggagagcuggagccugg

SEQ ID NO: 2207559 - RNA, 18 nt, Human
ggagagcuggagccuggu

SEQ ID NO: 2207560 - RNA, 22 nt, Human
ggagagcuggagccuggugccc

SEQ ID NO: 2207561 - RNA, 18 nt, Human
ggagagcuggugcccgga

SEQ ID NO: 2207562 - RNA, 17 nt, Human
ggagagcuggugcccgg

SEQ ID NO: 2207563 - RNA, 15 nt, Human
ggagagcuggugccc

SEQ ID NO: 2207564 - RNA, 13 nt, Human
ggagagggagguc

SEQ ID NO: 2207565 - RNA, 21 nt, Human
ggagagggaugaggugcuggg

SEQ ID NO: 2207566 - RNA, 14 nt, Human
ggagagggaugagg

SEQ ID NO: 2207567 - RNA, 17 nt, Human
ggagagggaggucacug

SEQ ID NO: 2207568 - RNA, 11 nt, Human
ggacuggguuu

SEQ ID NO: 2207569 - RNA, 15 nt, Human
ggacugggggccaga

SEQ ID NO: 2207570 - RNA, 13 nt, Human
ggacuggguuugg

SEQ ID NO: 2207571 - RNA, 18 nt, Human
ggacuggguuuggacccc

SEQ ID NO: 2207572 - RNA, 23 nt, Human
ggacugggccacuucuggguggg

SEQ ID NO: 2207573 - RNA, 17 nt, Human
ggacuggggauguggga

SEQ ID NO: 2207574 - RNA, 23 nt, Human
ggacuggggaugugggagggagc

SEQ ID NO: 2207575 - RNA, 18 nt, Human
ggacugcuaaauaaaauu

SEQ ID NO: 2207576 - RNA, 19 nt, Human
ggacugcuaaauaaaauuu

SEQ ID NO: 2207577 - RNA, 11 nt, Human
ggacugggagg

SEQ ID NO: 2207578 - RNA, 12 nt, Human
ggacugggaggu

SEQ ID NO: 2207579 - RNA, 21 nt, Human
ggacugccccgugcagacugg

SEQ ID NO: 2207580 - RNA, 21 nt, Human
ggacugccagucccccugccc

SEQ ID NO: 2207581 - RNA, 18 nt, Human
ggacugccccgugcagac

SEQ ID NO: 2207582 - RNA, 20 nt, Human
ggacugccuugaauaucccc

SEQ ID NO: 2207583 - RNA, 18 nt, Human
ggacuguagggagggcgg

SEQ ID NO: 2207584 - RNA, 20 nt, Human
ggacuguagggagggcggca

SEQ ID NO: 2207585 - RNA, 15 nt, Human
ggacuguauuuguga

SEQ ID NO: 2207586 - RNA, 21 nt, Human
ggacuggguuuggaccccagc

SEQ ID NO: 2207587 - RNA, 23 nt, Human
ggacuggguuuggaccccagcug

SEQ ID NO: 2207588 - RNA, 24 nt, Human
ggacuggguuuggaccccagcugg

SEQ ID NO: 2207589 - RNA, 20 nt, Human
ggacugucuuucagauacau

SEQ ID NO: 2207590 - RNA, 15 nt, Human
ggacugucauagaaa

SEQ ID NO: 2207591 - RNA, 21 nt, Human
ggagaccccuuggggagcagg

SEQ ID NO: 2207592 - RNA, 20 nt, Human
ggagcaaaaucgaugcagug

SEQ ID NO: 2207593 - RNA, 16 nt, Human
ggagauuuuccuuccu

SEQ ID NO: 2207594 - RNA, 16 nt, Human
ggagcaaacucugcug

SEQ ID NO: 2207595 - RNA, 16 nt, Human
ggagauuuuagguguu

SEQ ID NO: 2207596 - RNA, 19 nt, Human
ggagauuuuagguguugau

SEQ ID NO: 2207597 - RNA, 17 nt, Human
ggagauuuuccuuccua

SEQ ID NO: 2207598 - RNA, 21 nt, Human
ggagccccuucugcucagcuc

SEQ ID NO: 2207599 - RNA, 19 nt, Human
ggagccccuucugcucagc

SEQ ID NO: 2207600 - RNA, 18 nt, Human
ggagccccuucugcucag

SEQ ID NO: 2207601 - RNA, 14 nt, Human
ggagcaaaggcuga

SEQ ID NO: 2207602 - RNA, 18 nt, Human
ggagcccgcacccccacc

SEQ ID NO: 2207603 - RNA, 16 nt, Human
ggagcccgcaccccca

SEQ ID NO: 2207604 - RNA, 14 nt, Human
ggagcccgcacccc

SEQ ID NO: 2207605 - RNA, 21 nt, Human
ggagcccgcacccccacccuu

SEQ ID NO: 2207606 - RNA, 20 nt, Human
ggagcccgcacccccacccu

SEQ ID NO: 2207607 - RNA, 16 nt, Human
ggagcccgucucagug

SEQ ID NO: 2207608 - RNA, 12 nt, Human
ggagcccuggga

SEQ ID NO: 2207609 - RNA, 22 nt, Human
ggagcccuuaucugugcucagg

SEQ ID NO: 2207610 - RNA, 20 nt, Human
ggagcccuuaucugugcuca

SEQ ID NO: 2207611 - RNA, 13 nt, Human
ggagcccugggag

SEQ ID NO: 2207612 - RNA, 16 nt, Human
ggagauguagcaaaac

SEQ ID NO: 2207613 - RNA, 18 nt, Human
ggagaugggccuuuugga

SEQ ID NO: 2207614 - RNA, 19 nt, Human
ggagauggaggaaagugau

SEQ ID NO: 2207615 - RNA, 12 nt, Human
ggagaugucuuc

SEQ ID NO: 2207616 - RNA, 13 nt, Human
ggagaugucuucg

SEQ ID NO: 2207617 - RNA, 14 nt, Human
ggagauucagacug

SEQ ID NO: 2207618 - RNA, 22 nt, Human
ggagaugucuucguacaguucu

SEQ ID NO: 2207619 - RNA, 14 nt, Human
ggagaugucuucgu

SEQ ID NO: 2207620 - RNA, 17 nt, Human
ggagauuggacggccug

SEQ ID NO: 2207621 - RNA, 20 nt, Human
ggagauugagaaggagagaa

SEQ ID NO: 2207622 - RNA, 21 nt, Human
ggagauugagaaggagagaaa

SEQ ID NO: 2207623 - RNA, 14 nt, Human
ggagauugagaagg

SEQ ID NO: 2207624 - RNA, 16 nt, Human
ggagauugagaaggag

SEQ ID NO: 2207625 - RNA, 17 nt, Human
ggagauugagaaggaga

SEQ ID NO: 2207626 - RNA, 20 nt, Human
ggagauuuacaacuggggga

SEQ ID NO: 2207627 - RNA, 14 nt, Human
ggagaggggcagaa

SEQ ID NO: 2207628 - RNA, 24 nt, Human
ggagagggaugaggugcugggagg

SEQ ID NO: 2207629 - RNA, 22 nt, Human
ggagaggggaagggccagucug

SEQ ID NO: 2207630 - RNA, 18 nt, Human
ggagaggggaagggccag

SEQ ID NO: 2207631 - RNA, 15 nt, Human
ggagaggggcacagg

SEQ ID NO: 2207632 - RNA, 18 nt, Human
ggagagggucuggagaag

SEQ ID NO: 2207633 - RNA, 17 nt, Human
ggagagggucuggagaa

SEQ ID NO: 2207634 - RNA, 14 nt, Human
ggagagggucugga

SEQ ID NO: 2207635 - RNA, 21 nt, Human
ggagagggucuggagaagcag

SEQ ID NO: 2207636 - RNA, 20 nt, Human
ggagagggucuggagaagca

SEQ ID NO: 2207637 - RNA, 15 nt, Human
ggagaugcuccuugg

SEQ ID NO: 2207638 - RNA, 20 nt, Human
ggagauggaaguugcaguga

SEQ ID NO: 2207639 - RNA, 13 nt, Human
ggagauggaguuc

SEQ ID NO: 2207640 - RNA, 22 nt, Human
ggaccugccuccugccugcccc

SEQ ID NO: 2207641 - RNA, 14 nt, Human
ggaccugccuguag

SEQ ID NO: 2207642 - RNA, 19 nt, Human
ggaccugccuccugccugc

SEQ ID NO: 2207643 - RNA, 14 nt, Human
ggaccuggcugcca

SEQ ID NO: 2207644 - RNA, 15 nt, Human
ggaccugccuguagc

SEQ ID NO: 2207645 - RNA, 23 nt, Human
ggaccugccuccugccugccccu

SEQ ID NO: 2207646 - RNA, 17 nt, Human
ggaccucugcucugagg

SEQ ID NO: 2207647 - RNA, 17 nt, Human
ggaccugagucugcuau

SEQ ID NO: 2207648 - RNA, 14 nt, Human
ggaccugccaggca

SEQ ID NO: 2207649 - RNA, 16 nt, Human
ggaccugccaggcagg

SEQ ID NO: 2207650 - RNA, 17 nt, Human
ggaccugccaggcaggg

SEQ ID NO: 2207651 - RNA, 22 nt, Human
ggaccuuaucugugcgugaaac

SEQ ID NO: 2207652 - RNA, 15 nt, Human
ggaccuuaucugugc

SEQ ID NO: 2207653 - RNA, 21 nt, Human
ggaccuuaggccuuccucucu

SEQ ID NO: 2207654 - RNA, 18 nt, Human
ggaccuuaggccuuccuc

SEQ ID NO: 2207655 - RNA, 17 nt, Human
ggaccuggugcugccuc

SEQ ID NO: 2207656 - RNA, 17 nt, Human
ggaccugguacccuccu

SEQ ID NO: 2207657 - RNA, 15 nt, Human
ggacuccucugucca

SEQ ID NO: 2207658 - RNA, 15 nt, Human
ggaccuuccugccac

SEQ ID NO: 2207659 - RNA, 12 nt, Human
ggaccuuccugc

SEQ ID NO: 2207660 - RNA, 13 nt, Human
ggaccuuccugcc

SEQ ID NO: 2207661 - RNA, 14 nt, Human
ggacuccucugucc

SEQ ID NO: 2207662 - RNA, 12 nt, Human
ggacuccucugu

SEQ ID NO: 2207663 - RNA, 13 nt, Human
ggacucugaggcu

SEQ ID NO: 2207664 - RNA, 11 nt, Human
ggacucugagg

SEQ ID NO: 2207665 - RNA, 21 nt, Human
ggacucugaggcucuuucugg

SEQ ID NO: 2207666 - RNA, 13 nt, Human
ggacucugcacau

SEQ ID NO: 2207667 - RNA, 21 nt, Human
ggacucugcacaugucuugua

SEQ ID NO: 2207668 - RNA, 15 nt, Human
ggacucugcacauga

SEQ ID NO: 2207669 - RNA, 20 nt, Human
ggacucugcacaugucuugu

SEQ ID NO: 2207670 - RNA, 18 nt, Human
ggacucucagucucugag

SEQ ID NO: 2207671 - RNA, 17 nt, Human
ggacucucagucucuga

SEQ ID NO: 2207672 - RNA, 17 nt, Human
ggacucugaagccucug

SEQ ID NO: 2207673 - RNA, 19 nt, Human
ggacucugaagccucuggg

SEQ ID NO: 2207674 - RNA, 21 nt, Human
ggacucucagucucugagcag

SEQ ID NO: 2207675 - RNA, 20 nt, Human
ggacucucagucucugagca

SEQ ID NO: 2207676 - RNA, 11 nt, Human
ggacucugccu

SEQ ID NO: 2207677 - RNA, 17 nt, Human
ggacucugggguuuuua

SEQ ID NO: 2207678 - RNA, 22 nt, Human
ggacugcacagcguccugucca

SEQ ID NO: 2207679 - RNA, 23 nt, Human
ggacugcacagcguccuguccac

SEQ ID NO: 2207680 - RNA, 16 nt, Human
ggacucuugcucuuuc

SEQ ID NO: 2207681 - RNA, 18 nt, Human
ggacucuugcucuuucua

SEQ ID NO: 2207682 - RNA, 22 nt, Human
ggacugcaagcagggcucugcc

SEQ ID NO: 2207683 - RNA, 15 nt, Human
ggaccucucccaggg

SEQ ID NO: 2207684 - RNA, 14 nt, Human
ggaccucucccagg

SEQ ID NO: 2207685 - RNA, 12 nt, Human
ggaccucuccca

SEQ ID NO: 2207686 - RNA, 12 nt, Human
ggaccucugcuc

SEQ ID NO: 2207687 - RNA, 13 nt, Human
ggaccucugcucu

SEQ ID NO: 2207688 - RNA, 14 nt, Human
ggaccucugcucug

SEQ ID NO: 2207689 - RNA, 16 nt, Human
ggaccucugcucugag

SEQ ID NO: 2207690 - RNA, 19 nt, Human
ggacccaucacgccugugc

SEQ ID NO: 2207691 - RNA, 22 nt, Human
ggacccaugaguuggggucugg

SEQ ID NO: 2207692 - RNA, 14 nt, Human
ggacccagggauga

SEQ ID NO: 2207693 - RNA, 15 nt, Human
ggaccaggacucccu

SEQ ID NO: 2207694 - RNA, 17 nt, Human
ggaccaggacaggacca

SEQ ID NO: 2207695 - RNA, 11 nt, Human
ggaccaggacu

SEQ ID NO: 2207696 - RNA, 17 nt, Human
ggaccaggacucccucc

SEQ ID NO: 2207697 - RNA, 21 nt, Human
ggaccaggacuauagcccagg

SEQ ID NO: 2207698 - RNA, 21 nt, Human
ggacccagaggaaggggccag

SEQ ID NO: 2207699 - RNA, 16 nt, Human
ggacccagacccagug

SEQ ID NO: 2207700 - RNA, 17 nt, Human
ggacccagacccagugg

SEQ ID NO: 2207701 - RNA, 14 nt, Human
ggacccagacccag

SEQ ID NO: 2207702 - RNA, 20 nt, Human
ggaaggaggguuagggaggg

SEQ ID NO: 2207703 - RNA, 13 nt, Human
ggaaggagugaga

SEQ ID NO: 2207704 - RNA, 13 nt, Human
ggaaggagggagg

SEQ ID NO: 2207705 - RNA, 18 nt, Human
ggaccagcucaggacaga

SEQ ID NO: 2207706 - RNA, 16 nt, Human
ggaccagcucaggaca

SEQ ID NO: 2207707 - RNA, 14 nt, Human
ggaccaggacagga

SEQ ID NO: 2207708 - RNA, 22 nt, Human
ggaccagcuuuucccaaaagcc

SEQ ID NO: 2207709 - RNA, 17 nt, Human
ggaccagcuuuucccaa

SEQ ID NO: 2207710 - RNA, 15 nt, Human
ggaccagcuuuuccc

SEQ ID NO: 2207711 - RNA, 22 nt, Human
ggaccagcuggggcguggggag

SEQ ID NO: 2207712 - RNA, 12 nt, Human
ggaccagcuggg

SEQ ID NO: 2207713 - RNA, 19 nt, Human
ggaccagcuggggcguggg

SEQ ID NO: 2207714 - RNA, 22 nt, Human
ggaccagcucaggacagaugcc

SEQ ID NO: 2207715 - RNA, 19 nt, Human
ggaccagcucaggacagau

SEQ ID NO: 2207716 - RNA, 17 nt, Human
ggaaggagagccugcug

SEQ ID NO: 2207717 - RNA, 16 nt, Human
ggaaggagagccugcu

SEQ ID NO: 2207718 - RNA, 15 nt, Human
ggaaggagagccugc

SEQ ID NO: 2207719 - RNA, 14 nt, Human
ggaaggagagccug

SEQ ID NO: 2207720 - RNA, 20 nt, Human
ggaagccagcaggcucucag

SEQ ID NO: 2207721 - RNA, 20 nt, Human
ggaggaucuuuugaacccag

SEQ ID NO: 2207722 - RNA, 13 nt, Human
ggaggauggagag

SEQ ID NO: 2207723 - RNA, 12 nt, Human
ggaggauggaga

SEQ ID NO: 2207724 - RNA, 22 nt, Human
ggaggaucacuggagcccagga

SEQ ID NO: 2207725 - RNA, 17 nt, Human
ggaggaggugccaacag

SEQ ID NO: 2207726 - RNA, 21 nt, Human
ggaggaucucuugagccuggg

SEQ ID NO: 2207727 - RNA, 17 nt, Human
ggaggaucucuugagcc

SEQ ID NO: 2207728 - RNA, 23 nt, Human
ggaggaucacuugaguccagaag

SEQ ID NO: 2207729 - RNA, 19 nt, Human
ggagggaauugaggucugc

SEQ ID NO: 2207730 - RNA, 17 nt, Human
ggagggaauugaggucu

SEQ ID NO: 2207731 - RNA, 15 nt, Human
ggagggaauugaggu

SEQ ID NO: 2207732 - RNA, 21 nt, Human
ggagggaaugaaccuggaggg

SEQ ID NO: 2207733 - RNA, 13 nt, Human
ggagggacauggc

SEQ ID NO: 2207734 - RNA, 22 nt, Human
ggagggacaaguggacucaggg

SEQ ID NO: 2207735 - RNA, 21 nt, Human
ggaggauggagagaggggaau

SEQ ID NO: 2207736 - RNA, 14 nt, Human
ggaggauggagaga

SEQ ID NO: 2207737 - RNA, 13 nt, Human
ggaggaugggcuc

SEQ ID NO: 2207738 - RNA, 15 nt, Human
ggaggauguucuggg

SEQ ID NO: 2207739 - RNA, 13 nt, Human
ggagggagaugga

SEQ ID NO: 2207740 - RNA, 13 nt, Human
ggagggagaggga

SEQ ID NO: 2207741 - RNA, 16 nt, Human
ggagggagcagacagg

SEQ ID NO: 2207742 - RNA, 16 nt, Human
ggagggaggcucaggu

SEQ ID NO: 2207743 - RNA, 15 nt, Human
ggagggaggcucagg

SEQ ID NO: 2207744 - RNA, 12 nt, Human
ggagggagggcu

SEQ ID NO: 2207745 - RNA, 12 nt, Human
ggagggauuugg

SEQ ID NO: 2207746 - RNA, 20 nt, Human
ggagggauuggccgcuuggc

SEQ ID NO: 2207747 - RNA, 21 nt, Human
ggagggcaagggccaugcuga

SEQ ID NO: 2207748 - RNA, 16 nt, Human
ggagggcagcagaagg

SEQ ID NO: 2207749 - RNA, 23 nt, Human
ggagggcaagggccaugcugaag

SEQ ID NO: 2207750 - RNA, 21 nt, Human
ggagggcacauuccuugccug

SEQ ID NO: 2207751 - RNA, 12 nt, Human
ggagggcuccag

SEQ ID NO: 2207752 - RNA, 13 nt, Human
ggagggcuccaga

SEQ ID NO: 2207753 - RNA, 17 nt, Human
ggagggcagcagggcua

SEQ ID NO: 2207754 - RNA, 16 nt, Human
ggagggcagcagggcu

SEQ ID NO: 2207755 - RNA, 15 nt, Human
ggagggcagcagggc

SEQ ID NO: 2207756 - RNA, 13 nt, Human
ggagggcagcagg

SEQ ID NO: 2207757 - RNA, 23 nt, Human
ggagggcuagaaccuggcagguu

SEQ ID NO: 2207758 - RNA, 21 nt, Human
ggaggaucacuggagcccagg

SEQ ID NO: 2207759 - RNA, 20 nt, Human
ggaggaucacuggagcccag

SEQ ID NO: 2207760 - RNA, 19 nt, Human
ggaggaucacuggagccca

SEQ ID NO: 2207761 - RNA, 17 nt, Human
ggaggaucacuggagcc

SEQ ID NO: 2207762 - RNA, 16 nt, Human
ggaggaucacuggagc

SEQ ID NO: 2207763 - RNA, 23 nt, Human
ggaggagguuuaggucaagaaga

SEQ ID NO: 2207764 - RNA, 20 nt, Human
ggaggagguggcagcccugu

SEQ ID NO: 2207765 - RNA, 15 nt, Human
ggaggaggugccaac

SEQ ID NO: 2207766 - RNA, 19 nt, Human
ggaggagggcggggggcac

SEQ ID NO: 2207767 - RNA, 12 nt, Human
ggaggagggaga

SEQ ID NO: 2207768 - RNA, 13 nt, Human
ggaggagggagag

SEQ ID NO: 2207769 - RNA, 17 nt, Human
ggaggagcuugggggau

SEQ ID NO: 2207770 - RNA, 13 nt, Human
ggaggaggaaggc

SEQ ID NO: 2207771 - RNA, 15 nt, Human
ggaggaggaaggcaa

SEQ ID NO: 2207772 - RNA, 17 nt, Human
ggaggagcagugcaggc

SEQ ID NO: 2207773 - RNA, 13 nt, Human
ggaggagagaaga

SEQ ID NO: 2207774 - RNA, 12 nt, Human
ggaggagcaggg

SEQ ID NO: 2207775 - RNA, 14 nt, Human
ggaggaggaggcaa

SEQ ID NO: 2207776 - RNA, 13 nt, Human
ggaggaggaggca

SEQ ID NO: 2207777 - RNA, 13 nt, Human
ggaggaggccacc

SEQ ID NO: 2207778 - RNA, 14 nt, Human
ggaggaggccaccu

SEQ ID NO: 2207779 - RNA, 15 nt, Human
ggaggaggccaccuc

SEQ ID NO: 2207780 - RNA, 16 nt, Human
ggaggaggccaccucu

SEQ ID NO: 2207781 - RNA, 19 nt, Human
ggaggaggccaccucucca

SEQ ID NO: 2207782 - RNA, 22 nt, Human
ggaggaggccaccucuccaagg

SEQ ID NO: 2207783 - RNA, 12 nt, Human
ggaggaggccug

SEQ ID NO: 2207784 - RNA, 22 nt, Human
ggaggaggccugggggcaggga

SEQ ID NO: 2207785 - RNA, 13 nt, Human
ggagcccuugggu

SEQ ID NO: 2207786 - RNA, 21 nt, Human
ggagccgagaucacgccacug

SEQ ID NO: 2207787 - RNA, 13 nt, Human
ggagccgcagcag

SEQ ID NO: 2207788 - RNA, 21 nt, Human
ggagccgaggccuaccccgca

SEQ ID NO: 2207789 - RNA, 19 nt, Human
ggaggacgcucucuggccu

SEQ ID NO: 2207790 - RNA, 13 nt, Human
ggagccgcuggca

SEQ ID NO: 2207791 - RNA, 14 nt, Human
ggagccgcuggcag

SEQ ID NO: 2207792 - RNA, 20 nt, Human
ggagccgcuggcagaaggga

SEQ ID NO: 2207793 - RNA, 21 nt, Human
ggagccgggaaagaagagccg

SEQ ID NO: 2207794 - RNA, 12 nt, Human
ggaggagcaaag

SEQ ID NO: 2207795 - RNA, 13 nt, Human
ggaggagaaugag

SEQ ID NO: 2207796 - RNA, 17 nt, Human
ggaggagcaaaggcuga

SEQ ID NO: 2207797 - RNA, 21 nt, Human
ggaggacugccccgugcagac

SEQ ID NO: 2207798 - RNA, 21 nt, Human
ggaggacuagaaccuggaggg

SEQ ID NO: 2207799 - RNA, 22 nt, Human
ggaggacuagaaccuggagggc

SEQ ID NO: 2207800 - RNA, 16 nt, Human
ggaggacuagaaccug

SEQ ID NO: 2207801 - RNA, 19 nt, Human
ggaggacuagaaccuggag

SEQ ID NO: 2207802 - RNA, 21 nt, Human
ggaggacgcucucuggccuuc

SEQ ID NO: 2207803 - RNA, 20 nt, Human
ggaggacgcucucuggccuu

SEQ ID NO: 2207804 - RNA, 15 nt, Human
ggagugagaugccug

SEQ ID NO: 2207805 - RNA, 22 nt, Human
ggagugaagaggggcagcccuu

SEQ ID NO: 2207806 - RNA, 23 nt, Human
ggagugaagaggggcagcccuug

SEQ ID NO: 2207807 - RNA, 17 nt, Human
ggagugaagaggggcag

SEQ ID NO: 2207808 - RNA, 18 nt, Human
ggagugaagaggggcagc

SEQ ID NO: 2207809 - RNA, 19 nt, Human
ggagugaagaggggcagcc

SEQ ID NO: 2207810 - RNA, 20 nt, Human
ggagugaagaggggcagccc

SEQ ID NO: 2207811 - RNA, 12 nt, Human
ggagugagcugg

SEQ ID NO: 2207812 - RNA, 14 nt, Human
ggagugagcugguu

SEQ ID NO: 2207813 - RNA, 21 nt, Human
ggagugaguugauagcacaga

SEQ ID NO: 2207814 - RNA, 17 nt, Human
ggagugacagaggcagc

SEQ ID NO: 2207815 - RNA, 18 nt, Human
ggagugacagaggcagcc

SEQ ID NO: 2207816 - RNA, 19 nt, Human
ggagugacagaggcagccc

SEQ ID NO: 2207817 - RNA, 21 nt, Human
ggagugacagaggcagcccca

SEQ ID NO: 2207818 - RNA, 21 nt, Human
ggagugaguguggcuccccuc

SEQ ID NO: 2207819 - RNA, 21 nt, Human
ggagugaggaaggcaggaaga

SEQ ID NO: 2207820 - RNA, 21 nt, Human
ggagugaggaauaguugagcc

SEQ ID NO: 2207821 - RNA, 18 nt, Human
ggauagaugcuggcccag

SEQ ID NO: 2207822 - RNA, 13 nt, Human
ggauagaugugug

SEQ ID NO: 2207823 - RNA, 20 nt, Human
ggauagaugcuggcccaggg

SEQ ID NO: 2207824 - RNA, 19 nt, Human
ggauagaugcuggcccagg

SEQ ID NO: 2207825 - RNA, 15 nt, Human
ggauagaugugugga

SEQ ID NO: 2207826 - RNA, 14 nt, Human
ggauagaugugugg

SEQ ID NO: 2207827 - RNA, 21 nt, Human
ggauagaugcuggcccagggc

SEQ ID NO: 2207828 - RNA, 23 nt, Human
ggagugaggaauaguugagcccc

SEQ ID NO: 2207829 - RNA, 13 nt, Human
ggauagcauuuuu

SEQ ID NO: 2207830 - RNA, 18 nt, Human
ggauaggaaaaaugagua

SEQ ID NO: 2207831 - RNA, 14 nt, Human
ggauaggagccugc

SEQ ID NO: 2207832 - RNA, 15 nt, Human
ggauaggagccugcu

SEQ ID NO: 2207833 - RNA, 19 nt, Human
ggaucacuggagcccagga

SEQ ID NO: 2207834 - RNA, 18 nt, Human
ggaucacuggagcccagg

SEQ ID NO: 2207835 - RNA, 17 nt, Human
ggaucacuggagcccag

SEQ ID NO: 2207836 - RNA, 14 nt, Human
ggaucacuggagcc

SEQ ID NO: 2207837 - RNA, 16 nt, Human
ggaucagaacagcaga

SEQ ID NO: 2207838 - RNA, 17 nt, Human
ggaucagaacagcagag

SEQ ID NO: 2207839 - RNA, 14 nt, Human
ggaucagaaauaca

SEQ ID NO: 2207840 - RNA, 16 nt, Human
ggaucagaaauacaga

SEQ ID NO: 2207841 - RNA, 13 nt, Human
ggaucacuggagc

SEQ ID NO: 2207842 - RNA, 17 nt, Human
ggaucacagggccccag

SEQ ID NO: 2207843 - RNA, 14 nt, Human
ggaucacagggccc

SEQ ID NO: 2207844 - RNA, 13 nt, Human
ggaucacagggcc

SEQ ID NO: 2207845 - RNA, 17 nt, Human
ggauaggagccugcugg

SEQ ID NO: 2207846 - RNA, 21 nt, Human
ggauaggaguucacuucaucu

SEQ ID NO: 2207847 - RNA, 16 nt, Human
ggaucacagccucuga

SEQ ID NO: 2207848 - RNA, 11 nt, Human
ggagugacaga

SEQ ID NO: 2207849 - RNA, 16 nt, Human
ggagugacagaggcag

SEQ ID NO: 2207850 - RNA, 21 nt, Human
ggagugaaaccuuuagggcag

SEQ ID NO: 2207851 - RNA, 22 nt, Human
ggagugaaaccuuuagggcagc

SEQ ID NO: 2207852 - RNA, 23 nt, Human
ggagugaaaccuuuagggcagcu

SEQ ID NO: 2207853 - RNA, 12 nt, Human
ggagugaagagg

SEQ ID NO: 2207854 - RNA, 15 nt, Human
ggagugaagaggggc

SEQ ID NO: 2207855 - RNA, 16 nt, Human
ggagugaagaggggca

SEQ ID NO: 2207856 - RNA, 15 nt, Human
ggagucugaagcaga

SEQ ID NO: 2207857 - RNA, 14 nt, Human
ggagucugaagcag

SEQ ID NO: 2207858 - RNA, 16 nt, Human
ggagucccgucaggac

SEQ ID NO: 2207859 - RNA, 21 nt, Human
ggagucuccagugguugcugu

SEQ ID NO: 2207860 - RNA, 22 nt, Human
ggagucguggggugugcuggga

SEQ ID NO: 2207861 - RNA, 24 nt, Human
ggagucguggggugugcugggagc

SEQ ID NO: 2207862 - RNA, 20 nt, Human
ggagucccaccuuggcugca

SEQ ID NO: 2207863 - RNA, 21 nt, Human
ggagucccaccuuggcugcag

SEQ ID NO: 2207864 - RNA, 21 nt, Human
ggaggggacuauuuaugaagg

SEQ ID NO: 2207865 - RNA, 20 nt, Human
ggaggggacuauuuaugaag

SEQ ID NO: 2207866 - RNA, 13 nt, Human
ggaggggacgcug

SEQ ID NO: 2207867 - RNA, 20 nt, Human
ggagggcuggaaucuggaga

SEQ ID NO: 2207868 - RNA, 22 nt, Human
ggagggcugucaucugugcacu

SEQ ID NO: 2207869 - RNA, 14 nt, Human
ggagggcuggaauc

SEQ ID NO: 2207870 - RNA, 16 nt, Human
ggagggcuggaaucug

SEQ ID NO: 2207871 - RNA, 23 nt, Human
ggagucaucucaaccauccccuc

SEQ ID NO: 2207872 - RNA, 17 nt, Human
ggagucaucucaaccau

SEQ ID NO: 2207873 - RNA, 15 nt, Human
ggaguccacucccag

SEQ ID NO: 2207874 - RNA, 16 nt, Human
ggaguccacuuuguuu

SEQ ID NO: 2207875 - RNA, 17 nt, Human
ggagucccaaggaaagc

SEQ ID NO: 2207876 - RNA, 16 nt, Human
ggagucccaaggaaag

SEQ ID NO: 2207877 - RNA, 19 nt, Human
ggaguccacucccagugcu

SEQ ID NO: 2207878 - RNA, 21 nt, Human
ggaguccaggccauggaggca

SEQ ID NO: 2207879 - RNA, 17 nt, Human
ggagggcuccagacaca

SEQ ID NO: 2207880 - RNA, 22 nt, Human
ggagggcuagaaucuggagagc

SEQ ID NO: 2207881 - RNA, 19 nt, Human
ggagggcuagaacuggaga

SEQ ID NO: 2207882 - RNA, 20 nt, Human
ggagggcuagaaucuggaga

SEQ ID NO: 2207883 - RNA, 14 nt, Human
ggagggcuccagac

SEQ ID NO: 2207884 - RNA, 15 nt, Human
ggagggcuccagaca

SEQ ID NO: 2207885 - RNA, 12 nt, Human
ggcagagcagag

SEQ ID NO: 2207886 - RNA, 17 nt, Human
ggcaccuauaaaacagg

SEQ ID NO: 2207887 - RNA, 16 nt, Human
ggcaccugcagguugg

SEQ ID NO: 2207888 - RNA, 20 nt, Human
ggcaccugcagguugggcca

SEQ ID NO: 2207889 - RNA, 23 nt, Human
ggcaccuccuacgucaaacauga

SEQ ID NO: 2207890 - RNA, 22 nt, Human
ggcaccuauagucccagcuacu

SEQ ID NO: 2207891 - RNA, 19 nt, Human
ggcaccuauagucccagcu

SEQ ID NO: 2207892 - RNA, 18 nt, Human
ggcaccuauagucccagc

SEQ ID NO: 2207893 - RNA, 22 nt, Human
ggcaccuaauccaggcagaucc

SEQ ID NO: 2207894 - RNA, 20 nt, Human
ggcacccccuggagagaagu

SEQ ID NO: 2207895 - RNA, 19 nt, Human
ggcaccucacaggccccag

SEQ ID NO: 2207896 - RNA, 16 nt, Human
ggcaccucacaggccc

SEQ ID NO: 2207897 - RNA, 20 nt, Human
ggcagagcagagaccauccc

SEQ ID NO: 2207898 - RNA, 15 nt, Human
ggcagagcagagacc

SEQ ID NO: 2207899 - RNA, 16 nt, Human
ggcagagcagagacca

SEQ ID NO: 2207900 - RNA, 22 nt, Human
ggcaagucccugacucucugug

SEQ ID NO: 2207901 - RNA, 23 nt, Human
ggcaagucccugacucucuguga

SEQ ID NO: 2207902 - RNA, 13 nt, Human
ggcaagugauuga

SEQ ID NO: 2207903 - RNA, 16 nt, Human
ggcaaggcugucaauu

SEQ ID NO: 2207904 - RNA, 19 nt, Human
ggcaagggccaugcugaag

SEQ ID NO: 2207905 - RNA, 14 nt, Human
ggcaaggcugugcu

SEQ ID NO: 2207906 - RNA, 21 nt, Human
ggcaagggccaugcugaaggg

SEQ ID NO: 2207907 - RNA, 22 nt, Human
ggcaacuuuccuuguuccccau

SEQ ID NO: 2207908 - RNA, 13 nt, Human
ggcaaggcugugc

SEQ ID NO: 2207909 - RNA, 17 nt, Human
ggcacccggccccugcu

SEQ ID NO: 2207910 - RNA, 14 nt, Human
ggcacccccuggag

SEQ ID NO: 2207911 - RNA, 15 nt, Human
ggcacccccuggaga

SEQ ID NO: 2207912 - RNA, 16 nt, Human
ggcacccccuggagag

SEQ ID NO: 2207913 - RNA, 19 nt, Human
ggcaccuaauccaggcaga

SEQ ID NO: 2207914 - RNA, 18 nt, Human
ggcaccuaauccaggcag

SEQ ID NO: 2207915 - RNA, 17 nt, Human
ggcaccuaauccaggca

SEQ ID NO: 2207916 - RNA, 18 nt, Human
ggcacccccuggagagaa

SEQ ID NO: 2207917 - RNA, 19 nt, Human
ggcacccccuggagagaag

SEQ ID NO: 2207918 - RNA, 15 nt, Human
ggcacccggccccug

SEQ ID NO: 2207919 - RNA, 16 nt, Human
ggcacccggccccugc

SEQ ID NO: 2207920 - RNA, 23 nt, Human
ggcaacugaggcagacagcagcu

SEQ ID NO: 2207921 - RNA, 20 nt, Human
ggcaacugaggcagacagca

SEQ ID NO: 2207922 - RNA, 19 nt, Human
ggcaacugaggcagacagc

SEQ ID NO: 2207923 - RNA, 19 nt, Human
ggcaacugcauuggcuuug

SEQ ID NO: 2207924 - RNA, 18 nt, Human
ggcaacuugggaacuaga

SEQ ID NO: 2207925 - RNA, 23 nt, Human
ggcaacuugggaacuagacuccc

SEQ ID NO: 2207926 - RNA, 15 nt, Human
ggcaaggcugucaau

SEQ ID NO: 2207927 - RNA, 15 nt, Human
ggcaacugaggcaga

SEQ ID NO: 2207928 - RNA, 14 nt, Human
ggcaacugaggcag

SEQ ID NO: 2207929 - RNA, 13 nt, Human
ggcaacugaggca

SEQ ID NO: 2207930 - RNA, 18 nt, Human
ggcaacugcauuggcuuu

SEQ ID NO: 2207931 - RNA, 19 nt, Human
ggcaaccuugucucuaugc

SEQ ID NO: 2207932 - RNA, 15 nt, Human
ggcaaccuugucucu

SEQ ID NO: 2207933 - RNA, 21 nt, Human
ggaucagucugauucccaagc

SEQ ID NO: 2207934 - RNA, 21 nt, Human
ggaucagaugaacucuuagaa

SEQ ID NO: 2207935 - RNA, 19 nt, Human
ggaucagcccucauuuugu

SEQ ID NO: 2207936 - RNA, 12 nt, Human
ggaucagaauag

SEQ ID NO: 2207937 - RNA, 16 nt, Human
ggaucagauugcaugu

SEQ ID NO: 2207938 - RNA, 16 nt, Human
ggaucagaugaacucu

SEQ ID NO: 2207939 - RNA, 19 nt, Human
ggcaacccccagccugcua

SEQ ID NO: 2207940 - RNA, 23 nt, Human
ggaucccaccccauuuucugugg

SEQ ID NO: 2207941 - RNA, 13 nt, Human
ggauccagaaggg

SEQ ID NO: 2207942 - RNA, 14 nt, Human
ggauccacaccugg

SEQ ID NO: 2207943 - RNA, 15 nt, Human
ggauccacaccuggu

SEQ ID NO: 2207944 - RNA, 19 nt, Human
ggaucaucugccgugccug

SEQ ID NO: 2207945 - RNA, 21 nt, Human
ggaucaugguguaauaagaca

SEQ ID NO: 2207946 - RNA, 16 nt, Human
ggaucaugguguaaua

SEQ ID NO: 2207947 - RNA, 19 nt, Human
ggaucaugguguaauaaga

SEQ ID NO: 2207948 - RNA, 21 nt, Human
ggcagcuugaggguugggcug

SEQ ID NO: 2207949 - RNA, 19 nt, Human
ggcagcugcgguccaccca

SEQ ID NO: 2207950 - RNA, 22 nt, Human
ggcagcucaccucucccuugga

SEQ ID NO: 2207951 - RNA, 18 nt, Human
ggcagcucaccucucccu

SEQ ID NO: 2207952 - RNA, 21 nt, Human
ggcagcucaccucucccuugg

SEQ ID NO: 2207953 - RNA, 16 nt, Human
ggcaggugaccuucug

SEQ ID NO: 2207954 - RNA, 21 nt, Human
ggcaggugccaugucugggaa

SEQ ID NO: 2207955 - RNA, 22 nt, Human
ggcaggugccaugucugggaac

SEQ ID NO: 2207956 - RNA, 13 nt, Human
ggcaggugccucc

SEQ ID NO: 2207957 - RNA, 14 nt, Human
ggcaggugccucca

SEQ ID NO: 2207958 - RNA, 21 nt, Human
ggcaggugccuccaggugugc

SEQ ID NO: 2207959 - RNA, 15 nt, Human
ggcaggugccuccag

SEQ ID NO: 2207960 - RNA, 16 nt, Human
ggcaggugccuccagg

SEQ ID NO: 2207961 - RNA, 18 nt, Human
ggcaggugccuccaggug

SEQ ID NO: 2207962 - RNA, 20 nt, Human
ggcaggugccuccaggugug

SEQ ID NO: 2207963 - RNA, 23 nt, Human
ggcaggucuugaacuccuggccu

SEQ ID NO: 2207964 - RNA, 19 nt, Human
ggcagguccccagacucca

SEQ ID NO: 2207965 - RNA, 14 nt, Human
ggcagguccccaga

SEQ ID NO: 2207966 - RNA, 16 nt, Human
ggcaggaaggagagcc

SEQ ID NO: 2207967 - RNA, 15 nt, Human
ggcaggaaggagagc

SEQ ID NO: 2207968 - RNA, 11 nt, Human
ggcaggaaaag

SEQ ID NO: 2207969 - RNA, 21 nt, Human
ggcagcuuuaaccauuaaaac

SEQ ID NO: 2207970 - RNA, 13 nt, Human
ggcagcuugcccc

SEQ ID NO: 2207971 - RNA, 15 nt, Human
ggcagcuugccccgg

SEQ ID NO: 2207972 - RNA, 18 nt, Human
ggcagcuugccccggccc

SEQ ID NO: 2207973 - RNA, 13 nt, Human
ggcagguccaggg

SEQ ID NO: 2207974 - RNA, 23 nt, Human
ggcaggaaggagagccugcugca

SEQ ID NO: 2207975 - RNA, 14 nt, Human
ggcaggaaggcuga

SEQ ID NO: 2207976 - RNA, 18 nt, Human
ggcagaucugugccccau

SEQ ID NO: 2207977 - RNA, 17 nt, Human
ggcagaucugugcccca

SEQ ID NO: 2207978 - RNA, 16 nt, Human
ggcagaucugugcccc

SEQ ID NO: 2207979 - RNA, 15 nt, Human
ggcagaucugugccc

SEQ ID NO: 2207980 - RNA, 18 nt, Human
ggcagaucaccagagguc

SEQ ID NO: 2207981 - RNA, 14 nt, Human
ggcagauccaggac

SEQ ID NO: 2207982 - RNA, 16 nt, Human
ggcagauccaggacua

SEQ ID NO: 2207983 - RNA, 13 nt, Human
ggcagauugaaaa

SEQ ID NO: 2207984 - RNA, 20 nt, Human
ggcagaucugugccccaugc

SEQ ID NO: 2207985 - RNA, 24 nt, Human
ggcagauuuagugaaagcuagaga

SEQ ID NO: 2207986 - RNA, 14 nt, Human
ggcagcacagagac

SEQ ID NO: 2207987 - RNA, 21 nt, Human
ggcagcacagagacccccgga

SEQ ID NO: 2207988 - RNA, 21 nt, Human
ggcagcaccugucuccuuuca

SEQ ID NO: 2207989 - RNA, 18 nt, Human
ggcagcagaagggggugg

SEQ ID NO: 2207990 - RNA, 10 nt, Human
ggcagcagau

SEQ ID NO: 2207991 - RNA, 19 nt, Human
ggcagaggcuggaggcagg

SEQ ID NO: 2207992 - RNA, 13 nt, Human
ggcagaggcugga

SEQ ID NO: 2207993 - RNA, 12 nt, Human
ggcagaggcugg

SEQ ID NO: 2207994 - RNA, 15 nt, Human
ggcagaggacagauc

SEQ ID NO: 2207995 - RNA, 13 nt, Human
ggcagagcuucuu

SEQ ID NO: 2207996 - RNA, 17 nt, Human
ggcagagcuuggacugg

SEQ ID NO: 2207997 - RNA, 21 nt, Human
ggcagagcuuggacuggaugc

SEQ ID NO: 2207998 - RNA, 17 nt, Human
ggcagaggaaagcaaag

SEQ ID NO: 2207999 - RNA, 20 nt, Human
ggcagauaaucagccucuua

SEQ ID NO: 2208000 - RNA, 19 nt, Human
ggcagauaaucagccucuu

SEQ ID NO: 2208001 - RNA, 18 nt, Human
ggcagauaaucagccucu

SEQ ID NO: 2208002 - RNA, 15 nt, Human
ggcagauaaucagcc

SEQ ID NO: 2208003 - RNA, 23 nt, Human
ggcagauacaggaaaagcugcug

SEQ ID NO: 2208004 - RNA, 23 nt, Human
ggcagaguugaagacagagcuac

SEQ ID NO: 2208005 - RNA, 14 nt, Human
ggcagaguuguaaa

SEQ ID NO: 2208006 - RNA, 15 nt, Human
ggcagaguuguaaau

SEQ ID NO: 2208007 - RNA, 16 nt, Human
ggcagaguuguaaaua

SEQ ID NO: 2208008 - RNA, 17 nt, Human
ggcagaguuguaaauau

SEQ ID NO: 2208009 - RNA, 18 nt, Human
ggcagaguuguaaauaua

SEQ ID NO: 2208010 - RNA, 22 nt, Human
ggcagaguuguaaauauauaaa

SEQ ID NO: 2208011 - RNA, 23 nt, Human
ggcagaguuguaaauauauaaau

SEQ ID NO: 2208012 - RNA, 21 nt, Human
ggcagaguuuguguguugucu

SEQ ID NO: 2208013 - RNA, 14 nt, Human
ggccccgccgccug

SEQ ID NO: 2208014 - RNA, 18 nt, Human
ggccccgaggacccagac

SEQ ID NO: 2208015 - RNA, 19 nt, Human
ggccccgaggacccagacc

SEQ ID NO: 2208016 - RNA, 15 nt, Human
ggccccgccgccugg

SEQ ID NO: 2208017 - RNA, 18 nt, Human
ggccccgccgccugguac

SEQ ID NO: 2208018 - RNA, 17 nt, Human
ggcccccuggucucugg

SEQ ID NO: 2208019 - RNA, 14 nt, Human
ggcccccuguccuc

SEQ ID NO: 2208020 - RNA, 18 nt, Human
ggcccccuggucucuggu

SEQ ID NO: 2208021 - RNA, 17 nt, Human
ggccccgaggacccaga

SEQ ID NO: 2208022 - RNA, 19 nt, Human
ggccccgcuuguccagcgc

SEQ ID NO: 2208023 - RNA, 13 nt, Human
ggccccggcccca

SEQ ID NO: 2208024 - RNA, 21 nt, Human
ggccccgcuuguccagcgccu

SEQ ID NO: 2208025 - RNA, 14 nt, Human
ggccccggccccag

SEQ ID NO: 2208026 - RNA, 16 nt, Human
ggccccggccccagcc

SEQ ID NO: 2208027 - RNA, 17 nt, Human
ggccccggccccagcca

SEQ ID NO: 2208028 - RNA, 18 nt, Human
ggccccggccccagccag

SEQ ID NO: 2208029 - RNA, 21 nt, Human
ggccccggccccagccagagu

SEQ ID NO: 2208030 - RNA, 18 nt, Human
ggccccguuucugguggu

SEQ ID NO: 2208031 - RNA, 19 nt, Human
ggccccucacccugccuua

SEQ ID NO: 2208032 - RNA, 15 nt, Human
ggcccccgagcuggg

SEQ ID NO: 2208033 - RNA, 13 nt, Human
ggcccccgagcug

SEQ ID NO: 2208034 - RNA, 20 nt, Human
ggccccccuccuugcucugc

SEQ ID NO: 2208035 - RNA, 15 nt, Human
ggcccccuccaucgg

SEQ ID NO: 2208036 - RNA, 12 nt, Human
ggcccccagcug

SEQ ID NO: 2208037 - RNA, 19 nt, Human
ggcccccagagcgccccuc

SEQ ID NO: 2208038 - RNA, 23 nt, Human
ggcccccagcccagggcuccugc

SEQ ID NO: 2208039 - RNA, 15 nt, Human
ggcccccagcugugg

SEQ ID NO: 2208040 - RNA, 14 nt, Human
ggcccccaucucau

SEQ ID NO: 2208041 - RNA, 21 nt, Human
ggcccccaucucaugccccug

SEQ ID NO: 2208042 - RNA, 15 nt, Human
ggcccccaucucaug

SEQ ID NO: 2208043 - RNA, 17 nt, Human
ggccccccuccuugcuc

SEQ ID NO: 2208044 - RNA, 13 nt, Human
ggccauggcagaa

SEQ ID NO: 2208045 - RNA, 16 nt, Human
ggccaggcugcucuug

SEQ ID NO: 2208046 - RNA, 21 nt, Human
ggccaggccaccuccagaaac

SEQ ID NO: 2208047 - RNA, 22 nt, Human
ggccauggagagcuggagccug

SEQ ID NO: 2208048 - RNA, 13 nt, Human
ggccaugggccuc

SEQ ID NO: 2208049 - RNA, 22 nt, Human
ggccaugggacagggaggacgc

SEQ ID NO: 2208050 - RNA, 15 nt, Human
ggcccccacuugccu

SEQ ID NO: 2208051 - RNA, 16 nt, Human
ggcccccacuugccuc

SEQ ID NO: 2208052 - RNA, 18 nt, Human
ggcccccacuugccucuu

SEQ ID NO: 2208053 - RNA, 12 nt, Human
ggcccccagagc

SEQ ID NO: 2208054 - RNA, 15 nt, Human
ggcccccagagcgcc

SEQ ID NO: 2208055 - RNA, 16 nt, Human
ggcccccagagcgccc

SEQ ID NO: 2208056 - RNA, 17 nt, Human
ggcccccagagcgcccc

SEQ ID NO: 2208057 - RNA, 14 nt, Human
ggcccccagcccag

SEQ ID NO: 2208058 - RNA, 17 nt, Human
ggcccccagcccagggc

SEQ ID NO: 2208059 - RNA, 18 nt, Human
ggcccccagcccagggcu

SEQ ID NO: 2208060 - RNA, 20 nt, Human
ggcccccagcccagggcucc

SEQ ID NO: 2208061 - RNA, 12 nt, Human
ggccccucugcc

SEQ ID NO: 2208062 - RNA, 14 nt, Human
ggccccucugccca

SEQ ID NO: 2208063 - RNA, 14 nt, Human
ggccccucugaccu

SEQ ID NO: 2208064 - RNA, 15 nt, Human
ggccccucugcccag

SEQ ID NO: 2208065 - RNA, 16 nt, Human
ggccccucugcccagc

SEQ ID NO: 2208066 - RNA, 17 nt, Human
ggccccucugcccagcu

SEQ ID NO: 2208067 - RNA, 19 nt, Human
ggccccucugcccagcuug

SEQ ID NO: 2208068 - RNA, 17 nt, Human
ggccccuccagcuugug

SEQ ID NO: 2208069 - RNA, 22 nt, Human
ggccccuauguaguccgugcug

SEQ ID NO: 2208070 - RNA, 22 nt, Human
ggccccucacccugccuuaucu

SEQ ID NO: 2208071 - RNA, 23 nt, Human
ggccccucaucugcucagcagcu

SEQ ID NO: 2208072 - RNA, 12 nt, Human
ggccccuccagc

SEQ ID NO: 2208073 - RNA, 22 nt, Human
ggccccucccacacacacccac

SEQ ID NO: 2208074 - RNA, 16 nt, Human
ggccccucaggguccc

SEQ ID NO: 2208075 - RNA, 19 nt, Human
ggccccucagggucccugg

SEQ ID NO: 2208076 - RNA, 20 nt, Human
ggccccucagggucccuggu

SEQ ID NO: 2208077 - RNA, 21 nt, Human
ggccccucagggucccuggug

SEQ ID NO: 2208078 - RNA, 17 nt, Human
ggccccugccacccugg

SEQ ID NO: 2208079 - RNA, 18 nt, Human
ggccccugccacccuggg

SEQ ID NO: 2208080 - RNA, 13 nt, Human
ggccccugcccgg

SEQ ID NO: 2208081 - RNA, 19 nt, Human
ggccccugccagacccccu

SEQ ID NO: 2208082 - RNA, 17 nt, Human
ggccccugccagacccc

SEQ ID NO: 2208083 - RNA, 13 nt, Human
ggccccugccacc

SEQ ID NO: 2208084 - RNA, 16 nt, Human
ggccccugccacccug

SEQ ID NO: 2208085 - RNA, 12 nt, Human
ggccccugccac

SEQ ID NO: 2208086 - RNA, 21 nt, Human
ggccccugagaucucugcagg

SEQ ID NO: 2208087 - RNA, 17 nt, Human
ggccccugagaucucug

SEQ ID NO: 2208088 - RNA, 17 nt, Human
ggccaggccagcugccu

SEQ ID NO: 2208089 - RNA, 15 nt, Human
ggccaggccagcugc

SEQ ID NO: 2208090 - RNA, 11 nt, Human
ggccaggcagg

SEQ ID NO: 2208091 - RNA, 15 nt, Human
ggccaggccaccagg

SEQ ID NO: 2208092 - RNA, 16 nt, Human
ggccaggccaccagga

SEQ ID NO: 2208093 - RNA, 17 nt, Human
ggccaggccaccaggau

SEQ ID NO: 2208094 - RNA, 11 nt, Human
ggccaggcugg

SEQ ID NO: 2208095 - RNA, 18 nt, Human
ggccaggcugggucgccc

SEQ ID NO: 2208096 - RNA, 22 nt, Human
ggccaggcugggucgcccugga

SEQ ID NO: 2208097 - RNA, 20 nt, Human
ggccaggaguuugagaccag

SEQ ID NO: 2208098 - RNA, 15 nt, Human
ggccaggagcucuuc

SEQ ID NO: 2208099 - RNA, 15 nt, Human
ggccaggcagaucug

SEQ ID NO: 2208100 - RNA, 16 nt, Human
ggccaggauggagggg

SEQ ID NO: 2208101 - RNA, 22 nt, Human
ggccaggcagaucugugcccca

SEQ ID NO: 2208102 - RNA, 11 nt, Human
ggccaggccac

SEQ ID NO: 2208103 - RNA, 12 nt, Human
ggccaggcaggu

SEQ ID NO: 2208104 - RNA, 14 nt, Human
ggccaggccagagg

SEQ ID NO: 2208105 - RNA, 16 nt, Human
ggccaggccagaggga

SEQ ID NO: 2208106 - RNA, 16 nt, Human
ggccacugugaagaga

SEQ ID NO: 2208107 - RNA, 14 nt, Human
ggccaggagccucc

SEQ ID NO: 2208108 - RNA, 13 nt, Human
ggccaggagcucu

SEQ ID NO: 2208109 - RNA, 18 nt, Human
ggccacugcacagagcuc

SEQ ID NO: 2208110 - RNA, 18 nt, Human
ggccacuggccaucucca

SEQ ID NO: 2208111 - RNA, 19 nt, Human
ggccaggaguuugagacca

SEQ ID NO: 2208112 - RNA, 16 nt, Human
ggccaggagccuccug

SEQ ID NO: 2208113 - RNA, 21 nt, Human
ggccacucugccucugccugc

SEQ ID NO: 2208114 - RNA, 20 nt, Human
ggccacucugccucugccug

SEQ ID NO: 2208115 - RNA, 16 nt, Human
ggccacucugccucug

SEQ ID NO: 2208116 - RNA, 23 nt, Human
ggccaccugcccccuucucccac

SEQ ID NO: 2208117 - RNA, 14 nt, Human
ggccaccuuuucag

SEQ ID NO: 2208118 - RNA, 22 nt, Human
ggccacucugccucugccugca

SEQ ID NO: 2208119 - RNA, 14 nt, Human
ggccacugaagaua

SEQ ID NO: 2208120 - RNA, 15 nt, Human
ggccacugcacagag

SEQ ID NO: 2208121 - RNA, 19 nt, Human
ggccacugcacagagcucu

SEQ ID NO: 2208122 - RNA, 11 nt, Human
ggccacuguga

SEQ ID NO: 2208123 - RNA, 12 nt, Human
ggccaaguucuu

SEQ ID NO: 2208124 - RNA, 20 nt, Human
ggccaagugcaggcuggcac

SEQ ID NO: 2208125 - RNA, 15 nt, Human
ggcauuccccaggag

SEQ ID NO: 2208126 - RNA, 16 nt, Human
ggccacaagacccuug

SEQ ID NO: 2208127 - RNA, 17 nt, Human
ggccacaagacccuugu

SEQ ID NO: 2208128 - RNA, 22 nt, Human
ggccaccugcccccuucuccca

SEQ ID NO: 2208129 - RNA, 14 nt, Human
ggccaccugccccc

SEQ ID NO: 2208130 - RNA, 22 nt, Human
ggccacacuauuaccaugagaa

SEQ ID NO: 2208131 - RNA, 21 nt, Human
ggccacacuauuaccaugaga

SEQ ID NO: 2208132 - RNA, 23 nt, Human
ggcauuccagcuccuccgugcuu

SEQ ID NO: 2208133 - RNA, 16 nt, Human
ggccaccugcggugcu

SEQ ID NO: 2208134 - RNA, 22 nt, Human
ggccaccugcggugcuaucucc

SEQ ID NO: 2208135 - RNA, 21 nt, Human
ggcagucuggaggggcauggc

SEQ ID NO: 2208136 - RNA, 16 nt, Human
ggcagucuggaggggc

SEQ ID NO: 2208137 - RNA, 14 nt, Human
ggcagucuggaggg

SEQ ID NO: 2208138 - RNA, 13 nt, Human
ggcagucuggagg

SEQ ID NO: 2208139 - RNA, 16 nt, Human
ggcagguuagaaccua

SEQ ID NO: 2208140 - RNA, 20 nt, Human
ggcagguuagaaccuagaag

SEQ ID NO: 2208141 - RNA, 19 nt, Human
ggcagucugaauuuuuaaa

SEQ ID NO: 2208142 - RNA, 22 nt, Human
ggcagucgggggcuggccuagg

SEQ ID NO: 2208143 - RNA, 23 nt, Human
ggcagucgggggcuggccuagga

SEQ ID NO: 2208144 - RNA, 17 nt, Human
ggcaggugggagcuuga

SEQ ID NO: 2208145 - RNA, 16 nt, Human
ggcaggugggagcuug

SEQ ID NO: 2208146 - RNA, 12 nt, Human
ggcaggugggag

SEQ ID NO: 2208147 - RNA, 23 nt, Human
ggcagguggaggugucaggcugc

SEQ ID NO: 2208148 - RNA, 14 nt, Human
ggcaggugguggca

SEQ ID NO: 2208149 - RNA, 17 nt, Human
ggcaggugguggcacug

SEQ ID NO: 2208150 - RNA, 21 nt, Human
ggcaggugguggcacugagcc

SEQ ID NO: 2208151 - RNA, 22 nt, Human
ggcaggugguggcacugagccc

SEQ ID NO: 2208152 - RNA, 15 nt, Human
ggcagguuggugggg

SEQ ID NO: 2208153 - RNA, 18 nt, Human
ggcagugaugcuggaugc

SEQ ID NO: 2208154 - RNA, 16 nt, Human
ggcagugccagggcag

SEQ ID NO: 2208155 - RNA, 14 nt, Human
ggcagugccagggc

SEQ ID NO: 2208156 - RNA, 20 nt, Human
ggcauuauguccacugugua

SEQ ID NO: 2208157 - RNA, 20 nt, Human
ggcauuagaauuauuuaaac

SEQ ID NO: 2208158 - RNA, 17 nt, Human
ggcauuagaauuauuua

SEQ ID NO: 2208159 - RNA, 19 nt, Human
ggcauuagaauuauuuaaa

SEQ ID NO: 2208160 - RNA, 23 nt, Human
ggcauguucucugaggacacuaa

SEQ ID NO: 2208161 - RNA, 21 nt, Human
ggcagugagggagggcuguca

SEQ ID NO: 2208162 - RNA, 16 nt, Human
ggcagugagggagggc

SEQ ID NO: 2208163 - RNA, 15 nt, Human
ggcagugagugagcc

SEQ ID NO: 2208164 - RNA, 16 nt, Human
ggcagugagugagccu

SEQ ID NO: 2208165 - RNA, 18 nt, Human
ggcagugagugagccugg

SEQ ID NO: 2208166 - RNA, 19 nt, Human
ggcagugagugagccuggc

SEQ ID NO: 2208167 - RNA, 20 nt, Human
gcugucaaaacaaguuuuuc

SEQ ID NO: 2208168 - RNA, 14 nt, Human
gcugguuagaaaug

SEQ ID NO: 2208169 - RNA, 18 nt, Human
gcugucaaguuccuuugg

SEQ ID NO: 2208170 - RNA, 16 nt, Human
gcugucaauuacagga

SEQ ID NO: 2208171 - RNA, 22 nt, Human
gcugguucaggguuggccccug

SEQ ID NO: 2208172 - RNA, 22 nt, Human
gcuguauuuuaaaagaaugauu

SEQ ID NO: 2208173 - RNA, 15 nt, Human
gcugguucaggguug

SEQ ID NO: 2208174 - RNA, 21 nt, Human
gcugguuagagguucccuuug

SEQ ID NO: 2208175 - RNA, 19 nt, Human
gcugguguccugaccaccc

SEQ ID NO: 2208176 - RNA, 22 nt, Human
gcugguguccugaccacccucc

SEQ ID NO: 2208177 - RNA, 12 nt, Human
gcuggugggagg

SEQ ID NO: 2208178 - RNA, 13 nt, Human
gcuggugggaggg

SEQ ID NO: 2208179 - RNA, 21 nt, Human
gcuggugggaagcgucugucc

SEQ ID NO: 2208180 - RNA, 15 nt, Human
gcugguggcucccgg

SEQ ID NO: 2208181 - RNA, 15 nt, Human
gcugguggcccagga

SEQ ID NO: 2208182 - RNA, 14 nt, Human
gcugguggcccagg

SEQ ID NO: 2208183 - RNA, 16 nt, Human
gcuggugucaccugaa

SEQ ID NO: 2208184 - RNA, 18 nt, Human
gcuggugucaccugaaga

SEQ ID NO: 2208185 - RNA, 12 nt, Human
gcuggugguuuc

SEQ ID NO: 2208186 - RNA, 14 nt, Human
gcuggugggagggg

SEQ ID NO: 2208187 - RNA, 13 nt, Human
gcuggugguuuca

SEQ ID NO: 2208188 - RNA, 15 nt, Human
gcugguguccugacc

SEQ ID NO: 2208189 - RNA, 16 nt, Human
gcugguguccugacca

SEQ ID NO: 2208190 - RNA, 17 nt, Human
gcugguguccugaccac

SEQ ID NO: 2208191 - RNA, 18 nt, Human
gcugguguccugaccacc

SEQ ID NO: 2208192 - RNA, 13 nt, Human
gcugguggcccag

SEQ ID NO: 2208193 - RNA, 12 nt, Human
gcugguggccca

SEQ ID NO: 2208194 - RNA, 17 nt, Human
gcuggugcuguggccag

SEQ ID NO: 2208195 - RNA, 19 nt, Human
gcuggugcuguggccaggg

SEQ ID NO: 2208196 - RNA, 15 nt, Human
gcuggugcuguggcc

SEQ ID NO: 2208197 - RNA, 20 nt, Human
gcuggucccacucaguccau

SEQ ID NO: 2208198 - RNA, 14 nt, Human
gcugucccugucac

SEQ ID NO: 2208199 - RNA, 13 nt, Human
gcugucccucacu

SEQ ID NO: 2208200 - RNA, 16 nt, Human
gcugucccucccccuu

SEQ ID NO: 2208201 - RNA, 22 nt, Human
gcugucccuuacgugaguccug

SEQ ID NO: 2208202 - RNA, 21 nt, Human
gcugucccuuacgugaguccu

SEQ ID NO: 2208203 - RNA, 19 nt, Human
gcugucccuuacgugaguc

SEQ ID NO: 2208204 - RNA, 13 nt, Human
gcugucacaggcg

SEQ ID NO: 2208205 - RNA, 15 nt, Human
gcugucccucccccu

SEQ ID NO: 2208206 - RNA, 17 nt, Human
gcugucaauuacaggaa

SEQ ID NO: 2208207 - RNA, 19 nt, Human
gcugucaauuacaggaagu

SEQ ID NO: 2208208 - RNA, 22 nt, Human
gcugucaauuacaggaaguacu

SEQ ID NO: 2208209 - RNA, 23 nt, Human
gcugucaauuacaggaaguacug

SEQ ID NO: 2208210 - RNA, 18 nt, Human
gcugucccugucaccaag

SEQ ID NO: 2208211 - RNA, 15 nt, Human
gcugucccugucacc

SEQ ID NO: 2208212 - RNA, 17 nt, Human
gcugucugaucugugcu

SEQ ID NO: 2208213 - RNA, 18 nt, Human
gcugucugaucugugcuu

SEQ ID NO: 2208214 - RNA, 22 nt, Human
gcugucugaucugugcuuucca

SEQ ID NO: 2208215 - RNA, 17 nt, Human
gcugucuccauguuuga

SEQ ID NO: 2208216 - RNA, 22 nt, Human
gcugucuucucaggcucugccc

SEQ ID NO: 2208217 - RNA, 20 nt, Human
gcugucuucucaggcucugc

SEQ ID NO: 2208218 - RNA, 13 nt, Human
gcugucuggccag

SEQ ID NO: 2208219 - RNA, 19 nt, Human
gcugucugaucugugcuuu

SEQ ID NO: 2208220 - RNA, 17 nt, Human
gcugucuggccaggccu

SEQ ID NO: 2208221 - RNA, 21 nt, Human
gcuguguccuugcaccugcau

SEQ ID NO: 2208222 - RNA, 20 nt, Human
gcuguguccuugcaccugca

SEQ ID NO: 2208223 - RNA, 19 nt, Human
gcuguguccuugcaccugc

SEQ ID NO: 2208224 - RNA, 18 nt, Human
gcuguguccuugcaccug

SEQ ID NO: 2208225 - RNA, 14 nt, Human
gcuguguccuugca

SEQ ID NO: 2208226 - RNA, 19 nt, Human
gcuguguaaaguuagucua

SEQ ID NO: 2208227 - RNA, 17 nt, Human
gcuguguaaaguuaguc

SEQ ID NO: 2208228 - RNA, 18 nt, Human
gcuguguaaaguuagucu

SEQ ID NO: 2208229 - RNA, 22 nt, Human
gcuguguacacugacaccuuug

SEQ ID NO: 2208230 - RNA, 14 nt, Human
gcuguguaucugau

SEQ ID NO: 2208231 - RNA, 12 nt, Human
gcuguguaaagu

SEQ ID NO: 2208232 - RNA, 11 nt, Human
gcuguguaaag

SEQ ID NO: 2208233 - RNA, 13 nt, Human
gcuguguaaaguu

SEQ ID NO: 2208234 - RNA, 14 nt, Human
gcuguguaaaguua

SEQ ID NO: 2208235 - RNA, 15 nt, Human
gcuguguaaaguuag

SEQ ID NO: 2208236 - RNA, 16 nt, Human
gcuguguaaaguuagu

SEQ ID NO: 2208237 - RNA, 23 nt, Human
gcugggggaagaagcucucuccu

SEQ ID NO: 2208238 - RNA, 19 nt, Human
gcuggggccugauggggag

SEQ ID NO: 2208239 - RNA, 12 nt, Human
gcuggggccuga

SEQ ID NO: 2208240 - RNA, 15 nt, Human
gcuggggccugaugg

SEQ ID NO: 2208241 - RNA, 17 nt, Human
gcuggggcguggggagg

SEQ ID NO: 2208242 - RNA, 12 nt, Human
gcuggggccagu

SEQ ID NO: 2208243 - RNA, 20 nt, Human
gcuggggccuaucagugugc

SEQ ID NO: 2208244 - RNA, 21 nt, Human
gcuggggccuaucagugugcc

SEQ ID NO: 2208245 - RNA, 17 nt, Human
gcugggcuggggccuga

SEQ ID NO: 2208246 - RNA, 12 nt, Human
gcugggcugggu

SEQ ID NO: 2208247 - RNA, 14 nt, Human
gcugggcugggugc

SEQ ID NO: 2208248 - RNA, 15 nt, Human
gcugggcugggugcg

SEQ ID NO: 2208249 - RNA, 18 nt, Human
gcugggcuucaguggcag

SEQ ID NO: 2208250 - RNA, 19 nt, Human
gcugggcuucaguggcagc

SEQ ID NO: 2208251 - RNA, 16 nt, Human
gcuggggccaggcugg

SEQ ID NO: 2208252 - RNA, 19 nt, Human
gcuggggccaggcuggguc

SEQ ID NO: 2208253 - RNA, 13 nt, Human
gcugggggccuca

SEQ ID NO: 2208254 - RNA, 18 nt, Human
gcugggggugggccaggc

SEQ ID NO: 2208255 - RNA, 15 nt, Human
gcugggggugggcca

SEQ ID NO: 2208256 - RNA, 19 nt, Human
gcugggggugggccaggcu

SEQ ID NO: 2208257 - RNA, 15 nt, Human
gcuggucccacucag

SEQ ID NO: 2208258 - RNA, 19 nt, Human
gcuggucccacucagucca

SEQ ID NO: 2208259 - RNA, 19 nt, Human
gcugggggccucagugcca

SEQ ID NO: 2208260 - RNA, 20 nt, Human
gcugggggccucagugccac

SEQ ID NO: 2208261 - RNA, 23 nt, Human
gcugggggccaugagcuccagac

SEQ ID NO: 2208262 - RNA, 16 nt, Human
gcugggggccaugagc

SEQ ID NO: 2208263 - RNA, 23 nt, Human
gcugggggcaggagggcccuacc

SEQ ID NO: 2208264 - RNA, 20 nt, Human
gcugggggcaggagggcccu

SEQ ID NO: 2208265 - RNA, 13 nt, Human
gcugggggcagga

SEQ ID NO: 2208266 - RNA, 18 nt, Human
gcuggggcguggggaggg

SEQ ID NO: 2208267 - RNA, 19 nt, Human
gcuggggcguggggagggc

SEQ ID NO: 2208268 - RNA, 15 nt, Human
gcuggggcugaccuu

SEQ ID NO: 2208269 - RNA, 16 nt, Human
gcugggacuggccagg

SEQ ID NO: 2208270 - RNA, 15 nt, Human
gcugggacuggccag

SEQ ID NO: 2208271 - RNA, 17 nt, Human
gcugggacugagccagu

SEQ ID NO: 2208272 - RNA, 13 nt, Human
gcugggagcucca

SEQ ID NO: 2208273 - RNA, 14 nt, Human
gcugggagcuccac

SEQ ID NO: 2208274 - RNA, 16 nt, Human
gcugggagcuccacuc

SEQ ID NO: 2208275 - RNA, 18 nt, Human
gcugggagcuccacucug

SEQ ID NO: 2208276 - RNA, 19 nt, Human
gcugggagagccuuccagg

SEQ ID NO: 2208277 - RNA, 22 nt, Human
gcugggagagccuuccaggggu

SEQ ID NO: 2208278 - RNA, 12 nt, Human
gcugggagagcc

SEQ ID NO: 2208279 - RNA, 13 nt, Human
gcugggagagccu

SEQ ID NO: 2208280 - RNA, 17 nt, Human
gcugggagagccuucca

SEQ ID NO: 2208281 - RNA, 18 nt, Human
gcugggagagccuuccag

SEQ ID NO: 2208282 - RNA, 16 nt, Human
gcugggagcucugcag

SEQ ID NO: 2208283 - RNA, 22 nt, Human
gcugggagcuccacucugcuuc

SEQ ID NO: 2208284 - RNA, 13 nt, Human
gcugggagcugaa

SEQ ID NO: 2208285 - RNA, 15 nt, Human
gcugggagcucugca

SEQ ID NO: 2208286 - RNA, 20 nt, Human
gcugggagcuccacucugcu

SEQ ID NO: 2208287 - RNA, 21 nt, Human
gcugggagcuccacucugcuu

SEQ ID NO: 2208288 - RNA, 21 nt, Human
gcugggaugauuggagggggg

SEQ ID NO: 2208289 - RNA, 16 nt, Human
gcugggaggagggaga

SEQ ID NO: 2208290 - RNA, 17 nt, Human
gcugggaggagggagag

SEQ ID NO: 2208291 - RNA, 17 nt, Human
gcugggcuucaguggca

SEQ ID NO: 2208292 - RNA, 21 nt, Human
gcugggauuacaggcuccugc

SEQ ID NO: 2208293 - RNA, 14 nt, Human
gcugggcuggggcc

SEQ ID NO: 2208294 - RNA, 18 nt, Human
gcugggaggagggagagg

SEQ ID NO: 2208295 - RNA, 22 nt, Human
gcugggaggagggagagggagg

SEQ ID NO: 2208296 - RNA, 15 nt, Human
gcugggcuggggccu

SEQ ID NO: 2208297 - RNA, 20 nt, Human
gcugggauuacaggcuccug

SEQ ID NO: 2208298 - RNA, 19 nt, Human
gcugggauuacaggcuccu

SEQ ID NO: 2208299 - RNA, 18 nt, Human
gcugggauuacaggcgug

SEQ ID NO: 2208300 - RNA, 17 nt, Human
gcugggauuacaggcgu

SEQ ID NO: 2208301 - RNA, 18 nt, Human
gcugcccuguaccccagc

SEQ ID NO: 2208302 - RNA, 23 nt, Human
gcugcccuggugcugccacacuu

SEQ ID NO: 2208303 - RNA, 17 nt, Human
gcugccgaccagagccc

SEQ ID NO: 2208304 - RNA, 16 nt, Human
gcugccgaccagagcc

SEQ ID NO: 2208305 - RNA, 17 nt, Human
gcugcccuuucugggca

SEQ ID NO: 2208306 - RNA, 12 nt, Human
gcugcccuguga

SEQ ID NO: 2208307 - RNA, 14 nt, Human
gcugcccugugagu

SEQ ID NO: 2208308 - RNA, 14 nt, Human
gcugccgcacccca

SEQ ID NO: 2208309 - RNA, 14 nt, Human
gcugccuuggcuca

SEQ ID NO: 2208310 - RNA, 16 nt, Human
gcugccuuggcucaga

SEQ ID NO: 2208311 - RNA, 19 nt, Human
gcugccuuggcucagacau

SEQ ID NO: 2208312 - RNA, 17 nt, Human
gcugccuuggcucagac

SEQ ID NO: 2208313 - RNA, 23 nt, Human
gcugccuuggcucagacauguuu

SEQ ID NO: 2208314 - RNA, 21 nt, Human
gcugccuuggcucagacaugu

SEQ ID NO: 2208315 - RNA, 20 nt, Human
gcugccuuuagucgcugagg

SEQ ID NO: 2208316 - RNA, 15 nt, Human
gcugcgcccugggcu

SEQ ID NO: 2208317 - RNA, 16 nt, Human
gcugcgguccacccag

SEQ ID NO: 2208318 - RNA, 16 nt, Human
gcugcgcccugggcuc

SEQ ID NO: 2208319 - RNA, 19 nt, Human
gcugcgcccuuaccuuccc

SEQ ID NO: 2208320 - RNA, 15 nt, Human
gcugcgcuugcuuuu

SEQ ID NO: 2208321 - RNA, 16 nt, Human
gcugcgcuugcuuuuc

SEQ ID NO: 2208322 - RNA, 23 nt, Human
gcuagcagaaaucuagaagacug

SEQ ID NO: 2208323 - RNA, 17 nt, Human
gcuagcacuuggagcca

SEQ ID NO: 2208324 - RNA, 22 nt, Human
gcuagcagcagggagggcuucu

SEQ ID NO: 2208325 - RNA, 18 nt, Human
gcugcccuggugcugcca

SEQ ID NO: 2208326 - RNA, 19 nt, Human
gcugcccuggugcugccac

SEQ ID NO: 2208327 - RNA, 20 nt, Human
gcugcccuggugcugccaca

SEQ ID NO: 2208328 - RNA, 22 nt, Human
gcugcccuggugcugccacacu

SEQ ID NO: 2208329 - RNA, 11 nt, Human
gcugcccugug

SEQ ID NO: 2208330 - RNA, 18 nt, Human
gcuagauguauguacuuc

SEQ ID NO: 2208331 - RNA, 20 nt, Human
gcuagaggccagccccaccc

SEQ ID NO: 2208332 - RNA, 19 nt, Human
gcuagaggccagccccacc

SEQ ID NO: 2208333 - RNA, 18 nt, Human
gcuagaggccagccccac

SEQ ID NO: 2208334 - RNA, 21 nt, Human
gcuagaggccagccccaccca

SEQ ID NO: 2208335 - RNA, 21 nt, Human
gcugcucagggaaaagcagcu

SEQ ID NO: 2208336 - RNA, 19 nt, Human
gcugcucaucugauuuuug

SEQ ID NO: 2208337 - RNA, 13 nt, Human
gcugcuucaagga

SEQ ID NO: 2208338 - RNA, 20 nt, Human
gcugcucagggaaaagcagc

SEQ ID NO: 2208339 - RNA, 21 nt, Human
gcugcucacuaccuccucagg

SEQ ID NO: 2208340 - RNA, 23 nt, Human
gcugcucacuaccuccucaggga

SEQ ID NO: 2208341 - RNA, 16 nt, Human
gcugcuauagccuggg

SEQ ID NO: 2208342 - RNA, 15 nt, Human
gcugcuauagccugg

SEQ ID NO: 2208343 - RNA, 23 nt, Human
gcugcuagcacuuggagccaagg

SEQ ID NO: 2208344 - RNA, 20 nt, Human
gcugcuagcacuuggagcca

SEQ ID NO: 2208345 - RNA, 17 nt, Human
gcugcuauagccugggg

SEQ ID NO: 2208346 - RNA, 19 nt, Human
gcugcuagcacuuggagcc

SEQ ID NO: 2208347 - RNA, 16 nt, Human
gcugcuagagccagca

SEQ ID NO: 2208348 - RNA, 19 nt, Human
gcugcgguccacccaggag

SEQ ID NO: 2208349 - RNA, 17 nt, Human
gcugcgguccacccagg

SEQ ID NO: 2208350 - RNA, 18 nt, Human
gcugcgguccacccagga

SEQ ID NO: 2208351 - RNA, 23 nt, Human
gcugcuucccucugccugucccu

SEQ ID NO: 2208352 - RNA, 22 nt, Human
gcugcuucccucugccuguccc

SEQ ID NO: 2208353 - RNA, 21 nt, Human
gcugcuucccucugccugucc

SEQ ID NO: 2208354 - RNA, 20 nt, Human
gcugcuucccucugccuguc

SEQ ID NO: 2208355 - RNA, 15 nt, Human
gcugcuucccucugc

SEQ ID NO: 2208356 - RNA, 14 nt, Human
gcugcuucccucug

SEQ ID NO: 2208357 - RNA, 12 nt, Human
gcugcuucccuc

SEQ ID NO: 2208358 - RNA, 13 nt, Human
gcugcuuccuccu

SEQ ID NO: 2208359 - RNA, 14 nt, Human
gcugcuuccuccug

SEQ ID NO: 2208360 - RNA, 15 nt, Human
gcugcuuccuccugg

SEQ ID NO: 2208361 - RNA, 16 nt, Human
gcugcuuccuccugga

SEQ ID NO: 2208362 - RNA, 16 nt, Human
gcugcuugggcuucau

SEQ ID NO: 2208363 - RNA, 17 nt, Human
gcugcuuccuccuggaa

SEQ ID NO: 2208364 - RNA, 21 nt, Human
gcugcuucucccacuuggcca

SEQ ID NO: 2208365 - RNA, 23 nt, Human
gcugcuucaaggauccugagcca

SEQ ID NO: 2208366 - RNA, 18 nt, Human
gcugcuuagacauaacaa

SEQ ID NO: 2208367 - RNA, 20 nt, Human
gcugcuuagaauccaaacuu

SEQ ID NO: 2208368 - RNA, 21 nt, Human
gcugcuucaaggauccugagc

SEQ ID NO: 2208369 - RNA, 22 nt, Human
gcugcuucaaggauccugagcc

SEQ ID NO: 2208370 - RNA, 13 nt, Human
gcuggccccgccg

SEQ ID NO: 2208371 - RNA, 20 nt, Human
gcuggcccagggcccagagc

SEQ ID NO: 2208372 - RNA, 22 nt, Human
gcuggccccgccgccugguacu

SEQ ID NO: 2208373 - RNA, 23 nt, Human
gcuggccccgccgccugguacuc

SEQ ID NO: 2208374 - RNA, 24 nt, Human
gcuggccccgccgccugguacuca

SEQ ID NO: 2208375 - RNA, 12 nt, Human
gcuggccccuca

SEQ ID NO: 2208376 - RNA, 11 nt, Human
gcuggccccuc

SEQ ID NO: 2208377 - RNA, 23 nt, Human
gcuggccccucaccugggcaccu

SEQ ID NO: 2208378 - RNA, 19 nt, Human
gcuggccccucaccugggc

SEQ ID NO: 2208379 - RNA, 14 nt, Human
gcuggccccucacc

SEQ ID NO: 2208380 - RNA, 19 nt, Human
gcuggcccagggcccagag

SEQ ID NO: 2208381 - RNA, 18 nt, Human
gcuggcccagggcccaga

SEQ ID NO: 2208382 - RNA, 21 nt, Human
gcuggcccagggcccagagcc

SEQ ID NO: 2208383 - RNA, 16 nt, Human
gcuggauuacaggcau

SEQ ID NO: 2208384 - RNA, 19 nt, Human
gcuggcaaagacagaagcc

SEQ ID NO: 2208385 - RNA, 15 nt, Human
gcuggcaaagacaga

SEQ ID NO: 2208386 - RNA, 22 nt, Human
gcuggaugucugccaauuuuug

SEQ ID NO: 2208387 - RNA, 22 nt, Human
gcuggauuggguuaugaauauu

SEQ ID NO: 2208388 - RNA, 16 nt, Human
gcuggcccagcccugc

SEQ ID NO: 2208389 - RNA, 17 nt, Human
gcuggcccagcccugcu

SEQ ID NO: 2208390 - RNA, 19 nt, Human
gcuggcccagcccugcugg

SEQ ID NO: 2208391 - RNA, 15 nt, Human
gcuggcaaagguggc

SEQ ID NO: 2208392 - RNA, 20 nt, Human
gcuggcaaagguggcucucc

SEQ ID NO: 2208393 - RNA, 17 nt, Human
gcuggcccagggcccag

SEQ ID NO: 2208394 - RNA, 16 nt, Human
gcuggcccagggccca

SEQ ID NO: 2208395 - RNA, 15 nt, Human
gcuggcccagggccc

SEQ ID NO: 2208396 - RNA, 13 nt, Human
gcuggcccagggc

SEQ ID NO: 2208397 - RNA, 20 nt, Human
gcuggcccagcccugcuggc

SEQ ID NO: 2208398 - RNA, 13 nt, Human
gcuggcccagccg

SEQ ID NO: 2208399 - RNA, 16 nt, Human
gcuggcccagccggcc

SEQ ID NO: 2208400 - RNA, 17 nt, Human
gcuggcccagccggccu

SEQ ID NO: 2208401 - RNA, 18 nt, Human
gcuggcccagccggccuc

SEQ ID NO: 2208402 - RNA, 19 nt, Human
gcuggcccagccggccucu

SEQ ID NO: 2208403 - RNA, 20 nt, Human
gcuggcccagccggccucuc

SEQ ID NO: 2208404 - RNA, 23 nt, Human
gcuggcccagccggccucucugg

SEQ ID NO: 2208405 - RNA, 16 nt, Human
gcuggaccuugaacug

SEQ ID NO: 2208406 - RNA, 21 nt, Human
gcugcuucuuaaccccaguaa

SEQ ID NO: 2208407 - RNA, 12 nt, Human
gcugcuugcccc

SEQ ID NO: 2208408 - RNA, 22 nt, Human
gcugcuugcccccaugcuggcg

SEQ ID NO: 2208409 - RNA, 18 nt, Human
gcuggaccuugaacuggg

SEQ ID NO: 2208410 - RNA, 17 nt, Human
gcugcuugggcuucauc

SEQ ID NO: 2208411 - RNA, 22 nt, Human
gcugcuugggcuucauccuccu

SEQ ID NO: 2208412 - RNA, 22 nt, Human
gcuggaugcuccuuccaacagg

SEQ ID NO: 2208413 - RNA, 14 nt, Human
gcuggauggagccc

SEQ ID NO: 2208414 - RNA, 21 nt, Human
gcuggaugcuccuuccaacag

SEQ ID NO: 2208415 - RNA, 16 nt, Human
gcuggauggagcccag

SEQ ID NO: 2208416 - RNA, 18 nt, Human
gcuggauggagcccaggc

SEQ ID NO: 2208417 - RNA, 18 nt, Human
gcuggaugucugccaauu

SEQ ID NO: 2208418 - RNA, 21 nt, Human
gcuggaugucugccaauuuuu

SEQ ID NO: 2208419 - RNA, 13 nt, Human
gcugcuuggccuu

SEQ ID NO: 2208420 - RNA, 20 nt, Human
gcuggaugagacuuccaaac

SEQ ID NO: 2208421 - RNA, 20 nt, Human
gcuggaugagaauuugagug

SEQ ID NO: 2208422 - RNA, 15 nt, Human
gcuggaugauggucu

SEQ ID NO: 2208423 - RNA, 21 nt, Human
gcuggaccuugaacuggguac

SEQ ID NO: 2208424 - RNA, 22 nt, Human
gcuggaccuugaacuggguacu

SEQ ID NO: 2208425 - RNA, 21 nt, Human
gcuggccucccaaaugagcca

SEQ ID NO: 2208426 - RNA, 22 nt, Human
gcuggccucccaaaugagccau

SEQ ID NO: 2208427 - RNA, 18 nt, Human
gcuggccgugggccuggg

SEQ ID NO: 2208428 - RNA, 17 nt, Human
gcuggccgggagccuga

SEQ ID NO: 2208429 - RNA, 20 nt, Human
gcuggccccucaccugggca

SEQ ID NO: 2208430 - RNA, 17 nt, Human
gcuggcccgugacagac

SEQ ID NO: 2208431 - RNA, 19 nt, Human
gcuggcccgugacagacuc

SEQ ID NO: 2208432 - RNA, 22 nt, Human
gcuggcccgugacagacuccug

SEQ ID NO: 2208433 - RNA, 12 nt, Human
gcuggcccugcc

SEQ ID NO: 2208434 - RNA, 22 nt, Human
gcuggccggagcaaacucugcu

SEQ ID NO: 2208435 - RNA, 13 nt, Human
gcuggccgggacc

SEQ ID NO: 2208436 - RNA, 20 nt, Human
gcugggacaugggaaagggg

SEQ ID NO: 2208437 - RNA, 15 nt, Human
gcuggccuggaucuc

SEQ ID NO: 2208438 - RNA, 17 nt, Human
gcugggacguggcucag

SEQ ID NO: 2208439 - RNA, 20 nt, Human
gcugggacguggcucagcca

SEQ ID NO: 2208440 - RNA, 19 nt, Human
gcugggacguggcucagcc

SEQ ID NO: 2208441 - RNA, 12 nt, Human
gcuggccuggau

SEQ ID NO: 2208442 - RNA, 14 nt, Human
gcuggccuggaucu

SEQ ID NO: 2208443 - RNA, 18 nt, Human
gcuggccucuggcucuca

SEQ ID NO: 2208444 - RNA, 23 nt, Human
gcuggccucuggcucucaugggg

SEQ ID NO: 2208445 - RNA, 14 nt, Human
gcugggacuggcca

SEQ ID NO: 2208446 - RNA, 14 nt, Human
gcugggacugagcc

SEQ ID NO: 2208447 - RNA, 15 nt, Human
gcugggacugagcca

SEQ ID NO: 2208448 - RNA, 22 nt, Human
gcugggacucagccuucagaca

SEQ ID NO: 2208449 - RNA, 23 nt, Human
gcugggacucagccuucagacag

SEQ ID NO: 2208450 - RNA, 14 nt, Human
gcugggacucagcc

SEQ ID NO: 2208451 - RNA, 15 nt, Human
gcugggacucagccu

SEQ ID NO: 2208452 - RNA, 16 nt, Human
gcugggacucagccuu

SEQ ID NO: 2208453 - RNA, 19 nt, Human
gcugggacucagccuucag

SEQ ID NO: 2208454 - RNA, 19 nt, Human
gcugggacuacagguguga

SEQ ID NO: 2208455 - RNA, 12 nt, Human
gcugggacucag

SEQ ID NO: 2208456 - RNA, 22 nt, Human
gcugggacguggcucagccagc

SEQ ID NO: 2208457 - RNA, 21 nt, Human
gcugggacguggcucagccag

SEQ ID NO: 2208458 - RNA, 13 nt, Human
gcugggacuacag

SEQ ID NO: 2208459 - RNA, 18 nt, Human
gcugggacuacaggcacc

SEQ ID NO: 2208460 - RNA, 19 nt, Human
gcugggacuacaggcaccc

SEQ ID NO: 2208461 - RNA, 20 nt, Human
gcugggacuacaggcaccca

SEQ ID NO: 2208462 - RNA, 22 nt, Human
ggaagaucuuaaauuuugugau

SEQ ID NO: 2208463 - RNA, 23 nt, Human
ggaagaucuuaaauuuugugaua

SEQ ID NO: 2208464 - RNA, 18 nt, Human
ggaagaugggggcaagaa

SEQ ID NO: 2208465 - RNA, 12 nt, Human
ggaagauccugc

SEQ ID NO: 2208466 - RNA, 22 nt, Human
ggaagauccugcggguggggcu

SEQ ID NO: 2208467 - RNA, 18 nt, Human
ggaagauuuuaaauucac

SEQ ID NO: 2208468 - RNA, 19 nt, Human
ggaagaugggggcaagaag

SEQ ID NO: 2208469 - RNA, 20 nt, Human
ggaagaugggggcaagaaga

SEQ ID NO: 2208470 - RNA, 22 nt, Human
ggaagaugggggcaagaagauc

SEQ ID NO: 2208471 - RNA, 17 nt, Human
ggaagcacagcuucauu

SEQ ID NO: 2208472 - RNA, 13 nt, Human
ggaagcacaugcc

SEQ ID NO: 2208473 - RNA, 14 nt, Human
ggaagcacaugccu

SEQ ID NO: 2208474 - RNA, 15 nt, Human
ggaagcacaugccuc

SEQ ID NO: 2208475 - RNA, 17 nt, Human
ggaagcacaugccucuc

SEQ ID NO: 2208476 - RNA, 15 nt, Human
ggaacuccuggaaau

SEQ ID NO: 2208477 - RNA, 23 nt, Human
ggaagagaggaguucaaugaucu

SEQ ID NO: 2208478 - RNA, 22 nt, Human
ggaacucauuccugccugucuc

SEQ ID NO: 2208479 - RNA, 13 nt, Human
ggaacucccagca

SEQ ID NO: 2208480 - RNA, 22 nt, Human
ggaacucccagcaacacaagcu

SEQ ID NO: 2208481 - RNA, 14 nt, Human
ggaagagcaggcac

SEQ ID NO: 2208482 - RNA, 15 nt, Human
ggaagagcaggcaca

SEQ ID NO: 2208483 - RNA, 21 nt, Human
ggaagagcaggcacauggagg

SEQ ID NO: 2208484 - RNA, 19 nt, Human
ggaagagcagaacggagcc

SEQ ID NO: 2208485 - RNA, 18 nt, Human
ggaagagcacagcccucc

SEQ ID NO: 2208486 - RNA, 19 nt, Human
ggaagagcacagcccuccc

SEQ ID NO: 2208487 - RNA, 22 nt, Human
ggaagagaggaguucaaugauc

SEQ ID NO: 2208488 - RNA, 14 nt, Human
ggaagagcacagcc

SEQ ID NO: 2208489 - RNA, 16 nt, Human
ggaagagcacagcccu

SEQ ID NO: 2208490 - RNA, 17 nt, Human
ggaagagcacagcccuc

SEQ ID NO: 2208491 - RNA, 13 nt, Human
ggaagagccuugc

SEQ ID NO: 2208492 - RNA, 15 nt, Human
ggaagagggacagau

SEQ ID NO: 2208493 - RNA, 21 nt, Human
ggaagauaggcucugcacaga

SEQ ID NO: 2208494 - RNA, 17 nt, Human
ggaagauaggcucugca

SEQ ID NO: 2208495 - RNA, 18 nt, Human
ggaagauaggcucugcac

SEQ ID NO: 2208496 - RNA, 19 nt, Human
ggaagaguguacugggggu

SEQ ID NO: 2208497 - RNA, 20 nt, Human
ggaagaggggacaggucccu

SEQ ID NO: 2208498 - RNA, 16 nt, Human
ggaagaguguacuggg

SEQ ID NO: 2208499 - RNA, 15 nt, Human
ggaagaguguacugg

SEQ ID NO: 2208500 - RNA, 14 nt, Human
ggaagaggggacag

SEQ ID NO: 2208501 - RNA, 21 nt, Human
ggaagcauguaggagaaucca

SEQ ID NO: 2208502 - RNA, 20 nt, Human
ggaagcauguaggagaaucc

SEQ ID NO: 2208503 - RNA, 17 nt, Human
ggaagcauguaggagaa

SEQ ID NO: 2208504 - RNA, 20 nt, Human
ggaagcauauuguuauuaua

SEQ ID NO: 2208505 - RNA, 20 nt, Human
ggaagcauucagagagcagc

SEQ ID NO: 2208506 - RNA, 16 nt, Human
ggaagcauucagagag

SEQ ID NO: 2208507 - RNA, 18 nt, Human
ggaagcauucagagagca

SEQ ID NO: 2208508 - RNA, 14 nt, Human
ggaagccaaagagu

SEQ ID NO: 2208509 - RNA, 18 nt, Human
ggaagccaacuuggcuuu

SEQ ID NO: 2208510 - RNA, 22 nt, Human
ggaagccaaaccucugugagca

SEQ ID NO: 2208511 - RNA, 22 nt, Human
ggaagccaaaauguaggcuuag

SEQ ID NO: 2208512 - RNA, 13 nt, Human
ggaagccagcagg

SEQ ID NO: 2208513 - RNA, 14 nt, Human
ggaagccagcaggc

SEQ ID NO: 2208514 - RNA, 15 nt, Human
ggaagccagcaggcu

SEQ ID NO: 2208515 - RNA, 16 nt, Human
ggaagccagcaggcuc

SEQ ID NO: 2208516 - RNA, 17 nt, Human
ggaagccagcaggcucu

SEQ ID NO: 2208517 - RNA, 18 nt, Human
ggaagccagcaggcucuc

SEQ ID NO: 2208518 - RNA, 15 nt, Human
ggaagcaccccaugc

SEQ ID NO: 2208519 - RNA, 13 nt, Human
ggaagcaccccau

SEQ ID NO: 2208520 - RNA, 22 nt, Human
ggaagcaccccaugccaaagcu

SEQ ID NO: 2208521 - RNA, 23 nt, Human
ggaagcacaugccucucucaggc

SEQ ID NO: 2208522 - RNA, 21 nt, Human
ggaagcacaugccucucucag

SEQ ID NO: 2208523 - RNA, 22 nt, Human
ggaagcacaugccucucucagg

SEQ ID NO: 2208524 - RNA, 11 nt, Human
ggaagcagugc

SEQ ID NO: 2208525 - RNA, 13 nt, Human
ggaagcagcuuuc

SEQ ID NO: 2208526 - RNA, 12 nt, Human
ggaagcagugcc

SEQ ID NO: 2208527 - RNA, 21 nt, Human
ggaagcagugccuuccauaau

SEQ ID NO: 2208528 - RNA, 20 nt, Human
ggaagcagugccuuccauaa

SEQ ID NO: 2208529 - RNA, 19 nt, Human
ggaagcagugccuuccaua

SEQ ID NO: 2208530 - RNA, 22 nt, Human
ggaagcagauacauaugagugu

SEQ ID NO: 2208531 - RNA, 19 nt, Human
ggaagcagaauaaagcaau

SEQ ID NO: 2208532 - RNA, 20 nt, Human
ggaagcagaauaaagcaauu

SEQ ID NO: 2208533 - RNA, 21 nt, Human
ggaagcagaauaaagcaauuu

SEQ ID NO: 2208534 - RNA, 22 nt, Human
ggaagcagaauaaagcaauuuu

SEQ ID NO: 2208535 - RNA, 23 nt, Human
ggaagcacauguuuauuuauucu

SEQ ID NO: 2208536 - RNA, 12 nt, Human
ggaagcagaaua

SEQ ID NO: 2208537 - RNA, 13 nt, Human
ggaagcagaauaa

SEQ ID NO: 2208538 - RNA, 14 nt, Human
ggaagcagaauaaa

SEQ ID NO: 2208539 - RNA, 15 nt, Human
ggaagcagaauaaag

SEQ ID NO: 2208540 - RNA, 16 nt, Human
ggaagcagaauaaagc

SEQ ID NO: 2208541 - RNA, 17 nt, Human
ggaagcagaauaaagca

SEQ ID NO: 2208542 - RNA, 18 nt, Human
ggaagcagaauaaagcaa

SEQ ID NO: 2208543 - RNA, 18 nt, Human
ggaaccgcaggaagcugc

SEQ ID NO: 2208544 - RNA, 16 nt, Human
ggaaccgcaggaagcu

SEQ ID NO: 2208545 - RNA, 15 nt, Human
ggaaccgcaggaagc

SEQ ID NO: 2208546 - RNA, 17 nt, Human
ggaaccgcaggaagcug

SEQ ID NO: 2208547 - RNA, 12 nt, Human
ggaaccucacuc

SEQ ID NO: 2208548 - RNA, 18 nt, Human
ggaaccucacucuugcca

SEQ ID NO: 2208549 - RNA, 13 nt, Human
ggaaccucagccu

SEQ ID NO: 2208550 - RNA, 12 nt, Human
ggaaccucagcc

SEQ ID NO: 2208551 - RNA, 24 nt, Human
ggaacccuuacaguaggagcccag

SEQ ID NO: 2208552 - RNA, 20 nt, Human
ggaacagcuaugggagcccc

SEQ ID NO: 2208553 - RNA, 21 nt, Human
ggaaccccggggugcccacag

SEQ ID NO: 2208554 - RNA, 19 nt, Human
ggaacagcuaugggagccc

SEQ ID NO: 2208555 - RNA, 16 nt, Human
ggaaaucaaauaugca

SEQ ID NO: 2208556 - RNA, 19 nt, Human
ggaacagacuggaagcaca

SEQ ID NO: 2208557 - RNA, 20 nt, Human
ggaacagacuggaagcacag

SEQ ID NO: 2208558 - RNA, 20 nt, Human
ggaacgguaaauuucugugg

SEQ ID NO: 2208559 - RNA, 18 nt, Human
ggaacgggguccuucaag

SEQ ID NO: 2208560 - RNA, 22 nt, Human
ggaaccucagccuggccagaca

SEQ ID NO: 2208561 - RNA, 23 nt, Human
ggaaccucagccuggccagacac

SEQ ID NO: 2208562 - RNA, 21 nt, Human
ggaaccucagccuggccagac

SEQ ID NO: 2208563 - RNA, 20 nt, Human
ggaaccucagccuggccaga

SEQ ID NO: 2208564 - RNA, 19 nt, Human
ggaaccucagccuggccag

SEQ ID NO: 2208565 - RNA, 16 nt, Human
ggaaccucagccuggc

SEQ ID NO: 2208566 - RNA, 15 nt, Human
ggaaccucagccugg

SEQ ID NO: 2208567 - RNA, 14 nt, Human
ggaaccucagccug

SEQ ID NO: 2208568 - RNA, 11 nt, Human
ggaacucccag

SEQ ID NO: 2208569 - RNA, 21 nt, Human
ggaacucauuccugccugucu

SEQ ID NO: 2208570 - RNA, 20 nt, Human
ggaacucagauccagggaca

SEQ ID NO: 2208571 - RNA, 19 nt, Human
ggaacucagauccagggac

SEQ ID NO: 2208572 - RNA, 17 nt, Human
ggaacucagauccaggg

SEQ ID NO: 2208573 - RNA, 16 nt, Human
ggaacucagauccagg

SEQ ID NO: 2208574 - RNA, 15 nt, Human
ggaacucagauccag

SEQ ID NO: 2208575 - RNA, 13 nt, Human
ggaacucagaucc

SEQ ID NO: 2208576 - RNA, 22 nt, Human
ggaacuagagggauacacugaa

SEQ ID NO: 2208577 - RNA, 17 nt, Human
ggaacucaccuggggcu

SEQ ID NO: 2208578 - RNA, 21 nt, Human
ggaacuagagggauacacuga

SEQ ID NO: 2208579 - RNA, 17 nt, Human
ggaacgugacugcccca

SEQ ID NO: 2208580 - RNA, 23 nt, Human
ggaacuagacucccaagcuggac

SEQ ID NO: 2208581 - RNA, 16 nt, Human
ggaacgugacugcccc

SEQ ID NO: 2208582 - RNA, 21 nt, Human
ggaaccucacucuugccaacc

SEQ ID NO: 2208583 - RNA, 20 nt, Human
ggaaaggggucggcugacca

SEQ ID NO: 2208584 - RNA, 15 nt, Human
ggaaagggugcugcu

SEQ ID NO: 2208585 - RNA, 20 nt, Human
ggaaagggugcugcuucccu

SEQ ID NO: 2208586 - RNA, 15 nt, Human
ggaaaaucagccugc

SEQ ID NO: 2208587 - RNA, 22 nt, Human
ggaaagugaauuugaaugaaaa

SEQ ID NO: 2208588 - RNA, 19 nt, Human
ggaaagugaauuugaauga

SEQ ID NO: 2208589 - RNA, 18 nt, Human
ggaaagugaauuugaaug

SEQ ID NO: 2208590 - RNA, 14 nt, Human
ggaaagugaauuug

SEQ ID NO: 2208591 - RNA, 13 nt, Human
ggaaagugaauuu

SEQ ID NO: 2208592 - RNA, 21 nt, Human
ggaaagucauuggcuuuaucc

SEQ ID NO: 2208593 - RNA, 16 nt, Human
ggaaagucauuggcuu

SEQ ID NO: 2208594 - RNA, 14 nt, Human
ggaaaauaaauuau

SEQ ID NO: 2208595 - RNA, 13 nt, Human
ggaaaauacccca

SEQ ID NO: 2208596 - RNA, 22 nt, Human
ggaaaauaccccaucauucaug

SEQ ID NO: 2208597 - RNA, 22 nt, Human
ggaaaagagcgcaucaggccug

SEQ ID NO: 2208598 - RNA, 18 nt, Human
ggaaaagaauacagaaag

SEQ ID NO: 2208599 - RNA, 14 nt, Human
ggaaaagaauacag

SEQ ID NO: 2208600 - RNA, 21 nt, Human
ggaaaagagauggccugagaa

SEQ ID NO: 2208601 - RNA, 17 nt, Human
ggaacagacuggaagca

SEQ ID NO: 2208602 - RNA, 17 nt, Human
ggaaauauugcuggggu

SEQ ID NO: 2208603 - RNA, 17 nt, Human
ggaaaguguaaagcauu

SEQ ID NO: 2208604 - RNA, 17 nt, Human
ggaaauauuuagcaaau

SEQ ID NO: 2208605 - RNA, 20 nt, Human
ggaaauauuuagcaaauaau

SEQ ID NO: 2208606 - RNA, 17 nt, Human
ggaaauauuuauuuuaa

SEQ ID NO: 2208607 - RNA, 18 nt, Human
ggaaauauuuauuuuaau

SEQ ID NO: 2208608 - RNA, 13 nt, Human
ggaaaguguaaag

SEQ ID NO: 2208609 - RNA, 14 nt, Human
ggaaaguguaaagc

SEQ ID NO: 2208610 - RNA, 15 nt, Human
ggaaaguguaaagca

SEQ ID NO: 2208611 - RNA, 16 nt, Human
ggaaaguguaaagcau

SEQ ID NO: 2208612 - RNA, 12 nt, Human
ggaaauauuuau

SEQ ID NO: 2208613 - RNA, 13 nt, Human
ggaaauauuuauu

SEQ ID NO: 2208614 - RNA, 15 nt, Human
ggaaauauuuauuuu

SEQ ID NO: 2208615 - RNA, 22 nt, Human
gcuuugggaauguuuuuagcug

SEQ ID NO: 2208616 - RNA, 13 nt, Human
gcuuuggcuucuu

SEQ ID NO: 2208617 - RNA, 14 nt, Human
gcuuugggcugccc

SEQ ID NO: 2208618 - RNA, 17 nt, Human
gcuuuggauuugacauu

SEQ ID NO: 2208619 - RNA, 17 nt, Human
gcuuuggaccuaaucca

SEQ ID NO: 2208620 - RNA, 22 nt, Human
gcuuuggaccuaaauggccuca

SEQ ID NO: 2208621 - RNA, 17 nt, Human
gcuuuauuuuuuaagua

SEQ ID NO: 2208622 - RNA, 13 nt, Human
gcuuuauuuuuua

SEQ ID NO: 2208623 - RNA, 13 nt, Human
gcuuuauucuuca

SEQ ID NO: 2208624 - RNA, 22 nt, Human
gcuuuauucuucagauacaaac

SEQ ID NO: 2208625 - RNA, 15 nt, Human
gcuuuauguaauaau

SEQ ID NO: 2208626 - RNA, 14 nt, Human
gcuuuaugcugaaa

SEQ ID NO: 2208627 - RNA, 13 nt, Human
gcuuuaugcugaa

SEQ ID NO: 2208628 - RNA, 17 nt, Human
gcuuuauuccagaaugc

SEQ ID NO: 2208629 - RNA, 20 nt, Human
gcuuuauggguguuaauuga

SEQ ID NO: 2208630 - RNA, 21 nt, Human
gcuuuaauuuuuuuaaccaaa

SEQ ID NO: 2208631 - RNA, 20 nt, Human
gcuuuauccucuuuagaguu

SEQ ID NO: 2208632 - RNA, 15 nt, Human
gcuuuauccucuuua

SEQ ID NO: 2208633 - RNA, 16 nt, Human
gcuuuauccucuuuag

SEQ ID NO: 2208634 - RNA, 17 nt, Human
gcuuuauccucuuuaga

SEQ ID NO: 2208635 - RNA, 19 nt, Human
gcuuuauccucuuuagagu

SEQ ID NO: 2208636 - RNA, 12 nt, Human
gcuuuacaugca

SEQ ID NO: 2208637 - RNA, 23 nt, Human
gcuuuacugucaaaauaauuuua

SEQ ID NO: 2208638 - RNA, 13 nt, Human
gcuuggccugcug

SEQ ID NO: 2208639 - RNA, 23 nt, Human
gcuuuaauaucaucaguauugaa

SEQ ID NO: 2208640 - RNA, 22 nt, Human
gcuuuaauaucaucaguauuga

SEQ ID NO: 2208641 - RNA, 20 nt, Human
gcuuuaauaucaucaguauu

SEQ ID NO: 2208642 - RNA, 18 nt, Human
gcuuggccagaagggggc

SEQ ID NO: 2208643 - RNA, 13 nt, Human
gcuuggcagcuga

SEQ ID NO: 2208644 - RNA, 13 nt, Human
gcuuggccagaag

SEQ ID NO: 2208645 - RNA, 18 nt, Human
gcuuggagcagaggggcu

SEQ ID NO: 2208646 - RNA, 16 nt, Human
gcuuggagcagagggg

SEQ ID NO: 2208647 - RNA, 14 nt, Human
gcuuggcacaugac

SEQ ID NO: 2208648 - RNA, 13 nt, Human
gcuuggcagccga

SEQ ID NO: 2208649 - RNA, 21 nt, Human
gcuuuuacugaagccuuucuu

SEQ ID NO: 2208650 - RNA, 19 nt, Human
ggaaaaaauguuggauuua

SEQ ID NO: 2208651 - RNA, 13 nt, Human
gcuuuuagacaga

SEQ ID NO: 2208652 - RNA, 14 nt, Human
gcuuuuacuuaaac

SEQ ID NO: 2208653 - RNA, 20 nt, Human
ggaaaaaauaacaaugaaag

SEQ ID NO: 2208654 - RNA, 15 nt, Human
gcuuugggcugcccu

SEQ ID NO: 2208655 - RNA, 16 nt, Human
gcuuugggcugcccug

SEQ ID NO: 2208656 - RNA, 17 nt, Human
gcuuuuaaaaaaaaaua

SEQ ID NO: 2208657 - RNA, 20 nt, Human
gcuuuuaccaugccccugag

SEQ ID NO: 2208658 - RNA, 15 nt, Human
gcuuuuaccaugccc

SEQ ID NO: 2208659 - RNA, 11 nt, Human
ggaaaaauauu

SEQ ID NO: 2208660 - RNA, 21 nt, Human
ggaaaacugagacucagacag

SEQ ID NO: 2208661 - RNA, 16 nt, Human
ggaaaacugacagagg

SEQ ID NO: 2208662 - RNA, 15 nt, Human
ggaaaaauagccugc

SEQ ID NO: 2208663 - RNA, 22 nt, Human
ggaaaaccaagccguggcuucc

SEQ ID NO: 2208664 - RNA, 19 nt, Human
ggaaaaaccacccccaaau

SEQ ID NO: 2208665 - RNA, 21 nt, Human
ggaaaaacaucugaaagccac

SEQ ID NO: 2208666 - RNA, 13 nt, Human
ggaaaaacacaag

SEQ ID NO: 2208667 - RNA, 14 nt, Human
ggaaaaacugauuu

SEQ ID NO: 2208668 - RNA, 16 nt, Human
ggaaaaagcacaagaa

SEQ ID NO: 2208669 - RNA, 17 nt, Human
ggaaaaagcacaagaag

SEQ ID NO: 2208670 - RNA, 13 nt, Human
ggaaaaauagccu

SEQ ID NO: 2208671 - RNA, 22 nt, Human
gcuguucacccacagggcuaag

SEQ ID NO: 2208672 - RNA, 23 nt, Human
gcuguguccuugcaccugcaucc

SEQ ID NO: 2208673 - RNA, 21 nt, Human
gcuuccagugaggcucugccc

SEQ ID NO: 2208674 - RNA, 19 nt, Human
gcuuccagugaggcucugc

SEQ ID NO: 2208675 - RNA, 20 nt, Human
gcuuccagugaggcucugcc

SEQ ID NO: 2208676 - RNA, 18 nt, Human
gcuuccagugaggcucug

SEQ ID NO: 2208677 - RNA, 23 nt, Human
gcuguucacagccagacuggcac

SEQ ID NO: 2208678 - RNA, 16 nt, Human
gcuguucacagccaga

SEQ ID NO: 2208679 - RNA, 15 nt, Human
gcuguucacagccag

SEQ ID NO: 2208680 - RNA, 15 nt, Human
gcuucugguacucuc

SEQ ID NO: 2208681 - RNA, 16 nt, Human
gcuucugguacucucc

SEQ ID NO: 2208682 - RNA, 19 nt, Human
gcuucucugugaacgauuu

SEQ ID NO: 2208683 - RNA, 16 nt, Human
gcuucucucucaccag

SEQ ID NO: 2208684 - RNA, 22 nt, Human
gcuggugguuucacggugccag

SEQ ID NO: 2208685 - RNA, 21 nt, Human
gcuucucugacuucugccugg

SEQ ID NO: 2208686 - RNA, 22 nt, Human
gcuucucugacuucugccugga

SEQ ID NO: 2208687 - RNA, 16 nt, Human
gcuucucucuguggga

SEQ ID NO: 2208688 - RNA, 13 nt, Human
gcuucucugacuu

SEQ ID NO: 2208689 - RNA, 14 nt, Human
gcuucucucugugg

SEQ ID NO: 2208690 - RNA, 13 nt, Human
gcuucucucucac

SEQ ID NO: 2208691 - RNA, 14 nt, Human
gcuucucucucacc

SEQ ID NO: 2208692 - RNA, 14 nt, Human
gcuucucugacuuc

SEQ ID NO: 2208693 - RNA, 17 nt, Human
gcuucucugacuucugc

SEQ ID NO: 2208694 - RNA, 18 nt, Human
gcuucucugacuucugcc

SEQ ID NO: 2208695 - RNA, 20 nt, Human
gcuucucugacuucugccug

SEQ ID NO: 2208696 - RNA, 20 nt, Human
gcuguucacccacagggcua

SEQ ID NO: 2208697 - RNA, 12 nt, Human
gcuucuauccca

SEQ ID NO: 2208698 - RNA, 14 nt, Human
gcuucucuacagac

SEQ ID NO: 2208699 - RNA, 15 nt, Human
gcuucuccuguguga

SEQ ID NO: 2208700 - RNA, 12 nt, Human
gcuucucucuca

SEQ ID NO: 2208701 - RNA, 12 nt, Human
gcuucuccugac

SEQ ID NO: 2208702 - RNA, 24 nt, Human
gcuucuccgccagccuccucugga

SEQ ID NO: 2208703 - RNA, 14 nt, Human
gcuucuccugaccc

SEQ ID NO: 2208704 - RNA, 16 nt, Human
gcuucuauuagccagu

SEQ ID NO: 2208705 - RNA, 20 nt, Human
gcuucuaucccaggaggugg

SEQ ID NO: 2208706 - RNA, 14 nt, Human
gcuucuaucccagg

SEQ ID NO: 2208707 - RNA, 18 nt, Human
gcuucuaucccaggaggu

SEQ ID NO: 2208708 - RNA, 15 nt, Human
gcuugccacagcucu

SEQ ID NO: 2208709 - RNA, 16 nt, Human
gcuugccacagagcgg

SEQ ID NO: 2208710 - RNA, 12 nt, Human
gcuugccccggc

SEQ ID NO: 2208711 - RNA, 14 nt, Human
gcuugccccggccc

SEQ ID NO: 2208712 - RNA, 19 nt, Human
gcuugcccuggugccucac

SEQ ID NO: 2208713 - RNA, 17 nt, Human
gcuugcccuggugccuc

SEQ ID NO: 2208714 - RNA, 14 nt, Human
gcuuggaggaagga

SEQ ID NO: 2208715 - RNA, 15 nt, Human
gcuuggaggaaggaa

SEQ ID NO: 2208716 - RNA, 13 nt, Human
gcuuggaggaagg

SEQ ID NO: 2208717 - RNA, 18 nt, Human
gcuugcccuguuaaaaga

SEQ ID NO: 2208718 - RNA, 22 nt, Human
gcuugaggguugggcugguguc

SEQ ID NO: 2208719 - RNA, 16 nt, Human
gcuucuguugcugccu

SEQ ID NO: 2208720 - RNA, 19 nt, Human
gcuucuggugaccuuccaa

SEQ ID NO: 2208721 - RNA, 23 nt, Human
gcuucugucuuauuugaaggcca

SEQ ID NO: 2208722 - RNA, 17 nt, Human
gcuucugguacucuccu

SEQ ID NO: 2208723 - RNA, 18 nt, Human
gcuucugguacucuccua

SEQ ID NO: 2208724 - RNA, 19 nt, Human
gcuucugguacucuccuag

SEQ ID NO: 2208725 - RNA, 19 nt, Human
gcuugaguuuggggaaugc

SEQ ID NO: 2208726 - RNA, 14 nt, Human
gcuugauucugcag

SEQ ID NO: 2208727 - RNA, 23 nt, Human
gcuugcaaguauguuuuagcaug

SEQ ID NO: 2208728 - RNA, 14 nt, Human
gcuugauuuuugcc

SEQ ID NO: 2208729 - RNA, 22 nt, Human
gcuugcagagaugaggccgcca

SEQ ID NO: 2208730 - RNA, 15 nt, Human
gcuugcauaauaagc

SEQ ID NO: 2208731 - RNA, 14 nt, Human
gcuugccacagagc

SEQ ID NO: 2208732 - RNA, 23 nt, Human
gcuugcauaauaagcuaaagagg

SEQ ID NO: 2208733 - RNA, 19 nt, Human
gcuugcagugagccgagau

SEQ ID NO: 2208734 - RNA, 19 nt, Human
gcuugcacuuuguaacaug

SEQ ID NO: 2208735 - RNA, 22 nt, Human
gcuugcacuuuguaacauguuu

SEQ ID NO: 2208736 - RNA, 21 nt, Human
gcuugcaguagauuuucuuua

SEQ ID NO: 2208737 - RNA, 15 nt, Human
ggcugauggaguaaa

SEQ ID NO: 2208738 - RNA, 19 nt, Human
ggcugauaauuccaguggu

SEQ ID NO: 2208739 - RNA, 21 nt, Human
ggcugaugccaaguuguuuga

SEQ ID NO: 2208740 - RNA, 23 nt, Human
ggcugagucaugaucucccugcc

SEQ ID NO: 2208741 - RNA, 22 nt, Human
ggcugagucaugaucucccugc

SEQ ID NO: 2208742 - RNA, 23 nt, Human
ggcugagguuccucugccugccc

SEQ ID NO: 2208743 - RNA, 14 nt, Human
ggcugagguuccuc

SEQ ID NO: 2208744 - RNA, 16 nt, Human
ggcugagguuccucug

SEQ ID NO: 2208745 - RNA, 17 nt, Human
ggcugagguuccucugc

SEQ ID NO: 2208746 - RNA, 18 nt, Human
ggcugagguuccucugcc

SEQ ID NO: 2208747 - RNA, 19 nt, Human
ggcugagguuccucugccu

SEQ ID NO: 2208748 - RNA, 20 nt, Human
ggcugagguuccucugccug

SEQ ID NO: 2208749 - RNA, 21 nt, Human
ggcugagguuccucugccugc

SEQ ID NO: 2208750 - RNA, 22 nt, Human
ggcugagguuccucugccugcc

SEQ ID NO: 2208751 - RNA, 22 nt, Human
ggcugcaaaggguaucaggugc

SEQ ID NO: 2208752 - RNA, 23 nt, Human
ggcugcaaaggguaucaggugcu

SEQ ID NO: 2208753 - RNA, 18 nt, Human
ggcugcaaaggguaucag

SEQ ID NO: 2208754 - RNA, 22 nt, Human
ggcugaugccaaguuguuugag

SEQ ID NO: 2208755 - RNA, 18 nt, Human
ggcugaugucaauuucug

SEQ ID NO: 2208756 - RNA, 22 nt, Human
ggcugaugucaauuucuguguu

SEQ ID NO: 2208757 - RNA, 24 nt, Human
ggcugaugucaauuucuguguugc

SEQ ID NO: 2208758 - RNA, 24 nt, Human
ggcugcaaaggguaucaggugcug

SEQ ID NO: 2208759 - RNA, 17 nt, Human
ggcugcaccggcuggcc

SEQ ID NO: 2208760 - RNA, 18 nt, Human
ggcugcaccggcuggccu

SEQ ID NO: 2208761 - RNA, 19 nt, Human
ggcugcaccggcuggccug

SEQ ID NO: 2208762 - RNA, 22 nt, Human
ggcugcagccaggccacuggcc

SEQ ID NO: 2208763 - RNA, 21 nt, Human
ggcugcagcauguugcugagg

SEQ ID NO: 2208764 - RNA, 22 nt, Human
ggcugcagcagcgguggccucu

SEQ ID NO: 2208765 - RNA, 12 nt, Human
ggcugcagcaug

SEQ ID NO: 2208766 - RNA, 16 nt, Human
ggcugcagccaggcca

SEQ ID NO: 2208767 - RNA, 19 nt, Human
ggcugcagaggccagaggc

SEQ ID NO: 2208768 - RNA, 13 nt, Human
ggcugcagcagcg

SEQ ID NO: 2208769 - RNA, 20 nt, Human
ggcugcagcagcgguggccu

SEQ ID NO: 2208770 - RNA, 22 nt, Human
ggcugcaagguuuaggcuggug

SEQ ID NO: 2208771 - RNA, 15 nt, Human
ggcugcacucugugc

SEQ ID NO: 2208772 - RNA, 16 nt, Human
ggcugcacucugugcc

SEQ ID NO: 2208773 - RNA, 17 nt, Human
ggcugcacucugugccc

SEQ ID NO: 2208774 - RNA, 18 nt, Human
ggcugcacucugugccca

SEQ ID NO: 2208775 - RNA, 19 nt, Human
ggcugcacucugugcccau

SEQ ID NO: 2208776 - RNA, 13 nt, Human
ggcugcagaggcc

SEQ ID NO: 2208777 - RNA, 20 nt, Human
ggcugcacucugugcccaug

SEQ ID NO: 2208778 - RNA, 21 nt, Human
ggcugcacucugugcccaugg

SEQ ID NO: 2208779 - RNA, 16 nt, Human
ggcugcagaggccaga

SEQ ID NO: 2208780 - RNA, 18 nt, Human
ggcugcagaggccagagg

SEQ ID NO: 2208781 - RNA, 20 nt, Human
ggccccugcccggcugcgga

SEQ ID NO: 2208782 - RNA, 17 nt, Human
ggcucugccucccauca

SEQ ID NO: 2208783 - RNA, 16 nt, Human
ggccccugcccggcug

SEQ ID NO: 2208784 - RNA, 17 nt, Human
ggccccugcccggcugc

SEQ ID NO: 2208785 - RNA, 13 nt, Human
ggcucuggagccc

SEQ ID NO: 2208786 - RNA, 14 nt, Human
ggcucuggagccca

SEQ ID NO: 2208787 - RNA, 20 nt, Human
ggccccugccagacccccug

SEQ ID NO: 2208788 - RNA, 19 nt, Human
ggcucugcuggccggagca

SEQ ID NO: 2208789 - RNA, 17 nt, Human
ggccccugcauccccuu

SEQ ID NO: 2208790 - RNA, 12 nt, Human
ggcucuggagac

SEQ ID NO: 2208791 - RNA, 15 nt, Human
ggcucuggagacagc

SEQ ID NO: 2208792 - RNA, 16 nt, Human
ggcucuggagacagcc

SEQ ID NO: 2208793 - RNA, 17 nt, Human
ggcucuggagacagccc

SEQ ID NO: 2208794 - RNA, 19 nt, Human
ggcucuggagacagcccca

SEQ ID NO: 2208795 - RNA, 21 nt, Human
ggcucuggagacagccccaga

SEQ ID NO: 2208796 - RNA, 14 nt, Human
ggcucuggagagaa

SEQ ID NO: 2208797 - RNA, 21 nt, Human
ggcugagacuggauacugccc

SEQ ID NO: 2208798 - RNA, 15 nt, Human
ggcugagagaguggc

SEQ ID NO: 2208799 - RNA, 17 nt, Human
ggcugagagaguggcau

SEQ ID NO: 2208800 - RNA, 14 nt, Human
ggcugagagcccca

SEQ ID NO: 2208801 - RNA, 13 nt, Human
ggcugagacugga

SEQ ID NO: 2208802 - RNA, 15 nt, Human
ggcucuggagagaaa

SEQ ID NO: 2208803 - RNA, 12 nt, Human
ggcugagacugg

SEQ ID NO: 2208804 - RNA, 15 nt, Human
ggcugagauaugaac

SEQ ID NO: 2208805 - RNA, 20 nt, Human
ggcugagagccccagcugac

SEQ ID NO: 2208806 - RNA, 13 nt, Human
ggcugagccccua

SEQ ID NO: 2208807 - RNA, 16 nt, Human
ggcugagagccccagc

SEQ ID NO: 2208808 - RNA, 17 nt, Human
ggcugagagccccagcu

SEQ ID NO: 2208809 - RNA, 18 nt, Human
ggcugagagccccagcug

SEQ ID NO: 2208810 - RNA, 19 nt, Human
ggcugagagccccagcuga

SEQ ID NO: 2208811 - RNA, 14 nt, Human
ggcugagcccuggc

SEQ ID NO: 2208812 - RNA, 13 nt, Human
ggcugagcccugg

SEQ ID NO: 2208813 - RNA, 12 nt, Human
ggcugagcccug

SEQ ID NO: 2208814 - RNA, 16 nt, Human
ggcugagccccuaccc

SEQ ID NO: 2208815 - RNA, 18 nt, Human
ggcugagccccuacccca

SEQ ID NO: 2208816 - RNA, 16 nt, Human
ggcugagcccuggcag

SEQ ID NO: 2208817 - RNA, 15 nt, Human
ggcugagcccuggca

SEQ ID NO: 2208818 - RNA, 15 nt, Human
ggcugagccuggcug

SEQ ID NO: 2208819 - RNA, 22 nt, Human
ggcugagggauggacugaugcu

SEQ ID NO: 2208820 - RNA, 23 nt, Human
ggcugagggauggacugaugcuu

SEQ ID NO: 2208821 - RNA, 16 nt, Human
ggcugagggagccugg

SEQ ID NO: 2208822 - RNA, 20 nt, Human
ggcugagcucucugugggcu

SEQ ID NO: 2208823 - RNA, 15 nt, Human
ggcugagcucucugu

SEQ ID NO: 2208824 - RNA, 22 nt, Human
ggcugagccccuaccccacacc

SEQ ID NO: 2208825 - RNA, 19 nt, Human
ggcugagcggaugcaucug

SEQ ID NO: 2208826 - RNA, 15 nt, Human
ggcugaggugggagg

SEQ ID NO: 2208827 - RNA, 13 nt, Human
ggcugagguggga

SEQ ID NO: 2208828 - RNA, 13 nt, Human
ggcugggcagcug

SEQ ID NO: 2208829 - RNA, 14 nt, Human
ggcugggcagcugu

SEQ ID NO: 2208830 - RNA, 13 nt, Human
ggcugggcagcua

SEQ ID NO: 2208831 - RNA, 15 nt, Human
ggcuggacguggugg

SEQ ID NO: 2208832 - RNA, 12 nt, Human
ggcugggcagcu

SEQ ID NO: 2208833 - RNA, 22 nt, Human
ggcuggaccuauguccuaagga

SEQ ID NO: 2208834 - RNA, 18 nt, Human
ggcugggagagccuucca

SEQ ID NO: 2208835 - RNA, 15 nt, Human
ggcugggcagaggaa

SEQ ID NO: 2208836 - RNA, 19 nt, Human
ggcugggcagaggaaagca

SEQ ID NO: 2208837 - RNA, 13 nt, Human
ggcugggcagagg

SEQ ID NO: 2208838 - RNA, 14 nt, Human
ggcugggcagagga

SEQ ID NO: 2208839 - RNA, 20 nt, Human
ggcugggagagccuuccagg

SEQ ID NO: 2208840 - RNA, 23 nt, Human
ggcugggagagccuuccaggggu

SEQ ID NO: 2208841 - RNA, 13 nt, Human
ggcuggaaucugg

SEQ ID NO: 2208842 - RNA, 19 nt, Human
ggcuggaagauccugcggg

SEQ ID NO: 2208843 - RNA, 14 nt, Human
ggcuggaaucugga

SEQ ID NO: 2208844 - RNA, 16 nt, Human
ggcuggaaucuggaga

SEQ ID NO: 2208845 - RNA, 18 nt, Human
ggcuggaaucuggagagc

SEQ ID NO: 2208846 - RNA, 19 nt, Human
ggcuggaaucuggagagcu

SEQ ID NO: 2208847 - RNA, 23 nt, Human
ggcuggaacagauucacacuguc

SEQ ID NO: 2208848 - RNA, 15 nt, Human
ggcuggaagauccug

SEQ ID NO: 2208849 - RNA, 22 nt, Human
ggcuggaagauccugcgggugg

SEQ ID NO: 2208850 - RNA, 19 nt, Human
ggcugggagagccuuccag

SEQ ID NO: 2208851 - RNA, 20 nt, Human
ggcuggaaucuggagagcua

SEQ ID NO: 2208852 - RNA, 16 nt, Human
ggcuggaccuaugucc

SEQ ID NO: 2208853 - RNA, 23 nt, Human
ggcugcuucaaggauccugagcc

SEQ ID NO: 2208854 - RNA, 14 nt, Human
ggcugcuuagaauc

SEQ ID NO: 2208855 - RNA, 17 nt, Human
ggcugcugugugccuuc

SEQ ID NO: 2208856 - RNA, 13 nt, Human
ggcugcuuccucc

SEQ ID NO: 2208857 - RNA, 15 nt, Human
ggcugcuuuccaaag

SEQ ID NO: 2208858 - RNA, 19 nt, Human
ggcugcuuccuccuggaaa

SEQ ID NO: 2208859 - RNA, 14 nt, Human
ggcugcuuggccuu

SEQ ID NO: 2208860 - RNA, 22 nt, Human
ggcuggaacagauucacacugu

SEQ ID NO: 2208861 - RNA, 15 nt, Human
ggcugcuuccuccug

SEQ ID NO: 2208862 - RNA, 16 nt, Human
ggcugcuuccuccugg

SEQ ID NO: 2208863 - RNA, 17 nt, Human
ggcugcuuccuccugga

SEQ ID NO: 2208864 - RNA, 18 nt, Human
ggcugcuuccuccuggaa

SEQ ID NO: 2208865 - RNA, 16 nt, Human
ggcugcuggaggaaaa

SEQ ID NO: 2208866 - RNA, 13 nt, Human
ggcugcuggccug

SEQ ID NO: 2208867 - RNA, 15 nt, Human
ggcugcuggaggaaa

SEQ ID NO: 2208868 - RNA, 14 nt, Human
ggcugcuggaggaa

SEQ ID NO: 2208869 - RNA, 13 nt, Human
ggcugcuggagga

SEQ ID NO: 2208870 - RNA, 12 nt, Human
ggcugcuggagg

SEQ ID NO: 2208871 - RNA, 15 nt, Human
ggcugcugugugccu

SEQ ID NO: 2208872 - RNA, 14 nt, Human
ggcugcuggcgccu

SEQ ID NO: 2208873 - RNA, 18 nt, Human
ggcugcuggcgccucugc

SEQ ID NO: 2208874 - RNA, 19 nt, Human
ggcugcuggcgccucugca

SEQ ID NO: 2208875 - RNA, 18 nt, Human
ggcugcugcccccacccc

SEQ ID NO: 2208876 - RNA, 10 nt, Human
ggcugcugcc

SEQ ID NO: 2208877 - RNA, 11 nt, Human
ggcugcugccc

SEQ ID NO: 2208878 - RNA, 12 nt, Human
ggcugcugccca

SEQ ID NO: 2208879 - RNA, 14 nt, Human
ggcugcugcccagg

SEQ ID NO: 2208880 - RNA, 13 nt, Human
ggcugcugccccc

SEQ ID NO: 2208881 - RNA, 17 nt, Human
ggcugcugcccccaccc

SEQ ID NO: 2208882 - RNA, 11 nt, Human
ggcugcuucaa

SEQ ID NO: 2208883 - RNA, 12 nt, Human
ggcugcuucaag

SEQ ID NO: 2208884 - RNA, 14 nt, Human
ggcugcuucaagga

SEQ ID NO: 2208885 - RNA, 22 nt, Human
ggcugcuucaaggauccugagc

SEQ ID NO: 2208886 - RNA, 21 nt, Human
ggcugcugaccuccacagcuu

SEQ ID NO: 2208887 - RNA, 16 nt, Human
ggcugcugaccuccac

SEQ ID NO: 2208888 - RNA, 18 nt, Human
ggcugcugaaggcucgag

SEQ ID NO: 2208889 - RNA, 15 nt, Human
ggcugcugaaggcuc

SEQ ID NO: 2208890 - RNA, 17 nt, Human
ggcugcugaaggcucga

SEQ ID NO: 2208891 - RNA, 12 nt, Human
ggcugcagggag

SEQ ID NO: 2208892 - RNA, 13 nt, Human
ggcugcagggagu

SEQ ID NO: 2208893 - RNA, 14 nt, Human
ggcugcugaaggcu

SEQ ID NO: 2208894 - RNA, 23 nt, Human
gggaccucucccagggucccugg

SEQ ID NO: 2208895 - RNA, 16 nt, Human
gggaccucucccaggg

SEQ ID NO: 2208896 - RNA, 12 nt, Human
gggaccucuccc

SEQ ID NO: 2208897 - RNA, 19 nt, Human
gggacguggcucagccagc

SEQ ID NO: 2208898 - RNA, 22 nt, Human
gggaccuccccugaggcucagg

SEQ ID NO: 2208899 - RNA, 20 nt, Human
gggacguggcucagccagca

SEQ ID NO: 2208900 - RNA, 22 nt, Human
gggacguggcucagccagcacu

SEQ ID NO: 2208901 - RNA, 17 nt, Human
gggacuacaggcaccca

SEQ ID NO: 2208902 - RNA, 16 nt, Human
gggacucaaugcacug

SEQ ID NO: 2208903 - RNA, 18 nt, Human
gggaccgguacagaaagg

SEQ ID NO: 2208904 - RNA, 23 nt, Human
gggaccgccagauggggccucug

SEQ ID NO: 2208905 - RNA, 12 nt, Human
gggaccucaggc

SEQ ID NO: 2208906 - RNA, 13 nt, Human
gggaccucaggcc

SEQ ID NO: 2208907 - RNA, 15 nt, Human
gggaccucaggccug

SEQ ID NO: 2208908 - RNA, 18 nt, Human
gggaauugugugauguuu

SEQ ID NO: 2208909 - RNA, 12 nt, Human
gggaauuuccuc

SEQ ID NO: 2208910 - RNA, 13 nt, Human
gggaauuuccucu

SEQ ID NO: 2208911 - RNA, 18 nt, Human
gggacaaaacccaccuug

SEQ ID NO: 2208912 - RNA, 23 nt, Human
gggacaaggacuaggguccuggg

SEQ ID NO: 2208913 - RNA, 15 nt, Human
gggaauggcagcugc

SEQ ID NO: 2208914 - RNA, 21 nt, Human
gggaauguauuauucugcagc

SEQ ID NO: 2208915 - RNA, 22 nt, Human
gggaauugaggucugcucggcc

SEQ ID NO: 2208916 - RNA, 14 nt, Human
gggaauugugugau

SEQ ID NO: 2208917 - RNA, 20 nt, Human
gggaauguauuauucugcag

SEQ ID NO: 2208918 - RNA, 21 nt, Human
gggaauguaacugcugaaaac

SEQ ID NO: 2208919 - RNA, 17 nt, Human
gggaauuucuucaacuc

SEQ ID NO: 2208920 - RNA, 16 nt, Human
gggacccuuuccuucc

SEQ ID NO: 2208921 - RNA, 23 nt, Human
gggacccugugacauggugccug

SEQ ID NO: 2208922 - RNA, 20 nt, Human
gggacccuaagacuccucgg

SEQ ID NO: 2208923 - RNA, 13 nt, Human
gggaccccuccuc

SEQ ID NO: 2208924 - RNA, 14 nt, Human
gggaccccugagcu

SEQ ID NO: 2208925 - RNA, 20 nt, Human
gggaccccuggugguucacu

SEQ ID NO: 2208926 - RNA, 18 nt, Human
gggacaaguggacucagg

SEQ ID NO: 2208927 - RNA, 20 nt, Human
gggaccccgagccuggcucc

SEQ ID NO: 2208928 - RNA, 18 nt, Human
gggaccccgagccuggcu

SEQ ID NO: 2208929 - RNA, 18 nt, Human
gggaaggggacccccgcc

SEQ ID NO: 2208930 - RNA, 16 nt, Human
gggaagggccagucug

SEQ ID NO: 2208931 - RNA, 22 nt, Human
gggaagggccagucugggcugc

SEQ ID NO: 2208932 - RNA, 17 nt, Human
gggaagggggcugggac

SEQ ID NO: 2208933 - RNA, 14 nt, Human
gggaagggggcugg

SEQ ID NO: 2208934 - RNA, 16 nt, Human
gggaagggggcuggga

SEQ ID NO: 2208935 - RNA, 16 nt, Human
gggaauggcacagccc

SEQ ID NO: 2208936 - RNA, 22 nt, Human
gggaauggcacagcccaaagaa

SEQ ID NO: 2208937 - RNA, 21 nt, Human
gggaaugaggcuugcugagag

SEQ ID NO: 2208938 - RNA, 17 nt, Human
gggaaugccugagugcc

SEQ ID NO: 2208939 - RNA, 21 nt, Human
gggaaugccugagugccuggc

SEQ ID NO: 2208940 - RNA, 14 nt, Human
gggaaugaaccugg

SEQ ID NO: 2208941 - RNA, 16 nt, Human
gggaaugaaccuggag

SEQ ID NO: 2208942 - RNA, 14 nt, Human
gggaaugaagcuug

SEQ ID NO: 2208943 - RNA, 24 nt, Human
gggaaugaagcuuguguauccauu

SEQ ID NO: 2208944 - RNA, 14 nt, Human
gggaaugaggcuug

SEQ ID NO: 2208945 - RNA, 20 nt, Human
gggaaugaggcuugcugaga

SEQ ID NO: 2208946 - RNA, 12 nt, Human
gggaaggucacc

SEQ ID NO: 2208947 - RNA, 21 nt, Human
gggaaggugggguccuggagc

SEQ ID NO: 2208948 - RNA, 14 nt, Human
gggaaguccccagg

SEQ ID NO: 2208949 - RNA, 19 nt, Human
gggaaggucaccagcacca

SEQ ID NO: 2208950 - RNA, 23 nt, Human
gggaaguccccgaguuuccccag

SEQ ID NO: 2208951 - RNA, 12 nt, Human
ggcuuucuggag

SEQ ID NO: 2208952 - RNA, 12 nt, Human
gggaaggccagc

SEQ ID NO: 2208953 - RNA, 22 nt, Human
gggaaggcagggagggccuggg

SEQ ID NO: 2208954 - RNA, 16 nt, Human
gggaagggagagcggg

SEQ ID NO: 2208955 - RNA, 13 nt, Human
gggaagggagagc

SEQ ID NO: 2208956 - RNA, 12 nt, Human
gggaagggccag

SEQ ID NO: 2208957 - RNA, 13 nt, Human
gggaagggccagu

SEQ ID NO: 2208958 - RNA, 19 nt, Human
gggaaggccccacagacaa

SEQ ID NO: 2208959 - RNA, 14 nt, Human
gggaagggacacac

SEQ ID NO: 2208960 - RNA, 23 nt, Human
gggaaggauacaaaagcauguga

SEQ ID NO: 2208961 - RNA, 21 nt, Human
gggaaggauacaaaagcaugu

SEQ ID NO: 2208962 - RNA, 14 nt, Human
ggcuuuugugcauu

SEQ ID NO: 2208963 - RNA, 19 nt, Human
ggcuuaagaaaucuaguau

SEQ ID NO: 2208964 - RNA, 16 nt, Human
ggcuuaaugcuucuuu

SEQ ID NO: 2208965 - RNA, 12 nt, Human
ggcuuaauguuu

SEQ ID NO: 2208966 - RNA, 14 nt, Human
ggcuuaauguuuau

SEQ ID NO: 2208967 - RNA, 16 nt, Human
ggcuuaauguuuauuc

SEQ ID NO: 2208968 - RNA, 15 nt, Human
ggcuuaaaacaacac

SEQ ID NO: 2208969 - RNA, 13 nt, Human
ggcugggcuucag

SEQ ID NO: 2208970 - RNA, 17 nt, Human
ggcugggcuucaguggc

SEQ ID NO: 2208971 - RNA, 14 nt, Human
ggcugggcccagaa

SEQ ID NO: 2208972 - RNA, 17 nt, Human
ggcugggcucccuuccc

SEQ ID NO: 2208973 - RNA, 18 nt, Human
ggcugggcucccuuccca

SEQ ID NO: 2208974 - RNA, 12 nt, Human
ggcugggcuuca

SEQ ID NO: 2208975 - RNA, 13 nt, Human
ggcuuacacccac

SEQ ID NO: 2208976 - RNA, 17 nt, Human
ggcuuacacguggagga

SEQ ID NO: 2208977 - RNA, 22 nt, Human
ggcuuacuacaugugggagcuu

SEQ ID NO: 2208978 - RNA, 21 nt, Human
ggcuuagucacugagacagcc

SEQ ID NO: 2208979 - RNA, 22 nt, Human
ggcuuaguuuguguguugucuc

SEQ ID NO: 2208980 - RNA, 16 nt, Human
ggcuuauccagcuggu

SEQ ID NO: 2208981 - RNA, 22 nt, Human
ggcuucaaccuugagacagcuu

SEQ ID NO: 2208982 - RNA, 12 nt, Human
ggcuugaagcca

SEQ ID NO: 2208983 - RNA, 13 nt, Human
ggcuugaagccaa

SEQ ID NO: 2208984 - RNA, 15 nt, Human
ggcuugaagccaaag

SEQ ID NO: 2208985 - RNA, 20 nt, Human
ggcuugagcccccgcgccca

SEQ ID NO: 2208986 - RNA, 21 nt, Human
ggcuugagaaauauggacacu

SEQ ID NO: 2208987 - RNA, 20 nt, Human
ggcuugaagccaaagaaaaa

SEQ ID NO: 2208988 - RNA, 19 nt, Human
ggcuuuucacugcuggcug

SEQ ID NO: 2208989 - RNA, 22 nt, Human
ggcuuuucacugcuggcugccu

SEQ ID NO: 2208990 - RNA, 15 nt, Human
ggcuuuucucagcug

SEQ ID NO: 2208991 - RNA, 14 nt, Human
ggcuuuucucagcu

SEQ ID NO: 2208992 - RNA, 10 nt, Human
ggcuuuugug

SEQ ID NO: 2208993 - RNA, 14 nt, Human
ggcuuuucacugcu

SEQ ID NO: 2208994 - RNA, 13 nt, Human
ggcuuuucacugc

SEQ ID NO: 2208995 - RNA, 16 nt, Human
ggcuuucccuuaucaa

SEQ ID NO: 2208996 - RNA, 15 nt, Human
ggcuuuucacugcug

SEQ ID NO: 2208997 - RNA, 17 nt, Human
ggcuuuucacugcuggc

SEQ ID NO: 2208998 - RNA, 11 nt, Human
ggcuuucaugu

SEQ ID NO: 2208999 - RNA, 22 nt, Human
ggcuuucauuauuaguacugcu

SEQ ID NO: 2209000 - RNA, 15 nt, Human
ggcuuguaacuccac

SEQ ID NO: 2209001 - RNA, 15 nt, Human
ggcuuggggcuuccu

SEQ ID NO: 2209002 - RNA, 18 nt, Human
ggcuuguaacuccaccaa

SEQ ID NO: 2209003 - RNA, 17 nt, Human
ggcuuguaacuccacca

SEQ ID NO: 2209004 - RNA, 17 nt, Human
ggcuugucagagcuggg

SEQ ID NO: 2209005 - RNA, 16 nt, Human
ggcuugucagagcugg

SEQ ID NO: 2209006 - RNA, 15 nt, Human
ggcuugucagagcug

SEQ ID NO: 2209007 - RNA, 16 nt, Human
ggcuuguguguuucac

SEQ ID NO: 2209008 - RNA, 13 nt, Human
ggcuuuagacacu

SEQ ID NO: 2209009 - RNA, 14 nt, Human
ggcuuuauccucuu

SEQ ID NO: 2209010 - RNA, 15 nt, Human
ggcuuuauccucuuu

SEQ ID NO: 2209011 - RNA, 18 nt, Human
ggcuuuauccucuuuaga

SEQ ID NO: 2209012 - RNA, 20 nt, Human
ggcuuuauccucuuuagagu

SEQ ID NO: 2209013 - RNA, 21 nt, Human
ggcuuuauccucuuuagaguu

SEQ ID NO: 2209014 - RNA, 23 nt, Human
ggcuugcaaguauguuuuagcau

SEQ ID NO: 2209015 - RNA, 16 nt, Human
ggcuugaagccaaaga

SEQ ID NO: 2209016 - RNA, 22 nt, Human
ggcuuggggcucacacaccugu

SEQ ID NO: 2209017 - RNA, 19 nt, Human
ggcuuggggaccagagcug

SEQ ID NO: 2209018 - RNA, 21 nt, Human
ggcuuggggaccagagcugcc

SEQ ID NO: 2209019 - RNA, 22 nt, Human
ggcuugaguuuaaauuguaaua

SEQ ID NO: 2209020 - RNA, 20 nt, Human
gggcagggcaucuccugugc

SEQ ID NO: 2209021 - RNA, 14 nt, Human
gggcagggcaugac

SEQ ID NO: 2209022 - RNA, 11 nt, Human
gggcagagcag

SEQ ID NO: 2209023 - RNA, 19 nt, Human
gggcagaagggagaaggau

SEQ ID NO: 2209024 - RNA, 16 nt, Human
gggcagaagggagaag

SEQ ID NO: 2209025 - RNA, 18 nt, Human
gggcagaagggagaagga

SEQ ID NO: 2209026 - RNA, 12 nt, Human
gggcagagcaga

SEQ ID NO: 2209027 - RNA, 17 nt, Human
gggcaggugggagcuug

SEQ ID NO: 2209028 - RNA, 16 nt, Human
gggcaggugguggcac

SEQ ID NO: 2209029 - RNA, 18 nt, Human
gggcaggugguggcacug

SEQ ID NO: 2209030 - RNA, 13 nt, Human
gggcaggugggag

SEQ ID NO: 2209031 - RNA, 14 nt, Human
gggcagggugaccc

SEQ ID NO: 2209032 - RNA, 17 nt, Human
gggcagguugguggggg

SEQ ID NO: 2209033 - RNA, 22 nt, Human
gggcaggugguggcacugagcc

SEQ ID NO: 2209034 - RNA, 20 nt, Human
gggcaguagaaggucggagg

SEQ ID NO: 2209035 - RNA, 22 nt, Human
gggcagaacagccgcuccuguc

SEQ ID NO: 2209036 - RNA, 22 nt, Human
gggcagaacacuaaccugaccg

SEQ ID NO: 2209037 - RNA, 14 nt, Human
gggcagaagggaga

SEQ ID NO: 2209038 - RNA, 15 nt, Human
gggcagaaaguggcc

SEQ ID NO: 2209039 - RNA, 14 nt, Human
gggcagaacacuaa

SEQ ID NO: 2209040 - RNA, 22 nt, Human
gggcacuuuuuaauucaccaaa

SEQ ID NO: 2209041 - RNA, 23 nt, Human
gggcacuuuuuaauucaccaaag

SEQ ID NO: 2209042 - RNA, 18 nt, Human
gggcagaaggaagacuuc

SEQ ID NO: 2209043 - RNA, 17 nt, Human
gggcacuucacagagug

SEQ ID NO: 2209044 - RNA, 18 nt, Human
gggcacuucacagagugu

SEQ ID NO: 2209045 - RNA, 14 nt, Human
gggcacuucacaga

SEQ ID NO: 2209046 - RNA, 15 nt, Human
gggcacuucacagag

SEQ ID NO: 2209047 - RNA, 16 nt, Human
gggcacuucacagagu

SEQ ID NO: 2209048 - RNA, 14 nt, Human
gggcagaaggaaga

SEQ ID NO: 2209049 - RNA, 20 nt, Human
gggcacucagaagacacuga

SEQ ID NO: 2209050 - RNA, 18 nt, Human
gggcaccuggggaguggg

SEQ ID NO: 2209051 - RNA, 17 nt, Human
gggcacgcugugggcag

SEQ ID NO: 2209052 - RNA, 18 nt, Human
gggcacgcugugggcagg

SEQ ID NO: 2209053 - RNA, 13 nt, Human
gggcacugguggc

SEQ ID NO: 2209054 - RNA, 16 nt, Human
gggcacugguggcccg

SEQ ID NO: 2209055 - RNA, 13 nt, Human
gggcacugcuggg

SEQ ID NO: 2209056 - RNA, 14 nt, Human
gggcacugcugggu

SEQ ID NO: 2209057 - RNA, 16 nt, Human
gggcacugcugggugg

SEQ ID NO: 2209058 - RNA, 20 nt, Human
gggcacugcuggguggccca

SEQ ID NO: 2209059 - RNA, 21 nt, Human
gggcacugcuggguggcccau

SEQ ID NO: 2209060 - RNA, 22 nt, Human
gggcacugcuggguggcccauc

SEQ ID NO: 2209061 - RNA, 14 nt, Human
gggcacuggagcug

SEQ ID NO: 2209062 - RNA, 12 nt, Human
gggcacccaccc

SEQ ID NO: 2209063 - RNA, 19 nt, Human
gggcaccuauagucccagc

SEQ ID NO: 2209064 - RNA, 14 nt, Human
gggcaccggggccu

SEQ ID NO: 2209065 - RNA, 16 nt, Human
gggcacucagaagaca

SEQ ID NO: 2209066 - RNA, 19 nt, Human
gggcacucagaagacacug

SEQ ID NO: 2209067 - RNA, 16 nt, Human
gggcacagggucucua

SEQ ID NO: 2209068 - RNA, 13 nt, Human
gggcacagggucu

SEQ ID NO: 2209069 - RNA, 23 nt, Human
gggcacaugcugagucucccaag

SEQ ID NO: 2209070 - RNA, 20 nt, Human
gggcacaugcugagucuccc

SEQ ID NO: 2209071 - RNA, 22 nt, Human
gggcacaugcugagucucccaa

SEQ ID NO: 2209072 - RNA, 18 nt, Human
gggcaccagggguuucuc

SEQ ID NO: 2209073 - RNA, 20 nt, Human
gggcaccagggguuucucgc

SEQ ID NO: 2209074 - RNA, 19 nt, Human
gggcacacgccucccacug

SEQ ID NO: 2209075 - RNA, 18 nt, Human
gggcacagaaaauggaag

SEQ ID NO: 2209076 - RNA, 15 nt, Human
gggcacacgccuccc

SEQ ID NO: 2209077 - RNA, 12 nt, Human
gggcacacacug

SEQ ID NO: 2209078 - RNA, 13 nt, Human
gggcacacacugu

SEQ ID NO: 2209079 - RNA, 23 nt, Human
gggcacaccgggcacucagaaga

SEQ ID NO: 2209080 - RNA, 20 nt, Human
gggcacagaaaauggaagac

SEQ ID NO: 2209081 - RNA, 21 nt, Human
gggcacagaaaauggaagaca

SEQ ID NO: 2209082 - RNA, 16 nt, Human
gggaguuaagaccugg

SEQ ID NO: 2209083 - RNA, 15 nt, Human
gggaguuaagaccug

SEQ ID NO: 2209084 - RNA, 21 nt, Human
gggagugggacagagucuggg

SEQ ID NO: 2209085 - RNA, 19 nt, Human
gggagugagacagaaguaa

SEQ ID NO: 2209086 - RNA, 11 nt, Human
gggagugugua

SEQ ID NO: 2209087 - RNA, 22 nt, Human
gggaguugucaagucucugcug

SEQ ID NO: 2209088 - RNA, 21 nt, Human
gggaguuucuuuccugccuuc

SEQ ID NO: 2209089 - RNA, 20 nt, Human
gggaguucgagaccaaccug

SEQ ID NO: 2209090 - RNA, 23 nt, Human
gggaguuaagaccuggcagcucu

SEQ ID NO: 2209091 - RNA, 20 nt, Human
gggaguuaagaccuggcagc

SEQ ID NO: 2209092 - RNA, 17 nt, Human
gggaguuaagaccuggc

SEQ ID NO: 2209093 - RNA, 14 nt, Human
gggagguggcuggg

SEQ ID NO: 2209094 - RNA, 23 nt, Human
gggagguggaagaagggagaaga

SEQ ID NO: 2209095 - RNA, 18 nt, Human
gggagugacagaggcagc

SEQ ID NO: 2209096 - RNA, 11 nt, Human
gggagugagcu

SEQ ID NO: 2209097 - RNA, 14 nt, Human
gggagugagcuggu

SEQ ID NO: 2209098 - RNA, 19 nt, Human
gggacugaaaaccucuccu

SEQ ID NO: 2209099 - RNA, 18 nt, Human
gggacugaaaaccucucc

SEQ ID NO: 2209100 - RNA, 18 nt, Human
gggacugaagccaaaguu

SEQ ID NO: 2209101 - RNA, 15 nt, Human
gggacugaagccaaa

SEQ ID NO: 2209102 - RNA, 15 nt, Human
gggaggucgagguag

SEQ ID NO: 2209103 - RNA, 16 nt, Human
gggaggugaccccagg

SEQ ID NO: 2209104 - RNA, 16 nt, Human
gggaggucgagguagg

SEQ ID NO: 2209105 - RNA, 17 nt, Human
gggaggugggauccucc

SEQ ID NO: 2209106 - RNA, 15 nt, Human
gggacuaugaauggg

SEQ ID NO: 2209107 - RNA, 17 nt, Human
gggacucagcccugagg

SEQ ID NO: 2209108 - RNA, 22 nt, Human
gggacucagccuucagacagag

SEQ ID NO: 2209109 - RNA, 16 nt, Human
gggacucagcccugag

SEQ ID NO: 2209110 - RNA, 15 nt, Human
gggacuagccccugu

SEQ ID NO: 2209111 - RNA, 20 nt, Human
gggacucugaagccucuggg

SEQ ID NO: 2209112 - RNA, 19 nt, Human
gggacucugaagccucugg

SEQ ID NO: 2209113 - RNA, 13 nt, Human
gggacugagaaau

SEQ ID NO: 2209114 - RNA, 21 nt, Human
gggcaagaagaucacgcuccc

SEQ ID NO: 2209115 - RNA, 13 nt, Human
gggcaaggagacc

SEQ ID NO: 2209116 - RNA, 13 nt, Human
gggcaagggccau

SEQ ID NO: 2209117 - RNA, 20 nt, Human
gggcaagaagaucacgcucc

SEQ ID NO: 2209118 - RNA, 11 nt, Human
gggaugaaaga

SEQ ID NO: 2209119 - RNA, 15 nt, Human
gggaugaaagagaag

SEQ ID NO: 2209120 - RNA, 17 nt, Human
gggaucugugcccagag

SEQ ID NO: 2209121 - RNA, 18 nt, Human
gggaucuugcauucccag

SEQ ID NO: 2209122 - RNA, 23 nt, Human
gggaucugguccuacccaucccc

SEQ ID NO: 2209123 - RNA, 19 nt, Human
gggaucugguccuacccau

SEQ ID NO: 2209124 - RNA, 24 nt, Human
gggcaagucccugacucucuguga

SEQ ID NO: 2209125 - RNA, 20 nt, Human
gggcaacccccagccugcua

SEQ ID NO: 2209126 - RNA, 18 nt, Human
gggcaacccuggugacca

SEQ ID NO: 2209127 - RNA, 23 nt, Human
gggauccuggaguucugguuccu

SEQ ID NO: 2209128 - RNA, 20 nt, Human
gggaucccucccccccaugc

SEQ ID NO: 2209129 - RNA, 17 nt, Human
gggauccgacugcuuug

SEQ ID NO: 2209130 - RNA, 14 nt, Human
gggaucucaggggc

SEQ ID NO: 2209131 - RNA, 15 nt, Human
gggaucugccccucc

SEQ ID NO: 2209132 - RNA, 14 nt, Human
gggaucacagggcc

SEQ ID NO: 2209133 - RNA, 13 nt, Human
gggaucacagaga

SEQ ID NO: 2209134 - RNA, 22 nt, Human
gggaucacagagacauuccucc

SEQ ID NO: 2209135 - RNA, 22 nt, Human
gggaucaaccagcuaagaaaag

SEQ ID NO: 2209136 - RNA, 13 nt, Human
gggaucacaaggu

SEQ ID NO: 2209137 - RNA, 12 nt, Human
gggauaugcuua

SEQ ID NO: 2209138 - RNA, 16 nt, Human
gggauauaggagagga

SEQ ID NO: 2209139 - RNA, 15 nt, Human
gggauccuccaggug

SEQ ID NO: 2209140 - RNA, 16 nt, Human
gggauccuccaggugc

SEQ ID NO: 2209141 - RNA, 15 nt, Human
gggauauaggagagg

SEQ ID NO: 2209142 - RNA, 16 nt, Human
gggauagcacugagca

SEQ ID NO: 2209143 - RNA, 14 nt, Human
gggauagaugugug

SEQ ID NO: 2209144 - RNA, 21 nt, Human
gggauaugauuuaaaucagcc

SEQ ID NO: 2209145 - RNA, 23 nt, Human
gggaguucgagaccaaccugacc

SEQ ID NO: 2209146 - RNA, 13 nt, Human
gggauacaugcuc

SEQ ID NO: 2209147 - RNA, 15 nt, Human
gggauacaugcucuu

SEQ ID NO: 2209148 - RNA, 13 nt, Human
gggauacugcagg

SEQ ID NO: 2209149 - RNA, 13 nt, Human
gggauagaugugu

SEQ ID NO: 2209150 - RNA, 13 nt, Human
gggauagagagag

SEQ ID NO: 2209151 - RNA, 19 nt, Human
gggccaccuccccaggccg

SEQ ID NO: 2209152 - RNA, 22 nt, Human
gggccaccuccccaggccgugg

SEQ ID NO: 2209153 - RNA, 14 nt, Human
gggccacgugccag

SEQ ID NO: 2209154 - RNA, 15 nt, Human
gggccaccuccccag

SEQ ID NO: 2209155 - RNA, 16 nt, Human
gggccaccuccccagg

SEQ ID NO: 2209156 - RNA, 17 nt, Human
gggccaccuccccaggc

SEQ ID NO: 2209157 - RNA, 19 nt, Human
gggccacagggcgagacuc

SEQ ID NO: 2209158 - RNA, 19 nt, Human
gggccacaugggaggcuca

SEQ ID NO: 2209159 - RNA, 23 nt, Human
gggccacagagaaaguacuucuc

SEQ ID NO: 2209160 - RNA, 15 nt, Human
gggccacacagaaac

SEQ ID NO: 2209161 - RNA, 13 nt, Human
gggccaaggacug

SEQ ID NO: 2209162 - RNA, 17 nt, Human
gggccaagacuuggcaa

SEQ ID NO: 2209163 - RNA, 16 nt, Human
gggccacagagaaagu

SEQ ID NO: 2209164 - RNA, 16 nt, Human
gggccaacaccaggga

SEQ ID NO: 2209165 - RNA, 22 nt, Human
gggccaacuugagggcccagag

SEQ ID NO: 2209166 - RNA, 15 nt, Human
gggccaacaccaggg

SEQ ID NO: 2209167 - RNA, 11 nt, Human
gggccaacacc

SEQ ID NO: 2209168 - RNA, 13 nt, Human
gggccaagaaaga

SEQ ID NO: 2209169 - RNA, 23 nt, Human
gggccaacuugagggcccagagc

SEQ ID NO: 2209170 - RNA, 13 nt, Human
gggccaagcccag

SEQ ID NO: 2209171 - RNA, 14 nt, Human
gggcauugcuuucc

SEQ ID NO: 2209172 - RNA, 23 nt, Human
gggcauugauggggaaggaggcu

SEQ ID NO: 2209173 - RNA, 18 nt, Human
gggcauugauggggaagg

SEQ ID NO: 2209174 - RNA, 14 nt, Human
gggcccagauucua

SEQ ID NO: 2209175 - RNA, 13 nt, Human
gggcccagaucug

SEQ ID NO: 2209176 - RNA, 11 nt, Human
gggcccagccc

SEQ ID NO: 2209177 - RNA, 12 nt, Human
gggcccagcccc

SEQ ID NO: 2209178 - RNA, 13 nt, Human
gggcccagccccc

SEQ ID NO: 2209179 - RNA, 19 nt, Human
gggcccagagcccagcucc

SEQ ID NO: 2209180 - RNA, 17 nt, Human
gggcccagagcccagcu

SEQ ID NO: 2209181 - RNA, 20 nt, Human
gggcccagagcccagcucca

SEQ ID NO: 2209182 - RNA, 14 nt, Human
gggcccagagcagg

SEQ ID NO: 2209183 - RNA, 16 nt, Human
gggcccagagcccagc

SEQ ID NO: 2209184 - RNA, 15 nt, Human
gggcccagagcccag

SEQ ID NO: 2209185 - RNA, 13 nt, Human
gggcccagagccc

SEQ ID NO: 2209186 - RNA, 12 nt, Human
gggcccagagcc

SEQ ID NO: 2209187 - RNA, 11 nt, Human
gggcccagagc

SEQ ID NO: 2209188 - RNA, 22 nt, Human
gggcccaccuggccaccugagg

SEQ ID NO: 2209189 - RNA, 12 nt, Human
gggcccagagca

SEQ ID NO: 2209190 - RNA, 15 nt, Human
gggcccaccuggcca

SEQ ID NO: 2209191 - RNA, 16 nt, Human
gggcccaccuggccac

SEQ ID NO: 2209192 - RNA, 18 nt, Human
gggcccaccuggccaccu

SEQ ID NO: 2209193 - RNA, 19 nt, Human
gggcccaccuggccaccug

SEQ ID NO: 2209194 - RNA, 23 nt, Human
gggcccaagacagaugccccaga

SEQ ID NO: 2209195 - RNA, 18 nt, Human
gggcccaaggcggccccu

SEQ ID NO: 2209196 - RNA, 19 nt, Human
gggcccaaggcggccccuc

SEQ ID NO: 2209197 - RNA, 19 nt, Human
gggcccaagacagaugccc

SEQ ID NO: 2209198 - RNA, 16 nt, Human
gggccacucugccucu

SEQ ID NO: 2209199 - RNA, 15 nt, Human
gggccacucugccuc

SEQ ID NO: 2209200 - RNA, 19 nt, Human
gggccacgugccaggcccg

SEQ ID NO: 2209201 - RNA, 18 nt, Human
gggccacgugccaggccc

SEQ ID NO: 2209202 - RNA, 17 nt, Human
gggcccagagagggugg

SEQ ID NO: 2209203 - RNA, 20 nt, Human
gggcccaagucccuguuuuc

SEQ ID NO: 2209204 - RNA, 12 nt, Human
gggcccacaccc

SEQ ID NO: 2209205 - RNA, 10 nt, Human
gggcccaccu

SEQ ID NO: 2209206 - RNA, 13 nt, Human
gggcccaccuggc

SEQ ID NO: 2209207 - RNA, 14 nt, Human
gggcccaccuggcc

SEQ ID NO: 2209208 - RNA, 17 nt, Human
gggcagucuggaggggc

SEQ ID NO: 2209209 - RNA, 14 nt, Human
gggcagucuggagg

SEQ ID NO: 2209210 - RNA, 17 nt, Human
gggcagucauuauccag

SEQ ID NO: 2209211 - RNA, 15 nt, Human
gggcagucuggaggg

SEQ ID NO: 2209212 - RNA, 18 nt, Human
gggcagugggucccagau

SEQ ID NO: 2209213 - RNA, 20 nt, Human
gggcagugguguggagaagc

SEQ ID NO: 2209214 - RNA, 21 nt, Human
gggcagugguaagcucuggcu

SEQ ID NO: 2209215 - RNA, 22 nt, Human
gggcagugguaagcucuggcuu

SEQ ID NO: 2209216 - RNA, 13 nt, Human
gggcaucaugcau

SEQ ID NO: 2209217 - RNA, 13 nt, Human
gggcauccucagg

SEQ ID NO: 2209218 - RNA, 14 nt, Human
gggcaucuccagga

SEQ ID NO: 2209219 - RNA, 15 nt, Human
gggcauacuaauaaa

SEQ ID NO: 2209220 - RNA, 22 nt, Human
gggcauagaugcaggugagccc

SEQ ID NO: 2209221 - RNA, 17 nt, Human
gggcauauccaccaccu

SEQ ID NO: 2209222 - RNA, 17 nt, Human
gggcaugcuggggcaag

SEQ ID NO: 2209223 - RNA, 14 nt, Human
gggcaugcuggggc

SEQ ID NO: 2209224 - RNA, 20 nt, Human
gggcaugccccggccaccuc

SEQ ID NO: 2209225 - RNA, 22 nt, Human
gggcaugccccggccaccucug

SEQ ID NO: 2209226 - RNA, 23 nt, Human
gggcaugccccggccaccucugc

SEQ ID NO: 2209227 - RNA, 20 nt, Human
gggcaucugccccuccccca

SEQ ID NO: 2209228 - RNA, 16 nt, Human
gggcaugccccggcca

SEQ ID NO: 2209229 - RNA, 19 nt, Human
gggcaucugccccuccccc

SEQ ID NO: 2209230 - RNA, 17 nt, Human
gggcaucugccccuccc

SEQ ID NO: 2209231 - RNA, 14 nt, Human
gggcaucugccccu

SEQ ID NO: 2209232 - RNA, 12 nt, Human
gggcaugacacg

SEQ ID NO: 2209233 - RNA, 22 nt, Human
gggcauggacguucggggcaug

SEQ ID NO: 2209234 - RNA, 20 nt, Human
gggcauggacguucggggca

SEQ ID NO: 2209235 - RNA, 15 nt, Human
gggcauggccaggug

SEQ ID NO: 2209236 - RNA, 17 nt, Human
gggcauggccagguggc

SEQ ID NO: 2209237 - RNA, 20 nt, Human
gggcauggccagguggccac

SEQ ID NO: 2209238 - RNA, 16 nt, Human
gggcauggccagcagc

SEQ ID NO: 2209239 - RNA, 15 nt, Human
gggcauggggugggc

SEQ ID NO: 2209240 - RNA, 17 nt, Human
gggcauggggugggccu

SEQ ID NO: 2209241 - RNA, 20 nt, Human
gggcauggggugggccucug

SEQ ID NO: 2209242 - RNA, 18 nt, Human
gggcauguauuggccugg

SEQ ID NO: 2209243 - RNA, 21 nt, Human
gggcauggggugggccucugg

SEQ ID NO: 2209244 - RNA, 22 nt, Human
gggcauguauuggccuggaggu

SEQ ID NO: 2209245 - RNA, 19 nt, Human
gggcauguauuggccugga

SEQ ID NO: 2209246 - RNA, 20 nt, Human
gggcauguauuggccuggag

SEQ ID NO: 2209247 - RNA, 21 nt, Human
gggcauguauuggccuggagg

SEQ ID NO: 2209248 - RNA, 12 nt, Human
gggccccucugc

SEQ ID NO: 2209249 - RNA, 13 nt, Human
gggccccugccag

SEQ ID NO: 2209250 - RNA, 15 nt, Human
gggccccucugccca

SEQ ID NO: 2209251 - RNA, 16 nt, Human
gggccccucugcccag

SEQ ID NO: 2209252 - RNA, 17 nt, Human
gggccccucugcccagc

SEQ ID NO: 2209253 - RNA, 13 nt, Human
gggccccugccuc

SEQ ID NO: 2209254 - RNA, 15 nt, Human
gggccccugccucuc

SEQ ID NO: 2209255 - RNA, 17 nt, Human
gggccccugccucucug

SEQ ID NO: 2209256 - RNA, 18 nt, Human
gggccccugccucucugc

SEQ ID NO: 2209257 - RNA, 19 nt, Human
gggccccugccucucugca

SEQ ID NO: 2209258 - RNA, 21 nt, Human
gggccccugccucucugcagg

SEQ ID NO: 2209259 - RNA, 13 nt, Human
gggccccuccagc

SEQ ID NO: 2209260 - RNA, 21 nt, Human
gggccccucaucgcguccucc

SEQ ID NO: 2209261 - RNA, 14 nt, Human
gggccccuccagcu

SEQ ID NO: 2209262 - RNA, 15 nt, Human
gggccccuccagcuu

SEQ ID NO: 2209263 - RNA, 17 nt, Human
gggccccucacccugcc

SEQ ID NO: 2209264 - RNA, 19 nt, Human
gggccccucacccugccuu

SEQ ID NO: 2209265 - RNA, 21 nt, Human
gggccccccuccuugcucugc

SEQ ID NO: 2209266 - RNA, 19 nt, Human
gggccccagucagccucuc

SEQ ID NO: 2209267 - RNA, 15 nt, Human
gggccccccuccuug

SEQ ID NO: 2209268 - RNA, 17 nt, Human
gggccccccuccuugcu

SEQ ID NO: 2209269 - RNA, 19 nt, Human
gggccccccuccuugcucu

SEQ ID NO: 2209270 - RNA, 23 nt, Human
gggcccccagcgagagucccugc

SEQ ID NO: 2209271 - RNA, 17 nt, Human
gggccccagucagccuc

SEQ ID NO: 2209272 - RNA, 18 nt, Human
gggccccagucagccucu

SEQ ID NO: 2209273 - RNA, 14 nt, Human
gggcccccaucuca

SEQ ID NO: 2209274 - RNA, 12 nt, Human
gggccccagccc

SEQ ID NO: 2209275 - RNA, 13 nt, Human
gggccccagccca

SEQ ID NO: 2209276 - RNA, 14 nt, Human
gggccccagcccac

SEQ ID NO: 2209277 - RNA, 16 nt, Human
gggccccagcccaccc

SEQ ID NO: 2209278 - RNA, 18 nt, Human
gggccccagcccacccuc

SEQ ID NO: 2209279 - RNA, 17 nt, Human
gggccccagcccacccu

SEQ ID NO: 2209280 - RNA, 14 nt, Human
gggccccagucagc

SEQ ID NO: 2209281 - RNA, 13 nt, Human
gggcccaggcagg

SEQ ID NO: 2209282 - RNA, 24 nt, Human
gggcccaggaccagcuggggcgug

SEQ ID NO: 2209283 - RNA, 14 nt, Human
gggcccaggcaaau

SEQ ID NO: 2209284 - RNA, 16 nt, Human
gggcccaggaccagcu

SEQ ID NO: 2209285 - RNA, 17 nt, Human
gggcccaggaccagcug

SEQ ID NO: 2209286 - RNA, 18 nt, Human
gggcccaggaccagcugg

SEQ ID NO: 2209287 - RNA, 19 nt, Human
gggcccaggaccagcuggg

SEQ ID NO: 2209288 - RNA, 18 nt, Human
gggcccagcccccacagu

SEQ ID NO: 2209289 - RNA, 22 nt, Human
gggcccagcccccacagugcug

SEQ ID NO: 2209290 - RNA, 12 nt, Human
gggcccagcugg

SEQ ID NO: 2209291 - RNA, 15 nt, Human
gggcccagcugggcu

SEQ ID NO: 2209292 - RNA, 16 nt, Human
gggcccagcugggcuc

SEQ ID NO: 2209293 - RNA, 21 nt, Human
gggcccagcugggcucugcca

SEQ ID NO: 2209294 - RNA, 9 nt, Human
gggcccagg

SEQ ID NO: 2209295 - RNA, 14 nt, Human
gggcccaggaccag

SEQ ID NO: 2209296 - RNA, 22 nt, Human
gggccccaaacgggcugcccug

SEQ ID NO: 2209297 - RNA, 20 nt, Human
gggcccaggccaucuuccag

SEQ ID NO: 2209298 - RNA, 11 nt, Human
gggcccaggga

SEQ ID NO: 2209299 - RNA, 18 nt, Human
gggcccagggacaccagc

SEQ ID NO: 2209300 - RNA, 22 nt, Human
gggcccagggacaccagccagg

SEQ ID NO: 2209301 - RNA, 15 nt, Human
gggccccaccaccua

SEQ ID NO: 2209302 - RNA, 18 nt, Human
gggccccagaaggcaggg

SEQ ID NO: 2209303 - RNA, 14 nt, Human
gggccccagaggcu

SEQ ID NO: 2209304 - RNA, 13 nt, Human
gggcccugggcug

SEQ ID NO: 2209305 - RNA, 15 nt, Human
gggcccugggcugga

SEQ ID NO: 2209306 - RNA, 13 nt, Human
gggccuggccuga

SEQ ID NO: 2209307 - RNA, 15 nt, Human
gggcccugcagaggg

SEQ ID NO: 2209308 - RNA, 13 nt, Human
gggcccugccucc

SEQ ID NO: 2209309 - RNA, 23 nt, Human
gggcccgccuggcagaacugagc

SEQ ID NO: 2209310 - RNA, 18 nt, Human
gggcccugagcugagggc

SEQ ID NO: 2209311 - RNA, 18 nt, Human
gggcccugcaccugugca

SEQ ID NO: 2209312 - RNA, 19 nt, Human
gggcccugcaccugugcag

SEQ ID NO: 2209313 - RNA, 22 nt, Human
gggcccugagcucgguggaccc

SEQ ID NO: 2209314 - RNA, 13 nt, Human
gggcccugagcuc

SEQ ID NO: 2209315 - RNA, 20 nt, Human
gggcccgccuggcagaacug

SEQ ID NO: 2209316 - RNA, 16 nt, Human
gggcccgccuggcaga

SEQ ID NO: 2209317 - RNA, 18 nt, Human
gggccccuuuuuacuccc

SEQ ID NO: 2209318 - RNA, 12 nt, Human
gggcccugagcu

SEQ ID NO: 2209319 - RNA, 22 nt, Human
gggccccugccucucugcaggu

SEQ ID NO: 2209320 - RNA, 22 nt, Human
gggccccucugcccagcuuggg

SEQ ID NO: 2209321 - RNA, 23 nt, Human
gggccccucugcccagcuugggc

SEQ ID NO: 2209322 - RNA, 21 nt, Human
gggccccugcuucuccagccu

SEQ ID NO: 2209323 - RNA, 19 nt, Human
gggccccugcuucuccagc

SEQ ID NO: 2209324 - RNA, 14 nt, Human
gggccccugggcuu

SEQ ID NO: 2209325 - RNA, 21 nt, Human
gggccccugggcuuggccugc

SEQ ID NO: 2209326 - RNA, 23 nt, Human
gggccccugggcuuggccugcug

SEQ ID NO: 2209327 - RNA, 14 nt, Human
gggcccugggcugg

SEQ ID NO: 2209328 - RNA, 14 nt, Human
gggccuggccugag

SEQ ID NO: 2209329 - RNA, 18 nt, Human
gggccuggccugagcugg

SEQ ID NO: 2209330 - RNA, 17 nt, Human
gggccuggcucaggugg

SEQ ID NO: 2209331 - RNA, 13 nt, Human
gggccuggcuccc

SEQ ID NO: 2209332 - RNA, 14 nt, Human
ggggagggugacag

SEQ ID NO: 2209333 - RNA, 20 nt, Human
ggggauucuuccaucugauu

SEQ ID NO: 2209334 - RNA, 15 nt, Human
ggggauuucucccag

SEQ ID NO: 2209335 - RNA, 14 nt, Human
ggggauuucuccca

SEQ ID NO: 2209336 - RNA, 21 nt, Human
ggggauuuccagccagggcug

SEQ ID NO: 2209337 - RNA, 18 nt, Human
ggggaggggcugugggcg

SEQ ID NO: 2209338 - RNA, 22 nt, Human
ggggagggguugccacaggccu

SEQ ID NO: 2209339 - RNA, 15 nt, Human
ggggagggggauccg

SEQ ID NO: 2209340 - RNA, 13 nt, Human
ggggaggggcgcu

SEQ ID NO: 2209341 - RNA, 16 nt, Human
ggggaggggcgcuggc

SEQ ID NO: 2209342 - RNA, 20 nt, Human
ggggaggggcgcuggcccag

SEQ ID NO: 2209343 - RNA, 15 nt, Human
ggggagggauucugg

SEQ ID NO: 2209344 - RNA, 21 nt, Human
ggggagggccguaccccaccc

SEQ ID NO: 2209345 - RNA, 21 nt, Human
ggggaaaaucagccugcucca

SEQ ID NO: 2209346 - RNA, 15 nt, Human
ggggaaaagagauga

SEQ ID NO: 2209347 - RNA, 21 nt, Human
ggggaggccaagugcaggcug

SEQ ID NO: 2209348 - RNA, 13 nt, Human
ggggaggccaagu

SEQ ID NO: 2209349 - RNA, 14 nt, Human
ggggaggcagccgg

SEQ ID NO: 2209350 - RNA, 19 nt, Human
ggggaggaucacuggagcc

SEQ ID NO: 2209351 - RNA, 22 nt, Human
ggggaggcggacguuccagccg

SEQ ID NO: 2209352 - RNA, 14 nt, Human
ggggagggauucug

SEQ ID NO: 2209353 - RNA, 19 nt, Human
ggggaaaaucagccugcuc

SEQ ID NO: 2209354 - RNA, 17 nt, Human
ggggaaaaucagccugc

SEQ ID NO: 2209355 - RNA, 16 nt, Human
ggggaaaaucagccug

SEQ ID NO: 2209356 - RNA, 15 nt, Human
gggcuuucuggagag

SEQ ID NO: 2209357 - RNA, 14 nt, Human
gggcuuucuggaga

SEQ ID NO: 2209358 - RNA, 16 nt, Human
gggccuggucccuggg

SEQ ID NO: 2209359 - RNA, 23 nt, Human
gggcuuguugcuguugauguuuu

SEQ ID NO: 2209360 - RNA, 22 nt, Human
gggcuuggggaccagagcugcc

SEQ ID NO: 2209361 - RNA, 11 nt, Human
gggccugggcc

SEQ ID NO: 2209362 - RNA, 20 nt, Human
ggggcaucugccccuccccc

SEQ ID NO: 2209363 - RNA, 14 nt, Human
ggggcaucugcccc

SEQ ID NO: 2209364 - RNA, 13 nt, Human
ggggcaguggcaa

SEQ ID NO: 2209365 - RNA, 17 nt, Human
ggggcagaacagccgcu

SEQ ID NO: 2209366 - RNA, 21 nt, Human
ggggcgcucgcuuccgcaucc

SEQ ID NO: 2209367 - RNA, 13 nt, Human
ggggcgcuggccc

SEQ ID NO: 2209368 - RNA, 14 nt, Human
ggggcgcuggccca

SEQ ID NO: 2209369 - RNA, 15 nt, Human
ggggcgcuggcccag

SEQ ID NO: 2209370 - RNA, 17 nt, Human
ggggcgcuggcccagcc

SEQ ID NO: 2209371 - RNA, 18 nt, Human
ggggcgcuggcccagccg

SEQ ID NO: 2209372 - RNA, 23 nt, Human
ggggcgcuggcccagccggccuc

SEQ ID NO: 2209373 - RNA, 17 nt, Human
ggggcagucuggagggg

SEQ ID NO: 2209374 - RNA, 13 nt, Human
ggggcagaacagc

SEQ ID NO: 2209375 - RNA, 22 nt, Human
ggggcaagaagaucacgcuccc

SEQ ID NO: 2209376 - RNA, 21 nt, Human
ggggcacaugcugagucuccc

SEQ ID NO: 2209377 - RNA, 17 nt, Human
ggggcacugcaggggcc

SEQ ID NO: 2209378 - RNA, 16 nt, Human
ggggcaacccugguga

SEQ ID NO: 2209379 - RNA, 13 nt, Human
ggggcuccuggaa

SEQ ID NO: 2209380 - RNA, 12 nt, Human
ggggcuccugga

SEQ ID NO: 2209381 - RNA, 11 nt, Human
ggggcuccugg

SEQ ID NO: 2209382 - RNA, 13 nt, Human
ggggcucccgccc

SEQ ID NO: 2209383 - RNA, 21 nt, Human
ggggcuagaaccuagagaagc

SEQ ID NO: 2209384 - RNA, 14 nt, Human
ggggcuagaaccua

SEQ ID NO: 2209385 - RNA, 16 nt, Human
ggggcuacaagaggga

SEQ ID NO: 2209386 - RNA, 17 nt, Human
ggggcuacaagagggaa

SEQ ID NO: 2209387 - RNA, 18 nt, Human
ggggcgucuguucccccu

SEQ ID NO: 2209388 - RNA, 15 nt, Human
ggggcguggggaggg

SEQ ID NO: 2209389 - RNA, 20 nt, Human
ggggcgucuguucccccuuc

SEQ ID NO: 2209390 - RNA, 14 nt, Human
ggggcuacaagagg

SEQ ID NO: 2209391 - RNA, 15 nt, Human
ggggcuacaagaggg

SEQ ID NO: 2209392 - RNA, 13 nt, Human
ggggcucuggaga

SEQ ID NO: 2209393 - RNA, 16 nt, Human
ggggcucucagcucag

SEQ ID NO: 2209394 - RNA, 20 nt, Human
ggggcucucagcucagcgcc

SEQ ID NO: 2209395 - RNA, 21 nt, Human
ggggcuccuggaaaggcucag

SEQ ID NO: 2209396 - RNA, 21 nt, Human
ggggcuccuuucuccagccag

SEQ ID NO: 2209397 - RNA, 22 nt, Human
ggggcuccuuucuccagccagc

SEQ ID NO: 2209398 - RNA, 15 nt, Human
ggggcucgccaugcc

SEQ ID NO: 2209399 - RNA, 12 nt, Human
ggggcucuggga

SEQ ID NO: 2209400 - RNA, 14 nt, Human
ggggcucuucucau

SEQ ID NO: 2209401 - RNA, 24 nt, Human
ggggcucucauguuuucaacugcc

SEQ ID NO: 2209402 - RNA, 14 nt, Human
ggggcucuggagag

SEQ ID NO: 2209403 - RNA, 16 nt, Human
ggggcucuggagagaa

SEQ ID NO: 2209404 - RNA, 17 nt, Human
ggggcucuggagagaaa

SEQ ID NO: 2209405 - RNA, 17 nt, Human
ggggcugaggugggagg

SEQ ID NO: 2209406 - RNA, 19 nt, Human
ggggcugaggugggaggau

SEQ ID NO: 2209407 - RNA, 12 nt, Human
ggggcugcaccg

SEQ ID NO: 2209408 - RNA, 21 nt, Human
ggggcugcaccggcuggccug

SEQ ID NO: 2209409 - RNA, 22 nt, Human
ggggcugcaccggcuggccugg

SEQ ID NO: 2209410 - RNA, 18 nt, Human
ggggcugaacggggagaa

SEQ ID NO: 2209411 - RNA, 18 nt, Human
ggggcucuggagagaaac

SEQ ID NO: 2209412 - RNA, 20 nt, Human
ggggcugaccuuccucgcag

SEQ ID NO: 2209413 - RNA, 23 nt, Human
ggggcugaccuuccucgcagaga

SEQ ID NO: 2209414 - RNA, 18 nt, Human
gggggacagggcuggccc

SEQ ID NO: 2209415 - RNA, 22 nt, Human
gggggacagggcuggcccagcc

SEQ ID NO: 2209416 - RNA, 23 nt, Human
ggggcugcaccggcuggccuggc

SEQ ID NO: 2209417 - RNA, 22 nt, Human
gggggaggugggauccuccagg

SEQ ID NO: 2209418 - RNA, 21 nt, Human
gggggacuuacaugauucauu

SEQ ID NO: 2209419 - RNA, 16 nt, Human
gggggacuagccccug

SEQ ID NO: 2209420 - RNA, 15 nt, Human
ggggugggagagguc

SEQ ID NO: 2209421 - RNA, 13 nt, Human
ggggugggccagg

SEQ ID NO: 2209422 - RNA, 20 nt, Human
ggggugcuuuuauagaggcu

SEQ ID NO: 2209423 - RNA, 17 nt, Human
gggguggaggcuuccug

SEQ ID NO: 2209424 - RNA, 17 nt, Human
gggguggggaccucagg

SEQ ID NO: 2209425 - RNA, 20 nt, Human
gggguggggggggugcuggg

SEQ ID NO: 2209426 - RNA, 17 nt, Human
ggggugggccaggcuga

SEQ ID NO: 2209427 - RNA, 14 nt, Human
ggggugggccaggc

SEQ ID NO: 2209428 - RNA, 14 nt, Human
ggggugggccucug

SEQ ID NO: 2209429 - RNA, 15 nt, Human
ggggugggccucugg

SEQ ID NO: 2209430 - RNA, 15 nt, Human
gggguggguauaaaa

SEQ ID NO: 2209431 - RNA, 18 nt, Human
gggguggggguggaggcu

SEQ ID NO: 2209432 - RNA, 22 nt, Human
gggggagucugaagcagaugca

SEQ ID NO: 2209433 - RNA, 17 nt, Human
gggggagucugaagcag

SEQ ID NO: 2209434 - RNA, 13 nt, Human
gggggaguggaau

SEQ ID NO: 2209435 - RNA, 12 nt, Human
gggggauaugaa

SEQ ID NO: 2209436 - RNA, 22 nt, Human
gggggagccccuucugcucagc

SEQ ID NO: 2209437 - RNA, 23 nt, Human
gggggacagggcuggcccagccc

SEQ ID NO: 2209438 - RNA, 18 nt, Human
ggggugcugggccccugc

SEQ ID NO: 2209439 - RNA, 12 nt, Human
gggguggccucc

SEQ ID NO: 2209440 - RNA, 12 nt, Human
gggucugaggaa

SEQ ID NO: 2209441 - RNA, 21 nt, Human
gggucugaggaauccagaccc

SEQ ID NO: 2209442 - RNA, 20 nt, Human
gggucucccucuccugccua

SEQ ID NO: 2209443 - RNA, 15 nt, Human
gggucucuagugcug

SEQ ID NO: 2209444 - RNA, 20 nt, Human
gggucucuagugcugugaaa

SEQ ID NO: 2209445 - RNA, 12 nt, Human
gggucucugcug

SEQ ID NO: 2209446 - RNA, 13 nt, Human
gggucucugcugc

SEQ ID NO: 2209447 - RNA, 14 nt, Human
gggucucugcugcc

SEQ ID NO: 2209448 - RNA, 15 nt, Human
gggucucugcugccg

SEQ ID NO: 2209449 - RNA, 18 nt, Human
gggucucugcugccgccc

SEQ ID NO: 2209450 - RNA, 20 nt, Human
gggucuggaguugaucugga

SEQ ID NO: 2209451 - RNA, 22 nt, Human
gggucugcucuuucucugccag

SEQ ID NO: 2209452 - RNA, 20 nt, Human
gggucugcucuuucucugcc

SEQ ID NO: 2209453 - RNA, 21 nt, Human
gggucugcucuuucucugcca

SEQ ID NO: 2209454 - RNA, 21 nt, Human
gggucugagucauggccgggu

SEQ ID NO: 2209455 - RNA, 20 nt, Human
gggucugccaccauccugcu

SEQ ID NO: 2209456 - RNA, 19 nt, Human
gggucugcucuuucucugc

SEQ ID NO: 2209457 - RNA, 22 nt, Human
gggucuggcagccucccaucca

SEQ ID NO: 2209458 - RNA, 22 nt, Human
gggucuggaguugaucuggaac

SEQ ID NO: 2209459 - RNA, 15 nt, Human
gggucuggcugagcu

SEQ ID NO: 2209460 - RNA, 13 nt, Human
gggucuguaaaau

SEQ ID NO: 2209461 - RNA, 14 nt, Human
gggucuguaaaauc

SEQ ID NO: 2209462 - RNA, 21 nt, Human
gggucuggucuccucagccuc

SEQ ID NO: 2209463 - RNA, 13 nt, Human
gggguuggcuggg

SEQ ID NO: 2209464 - RNA, 15 nt, Human
gggguuaucucugug

SEQ ID NO: 2209465 - RNA, 21 nt, Human
gggguugggauugggggcugg

SEQ ID NO: 2209466 - RNA, 22 nt, Human
gggguugggauugggggcuggu

SEQ ID NO: 2209467 - RNA, 17 nt, Human
gggguugugaggccugg

SEQ ID NO: 2209468 - RNA, 15 nt, Human
gggguuguguuguca

SEQ ID NO: 2209469 - RNA, 21 nt, Human
gggguguguuccaacugcccc

SEQ ID NO: 2209470 - RNA, 16 nt, Human
gggguggggucaugcc

SEQ ID NO: 2209471 - RNA, 19 nt, Human
gggguguggcuccuuccca

SEQ ID NO: 2209472 - RNA, 14 nt, Human
ggguaaggugccuu

SEQ ID NO: 2209473 - RNA, 13 nt, Human
ggguaaggugccu

SEQ ID NO: 2209474 - RNA, 13 nt, Human
ggguaaacugugg

SEQ ID NO: 2209475 - RNA, 22 nt, Human
ggguaaaauuccuuagcuuaga

SEQ ID NO: 2209476 - RNA, 23 nt, Human
gggguuuucgaagcucagcccac

SEQ ID NO: 2209477 - RNA, 19 nt, Human
gggucucccucuccugccu

SEQ ID NO: 2209478 - RNA, 18 nt, Human
gggucucccucuccugcc

SEQ ID NO: 2209479 - RNA, 16 nt, Human
gggucucccucuccug

SEQ ID NO: 2209480 - RNA, 15 nt, Human
gggucucccucuccu

SEQ ID NO: 2209481 - RNA, 15 nt, Human
gggucucccuggagu

SEQ ID NO: 2209482 - RNA, 19 nt, Human
gggucuccaggaggagacu

SEQ ID NO: 2209483 - RNA, 18 nt, Human
gggucuccaggaggagac

SEQ ID NO: 2209484 - RNA, 21 nt, Human
ggguaauaaacuuagaauaaa

SEQ ID NO: 2209485 - RNA, 14 nt, Human
gggucucacucugu

SEQ ID NO: 2209486 - RNA, 17 nt, Human
ggguaagugagagaggg

SEQ ID NO: 2209487 - RNA, 21 nt, Human
ggguuggagcaguagcuggag

SEQ ID NO: 2209488 - RNA, 20 nt, Human
ggguugccacaggccucccu

SEQ ID NO: 2209489 - RNA, 18 nt, Human
ggguugccacaggccucc

SEQ ID NO: 2209490 - RNA, 21 nt, Human
ggguugagcagggauccuggu

SEQ ID NO: 2209491 - RNA, 19 nt, Human
ggguugccacaggccuccc

SEQ ID NO: 2209492 - RNA, 12 nt, Human
ggguugaaaauu

SEQ ID NO: 2209493 - RNA, 23 nt, Human
ggguugaaaauucaaaaaguguu

SEQ ID NO: 2209494 - RNA, 12 nt, Human
ggguugagggga

SEQ ID NO: 2209495 - RNA, 19 nt, Human
ggguucuuucuuccucugc

SEQ ID NO: 2209496 - RNA, 18 nt, Human
ggguucguggaaagggug

SEQ ID NO: 2209497 - RNA, 16 nt, Human
ggguucuuuggaagga

SEQ ID NO: 2209498 - RNA, 19 nt, Human
ggguucuuuggaaggagug

SEQ ID NO: 2209499 - RNA, 17 nt, Human
ggguucuuucuuccucu

SEQ ID NO: 2209500 - RNA, 16 nt, Human
ggguucuuucuuccuc

SEQ ID NO: 2209501 - RNA, 17 nt, Human
ggguucauuauuggaau

SEQ ID NO: 2209502 - RNA, 13 nt, Human
ggguucauuauug

SEQ ID NO: 2209503 - RNA, 22 nt, Human
ggguucauaggucacuggcucu

SEQ ID NO: 2209504 - RNA, 22 nt, Human
ggguucagccccuccucugcca

SEQ ID NO: 2209505 - RNA, 19 nt, Human
ggguucauaggucacuggc

SEQ ID NO: 2209506 - RNA, 20 nt, Human
ggguucauaggucacuggcu

SEQ ID NO: 2209507 - RNA, 21 nt, Human
ggguucauaggucacuggcuc

SEQ ID NO: 2209508 - RNA, 19 nt, Human
ggguuccuuccucugagcc

SEQ ID NO: 2209509 - RNA, 11 nt, Human
ggguuccugca

SEQ ID NO: 2209510 - RNA, 14 nt, Human
ggguuccucuuccc

SEQ ID NO: 2209511 - RNA, 21 nt, Human
ggguuccuuccucugagccuu

SEQ ID NO: 2209512 - RNA, 20 nt, Human
ggguuccuuccucugagccu

SEQ ID NO: 2209513 - RNA, 12 nt, Human
ggguucuaccca

SEQ ID NO: 2209514 - RNA, 20 nt, Human
ggguucaccugggcugaggc

SEQ ID NO: 2209515 - RNA, 13 nt, Human
ggguuaucucugu

SEQ ID NO: 2209516 - RNA, 14 nt, Human
ggguuaugaauauu

SEQ ID NO: 2209517 - RNA, 23 nt, Human
ggguucaagcgauucuucugcuu

SEQ ID NO: 2209518 - RNA, 13 nt, Human
ggguucaggggac

SEQ ID NO: 2209519 - RNA, 21 nt, Human
ggguucagccccuccucugcc

SEQ ID NO: 2209520 - RNA, 20 nt, Human
ggguucagccccuccucugc

SEQ ID NO: 2209521 - RNA, 19 nt, Human
ggguucagccccuccucug

SEQ ID NO: 2209522 - RNA, 17 nt, Human
ggguucagccccuccuc

SEQ ID NO: 2209523 - RNA, 16 nt, Human
ggguucagccccuccu

SEQ ID NO: 2209524 - RNA, 13 nt, Human
ggguucagccccu

SEQ ID NO: 2209525 - RNA, 19 nt, Human
ggguucagagacucagggc

SEQ ID NO: 2209526 - RNA, 20 nt, Human
ggguucagaaaugcugccug

SEQ ID NO: 2209527 - RNA, 21 nt, Human
ggguucagaaaugcugccugc

SEQ ID NO: 2209528 - RNA, 16 nt, Human
ggguucaaaaugucug

SEQ ID NO: 2209529 - RNA, 19 nt, Human
ggguucagaaaugcugccu

SEQ ID NO: 2209530 - RNA, 22 nt, Human
ggguguguguuugugugagaga

SEQ ID NO: 2209531 - RNA, 14 nt, Human
ggguguguguuugu

SEQ ID NO: 2209532 - RNA, 17 nt, Human
gggugcugggccccugc

SEQ ID NO: 2209533 - RNA, 22 nt, Human
ggguucaagcgauucuucugcu

SEQ ID NO: 2209534 - RNA, 22 nt, Human
ggguuaagaaaagagauauuuu

SEQ ID NO: 2209535 - RNA, 18 nt, Human
gggugcugggaggaggga

SEQ ID NO: 2209536 - RNA, 16 nt, Human
ggguuaagaagacuuu

SEQ ID NO: 2209537 - RNA, 17 nt, Human
gggugaagugaagacaa

SEQ ID NO: 2209538 - RNA, 14 nt, Human
gggugaagggagag

SEQ ID NO: 2209539 - RNA, 13 nt, Human
gggugaagggaga

SEQ ID NO: 2209540 - RNA, 23 nt, Human
gggugaauaauaaaaguauauau

SEQ ID NO: 2209541 - RNA, 13 nt, Human
gggugacaagaua

SEQ ID NO: 2209542 - RNA, 21 nt, Human
gggugacaagauagagagcua

SEQ ID NO: 2209543 - RNA, 19 nt, Human
gggugacagagcaagugag

SEQ ID NO: 2209544 - RNA, 20 nt, Human
gggucuucagggggccaggu

SEQ ID NO: 2209545 - RNA, 21 nt, Human
gggucuguaaaaucuuucuuu

SEQ ID NO: 2209546 - RNA, 15 nt, Human
gggucugugucucuu

SEQ ID NO: 2209547 - RNA, 15 nt, Human
gggucuguaaaaucu

SEQ ID NO: 2209548 - RNA, 16 nt, Human
gggucuguaaaaucuu

SEQ ID NO: 2209549 - RNA, 17 nt, Human
gggucuguaaaaucuuu

SEQ ID NO: 2209550 - RNA, 20 nt, Human
gggucuguaaaaucuuucuu

SEQ ID NO: 2209551 - RNA, 19 nt, Human
gggugaagagaaccgagca

SEQ ID NO: 2209552 - RNA, 20 nt, Human
gggugaacaaagcagccacg

SEQ ID NO: 2209553 - RNA, 21 nt, Human
gggucuuuucaucugggaaag

SEQ ID NO: 2209554 - RNA, 23 nt, Human
gggucuucccuaccucaggcagg

SEQ ID NO: 2209555 - RNA, 20 nt, Human
gggucuugguuccagccugc

SEQ ID NO: 2209556 - RNA, 12 nt, Human
gggugccgccug

SEQ ID NO: 2209557 - RNA, 15 nt, Human
gggugcccccuccuc

SEQ ID NO: 2209558 - RNA, 14 nt, Human
gggugccgccugcc

SEQ ID NO: 2209559 - RNA, 21 nt, Human
gggugccccccuugccagaca

SEQ ID NO: 2209560 - RNA, 18 nt, Human
gggugcccaagcucagaa

SEQ ID NO: 2209561 - RNA, 12 nt, Human
gggugcccccuc

SEQ ID NO: 2209562 - RNA, 23 nt, Human
gggugcaguaucaugcccugugc

SEQ ID NO: 2209563 - RNA, 19 nt, Human
gggugcuggcugcccagac

SEQ ID NO: 2209564 - RNA, 15 nt, Human
gggugcugggaggag

SEQ ID NO: 2209565 - RNA, 23 nt, Human
gggugcugcuucccucugccugu

SEQ ID NO: 2209566 - RNA, 21 nt, Human
gggugcugcuucccucugccu

SEQ ID NO: 2209567 - RNA, 16 nt, Human
gggugcucccuaccac

SEQ ID NO: 2209568 - RNA, 19 nt, Human
gggugcgaccccaucugcc

SEQ ID NO: 2209569 - RNA, 21 nt, Human
gggugcgaccccaucugccca

SEQ ID NO: 2209570 - RNA, 22 nt, Human
gggugcgaccccaucugcccag

SEQ ID NO: 2209571 - RNA, 15 nt, Human
gggugaggaccacuc

SEQ ID NO: 2209572 - RNA, 20 nt, Human
gggugagaugcuggagaaga

SEQ ID NO: 2209573 - RNA, 15 nt, Human
gggugagaugcugga

SEQ ID NO: 2209574 - RNA, 18 nt, Human
gggugagaugcuggagaa

SEQ ID NO: 2209575 - RNA, 17 nt, Human
gggugagaacaaccaaa

SEQ ID NO: 2209576 - RNA, 18 nt, Human
gggugaggaccacuccug

SEQ ID NO: 2209577 - RNA, 19 nt, Human
gggugaguccauucuccca

SEQ ID NO: 2209578 - RNA, 17 nt, Human
gggugagggucccaugu

SEQ ID NO: 2209579 - RNA, 15 nt, Human
gggugaggagcuggg

SEQ ID NO: 2209580 - RNA, 14 nt, Human
gggugaggagcugg

SEQ ID NO: 2209581 - RNA, 18 nt, Human
gggugauauggacagcag

SEQ ID NO: 2209582 - RNA, 16 nt, Human
gggugauuucagagag

SEQ ID NO: 2209583 - RNA, 16 nt, Human
gggugaugccagguuc

SEQ ID NO: 2209584 - RNA, 22 nt, Human
gggugauuucagagagggcaga

SEQ ID NO: 2209585 - RNA, 16 nt, Human
gguacccaauucaauu

SEQ ID NO: 2209586 - RNA, 15 nt, Human
gguaccagcugcgcu

SEQ ID NO: 2209587 - RNA, 20 nt, Human
gguaccaggucuccuccacc

SEQ ID NO: 2209588 - RNA, 12 nt, Human
gguaccagcugc

SEQ ID NO: 2209589 - RNA, 14 nt, Human
gguaccagcugcgc

SEQ ID NO: 2209590 - RNA, 11 nt, Human
gguacccacug

SEQ ID NO: 2209591 - RNA, 16 nt, Human
gguacuucuugaaggu

SEQ ID NO: 2209592 - RNA, 15 nt, Human
gguacuucuugaagg

SEQ ID NO: 2209593 - RNA, 13 nt, Human
gguacccacugcu

SEQ ID NO: 2209594 - RNA, 22 nt, Human
gguagaaauaucugaaaaugua

SEQ ID NO: 2209595 - RNA, 19 nt, Human
gguacuucuugaaggugcu

SEQ ID NO: 2209596 - RNA, 16 nt, Human
gguacuugucauuucg

SEQ ID NO: 2209597 - RNA, 16 nt, Human
gguacuuguggacaca

SEQ ID NO: 2209598 - RNA, 17 nt, Human
gguacuuguggacacag

SEQ ID NO: 2209599 - RNA, 11 nt, Human
gguagaacaca

SEQ ID NO: 2209600 - RNA, 19 nt, Human
gguagagauucauuauuuu

SEQ ID NO: 2209601 - RNA, 23 nt, Human
gguagaguuugaaggaggugagg

SEQ ID NO: 2209602 - RNA, 17 nt, Human
gguagaggaugaggaaa

SEQ ID NO: 2209603 - RNA, 15 nt, Human
gguagagcugaucca

SEQ ID NO: 2209604 - RNA, 17 nt, Human
gguagagcugauccaga

SEQ ID NO: 2209605 - RNA, 21 nt, Human
gguagagcugauccagagcac

SEQ ID NO: 2209606 - RNA, 23 nt, Human
gguagagcugauccagagcacag

SEQ ID NO: 2209607 - RNA, 23 nt, Human
gguagaaauaucugaaaauguau

SEQ ID NO: 2209608 - RNA, 22 nt, Human
gguagaagcccuucuaccuucc

SEQ ID NO: 2209609 - RNA, 18 nt, Human
gguagaucacgagaucaa

SEQ ID NO: 2209610 - RNA, 12 nt, Human
gguagauguuca

SEQ ID NO: 2209611 - RNA, 14 nt, Human
gguagauguucaga

SEQ ID NO: 2209612 - RNA, 16 nt, Human
gguagccagcacacag

SEQ ID NO: 2209613 - RNA, 13 nt, Human
gguagccagcaca

SEQ ID NO: 2209614 - RNA, 12 nt, Human
gguagcagcugg

SEQ ID NO: 2209615 - RNA, 13 nt, Human
gguagcagcugga

SEQ ID NO: 2209616 - RNA, 14 nt, Human
gguagcagcuggac

SEQ ID NO: 2209617 - RNA, 14 nt, Human
gguauuuauaauau

SEQ ID NO: 2209618 - RNA, 23 nt, Human
gguauuguauuuauucaauaaag

SEQ ID NO: 2209619 - RNA, 20 nt, Human
gguauuguauuuauucaaua

SEQ ID NO: 2209620 - RNA, 22 nt, Human
gguauuguauuuauucaauaaa

SEQ ID NO: 2209621 - RNA, 16 nt, Human
gguagccaucauggau

SEQ ID NO: 2209622 - RNA, 21 nt, Human
gguagccagcacacagggcag

SEQ ID NO: 2209623 - RNA, 19 nt, Human
gguauuguauuuauucaau

SEQ ID NO: 2209624 - RNA, 14 nt, Human
gguagccaggggga

SEQ ID NO: 2209625 - RNA, 12 nt, Human
gguagccauccc

SEQ ID NO: 2209626 - RNA, 22 nt, Human
ggucaggagaggggcagaacag

SEQ ID NO: 2209627 - RNA, 22 nt, Human
ggucagcuugcugcccuaggcu

SEQ ID NO: 2209628 - RNA, 20 nt, Human
ggucagagacugcuguguuu

SEQ ID NO: 2209629 - RNA, 21 nt, Human
ggucaggaguuagaggccagc

SEQ ID NO: 2209630 - RNA, 22 nt, Human
ggucaggaaggaugagcauuua

SEQ ID NO: 2209631 - RNA, 21 nt, Human
ggucaggaguuccuaaccagc

SEQ ID NO: 2209632 - RNA, 13 nt, Human
ggucaggcagggu

SEQ ID NO: 2209633 - RNA, 17 nt, Human
ggucacuggcucuccaa

SEQ ID NO: 2209634 - RNA, 11 nt, Human
ggucagagccu

SEQ ID NO: 2209635 - RNA, 16 nt, Human
ggucaggccacggcag

SEQ ID NO: 2209636 - RNA, 22 nt, Human
ggucaggaguuagaggccagcc

SEQ ID NO: 2209637 - RNA, 17 nt, Human
ggucagggaccaaggac

SEQ ID NO: 2209638 - RNA, 19 nt, Human
ggucagguguucaagacca

SEQ ID NO: 2209639 - RNA, 13 nt, Human
ggucaggcuccau

SEQ ID NO: 2209640 - RNA, 15 nt, Human
ggucccaccccacac

SEQ ID NO: 2209641 - RNA, 16 nt, Human
ggucccaccccacaca

SEQ ID NO: 2209642 - RNA, 15 nt, Human
ggucacugccaugga

SEQ ID NO: 2209643 - RNA, 12 nt, Human
ggucacugcugu

SEQ ID NO: 2209644 - RNA, 13 nt, Human
ggucacugcuguc

SEQ ID NO: 2209645 - RNA, 14 nt, Human
ggucacugcuguca

SEQ ID NO: 2209646 - RNA, 13 nt, Human
ggucacuggaaag

SEQ ID NO: 2209647 - RNA, 15 nt, Human
ggucacuggaaaggg

SEQ ID NO: 2209648 - RNA, 13 nt, Human
ggucacuggaacu

SEQ ID NO: 2209649 - RNA, 13 nt, Human
ggucacuggcucu

SEQ ID NO: 2209650 - RNA, 16 nt, Human
ggucacuggcucucca

SEQ ID NO: 2209651 - RNA, 18 nt, Human
ggucacuggcucuccaag

SEQ ID NO: 2209652 - RNA, 13 nt, Human
ggucacuccuggg

SEQ ID NO: 2209653 - RNA, 15 nt, Human
ggucaccaugaaacu

SEQ ID NO: 2209654 - RNA, 16 nt, Human
ggucaccagcuccucc

SEQ ID NO: 2209655 - RNA, 17 nt, Human
ggucacauucaggaaga

SEQ ID NO: 2209656 - RNA, 21 nt, Human
ggucacauucaggaagaugaa

SEQ ID NO: 2209657 - RNA, 14 nt, Human
ggucaccaugaaac

SEQ ID NO: 2209658 - RNA, 21 nt, Human
ggucacagcggagguguggag

SEQ ID NO: 2209659 - RNA, 23 nt, Human
ggucaacaucuuuuacauucugc

SEQ ID NO: 2209660 - RNA, 19 nt, Human
ggucaacauggugaaaccc

SEQ ID NO: 2209661 - RNA, 16 nt, Human
ggucacaggacucugc

SEQ ID NO: 2209662 - RNA, 18 nt, Human
ggucacaggacucugccu

SEQ ID NO: 2209663 - RNA, 20 nt, Human
ggucaacagagaaggcagga

SEQ ID NO: 2209664 - RNA, 14 nt, Human
ggucaacagagaag

SEQ ID NO: 2209665 - RNA, 18 nt, Human
ggucaacagcuaugcugg

SEQ ID NO: 2209666 - RNA, 20 nt, Human
gguauuuucccccuuuucug

SEQ ID NO: 2209667 - RNA, 22 nt, Human
ggucaaaccgcacucacccaug

SEQ ID NO: 2209668 - RNA, 22 nt, Human
gguauuuuaggcagggauuuga

SEQ ID NO: 2209669 - RNA, 18 nt, Human
gguauuuuugcccugagu

SEQ ID NO: 2209670 - RNA, 20 nt, Human
gguggugcugggacugagcc

SEQ ID NO: 2209671 - RNA, 22 nt, Human
gguggucuguuggcaggcuggc

SEQ ID NO: 2209672 - RNA, 16 nt, Human
gguggucuguuggcag

SEQ ID NO: 2209673 - RNA, 21 nt, Human
gguggucuguuggcaggcugg

SEQ ID NO: 2209674 - RNA, 16 nt, Human
gguggugaccucugcc

SEQ ID NO: 2209675 - RNA, 22 nt, Human
gguggucugcucgggcccaggc

SEQ ID NO: 2209676 - RNA, 23 nt, Human
gguggugcugggacugagccagu

SEQ ID NO: 2209677 - RNA, 13 nt, Human
ggugguggagcca

SEQ ID NO: 2209678 - RNA, 14 nt, Human
ggugguggaucugu

SEQ ID NO: 2209679 - RNA, 20 nt, Human
gguggugggaaccaugaaga

SEQ ID NO: 2209680 - RNA, 21 nt, Human
ggugguggaucuguccaagga

SEQ ID NO: 2209681 - RNA, 17 nt, Human
ggugguggcacugagcc

SEQ ID NO: 2209682 - RNA, 13 nt, Human
ggugguggggagg

SEQ ID NO: 2209683 - RNA, 14 nt, Human
ggugguggggaggg

SEQ ID NO: 2209684 - RNA, 18 nt, Human
gguggucugcaggcaggg

SEQ ID NO: 2209685 - RNA, 17 nt, Human
gguggucugcaggcagg

SEQ ID NO: 2209686 - RNA, 16 nt, Human
gguggucugcaggcag

SEQ ID NO: 2209687 - RNA, 19 nt, Human
gguggucugaauguucuga

SEQ ID NO: 2209688 - RNA, 13 nt, Human
gguggucugcucg

SEQ ID NO: 2209689 - RNA, 14 nt, Human
gguggucugcucgg

SEQ ID NO: 2209690 - RNA, 19 nt, Human
gguggucugcucgggccca

SEQ ID NO: 2209691 - RNA, 20 nt, Human
gguggucugcucgggcccag

SEQ ID NO: 2209692 - RNA, 18 nt, Human
gguggucugaauguucug

SEQ ID NO: 2209693 - RNA, 15 nt, Human
gguggucugaauguu

SEQ ID NO: 2209694 - RNA, 17 nt, Human
ggugguccugagaccug

SEQ ID NO: 2209695 - RNA, 18 nt, Human
ggugguccugagaccuga

SEQ ID NO: 2209696 - RNA, 19 nt, Human
ggugguccugacucaacau

SEQ ID NO: 2209697 - RNA, 14 nt, Human
gguggucaggcgua

SEQ ID NO: 2209698 - RNA, 14 nt, Human
gguggugaccucug

SEQ ID NO: 2209699 - RNA, 15 nt, Human
gguggugaccucugc

SEQ ID NO: 2209700 - RNA, 23 nt, Human
gguggcugacccagucccugggg

SEQ ID NO: 2209701 - RNA, 22 nt, Human
gguggcugacccagucccuggg

SEQ ID NO: 2209702 - RNA, 21 nt, Human
gguggcugacccagucccugg

SEQ ID NO: 2209703 - RNA, 19 nt, Human
gguggcugacccagucccu

SEQ ID NO: 2209704 - RNA, 22 nt, Human
gguggcuggagacgggugggcg

SEQ ID NO: 2209705 - RNA, 23 nt, Human
gguggggucaugcccuccucucc

SEQ ID NO: 2209706 - RNA, 14 nt, Human
ggugggguccugga

SEQ ID NO: 2209707 - RNA, 23 nt, Human
ggugggguccuggagcagaccac

SEQ ID NO: 2209708 - RNA, 18 nt, Human
gguggcugacccaguccc

SEQ ID NO: 2209709 - RNA, 15 nt, Human
gguggcugacccagu

SEQ ID NO: 2209710 - RNA, 13 nt, Human
gguggcugaccca

SEQ ID NO: 2209711 - RNA, 19 nt, Human
gguggcucacgccuguaau

SEQ ID NO: 2209712 - RNA, 17 nt, Human
gguggcucaugccugua

SEQ ID NO: 2209713 - RNA, 20 nt, Human
gguggcucccggagggcccu

SEQ ID NO: 2209714 - RNA, 17 nt, Human
gguggcuagucagagag

SEQ ID NO: 2209715 - RNA, 16 nt, Human
gguggcuagucagaga

SEQ ID NO: 2209716 - RNA, 15 nt, Human
gguggcuagucagag

SEQ ID NO: 2209717 - RNA, 23 nt, Human
gguggcuagucaagcuccuccuc

SEQ ID NO: 2209718 - RNA, 22 nt, Human
gguggcuagucaagcuccuccu

SEQ ID NO: 2209719 - RNA, 21 nt, Human
gguggcuagucaagcuccucc

SEQ ID NO: 2209720 - RNA, 20 nt, Human
gguggguccaugggcagagc

SEQ ID NO: 2209721 - RNA, 17 nt, Human
gguggguccaugggcag

SEQ ID NO: 2209722 - RNA, 20 nt, Human
gguggguccaggggccccuc

SEQ ID NO: 2209723 - RNA, 14 nt, Human
gguggguccauggg

SEQ ID NO: 2209724 - RNA, 10 nt, Human
ggugggucca

SEQ ID NO: 2209725 - RNA, 14 nt, Human
gguggguauaaaag

SEQ ID NO: 2209726 - RNA, 14 nt, Human
ggugguaugugugu

SEQ ID NO: 2209727 - RNA, 22 nt, Human
ggugguaccaggucuccuccac

SEQ ID NO: 2209728 - RNA, 19 nt, Human
gguggucacuggaacucag

SEQ ID NO: 2209729 - RNA, 16 nt, Human
ggugguacccucugga

SEQ ID NO: 2209730 - RNA, 15 nt, Human
ggugguaccaggucu

SEQ ID NO: 2209731 - RNA, 16 nt, Human
ggugguaccaggucuc

SEQ ID NO: 2209732 - RNA, 16 nt, Human
gguggguuuucuuccc

SEQ ID NO: 2209733 - RNA, 19 nt, Human
gguggguucuuuggaagga

SEQ ID NO: 2209734 - RNA, 17 nt, Human
gguggguuuucuuccca

SEQ ID NO: 2209735 - RNA, 14 nt, Human
ggugguaacccugg

SEQ ID NO: 2209736 - RNA, 16 nt, Human
ggugggugguggggag

SEQ ID NO: 2209737 - RNA, 14 nt, Human
gguggguggugggg

SEQ ID NO: 2209738 - RNA, 14 nt, Human
gguguaauaagaca

SEQ ID NO: 2209739 - RNA, 23 nt, Human
ggugguugcuguuuuccucccuu

SEQ ID NO: 2209740 - RNA, 21 nt, Human
ggugguugcuguuuuccuccc

SEQ ID NO: 2209741 - RNA, 21 nt, Human
gguggugucuccaacccccca

SEQ ID NO: 2209742 - RNA, 18 nt, Human
gguguaauaagacauaac

SEQ ID NO: 2209743 - RNA, 15 nt, Human
gguguaauaagacau

SEQ ID NO: 2209744 - RNA, 16 nt, Human
gguguaauaagacaua

SEQ ID NO: 2209745 - RNA, 18 nt, Human
ggugguuuucuguucuuu

SEQ ID NO: 2209746 - RNA, 15 nt, Human
ggugguuuucuguuc

SEQ ID NO: 2209747 - RNA, 21 nt, Human
ggugguuauggagaggguguc

SEQ ID NO: 2209748 - RNA, 23 nt, Human
ggugguucacucuuggagccugc

SEQ ID NO: 2209749 - RNA, 22 nt, Human
ggugguucacucuuggagccug

SEQ ID NO: 2209750 - RNA, 18 nt, Human
ggugguuucagaaaugug

SEQ ID NO: 2209751 - RNA, 17 nt, Human
ggugguuucagaaaugu

SEQ ID NO: 2209752 - RNA, 19 nt, Human
ggugucaccugaagacuca

SEQ ID NO: 2209753 - RNA, 15 nt, Human
ggugucacuuacugu

SEQ ID NO: 2209754 - RNA, 23 nt, Human
ggugucacuuacuguuucuguca

SEQ ID NO: 2209755 - RNA, 17 nt, Human
ggugucacuuacuguuu

SEQ ID NO: 2209756 - RNA, 19 nt, Human
ggugucacuuacuguuucu

SEQ ID NO: 2209757 - RNA, 13 nt, Human
ggugucaggcugc

SEQ ID NO: 2209758 - RNA, 17 nt, Human
ggugucaggcugcuggc

SEQ ID NO: 2209759 - RNA, 20 nt, Human
ggugucaggcugcuggcgcc

SEQ ID NO: 2209760 - RNA, 23 nt, Human
gguguauuuauuuuccuccccag

SEQ ID NO: 2209761 - RNA, 22 nt, Human
gguguauuuauuuuccucccca

SEQ ID NO: 2209762 - RNA, 17 nt, Human
gguguauuuauuuuccu

SEQ ID NO: 2209763 - RNA, 19 nt, Human
ggugucaagagggucugag

SEQ ID NO: 2209764 - RNA, 17 nt, Human
ggugucaagagggucug

SEQ ID NO: 2209765 - RNA, 16 nt, Human
gguguaugguucugug

SEQ ID NO: 2209766 - RNA, 11 nt, Human
gguuaaaacug

SEQ ID NO: 2209767 - RNA, 13 nt, Human
gguuaaaacuguc

SEQ ID NO: 2209768 - RNA, 20 nt, Human
gguguccugaccacccuccc

SEQ ID NO: 2209769 - RNA, 17 nt, Human
gguguccugaccacccu

SEQ ID NO: 2209770 - RNA, 18 nt, Human
gguguccugaccacccuc

SEQ ID NO: 2209771 - RNA, 23 nt, Human
gguuaaaaaaaggcauuguuuga

SEQ ID NO: 2209772 - RNA, 17 nt, Human
gguguccuuucccucca

SEQ ID NO: 2209773 - RNA, 12 nt, Human
gguguccugacc

SEQ ID NO: 2209774 - RNA, 13 nt, Human
gguguccugacca

SEQ ID NO: 2209775 - RNA, 14 nt, Human
gguguccugaccac

SEQ ID NO: 2209776 - RNA, 19 nt, Human
gguuacaacagauuuguga

SEQ ID NO: 2209777 - RNA, 21 nt, Human
gguuacaacagauuugugaac

SEQ ID NO: 2209778 - RNA, 13 nt, Human
gguuaauaaguuu

SEQ ID NO: 2209779 - RNA, 14 nt, Human
gguuacaacagauu

SEQ ID NO: 2209780 - RNA, 13 nt, Human
gguuacaacagau

SEQ ID NO: 2209781 - RNA, 21 nt, Human
gguuacccaguuagcucucaa

SEQ ID NO: 2209782 - RNA, 22 nt, Human
gguuaaggcugaggaaaggcca

SEQ ID NO: 2209783 - RNA, 16 nt, Human
gguuaagcccugaggg

SEQ ID NO: 2209784 - RNA, 15 nt, Human
gguuaaggcugagga

SEQ ID NO: 2209785 - RNA, 21 nt, Human
gguuaagcauuaccacucagg

SEQ ID NO: 2209786 - RNA, 17 nt, Human
gguuaaucuuuccugau

SEQ ID NO: 2209787 - RNA, 23 nt, Human
gguuaagucuguuuuaugacuuc

SEQ ID NO: 2209788 - RNA, 16 nt, Human
gguuaagucuguuuua

SEQ ID NO: 2209789 - RNA, 13 nt, Human
gguuaagucuguu

SEQ ID NO: 2209790 - RNA, 13 nt, Human
gguuauggagagg

SEQ ID NO: 2209791 - RNA, 14 nt, Human
gguuaucucugugu

SEQ ID NO: 2209792 - RNA, 18 nt, Human
gguuaucaaaaauuucau

SEQ ID NO: 2209793 - RNA, 17 nt, Human
gguuaucgaaauaacaa

SEQ ID NO: 2209794 - RNA, 16 nt, Human
gguuaggauuuaacag

SEQ ID NO: 2209795 - RNA, 14 nt, Human
gguuauaaaaguga

SEQ ID NO: 2209796 - RNA, 21 nt, Human
gguuauauuuuacuacugugg

SEQ ID NO: 2209797 - RNA, 22 nt, Human
gguuaguggauggaaggggcug

SEQ ID NO: 2209798 - RNA, 21 nt, Human
gguuaguggauggaaggggcu

SEQ ID NO: 2209799 - RNA, 15 nt, Human
gguuagggaggggua

SEQ ID NO: 2209800 - RNA, 13 nt, Human
gguuagggagggg

SEQ ID NO: 2209801 - RNA, 20 nt, Human
gguuaggaguucgagaccag

SEQ ID NO: 2209802 - RNA, 16 nt, Human
gguuagggaaaacauu

SEQ ID NO: 2209803 - RNA, 17 nt, Human
gguuaggcauuguggga

SEQ ID NO: 2209804 - RNA, 23 nt, Human
gguuacaaucauugcugaaaaug

SEQ ID NO: 2209805 - RNA, 16 nt, Human
gguuaccaagaagccu

SEQ ID NO: 2209806 - RNA, 23 nt, Human
gguuauuuuaguuucuguucugu

SEQ ID NO: 2209807 - RNA, 18 nt, Human
gguuauuuauuuaaaugu

SEQ ID NO: 2209808 - RNA, 24 nt, Human
gguuauuucucaacaaagcacagu

SEQ ID NO: 2209809 - RNA, 17 nt, Human
gguuauuuuaguuucug

SEQ ID NO: 2209810 - RNA, 19 nt, Human
gguuauuuuaguuucuguu

SEQ ID NO: 2209811 - RNA, 13 nt, Human
gguucaaagauau

SEQ ID NO: 2209812 - RNA, 20 nt, Human
gguuauugaaaauaugaugu

SEQ ID NO: 2209813 - RNA, 15 nt, Human
gguuaucugucccag

SEQ ID NO: 2209814 - RNA, 23 nt, Human
gguuaucgaaauaacaauguuaa

SEQ ID NO: 2209815 - RNA, 13 nt, Human
gguuaugaauauu

SEQ ID NO: 2209816 - RNA, 20 nt, Human
gguuauuuagggaacugcuu

SEQ ID NO: 2209817 - RNA, 14 nt, Human
gguuauuuauuuaa

SEQ ID NO: 2209818 - RNA, 13 nt, Human
gguuauuucucug

SEQ ID NO: 2209819 - RNA, 15 nt, Human
gguucacuaaagcag

SEQ ID NO: 2209820 - RNA, 20 nt, Human
gguucacgugcagcucaagg

SEQ ID NO: 2209821 - RNA, 22 nt, Human
gguucacgccuguaaucccagc

SEQ ID NO: 2209822 - RNA, 21 nt, Human
gguucacgccuguaaucccag

SEQ ID NO: 2209823 - RNA, 15 nt, Human
gguucaccagccucu

SEQ ID NO: 2209824 - RNA, 20 nt, Human
gguucacucuuggagccugc

SEQ ID NO: 2209825 - RNA, 19 nt, Human
gguucacucuuggagccug

SEQ ID NO: 2209826 - RNA, 14 nt, Human
gguucaccagccuc

SEQ ID NO: 2209827 - RNA, 13 nt, Human
gguucaccagccu

SEQ ID NO: 2209828 - RNA, 12 nt, Human
gguucaccagcc

SEQ ID NO: 2209829 - RNA, 22 nt, Human
gguucacaggcgaggccuggag

SEQ ID NO: 2209830 - RNA, 21 nt, Human
gguucaaagauauuuugcuuu

SEQ ID NO: 2209831 - RNA, 16 nt, Human
gguucuuagugucacu

SEQ ID NO: 2209832 - RNA, 18 nt, Human
gguucuuaguucucacug

SEQ ID NO: 2209833 - RNA, 13 nt, Human
gguucuucccuuu

SEQ ID NO: 2209834 - RNA, 23 nt, Human
gguucacucuuggagccugcaga

SEQ ID NO: 2209835 - RNA, 21 nt, Human
gguucacucuuggagccugca

SEQ ID NO: 2209836 - RNA, 14 nt, Human
gguucuuucuuccu

SEQ ID NO: 2209837 - RNA, 16 nt, Human
gguucuuucuuccucu

SEQ ID NO: 2209838 - RNA, 14 nt, Human
gguucuuguauuaa

SEQ ID NO: 2209839 - RNA, 17 nt, Human
gguucuugguagagauu

SEQ ID NO: 2209840 - RNA, 22 nt, Human
gguucuuguauuaagaaugaaa

SEQ ID NO: 2209841 - RNA, 19 nt, Human
gguugagguggaagcccuc

SEQ ID NO: 2209842 - RNA, 23 nt, Human
gguugagguccagcccuggcuga

SEQ ID NO: 2209843 - RNA, 17 nt, Human
gguugauaacuuugcuu

SEQ ID NO: 2209844 - RNA, 19 nt, Human
gguugauaacuuugcuugc

SEQ ID NO: 2209845 - RNA, 22 nt, Human
gguugauaguuuaccugaauaa

SEQ ID NO: 2209846 - RNA, 14 nt, Human
gguugaucacacuc

SEQ ID NO: 2209847 - RNA, 13 nt, Human
gguugagguuuca

SEQ ID NO: 2209848 - RNA, 19 nt, Human
gguugaggggcuccuggaa

SEQ ID NO: 2209849 - RNA, 21 nt, Human
gguugagguccagcccuggcu

SEQ ID NO: 2209850 - RNA, 18 nt, Human
gguugaggggcuccugga

SEQ ID NO: 2209851 - RNA, 11 nt, Human
gguugaggaaa

SEQ ID NO: 2209852 - RNA, 13 nt, Human
gguugagaaauga

SEQ ID NO: 2209853 - RNA, 16 nt, Human
gguugacuuucaggua

SEQ ID NO: 2209854 - RNA, 16 nt, Human
ggugagaugcagcugg

SEQ ID NO: 2209855 - RNA, 14 nt, Human
ggugagaugcugga

SEQ ID NO: 2209856 - RNA, 17 nt, Human
ggugagaugcuggagaa

SEQ ID NO: 2209857 - RNA, 21 nt, Human
ggugagaugcuggagaagaga

SEQ ID NO: 2209858 - RNA, 22 nt, Human
ggugagaugcuggagaagagag

SEQ ID NO: 2209859 - RNA, 23 nt, Human
ggugagaugcuggagaagagagg

SEQ ID NO: 2209860 - RNA, 16 nt, Human
ggugagaggggaacag

SEQ ID NO: 2209861 - RNA, 15 nt, Human
ggugagaagcagagg

SEQ ID NO: 2209862 - RNA, 12 nt, Human
ggugagagcugc

SEQ ID NO: 2209863 - RNA, 14 nt, Human
ggugcgaccccauc

SEQ ID NO: 2209864 - RNA, 23 nt, Human
ggugccuucuuauucucacucca

SEQ ID NO: 2209865 - RNA, 19 nt, Human
ggugccugugaggcagggg

SEQ ID NO: 2209866 - RNA, 18 nt, Human
ggugccugugaggcaggg

SEQ ID NO: 2209867 - RNA, 17 nt, Human
ggugccugugaggcagg

SEQ ID NO: 2209868 - RNA, 23 nt, Human
ggugccuggguggggcugcuccu

SEQ ID NO: 2209869 - RNA, 17 nt, Human
ggugccugucccacccc

SEQ ID NO: 2209870 - RNA, 22 nt, Human
ggugccuggguggggcugcucc

SEQ ID NO: 2209871 - RNA, 19 nt, Human
ggugccuggguggggcugc

SEQ ID NO: 2209872 - RNA, 13 nt, Human
ggugccuguccca

SEQ ID NO: 2209873 - RNA, 18 nt, Human
ggugccuggguggggcug

SEQ ID NO: 2209874 - RNA, 21 nt, Human
ggugccugauucggcugucuc

SEQ ID NO: 2209875 - RNA, 14 nt, Human
ggugccugaggucu

SEQ ID NO: 2209876 - RNA, 18 nt, Human
ggugccugauucggcugu

SEQ ID NO: 2209877 - RNA, 19 nt, Human
ggugccugagaggcaggca

SEQ ID NO: 2209878 - RNA, 18 nt, Human
ggugaggaccacuccugu

SEQ ID NO: 2209879 - RNA, 22 nt, Human
ggugagcccauggcccucccag

SEQ ID NO: 2209880 - RNA, 18 nt, Human
ggugagcagacugguggg

SEQ ID NO: 2209881 - RNA, 19 nt, Human
ggugagcagaaguggagcu

SEQ ID NO: 2209882 - RNA, 14 nt, Human
ggugagcaaccagu

SEQ ID NO: 2209883 - RNA, 23 nt, Human
ggugagcacggccaacaaagcug

SEQ ID NO: 2209884 - RNA, 15 nt, Human
ggugaggaccacucc

SEQ ID NO: 2209885 - RNA, 19 nt, Human
ggugagcccauggcccucc

SEQ ID NO: 2209886 - RNA, 21 nt, Human
ggugccugugaggcaggggcg

SEQ ID NO: 2209887 - RNA, 19 nt, Human
ggugcgaccccaucugccc

SEQ ID NO: 2209888 - RNA, 22 nt, Human
ggugcuacacccuuuuccagcu

SEQ ID NO: 2209889 - RNA, 21 nt, Human
ggugcgaccccaucugcccag

SEQ ID NO: 2209890 - RNA, 22 nt, Human
ggugcgaccccaucugcccagg

SEQ ID NO: 2209891 - RNA, 15 nt, Human
ggugcuacgccugca

SEQ ID NO: 2209892 - RNA, 23 nt, Human
ggugcuacacccuuuuccagcug

SEQ ID NO: 2209893 - RNA, 23 nt, Human
ggugcuacaaaaacacagcaagg

SEQ ID NO: 2209894 - RNA, 16 nt, Human
ggugcuaucuccccca

SEQ ID NO: 2209895 - RNA, 17 nt, Human
ggugcuaucucccccag

SEQ ID NO: 2209896 - RNA, 19 nt, Human
ggugcuaucucccccagcc

SEQ ID NO: 2209897 - RNA, 20 nt, Human
ggugcuaucucccccagccc

SEQ ID NO: 2209898 - RNA, 17 nt, Human
gguggccaugccucagc

SEQ ID NO: 2209899 - RNA, 20 nt, Human
gguggccaugccucagcccu

SEQ ID NO: 2209900 - RNA, 12 nt, Human
gguggccucggg

SEQ ID NO: 2209901 - RNA, 22 nt, Human
gguggccucgggacaccugccc

SEQ ID NO: 2209902 - RNA, 23 nt, Human
gguggccucccaacucaccccag

SEQ ID NO: 2209903 - RNA, 20 nt, Human
gguggcuagucaagcuccuc

SEQ ID NO: 2209904 - RNA, 19 nt, Human
gguggcgggcaccuauagu

SEQ ID NO: 2209905 - RNA, 21 nt, Human
gguggcgggcgccuguaaucc

SEQ ID NO: 2209906 - RNA, 21 nt, Human
gguggcgacucuauagacucu

SEQ ID NO: 2209907 - RNA, 23 nt, Human
gguggccucuccuuguggccugg

SEQ ID NO: 2209908 - RNA, 10 nt, Human
gguggccaug

SEQ ID NO: 2209909 - RNA, 23 nt, Human
gguggccacuccagaccccuggc

SEQ ID NO: 2209910 - RNA, 22 nt, Human
gguggccucccaacucacccca

SEQ ID NO: 2209911 - RNA, 17 nt, Human
gguggcaucccaguggc

SEQ ID NO: 2209912 - RNA, 20 nt, Human
gguggccacuccagaccccu

SEQ ID NO: 2209913 - RNA, 21 nt, Human
gguggccacuccagaccccug

SEQ ID NO: 2209914 - RNA, 22 nt, Human
gguggccacuccagaccccugg

SEQ ID NO: 2209915 - RNA, 13 nt, Human
ggugcugagaagc

SEQ ID NO: 2209916 - RNA, 21 nt, Human
ggugcugacuucaucucccac

SEQ ID NO: 2209917 - RNA, 15 nt, Human
ggugcugccauccag

SEQ ID NO: 2209918 - RNA, 17 nt, Human
ggugcuauaggcuggag

SEQ ID NO: 2209919 - RNA, 19 nt, Human
ggugcuauaggcuggagaa

SEQ ID NO: 2209920 - RNA, 21 nt, Human
ggugcuauaggcuggagaagc

SEQ ID NO: 2209921 - RNA, 20 nt, Human
ggugcugacggccagggaga

SEQ ID NO: 2209922 - RNA, 17 nt, Human
ggugcugacggccaggg

SEQ ID NO: 2209923 - RNA, 16 nt, Human
ggugcugacggccagg

SEQ ID NO: 2209924 - RNA, 15 nt, Human
ggugcugacggccag

SEQ ID NO: 2209925 - RNA, 21 nt, Human
ggugcugccauccagguucag

SEQ ID NO: 2209926 - RNA, 19 nt, Human
gguggcagugggagcugcc

SEQ ID NO: 2209927 - RNA, 22 nt, Human
gguggcagugggagcugccugu

SEQ ID NO: 2209928 - RNA, 15 nt, Human
gguggcauacgccug

SEQ ID NO: 2209929 - RNA, 13 nt, Human
gguggcaucccag

SEQ ID NO: 2209930 - RNA, 12 nt, Human
ggugacaguggc

SEQ ID NO: 2209931 - RNA, 22 nt, Human
ggucugcucgggcccaggccau

SEQ ID NO: 2209932 - RNA, 14 nt, Human
ggugacaugugaaa

SEQ ID NO: 2209933 - RNA, 19 nt, Human
ggucugcucuuucucugcc

SEQ ID NO: 2209934 - RNA, 20 nt, Human
ggucugcucuuucucugcca

SEQ ID NO: 2209935 - RNA, 21 nt, Human
ggugacagagugagacucugu

SEQ ID NO: 2209936 - RNA, 17 nt, Human
ggucugcucgggcccag

SEQ ID NO: 2209937 - RNA, 18 nt, Human
ggucugcucgggcccagg

SEQ ID NO: 2209938 - RNA, 19 nt, Human
ggucugcucgggcccaggc

SEQ ID NO: 2209939 - RNA, 16 nt, Human
ggucugcucuuucucu

SEQ ID NO: 2209940 - RNA, 18 nt, Human
ggucugcucuuucucugc

SEQ ID NO: 2209941 - RNA, 23 nt, Human
ggucugcaggcagggcugacucu

SEQ ID NO: 2209942 - RNA, 14 nt, Human
ggucugcaggcagg

SEQ ID NO: 2209943 - RNA, 12 nt, Human
ggucugccacca

SEQ ID NO: 2209944 - RNA, 13 nt, Human
ggucugcaggcag

SEQ ID NO: 2209945 - RNA, 20 nt, Human
ggucugcaagucagaggaug

SEQ ID NO: 2209946 - RNA, 17 nt, Human
ggucugcaagucagagg

SEQ ID NO: 2209947 - RNA, 19 nt, Human
ggucugcaagucagaggau

SEQ ID NO: 2209948 - RNA, 23 nt, Human
ggucugccucuucugggagggca

SEQ ID NO: 2209949 - RNA, 16 nt, Human
ggucugcucgggccca

SEQ ID NO: 2209950 - RNA, 14 nt, Human
ggucugacccacug

SEQ ID NO: 2209951 - RNA, 22 nt, Human
ggucugaauguucugacauuaa

SEQ ID NO: 2209952 - RNA, 20 nt, Human
ggucugagucauggccgggu

SEQ ID NO: 2209953 - RNA, 21 nt, Human
ggucugaauguucugacauua

SEQ ID NO: 2209954 - RNA, 17 nt, Human
ggucugaauguucugac

SEQ ID NO: 2209955 - RNA, 14 nt, Human
ggucugcaagucag

SEQ ID NO: 2209956 - RNA, 15 nt, Human
ggucugcaagucaga

SEQ ID NO: 2209957 - RNA, 16 nt, Human
ggucugcaagucagag

SEQ ID NO: 2209958 - RNA, 15 nt, Human
ggugaccuucuggga

SEQ ID NO: 2209959 - RNA, 18 nt, Human
ggugacgccugcccuccc

SEQ ID NO: 2209960 - RNA, 23 nt, Human
ggugacugcgaucuucagagcag

SEQ ID NO: 2209961 - RNA, 19 nt, Human
ggugacugggcccugccuc

SEQ ID NO: 2209962 - RNA, 12 nt, Human
ggugagaacucu

SEQ ID NO: 2209963 - RNA, 21 nt, Human
ggugaccucugccugaaguca

SEQ ID NO: 2209964 - RNA, 19 nt, Human
ggugaccuuccaagagccu

SEQ ID NO: 2209965 - RNA, 21 nt, Human
ggugaccuuccaagagccuga

SEQ ID NO: 2209966 - RNA, 20 nt, Human
ggugaccuuccaagagccug

SEQ ID NO: 2209967 - RNA, 22 nt, Human
ggugaccagcaccaucucuccu

SEQ ID NO: 2209968 - RNA, 15 nt, Human
ggugacaugugaaac

SEQ ID NO: 2209969 - RNA, 18 nt, Human
ggugacaugugaaaccuu

SEQ ID NO: 2209970 - RNA, 21 nt, Human
ggugaccaaaauccccuucuc

SEQ ID NO: 2209971 - RNA, 17 nt, Human
ggucucaaacuccugac

SEQ ID NO: 2209972 - RNA, 15 nt, Human
ggucuauugucugua

SEQ ID NO: 2209973 - RNA, 17 nt, Human
ggucuauugucuguauu

SEQ ID NO: 2209974 - RNA, 18 nt, Human
ggucucacaguguugccc

SEQ ID NO: 2209975 - RNA, 23 nt, Human
ggucucaaacuccugggcucagg

SEQ ID NO: 2209976 - RNA, 21 nt, Human
ggucucaaacuccugggcuca

SEQ ID NO: 2209977 - RNA, 19 nt, Human
ggucuauugucuguauuug

SEQ ID NO: 2209978 - RNA, 12 nt, Human
ggucuauuucua

SEQ ID NO: 2209979 - RNA, 17 nt, Human
ggucccaccccacacac

SEQ ID NO: 2209980 - RNA, 14 nt, Human
ggucccaccccaca

SEQ ID NO: 2209981 - RNA, 20 nt, Human
ggucucacaguguugcccag

SEQ ID NO: 2209982 - RNA, 19 nt, Human
ggucucacaguguugccca

SEQ ID NO: 2209983 - RNA, 21 nt, Human
ggucucacaguguugcccagg

SEQ ID NO: 2209984 - RNA, 22 nt, Human
ggucucacucugucgcccaguc

SEQ ID NO: 2209985 - RNA, 23 nt, Human
ggucucacucugucgcccagucu

SEQ ID NO: 2209986 - RNA, 14 nt, Human
ggucugaauguucu

SEQ ID NO: 2209987 - RNA, 12 nt, Human
ggucugaauguu

SEQ ID NO: 2209988 - RNA, 11 nt, Human
ggucugaaugu

SEQ ID NO: 2209989 - RNA, 13 nt, Human
ggucugaaaugga

SEQ ID NO: 2209990 - RNA, 12 nt, Human
ggucugaaaugg

SEQ ID NO: 2209991 - RNA, 15 nt, Human
ggucucuugagggag

SEQ ID NO: 2209992 - RNA, 21 nt, Human
ggucucuugagggagcuuagc

SEQ ID NO: 2209993 - RNA, 20 nt, Human
ggucucuuacuuuccuuucc

SEQ ID NO: 2209994 - RNA, 19 nt, Human
ggucucugccggcucuuuc

SEQ ID NO: 2209995 - RNA, 12 nt, Human
ggucucugcugc

SEQ ID NO: 2209996 - RNA, 13 nt, Human
ggucucugcugcc

SEQ ID NO: 2209997 - RNA, 14 nt, Human
ggucucugcugccg

SEQ ID NO: 2209998 - RNA, 10 nt, Human
ggucucuggu

SEQ ID NO: 2209999 - RNA, 19 nt, Human
ggucucucucucucuacaa

SEQ ID NO: 2210000 - RNA, 18 nt, Human
ggucucuaggcuggggaa

SEQ ID NO: 2210001 - RNA, 15 nt, Human
ggucucccucuccug

SEQ ID NO: 2210002 - RNA, 22 nt, Human
ggucucgcugaugcugggcugg

SEQ ID NO: 2210003 - RNA, 14 nt, Human
ggucucccucuccu

SEQ ID NO: 2210004 - RNA, 16 nt, Human
ggucucccacguggga

SEQ ID NO: 2210005 - RNA, 18 nt, Human
ggucucaggcugguggga

SEQ ID NO: 2210006 - RNA, 20 nt, Human
ggucucagcagcgaccaccc

SEQ ID NO: 2210007 - RNA, 20 nt, Human
ggucucgcuuuguugcccag

SEQ ID NO: 2210008 - RNA, 19 nt, Human
ggucucgcuuuguugccca

SEQ ID NO: 2210009 - RNA, 21 nt, Human
ggucucgcuuuguugcccagg

SEQ ID NO: 2210010 - RNA, 23 nt, Human
ggucucgcugaugcugggcuggg

SEQ ID NO: 2210011 - RNA, 19 nt, Human
ggucucuagugcugugaaa

SEQ ID NO: 2210012 - RNA, 16 nt, Human
ggucucuagugcugug

SEQ ID NO: 2210013 - RNA, 15 nt, Human
ggucucuaggcuggg

SEQ ID NO: 2210014 - RNA, 16 nt, Human
ggucucuaggcugggg

SEQ ID NO: 2210015 - RNA, 17 nt, Human
ggucucuaggcugggga

SEQ ID NO: 2210016 - RNA, 19 nt, Human
gccuucggacaacucaguc

SEQ ID NO: 2210017 - RNA, 15 nt, Human
gccuugggcugcucc

SEQ ID NO: 2210018 - RNA, 14 nt, Human
gccuugggcugcuc

SEQ ID NO: 2210019 - RNA, 19 nt, Human
gccuucggccuccauccug

SEQ ID NO: 2210020 - RNA, 20 nt, Human
gccuuggcuguuggcaguga

SEQ ID NO: 2210021 - RNA, 22 nt, Human
gccuucgcuucuugccucugug

SEQ ID NO: 2210022 - RNA, 20 nt, Human
gccuucgcuucuugccucug

SEQ ID NO: 2210023 - RNA, 21 nt, Human
gccuucgcuucuugccucugu

SEQ ID NO: 2210024 - RNA, 22 nt, Human
gccuugggcugcuccucauggu

SEQ ID NO: 2210025 - RNA, 18 nt, Human
gccuuggggaauuuccuc

SEQ ID NO: 2210026 - RNA, 19 nt, Human
gccuuggggaauuuccucu

SEQ ID NO: 2210027 - RNA, 18 nt, Human
gccuugggcugcuccuca

SEQ ID NO: 2210028 - RNA, 16 nt, Human
gccuugggcugcuccu

SEQ ID NO: 2210029 - RNA, 18 nt, Human
gccuuggggcugaugcag

SEQ ID NO: 2210030 - RNA, 15 nt, Human
gccuuuaaaguauga

SEQ ID NO: 2210031 - RNA, 18 nt, Human
gccuuuaaaguaugaauc

SEQ ID NO: 2210032 - RNA, 17 nt, Human
gccuuuaaaucugugau

SEQ ID NO: 2210033 - RNA, 21 nt, Human
gccuuuaaaauuuuuuuagaa

SEQ ID NO: 2210034 - RNA, 21 nt, Human
gccuuuagugaucacagcagc

SEQ ID NO: 2210035 - RNA, 22 nt, Human
gccuuuagugaucacagcagcu

SEQ ID NO: 2210036 - RNA, 19 nt, Human
gccuuuagugaucacagca

SEQ ID NO: 2210037 - RNA, 19 nt, Human
gccuuuaaaucugugauga

SEQ ID NO: 2210038 - RNA, 23 nt, Human
gccuucccccucccagggccagg

SEQ ID NO: 2210039 - RNA, 18 nt, Human
gccuucccccucccaggg

SEQ ID NO: 2210040 - RNA, 17 nt, Human
gccuuccccagccucuu

SEQ ID NO: 2210041 - RNA, 16 nt, Human
gccuuccccagccucu

SEQ ID NO: 2210042 - RNA, 15 nt, Human
gccuuccccagccuc

SEQ ID NO: 2210043 - RNA, 14 nt, Human
gccuuccccagccu

SEQ ID NO: 2210044 - RNA, 20 nt, Human
gccuuccaugucggccucua

SEQ ID NO: 2210045 - RNA, 16 nt, Human
gccuuccccuugccca

SEQ ID NO: 2210046 - RNA, 14 nt, Human
gccuuccccugggc

SEQ ID NO: 2210047 - RNA, 22 nt, Human
gccuucgcgguggaaggcccga

SEQ ID NO: 2210048 - RNA, 17 nt, Human
gccuucgcuucuugccu

SEQ ID NO: 2210049 - RNA, 18 nt, Human
gccuucggccuccauccu

SEQ ID NO: 2210050 - RNA, 20 nt, Human
gccuucacuccggugugccu

SEQ ID NO: 2210051 - RNA, 23 nt, Human
gccuucagacagagaggacugua

SEQ ID NO: 2210052 - RNA, 13 nt, Human
gccuucagcucua

SEQ ID NO: 2210053 - RNA, 16 nt, Human
gccuucagauguucuc

SEQ ID NO: 2210054 - RNA, 17 nt, Human
gccuucagaaccaucca

SEQ ID NO: 2210055 - RNA, 21 nt, Human
gccuuccauaauuaugacagu

SEQ ID NO: 2210056 - RNA, 17 nt, Human
gccuuccaugucggccu

SEQ ID NO: 2210057 - RNA, 18 nt, Human
gccuuccaugucggccuc

SEQ ID NO: 2210058 - RNA, 19 nt, Human
gccuuccaugucggccucu

SEQ ID NO: 2210059 - RNA, 16 nt, Human
gccuuccauaauuaug

SEQ ID NO: 2210060 - RNA, 15 nt, Human
gccuuccauaauuau

SEQ ID NO: 2210061 - RNA, 14 nt, Human
gccuuccauaauua

SEQ ID NO: 2210062 - RNA, 13 nt, Human
gccuuccauaauu

SEQ ID NO: 2210063 - RNA, 16 nt, Human
gccuucagcucuacag

SEQ ID NO: 2210064 - RNA, 14 nt, Human
gccuuuugcacccc

SEQ ID NO: 2210065 - RNA, 15 nt, Human
gccuuuugcaccccu

SEQ ID NO: 2210066 - RNA, 16 nt, Human
gccuuuugcaccccuc

SEQ ID NO: 2210067 - RNA, 17 nt, Human
gccuuuugcaccccucc

SEQ ID NO: 2210068 - RNA, 18 nt, Human
gccuuuugcaccccuccc

SEQ ID NO: 2210069 - RNA, 19 nt, Human
gccuuuugcaccccuccca

SEQ ID NO: 2210070 - RNA, 14 nt, Human
gccuuuucuagccc

SEQ ID NO: 2210071 - RNA, 13 nt, Human
gccuuuucccucu

SEQ ID NO: 2210072 - RNA, 20 nt, Human
gccuuuucccucuuuggcuc

SEQ ID NO: 2210073 - RNA, 16 nt, Human
gccuuuuauuucuuaa

SEQ ID NO: 2210074 - RNA, 14 nt, Human
gccuuuuauagcua

SEQ ID NO: 2210075 - RNA, 18 nt, Human
gccuuuuauaaaccucua

SEQ ID NO: 2210076 - RNA, 22 nt, Human
gccuuuauuguguuugucauua

SEQ ID NO: 2210077 - RNA, 23 nt, Human
gccuuuauuguguuugucauuag

SEQ ID NO: 2210078 - RNA, 14 nt, Human
gccuuuauuguguu

SEQ ID NO: 2210079 - RNA, 20 nt, Human
gccuuuauuguguuugucau

SEQ ID NO: 2210080 - RNA, 13 nt, Human
gccuuuauugugu

SEQ ID NO: 2210081 - RNA, 14 nt, Human
gccuuuaugguuuc

SEQ ID NO: 2210082 - RNA, 16 nt, Human
gcgacauagcccaucc

SEQ ID NO: 2210083 - RNA, 17 nt, Human
gcgacauagcccauccc

SEQ ID NO: 2210084 - RNA, 15 nt, Human
gcgaccaccccugcc

SEQ ID NO: 2210085 - RNA, 18 nt, Human
gcgacauagcccaucccu

SEQ ID NO: 2210086 - RNA, 21 nt, Human
gcgacauagcccaucccugcc

SEQ ID NO: 2210087 - RNA, 19 nt, Human
gcgaccaccccugccucca

SEQ ID NO: 2210088 - RNA, 16 nt, Human
gcgaccaccccugccu

SEQ ID NO: 2210089 - RNA, 14 nt, Human
gcgaccccaucugc

SEQ ID NO: 2210090 - RNA, 15 nt, Human
gcgaccccaucugcc

SEQ ID NO: 2210091 - RNA, 16 nt, Human
gcgaccccaucugccc

SEQ ID NO: 2210092 - RNA, 17 nt, Human
gcgaccccaucugccca

SEQ ID NO: 2210093 - RNA, 18 nt, Human
gcgaccccaucugcccag

SEQ ID NO: 2210094 - RNA, 13 nt, Human
gcgaccgcccccu

SEQ ID NO: 2210095 - RNA, 14 nt, Human
gcgaccgcccccuc

SEQ ID NO: 2210096 - RNA, 19 nt, Human
gcgaccccaucugcccagg

SEQ ID NO: 2210097 - RNA, 20 nt, Human
gcgaccccaucugcccagga

SEQ ID NO: 2210098 - RNA, 17 nt, Human
gcgaccccgucacagcc

SEQ ID NO: 2210099 - RNA, 15 nt, Human
gcgaccgcccccucc

SEQ ID NO: 2210100 - RNA, 23 nt, Human
gcgaccucuccaucuucagcuuc

SEQ ID NO: 2210101 - RNA, 15 nt, Human
gcgaccuuccucauc

SEQ ID NO: 2210102 - RNA, 22 nt, Human
gcgaccuuccucauccacccca

SEQ ID NO: 2210103 - RNA, 22 nt, Human
gcgacagugagacucugucuca

SEQ ID NO: 2210104 - RNA, 20 nt, Human
gccuuuugcaccccucccau

SEQ ID NO: 2210105 - RNA, 15 nt, Human
gccuguaaucccagc

SEQ ID NO: 2210106 - RNA, 18 nt, Human
gccuguaaucccagcagu

SEQ ID NO: 2210107 - RNA, 17 nt, Human
gccuguaaucccagcag

SEQ ID NO: 2210108 - RNA, 19 nt, Human
gccuguaaucccagcacuu

SEQ ID NO: 2210109 - RNA, 20 nt, Human
gccuguaaucccagcacuuu

SEQ ID NO: 2210110 - RNA, 17 nt, Human
gccuguaaucccagcac

SEQ ID NO: 2210111 - RNA, 16 nt, Human
gccuguaaucccagca

SEQ ID NO: 2210112 - RNA, 18 nt, Human
gccuguaaucccagcacu

SEQ ID NO: 2210113 - RNA, 14 nt, Human
gccuguccagccug

SEQ ID NO: 2210114 - RNA, 13 nt, Human
gccuguccagccu

SEQ ID NO: 2210115 - RNA, 12 nt, Human
gccuguccagcc

SEQ ID NO: 2210116 - RNA, 18 nt, Human
gccuguaaucacagcuac

SEQ ID NO: 2210117 - RNA, 16 nt, Human
gccugguggcagcugc

SEQ ID NO: 2210118 - RNA, 17 nt, Human
gccugguggcagcugcg

SEQ ID NO: 2210119 - RNA, 22 nt, Human
gccuggagauccuccugcagac

SEQ ID NO: 2210120 - RNA, 13 nt, Human
gccuggagaagcu

SEQ ID NO: 2210121 - RNA, 17 nt, Human
gccuggagauccuccug

SEQ ID NO: 2210122 - RNA, 18 nt, Human
gccuggagauccuccugc

SEQ ID NO: 2210123 - RNA, 19 nt, Human
gccuggagauccuccugca

SEQ ID NO: 2210124 - RNA, 20 nt, Human
gccuggagauccuccugcag

SEQ ID NO: 2210125 - RNA, 15 nt, Human
gccugguggcagcug

SEQ ID NO: 2210126 - RNA, 11 nt, Human
gccuggaccug

SEQ ID NO: 2210127 - RNA, 14 nt, Human
gccuggaccugccu

SEQ ID NO: 2210128 - RNA, 15 nt, Human
gccuggaccugccuc

SEQ ID NO: 2210129 - RNA, 16 nt, Human
gccuggaccugccucc

SEQ ID NO: 2210130 - RNA, 17 nt, Human
gccuggaccugccuccu

SEQ ID NO: 2210131 - RNA, 14 nt, Human
gccuggacuuuccu

SEQ ID NO: 2210132 - RNA, 18 nt, Human
gccuggaccugccuccug

SEQ ID NO: 2210133 - RNA, 19 nt, Human
gccuggaccugccuccugc

SEQ ID NO: 2210134 - RNA, 15 nt, Human
gccuggacuuuccug

SEQ ID NO: 2210135 - RNA, 16 nt, Human
gccuggacuuuccugc

SEQ ID NO: 2210136 - RNA, 17 nt, Human
gccuggacuuuccugca

SEQ ID NO: 2210137 - RNA, 18 nt, Human
gccuggacuuuccugcaa

SEQ ID NO: 2210138 - RNA, 23 nt, Human
gccuggaccugccuccugccugc

SEQ ID NO: 2210139 - RNA, 12 nt, Human
gccuggagaagc

SEQ ID NO: 2210140 - RNA, 15 nt, Human
gccuggagaagcuga

SEQ ID NO: 2210141 - RNA, 17 nt, Human
gccuggagacuuagggc

SEQ ID NO: 2210142 - RNA, 19 nt, Human
gccuggagacuuagggcac

SEQ ID NO: 2210143 - RNA, 23 nt, Human
gccuggagacuuagggcaccagg

SEQ ID NO: 2210144 - RNA, 16 nt, Human
gccuggagauccuccu

SEQ ID NO: 2210145 - RNA, 17 nt, Human
gccuguccagccugggc

SEQ ID NO: 2210146 - RNA, 15 nt, Human
gccuguccagccugg

SEQ ID NO: 2210147 - RNA, 20 nt, Human
gccugucccacccccacccc

SEQ ID NO: 2210148 - RNA, 21 nt, Human
gccugucccauggacacucca

SEQ ID NO: 2210149 - RNA, 18 nt, Human
gccugucccucucaggca

SEQ ID NO: 2210150 - RNA, 22 nt, Human
gccugucccauggacacuccag

SEQ ID NO: 2210151 - RNA, 14 nt, Human
gccugucccucuca

SEQ ID NO: 2210152 - RNA, 22 nt, Human
gccuguccuccaacaccaagca

SEQ ID NO: 2210153 - RNA, 14 nt, Human
gccuuaccuccugc

SEQ ID NO: 2210154 - RNA, 13 nt, Human
gccuuaccuccug

SEQ ID NO: 2210155 - RNA, 12 nt, Human
gccuuaccuccu

SEQ ID NO: 2210156 - RNA, 20 nt, Human
gccuguccugaccugucuca

SEQ ID NO: 2210157 - RNA, 19 nt, Human
gccuuacccucauguucuu

SEQ ID NO: 2210158 - RNA, 20 nt, Human
gccuuagaagucacacagua

SEQ ID NO: 2210159 - RNA, 13 nt, Human
gccuuagagccag

SEQ ID NO: 2210160 - RNA, 14 nt, Human
gccuuagagccagg

SEQ ID NO: 2210161 - RNA, 15 nt, Human
gccuuagagccaggc

SEQ ID NO: 2210162 - RNA, 17 nt, Human
gccuuagagccaggcac

SEQ ID NO: 2210163 - RNA, 22 nt, Human
gccuuaccuccugcccaggaga

SEQ ID NO: 2210164 - RNA, 21 nt, Human
gccuuaccuccugcccaggag

SEQ ID NO: 2210165 - RNA, 20 nt, Human
gccuuaccuccugcccagga

SEQ ID NO: 2210166 - RNA, 19 nt, Human
gccuuaccuccugcccagg

SEQ ID NO: 2210167 - RNA, 18 nt, Human
gccuuaccuccugcccag

SEQ ID NO: 2210168 - RNA, 17 nt, Human
gccuuaccuccugccca

SEQ ID NO: 2210169 - RNA, 16 nt, Human
gccuuaccuccugccc

SEQ ID NO: 2210170 - RNA, 15 nt, Human
gccuuaccuccugcc

SEQ ID NO: 2210171 - RNA, 16 nt, Human
gccuuagaaccuuucu

SEQ ID NO: 2210172 - RNA, 15 nt, Human
gccuuagucucaguu

SEQ ID NO: 2210173 - RNA, 23 nt, Human
gccuuagagccaggcacacacug

SEQ ID NO: 2210174 - RNA, 14 nt, Human
gccuuagcauguuu

SEQ ID NO: 2210175 - RNA, 15 nt, Human
gccuuagcauguuug

SEQ ID NO: 2210176 - RNA, 17 nt, Human
gccuuagcauguuugcu

SEQ ID NO: 2210177 - RNA, 18 nt, Human
gccuuagcauguuugcug

SEQ ID NO: 2210178 - RNA, 20 nt, Human
gccuuagcauguuugcugaa

SEQ ID NO: 2210179 - RNA, 21 nt, Human
gccuuauggaacacucugaga

SEQ ID NO: 2210180 - RNA, 22 nt, Human
gccuuauggaacacucugagac

SEQ ID NO: 2210181 - RNA, 23 nt, Human
gccuuauggaacacucugagacu

SEQ ID NO: 2210182 - RNA, 22 nt, Human
gccuuagucucaguuugugugu

SEQ ID NO: 2210183 - RNA, 18 nt, Human
gccuuagucucaguuugu

SEQ ID NO: 2210184 - RNA, 12 nt, Human
gccuuauuaaag

SEQ ID NO: 2210185 - RNA, 19 nt, Human
gccuuauuagagugucuuu

SEQ ID NO: 2210186 - RNA, 15 nt, Human
gccuucaauaaaugg

SEQ ID NO: 2210187 - RNA, 16 nt, Human
gcgucgcccucccagg

SEQ ID NO: 2210188 - RNA, 15 nt, Human
gcgugagaccugccc

SEQ ID NO: 2210189 - RNA, 14 nt, Human
gcgugagccacugc

SEQ ID NO: 2210190 - RNA, 16 nt, Human
gcgugagccacugcac

SEQ ID NO: 2210191 - RNA, 16 nt, Human
gcgugagaccugcccc

SEQ ID NO: 2210192 - RNA, 15 nt, Human
gcgugagccacugca

SEQ ID NO: 2210193 - RNA, 22 nt, Human
gcuaacccccuucuacugagcc

SEQ ID NO: 2210194 - RNA, 14 nt, Human
gcuaacauuuuaaa

SEQ ID NO: 2210195 - RNA, 17 nt, Human
gcuaacauuuuaaauaa

SEQ ID NO: 2210196 - RNA, 23 nt, Human
gcuaacauuuuaaauaaaagaaa

SEQ ID NO: 2210197 - RNA, 14 nt, Human
gcuaacauggaagu

SEQ ID NO: 2210198 - RNA, 24 nt, Human
gcguccuguccacacccagcucag

SEQ ID NO: 2210199 - RNA, 11 nt, Human
gcgugagacgc

SEQ ID NO: 2210200 - RNA, 15 nt, Human
gcgugagacgccacc

SEQ ID NO: 2210201 - RNA, 13 nt, Human
gcuaacauuuuaa

SEQ ID NO: 2210202 - RNA, 17 nt, Human
gcuaacauggaaguacu

SEQ ID NO: 2210203 - RNA, 18 nt, Human
gcuaacauggaaguacua

SEQ ID NO: 2210204 - RNA, 13 nt, Human
gcuacaccuuucu

SEQ ID NO: 2210205 - RNA, 19 nt, Human
gcuacacccuuuuccagcu

SEQ ID NO: 2210206 - RNA, 15 nt, Human
gcuacaccuuucucc

SEQ ID NO: 2210207 - RNA, 20 nt, Human
gcuacaccuuucuccuuugu

SEQ ID NO: 2210208 - RNA, 22 nt, Human
gcuacacaggggaaaagaggag

SEQ ID NO: 2210209 - RNA, 17 nt, Human
gcuacacccuuuuccag

SEQ ID NO: 2210210 - RNA, 21 nt, Human
gcuaacuagcuuggaaacugg

SEQ ID NO: 2210211 - RNA, 12 nt, Human
gcuaacuggaag

SEQ ID NO: 2210212 - RNA, 21 nt, Human
gcuaacauuuuaaauaaaaga

SEQ ID NO: 2210213 - RNA, 21 nt, Human
gcuaacccccuucuacugagc

SEQ ID NO: 2210214 - RNA, 20 nt, Human
gcuaacuuggagccccagug

SEQ ID NO: 2210215 - RNA, 13 nt, Human
gcuaacuggaagc

SEQ ID NO: 2210216 - RNA, 18 nt, Human
gcuaacuuggagccccag

SEQ ID NO: 2210217 - RNA, 14 nt, Human
gcuaagaaaagauu

SEQ ID NO: 2210218 - RNA, 17 nt, Human
gcuaagaaccuggaacu

SEQ ID NO: 2210219 - RNA, 16 nt, Human
gcuaagaaccuggaac

SEQ ID NO: 2210220 - RNA, 23 nt, Human
gcuaagaaccuggaacuugggga

SEQ ID NO: 2210221 - RNA, 14 nt, Human
gcuaagaauauuug

SEQ ID NO: 2210222 - RNA, 20 nt, Human
gcuagaggaaccaaccccca

SEQ ID NO: 2210223 - RNA, 21 nt, Human
gcuagagauauggcagcgaaa

SEQ ID NO: 2210224 - RNA, 20 nt, Human
gcuagagauauggcagcgaa

SEQ ID NO: 2210225 - RNA, 14 nt, Human
gcuaccucacuggg

SEQ ID NO: 2210226 - RNA, 15 nt, Human
gcuagacacccauuu

SEQ ID NO: 2210227 - RNA, 17 nt, Human
gcuaccucaagggggac

SEQ ID NO: 2210228 - RNA, 13 nt, Human
gcuaccucaaggg

SEQ ID NO: 2210229 - RNA, 22 nt, Human
gcuacccuuuuucuccagcugg

SEQ ID NO: 2210230 - RNA, 18 nt, Human
gcuacccuuuuucuccag

SEQ ID NO: 2210231 - RNA, 19 nt, Human
gcuacccuuuuucuccagc

SEQ ID NO: 2210232 - RNA, 20 nt, Human
gcuacccuuuuucuccagcu

SEQ ID NO: 2210233 - RNA, 21 nt, Human
gcuacccuuuuucuccagcug

SEQ ID NO: 2210234 - RNA, 21 nt, Human
gcuagacgagcaggcuucuuc

SEQ ID NO: 2210235 - RNA, 22 nt, Human
gcuagacgagcaggcuucuucc

SEQ ID NO: 2210236 - RNA, 20 nt, Human
gcuacccccaugcuggaggu

SEQ ID NO: 2210237 - RNA, 16 nt, Human
gcuacccucccugcug

SEQ ID NO: 2210238 - RNA, 17 nt, Human
gcuacccucccugcugu

SEQ ID NO: 2210239 - RNA, 17 nt, Human
gcuacccacuucuaaau

SEQ ID NO: 2210240 - RNA, 19 nt, Human
gcuacccugagcugaggca

SEQ ID NO: 2210241 - RNA, 16 nt, Human
gcuacccuuuuucucc

SEQ ID NO: 2210242 - RNA, 20 nt, Human
gcuacccugagcugaggcag

SEQ ID NO: 2210243 - RNA, 16 nt, Human
gcuacccugagcugag

SEQ ID NO: 2210244 - RNA, 14 nt, Human
gcuacccugagcug

SEQ ID NO: 2210245 - RNA, 12 nt, Human
gcuacccugagc

SEQ ID NO: 2210246 - RNA, 19 nt, Human
gcuacccucccugcugucc

SEQ ID NO: 2210247 - RNA, 23 nt, Human
gcuacccucccugcuguccccuc

SEQ ID NO: 2210248 - RNA, 20 nt, Human
gcuaccaaagcaccuuagcu

SEQ ID NO: 2210249 - RNA, 17 nt, Human
gcgcccaguccuuccac

SEQ ID NO: 2210250 - RNA, 17 nt, Human
gcgcccaccuccccacg

SEQ ID NO: 2210251 - RNA, 12 nt, Human
gcgcccaccucc

SEQ ID NO: 2210252 - RNA, 13 nt, Human
gcgcccaccuccc

SEQ ID NO: 2210253 - RNA, 18 nt, Human
gcgccuacaggagugagc

SEQ ID NO: 2210254 - RNA, 20 nt, Human
gcgccauugcacuccagccu

SEQ ID NO: 2210255 - RNA, 16 nt, Human
gcgcccaccccgcucu

SEQ ID NO: 2210256 - RNA, 16 nt, Human
gcgccauugcacucca

SEQ ID NO: 2210257 - RNA, 22 nt, Human
gcgccaggcugaccacagcaca

SEQ ID NO: 2210258 - RNA, 20 nt, Human
gcgccaggcugaccacagca

SEQ ID NO: 2210259 - RNA, 15 nt, Human
gcgccaggcugacca

SEQ ID NO: 2210260 - RNA, 22 nt, Human
gcgccaggauggaacacggcca

SEQ ID NO: 2210261 - RNA, 21 nt, Human
gcgccaggauggaacacggcc

SEQ ID NO: 2210262 - RNA, 23 nt, Human
gcgaccuuccucauccaccccau

SEQ ID NO: 2210263 - RNA, 21 nt, Human
gcgacguuagucgugagcucu

SEQ ID NO: 2210264 - RNA, 22 nt, Human
gcgacguuagucgugagcucuu

SEQ ID NO: 2210265 - RNA, 23 nt, Human
gcgacuaauuucaaaaugcuuuu

SEQ ID NO: 2210266 - RNA, 21 nt, Human
gcgacuaauuucaaaaugcuu

SEQ ID NO: 2210267 - RNA, 13 nt, Human
gcgacuaauuuca

SEQ ID NO: 2210268 - RNA, 21 nt, Human
gcgaccccaucugcccaggac

SEQ ID NO: 2210269 - RNA, 21 nt, Human
gcgacucuauagacucuagga

SEQ ID NO: 2210270 - RNA, 20 nt, Human
gcgacuccguuggccacucc

SEQ ID NO: 2210271 - RNA, 18 nt, Human
gcgacuccguuggccacu

SEQ ID NO: 2210272 - RNA, 19 nt, Human
gcgacuccguuggccacuc

SEQ ID NO: 2210273 - RNA, 12 nt, Human
gcgacuuucugc

SEQ ID NO: 2210274 - RNA, 17 nt, Human
gcgccagcacagaaaca

SEQ ID NO: 2210275 - RNA, 21 nt, Human
gcgccagcacagaaacagagg

SEQ ID NO: 2210276 - RNA, 19 nt, Human
gcgcccaguccuuccaccu

SEQ ID NO: 2210277 - RNA, 21 nt, Human
gcgccuaguggggucucccuc

SEQ ID NO: 2210278 - RNA, 20 nt, Human
gcgccuaguggggucucccu

SEQ ID NO: 2210279 - RNA, 19 nt, Human
gcgcuccugccgcagagcu

SEQ ID NO: 2210280 - RNA, 20 nt, Human
gcgcuccugccgcagagcug

SEQ ID NO: 2210281 - RNA, 21 nt, Human
gcgcuccugccgcagagcugg

SEQ ID NO: 2210282 - RNA, 20 nt, Human
gcgccuacaggagugagcac

SEQ ID NO: 2210283 - RNA, 21 nt, Human
gcgccuacaggagugagcacu

SEQ ID NO: 2210284 - RNA, 19 nt, Human
gcgcugacaaccaccgcuc

SEQ ID NO: 2210285 - RNA, 16 nt, Human
gcgcucuagccugggc

SEQ ID NO: 2210286 - RNA, 14 nt, Human
gcgcugccccuggc

SEQ ID NO: 2210287 - RNA, 23 nt, Human
gcgcugacaaccaccgcucccca

SEQ ID NO: 2210288 - RNA, 11 nt, Human
gcgcugcaaau

SEQ ID NO: 2210289 - RNA, 15 nt, Human
gcgcuggcccagccg

SEQ ID NO: 2210290 - RNA, 17 nt, Human
gcgcugccccuggcagc

SEQ ID NO: 2210291 - RNA, 19 nt, Human
gcgcuggccgggaccccga

SEQ ID NO: 2210292 - RNA, 16 nt, Human
gcgcuggcccagccgg

SEQ ID NO: 2210293 - RNA, 17 nt, Human
gcgcuggcccagccggc

SEQ ID NO: 2210294 - RNA, 16 nt, Human
gcggacaucagcuggu

SEQ ID NO: 2210295 - RNA, 18 nt, Human
gcggggacagcuccuucu

SEQ ID NO: 2210296 - RNA, 19 nt, Human
gcggggacagcuccuucug

SEQ ID NO: 2210297 - RNA, 20 nt, Human
gcggaacaaggagucagaca

SEQ ID NO: 2210298 - RNA, 17 nt, Human
gcgcuuuugcuggucac

SEQ ID NO: 2210299 - RNA, 15 nt, Human
gcggaaagcagcuca

SEQ ID NO: 2210300 - RNA, 22 nt, Human
gcgcuuucuggaaaagaggagu

SEQ ID NO: 2210301 - RNA, 23 nt, Human
gcggacagccacggccaggccag

SEQ ID NO: 2210302 - RNA, 19 nt, Human
gcggaaugaaccacaucuu

SEQ ID NO: 2210303 - RNA, 15 nt, Human
gcgcuuucuggaaaa

SEQ ID NO: 2210304 - RNA, 19 nt, Human
gcgcuggcccagccggccu

SEQ ID NO: 2210305 - RNA, 16 nt, Human
gcggacagccacggcc

SEQ ID NO: 2210306 - RNA, 19 nt, Human
gcggacagccacggccagg

SEQ ID NO: 2210307 - RNA, 22 nt, Human
gcgguccccuccgccaggcgag

SEQ ID NO: 2210308 - RNA, 20 nt, Human
gcggggcgaagcccaggccc

SEQ ID NO: 2210309 - RNA, 22 nt, Human
gcggucucaggcuggugggagg

SEQ ID NO: 2210310 - RNA, 20 nt, Human
gcggucucaggcugguggga

SEQ ID NO: 2210311 - RNA, 16 nt, Human
gcguccgcgcgccagc

SEQ ID NO: 2210312 - RNA, 19 nt, Human
gcgguccccuccgccaggc

SEQ ID NO: 2210313 - RNA, 13 nt, Human
gcguccuguccac

SEQ ID NO: 2210314 - RNA, 20 nt, Human
gcguccuccucaccucaugc

SEQ ID NO: 2210315 - RNA, 19 nt, Human
gcguccuguccacacccag

SEQ ID NO: 2210316 - RNA, 21 nt, Human
gcguccuguccacacccagcu

SEQ ID NO: 2210317 - RNA, 16 nt, Human
gcguccuccucuguga

SEQ ID NO: 2210318 - RNA, 15 nt, Human
gcguccuccucugug

SEQ ID NO: 2210319 - RNA, 14 nt, Human
gcguccuccucugu

SEQ ID NO: 2210320 - RNA, 19 nt, Human
gcguccgcgcgccagcaca

SEQ ID NO: 2210321 - RNA, 20 nt, Human
gcguccgcgcgccagcacag

SEQ ID NO: 2210322 - RNA, 23 nt, Human
gcggggacagcuccuucuguccu

SEQ ID NO: 2210323 - RNA, 20 nt, Human
gcgguccacccaggagcccc

SEQ ID NO: 2210324 - RNA, 19 nt, Human
gcggggacucgguaagcac

SEQ ID NO: 2210325 - RNA, 12 nt, Human
gcggggccuugc

SEQ ID NO: 2210326 - RNA, 17 nt, Human
gcggggcgaagcccagg

SEQ ID NO: 2210327 - RNA, 18 nt, Human
gcggggcgaagcccaggc

SEQ ID NO: 2210328 - RNA, 23 nt, Human
gcgguccacccaggagccccgag

SEQ ID NO: 2210329 - RNA, 20 nt, Human
gccugaagaguccucugaau

SEQ ID NO: 2210330 - RNA, 15 nt, Human
gccugaaccuuccau

SEQ ID NO: 2210331 - RNA, 15 nt, Human
gccugaagucacaca

SEQ ID NO: 2210332 - RNA, 18 nt, Human
gccugaagaguccucuga

SEQ ID NO: 2210333 - RNA, 14 nt, Human
gccugaaccuucca

SEQ ID NO: 2210334 - RNA, 21 nt, Human
gccugaacauccuuccuuccc

SEQ ID NO: 2210335 - RNA, 21 nt, Human
gccugagaguauuuaggcaga

SEQ ID NO: 2210336 - RNA, 13 nt, Human
gccugagaguauu

SEQ ID NO: 2210337 - RNA, 22 nt, Human
gccugaaggggcgucuguuccc

SEQ ID NO: 2210338 - RNA, 18 nt, Human
gccugaaggggcgucugu

SEQ ID NO: 2210339 - RNA, 17 nt, Human
gccugaaggggcgucug

SEQ ID NO: 2210340 - RNA, 16 nt, Human
gccugagauuucaucu

SEQ ID NO: 2210341 - RNA, 13 nt, Human
gccugagaugguc

SEQ ID NO: 2210342 - RNA, 18 nt, Human
gccugagauuucaucugc

SEQ ID NO: 2210343 - RNA, 22 nt, Human
gccugagauuucaucugcucuc

SEQ ID NO: 2210344 - RNA, 12 nt, Human
gccucugcauuc

SEQ ID NO: 2210345 - RNA, 15 nt, Human
gccucugcacucccc

SEQ ID NO: 2210346 - RNA, 21 nt, Human
gccucugcacuccccugcugg

SEQ ID NO: 2210347 - RNA, 14 nt, Human
gccugaaaggagcc

SEQ ID NO: 2210348 - RNA, 23 nt, Human
gccugaaagaggcugaggccugg

SEQ ID NO: 2210349 - RNA, 14 nt, Human
gccugaacauccuu

SEQ ID NO: 2210350 - RNA, 18 nt, Human
gccugaaauuucaccauu

SEQ ID NO: 2210351 - RNA, 15 nt, Human
gccugaacauccuuc

SEQ ID NO: 2210352 - RNA, 23 nt, Human
gccugaaaggagcccuuaucugu

SEQ ID NO: 2210353 - RNA, 17 nt, Human
gccugaaaggagcccuu

SEQ ID NO: 2210354 - RNA, 16 nt, Human
gccucugacacacagc

SEQ ID NO: 2210355 - RNA, 16 nt, Human
gccucugcacuccccu

SEQ ID NO: 2210356 - RNA, 19 nt, Human
gccucucuugguuuccuuc

SEQ ID NO: 2210357 - RNA, 23 nt, Human
gccucucuggccucccacccgau

SEQ ID NO: 2210358 - RNA, 15 nt, Human
gccucugacacacag

SEQ ID NO: 2210359 - RNA, 17 nt, Human
gccucugcacuccccug

SEQ ID NO: 2210360 - RNA, 18 nt, Human
gccucugcacuccccugc

SEQ ID NO: 2210361 - RNA, 19 nt, Human
gccucugcacuccccugcu

SEQ ID NO: 2210362 - RNA, 20 nt, Human
gccucugcacuccccugcug

SEQ ID NO: 2210363 - RNA, 11 nt, Human
gccugcagccc

SEQ ID NO: 2210364 - RNA, 17 nt, Human
gccugcaggaccugccu

SEQ ID NO: 2210365 - RNA, 16 nt, Human
gccugcaggaccugcc

SEQ ID NO: 2210366 - RNA, 14 nt, Human
gccugcaggaccug

SEQ ID NO: 2210367 - RNA, 21 nt, Human
gccugcaggaccugccuguag

SEQ ID NO: 2210368 - RNA, 20 nt, Human
gccugcaggaccugccugua

SEQ ID NO: 2210369 - RNA, 19 nt, Human
gccugcaggaccugccugu

SEQ ID NO: 2210370 - RNA, 18 nt, Human
gccugcaggaccugccug

SEQ ID NO: 2210371 - RNA, 21 nt, Human
gccugcagaggucugugcuga

SEQ ID NO: 2210372 - RNA, 18 nt, Human
gccugccaguccuagcug

SEQ ID NO: 2210373 - RNA, 19 nt, Human
gccugccaguccuagcugc

SEQ ID NO: 2210374 - RNA, 20 nt, Human
gccugccaguccuagcugca

SEQ ID NO: 2210375 - RNA, 23 nt, Human
gccugccaguccuagcugcacag

SEQ ID NO: 2210376 - RNA, 22 nt, Human
gccugagcaacagagugagacc

SEQ ID NO: 2210377 - RNA, 23 nt, Human
gccugagauuucaucugcucucc

SEQ ID NO: 2210378 - RNA, 18 nt, Human
gccugagcaacucuugau

SEQ ID NO: 2210379 - RNA, 10 nt, Human
gccugcagcc

SEQ ID NO: 2210380 - RNA, 19 nt, Human
gccugcagaggucugugcu

SEQ ID NO: 2210381 - RNA, 20 nt, Human
gccugcagaggucugugcug

SEQ ID NO: 2210382 - RNA, 20 nt, Human
gccugcagagcugcgggcug

SEQ ID NO: 2210383 - RNA, 14 nt, Human
gccugagccuggcc

SEQ ID NO: 2210384 - RNA, 24 nt, Human
gccugcugggcucuccaccucagc

SEQ ID NO: 2210385 - RNA, 23 nt, Human
gccugcugggcucuccaccucag

SEQ ID NO: 2210386 - RNA, 22 nt, Human
gccugcugggcucuccaccuca

SEQ ID NO: 2210387 - RNA, 21 nt, Human
gccugcugggcucuccaccuc

SEQ ID NO: 2210388 - RNA, 20 nt, Human
gccugcugggcucuccaccu

SEQ ID NO: 2210389 - RNA, 19 nt, Human
gccugcugggcucuccacc

SEQ ID NO: 2210390 - RNA, 18 nt, Human
gccugcugggcucuccac

SEQ ID NO: 2210391 - RNA, 17 nt, Human
gccugcugggcucucca

SEQ ID NO: 2210392 - RNA, 16 nt, Human
gccugcugggcucucc

SEQ ID NO: 2210393 - RNA, 13 nt, Human
gccugcugggcuc

SEQ ID NO: 2210394 - RNA, 22 nt, Human
gccugcuggcacccaccgugga

SEQ ID NO: 2210395 - RNA, 13 nt, Human
gccugcuggcacc

SEQ ID NO: 2210396 - RNA, 16 nt, Human
gccugcuggcacccac

SEQ ID NO: 2210397 - RNA, 17 nt, Human
gccugcuggcacccacc

SEQ ID NO: 2210398 - RNA, 19 nt, Human
gccugcuggcacccaccgu

SEQ ID NO: 2210399 - RNA, 14 nt, Human
gccuggacccugug

SEQ ID NO: 2210400 - RNA, 17 nt, Human
gccugcuggucacagcc

SEQ ID NO: 2210401 - RNA, 18 nt, Human
gccugcuggucacagccu

SEQ ID NO: 2210402 - RNA, 19 nt, Human
gccugcuggucacagccuc

SEQ ID NO: 2210403 - RNA, 21 nt, Human
gccugcuggucacagccuccu

SEQ ID NO: 2210404 - RNA, 14 nt, Human
gccugcccacccgu

SEQ ID NO: 2210405 - RNA, 13 nt, Human
gccugcccacccg

SEQ ID NO: 2210406 - RNA, 10 nt, Human
gccugcccac

SEQ ID NO: 2210407 - RNA, 10 nt, Human
gccugcuggc

SEQ ID NO: 2210408 - RNA, 11 nt, Human
gccugcccagg

SEQ ID NO: 2210409 - RNA, 12 nt, Human
gccugcccaggc

SEQ ID NO: 2210410 - RNA, 17 nt, Human
gccucagcccugacccu

SEQ ID NO: 2210411 - RNA, 22 nt, Human
gccucagcccugacccugugga

SEQ ID NO: 2210412 - RNA, 22 nt, Human
gccucagccucccaaagugcug

SEQ ID NO: 2210413 - RNA, 12 nt, Human
gccucagccucc

SEQ ID NO: 2210414 - RNA, 14 nt, Human
gccucagccuccca

SEQ ID NO: 2210415 - RNA, 18 nt, Human
gccuccccgaaacaggcu

SEQ ID NO: 2210416 - RNA, 23 nt, Human
gccuccccauuucccaucugcac

SEQ ID NO: 2210417 - RNA, 21 nt, Human
gccuccccauuucccaucugc

SEQ ID NO: 2210418 - RNA, 22 nt, Human
gccuccccauuucccaucugca

SEQ ID NO: 2210419 - RNA, 21 nt, Human
gccuccccacggccgcuccag

SEQ ID NO: 2210420 - RNA, 22 nt, Human
gccuccccacggccgcuccagg

SEQ ID NO: 2210421 - RNA, 17 nt, Human
gccuccccagcucaccc

SEQ ID NO: 2210422 - RNA, 13 nt, Human
gccuccccauuuc

SEQ ID NO: 2210423 - RNA, 16 nt, Human
gccuccccauuuccca

SEQ ID NO: 2210424 - RNA, 18 nt, Human
gccuccccauuucccauc

SEQ ID NO: 2210425 - RNA, 19 nt, Human
gccuccccauuucccaucu

SEQ ID NO: 2210426 - RNA, 20 nt, Human
gccuccccauuucccaucug

SEQ ID NO: 2210427 - RNA, 12 nt, Human
gccuccccaccu

SEQ ID NO: 2210428 - RNA, 19 nt, Human
gccuccccacggccgcucc

SEQ ID NO: 2210429 - RNA, 22 nt, Human
gccuccccaacccugccccugc

SEQ ID NO: 2210430 - RNA, 21 nt, Human
gccuccccaacccugccccug

SEQ ID NO: 2210431 - RNA, 20 nt, Human
gccuccccaacccugccccu

SEQ ID NO: 2210432 - RNA, 19 nt, Human
gccuccccaacccugcccc

SEQ ID NO: 2210433 - RNA, 17 nt, Human
gccuccccaacccugcc

SEQ ID NO: 2210434 - RNA, 22 nt, Human
gccucccauccagggcccccau

SEQ ID NO: 2210435 - RNA, 15 nt, Human
gccucccauccaggg

SEQ ID NO: 2210436 - RNA, 18 nt, Human
gccucccgaauagcuggg

SEQ ID NO: 2210437 - RNA, 19 nt, Human
gccucccgaauagcuggga

SEQ ID NO: 2210438 - RNA, 21 nt, Human
gccucccgaguagcugggacu

SEQ ID NO: 2210439 - RNA, 23 nt, Human
gccucccgaguagcugggacuac

SEQ ID NO: 2210440 - RNA, 20 nt, Human
gccucccgaauagcugggac

SEQ ID NO: 2210441 - RNA, 18 nt, Human
gccucuccccagguccag

SEQ ID NO: 2210442 - RNA, 15 nt, Human
gccucucccaucacu

SEQ ID NO: 2210443 - RNA, 22 nt, Human
gccucccugaaaauguuuuucu

SEQ ID NO: 2210444 - RNA, 11 nt, Human
gccucccugaa

SEQ ID NO: 2210445 - RNA, 18 nt, Human
gccucccugaagccuuug

SEQ ID NO: 2210446 - RNA, 13 nt, Human
gccucccugaagc

SEQ ID NO: 2210447 - RNA, 21 nt, Human
gccucccucugaccugcaggc

SEQ ID NO: 2210448 - RNA, 20 nt, Human
gccucccucugaccugcagg

SEQ ID NO: 2210449 - RNA, 14 nt, Human
gccucccucugacc

SEQ ID NO: 2210450 - RNA, 12 nt, Human
gccucccucuga

SEQ ID NO: 2210451 - RNA, 23 nt, Human
gccucccucucucuucugcucca

SEQ ID NO: 2210452 - RNA, 22 nt, Human
gccucccucucucuucugcucc

SEQ ID NO: 2210453 - RNA, 21 nt, Human
gccucccucucucuucugcuc

SEQ ID NO: 2210454 - RNA, 16 nt, Human
gccucccucucucuuc

SEQ ID NO: 2210455 - RNA, 17 nt, Human
gccucccucacccugag

SEQ ID NO: 2210456 - RNA, 18 nt, Human
gccucccucacccugagc

SEQ ID NO: 2210457 - RNA, 20 nt, Human
gccucccucacccugagccc

SEQ ID NO: 2210458 - RNA, 14 nt, Human
gccucccucaaccc

SEQ ID NO: 2210459 - RNA, 13 nt, Human
gccucccucaacc

SEQ ID NO: 2210460 - RNA, 19 nt, Human
gccucccgcguugggcaac

SEQ ID NO: 2210461 - RNA, 16 nt, Human
gccucccuagccagca

SEQ ID NO: 2210462 - RNA, 10 nt, Human
gccucucugc

SEQ ID NO: 2210463 - RNA, 14 nt, Human
gccucucugcaggu

SEQ ID NO: 2210464 - RNA, 20 nt, Human
gccucuccccagguccagcu

SEQ ID NO: 2210465 - RNA, 22 nt, Human
gccucuccccagguccagcucu

SEQ ID NO: 2210466 - RNA, 23 nt, Human
gccucuccccagguccagcucug

SEQ ID NO: 2210467 - RNA, 12 nt, Human
gccucuccccug

SEQ ID NO: 2210468 - RNA, 13 nt, Human
gccucuccccuga

SEQ ID NO: 2210469 - RNA, 13 nt, Human
gccucucccguca

SEQ ID NO: 2210470 - RNA, 17 nt, Human
gccucucccgucagggc

SEQ ID NO: 2210471 - RNA, 18 nt, Human
gccucucccgucagggcc

SEQ ID NO: 2210472 - RNA, 19 nt, Human
gccucucccgucagggccc

SEQ ID NO: 2210473 - RNA, 16 nt, Human
gccucucugcaggucc

SEQ ID NO: 2210474 - RNA, 17 nt, Human
gccucucugcagguccc

SEQ ID NO: 2210475 - RNA, 17 nt, Human
gccucucucccagucua

SEQ ID NO: 2210476 - RNA, 23 nt, Human
gccucucccgucagggcccaagu

SEQ ID NO: 2210477 - RNA, 12 nt, Human
gccucucuggcc

SEQ ID NO: 2210478 - RNA, 13 nt, Human
gccucucuggccu

SEQ ID NO: 2210479 - RNA, 14 nt, Human
gccucucuggccuc

SEQ ID NO: 2210480 - RNA, 15 nt, Human
gccucucuggccucc

SEQ ID NO: 2210481 - RNA, 16 nt, Human
gccucucuggccuccc

SEQ ID NO: 2210482 - RNA, 17 nt, Human
gccucucuggccuccca

SEQ ID NO: 2210483 - RNA, 18 nt, Human
gccucucuggccucccac

SEQ ID NO: 2210484 - RNA, 19 nt, Human
gccucucuggccucccacc

SEQ ID NO: 2210485 - RNA, 20 nt, Human
gccucucuggccucccaccc

SEQ ID NO: 2210486 - RNA, 20 nt, Human
gccguugauguuggcuggga

SEQ ID NO: 2210487 - RNA, 17 nt, Human
gccguugauguuggcug

SEQ ID NO: 2210488 - RNA, 19 nt, Human
gccguugauguuggcuggg

SEQ ID NO: 2210489 - RNA, 14 nt, Human
gccuaaaaaugcaa

SEQ ID NO: 2210490 - RNA, 23 nt, Human
gccguuugagaagaaaacaucua

SEQ ID NO: 2210491 - RNA, 12 nt, Human
gccguuggccac

SEQ ID NO: 2210492 - RNA, 14 nt, Human
gccguuggccacgu

SEQ ID NO: 2210493 - RNA, 13 nt, Human
gccguuguuuacu

SEQ ID NO: 2210494 - RNA, 17 nt, Human
gccuaaaaaugcaacuu

SEQ ID NO: 2210495 - RNA, 15 nt, Human
gccuaaaaguaaaca

SEQ ID NO: 2210496 - RNA, 16 nt, Human
gccuaaaaguaaacau

SEQ ID NO: 2210497 - RNA, 23 nt, Human
gccuaaaagugggcuugauucug

SEQ ID NO: 2210498 - RNA, 18 nt, Human
gccguggcugcggcaccc

SEQ ID NO: 2210499 - RNA, 14 nt, Human
gccguggcugcggc

SEQ ID NO: 2210500 - RNA, 15 nt, Human
gccguggcugcggca

SEQ ID NO: 2210501 - RNA, 15 nt, Human
gccgugcccaggggc

SEQ ID NO: 2210502 - RNA, 14 nt, Human
gccgugcccagggg

SEQ ID NO: 2210503 - RNA, 21 nt, Human
gccguggauugcacguggccu

SEQ ID NO: 2210504 - RNA, 22 nt, Human
gccguggauugcacguggccuc

SEQ ID NO: 2210505 - RNA, 23 nt, Human
gccguggauugcacguggccucu

SEQ ID NO: 2210506 - RNA, 11 nt, Human
gccguggcuuc

SEQ ID NO: 2210507 - RNA, 12 nt, Human
gccguggcuucc

SEQ ID NO: 2210508 - RNA, 13 nt, Human
gccguggcuuccc

SEQ ID NO: 2210509 - RNA, 20 nt, Human
gccgucuucacucgcccccg

SEQ ID NO: 2210510 - RNA, 19 nt, Human
gccgucuucacucgccccc

SEQ ID NO: 2210511 - RNA, 23 nt, Human
gccgucuccaggggcugcuuccu

SEQ ID NO: 2210512 - RNA, 16 nt, Human
gccgucuccaggggcu

SEQ ID NO: 2210513 - RNA, 21 nt, Human
gccgucuccaggggcugcuuc

SEQ ID NO: 2210514 - RNA, 11 nt, Human
gccgucucaac

SEQ ID NO: 2210515 - RNA, 14 nt, Human
gccgucuccagggg

SEQ ID NO: 2210516 - RNA, 17 nt, Human
gccgggugcucagggcu

SEQ ID NO: 2210517 - RNA, 16 nt, Human
gccgggugcucagggc

SEQ ID NO: 2210518 - RNA, 18 nt, Human
gccggguucuagucuccu

SEQ ID NO: 2210519 - RNA, 15 nt, Human
gccgugaugccuccc

SEQ ID NO: 2210520 - RNA, 12 nt, Human
gccgugcccagg

SEQ ID NO: 2210521 - RNA, 17 nt, Human
gccgugaugcucaggcu

SEQ ID NO: 2210522 - RNA, 18 nt, Human
gccgugaguucucagggc

SEQ ID NO: 2210523 - RNA, 20 nt, Human
gccgugaguucucagggcuc

SEQ ID NO: 2210524 - RNA, 21 nt, Human
gccgugaguucucagggcucc

SEQ ID NO: 2210525 - RNA, 23 nt, Human
gccgugaguucucagggcuccug

SEQ ID NO: 2210526 - RNA, 22 nt, Human
gccgucuucacucgcccccggg

SEQ ID NO: 2210527 - RNA, 21 nt, Human
gccgucuucacucgcccccgg

SEQ ID NO: 2210528 - RNA, 16 nt, Human
gccgugaguucucagg

SEQ ID NO: 2210529 - RNA, 18 nt, Human
gccgucuaccugaggggc

SEQ ID NO: 2210530 - RNA, 20 nt, Human
gccgucuaccugaggggccu

SEQ ID NO: 2210531 - RNA, 22 nt, Human
gccgucuaccugaggggccucu

SEQ ID NO: 2210532 - RNA, 23 nt, Human
gccgucuaccugaggggccucuu

SEQ ID NO: 2210533 - RNA, 22 nt, Human
gccucaagugauucuccugccu

SEQ ID NO: 2210534 - RNA, 24 nt, Human
gccucaagugauucuccugccuca

SEQ ID NO: 2210535 - RNA, 22 nt, Human
gccucaaugugaaucagacccu

SEQ ID NO: 2210536 - RNA, 17 nt, Human
gccucaaugugaccagg

SEQ ID NO: 2210537 - RNA, 21 nt, Human
gccucaaugugaaucagaccc

SEQ ID NO: 2210538 - RNA, 18 nt, Human
gccucaauaagccuuguc

SEQ ID NO: 2210539 - RNA, 13 nt, Human
gccucacagaaga

SEQ ID NO: 2210540 - RNA, 21 nt, Human
gccucaaugugguugcaaggc

SEQ ID NO: 2210541 - RNA, 23 nt, Human
gccucacacgguuugaagccugg

SEQ ID NO: 2210542 - RNA, 15 nt, Human
gccucaacccucccu

SEQ ID NO: 2210543 - RNA, 17 nt, Human
gccucaauaagccuugu

SEQ ID NO: 2210544 - RNA, 14 nt, Human
gccucaaugccagu

SEQ ID NO: 2210545 - RNA, 14 nt, Human
gccucaacccuccc

SEQ ID NO: 2210546 - RNA, 18 nt, Human
gccucagcauccuggcac

SEQ ID NO: 2210547 - RNA, 17 nt, Human
gccucagcauccuggca

SEQ ID NO: 2210548 - RNA, 15 nt, Human
gccucacagaagaau

SEQ ID NO: 2210549 - RNA, 13 nt, Human
gccucagccagag

SEQ ID NO: 2210550 - RNA, 15 nt, Human
gccucagccagagaa

SEQ ID NO: 2210551 - RNA, 14 nt, Human
gccucagccagaga

SEQ ID NO: 2210552 - RNA, 16 nt, Human
gccucagccagagaag

SEQ ID NO: 2210553 - RNA, 15 nt, Human
gccucagccauucac

SEQ ID NO: 2210554 - RNA, 16 nt, Human
gccucagccauucacu

SEQ ID NO: 2210555 - RNA, 17 nt, Human
gccucagccauucacug

SEQ ID NO: 2210556 - RNA, 21 nt, Human
gccucagcauccuggcacccg

SEQ ID NO: 2210557 - RNA, 22 nt, Human
gccuauucccacaccuccacag

SEQ ID NO: 2210558 - RNA, 17 nt, Human
gccuauuuuaauaaaca

SEQ ID NO: 2210559 - RNA, 17 nt, Human
gccucaaaggcccgcuc

SEQ ID NO: 2210560 - RNA, 15 nt, Human
gccucaaaggcccgc

SEQ ID NO: 2210561 - RNA, 21 nt, Human
gccuauuucaguggcacguca

SEQ ID NO: 2210562 - RNA, 14 nt, Human
gccuaaggcugaac

SEQ ID NO: 2210563 - RNA, 22 nt, Human
gccuaaaagugggcuugauucu

SEQ ID NO: 2210564 - RNA, 16 nt, Human
gccgcaaaccacacug

SEQ ID NO: 2210565 - RNA, 17 nt, Human
gccgcaaaccacacugg

SEQ ID NO: 2210566 - RNA, 19 nt, Human
gccgcaaaccacacuggac

SEQ ID NO: 2210567 - RNA, 21 nt, Human
gccgcaaaccacacuggacuc

SEQ ID NO: 2210568 - RNA, 15 nt, Human
gccgcagcccugcag

SEQ ID NO: 2210569 - RNA, 16 nt, Human
gccgcagcccugcaga

SEQ ID NO: 2210570 - RNA, 17 nt, Human
gccgcagcccugcagag

SEQ ID NO: 2210571 - RNA, 18 nt, Human
gccgaguccaagcuggga

SEQ ID NO: 2210572 - RNA, 15 nt, Human
gccgaguccaagcug

SEQ ID NO: 2210573 - RNA, 14 nt, Human
gccgaguccaagcu

SEQ ID NO: 2210574 - RNA, 22 nt, Human
gccgauauacucuagaugaagu

SEQ ID NO: 2210575 - RNA, 17 nt, Human
gccgauauacucuagau

SEQ ID NO: 2210576 - RNA, 17 nt, Human
gccgauucaccugagca

SEQ ID NO: 2210577 - RNA, 20 nt, Human
gccgaggguccuggcuccug

SEQ ID NO: 2210578 - RNA, 18 nt, Human
gccgaggguccuggcucc

SEQ ID NO: 2210579 - RNA, 17 nt, Human
gccgagauagccaaggc

SEQ ID NO: 2210580 - RNA, 22 nt, Human
gccgcaaaccacacuggacucc

SEQ ID NO: 2210581 - RNA, 12 nt, Human
gccgggccccug

SEQ ID NO: 2210582 - RNA, 23 nt, Human
gccgggcaugguggcgcaagccu

SEQ ID NO: 2210583 - RNA, 14 nt, Human
gccgagucugucuc

SEQ ID NO: 2210584 - RNA, 22 nt, Human
gccggguacugagagucugcac

SEQ ID NO: 2210585 - RNA, 21 nt, Human
gccgggucugccucuucuggg

SEQ ID NO: 2210586 - RNA, 14 nt, Human
gccgggucugccuc

SEQ ID NO: 2210587 - RNA, 13 nt, Human
gccgggugcggug

SEQ ID NO: 2210588 - RNA, 16 nt, Human
gccgggugcgguggcu

SEQ ID NO: 2210589 - RNA, 19 nt, Human
gccgggugcgguggcucac

SEQ ID NO: 2210590 - RNA, 23 nt, Human
gccggggacagaggccugcccgg

SEQ ID NO: 2210591 - RNA, 19 nt, Human
gccggggacagaggccugc

SEQ ID NO: 2210592 - RNA, 21 nt, Human
gccggggacagaggccugccc

SEQ ID NO: 2210593 - RNA, 15 nt, Human
gccggggcugagacu

SEQ ID NO: 2210594 - RNA, 22 nt, Human
gccggggguucauaggucacug

SEQ ID NO: 2210595 - RNA, 22 nt, Human
gccgggguggagcaugggccug

SEQ ID NO: 2210596 - RNA, 13 nt, Human
gcccuugcccuga

SEQ ID NO: 2210597 - RNA, 16 nt, Human
gccggggacagaggcc

SEQ ID NO: 2210598 - RNA, 14 nt, Human
gccgggccccuggg

SEQ ID NO: 2210599 - RNA, 17 nt, Human
gccgggccccugggcuu

SEQ ID NO: 2210600 - RNA, 19 nt, Human
gccgggccccugggcuugg

SEQ ID NO: 2210601 - RNA, 19 nt, Human
gccgggccgaauccccucc

SEQ ID NO: 2210602 - RNA, 11 nt, Human
gcccucuucca

SEQ ID NO: 2210603 - RNA, 14 nt, Human
gcccucuuccauca

SEQ ID NO: 2210604 - RNA, 13 nt, Human
gcccucuguccug

SEQ ID NO: 2210605 - RNA, 14 nt, Human
gcccucuguccuga

SEQ ID NO: 2210606 - RNA, 15 nt, Human
gcccucuguccugac

SEQ ID NO: 2210607 - RNA, 12 nt, Human
gcccucuguccu

SEQ ID NO: 2210608 - RNA, 22 nt, Human
gcccuuccucuccacugccuuc

SEQ ID NO: 2210609 - RNA, 13 nt, Human
gcccuucucucca

SEQ ID NO: 2210610 - RNA, 19 nt, Human
gcccuucuuuccacagaag

SEQ ID NO: 2210611 - RNA, 23 nt, Human
gcccuucucuccagccccuggau

SEQ ID NO: 2210612 - RNA, 16 nt, Human
gccgagagccugcucc

SEQ ID NO: 2210613 - RNA, 15 nt, Human
gccgagagccugcuc

SEQ ID NO: 2210614 - RNA, 12 nt, Human
gccgagagccug

SEQ ID NO: 2210615 - RNA, 20 nt, Human
gccgagaagccagugcggca

SEQ ID NO: 2210616 - RNA, 22 nt, Human
gccgagacauggcuugccacag

SEQ ID NO: 2210617 - RNA, 14 nt, Human
gccgagaagcaaga

SEQ ID NO: 2210618 - RNA, 13 nt, Human
gccgagaagcaag

SEQ ID NO: 2210619 - RNA, 20 nt, Human
gccgaccucguccucccccu

SEQ ID NO: 2210620 - RNA, 22 nt, Human
gccgacugcacagcggccccug

SEQ ID NO: 2210621 - RNA, 21 nt, Human
gccgacuuuguaccccccaac

SEQ ID NO: 2210622 - RNA, 23 nt, Human
gccgacuuuguaccccccaaccc

SEQ ID NO: 2210623 - RNA, 13 nt, Human
gccgacuccuggg

SEQ ID NO: 2210624 - RNA, 22 nt, Human
gccgagagccugcucccccacc

SEQ ID NO: 2210625 - RNA, 20 nt, Human
gccgagagccugcuccccca

SEQ ID NO: 2210626 - RNA, 19 nt, Human
gccgagagccugcuccccc

SEQ ID NO: 2210627 - RNA, 17 nt, Human
gccgagagccugcuccc

SEQ ID NO: 2210628 - RNA, 16 nt, Human
gccgagauagccaagg

SEQ ID NO: 2210629 - RNA, 22 nt, Human
gcccuugcaguucagcaccacc

SEQ ID NO: 2210630 - RNA, 21 nt, Human
gcccuugcaguucagcaccac

SEQ ID NO: 2210631 - RNA, 20 nt, Human
gcccuugcaguucagcacca

SEQ ID NO: 2210632 - RNA, 19 nt, Human
gcccuugcaguucagcacc

SEQ ID NO: 2210633 - RNA, 22 nt, Human
gcccuugagcuccccaaaaacc

SEQ ID NO: 2210634 - RNA, 17 nt, Human
gcccuugagcuccccaa

SEQ ID NO: 2210635 - RNA, 21 nt, Human
gccgaccucguccucccccug

SEQ ID NO: 2210636 - RNA, 19 nt, Human
gccgaccucguccuccccc

SEQ ID NO: 2210637 - RNA, 13 nt, Human
gccgaccucgucc

SEQ ID NO: 2210638 - RNA, 17 nt, Human
gccgaccucagccuucc

SEQ ID NO: 2210639 - RNA, 15 nt, Human
gccgaccucagccuu

SEQ ID NO: 2210640 - RNA, 14 nt, Human
gccgaccucagccu

SEQ ID NO: 2210641 - RNA, 13 nt, Human
gccgaccucagcc

SEQ ID NO: 2210642 - RNA, 12 nt, Human
gccgaccucagc

SEQ ID NO: 2210643 - RNA, 18 nt, Human
gcccuugagcuccccaaa

SEQ ID NO: 2210644 - RNA, 14 nt, Human
gcccagguuucugg

SEQ ID NO: 2210645 - RNA, 23 nt, Human
gcccagguuucuggucucuaggc

SEQ ID NO: 2210646 - RNA, 17 nt, Human
gcccagguuucuggucu

SEQ ID NO: 2210647 - RNA, 15 nt, Human
gcccaguagaccuug

SEQ ID NO: 2210648 - RNA, 17 nt, Human
gcccaguagaccuuguu

SEQ ID NO: 2210649 - RNA, 22 nt, Human
gcccagucuggaaugcaguggu

SEQ ID NO: 2210650 - RNA, 13 nt, Human
gcccaguccccca

SEQ ID NO: 2210651 - RNA, 21 nt, Human
gcccagucccccaaccccagc

SEQ ID NO: 2210652 - RNA, 22 nt, Human
gcccagugucaaguugugcuug

SEQ ID NO: 2210653 - RNA, 13 nt, Human
gcccaguggcugc

SEQ ID NO: 2210654 - RNA, 17 nt, Human
gcccagucccccaaccc

SEQ ID NO: 2210655 - RNA, 14 nt, Human
gcccagucccccaa

SEQ ID NO: 2210656 - RNA, 15 nt, Human
gcccagucccccaac

SEQ ID NO: 2210657 - RNA, 19 nt, Human
gcccaguucacccugauuu

SEQ ID NO: 2210658 - RNA, 18 nt, Human
gcccauccccaggcaccu

SEQ ID NO: 2210659 - RNA, 12 nt, Human
gcccaucccccc

SEQ ID NO: 2210660 - RNA, 14 nt, Human
gcccauccccccuc

SEQ ID NO: 2210661 - RNA, 15 nt, Human
gcccauccccccuca

SEQ ID NO: 2210662 - RNA, 16 nt, Human
gcccauccccccucac

SEQ ID NO: 2210663 - RNA, 17 nt, Human
gcccauccccccucacc

SEQ ID NO: 2210664 - RNA, 18 nt, Human
gcccauccccccucacca

SEQ ID NO: 2210665 - RNA, 23 nt, Human
gcccaggguucccccagcccugu

SEQ ID NO: 2210666 - RNA, 22 nt, Human
gcccaggguucccccagcccug

SEQ ID NO: 2210667 - RNA, 15 nt, Human
gcccagguccucuga

SEQ ID NO: 2210668 - RNA, 16 nt, Human
gcccagguccucugau

SEQ ID NO: 2210669 - RNA, 21 nt, Human
gcccaggguucccccagcccu

SEQ ID NO: 2210670 - RNA, 20 nt, Human
gcccaggguucccccagccc

SEQ ID NO: 2210671 - RNA, 19 nt, Human
gcccaggguucccccagcc

SEQ ID NO: 2210672 - RNA, 17 nt, Human
gcccaggguucccccag

SEQ ID NO: 2210673 - RNA, 18 nt, Human
gcccagggcucagccugg

SEQ ID NO: 2210674 - RNA, 23 nt, Human
gcccaggcuggccagccccacag

SEQ ID NO: 2210675 - RNA, 17 nt, Human
gcccagggcucagccug

SEQ ID NO: 2210676 - RNA, 16 nt, Human
gcccagggcucagccu

SEQ ID NO: 2210677 - RNA, 15 nt, Human
gcccagggcucagcc

SEQ ID NO: 2210678 - RNA, 14 nt, Human
gcccagggcucagc

SEQ ID NO: 2210679 - RNA, 13 nt, Human
gcccagggcucag

SEQ ID NO: 2210680 - RNA, 12 nt, Human
gcccagggcuca

SEQ ID NO: 2210681 - RNA, 23 nt, Human
gcccagggcccagagcccagcuc

SEQ ID NO: 2210682 - RNA, 21 nt, Human
gcccagggcccagagcccagc

SEQ ID NO: 2210683 - RNA, 20 nt, Human
gcccagggcccagagcccag

SEQ ID NO: 2210684 - RNA, 19 nt, Human
gcccagggcccagagccca

SEQ ID NO: 2210685 - RNA, 18 nt, Human
gcccagggcccagagccc

SEQ ID NO: 2210686 - RNA, 16 nt, Human
gcccaggcuggcgugc

SEQ ID NO: 2210687 - RNA, 17 nt, Human
gcccagggcccagagcc

SEQ ID NO: 2210688 - RNA, 16 nt, Human
gcccagggcccagagc

SEQ ID NO: 2210689 - RNA, 15 nt, Human
gcccagggcccagag

SEQ ID NO: 2210690 - RNA, 14 nt, Human
gcccagggcccaga

SEQ ID NO: 2210691 - RNA, 14 nt, Human
gcccaggcuggcgu

SEQ ID NO: 2210692 - RNA, 15 nt, Human
gcccaggcuggcgug

SEQ ID NO: 2210693 - RNA, 17 nt, Human
gcccagcuugggcccag

SEQ ID NO: 2210694 - RNA, 18 nt, Human
gcccagcuugggcccagc

SEQ ID NO: 2210695 - RNA, 24 nt, Human
gcccagcugcaccugccagccugg

SEQ ID NO: 2210696 - RNA, 23 nt, Human
gcccagcugcaccugccagccug

SEQ ID NO: 2210697 - RNA, 18 nt, Human
gcccagcugcaccugcca

SEQ ID NO: 2210698 - RNA, 15 nt, Human
gcccagcugcaccug

SEQ ID NO: 2210699 - RNA, 14 nt, Human
gcccagcugcaccu

SEQ ID NO: 2210700 - RNA, 13 nt, Human
gcccagcugcacc

SEQ ID NO: 2210701 - RNA, 11 nt, Human
gcccagcuccc

SEQ ID NO: 2210702 - RNA, 12 nt, Human
gcccagcucccc

SEQ ID NO: 2210703 - RNA, 13 nt, Human
gcccagcuccccc

SEQ ID NO: 2210704 - RNA, 15 nt, Human
gcccagcuccaaggg

SEQ ID NO: 2210705 - RNA, 12 nt, Human
gcccagcuccaa

SEQ ID NO: 2210706 - RNA, 13 nt, Human
gcccagcucugaa

SEQ ID NO: 2210707 - RNA, 19 nt, Human
gcccagcucccccgggagg

SEQ ID NO: 2210708 - RNA, 16 nt, Human
gcccagcucccccggg

SEQ ID NO: 2210709 - RNA, 17 nt, Human
gcccagcucccccggga

SEQ ID NO: 2210710 - RNA, 20 nt, Human
gcccaccugcccaucacagg

SEQ ID NO: 2210711 - RNA, 15 nt, Human
gcccaccugcccauc

SEQ ID NO: 2210712 - RNA, 14 nt, Human
gcccaccugcccau

SEQ ID NO: 2210713 - RNA, 13 nt, Human
gcccaccugccca

SEQ ID NO: 2210714 - RNA, 15 nt, Human
gcccagcucagaggg

SEQ ID NO: 2210715 - RNA, 20 nt, Human
gcccagcuauaccugugccu

SEQ ID NO: 2210716 - RNA, 18 nt, Human
gcccaccuccccacgccc

SEQ ID NO: 2210717 - RNA, 19 nt, Human
gcccagcuauaccugugcc

SEQ ID NO: 2210718 - RNA, 10 nt, Human
gcccaccucc

SEQ ID NO: 2210719 - RNA, 20 nt, Human
gcccaccgcaugcccccucg

SEQ ID NO: 2210720 - RNA, 12 nt, Human
gcccaccucccc

SEQ ID NO: 2210721 - RNA, 15 nt, Human
gcccaccuccccacg

SEQ ID NO: 2210722 - RNA, 17 nt, Human
gcccaccuccccacgcc

SEQ ID NO: 2210723 - RNA, 21 nt, Human
gcccaccuccccacgcccucc

SEQ ID NO: 2210724 - RNA, 14 nt, Human
gcccaccgcaugcc

SEQ ID NO: 2210725 - RNA, 16 nt, Human
gcccaccgcaugcccc

SEQ ID NO: 2210726 - RNA, 17 nt, Human
gcccaccgcaugccccc

SEQ ID NO: 2210727 - RNA, 18 nt, Human
gcccaccgcaugcccccu

SEQ ID NO: 2210728 - RNA, 19 nt, Human
gcccaccgcaugcccccuc

SEQ ID NO: 2210729 - RNA, 11 nt, Human
gcccaggcugg

SEQ ID NO: 2210730 - RNA, 19 nt, Human
gcccaggcuggccagcccc

SEQ ID NO: 2210731 - RNA, 20 nt, Human
gcccaggcuggccagcccca

SEQ ID NO: 2210732 - RNA, 22 nt, Human
gcccaggcuggccagccccaca

SEQ ID NO: 2210733 - RNA, 17 nt, Human
gcccaggccugccuguu

SEQ ID NO: 2210734 - RNA, 19 nt, Human
gcccagcuugggcccagcu

SEQ ID NO: 2210735 - RNA, 20 nt, Human
gcccagcuugggcccagcug

SEQ ID NO: 2210736 - RNA, 21 nt, Human
gcccagcuugggcccagcugg

SEQ ID NO: 2210737 - RNA, 22 nt, Human
gcccagcuugggcccagcuggg

SEQ ID NO: 2210738 - RNA, 23 nt, Human
gcccagcuugggcccagcugggc

SEQ ID NO: 2210739 - RNA, 12 nt, Human
gcccaggcggga

SEQ ID NO: 2210740 - RNA, 22 nt, Human
gcccaggcgggagcgguggccc

SEQ ID NO: 2210741 - RNA, 12 nt, Human
gcccaggaaagg

SEQ ID NO: 2210742 - RNA, 15 nt, Human
gcccaggaaaggcuc

SEQ ID NO: 2210743 - RNA, 16 nt, Human
gcccaggaaaggcucc

SEQ ID NO: 2210744 - RNA, 18 nt, Human
gcccaggccuccuacagc

SEQ ID NO: 2210745 - RNA, 21 nt, Human
gccccaggcagggccaacccu

SEQ ID NO: 2210746 - RNA, 20 nt, Human
gccccaggcaggcugugcgc

SEQ ID NO: 2210747 - RNA, 19 nt, Human
gccccaggcaggcugugcg

SEQ ID NO: 2210748 - RNA, 15 nt, Human
gccccaggcaggcug

SEQ ID NO: 2210749 - RNA, 12 nt, Human
gccccaggcagg

SEQ ID NO: 2210750 - RNA, 22 nt, Human
gccccaggaccuggcugccaua

SEQ ID NO: 2210751 - RNA, 21 nt, Human
gccccaggaccuggcugccau

SEQ ID NO: 2210752 - RNA, 20 nt, Human
gccccaggaccuggcugcca

SEQ ID NO: 2210753 - RNA, 24 nt, Human
gccccaggaccagcucaggacaga

SEQ ID NO: 2210754 - RNA, 23 nt, Human
gccccaggaccagcucaggacag

SEQ ID NO: 2210755 - RNA, 22 nt, Human
gccccaggaccagcucaggaca

SEQ ID NO: 2210756 - RNA, 19 nt, Human
gccccaggaccagcucagg

SEQ ID NO: 2210757 - RNA, 18 nt, Human
gccccaggaccagcucag

SEQ ID NO: 2210758 - RNA, 17 nt, Human
gccccaggaccagcuca

SEQ ID NO: 2210759 - RNA, 16 nt, Human
gccccaggaccagcuc

SEQ ID NO: 2210760 - RNA, 15 nt, Human
gccccaggaccagcu

SEQ ID NO: 2210761 - RNA, 14 nt, Human
gccccaggaccagc

SEQ ID NO: 2210762 - RNA, 12 nt, Human
gccccaggacca

SEQ ID NO: 2210763 - RNA, 15 nt, Human
gccccagugcccaca

SEQ ID NO: 2210764 - RNA, 16 nt, Human
gccccagugcccacag

SEQ ID NO: 2210765 - RNA, 17 nt, Human
gccccagugcccacagg

SEQ ID NO: 2210766 - RNA, 21 nt, Human
gccccagugcccacaggauca

SEQ ID NO: 2210767 - RNA, 20 nt, Human
gccccaugccuguccagccu

SEQ ID NO: 2210768 - RNA, 17 nt, Human
gccccaugccuguccag

SEQ ID NO: 2210769 - RNA, 23 nt, Human
gccccaugccuguccagccuggg

SEQ ID NO: 2210770 - RNA, 12 nt, Human
gccccaugcugg

SEQ ID NO: 2210771 - RNA, 16 nt, Human
gccccaugccugucca

SEQ ID NO: 2210772 - RNA, 14 nt, Human
gccccaugccuguc

SEQ ID NO: 2210773 - RNA, 23 nt, Human
gccccauccucuguacagagccc

SEQ ID NO: 2210774 - RNA, 17 nt, Human
gccccauucugccugcc

SEQ ID NO: 2210775 - RNA, 18 nt, Human
gccccauucugccugccc

SEQ ID NO: 2210776 - RNA, 20 nt, Human
gccccauucugccugcccag

SEQ ID NO: 2210777 - RNA, 21 nt, Human
gccccauucugccugcccagg

SEQ ID NO: 2210778 - RNA, 10 nt, Human
gccccagccu

SEQ ID NO: 2210779 - RNA, 18 nt, Human
gccccagccucccugaag

SEQ ID NO: 2210780 - RNA, 16 nt, Human
gccccagccucccuga

SEQ ID NO: 2210781 - RNA, 21 nt, Human
gccccagccucccugaagccu

SEQ ID NO: 2210782 - RNA, 21 nt, Human
gccccagcccacccuccuguc

SEQ ID NO: 2210783 - RNA, 18 nt, Human
gccccagcccacccuccu

SEQ ID NO: 2210784 - RNA, 20 nt, Human
gccccagcccacccuccugu

SEQ ID NO: 2210785 - RNA, 17 nt, Human
gccccagcccccuuugg

SEQ ID NO: 2210786 - RNA, 12 nt, Human
gccccagcccaa

SEQ ID NO: 2210787 - RNA, 14 nt, Human
gccccagcccaagu

SEQ ID NO: 2210788 - RNA, 15 nt, Human
gccccagcccaaguc

SEQ ID NO: 2210789 - RNA, 16 nt, Human
gccccagcccaagucc

SEQ ID NO: 2210790 - RNA, 12 nt, Human
gccccagcccac

SEQ ID NO: 2210791 - RNA, 14 nt, Human
gccccagcccaccc

SEQ ID NO: 2210792 - RNA, 15 nt, Human
gccccagcccacccu

SEQ ID NO: 2210793 - RNA, 16 nt, Human
gccccagcccacccuc

SEQ ID NO: 2210794 - RNA, 14 nt, Human
gccccagcucuggc

SEQ ID NO: 2210795 - RNA, 11 nt, Human
gccccagcuga

SEQ ID NO: 2210796 - RNA, 17 nt, Human
gccccagcugacaugga

SEQ ID NO: 2210797 - RNA, 15 nt, Human
gccccaggaaaggcc

SEQ ID NO: 2210798 - RNA, 14 nt, Human
gccccaggaagccg

SEQ ID NO: 2210799 - RNA, 11 nt, Human
gccccaggacc

SEQ ID NO: 2210800 - RNA, 22 nt, Human
gccccaggaaaggcccagccac

SEQ ID NO: 2210801 - RNA, 13 nt, Human
gccccagcucugg

SEQ ID NO: 2210802 - RNA, 19 nt, Human
gccccagccuggcccagcu

SEQ ID NO: 2210803 - RNA, 20 nt, Human
gccccagccuggcccagcuc

SEQ ID NO: 2210804 - RNA, 21 nt, Human
gccccagccuggcccagcucc

SEQ ID NO: 2210805 - RNA, 22 nt, Human
gccccagccuggcccagcuccc

SEQ ID NO: 2210806 - RNA, 12 nt, Human
gccccagccugg

SEQ ID NO: 2210807 - RNA, 13 nt, Human
gccccagccuggc

SEQ ID NO: 2210808 - RNA, 14 nt, Human
gccccagccuggcc

SEQ ID NO: 2210809 - RNA, 15 nt, Human
gccccagccuggccc

SEQ ID NO: 2210810 - RNA, 16 nt, Human
gccccagccuggccca

SEQ ID NO: 2210811 - RNA, 17 nt, Human
gccccagccuggcccag

SEQ ID NO: 2210812 - RNA, 18 nt, Human
gccccagccuggcccagc

SEQ ID NO: 2210813 - RNA, 19 nt, Human
gcccaugcccaccugccca

SEQ ID NO: 2210814 - RNA, 15 nt, Human
gcccaugcccaccug

SEQ ID NO: 2210815 - RNA, 14 nt, Human
gcccaugcccaccu

SEQ ID NO: 2210816 - RNA, 13 nt, Human
gcccaugcccacc

SEQ ID NO: 2210817 - RNA, 18 nt, Human
gcccaucugggaaaauac

SEQ ID NO: 2210818 - RNA, 17 nt, Human
gcccaugaguccuugaa

SEQ ID NO: 2210819 - RNA, 16 nt, Human
gcccaugccaccgcuu

SEQ ID NO: 2210820 - RNA, 23 nt, Human
gcccauggacaggcuggcuccag

SEQ ID NO: 2210821 - RNA, 21 nt, Human
gcccauggacaggcuggcucc

SEQ ID NO: 2210822 - RNA, 20 nt, Human
gcccauggacaggcuggcuc

SEQ ID NO: 2210823 - RNA, 19 nt, Human
gcccauggacaggcuggcu

SEQ ID NO: 2210824 - RNA, 12 nt, Human
gccccagccaga

SEQ ID NO: 2210825 - RNA, 14 nt, Human
gccccagccagagu

SEQ ID NO: 2210826 - RNA, 19 nt, Human
gccccagccagaguuccug

SEQ ID NO: 2210827 - RNA, 20 nt, Human
gccccagccagaguuccugc

SEQ ID NO: 2210828 - RNA, 22 nt, Human
gcccaucuaugucccuugcugu

SEQ ID NO: 2210829 - RNA, 22 nt, Human
gcccaucugggggccucuucug

SEQ ID NO: 2210830 - RNA, 20 nt, Human
gcccauccccccucaccagg

SEQ ID NO: 2210831 - RNA, 12 nt, Human
gcccaucccugc

SEQ ID NO: 2210832 - RNA, 14 nt, Human
gcccaucccugccu

SEQ ID NO: 2210833 - RNA, 16 nt, Human
gcccaucccugccugg

SEQ ID NO: 2210834 - RNA, 18 nt, Human
gcccaucccugccugguc

SEQ ID NO: 2210835 - RNA, 19 nt, Human
gcccaucccugccugguca

SEQ ID NO: 2210836 - RNA, 21 nt, Human
gcccaucccuggaaggugcug

SEQ ID NO: 2210837 - RNA, 20 nt, Human
gccccauucuuuuguaauuu

SEQ ID NO: 2210838 - RNA, 13 nt, Human
gccccaugcugga

SEQ ID NO: 2210839 - RNA, 14 nt, Human
gccccaugcuggag

SEQ ID NO: 2210840 - RNA, 15 nt, Human
gccccaugcuggagc

SEQ ID NO: 2210841 - RNA, 23 nt, Human
gccccgaggccuucucugaagga

SEQ ID NO: 2210842 - RNA, 22 nt, Human
gccccauucugccugcccaggc

SEQ ID NO: 2210843 - RNA, 23 nt, Human
gccccauucugccugcccaggcc

SEQ ID NO: 2210844 - RNA, 13 nt, Human
gccccgccgccug

SEQ ID NO: 2210845 - RNA, 21 nt, Human
gccccgcccccaguccccacc

SEQ ID NO: 2210846 - RNA, 14 nt, Human
gccccgccuccccg

SEQ ID NO: 2210847 - RNA, 14 nt, Human
gccccgccccacau

SEQ ID NO: 2210848 - RNA, 13 nt, Human
gccccgccccaca

SEQ ID NO: 2210849 - RNA, 20 nt, Human
gccccgcagaccuccccagc

SEQ ID NO: 2210850 - RNA, 21 nt, Human
gccccgcagaccuccccagcc

SEQ ID NO: 2210851 - RNA, 22 nt, Human
gccccgccccacauuccgacaa

SEQ ID NO: 2210852 - RNA, 15 nt, Human
gccccgccccacauu

SEQ ID NO: 2210853 - RNA, 15 nt, Human
gccccgcagaccucc

SEQ ID NO: 2210854 - RNA, 18 nt, Human
gccccgcagaccucccca

SEQ ID NO: 2210855 - RNA, 19 nt, Human
gccccgcagaccuccccag

SEQ ID NO: 2210856 - RNA, 22 nt, Human
gccccgaggccuucucugaagg

SEQ ID NO: 2210857 - RNA, 14 nt, Human
gccccgcccaggcu

SEQ ID NO: 2210858 - RNA, 20 nt, Human
gccccgcuuguccagcgccu

SEQ ID NO: 2210859 - RNA, 13 nt, Human
gccccggccaccu

SEQ ID NO: 2210860 - RNA, 14 nt, Human
gccccggccaccuc

SEQ ID NO: 2210861 - RNA, 15 nt, Human
gccccggccaccucu

SEQ ID NO: 2210862 - RNA, 16 nt, Human
gccccggccaccucug

SEQ ID NO: 2210863 - RNA, 19 nt, Human
gccccgcuuguccagcgcc

SEQ ID NO: 2210864 - RNA, 18 nt, Human
gccccgcuuguccagcgc

SEQ ID NO: 2210865 - RNA, 16 nt, Human
gccccgcuuguccagc

SEQ ID NO: 2210866 - RNA, 14 nt, Human
gccccgcuugucca

SEQ ID NO: 2210867 - RNA, 17 nt, Human
gccccgcgccuccuucc

SEQ ID NO: 2210868 - RNA, 18 nt, Human
gccccgcuuggcuucuuc

SEQ ID NO: 2210869 - RNA, 22 nt, Human
gccccgcuuggcuucuucuuua

SEQ ID NO: 2210870 - RNA, 15 nt, Human
gccccgucaccaucu

SEQ ID NO: 2210871 - RNA, 19 nt, Human
gccccggggugaguccauu

SEQ ID NO: 2210872 - RNA, 15 nt, Human
gccccggcccugggc

SEQ ID NO: 2210873 - RNA, 17 nt, Human
gccccggcccugggcuc

SEQ ID NO: 2210874 - RNA, 21 nt, Human
gccccggcccugggcucggag

SEQ ID NO: 2210875 - RNA, 17 nt, Human
gccccgggacuuggagg

SEQ ID NO: 2210876 - RNA, 17 nt, Human
gccccggccaccucugc

SEQ ID NO: 2210877 - RNA, 18 nt, Human
gccccggccaccucugcg

SEQ ID NO: 2210878 - RNA, 14 nt, Human
gccccggccccagc

SEQ ID NO: 2210879 - RNA, 16 nt, Human
gccccggccccagcca

SEQ ID NO: 2210880 - RNA, 17 nt, Human
gccccggccccagccag

SEQ ID NO: 2210881 - RNA, 18 nt, Human
gccccggccccagccaga

SEQ ID NO: 2210882 - RNA, 13 nt, Human
gccccggccccgg

SEQ ID NO: 2210883 - RNA, 14 nt, Human
gccccggcccuggg

SEQ ID NO: 2210884 - RNA, 20 nt, Human
gccccgucucaugaggggcc

SEQ ID NO: 2210885 - RNA, 13 nt, Human
gccccgugaggca

SEQ ID NO: 2210886 - RNA, 17 nt, Human
gccccgugggguuccuc

SEQ ID NO: 2210887 - RNA, 20 nt, Human
gccccgucaccaucucaggc

SEQ ID NO: 2210888 - RNA, 18 nt, Human
gccccgucaccaucucag

SEQ ID NO: 2210889 - RNA, 17 nt, Human
gccccgucaccaucuca

SEQ ID NO: 2210890 - RNA, 18 nt, Human
gccccgggacuuggaggg

SEQ ID NO: 2210891 - RNA, 17 nt, Human
gccccgucccccucugg

SEQ ID NO: 2210892 - RNA, 22 nt, Human
gccccgucaccaucucaggcca

SEQ ID NO: 2210893 - RNA, 21 nt, Human
gccccgucaccaucucaggcc

SEQ ID NO: 2210894 - RNA, 23 nt, Human
gccccgucaccaucucaggccac

SEQ ID NO: 2210895 - RNA, 21 nt, Human
gccccgucccccucuggcucc

SEQ ID NO: 2210896 - RNA, 13 nt, Human
gccccugcacaaa

SEQ ID NO: 2210897 - RNA, 23 nt, Human
gccccugagcaaugucugugcua

SEQ ID NO: 2210898 - RNA, 20 nt, Human
gccccugagcaaugucugug

SEQ ID NO: 2210899 - RNA, 22 nt, Human
gccccugagcaaugucugugcu

SEQ ID NO: 2210900 - RNA, 18 nt, Human
gccccucccacagcgcug

SEQ ID NO: 2210901 - RNA, 20 nt, Human
gccccugagaucucugcagg

SEQ ID NO: 2210902 - RNA, 23 nt, Human
gccccuggcagccccuguucugg

SEQ ID NO: 2210903 - RNA, 19 nt, Human
gccccugcacuccagccug

SEQ ID NO: 2210904 - RNA, 17 nt, Human
gccccuucccccuccaa

SEQ ID NO: 2210905 - RNA, 23 nt, Human
gccccuggcugggacguggcuca

SEQ ID NO: 2210906 - RNA, 16 nt, Human
gccccuggcugggacg

SEQ ID NO: 2210907 - RNA, 14 nt, Human
gccccuggcuggga

SEQ ID NO: 2210908 - RNA, 12 nt, Human
gccccuggcugg

SEQ ID NO: 2210909 - RNA, 14 nt, Human
gccccuggccccag

SEQ ID NO: 2210910 - RNA, 14 nt, Human
gccccugcaucccc

SEQ ID NO: 2210911 - RNA, 13 nt, Human
gccccuggcccag

SEQ ID NO: 2210912 - RNA, 13 nt, Human
gccccuggcccca

SEQ ID NO: 2210913 - RNA, 22 nt, Human
gccccuggcccagcggccccuc

SEQ ID NO: 2210914 - RNA, 23 nt, Human
gccccuggcccagcggccccucc

SEQ ID NO: 2210915 - RNA, 16 nt, Human
gccccuggcccagcgg

SEQ ID NO: 2210916 - RNA, 17 nt, Human
gccccuggcccagcggc

SEQ ID NO: 2210917 - RNA, 18 nt, Human
gccccuggcccagcggcc

SEQ ID NO: 2210918 - RNA, 19 nt, Human
gccccuggcccagcggccc

SEQ ID NO: 2210919 - RNA, 20 nt, Human
gccccuagaaucagccuagg

SEQ ID NO: 2210920 - RNA, 13 nt, Human
gccccuagcccag

SEQ ID NO: 2210921 - RNA, 17 nt, Human
gccccuagaaucagccu

SEQ ID NO: 2210922 - RNA, 22 nt, Human
gccccgugcagacuggagggga

SEQ ID NO: 2210923 - RNA, 20 nt, Human
gccccgugcagacuggaggg

SEQ ID NO: 2210924 - RNA, 19 nt, Human
gccccgugcagacuggagg

SEQ ID NO: 2210925 - RNA, 15 nt, Human
gccccgugcagacug

SEQ ID NO: 2210926 - RNA, 19 nt, Human
gccccguguccugccuguc

SEQ ID NO: 2210927 - RNA, 16 nt, Human
gccccuaccccacacc

SEQ ID NO: 2210928 - RNA, 23 nt, Human
gccccucaacucuccuccagagu

SEQ ID NO: 2210929 - RNA, 20 nt, Human
gccccuagcccaggagagag

SEQ ID NO: 2210930 - RNA, 21 nt, Human
gccccuagcccaggagagaga

SEQ ID NO: 2210931 - RNA, 14 nt, Human
gccccuagcccagg

SEQ ID NO: 2210932 - RNA, 15 nt, Human
gccccuagcccagga

SEQ ID NO: 2210933 - RNA, 18 nt, Human
gccccuagcccaggagag

SEQ ID NO: 2210934 - RNA, 19 nt, Human
gccccuagcccaggagaga

SEQ ID NO: 2210935 - RNA, 19 nt, Human
gccccucagggucccuggu

SEQ ID NO: 2210936 - RNA, 21 nt, Human
gccccucagggucccuggugg

SEQ ID NO: 2210937 - RNA, 20 nt, Human
gccccuauguaguccgugcu

SEQ ID NO: 2210938 - RNA, 22 nt, Human
gccccuagcuuagagccucccu

SEQ ID NO: 2210939 - RNA, 21 nt, Human
gccccucaucucucugcccaa

SEQ ID NO: 2210940 - RNA, 21 nt, Human
gccccucaucugcucagcagc

SEQ ID NO: 2210941 - RNA, 12 nt, Human
gccccuccagcu

SEQ ID NO: 2210942 - RNA, 13 nt, Human
gccccuccagcuu

SEQ ID NO: 2210943 - RNA, 18 nt, Human
gccccuccagcuugugga

SEQ ID NO: 2210944 - RNA, 14 nt, Human
gccccuccagcuug

SEQ ID NO: 2210945 - RNA, 15 nt, Human
gccccucccacacac

SEQ ID NO: 2210946 - RNA, 21 nt, Human
gccccucccacacacacccac

SEQ ID NO: 2210947 - RNA, 15 nt, Human
gcccuccccucucug

SEQ ID NO: 2210948 - RNA, 20 nt, Human
gcccuccccuccccugcugc

SEQ ID NO: 2210949 - RNA, 21 nt, Human
gcccuccccuccccugcugca

SEQ ID NO: 2210950 - RNA, 18 nt, Human
gcccuccccucucugcac

SEQ ID NO: 2210951 - RNA, 19 nt, Human
gcccuccccucucugcacc

SEQ ID NO: 2210952 - RNA, 12 nt, Human
gcccuccccucc

SEQ ID NO: 2210953 - RNA, 13 nt, Human
gcccuccccuccc

SEQ ID NO: 2210954 - RNA, 16 nt, Human
gcccuccccuccccug

SEQ ID NO: 2210955 - RNA, 17 nt, Human
gcccuccccuccccugc

SEQ ID NO: 2210956 - RNA, 18 nt, Human
gcccuccccuccccugcu

SEQ ID NO: 2210957 - RNA, 19 nt, Human
gcccuccccuccccugcug

SEQ ID NO: 2210958 - RNA, 19 nt, Human
gcccuccuacccugcgccc

SEQ ID NO: 2210959 - RNA, 24 nt, Human
gcccuccuacccugcgcccagucc

SEQ ID NO: 2210960 - RNA, 21 nt, Human
gcccuccucaccccgucuggg

SEQ ID NO: 2210961 - RNA, 14 nt, Human
gcccuccucacccc

SEQ ID NO: 2210962 - RNA, 13 nt, Human
gcccuccucaccc

SEQ ID NO: 2210963 - RNA, 15 nt, Human
gcccucccgccccuu

SEQ ID NO: 2210964 - RNA, 15 nt, Human
gcccucccugccccu

SEQ ID NO: 2210965 - RNA, 18 nt, Human
gcccuccuacccugcgcc

SEQ ID NO: 2210966 - RNA, 22 nt, Human
gcccuccccuccccugcugcag

SEQ ID NO: 2210967 - RNA, 13 nt, Human
gcccucccgcccc

SEQ ID NO: 2210968 - RNA, 21 nt, Human
gcccggagauuggacggccug

SEQ ID NO: 2210969 - RNA, 19 nt, Human
gcccggagauuggacggcc

SEQ ID NO: 2210970 - RNA, 22 nt, Human
gcccggagauuggacggccuga

SEQ ID NO: 2210971 - RNA, 19 nt, Human
gcccuccccauggagccag

SEQ ID NO: 2210972 - RNA, 21 nt, Human
gcccgggcucugccucccauc

SEQ ID NO: 2210973 - RNA, 19 nt, Human
gcccgggcucugccuccca

SEQ ID NO: 2210974 - RNA, 20 nt, Human
gcccgggcucugccucccau

SEQ ID NO: 2210975 - RNA, 10 nt, Human
gcccuccuuc

SEQ ID NO: 2210976 - RNA, 15 nt, Human
gcccuccuuguccac

SEQ ID NO: 2210977 - RNA, 17 nt, Human
gcccuccuuguccaccc

SEQ ID NO: 2210978 - RNA, 23 nt, Human
gcccuccugaaacuuacacacaa

SEQ ID NO: 2210979 - RNA, 12 nt, Human
gcccuccucucc

SEQ ID NO: 2210980 - RNA, 20 nt, Human
gcccuccucucccauugucc

SEQ ID NO: 2210981 - RNA, 17 nt, Human
gcccuccucucccauug

SEQ ID NO: 2210982 - RNA, 14 nt, Human
gcccuccucuccca

SEQ ID NO: 2210983 - RNA, 22 nt, Human
gcccucugcccacucccugcaa

SEQ ID NO: 2210984 - RNA, 22 nt, Human
gcccucuggaguggccacuaag

SEQ ID NO: 2210985 - RNA, 20 nt, Human
gcccucuggaguggccacua

SEQ ID NO: 2210986 - RNA, 19 nt, Human
gcccucuggaguggccacu

SEQ ID NO: 2210987 - RNA, 18 nt, Human
gcccucuggaguggccac

SEQ ID NO: 2210988 - RNA, 17 nt, Human
gcccucuggaguggcca

SEQ ID NO: 2210989 - RNA, 16 nt, Human
gcccucuggaguggcc

SEQ ID NO: 2210990 - RNA, 14 nt, Human
gcccucuggagugg

SEQ ID NO: 2210991 - RNA, 16 nt, Human
gcccuccuuguccacc

SEQ ID NO: 2210992 - RNA, 18 nt, Human
gcccgcggggacauuggg

SEQ ID NO: 2210993 - RNA, 23 nt, Human
gcccgcgcccucgcccccgcccc

SEQ ID NO: 2210994 - RNA, 12 nt, Human
gcccgcucccag

SEQ ID NO: 2210995 - RNA, 22 nt, Human
gcccgcucuacaucuucugccu

SEQ ID NO: 2210996 - RNA, 13 nt, Human
gcccgcucccagu

SEQ ID NO: 2210997 - RNA, 15 nt, Human
gcccgcucugcagac

SEQ ID NO: 2210998 - RNA, 17 nt, Human
gcccgcugaguggacug

SEQ ID NO: 2210999 - RNA, 12 nt, Human
gcccgcugggcu

SEQ ID NO: 2211000 - RNA, 13 nt, Human
gcccgcugggcug

SEQ ID NO: 2211001 - RNA, 14 nt, Human
gcccgcugggcuga

SEQ ID NO: 2211002 - RNA, 15 nt, Human
gcccgcugggcugag

SEQ ID NO: 2211003 - RNA, 16 nt, Human
gcccgcugggcugagc

SEQ ID NO: 2211004 - RNA, 17 nt, Human
gcccgcugggcugagcc

SEQ ID NO: 2211005 - RNA, 18 nt, Human
gcccgcugggcugagccc

SEQ ID NO: 2211006 - RNA, 12 nt, Human
gcccggcuccag

SEQ ID NO: 2211007 - RNA, 12 nt, Human
gcccgcuugccu

SEQ ID NO: 2211008 - RNA, 14 nt, Human
gcccgcuugccucg

SEQ ID NO: 2211009 - RNA, 18 nt, Human
gcccgcuugccucggcuc

SEQ ID NO: 2211010 - RNA, 19 nt, Human
gcccgcuugccucggcucc

SEQ ID NO: 2211011 - RNA, 21 nt, Human
gcccgcuugccucggcuccug

SEQ ID NO: 2211012 - RNA, 22 nt, Human
gcccgcuugccucggcuccugc

SEQ ID NO: 2211013 - RNA, 23 nt, Human
gcccgcuugccucggcuccugcu

SEQ ID NO: 2211014 - RNA, 14 nt, Human
gcccggaccuuggc

SEQ ID NO: 2211015 - RNA, 23 nt, Human
gccccuucuagguggcaaggcug

SEQ ID NO: 2211016 - RNA, 20 nt, Human
gccccuuccuugcucugcac

SEQ ID NO: 2211017 - RNA, 18 nt, Human
gccccuucucagaaucua

SEQ ID NO: 2211018 - RNA, 11 nt, Human
gccccugggcu

SEQ ID NO: 2211019 - RNA, 12 nt, Human
gccccugggcuu

SEQ ID NO: 2211020 - RNA, 16 nt, Human
gccccuuccccgaggg

SEQ ID NO: 2211021 - RNA, 20 nt, Human
gccccuucugacccaugcug

SEQ ID NO: 2211022 - RNA, 13 nt, Human
gcccgcgcccgcg

SEQ ID NO: 2211023 - RNA, 17 nt, Human
gccccuucucagaaucu

SEQ ID NO: 2211024 - RNA, 19 nt, Human
gccccuucugacccaugcu

SEQ ID NO: 2211025 - RNA, 13 nt, Human
gcccggcuccagg

SEQ ID NO: 2211026 - RNA, 14 nt, Human
gcccggcuccaggc

SEQ ID NO: 2211027 - RNA, 15 nt, Human
gcccggcuccaggcu

SEQ ID NO: 2211028 - RNA, 12 nt, Human
gcccgggcucug

SEQ ID NO: 2211029 - RNA, 13 nt, Human
gcccgggcucugc

SEQ ID NO: 2211030 - RNA, 14 nt, Human
gcccgggcucugcc

SEQ ID NO: 2211031 - RNA, 15 nt, Human
gcccgggcucugccu

SEQ ID NO: 2211032 - RNA, 18 nt, Human
gcccgggcucugccuccc

SEQ ID NO: 2211033 - RNA, 22 nt, Human
gccagagcuacccgcagaguuc

SEQ ID NO: 2211034 - RNA, 15 nt, Human
gccagagcugggagg

SEQ ID NO: 2211035 - RNA, 18 nt, Human
gccagagggagugacaga

SEQ ID NO: 2211036 - RNA, 14 nt, Human
gccagaggaacugu

SEQ ID NO: 2211037 - RNA, 18 nt, Human
gccagaggaacuguccag

SEQ ID NO: 2211038 - RNA, 20 nt, Human
gccagaggaacuguccagag

SEQ ID NO: 2211039 - RNA, 21 nt, Human
gccagaggaacuguccagaga

SEQ ID NO: 2211040 - RNA, 24 nt, Human
gccagaggaacuguccagagagca

SEQ ID NO: 2211041 - RNA, 12 nt, Human
gccagagacaca

SEQ ID NO: 2211042 - RNA, 15 nt, Human
gccagagacacaagc

SEQ ID NO: 2211043 - RNA, 23 nt, Human
gccagagauccaaaagaagcccc

SEQ ID NO: 2211044 - RNA, 18 nt, Human
gccagagaagugacaggg

SEQ ID NO: 2211045 - RNA, 19 nt, Human
gccagagaagugacaggga

SEQ ID NO: 2211046 - RNA, 14 nt, Human
gccagagaagugac

SEQ ID NO: 2211047 - RNA, 15 nt, Human
gccagagaagugaca

SEQ ID NO: 2211048 - RNA, 16 nt, Human
gccagagaagugacag

SEQ ID NO: 2211049 - RNA, 17 nt, Human
gccagagaagugacagg

SEQ ID NO: 2211050 - RNA, 14 nt, Human
gccagagccagggg

SEQ ID NO: 2211051 - RNA, 12 nt, Human
gccagagccagg

SEQ ID NO: 2211052 - RNA, 22 nt, Human
gccagagauccaaaagaagccc

SEQ ID NO: 2211053 - RNA, 17 nt, Human
gccacugcaccgggcca

SEQ ID NO: 2211054 - RNA, 18 nt, Human
gccacugcaccgggccac

SEQ ID NO: 2211055 - RNA, 13 nt, Human
gccagagaagcua

SEQ ID NO: 2211056 - RNA, 11 nt, Human
gccagagaagu

SEQ ID NO: 2211057 - RNA, 13 nt, Human
gccagagaaguga

SEQ ID NO: 2211058 - RNA, 10 nt, Human
gccagagaag

SEQ ID NO: 2211059 - RNA, 17 nt, Human
gccacugcacagagcuc

SEQ ID NO: 2211060 - RNA, 22 nt, Human
gccacugcacagagcucuccag

SEQ ID NO: 2211061 - RNA, 15 nt, Human
gccacugcacagagc

SEQ ID NO: 2211062 - RNA, 16 nt, Human
gccacugcacagagcu

SEQ ID NO: 2211063 - RNA, 21 nt, Human
gccacucaggaggcugaggca

SEQ ID NO: 2211064 - RNA, 20 nt, Human
gccacucaggaggcugaggc

SEQ ID NO: 2211065 - RNA, 14 nt, Human
gccacucaggccca

SEQ ID NO: 2211066 - RNA, 22 nt, Human
gccacucaggcccaaagccucg

SEQ ID NO: 2211067 - RNA, 15 nt, Human
gccacucagcuuccu

SEQ ID NO: 2211068 - RNA, 16 nt, Human
gccacucauuccugua

SEQ ID NO: 2211069 - RNA, 19 nt, Human
gccacugaagcugggauuc

SEQ ID NO: 2211070 - RNA, 19 nt, Human
gccacuccagaccccuggc

SEQ ID NO: 2211071 - RNA, 16 nt, Human
gccacuccagaccccu

SEQ ID NO: 2211072 - RNA, 18 nt, Human
gccacuccagaccccugg

SEQ ID NO: 2211073 - RNA, 14 nt, Human
gccacggcagccua

SEQ ID NO: 2211074 - RNA, 18 nt, Human
gccaaauguaauugaaua

SEQ ID NO: 2211075 - RNA, 16 nt, Human
gccaaauguaauugaa

SEQ ID NO: 2211076 - RNA, 22 nt, Human
gccaaaugguuuaacuucugcc

SEQ ID NO: 2211077 - RNA, 17 nt, Human
gccaaauauguccuggg

SEQ ID NO: 2211078 - RNA, 14 nt, Human
gccacggccaggcc

SEQ ID NO: 2211079 - RNA, 15 nt, Human
gccacggccaggcca

SEQ ID NO: 2211080 - RNA, 23 nt, Human
gccaaaggagggucaggaaggau

SEQ ID NO: 2211081 - RNA, 14 nt, Human
gccaaagaucacuu

SEQ ID NO: 2211082 - RNA, 16 nt, Human
gccaaagauaaucucu

SEQ ID NO: 2211083 - RNA, 19 nt, Human
gccaaagacuuaguauauu

SEQ ID NO: 2211084 - RNA, 19 nt, Human
gccaaagggaaauaucauu

SEQ ID NO: 2211085 - RNA, 18 nt, Human
gccaaaggaugugauaua

SEQ ID NO: 2211086 - RNA, 16 nt, Human
gccaaaggaugugaua

SEQ ID NO: 2211087 - RNA, 17 nt, Human
gccaaaggaugugauau

SEQ ID NO: 2211088 - RNA, 12 nt, Human
gccaaaguguua

SEQ ID NO: 2211089 - RNA, 16 nt, Human
gccaaauaaugucucu

SEQ ID NO: 2211090 - RNA, 15 nt, Human
gccaaauauguccug

SEQ ID NO: 2211091 - RNA, 18 nt, Human
gccaaauaaugucucugu

SEQ ID NO: 2211092 - RNA, 22 nt, Human
gccaaauaaugucucugugaga

SEQ ID NO: 2211093 - RNA, 21 nt, Human
gccacguuccuuacugcagaa

SEQ ID NO: 2211094 - RNA, 16 nt, Human
gccacguuccuuacug

SEQ ID NO: 2211095 - RNA, 23 nt, Human
gccacguguuugugcuguggugu

SEQ ID NO: 2211096 - RNA, 22 nt, Human
gccacguuccuuacugcagaau

SEQ ID NO: 2211097 - RNA, 22 nt, Human
gccacguuggagaagcccgugu

SEQ ID NO: 2211098 - RNA, 22 nt, Human
gccacguucuuacuaguuuccc

SEQ ID NO: 2211099 - RNA, 17 nt, Human
gccacgugccaggcccg

SEQ ID NO: 2211100 - RNA, 16 nt, Human
gccacgugccaggccc

SEQ ID NO: 2211101 - RNA, 18 nt, Human
gccacgugccaggcccgg

SEQ ID NO: 2211102 - RNA, 21 nt, Human
gccacgugggcaaacaggcag

SEQ ID NO: 2211103 - RNA, 16 nt, Human
gccacggccaggccag

SEQ ID NO: 2211104 - RNA, 21 nt, Human
gccacuauuguuagucucuug

SEQ ID NO: 2211105 - RNA, 20 nt, Human
gccacuauuguuagucucuu

SEQ ID NO: 2211106 - RNA, 23 nt, Human
gccacuaacuagagcagcccugg

SEQ ID NO: 2211107 - RNA, 14 nt, Human
gccacucacuaggc

SEQ ID NO: 2211108 - RNA, 15 nt, Human
gccacucacuaggcc

SEQ ID NO: 2211109 - RNA, 14 nt, Human
gccacucacacagc

SEQ ID NO: 2211110 - RNA, 17 nt, Human
gccacucacacagccag

SEQ ID NO: 2211111 - RNA, 18 nt, Human
gccacucacacagccagg

SEQ ID NO: 2211112 - RNA, 20 nt, Human
gccacucacacagccaggug

SEQ ID NO: 2211113 - RNA, 18 nt, Human
gccacucacuaggccccc

SEQ ID NO: 2211114 - RNA, 19 nt, Human
gccacucacuaggccccca

SEQ ID NO: 2211115 - RNA, 23 nt, Human
gccacucacuaggcccccacuug

SEQ ID NO: 2211116 - RNA, 16 nt, Human
gccacucaccgaagcc

SEQ ID NO: 2211117 - RNA, 13 nt, Human
gccacucagcuuc

SEQ ID NO: 2211118 - RNA, 19 nt, Human
gccagcgggaauggcagcu

SEQ ID NO: 2211119 - RNA, 16 nt, Human
gccagcgaacuugaca

SEQ ID NO: 2211120 - RNA, 13 nt, Human
gccagcguccucc

SEQ ID NO: 2211121 - RNA, 12 nt, Human
gccagcguccuc

SEQ ID NO: 2211122 - RNA, 21 nt, Human
gccagccuucuuccaucccag

SEQ ID NO: 2211123 - RNA, 12 nt, Human
gccagcgaacuu

SEQ ID NO: 2211124 - RNA, 23 nt, Human
gccagcuacuuccuccuccccac

SEQ ID NO: 2211125 - RNA, 22 nt, Human
gccagcguccuccucugugacc

SEQ ID NO: 2211126 - RNA, 19 nt, Human
gccagcguccuccucugug

SEQ ID NO: 2211127 - RNA, 14 nt, Human
gccagccuugacca

SEQ ID NO: 2211128 - RNA, 20 nt, Human
gccagccuugaccauucucc

SEQ ID NO: 2211129 - RNA, 21 nt, Human
gccagccuugaccauucucca

SEQ ID NO: 2211130 - RNA, 22 nt, Human
gccagccuugaccauucuccac

SEQ ID NO: 2211131 - RNA, 13 nt, Human
gccagcugccucc

SEQ ID NO: 2211132 - RNA, 13 nt, Human
gccagcugcuccc

SEQ ID NO: 2211133 - RNA, 14 nt, Human
gccagcucauuuca

SEQ ID NO: 2211134 - RNA, 15 nt, Human
gccagcucucagcca

SEQ ID NO: 2211135 - RNA, 13 nt, Human
gccagcucuguau

SEQ ID NO: 2211136 - RNA, 14 nt, Human
gccagcucucagcc

SEQ ID NO: 2211137 - RNA, 13 nt, Human
gccagcucucagc

SEQ ID NO: 2211138 - RNA, 16 nt, Human
gccagcucagucccau

SEQ ID NO: 2211139 - RNA, 13 nt, Human
gccagcucccucu

SEQ ID NO: 2211140 - RNA, 16 nt, Human
gccagcugcuccccag

SEQ ID NO: 2211141 - RNA, 15 nt, Human
gccagcugcucccca

SEQ ID NO: 2211142 - RNA, 14 nt, Human
gccagcugcucccc

SEQ ID NO: 2211143 - RNA, 14 nt, Human
gccagcugcuuggg

SEQ ID NO: 2211144 - RNA, 13 nt, Human
gccagcuggagaa

SEQ ID NO: 2211145 - RNA, 16 nt, Human
gccagcugcuugggcu

SEQ ID NO: 2211146 - RNA, 15 nt, Human
gccagcugcuugggc

SEQ ID NO: 2211147 - RNA, 18 nt, Human
gccagcuggcagcagagu

SEQ ID NO: 2211148 - RNA, 17 nt, Human
gccagcuggcagcagag

SEQ ID NO: 2211149 - RNA, 14 nt, Human
gccagcuggcagca

SEQ ID NO: 2211150 - RNA, 18 nt, Human
gccagcuuguuauuuaua

SEQ ID NO: 2211151 - RNA, 21 nt, Human
gccagcccucccuguccuccu

SEQ ID NO: 2211152 - RNA, 20 nt, Human
gccagcccucccuguccucc

SEQ ID NO: 2211153 - RNA, 17 nt, Human
gccagcccucccugucc

SEQ ID NO: 2211154 - RNA, 15 nt, Human
gccagcccucccugu

SEQ ID NO: 2211155 - RNA, 14 nt, Human
gccagcccucccug

SEQ ID NO: 2211156 - RNA, 13 nt, Human
gccagcccucccu

SEQ ID NO: 2211157 - RNA, 10 nt, Human
gccagcccuc

SEQ ID NO: 2211158 - RNA, 15 nt, Human
gccagcccggcuggu

SEQ ID NO: 2211159 - RNA, 23 nt, Human
gccagcccucccuguccuccucg

SEQ ID NO: 2211160 - RNA, 22 nt, Human
gccagcccucccuguccuccuc

SEQ ID NO: 2211161 - RNA, 21 nt, Human
gccagccccucccaccacagc

SEQ ID NO: 2211162 - RNA, 20 nt, Human
gccagccccucccaccacag

SEQ ID NO: 2211163 - RNA, 17 nt, Human
gccagccccucccacca

SEQ ID NO: 2211164 - RNA, 19 nt, Human
gccagccccuggccccagg

SEQ ID NO: 2211165 - RNA, 14 nt, Human
gccagccccuggcc

SEQ ID NO: 2211166 - RNA, 20 nt, Human
gccagccccuggccccagga

SEQ ID NO: 2211167 - RNA, 21 nt, Human
gccagccgagauagccaaggc

SEQ ID NO: 2211168 - RNA, 20 nt, Human
gccagccgagauagccaagg

SEQ ID NO: 2211169 - RNA, 12 nt, Human
gccagccuugac

SEQ ID NO: 2211170 - RNA, 20 nt, Human
gccagccugucccauggaca

SEQ ID NO: 2211171 - RNA, 16 nt, Human
gccagccuuccucugc

SEQ ID NO: 2211172 - RNA, 17 nt, Human
gccagccuuccucugca

SEQ ID NO: 2211173 - RNA, 19 nt, Human
gccagccuuccucugcagc

SEQ ID NO: 2211174 - RNA, 21 nt, Human
gccagccuuccucugcagcug

SEQ ID NO: 2211175 - RNA, 22 nt, Human
gccagccuuccucugcagcuga

SEQ ID NO: 2211176 - RNA, 12 nt, Human
gccagccuucuu

SEQ ID NO: 2211177 - RNA, 19 nt, Human
gccagccuucuuccauccc

SEQ ID NO: 2211178 - RNA, 16 nt, Human
gccagccccucccacc

SEQ ID NO: 2211179 - RNA, 21 nt, Human
gccagccccggcccugggcuc

SEQ ID NO: 2211180 - RNA, 12 nt, Human
gccagccccucc

SEQ ID NO: 2211181 - RNA, 11 nt, Human
gccagccccuc

SEQ ID NO: 2211182 - RNA, 18 nt, Human
gccagccccggcccuggg

SEQ ID NO: 2211183 - RNA, 19 nt, Human
gccagccccggcccugggc

SEQ ID NO: 2211184 - RNA, 18 nt, Human
gccagccccacccaggag

SEQ ID NO: 2211185 - RNA, 17 nt, Human
gccagauggggccucug

SEQ ID NO: 2211186 - RNA, 18 nt, Human
gccagauggggccucugu

SEQ ID NO: 2211187 - RNA, 19 nt, Human
gccagccccacccaggagg

SEQ ID NO: 2211188 - RNA, 17 nt, Human
gccagccccggcccugg

SEQ ID NO: 2211189 - RNA, 17 nt, Human
gccagauucuuuccuga

SEQ ID NO: 2211190 - RNA, 24 nt, Human
gccagaugcugauguucaguguaa

SEQ ID NO: 2211191 - RNA, 22 nt, Human
gccagauggacuccagccugcc

SEQ ID NO: 2211192 - RNA, 14 nt, Human
gccagauggggccu

SEQ ID NO: 2211193 - RNA, 19 nt, Human
gccagagggagugacagag

SEQ ID NO: 2211194 - RNA, 20 nt, Human
gccagagggagugacagagg

SEQ ID NO: 2211195 - RNA, 16 nt, Human
gccagauucuuuccug

SEQ ID NO: 2211196 - RNA, 22 nt, Human
gccagaggaacuguccagagag

SEQ ID NO: 2211197 - RNA, 23 nt, Human
gccagaggaacuguccagagagc

SEQ ID NO: 2211198 - RNA, 15 nt, Human
gccagaugcugaugu

SEQ ID NO: 2211199 - RNA, 16 nt, Human
gccagaugcugauguu

SEQ ID NO: 2211200 - RNA, 17 nt, Human
gccagaugcugauguuc

SEQ ID NO: 2211201 - RNA, 19 nt, Human
gccagaugcugauguucag

SEQ ID NO: 2211202 - RNA, 20 nt, Human
gccagaugcugauguucagu

SEQ ID NO: 2211203 - RNA, 21 nt, Human
gccagaugcugauguucagug

SEQ ID NO: 2211204 - RNA, 20 nt, Human
gccagucuugacgaguguga

SEQ ID NO: 2211205 - RNA, 17 nt, Human
gccagucugggcugccg

SEQ ID NO: 2211206 - RNA, 13 nt, Human
gccagucuugugu

SEQ ID NO: 2211207 - RNA, 13 nt, Human
gccagugacagac

SEQ ID NO: 2211208 - RNA, 12 nt, Human
gccagucugugg

SEQ ID NO: 2211209 - RNA, 15 nt, Human
gccagucugggcugc

SEQ ID NO: 2211210 - RNA, 16 nt, Human
gccagucugggcugcc

SEQ ID NO: 2211211 - RNA, 13 nt, Human
gccagucugugga

SEQ ID NO: 2211212 - RNA, 20 nt, Human
gccagucuguggaucagaga

SEQ ID NO: 2211213 - RNA, 19 nt, Human
gccauccagguucagcuug

SEQ ID NO: 2211214 - RNA, 20 nt, Human
gccauccagguucagcuugu

SEQ ID NO: 2211215 - RNA, 13 nt, Human
gccaggugcagug

SEQ ID NO: 2211216 - RNA, 14 nt, Human
gccaggugcagugg

SEQ ID NO: 2211217 - RNA, 12 nt, Human
gccaggugccuu

SEQ ID NO: 2211218 - RNA, 18 nt, Human
gccaguccugccuggcca

SEQ ID NO: 2211219 - RNA, 13 nt, Human
gccaggugccuug

SEQ ID NO: 2211220 - RNA, 14 nt, Human
gccaggugccuugg

SEQ ID NO: 2211221 - RNA, 15 nt, Human
gccaggugccuugga

SEQ ID NO: 2211222 - RNA, 16 nt, Human
gccaggugccuuggag

SEQ ID NO: 2211223 - RNA, 22 nt, Human
gccagucucacugugggaaggc

SEQ ID NO: 2211224 - RNA, 20 nt, Human
gccagucgcgcugccugugu

SEQ ID NO: 2211225 - RNA, 13 nt, Human
gccagucugggcu

SEQ ID NO: 2211226 - RNA, 14 nt, Human
gccagucugggcug

SEQ ID NO: 2211227 - RNA, 16 nt, Human
gccagucgcgcugccu

SEQ ID NO: 2211228 - RNA, 17 nt, Human
gccagucgcgcugccug

SEQ ID NO: 2211229 - RNA, 18 nt, Human
gccagucgcgcugccugu

SEQ ID NO: 2211230 - RNA, 19 nt, Human
gccagucgcgcugccugug

SEQ ID NO: 2211231 - RNA, 20 nt, Human
gccaguccugccuggccagg

SEQ ID NO: 2211232 - RNA, 19 nt, Human
gccaguccugccuggccag

SEQ ID NO: 2211233 - RNA, 15 nt, Human
gccagucgcgcugcc

SEQ ID NO: 2211234 - RNA, 14 nt, Human
gccagucgcgcugc

SEQ ID NO: 2211235 - RNA, 13 nt, Human
gccaucccagccc

SEQ ID NO: 2211236 - RNA, 14 nt, Human
gccaucccagcccc

SEQ ID NO: 2211237 - RNA, 15 nt, Human
gccaucccagcccca

SEQ ID NO: 2211238 - RNA, 16 nt, Human
gccaucccagccccaa

SEQ ID NO: 2211239 - RNA, 17 nt, Human
gccaucccagccccaau

SEQ ID NO: 2211240 - RNA, 14 nt, Human
gccagugacagaca

SEQ ID NO: 2211241 - RNA, 17 nt, Human
gccaucccagccuuggc

SEQ ID NO: 2211242 - RNA, 15 nt, Human
gccagggccuggaag

SEQ ID NO: 2211243 - RNA, 16 nt, Human
gccagggccuggaaga

SEQ ID NO: 2211244 - RNA, 11 nt, Human
gccagggcugc

SEQ ID NO: 2211245 - RNA, 22 nt, Human
gccagggccuggaagacagaga

SEQ ID NO: 2211246 - RNA, 22 nt, Human
gccagggcuauagcucaggacc

SEQ ID NO: 2211247 - RNA, 17 nt, Human
gccaggggaaaaucagc

SEQ ID NO: 2211248 - RNA, 22 nt, Human
gccaggggaaaaucagccugcu

SEQ ID NO: 2211249 - RNA, 21 nt, Human
gccaggggaaaaucagccugc

SEQ ID NO: 2211250 - RNA, 15 nt, Human
gccagguaaugugaa

SEQ ID NO: 2211251 - RNA, 21 nt, Human
gccaggguuucgagaagcugc

SEQ ID NO: 2211252 - RNA, 16 nt, Human
gccagguaaugaggga

SEQ ID NO: 2211253 - RNA, 21 nt, Human
gccagguaaugugaauaaauu

SEQ ID NO: 2211254 - RNA, 21 nt, Human
gccaggucacccuuugcugug

SEQ ID NO: 2211255 - RNA, 22 nt, Human
gccaggucacccuuugcuguga

SEQ ID NO: 2211256 - RNA, 16 nt, Human
gccagguccuugcccu

SEQ ID NO: 2211257 - RNA, 23 nt, Human
gccaggggaaaaucagccugcuc

SEQ ID NO: 2211258 - RNA, 14 nt, Human
gccaggguguggcc

SEQ ID NO: 2211259 - RNA, 20 nt, Human
gccaggguguggcccugcca

SEQ ID NO: 2211260 - RNA, 23 nt, Human
gccaggguguggcccugccaucu

SEQ ID NO: 2211261 - RNA, 19 nt, Human
gccagggcccugcagaggg

SEQ ID NO: 2211262 - RNA, 17 nt, Human
gccagggcccugcagag

SEQ ID NO: 2211263 - RNA, 16 nt, Human
gccagggcccugcaga

SEQ ID NO: 2211264 - RNA, 15 nt, Human
gccagggcccugcag

SEQ ID NO: 2211265 - RNA, 13 nt, Human
gccagggcccugc

SEQ ID NO: 2211266 - RNA, 20 nt, Human
gccaggaagccagcaggcuc

SEQ ID NO: 2211267 - RNA, 19 nt, Human
gccaggaagccagcaggcu

SEQ ID NO: 2211268 - RNA, 17 nt, Human
gccagcuuuuccucccu

SEQ ID NO: 2211269 - RNA, 15 nt, Human
gccagcuuucccugc

SEQ ID NO: 2211270 - RNA, 11 nt, Human
gccaggaagcc

SEQ ID NO: 2211271 - RNA, 17 nt, Human
gccaggaagccagcagg

SEQ ID NO: 2211272 - RNA, 18 nt, Human
gccaggaagccagcaggc

SEQ ID NO: 2211273 - RNA, 21 nt, Human
gccauggaggcacacagcugc

SEQ ID NO: 2211274 - RNA, 22 nt, Human
gccauggcgugucccucucgga

SEQ ID NO: 2211275 - RNA, 20 nt, Human
gccauggcugucucaaacca

SEQ ID NO: 2211276 - RNA, 17 nt, Human
gccauggcgugucccuc

SEQ ID NO: 2211277 - RNA, 16 nt, Human
gccauggcgugucccu

SEQ ID NO: 2211278 - RNA, 19 nt, Human
gccaugggacagggaggac

SEQ ID NO: 2211279 - RNA, 14 nt, Human
gccaugggacaggg

SEQ ID NO: 2211280 - RNA, 15 nt, Human
gccauggaggcacac

SEQ ID NO: 2211281 - RNA, 22 nt, Human
gccauggagagcuggagccugg

SEQ ID NO: 2211282 - RNA, 23 nt, Human
gccauggagagcuggagccuggu

SEQ ID NO: 2211283 - RNA, 16 nt, Human
gccauggaggcacaca

SEQ ID NO: 2211284 - RNA, 18 nt, Human
gccauggaggcacacagc

SEQ ID NO: 2211285 - RNA, 15 nt, Human
gccauggagagcugg

SEQ ID NO: 2211286 - RNA, 16 nt, Human
gccauggagagcugga

SEQ ID NO: 2211287 - RNA, 18 nt, Human
gccauggagagcuggagc

SEQ ID NO: 2211288 - RNA, 20 nt, Human
gccauggagagcuggagccu

SEQ ID NO: 2211289 - RNA, 16 nt, Human
gccaucccagccuugg

SEQ ID NO: 2211290 - RNA, 23 nt, Human
gccauuugcacccuccgccuuca

SEQ ID NO: 2211291 - RNA, 20 nt, Human
gccauuugcacccuccgccu

SEQ ID NO: 2211292 - RNA, 15 nt, Human
gccauuugcuuuuuc

SEQ ID NO: 2211293 - RNA, 20 nt, Human
gccauuucuuccacaagagc

SEQ ID NO: 2211294 - RNA, 22 nt, Human
gccauuucuuccacaagagccc

SEQ ID NO: 2211295 - RNA, 19 nt, Human
gccauggcuuccaaggugg

SEQ ID NO: 2211296 - RNA, 24 nt, Human
gccauggcuuccaagguggucugc

SEQ ID NO: 2211297 - RNA, 22 nt, Human
gccauuuaaagcuuauuaaaac

SEQ ID NO: 2211298 - RNA, 23 nt, Human
gccauugucuucggaaaccuugg

SEQ ID NO: 2211299 - RNA, 21 nt, Human
gccauuuagccaccaucuuug

SEQ ID NO: 2211300 - RNA, 17 nt, Human
gccauuucuuccacaag

SEQ ID NO: 2211301 - RNA, 13 nt, Human
gcccacacacccc

SEQ ID NO: 2211302 - RNA, 23 nt, Human
gcccacacccagcuacuuuaaca

SEQ ID NO: 2211303 - RNA, 13 nt, Human
gcccacacccccu

SEQ ID NO: 2211304 - RNA, 13 nt, Human
gcccacacuugag

SEQ ID NO: 2211305 - RNA, 17 nt, Human
gcccacagcucccaccc

SEQ ID NO: 2211306 - RNA, 16 nt, Human
gcccacagcucccacc

SEQ ID NO: 2211307 - RNA, 13 nt, Human
gcccacagcuccc

SEQ ID NO: 2211308 - RNA, 14 nt, Human
gcccacagcuccca

SEQ ID NO: 2211309 - RNA, 16 nt, Human
gcccacagcaggugcu

SEQ ID NO: 2211310 - RNA, 16 nt, Human
gcccacagcuguauga

SEQ ID NO: 2211311 - RNA, 19 nt, Human
gcccaaagugguauagaaa

SEQ ID NO: 2211312 - RNA, 17 nt, Human
gcccaaagucuguguga

SEQ ID NO: 2211313 - RNA, 17 nt, Human
gcccaaagccagacagc

SEQ ID NO: 2211314 - RNA, 16 nt, Human
gcccaaagccagacag

SEQ ID NO: 2211315 - RNA, 16 nt, Human
gccauuuguguuuaua

SEQ ID NO: 2211316 - RNA, 15 nt, Human
gcccaaagaugcagc

SEQ ID NO: 2211317 - RNA, 16 nt, Human
gcccaaagaugcagcc

SEQ ID NO: 2211318 - RNA, 15 nt, Human
gcccaccccccucau

SEQ ID NO: 2211319 - RNA, 19 nt, Human
gcccacagcucccacccca

SEQ ID NO: 2211320 - RNA, 12 nt, Human
gcccacagggaa

SEQ ID NO: 2211321 - RNA, 19 nt, Human
gcccacagggaacccugcu

SEQ ID NO: 2211322 - RNA, 15 nt, Human
gcccacccccucaag

SEQ ID NO: 2211323 - RNA, 19 nt, Human
gcccacaggaucagucuga

SEQ ID NO: 2211324 - RNA, 13 nt, Human
gcccacaggauca

SEQ ID NO: 2211325 - RNA, 18 nt, Human
gcccacaggaucagucug

SEQ ID NO: 2211326 - RNA, 15 nt, Human
gcccaccccucaaca

SEQ ID NO: 2211327 - RNA, 22 nt, Human
gcccacccccucaagccaaucc

SEQ ID NO: 2211328 - RNA, 14 nt, Human
gcccacccccugcc

SEQ ID NO: 2211329 - RNA, 15 nt, Human
gcccacccccugccc

SEQ ID NO: 2211330 - RNA, 16 nt, Human
gcccacccccugcccu

SEQ ID NO: 2211331 - RNA, 17 nt, Human
gcccacccccugcccug

SEQ ID NO: 2211332 - RNA, 18 nt, Human
gcccacccccugcccugc

SEQ ID NO: 2211333 - RNA, 19 nt, Human
gcccacccccugcccugca

SEQ ID NO: 2211334 - RNA, 20 nt, Human
gcccacccccugcccugcac

SEQ ID NO: 2211335 - RNA, 19 nt, Human
gcccacccguggagauggg

SEQ ID NO: 2211336 - RNA, 14 nt, Human
gcccacccuccugu

SEQ ID NO: 2211337 - RNA, 22 nt, Human
gcccacccccugcccugcacgu

SEQ ID NO: 2211338 - RNA, 13 nt, Human
gcccaccccgcuc

SEQ ID NO: 2211339 - RNA, 17 nt, Human
gcccaccccgcucugca

SEQ ID NO: 2211340 - RNA, 18 nt, Human
gcccaccccgcucugcau

SEQ ID NO: 2211341 - RNA, 20 nt, Human
gcccacccuccugucuuccc

SEQ ID NO: 2211342 - RNA, 18 nt, Human
gcccacccuccugucuuc

SEQ ID NO: 2211343 - RNA, 19 nt, Human
gcccacccuccugucuucc

SEQ ID NO: 2211344 - RNA, 22 nt, Human
gcccacccuccugucuucccag

SEQ ID NO: 2211345 - RNA, 20 nt, Human
gcauuuuccuccaucgcagu

SEQ ID NO: 2211346 - RNA, 18 nt, Human
gcauuuucaccccacccu

SEQ ID NO: 2211347 - RNA, 14 nt, Human
gcauuuucccagau

SEQ ID NO: 2211348 - RNA, 22 nt, Human
gcauuuugcuaaaugugaauga

SEQ ID NO: 2211349 - RNA, 23 nt, Human
gcauuuuggagaguuuccugaaa

SEQ ID NO: 2211350 - RNA, 22 nt, Human
gcauuuuggagaguuuccugaa

SEQ ID NO: 2211351 - RNA, 13 nt, Human
gcauuuugcuauu

SEQ ID NO: 2211352 - RNA, 14 nt, Human
gcauuuugcuauug

SEQ ID NO: 2211353 - RNA, 17 nt, Human
gcauuuugcuauuguaa

SEQ ID NO: 2211354 - RNA, 19 nt, Human
gcauuuugcuauuguaaau

SEQ ID NO: 2211355 - RNA, 14 nt, Human
gcauuuuguauuug

SEQ ID NO: 2211356 - RNA, 23 nt, Human
gcauuuuguauuugucuaacugg

SEQ ID NO: 2211357 - RNA, 16 nt, Human
gcauuuuguuugguau

SEQ ID NO: 2211358 - RNA, 15 nt, Human
gccaaaagcugcuca

SEQ ID NO: 2211359 - RNA, 14 nt, Human
gccaaaagcugcuc

SEQ ID NO: 2211360 - RNA, 23 nt, Human
gccaaacaaaaagguucucaggu

SEQ ID NO: 2211361 - RNA, 17 nt, Human
gccaaacucugccagcc

SEQ ID NO: 2211362 - RNA, 14 nt, Human
gccaaaggaagcac

SEQ ID NO: 2211363 - RNA, 16 nt, Human
gccaaaggaagcacau

SEQ ID NO: 2211364 - RNA, 20 nt, Human
gccaaaggaagcacaugccu

SEQ ID NO: 2211365 - RNA, 15 nt, Human
gccaaacagccacac

SEQ ID NO: 2211366 - RNA, 19 nt, Human
gccaaacucaccugccccu

SEQ ID NO: 2211367 - RNA, 18 nt, Human
gccaaacucugccagcca

SEQ ID NO: 2211368 - RNA, 21 nt, Human
gccaaacucaccugccccuca

SEQ ID NO: 2211369 - RNA, 17 nt, Human
gcauuuuacuguacaga

SEQ ID NO: 2211370 - RNA, 13 nt, Human
gcauuuuauaaau

SEQ ID NO: 2211371 - RNA, 17 nt, Human
gcauuuuaaaaaugaaa

SEQ ID NO: 2211372 - RNA, 12 nt, Human
gcauuuuauucu

SEQ ID NO: 2211373 - RNA, 16 nt, Human
gcauuuuauugcuuga

SEQ ID NO: 2211374 - RNA, 16 nt, Human
gcauuuuacuguacag

SEQ ID NO: 2211375 - RNA, 23 nt, Human
gcauuuggauuggggucccucua

SEQ ID NO: 2211376 - RNA, 15 nt, Human
gcauuuuaaaaauga

SEQ ID NO: 2211377 - RNA, 13 nt, Human
gcauugcuuucug

SEQ ID NO: 2211378 - RNA, 21 nt, Human
gcauuggaaacccuauuuccc

SEQ ID NO: 2211379 - RNA, 20 nt, Human
gcauugcuuucugaaauuag

SEQ ID NO: 2211380 - RNA, 16 nt, Human
gcauuggaagacccca

SEQ ID NO: 2211381 - RNA, 23 nt, Human
gcauuugcugaauacagaggcaa

SEQ ID NO: 2211382 - RNA, 21 nt, Human
gcauuuggugguuucagaaau

SEQ ID NO: 2211383 - RNA, 22 nt, Human
gcauuuggauuggggucccucu

SEQ ID NO: 2211384 - RNA, 16 nt, Human
gcauuuggauuggggu

SEQ ID NO: 2211385 - RNA, 15 nt, Human
gcauuggcagcaggu

SEQ ID NO: 2211386 - RNA, 12 nt, Human
gcauuccccacu

SEQ ID NO: 2211387 - RNA, 12 nt, Human
gcauuccccagg

SEQ ID NO: 2211388 - RNA, 13 nt, Human
gcauucccagugg

SEQ ID NO: 2211389 - RNA, 22 nt, Human
gcauuccuucuuugauaauguu

SEQ ID NO: 2211390 - RNA, 13 nt, Human
gcauucucacucc

SEQ ID NO: 2211391 - RNA, 15 nt, Human
gcauucucacuccua

SEQ ID NO: 2211392 - RNA, 23 nt, Human
gcauuccuucuuugauaauguua

SEQ ID NO: 2211393 - RNA, 13 nt, Human
gcauucuaguacu

SEQ ID NO: 2211394 - RNA, 18 nt, Human
gcauucucacuccuaccu

SEQ ID NO: 2211395 - RNA, 14 nt, Human
gcauucucauggag

SEQ ID NO: 2211396 - RNA, 18 nt, Human
gcauugauggggaaggag

SEQ ID NO: 2211397 - RNA, 17 nt, Human
gcauugauggggaagga

SEQ ID NO: 2211398 - RNA, 16 nt, Human
gcauugauggggaagg

SEQ ID NO: 2211399 - RNA, 14 nt, Human
gcauucucugaaga

SEQ ID NO: 2211400 - RNA, 12 nt, Human
gcauugcuuucu

SEQ ID NO: 2211401 - RNA, 12 nt, Human
gcauugcuuucc

SEQ ID NO: 2211402 - RNA, 15 nt, Human
gcauugcuuuccacu

SEQ ID NO: 2211403 - RNA, 13 nt, Human
gcauugcugguuc

SEQ ID NO: 2211404 - RNA, 13 nt, Human
gcauugcauggac

SEQ ID NO: 2211405 - RNA, 14 nt, Human
gcauugccaagggc

SEQ ID NO: 2211406 - RNA, 14 nt, Human
gcauugccauuccc

SEQ ID NO: 2211407 - RNA, 16 nt, Human
gcauugccaagggcuu

SEQ ID NO: 2211408 - RNA, 15 nt, Human
gcaugccugugugac

SEQ ID NO: 2211409 - RNA, 13 nt, Human
gcaugccugugug

SEQ ID NO: 2211410 - RNA, 12 nt, Human
gcaugcccccuc

SEQ ID NO: 2211411 - RNA, 15 nt, Human
gcaugcccccucgug

SEQ ID NO: 2211412 - RNA, 21 nt, Human
gcaugcgcacaaggcugacca

SEQ ID NO: 2211413 - RNA, 13 nt, Human
gcaugcggcccag

SEQ ID NO: 2211414 - RNA, 14 nt, Human
gcaugcgcacaagg

SEQ ID NO: 2211415 - RNA, 16 nt, Human
gcaugccuuccagcac

SEQ ID NO: 2211416 - RNA, 21 nt, Human
gcaugccuuccagcacccugc

SEQ ID NO: 2211417 - RNA, 14 nt, Human
gcaugcggcccagc

SEQ ID NO: 2211418 - RNA, 16 nt, Human
gcaugcuggggcaagu

SEQ ID NO: 2211419 - RNA, 15 nt, Human
gcaugcugucccuua

SEQ ID NO: 2211420 - RNA, 15 nt, Human
gcauggagaauaaac

SEQ ID NO: 2211421 - RNA, 23 nt, Human
gcauggacaccccuuauccagga

SEQ ID NO: 2211422 - RNA, 17 nt, Human
gcauggaauuuguaagu

SEQ ID NO: 2211423 - RNA, 23 nt, Human
gcauggaaauucccuucaucugg

SEQ ID NO: 2211424 - RNA, 13 nt, Human
gcauggaauuugu

SEQ ID NO: 2211425 - RNA, 18 nt, Human
gcauguugagccaggccu

SEQ ID NO: 2211426 - RNA, 16 nt, Human
gcauguugcugaggag

SEQ ID NO: 2211427 - RNA, 17 nt, Human
gcauguuugugauugac

SEQ ID NO: 2211428 - RNA, 13 nt, Human
gcauuagaaauua

SEQ ID NO: 2211429 - RNA, 20 nt, Human
gcauuagauuucucauuugc

SEQ ID NO: 2211430 - RNA, 17 nt, Human
gcauuagaauuauuuaa

SEQ ID NO: 2211431 - RNA, 18 nt, Human
gcauuagaauuauuuaaa

SEQ ID NO: 2211432 - RNA, 16 nt, Human
gcauuccagccccucu

SEQ ID NO: 2211433 - RNA, 19 nt, Human
gcauuccagccccucuggu

SEQ ID NO: 2211434 - RNA, 17 nt, Human
gcauuccaacaaagggu

SEQ ID NO: 2211435 - RNA, 18 nt, Human
gcauuccaacaaaggguu

SEQ ID NO: 2211436 - RNA, 12 nt, Human
gcauuccagccc

SEQ ID NO: 2211437 - RNA, 15 nt, Human
gcauuccagccccuc

SEQ ID NO: 2211438 - RNA, 21 nt, Human
gcauuagaaauagacaguaua

SEQ ID NO: 2211439 - RNA, 16 nt, Human
gcauuagaaauagaca

SEQ ID NO: 2211440 - RNA, 15 nt, Human
gcauuagaauuauuu

SEQ ID NO: 2211441 - RNA, 17 nt, Human
gcauuacugcaugcacu

SEQ ID NO: 2211442 - RNA, 14 nt, Human
gcauuacugcaugc

SEQ ID NO: 2211443 - RNA, 15 nt, Human
gcauuaaaagaaaau

SEQ ID NO: 2211444 - RNA, 17 nt, Human
gcauuacgugagccagg

SEQ ID NO: 2211445 - RNA, 18 nt, Human
gcauuacgugagccaggu

SEQ ID NO: 2211446 - RNA, 14 nt, Human
gcauuaaaagaaaa

SEQ ID NO: 2211447 - RNA, 13 nt, Human
gcauuaaaagaaa

SEQ ID NO: 2211448 - RNA, 15 nt, Human
gcauguuucauguuu

SEQ ID NO: 2211449 - RNA, 20 nt, Human
gcauguuucauguuuuguga

SEQ ID NO: 2211450 - RNA, 12 nt, Human
gcauguuugcug

SEQ ID NO: 2211451 - RNA, 18 nt, Human
gcauguuuuccagcuccu

SEQ ID NO: 2211452 - RNA, 19 nt, Human
gcauguuuuccagcuccuc

SEQ ID NO: 2211453 - RNA, 21 nt, Human
gcaugcauuuugcagcaguga

SEQ ID NO: 2211454 - RNA, 14 nt, Human
gcaugcauuuugca

SEQ ID NO: 2211455 - RNA, 15 nt, Human
gcaugcauuuugcag

SEQ ID NO: 2211456 - RNA, 21 nt, Human
gcaugacaagccccaggcagg

SEQ ID NO: 2211457 - RNA, 23 nt, Human
gcaugcacuguucccccugugca

SEQ ID NO: 2211458 - RNA, 17 nt, Human
gcaugccuggauggggc

SEQ ID NO: 2211459 - RNA, 22 nt, Human
gcaugccuggauggggcugcac

SEQ ID NO: 2211460 - RNA, 19 nt, Human
gcaugacaagccccaggca

SEQ ID NO: 2211461 - RNA, 18 nt, Human
gcaugacaagccccaggc

SEQ ID NO: 2211462 - RNA, 17 nt, Human
gcaugacaagccccagg

SEQ ID NO: 2211463 - RNA, 16 nt, Human
gcaugacaagccccag

SEQ ID NO: 2211464 - RNA, 15 nt, Human
gcaugacaagcccca

SEQ ID NO: 2211465 - RNA, 17 nt, Human
gcaugaauuugugaagg

SEQ ID NO: 2211466 - RNA, 22 nt, Human
gcaugcacuguucccccugugc

SEQ ID NO: 2211467 - RNA, 21 nt, Human
gcaugcacuguucccccugug

SEQ ID NO: 2211468 - RNA, 17 nt, Human
gcaugcacuguuccccc

SEQ ID NO: 2211469 - RNA, 16 nt, Human
gcaugcacuguucccc

SEQ ID NO: 2211470 - RNA, 13 nt, Human
gcaucaccucagg

SEQ ID NO: 2211471 - RNA, 12 nt, Human
gcaucacaguuu

SEQ ID NO: 2211472 - RNA, 23 nt, Human
gcaugaaguaauaugcacacauu

SEQ ID NO: 2211473 - RNA, 15 nt, Human
gcaugaauuugugaa

SEQ ID NO: 2211474 - RNA, 16 nt, Human
gcaucaggccaggccc

SEQ ID NO: 2211475 - RNA, 17 nt, Human
gcaucaggccaggcccu

SEQ ID NO: 2211476 - RNA, 22 nt, Human
gcaucacagggcagagccggga

SEQ ID NO: 2211477 - RNA, 21 nt, Human
gcaucacagggcagagccggg

SEQ ID NO: 2211478 - RNA, 17 nt, Human
gcaucacagggcagagc

SEQ ID NO: 2211479 - RNA, 16 nt, Human
gcaucacagggcagag

SEQ ID NO: 2211480 - RNA, 15 nt, Human
gcaucacagggcaga

SEQ ID NO: 2211481 - RNA, 14 nt, Human
gcaucacagggcag

SEQ ID NO: 2211482 - RNA, 21 nt, Human
gcaucaaaagacaauucuuua

SEQ ID NO: 2211483 - RNA, 22 nt, Human
gcaucaaaagacaauucuuuau

SEQ ID NO: 2211484 - RNA, 13 nt, Human
gcaucaggccagg

SEQ ID NO: 2211485 - RNA, 15 nt, Human
gcaucaggccaggcc

SEQ ID NO: 2211486 - RNA, 15 nt, Human
gcauauguguuggcu

SEQ ID NO: 2211487 - RNA, 12 nt, Human
gcauauguugaa

SEQ ID NO: 2211488 - RNA, 17 nt, Human
gcauauguugaauacuu

SEQ ID NO: 2211489 - RNA, 14 nt, Human
gcauauguugaaua

SEQ ID NO: 2211490 - RNA, 15 nt, Human
gcauauguaugacuc

SEQ ID NO: 2211491 - RNA, 18 nt, Human
gcauauuauuuuauguug

SEQ ID NO: 2211492 - RNA, 21 nt, Human
gcauauguugaauacuuuuua

SEQ ID NO: 2211493 - RNA, 20 nt, Human
gcauauguugaauacuuuuu

SEQ ID NO: 2211494 - RNA, 19 nt, Human
gcauauguugaauacuuuu

SEQ ID NO: 2211495 - RNA, 18 nt, Human
gcauauguugaauacuuu

SEQ ID NO: 2211496 - RNA, 23 nt, Human
gcauauuauuuuauguugcauag

SEQ ID NO: 2211497 - RNA, 15 nt, Human
gcauauucaggaagc

SEQ ID NO: 2211498 - RNA, 21 nt, Human
gcauauguuucgcugauauau

SEQ ID NO: 2211499 - RNA, 18 nt, Human
gcauauguguuggcuugu

SEQ ID NO: 2211500 - RNA, 20 nt, Human
gcauauuccuuucuaucauu

SEQ ID NO: 2211501 - RNA, 15 nt, Human
gcauauuccuuucua

SEQ ID NO: 2211502 - RNA, 16 nt, Human
gcauauuccuuucuau

SEQ ID NO: 2211503 - RNA, 20 nt, Human
gcauauucaggaagcucagg

SEQ ID NO: 2211504 - RNA, 17 nt, Human
gcauauucaggaagcuc

SEQ ID NO: 2211505 - RNA, 18 nt, Human
gcauauucaggaagcuca

SEQ ID NO: 2211506 - RNA, 19 nt, Human
gcauauuguuauuauauaa

SEQ ID NO: 2211507 - RNA, 17 nt, Human
gcaucaaaagacaauuc

SEQ ID NO: 2211508 - RNA, 18 nt, Human
gcaucaaaagacaauucu

SEQ ID NO: 2211509 - RNA, 19 nt, Human
gcaucaaaagacaauucuu

SEQ ID NO: 2211510 - RNA, 21 nt, Human
gcaucaagaugugacauguuu

SEQ ID NO: 2211511 - RNA, 15 nt, Human
gcauauuguuauuau

SEQ ID NO: 2211512 - RNA, 21 nt, Human
gcauauuguauuacuagaaga

SEQ ID NO: 2211513 - RNA, 19 nt, Human
gcauauuguacacuuuuuu

SEQ ID NO: 2211514 - RNA, 20 nt, Human
gcauauuguacacuuuuuug

SEQ ID NO: 2211515 - RNA, 15 nt, Human
gcauauuguacacuu

SEQ ID NO: 2211516 - RNA, 16 nt, Human
gcauauuguacacuuu

SEQ ID NO: 2211517 - RNA, 17 nt, Human
gcauauuguacacuuuu

SEQ ID NO: 2211518 - RNA, 18 nt, Human
gcauauuguacacuuuuu

SEQ ID NO: 2211519 - RNA, 16 nt, Human
gcauauucuuauguau

SEQ ID NO: 2211520 - RNA, 19 nt, Human
gcauauugcuuuuucuaau

SEQ ID NO: 2211521 - RNA, 12 nt, Human
gcauauuguaca

SEQ ID NO: 2211522 - RNA, 21 nt, Human
gcagugugcacuaaggggccc

SEQ ID NO: 2211523 - RNA, 21 nt, Human
gcaguguuccccaucuggguc

SEQ ID NO: 2211524 - RNA, 20 nt, Human
gcaguguuccccaucugggu

SEQ ID NO: 2211525 - RNA, 15 nt, Human
gcagugggccuggcc

SEQ ID NO: 2211526 - RNA, 19 nt, Human
gcagugugaggccagggca

SEQ ID NO: 2211527 - RNA, 20 nt, Human
gcagugugcacuaaggggcc

SEQ ID NO: 2211528 - RNA, 21 nt, Human
gcagugugaggccagggcaga

SEQ ID NO: 2211529 - RNA, 17 nt, Human
gcagugggagcugccug

SEQ ID NO: 2211530 - RNA, 18 nt, Human
gcagugggagcugccugu

SEQ ID NO: 2211531 - RNA, 14 nt, Human
gcaguuauagaaaa

SEQ ID NO: 2211532 - RNA, 18 nt, Human
gcaguuacaugcauacuu

SEQ ID NO: 2211533 - RNA, 21 nt, Human
gcaguuacaugcauacuucaa

SEQ ID NO: 2211534 - RNA, 13 nt, Human
gcaguuacaugca

SEQ ID NO: 2211535 - RNA, 14 nt, Human
gcaguguuuccuuu

SEQ ID NO: 2211536 - RNA, 21 nt, Human
gcaguguuccuauuuggggcu

SEQ ID NO: 2211537 - RNA, 15 nt, Human
gcaguguuuccuuuu

SEQ ID NO: 2211538 - RNA, 23 nt, Human
gcaguuccggauuggcuugugug

SEQ ID NO: 2211539 - RNA, 21 nt, Human
gcaguuccggauuggcuugug

SEQ ID NO: 2211540 - RNA, 16 nt, Human
gcauagcaagacacau

SEQ ID NO: 2211541 - RNA, 21 nt, Human
gcaguucuaguuugcauuccu

SEQ ID NO: 2211542 - RNA, 14 nt, Human
gcauagcaaacaga

SEQ ID NO: 2211543 - RNA, 16 nt, Human
gcaguucuaguuugca

SEQ ID NO: 2211544 - RNA, 18 nt, Human
gcauagauucccugagca

SEQ ID NO: 2211545 - RNA, 13 nt, Human
gcaguucugaaga

SEQ ID NO: 2211546 - RNA, 14 nt, Human
gcaguucugaagaa

SEQ ID NO: 2211547 - RNA, 16 nt, Human
gcauaggccugggugc

SEQ ID NO: 2211548 - RNA, 12 nt, Human
gcauaggccugg

SEQ ID NO: 2211549 - RNA, 22 nt, Human
gcauagcccagacacagaagag

SEQ ID NO: 2211550 - RNA, 19 nt, Human
gcauaggaccuuuccacca

SEQ ID NO: 2211551 - RNA, 22 nt, Human
gcauaggccugggugcuggcug

SEQ ID NO: 2211552 - RNA, 17 nt, Human
gcauaggccugggugcu

SEQ ID NO: 2211553 - RNA, 23 nt, Human
gcauaggccugggugcuggcugc

SEQ ID NO: 2211554 - RNA, 15 nt, Human
gcauauaacuuauau

SEQ ID NO: 2211555 - RNA, 23 nt, Human
gcauauaacuuauauuguaagaa

SEQ ID NO: 2211556 - RNA, 16 nt, Human
gcauauaacuuauauu

SEQ ID NO: 2211557 - RNA, 13 nt, Human
gcaggugccucca

SEQ ID NO: 2211558 - RNA, 14 nt, Human
gcaggugccuccag

SEQ ID NO: 2211559 - RNA, 15 nt, Human
gcaggugccuccagg

SEQ ID NO: 2211560 - RNA, 16 nt, Human
gcaggugccuccaggu

SEQ ID NO: 2211561 - RNA, 18 nt, Human
gcaggugccuccaggugu

SEQ ID NO: 2211562 - RNA, 21 nt, Human
gcaggugccuccaggugugca

SEQ ID NO: 2211563 - RNA, 14 nt, Human
gcaggugcugcuac

SEQ ID NO: 2211564 - RNA, 15 nt, Human
gcaggugcugcuacc

SEQ ID NO: 2211565 - RNA, 23 nt, Human
gcagggguggggguggaggcuuc

SEQ ID NO: 2211566 - RNA, 23 nt, Human
gcagguccccagacuccaccaag

SEQ ID NO: 2211567 - RNA, 12 nt, Human
gcaggucccuaa

SEQ ID NO: 2211568 - RNA, 13 nt, Human
gcaggucccuaau

SEQ ID NO: 2211569 - RNA, 10 nt, Human
gcaggucccu

SEQ ID NO: 2211570 - RNA, 11 nt, Human
gcaggucccua

SEQ ID NO: 2211571 - RNA, 22 nt, Human
gcagggguggcugccucauuua

SEQ ID NO: 2211572 - RNA, 17 nt, Human
gcaggggugggggugga

SEQ ID NO: 2211573 - RNA, 18 nt, Human
gcagggguggcugccuca

SEQ ID NO: 2211574 - RNA, 19 nt, Human
gcagggguccuugguguga

SEQ ID NO: 2211575 - RNA, 20 nt, Human
gcagggguggggguggaggc

SEQ ID NO: 2211576 - RNA, 21 nt, Human
gcagggguggggguggaggcu

SEQ ID NO: 2211577 - RNA, 15 nt, Human
gcagggguugcagug

SEQ ID NO: 2211578 - RNA, 14 nt, Human
gcagguccccagac

SEQ ID NO: 2211579 - RNA, 20 nt, Human
gcaggggcuuguugcaggcu

SEQ ID NO: 2211580 - RNA, 16 nt, Human
gcaggugggagcuuga

SEQ ID NO: 2211581 - RNA, 17 nt, Human
gcagguggggagacugg

SEQ ID NO: 2211582 - RNA, 13 nt, Human
gcagguggggagg

SEQ ID NO: 2211583 - RNA, 21 nt, Human
gcagguggggagacugggcug

SEQ ID NO: 2211584 - RNA, 22 nt, Human
gcagugcgcgugcacguggaga

SEQ ID NO: 2211585 - RNA, 16 nt, Human
gcagugccuuccauaa

SEQ ID NO: 2211586 - RNA, 22 nt, Human
gcagugccuuccauaauuauga

SEQ ID NO: 2211587 - RNA, 15 nt, Human
gcagugccuugggga

SEQ ID NO: 2211588 - RNA, 15 nt, Human
gcaggugcugcugcg

SEQ ID NO: 2211589 - RNA, 20 nt, Human
gcaggugcugcuacccuccc

SEQ ID NO: 2211590 - RNA, 21 nt, Human
gcaggugcugcuacccucccu

SEQ ID NO: 2211591 - RNA, 22 nt, Human
gcaggugcugcuacccucccug

SEQ ID NO: 2211592 - RNA, 23 nt, Human
gcaggugcugcuacccucccugc

SEQ ID NO: 2211593 - RNA, 17 nt, Human
gcagguggcaucucuaa

SEQ ID NO: 2211594 - RNA, 23 nt, Human
gcagugcuuccaaggauggacca

SEQ ID NO: 2211595 - RNA, 17 nt, Human
gcagugcucgcuguugc

SEQ ID NO: 2211596 - RNA, 18 nt, Human
gcagugcucgcuguugcu

SEQ ID NO: 2211597 - RNA, 19 nt, Human
gcagugcucgcuguugcug

SEQ ID NO: 2211598 - RNA, 21 nt, Human
gcagugcucgcuguugcugaa

SEQ ID NO: 2211599 - RNA, 16 nt, Human
gcagugcuucucuaca

SEQ ID NO: 2211600 - RNA, 23 nt, Human
gcagugccuuggggaauuuccuc

SEQ ID NO: 2211601 - RNA, 15 nt, Human
gcagugcuucucaaa

SEQ ID NO: 2211602 - RNA, 16 nt, Human
gcagugggagcugccu

SEQ ID NO: 2211603 - RNA, 16 nt, Human
gcaggauggccuggcc

SEQ ID NO: 2211604 - RNA, 24 nt, Human
gcaggauggccuggccagggccug

SEQ ID NO: 2211605 - RNA, 19 nt, Human
gcaggauugauuaugcaga

SEQ ID NO: 2211606 - RNA, 21 nt, Human
gcaggauugauuaugcagaau

SEQ ID NO: 2211607 - RNA, 12 nt, Human
gcaggcacagca

SEQ ID NO: 2211608 - RNA, 13 nt, Human
gcaggcacagcac

SEQ ID NO: 2211609 - RNA, 19 nt, Human
gcaggcguucagcucacug

SEQ ID NO: 2211610 - RNA, 17 nt, Human
gcaggcuaaggcgugga

SEQ ID NO: 2211611 - RNA, 22 nt, Human
gcaggauaguugcuccgccucu

SEQ ID NO: 2211612 - RNA, 21 nt, Human
gcaggauaguugcuccgccuc

SEQ ID NO: 2211613 - RNA, 20 nt, Human
gcaggauucuuccucccucc

SEQ ID NO: 2211614 - RNA, 17 nt, Human
gcagggagggccugggc

SEQ ID NO: 2211615 - RNA, 14 nt, Human
gcagggagggccug

SEQ ID NO: 2211616 - RNA, 22 nt, Human
gcaggcucacugccaggccagc

SEQ ID NO: 2211617 - RNA, 23 nt, Human
gcaggcucacugccaggccagcc

SEQ ID NO: 2211618 - RNA, 17 nt, Human
gcaggcucacugccagg

SEQ ID NO: 2211619 - RNA, 18 nt, Human
gcaggcucacugccaggc

SEQ ID NO: 2211620 - RNA, 19 nt, Human
gcaggcucacugccaggcc

SEQ ID NO: 2211621 - RNA, 21 nt, Human
gcaggcucacugccaggccag

SEQ ID NO: 2211622 - RNA, 15 nt, Human
gcaggcuacugucag

SEQ ID NO: 2211623 - RNA, 20 nt, Human
gcaggcuaaggcguggagcu

SEQ ID NO: 2211624 - RNA, 21 nt, Human
gcaggcuaaggcguggagcug

SEQ ID NO: 2211625 - RNA, 22 nt, Human
gcaggcuaaggcguggagcugc

SEQ ID NO: 2211626 - RNA, 16 nt, Human
gcaggcuacacugaca

SEQ ID NO: 2211627 - RNA, 20 nt, Human
gcaggcuacacugacacugg

SEQ ID NO: 2211628 - RNA, 16 nt, Human
gcaggcuagaaccugg

SEQ ID NO: 2211629 - RNA, 14 nt, Human
gcaggcucacugcc

SEQ ID NO: 2211630 - RNA, 15 nt, Human
gcaggcucacugcca

SEQ ID NO: 2211631 - RNA, 21 nt, Human
gcagggccuugcccagagaug

SEQ ID NO: 2211632 - RNA, 19 nt, Human
gcagggccuugcccagaga

SEQ ID NO: 2211633 - RNA, 18 nt, Human
gcagggccuugcccagag

SEQ ID NO: 2211634 - RNA, 13 nt, Human
gcagggaggggac

SEQ ID NO: 2211635 - RNA, 16 nt, Human
gcagggccucacacgg

SEQ ID NO: 2211636 - RNA, 12 nt, Human
gcagggagggga

SEQ ID NO: 2211637 - RNA, 20 nt, Human
gcagggcuacccugagcuga

SEQ ID NO: 2211638 - RNA, 17 nt, Human
gcagggcuacccugagc

SEQ ID NO: 2211639 - RNA, 16 nt, Human
gcagggagggcuucug

SEQ ID NO: 2211640 - RNA, 22 nt, Human
gcagggagggccugggccccag

SEQ ID NO: 2211641 - RNA, 18 nt, Human
gcagggagggccugggcc

SEQ ID NO: 2211642 - RNA, 12 nt, Human
gcagggcucagc

SEQ ID NO: 2211643 - RNA, 22 nt, Human
gcagggcuacccugagcugagg

SEQ ID NO: 2211644 - RNA, 21 nt, Human
gcagggcuacccugagcugag

SEQ ID NO: 2211645 - RNA, 23 nt, Human
gcagggcuacccugagcugaggc

SEQ ID NO: 2211646 - RNA, 13 nt, Human
gcaggggcucugg

SEQ ID NO: 2211647 - RNA, 14 nt, Human
gcaggggcucugga

SEQ ID NO: 2211648 - RNA, 16 nt, Human
gcaggggcucuggaga

SEQ ID NO: 2211649 - RNA, 17 nt, Human
gcaggggcucuggagag

SEQ ID NO: 2211650 - RNA, 18 nt, Human
gcaggggcucuggagaga

SEQ ID NO: 2211651 - RNA, 21 nt, Human
gcaggggcucuggagagaaac

SEQ ID NO: 2211652 - RNA, 19 nt, Human
gcaggggcucuggagagaa

SEQ ID NO: 2211653 - RNA, 20 nt, Human
gcaggggcucuggagagaaa

SEQ ID NO: 2211654 - RNA, 22 nt, Human
gcaggggcucuggagagaaaca

SEQ ID NO: 2211655 - RNA, 13 nt, Human
gcacccacccugg

SEQ ID NO: 2211656 - RNA, 14 nt, Human
gcacccacccuggg

SEQ ID NO: 2211657 - RNA, 17 nt, Human
gcacccacccugggacc

SEQ ID NO: 2211658 - RNA, 18 nt, Human
gcacccaccguggaggag

SEQ ID NO: 2211659 - RNA, 19 nt, Human
gcacccaccguggaggagg

SEQ ID NO: 2211660 - RNA, 19 nt, Human
gcaccacugcacuccagcc

SEQ ID NO: 2211661 - RNA, 23 nt, Human
gcaccacccuagucccuuccccu

SEQ ID NO: 2211662 - RNA, 22 nt, Human
gcaccaccgagagaggcuggga

SEQ ID NO: 2211663 - RNA, 22 nt, Human
gcacauggaggagcuuggggga

SEQ ID NO: 2211664 - RNA, 22 nt, Human
gcacaugcugagucucccaagg

SEQ ID NO: 2211665 - RNA, 19 nt, Human
gcacaugcugagucuccca

SEQ ID NO: 2211666 - RNA, 20 nt, Human
gcacaugcugagucucccaa

SEQ ID NO: 2211667 - RNA, 13 nt, Human
gcacaugucuuaa

SEQ ID NO: 2211668 - RNA, 15 nt, Human
gcacaugucuuaaug

SEQ ID NO: 2211669 - RNA, 17 nt, Human
gcacaugucuuaaugaa

SEQ ID NO: 2211670 - RNA, 20 nt, Human
gcacaugucuuaaugaaguu

SEQ ID NO: 2211671 - RNA, 21 nt, Human
gcacaugucuuaaugaaguuu

SEQ ID NO: 2211672 - RNA, 22 nt, Human
gcacaugucuuaaugaaguuug

SEQ ID NO: 2211673 - RNA, 22 nt, Human
gcaccacccuagucccuucccc

SEQ ID NO: 2211674 - RNA, 20 nt, Human
gcaccacccuagucccuucc

SEQ ID NO: 2211675 - RNA, 11 nt, Human
gcaccacccua

SEQ ID NO: 2211676 - RNA, 21 nt, Human
gcacaugucuuguacaugugu

SEQ ID NO: 2211677 - RNA, 18 nt, Human
gcaccaccaagccaaggg

SEQ ID NO: 2211678 - RNA, 13 nt, Human
gcacaugucuugu

SEQ ID NO: 2211679 - RNA, 20 nt, Human
gcacaugucuuguacaugug

SEQ ID NO: 2211680 - RNA, 13 nt, Human
gcaccccaaggcu

SEQ ID NO: 2211681 - RNA, 20 nt, Human
gcaccccaaagcuuuccugc

SEQ ID NO: 2211682 - RNA, 17 nt, Human
gcaccccaaagcuuucc

SEQ ID NO: 2211683 - RNA, 14 nt, Human
gcacccggccccug

SEQ ID NO: 2211684 - RNA, 14 nt, Human
gcacccacucugcu

SEQ ID NO: 2211685 - RNA, 20 nt, Human
gcacccaccguggaggagga

SEQ ID NO: 2211686 - RNA, 11 nt, Human
gcacccagccc

SEQ ID NO: 2211687 - RNA, 12 nt, Human
gcacccagcccu

SEQ ID NO: 2211688 - RNA, 13 nt, Human
gcacccagcccug

SEQ ID NO: 2211689 - RNA, 14 nt, Human
gcacccagcccugg

SEQ ID NO: 2211690 - RNA, 15 nt, Human
gcacccagcccuggu

SEQ ID NO: 2211691 - RNA, 23 nt, Human
gcacccagugagcacucccaagu

SEQ ID NO: 2211692 - RNA, 19 nt, Human
gcacccagccucuagggac

SEQ ID NO: 2211693 - RNA, 21 nt, Human
gcacccagccucuagggaccc

SEQ ID NO: 2211694 - RNA, 17 nt, Human
gcacccagugagcacuc

SEQ ID NO: 2211695 - RNA, 21 nt, Human
gcacccagugagcacucccaa

SEQ ID NO: 2211696 - RNA, 15 nt, Human
gcacccggccccugc

SEQ ID NO: 2211697 - RNA, 17 nt, Human
gcacccggccccugcug

SEQ ID NO: 2211698 - RNA, 14 nt, Human
gcaccuccugccuc

SEQ ID NO: 2211699 - RNA, 15 nt, Human
gcaccuccugccucg

SEQ ID NO: 2211700 - RNA, 16 nt, Human
gcacagcuaugaaggc

SEQ ID NO: 2211701 - RNA, 21 nt, Human
gcacagcggggccccagggcu

SEQ ID NO: 2211702 - RNA, 16 nt, Human
gcaaugacaucuucaa

SEQ ID NO: 2211703 - RNA, 14 nt, Human
gcacagccuucucc

SEQ ID NO: 2211704 - RNA, 13 nt, Human
gcacagcuaugaa

SEQ ID NO: 2211705 - RNA, 19 nt, Human
gcacagcuaacauggaagu

SEQ ID NO: 2211706 - RNA, 13 nt, Human
gcaaugaccuuuc

SEQ ID NO: 2211707 - RNA, 14 nt, Human
gcaaugaccuuuca

SEQ ID NO: 2211708 - RNA, 20 nt, Human
gcacagccucuuagaugcag

SEQ ID NO: 2211709 - RNA, 19 nt, Human
gcaaugacagguaaauuaa

SEQ ID NO: 2211710 - RNA, 16 nt, Human
gcaaugacaucucagg

SEQ ID NO: 2211711 - RNA, 19 nt, Human
gcaaugacaucucaggggc

SEQ ID NO: 2211712 - RNA, 21 nt, Human
gcaaugacaucucaggggcca

SEQ ID NO: 2211713 - RNA, 12 nt, Human
gcacagcuggcc

SEQ ID NO: 2211714 - RNA, 14 nt, Human
gcacaggacaugcg

SEQ ID NO: 2211715 - RNA, 16 nt, Human
gcacagcuucauuucc

SEQ ID NO: 2211716 - RNA, 22 nt, Human
gcacaggacaugcgguagccag

SEQ ID NO: 2211717 - RNA, 21 nt, Human
gcacaggacaugcgguagcca

SEQ ID NO: 2211718 - RNA, 19 nt, Human
gcacaugccuguaguccca

SEQ ID NO: 2211719 - RNA, 23 nt, Human
gcacaugcugagucucccaaggc

SEQ ID NO: 2211720 - RNA, 12 nt, Human
gcacaggcagcu

SEQ ID NO: 2211721 - RNA, 14 nt, Human
gcacaggcagcugg

SEQ ID NO: 2211722 - RNA, 14 nt, Human
gcacaggcccccuu

SEQ ID NO: 2211723 - RNA, 14 nt, Human
gcacuaaggggccc

SEQ ID NO: 2211724 - RNA, 20 nt, Human
gcacuaacguugagccccug

SEQ ID NO: 2211725 - RNA, 18 nt, Human
gcacuaaggugugcucug

SEQ ID NO: 2211726 - RNA, 21 nt, Human
gcacuacucccucaaagcaca

SEQ ID NO: 2211727 - RNA, 23 nt, Human
gcacuaaggggcccggccagcca

SEQ ID NO: 2211728 - RNA, 21 nt, Human
gcacuaccacuccugccaagg

SEQ ID NO: 2211729 - RNA, 13 nt, Human
gcacuacuccucu

SEQ ID NO: 2211730 - RNA, 16 nt, Human
gcacuacuccucugca

SEQ ID NO: 2211731 - RNA, 17 nt, Human
gcacuacuccucugcag

SEQ ID NO: 2211732 - RNA, 19 nt, Human
gcacuacuccucugcagug

SEQ ID NO: 2211733 - RNA, 17 nt, Human
gcacuacugacaugugg

SEQ ID NO: 2211734 - RNA, 15 nt, Human
gcacuacucugugcc

SEQ ID NO: 2211735 - RNA, 17 nt, Human
gcacuacucugugccag

SEQ ID NO: 2211736 - RNA, 18 nt, Human
gcacuacugacauguggg

SEQ ID NO: 2211737 - RNA, 17 nt, Human
gcacugaggaccagcca

SEQ ID NO: 2211738 - RNA, 18 nt, Human
gcacugaggaagaacggg

SEQ ID NO: 2211739 - RNA, 11 nt, Human
gcacugagggc

SEQ ID NO: 2211740 - RNA, 12 nt, Human
gcacugagggcc

SEQ ID NO: 2211741 - RNA, 13 nt, Human
gcacugagggcca

SEQ ID NO: 2211742 - RNA, 24 nt, Human
gcacugagggccacacuauuacca

SEQ ID NO: 2211743 - RNA, 13 nt, Human
gcacugaugcugc

SEQ ID NO: 2211744 - RNA, 14 nt, Human
gcacugagggccac

SEQ ID NO: 2211745 - RNA, 15 nt, Human
gcacugagggccaca

SEQ ID NO: 2211746 - RNA, 16 nt, Human
gcacugagggccacac

SEQ ID NO: 2211747 - RNA, 20 nt, Human
gcacugagggccacacuauu

SEQ ID NO: 2211748 - RNA, 13 nt, Human
gcacuagccuuug

SEQ ID NO: 2211749 - RNA, 15 nt, Human
gcacuagccuuuggc

SEQ ID NO: 2211750 - RNA, 16 nt, Human
gcacuagccuuuggcu

SEQ ID NO: 2211751 - RNA, 18 nt, Human
gcacuagccuuuggcucu

SEQ ID NO: 2211752 - RNA, 20 nt, Human
gcacuagccuuuggcucugg

SEQ ID NO: 2211753 - RNA, 22 nt, Human
gcacuagccuuuggcucuggag

SEQ ID NO: 2211754 - RNA, 21 nt, Human
gcacuagccuuuggcucugga

SEQ ID NO: 2211755 - RNA, 21 nt, Human
gcacuaggggauauaggagag

SEQ ID NO: 2211756 - RNA, 22 nt, Human
gcaccugcccccugguggacag

SEQ ID NO: 2211757 - RNA, 19 nt, Human
gcaccugccgaccucgucc

SEQ ID NO: 2211758 - RNA, 21 nt, Human
gcaccugccgaccucguccuc

SEQ ID NO: 2211759 - RNA, 23 nt, Human
gcaccugcauccguaguucccug

SEQ ID NO: 2211760 - RNA, 12 nt, Human
gcaccugccuca

SEQ ID NO: 2211761 - RNA, 16 nt, Human
gcaccugccucaggac

SEQ ID NO: 2211762 - RNA, 15 nt, Human
gcaccugccucagga

SEQ ID NO: 2211763 - RNA, 14 nt, Human
gcaccugccucagg

SEQ ID NO: 2211764 - RNA, 13 nt, Human
gcaccugccucag

SEQ ID NO: 2211765 - RNA, 17 nt, Human
gcacuaaggugugcucu

SEQ ID NO: 2211766 - RNA, 19 nt, Human
gcacuaacguugagccccu

SEQ ID NO: 2211767 - RNA, 15 nt, Human
gcaccugcucucuug

SEQ ID NO: 2211768 - RNA, 20 nt, Human
gcaccugcuucaugcucagc

SEQ ID NO: 2211769 - RNA, 18 nt, Human
gcaccugcccccuggugg

SEQ ID NO: 2211770 - RNA, 17 nt, Human
gcaccugcccccuggug

SEQ ID NO: 2211771 - RNA, 16 nt, Human
gcaccugcccccuggu

SEQ ID NO: 2211772 - RNA, 15 nt, Human
gcaccugcccccugg

SEQ ID NO: 2211773 - RNA, 22 nt, Human
gcaccugccagccuggcuucug

SEQ ID NO: 2211774 - RNA, 17 nt, Human
gcaccugccagccuggc

SEQ ID NO: 2211775 - RNA, 16 nt, Human
gcaccugccagccugg

SEQ ID NO: 2211776 - RNA, 15 nt, Human
gcaccugccagccug

SEQ ID NO: 2211777 - RNA, 14 nt, Human
gcaccugccagccu

SEQ ID NO: 2211778 - RNA, 13 nt, Human
gcaccugccagcc

SEQ ID NO: 2211779 - RNA, 22 nt, Human
gcaccugcauccguaguucccu

SEQ ID NO: 2211780 - RNA, 21 nt, Human
gcaccugcagguugggccaua

SEQ ID NO: 2211781 - RNA, 15 nt, Human
gcaccugcagguugg

SEQ ID NO: 2211782 - RNA, 20 nt, Human
gcaccugcagguugggccau

SEQ ID NO: 2211783 - RNA, 21 nt, Human
gcaccugauggaaaagauaua

SEQ ID NO: 2211784 - RNA, 19 nt, Human
gcaccucugaccuaucacu

SEQ ID NO: 2211785 - RNA, 23 nt, Human
gcagaagaauugaacccaggagg

SEQ ID NO: 2211786 - RNA, 14 nt, Human
gcagaagacaccag

SEQ ID NO: 2211787 - RNA, 15 nt, Human
gcagaagacaccaga

SEQ ID NO: 2211788 - RNA, 21 nt, Human
gcagaagaauugaacccagga

SEQ ID NO: 2211789 - RNA, 22 nt, Human
gcagaagaaugggaauauuuua

SEQ ID NO: 2211790 - RNA, 14 nt, Human
gcagaagacaguau

SEQ ID NO: 2211791 - RNA, 20 nt, Human
gcacuguccugcuccacagu

SEQ ID NO: 2211792 - RNA, 18 nt, Human
gcacuguccugcuccaca

SEQ ID NO: 2211793 - RNA, 19 nt, Human
gcacuguccugcuccacag

SEQ ID NO: 2211794 - RNA, 14 nt, Human
gcacuguccugcuc

SEQ ID NO: 2211795 - RNA, 15 nt, Human
gcacuguccugcucc

SEQ ID NO: 2211796 - RNA, 16 nt, Human
gcacuguccugcucca

SEQ ID NO: 2211797 - RNA, 17 nt, Human
gcacuguccugcuccac

SEQ ID NO: 2211798 - RNA, 17 nt, Human
gcacugucccuugccuc

SEQ ID NO: 2211799 - RNA, 18 nt, Human
gcacugucccuugccuca

SEQ ID NO: 2211800 - RNA, 23 nt, Human
gcacugucccuugccucaaugcc

SEQ ID NO: 2211801 - RNA, 21 nt, Human
gcacugucacuuugcucuggg

SEQ ID NO: 2211802 - RNA, 12 nt, Human
gcacuguccugc

SEQ ID NO: 2211803 - RNA, 12 nt, Human
gcagaaggaaga

SEQ ID NO: 2211804 - RNA, 13 nt, Human
gcagaagcauuaa

SEQ ID NO: 2211805 - RNA, 16 nt, Human
gcagaagacaccagag

SEQ ID NO: 2211806 - RNA, 18 nt, Human
gcagaagacaccagagca

SEQ ID NO: 2211807 - RNA, 20 nt, Human
gcagaagacaccagagcaga

SEQ ID NO: 2211808 - RNA, 21 nt, Human
gcagaagacaccagagcagau

SEQ ID NO: 2211809 - RNA, 13 nt, Human
gcagaaggaagac

SEQ ID NO: 2211810 - RNA, 14 nt, Human
gcagaaggaagacu

SEQ ID NO: 2211811 - RNA, 16 nt, Human
gcacuguaugcuggac

SEQ ID NO: 2211812 - RNA, 15 nt, Human
gcacuguaugcugga

SEQ ID NO: 2211813 - RNA, 16 nt, Human
gcacugucacuuugcu

SEQ ID NO: 2211814 - RNA, 18 nt, Human
gcacugucacuuugcucu

SEQ ID NO: 2211815 - RNA, 20 nt, Human
gcacugucacuuugcucugg

SEQ ID NO: 2211816 - RNA, 15 nt, Human
gcacugucaagauga

SEQ ID NO: 2211817 - RNA, 15 nt, Human
gcacuggggagcccg

SEQ ID NO: 2211818 - RNA, 19 nt, Human
gcacugauuucacaacaga

SEQ ID NO: 2211819 - RNA, 20 nt, Human
gcacugauuucacaacagau

SEQ ID NO: 2211820 - RNA, 18 nt, Human
gcacuggggagcccgucu

SEQ ID NO: 2211821 - RNA, 19 nt, Human
gcacuggggagcccgucuc

SEQ ID NO: 2211822 - RNA, 22 nt, Human
gcacuggggagcccgucucagu

SEQ ID NO: 2211823 - RNA, 23 nt, Human
gcacuggggagcccgucucagug

SEQ ID NO: 2211824 - RNA, 13 nt, Human
gcacugcaggggc

SEQ ID NO: 2211825 - RNA, 22 nt, Human
gcacugggcuuggggaccagag

SEQ ID NO: 2211826 - RNA, 23 nt, Human
gcacugggcuuggggaccagagc

SEQ ID NO: 2211827 - RNA, 14 nt, Human
gcacugggcuuggg

SEQ ID NO: 2211828 - RNA, 15 nt, Human
gcacugauuucacaa

SEQ ID NO: 2211829 - RNA, 12 nt, Human
gcacugauuuca

SEQ ID NO: 2211830 - RNA, 19 nt, Human
gcacugaugcugccccuca

SEQ ID NO: 2211831 - RNA, 18 nt, Human
gcacugaugcugccccuc

SEQ ID NO: 2211832 - RNA, 22 nt, Human
gcacugaugcugccccucaucu

SEQ ID NO: 2211833 - RNA, 14 nt, Human
gcacugauauuuua

SEQ ID NO: 2211834 - RNA, 20 nt, Human
gcagcaggugcugcuacccu

SEQ ID NO: 2211835 - RNA, 22 nt, Human
gcagcaggugcugcuacccucc

SEQ ID NO: 2211836 - RNA, 14 nt, Human
gcagccgugccuuc

SEQ ID NO: 2211837 - RNA, 15 nt, Human
gcagccgugccuuca

SEQ ID NO: 2211838 - RNA, 17 nt, Human
gcagccgugccuucagc

SEQ ID NO: 2211839 - RNA, 19 nt, Human
gcagccucaaccuccuggg

SEQ ID NO: 2211840 - RNA, 20 nt, Human
gcagccucaaccuccugggc

SEQ ID NO: 2211841 - RNA, 20 nt, Human
gcagcagggcuacccugagc

SEQ ID NO: 2211842 - RNA, 19 nt, Human
gcagcagggcuacccugag

SEQ ID NO: 2211843 - RNA, 12 nt, Human
gcagcaggugcu

SEQ ID NO: 2211844 - RNA, 13 nt, Human
gcagcaggugcug

SEQ ID NO: 2211845 - RNA, 14 nt, Human
gcagcaggugcugc

SEQ ID NO: 2211846 - RNA, 15 nt, Human
gcagcaggugcugcu

SEQ ID NO: 2211847 - RNA, 16 nt, Human
gcagcaggugcugcua

SEQ ID NO: 2211848 - RNA, 17 nt, Human
gcagcaggugcugcuac

SEQ ID NO: 2211849 - RNA, 18 nt, Human
gcagcaggugcugcuacc

SEQ ID NO: 2211850 - RNA, 19 nt, Human
gcagcaggugcugcuaccc

SEQ ID NO: 2211851 - RNA, 12 nt, Human
gcagcagaaggg

SEQ ID NO: 2211852 - RNA, 19 nt, Human
gcagcacucacacaggacc

SEQ ID NO: 2211853 - RNA, 20 nt, Human
gcagcagggaugcccuggag

SEQ ID NO: 2211854 - RNA, 19 nt, Human
gcagcagggaugcccugga

SEQ ID NO: 2211855 - RNA, 17 nt, Human
gcagcagggaugcccug

SEQ ID NO: 2211856 - RNA, 15 nt, Human
gcagcagggaugccc

SEQ ID NO: 2211857 - RNA, 17 nt, Human
gcagcagggcuacccug

SEQ ID NO: 2211858 - RNA, 12 nt, Human
gcagcagggcua

SEQ ID NO: 2211859 - RNA, 18 nt, Human
gcagccgugccuucagcu

SEQ ID NO: 2211860 - RNA, 22 nt, Human
gcagccguuugagaagaaaaca

SEQ ID NO: 2211861 - RNA, 18 nt, Human
gcagccguuugagaagaa

SEQ ID NO: 2211862 - RNA, 21 nt, Human
gcagccucaaccuccugggcu

SEQ ID NO: 2211863 - RNA, 22 nt, Human
gcagccucaaccuccugggcua

SEQ ID NO: 2211864 - RNA, 13 nt, Human
gcagccuggaggc

SEQ ID NO: 2211865 - RNA, 12 nt, Human
gcagccuggagg

SEQ ID NO: 2211866 - RNA, 14 nt, Human
gcagcgaccacccc

SEQ ID NO: 2211867 - RNA, 15 nt, Human
gcagcgaccaccccu

SEQ ID NO: 2211868 - RNA, 16 nt, Human
gcagcgaccaccccug

SEQ ID NO: 2211869 - RNA, 14 nt, Human
gcagcgaccgcccc

SEQ ID NO: 2211870 - RNA, 20 nt, Human
gcagcgaccaccccugccuc

SEQ ID NO: 2211871 - RNA, 22 nt, Human
gcagcgaccaccccugccucca

SEQ ID NO: 2211872 - RNA, 18 nt, Human
gcagccuggacauagaga

SEQ ID NO: 2211873 - RNA, 23 nt, Human
gcagccugcgccaccgcccagag

SEQ ID NO: 2211874 - RNA, 14 nt, Human
gcagccuggacccu

SEQ ID NO: 2211875 - RNA, 21 nt, Human
gcaggagauugagaaggagag

SEQ ID NO: 2211876 - RNA, 22 nt, Human
gcaggagauugagaaggagaga

SEQ ID NO: 2211877 - RNA, 14 nt, Human
gcaggagccugagc

SEQ ID NO: 2211878 - RNA, 22 nt, Human
gcaggagcaguaucaugaagcc

SEQ ID NO: 2211879 - RNA, 17 nt, Human
gcaggagcaguaucaug

SEQ ID NO: 2211880 - RNA, 13 nt, Human
gcaggagcaguau

SEQ ID NO: 2211881 - RNA, 23 nt, Human
gcaggagauugagaaggagagaa

SEQ ID NO: 2211882 - RNA, 13 nt, Human
gcaggaggaggug

SEQ ID NO: 2211883 - RNA, 11 nt, Human
gcaggaggaag

SEQ ID NO: 2211884 - RNA, 14 nt, Human
gcaggaggaggugc

SEQ ID NO: 2211885 - RNA, 15 nt, Human
gcaggaggaggugcc

SEQ ID NO: 2211886 - RNA, 22 nt, Human
gcaggagggcccuaccugauug

SEQ ID NO: 2211887 - RNA, 18 nt, Human
gcaggagggcccuaccug

SEQ ID NO: 2211888 - RNA, 20 nt, Human
gcaggaggaggugccaacag

SEQ ID NO: 2211889 - RNA, 20 nt, Human
gcaggaguuucguuuucaaa

SEQ ID NO: 2211890 - RNA, 21 nt, Human
gcaggaguuucguuuucaaaa

SEQ ID NO: 2211891 - RNA, 24 nt, Human
gcagcgaguuguggaaagccucug

SEQ ID NO: 2211892 - RNA, 15 nt, Human
gcagcgccaagcaac

SEQ ID NO: 2211893 - RNA, 22 nt, Human
gcagcgagcuaugaucgcgcca

SEQ ID NO: 2211894 - RNA, 16 nt, Human
gcagcgaccgcccccu

SEQ ID NO: 2211895 - RNA, 17 nt, Human
gcagcgaccgcccccuc

SEQ ID NO: 2211896 - RNA, 18 nt, Human
gcagcgaccgcccccucc

SEQ ID NO: 2211897 - RNA, 22 nt, Human
gcagcgaccgcccccuccucua

SEQ ID NO: 2211898 - RNA, 19 nt, Human
gcagcgcccuuccucucca

SEQ ID NO: 2211899 - RNA, 21 nt, Human
gcagcgcccuuccucuccacc

SEQ ID NO: 2211900 - RNA, 14 nt, Human
gcagcgccaggcug

SEQ ID NO: 2211901 - RNA, 16 nt, Human
gcagcgcccuuccucu

SEQ ID NO: 2211902 - RNA, 18 nt, Human
gcagcgcccuuccucucc

SEQ ID NO: 2211903 - RNA, 13 nt, Human
gcagcgccaggcu

SEQ ID NO: 2211904 - RNA, 18 nt, Human
gcagcgccaagcaaccug

SEQ ID NO: 2211905 - RNA, 20 nt, Human
gcagcgccaagcaaccuggg

SEQ ID NO: 2211906 - RNA, 23 nt, Human
gcaggaccucagaguccaggccc

SEQ ID NO: 2211907 - RNA, 22 nt, Human
gcaggaccucagaguccaggcc

SEQ ID NO: 2211908 - RNA, 16 nt, Human
gcaggaccucagaguc

SEQ ID NO: 2211909 - RNA, 12 nt, Human
gcaggaccucug

SEQ ID NO: 2211910 - RNA, 15 nt, Human
gcaggaccucagagu

SEQ ID NO: 2211911 - RNA, 14 nt, Human
gcaggaccucagag

SEQ ID NO: 2211912 - RNA, 11 nt, Human
gcaggaccuca

SEQ ID NO: 2211913 - RNA, 15 nt, Human
gcaggaccaggacua

SEQ ID NO: 2211914 - RNA, 12 nt, Human
gcaggaccagga

SEQ ID NO: 2211915 - RNA, 13 nt, Human
gcaggaccaggac

SEQ ID NO: 2211916 - RNA, 14 nt, Human
gcaggaccaggacu

SEQ ID NO: 2211917 - RNA, 20 nt, Human
gcaggaccuucgggcugugc

SEQ ID NO: 2211918 - RNA, 20 nt, Human
gcaggaccugccuguagccc

SEQ ID NO: 2211919 - RNA, 18 nt, Human
gcaggagauugagaagga

SEQ ID NO: 2211920 - RNA, 19 nt, Human
gcaggagauugagaaggag

SEQ ID NO: 2211921 - RNA, 16 nt, Human
gcaggaccugccugua

SEQ ID NO: 2211922 - RNA, 15 nt, Human
gcaggaccugccugu

SEQ ID NO: 2211923 - RNA, 14 nt, Human
gcaggaccugccug

SEQ ID NO: 2211924 - RNA, 20 nt, Human
gcaggaccucugaaacccug

SEQ ID NO: 2211925 - RNA, 12 nt, Human
gcagcaauaaag

SEQ ID NO: 2211926 - RNA, 12 nt, Human
gcagcacagcaa

SEQ ID NO: 2211927 - RNA, 22 nt, Human
gcagcacagcaaggaggcuggc

SEQ ID NO: 2211928 - RNA, 18 nt, Human
gcagcaccguucugugca

SEQ ID NO: 2211929 - RNA, 17 nt, Human
gcagcaccguucugugc

SEQ ID NO: 2211930 - RNA, 19 nt, Human
gcagcaccguucugugcac

SEQ ID NO: 2211931 - RNA, 16 nt, Human
gcagcacucacacagg

SEQ ID NO: 2211932 - RNA, 18 nt, Human
gcagcacucacacaggac

SEQ ID NO: 2211933 - RNA, 15 nt, Human
gcagaugcuggucau

SEQ ID NO: 2211934 - RNA, 18 nt, Human
gcagauggaaugcugugu

SEQ ID NO: 2211935 - RNA, 19 nt, Human
gcagauuuugcccuugaca

SEQ ID NO: 2211936 - RNA, 22 nt, Human
gcagauggaaugcuguguuaaa

SEQ ID NO: 2211937 - RNA, 19 nt, Human
gcagaugcaaugacucagg

SEQ ID NO: 2211938 - RNA, 15 nt, Human
gcagaugcagagagc

SEQ ID NO: 2211939 - RNA, 17 nt, Human
gcagaugcagagagcca

SEQ ID NO: 2211940 - RNA, 13 nt, Human
gcagaugcaauga

SEQ ID NO: 2211941 - RNA, 22 nt, Human
gcagaugcaaagaggcaagagg

SEQ ID NO: 2211942 - RNA, 19 nt, Human
gcagaugcaaagaggcaag

SEQ ID NO: 2211943 - RNA, 18 nt, Human
gcagaugcagagagccau

SEQ ID NO: 2211944 - RNA, 18 nt, Human
gcagaugcaaagaggcaa

SEQ ID NO: 2211945 - RNA, 19 nt, Human
gcagaguugaagacagagc

SEQ ID NO: 2211946 - RNA, 16 nt, Human
gcagaguugaagacag

SEQ ID NO: 2211947 - RNA, 17 nt, Human
gcagaguugaagacaga

SEQ ID NO: 2211948 - RNA, 15 nt, Human
gcagagacagagagg

SEQ ID NO: 2211949 - RNA, 17 nt, Human
gcagagacaggaccuga

SEQ ID NO: 2211950 - RNA, 17 nt, Human
gcagagaccaucccuga

SEQ ID NO: 2211951 - RNA, 14 nt, Human
gcagagaccauccc

SEQ ID NO: 2211952 - RNA, 15 nt, Human
gcagagaccaucccu

SEQ ID NO: 2211953 - RNA, 12 nt, Human
gcagagucagca

SEQ ID NO: 2211954 - RNA, 23 nt, Human
gcagagucacacgggggcagcug

SEQ ID NO: 2211955 - RNA, 13 nt, Human
gcagagucacacg

SEQ ID NO: 2211956 - RNA, 14 nt, Human
gcagagucacacgg

SEQ ID NO: 2211957 - RNA, 14 nt, Human
gcagagucagcaga

SEQ ID NO: 2211958 - RNA, 13 nt, Human
gcagagucagcag

SEQ ID NO: 2211959 - RNA, 15 nt, Human
gcagagucuugcuac

SEQ ID NO: 2211960 - RNA, 22 nt, Human
gcagaguccugcacaguuuucu

SEQ ID NO: 2211961 - RNA, 15 nt, Human
gcagaguugaagaca

SEQ ID NO: 2211962 - RNA, 23 nt, Human
gcagagucuugcuaccucaguca

SEQ ID NO: 2211963 - RNA, 13 nt, Human
gcagaaggaaaaa

SEQ ID NO: 2211964 - RNA, 18 nt, Human
gcagaaggaagacuucau

SEQ ID NO: 2211965 - RNA, 19 nt, Human
gcagagaaugaaagggccc

SEQ ID NO: 2211966 - RNA, 20 nt, Human
gcagagaaugaaagggccca

SEQ ID NO: 2211967 - RNA, 21 nt, Human
gcagagaaugaaagggcccag

SEQ ID NO: 2211968 - RNA, 21 nt, Human
gcagagaauucucuuauccaa

SEQ ID NO: 2211969 - RNA, 13 nt, Human
gcagagacacuaa

SEQ ID NO: 2211970 - RNA, 20 nt, Human
gcagagaaucauacuuagca

SEQ ID NO: 2211971 - RNA, 21 nt, Human
gcagaaggaaaaauguguaau

SEQ ID NO: 2211972 - RNA, 15 nt, Human
gcagaaggaaaaaug

SEQ ID NO: 2211973 - RNA, 20 nt, Human
gcagaaggaaaaauguguaa

SEQ ID NO: 2211974 - RNA, 22 nt, Human
gcagagaaugaaagggcccaga

SEQ ID NO: 2211975 - RNA, 23 nt, Human
gcagagaaugaaagggcccagag

SEQ ID NO: 2211976 - RNA, 17 nt, Human
gauuuuaacaauaacua

SEQ ID NO: 2211977 - RNA, 23 nt, Human
gauuuuaacaauaacuacugugu

SEQ ID NO: 2211978 - RNA, 19 nt, Human
gcaaacccaucaacaaaaa

SEQ ID NO: 2211979 - RNA, 18 nt, Human
gcaaacccccuuugugcu

SEQ ID NO: 2211980 - RNA, 22 nt, Human
gcaaacccccuuugugcugugg

SEQ ID NO: 2211981 - RNA, 14 nt, Human
gcaaacgcuaaaga

SEQ ID NO: 2211982 - RNA, 21 nt, Human
gcaaaccugaccccugcucag

SEQ ID NO: 2211983 - RNA, 19 nt, Human
gcaaaccugaccccugcuc

SEQ ID NO: 2211984 - RNA, 18 nt, Human
gcaaacgcugccugcccg

SEQ ID NO: 2211985 - RNA, 16 nt, Human
gcaaacgcugccugcc

SEQ ID NO: 2211986 - RNA, 15 nt, Human
gcaaacgcugccugc

SEQ ID NO: 2211987 - RNA, 14 nt, Human
gcaaacgcugccug

SEQ ID NO: 2211988 - RNA, 18 nt, Human
gcaaacuuuauuuugugu

SEQ ID NO: 2211989 - RNA, 17 nt, Human
gcaaacucacugcucaa

SEQ ID NO: 2211990 - RNA, 17 nt, Human
gcaaacgcugccugccg

SEQ ID NO: 2211991 - RNA, 19 nt, Human
gcaaacuaagcccccgcug

SEQ ID NO: 2211992 - RNA, 19 nt, Human
gcaaacucacugcucaaga

SEQ ID NO: 2211993 - RNA, 13 nt, Human
gcaaacucugcug

SEQ ID NO: 2211994 - RNA, 14 nt, Human
gcaaacucugcugu

SEQ ID NO: 2211995 - RNA, 15 nt, Human
gauuuuaacaauaac

SEQ ID NO: 2211996 - RNA, 14 nt, Human
gauuuuaacaauaa

SEQ ID NO: 2211997 - RNA, 12 nt, Human
gauuuuaacaau

SEQ ID NO: 2211998 - RNA, 20 nt, Human
gauuuuaacaaaagcaagac

SEQ ID NO: 2211999 - RNA, 21 nt, Human
gauuuuaaauucacaauagaa

SEQ ID NO: 2212000 - RNA, 16 nt, Human
gcaaaccaucauugaa

SEQ ID NO: 2212001 - RNA, 22 nt, Human
gauuuuaaagagugaaaaauga

SEQ ID NO: 2212002 - RNA, 23 nt, Human
gauuuuaaaccauaaaaagcuga

SEQ ID NO: 2212003 - RNA, 19 nt, Human
gauuuguuuuuguauuuuu

SEQ ID NO: 2212004 - RNA, 17 nt, Human
gcaaaccaucauugaaa

SEQ ID NO: 2212005 - RNA, 19 nt, Human
gcaaaccaucauugaaauc

SEQ ID NO: 2212006 - RNA, 20 nt, Human
gcaaaccaucauugaaaucu

SEQ ID NO: 2212007 - RNA, 21 nt, Human
gcaaaccaucauugaaaucuu

SEQ ID NO: 2212008 - RNA, 17 nt, Human
gcaaagugagggccgag

SEQ ID NO: 2212009 - RNA, 20 nt, Human
gcaaagugaagacacuggcu

SEQ ID NO: 2212010 - RNA, 22 nt, Human
gcaaagucuaaaguuuacagua

SEQ ID NO: 2212011 - RNA, 16 nt, Human
gcaaagucuaaaguuu

SEQ ID NO: 2212012 - RNA, 21 nt, Human
gcaaagucuaaaguuuacagu

SEQ ID NO: 2212013 - RNA, 14 nt, Human
gcaaagaggcaaga

SEQ ID NO: 2212014 - RNA, 21 nt, Human
gcaaagucaugcaaaggcugg

SEQ ID NO: 2212015 - RNA, 16 nt, Human
gcaaagucaugcaaag

SEQ ID NO: 2212016 - RNA, 22 nt, Human
gcaaagucaugcaaaggcuggg

SEQ ID NO: 2212017 - RNA, 23 nt, Human
gcaaagucaugcaaaggcuggga

SEQ ID NO: 2212018 - RNA, 14 nt, Human
gcaaagucuaaagu

SEQ ID NO: 2212019 - RNA, 15 nt, Human
gcaaagucuaaaguu

SEQ ID NO: 2212020 - RNA, 22 nt, Human
gcaaauaauuuccuggugugaa

SEQ ID NO: 2212021 - RNA, 19 nt, Human
gcaaauaauuuccuggugu

SEQ ID NO: 2212022 - RNA, 23 nt, Human
gcaaaguucccuacuuccuguga

SEQ ID NO: 2212023 - RNA, 12 nt, Human
gcaaauaaaagu

SEQ ID NO: 2212024 - RNA, 22 nt, Human
gcaaagacuauucccuucuaac

SEQ ID NO: 2212025 - RNA, 13 nt, Human
gcaaagaggcaag

SEQ ID NO: 2212026 - RNA, 20 nt, Human
gcaaagagccagcacccuga

SEQ ID NO: 2212027 - RNA, 21 nt, Human
gcaaagacuauucccuucuaa

SEQ ID NO: 2212028 - RNA, 17 nt, Human
gcaaagacagaagccuc

SEQ ID NO: 2212029 - RNA, 16 nt, Human
gcaaagacagaagccu

SEQ ID NO: 2212030 - RNA, 15 nt, Human
gcaaagacagaagcc

SEQ ID NO: 2212031 - RNA, 23 nt, Human
gcaaacuuggaauuuguaaccuc

SEQ ID NO: 2212032 - RNA, 23 nt, Human
gcaaacuuuguaugucauuuccu

SEQ ID NO: 2212033 - RNA, 20 nt, Human
gcaaacuuuauuuuguguuu

SEQ ID NO: 2212034 - RNA, 11 nt, Human
gcaaaugcccu

SEQ ID NO: 2212035 - RNA, 12 nt, Human
gcaaaugacuuu

SEQ ID NO: 2212036 - RNA, 14 nt, Human
gcaaaugcccaagg

SEQ ID NO: 2212037 - RNA, 20 nt, Human
gcaaaugcccaagggaaaga

SEQ ID NO: 2212038 - RNA, 12 nt, Human
gcaaaucuugaa

SEQ ID NO: 2212039 - RNA, 13 nt, Human
gcaaaugacuuug

SEQ ID NO: 2212040 - RNA, 18 nt, Human
gcaaaugucaucagaacu

SEQ ID NO: 2212041 - RNA, 21 nt, Human
gcaaaugucagauacaaugua

SEQ ID NO: 2212042 - RNA, 12 nt, Human
gcaaaugugaau

SEQ ID NO: 2212043 - RNA, 15 nt, Human
gcaacugaggcagac

SEQ ID NO: 2212044 - RNA, 14 nt, Human
gcaacugaggcaga

SEQ ID NO: 2212045 - RNA, 13 nt, Human
gcaacugaggcag

SEQ ID NO: 2212046 - RNA, 21 nt, Human
gcaacugaauaaauaccucuu

SEQ ID NO: 2212047 - RNA, 12 nt, Human
gcaacugaauaa

SEQ ID NO: 2212048 - RNA, 15 nt, Human
gcaacucuugauuau

SEQ ID NO: 2212049 - RNA, 13 nt, Human
gcaacugaauaaa

SEQ ID NO: 2212050 - RNA, 18 nt, Human
gcaacugaauaaauaccu

SEQ ID NO: 2212051 - RNA, 19 nt, Human
gcaacugaauaaauaccuc

SEQ ID NO: 2212052 - RNA, 18 nt, Human
gcaacugagucugcggga

SEQ ID NO: 2212053 - RNA, 22 nt, Human
gcaacugaggcagacagcagcu

SEQ ID NO: 2212054 - RNA, 21 nt, Human
gcaacugaggcagacagcagc

SEQ ID NO: 2212055 - RNA, 19 nt, Human
gcaacugaggcagacagca

SEQ ID NO: 2212056 - RNA, 18 nt, Human
gcaacugcauuggcuuug

SEQ ID NO: 2212057 - RNA, 19 nt, Human
gcaacuugucuuuuucugg

SEQ ID NO: 2212058 - RNA, 19 nt, Human
gcaacugucuauuucugcu

SEQ ID NO: 2212059 - RNA, 20 nt, Human
gcaacugucuauuucugcug

SEQ ID NO: 2212060 - RNA, 23 nt, Human
gcaacugucuauuucugcugaau

SEQ ID NO: 2212061 - RNA, 12 nt, Human
gcaacuguuaug

SEQ ID NO: 2212062 - RNA, 18 nt, Human
gcaacuguuaugaaauaa

SEQ ID NO: 2212063 - RNA, 20 nt, Human
gcaacuguuaugaaauaaag

SEQ ID NO: 2212064 - RNA, 21 nt, Human
gcaacuguuaugaaauaaaga

SEQ ID NO: 2212065 - RNA, 23 nt, Human
gcaacuugucuuuuucuggacug

SEQ ID NO: 2212066 - RNA, 22 nt, Human
gcaacuugucuuuuucuggacu

SEQ ID NO: 2212067 - RNA, 21 nt, Human
gcaacuugucuuuuucuggac

SEQ ID NO: 2212068 - RNA, 17 nt, Human
gcaacuuuaagcagcuc

SEQ ID NO: 2212069 - RNA, 15 nt, Human
gcaagauauuuauau

SEQ ID NO: 2212070 - RNA, 22 nt, Human
gcaacuuuguauaaaagggacu

SEQ ID NO: 2212071 - RNA, 22 nt, Human
gcaagauuuuccacaagauucc

SEQ ID NO: 2212072 - RNA, 13 nt, Human
gcaagauugcuua

SEQ ID NO: 2212073 - RNA, 18 nt, Human
gcaagauucugaaacauu

SEQ ID NO: 2212074 - RNA, 16 nt, Human
gcaagaugugggcagu

SEQ ID NO: 2212075 - RNA, 16 nt, Human
gcaagauauuuauaua

SEQ ID NO: 2212076 - RNA, 12 nt, Human
gcaagauguggg

SEQ ID NO: 2212077 - RNA, 15 nt, Human
gcaagcaccuccugc

SEQ ID NO: 2212078 - RNA, 16 nt, Human
gcaagcaccuccugcc

SEQ ID NO: 2212079 - RNA, 14 nt, Human
gcaagauugcuuaa

SEQ ID NO: 2212080 - RNA, 18 nt, Human
gcaagcaagaaacacugg

SEQ ID NO: 2212081 - RNA, 14 nt, Human
gcaagcacaucugc

SEQ ID NO: 2212082 - RNA, 20 nt, Human
gcaagcaauccuagguaggg

SEQ ID NO: 2212083 - RNA, 18 nt, Human
gcaagcaccuccugccuc

SEQ ID NO: 2212084 - RNA, 20 nt, Human
gcaagcaccuccugccucga

SEQ ID NO: 2212085 - RNA, 21 nt, Human
gcaagcacugcaugggcaagc

SEQ ID NO: 2212086 - RNA, 13 nt, Human
gcaagcuggguaa

SEQ ID NO: 2212087 - RNA, 22 nt, Human
gcaagcuuggcuguagaaggag

SEQ ID NO: 2212088 - RNA, 21 nt, Human
gcaagcuuggcuguagaagga

SEQ ID NO: 2212089 - RNA, 17 nt, Human
gcaagcuuggcuguaga

SEQ ID NO: 2212090 - RNA, 16 nt, Human
gcaaggaaaaacaggu

SEQ ID NO: 2212091 - RNA, 21 nt, Human
gcaaggaccaggacucccucc

SEQ ID NO: 2212092 - RNA, 15 nt, Human
gcaaggaccaggacu

SEQ ID NO: 2212093 - RNA, 14 nt, Human
gcaaggaccaggac

SEQ ID NO: 2212094 - RNA, 14 nt, Human
gcaaggaaggaaag

SEQ ID NO: 2212095 - RNA, 13 nt, Human
gcaaggaaggaaa

SEQ ID NO: 2212096 - RNA, 15 nt, Human
gcaaggaaggaaaga

SEQ ID NO: 2212097 - RNA, 20 nt, Human
gcaaggaccaggacucccuc

SEQ ID NO: 2212098 - RNA, 21 nt, Human
gcaaggacacagaugaaacac

SEQ ID NO: 2212099 - RNA, 12 nt, Human
gcaaggcugugc

SEQ ID NO: 2212100 - RNA, 21 nt, Human
gcaagggaauuucuucaacuc

SEQ ID NO: 2212101 - RNA, 12 nt, Human
gcaagggacugu

SEQ ID NO: 2212102 - RNA, 13 nt, Human
gcaaggcugugcu

SEQ ID NO: 2212103 - RNA, 18 nt, Human
gcaaggcugugcucccug

SEQ ID NO: 2212104 - RNA, 14 nt, Human
gcaaggucauuuuu

SEQ ID NO: 2212105 - RNA, 14 nt, Human
gcaaggcugucaau

SEQ ID NO: 2212106 - RNA, 18 nt, Human
gcaaggcugucaauuaca

SEQ ID NO: 2212107 - RNA, 23 nt, Human
gcaaguauguuuuagcauguguu

SEQ ID NO: 2212108 - RNA, 18 nt, Human
gcaaguaugugagugugu

SEQ ID NO: 2212109 - RNA, 14 nt, Human
gcaaguaugugagu

SEQ ID NO: 2212110 - RNA, 23 nt, Human
gcaagguuuaggcugguggccca

SEQ ID NO: 2212111 - RNA, 24 nt, Human
gcaagguuuaggcugguggcccag

SEQ ID NO: 2212112 - RNA, 22 nt, Human
gcaagguuuaggcugguggccc

SEQ ID NO: 2212113 - RNA, 21 nt, Human
gcaagguuuaggcugguggcc

SEQ ID NO: 2212114 - RNA, 20 nt, Human
gcaagguuuaggcugguggc

SEQ ID NO: 2212115 - RNA, 20 nt, Human
gcaagguggcuccagcacca

SEQ ID NO: 2212116 - RNA, 14 nt, Human
gcaaggugcucaca

SEQ ID NO: 2212117 - RNA, 21 nt, Human
gcaaggugcucacaccccauu

SEQ ID NO: 2212118 - RNA, 22 nt, Human
gcaaggucuggccucagguggg

SEQ ID NO: 2212119 - RNA, 19 nt, Human
gcaaggucuggccucaggu

SEQ ID NO: 2212120 - RNA, 18 nt, Human
gcaagguccggcccaucc

SEQ ID NO: 2212121 - RNA, 16 nt, Human
gcaaugaaaaauucuc

SEQ ID NO: 2212122 - RNA, 23 nt, Human
gcaaucuauuaauagcugccuua

SEQ ID NO: 2212123 - RNA, 19 nt, Human
gcaaucucggcucauugaa

SEQ ID NO: 2212124 - RNA, 15 nt, Human
gcaaugaaaaauucu

SEQ ID NO: 2212125 - RNA, 18 nt, Human
gcaaugacagguaaauua

SEQ ID NO: 2212126 - RNA, 19 nt, Human
gcaaugaagucucugaagu

SEQ ID NO: 2212127 - RNA, 17 nt, Human
gcaaugaagucucugaa

SEQ ID NO: 2212128 - RNA, 14 nt, Human
gcaaugaacacuua

SEQ ID NO: 2212129 - RNA, 21 nt, Human
gcaaucuauuaauagcugccu

SEQ ID NO: 2212130 - RNA, 21 nt, Human
gcaaucguaauguacagaugg

SEQ ID NO: 2212131 - RNA, 14 nt, Human
gcaauccugucuuu

SEQ ID NO: 2212132 - RNA, 17 nt, Human
gcaauccugcaagaaca

SEQ ID NO: 2212133 - RNA, 17 nt, Human
gauuucaucugcucucc

SEQ ID NO: 2212134 - RNA, 20 nt, Human
gauuucaucugcucuccuuc

SEQ ID NO: 2212135 - RNA, 21 nt, Human
gauuucaucugcucuccuucc

SEQ ID NO: 2212136 - RNA, 22 nt, Human
gauuucaucugcucuccuuccu

SEQ ID NO: 2212137 - RNA, 17 nt, Human
gauuguuugcucugaga

SEQ ID NO: 2212138 - RNA, 13 nt, Human
gauuguuguuugc

SEQ ID NO: 2212139 - RNA, 12 nt, Human
gauuguuuuauc

SEQ ID NO: 2212140 - RNA, 18 nt, Human
gauuguuuuaucaugaca

SEQ ID NO: 2212141 - RNA, 15 nt, Human
gauuuaaaacaugua

SEQ ID NO: 2212142 - RNA, 15 nt, Human
gauuuaaaagggaag

SEQ ID NO: 2212143 - RNA, 21 nt, Human
gauuguuaagucuaaauauuu

SEQ ID NO: 2212144 - RNA, 18 nt, Human
gauuguucgggugugcaa

SEQ ID NO: 2212145 - RNA, 16 nt, Human
gauuguuaaaauaacu

SEQ ID NO: 2212146 - RNA, 13 nt, Human
gauuguucaucau

SEQ ID NO: 2212147 - RNA, 15 nt, Human
gauugggccccugcc

SEQ ID NO: 2212148 - RNA, 13 nt, Human
gauugggacagag

SEQ ID NO: 2212149 - RNA, 16 nt, Human
gauugggaauccgccc

SEQ ID NO: 2212150 - RNA, 22 nt, Human
gauuggcucacccaagcaaggc

SEQ ID NO: 2212151 - RNA, 18 nt, Human
gauuggcucacccaagca

SEQ ID NO: 2212152 - RNA, 18 nt, Human
gauuggcuuguguguuuc

SEQ ID NO: 2212153 - RNA, 19 nt, Human
gauuggcuuguguguuuca

SEQ ID NO: 2212154 - RNA, 16 nt, Human
gauuggcuuuaaacac

SEQ ID NO: 2212155 - RNA, 15 nt, Human
gauugggaauaaaua

SEQ ID NO: 2212156 - RNA, 23 nt, Human
gauugggaauaaauaugccucuc

SEQ ID NO: 2212157 - RNA, 19 nt, Human
gauuuguuaaugauagcua

SEQ ID NO: 2212158 - RNA, 13 nt, Human
gauuugaacucag

SEQ ID NO: 2212159 - RNA, 16 nt, Human
gauuugaacucagauc

SEQ ID NO: 2212160 - RNA, 22 nt, Human
gauuugaacucagaucugucug

SEQ ID NO: 2212161 - RNA, 21 nt, Human
gauuucauuucaacuguuugc

SEQ ID NO: 2212162 - RNA, 15 nt, Human
gauuuccagccaggg

SEQ ID NO: 2212163 - RNA, 11 nt, Human
gauuucuuucc

SEQ ID NO: 2212164 - RNA, 15 nt, Human
gauuucuuuccagag

SEQ ID NO: 2212165 - RNA, 17 nt, Human
gauuucuuuccagaggg

SEQ ID NO: 2212166 - RNA, 20 nt, Human
gauuucauuucaacuguuug

SEQ ID NO: 2212167 - RNA, 13 nt, Human
gauuucaugauuu

SEQ ID NO: 2212168 - RNA, 16 nt, Human
gauuucaugcuaucuc

SEQ ID NO: 2212169 - RNA, 20 nt, Human
gauuucaugcuaucucugug

SEQ ID NO: 2212170 - RNA, 18 nt, Human
gauuucaugcuaucucug

SEQ ID NO: 2212171 - RNA, 21 nt, Human
gauuucuguuuagauaauaca

SEQ ID NO: 2212172 - RNA, 22 nt, Human
gauuucuguuuagauaauacac

SEQ ID NO: 2212173 - RNA, 15 nt, Human
gauugcuaugaauga

SEQ ID NO: 2212174 - RNA, 20 nt, Human
gauugcuaaauguaacaguc

SEQ ID NO: 2212175 - RNA, 15 nt, Human
gauugcaacaggcug

SEQ ID NO: 2212176 - RNA, 20 nt, Human
gauugcugccccaucagugc

SEQ ID NO: 2212177 - RNA, 16 nt, Human
gauugcugccccauca

SEQ ID NO: 2212178 - RNA, 18 nt, Human
gauugcugauaauaaauu

SEQ ID NO: 2212179 - RNA, 13 nt, Human
gauugcugccacu

SEQ ID NO: 2212180 - RNA, 16 nt, Human
gauugcugccacuuuu

SEQ ID NO: 2212181 - RNA, 17 nt, Human
gauugcaacaggcuggg

SEQ ID NO: 2212182 - RNA, 18 nt, Human
gauugcaacaggcugggc

SEQ ID NO: 2212183 - RNA, 19 nt, Human
gauugcuugagcccaggag

SEQ ID NO: 2212184 - RNA, 16 nt, Human
gauugcuugagcccag

SEQ ID NO: 2212185 - RNA, 18 nt, Human
gauugcuuaaaauagcaa

SEQ ID NO: 2212186 - RNA, 17 nt, Human
gauugcuuaaaauagca

SEQ ID NO: 2212187 - RNA, 21 nt, Human
gauugcugccccaucagugcu

SEQ ID NO: 2212188 - RNA, 14 nt, Human
gauugcuuaaaaua

SEQ ID NO: 2212189 - RNA, 22 nt, Human
gauugcugccacuuuuuaacua

SEQ ID NO: 2212190 - RNA, 21 nt, Human
gauuccacuacaccuggcuga

SEQ ID NO: 2212191 - RNA, 17 nt, Human
gauuggcucacacugag

SEQ ID NO: 2212192 - RNA, 18 nt, Human
gauuggcucacacugaga

SEQ ID NO: 2212193 - RNA, 20 nt, Human
gauuggcucacacugagaau

SEQ ID NO: 2212194 - RNA, 12 nt, Human
gauuggcucacc

SEQ ID NO: 2212195 - RNA, 16 nt, Human
gauucccaagcucugc

SEQ ID NO: 2212196 - RNA, 17 nt, Human
gauucccaagcucugcu

SEQ ID NO: 2212197 - RNA, 17 nt, Human
gauuccaaccccaacuc

SEQ ID NO: 2212198 - RNA, 22 nt, Human
gauuccaaccccaacuccagua

SEQ ID NO: 2212199 - RNA, 20 nt, Human
gauuccaaguucucaccucu

SEQ ID NO: 2212200 - RNA, 19 nt, Human
gauucuuuccugaggcugg

SEQ ID NO: 2212201 - RNA, 16 nt, Human
gauugcaacaggcugg

SEQ ID NO: 2212202 - RNA, 20 nt, Human
gauucuuuuuaaaguguuuc

SEQ ID NO: 2212203 - RNA, 17 nt, Human
gauuccacuacaccugg

SEQ ID NO: 2212204 - RNA, 20 nt, Human
gauuccacuacaccuggcug

SEQ ID NO: 2212205 - RNA, 14 nt, Human
gauugaaaacuuuu

SEQ ID NO: 2212206 - RNA, 15 nt, Human
gauugaaaacuuuuc

SEQ ID NO: 2212207 - RNA, 19 nt, Human
gauugaaaacuuuucucag

SEQ ID NO: 2212208 - RNA, 20 nt, Human
gauucuuuccugaggcuggg

SEQ ID NO: 2212209 - RNA, 22 nt, Human
gauucuuuccugaggcugggcu

SEQ ID NO: 2212210 - RNA, 19 nt, Human
gauguucuaagucuuucca

SEQ ID NO: 2212211 - RNA, 16 nt, Human
gaugcgguggcucacg

SEQ ID NO: 2212212 - RNA, 21 nt, Human
gaugcgguggcucacgccugu

SEQ ID NO: 2212213 - RNA, 15 nt, Human
gauguucucuaucau

SEQ ID NO: 2212214 - RNA, 19 nt, Human
gauguucucuaucauuuaa

SEQ ID NO: 2212215 - RNA, 21 nt, Human
gauguucucuaucauuuaaua

SEQ ID NO: 2212216 - RNA, 18 nt, Human
gauguucuagcauggcug

SEQ ID NO: 2212217 - RNA, 17 nt, Human
gaugccugguggcagcu

SEQ ID NO: 2212218 - RNA, 20 nt, Human
gaugccugugaacugaacuc

SEQ ID NO: 2212219 - RNA, 22 nt, Human
gaugcagugcucgcuguugcug

SEQ ID NO: 2212220 - RNA, 14 nt, Human
gaugcgcacugcau

SEQ ID NO: 2212221 - RNA, 16 nt, Human
gaugcuagaacucccu

SEQ ID NO: 2212222 - RNA, 18 nt, Human
gauuaauauggggaugca

SEQ ID NO: 2212223 - RNA, 14 nt, Human
gauuaauaugaaaa

SEQ ID NO: 2212224 - RNA, 18 nt, Human
gauuaauaugaaaacuua

SEQ ID NO: 2212225 - RNA, 15 nt, Human
gauuaauccagaaua

SEQ ID NO: 2212226 - RNA, 19 nt, Human
gauuaauccagaauaacua

SEQ ID NO: 2212227 - RNA, 22 nt, Human
gauuaaguaaugauaacuggaa

SEQ ID NO: 2212228 - RNA, 18 nt, Human
gauguuuguggccucaga

SEQ ID NO: 2212229 - RNA, 21 nt, Human
gauguuuuaaggaugcuugua

SEQ ID NO: 2212230 - RNA, 14 nt, Human
gauuaaguaaugau

SEQ ID NO: 2212231 - RNA, 17 nt, Human
gauguuuguggccucag

SEQ ID NO: 2212232 - RNA, 16 nt, Human
gauguuuguggccuca

SEQ ID NO: 2212233 - RNA, 15 nt, Human
gauguuuguggccuc

SEQ ID NO: 2212234 - RNA, 14 nt, Human
gauguuuguggccu

SEQ ID NO: 2212235 - RNA, 13 nt, Human
gauguuuguggcc

SEQ ID NO: 2212236 - RNA, 18 nt, Human
gauguuucuuuuguaugu

SEQ ID NO: 2212237 - RNA, 19 nt, Human
gauguuucuuuuguaugua

SEQ ID NO: 2212238 - RNA, 20 nt, Human
gauguuucuuuuguauguaa

SEQ ID NO: 2212239 - RNA, 23 nt, Human
gauguuucuuuuguauguaaaug

SEQ ID NO: 2212240 - RNA, 14 nt, Human
gauguucuggcccu

SEQ ID NO: 2212241 - RNA, 19 nt, Human
gauguuuccagacuuccuu

SEQ ID NO: 2212242 - RNA, 13 nt, Human
gauguuuccagac

SEQ ID NO: 2212243 - RNA, 12 nt, Human
gauguuuccaga

SEQ ID NO: 2212244 - RNA, 15 nt, Human
gauuaauuaaaugca

SEQ ID NO: 2212245 - RNA, 13 nt, Human
gauuacaagcgug

SEQ ID NO: 2212246 - RNA, 21 nt, Human
gauuacaagcgugagccacug

SEQ ID NO: 2212247 - RNA, 13 nt, Human
gauucagacagcu

SEQ ID NO: 2212248 - RNA, 14 nt, Human
gauucagacagcug

SEQ ID NO: 2212249 - RNA, 17 nt, Human
gauucagacagcugccu

SEQ ID NO: 2212250 - RNA, 18 nt, Human
gauucagacagcugccug

SEQ ID NO: 2212251 - RNA, 16 nt, Human
gauucaggcugcuugg

SEQ ID NO: 2212252 - RNA, 13 nt, Human
gauucaggcugcu

SEQ ID NO: 2212253 - RNA, 12 nt, Human
gauucaggcugc

SEQ ID NO: 2212254 - RNA, 13 nt, Human
gauucaggaaugu

SEQ ID NO: 2212255 - RNA, 16 nt, Human
gauucauaguaacuuc

SEQ ID NO: 2212256 - RNA, 22 nt, Human
gauucaucucucagaagggagg

SEQ ID NO: 2212257 - RNA, 22 nt, Human
gauucaguuuucauuugguuca

SEQ ID NO: 2212258 - RNA, 15 nt, Human
gauucaguuuucauu

SEQ ID NO: 2212259 - RNA, 20 nt, Human
gauucaguguuaaaugugau

SEQ ID NO: 2212260 - RNA, 17 nt, Human
gauucagguauguugcc

SEQ ID NO: 2212261 - RNA, 11 nt, Human
gauucaugugg

SEQ ID NO: 2212262 - RNA, 21 nt, Human
gauucaugccaauuagcaauu

SEQ ID NO: 2212263 - RNA, 23 nt, Human
gauucaucucucagaagggaggc

SEQ ID NO: 2212264 - RNA, 19 nt, Human
gauucauuuuaacaucuga

SEQ ID NO: 2212265 - RNA, 23 nt, Human
gauucauuuccugcccuuccuca

SEQ ID NO: 2212266 - RNA, 10 nt, Human
gauucauuuu

SEQ ID NO: 2212267 - RNA, 13 nt, Human
gauucauuuccug

SEQ ID NO: 2212268 - RNA, 16 nt, Human
gauucauuuccugccc

SEQ ID NO: 2212269 - RNA, 21 nt, Human
gauucauuuccugcccuuccu

SEQ ID NO: 2212270 - RNA, 15 nt, Human
gauucccaagcucug

SEQ ID NO: 2212271 - RNA, 23 nt, Human
gauuccaaagaguagaauugcau

SEQ ID NO: 2212272 - RNA, 19 nt, Human
gauuccaaagaguagaauu

SEQ ID NO: 2212273 - RNA, 18 nt, Human
gauuccaaagaguagaau

SEQ ID NO: 2212274 - RNA, 19 nt, Human
gauucauuuuuaaucauga

SEQ ID NO: 2212275 - RNA, 13 nt, Human
gaugaacccagga

SEQ ID NO: 2212276 - RNA, 22 nt, Human
gaugaacccaggacgcuucuga

SEQ ID NO: 2212277 - RNA, 23 nt, Human
gaugaacccaggacgcuucugaa

SEQ ID NO: 2212278 - RNA, 19 nt, Human
gaucuuggcuuacugcagc

SEQ ID NO: 2212279 - RNA, 23 nt, Human
gaugaaauuuucuagacuuucug

SEQ ID NO: 2212280 - RNA, 16 nt, Human
gaugaaauguaaauac

SEQ ID NO: 2212281 - RNA, 13 nt, Human
gaucuuuaaaaua

SEQ ID NO: 2212282 - RNA, 15 nt, Human
gaugaaugauaaacu

SEQ ID NO: 2212283 - RNA, 23 nt, Human
gaugaaugaggucccaggcagag

SEQ ID NO: 2212284 - RNA, 19 nt, Human
gaugaaugaggucccaggc

SEQ ID NO: 2212285 - RNA, 13 nt, Human
gaugaaugagaau

SEQ ID NO: 2212286 - RNA, 17 nt, Human
gaugaaguuuuacauug

SEQ ID NO: 2212287 - RNA, 23 nt, Human
gaugaaguuuuacauuguugagc

SEQ ID NO: 2212288 - RNA, 22 nt, Human
gaugaaguuuuacauuguugag

SEQ ID NO: 2212289 - RNA, 20 nt, Human
gaugacaaaaauucaacuca

SEQ ID NO: 2212290 - RNA, 19 nt, Human
gaugacaaauggagaagaa

SEQ ID NO: 2212291 - RNA, 16 nt, Human
gaugaauuaaauuuaa

SEQ ID NO: 2212292 - RNA, 14 nt, Human
gaugaauguauuua

SEQ ID NO: 2212293 - RNA, 13 nt, Human
gaugaauguaugu

SEQ ID NO: 2212294 - RNA, 14 nt, Human
gaugaauguaugug

SEQ ID NO: 2212295 - RNA, 15 nt, Human
gaugaaugccgugga

SEQ ID NO: 2212296 - RNA, 16 nt, Human
gaugaaugccguggau

SEQ ID NO: 2212297 - RNA, 12 nt, Human
gaugaccccucc

SEQ ID NO: 2212298 - RNA, 13 nt, Human
gaugaccagaaca

SEQ ID NO: 2212299 - RNA, 16 nt, Human
gaugaccccuccccua

SEQ ID NO: 2212300 - RNA, 17 nt, Human
gaugaccccuccccuaa

SEQ ID NO: 2212301 - RNA, 23 nt, Human
gaugacccugcgaaggggcccug

SEQ ID NO: 2212302 - RNA, 18 nt, Human
gaugaccagaacaagguu

SEQ ID NO: 2212303 - RNA, 16 nt, Human
gaucugucacaccagc

SEQ ID NO: 2212304 - RNA, 20 nt, Human
gaucuguauauacaauaaca

SEQ ID NO: 2212305 - RNA, 15 nt, Human
gaucuguauauacaa

SEQ ID NO: 2212306 - RNA, 16 nt, Human
gaucugguuuugcuau

SEQ ID NO: 2212307 - RNA, 18 nt, Human
gaucugguuuugcuauua

SEQ ID NO: 2212308 - RNA, 14 nt, Human
gaucuguccucagc

SEQ ID NO: 2212309 - RNA, 20 nt, Human
gaucugucacaccagccaua

SEQ ID NO: 2212310 - RNA, 15 nt, Human
gaucuguccaaggaa

SEQ ID NO: 2212311 - RNA, 24 nt, Human
gaucugguuuugcuauuagacugu

SEQ ID NO: 2212312 - RNA, 17 nt, Human
gaucugucacaccagcc

SEQ ID NO: 2212313 - RNA, 18 nt, Human
gaucugucacaccagcca

SEQ ID NO: 2212314 - RNA, 19 nt, Human
gaucugucacaccagccau

SEQ ID NO: 2212315 - RNA, 22 nt, Human
gaucuucuguggguuucuaaag

SEQ ID NO: 2212316 - RNA, 18 nt, Human
gaucuguccucagccuug

SEQ ID NO: 2212317 - RNA, 17 nt, Human
gaucuguccucagccuu

SEQ ID NO: 2212318 - RNA, 16 nt, Human
gaucuguccucagccu

SEQ ID NO: 2212319 - RNA, 15 nt, Human
gaucuguccucagcc

SEQ ID NO: 2212320 - RNA, 19 nt, Human
gaucuucuuuauaauucua

SEQ ID NO: 2212321 - RNA, 19 nt, Human
gaucuugagcaaguuccuu

SEQ ID NO: 2212322 - RNA, 15 nt, Human
gaugaaaugagguca

SEQ ID NO: 2212323 - RNA, 21 nt, Human
gaugaaaugaggucagagccu

SEQ ID NO: 2212324 - RNA, 14 nt, Human
gaugcagugcuucc

SEQ ID NO: 2212325 - RNA, 14 nt, Human
gaugccugguggca

SEQ ID NO: 2212326 - RNA, 15 nt, Human
gaugccugguggcag

SEQ ID NO: 2212327 - RNA, 16 nt, Human
gaugccugguggcagc

SEQ ID NO: 2212328 - RNA, 16 nt, Human
gaugagaggaaaucac

SEQ ID NO: 2212329 - RNA, 21 nt, Human
gaugagagcccagagguaaca

SEQ ID NO: 2212330 - RNA, 15 nt, Human
gaugcagggcaguca

SEQ ID NO: 2212331 - RNA, 22 nt, Human
gaugcaggugagcccauggccc

SEQ ID NO: 2212332 - RNA, 14 nt, Human
gaugcagggcaguc

SEQ ID NO: 2212333 - RNA, 14 nt, Human
gaugagaagagggg

SEQ ID NO: 2212334 - RNA, 23 nt, Human
gaugagacuuccaaaccugacag

SEQ ID NO: 2212335 - RNA, 14 nt, Human
gaugagagcccaga

SEQ ID NO: 2212336 - RNA, 15 nt, Human
gaugagagcccagag

SEQ ID NO: 2212337 - RNA, 17 nt, Human
gaugagagcccagaggu

SEQ ID NO: 2212338 - RNA, 18 nt, Human
gaugagagcccagaggua

SEQ ID NO: 2212339 - RNA, 15 nt, Human
gaugaccuggauaac

SEQ ID NO: 2212340 - RNA, 20 nt, Human
gaugaccuugaaugaugcca

SEQ ID NO: 2212341 - RNA, 23 nt, Human
gaugagaaauaaaguuucuguug

SEQ ID NO: 2212342 - RNA, 18 nt, Human
gaugaccuugaaugaugc

SEQ ID NO: 2212343 - RNA, 14 nt, Human
gaugcaccagcccu

SEQ ID NO: 2212344 - RNA, 14 nt, Human
gaugagaggaaauc

SEQ ID NO: 2212345 - RNA, 15 nt, Human
gaugcaccagcccuu

SEQ ID NO: 2212346 - RNA, 23 nt, Human
gaugcaccagcccuuagcaggga

SEQ ID NO: 2212347 - RNA, 18 nt, Human
gauccuaggcauuugcug

SEQ ID NO: 2212348 - RNA, 18 nt, Human
gauccuaagggcucaccg

SEQ ID NO: 2212349 - RNA, 20 nt, Human
gauccuagccuuauccucug

SEQ ID NO: 2212350 - RNA, 23 nt, Human
gauccuaaugaaugcauaaaaug

SEQ ID NO: 2212351 - RNA, 23 nt, Human
gauccgacuugaauuuucccacu

SEQ ID NO: 2212352 - RNA, 20 nt, Human
gauccgacugcuuuggaccu

SEQ ID NO: 2212353 - RNA, 14 nt, Human
gauccgacugcuuu

SEQ ID NO: 2212354 - RNA, 17 nt, Human
gauccgacugcuuugga

SEQ ID NO: 2212355 - RNA, 18 nt, Human
gauccgacugcuuuggac

SEQ ID NO: 2212356 - RNA, 16 nt, Human
gauccucccaccucag

SEQ ID NO: 2212357 - RNA, 14 nt, Human
gauccuccaggugc

SEQ ID NO: 2212358 - RNA, 17 nt, Human
gauccucccaccucagc

SEQ ID NO: 2212359 - RNA, 13 nt, Human
gaucauccacugu

SEQ ID NO: 2212360 - RNA, 12 nt, Human
gaucccucaucu

SEQ ID NO: 2212361 - RNA, 19 nt, Human
gaucauauacgugaaaauu

SEQ ID NO: 2212362 - RNA, 17 nt, Human
gaucauagguauuucaa

SEQ ID NO: 2212363 - RNA, 14 nt, Human
gaucaggcucugcc

SEQ ID NO: 2212364 - RNA, 18 nt, Human
gaucauagguauuucaaa

SEQ ID NO: 2212365 - RNA, 18 nt, Human
gaucccuguuacccagag

SEQ ID NO: 2212366 - RNA, 20 nt, Human
gaucccuguuacccagagaa

SEQ ID NO: 2212367 - RNA, 21 nt, Human
gaucccuguguugucucuaga

SEQ ID NO: 2212368 - RNA, 24 nt, Human
gaucccuguguugucucuagagca

SEQ ID NO: 2212369 - RNA, 14 nt, Human
gaucccuguguugu

SEQ ID NO: 2212370 - RNA, 18 nt, Human
gaucccuguguugucucu

SEQ ID NO: 2212371 - RNA, 19 nt, Human
gaucccuguguugucucua

SEQ ID NO: 2212372 - RNA, 20 nt, Human
gaucccuguguugucucuag

SEQ ID NO: 2212373 - RNA, 19 nt, Human
gaucccucccccccaugca

SEQ ID NO: 2212374 - RNA, 13 nt, Human
gaucccucccccc

SEQ ID NO: 2212375 - RNA, 18 nt, Human
gaucccucaucugucccu

SEQ ID NO: 2212376 - RNA, 14 nt, Human
gaucccucaucugu

SEQ ID NO: 2212377 - RNA, 23 nt, Human
gaucccucccccccaugcacugu

SEQ ID NO: 2212378 - RNA, 21 nt, Human
gaucccucccccccaugcacu

SEQ ID NO: 2212379 - RNA, 23 nt, Human
gaucccucuacagagcuucccug

SEQ ID NO: 2212380 - RNA, 14 nt, Human
gaucccucucugga

SEQ ID NO: 2212381 - RNA, 15 nt, Human
gaucuaggugaggau

SEQ ID NO: 2212382 - RNA, 14 nt, Human
gaucuagguuuaac

SEQ ID NO: 2212383 - RNA, 15 nt, Human
gaucuagguuuaacu

SEQ ID NO: 2212384 - RNA, 16 nt, Human
gaucuagaauguguuu

SEQ ID NO: 2212385 - RNA, 20 nt, Human
gaucuagaauguguuuucug

SEQ ID NO: 2212386 - RNA, 21 nt, Human
gaucuagaauguguuuucuga

SEQ ID NO: 2212387 - RNA, 22 nt, Human
gaucuagaauguguuuucugaa

SEQ ID NO: 2212388 - RNA, 20 nt, Human
gaucuaggaagacuuuggaa

SEQ ID NO: 2212389 - RNA, 16 nt, Human
gaucugguccuaccca

SEQ ID NO: 2212390 - RNA, 16 nt, Human
gaucugguuugacucc

SEQ ID NO: 2212391 - RNA, 14 nt, Human
gaucugguuuugcu

SEQ ID NO: 2212392 - RNA, 15 nt, Human
gaucugguccuaccc

SEQ ID NO: 2212393 - RNA, 22 nt, Human
gaucuagguuuaacucagauca

SEQ ID NO: 2212394 - RNA, 20 nt, Human
gaucuagguuuaacucagau

SEQ ID NO: 2212395 - RNA, 21 nt, Human
gaucuagguuuaacucagauc

SEQ ID NO: 2212396 - RNA, 16 nt, Human
gaucuagguuuaacuc

SEQ ID NO: 2212397 - RNA, 17 nt, Human
gaucuagguuuaacuca

SEQ ID NO: 2212398 - RNA, 18 nt, Human
gaucuagguuuaacucag

SEQ ID NO: 2212399 - RNA, 19 nt, Human
gaucuagguuuaacucaga

SEQ ID NO: 2212400 - RNA, 18 nt, Human
gaucuaccagcauaaaua

SEQ ID NO: 2212401 - RNA, 21 nt, Human
gaucuaaggaugucacagggc

SEQ ID NO: 2212402 - RNA, 17 nt, Human
gaucuaccccuuacuua

SEQ ID NO: 2212403 - RNA, 13 nt, Human
gaucuaggaagac

SEQ ID NO: 2212404 - RNA, 14 nt, Human
gaucuaggaagacu

SEQ ID NO: 2212405 - RNA, 18 nt, Human
gaucuaggaagacuuugg

SEQ ID NO: 2212406 - RNA, 18 nt, Human
gaucuaagccuuuccaua

SEQ ID NO: 2212407 - RNA, 23 nt, Human
gauccuggguggucugcaggcag

SEQ ID NO: 2212408 - RNA, 23 nt, Human
gaucuaaggaugucacagggcca

SEQ ID NO: 2212409 - RNA, 17 nt, Human
gaucuaagccuuuccau

SEQ ID NO: 2212410 - RNA, 12 nt, Human
gauccugugaag

SEQ ID NO: 2212411 - RNA, 20 nt, Human
gauccugucuuuaaggaaaa

SEQ ID NO: 2212412 - RNA, 19 nt, Human
gauccugucuuuaaggaaa

SEQ ID NO: 2212413 - RNA, 16 nt, Human
gauccugucuuuaagg

SEQ ID NO: 2212414 - RNA, 17 nt, Human
gauccuggaggcccagu

SEQ ID NO: 2212415 - RNA, 16 nt, Human
gauccuggaggcccag

SEQ ID NO: 2212416 - RNA, 15 nt, Human
gauccuggaggccca

SEQ ID NO: 2212417 - RNA, 12 nt, Human
gauccuggaggc

SEQ ID NO: 2212418 - RNA, 14 nt, Human
gauccuggaaauca

SEQ ID NO: 2212419 - RNA, 15 nt, Human
gauccuccugcagac

SEQ ID NO: 2212420 - RNA, 16 nt, Human
gauccuccugcagacc

SEQ ID NO: 2212421 - RNA, 21 nt, Human
gauccuccugcagaccacgcc

SEQ ID NO: 2212422 - RNA, 22 nt, Human
gauccuagccuuauccucugau

SEQ ID NO: 2212423 - RNA, 23 nt, Human
gauccuagccuuauccucugauc

SEQ ID NO: 2212424 - RNA, 16 nt, Human
gauccucccaggcuuc

SEQ ID NO: 2212425 - RNA, 12 nt, Human
gauccugagcca

SEQ ID NO: 2212426 - RNA, 22 nt, Human
gauccuccugcagaccacgccc

SEQ ID NO: 2212427 - RNA, 21 nt, Human
gaguucucagggcuccugccu

SEQ ID NO: 2212428 - RNA, 16 nt, Human
gaguucucagggcucc

SEQ ID NO: 2212429 - RNA, 18 nt, Human
gaguucucagggcuccug

SEQ ID NO: 2212430 - RNA, 19 nt, Human
gaguucucagggcuccugc

SEQ ID NO: 2212431 - RNA, 20 nt, Human
gaguucucagggcuccugcc

SEQ ID NO: 2212432 - RNA, 13 nt, Human
gaguucugguucc

SEQ ID NO: 2212433 - RNA, 14 nt, Human
gauaaaauaaauga

SEQ ID NO: 2212434 - RNA, 13 nt, Human
gauaaacaguagu

SEQ ID NO: 2212435 - RNA, 16 nt, Human
gauaaauuccacugga

SEQ ID NO: 2212436 - RNA, 12 nt, Human
gauaaauuauaa

SEQ ID NO: 2212437 - RNA, 13 nt, Human
gauaaauuauaag

SEQ ID NO: 2212438 - RNA, 15 nt, Human
gauaacaagaucuuu

SEQ ID NO: 2212439 - RNA, 16 nt, Human
gauaacaaccuggaga

SEQ ID NO: 2212440 - RNA, 13 nt, Human
gauaacagcacug

SEQ ID NO: 2212441 - RNA, 17 nt, Human
gauaacaaccuggagac

SEQ ID NO: 2212442 - RNA, 11 nt, Human
gauaaagauga

SEQ ID NO: 2212443 - RNA, 12 nt, Human
gauaaagaugau

SEQ ID NO: 2212444 - RNA, 15 nt, Human
gauaaagauaucaau

SEQ ID NO: 2212445 - RNA, 18 nt, Human
gauaaaaugagguucaac

SEQ ID NO: 2212446 - RNA, 19 nt, Human
gauaaaauuauagauggga

SEQ ID NO: 2212447 - RNA, 22 nt, Human
gauaaaauuauagaugggaaug

SEQ ID NO: 2212448 - RNA, 22 nt, Human
gauaaccuguacuucaaguuaa

SEQ ID NO: 2212449 - RNA, 13 nt, Human
gauaacuagaugg

SEQ ID NO: 2212450 - RNA, 21 nt, Human
gauaaccuguacuucaaguua

SEQ ID NO: 2212451 - RNA, 23 nt, Human
gauaaccuauaugauuuauaguu

SEQ ID NO: 2212452 - RNA, 17 nt, Human
gauaaccuauaugauuu

SEQ ID NO: 2212453 - RNA, 16 nt, Human
gauaacagcacugacu

SEQ ID NO: 2212454 - RNA, 15 nt, Human
gauaaccagcuguaa

SEQ ID NO: 2212455 - RNA, 23 nt, Human
gauaaguucuuaugccauguuaa

SEQ ID NO: 2212456 - RNA, 17 nt, Human
gauaacuagauggugcu

SEQ ID NO: 2212457 - RNA, 24 nt, Human
gauaauacaccacuacauucuguu

SEQ ID NO: 2212458 - RNA, 23 nt, Human
gauaauacaccacuacauucugu

SEQ ID NO: 2212459 - RNA, 12 nt, Human
gauaauacacca

SEQ ID NO: 2212460 - RNA, 16 nt, Human
gauaauaauauauguu

SEQ ID NO: 2212461 - RNA, 18 nt, Human
gaguucgagaccagccug

SEQ ID NO: 2212462 - RNA, 22 nt, Human
gaguucagguagcugccccugg

SEQ ID NO: 2212463 - RNA, 21 nt, Human
gaguucagguagcugccccug

SEQ ID NO: 2212464 - RNA, 19 nt, Human
gaguucagguagcugcccc

SEQ ID NO: 2212465 - RNA, 22 nt, Human
gaguucacuucaucuucucagc

SEQ ID NO: 2212466 - RNA, 16 nt, Human
gaguucaauggcugcu

SEQ ID NO: 2212467 - RNA, 19 nt, Human
gaguucaauggcugcugaa

SEQ ID NO: 2212468 - RNA, 18 nt, Human
gaguucaaugaucuaggu

SEQ ID NO: 2212469 - RNA, 19 nt, Human
gaguucaaugaucuagguu

SEQ ID NO: 2212470 - RNA, 21 nt, Human
gaguucaaugaucuagguuua

SEQ ID NO: 2212471 - RNA, 15 nt, Human
gaguucaauggcugc

SEQ ID NO: 2212472 - RNA, 19 nt, Human
gaguucgaggcugcaguca

SEQ ID NO: 2212473 - RNA, 21 nt, Human
gaguucgagaccagccuggcc

SEQ ID NO: 2212474 - RNA, 20 nt, Human
gaguucgagaccagccuggc

SEQ ID NO: 2212475 - RNA, 19 nt, Human
gaguucgagaccagccugg

SEQ ID NO: 2212476 - RNA, 11 nt, Human
gaguucuacau

SEQ ID NO: 2212477 - RNA, 14 nt, Human
gaguucaguuuuac

SEQ ID NO: 2212478 - RNA, 13 nt, Human
gaguucucagggc

SEQ ID NO: 2212479 - RNA, 14 nt, Human
gaguucucagggcu

SEQ ID NO: 2212480 - RNA, 15 nt, Human
gaguucucagggcuc

SEQ ID NO: 2212481 - RNA, 19 nt, Human
gaguguuccccuuccacug

SEQ ID NO: 2212482 - RNA, 17 nt, Human
gaguguguuugucaccg

SEQ ID NO: 2212483 - RNA, 19 nt, Human
gagugugugcaugugugug

SEQ ID NO: 2212484 - RNA, 21 nt, Human
gaguguguccaagugugugug

SEQ ID NO: 2212485 - RNA, 19 nt, Human
gaguguguauuguucccag

SEQ ID NO: 2212486 - RNA, 11 nt, Human
gagugugugca

SEQ ID NO: 2212487 - RNA, 23 nt, Human
gaguuauuuuaauuaucuuuucu

SEQ ID NO: 2212488 - RNA, 22 nt, Human
gaguucaauaaaugucuguuga

SEQ ID NO: 2212489 - RNA, 11 nt, Human
gaguucaauga

SEQ ID NO: 2212490 - RNA, 12 nt, Human
gaguucaaugau

SEQ ID NO: 2212491 - RNA, 13 nt, Human
gaguucaaugauc

SEQ ID NO: 2212492 - RNA, 14 nt, Human
gaguucaaugaucu

SEQ ID NO: 2212493 - RNA, 15 nt, Human
gaguucaaugaucua

SEQ ID NO: 2212494 - RNA, 16 nt, Human
gaguucaaugaucuag

SEQ ID NO: 2212495 - RNA, 15 nt, Human
gacuucauuuuuccu

SEQ ID NO: 2212496 - RNA, 16 nt, Human
gacuucauuuuuccua

SEQ ID NO: 2212497 - RNA, 15 nt, Human
gacuucauuaauaau

SEQ ID NO: 2212498 - RNA, 21 nt, Human
gacuucauagauuuccuuccc

SEQ ID NO: 2212499 - RNA, 21 nt, Human
gacuucaguauguugucaaag

SEQ ID NO: 2212500 - RNA, 24 nt, Human
gacuucaucucccaccuagcagca

SEQ ID NO: 2212501 - RNA, 13 nt, Human
gacuucaguaugu

SEQ ID NO: 2212502 - RNA, 17 nt, Human
gacuucaguauguuguc

SEQ ID NO: 2212503 - RNA, 19 nt, Human
gacuucaguauguugucaa

SEQ ID NO: 2212504 - RNA, 20 nt, Human
gacuucaguauguugucaaa

SEQ ID NO: 2212505 - RNA, 19 nt, Human
gacuucccacucuagggca

SEQ ID NO: 2212506 - RNA, 18 nt, Human
gaguguguauuguuccca

SEQ ID NO: 2212507 - RNA, 17 nt, Human
gaguguguauuguuccc

SEQ ID NO: 2212508 - RNA, 16 nt, Human
gaguguguauuguucc

SEQ ID NO: 2212509 - RNA, 22 nt, Human
gaguguguaauuuaaaauugug

SEQ ID NO: 2212510 - RNA, 21 nt, Human
gaguguguaauuuaaaauugu

SEQ ID NO: 2212511 - RNA, 14 nt, Human
gacuuccuuacuaa

SEQ ID NO: 2212512 - RNA, 14 nt, Human
gacuuccuugagac

SEQ ID NO: 2212513 - RNA, 18 nt, Human
gacuuccuguccagcucc

SEQ ID NO: 2212514 - RNA, 22 nt, Human
gacuuccuguccagcuccaacc

SEQ ID NO: 2212515 - RNA, 21 nt, Human
gacuuccuguccagcuccaac

SEQ ID NO: 2212516 - RNA, 20 nt, Human
gacuuccuguccagcuccaa

SEQ ID NO: 2212517 - RNA, 19 nt, Human
gacuuccuguccagcucca

SEQ ID NO: 2212518 - RNA, 15 nt, Human
gauauaaauaaaaca

SEQ ID NO: 2212519 - RNA, 16 nt, Human
gauauagccagaaaaa

SEQ ID NO: 2212520 - RNA, 19 nt, Human
gauauaguuuuacuuuuaa

SEQ ID NO: 2212521 - RNA, 24 nt, Human
gauauaguuuuacuuuuaaacugu

SEQ ID NO: 2212522 - RNA, 21 nt, Human
gauauaguuuuacuuuuaaac

SEQ ID NO: 2212523 - RNA, 15 nt, Human
gauauauaaguguac

SEQ ID NO: 2212524 - RNA, 17 nt, Human
gauauauaaguguacau

SEQ ID NO: 2212525 - RNA, 18 nt, Human
gauauaugcucugcaugu

SEQ ID NO: 2212526 - RNA, 14 nt, Human
gauauauacauagc

SEQ ID NO: 2212527 - RNA, 13 nt, Human
gauauauaucaua

SEQ ID NO: 2212528 - RNA, 21 nt, Human
gauauaucaugagugaauaaa

SEQ ID NO: 2212529 - RNA, 23 nt, Human
gauaguggggagacuucuuggcu

SEQ ID NO: 2212530 - RNA, 21 nt, Human
gauagggauacaugcucuuag

SEQ ID NO: 2212531 - RNA, 20 nt, Human
gauaggcucugcacagaugg

SEQ ID NO: 2212532 - RNA, 17 nt, Human
gauaggcucugcacaga

SEQ ID NO: 2212533 - RNA, 14 nt, Human
gauaggcucugcac

SEQ ID NO: 2212534 - RNA, 13 nt, Human
gauaggcucugca

SEQ ID NO: 2212535 - RNA, 20 nt, Human
gauagugucccacggugccu

SEQ ID NO: 2212536 - RNA, 13 nt, Human
gauauaaauaaaa

SEQ ID NO: 2212537 - RNA, 18 nt, Human
gauauaaaagacugacca

SEQ ID NO: 2212538 - RNA, 12 nt, Human
gauaguuacugu

SEQ ID NO: 2212539 - RNA, 14 nt, Human
gauaguuacuguug

SEQ ID NO: 2212540 - RNA, 17 nt, Human
gauaguuacuguuguga

SEQ ID NO: 2212541 - RNA, 20 nt, Human
gauaguuacuguugugaccu

SEQ ID NO: 2212542 - RNA, 12 nt, Human
gauaggcucugc

SEQ ID NO: 2212543 - RNA, 17 nt, Human
gauaggagccugcuggu

SEQ ID NO: 2212544 - RNA, 18 nt, Human
gauaggaaugugaaagca

SEQ ID NO: 2212545 - RNA, 17 nt, Human
gauaggucagugcaaau

SEQ ID NO: 2212546 - RNA, 16 nt, Human
gauacaaaagcaugug

SEQ ID NO: 2212547 - RNA, 19 nt, Human
gauaggaaaaaugaguaau

SEQ ID NO: 2212548 - RNA, 17 nt, Human
gauaauaugagaaucag

SEQ ID NO: 2212549 - RNA, 18 nt, Human
gauaauauuguggugcca

SEQ ID NO: 2212550 - RNA, 14 nt, Human
gauaauuauaauau

SEQ ID NO: 2212551 - RNA, 17 nt, Human
gauaaucaacugggcug

SEQ ID NO: 2212552 - RNA, 18 nt, Human
gauaauucuagcuuugag

SEQ ID NO: 2212553 - RNA, 18 nt, Human
gauaauugcauucaucuu

SEQ ID NO: 2212554 - RNA, 13 nt, Human
gauaauuccagug

SEQ ID NO: 2212555 - RNA, 17 nt, Human
gauaauuccaguggucc

SEQ ID NO: 2212556 - RNA, 23 nt, Human
gauaucccuaugcugccuaggcu

SEQ ID NO: 2212557 - RNA, 22 nt, Human
gauaucccuaugcugccuaggc

SEQ ID NO: 2212558 - RNA, 17 nt, Human
gauaucccuaugcugcc

SEQ ID NO: 2212559 - RNA, 13 nt, Human
gauaucucaucuc

SEQ ID NO: 2212560 - RNA, 23 nt, Human
gauaucgacuuguuuuugcacau

SEQ ID NO: 2212561 - RNA, 14 nt, Human
gauaucucaucucu

SEQ ID NO: 2212562 - RNA, 15 nt, Human
gauaucugagggagg

SEQ ID NO: 2212563 - RNA, 16 nt, Human
gauaucugagggagga

SEQ ID NO: 2212564 - RNA, 20 nt, Human
gauaucugagggaggaggcc

SEQ ID NO: 2212565 - RNA, 23 nt, Human
gauaucugagggaggaggccacc

SEQ ID NO: 2212566 - RNA, 23 nt, Human
gauauaggucagugaggcccagg

SEQ ID NO: 2212567 - RNA, 20 nt, Human
gauauaucaugagugaauaa

SEQ ID NO: 2212568 - RNA, 15 nt, Human
gauauauuuuucaca

SEQ ID NO: 2212569 - RNA, 17 nt, Human
gauauauuuuuaagaua

SEQ ID NO: 2212570 - RNA, 17 nt, Human
gauauauuuuucacagu

SEQ ID NO: 2212571 - RNA, 19 nt, Human
gauauccauucuuucugau

SEQ ID NO: 2212572 - RNA, 16 nt, Human
gauauccauucuuucu

SEQ ID NO: 2212573 - RNA, 15 nt, Human
gauauccauucuuuc

SEQ ID NO: 2212574 - RNA, 18 nt, Human
gauaucacagucuaauuu

SEQ ID NO: 2212575 - RNA, 19 nt, Human
gauaucacagucuaauuuu

SEQ ID NO: 2212576 - RNA, 19 nt, Human
gaucacagcuucagccagg

SEQ ID NO: 2212577 - RNA, 21 nt, Human
gaucacagcuucagccaggag

SEQ ID NO: 2212578 - RNA, 21 nt, Human
gauaucugagggaggaggcca

SEQ ID NO: 2212579 - RNA, 13 nt, Human
gaucacagcugcu

SEQ ID NO: 2212580 - RNA, 17 nt, Human
gaucacagcugcuuucu

SEQ ID NO: 2212581 - RNA, 20 nt, Human
gaucacagcugcuuucuguu

SEQ ID NO: 2212582 - RNA, 14 nt, Human
gaucacagccucug

SEQ ID NO: 2212583 - RNA, 14 nt, Human
gaucaccagaauaa

SEQ ID NO: 2212584 - RNA, 20 nt, Human
gaucacagggccccagaagg

SEQ ID NO: 2212585 - RNA, 13 nt, Human
gaucacagggccc

SEQ ID NO: 2212586 - RNA, 16 nt, Human
gaucacauguggacuu

SEQ ID NO: 2212587 - RNA, 20 nt, Human
gaucaccagcccggccugcu

SEQ ID NO: 2212588 - RNA, 22 nt, Human
gaucaccagcccggccugcucc

SEQ ID NO: 2212589 - RNA, 15 nt, Human
gaucaccagaauaaa

SEQ ID NO: 2212590 - RNA, 14 nt, Human
gaucaccagcccgg

SEQ ID NO: 2212591 - RNA, 15 nt, Human
gaucaccagcccggc

SEQ ID NO: 2212592 - RNA, 18 nt, Human
gaucaccagcccggccug

SEQ ID NO: 2212593 - RNA, 23 nt, Human
gaucacggcucacugcagccuca

SEQ ID NO: 2212594 - RNA, 20 nt, Human
gaucacggcucacugcagcc

SEQ ID NO: 2212595 - RNA, 13 nt, Human
gaucacuggagcc

SEQ ID NO: 2212596 - RNA, 12 nt, Human
gaucacuggagc

SEQ ID NO: 2212597 - RNA, 14 nt, Human
gaucaccugagguu

SEQ ID NO: 2212598 - RNA, 14 nt, Human
gaucaccugagguc

SEQ ID NO: 2212599 - RNA, 12 nt, Human
gaucacuacugc

SEQ ID NO: 2212600 - RNA, 14 nt, Human
gaucacuacugcag

SEQ ID NO: 2212601 - RNA, 16 nt, Human
gaucagcuguuuguca

SEQ ID NO: 2212602 - RNA, 14 nt, Human
gaucacuggagccc

SEQ ID NO: 2212603 - RNA, 17 nt, Human
gaucacuggagcccagg

SEQ ID NO: 2212604 - RNA, 23 nt, Human
gaucagcuuauugucuagugaaa

SEQ ID NO: 2212605 - RNA, 18 nt, Human
gaucagcuguuugucaua

SEQ ID NO: 2212606 - RNA, 17 nt, Human
gaucagcuguuugucau

SEQ ID NO: 2212607 - RNA, 17 nt, Human
gaaugaaccuucuggcc

SEQ ID NO: 2212608 - RNA, 15 nt, Human
gaaugaaccuucugg

SEQ ID NO: 2212609 - RNA, 14 nt, Human
gaaugaaaccccca

SEQ ID NO: 2212610 - RNA, 23 nt, Human
gaaugaaccacaucuugcucugc

SEQ ID NO: 2212611 - RNA, 22 nt, Human
gaaugaaccacaucuugcucug

SEQ ID NO: 2212612 - RNA, 18 nt, Human
gaaugaaccacaucuugc

SEQ ID NO: 2212613 - RNA, 23 nt, Human
gaaugaaaaauuuaagcauuguu

SEQ ID NO: 2212614 - RNA, 16 nt, Human
gaaugaaaauuguaug

SEQ ID NO: 2212615 - RNA, 22 nt, Human
gaaugaaaaauuuaagcauugu

SEQ ID NO: 2212616 - RNA, 20 nt, Human
gaaugaaaaauuuaagcauu

SEQ ID NO: 2212617 - RNA, 15 nt, Human
gaaugaaaacucauu

SEQ ID NO: 2212618 - RNA, 19 nt, Human
gaaugaaaaauuuaagcau

SEQ ID NO: 2212619 - RNA, 15 nt, Human
gaaugaaaaauuuaa

SEQ ID NO: 2212620 - RNA, 20 nt, Human
gaaucuuuccaauaaaccag

SEQ ID NO: 2212621 - RNA, 23 nt, Human
gaaucuuuuucagaaacagugag

SEQ ID NO: 2212622 - RNA, 15 nt, Human
gaaugaaaaaacagu

SEQ ID NO: 2212623 - RNA, 11 nt, Human
gaaucaauaau

SEQ ID NO: 2212624 - RNA, 22 nt, Human
gaaucuugucucaaugcucaua

SEQ ID NO: 2212625 - RNA, 22 nt, Human
gaaucuuuagagaaguauacau

SEQ ID NO: 2212626 - RNA, 23 nt, Human
gaaucuuuagagaaguauacaua

SEQ ID NO: 2212627 - RNA, 17 nt, Human
gaaucuuuauugagaaa

SEQ ID NO: 2212628 - RNA, 18 nt, Human
gaaucuuuauugagaaag

SEQ ID NO: 2212629 - RNA, 19 nt, Human
gaaucuuuauugagaaaga

SEQ ID NO: 2212630 - RNA, 22 nt, Human
gaaucuuuauugagaaagagca

SEQ ID NO: 2212631 - RNA, 17 nt, Human
gaaugaaggugucagaa

SEQ ID NO: 2212632 - RNA, 20 nt, Human
gaaugaagcuuguguaucca

SEQ ID NO: 2212633 - RNA, 16 nt, Human
gaaugaagcuugugua

SEQ ID NO: 2212634 - RNA, 18 nt, Human
gaaugaagcuuguguauc

SEQ ID NO: 2212635 - RNA, 11 nt, Human
gaaugcagugg

SEQ ID NO: 2212636 - RNA, 14 nt, Human
gaaugcauaaaaug

SEQ ID NO: 2212637 - RNA, 14 nt, Human
gaaugcauuuuguu

SEQ ID NO: 2212638 - RNA, 22 nt, Human
gaaugccacugccuucgcuucu

SEQ ID NO: 2212639 - RNA, 22 nt, Human
gaaugcccacaggcaaaugcau

SEQ ID NO: 2212640 - RNA, 17 nt, Human
gaaugcccacaggcaaa

SEQ ID NO: 2212641 - RNA, 21 nt, Human
gaaugccacugccuucgcuuc

SEQ ID NO: 2212642 - RNA, 14 nt, Human
gaaugcccucaggg

SEQ ID NO: 2212643 - RNA, 17 nt, Human
gaaugcccccagcuggc

SEQ ID NO: 2212644 - RNA, 18 nt, Human
gaaugcccccagcuggcc

SEQ ID NO: 2212645 - RNA, 13 nt, Human
gaaugcuuuagga

SEQ ID NO: 2212646 - RNA, 14 nt, Human
gaaugccguggauu

SEQ ID NO: 2212647 - RNA, 20 nt, Human
gaaugccucaaugugaccag

SEQ ID NO: 2212648 - RNA, 18 nt, Human
gaaugcuuuuugaauguu

SEQ ID NO: 2212649 - RNA, 23 nt, Human
gaauggucagcguugcaugucgu

SEQ ID NO: 2212650 - RNA, 13 nt, Human
gaaugguccaggg

SEQ ID NO: 2212651 - RNA, 15 nt, Human
gaaugggcaguuaca

SEQ ID NO: 2212652 - RNA, 16 nt, Human
gaaugggcaguuacau

SEQ ID NO: 2212653 - RNA, 17 nt, Human
gaaugggcuguuuuugg

SEQ ID NO: 2212654 - RNA, 18 nt, Human
gaauggggaucacagaga

SEQ ID NO: 2212655 - RNA, 13 nt, Human
gaaugguuauaaa

SEQ ID NO: 2212656 - RNA, 16 nt, Human
gaaugguuauaaaagu

SEQ ID NO: 2212657 - RNA, 17 nt, Human
gaaugguuauaaaagug

SEQ ID NO: 2212658 - RNA, 16 nt, Human
gaaugguuccaugccu

SEQ ID NO: 2212659 - RNA, 14 nt, Human
gaaugguccagggu

SEQ ID NO: 2212660 - RNA, 15 nt, Human
gaaugguccaggguu

SEQ ID NO: 2212661 - RNA, 19 nt, Human
gaauggauuggauuauuua

SEQ ID NO: 2212662 - RNA, 20 nt, Human
gaauggauuggauuauuuaa

SEQ ID NO: 2212663 - RNA, 13 nt, Human
gaauggcaauggu

SEQ ID NO: 2212664 - RNA, 23 nt, Human
gaaugggagguugaucagaucug

SEQ ID NO: 2212665 - RNA, 13 nt, Human
gaaugggaaaaga

SEQ ID NO: 2212666 - RNA, 21 nt, Human
gaaugggcaaaacugaauuau

SEQ ID NO: 2212667 - RNA, 21 nt, Human
gaauggaaggguucuggcugc

SEQ ID NO: 2212668 - RNA, 22 nt, Human
gaauggaaggguucuggcugcc

SEQ ID NO: 2212669 - RNA, 22 nt, Human
gaaugguuuucaaaauaaaaau

SEQ ID NO: 2212670 - RNA, 19 nt, Human
gaaugguuccaugccugag

SEQ ID NO: 2212671 - RNA, 20 nt, Human
gaaugguuccaugccugagg

SEQ ID NO: 2212672 - RNA, 22 nt, Human
gaaugguuccaugccugagggu

SEQ ID NO: 2212673 - RNA, 18 nt, Human
gaauguaugcuucauaca

SEQ ID NO: 2212674 - RNA, 16 nt, Human
gaauguaugcuucaua

SEQ ID NO: 2212675 - RNA, 18 nt, Human
gaauguaagaacuacaaa

SEQ ID NO: 2212676 - RNA, 18 nt, Human
gaauguaacugcugaaaa

SEQ ID NO: 2212677 - RNA, 15 nt, Human
gaauguaacugcuga

SEQ ID NO: 2212678 - RNA, 21 nt, Human
gaauguauuauucugcagcau

SEQ ID NO: 2212679 - RNA, 19 nt, Human
gaauguauuauucugcagc

SEQ ID NO: 2212680 - RNA, 18 nt, Human
gaauguauuauucugcag

SEQ ID NO: 2212681 - RNA, 17 nt, Human
gaauguauuauucugca

SEQ ID NO: 2212682 - RNA, 12 nt, Human
gaauguauugua

SEQ ID NO: 2212683 - RNA, 13 nt, Human
gaauguauuguac

SEQ ID NO: 2212684 - RNA, 14 nt, Human
gaauguauuguacc

SEQ ID NO: 2212685 - RNA, 15 nt, Human
gaauguauuguaccu

SEQ ID NO: 2212686 - RNA, 16 nt, Human
gaauguauuauucugc

SEQ ID NO: 2212687 - RNA, 21 nt, Human
gaauguaugcuucauacaggg

SEQ ID NO: 2212688 - RNA, 14 nt, Human
gaaugucaguguga

SEQ ID NO: 2212689 - RNA, 23 nt, Human
gaauguauuuauuugggagaccg

SEQ ID NO: 2212690 - RNA, 16 nt, Human
gaauguauuuauuugg

SEQ ID NO: 2212691 - RNA, 13 nt, Human
gaauguauuuauu

SEQ ID NO: 2212692 - RNA, 21 nt, Human
gaauguauuguaccuuuuaac

SEQ ID NO: 2212693 - RNA, 22 nt, Human
gaauguauuguaccuuuuaaca

SEQ ID NO: 2212694 - RNA, 18 nt, Human
gaauugaggggauuaaua

SEQ ID NO: 2212695 - RNA, 18 nt, Human
gaauugaacccaggaggu

SEQ ID NO: 2212696 - RNA, 18 nt, Human
gaauugacuucgacugug

SEQ ID NO: 2212697 - RNA, 16 nt, Human
gaauugaacccaggag

SEQ ID NO: 2212698 - RNA, 15 nt, Human
gaauugaacccagga

SEQ ID NO: 2212699 - RNA, 20 nt, Human
gaauugaucauuuucccccc

SEQ ID NO: 2212700 - RNA, 15 nt, Human
gaauugaggucugcu

SEQ ID NO: 2212701 - RNA, 22 nt, Human
gaauugaggggauuaauaugaa

SEQ ID NO: 2212702 - RNA, 14 nt, Human
gaauugaagcagga

SEQ ID NO: 2212703 - RNA, 16 nt, Human
gaauucuuuuggggaa

SEQ ID NO: 2212704 - RNA, 14 nt, Human
gaauugaaaaacca

SEQ ID NO: 2212705 - RNA, 19 nt, Human
gaauucugcuaccucacug

SEQ ID NO: 2212706 - RNA, 19 nt, Human
gaauucuugguugaggaaa

SEQ ID NO: 2212707 - RNA, 20 nt, Human
gaauucuugguugaggaaac

SEQ ID NO: 2212708 - RNA, 23 nt, Human
gaauucuugaaggaaaaugauac

SEQ ID NO: 2212709 - RNA, 18 nt, Human
gaauucugcuaccucacu

SEQ ID NO: 2212710 - RNA, 17 nt, Human
gaauucuagugcugcug

SEQ ID NO: 2212711 - RNA, 15 nt, Human
gaauucuauuugcug

SEQ ID NO: 2212712 - RNA, 23 nt, Human
gaauucuaggcaucccaggggac

SEQ ID NO: 2212713 - RNA, 17 nt, Human
gaauuccuucaggguga

SEQ ID NO: 2212714 - RNA, 14 nt, Human
gaauucuagugcug

SEQ ID NO: 2212715 - RNA, 16 nt, Human
gaauucuagugcugcu

SEQ ID NO: 2212716 - RNA, 19 nt, Human
gaauucucuaguuugauua

SEQ ID NO: 2212717 - RNA, 16 nt, Human
gaauucagauuuuaaa

SEQ ID NO: 2212718 - RNA, 23 nt, Human
gaauguauuguaccuuuuaacac

SEQ ID NO: 2212719 - RNA, 23 nt, Human
gaauucaaacuggggccuccaga

SEQ ID NO: 2212720 - RNA, 20 nt, Human
gaaugucagugugacugauc

SEQ ID NO: 2212721 - RNA, 21 nt, Human
gaaugucagugugacugaucu

SEQ ID NO: 2212722 - RNA, 13 nt, Human
gaauuccaaggag

SEQ ID NO: 2212723 - RNA, 12 nt, Human
gaauuccaagga

SEQ ID NO: 2212724 - RNA, 16 nt, Human
gaauuccaaggaguuc

SEQ ID NO: 2212725 - RNA, 17 nt, Human
gaauucggugugcacca

SEQ ID NO: 2212726 - RNA, 16 nt, Human
gaauuccuucagggug

SEQ ID NO: 2212727 - RNA, 17 nt, Human
gaauucucagaaucuca

SEQ ID NO: 2212728 - RNA, 17 nt, Human
gaauucucuaguuugau

SEQ ID NO: 2212729 - RNA, 21 nt, Human
gaauugaucauuuucccccca

SEQ ID NO: 2212730 - RNA, 12 nt, Human
gaauugauuugc

SEQ ID NO: 2212731 - RNA, 17 nt, Human
gaauugauuugcauuga

SEQ ID NO: 2212732 - RNA, 15 nt, Human
gaauugauuugcauu

SEQ ID NO: 2212733 - RNA, 14 nt, Human
gaauugauuugcau

SEQ ID NO: 2212734 - RNA, 13 nt, Human
gaauugauuugca

SEQ ID NO: 2212735 - RNA, 18 nt, Human
gaauugugaccaaguuau

SEQ ID NO: 2212736 - RNA, 23 nt, Human
gaauuguccccaguuugcagaaa

SEQ ID NO: 2212737 - RNA, 14 nt, Human
gaauuguccccagu

SEQ ID NO: 2212738 - RNA, 14 nt, Human
gaauuguaucauuu

SEQ ID NO: 2212739 - RNA, 22 nt, Human
gaauuguaaggaaugauuaauu

SEQ ID NO: 2212740 - RNA, 15 nt, Human
gaauuguguuuauaa

SEQ ID NO: 2212741 - RNA, 23 nt, Human
gaauuguguuuauaauuuuaaau

SEQ ID NO: 2212742 - RNA, 18 nt, Human
gaauuuaaaaauaagaaa

SEQ ID NO: 2212743 - RNA, 16 nt, Human
gaauugugugauguuu

SEQ ID NO: 2212744 - RNA, 16 nt, Human
gaauugugucugcagg

SEQ ID NO: 2212745 - RNA, 16 nt, Human
gaauugugcucaaaau

SEQ ID NO: 2212746 - RNA, 20 nt, Human
gaauuuaucacacuucugug

SEQ ID NO: 2212747 - RNA, 16 nt, Human
gaauuuagguuuuuau

SEQ ID NO: 2212748 - RNA, 22 nt, Human
gaauuuauauacaaccugcuug

SEQ ID NO: 2212749 - RNA, 19 nt, Human
gaauuuagguuuuuauuag

SEQ ID NO: 2212750 - RNA, 13 nt, Human
gaauuuauucaau

SEQ ID NO: 2212751 - RNA, 17 nt, Human
gaauuuauucaauuccu

SEQ ID NO: 2212752 - RNA, 22 nt, Human
gaauuuaucacacuucugugag

SEQ ID NO: 2212753 - RNA, 16 nt, Human
gaauuuaauaaucugu

SEQ ID NO: 2212754 - RNA, 23 nt, Human
gaauuuaaauauaauucuguaaa

SEQ ID NO: 2212755 - RNA, 19 nt, Human
gaauuuagggagaaauguu

SEQ ID NO: 2212756 - RNA, 21 nt, Human
gaauuuagggagaaauguugu

SEQ ID NO: 2212757 - RNA, 13 nt, Human
gaauuuaaauaua

SEQ ID NO: 2212758 - RNA, 14 nt, Human
gaauuuaaauauaa

SEQ ID NO: 2212759 - RNA, 15 nt, Human
gaauuuaaauauaau

SEQ ID NO: 2212760 - RNA, 17 nt, Human
gaauuuaaauauaauuc

SEQ ID NO: 2212761 - RNA, 20 nt, Human
gaauuuaaauauaauucugu

SEQ ID NO: 2212762 - RNA, 22 nt, Human
gaauuuaaauauaauucuguaa

SEQ ID NO: 2212763 - RNA, 23 nt, Human
gaauuuauucaauuccucuggga

SEQ ID NO: 2212764 - RNA, 17 nt, Human
gaauuuauuauuguucu

SEQ ID NO: 2212765 - RNA, 15 nt, Human
gaauuucccaaagca

SEQ ID NO: 2212766 - RNA, 15 nt, Human
gaauaccuguccccc

SEQ ID NO: 2212767 - RNA, 20 nt, Human
gaauacaguguuauuuucuu

SEQ ID NO: 2212768 - RNA, 13 nt, Human
gaauaccuguccc

SEQ ID NO: 2212769 - RNA, 23 nt, Human
gaauagcugggacuacaggugug

SEQ ID NO: 2212770 - RNA, 16 nt, Human
gaauaggcgaucacaa

SEQ ID NO: 2212771 - RNA, 22 nt, Human
gaauagcugggacuacaggugu

SEQ ID NO: 2212772 - RNA, 22 nt, Human
gaauauuuguuauguagauaac

SEQ ID NO: 2212773 - RNA, 18 nt, Human
gaauauuuuaaguauugc

SEQ ID NO: 2212774 - RNA, 16 nt, Human
gaauauuuuaacuucc

SEQ ID NO: 2212775 - RNA, 17 nt, Human
gaauauuugaauguaug

SEQ ID NO: 2212776 - RNA, 18 nt, Human
gaauauuugaaucuuguc

SEQ ID NO: 2212777 - RNA, 22 nt, Human
gaauauuugaaucuugucucaa

SEQ ID NO: 2212778 - RNA, 22 nt, Human
gaauaggcgaucacaacgugca

SEQ ID NO: 2212779 - RNA, 23 nt, Human
gaauaggcgaucacaacgugcau

SEQ ID NO: 2212780 - RNA, 14 nt, Human
gaauauuugaaucu

SEQ ID NO: 2212781 - RNA, 16 nt, Human
gaauauuugaaucuug

SEQ ID NO: 2212782 - RNA, 14 nt, Human
gaaucaaaacucuc

SEQ ID NO: 2212783 - RNA, 13 nt, Human
gaaucaaaacucu

SEQ ID NO: 2212784 - RNA, 15 nt, Human
gaaucaaaacucucc

SEQ ID NO: 2212785 - RNA, 16 nt, Human
gaaucaaagacaugga

SEQ ID NO: 2212786 - RNA, 17 nt, Human
gaaucaaagacauggaa

SEQ ID NO: 2212787 - RNA, 17 nt, Human
gaaucaaagcaaugcau

SEQ ID NO: 2212788 - RNA, 18 nt, Human
gaaucaaagcaaugcauu

SEQ ID NO: 2212789 - RNA, 19 nt, Human
gaaucaaagcaaugcauuu

SEQ ID NO: 2212790 - RNA, 21 nt, Human
gaaucaagaugucagacuggc

SEQ ID NO: 2212791 - RNA, 20 nt, Human
gaaucaagcuagaaggccac

SEQ ID NO: 2212792 - RNA, 22 nt, Human
gaaucaagcuagaaggccacau

SEQ ID NO: 2212793 - RNA, 20 nt, Human
gaaucaagaugucagacugg

SEQ ID NO: 2212794 - RNA, 18 nt, Human
gaaucaagagcugcccuc

SEQ ID NO: 2212795 - RNA, 19 nt, Human
gaaucaagagcugcccucc

SEQ ID NO: 2212796 - RNA, 22 nt, Human
gaaucaaagcaguuaacuuuaa

SEQ ID NO: 2212797 - RNA, 17 nt, Human
gaaucaacauuucucaa

SEQ ID NO: 2212798 - RNA, 14 nt, Human
gaaucaagagcugc

SEQ ID NO: 2212799 - RNA, 15 nt, Human
gaaucaagagcugcc

SEQ ID NO: 2212800 - RNA, 16 nt, Human
gaaucaagagcugccc

SEQ ID NO: 2212801 - RNA, 17 nt, Human
gaaucaagagcugcccu

SEQ ID NO: 2212802 - RNA, 22 nt, Human
gaauaauaauuauccagaguuu

SEQ ID NO: 2212803 - RNA, 12 nt, Human
gaauaauagaag

SEQ ID NO: 2212804 - RNA, 16 nt, Human
gaauaauacauugaau

SEQ ID NO: 2212805 - RNA, 19 nt, Human
gaauaauaugcugccaaau

SEQ ID NO: 2212806 - RNA, 15 nt, Human
gaauaauagaagaac

SEQ ID NO: 2212807 - RNA, 17 nt, Human
gaauaauacaguaucuc

SEQ ID NO: 2212808 - RNA, 23 nt, Human
gaauaaccacuuaaaaaaugucc

SEQ ID NO: 2212809 - RNA, 15 nt, Human
gaauaacuagcacca

SEQ ID NO: 2212810 - RNA, 22 nt, Human
gaauaaccacuuaaaaaauguc

SEQ ID NO: 2212811 - RNA, 21 nt, Human
gaauaaaauacuauuuuuacu

SEQ ID NO: 2212812 - RNA, 21 nt, Human
gaauaacucuguggcauuauu

SEQ ID NO: 2212813 - RNA, 17 nt, Human
gaauaagaaaguuucac

SEQ ID NO: 2212814 - RNA, 23 nt, Human
gaauaauuucccaauuaggaagu

SEQ ID NO: 2212815 - RNA, 21 nt, Human
gaauaauuucccaauuaggaa

SEQ ID NO: 2212816 - RNA, 14 nt, Human
gaauaauuucuuac

SEQ ID NO: 2212817 - RNA, 17 nt, Human
gaauacaaacaccugga

SEQ ID NO: 2212818 - RNA, 14 nt, Human
gaauaauuucccaa

SEQ ID NO: 2212819 - RNA, 21 nt, Human
gaauaaucacgcuuuccugaa

SEQ ID NO: 2212820 - RNA, 20 nt, Human
gaauaaucacgcuuuccuga

SEQ ID NO: 2212821 - RNA, 19 nt, Human
gaauaaucacgcuuuccug

SEQ ID NO: 2212822 - RNA, 18 nt, Human
gaauaaucacgcuuuccu

SEQ ID NO: 2212823 - RNA, 13 nt, Human
gaauacaguguua

SEQ ID NO: 2212824 - RNA, 21 nt, Human
gaauacaguaagcugcucuau

SEQ ID NO: 2212825 - RNA, 23 nt, Human
gaauacagggcaugcauuuugca

SEQ ID NO: 2212826 - RNA, 14 nt, Human
gaauacagaaagau

SEQ ID NO: 2212827 - RNA, 16 nt, Human
gaauacaaacauauuu

SEQ ID NO: 2212828 - RNA, 21 nt, Human
gaauacagaggcaacugcauu

SEQ ID NO: 2212829 - RNA, 17 nt, Human
gaaguuuugcauuuaug

SEQ ID NO: 2212830 - RNA, 15 nt, Human
gaaguuuuguacaga

SEQ ID NO: 2212831 - RNA, 14 nt, Human
gaaguuuuuguacu

SEQ ID NO: 2212832 - RNA, 18 nt, Human
gaaguuuuuguacuguaa

SEQ ID NO: 2212833 - RNA, 12 nt, Human
gaaguuuugcau

SEQ ID NO: 2212834 - RNA, 13 nt, Human
gaaguuuucagga

SEQ ID NO: 2212835 - RNA, 23 nt, Human
gaaguuuucaggacuuggucuga

SEQ ID NO: 2212836 - RNA, 16 nt, Human
gaauaaaaacuuugcu

SEQ ID NO: 2212837 - RNA, 19 nt, Human
gaaguuuuuguacuguaaa

SEQ ID NO: 2212838 - RNA, 23 nt, Human
gaauaaaauacuauuuuuacugc

SEQ ID NO: 2212839 - RNA, 19 nt, Human
gaauaacauguaauuaagu

SEQ ID NO: 2212840 - RNA, 18 nt, Human
gaauaacauguaauuaag

SEQ ID NO: 2212841 - RNA, 19 nt, Human
gaaguuugauauuaaagga

SEQ ID NO: 2212842 - RNA, 13 nt, Human
gaaguuuuacauu

SEQ ID NO: 2212843 - RNA, 11 nt, Human
gaaguuuucaa

SEQ ID NO: 2212844 - RNA, 23 nt, Human
gaaguuuucaaugaugggcgagc

SEQ ID NO: 2212845 - RNA, 19 nt, Human
gaaguuugaauguuaaaua

SEQ ID NO: 2212846 - RNA, 20 nt, Human
gaaguuugaauguuaaauaa

SEQ ID NO: 2212847 - RNA, 20 nt, Human
gaaguuugagaucagccugg

SEQ ID NO: 2212848 - RNA, 13 nt, Human
gaaguuugaaugu

SEQ ID NO: 2212849 - RNA, 14 nt, Human
gaaguuugaauguu

SEQ ID NO: 2212850 - RNA, 16 nt, Human
gaaguuugaauguuaa

SEQ ID NO: 2212851 - RNA, 17 nt, Human
gaaguuugaauguuaaa

SEQ ID NO: 2212852 - RNA, 15 nt, Human
gaaguauuauaaauu

SEQ ID NO: 2212853 - RNA, 19 nt, Human
gaaguaguuuguauaacuu

SEQ ID NO: 2212854 - RNA, 14 nt, Human
gaaguauaccugau

SEQ ID NO: 2212855 - RNA, 16 nt, Human
gaaguauccuucagcc

SEQ ID NO: 2212856 - RNA, 15 nt, Human
gaagucaugaagccc

SEQ ID NO: 2212857 - RNA, 19 nt, Human
gaagucaugaagcccaagu

SEQ ID NO: 2212858 - RNA, 18 nt, Human
gaagucauaccaaugaaa

SEQ ID NO: 2212859 - RNA, 16 nt, Human
gaaguauuauaaauua

SEQ ID NO: 2212860 - RNA, 19 nt, Human
gaaguauuauaaauuaugu

SEQ ID NO: 2212861 - RNA, 20 nt, Human
gaaguauuauaaauuauguu

SEQ ID NO: 2212862 - RNA, 23 nt, Human
gaaguauuauaaauuauguuuau

SEQ ID NO: 2212863 - RNA, 23 nt, Human
gaaguaggaagugaaaauaggua

SEQ ID NO: 2212864 - RNA, 13 nt, Human
gaaguaggaagua

SEQ ID NO: 2212865 - RNA, 14 nt, Human
gaaguauccuucag

SEQ ID NO: 2212866 - RNA, 16 nt, Human
gaagucuaggagcugg

SEQ ID NO: 2212867 - RNA, 15 nt, Human
gaagucuaggagcug

SEQ ID NO: 2212868 - RNA, 22 nt, Human
gaagucuaggagcugggaggaa

SEQ ID NO: 2212869 - RNA, 20 nt, Human
gaagucuaggagcugggagg

SEQ ID NO: 2212870 - RNA, 18 nt, Human
gaagucucuagguucuga

SEQ ID NO: 2212871 - RNA, 16 nt, Human
gaagucucugaaguga

SEQ ID NO: 2212872 - RNA, 21 nt, Human
gaagucucugaagugaaacug

SEQ ID NO: 2212873 - RNA, 15 nt, Human
gaagucucuuuucuu

SEQ ID NO: 2212874 - RNA, 12 nt, Human
gaaguccaagca

SEQ ID NO: 2212875 - RNA, 22 nt, Human
gaaguccaagcauuuagaugua

SEQ ID NO: 2212876 - RNA, 15 nt, Human
gaagucuuagaugua

SEQ ID NO: 2212877 - RNA, 20 nt, Human
gaaguuucugccgcagcccu

SEQ ID NO: 2212878 - RNA, 21 nt, Human
gaaguuucugccgcagcccug

SEQ ID NO: 2212879 - RNA, 11 nt, Human
gaagucugaaa

SEQ ID NO: 2212880 - RNA, 12 nt, Human
gaaguuugaaug

SEQ ID NO: 2212881 - RNA, 15 nt, Human
gaagcgugagacgcc

SEQ ID NO: 2212882 - RNA, 21 nt, Human
gaagcccuggauuucagaaag

SEQ ID NO: 2212883 - RNA, 18 nt, Human
gaagcggucguguuguga

SEQ ID NO: 2212884 - RNA, 14 nt, Human
gaagcggcuggcag

SEQ ID NO: 2212885 - RNA, 15 nt, Human
gaagggggcugggac

SEQ ID NO: 2212886 - RNA, 17 nt, Human
gaaggggguccacccag

SEQ ID NO: 2212887 - RNA, 18 nt, Human
gaaggggguccacccagc

SEQ ID NO: 2212888 - RNA, 12 nt, Human
gaaggggguggu

SEQ ID NO: 2212889 - RNA, 19 nt, Human
gaaggggguggugucucca

SEQ ID NO: 2212890 - RNA, 22 nt, Human
gaaggugccccaaaaugcaaga

SEQ ID NO: 2212891 - RNA, 22 nt, Human
gaagggguaggauuacuaggug

SEQ ID NO: 2212892 - RNA, 16 nt, Human
gaagggggcugggaca

SEQ ID NO: 2212893 - RNA, 19 nt, Human
gaagggggcugggacaugg

SEQ ID NO: 2212894 - RNA, 20 nt, Human
gaagguuaggauuuaacagu

SEQ ID NO: 2212895 - RNA, 18 nt, Human
gaagguggccucugugga

SEQ ID NO: 2212896 - RNA, 22 nt, Human
gaagguggauggccccagcaca

SEQ ID NO: 2212897 - RNA, 22 nt, Human
gaaguaauaugcacacauuuuu

SEQ ID NO: 2212898 - RNA, 21 nt, Human
gaaggugcugacggccaggga

SEQ ID NO: 2212899 - RNA, 12 nt, Human
gaaggugcugga

SEQ ID NO: 2212900 - RNA, 14 nt, Human
gaaggugcuggagg

SEQ ID NO: 2212901 - RNA, 19 nt, Human
gaaggugcugacggccagg

SEQ ID NO: 2212902 - RNA, 18 nt, Human
gaaggugcugacggccag

SEQ ID NO: 2212903 - RNA, 16 nt, Human
gaaggugcuggaggug

SEQ ID NO: 2212904 - RNA, 17 nt, Human
gaaggugcuggaggugg

SEQ ID NO: 2212905 - RNA, 18 nt, Human
gaaggugcuggagguggg

SEQ ID NO: 2212906 - RNA, 19 nt, Human
gaaggugcuggagguggga

SEQ ID NO: 2212907 - RNA, 20 nt, Human
gaaggugcuggaggugggag

SEQ ID NO: 2212908 - RNA, 21 nt, Human
gaaggugcuggaggugggagc

SEQ ID NO: 2212909 - RNA, 23 nt, Human
gaaggugcuggaggugggagcag

SEQ ID NO: 2212910 - RNA, 15 nt, Human
gaaguaaugaauuuu

SEQ ID NO: 2212911 - RNA, 13 nt, Human
gaaguaaugaauu

SEQ ID NO: 2212912 - RNA, 23 nt, Human
gaagguggugggggugcagauga

SEQ ID NO: 2212913 - RNA, 18 nt, Human
gaaguacuauaauuuacc

SEQ ID NO: 2212914 - RNA, 13 nt, Human
gaaguagaaaggg

SEQ ID NO: 2212915 - RNA, 21 nt, Human
gaaguacguuauuguugacuu

SEQ ID NO: 2212916 - RNA, 21 nt, Human
gaaguacccguucacauuuuu

SEQ ID NO: 2212917 - RNA, 15 nt, Human
gaaguacuggagaaa

SEQ ID NO: 2212918 - RNA, 23 nt, Human
gaagagcaggcacauggaggagc

SEQ ID NO: 2212919 - RNA, 18 nt, Human
gaagagcaggcacaugga

SEQ ID NO: 2212920 - RNA, 15 nt, Human
gaagagcaggcacau

SEQ ID NO: 2212921 - RNA, 15 nt, Human
gaagagcacagcccu

SEQ ID NO: 2212922 - RNA, 20 nt, Human
gaagagcacagcccucccgc

SEQ ID NO: 2212923 - RNA, 15 nt, Human
gaagaggcgggccag

SEQ ID NO: 2212924 - RNA, 16 nt, Human
gaagaggcgggccagc

SEQ ID NO: 2212925 - RNA, 17 nt, Human
gaagaggcgggccagcc

SEQ ID NO: 2212926 - RNA, 18 nt, Human
gaagaggcgggccagcca

SEQ ID NO: 2212927 - RNA, 19 nt, Human
gaagaggcgggccagccag

SEQ ID NO: 2212928 - RNA, 16 nt, Human
gaagaggcuggugcug

SEQ ID NO: 2212929 - RNA, 15 nt, Human
gaagaggcugguucu

SEQ ID NO: 2212930 - RNA, 21 nt, Human
gaagagaguccauauuucaau

SEQ ID NO: 2212931 - RNA, 20 nt, Human
gaagagaggaguucaaugau

SEQ ID NO: 2212932 - RNA, 21 nt, Human
gaagagaggaguucaaugauc

SEQ ID NO: 2212933 - RNA, 16 nt, Human
gaagagaggaguucaa

SEQ ID NO: 2212934 - RNA, 17 nt, Human
gaagagaggaguucaau

SEQ ID NO: 2212935 - RNA, 18 nt, Human
gaagagaggaguucaaug

SEQ ID NO: 2212936 - RNA, 19 nt, Human
gaagagaggaguucaauga

SEQ ID NO: 2212937 - RNA, 13 nt, Human
gaagagaggagag

SEQ ID NO: 2212938 - RNA, 14 nt, Human
gaagagaggagagg

SEQ ID NO: 2212939 - RNA, 19 nt, Human
gaagagaggagaggagaga

SEQ ID NO: 2212940 - RNA, 21 nt, Human
gaagagaggagaggagagagg

SEQ ID NO: 2212941 - RNA, 12 nt, Human
gaagagaggagu

SEQ ID NO: 2212942 - RNA, 13 nt, Human
gaagagaggaguu

SEQ ID NO: 2212943 - RNA, 15 nt, Human
gaagagaggaguuca

SEQ ID NO: 2212944 - RNA, 18 nt, Human
gaagagaugggcuuguuu

SEQ ID NO: 2212945 - RNA, 22 nt, Human
gaagagaggaguucaaugaucu

SEQ ID NO: 2212946 - RNA, 18 nt, Human
gaagagauuuuucaugau

SEQ ID NO: 2212947 - RNA, 15 nt, Human
gaagagauuuuucau

SEQ ID NO: 2212948 - RNA, 13 nt, Human
gaagagcacagcc

SEQ ID NO: 2212949 - RNA, 14 nt, Human
gaagagcacagccc

SEQ ID NO: 2212950 - RNA, 16 nt, Human
gaagagagaucaaaug

SEQ ID NO: 2212951 - RNA, 19 nt, Human
gaagagagaucaaauggaa

SEQ ID NO: 2212952 - RNA, 16 nt, Human
gaagagagcaugagag

SEQ ID NO: 2212953 - RNA, 16 nt, Human
gaagagacugggaaga

SEQ ID NO: 2212954 - RNA, 17 nt, Human
gaagagaagggcagggc

SEQ ID NO: 2212955 - RNA, 18 nt, Human
gaagagacaggagggcaa

SEQ ID NO: 2212956 - RNA, 19 nt, Human
gaagagaaugcacaaacag

SEQ ID NO: 2212957 - RNA, 13 nt, Human
gaagacuguggcu

SEQ ID NO: 2212958 - RNA, 12 nt, Human
gaagagaaacca

SEQ ID NO: 2212959 - RNA, 20 nt, Human
gaagacuuuucuuucagcca

SEQ ID NO: 2212960 - RNA, 14 nt, Human
gaagacuuuggaaa

SEQ ID NO: 2212961 - RNA, 17 nt, Human
gaagacuuuggaaagag

SEQ ID NO: 2212962 - RNA, 13 nt, Human
gaagaaaaaauac

SEQ ID NO: 2212963 - RNA, 18 nt, Human
gaagaaaaaauacauuuu

SEQ ID NO: 2212964 - RNA, 22 nt, Human
gaagaaccaguccccccacccu

SEQ ID NO: 2212965 - RNA, 19 nt, Human
gaagaaccaguccccccac

SEQ ID NO: 2212966 - RNA, 14 nt, Human
gaacuuuuuguagg

SEQ ID NO: 2212967 - RNA, 18 nt, Human
gaacucaucccuaaugcu

SEQ ID NO: 2212968 - RNA, 22 nt, Human
gaacucaucccuaaugcugcag

SEQ ID NO: 2212969 - RNA, 19 nt, Human
gaacuuugcugagccugua

SEQ ID NO: 2212970 - RNA, 20 nt, Human
gaacucaucuagguaaauua

SEQ ID NO: 2212971 - RNA, 18 nt, Human
gaacucagccaagcacag

SEQ ID NO: 2212972 - RNA, 19 nt, Human
gaacucagccaagcacagu

SEQ ID NO: 2212973 - RNA, 20 nt, Human
gaacucagccaagcacagug

SEQ ID NO: 2212974 - RNA, 24 nt, Human
gaacucagccaagcacaguggugg

SEQ ID NO: 2212975 - RNA, 21 nt, Human
gaacucaucuagguaaauuac

SEQ ID NO: 2212976 - RNA, 23 nt, Human
gaacuuugaccucugcagcaaua

SEQ ID NO: 2212977 - RNA, 12 nt, Human
gaagacuguggc

SEQ ID NO: 2212978 - RNA, 11 nt, Human
gaagacugugg

SEQ ID NO: 2212979 - RNA, 20 nt, Human
gaagacugucagcuuccaaa

SEQ ID NO: 2212980 - RNA, 17 nt, Human
gaagacuggaagcuaau

SEQ ID NO: 2212981 - RNA, 16 nt, Human
gaagacuggaagcuaa

SEQ ID NO: 2212982 - RNA, 15 nt, Human
gaagacuggaagcua

SEQ ID NO: 2212983 - RNA, 19 nt, Human
gaagaacugcaggcccugg

SEQ ID NO: 2212984 - RNA, 11 nt, Human
gaagacuuugg

SEQ ID NO: 2212985 - RNA, 13 nt, Human
gaagacuuuggaa

SEQ ID NO: 2212986 - RNA, 13 nt, Human
gaagaacugcagg

SEQ ID NO: 2212987 - RNA, 14 nt, Human
gaagaacugcaggc

SEQ ID NO: 2212988 - RNA, 15 nt, Human
gaagaacugcaggcc

SEQ ID NO: 2212989 - RNA, 19 nt, Human
gaagacugcauuauauuua

SEQ ID NO: 2212990 - RNA, 13 nt, Human
gaagaacggggcu

SEQ ID NO: 2212991 - RNA, 20 nt, Human
gaagaacggggcucuucuca

SEQ ID NO: 2212992 - RNA, 22 nt, Human
gaagaacggggcucuucucauu

SEQ ID NO: 2212993 - RNA, 23 nt, Human
gaagaacggggcucuucucauuu

SEQ ID NO: 2212994 - RNA, 12 nt, Human
gaagaacugaaa

SEQ ID NO: 2212995 - RNA, 23 nt, Human
gaagcccaggccccuuuucacuc

SEQ ID NO: 2212996 - RNA, 21 nt, Human
gaagcccccagcuaagaaccu

SEQ ID NO: 2212997 - RNA, 17 nt, Human
gaagcccccagcuaaga

SEQ ID NO: 2212998 - RNA, 14 nt, Human
gaagcccccagcua

SEQ ID NO: 2212999 - RNA, 20 nt, Human
gaagcccccaccgugggcag

SEQ ID NO: 2213000 - RNA, 22 nt, Human
gaagcccccagcuaagaaccug

SEQ ID NO: 2213001 - RNA, 14 nt, Human
gaagccccuucccc

SEQ ID NO: 2213002 - RNA, 17 nt, Human
gaagccccuuccccaug

SEQ ID NO: 2213003 - RNA, 19 nt, Human
gaagccccuuccccauggg

SEQ ID NO: 2213004 - RNA, 19 nt, Human
gaagcccuccuuccacgga

SEQ ID NO: 2213005 - RNA, 16 nt, Human
gaagcccuccuuccac

SEQ ID NO: 2213006 - RNA, 15 nt, Human
gaagcccuccuucca

SEQ ID NO: 2213007 - RNA, 14 nt, Human
gaagcccuccuucc

SEQ ID NO: 2213008 - RNA, 12 nt, Human
gaagcccuccuu

SEQ ID NO: 2213009 - RNA, 11 nt, Human
gaagcccuccu

SEQ ID NO: 2213010 - RNA, 17 nt, Human
gaagcccuccaaaagca

SEQ ID NO: 2213011 - RNA, 22 nt, Human
gaagcccuggauuucagaaaga

SEQ ID NO: 2213012 - RNA, 19 nt, Human
gaagcccuggauuucagaa

SEQ ID NO: 2213013 - RNA, 18 nt, Human
gaagcccuggauuucaga

SEQ ID NO: 2213014 - RNA, 11 nt, Human
gaagcccugga

SEQ ID NO: 2213015 - RNA, 23 nt, Human
gaagcccuucuaccuuccugcaa

SEQ ID NO: 2213016 - RNA, 20 nt, Human
gaagccagcaggcucucagg

SEQ ID NO: 2213017 - RNA, 19 nt, Human
gaagccagcaggcucucag

SEQ ID NO: 2213018 - RNA, 17 nt, Human
gaagccacaggccugag

SEQ ID NO: 2213019 - RNA, 18 nt, Human
gaagccacaggccugaga

SEQ ID NO: 2213020 - RNA, 21 nt, Human
gaagccagcaggcucucaggc

SEQ ID NO: 2213021 - RNA, 22 nt, Human
gaagccagcaggcucucaggcc

SEQ ID NO: 2213022 - RNA, 13 nt, Human
gaagcccaggaaa

SEQ ID NO: 2213023 - RNA, 15 nt, Human
gaagcccaggaaagg

SEQ ID NO: 2213024 - RNA, 16 nt, Human
gaagcccaggaaaggc

SEQ ID NO: 2213025 - RNA, 19 nt, Human
gaagcccaggaaaggcucc

SEQ ID NO: 2213026 - RNA, 17 nt, Human
gaagcauuuacuuugug

SEQ ID NO: 2213027 - RNA, 22 nt, Human
gaagcauuccuucuuugauaau

SEQ ID NO: 2213028 - RNA, 15 nt, Human
gaagcauuccuucuu

SEQ ID NO: 2213029 - RNA, 18 nt, Human
gaagcauuccuucuuuga

SEQ ID NO: 2213030 - RNA, 21 nt, Human
gaagcauuaacuucucuggaa

SEQ ID NO: 2213031 - RNA, 15 nt, Human
gaagcauucagagag

SEQ ID NO: 2213032 - RNA, 16 nt, Human
gaagcauucagagagc

SEQ ID NO: 2213033 - RNA, 17 nt, Human
gaagcauucagagagca

SEQ ID NO: 2213034 - RNA, 13 nt, Human
gaagauguuuaac

SEQ ID NO: 2213035 - RNA, 21 nt, Human
gaagauguuuaacuuaaucaa

SEQ ID NO: 2213036 - RNA, 22 nt, Human
gaagauguuuaacuuaaucaau

SEQ ID NO: 2213037 - RNA, 15 nt, Human
gaagauguuucaaaa

SEQ ID NO: 2213038 - RNA, 17 nt, Human
gaagcauuaacuucucu

SEQ ID NO: 2213039 - RNA, 18 nt, Human
gaagcauuaacuucucug

SEQ ID NO: 2213040 - RNA, 20 nt, Human
gaagcauuaacuucucugga

SEQ ID NO: 2213041 - RNA, 20 nt, Human
gaagccaauucagacaggca

SEQ ID NO: 2213042 - RNA, 15 nt, Human
gaagccacaggccug

SEQ ID NO: 2213043 - RNA, 16 nt, Human
gaagccacaggccuga

SEQ ID NO: 2213044 - RNA, 18 nt, Human
gaagccaauucagacagg

SEQ ID NO: 2213045 - RNA, 22 nt, Human
gaagccaaguggggugcuggga

SEQ ID NO: 2213046 - RNA, 23 nt, Human
gaagccaaguggggugcugggag

SEQ ID NO: 2213047 - RNA, 21 nt, Human
gaagccaagggaaaggggugc

SEQ ID NO: 2213048 - RNA, 13 nt, Human
gaagccaaguggg

SEQ ID NO: 2213049 - RNA, 19 nt, Human
gaagccaaguggggugcug

SEQ ID NO: 2213050 - RNA, 21 nt, Human
gaagccaaguggggugcuggg

SEQ ID NO: 2213051 - RNA, 14 nt, Human
gaagccaagggaaa

SEQ ID NO: 2213052 - RNA, 15 nt, Human
gaagccaagggaaag

SEQ ID NO: 2213053 - RNA, 16 nt, Human
gaagccaagggaaagg

SEQ ID NO: 2213054 - RNA, 17 nt, Human
gaagccaagggaaaggg

SEQ ID NO: 2213055 - RNA, 19 nt, Human
gaagccaagggaaaggggu

SEQ ID NO: 2213056 - RNA, 20 nt, Human
gaagccaagggaaaggggug

SEQ ID NO: 2213057 - RNA, 20 nt, Human
gaagagggagaagcaugaaa

SEQ ID NO: 2213058 - RNA, 11 nt, Human
gaagaggcuuc

SEQ ID NO: 2213059 - RNA, 19 nt, Human
gaagagggauaagguaccu

SEQ ID NO: 2213060 - RNA, 13 nt, Human
gaagagggccugu

SEQ ID NO: 2213061 - RNA, 12 nt, Human
gaagagggcugc

SEQ ID NO: 2213062 - RNA, 20 nt, Human
gaagagggccugugggagcc

SEQ ID NO: 2213063 - RNA, 14 nt, Human
gaagaggggacagg

SEQ ID NO: 2213064 - RNA, 19 nt, Human
gaagaggggacaggucccu

SEQ ID NO: 2213065 - RNA, 11 nt, Human
gaagaggggca

SEQ ID NO: 2213066 - RNA, 13 nt, Human
gaagaggggcagc

SEQ ID NO: 2213067 - RNA, 14 nt, Human
gaagaggggcagcc

SEQ ID NO: 2213068 - RNA, 15 nt, Human
gaagaggggcagccc

SEQ ID NO: 2213069 - RNA, 17 nt, Human
gaagaggggcagcccuu

SEQ ID NO: 2213070 - RNA, 20 nt, Human
gaagauaauauuaaggaaga

SEQ ID NO: 2213071 - RNA, 21 nt, Human
gaagauaaguguauuuuucaa

SEQ ID NO: 2213072 - RNA, 18 nt, Human
gaagaggggcagcccuug

SEQ ID NO: 2213073 - RNA, 13 nt, Human
gaagauaggcucu

SEQ ID NO: 2213074 - RNA, 17 nt, Human
gaagauaggcucugcac

SEQ ID NO: 2213075 - RNA, 16 nt, Human
gaagauaggcucugca

SEQ ID NO: 2213076 - RNA, 15 nt, Human
gaagauaggcucugc

SEQ ID NO: 2213077 - RNA, 18 nt, Human
gaagauguagaggagaaa

SEQ ID NO: 2213078 - RNA, 14 nt, Human
gaacaguguuuccc

SEQ ID NO: 2213079 - RNA, 15 nt, Human
gaacauaaaauacaa

SEQ ID NO: 2213080 - RNA, 18 nt, Human
gaacagugcuugccacag

SEQ ID NO: 2213081 - RNA, 23 nt, Human
gaacagccaaaugcauggugcag

SEQ ID NO: 2213082 - RNA, 18 nt, Human
gaacagugaggugcccag

SEQ ID NO: 2213083 - RNA, 18 nt, Human
gaacauacuggcugguga

SEQ ID NO: 2213084 - RNA, 18 nt, Human
gaacauauuguugaaagg

SEQ ID NO: 2213085 - RNA, 12 nt, Human
gaacauauuguu

SEQ ID NO: 2213086 - RNA, 13 nt, Human
gaacauacuucag

SEQ ID NO: 2213087 - RNA, 20 nt, Human
gaacaucaucaaggcacugc

SEQ ID NO: 2213088 - RNA, 23 nt, Human
gaacaucaccgacgcgucuccug

SEQ ID NO: 2213089 - RNA, 12 nt, Human
gaacauccaagg

SEQ ID NO: 2213090 - RNA, 15 nt, Human
gaacaucauuagaac

SEQ ID NO: 2213091 - RNA, 18 nt, Human
gaacauccaaccuuccca

SEQ ID NO: 2213092 - RNA, 17 nt, Human
gaacauccaaccuuccc

SEQ ID NO: 2213093 - RNA, 21 nt, Human
gaacaucaucaaggcacugcc

SEQ ID NO: 2213094 - RNA, 22 nt, Human
gaacaucaucaaggcacugccu

SEQ ID NO: 2213095 - RNA, 23 nt, Human
gaacagcuaugggagccccaggg

SEQ ID NO: 2213096 - RNA, 22 nt, Human
gaacagcuaugggagccccagg

SEQ ID NO: 2213097 - RNA, 21 nt, Human
gaacagcuaugggagccccag

SEQ ID NO: 2213098 - RNA, 18 nt, Human
gaacagccgcuccugucu

SEQ ID NO: 2213099 - RNA, 21 nt, Human
gaacagcggcuggacuuggag

SEQ ID NO: 2213100 - RNA, 22 nt, Human
gaacagccaaaugcauggugca

SEQ ID NO: 2213101 - RNA, 17 nt, Human
gaacagauucacacugu

SEQ ID NO: 2213102 - RNA, 21 nt, Human
gaacagauucacacugucugg

SEQ ID NO: 2213103 - RNA, 20 nt, Human
gaacagugauuaccagggac

SEQ ID NO: 2213104 - RNA, 16 nt, Human
gaacagugauuaccag

SEQ ID NO: 2213105 - RNA, 23 nt, Human
gaacacugcacucuuaagcuucc

SEQ ID NO: 2213106 - RNA, 21 nt, Human
gaacagauguuucuuuuguau

SEQ ID NO: 2213107 - RNA, 15 nt, Human
gaacacucugagacu

SEQ ID NO: 2213108 - RNA, 18 nt, Human
gaacacucuuuugcuuua

SEQ ID NO: 2213109 - RNA, 16 nt, Human
gaacacucuuuugcuu

SEQ ID NO: 2213110 - RNA, 23 nt, Human
gaaauuucagauucccagagcaa

SEQ ID NO: 2213111 - RNA, 21 nt, Human
gaaauuucagauucccagagc

SEQ ID NO: 2213112 - RNA, 17 nt, Human
gaaaauaaaaaguuaaa

SEQ ID NO: 2213113 - RNA, 19 nt, Human
gaaaauacaacuuaaauaa

SEQ ID NO: 2213114 - RNA, 23 nt, Human
gaaaauaaaucaaugcuauaacu

SEQ ID NO: 2213115 - RNA, 19 nt, Human
gaaaauagcucuuucaggg

SEQ ID NO: 2213116 - RNA, 20 nt, Human
gaaaauaguaaaugcuuugu

SEQ ID NO: 2213117 - RNA, 16 nt, Human
gaaaauauaaccagcc

SEQ ID NO: 2213118 - RNA, 12 nt, Human
gaaaauauacug

SEQ ID NO: 2213119 - RNA, 16 nt, Human
gaaaauauacuguaaa

SEQ ID NO: 2213120 - RNA, 15 nt, Human
gaaaauauacuguaa

SEQ ID NO: 2213121 - RNA, 14 nt, Human
gaaaauauacugua

SEQ ID NO: 2213122 - RNA, 13 nt, Human
gaaaauauacugu

SEQ ID NO: 2213123 - RNA, 16 nt, Human
gaaauuguauuacaaa

SEQ ID NO: 2213124 - RNA, 18 nt, Human
gaaauuguauuacaaauc

SEQ ID NO: 2213125 - RNA, 18 nt, Human
gaaauuguacauauuugu

SEQ ID NO: 2213126 - RNA, 17 nt, Human
gaaaauauacuguaaag

SEQ ID NO: 2213127 - RNA, 16 nt, Human
gaaauuuauaaacuuu

SEQ ID NO: 2213128 - RNA, 17 nt, Human
gaaauuuauaaacuuuu

SEQ ID NO: 2213129 - RNA, 11 nt, Human
gaaauuucaga

SEQ ID NO: 2213130 - RNA, 23 nt, Human
gaaauuuauuuccuaguucugua

SEQ ID NO: 2213131 - RNA, 22 nt, Human
gaaauuuauuuccuaguucugu

SEQ ID NO: 2213132 - RNA, 19 nt, Human
gaaauuuauuaguuaauau

SEQ ID NO: 2213133 - RNA, 21 nt, Human
gaaauuuauuaguuaauauau

SEQ ID NO: 2213134 - RNA, 13 nt, Human
gaacacucugaga

SEQ ID NO: 2213135 - RNA, 14 nt, Human
gaacacucugagac

SEQ ID NO: 2213136 - RNA, 11 nt, Human
gaaccaaagcg

SEQ ID NO: 2213137 - RNA, 17 nt, Human
gaaccuagaagggcuag

SEQ ID NO: 2213138 - RNA, 16 nt, Human
gaaccucacgcaccuc

SEQ ID NO: 2213139 - RNA, 17 nt, Human
gaaccaaagagacugga

SEQ ID NO: 2213140 - RNA, 20 nt, Human
gaaccaaagagacuggagca

SEQ ID NO: 2213141 - RNA, 21 nt, Human
gaaccaaagagacuggagcau

SEQ ID NO: 2213142 - RNA, 21 nt, Human
gaaccucacgcaccucccauc

SEQ ID NO: 2213143 - RNA, 11 nt, Human
gaaccucacuc

SEQ ID NO: 2213144 - RNA, 16 nt, Human
gaaccucacucuugcc

SEQ ID NO: 2213145 - RNA, 17 nt, Human
gaaccucacucuugcca

SEQ ID NO: 2213146 - RNA, 20 nt, Human
gaaccucacgcaccucccau

SEQ ID NO: 2213147 - RNA, 19 nt, Human
gaaccucacgcaccuccca

SEQ ID NO: 2213148 - RNA, 18 nt, Human
gaaccucacgcaccuccc

SEQ ID NO: 2213149 - RNA, 17 nt, Human
gaaccucacgcaccucc

SEQ ID NO: 2213150 - RNA, 13 nt, Human
gaaccucagccug

SEQ ID NO: 2213151 - RNA, 12 nt, Human
gaaccucagccu

SEQ ID NO: 2213152 - RNA, 18 nt, Human
gaaccucacucuugccaa

SEQ ID NO: 2213153 - RNA, 19 nt, Human
gaaccucacucuugccaac

SEQ ID NO: 2213154 - RNA, 20 nt, Human
gaaccucacucuugccaacc

SEQ ID NO: 2213155 - RNA, 21 nt, Human
gaaccucacucuugccaaccu

SEQ ID NO: 2213156 - RNA, 14 nt, Human
gaacaucccuccug

SEQ ID NO: 2213157 - RNA, 23 nt, Human
gaacauugcauauaacuuauauu

SEQ ID NO: 2213158 - RNA, 23 nt, Human
gaacauccaaggagaaacagaga

SEQ ID NO: 2213159 - RNA, 20 nt, Human
gaacauccaaggagaaacag

SEQ ID NO: 2213160 - RNA, 21 nt, Human
gaacauugcauauaacuuaua

SEQ ID NO: 2213161 - RNA, 18 nt, Human
gaaccucaggcuuccuug

SEQ ID NO: 2213162 - RNA, 15 nt, Human
gaaccucauccagcu

SEQ ID NO: 2213163 - RNA, 16 nt, Human
gaaccuccucugugaa

SEQ ID NO: 2213164 - RNA, 13 nt, Human
gaaccuccuuucu

SEQ ID NO: 2213165 - RNA, 15 nt, Human
gaaccuccucuguga

SEQ ID NO: 2213166 - RNA, 14 nt, Human
gaaccuccucugug

SEQ ID NO: 2213167 - RNA, 13 nt, Human
gaaccuccucugu

SEQ ID NO: 2213168 - RNA, 14 nt, Human
gaaccucaggcuuc

SEQ ID NO: 2213169 - RNA, 11 nt, Human
gaaccucaggc

SEQ ID NO: 2213170 - RNA, 21 nt, Human
gaaccucagccuggccagaca

SEQ ID NO: 2213171 - RNA, 19 nt, Human
gaaccucagccuggccaga

SEQ ID NO: 2213172 - RNA, 18 nt, Human
gaaccucagccuggccag

SEQ ID NO: 2213173 - RNA, 17 nt, Human
gaaccucagccuggcca

SEQ ID NO: 2213174 - RNA, 15 nt, Human
gaaccucagccuggc

SEQ ID NO: 2213175 - RNA, 14 nt, Human
gaaccucagccugg

SEQ ID NO: 2213176 - RNA, 14 nt, Human
gaaccucuucccca

SEQ ID NO: 2213177 - RNA, 13 nt, Human
gaaccucuucccc

SEQ ID NO: 2213178 - RNA, 18 nt, Human
gaaccuuuugagugccuu

SEQ ID NO: 2213179 - RNA, 19 nt, Human
gaaccuuuugagugccuua

SEQ ID NO: 2213180 - RNA, 21 nt, Human
gaaccuuuugagugccuuaca

SEQ ID NO: 2213181 - RNA, 14 nt, Human
gaacgagaggggaa

SEQ ID NO: 2213182 - RNA, 12 nt, Human
gaacgcagcccu

SEQ ID NO: 2213183 - RNA, 18 nt, Human
gaacgauuuagaaagaag

SEQ ID NO: 2213184 - RNA, 22 nt, Human
gaacgcagcccuagagccugcc

SEQ ID NO: 2213185 - RNA, 23 nt, Human
gaacgcagcccuagagccugccu

SEQ ID NO: 2213186 - RNA, 16 nt, Human
gaacgcagcccuagag

SEQ ID NO: 2213187 - RNA, 17 nt, Human
gaacgcagcccuagagc

SEQ ID NO: 2213188 - RNA, 20 nt, Human
gaacgcagcccuagagccug

SEQ ID NO: 2213189 - RNA, 21 nt, Human
gaacgcagcccuagagccugc

SEQ ID NO: 2213190 - RNA, 17 nt, Human
gaaccucuuccccagaa

SEQ ID NO: 2213191 - RNA, 21 nt, Human
gaacgacaauagcuuuacccu

SEQ ID NO: 2213192 - RNA, 22 nt, Human
gaaccuuuugagugccuuacac

SEQ ID NO: 2213193 - RNA, 12 nt, Human
gaacguuuuucc

SEQ ID NO: 2213194 - RNA, 20 nt, Human
gaacgcccccccccaccccu

SEQ ID NO: 2213195 - RNA, 20 nt, Human
gaacgcguguguacacggga

SEQ ID NO: 2213196 - RNA, 19 nt, Human
gaacgcccccccccacccc

SEQ ID NO: 2213197 - RNA, 18 nt, Human
gaacgcccccccccaccc

SEQ ID NO: 2213198 - RNA, 15 nt, Human
gaacguuuuuccugu

SEQ ID NO: 2213199 - RNA, 17 nt, Human
gaacuaaacucauuuau

SEQ ID NO: 2213200 - RNA, 12 nt, Human
gaacuaaacuuu

SEQ ID NO: 2213201 - RNA, 18 nt, Human
gaacuaaacuuucacacc

SEQ ID NO: 2213202 - RNA, 16 nt, Human
gaacuaaacuuucaca

SEQ ID NO: 2213203 - RNA, 14 nt, Human
gaacuaaacuuuca

SEQ ID NO: 2213204 - RNA, 15 nt, Human
gaacuaauaaaagca

SEQ ID NO: 2213205 - RNA, 22 nt, Human
gaacuacaaacaaaauuucuau

SEQ ID NO: 2213206 - RNA, 23 nt, Human
gaacuacaaacaaaauuucuauu

SEQ ID NO: 2213207 - RNA, 19 nt, Human
gaacuaccuugguuccccc

SEQ ID NO: 2213208 - RNA, 17 nt, Human
gaacuaaacuuucacac

SEQ ID NO: 2213209 - RNA, 17 nt, Human
gaacuaacacuauuuua

SEQ ID NO: 2213210 - RNA, 22 nt, Human
gaacuacgcuugcucauuuuuu

SEQ ID NO: 2213211 - RNA, 20 nt, Human
gaacuaccuugguuccccca

SEQ ID NO: 2213212 - RNA, 19 nt, Human
gaacuagaauuugauuauu

SEQ ID NO: 2213213 - RNA, 14 nt, Human
gaacuacugaggau

SEQ ID NO: 2213214 - RNA, 21 nt, Human
gaacucagauccagggacaga

SEQ ID NO: 2213215 - RNA, 22 nt, Human
gaacucaccuggggcugcuggc

SEQ ID NO: 2213216 - RNA, 18 nt, Human
gaacucagaucugucuga

SEQ ID NO: 2213217 - RNA, 14 nt, Human
gaacucagccaagc

SEQ ID NO: 2213218 - RNA, 15 nt, Human
gaacucagccaagca

SEQ ID NO: 2213219 - RNA, 16 nt, Human
gaacucagccaagcac

SEQ ID NO: 2213220 - RNA, 17 nt, Human
gaacucagccaagcaca

SEQ ID NO: 2213221 - RNA, 19 nt, Human
gaacucagauccagggaca

SEQ ID NO: 2213222 - RNA, 18 nt, Human
gaacucagauccagggac

SEQ ID NO: 2213223 - RNA, 16 nt, Human
gaacucagauccaggg

SEQ ID NO: 2213224 - RNA, 15 nt, Human
gaacucagauccagg

SEQ ID NO: 2213225 - RNA, 16 nt, Human
gaacucacuggggccu

SEQ ID NO: 2213226 - RNA, 14 nt, Human
gaacucacuggggc

SEQ ID NO: 2213227 - RNA, 14 nt, Human
gaacucagauccag

SEQ ID NO: 2213228 - RNA, 13 nt, Human
gaacucagaucca

SEQ ID NO: 2213229 - RNA, 16 nt, Human
gaacucaacuuugaca

SEQ ID NO: 2213230 - RNA, 16 nt, Human
gaacucaccuggggcu

SEQ ID NO: 2213231 - RNA, 21 nt, Human
gaacucaccuggggcugcugg

SEQ ID NO: 2213232 - RNA, 16 nt, Human
gacguggcucagccag

SEQ ID NO: 2213233 - RNA, 15 nt, Human
gacguggcucagcca

SEQ ID NO: 2213234 - RNA, 11 nt, Human
gacguguuaug

SEQ ID NO: 2213235 - RNA, 14 nt, Human
gacguguuaugacu

SEQ ID NO: 2213236 - RNA, 15 nt, Human
gacguguuaugacuc

SEQ ID NO: 2213237 - RNA, 18 nt, Human
gacguuuacaagcccccc

SEQ ID NO: 2213238 - RNA, 22 nt, Human
gacguuccagccggcauggcug

SEQ ID NO: 2213239 - RNA, 21 nt, Human
gacguucggggcaugcugggg

SEQ ID NO: 2213240 - RNA, 15 nt, Human
gacguuccagccggc

SEQ ID NO: 2213241 - RNA, 18 nt, Human
gacuaaaaauauuauaac

SEQ ID NO: 2213242 - RNA, 13 nt, Human
gacguuuccauca

SEQ ID NO: 2213243 - RNA, 12 nt, Human
gacuaaaagaua

SEQ ID NO: 2213244 - RNA, 13 nt, Human
gacuaaaagauau

SEQ ID NO: 2213245 - RNA, 17 nt, Human
gacuaaaagauauaagu

SEQ ID NO: 2213246 - RNA, 18 nt, Human
gacuaaaagauauaagug

SEQ ID NO: 2213247 - RNA, 19 nt, Human
gacuaaaagauauaagugc

SEQ ID NO: 2213248 - RNA, 20 nt, Human
gacuaaaagauauaagugcu

SEQ ID NO: 2213249 - RNA, 21 nt, Human
gacuaaaagauauaagugcug

SEQ ID NO: 2213250 - RNA, 22 nt, Human
gacuaaaagauauaagugcugu

SEQ ID NO: 2213251 - RNA, 23 nt, Human
gacuaaaagauauaagugcugua

SEQ ID NO: 2213252 - RNA, 18 nt, Human
gacuaaccccaccacacc

SEQ ID NO: 2213253 - RNA, 18 nt, Human
gacuaaagagagaaugua

SEQ ID NO: 2213254 - RNA, 17 nt, Human
gacuaaagagagaaugu

SEQ ID NO: 2213255 - RNA, 14 nt, Human
gacuaaagagagaa

SEQ ID NO: 2213256 - RNA, 13 nt, Human
gacuaaagagaga

SEQ ID NO: 2213257 - RNA, 10 nt, Human
gacuaaagag

SEQ ID NO: 2213258 - RNA, 14 nt, Human
gacuaagcccuguc

SEQ ID NO: 2213259 - RNA, 22 nt, Human
gacuaagcccugucgagacacu

SEQ ID NO: 2213260 - RNA, 17 nt, Human
gacuaauauauuaauau

SEQ ID NO: 2213261 - RNA, 23 nt, Human
gacuaagcccugucgagacacuu

SEQ ID NO: 2213262 - RNA, 15 nt, Human
gacuaagccuaccug

SEQ ID NO: 2213263 - RNA, 18 nt, Human
gacuaagccuaccugcuc

SEQ ID NO: 2213264 - RNA, 21 nt, Human
gacuaagccuaccugcucucc

SEQ ID NO: 2213265 - RNA, 16 nt, Human
gacuaacuugucuuug

SEQ ID NO: 2213266 - RNA, 23 nt, Human
gacuaacuugucuuuggacccug

SEQ ID NO: 2213267 - RNA, 12 nt, Human
gacggcugggca

SEQ ID NO: 2213268 - RNA, 13 nt, Human
gacggcugggcac

SEQ ID NO: 2213269 - RNA, 18 nt, Human
gacggcugggcacacgcc

SEQ ID NO: 2213270 - RNA, 19 nt, Human
gacggcaggcucacugcca

SEQ ID NO: 2213271 - RNA, 23 nt, Human
gacggccugaugcucccuccccu

SEQ ID NO: 2213272 - RNA, 22 nt, Human
gacggccugaugcucccucccc

SEQ ID NO: 2213273 - RNA, 20 nt, Human
gacggccugaugcucccucc

SEQ ID NO: 2213274 - RNA, 15 nt, Human
gacggccugaugcuc

SEQ ID NO: 2213275 - RNA, 11 nt, Human
gacggcaggcu

SEQ ID NO: 2213276 - RNA, 16 nt, Human
gacggcaggcucacug

SEQ ID NO: 2213277 - RNA, 20 nt, Human
gacggcaggcucacugccag

SEQ ID NO: 2213278 - RNA, 14 nt, Human
gacggagccgggaa

SEQ ID NO: 2213279 - RNA, 21 nt, Human
gacggaagccuuuuuccccaa

SEQ ID NO: 2213280 - RNA, 19 nt, Human
gacggcacccacccagcac

SEQ ID NO: 2213281 - RNA, 19 nt, Human
gacggagucucgcucuguc

SEQ ID NO: 2213282 - RNA, 17 nt, Human
gacgugauuuugcugua

SEQ ID NO: 2213283 - RNA, 18 nt, Human
gacgugcaccuguacuca

SEQ ID NO: 2213284 - RNA, 23 nt, Human
gacgugcacugagagugaaguga

SEQ ID NO: 2213285 - RNA, 22 nt, Human
gacgugccuuuugcaccccucc

SEQ ID NO: 2213286 - RNA, 23 nt, Human
gacgugccuuuugcaccccuccc

SEQ ID NO: 2213287 - RNA, 14 nt, Human
gacguggcucagcc

SEQ ID NO: 2213288 - RNA, 12 nt, Human
gacguggcucag

SEQ ID NO: 2213289 - RNA, 16 nt, Human
gacgugauuuugcugu

SEQ ID NO: 2213290 - RNA, 21 nt, Human
gacguccugccaccuggggca

SEQ ID NO: 2213291 - RNA, 22 nt, Human
gacgugauucaauucaacacuc

SEQ ID NO: 2213292 - RNA, 22 nt, Human
gacgugaccggacuuuucugca

SEQ ID NO: 2213293 - RNA, 13 nt, Human
gacguccugccac

SEQ ID NO: 2213294 - RNA, 18 nt, Human
gacgucccuuuuuucucu

SEQ ID NO: 2213295 - RNA, 15 nt, Human
gacgucccugcccau

SEQ ID NO: 2213296 - RNA, 18 nt, Human
gacguccugccaccuggg

SEQ ID NO: 2213297 - RNA, 14 nt, Human
gacguccugccacc

SEQ ID NO: 2213298 - RNA, 13 nt, Human
gacggagucccac

SEQ ID NO: 2213299 - RNA, 22 nt, Human
gaccuuuagugguggccauuua

SEQ ID NO: 2213300 - RNA, 13 nt, Human
gacgcuucugaau

SEQ ID NO: 2213301 - RNA, 21 nt, Human
gacgcugugcugcccugccca

SEQ ID NO: 2213302 - RNA, 22 nt, Human
gacgcugugcugcccugcccac

SEQ ID NO: 2213303 - RNA, 22 nt, Human
gaccuuuaagagaaaugagcug

SEQ ID NO: 2213304 - RNA, 11 nt, Human
gaccuuucaau

SEQ ID NO: 2213305 - RNA, 19 nt, Human
gaccuuucaauaggaaaaa

SEQ ID NO: 2213306 - RNA, 20 nt, Human
gaccuuucaauaggaaaaac

SEQ ID NO: 2213307 - RNA, 15 nt, Human
gaccuucuaggaagc

SEQ ID NO: 2213308 - RNA, 19 nt, Human
gaccuuccugccaccaguc

SEQ ID NO: 2213309 - RNA, 23 nt, Human
gaccuuccugccaccagucacug

SEQ ID NO: 2213310 - RNA, 17 nt, Human
gaccuugaacuccuggg

SEQ ID NO: 2213311 - RNA, 12 nt, Human
gaccuucuggga

SEQ ID NO: 2213312 - RNA, 18 nt, Human
gaccuucuccaaaugaga

SEQ ID NO: 2213313 - RNA, 23 nt, Human
gaccuucuaggacgccacccagc

SEQ ID NO: 2213314 - RNA, 14 nt, Human
gaccuugaacuggg

SEQ ID NO: 2213315 - RNA, 20 nt, Human
gaccuucuccuucaccuuug

SEQ ID NO: 2213316 - RNA, 21 nt, Human
gaccuucuccuucaccuuugu

SEQ ID NO: 2213317 - RNA, 14 nt, Human
gaccuucuccuuca

SEQ ID NO: 2213318 - RNA, 19 nt, Human
gaccuucgggcugugcccg

SEQ ID NO: 2213319 - RNA, 18 nt, Human
gaccuucgggcugugccc

SEQ ID NO: 2213320 - RNA, 15 nt, Human
gaccuucuccuucac

SEQ ID NO: 2213321 - RNA, 16 nt, Human
gaccuucuccuucacc

SEQ ID NO: 2213322 - RNA, 22 nt, Human
gaccuuaucugugcgugaaaca

SEQ ID NO: 2213323 - RNA, 21 nt, Human
gaccuuaucugugcgugaaac

SEQ ID NO: 2213324 - RNA, 14 nt, Human
gaccuuaucugugc

SEQ ID NO: 2213325 - RNA, 12 nt, Human
gaccuuaucugu

SEQ ID NO: 2213326 - RNA, 16 nt, Human
gaccuucaccaaacau

SEQ ID NO: 2213327 - RNA, 19 nt, Human
gaccuucaccaaacauacu

SEQ ID NO: 2213328 - RNA, 17 nt, Human
gaccuuccaagagccug

SEQ ID NO: 2213329 - RNA, 16 nt, Human
gaccuuccaagagccu

SEQ ID NO: 2213330 - RNA, 21 nt, Human
gaccuuaggccuuccucucuc

SEQ ID NO: 2213331 - RNA, 16 nt, Human
gaccuuaguguuucug

SEQ ID NO: 2213332 - RNA, 20 nt, Human
gaccuuaguguuucugugca

SEQ ID NO: 2213333 - RNA, 21 nt, Human
gaccuuaguguuucugugcau

SEQ ID NO: 2213334 - RNA, 22 nt, Human
gaccuuaguguuucugugcaug

SEQ ID NO: 2213335 - RNA, 23 nt, Human
gaccuuaguguuucugugcaugg

SEQ ID NO: 2213336 - RNA, 18 nt, Human
gaccuuaggccuuccucu

SEQ ID NO: 2213337 - RNA, 16 nt, Human
gaccuuaggccuuccu

SEQ ID NO: 2213338 - RNA, 15 nt, Human
gaccuuaggccuucc

SEQ ID NO: 2213339 - RNA, 13 nt, Human
gaccuuaggccuu

SEQ ID NO: 2213340 - RNA, 16 nt, Human
gaccuucgggcugugc

SEQ ID NO: 2213341 - RNA, 22 nt, Human
gaccuuccucgcagagaggcca

SEQ ID NO: 2213342 - RNA, 12 nt, Human
gaccuuccugcc

SEQ ID NO: 2213343 - RNA, 14 nt, Human
gaccuuccugccac

SEQ ID NO: 2213344 - RNA, 16 nt, Human
gaccuuccugccacca

SEQ ID NO: 2213345 - RNA, 16 nt, Human
gaccuuccucgcagag

SEQ ID NO: 2213346 - RNA, 17 nt, Human
gaccuuccucgcagaga

SEQ ID NO: 2213347 - RNA, 18 nt, Human
gaccuuccucgcagagag

SEQ ID NO: 2213348 - RNA, 19 nt, Human
gaccuuccucgcagagagg

SEQ ID NO: 2213349 - RNA, 20 nt, Human
gaccuuccucgcagagaggc

SEQ ID NO: 2213350 - RNA, 21 nt, Human
gaccuuccucgcagagaggcc

SEQ ID NO: 2213351 - RNA, 23 nt, Human
gaccuuccucgcagagaggccag

SEQ ID NO: 2213352 - RNA, 22 nt, Human
gaccuuccauaaugcuacuguc

SEQ ID NO: 2213353 - RNA, 18 nt, Human
gaccuuccaagagccuga

SEQ ID NO: 2213354 - RNA, 12 nt, Human
gaccuuccucau

SEQ ID NO: 2213355 - RNA, 14 nt, Human
gaccuuccucaucc

SEQ ID NO: 2213356 - RNA, 22 nt, Human
gaccuuccucauccaccccauc

SEQ ID NO: 2213357 - RNA, 23 nt, Human
gaccuuccucauccaccccaucc

SEQ ID NO: 2213358 - RNA, 23 nt, Human
gaccugguacccuccuggcucuu

SEQ ID NO: 2213359 - RNA, 17 nt, Human
gaccuguaacuuuugua

SEQ ID NO: 2213360 - RNA, 13 nt, Human
gaccugguuuuua

SEQ ID NO: 2213361 - RNA, 22 nt, Human
gaccuggugcugccucuaccug

SEQ ID NO: 2213362 - RNA, 17 nt, Human
gaccuggugcugccucu

SEQ ID NO: 2213363 - RNA, 19 nt, Human
gaccuguccuccugguggg

SEQ ID NO: 2213364 - RNA, 12 nt, Human
gaccugugacca

SEQ ID NO: 2213365 - RNA, 21 nt, Human
gaccugucaugccccccucaa

SEQ ID NO: 2213366 - RNA, 14 nt, Human
gaccuguccuccug

SEQ ID NO: 2213367 - RNA, 15 nt, Human
gaccuguccuccugg

SEQ ID NO: 2213368 - RNA, 16 nt, Human
gaccuguccuccuggu

SEQ ID NO: 2213369 - RNA, 12 nt, Human
gaccuguaauca

SEQ ID NO: 2213370 - RNA, 15 nt, Human
gaccugucaugcccc

SEQ ID NO: 2213371 - RNA, 17 nt, Human
gaccugucaugcccccc

SEQ ID NO: 2213372 - RNA, 19 nt, Human
gaccugucaugccccccuc

SEQ ID NO: 2213373 - RNA, 20 nt, Human
gaccugucaugccccccuca

SEQ ID NO: 2213374 - RNA, 19 nt, Human
gaccuguggccaaguucuu

SEQ ID NO: 2213375 - RNA, 21 nt, Human
gaccuguggggauuucuccca

SEQ ID NO: 2213376 - RNA, 20 nt, Human
gaccuguggggauuucuccc

SEQ ID NO: 2213377 - RNA, 23 nt, Human
gaccugugagcccagcuggguca

SEQ ID NO: 2213378 - RNA, 17 nt, Human
gaccugugaccagcacu

SEQ ID NO: 2213379 - RNA, 15 nt, Human
gaccugugaccagca

SEQ ID NO: 2213380 - RNA, 15 nt, Human
gaccugugagcccag

SEQ ID NO: 2213381 - RNA, 19 nt, Human
gaccugugagcccagcugg

SEQ ID NO: 2213382 - RNA, 16 nt, Human
gaccugugagcccagc

SEQ ID NO: 2213383 - RNA, 23 nt, Human
gaccuguggggauuucucccagc

SEQ ID NO: 2213384 - RNA, 22 nt, Human
gaccuguggggauuucucccag

SEQ ID NO: 2213385 - RNA, 14 nt, Human
gaccuguggugcaa

SEQ ID NO: 2213386 - RNA, 19 nt, Human
gaccuguggugcaaaagca

SEQ ID NO: 2213387 - RNA, 19 nt, Human
gaccugugucacuacguga

SEQ ID NO: 2213388 - RNA, 17 nt, Human
gaccuguuagcagacag

SEQ ID NO: 2213389 - RNA, 15 nt, Human
gaccuguugguucca

SEQ ID NO: 2213390 - RNA, 19 nt, Human
gaccuguugguuccaagcc

SEQ ID NO: 2213391 - RNA, 19 nt, Human
gaccuguuagcagacaggc

SEQ ID NO: 2213392 - RNA, 18 nt, Human
gaccuguuagcagacagg

SEQ ID NO: 2213393 - RNA, 20 nt, Human
gacccugcgaaggggcccug

SEQ ID NO: 2213394 - RNA, 19 nt, Human
gacccuugccgucuaccug

SEQ ID NO: 2213395 - RNA, 20 nt, Human
gacccuugccgucuaccuga

SEQ ID NO: 2213396 - RNA, 23 nt, Human
gacccuugccgucuaccugaggg

SEQ ID NO: 2213397 - RNA, 22 nt, Human
gaccuggcacuggaugcagaaa

SEQ ID NO: 2213398 - RNA, 18 nt, Human
gaccuggcacuggaugca

SEQ ID NO: 2213399 - RNA, 15 nt, Human
gaccuggcagcucug

SEQ ID NO: 2213400 - RNA, 10 nt, Human
gaccuggcag

SEQ ID NO: 2213401 - RNA, 21 nt, Human
gacccugcgaaggggcccugg

SEQ ID NO: 2213402 - RNA, 21 nt, Human
gacccuugacaccugcugaga

SEQ ID NO: 2213403 - RNA, 15 nt, Human
gacccuugugguccc

SEQ ID NO: 2213404 - RNA, 17 nt, Human
gaccugguacccuccug

SEQ ID NO: 2213405 - RNA, 19 nt, Human
gaccugguacccuccuggc

SEQ ID NO: 2213406 - RNA, 21 nt, Human
gaccugguacccuccuggcuc

SEQ ID NO: 2213407 - RNA, 18 nt, Human
gaccuggcaaggacacag

SEQ ID NO: 2213408 - RNA, 16 nt, Human
gaccuggcagcucugg

SEQ ID NO: 2213409 - RNA, 18 nt, Human
gaccugggaccuccccug

SEQ ID NO: 2213410 - RNA, 14 nt, Human
gacugaugcuuuca

SEQ ID NO: 2213411 - RNA, 21 nt, Human
gacugauguugagggaacaga

SEQ ID NO: 2213412 - RNA, 18 nt, Human
gacugcacagcggccccu

SEQ ID NO: 2213413 - RNA, 21 nt, Human
gacugcacagcguccugucca

SEQ ID NO: 2213414 - RNA, 15 nt, Human
gacugcacagcggcc

SEQ ID NO: 2213415 - RNA, 20 nt, Human
gacugccagucccccugccc

SEQ ID NO: 2213416 - RNA, 24 nt, Human
gacugcauuauauuuauuacugua

SEQ ID NO: 2213417 - RNA, 14 nt, Human
gacugagcaccugc

SEQ ID NO: 2213418 - RNA, 13 nt, Human
gacugagaaauuu

SEQ ID NO: 2213419 - RNA, 19 nt, Human
gacugagcagacuggugag

SEQ ID NO: 2213420 - RNA, 12 nt, Human
gacugagccagu

SEQ ID NO: 2213421 - RNA, 14 nt, Human
gacugagccagucc

SEQ ID NO: 2213422 - RNA, 17 nt, Human
gacugagccagucccag

SEQ ID NO: 2213423 - RNA, 15 nt, Human
gacugagcagacugg

SEQ ID NO: 2213424 - RNA, 14 nt, Human
gacugagcagacug

SEQ ID NO: 2213425 - RNA, 15 nt, Human
gacugagcaccugcu

SEQ ID NO: 2213426 - RNA, 16 nt, Human
gacugagcaccugcuu

SEQ ID NO: 2213427 - RNA, 13 nt, Human
gacugagcucaag

SEQ ID NO: 2213428 - RNA, 22 nt, Human
gacugagccccgcagaccuccc

SEQ ID NO: 2213429 - RNA, 13 nt, Human
gacugaggccuga

SEQ ID NO: 2213430 - RNA, 14 nt, Human
gacugaggccugag

SEQ ID NO: 2213431 - RNA, 18 nt, Human
gacugaguacguugugca

SEQ ID NO: 2213432 - RNA, 21 nt, Human
gacugaguaagaaaugcugcc

SEQ ID NO: 2213433 - RNA, 19 nt, Human
gacugaguaagaaaugcug

SEQ ID NO: 2213434 - RNA, 16 nt, Human
gacugaggggagggga

SEQ ID NO: 2213435 - RNA, 21 nt, Human
gacugaggccugagcgcuccu

SEQ ID NO: 2213436 - RNA, 23 nt, Human
gacugaggccugagcgcuccugc

SEQ ID NO: 2213437 - RNA, 15 nt, Human
gacugagggacucug

SEQ ID NO: 2213438 - RNA, 21 nt, Human
gacugagggacucugaagccu

SEQ ID NO: 2213439 - RNA, 11 nt, Human
gacugagaaau

SEQ ID NO: 2213440 - RNA, 16 nt, Human
gacugacccugaucag

SEQ ID NO: 2213441 - RNA, 21 nt, Human
gacugaccaauauuguacagu

SEQ ID NO: 2213442 - RNA, 22 nt, Human
gacugaccaauauuguacaguu

SEQ ID NO: 2213443 - RNA, 21 nt, Human
gacucuacagaggccaugggc

SEQ ID NO: 2213444 - RNA, 16 nt, Human
gacucuacacugugaa

SEQ ID NO: 2213445 - RNA, 16 nt, Human
gacugaauuucuuuug

SEQ ID NO: 2213446 - RNA, 15 nt, Human
gacucuacagaggcc

SEQ ID NO: 2213447 - RNA, 19 nt, Human
gacucgguuucuccaaacu

SEQ ID NO: 2213448 - RNA, 20 nt, Human
gacucgucugacugugugug

SEQ ID NO: 2213449 - RNA, 18 nt, Human
gacuacaggcacccacca

SEQ ID NO: 2213450 - RNA, 13 nt, Human
gacuacaggcacc

SEQ ID NO: 2213451 - RNA, 15 nt, Human
gacuacaggcaccca

SEQ ID NO: 2213452 - RNA, 18 nt, Human
gacuccugcaggcagcca

SEQ ID NO: 2213453 - RNA, 19 nt, Human
gacuccugcaggcagccag

SEQ ID NO: 2213454 - RNA, 20 nt, Human
gacuccugcaggcagccagg

SEQ ID NO: 2213455 - RNA, 21 nt, Human
gacuccugcaggcagccaggc

SEQ ID NO: 2213456 - RNA, 16 nt, Human
gacuuauuuauauaaa

SEQ ID NO: 2213457 - RNA, 15 nt, Human
gacuuauuuucucug

SEQ ID NO: 2213458 - RNA, 22 nt, Human
gacuucacacugcaagagccuu

SEQ ID NO: 2213459 - RNA, 16 nt, Human
gacuucacacugcaag

SEQ ID NO: 2213460 - RNA, 17 nt, Human
gacuucacauaagcuca

SEQ ID NO: 2213461 - RNA, 21 nt, Human
gacuucacauaagcucagaau

SEQ ID NO: 2213462 - RNA, 14 nt, Human
gacuucacacugca

SEQ ID NO: 2213463 - RNA, 13 nt, Human
gacuucacacugc

SEQ ID NO: 2213464 - RNA, 17 nt, Human
gacuuaguauauuuucu

SEQ ID NO: 2213465 - RNA, 15 nt, Human
gacuuagcugggaga

SEQ ID NO: 2213466 - RNA, 16 nt, Human
gacuuagggcaccagg

SEQ ID NO: 2213467 - RNA, 17 nt, Human
gacuuagggcaccaggg

SEQ ID NO: 2213468 - RNA, 22 nt, Human
gacuucagggcagggcucugau

SEQ ID NO: 2213469 - RNA, 18 nt, Human
gacuucagggcagggcuc

SEQ ID NO: 2213470 - RNA, 17 nt, Human
gacuucaggggcugccc

SEQ ID NO: 2213471 - RNA, 18 nt, Human
gacuucaggggcugcccg

SEQ ID NO: 2213472 - RNA, 19 nt, Human
gacuucaggggcugcccgc

SEQ ID NO: 2213473 - RNA, 20 nt, Human
gacuucaggggcugcccgcu

SEQ ID NO: 2213474 - RNA, 21 nt, Human
gacuucaggggcugcccgcuc

SEQ ID NO: 2213475 - RNA, 23 nt, Human
gacuucaggggcugcccgcuccc

SEQ ID NO: 2213476 - RNA, 14 nt, Human
gacuucagcucugu

SEQ ID NO: 2213477 - RNA, 14 nt, Human
gacuucagggcagg

SEQ ID NO: 2213478 - RNA, 22 nt, Human
gacuucacgaaguguugcaugg

SEQ ID NO: 2213479 - RNA, 12 nt, Human
gacuucaucccu

SEQ ID NO: 2213480 - RNA, 20 nt, Human
gacuucaucccucuggggcu

SEQ ID NO: 2213481 - RNA, 16 nt, Human
gacuuagaaagcaggg

SEQ ID NO: 2213482 - RNA, 18 nt, Human
gacuuagaaagcaggggc

SEQ ID NO: 2213483 - RNA, 19 nt, Human
gacuuagaaagcaggggcu

SEQ ID NO: 2213484 - RNA, 19 nt, Human
gacuuacaugauucauuuu

SEQ ID NO: 2213485 - RNA, 14 nt, Human
gacuuaccaggaag

SEQ ID NO: 2213486 - RNA, 14 nt, Human
gacuuagaaagcag

SEQ ID NO: 2213487 - RNA, 23 nt, Human
gacuuacuguacaugaaaacaca

SEQ ID NO: 2213488 - RNA, 18 nt, Human
gacuuacuguacaugaaa

SEQ ID NO: 2213489 - RNA, 12 nt, Human
gacuuacuguac

SEQ ID NO: 2213490 - RNA, 18 nt, Human
gacuuacaugauucauuu

SEQ ID NO: 2213491 - RNA, 16 nt, Human
gacuuacaugauucau

SEQ ID NO: 2213492 - RNA, 15 nt, Human
gacuuacaugauuca

SEQ ID NO: 2213493 - RNA, 14 nt, Human
gacuuacaugauuc

SEQ ID NO: 2213494 - RNA, 16 nt, Human
gacuuacuguacauga

SEQ ID NO: 2213495 - RNA, 15 nt, Human
gacuuacuguacaug

SEQ ID NO: 2213496 - RNA, 23 nt, Human
gacuggcuagaguccucacuccc

SEQ ID NO: 2213497 - RNA, 21 nt, Human
gacuggcuagaguccucacuc

SEQ ID NO: 2213498 - RNA, 20 nt, Human
gacuggcuagaguccucacu

SEQ ID NO: 2213499 - RNA, 17 nt, Human
gacuggcuagaguccuc

SEQ ID NO: 2213500 - RNA, 22 nt, Human
gacuggccccugggucagucug

SEQ ID NO: 2213501 - RNA, 16 nt, Human
gacuggccccuggguc

SEQ ID NO: 2213502 - RNA, 14 nt, Human
gacuggccccuggg

SEQ ID NO: 2213503 - RNA, 23 nt, Human
gacuggccaagguuuggggaaga

SEQ ID NO: 2213504 - RNA, 16 nt, Human
gacuggcuggcugcag

SEQ ID NO: 2213505 - RNA, 14 nt, Human
gacuggcuggcugc

SEQ ID NO: 2213506 - RNA, 17 nt, Human
gacuggcuggcugcagu

SEQ ID NO: 2213507 - RNA, 10 nt, Human
gacuggcuuu

SEQ ID NO: 2213508 - RNA, 20 nt, Human
gacuggcuuuuauuaaugca

SEQ ID NO: 2213509 - RNA, 21 nt, Human
gacuggcuuuuauuaaugcac

SEQ ID NO: 2213510 - RNA, 22 nt, Human
gacuggcuuuuauuaaugcacu

SEQ ID NO: 2213511 - RNA, 23 nt, Human
gacuggcuuuuauuaaugcacuu

SEQ ID NO: 2213512 - RNA, 23 nt, Human
gacugggaagauaggcucugcac

SEQ ID NO: 2213513 - RNA, 22 nt, Human
gacugggaagauaggcucugca

SEQ ID NO: 2213514 - RNA, 20 nt, Human
gacugggaagauaggcucug

SEQ ID NO: 2213515 - RNA, 22 nt, Human
gacugcgggaugguccuggggc

SEQ ID NO: 2213516 - RNA, 12 nt, Human
gacugcuaaaua

SEQ ID NO: 2213517 - RNA, 21 nt, Human
gacugcgggaugguccugggg

SEQ ID NO: 2213518 - RNA, 15 nt, Human
gacugccccgugcag

SEQ ID NO: 2213519 - RNA, 20 nt, Human
gacugcgaucuucagagcag

SEQ ID NO: 2213520 - RNA, 18 nt, Human
gacugccccaacuccugg

SEQ ID NO: 2213521 - RNA, 21 nt, Human
gacugcuccccagcccuggcu

SEQ ID NO: 2213522 - RNA, 24 nt, Human
gacugcuccccagcccuggcucug

SEQ ID NO: 2213523 - RNA, 15 nt, Human
gacugcuccccagcc

SEQ ID NO: 2213524 - RNA, 19 nt, Human
gacugcuccccagcccugg

SEQ ID NO: 2213525 - RNA, 20 nt, Human
gacugcuccccagcccuggc

SEQ ID NO: 2213526 - RNA, 14 nt, Human
gacugcuaaauaaa

SEQ ID NO: 2213527 - RNA, 17 nt, Human
gacugcuaaauaaaauu

SEQ ID NO: 2213528 - RNA, 18 nt, Human
gacugcuaaauaaaauuu

SEQ ID NO: 2213529 - RNA, 15 nt, Human
gacugcuagggagug

SEQ ID NO: 2213530 - RNA, 14 nt, Human
gacuggcacaguuu

SEQ ID NO: 2213531 - RNA, 22 nt, Human
gacuggcacaguuuucugagaa

SEQ ID NO: 2213532 - RNA, 18 nt, Human
gacuggcacaguuuucug

SEQ ID NO: 2213533 - RNA, 23 nt, Human
gacagacucacaaccugaaccua

SEQ ID NO: 2213534 - RNA, 18 nt, Human
gacagacaucucugcacc

SEQ ID NO: 2213535 - RNA, 18 nt, Human
gacagaccacaucuuuau

SEQ ID NO: 2213536 - RNA, 22 nt, Human
gacagaccacaucuuuaucugu

SEQ ID NO: 2213537 - RNA, 16 nt, Human
gacagacuccugagga

SEQ ID NO: 2213538 - RNA, 19 nt, Human
gacagacuccugaggacag

SEQ ID NO: 2213539 - RNA, 23 nt, Human
gacagacuccugaggacagcugu

SEQ ID NO: 2213540 - RNA, 22 nt, Human
gacagagacaccugcaccuccc

SEQ ID NO: 2213541 - RNA, 21 nt, Human
gacagagacaccugcaccucc

SEQ ID NO: 2213542 - RNA, 18 nt, Human
gacagagacaccugcacc

SEQ ID NO: 2213543 - RNA, 17 nt, Human
gacagagacaccugcac

SEQ ID NO: 2213544 - RNA, 16 nt, Human
gacagagacaccugca

SEQ ID NO: 2213545 - RNA, 15 nt, Human
gacagagacaccugc

SEQ ID NO: 2213546 - RNA, 23 nt, Human
gacagacacuucuaaaugaagug

SEQ ID NO: 2213547 - RNA, 14 nt, Human
gacagacaggcucu

SEQ ID NO: 2213548 - RNA, 15 nt, Human
gacagacaggcucuu

SEQ ID NO: 2213549 - RNA, 21 nt, Human
gacagacaggcucuuagcagc

SEQ ID NO: 2213550 - RNA, 16 nt, Human
gacagacagcccucca

SEQ ID NO: 2213551 - RNA, 18 nt, Human
gacacuagcccaaugaaa

SEQ ID NO: 2213552 - RNA, 12 nt, Human
gacacuauaucu

SEQ ID NO: 2213553 - RNA, 13 nt, Human
gacacuauaucug

SEQ ID NO: 2213554 - RNA, 12 nt, Human
gacagaggcagc

SEQ ID NO: 2213555 - RNA, 12 nt, Human
gacagaggaggg

SEQ ID NO: 2213556 - RNA, 20 nt, Human
gacagagcugguugggaaga

SEQ ID NO: 2213557 - RNA, 20 nt, Human
gacagagcuacacaggggaa

SEQ ID NO: 2213558 - RNA, 20 nt, Human
gacagagacccucugccacc

SEQ ID NO: 2213559 - RNA, 15 nt, Human
gacagagaccuccug

SEQ ID NO: 2213560 - RNA, 16 nt, Human
gacagagaccuccugc

SEQ ID NO: 2213561 - RNA, 14 nt, Human
gacagagagagaga

SEQ ID NO: 2213562 - RNA, 19 nt, Human
gacagagggaagaaaagag

SEQ ID NO: 2213563 - RNA, 12 nt, Human
gacagaggccug

SEQ ID NO: 2213564 - RNA, 13 nt, Human
gacagaggccugc

SEQ ID NO: 2213565 - RNA, 15 nt, Human
gacagaggccugccc

SEQ ID NO: 2213566 - RNA, 23 nt, Human
gacagaggcagccccauucugcc

SEQ ID NO: 2213567 - RNA, 19 nt, Human
gacagaggccccagccucc

SEQ ID NO: 2213568 - RNA, 18 nt, Human
gacagaggccccagccuc

SEQ ID NO: 2213569 - RNA, 13 nt, Human
gacagaggcccca

SEQ ID NO: 2213570 - RNA, 15 nt, Human
gacagaggaugagcu

SEQ ID NO: 2213571 - RNA, 13 nt, Human
gacagagucuggg

SEQ ID NO: 2213572 - RNA, 16 nt, Human
gacagagggaagaaaa

SEQ ID NO: 2213573 - RNA, 13 nt, Human
gacagagggaaga

SEQ ID NO: 2213574 - RNA, 20 nt, Human
gacagagggaaacacagcag

SEQ ID NO: 2213575 - RNA, 20 nt, Human
gacagaugccccagagcugu

SEQ ID NO: 2213576 - RNA, 15 nt, Human
gacagagucugggug

SEQ ID NO: 2213577 - RNA, 19 nt, Human
gacagagugagacucuguc

SEQ ID NO: 2213578 - RNA, 21 nt, Human
gacagagucucacuguugccc

SEQ ID NO: 2213579 - RNA, 16 nt, Human
gacagagugagacucu

SEQ ID NO: 2213580 - RNA, 21 nt, Human
gaauuucaccuguaaaccuga

SEQ ID NO: 2213581 - RNA, 17 nt, Human
gaauuucaccuguaaac

SEQ ID NO: 2213582 - RNA, 12 nt, Human
gaauuucaccug

SEQ ID NO: 2213583 - RNA, 22 nt, Human
gaauuucccaaagcagugcaug

SEQ ID NO: 2213584 - RNA, 16 nt, Human
gaauuucccaaagcag

SEQ ID NO: 2213585 - RNA, 18 nt, Human
gaauuucccaaagcagug

SEQ ID NO: 2213586 - RNA, 22 nt, Human
gacacgaauauugcugauggug

SEQ ID NO: 2213587 - RNA, 17 nt, Human
gaauuucccaggacccu

SEQ ID NO: 2213588 - RNA, 16 nt, Human
gaauuucccaggaccc

SEQ ID NO: 2213589 - RNA, 15 nt, Human
gaauuucccaggacc

SEQ ID NO: 2213590 - RNA, 14 nt, Human
gaauuucccaggac

SEQ ID NO: 2213591 - RNA, 22 nt, Human
gaauuucccaggacccugaagg

SEQ ID NO: 2213592 - RNA, 15 nt, Human
gacacuaacgacuuc

SEQ ID NO: 2213593 - RNA, 17 nt, Human
gacacuaaguuauagua

SEQ ID NO: 2213594 - RNA, 23 nt, Human
gacacgcucuucuauuuuauucc

SEQ ID NO: 2213595 - RNA, 19 nt, Human
gacacggaucugagaaucu

SEQ ID NO: 2213596 - RNA, 15 nt, Human
gacacggagcccagc

SEQ ID NO: 2213597 - RNA, 20 nt, Human
gacacggaucugagaaucuu

SEQ ID NO: 2213598 - RNA, 18 nt, Human
gacacuaaguuauaguau

SEQ ID NO: 2213599 - RNA, 20 nt, Human
gacacuaaguuauaguauau

SEQ ID NO: 2213600 - RNA, 16 nt, Human
gacacuagaagauuuu

SEQ ID NO: 2213601 - RNA, 17 nt, Human
gacagacacaggcccgg

SEQ ID NO: 2213602 - RNA, 20 nt, Human
gacagacacaggcccggcuc

SEQ ID NO: 2213603 - RNA, 22 nt, Human
gacagacacaggcccggcucca

SEQ ID NO: 2213604 - RNA, 23 nt, Human
gacaggcaaugcuggcuguuggc

SEQ ID NO: 2213605 - RNA, 20 nt, Human
gacaggcauguucucugagg

SEQ ID NO: 2213606 - RNA, 21 nt, Human
gacaggcauguucucugagga

SEQ ID NO: 2213607 - RNA, 20 nt, Human
gacaggcaagcaccuccugc

SEQ ID NO: 2213608 - RNA, 21 nt, Human
gacaggcaagcaccuccugcc

SEQ ID NO: 2213609 - RNA, 18 nt, Human
gacaggcaaugcuggcug

SEQ ID NO: 2213610 - RNA, 19 nt, Human
gacaggcaaugcuggcugu

SEQ ID NO: 2213611 - RNA, 20 nt, Human
gacagcagcucaggcacacu

SEQ ID NO: 2213612 - RNA, 18 nt, Human
gacagcagcucaggcaca

SEQ ID NO: 2213613 - RNA, 16 nt, Human
gacagcagcucaggca

SEQ ID NO: 2213614 - RNA, 15 nt, Human
gacagcagcucaggc

SEQ ID NO: 2213615 - RNA, 23 nt, Human
gacaggaugguucccuugaugaa

SEQ ID NO: 2213616 - RNA, 14 nt, Human
gacagcagcucagg

SEQ ID NO: 2213617 - RNA, 13 nt, Human
gacagcagcucag

SEQ ID NO: 2213618 - RNA, 22 nt, Human
gacagcaacggggaggccaagu

SEQ ID NO: 2213619 - RNA, 19 nt, Human
gacagcaacggggaggcca

SEQ ID NO: 2213620 - RNA, 18 nt, Human
gacagaugucagccgagc

SEQ ID NO: 2213621 - RNA, 17 nt, Human
gacagaugucagccgag

SEQ ID NO: 2213622 - RNA, 13 nt, Human
gacaggcaagcac

SEQ ID NO: 2213623 - RNA, 16 nt, Human
gacagcaggugggaaa

SEQ ID NO: 2213624 - RNA, 12 nt, Human
gacagcaggugg

SEQ ID NO: 2213625 - RNA, 17 nt, Human
gacaggcaagcaccucc

SEQ ID NO: 2213626 - RNA, 18 nt, Human
gacaggcaagcaccuccu

SEQ ID NO: 2213627 - RNA, 14 nt, Human
gacauaacguuuuu

SEQ ID NO: 2213628 - RNA, 22 nt, Human
gacauaacguuuuuccuuuaaa

SEQ ID NO: 2213629 - RNA, 16 nt, Human
gacaucaacugcauca

SEQ ID NO: 2213630 - RNA, 19 nt, Human
gacaucaagcacagaagga

SEQ ID NO: 2213631 - RNA, 16 nt, Human
gacauaacguuuuucc

SEQ ID NO: 2213632 - RNA, 21 nt, Human
gacauaacguuuuuccuuuaa

SEQ ID NO: 2213633 - RNA, 15 nt, Human
gacaucacuuguaca

SEQ ID NO: 2213634 - RNA, 23 nt, Human
gacaucaacugcaucaagaugug

SEQ ID NO: 2213635 - RNA, 22 nt, Human
gacaguuuuccuucucaucugu

SEQ ID NO: 2213636 - RNA, 20 nt, Human
gacaguuuuccauaaagaag

SEQ ID NO: 2213637 - RNA, 12 nt, Human
gacaguuucuua

SEQ ID NO: 2213638 - RNA, 14 nt, Human
gacaguuucuuagc

SEQ ID NO: 2213639 - RNA, 20 nt, Human
gacaguuucuuagcuuuuua

SEQ ID NO: 2213640 - RNA, 21 nt, Human
gacaguuucuuagcuuuuuaa

SEQ ID NO: 2213641 - RNA, 23 nt, Human
gacaguuucuuagcuuuuuaauu

SEQ ID NO: 2213642 - RNA, 11 nt, Human
gacaggcccaa

SEQ ID NO: 2213643 - RNA, 16 nt, Human
gacaggcaaauaaaag

SEQ ID NO: 2213644 - RNA, 14 nt, Human
gacagggcauggcc

SEQ ID NO: 2213645 - RNA, 22 nt, Human
gacaggcauguucucugaggac

SEQ ID NO: 2213646 - RNA, 15 nt, Human
gacagggcauggcca

SEQ ID NO: 2213647 - RNA, 20 nt, Human
gacagggcauggccaggugg

SEQ ID NO: 2213648 - RNA, 15 nt, Human
gacaggcccaagaga

SEQ ID NO: 2213649 - RNA, 22 nt, Human
gacagggcauggccagguggcc

SEQ ID NO: 2213650 - RNA, 14 nt, Human
gacaggcccaagag

SEQ ID NO: 2213651 - RNA, 21 nt, Human
gacaguuauacugucgguuuu

SEQ ID NO: 2213652 - RNA, 14 nt, Human
gacaguucaagaaa

SEQ ID NO: 2213653 - RNA, 14 nt, Human
gacaguucugaaga

SEQ ID NO: 2213654 - RNA, 15 nt, Human
gacaguucauaugua

SEQ ID NO: 2213655 - RNA, 17 nt, Human
gacaguucauauguacc

SEQ ID NO: 2213656 - RNA, 18 nt, Human
gacaguugggugagaaca

SEQ ID NO: 2213657 - RNA, 15 nt, Human
gacaguucugaagaa

SEQ ID NO: 2213658 - RNA, 19 nt, Human
gacaguugggugagaacaa

SEQ ID NO: 2213659 - RNA, 19 nt, Human
gacccccgcccccugcccu

SEQ ID NO: 2213660 - RNA, 12 nt, Human
gacccccuggag

SEQ ID NO: 2213661 - RNA, 10 nt, Human
gacccugagg

SEQ ID NO: 2213662 - RNA, 14 nt, Human
gacccccuuccccu

SEQ ID NO: 2213663 - RNA, 11 nt, Human
gacccugaggc

SEQ ID NO: 2213664 - RNA, 12 nt, Human
gacccugaggcc

SEQ ID NO: 2213665 - RNA, 16 nt, Human
gacccugaggcccaga

SEQ ID NO: 2213666 - RNA, 17 nt, Human
gacccugcccugugggc

SEQ ID NO: 2213667 - RNA, 20 nt, Human
gacccugcccugugggcccc

SEQ ID NO: 2213668 - RNA, 22 nt, Human
gacccugcccugugggccccca

SEQ ID NO: 2213669 - RNA, 11 nt, Human
gacccccgccc

SEQ ID NO: 2213670 - RNA, 15 nt, Human
gacccccgcccccug

SEQ ID NO: 2213671 - RNA, 16 nt, Human
gacccccgcccccugc

SEQ ID NO: 2213672 - RNA, 18 nt, Human
gacccccgcccccugccc

SEQ ID NO: 2213673 - RNA, 18 nt, Human
gaccccagcggcugaguc

SEQ ID NO: 2213674 - RNA, 20 nt, Human
gaccccccaccaccagccgg

SEQ ID NO: 2213675 - RNA, 12 nt, Human
gaccccagagga

SEQ ID NO: 2213676 - RNA, 13 nt, Human
gacccccagcucc

SEQ ID NO: 2213677 - RNA, 23 nt, Human
gacccccagcuccggccuguccu

SEQ ID NO: 2213678 - RNA, 17 nt, Human
gacccccagcuccggcc

SEQ ID NO: 2213679 - RNA, 17 nt, Human
gacccaucacgccugug

SEQ ID NO: 2213680 - RNA, 17 nt, Human
gacccaugcugcccugu

SEQ ID NO: 2213681 - RNA, 20 nt, Human
gacccauucuacacagagca

SEQ ID NO: 2213682 - RNA, 23 nt, Human
gaccccaaacaccuuccagcucc

SEQ ID NO: 2213683 - RNA, 16 nt, Human
gaccccaaagagccug

SEQ ID NO: 2213684 - RNA, 18 nt, Human
gaccccaaagagccugga

SEQ ID NO: 2213685 - RNA, 19 nt, Human
gaccccaaagagccuggag

SEQ ID NO: 2213686 - RNA, 20 nt, Human
gaccccaaagagccuggaga

SEQ ID NO: 2213687 - RNA, 12 nt, Human
gaccccacccaa

SEQ ID NO: 2213688 - RNA, 14 nt, Human
gaccccacccaagc

SEQ ID NO: 2213689 - RNA, 21 nt, Human
gaccccaaagagccuggagaa

SEQ ID NO: 2213690 - RNA, 23 nt, Human
gaccccaaagagccuggagaagc

SEQ ID NO: 2213691 - RNA, 19 nt, Human
gaccccacccaagcuuggc

SEQ ID NO: 2213692 - RNA, 20 nt, Human
gaccccacccaagcuuggca

SEQ ID NO: 2213693 - RNA, 22 nt, Human
gaccccacccaagcuuggcagc

SEQ ID NO: 2213694 - RNA, 10 nt, Human
gacccagacc

SEQ ID NO: 2213695 - RNA, 14 nt, Human
gacccagacccagu

SEQ ID NO: 2213696 - RNA, 23 nt, Human
gacccacuucacacacaggcaac

SEQ ID NO: 2213697 - RNA, 13 nt, Human
gacccagcacugc

SEQ ID NO: 2213698 - RNA, 17 nt, Human
gacccagcacugcccaa

SEQ ID NO: 2213699 - RNA, 16 nt, Human
gacccagacccagugg

SEQ ID NO: 2213700 - RNA, 15 nt, Human
gacccagauccucac

SEQ ID NO: 2213701 - RNA, 16 nt, Human
gacccagauccucaca

SEQ ID NO: 2213702 - RNA, 20 nt, Human
gacccagauccucacaacca

SEQ ID NO: 2213703 - RNA, 19 nt, Human
gacccacuggacucaccuc

SEQ ID NO: 2213704 - RNA, 20 nt, Human
gacccaaaaggcagaagcaa

SEQ ID NO: 2213705 - RNA, 23 nt, Human
gaccagcagcgccuuucccaacu

SEQ ID NO: 2213706 - RNA, 20 nt, Human
gaccagcagcgccuuuccca

SEQ ID NO: 2213707 - RNA, 16 nt, Human
gaccagcagcgccuuu

SEQ ID NO: 2213708 - RNA, 14 nt, Human
gaccagcagcgccu

SEQ ID NO: 2213709 - RNA, 13 nt, Human
gaccagcagcgcc

SEQ ID NO: 2213710 - RNA, 19 nt, Human
gacccaaaaggcagaagca

SEQ ID NO: 2213711 - RNA, 18 nt, Human
gacccaaaaggcagaagc

SEQ ID NO: 2213712 - RNA, 16 nt, Human
gacccagucccugggg

SEQ ID NO: 2213713 - RNA, 12 nt, Human
gacccagugaga

SEQ ID NO: 2213714 - RNA, 22 nt, Human
gacccagugagauuacagagga

SEQ ID NO: 2213715 - RNA, 15 nt, Human
gacccagugccccca

SEQ ID NO: 2213716 - RNA, 23 nt, Human
gacccagccccuugagaaaccuu

SEQ ID NO: 2213717 - RNA, 16 nt, Human
gacccagcccucaucc

SEQ ID NO: 2213718 - RNA, 22 nt, Human
gacccagccccuugagaaaccu

SEQ ID NO: 2213719 - RNA, 23 nt, Human
gacccagugagauuacagaggaa

SEQ ID NO: 2213720 - RNA, 20 nt, Human
gacccagugcccccacugac

SEQ ID NO: 2213721 - RNA, 17 nt, Human
gacccagugcccccacu

SEQ ID NO: 2213722 - RNA, 16 nt, Human
gacccagugcccccac

SEQ ID NO: 2213723 - RNA, 13 nt, Human
gacccaugcugcc

SEQ ID NO: 2213724 - RNA, 14 nt, Human
gacccaguggggag

SEQ ID NO: 2213725 - RNA, 23 nt, Human
gacccaugaguuggggucuggca

SEQ ID NO: 2213726 - RNA, 18 nt, Human
gacccaugcugcccugug

SEQ ID NO: 2213727 - RNA, 19 nt, Human
gacccaugcugcccuguga

SEQ ID NO: 2213728 - RNA, 20 nt, Human
gacccaugcugcccugugag

SEQ ID NO: 2213729 - RNA, 20 nt, Human
gaccagcaacuugucuuuuu

SEQ ID NO: 2213730 - RNA, 17 nt, Human
gaccagcacugucucag

SEQ ID NO: 2213731 - RNA, 20 nt, Human
gaccagcagaucccagcuca

SEQ ID NO: 2213732 - RNA, 18 nt, Human
gaccagcagaucccagcu

SEQ ID NO: 2213733 - RNA, 17 nt, Human
gaccagcagaucccagc

SEQ ID NO: 2213734 - RNA, 16 nt, Human
gaccagcagaucccag

SEQ ID NO: 2213735 - RNA, 20 nt, Human
gaccagcaccaucucuccuc

SEQ ID NO: 2213736 - RNA, 21 nt, Human
gaccagcaccaucucuccucc

SEQ ID NO: 2213737 - RNA, 23 nt, Human
gaccagacaccuugacagggcac

SEQ ID NO: 2213738 - RNA, 24 nt, Human
gaccagacaccuugacagggcaca

SEQ ID NO: 2213739 - RNA, 21 nt, Human
gaccagagcugccaccugccu

SEQ ID NO: 2213740 - RNA, 22 nt, Human
gaccagacaccuugacagggca

SEQ ID NO: 2213741 - RNA, 21 nt, Human
gaccagacaccuugacagggc

SEQ ID NO: 2213742 - RNA, 18 nt, Human
gaccacugcagaagacag

SEQ ID NO: 2213743 - RNA, 16 nt, Human
gaccacugcagaagac

SEQ ID NO: 2213744 - RNA, 21 nt, Human
gaccacaggguucaaaauguc

SEQ ID NO: 2213745 - RNA, 23 nt, Human
gaccacagcaucauuuugcauuc

SEQ ID NO: 2213746 - RNA, 23 nt, Human
gaccacaggguucaaaaugucug

SEQ ID NO: 2213747 - RNA, 18 nt, Human
gaccacauuuuauauuua

SEQ ID NO: 2213748 - RNA, 17 nt, Human
gaccacaucuuuaucug

SEQ ID NO: 2213749 - RNA, 23 nt, Human
gaccacaucuuuaucuguucuug

SEQ ID NO: 2213750 - RNA, 16 nt, Human
gaccaccaccucagag

SEQ ID NO: 2213751 - RNA, 16 nt, Human
gaccacguuucuaaag

SEQ ID NO: 2213752 - RNA, 16 nt, Human
gaccaaggagaugaag

SEQ ID NO: 2213753 - RNA, 19 nt, Human
gaccaaggaccccucaccu

SEQ ID NO: 2213754 - RNA, 17 nt, Human
gaccaaggaccccucac

SEQ ID NO: 2213755 - RNA, 23 nt, Human
gaccaaggcaaggcaggugccuc

SEQ ID NO: 2213756 - RNA, 17 nt, Human
gaccaaggcaaggcagg

SEQ ID NO: 2213757 - RNA, 19 nt, Human
gaccaaggcaaggcaggug

SEQ ID NO: 2213758 - RNA, 21 nt, Human
gaccaaguuauaaaucaaugu

SEQ ID NO: 2213759 - RNA, 18 nt, Human
gaccaaggggugggccac

SEQ ID NO: 2213760 - RNA, 18 nt, Human
gaccaagguuccagcuca

SEQ ID NO: 2213761 - RNA, 20 nt, Human
gaccaauauuauacuaagaa

SEQ ID NO: 2213762 - RNA, 18 nt, Human
gaccaauauucaaaugcg

SEQ ID NO: 2213763 - RNA, 14 nt, Human
gaccaaguuauaaa

SEQ ID NO: 2213764 - RNA, 16 nt, Human
gaccaaggaccccuca

SEQ ID NO: 2213765 - RNA, 13 nt, Human
gaccaaggacccc

SEQ ID NO: 2213766 - RNA, 15 nt, Human
gaccaagcaucuugg

SEQ ID NO: 2213767 - RNA, 20 nt, Human
gaccaagcaucuuggggggg

SEQ ID NO: 2213768 - RNA, 20 nt, Human
gaccaagcaggaagcucaga

SEQ ID NO: 2213769 - RNA, 19 nt, Human
gaccaagcaggaagcucag

SEQ ID NO: 2213770 - RNA, 17 nt, Human
gaccaagcaggaagcuc

SEQ ID NO: 2213771 - RNA, 16 nt, Human
gaccaagcaggaagcu

SEQ ID NO: 2213772 - RNA, 15 nt, Human
gaccaagcaggaagc

SEQ ID NO: 2213773 - RNA, 20 nt, Human
gacauccauaaagaagcaau

SEQ ID NO: 2213774 - RNA, 13 nt, Human
gacaucagcuggu

SEQ ID NO: 2213775 - RNA, 20 nt, Human
gacaucaguggcauggcucc

SEQ ID NO: 2213776 - RNA, 13 nt, Human
gacaucaguggca

SEQ ID NO: 2213777 - RNA, 22 nt, Human
gacaucacuuguacaaaauaaa

SEQ ID NO: 2213778 - RNA, 16 nt, Human
gacaucacuuguacaa

SEQ ID NO: 2213779 - RNA, 17 nt, Human
gacauccaagcuuccuu

SEQ ID NO: 2213780 - RNA, 15 nt, Human
gacauccaagcuucc

SEQ ID NO: 2213781 - RNA, 16 nt, Human
gacauccaagcuuccu

SEQ ID NO: 2213782 - RNA, 19 nt, Human
gacaucaguggcauggcuc

SEQ ID NO: 2213783 - RNA, 17 nt, Human
gacauccauaaagaagc

SEQ ID NO: 2213784 - RNA, 18 nt, Human
gacauccauaaagaagca

SEQ ID NO: 2213785 - RNA, 19 nt, Human
gacauccauaaagaagcaa

SEQ ID NO: 2213786 - RNA, 16 nt, Human
gacauccauaaagaag

SEQ ID NO: 2213787 - RNA, 17 nt, Human
gaccaauauuguacagu

SEQ ID NO: 2213788 - RNA, 18 nt, Human
gaccaauauuguacaguu

SEQ ID NO: 2213789 - RNA, 19 nt, Human
gaccaauauuguacaguuu

SEQ ID NO: 2213790 - RNA, 21 nt, Human
gaccaauauuguacaguuuuu

SEQ ID NO: 2213791 - RNA, 18 nt, Human
gaccacaaaacuuuucua

SEQ ID NO: 2213792 - RNA, 13 nt, Human
gaccaauucaacc

SEQ ID NO: 2213793 - RNA, 21 nt, Human
gaccacacauuuguguaaaca

SEQ ID NO: 2213794 - RNA, 12 nt, Human
gaccacaccucc

SEQ ID NO: 2213795 - RNA, 16 nt, Human
gaccacacccuguacu

SEQ ID NO: 2213796 - RNA, 23 nt, Human
gaccacacuuccuguccagagag

SEQ ID NO: 2213797 - RNA, 11 nt, Human
gaccacagcaa

SEQ ID NO: 2213798 - RNA, 20 nt, Human
gaccacagcaaggcaccugc

SEQ ID NO: 2213799 - RNA, 21 nt, Human
gaccacagcaaggcaccugca

SEQ ID NO: 2213800 - RNA, 22 nt, Human
gaccacacuuccuguccagaga

SEQ ID NO: 2213801 - RNA, 20 nt, Human
gaccacacuuccuguccaga

SEQ ID NO: 2213802 - RNA, 18 nt, Human
gaccacacuuccugucca

SEQ ID NO: 2213803 - RNA, 17 nt, Human
gaccacacuuccugucc

SEQ ID NO: 2213804 - RNA, 16 nt, Human
gaccacagcacagcca

SEQ ID NO: 2213805 - RNA, 15 nt, Human
gaccacagcacagcc

SEQ ID NO: 2213806 - RNA, 14 nt, Human
gaccacagcacagc

SEQ ID NO: 2213807 - RNA, 12 nt, Human
gaccacagcaca

SEQ ID NO: 2213808 - RNA, 20 nt, Human
gaccacaccucccugaacca

SEQ ID NO: 2213809 - RNA, 17 nt, Human
gaccacaccucccugaa

SEQ ID NO: 2213810 - RNA, 14 nt, Human
gaccacacuccagc

SEQ ID NO: 2213811 - RNA, 22 nt, Human
gaccacacuccagcugggauca

SEQ ID NO: 2213812 - RNA, 16 nt, Human
gaccacacuccagcug

SEQ ID NO: 2213813 - RNA, 15 nt, Human
cuugggcccuucccu

SEQ ID NO: 2213814 - RNA, 14 nt, Human
cuugggcccuccug

SEQ ID NO: 2213815 - RNA, 13 nt, Human
cuugggcccuccu

SEQ ID NO: 2213816 - RNA, 12 nt, Human
cuugggcccucc

SEQ ID NO: 2213817 - RNA, 22 nt, Human
cuugggcccagcugggcucugc

SEQ ID NO: 2213818 - RNA, 20 nt, Human
cuugggcccagcugggcucu

SEQ ID NO: 2213819 - RNA, 21 nt, Human
cuugggcccagcugggcucug

SEQ ID NO: 2213820 - RNA, 19 nt, Human
cuugggcccuuugagugca

SEQ ID NO: 2213821 - RNA, 17 nt, Human
cuugggcccuuugagug

SEQ ID NO: 2213822 - RNA, 16 nt, Human
cuugggcccuuugagu

SEQ ID NO: 2213823 - RNA, 14 nt, Human
cuugggcccuuuga

SEQ ID NO: 2213824 - RNA, 22 nt, Human
cuugggcacuuuuuaauucacc

SEQ ID NO: 2213825 - RNA, 13 nt, Human
cuugggcagagcu

SEQ ID NO: 2213826 - RNA, 16 nt, Human
cuugggccauagcucc

SEQ ID NO: 2213827 - RNA, 17 nt, Human
cuugggccauagcuccu

SEQ ID NO: 2213828 - RNA, 14 nt, Human
cuugggcccagcug

SEQ ID NO: 2213829 - RNA, 15 nt, Human
cuugggcccagcugg

SEQ ID NO: 2213830 - RNA, 16 nt, Human
cuugggcccagcuggg

SEQ ID NO: 2213831 - RNA, 18 nt, Human
cuugggcccagcugggcu

SEQ ID NO: 2213832 - RNA, 20 nt, Human
cuugggccacugugaagaga

SEQ ID NO: 2213833 - RNA, 18 nt, Human
cuugggccacugugaaga

SEQ ID NO: 2213834 - RNA, 20 nt, Human
cuugggaugaugccucauga

SEQ ID NO: 2213835 - RNA, 16 nt, Human
cuugcaccucugaccu

SEQ ID NO: 2213836 - RNA, 14 nt, Human
cuuggacuauuaua

SEQ ID NO: 2213837 - RNA, 17 nt, Human
cuuggaccucugcucug

SEQ ID NO: 2213838 - RNA, 22 nt, Human
cuuggacuauuauaauuuaaug

SEQ ID NO: 2213839 - RNA, 19 nt, Human
cuuggaccucugcucugag

SEQ ID NO: 2213840 - RNA, 16 nt, Human
cuuggacucauuuuaa

SEQ ID NO: 2213841 - RNA, 21 nt, Human
cuuggaaguuucauauauugu

SEQ ID NO: 2213842 - RNA, 18 nt, Human
cuuggaaguugcauggca

SEQ ID NO: 2213843 - RNA, 13 nt, Human
cuuggacacugua

SEQ ID NO: 2213844 - RNA, 20 nt, Human
cuuggaauuuguaaccucag

SEQ ID NO: 2213845 - RNA, 22 nt, Human
cuuggaauuuguaaccucagcu

SEQ ID NO: 2213846 - RNA, 16 nt, Human
cuugcugcccuaggcu

SEQ ID NO: 2213847 - RNA, 15 nt, Human
cuuggaagcuucugg

SEQ ID NO: 2213848 - RNA, 16 nt, Human
cuugggaggcuucccc

SEQ ID NO: 2213849 - RNA, 15 nt, Human
cuugggaggcuuccc

SEQ ID NO: 2213850 - RNA, 22 nt, Human
cuugggaggccccacuggggaa

SEQ ID NO: 2213851 - RNA, 21 nt, Human
cuugggaggccccacugggga

SEQ ID NO: 2213852 - RNA, 19 nt, Human
cuugggaggccccacuggg

SEQ ID NO: 2213853 - RNA, 15 nt, Human
cuugggaggccccac

SEQ ID NO: 2213854 - RNA, 14 nt, Human
cuugggaggcccca

SEQ ID NO: 2213855 - RNA, 22 nt, Human
cuugggaggaagcagaauaaag

SEQ ID NO: 2213856 - RNA, 23 nt, Human
cuugggaggaagcagaauaaagc

SEQ ID NO: 2213857 - RNA, 13 nt, Human
cuuggagccccag

SEQ ID NO: 2213858 - RNA, 21 nt, Human
cuugggaggaagcagaauaaa

SEQ ID NO: 2213859 - RNA, 18 nt, Human
cuuggagccccagugcca

SEQ ID NO: 2213860 - RNA, 20 nt, Human
cuugggaggaagcagaauaa

SEQ ID NO: 2213861 - RNA, 22 nt, Human
cuuggagccaauggagacuguc

SEQ ID NO: 2213862 - RNA, 13 nt, Human
cuuggacuugagg

SEQ ID NO: 2213863 - RNA, 14 nt, Human
cuuggacucuugcu

SEQ ID NO: 2213864 - RNA, 15 nt, Human
cuuggacucuugcuc

SEQ ID NO: 2213865 - RNA, 18 nt, Human
cuuggacucuugcucuuu

SEQ ID NO: 2213866 - RNA, 22 nt, Human
cuuggacuucuucucccccgcg

SEQ ID NO: 2213867 - RNA, 12 nt, Human
cuugggcggcug

SEQ ID NO: 2213868 - RNA, 14 nt, Human
cuugggcggcugag

SEQ ID NO: 2213869 - RNA, 15 nt, Human
cuugggcggcugaga

SEQ ID NO: 2213870 - RNA, 18 nt, Human
cuugggcggcugagagcc

SEQ ID NO: 2213871 - RNA, 13 nt, Human
cuugggcucccug

SEQ ID NO: 2213872 - RNA, 22 nt, Human
cuugggcggcugagagccccag

SEQ ID NO: 2213873 - RNA, 21 nt, Human
cuugggcucccuguaaccucu

SEQ ID NO: 2213874 - RNA, 17 nt, Human
cuugggcugagacugga

SEQ ID NO: 2213875 - RNA, 14 nt, Human
cuugggcugagacu

SEQ ID NO: 2213876 - RNA, 16 nt, Human
cuuggggcugaugcag

SEQ ID NO: 2213877 - RNA, 14 nt, Human
cuuggggcuuccua

SEQ ID NO: 2213878 - RNA, 18 nt, Human
cuuggggcucacacaccu

SEQ ID NO: 2213879 - RNA, 15 nt, Human
cuuggggccuaugca

SEQ ID NO: 2213880 - RNA, 18 nt, Human
cuuggggcugaugcaguu

SEQ ID NO: 2213881 - RNA, 17 nt, Human
cuugguuggguccucac

SEQ ID NO: 2213882 - RNA, 16 nt, Human
cuugguuggcuggccu

SEQ ID NO: 2213883 - RNA, 15 nt, Human
cuugguuggcuggcc

SEQ ID NO: 2213884 - RNA, 14 nt, Human
cuugggcugcuccu

SEQ ID NO: 2213885 - RNA, 20 nt, Human
cuuggggcuugacuuuugua

SEQ ID NO: 2213886 - RNA, 21 nt, Human
cuuggggcuugacuuuuguau

SEQ ID NO: 2213887 - RNA, 22 nt, Human
cuugguuucuucaacaggagaa

SEQ ID NO: 2213888 - RNA, 17 nt, Human
cuugguuuccaaaggca

SEQ ID NO: 2213889 - RNA, 14 nt, Human
cuugguugucucca

SEQ ID NO: 2213890 - RNA, 18 nt, Human
cuugguugucuccacaca

SEQ ID NO: 2213891 - RNA, 12 nt, Human
cuuguacaaaau

SEQ ID NO: 2213892 - RNA, 17 nt, Human
cuuguacuuuauuuucu

SEQ ID NO: 2213893 - RNA, 16 nt, Human
cuuguaauucuaaaug

SEQ ID NO: 2213894 - RNA, 23 nt, Human
cuuguaauucuaaaugaauguuu

SEQ ID NO: 2213895 - RNA, 12 nt, Human
cuuguaauuuaa

SEQ ID NO: 2213896 - RNA, 21 nt, Human
cuuguaauuuaaacaggccca

SEQ ID NO: 2213897 - RNA, 22 nt, Human
cuuguaauuuaaacaggcccag

SEQ ID NO: 2213898 - RNA, 13 nt, Human
cuuguacaaaaua

SEQ ID NO: 2213899 - RNA, 23 nt, Human
cuuguaauuuaaacaggcccagc

SEQ ID NO: 2213900 - RNA, 22 nt, Human
cuuguaauuuuuuuaauuuaca

SEQ ID NO: 2213901 - RNA, 13 nt, Human
cuuguaauucuaa

SEQ ID NO: 2213902 - RNA, 15 nt, Human
cuuguaauucuaaau

SEQ ID NO: 2213903 - RNA, 22 nt, Human
cuuguaaugauauagccagaaa

SEQ ID NO: 2213904 - RNA, 15 nt, Human
cuugguuuguaaauu

SEQ ID NO: 2213905 - RNA, 14 nt, Human
cuugguuuguaaau

SEQ ID NO: 2213906 - RNA, 22 nt, Human
cuuguguuuuuaacucaauauu

SEQ ID NO: 2213907 - RNA, 21 nt, Human
cuuguguuucuuuaguuuuug

SEQ ID NO: 2213908 - RNA, 14 nt, Human
cuuguuacuucuga

SEQ ID NO: 2213909 - RNA, 15 nt, Human
cuuguuacuucugag

SEQ ID NO: 2213910 - RNA, 17 nt, Human
cuuguuacuucugaggu

SEQ ID NO: 2213911 - RNA, 20 nt, Human
cuuguucugugaugagggga

SEQ ID NO: 2213912 - RNA, 21 nt, Human
cuuguucugugaugaggggag

SEQ ID NO: 2213913 - RNA, 16 nt, Human
cuuguuaagauaguua

SEQ ID NO: 2213914 - RNA, 16 nt, Human
cuuguggucccacccc

SEQ ID NO: 2213915 - RNA, 19 nt, Human
cuuguggucccaccccaca

SEQ ID NO: 2213916 - RNA, 21 nt, Human
cuuguccccuccucacucccu

SEQ ID NO: 2213917 - RNA, 20 nt, Human
cuuguccccuccucacuccc

SEQ ID NO: 2213918 - RNA, 18 nt, Human
cuuguccccacacuccua

SEQ ID NO: 2213919 - RNA, 20 nt, Human
cuuguccccacacuccuaca

SEQ ID NO: 2213920 - RNA, 17 nt, Human
cuuguccccugccugug

SEQ ID NO: 2213921 - RNA, 21 nt, Human
cuuguccccugccugugccug

SEQ ID NO: 2213922 - RNA, 13 nt, Human
cuuguccccacac

SEQ ID NO: 2213923 - RNA, 14 nt, Human
cuuguccccacacu

SEQ ID NO: 2213924 - RNA, 16 nt, Human
cuuguccccacacucc

SEQ ID NO: 2213925 - RNA, 23 nt, Human
cuuguccuuuuguaccauggugu

SEQ ID NO: 2213926 - RNA, 15 nt, Human
cuuguccuuucccuu

SEQ ID NO: 2213927 - RNA, 14 nt, Human
cuuguccuuucccu

SEQ ID NO: 2213928 - RNA, 18 nt, Human
cuuguccuagcuugggag

SEQ ID NO: 2213929 - RNA, 15 nt, Human
cuuguggucccaccc

SEQ ID NO: 2213930 - RNA, 18 nt, Human
cuuuagaaugagagugug

SEQ ID NO: 2213931 - RNA, 22 nt, Human
cuuuagaaugagagugugaaau

SEQ ID NO: 2213932 - RNA, 16 nt, Human
cuuuaccugagaccag

SEQ ID NO: 2213933 - RNA, 13 nt, Human
cuuuaccugagac

SEQ ID NO: 2213934 - RNA, 14 nt, Human
cuuuagacccuggg

SEQ ID NO: 2213935 - RNA, 16 nt, Human
cuuuagacccugggug

SEQ ID NO: 2213936 - RNA, 23 nt, Human
cuuuagacccugggugggcucug

SEQ ID NO: 2213937 - RNA, 20 nt, Human
cuuuaccuuuuuuauacaua

SEQ ID NO: 2213938 - RNA, 19 nt, Human
cuuuaccuuuuuuauacau

SEQ ID NO: 2213939 - RNA, 23 nt, Human
cuuuaaaaacuauuuaacuugag

SEQ ID NO: 2213940 - RNA, 21 nt, Human
cuuuaaaaagcuccaaaugca

SEQ ID NO: 2213941 - RNA, 14 nt, Human
cuuuaaaaacuauu

SEQ ID NO: 2213942 - RNA, 19 nt, Human
cuuuaaaaacuauuuaacu

SEQ ID NO: 2213943 - RNA, 22 nt, Human
cuuuaaaaaauuaaucugggcc

SEQ ID NO: 2213944 - RNA, 17 nt, Human
cuuuaccuuuuuuauac

SEQ ID NO: 2213945 - RNA, 12 nt, Human
cuuuaaaagaau

SEQ ID NO: 2213946 - RNA, 20 nt, Human
cuuuaaaagacaaaucaaag

SEQ ID NO: 2213947 - RNA, 12 nt, Human
cuuguuucaauu

SEQ ID NO: 2213948 - RNA, 14 nt, Human
cuuguuucuuuuca

SEQ ID NO: 2213949 - RNA, 22 nt, Human
cuuguuucaauuccaccugcaa

SEQ ID NO: 2213950 - RNA, 15 nt, Human
cuuguuuccaauguu

SEQ ID NO: 2213951 - RNA, 16 nt, Human
cuuguuugcucaccug

SEQ ID NO: 2213952 - RNA, 23 nt, Human
cuuguuugauuuuagcugcagaa

SEQ ID NO: 2213953 - RNA, 22 nt, Human
cuuguuugauuuuagcugcaga

SEQ ID NO: 2213954 - RNA, 20 nt, Human
cuuguuugauuuuagcugca

SEQ ID NO: 2213955 - RNA, 19 nt, Human
cuuguuugcucaccugggg

SEQ ID NO: 2213956 - RNA, 18 nt, Human
cuuguuugcucaccuggg

SEQ ID NO: 2213957 - RNA, 20 nt, Human
cuuguuugcucaccuggggu

SEQ ID NO: 2213958 - RNA, 17 nt, Human
cuuuaaaaaaauuuaag

SEQ ID NO: 2213959 - RNA, 18 nt, Human
cuuuaaaaaaauuuaagu

SEQ ID NO: 2213960 - RNA, 19 nt, Human
cuuuaaaaaaauuuaagug

SEQ ID NO: 2213961 - RNA, 20 nt, Human
cuuguugcucaaaaaaugag

SEQ ID NO: 2213962 - RNA, 19 nt, Human
cuuguugcaugauguauuu

SEQ ID NO: 2213963 - RNA, 22 nt, Human
cuuguugcuguugauguuuugu

SEQ ID NO: 2213964 - RNA, 14 nt, Human
cuuguuggagccug

SEQ ID NO: 2213965 - RNA, 23 nt, Human
cuugcucugcuugacaacaucug

SEQ ID NO: 2213966 - RNA, 19 nt, Human
cuugcccuucccugucccu

SEQ ID NO: 2213967 - RNA, 22 nt, Human
cuugcucugcugacagacacag

SEQ ID NO: 2213968 - RNA, 22 nt, Human
cuugcccuguuaaaagaugaaa

SEQ ID NO: 2213969 - RNA, 19 nt, Human
cuugccccaacccccagca

SEQ ID NO: 2213970 - RNA, 20 nt, Human
cuugccccaacccccagcac

SEQ ID NO: 2213971 - RNA, 21 nt, Human
cuugccccaacccccagcacc

SEQ ID NO: 2213972 - RNA, 12 nt, Human
cuugcccuuccc

SEQ ID NO: 2213973 - RNA, 14 nt, Human
cuugcccuucccug

SEQ ID NO: 2213974 - RNA, 15 nt, Human
cuugcccuucccugu

SEQ ID NO: 2213975 - RNA, 16 nt, Human
cuugcccuucccuguc

SEQ ID NO: 2213976 - RNA, 17 nt, Human
cuugcccuucccugucc

SEQ ID NO: 2213977 - RNA, 14 nt, Human
cuugcucuguaauc

SEQ ID NO: 2213978 - RNA, 19 nt, Human
cuugcucuucagugggaga

SEQ ID NO: 2213979 - RNA, 15 nt, Human
cuugcucuguaaucu

SEQ ID NO: 2213980 - RNA, 19 nt, Human
cuugcucuuucuacucuga

SEQ ID NO: 2213981 - RNA, 20 nt, Human
cuugcucuuucuacucugaa

SEQ ID NO: 2213982 - RNA, 22 nt, Human
cuugcucuuucuacucugaacu

SEQ ID NO: 2213983 - RNA, 19 nt, Human
cuugcucuugaugccuggc

SEQ ID NO: 2213984 - RNA, 17 nt, Human
cuugcucuugaugccug

SEQ ID NO: 2213985 - RNA, 18 nt, Human
cuugcucuugaugccugg

SEQ ID NO: 2213986 - RNA, 17 nt, Human
cuugcugagaggggcug

SEQ ID NO: 2213987 - RNA, 19 nt, Human
cuugcugagaggggcuguc

SEQ ID NO: 2213988 - RNA, 21 nt, Human
cuugcugcaguaugaaaauaa

SEQ ID NO: 2213989 - RNA, 23 nt, Human
cuugcugcccuaggcuccgucag

SEQ ID NO: 2213990 - RNA, 20 nt, Human
cuugcugcccugugcuccuc

SEQ ID NO: 2213991 - RNA, 13 nt, Human
cuugcuucccuaa

SEQ ID NO: 2213992 - RNA, 17 nt, Human
cuugcuucccuaaucua

SEQ ID NO: 2213993 - RNA, 20 nt, Human
cuuggaagcuccgcuuucua

SEQ ID NO: 2213994 - RNA, 14 nt, Human
cuuggaagcuccgc

SEQ ID NO: 2213995 - RNA, 20 nt, Human
cuugcuugauuguauggugg

SEQ ID NO: 2213996 - RNA, 19 nt, Human
cuugcccagggcucagccu

SEQ ID NO: 2213997 - RNA, 18 nt, Human
cuugcccagggcucagcc

SEQ ID NO: 2213998 - RNA, 16 nt, Human
cuugcccagggcucag

SEQ ID NO: 2213999 - RNA, 15 nt, Human
cuugcccagggcuca

SEQ ID NO: 2214000 - RNA, 14 nt, Human
cuugcccagggcuc

SEQ ID NO: 2214001 - RNA, 13 nt, Human
cuugcccagggcu

SEQ ID NO: 2214002 - RNA, 23 nt, Human
cuugcccagggcucagccuggug

SEQ ID NO: 2214003 - RNA, 14 nt, Human
cuugcccaguuuca

SEQ ID NO: 2214004 - RNA, 21 nt, Human
cuugcccagggcucagccugg

SEQ ID NO: 2214005 - RNA, 20 nt, Human
cuugcccagggcucagccug

SEQ ID NO: 2214006 - RNA, 20 nt, Human
cuugcccaguuucagggcua

SEQ ID NO: 2214007 - RNA, 13 nt, Human
cuugccccaaccc

SEQ ID NO: 2214008 - RNA, 14 nt, Human
cuugccccaacccc

SEQ ID NO: 2214009 - RNA, 17 nt, Human
cuugccccaacccccag

SEQ ID NO: 2214010 - RNA, 18 nt, Human
cuugccccaacccccagc

SEQ ID NO: 2214011 - RNA, 18 nt, Human
cuugcccuggugccucac

SEQ ID NO: 2214012 - RNA, 14 nt, Human
cuugcccuguuaaa

SEQ ID NO: 2214013 - RNA, 23 nt, Human
cuugccaaugaggucugaaaugg

SEQ ID NO: 2214014 - RNA, 22 nt, Human
cuugccaaugaggucugaaaug

SEQ ID NO: 2214015 - RNA, 20 nt, Human
cuugccacagcucuugagga

SEQ ID NO: 2214016 - RNA, 13 nt, Human
cuugccaccccac

SEQ ID NO: 2214017 - RNA, 18 nt, Human
cuugccaccccacccucc

SEQ ID NO: 2214018 - RNA, 20 nt, Human
cuugccaccccacccucccu

SEQ ID NO: 2214019 - RNA, 14 nt, Human
cuugccacagcucu

SEQ ID NO: 2214020 - RNA, 17 nt, Human
cuugccacuagggcucu

SEQ ID NO: 2214021 - RNA, 23 nt, Human
cuugccaggguuucgagaagcug

SEQ ID NO: 2214022 - RNA, 21 nt, Human
cuugccaccccacccucccug

SEQ ID NO: 2214023 - RNA, 22 nt, Human
cuugccaccccacccucccugg

SEQ ID NO: 2214024 - RNA, 23 nt, Human
cuugccaccccacccucccugga

SEQ ID NO: 2214025 - RNA, 17 nt, Human
cuugcaugaggcuagug

SEQ ID NO: 2214026 - RNA, 15 nt, Human
cuugcauccaacucc

SEQ ID NO: 2214027 - RNA, 17 nt, Human
cuugcaucguggagaca

SEQ ID NO: 2214028 - RNA, 18 nt, Human
cuugcaucucauugcucu

SEQ ID NO: 2214029 - RNA, 20 nt, Human
cuugccaaccuguaauaaau

SEQ ID NO: 2214030 - RNA, 20 nt, Human
cuugcaucguggagacaggg

SEQ ID NO: 2214031 - RNA, 21 nt, Human
cuugccaaccuguaauaaaua

SEQ ID NO: 2214032 - RNA, 22 nt, Human
cuugccaaccuguaauaaauau

SEQ ID NO: 2214033 - RNA, 23 nt, Human
cuugccaaccuguaauaaauaug

SEQ ID NO: 2214034 - RNA, 13 nt, Human
cuugcaugaggcu

SEQ ID NO: 2214035 - RNA, 14 nt, Human
cuugcaugaggcua

SEQ ID NO: 2214036 - RNA, 14 nt, Human
cuucuggccuccca

SEQ ID NO: 2214037 - RNA, 15 nt, Human
cuucuggccucccac

SEQ ID NO: 2214038 - RNA, 19 nt, Human
cuucuggccucccacagac

SEQ ID NO: 2214039 - RNA, 16 nt, Human
cuucuggccucccaca

SEQ ID NO: 2214040 - RNA, 12 nt, Human
cuucuggcucaa

SEQ ID NO: 2214041 - RNA, 14 nt, Human
cuucuggagcccuu

SEQ ID NO: 2214042 - RNA, 16 nt, Human
cuucuggagucuccag

SEQ ID NO: 2214043 - RNA, 18 nt, Human
cuucuggagucuccagug

SEQ ID NO: 2214044 - RNA, 15 nt, Human
cuucuggauucuugg

SEQ ID NO: 2214045 - RNA, 20 nt, Human
cuucuggagucuccaguggu

SEQ ID NO: 2214046 - RNA, 17 nt, Human
cuucuggcacuuggaga

SEQ ID NO: 2214047 - RNA, 18 nt, Human
cuucuggauucuuggccc

SEQ ID NO: 2214048 - RNA, 16 nt, Human
cuucuggauucuuggc

SEQ ID NO: 2214049 - RNA, 17 nt, Human
cuucuggauucuuggcc

SEQ ID NO: 2214050 - RNA, 23 nt, Human
cuugagaagaccucaccuagaaa

SEQ ID NO: 2214051 - RNA, 22 nt, Human
cuugagaaauauggacacuuaa

SEQ ID NO: 2214052 - RNA, 16 nt, Human
cuugagaccucagcca

SEQ ID NO: 2214053 - RNA, 15 nt, Human
cuugagaccucagcc

SEQ ID NO: 2214054 - RNA, 14 nt, Human
cuugagaccucagc

SEQ ID NO: 2214055 - RNA, 13 nt, Human
cuugagacagcuu

SEQ ID NO: 2214056 - RNA, 22 nt, Human
cuugagacacggagcccagccc

SEQ ID NO: 2214057 - RNA, 17 nt, Human
cuugagacacggagccc

SEQ ID NO: 2214058 - RNA, 11 nt, Human
cuugagaaacc

SEQ ID NO: 2214059 - RNA, 12 nt, Human
cuugagaaaccu

SEQ ID NO: 2214060 - RNA, 13 nt, Human
cuugagaaaccuu

SEQ ID NO: 2214061 - RNA, 15 nt, Human
cuucugggagggcag

SEQ ID NO: 2214062 - RNA, 20 nt, Human
cuucuggcuuccuucucuca

SEQ ID NO: 2214063 - RNA, 14 nt, Human
cuucuggcuuccuu

SEQ ID NO: 2214064 - RNA, 14 nt, Human
cuugagcccaggag

SEQ ID NO: 2214065 - RNA, 15 nt, Human
cuugagcccaggagu

SEQ ID NO: 2214066 - RNA, 22 nt, Human
cuugagacuguuuugaauuugg

SEQ ID NO: 2214067 - RNA, 14 nt, Human
cuugagagaccagg

SEQ ID NO: 2214068 - RNA, 17 nt, Human
cuugagacuguuuugaa

SEQ ID NO: 2214069 - RNA, 18 nt, Human
cuugagaccucagccaug

SEQ ID NO: 2214070 - RNA, 13 nt, Human
cuugagcccagga

SEQ ID NO: 2214071 - RNA, 16 nt, Human
cuugagagaccaggca

SEQ ID NO: 2214072 - RNA, 15 nt, Human
cuugagccugggagg

SEQ ID NO: 2214073 - RNA, 12 nt, Human
cuugagccuggg

SEQ ID NO: 2214074 - RNA, 15 nt, Human
cuugaggguugggcu

SEQ ID NO: 2214075 - RNA, 17 nt, Human
cuugaggguugggcugg

SEQ ID NO: 2214076 - RNA, 20 nt, Human
cuugagccgggccccugggc

SEQ ID NO: 2214077 - RNA, 17 nt, Human
cuugagccgggccccug

SEQ ID NO: 2214078 - RNA, 19 nt, Human
cuugagccgggccccuggg

SEQ ID NO: 2214079 - RNA, 19 nt, Human
cuugaguugauucagcucu

SEQ ID NO: 2214080 - RNA, 18 nt, Human
cuugaguugauucagcuc

SEQ ID NO: 2214081 - RNA, 20 nt, Human
cuugaguugauucagcucug

SEQ ID NO: 2214082 - RNA, 21 nt, Human
cuugaguugauucagcucugc

SEQ ID NO: 2214083 - RNA, 15 nt, Human
cuugcaauggcagcc

SEQ ID NO: 2214084 - RNA, 16 nt, Human
cuugcaauggcagccu

SEQ ID NO: 2214085 - RNA, 17 nt, Human
cuugcaauggcagccuu

SEQ ID NO: 2214086 - RNA, 18 nt, Human
cuugcaauggcagccuug

SEQ ID NO: 2214087 - RNA, 22 nt, Human
cuugcagcacucacacaggacc

SEQ ID NO: 2214088 - RNA, 23 nt, Human
cuugcagcacucacacaggaccc

SEQ ID NO: 2214089 - RNA, 12 nt, Human
cuugcagcagga

SEQ ID NO: 2214090 - RNA, 13 nt, Human
cuugcagcaggau

SEQ ID NO: 2214091 - RNA, 23 nt, Human
cuugcagcaggaucuagaggggg

SEQ ID NO: 2214092 - RNA, 19 nt, Human
cuugcauccaacuccagga

SEQ ID NO: 2214093 - RNA, 18 nt, Human
cuugcagcacucacacag

SEQ ID NO: 2214094 - RNA, 18 nt, Human
cuugcacccgccucuccc

SEQ ID NO: 2214095 - RNA, 19 nt, Human
cuugcagcacucacacagg

SEQ ID NO: 2214096 - RNA, 20 nt, Human
cuugcaccccucacucuggc

SEQ ID NO: 2214097 - RNA, 15 nt, Human
cuugcacccgccucu

SEQ ID NO: 2214098 - RNA, 16 nt, Human
cuugcacccgccucuc

SEQ ID NO: 2214099 - RNA, 17 nt, Human
cuugcacccgccucucc

SEQ ID NO: 2214100 - RNA, 21 nt, Human
cuugcagacucuacagaggcc

SEQ ID NO: 2214101 - RNA, 20 nt, Human
cuugcagacucuacagaggc

SEQ ID NO: 2214102 - RNA, 22 nt, Human
cuugcaccccaaagcuuuccug

SEQ ID NO: 2214103 - RNA, 23 nt, Human
cuugcaccccaaagcuuuccugc

SEQ ID NO: 2214104 - RNA, 14 nt, Human
cuugcaccccucac

SEQ ID NO: 2214105 - RNA, 16 nt, Human
cuugcaccccucacuc

SEQ ID NO: 2214106 - RNA, 18 nt, Human
cuugcaccccucacucug

SEQ ID NO: 2214107 - RNA, 22 nt, Human
cuugcacacuccccugcacugg

SEQ ID NO: 2214108 - RNA, 19 nt, Human
cuugcacacuccccugcac

SEQ ID NO: 2214109 - RNA, 23 nt, Human
cuugcacacuccccugcacugga

SEQ ID NO: 2214110 - RNA, 17 nt, Human
cuugcaauuucuaccua

SEQ ID NO: 2214111 - RNA, 14 nt, Human
cuuuugaacccagg

SEQ ID NO: 2214112 - RNA, 13 nt, Human
cuuuugaacccag

SEQ ID NO: 2214113 - RNA, 14 nt, Human
cuuuucuuuuucuc

SEQ ID NO: 2214114 - RNA, 13 nt, Human
cuuuugaaacaau

SEQ ID NO: 2214115 - RNA, 16 nt, Human
cuuuugaaacaauacu

SEQ ID NO: 2214116 - RNA, 14 nt, Human
cuuuugaaaucugu

SEQ ID NO: 2214117 - RNA, 15 nt, Human
cuuuucuuaaaccuu

SEQ ID NO: 2214118 - RNA, 16 nt, Human
cuuuucuuaaaccuuc

SEQ ID NO: 2214119 - RNA, 13 nt, Human
cuuuucugcauuu

SEQ ID NO: 2214120 - RNA, 14 nt, Human
cuuuucugcauuuu

SEQ ID NO: 2214121 - RNA, 20 nt, Human
cuuuucugcauuuugcuauu

SEQ ID NO: 2214122 - RNA, 13 nt, Human
cuuuucugcccug

SEQ ID NO: 2214123 - RNA, 15 nt, Human
cuuuucugcagaggg

SEQ ID NO: 2214124 - RNA, 12 nt, Human
cuuuucugcaga

SEQ ID NO: 2214125 - RNA, 15 nt, Human
cuuuucuguuugcua

SEQ ID NO: 2214126 - RNA, 14 nt, Human
cuuuucugcccugg

SEQ ID NO: 2214127 - RNA, 15 nt, Human
cuuuucugcccuggc

SEQ ID NO: 2214128 - RNA, 17 nt, Human
cuuuucugcccuggcug

SEQ ID NO: 2214129 - RNA, 16 nt, Human
cuuuucugucucugcc

SEQ ID NO: 2214130 - RNA, 17 nt, Human
cuuuucugucucugccu

SEQ ID NO: 2214131 - RNA, 18 nt, Human
cuuuucugucucugccuc

SEQ ID NO: 2214132 - RNA, 21 nt, Human
cuuuucugucucugccucccu

SEQ ID NO: 2214133 - RNA, 21 nt, Human
cuuuguuuguugucagcugaa

SEQ ID NO: 2214134 - RNA, 17 nt, Human
cuuuguuuuacugucuu

SEQ ID NO: 2214135 - RNA, 21 nt, Human
cuuuguugcaaguacugcugu

SEQ ID NO: 2214136 - RNA, 16 nt, Human
cuuuguugcccaggcu

SEQ ID NO: 2214137 - RNA, 17 nt, Human
cuuuguguagcuuugcu

SEQ ID NO: 2214138 - RNA, 20 nt, Human
cuuuguucuuuaggagauuu

SEQ ID NO: 2214139 - RNA, 24 nt, Human
cuuuguuuugauguuuguggccuc

SEQ ID NO: 2214140 - RNA, 19 nt, Human
cuuuguuuugcacacuuug

SEQ ID NO: 2214141 - RNA, 23 nt, Human
cuuuguuuugcacacuuugccau

SEQ ID NO: 2214142 - RNA, 23 nt, Human
cuuuguuuugauguuuguggccu

SEQ ID NO: 2214143 - RNA, 19 nt, Human
cuuuguuuugauguuugug

SEQ ID NO: 2214144 - RNA, 20 nt, Human
cuuuuugagguggcacuuuu

SEQ ID NO: 2214145 - RNA, 18 nt, Human
cuuuuugagguggcacuu

SEQ ID NO: 2214146 - RNA, 13 nt, Human
cuuuuugcuuucg

SEQ ID NO: 2214147 - RNA, 18 nt, Human
cuuuuuuaaaugaagaaa

SEQ ID NO: 2214148 - RNA, 15 nt, Human
cuuuuuggaggugcu

SEQ ID NO: 2214149 - RNA, 11 nt, Human
cuuuuugaaug

SEQ ID NO: 2214150 - RNA, 19 nt, Human
cuuuuugaauguuauuugu

SEQ ID NO: 2214151 - RNA, 23 nt, Human
cuuuuugaaguguaggcagacac

SEQ ID NO: 2214152 - RNA, 12 nt, Human
cuuuuugaagug

SEQ ID NO: 2214153 - RNA, 16 nt, Human
cuuuuuaaaguguuuc

SEQ ID NO: 2214154 - RNA, 13 nt, Human
cuuuuugaagugu

SEQ ID NO: 2214155 - RNA, 21 nt, Human
cuuuuugaaguguaggcagac

SEQ ID NO: 2214156 - RNA, 22 nt, Human
cuuuuugaaguguaggcagaca

SEQ ID NO: 2214157 - RNA, 17 nt, Human
cuuuuucauauguugcu

SEQ ID NO: 2214158 - RNA, 20 nt, Human
cuuuugaacccaggaguuca

SEQ ID NO: 2214159 - RNA, 18 nt, Human
cuuuugaacccaggaguu

SEQ ID NO: 2214160 - RNA, 21 nt, Human
cuuuugaacgcccccccccac

SEQ ID NO: 2214161 - RNA, 20 nt, Human
cuuuugaaguaguuuguaua

SEQ ID NO: 2214162 - RNA, 23 nt, Human
cuuuugaauccaugcuugggugu

SEQ ID NO: 2214163 - RNA, 21 nt, Human
cuuuugaauccaugcuugggu

SEQ ID NO: 2214164 - RNA, 20 nt, Human
cuuuugaauccaugcuuggg

SEQ ID NO: 2214165 - RNA, 19 nt, Human
cuuuugaauccaugcuugg

SEQ ID NO: 2214166 - RNA, 13 nt, Human
cuuuugaauauuc

SEQ ID NO: 2214167 - RNA, 21 nt, Human
cuuuugaauaaaaacuuugcu

SEQ ID NO: 2214168 - RNA, 22 nt, Human
cuuuugaaguaguuuguauaac

SEQ ID NO: 2214169 - RNA, 22 nt, Human
cuuuuguucuugguuuguaaau

SEQ ID NO: 2214170 - RNA, 17 nt, Human
cuuuugacaaaggcaag

SEQ ID NO: 2214171 - RNA, 19 nt, Human
cuuuuuaaaaauagacacu

SEQ ID NO: 2214172 - RNA, 15 nt, Human
cuuuuuauuugcaug

SEQ ID NO: 2214173 - RNA, 16 nt, Human
cuuuuuauuucugcau

SEQ ID NO: 2214174 - RNA, 13 nt, Human
cuuuuuauuucug

SEQ ID NO: 2214175 - RNA, 14 nt, Human
cuuuuuauuugcau

SEQ ID NO: 2214176 - RNA, 13 nt, Human
cuuuuuauuugca

SEQ ID NO: 2214177 - RNA, 13 nt, Human
gaaaaccucuccu

SEQ ID NO: 2214178 - RNA, 14 nt, Human
gaaaacguggcugc

SEQ ID NO: 2214179 - RNA, 14 nt, Human
gaaaacggagcuga

SEQ ID NO: 2214180 - RNA, 13 nt, Human
gaaaacggagcug

SEQ ID NO: 2214181 - RNA, 18 nt, Human
gaaaagggaacugaacau

SEQ ID NO: 2214182 - RNA, 17 nt, Human
gaaaacgguuaaaacug

SEQ ID NO: 2214183 - RNA, 21 nt, Human
gaaaagggagauucagacugu

SEQ ID NO: 2214184 - RNA, 19 nt, Human
gaaaagggaaguugugccu

SEQ ID NO: 2214185 - RNA, 17 nt, Human
gaaaagguaaggugaag

SEQ ID NO: 2214186 - RNA, 19 nt, Human
gaaaacgucuugcuuggga

SEQ ID NO: 2214187 - RNA, 21 nt, Human
gaaaagggucuugggaaauau

SEQ ID NO: 2214188 - RNA, 15 nt, Human
gaaaacauguaauaa

SEQ ID NO: 2214189 - RNA, 13 nt, Human
gaaaacauuccau

SEQ ID NO: 2214190 - RNA, 14 nt, Human
gaaaacaaggaagu

SEQ ID NO: 2214191 - RNA, 19 nt, Human
gaaaacaugcuacacacug

SEQ ID NO: 2214192 - RNA, 14 nt, Human
gaaaaccccagcau

SEQ ID NO: 2214193 - RNA, 22 nt, Human
gaaaacccagagaggaaucaga

SEQ ID NO: 2214194 - RNA, 15 nt, Human
gaaaacccagagagg

SEQ ID NO: 2214195 - RNA, 14 nt, Human
gaaaacccagagag

SEQ ID NO: 2214196 - RNA, 17 nt, Human
gaaaacauuccauccuu

SEQ ID NO: 2214197 - RNA, 21 nt, Human
gaaaaccuaaguccuuuaugu

SEQ ID NO: 2214198 - RNA, 14 nt, Human
gaaaaguacauuua

SEQ ID NO: 2214199 - RNA, 16 nt, Human
gaaaaguacauuuaau

SEQ ID NO: 2214200 - RNA, 20 nt, Human
gaaaaguauguuagugcaaa

SEQ ID NO: 2214201 - RNA, 21 nt, Human
gaaaaguaaggugcaguuccc

SEQ ID NO: 2214202 - RNA, 17 nt, Human
gaaaagguuuuauuuug

SEQ ID NO: 2214203 - RNA, 18 nt, Human
gaaaagguuuuauuuugu

SEQ ID NO: 2214204 - RNA, 14 nt, Human
gaaaagguuuuauu

SEQ ID NO: 2214205 - RNA, 14 nt, Human
gaaaaguauguuag

SEQ ID NO: 2214206 - RNA, 22 nt, Human
gaaaagucaaggguaggguggg

SEQ ID NO: 2214207 - RNA, 13 nt, Human
gaaaagucaaacu

SEQ ID NO: 2214208 - RNA, 14 nt, Human
gaaaagucaaacug

SEQ ID NO: 2214209 - RNA, 16 nt, Human
gaaaauaaaaaguuaa

SEQ ID NO: 2214210 - RNA, 15 nt, Human
gaaaauaaaaaguua

SEQ ID NO: 2214211 - RNA, 19 nt, Human
gaaaauaacaauaaaagac

SEQ ID NO: 2214212 - RNA, 15 nt, Human
cuuuuuuacacaaau

SEQ ID NO: 2214213 - RNA, 20 nt, Human
cuuuuuuaagauuuuucuca

SEQ ID NO: 2214214 - RNA, 21 nt, Human
cuuuuuuaagauuuuucucaa

SEQ ID NO: 2214215 - RNA, 16 nt, Human
cuuuuuuagaguugau

SEQ ID NO: 2214216 - RNA, 11 nt, Human
gaaaaauauga

SEQ ID NO: 2214217 - RNA, 10 nt, Human
gaaaaauaug

SEQ ID NO: 2214218 - RNA, 14 nt, Human
cuuuuuuauacaca

SEQ ID NO: 2214219 - RNA, 19 nt, Human
cuuuuuuauacacauaauu

SEQ ID NO: 2214220 - RNA, 15 nt, Human
cuuuuuuauacacau

SEQ ID NO: 2214221 - RNA, 18 nt, Human
gaaaaauuuaagcauugu

SEQ ID NO: 2214222 - RNA, 17 nt, Human
gaaaaauuuaagcauug

SEQ ID NO: 2214223 - RNA, 16 nt, Human
gaaaaauuuaagcauu

SEQ ID NO: 2214224 - RNA, 15 nt, Human
gaaaaauuccuauug

SEQ ID NO: 2214225 - RNA, 20 nt, Human
gaaaaauuccuauugugauu

SEQ ID NO: 2214226 - RNA, 18 nt, Human
gaaaaauccagaaagaaa

SEQ ID NO: 2214227 - RNA, 17 nt, Human
gaaaaauccagaaagaa

SEQ ID NO: 2214228 - RNA, 13 nt, Human
gaaaaauccucuu

SEQ ID NO: 2214229 - RNA, 18 nt, Human
gaaaaauccucuuccucu

SEQ ID NO: 2214230 - RNA, 11 nt, Human
gaaaaauuccu

SEQ ID NO: 2214231 - RNA, 20 nt, Human
gaaaaauccucuuccucuga

SEQ ID NO: 2214232 - RNA, 15 nt, Human
gaaaaauaugauauu

SEQ ID NO: 2214233 - RNA, 14 nt, Human
gaaaaauauuuaag

SEQ ID NO: 2214234 - RNA, 13 nt, Human
gaaaaauauuuaa

SEQ ID NO: 2214235 - RNA, 19 nt, Human
gaaaaaucacauccuggcc

SEQ ID NO: 2214236 - RNA, 12 nt, Human
gaaaacaaggaa

SEQ ID NO: 2214237 - RNA, 19 nt, Human
gaaaacacuguucucugcc

SEQ ID NO: 2214238 - RNA, 22 nt, Human
gaaaaauuuaagcauuguuugc

SEQ ID NO: 2214239 - RNA, 20 nt, Human
gaaaaauuuaagcauuguuu

SEQ ID NO: 2214240 - RNA, 19 nt, Human
gaaaaauuuaagcauuguu

SEQ ID NO: 2214241 - RNA, 14 nt, Human
gaaaacaaggauga

SEQ ID NO: 2214242 - RNA, 18 nt, Human
gaaaacaugcuacacacu

SEQ ID NO: 2214243 - RNA, 16 nt, Human
gaaaacaugcuacaca

SEQ ID NO: 2214244 - RNA, 20 nt, Human
gaaaacacuguucucugccc

SEQ ID NO: 2214245 - RNA, 21 nt, Human
gaaaacacuguucucugcccu

SEQ ID NO: 2214246 - RNA, 14 nt, Human
cuuugcauuuugga

SEQ ID NO: 2214247 - RNA, 19 nt, Human
cuuugcauuuuaaaaauga

SEQ ID NO: 2214248 - RNA, 22 nt, Human
cuuugcauuuuaaaaaugaaau

SEQ ID NO: 2214249 - RNA, 18 nt, Human
cuuugccacccucaugcu

SEQ ID NO: 2214250 - RNA, 17 nt, Human
cuuugccacccucaugc

SEQ ID NO: 2214251 - RNA, 16 nt, Human
cuuugccacccucaug

SEQ ID NO: 2214252 - RNA, 21 nt, Human
cuuugaccucaaccugugaug

SEQ ID NO: 2214253 - RNA, 21 nt, Human
cuuugcauggagacuugagga

SEQ ID NO: 2214254 - RNA, 21 nt, Human
cuuugcauggaauuuguaagu

SEQ ID NO: 2214255 - RNA, 20 nt, Human
cuuugcauguuccacuaacc

SEQ ID NO: 2214256 - RNA, 22 nt, Human
cuuugcauguuccacuaacccc

SEQ ID NO: 2214257 - RNA, 12 nt, Human
cuuugcauuuua

SEQ ID NO: 2214258 - RNA, 17 nt, Human
cuuugaauuuucugugu

SEQ ID NO: 2214259 - RNA, 19 nt, Human
cuuugacaaagguaaauca

SEQ ID NO: 2214260 - RNA, 18 nt, Human
cuuugaccucaaccugug

SEQ ID NO: 2214261 - RNA, 17 nt, Human
cuuugaccucaaccugu

SEQ ID NO: 2214262 - RNA, 22 nt, Human
cuuugcauaacguauaaaagcc

SEQ ID NO: 2214263 - RNA, 14 nt, Human
cuuugcuugcagua

SEQ ID NO: 2214264 - RNA, 20 nt, Human
cuuugcuucaaauccaucca

SEQ ID NO: 2214265 - RNA, 19 nt, Human
cuuugcuugcaguagauuu

SEQ ID NO: 2214266 - RNA, 15 nt, Human
cuuugcuucccauug

SEQ ID NO: 2214267 - RNA, 14 nt, Human
cuuugcuugaaaga

SEQ ID NO: 2214268 - RNA, 16 nt, Human
cuuugcuuucugcuca

SEQ ID NO: 2214269 - RNA, 15 nt, Human
cuuugcuuucugcuc

SEQ ID NO: 2214270 - RNA, 14 nt, Human
cuuugcuuucugcu

SEQ ID NO: 2214271 - RNA, 13 nt, Human
cuuugcuuucugc

SEQ ID NO: 2214272 - RNA, 12 nt, Human
cuuugcuuucug

SEQ ID NO: 2214273 - RNA, 17 nt, Human
cuuugcuugccucucug

SEQ ID NO: 2214274 - RNA, 20 nt, Human
cuuugcuugccucucuguuu

SEQ ID NO: 2214275 - RNA, 12 nt, Human
cuuuggaaagac

SEQ ID NO: 2214276 - RNA, 11 nt, Human
cuuugcuuugc

SEQ ID NO: 2214277 - RNA, 21 nt, Human
cuuugcuuucugcucagcuuc

SEQ ID NO: 2214278 - RNA, 19 nt, Human
cuuugcuuucugcucagcu

SEQ ID NO: 2214279 - RNA, 17 nt, Human
cuuugcuuucugcucag

SEQ ID NO: 2214280 - RNA, 17 nt, Human
cuuugcuuugcuuucug

SEQ ID NO: 2214281 - RNA, 19 nt, Human
cuuuggaaaaugcauugua

SEQ ID NO: 2214282 - RNA, 16 nt, Human
cuuugcuuugcccagc

SEQ ID NO: 2214283 - RNA, 23 nt, Human
cuuuggaaagacuuuuccaaccc

SEQ ID NO: 2214284 - RNA, 14 nt, Human
cuuuggcagaguuc

SEQ ID NO: 2214285 - RNA, 13 nt, Human
cuuuggcaggugc

SEQ ID NO: 2214286 - RNA, 18 nt, Human
cuuuggcacuggggcacu

SEQ ID NO: 2214287 - RNA, 24 nt, Human
cuuuggcaggugcagcccccacug

SEQ ID NO: 2214288 - RNA, 23 nt, Human
cuuugggaggccaaggugggagg

SEQ ID NO: 2214289 - RNA, 21 nt, Human
cuuuggaaaaugcauuguauc

SEQ ID NO: 2214290 - RNA, 20 nt, Human
cuuuggaaaaugcauuguau

SEQ ID NO: 2214291 - RNA, 15 nt, Human
cuuuggauuugacau

SEQ ID NO: 2214292 - RNA, 13 nt, Human
cuuuggauuugac

SEQ ID NO: 2214293 - RNA, 17 nt, Human
cuuuggaaacaggacca

SEQ ID NO: 2214294 - RNA, 12 nt, Human
cuuuggcacugg

SEQ ID NO: 2214295 - RNA, 17 nt, Human
cuuuggcacuggggcac

SEQ ID NO: 2214296 - RNA, 17 nt, Human
cuuuggauuugacauug

SEQ ID NO: 2214297 - RNA, 16 nt, Human
cuuuggauuugacauu

SEQ ID NO: 2214298 - RNA, 18 nt, Human
cuuugggaggcugaggcg

SEQ ID NO: 2214299 - RNA, 17 nt, Human
cuuugggaggcugaggc

SEQ ID NO: 2214300 - RNA, 14 nt, Human
cuuugggaggcuga

SEQ ID NO: 2214301 - RNA, 17 nt, Human
cuuuggccauuccaaca

SEQ ID NO: 2214302 - RNA, 21 nt, Human
cuuugggccagacaugccaca

SEQ ID NO: 2214303 - RNA, 13 nt, Human
cuuugggcccagg

SEQ ID NO: 2214304 - RNA, 15 nt, Human
cuuugggcccaggga

SEQ ID NO: 2214305 - RNA, 13 nt, Human
cuuugggccagac

SEQ ID NO: 2214306 - RNA, 12 nt, Human
cuuugggccaga

SEQ ID NO: 2214307 - RNA, 17 nt, Human
cuuugggccuggcuccc

SEQ ID NO: 2214308 - RNA, 16 nt, Human
cuuugggcccagggac

SEQ ID NO: 2214309 - RNA, 22 nt, Human
cuuugggcccagggacaccagc

SEQ ID NO: 2214310 - RNA, 23 nt, Human
cuuugggcccagggacaccagcc

SEQ ID NO: 2214311 - RNA, 23 nt, Human
cuuugugaggaagccgcuggggc

SEQ ID NO: 2214312 - RNA, 13 nt, Human
cuuuguggcuucc

SEQ ID NO: 2214313 - RNA, 13 nt, Human
cuuuguggccaag

SEQ ID NO: 2214314 - RNA, 12 nt, Human
cuuuguggccaa

SEQ ID NO: 2214315 - RNA, 11 nt, Human
cuuuguggcca

SEQ ID NO: 2214316 - RNA, 18 nt, Human
cuuugugauuauuucacu

SEQ ID NO: 2214317 - RNA, 23 nt, Human
cuuugugauucaaucuguaaacu

SEQ ID NO: 2214318 - RNA, 22 nt, Human
cuuugugauucaaucuguaaac

SEQ ID NO: 2214319 - RNA, 12 nt, Human
cuuugugauuuu

SEQ ID NO: 2214320 - RNA, 19 nt, Human
cuuugugaggaagccgcug

SEQ ID NO: 2214321 - RNA, 17 nt, Human
cuuugugauuauuucac

SEQ ID NO: 2214322 - RNA, 16 nt, Human
cuuuguucuggcucuu

SEQ ID NO: 2214323 - RNA, 21 nt, Human
cuuuguucuggcucuuccagg

SEQ ID NO: 2214324 - RNA, 22 nt, Human
cuuuguggccaaggagcugcua

SEQ ID NO: 2214325 - RNA, 16 nt, Human
cuuuguguagcuuugc

SEQ ID NO: 2214326 - RNA, 18 nt, Human
cuuuguguagcuuugcuc

SEQ ID NO: 2214327 - RNA, 21 nt, Human
cuuuguggccaaggagcugcu

SEQ ID NO: 2214328 - RNA, 20 nt, Human
cuuuguggccaaggagcugc

SEQ ID NO: 2214329 - RNA, 18 nt, Human
cuuuguggccaaggagcu

SEQ ID NO: 2214330 - RNA, 16 nt, Human
cuuuguggccaaggag

SEQ ID NO: 2214331 - RNA, 15 nt, Human
cuuuguggccaagga

SEQ ID NO: 2214332 - RNA, 14 nt, Human
cuuuguggccaagg

SEQ ID NO: 2214333 - RNA, 22 nt, Human
cuuugaaacaagauaacugaga

SEQ ID NO: 2214334 - RNA, 17 nt, Human
cuuugacaaagguaaau

SEQ ID NO: 2214335 - RNA, 19 nt, Human
cuuucuuuuuuuuuuuuga

SEQ ID NO: 2214336 - RNA, 20 nt, Human
cuuucuuuuucuucuucccu

SEQ ID NO: 2214337 - RNA, 16 nt, Human
cuuucuucuauuuuau

SEQ ID NO: 2214338 - RNA, 14 nt, Human
cuuucuucucugcu

SEQ ID NO: 2214339 - RNA, 21 nt, Human
cuuucuugaucaacaucuuuu

SEQ ID NO: 2214340 - RNA, 22 nt, Human
cuuucuugaucaacaucuuuuc

SEQ ID NO: 2214341 - RNA, 14 nt, Human
cuuucuuggccagu

SEQ ID NO: 2214342 - RNA, 13 nt, Human
cuuucuuggccag

SEQ ID NO: 2214343 - RNA, 21 nt, Human
cuuucuugcugguugucauuu

SEQ ID NO: 2214344 - RNA, 16 nt, Human
cuuucuugcugguugu

SEQ ID NO: 2214345 - RNA, 20 nt, Human
cuuucuugguucauaaauga

SEQ ID NO: 2214346 - RNA, 21 nt, Human
cuuucuugguucauaaaugaa

SEQ ID NO: 2214347 - RNA, 14 nt, Human
cuuucuuuuucuuc

SEQ ID NO: 2214348 - RNA, 15 nt, Human
cuuucuuuuucuucu

SEQ ID NO: 2214349 - RNA, 16 nt, Human
cuuucuuuuucuucuu

SEQ ID NO: 2214350 - RNA, 18 nt, Human
cuuucuuuugauucuucc

SEQ ID NO: 2214351 - RNA, 22 nt, Human
cuuucuugguucauaaaugaau

SEQ ID NO: 2214352 - RNA, 15 nt, Human
cuuucuuuaccugag

SEQ ID NO: 2214353 - RNA, 15 nt, Human
cuuucugcagaaaca

SEQ ID NO: 2214354 - RNA, 11 nt, Human
cuuucugccug

SEQ ID NO: 2214355 - RNA, 14 nt, Human
cuuucugccucuca

SEQ ID NO: 2214356 - RNA, 15 nt, Human
cuuucugccucucaa

SEQ ID NO: 2214357 - RNA, 12 nt, Human
cuuucugccugg

SEQ ID NO: 2214358 - RNA, 14 nt, Human
cuuucugccuggag

SEQ ID NO: 2214359 - RNA, 18 nt, Human
cuuucuguauauacuuuu

SEQ ID NO: 2214360 - RNA, 17 nt, Human
cuuucugcucagcuucu

SEQ ID NO: 2214361 - RNA, 16 nt, Human
cuuucugcucagcuuc

SEQ ID NO: 2214362 - RNA, 14 nt, Human
cuuucugcucagcu

SEQ ID NO: 2214363 - RNA, 13 nt, Human
cuuucugcucagc

SEQ ID NO: 2214364 - RNA, 15 nt, Human
cuuucugccuggagu

SEQ ID NO: 2214365 - RNA, 20 nt, Human
cuuucuguauauacuuuuuu

SEQ ID NO: 2214366 - RNA, 19 nt, Human
cuuucuguauauacuuuuu

SEQ ID NO: 2214367 - RNA, 23 nt, Human
cuuucugucccuucugucccuca

SEQ ID NO: 2214368 - RNA, 18 nt, Human
cuuucugucccuucuguc

SEQ ID NO: 2214369 - RNA, 19 nt, Human
cuuucuguccuuuuggcac

SEQ ID NO: 2214370 - RNA, 16 nt, Human
cuuucuguauugagua

SEQ ID NO: 2214371 - RNA, 14 nt, Human
cuuucugucucucu

SEQ ID NO: 2214372 - RNA, 21 nt, Human
cuuucugugugcaccuuacca

SEQ ID NO: 2214373 - RNA, 12 nt, Human
cuuucugugugc

SEQ ID NO: 2214374 - RNA, 15 nt, Human
cuuucugugugcacc

SEQ ID NO: 2214375 - RNA, 15 nt, Human
cuuucuucuauuuua

SEQ ID NO: 2214376 - RNA, 16 nt, Human
cuuucuuccucugcug

SEQ ID NO: 2214377 - RNA, 13 nt, Human
cuuuagaguagca

SEQ ID NO: 2214378 - RNA, 15 nt, Human
cuuguuggagccugc

SEQ ID NO: 2214379 - RNA, 17 nt, Human
cuuuagaguuagacugu

SEQ ID NO: 2214380 - RNA, 20 nt, Human
cuuuagaguuagacuguugg

SEQ ID NO: 2214381 - RNA, 18 nt, Human
cuuuaggcagcagcuuuu

SEQ ID NO: 2214382 - RNA, 21 nt, Human
cuuuaggagggaguuaucuaa

SEQ ID NO: 2214383 - RNA, 19 nt, Human
cuuuagagaaguauacaua

SEQ ID NO: 2214384 - RNA, 14 nt, Human
cuuuagaguuagac

SEQ ID NO: 2214385 - RNA, 19 nt, Human
cuuuagagcauugccauuc

SEQ ID NO: 2214386 - RNA, 23 nt, Human
cuuuagagcauugccauucccug

SEQ ID NO: 2214387 - RNA, 22 nt, Human
cuuuagagaaguauacauaagu

SEQ ID NO: 2214388 - RNA, 17 nt, Human
cuuuagagcauugccau

SEQ ID NO: 2214389 - RNA, 18 nt, Human
cuuuagagcauugccauu

SEQ ID NO: 2214390 - RNA, 15 nt, Human
cuuuagucgcugagg

SEQ ID NO: 2214391 - RNA, 19 nt, Human
cuuuaguaccugaaaagua

SEQ ID NO: 2214392 - RNA, 21 nt, Human
cuuuccucaggcaaggucugg

SEQ ID NO: 2214393 - RNA, 18 nt, Human
cuuuagggcagcuugccc

SEQ ID NO: 2214394 - RNA, 17 nt, Human
cuuuaguaccugaaaag

SEQ ID NO: 2214395 - RNA, 22 nt, Human
cuuuaguaccugaaaaguaacu

SEQ ID NO: 2214396 - RNA, 19 nt, Human
cuuuccucaaaacuucaga

SEQ ID NO: 2214397 - RNA, 13 nt, Human
cuuuagggcagcu

SEQ ID NO: 2214398 - RNA, 14 nt, Human
cuuuagggcagcuu

SEQ ID NO: 2214399 - RNA, 15 nt, Human
cuuuagggcagcuug

SEQ ID NO: 2214400 - RNA, 16 nt, Human
cuuuagggcagcuugc

SEQ ID NO: 2214401 - RNA, 15 nt, Human
cuuuaggcauuaaau

SEQ ID NO: 2214402 - RNA, 21 nt, Human
cuuuagggacucaauuucucc

SEQ ID NO: 2214403 - RNA, 23 nt, Human
cuuuagggacucaauuucucccc

SEQ ID NO: 2214404 - RNA, 23 nt, Human
cuuuaggcauuaaauuuuagcaa

SEQ ID NO: 2214405 - RNA, 19 nt, Human
cuuuccucuuccccuugcc

SEQ ID NO: 2214406 - RNA, 20 nt, Human
cuuucugaagccucacuuau

SEQ ID NO: 2214407 - RNA, 21 nt, Human
cuuucugauaacuagauggug

SEQ ID NO: 2214408 - RNA, 23 nt, Human
cuuucugauaacuagauggugcu

SEQ ID NO: 2214409 - RNA, 21 nt, Human
cuuucugagcacacuuuagug

SEQ ID NO: 2214410 - RNA, 17 nt, Human
cuuucugagcacacuuu

SEQ ID NO: 2214411 - RNA, 20 nt, Human
cuuucugagcacacuuuagu

SEQ ID NO: 2214412 - RNA, 13 nt, Human
cuuucugaaauaa

SEQ ID NO: 2214413 - RNA, 16 nt, Human
cuuuccucuuuggucu

SEQ ID NO: 2214414 - RNA, 14 nt, Human
cuuuccuccuucca

SEQ ID NO: 2214415 - RNA, 13 nt, Human
cuuuccuccuucc

SEQ ID NO: 2214416 - RNA, 16 nt, Human
cuuuccuccuuccaug

SEQ ID NO: 2214417 - RNA, 16 nt, Human
cuuuccuccuggcaga

SEQ ID NO: 2214418 - RNA, 13 nt, Human
cuuuccucuuccc

SEQ ID NO: 2214419 - RNA, 14 nt, Human
cuuuccucuucccc

SEQ ID NO: 2214420 - RNA, 13 nt, Human
cuuuccucgccug

SEQ ID NO: 2214421 - RNA, 18 nt, Human
cuucguuuacuaugccug

SEQ ID NO: 2214422 - RNA, 21 nt, Human
cuucguuuacuaugccugugu

SEQ ID NO: 2214423 - RNA, 19 nt, Human
cuucguuuacuaugccugu

SEQ ID NO: 2214424 - RNA, 18 nt, Human
cuucguuuauuuucaaga

SEQ ID NO: 2214425 - RNA, 16 nt, Human
cuucguuuauuuucaa

SEQ ID NO: 2214426 - RNA, 15 nt, Human
cuucguuuauuuuca

SEQ ID NO: 2214427 - RNA, 18 nt, Human
cuucuaaacuuccccauc

SEQ ID NO: 2214428 - RNA, 19 nt, Human
cuucuaaacccaauccaaa

SEQ ID NO: 2214429 - RNA, 15 nt, Human
cuucuaaagguguug

SEQ ID NO: 2214430 - RNA, 22 nt, Human
cuucuaaagguguugucccuuc

SEQ ID NO: 2214431 - RNA, 21 nt, Human
cuucuaaagguguugucccuu

SEQ ID NO: 2214432 - RNA, 22 nt, Human
cuucuaaacuuccccaucuucu

SEQ ID NO: 2214433 - RNA, 19 nt, Human
cuucuaaacuuccccaucu

SEQ ID NO: 2214434 - RNA, 14 nt, Human
cuucucagcuccca

SEQ ID NO: 2214435 - RNA, 14 nt, Human
cuucucagaaucua

SEQ ID NO: 2214436 - RNA, 18 nt, Human
cuucucagaaucuaccca

SEQ ID NO: 2214437 - RNA, 21 nt, Human
cuucucaggcucugcccugcc

SEQ ID NO: 2214438 - RNA, 20 nt, Human
cuucucaggcucugcccugc

SEQ ID NO: 2214439 - RNA, 19 nt, Human
cuucucaggcucugcccug

SEQ ID NO: 2214440 - RNA, 16 nt, Human
cuucucaggcucugcc

SEQ ID NO: 2214441 - RNA, 15 nt, Human
cuucucaggcucugc

SEQ ID NO: 2214442 - RNA, 13 nt, Human
cuucucaggcucu

SEQ ID NO: 2214443 - RNA, 22 nt, Human
cuucucaggcaugaacauguac

SEQ ID NO: 2214444 - RNA, 15 nt, Human
cuucucauagcauua

SEQ ID NO: 2214445 - RNA, 13 nt, Human
cuucucauagcau

SEQ ID NO: 2214446 - RNA, 22 nt, Human
cuucucaggcucugcccugccc

SEQ ID NO: 2214447 - RNA, 16 nt, Human
cuucucauacguccac

SEQ ID NO: 2214448 - RNA, 22 nt, Human
cuucucauagcauuaacuaauc

SEQ ID NO: 2214449 - RNA, 21 nt, Human
cuucucauuucaccccucccu

SEQ ID NO: 2214450 - RNA, 21 nt, Human
cuucgggaggucgaggcagga

SEQ ID NO: 2214451 - RNA, 20 nt, Human
cuucgggaggucgaggcagg

SEQ ID NO: 2214452 - RNA, 15 nt, Human
cuucgggcugugccc

SEQ ID NO: 2214453 - RNA, 14 nt, Human
cuucgggcugugcc

SEQ ID NO: 2214454 - RNA, 17 nt, Human
cuucgggcccuucccac

SEQ ID NO: 2214455 - RNA, 16 nt, Human
cuucgggcccuuccca

SEQ ID NO: 2214456 - RNA, 23 nt, Human
cuucgagguggaucacagaggcu

SEQ ID NO: 2214457 - RNA, 17 nt, Human
cuucgagcacuguccag

SEQ ID NO: 2214458 - RNA, 17 nt, Human
cuucggccuccauccug

SEQ ID NO: 2214459 - RNA, 19 nt, Human
cuucggccuccauccugag

SEQ ID NO: 2214460 - RNA, 18 nt, Human
cuucggccuccauccuga

SEQ ID NO: 2214461 - RNA, 14 nt, Human
cuucgacucaggau

SEQ ID NO: 2214462 - RNA, 15 nt, Human
cuucgacucaggauc

SEQ ID NO: 2214463 - RNA, 16 nt, Human
cuucgacucaggaucc

SEQ ID NO: 2214464 - RNA, 13 nt, Human
cuucgacugugac

SEQ ID NO: 2214465 - RNA, 18 nt, Human
cuucgacucaggauccag

SEQ ID NO: 2214466 - RNA, 13 nt, Human
cuucgcuccugug

SEQ ID NO: 2214467 - RNA, 14 nt, Human
cuucgcuccugugu

SEQ ID NO: 2214468 - RNA, 15 nt, Human
cuucgcuccuguguc

SEQ ID NO: 2214469 - RNA, 17 nt, Human
cuuccuugcuuaaggua

SEQ ID NO: 2214470 - RNA, 20 nt, Human
cuuccuuggacucauuuuaa

SEQ ID NO: 2214471 - RNA, 20 nt, Human
cuuccuugcuguccuaggcc

SEQ ID NO: 2214472 - RNA, 19 nt, Human
cuuccuugcuguccuaggc

SEQ ID NO: 2214473 - RNA, 19 nt, Human
cuuccuuggacucauuuua

SEQ ID NO: 2214474 - RNA, 15 nt, Human
cuuccuuuugaggga

SEQ ID NO: 2214475 - RNA, 15 nt, Human
cuucgaaaccuggga

SEQ ID NO: 2214476 - RNA, 15 nt, Human
cuuccuuuucccugc

SEQ ID NO: 2214477 - RNA, 16 nt, Human
cuuccuuuucccugcu

SEQ ID NO: 2214478 - RNA, 17 nt, Human
cuuccuuuucccugcuu

SEQ ID NO: 2214479 - RNA, 19 nt, Human
cuuccuuuucccugcuucc

SEQ ID NO: 2214480 - RNA, 20 nt, Human
cuucgaaagcaucauuauuu

SEQ ID NO: 2214481 - RNA, 22 nt, Human
cuuccuuuucccugcuuccagg

SEQ ID NO: 2214482 - RNA, 17 nt, Human
cuuccuugcuguccuag

SEQ ID NO: 2214483 - RNA, 16 nt, Human
cuuccuugcucugcac

SEQ ID NO: 2214484 - RNA, 17 nt, Human
cuuccuugcucugcacc

SEQ ID NO: 2214485 - RNA, 19 nt, Human
cuuccuugcuaaugcacca

SEQ ID NO: 2214486 - RNA, 14 nt, Human
cuuccuugcucucc

SEQ ID NO: 2214487 - RNA, 15 nt, Human
cuuccuugcucuccc

SEQ ID NO: 2214488 - RNA, 15 nt, Human
cuuccuugcucugca

SEQ ID NO: 2214489 - RNA, 22 nt, Human
cuuccuugaccagcagauccca

SEQ ID NO: 2214490 - RNA, 23 nt, Human
cuuccuugagacacggagcccag

SEQ ID NO: 2214491 - RNA, 20 nt, Human
cuuccuugagacacggagcc

SEQ ID NO: 2214492 - RNA, 18 nt, Human
cuuccuugagacacggag

SEQ ID NO: 2214493 - RNA, 16 nt, Human
cuuccuugaccagcag

SEQ ID NO: 2214494 - RNA, 15 nt, Human
cuuccuugaccagca

SEQ ID NO: 2214495 - RNA, 14 nt, Human
cuuccuugaccagc

SEQ ID NO: 2214496 - RNA, 22 nt, Human
cuuccuugaagaacugcaggcc

SEQ ID NO: 2214497 - RNA, 21 nt, Human
cuuccuucccugggcugugcu

SEQ ID NO: 2214498 - RNA, 11 nt, Human
cuuccuucugc

SEQ ID NO: 2214499 - RNA, 18 nt, Human
cuuccuucugccugagcu

SEQ ID NO: 2214500 - RNA, 21 nt, Human
cuuccuugaagaacugcaggc

SEQ ID NO: 2214501 - RNA, 17 nt, Human
cuuccuucccuggcuug

SEQ ID NO: 2214502 - RNA, 15 nt, Human
cuuccuucccuggcu

SEQ ID NO: 2214503 - RNA, 16 nt, Human
cuuccuucccugggcu

SEQ ID NO: 2214504 - RNA, 18 nt, Human
cuuccuucccugggcugu

SEQ ID NO: 2214505 - RNA, 13 nt, Human
cuuccuucccugg

SEQ ID NO: 2214506 - RNA, 14 nt, Human
cuuccuucccuggc

SEQ ID NO: 2214507 - RNA, 21 nt, Human
cuuccuagaaguuacugaaug

SEQ ID NO: 2214508 - RNA, 22 nt, Human
cuuccuagaaguuacugaaugc

SEQ ID NO: 2214509 - RNA, 23 nt, Human
cuuccuacccacaccucugccag

SEQ ID NO: 2214510 - RNA, 14 nt, Human
cuucucucaccucc

SEQ ID NO: 2214511 - RNA, 15 nt, Human
cuucucuacagacuu

SEQ ID NO: 2214512 - RNA, 15 nt, Human
cuucucuagcuggug

SEQ ID NO: 2214513 - RNA, 17 nt, Human
cuucucuagcugguggu

SEQ ID NO: 2214514 - RNA, 15 nt, Human
cuucucucaccuccu

SEQ ID NO: 2214515 - RNA, 16 nt, Human
cuucucucaccuccua

SEQ ID NO: 2214516 - RNA, 18 nt, Human
cuucucucaccuccuaaa

SEQ ID NO: 2214517 - RNA, 15 nt, Human
cuucugccauauucu

SEQ ID NO: 2214518 - RNA, 17 nt, Human
cuucugccauauucugu

SEQ ID NO: 2214519 - RNA, 20 nt, Human
cuucugccauuucugagauc

SEQ ID NO: 2214520 - RNA, 14 nt, Human
cuucucucaucucu

SEQ ID NO: 2214521 - RNA, 16 nt, Human
cuucucucaucucuua

SEQ ID NO: 2214522 - RNA, 21 nt, Human
cuucugccauauucuguuggc

SEQ ID NO: 2214523 - RNA, 19 nt, Human
cuucugcuacuggcaaaag

SEQ ID NO: 2214524 - RNA, 13 nt, Human
cuucugcuacugg

SEQ ID NO: 2214525 - RNA, 11 nt, Human
cuucugcuacu

SEQ ID NO: 2214526 - RNA, 20 nt, Human
cuucucucagacuuacuuua

SEQ ID NO: 2214527 - RNA, 16 nt, Human
cuucugccuucucaug

SEQ ID NO: 2214528 - RNA, 13 nt, Human
cuucugccuuuuu

SEQ ID NO: 2214529 - RNA, 14 nt, Human
cuucugccuucuca

SEQ ID NO: 2214530 - RNA, 21 nt, Human
cuucugccuuagucucaguuu

SEQ ID NO: 2214531 - RNA, 19 nt, Human
cuucugccuuagucucagu

SEQ ID NO: 2214532 - RNA, 20 nt, Human
cuucugccuuagucucaguu

SEQ ID NO: 2214533 - RNA, 13 nt, Human
cuucuggagcccu

SEQ ID NO: 2214534 - RNA, 11 nt, Human
cuucuggagcc

SEQ ID NO: 2214535 - RNA, 23 nt, Human
cuucugcuuuucugcccuggcug

SEQ ID NO: 2214536 - RNA, 14 nt, Human
cuucugcuuuucug

SEQ ID NO: 2214537 - RNA, 16 nt, Human
cuucugcuuuucugcc

SEQ ID NO: 2214538 - RNA, 17 nt, Human
cuucugcuuuucugccc

SEQ ID NO: 2214539 - RNA, 18 nt, Human
cuucugcuuuucugcccu

SEQ ID NO: 2214540 - RNA, 19 nt, Human
cuucugcuuuucugcccug

SEQ ID NO: 2214541 - RNA, 20 nt, Human
cuucugcuuuucugcccugg

SEQ ID NO: 2214542 - RNA, 21 nt, Human
cuucugcuuuucugcccuggc

SEQ ID NO: 2214543 - RNA, 22 nt, Human
cuucugcuuuucugcccuggcu

SEQ ID NO: 2214544 - RNA, 13 nt, Human
cuucugcuccacc

SEQ ID NO: 2214545 - RNA, 20 nt, Human
cuucugcuacuggcaaaagg

SEQ ID NO: 2214546 - RNA, 18 nt, Human
cuucugcuucagccuccc

SEQ ID NO: 2214547 - RNA, 14 nt, Human
cuucugcuccaccc

SEQ ID NO: 2214548 - RNA, 12 nt, Human
cuucugcuccac

SEQ ID NO: 2214549 - RNA, 10 nt, Human
cuucugcucc

SEQ ID NO: 2214550 - RNA, 18 nt, Human
cuucugcucagcucuggg

SEQ ID NO: 2214551 - RNA, 16 nt, Human
cuucugcucagcucug

SEQ ID NO: 2214552 - RNA, 15 nt, Human
cuucugcucagcucu

SEQ ID NO: 2214553 - RNA, 14 nt, Human
cuucugcucagcuc

SEQ ID NO: 2214554 - RNA, 16 nt, Human
cuucugcuucagccuc

SEQ ID NO: 2214555 - RNA, 17 nt, Human
cuucugcuucagccucc

SEQ ID NO: 2214556 - RNA, 14 nt, Human
cuucuccaucuggc

SEQ ID NO: 2214557 - RNA, 21 nt, Human
cuucuccaucucucuggcccu

SEQ ID NO: 2214558 - RNA, 13 nt, Human
cuucucccacacu

SEQ ID NO: 2214559 - RNA, 16 nt, Human
cuucuccauccacaug

SEQ ID NO: 2214560 - RNA, 20 nt, Human
cuucuccauccuuucugccu

SEQ ID NO: 2214561 - RNA, 22 nt, Human
cuucuccauccuuucugccucu

SEQ ID NO: 2214562 - RNA, 11 nt, Human
cuucuccaucu

SEQ ID NO: 2214563 - RNA, 13 nt, Human
cuucuccaucucu

SEQ ID NO: 2214564 - RNA, 18 nt, Human
cuucuccaucucucuggc

SEQ ID NO: 2214565 - RNA, 19 nt, Human
cuucuccaucucucuggcc

SEQ ID NO: 2214566 - RNA, 17 nt, Human
cuucuccaggcuguauc

SEQ ID NO: 2214567 - RNA, 22 nt, Human
cuucucauuucaccccucccuu

SEQ ID NO: 2214568 - RNA, 19 nt, Human
cuucuccaauucugcccaa

SEQ ID NO: 2214569 - RNA, 13 nt, Human
cuucuccaggguc

SEQ ID NO: 2214570 - RNA, 14 nt, Human
cuucuccauccaca

SEQ ID NO: 2214571 - RNA, 19 nt, Human
cuucuccaggguccacagg

SEQ ID NO: 2214572 - RNA, 20 nt, Human
cuucuccaggucucacgggc

SEQ ID NO: 2214573 - RNA, 16 nt, Human
cuucuccacccugcuc

SEQ ID NO: 2214574 - RNA, 14 nt, Human
cuucuccaggcugu

SEQ ID NO: 2214575 - RNA, 14 nt, Human
cuucuccacccugc

SEQ ID NO: 2214576 - RNA, 15 nt, Human
cuucuccacccugcu

SEQ ID NO: 2214577 - RNA, 14 nt, Human
cuucucccacacug

SEQ ID NO: 2214578 - RNA, 17 nt, Human
cuucuccaucuggcagg

SEQ ID NO: 2214579 - RNA, 16 nt, Human
cuucucccacacugcu

SEQ ID NO: 2214580 - RNA, 18 nt, Human
cuucucccacuuggccaa

SEQ ID NO: 2214581 - RNA, 22 nt, Human
cuucuccuucaccuuugucccc

SEQ ID NO: 2214582 - RNA, 13 nt, Human
cuucucccaugag

SEQ ID NO: 2214583 - RNA, 16 nt, Human
cuucuccccagaguuc

SEQ ID NO: 2214584 - RNA, 12 nt, Human
cuucuccccaga

SEQ ID NO: 2214585 - RNA, 20 nt, Human
cuucucuaaaugaggggccu

SEQ ID NO: 2214586 - RNA, 21 nt, Human
cuucucgaccacgggaagcau

SEQ ID NO: 2214587 - RNA, 11 nt, Human
cuucucuacag

SEQ ID NO: 2214588 - RNA, 13 nt, Human
cuucucuacagac

SEQ ID NO: 2214589 - RNA, 20 nt, Human
cuucuccuuucacaaccuuc

SEQ ID NO: 2214590 - RNA, 22 nt, Human
cuucuccuuucacaaccuucug

SEQ ID NO: 2214591 - RNA, 14 nt, Human
cuucuccuuucaca

SEQ ID NO: 2214592 - RNA, 17 nt, Human
cuucuccuuucacaacc

SEQ ID NO: 2214593 - RNA, 16 nt, Human
cuuccagcacccugca

SEQ ID NO: 2214594 - RNA, 15 nt, Human
cuuccagcacccugc

SEQ ID NO: 2214595 - RNA, 14 nt, Human
cuuccagcacccug

SEQ ID NO: 2214596 - RNA, 16 nt, Human
cuuccaccagccugca

SEQ ID NO: 2214597 - RNA, 15 nt, Human
cuuccaccagccugc

SEQ ID NO: 2214598 - RNA, 14 nt, Human
cuuccaccagccug

SEQ ID NO: 2214599 - RNA, 13 nt, Human
cuuccaccagccu

SEQ ID NO: 2214600 - RNA, 12 nt, Human
cuuccaccagcc

SEQ ID NO: 2214601 - RNA, 19 nt, Human
cuuccagauccuggaaauc

SEQ ID NO: 2214602 - RNA, 13 nt, Human
cuuccaggaaacu

SEQ ID NO: 2214603 - RNA, 15 nt, Human
cuuccagcuccugua

SEQ ID NO: 2214604 - RNA, 12 nt, Human
cuuccagcuccu

SEQ ID NO: 2214605 - RNA, 13 nt, Human
cuuccagcuccug

SEQ ID NO: 2214606 - RNA, 22 nt, Human
cuuccaggggugggacacccug

SEQ ID NO: 2214607 - RNA, 24 nt, Human
cuuccaggggugggacacccugug

SEQ ID NO: 2214608 - RNA, 20 nt, Human
cuucccagcucucccucugg

SEQ ID NO: 2214609 - RNA, 18 nt, Human
cuucccagcucucccucu

SEQ ID NO: 2214610 - RNA, 15 nt, Human
cuucccagcucuccc

SEQ ID NO: 2214611 - RNA, 14 nt, Human
cuucccagcucucc

SEQ ID NO: 2214612 - RNA, 21 nt, Human
cuucccagcagggccacuccc

SEQ ID NO: 2214613 - RNA, 14 nt, Human
cuucccacuggagg

SEQ ID NO: 2214614 - RNA, 15 nt, Human
cuucccacuggaggu

SEQ ID NO: 2214615 - RNA, 15 nt, Human
cuuccagugaggcuc

SEQ ID NO: 2214616 - RNA, 22 nt, Human
cuuccagucuuccugacacuuu

SEQ ID NO: 2214617 - RNA, 20 nt, Human
cuuccaguccaaucucaugg

SEQ ID NO: 2214618 - RNA, 19 nt, Human
cuucccacucuagggcagu

SEQ ID NO: 2214619 - RNA, 20 nt, Human
cuucccacucuagggcagug

SEQ ID NO: 2214620 - RNA, 22 nt, Human
cuucccacucuagggcagugga

SEQ ID NO: 2214621 - RNA, 20 nt, Human
cuuccagguaucuccaggau

SEQ ID NO: 2214622 - RNA, 13 nt, Human
cuuccagucagga

SEQ ID NO: 2214623 - RNA, 17 nt, Human
cuuccaguccaaucuca

SEQ ID NO: 2214624 - RNA, 21 nt, Human
cuuccagucuuccugacacuu

SEQ ID NO: 2214625 - RNA, 20 nt, Human
cuuccagucuuccugacacu

SEQ ID NO: 2214626 - RNA, 14 nt, Human
cuuccagugaggcu

SEQ ID NO: 2214627 - RNA, 22 nt, Human
cuuccagguguuacuguaauuc

SEQ ID NO: 2214628 - RNA, 20 nt, Human
cuuccagguguuacuguaau

SEQ ID NO: 2214629 - RNA, 19 nt, Human
cuuccagguguuacuguaa

SEQ ID NO: 2214630 - RNA, 16 nt, Human
cuuccagguguuacug

SEQ ID NO: 2214631 - RNA, 19 nt, Human
cuuccaggugcccagcuau

SEQ ID NO: 2214632 - RNA, 16 nt, Human
cuuccaggugcccagc

SEQ ID NO: 2214633 - RNA, 14 nt, Human
cuuccagcuccugu

SEQ ID NO: 2214634 - RNA, 18 nt, Human
cuuccagguaucuccagg

SEQ ID NO: 2214635 - RNA, 19 nt, Human
cuuccagguaucuccagga

SEQ ID NO: 2214636 - RNA, 16 nt, Human
cuucccucuccccaag

SEQ ID NO: 2214637 - RNA, 15 nt, Human
cuucccucccuaucu

SEQ ID NO: 2214638 - RNA, 17 nt, Human
cuucccucaccuuggca

SEQ ID NO: 2214639 - RNA, 16 nt, Human
cuucccucaucucucc

SEQ ID NO: 2214640 - RNA, 17 nt, Human
cuucccucaucucuccu

SEQ ID NO: 2214641 - RNA, 15 nt, Human
cuucccucacaccgc

SEQ ID NO: 2214642 - RNA, 16 nt, Human
cuucccgcucagcccu

SEQ ID NO: 2214643 - RNA, 17 nt, Human
cuucccgcucagcccuc

SEQ ID NO: 2214644 - RNA, 23 nt, Human
cuuccccuugcccagggcucagc

SEQ ID NO: 2214645 - RNA, 19 nt, Human
cuuccccuugcccagggcu

SEQ ID NO: 2214646 - RNA, 14 nt, Human
cuuccccuugcccu

SEQ ID NO: 2214647 - RNA, 17 nt, Human
cuuccccuugcccuugc

SEQ ID NO: 2214648 - RNA, 22 nt, Human
cuuccccuugcccuugcccuga

SEQ ID NO: 2214649 - RNA, 23 nt, Human
cuuccccuugcccuugcccugac

SEQ ID NO: 2214650 - RNA, 15 nt, Human
cuucccgcucagccc

SEQ ID NO: 2214651 - RNA, 13 nt, Human
cuuccccuuuccc

SEQ ID NO: 2214652 - RNA, 22 nt, Human
cuucccagcucucccucuggcc

SEQ ID NO: 2214653 - RNA, 21 nt, Human
cuucccagcucucccucuggc

SEQ ID NO: 2214654 - RNA, 18 nt, Human
cuucccaggcuggggcug

SEQ ID NO: 2214655 - RNA, 22 nt, Human
cuucccaggcuggggcugaccu

SEQ ID NO: 2214656 - RNA, 19 nt, Human
cuucccaggaguggaggag

SEQ ID NO: 2214657 - RNA, 11 nt, Human
cuucccagggu

SEQ ID NO: 2214658 - RNA, 19 nt, Human
cuucccaggguagcccgcc

SEQ ID NO: 2214659 - RNA, 21 nt, Human
cuucccaggguagcccgccug

SEQ ID NO: 2214660 - RNA, 21 nt, Human
cuucccagguaagcaggagga

SEQ ID NO: 2214661 - RNA, 14 nt, Human
cuucccaguggcug

SEQ ID NO: 2214662 - RNA, 15 nt, Human
cuucccaguggcugc

SEQ ID NO: 2214663 - RNA, 19 nt, Human
cuucccucugccugucccu

SEQ ID NO: 2214664 - RNA, 18 nt, Human
cuucccucugccuguccc

SEQ ID NO: 2214665 - RNA, 17 nt, Human
cuucccucugccugucc

SEQ ID NO: 2214666 - RNA, 16 nt, Human
cuucccucugccuguc

SEQ ID NO: 2214667 - RNA, 15 nt, Human
cuucccucugccugu

SEQ ID NO: 2214668 - RNA, 13 nt, Human
cuucccucugccu

SEQ ID NO: 2214669 - RNA, 11 nt, Human
cuucccucugc

SEQ ID NO: 2214670 - RNA, 14 nt, Human
cuucccuuuuacau

SEQ ID NO: 2214671 - RNA, 16 nt, Human
cuucccucuguuucuc

SEQ ID NO: 2214672 - RNA, 17 nt, Human
cuucccucuguuucucu

SEQ ID NO: 2214673 - RNA, 21 nt, Human
cuucccucuguuucucuuucc

SEQ ID NO: 2214674 - RNA, 20 nt, Human
cuuccgaaaaauccucuucc

SEQ ID NO: 2214675 - RNA, 21 nt, Human
cuuccgaaaaauccucuuccu

SEQ ID NO: 2214676 - RNA, 22 nt, Human
cuuccgaaaaauccucuuccuc

SEQ ID NO: 2214677 - RNA, 23 nt, Human
cuuccgaaaaauccucuuccucu

SEQ ID NO: 2214678 - RNA, 18 nt, Human
cuuccgcauccuagucuc

SEQ ID NO: 2214679 - RNA, 15 nt, Human
cuuccgcauccuagu

SEQ ID NO: 2214680 - RNA, 17 nt, Human
cuuccgcauccuagucu

SEQ ID NO: 2214681 - RNA, 14 nt, Human
cuuccggagaugua

SEQ ID NO: 2214682 - RNA, 15 nt, Human
cuuccggagauguag

SEQ ID NO: 2214683 - RNA, 15 nt, Human
cuuccggcuccugug

SEQ ID NO: 2214684 - RNA, 18 nt, Human
cuuccuacaagagcagcc

SEQ ID NO: 2214685 - RNA, 24 nt, Human
cuuccuacaagagcagccuguggc

SEQ ID NO: 2214686 - RNA, 18 nt, Human
cuuccggcuccugugcuu

SEQ ID NO: 2214687 - RNA, 23 nt, Human
cuuccuacacccuuggacuugag

SEQ ID NO: 2214688 - RNA, 22 nt, Human
cuuccuacaagagcagccugug

SEQ ID NO: 2214689 - RNA, 21 nt, Human
cuuccuacaagagcagccugu

SEQ ID NO: 2214690 - RNA, 16 nt, Human
cuuccuacccacaccu

SEQ ID NO: 2214691 - RNA, 18 nt, Human
cuuccuacccacaccucu

SEQ ID NO: 2214692 - RNA, 19 nt, Human
cuuccuacccacaccucug

SEQ ID NO: 2214693 - RNA, 22 nt, Human
cuuccuacccacaccucugcca

SEQ ID NO: 2214694 - RNA, 14 nt, Human
cuucagggggccag

SEQ ID NO: 2214695 - RNA, 15 nt, Human
cuucagggggccagg

SEQ ID NO: 2214696 - RNA, 23 nt, Human
cuucagggggccaggugcacaga

SEQ ID NO: 2214697 - RNA, 23 nt, Human
cuucaggggcugcccgcucccag

SEQ ID NO: 2214698 - RNA, 18 nt, Human
cuucagggugaugccagg

SEQ ID NO: 2214699 - RNA, 21 nt, Human
cuucaggguucuccucucccc

SEQ ID NO: 2214700 - RNA, 20 nt, Human
cuucaggguucuccucuccc

SEQ ID NO: 2214701 - RNA, 18 nt, Human
cuucaggguucuccucuc

SEQ ID NO: 2214702 - RNA, 14 nt, Human
cuucaggguucucc

SEQ ID NO: 2214703 - RNA, 23 nt, Human
cuucaggguucuccucuccccuc

SEQ ID NO: 2214704 - RNA, 17 nt, Human
cuucagugcccaccaac

SEQ ID NO: 2214705 - RNA, 11 nt, Human
cuucagugccu

SEQ ID NO: 2214706 - RNA, 12 nt, Human
cuucagugccuu

SEQ ID NO: 2214707 - RNA, 18 nt, Human
cuucauuuccugugucuu

SEQ ID NO: 2214708 - RNA, 14 nt, Human
cuucauuuccuccg

SEQ ID NO: 2214709 - RNA, 18 nt, Human
cuucauuucauuguauga

SEQ ID NO: 2214710 - RNA, 19 nt, Human
cuucauuucauuguaugau

SEQ ID NO: 2214711 - RNA, 15 nt, Human
cuucauuucauugua

SEQ ID NO: 2214712 - RNA, 16 nt, Human
cuucauuucauuguau

SEQ ID NO: 2214713 - RNA, 17 nt, Human
cuucauuucauuguaug

SEQ ID NO: 2214714 - RNA, 13 nt, Human
cuucagugccuua

SEQ ID NO: 2214715 - RNA, 14 nt, Human
cuucagugccuuau

SEQ ID NO: 2214716 - RNA, 16 nt, Human
cuuccaagcaaaggug

SEQ ID NO: 2214717 - RNA, 15 nt, Human
cuuccaagguggucu

SEQ ID NO: 2214718 - RNA, 16 nt, Human
cuuccaagguggucug

SEQ ID NO: 2214719 - RNA, 18 nt, Human
cuuccaagguggucugcu

SEQ ID NO: 2214720 - RNA, 15 nt, Human
cuuccaagagccuga

SEQ ID NO: 2214721 - RNA, 22 nt, Human
cuuccacaagagcccaggccuc

SEQ ID NO: 2214722 - RNA, 23 nt, Human
cuuccacaagagcccaggccucc

SEQ ID NO: 2214723 - RNA, 14 nt, Human
cuuccacaccccca

SEQ ID NO: 2214724 - RNA, 20 nt, Human
cuuccaagguggucugcucg

SEQ ID NO: 2214725 - RNA, 21 nt, Human
cuuccaagguggucugcucgg

SEQ ID NO: 2214726 - RNA, 23 nt, Human
cuuccacacccccaccccuugcu

SEQ ID NO: 2214727 - RNA, 14 nt, Human
cuuccaagagccug

SEQ ID NO: 2214728 - RNA, 18 nt, Human
cuuccaacaggagcuggg

SEQ ID NO: 2214729 - RNA, 19 nt, Human
cuuccaacccauuagccau

SEQ ID NO: 2214730 - RNA, 20 nt, Human
cuuccaaauccccuaagcag

SEQ ID NO: 2214731 - RNA, 19 nt, Human
cuuccaaauccccuaagca

SEQ ID NO: 2214732 - RNA, 13 nt, Human
cuucauuuggaga

SEQ ID NO: 2214733 - RNA, 14 nt, Human
cuucauuuggagau

SEQ ID NO: 2214734 - RNA, 18 nt, Human
cuucauuugggaugcuac

SEQ ID NO: 2214735 - RNA, 16 nt, Human
cuuccaaauccccuaa

SEQ ID NO: 2214736 - RNA, 22 nt, Human
cuucagccuagccgaccucagc

SEQ ID NO: 2214737 - RNA, 21 nt, Human
cuucagccuagccgaccucag

SEQ ID NO: 2214738 - RNA, 20 nt, Human
cuucagccuagccgaccuca

SEQ ID NO: 2214739 - RNA, 13 nt, Human
cuucagccuagcc

SEQ ID NO: 2214740 - RNA, 18 nt, Human
cuucagcgguuuauauaa

SEQ ID NO: 2214741 - RNA, 18 nt, Human
cuucagccaggagcuggg

SEQ ID NO: 2214742 - RNA, 19 nt, Human
cuucagccaggagcugggc

SEQ ID NO: 2214743 - RNA, 14 nt, Human
cuucagccaucaac

SEQ ID NO: 2214744 - RNA, 15 nt, Human
cuucagcccucaccc

SEQ ID NO: 2214745 - RNA, 16 nt, Human
cuucagcccucacccc

SEQ ID NO: 2214746 - RNA, 17 nt, Human
cuucagcccucaccccu

SEQ ID NO: 2214747 - RNA, 19 nt, Human
cuucagcccucaccccugg

SEQ ID NO: 2214748 - RNA, 21 nt, Human
cuuauuguuccaagacauugu

SEQ ID NO: 2214749 - RNA, 14 nt, Human
cuuauuuucucugu

SEQ ID NO: 2214750 - RNA, 16 nt, Human
cuuauuuucauguaua

SEQ ID NO: 2214751 - RNA, 15 nt, Human
cuuauuuucucugug

SEQ ID NO: 2214752 - RNA, 17 nt, Human
cuuauuuuugacagugu

SEQ ID NO: 2214753 - RNA, 21 nt, Human
cuuauuuuuaaaauuuuaaua

SEQ ID NO: 2214754 - RNA, 14 nt, Human
cuuauuuuuuccca

SEQ ID NO: 2214755 - RNA, 15 nt, Human
cuuauuuuuucccaa

SEQ ID NO: 2214756 - RNA, 19 nt, Human
cuuauuuuuucccaaagcc

SEQ ID NO: 2214757 - RNA, 16 nt, Human
cuuauuuuuuucugau

SEQ ID NO: 2214758 - RNA, 17 nt, Human
cuucagccaccucucuu

SEQ ID NO: 2214759 - RNA, 15 nt, Human
cuucagccaccucuc

SEQ ID NO: 2214760 - RNA, 15 nt, Human
cuucagccaggagcu

SEQ ID NO: 2214761 - RNA, 17 nt, Human
cuucagccaggagcugg

SEQ ID NO: 2214762 - RNA, 17 nt, Human
cuuauuuuuuucugauu

SEQ ID NO: 2214763 - RNA, 18 nt, Human
cuuauuuuuuucugauug

SEQ ID NO: 2214764 - RNA, 19 nt, Human
cuuauuuuuuucugauugu

SEQ ID NO: 2214765 - RNA, 20 nt, Human
cuuauuuuuuucugauugua

SEQ ID NO: 2214766 - RNA, 23 nt, Human
cuucagccuagccgaccucagcc

SEQ ID NO: 2214767 - RNA, 11 nt, Human
cuucagcugac

SEQ ID NO: 2214768 - RNA, 15 nt, Human
cuucaggccucccuc

SEQ ID NO: 2214769 - RNA, 12 nt, Human
cuucaggccucc

SEQ ID NO: 2214770 - RNA, 14 nt, Human
cuucaggcucuucu

SEQ ID NO: 2214771 - RNA, 23 nt, Human
cuucaggggagucccgucaggac

SEQ ID NO: 2214772 - RNA, 22 nt, Human
cuucaggggagucccgucagga

SEQ ID NO: 2214773 - RNA, 17 nt, Human
cuucaggggcacuucau

SEQ ID NO: 2214774 - RNA, 19 nt, Human
cuucaggggcacuucauug

SEQ ID NO: 2214775 - RNA, 21 nt, Human
cuucaggggagucccgucagg

SEQ ID NO: 2214776 - RNA, 20 nt, Human
cuucaggccucccucucucu

SEQ ID NO: 2214777 - RNA, 14 nt, Human
cuucaggggcugcc

SEQ ID NO: 2214778 - RNA, 15 nt, Human
cuucaggggcugccc

SEQ ID NO: 2214779 - RNA, 16 nt, Human
cuucaggggcugcccg

SEQ ID NO: 2214780 - RNA, 17 nt, Human
cuucaggggcugcccgc

SEQ ID NO: 2214781 - RNA, 18 nt, Human
cuucaggggcugcccgcu

SEQ ID NO: 2214782 - RNA, 19 nt, Human
cuucaggggcugcccgcuc

SEQ ID NO: 2214783 - RNA, 20 nt, Human
cuucaggggcugcccgcucc

SEQ ID NO: 2214784 - RNA, 22 nt, Human
cuucaggggcugcccgcuccca

SEQ ID NO: 2214785 - RNA, 15 nt, Human
cuucaggcucuucuc

SEQ ID NO: 2214786 - RNA, 16 nt, Human
cuucaggcucuucucc

SEQ ID NO: 2214787 - RNA, 17 nt, Human
cuucaggcucuucuccu

SEQ ID NO: 2214788 - RNA, 18 nt, Human
cuucaggcucuucuccuu

SEQ ID NO: 2214789 - RNA, 22 nt, Human
cuguuuauggccucagcugccu

SEQ ID NO: 2214790 - RNA, 21 nt, Human
cuguuuauggccucagcugcc

SEQ ID NO: 2214791 - RNA, 19 nt, Human
cuguuuauggccucagcug

SEQ ID NO: 2214792 - RNA, 18 nt, Human
cuguuuauggccucagcu

SEQ ID NO: 2214793 - RNA, 17 nt, Human
cuguuuauggccucagc

SEQ ID NO: 2214794 - RNA, 15 nt, Human
cuguuucccagcagu

SEQ ID NO: 2214795 - RNA, 21 nt, Human
cuguuucccagcaguggacuc

SEQ ID NO: 2214796 - RNA, 14 nt, Human
cuguuucucugcug

SEQ ID NO: 2214797 - RNA, 13 nt, Human
cuguuucucugcu

SEQ ID NO: 2214798 - RNA, 15 nt, Human
cuguuuccuuuuaug

SEQ ID NO: 2214799 - RNA, 13 nt, Human
cuguuuccuuuua

SEQ ID NO: 2214800 - RNA, 18 nt, Human
cuguuuguuucugaaagg

SEQ ID NO: 2214801 - RNA, 16 nt, Human
cuguuucucuuuccuu

SEQ ID NO: 2214802 - RNA, 19 nt, Human
cuguuucucuuuccuuggc

SEQ ID NO: 2214803 - RNA, 20 nt, Human
cuguuucucuuuccuuggcu

SEQ ID NO: 2214804 - RNA, 17 nt, Human
cuguuuacaagaaaaaa

SEQ ID NO: 2214805 - RNA, 16 nt, Human
cuguuuacaagaaaaa

SEQ ID NO: 2214806 - RNA, 15 nt, Human
cuguuuacaagaaaa

SEQ ID NO: 2214807 - RNA, 14 nt, Human
cuguuuacaagaaa

SEQ ID NO: 2214808 - RNA, 21 nt, Human
cuguuuaauauuuaaacagca

SEQ ID NO: 2214809 - RNA, 15 nt, Human
cuguuuacaguguuc

SEQ ID NO: 2214810 - RNA, 13 nt, Human
cuguuuacagugu

SEQ ID NO: 2214811 - RNA, 13 nt, Human
cugguugcugugu

SEQ ID NO: 2214812 - RNA, 14 nt, Human
cugguugcugugug

SEQ ID NO: 2214813 - RNA, 15 nt, Human
cugguugcugugugg

SEQ ID NO: 2214814 - RNA, 18 nt, Human
cugguugcugugugguuu

SEQ ID NO: 2214815 - RNA, 17 nt, Human
cugguuggagagcuaga

SEQ ID NO: 2214816 - RNA, 23 nt, Human
cugguuggagagcuagaaccugg

SEQ ID NO: 2214817 - RNA, 23 nt, Human
cugguucugaugaugugccuggg

SEQ ID NO: 2214818 - RNA, 17 nt, Human
cugguugaugccuguga

SEQ ID NO: 2214819 - RNA, 20 nt, Human
cuguuuacaagaaaaaauga

SEQ ID NO: 2214820 - RNA, 18 nt, Human
cuguuuacaagaaaaaau

SEQ ID NO: 2214821 - RNA, 12 nt, Human
cuguuuagauaa

SEQ ID NO: 2214822 - RNA, 16 nt, Human
cuguuuauggccucag

SEQ ID NO: 2214823 - RNA, 15 nt, Human
cuguuuauggccuca

SEQ ID NO: 2214824 - RNA, 14 nt, Human
cuguuuauggccuc

SEQ ID NO: 2214825 - RNA, 13 nt, Human
cuguuuauggccu

SEQ ID NO: 2214826 - RNA, 15 nt, Human
cuguuuauagaauaa

SEQ ID NO: 2214827 - RNA, 20 nt, Human
cuguuuuguggucagcugua

SEQ ID NO: 2214828 - RNA, 14 nt, Human
cuguuuuguucugu

SEQ ID NO: 2214829 - RNA, 21 nt, Human
cuguuuuucagggagguggcu

SEQ ID NO: 2214830 - RNA, 21 nt, Human
cuguuuuucuggguggccucg

SEQ ID NO: 2214831 - RNA, 15 nt, Human
cuguuuuucugggug

SEQ ID NO: 2214832 - RNA, 22 nt, Human
cuguuuugccugaaguuggagu

SEQ ID NO: 2214833 - RNA, 12 nt, Human
cuguuuugaauu

SEQ ID NO: 2214834 - RNA, 17 nt, Human
cuguuuugaaggcaaaa

SEQ ID NO: 2214835 - RNA, 14 nt, Human
cuguuuucuguuuc

SEQ ID NO: 2214836 - RNA, 18 nt, Human
cuguuuucuucuauucca

SEQ ID NO: 2214837 - RNA, 12 nt, Human
cuguuuucuucu

SEQ ID NO: 2214838 - RNA, 14 nt, Human
cuguuuuauacugu

SEQ ID NO: 2214839 - RNA, 13 nt, Human
cuguuuucugagc

SEQ ID NO: 2214840 - RNA, 16 nt, Human
cuguuuuaugacuuca

SEQ ID NO: 2214841 - RNA, 15 nt, Human
cuguuuucugagccc

SEQ ID NO: 2214842 - RNA, 17 nt, Human
cuguuuucugagcccgg

SEQ ID NO: 2214843 - RNA, 19 nt, Human
cuguuuucugagcccgggc

SEQ ID NO: 2214844 - RNA, 20 nt, Human
cuguuuucugagcccgggcu

SEQ ID NO: 2214845 - RNA, 17 nt, Human
cuguuuucucuugagag

SEQ ID NO: 2214846 - RNA, 20 nt, Human
cuguuuguuugacaaagaaa

SEQ ID NO: 2214847 - RNA, 17 nt, Human
cuguuucugcuugcucu

SEQ ID NO: 2214848 - RNA, 22 nt, Human
cuguuuuaaauuuauuucaaaa

SEQ ID NO: 2214849 - RNA, 14 nt, Human
cuguuuuaaguucu

SEQ ID NO: 2214850 - RNA, 12 nt, Human
cuguuuuaaauu

SEQ ID NO: 2214851 - RNA, 19 nt, Human
cuguuuuauaauuuuguga

SEQ ID NO: 2214852 - RNA, 21 nt, Human
cuguuuguuucugaaagggac

SEQ ID NO: 2214853 - RNA, 23 nt, Human
cuguuuguuucugaaagggacgc

SEQ ID NO: 2214854 - RNA, 14 nt, Human
cuguuuucucuuga

SEQ ID NO: 2214855 - RNA, 13 nt, Human
cuguuuucucuug

SEQ ID NO: 2214856 - RNA, 21 nt, Human
cuguuuuauuuuaauucaguu

SEQ ID NO: 2214857 - RNA, 15 nt, Human
cuguuuuaugacuuc

SEQ ID NO: 2214858 - RNA, 14 nt, Human
cuguuuuaugacuu

SEQ ID NO: 2214859 - RNA, 13 nt, Human
cuguuuuaugacu

SEQ ID NO: 2214860 - RNA, 12 nt, Human
cuguuuuaugac

SEQ ID NO: 2214861 - RNA, 18 nt, Human
cuuaauaaauucagauau

SEQ ID NO: 2214862 - RNA, 17 nt, Human
cuuaauaaauucagaua

SEQ ID NO: 2214863 - RNA, 22 nt, Human
cuuaaucagguccucagagaau

SEQ ID NO: 2214864 - RNA, 20 nt, Human
cuuaaucagguccucagaga

SEQ ID NO: 2214865 - RNA, 18 nt, Human
cuuaaucaauuaauuuuu

SEQ ID NO: 2214866 - RNA, 12 nt, Human
cuuaauaaauuc

SEQ ID NO: 2214867 - RNA, 17 nt, Human
cuuaaguuucucagcuc

SEQ ID NO: 2214868 - RNA, 15 nt, Human
cuuaaguuucucagc

SEQ ID NO: 2214869 - RNA, 16 nt, Human
cuuaaguuucucagcu

SEQ ID NO: 2214870 - RNA, 20 nt, Human
cuuaaguuucucagcuccca

SEQ ID NO: 2214871 - RNA, 16 nt, Human
cuuaaguuuauacucu

SEQ ID NO: 2214872 - RNA, 12 nt, Human
cuuaaugagaua

SEQ ID NO: 2214873 - RNA, 14 nt, Human
cuuaaugagauagu

SEQ ID NO: 2214874 - RNA, 18 nt, Human
cuuaauccagcugaugag

SEQ ID NO: 2214875 - RNA, 18 nt, Human
cuuaaugccacuaaauug

SEQ ID NO: 2214876 - RNA, 16 nt, Human
cuuaaucuaaauggaa

SEQ ID NO: 2214877 - RNA, 14 nt, Human
cuuaaucuaaaugg

SEQ ID NO: 2214878 - RNA, 16 nt, Human
cuuaagaacugcuuuc

SEQ ID NO: 2214879 - RNA, 21 nt, Human
cuuaagaagacugcauuauau

SEQ ID NO: 2214880 - RNA, 17 nt, Human
cuuaagagaugccucau

SEQ ID NO: 2214881 - RNA, 13 nt, Human
cuuaagagaauau

SEQ ID NO: 2214882 - RNA, 14 nt, Human
cuuaagagaauauu

SEQ ID NO: 2214883 - RNA, 18 nt, Human
cuuaagagaauauuuuaa

SEQ ID NO: 2214884 - RNA, 23 nt, Human
cuuaagagaauauuuuaaguauu

SEQ ID NO: 2214885 - RNA, 20 nt, Human
cuuaagccuuuugcucacaa

SEQ ID NO: 2214886 - RNA, 23 nt, Human
cuuaagccaucuugguaaauuuc

SEQ ID NO: 2214887 - RNA, 20 nt, Human
cuuaagccaucuugguaaau

SEQ ID NO: 2214888 - RNA, 22 nt, Human
cuuaagccaucuugguaaauuu

SEQ ID NO: 2214889 - RNA, 14 nt, Human
cuuaagcagaagca

SEQ ID NO: 2214890 - RNA, 18 nt, Human
cuuaagcagaagcauuaa

SEQ ID NO: 2214891 - RNA, 15 nt, Human
cuuaagccaucuugg

SEQ ID NO: 2214892 - RNA, 16 nt, Human
cuuaagccaucuuggu

SEQ ID NO: 2214893 - RNA, 17 nt, Human
cuuaagccaucuuggua

SEQ ID NO: 2214894 - RNA, 19 nt, Human
cuuaagccaucuugguaaa

SEQ ID NO: 2214895 - RNA, 19 nt, Human
cuuaacugcauuuuuagac

SEQ ID NO: 2214896 - RNA, 11 nt, Human
cuuaacuauuc

SEQ ID NO: 2214897 - RNA, 22 nt, Human
cuuaacuuaaauuuuaauuuau

SEQ ID NO: 2214898 - RNA, 17 nt, Human
cuuaacuccuuccagug

SEQ ID NO: 2214899 - RNA, 16 nt, Human
cuuaacuggagcccca

SEQ ID NO: 2214900 - RNA, 14 nt, Human
cuuaacuucacaua

SEQ ID NO: 2214901 - RNA, 12 nt, Human
cuuaacuucaca

SEQ ID NO: 2214902 - RNA, 22 nt, Human
cuuaacuucacauauugauuuc

SEQ ID NO: 2214903 - RNA, 17 nt, Human
cuuaacuucacauauug

SEQ ID NO: 2214904 - RNA, 16 nt, Human
cuuaacuucacauauu

SEQ ID NO: 2214905 - RNA, 15 nt, Human
cuuaacuucacauau

SEQ ID NO: 2214906 - RNA, 21 nt, Human
cuuaaaugaaagcauguggca

SEQ ID NO: 2214907 - RNA, 14 nt, Human
cuuaaaaaaugucc

SEQ ID NO: 2214908 - RNA, 13 nt, Human
cuuaaaaaauguc

SEQ ID NO: 2214909 - RNA, 17 nt, Human
cuuaaaaaauaaaaacu

SEQ ID NO: 2214910 - RNA, 16 nt, Human
cuuaaaugagaaggaa

SEQ ID NO: 2214911 - RNA, 13 nt, Human
cuguuuuuuaguu

SEQ ID NO: 2214912 - RNA, 14 nt, Human
cuguuuuuguagug

SEQ ID NO: 2214913 - RNA, 15 nt, Human
cuuaaaaaaaugaca

SEQ ID NO: 2214914 - RNA, 18 nt, Human
cuguuuuuuccugagcuu

SEQ ID NO: 2214915 - RNA, 17 nt, Human
cuguuuuuuccugagcu

SEQ ID NO: 2214916 - RNA, 18 nt, Human
cuuaaaaaacuuguaaau

SEQ ID NO: 2214917 - RNA, 12 nt, Human
cuuaaaaaacuu

SEQ ID NO: 2214918 - RNA, 17 nt, Human
cuuaaaaaaaugacaga

SEQ ID NO: 2214919 - RNA, 20 nt, Human
cuuaaccccaguaagccacu

SEQ ID NO: 2214920 - RNA, 12 nt, Human
cuuaaccaucuu

SEQ ID NO: 2214921 - RNA, 16 nt, Human
cuuaaauuuuaauuua

SEQ ID NO: 2214922 - RNA, 15 nt, Human
cuuaaauucauuuua

SEQ ID NO: 2214923 - RNA, 14 nt, Human
cuuaacggcuccag

SEQ ID NO: 2214924 - RNA, 15 nt, Human
cuuaacggcuccagg

SEQ ID NO: 2214925 - RNA, 16 nt, Human
cuuaacggcuccagga

SEQ ID NO: 2214926 - RNA, 12 nt, Human
cuuauaaauaug

SEQ ID NO: 2214927 - RNA, 17 nt, Human
cuuagguuggcaaaaag

SEQ ID NO: 2214928 - RNA, 18 nt, Human
cuuagguacuuauuccag

SEQ ID NO: 2214929 - RNA, 21 nt, Human
cuuagguggcaagcugugacu

SEQ ID NO: 2214930 - RNA, 20 nt, Human
cuuaggugauccacucgccu

SEQ ID NO: 2214931 - RNA, 21 nt, Human
cuuaggguuaugauuaaguaa

SEQ ID NO: 2214932 - RNA, 13 nt, Human
cuuauaauuuaaa

SEQ ID NO: 2214933 - RNA, 17 nt, Human
cuuauaaauaugaagcu

SEQ ID NO: 2214934 - RNA, 13 nt, Human
cuuauaaauauga

SEQ ID NO: 2214935 - RNA, 23 nt, Human
cuuauagucaauguuucuuuuau

SEQ ID NO: 2214936 - RNA, 13 nt, Human
cuuauagguggcc

SEQ ID NO: 2214937 - RNA, 15 nt, Human
cuuauacauuugaua

SEQ ID NO: 2214938 - RNA, 19 nt, Human
cuuauaggaauugacccac

SEQ ID NO: 2214939 - RNA, 14 nt, Human
cuuauaauuuaaaa

SEQ ID NO: 2214940 - RNA, 16 nt, Human
cuuaucaaaggacacc

SEQ ID NO: 2214941 - RNA, 11 nt, Human
cuuaucaagug

SEQ ID NO: 2214942 - RNA, 12 nt, Human
cuuaucaagugu

SEQ ID NO: 2214943 - RNA, 14 nt, Human
cuuaucaagugucu

SEQ ID NO: 2214944 - RNA, 15 nt, Human
cuuaucaagugucuu

SEQ ID NO: 2214945 - RNA, 16 nt, Human
cuuaucaagugucuuc

SEQ ID NO: 2214946 - RNA, 17 nt, Human
cuuaucaagugucuucc

SEQ ID NO: 2214947 - RNA, 22 nt, Human
cuuaucucagucaugcauaaau

SEQ ID NO: 2214948 - RNA, 23 nt, Human
cuuaucucagucaugcauaaaua

SEQ ID NO: 2214949 - RNA, 17 nt, Human
cuuauauuguaagaaau

SEQ ID NO: 2214950 - RNA, 14 nt, Human
cuuauauuguaaga

SEQ ID NO: 2214951 - RNA, 18 nt, Human
cuuauauuguaagaaaua

SEQ ID NO: 2214952 - RNA, 14 nt, Human
cuuaucaaaggaca

SEQ ID NO: 2214953 - RNA, 14 nt, Human
cuuaucuccaagac

SEQ ID NO: 2214954 - RNA, 13 nt, Human
cuuaucuccaaga

SEQ ID NO: 2214955 - RNA, 16 nt, Human
cuuaucuccaagacca

SEQ ID NO: 2214956 - RNA, 12 nt, Human
cuuaucucucug

SEQ ID NO: 2214957 - RNA, 17 nt, Human
cuuaucugugcgugaaa

SEQ ID NO: 2214958 - RNA, 13 nt, Human
cuuaucucucugu

SEQ ID NO: 2214959 - RNA, 14 nt, Human
cuuaucucucugug

SEQ ID NO: 2214960 - RNA, 21 nt, Human
cuuaucucucugugcugugga

SEQ ID NO: 2214961 - RNA, 22 nt, Human
cuuaucugugcucaggacucag

SEQ ID NO: 2214962 - RNA, 14 nt, Human
cuuaucuuaugcca

SEQ ID NO: 2214963 - RNA, 21 nt, Human
cuuaucugugcgugaaacaca

SEQ ID NO: 2214964 - RNA, 20 nt, Human
cuuaucugugcgugaaacac

SEQ ID NO: 2214965 - RNA, 19 nt, Human
cuuaucugugcgugaaaca

SEQ ID NO: 2214966 - RNA, 15 nt, Human
cuuaucucucugugc

SEQ ID NO: 2214967 - RNA, 16 nt, Human
cuuaucugugcucagg

SEQ ID NO: 2214968 - RNA, 14 nt, Human
cuuaucugugcuca

SEQ ID NO: 2214969 - RNA, 12 nt, Human
cuuauuuucaag

SEQ ID NO: 2214970 - RNA, 19 nt, Human
cuuauuuucaagaaacuga

SEQ ID NO: 2214971 - RNA, 18 nt, Human
cuuauuuucaagaaacug

SEQ ID NO: 2214972 - RNA, 15 nt, Human
cuuauuuucaagaaa

SEQ ID NO: 2214973 - RNA, 14 nt, Human
cuuauuuucaagaa

SEQ ID NO: 2214974 - RNA, 20 nt, Human
cuuauuguuccaagacauug

SEQ ID NO: 2214975 - RNA, 19 nt, Human
cuuauuguuccaagacauu

SEQ ID NO: 2214976 - RNA, 22 nt, Human
cuuauuguuccaagacauuguc

SEQ ID NO: 2214977 - RNA, 15 nt, Human
cuuauuuaaugaaag

SEQ ID NO: 2214978 - RNA, 17 nt, Human
cuuauuguuccaagaca

SEQ ID NO: 2214979 - RNA, 15 nt, Human
cuuauuguuccaaga

SEQ ID NO: 2214980 - RNA, 14 nt, Human
cuuauuguuccaag

SEQ ID NO: 2214981 - RNA, 13 nt, Human
cuuauuguuccaa

SEQ ID NO: 2214982 - RNA, 12 nt, Human
cuuauuguucca

SEQ ID NO: 2214983 - RNA, 23 nt, Human
cuuaugauucagauuguuaucua

SEQ ID NO: 2214984 - RNA, 14 nt, Human
cuuaugccacggga

SEQ ID NO: 2214985 - RNA, 15 nt, Human
cuuaugauugcagau

SEQ ID NO: 2214986 - RNA, 22 nt, Human
cuuaugacaucacuuguacaaa

SEQ ID NO: 2214987 - RNA, 13 nt, Human
cuuaugagauggg

SEQ ID NO: 2214988 - RNA, 21 nt, Human
cuuaugacaucacuuguacaa

SEQ ID NO: 2214989 - RNA, 18 nt, Human
cuuacgauggcacccagu

SEQ ID NO: 2214990 - RNA, 20 nt, Human
cuuaccuuuuuauuugcaug

SEQ ID NO: 2214991 - RNA, 19 nt, Human
cuuacgcccaacccuuccc

SEQ ID NO: 2214992 - RNA, 23 nt, Human
cuuacgaauacuuuugcccuuug

SEQ ID NO: 2214993 - RNA, 19 nt, Human
cuuaccuuuuuauuugcau

SEQ ID NO: 2214994 - RNA, 21 nt, Human
cuuaaugauccguuccauugc

SEQ ID NO: 2214995 - RNA, 15 nt, Human
cuuaaugcuucuuuc

SEQ ID NO: 2214996 - RNA, 18 nt, Human
cuuacuacaugugggagc

SEQ ID NO: 2214997 - RNA, 24 nt, Human
cuuacuaagcuuugccagcugcug

SEQ ID NO: 2214998 - RNA, 19 nt, Human
cuuacuaguuucccuugca

SEQ ID NO: 2214999 - RNA, 15 nt, Human
cuuacgugaguccug

SEQ ID NO: 2215000 - RNA, 21 nt, Human
cuuacuaaacauuuuguuauu

SEQ ID NO: 2215001 - RNA, 22 nt, Human
cuuacuaaacauuuuguuauug

SEQ ID NO: 2215002 - RNA, 21 nt, Human
cuuacuaagcuuugccagcug

SEQ ID NO: 2215003 - RNA, 23 nt, Human
cuuacuaagcuuugccagcugcu

SEQ ID NO: 2215004 - RNA, 14 nt, Human
cuuacuccaggaga

SEQ ID NO: 2215005 - RNA, 20 nt, Human
cuuacuacaugugggagcuu

SEQ ID NO: 2215006 - RNA, 13 nt, Human
cuuacuguacaug

SEQ ID NO: 2215007 - RNA, 16 nt, Human
cuuacuguacaugaaa

SEQ ID NO: 2215008 - RNA, 16 nt, Human
cuuacuguggaggaag

SEQ ID NO: 2215009 - RNA, 17 nt, Human
cuuacuguggaggaagg

SEQ ID NO: 2215010 - RNA, 18 nt, Human
cuuacuguggaggaagga

SEQ ID NO: 2215011 - RNA, 15 nt, Human
cuuacuguaccuguu

SEQ ID NO: 2215012 - RNA, 18 nt, Human
cuuacuguaccuguuccu

SEQ ID NO: 2215013 - RNA, 23 nt, Human
cuuacuguaccuguuccuuagac

SEQ ID NO: 2215014 - RNA, 14 nt, Human
cuuacuuaguguua

SEQ ID NO: 2215015 - RNA, 21 nt, Human
cuuacuguuucugucaggaga

SEQ ID NO: 2215016 - RNA, 14 nt, Human
cuuacuuacccuca

SEQ ID NO: 2215017 - RNA, 16 nt, Human
cuuacuguuucuguca

SEQ ID NO: 2215018 - RNA, 19 nt, Human
cuuacuguuucugucagga

SEQ ID NO: 2215019 - RNA, 19 nt, Human
cuuacuguggaggaaggau

SEQ ID NO: 2215020 - RNA, 13 nt, Human
cuuacuguuucug

SEQ ID NO: 2215021 - RNA, 14 nt, Human
cuuacuguuucugu

SEQ ID NO: 2215022 - RNA, 15 nt, Human
cuuacuguuucuguc

SEQ ID NO: 2215023 - RNA, 20 nt, Human
cuuacuuuccuuuccccagc

SEQ ID NO: 2215024 - RNA, 21 nt, Human
cuuacuuuccuuuccccagcc

SEQ ID NO: 2215025 - RNA, 22 nt, Human
cuuacuuuccuuuccccagccc

SEQ ID NO: 2215026 - RNA, 23 nt, Human
cuuacuuuccuuuccccagccca

SEQ ID NO: 2215027 - RNA, 19 nt, Human
cuuagaugcaguucugaag

SEQ ID NO: 2215028 - RNA, 11 nt, Human
cuuagacaguc

SEQ ID NO: 2215029 - RNA, 16 nt, Human
cuuagacauaacaaaa

SEQ ID NO: 2215030 - RNA, 19 nt, Human
cuuagacagucccugccaa

SEQ ID NO: 2215031 - RNA, 17 nt, Human
cuuagacagucccugcc

SEQ ID NO: 2215032 - RNA, 18 nt, Human
cuuagacagucccugcca

SEQ ID NO: 2215033 - RNA, 15 nt, Human
cuuagaaccuuucuu

SEQ ID NO: 2215034 - RNA, 19 nt, Human
cuuagaacauuuuaauuca

SEQ ID NO: 2215035 - RNA, 16 nt, Human
cuuagaacauuuuaau

SEQ ID NO: 2215036 - RNA, 15 nt, Human
cuuagaacauuuuaa

SEQ ID NO: 2215037 - RNA, 12 nt, Human
cuuagaacauuu

SEQ ID NO: 2215038 - RNA, 15 nt, Human
cuuagaaauuuauuu

SEQ ID NO: 2215039 - RNA, 17 nt, Human
cuuagaaauugcauuuc

SEQ ID NO: 2215040 - RNA, 14 nt, Human
cuuagaaauuuauu

SEQ ID NO: 2215041 - RNA, 15 nt, Human
cuuagaagucacaca

SEQ ID NO: 2215042 - RNA, 14 nt, Human
cuuagacagucccu

SEQ ID NO: 2215043 - RNA, 15 nt, Human
cuuagacagucccug

SEQ ID NO: 2215044 - RNA, 16 nt, Human
cuuagacagucccugc

SEQ ID NO: 2215045 - RNA, 22 nt, Human
cugaaugaaccuucuggccucc

SEQ ID NO: 2215046 - RNA, 16 nt, Human
cugaauucuauuugcu

SEQ ID NO: 2215047 - RNA, 17 nt, Human
cugaaugaaauaucaga

SEQ ID NO: 2215048 - RNA, 23 nt, Human
cugaaugaaacccccacacacac

SEQ ID NO: 2215049 - RNA, 22 nt, Human
cugaaugaaacccccacacaca

SEQ ID NO: 2215050 - RNA, 21 nt, Human
cugaaugaaacccccacacac

SEQ ID NO: 2215051 - RNA, 20 nt, Human
cugaaugaaacccccacaca

SEQ ID NO: 2215052 - RNA, 19 nt, Human
cugaaugaaacccccacac

SEQ ID NO: 2215053 - RNA, 18 nt, Human
cugaaugaaacccccaca

SEQ ID NO: 2215054 - RNA, 17 nt, Human
cugaaugaaacccccac

SEQ ID NO: 2215055 - RNA, 19 nt, Human
cugaaucccccuugccacc

SEQ ID NO: 2215056 - RNA, 20 nt, Human
cugaaucccccuugccaccc

SEQ ID NO: 2215057 - RNA, 21 nt, Human
cugaaucccccuugccacccc

SEQ ID NO: 2215058 - RNA, 22 nt, Human
cugaaucccccuugccacccca

SEQ ID NO: 2215059 - RNA, 15 nt, Human
cugaauagcagaagg

SEQ ID NO: 2215060 - RNA, 18 nt, Human
cugaauaggcgaucacaa

SEQ ID NO: 2215061 - RNA, 17 nt, Human
cugaauauacagcaggu

SEQ ID NO: 2215062 - RNA, 21 nt, Human
cugaauaggcgaucacaacgu

SEQ ID NO: 2215063 - RNA, 23 nt, Human
cugaauaggcgaucacaacgugc

SEQ ID NO: 2215064 - RNA, 21 nt, Human
cugaauauuuauauuucacua

SEQ ID NO: 2215065 - RNA, 20 nt, Human
cugaauauuuauauuucacu

SEQ ID NO: 2215066 - RNA, 16 nt, Human
cugaauauuuauauuu

SEQ ID NO: 2215067 - RNA, 21 nt, Human
cugaauaugaacggugagcau

SEQ ID NO: 2215068 - RNA, 19 nt, Human
cugaauaugaggcauuugg

SEQ ID NO: 2215069 - RNA, 22 nt, Human
cugaaucauucucgauuuaacu

SEQ ID NO: 2215070 - RNA, 20 nt, Human
cugaauccaaacuaauccau

SEQ ID NO: 2215071 - RNA, 19 nt, Human
cugaauccaaacuaaucca

SEQ ID NO: 2215072 - RNA, 15 nt, Human
cugaauuguccccag

SEQ ID NO: 2215073 - RNA, 17 nt, Human
cugaauucuauuugcug

SEQ ID NO: 2215074 - RNA, 23 nt, Human
cugaauucuauuugcugggcuuu

SEQ ID NO: 2215075 - RNA, 16 nt, Human
cugaauuguccccagu

SEQ ID NO: 2215076 - RNA, 19 nt, Human
cugacagacacaggcccgg

SEQ ID NO: 2215077 - RNA, 12 nt, Human
cugacagaggag

SEQ ID NO: 2215078 - RNA, 23 nt, Human
cugacagcugcuccuagagggag

SEQ ID NO: 2215079 - RNA, 19 nt, Human
cugacagcugcuccuagag

SEQ ID NO: 2215080 - RNA, 11 nt, Human
cugacaggcaa

SEQ ID NO: 2215081 - RNA, 21 nt, Human
cugacagacacaggcccggcu

SEQ ID NO: 2215082 - RNA, 19 nt, Human
cugacagacagcccuccau

SEQ ID NO: 2215083 - RNA, 17 nt, Human
cugacagacagcccucc

SEQ ID NO: 2215084 - RNA, 17 nt, Human
cugacauuguuggccaa

SEQ ID NO: 2215085 - RNA, 23 nt, Human
cugacauucaccugccccaacuc

SEQ ID NO: 2215086 - RNA, 17 nt, Human
cugacauucaccugccc

SEQ ID NO: 2215087 - RNA, 23 nt, Human
cugacauuaacaguuuuccauga

SEQ ID NO: 2215088 - RNA, 22 nt, Human
cugacagcugcuccuagaggga

SEQ ID NO: 2215089 - RNA, 16 nt, Human
cugacauucaccugcc

SEQ ID NO: 2215090 - RNA, 21 nt, Human
cugacauuaacaguuuuccau

SEQ ID NO: 2215091 - RNA, 20 nt, Human
cugacaggcaaugcuggcug

SEQ ID NO: 2215092 - RNA, 16 nt, Human
cugacaggcaaugcug

SEQ ID NO: 2215093 - RNA, 17 nt, Human
cugacaggcaaugcugg

SEQ ID NO: 2215094 - RNA, 18 nt, Human
cugacaggcaaugcuggc

SEQ ID NO: 2215095 - RNA, 19 nt, Human
cugacaggcaaugcuggcu

SEQ ID NO: 2215096 - RNA, 21 nt, Human
cugaccacacuuccuguccag

SEQ ID NO: 2215097 - RNA, 14 nt, Human
cugacauuggagcc

SEQ ID NO: 2215098 - RNA, 19 nt, Human
cugacauucucaggaagcc

SEQ ID NO: 2215099 - RNA, 15 nt, Human
cugaccacagcacag

SEQ ID NO: 2215100 - RNA, 14 nt, Human
cugaccacagcaca

SEQ ID NO: 2215101 - RNA, 12 nt, Human
cugaccacagca

SEQ ID NO: 2215102 - RNA, 15 nt, Human
cugacauuggagccu

SEQ ID NO: 2215103 - RNA, 16 nt, Human
cugacauuggagccug

SEQ ID NO: 2215104 - RNA, 22 nt, Human
cugaccacgcuuucuagcuguu

SEQ ID NO: 2215105 - RNA, 22 nt, Human
cugaccacggacguuuccauca

SEQ ID NO: 2215106 - RNA, 23 nt, Human
cugaccacggacguuuccaucag

SEQ ID NO: 2215107 - RNA, 18 nt, Human
cugaccacagcacagcca

SEQ ID NO: 2215108 - RNA, 20 nt, Human
cugacauuguggcacauucu

SEQ ID NO: 2215109 - RNA, 12 nt, Human
cugaccacccuc

SEQ ID NO: 2215110 - RNA, 13 nt, Human
cugaccacccucc

SEQ ID NO: 2215111 - RNA, 14 nt, Human
cugaccacccuccc

SEQ ID NO: 2215112 - RNA, 16 nt, Human
cugaccacccuccccu

SEQ ID NO: 2215113 - RNA, 17 nt, Human
cugaccacccuccccuc

SEQ ID NO: 2215114 - RNA, 16 nt, Human
cugaccauccacucua

SEQ ID NO: 2215115 - RNA, 15 nt, Human
cugaccauccacucu

SEQ ID NO: 2215116 - RNA, 15 nt, Human
cugaccagcagcgcc

SEQ ID NO: 2215117 - RNA, 14 nt, Human
cugaccagcagcgc

SEQ ID NO: 2215118 - RNA, 13 nt, Human
cugaccagcagcg

SEQ ID NO: 2215119 - RNA, 13 nt, Human
cugaccagaacua

SEQ ID NO: 2215120 - RNA, 22 nt, Human
cugaccauccacucuacccucc

SEQ ID NO: 2215121 - RNA, 19 nt, Human
cugaccauccacucuaccc

SEQ ID NO: 2215122 - RNA, 23 nt, Human
cugaccauccacucuacccuccc

SEQ ID NO: 2215123 - RNA, 15 nt, Human
cugaccaugcucauc

SEQ ID NO: 2215124 - RNA, 11 nt, Human
cugacccacug

SEQ ID NO: 2215125 - RNA, 21 nt, Human
cugaaccuggguaacuaggga

SEQ ID NO: 2215126 - RNA, 20 nt, Human
cugaaccggcuuuaccaaac

SEQ ID NO: 2215127 - RNA, 17 nt, Human
cugaaccugaugcugac

SEQ ID NO: 2215128 - RNA, 14 nt, Human
cugaaccugaugcu

SEQ ID NO: 2215129 - RNA, 17 nt, Human
cugaaccggcuuuacca

SEQ ID NO: 2215130 - RNA, 15 nt, Human
cucuuugggaauguu

SEQ ID NO: 2215131 - RNA, 20 nt, Human
cucuuugggaauguuugucu

SEQ ID NO: 2215132 - RNA, 21 nt, Human
cucuuugggaauguuugucuc

SEQ ID NO: 2215133 - RNA, 17 nt, Human
cucuuuggggucagcca

SEQ ID NO: 2215134 - RNA, 19 nt, Human
cucuuuggggucagccagg

SEQ ID NO: 2215135 - RNA, 20 nt, Human
cucuuuggggucagccaggg

SEQ ID NO: 2215136 - RNA, 17 nt, Human
cugaacccugugcuggu

SEQ ID NO: 2215137 - RNA, 18 nt, Human
cugaacccugugcuggug

SEQ ID NO: 2215138 - RNA, 23 nt, Human
cugaacccugugcugguguccug

SEQ ID NO: 2215139 - RNA, 20 nt, Human
cugaacccugugcugguguc

SEQ ID NO: 2215140 - RNA, 18 nt, Human
cucuuugggccuggcucc

SEQ ID NO: 2215141 - RNA, 22 nt, Human
cucuuugcuuugcuuucugcuc

SEQ ID NO: 2215142 - RNA, 20 nt, Human
cucuuugcuuugcuuucugc

SEQ ID NO: 2215143 - RNA, 15 nt, Human
cucuuuggcagucua

SEQ ID NO: 2215144 - RNA, 18 nt, Human
cucuuuggcuccccugua

SEQ ID NO: 2215145 - RNA, 19 nt, Human
cucuuuggucuacacugug

SEQ ID NO: 2215146 - RNA, 21 nt, Human
cucuuuggucuacacugugcu

SEQ ID NO: 2215147 - RNA, 13 nt, Human
cugaacggggaga

SEQ ID NO: 2215148 - RNA, 14 nt, Human
cugaaccuuccauc

SEQ ID NO: 2215149 - RNA, 15 nt, Human
cugaacuuggcgcug

SEQ ID NO: 2215150 - RNA, 16 nt, Human
cugaacuuggcgcugc

SEQ ID NO: 2215151 - RNA, 21 nt, Human
cugaacuuggcgcugccccug

SEQ ID NO: 2215152 - RNA, 20 nt, Human
cugaagagcuauuauauaaa

SEQ ID NO: 2215153 - RNA, 14 nt, Human
cugaagaggcgggc

SEQ ID NO: 2215154 - RNA, 15 nt, Human
cugaagaggcgggcc

SEQ ID NO: 2215155 - RNA, 16 nt, Human
cugaagaggcgggcca

SEQ ID NO: 2215156 - RNA, 21 nt, Human
cugaagagaagggcagggcug

SEQ ID NO: 2215157 - RNA, 22 nt, Human
cugaacuucaggauaauaaagu

SEQ ID NO: 2215158 - RNA, 16 nt, Human
cugaaccuuccaucuc

SEQ ID NO: 2215159 - RNA, 19 nt, Human
cugaagacucauucuucug

SEQ ID NO: 2215160 - RNA, 21 nt, Human
cugaagacucauucuucugua

SEQ ID NO: 2215161 - RNA, 16 nt, Human
cugaauacagaggcaa

SEQ ID NO: 2215162 - RNA, 11 nt, Human
cugaauaauaa

SEQ ID NO: 2215163 - RNA, 15 nt, Human
cugaauaacauuugu

SEQ ID NO: 2215164 - RNA, 20 nt, Human
cugaauaacauuuguguggu

SEQ ID NO: 2215165 - RNA, 18 nt, Human
cugaauacauucugcuuu

SEQ ID NO: 2215166 - RNA, 16 nt, Human
cugaauacauucugcu

SEQ ID NO: 2215167 - RNA, 13 nt, Human
cugaauaauuucu

SEQ ID NO: 2215168 - RNA, 15 nt, Human
cugaauaauuucuua

SEQ ID NO: 2215169 - RNA, 16 nt, Human
cugaauaauuucuuac

SEQ ID NO: 2215170 - RNA, 16 nt, Human
cugaauacaaagugau

SEQ ID NO: 2215171 - RNA, 19 nt, Human
cugaagugaaacugcuugu

SEQ ID NO: 2215172 - RNA, 18 nt, Human
cugaagugagcacagccu

SEQ ID NO: 2215173 - RNA, 19 nt, Human
cugaagugagcacagccua

SEQ ID NO: 2215174 - RNA, 21 nt, Human
cugaagugagcacagccuagg

SEQ ID NO: 2215175 - RNA, 17 nt, Human
cugaagugaaacugcuu

SEQ ID NO: 2215176 - RNA, 13 nt, Human
cugaagugaaacu

SEQ ID NO: 2215177 - RNA, 16 nt, Human
cugaagugcuuagugu

SEQ ID NO: 2215178 - RNA, 19 nt, Human
cugaagugcauccaaaggu

SEQ ID NO: 2215179 - RNA, 22 nt, Human
cugaagugcauccaaaggugcu

SEQ ID NO: 2215180 - RNA, 14 nt, Human
cugaagugcaucca

SEQ ID NO: 2215181 - RNA, 16 nt, Human
cugaagugcauccaaa

SEQ ID NO: 2215182 - RNA, 17 nt, Human
cugaagugcauccaaag

SEQ ID NO: 2215183 - RNA, 18 nt, Human
cugaagugcauccaaagg

SEQ ID NO: 2215184 - RNA, 15 nt, Human
cugaaguggacucuu

SEQ ID NO: 2215185 - RNA, 23 nt, Human
cugaaguggacucuuugguggcu

SEQ ID NO: 2215186 - RNA, 12 nt, Human
cugaauaaaugg

SEQ ID NO: 2215187 - RNA, 14 nt, Human
cugaauaaauggua

SEQ ID NO: 2215188 - RNA, 17 nt, Human
cugaauaaaugguagua

SEQ ID NO: 2215189 - RNA, 12 nt, Human
cugaauaaaugu

SEQ ID NO: 2215190 - RNA, 13 nt, Human
cugaauaaauguc

SEQ ID NO: 2215191 - RNA, 15 nt, Human
cugaauaaaugucuu

SEQ ID NO: 2215192 - RNA, 17 nt, Human
cugaagucacugcacag

SEQ ID NO: 2215193 - RNA, 16 nt, Human
cugaagucacugcaca

SEQ ID NO: 2215194 - RNA, 22 nt, Human
cugaagucacugcacagugcau

SEQ ID NO: 2215195 - RNA, 24 nt, Human
cugaagucuuuguacagacaacaa

SEQ ID NO: 2215196 - RNA, 14 nt, Human
cugaagucacacag

SEQ ID NO: 2215197 - RNA, 20 nt, Human
cugaagaggcgggccagcca

SEQ ID NO: 2215198 - RNA, 15 nt, Human
cugaagguugaagag

SEQ ID NO: 2215199 - RNA, 18 nt, Human
cugaagaggcgggccagc

SEQ ID NO: 2215200 - RNA, 19 nt, Human
cugaagaggcgggccagcc

SEQ ID NO: 2215201 - RNA, 21 nt, Human
cugaagaggcgggccagccag

SEQ ID NO: 2215202 - RNA, 19 nt, Human
cugaagguaaaauugaaag

SEQ ID NO: 2215203 - RNA, 15 nt, Human
cugaagucacacagu

SEQ ID NO: 2215204 - RNA, 16 nt, Human
cugaagucacacagug

SEQ ID NO: 2215205 - RNA, 17 nt, Human
cugaaguagugugcagu

SEQ ID NO: 2215206 - RNA, 22 nt, Human
cucuucagguucuuagugucac

SEQ ID NO: 2215207 - RNA, 15 nt, Human
cucuucagguucuua

SEQ ID NO: 2215208 - RNA, 14 nt, Human
cucuucagguucuu

SEQ ID NO: 2215209 - RNA, 19 nt, Human
cucuucaguuaagccuuug

SEQ ID NO: 2215210 - RNA, 23 nt, Human
cucuucaguuaagccuuuggaaa

SEQ ID NO: 2215211 - RNA, 20 nt, Human
cucuucaguuaagccuuugg

SEQ ID NO: 2215212 - RNA, 20 nt, Human
cucuucaggccucccucucu

SEQ ID NO: 2215213 - RNA, 19 nt, Human
cucuucaggccucccucuc

SEQ ID NO: 2215214 - RNA, 18 nt, Human
cucuucaggccucccucu

SEQ ID NO: 2215215 - RNA, 22 nt, Human
cucuuaaagaaaacccaccccg

SEQ ID NO: 2215216 - RNA, 17 nt, Human
cucuuaacaauuucugu

SEQ ID NO: 2215217 - RNA, 13 nt, Human
cucuuaagaagac

SEQ ID NO: 2215218 - RNA, 20 nt, Human
cucuuaaagcugccuguagu

SEQ ID NO: 2215219 - RNA, 20 nt, Human
cucuuaaagaaaacccaccc

SEQ ID NO: 2215220 - RNA, 20 nt, Human
cucuguugcaagugcaauaa

SEQ ID NO: 2215221 - RNA, 24 nt, Human
cucuuaaaacccaagugccuuagc

SEQ ID NO: 2215222 - RNA, 13 nt, Human
cucuuaaaaccca

SEQ ID NO: 2215223 - RNA, 16 nt, Human
cucuguuccuucacau

SEQ ID NO: 2215224 - RNA, 20 nt, Human
cucuggcagcucagagaggg

SEQ ID NO: 2215225 - RNA, 19 nt, Human
cucuggcagcucagagagg

SEQ ID NO: 2215226 - RNA, 22 nt, Human
cucuguuccuucacauccugug

SEQ ID NO: 2215227 - RNA, 23 nt, Human
cucuguuccccuaguaagugccu

SEQ ID NO: 2215228 - RNA, 19 nt, Human
cucuguucugcacacagca

SEQ ID NO: 2215229 - RNA, 21 nt, Human
cucuguucugcacacagcacg

SEQ ID NO: 2215230 - RNA, 20 nt, Human
cucuguucugcacacagcac

SEQ ID NO: 2215231 - RNA, 15 nt, Human
cucuggagcccacug

SEQ ID NO: 2215232 - RNA, 17 nt, Human
cucuggcagcucagaga

SEQ ID NO: 2215233 - RNA, 18 nt, Human
cucuggcagcucagagag

SEQ ID NO: 2215234 - RNA, 18 nt, Human
cucuucugcuccacccuu

SEQ ID NO: 2215235 - RNA, 16 nt, Human
cucuucugcuccaccc

SEQ ID NO: 2215236 - RNA, 15 nt, Human
cucuucugcuccacc

SEQ ID NO: 2215237 - RNA, 14 nt, Human
cucuucugcuccac

SEQ ID NO: 2215238 - RNA, 20 nt, Human
cucuucugcuccacccuugg

SEQ ID NO: 2215239 - RNA, 19 nt, Human
cucuucugcuccacccuug

SEQ ID NO: 2215240 - RNA, 21 nt, Human
cucuucugcuccacccuuggc

SEQ ID NO: 2215241 - RNA, 20 nt, Human
cucuucugcuuaggagagac

SEQ ID NO: 2215242 - RNA, 14 nt, Human
cucuucuggcucaa

SEQ ID NO: 2215243 - RNA, 11 nt, Human
cucuucuggcu

SEQ ID NO: 2215244 - RNA, 22 nt, Human
cucuucugggagggcagcaggg

SEQ ID NO: 2215245 - RNA, 21 nt, Human
cucuucugggagggcagcagg

SEQ ID NO: 2215246 - RNA, 13 nt, Human
cucuucuccuuuc

SEQ ID NO: 2215247 - RNA, 15 nt, Human
cucuucuccuuucac

SEQ ID NO: 2215248 - RNA, 16 nt, Human
cucuucuccuuucaca

SEQ ID NO: 2215249 - RNA, 12 nt, Human
cucuucuccagg

SEQ ID NO: 2215250 - RNA, 19 nt, Human
cucuucuccacuggaugga

SEQ ID NO: 2215251 - RNA, 16 nt, Human
cucuucuccccagagu

SEQ ID NO: 2215252 - RNA, 15 nt, Human
cucuucuccacugga

SEQ ID NO: 2215253 - RNA, 17 nt, Human
cucuucuccacuggaug

SEQ ID NO: 2215254 - RNA, 14 nt, Human
cucuucuccacugg

SEQ ID NO: 2215255 - RNA, 23 nt, Human
cucuuccagucuuccugacacuu

SEQ ID NO: 2215256 - RNA, 22 nt, Human
cucuuccagucuuccugacacu

SEQ ID NO: 2215257 - RNA, 19 nt, Human
cucuucauacuuuuuuuca

SEQ ID NO: 2215258 - RNA, 19 nt, Human
cucuuccagucuuccugac

SEQ ID NO: 2215259 - RNA, 15 nt, Human
cucuucauaauucua

SEQ ID NO: 2215260 - RNA, 13 nt, Human
cucuucauacuuu

SEQ ID NO: 2215261 - RNA, 23 nt, Human
cucuuccaggcugggagagccuu

SEQ ID NO: 2215262 - RNA, 22 nt, Human
cucuuccaggcugggagagccu

SEQ ID NO: 2215263 - RNA, 21 nt, Human
cucuuccaggcugggagagcc

SEQ ID NO: 2215264 - RNA, 17 nt, Human
cucuuguaaauaaagcc

SEQ ID NO: 2215265 - RNA, 18 nt, Human
cucuuguaaauaaagccc

SEQ ID NO: 2215266 - RNA, 19 nt, Human
cucuuguaaauaaagcccu

SEQ ID NO: 2215267 - RNA, 20 nt, Human
cucuuguaaauaaagcccug

SEQ ID NO: 2215268 - RNA, 23 nt, Human
cucuuguaaauaaagcccuggga

SEQ ID NO: 2215269 - RNA, 24 nt, Human
cucuuguaaauaaagcccugggau

SEQ ID NO: 2215270 - RNA, 20 nt, Human
cucuugugaggaaagucauu

SEQ ID NO: 2215271 - RNA, 15 nt, Human
cucuuguauuaaacu

SEQ ID NO: 2215272 - RNA, 21 nt, Human
cucuuguaauccgaaucucuu

SEQ ID NO: 2215273 - RNA, 16 nt, Human
cucuuggucuucccag

SEQ ID NO: 2215274 - RNA, 23 nt, Human
cucuuguaaugauauagccagaa

SEQ ID NO: 2215275 - RNA, 17 nt, Human
cucuuuccaucuacccu

SEQ ID NO: 2215276 - RNA, 12 nt, Human
cucuuucaucca

SEQ ID NO: 2215277 - RNA, 13 nt, Human
cucuuucauccac

SEQ ID NO: 2215278 - RNA, 11 nt, Human
cucuuucaaag

SEQ ID NO: 2215279 - RNA, 22 nt, Human
cucuuucaagcagucgugccug

SEQ ID NO: 2215280 - RNA, 23 nt, Human
cucuugugcuggauggagcccag

SEQ ID NO: 2215281 - RNA, 12 nt, Human
cucuuucaaaac

SEQ ID NO: 2215282 - RNA, 14 nt, Human
cucuugugcuggau

SEQ ID NO: 2215283 - RNA, 12 nt, Human
cucuuucugggc

SEQ ID NO: 2215284 - RNA, 13 nt, Human
cucuuucuguaua

SEQ ID NO: 2215285 - RNA, 11 nt, Human
cucuuucugua

SEQ ID NO: 2215286 - RNA, 18 nt, Human
cucuuugcuuugcuuucu

SEQ ID NO: 2215287 - RNA, 16 nt, Human
cucuuugcuuugcuuu

SEQ ID NO: 2215288 - RNA, 15 nt, Human
cucuuugcuuugcuu

SEQ ID NO: 2215289 - RNA, 14 nt, Human
cucuuugcuuugcu

SEQ ID NO: 2215290 - RNA, 13 nt, Human
cucuuugcuuugc

SEQ ID NO: 2215291 - RNA, 15 nt, Human
cucuuucucuccuuu

SEQ ID NO: 2215292 - RNA, 12 nt, Human
cucuuugcuuug

SEQ ID NO: 2215293 - RNA, 18 nt, Human
cucuuuggacacucacac

SEQ ID NO: 2215294 - RNA, 15 nt, Human
cucuuuggacacuca

SEQ ID NO: 2215295 - RNA, 18 nt, Human
cucuuucuccuuagucuu

SEQ ID NO: 2215296 - RNA, 17 nt, Human
cucuuucuauuguuucu

SEQ ID NO: 2215297 - RNA, 12 nt, Human
cucuuucucugc

SEQ ID NO: 2215298 - RNA, 19 nt, Human
cucuuucucuccuuucuuu

SEQ ID NO: 2215299 - RNA, 13 nt, Human
cucuuucucugcc

SEQ ID NO: 2215300 - RNA, 15 nt, Human
cucuuucucugccag

SEQ ID NO: 2215301 - RNA, 16 nt, Human
cucuuucucugccagu

SEQ ID NO: 2215302 - RNA, 17 nt, Human
cucuuucucugccagug

SEQ ID NO: 2215303 - RNA, 18 nt, Human
cucuuucucugccaguga

SEQ ID NO: 2215304 - RNA, 21 nt, Human
cucuugaagacacugaaauau

SEQ ID NO: 2215305 - RNA, 20 nt, Human
cucuugaagacacugaaaua

SEQ ID NO: 2215306 - RNA, 19 nt, Human
cucuugaacugagcuugga

SEQ ID NO: 2215307 - RNA, 20 nt, Human
cucuugaagaugcugaaaca

SEQ ID NO: 2215308 - RNA, 18 nt, Human
cucuucuggguuccuucc

SEQ ID NO: 2215309 - RNA, 18 nt, Human
cucuugaacuccugaccu

SEQ ID NO: 2215310 - RNA, 17 nt, Human
cucuugaacugagcuug

SEQ ID NO: 2215311 - RNA, 16 nt, Human
cucuugaacugagcuu

SEQ ID NO: 2215312 - RNA, 16 nt, Human
cucuugaccucaggug

SEQ ID NO: 2215313 - RNA, 15 nt, Human
cucuugagcaguggc

SEQ ID NO: 2215314 - RNA, 18 nt, Human
cucuugagcaguggcugg

SEQ ID NO: 2215315 - RNA, 22 nt, Human
cucuugagcaguggcuggucca

SEQ ID NO: 2215316 - RNA, 13 nt, Human
cucuugaccucag

SEQ ID NO: 2215317 - RNA, 15 nt, Human
cucuugaccucaggu

SEQ ID NO: 2215318 - RNA, 12 nt, Human
cucuuguaaaua

SEQ ID NO: 2215319 - RNA, 14 nt, Human
cucuuguaaauaaa

SEQ ID NO: 2215320 - RNA, 20 nt, Human
cucuugguuuccuuccuugg

SEQ ID NO: 2215321 - RNA, 18 nt, Human
cucuuggucuucccaggc

SEQ ID NO: 2215322 - RNA, 17 nt, Human
cucuugggcugagacug

SEQ ID NO: 2215323 - RNA, 15 nt, Human
cucuuggucuuccca

SEQ ID NO: 2215324 - RNA, 18 nt, Human
cucuugggcugagacugg

SEQ ID NO: 2215325 - RNA, 18 nt, Human
cucuugguccugcugcag

SEQ ID NO: 2215326 - RNA, 19 nt, Human
cucuugguccugcugcagu

SEQ ID NO: 2215327 - RNA, 16 nt, Human
cucuuggccugaucag

SEQ ID NO: 2215328 - RNA, 14 nt, Human
cucuuggcuccacu

SEQ ID NO: 2215329 - RNA, 20 nt, Human
cucuugagaucuugguccug

SEQ ID NO: 2215330 - RNA, 22 nt, Human
cucuuggagccugcagagcugc

SEQ ID NO: 2215331 - RNA, 19 nt, Human
cucuugggaaauaugucaa

SEQ ID NO: 2215332 - RNA, 21 nt, Human
cucuugggaacugaacucacu

SEQ ID NO: 2215333 - RNA, 16 nt, Human
cucuugggcugagacu

SEQ ID NO: 2215334 - RNA, 15 nt, Human
cucuugggcugagac

SEQ ID NO: 2215335 - RNA, 21 nt, Human
cucuggaaaaugugacccaga

SEQ ID NO: 2215336 - RNA, 19 nt, Human
cucuggaaaaugugaccca

SEQ ID NO: 2215337 - RNA, 20 nt, Human
cucuggaaaaugugacccag

SEQ ID NO: 2215338 - RNA, 15 nt, Human
cucugcuuuggaaau

SEQ ID NO: 2215339 - RNA, 14 nt, Human
cucuggaauuugaa

SEQ ID NO: 2215340 - RNA, 21 nt, Human
cucugccugucccucucaggc

SEQ ID NO: 2215341 - RNA, 14 nt, Human
cucugcggacccca

SEQ ID NO: 2215342 - RNA, 15 nt, Human
cucugcggaccccag

SEQ ID NO: 2215343 - RNA, 16 nt, Human
cucugcggaccccagc

SEQ ID NO: 2215344 - RNA, 17 nt, Human
cucugcggaccccagcu

SEQ ID NO: 2215345 - RNA, 19 nt, Human
cucugcggaccccagcugu

SEQ ID NO: 2215346 - RNA, 20 nt, Human
cucugcggaccccagcugug

SEQ ID NO: 2215347 - RNA, 14 nt, Human
cucugccucugaca

SEQ ID NO: 2215348 - RNA, 15 nt, Human
cucugccuccucuuc

SEQ ID NO: 2215349 - RNA, 16 nt, Human
cucugccuccucuuca

SEQ ID NO: 2215350 - RNA, 20 nt, Human
cucugccugucccucucagg

SEQ ID NO: 2215351 - RNA, 19 nt, Human
cucugccugucccucucag

SEQ ID NO: 2215352 - RNA, 18 nt, Human
cucugccugucccucuca

SEQ ID NO: 2215353 - RNA, 16 nt, Human
cucugccugucccucu

SEQ ID NO: 2215354 - RNA, 14 nt, Human
cucugccugucccu

SEQ ID NO: 2215355 - RNA, 13 nt, Human
cucugccuguccc

SEQ ID NO: 2215356 - RNA, 20 nt, Human
cucugccugccccgccccca

SEQ ID NO: 2215357 - RNA, 15 nt, Human
cucuggacggcaggc

SEQ ID NO: 2215358 - RNA, 22 nt, Human
cucuggaccaacccuguuuccu

SEQ ID NO: 2215359 - RNA, 13 nt, Human
cucuggaccagcc

SEQ ID NO: 2215360 - RNA, 14 nt, Human
cucuggaccagccu

SEQ ID NO: 2215361 - RNA, 20 nt, Human
cucuggaccagccuguugga

SEQ ID NO: 2215362 - RNA, 16 nt, Human
cucuggacggcaggcu

SEQ ID NO: 2215363 - RNA, 17 nt, Human
cucuggacggcaggcuc

SEQ ID NO: 2215364 - RNA, 18 nt, Human
cucuggacggcaggcuca

SEQ ID NO: 2215365 - RNA, 13 nt, Human
cucuggacuggcu

SEQ ID NO: 2215366 - RNA, 23 nt, Human
cucuggacggcaggcucacugcc

SEQ ID NO: 2215367 - RNA, 21 nt, Human
cucuggaagagaggaaugccu

SEQ ID NO: 2215368 - RNA, 21 nt, Human
cucuggaaaggggggagcugg

SEQ ID NO: 2215369 - RNA, 22 nt, Human
cucuggaaaggggggagcuggg

SEQ ID NO: 2215370 - RNA, 16 nt, Human
cucuggacaaagcguu

SEQ ID NO: 2215371 - RNA, 15 nt, Human
cucuggacagcccca

SEQ ID NO: 2215372 - RNA, 18 nt, Human
cucuggacagccccaccc

SEQ ID NO: 2215373 - RNA, 20 nt, Human
cucuggaauuugcaagucau

SEQ ID NO: 2215374 - RNA, 16 nt, Human
cucuggaccaacccug

SEQ ID NO: 2215375 - RNA, 15 nt, Human
cucuggagacagccc

SEQ ID NO: 2215376 - RNA, 16 nt, Human
cucuggagacagcccc

SEQ ID NO: 2215377 - RNA, 17 nt, Human
cucuggagacagcccca

SEQ ID NO: 2215378 - RNA, 18 nt, Human
cucuggagacagccccag

SEQ ID NO: 2215379 - RNA, 19 nt, Human
cucuggagacagccccaga

SEQ ID NO: 2215380 - RNA, 19 nt, Human
cucuggacuggcuagaguc

SEQ ID NO: 2215381 - RNA, 16 nt, Human
cucuggacuggcuaga

SEQ ID NO: 2215382 - RNA, 15 nt, Human
cucuggacuggcuag

SEQ ID NO: 2215383 - RNA, 14 nt, Human
cucuggacuggcua

SEQ ID NO: 2215384 - RNA, 12 nt, Human
cucuggagccca

SEQ ID NO: 2215385 - RNA, 15 nt, Human
cucuggagagaaaca

SEQ ID NO: 2215386 - RNA, 19 nt, Human
cucuggagccaaguccaga

SEQ ID NO: 2215387 - RNA, 20 nt, Human
cucuggagacagccccagag

SEQ ID NO: 2215388 - RNA, 24 nt, Human
cucuggagacagccccagagcagg

SEQ ID NO: 2215389 - RNA, 12 nt, Human
cucuggagagaa

SEQ ID NO: 2215390 - RNA, 13 nt, Human
cucuggagagaaa

SEQ ID NO: 2215391 - RNA, 14 nt, Human
cucugccuccucuu

SEQ ID NO: 2215392 - RNA, 20 nt, Human
cucugccucccucacccuga

SEQ ID NO: 2215393 - RNA, 21 nt, Human
cucugccucccucacccugag

SEQ ID NO: 2215394 - RNA, 12 nt, Human
cucugcccugcg

SEQ ID NO: 2215395 - RNA, 23 nt, Human
cucugcccugcccuagcuccaca

SEQ ID NO: 2215396 - RNA, 20 nt, Human
cucugcccugcccuagcucc

SEQ ID NO: 2215397 - RNA, 19 nt, Human
cucugcccugcccuagcuc

SEQ ID NO: 2215398 - RNA, 17 nt, Human
cucugcccugcccuagc

SEQ ID NO: 2215399 - RNA, 16 nt, Human
cucugcccugcccuag

SEQ ID NO: 2215400 - RNA, 15 nt, Human
cucugcccugcccua

SEQ ID NO: 2215401 - RNA, 11 nt, Human
cucugcccugc

SEQ ID NO: 2215402 - RNA, 23 nt, Human
cucugcccuaaugcgcaggcugg

SEQ ID NO: 2215403 - RNA, 14 nt, Human
cucugcccuccaag

SEQ ID NO: 2215404 - RNA, 15 nt, Human
cucugcccuccaaga

SEQ ID NO: 2215405 - RNA, 16 nt, Human
cucugcccuccaagac

SEQ ID NO: 2215406 - RNA, 23 nt, Human
cucugcccuccaagaccuucucc

SEQ ID NO: 2215407 - RNA, 14 nt, Human
cucugccaccuccc

SEQ ID NO: 2215408 - RNA, 13 nt, Human
cucugccaccucc

SEQ ID NO: 2215409 - RNA, 12 nt, Human
cucugccaccuc

SEQ ID NO: 2215410 - RNA, 22 nt, Human
cucugccacccuaccuguucag

SEQ ID NO: 2215411 - RNA, 23 nt, Human
cucugccaccagagaccguccuc

SEQ ID NO: 2215412 - RNA, 17 nt, Human
cucugccacccuaccug

SEQ ID NO: 2215413 - RNA, 18 nt, Human
cucugccacccuaccugu

SEQ ID NO: 2215414 - RNA, 20 nt, Human
cucugccacccuaccuguuc

SEQ ID NO: 2215415 - RNA, 10 nt, Human
cucugccacc

SEQ ID NO: 2215416 - RNA, 11 nt, Human
cucugccacca

SEQ ID NO: 2215417 - RNA, 23 nt, Human
cucugccaacuucuucagagcug

SEQ ID NO: 2215418 - RNA, 14 nt, Human
cucugccaccagag

SEQ ID NO: 2215419 - RNA, 16 nt, Human
cucugccaccagagac

SEQ ID NO: 2215420 - RNA, 17 nt, Human
cucugccaccagagacc

SEQ ID NO: 2215421 - RNA, 18 nt, Human
cucugccaccagagaccg

SEQ ID NO: 2215422 - RNA, 14 nt, Human
cucugccagccaca

SEQ ID NO: 2215423 - RNA, 18 nt, Human
cucugccaccuccccuau

SEQ ID NO: 2215424 - RNA, 22 nt, Human
cucugccagaagauccccucag

SEQ ID NO: 2215425 - RNA, 17 nt, Human
cucugccagaagauccc

SEQ ID NO: 2215426 - RNA, 23 nt, Human
cucugccagaagauccccucagg

SEQ ID NO: 2215427 - RNA, 13 nt, Human
cucugcccagcuu

SEQ ID NO: 2215428 - RNA, 14 nt, Human
cucugcccagcuug

SEQ ID NO: 2215429 - RNA, 14 nt, Human
cucugccccagagg

SEQ ID NO: 2215430 - RNA, 18 nt, Human
cucugcccagcuugggcc

SEQ ID NO: 2215431 - RNA, 15 nt, Human
cucugcccagcuugg

SEQ ID NO: 2215432 - RNA, 17 nt, Human
cucugcccagcuugggc

SEQ ID NO: 2215433 - RNA, 12 nt, Human
cucugccccagc

SEQ ID NO: 2215434 - RNA, 18 nt, Human
cucugccccagaggccuc

SEQ ID NO: 2215435 - RNA, 20 nt, Human
cucugccccagaggccucuc

SEQ ID NO: 2215436 - RNA, 15 nt, Human
cucugccccagaggc

SEQ ID NO: 2215437 - RNA, 16 nt, Human
cucugccccagaggcc

SEQ ID NO: 2215438 - RNA, 18 nt, Human
cucugccccagcucuggc

SEQ ID NO: 2215439 - RNA, 17 nt, Human
cucugccccagcucugg

SEQ ID NO: 2215440 - RNA, 16 nt, Human
cucugccccagcucug

SEQ ID NO: 2215441 - RNA, 13 nt, Human
cucugccccagcu

SEQ ID NO: 2215442 - RNA, 21 nt, Human
cucugccccagcucuggcuuc

SEQ ID NO: 2215443 - RNA, 19 nt, Human
cucugccccagcucuggcu

SEQ ID NO: 2215444 - RNA, 22 nt, Human
cucugccccagaggccucucuc

SEQ ID NO: 2215445 - RNA, 18 nt, Human
cucugagaauuccaagga

SEQ ID NO: 2215446 - RNA, 19 nt, Human
cucugagaauuccaaggag

SEQ ID NO: 2215447 - RNA, 21 nt, Human
cucugagaauuccaaggaguu

SEQ ID NO: 2215448 - RNA, 13 nt, Human
cucugacuucugc

SEQ ID NO: 2215449 - RNA, 14 nt, Human
cucugacuucugcc

SEQ ID NO: 2215450 - RNA, 15 nt, Human
cucugacuucugccu

SEQ ID NO: 2215451 - RNA, 16 nt, Human
cucugacuucugccug

SEQ ID NO: 2215452 - RNA, 17 nt, Human
cucugacuucugccugg

SEQ ID NO: 2215453 - RNA, 18 nt, Human
cucugacuucugccugga

SEQ ID NO: 2215454 - RNA, 19 nt, Human
cucugacuucugccuggag

SEQ ID NO: 2215455 - RNA, 21 nt, Human
cucugacuucugccuggagac

SEQ ID NO: 2215456 - RNA, 12 nt, Human
cucucugcucug

SEQ ID NO: 2215457 - RNA, 16 nt, Human
cucucugcaucugacc

SEQ ID NO: 2215458 - RNA, 12 nt, Human
cucucugccacu

SEQ ID NO: 2215459 - RNA, 13 nt, Human
cucucugcuguac

SEQ ID NO: 2215460 - RNA, 22 nt, Human
cucucugcucugcgugucaccu

SEQ ID NO: 2215461 - RNA, 14 nt, Human
cucucugcucugcg

SEQ ID NO: 2215462 - RNA, 21 nt, Human
cucucugcagccagcccagcc

SEQ ID NO: 2215463 - RNA, 12 nt, Human
cucucugcccua

SEQ ID NO: 2215464 - RNA, 21 nt, Human
cucucugcccuaaugcgcagg

SEQ ID NO: 2215465 - RNA, 13 nt, Human
cucucugcccuaa

SEQ ID NO: 2215466 - RNA, 20 nt, Human
cucugaggcucuuucugggc

SEQ ID NO: 2215467 - RNA, 19 nt, Human
cucugaggcucuuucuggg

SEQ ID NO: 2215468 - RNA, 21 nt, Human
cucugaggcuggauccuagcc

SEQ ID NO: 2215469 - RNA, 13 nt, Human
cucugaggcugua

SEQ ID NO: 2215470 - RNA, 15 nt, Human
cucugaggcuuccag

SEQ ID NO: 2215471 - RNA, 16 nt, Human
cucugaggcuuccaga

SEQ ID NO: 2215472 - RNA, 18 nt, Human
cucugaggcuuccagaga

SEQ ID NO: 2215473 - RNA, 19 nt, Human
cucugaggcuuccagagag

SEQ ID NO: 2215474 - RNA, 21 nt, Human
cucugaggcuuccagagaguc

SEQ ID NO: 2215475 - RNA, 19 nt, Human
cucugagggaaagcccaga

SEQ ID NO: 2215476 - RNA, 12 nt, Human
cucugagggcuu

SEQ ID NO: 2215477 - RNA, 13 nt, Human
cucugagggcuuc

SEQ ID NO: 2215478 - RNA, 17 nt, Human
cucugagggcuuccuuu

SEQ ID NO: 2215479 - RNA, 16 nt, Human
cucugagcaaaugugg

SEQ ID NO: 2215480 - RNA, 18 nt, Human
cucugagccaguucagua

SEQ ID NO: 2215481 - RNA, 13 nt, Human
cucugagcaguga

SEQ ID NO: 2215482 - RNA, 21 nt, Human
cucugagaucuaaggauguca

SEQ ID NO: 2215483 - RNA, 22 nt, Human
cucugagaucuaaggaugucac

SEQ ID NO: 2215484 - RNA, 22 nt, Human
cucugagccccugggacugcug

SEQ ID NO: 2215485 - RNA, 13 nt, Human
cucugagccccug

SEQ ID NO: 2215486 - RNA, 15 nt, Human
cucugagcugugcag

SEQ ID NO: 2215487 - RNA, 15 nt, Human
cucugagccuuggga

SEQ ID NO: 2215488 - RNA, 13 nt, Human
cucugagcgccuc

SEQ ID NO: 2215489 - RNA, 22 nt, Human
cucugcaagaauugaagcagga

SEQ ID NO: 2215490 - RNA, 18 nt, Human
cucugauuugcaaaaaaa

SEQ ID NO: 2215491 - RNA, 20 nt, Human
cucugauuuucaaagcuuuu

SEQ ID NO: 2215492 - RNA, 22 nt, Human
cucugauuuucaaagcuuuuuc

SEQ ID NO: 2215493 - RNA, 14 nt, Human
cucugauuugcaaa

SEQ ID NO: 2215494 - RNA, 15 nt, Human
cucugauuuucaaag

SEQ ID NO: 2215495 - RNA, 19 nt, Human
cucugauuuucaaagcuuu

SEQ ID NO: 2215496 - RNA, 18 nt, Human
cucugauuuucaaagcuu

SEQ ID NO: 2215497 - RNA, 15 nt, Human
cucugaucaaguauu

SEQ ID NO: 2215498 - RNA, 23 nt, Human
cucugauauuccaugaauguauc

SEQ ID NO: 2215499 - RNA, 20 nt, Human
cucugauauuccaugaaugu

SEQ ID NO: 2215500 - RNA, 19 nt, Human
cucugauauuccaugaaug

SEQ ID NO: 2215501 - RNA, 15 nt, Human
cucugauaggccaag

SEQ ID NO: 2215502 - RNA, 18 nt, Human
cucugagggcuuccuuug

SEQ ID NO: 2215503 - RNA, 17 nt, Human
cucugaugaagaggagu

SEQ ID NO: 2215504 - RNA, 15 nt, Human
cucugaucuccaugg

SEQ ID NO: 2215505 - RNA, 22 nt, Human
cucugaucuccauggcuuccuc

SEQ ID NO: 2215506 - RNA, 22 nt, Human
cucugaucccucuacagagcuu

SEQ ID NO: 2215507 - RNA, 17 nt, Human
cucugauccuucuuccu

SEQ ID NO: 2215508 - RNA, 21 nt, Human
cucugaucccucuacagagcu

SEQ ID NO: 2215509 - RNA, 12 nt, Human
cucugaucccuc

SEQ ID NO: 2215510 - RNA, 18 nt, Human
cucugcaauuccccucug

SEQ ID NO: 2215511 - RNA, 19 nt, Human
cucugcaauuccccucugc

SEQ ID NO: 2215512 - RNA, 20 nt, Human
cucugcaauuccccucugcu

SEQ ID NO: 2215513 - RNA, 21 nt, Human
cucugcaauuccccucugcug

SEQ ID NO: 2215514 - RNA, 16 nt, Human
cucugcaaaggaaaua

SEQ ID NO: 2215515 - RNA, 17 nt, Human
cucugcaaucuucucag

SEQ ID NO: 2215516 - RNA, 18 nt, Human
cucugcaaucuucucaga

SEQ ID NO: 2215517 - RNA, 17 nt, Human
cucugcaaugggcacug

SEQ ID NO: 2215518 - RNA, 15 nt, Human
cucugcaauuccccu

SEQ ID NO: 2215519 - RNA, 18 nt, Human
cucugcaaugggcacugg

SEQ ID NO: 2215520 - RNA, 23 nt, Human
cucugcaaugggcacugggauga

SEQ ID NO: 2215521 - RNA, 16 nt, Human
cucugcaauuccccuc

SEQ ID NO: 2215522 - RNA, 17 nt, Human
cucugcaauuccccucu

SEQ ID NO: 2215523 - RNA, 23 nt, Human
cucugcauacucauuaggauggc

SEQ ID NO: 2215524 - RNA, 16 nt, Human
cucugcagugccuugg

SEQ ID NO: 2215525 - RNA, 19 nt, Human
cucugccaacuucuucaga

SEQ ID NO: 2215526 - RNA, 13 nt, Human
cucugcagugccu

SEQ ID NO: 2215527 - RNA, 14 nt, Human
cucugcagugccuu

SEQ ID NO: 2215528 - RNA, 15 nt, Human
cucugcagugccuug

SEQ ID NO: 2215529 - RNA, 22 nt, Human
cucugcaauuccccucugcugc

SEQ ID NO: 2215530 - RNA, 23 nt, Human
cucugcaauuccccucugcugcu

SEQ ID NO: 2215531 - RNA, 23 nt, Human
cucugcaggucccuaauaaagcu

SEQ ID NO: 2215532 - RNA, 18 nt, Human
cucucugcaccguacugu

SEQ ID NO: 2215533 - RNA, 16 nt, Human
cucucugcagccagcc

SEQ ID NO: 2215534 - RNA, 20 nt, Human
cucucugcagccagcccagc

SEQ ID NO: 2215535 - RNA, 19 nt, Human
cucucugcagccagcccag

SEQ ID NO: 2215536 - RNA, 18 nt, Human
cucucugcagccagccca

SEQ ID NO: 2215537 - RNA, 17 nt, Human
cucucugcagccagccc

SEQ ID NO: 2215538 - RNA, 12 nt, Human
cucucugcaggu

SEQ ID NO: 2215539 - RNA, 13 nt, Human
cucucugcagguc

SEQ ID NO: 2215540 - RNA, 14 nt, Human
cucucugcaggucc

SEQ ID NO: 2215541 - RNA, 16 nt, Human
cucucugcaggucccu

SEQ ID NO: 2215542 - RNA, 17 nt, Human
cucucugcaggucccua

SEQ ID NO: 2215543 - RNA, 19 nt, Human
cucucugcaggucccuaau

SEQ ID NO: 2215544 - RNA, 22 nt, Human
cucucugcaggucccuaauaaa

SEQ ID NO: 2215545 - RNA, 20 nt, Human
cucucggaguaucugggaac

SEQ ID NO: 2215546 - RNA, 19 nt, Human
cucucggaguaucugggaa

SEQ ID NO: 2215547 - RNA, 14 nt, Human
cucucggcucccca

SEQ ID NO: 2215548 - RNA, 15 nt, Human
cucucggcuccccau

SEQ ID NO: 2215549 - RNA, 16 nt, Human
cucucggcuccccaug

SEQ ID NO: 2215550 - RNA, 19 nt, Human
cucucggguugugugucug

SEQ ID NO: 2215551 - RNA, 19 nt, Human
cucucggguucaagcaauu

SEQ ID NO: 2215552 - RNA, 21 nt, Human
cucucgguuccacgucccccu

SEQ ID NO: 2215553 - RNA, 17 nt, Human
cucucggcuccccaugu

SEQ ID NO: 2215554 - RNA, 18 nt, Human
cucucggcuccccaugug

SEQ ID NO: 2215555 - RNA, 16 nt, Human
cucucguaacugguuu

SEQ ID NO: 2215556 - RNA, 17 nt, Human
cucucguaacugguuuc

SEQ ID NO: 2215557 - RNA, 19 nt, Human
cucucuacaaacucccacu

SEQ ID NO: 2215558 - RNA, 14 nt, Human
cucucucacuccuu

SEQ ID NO: 2215559 - RNA, 15 nt, Human
cucucucacuccuug

SEQ ID NO: 2215560 - RNA, 16 nt, Human
cucucucacuccuuga

SEQ ID NO: 2215561 - RNA, 14 nt, Human
cucucugacucuca

SEQ ID NO: 2215562 - RNA, 12 nt, Human
cucucucaggcc

SEQ ID NO: 2215563 - RNA, 22 nt, Human
cucucggaaggcuggcugggca

SEQ ID NO: 2215564 - RNA, 19 nt, Human
cucucggaaggcuggcugg

SEQ ID NO: 2215565 - RNA, 18 nt, Human
cucucggaaggcuggcug

SEQ ID NO: 2215566 - RNA, 16 nt, Human
cucucggaaggcuggc

SEQ ID NO: 2215567 - RNA, 23 nt, Human
cucucggaacugcaugcugcugg

SEQ ID NO: 2215568 - RNA, 21 nt, Human
cucucggaacugcaugcugcu

SEQ ID NO: 2215569 - RNA, 20 nt, Human
cucucggaacugcaugcugc

SEQ ID NO: 2215570 - RNA, 19 nt, Human
cucucggaacugcaugcug

SEQ ID NO: 2215571 - RNA, 16 nt, Human
cucucggaacugcaug

SEQ ID NO: 2215572 - RNA, 12 nt, Human
cucucggaacug

SEQ ID NO: 2215573 - RNA, 18 nt, Human
cucucgcaccuuuccaaa

SEQ ID NO: 2215574 - RNA, 13 nt, Human
cucuccuuuguau

SEQ ID NO: 2215575 - RNA, 14 nt, Human
cucuccuuuguaua

SEQ ID NO: 2215576 - RNA, 15 nt, Human
cucuccuuuguauau

SEQ ID NO: 2215577 - RNA, 18 nt, Human
cucuccuuuguauauuau

SEQ ID NO: 2215578 - RNA, 17 nt, Human
cucucgcaccuuuccaa

SEQ ID NO: 2215579 - RNA, 20 nt, Human
cucuccuuuguauauuauuu

SEQ ID NO: 2215580 - RNA, 22 nt, Human
cucuccuuuguauauuauuucu

SEQ ID NO: 2215581 - RNA, 19 nt, Human
cucucgcaccuuuccaaag

SEQ ID NO: 2215582 - RNA, 19 nt, Human
cucuccuuuggccauucca

SEQ ID NO: 2215583 - RNA, 12 nt, Human
cucuccugucca

SEQ ID NO: 2215584 - RNA, 23 nt, Human
cucuccuuucuuuuucuucuucc

SEQ ID NO: 2215585 - RNA, 18 nt, Human
cucuccuguacuuuuucc

SEQ ID NO: 2215586 - RNA, 11 nt, Human
cucuccccagc

SEQ ID NO: 2215587 - RNA, 22 nt, Human
cucuccuguaccucuugagccu

SEQ ID NO: 2215588 - RNA, 18 nt, Human
cucuccuguaccucuuga

SEQ ID NO: 2215589 - RNA, 17 nt, Human
cucuccuguaccucuug

SEQ ID NO: 2215590 - RNA, 13 nt, Human
cucuccuguaccu

SEQ ID NO: 2215591 - RNA, 15 nt, Human
cucuccuguaccucu

SEQ ID NO: 2215592 - RNA, 14 nt, Human
cucuccuguaccuc

SEQ ID NO: 2215593 - RNA, 12 nt, Human
cucuccccacac

SEQ ID NO: 2215594 - RNA, 14 nt, Human
cucucccauuuccu

SEQ ID NO: 2215595 - RNA, 19 nt, Human
cucucccauugucccucug

SEQ ID NO: 2215596 - RNA, 18 nt, Human
cucucccauugucccucu

SEQ ID NO: 2215597 - RNA, 16 nt, Human
cucucccauugucccu

SEQ ID NO: 2215598 - RNA, 13 nt, Human
cucucccauggcu

SEQ ID NO: 2215599 - RNA, 13 nt, Human
cucucccauggag

SEQ ID NO: 2215600 - RNA, 14 nt, Human
cucucccauggagc

SEQ ID NO: 2215601 - RNA, 16 nt, Human
cucucccauggagccc

SEQ ID NO: 2215602 - RNA, 18 nt, Human
cucucccauggagcccca

SEQ ID NO: 2215603 - RNA, 19 nt, Human
cucucccauggagccccag

SEQ ID NO: 2215604 - RNA, 21 nt, Human
cucucccauggagccccagcc

SEQ ID NO: 2215605 - RNA, 22 nt, Human
cucucccauggagccccagccc

SEQ ID NO: 2215606 - RNA, 23 nt, Human
cucucccauggagccccagcccc

SEQ ID NO: 2215607 - RNA, 15 nt, Human
cucuccccacacuaa

SEQ ID NO: 2215608 - RNA, 14 nt, Human
cucuccccacacua

SEQ ID NO: 2215609 - RNA, 13 nt, Human
cucuccccacacu

SEQ ID NO: 2215610 - RNA, 13 nt, Human
cucuccccagcaa

SEQ ID NO: 2215611 - RNA, 21 nt, Human
cucucccauugucccucugcc

SEQ ID NO: 2215612 - RNA, 23 nt, Human
cucuccaagucucaguggcuuca

SEQ ID NO: 2215613 - RNA, 20 nt, Human
cucuccaagucucaguggcu

SEQ ID NO: 2215614 - RNA, 17 nt, Human
cucucaucucuuagcuc

SEQ ID NO: 2215615 - RNA, 13 nt, Human
cucucaugaaccu

SEQ ID NO: 2215616 - RNA, 21 nt, Human
cucucaguuccgauuucccag

SEQ ID NO: 2215617 - RNA, 22 nt, Human
cucucaucaguguccucuugcu

SEQ ID NO: 2215618 - RNA, 18 nt, Human
cucucaucaacugaauga

SEQ ID NO: 2215619 - RNA, 17 nt, Human
cucucaucaacugaaug

SEQ ID NO: 2215620 - RNA, 12 nt, Human
cucucaguuuuu

SEQ ID NO: 2215621 - RNA, 16 nt, Human
cucucaucaacugaau

SEQ ID NO: 2215622 - RNA, 18 nt, Human
cucucagucucugagcag

SEQ ID NO: 2215623 - RNA, 10 nt, Human
cucuccaccu

SEQ ID NO: 2215624 - RNA, 14 nt, Human
cucuccaccuagug

SEQ ID NO: 2215625 - RNA, 17 nt, Human
cucuccaccuaguggcu

SEQ ID NO: 2215626 - RNA, 20 nt, Human
cucuccaccuaguggcuguc

SEQ ID NO: 2215627 - RNA, 22 nt, Human
cucuccaccuaguggcugucca

SEQ ID NO: 2215628 - RNA, 20 nt, Human
cucuccaagugccagaggug

SEQ ID NO: 2215629 - RNA, 22 nt, Human
cucuccaagugccagagguggg

SEQ ID NO: 2215630 - RNA, 14 nt, Human
cucuccaagugcca

SEQ ID NO: 2215631 - RNA, 15 nt, Human
cucuccaagugccag

SEQ ID NO: 2215632 - RNA, 16 nt, Human
cucuccaagugccaga

SEQ ID NO: 2215633 - RNA, 19 nt, Human
cucuccaagugccagaggu

SEQ ID NO: 2215634 - RNA, 18 nt, Human
cucuccaccucagccuug

SEQ ID NO: 2215635 - RNA, 17 nt, Human
cucuccaccucagccuu

SEQ ID NO: 2215636 - RNA, 16 nt, Human
cucuccaccucagccu

SEQ ID NO: 2215637 - RNA, 15 nt, Human
cucuccaccucagcc

SEQ ID NO: 2215638 - RNA, 14 nt, Human
cucuccaccucagc

SEQ ID NO: 2215639 - RNA, 13 nt, Human
cucuccaccucag

SEQ ID NO: 2215640 - RNA, 12 nt, Human
cucuccaccuca

SEQ ID NO: 2215641 - RNA, 23 nt, Human
cucuccaccuaguggcuguccag

SEQ ID NO: 2215642 - RNA, 16 nt, Human
cucuccacugccuucg

SEQ ID NO: 2215643 - RNA, 15 nt, Human
cucuaauaucagcaa

SEQ ID NO: 2215644 - RNA, 19 nt, Human
cucuaagccacucuuccaa

SEQ ID NO: 2215645 - RNA, 14 nt, Human
cucuaagguugggc

SEQ ID NO: 2215646 - RNA, 23 nt, Human
cucuaaggccgaagaaggguccu

SEQ ID NO: 2215647 - RNA, 16 nt, Human
cucuaaguuccacuga

SEQ ID NO: 2215648 - RNA, 18 nt, Human
cucuaaguuccacugagc

SEQ ID NO: 2215649 - RNA, 19 nt, Human
cucuaaguuccacugagcu

SEQ ID NO: 2215650 - RNA, 20 nt, Human
cucuaaguuccacugagcuc

SEQ ID NO: 2215651 - RNA, 21 nt, Human
cucuaaguuccacugagcucc

SEQ ID NO: 2215652 - RNA, 22 nt, Human
cucucaggccagcugcuugggc

SEQ ID NO: 2215653 - RNA, 23 nt, Human
cucucaggccagcugcuugggcu

SEQ ID NO: 2215654 - RNA, 19 nt, Human
cucucaguacuuuggaggc

SEQ ID NO: 2215655 - RNA, 18 nt, Human
cucucaguacuuuggagg

SEQ ID NO: 2215656 - RNA, 13 nt, Human
cucucagucucug

SEQ ID NO: 2215657 - RNA, 15 nt, Human
cucucaggugaccaa

SEQ ID NO: 2215658 - RNA, 17 nt, Human
cucucagucucugagca

SEQ ID NO: 2215659 - RNA, 16 nt, Human
cucucagucucugagc

SEQ ID NO: 2215660 - RNA, 15 nt, Human
cucucagucucugag

SEQ ID NO: 2215661 - RNA, 14 nt, Human
cucucagucucuga

SEQ ID NO: 2215662 - RNA, 11 nt, Human
cucucccaggg

SEQ ID NO: 2215663 - RNA, 13 nt, Human
cucucccaggggc

SEQ ID NO: 2215664 - RNA, 20 nt, Human
cucucccagucuacccagag

SEQ ID NO: 2215665 - RNA, 13 nt, Human
cucucccaucacu

SEQ ID NO: 2215666 - RNA, 13 nt, Human
cucucccaggacc

SEQ ID NO: 2215667 - RNA, 12 nt, Human
cucucccaggac

SEQ ID NO: 2215668 - RNA, 18 nt, Human
cucucccaucacuucccu

SEQ ID NO: 2215669 - RNA, 14 nt, Human
cucucccaucacuu

SEQ ID NO: 2215670 - RNA, 12 nt, Human
cucucccauccc

SEQ ID NO: 2215671 - RNA, 21 nt, Human
cucucccagucuacccagaga

SEQ ID NO: 2215672 - RNA, 22 nt, Human
cucucccagucuacccagagaa

SEQ ID NO: 2215673 - RNA, 13 nt, Human
cucucccaucccc

SEQ ID NO: 2215674 - RNA, 16 nt, Human
cucucccaucccccug

SEQ ID NO: 2215675 - RNA, 18 nt, Human
cucucccaucccccugcc

SEQ ID NO: 2215676 - RNA, 20 nt, Human
cucucccaucccccugcccu

SEQ ID NO: 2215677 - RNA, 20 nt, Human
cucucccaucacuucccuac

SEQ ID NO: 2215678 - RNA, 21 nt, Human
cucuccauucccguggaacgu

SEQ ID NO: 2215679 - RNA, 13 nt, Human
cucuccauaaccc

SEQ ID NO: 2215680 - RNA, 16 nt, Human
cucuccauaaccccac

SEQ ID NO: 2215681 - RNA, 18 nt, Human
cucuccauaaccccaccc

SEQ ID NO: 2215682 - RNA, 15 nt, Human
cucuccaucuucagc

SEQ ID NO: 2215683 - RNA, 17 nt, Human
cucuccaggcgccggcg

SEQ ID NO: 2215684 - RNA, 18 nt, Human
cucuccaggcacccuucu

SEQ ID NO: 2215685 - RNA, 19 nt, Human
cucuccaggcacccuucuu

SEQ ID NO: 2215686 - RNA, 16 nt, Human
cucuccaucuucagcu

SEQ ID NO: 2215687 - RNA, 20 nt, Human
cucuccaccucagccuugga

SEQ ID NO: 2215688 - RNA, 12 nt, Human
cucuccagcccc

SEQ ID NO: 2215689 - RNA, 13 nt, Human
cucuccagccccu

SEQ ID NO: 2215690 - RNA, 13 nt, Human
cucuccaggcacc

SEQ ID NO: 2215691 - RNA, 20 nt, Human
cucuccagauguuuccagac

SEQ ID NO: 2215692 - RNA, 19 nt, Human
cucauugucuguguagagu

SEQ ID NO: 2215693 - RNA, 15 nt, Human
cuccacagccgcagc

SEQ ID NO: 2215694 - RNA, 14 nt, Human
cuccacagccgcag

SEQ ID NO: 2215695 - RNA, 19 nt, Human
cuccacagcaaccccaggc

SEQ ID NO: 2215696 - RNA, 16 nt, Human
cuccacagccauccca

SEQ ID NO: 2215697 - RNA, 23 nt, Human
cuccacagccaucccagccuugg

SEQ ID NO: 2215698 - RNA, 16 nt, Human
cuccacagcaacccca

SEQ ID NO: 2215699 - RNA, 23 nt, Human
cuccaccccccagaaccuguccu

SEQ ID NO: 2215700 - RNA, 22 nt, Human
cuccaccccccagaaccugucc

SEQ ID NO: 2215701 - RNA, 21 nt, Human
cuccaccccccagaaccuguc

SEQ ID NO: 2215702 - RNA, 16 nt, Human
cuccaccccccagaac

SEQ ID NO: 2215703 - RNA, 22 nt, Human
cuccacccccagcugcuugugu

SEQ ID NO: 2215704 - RNA, 22 nt, Human
cuccacaguucgaccugcggcu

SEQ ID NO: 2215705 - RNA, 11 nt, Human
cuccacccugc

SEQ ID NO: 2215706 - RNA, 15 nt, Human
cuccacagcuaccuc

SEQ ID NO: 2215707 - RNA, 15 nt, Human
cuccacaguucagug

SEQ ID NO: 2215708 - RNA, 17 nt, Human
cuccacaguucaguggc

SEQ ID NO: 2215709 - RNA, 23 nt, Human
cuccacaguucaguggcagggcu

SEQ ID NO: 2215710 - RNA, 21 nt, Human
cuccacaguucgaccugcggc

SEQ ID NO: 2215711 - RNA, 13 nt, Human
cuccacaguguug

SEQ ID NO: 2215712 - RNA, 17 nt, Human
cuccaccucagccuugg

SEQ ID NO: 2215713 - RNA, 16 nt, Human
cuccaccucagccuug

SEQ ID NO: 2215714 - RNA, 15 nt, Human
cuccaccugccaggg

SEQ ID NO: 2215715 - RNA, 17 nt, Human
cuccaccugccagggac

SEQ ID NO: 2215716 - RNA, 18 nt, Human
cuccaccugccagggaca

SEQ ID NO: 2215717 - RNA, 21 nt, Human
cuccaccugccagggacagag

SEQ ID NO: 2215718 - RNA, 15 nt, Human
cuccaccucagccuu

SEQ ID NO: 2215719 - RNA, 19 nt, Human
cuccacccucugagcuuug

SEQ ID NO: 2215720 - RNA, 16 nt, Human
cuccacccucugagcu

SEQ ID NO: 2215721 - RNA, 17 nt, Human
cuccacccucugagcuu

SEQ ID NO: 2215722 - RNA, 14 nt, Human
cuccacccucccag

SEQ ID NO: 2215723 - RNA, 18 nt, Human
cuccacccucccagaccu

SEQ ID NO: 2215724 - RNA, 13 nt, Human
cuccacccucuga

SEQ ID NO: 2215725 - RNA, 14 nt, Human
cuccacccucugag

SEQ ID NO: 2215726 - RNA, 12 nt, Human
cuccacccugcu

SEQ ID NO: 2215727 - RNA, 18 nt, Human
cuccaccucagccuugga

SEQ ID NO: 2215728 - RNA, 17 nt, Human
cuccaccugcucccagg

SEQ ID NO: 2215729 - RNA, 21 nt, Human
cuccacucuccucuuccaggc

SEQ ID NO: 2215730 - RNA, 12 nt, Human
cuccacucugcu

SEQ ID NO: 2215731 - RNA, 13 nt, Human
cuccacucugcuu

SEQ ID NO: 2215732 - RNA, 14 nt, Human
cuccacucugcuuc

SEQ ID NO: 2215733 - RNA, 15 nt, Human
cuccacucugcuucu

SEQ ID NO: 2215734 - RNA, 11 nt, Human
cuccacugccu

SEQ ID NO: 2215735 - RNA, 16 nt, Human
cuccacucugcuucuc

SEQ ID NO: 2215736 - RNA, 17 nt, Human
cuccacucugcuucucu

SEQ ID NO: 2215737 - RNA, 20 nt, Human
cuccacucugcuucucugac

SEQ ID NO: 2215738 - RNA, 21 nt, Human
cuccacucugcuucucugacu

SEQ ID NO: 2215739 - RNA, 14 nt, Human
cuccagaccccugg

SEQ ID NO: 2215740 - RNA, 15 nt, Human
cuccagaccccuggc

SEQ ID NO: 2215741 - RNA, 17 nt, Human
cuccagaccccuggcuu

SEQ ID NO: 2215742 - RNA, 18 nt, Human
cuccagaccccuggcuuu

SEQ ID NO: 2215743 - RNA, 19 nt, Human
cuccacucugacuggcaca

SEQ ID NO: 2215744 - RNA, 19 nt, Human
cuccagaccccuggcuuuu

SEQ ID NO: 2215745 - RNA, 20 nt, Human
cuccagaccccuggcuuuuc

SEQ ID NO: 2215746 - RNA, 13 nt, Human
cuccagccugagc

SEQ ID NO: 2215747 - RNA, 17 nt, Human
cuccagccucuguuccc

SEQ ID NO: 2215748 - RNA, 22 nt, Human
cuccagccccuucucagaaucu

SEQ ID NO: 2215749 - RNA, 13 nt, Human
cuccagccucugu

SEQ ID NO: 2215750 - RNA, 11 nt, Human
cuccagccucu

SEQ ID NO: 2215751 - RNA, 19 nt, Human
cuccagcucaccagcccca

SEQ ID NO: 2215752 - RNA, 20 nt, Human
cuccagcucaccagccccag

SEQ ID NO: 2215753 - RNA, 21 nt, Human
cuccagccaaccccuguggag

SEQ ID NO: 2215754 - RNA, 20 nt, Human
cuccagccaaccccugugga

SEQ ID NO: 2215755 - RNA, 19 nt, Human
cuccagccaaccccugugg

SEQ ID NO: 2215756 - RNA, 18 nt, Human
cuccagccaaccccugug

SEQ ID NO: 2215757 - RNA, 11 nt, Human
cuccagccagc

SEQ ID NO: 2215758 - RNA, 12 nt, Human
cuccagccagca

SEQ ID NO: 2215759 - RNA, 13 nt, Human
cuccagccagcaa

SEQ ID NO: 2215760 - RNA, 16 nt, Human
cuccagccagcaauga

SEQ ID NO: 2215761 - RNA, 17 nt, Human
cuccagccaaccccugu

SEQ ID NO: 2215762 - RNA, 14 nt, Human
cuccagccaacccc

SEQ ID NO: 2215763 - RNA, 13 nt, Human
cuccagccaaccc

SEQ ID NO: 2215764 - RNA, 18 nt, Human
cuccagcaccauccgcca

SEQ ID NO: 2215765 - RNA, 23 nt, Human
cuccagccagcaaugauguccag

SEQ ID NO: 2215766 - RNA, 24 nt, Human
cuccagccagcaaugauguccaga

SEQ ID NO: 2215767 - RNA, 20 nt, Human
cuccagccagccagcucauu

SEQ ID NO: 2215768 - RNA, 19 nt, Human
cuccagccccuucucagaa

SEQ ID NO: 2215769 - RNA, 21 nt, Human
cuccagccccuucucagaauc

SEQ ID NO: 2215770 - RNA, 23 nt, Human
cuccagccccuucucagaaucua

SEQ ID NO: 2215771 - RNA, 24 nt, Human
cuccauucccguggaacguuuuuc

SEQ ID NO: 2215772 - RNA, 22 nt, Human
cuccauuaggauuugccccuuc

SEQ ID NO: 2215773 - RNA, 14 nt, Human
cuccaugugggcua

SEQ ID NO: 2215774 - RNA, 20 nt, Human
cuccauucugaccauuucag

SEQ ID NO: 2215775 - RNA, 14 nt, Human
cuccauucugacca

SEQ ID NO: 2215776 - RNA, 22 nt, Human
cuccaucuccaagaaugcugaa

SEQ ID NO: 2215777 - RNA, 15 nt, Human
cuccauuccagucuc

SEQ ID NO: 2215778 - RNA, 17 nt, Human
cuccauugguguugaca

SEQ ID NO: 2215779 - RNA, 22 nt, Human
cucccaaggggcccaaauucuu

SEQ ID NO: 2215780 - RNA, 21 nt, Human
cucccaaggggcccaaauucu

SEQ ID NO: 2215781 - RNA, 23 nt, Human
cucccaaggcugcgucuggaggg

SEQ ID NO: 2215782 - RNA, 14 nt, Human
cucccaagggaugg

SEQ ID NO: 2215783 - RNA, 18 nt, Human
cucccaagggauggugcc

SEQ ID NO: 2215784 - RNA, 22 nt, Human
cucccaaguagcugggauuaca

SEQ ID NO: 2215785 - RNA, 15 nt, Human
cucccaggcauuccc

SEQ ID NO: 2215786 - RNA, 17 nt, Human
cucccaagucuacagag

SEQ ID NO: 2215787 - RNA, 13 nt, Human
cucccaaguggug

SEQ ID NO: 2215788 - RNA, 16 nt, Human
cucccaaguggugccu

SEQ ID NO: 2215789 - RNA, 21 nt, Human
cucccaggccaggcuccuucc

SEQ ID NO: 2215790 - RNA, 17 nt, Human
cucccaggccaggcucc

SEQ ID NO: 2215791 - RNA, 17 nt, Human
cucccaaguggugccua

SEQ ID NO: 2215792 - RNA, 18 nt, Human
cucccaaguggugccuaa

SEQ ID NO: 2215793 - RNA, 22 nt, Human
cucccaggccaggcuccuuccu

SEQ ID NO: 2215794 - RNA, 22 nt, Human
cucccaggccaguaagggaaau

SEQ ID NO: 2215795 - RNA, 22 nt, Human
cucccaggcauuccccaggagg

SEQ ID NO: 2215796 - RNA, 14 nt, Human
cucccaggcgcccc

SEQ ID NO: 2215797 - RNA, 21 nt, Human
cucccaggccgagaagccagu

SEQ ID NO: 2215798 - RNA, 17 nt, Human
cucccagucauuuaaua

SEQ ID NO: 2215799 - RNA, 17 nt, Human
cucccaggcauucccca

SEQ ID NO: 2215800 - RNA, 19 nt, Human
cucccaggcauuccccagg

SEQ ID NO: 2215801 - RNA, 20 nt, Human
cucccaggcauuccccagga

SEQ ID NO: 2215802 - RNA, 21 nt, Human
cucccaggcauuccccaggag

SEQ ID NO: 2215803 - RNA, 13 nt, Human
cuccagcuguuca

SEQ ID NO: 2215804 - RNA, 19 nt, Human
cuccagcuggguuggaaaa

SEQ ID NO: 2215805 - RNA, 11 nt, Human
cuccagcuccu

SEQ ID NO: 2215806 - RNA, 14 nt, Human
cuccagccugagca

SEQ ID NO: 2215807 - RNA, 17 nt, Human
cuccagccugccuggca

SEQ ID NO: 2215808 - RNA, 19 nt, Human
cuccagccugccuggcagg

SEQ ID NO: 2215809 - RNA, 13 nt, Human
cuccagcuccaag

SEQ ID NO: 2215810 - RNA, 19 nt, Human
cuccagccuggacccccag

SEQ ID NO: 2215811 - RNA, 14 nt, Human
cuccagcuccaaga

SEQ ID NO: 2215812 - RNA, 21 nt, Human
cuccagcuccaagaccuguug

SEQ ID NO: 2215813 - RNA, 19 nt, Human
cuccagcuguucagcuggu

SEQ ID NO: 2215814 - RNA, 18 nt, Human
cuccagcuguucagcugg

SEQ ID NO: 2215815 - RNA, 20 nt, Human
cuccaggccacauggggcug

SEQ ID NO: 2215816 - RNA, 11 nt, Human
cuccagcuucu

SEQ ID NO: 2215817 - RNA, 13 nt, Human
cuccaggcaggcu

SEQ ID NO: 2215818 - RNA, 15 nt, Human
cuccaggcaggcuaa

SEQ ID NO: 2215819 - RNA, 20 nt, Human
cuccaucgcugucaucucag

SEQ ID NO: 2215820 - RNA, 17 nt, Human
cuccaucuaaacugccc

SEQ ID NO: 2215821 - RNA, 23 nt, Human
cuccauccugaggcuccacuugg

SEQ ID NO: 2215822 - RNA, 13 nt, Human
cuccaucuccacu

SEQ ID NO: 2215823 - RNA, 14 nt, Human
cuccaucucaugua

SEQ ID NO: 2215824 - RNA, 23 nt, Human
cuccaucucauguaucaucugga

SEQ ID NO: 2215825 - RNA, 18 nt, Human
cuccaucuccaagaaugc

SEQ ID NO: 2215826 - RNA, 21 nt, Human
cuccaucuccaagaaugcuga

SEQ ID NO: 2215827 - RNA, 18 nt, Human
cuccaucuaaacugcccc

SEQ ID NO: 2215828 - RNA, 19 nt, Human
cuccauccuuucugccucu

SEQ ID NO: 2215829 - RNA, 21 nt, Human
cuccauccuuucugccucuca

SEQ ID NO: 2215830 - RNA, 22 nt, Human
cuccauccuuucugccucucaa

SEQ ID NO: 2215831 - RNA, 9 nt, Human
cuccaucuc

SEQ ID NO: 2215832 - RNA, 11 nt, Human
cuccaggcucc

SEQ ID NO: 2215833 - RNA, 13 nt, Human
cuccaggcgccgg

SEQ ID NO: 2215834 - RNA, 14 nt, Human
cuccaggcgccggc

SEQ ID NO: 2215835 - RNA, 18 nt, Human
cuccaggcgccggcgggc

SEQ ID NO: 2215836 - RNA, 20 nt, Human
cuccauccugaggcuccacu

SEQ ID NO: 2215837 - RNA, 21 nt, Human
cuccauccugaggcuccacuu

SEQ ID NO: 2215838 - RNA, 17 nt, Human
cucauugacaagaacug

SEQ ID NO: 2215839 - RNA, 18 nt, Human
cucauuccugccugucuc

SEQ ID NO: 2215840 - RNA, 17 nt, Human
cucauuccugccugucu

SEQ ID NO: 2215841 - RNA, 23 nt, Human
cucauucuucuguacgucugaca

SEQ ID NO: 2215842 - RNA, 13 nt, Human
cucauugaccuga

SEQ ID NO: 2215843 - RNA, 15 nt, Human
cucauugaccugagg

SEQ ID NO: 2215844 - RNA, 18 nt, Human
cucauuggacccuuccau

SEQ ID NO: 2215845 - RNA, 17 nt, Human
cucauuggacccuucca

SEQ ID NO: 2215846 - RNA, 13 nt, Human
cucauuggacccu

SEQ ID NO: 2215847 - RNA, 18 nt, Human
cucauugacaagaacuga

SEQ ID NO: 2215848 - RNA, 20 nt, Human
cucauugcuuggaauucagc

SEQ ID NO: 2215849 - RNA, 16 nt, Human
cucauugaccugaggc

SEQ ID NO: 2215850 - RNA, 19 nt, Human
cucauugcugagccucugc

SEQ ID NO: 2215851 - RNA, 18 nt, Human
cucauugcugagccucug

SEQ ID NO: 2215852 - RNA, 20 nt, Human
cucauugcugagccucugcu

SEQ ID NO: 2215853 - RNA, 19 nt, Human
cucauugcuuacaagccua

SEQ ID NO: 2215854 - RNA, 12 nt, Human
cucauuccccag

SEQ ID NO: 2215855 - RNA, 13 nt, Human
cucauuccccagg

SEQ ID NO: 2215856 - RNA, 17 nt, Human
cucauuccagaggaagg

SEQ ID NO: 2215857 - RNA, 21 nt, Human
cucauuccaccuucccaugcc

SEQ ID NO: 2215858 - RNA, 15 nt, Human
cucauuccagaggaa

SEQ ID NO: 2215859 - RNA, 18 nt, Human
cucauuccaccuucccau

SEQ ID NO: 2215860 - RNA, 17 nt, Human
cucauuccaacagugag

SEQ ID NO: 2215861 - RNA, 18 nt, Human
cucauuccaacagugagu

SEQ ID NO: 2215862 - RNA, 22 nt, Human
cucauucaggaaaacugacaga

SEQ ID NO: 2215863 - RNA, 13 nt, Human
cucauucuucugu

SEQ ID NO: 2215864 - RNA, 14 nt, Human
cucauucuucugua

SEQ ID NO: 2215865 - RNA, 16 nt, Human
cucauuccugccuguc

SEQ ID NO: 2215866 - RNA, 13 nt, Human
cucauuccugccu

SEQ ID NO: 2215867 - RNA, 12 nt, Human
cucauuccugcc

SEQ ID NO: 2215868 - RNA, 21 nt, Human
cucauuccuccaccugccgug

SEQ ID NO: 2215869 - RNA, 14 nt, Human
cucauuccccaggu

SEQ ID NO: 2215870 - RNA, 13 nt, Human
cucauuccccggg

SEQ ID NO: 2215871 - RNA, 14 nt, Human
cucauuccccgggg

SEQ ID NO: 2215872 - RNA, 23 nt, Human
cucauuccccggggcguuucuuu

SEQ ID NO: 2215873 - RNA, 18 nt, Human
cucauuccuccaccugcc

SEQ ID NO: 2215874 - RNA, 16 nt, Human
cucaucgcguccuccu

SEQ ID NO: 2215875 - RNA, 16 nt, Human
cucauccuuguauaaa

SEQ ID NO: 2215876 - RNA, 14 nt, Human
cucauccugcaggc

SEQ ID NO: 2215877 - RNA, 21 nt, Human
cucaucuagguaaauuacagu

SEQ ID NO: 2215878 - RNA, 21 nt, Human
cucauuagcauuuugcuaaau

SEQ ID NO: 2215879 - RNA, 17 nt, Human
cucaucuccccaucauu

SEQ ID NO: 2215880 - RNA, 15 nt, Human
cucauucaaaaguug

SEQ ID NO: 2215881 - RNA, 19 nt, Human
cucauucaaaaguugaaau

SEQ ID NO: 2215882 - RNA, 14 nt, Human
cucaucuaucucaa

SEQ ID NO: 2215883 - RNA, 18 nt, Human
cucaucuaucucaauccu

SEQ ID NO: 2215884 - RNA, 18 nt, Human
cucauuaggauggcuagu

SEQ ID NO: 2215885 - RNA, 17 nt, Human
cucauuaggauggcuag

SEQ ID NO: 2215886 - RNA, 13 nt, Human
cucauccugcagg

SEQ ID NO: 2215887 - RNA, 23 nt, Human
cucauccccaggggucccagcca

SEQ ID NO: 2215888 - RNA, 19 nt, Human
cucaucccacgcacuccau

SEQ ID NO: 2215889 - RNA, 22 nt, Human
cucauccccaggggucccagcc

SEQ ID NO: 2215890 - RNA, 14 nt, Human
cucauccccagggg

SEQ ID NO: 2215891 - RNA, 13 nt, Human
cucauccccaggg

SEQ ID NO: 2215892 - RNA, 16 nt, Human
cucauccagggcucug

SEQ ID NO: 2215893 - RNA, 14 nt, Human
cucaucccacgcac

SEQ ID NO: 2215894 - RNA, 10 nt, Human
cucaucccau

SEQ ID NO: 2215895 - RNA, 19 nt, Human
cucauccaucaucaugugu

SEQ ID NO: 2215896 - RNA, 16 nt, Human
cucauccaucaucaug

SEQ ID NO: 2215897 - RNA, 24 nt, Human
cucauccaccccaucccuccccag

SEQ ID NO: 2215898 - RNA, 15 nt, Human
cucauccagggcucu

SEQ ID NO: 2215899 - RNA, 13 nt, Human
cucauccacccca

SEQ ID NO: 2215900 - RNA, 15 nt, Human
cucauccaccccauc

SEQ ID NO: 2215901 - RNA, 16 nt, Human
cucauccaccccaucc

SEQ ID NO: 2215902 - RNA, 19 nt, Human
cucauccaccccaucccuc

SEQ ID NO: 2215903 - RNA, 20 nt, Human
cucauauuccugcagccugg

SEQ ID NO: 2215904 - RNA, 15 nt, Human
cucauauuccugcag

SEQ ID NO: 2215905 - RNA, 18 nt, Human
cucauauggcccaguguc

SEQ ID NO: 2215906 - RNA, 19 nt, Human
cucauauggcccaguguca

SEQ ID NO: 2215907 - RNA, 24 nt, Human
cucauauuccugcagccuggaggc

SEQ ID NO: 2215908 - RNA, 22 nt, Human
cucauauuccugcagccuggag

SEQ ID NO: 2215909 - RNA, 13 nt, Human
cucauauugugau

SEQ ID NO: 2215910 - RNA, 15 nt, Human
cucauauuuaaagac

SEQ ID NO: 2215911 - RNA, 12 nt, Human
cucauauuuaaa

SEQ ID NO: 2215912 - RNA, 13 nt, Human
cucauauuuaaag

SEQ ID NO: 2215913 - RNA, 21 nt, Human
cucauauugugauucugccuu

SEQ ID NO: 2215914 - RNA, 19 nt, Human
cucauauugugauucugcc

SEQ ID NO: 2215915 - RNA, 23 nt, Human
cucaucauucucugucucaucca

SEQ ID NO: 2215916 - RNA, 16 nt, Human
cucauauuuuguauau

SEQ ID NO: 2215917 - RNA, 12 nt, Human
cucauauuuugu

SEQ ID NO: 2215918 - RNA, 13 nt, Human
cucauauuuugua

SEQ ID NO: 2215919 - RNA, 21 nt, Human
cucauauuuuguauauaucug

SEQ ID NO: 2215920 - RNA, 12 nt, Human
cuaaaagcacac

SEQ ID NO: 2215921 - RNA, 13 nt, Human
cuaaaagauccuu

SEQ ID NO: 2215922 - RNA, 15 nt, Human
cuaaaagauccuuuu

SEQ ID NO: 2215923 - RNA, 20 nt, Human
cuaaaagauccuuuuuaaau

SEQ ID NO: 2215924 - RNA, 23 nt, Human
cuaaaagguaugcaaucaaaucu

SEQ ID NO: 2215925 - RNA, 13 nt, Human
cguuuuuccuuua

SEQ ID NO: 2215926 - RNA, 16 nt, Human
cguuuuugguggaguc

SEQ ID NO: 2215927 - RNA, 16 nt, Human
cuaaaaaaaaaaaagu

SEQ ID NO: 2215928 - RNA, 17 nt, Human
cuaaaagauauaagugc

SEQ ID NO: 2215929 - RNA, 20 nt, Human
cuaaaagauauaagugcugu

SEQ ID NO: 2215930 - RNA, 21 nt, Human
cuaaaagauauaagugcugua

SEQ ID NO: 2215931 - RNA, 17 nt, Human
cucaggggcguguggcu

SEQ ID NO: 2215932 - RNA, 18 nt, Human
cucaggggccagaggaac

SEQ ID NO: 2215933 - RNA, 20 nt, Human
cucaggggccagaggaacug

SEQ ID NO: 2215934 - RNA, 14 nt, Human
cucaggggcuguuu

SEQ ID NO: 2215935 - RNA, 15 nt, Human
cucaggggcuguuug

SEQ ID NO: 2215936 - RNA, 16 nt, Human
cucaggggcuguuuga

SEQ ID NO: 2215937 - RNA, 12 nt, Human
cucagggucccu

SEQ ID NO: 2215938 - RNA, 16 nt, Human
cuaaaagguucaggga

SEQ ID NO: 2215939 - RNA, 13 nt, Human
cuaaaaguaaaca

SEQ ID NO: 2215940 - RNA, 14 nt, Human
cuaaaaguaaacau

SEQ ID NO: 2215941 - RNA, 19 nt, Human
cuaaaagugggcuugauuc

SEQ ID NO: 2215942 - RNA, 15 nt, Human
cuaaaaguaaacauu

SEQ ID NO: 2215943 - RNA, 13 nt, Human
cuaaaagucuucg

SEQ ID NO: 2215944 - RNA, 13 nt, Human
cucaggggccaga

SEQ ID NO: 2215945 - RNA, 17 nt, Human
cucaggggccagaggaa

SEQ ID NO: 2215946 - RNA, 13 nt, Human
cucaggugaccaa

SEQ ID NO: 2215947 - RNA, 20 nt, Human
cucaggucagggugaggaug

SEQ ID NO: 2215948 - RNA, 19 nt, Human
cucaggucagggugaggau

SEQ ID NO: 2215949 - RNA, 20 nt, Human
cucaggucccuggggcuagg

SEQ ID NO: 2215950 - RNA, 17 nt, Human
cucaggucccugcaggg

SEQ ID NO: 2215951 - RNA, 18 nt, Human
cucaggucccugcagggc

SEQ ID NO: 2215952 - RNA, 16 nt, Human
cucaggggugugccug

SEQ ID NO: 2215953 - RNA, 14 nt, Human
cucagggucccugg

SEQ ID NO: 2215954 - RNA, 19 nt, Human
cucaggggcuguuugagga

SEQ ID NO: 2215955 - RNA, 15 nt, Human
cucaggugucccugc

SEQ ID NO: 2215956 - RNA, 16 nt, Human
cucaggugucccugca

SEQ ID NO: 2215957 - RNA, 22 nt, Human
cucagguggggucacucuggca

SEQ ID NO: 2215958 - RNA, 23 nt, Human
cucagguggggucacucuggcag

SEQ ID NO: 2215959 - RNA, 19 nt, Human
cucaguucccuuggccuca

SEQ ID NO: 2215960 - RNA, 18 nt, Human
cucaguucccuuggccuc

SEQ ID NO: 2215961 - RNA, 17 nt, Human
cucaguucccuuggccu

SEQ ID NO: 2215962 - RNA, 16 nt, Human
cucaguucccuuggcc

SEQ ID NO: 2215963 - RNA, 15 nt, Human
cucaguucccuuggc

SEQ ID NO: 2215964 - RNA, 14 nt, Human
cucaguucccuugg

SEQ ID NO: 2215965 - RNA, 18 nt, Human
cucaguucauccauucua

SEQ ID NO: 2215966 - RNA, 20 nt, Human
cucaguucauccauucuauu

SEQ ID NO: 2215967 - RNA, 23 nt, Human
cucaguuacacaaaggaccucag

SEQ ID NO: 2215968 - RNA, 15 nt, Human
cucaguucagaauca

SEQ ID NO: 2215969 - RNA, 16 nt, Human
cucagugugacuccuc

SEQ ID NO: 2215970 - RNA, 22 nt, Human
cucagugucuggcugcagagca

SEQ ID NO: 2215971 - RNA, 21 nt, Human
cucagugucuggcugcagagc

SEQ ID NO: 2215972 - RNA, 17 nt, Human
cucaggugucccugcac

SEQ ID NO: 2215973 - RNA, 18 nt, Human
cucaggugucccugcacu

SEQ ID NO: 2215974 - RNA, 14 nt, Human
cucaggugagaagc

SEQ ID NO: 2215975 - RNA, 20 nt, Human
cucagugucuggcugcagag

SEQ ID NO: 2215976 - RNA, 19 nt, Human
cucaggugucccugcacuu

SEQ ID NO: 2215977 - RNA, 18 nt, Human
cucauaauagacuuccca

SEQ ID NO: 2215978 - RNA, 13 nt, Human
cucauaaugugaa

SEQ ID NO: 2215979 - RNA, 14 nt, Human
cucauaaugugaag

SEQ ID NO: 2215980 - RNA, 17 nt, Human
cucauaaugugaagugu

SEQ ID NO: 2215981 - RNA, 17 nt, Human
cucauaacggaucagaa

SEQ ID NO: 2215982 - RNA, 21 nt, Human
cucaguucagaaucacuucug

SEQ ID NO: 2215983 - RNA, 19 nt, Human
cucauaacggaucagaaau

SEQ ID NO: 2215984 - RNA, 21 nt, Human
cucauaacggaucagaaauac

SEQ ID NO: 2215985 - RNA, 21 nt, Human
cucauaggaaaaguacauuua

SEQ ID NO: 2215986 - RNA, 14 nt, Human
cucauagggaagac

SEQ ID NO: 2215987 - RNA, 23 nt, Human
cucauaggaaaaguacauuuaau

SEQ ID NO: 2215988 - RNA, 15 nt, Human
cucauaaugugaagu

SEQ ID NO: 2215989 - RNA, 19 nt, Human
cucauagggaagaccugcu

SEQ ID NO: 2215990 - RNA, 13 nt, Human
cucauauggccca

SEQ ID NO: 2215991 - RNA, 20 nt, Human
cucauaguaugguggcuggg

SEQ ID NO: 2215992 - RNA, 18 nt, Human
cucauaguaugguggcug

SEQ ID NO: 2215993 - RNA, 19 nt, Human
cucauaguaugguggcugg

SEQ ID NO: 2215994 - RNA, 18 nt, Human
cucuaaaugggaaaguau

SEQ ID NO: 2215995 - RNA, 16 nt, Human
cucuaacagcucagga

SEQ ID NO: 2215996 - RNA, 14 nt, Human
cucuaacagcucag

SEQ ID NO: 2215997 - RNA, 13 nt, Human
cucuaagccacuc

SEQ ID NO: 2215998 - RNA, 22 nt, Human
cucuaacagcucaggaucucuu

SEQ ID NO: 2215999 - RNA, 18 nt, Human
cucuaacagcucaggauc

SEQ ID NO: 2216000 - RNA, 22 nt, Human
cucuaaaugaggggccucaggu

SEQ ID NO: 2216001 - RNA, 12 nt, Human
cucggagccuca

SEQ ID NO: 2216002 - RNA, 18 nt, Human
cucggacuaagccuaccu

SEQ ID NO: 2216003 - RNA, 22 nt, Human
cucggacuaagccuaccugcuc

SEQ ID NO: 2216004 - RNA, 13 nt, Human
cucggacucugcu

SEQ ID NO: 2216005 - RNA, 17 nt, Human
cucggcccccuccaucg

SEQ ID NO: 2216006 - RNA, 15 nt, Human
cucggccucccaaag

SEQ ID NO: 2216007 - RNA, 16 nt, Human
cucggcccccuccauc

SEQ ID NO: 2216008 - RNA, 21 nt, Human
cucggccgucuucacucgccc

SEQ ID NO: 2216009 - RNA, 15 nt, Human
cucggccuggcuccu

SEQ ID NO: 2216010 - RNA, 23 nt, Human
cucggccucccaaagugcuggga

SEQ ID NO: 2216011 - RNA, 22 nt, Human
cucggccucccaaagugcuggg

SEQ ID NO: 2216012 - RNA, 20 nt, Human
cucggccucccaaagugcug

SEQ ID NO: 2216013 - RNA, 18 nt, Human
cucggccucccaaagugc

SEQ ID NO: 2216014 - RNA, 22 nt, Human
cucgcuuggacggcugggcaca

SEQ ID NO: 2216015 - RNA, 14 nt, Human
cucgcuugugcaga

SEQ ID NO: 2216016 - RNA, 22 nt, Human
cucgcuugugcagaaaacauug

SEQ ID NO: 2216017 - RNA, 21 nt, Human
cucgcuauugucaccagggcu

SEQ ID NO: 2216018 - RNA, 20 nt, Human
cucggaaggcuggcugggca

SEQ ID NO: 2216019 - RNA, 16 nt, Human
cucggaaggcuggcug

SEQ ID NO: 2216020 - RNA, 22 nt, Human
cucggaacugcaugcugcugga

SEQ ID NO: 2216021 - RNA, 17 nt, Human
cucgcuuuguugcccag

SEQ ID NO: 2216022 - RNA, 19 nt, Human
cucgcuuucuauguaguuu

SEQ ID NO: 2216023 - RNA, 21 nt, Human
cucggaacugcaugcugcugg

SEQ ID NO: 2216024 - RNA, 19 nt, Human
cucggaacugcaugcugcu

SEQ ID NO: 2216025 - RNA, 19 nt, Human
cucggacuuagcugggaga

SEQ ID NO: 2216026 - RNA, 18 nt, Human
cucggacuuagcugggag

SEQ ID NO: 2216027 - RNA, 12 nt, Human
cucggagaagag

SEQ ID NO: 2216028 - RNA, 20 nt, Human
cucggagaagagcuguucac

SEQ ID NO: 2216029 - RNA, 13 nt, Human
cucggagaagagc

SEQ ID NO: 2216030 - RNA, 21 nt, Human
cucgcauuugucaaugacagu

SEQ ID NO: 2216031 - RNA, 22 nt, Human
cucgcauuugucaaugacaguu

SEQ ID NO: 2216032 - RNA, 19 nt, Human
cucgccaccccuccuuccu

SEQ ID NO: 2216033 - RNA, 22 nt, Human
cucgcauaggaccuuuccacca

SEQ ID NO: 2216034 - RNA, 22 nt, Human
cucgcccaccgcaugcccccuc

SEQ ID NO: 2216035 - RNA, 23 nt, Human
cucgcccaccgcaugcccccucg

SEQ ID NO: 2216036 - RNA, 12 nt, Human
cucgccaugccg

SEQ ID NO: 2216037 - RNA, 13 nt, Human
cucgccaugccgg

SEQ ID NO: 2216038 - RNA, 17 nt, Human
cucgccaugccgggggu

SEQ ID NO: 2216039 - RNA, 18 nt, Human
cucgcccaccgcaugccc

SEQ ID NO: 2216040 - RNA, 14 nt, Human
cucgccccagcagg

SEQ ID NO: 2216041 - RNA, 13 nt, Human
cucgcgacaaugc

SEQ ID NO: 2216042 - RNA, 12 nt, Human
cucgcccgccca

SEQ ID NO: 2216043 - RNA, 14 nt, Human
cucgcccgcccacu

SEQ ID NO: 2216044 - RNA, 15 nt, Human
cucgcccgcccacug

SEQ ID NO: 2216045 - RNA, 16 nt, Human
cucgcccgcccacugu

SEQ ID NO: 2216046 - RNA, 20 nt, Human
cucgcccgcccacuguccug

SEQ ID NO: 2216047 - RNA, 19 nt, Human
cucgcuauugucaccaggg

SEQ ID NO: 2216048 - RNA, 21 nt, Human
cucgcccgcccacuguccugg

SEQ ID NO: 2216049 - RNA, 15 nt, Human
cucgcgacaaugcaa

SEQ ID NO: 2216050 - RNA, 23 nt, Human
cucgacguuuacaagcccccccu

SEQ ID NO: 2216051 - RNA, 15 nt, Human
cucgaaucucugugc

SEQ ID NO: 2216052 - RNA, 16 nt, Human
cucgaaucucugugcc

SEQ ID NO: 2216053 - RNA, 17 nt, Human
cucgaaucucugugccu

SEQ ID NO: 2216054 - RNA, 18 nt, Human
cucgaaucucugugccuu

SEQ ID NO: 2216055 - RNA, 13 nt, Human
cucgaagcgcgcc

SEQ ID NO: 2216056 - RNA, 12 nt, Human
cucgaagcgcgc

SEQ ID NO: 2216057 - RNA, 22 nt, Human
cuccuugggaggccccacuggg

SEQ ID NO: 2216058 - RNA, 15 nt, Human
cuccuugggcacuuu

SEQ ID NO: 2216059 - RNA, 21 nt, Human
cuccuugggaggccccacugg

SEQ ID NO: 2216060 - RNA, 17 nt, Human
cuccuugggaggcccca

SEQ ID NO: 2216061 - RNA, 20 nt, Human
cucgaagcgcgccacucgcu

SEQ ID NO: 2216062 - RNA, 17 nt, Human
cucgaagcgcgccacuc

SEQ ID NO: 2216063 - RNA, 13 nt, Human
cucgaaucucugu

SEQ ID NO: 2216064 - RNA, 14 nt, Human
cucgaaucucugug

SEQ ID NO: 2216065 - RNA, 16 nt, Human
cucgaguuacagacaa

SEQ ID NO: 2216066 - RNA, 21 nt, Human
cuccuugggcacuuuuuaauu

SEQ ID NO: 2216067 - RNA, 20 nt, Human
cucgaguuacagacaaagcg

SEQ ID NO: 2216068 - RNA, 17 nt, Human
cuccugcccacggaguc

SEQ ID NO: 2216069 - RNA, 11 nt, Human
cuccugcccag

SEQ ID NO: 2216070 - RNA, 17 nt, Human
cuccuguugcacccagc

SEQ ID NO: 2216071 - RNA, 23 nt, Human
cuccuguugcacccagcccuggu

SEQ ID NO: 2216072 - RNA, 19 nt, Human
cuccuguugcacccagccc

SEQ ID NO: 2216073 - RNA, 20 nt, Human
cuccuguugcacccagcccu

SEQ ID NO: 2216074 - RNA, 21 nt, Human
cuccuguugcacccagcccug

SEQ ID NO: 2216075 - RNA, 22 nt, Human
cuccuguugcacccagcccugg

SEQ ID NO: 2216076 - RNA, 17 nt, Human
cuccuuaacacugagcu

SEQ ID NO: 2216077 - RNA, 20 nt, Human
cuccuuaacacugagcuguc

SEQ ID NO: 2216078 - RNA, 14 nt, Human
cuccuucaccuuug

SEQ ID NO: 2216079 - RNA, 16 nt, Human
cuccuucaccuuuguc

SEQ ID NO: 2216080 - RNA, 19 nt, Human
cuccuucaccuuugucccc

SEQ ID NO: 2216081 - RNA, 21 nt, Human
cuccuucaccuuuguccccac

SEQ ID NO: 2216082 - RNA, 23 nt, Human
cuccugaggggcaucugccccuc

SEQ ID NO: 2216083 - RNA, 14 nt, Human
cuccugccaaggag

SEQ ID NO: 2216084 - RNA, 22 nt, Human
cuccugcaggcagccaggccac

SEQ ID NO: 2216085 - RNA, 15 nt, Human
cuccugcaggcagcc

SEQ ID NO: 2216086 - RNA, 21 nt, Human
cuccugcaggcagccaggcca

SEQ ID NO: 2216087 - RNA, 15 nt, Human
cuccugugucuugca

SEQ ID NO: 2216088 - RNA, 14 nt, Human
cuccugcccaccug

SEQ ID NO: 2216089 - RNA, 18 nt, Human
cuccugccaguguggaac

SEQ ID NO: 2216090 - RNA, 13 nt, Human
cuccugcccacgg

SEQ ID NO: 2216091 - RNA, 11 nt, Human
cuccugccacc

SEQ ID NO: 2216092 - RNA, 23 nt, Human
cuccugugucuugcaauggcagc

SEQ ID NO: 2216093 - RNA, 11 nt, Human
cuccugugugu

SEQ ID NO: 2216094 - RNA, 17 nt, Human
cuccuugagagaccagg

SEQ ID NO: 2216095 - RNA, 20 nt, Human
cuccuugagagaccaggcaa

SEQ ID NO: 2216096 - RNA, 21 nt, Human
cuccuugauuuuagccuucuc

SEQ ID NO: 2216097 - RNA, 19 nt, Human
cuccuugacuccuuguggu

SEQ ID NO: 2216098 - RNA, 11 nt, Human
cuccuucuucc

SEQ ID NO: 2216099 - RNA, 21 nt, Human
cuccuugaaaacacuguucuc

SEQ ID NO: 2216100 - RNA, 16 nt, Human
cuccuugggaggcccc

SEQ ID NO: 2216101 - RNA, 13 nt, Human
cuccuugggaggc

SEQ ID NO: 2216102 - RNA, 22 nt, Human
cuccuugggaggaagcagaaua

SEQ ID NO: 2216103 - RNA, 23 nt, Human
cuccuugggaggaagcagaauaa

SEQ ID NO: 2216104 - RNA, 18 nt, Human
cuccuugggaggaagcag

SEQ ID NO: 2216105 - RNA, 19 nt, Human
cuccuugggaggaagcaga

SEQ ID NO: 2216106 - RNA, 20 nt, Human
cuccuugggaggaagcagaa

SEQ ID NO: 2216107 - RNA, 21 nt, Human
cuccuugggaggaagcagaau

SEQ ID NO: 2216108 - RNA, 16 nt, Human
cucgaacuggcugcaa

SEQ ID NO: 2216109 - RNA, 18 nt, Human
cuccuugccuccugugua

SEQ ID NO: 2216110 - RNA, 17 nt, Human
cuccuugcuacccagaa

SEQ ID NO: 2216111 - RNA, 13 nt, Human
cuccuugcucugc

SEQ ID NO: 2216112 - RNA, 14 nt, Human
cuccuugcucugca

SEQ ID NO: 2216113 - RNA, 17 nt, Human
cuccuugccuccugugu

SEQ ID NO: 2216114 - RNA, 13 nt, Human
cuccuuggaaauc

SEQ ID NO: 2216115 - RNA, 17 nt, Human
cuccuugcucugcaggc

SEQ ID NO: 2216116 - RNA, 13 nt, Human
cuccuugggagga

SEQ ID NO: 2216117 - RNA, 14 nt, Human
cuccuugggaggaa

SEQ ID NO: 2216118 - RNA, 17 nt, Human
cuccuugggaggaagca

SEQ ID NO: 2216119 - RNA, 15 nt, Human
cuccuuccaccuccc

SEQ ID NO: 2216120 - RNA, 14 nt, Human
cuccuuccaacagg

SEQ ID NO: 2216121 - RNA, 18 nt, Human
cuccuuccaacaggagcu

SEQ ID NO: 2216122 - RNA, 16 nt, Human
cuccuuccaccucccu

SEQ ID NO: 2216123 - RNA, 14 nt, Human
cuccuucagcccuc

SEQ ID NO: 2216124 - RNA, 15 nt, Human
cuccuucagcccuca

SEQ ID NO: 2216125 - RNA, 17 nt, Human
cuccuucagcccucacc

SEQ ID NO: 2216126 - RNA, 20 nt, Human
cuccuucagcccucaccccu

SEQ ID NO: 2216127 - RNA, 12 nt, Human
cuccuucagaca

SEQ ID NO: 2216128 - RNA, 14 nt, Human
cuccuucagacacc

SEQ ID NO: 2216129 - RNA, 13 nt, Human
cuccuucagacac

SEQ ID NO: 2216130 - RNA, 19 nt, Human
cuccuucagacacccucaa

SEQ ID NO: 2216131 - RNA, 13 nt, Human
cuccuucagcccu

SEQ ID NO: 2216132 - RNA, 13 nt, Human
cuccuucucccuu

SEQ ID NO: 2216133 - RNA, 18 nt, Human
cuccuuccaccucccucc

SEQ ID NO: 2216134 - RNA, 21 nt, Human
cuccuucucugucucaugugu

SEQ ID NO: 2216135 - RNA, 16 nt, Human
cuccuucucugucuca

SEQ ID NO: 2216136 - RNA, 20 nt, Human
cuccuucucugucucaugug

SEQ ID NO: 2216137 - RNA, 14 nt, Human
cuccuucuguccua

SEQ ID NO: 2216138 - RNA, 15 nt, Human
cuccuucuguccuac

SEQ ID NO: 2216139 - RNA, 20 nt, Human
cuccuucuguccuacucugu

SEQ ID NO: 2216140 - RNA, 20 nt, Human
cucccaguccaaauguccuc

SEQ ID NO: 2216141 - RNA, 16 nt, Human
cucccaguaccuccug

SEQ ID NO: 2216142 - RNA, 22 nt, Human
cucccagucaccuuguggcaag

SEQ ID NO: 2216143 - RNA, 16 nt, Human
cucccagucuacccag

SEQ ID NO: 2216144 - RNA, 18 nt, Human
cucccagucuacccagag

SEQ ID NO: 2216145 - RNA, 19 nt, Human
cucccagucuacccagaga

SEQ ID NO: 2216146 - RNA, 12 nt, Human
cucccagugucu

SEQ ID NO: 2216147 - RNA, 17 nt, Human
cucccagugucuuccug

SEQ ID NO: 2216148 - RNA, 19 nt, Human
cucccagugucuuccugug

SEQ ID NO: 2216149 - RNA, 20 nt, Human
cucccagugucuuccugugg

SEQ ID NO: 2216150 - RNA, 21 nt, Human
cucccagugucuuccuguggg

SEQ ID NO: 2216151 - RNA, 17 nt, Human
cucccauaaccgcugau

SEQ ID NO: 2216152 - RNA, 20 nt, Human
cucccauaaccgcugauucu

SEQ ID NO: 2216153 - RNA, 14 nt, Human
cucccaucucacac

SEQ ID NO: 2216154 - RNA, 12 nt, Human
cucccuggcucc

SEQ ID NO: 2216155 - RNA, 11 nt, Human
cucccuggcuc

SEQ ID NO: 2216156 - RNA, 21 nt, Human
cucccuggccuguucuguuuu

SEQ ID NO: 2216157 - RNA, 19 nt, Human
cucccuggccuguucuguu

SEQ ID NO: 2216158 - RNA, 16 nt, Human
cucccuggccuguucu

SEQ ID NO: 2216159 - RNA, 15 nt, Human
cucccuggccuguuc

SEQ ID NO: 2216160 - RNA, 15 nt, Human
cucccaucucacaca

SEQ ID NO: 2216161 - RNA, 18 nt, Human
cucccaucucacacauga

SEQ ID NO: 2216162 - RNA, 20 nt, Human
cucccuggcucucagaaggu

SEQ ID NO: 2216163 - RNA, 13 nt, Human
cucccuggcugcc

SEQ ID NO: 2216164 - RNA, 14 nt, Human
cucccuggcugccc

SEQ ID NO: 2216165 - RNA, 15 nt, Human
cucccuggcugcccu

SEQ ID NO: 2216166 - RNA, 17 nt, Human
cucccuggcugcccugg

SEQ ID NO: 2216167 - RNA, 18 nt, Human
cucccuggcugcccuggc

SEQ ID NO: 2216168 - RNA, 19 nt, Human
cucccuggcugcccuggcc

SEQ ID NO: 2216169 - RNA, 20 nt, Human
cucccuggcugcccuggccc

SEQ ID NO: 2216170 - RNA, 18 nt, Human
cucccuggcucucagaag

SEQ ID NO: 2216171 - RNA, 16 nt, Human
cucccuggcucucaga

SEQ ID NO: 2216172 - RNA, 15 nt, Human
cucccuggcucucag

SEQ ID NO: 2216173 - RNA, 15 nt, Human
cucccuggcucccau

SEQ ID NO: 2216174 - RNA, 14 nt, Human
cucccuggcuccca

SEQ ID NO: 2216175 - RNA, 19 nt, Human
cucccuguugaagcucugg

SEQ ID NO: 2216176 - RNA, 19 nt, Human
cucccuguugacgaagucu

SEQ ID NO: 2216177 - RNA, 17 nt, Human
cucccuguucuugggua

SEQ ID NO: 2216178 - RNA, 21 nt, Human
cucccuguugacgaagucucu

SEQ ID NO: 2216179 - RNA, 22 nt, Human
cucccuguugacgaagucucuu

SEQ ID NO: 2216180 - RNA, 12 nt, Human
cucccuguuuga

SEQ ID NO: 2216181 - RNA, 21 nt, Human
cucccuguuugaagccugccc

SEQ ID NO: 2216182 - RNA, 21 nt, Human
cucccuggcugcccuggcccu

SEQ ID NO: 2216183 - RNA, 22 nt, Human
cucccuggcugcccuggcccug

SEQ ID NO: 2216184 - RNA, 11 nt, Human
cucccuggguu

SEQ ID NO: 2216185 - RNA, 14 nt, Human
cucccuggguucag

SEQ ID NO: 2216186 - RNA, 10 nt, Human
cucccuuccu

SEQ ID NO: 2216187 - RNA, 23 nt, Human
cucccuucccaccucucucacuc

SEQ ID NO: 2216188 - RNA, 12 nt, Human
cucccuucaacc

SEQ ID NO: 2216189 - RNA, 18 nt, Human
cucccuucaaccauuccc

SEQ ID NO: 2216190 - RNA, 19 nt, Human
cucccuucaaccauucccc

SEQ ID NO: 2216191 - RNA, 20 nt, Human
cucccuucaaccauucccca

SEQ ID NO: 2216192 - RNA, 20 nt, Human
cuccuagggaaaaguucaua

SEQ ID NO: 2216193 - RNA, 15 nt, Human
cucccuuucuccccu

SEQ ID NO: 2216194 - RNA, 23 nt, Human
cucccuuucuccccugcccccag

SEQ ID NO: 2216195 - RNA, 18 nt, Human
cuccuaucaccuccccuc

SEQ ID NO: 2216196 - RNA, 17 nt, Human
cuccuaucaccuccccu

SEQ ID NO: 2216197 - RNA, 22 nt, Human
cuccuaguacuaacuccuagga

SEQ ID NO: 2216198 - RNA, 17 nt, Human
cucccuuggauuguccc

SEQ ID NO: 2216199 - RNA, 12 nt, Human
cucccuuucaac

SEQ ID NO: 2216200 - RNA, 13 nt, Human
cucccuuucaaca

SEQ ID NO: 2216201 - RNA, 12 nt, Human
cucccuuucucc

SEQ ID NO: 2216202 - RNA, 14 nt, Human
cucccuuucucccc

SEQ ID NO: 2216203 - RNA, 22 nt, Human
cucccuuggaaaccugcccugc

SEQ ID NO: 2216204 - RNA, 14 nt, Human
cucccuuucccuuc

SEQ ID NO: 2216205 - RNA, 15 nt, Human
cucccuuucccuucu

SEQ ID NO: 2216206 - RNA, 17 nt, Human
cucccuucccauaagcu

SEQ ID NO: 2216207 - RNA, 22 nt, Human
cucccuguuugaagccugcccu

SEQ ID NO: 2216208 - RNA, 23 nt, Human
cucccuguuugaagccugcccuu

SEQ ID NO: 2216209 - RNA, 13 nt, Human
cucccuuccucuu

SEQ ID NO: 2216210 - RNA, 17 nt, Human
cucccuuagcucccugu

SEQ ID NO: 2216211 - RNA, 12 nt, Human
cucccuuccuuu

SEQ ID NO: 2216212 - RNA, 19 nt, Human
cucccuuccuuuucccugc

SEQ ID NO: 2216213 - RNA, 15 nt, Human
cucccuucuaccugc

SEQ ID NO: 2216214 - RNA, 20 nt, Human
cucccuuccuuuucccugcu

SEQ ID NO: 2216215 - RNA, 14 nt, Human
cucccuuccucuuu

SEQ ID NO: 2216216 - RNA, 14 nt, Human
cucccuucucccau

SEQ ID NO: 2216217 - RNA, 21 nt, Human
cucccuucuaccugccacuca

SEQ ID NO: 2216218 - RNA, 17 nt, Human
cucccuucuaccugcca

SEQ ID NO: 2216219 - RNA, 18 nt, Human
cucccuucuaccugccac

SEQ ID NO: 2216220 - RNA, 16 nt, Human
cucccuucucuucaca

SEQ ID NO: 2216221 - RNA, 16 nt, Human
cucccuucugcuacug

SEQ ID NO: 2216222 - RNA, 15 nt, Human
cucccuucugcuacu

SEQ ID NO: 2216223 - RNA, 14 nt, Human
cucccuucugcuac

SEQ ID NO: 2216224 - RNA, 13 nt, Human
cucccuucugcua

SEQ ID NO: 2216225 - RNA, 18 nt, Human
cucccuuggaaaccugcc

SEQ ID NO: 2216226 - RNA, 19 nt, Human
cucccuuggaaaccugccc

SEQ ID NO: 2216227 - RNA, 20 nt, Human
cucccuuggaaaccugcccu

SEQ ID NO: 2216228 - RNA, 21 nt, Human
cucccuuggaaaccugcccug

SEQ ID NO: 2216229 - RNA, 14 nt, Human
cuccucacucccuu

SEQ ID NO: 2216230 - RNA, 21 nt, Human
cuccucacucccuucccauaa

SEQ ID NO: 2216231 - RNA, 19 nt, Human
cuccuaucaccuccccucc

SEQ ID NO: 2216232 - RNA, 16 nt, Human
cuccucacucccuucu

SEQ ID NO: 2216233 - RNA, 14 nt, Human
cuccucacuggcca

SEQ ID NO: 2216234 - RNA, 18 nt, Human
cuccucacuggccauccc

SEQ ID NO: 2216235 - RNA, 20 nt, Human
cuccucacuggccaucccuc

SEQ ID NO: 2216236 - RNA, 12 nt, Human
cuccucagaucu

SEQ ID NO: 2216237 - RNA, 14 nt, Human
cuccucccuccugc

SEQ ID NO: 2216238 - RNA, 14 nt, Human
cuccucccucugag

SEQ ID NO: 2216239 - RNA, 15 nt, Human
cuccucccucugagg

SEQ ID NO: 2216240 - RNA, 13 nt, Human
cuccucccugcau

SEQ ID NO: 2216241 - RNA, 15 nt, Human
cuccucccugcaucu

SEQ ID NO: 2216242 - RNA, 14 nt, Human
cuccucccugcauc

SEQ ID NO: 2216243 - RNA, 14 nt, Human
cuccucagaucuuc

SEQ ID NO: 2216244 - RNA, 23 nt, Human
cuccucccugcaucugaccagca

SEQ ID NO: 2216245 - RNA, 12 nt, Human
cuccucccuggc

SEQ ID NO: 2216246 - RNA, 18 nt, Human
cuccucccugcaucugac

SEQ ID NO: 2216247 - RNA, 16 nt, Human
cuccucccugcaucug

SEQ ID NO: 2216248 - RNA, 13 nt, Human
cuccucccuggcu

SEQ ID NO: 2216249 - RNA, 14 nt, Human
cuccucccuggcug

SEQ ID NO: 2216250 - RNA, 17 nt, Human
cuccucccuggcugccc

SEQ ID NO: 2216251 - RNA, 18 nt, Human
cuccucccuggcugcccu

SEQ ID NO: 2216252 - RNA, 19 nt, Human
cuccucccuggcugcccug

SEQ ID NO: 2216253 - RNA, 20 nt, Human
cuccucccuggcugcccugg

SEQ ID NO: 2216254 - RNA, 22 nt, Human
cuccucccuggcugcccuggcc

SEQ ID NO: 2216255 - RNA, 21 nt, Human
cuccucccuggcugcccuggc

SEQ ID NO: 2216256 - RNA, 14 nt, Human
cuccucccuuagcu

SEQ ID NO: 2216257 - RNA, 15 nt, Human
cuccucccuuagcuc

SEQ ID NO: 2216258 - RNA, 20 nt, Human
cuccucccuuagcucccugu

SEQ ID NO: 2216259 - RNA, 12 nt, Human
cuccucuuguaa

SEQ ID NO: 2216260 - RNA, 13 nt, Human
cuccucuuguaaa

SEQ ID NO: 2216261 - RNA, 14 nt, Human
cuccucuuguaaau

SEQ ID NO: 2216262 - RNA, 20 nt, Human
cuccucuuguaaauaaagcc

SEQ ID NO: 2216263 - RNA, 21 nt, Human
cuccucuuguaaauaaagccc

SEQ ID NO: 2216264 - RNA, 22 nt, Human
cuccucuuuccucucuuuguuc

SEQ ID NO: 2216265 - RNA, 19 nt, Human
cuccucuugccacugccuc

SEQ ID NO: 2216266 - RNA, 11 nt, Human
cuccucuccag

SEQ ID NO: 2216267 - RNA, 18 nt, Human
cuccucuugccacugccu

SEQ ID NO: 2216268 - RNA, 13 nt, Human
cuccucucagccc

SEQ ID NO: 2216269 - RNA, 13 nt, Human
cuccucucaguac

SEQ ID NO: 2216270 - RNA, 19 nt, Human
cuccucgcaagcuggguaa

SEQ ID NO: 2216271 - RNA, 22 nt, Human
cuccucccuuccuuuucccugc

SEQ ID NO: 2216272 - RNA, 13 nt, Human
cuccucccuuccu

SEQ ID NO: 2216273 - RNA, 14 nt, Human
cuccucccuuccuu

SEQ ID NO: 2216274 - RNA, 15 nt, Human
cuccucccuuccuuu

SEQ ID NO: 2216275 - RNA, 21 nt, Human
cuccucccuuccuuuucccug

SEQ ID NO: 2216276 - RNA, 17 nt, Human
cuccucgcaagcugggu

SEQ ID NO: 2216277 - RNA, 18 nt, Human
cuccucggcccccuccau

SEQ ID NO: 2216278 - RNA, 19 nt, Human
cuccucggcccccuccauc

SEQ ID NO: 2216279 - RNA, 20 nt, Human
cuccucggcccccuccaucg

SEQ ID NO: 2216280 - RNA, 14 nt, Human
cuccucggccuggc

SEQ ID NO: 2216281 - RNA, 15 nt, Human
cuccucggccuggcu

SEQ ID NO: 2216282 - RNA, 16 nt, Human
cuccucggccuggcuc

SEQ ID NO: 2216283 - RNA, 18 nt, Human
cuccucggccuggcuccu

SEQ ID NO: 2216284 - RNA, 13 nt, Human
cuccucuaagcca

SEQ ID NO: 2216285 - RNA, 19 nt, Human
cuccucuagcugugggggu

SEQ ID NO: 2216286 - RNA, 17 nt, Human
cuccucuagcugugggg

SEQ ID NO: 2216287 - RNA, 18 nt, Human
cuccucuagcuguggggg

SEQ ID NO: 2216288 - RNA, 21 nt, Human
cuccugaguagcuggauuaca

SEQ ID NO: 2216289 - RNA, 17 nt, Human
cuccugaguagcuggga

SEQ ID NO: 2216290 - RNA, 22 nt, Human
cuccugaguagcugggauuaca

SEQ ID NO: 2216291 - RNA, 12 nt, Human
cuccugcaggca

SEQ ID NO: 2216292 - RNA, 13 nt, Human
cuccugcaggcag

SEQ ID NO: 2216293 - RNA, 14 nt, Human
cuccugcaggcagc

SEQ ID NO: 2216294 - RNA, 22 nt, Human
cuccugaggggcaucugccccu

SEQ ID NO: 2216295 - RNA, 21 nt, Human
cuccugaggggcaucugcccc

SEQ ID NO: 2216296 - RNA, 20 nt, Human
cuccugaggggcaucugccc

SEQ ID NO: 2216297 - RNA, 19 nt, Human
cuccugaggggcaucugcc

SEQ ID NO: 2216298 - RNA, 16 nt, Human
cuccugaggggcaucu

SEQ ID NO: 2216299 - RNA, 16 nt, Human
cuccugaggcuuugga

SEQ ID NO: 2216300 - RNA, 17 nt, Human
cuccugaggcuuuggau

SEQ ID NO: 2216301 - RNA, 21 nt, Human
cuccugaggacagcuguccuc

SEQ ID NO: 2216302 - RNA, 18 nt, Human
cuccugaggacagcuguc

SEQ ID NO: 2216303 - RNA, 19 nt, Human
cuccugaggacagcugucc

SEQ ID NO: 2216304 - RNA, 14 nt, Human
cuccugaggacagc

SEQ ID NO: 2216305 - RNA, 15 nt, Human
cuccugaggacagcu

SEQ ID NO: 2216306 - RNA, 16 nt, Human
cuccugaggacagcug

SEQ ID NO: 2216307 - RNA, 17 nt, Human
cuccugaggacagcugu

SEQ ID NO: 2216308 - RNA, 16 nt, Human
cuccugaccugucacc

SEQ ID NO: 2216309 - RNA, 16 nt, Human
cuccugaccugaggcu

SEQ ID NO: 2216310 - RNA, 20 nt, Human
cuccugagaaaaaagguucc

SEQ ID NO: 2216311 - RNA, 15 nt, Human
cuccugagaccccug

SEQ ID NO: 2216312 - RNA, 17 nt, Human
cuccugagaccccuggc

SEQ ID NO: 2216313 - RNA, 18 nt, Human
cuccugagaccccuggcc

SEQ ID NO: 2216314 - RNA, 23 nt, Human
cuccugagaccccuggccuccgg

SEQ ID NO: 2216315 - RNA, 19 nt, Human
cuccugagaccccuggccu

SEQ ID NO: 2216316 - RNA, 20 nt, Human
cuccugagaccccuggccuc

SEQ ID NO: 2216317 - RNA, 21 nt, Human
cuccugagaccccuggccucc

SEQ ID NO: 2216318 - RNA, 22 nt, Human
cuccugagaccccuggccuccg

SEQ ID NO: 2216319 - RNA, 14 nt, Human
cuccugaccuuagg

SEQ ID NO: 2216320 - RNA, 15 nt, Human
cuccugaccugaggc

SEQ ID NO: 2216321 - RNA, 14 nt, Human
cuccugaccugagg

SEQ ID NO: 2216322 - RNA, 14 nt, Human
cuccugaccucagg

SEQ ID NO: 2216323 - RNA, 23 nt, Human
cuccugacccaguccccgugccc

SEQ ID NO: 2216324 - RNA, 15 nt, Human
cuccucuuuccucuc

SEQ ID NO: 2216325 - RNA, 17 nt, Human
cuccucuuuccucucuu

SEQ ID NO: 2216326 - RNA, 16 nt, Human
cuccugacccaguccc

SEQ ID NO: 2216327 - RNA, 22 nt, Human
cugauguugagggaacagacag

SEQ ID NO: 2216328 - RNA, 16 nt, Human
cugauguucaguguaa

SEQ ID NO: 2216329 - RNA, 17 nt, Human
cugauguucaguguaau

SEQ ID NO: 2216330 - RNA, 19 nt, Human
cugauguucaguguaauuu

SEQ ID NO: 2216331 - RNA, 21 nt, Human
cugauguucaguguaauuucu

SEQ ID NO: 2216332 - RNA, 16 nt, Human
cugauuacacaaaaca

SEQ ID NO: 2216333 - RNA, 21 nt, Human
cugauuaaguugucuaaacaa

SEQ ID NO: 2216334 - RNA, 15 nt, Human
cugauguuggaagag

SEQ ID NO: 2216335 - RNA, 23 nt, Human
cugauuagaaaugaccaauauua

SEQ ID NO: 2216336 - RNA, 11 nt, Human
cugauuagaaa

SEQ ID NO: 2216337 - RNA, 14 nt, Human
cugauucaacuaaa

SEQ ID NO: 2216338 - RNA, 13 nt, Human
cugauuagaaaug

SEQ ID NO: 2216339 - RNA, 14 nt, Human
cugauuacaccagc

SEQ ID NO: 2216340 - RNA, 19 nt, Human
cugauuagaaaugaccaau

SEQ ID NO: 2216341 - RNA, 21 nt, Human
cugauguuccuagugaaagag

SEQ ID NO: 2216342 - RNA, 20 nt, Human
cugauguuccuagugaaaga

SEQ ID NO: 2216343 - RNA, 18 nt, Human
cugauguuccuagugaaa

SEQ ID NO: 2216344 - RNA, 13 nt, Human
cugauguuccuag

SEQ ID NO: 2216345 - RNA, 22 nt, Human
cugauucauaauaaauaucugu

SEQ ID NO: 2216346 - RNA, 20 nt, Human
cugauucacugcauggcucc

SEQ ID NO: 2216347 - RNA, 15 nt, Human
cugauucacugcaug

SEQ ID NO: 2216348 - RNA, 18 nt, Human
cugauucacugcauggcu

SEQ ID NO: 2216349 - RNA, 16 nt, Human
cugauucggcugucuc

SEQ ID NO: 2216350 - RNA, 22 nt, Human
cugauucccaagcucugcuccu

SEQ ID NO: 2216351 - RNA, 19 nt, Human
cugauucccaagcucugcu

SEQ ID NO: 2216352 - RNA, 20 nt, Human
cugauucccaagcucugcuc

SEQ ID NO: 2216353 - RNA, 17 nt, Human
cugauucccaagcucug

SEQ ID NO: 2216354 - RNA, 18 nt, Human
cugauucccaagcucugc

SEQ ID NO: 2216355 - RNA, 15 nt, Human
cugauucccaagcuc

SEQ ID NO: 2216356 - RNA, 17 nt, Human
cugauucaacuaaaaaa

SEQ ID NO: 2216357 - RNA, 15 nt, Human
cugauucaacuaaaa

SEQ ID NO: 2216358 - RNA, 18 nt, Human
cugauucaacuaaaaaaa

SEQ ID NO: 2216359 - RNA, 13 nt, Human
cugauucacugca

SEQ ID NO: 2216360 - RNA, 17 nt, Human
cugaucaugcauuguug

SEQ ID NO: 2216361 - RNA, 15 nt, Human
cugaucaugcauugu

SEQ ID NO: 2216362 - RNA, 14 nt, Human
cugaucaugcauug

SEQ ID NO: 2216363 - RNA, 12 nt, Human
cugaucaugcau

SEQ ID NO: 2216364 - RNA, 19 nt, Human
cugaucagucuaagauggg

SEQ ID NO: 2216365 - RNA, 22 nt, Human
cugaucagugggccuccaagga

SEQ ID NO: 2216366 - RNA, 16 nt, Human
cugauaguuacuguug

SEQ ID NO: 2216367 - RNA, 17 nt, Human
cugauaguuacuguugu

SEQ ID NO: 2216368 - RNA, 18 nt, Human
cugauaguuacuguugug

SEQ ID NO: 2216369 - RNA, 19 nt, Human
cugauaguuacuguuguga

SEQ ID NO: 2216370 - RNA, 21 nt, Human
cugauaguuacuguugugacc

SEQ ID NO: 2216371 - RNA, 22 nt, Human
cugauaguuacuguugugaccu

SEQ ID NO: 2216372 - RNA, 18 nt, Human
cugauccagccucucccc

SEQ ID NO: 2216373 - RNA, 16 nt, Human
cugaucaugcauuguu

SEQ ID NO: 2216374 - RNA, 13 nt, Human
cugauccagagca

SEQ ID NO: 2216375 - RNA, 15 nt, Human
cugauccagagcaca

SEQ ID NO: 2216376 - RNA, 21 nt, Human
cugauccagagcacagaucug

SEQ ID NO: 2216377 - RNA, 20 nt, Human
cugauccagcccugaguucc

SEQ ID NO: 2216378 - RNA, 12 nt, Human
cugauaccucaa

SEQ ID NO: 2216379 - RNA, 15 nt, Human
cugauacccagagca

SEQ ID NO: 2216380 - RNA, 14 nt, Human
cugauaaagaaaga

SEQ ID NO: 2216381 - RNA, 21 nt, Human
cugauaaagaugagugagcau

SEQ ID NO: 2216382 - RNA, 15 nt, Human
cugauagcucuuugg

SEQ ID NO: 2216383 - RNA, 15 nt, Human
cugauaguuacuguu

SEQ ID NO: 2216384 - RNA, 22 nt, Human
cugauagcucuuuggcagucua

SEQ ID NO: 2216385 - RNA, 17 nt, Human
cugauaggccaaguuug

SEQ ID NO: 2216386 - RNA, 17 nt, Human
cugauagggauacaugc

SEQ ID NO: 2216387 - RNA, 19 nt, Human
cugauagggauacaugcuc

SEQ ID NO: 2216388 - RNA, 21 nt, Human
cugaucgugcuaaauuuucag

SEQ ID NO: 2216389 - RNA, 13 nt, Human
cugaucuccaugg

SEQ ID NO: 2216390 - RNA, 14 nt, Human
cugaucuccauggc

SEQ ID NO: 2216391 - RNA, 20 nt, Human
cugaucuccauggcuuccuc

SEQ ID NO: 2216392 - RNA, 19 nt, Human
cugaucgugcuaaauuuuc

SEQ ID NO: 2216393 - RNA, 17 nt, Human
cugaucgugcuaaauuu

SEQ ID NO: 2216394 - RNA, 15 nt, Human
cugaucgugcuaaau

SEQ ID NO: 2216395 - RNA, 22 nt, Human
cugaucgugacgcugaauaaau

SEQ ID NO: 2216396 - RNA, 14 nt, Human
cugaucgugacgcu

SEQ ID NO: 2216397 - RNA, 21 nt, Human
cugaucgugacgcugaauaaa

SEQ ID NO: 2216398 - RNA, 20 nt, Human
cugaucgccaaccuuucccc

SEQ ID NO: 2216399 - RNA, 23 nt, Human
cugauccugugaaguaaggaugu

SEQ ID NO: 2216400 - RNA, 21 nt, Human
cugauccuggaggcccaguuc

SEQ ID NO: 2216401 - RNA, 20 nt, Human
cugauccugugaaguaagga

SEQ ID NO: 2216402 - RNA, 19 nt, Human
cugauccuggaggcccagu

SEQ ID NO: 2216403 - RNA, 13 nt, Human
cugaucccucuac

SEQ ID NO: 2216404 - RNA, 12 nt, Human
cugaucccucua

SEQ ID NO: 2216405 - RNA, 13 nt, Human
cugauguucagug

SEQ ID NO: 2216406 - RNA, 20 nt, Human
cugauguuacaucacagugu

SEQ ID NO: 2216407 - RNA, 14 nt, Human
cugauguucagugu

SEQ ID NO: 2216408 - RNA, 15 nt, Human
cugauguucagugua

SEQ ID NO: 2216409 - RNA, 13 nt, Human
cugauguguacau

SEQ ID NO: 2216410 - RNA, 15 nt, Human
cugauguccucacca

SEQ ID NO: 2216411 - RNA, 22 nt, Human
cugaucuccauggcuuccuccu

SEQ ID NO: 2216412 - RNA, 18 nt, Human
cugaugucaauuucugug

SEQ ID NO: 2216413 - RNA, 19 nt, Human
cugaugucaauuucugugu

SEQ ID NO: 2216414 - RNA, 20 nt, Human
cugaugucaauuucuguguu

SEQ ID NO: 2216415 - RNA, 22 nt, Human
cugaugucaauuucuguguugc

SEQ ID NO: 2216416 - RNA, 18 nt, Human
cugaguggcaggggacag

SEQ ID NO: 2216417 - RNA, 13 nt, Human
cugaguggcaggg

SEQ ID NO: 2216418 - RNA, 16 nt, Human
cugaguggcaggggac

SEQ ID NO: 2216419 - RNA, 16 nt, Human
cugagugccuuuuggu

SEQ ID NO: 2216420 - RNA, 15 nt, Human
cugagugccuuuugg

SEQ ID NO: 2216421 - RNA, 16 nt, Human
cugaguggacuggagu

SEQ ID NO: 2216422 - RNA, 19 nt, Human
cugagugccuggccaaagg

SEQ ID NO: 2216423 - RNA, 21 nt, Human
cugaguggacuggaguggagc

SEQ ID NO: 2216424 - RNA, 22 nt, Human
cugaguggacuggaguggagca

SEQ ID NO: 2216425 - RNA, 18 nt, Human
cugaguggaucuccaagg

SEQ ID NO: 2216426 - RNA, 22 nt, Human
cugagugggggaucacagccuc

SEQ ID NO: 2216427 - RNA, 13 nt, Human
cugauaaagauga

SEQ ID NO: 2216428 - RNA, 23 nt, Human
cugauaaaaccauguagaaaauu

SEQ ID NO: 2216429 - RNA, 19 nt, Human
cugauaaaaccauguagaa

SEQ ID NO: 2216430 - RNA, 19 nt, Human
cugagugcagccguuugag

SEQ ID NO: 2216431 - RNA, 13 nt, Human
cugagugccuggc

SEQ ID NO: 2216432 - RNA, 14 nt, Human
cugagugccuggcc

SEQ ID NO: 2216433 - RNA, 16 nt, Human
cugagugccuggccaa

SEQ ID NO: 2216434 - RNA, 14 nt, Human
cugagugccuuuug

SEQ ID NO: 2216435 - RNA, 18 nt, Human
cugagugaaccuguauaa

SEQ ID NO: 2216436 - RNA, 15 nt, Human
cugagucuccugugc

SEQ ID NO: 2216437 - RNA, 16 nt, Human
cugagucuccugugcc

SEQ ID NO: 2216438 - RNA, 17 nt, Human
cugagugaaccuguaua

SEQ ID NO: 2216439 - RNA, 16 nt, Human
cugagucucccaaggc

SEQ ID NO: 2216440 - RNA, 17 nt, Human
cugagucucccaaggcu

SEQ ID NO: 2216441 - RNA, 13 nt, Human
cugagucuccugu

SEQ ID NO: 2216442 - RNA, 14 nt, Human
cugagucuccugug

SEQ ID NO: 2216443 - RNA, 13 nt, Human
cugagucugaagg

SEQ ID NO: 2216444 - RNA, 14 nt, Human
cugagucugaaggc

SEQ ID NO: 2216445 - RNA, 15 nt, Human
cugagucugaaggcu

SEQ ID NO: 2216446 - RNA, 16 nt, Human
cugagucugaaggcug

SEQ ID NO: 2216447 - RNA, 18 nt, Human
cugaccauuucagggguc

SEQ ID NO: 2216448 - RNA, 18 nt, Human
cugacccaggccgcagcu

SEQ ID NO: 2216449 - RNA, 22 nt, Human
cugaccaugcucaucugcuggu

SEQ ID NO: 2216450 - RNA, 10 nt, Human
cugacccagu

SEQ ID NO: 2216451 - RNA, 19 nt, Human
cugacccaggccgcagcuc

SEQ ID NO: 2216452 - RNA, 21 nt, Human
cugacccaggccgcagcucuu

SEQ ID NO: 2216453 - RNA, 20 nt, Human
cugaccaugcucaucugcug

SEQ ID NO: 2216454 - RNA, 21 nt, Human
cugaccaugcucaucugcugg

SEQ ID NO: 2216455 - RNA, 17 nt, Human
cugacccagucccuggg

SEQ ID NO: 2216456 - RNA, 16 nt, Human
cugacccagucccugg

SEQ ID NO: 2216457 - RNA, 15 nt, Human
cugacccagucccug

SEQ ID NO: 2216458 - RNA, 14 nt, Human
cugacccagucccu

SEQ ID NO: 2216459 - RNA, 13 nt, Human
cugacccaguccc

SEQ ID NO: 2216460 - RNA, 12 nt, Human
cugacccagucc

SEQ ID NO: 2216461 - RNA, 23 nt, Human
cugacccaggccgcagcucuugc

SEQ ID NO: 2216462 - RNA, 11 nt, Human
cugacccaguc

SEQ ID NO: 2216463 - RNA, 18 nt, Human
cugacccagucccugggg

SEQ ID NO: 2216464 - RNA, 13 nt, Human
cugacccagugag

SEQ ID NO: 2216465 - RNA, 12 nt, Human
cugacccagugc

SEQ ID NO: 2216466 - RNA, 18 nt, Human
cugacccagugcccccac

SEQ ID NO: 2216467 - RNA, 13 nt, Human
cugacccagugcc

SEQ ID NO: 2216468 - RNA, 18 nt, Human
cugagggaccaacugggc

SEQ ID NO: 2216469 - RNA, 16 nt, Human
cugagggaccaacugg

SEQ ID NO: 2216470 - RNA, 12 nt, Human
cugagggaccaa

SEQ ID NO: 2216471 - RNA, 21 nt, Human
cugaggcuuuggauuugacau

SEQ ID NO: 2216472 - RNA, 19 nt, Human
cugagggaaagcccagaaa

SEQ ID NO: 2216473 - RNA, 23 nt, Human
cugagggaaagcccagaaaagga

SEQ ID NO: 2216474 - RNA, 18 nt, Human
cugaggcuuuggauuuga

SEQ ID NO: 2216475 - RNA, 17 nt, Human
cugaggcuuuggauuug

SEQ ID NO: 2216476 - RNA, 15 nt, Human
cugaggcuuuggauu

SEQ ID NO: 2216477 - RNA, 14 nt, Human
cugaggcuuuggau

SEQ ID NO: 2216478 - RNA, 21 nt, Human
cugacccagugcccccacuga

SEQ ID NO: 2216479 - RNA, 20 nt, Human
cugacccagugcccccacug

SEQ ID NO: 2216480 - RNA, 23 nt, Human
cugacccagugcccccacugacc

SEQ ID NO: 2216481 - RNA, 14 nt, Human
cugacccagugaga

SEQ ID NO: 2216482 - RNA, 15 nt, Human
cugagggaccagcca

SEQ ID NO: 2216483 - RNA, 13 nt, Human
cugagggaccagc

SEQ ID NO: 2216484 - RNA, 21 nt, Human
cugagggaccaacugggccca

SEQ ID NO: 2216485 - RNA, 20 nt, Human
cugagggaccaacugggccc

SEQ ID NO: 2216486 - RNA, 19 nt, Human
cugagggaccaacugggcc

SEQ ID NO: 2216487 - RNA, 16 nt, Human
cugagggcagucgaua

SEQ ID NO: 2216488 - RNA, 21 nt, Human
cugagggauggacugaugcuu

SEQ ID NO: 2216489 - RNA, 20 nt, Human
cugagggcagaaagguucug

SEQ ID NO: 2216490 - RNA, 23 nt, Human
cugagggcagaaagguucugccc

SEQ ID NO: 2216491 - RNA, 13 nt, Human
cugagggccacac

SEQ ID NO: 2216492 - RNA, 14 nt, Human
cugagggccacacu

SEQ ID NO: 2216493 - RNA, 15 nt, Human
cugagggccacacua

SEQ ID NO: 2216494 - RNA, 16 nt, Human
cugagggccacacuau

SEQ ID NO: 2216495 - RNA, 13 nt, Human
cugagggccccuc

SEQ ID NO: 2216496 - RNA, 15 nt, Human
cugagggccccucug

SEQ ID NO: 2216497 - RNA, 16 nt, Human
cugagggccccucugc

SEQ ID NO: 2216498 - RNA, 17 nt, Human
cugagggccccucugcc

SEQ ID NO: 2216499 - RNA, 18 nt, Human
cugagggccccucugccc

SEQ ID NO: 2216500 - RNA, 19 nt, Human
cugagggccccucugccca

SEQ ID NO: 2216501 - RNA, 20 nt, Human
cugagggccccucugcccag

SEQ ID NO: 2216502 - RNA, 21 nt, Human
cugagggccccucugcccagc

SEQ ID NO: 2216503 - RNA, 22 nt, Human
cugagggccccucugcccagcu

SEQ ID NO: 2216504 - RNA, 16 nt, Human
cugagggcgaggggag

SEQ ID NO: 2216505 - RNA, 14 nt, Human
cugagggcuuccuu

SEQ ID NO: 2216506 - RNA, 16 nt, Human
cugagggcuuccuuug

SEQ ID NO: 2216507 - RNA, 15 nt, Human
cugaguccuuaaaca

SEQ ID NO: 2216508 - RNA, 21 nt, Human
cugaguccuuaaacagggcau

SEQ ID NO: 2216509 - RNA, 22 nt, Human
cugaguccuuaaacagggcauc

SEQ ID NO: 2216510 - RNA, 23 nt, Human
cugagucguacagaaagcugccu

SEQ ID NO: 2216511 - RNA, 21 nt, Human
cugagucguacagaaagcugc

SEQ ID NO: 2216512 - RNA, 15 nt, Human
cugagucucccaagg

SEQ ID NO: 2216513 - RNA, 20 nt, Human
cugagucguacagaaagcug

SEQ ID NO: 2216514 - RNA, 19 nt, Human
cugagucguacagaaagcu

SEQ ID NO: 2216515 - RNA, 18 nt, Human
cugagucguacagaaagc

SEQ ID NO: 2216516 - RNA, 17 nt, Human
cugagucguacagaaag

SEQ ID NO: 2216517 - RNA, 11 nt, Human
cugcacccagg

SEQ ID NO: 2216518 - RNA, 15 nt, Human
cugcaccccccuggg

SEQ ID NO: 2216519 - RNA, 14 nt, Human
cugcaccccccugg

SEQ ID NO: 2216520 - RNA, 12 nt, Human
cugcacccaggg

SEQ ID NO: 2216521 - RNA, 13 nt, Human
cugcacccagggg

SEQ ID NO: 2216522 - RNA, 21 nt, Human
cugcacagugcaucucagccc

SEQ ID NO: 2216523 - RNA, 21 nt, Human
cugcacauuaaggagaaaucu

SEQ ID NO: 2216524 - RNA, 13 nt, Human
cugcaccaaccca

SEQ ID NO: 2216525 - RNA, 16 nt, Human
cugcaccaacccagcc

SEQ ID NO: 2216526 - RNA, 17 nt, Human
cugcaccaacccagccg

SEQ ID NO: 2216527 - RNA, 21 nt, Human
cugcaccaacccagccgcugc

SEQ ID NO: 2216528 - RNA, 23 nt, Human
cugcaccaacccagccgcugccc

SEQ ID NO: 2216529 - RNA, 18 nt, Human
cugcacccucaggcaggu

SEQ ID NO: 2216530 - RNA, 16 nt, Human
cugcacccucaggcag

SEQ ID NO: 2216531 - RNA, 12 nt, Human
cugcacccucca

SEQ ID NO: 2216532 - RNA, 13 nt, Human
cugcacccuccac

SEQ ID NO: 2216533 - RNA, 14 nt, Human
cugcacccuccacc

SEQ ID NO: 2216534 - RNA, 15 nt, Human
cugcacccuccaccc

SEQ ID NO: 2216535 - RNA, 17 nt, Human
cugcaccccccugggcu

SEQ ID NO: 2216536 - RNA, 16 nt, Human
cugcaccccccugggc

SEQ ID NO: 2216537 - RNA, 13 nt, Human
cugcacccccucc

SEQ ID NO: 2216538 - RNA, 14 nt, Human
cugcacccccuccu

SEQ ID NO: 2216539 - RNA, 16 nt, Human
cugcacccccuccugc

SEQ ID NO: 2216540 - RNA, 17 nt, Human
cugcacccccuccugcu

SEQ ID NO: 2216541 - RNA, 18 nt, Human
cugcacccccuccugcug

SEQ ID NO: 2216542 - RNA, 19 nt, Human
cugcacccccuccugcugc

SEQ ID NO: 2216543 - RNA, 17 nt, Human
cugcacccucaggcagg

SEQ ID NO: 2216544 - RNA, 16 nt, Human
cugcacaagcugcacc

SEQ ID NO: 2216545 - RNA, 15 nt, Human
cugcacaagcugcac

SEQ ID NO: 2216546 - RNA, 14 nt, Human
cugcacaagcugca

SEQ ID NO: 2216547 - RNA, 13 nt, Human
cugcacaagcugc

SEQ ID NO: 2216548 - RNA, 18 nt, Human
cugcacaagcugcacccu

SEQ ID NO: 2216549 - RNA, 13 nt, Human
cugcacagcggcc

SEQ ID NO: 2216550 - RNA, 19 nt, Human
cugcacagcggccccugca

SEQ ID NO: 2216551 - RNA, 16 nt, Human
cugcacagggcagcug

SEQ ID NO: 2216552 - RNA, 18 nt, Human
cugcacagugcaucucag

SEQ ID NO: 2216553 - RNA, 21 nt, Human
cugcacagggcagcugggccc

SEQ ID NO: 2216554 - RNA, 22 nt, Human
cugcacagggcagcugggccca

SEQ ID NO: 2216555 - RNA, 17 nt, Human
cugcacagggcagcugg

SEQ ID NO: 2216556 - RNA, 18 nt, Human
cugcacagggcagcuggg

SEQ ID NO: 2216557 - RNA, 19 nt, Human
cugcacagggcagcugggc

SEQ ID NO: 2216558 - RNA, 20 nt, Human
cugcacagggcagcugggcc

SEQ ID NO: 2216559 - RNA, 14 nt, Human
cugcaaaaugagac

SEQ ID NO: 2216560 - RNA, 12 nt, Human
cugcaaaaugag

SEQ ID NO: 2216561 - RNA, 19 nt, Human
cugcaaaaugaggaaugua

SEQ ID NO: 2216562 - RNA, 21 nt, Human
cugcaaaaugaggaauguaua

SEQ ID NO: 2216563 - RNA, 18 nt, Human
cugcaaaaggacucucag

SEQ ID NO: 2216564 - RNA, 15 nt, Human
cugauuggacauuuu

SEQ ID NO: 2216565 - RNA, 14 nt, Human
cugauuggcucacc

SEQ ID NO: 2216566 - RNA, 16 nt, Human
cugauuggcucaccca

SEQ ID NO: 2216567 - RNA, 17 nt, Human
cugcaaaaggacucuca

SEQ ID NO: 2216568 - RNA, 17 nt, Human
cugauucggcugucuca

SEQ ID NO: 2216569 - RNA, 23 nt, Human
cugauucggcugucucagacucu

SEQ ID NO: 2216570 - RNA, 14 nt, Human
cugauucucagggu

SEQ ID NO: 2216571 - RNA, 15 nt, Human
cugauucucaggguc

SEQ ID NO: 2216572 - RNA, 17 nt, Human
cugauucucagggucuc

SEQ ID NO: 2216573 - RNA, 18 nt, Human
cugauucucagggucucu

SEQ ID NO: 2216574 - RNA, 20 nt, Human
cugauucucagggucucugc

SEQ ID NO: 2216575 - RNA, 21 nt, Human
cugauucucagggucucugcu

SEQ ID NO: 2216576 - RNA, 13 nt, Human
cugcaaaauuuua

SEQ ID NO: 2216577 - RNA, 11 nt, Human
cugcaaaauuu

SEQ ID NO: 2216578 - RNA, 22 nt, Human
cugcaaaaugaggaauguauau

SEQ ID NO: 2216579 - RNA, 22 nt, Human
cugcaaacaccaacauguuggg

SEQ ID NO: 2216580 - RNA, 23 nt, Human
cugcaaacaugggguuggcuggg

SEQ ID NO: 2216581 - RNA, 23 nt, Human
cugcaaaauuugaugccaggaca

SEQ ID NO: 2216582 - RNA, 18 nt, Human
cugcaaaccugaccccug

SEQ ID NO: 2216583 - RNA, 13 nt, Human
cugcaaacgcugc

SEQ ID NO: 2216584 - RNA, 20 nt, Human
cugcaaaccugaccccugcu

SEQ ID NO: 2216585 - RNA, 16 nt, Human
cugcaaacgcugccug

SEQ ID NO: 2216586 - RNA, 15 nt, Human
cugcaaacgcugccu

SEQ ID NO: 2216587 - RNA, 17 nt, Human
cugcaaacgcugccugc

SEQ ID NO: 2216588 - RNA, 15 nt, Human
cugcaauccugucuu

SEQ ID NO: 2216589 - RNA, 16 nt, Human
cugcaauccugucuuu

SEQ ID NO: 2216590 - RNA, 21 nt, Human
cugcacaaagcccuuccaugu

SEQ ID NO: 2216591 - RNA, 16 nt, Human
cugcacaaacucacca

SEQ ID NO: 2216592 - RNA, 20 nt, Human
cugcaauugcuuaggauguu

SEQ ID NO: 2216593 - RNA, 18 nt, Human
cugcacaaagcccuucca

SEQ ID NO: 2216594 - RNA, 20 nt, Human
cugcacaaagcccuuccaug

SEQ ID NO: 2216595 - RNA, 13 nt, Human
cugcacaaagccc

SEQ ID NO: 2216596 - RNA, 20 nt, Human
cugcaauuucauaugcugua

SEQ ID NO: 2216597 - RNA, 18 nt, Human
cugcaauuucauaugcug

SEQ ID NO: 2216598 - RNA, 21 nt, Human
cugcaaugaagucucugaagu

SEQ ID NO: 2216599 - RNA, 18 nt, Human
cugcaaugaagucucuga

SEQ ID NO: 2216600 - RNA, 22 nt, Human
cugcaaucuucucagaaggcaa

SEQ ID NO: 2216601 - RNA, 23 nt, Human
cugcaauccugucuuucugagca

SEQ ID NO: 2216602 - RNA, 17 nt, Human
cugcaaugggcacuggg

SEQ ID NO: 2216603 - RNA, 21 nt, Human
cugcaaugggcacugggauga

SEQ ID NO: 2216604 - RNA, 18 nt, Human
cugcaaugugggcagaga

SEQ ID NO: 2216605 - RNA, 15 nt, Human
cugcaauguuuuccu

SEQ ID NO: 2216606 - RNA, 16 nt, Human
cugcaauguuuuccuu

SEQ ID NO: 2216607 - RNA, 23 nt, Human
cugcaauuaaagugauacugaaa

SEQ ID NO: 2216608 - RNA, 15 nt, Human
cugcaauuccccucu

SEQ ID NO: 2216609 - RNA, 16 nt, Human
cugcaauuccccucug

SEQ ID NO: 2216610 - RNA, 17 nt, Human
cugcaauuccccucugc

SEQ ID NO: 2216611 - RNA, 20 nt, Human
cugcaauuccccucugcugc

SEQ ID NO: 2216612 - RNA, 15 nt, Human
cugcaauugcuuagg

SEQ ID NO: 2216613 - RNA, 16 nt, Human
cugcaauugcuuagga

SEQ ID NO: 2216614 - RNA, 17 nt, Human
cugcagagacagagagg

SEQ ID NO: 2216615 - RNA, 13 nt, Human
cugcagaaggaaa

SEQ ID NO: 2216616 - RNA, 14 nt, Human
cugcagagagaagc

SEQ ID NO: 2216617 - RNA, 23 nt, Human
cugcagaagacaguauggcagcu

SEQ ID NO: 2216618 - RNA, 23 nt, Human
cugcagaacguauugguccagcu

SEQ ID NO: 2216619 - RNA, 21 nt, Human
cugcagaacguauugguccag

SEQ ID NO: 2216620 - RNA, 20 nt, Human
cugcagaacguauuggucca

SEQ ID NO: 2216621 - RNA, 13 nt, Human
cugcagaagacag

SEQ ID NO: 2216622 - RNA, 20 nt, Human
cugcagagcaggaaacauga

SEQ ID NO: 2216623 - RNA, 18 nt, Human
cugcagagcagugggccu

SEQ ID NO: 2216624 - RNA, 23 nt, Human
cugcagagcagugggccuggcca

SEQ ID NO: 2216625 - RNA, 21 nt, Human
cugcagagcagugggccuggc

SEQ ID NO: 2216626 - RNA, 13 nt, Human
cugcagaggggca

SEQ ID NO: 2216627 - RNA, 14 nt, Human
cugcagaggggcag

SEQ ID NO: 2216628 - RNA, 15 nt, Human
cugcagaggggcagg

SEQ ID NO: 2216629 - RNA, 17 nt, Human
cugcagaggggcaggcc

SEQ ID NO: 2216630 - RNA, 19 nt, Human
cugcagaggggcaggcccu

SEQ ID NO: 2216631 - RNA, 21 nt, Human
cugcagagcugcgggcugggu

SEQ ID NO: 2216632 - RNA, 12 nt, Human
cugcagagcugc

SEQ ID NO: 2216633 - RNA, 14 nt, Human
cugcacuugcagac

SEQ ID NO: 2216634 - RNA, 15 nt, Human
cugcacuuacuugcu

SEQ ID NO: 2216635 - RNA, 17 nt, Human
cugcacccucccuccga

SEQ ID NO: 2216636 - RNA, 16 nt, Human
cugcacuuacuugcuu

SEQ ID NO: 2216637 - RNA, 21 nt, Human
cugcacccuccacccuguccc

SEQ ID NO: 2216638 - RNA, 19 nt, Human
cugcacuuauacccaugaa

SEQ ID NO: 2216639 - RNA, 16 nt, Human
cugcacuugcagacuc

SEQ ID NO: 2216640 - RNA, 17 nt, Human
cugcacuugcagacucu

SEQ ID NO: 2216641 - RNA, 17 nt, Human
cugcaccggcuggccug

SEQ ID NO: 2216642 - RNA, 18 nt, Human
cugcaccggcuggccugg

SEQ ID NO: 2216643 - RNA, 19 nt, Human
cugcaccggcuggccuggc

SEQ ID NO: 2216644 - RNA, 20 nt, Human
cugcaccggcuggccuggcc

SEQ ID NO: 2216645 - RNA, 16 nt, Human
cugcacccuccacccu

SEQ ID NO: 2216646 - RNA, 17 nt, Human
cugcacccuccacccug

SEQ ID NO: 2216647 - RNA, 18 nt, Human
cugcacccuccacccugu

SEQ ID NO: 2216648 - RNA, 20 nt, Human
cugcacccuccacccugucc

SEQ ID NO: 2216649 - RNA, 23 nt, Human
cugcagaggggcuuucuggagag

SEQ ID NO: 2216650 - RNA, 23 nt, Human
cugcagaggggcaggcccugcac

SEQ ID NO: 2216651 - RNA, 16 nt, Human
cugcagaggucugugc

SEQ ID NO: 2216652 - RNA, 17 nt, Human
cugcagaggucugugcu

SEQ ID NO: 2216653 - RNA, 18 nt, Human
cugcagaggucugugcug

SEQ ID NO: 2216654 - RNA, 19 nt, Human
cugcagaggucugugcuga

SEQ ID NO: 2216655 - RNA, 21 nt, Human
cugcagaggucugugcugagg

SEQ ID NO: 2216656 - RNA, 22 nt, Human
cugcagaggggcuuucuggaga

SEQ ID NO: 2216657 - RNA, 20 nt, Human
cugcagaggggcuuucugga

SEQ ID NO: 2216658 - RNA, 19 nt, Human
cugcagaggggcuuucugg

SEQ ID NO: 2216659 - RNA, 21 nt, Human
cugcagaggggcaggcccugc

SEQ ID NO: 2216660 - RNA, 22 nt, Human
cugcagaggggcaggcccugca

SEQ ID NO: 2216661 - RNA, 22 nt, Human
cugcagaggucugugcugaggc

SEQ ID NO: 2216662 - RNA, 23 nt, Human
cugcagaggucugugcugaggcc

SEQ ID NO: 2216663 - RNA, 17 nt, Human
cugcagaguuuccaaaa

SEQ ID NO: 2216664 - RNA, 15 nt, Human
cugcagccaggccac

SEQ ID NO: 2216665 - RNA, 17 nt, Human
cugcagauuugggcugg

SEQ ID NO: 2216666 - RNA, 11 nt, Human
cugcagccuca

SEQ ID NO: 2216667 - RNA, 24 nt, Human
cugcagcccggcgccaccauccug

SEQ ID NO: 2216668 - RNA, 18 nt, Human
cugcagauuugggcugga

SEQ ID NO: 2216669 - RNA, 12 nt, Human
cugcagcccagg

SEQ ID NO: 2216670 - RNA, 16 nt, Human
cugcagcccagggacc

SEQ ID NO: 2216671 - RNA, 23 nt, Human
cugcagccaggccacuggccccu

SEQ ID NO: 2216672 - RNA, 22 nt, Human
cugcagccaggccacuggcccc

SEQ ID NO: 2216673 - RNA, 17 nt, Human
cugcagccaggccacug

SEQ ID NO: 2216674 - RNA, 16 nt, Human
cugcagccaggccacu

SEQ ID NO: 2216675 - RNA, 22 nt, Human
cugcagccucaaccuccugggc

SEQ ID NO: 2216676 - RNA, 21 nt, Human
cugcaggcccuggccuccccu

SEQ ID NO: 2216677 - RNA, 19 nt, Human
cugcagccucaaccuccug

SEQ ID NO: 2216678 - RNA, 20 nt, Human
cugcagccucaaccuccugg

SEQ ID NO: 2216679 - RNA, 22 nt, Human
cugcagggaguccgaaagggac

SEQ ID NO: 2216680 - RNA, 16 nt, Human
cugcagggccaagcac

SEQ ID NO: 2216681 - RNA, 13 nt, Human
cugcagggccagg

SEQ ID NO: 2216682 - RNA, 23 nt, Human
cugcagggaaaauuauuugcaua

SEQ ID NO: 2216683 - RNA, 15 nt, Human
cugcagggacugcca

SEQ ID NO: 2216684 - RNA, 17 nt, Human
cugcagggacugccagu

SEQ ID NO: 2216685 - RNA, 22 nt, Human
cugcagggaaaauuauuugcau

SEQ ID NO: 2216686 - RNA, 12 nt, Human
cugcagggaaaa

SEQ ID NO: 2216687 - RNA, 17 nt, Human
cugcuccccucccuccu

SEQ ID NO: 2216688 - RNA, 13 nt, Human
cugcuccccuccc

SEQ ID NO: 2216689 - RNA, 14 nt, Human
cugcucccugaagc

SEQ ID NO: 2216690 - RNA, 15 nt, Human
cugcuccagcuguuc

SEQ ID NO: 2216691 - RNA, 22 nt, Human
cugcuccagaccugauccugga

SEQ ID NO: 2216692 - RNA, 21 nt, Human
cugcuccagaccugauccugg

SEQ ID NO: 2216693 - RNA, 16 nt, Human
cugcuccucuccccag

SEQ ID NO: 2216694 - RNA, 17 nt, Human
cugcuccucuccccagc

SEQ ID NO: 2216695 - RNA, 14 nt, Human
cugcuccucuccag

SEQ ID NO: 2216696 - RNA, 15 nt, Human
cugcuccucuccagg

SEQ ID NO: 2216697 - RNA, 16 nt, Human
cugcuccucuccaggc

SEQ ID NO: 2216698 - RNA, 17 nt, Human
cugcuccucuccaggca

SEQ ID NO: 2216699 - RNA, 15 nt, Human
cugcucccugaagcc

SEQ ID NO: 2216700 - RNA, 16 nt, Human
cugcucccugaagcca

SEQ ID NO: 2216701 - RNA, 17 nt, Human
cugcucccugaagccag

SEQ ID NO: 2216702 - RNA, 18 nt, Human
cugcucccugaagccagc

SEQ ID NO: 2216703 - RNA, 19 nt, Human
cugcucccugaagccagcc

SEQ ID NO: 2216704 - RNA, 20 nt, Human
cugcucccugaagccagccu

SEQ ID NO: 2216705 - RNA, 21 nt, Human
cugcucccugaagccagccuu

SEQ ID NO: 2216706 - RNA, 22 nt, Human
cugcucccugaagccagccuuc

SEQ ID NO: 2216707 - RNA, 20 nt, Human
cugcucuccuuccuggagcc

SEQ ID NO: 2216708 - RNA, 21 nt, Human
cugcucugaauuaguccuugc

SEQ ID NO: 2216709 - RNA, 22 nt, Human
cugcucugaauuaguccuugcu

SEQ ID NO: 2216710 - RNA, 16 nt, Human
cugcucuccuuccugg

SEQ ID NO: 2216711 - RNA, 19 nt, Human
cugcucgggcccaggccau

SEQ ID NO: 2216712 - RNA, 22 nt, Human
cugcucgggcccaggccaucuu

SEQ ID NO: 2216713 - RNA, 17 nt, Human
cugcucuccuuccugga

SEQ ID NO: 2216714 - RNA, 19 nt, Human
cugcucuccuuccuggagc

SEQ ID NO: 2216715 - RNA, 16 nt, Human
cugcucgccuuagcac

SEQ ID NO: 2216716 - RNA, 13 nt, Human
cugcucgggccca

SEQ ID NO: 2216717 - RNA, 14 nt, Human
cugcucgggcccag

SEQ ID NO: 2216718 - RNA, 15 nt, Human
cugcucgggcccagg

SEQ ID NO: 2216719 - RNA, 16 nt, Human
cugcucgggcccaggc

SEQ ID NO: 2216720 - RNA, 17 nt, Human
cugcucgggcccaggcc

SEQ ID NO: 2216721 - RNA, 18 nt, Human
cugcuccucuccccagca

SEQ ID NO: 2216722 - RNA, 13 nt, Human
cugcuccuggagc

SEQ ID NO: 2216723 - RNA, 15 nt, Human
cugcuccuggagccu

SEQ ID NO: 2216724 - RNA, 19 nt, Human
cugcuccuggagccuuuga

SEQ ID NO: 2216725 - RNA, 20 nt, Human
cugcuccuggagccuuugaa

SEQ ID NO: 2216726 - RNA, 15 nt, Human
cugcucgccuuagca

SEQ ID NO: 2216727 - RNA, 18 nt, Human
cugcuccuuccuucaccu

SEQ ID NO: 2216728 - RNA, 20 nt, Human
cugcggaaugaaccacaucu

SEQ ID NO: 2216729 - RNA, 17 nt, Human
cugccuuaucuugcacc

SEQ ID NO: 2216730 - RNA, 15 nt, Human
cugccuuagagccag

SEQ ID NO: 2216731 - RNA, 17 nt, Human
cugccuuagagccaggc

SEQ ID NO: 2216732 - RNA, 19 nt, Human
cugccuuagagccaggcac

SEQ ID NO: 2216733 - RNA, 16 nt, Human
cugccuuagucucagu

SEQ ID NO: 2216734 - RNA, 20 nt, Human
cugccuuagucucaguuugu

SEQ ID NO: 2216735 - RNA, 23 nt, Human
cugccuuagucucaguuugugug

SEQ ID NO: 2216736 - RNA, 15 nt, Human
cugccuuaucuugca

SEQ ID NO: 2216737 - RNA, 15 nt, Human
cugcgguccacccag

SEQ ID NO: 2216738 - RNA, 22 nt, Human
cugcgguagaugggagggaggc

SEQ ID NO: 2216739 - RNA, 21 nt, Human
cugcggguggggcuuggggcu

SEQ ID NO: 2216740 - RNA, 20 nt, Human
cugcggagagaggccuuguc

SEQ ID NO: 2216741 - RNA, 23 nt, Human
cugcggaccccagcugugagccu

SEQ ID NO: 2216742 - RNA, 13 nt, Human
cugcggguggggc

SEQ ID NO: 2216743 - RNA, 21 nt, Human
cugcggaaugaaccacaucuu

SEQ ID NO: 2216744 - RNA, 17 nt, Human
cugcgcuugcuuuucug

SEQ ID NO: 2216745 - RNA, 14 nt, Human
cugcggaaaaggaa

SEQ ID NO: 2216746 - RNA, 13 nt, Human
cugcggaccccag

SEQ ID NO: 2216747 - RNA, 14 nt, Human
cugcggaccccagc

SEQ ID NO: 2216748 - RNA, 15 nt, Human
cugcggaccccagcu

SEQ ID NO: 2216749 - RNA, 16 nt, Human
cugcggaccccagcug

SEQ ID NO: 2216750 - RNA, 20 nt, Human
cugcggaccccagcugugag

SEQ ID NO: 2216751 - RNA, 20 nt, Human
cugcguggggacagggcucg

SEQ ID NO: 2216752 - RNA, 19 nt, Human
cugcgugucaccugugcuu

SEQ ID NO: 2216753 - RNA, 17 nt, Human
cugcgguccacccagga

SEQ ID NO: 2216754 - RNA, 16 nt, Human
cugcgguccacccagg

SEQ ID NO: 2216755 - RNA, 23 nt, Human
cugcuaaauaaaauuuguugcau

SEQ ID NO: 2216756 - RNA, 12 nt, Human
cugcuaaauaaa

SEQ ID NO: 2216757 - RNA, 15 nt, Human
cugcuaaauaaaauu

SEQ ID NO: 2216758 - RNA, 20 nt, Human
cugcguuuuggaagcucuga

SEQ ID NO: 2216759 - RNA, 18 nt, Human
cugcguucuugugacaga

SEQ ID NO: 2216760 - RNA, 14 nt, Human
cugcuccagcuguu

SEQ ID NO: 2216761 - RNA, 15 nt, Human
cugcuccagaccuga

SEQ ID NO: 2216762 - RNA, 14 nt, Human
cugcuccagaccug

SEQ ID NO: 2216763 - RNA, 13 nt, Human
cugcuccagaccu

SEQ ID NO: 2216764 - RNA, 17 nt, Human
cugcuaaguauuuccca

SEQ ID NO: 2216765 - RNA, 20 nt, Human
cugcuaacuuggagccccag

SEQ ID NO: 2216766 - RNA, 21 nt, Human
cugcuaacuuggagccccagu

SEQ ID NO: 2216767 - RNA, 23 nt, Human
cugcuaacuuggagccccagugc

SEQ ID NO: 2216768 - RNA, 18 nt, Human
cugcuaaguauuucccag

SEQ ID NO: 2216769 - RNA, 12 nt, Human
cugccucagguu

SEQ ID NO: 2216770 - RNA, 12 nt, Human
cugccucauuua

SEQ ID NO: 2216771 - RNA, 18 nt, Human
cugccucagguuccuaug

SEQ ID NO: 2216772 - RNA, 13 nt, Human
cugccucagguuc

SEQ ID NO: 2216773 - RNA, 17 nt, Human
cugccucagguuccuau

SEQ ID NO: 2216774 - RNA, 23 nt, Human
cugccucaggaggcaggaccuuc

SEQ ID NO: 2216775 - RNA, 22 nt, Human
cugccucaggaggcaggaccuu

SEQ ID NO: 2216776 - RNA, 18 nt, Human
cugccucucccuggcccu

SEQ ID NO: 2216777 - RNA, 17 nt, Human
cugccucucccuggccc

SEQ ID NO: 2216778 - RNA, 19 nt, Human
cugccucucccuggcccuc

SEQ ID NO: 2216779 - RNA, 13 nt, Human
cugccuccacucc

SEQ ID NO: 2216780 - RNA, 14 nt, Human
cugccuccacuccc

SEQ ID NO: 2216781 - RNA, 15 nt, Human
cugccuccacuccca

SEQ ID NO: 2216782 - RNA, 16 nt, Human
cugccucucccuggcc

SEQ ID NO: 2216783 - RNA, 13 nt, Human
cugccucauuuag

SEQ ID NO: 2216784 - RNA, 12 nt, Human
cugccuccaccc

SEQ ID NO: 2216785 - RNA, 15 nt, Human
cugccuccacccucu

SEQ ID NO: 2216786 - RNA, 16 nt, Human
cugccuccacccucug

SEQ ID NO: 2216787 - RNA, 17 nt, Human
cugccuccacccucuga

SEQ ID NO: 2216788 - RNA, 18 nt, Human
cugccuccacccucugag

SEQ ID NO: 2216789 - RNA, 20 nt, Human
cugccuccacccucugagcu

SEQ ID NO: 2216790 - RNA, 21 nt, Human
cugccuccacccucugagcuu

SEQ ID NO: 2216791 - RNA, 14 nt, Human
cugccucagccucc

SEQ ID NO: 2216792 - RNA, 14 nt, Human
cugccucaggacug

SEQ ID NO: 2216793 - RNA, 13 nt, Human
cugccucaggacu

SEQ ID NO: 2216794 - RNA, 11 nt, Human
cugccucagga

SEQ ID NO: 2216795 - RNA, 14 nt, Human
cugccucagcccgc

SEQ ID NO: 2216796 - RNA, 12 nt, Human
cugccucaggac

SEQ ID NO: 2216797 - RNA, 12 nt, Human
cugccucagccu

SEQ ID NO: 2216798 - RNA, 23 nt, Human
cugccucacuuccuacaagagca

SEQ ID NO: 2216799 - RNA, 14 nt, Human
cugccucacuuccu

SEQ ID NO: 2216800 - RNA, 23 nt, Human
cugccucacagcuggccgucacu

SEQ ID NO: 2216801 - RNA, 13 nt, Human
cugccucagccuc

SEQ ID NO: 2216802 - RNA, 16 nt, Human
cugccuaaguggcugc

SEQ ID NO: 2216803 - RNA, 15 nt, Human
cugccuaaguggcug

SEQ ID NO: 2216804 - RNA, 14 nt, Human
cugccuaaguggcu

SEQ ID NO: 2216805 - RNA, 21 nt, Human
cugcccugggauguccacaga

SEQ ID NO: 2216806 - RNA, 24 nt, Human
cugccucaaugugaaucagacccu

SEQ ID NO: 2216807 - RNA, 15 nt, Human
cugccucacagcugg

SEQ ID NO: 2216808 - RNA, 21 nt, Human
cugccucaaugugaaucagac

SEQ ID NO: 2216809 - RNA, 18 nt, Human
cugccuaaguggcugcug

SEQ ID NO: 2216810 - RNA, 13 nt, Human
cugccuauuuuaa

SEQ ID NO: 2216811 - RNA, 15 nt, Human
cugccuaagugcagc

SEQ ID NO: 2216812 - RNA, 16 nt, Human
cugcccugccacuuug

SEQ ID NO: 2216813 - RNA, 11 nt, Human
cugcccuggga

SEQ ID NO: 2216814 - RNA, 13 nt, Human
cugcccugggagg

SEQ ID NO: 2216815 - RNA, 12 nt, Human
cugcccugggag

SEQ ID NO: 2216816 - RNA, 19 nt, Human
cugcccugggauguccaca

SEQ ID NO: 2216817 - RNA, 21 nt, Human
cugcccuggcugcugccccca

SEQ ID NO: 2216818 - RNA, 18 nt, Human
cugcccuggcugcugccc

SEQ ID NO: 2216819 - RNA, 20 nt, Human
cugcccuggcugcugccccc

SEQ ID NO: 2216820 - RNA, 22 nt, Human
cugcccugggaggcagugaugg

SEQ ID NO: 2216821 - RNA, 15 nt, Human
cugcccugggaggca

SEQ ID NO: 2216822 - RNA, 14 nt, Human
cugccucuucucua

SEQ ID NO: 2216823 - RNA, 23 nt, Human
cugccugaagucacacagugagu

SEQ ID NO: 2216824 - RNA, 13 nt, Human
cugccucuucucu

SEQ ID NO: 2216825 - RNA, 19 nt, Human
cugccucuuagacuucugc

SEQ ID NO: 2216826 - RNA, 20 nt, Human
cugccucuguuugacaaacc

SEQ ID NO: 2216827 - RNA, 22 nt, Human
cugccucuuagacuucugcuuu

SEQ ID NO: 2216828 - RNA, 23 nt, Human
cugccucuuagacuucugcuuuc

SEQ ID NO: 2216829 - RNA, 15 nt, Human
cugccucuucccccu

SEQ ID NO: 2216830 - RNA, 21 nt, Human
cugccucuucccccugcuucc

SEQ ID NO: 2216831 - RNA, 22 nt, Human
cugccucuucccccugcuucca

SEQ ID NO: 2216832 - RNA, 12 nt, Human
cugccucuuccu

SEQ ID NO: 2216833 - RNA, 18 nt, Human
cugccucucgguggccag

SEQ ID NO: 2216834 - RNA, 14 nt, Human
cugccucucugcag

SEQ ID NO: 2216835 - RNA, 12 nt, Human
cugccucucugc

SEQ ID NO: 2216836 - RNA, 13 nt, Human
cugccucucugca

SEQ ID NO: 2216837 - RNA, 13 nt, Human
cugccugcccagg

SEQ ID NO: 2216838 - RNA, 14 nt, Human
cugccugcccaggc

SEQ ID NO: 2216839 - RNA, 16 nt, Human
cugccugcccacccgu

SEQ ID NO: 2216840 - RNA, 15 nt, Human
cugccugcccacccg

SEQ ID NO: 2216841 - RNA, 16 nt, Human
cugccuuaaaaccaaa

SEQ ID NO: 2216842 - RNA, 17 nt, Human
cugccuuaaaaccaaag

SEQ ID NO: 2216843 - RNA, 18 nt, Human
cugccuuaaaaccaaaga

SEQ ID NO: 2216844 - RNA, 19 nt, Human
cugccuuaaaaccaaagag

SEQ ID NO: 2216845 - RNA, 22 nt, Human
cugccuuaaaaccaaagagggc

SEQ ID NO: 2216846 - RNA, 20 nt, Human
cugccuuaaagucaguaacu

SEQ ID NO: 2216847 - RNA, 15 nt, Human
cugccugcccaggcc

SEQ ID NO: 2216848 - RNA, 14 nt, Human
cugccugcccaccc

SEQ ID NO: 2216849 - RNA, 13 nt, Human
cugccugcccacc

SEQ ID NO: 2216850 - RNA, 16 nt, Human
cugccugcccacacag

SEQ ID NO: 2216851 - RNA, 16 nt, Human
cugccugauggaccug

SEQ ID NO: 2216852 - RNA, 12 nt, Human
cugccugagcuu

SEQ ID NO: 2216853 - RNA, 23 nt, Human
cugccugacauuuggaguguucc

SEQ ID NO: 2216854 - RNA, 20 nt, Human
cugccugacauuuggagugu

SEQ ID NO: 2216855 - RNA, 15 nt, Human
cugccugagggcccc

SEQ ID NO: 2216856 - RNA, 16 nt, Human
cugccugagggccccu

SEQ ID NO: 2216857 - RNA, 17 nt, Human
cugccugagggccccuc

SEQ ID NO: 2216858 - RNA, 18 nt, Human
cugccugagggccccucu

SEQ ID NO: 2216859 - RNA, 20 nt, Human
cugccugagggccccucugc

SEQ ID NO: 2216860 - RNA, 21 nt, Human
cugccugagggccccucugcc

SEQ ID NO: 2216861 - RNA, 22 nt, Human
cugccugagggccccucugccc

SEQ ID NO: 2216862 - RNA, 23 nt, Human
cugccugagggccccucugccca

SEQ ID NO: 2216863 - RNA, 11 nt, Human
cugcaggggcu

SEQ ID NO: 2216864 - RNA, 14 nt, Human
cugcagggccagga

SEQ ID NO: 2216865 - RNA, 15 nt, Human
cugcagggccaggac

SEQ ID NO: 2216866 - RNA, 16 nt, Human
cugcagggccaggacu

SEQ ID NO: 2216867 - RNA, 17 nt, Human
cugcagggccaggacug

SEQ ID NO: 2216868 - RNA, 21 nt, Human
cugcagggccaggacugagcc

SEQ ID NO: 2216869 - RNA, 22 nt, Human
cugcagggcccucccuuuuccc

SEQ ID NO: 2216870 - RNA, 13 nt, Human
cugccacacuuca

SEQ ID NO: 2216871 - RNA, 14 nt, Human
cugcaggggcucug

SEQ ID NO: 2216872 - RNA, 17 nt, Human
cugccacacuucaggcu

SEQ ID NO: 2216873 - RNA, 22 nt, Human
cugccacacuucaggcucuucu

SEQ ID NO: 2216874 - RNA, 19 nt, Human
cugccaccacgcccggcua

SEQ ID NO: 2216875 - RNA, 18 nt, Human
cugccaccaaaggccagg

SEQ ID NO: 2216876 - RNA, 22 nt, Human
cugccaccaaaggccaggguca

SEQ ID NO: 2216877 - RNA, 18 nt, Human
cugccaccaccagaaagc

SEQ ID NO: 2216878 - RNA, 14 nt, Human
cugccaccagagac

SEQ ID NO: 2216879 - RNA, 23 nt, Human
cugccacagccuccccugccagg

SEQ ID NO: 2216880 - RNA, 12 nt, Human
cugcaggggcuc

SEQ ID NO: 2216881 - RNA, 15 nt, Human
cugccaccaaaggcc

SEQ ID NO: 2216882 - RNA, 22 nt, Human
cugccacagccuccccugccag

SEQ ID NO: 2216883 - RNA, 21 nt, Human
cugccacagccuccccugcca

SEQ ID NO: 2216884 - RNA, 13 nt, Human
cugccaccaggcc

SEQ ID NO: 2216885 - RNA, 15 nt, Human
cugccaccagagacc

SEQ ID NO: 2216886 - RNA, 21 nt, Human
cugccaccagagaccguccuc

SEQ ID NO: 2216887 - RNA, 14 nt, Human
cugccaccaggcca

SEQ ID NO: 2216888 - RNA, 15 nt, Human
cugccaccaggccac

SEQ ID NO: 2216889 - RNA, 17 nt, Human
cugccaccaggccaccu

SEQ ID NO: 2216890 - RNA, 18 nt, Human
cugccaccaggccaccuc

SEQ ID NO: 2216891 - RNA, 23 nt, Human
cugccaccaggccaccuccccag

SEQ ID NO: 2216892 - RNA, 22 nt, Human
cugccaccagagaccguccuca

SEQ ID NO: 2216893 - RNA, 12 nt, Human
cugccaccaguc

SEQ ID NO: 2216894 - RNA, 19 nt, Human
cugccagccagcagccagc

SEQ ID NO: 2216895 - RNA, 18 nt, Human
cugccagccagcagccag

SEQ ID NO: 2216896 - RNA, 16 nt, Human
cugccagccagcagcc

SEQ ID NO: 2216897 - RNA, 15 nt, Human
cugccagccagcagc

SEQ ID NO: 2216898 - RNA, 14 nt, Human
cugccagccagcag

SEQ ID NO: 2216899 - RNA, 13 nt, Human
cugccagccagca

SEQ ID NO: 2216900 - RNA, 12 nt, Human
cugccagccagc

SEQ ID NO: 2216901 - RNA, 12 nt, Human
cugccagccaca

SEQ ID NO: 2216902 - RNA, 18 nt, Human
cugccacccaccucccug

SEQ ID NO: 2216903 - RNA, 15 nt, Human
cugccacccugggga

SEQ ID NO: 2216904 - RNA, 17 nt, Human
cugccacccaccucccu

SEQ ID NO: 2216905 - RNA, 15 nt, Human
cugccacccaccucc

SEQ ID NO: 2216906 - RNA, 14 nt, Human
cugccacccaccuc

SEQ ID NO: 2216907 - RNA, 19 nt, Human
cugccaccauccugcugcu

SEQ ID NO: 2216908 - RNA, 14 nt, Human
cugccaccagucac

SEQ ID NO: 2216909 - RNA, 17 nt, Human
cugccaccagucacugu

SEQ ID NO: 2216910 - RNA, 14 nt, Human
cugccaccauccug

SEQ ID NO: 2216911 - RNA, 17 nt, Human
cugccaccauccugcug

SEQ ID NO: 2216912 - RNA, 16 nt, Human
cugccacccuggggag

SEQ ID NO: 2216913 - RNA, 20 nt, Human
cugccacccuggggagaaag

SEQ ID NO: 2216914 - RNA, 20 nt, Human
cugccagccuggcuucugga

SEQ ID NO: 2216915 - RNA, 19 nt, Human
cugccagccuggcuucugg

SEQ ID NO: 2216916 - RNA, 16 nt, Human
cugccagccuggcuuc

SEQ ID NO: 2216917 - RNA, 15 nt, Human
cugccagccuggcuu

SEQ ID NO: 2216918 - RNA, 14 nt, Human
cugccagccuggcu

SEQ ID NO: 2216919 - RNA, 13 nt, Human
cugccagccuggc

SEQ ID NO: 2216920 - RNA, 12 nt, Human
cugccagccugg

SEQ ID NO: 2216921 - RNA, 23 nt, Human
cugccagccagcagccagcucuc

SEQ ID NO: 2216922 - RNA, 20 nt, Human
cugccagccagcagccagcu

SEQ ID NO: 2216923 - RNA, 19 nt, Human
cugccagccgagauagcca

SEQ ID NO: 2216924 - RNA, 15 nt, Human
cugccaggaagccag

SEQ ID NO: 2216925 - RNA, 16 nt, Human
cugccaggaagccagc

SEQ ID NO: 2216926 - RNA, 18 nt, Human
cugccaggaagccagcag

SEQ ID NO: 2216927 - RNA, 19 nt, Human
cugccaggaagccagcagg

SEQ ID NO: 2216928 - RNA, 19 nt, Human
cugccaugccagcuuaucu

SEQ ID NO: 2216929 - RNA, 13 nt, Human
cugccaggcaggg

SEQ ID NO: 2216930 - RNA, 12 nt, Human
cugccaggcagg

SEQ ID NO: 2216931 - RNA, 17 nt, Human
cugccaugccagcuuau

SEQ ID NO: 2216932 - RNA, 15 nt, Human
cugccaggcaggggu

SEQ ID NO: 2216933 - RNA, 23 nt, Human
cugccagccuggcuucuggagcc

SEQ ID NO: 2216934 - RNA, 22 nt, Human
cugccagccuggcuucuggagc

SEQ ID NO: 2216935 - RNA, 15 nt, Human
cugccaggagcuuug

SEQ ID NO: 2216936 - RNA, 10 nt, Human
cugcccuccc

SEQ ID NO: 2216937 - RNA, 14 nt, Human
cugcccuccauccc

SEQ ID NO: 2216938 - RNA, 22 nt, Human
cugcccuccagcucuuuccucc

SEQ ID NO: 2216939 - RNA, 14 nt, Human
cugcccuccccucu

SEQ ID NO: 2216940 - RNA, 15 nt, Human
cugcccuccaucccg

SEQ ID NO: 2216941 - RNA, 17 nt, Human
cugcccuccccagagca

SEQ ID NO: 2216942 - RNA, 21 nt, Human
cugcccgggaaggucaccagc

SEQ ID NO: 2216943 - RNA, 22 nt, Human
cugcccggcgcccucuguccug

SEQ ID NO: 2216944 - RNA, 23 nt, Human
cugcccggcgcccucuguccuga

SEQ ID NO: 2216945 - RNA, 20 nt, Human
cugcccuccccucucugcac

SEQ ID NO: 2216946 - RNA, 21 nt, Human
cugcccuccccagagcacugg

SEQ ID NO: 2216947 - RNA, 20 nt, Human
cugcccuccuuguccaccca

SEQ ID NO: 2216948 - RNA, 18 nt, Human
cugcccuccuuguccacc

SEQ ID NO: 2216949 - RNA, 16 nt, Human
cugcccucguggccag

SEQ ID NO: 2216950 - RNA, 11 nt, Human
cugcccggcug

SEQ ID NO: 2216951 - RNA, 11 nt, Human
cugccccuggc

SEQ ID NO: 2216952 - RNA, 15 nt, Human
cugcccggcgcccuc

SEQ ID NO: 2216953 - RNA, 16 nt, Human
cugcccggcgcccucu

SEQ ID NO: 2216954 - RNA, 17 nt, Human
cugcccggcgcccucug

SEQ ID NO: 2216955 - RNA, 20 nt, Human
cugcccggcgcccucugucc

SEQ ID NO: 2216956 - RNA, 21 nt, Human
cugcccggcgcccucuguccu

SEQ ID NO: 2216957 - RNA, 15 nt, Human
cugcccggcugcgga

SEQ ID NO: 2216958 - RNA, 19 nt, Human
cugcccuccaagaccuucu

SEQ ID NO: 2216959 - RNA, 17 nt, Human
cugcccucguggccagc

SEQ ID NO: 2216960 - RNA, 17 nt, Human
cugcccugcacgucaug

SEQ ID NO: 2216961 - RNA, 20 nt, Human
cugcccugcacgucauggga

SEQ ID NO: 2216962 - RNA, 13 nt, Human
cugcccugccacu

SEQ ID NO: 2216963 - RNA, 11 nt, Human
cugcccugccc

SEQ ID NO: 2216964 - RNA, 13 nt, Human
cugcccugcccac

SEQ ID NO: 2216965 - RNA, 14 nt, Human
cugcccugcccacc

SEQ ID NO: 2216966 - RNA, 15 nt, Human
cugcccugcccaccu

SEQ ID NO: 2216967 - RNA, 16 nt, Human
cugcccugcccaccug

SEQ ID NO: 2216968 - RNA, 19 nt, Human
cugccauuugcacccuccg

SEQ ID NO: 2216969 - RNA, 17 nt, Human
cugccauggaggcacac

SEQ ID NO: 2216970 - RNA, 16 nt, Human
cugccauuucugagau

SEQ ID NO: 2216971 - RNA, 21 nt, Human
cugccauuugcacccuccgcc

SEQ ID NO: 2216972 - RNA, 20 nt, Human
cugccauuugcacccuccgc

SEQ ID NO: 2216973 - RNA, 22 nt, Human
cugcccaaagugcuuccaaggc

SEQ ID NO: 2216974 - RNA, 17 nt, Human
cugcccaaaaauauggu

SEQ ID NO: 2216975 - RNA, 17 nt, Human
cugcccaaccugcucuc

SEQ ID NO: 2216976 - RNA, 20 nt, Human
cugcccaacccuucccucac

SEQ ID NO: 2216977 - RNA, 17 nt, Human
cugcccaacccuucccu

SEQ ID NO: 2216978 - RNA, 19 nt, Human
cugcccaggagagccagcc

SEQ ID NO: 2216979 - RNA, 18 nt, Human
cugcccaggagagccagc

SEQ ID NO: 2216980 - RNA, 17 nt, Human
cugcccaggagagccag

SEQ ID NO: 2216981 - RNA, 12 nt, Human
cugcccaggaga

SEQ ID NO: 2216982 - RNA, 22 nt, Human
cugcccaggagagccagcccuc

SEQ ID NO: 2216983 - RNA, 21 nt, Human
cugcccaggagagccagcccu

SEQ ID NO: 2216984 - RNA, 23 nt, Human
cugcccaggagagccagcccucc

SEQ ID NO: 2216985 - RNA, 13 nt, Human
cugcccaggcccc

SEQ ID NO: 2216986 - RNA, 15 nt, Human
cugcccagcuugggc

SEQ ID NO: 2216987 - RNA, 16 nt, Human
cugcccagcuugggcc

SEQ ID NO: 2216988 - RNA, 17 nt, Human
cugcccagcuugggccc

SEQ ID NO: 2216989 - RNA, 19 nt, Human
cugcccagcuugggcccag

SEQ ID NO: 2216990 - RNA, 20 nt, Human
cugcccagcuugggcccagc

SEQ ID NO: 2216991 - RNA, 11 nt, Human
cugcccaggag

SEQ ID NO: 2216992 - RNA, 21 nt, Human
cugcccaggacggggccggcc

SEQ ID NO: 2216993 - RNA, 20 nt, Human
cugcccaggacggggccggc

SEQ ID NO: 2216994 - RNA, 23 nt, Human
cugcccagcuugggcccagcugg

SEQ ID NO: 2216995 - RNA, 21 nt, Human
cugcccagcuugggcccagcu

SEQ ID NO: 2216996 - RNA, 22 nt, Human
cugcccagcuugggcccagcug

SEQ ID NO: 2216997 - RNA, 19 nt, Human
cugcccaggccugccuguu

SEQ ID NO: 2216998 - RNA, 16 nt, Human
cugcccaggggagccc

SEQ ID NO: 2216999 - RNA, 17 nt, Human
cugcccaggggagcccu

SEQ ID NO: 2217000 - RNA, 18 nt, Human
cugcccaggggagcccuc

SEQ ID NO: 2217001 - RNA, 22 nt, Human
cugcccaggggagcccuccacg

SEQ ID NO: 2217002 - RNA, 18 nt, Human
cugcccaggccugccugu

SEQ ID NO: 2217003 - RNA, 18 nt, Human
cugcccagucccccaacc

SEQ ID NO: 2217004 - RNA, 19 nt, Human
cugcccagucccccaaccc

SEQ ID NO: 2217005 - RNA, 21 nt, Human
cugcccaggggugcccccucc

SEQ ID NO: 2217006 - RNA, 22 nt, Human
cugcccaggggugcccccuccu

SEQ ID NO: 2217007 - RNA, 13 nt, Human
cugcccagucccc

SEQ ID NO: 2217008 - RNA, 14 nt, Human
cugcccaguccccc

SEQ ID NO: 2217009 - RNA, 13 nt, Human
cugcccaggggug

SEQ ID NO: 2217010 - RNA, 14 nt, Human
cugcccaggggugc

SEQ ID NO: 2217011 - RNA, 15 nt, Human
cugcccaggggugcc

SEQ ID NO: 2217012 - RNA, 16 nt, Human
cugcccaggggugccc

SEQ ID NO: 2217013 - RNA, 17 nt, Human
cugcccaggggugcccc

SEQ ID NO: 2217014 - RNA, 18 nt, Human
cugcccaggggugccccc

SEQ ID NO: 2217015 - RNA, 19 nt, Human
cugcccaggggugcccccu

SEQ ID NO: 2217016 - RNA, 20 nt, Human
cugcccaggggugcccccuc

SEQ ID NO: 2217017 - RNA, 14 nt, Human
cugccccuggcagc

SEQ ID NO: 2217018 - RNA, 15 nt, Human
cugccccuggcagcc

SEQ ID NO: 2217019 - RNA, 16 nt, Human
cugccccuggcagccc

SEQ ID NO: 2217020 - RNA, 17 nt, Human
cugccccuggcagcccc

SEQ ID NO: 2217021 - RNA, 17 nt, Human
cuggccaacaugguaaa

SEQ ID NO: 2217022 - RNA, 22 nt, Human
cuggccagaugcaccagcccuu

SEQ ID NO: 2217023 - RNA, 21 nt, Human
cuggccagaugcaccagcccu

SEQ ID NO: 2217024 - RNA, 18 nt, Human
cuggcccacagcaggugc

SEQ ID NO: 2217025 - RNA, 17 nt, Human
cuggccagaugcaccag

SEQ ID NO: 2217026 - RNA, 18 nt, Human
cuggccagaugcaccagc

SEQ ID NO: 2217027 - RNA, 19 nt, Human
cuggccagaugcaccagcc

SEQ ID NO: 2217028 - RNA, 20 nt, Human
cuggccagaugcaccagccc

SEQ ID NO: 2217029 - RNA, 16 nt, Human
cuggccagaugcacca

SEQ ID NO: 2217030 - RNA, 16 nt, Human
cuggccaacgggguga

SEQ ID NO: 2217031 - RNA, 23 nt, Human
cuggccaacaucgugaaacccug

SEQ ID NO: 2217032 - RNA, 19 nt, Human
cuggcauugucccugugcc

SEQ ID NO: 2217033 - RNA, 21 nt, Human
cuggcauuauguccacugugu

SEQ ID NO: 2217034 - RNA, 16 nt, Human
cuggcauugucccugu

SEQ ID NO: 2217035 - RNA, 17 nt, Human
cuggcauugucccugug

SEQ ID NO: 2217036 - RNA, 20 nt, Human
cuggcauuagaauuauuuaa

SEQ ID NO: 2217037 - RNA, 13 nt, Human
cuggcacugcugu

SEQ ID NO: 2217038 - RNA, 14 nt, Human
cuggcacugcugug

SEQ ID NO: 2217039 - RNA, 22 nt, Human
cuggcauuagaauuauuuaaac

SEQ ID NO: 2217040 - RNA, 16 nt, Human
cuggcacugcugugcu

SEQ ID NO: 2217041 - RNA, 19 nt, Human
cuggcauuauguccacugu

SEQ ID NO: 2217042 - RNA, 20 nt, Human
cuggcacugacugggcauag

SEQ ID NO: 2217043 - RNA, 19 nt, Human
cuggagggcuggaaucugg

SEQ ID NO: 2217044 - RNA, 19 nt, Human
cuggcacugaauuaaucau

SEQ ID NO: 2217045 - RNA, 17 nt, Human
cuggcacugcuuccagu

SEQ ID NO: 2217046 - RNA, 15 nt, Human
cuggcacugcuucca

SEQ ID NO: 2217047 - RNA, 16 nt, Human
cuggcacugcuuccag

SEQ ID NO: 2217048 - RNA, 19 nt, Human
cuggccucccacagacuca

SEQ ID NO: 2217049 - RNA, 13 nt, Human
cuggccucccacc

SEQ ID NO: 2217050 - RNA, 15 nt, Human
cuggccucccacccg

SEQ ID NO: 2217051 - RNA, 17 nt, Human
cuggccucccacccgau

SEQ ID NO: 2217052 - RNA, 22 nt, Human
cuggccucccacccgaugcugc

SEQ ID NO: 2217053 - RNA, 23 nt, Human
cuggccucccacccgaugcugcu

SEQ ID NO: 2217054 - RNA, 17 nt, Human
cuggccucccacagacu

SEQ ID NO: 2217055 - RNA, 17 nt, Human
cuggccuagucccuucc

SEQ ID NO: 2217056 - RNA, 22 nt, Human
cuggccucaagugauucuccug

SEQ ID NO: 2217057 - RNA, 23 nt, Human
cuggccuagcauacguacacauu

SEQ ID NO: 2217058 - RNA, 21 nt, Human
cuggccuaggagauaucugag

SEQ ID NO: 2217059 - RNA, 23 nt, Human
cuggccuaggagauaucugaggg

SEQ ID NO: 2217060 - RNA, 12 nt, Human
cuggccuagucc

SEQ ID NO: 2217061 - RNA, 23 nt, Human
cuggccuagucccuuccacaccc

SEQ ID NO: 2217062 - RNA, 17 nt, Human
cuggccucuggcucuca

SEQ ID NO: 2217063 - RNA, 13 nt, Human
cuggccucugugc

SEQ ID NO: 2217064 - RNA, 11 nt, Human
cuggccucugu

SEQ ID NO: 2217065 - RNA, 12 nt, Human
cuggccucgccu

SEQ ID NO: 2217066 - RNA, 16 nt, Human
cuggccucgccuggcc

SEQ ID NO: 2217067 - RNA, 17 nt, Human
cuggccucgccuggccu

SEQ ID NO: 2217068 - RNA, 18 nt, Human
cuggccucgccuggccug

SEQ ID NO: 2217069 - RNA, 19 nt, Human
cuggccucgccuggccuga

SEQ ID NO: 2217070 - RNA, 20 nt, Human
cuggccucgccuggccugag

SEQ ID NO: 2217071 - RNA, 16 nt, Human
cuggccuccccugcca

SEQ ID NO: 2217072 - RNA, 17 nt, Human
cuggccuccccugccac

SEQ ID NO: 2217073 - RNA, 18 nt, Human
cuggccuccccugccacc

SEQ ID NO: 2217074 - RNA, 21 nt, Human
cuggccuccccugccaccagg

SEQ ID NO: 2217075 - RNA, 20 nt, Human
cuggccuccggcgucagccu

SEQ ID NO: 2217076 - RNA, 21 nt, Human
cuggccuccggcgucagccuc

SEQ ID NO: 2217077 - RNA, 22 nt, Human
cuggccuccggcgucagccucc

SEQ ID NO: 2217078 - RNA, 13 nt, Human
cuggcccacugca

SEQ ID NO: 2217079 - RNA, 12 nt, Human
cuggcccacugc

SEQ ID NO: 2217080 - RNA, 20 nt, Human
cuggcccagccggccucucu

SEQ ID NO: 2217081 - RNA, 23 nt, Human
cuggcccagccggccucucuggc

SEQ ID NO: 2217082 - RNA, 21 nt, Human
cuggcccagccggccucucug

SEQ ID NO: 2217083 - RNA, 22 nt, Human
cuggcccagccggccucucugg

SEQ ID NO: 2217084 - RNA, 12 nt, Human
cuggcccagcgg

SEQ ID NO: 2217085 - RNA, 13 nt, Human
cuggcccagcggc

SEQ ID NO: 2217086 - RNA, 17 nt, Human
cuggccuagcauacgua

SEQ ID NO: 2217087 - RNA, 15 nt, Human
cuggcccagggccca

SEQ ID NO: 2217088 - RNA, 14 nt, Human
cuggcccagggccc

SEQ ID NO: 2217089 - RNA, 13 nt, Human
cuggcccagggcc

SEQ ID NO: 2217090 - RNA, 11 nt, Human
cuggcccaggg

SEQ ID NO: 2217091 - RNA, 22 nt, Human
cuggcccagcucccccgggagg

SEQ ID NO: 2217092 - RNA, 12 nt, Human
cuggcccagggc

SEQ ID NO: 2217093 - RNA, 14 nt, Human
cuggcccagcggcc

SEQ ID NO: 2217094 - RNA, 17 nt, Human
cuggcccagcggccccu

SEQ ID NO: 2217095 - RNA, 18 nt, Human
cuggcccagcggccccuc

SEQ ID NO: 2217096 - RNA, 19 nt, Human
cuggcccagcggccccucc

SEQ ID NO: 2217097 - RNA, 12 nt, Human
cuggcccagcuc

SEQ ID NO: 2217098 - RNA, 13 nt, Human
cuggcccagcucc

SEQ ID NO: 2217099 - RNA, 14 nt, Human
cuggcccagcuccc

SEQ ID NO: 2217100 - RNA, 15 nt, Human
cuggcccagcucccc

SEQ ID NO: 2217101 - RNA, 18 nt, Human
cuggcacaaacucuuggu

SEQ ID NO: 2217102 - RNA, 12 nt, Human
cuggcacacauc

SEQ ID NO: 2217103 - RNA, 16 nt, Human
cuggcacagaaaccuc

SEQ ID NO: 2217104 - RNA, 21 nt, Human
cuggcacacaucaggaguuca

SEQ ID NO: 2217105 - RNA, 21 nt, Human
cuggcacacaguaggugcuca

SEQ ID NO: 2217106 - RNA, 15 nt, Human
cuggcacagaaaccu

SEQ ID NO: 2217107 - RNA, 18 nt, Human
cuggcaaagacagaagcc

SEQ ID NO: 2217108 - RNA, 20 nt, Human
cuggcaaagcuuuuagaaau

SEQ ID NO: 2217109 - RNA, 19 nt, Human
cuggcaaagcuuuuagaaa

SEQ ID NO: 2217110 - RNA, 12 nt, Human
cuggcaaaggcc

SEQ ID NO: 2217111 - RNA, 18 nt, Human
cuggcaaagggagcagaa

SEQ ID NO: 2217112 - RNA, 22 nt, Human
cuggcaaugaaaaauucucagu

SEQ ID NO: 2217113 - RNA, 21 nt, Human
cuggcaaugaaaaauucucag

SEQ ID NO: 2217114 - RNA, 19 nt, Human
cuggcaaacuucagacuga

SEQ ID NO: 2217115 - RNA, 22 nt, Human
cuggcaaacaugaaaaaucggc

SEQ ID NO: 2217116 - RNA, 16 nt, Human
cuggcaaacaugaaaa

SEQ ID NO: 2217117 - RNA, 21 nt, Human
cuggcaaaaggaucuuugugg

SEQ ID NO: 2217118 - RNA, 23 nt, Human
cuggcaaaaggaucuuuguggcc

SEQ ID NO: 2217119 - RNA, 20 nt, Human
cuggcaaaaggaucuuugug

SEQ ID NO: 2217120 - RNA, 20 nt, Human
cuggauuggguuaugaauau

SEQ ID NO: 2217121 - RNA, 22 nt, Human
cuggauugaucggagccuccuc

SEQ ID NO: 2217122 - RNA, 19 nt, Human
cuggcaaaaggaucuuugu

SEQ ID NO: 2217123 - RNA, 13 nt, Human
cuggauuuuguca

SEQ ID NO: 2217124 - RNA, 23 nt, Human
cuggcacuauaauguaagcucua

SEQ ID NO: 2217125 - RNA, 15 nt, Human
cuggcacagugucug

SEQ ID NO: 2217126 - RNA, 19 nt, Human
cuggcacagugucugggcu

SEQ ID NO: 2217127 - RNA, 20 nt, Human
cuggcacagugucugggcug

SEQ ID NO: 2217128 - RNA, 21 nt, Human
cuggcacagugucugggcuga

SEQ ID NO: 2217129 - RNA, 13 nt, Human
cuggcacugcuuc

SEQ ID NO: 2217130 - RNA, 14 nt, Human
cuggcacugcuucc

SEQ ID NO: 2217131 - RNA, 17 nt, Human
cuggcacagggcagugg

SEQ ID NO: 2217132 - RNA, 12 nt, Human
cuggcacagucu

SEQ ID NO: 2217133 - RNA, 12 nt, Human
cuggcacagugu

SEQ ID NO: 2217134 - RNA, 14 nt, Human
cuggcacagugucu

SEQ ID NO: 2217135 - RNA, 19 nt, Human
cuggcacaguuuucugaga

SEQ ID NO: 2217136 - RNA, 18 nt, Human
cuggcacaguuuucugag

SEQ ID NO: 2217137 - RNA, 20 nt, Human
cuggauguuuuuucccuguu

SEQ ID NO: 2217138 - RNA, 15 nt, Human
cuggaugucugccaa

SEQ ID NO: 2217139 - RNA, 16 nt, Human
cuggauucauuuccug

SEQ ID NO: 2217140 - RNA, 18 nt, Human
cuggauucauuuccugcc

SEQ ID NO: 2217141 - RNA, 19 nt, Human
cuggauucauuuccugccc

SEQ ID NO: 2217142 - RNA, 14 nt, Human
cuggauucccagga

SEQ ID NO: 2217143 - RNA, 13 nt, Human
cuggauucccagg

SEQ ID NO: 2217144 - RNA, 23 nt, Human
cuggauuauucaaaaugauguau

SEQ ID NO: 2217145 - RNA, 19 nt, Human
cuggaugucugccaauuuu

SEQ ID NO: 2217146 - RNA, 17 nt, Human
cuggauuauauuaugaa

SEQ ID NO: 2217147 - RNA, 20 nt, Human
cuggaugguucccagagggu

SEQ ID NO: 2217148 - RNA, 19 nt, Human
cuggaugguucccagaggg

SEQ ID NO: 2217149 - RNA, 16 nt, Human
cuggauggggcugcac

SEQ ID NO: 2217150 - RNA, 23 nt, Human
cuggauuaaacuuaaucuaaaug

SEQ ID NO: 2217151 - RNA, 13 nt, Human
cuggauuaaacuu

SEQ ID NO: 2217152 - RNA, 21 nt, Human
cuggauggaggaaaaccaagc

SEQ ID NO: 2217153 - RNA, 21 nt, Human
cuggagggcuagaacuggaga

SEQ ID NO: 2217154 - RNA, 19 nt, Human
cuggagggcuagaaucugg

SEQ ID NO: 2217155 - RNA, 20 nt, Human
cuggagggcuagaaucugga

SEQ ID NO: 2217156 - RNA, 22 nt, Human
cuggagggcuagaaucuggaga

SEQ ID NO: 2217157 - RNA, 22 nt, Human
cuggagggaaugaaccuggagg

SEQ ID NO: 2217158 - RNA, 23 nt, Human
cuggagggaaugaaccuggaggg

SEQ ID NO: 2217159 - RNA, 20 nt, Human
cuggagggcuagaaccuaga

SEQ ID NO: 2217160 - RNA, 19 nt, Human
cuggagggcuagaaccugg

SEQ ID NO: 2217161 - RNA, 20 nt, Human
cuggagggcuagaaccugga

SEQ ID NO: 2217162 - RNA, 21 nt, Human
cuggagggcuagaaccuggag

SEQ ID NO: 2217163 - RNA, 22 nt, Human
cuggagggcuagaaccuggaga

SEQ ID NO: 2217164 - RNA, 22 nt, Human
cuggagggcuagaaccuggcag

SEQ ID NO: 2217165 - RNA, 18 nt, Human
cuggaugggcugcagcag

SEQ ID NO: 2217166 - RNA, 20 nt, Human
cuggaugggcugcagcagag

SEQ ID NO: 2217167 - RNA, 21 nt, Human
cuggauggauuugaagcaaag

SEQ ID NO: 2217168 - RNA, 15 nt, Human
cuggauggcaccaga

SEQ ID NO: 2217169 - RNA, 16 nt, Human
cuggauggcaccagag

SEQ ID NO: 2217170 - RNA, 23 nt, Human
cuggauggcaccagaggcugcag

SEQ ID NO: 2217171 - RNA, 15 nt, Human
cuggauggggcugca

SEQ ID NO: 2217172 - RNA, 21 nt, Human
cuggaggccgggugcucaggg

SEQ ID NO: 2217173 - RNA, 19 nt, Human
cuggagggaaugaaccugg

SEQ ID NO: 2217174 - RNA, 21 nt, Human
cuggagggaaugaaccuggag

SEQ ID NO: 2217175 - RNA, 14 nt, Human
cuggaggaggagca

SEQ ID NO: 2217176 - RNA, 14 nt, Human
cuggaggagagaag

SEQ ID NO: 2217177 - RNA, 17 nt, Human
cuggaggagagaagaau

SEQ ID NO: 2217178 - RNA, 22 nt, Human
cuggagccagacucuggucuuc

SEQ ID NO: 2217179 - RNA, 16 nt, Human
cuggagccagacucug

SEQ ID NO: 2217180 - RNA, 21 nt, Human
cuggagccagacucuggucuu

SEQ ID NO: 2217181 - RNA, 13 nt, Human
cuggagcccacug

SEQ ID NO: 2217182 - RNA, 15 nt, Human
cuggagccacuaacu

SEQ ID NO: 2217183 - RNA, 17 nt, Human
cuggagccaaguccaga

SEQ ID NO: 2217184 - RNA, 19 nt, Human
cuggagccaaguccagauu

SEQ ID NO: 2217185 - RNA, 16 nt, Human
cuggagccacuaacua

SEQ ID NO: 2217186 - RNA, 18 nt, Human
cuggagccacuaacuaga

SEQ ID NO: 2217187 - RNA, 17 nt, Human
cuggagccaacugcugc

SEQ ID NO: 2217188 - RNA, 22 nt, Human
cuggagcaucugacucacaaga

SEQ ID NO: 2217189 - RNA, 23 nt, Human
cuggagcaucugacucacaagaa

SEQ ID NO: 2217190 - RNA, 18 nt, Human
cuggagccaacugcugcu

SEQ ID NO: 2217191 - RNA, 20 nt, Human
cuggagccaacugcugcuuu

SEQ ID NO: 2217192 - RNA, 15 nt, Human
cuggagccaagucca

SEQ ID NO: 2217193 - RNA, 16 nt, Human
cuggagccaaguccag

SEQ ID NO: 2217194 - RNA, 15 nt, Human
cuggagcccacugua

SEQ ID NO: 2217195 - RNA, 16 nt, Human
cuggagcccacuguac

SEQ ID NO: 2217196 - RNA, 17 nt, Human
cuggagcccacuguacu

SEQ ID NO: 2217197 - RNA, 20 nt, Human
cuggagcccacuguacuugc

SEQ ID NO: 2217198 - RNA, 23 nt, Human
cuggagccuguguaacagcuccu

SEQ ID NO: 2217199 - RNA, 24 nt, Human
cuggagccuguguaacagcuccuu

SEQ ID NO: 2217200 - RNA, 19 nt, Human
cuggagcuggcgucugucu

SEQ ID NO: 2217201 - RNA, 17 nt, Human
cuggaggaaaacugaga

SEQ ID NO: 2217202 - RNA, 14 nt, Human
cuggaggaaaacug

SEQ ID NO: 2217203 - RNA, 19 nt, Human
cuggaggaaaacugagacu

SEQ ID NO: 2217204 - RNA, 19 nt, Human
cuggaggacuagaaccugg

SEQ ID NO: 2217205 - RNA, 20 nt, Human
cuggaggacuagaaccugga

SEQ ID NO: 2217206 - RNA, 21 nt, Human
cuggaggacuagaaccuggag

SEQ ID NO: 2217207 - RNA, 22 nt, Human
cuggaggacuagaaccuggagg

SEQ ID NO: 2217208 - RNA, 13 nt, Human
cuggaggagagaa

SEQ ID NO: 2217209 - RNA, 21 nt, Human
cuggagcccacuguacuugcu

SEQ ID NO: 2217210 - RNA, 16 nt, Human
cuggagcccagaggag

SEQ ID NO: 2217211 - RNA, 17 nt, Human
cuggagcccagaggagg

SEQ ID NO: 2217212 - RNA, 12 nt, Human
cuggagccugug

SEQ ID NO: 2217213 - RNA, 13 nt, Human
cuggagccugugu

SEQ ID NO: 2217214 - RNA, 14 nt, Human
cuggagccugugua

SEQ ID NO: 2217215 - RNA, 15 nt, Human
cuggagccuguguaa

SEQ ID NO: 2217216 - RNA, 16 nt, Human
cuggagccuguguaac

SEQ ID NO: 2217217 - RNA, 17 nt, Human
cuggagccuguguaaca

SEQ ID NO: 2217218 - RNA, 18 nt, Human
cuggagccuguguaacag

SEQ ID NO: 2217219 - RNA, 19 nt, Human
cuggagccuguguaacagc

SEQ ID NO: 2217220 - RNA, 22 nt, Human
cuggagccuguguaacagcucc

SEQ ID NO: 2217221 - RNA, 23 nt, Human
cuggacuagagggaccucuccca

SEQ ID NO: 2217222 - RNA, 21 nt, Human
cuggacuagagggaccucucc

SEQ ID NO: 2217223 - RNA, 20 nt, Human
cuggacuagagggaccucuc

SEQ ID NO: 2217224 - RNA, 23 nt, Human
cuggacggggacuggggaugugg

SEQ ID NO: 2217225 - RNA, 22 nt, Human
cuggacucaggaugcccagggc

SEQ ID NO: 2217226 - RNA, 20 nt, Human
cuggacucaggaugcccagg

SEQ ID NO: 2217227 - RNA, 19 nt, Human
cuggacucaggaugcccag

SEQ ID NO: 2217228 - RNA, 13 nt, Human
cuggacucaggau

SEQ ID NO: 2217229 - RNA, 16 nt, Human
cuggacucaccucccc

SEQ ID NO: 2217230 - RNA, 20 nt, Human
cuggacggcauuccugcuua

SEQ ID NO: 2217231 - RNA, 15 nt, Human
cuggacggggacugg

SEQ ID NO: 2217232 - RNA, 18 nt, Human
cuggacggggacugggga

SEQ ID NO: 2217233 - RNA, 19 nt, Human
cuggacggcauuccugcuu

SEQ ID NO: 2217234 - RNA, 17 nt, Human
cuggacggcauuccugc

SEQ ID NO: 2217235 - RNA, 15 nt, Human
cuggacggcauuccu

SEQ ID NO: 2217236 - RNA, 21 nt, Human
cuggaccaacccuguuuccug

SEQ ID NO: 2217237 - RNA, 22 nt, Human
cuggaccaacccuguuuccuga

SEQ ID NO: 2217238 - RNA, 23 nt, Human
cuggaccaacccuguuuccugag

SEQ ID NO: 2217239 - RNA, 15 nt, Human
cuggaccacugggca

SEQ ID NO: 2217240 - RNA, 14 nt, Human
cuggaccacugggc

SEQ ID NO: 2217241 - RNA, 18 nt, Human
cuggacauuugccuugcu

SEQ ID NO: 2217242 - RNA, 18 nt, Human
cuggacauccucuucugc

SEQ ID NO: 2217243 - RNA, 17 nt, Human
cuggacauuuuuucagu

SEQ ID NO: 2217244 - RNA, 23 nt, Human
cuggacaugaagauucuuuccca

SEQ ID NO: 2217245 - RNA, 18 nt, Human
cuggacauagagagggag

SEQ ID NO: 2217246 - RNA, 23 nt, Human
cuggacauagagagggagaagaa

SEQ ID NO: 2217247 - RNA, 20 nt, Human
cuggacaguaucacugucuu

SEQ ID NO: 2217248 - RNA, 17 nt, Human
cuggacauagagaggga

SEQ ID NO: 2217249 - RNA, 19 nt, Human
cuggacaguaucacugucu

SEQ ID NO: 2217250 - RNA, 23 nt, Human
cuggagcaccaggcacgaaccca

SEQ ID NO: 2217251 - RNA, 15 nt, Human
cuggagcaccaggca

SEQ ID NO: 2217252 - RNA, 14 nt, Human
cuggagcaccaggc

SEQ ID NO: 2217253 - RNA, 23 nt, Human
cuggagaguucaauggcugcuga

SEQ ID NO: 2217254 - RNA, 20 nt, Human
cuggagaguucaauggcugc

SEQ ID NO: 2217255 - RNA, 13 nt, Human
cuggagcaccagg

SEQ ID NO: 2217256 - RNA, 13 nt, Human
cuggagcagacca

SEQ ID NO: 2217257 - RNA, 15 nt, Human
cuggagcagaccacc

SEQ ID NO: 2217258 - RNA, 18 nt, Human
cuggagcagaccaccccg

SEQ ID NO: 2217259 - RNA, 22 nt, Human
cuggagcagaccaccccgccug

SEQ ID NO: 2217260 - RNA, 12 nt, Human
cuggagcaggcc

SEQ ID NO: 2217261 - RNA, 16 nt, Human
cuggagcaggccuugc

SEQ ID NO: 2217262 - RNA, 21 nt, Human
cuggagcaggccuugcgcugu

SEQ ID NO: 2217263 - RNA, 12 nt, Human
cuggagcaucug

SEQ ID NO: 2217264 - RNA, 16 nt, Human
cuggagcaucugacuc

SEQ ID NO: 2217265 - RNA, 17 nt, Human
cuggagcaucugacuca

SEQ ID NO: 2217266 - RNA, 21 nt, Human
cuggagagguuauaggucacu

SEQ ID NO: 2217267 - RNA, 12 nt, Human
cuggagagguua

SEQ ID NO: 2217268 - RNA, 22 nt, Human
cuggagaggcccucuggagugg

SEQ ID NO: 2217269 - RNA, 23 nt, Human
cuggagaggagggaugcugccug

SEQ ID NO: 2217270 - RNA, 22 nt, Human
cuggagagcuagaaccuggagg

SEQ ID NO: 2217271 - RNA, 23 nt, Human
cuggagagcuagaaccuggaggg

SEQ ID NO: 2217272 - RNA, 13 nt, Human
cuggagagcuaga

SEQ ID NO: 2217273 - RNA, 19 nt, Human
cuggagagcuagaaccugg

SEQ ID NO: 2217274 - RNA, 20 nt, Human
cuggagagcuagaaccugga

SEQ ID NO: 2217275 - RNA, 22 nt, Human
cuggagagcuagaaccuggaga

SEQ ID NO: 2217276 - RNA, 21 nt, Human
cuggagacuuagggcaccagg

SEQ ID NO: 2217277 - RNA, 12 nt, Human
cuggagagaagu

SEQ ID NO: 2217278 - RNA, 14 nt, Human
cuggagagaaacaa

SEQ ID NO: 2217279 - RNA, 22 nt, Human
cuggagagaaacaauaaagaga

SEQ ID NO: 2217280 - RNA, 22 nt, Human
cuggagagccagaaccuggagg

SEQ ID NO: 2217281 - RNA, 23 nt, Human
cuggagagccagaaccuggaggg

SEQ ID NO: 2217282 - RNA, 17 nt, Human
cuggagagaaguuucug

SEQ ID NO: 2217283 - RNA, 19 nt, Human
cuggagagccagaaccugg

SEQ ID NO: 2217284 - RNA, 21 nt, Human
cugcuuugggcugcccuggug

SEQ ID NO: 2217285 - RNA, 22 nt, Human
cugcuuugggcugcccuggugc

SEQ ID NO: 2217286 - RNA, 23 nt, Human
cugcuuugggcugcccuggugcu

SEQ ID NO: 2217287 - RNA, 15 nt, Human
cugcuuuucccuaag

SEQ ID NO: 2217288 - RNA, 18 nt, Human
cugcuuuucacugcugca

SEQ ID NO: 2217289 - RNA, 14 nt, Human
cugcuuuuaccaug

SEQ ID NO: 2217290 - RNA, 17 nt, Human
cugcuuuucacugcugc

SEQ ID NO: 2217291 - RNA, 21 nt, Human
cugcuuuucccuaagccaagg

SEQ ID NO: 2217292 - RNA, 18 nt, Human
cugcuuuucccuaagcca

SEQ ID NO: 2217293 - RNA, 15 nt, Human
cugcuuuucacugcu

SEQ ID NO: 2217294 - RNA, 17 nt, Human
cugcuuuuaccaugccc

SEQ ID NO: 2217295 - RNA, 19 nt, Human
cugcuuugggcugcccugg

SEQ ID NO: 2217296 - RNA, 20 nt, Human
cugcuuugggcugcccuggu

SEQ ID NO: 2217297 - RNA, 18 nt, Human
cugcuuugggcugcccug

SEQ ID NO: 2217298 - RNA, 12 nt, Human
cugcuuuccaca

SEQ ID NO: 2217299 - RNA, 14 nt, Human
cugcuuuccccugu

SEQ ID NO: 2217300 - RNA, 15 nt, Human
cugcuuuccccugug

SEQ ID NO: 2217301 - RNA, 16 nt, Human
cugcuuuccccugugg

SEQ ID NO: 2217302 - RNA, 17 nt, Human
cugcuuuccccuguggg

SEQ ID NO: 2217303 - RNA, 18 nt, Human
cugcuuuccccugugggg

SEQ ID NO: 2217304 - RNA, 22 nt, Human
cugcuuucuccauuguaaacca

SEQ ID NO: 2217305 - RNA, 19 nt, Human
cugcuuuccccugugggga

SEQ ID NO: 2217306 - RNA, 20 nt, Human
cugcuuuccccuguggggau

SEQ ID NO: 2217307 - RNA, 21 nt, Human
cugcuuuccccuguggggauc

SEQ ID NO: 2217308 - RNA, 16 nt, Human
cugcuuucuccauugu

SEQ ID NO: 2217309 - RNA, 22 nt, Human
cugcucugaggcuuccagagag

SEQ ID NO: 2217310 - RNA, 20 nt, Human
cugcucugaggcuuccagag

SEQ ID NO: 2217311 - RNA, 21 nt, Human
cugcucugaggcuuccagaga

SEQ ID NO: 2217312 - RNA, 12 nt, Human
cugcucugauga

SEQ ID NO: 2217313 - RNA, 13 nt, Human
cugcucugaggcu

SEQ ID NO: 2217314 - RNA, 18 nt, Human
cugcucugaggcuuccag

SEQ ID NO: 2217315 - RNA, 19 nt, Human
cugcucugaggcuuccaga

SEQ ID NO: 2217316 - RNA, 14 nt, Human
cugcucuuucucug

SEQ ID NO: 2217317 - RNA, 15 nt, Human
cugcucuuucucugc

SEQ ID NO: 2217318 - RNA, 16 nt, Human
cugcucuuucucugcc

SEQ ID NO: 2217319 - RNA, 17 nt, Human
cugcucuuucucugcca

SEQ ID NO: 2217320 - RNA, 18 nt, Human
cugcucuuucucugccag

SEQ ID NO: 2217321 - RNA, 19 nt, Human
cugcucuuucucugccagu

SEQ ID NO: 2217322 - RNA, 20 nt, Human
cugcucuuucucugccagug

SEQ ID NO: 2217323 - RNA, 21 nt, Human
cugcucuuucucugccaguga

SEQ ID NO: 2217324 - RNA, 14 nt, Human
cugcucuuguuucu

SEQ ID NO: 2217325 - RNA, 22 nt, Human
cugcucuuucucugccagugac

SEQ ID NO: 2217326 - RNA, 18 nt, Human
cugcugaaacaacaaaua

SEQ ID NO: 2217327 - RNA, 13 nt, Human
cugcugaaacaac

SEQ ID NO: 2217328 - RNA, 17 nt, Human
cugcuuuccaaagccaa

SEQ ID NO: 2217329 - RNA, 15 nt, Human
cugcuuuccaaagcc

SEQ ID NO: 2217330 - RNA, 23 nt, Human
cugcuuuuccuuggggcaggcag

SEQ ID NO: 2217331 - RNA, 22 nt, Human
cugcuuuuccuuggggcaggca

SEQ ID NO: 2217332 - RNA, 21 nt, Human
cugcuuuuccuuggggcaggc

SEQ ID NO: 2217333 - RNA, 14 nt, Human
cugcuuuucugccc

SEQ ID NO: 2217334 - RNA, 15 nt, Human
cugcuuuucugcccu

SEQ ID NO: 2217335 - RNA, 16 nt, Human
cugcuuuucugcccug

SEQ ID NO: 2217336 - RNA, 17 nt, Human
cugcuuuucugcccugg

SEQ ID NO: 2217337 - RNA, 15 nt, Human
cuggaagcacagcuu

SEQ ID NO: 2217338 - RNA, 18 nt, Human
cuggaagcacagcuucau

SEQ ID NO: 2217339 - RNA, 15 nt, Human
cuggaagcacauguu

SEQ ID NO: 2217340 - RNA, 18 nt, Human
cugcuuuucugcccuggc

SEQ ID NO: 2217341 - RNA, 12 nt, Human
cuggaagcacau

SEQ ID NO: 2217342 - RNA, 23 nt, Human
cuggaagcauguaggagaaucca

SEQ ID NO: 2217343 - RNA, 21 nt, Human
cuggaagugcuaauuuugaaa

SEQ ID NO: 2217344 - RNA, 23 nt, Human
cuggaauaauccuaaacauauga

SEQ ID NO: 2217345 - RNA, 20 nt, Human
cuggaaguuuugcauuuaug

SEQ ID NO: 2217346 - RNA, 17 nt, Human
cuggaaguuuugcauuu

SEQ ID NO: 2217347 - RNA, 15 nt, Human
cuggaauacaugaaa

SEQ ID NO: 2217348 - RNA, 14 nt, Human
cuggaauaaguuca

SEQ ID NO: 2217349 - RNA, 14 nt, Human
cuggaaugcagugg

SEQ ID NO: 2217350 - RNA, 15 nt, Human
cuggaaugcaguggu

SEQ ID NO: 2217351 - RNA, 14 nt, Human
cuggaauguaauca

SEQ ID NO: 2217352 - RNA, 20 nt, Human
cuggaauggaaggguucugg

SEQ ID NO: 2217353 - RNA, 15 nt, Human
cuggaauguaaucaa

SEQ ID NO: 2217354 - RNA, 20 nt, Human
cuggaauguaaucaauguuu

SEQ ID NO: 2217355 - RNA, 19 nt, Human
cuggacagccccacccugg

SEQ ID NO: 2217356 - RNA, 18 nt, Human
cuggacagccccacccug

SEQ ID NO: 2217357 - RNA, 16 nt, Human
cuggacagccccaccc

SEQ ID NO: 2217358 - RNA, 15 nt, Human
cuggacagccccacc

SEQ ID NO: 2217359 - RNA, 14 nt, Human
cuggacagccccac

SEQ ID NO: 2217360 - RNA, 13 nt, Human
cuggacagcccca

SEQ ID NO: 2217361 - RNA, 21 nt, Human
cuggaauguaaucaauguuuc

SEQ ID NO: 2217362 - RNA, 18 nt, Human
cuggacacucagaccuga

SEQ ID NO: 2217363 - RNA, 16 nt, Human
cugggcacacgccucc

SEQ ID NO: 2217364 - RNA, 17 nt, Human
cugggcacacgccuccc

SEQ ID NO: 2217365 - RNA, 22 nt, Human
cugggcacacgccucccacugg

SEQ ID NO: 2217366 - RNA, 23 nt, Human
cugggcacacgccucccacuggg

SEQ ID NO: 2217367 - RNA, 20 nt, Human
cugggcaaugugauaaaacc

SEQ ID NO: 2217368 - RNA, 10 nt, Human
cugggccccu

SEQ ID NO: 2217369 - RNA, 20 nt, Human
cugggccccucaucugcuca

SEQ ID NO: 2217370 - RNA, 21 nt, Human
cugggccccucaucugcucag

SEQ ID NO: 2217371 - RNA, 12 nt, Human
cugggccccugc

SEQ ID NO: 2217372 - RNA, 16 nt, Human
cugggccccugccucu

SEQ ID NO: 2217373 - RNA, 17 nt, Human
cugggccccugccucuc

SEQ ID NO: 2217374 - RNA, 13 nt, Human
cugggagggccca

SEQ ID NO: 2217375 - RNA, 22 nt, Human
cugggagggcagcagggcuacc

SEQ ID NO: 2217376 - RNA, 22 nt, Human
cugggagggguuuucgaagcuc

SEQ ID NO: 2217377 - RNA, 20 nt, Human
cugggagggcccacuucagg

SEQ ID NO: 2217378 - RNA, 23 nt, Human
cugggaguugaucgccuuuccca

SEQ ID NO: 2217379 - RNA, 16 nt, Human
cugggagugagcuggu

SEQ ID NO: 2217380 - RNA, 13 nt, Human
cugggagugagcu

SEQ ID NO: 2217381 - RNA, 12 nt, Human
cugggagugagc

SEQ ID NO: 2217382 - RNA, 21 nt, Human
cugggauuacaggcgugagcc

SEQ ID NO: 2217383 - RNA, 20 nt, Human
cugggauuacaggcuccugc

SEQ ID NO: 2217384 - RNA, 19 nt, Human
cugggauuacaggcuccug

SEQ ID NO: 2217385 - RNA, 23 nt, Human
cugggauuacaggcuccugccac

SEQ ID NO: 2217386 - RNA, 19 nt, Human
cugggcaaugauggcaauu

SEQ ID NO: 2217387 - RNA, 22 nt, Human
cugggauuacaggcuccugcca

SEQ ID NO: 2217388 - RNA, 21 nt, Human
cugggauuacaggcuccugcc

SEQ ID NO: 2217389 - RNA, 22 nt, Human
cugggaggcauggcccuggggu

SEQ ID NO: 2217390 - RNA, 22 nt, Human
cugggaggcggagaguacagug

SEQ ID NO: 2217391 - RNA, 22 nt, Human
cugggaggcucuggagcccacu

SEQ ID NO: 2217392 - RNA, 23 nt, Human
cugggagggauagaggggggcug

SEQ ID NO: 2217393 - RNA, 13 nt, Human
cugggagggcagc

SEQ ID NO: 2217394 - RNA, 11 nt, Human
cugggagggca

SEQ ID NO: 2217395 - RNA, 18 nt, Human
cugggaggucaaggcugc

SEQ ID NO: 2217396 - RNA, 20 nt, Human
cugggagggcagcagggcua

SEQ ID NO: 2217397 - RNA, 19 nt, Human
cugggagggcagcagggcu

SEQ ID NO: 2217398 - RNA, 17 nt, Human
cugggagggcagcaggg

SEQ ID NO: 2217399 - RNA, 15 nt, Human
cugggagggcagcag

SEQ ID NO: 2217400 - RNA, 14 nt, Human
cugggaggaagcag

SEQ ID NO: 2217401 - RNA, 13 nt, Human
cugggaggaagca

SEQ ID NO: 2217402 - RNA, 14 nt, Human
cugggaggcaguga

SEQ ID NO: 2217403 - RNA, 15 nt, Human
cugggaggaagcagg

SEQ ID NO: 2217404 - RNA, 13 nt, Human
cugggaggcaugg

SEQ ID NO: 2217405 - RNA, 19 nt, Human
cugggaggcauggcccugg

SEQ ID NO: 2217406 - RNA, 16 nt, Human
cugggaggcagugaug

SEQ ID NO: 2217407 - RNA, 15 nt, Human
cugggaggcucugga

SEQ ID NO: 2217408 - RNA, 16 nt, Human
cugggaggcucuggag

SEQ ID NO: 2217409 - RNA, 22 nt, Human
cugggaggaaaagaaaagaggg

SEQ ID NO: 2217410 - RNA, 13 nt, Human
cugggaggaaaag

SEQ ID NO: 2217411 - RNA, 14 nt, Human
cugggagcucugca

SEQ ID NO: 2217412 - RNA, 15 nt, Human
cugggagcucugcag

SEQ ID NO: 2217413 - RNA, 22 nt, Human
cugggaagauaggcucugcaca

SEQ ID NO: 2217414 - RNA, 21 nt, Human
cugggaagauaggcucugcac

SEQ ID NO: 2217415 - RNA, 20 nt, Human
cugggaagauaggcucugca

SEQ ID NO: 2217416 - RNA, 18 nt, Human
cugggaagauaggcucug

SEQ ID NO: 2217417 - RNA, 24 nt, Human
cugggaagauaggcucugcacaga

SEQ ID NO: 2217418 - RNA, 13 nt, Human
cugggagcucugc

SEQ ID NO: 2217419 - RNA, 13 nt, Human
cugggaagggaag

SEQ ID NO: 2217420 - RNA, 23 nt, Human
cugggagcuccacucugcuucuc

SEQ ID NO: 2217421 - RNA, 17 nt, Human
cugggaagauaggcucu

SEQ ID NO: 2217422 - RNA, 19 nt, Human
cugggaagacgccugagcu

SEQ ID NO: 2217423 - RNA, 21 nt, Human
cugggaacugcagaccugucc

SEQ ID NO: 2217424 - RNA, 23 nt, Human
cugggaacugcagaccuguccuc

SEQ ID NO: 2217425 - RNA, 20 nt, Human
cugggaacucaccuggggcu

SEQ ID NO: 2217426 - RNA, 18 nt, Human
cugggaacugcagaccug

SEQ ID NO: 2217427 - RNA, 19 nt, Human
cugggaacugcagaccugu

SEQ ID NO: 2217428 - RNA, 20 nt, Human
cugggaacugcagaccuguc

SEQ ID NO: 2217429 - RNA, 15 nt, Human
cugggaacugcagac

SEQ ID NO: 2217430 - RNA, 17 nt, Human
cugggaacucaccuggg

SEQ ID NO: 2217431 - RNA, 23 nt, Human
cugggaaauggcuugaagccaag

SEQ ID NO: 2217432 - RNA, 22 nt, Human
cugggaacccaaguccaagcau

SEQ ID NO: 2217433 - RNA, 15 nt, Human
cuggcuuuucacugc

SEQ ID NO: 2217434 - RNA, 16 nt, Human
cuggcuuuucacugcu

SEQ ID NO: 2217435 - RNA, 20 nt, Human
cuggcuucuggagcccuugg

SEQ ID NO: 2217436 - RNA, 16 nt, Human
cuggcuucuggagccc

SEQ ID NO: 2217437 - RNA, 15 nt, Human
cuggcuucuggagcc

SEQ ID NO: 2217438 - RNA, 14 nt, Human
cuggcuucuggagc

SEQ ID NO: 2217439 - RNA, 18 nt, Human
cuggcuuccuucucucaa

SEQ ID NO: 2217440 - RNA, 16 nt, Human
cuggcuucgcaaaaug

SEQ ID NO: 2217441 - RNA, 12 nt, Human
cuggcuucuccu

SEQ ID NO: 2217442 - RNA, 16 nt, Human
cuggcuucuccuuugg

SEQ ID NO: 2217443 - RNA, 17 nt, Human
cugggaaauaagagaga

SEQ ID NO: 2217444 - RNA, 16 nt, Human
cugggaaauaagagag

SEQ ID NO: 2217445 - RNA, 16 nt, Human
cugggaaauauucccu

SEQ ID NO: 2217446 - RNA, 18 nt, Human
cugggaaauauucccuag

SEQ ID NO: 2217447 - RNA, 19 nt, Human
cugggaaaugagaaggcag

SEQ ID NO: 2217448 - RNA, 20 nt, Human
cugggaaaugagaaggcagc

SEQ ID NO: 2217449 - RNA, 19 nt, Human
cugggaacaccauagguca

SEQ ID NO: 2217450 - RNA, 23 nt, Human
cugggaaaugagaaggcagccac

SEQ ID NO: 2217451 - RNA, 21 nt, Human
cugggaaaugagaaggcagcc

SEQ ID NO: 2217452 - RNA, 22 nt, Human
cugggaaaugagaaggcagcca

SEQ ID NO: 2217453 - RNA, 17 nt, Human
cuggcuuuucacugcug

SEQ ID NO: 2217454 - RNA, 19 nt, Human
cuggcuuuucacugcuggc

SEQ ID NO: 2217455 - RNA, 20 nt, Human
cuggcuuuucacugcuggcu

SEQ ID NO: 2217456 - RNA, 22 nt, Human
cuggcuuuucacugcuggcugc

SEQ ID NO: 2217457 - RNA, 20 nt, Human
cuggcuguuggcugggggcc

SEQ ID NO: 2217458 - RNA, 14 nt, Human
cuggcuucacagau

SEQ ID NO: 2217459 - RNA, 13 nt, Human
cuggcuucaggag

SEQ ID NO: 2217460 - RNA, 12 nt, Human
cuggcuuccagg

SEQ ID NO: 2217461 - RNA, 14 nt, Human
cuggcuuccaggua

SEQ ID NO: 2217462 - RNA, 15 nt, Human
cuggcuuccagguau

SEQ ID NO: 2217463 - RNA, 23 nt, Human
cuggcuuccagguaucuccagga

SEQ ID NO: 2217464 - RNA, 16 nt, Human
cuggcuuccagguauc

SEQ ID NO: 2217465 - RNA, 22 nt, Human
cuggcuuccagguaucuccagg

SEQ ID NO: 2217466 - RNA, 23 nt, Human
cuggcuggggccuaucagugugc

SEQ ID NO: 2217467 - RNA, 24 nt, Human
cuggcuggggccuaucagugugcc

SEQ ID NO: 2217468 - RNA, 13 nt, Human
cuggcuggggccu

SEQ ID NO: 2217469 - RNA, 18 nt, Human
cuggcuggggccuaucag

SEQ ID NO: 2217470 - RNA, 21 nt, Human
cuggcuggggccuaucagugu

SEQ ID NO: 2217471 - RNA, 22 nt, Human
cuggcuggggccuaucagugug

SEQ ID NO: 2217472 - RNA, 21 nt, Human
cuggcuggguggcaccagcag

SEQ ID NO: 2217473 - RNA, 22 nt, Human
cuggcuggguggcaccagcagc

SEQ ID NO: 2217474 - RNA, 19 nt, Human
cuggcuguuggcugggggc

SEQ ID NO: 2217475 - RNA, 14 nt, Human
cuggcugccuuaga

SEQ ID NO: 2217476 - RNA, 19 nt, Human
cuggcugccuuagaaccuu

SEQ ID NO: 2217477 - RNA, 20 nt, Human
cuggcugcccuggcccugag

SEQ ID NO: 2217478 - RNA, 23 nt, Human
cuggcugcccuggcccugaggug

SEQ ID NO: 2217479 - RNA, 15 nt, Human
cuggcugccuccacu

SEQ ID NO: 2217480 - RNA, 16 nt, Human
cuggcugccuccacuc

SEQ ID NO: 2217481 - RNA, 18 nt, Human
cuggcugccuccacuccc

SEQ ID NO: 2217482 - RNA, 20 nt, Human
cuggcugccuccacucccac

SEQ ID NO: 2217483 - RNA, 21 nt, Human
cuggcugccuccacucccacu

SEQ ID NO: 2217484 - RNA, 22 nt, Human
cuggcugccuccacucccacuu

SEQ ID NO: 2217485 - RNA, 17 nt, Human
cuggcugggcauggacg

SEQ ID NO: 2217486 - RNA, 15 nt, Human
cuggcugggcaugga

SEQ ID NO: 2217487 - RNA, 14 nt, Human
cuggcugggcaugg

SEQ ID NO: 2217488 - RNA, 12 nt, Human
cuggcugcugcc

SEQ ID NO: 2217489 - RNA, 13 nt, Human
cuggcugcugccc

SEQ ID NO: 2217490 - RNA, 14 nt, Human
cuggcugcugcccc

SEQ ID NO: 2217491 - RNA, 15 nt, Human
cuggcugcugccccc

SEQ ID NO: 2217492 - RNA, 20 nt, Human
cuggcucuugugcuggaugg

SEQ ID NO: 2217493 - RNA, 17 nt, Human
cuggcucuugugcugga

SEQ ID NO: 2217494 - RNA, 22 nt, Human
cuggcucuuuggagaucaagga

SEQ ID NO: 2217495 - RNA, 13 nt, Human
cuggcugaacccu

SEQ ID NO: 2217496 - RNA, 16 nt, Human
cuggcugaacccugug

SEQ ID NO: 2217497 - RNA, 17 nt, Human
cuggcugaacccugugc

SEQ ID NO: 2217498 - RNA, 18 nt, Human
cuggcugaacccugugcu

SEQ ID NO: 2217499 - RNA, 19 nt, Human
cuggcugaacccugugcug

SEQ ID NO: 2217500 - RNA, 20 nt, Human
cuggcugaacccugugcugg

SEQ ID NO: 2217501 - RNA, 21 nt, Human
cuggcugaacccugugcuggu

SEQ ID NO: 2217502 - RNA, 23 nt, Human
cuggcugaacccugugcuggugu

SEQ ID NO: 2217503 - RNA, 12 nt, Human
cuggcugaagga

SEQ ID NO: 2217504 - RNA, 13 nt, Human
cuggcugaaggac

SEQ ID NO: 2217505 - RNA, 14 nt, Human
cuggcugaaggacu

SEQ ID NO: 2217506 - RNA, 15 nt, Human
cuggcugaaggacug

SEQ ID NO: 2217507 - RNA, 16 nt, Human
cuggcugaaggacugu

SEQ ID NO: 2217508 - RNA, 17 nt, Human
cuggcugaaggacugug

SEQ ID NO: 2217509 - RNA, 19 nt, Human
cuggcugaccccaaagagc

SEQ ID NO: 2217510 - RNA, 22 nt, Human
cuggcugaccccaaagagccug

SEQ ID NO: 2217511 - RNA, 23 nt, Human
cuggcugaccccaaagagccugg

SEQ ID NO: 2217512 - RNA, 12 nt, Human
cuggcugagccc

SEQ ID NO: 2217513 - RNA, 14 nt, Human
cuggcugagcccug

SEQ ID NO: 2217514 - RNA, 16 nt, Human
cuggcugagccuggcu

SEQ ID NO: 2217515 - RNA, 17 nt, Human
cuggcugagccuggcug

SEQ ID NO: 2217516 - RNA, 13 nt, Human
cuggcugcccugg

SEQ ID NO: 2217517 - RNA, 14 nt, Human
cuggcugcccuggc

SEQ ID NO: 2217518 - RNA, 15 nt, Human
cuggcugcccuggcc

SEQ ID NO: 2217519 - RNA, 16 nt, Human
cuggcugcccuggccc

SEQ ID NO: 2217520 - RNA, 17 nt, Human
cuggcugcccuggcccu

SEQ ID NO: 2217521 - RNA, 18 nt, Human
cuggcugcccuggcccug

SEQ ID NO: 2217522 - RNA, 19 nt, Human
cuggcugcccuggcccuga

SEQ ID NO: 2217523 - RNA, 17 nt, Human
cuggcucuuccaggcug

SEQ ID NO: 2217524 - RNA, 13 nt, Human
cuggccugagcug

SEQ ID NO: 2217525 - RNA, 20 nt, Human
cuggccucugugccuucuuu

SEQ ID NO: 2217526 - RNA, 16 nt, Human
cuggccucugugccuu

SEQ ID NO: 2217527 - RNA, 15 nt, Human
cuggccucugugccu

SEQ ID NO: 2217528 - RNA, 14 nt, Human
cuggccucugugcc

SEQ ID NO: 2217529 - RNA, 20 nt, Human
cuggcucuuccaggcuggga

SEQ ID NO: 2217530 - RNA, 20 nt, Human
cuggcucuugauaccccccu

SEQ ID NO: 2217531 - RNA, 21 nt, Human
cuggcucuugauaccccccuc

SEQ ID NO: 2217532 - RNA, 22 nt, Human
cuggcucuugauaccccccucu

SEQ ID NO: 2217533 - RNA, 23 nt, Human
cuggcucuugauaccccccucug

SEQ ID NO: 2217534 - RNA, 18 nt, Human
cuggcucuuccaggcugg

SEQ ID NO: 2217535 - RNA, 19 nt, Human
cuggcucuuccaggcuggg

SEQ ID NO: 2217536 - RNA, 23 nt, Human
cugggcguaguggcucacaccug

SEQ ID NO: 2217537 - RNA, 17 nt, Human
cugggcucaagcagucu

SEQ ID NO: 2217538 - RNA, 16 nt, Human
cugggcgcccuggaag

SEQ ID NO: 2217539 - RNA, 18 nt, Human
cugggcgcccuggaagcc

SEQ ID NO: 2217540 - RNA, 13 nt, Human
cugggcgacagag

SEQ ID NO: 2217541 - RNA, 14 nt, Human
cugggcgcccugga

SEQ ID NO: 2217542 - RNA, 15 nt, Human
cugggcgcccuggaa

SEQ ID NO: 2217543 - RNA, 18 nt, Human
cugggcuucaguggcagc

SEQ ID NO: 2217544 - RNA, 17 nt, Human
cugggcuucaguggcag

SEQ ID NO: 2217545 - RNA, 19 nt, Human
cugggcuucaguggcagcu

SEQ ID NO: 2217546 - RNA, 20 nt, Human
cugggcuucaguggcagcug

SEQ ID NO: 2217547 - RNA, 21 nt, Human
cugggcuucaguggcagcugc

SEQ ID NO: 2217548 - RNA, 22 nt, Human
cugggcuucaguggcagcugcu

SEQ ID NO: 2217549 - RNA, 23 nt, Human
cugggcuucaguggcagcugcuu

SEQ ID NO: 2217550 - RNA, 13 nt, Human
cugggcuugggga

SEQ ID NO: 2217551 - RNA, 13 nt, Human
cugggcucaagca

SEQ ID NO: 2217552 - RNA, 20 nt, Human
cugggggccaugagcuccag

SEQ ID NO: 2217553 - RNA, 21 nt, Human
cugggcuuggggaccagagcu

SEQ ID NO: 2217554 - RNA, 17 nt, Human
cugggcuuggggaccag

SEQ ID NO: 2217555 - RNA, 20 nt, Human
cugggcuuggggaccagagc

SEQ ID NO: 2217556 - RNA, 21 nt, Human
cuggguacuuguggacacagc

SEQ ID NO: 2217557 - RNA, 23 nt, Human
cuggguacuuguggacacagcuc

SEQ ID NO: 2217558 - RNA, 15 nt, Human
cuggguagcuguaag

SEQ ID NO: 2217559 - RNA, 14 nt, Human
cuggguagcuguaa

SEQ ID NO: 2217560 - RNA, 13 nt, Human
cuggguagcugua

SEQ ID NO: 2217561 - RNA, 20 nt, Human
cuggguacuuguggacacag

SEQ ID NO: 2217562 - RNA, 23 nt, Human
cugggguggggaccucaggccug

SEQ ID NO: 2217563 - RNA, 21 nt, Human
cugggguggggaccucaggcc

SEQ ID NO: 2217564 - RNA, 22 nt, Human
cugggguggggaccucaggccu

SEQ ID NO: 2217565 - RNA, 13 nt, Human
cugggggccucag

SEQ ID NO: 2217566 - RNA, 17 nt, Human
cugggggccucagugcc

SEQ ID NO: 2217567 - RNA, 23 nt, Human
cugggggccaugagcuccagacc

SEQ ID NO: 2217568 - RNA, 22 nt, Human
cugggggccaugagcuccagac

SEQ ID NO: 2217569 - RNA, 17 nt, Human
cuggggugccgccugcc

SEQ ID NO: 2217570 - RNA, 18 nt, Human
cuggggugccgccugccc

SEQ ID NO: 2217571 - RNA, 19 nt, Human
cuggggugccgccugcccg

SEQ ID NO: 2217572 - RNA, 18 nt, Human
cugggggccucagugcca

SEQ ID NO: 2217573 - RNA, 17 nt, Human
cugggguggggaccuca

SEQ ID NO: 2217574 - RNA, 18 nt, Human
cugggguggggaccucag

SEQ ID NO: 2217575 - RNA, 19 nt, Human
cugggguggggaccucagg

SEQ ID NO: 2217576 - RNA, 18 nt, Human
cuggucucaaacuccuga

SEQ ID NO: 2217577 - RNA, 23 nt, Human
cuggucgcuccugcccacggagu

SEQ ID NO: 2217578 - RNA, 16 nt, Human
cuggucgcuccugccc

SEQ ID NO: 2217579 - RNA, 18 nt, Human
cuggucgcuccugcccac

SEQ ID NO: 2217580 - RNA, 12 nt, Human
cugguggacagu

SEQ ID NO: 2217581 - RNA, 23 nt, Human
cuggugcuguggccagggugaga

SEQ ID NO: 2217582 - RNA, 19 nt, Human
cuggugcuguggccagggu

SEQ ID NO: 2217583 - RNA, 20 nt, Human
cuggugcuguggccagggug

SEQ ID NO: 2217584 - RNA, 20 nt, Human
cuggugcuggauauuuucaa

SEQ ID NO: 2217585 - RNA, 14 nt, Human
cuggugcugcugcu

SEQ ID NO: 2217586 - RNA, 12 nt, Human
cuggugcugugg

SEQ ID NO: 2217587 - RNA, 16 nt, Human
cuggugcuguggccag

SEQ ID NO: 2217588 - RNA, 17 nt, Human
cuggugcuguggccagg

SEQ ID NO: 2217589 - RNA, 18 nt, Human
cuggugcuguggccaggg

SEQ ID NO: 2217590 - RNA, 18 nt, Human
cugguggacaguccuggg

SEQ ID NO: 2217591 - RNA, 17 nt, Human
cugguggacaguccugg

SEQ ID NO: 2217592 - RNA, 16 nt, Human
cugguggacaguccug

SEQ ID NO: 2217593 - RNA, 15 nt, Human
cugguggacaguccu

SEQ ID NO: 2217594 - RNA, 21 nt, Human
cugguggacaguccugggaga

SEQ ID NO: 2217595 - RNA, 19 nt, Human
cugguggacaguccuggga

SEQ ID NO: 2217596 - RNA, 15 nt, Human
cugguggagaaagca

SEQ ID NO: 2217597 - RNA, 18 nt, Human
cugguggagaaagcacug

SEQ ID NO: 2217598 - RNA, 21 nt, Human
cugguggagaaagcacugacc

SEQ ID NO: 2217599 - RNA, 19 nt, Human
cugguggcagugggagcug

SEQ ID NO: 2217600 - RNA, 23 nt, Human
cugguggcagugggagcugccug

SEQ ID NO: 2217601 - RNA, 24 nt, Human
cuggugggaucugugcccagagau

SEQ ID NO: 2217602 - RNA, 21 nt, Human
cugguggccccguuucuggug

SEQ ID NO: 2217603 - RNA, 22 nt, Human
cugguggccccguuucuggugg

SEQ ID NO: 2217604 - RNA, 12 nt, Human
cugguggcccag

SEQ ID NO: 2217605 - RNA, 11 nt, Human
cugguggccca

SEQ ID NO: 2217606 - RNA, 22 nt, Human
cugguggagaaagcacugaccu

SEQ ID NO: 2217607 - RNA, 23 nt, Human
cugguggagaaagcacugaccug

SEQ ID NO: 2217608 - RNA, 14 nt, Human
cugguggcccagga

SEQ ID NO: 2217609 - RNA, 13 nt, Human
cugguggcccagg

SEQ ID NO: 2217610 - RNA, 20 nt, Human
cugguggccccguuucuggu

SEQ ID NO: 2217611 - RNA, 17 nt, Human
cuggugggccuccucug

SEQ ID NO: 2217612 - RNA, 12 nt, Human
cuggugggccuc

SEQ ID NO: 2217613 - RNA, 13 nt, Human
cuggugggccaac

SEQ ID NO: 2217614 - RNA, 22 nt, Human
cuggugggguguguuccaacug

SEQ ID NO: 2217615 - RNA, 16 nt, Human
cugguggguccagggg

SEQ ID NO: 2217616 - RNA, 17 nt, Human
cugguggguccaggggc

SEQ ID NO: 2217617 - RNA, 22 nt, Human
cugguggguccaggggccccuc

SEQ ID NO: 2217618 - RNA, 18 nt, Human
cugguggucuguuggcag

SEQ ID NO: 2217619 - RNA, 20 nt, Human
cugguggucuguuggcaggc

SEQ ID NO: 2217620 - RNA, 22 nt, Human
cugguggucuguuggcaggcug

SEQ ID NO: 2217621 - RNA, 23 nt, Human
cugguggucuguuggcaggcugg

SEQ ID NO: 2217622 - RNA, 12 nt, Human
cugguucucauc

SEQ ID NO: 2217623 - RNA, 14 nt, Human
cugguucucaucuu

SEQ ID NO: 2217624 - RNA, 15 nt, Human
cugguucucaucuuu

SEQ ID NO: 2217625 - RNA, 16 nt, Human
cugguucucaucuuuc

SEQ ID NO: 2217626 - RNA, 20 nt, Human
cugguucucaucuuucuuga

SEQ ID NO: 2217627 - RNA, 13 nt, Human
cuggguuggaggg

SEQ ID NO: 2217628 - RNA, 13 nt, Human
cuggguuggaaaa

SEQ ID NO: 2217629 - RNA, 18 nt, Human
cuggguuggaaaacagua

SEQ ID NO: 2217630 - RNA, 15 nt, Human
cugguccauagagag

SEQ ID NO: 2217631 - RNA, 17 nt, Human
cugguccauagagagca

SEQ ID NO: 2217632 - RNA, 19 nt, Human
cuggguccaaauaaaaacu

SEQ ID NO: 2217633 - RNA, 20 nt, Human
cuggguccaaauaaaaacua

SEQ ID NO: 2217634 - RNA, 21 nt, Human
cuggguccaaauaaaaacuaa

SEQ ID NO: 2217635 - RNA, 23 nt, Human
cuggguccaaauaaaaacuaaau

SEQ ID NO: 2217636 - RNA, 19 nt, Human
cuggguucuacccaggugc

SEQ ID NO: 2217637 - RNA, 12 nt, Human
cugggucagugg

SEQ ID NO: 2217638 - RNA, 18 nt, Human
cugggucagucugguggg

SEQ ID NO: 2217639 - RNA, 21 nt, Human
cugggucagucuggugggagg

SEQ ID NO: 2217640 - RNA, 13 nt, Human
cuggguccaaaua

SEQ ID NO: 2217641 - RNA, 14 nt, Human
cuggguccaaauaa

SEQ ID NO: 2217642 - RNA, 15 nt, Human
cuggguccaaauaaa

SEQ ID NO: 2217643 - RNA, 16 nt, Human
cuggguccaaauaaaa

SEQ ID NO: 2217644 - RNA, 13 nt, Human
cugggucagucug

SEQ ID NO: 2217645 - RNA, 17 nt, Human
cugggucagucuggugg

SEQ ID NO: 2217646 - RNA, 15 nt, Human
cuggucccacucagu

SEQ ID NO: 2217647 - RNA, 18 nt, Human
cuggucccacucagucca

SEQ ID NO: 2217648 - RNA, 18 nt, Human
cugguccauagagagcaa

SEQ ID NO: 2217649 - RNA, 17 nt, Human
cugguccuuccaggccc

SEQ ID NO: 2217650 - RNA, 16 nt, Human
cugguccuuccaggcc

SEQ ID NO: 2217651 - RNA, 19 nt, Human
cugguccuuccaggccccc

SEQ ID NO: 2217652 - RNA, 13 nt, Human
cuggucgcuccug

SEQ ID NO: 2217653 - RNA, 14 nt, Human
cuggucgcuccugc

SEQ ID NO: 2217654 - RNA, 15 nt, Human
cuggucgcuccugcc

SEQ ID NO: 2217655 - RNA, 13 nt, Human
cugguccagggcu

SEQ ID NO: 2217656 - RNA, 14 nt, Human
cugguccagggcua

SEQ ID NO: 2217657 - RNA, 14 nt, Human
cugguccugugugc

SEQ ID NO: 2217658 - RNA, 21 nt, Human
cugguccugaggguccccacc

SEQ ID NO: 2217659 - RNA, 19 nt, Human
ccuccugccgacuccuggg

SEQ ID NO: 2217660 - RNA, 21 nt, Human
ccuccuggacauuuuuucagu

SEQ ID NO: 2217661 - RNA, 17 nt, Human
ccuccugggaucugcuc

SEQ ID NO: 2217662 - RNA, 13 nt, Human
ccuccugggcuaa

SEQ ID NO: 2217663 - RNA, 13 nt, Human
ccuccuggacucc

SEQ ID NO: 2217664 - RNA, 12 nt, Human
ccuccugccucc

SEQ ID NO: 2217665 - RNA, 19 nt, Human
ccuccugcccaguccccca

SEQ ID NO: 2217666 - RNA, 18 nt, Human
ccuccugccgacuccugg

SEQ ID NO: 2217667 - RNA, 17 nt, Human
ccuccugggaaugaagc

SEQ ID NO: 2217668 - RNA, 13 nt, Human
ccuccugugugug

SEQ ID NO: 2217669 - RNA, 14 nt, Human
ccuccugggccccu

SEQ ID NO: 2217670 - RNA, 21 nt, Human
ccuccugggcccucucugcuc

SEQ ID NO: 2217671 - RNA, 18 nt, Human
ccuccugggaucugcucg

SEQ ID NO: 2217672 - RNA, 15 nt, Human
ccuccugugugugcg

SEQ ID NO: 2217673 - RNA, 22 nt, Human
ccuccugugugugcgccuacag

SEQ ID NO: 2217674 - RNA, 23 nt, Human
ccuccugcccaggagagccagcc

SEQ ID NO: 2217675 - RNA, 21 nt, Human
ccuccugcccaggagagccag

SEQ ID NO: 2217676 - RNA, 15 nt, Human
ccuccugcccagucc

SEQ ID NO: 2217677 - RNA, 17 nt, Human
ccuccugcccagucccc

SEQ ID NO: 2217678 - RNA, 19 nt, Human
ccuccugcccaggagagcc

SEQ ID NO: 2217679 - RNA, 16 nt, Human
ccuccugcccaggaga

SEQ ID NO: 2217680 - RNA, 15 nt, Human
ccuccugcccaggag

SEQ ID NO: 2217681 - RNA, 14 nt, Human
ccuccugcccagga

SEQ ID NO: 2217682 - RNA, 13 nt, Human
ccuccugccucga

SEQ ID NO: 2217683 - RNA, 21 nt, Human
ccuccucugccaccuccccua

SEQ ID NO: 2217684 - RNA, 18 nt, Human
ccuccugaguagcuggga

SEQ ID NO: 2217685 - RNA, 13 nt, Human
ccuccugcccagg

SEQ ID NO: 2217686 - RNA, 12 nt, Human
ccuccugcccag

SEQ ID NO: 2217687 - RNA, 17 nt, Human
ccuccugcccaccuguc

SEQ ID NO: 2217688 - RNA, 14 nt, Human
ccuccugcccaccu

SEQ ID NO: 2217689 - RNA, 12 nt, Human
ccuccugcccac

SEQ ID NO: 2217690 - RNA, 19 nt, Human
ccuccugcagaccacgccc

SEQ ID NO: 2217691 - RNA, 20 nt, Human
ccuccucugccaccuccccu

SEQ ID NO: 2217692 - RNA, 18 nt, Human
ccuccucugccaccuccc

SEQ ID NO: 2217693 - RNA, 15 nt, Human
ccuccucugccaccu

SEQ ID NO: 2217694 - RNA, 14 nt, Human
ccuccucugccacc

SEQ ID NO: 2217695 - RNA, 13 nt, Human
ccuccucugccac

SEQ ID NO: 2217696 - RNA, 12 nt, Human
ccuccucugcca

SEQ ID NO: 2217697 - RNA, 14 nt, Human
ccuccuccuggacu

SEQ ID NO: 2217698 - RNA, 14 nt, Human
ccuccucccuuagc

SEQ ID NO: 2217699 - RNA, 15 nt, Human
ccuccucccuuagcu

SEQ ID NO: 2217700 - RNA, 16 nt, Human
ccuccucccuuagcuc

SEQ ID NO: 2217701 - RNA, 14 nt, Human
ccuccucccuuuuu

SEQ ID NO: 2217702 - RNA, 15 nt, Human
ccuccucccuuuuuc

SEQ ID NO: 2217703 - RNA, 17 nt, Human
ccuccucccuuuuuccu

SEQ ID NO: 2217704 - RNA, 22 nt, Human
ccuccucccuuuuuccuugucc

SEQ ID NO: 2217705 - RNA, 12 nt, Human
ccuccuccugac

SEQ ID NO: 2217706 - RNA, 16 nt, Human
ccuccccucucugcac

SEQ ID NO: 2217707 - RNA, 16 nt, Human
ccuccccucucuugca

SEQ ID NO: 2217708 - RNA, 17 nt, Human
ccuccccucucuugcac

SEQ ID NO: 2217709 - RNA, 13 nt, Human
ccucccggugccc

SEQ ID NO: 2217710 - RNA, 14 nt, Human
ccucccgggcccuc

SEQ ID NO: 2217711 - RNA, 16 nt, Human
ccucccgggcccuccc

SEQ ID NO: 2217712 - RNA, 17 nt, Human
ccucccgggcccucccu

SEQ ID NO: 2217713 - RNA, 19 nt, Human
ccucccgggcccucccuug

SEQ ID NO: 2217714 - RNA, 20 nt, Human
ccuccccuccuugccuccug

SEQ ID NO: 2217715 - RNA, 24 nt, Human
ccucaguccuccccucacagccuc

SEQ ID NO: 2217716 - RNA, 22 nt, Human
ccucaguccuccccucacagcc

SEQ ID NO: 2217717 - RNA, 23 nt, Human
ccucaguccuccccucacagccu

SEQ ID NO: 2217718 - RNA, 17 nt, Human
ccuccccucuccuuccu

SEQ ID NO: 2217719 - RNA, 15 nt, Human
ccucccucccucuuu

SEQ ID NO: 2217720 - RNA, 13 nt, Human
ccucccucccucu

SEQ ID NO: 2217721 - RNA, 15 nt, Human
ccucccuagccagca

SEQ ID NO: 2217722 - RNA, 16 nt, Human
ccucccggugcccaag

SEQ ID NO: 2217723 - RNA, 14 nt, Human
ccucccucacccug

SEQ ID NO: 2217724 - RNA, 21 nt, Human
ccucccgggcccucccuugga

SEQ ID NO: 2217725 - RNA, 20 nt, Human
ccucccgucuacucauuccc

SEQ ID NO: 2217726 - RNA, 21 nt, Human
ccucccuagccagcacuugua

SEQ ID NO: 2217727 - RNA, 18 nt, Human
ccucccuagugacccgga

SEQ ID NO: 2217728 - RNA, 20 nt, Human
ccucccugcaucugaccagc

SEQ ID NO: 2217729 - RNA, 14 nt, Human
ccucccugcaucug

SEQ ID NO: 2217730 - RNA, 22 nt, Human
ccucccugcaucugaccagcag

SEQ ID NO: 2217731 - RNA, 21 nt, Human
ccucccugcaucugaccagca

SEQ ID NO: 2217732 - RNA, 14 nt, Human
ccuccuccccacuu

SEQ ID NO: 2217733 - RNA, 13 nt, Human
ccuccuccccacu

SEQ ID NO: 2217734 - RNA, 16 nt, Human
ccuccucccugcaucu

SEQ ID NO: 2217735 - RNA, 12 nt, Human
ccuccucccuua

SEQ ID NO: 2217736 - RNA, 17 nt, Human
ccuccucccugcaucug

SEQ ID NO: 2217737 - RNA, 14 nt, Human
ccuccucccugcau

SEQ ID NO: 2217738 - RNA, 13 nt, Human
ccuccucccugca

SEQ ID NO: 2217739 - RNA, 18 nt, Human
ccuccucccuccugccga

SEQ ID NO: 2217740 - RNA, 13 nt, Human
ccucccugaacca

SEQ ID NO: 2217741 - RNA, 13 nt, Human
ccucccuccucug

SEQ ID NO: 2217742 - RNA, 20 nt, Human
ccucccugaaaauguuuuuc

SEQ ID NO: 2217743 - RNA, 20 nt, Human
ccucccugaaccaucccuga

SEQ ID NO: 2217744 - RNA, 19 nt, Human
ccucccugaagccuuugca

SEQ ID NO: 2217745 - RNA, 16 nt, Human
ccucccuccucugucc

SEQ ID NO: 2217746 - RNA, 14 nt, Human
ccucccucccggca

SEQ ID NO: 2217747 - RNA, 19 nt, Human
ccucccucacccugagccc

SEQ ID NO: 2217748 - RNA, 19 nt, Human
ccucccucccggcauggga

SEQ ID NO: 2217749 - RNA, 16 nt, Human
ccucccucccucuuuc

SEQ ID NO: 2217750 - RNA, 16 nt, Human
ccucagccagagaagc

SEQ ID NO: 2217751 - RNA, 15 nt, Human
ccucagccagagaag

SEQ ID NO: 2217752 - RNA, 11 nt, Human
ccucagccaga

SEQ ID NO: 2217753 - RNA, 11 nt, Human
ccucaggccug

SEQ ID NO: 2217754 - RNA, 14 nt, Human
ccucaggccugggg

SEQ ID NO: 2217755 - RNA, 21 nt, Human
ccucaggccugggggcugggc

SEQ ID NO: 2217756 - RNA, 14 nt, Human
ccucagggucccug

SEQ ID NO: 2217757 - RNA, 16 nt, Human
ccucagcauccuggca

SEQ ID NO: 2217758 - RNA, 17 nt, Human
ccucagcauccuggcac

SEQ ID NO: 2217759 - RNA, 22 nt, Human
ccucagaacccuuggcuugccc

SEQ ID NO: 2217760 - RNA, 23 nt, Human
ccucagaacaaagugagacaguc

SEQ ID NO: 2217761 - RNA, 14 nt, Human
ccucagcauccugg

SEQ ID NO: 2217762 - RNA, 21 nt, Human
ccucacuaucccggcugcccu

SEQ ID NO: 2217763 - RNA, 21 nt, Human
ccucacuaggcuucugguuga

SEQ ID NO: 2217764 - RNA, 20 nt, Human
ccucagaaaacaaggaugaa

SEQ ID NO: 2217765 - RNA, 18 nt, Human
ccucagaaacacuggggc

SEQ ID NO: 2217766 - RNA, 22 nt, Human
ccucacuaucccggcugcccuu

SEQ ID NO: 2217767 - RNA, 21 nt, Human
ccucagaacccuuggcuugcc

SEQ ID NO: 2217768 - RNA, 16 nt, Human
ccucagaacccuuggc

SEQ ID NO: 2217769 - RNA, 19 nt, Human
ccucagaaacacuggggcu

SEQ ID NO: 2217770 - RNA, 20 nt, Human
ccucagaaacacuggggcug

SEQ ID NO: 2217771 - RNA, 21 nt, Human
ccucagaaacacuggggcugg

SEQ ID NO: 2217772 - RNA, 21 nt, Human
ccucagaacaaagugagacag

SEQ ID NO: 2217773 - RNA, 11 nt, Human
ccucagguggc

SEQ ID NO: 2217774 - RNA, 19 nt, Human
ccucaggucagggugagga

SEQ ID NO: 2217775 - RNA, 22 nt, Human
ccucaggugauccacccaccuc

SEQ ID NO: 2217776 - RNA, 17 nt, Human
ccucaggugauccaccc

SEQ ID NO: 2217777 - RNA, 19 nt, Human
ccucaggugauccacccac

SEQ ID NO: 2217778 - RNA, 16 nt, Human
ccucaggugagaagca

SEQ ID NO: 2217779 - RNA, 23 nt, Human
ccucagguaaucgaccugccucg

SEQ ID NO: 2217780 - RNA, 22 nt, Human
ccucagguaaucgaccugccuc

SEQ ID NO: 2217781 - RNA, 21 nt, Human
ccucagguaaucgaccugccu

SEQ ID NO: 2217782 - RNA, 15 nt, Human
ccucagggucccugg

SEQ ID NO: 2217783 - RNA, 18 nt, Human
ccucagguggccaugccu

SEQ ID NO: 2217784 - RNA, 21 nt, Human
ccucagguggccaugccucag

SEQ ID NO: 2217785 - RNA, 23 nt, Human
ccucagguggccagccuggaucu

SEQ ID NO: 2217786 - RNA, 15 nt, Human
ccucaggugggccgc

SEQ ID NO: 2217787 - RNA, 18 nt, Human
ccucaggugggccgcagg

SEQ ID NO: 2217788 - RNA, 15 nt, Human
ccucagguuccuaug

SEQ ID NO: 2217789 - RNA, 15 nt, Human
ccucagguggccaug

SEQ ID NO: 2217790 - RNA, 16 nt, Human
ccucagguggccaugc

SEQ ID NO: 2217791 - RNA, 12 nt, Human
ccucagguggcc

SEQ ID NO: 2217792 - RNA, 20 nt, Human
ccucaggucagggugaggau

SEQ ID NO: 2217793 - RNA, 21 nt, Human
ccucagguggccagccuggau

SEQ ID NO: 2217794 - RNA, 19 nt, Human
ccucagguuugccugaggg

SEQ ID NO: 2217795 - RNA, 23 nt, Human
ccucagguugcugguugcugugu

SEQ ID NO: 2217796 - RNA, 21 nt, Human
ccucagguugcugguugcugu

SEQ ID NO: 2217797 - RNA, 22 nt, Human
ccucagguugcugguugcugug

SEQ ID NO: 2217798 - RNA, 23 nt, Human
ccucagguuccuauggcuggcca

SEQ ID NO: 2217799 - RNA, 16 nt, Human
ccucagguugcugguu

SEQ ID NO: 2217800 - RNA, 17 nt, Human
ccucagguugcugguug

SEQ ID NO: 2217801 - RNA, 18 nt, Human
ccucagguugcugguugc

SEQ ID NO: 2217802 - RNA, 15 nt, Human
ccucaguaagacgac

SEQ ID NO: 2217803 - RNA, 21 nt, Human
ccucaguaaguaucuggagga

SEQ ID NO: 2217804 - RNA, 15 nt, Human
ccucagucuggcccu

SEQ ID NO: 2217805 - RNA, 11 nt, Human
ccucaguccuc

SEQ ID NO: 2217806 - RNA, 12 nt, Human
ccucaguccucc

SEQ ID NO: 2217807 - RNA, 16 nt, Human
ccucaguccuccccuc

SEQ ID NO: 2217808 - RNA, 17 nt, Human
ccucaguccuccccuca

SEQ ID NO: 2217809 - RNA, 18 nt, Human
ccucaguccuccccucac

SEQ ID NO: 2217810 - RNA, 19 nt, Human
ccucaguccuccccucaca

SEQ ID NO: 2217811 - RNA, 20 nt, Human
ccucaguccuccccucacag

SEQ ID NO: 2217812 - RNA, 21 nt, Human
ccucaguccuccccucacagc

SEQ ID NO: 2217813 - RNA, 14 nt, Human
ccucagucucccuc

SEQ ID NO: 2217814 - RNA, 21 nt, Human
ccuccccucucuugcacccgc

SEQ ID NO: 2217815 - RNA, 12 nt, Human
ccucucccaggg

SEQ ID NO: 2217816 - RNA, 19 nt, Human
ccucuccacugccuucgau

SEQ ID NO: 2217817 - RNA, 18 nt, Human
ccucucaggugaccaaaa

SEQ ID NO: 2217818 - RNA, 12 nt, Human
ccucuccacugc

SEQ ID NO: 2217819 - RNA, 13 nt, Human
ccucuccacugcc

SEQ ID NO: 2217820 - RNA, 14 nt, Human
ccucuccacugccu

SEQ ID NO: 2217821 - RNA, 16 nt, Human
ccucuccacugccuuc

SEQ ID NO: 2217822 - RNA, 13 nt, Human
ccucucccauccc

SEQ ID NO: 2217823 - RNA, 14 nt, Human
ccucucccaucccc

SEQ ID NO: 2217824 - RNA, 12 nt, Human
ccucucccauca

SEQ ID NO: 2217825 - RNA, 21 nt, Human
ccucuccccagcccagagaca

SEQ ID NO: 2217826 - RNA, 20 nt, Human
ccucuccccagcccagagac

SEQ ID NO: 2217827 - RNA, 19 nt, Human
ccucuccccagcccagaga

SEQ ID NO: 2217828 - RNA, 18 nt, Human
ccucuccccagcccagag

SEQ ID NO: 2217829 - RNA, 15 nt, Human
ccucucccauccccc

SEQ ID NO: 2217830 - RNA, 16 nt, Human
ccucucccaucccccu

SEQ ID NO: 2217831 - RNA, 17 nt, Human
ccucucccaucccccug

SEQ ID NO: 2217832 - RNA, 18 nt, Human
ccucucccaucccccugc

SEQ ID NO: 2217833 - RNA, 19 nt, Human
ccucucccaucccccugcc

SEQ ID NO: 2217834 - RNA, 20 nt, Human
ccucucccaucccccugccc

SEQ ID NO: 2217835 - RNA, 21 nt, Human
ccucucccaucccccugcccu

SEQ ID NO: 2217836 - RNA, 22 nt, Human
ccucucccaucccccugcccuc

SEQ ID NO: 2217837 - RNA, 17 nt, Human
ccuccuguguagcuggg

SEQ ID NO: 2217838 - RNA, 15 nt, Human
ccuccuguugcaccc

SEQ ID NO: 2217839 - RNA, 16 nt, Human
ccuccuguugcaccca

SEQ ID NO: 2217840 - RNA, 17 nt, Human
ccuccuguugcacccag

SEQ ID NO: 2217841 - RNA, 18 nt, Human
ccuccuguugcacccagc

SEQ ID NO: 2217842 - RNA, 19 nt, Human
ccuccuguugcacccagcc

SEQ ID NO: 2217843 - RNA, 21 nt, Human
ccuccuguugcacccagcccu

SEQ ID NO: 2217844 - RNA, 22 nt, Human
ccuccuguugcacccagcccug

SEQ ID NO: 2217845 - RNA, 23 nt, Human
ccuccugugugugcgccuacagg

SEQ ID NO: 2217846 - RNA, 20 nt, Human
ccuccuuaucaaaggacacc

SEQ ID NO: 2217847 - RNA, 18 nt, Human
ccuccuuaucaaaggaca

SEQ ID NO: 2217848 - RNA, 22 nt, Human
ccucccucacccugagccccuu

SEQ ID NO: 2217849 - RNA, 16 nt, Human
ccucucacuaaacuuu

SEQ ID NO: 2217850 - RNA, 12 nt, Human
ccuccuucagac

SEQ ID NO: 2217851 - RNA, 23 nt, Human
ccuccuguugcacccagcccugg

SEQ ID NO: 2217852 - RNA, 21 nt, Human
ccucucaggcaugccugugug

SEQ ID NO: 2217853 - RNA, 20 nt, Human
ccucucaggcaugccugugu

SEQ ID NO: 2217854 - RNA, 14 nt, Human
ccucucaggcaugc

SEQ ID NO: 2217855 - RNA, 13 nt, Human
ccucucagcucca

SEQ ID NO: 2217856 - RNA, 16 nt, Human
ccucucagcuccaggu

SEQ ID NO: 2217857 - RNA, 18 nt, Human
ccucucagcuccaggugg

SEQ ID NO: 2217858 - RNA, 14 nt, Human
ccucucagagcuac

SEQ ID NO: 2217859 - RNA, 15 nt, Human
ccucucagagcuacu

SEQ ID NO: 2217860 - RNA, 21 nt, Human
ccucucagagcuacuugggcc

SEQ ID NO: 2217861 - RNA, 22 nt, Human
ccucucagagcuacuugggcca

SEQ ID NO: 2217862 - RNA, 23 nt, Human
ccucucagagcuacuugggccau

SEQ ID NO: 2217863 - RNA, 12 nt, Human
ccucucacuguc

SEQ ID NO: 2217864 - RNA, 17 nt, Human
ccucucaccuguacucu

SEQ ID NO: 2217865 - RNA, 13 nt, Human
ccucucacugucu

SEQ ID NO: 2217866 - RNA, 14 nt, Human
ccucucacugucug

SEQ ID NO: 2217867 - RNA, 15 nt, Human
ccucucacugucuga

SEQ ID NO: 2217868 - RNA, 19 nt, Human
ccucucacugucugagagu

SEQ ID NO: 2217869 - RNA, 21 nt, Human
ccucucuugguuuccuuccuu

SEQ ID NO: 2217870 - RNA, 15 nt, Human
ccucucuuuguucuc

SEQ ID NO: 2217871 - RNA, 19 nt, Human
ccucucuugguuuccuucc

SEQ ID NO: 2217872 - RNA, 18 nt, Human
ccucucuugguuuccuuc

SEQ ID NO: 2217873 - RNA, 17 nt, Human
ccucucuugcacccgcc

SEQ ID NO: 2217874 - RNA, 18 nt, Human
ccucucuugcacccgccu

SEQ ID NO: 2217875 - RNA, 21 nt, Human
ccucucuugcacccgccucuc

SEQ ID NO: 2217876 - RNA, 23 nt, Human
ccucucuugcacccgccucuccc

SEQ ID NO: 2217877 - RNA, 11 nt, Human
ccucucuugca

SEQ ID NO: 2217878 - RNA, 13 nt, Human
ccucucuugcacc

SEQ ID NO: 2217879 - RNA, 14 nt, Human
ccucucuugcaccc

SEQ ID NO: 2217880 - RNA, 20 nt, Human
ccucucuuauagaauauuua

SEQ ID NO: 2217881 - RNA, 19 nt, Human
ccucucuggccucccaccc

SEQ ID NO: 2217882 - RNA, 10 nt, Human
ccucucuguu

SEQ ID NO: 2217883 - RNA, 22 nt, Human
ccucucuggccucccacccgau

SEQ ID NO: 2217884 - RNA, 13 nt, Human
ccucucuggccuc

SEQ ID NO: 2217885 - RNA, 15 nt, Human
ccucucuggccuccc

SEQ ID NO: 2217886 - RNA, 16 nt, Human
ccucucuggccuccca

SEQ ID NO: 2217887 - RNA, 17 nt, Human
ccucucuggccucccac

SEQ ID NO: 2217888 - RNA, 18 nt, Human
ccucucuggccucccacc

SEQ ID NO: 2217889 - RNA, 23 nt, Human
ccucugaaaaccaauguucucuc

SEQ ID NO: 2217890 - RNA, 18 nt, Human
ccucucuuuguucucagc

SEQ ID NO: 2217891 - RNA, 19 nt, Human
ccucucuuuguucucagcu

SEQ ID NO: 2217892 - RNA, 20 nt, Human
ccucucuuuguucucagcuc

SEQ ID NO: 2217893 - RNA, 21 nt, Human
ccucucuuuguucucagcucc

SEQ ID NO: 2217894 - RNA, 22 nt, Human
ccucucuuuguucucagcuccc

SEQ ID NO: 2217895 - RNA, 23 nt, Human
ccucucuuuguucucagcucccc

SEQ ID NO: 2217896 - RNA, 18 nt, Human
ccucugaaaacggcccuc

SEQ ID NO: 2217897 - RNA, 20 nt, Human
ccucugaaaacggcccucuu

SEQ ID NO: 2217898 - RNA, 16 nt, Human
ccucugacacacagcu

SEQ ID NO: 2217899 - RNA, 15 nt, Human
ccucugacacacagc

SEQ ID NO: 2217900 - RNA, 16 nt, Human
ccucuccugccuacuc

SEQ ID NO: 2217901 - RNA, 15 nt, Human
ccucuccugccuacu

SEQ ID NO: 2217902 - RNA, 14 nt, Human
ccucuccugccuac

SEQ ID NO: 2217903 - RNA, 13 nt, Human
ccucuccugccua

SEQ ID NO: 2217904 - RNA, 16 nt, Human
ccucuccccugauuac

SEQ ID NO: 2217905 - RNA, 20 nt, Human
ccucuccccccccccuccaa

SEQ ID NO: 2217906 - RNA, 18 nt, Human
ccucuccccuaccacugu

SEQ ID NO: 2217907 - RNA, 23 nt, Human
ccucuccccuaccacugucuucu

SEQ ID NO: 2217908 - RNA, 19 nt, Human
ccucuccccauucggugug

SEQ ID NO: 2217909 - RNA, 19 nt, Human
ccucuccccccccccucca

SEQ ID NO: 2217910 - RNA, 23 nt, Human
ccucuccccagguccagcucugg

SEQ ID NO: 2217911 - RNA, 19 nt, Human
ccucucccauugucccucu

SEQ ID NO: 2217912 - RNA, 21 nt, Human
ccucuccccagguccagcucu

SEQ ID NO: 2217913 - RNA, 17 nt, Human
ccucuccugccuacuca

SEQ ID NO: 2217914 - RNA, 11 nt, Human
ccucuccugga

SEQ ID NO: 2217915 - RNA, 12 nt, Human
ccucuccuggag

SEQ ID NO: 2217916 - RNA, 13 nt, Human
ccucuccuggagg

SEQ ID NO: 2217917 - RNA, 13 nt, Human
ccucucugcccua

SEQ ID NO: 2217918 - RNA, 14 nt, Human
ccucuccuggagga

SEQ ID NO: 2217919 - RNA, 15 nt, Human
ccucuccuggaggau

SEQ ID NO: 2217920 - RNA, 16 nt, Human
ccucucugcucugcgu

SEQ ID NO: 2217921 - RNA, 22 nt, Human
ccucucugccgcaauacaggaa

SEQ ID NO: 2217922 - RNA, 15 nt, Human
ccucucugcucugcg

SEQ ID NO: 2217923 - RNA, 12 nt, Human
ccucucugcucu

SEQ ID NO: 2217924 - RNA, 15 nt, Human
ccucuggacggcagg

SEQ ID NO: 2217925 - RNA, 16 nt, Human
ccucuggacggcaggc

SEQ ID NO: 2217926 - RNA, 21 nt, Human
ccucuggacggcaggcucacu

SEQ ID NO: 2217927 - RNA, 22 nt, Human
ccucuggacggcaggcucacug

SEQ ID NO: 2217928 - RNA, 23 nt, Human
ccucuggacggcaggcucacugc

SEQ ID NO: 2217929 - RNA, 24 nt, Human
ccucugccaccagagaccguccuc

SEQ ID NO: 2217930 - RNA, 17 nt, Human
ccucugccaccagagac

SEQ ID NO: 2217931 - RNA, 19 nt, Human
ccucugccaccagagaccg

SEQ ID NO: 2217932 - RNA, 11 nt, Human
ccucugccacc

SEQ ID NO: 2217933 - RNA, 13 nt, Human
ccucugccaccag

SEQ ID NO: 2217934 - RNA, 20 nt, Human
ccucugccaaaggaugugau

SEQ ID NO: 2217935 - RNA, 22 nt, Human
ccucugccaaaggaugugauau

SEQ ID NO: 2217936 - RNA, 17 nt, Human
ccucuggacuggcuaga

SEQ ID NO: 2217937 - RNA, 16 nt, Human
ccucuggacuggcuag

SEQ ID NO: 2217938 - RNA, 15 nt, Human
ccucuggacuggcua

SEQ ID NO: 2217939 - RNA, 14 nt, Human
ccucuggacuggcu

SEQ ID NO: 2217940 - RNA, 17 nt, Human
ccucuggaggggugugg

SEQ ID NO: 2217941 - RNA, 18 nt, Human
ccucuggacuggcuagag

SEQ ID NO: 2217942 - RNA, 21 nt, Human
ccucuggaguggccacuaagc

SEQ ID NO: 2217943 - RNA, 16 nt, Human
ccucuggaguggccac

SEQ ID NO: 2217944 - RNA, 16 nt, Human
ccucuggauggcacca

SEQ ID NO: 2217945 - RNA, 21 nt, Human
ccucuggauggcaccagaggc

SEQ ID NO: 2217946 - RNA, 21 nt, Human
ccucuggcauuagaauuauuu

SEQ ID NO: 2217947 - RNA, 23 nt, Human
ccucuggcauuagaauuauuuaa

SEQ ID NO: 2217948 - RNA, 15 nt, Human
ccucuggaguggcca

SEQ ID NO: 2217949 - RNA, 14 nt, Human
ccucuggaguggcc

SEQ ID NO: 2217950 - RNA, 13 nt, Human
ccucuggaguggc

SEQ ID NO: 2217951 - RNA, 20 nt, Human
ccucuggagggguguggcuc

SEQ ID NO: 2217952 - RNA, 22 nt, Human
ccucuggagggguguggcuccu

SEQ ID NO: 2217953 - RNA, 16 nt, Human
ccucugggcaggaccu

SEQ ID NO: 2217954 - RNA, 14 nt, Human
ccucugggcacugg

SEQ ID NO: 2217955 - RNA, 23 nt, Human
ccucugggaaaugagaaggcagc

SEQ ID NO: 2217956 - RNA, 12 nt, Human
ccucugggacug

SEQ ID NO: 2217957 - RNA, 16 nt, Human
ccucuggucgcuccug

SEQ ID NO: 2217958 - RNA, 20 nt, Human
ccucugggucagugguccac

SEQ ID NO: 2217959 - RNA, 17 nt, Human
ccucugggucagugguc

SEQ ID NO: 2217960 - RNA, 23 nt, Human
ccucuggcuagaggccagcccca

SEQ ID NO: 2217961 - RNA, 22 nt, Human
ccucuggcuagaggccagcccc

SEQ ID NO: 2217962 - RNA, 13 nt, Human
ccucuggcuagag

SEQ ID NO: 2217963 - RNA, 12 nt, Human
ccucuggcuaga

SEQ ID NO: 2217964 - RNA, 18 nt, Human
ccucuggcccugccuucu

SEQ ID NO: 2217965 - RNA, 15 nt, Human
ccucuggcccugccu

SEQ ID NO: 2217966 - RNA, 13 nt, Human
ccucuggcccugc

SEQ ID NO: 2217967 - RNA, 12 nt, Human
ccucuggcccug

SEQ ID NO: 2217968 - RNA, 15 nt, Human
ccucuggccaggaug

SEQ ID NO: 2217969 - RNA, 12 nt, Human
ccucuggccagg

SEQ ID NO: 2217970 - RNA, 18 nt, Human
ccucuggauugugggaau

SEQ ID NO: 2217971 - RNA, 23 nt, Human
ccucuggcuggcuaacuggaagc

SEQ ID NO: 2217972 - RNA, 22 nt, Human
ccucuggcuggcuaacuggaag

SEQ ID NO: 2217973 - RNA, 24 nt, Human
ccucuggcuagaggccagccccac

SEQ ID NO: 2217974 - RNA, 17 nt, Human
ccucuggcccugccuuc

SEQ ID NO: 2217975 - RNA, 17 nt, Human
ccucuggcuccagcugg

SEQ ID NO: 2217976 - RNA, 16 nt, Human
ccucuggcuccagcug

SEQ ID NO: 2217977 - RNA, 19 nt, Human
ccucugcacaagcugcacc

SEQ ID NO: 2217978 - RNA, 17 nt, Human
ccucugcacaagcugca

SEQ ID NO: 2217979 - RNA, 20 nt, Human
ccucugcacaagcugcaccc

SEQ ID NO: 2217980 - RNA, 20 nt, Human
ccucugcacuacugacaugu

SEQ ID NO: 2217981 - RNA, 21 nt, Human
ccucugcacuacugacaugug

SEQ ID NO: 2217982 - RNA, 15 nt, Human
ccucugcacaagcug

SEQ ID NO: 2217983 - RNA, 11 nt, Human
ccucugcacaa

SEQ ID NO: 2217984 - RNA, 17 nt, Human
ccucugacacacagcuc

SEQ ID NO: 2217985 - RNA, 18 nt, Human
ccucugacacacagcucu

SEQ ID NO: 2217986 - RNA, 22 nt, Human
ccucugcagcugaccucuguug

SEQ ID NO: 2217987 - RNA, 17 nt, Human
ccucugcagugccuugg

SEQ ID NO: 2217988 - RNA, 19 nt, Human
ccucugccaaaggauguga

SEQ ID NO: 2217989 - RNA, 16 nt, Human
ccucugcagugccuug

SEQ ID NO: 2217990 - RNA, 17 nt, Human
ccucugcagcugaccuc

SEQ ID NO: 2217991 - RNA, 19 nt, Human
ccucugcagcugaccucug

SEQ ID NO: 2217992 - RNA, 22 nt, Human
ccucugcacuccccugcugggu

SEQ ID NO: 2217993 - RNA, 12 nt, Human
ccucugcagcug

SEQ ID NO: 2217994 - RNA, 13 nt, Human
ccucugcagcuga

SEQ ID NO: 2217995 - RNA, 15 nt, Human
ccucugcagcugacc

SEQ ID NO: 2217996 - RNA, 16 nt, Human
ccucugcagcugaccu

SEQ ID NO: 2217997 - RNA, 14 nt, Human
ccucugcacucccc

SEQ ID NO: 2217998 - RNA, 19 nt, Human
ccucugcacuccccugcug

SEQ ID NO: 2217999 - RNA, 20 nt, Human
ccucugcacuccccugcugg

SEQ ID NO: 2218000 - RNA, 21 nt, Human
ccucugcacuccccugcuggg

SEQ ID NO: 2218001 - RNA, 15 nt, Human
ccucucaguacuuug

SEQ ID NO: 2218002 - RNA, 16 nt, Human
ccucugguuuggggcg

SEQ ID NO: 2218003 - RNA, 16 nt, Human
ccucuggucugggugc

SEQ ID NO: 2218004 - RNA, 18 nt, Human
ccucugguuuggggcgag

SEQ ID NO: 2218005 - RNA, 21 nt, Human
ccucugguuuggggcgaggca

SEQ ID NO: 2218006 - RNA, 23 nt, Human
ccucugguuuggggcgaggcaga

SEQ ID NO: 2218007 - RNA, 23 nt, Human
ccucuguacagagcccacgcccc

SEQ ID NO: 2218008 - RNA, 17 nt, Human
ccucuguacagagccca

SEQ ID NO: 2218009 - RNA, 18 nt, Human
ccucuguacagagcccac

SEQ ID NO: 2218010 - RNA, 14 nt, Human
ccucuguacagagc

SEQ ID NO: 2218011 - RNA, 17 nt, Human
ccucuggucgcuccugc

SEQ ID NO: 2218012 - RNA, 19 nt, Human
ccucuggucgcuccugccc

SEQ ID NO: 2218013 - RNA, 20 nt, Human
ccucuggucgcuccugccca

SEQ ID NO: 2218014 - RNA, 21 nt, Human
ccucuggucgcuccugcccac

SEQ ID NO: 2218015 - RNA, 15 nt, Human
ccucuguacagagcc

SEQ ID NO: 2218016 - RNA, 16 nt, Human
ccucuguacagagccc

SEQ ID NO: 2218017 - RNA, 23 nt, Human
ccucuguccagggcccugagcuc

SEQ ID NO: 2218018 - RNA, 21 nt, Human
ccucuguccagggcccugagc

SEQ ID NO: 2218019 - RNA, 20 nt, Human
ccucuguccagggcccugag

SEQ ID NO: 2218020 - RNA, 18 nt, Human
ccucuguccagggcccug

SEQ ID NO: 2218021 - RNA, 14 nt, Human
ccucuguccccuuc

SEQ ID NO: 2218022 - RNA, 17 nt, Human
ccucuguccccuucucu

SEQ ID NO: 2218023 - RNA, 18 nt, Human
ccucuguccccuucucuc

SEQ ID NO: 2218024 - RNA, 19 nt, Human
ccucuguccccuucucuca

SEQ ID NO: 2218025 - RNA, 21 nt, Human
ccucuguccccuucucucauc

SEQ ID NO: 2218026 - RNA, 22 nt, Human
ccucuguccccuucucucaucu

SEQ ID NO: 2218027 - RNA, 11 nt, Human
ccucuguccug

SEQ ID NO: 2218028 - RNA, 13 nt, Human
ccucuguccugac

SEQ ID NO: 2218029 - RNA, 14 nt, Human
ccucuguccugacu

SEQ ID NO: 2218030 - RNA, 16 nt, Human
ccucuguccugacuuc

SEQ ID NO: 2218031 - RNA, 13 nt, Human
ccucugucugccc

SEQ ID NO: 2218032 - RNA, 17 nt, Human
ccucugucacugcaggc

SEQ ID NO: 2218033 - RNA, 19 nt, Human
ccucugucacugcaggcac

SEQ ID NO: 2218034 - RNA, 16 nt, Human
ccucugucagucacag

SEQ ID NO: 2218035 - RNA, 15 nt, Human
ccucugucagucaca

SEQ ID NO: 2218036 - RNA, 21 nt, Human
ccucugucagucacagccacc

SEQ ID NO: 2218037 - RNA, 19 nt, Human
ccucugucagucacagcca

SEQ ID NO: 2218038 - RNA, 18 nt, Human
ccucugucagucacagcc

SEQ ID NO: 2218039 - RNA, 15 nt, Human
ccucuguccagggcc

SEQ ID NO: 2218040 - RNA, 14 nt, Human
ccucuguccagggc

SEQ ID NO: 2218041 - RNA, 21 nt, Human
ccucuguccaggcacugagau

SEQ ID NO: 2218042 - RNA, 20 nt, Human
ccucuguccaggcacugaga

SEQ ID NO: 2218043 - RNA, 17 nt, Human
ccucuguccaggcacug

SEQ ID NO: 2218044 - RNA, 19 nt, Human
ccucuguccaggcacugag

SEQ ID NO: 2218045 - RNA, 15 nt, Human
ccucuguccaggcac

SEQ ID NO: 2218046 - RNA, 22 nt, Human
ccucuuaaagcugccuguaguu

SEQ ID NO: 2218047 - RNA, 21 nt, Human
ccucuuaaagcugccuguagu

SEQ ID NO: 2218048 - RNA, 20 nt, Human
ccucuuaaagcugccuguag

SEQ ID NO: 2218049 - RNA, 19 nt, Human
ccucuuaaagcugccugua

SEQ ID NO: 2218050 - RNA, 17 nt, Human
ccucuuaaagcugccug

SEQ ID NO: 2218051 - RNA, 19 nt, Human
ccucuuaaagaaaacccac

SEQ ID NO: 2218052 - RNA, 20 nt, Human
ccucuuaaagaaaacccacc

SEQ ID NO: 2218053 - RNA, 19 nt, Human
ccucuuaaaaaauaaaaac

SEQ ID NO: 2218054 - RNA, 18 nt, Human
ccucuuaaaaaauaaaaa

SEQ ID NO: 2218055 - RNA, 17 nt, Human
ccucuuaaaaaauaaaa

SEQ ID NO: 2218056 - RNA, 21 nt, Human
ccucuguuugacaaaccucua

SEQ ID NO: 2218057 - RNA, 23 nt, Human
ccucuuaaagcugccuguaguua

SEQ ID NO: 2218058 - RNA, 21 nt, Human
ccucuuaauguaugauuacau

SEQ ID NO: 2218059 - RNA, 14 nt, Human
ccucuuagaaaaac

SEQ ID NO: 2218060 - RNA, 15 nt, Human
ccucuuaugggcugg

SEQ ID NO: 2218061 - RNA, 16 nt, Human
ccucuuaugggcuggg

SEQ ID NO: 2218062 - RNA, 14 nt, Human
ccucuuaugggcug

SEQ ID NO: 2218063 - RNA, 23 nt, Human
ccucuuagaugcaguucugaaga

SEQ ID NO: 2218064 - RNA, 21 nt, Human
ccucuguucugcacacagcac

SEQ ID NO: 2218065 - RNA, 19 nt, Human
ccucugugugcuccuccuu

SEQ ID NO: 2218066 - RNA, 16 nt, Human
ccucuguucaguguaa

SEQ ID NO: 2218067 - RNA, 22 nt, Human
ccucuguucaguguaaauaguu

SEQ ID NO: 2218068 - RNA, 15 nt, Human
ccucuguuguccucc

SEQ ID NO: 2218069 - RNA, 18 nt, Human
ccucuguuguccuccccu

SEQ ID NO: 2218070 - RNA, 23 nt, Human
ccucuguuguccuccccuugggc

SEQ ID NO: 2218071 - RNA, 21 nt, Human
ccucuguuucucuuuccuugg

SEQ ID NO: 2218072 - RNA, 16 nt, Human
ccucuguuugacaaac

SEQ ID NO: 2218073 - RNA, 15 nt, Human
ccucugugcugugug

SEQ ID NO: 2218074 - RNA, 18 nt, Human
ccucuguguauuugcuuu

SEQ ID NO: 2218075 - RNA, 16 nt, Human
ccucugugaccucagg

SEQ ID NO: 2218076 - RNA, 14 nt, Human
ccucugugucacug

SEQ ID NO: 2218077 - RNA, 16 nt, Human
ccucugugucacuggc

SEQ ID NO: 2218078 - RNA, 17 nt, Human
ccucugugucacuggcu

SEQ ID NO: 2218079 - RNA, 18 nt, Human
ccucugugucacuggcug

SEQ ID NO: 2218080 - RNA, 19 nt, Human
ccucugugucacuggcugc

SEQ ID NO: 2218081 - RNA, 21 nt, Human
ccucugugucacuggcugccu

SEQ ID NO: 2218082 - RNA, 22 nt, Human
ccucugugucacuggcugccuc

SEQ ID NO: 2218083 - RNA, 23 nt, Human
ccucugugucacuggcugccucc

SEQ ID NO: 2218084 - RNA, 13 nt, Human
ccucuguguccuu

SEQ ID NO: 2218085 - RNA, 19 nt, Human
ccucuguguccuucccugc

SEQ ID NO: 2218086 - RNA, 20 nt, Human
ccucuguguccuucccugca

SEQ ID NO: 2218087 - RNA, 21 nt, Human
ccucugugccuucuuuugauu

SEQ ID NO: 2218088 - RNA, 13 nt, Human
ccucugugcugug

SEQ ID NO: 2218089 - RNA, 16 nt, Human
ccucugugcugugugu

SEQ ID NO: 2218090 - RNA, 14 nt, Human
ccucugugccuucu

SEQ ID NO: 2218091 - RNA, 17 nt, Human
ccucugugaccucaggc

SEQ ID NO: 2218092 - RNA, 21 nt, Human
ccucugugaccaaugucuuga

SEQ ID NO: 2218093 - RNA, 22 nt, Human
ccucugucuuggcuuucauguu

SEQ ID NO: 2218094 - RNA, 15 nt, Human
ccucugugaccucag

SEQ ID NO: 2218095 - RNA, 19 nt, Human
ccucugugaccaaugucuu

SEQ ID NO: 2218096 - RNA, 18 nt, Human
ccucugugaccaaugucu

SEQ ID NO: 2218097 - RNA, 20 nt, Human
ccucugucuuggcuuucaug

SEQ ID NO: 2218098 - RNA, 22 nt, Human
ccucugucuugugaaggcaggg

SEQ ID NO: 2218099 - RNA, 14 nt, Human
ccucugucugcccu

SEQ ID NO: 2218100 - RNA, 16 nt, Human
ccucugucugcccuuc

SEQ ID NO: 2218101 - RNA, 22 nt, Human
ccucugucugcccuucacccca

SEQ ID NO: 2218102 - RNA, 13 nt, Human
ccugaaccuagga

SEQ ID NO: 2218103 - RNA, 19 nt, Human
ccugaacugggaccuuuag

SEQ ID NO: 2218104 - RNA, 14 nt, Human
ccugaagaacagua

SEQ ID NO: 2218105 - RNA, 16 nt, Human
ccugaagaaccagucc

SEQ ID NO: 2218106 - RNA, 13 nt, Human
ccugaagaaccag

SEQ ID NO: 2218107 - RNA, 21 nt, Human
ccugaacaagaauuggaagcu

SEQ ID NO: 2218108 - RNA, 18 nt, Human
ccugaacauccuuccuuc

SEQ ID NO: 2218109 - RNA, 20 nt, Human
ccugaacauccuuccuuccc

SEQ ID NO: 2218110 - RNA, 21 nt, Human
ccugaacauccuuccuuccca

SEQ ID NO: 2218111 - RNA, 21 nt, Human
ccugaagacucauucuucugu

SEQ ID NO: 2218112 - RNA, 20 nt, Human
ccugaagcuaucguaaaauu

SEQ ID NO: 2218113 - RNA, 17 nt, Human
ccugaagaaccaguccc

SEQ ID NO: 2218114 - RNA, 22 nt, Human
ccugaagcuaucguaaaauuaa

SEQ ID NO: 2218115 - RNA, 23 nt, Human
ccugaagcuaucguaaaauuaag

SEQ ID NO: 2218116 - RNA, 15 nt, Human
ccugaagucacacag

SEQ ID NO: 2218117 - RNA, 13 nt, Human
ccugaaggccccg

SEQ ID NO: 2218118 - RNA, 16 nt, Human
ccugaagucacacagu

SEQ ID NO: 2218119 - RNA, 17 nt, Human
ccugaagucacacagug

SEQ ID NO: 2218120 - RNA, 23 nt, Human
ccugaauguauugaacuuggaaa

SEQ ID NO: 2218121 - RNA, 14 nt, Human
ccugaauucuauuu

SEQ ID NO: 2218122 - RNA, 18 nt, Human
ccugaauucuauuugcug

SEQ ID NO: 2218123 - RNA, 15 nt, Human
ccugaauucuuuuuc

SEQ ID NO: 2218124 - RNA, 21 nt, Human
ccugaauucuauuugcugggc

SEQ ID NO: 2218125 - RNA, 19 nt, Human
ccugaauuuauuauuguuc

SEQ ID NO: 2218126 - RNA, 13 nt, Human
ccugaaugaaaua

SEQ ID NO: 2218127 - RNA, 22 nt, Human
ccugaaucccccuugccacccc

SEQ ID NO: 2218128 - RNA, 20 nt, Human
ccugaaugguuccaugccug

SEQ ID NO: 2218129 - RNA, 21 nt, Human
ccugaaugguuccaugccuga

SEQ ID NO: 2218130 - RNA, 22 nt, Human
ccugaaugguuccaugccugag

SEQ ID NO: 2218131 - RNA, 23 nt, Human
ccugaaugguuccaugccugagg

SEQ ID NO: 2218132 - RNA, 21 nt, Human
ccugaaggaacauuccuuagu

SEQ ID NO: 2218133 - RNA, 21 nt, Human
ccugaauccaaacuaauccau

SEQ ID NO: 2218134 - RNA, 19 nt, Human
ccugaaucccccuugccac

SEQ ID NO: 2218135 - RNA, 20 nt, Human
ccugaaucccccuugccacc

SEQ ID NO: 2218136 - RNA, 20 nt, Human
ccugaauccaaacuaaucca

SEQ ID NO: 2218137 - RNA, 17 nt, Human
ccugaauccaaacuaau

SEQ ID NO: 2218138 - RNA, 23 nt, Human
ccucuuugucuaaaacaauaaaa

SEQ ID NO: 2218139 - RNA, 18 nt, Human
ccugaaagaggaaugaag

SEQ ID NO: 2218140 - RNA, 17 nt, Human
ccugaaaacacugugca

SEQ ID NO: 2218141 - RNA, 23 nt, Human
ccugaaagaggaaugaaguacuc

SEQ ID NO: 2218142 - RNA, 15 nt, Human
ccugaaagaggcuga

SEQ ID NO: 2218143 - RNA, 19 nt, Human
ccugaaagaggcugaggcc

SEQ ID NO: 2218144 - RNA, 22 nt, Human
ccugaaagaggcugaggccugg

SEQ ID NO: 2218145 - RNA, 17 nt, Human
ccugaacaagaauugga

SEQ ID NO: 2218146 - RNA, 16 nt, Human
ccugaacaagaauugg

SEQ ID NO: 2218147 - RNA, 15 nt, Human
ccugaacaagaauug

SEQ ID NO: 2218148 - RNA, 13 nt, Human
ccugaacaagaau

SEQ ID NO: 2218149 - RNA, 15 nt, Human
ccugaaauuucagau

SEQ ID NO: 2218150 - RNA, 14 nt, Human
ccugaaauuucaga

SEQ ID NO: 2218151 - RNA, 14 nt, Human
ccugaaauuucacc

SEQ ID NO: 2218152 - RNA, 19 nt, Human
ccucuuccggagauguagc

SEQ ID NO: 2218153 - RNA, 18 nt, Human
ccucuuccgugacgucac

SEQ ID NO: 2218154 - RNA, 20 nt, Human
ccucuuccggagauguagca

SEQ ID NO: 2218155 - RNA, 21 nt, Human
ccucuuccccuugcccuugcc

SEQ ID NO: 2218156 - RNA, 13 nt, Human
ccucuucaccccc

SEQ ID NO: 2218157 - RNA, 17 nt, Human
ccucuucaccccccacu

SEQ ID NO: 2218158 - RNA, 13 nt, Human
ccucuucaaauua

SEQ ID NO: 2218159 - RNA, 14 nt, Human
ccucuuagcugagu

SEQ ID NO: 2218160 - RNA, 17 nt, Human
ccucuuagcugagugga

SEQ ID NO: 2218161 - RNA, 21 nt, Human
ccucuuaaagaaaacccaccc

SEQ ID NO: 2218162 - RNA, 20 nt, Human
ccucuuagacuucugcuuuc

SEQ ID NO: 2218163 - RNA, 22 nt, Human
ccucuuagacuucugcuuucca

SEQ ID NO: 2218164 - RNA, 17 nt, Human
ccucuuaugggcugggu

SEQ ID NO: 2218165 - RNA, 15 nt, Human
ccucuuccucccuca

SEQ ID NO: 2218166 - RNA, 16 nt, Human
ccucuuccucccucau

SEQ ID NO: 2218167 - RNA, 19 nt, Human
ccucuuccucccucauucc

SEQ ID NO: 2218168 - RNA, 11 nt, Human
ccucuuccucu

SEQ ID NO: 2218169 - RNA, 12 nt, Human
ccucuuccucug

SEQ ID NO: 2218170 - RNA, 13 nt, Human
ccucuuccucuga

SEQ ID NO: 2218171 - RNA, 22 nt, Human
ccucuuugucuaaaacaauaaa

SEQ ID NO: 2218172 - RNA, 19 nt, Human
ccucuuugucuaaaacaau

SEQ ID NO: 2218173 - RNA, 15 nt, Human
ccucuuugucuaaaa

SEQ ID NO: 2218174 - RNA, 14 nt, Human
ccucuuugucuaaa

SEQ ID NO: 2218175 - RNA, 22 nt, Human
ccucuuuggucuacacugugcu

SEQ ID NO: 2218176 - RNA, 23 nt, Human
ccugaucgccaaccuuuccccca

SEQ ID NO: 2218177 - RNA, 19 nt, Human
ccugaucugacauccccac

SEQ ID NO: 2218178 - RNA, 14 nt, Human
ccugaggcugagac

SEQ ID NO: 2218179 - RNA, 17 nt, Human
ccugaggcuccugugcu

SEQ ID NO: 2218180 - RNA, 18 nt, Human
ccugaggcuccugugcua

SEQ ID NO: 2218181 - RNA, 12 nt, Human
ccugaggcuccu

SEQ ID NO: 2218182 - RNA, 20 nt, Human
ccugaggcuccacuuggucu

SEQ ID NO: 2218183 - RNA, 18 nt, Human
ccugaggcuccacuuggu

SEQ ID NO: 2218184 - RNA, 14 nt, Human
ccugaugcucccuc

SEQ ID NO: 2218185 - RNA, 13 nt, Human
ccugaugcucccu

SEQ ID NO: 2218186 - RNA, 16 nt, Human
ccugaugacagagcga

SEQ ID NO: 2218187 - RNA, 15 nt, Human
ccugaugcagucacg

SEQ ID NO: 2218188 - RNA, 16 nt, Human
ccugaugcagucacgu

SEQ ID NO: 2218189 - RNA, 16 nt, Human
ccugaugcucauauca

SEQ ID NO: 2218190 - RNA, 13 nt, Human
ccugaugacagag

SEQ ID NO: 2218191 - RNA, 23 nt, Human
ccugaugcucccuccccugcccu

SEQ ID NO: 2218192 - RNA, 20 nt, Human
ccugaugcucccuccccugc

SEQ ID NO: 2218193 - RNA, 19 nt, Human
ccugaugcucccuccccug

SEQ ID NO: 2218194 - RNA, 16 nt, Human
ccugaugcucccuccc

SEQ ID NO: 2218195 - RNA, 14 nt, Human
ccugaugcuucuuc

SEQ ID NO: 2218196 - RNA, 17 nt, Human
ccugauguuaaaauucc

SEQ ID NO: 2218197 - RNA, 16 nt, Human
ccugauucaacuaaaa

SEQ ID NO: 2218198 - RNA, 23 nt, Human
ccugauugugucucuugguccug

SEQ ID NO: 2218199 - RNA, 16 nt, Human
ccugauguuaaaauuc

SEQ ID NO: 2218200 - RNA, 23 nt, Human
ccugauggucagcucccuucucu

SEQ ID NO: 2218201 - RNA, 17 nt, Human
ccugauggccaggccag

SEQ ID NO: 2218202 - RNA, 21 nt, Human
ccugaugguacaggaaagcuc

SEQ ID NO: 2218203 - RNA, 16 nt, Human
ccugauggucagcucc

SEQ ID NO: 2218204 - RNA, 17 nt, Human
ccugauggucagcuccc

SEQ ID NO: 2218205 - RNA, 18 nt, Human
ccugauggucagcucccu

SEQ ID NO: 2218206 - RNA, 20 nt, Human
ccugauggucagcucccuuc

SEQ ID NO: 2218207 - RNA, 21 nt, Human
ccugauggucagcucccuucu

SEQ ID NO: 2218208 - RNA, 22 nt, Human
ccugauggucagcucccuucuc

SEQ ID NO: 2218209 - RNA, 17 nt, Human
ccugaugcuucuucaga

SEQ ID NO: 2218210 - RNA, 18 nt, Human
ccugaugcuucuucagag

SEQ ID NO: 2218211 - RNA, 21 nt, Human
ccugaugcugacauucaccug

SEQ ID NO: 2218212 - RNA, 13 nt, Human
ccugaugcugaca

SEQ ID NO: 2218213 - RNA, 23 nt, Human
ccugaugcugacauucaccugcc

SEQ ID NO: 2218214 - RNA, 18 nt, Human
ccugaugguacaggaaag

SEQ ID NO: 2218215 - RNA, 20 nt, Human
ccugauggcaggauggccug

SEQ ID NO: 2218216 - RNA, 23 nt, Human
ccugauggcaggauggccuggcc

SEQ ID NO: 2218217 - RNA, 13 nt, Human
ccugaugcugacu

SEQ ID NO: 2218218 - RNA, 17 nt, Human
ccugauggaccugucac

SEQ ID NO: 2218219 - RNA, 21 nt, Human
ccugauggcacuuagcuauca

SEQ ID NO: 2218220 - RNA, 12 nt, Human
ccugaggcccag

SEQ ID NO: 2218221 - RNA, 18 nt, Human
ccugaggcagguccccag

SEQ ID NO: 2218222 - RNA, 21 nt, Human
ccugaauuuuguugcuguuuu

SEQ ID NO: 2218223 - RNA, 13 nt, Human
ccugaggcccaga

SEQ ID NO: 2218224 - RNA, 14 nt, Human
ccugaggcccagag

SEQ ID NO: 2218225 - RNA, 12 nt, Human
ccugacaacacu

SEQ ID NO: 2218226 - RNA, 14 nt, Human
ccugacaacacuca

SEQ ID NO: 2218227 - RNA, 15 nt, Human
ccugacaacacucau

SEQ ID NO: 2218228 - RNA, 16 nt, Human
ccugacaacacucauu

SEQ ID NO: 2218229 - RNA, 23 nt, Human
ccugaggcccuucucuccagccc

SEQ ID NO: 2218230 - RNA, 19 nt, Human
ccugaggcagguccccaga

SEQ ID NO: 2218231 - RNA, 21 nt, Human
ccugaggcccuucucuccagc

SEQ ID NO: 2218232 - RNA, 22 nt, Human
ccugaggcccuucucuccagcc

SEQ ID NO: 2218233 - RNA, 16 nt, Human
ccugaggcccuucucu

SEQ ID NO: 2218234 - RNA, 17 nt, Human
ccugaggcccuucucuc

SEQ ID NO: 2218235 - RNA, 19 nt, Human
ccugaggcccuucucucca

SEQ ID NO: 2218236 - RNA, 20 nt, Human
ccugaggcccuucucuccag

SEQ ID NO: 2218237 - RNA, 22 nt, Human
ccucuguccugacuucaggggc

SEQ ID NO: 2218238 - RNA, 18 nt, Human
ccuagagccugccuggag

SEQ ID NO: 2218239 - RNA, 19 nt, Human
ccuagagccugccuggagc

SEQ ID NO: 2218240 - RNA, 13 nt, Human
ccuagagccugcc

SEQ ID NO: 2218241 - RNA, 14 nt, Human
ccuagagccugccu

SEQ ID NO: 2218242 - RNA, 17 nt, Human
ccuagagccugccugga

SEQ ID NO: 2218243 - RNA, 15 nt, Human
ccuagagcacacugu

SEQ ID NO: 2218244 - RNA, 23 nt, Human
ccuagagaagcuaaaaccugagc

SEQ ID NO: 2218245 - RNA, 16 nt, Human
ccuagagacagaagca

SEQ ID NO: 2218246 - RNA, 21 nt, Human
ccuagagacagaagcaggcug

SEQ ID NO: 2218247 - RNA, 16 nt, Human
ccuaucaccuccccuc

SEQ ID NO: 2218248 - RNA, 15 nt, Human
ccuaucaccuccccu

SEQ ID NO: 2218249 - RNA, 17 nt, Human
ccuaucaccuauuucca

SEQ ID NO: 2218250 - RNA, 16 nt, Human
ccuaucaccuauuucc

SEQ ID NO: 2218251 - RNA, 16 nt, Human
ccuagagggaggggcc

SEQ ID NO: 2218252 - RNA, 15 nt, Human
ccuagagggaggggc

SEQ ID NO: 2218253 - RNA, 13 nt, Human
ccuagagggaggg

SEQ ID NO: 2218254 - RNA, 14 nt, Human
ccuauccacccagc

SEQ ID NO: 2218255 - RNA, 13 nt, Human
ccuauccacccag

SEQ ID NO: 2218256 - RNA, 12 nt, Human
ccuauccaccca

SEQ ID NO: 2218257 - RNA, 11 nt, Human
ccuauggaugu

SEQ ID NO: 2218258 - RNA, 17 nt, Human
ccuauggggauggucca

SEQ ID NO: 2218259 - RNA, 21 nt, Human
ccuauggcuggccacugcaca

SEQ ID NO: 2218260 - RNA, 23 nt, Human
ccuauggcuggccacugcacaga

SEQ ID NO: 2218261 - RNA, 18 nt, Human
ccuauggcuggccacugc

SEQ ID NO: 2218262 - RNA, 19 nt, Human
ccuauggcuggccacugca

SEQ ID NO: 2218263 - RNA, 18 nt, Human
ccuaucaccuccccuccu

SEQ ID NO: 2218264 - RNA, 17 nt, Human
ccuaucaccuccccucc

SEQ ID NO: 2218265 - RNA, 20 nt, Human
ccuaucagaguugcugcaaa

SEQ ID NO: 2218266 - RNA, 17 nt, Human
ccuaucagaaguuucuc

SEQ ID NO: 2218267 - RNA, 21 nt, Human
ccuaucagccugucucuucca

SEQ ID NO: 2218268 - RNA, 12 nt, Human
ccuaucagugug

SEQ ID NO: 2218269 - RNA, 16 nt, Human
ccuaucagugugcccc

SEQ ID NO: 2218270 - RNA, 17 nt, Human
ccuaucagugugccccc

SEQ ID NO: 2218271 - RNA, 18 nt, Human
ccuaucagugugcccccc

SEQ ID NO: 2218272 - RNA, 20 nt, Human
ccuaucagugugccccccau

SEQ ID NO: 2218273 - RNA, 22 nt, Human
ccuaucagugugccccccaucc

SEQ ID NO: 2218274 - RNA, 24 nt, Human
ccuaucagugugccccccauccug

SEQ ID NO: 2218275 - RNA, 15 nt, Human
ccucacaggccccag

SEQ ID NO: 2218276 - RNA, 17 nt, Human
ccucacaguccuuacca

SEQ ID NO: 2218277 - RNA, 22 nt, Human
ccucaaugugaaucagacccua

SEQ ID NO: 2218278 - RNA, 14 nt, Human
ccucaaugugacca

SEQ ID NO: 2218279 - RNA, 21 nt, Human
ccucaaugugaaucagacccu

SEQ ID NO: 2218280 - RNA, 20 nt, Human
ccucaaugugaaucagaccc

SEQ ID NO: 2218281 - RNA, 20 nt, Human
ccucaauucccccuggccac

SEQ ID NO: 2218282 - RNA, 16 nt, Human
ccucaaugugaccagg

SEQ ID NO: 2218283 - RNA, 22 nt, Human
ccuaugguauaaugguugacug

SEQ ID NO: 2218284 - RNA, 18 nt, Human
ccuaugggagucaagugu

SEQ ID NO: 2218285 - RNA, 18 nt, Human
ccuauguaguccgugcug

SEQ ID NO: 2218286 - RNA, 16 nt, Human
ccuauguaguccgugc

SEQ ID NO: 2218287 - RNA, 18 nt, Human
ccuaugucauuucauuuc

SEQ ID NO: 2218288 - RNA, 14 nt, Human
ccuauguauuugca

SEQ ID NO: 2218289 - RNA, 14 nt, Human
ccuauguccuaagg

SEQ ID NO: 2218290 - RNA, 15 nt, Human
ccuauguccuaagga

SEQ ID NO: 2218291 - RNA, 19 nt, Human
ccuauguccuaaggacaca

SEQ ID NO: 2218292 - RNA, 20 nt, Human
ccuauguccuaaggacacac

SEQ ID NO: 2218293 - RNA, 21 nt, Human
ccuauguccuaaggacacacu

SEQ ID NO: 2218294 - RNA, 22 nt, Human
ccuauguccuaaggacacacua

SEQ ID NO: 2218295 - RNA, 23 nt, Human
ccuauguccuaaggacacacuaa

SEQ ID NO: 2218296 - RNA, 20 nt, Human
ccuaugugauuuuaacucug

SEQ ID NO: 2218297 - RNA, 15 nt, Human
ccucaauaagccuug

SEQ ID NO: 2218298 - RNA, 17 nt, Human
ccuaugugauuuuaacu

SEQ ID NO: 2218299 - RNA, 24 nt, Human
ccuauguccuaaggacacacuaau

SEQ ID NO: 2218300 - RNA, 18 nt, Human
ccucaauccagcuauguu

SEQ ID NO: 2218301 - RNA, 23 nt, Human
ccucaaugccaguaacgcgucuu

SEQ ID NO: 2218302 - RNA, 13 nt, Human
ccucaauccagcu

SEQ ID NO: 2218303 - RNA, 16 nt, Human
ccucaauaagccuugu

SEQ ID NO: 2218304 - RNA, 18 nt, Human
ccucaauaagccuugucg

SEQ ID NO: 2218305 - RNA, 14 nt, Human
ccucaccugggcac

SEQ ID NO: 2218306 - RNA, 16 nt, Human
ccucaccugagagcca

SEQ ID NO: 2218307 - RNA, 22 nt, Human
ccucaccucuggacuggcuaga

SEQ ID NO: 2218308 - RNA, 20 nt, Human
ccucaccucuggacuggcua

SEQ ID NO: 2218309 - RNA, 18 nt, Human
ccucaccucuggacuggc

SEQ ID NO: 2218310 - RNA, 13 nt, Human
ccucaccucugga

SEQ ID NO: 2218311 - RNA, 12 nt, Human
ccucaccucugg

SEQ ID NO: 2218312 - RNA, 14 nt, Human
ccucaccuccucua

SEQ ID NO: 2218313 - RNA, 21 nt, Human
ccucacccgaggcugcccacu

SEQ ID NO: 2218314 - RNA, 19 nt, Human
ccucacccgaggcugccca

SEQ ID NO: 2218315 - RNA, 21 nt, Human
ccucaccccuguccucacugc

SEQ ID NO: 2218316 - RNA, 22 nt, Human
ccucaccccuguccucacugcu

SEQ ID NO: 2218317 - RNA, 18 nt, Human
ccucaccccugcccuggg

SEQ ID NO: 2218318 - RNA, 15 nt, Human
ccucaccccuguccu

SEQ ID NO: 2218319 - RNA, 19 nt, Human
ccucaccccuguccucacu

SEQ ID NO: 2218320 - RNA, 20 nt, Human
ccucaccccuguccucacug

SEQ ID NO: 2218321 - RNA, 20 nt, Human
ccucaccccugguucucauc

SEQ ID NO: 2218322 - RNA, 21 nt, Human
ccucaccccugguucucaucu

SEQ ID NO: 2218323 - RNA, 22 nt, Human
ccucaccccugguucucaucuu

SEQ ID NO: 2218324 - RNA, 23 nt, Human
ccucaccccugguucucaucuuu

SEQ ID NO: 2218325 - RNA, 18 nt, Human
ccucaccuugcaacacac

SEQ ID NO: 2218326 - RNA, 17 nt, Human
ccucaccuugcaacaca

SEQ ID NO: 2218327 - RNA, 22 nt, Human
ccucaccugggcaccuggggag

SEQ ID NO: 2218328 - RNA, 19 nt, Human
ccucaccugggcaccuggg

SEQ ID NO: 2218329 - RNA, 18 nt, Human
ccucaccugggcaccugg

SEQ ID NO: 2218330 - RNA, 15 nt, Human
ccucaccuguagcag

SEQ ID NO: 2218331 - RNA, 21 nt, Human
ccucaccuugcaacacacaga

SEQ ID NO: 2218332 - RNA, 19 nt, Human
ccucaccuugcaacacaca

SEQ ID NO: 2218333 - RNA, 15 nt, Human
ccucaccuuggcacc

SEQ ID NO: 2218334 - RNA, 21 nt, Human
ccucaccuuggcaccagacac

SEQ ID NO: 2218335 - RNA, 16 nt, Human
ccucaccuuggcacca

SEQ ID NO: 2218336 - RNA, 17 nt, Human
ccucaccuuucccaucu

SEQ ID NO: 2218337 - RNA, 17 nt, Human
ccucacgcaccucccau

SEQ ID NO: 2218338 - RNA, 22 nt, Human
ccucaccuugcaacacacagac

SEQ ID NO: 2218339 - RNA, 19 nt, Human
ccucaccuuuucccgggga

SEQ ID NO: 2218340 - RNA, 14 nt, Human
ccucacgcaccucc

SEQ ID NO: 2218341 - RNA, 21 nt, Human
ccucacggugccuuuuuucac

SEQ ID NO: 2218342 - RNA, 12 nt, Human
ccucaccccacu

SEQ ID NO: 2218343 - RNA, 20 nt, Human
ccucacaguccuuaccagca

SEQ ID NO: 2218344 - RNA, 22 nt, Human
ccucacaguccuuaccagcaga

SEQ ID NO: 2218345 - RNA, 16 nt, Human
ccucaccccgucuggg

SEQ ID NO: 2218346 - RNA, 24 nt, Human
ccucaccccacuuaucccucucca

SEQ ID NO: 2218347 - RNA, 15 nt, Human
ccucacccccucggg

SEQ ID NO: 2218348 - RNA, 14 nt, Human
ccucaccccugccc

SEQ ID NO: 2218349 - RNA, 13 nt, Human
ccucaccccugcc

SEQ ID NO: 2218350 - RNA, 17 nt, Human
ccucaccccgucugggg

SEQ ID NO: 2218351 - RNA, 17 nt, Human
ccucaccccugcccugg

SEQ ID NO: 2218352 - RNA, 16 nt, Human
ccucaccccugcccug

SEQ ID NO: 2218353 - RNA, 15 nt, Human
ccucaccccugguuc

SEQ ID NO: 2218354 - RNA, 15 nt, Human
ccucaccccacugug

SEQ ID NO: 2218355 - RNA, 19 nt, Human
ccucacccccagcuuugcu

SEQ ID NO: 2218356 - RNA, 17 nt, Human
ccucacccccagcuuug

SEQ ID NO: 2218357 - RNA, 23 nt, Human
ccucacccacuuuggccuccguu

SEQ ID NO: 2218358 - RNA, 22 nt, Human
ccucaccccacuuaucccucuc

SEQ ID NO: 2218359 - RNA, 17 nt, Human
ccuagagggaggggccu

SEQ ID NO: 2218360 - RNA, 21 nt, Human
ccuaaaccaaaaacugaaagu

SEQ ID NO: 2218361 - RNA, 12 nt, Human
ccuaaaacaaau

SEQ ID NO: 2218362 - RNA, 14 nt, Human
ccuaaaaacacaga

SEQ ID NO: 2218363 - RNA, 18 nt, Human
ccuaaaaaagauauauua

SEQ ID NO: 2218364 - RNA, 13 nt, Human
ccuaaaacaaaag

SEQ ID NO: 2218365 - RNA, 22 nt, Human
ccguuugagaagaaaacaucua

SEQ ID NO: 2218366 - RNA, 23 nt, Human
ccguuuccuuucauuuacugugg

SEQ ID NO: 2218367 - RNA, 13 nt, Human
ccguuucuucccu

SEQ ID NO: 2218368 - RNA, 15 nt, Human
ccguuucuucccugu

SEQ ID NO: 2218369 - RNA, 12 nt, Human
ccuaaaaaagau

SEQ ID NO: 2218370 - RNA, 14 nt, Human
ccuaaaaaagauau

SEQ ID NO: 2218371 - RNA, 23 nt, Human
ccguuucauuuagucaugugacc

SEQ ID NO: 2218372 - RNA, 17 nt, Human
ccguggggccgccgccu

SEQ ID NO: 2218373 - RNA, 20 nt, Human
ccguuguuuacuuaaagauu

SEQ ID NO: 2218374 - RNA, 12 nt, Human
ccgugggcgggg

SEQ ID NO: 2218375 - RNA, 18 nt, Human
ccgugggcggggccuugc

SEQ ID NO: 2218376 - RNA, 19 nt, Human
ccgugggcggggccuugcg

SEQ ID NO: 2218377 - RNA, 14 nt, Human
ccgugggcucccug

SEQ ID NO: 2218378 - RNA, 15 nt, Human
ccguggcuucccgcu

SEQ ID NO: 2218379 - RNA, 21 nt, Human
ccguggcuucccgcucagccc

SEQ ID NO: 2218380 - RNA, 13 nt, Human
ccgugggccuggg

SEQ ID NO: 2218381 - RNA, 23 nt, Human
ccguggcuucccgcucagcccuc

SEQ ID NO: 2218382 - RNA, 20 nt, Human
ccgggcacucagaagacacu

SEQ ID NO: 2218383 - RNA, 19 nt, Human
ccgggccuggagaacuaga

SEQ ID NO: 2218384 - RNA, 18 nt, Human
ccgggcccucccuuggaa

SEQ ID NO: 2218385 - RNA, 15 nt, Human
ccgggcccugaguaa

SEQ ID NO: 2218386 - RNA, 23 nt, Human
ccgggccgaauccccucccuguc

SEQ ID NO: 2218387 - RNA, 13 nt, Human
ccgggccuggggc

SEQ ID NO: 2218388 - RNA, 14 nt, Human
ccgggccccugggc

SEQ ID NO: 2218389 - RNA, 16 nt, Human
ccgggccccugggcuu

SEQ ID NO: 2218390 - RNA, 19 nt, Human
ccgggccccugggcuuggc

SEQ ID NO: 2218391 - RNA, 21 nt, Human
ccgggccccugggcuuggccu

SEQ ID NO: 2218392 - RNA, 23 nt, Human
ccgggccccugggcuuggccugc

SEQ ID NO: 2218393 - RNA, 13 nt, Human
ccgggcccucccu

SEQ ID NO: 2218394 - RNA, 14 nt, Human
ccgggcccucccuu

SEQ ID NO: 2218395 - RNA, 17 nt, Human
ccgggcccucccuugga

SEQ ID NO: 2218396 - RNA, 14 nt, Human
ccgugccuucagcu

SEQ ID NO: 2218397 - RNA, 15 nt, Human
ccgugccuucagcuc

SEQ ID NO: 2218398 - RNA, 14 nt, Human
ccgugccuccacca

SEQ ID NO: 2218399 - RNA, 15 nt, Human
ccgggcgcggccagc

SEQ ID NO: 2218400 - RNA, 17 nt, Human
ccgggcgcggccagccc

SEQ ID NO: 2218401 - RNA, 19 nt, Human
ccgggcgcggccagccccg

SEQ ID NO: 2218402 - RNA, 16 nt, Human
ccgugccuucagcucu

SEQ ID NO: 2218403 - RNA, 17 nt, Human
ccgugccuucagcucua

SEQ ID NO: 2218404 - RNA, 23 nt, Human
ccgugccuccaccaccacuggcc

SEQ ID NO: 2218405 - RNA, 17 nt, Human
ccgugccuccaccacca

SEQ ID NO: 2218406 - RNA, 22 nt, Human
ccgugccuccaccaccacuggc

SEQ ID NO: 2218407 - RNA, 19 nt, Human
ccuaaaguagacuucauuu

SEQ ID NO: 2218408 - RNA, 13 nt, Human
ccuaauuccacag

SEQ ID NO: 2218409 - RNA, 12 nt, Human
ccuaaagagaua

SEQ ID NO: 2218410 - RNA, 11 nt, Human
ccuaaacugua

SEQ ID NO: 2218411 - RNA, 18 nt, Human
ccuaaaacaaaagcucau

SEQ ID NO: 2218412 - RNA, 14 nt, Human
ccuaaacuaucuuu

SEQ ID NO: 2218413 - RNA, 12 nt, Human
ccuaaagaaaaa

SEQ ID NO: 2218414 - RNA, 11 nt, Human
ccuaccccacc

SEQ ID NO: 2218415 - RNA, 23 nt, Human
ccuaccccacaccaggccguccu

SEQ ID NO: 2218416 - RNA, 20 nt, Human
ccuaccccacaccaggccgu

SEQ ID NO: 2218417 - RNA, 21 nt, Human
ccuaccccacaccaggccguc

SEQ ID NO: 2218418 - RNA, 13 nt, Human
ccuaccccacacc

SEQ ID NO: 2218419 - RNA, 18 nt, Human
ccuaccccacaccaggcc

SEQ ID NO: 2218420 - RNA, 19 nt, Human
ccuaccccacaccaggccg

SEQ ID NO: 2218421 - RNA, 14 nt, Human
ccuaauuucuccuc

SEQ ID NO: 2218422 - RNA, 15 nt, Human
ccuaauuucuccucc

SEQ ID NO: 2218423 - RNA, 16 nt, Human
ccuaauuucuccuccc

SEQ ID NO: 2218424 - RNA, 17 nt, Human
ccuaauuucuccucccu

SEQ ID NO: 2218425 - RNA, 18 nt, Human
ccuaauuucuccucccuu

SEQ ID NO: 2218426 - RNA, 17 nt, Human
ccuaauuccacagcugc

SEQ ID NO: 2218427 - RNA, 16 nt, Human
ccuaauuccacagcug

SEQ ID NO: 2218428 - RNA, 15 nt, Human
ccuaauuccacagcu

SEQ ID NO: 2218429 - RNA, 14 nt, Human
ccuaauuccacagc

SEQ ID NO: 2218430 - RNA, 13 nt, Human
ccuaccccaccac

SEQ ID NO: 2218431 - RNA, 19 nt, Human
ccuacccccuccucucugc

SEQ ID NO: 2218432 - RNA, 20 nt, Human
ccuaccccgcagacaccuug

SEQ ID NO: 2218433 - RNA, 14 nt, Human
ccuaccccaccacg

SEQ ID NO: 2218434 - RNA, 17 nt, Human
ccuacccccuccucucu

SEQ ID NO: 2218435 - RNA, 21 nt, Human
ccuaccccgcagacaccuugg

SEQ ID NO: 2218436 - RNA, 14 nt, Human
ccuaccccucccag

SEQ ID NO: 2218437 - RNA, 15 nt, Human
ccuaccccucccagc

SEQ ID NO: 2218438 - RNA, 16 nt, Human
ccuaccccucccagcu

SEQ ID NO: 2218439 - RNA, 17 nt, Human
ccuaccccucccagcug

SEQ ID NO: 2218440 - RNA, 18 nt, Human
ccuaccccucccagcuga

SEQ ID NO: 2218441 - RNA, 21 nt, Human
ccuaccccucccagcugacag

SEQ ID NO: 2218442 - RNA, 14 nt, Human
ccuacccucgggcc

SEQ ID NO: 2218443 - RNA, 18 nt, Human
ccuacccucgggcccacc

SEQ ID NO: 2218444 - RNA, 22 nt, Human
ccuaccucagguugcugguugc

SEQ ID NO: 2218445 - RNA, 23 nt, Human
ccuaccucagguugcugguugcu

SEQ ID NO: 2218446 - RNA, 19 nt, Human
ccuacccucgggcccaccu

SEQ ID NO: 2218447 - RNA, 23 nt, Human
ccuacccucgggcccaccuggcc

SEQ ID NO: 2218448 - RNA, 14 nt, Human
ccuaccucagguug

SEQ ID NO: 2218449 - RNA, 19 nt, Human
ccuaccucagguugcuggu

SEQ ID NO: 2218450 - RNA, 19 nt, Human
ccuaccuucauuucaggag

SEQ ID NO: 2218451 - RNA, 23 nt, Human
ccuaccuguucagugucccgggc

SEQ ID NO: 2218452 - RNA, 16 nt, Human
ccuaccugcucuccaa

SEQ ID NO: 2218453 - RNA, 13 nt, Human
ccuaccuguucag

SEQ ID NO: 2218454 - RNA, 17 nt, Human
ccuaccuguucaguguc

SEQ ID NO: 2218455 - RNA, 22 nt, Human
ccuaccuguucagugucccggg

SEQ ID NO: 2218456 - RNA, 20 nt, Human
ccuagagaacgcagcccuag

SEQ ID NO: 2218457 - RNA, 13 nt, Human
ccuacgcugaaga

SEQ ID NO: 2218458 - RNA, 17 nt, Human
ccuagagaacgcagccc

SEQ ID NO: 2218459 - RNA, 18 nt, Human
ccuagagaacgcagcccu

SEQ ID NO: 2218460 - RNA, 19 nt, Human
ccuagagaacgcagcccua

SEQ ID NO: 2218461 - RNA, 21 nt, Human
ccuaccugauuggugcaaccc

SEQ ID NO: 2218462 - RNA, 12 nt, Human
ccuaccugguaa

SEQ ID NO: 2218463 - RNA, 16 nt, Human
ccuaccugugccugac

SEQ ID NO: 2218464 - RNA, 15 nt, Human
ccuaccugugccuga

SEQ ID NO: 2218465 - RNA, 14 nt, Human
ccuaccugugccug

SEQ ID NO: 2218466 - RNA, 12 nt, Human
ccuaccugcucu

SEQ ID NO: 2218467 - RNA, 13 nt, Human
ccuaccugcucuc

SEQ ID NO: 2218468 - RNA, 19 nt, Human
ccggaauccuguccucagc

SEQ ID NO: 2218469 - RNA, 22 nt, Human
ccggaagccaaaccucugugag

SEQ ID NO: 2218470 - RNA, 20 nt, Human
ccggaauccuguccucagcu

SEQ ID NO: 2218471 - RNA, 22 nt, Human
ccggaauccuguccucagcuuc

SEQ ID NO: 2218472 - RNA, 18 nt, Human
ccgcuuggagcagagggg

SEQ ID NO: 2218473 - RNA, 17 nt, Human
ccgcuuggagcagaggg

SEQ ID NO: 2218474 - RNA, 11 nt, Human
ccggaagccaa

SEQ ID NO: 2218475 - RNA, 23 nt, Human
ccgcuuucuacccagcgagcccu

SEQ ID NO: 2218476 - RNA, 15 nt, Human
ccgcuuggagcagag

SEQ ID NO: 2218477 - RNA, 21 nt, Human
ccgcuugccucggcuccugcu

SEQ ID NO: 2218478 - RNA, 22 nt, Human
ccgcuugccucggcuccugcug

SEQ ID NO: 2218479 - RNA, 13 nt, Human
ccgcuugccucgg

SEQ ID NO: 2218480 - RNA, 14 nt, Human
ccgcuugccucggc

SEQ ID NO: 2218481 - RNA, 18 nt, Human
ccgcuugccucggcuccu

SEQ ID NO: 2218482 - RNA, 20 nt, Human
ccgcuugccucggcuccugc

SEQ ID NO: 2218483 - RNA, 21 nt, Human
ccgcccuugccgaaccaggag

SEQ ID NO: 2218484 - RNA, 15 nt, Human
ccgccgacuuuguac

SEQ ID NO: 2218485 - RNA, 18 nt, Human
ccgcccugcuccucccug

SEQ ID NO: 2218486 - RNA, 19 nt, Human
ccgcccugcuccucccugg

SEQ ID NO: 2218487 - RNA, 21 nt, Human
ccgcccugcuccucccuggcu

SEQ ID NO: 2218488 - RNA, 22 nt, Human
ccgcccugcuccucccuggcug

SEQ ID NO: 2218489 - RNA, 13 nt, Human
ccgcccugccacu

SEQ ID NO: 2218490 - RNA, 14 nt, Human
ccgcccugccacuc

SEQ ID NO: 2218491 - RNA, 15 nt, Human
ccgcccugccacuca

SEQ ID NO: 2218492 - RNA, 14 nt, Human
ccgcccugcuccuc

SEQ ID NO: 2218493 - RNA, 15 nt, Human
ccgcccugcuccucc

SEQ ID NO: 2218494 - RNA, 16 nt, Human
ccgcuguucacccaca

SEQ ID NO: 2218495 - RNA, 15 nt, Human
ccgcuguucacccac

SEQ ID NO: 2218496 - RNA, 14 nt, Human
ccgcuguucaccca

SEQ ID NO: 2218497 - RNA, 20 nt, Human
ccgcugugagccccuggucc

SEQ ID NO: 2218498 - RNA, 15 nt, Human
ccgcugugagccccu

SEQ ID NO: 2218499 - RNA, 18 nt, Human
ccgcugugagccccuggu

SEQ ID NO: 2218500 - RNA, 19 nt, Human
ccgcugugagccccugguc

SEQ ID NO: 2218501 - RNA, 21 nt, Human
ccgcuguucacccacagggcu

SEQ ID NO: 2218502 - RNA, 19 nt, Human
ccgcuguucacccacaggg

SEQ ID NO: 2218503 - RNA, 18 nt, Human
ccgcuguucacccacagg

SEQ ID NO: 2218504 - RNA, 15 nt, Human
ccgcuucugccugca

SEQ ID NO: 2218505 - RNA, 15 nt, Human
ccgggcacucagaag

SEQ ID NO: 2218506 - RNA, 12 nt, Human
ccggcuggaaau

SEQ ID NO: 2218507 - RNA, 15 nt, Human
ccgggaggggcccgc

SEQ ID NO: 2218508 - RNA, 16 nt, Human
ccgggaggggcccgcu

SEQ ID NO: 2218509 - RNA, 22 nt, Human
ccgggaggggcccgcuugccuc

SEQ ID NO: 2218510 - RNA, 22 nt, Human
ccgggagggugcggcugugcag

SEQ ID NO: 2218511 - RNA, 19 nt, Human
ccgggauauauauucucuc

SEQ ID NO: 2218512 - RNA, 13 nt, Human
ccggcuggccugg

SEQ ID NO: 2218513 - RNA, 22 nt, Human
ccgggaggcagagguugcagug

SEQ ID NO: 2218514 - RNA, 14 nt, Human
ccggcucuuuccuu

SEQ ID NO: 2218515 - RNA, 15 nt, Human
ccggcugcagaggcc

SEQ ID NO: 2218516 - RNA, 16 nt, Human
ccggacacuccuagag

SEQ ID NO: 2218517 - RNA, 17 nt, Human
ccggacacuccuagaga

SEQ ID NO: 2218518 - RNA, 22 nt, Human
ccggcugcuuuucccuaagcca

SEQ ID NO: 2218519 - RNA, 17 nt, Human
ccggcucuuuccuugcu

SEQ ID NO: 2218520 - RNA, 12 nt, Human
ccggcugcccuu

SEQ ID NO: 2218521 - RNA, 12 nt, Human
ccggcuggccug

SEQ ID NO: 2218522 - RNA, 19 nt, Human
ccgccgacuuuguaccccc

SEQ ID NO: 2218523 - RNA, 20 nt, Human
ccguggggccgccgccucuu

SEQ ID NO: 2218524 - RNA, 21 nt, Human
cccuuuugcggaugggagggg

SEQ ID NO: 2218525 - RNA, 18 nt, Human
cccuuuucuuuucuaccc

SEQ ID NO: 2218526 - RNA, 23 nt, Human
cccuuuucuuuucuacccuagcc

SEQ ID NO: 2218527 - RNA, 20 nt, Human
cccuuuuggcccccgagcug

SEQ ID NO: 2218528 - RNA, 14 nt, Human
cccuuuuggccccc

SEQ ID NO: 2218529 - RNA, 22 nt, Human
cccuuuuggcccccgagcuggg

SEQ ID NO: 2218530 - RNA, 13 nt, Human
cccuuuucuguuu

SEQ ID NO: 2218531 - RNA, 16 nt, Human
cccuuuucuacaguua

SEQ ID NO: 2218532 - RNA, 18 nt, Human
cccuuuucagcuucugcu

SEQ ID NO: 2218533 - RNA, 15 nt, Human
cccuuuucagcuucu

SEQ ID NO: 2218534 - RNA, 16 nt, Human
cccuuuucagcuucug

SEQ ID NO: 2218535 - RNA, 11 nt, Human
cccuuuuccuu

SEQ ID NO: 2218536 - RNA, 18 nt, Human
cccuuuuuacuccccuug

SEQ ID NO: 2218537 - RNA, 23 nt, Human
cccuuuuuccuuguccccacacu

SEQ ID NO: 2218538 - RNA, 15 nt, Human
cccuuuuucuccagc

SEQ ID NO: 2218539 - RNA, 16 nt, Human
cccuuuuuccuugucc

SEQ ID NO: 2218540 - RNA, 23 nt, Human
cccuuuuuacuccccuugagcug

SEQ ID NO: 2218541 - RNA, 16 nt, Human
cccuuuuuacuccccu

SEQ ID NO: 2218542 - RNA, 17 nt, Human
cccuuuuuuggcugcug

SEQ ID NO: 2218543 - RNA, 18 nt, Human
cccuuuuuuggcugcuga

SEQ ID NO: 2218544 - RNA, 19 nt, Human
ccgagaagcaagaaagaaa

SEQ ID NO: 2218545 - RNA, 14 nt, Human
ccgagaagccagug

SEQ ID NO: 2218546 - RNA, 23 nt, Human
ccgagagagcaccccucucugca

SEQ ID NO: 2218547 - RNA, 18 nt, Human
ccgagauagccaaggcca

SEQ ID NO: 2218548 - RNA, 17 nt, Human
ccgagaaggaagccucc

SEQ ID NO: 2218549 - RNA, 19 nt, Human
ccgagauagccaaggccaa

SEQ ID NO: 2218550 - RNA, 22 nt, Human
ccgagauagccaaggccaaagg

SEQ ID NO: 2218551 - RNA, 13 nt, Human
ccgagaagcaaga

SEQ ID NO: 2218552 - RNA, 22 nt, Human
ccgacuuuguaccccccaaccc

SEQ ID NO: 2218553 - RNA, 16 nt, Human
ccgacuugcuguuuug

SEQ ID NO: 2218554 - RNA, 23 nt, Human
ccgacuugcuguuuuguucugug

SEQ ID NO: 2218555 - RNA, 21 nt, Human
ccgacuugaauuuucccacug

SEQ ID NO: 2218556 - RNA, 22 nt, Human
ccgacuugaauuuucccacugc

SEQ ID NO: 2218557 - RNA, 23 nt, Human
ccgacuugaauuuucccacugca

SEQ ID NO: 2218558 - RNA, 19 nt, Human
cccuuuuuuggcugcugaa

SEQ ID NO: 2218559 - RNA, 15 nt, Human
cccuuuuugaagugu

SEQ ID NO: 2218560 - RNA, 20 nt, Human
ccgacuugaauuuucccacu

SEQ ID NO: 2218561 - RNA, 16 nt, Human
cccuuuuucuccagcu

SEQ ID NO: 2218562 - RNA, 23 nt, Human
cccuuuuugaaguguaggcagac

SEQ ID NO: 2218563 - RNA, 14 nt, Human
ccgaggcuggagcu

SEQ ID NO: 2218564 - RNA, 20 nt, Human
ccgagcucguguauccuggg

SEQ ID NO: 2218565 - RNA, 21 nt, Human
ccgagcucguguauccugggg

SEQ ID NO: 2218566 - RNA, 17 nt, Human
ccgaggcuggagcuggc

SEQ ID NO: 2218567 - RNA, 18 nt, Human
ccgagggaugaugccaca

SEQ ID NO: 2218568 - RNA, 16 nt, Human
ccgagggaugaugcca

SEQ ID NO: 2218569 - RNA, 19 nt, Human
ccgagggaugaugccacac

SEQ ID NO: 2218570 - RNA, 20 nt, Human
ccgagggaugaugccacacc

SEQ ID NO: 2218571 - RNA, 15 nt, Human
ccgagggcgaccccg

SEQ ID NO: 2218572 - RNA, 16 nt, Human
ccgagggcgaccccgu

SEQ ID NO: 2218573 - RNA, 17 nt, Human
ccgaggccuucucugaa

SEQ ID NO: 2218574 - RNA, 19 nt, Human
ccgagcucguguauccugg

SEQ ID NO: 2218575 - RNA, 19 nt, Human
ccgagccuggcuccaaacc

SEQ ID NO: 2218576 - RNA, 19 nt, Human
ccgagcgcuuucuggaaaa

SEQ ID NO: 2218577 - RNA, 21 nt, Human
ccgagccucugucacugcagg

SEQ ID NO: 2218578 - RNA, 18 nt, Human
ccgagcgcuuucuggaaa

SEQ ID NO: 2218579 - RNA, 16 nt, Human
ccgagccgggccuggg

SEQ ID NO: 2218580 - RNA, 19 nt, Human
ccgagccgggccuggggcu

SEQ ID NO: 2218581 - RNA, 16 nt, Human
ccgagccuggcuccaa

SEQ ID NO: 2218582 - RNA, 21 nt, Human
ccgagcaaagaucaaaauaaa

SEQ ID NO: 2218583 - RNA, 23 nt, Human
ccgagcaaagaucaaaauaaaaa

SEQ ID NO: 2218584 - RNA, 18 nt, Human
ccgagcaaagucuaaagu

SEQ ID NO: 2218585 - RNA, 20 nt, Human
ccgagcaaagucuaaaguuu

SEQ ID NO: 2218586 - RNA, 18 nt, Human
ccgagaucacgccacugc

SEQ ID NO: 2218587 - RNA, 19 nt, Human
ccgccccuuccccgaggga

SEQ ID NO: 2218588 - RNA, 17 nt, Human
ccgccccuuccccgagg

SEQ ID NO: 2218589 - RNA, 11 nt, Human
ccgcccugcca

SEQ ID NO: 2218590 - RNA, 12 nt, Human
ccgcccugccac

SEQ ID NO: 2218591 - RNA, 15 nt, Human
ccgaugcuccagcca

SEQ ID NO: 2218592 - RNA, 14 nt, Human
ccgaugcuccagcc

SEQ ID NO: 2218593 - RNA, 14 nt, Human
ccgauccuuccucc

SEQ ID NO: 2218594 - RNA, 22 nt, Human
ccgaugcuccagccaaccccug

SEQ ID NO: 2218595 - RNA, 19 nt, Human
ccgaugcuccagccaaccc

SEQ ID NO: 2218596 - RNA, 11 nt, Human
ccgaugcugcu

SEQ ID NO: 2218597 - RNA, 13 nt, Human
ccgaugcugcuuu

SEQ ID NO: 2218598 - RNA, 14 nt, Human
ccgccccgccccac

SEQ ID NO: 2218599 - RNA, 17 nt, Human
ccgaugcugcuuucccc

SEQ ID NO: 2218600 - RNA, 21 nt, Human
ccgagucucuucuccacugga

SEQ ID NO: 2218601 - RNA, 16 nt, Human
ccgaggguccuggcuc

SEQ ID NO: 2218602 - RNA, 22 nt, Human
ccgagucucuucuccacuggau

SEQ ID NO: 2218603 - RNA, 13 nt, Human
ccgaggggcggga

SEQ ID NO: 2218604 - RNA, 23 nt, Human
ccgaggggcgggacccaggcacc

SEQ ID NO: 2218605 - RNA, 18 nt, Human
ccgaggggcucaggaaaa

SEQ ID NO: 2218606 - RNA, 16 nt, Human
ccgaggggcucaggaa

SEQ ID NO: 2218607 - RNA, 17 nt, Human
ccgagucugucucuguc

SEQ ID NO: 2218608 - RNA, 16 nt, Human
ccgagugaaccuaccu

SEQ ID NO: 2218609 - RNA, 14 nt, Human
ccgagucugucucu

SEQ ID NO: 2218610 - RNA, 15 nt, Human
ccgaguuuccccaga

SEQ ID NO: 2218611 - RNA, 13 nt, Human
ccgauccuuccuc

SEQ ID NO: 2218612 - RNA, 19 nt, Human
cccuuaccucggugccuuc

SEQ ID NO: 2218613 - RNA, 21 nt, Human
cccuuaccacugcucugauga

SEQ ID NO: 2218614 - RNA, 17 nt, Human
cccuuaccacugcucug

SEQ ID NO: 2218615 - RNA, 22 nt, Human
cccuuaccccuuagccucccug

SEQ ID NO: 2218616 - RNA, 20 nt, Human
cccuuccuacagauagucaa

SEQ ID NO: 2218617 - RNA, 17 nt, Human
cccuuaccccuuagccu

SEQ ID NO: 2218618 - RNA, 19 nt, Human
cccuuacagccucugacuu

SEQ ID NO: 2218619 - RNA, 20 nt, Human
cccuuaccaugugccugauc

SEQ ID NO: 2218620 - RNA, 13 nt, Human
cccuuccucucca

SEQ ID NO: 2218621 - RNA, 15 nt, Human
cccuuccucuccacc

SEQ ID NO: 2218622 - RNA, 16 nt, Human
cccuuccucuccacug

SEQ ID NO: 2218623 - RNA, 17 nt, Human
cccuuccucuccacugc

SEQ ID NO: 2218624 - RNA, 15 nt, Human
cccuugaugaagaag

SEQ ID NO: 2218625 - RNA, 20 nt, Human
cccuuccucuccacugccuu

SEQ ID NO: 2218626 - RNA, 17 nt, Human
cccuuccucuccacccu

SEQ ID NO: 2218627 - RNA, 18 nt, Human
cccuuccucuccacccuc

SEQ ID NO: 2218628 - RNA, 16 nt, Human
cccuugaugaagaagu

SEQ ID NO: 2218629 - RNA, 23 nt, Human
cccuugcaguucagcaccacccu

SEQ ID NO: 2218630 - RNA, 21 nt, Human
cccuugcaguucagcaccacc

SEQ ID NO: 2218631 - RNA, 13 nt, Human
cccuugccacccc

SEQ ID NO: 2218632 - RNA, 18 nt, Human
cccuugccaccccacccu

SEQ ID NO: 2218633 - RNA, 15 nt, Human
cccuugcccugaccu

SEQ ID NO: 2218634 - RNA, 16 nt, Human
cccuugcccugaccuc

SEQ ID NO: 2218635 - RNA, 19 nt, Human
cccuugcaguucagcacca

SEQ ID NO: 2218636 - RNA, 19 nt, Human
cccuugcagcuaguuuucu

SEQ ID NO: 2218637 - RNA, 16 nt, Human
cccuugcagcuaguuu

SEQ ID NO: 2218638 - RNA, 22 nt, Human
cccuugcacuaaaguauguaaa

SEQ ID NO: 2218639 - RNA, 17 nt, Human
cccuugccgucuaccug

SEQ ID NO: 2218640 - RNA, 18 nt, Human
cccuugccgucuaccuga

SEQ ID NO: 2218641 - RNA, 15 nt, Human
cccuuggcucaaucc

SEQ ID NO: 2218642 - RNA, 19 nt, Human
cccuuggccugucucaucc

SEQ ID NO: 2218643 - RNA, 22 nt, Human
cccuuggcugugaggccccugg

SEQ ID NO: 2218644 - RNA, 14 nt, Human
cccuuggcugugag

SEQ ID NO: 2218645 - RNA, 23 nt, Human
cccuuggcugugaggccccugga

SEQ ID NO: 2218646 - RNA, 22 nt, Human
cccuugccgucuaccugagggg

SEQ ID NO: 2218647 - RNA, 19 nt, Human
cccuugcccugaccuccca

SEQ ID NO: 2218648 - RNA, 20 nt, Human
cccuugcccugaccucccag

SEQ ID NO: 2218649 - RNA, 21 nt, Human
cccuugcccugaccucccagc

SEQ ID NO: 2218650 - RNA, 16 nt, Human
cccuugcccuugcccu

SEQ ID NO: 2218651 - RNA, 17 nt, Human
cccuugcccuugcccug

SEQ ID NO: 2218652 - RNA, 18 nt, Human
cccuugcccuugcccuga

SEQ ID NO: 2218653 - RNA, 21 nt, Human
cccuugcccuugcccugaccu

SEQ ID NO: 2218654 - RNA, 16 nt, Human
cccuuggccugucuca

SEQ ID NO: 2218655 - RNA, 13 nt, Human
cccuuuccugcgg

SEQ ID NO: 2218656 - RNA, 14 nt, Human
cccuuuccucaggc

SEQ ID NO: 2218657 - RNA, 21 nt, Human
cccuuuccuuccuucccuggc

SEQ ID NO: 2218658 - RNA, 18 nt, Human
cccuuuccuuccuucccu

SEQ ID NO: 2218659 - RNA, 18 nt, Human
cccuuuccuuccaucccu

SEQ ID NO: 2218660 - RNA, 15 nt, Human
cccuuuccuuccauc

SEQ ID NO: 2218661 - RNA, 13 nt, Human
cccuuuccuucca

SEQ ID NO: 2218662 - RNA, 23 nt, Human
cccuugugcgugggugaagccgc

SEQ ID NO: 2218663 - RNA, 15 nt, Human
cccuuggguucugau

SEQ ID NO: 2218664 - RNA, 20 nt, Human
cccuuguggucccaccccac

SEQ ID NO: 2218665 - RNA, 18 nt, Human
cccuuguggucccacccc

SEQ ID NO: 2218666 - RNA, 18 nt, Human
cccuuggggagcaggcuc

SEQ ID NO: 2218667 - RNA, 18 nt, Human
cccuugggcggcugagag

SEQ ID NO: 2218668 - RNA, 14 nt, Human
cccuugugguccca

SEQ ID NO: 2218669 - RNA, 16 nt, Human
cccuuguggucccacc

SEQ ID NO: 2218670 - RNA, 17 nt, Human
cccuuucuuggccaguu

SEQ ID NO: 2218671 - RNA, 15 nt, Human
cccuuucuuggccag

SEQ ID NO: 2218672 - RNA, 14 nt, Human
cccuuucuuggcca

SEQ ID NO: 2218673 - RNA, 20 nt, Human
cccuuugacgccaucccagc

SEQ ID NO: 2218674 - RNA, 22 nt, Human
cccuuucugggcaccggggccu

SEQ ID NO: 2218675 - RNA, 12 nt, Human
cccuuucugugu

SEQ ID NO: 2218676 - RNA, 14 nt, Human
cccuuucuggcucu

SEQ ID NO: 2218677 - RNA, 14 nt, Human
cccuuucuccccug

SEQ ID NO: 2218678 - RNA, 22 nt, Human
cccuuucuccccugcccccagg

SEQ ID NO: 2218679 - RNA, 20 nt, Human
cccuuugggaggcugaggcg

SEQ ID NO: 2218680 - RNA, 16 nt, Human
cccuuugggaggcuga

SEQ ID NO: 2218681 - RNA, 23 nt, Human
cccuuugcugugaggcuguccug

SEQ ID NO: 2218682 - RNA, 16 nt, Human
cccuuucuuggccagu

SEQ ID NO: 2218683 - RNA, 17 nt, Human
cccuuugcccagaaaga

SEQ ID NO: 2218684 - RNA, 14 nt, Human
cccuuugagugcag

SEQ ID NO: 2218685 - RNA, 12 nt, Human
cccuuugagugc

SEQ ID NO: 2218686 - RNA, 20 nt, Human
cccuuugguuuuuuucuucu

SEQ ID NO: 2218687 - RNA, 14 nt, Human
cccuuugugcugug

SEQ ID NO: 2218688 - RNA, 15 nt, Human
cccuuugugcugugg

SEQ ID NO: 2218689 - RNA, 18 nt, Human
cccuuugggcccagggac

SEQ ID NO: 2218690 - RNA, 14 nt, Human
cccuuugggcccag

SEQ ID NO: 2218691 - RNA, 15 nt, Human
cccuuugggcccagg

SEQ ID NO: 2218692 - RNA, 17 nt, Human
cccuuugggcccaggga

SEQ ID NO: 2218693 - RNA, 16 nt, Human
cccuuggguucugaua

SEQ ID NO: 2218694 - RNA, 17 nt, Human
ccccacugccugcccac

SEQ ID NO: 2218695 - RNA, 16 nt, Human
ccccacugccugccca

SEQ ID NO: 2218696 - RNA, 22 nt, Human
ccccacuggggaaauaacagcu

SEQ ID NO: 2218697 - RNA, 14 nt, Human
ccccacuggggaaa

SEQ ID NO: 2218698 - RNA, 15 nt, Human
ccccacugccugccc

SEQ ID NO: 2218699 - RNA, 12 nt, Human
ccccacugccug

SEQ ID NO: 2218700 - RNA, 16 nt, Human
ccccacugccuacugc

SEQ ID NO: 2218701 - RNA, 19 nt, Human
ccccacugccuacugcauc

SEQ ID NO: 2218702 - RNA, 18 nt, Human
ccccacugcaggccccgc

SEQ ID NO: 2218703 - RNA, 16 nt, Human
ccccacugcaggcccc

SEQ ID NO: 2218704 - RNA, 12 nt, Human
ccccacugcagg

SEQ ID NO: 2218705 - RNA, 15 nt, Human
ccccacugaccagaa

SEQ ID NO: 2218706 - RNA, 22 nt, Human
ccccaccccuuccccacugccu

SEQ ID NO: 2218707 - RNA, 18 nt, Human
ccccaccccuuccccacu

SEQ ID NO: 2218708 - RNA, 13 nt, Human
ccccaccccuugc

SEQ ID NO: 2218709 - RNA, 15 nt, Human
ccccaccccuugcuc

SEQ ID NO: 2218710 - RNA, 17 nt, Human
ccccaccccuuccccac

SEQ ID NO: 2218711 - RNA, 15 nt, Human
ccccaccccuucccc

SEQ ID NO: 2218712 - RNA, 13 nt, Human
ccccaccccuucc

SEQ ID NO: 2218713 - RNA, 20 nt, Human
ccccaccccugggggcucuc

SEQ ID NO: 2218714 - RNA, 12 nt, Human
ccccaccccugg

SEQ ID NO: 2218715 - RNA, 23 nt, Human
ccccaccccugcccccagccccg

SEQ ID NO: 2218716 - RNA, 19 nt, Human
ccccaccccugggggcucu

SEQ ID NO: 2218717 - RNA, 22 nt, Human
ccccaccccggggacccuguga

SEQ ID NO: 2218718 - RNA, 13 nt, Human
ccccaccccugcc

SEQ ID NO: 2218719 - RNA, 14 nt, Human
ccccaccccugccc

SEQ ID NO: 2218720 - RNA, 17 nt, Human
ccccaccccugccccca

SEQ ID NO: 2218721 - RNA, 15 nt, Human
ccccacugacagccu

SEQ ID NO: 2218722 - RNA, 13 nt, Human
ccccacucugugc

SEQ ID NO: 2218723 - RNA, 21 nt, Human
ccccacugacagccucccacc

SEQ ID NO: 2218724 - RNA, 14 nt, Human
ccccacugaccaga

SEQ ID NO: 2218725 - RNA, 18 nt, Human
ccccaccccuugcucuca

SEQ ID NO: 2218726 - RNA, 13 nt, Human
ccccacccucagc

SEQ ID NO: 2218727 - RNA, 12 nt, Human
ccccacucugug

SEQ ID NO: 2218728 - RNA, 15 nt, Human
ccccagccucccuga

SEQ ID NO: 2218729 - RNA, 14 nt, Human
ccccagccucuggc

SEQ ID NO: 2218730 - RNA, 15 nt, Human
ccccagccucuggca

SEQ ID NO: 2218731 - RNA, 21 nt, Human
ccccagccuaagaugaagagg

SEQ ID NO: 2218732 - RNA, 13 nt, Human
ccccagccucccu

SEQ ID NO: 2218733 - RNA, 19 nt, Human
ccccagccuaagaugaaga

SEQ ID NO: 2218734 - RNA, 16 nt, Human
ccccagccgcucggag

SEQ ID NO: 2218735 - RNA, 19 nt, Human
ccccagcgagagucccugc

SEQ ID NO: 2218736 - RNA, 12 nt, Human
ccccagccuucu

SEQ ID NO: 2218737 - RNA, 16 nt, Human
ccccagccucuggcau

SEQ ID NO: 2218738 - RNA, 18 nt, Human
ccccagcgucccagucuc

SEQ ID NO: 2218739 - RNA, 17 nt, Human
ccccagcuaagaaccug

SEQ ID NO: 2218740 - RNA, 21 nt, Human
ccccagcuaagaaccuggaac

SEQ ID NO: 2218741 - RNA, 19 nt, Human
ccccagcuaagaaccugga

SEQ ID NO: 2218742 - RNA, 12 nt, Human
ccccagcccugu

SEQ ID NO: 2218743 - RNA, 19 nt, Human
ccccagcccuggcucugca

SEQ ID NO: 2218744 - RNA, 13 nt, Human
ccccagcccuggc

SEQ ID NO: 2218745 - RNA, 16 nt, Human
ccccagcccuggcucu

SEQ ID NO: 2218746 - RNA, 14 nt, Human
ccccagcccugugg

SEQ ID NO: 2218747 - RNA, 13 nt, Human
ccccagcccugug

SEQ ID NO: 2218748 - RNA, 15 nt, Human
ccccagcccugugga

SEQ ID NO: 2218749 - RNA, 19 nt, Human
ccccagcccuccuuaucaa

SEQ ID NO: 2218750 - RNA, 14 nt, Human
ccccacuggugaca

SEQ ID NO: 2218751 - RNA, 12 nt, Human
ccccacugguga

SEQ ID NO: 2218752 - RNA, 13 nt, Human
ccccacuggugac

SEQ ID NO: 2218753 - RNA, 23 nt, Human
ccccaggcaggcugugcgcugac

SEQ ID NO: 2218754 - RNA, 12 nt, Human
ccccaggccagg

SEQ ID NO: 2218755 - RNA, 18 nt, Human
ccccaggcaggcugugcg

SEQ ID NO: 2218756 - RNA, 14 nt, Human
ccccaggcaggcug

SEQ ID NO: 2218757 - RNA, 13 nt, Human
ccccaggccaggc

SEQ ID NO: 2218758 - RNA, 15 nt, Human
ccccaggccaggcca

SEQ ID NO: 2218759 - RNA, 22 nt, Human
ccccaggccaggccaccaggau

SEQ ID NO: 2218760 - RNA, 11 nt, Human
ccccaggcagg

SEQ ID NO: 2218761 - RNA, 16 nt, Human
ccccaggaccagcuca

SEQ ID NO: 2218762 - RNA, 14 nt, Human
cccccaagccugca

SEQ ID NO: 2218763 - RNA, 13 nt, Human
cccccaagccugc

SEQ ID NO: 2218764 - RNA, 19 nt, Human
cccccaagcuguuuucuuc

SEQ ID NO: 2218765 - RNA, 14 nt, Human
cccccaaccccuga

SEQ ID NO: 2218766 - RNA, 16 nt, Human
cccccaaccccugagg

SEQ ID NO: 2218767 - RNA, 18 nt, Human
cccccaaccccugaggaa

SEQ ID NO: 2218768 - RNA, 23 nt, Human
cccccaaccaaguggcucccaca

SEQ ID NO: 2218769 - RNA, 14 nt, Human
cccccaaccccagc

SEQ ID NO: 2218770 - RNA, 22 nt, Human
cccccaacacugugcccuggug

SEQ ID NO: 2218771 - RNA, 23 nt, Human
cccccaacacugugcccuggugg

SEQ ID NO: 2218772 - RNA, 14 nt, Human
ccccaggaggccag

SEQ ID NO: 2218773 - RNA, 15 nt, Human
ccccaggaggccagc

SEQ ID NO: 2218774 - RNA, 21 nt, Human
ccccaggaggccagccuugac

SEQ ID NO: 2218775 - RNA, 22 nt, Human
ccccaggaggccagccuugacc

SEQ ID NO: 2218776 - RNA, 12 nt, Human
ccccagcucugg

SEQ ID NO: 2218777 - RNA, 13 nt, Human
ccccagcuccggc

SEQ ID NO: 2218778 - RNA, 14 nt, Human
ccccagcugugagc

SEQ ID NO: 2218779 - RNA, 15 nt, Human
ccccagcugugagcc

SEQ ID NO: 2218780 - RNA, 16 nt, Human
ccccagcugugagccu

SEQ ID NO: 2218781 - RNA, 19 nt, Human
ccccagcugugagccuugg

SEQ ID NO: 2218782 - RNA, 21 nt, Human
ccccagcugugagccuuggcu

SEQ ID NO: 2218783 - RNA, 23 nt, Human
ccccagcgucccagucucuggca

SEQ ID NO: 2218784 - RNA, 11 nt, Human
ccccagcuccg

SEQ ID NO: 2218785 - RNA, 11 nt, Human
ccccagcuacc

SEQ ID NO: 2218786 - RNA, 22 nt, Human
ccccagcuacccuuuuucucca

SEQ ID NO: 2218787 - RNA, 14 nt, Human
ccccagcucaaugg

SEQ ID NO: 2218788 - RNA, 23 nt, Human
ccccaggaagccgugcccugccc

SEQ ID NO: 2218789 - RNA, 12 nt, Human
ccccaggaagcc

SEQ ID NO: 2218790 - RNA, 11 nt, Human
ccccaggacca

SEQ ID NO: 2218791 - RNA, 13 nt, Human
ccccagcuuugcc

SEQ ID NO: 2218792 - RNA, 14 nt, Human
ccccagcuuugccc

SEQ ID NO: 2218793 - RNA, 24 nt, Human
ccccagcuuugcccaacaccagcc

SEQ ID NO: 2218794 - RNA, 13 nt, Human
ccccaggaggcca

SEQ ID NO: 2218795 - RNA, 15 nt, Human
ccccaggaccagcuc

SEQ ID NO: 2218796 - RNA, 13 nt, Human
ccccaggaccagc

SEQ ID NO: 2218797 - RNA, 12 nt, Human
cccccccuucca

SEQ ID NO: 2218798 - RNA, 13 nt, Human
cccccccuuccac

SEQ ID NO: 2218799 - RNA, 14 nt, Human
ccccccaugcacug

SEQ ID NO: 2218800 - RNA, 13 nt, Human
ccccccagcacug

SEQ ID NO: 2218801 - RNA, 14 nt, Human
ccccccagcacuga

SEQ ID NO: 2218802 - RNA, 12 nt, Human
ccccccagccuc

SEQ ID NO: 2218803 - RNA, 13 nt, Human
ccccccagccucu

SEQ ID NO: 2218804 - RNA, 11 nt, Human
ccccccacucu

SEQ ID NO: 2218805 - RNA, 13 nt, Human
ccccccaccccug

SEQ ID NO: 2218806 - RNA, 12 nt, Human
ccccccaccccu

SEQ ID NO: 2218807 - RNA, 14 nt, Human
cccccaugcacugu

SEQ ID NO: 2218808 - RNA, 18 nt, Human
ccccccagaaccuguccu

SEQ ID NO: 2218809 - RNA, 12 nt, Human
ccccccacugca

SEQ ID NO: 2218810 - RNA, 12 nt, Human
ccccccagcacu

SEQ ID NO: 2218811 - RNA, 12 nt, Human
ccccccacucuc

SEQ ID NO: 2218812 - RNA, 13 nt, Human
ccccccacucugu

SEQ ID NO: 2218813 - RNA, 16 nt, Human
cccccaggcugcugga

SEQ ID NO: 2218814 - RNA, 18 nt, Human
cccccagcuuugcccaac

SEQ ID NO: 2218815 - RNA, 17 nt, Human
cccccaggacugggcca

SEQ ID NO: 2218816 - RNA, 20 nt, Human
cccccaggggaaagaugagc

SEQ ID NO: 2218817 - RNA, 15 nt, Human
cccccaguccccacc

SEQ ID NO: 2218818 - RNA, 22 nt, Human
cccccauccccauccuccagcu

SEQ ID NO: 2218819 - RNA, 20 nt, Human
cccccaguccccaccccugc

SEQ ID NO: 2218820 - RNA, 22 nt, Human
cccccaguccccaccccugccc

SEQ ID NO: 2218821 - RNA, 19 nt, Human
cccccauccuccccuuccc

SEQ ID NO: 2218822 - RNA, 23 nt, Human
cccccauccccauccuccagcuu

SEQ ID NO: 2218823 - RNA, 13 nt, Human
cccccauccuggc

SEQ ID NO: 2218824 - RNA, 15 nt, Human
cccccauccuggccc

SEQ ID NO: 2218825 - RNA, 16 nt, Human
cccccaucucuucugg

SEQ ID NO: 2218826 - RNA, 18 nt, Human
cccccaugcacugugaag

SEQ ID NO: 2218827 - RNA, 17 nt, Human
cccccauccuggcccau

SEQ ID NO: 2218828 - RNA, 23 nt, Human
cccccaaggggcagucuggaggg

SEQ ID NO: 2218829 - RNA, 16 nt, Human
cccccaaggggcaguc

SEQ ID NO: 2218830 - RNA, 13 nt, Human
cccccaauccaug

SEQ ID NO: 2218831 - RNA, 11 nt, Human
cccccacacac

SEQ ID NO: 2218832 - RNA, 13 nt, Human
cccccagcacuga

SEQ ID NO: 2218833 - RNA, 19 nt, Human
cccccacacacacacacau

SEQ ID NO: 2218834 - RNA, 14 nt, Human
cccccacacacaca

SEQ ID NO: 2218835 - RNA, 12 nt, Human
cccccacacaca

SEQ ID NO: 2218836 - RNA, 15 nt, Human
cccccagcacugagg

SEQ ID NO: 2218837 - RNA, 17 nt, Human
cccccagcacugaggaa

SEQ ID NO: 2218838 - RNA, 18 nt, Human
cccccagcacugaggaag

SEQ ID NO: 2218839 - RNA, 13 nt, Human
cccccagcccagg

SEQ ID NO: 2218840 - RNA, 14 nt, Human
cccccagcccaggg

SEQ ID NO: 2218841 - RNA, 21 nt, Human
cccccagcccagggcuccugc

SEQ ID NO: 2218842 - RNA, 14 nt, Human
cccccagcuguggg

SEQ ID NO: 2218843 - RNA, 23 nt, Human
cccccagcuuugcuaccaaagca

SEQ ID NO: 2218844 - RNA, 11 nt, Human
cccccaggacu

SEQ ID NO: 2218845 - RNA, 12 nt, Human
cccccaggacug

SEQ ID NO: 2218846 - RNA, 13 nt, Human
cccccaggacugg

SEQ ID NO: 2218847 - RNA, 15 nt, Human
cccccaggacugggc

SEQ ID NO: 2218848 - RNA, 11 nt, Human
cccccagcugu

SEQ ID NO: 2218849 - RNA, 13 nt, Human
cccccagcccugu

SEQ ID NO: 2218850 - RNA, 14 nt, Human
cccccagcccugug

SEQ ID NO: 2218851 - RNA, 12 nt, Human
cccccagcccug

SEQ ID NO: 2218852 - RNA, 13 nt, Human
cccccagccccgg

SEQ ID NO: 2218853 - RNA, 12 nt, Human
cccccagcccca

SEQ ID NO: 2218854 - RNA, 13 nt, Human
cccccugcccucc

SEQ ID NO: 2218855 - RNA, 12 nt, Human
cccccugcccuc

SEQ ID NO: 2218856 - RNA, 13 nt, Human
cccccucugccgc

SEQ ID NO: 2218857 - RNA, 16 nt, Human
cccccugcccucgugg

SEQ ID NO: 2218858 - RNA, 19 nt, Human
cccccugcccucguggcca

SEQ ID NO: 2218859 - RNA, 20 nt, Human
cccccugcccucguggccag

SEQ ID NO: 2218860 - RNA, 12 nt, Human
cccccugcuggc

SEQ ID NO: 2218861 - RNA, 24 nt, Human
cccccugccggccggggcugagac

SEQ ID NO: 2218862 - RNA, 15 nt, Human
cccccugcuggcucu

SEQ ID NO: 2218863 - RNA, 22 nt, Human
cccccugcccucguggccagcc

SEQ ID NO: 2218864 - RNA, 12 nt, Human
cccccugcccug

SEQ ID NO: 2218865 - RNA, 13 nt, Human
cccccugcccugc

SEQ ID NO: 2218866 - RNA, 14 nt, Human
cccccugcccugca

SEQ ID NO: 2218867 - RNA, 16 nt, Human
cccccucugcccugcg

SEQ ID NO: 2218868 - RNA, 22 nt, Human
cccccugccccccagccucugg

SEQ ID NO: 2218869 - RNA, 14 nt, Human
cccccucugcccug

SEQ ID NO: 2218870 - RNA, 13 nt, Human
cccccucugcccu

SEQ ID NO: 2218871 - RNA, 16 nt, Human
ccccgucacagccuca

SEQ ID NO: 2218872 - RNA, 14 nt, Human
ccccgucacagccu

SEQ ID NO: 2218873 - RNA, 10 nt, Human
cccccugggc

SEQ ID NO: 2218874 - RNA, 22 nt, Human
cccccuggccucugugccuucu

SEQ ID NO: 2218875 - RNA, 19 nt, Human
cccccuggccucugugccu

SEQ ID NO: 2218876 - RNA, 15 nt, Human
cccccuggccucugu

SEQ ID NO: 2218877 - RNA, 18 nt, Human
cccccugcuggcucuucu

SEQ ID NO: 2218878 - RNA, 20 nt, Human
cccccugcuggcucuucugc

SEQ ID NO: 2218879 - RNA, 12 nt, Human
cccccuggagag

SEQ ID NO: 2218880 - RNA, 14 nt, Human
ccccgucucuacua

SEQ ID NO: 2218881 - RNA, 21 nt, Human
ccccgucaccaucucaggcca

SEQ ID NO: 2218882 - RNA, 21 nt, Human
ccccgucucugguuccucccc

SEQ ID NO: 2218883 - RNA, 20 nt, Human
ccccgucccccucuggcucc

SEQ ID NO: 2218884 - RNA, 16 nt, Human
ccccgucccccucugg

SEQ ID NO: 2218885 - RNA, 11 nt, Human
ccccccuucca

SEQ ID NO: 2218886 - RNA, 12 nt, Human
ccccccuuccac

SEQ ID NO: 2218887 - RNA, 13 nt, Human
ccccccuuccacu

SEQ ID NO: 2218888 - RNA, 15 nt, Human
cccccgagcuggggg

SEQ ID NO: 2218889 - RNA, 13 nt, Human
cccccgagcuggg

SEQ ID NO: 2218890 - RNA, 11 nt, Human
ccccccccucc

SEQ ID NO: 2218891 - RNA, 12 nt, Human
ccccccucuguc

SEQ ID NO: 2218892 - RNA, 14 nt, Human
ccccccucaccagg

SEQ ID NO: 2218893 - RNA, 13 nt, Human
cccccgcccccug

SEQ ID NO: 2218894 - RNA, 14 nt, Human
cccccgcccccugc

SEQ ID NO: 2218895 - RNA, 16 nt, Human
cccccgcccccugccc

SEQ ID NO: 2218896 - RNA, 18 nt, Human
cccccgccccgccccaca

SEQ ID NO: 2218897 - RNA, 11 nt, Human
cccccgccccg

SEQ ID NO: 2218898 - RNA, 12 nt, Human
cccccgcccccu

SEQ ID NO: 2218899 - RNA, 13 nt, Human
cccccgcccaggc

SEQ ID NO: 2218900 - RNA, 18 nt, Human
cccccgcccaggcuggcc

SEQ ID NO: 2218901 - RNA, 12 nt, Human
cccccgccacuc

SEQ ID NO: 2218902 - RNA, 21 nt, Human
cccccgagcugggggccauga

SEQ ID NO: 2218903 - RNA, 15 nt, Human
cccccuccuugcucu

SEQ ID NO: 2218904 - RNA, 14 nt, Human
cccccuccugcugc

SEQ ID NO: 2218905 - RNA, 15 nt, Human
cccccuccugcugca

SEQ ID NO: 2218906 - RNA, 22 nt, Human
cccccuccucucccaucccccu

SEQ ID NO: 2218907 - RNA, 13 nt, Human
cccccuccucucu

SEQ ID NO: 2218908 - RNA, 12 nt, Human
cccccuccugcu

SEQ ID NO: 2218909 - RNA, 13 nt, Human
cccccuccugcug

SEQ ID NO: 2218910 - RNA, 16 nt, Human
cccccuccugcugcag

SEQ ID NO: 2218911 - RNA, 22 nt, Human
cccccucgggucuccucacucc

SEQ ID NO: 2218912 - RNA, 13 nt, Human
cccccucgugcca

SEQ ID NO: 2218913 - RNA, 18 nt, Human
cccccucgugccagucgc

SEQ ID NO: 2218914 - RNA, 21 nt, Human
cccccgcugucagccauuccu

SEQ ID NO: 2218915 - RNA, 13 nt, Human
cccccggcccccu

SEQ ID NO: 2218916 - RNA, 21 nt, Human
cccccgcgcgcgucccccugc

SEQ ID NO: 2218917 - RNA, 23 nt, Human
cccccgcuguaaugaaacaccuu

SEQ ID NO: 2218918 - RNA, 14 nt, Human
cccccggcccccug

SEQ ID NO: 2218919 - RNA, 15 nt, Human
cccccggcccccugg

SEQ ID NO: 2218920 - RNA, 15 nt, Human
cccccgggaggggcc

SEQ ID NO: 2218921 - RNA, 18 nt, Human
cccccgggaggggcccgc

SEQ ID NO: 2218922 - RNA, 12 nt, Human
ccccuagcccag

SEQ ID NO: 2218923 - RNA, 17 nt, Human
ccccucagggucccugg

SEQ ID NO: 2218924 - RNA, 18 nt, Human
ccccucagggucccuggu

SEQ ID NO: 2218925 - RNA, 20 nt, Human
ccccucagggucccuggugg

SEQ ID NO: 2218926 - RNA, 18 nt, Human
ccccuaaugccugcggag

SEQ ID NO: 2218927 - RNA, 23 nt, Human
ccccuaaugacaucaccacaguu

SEQ ID NO: 2218928 - RNA, 15 nt, Human
ccccuaccacugucu

SEQ ID NO: 2218929 - RNA, 20 nt, Human
ccccuaccacugucuucuuc

SEQ ID NO: 2218930 - RNA, 13 nt, Human
ccccuaccccaca

SEQ ID NO: 2218931 - RNA, 20 nt, Human
ccccuaccccacaccaggcc

SEQ ID NO: 2218932 - RNA, 22 nt, Human
ccccuaccccacaccaggccgu

SEQ ID NO: 2218933 - RNA, 22 nt, Human
ccccuacccccuccucucugcc

SEQ ID NO: 2218934 - RNA, 19 nt, Human
ccccgugcagacuggaggg

SEQ ID NO: 2218935 - RNA, 15 nt, Human
ccccgugcagacugg

SEQ ID NO: 2218936 - RNA, 14 nt, Human
ccccgucuguggcu

SEQ ID NO: 2218937 - RNA, 22 nt, Human
ccccgucugggguucagccccu

SEQ ID NO: 2218938 - RNA, 21 nt, Human
ccccgucugggguucagcccc

SEQ ID NO: 2218939 - RNA, 20 nt, Human
ccccgucugggguucagccc

SEQ ID NO: 2218940 - RNA, 14 nt, Human
ccccguuucuggug

SEQ ID NO: 2218941 - RNA, 19 nt, Human
ccccuccccuaaugccugc

SEQ ID NO: 2218942 - RNA, 14 nt, Human
ccccucccccuucu

SEQ ID NO: 2218943 - RNA, 13 nt, Human
ccccuccccugcu

SEQ ID NO: 2218944 - RNA, 21 nt, Human
ccccuccccggcccuaccagc

SEQ ID NO: 2218945 - RNA, 15 nt, Human
ccccuccccugcugc

SEQ ID NO: 2218946 - RNA, 18 nt, Human
ccccucccccaaccccca

SEQ ID NO: 2218947 - RNA, 16 nt, Human
ccccucccccaacccc

SEQ ID NO: 2218948 - RNA, 21 nt, Human
ccccucccccaacccccaccc

SEQ ID NO: 2218949 - RNA, 14 nt, Human
ccccucccagggcc

SEQ ID NO: 2218950 - RNA, 11 nt, Human
ccccucccauc

SEQ ID NO: 2218951 - RNA, 13 nt, Human
ccccucccaucug

SEQ ID NO: 2218952 - RNA, 13 nt, Human
ccccuagcccagg

SEQ ID NO: 2218953 - RNA, 17 nt, Human
ccccuagcccaggagag

SEQ ID NO: 2218954 - RNA, 15 nt, Human
ccccuccccagggga

SEQ ID NO: 2218955 - RNA, 14 nt, Human
ccccucccaucugg

SEQ ID NO: 2218956 - RNA, 11 nt, Human
ccccucccauu

SEQ ID NO: 2218957 - RNA, 15 nt, Human
ccccucccccaaccc

SEQ ID NO: 2218958 - RNA, 20 nt, Human
ccccuccccauuagcuuuca

SEQ ID NO: 2218959 - RNA, 13 nt, Human
ccccucccauuag

SEQ ID NO: 2218960 - RNA, 21 nt, Human
cccugguggcagugggagcug

SEQ ID NO: 2218961 - RNA, 15 nt, Human
cccugguggcagugg

SEQ ID NO: 2218962 - RNA, 21 nt, Human
cccugguuuccugcccuggga

SEQ ID NO: 2218963 - RNA, 16 nt, Human
cccugguggcaguggg

SEQ ID NO: 2218964 - RNA, 19 nt, Human
cccugguggcagugggagc

SEQ ID NO: 2218965 - RNA, 20 nt, Human
cccuguccccucccccuucc

SEQ ID NO: 2218966 - RNA, 10 nt, Human
cccugucccu

SEQ ID NO: 2218967 - RNA, 12 nt, Human
cccugucccucc

SEQ ID NO: 2218968 - RNA, 13 nt, Human
cccugucccuccc

SEQ ID NO: 2218969 - RNA, 14 nt, Human
cccugucccuccca

SEQ ID NO: 2218970 - RNA, 15 nt, Human
cccugucccucccac

SEQ ID NO: 2218971 - RNA, 16 nt, Human
cccugucccucccacc

SEQ ID NO: 2218972 - RNA, 15 nt, Human
cccugucccccagcu

SEQ ID NO: 2218973 - RNA, 16 nt, Human
cccugucccccagcuc

SEQ ID NO: 2218974 - RNA, 17 nt, Human
cccugucccccagcucu

SEQ ID NO: 2218975 - RNA, 18 nt, Human
cccugucccccagcucug

SEQ ID NO: 2218976 - RNA, 19 nt, Human
cccugucccccagcucugg

SEQ ID NO: 2218977 - RNA, 13 nt, Human
cccuguccccuca

SEQ ID NO: 2218978 - RNA, 18 nt, Human
cccuguccccucagcucc

SEQ ID NO: 2218979 - RNA, 19 nt, Human
cccuguccccucagcucca

SEQ ID NO: 2218980 - RNA, 16 nt, Human
cccugugggcccccaa

SEQ ID NO: 2218981 - RNA, 17 nt, Human
cccugucccucccaccu

SEQ ID NO: 2218982 - RNA, 18 nt, Human
cccugucccucccaccuc

SEQ ID NO: 2218983 - RNA, 19 nt, Human
cccugucccucccaccucu

SEQ ID NO: 2218984 - RNA, 20 nt, Human
cccugucccucccaccucug

SEQ ID NO: 2218985 - RNA, 23 nt, Human
cccugucccucccaccucuguga

SEQ ID NO: 2218986 - RNA, 18 nt, Human
cccuguacaauauuuaaa

SEQ ID NO: 2218987 - RNA, 22 nt, Human
ccccucccgucuacucauuccc

SEQ ID NO: 2218988 - RNA, 17 nt, Human
cccuguacaauauuuaa

SEQ ID NO: 2218989 - RNA, 18 nt, Human
ccccuccccugcugcagg

SEQ ID NO: 2218990 - RNA, 17 nt, Human
ccccucccgccccuucc

SEQ ID NO: 2218991 - RNA, 23 nt, Human
cccugguuuccugcccugggagg

SEQ ID NO: 2218992 - RNA, 22 nt, Human
cccugguuuccugcccugggag

SEQ ID NO: 2218993 - RNA, 21 nt, Human
cccuguccaaacugccuaagc

SEQ ID NO: 2218994 - RNA, 19 nt, Human
cccuguaccuuuugaggag

SEQ ID NO: 2218995 - RNA, 18 nt, Human
cccuguacuguucugugu

SEQ ID NO: 2218996 - RNA, 13 nt, Human
cccugucccccag

SEQ ID NO: 2218997 - RNA, 21 nt, Human
cccugucccucccaccucugu

SEQ ID NO: 2218998 - RNA, 22 nt, Human
cccugucccucccaccucugug

SEQ ID NO: 2218999 - RNA, 12 nt, Human
cccuguggggau

SEQ ID NO: 2219000 - RNA, 14 nt, Human
cccuguggggaucu

SEQ ID NO: 2219001 - RNA, 18 nt, Human
cccugugggcccccaaau

SEQ ID NO: 2219002 - RNA, 15 nt, Human
cccuguggggaucuc

SEQ ID NO: 2219003 - RNA, 20 nt, Human
cccuguggggaucucagggg

SEQ ID NO: 2219004 - RNA, 23 nt, Human
cccuguggggaucucaggggcug

SEQ ID NO: 2219005 - RNA, 11 nt, Human
cccuguugcua

SEQ ID NO: 2219006 - RNA, 11 nt, Human
cccuguuuaau

SEQ ID NO: 2219007 - RNA, 14 nt, Human
cccuguuuaauauu

SEQ ID NO: 2219008 - RNA, 16 nt, Human
cccuguuuaauauuua

SEQ ID NO: 2219009 - RNA, 17 nt, Human
cccuguuuaauauuuaa

SEQ ID NO: 2219010 - RNA, 18 nt, Human
cccuguuuaauauuuaaa

SEQ ID NO: 2219011 - RNA, 19 nt, Human
cccuguuuaauauuuaaac

SEQ ID NO: 2219012 - RNA, 16 nt, Human
cccuguuuguuucuga

SEQ ID NO: 2219013 - RNA, 14 nt, Human
cccuuacaguagga

SEQ ID NO: 2219014 - RNA, 17 nt, Human
cccuuacagccucugac

SEQ ID NO: 2219015 - RNA, 18 nt, Human
cccuuacagccucugacu

SEQ ID NO: 2219016 - RNA, 15 nt, Human
cccuuacacguaccu

SEQ ID NO: 2219017 - RNA, 16 nt, Human
cccuuacacguaccuc

SEQ ID NO: 2219018 - RNA, 14 nt, Human
cccuuacacuuacu

SEQ ID NO: 2219019 - RNA, 15 nt, Human
cccuuacagccucug

SEQ ID NO: 2219020 - RNA, 14 nt, Human
cccuguuuccugag

SEQ ID NO: 2219021 - RNA, 20 nt, Human
cccuguuugaagccugcccu

SEQ ID NO: 2219022 - RNA, 21 nt, Human
cccuguuuaauauuuaaacag

SEQ ID NO: 2219023 - RNA, 15 nt, Human
cccuguuuguuucug

SEQ ID NO: 2219024 - RNA, 23 nt, Human
ccugggaggcggagaguacagug

SEQ ID NO: 2219025 - RNA, 23 nt, Human
ccuggcugagguuccucugccug

SEQ ID NO: 2219026 - RNA, 14 nt, Human
ccugggaggcggag

SEQ ID NO: 2219027 - RNA, 16 nt, Human
ccugggaggcggagag

SEQ ID NO: 2219028 - RNA, 20 nt, Human
ccugggaggucaaggcugca

SEQ ID NO: 2219029 - RNA, 16 nt, Human
ccugggaucccucauc

SEQ ID NO: 2219030 - RNA, 20 nt, Human
ccugggaucccucauccuca

SEQ ID NO: 2219031 - RNA, 13 nt, Human
ccugggaggcagu

SEQ ID NO: 2219032 - RNA, 19 nt, Human
ccuggcugagguuccucug

SEQ ID NO: 2219033 - RNA, 20 nt, Human
ccuggcugagguuccucugc

SEQ ID NO: 2219034 - RNA, 21 nt, Human
ccuggcugagguuccucugcc

SEQ ID NO: 2219035 - RNA, 22 nt, Human
ccuggcugagguuccucugccu

SEQ ID NO: 2219036 - RNA, 16 nt, Human
ccuggcugaaggacug

SEQ ID NO: 2219037 - RNA, 19 nt, Human
ccuggcugaaggacuguga

SEQ ID NO: 2219038 - RNA, 20 nt, Human
ccuggcugaaggacugugac

SEQ ID NO: 2219039 - RNA, 22 nt, Human
ccuggcugaccccaaagagccu

SEQ ID NO: 2219040 - RNA, 23 nt, Human
ccuggcugaccccaaagagccug

SEQ ID NO: 2219041 - RNA, 18 nt, Human
ccuggcugagccuggcug

SEQ ID NO: 2219042 - RNA, 19 nt, Human
ccuggcugagccuggcugg

SEQ ID NO: 2219043 - RNA, 16 nt, Human
ccuggcugagguuccu

SEQ ID NO: 2219044 - RNA, 13 nt, Human
ccugggaggcucu

SEQ ID NO: 2219045 - RNA, 21 nt, Human
ccugggaggcucuggagccca

SEQ ID NO: 2219046 - RNA, 20 nt, Human
ccugggcaccuggggagugg

SEQ ID NO: 2219047 - RNA, 15 nt, Human
ccugggcaccugggg

SEQ ID NO: 2219048 - RNA, 14 nt, Human
ccugggcagaagga

SEQ ID NO: 2219049 - RNA, 22 nt, Human
ccugggauguccacagaugccu

SEQ ID NO: 2219050 - RNA, 20 nt, Human
ccugggauguccacagaugc

SEQ ID NO: 2219051 - RNA, 21 nt, Human
ccugggaugagaguuuuggau

SEQ ID NO: 2219052 - RNA, 15 nt, Human
ccugggaucugcucg

SEQ ID NO: 2219053 - RNA, 13 nt, Human
ccugggcaaagcc

SEQ ID NO: 2219054 - RNA, 21 nt, Human
ccugggauguggcugcagcag

SEQ ID NO: 2219055 - RNA, 23 nt, Human
ccugggauguggcugcagcagcg

SEQ ID NO: 2219056 - RNA, 21 nt, Human
ccugggcaaaugaauggcuca

SEQ ID NO: 2219057 - RNA, 23 nt, Human
ccugggcaaaugaauggcucacu

SEQ ID NO: 2219058 - RNA, 12 nt, Human
ccugggcagaag

SEQ ID NO: 2219059 - RNA, 13 nt, Human
ccuggcucuugug

SEQ ID NO: 2219060 - RNA, 20 nt, Human
ccuggcucuugugcuggaug

SEQ ID NO: 2219061 - RNA, 13 nt, Human
ccuggcugaagga

SEQ ID NO: 2219062 - RNA, 14 nt, Human
ccuggcugaaggac

SEQ ID NO: 2219063 - RNA, 20 nt, Human
ccuggcucugaccgaaacag

SEQ ID NO: 2219064 - RNA, 11 nt, Human
ccuggcucuga

SEQ ID NO: 2219065 - RNA, 16 nt, Human
ccuggcucucagaagg

SEQ ID NO: 2219066 - RNA, 22 nt, Human
ccuggcucugcaaugggcacug

SEQ ID NO: 2219067 - RNA, 21 nt, Human
ccuggcgggaugggccaccgc

SEQ ID NO: 2219068 - RNA, 13 nt, Human
ccuggcgggaugg

SEQ ID NO: 2219069 - RNA, 17 nt, Human
ccuggcgggaugggcca

SEQ ID NO: 2219070 - RNA, 19 nt, Human
ccuggcgggaugggccacc

SEQ ID NO: 2219071 - RNA, 20 nt, Human
ccuggcgggaugggccaccg

SEQ ID NO: 2219072 - RNA, 13 nt, Human
ccuggcucagagc

SEQ ID NO: 2219073 - RNA, 16 nt, Human
ccuggcucagagccag

SEQ ID NO: 2219074 - RNA, 17 nt, Human
ccuggcucagagccagu

SEQ ID NO: 2219075 - RNA, 12 nt, Human
ccuggcggggug

SEQ ID NO: 2219076 - RNA, 14 nt, Human
ccuggccuuucaua

SEQ ID NO: 2219077 - RNA, 20 nt, Human
ccuggcgacugccccugccu

SEQ ID NO: 2219078 - RNA, 14 nt, Human
ccuggccccucagg

SEQ ID NO: 2219079 - RNA, 16 nt, Human
ccuggccccucagggu

SEQ ID NO: 2219080 - RNA, 15 nt, Human
ccuggccuuucauau

SEQ ID NO: 2219081 - RNA, 22 nt, Human
ccuggccaggcagaucugugcc

SEQ ID NO: 2219082 - RNA, 14 nt, Human
ccuggccaggcaga

SEQ ID NO: 2219083 - RNA, 21 nt, Human
ccuggccaggcacccccugga

SEQ ID NO: 2219084 - RNA, 14 nt, Human
ccuggccagggccu

SEQ ID NO: 2219085 - RNA, 15 nt, Human
ccuggccagggccug

SEQ ID NO: 2219086 - RNA, 19 nt, Human
ccuggccagggccuggaag

SEQ ID NO: 2219087 - RNA, 14 nt, Human
ccuggccccauguc

SEQ ID NO: 2219088 - RNA, 18 nt, Human
ccuggccccauggucagc

SEQ ID NO: 2219089 - RNA, 15 nt, Human
ccuggccaucccaca

SEQ ID NO: 2219090 - RNA, 14 nt, Human
ccuggccaucccac

SEQ ID NO: 2219091 - RNA, 20 nt, Human
ccuggccagggccuggaaga

SEQ ID NO: 2219092 - RNA, 23 nt, Human
ccuggccagggccuggaagacag

SEQ ID NO: 2219093 - RNA, 21 nt, Human
ccuggccccaugucucucaga

SEQ ID NO: 2219094 - RNA, 20 nt, Human
ccuggccccaugucucucag

SEQ ID NO: 2219095 - RNA, 18 nt, Human
ccuggccccaugucucuc

SEQ ID NO: 2219096 - RNA, 17 nt, Human
ccuggccccaugucucu

SEQ ID NO: 2219097 - RNA, 15 nt, Human
ccuggccccaugucu

SEQ ID NO: 2219098 - RNA, 14 nt, Human
ccuggcccccagcu

SEQ ID NO: 2219099 - RNA, 12 nt, Human
ccuggcccccag

SEQ ID NO: 2219100 - RNA, 21 nt, Human
ccuggcccccacccucugcca

SEQ ID NO: 2219101 - RNA, 22 nt, Human
ccuggccaggagcucuucaggc

SEQ ID NO: 2219102 - RNA, 12 nt, Human
ccuggccaggca

SEQ ID NO: 2219103 - RNA, 13 nt, Human
ccuggccaggcac

SEQ ID NO: 2219104 - RNA, 21 nt, Human
ccuggccaggagcucuucagg

SEQ ID NO: 2219105 - RNA, 20 nt, Human
ccuggccaggagcucuucag

SEQ ID NO: 2219106 - RNA, 19 nt, Human
ccuggccaggagcucuuca

SEQ ID NO: 2219107 - RNA, 18 nt, Human
ccuggccaggagcucuuc

SEQ ID NO: 2219108 - RNA, 16 nt, Human
ccuggccaggagcucu

SEQ ID NO: 2219109 - RNA, 15 nt, Human
ccuggccaggagcuc

SEQ ID NO: 2219110 - RNA, 14 nt, Human
ccuggccaggagcu

SEQ ID NO: 2219111 - RNA, 18 nt, Human
ccuggcaugggaaugaau

SEQ ID NO: 2219112 - RNA, 22 nt, Human
ccuggacuagagggaccucucc

SEQ ID NO: 2219113 - RNA, 15 nt, Human
ccuggacuagaggga

SEQ ID NO: 2219114 - RNA, 14 nt, Human
ccuggacuccugca

SEQ ID NO: 2219115 - RNA, 17 nt, Human
ccuggacugugugcuca

SEQ ID NO: 2219116 - RNA, 20 nt, Human
ccuggacugugugcucagga

SEQ ID NO: 2219117 - RNA, 14 nt, Human
ccuggacccugugg

SEQ ID NO: 2219118 - RNA, 13 nt, Human
ccuggacccugug

SEQ ID NO: 2219119 - RNA, 21 nt, Human
ccuggaccugcccugggccac

SEQ ID NO: 2219120 - RNA, 23 nt, Human
ccuggaccugcccugggccacac

SEQ ID NO: 2219121 - RNA, 13 nt, Human
ccuggaccugccu

SEQ ID NO: 2219122 - RNA, 14 nt, Human
ccuggaccugccuc

SEQ ID NO: 2219123 - RNA, 16 nt, Human
ccuggaccugccuccu

SEQ ID NO: 2219124 - RNA, 20 nt, Human
ccuggaccugccuccugccu

SEQ ID NO: 2219125 - RNA, 22 nt, Human
ccuggaccugccuccugccugc

SEQ ID NO: 2219126 - RNA, 23 nt, Human
ccuggaccugccuccugccugcc

SEQ ID NO: 2219127 - RNA, 22 nt, Human
ccuggaaaggcucagucucagg

SEQ ID NO: 2219128 - RNA, 21 nt, Human
ccuggaaaggcucagucucag

SEQ ID NO: 2219129 - RNA, 20 nt, Human
ccuggaaaggcucagucuca

SEQ ID NO: 2219130 - RNA, 17 nt, Human
ccuggaaaggcucaguc

SEQ ID NO: 2219131 - RNA, 15 nt, Human
ccuggaaaggcucag

SEQ ID NO: 2219132 - RNA, 23 nt, Human
ccuggaaaggcucagucucagga

SEQ ID NO: 2219133 - RNA, 18 nt, Human
ccuggacauagagaggga

SEQ ID NO: 2219134 - RNA, 20 nt, Human
ccuggacauccucuucugcu

SEQ ID NO: 2219135 - RNA, 24 nt, Human
ccuggacaugaagauucuuuccca

SEQ ID NO: 2219136 - RNA, 20 nt, Human
ccuggacauuugccuugcug

SEQ ID NO: 2219137 - RNA, 21 nt, Human
ccuggacauuugccuugcugg

SEQ ID NO: 2219138 - RNA, 23 nt, Human
ccuggacaugaagauucuuuccc

SEQ ID NO: 2219139 - RNA, 21 nt, Human
ccuggacaugaagauucuuuc

SEQ ID NO: 2219140 - RNA, 19 nt, Human
ccuggacauuuuuucaguc

SEQ ID NO: 2219141 - RNA, 20 nt, Human
ccuggacauuuuuucaguca

SEQ ID NO: 2219142 - RNA, 12 nt, Human
ccuggaccccca

SEQ ID NO: 2219143 - RNA, 15 nt, Human
ccuggacccccagcu

SEQ ID NO: 2219144 - RNA, 16 nt, Human
ccuggacccccagcuu

SEQ ID NO: 2219145 - RNA, 17 nt, Human
ccuggacccccagcuuu

SEQ ID NO: 2219146 - RNA, 14 nt, Human
ccuggacuguuuuc

SEQ ID NO: 2219147 - RNA, 17 nt, Human
ccuggacugggagguag

SEQ ID NO: 2219148 - RNA, 18 nt, Human
ccuggacugggagguaga

SEQ ID NO: 2219149 - RNA, 13 nt, Human
ccuggacugggag

SEQ ID NO: 2219150 - RNA, 14 nt, Human
ccuggacugggagg

SEQ ID NO: 2219151 - RNA, 21 nt, Human
ccuggagauccuccugcagac

SEQ ID NO: 2219152 - RNA, 18 nt, Human
ccuggagcagaccacccc

SEQ ID NO: 2219153 - RNA, 13 nt, Human
ccuggagcaggcc

SEQ ID NO: 2219154 - RNA, 14 nt, Human
ccuggagcaggccu

SEQ ID NO: 2219155 - RNA, 15 nt, Human
ccuggagcaggccuu

SEQ ID NO: 2219156 - RNA, 12 nt, Human
ccuggagccccu

SEQ ID NO: 2219157 - RNA, 11 nt, Human
ccuggagcccc

SEQ ID NO: 2219158 - RNA, 13 nt, Human
ccuggagccccug

SEQ ID NO: 2219159 - RNA, 14 nt, Human
ccuggagcccagag

SEQ ID NO: 2219160 - RNA, 17 nt, Human
ccuggagcccagaggag

SEQ ID NO: 2219161 - RNA, 13 nt, Human
ccuggagcccaga

SEQ ID NO: 2219162 - RNA, 16 nt, Human
ccuggagccagacucu

SEQ ID NO: 2219163 - RNA, 22 nt, Human
ccuggagccagacucuggucuu

SEQ ID NO: 2219164 - RNA, 18 nt, Human
ccuggagcaggccuugcg

SEQ ID NO: 2219165 - RNA, 19 nt, Human
ccuggagcaggccuugcgc

SEQ ID NO: 2219166 - RNA, 15 nt, Human
ccuggagccaacugc

SEQ ID NO: 2219167 - RNA, 18 nt, Human
ccuggagccaacugcugc

SEQ ID NO: 2219168 - RNA, 20 nt, Human
ccuggcacugcuuccaguga

SEQ ID NO: 2219169 - RNA, 17 nt, Human
ccuggcacugcuuccag

SEQ ID NO: 2219170 - RNA, 12 nt, Human
ccuggcagccgu

SEQ ID NO: 2219171 - RNA, 18 nt, Human
ccuggcagccgugccuuc

SEQ ID NO: 2219172 - RNA, 19 nt, Human
ccuggcagccgugccuuca

SEQ ID NO: 2219173 - RNA, 16 nt, Human
ccuggcaugggaauga

SEQ ID NO: 2219174 - RNA, 17 nt, Human
ccuggcaugggaaugaa

SEQ ID NO: 2219175 - RNA, 13 nt, Human
ccuggcagaacug

SEQ ID NO: 2219176 - RNA, 14 nt, Human
ccuggcagccccug

SEQ ID NO: 2219177 - RNA, 16 nt, Human
ccuggcagccccuguu

SEQ ID NO: 2219178 - RNA, 21 nt, Human
ccuggcacugcuuccagugag

SEQ ID NO: 2219179 - RNA, 17 nt, Human
ccuggagccccugggug

SEQ ID NO: 2219180 - RNA, 14 nt, Human
ccuggagccccugg

SEQ ID NO: 2219181 - RNA, 16 nt, Human
ccuggagccccugggu

SEQ ID NO: 2219182 - RNA, 15 nt, Human
ccugcuuccugucuu

SEQ ID NO: 2219183 - RNA, 22 nt, Human
ccugcuuccugucuuugggaga

SEQ ID NO: 2219184 - RNA, 14 nt, Human
ccugcuucuccagc

SEQ ID NO: 2219185 - RNA, 15 nt, Human
ccugcuucuccagcc

SEQ ID NO: 2219186 - RNA, 16 nt, Human
ccugcuucuccagccu

SEQ ID NO: 2219187 - RNA, 17 nt, Human
ccugcuucuccagccug

SEQ ID NO: 2219188 - RNA, 20 nt, Human
ccugcuucuccagccuggac

SEQ ID NO: 2219189 - RNA, 22 nt, Human
ccugcuucuccagccuggaccc

SEQ ID NO: 2219190 - RNA, 18 nt, Human
ccugcuggucacagccuc

SEQ ID NO: 2219191 - RNA, 20 nt, Human
ccugcuggucacagccuccu

SEQ ID NO: 2219192 - RNA, 12 nt, Human
ccugcugucccc

SEQ ID NO: 2219193 - RNA, 22 nt, Human
ccugcuuccaggaaacuccaca

SEQ ID NO: 2219194 - RNA, 19 nt, Human
ccugcugguucaggguugg

SEQ ID NO: 2219195 - RNA, 13 nt, Human
ccugcugguucag

SEQ ID NO: 2219196 - RNA, 17 nt, Human
ccugcuggucacagccu

SEQ ID NO: 2219197 - RNA, 19 nt, Human
ccugcuccucccuggcugc

SEQ ID NO: 2219198 - RNA, 20 nt, Human
ccugcuccucccuggcugcc

SEQ ID NO: 2219199 - RNA, 21 nt, Human
ccugcuggguguggcgcagca

SEQ ID NO: 2219200 - RNA, 16 nt, Human
ccugcucccccacccc

SEQ ID NO: 2219201 - RNA, 14 nt, Human
ccugcucccccacc

SEQ ID NO: 2219202 - RNA, 23 nt, Human
ccugcucccccacccccucccca

SEQ ID NO: 2219203 - RNA, 18 nt, Human
ccugcucccccacccccu

SEQ ID NO: 2219204 - RNA, 15 nt, Human
ccugcucccucccau

SEQ ID NO: 2219205 - RNA, 15 nt, Human
ccugcuccucccugg

SEQ ID NO: 2219206 - RNA, 16 nt, Human
ccugcuccucccuggc

SEQ ID NO: 2219207 - RNA, 17 nt, Human
ccugcuccucccuggcu

SEQ ID NO: 2219208 - RNA, 18 nt, Human
ccugcuccucccuggcug

SEQ ID NO: 2219209 - RNA, 18 nt, Human
ccugcuuugggcugcccu

SEQ ID NO: 2219210 - RNA, 17 nt, Human
ccugcuuugggcugccc

SEQ ID NO: 2219211 - RNA, 17 nt, Human
ccuggaaaccacagucc

SEQ ID NO: 2219212 - RNA, 12 nt, Human
ccuggaaaccac

SEQ ID NO: 2219213 - RNA, 15 nt, Human
ccuggaaaccacagu

SEQ ID NO: 2219214 - RNA, 16 nt, Human
ccuggaaaccacaguc

SEQ ID NO: 2219215 - RNA, 20 nt, Human
ccugcuuuuuauggccugug

SEQ ID NO: 2219216 - RNA, 21 nt, Human
ccugcuuggguggagaagcca

SEQ ID NO: 2219217 - RNA, 22 nt, Human
ccugcuuggguggagaagccau

SEQ ID NO: 2219218 - RNA, 23 nt, Human
ccugcuuggguggagaagccauu

SEQ ID NO: 2219219 - RNA, 20 nt, Human
ccugcuuggguggagaagcc

SEQ ID NO: 2219220 - RNA, 22 nt, Human
ccugauuuaggagaagccagga

SEQ ID NO: 2219221 - RNA, 21 nt, Human
ccugauuuaggagaagccagg

SEQ ID NO: 2219222 - RNA, 20 nt, Human
ccugauuuaggagaagccag

SEQ ID NO: 2219223 - RNA, 19 nt, Human
ccugauuuaggagaagcca

SEQ ID NO: 2219224 - RNA, 18 nt, Human
ccugauuuaggagaagcc

SEQ ID NO: 2219225 - RNA, 14 nt, Human
ccugauuuacaguu

SEQ ID NO: 2219226 - RNA, 17 nt, Human
ccugauuuacaguuuca

SEQ ID NO: 2219227 - RNA, 20 nt, Human
ccugauuuacaguuucaaaa

SEQ ID NO: 2219228 - RNA, 22 nt, Human
ccugauuugcugggcaguuuuu

SEQ ID NO: 2219229 - RNA, 17 nt, Human
ccugauuugcugggcag

SEQ ID NO: 2219230 - RNA, 19 nt, Human
ccugcaaagcccagcuuga

SEQ ID NO: 2219231 - RNA, 16 nt, Human
ccugauuuuuuuuccu

SEQ ID NO: 2219232 - RNA, 18 nt, Human
ccugcaacaccuuguuuc

SEQ ID NO: 2219233 - RNA, 23 nt, Human
ccugcgucucauacucaccucac

SEQ ID NO: 2219234 - RNA, 22 nt, Human
ccugcguccuccucaccucaug

SEQ ID NO: 2219235 - RNA, 23 nt, Human
ccugcgucgaagcuuugaaggcc

SEQ ID NO: 2219236 - RNA, 19 nt, Human
ccugcaacaccuuguuucc

SEQ ID NO: 2219237 - RNA, 16 nt, Human
ccugcaaccugauugu

SEQ ID NO: 2219238 - RNA, 22 nt, Human
ccugcuccagcuguucagcugg

SEQ ID NO: 2219239 - RNA, 12 nt, Human
ccugcucccagc

SEQ ID NO: 2219240 - RNA, 13 nt, Human
ccugcucccagca

SEQ ID NO: 2219241 - RNA, 14 nt, Human
ccugcucccagcag

SEQ ID NO: 2219242 - RNA, 15 nt, Human
ccugcucccagcagc

SEQ ID NO: 2219243 - RNA, 16 nt, Human
ccugcucccagcagcc

SEQ ID NO: 2219244 - RNA, 23 nt, Human
ccugcucccagcagcccuaagga

SEQ ID NO: 2219245 - RNA, 12 nt, Human
ccugcucccagg

SEQ ID NO: 2219246 - RNA, 16 nt, Human
ccugcucccaggccag

SEQ ID NO: 2219247 - RNA, 14 nt, Human
ccugcuccagcugu

SEQ ID NO: 2219248 - RNA, 13 nt, Human
ccugcuccagcug

SEQ ID NO: 2219249 - RNA, 12 nt, Human
ccugcuccagcu

SEQ ID NO: 2219250 - RNA, 22 nt, Human
ccugcuccagaccugauccugg

SEQ ID NO: 2219251 - RNA, 16 nt, Human
ccugcuccagaccuga

SEQ ID NO: 2219252 - RNA, 12 nt, Human
ccugcgugggga

SEQ ID NO: 2219253 - RNA, 13 nt, Human
ccugcguggggac

SEQ ID NO: 2219254 - RNA, 15 nt, Human
ccugcguggggacag

SEQ ID NO: 2219255 - RNA, 16 nt, Human
ccugcguggggacagg

SEQ ID NO: 2219256 - RNA, 17 nt, Human
ccugcguggggacaggg

SEQ ID NO: 2219257 - RNA, 22 nt, Human
ccugcguuuuggaagcucugaa

SEQ ID NO: 2219258 - RNA, 19 nt, Human
ccugcguucuugugacaga

SEQ ID NO: 2219259 - RNA, 13 nt, Human
ccuguagucccag

SEQ ID NO: 2219260 - RNA, 14 nt, Human
ccuguagucccagc

SEQ ID NO: 2219261 - RNA, 18 nt, Human
ccuguagucccagccacu

SEQ ID NO: 2219262 - RNA, 19 nt, Human
ccuguagucccagccacuc

SEQ ID NO: 2219263 - RNA, 15 nt, Human
ccuguaguuaggaaa

SEQ ID NO: 2219264 - RNA, 14 nt, Human
ccuguaguuaggaa

SEQ ID NO: 2219265 - RNA, 13 nt, Human
ccuguaguccuag

SEQ ID NO: 2219266 - RNA, 16 nt, Human
ccuguagucccagcua

SEQ ID NO: 2219267 - RNA, 15 nt, Human
ccuguagucccagcu

SEQ ID NO: 2219268 - RNA, 19 nt, Human
ccuguaguuaggaaauaaa

SEQ ID NO: 2219269 - RNA, 18 nt, Human
ccuguaguuaggaaauaa

SEQ ID NO: 2219270 - RNA, 17 nt, Human
ccuguaguuaggaaaua

SEQ ID NO: 2219271 - RNA, 16 nt, Human
ccuguaguuaggaaau

SEQ ID NO: 2219272 - RNA, 22 nt, Human
ccuguaguuaggaaauaaaacc

SEQ ID NO: 2219273 - RNA, 21 nt, Human
ccuguaguuaggaaauaaaac

SEQ ID NO: 2219274 - RNA, 23 nt, Human
ccuguaguuaggaaauaaaaccu

SEQ ID NO: 2219275 - RNA, 18 nt, Human
ccuguaguugcguggacu

SEQ ID NO: 2219276 - RNA, 19 nt, Human
ccugucaaacaaagccaga

SEQ ID NO: 2219277 - RNA, 18 nt, Human
ccugucaaacaaagccag

SEQ ID NO: 2219278 - RNA, 17 nt, Human
ccuguauuuucuuucuc

SEQ ID NO: 2219279 - RNA, 22 nt, Human
ccugucaaacaaagccagaagc

SEQ ID NO: 2219280 - RNA, 20 nt, Human
ccugucaaacaaagccagaa

SEQ ID NO: 2219281 - RNA, 23 nt, Human
ccugucaaacaaagccagaagcu

SEQ ID NO: 2219282 - RNA, 19 nt, Human
ccuguaguugcguggacuc

SEQ ID NO: 2219283 - RNA, 16 nt, Human
ccuguaugucuccagu

SEQ ID NO: 2219284 - RNA, 17 nt, Human
ccuguaugucuccagua

SEQ ID NO: 2219285 - RNA, 13 nt, Human
ccuguauguuguc

SEQ ID NO: 2219286 - RNA, 14 nt, Human
ccuguauguugucc

SEQ ID NO: 2219287 - RNA, 22 nt, Human
ccuguauucucaaacacaguua

SEQ ID NO: 2219288 - RNA, 23 nt, Human
ccuguacucaggaggcugagggg

SEQ ID NO: 2219289 - RNA, 17 nt, Human
ccuguacucgcuugugc

SEQ ID NO: 2219290 - RNA, 18 nt, Human
ccuguacucgcuugugca

SEQ ID NO: 2219291 - RNA, 19 nt, Human
ccuguacucgcuugugcag

SEQ ID NO: 2219292 - RNA, 20 nt, Human
ccuguacucgcuugugcaga

SEQ ID NO: 2219293 - RNA, 15 nt, Human
ccuguacucuuccga

SEQ ID NO: 2219294 - RNA, 16 nt, Human
ccuguacucuuccgaa

SEQ ID NO: 2219295 - RNA, 17 nt, Human
ccuguacuguucugugu

SEQ ID NO: 2219296 - RNA, 22 nt, Human
ccuguacucaggaggcugaggg

SEQ ID NO: 2219297 - RNA, 21 nt, Human
ccuguacucaggaggcugagg

SEQ ID NO: 2219298 - RNA, 15 nt, Human
ccuguacucaggagg

SEQ ID NO: 2219299 - RNA, 14 nt, Human
ccuguacucaggag

SEQ ID NO: 2219300 - RNA, 13 nt, Human
ccuguacucagga

SEQ ID NO: 2219301 - RNA, 23 nt, Human
ccuguaccuuuugaggagcccca

SEQ ID NO: 2219302 - RNA, 12 nt, Human
ccuguacacuga

SEQ ID NO: 2219303 - RNA, 22 nt, Human
ccuguaccuuuugaggagcccc

SEQ ID NO: 2219304 - RNA, 23 nt, Human
ccuguagagugggagcugagugg

SEQ ID NO: 2219305 - RNA, 18 nt, Human
ccuguacuguucuguguc

SEQ ID NO: 2219306 - RNA, 15 nt, Human
ccuguagcacuuacu

SEQ ID NO: 2219307 - RNA, 19 nt, Human
ccuguagagugggagcuga

SEQ ID NO: 2219308 - RNA, 21 nt, Human
ccuguagagugggagcugagu

SEQ ID NO: 2219309 - RNA, 16 nt, Human
ccuguaaucccagcag

SEQ ID NO: 2219310 - RNA, 21 nt, Human
ccuguaaucccagcacuuugg

SEQ ID NO: 2219311 - RNA, 23 nt, Human
ccuguaaucccagcacuuuggga

SEQ ID NO: 2219312 - RNA, 18 nt, Human
ccuguaaucccagcacuu

SEQ ID NO: 2219313 - RNA, 20 nt, Human
ccuguaaucccagcacuugg

SEQ ID NO: 2219314 - RNA, 20 nt, Human
ccuguaauccuagcacuuug

SEQ ID NO: 2219315 - RNA, 21 nt, Human
ccuguacacugaauauuuaua

SEQ ID NO: 2219316 - RNA, 21 nt, Human
ccuguacaauauuuaaaauuu

SEQ ID NO: 2219317 - RNA, 18 nt, Human
ccuguaauuuuuuucuua

SEQ ID NO: 2219318 - RNA, 15 nt, Human
ccuguacaauauuua

SEQ ID NO: 2219319 - RNA, 23 nt, Human
ccuguaaucccagcuacucagga

SEQ ID NO: 2219320 - RNA, 18 nt, Human
ccuguaaucccagcuacu

SEQ ID NO: 2219321 - RNA, 16 nt, Human
ccuguaaucccagcua

SEQ ID NO: 2219322 - RNA, 15 nt, Human
ccuguaaucccagcu

SEQ ID NO: 2219323 - RNA, 23 nt, Human
ccuguaauuguuguuuguaugua

SEQ ID NO: 2219324 - RNA, 23 nt, Human
ccuguaauuccuaccucccugca

SEQ ID NO: 2219325 - RNA, 14 nt, Human
ccugguggcagcuc

SEQ ID NO: 2219326 - RNA, 16 nt, Human
ccugguggcagcucac

SEQ ID NO: 2219327 - RNA, 17 nt, Human
ccugguggcagcucacc

SEQ ID NO: 2219328 - RNA, 18 nt, Human
ccugguggcagcucaccu

SEQ ID NO: 2219329 - RNA, 20 nt, Human
ccugguggacaguccuggga

SEQ ID NO: 2219330 - RNA, 12 nt, Human
ccugguggagaa

SEQ ID NO: 2219331 - RNA, 22 nt, Human
ccugguggagaaagcacugacc

SEQ ID NO: 2219332 - RNA, 19 nt, Human
ccugguggacaguccuggg

SEQ ID NO: 2219333 - RNA, 18 nt, Human
ccugguggacaguccugg

SEQ ID NO: 2219334 - RNA, 17 nt, Human
ccugguggacaguccug

SEQ ID NO: 2219335 - RNA, 14 nt, Human
ccugguggacaguc

SEQ ID NO: 2219336 - RNA, 12 nt, Human
ccugguggacag

SEQ ID NO: 2219337 - RNA, 12 nt, Human
ccugguggcagc

SEQ ID NO: 2219338 - RNA, 13 nt, Human
ccugguggcagcu

SEQ ID NO: 2219339 - RNA, 13 nt, Human
ccuggugcuggau

SEQ ID NO: 2219340 - RNA, 13 nt, Human
ccuggugcugcug

SEQ ID NO: 2219341 - RNA, 13 nt, Human
ccugggcagaaag

SEQ ID NO: 2219342 - RNA, 17 nt, Human
ccugggcaccuggggag

SEQ ID NO: 2219343 - RNA, 15 nt, Human
ccuggugcugccucu

SEQ ID NO: 2219344 - RNA, 12 nt, Human
ccuggugcugcu

SEQ ID NO: 2219345 - RNA, 20 nt, Human
ccuggugcugccucuaccug

SEQ ID NO: 2219346 - RNA, 18 nt, Human
ccuggugcugccacacuu

SEQ ID NO: 2219347 - RNA, 21 nt, Human
ccuggugcugccacacuucag

SEQ ID NO: 2219348 - RNA, 15 nt, Human
ccuggugcugccaca

SEQ ID NO: 2219349 - RNA, 15 nt, Human
ccugugcccuuauuc

SEQ ID NO: 2219350 - RNA, 15 nt, Human
ccugugccuccucac

SEQ ID NO: 2219351 - RNA, 18 nt, Human
ccugugccuaacaccagc

SEQ ID NO: 2219352 - RNA, 23 nt, Human
ccugugcccacaucccaggcuuc

SEQ ID NO: 2219353 - RNA, 21 nt, Human
ccugugccacccaccagggcg

SEQ ID NO: 2219354 - RNA, 19 nt, Human
ccugugccacccaccaggg

SEQ ID NO: 2219355 - RNA, 20 nt, Human
ccugugcauguaugucuugg

SEQ ID NO: 2219356 - RNA, 14 nt, Human
ccugugcauguaug

SEQ ID NO: 2219357 - RNA, 17 nt, Human
ccugugcauguaugucu

SEQ ID NO: 2219358 - RNA, 21 nt, Human
ccugugcagccgcugagcgag

SEQ ID NO: 2219359 - RNA, 20 nt, Human
ccugugcagccgcugagcga

SEQ ID NO: 2219360 - RNA, 18 nt, Human
ccugugcagccgcugagc

SEQ ID NO: 2219361 - RNA, 17 nt, Human
ccugugccucugggacu

SEQ ID NO: 2219362 - RNA, 15 nt, Human
ccugugccucuggga

SEQ ID NO: 2219363 - RNA, 22 nt, Human
ccugugcugcccgucuucagcc

SEQ ID NO: 2219364 - RNA, 21 nt, Human
ccugugccuccucacccccag

SEQ ID NO: 2219365 - RNA, 20 nt, Human
ccugugccuccucaccccca

SEQ ID NO: 2219366 - RNA, 19 nt, Human
ccugugccucugggacugg

SEQ ID NO: 2219367 - RNA, 19 nt, Human
ccugugaggugcagagugc

SEQ ID NO: 2219368 - RNA, 17 nt, Human
ccugugaggcaggggcg

SEQ ID NO: 2219369 - RNA, 23 nt, Human
ccugugaggugcagagugcccag

SEQ ID NO: 2219370 - RNA, 17 nt, Human
ccugugauggggcccug

SEQ ID NO: 2219371 - RNA, 18 nt, Human
ccugugauggggcccugc

SEQ ID NO: 2219372 - RNA, 19 nt, Human
ccugugauggggcccugcc

SEQ ID NO: 2219373 - RNA, 22 nt, Human
ccugugauggggcccugccucc

SEQ ID NO: 2219374 - RNA, 20 nt, Human
ccugugauggggcccugccu

SEQ ID NO: 2219375 - RNA, 21 nt, Human
ccugugauggggcccugccuc

SEQ ID NO: 2219376 - RNA, 16 nt, Human
ccuguccucccauccc

SEQ ID NO: 2219377 - RNA, 22 nt, Human
ccuguccuccaacaccaagcac

SEQ ID NO: 2219378 - RNA, 21 nt, Human
ccuguccuccaacaccaagca

SEQ ID NO: 2219379 - RNA, 15 nt, Human
ccuguccucagcuuc

SEQ ID NO: 2219380 - RNA, 13 nt, Human
ccuguccuccaac

SEQ ID NO: 2219381 - RNA, 13 nt, Human
ccugucccuccca

SEQ ID NO: 2219382 - RNA, 22 nt, Human
ccuguccucacugcucccugaa

SEQ ID NO: 2219383 - RNA, 23 nt, Human
ccuguccuccucggaucaccgag

SEQ ID NO: 2219384 - RNA, 15 nt, Human
ccuguccuccucgga

SEQ ID NO: 2219385 - RNA, 14 nt, Human
ccuguccuccucgg

SEQ ID NO: 2219386 - RNA, 13 nt, Human
ccuguccuccucg

SEQ ID NO: 2219387 - RNA, 17 nt, Human
ccuguccucccaucccc

SEQ ID NO: 2219388 - RNA, 21 nt, Human
ccuguccucccauccccugga

SEQ ID NO: 2219389 - RNA, 22 nt, Human
ccuguccucccauccccuggac

SEQ ID NO: 2219390 - RNA, 23 nt, Human
ccuguccucccauccccuggacu

SEQ ID NO: 2219391 - RNA, 18 nt, Human
ccugugacuucagcucug

SEQ ID NO: 2219392 - RNA, 14 nt, Human
ccuguccuccuggu

SEQ ID NO: 2219393 - RNA, 16 nt, Human
ccuguccuccuggugg

SEQ ID NO: 2219394 - RNA, 17 nt, Human
ccuguccuccugguggg

SEQ ID NO: 2219395 - RNA, 22 nt, Human
ccuguccuccugguggguccag

SEQ ID NO: 2219396 - RNA, 14 nt, Human
ccugugaggcaggg

SEQ ID NO: 2219397 - RNA, 13 nt, Human
ccugugaggcagg

SEQ ID NO: 2219398 - RNA, 20 nt, Human
ccugugagcccagcuggguc

SEQ ID NO: 2219399 - RNA, 20 nt, Human
ccugugaguacuacaguccu

SEQ ID NO: 2219400 - RNA, 17 nt, Human
ccugugagcccagcugg

SEQ ID NO: 2219401 - RNA, 15 nt, Human
ccugugagcccagcu

SEQ ID NO: 2219402 - RNA, 22 nt, Human
ccugugagcuaggaauuguguu

SEQ ID NO: 2219403 - RNA, 16 nt, Human
ccuguccagccugggc

SEQ ID NO: 2219404 - RNA, 14 nt, Human
ccuguccagccugg

SEQ ID NO: 2219405 - RNA, 12 nt, Human
ccuguccagccu

SEQ ID NO: 2219406 - RNA, 13 nt, Human
ccuguccagagag

SEQ ID NO: 2219407 - RNA, 22 nt, Human
ccuguccagccugggcagccag

SEQ ID NO: 2219408 - RNA, 13 nt, Human
ccuguccagcucc

SEQ ID NO: 2219409 - RNA, 15 nt, Human
ccuguccagcuccaa

SEQ ID NO: 2219410 - RNA, 14 nt, Human
ccuguccagcucca

SEQ ID NO: 2219411 - RNA, 23 nt, Human
ccuguccaaccuaaccccuuucc

SEQ ID NO: 2219412 - RNA, 18 nt, Human
ccuguccacacccagcuc

SEQ ID NO: 2219413 - RNA, 16 nt, Human
ccuguccacacccagc

SEQ ID NO: 2219414 - RNA, 22 nt, Human
ccuguccacacccagcucagca

SEQ ID NO: 2219415 - RNA, 19 nt, Human
ccuguccacacccagcuca

SEQ ID NO: 2219416 - RNA, 21 nt, Human
ccuguccacacccagcucagc

SEQ ID NO: 2219417 - RNA, 19 nt, Human
ccuguccaaccuaaccccu

SEQ ID NO: 2219418 - RNA, 12 nt, Human
ccuguccaaccu

SEQ ID NO: 2219419 - RNA, 23 nt, Human
ccuguccaaacugccuaagcccu

SEQ ID NO: 2219420 - RNA, 19 nt, Human
ccuguccaaacugccuaag

SEQ ID NO: 2219421 - RNA, 17 nt, Human
ccuguccaaacugccua

SEQ ID NO: 2219422 - RNA, 19 nt, Human
ccuguccagcuccaaccug

SEQ ID NO: 2219423 - RNA, 16 nt, Human
ccugucccccugacaa

SEQ ID NO: 2219424 - RNA, 17 nt, Human
ccugucccccugacaac

SEQ ID NO: 2219425 - RNA, 18 nt, Human
ccuguccccgcacugggc

SEQ ID NO: 2219426 - RNA, 14 nt, Human
ccuguccccucagc

SEQ ID NO: 2219427 - RNA, 15 nt, Human
ccuguccccucagcu

SEQ ID NO: 2219428 - RNA, 16 nt, Human
ccuguccccucagcuc

SEQ ID NO: 2219429 - RNA, 17 nt, Human
ccuguccccucagcucc

SEQ ID NO: 2219430 - RNA, 18 nt, Human
ccuguccccucagcucca

SEQ ID NO: 2219431 - RNA, 21 nt, Human
ccuguccccucagcuccagac

SEQ ID NO: 2219432 - RNA, 19 nt, Human
ccuguggaaucuggaguga

SEQ ID NO: 2219433 - RNA, 12 nt, Human
ccuucaggguga

SEQ ID NO: 2219434 - RNA, 18 nt, Human
ccuucagggugaugccag

SEQ ID NO: 2219435 - RNA, 19 nt, Human
ccuucagggugaugccagg

SEQ ID NO: 2219436 - RNA, 20 nt, Human
ccuucagggugaugccaggu

SEQ ID NO: 2219437 - RNA, 18 nt, Human
ccuucacaaagcccaagg

SEQ ID NO: 2219438 - RNA, 12 nt, Human
ccuucacaaagc

SEQ ID NO: 2219439 - RNA, 20 nt, Human
ccuucaauuccugggcccca

SEQ ID NO: 2219440 - RNA, 16 nt, Human
ccuucaauuccugggc

SEQ ID NO: 2219441 - RNA, 15 nt, Human
ccuucaauuccuggg

SEQ ID NO: 2219442 - RNA, 14 nt, Human
ccuucaauuccugg

SEQ ID NO: 2219443 - RNA, 19 nt, Human
ccuucaaguuagcucagga

SEQ ID NO: 2219444 - RNA, 17 nt, Human
ccuucaaguuagcucag

SEQ ID NO: 2219445 - RNA, 16 nt, Human
ccuucaauaaaguauc

SEQ ID NO: 2219446 - RNA, 22 nt, Human
ccuucaauaaaugguauagcaa

SEQ ID NO: 2219447 - RNA, 14 nt, Human
ccuucaauaaagua

SEQ ID NO: 2219448 - RNA, 13 nt, Human
ccuucagugccuu

SEQ ID NO: 2219449 - RNA, 14 nt, Human
ccuucagugccuua

SEQ ID NO: 2219450 - RNA, 17 nt, Human
ccuucaguacccucuca

SEQ ID NO: 2219451 - RNA, 19 nt, Human
ccuucaguacccucucagc

SEQ ID NO: 2219452 - RNA, 20 nt, Human
ccuucaguacccucucagcu

SEQ ID NO: 2219453 - RNA, 23 nt, Human
ccuucaguacccucucagcucca

SEQ ID NO: 2219454 - RNA, 20 nt, Human
ccuucagucuugaauuucua

SEQ ID NO: 2219455 - RNA, 24 nt, Human
ccuucaguacccucucagcuccag

SEQ ID NO: 2219456 - RNA, 15 nt, Human
ccuucagugccuuau

SEQ ID NO: 2219457 - RNA, 21 nt, Human
ccuucagucuugaauuucuaa

SEQ ID NO: 2219458 - RNA, 18 nt, Human
ccuucaguuaugauuuuu

SEQ ID NO: 2219459 - RNA, 20 nt, Human
ccuucagugccuuauggaac

SEQ ID NO: 2219460 - RNA, 16 nt, Human
ccuuccaccucccucc

SEQ ID NO: 2219461 - RNA, 15 nt, Human
ccuuccacaccccca

SEQ ID NO: 2219462 - RNA, 18 nt, Human
ccuuccacacccccaccc

SEQ ID NO: 2219463 - RNA, 14 nt, Human
ccuucaucuccagg

SEQ ID NO: 2219464 - RNA, 13 nt, Human
ccuucaucuggaa

SEQ ID NO: 2219465 - RNA, 15 nt, Human
ccuucaucuccaggg

SEQ ID NO: 2219466 - RNA, 14 nt, Human
ccuucaucuggaac

SEQ ID NO: 2219467 - RNA, 17 nt, Human
ccuucaucuccagggag

SEQ ID NO: 2219468 - RNA, 19 nt, Human
ccuuccaugucgccucugc

SEQ ID NO: 2219469 - RNA, 20 nt, Human
ccuuccaugucgccucugca

SEQ ID NO: 2219470 - RNA, 21 nt, Human
ccuuccaugucgccucugcau

SEQ ID NO: 2219471 - RNA, 23 nt, Human
ccuuccaugucgccucugcauuc

SEQ ID NO: 2219472 - RNA, 18 nt, Human
ccuuccaggggugggaca

SEQ ID NO: 2219473 - RNA, 22 nt, Human
ccuuccaggggugggacacccu

SEQ ID NO: 2219474 - RNA, 21 nt, Human
ccuuccacggauccauguagc

SEQ ID NO: 2219475 - RNA, 20 nt, Human
ccuuccacgcugucuccaga

SEQ ID NO: 2219476 - RNA, 20 nt, Human
ccuuccacggauccauguag

SEQ ID NO: 2219477 - RNA, 19 nt, Human
ccuuccacgcugucuccag

SEQ ID NO: 2219478 - RNA, 18 nt, Human
ccuuccacgcugucucca

SEQ ID NO: 2219479 - RNA, 17 nt, Human
ccuuccacugagggcag

SEQ ID NO: 2219480 - RNA, 15 nt, Human
ccuuccacugagggc

SEQ ID NO: 2219481 - RNA, 15 nt, Human
ccuuccagggguggg

SEQ ID NO: 2219482 - RNA, 16 nt, Human
ccuuccagggguggga

SEQ ID NO: 2219483 - RNA, 14 nt, Human
ccuuccucuuucca

SEQ ID NO: 2219484 - RNA, 18 nt, Human
ccuuccucugcagcugac

SEQ ID NO: 2219485 - RNA, 16 nt, Human
ccuuccucugcagcug

SEQ ID NO: 2219486 - RNA, 17 nt, Human
ccuuccucugcagcuga

SEQ ID NO: 2219487 - RNA, 14 nt, Human
ccuuccugccacca

SEQ ID NO: 2219488 - RNA, 20 nt, Human
ccuuccaugucggccucuaa

SEQ ID NO: 2219489 - RNA, 16 nt, Human
ccuucccaaaggacuc

SEQ ID NO: 2219490 - RNA, 19 nt, Human
ccuuccaugucggccucua

SEQ ID NO: 2219491 - RNA, 16 nt, Human
ccuuccauguggagaa

SEQ ID NO: 2219492 - RNA, 14 nt, Human
ccuuccucugaggc

SEQ ID NO: 2219493 - RNA, 12 nt, Human
ccuuccucugca

SEQ ID NO: 2219494 - RNA, 15 nt, Human
ccuuccucugcagcu

SEQ ID NO: 2219495 - RNA, 18 nt, Human
ccuucccaaaggacucca

SEQ ID NO: 2219496 - RNA, 21 nt, Human
ccuucccaaaggacuccaccc

SEQ ID NO: 2219497 - RNA, 15 nt, Human
ccuucgauacaccgg

SEQ ID NO: 2219498 - RNA, 18 nt, Human
ccuuccugccaccugcug

SEQ ID NO: 2219499 - RNA, 11 nt, Human
ccuuccugccc

SEQ ID NO: 2219500 - RNA, 17 nt, Human
ccuuccugccaccugcu

SEQ ID NO: 2219501 - RNA, 17 nt, Human
ccuuccugccaccaguc

SEQ ID NO: 2219502 - RNA, 16 nt, Human
ccuuccugccaccagu

SEQ ID NO: 2219503 - RNA, 20 nt, Human
ccuucgauacaccgggccug

SEQ ID NO: 2219504 - RNA, 22 nt, Human
ccuucgauacaccgggccugga

SEQ ID NO: 2219505 - RNA, 23 nt, Human
ccuucgauacaccgggccuggag

SEQ ID NO: 2219506 - RNA, 13 nt, Human
ccuucgccaccug

SEQ ID NO: 2219507 - RNA, 20 nt, Human
ccuguggccaaguucuuagu

SEQ ID NO: 2219508 - RNA, 23 nt, Human
ccuguggcaucuuugccuugggc

SEQ ID NO: 2219509 - RNA, 18 nt, Human
ccuguggcaucuuugccu

SEQ ID NO: 2219510 - RNA, 15 nt, Human
ccuguggccccaccc

SEQ ID NO: 2219511 - RNA, 16 nt, Human
ccuguggccccacccu

SEQ ID NO: 2219512 - RNA, 17 nt, Human
ccuguggccccacccug

SEQ ID NO: 2219513 - RNA, 14 nt, Human
ccuuaccagcagag

SEQ ID NO: 2219514 - RNA, 18 nt, Human
ccuguggccccacccugg

SEQ ID NO: 2219515 - RNA, 20 nt, Human
ccuguggccccacccugggc

SEQ ID NO: 2219516 - RNA, 22 nt, Human
ccuguggccccacccugggccc

SEQ ID NO: 2219517 - RNA, 19 nt, Human
ccuguggcaggcagcgcca

SEQ ID NO: 2219518 - RNA, 22 nt, Human
ccuguggcaggcagcgccaagc

SEQ ID NO: 2219519 - RNA, 24 nt, Human
ccuguggaagggacuaggagcacu

SEQ ID NO: 2219520 - RNA, 14 nt, Human
ccuguggcaggcag

SEQ ID NO: 2219521 - RNA, 15 nt, Human
ccuguggcaggcagc

SEQ ID NO: 2219522 - RNA, 18 nt, Human
ccuguggcaggcagcgcc

SEQ ID NO: 2219523 - RNA, 20 nt, Human
ccuguggaagggacuaggag

SEQ ID NO: 2219524 - RNA, 19 nt, Human
ccuguggaagggacuagga

SEQ ID NO: 2219525 - RNA, 16 nt, Human
ccuguggaagggacua

SEQ ID NO: 2219526 - RNA, 24 nt, Human
ccugugcugguguccugaccaccc

SEQ ID NO: 2219527 - RNA, 23 nt, Human
ccugugcugcccgucuucagccu

SEQ ID NO: 2219528 - RNA, 12 nt, Human
ccugugcuggug

SEQ ID NO: 2219529 - RNA, 14 nt, Human
ccugugcugguguc

SEQ ID NO: 2219530 - RNA, 17 nt, Human
ccugugcugguguccug

SEQ ID NO: 2219531 - RNA, 18 nt, Human
ccugugcugguguccuga

SEQ ID NO: 2219532 - RNA, 21 nt, Human
ccugugcugguguccugacca

SEQ ID NO: 2219533 - RNA, 22 nt, Human
ccugugcuucgggcccuuccca

SEQ ID NO: 2219534 - RNA, 22 nt, Human
ccugugcugguguccugaccac

SEQ ID NO: 2219535 - RNA, 23 nt, Human
ccugugcugguguccugaccacc

SEQ ID NO: 2219536 - RNA, 14 nt, Human
ccuuaccugccagg

SEQ ID NO: 2219537 - RNA, 14 nt, Human
ccuuaccucuuccg

SEQ ID NO: 2219538 - RNA, 20 nt, Human
ccuuaccuccugcccaggag

SEQ ID NO: 2219539 - RNA, 18 nt, Human
ccuuaccuccugcccagg

SEQ ID NO: 2219540 - RNA, 17 nt, Human
ccuuaccuccugcccag

SEQ ID NO: 2219541 - RNA, 16 nt, Human
ccuuaccuccugccca

SEQ ID NO: 2219542 - RNA, 14 nt, Human
ccuuaccuccugcc

SEQ ID NO: 2219543 - RNA, 13 nt, Human
ccuuaccuccugc

SEQ ID NO: 2219544 - RNA, 20 nt, Human
ccuuaccucggugccuuccu

SEQ ID NO: 2219545 - RNA, 17 nt, Human
ccuuaccagcagagcac

SEQ ID NO: 2219546 - RNA, 17 nt, Human
ccuuacccuccuuggga

SEQ ID NO: 2219547 - RNA, 15 nt, Human
ccuuaccagcagagc

SEQ ID NO: 2219548 - RNA, 16 nt, Human
ccuuaccagcagagca

SEQ ID NO: 2219549 - RNA, 14 nt, Human
ccuuagaaccuuuc

SEQ ID NO: 2219550 - RNA, 15 nt, Human
ccuuagaaccuuucu

SEQ ID NO: 2219551 - RNA, 16 nt, Human
ccuuagaaccuuucuu

SEQ ID NO: 2219552 - RNA, 18 nt, Human
ccuuagaaccuuucuuac

SEQ ID NO: 2219553 - RNA, 16 nt, Human
ccuuagacagucccug

SEQ ID NO: 2219554 - RNA, 17 nt, Human
ccuuagacagucccugc

SEQ ID NO: 2219555 - RNA, 21 nt, Human
ccuuagacagucccugccaau

SEQ ID NO: 2219556 - RNA, 20 nt, Human
ccuuagaacauuuuaauuca

SEQ ID NO: 2219557 - RNA, 18 nt, Human
ccuuagacagucccugcc

SEQ ID NO: 2219558 - RNA, 19 nt, Human
ccuuagacagucccugcca

SEQ ID NO: 2219559 - RNA, 16 nt, Human
ccuuagagacaucaaa

SEQ ID NO: 2219560 - RNA, 15 nt, Human
ccuuagagccaggca

SEQ ID NO: 2219561 - RNA, 16 nt, Human
ccuuagaccuuccaua

SEQ ID NO: 2219562 - RNA, 16 nt, Human
ccuuagauuagcucug

SEQ ID NO: 2219563 - RNA, 16 nt, Human
ccuuagagccaggcac

SEQ ID NO: 2219564 - RNA, 17 nt, Human
ccuuagagccaggcaca

SEQ ID NO: 2219565 - RNA, 18 nt, Human
ccuuagagccaggcacac

SEQ ID NO: 2219566 - RNA, 15 nt, Human
ccuuauuguaccucu

SEQ ID NO: 2219567 - RNA, 16 nt, Human
ccuuauuguaccucuc

SEQ ID NO: 2219568 - RNA, 18 nt, Human
ccuuagauuagcucugga

SEQ ID NO: 2219569 - RNA, 21 nt, Human
ccuuagauuagcucuggacca

SEQ ID NO: 2219570 - RNA, 15 nt, Human
ccuucaaagcaaaug

SEQ ID NO: 2219571 - RNA, 18 nt, Human
ccuuauuuucaagaaacu

SEQ ID NO: 2219572 - RNA, 14 nt, Human
ccuuauuuucaaga

SEQ ID NO: 2219573 - RNA, 16 nt, Human
ccuuauuuuuucccaa

SEQ ID NO: 2219574 - RNA, 15 nt, Human
ccuuauuuuuuccca

SEQ ID NO: 2219575 - RNA, 19 nt, Human
ccuucaaagcaaaugucuu

SEQ ID NO: 2219576 - RNA, 14 nt, Human
ccuucaaccauucc

SEQ ID NO: 2219577 - RNA, 19 nt, Human
ccuucaagaacucugggcu

SEQ ID NO: 2219578 - RNA, 13 nt, Human
ccuucaagaccuu

SEQ ID NO: 2219579 - RNA, 18 nt, Human
ccuucaagaccuucacca

SEQ ID NO: 2219580 - RNA, 24 nt, Human
ccuucaacugaaaagacucagugu

SEQ ID NO: 2219581 - RNA, 13 nt, Human
ccuucaacugaaa

SEQ ID NO: 2219582 - RNA, 22 nt, Human
ccuucaagaccuucaccaaaca

SEQ ID NO: 2219583 - RNA, 23 nt, Human
ccuucaagaucauguaccccaau

SEQ ID NO: 2219584 - RNA, 19 nt, Human
ccuucagugccuuauggaa

SEQ ID NO: 2219585 - RNA, 11 nt, Human
ccuuuggcuuc

SEQ ID NO: 2219586 - RNA, 13 nt, Human
ccuugacagggca

SEQ ID NO: 2219587 - RNA, 15 nt, Human
ccuuggcaugccuuc

SEQ ID NO: 2219588 - RNA, 18 nt, Human
ccuuggcaucuagagcuu

SEQ ID NO: 2219589 - RNA, 19 nt, Human
ccuuggcaucacagggcag

SEQ ID NO: 2219590 - RNA, 23 nt, Human
ccuuggcaccagacacccaggac

SEQ ID NO: 2219591 - RNA, 22 nt, Human
ccuuggcaccagacacccagga

SEQ ID NO: 2219592 - RNA, 21 nt, Human
ccuuggcaccagacacccagg

SEQ ID NO: 2219593 - RNA, 20 nt, Human
ccuuggcaccagacacccag

SEQ ID NO: 2219594 - RNA, 15 nt, Human
ccuuggcaccagaca

SEQ ID NO: 2219595 - RNA, 14 nt, Human
ccuugaucuguaua

SEQ ID NO: 2219596 - RNA, 19 nt, Human
ccuuggauuguccccgacc

SEQ ID NO: 2219597 - RNA, 23 nt, Human
ccuugaguugauucagcucugca

SEQ ID NO: 2219598 - RNA, 22 nt, Human
ccuugaguugauucagcucugc

SEQ ID NO: 2219599 - RNA, 15 nt, Human
ccuugaccaggccug

SEQ ID NO: 2219600 - RNA, 16 nt, Human
ccuugaccaggccugg

SEQ ID NO: 2219601 - RNA, 21 nt, Human
ccuugaccauucuccaccugc

SEQ ID NO: 2219602 - RNA, 14 nt, Human
ccuugacagggcac

SEQ ID NO: 2219603 - RNA, 14 nt, Human
ccuugacaccugcu

SEQ ID NO: 2219604 - RNA, 23 nt, Human
ccuugacaaagucaagccacaug

SEQ ID NO: 2219605 - RNA, 12 nt, Human
ccuugaaugugg

SEQ ID NO: 2219606 - RNA, 21 nt, Human
ccuugacaaagucaagccaca

SEQ ID NO: 2219607 - RNA, 15 nt, Human
ccuugacagggcaca

SEQ ID NO: 2219608 - RNA, 17 nt, Human
ccuugacagggcacacc

SEQ ID NO: 2219609 - RNA, 19 nt, Human
ccuugaccauucuccaccu

SEQ ID NO: 2219610 - RNA, 20 nt, Human
ccuugaccauucuccaccug

SEQ ID NO: 2219611 - RNA, 14 nt, Human
ccuucuuuuucuuc

SEQ ID NO: 2219612 - RNA, 16 nt, Human
ccuucuuuuucuucuu

SEQ ID NO: 2219613 - RNA, 15 nt, Human
ccuugaaaacacugu

SEQ ID NO: 2219614 - RNA, 13 nt, Human
ccuucuuugauaa

SEQ ID NO: 2219615 - RNA, 17 nt, Human
ccuucgcgguggaaggc

SEQ ID NO: 2219616 - RNA, 20 nt, Human
ccuucgcgguggaaggcccg

SEQ ID NO: 2219617 - RNA, 18 nt, Human
ccuucuuugcuugccucu

SEQ ID NO: 2219618 - RNA, 18 nt, Human
ccuucuuugauaauguua

SEQ ID NO: 2219619 - RNA, 19 nt, Human
ccuucuuugauaauguuaa

SEQ ID NO: 2219620 - RNA, 20 nt, Human
ccuucuuugauaauguuaaa

SEQ ID NO: 2219621 - RNA, 21 nt, Human
ccuucuuugauaauguuaaau

SEQ ID NO: 2219622 - RNA, 13 nt, Human
ccuucgcuccugu

SEQ ID NO: 2219623 - RNA, 14 nt, Human
ccuucgcuccugug

SEQ ID NO: 2219624 - RNA, 15 nt, Human
ccuucgcuccugugu

SEQ ID NO: 2219625 - RNA, 18 nt, Human
ccuucgcuccugugucuu

SEQ ID NO: 2219626 - RNA, 14 nt, Human
ccuugaacugggua

SEQ ID NO: 2219627 - RNA, 22 nt, Human
ccuugaaaacacuguucucugc

SEQ ID NO: 2219628 - RNA, 19 nt, Human
ccuugaaaacacuguucuc

SEQ ID NO: 2219629 - RNA, 21 nt, Human
ccuugaaaacacuguucucug

SEQ ID NO: 2219630 - RNA, 16 nt, Human
ccuugaacuggguacu

SEQ ID NO: 2219631 - RNA, 17 nt, Human
ccuugaacuuugaccuc

SEQ ID NO: 2219632 - RNA, 17 nt, Human
ccuugaaugaugccaug

SEQ ID NO: 2219633 - RNA, 19 nt, Human
ccuugaacuuugaccucug

SEQ ID NO: 2219634 - RNA, 16 nt, Human
cguuugagaagaaaac

SEQ ID NO: 2219635 - RNA, 17 nt, Human
cguuugaccuuuuaugu

SEQ ID NO: 2219636 - RNA, 12 nt, Human
cguuucuucccu

SEQ ID NO: 2219637 - RNA, 13 nt, Human
cguuucuucccug

SEQ ID NO: 2219638 - RNA, 21 nt, Human
cguuugagaagaaaacaucua

SEQ ID NO: 2219639 - RNA, 23 nt, Human
cguuuuuauaaaaaauggugccu

SEQ ID NO: 2219640 - RNA, 23 nt, Human
cguuuugugugguggcaccuccu

SEQ ID NO: 2219641 - RNA, 15 nt, Human
cguuuuggaagcucu

SEQ ID NO: 2219642 - RNA, 20 nt, Human
cguuuugaagcuacugugug

SEQ ID NO: 2219643 - RNA, 13 nt, Human
cguuuugaagcua

SEQ ID NO: 2219644 - RNA, 15 nt, Human
cguuuucuguuugga

SEQ ID NO: 2219645 - RNA, 11 nt, Human
cguuuccauca

SEQ ID NO: 2219646 - RNA, 22 nt, Human
cguuuccaucagguuccauccc

SEQ ID NO: 2219647 - RNA, 20 nt, Human
cguuuccugagaagugucua

SEQ ID NO: 2219648 - RNA, 18 nt, Human
cguuucuccaccuagacu

SEQ ID NO: 2219649 - RNA, 22 nt, Human
cguuucuccaccuagacuguaa

SEQ ID NO: 2219650 - RNA, 20 nt, Human
cguuucuaugacacaugcaa

SEQ ID NO: 2219651 - RNA, 21 nt, Human
cguuucuaaaggcuaccuuug

SEQ ID NO: 2219652 - RNA, 19 nt, Human
cguuucuaaaggcuaccuu

SEQ ID NO: 2219653 - RNA, 14 nt, Human
cguucugcucauca

SEQ ID NO: 2219654 - RNA, 12 nt, Human
cguucucugccu

SEQ ID NO: 2219655 - RNA, 12 nt, Human
cguucugugcac

SEQ ID NO: 2219656 - RNA, 20 nt, Human
cguucuguuuacaucaguuu

SEQ ID NO: 2219657 - RNA, 17 nt, Human
cguucugcuggccugga

SEQ ID NO: 2219658 - RNA, 18 nt, Human
cguucugcuggccuggau

SEQ ID NO: 2219659 - RNA, 18 nt, Human
cguuccuuacugcagaau

SEQ ID NO: 2219660 - RNA, 15 nt, Human
cguucucacacccac

SEQ ID NO: 2219661 - RNA, 16 nt, Human
cguucucacacccacc

SEQ ID NO: 2219662 - RNA, 18 nt, Human
cguucucacacccaccgu

SEQ ID NO: 2219663 - RNA, 14 nt, Human
cguucucacaccca

SEQ ID NO: 2219664 - RNA, 20 nt, Human
cguuccuauugucauuaaag

SEQ ID NO: 2219665 - RNA, 22 nt, Human
cguuccuucaaagcaaaugucu

SEQ ID NO: 2219666 - RNA, 17 nt, Human
cguuccuauugucauua

SEQ ID NO: 2219667 - RNA, 20 nt, Human
cguuccaugaugcugggauu

SEQ ID NO: 2219668 - RNA, 22 nt, Human
cguuucagugucaaauaaacac

SEQ ID NO: 2219669 - RNA, 22 nt, Human
cguuucagcgacuccguuggcc

SEQ ID NO: 2219670 - RNA, 22 nt, Human
cguuucauuuagucaugugacc

SEQ ID NO: 2219671 - RNA, 15 nt, Human
cguuucaaaaacaca

SEQ ID NO: 2219672 - RNA, 23 nt, Human
cguuucagugucaaauaaacacu

SEQ ID NO: 2219673 - RNA, 13 nt, Human
cguuucaaaaaca

SEQ ID NO: 2219674 - RNA, 15 nt, Human
cguuuauuuucaaga

SEQ ID NO: 2219675 - RNA, 14 nt, Human
cguuuauuuucaag

SEQ ID NO: 2219676 - RNA, 20 nt, Human
cguuuacuaugccugugucu

SEQ ID NO: 2219677 - RNA, 20 nt, Human
cguuuacuuaucuuaugcca

SEQ ID NO: 2219678 - RNA, 12 nt, Human
cguucuguuuac

SEQ ID NO: 2219679 - RNA, 21 nt, Human
cguggcugcccacacacccca

SEQ ID NO: 2219680 - RNA, 13 nt, Human
cguggcucugcug

SEQ ID NO: 2219681 - RNA, 14 nt, Human
cguggcucugcugg

SEQ ID NO: 2219682 - RNA, 15 nt, Human
cguggcucugcuggc

SEQ ID NO: 2219683 - RNA, 12 nt, Human
cguggcugcuuc

SEQ ID NO: 2219684 - RNA, 14 nt, Human
cguggcugcuucaa

SEQ ID NO: 2219685 - RNA, 15 nt, Human
cguggcugcuucaag

SEQ ID NO: 2219686 - RNA, 19 nt, Human
cguggcugcggcacccuug

SEQ ID NO: 2219687 - RNA, 17 nt, Human
cguggcugcuucaagga

SEQ ID NO: 2219688 - RNA, 13 nt, Human
cguuccaguuccc

SEQ ID NO: 2219689 - RNA, 21 nt, Human
cguuccagccggcauggcugg

SEQ ID NO: 2219690 - RNA, 10 nt, Human
cguuccagcc

SEQ ID NO: 2219691 - RNA, 11 nt, Human
cguuccagccg

SEQ ID NO: 2219692 - RNA, 20 nt, Human
cguggccuuccccagccucu

SEQ ID NO: 2219693 - RNA, 23 nt, Human
cguggccucuugagcaguggcug

SEQ ID NO: 2219694 - RNA, 15 nt, Human
cguggccucuugagc

SEQ ID NO: 2219695 - RNA, 16 nt, Human
cguggccucuugagca

SEQ ID NO: 2219696 - RNA, 22 nt, Human
cguggcuaagaguguccuagga

SEQ ID NO: 2219697 - RNA, 14 nt, Human
cguggcucagccag

SEQ ID NO: 2219698 - RNA, 18 nt, Human
cguggcucagccagcacu

SEQ ID NO: 2219699 - RNA, 15 nt, Human
cguggcucagccagc

SEQ ID NO: 2219700 - RNA, 15 nt, Human
cgugccuguguccau

SEQ ID NO: 2219701 - RNA, 23 nt, Human
cgugccuccuuccaccucccucc

SEQ ID NO: 2219702 - RNA, 16 nt, Human
cgugccuuuugcaccc

SEQ ID NO: 2219703 - RNA, 17 nt, Human
cgugccuuuugcacccc

SEQ ID NO: 2219704 - RNA, 19 nt, Human
cgugccuuuugcaccccuc

SEQ ID NO: 2219705 - RNA, 20 nt, Human
cgugccuuuugcaccccucc

SEQ ID NO: 2219706 - RNA, 21 nt, Human
cgugccuuuugcaccccuccc

SEQ ID NO: 2219707 - RNA, 23 nt, Human
cguggccccagccuggcccagcu

SEQ ID NO: 2219708 - RNA, 13 nt, Human
cgugccuucagcu

SEQ ID NO: 2219709 - RNA, 15 nt, Human
cgugccuucagcucu

SEQ ID NO: 2219710 - RNA, 16 nt, Human
cgugccuucagcucua

SEQ ID NO: 2219711 - RNA, 18 nt, Human
cgugccuucagcucuaca

SEQ ID NO: 2219712 - RNA, 16 nt, Human
cgugccuggccacgcc

SEQ ID NO: 2219713 - RNA, 12 nt, Human
cgugccuguguc

SEQ ID NO: 2219714 - RNA, 14 nt, Human
cgugccugugucca

SEQ ID NO: 2219715 - RNA, 12 nt, Human
cgugccuggcca

SEQ ID NO: 2219716 - RNA, 22 nt, Human
cgugccuccaccaccacuggcc

SEQ ID NO: 2219717 - RNA, 23 nt, Human
cgugccuccaccaccacuggcca

SEQ ID NO: 2219718 - RNA, 19 nt, Human
cgugccuccuuccaccucc

SEQ ID NO: 2219719 - RNA, 20 nt, Human
cgugccuccuuccaccuccc

SEQ ID NO: 2219720 - RNA, 17 nt, Human
cuaaaaaaaaaaaagua

SEQ ID NO: 2219721 - RNA, 16 nt, Human
cggugcuguccucagg

SEQ ID NO: 2219722 - RNA, 16 nt, Human
cggugcuccaggcagg

SEQ ID NO: 2219723 - RNA, 17 nt, Human
cggugcuguccucaggu

SEQ ID NO: 2219724 - RNA, 21 nt, Human
cggugcuguccucagguggcc

SEQ ID NO: 2219725 - RNA, 15 nt, Human
cggggccccagggcu

SEQ ID NO: 2219726 - RNA, 17 nt, Human
cggggccucgggaccuc

SEQ ID NO: 2219727 - RNA, 13 nt, Human
cggugcuccaggc

SEQ ID NO: 2219728 - RNA, 14 nt, Human
cggugcuccaggca

SEQ ID NO: 2219729 - RNA, 15 nt, Human
cggugcuccaggcag

SEQ ID NO: 2219730 - RNA, 22 nt, Human
cggugcuguccucagguggcca

SEQ ID NO: 2219731 - RNA, 13 nt, Human
cgguggaggccag

SEQ ID NO: 2219732 - RNA, 14 nt, Human
cgguggaggccagg

SEQ ID NO: 2219733 - RNA, 15 nt, Human
cgguggaggccaggg

SEQ ID NO: 2219734 - RNA, 11 nt, Human
cgguggccucu

SEQ ID NO: 2219735 - RNA, 14 nt, Human
cgguggcccugucc

SEQ ID NO: 2219736 - RNA, 16 nt, Human
cgguggcccugucccu

SEQ ID NO: 2219737 - RNA, 19 nt, Human
cguagaucaccagaauaaa

SEQ ID NO: 2219738 - RNA, 18 nt, Human
cguagaucaccagaauaa

SEQ ID NO: 2219739 - RNA, 14 nt, Human
cggggcagcugcca

SEQ ID NO: 2219740 - RNA, 15 nt, Human
cggggcacugcaggg

SEQ ID NO: 2219741 - RNA, 18 nt, Human
cggggaguuucuuuccug

SEQ ID NO: 2219742 - RNA, 19 nt, Human
cggggaguuucuuuccugc

SEQ ID NO: 2219743 - RNA, 19 nt, Human
cggggcaugcuggggcaag

SEQ ID NO: 2219744 - RNA, 17 nt, Human
cggggcaugcuggggca

SEQ ID NO: 2219745 - RNA, 16 nt, Human
cggggcaugcuggggc

SEQ ID NO: 2219746 - RNA, 19 nt, Human
cggggcagcugccagagaa

SEQ ID NO: 2219747 - RNA, 14 nt, Human
cggggccccagggc

SEQ ID NO: 2219748 - RNA, 23 nt, Human
cggugcuaucucccccagcccca

SEQ ID NO: 2219749 - RNA, 17 nt, Human
cguaguagggucaggcc

SEQ ID NO: 2219750 - RNA, 17 nt, Human
cguaggggagggguugc

SEQ ID NO: 2219751 - RNA, 14 nt, Human
cguaggggaggggu

SEQ ID NO: 2219752 - RNA, 13 nt, Human
cguaguucccuga

SEQ ID NO: 2219753 - RNA, 14 nt, Human
cguaguucccugaa

SEQ ID NO: 2219754 - RNA, 23 nt, Human
cguaggggagggguugccacagg

SEQ ID NO: 2219755 - RNA, 20 nt, Human
cguagccaaggugggcugag

SEQ ID NO: 2219756 - RNA, 21 nt, Human
cguagauucccaucauacacu

SEQ ID NO: 2219757 - RNA, 16 nt, Human
cguagccagcugcucc

SEQ ID NO: 2219758 - RNA, 19 nt, Human
cguagccagcugcucccca

SEQ ID NO: 2219759 - RNA, 16 nt, Human
cguagcugcaaaggac

SEQ ID NO: 2219760 - RNA, 22 nt, Human
cguagcuucuaccaugaacaga

SEQ ID NO: 2219761 - RNA, 16 nt, Human
cguauaaaagccuguu

SEQ ID NO: 2219762 - RNA, 17 nt, Human
cguauaaaagccuguuu

SEQ ID NO: 2219763 - RNA, 21 nt, Human
cguauaaaagccuguuuaaga

SEQ ID NO: 2219764 - RNA, 22 nt, Human
cguauaaaagccuguuuaagag

SEQ ID NO: 2219765 - RNA, 13 nt, Human
cguaugcauguga

SEQ ID NO: 2219766 - RNA, 15 nt, Human
cguauguaaauguau

SEQ ID NO: 2219767 - RNA, 16 nt, Human
cguaugucuguuacca

SEQ ID NO: 2219768 - RNA, 15 nt, Human
cguauugguccagcu

SEQ ID NO: 2219769 - RNA, 20 nt, Human
cguaugucuguuaccauguc

SEQ ID NO: 2219770 - RNA, 22 nt, Human
cguauaugucucaggucccugc

SEQ ID NO: 2219771 - RNA, 22 nt, Human
cguaguucccugaaaacccaga

SEQ ID NO: 2219772 - RNA, 12 nt, Human
cguauagcugua

SEQ ID NO: 2219773 - RNA, 15 nt, Human
cguauagcuguauug

SEQ ID NO: 2219774 - RNA, 16 nt, Human
cguauagcuguauuga

SEQ ID NO: 2219775 - RNA, 17 nt, Human
cgucaacgugcauuuua

SEQ ID NO: 2219776 - RNA, 18 nt, Human
cgucaccaucucaggcca

SEQ ID NO: 2219777 - RNA, 14 nt, Human
cgucaccaccucuc

SEQ ID NO: 2219778 - RNA, 16 nt, Human
cgucaccaucucaggc

SEQ ID NO: 2219779 - RNA, 21 nt, Human
cgucaccaucucaggccaccu

SEQ ID NO: 2219780 - RNA, 20 nt, Human
cgucaccaucucaggccacc

SEQ ID NO: 2219781 - RNA, 12 nt, Human
cgucaccucaga

SEQ ID NO: 2219782 - RNA, 17 nt, Human
cgucagaagcacccagg

SEQ ID NO: 2219783 - RNA, 12 nt, Human
cgucagccucca

SEQ ID NO: 2219784 - RNA, 13 nt, Human
cgucagccuccag

SEQ ID NO: 2219785 - RNA, 14 nt, Human
cgucagccuccagc

SEQ ID NO: 2219786 - RNA, 11 nt, Human
cguccagggag

SEQ ID NO: 2219787 - RNA, 21 nt, Human
cgucccccucuggcuccagcu

SEQ ID NO: 2219788 - RNA, 14 nt, Human
cgucccccucuggc

SEQ ID NO: 2219789 - RNA, 15 nt, Human
cgucauguuccucaa

SEQ ID NO: 2219790 - RNA, 20 nt, Human
cgucauggcuuaauguuuau

SEQ ID NO: 2219791 - RNA, 15 nt, Human
cgucaugcuuguguu

SEQ ID NO: 2219792 - RNA, 19 nt, Human
cgucauggcuuaauguuua

SEQ ID NO: 2219793 - RNA, 21 nt, Human
cguccagccgccauugccacc

SEQ ID NO: 2219794 - RNA, 19 nt, Human
cguccaggagccugugccu

SEQ ID NO: 2219795 - RNA, 22 nt, Human
cguccacggcucuagguggggc

SEQ ID NO: 2219796 - RNA, 22 nt, Human
cguccaccaugggguccuacca

SEQ ID NO: 2219797 - RNA, 16 nt, Human
cguccacggcucuagg

SEQ ID NO: 2219798 - RNA, 19 nt, Human
cgucaucacuuuucaguga

SEQ ID NO: 2219799 - RNA, 17 nt, Human
cgucaucuaguuuuaaa

SEQ ID NO: 2219800 - RNA, 20 nt, Human
cgucaucauuuuuccuuccc

SEQ ID NO: 2219801 - RNA, 14 nt, Human
cgucaucuaguuuu

SEQ ID NO: 2219802 - RNA, 17 nt, Human
cgucaguaucaggccug

SEQ ID NO: 2219803 - RNA, 15 nt, Human
cgucagugccuaccc

SEQ ID NO: 2219804 - RNA, 15 nt, Human
cgucaguauuuuccc

SEQ ID NO: 2219805 - RNA, 19 nt, Human
cgucagcuggcacugucuc

SEQ ID NO: 2219806 - RNA, 20 nt, Human
cgucagccuccagccucugu

SEQ ID NO: 2219807 - RNA, 20 nt, Human
cgucagggcccaagucccug

SEQ ID NO: 2219808 - RNA, 15 nt, Human
cgucagccuccagcc

SEQ ID NO: 2219809 - RNA, 16 nt, Human
cgucagccuccagccu

SEQ ID NO: 2219810 - RNA, 17 nt, Human
cgucagccuccagccuc

SEQ ID NO: 2219811 - RNA, 18 nt, Human
cgucagccuccagccucu

SEQ ID NO: 2219812 - RNA, 15 nt, Human
cgucgcccucccagg

SEQ ID NO: 2219813 - RNA, 13 nt, Human
cgucgcacagucu

SEQ ID NO: 2219814 - RNA, 16 nt, Human
cgucgcacagucucuc

SEQ ID NO: 2219815 - RNA, 16 nt, Human
cgucgcccucccaggc

SEQ ID NO: 2219816 - RNA, 18 nt, Human
cgucggggggacagcucc

SEQ ID NO: 2219817 - RNA, 16 nt, Human
cgucgaggggcucuca

SEQ ID NO: 2219818 - RNA, 21 nt, Human
cguccuccucaccucaugccc

SEQ ID NO: 2219819 - RNA, 17 nt, Human
cgucgaggggcucucag

SEQ ID NO: 2219820 - RNA, 17 nt, Human
cguccuccucaccucau

SEQ ID NO: 2219821 - RNA, 17 nt, Human
cguccucccgggcccuc

SEQ ID NO: 2219822 - RNA, 18 nt, Human
cguccucccgggcccucc

SEQ ID NO: 2219823 - RNA, 22 nt, Human
cguccucccccugccagugccu

SEQ ID NO: 2219824 - RNA, 17 nt, Human
cguccucccccugccag

SEQ ID NO: 2219825 - RNA, 14 nt, Human
cguccucccgggcc

SEQ ID NO: 2219826 - RNA, 16 nt, Human
cguccucccgggcccu

SEQ ID NO: 2219827 - RNA, 16 nt, Human
cguccucccccugcca

SEQ ID NO: 2219828 - RNA, 15 nt, Human
cguccucccccugcc

SEQ ID NO: 2219829 - RNA, 13 nt, Human
cguccucccccug

SEQ ID NO: 2219830 - RNA, 22 nt, Human
cguccucaccccuguccucacu

SEQ ID NO: 2219831 - RNA, 20 nt, Human
cguccggcaguucugggugc

SEQ ID NO: 2219832 - RNA, 19 nt, Human
cguccgcccugcuccuccc

SEQ ID NO: 2219833 - RNA, 22 nt, Human
cguccgcccugcuccucccugg

SEQ ID NO: 2219834 - RNA, 15 nt, Human
cguccgcgcgccagc

SEQ ID NO: 2219835 - RNA, 14 nt, Human
cguccucaccccug

SEQ ID NO: 2219836 - RNA, 17 nt, Human
cguccucaccccugucc

SEQ ID NO: 2219837 - RNA, 20 nt, Human
cguccucaccccuguccuca

SEQ ID NO: 2219838 - RNA, 22 nt, Human
cgucccccucuggcuccagcug

SEQ ID NO: 2219839 - RNA, 17 nt, Human
cgucccauauccugccu

SEQ ID NO: 2219840 - RNA, 15 nt, Human
cgucccauauccugc

SEQ ID NO: 2219841 - RNA, 13 nt, Human
cgucccccugggg

SEQ ID NO: 2219842 - RNA, 11 nt, Human
cguccccuguc

SEQ ID NO: 2219843 - RNA, 13 nt, Human
cgucccugcccau

SEQ ID NO: 2219844 - RNA, 14 nt, Human
cgucccugcccaug

SEQ ID NO: 2219845 - RNA, 12 nt, Human
cguccgcccugc

SEQ ID NO: 2219846 - RNA, 15 nt, Human
cguccgcccugcucc

SEQ ID NO: 2219847 - RNA, 14 nt, Human
cguccccugucccc

SEQ ID NO: 2219848 - RNA, 19 nt, Human
cgucuaagucaugagcuga

SEQ ID NO: 2219849 - RNA, 14 nt, Human
cgucuaccugaggg

SEQ ID NO: 2219850 - RNA, 22 nt, Human
cgucucucccucccuuugaaau

SEQ ID NO: 2219851 - RNA, 13 nt, Human
cgucucucuccca

SEQ ID NO: 2219852 - RNA, 14 nt, Human
cgucucucucccau

SEQ ID NO: 2219853 - RNA, 18 nt, Human
cgucucucucccauggag

SEQ ID NO: 2219854 - RNA, 23 nt, Human
cgucugcuaacuuggagccccag

SEQ ID NO: 2219855 - RNA, 16 nt, Human
cgucugacccucucca

SEQ ID NO: 2219856 - RNA, 23 nt, Human
cgucucucucccauggagcccca

SEQ ID NO: 2219857 - RNA, 15 nt, Human
cgucuggaaguccaa

SEQ ID NO: 2219858 - RNA, 14 nt, Human
cgucuggaggggcc

SEQ ID NO: 2219859 - RNA, 18 nt, Human
cgucuggaggggccccug

SEQ ID NO: 2219860 - RNA, 20 nt, Human
cgucuggaggggccccugcu

SEQ ID NO: 2219861 - RNA, 23 nt, Human
cgucuggaggggccccugcuucu

SEQ ID NO: 2219862 - RNA, 13 nt, Human
cgucugacaggca

SEQ ID NO: 2219863 - RNA, 14 nt, Human
cgucugacaggcaa

SEQ ID NO: 2219864 - RNA, 23 nt, Human
cgucugggguucagccccuccuc

SEQ ID NO: 2219865 - RNA, 19 nt, Human
cgucugggguucagccccu

SEQ ID NO: 2219866 - RNA, 18 nt, Human
cgucugggguucagcccc

SEQ ID NO: 2219867 - RNA, 17 nt, Human
cgucugggguucagccc

SEQ ID NO: 2219868 - RNA, 24 nt, Human
cgucuggaggggccccugcuucuc

SEQ ID NO: 2219869 - RNA, 14 nt, Human
cgucugggagaaau

SEQ ID NO: 2219870 - RNA, 21 nt, Human
cgucugggagaaauugacaga

SEQ ID NO: 2219871 - RNA, 22 nt, Human
cgucugggagaaauugacagau

SEQ ID NO: 2219872 - RNA, 15 nt, Human
cgucuguauauuuug

SEQ ID NO: 2219873 - RNA, 21 nt, Human
cgucuguggcuuucagccucu

SEQ ID NO: 2219874 - RNA, 24 nt, Human
cgugaaacacaccaggcugugggc

SEQ ID NO: 2219875 - RNA, 22 nt, Human
cgugaaacacaccaggcugugg

SEQ ID NO: 2219876 - RNA, 20 nt, Human
cgugaaacacaccaggcugu

SEQ ID NO: 2219877 - RNA, 16 nt, Human
cgugaaacacaccagg

SEQ ID NO: 2219878 - RNA, 16 nt, Human
cgugaaagcagaugag

SEQ ID NO: 2219879 - RNA, 15 nt, Human
cgugaaacacaccag

SEQ ID NO: 2219880 - RNA, 12 nt, Human
cgugaaacacac

SEQ ID NO: 2219881 - RNA, 17 nt, Human
cgucuguuuauaaacau

SEQ ID NO: 2219882 - RNA, 18 nt, Human
cgucugucuucacagcuc

SEQ ID NO: 2219883 - RNA, 14 nt, Human
cgucuguucccccu

SEQ ID NO: 2219884 - RNA, 19 nt, Human
cgucuguggcuuucagccu

SEQ ID NO: 2219885 - RNA, 12 nt, Human
cgugacaacacu

SEQ ID NO: 2219886 - RNA, 19 nt, Human
cgugaaggccgagaagcaa

SEQ ID NO: 2219887 - RNA, 13 nt, Human
cgugaagggauuu

SEQ ID NO: 2219888 - RNA, 13 nt, Human
cgugaaacccugu

SEQ ID NO: 2219889 - RNA, 20 nt, Human
cgugcacacaccagagccca

SEQ ID NO: 2219890 - RNA, 21 nt, Human
cgugcacacaccagagcccac

SEQ ID NO: 2219891 - RNA, 19 nt, Human
cgugccguuacucuccaac

SEQ ID NO: 2219892 - RNA, 17 nt, Human
cgugccguuacucucca

SEQ ID NO: 2219893 - RNA, 13 nt, Human
cgugccuccacca

SEQ ID NO: 2219894 - RNA, 14 nt, Human
cgugccuccaccac

SEQ ID NO: 2219895 - RNA, 17 nt, Human
cgugccuccaccaccac

SEQ ID NO: 2219896 - RNA, 18 nt, Human
cgugccuccaccaccacu

SEQ ID NO: 2219897 - RNA, 20 nt, Human
cgugccuccaccaccacugg

SEQ ID NO: 2219898 - RNA, 21 nt, Human
cgugccuccaccaccacuggc

SEQ ID NO: 2219899 - RNA, 16 nt, Human
cgugcccaguggcugc

SEQ ID NO: 2219900 - RNA, 20 nt, Human
cgugcccaguggcugcuccu

SEQ ID NO: 2219901 - RNA, 17 nt, Human
cgugccccgccuccccg

SEQ ID NO: 2219902 - RNA, 22 nt, Human
cgugccagucgcgcugccugug

SEQ ID NO: 2219903 - RNA, 19 nt, Human
cgugcccaggggcccacag

SEQ ID NO: 2219904 - RNA, 21 nt, Human
cgugccagucgcgcugccugu

SEQ ID NO: 2219905 - RNA, 19 nt, Human
cgugcauaccacuuuuguu

SEQ ID NO: 2219906 - RNA, 15 nt, Human
cgugcaccuguacuc

SEQ ID NO: 2219907 - RNA, 17 nt, Human
cgugaaguauacuguau

SEQ ID NO: 2219908 - RNA, 22 nt, Human
cgugcacacaccagagcccacc

SEQ ID NO: 2219909 - RNA, 18 nt, Human
cgugcauaccacuuuugu

SEQ ID NO: 2219910 - RNA, 14 nt, Human
cgugcauaccacuu

SEQ ID NO: 2219911 - RNA, 21 nt, Human
cgcgucgcccucccaggcucu

SEQ ID NO: 2219912 - RNA, 12 nt, Human
cgcgucuccugu

SEQ ID NO: 2219913 - RNA, 13 nt, Human
cgcgucuccuguu

SEQ ID NO: 2219914 - RNA, 12 nt, Human
cgcgucuuccug

SEQ ID NO: 2219915 - RNA, 13 nt, Human
cgcgucuuccuga

SEQ ID NO: 2219916 - RNA, 14 nt, Human
cgcgucuuccugag

SEQ ID NO: 2219917 - RNA, 16 nt, Human
cgcgucuuccugagug

SEQ ID NO: 2219918 - RNA, 22 nt, Human
cgcgacuaauuucaaaaugcuu

SEQ ID NO: 2219919 - RNA, 12 nt, Human
cgcccugccacu

SEQ ID NO: 2219920 - RNA, 15 nt, Human
cgcgacuaauuucaa

SEQ ID NO: 2219921 - RNA, 16 nt, Human
cgcgugcacacaccag

SEQ ID NO: 2219922 - RNA, 19 nt, Human
cgcgugcacacaccagagc

SEQ ID NO: 2219923 - RNA, 19 nt, Human
cgcgugcacguggagagcu

SEQ ID NO: 2219924 - RNA, 21 nt, Human
cgcgucuccuguuuuucuggg

SEQ ID NO: 2219925 - RNA, 19 nt, Human
cgcgugcccucgcugcuuc

SEQ ID NO: 2219926 - RNA, 20 nt, Human
cgcgugcacacaccagagcc

SEQ ID NO: 2219927 - RNA, 13 nt, Human
cgcuagaggccug

SEQ ID NO: 2219928 - RNA, 14 nt, Human
cgcuagaggccuga

SEQ ID NO: 2219929 - RNA, 15 nt, Human
cgcuagaggccugag

SEQ ID NO: 2219930 - RNA, 17 nt, Human
cgcuagaggccugagga

SEQ ID NO: 2219931 - RNA, 20 nt, Human
cgcuagaugggcauggggug

SEQ ID NO: 2219932 - RNA, 23 nt, Human
cgcuagaugggcauggggugggc

SEQ ID NO: 2219933 - RNA, 23 nt, Human
cgcguguguggguggauauaaau

SEQ ID NO: 2219934 - RNA, 21 nt, Human
cgcuaagagggagggagggcu

SEQ ID NO: 2219935 - RNA, 15 nt, Human
cgcuaagagggaggg

SEQ ID NO: 2219936 - RNA, 16 nt, Human
cgcuaagagggaggga

SEQ ID NO: 2219937 - RNA, 14 nt, Human
cgcuaagagggagg

SEQ ID NO: 2219938 - RNA, 13 nt, Human
cgcccucccaggc

SEQ ID NO: 2219939 - RNA, 12 nt, Human
cgcccucccagg

SEQ ID NO: 2219940 - RNA, 17 nt, Human
cgcccguccugccugug

SEQ ID NO: 2219941 - RNA, 22 nt, Human
cgcccuccccuccccugcugca

SEQ ID NO: 2219942 - RNA, 14 nt, Human
cgcccuccccuccc

SEQ ID NO: 2219943 - RNA, 16 nt, Human
cgcccuccccuccccu

SEQ ID NO: 2219944 - RNA, 18 nt, Human
cgcccuccccuccccugc

SEQ ID NO: 2219945 - RNA, 20 nt, Human
cgcccuccccuccccugcug

SEQ ID NO: 2219946 - RNA, 12 nt, Human
cgcccccugccc

SEQ ID NO: 2219947 - RNA, 14 nt, Human
cgcccccuccucua

SEQ ID NO: 2219948 - RNA, 19 nt, Human
cgcccccuccgcccugcca

SEQ ID NO: 2219949 - RNA, 20 nt, Human
cgcccccuccgcccugccac

SEQ ID NO: 2219950 - RNA, 18 nt, Human
cgcccccaguccccaccc

SEQ ID NO: 2219951 - RNA, 22 nt, Human
cgcccccaguccccaccccugc

SEQ ID NO: 2219952 - RNA, 23 nt, Human
cgcccccggguuuggcgggccaa

SEQ ID NO: 2219953 - RNA, 17 nt, Human
cgcccccuccgcccugc

SEQ ID NO: 2219954 - RNA, 14 nt, Human
cgcccucuguccug

SEQ ID NO: 2219955 - RNA, 16 nt, Human
cgcccucuguccugac

SEQ ID NO: 2219956 - RNA, 17 nt, Human
cgcccucuguccugacu

SEQ ID NO: 2219957 - RNA, 11 nt, Human
cgcccugccac

SEQ ID NO: 2219958 - RNA, 14 nt, Human
cgcccugccacuca

SEQ ID NO: 2219959 - RNA, 16 nt, Human
cgcgacaaugcaaacc

SEQ ID NO: 2219960 - RNA, 17 nt, Human
cgcgacaaugcaaacca

SEQ ID NO: 2219961 - RNA, 12 nt, Human
cgcccccaccuc

SEQ ID NO: 2219962 - RNA, 14 nt, Human
cgcccccaccucca

SEQ ID NO: 2219963 - RNA, 14 nt, Human
cgccccagccucug

SEQ ID NO: 2219964 - RNA, 23 nt, Human
cgcccaggaucagauugcaugug

SEQ ID NO: 2219965 - RNA, 12 nt, Human
cgccccagccuc

SEQ ID NO: 2219966 - RNA, 15 nt, Human
cgcccccacugguga

SEQ ID NO: 2219967 - RNA, 15 nt, Human
cgcccaggagacauc

SEQ ID NO: 2219968 - RNA, 17 nt, Human
cgcccaggaucagauug

SEQ ID NO: 2219969 - RNA, 12 nt, Human
cgcccaggcugg

SEQ ID NO: 2219970 - RNA, 20 nt, Human
cgcccaggcuggagugcaau

SEQ ID NO: 2219971 - RNA, 19 nt, Human
cgcccaggcuggagugcaa

SEQ ID NO: 2219972 - RNA, 20 nt, Human
cgcccagcugcaccugccag

SEQ ID NO: 2219973 - RNA, 18 nt, Human
cgcccagcugcaccugcc

SEQ ID NO: 2219974 - RNA, 23 nt, Human
cgcccagcugcaccugccagccu

SEQ ID NO: 2219975 - RNA, 11 nt, Human
cgcccaggaga

SEQ ID NO: 2219976 - RNA, 15 nt, Human
cgcccagcugcaccu

SEQ ID NO: 2219977 - RNA, 17 nt, Human
cgcagacaccuuggaca

SEQ ID NO: 2219978 - RNA, 13 nt, Human
cgcagacaggacc

SEQ ID NO: 2219979 - RNA, 14 nt, Human
cgcagacaggacca

SEQ ID NO: 2219980 - RNA, 15 nt, Human
ccuuucuccuuugua

SEQ ID NO: 2219981 - RNA, 17 nt, Human
ccuuucucgauuuuauc

SEQ ID NO: 2219982 - RNA, 14 nt, Human
ccuuucuccuuugu

SEQ ID NO: 2219983 - RNA, 20 nt, Human
ccuuucuccccugcccccag

SEQ ID NO: 2219984 - RNA, 11 nt, Human
ccuuucugugu

SEQ ID NO: 2219985 - RNA, 13 nt, Human
ccuuucugugugc

SEQ ID NO: 2219986 - RNA, 14 nt, Human
ccuuucuggcucuc

SEQ ID NO: 2219987 - RNA, 17 nt, Human
ccuuucucuucucuguu

SEQ ID NO: 2219988 - RNA, 15 nt, Human
ccuuguuacuucuga

SEQ ID NO: 2219989 - RNA, 15 nt, Human
ccuuguguguaugug

SEQ ID NO: 2219990 - RNA, 17 nt, Human
ccuuguguguaugugua

SEQ ID NO: 2219991 - RNA, 20 nt, Human
ccuuuaaaauuuuuuuagaa

SEQ ID NO: 2219992 - RNA, 21 nt, Human
ccuuuaaaauuuuuuuagaaa

SEQ ID NO: 2219993 - RNA, 12 nt, Human
ccuuuaaaauuu

SEQ ID NO: 2219994 - RNA, 20 nt, Human
ccuuuaaaaaaauuuaagug

SEQ ID NO: 2219995 - RNA, 18 nt, Human
ccuuuaaaguaugaaucu

SEQ ID NO: 2219996 - RNA, 22 nt, Human
ccuuuaaaguaugaaucuaugc

SEQ ID NO: 2219997 - RNA, 23 nt, Human
ccuuuaaaguaugaaucuaugcc

SEQ ID NO: 2219998 - RNA, 13 nt, Human
ccuuuaagagaaa

SEQ ID NO: 2219999 - RNA, 21 nt, Human
ccuuggcaugccuuccagcac

SEQ ID NO: 2220000 - RNA, 18 nt, Human
ccuuggccagaagucaag

SEQ ID NO: 2220001 - RNA, 20 nt, Human
ccuuggcaugccuuccagca

SEQ ID NO: 2220002 - RNA, 17 nt, Human
ccuuggcaugccuucca

SEQ ID NO: 2220003 - RNA, 22 nt, Human
ccuuggcucaauccucuaagcu

SEQ ID NO: 2220004 - RNA, 18 nt, Human
ccuuggcucaauccucua

SEQ ID NO: 2220005 - RNA, 15 nt, Human
ccuuggcucagacau

SEQ ID NO: 2220006 - RNA, 12 nt, Human
ccuuggcucaga

SEQ ID NO: 2220007 - RNA, 12 nt, Human
ccuuggcugcag

SEQ ID NO: 2220008 - RNA, 13 nt, Human
ccuuggcugcagg

SEQ ID NO: 2220009 - RNA, 19 nt, Human
ccuuggcucccauucacuc

SEQ ID NO: 2220010 - RNA, 23 nt, Human
ccuugugucuacagagaaccugg

SEQ ID NO: 2220011 - RNA, 20 nt, Human
ccuuguggucccaccccaca

SEQ ID NO: 2220012 - RNA, 16 nt, Human
ccuuguggucccaccc

SEQ ID NO: 2220013 - RNA, 19 nt, Human
ccuuguggucccaccccac

SEQ ID NO: 2220014 - RNA, 15 nt, Human
ccuuuggcagaguuc

SEQ ID NO: 2220015 - RNA, 18 nt, Human
ccuuuggcaggugcagcc

SEQ ID NO: 2220016 - RNA, 16 nt, Human
ccuuuggaugaccaga

SEQ ID NO: 2220017 - RNA, 14 nt, Human
ccuuuggagaccau

SEQ ID NO: 2220018 - RNA, 15 nt, Human
ccuuuggccauucca

SEQ ID NO: 2220019 - RNA, 19 nt, Human
ccuuuggaugaccagaaca

SEQ ID NO: 2220020 - RNA, 12 nt, Human
ccuuuggcucug

SEQ ID NO: 2220021 - RNA, 20 nt, Human
ccuuuggcaggugcagcccc

SEQ ID NO: 2220022 - RNA, 19 nt, Human
ccuuuggcaggugcagccc

SEQ ID NO: 2220023 - RNA, 16 nt, Human
ccuuugcuugaaagaa

SEQ ID NO: 2220024 - RNA, 13 nt, Human
ccuuugcugugag

SEQ ID NO: 2220025 - RNA, 17 nt, Human
ccuuugcugugaggcug

SEQ ID NO: 2220026 - RNA, 22 nt, Human
ccuuugcugugaggcuguccug

SEQ ID NO: 2220027 - RNA, 23 nt, Human
ccuuugcugugaggcuguccugu

SEQ ID NO: 2220028 - RNA, 13 nt, Human
ccuuugcacugag

SEQ ID NO: 2220029 - RNA, 14 nt, Human
ccuuugcacugagg

SEQ ID NO: 2220030 - RNA, 16 nt, Human
ccuuugcacugagggc

SEQ ID NO: 2220031 - RNA, 19 nt, Human
ccuuugcacugagggccac

SEQ ID NO: 2220032 - RNA, 17 nt, Human
ccuuugcacugagggcc

SEQ ID NO: 2220033 - RNA, 18 nt, Human
ccuuugcacugagggcca

SEQ ID NO: 2220034 - RNA, 12 nt, Human
ccuuugcaggca

SEQ ID NO: 2220035 - RNA, 15 nt, Human
ccuuugcauggagug

SEQ ID NO: 2220036 - RNA, 13 nt, Human
ccuuugcaggcau

SEQ ID NO: 2220037 - RNA, 21 nt, Human
ccuuugccccaccuuuauuaa

SEQ ID NO: 2220038 - RNA, 16 nt, Human
ccuuugcccagaaaga

SEQ ID NO: 2220039 - RNA, 19 nt, Human
ccuuugcugaggccuccag

SEQ ID NO: 2220040 - RNA, 22 nt, Human
ccuuugaguuuccucaggcugc

SEQ ID NO: 2220041 - RNA, 17 nt, Human
ccuuugauaaaauaaau

SEQ ID NO: 2220042 - RNA, 21 nt, Human
ccuuugauuaaagacuccagu

SEQ ID NO: 2220043 - RNA, 22 nt, Human
ccuuugagugcaguccugauca

SEQ ID NO: 2220044 - RNA, 19 nt, Human
ccuuugagugcaguccuga

SEQ ID NO: 2220045 - RNA, 20 nt, Human
ccuuugaauccucucucugu

SEQ ID NO: 2220046 - RNA, 13 nt, Human
ccuuugagacagu

SEQ ID NO: 2220047 - RNA, 15 nt, Human
ccuuugagacaguuu

SEQ ID NO: 2220048 - RNA, 17 nt, Human
ccuuugagacaguuucu

SEQ ID NO: 2220049 - RNA, 19 nt, Human
ccuuugagacaguuucuua

SEQ ID NO: 2220050 - RNA, 22 nt, Human
ccuuugagcccacaaagccuua

SEQ ID NO: 2220051 - RNA, 23 nt, Human
ccuuugacgccaucccagcccca

SEQ ID NO: 2220052 - RNA, 14 nt, Human
ccuuugacaaaggu

SEQ ID NO: 2220053 - RNA, 15 nt, Human
ccuuucuuggccagu

SEQ ID NO: 2220054 - RNA, 13 nt, Human
ccuuucuuggcca

SEQ ID NO: 2220055 - RNA, 13 nt, Human
ccuuucuugguuc

SEQ ID NO: 2220056 - RNA, 18 nt, Human
ccuuucuugguucauaaa

SEQ ID NO: 2220057 - RNA, 15 nt, Human
ccuuucuuuuucuuc

SEQ ID NO: 2220058 - RNA, 16 nt, Human
ccuuucuuuuucuucu

SEQ ID NO: 2220059 - RNA, 17 nt, Human
ccuuucuuuuucuucuu

SEQ ID NO: 2220060 - RNA, 23 nt, Human
ccuuucuuuuucuucuucccucc

SEQ ID NO: 2220061 - RNA, 12 nt, Human
ccuuugaagagg

SEQ ID NO: 2220062 - RNA, 16 nt, Human
ccuuugaauccucucu

SEQ ID NO: 2220063 - RNA, 14 nt, Human
ccuuugaauccucu

SEQ ID NO: 2220064 - RNA, 13 nt, Human
ccuuugaagagga

SEQ ID NO: 2220065 - RNA, 14 nt, Human
ccuuugaagaggaa

SEQ ID NO: 2220066 - RNA, 23 nt, Human
ccuuugaagaggaaaaugaauaa

SEQ ID NO: 2220067 - RNA, 20 nt, Human
cgauccaccugucucagccu

SEQ ID NO: 2220068 - RNA, 16 nt, Human
cgaggcuggagcuggc

SEQ ID NO: 2220069 - RNA, 15 nt, Human
cgaggcuggagcugg

SEQ ID NO: 2220070 - RNA, 13 nt, Human
cgagggaugaugc

SEQ ID NO: 2220071 - RNA, 22 nt, Human
cgaggcugcccacuauggucau

SEQ ID NO: 2220072 - RNA, 18 nt, Human
cgaggccuucucugaagg

SEQ ID NO: 2220073 - RNA, 19 nt, Human
cgaggccuucucugaagga

SEQ ID NO: 2220074 - RNA, 11 nt, Human
cgaggaagccc

SEQ ID NO: 2220075 - RNA, 19 nt, Human
cgaggaaccagagccaugg

SEQ ID NO: 2220076 - RNA, 13 nt, Human
cgaggacagggag

SEQ ID NO: 2220077 - RNA, 16 nt, Human
cgaggaaccagagcca

SEQ ID NO: 2220078 - RNA, 15 nt, Human
cgaggaaccagagcc

SEQ ID NO: 2220079 - RNA, 14 nt, Human
cgaggaaccagagc

SEQ ID NO: 2220080 - RNA, 22 nt, Human
cgagcuggugcauuacagagag

SEQ ID NO: 2220081 - RNA, 14 nt, Human
cgagcuuuucuaaa

SEQ ID NO: 2220082 - RNA, 14 nt, Human
cgaggaaacucaga

SEQ ID NO: 2220083 - RNA, 12 nt, Human
cgaggacaggga

SEQ ID NO: 2220084 - RNA, 14 nt, Human
ccuuuggcucugga

SEQ ID NO: 2220085 - RNA, 15 nt, Human
ccuuuggcucuggag

SEQ ID NO: 2220086 - RNA, 16 nt, Human
ccuuuggcucuggaga

SEQ ID NO: 2220087 - RNA, 19 nt, Human
ccuuuggcucuggagacag

SEQ ID NO: 2220088 - RNA, 15 nt, Human
ccuuuguauucucuc

SEQ ID NO: 2220089 - RNA, 20 nt, Human
ccuuuguauucucuccugua

SEQ ID NO: 2220090 - RNA, 18 nt, Human
ccuuuguauucucuccug

SEQ ID NO: 2220091 - RNA, 23 nt, Human
cgagcuggugcauuacagagagg

SEQ ID NO: 2220092 - RNA, 21 nt, Human
cgagcuggugcauuacagaga

SEQ ID NO: 2220093 - RNA, 15 nt, Human
cgagcuggugcauua

SEQ ID NO: 2220094 - RNA, 14 nt, Human
cgagcuggugcauu

SEQ ID NO: 2220095 - RNA, 13 nt, Human
cgagcuggugcau

SEQ ID NO: 2220096 - RNA, 23 nt, Human
cgagcugggggccaugagcucca

SEQ ID NO: 2220097 - RNA, 20 nt, Human
cgagcugggggccaugagcu

SEQ ID NO: 2220098 - RNA, 16 nt, Human
cgagcugggggccaug

SEQ ID NO: 2220099 - RNA, 15 nt, Human
cgagcugggggccau

SEQ ID NO: 2220100 - RNA, 13 nt, Human
cgagcugggggcc

SEQ ID NO: 2220101 - RNA, 12 nt, Human
cgagcugggggc

SEQ ID NO: 2220102 - RNA, 15 nt, Human
cgagcuggauguccc

SEQ ID NO: 2220103 - RNA, 21 nt, Human
cgagcucguguauccuggggc

SEQ ID NO: 2220104 - RNA, 22 nt, Human
cgagcucguguauccuggggcu

SEQ ID NO: 2220105 - RNA, 12 nt, Human
ccuuuguauauu

SEQ ID NO: 2220106 - RNA, 14 nt, Human
ccuuuguauauuau

SEQ ID NO: 2220107 - RNA, 19 nt, Human
ccuuuguauauuauuucua

SEQ ID NO: 2220108 - RNA, 18 nt, Human
cgagcgcuuucuggaaaa

SEQ ID NO: 2220109 - RNA, 17 nt, Human
cgagcucguguauccug

SEQ ID NO: 2220110 - RNA, 23 nt, Human
cgagcgcuuucuggaaaagagga

SEQ ID NO: 2220111 - RNA, 18 nt, Human
cgagcucguguauccugg

SEQ ID NO: 2220112 - RNA, 19 nt, Human
cgagcucguguauccuggg

SEQ ID NO: 2220113 - RNA, 20 nt, Human
cgagcucguguauccugggg

SEQ ID NO: 2220114 - RNA, 19 nt, Human
cgaucgcggcggagcuggc

SEQ ID NO: 2220115 - RNA, 22 nt, Human
cgauccaccugucucagccucc

SEQ ID NO: 2220116 - RNA, 13 nt, Human
cgauccuuccucc

SEQ ID NO: 2220117 - RNA, 19 nt, Human
cgaucggggcacugcaggg

SEQ ID NO: 2220118 - RNA, 21 nt, Human
cgaugaauuuggagacucugu

SEQ ID NO: 2220119 - RNA, 17 nt, Human
cgaucucuuauuuuaca

SEQ ID NO: 2220120 - RNA, 19 nt, Human
cgaucuggguucacugcaa

SEQ ID NO: 2220121 - RNA, 21 nt, Human
cgauucuucugcuucagccuc

SEQ ID NO: 2220122 - RNA, 21 nt, Human
cgauugcaggagucccugcca

SEQ ID NO: 2220123 - RNA, 11 nt, Human
cgauucuggau

SEQ ID NO: 2220124 - RNA, 13 nt, Human
cgauucuucugcu

SEQ ID NO: 2220125 - RNA, 19 nt, Human
cgauucuucugcuucagcc

SEQ ID NO: 2220126 - RNA, 15 nt, Human
cgauuggcuuuaaac

SEQ ID NO: 2220127 - RNA, 14 nt, Human
cgauuuaauucucu

SEQ ID NO: 2220128 - RNA, 15 nt, Human
cgauuuaauucucuu

SEQ ID NO: 2220129 - RNA, 18 nt, Human
cgauuuaauucucuugaa

SEQ ID NO: 2220130 - RNA, 21 nt, Human
cgcaagccuguaaucccagcu

SEQ ID NO: 2220131 - RNA, 20 nt, Human
cgcaagccuguaaucccagc

SEQ ID NO: 2220132 - RNA, 14 nt, Human
cgcaagucugcagc

SEQ ID NO: 2220133 - RNA, 15 nt, Human
cgcaagucugcagcc

SEQ ID NO: 2220134 - RNA, 13 nt, Human
cgauuggcuuuaa

SEQ ID NO: 2220135 - RNA, 23 nt, Human
cgauugcaggagucccugccauc

SEQ ID NO: 2220136 - RNA, 12 nt, Human
cgauuucuguuu

SEQ ID NO: 2220137 - RNA, 18 nt, Human
cgcaaugugcccccagac

SEQ ID NO: 2220138 - RNA, 20 nt, Human
cgcaaugugcccccagacgc

SEQ ID NO: 2220139 - RNA, 10 nt, Human
cgcacacaca

SEQ ID NO: 2220140 - RNA, 22 nt, Human
cgcacaauaguaaccuggguaa

SEQ ID NO: 2220141 - RNA, 21 nt, Human
cgcacaaggcugaccaagaga

SEQ ID NO: 2220142 - RNA, 16 nt, Human
cgcacaaggcugacca

SEQ ID NO: 2220143 - RNA, 11 nt, Human
cgcaaugugac

SEQ ID NO: 2220144 - RNA, 13 nt, Human
cgcacacacacac

SEQ ID NO: 2220145 - RNA, 13 nt, Human
cgcacacacacaa

SEQ ID NO: 2220146 - RNA, 17 nt, Human
cgcacuuuccuccuggc

SEQ ID NO: 2220147 - RNA, 13 nt, Human
cgcagaagcagac

SEQ ID NO: 2220148 - RNA, 18 nt, Human
cgcucagcaugcauccuu

SEQ ID NO: 2220149 - RNA, 16 nt, Human
cgcuccugucugccag

SEQ ID NO: 2220150 - RNA, 17 nt, Human
cgcuauugucaccaggg

SEQ ID NO: 2220151 - RNA, 13 nt, Human
cgcuccugugucu

SEQ ID NO: 2220152 - RNA, 20 nt, Human
cgcuccugucugccagccag

SEQ ID NO: 2220153 - RNA, 17 nt, Human
cgcuccugucugccagc

SEQ ID NO: 2220154 - RNA, 21 nt, Human
cgcuccugucugccagccagc

SEQ ID NO: 2220155 - RNA, 17 nt, Human
cgcucuccuuucuuucu

SEQ ID NO: 2220156 - RNA, 17 nt, Human
cggaaaccuugguguag

SEQ ID NO: 2220157 - RNA, 21 nt, Human
cgcucgcuuccgcauccuagu

SEQ ID NO: 2220158 - RNA, 12 nt, Human
cgcucggaggcc

SEQ ID NO: 2220159 - RNA, 14 nt, Human
cgcucggaggcccc

SEQ ID NO: 2220160 - RNA, 15 nt, Human
cgcucggaggcccca

SEQ ID NO: 2220161 - RNA, 16 nt, Human
cgcucggaggccccaa

SEQ ID NO: 2220162 - RNA, 19 nt, Human
cgcucggaggccccaaagg

SEQ ID NO: 2220163 - RNA, 20 nt, Human
cgcucggaggccccaaagga

SEQ ID NO: 2220164 - RNA, 13 nt, Human
cggaaagcagcuc

SEQ ID NO: 2220165 - RNA, 12 nt, Human
cggaaagcagcu

SEQ ID NO: 2220166 - RNA, 15 nt, Human
cggaacaagccuaaa

SEQ ID NO: 2220167 - RNA, 17 nt, Human
cggaacccaagcuuaga

SEQ ID NO: 2220168 - RNA, 19 nt, Human
cggaacccaagcuuagaac

SEQ ID NO: 2220169 - RNA, 20 nt, Human
cggaaccgcccaggaucaga

SEQ ID NO: 2220170 - RNA, 12 nt, Human
cggacacccccu

SEQ ID NO: 2220171 - RNA, 14 nt, Human
cggacacccccucg

SEQ ID NO: 2220172 - RNA, 13 nt, Human
cggacaaguuuua

SEQ ID NO: 2220173 - RNA, 15 nt, Human
cggacagccacggcc

SEQ ID NO: 2220174 - RNA, 16 nt, Human
cggacagccacggcca

SEQ ID NO: 2220175 - RNA, 18 nt, Human
cggacagccacggccagg

SEQ ID NO: 2220176 - RNA, 21 nt, Human
cggaauccuguccucagcuuc

SEQ ID NO: 2220177 - RNA, 20 nt, Human
cggaagaccugaagaguggu

SEQ ID NO: 2220178 - RNA, 20 nt, Human
cggaaagcagcucaaaggca

SEQ ID NO: 2220179 - RNA, 16 nt, Human
cggaacugcaugcugc

SEQ ID NO: 2220180 - RNA, 18 nt, Human
cggaacugcaugcugcug

SEQ ID NO: 2220181 - RNA, 17 nt, Human
cggaacugcaugcugcu

SEQ ID NO: 2220182 - RNA, 20 nt, Human
cggaaugaaccacaucuugc

SEQ ID NO: 2220183 - RNA, 16 nt, Human
cggcaauuuccggcca

SEQ ID NO: 2220184 - RNA, 14 nt, Human
cggcacagggucug

SEQ ID NO: 2220185 - RNA, 18 nt, Human
cggcacagggucugcucu

SEQ ID NO: 2220186 - RNA, 19 nt, Human
cggcacagggucugcucuu

SEQ ID NO: 2220187 - RNA, 22 nt, Human
cggcaggacaacgaggaagccc

SEQ ID NO: 2220188 - RNA, 14 nt, Human
cggcaggcucacug

SEQ ID NO: 2220189 - RNA, 17 nt, Human
cggcaggcucacugcca

SEQ ID NO: 2220190 - RNA, 18 nt, Human
cggcaggcucacugccag

SEQ ID NO: 2220191 - RNA, 19 nt, Human
cggcaggcucacugccagg

SEQ ID NO: 2220192 - RNA, 23 nt, Human
cggcaggcucacugccaggccag

SEQ ID NO: 2220193 - RNA, 20 nt, Human
cggcaggcucacugccaggc

SEQ ID NO: 2220194 - RNA, 22 nt, Human
cggcaggcucacugccaggcca

SEQ ID NO: 2220195 - RNA, 14 nt, Human
cggcaggggccugg

SEQ ID NO: 2220196 - RNA, 23 nt, Human
cggauuauuuuuucagaccgaaa

SEQ ID NO: 2220197 - RNA, 23 nt, Human
cggauuggcuuguguguuucacu

SEQ ID NO: 2220198 - RNA, 24 nt, Human
cggauuccaaagaguagaauugca

SEQ ID NO: 2220199 - RNA, 13 nt, Human
cggaugugcuuuu

SEQ ID NO: 2220200 - RNA, 14 nt, Human
cggauuauuuuuuc

SEQ ID NO: 2220201 - RNA, 16 nt, Human
cggauuauuuuuucag

SEQ ID NO: 2220202 - RNA, 17 nt, Human
cggauuauuuuuucaga

SEQ ID NO: 2220203 - RNA, 18 nt, Human
cggauuauuuuuucagac

SEQ ID NO: 2220204 - RNA, 19 nt, Human
cggauuauuuuuucagacc

SEQ ID NO: 2220205 - RNA, 20 nt, Human
cggauuauuuuuucagaccg

SEQ ID NO: 2220206 - RNA, 22 nt, Human
cggauuauuuuuucagaccgaa

SEQ ID NO: 2220207 - RNA, 12 nt, Human
cggcaacaucaa

SEQ ID NO: 2220208 - RNA, 15 nt, Human
cggauuuggggugga

SEQ ID NO: 2220209 - RNA, 16 nt, Human
cggauuuauuuuucca

SEQ ID NO: 2220210 - RNA, 17 nt, Human
cggcaaccccaguucug

SEQ ID NO: 2220211 - RNA, 19 nt, Human
cggcaaccccaguucugcu

SEQ ID NO: 2220212 - RNA, 20 nt, Human
cggcaaccccaguucugcuc

SEQ ID NO: 2220213 - RNA, 21 nt, Human
cggcaaccccaguucugcucc

SEQ ID NO: 2220214 - RNA, 22 nt, Human
cggcaaccccaguucugcuccu

SEQ ID NO: 2220215 - RNA, 23 nt, Human
cggcaaccccaguucugcuccuc

SEQ ID NO: 2220216 - RNA, 14 nt, Human
cggauccugggugg

SEQ ID NO: 2220217 - RNA, 16 nt, Human
cggaucuuuggacaga

SEQ ID NO: 2220218 - RNA, 18 nt, Human
cggacguuuccaucaggu

SEQ ID NO: 2220219 - RNA, 20 nt, Human
cggacuaagccuaccugcuc

SEQ ID NO: 2220220 - RNA, 21 nt, Human
cggacuaagccuaccugcucu

SEQ ID NO: 2220221 - RNA, 19 nt, Human
cggaucuuuggacagaagc

SEQ ID NO: 2220222 - RNA, 14 nt, Human
cggaucugagaauc

SEQ ID NO: 2220223 - RNA, 16 nt, Human
cggaucugagaaucuu

SEQ ID NO: 2220224 - RNA, 15 nt, Human
cggaucuguugcaaa

SEQ ID NO: 2220225 - RNA, 14 nt, Human
cggacguuccagcc

SEQ ID NO: 2220226 - RNA, 15 nt, Human
cggacguuccagccg

SEQ ID NO: 2220227 - RNA, 16 nt, Human
cggacguuccagccgg

SEQ ID NO: 2220228 - RNA, 15 nt, Human
cggacguuuccauca

SEQ ID NO: 2220229 - RNA, 16 nt, Human
cggacguuuccaucag

SEQ ID NO: 2220230 - RNA, 14 nt, Human
cggaccccagcugu

SEQ ID NO: 2220231 - RNA, 20 nt, Human
cggaccccagcugugagccu

SEQ ID NO: 2220232 - RNA, 21 nt, Human
cggaccuuggcagcccaggcc

SEQ ID NO: 2220233 - RNA, 22 nt, Human
cggaccccagcugugagccuug

SEQ ID NO: 2220234 - RNA, 14 nt, Human
cggaccuuucagcu

SEQ ID NO: 2220235 - RNA, 16 nt, Human
cggacacuccuagaga

SEQ ID NO: 2220236 - RNA, 14 nt, Human
cggacacuccuaga

SEQ ID NO: 2220237 - RNA, 15 nt, Human
cggacacuccuagag

SEQ ID NO: 2220238 - RNA, 12 nt, Human
cggaccccagcu

SEQ ID NO: 2220239 - RNA, 13 nt, Human
cggaccccagcug

SEQ ID NO: 2220240 - RNA, 22 nt, Human
cggggagggugacaguggccgc

SEQ ID NO: 2220241 - RNA, 17 nt, Human
cgggcaugggcacuccc

SEQ ID NO: 2220242 - RNA, 23 nt, Human
cggggaggccaagugcaggcugg

SEQ ID NO: 2220243 - RNA, 17 nt, Human
cggggaguuucuuuccu

SEQ ID NO: 2220244 - RNA, 15 nt, Human
cggggagggugacag

SEQ ID NO: 2220245 - RNA, 15 nt, Human
cgggcaugggcacuc

SEQ ID NO: 2220246 - RNA, 15 nt, Human
cgggcaugacacgaa

SEQ ID NO: 2220247 - RNA, 12 nt, Human
cgggcaugacac

SEQ ID NO: 2220248 - RNA, 14 nt, Human
cgggaggggcccgc

SEQ ID NO: 2220249 - RNA, 15 nt, Human
cgggaggggcccgcu

SEQ ID NO: 2220250 - RNA, 23 nt, Human
cgggaggcugagacaggagaauc

SEQ ID NO: 2220251 - RNA, 20 nt, Human
cgggaggcugagacaggaga

SEQ ID NO: 2220252 - RNA, 16 nt, Human
cgggaggucgaggcag

SEQ ID NO: 2220253 - RNA, 17 nt, Human
cgggaggucgaggcagg

SEQ ID NO: 2220254 - RNA, 19 nt, Human
cgggaggggcccgcuugcc

SEQ ID NO: 2220255 - RNA, 15 nt, Human
cgggcagcacagcaa

SEQ ID NO: 2220256 - RNA, 12 nt, Human
cggcugggcaca

SEQ ID NO: 2220257 - RNA, 20 nt, Human
cggcugggcacacgccuccc

SEQ ID NO: 2220258 - RNA, 16 nt, Human
cggcugggcacacgcc

SEQ ID NO: 2220259 - RNA, 17 nt, Human
cggcugggcacacgccu

SEQ ID NO: 2220260 - RNA, 17 nt, Human
cggcugguuuuguaaga

SEQ ID NO: 2220261 - RNA, 22 nt, Human
cggcugguuuuguaagaugcug

SEQ ID NO: 2220262 - RNA, 23 nt, Human
cggcugguuuuguaagaugcugg

SEQ ID NO: 2220263 - RNA, 16 nt, Human
cggcugucucagacuc

SEQ ID NO: 2220264 - RNA, 13 nt, Human
cgggaggcugaga

SEQ ID NO: 2220265 - RNA, 17 nt, Human
cgggagcgguggcccug

SEQ ID NO: 2220266 - RNA, 20 nt, Human
cgggagcgguggcccugucc

SEQ ID NO: 2220267 - RNA, 16 nt, Human
cgggaggcugagacag

SEQ ID NO: 2220268 - RNA, 17 nt, Human
cgggaggcugagacagg

SEQ ID NO: 2220269 - RNA, 18 nt, Human
cgggaggcugagacagga

SEQ ID NO: 2220270 - RNA, 19 nt, Human
cgggaggcugagacaggag

SEQ ID NO: 2220271 - RNA, 22 nt, Human
cgggaggcggagcuugcaguga

SEQ ID NO: 2220272 - RNA, 20 nt, Human
cgggaggauguucugggaca

SEQ ID NO: 2220273 - RNA, 21 nt, Human
cgggagccugaucaccugccc

SEQ ID NO: 2220274 - RNA, 22 nt, Human
cgggagccugaucaccugcccu

SEQ ID NO: 2220275 - RNA, 14 nt, Human
cggccucccaaagu

SEQ ID NO: 2220276 - RNA, 23 nt, Human
cggccugaugcucccuccccugc

SEQ ID NO: 2220277 - RNA, 19 nt, Human
cggccugaugcucccuccc

SEQ ID NO: 2220278 - RNA, 14 nt, Human
cggccugcucccag

SEQ ID NO: 2220279 - RNA, 13 nt, Human
cggccugcuccca

SEQ ID NO: 2220280 - RNA, 19 nt, Human
cggccuucaacugaaaaga

SEQ ID NO: 2220281 - RNA, 15 nt, Human
cggccugguguucug

SEQ ID NO: 2220282 - RNA, 21 nt, Human
cggccuguccuccaacaccaa

SEQ ID NO: 2220283 - RNA, 15 nt, Human
cggccuuuggcuuca

SEQ ID NO: 2220284 - RNA, 15 nt, Human
cggccuguccuccaa

SEQ ID NO: 2220285 - RNA, 12 nt, Human
cggccuguccuc

SEQ ID NO: 2220286 - RNA, 15 nt, Human
cggccugcucccagc

SEQ ID NO: 2220287 - RNA, 18 nt, Human
cggccugcucccagcagc

SEQ ID NO: 2220288 - RNA, 19 nt, Human
cggccugcucccagcagcc

SEQ ID NO: 2220289 - RNA, 13 nt, Human
cggccuggcuccu

SEQ ID NO: 2220290 - RNA, 15 nt, Human
cggcuggccuggccc

SEQ ID NO: 2220291 - RNA, 16 nt, Human
cggcuggccuggcccc

SEQ ID NO: 2220292 - RNA, 18 nt, Human
cggcuggccuggccccuc

SEQ ID NO: 2220293 - RNA, 20 nt, Human
cggcaguucugggugcuccc

SEQ ID NO: 2220294 - RNA, 16 nt, Human
cggcaguucugggugc

SEQ ID NO: 2220295 - RNA, 17 nt, Human
cggcagguucacaggcg

SEQ ID NO: 2220296 - RNA, 20 nt, Human
cggcagguucacaggcgagg

SEQ ID NO: 2220297 - RNA, 20 nt, Human
cggcccauccccaggcaccu

SEQ ID NO: 2220298 - RNA, 15 nt, Human
cggcaggggccugga

SEQ ID NO: 2220299 - RNA, 17 nt, Human
cggcaggggccuggaga

SEQ ID NO: 2220300 - RNA, 18 nt, Human
cggcaggggccuggagau

SEQ ID NO: 2220301 - RNA, 19 nt, Human
cggcaggggccuggagauc

SEQ ID NO: 2220302 - RNA, 21 nt, Human
cggcaguucugggugcucccu

SEQ ID NO: 2220303 - RNA, 18 nt, Human
cggcccccagagcgcccc

SEQ ID NO: 2220304 - RNA, 21 nt, Human
cggcccccagagcgccccucc

SEQ ID NO: 2220305 - RNA, 12 nt, Human
cggccccagcca

SEQ ID NO: 2220306 - RNA, 14 nt, Human
cggccccagccaga

SEQ ID NO: 2220307 - RNA, 16 nt, Human
cggccccagccagagu

SEQ ID NO: 2220308 - RNA, 22 nt, Human
cggccccagccagaguuccugc

SEQ ID NO: 2220309 - RNA, 20 nt, Human
cggcccccgcgcgcgucccc

SEQ ID NO: 2220310 - RNA, 15 nt, Human
cggcccccuggucuc

SEQ ID NO: 2220311 - RNA, 17 nt, Human
cggcccccuccaucggg

SEQ ID NO: 2220312 - RNA, 18 nt, Human
cggcccccuggucucugg

SEQ ID NO: 2220313 - RNA, 14 nt, Human
cggccccggcccca

SEQ ID NO: 2220314 - RNA, 15 nt, Human
cggccccggccccag

SEQ ID NO: 2220315 - RNA, 19 nt, Human
cggccccggccccagccag

SEQ ID NO: 2220316 - RNA, 17 nt, Human
cggccccgucuguggcu

SEQ ID NO: 2220317 - RNA, 15 nt, Human
cggccccucccgccc

SEQ ID NO: 2220318 - RNA, 22 nt, Human
cggccccugcauccccuuggcu

SEQ ID NO: 2220319 - RNA, 17 nt, Human
cggccuccauccugagg

SEQ ID NO: 2220320 - RNA, 16 nt, Human
cggccuccauccugag

SEQ ID NO: 2220321 - RNA, 20 nt, Human
cccauucucucuccugucca

SEQ ID NO: 2220322 - RNA, 18 nt, Human
cccauucucucuccuguc

SEQ ID NO: 2220323 - RNA, 17 nt, Human
cccauucucucuccugu

SEQ ID NO: 2220324 - RNA, 13 nt, Human
cccauucugccug

SEQ ID NO: 2220325 - RNA, 22 nt, Human
ccccaaauggaaaugggcagag

SEQ ID NO: 2220326 - RNA, 21 nt, Human
cccauucugccuccauucuga

SEQ ID NO: 2220327 - RNA, 19 nt, Human
cccauucucucuccugucc

SEQ ID NO: 2220328 - RNA, 16 nt, Human
ccccaacacugugccc

SEQ ID NO: 2220329 - RNA, 17 nt, Human
ccccaacacugugcccu

SEQ ID NO: 2220330 - RNA, 18 nt, Human
ccccaacacugugcccug

SEQ ID NO: 2220331 - RNA, 19 nt, Human
ccccaacacugugcccugg

SEQ ID NO: 2220332 - RNA, 20 nt, Human
ccccaacacugugcccuggu

SEQ ID NO: 2220333 - RNA, 21 nt, Human
ccccaacacugugcccuggug

SEQ ID NO: 2220334 - RNA, 22 nt, Human
ccccaacagcgacauagcccau

SEQ ID NO: 2220335 - RNA, 22 nt, Human
ccccaacacugugcccuggugg

SEQ ID NO: 2220336 - RNA, 20 nt, Human
ccccaacagcgacauagccc

SEQ ID NO: 2220337 - RNA, 22 nt, Human
ccccaacaucucccucccacau

SEQ ID NO: 2220338 - RNA, 19 nt, Human
ccccaacaucucccuccca

SEQ ID NO: 2220339 - RNA, 12 nt, Human
ccccaacagugu

SEQ ID NO: 2220340 - RNA, 21 nt, Human
ccccacccccuucagugccca

SEQ ID NO: 2220341 - RNA, 19 nt, Human
ccccaccccggggacccug

SEQ ID NO: 2220342 - RNA, 23 nt, Human
ccccaccccggggacccugugac

SEQ ID NO: 2220343 - RNA, 17 nt, Human
ccccacccccuucagug

SEQ ID NO: 2220344 - RNA, 12 nt, Human
ccccacccccuu

SEQ ID NO: 2220345 - RNA, 23 nt, Human
ccccacccccuccccaggggaga

SEQ ID NO: 2220346 - RNA, 17 nt, Human
ccccacccccuccccag

SEQ ID NO: 2220347 - RNA, 16 nt, Human
ccccacccaagcuugg

SEQ ID NO: 2220348 - RNA, 18 nt, Human
ccccacccaagcuuggca

SEQ ID NO: 2220349 - RNA, 19 nt, Human
ccccacccaagcuuggcag

SEQ ID NO: 2220350 - RNA, 20 nt, Human
ccccacccaagcuuggcagc

SEQ ID NO: 2220351 - RNA, 14 nt, Human
ccccacccaagggc

SEQ ID NO: 2220352 - RNA, 20 nt, Human
ccccacccaagggccuggcc

SEQ ID NO: 2220353 - RNA, 23 nt, Human
ccccaagacuugguguccuuucc

SEQ ID NO: 2220354 - RNA, 16 nt, Human
ccccaagaaagccuca

SEQ ID NO: 2220355 - RNA, 16 nt, Human
ccccaagcuguuuucu

SEQ ID NO: 2220356 - RNA, 14 nt, Human
ccccaagcuguuuu

SEQ ID NO: 2220357 - RNA, 14 nt, Human
ccccaagccuggca

SEQ ID NO: 2220358 - RNA, 13 nt, Human
ccccaagccuggc

SEQ ID NO: 2220359 - RNA, 15 nt, Human
ccccaaggagggaga

SEQ ID NO: 2220360 - RNA, 17 nt, Human
ccccaagcuguuuucuu

SEQ ID NO: 2220361 - RNA, 22 nt, Human
ccccaagggcaaaauucccagg

SEQ ID NO: 2220362 - RNA, 13 nt, Human
ccccaaggcugcg

SEQ ID NO: 2220363 - RNA, 15 nt, Human
cccauggagccccag

SEQ ID NO: 2220364 - RNA, 16 nt, Human
cccauggagccccagc

SEQ ID NO: 2220365 - RNA, 17 nt, Human
cccauggcccucccagu

SEQ ID NO: 2220366 - RNA, 22 nt, Human
cccaugggaagacgaggcccuc

SEQ ID NO: 2220367 - RNA, 15 nt, Human
cccaugggcacugcu

SEQ ID NO: 2220368 - RNA, 21 nt, Human
cccauggagccccagcccccu

SEQ ID NO: 2220369 - RNA, 17 nt, Human
cccauggcuuaaugcuu

SEQ ID NO: 2220370 - RNA, 21 nt, Human
cccaugggaagacgaggcccu

SEQ ID NO: 2220371 - RNA, 14 nt, Human
cccaugggcucuga

SEQ ID NO: 2220372 - RNA, 21 nt, Human
cccaugggcacugcugggugg

SEQ ID NO: 2220373 - RNA, 16 nt, Human
cccaugggcacugcug

SEQ ID NO: 2220374 - RNA, 17 nt, Human
cccaugggcacugcugg

SEQ ID NO: 2220375 - RNA, 18 nt, Human
cccaugggcacugcuggg

SEQ ID NO: 2220376 - RNA, 20 nt, Human
cccaugggcacugcugggug

SEQ ID NO: 2220377 - RNA, 21 nt, Human
cccauucgguguggugcagug

SEQ ID NO: 2220378 - RNA, 16 nt, Human
cccaugggcucugaca

SEQ ID NO: 2220379 - RNA, 18 nt, Human
cccauuccugaagaacca

SEQ ID NO: 2220380 - RNA, 18 nt, Human
cccauucuacacagagca

SEQ ID NO: 2220381 - RNA, 19 nt, Human
cccauucuacacagagcag

SEQ ID NO: 2220382 - RNA, 14 nt, Human
cccauuccugggaa

SEQ ID NO: 2220383 - RNA, 18 nt, Human
cccaguggccucaacccu

SEQ ID NO: 2220384 - RNA, 13 nt, Human
cccaguggccuca

SEQ ID NO: 2220385 - RNA, 17 nt, Human
cccaguggccacucagc

SEQ ID NO: 2220386 - RNA, 22 nt, Human
cccaguggccacucagcuuccu

SEQ ID NO: 2220387 - RNA, 21 nt, Human
cccaguggccucaacccuccc

SEQ ID NO: 2220388 - RNA, 19 nt, Human
cccaguggccucaacccuc

SEQ ID NO: 2220389 - RNA, 19 nt, Human
cccauggagccagcucccu

SEQ ID NO: 2220390 - RNA, 13 nt, Human
cccauggagcccc

SEQ ID NO: 2220391 - RNA, 14 nt, Human
cccauggagcccca

SEQ ID NO: 2220392 - RNA, 13 nt, Human
cccauggagccag

SEQ ID NO: 2220393 - RNA, 17 nt, Human
cccaugcugcccuguga

SEQ ID NO: 2220394 - RNA, 18 nt, Human
cccaugcugcccugugag

SEQ ID NO: 2220395 - RNA, 15 nt, Human
cccagugcacccacu

SEQ ID NO: 2220396 - RNA, 14 nt, Human
cccagugcacccac

SEQ ID NO: 2220397 - RNA, 22 nt, Human
cccagugccaagcacagugccu

SEQ ID NO: 2220398 - RNA, 16 nt, Human
cccaguggccacucag

SEQ ID NO: 2220399 - RNA, 15 nt, Human
cccaugcugcccugu

SEQ ID NO: 2220400 - RNA, 16 nt, Human
cccaugcugcccugug

SEQ ID NO: 2220401 - RNA, 17 nt, Human
cccagugccgagaagga

SEQ ID NO: 2220402 - RNA, 18 nt, Human
cccagugccgagaaggaa

SEQ ID NO: 2220403 - RNA, 15 nt, Human
cccagugcccacagg

SEQ ID NO: 2220404 - RNA, 20 nt, Human
cccagugcccacaggaucag

SEQ ID NO: 2220405 - RNA, 14 nt, Human
cccaguggcugcug

SEQ ID NO: 2220406 - RNA, 17 nt, Human
ccccaggaggccagccu

SEQ ID NO: 2220407 - RNA, 22 nt, Human
ccccucagggucccugguggca

SEQ ID NO: 2220408 - RNA, 24 nt, Human
cccaggaguucgaggcugcaguca

SEQ ID NO: 2220409 - RNA, 23 nt, Human
cccaggagguggagguugcagug

SEQ ID NO: 2220410 - RNA, 22 nt, Human
cccaggaguggaggaggccugg

SEQ ID NO: 2220411 - RNA, 18 nt, Human
cccaggagggagggggcu

SEQ ID NO: 2220412 - RNA, 14 nt, Human
cccaggagggaggg

SEQ ID NO: 2220413 - RNA, 13 nt, Human
cccaggaggccag

SEQ ID NO: 2220414 - RNA, 22 nt, Human
cccaggaggccagccuugacca

SEQ ID NO: 2220415 - RNA, 21 nt, Human
cccaggagccccgaggccuuc

SEQ ID NO: 2220416 - RNA, 21 nt, Human
cccagcucucccucuggcccu

SEQ ID NO: 2220417 - RNA, 17 nt, Human
cccaggagcugcccaga

SEQ ID NO: 2220418 - RNA, 19 nt, Human
cccagcucucccucuggcc

SEQ ID NO: 2220419 - RNA, 18 nt, Human
cccagcucucccucuggc

SEQ ID NO: 2220420 - RNA, 17 nt, Human
cccagcucucccucugg

SEQ ID NO: 2220421 - RNA, 16 nt, Human
cccagcucucccucug

SEQ ID NO: 2220422 - RNA, 15 nt, Human
cccagcucucccucu

SEQ ID NO: 2220423 - RNA, 14 nt, Human
cccagcucucccuc

SEQ ID NO: 2220424 - RNA, 13 nt, Human
cccagcucucccu

SEQ ID NO: 2220425 - RNA, 12 nt, Human
cccagcucuccc

SEQ ID NO: 2220426 - RNA, 18 nt, Human
cccaggagccccgaggcc

SEQ ID NO: 2220427 - RNA, 23 nt, Human
cccaggaguuugaggcugcagcg

SEQ ID NO: 2220428 - RNA, 22 nt, Human
cccaggaguuugaggcugcagc

SEQ ID NO: 2220429 - RNA, 11 nt, Human
cccaggcaggu

SEQ ID NO: 2220430 - RNA, 13 nt, Human
cccaggcaggucu

SEQ ID NO: 2220431 - RNA, 14 nt, Human
cccaggcaggccac

SEQ ID NO: 2220432 - RNA, 23 nt, Human
cccaggaucagauugcaugugac

SEQ ID NO: 2220433 - RNA, 20 nt, Human
cccaggcaaaucaguuacua

SEQ ID NO: 2220434 - RNA, 15 nt, Human
cccaggcagggccaa

SEQ ID NO: 2220435 - RNA, 23 nt, Human
cccaggcagggccaacccuucuc

SEQ ID NO: 2220436 - RNA, 17 nt, Human
cccaggcaggucuugaa

SEQ ID NO: 2220437 - RNA, 20 nt, Human
cccaggcauuccccaggagg

SEQ ID NO: 2220438 - RNA, 21 nt, Human
cccaggcauuccccaggaggc

SEQ ID NO: 2220439 - RNA, 22 nt, Human
cccaggcauuccccaggaggcc

SEQ ID NO: 2220440 - RNA, 23 nt, Human
cccaggcauuccccaggaggcca

SEQ ID NO: 2220441 - RNA, 21 nt, Human
cccaggcauugccaagggcuu

SEQ ID NO: 2220442 - RNA, 14 nt, Human
cccaggcauugcca

SEQ ID NO: 2220443 - RNA, 13 nt, Human
cccaggccaggcc

SEQ ID NO: 2220444 - RNA, 23 nt, Human
cccaggccaggcuccuuccuguc

SEQ ID NO: 2220445 - RNA, 14 nt, Human
cccaggccaguaag

SEQ ID NO: 2220446 - RNA, 21 nt, Human
cccaggccaggcuccuuccug

SEQ ID NO: 2220447 - RNA, 19 nt, Human
cccaggccaggcuccuucc

SEQ ID NO: 2220448 - RNA, 18 nt, Human
cccaggccaggcuccuuc

SEQ ID NO: 2220449 - RNA, 22 nt, Human
cccaggccaggccaccaggaug

SEQ ID NO: 2220450 - RNA, 17 nt, Human
cccaggccaggccacca

SEQ ID NO: 2220451 - RNA, 20 nt, Human
cccaggccaggccaccagga

SEQ ID NO: 2220452 - RNA, 22 nt, Human
cccaggccaucuuccagguggg

SEQ ID NO: 2220453 - RNA, 14 nt, Human
cccaggccaucuuc

SEQ ID NO: 2220454 - RNA, 18 nt, Human
cccaggccaucuuccagg

SEQ ID NO: 2220455 - RNA, 20 nt, Human
cccaggccaucuuccaggug

SEQ ID NO: 2220456 - RNA, 21 nt, Human
cccaggccaucuuccaggugg

SEQ ID NO: 2220457 - RNA, 18 nt, Human
cccaggccccaggaagcc

SEQ ID NO: 2220458 - RNA, 17 nt, Human
cccaggccccaggaagc

SEQ ID NO: 2220459 - RNA, 13 nt, Human
cccaggccccagg

SEQ ID NO: 2220460 - RNA, 11 nt, Human
cccaggccccu

SEQ ID NO: 2220461 - RNA, 16 nt, Human
cccaggccccugccac

SEQ ID NO: 2220462 - RNA, 18 nt, Human
cccaggccccugccaccc

SEQ ID NO: 2220463 - RNA, 21 nt, Human
cccaggccccugccacccugg

SEQ ID NO: 2220464 - RNA, 22 nt, Human
cccaggccccugccacccuggg

SEQ ID NO: 2220465 - RNA, 15 nt, Human
cccagguccucugau

SEQ ID NO: 2220466 - RNA, 20 nt, Human
cccagguccucugauaccca

SEQ ID NO: 2220467 - RNA, 13 nt, Human
cccagguccucac

SEQ ID NO: 2220468 - RNA, 18 nt, Human
cccagguccagcucugga

SEQ ID NO: 2220469 - RNA, 17 nt, Human
cccagguccagcucugg

SEQ ID NO: 2220470 - RNA, 22 nt, Human
cccaggguggacuuagaaagca

SEQ ID NO: 2220471 - RNA, 22 nt, Human
cccaggugcuaggaacacuccu

SEQ ID NO: 2220472 - RNA, 13 nt, Human
cccaggugccagu

SEQ ID NO: 2220473 - RNA, 16 nt, Human
cccagguggcugaccc

SEQ ID NO: 2220474 - RNA, 23 nt, Human
cccagguggcugacccagucccu

SEQ ID NO: 2220475 - RNA, 22 nt, Human
cccagguggcugacccaguccc

SEQ ID NO: 2220476 - RNA, 19 nt, Human
cccagguggcugacccagu

SEQ ID NO: 2220477 - RNA, 18 nt, Human
cccagguggcugacccag

SEQ ID NO: 2220478 - RNA, 23 nt, Human
cccaggugcuaggaacacuccuu

SEQ ID NO: 2220479 - RNA, 22 nt, Human
cccagugacacuucagagagcu

SEQ ID NO: 2220480 - RNA, 19 nt, Human
cccagugacacuucagaga

SEQ ID NO: 2220481 - RNA, 19 nt, Human
cccagugagauuacagagg

SEQ ID NO: 2220482 - RNA, 19 nt, Human
cccagugagcacucccaag

SEQ ID NO: 2220483 - RNA, 21 nt, Human
cccagugagcacucccaaguc

SEQ ID NO: 2220484 - RNA, 13 nt, Human
cccagugcccaca

SEQ ID NO: 2220485 - RNA, 18 nt, Human
cccagugacacuucagag

SEQ ID NO: 2220486 - RNA, 13 nt, Human
cccagugacacuu

SEQ ID NO: 2220487 - RNA, 12 nt, Human
cccagugacacu

SEQ ID NO: 2220488 - RNA, 17 nt, Human
cccagucuguuccccau

SEQ ID NO: 2220489 - RNA, 19 nt, Human
cccaguccccaccccugcc

SEQ ID NO: 2220490 - RNA, 20 nt, Human
cccaguccccaccccugccc

SEQ ID NO: 2220491 - RNA, 20 nt, Human
cccagucuggaaugcagugg

SEQ ID NO: 2220492 - RNA, 23 nt, Human
cccaguauucuagguagugcccu

SEQ ID NO: 2220493 - RNA, 16 nt, Human
cccaguagaccuuguu

SEQ ID NO: 2220494 - RNA, 13 nt, Human
cccagucagccuc

SEQ ID NO: 2220495 - RNA, 14 nt, Human
cccagucagccucu

SEQ ID NO: 2220496 - RNA, 15 nt, Human
cccagucagccucuc

SEQ ID NO: 2220497 - RNA, 16 nt, Human
cccagucagccucucu

SEQ ID NO: 2220498 - RNA, 17 nt, Human
cccagucagccucucuc

SEQ ID NO: 2220499 - RNA, 18 nt, Human
cccagucagccucucucc

SEQ ID NO: 2220500 - RNA, 19 nt, Human
cccagucagccucucuccc

SEQ ID NO: 2220501 - RNA, 19 nt, Human
cccaguccaaauguccucc

SEQ ID NO: 2220502 - RNA, 20 nt, Human
cccagucagccucucuccca

SEQ ID NO: 2220503 - RNA, 21 nt, Human
cccagucagccucucucccag

SEQ ID NO: 2220504 - RNA, 23 nt, Human
cccaguccaaauguccuccagaa

SEQ ID NO: 2220505 - RNA, 22 nt, Human
cccagucagccucucucccagu

SEQ ID NO: 2220506 - RNA, 13 nt, Human
cccaguccccacc

SEQ ID NO: 2220507 - RNA, 14 nt, Human
cccaguccccaccc

SEQ ID NO: 2220508 - RNA, 15 nt, Human
cccaguccccacccc

SEQ ID NO: 2220509 - RNA, 18 nt, Human
cccaguccccaccccugc

SEQ ID NO: 2220510 - RNA, 15 nt, Human
cccaggccguggcug

SEQ ID NO: 2220511 - RNA, 18 nt, Human
cccaggccgcagcucuug

SEQ ID NO: 2220512 - RNA, 21 nt, Human
cccaggccgggguggagcaug

SEQ ID NO: 2220513 - RNA, 16 nt, Human
cccaggccgcagcucu

SEQ ID NO: 2220514 - RNA, 17 nt, Human
cccaggccgcagcucuu

SEQ ID NO: 2220515 - RNA, 21 nt, Human
cccaggccgcagcucuugccc

SEQ ID NO: 2220516 - RNA, 18 nt, Human
cccaggccgagaagccag

SEQ ID NO: 2220517 - RNA, 13 nt, Human
cccaggccgcagc

SEQ ID NO: 2220518 - RNA, 14 nt, Human
cccaggccgcagcu

SEQ ID NO: 2220519 - RNA, 22 nt, Human
cccaggccccgaggacccagac

SEQ ID NO: 2220520 - RNA, 23 nt, Human
cccaggccccgaggacccagacc

SEQ ID NO: 2220521 - RNA, 17 nt, Human
cccaggccuccuacagc

SEQ ID NO: 2220522 - RNA, 18 nt, Human
cccaggccuccuacagcu

SEQ ID NO: 2220523 - RNA, 13 nt, Human
cccaggccucugu

SEQ ID NO: 2220524 - RNA, 15 nt, Human
cccaggccugccugu

SEQ ID NO: 2220525 - RNA, 16 nt, Human
cccaggccugccuguu

SEQ ID NO: 2220526 - RNA, 18 nt, Human
cccaggcgccccuucccc

SEQ ID NO: 2220527 - RNA, 13 nt, Human
cccaggggagagg

SEQ ID NO: 2220528 - RNA, 17 nt, Human
cccaggggaccacaccu

SEQ ID NO: 2220529 - RNA, 14 nt, Human
cccaggcugagccu

SEQ ID NO: 2220530 - RNA, 13 nt, Human
cccaggcgggagc

SEQ ID NO: 2220531 - RNA, 22 nt, Human
cccaggcgggagcgguggcccu

SEQ ID NO: 2220532 - RNA, 23 nt, Human
cccaggcgggagcgguggcccug

SEQ ID NO: 2220533 - RNA, 24 nt, Human
cccaggggagagggucuggagaag

SEQ ID NO: 2220534 - RNA, 14 nt, Human
cccaggggagcccu

SEQ ID NO: 2220535 - RNA, 15 nt, Human
cccaggggagcccuc

SEQ ID NO: 2220536 - RNA, 16 nt, Human
cccaggggagcccucc

SEQ ID NO: 2220537 - RNA, 23 nt, Human
cccaggggagagggucuggagaa

SEQ ID NO: 2220538 - RNA, 22 nt, Human
cccaggggagagggucuggaga

SEQ ID NO: 2220539 - RNA, 21 nt, Human
cccaggggagagggucuggag

SEQ ID NO: 2220540 - RNA, 15 nt, Human
cccaggggagagggu

SEQ ID NO: 2220541 - RNA, 23 nt, Human
cccaggggcauguauuggccugg

SEQ ID NO: 2220542 - RNA, 17 nt, Human
cccaggggcccacaggg

SEQ ID NO: 2220543 - RNA, 22 nt, Human
cccaggggcauguauuggccug

SEQ ID NO: 2220544 - RNA, 19 nt, Human
cccaggggagcccuccacg

SEQ ID NO: 2220545 - RNA, 19 nt, Human
cccaggggucccagccacc

SEQ ID NO: 2220546 - RNA, 18 nt, Human
cccaggggucccagccac

SEQ ID NO: 2220547 - RNA, 16 nt, Human
cccaggggucccagcc

SEQ ID NO: 2220548 - RNA, 15 nt, Human
cccaggggucccagc

SEQ ID NO: 2220549 - RNA, 21 nt, Human
cccaggggcuggcuucaggag

SEQ ID NO: 2220550 - RNA, 18 nt, Human
cccaggggcccacaggga

SEQ ID NO: 2220551 - RNA, 20 nt, Human
cccaggggucccagccaccc

SEQ ID NO: 2220552 - RNA, 17 nt, Human
cccaggggugcccccuc

SEQ ID NO: 2220553 - RNA, 18 nt, Human
cccaggggugcccccucc

SEQ ID NO: 2220554 - RNA, 19 nt, Human
cccaggggugcccccuccu

SEQ ID NO: 2220555 - RNA, 21 nt, Human
cccaggggugcccccuccucu

SEQ ID NO: 2220556 - RNA, 22 nt, Human
cccaggggugcccccuccucuc

SEQ ID NO: 2220557 - RNA, 23 nt, Human
cccaggggugcccccuccucucc

SEQ ID NO: 2220558 - RNA, 13 nt, Human
cccaggguagccc

SEQ ID NO: 2220559 - RNA, 15 nt, Human
cccaggguagcccgc

SEQ ID NO: 2220560 - RNA, 16 nt, Human
cccaggguagcccgcc

SEQ ID NO: 2220561 - RNA, 17 nt, Human
cccaggguagcccgccu

SEQ ID NO: 2220562 - RNA, 15 nt, Human
cccagggucuucccu

SEQ ID NO: 2220563 - RNA, 19 nt, Human
cccaggguagcccgccugc

SEQ ID NO: 2220564 - RNA, 21 nt, Human
cccaggguagcccgccugcca

SEQ ID NO: 2220565 - RNA, 22 nt, Human
cccaggguagcccgccugccag

SEQ ID NO: 2220566 - RNA, 23 nt, Human
cccaggguagcccgccugccagu

SEQ ID NO: 2220567 - RNA, 18 nt, Human
cccagggucuucccuacc

SEQ ID NO: 2220568 - RNA, 16 nt, Human
cccagggucuucccua

SEQ ID NO: 2220569 - RNA, 23 nt, Human
cccagggucuucccuaccucagg

SEQ ID NO: 2220570 - RNA, 15 nt, Human
cccagcggccccucc

SEQ ID NO: 2220571 - RNA, 14 nt, Human
cccagcggccccuc

SEQ ID NO: 2220572 - RNA, 15 nt, Human
cccagccuggcccag

SEQ ID NO: 2220573 - RNA, 16 nt, Human
cccagccuggcccagc

SEQ ID NO: 2220574 - RNA, 19 nt, Human
cccagcgagcccugguggc

SEQ ID NO: 2220575 - RNA, 23 nt, Human
cccagcgagcccugguggcagug

SEQ ID NO: 2220576 - RNA, 17 nt, Human
cccagcgagcccuggug

SEQ ID NO: 2220577 - RNA, 18 nt, Human
cccagcgagcccuggugg

SEQ ID NO: 2220578 - RNA, 15 nt, Human
cccagcgagcccugg

SEQ ID NO: 2220579 - RNA, 12 nt, Human
cccagccuggcc

SEQ ID NO: 2220580 - RNA, 13 nt, Human
cccagccuggccc

SEQ ID NO: 2220581 - RNA, 14 nt, Human
cccagccuggccca

SEQ ID NO: 2220582 - RNA, 14 nt, Human
cccagcuaccucaa

SEQ ID NO: 2220583 - RNA, 22 nt, Human
cccagcuacccuuuuucuccag

SEQ ID NO: 2220584 - RNA, 22 nt, Human
cccagcuaccucaaccaaugcc

SEQ ID NO: 2220585 - RNA, 17 nt, Human
cccagcuacucagaagc

SEQ ID NO: 2220586 - RNA, 22 nt, Human
cccagcuaagaaccuggaacuu

SEQ ID NO: 2220587 - RNA, 18 nt, Human
cccagcuaaucuguaggg

SEQ ID NO: 2220588 - RNA, 19 nt, Human
cccagcuaaucuguagggc

SEQ ID NO: 2220589 - RNA, 20 nt, Human
cccagcuaaucuguagggcu

SEQ ID NO: 2220590 - RNA, 23 nt, Human
cccagcuaaucuguagggcugga

SEQ ID NO: 2220591 - RNA, 14 nt, Human
cccagcuaauuuuu

SEQ ID NO: 2220592 - RNA, 18 nt, Human
cccagcggccccucccac

SEQ ID NO: 2220593 - RNA, 19 nt, Human
cccagcggccccucccaca

SEQ ID NO: 2220594 - RNA, 20 nt, Human
cccagcggccccucccacac

SEQ ID NO: 2220595 - RNA, 16 nt, Human
cccagcuaagaaccug

SEQ ID NO: 2220596 - RNA, 20 nt, Human
cccagcuaagaaccuggaac

SEQ ID NO: 2220597 - RNA, 19 nt, Human
cccagcuaagaaccuggaa

SEQ ID NO: 2220598 - RNA, 18 nt, Human
cccagcuaagaaccugga

SEQ ID NO: 2220599 - RNA, 17 nt, Human
cccagcuaagaaccugg

SEQ ID NO: 2220600 - RNA, 23 nt, Human
cccagcucuagacaacccugcaa

SEQ ID NO: 2220601 - RNA, 14 nt, Human
cccagcucuagaca

SEQ ID NO: 2220602 - RNA, 19 nt, Human
cccagcucccccgggaggg

SEQ ID NO: 2220603 - RNA, 15 nt, Human
cccagcucccuagga

SEQ ID NO: 2220604 - RNA, 17 nt, Human
cccagcuccggccuguc

SEQ ID NO: 2220605 - RNA, 15 nt, Human
cccagcuccccaaga

SEQ ID NO: 2220606 - RNA, 16 nt, Human
cccagcucccccggga

SEQ ID NO: 2220607 - RNA, 21 nt, Human
cccagcuacucaagaggcuga

SEQ ID NO: 2220608 - RNA, 23 nt, Human
cccagcuacucagaagccugagg

SEQ ID NO: 2220609 - RNA, 22 nt, Human
cccagcuacucagaagccugag

SEQ ID NO: 2220610 - RNA, 21 nt, Human
cccagcuacucagaagccuga

SEQ ID NO: 2220611 - RNA, 22 nt, Human
cccagccccuagcccaggagag

SEQ ID NO: 2220612 - RNA, 18 nt, Human
cccagccccuucugaccc

SEQ ID NO: 2220613 - RNA, 20 nt, Human
cccagccccuagcccaggag

SEQ ID NO: 2220614 - RNA, 14 nt, Human
cccagcccuggcuc

SEQ ID NO: 2220615 - RNA, 15 nt, Human
cccagcccuggcucu

SEQ ID NO: 2220616 - RNA, 16 nt, Human
cccagcccuggcucug

SEQ ID NO: 2220617 - RNA, 18 nt, Human
cccagcccuggcucugca

SEQ ID NO: 2220618 - RNA, 14 nt, Human
cccagcccuggucu

SEQ ID NO: 2220619 - RNA, 18 nt, Human
cccagcccuggucucagc

SEQ ID NO: 2220620 - RNA, 19 nt, Human
cccagcccuggucucagca

SEQ ID NO: 2220621 - RNA, 22 nt, Human
cccagcccuuugggaggcugag

SEQ ID NO: 2220622 - RNA, 21 nt, Human
cccagcccuuugggaggcuga

SEQ ID NO: 2220623 - RNA, 14 nt, Human
cccagccgcucgga

SEQ ID NO: 2220624 - RNA, 15 nt, Human
cccagcccuguggaa

SEQ ID NO: 2220625 - RNA, 21 nt, Human
cccagcccuggucucagcagc

SEQ ID NO: 2220626 - RNA, 16 nt, Human
cccagcccuguggaag

SEQ ID NO: 2220627 - RNA, 14 nt, Human
cccagccgcugccc

SEQ ID NO: 2220628 - RNA, 17 nt, Human
cccagccgcugcccggc

SEQ ID NO: 2220629 - RNA, 14 nt, Human
cccagccggccucu

SEQ ID NO: 2220630 - RNA, 15 nt, Human
cccagccggccucuc

SEQ ID NO: 2220631 - RNA, 16 nt, Human
cccagccggccucucu

SEQ ID NO: 2220632 - RNA, 17 nt, Human
cccagccggccucucug

SEQ ID NO: 2220633 - RNA, 12 nt, Human
cccagccugcua

SEQ ID NO: 2220634 - RNA, 10 nt, Human
cccagccugg

SEQ ID NO: 2220635 - RNA, 22 nt, Human
cccagccggccucucuggccuc

SEQ ID NO: 2220636 - RNA, 23 nt, Human
cccagccggccucucuggccucc

SEQ ID NO: 2220637 - RNA, 18 nt, Human
cccagccggccucucugg

SEQ ID NO: 2220638 - RNA, 19 nt, Human
cccagccggccucucuggc

SEQ ID NO: 2220639 - RNA, 20 nt, Human
cccagccggccucucuggcc

SEQ ID NO: 2220640 - RNA, 21 nt, Human
cccagccggccucucuggccu

SEQ ID NO: 2220641 - RNA, 19 nt, Human
cccagcaagugagagcugg

SEQ ID NO: 2220642 - RNA, 20 nt, Human
cccagcaagugagagcuggg

SEQ ID NO: 2220643 - RNA, 21 nt, Human
cccagcaagugagagcugggu

SEQ ID NO: 2220644 - RNA, 22 nt, Human
cccagcaagugagagcugggug

SEQ ID NO: 2220645 - RNA, 23 nt, Human
cccagcaagugagagcugggugu

SEQ ID NO: 2220646 - RNA, 11 nt, Human
cccagccccuu

SEQ ID NO: 2220647 - RNA, 13 nt, Human
cccagccccuagc

SEQ ID NO: 2220648 - RNA, 15 nt, Human
cccagccccggggug

SEQ ID NO: 2220649 - RNA, 14 nt, Human
cccagccccuagcc

SEQ ID NO: 2220650 - RNA, 17 nt, Human
cccagccccuagcccag

SEQ ID NO: 2220651 - RNA, 18 nt, Human
cccagccccuagcccagg

SEQ ID NO: 2220652 - RNA, 19 nt, Human
cccagccccuagcccagga

SEQ ID NO: 2220653 - RNA, 12 nt, Human
cccaaggggcag

SEQ ID NO: 2220654 - RNA, 15 nt, Human
cccaagugugaacaa

SEQ ID NO: 2220655 - RNA, 15 nt, Human
cccaaguggugccua

SEQ ID NO: 2220656 - RNA, 23 nt, Human
cccaagggccuggccugagcugg

SEQ ID NO: 2220657 - RNA, 18 nt, Human
cccaagggccuggccuga

SEQ ID NO: 2220658 - RNA, 19 nt, Human
cccaagggccuggccugag

SEQ ID NO: 2220659 - RNA, 16 nt, Human
cccaacaccagccccu

SEQ ID NO: 2220660 - RNA, 17 nt, Human
cccaacaccagccccug

SEQ ID NO: 2220661 - RNA, 20 nt, Human
cccaacaccagccccugccc

SEQ ID NO: 2220662 - RNA, 16 nt, Human
cccaaauuugauugau

SEQ ID NO: 2220663 - RNA, 17 nt, Human
cccaagggccuggccug

SEQ ID NO: 2220664 - RNA, 19 nt, Human
cccaaauuugauugauuug

SEQ ID NO: 2220665 - RNA, 23 nt, Human
cccaaauggaaaugggcagagca

SEQ ID NO: 2220666 - RNA, 19 nt, Human
cccaaucccagcuaccuca

SEQ ID NO: 2220667 - RNA, 23 nt, Human
cccaaugcacuuuguucuggcuc

SEQ ID NO: 2220668 - RNA, 12 nt, Human
cccaauauuaua

SEQ ID NO: 2220669 - RNA, 15 nt, Human
cccaauauuauaauu

SEQ ID NO: 2220670 - RNA, 17 nt, Human
cccaauauuauaauuuu

SEQ ID NO: 2220671 - RNA, 11 nt, Human
cccaauauuau

SEQ ID NO: 2220672 - RNA, 21 nt, Human
cccaauaaacauuaagauuga

SEQ ID NO: 2220673 - RNA, 22 nt, Human
cccaaguuuuaggacaaacagc

SEQ ID NO: 2220674 - RNA, 23 nt, Human
cccaaguuuuaggacaaacagcu

SEQ ID NO: 2220675 - RNA, 16 nt, Human
cccaagugugaacaaa

SEQ ID NO: 2220676 - RNA, 20 nt, Human
cccaaucccagcuaccucaa

SEQ ID NO: 2220677 - RNA, 15 nt, Human
cccaaugcugauguc

SEQ ID NO: 2220678 - RNA, 15 nt, Human
cccaauuaggaagug

SEQ ID NO: 2220679 - RNA, 14 nt, Human
cccaauuaggaagu

SEQ ID NO: 2220680 - RNA, 16 nt, Human
cccaauguaggagcug

SEQ ID NO: 2220681 - RNA, 21 nt, Human
cccaauucuuacaaacaugug

SEQ ID NO: 2220682 - RNA, 15 nt, Human
cccaauuucagacuc

SEQ ID NO: 2220683 - RNA, 14 nt, Human
cccaauuggaggaa

SEQ ID NO: 2220684 - RNA, 14 nt, Human
cccacacaccccaa

SEQ ID NO: 2220685 - RNA, 22 nt, Human
cccacaaagccuuaucaagugu

SEQ ID NO: 2220686 - RNA, 13 nt, Human
cccacacacucgc

SEQ ID NO: 2220687 - RNA, 19 nt, Human
cccaauuaggaaguguaac

SEQ ID NO: 2220688 - RNA, 13 nt, Human
cccacaaagccuu

SEQ ID NO: 2220689 - RNA, 18 nt, Human
cccaauuuugcagggagc

SEQ ID NO: 2220690 - RNA, 12 nt, Human
cccacacccugg

SEQ ID NO: 2220691 - RNA, 14 nt, Human
cccacacccagcua

SEQ ID NO: 2220692 - RNA, 20 nt, Human
cccacaccaggccguccucc

SEQ ID NO: 2220693 - RNA, 15 nt, Human
cccacacacucgccc

SEQ ID NO: 2220694 - RNA, 23 nt, Human
cccacacggaggcaucugcaccc

SEQ ID NO: 2220695 - RNA, 16 nt, Human
cccacaccucugccag

SEQ ID NO: 2220696 - RNA, 19 nt, Human
cccacaccuccacaguuca

SEQ ID NO: 2220697 - RNA, 15 nt, Human
cccacaccucugcca

SEQ ID NO: 2220698 - RNA, 22 nt, Human
cccacacggaggcaucugcacc

SEQ ID NO: 2220699 - RNA, 22 nt, Human
cccacaccucaguucccuuggc

SEQ ID NO: 2220700 - RNA, 13 nt, Human
cccacaccucagu

SEQ ID NO: 2220701 - RNA, 15 nt, Human
cccacaccguguaaa

SEQ ID NO: 2220702 - RNA, 15 nt, Human
cccacaccuccacag

SEQ ID NO: 2220703 - RNA, 24 nt, Human
cccacaccuccacaguucaguggc

SEQ ID NO: 2220704 - RNA, 20 nt, Human
cccagagggccugcaaggga

SEQ ID NO: 2220705 - RNA, 18 nt, Human
cccagagggccugcaagg

SEQ ID NO: 2220706 - RNA, 14 nt, Human
cccacacuaaccug

SEQ ID NO: 2220707 - RNA, 13 nt, Human
cccacacucacuc

SEQ ID NO: 2220708 - RNA, 14 nt, Human
cccacacucacucc

SEQ ID NO: 2220709 - RNA, 16 nt, Human
cccacacucacuccug

SEQ ID NO: 2220710 - RNA, 23 nt, Human
cccagagugugggaagggagagc

SEQ ID NO: 2220711 - RNA, 23 nt, Human
cccagaguugcugggagcugaaa

SEQ ID NO: 2220712 - RNA, 16 nt, Human
cccagagugugggaag

SEQ ID NO: 2220713 - RNA, 17 nt, Human
cccagagugugaaacuu

SEQ ID NO: 2220714 - RNA, 15 nt, Human
cccagagugugaaac

SEQ ID NO: 2220715 - RNA, 22 nt, Human
cccagagguaacagaacagcuu

SEQ ID NO: 2220716 - RNA, 13 nt, Human
cccagagguaaca

SEQ ID NO: 2220717 - RNA, 18 nt, Human
cccagagguaacagaaca

SEQ ID NO: 2220718 - RNA, 20 nt, Human
cccagagguaacagaacagc

SEQ ID NO: 2220719 - RNA, 23 nt, Human
cccagagguaacagaacagcuuc

SEQ ID NO: 2220720 - RNA, 20 nt, Human
cccagauugcaacaggcugg

SEQ ID NO: 2220721 - RNA, 20 nt, Human
cccagaucuggucccuugca

SEQ ID NO: 2220722 - RNA, 21 nt, Human
cccagaugggggaaagcacag

SEQ ID NO: 2220723 - RNA, 22 nt, Human
cccagauguuuuacgucuggga

SEQ ID NO: 2220724 - RNA, 19 nt, Human
cccagauguuuuacgucug

SEQ ID NO: 2220725 - RNA, 21 nt, Human
cccagauguuuuacgucuggg

SEQ ID NO: 2220726 - RNA, 19 nt, Human
cccagaucuggucccuugc

SEQ ID NO: 2220727 - RNA, 18 nt, Human
cccagaucuggucccuug

SEQ ID NO: 2220728 - RNA, 16 nt, Human
cccagaucccagaagg

SEQ ID NO: 2220729 - RNA, 12 nt, Human
cccagauccuca

SEQ ID NO: 2220730 - RNA, 14 nt, Human
cccagaucccagaa

SEQ ID NO: 2220731 - RNA, 16 nt, Human
cccagaucagcuccua

SEQ ID NO: 2220732 - RNA, 14 nt, Human
cccagaguuuuuau

SEQ ID NO: 2220733 - RNA, 21 nt, Human
cccagaguuuuuauguagcag

SEQ ID NO: 2220734 - RNA, 14 nt, Human
cccagauaccagcc

SEQ ID NO: 2220735 - RNA, 18 nt, Human
cccagauaccagccccug

SEQ ID NO: 2220736 - RNA, 21 nt, Human
cccagauugcaacaggcuggg

SEQ ID NO: 2220737 - RNA, 22 nt, Human
cccagauugcaacaggcugggc

SEQ ID NO: 2220738 - RNA, 16 nt, Human
cccagcaagugagagc

SEQ ID NO: 2220739 - RNA, 18 nt, Human
cccagcaagugagagcug

SEQ ID NO: 2220740 - RNA, 13 nt, Human
cccaggcaggcug

SEQ ID NO: 2220741 - RNA, 22 nt, Human
ccaucuggguccuugcaccccu

SEQ ID NO: 2220742 - RNA, 23 nt, Human
ccaucuggguccuugcaccccuc

SEQ ID NO: 2220743 - RNA, 12 nt, Human
ccaugaagacag

SEQ ID NO: 2220744 - RNA, 19 nt, Human
ccaugaagacaggacagug

SEQ ID NO: 2220745 - RNA, 17 nt, Human
ccaugaagacaggacag

SEQ ID NO: 2220746 - RNA, 16 nt, Human
ccaugaagacaggaca

SEQ ID NO: 2220747 - RNA, 13 nt, Human
ccaugaagacagg

SEQ ID NO: 2220748 - RNA, 16 nt, Human
ccaucuggcagggugg

SEQ ID NO: 2220749 - RNA, 14 nt, Human
ccaucuggcagggu

SEQ ID NO: 2220750 - RNA, 16 nt, Human
ccaucugggagucccc

SEQ ID NO: 2220751 - RNA, 17 nt, Human
ccaucugggaguccccu

SEQ ID NO: 2220752 - RNA, 16 nt, Human
ccaucugggcuccucc

SEQ ID NO: 2220753 - RNA, 17 nt, Human
ccaucuggguccuugca

SEQ ID NO: 2220754 - RNA, 18 nt, Human
ccaucuggguccuugcac

SEQ ID NO: 2220755 - RNA, 12 nt, Human
ccaucugggcuc

SEQ ID NO: 2220756 - RNA, 22 nt, Human
ccaucugggaguccccuuuucu

SEQ ID NO: 2220757 - RNA, 22 nt, Human
ccaucugggcuccuaaccuucc

SEQ ID NO: 2220758 - RNA, 22 nt, Human
ccaugaagagauuuuucaugau

SEQ ID NO: 2220759 - RNA, 18 nt, Human
ccaugaagagauuuuuca

SEQ ID NO: 2220760 - RNA, 14 nt, Human
ccaugaagacagga

SEQ ID NO: 2220761 - RNA, 15 nt, Human
ccaugaagacaggau

SEQ ID NO: 2220762 - RNA, 14 nt, Human
ccaugaagauguag

SEQ ID NO: 2220763 - RNA, 14 nt, Human
ccaugauggcaaca

SEQ ID NO: 2220764 - RNA, 21 nt, Human
ccaugauggcaacagaucugg

SEQ ID NO: 2220765 - RNA, 19 nt, Human
ccaugauggcaacagaucu

SEQ ID NO: 2220766 - RNA, 16 nt, Human
ccaugauggcaacaga

SEQ ID NO: 2220767 - RNA, 15 nt, Human
ccaugauggcaacag

SEQ ID NO: 2220768 - RNA, 14 nt, Human
ccaugauucgccca

SEQ ID NO: 2220769 - RNA, 23 nt, Human
ccaugauucuauuuauauguaca

SEQ ID NO: 2220770 - RNA, 17 nt, Human
ccaugauguggaguggg

SEQ ID NO: 2220771 - RNA, 22 nt, Human
ccaugauguggaguggggcagu

SEQ ID NO: 2220772 - RNA, 19 nt, Human
ccaugauggugcugaccuc

SEQ ID NO: 2220773 - RNA, 22 nt, Human
ccaugauggugcugaccucugg

SEQ ID NO: 2220774 - RNA, 18 nt, Human
ccaugauguagugccucu

SEQ ID NO: 2220775 - RNA, 15 nt, Human
ccaugauguggagug

SEQ ID NO: 2220776 - RNA, 18 nt, Human
ccaugcaauauuuccuca

SEQ ID NO: 2220777 - RNA, 19 nt, Human
ccaugcaauauuuccucau

SEQ ID NO: 2220778 - RNA, 11 nt, Human
ccaugcacugu

SEQ ID NO: 2220779 - RNA, 17 nt, Human
ccaugcacugugaagga

SEQ ID NO: 2220780 - RNA, 16 nt, Human
ccaugcacugugaagg

SEQ ID NO: 2220781 - RNA, 15 nt, Human
ccaugcacugugaag

SEQ ID NO: 2220782 - RNA, 13 nt, Human
ccaugcacuguga

SEQ ID NO: 2220783 - RNA, 21 nt, Human
ccaugauuaaccacuucagcu

SEQ ID NO: 2220784 - RNA, 19 nt, Human
ccaugauuaaccacuucag

SEQ ID NO: 2220785 - RNA, 18 nt, Human
ccaugauguuuuccauga

SEQ ID NO: 2220786 - RNA, 16 nt, Human
ccaugauguuuagaaa

SEQ ID NO: 2220787 - RNA, 21 nt, Human
ccaugccucagcccugacccu

SEQ ID NO: 2220788 - RNA, 15 nt, Human
ccaugccucagcccu

SEQ ID NO: 2220789 - RNA, 16 nt, Human
ccaugccucagcccug

SEQ ID NO: 2220790 - RNA, 12 nt, Human
ccaugccucagc

SEQ ID NO: 2220791 - RNA, 14 nt, Human
ccaugccucagccc

SEQ ID NO: 2220792 - RNA, 18 nt, Human
ccaugcccagcucagagg

SEQ ID NO: 2220793 - RNA, 20 nt, Human
ccaugcguguuucugacucu

SEQ ID NO: 2220794 - RNA, 22 nt, Human
ccaugcgcucagggccaugcug

SEQ ID NO: 2220795 - RNA, 13 nt, Human
ccaugcucaucug

SEQ ID NO: 2220796 - RNA, 16 nt, Human
ccaugcucaucugcug

SEQ ID NO: 2220797 - RNA, 22 nt, Human
ccaugcgcccccuccgcccugc

SEQ ID NO: 2220798 - RNA, 13 nt, Human
ccaugcgcucagg

SEQ ID NO: 2220799 - RNA, 15 nt, Human
ccaugcgcucagggc

SEQ ID NO: 2220800 - RNA, 16 nt, Human
ccaugcgcucagggcc

SEQ ID NO: 2220801 - RNA, 20 nt, Human
ccaugccaaagcuagggugg

SEQ ID NO: 2220802 - RNA, 12 nt, Human
ccaugcagagcg

SEQ ID NO: 2220803 - RNA, 20 nt, Human
ccaugcacugugaaggaccc

SEQ ID NO: 2220804 - RNA, 19 nt, Human
ccaugcacugugaaggacc

SEQ ID NO: 2220805 - RNA, 21 nt, Human
ccaugcacugugaaggacccu

SEQ ID NO: 2220806 - RNA, 21 nt, Human
ccaugcccaccugcccaucac

SEQ ID NO: 2220807 - RNA, 18 nt, Human
ccaugcccaccugcccau

SEQ ID NO: 2220808 - RNA, 17 nt, Human
ccaugcccaccugccca

SEQ ID NO: 2220809 - RNA, 16 nt, Human
ccaugcccaccugccc

SEQ ID NO: 2220810 - RNA, 15 nt, Human
ccaugcccaccugcc

SEQ ID NO: 2220811 - RNA, 13 nt, Human
ccaugcccaccug

SEQ ID NO: 2220812 - RNA, 14 nt, Human
ccaugcugcccugu

SEQ ID NO: 2220813 - RNA, 20 nt, Human
ccaugcugaggccugggccg

SEQ ID NO: 2220814 - RNA, 18 nt, Human
ccaugcugaggccugggc

SEQ ID NO: 2220815 - RNA, 19 nt, Human
ccaugcugaggccugggcc

SEQ ID NO: 2220816 - RNA, 12 nt, Human
ccaugcuggagc

SEQ ID NO: 2220817 - RNA, 13 nt, Human
ccaugcuggagcc

SEQ ID NO: 2220818 - RNA, 14 nt, Human
ccaugcuggagccu

SEQ ID NO: 2220819 - RNA, 15 nt, Human
ccaugcuggagccug

SEQ ID NO: 2220820 - RNA, 16 nt, Human
ccaugcuggagccugu

SEQ ID NO: 2220821 - RNA, 16 nt, Human
ccaugcugggaagacg

SEQ ID NO: 2220822 - RNA, 21 nt, Human
ccaugcuggagccuguguaac

SEQ ID NO: 2220823 - RNA, 22 nt, Human
ccaugcuggagccuguguaaca

SEQ ID NO: 2220824 - RNA, 17 nt, Human
ccaugcuggagccugug

SEQ ID NO: 2220825 - RNA, 18 nt, Human
ccaugcuggagccugugu

SEQ ID NO: 2220826 - RNA, 19 nt, Human
ccaugcuggagccugugua

SEQ ID NO: 2220827 - RNA, 20 nt, Human
ccaugcuggagccuguguaa

SEQ ID NO: 2220828 - RNA, 11 nt, Human
ccaugcugccc

SEQ ID NO: 2220829 - RNA, 13 nt, Human
ccaugcugcccug

SEQ ID NO: 2220830 - RNA, 17 nt, Human
ccaugcucaucugcugg

SEQ ID NO: 2220831 - RNA, 18 nt, Human
ccaugcucaucugcuggu

SEQ ID NO: 2220832 - RNA, 20 nt, Human
ccaugcucaucugcuggucc

SEQ ID NO: 2220833 - RNA, 13 nt, Human
ccauacuggccuc

SEQ ID NO: 2220834 - RNA, 24 nt, Human
ccauaccuuccuucccugggcugu

SEQ ID NO: 2220835 - RNA, 14 nt, Human
ccauacuggccucg

SEQ ID NO: 2220836 - RNA, 17 nt, Human
ccauacuggccucgccu

SEQ ID NO: 2220837 - RNA, 18 nt, Human
ccauacuggccucgccug

SEQ ID NO: 2220838 - RNA, 19 nt, Human
ccauacuuugucugaaaaa

SEQ ID NO: 2220839 - RNA, 20 nt, Human
ccauacuggccucgccuggc

SEQ ID NO: 2220840 - RNA, 21 nt, Human
ccauacuggccucgccuggcc

SEQ ID NO: 2220841 - RNA, 22 nt, Human
ccauacuggccucgccuggccu

SEQ ID NO: 2220842 - RNA, 17 nt, Human
ccauacuuaucucucug

SEQ ID NO: 2220843 - RNA, 23 nt, Human
ccauacuaauuauacccccugca

SEQ ID NO: 2220844 - RNA, 13 nt, Human
ccauacuaauuau

SEQ ID NO: 2220845 - RNA, 12 nt, Human
ccauacuaauua

SEQ ID NO: 2220846 - RNA, 22 nt, Human
ccauaccacccaaugcugaugu

SEQ ID NO: 2220847 - RNA, 23 nt, Human
ccauaccuuccuucccugggcug

SEQ ID NO: 2220848 - RNA, 20 nt, Human
ccagugaggcucugcccuug

SEQ ID NO: 2220849 - RNA, 17 nt, Human
ccagugaggcucugccc

SEQ ID NO: 2220850 - RNA, 16 nt, Human
ccagugaaccaaagag

SEQ ID NO: 2220851 - RNA, 18 nt, Human
ccagugaggcucugcccu

SEQ ID NO: 2220852 - RNA, 19 nt, Human
ccagugaggcucugcccuu

SEQ ID NO: 2220853 - RNA, 18 nt, Human
ccauauccuuacccuccu

SEQ ID NO: 2220854 - RNA, 18 nt, Human
ccauauccccucuccccc

SEQ ID NO: 2220855 - RNA, 13 nt, Human
ccauauccugccu

SEQ ID NO: 2220856 - RNA, 18 nt, Human
ccaucaaggguacacugc

SEQ ID NO: 2220857 - RNA, 23 nt, Human
ccauauaaguuugaaggaaacag

SEQ ID NO: 2220858 - RNA, 19 nt, Human
ccauauaaguuugaaggaa

SEQ ID NO: 2220859 - RNA, 22 nt, Human
ccauauaaguuugaaggaaaca

SEQ ID NO: 2220860 - RNA, 15 nt, Human
ccauauaaguuugaa

SEQ ID NO: 2220861 - RNA, 16 nt, Human
ccauauaaguuugaag

SEQ ID NO: 2220862 - RNA, 18 nt, Human
ccauaugaccucaugcau

SEQ ID NO: 2220863 - RNA, 19 nt, Human
ccauaugaccucaugcauc

SEQ ID NO: 2220864 - RNA, 13 nt, Human
ccaucacaggguu

SEQ ID NO: 2220865 - RNA, 20 nt, Human
ccaucacaggguugggccca

SEQ ID NO: 2220866 - RNA, 22 nt, Human
ccaucagaaacacccucacacu

SEQ ID NO: 2220867 - RNA, 13 nt, Human
ccaucaccagaca

SEQ ID NO: 2220868 - RNA, 12 nt, Human
ccauccucugua

SEQ ID NO: 2220869 - RNA, 19 nt, Human
ccauccucuguacagagcc

SEQ ID NO: 2220870 - RNA, 14 nt, Human
ccaucucucccucc

SEQ ID NO: 2220871 - RNA, 23 nt, Human
ccaucugcgugacaauaaaacau

SEQ ID NO: 2220872 - RNA, 17 nt, Human
ccaucuccuuucaggga

SEQ ID NO: 2220873 - RNA, 16 nt, Human
ccaucuccuuucaggg

SEQ ID NO: 2220874 - RNA, 23 nt, Human
ccaucucgccaccccuccuuccu

SEQ ID NO: 2220875 - RNA, 22 nt, Human
ccaucucgccaccccuccuucc

SEQ ID NO: 2220876 - RNA, 20 nt, Human
ccaucucgccaccccuccuu

SEQ ID NO: 2220877 - RNA, 14 nt, Human
ccaucucgccaccc

SEQ ID NO: 2220878 - RNA, 18 nt, Human
ccaucuccuuucagggaa

SEQ ID NO: 2220879 - RNA, 15 nt, Human
ccaucacaugaccac

SEQ ID NO: 2220880 - RNA, 23 nt, Human
ccaucagaaacacccucacacug

SEQ ID NO: 2220881 - RNA, 21 nt, Human
ccaucagcuuaggggcugcug

SEQ ID NO: 2220882 - RNA, 17 nt, Human
ccaucaggacucuugug

SEQ ID NO: 2220883 - RNA, 24 nt, Human
ccaucagcuguaagaagagacugg

SEQ ID NO: 2220884 - RNA, 19 nt, Human
ccaucagcuguaagaagag

SEQ ID NO: 2220885 - RNA, 22 nt, Human
ccaucauugaaaucuuuuugcu

SEQ ID NO: 2220886 - RNA, 17 nt, Human
ccaucagugcucccuca

SEQ ID NO: 2220887 - RNA, 12 nt, Human
ccaucagugcuc

SEQ ID NO: 2220888 - RNA, 17 nt, Human
ccaucagguuccauccc

SEQ ID NO: 2220889 - RNA, 18 nt, Human
ccaucaguguacccccgc

SEQ ID NO: 2220890 - RNA, 22 nt, Human
ccaucaguguacccccgcccag

SEQ ID NO: 2220891 - RNA, 23 nt, Human
ccaucaguguacccccgcccagg

SEQ ID NO: 2220892 - RNA, 16 nt, Human
ccauccacucuacccu

SEQ ID NO: 2220893 - RNA, 17 nt, Human
ccauccacaugggagcc

SEQ ID NO: 2220894 - RNA, 20 nt, Human
ccauccaaauaagaaaccua

SEQ ID NO: 2220895 - RNA, 15 nt, Human
ccauccaaggccagg

SEQ ID NO: 2220896 - RNA, 15 nt, Human
ccaucauaggaaggg

SEQ ID NO: 2220897 - RNA, 16 nt, Human
ccaucaguuagagcug

SEQ ID NO: 2220898 - RNA, 16 nt, Human
ccaucaucaugugugu

SEQ ID NO: 2220899 - RNA, 14 nt, Human
ccaucaucccagcu

SEQ ID NO: 2220900 - RNA, 21 nt, Human
ccauccuccccuucccugcaa

SEQ ID NO: 2220901 - RNA, 18 nt, Human
ccauccuccccuucccug

SEQ ID NO: 2220902 - RNA, 17 nt, Human
ccauccuccccuucccu

SEQ ID NO: 2220903 - RNA, 21 nt, Human
ccauccagggaugccaucugu

SEQ ID NO: 2220904 - RNA, 15 nt, Human
ccauccuccccuucc

SEQ ID NO: 2220905 - RNA, 12 nt, Human
ccauccaggcag

SEQ ID NO: 2220906 - RNA, 13 nt, Human
ccauccaggcagu

SEQ ID NO: 2220907 - RNA, 22 nt, Human
ccauccacucuacccucccacc

SEQ ID NO: 2220908 - RNA, 19 nt, Human
ccauccacucuacccuccc

SEQ ID NO: 2220909 - RNA, 12 nt, Human
ccauccagaggc

SEQ ID NO: 2220910 - RNA, 20 nt, Human
ccauccucuguacagagccc

SEQ ID NO: 2220911 - RNA, 12 nt, Human
cccaaagaagga

SEQ ID NO: 2220912 - RNA, 23 nt, Human
cccaaacuguugauuauuagcca

SEQ ID NO: 2220913 - RNA, 12 nt, Human
cccaaaccucca

SEQ ID NO: 2220914 - RNA, 22 nt, Human
cccaaaccaccagaagcccaga

SEQ ID NO: 2220915 - RNA, 18 nt, Human
cccaaaccaccagaagcc

SEQ ID NO: 2220916 - RNA, 17 nt, Human
cccaaaccaccagaagc

SEQ ID NO: 2220917 - RNA, 16 nt, Human
cccaaacaccuuccag

SEQ ID NO: 2220918 - RNA, 19 nt, Human
cccaaacaccuuccagcuc

SEQ ID NO: 2220919 - RNA, 21 nt, Human
cccaaacaccuuccagcuccu

SEQ ID NO: 2220920 - RNA, 22 nt, Human
cccaaacaccuuccagcuccug

SEQ ID NO: 2220921 - RNA, 21 nt, Human
cccaaagaauguuuauagcaa

SEQ ID NO: 2220922 - RNA, 18 nt, Human
cccaaagagccuggagaa

SEQ ID NO: 2220923 - RNA, 19 nt, Human
cccaaagagccuggagaag

SEQ ID NO: 2220924 - RNA, 16 nt, Human
cccaaagcagugcaug

SEQ ID NO: 2220925 - RNA, 12 nt, Human
cccaaagaugca

SEQ ID NO: 2220926 - RNA, 15 nt, Human
cccaaagaugcagcc

SEQ ID NO: 2220927 - RNA, 22 nt, Human
ccauuuugggguacccacugcu

SEQ ID NO: 2220928 - RNA, 15 nt, Human
ccauucuggaaguga

SEQ ID NO: 2220929 - RNA, 12 nt, Human
ccauucuggaag

SEQ ID NO: 2220930 - RNA, 20 nt, Human
ccauuuugggguacccacug

SEQ ID NO: 2220931 - RNA, 23 nt, Human
ccauuuuggauucuuauggacaa

SEQ ID NO: 2220932 - RNA, 17 nt, Human
cccaaacaaauaugcaa

SEQ ID NO: 2220933 - RNA, 23 nt, Human
cccaaaagucaaaaggugccugu

SEQ ID NO: 2220934 - RNA, 22 nt, Human
cccaaaagucaaaaggugccug

SEQ ID NO: 2220935 - RNA, 20 nt, Human
cccaaacaaauaugcaaaag

SEQ ID NO: 2220936 - RNA, 18 nt, Human
cccaaaaggcagaagcaa

SEQ ID NO: 2220937 - RNA, 13 nt, Human
cccaaaaggcaga

SEQ ID NO: 2220938 - RNA, 15 nt, Human
ccauggacucuacac

SEQ ID NO: 2220939 - RNA, 17 nt, Human
ccaugcuuagucacugc

SEQ ID NO: 2220940 - RNA, 22 nt, Human
ccauggacucuacacugugaac

SEQ ID NO: 2220941 - RNA, 23 nt, Human
ccauggacuucacauaagcucag

SEQ ID NO: 2220942 - RNA, 19 nt, Human
ccauggacaggcuggcucc

SEQ ID NO: 2220943 - RNA, 18 nt, Human
ccauggacaggcuggcuc

SEQ ID NO: 2220944 - RNA, 16 nt, Human
ccauggacaggcuggc

SEQ ID NO: 2220945 - RNA, 16 nt, Human
ccaugcuuagucacug

SEQ ID NO: 2220946 - RNA, 24 nt, Human
ccaugcuggagccuguguaacagc

SEQ ID NO: 2220947 - RNA, 21 nt, Human
ccaugcugggaagacgccuga

SEQ ID NO: 2220948 - RNA, 24 nt, Human
ccaugcuguugauugcuaaaugua

SEQ ID NO: 2220949 - RNA, 21 nt, Human
ccaugcuguugauugcuaaau

SEQ ID NO: 2220950 - RNA, 22 nt, Human
ccaugcuguugauugcuaaaug

SEQ ID NO: 2220951 - RNA, 20 nt, Human
ccaugcuguugauugcuaaa

SEQ ID NO: 2220952 - RNA, 13 nt, Human
ccauggacuuugu

SEQ ID NO: 2220953 - RNA, 14 nt, Human
ccauggacuuuguu

SEQ ID NO: 2220954 - RNA, 15 nt, Human
ccauucuccaccugc

SEQ ID NO: 2220955 - RNA, 16 nt, Human
ccauucuccaccugcc

SEQ ID NO: 2220956 - RNA, 21 nt, Human
ccauucugccugcccaggccc

SEQ ID NO: 2220957 - RNA, 14 nt, Human
ccauucuccaccug

SEQ ID NO: 2220958 - RNA, 19 nt, Human
ccauucugccugcccaggc

SEQ ID NO: 2220959 - RNA, 20 nt, Human
ccauucugccugcccaggcc

SEQ ID NO: 2220960 - RNA, 16 nt, Human
ccauucugccugccca

SEQ ID NO: 2220961 - RNA, 17 nt, Human
ccauucuccaccugcca

SEQ ID NO: 2220962 - RNA, 17 nt, Human
ccauucugccugcccag

SEQ ID NO: 2220963 - RNA, 18 nt, Human
ccauucugccugcccagg

SEQ ID NO: 2220964 - RNA, 21 nt, Human
cccacaaaggagagcuagcag

SEQ ID NO: 2220965 - RNA, 21 nt, Human
ccaggcugguuucgaacuccu

SEQ ID NO: 2220966 - RNA, 18 nt, Human
ccaggcuugccugcaggc

SEQ ID NO: 2220967 - RNA, 19 nt, Human
ccaggcuuuuuuaucaugu

SEQ ID NO: 2220968 - RNA, 17 nt, Human
ccagggaagcugucccu

SEQ ID NO: 2220969 - RNA, 19 nt, Human
ccagggcacuucacagagu

SEQ ID NO: 2220970 - RNA, 18 nt, Human
ccagggaagcuggccgag

SEQ ID NO: 2220971 - RNA, 17 nt, Human
ccagggaagcuggccga

SEQ ID NO: 2220972 - RNA, 17 nt, Human
ccagggaagagaaagug

SEQ ID NO: 2220973 - RNA, 20 nt, Human
ccagggccacucugccucug

SEQ ID NO: 2220974 - RNA, 19 nt, Human
ccagggccacucugccucu

SEQ ID NO: 2220975 - RNA, 17 nt, Human
ccagggccacucugccu

SEQ ID NO: 2220976 - RNA, 22 nt, Human
ccagggccacgugccaggcccg

SEQ ID NO: 2220977 - RNA, 21 nt, Human
ccagggccacgugccaggccc

SEQ ID NO: 2220978 - RNA, 19 nt, Human
ccagggccacgugccaggc

SEQ ID NO: 2220979 - RNA, 17 nt, Human
ccagggccacgugccag

SEQ ID NO: 2220980 - RNA, 13 nt, Human
ccagggccacgug

SEQ ID NO: 2220981 - RNA, 13 nt, Human
ccagggcagggcc

SEQ ID NO: 2220982 - RNA, 14 nt, Human
ccagggcagggcca

SEQ ID NO: 2220983 - RNA, 17 nt, Human
ccaggcuugccugcagg

SEQ ID NO: 2220984 - RNA, 20 nt, Human
ccaggcuguaucccaugagc

SEQ ID NO: 2220985 - RNA, 19 nt, Human
ccaggcuggucucaaacuc

SEQ ID NO: 2220986 - RNA, 21 nt, Human
ccaggcuggucucgaacuccu

SEQ ID NO: 2220987 - RNA, 20 nt, Human
ccaggcccccaagccugcag

SEQ ID NO: 2220988 - RNA, 19 nt, Human
ccaggcccccaagccugca

SEQ ID NO: 2220989 - RNA, 17 nt, Human
ccaggccccaggaagcc

SEQ ID NO: 2220990 - RNA, 16 nt, Human
ccaggccccaggaagc

SEQ ID NO: 2220991 - RNA, 13 nt, Human
ccaggccccugcc

SEQ ID NO: 2220992 - RNA, 23 nt, Human
ccaggccccgaggacccagaccc

SEQ ID NO: 2220993 - RNA, 21 nt, Human
ccaggccccgaggacccagac

SEQ ID NO: 2220994 - RNA, 22 nt, Human
ccaggccccgaggacccagacc

SEQ ID NO: 2220995 - RNA, 19 nt, Human
ccaggccccgaggacccag

SEQ ID NO: 2220996 - RNA, 20 nt, Human
ccaggccccgaggacccaga

SEQ ID NO: 2220997 - RNA, 12 nt, Human
ccagggaagggg

SEQ ID NO: 2220998 - RNA, 17 nt, Human
ccaggugccaguuaugg

SEQ ID NO: 2220999 - RNA, 12 nt, Human
ccaggugccuug

SEQ ID NO: 2221000 - RNA, 14 nt, Human
ccaggugccuugga

SEQ ID NO: 2221001 - RNA, 15 nt, Human
ccaggugcccagcua

SEQ ID NO: 2221002 - RNA, 13 nt, Human
ccaggugcccagc

SEQ ID NO: 2221003 - RNA, 19 nt, Human
ccaggugcuaggaacacuc

SEQ ID NO: 2221004 - RNA, 15 nt, Human
ccaggucucacgggc

SEQ ID NO: 2221005 - RNA, 16 nt, Human
ccaggucucacgggca

SEQ ID NO: 2221006 - RNA, 23 nt, Human
ccaggucucacgggcaugggcac

SEQ ID NO: 2221007 - RNA, 22 nt, Human
ccagguccucugauacccagag

SEQ ID NO: 2221008 - RNA, 13 nt, Human
ccagguccucuga

SEQ ID NO: 2221009 - RNA, 14 nt, Human
ccagguccucugau

SEQ ID NO: 2221010 - RNA, 20 nt, Human
ccaggucuuggagcugagcc

SEQ ID NO: 2221011 - RNA, 21 nt, Human
ccaggucuuggagcugagccu

SEQ ID NO: 2221012 - RNA, 22 nt, Human
ccaggucuuggagcugagccuc

SEQ ID NO: 2221013 - RNA, 23 nt, Human
ccaggucuuggagcugagccucu

SEQ ID NO: 2221014 - RNA, 14 nt, Human
ccaggucuccucca

SEQ ID NO: 2221015 - RNA, 15 nt, Human
ccaggucuccuccac

SEQ ID NO: 2221016 - RNA, 16 nt, Human
ccaggucuccuccacc

SEQ ID NO: 2221017 - RNA, 19 nt, Human
ccaggucuccuccaccgcc

SEQ ID NO: 2221018 - RNA, 21 nt, Human
ccaggucuccuccaccgccau

SEQ ID NO: 2221019 - RNA, 19 nt, Human
ccaggucuuggagcugagc

SEQ ID NO: 2221020 - RNA, 15 nt, Human
ccagggcucagccug

SEQ ID NO: 2221021 - RNA, 14 nt, Human
ccagggcucagccu

SEQ ID NO: 2221022 - RNA, 13 nt, Human
ccagggcucagcc

SEQ ID NO: 2221023 - RNA, 12 nt, Human
ccagggcucagc

SEQ ID NO: 2221024 - RNA, 20 nt, Human
ccagggcucagccugguggg

SEQ ID NO: 2221025 - RNA, 16 nt, Human
ccagggcucagccugg

SEQ ID NO: 2221026 - RNA, 11 nt, Human
ccagggcucag

SEQ ID NO: 2221027 - RNA, 21 nt, Human
ccagggcuauagcucaggacc

SEQ ID NO: 2221028 - RNA, 19 nt, Human
ccagggcuaugggagcagc

SEQ ID NO: 2221029 - RNA, 19 nt, Human
ccagggcuagugacuugug

SEQ ID NO: 2221030 - RNA, 21 nt, Human
ccagggccuggaagacagaga

SEQ ID NO: 2221031 - RNA, 17 nt, Human
ccagggcuauagcucag

SEQ ID NO: 2221032 - RNA, 16 nt, Human
ccagggcuagugacuu

SEQ ID NO: 2221033 - RNA, 16 nt, Human
ccagggccuggaagac

SEQ ID NO: 2221034 - RNA, 17 nt, Human
ccagggccuggaagaca

SEQ ID NO: 2221035 - RNA, 19 nt, Human
ccagggccuggaagacaga

SEQ ID NO: 2221036 - RNA, 20 nt, Human
ccagggccuggaagacagag

SEQ ID NO: 2221037 - RNA, 18 nt, Human
ccagguccagcucuggag

SEQ ID NO: 2221038 - RNA, 16 nt, Human
ccagguccagcucugg

SEQ ID NO: 2221039 - RNA, 17 nt, Human
ccagguccagcucugga

SEQ ID NO: 2221040 - RNA, 19 nt, Human
ccagguccagcucuggagg

SEQ ID NO: 2221041 - RNA, 20 nt, Human
ccagggcuaugggagcagcu

SEQ ID NO: 2221042 - RNA, 20 nt, Human
ccaggucacccuuugcugug

SEQ ID NO: 2221043 - RNA, 16 nt, Human
ccagguccacggucug

SEQ ID NO: 2221044 - RNA, 13 nt, Human
ccagguccagcuc

SEQ ID NO: 2221045 - RNA, 14 nt, Human
ccagguccagcucu

SEQ ID NO: 2221046 - RNA, 15 nt, Human
ccagguccagcucug

SEQ ID NO: 2221047 - RNA, 21 nt, Human
ccaguagcuugggacaaauca

SEQ ID NO: 2221048 - RNA, 14 nt, Human
ccaguaucuauaua

SEQ ID NO: 2221049 - RNA, 13 nt, Human
ccaguaucgcuca

SEQ ID NO: 2221050 - RNA, 16 nt, Human
ccaguacgugcuaaca

SEQ ID NO: 2221051 - RNA, 17 nt, Human
ccaguaccuuugucaca

SEQ ID NO: 2221052 - RNA, 22 nt, Human
ccaguagaccuuguuacuucug

SEQ ID NO: 2221053 - RNA, 16 nt, Human
ccaguaccuuugucac

SEQ ID NO: 2221054 - RNA, 18 nt, Human
ccaguaccuccugucucu

SEQ ID NO: 2221055 - RNA, 20 nt, Human
ccaguaccuccugucucugg

SEQ ID NO: 2221056 - RNA, 22 nt, Human
ccaguaccuccugucucuggcc

SEQ ID NO: 2221057 - RNA, 12 nt, Human
ccagucuugugu

SEQ ID NO: 2221058 - RNA, 17 nt, Human
ccagucuuccugacacu

SEQ ID NO: 2221059 - RNA, 16 nt, Human
ccagucuguuccccau

SEQ ID NO: 2221060 - RNA, 18 nt, Human
ccaguaucuauauaugug

SEQ ID NO: 2221061 - RNA, 21 nt, Human
ccagucuguggaucagagaug

SEQ ID NO: 2221062 - RNA, 15 nt, Human
ccagugaaccaaaga

SEQ ID NO: 2221063 - RNA, 22 nt, Human
ccagucuuccugacacuuuaau

SEQ ID NO: 2221064 - RNA, 20 nt, Human
ccagugaaaucaguuacucu

SEQ ID NO: 2221065 - RNA, 16 nt, Human
ccagugaauucuugaa

SEQ ID NO: 2221066 - RNA, 20 nt, Human
ccagugaauucuugaaggaa

SEQ ID NO: 2221067 - RNA, 16 nt, Human
ccagguuaucugggca

SEQ ID NO: 2221068 - RNA, 21 nt, Human
ccagguguuacuguaauuccu

SEQ ID NO: 2221069 - RNA, 17 nt, Human
ccagguguuacuguaau

SEQ ID NO: 2221070 - RNA, 14 nt, Human
ccagguucagcuug

SEQ ID NO: 2221071 - RNA, 22 nt, Human
ccagguguguccaccugggcau

SEQ ID NO: 2221072 - RNA, 16 nt, Human
ccaggugugcacgugg

SEQ ID NO: 2221073 - RNA, 23 nt, Human
ccaggugugcacguggcaugugg

SEQ ID NO: 2221074 - RNA, 20 nt, Human
ccagguggggugaggcagug

SEQ ID NO: 2221075 - RNA, 22 nt, Human
ccaggugcuacacccuuuucca

SEQ ID NO: 2221076 - RNA, 13 nt, Human
ccaggugccuugg

SEQ ID NO: 2221077 - RNA, 23 nt, Human
ccagguggggugaggcagugggu

SEQ ID NO: 2221078 - RNA, 16 nt, Human
ccaguaacucaucugu

SEQ ID NO: 2221079 - RNA, 15 nt, Human
ccaguaacucaucug

SEQ ID NO: 2221080 - RNA, 21 nt, Human
ccaguaacgcgucuuccugag

SEQ ID NO: 2221081 - RNA, 18 nt, Human
ccaguaagggaaauagaa

SEQ ID NO: 2221082 - RNA, 19 nt, Human
ccaguaacgcgucuuccug

SEQ ID NO: 2221083 - RNA, 20 nt, Human
ccaguaacgcgucuuccuga

SEQ ID NO: 2221084 - RNA, 15 nt, Human
ccaggagccccgagg

SEQ ID NO: 2221085 - RNA, 18 nt, Human
ccaggagcauccaccucc

SEQ ID NO: 2221086 - RNA, 20 nt, Human
ccaggagcauccaccuccuu

SEQ ID NO: 2221087 - RNA, 23 nt, Human
ccaggagcauccaccuccuucuc

SEQ ID NO: 2221088 - RNA, 15 nt, Human
ccaggagcagccaca

SEQ ID NO: 2221089 - RNA, 16 nt, Human
ccaggagcagccacau

SEQ ID NO: 2221090 - RNA, 14 nt, Human
ccaggaggacugcc

SEQ ID NO: 2221091 - RNA, 14 nt, Human
ccaggaggccagcc

SEQ ID NO: 2221092 - RNA, 13 nt, Human
ccaggaggccagc

SEQ ID NO: 2221093 - RNA, 12 nt, Human
ccaggaggccag

SEQ ID NO: 2221094 - RNA, 19 nt, Human
ccaggagccuccugcccuu

SEQ ID NO: 2221095 - RNA, 18 nt, Human
ccaggagccuccugcccu

SEQ ID NO: 2221096 - RNA, 13 nt, Human
ccaggagccuccu

SEQ ID NO: 2221097 - RNA, 14 nt, Human
ccaggagccuccug

SEQ ID NO: 2221098 - RNA, 13 nt, Human
ccaggcauggugg

SEQ ID NO: 2221099 - RNA, 12 nt, Human
ccaggcagucgg

SEQ ID NO: 2221100 - RNA, 17 nt, Human
ccaggcagucgggggcu

SEQ ID NO: 2221101 - RNA, 19 nt, Human
ccaggcagucgggggcugg

SEQ ID NO: 2221102 - RNA, 20 nt, Human
ccaggcagucgggggcuggc

SEQ ID NO: 2221103 - RNA, 21 nt, Human
ccaggcagucgggggcuggcc

SEQ ID NO: 2221104 - RNA, 22 nt, Human
ccaggcagucgggggcuggccu

SEQ ID NO: 2221105 - RNA, 23 nt, Human
ccaggcagucgggggcuggccua

SEQ ID NO: 2221106 - RNA, 14 nt, Human
ccaggcauucccca

SEQ ID NO: 2221107 - RNA, 20 nt, Human
ccaggcauccuccacaauag

SEQ ID NO: 2221108 - RNA, 24 nt, Human
ccaggcagucgggggcuggccuag

SEQ ID NO: 2221109 - RNA, 24 nt, Human
ccaggcauuccccaggaggccagc

SEQ ID NO: 2221110 - RNA, 15 nt, Human
ccaggccccaggaag

SEQ ID NO: 2221111 - RNA, 16 nt, Human
ccaggcauugccaagg

SEQ ID NO: 2221112 - RNA, 23 nt, Human
ccaggcauuccccaggaggccag

SEQ ID NO: 2221113 - RNA, 22 nt, Human
ccaggcauuccccaggaggcca

SEQ ID NO: 2221114 - RNA, 12 nt, Human
ccagcugccucc

SEQ ID NO: 2221115 - RNA, 10 nt, Human
ccagcugccu

SEQ ID NO: 2221116 - RNA, 13 nt, Human
ccagcugccucuu

SEQ ID NO: 2221117 - RNA, 16 nt, Human
ccagcugcgcuugcuu

SEQ ID NO: 2221118 - RNA, 17 nt, Human
ccagcugcgcuugcuuu

SEQ ID NO: 2221119 - RNA, 18 nt, Human
ccagcugcgcuugcuuuu

SEQ ID NO: 2221120 - RNA, 18 nt, Human
ccagcugccgaccagagc

SEQ ID NO: 2221121 - RNA, 20 nt, Human
ccagcugccgaccagagccc

SEQ ID NO: 2221122 - RNA, 19 nt, Human
ccagcugccgaccagagcc

SEQ ID NO: 2221123 - RNA, 16 nt, Human
ccagcugccccagcca

SEQ ID NO: 2221124 - RNA, 18 nt, Human
ccagcugccccagccaga

SEQ ID NO: 2221125 - RNA, 19 nt, Human
ccagcugcacugaugcugc

SEQ ID NO: 2221126 - RNA, 18 nt, Human
ccagcugcacugaugcug

SEQ ID NO: 2221127 - RNA, 14 nt, Human
ccagcugcacugau

SEQ ID NO: 2221128 - RNA, 14 nt, Human
ccagcucuggucca

SEQ ID NO: 2221129 - RNA, 17 nt, Human
ccagcucugguccauag

SEQ ID NO: 2221130 - RNA, 21 nt, Human
ccagcucugguccauagagag

SEQ ID NO: 2221131 - RNA, 22 nt, Human
ccagcucugguccauagagagc

SEQ ID NO: 2221132 - RNA, 24 nt, Human
ccagcuggagaaauaugguacuca

SEQ ID NO: 2221133 - RNA, 23 nt, Human
ccagcugcuugggcuucauccuc

SEQ ID NO: 2221134 - RNA, 20 nt, Human
ccagcuggcagcagagugug

SEQ ID NO: 2221135 - RNA, 15 nt, Human
ccagcuggcagcaga

SEQ ID NO: 2221136 - RNA, 14 nt, Human
ccagcuggcagcag

SEQ ID NO: 2221137 - RNA, 16 nt, Human
ccagcugggcucugca

SEQ ID NO: 2221138 - RNA, 18 nt, Human
ccagcugggcucugcaau

SEQ ID NO: 2221139 - RNA, 13 nt, Human
ccagcuggcagca

SEQ ID NO: 2221140 - RNA, 21 nt, Human
ccagcugcuccccucccuccu

SEQ ID NO: 2221141 - RNA, 19 nt, Human
ccagcugcuccccucccuc

SEQ ID NO: 2221142 - RNA, 17 nt, Human
ccagcugcuccccuccc

SEQ ID NO: 2221143 - RNA, 16 nt, Human
ccagcugcuccccucc

SEQ ID NO: 2221144 - RNA, 14 nt, Human
ccagcugcuccccu

SEQ ID NO: 2221145 - RNA, 14 nt, Human
ccagcugcucccca

SEQ ID NO: 2221146 - RNA, 12 nt, Human
ccagcugcuccc

SEQ ID NO: 2221147 - RNA, 21 nt, Human
ccagcugcgcuugcuuuucug

SEQ ID NO: 2221148 - RNA, 19 nt, Human
ccagcugcgcuugcuuuuc

SEQ ID NO: 2221149 - RNA, 20 nt, Human
ccagcugcgcuugcuuuucu

SEQ ID NO: 2221150 - RNA, 20 nt, Human
ccagcugcuugggcuucauc

SEQ ID NO: 2221151 - RNA, 22 nt, Human
ccagagcccaccuuggcucaag

SEQ ID NO: 2221152 - RNA, 18 nt, Human
ccagagcauuuccaacac

SEQ ID NO: 2221153 - RNA, 20 nt, Human
ccagagcauuuccaacacca

SEQ ID NO: 2221154 - RNA, 11 nt, Human
ccagagcccag

SEQ ID NO: 2221155 - RNA, 16 nt, Human
ccagagcccaccuugg

SEQ ID NO: 2221156 - RNA, 22 nt, Human
ccagagcauuacgugagccagg

SEQ ID NO: 2221157 - RNA, 23 nt, Human
ccagagcauuacgugagccaggu

SEQ ID NO: 2221158 - RNA, 12 nt, Human
ccagagcagggu

SEQ ID NO: 2221159 - RNA, 14 nt, Human
ccagagcagggugu

SEQ ID NO: 2221160 - RNA, 20 nt, Human
ccagagcauuacgugagcca

SEQ ID NO: 2221161 - RNA, 21 nt, Human
ccagagcauuacgugagccag

SEQ ID NO: 2221162 - RNA, 19 nt, Human
ccagccuugaccauucucc

SEQ ID NO: 2221163 - RNA, 20 nt, Human
ccagccuugaccauucucca

SEQ ID NO: 2221164 - RNA, 15 nt, Human
ccagagcccagcucc

SEQ ID NO: 2221165 - RNA, 14 nt, Human
ccagagcccagcuc

SEQ ID NO: 2221166 - RNA, 13 nt, Human
ccagagcccagcu

SEQ ID NO: 2221167 - RNA, 12 nt, Human
ccagagcccagc

SEQ ID NO: 2221168 - RNA, 21 nt, Human
ccagccuuccucugcagcuga

SEQ ID NO: 2221169 - RNA, 22 nt, Human
ccagccuuccucugcagcugac

SEQ ID NO: 2221170 - RNA, 18 nt, Human
ccagccuucuuccauccc

SEQ ID NO: 2221171 - RNA, 19 nt, Human
ccagccuucuuccauccca

SEQ ID NO: 2221172 - RNA, 22 nt, Human
ccagccuucuuccaucccagga

SEQ ID NO: 2221173 - RNA, 18 nt, Human
ccagccuucuuugcuugc

SEQ ID NO: 2221174 - RNA, 19 nt, Human
ccagccuucuuugcuugcc

SEQ ID NO: 2221175 - RNA, 14 nt, Human
ccagcucuggcuuc

SEQ ID NO: 2221176 - RNA, 12 nt, Human
ccagcucuggcu

SEQ ID NO: 2221177 - RNA, 19 nt, Human
ccagcucuggaggggaggg

SEQ ID NO: 2221178 - RNA, 11 nt, Human
ccagcucuggu

SEQ ID NO: 2221179 - RNA, 12 nt, Human
ccagcucugguc

SEQ ID NO: 2221180 - RNA, 13 nt, Human
ccagcucuggucc

SEQ ID NO: 2221181 - RNA, 14 nt, Human
ccagcgagcccugg

SEQ ID NO: 2221182 - RNA, 22 nt, Human
ccagccuugaccauucuccacc

SEQ ID NO: 2221183 - RNA, 15 nt, Human
ccagcgagcccuggu

SEQ ID NO: 2221184 - RNA, 16 nt, Human
ccagcgagcccuggug

SEQ ID NO: 2221185 - RNA, 20 nt, Human
ccaggaauguuaaagucagu

SEQ ID NO: 2221186 - RNA, 22 nt, Human
ccaggaauuucccaggacccug

SEQ ID NO: 2221187 - RNA, 23 nt, Human
ccaggaauuucccaggacccuga

SEQ ID NO: 2221188 - RNA, 21 nt, Human
ccaggaauuucccaggacccu

SEQ ID NO: 2221189 - RNA, 20 nt, Human
ccaggaauuucccaggaccc

SEQ ID NO: 2221190 - RNA, 19 nt, Human
ccaggaauuucccaggacc

SEQ ID NO: 2221191 - RNA, 18 nt, Human
ccaggaauuucccaggac

SEQ ID NO: 2221192 - RNA, 19 nt, Human
ccaggaaugccuccucccu

SEQ ID NO: 2221193 - RNA, 14 nt, Human
ccaggaauuuccca

SEQ ID NO: 2221194 - RNA, 17 nt, Human
ccaggaauuucccagga

SEQ ID NO: 2221195 - RNA, 16 nt, Human
ccaggaauuucccagg

SEQ ID NO: 2221196 - RNA, 11 nt, Human
ccaggaagccg

SEQ ID NO: 2221197 - RNA, 16 nt, Human
ccagcuggggcguggg

SEQ ID NO: 2221198 - RNA, 19 nt, Human
ccagcuggggcguggggag

SEQ ID NO: 2221199 - RNA, 20 nt, Human
ccaggaagccagcaggcucu

SEQ ID NO: 2221200 - RNA, 22 nt, Human
ccaggaagccagcaggcucuca

SEQ ID NO: 2221201 - RNA, 15 nt, Human
ccaggaagccgugcc

SEQ ID NO: 2221202 - RNA, 20 nt, Human
ccaggaagccgugcccugcc

SEQ ID NO: 2221203 - RNA, 18 nt, Human
ccaggaaggcggggcuuc

SEQ ID NO: 2221204 - RNA, 15 nt, Human
ccaggaaggcggggc

SEQ ID NO: 2221205 - RNA, 20 nt, Human
ccagcuggggcguggggagg

SEQ ID NO: 2221206 - RNA, 22 nt, Human
ccaggaaggggguccacccagc

SEQ ID NO: 2221207 - RNA, 21 nt, Human
ccaggaaggggguccacccag

SEQ ID NO: 2221208 - RNA, 16 nt, Human
ccagcuggcagcagag

SEQ ID NO: 2221209 - RNA, 16 nt, Human
ccagcugggcucugcc

SEQ ID NO: 2221210 - RNA, 19 nt, Human
ccagcugggcucugcaauu

SEQ ID NO: 2221211 - RNA, 17 nt, Human
ccagcugggcucugcca

SEQ ID NO: 2221212 - RNA, 21 nt, Human
ccagcugggcucugccacccu

SEQ ID NO: 2221213 - RNA, 22 nt, Human
ccagcugggcucugccacccua

SEQ ID NO: 2221214 - RNA, 23 nt, Human
ccagcugggcucugccacccuac

SEQ ID NO: 2221215 - RNA, 17 nt, Human
ccagcuggggccaggcu

SEQ ID NO: 2221216 - RNA, 18 nt, Human
ccagcuggggccaggcug

SEQ ID NO: 2221217 - RNA, 19 nt, Human
ccagcuggggccaggcugg

SEQ ID NO: 2221218 - RNA, 20 nt, Human
ccagcuggggccaggcuggg

SEQ ID NO: 2221219 - RNA, 21 nt, Human
ccagcuggggccaggcugggu

SEQ ID NO: 2221220 - RNA, 22 nt, Human
ccagcuggggccaggcuggguc

SEQ ID NO: 2221221 - RNA, 23 nt, Human
ccagcuggggccaggcugggucg

SEQ ID NO: 2221222 - RNA, 22 nt, Human
ccaggacucccuccucaccucu

SEQ ID NO: 2221223 - RNA, 18 nt, Human
ccaggacucccuccucac

SEQ ID NO: 2221224 - RNA, 17 nt, Human
ccaggacucccuccuca

SEQ ID NO: 2221225 - RNA, 16 nt, Human
ccaggacucccuccuc

SEQ ID NO: 2221226 - RNA, 23 nt, Human
ccaggacucccuccucaccucug

SEQ ID NO: 2221227 - RNA, 22 nt, Human
ccaggacuccccaggccaggcc

SEQ ID NO: 2221228 - RNA, 14 nt, Human
ccaggacucccucc

SEQ ID NO: 2221229 - RNA, 19 nt, Human
ccaggacuccccaggccag

SEQ ID NO: 2221230 - RNA, 21 nt, Human
ccaggacuccccaggccaggc

SEQ ID NO: 2221231 - RNA, 21 nt, Human
ccaggacuauauuugggccug

SEQ ID NO: 2221232 - RNA, 15 nt, Human
ccaggacuccccagg

SEQ ID NO: 2221233 - RNA, 17 nt, Human
ccaggacuccccaggcc

SEQ ID NO: 2221234 - RNA, 20 nt, Human
ccaggacuauauuugggccu

SEQ ID NO: 2221235 - RNA, 20 nt, Human
ccaggacuauagcccagguc

SEQ ID NO: 2221236 - RNA, 22 nt, Human
ccaggacuauagcccagguccu

SEQ ID NO: 2221237 - RNA, 21 nt, Human
ccaggacggggccggccaggu

SEQ ID NO: 2221238 - RNA, 23 nt, Human
ccaggacggggccggccaggugg

SEQ ID NO: 2221239 - RNA, 18 nt, Human
ccaggacuauagcccagg

SEQ ID NO: 2221240 - RNA, 19 nt, Human
ccaggacuauagcccaggu

SEQ ID NO: 2221241 - RNA, 13 nt, Human
ccaggacaggacc

SEQ ID NO: 2221242 - RNA, 22 nt, Human
ccaggacaccacacccagccuc

SEQ ID NO: 2221243 - RNA, 23 nt, Human
ccaggacaccacacccagccuca

SEQ ID NO: 2221244 - RNA, 14 nt, Human
ccaggacaggacca

SEQ ID NO: 2221245 - RNA, 17 nt, Human
ccaggacaccacaccca

SEQ ID NO: 2221246 - RNA, 18 nt, Human
ccaggacaccacacccag

SEQ ID NO: 2221247 - RNA, 19 nt, Human
ccaggacaccacacccagc

SEQ ID NO: 2221248 - RNA, 20 nt, Human
ccaggacaccacacccagcc

SEQ ID NO: 2221249 - RNA, 21 nt, Human
ccaggacaccacacccagccu

SEQ ID NO: 2221250 - RNA, 13 nt, Human
ccaggacaggccc

SEQ ID NO: 2221251 - RNA, 17 nt, Human
ccaggacaggcccggcg

SEQ ID NO: 2221252 - RNA, 15 nt, Human
ccaggacaggcccgg

SEQ ID NO: 2221253 - RNA, 14 nt, Human
ccaggacaggcccg

SEQ ID NO: 2221254 - RNA, 20 nt, Human
ccaggacggggccggccagg

SEQ ID NO: 2221255 - RNA, 24 nt, Human
ccagaaacuguucccaccugcugg

SEQ ID NO: 2221256 - RNA, 12 nt, Human
ccagaaagaaaa

SEQ ID NO: 2221257 - RNA, 21 nt, Human
ccacuucaggguucuccucuc

SEQ ID NO: 2221258 - RNA, 13 nt, Human
ccacuucaauaga

SEQ ID NO: 2221259 - RNA, 16 nt, Human
ccagaaaggagacuag

SEQ ID NO: 2221260 - RNA, 14 nt, Human
ccagaaaggagacu

SEQ ID NO: 2221261 - RNA, 23 nt, Human
ccagaaauaaaguuggugacaga

SEQ ID NO: 2221262 - RNA, 21 nt, Human
ccagaaauaaaguuggugaca

SEQ ID NO: 2221263 - RNA, 16 nt, Human
ccagaaaucauuuuac

SEQ ID NO: 2221264 - RNA, 22 nt, Human
ccagaaauccaucuaaauaccu

SEQ ID NO: 2221265 - RNA, 17 nt, Human
ccagaacacacuccauc

SEQ ID NO: 2221266 - RNA, 22 nt, Human
ccagaacaagguucccucugag

SEQ ID NO: 2221267 - RNA, 13 nt, Human
ccagaaauuagaa

SEQ ID NO: 2221268 - RNA, 22 nt, Human
ccagaaaugucuaaaugcugaa

SEQ ID NO: 2221269 - RNA, 17 nt, Human
ccagaaauuagaaaccu

SEQ ID NO: 2221270 - RNA, 14 nt, Human
ccacuucagcugac

SEQ ID NO: 2221271 - RNA, 13 nt, Human
ccacuucagcuga

SEQ ID NO: 2221272 - RNA, 21 nt, Human
ccacuuagaaauugcauuucc

SEQ ID NO: 2221273 - RNA, 22 nt, Human
ccacuuaccuucaauaaaguau

SEQ ID NO: 2221274 - RNA, 21 nt, Human
ccacuuaccuucaauaaagua

SEQ ID NO: 2221275 - RNA, 17 nt, Human
ccacuucaagugaccac

SEQ ID NO: 2221276 - RNA, 22 nt, Human
ccacuuauuccccauucuuccu

SEQ ID NO: 2221277 - RNA, 17 nt, Human
ccacuuaucccucucca

SEQ ID NO: 2221278 - RNA, 13 nt, Human
ccacugcaggccc

SEQ ID NO: 2221279 - RNA, 14 nt, Human
ccacucccaggcag

SEQ ID NO: 2221280 - RNA, 14 nt, Human
ccacucccagugcu

SEQ ID NO: 2221281 - RNA, 23 nt, Human
ccacugcacuccagccuggguga

SEQ ID NO: 2221282 - RNA, 19 nt, Human
ccacuuaaaaaauguccau

SEQ ID NO: 2221283 - RNA, 17 nt, Human
ccacuuaaaaaaugucc

SEQ ID NO: 2221284 - RNA, 17 nt, Human
ccacugcaggccccgcu

SEQ ID NO: 2221285 - RNA, 14 nt, Human
ccacugcaggcccc

SEQ ID NO: 2221286 - RNA, 21 nt, Human
ccacuuaaaaaauguccauga

SEQ ID NO: 2221287 - RNA, 13 nt, Human
ccacuuaaaaugu

SEQ ID NO: 2221288 - RNA, 12 nt, Human
ccacuuaccuag

SEQ ID NO: 2221289 - RNA, 19 nt, Human
ccacuuaccuucaauaaag

SEQ ID NO: 2221290 - RNA, 14 nt, Human
ccacuuaccuucaa

SEQ ID NO: 2221291 - RNA, 13 nt, Human
ccacuuaccuuca

SEQ ID NO: 2221292 - RNA, 19 nt, Human
ccacuuagaaauugcauuu

SEQ ID NO: 2221293 - RNA, 13 nt, Human
ccacucccaggca

SEQ ID NO: 2221294 - RNA, 15 nt, Human
ccacucccaggcagc

SEQ ID NO: 2221295 - RNA, 17 nt, Human
ccacucccacuucccug

SEQ ID NO: 2221296 - RNA, 21 nt, Human
ccacucccacuucccugacac

SEQ ID NO: 2221297 - RNA, 22 nt, Human
ccacucccacuucccugacacu

SEQ ID NO: 2221298 - RNA, 23 nt, Human
ccacucccacuucccugacacug

SEQ ID NO: 2221299 - RNA, 20 nt, Human
ccacuccagcuccuucgcuu

SEQ ID NO: 2221300 - RNA, 11 nt, Human
ccacucccacu

SEQ ID NO: 2221301 - RNA, 12 nt, Human
ccacucccacuu

SEQ ID NO: 2221302 - RNA, 18 nt, Human
ccacugcagaagacagua

SEQ ID NO: 2221303 - RNA, 13 nt, Human
ccacugcagaaga

SEQ ID NO: 2221304 - RNA, 24 nt, Human
ccagaagauccccucaggacugca

SEQ ID NO: 2221305 - RNA, 18 nt, Human
ccagaagauccccucagg

SEQ ID NO: 2221306 - RNA, 22 nt, Human
ccagaagauccccucaggacug

SEQ ID NO: 2221307 - RNA, 22 nt, Human
ccagaagauagcuucaccccaa

SEQ ID NO: 2221308 - RNA, 19 nt, Human
ccagaagaauauucaggac

SEQ ID NO: 2221309 - RNA, 20 nt, Human
ccagaagaauauucaggacu

SEQ ID NO: 2221310 - RNA, 19 nt, Human
ccagaacacacuccaucag

SEQ ID NO: 2221311 - RNA, 16 nt, Human
ccagaagaauauucag

SEQ ID NO: 2221312 - RNA, 17 nt, Human
ccagaagaauauucagg

SEQ ID NO: 2221313 - RNA, 18 nt, Human
ccagaagaauauucagga

SEQ ID NO: 2221314 - RNA, 22 nt, Human
ccagaacacacuccaucagcuu

SEQ ID NO: 2221315 - RNA, 16 nt, Human
ccagaagccaaagacu

SEQ ID NO: 2221316 - RNA, 13 nt, Human
ccagaagcccaga

SEQ ID NO: 2221317 - RNA, 12 nt, Human
ccagaagcccag

SEQ ID NO: 2221318 - RNA, 22 nt, Human
ccagaaguuugagaucagccug

SEQ ID NO: 2221319 - RNA, 14 nt, Human
ccagaagcccagaa

SEQ ID NO: 2221320 - RNA, 20 nt, Human
ccagaaguuugucaagucaa

SEQ ID NO: 2221321 - RNA, 16 nt, Human
ccagaauaaacccagc

SEQ ID NO: 2221322 - RNA, 22 nt, Human
ccagaauaaacuggcagcucag

SEQ ID NO: 2221323 - RNA, 12 nt, Human
ccagaaguguga

SEQ ID NO: 2221324 - RNA, 23 nt, Human
ccagaaguuugagaucagccugg

SEQ ID NO: 2221325 - RNA, 17 nt, Human
ccagacagacaacacug

SEQ ID NO: 2221326 - RNA, 22 nt, Human
ccagacagacaucucugcaccc

SEQ ID NO: 2221327 - RNA, 23 nt, Human
ccagacacugaccauccacucua

SEQ ID NO: 2221328 - RNA, 15 nt, Human
ccagacacucugcuc

SEQ ID NO: 2221329 - RNA, 14 nt, Human
ccagacacaggccc

SEQ ID NO: 2221330 - RNA, 18 nt, Human
ccagacacagaagaggcu

SEQ ID NO: 2221331 - RNA, 13 nt, Human
ccagacacucugc

SEQ ID NO: 2221332 - RNA, 19 nt, Human
ccagaccccucuggccagg

SEQ ID NO: 2221333 - RNA, 14 nt, Human
ccagacagccugua

SEQ ID NO: 2221334 - RNA, 12 nt, Human
ccagacagccug

SEQ ID NO: 2221335 - RNA, 13 nt, Human
ccagacagccugu

SEQ ID NO: 2221336 - RNA, 21 nt, Human
ccagacagcaacggggaggcc

SEQ ID NO: 2221337 - RNA, 19 nt, Human
ccagacagacaucucugca

SEQ ID NO: 2221338 - RNA, 18 nt, Human
ccagacagacaucucugc

SEQ ID NO: 2221339 - RNA, 23 nt, Human
ccagaccccucuggccaggaugg

SEQ ID NO: 2221340 - RNA, 22 nt, Human
ccagaccccucuggccaggaug

SEQ ID NO: 2221341 - RNA, 21 nt, Human
ccagaccccucuggccaggau

SEQ ID NO: 2221342 - RNA, 20 nt, Human
ccagaccccucuggccagga

SEQ ID NO: 2221343 - RNA, 14 nt, Human
ccagaccccuggcu

SEQ ID NO: 2221344 - RNA, 24 nt, Human
ccagaccccucuggccaggaugga

SEQ ID NO: 2221345 - RNA, 15 nt, Human
ccagagcagaugcag

SEQ ID NO: 2221346 - RNA, 16 nt, Human
ccagagcagaugcaga

SEQ ID NO: 2221347 - RNA, 17 nt, Human
ccagagcagaugcagag

SEQ ID NO: 2221348 - RNA, 18 nt, Human
ccagagcagaugcagaga

SEQ ID NO: 2221349 - RNA, 20 nt, Human
ccagagcagaugcagagagc

SEQ ID NO: 2221350 - RNA, 22 nt, Human
ccagagcagaugcagagagcca

SEQ ID NO: 2221351 - RNA, 23 nt, Human
ccagagcagaugcagagagccau

SEQ ID NO: 2221352 - RNA, 14 nt, Human
ccagagcaggaagc

SEQ ID NO: 2221353 - RNA, 15 nt, Human
ccagagcaggaagca

SEQ ID NO: 2221354 - RNA, 12 nt, Human
ccagagcaggag

SEQ ID NO: 2221355 - RNA, 14 nt, Human
ccagagcaggaggc

SEQ ID NO: 2221356 - RNA, 15 nt, Human
ccagagcaggaggcc

SEQ ID NO: 2221357 - RNA, 19 nt, Human
ccagagcaggaggccccug

SEQ ID NO: 2221358 - RNA, 21 nt, Human
ccagagcaggaggccccuggc

SEQ ID NO: 2221359 - RNA, 23 nt, Human
ccagagcaggaggccccuggccc

SEQ ID NO: 2221360 - RNA, 15 nt, Human
ccagaccccuggcuu

SEQ ID NO: 2221361 - RNA, 16 nt, Human
ccagaccccuggcuuu

SEQ ID NO: 2221362 - RNA, 14 nt, Human
ccagagcagaugca

SEQ ID NO: 2221363 - RNA, 17 nt, Human
ccagaccccuggcuuuu

SEQ ID NO: 2221364 - RNA, 23 nt, Human
ccagaauggucuuucuaaugugu

SEQ ID NO: 2221365 - RNA, 16 nt, Human
ccagaaugcuuuagga

SEQ ID NO: 2221366 - RNA, 13 nt, Human
ccagaauuucaaa

SEQ ID NO: 2221367 - RNA, 12 nt, Human
ccagaauuuccc

SEQ ID NO: 2221368 - RNA, 19 nt, Human
ccagaauuucccaaagcag

SEQ ID NO: 2221369 - RNA, 18 nt, Human
ccagaauuucccaaagca

SEQ ID NO: 2221370 - RNA, 21 nt, Human
ccagaauuucccaaagcagug

SEQ ID NO: 2221371 - RNA, 21 nt, Human
ccagacaccuugacagggcac

SEQ ID NO: 2221372 - RNA, 21 nt, Human
ccacuauggucaucuuuuucu

SEQ ID NO: 2221373 - RNA, 14 nt, Human
ccacuaucugggug

SEQ ID NO: 2221374 - RNA, 14 nt, Human
ccacuagugcaaau

SEQ ID NO: 2221375 - RNA, 16 nt, Human
ccacuagugcaaauca

SEQ ID NO: 2221376 - RNA, 17 nt, Human
ccacuagugcaaaucau

SEQ ID NO: 2221377 - RNA, 20 nt, Human
ccacuaggacucugaggcuc

SEQ ID NO: 2221378 - RNA, 19 nt, Human
ccacuaggacucugaggcu

SEQ ID NO: 2221379 - RNA, 13 nt, Human
ccacucaggaggc

SEQ ID NO: 2221380 - RNA, 13 nt, Human
ccacucagcuucc

SEQ ID NO: 2221381 - RNA, 15 nt, Human
ccacucagcuccgug

SEQ ID NO: 2221382 - RNA, 11 nt, Human
ccacucagcuc

SEQ ID NO: 2221383 - RNA, 20 nt, Human
ccacucaggccaacaagcca

SEQ ID NO: 2221384 - RNA, 13 nt, Human
ccacucaggccaa

SEQ ID NO: 2221385 - RNA, 20 nt, Human
ccacucaggaggcugaggca

SEQ ID NO: 2221386 - RNA, 14 nt, Human
ccacucagcuuccu

SEQ ID NO: 2221387 - RNA, 18 nt, Human
ccacucaggcauuugacu

SEQ ID NO: 2221388 - RNA, 20 nt, Human
ccacuccagaccccuggcuu

SEQ ID NO: 2221389 - RNA, 21 nt, Human
ccacuccagaccccuggcuuu

SEQ ID NO: 2221390 - RNA, 22 nt, Human
ccacuccagaccccuggcuuuu

SEQ ID NO: 2221391 - RNA, 18 nt, Human
ccacuaggacucugaggc

SEQ ID NO: 2221392 - RNA, 16 nt, Human
ccacuaggacucugag

SEQ ID NO: 2221393 - RNA, 17 nt, Human
ccacuacaccuggcuga

SEQ ID NO: 2221394 - RNA, 21 nt, Human
ccacuagaacucuccaucuua

SEQ ID NO: 2221395 - RNA, 17 nt, Human
ccacuagacccacugga

SEQ ID NO: 2221396 - RNA, 15 nt, Human
ccacuagacccacug

SEQ ID NO: 2221397 - RNA, 17 nt, Human
ccacuacauucuguuaa

SEQ ID NO: 2221398 - RNA, 16 nt, Human
ccacuacauucuguua

SEQ ID NO: 2221399 - RNA, 22 nt, Human
ccacuacaugcagcccaugccc

SEQ ID NO: 2221400 - RNA, 22 nt, Human
ccacuacacuccagccugagca

SEQ ID NO: 2221401 - RNA, 21 nt, Human
ccacuacacuccagccugagc

SEQ ID NO: 2221402 - RNA, 20 nt, Human
ccacuacacuccagccugag

SEQ ID NO: 2221403 - RNA, 11 nt, Human
ccacuacauuc

SEQ ID NO: 2221404 - RNA, 14 nt, Human
ccacuacauucugu

SEQ ID NO: 2221405 - RNA, 15 nt, Human
ccacuacauucuguu

SEQ ID NO: 2221406 - RNA, 21 nt, Human
ccaccugguuccggaauccug

SEQ ID NO: 2221407 - RNA, 20 nt, Human
ccaccugucaaacaaagcca

SEQ ID NO: 2221408 - RNA, 19 nt, Human
ccaccugucaaacaaagcc

SEQ ID NO: 2221409 - RNA, 11 nt, Human
ccaccugucuc

SEQ ID NO: 2221410 - RNA, 17 nt, Human
ccaccugguggccucug

SEQ ID NO: 2221411 - RNA, 15 nt, Human
ccaccugguggccuc

SEQ ID NO: 2221412 - RNA, 15 nt, Human
ccacccccaccaagg

SEQ ID NO: 2221413 - RNA, 21 nt, Human
ccacccccaccaagggcgcaa

SEQ ID NO: 2221414 - RNA, 23 nt, Human
ccaccccaugucaccggauccug

SEQ ID NO: 2221415 - RNA, 13 nt, Human
ccacccccacacc

SEQ ID NO: 2221416 - RNA, 14 nt, Human
ccacccccacaccu

SEQ ID NO: 2221417 - RNA, 12 nt, Human
ccacccccacca

SEQ ID NO: 2221418 - RNA, 22 nt, Human
ccaccccagugcacccacucug

SEQ ID NO: 2221419 - RNA, 18 nt, Human
ccaccccauccaguucau

SEQ ID NO: 2221420 - RNA, 18 nt, Human
ccaccccauuuucugugg

SEQ ID NO: 2221421 - RNA, 12 nt, Human
ccacccccacac

SEQ ID NO: 2221422 - RNA, 15 nt, Human
ccacccccacccaag

SEQ ID NO: 2221423 - RNA, 18 nt, Human
ccaccugucucagccucc

SEQ ID NO: 2221424 - RNA, 16 nt, Human
ccaccugucucagccu

SEQ ID NO: 2221425 - RNA, 15 nt, Human
ccaccugucucagcc

SEQ ID NO: 2221426 - RNA, 12 nt, Human
ccaccugucuca

SEQ ID NO: 2221427 - RNA, 23 nt, Human
ccaccugucucagccucccagag

SEQ ID NO: 2221428 - RNA, 20 nt, Human
ccaccugucucagccuccca

SEQ ID NO: 2221429 - RNA, 16 nt, Human
ccacgcuggagugcag

SEQ ID NO: 2221430 - RNA, 13 nt, Human
ccacgcuggagug

SEQ ID NO: 2221431 - RNA, 22 nt, Human
ccaccugucaaacaaagccaga

SEQ ID NO: 2221432 - RNA, 15 nt, Human
ccacggccgcuccag

SEQ ID NO: 2221433 - RNA, 16 nt, Human
ccacggccgcuccagg

SEQ ID NO: 2221434 - RNA, 18 nt, Human
ccacggccgcuccagggg

SEQ ID NO: 2221435 - RNA, 23 nt, Human
ccacggccaggccagagggagug

SEQ ID NO: 2221436 - RNA, 20 nt, Human
ccacggccgcuccaggggug

SEQ ID NO: 2221437 - RNA, 17 nt, Human
ccacggucuguucuuga

SEQ ID NO: 2221438 - RNA, 18 nt, Human
ccacgggaaguuuagaga

SEQ ID NO: 2221439 - RNA, 14 nt, Human
ccacgguguucugu

SEQ ID NO: 2221440 - RNA, 18 nt, Human
ccacgcuggagugcagug

SEQ ID NO: 2221441 - RNA, 19 nt, Human
ccacgcuggagugcaguga

SEQ ID NO: 2221442 - RNA, 16 nt, Human
ccacggccaggccaga

SEQ ID NO: 2221443 - RNA, 18 nt, Human
ccacggccaggccagagg

SEQ ID NO: 2221444 - RNA, 19 nt, Human
ccaccccagugcacccacu

SEQ ID NO: 2221445 - RNA, 17 nt, Human
ccaccccagugcaccca

SEQ ID NO: 2221446 - RNA, 18 nt, Human
ccaccccagcugcucccc

SEQ ID NO: 2221447 - RNA, 19 nt, Human
ccaccccagaaauggugaa

SEQ ID NO: 2221448 - RNA, 17 nt, Human
ccaccccacccccuuca

SEQ ID NO: 2221449 - RNA, 13 nt, Human
ccaccccagcugc

SEQ ID NO: 2221450 - RNA, 14 nt, Human
ccaccccagccuaa

SEQ ID NO: 2221451 - RNA, 12 nt, Human
ccaccccagccu

SEQ ID NO: 2221452 - RNA, 13 nt, Human
ccaccccacacuu

SEQ ID NO: 2221453 - RNA, 14 nt, Human
ccaccccacccccu

SEQ ID NO: 2221454 - RNA, 12 nt, Human
ccaccccacacu

SEQ ID NO: 2221455 - RNA, 15 nt, Human
ccaccccacacacgc

SEQ ID NO: 2221456 - RNA, 18 nt, Human
ccacggcucuaggugggg

SEQ ID NO: 2221457 - RNA, 21 nt, Human
ccacggucuguucuugaagca

SEQ ID NO: 2221458 - RNA, 17 nt, Human
ccacgguggucacugga

SEQ ID NO: 2221459 - RNA, 15 nt, Human
ccacgucccccuggg

SEQ ID NO: 2221460 - RNA, 22 nt, Human
ccacgucccccuggggcuucuc

SEQ ID NO: 2221461 - RNA, 15 nt, Human
ccacguccugucagu

SEQ ID NO: 2221462 - RNA, 19 nt, Human
ccacuacacuccagccuga

SEQ ID NO: 2221463 - RNA, 18 nt, Human
ccacuacacuccagccug

SEQ ID NO: 2221464 - RNA, 14 nt, Human
ccacuacacuccag

SEQ ID NO: 2221465 - RNA, 15 nt, Human
ccacuacaccuggcu

SEQ ID NO: 2221466 - RNA, 16 nt, Human
ccacuacaccuggcug

SEQ ID NO: 2221467 - RNA, 22 nt, Human
ccacuaagcagaggaggggccg

SEQ ID NO: 2221468 - RNA, 13 nt, Human
ccacuacaccugg

SEQ ID NO: 2221469 - RNA, 14 nt, Human
ccacuacaccuggc

SEQ ID NO: 2221470 - RNA, 21 nt, Human
ccacuaagcagaggaggggcc

SEQ ID NO: 2221471 - RNA, 19 nt, Human
ccacuaagcagaggagggg

SEQ ID NO: 2221472 - RNA, 16 nt, Human
ccacguccugucagug

SEQ ID NO: 2221473 - RNA, 18 nt, Human
ccacguccugucagugcc

SEQ ID NO: 2221474 - RNA, 17 nt, Human
ccacagggcuaagagcu

SEQ ID NO: 2221475 - RNA, 14 nt, Human
ccacagggcuaaga

SEQ ID NO: 2221476 - RNA, 20 nt, Human
ccacagggcuaagagcuagc

SEQ ID NO: 2221477 - RNA, 22 nt, Human
ccacaggguucaaaaugucugu

SEQ ID NO: 2221478 - RNA, 18 nt, Human
ccacaggguucaaaaugu

SEQ ID NO: 2221479 - RNA, 11 nt, Human
ccacagggucu

SEQ ID NO: 2221480 - RNA, 22 nt, Human
ccacagguucaugccaccaugg

SEQ ID NO: 2221481 - RNA, 23 nt, Human
ccacagguguuuauacagcucag

SEQ ID NO: 2221482 - RNA, 17 nt, Human
ccacaguagucuugaug

SEQ ID NO: 2221483 - RNA, 17 nt, Human
ccacaggugggaggagu

SEQ ID NO: 2221484 - RNA, 14 nt, Human
ccacagucaaagaa

SEQ ID NO: 2221485 - RNA, 15 nt, Human
ccacaguagucuuga

SEQ ID NO: 2221486 - RNA, 16 nt, Human
ccacaguaaguuccua

SEQ ID NO: 2221487 - RNA, 22 nt, Human
ccacaggccugagauuucaucu

SEQ ID NO: 2221488 - RNA, 14 nt, Human
ccacaggccugaga

SEQ ID NO: 2221489 - RNA, 19 nt, Human
ccacaggccugagauuuca

SEQ ID NO: 2221490 - RNA, 11 nt, Human
ccacaggccug

SEQ ID NO: 2221491 - RNA, 12 nt, Human
ccacaggccuga

SEQ ID NO: 2221492 - RNA, 13 nt, Human
ccacaggccuccc

SEQ ID NO: 2221493 - RNA, 15 nt, Human
ccacaggccucccug

SEQ ID NO: 2221494 - RNA, 16 nt, Human
ccacaggccucccugu

SEQ ID NO: 2221495 - RNA, 18 nt, Human
ccacaggccucccuguuu

SEQ ID NO: 2221496 - RNA, 16 nt, Human
ccacagggaacccugc

SEQ ID NO: 2221497 - RNA, 14 nt, Human
ccacagugcugucu

SEQ ID NO: 2221498 - RNA, 12 nt, Human
ccacagugcugu

SEQ ID NO: 2221499 - RNA, 22 nt, Human
ccacagugacucgggcuccugu

SEQ ID NO: 2221500 - RNA, 23 nt, Human
ccacagugacucgggcuccugug

SEQ ID NO: 2221501 - RNA, 16 nt, Human
ccacagucaaagaagg

SEQ ID NO: 2221502 - RNA, 21 nt, Human
ccacagugacucgggcuccug

SEQ ID NO: 2221503 - RNA, 12 nt, Human
ccacagugucug

SEQ ID NO: 2221504 - RNA, 21 nt, Human
ccacaguguuggcgagaggag

SEQ ID NO: 2221505 - RNA, 22 nt, Human
ccacaguguuggcgagaggagg

SEQ ID NO: 2221506 - RNA, 23 nt, Human
ccacaguguuggcgagaggaggg

SEQ ID NO: 2221507 - RNA, 15 nt, Human
ccacaguucaguggc

SEQ ID NO: 2221508 - RNA, 22 nt, Human
ccacaguucaguggcagggcuc

SEQ ID NO: 2221509 - RNA, 12 nt, Human
ccacaucccagg

SEQ ID NO: 2221510 - RNA, 22 nt, Human
ccacauccacacacgcaggaac

SEQ ID NO: 2221511 - RNA, 22 nt, Human
ccacaguuuccucaucugucca

SEQ ID NO: 2221512 - RNA, 20 nt, Human
ccacaguuuccucaucuguc

SEQ ID NO: 2221513 - RNA, 20 nt, Human
ccacauccuccguccagccg

SEQ ID NO: 2221514 - RNA, 19 nt, Human
ccacauccuccguccagcc

SEQ ID NO: 2221515 - RNA, 14 nt, Human
ccacaucuacguuu

SEQ ID NO: 2221516 - RNA, 23 nt, Human
ccacaucuaagccugaaggggcg

SEQ ID NO: 2221517 - RNA, 22 nt, Human
ccacaucuaagccugaaggggc

SEQ ID NO: 2221518 - RNA, 15 nt, Human
ccacaucuaagccug

SEQ ID NO: 2221519 - RNA, 13 nt, Human
ccacauccuccac

SEQ ID NO: 2221520 - RNA, 17 nt, Human
ccacaucccuuugaaac

SEQ ID NO: 2221521 - RNA, 13 nt, Human
ccacaucccaggc

SEQ ID NO: 2221522 - RNA, 15 nt, Human
ccacaucccaggcuu

SEQ ID NO: 2221523 - RNA, 18 nt, Human
ccacaucccaggcuucac

SEQ ID NO: 2221524 - RNA, 20 nt, Human
ccacaucccgggacgcagca

SEQ ID NO: 2221525 - RNA, 22 nt, Human
ccacauugggcagcgcccuucc

SEQ ID NO: 2221526 - RNA, 13 nt, Human
ccacauuuggaau

SEQ ID NO: 2221527 - RNA, 14 nt, Human
ccacauuguuuuaa

SEQ ID NO: 2221528 - RNA, 16 nt, Human
ccacauuguuuuaaaa

SEQ ID NO: 2221529 - RNA, 21 nt, Human
ccaccaacauacucccaucug

SEQ ID NO: 2221530 - RNA, 19 nt, Human
ccacauuuggaauacuuuu

SEQ ID NO: 2221531 - RNA, 16 nt, Human
ccacauuuuauauuua

SEQ ID NO: 2221532 - RNA, 22 nt, Human
ccacauuuggaauacuuuuugu

SEQ ID NO: 2221533 - RNA, 21 nt, Human
ccaccauggccagccaacuuu

SEQ ID NO: 2221534 - RNA, 17 nt, Human
ccaccauggccagccaa

SEQ ID NO: 2221535 - RNA, 16 nt, Human
ccaccauggccagcca

SEQ ID NO: 2221536 - RNA, 22 nt, Human
ccaccaugcccagcucagaggg

SEQ ID NO: 2221537 - RNA, 15 nt, Human
ccaccaacucuugca

SEQ ID NO: 2221538 - RNA, 17 nt, Human
ccaccaagacuuguuuu

SEQ ID NO: 2221539 - RNA, 17 nt, Human
ccaccaagagggacgcc

SEQ ID NO: 2221540 - RNA, 21 nt, Human
ccaccaagccuggucagccca

SEQ ID NO: 2221541 - RNA, 21 nt, Human
ccaccaagagggacgccuggg

SEQ ID NO: 2221542 - RNA, 21 nt, Human
ccaccaacccaucagaaggag

SEQ ID NO: 2221543 - RNA, 14 nt, Human
ccaccaacucuugc

SEQ ID NO: 2221544 - RNA, 12 nt, Human
ccaccaacccau

SEQ ID NO: 2221545 - RNA, 15 nt, Human
ccaccaacaucccau

SEQ ID NO: 2221546 - RNA, 15 nt, Human
ccaccaacccucaga

SEQ ID NO: 2221547 - RNA, 17 nt, Human
ccacaugcggagaacaa

SEQ ID NO: 2221548 - RNA, 19 nt, Human
ccacaucuugcucugcuga

SEQ ID NO: 2221549 - RNA, 18 nt, Human
ccacaucuugcucugcug

SEQ ID NO: 2221550 - RNA, 17 nt, Human
ccacaucuugcucugcu

SEQ ID NO: 2221551 - RNA, 16 nt, Human
ccacaugugcacaugc

SEQ ID NO: 2221552 - RNA, 16 nt, Human
ccacauuccugaugcu

SEQ ID NO: 2221553 - RNA, 15 nt, Human
ccacaugugacacau

SEQ ID NO: 2221554 - RNA, 19 nt, Human
ccacaugugacacauaugc

SEQ ID NO: 2221555 - RNA, 19 nt, Human
ccacauggggcugggcagc

SEQ ID NO: 2221556 - RNA, 20 nt, Human
ccacauggggcugggcagcu

SEQ ID NO: 2221557 - RNA, 21 nt, Human
ccacauggggcugggcagcua

SEQ ID NO: 2221558 - RNA, 14 nt, Human
ccacaugucaccgu

SEQ ID NO: 2221559 - RNA, 16 nt, Human
ccacaugggaggcuca

SEQ ID NO: 2221560 - RNA, 21 nt, Human
ccacauggcuuccuccugcgc

SEQ ID NO: 2221561 - RNA, 17 nt, Human
ccacauggcuuccuccu

SEQ ID NO: 2221562 - RNA, 13 nt, Human
ccacacagagugg

SEQ ID NO: 2221563 - RNA, 13 nt, Human
ccaauauuauaau

SEQ ID NO: 2221564 - RNA, 15 nt, Human
ccacaccaaaccucu

SEQ ID NO: 2221565 - RNA, 15 nt, Human
ccaauauguauugua

SEQ ID NO: 2221566 - RNA, 22 nt, Human
ccaauagggcugagcucucugu

SEQ ID NO: 2221567 - RNA, 15 nt, Human
ccaauauuaaaucug

SEQ ID NO: 2221568 - RNA, 16 nt, Human
ccaauauguauuguaa

SEQ ID NO: 2221569 - RNA, 22 nt, Human
ccaauauguauuguaaacaugu

SEQ ID NO: 2221570 - RNA, 12 nt, Human
ccaauauuauaa

SEQ ID NO: 2221571 - RNA, 18 nt, Human
ccaauauuaaaucugcug

SEQ ID NO: 2221572 - RNA, 20 nt, Human
ccacacagacuugggcaggg

SEQ ID NO: 2221573 - RNA, 20 nt, Human
ccacacccagcccacuucug

SEQ ID NO: 2221574 - RNA, 15 nt, Human
ccacacccagcccac

SEQ ID NO: 2221575 - RNA, 14 nt, Human
ccacaccaggccgu

SEQ ID NO: 2221576 - RNA, 13 nt, Human
ccacaccacaucu

SEQ ID NO: 2221577 - RNA, 23 nt, Human
ccacaccaagcugugccacccug

SEQ ID NO: 2221578 - RNA, 18 nt, Human
ccacaccaagcugugcca

SEQ ID NO: 2221579 - RNA, 20 nt, Human
ccacaccaagcugugccacc

SEQ ID NO: 2221580 - RNA, 14 nt, Human
ccacaccaagcagc

SEQ ID NO: 2221581 - RNA, 12 nt, Human
ccacaccaagcu

SEQ ID NO: 2221582 - RNA, 13 nt, Human
ccacaccaagcug

SEQ ID NO: 2221583 - RNA, 14 nt, Human
ccacaccaagcugu

SEQ ID NO: 2221584 - RNA, 21 nt, Human
ccacacccagcccacuucugc

SEQ ID NO: 2221585 - RNA, 22 nt, Human
ccacacccagcccacuucugcc

SEQ ID NO: 2221586 - RNA, 16 nt, Human
ccacacccucacugcu

SEQ ID NO: 2221587 - RNA, 13 nt, Human
ccacacccccacc

SEQ ID NO: 2221588 - RNA, 15 nt, Human
ccacacccccacccc

SEQ ID NO: 2221589 - RNA, 20 nt, Human
ccacacccccaccccuugcu

SEQ ID NO: 2221590 - RNA, 11 nt, Human
ccacacccucc

SEQ ID NO: 2221591 - RNA, 13 nt, Human
ccacacccagccu

SEQ ID NO: 2221592 - RNA, 14 nt, Human
ccacacccagccuc

SEQ ID NO: 2221593 - RNA, 15 nt, Human
ccacacccagccuca

SEQ ID NO: 2221594 - RNA, 16 nt, Human
ccacacccagccucag

SEQ ID NO: 2221595 - RNA, 17 nt, Human
ccacacccagccucagu

SEQ ID NO: 2221596 - RNA, 19 nt, Human
ccacacccagccucagucc

SEQ ID NO: 2221597 - RNA, 16 nt, Human
ccacacccagcucagc

SEQ ID NO: 2221598 - RNA, 23 nt, Human
ccacacuaaccuggguucccuuu

SEQ ID NO: 2221599 - RNA, 22 nt, Human
ccacacuaaccuggguucccuu

SEQ ID NO: 2221600 - RNA, 16 nt, Human
ccacacuaaccugggu

SEQ ID NO: 2221601 - RNA, 19 nt, Human
ccacacgcuccucccucug

SEQ ID NO: 2221602 - RNA, 24 nt, Human
ccacacucacuccugagaccccug

SEQ ID NO: 2221603 - RNA, 17 nt, Human
ccacacuauuaccauga

SEQ ID NO: 2221604 - RNA, 18 nt, Human
ccacacuauuaccaugag

SEQ ID NO: 2221605 - RNA, 20 nt, Human
ccacacuauuaccaugagaa

SEQ ID NO: 2221606 - RNA, 17 nt, Human
ccacacucacuccugag

SEQ ID NO: 2221607 - RNA, 18 nt, Human
ccacacccucucccagga

SEQ ID NO: 2221608 - RNA, 17 nt, Human
ccacaccuggcacugcu

SEQ ID NO: 2221609 - RNA, 19 nt, Human
ccacacccuguacuguucu

SEQ ID NO: 2221610 - RNA, 15 nt, Human
ccacacccucuccca

SEQ ID NO: 2221611 - RNA, 21 nt, Human
ccacacccucccccgccacuc

SEQ ID NO: 2221612 - RNA, 16 nt, Human
ccacacccuguacugu

SEQ ID NO: 2221613 - RNA, 18 nt, Human
ccacaccuggcacugcug

SEQ ID NO: 2221614 - RNA, 19 nt, Human
ccacaccuggcacugcugu

SEQ ID NO: 2221615 - RNA, 22 nt, Human
ccacacguaaugaaacuuggau

SEQ ID NO: 2221616 - RNA, 17 nt, Human
ccacagcuuccccucuc

SEQ ID NO: 2221617 - RNA, 16 nt, Human
ccacagcugcuggaga

SEQ ID NO: 2221618 - RNA, 12 nt, Human
ccacagcugcug

SEQ ID NO: 2221619 - RNA, 13 nt, Human
ccacagcugcugg

SEQ ID NO: 2221620 - RNA, 14 nt, Human
ccacagcugcugga

SEQ ID NO: 2221621 - RNA, 12 nt, Human
ccacacuccagc

SEQ ID NO: 2221622 - RNA, 14 nt, Human
ccacagcugcucaa

SEQ ID NO: 2221623 - RNA, 14 nt, Human
ccacacucagcaca

SEQ ID NO: 2221624 - RNA, 20 nt, Human
ccacaggaaccacaagacug

SEQ ID NO: 2221625 - RNA, 22 nt, Human
ccacagcuuuuuaccaaguuuc

SEQ ID NO: 2221626 - RNA, 19 nt, Human
ccacaggaagccugcaguc

SEQ ID NO: 2221627 - RNA, 22 nt, Human
ccacaggaagccugcaguccug

SEQ ID NO: 2221628 - RNA, 23 nt, Human
ccacaggcccuuccucuccacug

SEQ ID NO: 2221629 - RNA, 19 nt, Human
ccacaggcccuuuccucag

SEQ ID NO: 2221630 - RNA, 16 nt, Human
ccacaggcccacagua

SEQ ID NO: 2221631 - RNA, 17 nt, Human
ccacaggccgcccugcg

SEQ ID NO: 2221632 - RNA, 23 nt, Human
ccacaggcccuuuccucaggcaa

SEQ ID NO: 2221633 - RNA, 12 nt, Human
ccacaggccucc

SEQ ID NO: 2221634 - RNA, 16 nt, Human
ccacaggccgcccugc

SEQ ID NO: 2221635 - RNA, 21 nt, Human
ccacaggcccuuuccucaggc

SEQ ID NO: 2221636 - RNA, 22 nt, Human
ccacaggcccuuuccucaggca

SEQ ID NO: 2221637 - RNA, 17 nt, Human
ccacaggcccuuccucu

SEQ ID NO: 2221638 - RNA, 18 nt, Human
ccacaggcccuuccucuc

SEQ ID NO: 2221639 - RNA, 19 nt, Human
ccacaggcccuuccucucc

SEQ ID NO: 2221640 - RNA, 22 nt, Human
ccacaggcccuuccucuccacu

SEQ ID NO: 2221641 - RNA, 15 nt, Human
ccacaggcccuuccu

SEQ ID NO: 2221642 - RNA, 16 nt, Human
ccacaggcccuuccuc

SEQ ID NO: 2221643 - RNA, 14 nt, Human
ccacaggcagcuuu

SEQ ID NO: 2221644 - RNA, 12 nt, Human
ccacaggcagcu

SEQ ID NO: 2221645 - RNA, 13 nt, Human
ccacaggcagcuu

SEQ ID NO: 2221646 - RNA, 17 nt, Human
ccacaggacacagucag

SEQ ID NO: 2221647 - RNA, 20 nt, Human
ccacaggagugggaaaacac

SEQ ID NO: 2221648 - RNA, 16 nt, Human
ccacaggaucagucug

SEQ ID NO: 2221649 - RNA, 16 nt, Human
ccacaggacacaguca

SEQ ID NO: 2221650 - RNA, 17 nt, Human
ccacaggaagugaagaa

SEQ ID NO: 2221651 - RNA, 23 nt, Human
ccacaggaagccugcaguccugg

SEQ ID NO: 2221652 - RNA, 21 nt, Human
ccacaggacauuucucuaaga

SEQ ID NO: 2221653 - RNA, 16 nt, Human
ccacaggacauuucuc

SEQ ID NO: 2221654 - RNA, 16 nt, Human
ccaauauucauagcag

SEQ ID NO: 2221655 - RNA, 18 nt, Human
ccacccaggagggagggg

SEQ ID NO: 2221656 - RNA, 17 nt, Human
ccacccaggagggaggg

SEQ ID NO: 2221657 - RNA, 23 nt, Human
ccacccaggagggagggggcuau

SEQ ID NO: 2221658 - RNA, 21 nt, Human
ccacccauccuaccaaugcau

SEQ ID NO: 2221659 - RNA, 12 nt, Human
ccaccccaacau

SEQ ID NO: 2221660 - RNA, 14 nt, Human
ccacccaucgcugu

SEQ ID NO: 2221661 - RNA, 17 nt, Human
ccacccaucgcugugug

SEQ ID NO: 2221662 - RNA, 23 nt, Human
ccacccaggagccccgaggccuu

SEQ ID NO: 2221663 - RNA, 14 nt, Human
ccacccaggaggga

SEQ ID NO: 2221664 - RNA, 15 nt, Human
ccacccaagcuuggc

SEQ ID NO: 2221665 - RNA, 16 nt, Human
ccacccaagcuuggca

SEQ ID NO: 2221666 - RNA, 12 nt, Human
ccacccaggagg

SEQ ID NO: 2221667 - RNA, 14 nt, Human
ccacccaagcuugg

SEQ ID NO: 2221668 - RNA, 21 nt, Human
ccacccaggagccccgaggcc

SEQ ID NO: 2221669 - RNA, 17 nt, Human
ccaccaugucugcccca

SEQ ID NO: 2221670 - RNA, 14 nt, Human
ccaccauuccugga

SEQ ID NO: 2221671 - RNA, 14 nt, Human
ccaccaugucugcc

SEQ ID NO: 2221672 - RNA, 17 nt, Human
ccaccaugcccagucga

SEQ ID NO: 2221673 - RNA, 19 nt, Human
ccaccaugggguccuacca

SEQ ID NO: 2221674 - RNA, 21 nt, Human
ccaccauuccuggaaaccaca

SEQ ID NO: 2221675 - RNA, 15 nt, Human
ccaccauuccuggaa

SEQ ID NO: 2221676 - RNA, 16 nt, Human
ccaccauuccuggaaa

SEQ ID NO: 2221677 - RNA, 17 nt, Human
ccacccccacccaaggg

SEQ ID NO: 2221678 - RNA, 16 nt, Human
ccaagccagaggcugg

SEQ ID NO: 2221679 - RNA, 17 nt, Human
ccaagccagaggcuggg

SEQ ID NO: 2221680 - RNA, 19 nt, Human
ccaagccagaggcuggguu

SEQ ID NO: 2221681 - RNA, 18 nt, Human
ccaagccaagggaaccug

SEQ ID NO: 2221682 - RNA, 20 nt, Human
ccaagccaagggaaccugug

SEQ ID NO: 2221683 - RNA, 22 nt, Human
ccaagccaagggaaccuguguc

SEQ ID NO: 2221684 - RNA, 23 nt, Human
ccaagccaagggaaccugugucc

SEQ ID NO: 2221685 - RNA, 17 nt, Human
ccaagcccgacuugcug

SEQ ID NO: 2221686 - RNA, 18 nt, Human
ccaagcccgacuugcugu

SEQ ID NO: 2221687 - RNA, 22 nt, Human
ccaagcccgacuugcuguuuug

SEQ ID NO: 2221688 - RNA, 23 nt, Human
ccaagcccuggagccaacugcug

SEQ ID NO: 2221689 - RNA, 13 nt, Human
ccaagccguggcu

SEQ ID NO: 2221690 - RNA, 22 nt, Human
ccaagccuacuuuugccauuga

SEQ ID NO: 2221691 - RNA, 20 nt, Human
ccaagcgaggucaacagaga

SEQ ID NO: 2221692 - RNA, 22 nt, Human
ccaagccuuggggauucuucca

SEQ ID NO: 2221693 - RNA, 19 nt, Human
ccaagccuuggcucuaccc

SEQ ID NO: 2221694 - RNA, 20 nt, Human
ccaagccuggucagcccaaa

SEQ ID NO: 2221695 - RNA, 19 nt, Human
ccaagccuggucagcccaa

SEQ ID NO: 2221696 - RNA, 13 nt, Human
ccaagccugacca

SEQ ID NO: 2221697 - RNA, 14 nt, Human
ccaagccugcaacu

SEQ ID NO: 2221698 - RNA, 15 nt, Human
ccaagccuggcaagg

SEQ ID NO: 2221699 - RNA, 18 nt, Human
ccaagcucacaguuccuc

SEQ ID NO: 2221700 - RNA, 17 nt, Human
ccaagcucacaguuccu

SEQ ID NO: 2221701 - RNA, 13 nt, Human
ccaagcucacagu

SEQ ID NO: 2221702 - RNA, 18 nt, Human
ccaagcucaaagcgugga

SEQ ID NO: 2221703 - RNA, 16 nt, Human
ccaagcuauccuggcu

SEQ ID NO: 2221704 - RNA, 22 nt, Human
ccaagcuagaauucccucucuc

SEQ ID NO: 2221705 - RNA, 17 nt, Human
ccaagcucaaagcgugg

SEQ ID NO: 2221706 - RNA, 14 nt, Human
ccaagcucccaggc

SEQ ID NO: 2221707 - RNA, 21 nt, Human
ccaagcgaggucaacagagaa

SEQ ID NO: 2221708 - RNA, 15 nt, Human
ccaagcuagaauucc

SEQ ID NO: 2221709 - RNA, 17 nt, Human
ccaagcuagaauucccu

SEQ ID NO: 2221710 - RNA, 15 nt, Human
ccaagcucccaggca

SEQ ID NO: 2221711 - RNA, 16 nt, Human
ccaagcucccaggcau

SEQ ID NO: 2221712 - RNA, 22 nt, Human
ccaagcucccaggcauucccca

SEQ ID NO: 2221713 - RNA, 17 nt, Human
ccaaggccaaaggaagc

SEQ ID NO: 2221714 - RNA, 22 nt, Human
ccaagcauaccaacacgagcag

SEQ ID NO: 2221715 - RNA, 17 nt, Human
ccaagcauuuagaugua

SEQ ID NO: 2221716 - RNA, 13 nt, Human
ccaagcaucuugg

SEQ ID NO: 2221717 - RNA, 22 nt, Human
ccaagcaucuuggggggguggc

SEQ ID NO: 2221718 - RNA, 23 nt, Human
ccaagcaucuuggggggguggcc

SEQ ID NO: 2221719 - RNA, 23 nt, Human
ccaagcauuuaauguagccaugg

SEQ ID NO: 2221720 - RNA, 18 nt, Human
ccaaggccagaguggccu

SEQ ID NO: 2221721 - RNA, 15 nt, Human
ccaaggccagagugg

SEQ ID NO: 2221722 - RNA, 22 nt, Human
ccaagcucacaguuccucgccc

SEQ ID NO: 2221723 - RNA, 19 nt, Human
ccaagcucacaguuccucg

SEQ ID NO: 2221724 - RNA, 12 nt, Human
ccaagcucagaa

SEQ ID NO: 2221725 - RNA, 19 nt, Human
ccaaggccagaguggccug

SEQ ID NO: 2221726 - RNA, 21 nt, Human
ccaagggaaagaaaaggaagg

SEQ ID NO: 2221727 - RNA, 14 nt, Human
ccaagcucagaagg

SEQ ID NO: 2221728 - RNA, 17 nt, Human
ccaagggaaaggggugc

SEQ ID NO: 2221729 - RNA, 21 nt, Human
ccaagggaaaggggugcuuuu

SEQ ID NO: 2221730 - RNA, 22 nt, Human
ccaagggaaaggggugcuuuua

SEQ ID NO: 2221731 - RNA, 18 nt, Human
ccaaggccaaaggaagca

SEQ ID NO: 2221732 - RNA, 21 nt, Human
ccaaggccaaaggaagcacau

SEQ ID NO: 2221733 - RNA, 24 nt, Human
ccaagggaguuaggcuauucacaa

SEQ ID NO: 2221734 - RNA, 21 nt, Human
ccaagggaucugguccuaccc

SEQ ID NO: 2221735 - RNA, 19 nt, Human
ccaagggaugaaagagaag

SEQ ID NO: 2221736 - RNA, 13 nt, Human
ccaagggaucugg

SEQ ID NO: 2221737 - RNA, 16 nt, Human
ccaagggaaccugugu

SEQ ID NO: 2221738 - RNA, 17 nt, Human
ccaagggaaccuguguc

SEQ ID NO: 2221739 - RNA, 18 nt, Human
ccaagggaaccugugucc

SEQ ID NO: 2221740 - RNA, 19 nt, Human
ccaagggaaccuguguccg

SEQ ID NO: 2221741 - RNA, 15 nt, Human
ccaagggccuggccu

SEQ ID NO: 2221742 - RNA, 24 nt, Human
ccaagggcaaaauucccagggaag

SEQ ID NO: 2221743 - RNA, 18 nt, Human
ccaagggcaaaauuccca

SEQ ID NO: 2221744 - RNA, 20 nt, Human
ccaagggaugaaagagaagg

SEQ ID NO: 2221745 - RNA, 22 nt, Human
ccaagggcaaaauucccaggga

SEQ ID NO: 2221746 - RNA, 16 nt, Human
ccaaggggcagucugg

SEQ ID NO: 2221747 - RNA, 15 nt, Human
ccaaggggcagucug

SEQ ID NO: 2221748 - RNA, 19 nt, Human
ccaaggggaaucagaacuc

SEQ ID NO: 2221749 - RNA, 21 nt, Human
ccaagggcuuuguuuugcaca

SEQ ID NO: 2221750 - RNA, 22 nt, Human
ccaaggggaauguuugccucug

SEQ ID NO: 2221751 - RNA, 20 nt, Human
ccaaggggcagucuggaggg

SEQ ID NO: 2221752 - RNA, 23 nt, Human
ccaaggguucagagacucagggc

SEQ ID NO: 2221753 - RNA, 20 nt, Human
ccaaggguucagagacucag

SEQ ID NO: 2221754 - RNA, 19 nt, Human
ccaagggccuggccugagc

SEQ ID NO: 2221755 - RNA, 14 nt, Human
ccaagggcuucugc

SEQ ID NO: 2221756 - RNA, 17 nt, Human
ccaagggcuucugcacc

SEQ ID NO: 2221757 - RNA, 19 nt, Human
ccaagggcuucugcacccu

SEQ ID NO: 2221758 - RNA, 20 nt, Human
ccaagggcuucugcacccuc

SEQ ID NO: 2221759 - RNA, 21 nt, Human
ccaagggcuucugcacccucc

SEQ ID NO: 2221760 - RNA, 22 nt, Human
ccaagggcuucugcacccucca

SEQ ID NO: 2221761 - RNA, 23 nt, Human
ccaagggcuucugcacccuccac

SEQ ID NO: 2221762 - RNA, 16 nt, Human
ccaagggccuggccug

SEQ ID NO: 2221763 - RNA, 18 nt, Human
ccaagggccuggccugag

SEQ ID NO: 2221764 - RNA, 13 nt, Human
ccaaggugggagg

SEQ ID NO: 2221765 - RNA, 18 nt, Human
ccaaggugggaggauugc

SEQ ID NO: 2221766 - RNA, 18 nt, Human
ccaaggggugggccacag

SEQ ID NO: 2221767 - RNA, 17 nt, Human
ccaaggucuucagccau

SEQ ID NO: 2221768 - RNA, 23 nt, Human
ccaagguuuggggaagaacgaag

SEQ ID NO: 2221769 - RNA, 19 nt, Human
ccaagguuuuauaaggcug

SEQ ID NO: 2221770 - RNA, 19 nt, Human
ccaaggucuucagccauca

SEQ ID NO: 2221771 - RNA, 15 nt, Human
ccaagguggcacggu

SEQ ID NO: 2221772 - RNA, 20 nt, Human
ccaagguuuuauaaggcuga

SEQ ID NO: 2221773 - RNA, 21 nt, Human
ccaagguuuuauaaggcugau

SEQ ID NO: 2221774 - RNA, 16 nt, Human
ccaagguggcacggug

SEQ ID NO: 2221775 - RNA, 20 nt, Human
ccaaguagcugggauuacag

SEQ ID NO: 2221776 - RNA, 21 nt, Human
ccaagucagcuuugccuucca

SEQ ID NO: 2221777 - RNA, 14 nt, Human
ccaaguccaaaugu

SEQ ID NO: 2221778 - RNA, 23 nt, Human
ccaaguccaaauguuuacaggga

SEQ ID NO: 2221779 - RNA, 13 nt, Human
ccaaguccagauu

SEQ ID NO: 2221780 - RNA, 20 nt, Human
ccaagucagcuuugccuucc

SEQ ID NO: 2221781 - RNA, 14 nt, Human
ccaaguauuuauua

SEQ ID NO: 2221782 - RNA, 20 nt, Human
ccaagucaagugaaaaagga

SEQ ID NO: 2221783 - RNA, 18 nt, Human
ccaauagggcugagcucu

SEQ ID NO: 2221784 - RNA, 22 nt, Human
ccaauaguuguugauuggcagg

SEQ ID NO: 2221785 - RNA, 18 nt, Human
ccaauagauuccccauug

SEQ ID NO: 2221786 - RNA, 14 nt, Human
ccaauaacacacag

SEQ ID NO: 2221787 - RNA, 22 nt, Human
ccaauaaaugugaaauucuguc

SEQ ID NO: 2221788 - RNA, 14 nt, Human
ccaauaaaccaggu

SEQ ID NO: 2221789 - RNA, 16 nt, Human
ccaauaacacacagcu

SEQ ID NO: 2221790 - RNA, 13 nt, Human
ccaauaaaccagg

SEQ ID NO: 2221791 - RNA, 13 nt, Human
ccaauaaacagga

SEQ ID NO: 2221792 - RNA, 22 nt, Human
ccaauaaaagcaauuccaaccu

SEQ ID NO: 2221793 - RNA, 23 nt, Human
ccaauaaaagcaauuccaaccuu

SEQ ID NO: 2221794 - RNA, 14 nt, Human
ccaaguuuauauac

SEQ ID NO: 2221795 - RNA, 21 nt, Human
ccaaguuuacucaacccucuc

SEQ ID NO: 2221796 - RNA, 19 nt, Human
ccaaguuccgucaguccaa

SEQ ID NO: 2221797 - RNA, 15 nt, Human
ccaaguucucaccuc

SEQ ID NO: 2221798 - RNA, 14 nt, Human
ccaagucuacagag

SEQ ID NO: 2221799 - RNA, 17 nt, Human
ccaagucuacagaguga

SEQ ID NO: 2221800 - RNA, 14 nt, Human
ccaagucucagugg

SEQ ID NO: 2221801 - RNA, 22 nt, Human
ccaaguuauaaaucaaugucac

SEQ ID NO: 2221802 - RNA, 18 nt, Human
ccaaguuguggugcugac

SEQ ID NO: 2221803 - RNA, 22 nt, Human
ccaaguuguggugcugacaaag

SEQ ID NO: 2221804 - RNA, 17 nt, Human
ccaaguuuacucaaccc

SEQ ID NO: 2221805 - RNA, 22 nt, Human
ccaaguugauuuaguguuuuua

SEQ ID NO: 2221806 - RNA, 12 nt, Human
ccaagucccugu

SEQ ID NO: 2221807 - RNA, 13 nt, Human
ccaagucccuguu

SEQ ID NO: 2221808 - RNA, 15 nt, Human
ccaagucccuguuuu

SEQ ID NO: 2221809 - RNA, 15 nt, Human
ccaaguccugaagag

SEQ ID NO: 2221810 - RNA, 22 nt, Human
ccaagucccuguuuucugagcc

SEQ ID NO: 2221811 - RNA, 23 nt, Human
ccaagucccuguuuucugagccc

SEQ ID NO: 2221812 - RNA, 16 nt, Human
ccaaguccugaagagg

SEQ ID NO: 2221813 - RNA, 19 nt, Human
ccaaguccugaagaggcgg

SEQ ID NO: 2221814 - RNA, 20 nt, Human
ccaaguccugaagaggcggg

SEQ ID NO: 2221815 - RNA, 12 nt, Human
ccaagcacagca

SEQ ID NO: 2221816 - RNA, 17 nt, Human
ccaagcaaccugggucc

SEQ ID NO: 2221817 - RNA, 20 nt, Human
ccaagcaaaggugaagagac

SEQ ID NO: 2221818 - RNA, 18 nt, Human
ccaagcaaccugggucca

SEQ ID NO: 2221819 - RNA, 23 nt, Human
ccaagcaaccuggguccaaauaa

SEQ ID NO: 2221820 - RNA, 14 nt, Human
ccaagcaaguauua

SEQ ID NO: 2221821 - RNA, 21 nt, Human
ccaagauugcgccauugcacu

SEQ ID NO: 2221822 - RNA, 17 nt, Human
ccaagcaaaaucaugga

SEQ ID NO: 2221823 - RNA, 21 nt, Human
ccaagauucacaccugacucu

SEQ ID NO: 2221824 - RNA, 18 nt, Human
ccaagcacagcagccugg

SEQ ID NO: 2221825 - RNA, 16 nt, Human
ccaagcacaguggugg

SEQ ID NO: 2221826 - RNA, 19 nt, Human
ccaagcacagugguggcag

SEQ ID NO: 2221827 - RNA, 20 nt, Human
ccaagcacagugguggcagg

SEQ ID NO: 2221828 - RNA, 21 nt, Human
ccaagcacagugguggcaggg

SEQ ID NO: 2221829 - RNA, 22 nt, Human
ccaagcacagugguggcagggc

SEQ ID NO: 2221830 - RNA, 23 nt, Human
ccaagcacagugguggcagggcc

SEQ ID NO: 2221831 - RNA, 17 nt, Human
ccaagcacagcagccug

SEQ ID NO: 2221832 - RNA, 15 nt, Human
ccaagcacagcagcc

SEQ ID NO: 2221833 - RNA, 14 nt, Human
ccaagcacagcagc

SEQ ID NO: 2221834 - RNA, 13 nt, Human
ccaagcacagcag

SEQ ID NO: 2221835 - RNA, 14 nt, Human
ccaagcacugugcu

SEQ ID NO: 2221836 - RNA, 21 nt, Human
ccaagcacugugcucagggcu

SEQ ID NO: 2221837 - RNA, 22 nt, Human
ccaagcacugugcucagggcua

SEQ ID NO: 2221838 - RNA, 14 nt, Human
ccaacacucaagaa

SEQ ID NO: 2221839 - RNA, 17 nt, Human
ccaacacgcaccugccu

SEQ ID NO: 2221840 - RNA, 21 nt, Human
ccaacacucaagaagcaggcu

SEQ ID NO: 2221841 - RNA, 21 nt, Human
ccaacacgcaccugccucagg

SEQ ID NO: 2221842 - RNA, 20 nt, Human
ccaacacgcaccugccucag

SEQ ID NO: 2221843 - RNA, 18 nt, Human
ccaacaccacagacacac

SEQ ID NO: 2221844 - RNA, 21 nt, Human
ccaacaccacagacacacaca

SEQ ID NO: 2221845 - RNA, 23 nt, Human
ccaacaccacagacacacacacg

SEQ ID NO: 2221846 - RNA, 13 nt, Human
ccaacaccagccc

SEQ ID NO: 2221847 - RNA, 14 nt, Human
ccaacacugugccc

SEQ ID NO: 2221848 - RNA, 15 nt, Human
ccaacacugugcccu

SEQ ID NO: 2221849 - RNA, 16 nt, Human
ccaacacugugcccug

SEQ ID NO: 2221850 - RNA, 17 nt, Human
ccaacacugugcccugg

SEQ ID NO: 2221851 - RNA, 22 nt, Human
ccaacaauccuagugcuuuccu

SEQ ID NO: 2221852 - RNA, 22 nt, Human
ccaacaaaggguuuuaauguag

SEQ ID NO: 2221853 - RNA, 14 nt, Human
ccaacaaagcuguu

SEQ ID NO: 2221854 - RNA, 21 nt, Human
ccaacaaaggguuuuaaugua

SEQ ID NO: 2221855 - RNA, 23 nt, Human
ccaacaccaagcacagcagccug

SEQ ID NO: 2221856 - RNA, 22 nt, Human
ccaacaccaagcacagcagccu

SEQ ID NO: 2221857 - RNA, 14 nt, Human
ccaacaccacagac

SEQ ID NO: 2221858 - RNA, 15 nt, Human
ccaacaccacagaca

SEQ ID NO: 2221859 - RNA, 16 nt, Human
ccaacaccacagacac

SEQ ID NO: 2221860 - RNA, 17 nt, Human
ccaacaccacagacaca

SEQ ID NO: 2221861 - RNA, 19 nt, Human
ccaacaccaagcacagcag

SEQ ID NO: 2221862 - RNA, 17 nt, Human
ccaacaccaagcacagc

SEQ ID NO: 2221863 - RNA, 16 nt, Human
ccaacaccaagcacag

SEQ ID NO: 2221864 - RNA, 13 nt, Human
ccaacaccaagca

SEQ ID NO: 2221865 - RNA, 17 nt, Human
ccaaauuuucuuuuuau

SEQ ID NO: 2221866 - RNA, 15 nt, Human
ccaaauuugauugau

SEQ ID NO: 2221867 - RNA, 22 nt, Human
ccaaaggugaaggaauauaugg

SEQ ID NO: 2221868 - RNA, 21 nt, Human
ccaaauuuuggccaaaguguu

SEQ ID NO: 2221869 - RNA, 20 nt, Human
ccaaauuugauugauuugaa

SEQ ID NO: 2221870 - RNA, 19 nt, Human
ccaacaaagaacacuaacu

SEQ ID NO: 2221871 - RNA, 12 nt, Human
ccaacaaagcug

SEQ ID NO: 2221872 - RNA, 13 nt, Human
ccaacaaagcugu

SEQ ID NO: 2221873 - RNA, 20 nt, Human
ccaaaguacacuguuucaaa

SEQ ID NO: 2221874 - RNA, 23 nt, Human
ccaaauuucauaccuaucaucuu

SEQ ID NO: 2221875 - RNA, 23 nt, Human
ccaaagggugaagcuauuuaucu

SEQ ID NO: 2221876 - RNA, 15 nt, Human
ccaaaggugaaggaa

SEQ ID NO: 2221877 - RNA, 20 nt, Human
ccaaaggugaaggaauauau

SEQ ID NO: 2221878 - RNA, 21 nt, Human
ccaaagggugaagcuauuuau

SEQ ID NO: 2221879 - RNA, 14 nt, Human
ccaaaggcccccua

SEQ ID NO: 2221880 - RNA, 21 nt, Human
ccaaaggccauggagagcugg

SEQ ID NO: 2221881 - RNA, 12 nt, Human
ccaaaggccccc

SEQ ID NO: 2221882 - RNA, 18 nt, Human
ccaaaguacacuguuuca

SEQ ID NO: 2221883 - RNA, 15 nt, Human
ccaaaguacacuguu

SEQ ID NO: 2221884 - RNA, 23 nt, Human
ccaacaggagcugggauccuaag

SEQ ID NO: 2221885 - RNA, 15 nt, Human
ccaacaggagcuggg

SEQ ID NO: 2221886 - RNA, 15 nt, Human
ccaacaggaggacaa

SEQ ID NO: 2221887 - RNA, 16 nt, Human
ccaacaggaggacaau

SEQ ID NO: 2221888 - RNA, 17 nt, Human
ccaacaggaggacaauu

SEQ ID NO: 2221889 - RNA, 18 nt, Human
ccaacaggaggacaauuc

SEQ ID NO: 2221890 - RNA, 16 nt, Human
ccaacauacucccauc

SEQ ID NO: 2221891 - RNA, 17 nt, Human
ccaacagaugcuuuucu

SEQ ID NO: 2221892 - RNA, 22 nt, Human
ccaacagaugcuuuucugucuc

SEQ ID NO: 2221893 - RNA, 19 nt, Human
ccaacagaagaacuguguu

SEQ ID NO: 2221894 - RNA, 18 nt, Human
ccaacacugugcccuggu

SEQ ID NO: 2221895 - RNA, 19 nt, Human
ccaacacugugcccuggug

SEQ ID NO: 2221896 - RNA, 22 nt, Human
ccaacagcgacauagcccaucc

SEQ ID NO: 2221897 - RNA, 23 nt, Human
ccaacagcgacauagcccauccc

SEQ ID NO: 2221898 - RNA, 17 nt, Human
ccaacauacucccaucu

SEQ ID NO: 2221899 - RNA, 18 nt, Human
ccaacauacucccaucug

SEQ ID NO: 2221900 - RNA, 19 nt, Human
ccaacauacucccaucugu

SEQ ID NO: 2221901 - RNA, 20 nt, Human
ccaacauacucccaucugug

SEQ ID NO: 2221902 - RNA, 13 nt, Human
ccaacaucaacau

SEQ ID NO: 2221903 - RNA, 19 nt, Human
ccaacaggaggacaauuca

SEQ ID NO: 2221904 - RNA, 20 nt, Human
ccaacaggaggacaauucau

SEQ ID NO: 2221905 - RNA, 20 nt, Human
ccaaccaaguggcucccaca

SEQ ID NO: 2221906 - RNA, 20 nt, Human
ccaacauugccuauuucagu

SEQ ID NO: 2221907 - RNA, 14 nt, Human
ccaacagguggcag

SEQ ID NO: 2221908 - RNA, 15 nt, Human
ccaacagguggcagg

SEQ ID NO: 2221909 - RNA, 21 nt, Human
ccaacauacucccaucuguga

SEQ ID NO: 2221910 - RNA, 22 nt, Human
ccaacauacucccaucugugaa

SEQ ID NO: 2221911 - RNA, 20 nt, Human
ccaacccccaccccacacuu

SEQ ID NO: 2221912 - RNA, 19 nt, Human
ccaacccccaccccacacu

SEQ ID NO: 2221913 - RNA, 13 nt, Human
ccaacccccagca

SEQ ID NO: 2221914 - RNA, 14 nt, Human
ccaacccccagcac

SEQ ID NO: 2221915 - RNA, 15 nt, Human
ccaacccccagcacc

SEQ ID NO: 2221916 - RNA, 21 nt, Human
ccaacccccagcacccgggcu

SEQ ID NO: 2221917 - RNA, 18 nt, Human
ccaacccccaccccacac

SEQ ID NO: 2221918 - RNA, 17 nt, Human
ccaacccccaccccaca

SEQ ID NO: 2221919 - RNA, 16 nt, Human
ccaacccccaccccac

SEQ ID NO: 2221920 - RNA, 13 nt, Human
ccaacccccaccc

SEQ ID NO: 2221921 - RNA, 14 nt, Human
ccaacccaucagaa

SEQ ID NO: 2221922 - RNA, 12 nt, Human
ccaacccaucag

SEQ ID NO: 2221923 - RNA, 14 nt, Human
ccaaccccaacucc

SEQ ID NO: 2221924 - RNA, 13 nt, Human
ccaaccccagccg

SEQ ID NO: 2221925 - RNA, 13 nt, Human
ccaacccagccgc

SEQ ID NO: 2221926 - RNA, 16 nt, Human
ccaacccagccgcugc

SEQ ID NO: 2221927 - RNA, 19 nt, Human
ccaacccagccgcugcccg

SEQ ID NO: 2221928 - RNA, 21 nt, Human
ccaacccagccgcugcccggc

SEQ ID NO: 2221929 - RNA, 12 nt, Human
ccaacccagccg

SEQ ID NO: 2221930 - RNA, 18 nt, Human
ccaaaggaggcuggcagg

SEQ ID NO: 2221931 - RNA, 17 nt, Human
ccaaaggaggcuggcag

SEQ ID NO: 2221932 - RNA, 16 nt, Human
ccaaaggaggcuggca

SEQ ID NO: 2221933 - RNA, 15 nt, Human
ccaaaggaggcuggc

SEQ ID NO: 2221934 - RNA, 12 nt, Human
ccaaaggaggcu

SEQ ID NO: 2221935 - RNA, 17 nt, Human
ccaaaggacuccaccca

SEQ ID NO: 2221936 - RNA, 16 nt, Human
ccaaaggcucucuccu

SEQ ID NO: 2221937 - RNA, 16 nt, Human
ccaaaggaugugauau

SEQ ID NO: 2221938 - RNA, 19 nt, Human
ccaaaggaugugauauaua

SEQ ID NO: 2221939 - RNA, 21 nt, Human
ccaaaggacuccacccauccu

SEQ ID NO: 2221940 - RNA, 22 nt, Human
ccaaaggcauuuuauugcuuga

SEQ ID NO: 2221941 - RNA, 19 nt, Human
ccaaaggccauggagagcu

SEQ ID NO: 2221942 - RNA, 20 nt, Human
ccaaaggccauggagagcug

SEQ ID NO: 2221943 - RNA, 21 nt, Human
ccaaagcuguuggucuguccc

SEQ ID NO: 2221944 - RNA, 12 nt, Human
ccaaaggaaaaa

SEQ ID NO: 2221945 - RNA, 17 nt, Human
ccaaaggaaaaagcaca

SEQ ID NO: 2221946 - RNA, 22 nt, Human
ccaaaggaaaaagcacaagaag

SEQ ID NO: 2221947 - RNA, 18 nt, Human
ccaaaggaagucuaggag

SEQ ID NO: 2221948 - RNA, 23 nt, Human
ccaaaggaaaaagcacaagaagc

SEQ ID NO: 2221949 - RNA, 23 nt, Human
ccaaaggaagcacaugccucucu

SEQ ID NO: 2221950 - RNA, 15 nt, Human
ccaaaggaagcacau

SEQ ID NO: 2221951 - RNA, 16 nt, Human
ccaaagcuuuccugcc

SEQ ID NO: 2221952 - RNA, 17 nt, Human
ccaaagcuuuccugccc

SEQ ID NO: 2221953 - RNA, 19 nt, Human
ccaaagcuuuccugcccca

SEQ ID NO: 2221954 - RNA, 20 nt, Human
ccaaagcuuuccugccccag

SEQ ID NO: 2221955 - RNA, 15 nt, Human
ccaaagccagacagc

SEQ ID NO: 2221956 - RNA, 23 nt, Human
ccaaagcuaggguggcccuugca

SEQ ID NO: 2221957 - RNA, 16 nt, Human
ccaaagcuuucaugua

SEQ ID NO: 2221958 - RNA, 13 nt, Human
ccaaagcuuuccu

SEQ ID NO: 2221959 - RNA, 14 nt, Human
ccaaagcuuuccug

SEQ ID NO: 2221960 - RNA, 15 nt, Human
ccaaagcuuuccugc

SEQ ID NO: 2221961 - RNA, 19 nt, Human
ccaaagcuaggguggcccu

SEQ ID NO: 2221962 - RNA, 18 nt, Human
ccaaagcuaggguggccc

SEQ ID NO: 2221963 - RNA, 21 nt, Human
ccaaagcuaggccuggccaga

SEQ ID NO: 2221964 - RNA, 16 nt, Human
ccaaagcuaggccugg

SEQ ID NO: 2221965 - RNA, 17 nt, Human
ccaaagcuaggccuggc

SEQ ID NO: 2221966 - RNA, 23 nt, Human
ccaaagccccuugcucuccccug

SEQ ID NO: 2221967 - RNA, 15 nt, Human
ccaaagccagaacca

SEQ ID NO: 2221968 - RNA, 17 nt, Human
ccaaagcgaauuuuaaa

SEQ ID NO: 2221969 - RNA, 15 nt, Human
ccaaagcuaggccug

SEQ ID NO: 2221970 - RNA, 12 nt, Human
ccaaacugccua

SEQ ID NO: 2221971 - RNA, 13 nt, Human
ccaaacucugcca

SEQ ID NO: 2221972 - RNA, 13 nt, Human
ccaaacagugaca

SEQ ID NO: 2221973 - RNA, 20 nt, Human
ccaaacucaccugccccuca

SEQ ID NO: 2221974 - RNA, 22 nt, Human
ccaaagccaccagacugacaaa

SEQ ID NO: 2221975 - RNA, 13 nt, Human
ccaaagccaccag

SEQ ID NO: 2221976 - RNA, 14 nt, Human
ccaaagccaaugug

SEQ ID NO: 2221977 - RNA, 20 nt, Human
ccaaagccaauaacacacag

SEQ ID NO: 2221978 - RNA, 21 nt, Human
ccaaagccaauaacacacagc

SEQ ID NO: 2221979 - RNA, 22 nt, Human
ccaaagccuccuccagccgcca

SEQ ID NO: 2221980 - RNA, 17 nt, Human
ccaaagccuccuccagc

SEQ ID NO: 2221981 - RNA, 19 nt, Human
ccaaagccaaagcuaggcc

SEQ ID NO: 2221982 - RNA, 23 nt, Human
ccaaagcagugcaugcugucccu

SEQ ID NO: 2221983 - RNA, 19 nt, Human
ccaaagcagugcaugcugu

SEQ ID NO: 2221984 - RNA, 22 nt, Human
ccaaacugacucuuaagaagac

SEQ ID NO: 2221985 - RNA, 15 nt, Human
ccaagagagaaagaa

SEQ ID NO: 2221986 - RNA, 16 nt, Human
ccaagaggcugcagcc

SEQ ID NO: 2221987 - RNA, 21 nt, Human
ccaagaggcuguucccaccag

SEQ ID NO: 2221988 - RNA, 19 nt, Human
ccaagaggguccuuuagua

SEQ ID NO: 2221989 - RNA, 16 nt, Human
ccaagagucugaugau

SEQ ID NO: 2221990 - RNA, 16 nt, Human
ccaagaucgcgccacu

SEQ ID NO: 2221991 - RNA, 14 nt, Human
ccaagagagaaaga

SEQ ID NO: 2221992 - RNA, 13 nt, Human
ccaagagagaaag

SEQ ID NO: 2221993 - RNA, 12 nt, Human
ccaagagagaaa

SEQ ID NO: 2221994 - RNA, 24 nt, Human
ccaagagacuccuugagagaccag

SEQ ID NO: 2221995 - RNA, 20 nt, Human
ccaagagacaugcugacuuu

SEQ ID NO: 2221996 - RNA, 22 nt, Human
ccaagacuugguguccuuuccc

SEQ ID NO: 2221997 - RNA, 15 nt, Human
ccaagaggcugcagc

SEQ ID NO: 2221998 - RNA, 14 nt, Human
ccaagaggcugcag

SEQ ID NO: 2221999 - RNA, 19 nt, Human
ccaagacuugguguccuuu

SEQ ID NO: 2222000 - RNA, 22 nt, Human
ccaagacuuggcaacagaagca

SEQ ID NO: 2222001 - RNA, 18 nt, Human
ccaagacuuggcaacaga

SEQ ID NO: 2222002 - RNA, 20 nt, Human
ccaagacuuggcaacagaag

SEQ ID NO: 2222003 - RNA, 21 nt, Human
ccaagacuugguguccuuucc

SEQ ID NO: 2222004 - RNA, 20 nt, Human
ccaagacuugguguccuuuc

SEQ ID NO: 2222005 - RNA, 12 nt, Human
ccaagaagggcu

SEQ ID NO: 2222006 - RNA, 19 nt, Human
ccaagaauagaugcugacu

SEQ ID NO: 2222007 - RNA, 13 nt, Human
ccaagaagggcua

SEQ ID NO: 2222008 - RNA, 22 nt, Human
ccaagaagggcuagaaccugga

SEQ ID NO: 2222009 - RNA, 13 nt, Human
ccaagaaguugga

SEQ ID NO: 2222010 - RNA, 19 nt, Human
ccaagaagcccaggaaagg

SEQ ID NO: 2222011 - RNA, 20 nt, Human
ccaagaagcccaggaaaggc

SEQ ID NO: 2222012 - RNA, 18 nt, Human
ccaagacagaugccccag

SEQ ID NO: 2222013 - RNA, 13 nt, Human
ccaagaaugcuga

SEQ ID NO: 2222014 - RNA, 14 nt, Human
ccaagaaugcugaa

SEQ ID NO: 2222015 - RNA, 15 nt, Human
ccaagaaugcugaaa

SEQ ID NO: 2222016 - RNA, 21 nt, Human
ccaagacagaugccccagagc

SEQ ID NO: 2222017 - RNA, 19 nt, Human
ccaagacagaugccccaga

SEQ ID NO: 2222018 - RNA, 22 nt, Human
ccaagacagaugccccagagcu

SEQ ID NO: 2222019 - RNA, 20 nt, Human
ccaagaauagaugcugacug

SEQ ID NO: 2222020 - RNA, 17 nt, Human
ccaagaaguuuaaggaa

SEQ ID NO: 2222021 - RNA, 12 nt, Human
ccaagaaucuau

SEQ ID NO: 2222022 - RNA, 12 nt, Human
ccaagaaugcug

SEQ ID NO: 2222023 - RNA, 18 nt, Human
ccaaccccccaccugcca

SEQ ID NO: 2222024 - RNA, 13 nt, Human
ccaaccccccagc

SEQ ID NO: 2222025 - RNA, 14 nt, Human
ccaaccccccagca

SEQ ID NO: 2222026 - RNA, 15 nt, Human
ccaaccccccagcac

SEQ ID NO: 2222027 - RNA, 17 nt, Human
ccaaccccccagcacug

SEQ ID NO: 2222028 - RNA, 18 nt, Human
ccaaccccccagcacuga

SEQ ID NO: 2222029 - RNA, 19 nt, Human
ccaaccccccagcacugag

SEQ ID NO: 2222030 - RNA, 20 nt, Human
ccaaccccccagcacugagg

SEQ ID NO: 2222031 - RNA, 17 nt, Human
ccaacccgaggcccgca

SEQ ID NO: 2222032 - RNA, 15 nt, Human
ccaaccccuguggag

SEQ ID NO: 2222033 - RNA, 15 nt, Human
ccaacccgaggcccg

SEQ ID NO: 2222034 - RNA, 12 nt, Human
ccaaccccugug

SEQ ID NO: 2222035 - RNA, 18 nt, Human
ccaaccccugaggaagau

SEQ ID NO: 2222036 - RNA, 21 nt, Human
ccaaccccccagcacugagga

SEQ ID NO: 2222037 - RNA, 14 nt, Human
ccaacccucagagc

SEQ ID NO: 2222038 - RNA, 15 nt, Human
ccaacccucagagcc

SEQ ID NO: 2222039 - RNA, 15 nt, Human
ccaagaagcccagga

SEQ ID NO: 2222040 - RNA, 12 nt, Human
ccaacccucauc

SEQ ID NO: 2222041 - RNA, 19 nt, Human
cauuguccaauccuauguu

SEQ ID NO: 2222042 - RNA, 21 nt, Human
cauuguccaauccuauguuuu

SEQ ID NO: 2222043 - RNA, 23 nt, Human
cauuguauucagaguugaugguu

SEQ ID NO: 2222044 - RNA, 15 nt, Human
cauuguaugaugugu

SEQ ID NO: 2222045 - RNA, 21 nt, Human
cauuguaucgauguuauguaa

SEQ ID NO: 2222046 - RNA, 17 nt, Human
cauuguaucgauguuau

SEQ ID NO: 2222047 - RNA, 16 nt, Human
cauuguaucgauguua

SEQ ID NO: 2222048 - RNA, 20 nt, Human
cauuguauauauguguguuu

SEQ ID NO: 2222049 - RNA, 22 nt, Human
cauuguauauauguguguuuaa

SEQ ID NO: 2222050 - RNA, 22 nt, Human
cauuguaucgauguuauguaaa

SEQ ID NO: 2222051 - RNA, 16 nt, Human
cauuguaugauguguu

SEQ ID NO: 2222052 - RNA, 17 nt, Human
cauuguaugauguguug

SEQ ID NO: 2222053 - RNA, 18 nt, Human
cauuguaugauguguugu

SEQ ID NO: 2222054 - RNA, 20 nt, Human
cauuguaugauguguuguga

SEQ ID NO: 2222055 - RNA, 22 nt, Human
cauuguaugauguguugugaua

SEQ ID NO: 2222056 - RNA, 22 nt, Human
cauuguauggauaguaaaauuc

SEQ ID NO: 2222057 - RNA, 13 nt, Human
cauugucuucgga

SEQ ID NO: 2222058 - RNA, 23 nt, Human
cauugucuucggaaaccuuggug

SEQ ID NO: 2222059 - RNA, 13 nt, Human
cauugucuuguuc

SEQ ID NO: 2222060 - RNA, 15 nt, Human
cauugucuuguucug

SEQ ID NO: 2222061 - RNA, 17 nt, Human
cauugugaacugacagg

SEQ ID NO: 2222062 - RNA, 18 nt, Human
cauugugaacugacaggc

SEQ ID NO: 2222063 - RNA, 19 nt, Human
cauugucccugaagagaag

SEQ ID NO: 2222064 - RNA, 21 nt, Human
cauugucccucugccccaucc

SEQ ID NO: 2222065 - RNA, 19 nt, Human
cauugucccucugccccau

SEQ ID NO: 2222066 - RNA, 18 nt, Human
cauugucccucugcccca

SEQ ID NO: 2222067 - RNA, 15 nt, Human
cauugucccucugcc

SEQ ID NO: 2222068 - RNA, 14 nt, Human
cauugucccucugc

SEQ ID NO: 2222069 - RNA, 13 nt, Human
cauugucccucug

SEQ ID NO: 2222070 - RNA, 22 nt, Human
cauuguuugcuuauuguuccaa

SEQ ID NO: 2222071 - RNA, 21 nt, Human
cauuguuugcuuauuguucca

SEQ ID NO: 2222072 - RNA, 15 nt, Human
cauuguuuggagaca

SEQ ID NO: 2222073 - RNA, 17 nt, Human
cauuguuuggagacauu

SEQ ID NO: 2222074 - RNA, 20 nt, Human
cauuguuugcuuauuguucc

SEQ ID NO: 2222075 - RNA, 19 nt, Human
cauuguuugcuuauuguuc

SEQ ID NO: 2222076 - RNA, 18 nt, Human
cauuguuugcuuauuguu

SEQ ID NO: 2222077 - RNA, 17 nt, Human
cauuguuugcuuauugu

SEQ ID NO: 2222078 - RNA, 14 nt, Human
cauuguuugcuuau

SEQ ID NO: 2222079 - RNA, 21 nt, Human
cauuguuugaaacaaagaagg

SEQ ID NO: 2222080 - RNA, 22 nt, Human
cauuguuugaaacaaagaaggu

SEQ ID NO: 2222081 - RNA, 14 nt, Human
cauuguuugaaaca

SEQ ID NO: 2222082 - RNA, 18 nt, Human
cauuguuugaaacaaaga

SEQ ID NO: 2222083 - RNA, 19 nt, Human
cauuguuugaaacaaagaa

SEQ ID NO: 2222084 - RNA, 20 nt, Human
cauuguuugaaacaaagaag

SEQ ID NO: 2222085 - RNA, 18 nt, Human
cauuguuggccaaagcca

SEQ ID NO: 2222086 - RNA, 17 nt, Human
cauuguuuauuaacaaa

SEQ ID NO: 2222087 - RNA, 13 nt, Human
cauuguuggcagc

SEQ ID NO: 2222088 - RNA, 18 nt, Human
cauuguugagguggucug

SEQ ID NO: 2222089 - RNA, 18 nt, Human
cauuguuuagaaagaaua

SEQ ID NO: 2222090 - RNA, 21 nt, Human
cauuguggcugucagcaggaa

SEQ ID NO: 2222091 - RNA, 19 nt, Human
cauuguggcugucagcagg

SEQ ID NO: 2222092 - RNA, 13 nt, Human
cauuguggcuccu

SEQ ID NO: 2222093 - RNA, 16 nt, Human
cauuguggcuccuauc

SEQ ID NO: 2222094 - RNA, 18 nt, Human
cauuguucaauuagaaua

SEQ ID NO: 2222095 - RNA, 17 nt, Human
cauugugcuucuuucuu

SEQ ID NO: 2222096 - RNA, 17 nt, Human
cauuguggcacauucuu

SEQ ID NO: 2222097 - RNA, 13 nt, Human
cauugugcuucuu

SEQ ID NO: 2222098 - RNA, 21 nt, Human
cauuguugagguggucugaau

SEQ ID NO: 2222099 - RNA, 16 nt, Human
cauuguugaggugguc

SEQ ID NO: 2222100 - RNA, 20 nt, Human
cauuguugagcuauugcugu

SEQ ID NO: 2222101 - RNA, 13 nt, Human
cauuguugagcua

SEQ ID NO: 2222102 - RNA, 17 nt, Human
cauuguuggccaaagcc

SEQ ID NO: 2222103 - RNA, 16 nt, Human
cauugccaccaggaga

SEQ ID NO: 2222104 - RNA, 15 nt, Human
cauugccaccaggag

SEQ ID NO: 2222105 - RNA, 14 nt, Human
cauugccaccagga

SEQ ID NO: 2222106 - RNA, 13 nt, Human
cauugccaccagg

SEQ ID NO: 2222107 - RNA, 15 nt, Human
cauugccaagggcuu

SEQ ID NO: 2222108 - RNA, 14 nt, Human
cacccaagggccug

SEQ ID NO: 2222109 - RNA, 15 nt, Human
cacccaagggccugg

SEQ ID NO: 2222110 - RNA, 15 nt, Human
cauuguagagcuucu

SEQ ID NO: 2222111 - RNA, 14 nt, Human
cauuguagaaaagc

SEQ ID NO: 2222112 - RNA, 18 nt, Human
cauugccuccuccuuccc

SEQ ID NO: 2222113 - RNA, 12 nt, Human
cauugcccuggu

SEQ ID NO: 2222114 - RNA, 17 nt, Human
cauugcccccagggcac

SEQ ID NO: 2222115 - RNA, 18 nt, Human
cauugcccccagggcacu

SEQ ID NO: 2222116 - RNA, 13 nt, Human
cauugccuauuuc

SEQ ID NO: 2222117 - RNA, 20 nt, Human
cauugccuauuucaguggca

SEQ ID NO: 2222118 - RNA, 15 nt, Human
cauugccauucccug

SEQ ID NO: 2222119 - RNA, 20 nt, Human
cauugccaccaggagaacca

SEQ ID NO: 2222120 - RNA, 17 nt, Human
cauugccaccaggagaa

SEQ ID NO: 2222121 - RNA, 16 nt, Human
cauugccauucccugc

SEQ ID NO: 2222122 - RNA, 17 nt, Human
cauugccauucccugcc

SEQ ID NO: 2222123 - RNA, 18 nt, Human
cauugccauucccugccu

SEQ ID NO: 2222124 - RNA, 19 nt, Human
cauugccauucccugccug

SEQ ID NO: 2222125 - RNA, 20 nt, Human
cauugccauucccugccugg

SEQ ID NO: 2222126 - RNA, 15 nt, Human
cauuguauaaaaaua

SEQ ID NO: 2222127 - RNA, 16 nt, Human
cauuguauaaaaauag

SEQ ID NO: 2222128 - RNA, 22 nt, Human
cauuguauaguuggaaucauau

SEQ ID NO: 2222129 - RNA, 14 nt, Human
cauuguauauaugu

SEQ ID NO: 2222130 - RNA, 15 nt, Human
cauuguauauaugug

SEQ ID NO: 2222131 - RNA, 16 nt, Human
cauuguauauaugugu

SEQ ID NO: 2222132 - RNA, 17 nt, Human
cauuguauauaugugug

SEQ ID NO: 2222133 - RNA, 16 nt, Human
cauuguagagcuucug

SEQ ID NO: 2222134 - RNA, 17 nt, Human
cauuguagagcuucugg

SEQ ID NO: 2222135 - RNA, 19 nt, Human
cauuguagagcuucuggca

SEQ ID NO: 2222136 - RNA, 21 nt, Human
cauuguagagcuucuggcacu

SEQ ID NO: 2222137 - RNA, 23 nt, Human
cauuucuagaacaucccugccag

SEQ ID NO: 2222138 - RNA, 18 nt, Human
cauuucuacugugacuga

SEQ ID NO: 2222139 - RNA, 21 nt, Human
cauuucuacucuuaaguuucu

SEQ ID NO: 2222140 - RNA, 23 nt, Human
cauuucuacucuuaaguuucuca

SEQ ID NO: 2222141 - RNA, 20 nt, Human
cauuucuacucucccauggc

SEQ ID NO: 2222142 - RNA, 21 nt, Human
cauuucuacucucccauggcu

SEQ ID NO: 2222143 - RNA, 22 nt, Human
cauuucuacucucccauggcuu

SEQ ID NO: 2222144 - RNA, 20 nt, Human
cauuucuacucuuaaguuuc

SEQ ID NO: 2222145 - RNA, 13 nt, Human
cauuucuauuuau

SEQ ID NO: 2222146 - RNA, 14 nt, Human
cauuucuauuuauu

SEQ ID NO: 2222147 - RNA, 18 nt, Human
cauuucuauuuauuuacu

SEQ ID NO: 2222148 - RNA, 23 nt, Human
cauuucuaaaggccucuuccuug

SEQ ID NO: 2222149 - RNA, 18 nt, Human
cauuucuaaaggccucuu

SEQ ID NO: 2222150 - RNA, 17 nt, Human
cauuucuaaaggccucu

SEQ ID NO: 2222151 - RNA, 15 nt, Human
cauuucgguggcuag

SEQ ID NO: 2222152 - RNA, 17 nt, Human
cauuucuacucucccau

SEQ ID NO: 2222153 - RNA, 21 nt, Human
cauuucgccccucauuuaucc

SEQ ID NO: 2222154 - RNA, 17 nt, Human
cauuucgccccucauuu

SEQ ID NO: 2222155 - RNA, 21 nt, Human
cauuucgguggcuagucaagc

SEQ ID NO: 2222156 - RNA, 21 nt, Human
cauuuccugcccuuccucagu

SEQ ID NO: 2222157 - RNA, 23 nt, Human
cauuuccugcccuuccucaguuu

SEQ ID NO: 2222158 - RNA, 16 nt, Human
cauuuccuucaaggca

SEQ ID NO: 2222159 - RNA, 12 nt, Human
cauuuccugugu

SEQ ID NO: 2222160 - RNA, 13 nt, Human
cauuuccuguguc

SEQ ID NO: 2222161 - RNA, 18 nt, Human
cauuguuugucugucuuc

SEQ ID NO: 2222162 - RNA, 22 nt, Human
cauuguuugucugucuucauag

SEQ ID NO: 2222163 - RNA, 13 nt, Human
cauuguuuuaaaa

SEQ ID NO: 2222164 - RNA, 12 nt, Human
cauuuaaaagau

SEQ ID NO: 2222165 - RNA, 16 nt, Human
cauuuaaaagauacag

SEQ ID NO: 2222166 - RNA, 15 nt, Human
cauuuaaaagauaca

SEQ ID NO: 2222167 - RNA, 16 nt, Human
cauuguuuuaaaaaga

SEQ ID NO: 2222168 - RNA, 19 nt, Human
cauuuccuauguaacugca

SEQ ID NO: 2222169 - RNA, 17 nt, Human
cauuuccuauguaacug

SEQ ID NO: 2222170 - RNA, 17 nt, Human
cauuguuuuaaaaagaa

SEQ ID NO: 2222171 - RNA, 17 nt, Human
cauuuaggggccacuuu

SEQ ID NO: 2222172 - RNA, 23 nt, Human
cauuuccuaucaccuauuuccau

SEQ ID NO: 2222173 - RNA, 15 nt, Human
cauuuccuaaauaua

SEQ ID NO: 2222174 - RNA, 13 nt, Human
cauuuccugacag

SEQ ID NO: 2222175 - RNA, 20 nt, Human
cauuuccugacagaaggacu

SEQ ID NO: 2222176 - RNA, 19 nt, Human
cauuuccugagaccacaga

SEQ ID NO: 2222177 - RNA, 11 nt, Human
cauuuccugcc

SEQ ID NO: 2222178 - RNA, 12 nt, Human
cauuuccugccc

SEQ ID NO: 2222179 - RNA, 13 nt, Human
cauuuccugcccu

SEQ ID NO: 2222180 - RNA, 17 nt, Human
cauuuccugcccuuccu

SEQ ID NO: 2222181 - RNA, 19 nt, Human
cauuuccugcccuuccuca

SEQ ID NO: 2222182 - RNA, 20 nt, Human
cauuuccugcccuuccucag

SEQ ID NO: 2222183 - RNA, 17 nt, Human
cauuuaggccaugggac

SEQ ID NO: 2222184 - RNA, 22 nt, Human
cauuuagcuaaacggauuccaa

SEQ ID NO: 2222185 - RNA, 21 nt, Human
cauuuagagaggaaaaguaac

SEQ ID NO: 2222186 - RNA, 20 nt, Human
cauuuagagaggaaaaguaa

SEQ ID NO: 2222187 - RNA, 19 nt, Human
cauuuagauugaaaacuuu

SEQ ID NO: 2222188 - RNA, 17 nt, Human
cauuuagccaccaucuu

SEQ ID NO: 2222189 - RNA, 22 nt, Human
cauuuagccaccaucuuugcag

SEQ ID NO: 2222190 - RNA, 20 nt, Human
cauuuagauugaaaacuuuu

SEQ ID NO: 2222191 - RNA, 18 nt, Human
cauuuagccaccaucuuu

SEQ ID NO: 2222192 - RNA, 20 nt, Human
cauuugcuaacuagcuugga

SEQ ID NO: 2222193 - RNA, 21 nt, Human
cauuugcguuccaugaugcug

SEQ ID NO: 2222194 - RNA, 21 nt, Human
cauuugcgaaugguuccauuc

SEQ ID NO: 2222195 - RNA, 19 nt, Human
cauuugccuauucccacac

SEQ ID NO: 2222196 - RNA, 15 nt, Human
cauuugccuauuccc

SEQ ID NO: 2222197 - RNA, 17 nt, Human
cauuugccuauucccac

SEQ ID NO: 2222198 - RNA, 18 nt, Human
cauuugccuauucccaca

SEQ ID NO: 2222199 - RNA, 14 nt, Human
cauuugccuugcug

SEQ ID NO: 2222200 - RNA, 20 nt, Human
cauuugagcagggcucagcg

SEQ ID NO: 2222201 - RNA, 18 nt, Human
cauuugaaagaaaggacu

SEQ ID NO: 2222202 - RNA, 12 nt, Human
cauuugccuauu

SEQ ID NO: 2222203 - RNA, 14 nt, Human
cauuugccuauucc

SEQ ID NO: 2222204 - RNA, 17 nt, Human
cauuugagcagggcuca

SEQ ID NO: 2222205 - RNA, 18 nt, Human
cauuugagcagggcucag

SEQ ID NO: 2222206 - RNA, 22 nt, Human
cauuugcguuccaugaugcugg

SEQ ID NO: 2222207 - RNA, 19 nt, Human
cauuugcucuuucaucucu

SEQ ID NO: 2222208 - RNA, 17 nt, Human
cauuuguuugaacugau

SEQ ID NO: 2222209 - RNA, 22 nt, Human
cauuuguuugaacugauaaaga

SEQ ID NO: 2222210 - RNA, 20 nt, Human
cauuuguuugaacugauaaa

SEQ ID NO: 2222211 - RNA, 13 nt, Human
cauuugcuccuuu

SEQ ID NO: 2222212 - RNA, 14 nt, Human
cauuugcuccuuuc

SEQ ID NO: 2222213 - RNA, 13 nt, Human
cauuugcucaugg

SEQ ID NO: 2222214 - RNA, 18 nt, Human
cauuugcucauggaauug

SEQ ID NO: 2222215 - RNA, 21 nt, Human
cauuugaauaaagccugcuuu

SEQ ID NO: 2222216 - RNA, 19 nt, Human
cauuugaaagaaaggacuc

SEQ ID NO: 2222217 - RNA, 10 nt, Human
cauuugaaug

SEQ ID NO: 2222218 - RNA, 11 nt, Human
cauuugaaugc

SEQ ID NO: 2222219 - RNA, 11 nt, Human
cauuugaaaga

SEQ ID NO: 2222220 - RNA, 14 nt, Human
cauuugaaagaaag

SEQ ID NO: 2222221 - RNA, 15 nt, Human
cauuugaaagaaagg

SEQ ID NO: 2222222 - RNA, 20 nt, Human
cauuugaaaauuuugauguu

SEQ ID NO: 2222223 - RNA, 22 nt, Human
cauuugaaaauuuugauguuuu

SEQ ID NO: 2222224 - RNA, 14 nt, Human
cauuuuauauguca

SEQ ID NO: 2222225 - RNA, 23 nt, Human
cauuuuauaaaucgcuuuugaua

SEQ ID NO: 2222226 - RNA, 15 nt, Human
cauuuuguauaauug

SEQ ID NO: 2222227 - RNA, 14 nt, Human
cauuuuguauaauu

SEQ ID NO: 2222228 - RNA, 22 nt, Human
cauuuuguggucauuaagcauu

SEQ ID NO: 2222229 - RNA, 18 nt, Human
cauuuugugaauggauug

SEQ ID NO: 2222230 - RNA, 21 nt, Human
cauuuugugaauggauuggau

SEQ ID NO: 2222231 - RNA, 13 nt, Human
cauuuugugaaug

SEQ ID NO: 2222232 - RNA, 14 nt, Human
cauuuugugaaugg

SEQ ID NO: 2222233 - RNA, 15 nt, Human
cauuuugugaaugga

SEQ ID NO: 2222234 - RNA, 16 nt, Human
cauuuugugaauggau

SEQ ID NO: 2222235 - RNA, 21 nt, Human
cauuuuguauaauuguaucgu

SEQ ID NO: 2222236 - RNA, 17 nt, Human
cauuuuguauaauugua

SEQ ID NO: 2222237 - RNA, 18 nt, Human
cauuuuguauaauuguau

SEQ ID NO: 2222238 - RNA, 20 nt, Human
cauuuuguauaauuguaucg

SEQ ID NO: 2222239 - RNA, 12 nt, Human
cauuuugugaau

SEQ ID NO: 2222240 - RNA, 20 nt, Human
cauuuuaaaaaaaaaggcau

SEQ ID NO: 2222241 - RNA, 18 nt, Human
cauuuuaaaaaugaaauu

SEQ ID NO: 2222242 - RNA, 21 nt, Human
cauuuuauaaaucgcuuuuga

SEQ ID NO: 2222243 - RNA, 18 nt, Human
cauuuuauaaaucgcuuu

SEQ ID NO: 2222244 - RNA, 17 nt, Human
cauuuuauaaaucgcuu

SEQ ID NO: 2222245 - RNA, 13 nt, Human
cauuuuauaaauc

SEQ ID NO: 2222246 - RNA, 11 nt, Human
cauuuuauaaa

SEQ ID NO: 2222247 - RNA, 15 nt, Human
cauuuuagucacuuu

SEQ ID NO: 2222248 - RNA, 16 nt, Human
cauuuuagucacuuuu

SEQ ID NO: 2222249 - RNA, 17 nt, Human
cauuuuagucacuuuuu

SEQ ID NO: 2222250 - RNA, 14 nt, Human
cauuuuaguucuuu

SEQ ID NO: 2222251 - RNA, 18 nt, Human
cauuuuucagauauaaaa

SEQ ID NO: 2222252 - RNA, 20 nt, Human
cauuuuucagauauaaaaga

SEQ ID NO: 2222253 - RNA, 13 nt, Human
cauuuuuccuaac

SEQ ID NO: 2222254 - RNA, 18 nt, Human
cauuuuuccuaacaggau

SEQ ID NO: 2222255 - RNA, 20 nt, Human
ccaaacaccuuccagcuccu

SEQ ID NO: 2222256 - RNA, 16 nt, Human
ccaaacagccacacug

SEQ ID NO: 2222257 - RNA, 16 nt, Human
cauuuuuccuucccuu

SEQ ID NO: 2222258 - RNA, 18 nt, Human
cauuuuuccuucccuucu

SEQ ID NO: 2222259 - RNA, 22 nt, Human
ccaaacaccuuccagcuccugu

SEQ ID NO: 2222260 - RNA, 21 nt, Human
cauuuuuccuucccuucucca

SEQ ID NO: 2222261 - RNA, 20 nt, Human
ccaaacauccuacaagacac

SEQ ID NO: 2222262 - RNA, 19 nt, Human
ccaaacauccuacaagaca

SEQ ID NO: 2222263 - RNA, 17 nt, Human
ccaaacucaccugcccc

SEQ ID NO: 2222264 - RNA, 12 nt, Human
uuuuuugaaaac

SEQ ID NO: 2222265 - RNA, 11 nt, Human
uuuuuucugau

SEQ ID NO: 2222266 - RNA, 13 nt, Human
uuuuuucuuacug

SEQ ID NO: 2222267 - RNA, 14 nt, Human
gcgagacuccgucu

SEQ ID NO: 2222268 - RNA, 18 nt, Human
gcgagacuccgucucaaa

SEQ ID NO: 2222269 - RNA, 20 nt, Human
gcgagaaccuaaguuucagu

SEQ ID NO: 2222270 - RNA, 17 nt, Human
gcgacuuucugccugga

SEQ ID NO: 2222271 - RNA, 14 nt, Human
gcgacuuucugccu

SEQ ID NO: 2222272 - RNA, 16 nt, Human
gcgacuuucugccugg

SEQ ID NO: 2222273 - RNA, 16 nt, Human
gcgauccaccugucuc

SEQ ID NO: 2222274 - RNA, 17 nt, Human
gcgaguuguggaaagcc

SEQ ID NO: 2222275 - RNA, 21 nt, Human
gcgagugccaggacuccccag

SEQ ID NO: 2222276 - RNA, 22 nt, Human
gcgagugccaggacuccccagg

SEQ ID NO: 2222277 - RNA, 23 nt, Human
gcgaggucaacagagaaggcagg

SEQ ID NO: 2222278 - RNA, 22 nt, Human
gcgaggucaacagagaaggcag

SEQ ID NO: 2222279 - RNA, 22 nt, Human
gcgaguauguguuugugugugu

SEQ ID NO: 2222280 - RNA, 15 nt, Human
gcgagugccaggacu

SEQ ID NO: 2222281 - RNA, 19 nt, Human
gcgaggucaacagagaagg

SEQ ID NO: 2222282 - RNA, 18 nt, Human
gcgaggucaacagagaag

SEQ ID NO: 2222283 - RNA, 17 nt, Human
gcgaggucaacagagaa

SEQ ID NO: 2222284 - RNA, 16 nt, Human
gcgaggucaacagaga

SEQ ID NO: 2222285 - RNA, 20 nt, Human
gcgagugugugcaugugugu

SEQ ID NO: 2222286 - RNA, 17 nt, Human
gcgauucuccugccuca

SEQ ID NO: 2222287 - RNA, 13 nt, Human
gcgauucuucugc

SEQ ID NO: 2222288 - RNA, 14 nt, Human
gcgaggggagggug

SEQ ID NO: 2222289 - RNA, 14 nt, Human
gcgaggcagaggac

SEQ ID NO: 2222290 - RNA, 16 nt, Human
gcgagcauccuggcca

SEQ ID NO: 2222291 - RNA, 12 nt, Human
gcgaggcagagg

SEQ ID NO: 2222292 - RNA, 13 nt, Human
gcgaggcagagga

SEQ ID NO: 2222293 - RNA, 16 nt, Human
gcgaggcagaggacag

SEQ ID NO: 2222294 - RNA, 16 nt, Human
gcgagagucugucuca

SEQ ID NO: 2222295 - RNA, 23 nt, Human
gcgagauggggugggguggagaa

SEQ ID NO: 2222296 - RNA, 15 nt, Human
gcgagagucccugca

SEQ ID NO: 2222297 - RNA, 15 nt, Human
gcgagaggcagagaa

SEQ ID NO: 2222298 - RNA, 16 nt, Human
gcgagaggcagagaaa

SEQ ID NO: 2222299 - RNA, 16 nt, Human
gcgagaggaggggccc

SEQ ID NO: 2222300 - RNA, 20 nt, Human
gcgauucuggauaaagccac

SEQ ID NO: 2222301 - RNA, 19 nt, Human
gcgauucuggauaaagcca

SEQ ID NO: 2222302 - RNA, 14 nt, Human
gcgauucuucugcu

SEQ ID NO: 2222303 - RNA, 14 nt, Human
gcggagcuggcccc

SEQ ID NO: 2222304 - RNA, 17 nt, Human
gcggagcuggccccgcc

SEQ ID NO: 2222305 - RNA, 16 nt, Human
gcggagguugcaggga

SEQ ID NO: 2222306 - RNA, 15 nt, Human
gcggagguugcaggg

SEQ ID NO: 2222307 - RNA, 16 nt, Human
gcggagcuugcaguga

SEQ ID NO: 2222308 - RNA, 21 nt, Human
gcggagguguggagccgaggc

SEQ ID NO: 2222309 - RNA, 22 nt, Human
gcggagaguacagugagccaag

SEQ ID NO: 2222310 - RNA, 16 nt, Human
gcggagaguacaguga

SEQ ID NO: 2222311 - RNA, 20 nt, Human
gcggagaguacagugagcca

SEQ ID NO: 2222312 - RNA, 12 nt, Human
gcggagcuggcc

SEQ ID NO: 2222313 - RNA, 22 nt, Human
gcggagagaggccuugucccag

SEQ ID NO: 2222314 - RNA, 15 nt, Human
gcggagaguacagug

SEQ ID NO: 2222315 - RNA, 20 nt, Human
gcgugaucaaagccacacuc

SEQ ID NO: 2222316 - RNA, 14 nt, Human
gcgugcacacacca

SEQ ID NO: 2222317 - RNA, 18 nt, Human
gcgugcacacaccagagc

SEQ ID NO: 2222318 - RNA, 23 nt, Human
gcgugaucucggcucacugcaac

SEQ ID NO: 2222319 - RNA, 16 nt, Human
gcguggagggcguggg

SEQ ID NO: 2222320 - RNA, 16 nt, Human
gcguggucacugcugu

SEQ ID NO: 2222321 - RNA, 17 nt, Human
gcguggggacagggcuc

SEQ ID NO: 2222322 - RNA, 13 nt, Human
gcguggggagggc

SEQ ID NO: 2222323 - RNA, 20 nt, Human
gcgugguggacaugcacagc

SEQ ID NO: 2222324 - RNA, 18 nt, Human
gcguggucacugcuguca

SEQ ID NO: 2222325 - RNA, 17 nt, Human
gcguggucacugcuguc

SEQ ID NO: 2222326 - RNA, 15 nt, Human
gcggccgcauucccu

SEQ ID NO: 2222327 - RNA, 16 nt, Human
gcggccccucccgccc

SEQ ID NO: 2222328 - RNA, 13 nt, Human
gcggccccucccg

SEQ ID NO: 2222329 - RNA, 14 nt, Human
gcggccccucccac

SEQ ID NO: 2222330 - RNA, 15 nt, Human
gcggccccucccaca

SEQ ID NO: 2222331 - RNA, 18 nt, Human
gcggccgcauucccugag

SEQ ID NO: 2222332 - RNA, 17 nt, Human
gcggccgcauucccuga

SEQ ID NO: 2222333 - RNA, 16 nt, Human
gcggccgcauucccug

SEQ ID NO: 2222334 - RNA, 19 nt, Human
gcggccgcauucccugagu

SEQ ID NO: 2222335 - RNA, 13 nt, Human
gcggccggccagc

SEQ ID NO: 2222336 - RNA, 14 nt, Human
gcggagugaagagg

SEQ ID NO: 2222337 - RNA, 18 nt, Human
gcggagugaagaggggca

SEQ ID NO: 2222338 - RNA, 20 nt, Human
gcggagugaagaggggcagc

SEQ ID NO: 2222339 - RNA, 21 nt, Human
gcggagugaagaggggcagcc

SEQ ID NO: 2222340 - RNA, 22 nt, Human
gcggagugaagaggggcagccc

SEQ ID NO: 2222341 - RNA, 20 nt, Human
gcggaucucuggagugagcu

SEQ ID NO: 2222342 - RNA, 22 nt, Human
gcggcccaagcccgacuugcug

SEQ ID NO: 2222343 - RNA, 23 nt, Human
gcggcccaagcccgacuugcugu

SEQ ID NO: 2222344 - RNA, 13 nt, Human
gcggcccagcccg

SEQ ID NO: 2222345 - RNA, 15 nt, Human
gcggcccagcccggc

SEQ ID NO: 2222346 - RNA, 16 nt, Human
gcggcccagcccggcu

SEQ ID NO: 2222347 - RNA, 18 nt, Human
gcggcccagcccggcucc

SEQ ID NO: 2222348 - RNA, 21 nt, Human
gcggcccagcccggcucccac

SEQ ID NO: 2222349 - RNA, 11 nt, Human
gcuagaaauga

SEQ ID NO: 2222350 - RNA, 18 nt, Human
gcuagaaauaugauuuua

SEQ ID NO: 2222351 - RNA, 18 nt, Human
gcuacuugggccauagcu

SEQ ID NO: 2222352 - RNA, 21 nt, Human
gcuacuuuauuuauacacugu

SEQ ID NO: 2222353 - RNA, 16 nt, Human
gcuacuuugccuuuug

SEQ ID NO: 2222354 - RNA, 13 nt, Human
gcuacuugggagg

SEQ ID NO: 2222355 - RNA, 19 nt, Human
gcuacuuccuccuccccac

SEQ ID NO: 2222356 - RNA, 18 nt, Human
gcuacuuccuccucccca

SEQ ID NO: 2222357 - RNA, 23 nt, Human
gcuacuuaauuccuuucucaucc

SEQ ID NO: 2222358 - RNA, 20 nt, Human
gcuacuucccucacccacuu

SEQ ID NO: 2222359 - RNA, 17 nt, Human
gcuacuugggaggcuga

SEQ ID NO: 2222360 - RNA, 19 nt, Human
gcuagaaccuggagggcug

SEQ ID NO: 2222361 - RNA, 20 nt, Human
gcuagaaccuguagagcuag

SEQ ID NO: 2222362 - RNA, 18 nt, Human
gcuagaaccaagaagggc

SEQ ID NO: 2222363 - RNA, 19 nt, Human
gcuagaaccaagaagggcu

SEQ ID NO: 2222364 - RNA, 20 nt, Human
gcuagaaccaagaagggcua

SEQ ID NO: 2222365 - RNA, 18 nt, Human
gcuagaaccuagaagggc

SEQ ID NO: 2222366 - RNA, 19 nt, Human
gcuagaaccuagaagggcu

SEQ ID NO: 2222367 - RNA, 20 nt, Human
gcuagaaccuagaagggcua

SEQ ID NO: 2222368 - RNA, 18 nt, Human
gcuagaaccuggaagggc

SEQ ID NO: 2222369 - RNA, 19 nt, Human
gcuagaaccuggaagggcu

SEQ ID NO: 2222370 - RNA, 20 nt, Human
gcuagaaccuggaagggcua

SEQ ID NO: 2222371 - RNA, 15 nt, Human
gcuagaaccuggaga

SEQ ID NO: 2222372 - RNA, 19 nt, Human
gcuagaaccuggagagcua

SEQ ID NO: 2222373 - RNA, 20 nt, Human
gcuagaaccuggagagcuag

SEQ ID NO: 2222374 - RNA, 15 nt, Human
gcuagaaccuggagg

SEQ ID NO: 2222375 - RNA, 19 nt, Human
gcuacuguccuacccaccc

SEQ ID NO: 2222376 - RNA, 20 nt, Human
gcuacuguccuacccacccu

SEQ ID NO: 2222377 - RNA, 21 nt, Human
gcuacugugugugugaaugaa

SEQ ID NO: 2222378 - RNA, 19 nt, Human
gcuacugugugugugaaug

SEQ ID NO: 2222379 - RNA, 17 nt, Human
gcuacuuaauuccuuuc

SEQ ID NO: 2222380 - RNA, 21 nt, Human
gcuacuuaauuccuuucucau

SEQ ID NO: 2222381 - RNA, 18 nt, Human
gcuacugugugugugaau

SEQ ID NO: 2222382 - RNA, 15 nt, Human
gcuacugugugugug

SEQ ID NO: 2222383 - RNA, 12 nt, Human
gcuacugucuca

SEQ ID NO: 2222384 - RNA, 16 nt, Human
gcuacugucucacuga

SEQ ID NO: 2222385 - RNA, 21 nt, Human
gcuacugucucacugaaacau

SEQ ID NO: 2222386 - RNA, 18 nt, Human
gcuacuguaaggcaauca

SEQ ID NO: 2222387 - RNA, 19 nt, Human
gcuacuguaaggcaaucau

SEQ ID NO: 2222388 - RNA, 22 nt, Human
gcuacuguaauuuuauaugaag

SEQ ID NO: 2222389 - RNA, 18 nt, Human
gcuacuguaauuuuauau

SEQ ID NO: 2222390 - RNA, 15 nt, Human
gcuacugucagcucc

SEQ ID NO: 2222391 - RNA, 20 nt, Human
gcuacaaauacucuuaggaa

SEQ ID NO: 2222392 - RNA, 17 nt, Human
gcuacaaagaagacaug

SEQ ID NO: 2222393 - RNA, 18 nt, Human
gcuacaaagaagacaugu

SEQ ID NO: 2222394 - RNA, 19 nt, Human
gcuacaaagaagacauguu

SEQ ID NO: 2222395 - RNA, 20 nt, Human
gcuacaaagaagacauguuu

SEQ ID NO: 2222396 - RNA, 14 nt, Human
gcuacaaagaagac

SEQ ID NO: 2222397 - RNA, 15 nt, Human
gcuacaaagaagaca

SEQ ID NO: 2222398 - RNA, 16 nt, Human
gcuacaaagaagacau

SEQ ID NO: 2222399 - RNA, 23 nt, Human
gcuacuggcaaaaggaucuuugu

SEQ ID NO: 2222400 - RNA, 22 nt, Human
gcuacaaagaagacauguuuua

SEQ ID NO: 2222401 - RNA, 15 nt, Human
gcuacaacuucagca

SEQ ID NO: 2222402 - RNA, 17 nt, Human
gcuacaacuucagcagu

SEQ ID NO: 2222403 - RNA, 15 nt, Human
gcuacaauuuucucc

SEQ ID NO: 2222404 - RNA, 20 nt, Human
gcuacaauuuucucccagga

SEQ ID NO: 2222405 - RNA, 21 nt, Human
gcuacaauuuucucccaggaa

SEQ ID NO: 2222406 - RNA, 22 nt, Human
gcuacaauuuucucccaggaag

SEQ ID NO: 2222407 - RNA, 17 nt, Human
gcuaauuuuuguaauuu

SEQ ID NO: 2222408 - RNA, 16 nt, Human
gcuaauuuuuguaauu

SEQ ID NO: 2222409 - RNA, 15 nt, Human
gcuaauuuuuguaau

SEQ ID NO: 2222410 - RNA, 17 nt, Human
gcuacaaaaacacagca

SEQ ID NO: 2222411 - RNA, 19 nt, Human
gcuacaaaaacacagcaag

SEQ ID NO: 2222412 - RNA, 18 nt, Human
gcuacaaaaacacagcaa

SEQ ID NO: 2222413 - RNA, 14 nt, Human
gcguuguaaaauau

SEQ ID NO: 2222414 - RNA, 15 nt, Human
gcguuguaaaauaua

SEQ ID NO: 2222415 - RNA, 21 nt, Human
gcgugguggaagaggggacag

SEQ ID NO: 2222416 - RNA, 15 nt, Human
gcguugcaugucgug

SEQ ID NO: 2222417 - RNA, 19 nt, Human
gcguuguaaaauauagcug

SEQ ID NO: 2222418 - RNA, 20 nt, Human
gcguuguaaaauauagcugu

SEQ ID NO: 2222419 - RNA, 19 nt, Human
gcguuuaagacuguaauga

SEQ ID NO: 2222420 - RNA, 17 nt, Human
gcguuucuaugacacau

SEQ ID NO: 2222421 - RNA, 16 nt, Human
gcuaauuuuucauuuu

SEQ ID NO: 2222422 - RNA, 18 nt, Human
gcuaauuuugaaaaacug

SEQ ID NO: 2222423 - RNA, 12 nt, Human
gcuaauuugcau

SEQ ID NO: 2222424 - RNA, 20 nt, Human
gcuaauuuauccugaaauuu

SEQ ID NO: 2222425 - RNA, 15 nt, Human
gcuaauuugcauuaa

SEQ ID NO: 2222426 - RNA, 13 nt, Human
gcuaauuugcauu

SEQ ID NO: 2222427 - RNA, 18 nt, Human
gccucauguggcuggaag

SEQ ID NO: 2222428 - RNA, 21 nt, Human
gccucauuacuuuaccacccc

SEQ ID NO: 2222429 - RNA, 19 nt, Human
gccucauguggcuggaaga

SEQ ID NO: 2222430 - RNA, 17 nt, Human
gccuccaaaugccaacu

SEQ ID NO: 2222431 - RNA, 21 nt, Human
gccucauuuagagaggaaaag

SEQ ID NO: 2222432 - RNA, 22 nt, Human
gccuccaaaugccaacuugucc

SEQ ID NO: 2222433 - RNA, 17 nt, Human
gccuccaagcuccaucu

SEQ ID NO: 2222434 - RNA, 18 nt, Human
gccuccagcugccccggg

SEQ ID NO: 2222435 - RNA, 19 nt, Human
gccuccaggaaccacacca

SEQ ID NO: 2222436 - RNA, 12 nt, Human
gccuccaggcca

SEQ ID NO: 2222437 - RNA, 12 nt, Human
gccuccagccuc

SEQ ID NO: 2222438 - RNA, 14 nt, Human
gccuccagccucug

SEQ ID NO: 2222439 - RNA, 15 nt, Human
gccuccagccucugu

SEQ ID NO: 2222440 - RNA, 12 nt, Human
gccuccagggcu

SEQ ID NO: 2222441 - RNA, 22 nt, Human
gccuccaggccacauggggcug

SEQ ID NO: 2222442 - RNA, 13 nt, Human
gccuccagggcug

SEQ ID NO: 2222443 - RNA, 14 nt, Human
gccuccagggcugg

SEQ ID NO: 2222444 - RNA, 11 nt, Human
gccuccagccu

SEQ ID NO: 2222445 - RNA, 19 nt, Human
gccuccagaacucacuggg

SEQ ID NO: 2222446 - RNA, 23 nt, Human
gccuccaaggaggggcuguaaaa

SEQ ID NO: 2222447 - RNA, 22 nt, Human
gccuccaaggaggggcuguaaa

SEQ ID NO: 2222448 - RNA, 20 nt, Human
gccuccuuccuugcuguccu

SEQ ID NO: 2222449 - RNA, 21 nt, Human
gccuccaggccacauggggcu

SEQ ID NO: 2222450 - RNA, 11 nt, Human
gccuccaucuc

SEQ ID NO: 2222451 - RNA, 19 nt, Human
gccuccuuugugaggaagc

SEQ ID NO: 2222452 - RNA, 20 nt, Human
gccuccuuugugaggaagcc

SEQ ID NO: 2222453 - RNA, 21 nt, Human
gccuccuuugugaggaagccg

SEQ ID NO: 2222454 - RNA, 20 nt, Human
gccuccauccugaggcucca

SEQ ID NO: 2222455 - RNA, 16 nt, Human
gccuccauccugaggc

SEQ ID NO: 2222456 - RNA, 16 nt, Human
gccuccagggcuggac

SEQ ID NO: 2222457 - RNA, 17 nt, Human
gccuccagggcuggacu

SEQ ID NO: 2222458 - RNA, 18 nt, Human
gccuccagggcuggacug

SEQ ID NO: 2222459 - RNA, 19 nt, Human
gccuccagggcuggacuga

SEQ ID NO: 2222460 - RNA, 20 nt, Human
gccuccagggcuggacugag

SEQ ID NO: 2222461 - RNA, 23 nt, Human
gccucgcccaccgcaugcccccu

SEQ ID NO: 2222462 - RNA, 14 nt, Human
gccucgcccaccgc

SEQ ID NO: 2222463 - RNA, 15 nt, Human
gccucgcccaccgca

SEQ ID NO: 2222464 - RNA, 16 nt, Human
gccucgcccaccgcau

SEQ ID NO: 2222465 - RNA, 20 nt, Human
gccucgcccaccgcaugccc

SEQ ID NO: 2222466 - RNA, 13 nt, Human
gccucgccuggcc

SEQ ID NO: 2222467 - RNA, 14 nt, Human
gccucgccuggccu

SEQ ID NO: 2222468 - RNA, 15 nt, Human
gccucgccuggccug

SEQ ID NO: 2222469 - RNA, 13 nt, Human
gccucggacuuag

SEQ ID NO: 2222470 - RNA, 14 nt, Human
gccugccccucucc

SEQ ID NO: 2222471 - RNA, 17 nt, Human
gccugccccucucccgc

SEQ ID NO: 2222472 - RNA, 21 nt, Human
gccugcccguaaacacgccug

SEQ ID NO: 2222473 - RNA, 16 nt, Human
gccugcccguaaacac

SEQ ID NO: 2222474 - RNA, 20 nt, Human
gccugcccucauggccccuc

SEQ ID NO: 2222475 - RNA, 18 nt, Human
gccugcccgucucucucc

SEQ ID NO: 2222476 - RNA, 20 nt, Human
gccugcccgucucucuccca

SEQ ID NO: 2222477 - RNA, 21 nt, Human
gccugcccucauggccccucu

SEQ ID NO: 2222478 - RNA, 22 nt, Human
gccugcccucauggccccucug

SEQ ID NO: 2222479 - RNA, 14 nt, Human
gccugcccucaggg

SEQ ID NO: 2222480 - RNA, 15 nt, Human
gccugcccuccccag

SEQ ID NO: 2222481 - RNA, 17 nt, Human
gccugcccuccccagag

SEQ ID NO: 2222482 - RNA, 18 nt, Human
gccugcccuccccagagc

SEQ ID NO: 2222483 - RNA, 17 nt, Human
gccugcuaauuccccag

SEQ ID NO: 2222484 - RNA, 23 nt, Human
gccugcuaauuccccagauugca

SEQ ID NO: 2222485 - RNA, 16 nt, Human
gccugcuccagaccug

SEQ ID NO: 2222486 - RNA, 15 nt, Human
gccugcuccagaccu

SEQ ID NO: 2222487 - RNA, 14 nt, Human
gccugcuccagacc

SEQ ID NO: 2222488 - RNA, 13 nt, Human
gccugcuccagac

SEQ ID NO: 2222489 - RNA, 12 nt, Human
gccugcuccaga

SEQ ID NO: 2222490 - RNA, 23 nt, Human
gccugcgcccaccccgcucugca

SEQ ID NO: 2222491 - RNA, 20 nt, Human
gccugcguucuugugacaga

SEQ ID NO: 2222492 - RNA, 20 nt, Human
gccugcguuuuggaagcucu

SEQ ID NO: 2222493 - RNA, 17 nt, Human
gccugcggccugcugga

SEQ ID NO: 2222494 - RNA, 20 nt, Human
gccugcgcccaccccgcucu

SEQ ID NO: 2222495 - RNA, 22 nt, Human
gccugcgcccaccccgcucugc

SEQ ID NO: 2222496 - RNA, 14 nt, Human
gccugcccuugucu

SEQ ID NO: 2222497 - RNA, 21 nt, Human
gccugcccuugucugagaugc

SEQ ID NO: 2222498 - RNA, 13 nt, Human
gccugcccuuguc

SEQ ID NO: 2222499 - RNA, 22 nt, Human
gccugcccuccccagagcacug

SEQ ID NO: 2222500 - RNA, 19 nt, Human
gccugcccuccccagagca

SEQ ID NO: 2222501 - RNA, 21 nt, Human
gccugcccuccccagagcacu

SEQ ID NO: 2222502 - RNA, 13 nt, Human
gccugcuccagcu

SEQ ID NO: 2222503 - RNA, 21 nt, Human
gccugcuccagaccugauccu

SEQ ID NO: 2222504 - RNA, 17 nt, Human
gccugcuccagaccuga

SEQ ID NO: 2222505 - RNA, 20 nt, Human
gcccaggagagccagcccuc

SEQ ID NO: 2222506 - RNA, 19 nt, Human
gcccaggagagccagcccu

SEQ ID NO: 2222507 - RNA, 23 nt, Human
gccauguuaauguaaucugaugg

SEQ ID NO: 2222508 - RNA, 18 nt, Human
gccauguuccaauaaaca

SEQ ID NO: 2222509 - RNA, 21 nt, Human
gcccaggagagccagcccucc

SEQ ID NO: 2222510 - RNA, 14 nt, Human
gccaugugccaggu

SEQ ID NO: 2222511 - RNA, 22 nt, Human
gccaugugcuaguaauuggaaa

SEQ ID NO: 2222512 - RNA, 19 nt, Human
gccaucaaaaugcuuuuua

SEQ ID NO: 2222513 - RNA, 17 nt, Human
gccaucaacaagaguug

SEQ ID NO: 2222514 - RNA, 18 nt, Human
gccaucaaaaugcuuuuu

SEQ ID NO: 2222515 - RNA, 16 nt, Human
gccaucaaaaugcuuu

SEQ ID NO: 2222516 - RNA, 15 nt, Human
gccaucaaaaugcuu

SEQ ID NO: 2222517 - RNA, 14 nt, Human
gccaucaaaaugcu

SEQ ID NO: 2222518 - RNA, 13 nt, Human
gcccaggcagguc

SEQ ID NO: 2222519 - RNA, 12 nt, Human
gcccaggcaggu

SEQ ID NO: 2222520 - RNA, 22 nt, Human
gcccaggaguuugaggcugcag

SEQ ID NO: 2222521 - RNA, 14 nt, Human
gcccaggcaggucu

SEQ ID NO: 2222522 - RNA, 16 nt, Human
gcccaggcaggucuug

SEQ ID NO: 2222523 - RNA, 15 nt, Human
gcccaggccccugcc

SEQ ID NO: 2222524 - RNA, 13 nt, Human
gcccaggccccug

SEQ ID NO: 2222525 - RNA, 17 nt, Human
gcccaggccccugccac

SEQ ID NO: 2222526 - RNA, 15 nt, Human
gcccauucucucucc

SEQ ID NO: 2222527 - RNA, 14 nt, Human
gcccauucucucuc

SEQ ID NO: 2222528 - RNA, 21 nt, Human
gcccauucucucuccugucca

SEQ ID NO: 2222529 - RNA, 19 nt, Human
gcccauucucucuccuguc

SEQ ID NO: 2222530 - RNA, 17 nt, Human
gcccauucucucuccug

SEQ ID NO: 2222531 - RNA, 22 nt, Human
gccccaacuccuggaagcugug

SEQ ID NO: 2222532 - RNA, 20 nt, Human
gcccauuucaauucucaaaa

SEQ ID NO: 2222533 - RNA, 20 nt, Human
gcccauucucucuccugucc

SEQ ID NO: 2222534 - RNA, 19 nt, Human
gcccauuucaauucucaaa

SEQ ID NO: 2222535 - RNA, 18 nt, Human
gcccauuucaauucucaa

SEQ ID NO: 2222536 - RNA, 13 nt, Human
gccccaaguccug

SEQ ID NO: 2222537 - RNA, 15 nt, Human
gccccaaguccugaa

SEQ ID NO: 2222538 - RNA, 16 nt, Human
gccccaaguccugaag

SEQ ID NO: 2222539 - RNA, 19 nt, Human
gccccaaguccugaagagg

SEQ ID NO: 2222540 - RNA, 20 nt, Human
gccccaaguccugaagaggc

SEQ ID NO: 2222541 - RNA, 21 nt, Human
gccccaacucuccccugaccu

SEQ ID NO: 2222542 - RNA, 16 nt, Human
gcccauuccucaccuu

SEQ ID NO: 2222543 - RNA, 16 nt, Human
gcccauucauuccauu

SEQ ID NO: 2222544 - RNA, 23 nt, Human
gcccauucauuccauucuggaag

SEQ ID NO: 2222545 - RNA, 19 nt, Human
gcccauucauuccauucug

SEQ ID NO: 2222546 - RNA, 11 nt, Human
gcccccgcccc

SEQ ID NO: 2222547 - RNA, 22 nt, Human
gcccccgagcugggggccauga

SEQ ID NO: 2222548 - RNA, 14 nt, Human
gcccccgagcuggg

SEQ ID NO: 2222549 - RNA, 13 nt, Human
gcccccgagcugg

SEQ ID NO: 2222550 - RNA, 16 nt, Human
gccccccuccuugcuc

SEQ ID NO: 2222551 - RNA, 20 nt, Human
gccccccuccuugcucugca

SEQ ID NO: 2222552 - RNA, 12 nt, Human
gccccacccugg

SEQ ID NO: 2222553 - RNA, 17 nt, Human
gccccaccccagguccu

SEQ ID NO: 2222554 - RNA, 20 nt, Human
gccccacacggaggcaucug

SEQ ID NO: 2222555 - RNA, 16 nt, Human
gccccacacuggggug

SEQ ID NO: 2222556 - RNA, 19 nt, Human
gccccacacuggggugccg

SEQ ID NO: 2222557 - RNA, 11 nt, Human
gccccacagcc

SEQ ID NO: 2222558 - RNA, 22 nt, Human
gccccacacuggggugccgccu

SEQ ID NO: 2222559 - RNA, 23 nt, Human
gccccacacuggggugccgccug

SEQ ID NO: 2222560 - RNA, 19 nt, Human
gccccaaucccuuuauuac

SEQ ID NO: 2222561 - RNA, 21 nt, Human
gccccaaguccugaagaggcg

SEQ ID NO: 2222562 - RNA, 18 nt, Human
gccccaaucccuuuauua

SEQ ID NO: 2222563 - RNA, 16 nt, Human
gcccccgccccgcccc

SEQ ID NO: 2222564 - RNA, 14 nt, Human
gcccccggcccccu

SEQ ID NO: 2222565 - RNA, 13 nt, Human
gcccccggcggcg

SEQ ID NO: 2222566 - RNA, 15 nt, Human
gcccccggcggcgcc

SEQ ID NO: 2222567 - RNA, 13 nt, Human
gcccccgccccgc

SEQ ID NO: 2222568 - RNA, 16 nt, Human
gcccccgcccccggcg

SEQ ID NO: 2222569 - RNA, 20 nt, Human
gcccccgcuguaaugaaaca

SEQ ID NO: 2222570 - RNA, 18 nt, Human
gcccccgggccgacggag

SEQ ID NO: 2222571 - RNA, 16 nt, Human
gcccccuccgcccugc

SEQ ID NO: 2222572 - RNA, 15 nt, Human
gccccugccucucug

SEQ ID NO: 2222573 - RNA, 16 nt, Human
gccccugccucucugc

SEQ ID NO: 2222574 - RNA, 21 nt, Human
gccccugcugguucaggguug

SEQ ID NO: 2222575 - RNA, 14 nt, Human
gccccugcuucucc

SEQ ID NO: 2222576 - RNA, 15 nt, Human
gccccugcuucucca

SEQ ID NO: 2222577 - RNA, 22 nt, Human
gccccugcugguucaggguugg

SEQ ID NO: 2222578 - RNA, 17 nt, Human
gccccugccucucugca

SEQ ID NO: 2222579 - RNA, 18 nt, Human
gccccugccucucugcag

SEQ ID NO: 2222580 - RNA, 12 nt, Human
gcccucaucccg

SEQ ID NO: 2222581 - RNA, 16 nt, Human
gcccucauggccccuc

SEQ ID NO: 2222582 - RNA, 23 nt, Human
gcccucaggucagggugaggaug

SEQ ID NO: 2222583 - RNA, 22 nt, Human
gcccucaggucagggugaggau

SEQ ID NO: 2222584 - RNA, 19 nt, Human
gcccucagaacccuuggcu

SEQ ID NO: 2222585 - RNA, 19 nt, Human
gcccucaggggacuugaau

SEQ ID NO: 2222586 - RNA, 17 nt, Human
gcccuaggcuccgucag

SEQ ID NO: 2222587 - RNA, 21 nt, Human
gcccuagagccugccuggagc

SEQ ID NO: 2222588 - RNA, 13 nt, Human
gcccuauggaugu

SEQ ID NO: 2222589 - RNA, 14 nt, Human
gcccuauggaugug

SEQ ID NO: 2222590 - RNA, 11 nt, Human
gcccuaucugu

SEQ ID NO: 2222591 - RNA, 16 nt, Human
gcccucacccuggggc

SEQ ID NO: 2222592 - RNA, 17 nt, Human
gcccucacccuggggcu

SEQ ID NO: 2222593 - RNA, 14 nt, Human
gcccucagaacccu

SEQ ID NO: 2222594 - RNA, 15 nt, Human
gcccuauuuuugcaa

SEQ ID NO: 2222595 - RNA, 17 nt, Human
gcccuauuuuugcaaug

SEQ ID NO: 2222596 - RNA, 23 nt, Human
gcccucagaacccuuggcuugcc

SEQ ID NO: 2222597 - RNA, 18 nt, Human
gcccucagaacccuuggc

SEQ ID NO: 2222598 - RNA, 17 nt, Human
gcccucagaacccuugg

SEQ ID NO: 2222599 - RNA, 12 nt, Human
gcccuaggcucc

SEQ ID NO: 2222600 - RNA, 13 nt, Human
gcccuagcuccac

SEQ ID NO: 2222601 - RNA, 19 nt, Human
gcccuagagccugccugga

SEQ ID NO: 2222602 - RNA, 20 nt, Human
gcccuagagccugccuggag

SEQ ID NO: 2222603 - RNA, 23 nt, Human
gcccuagagccugccuggagcgu

SEQ ID NO: 2222604 - RNA, 21 nt, Human
gcccuagagcacacuguagca

SEQ ID NO: 2222605 - RNA, 13 nt, Human
gcccuagagccug

SEQ ID NO: 2222606 - RNA, 14 nt, Human
gcccuagagccugc

SEQ ID NO: 2222607 - RNA, 15 nt, Human
gcccuagagccugcc

SEQ ID NO: 2222608 - RNA, 16 nt, Human
gcccuagagccugccu

SEQ ID NO: 2222609 - RNA, 17 nt, Human
gcccuagagccugccug

SEQ ID NO: 2222610 - RNA, 18 nt, Human
gcccuagagccugccugg

SEQ ID NO: 2222611 - RNA, 15 nt, Human
gccccuggaugcagc

SEQ ID NO: 2222612 - RNA, 19 nt, Human
gccccuggacaagcagagg

SEQ ID NO: 2222613 - RNA, 16 nt, Human
gccccugcuucuccag

SEQ ID NO: 2222614 - RNA, 18 nt, Human
gccccugcuucuccagcc

SEQ ID NO: 2222615 - RNA, 19 nt, Human
gccccugcuucuccagccu

SEQ ID NO: 2222616 - RNA, 20 nt, Human
gccccugcuucuccagccug

SEQ ID NO: 2222617 - RNA, 20 nt, Human
gccagugugaucccaagugc

SEQ ID NO: 2222618 - RNA, 22 nt, Human
gccagugucugucccggggucc

SEQ ID NO: 2222619 - RNA, 17 nt, Human
gccagugugaucccaag

SEQ ID NO: 2222620 - RNA, 15 nt, Human
gccagugucuguccc

SEQ ID NO: 2222621 - RNA, 16 nt, Human
gccagugucugucccg

SEQ ID NO: 2222622 - RNA, 21 nt, Human
gccagugucugucccgggguc

SEQ ID NO: 2222623 - RNA, 13 nt, Human
gccaguugguccc

SEQ ID NO: 2222624 - RNA, 22 nt, Human
gccaguuauggcuauaggugcu

SEQ ID NO: 2222625 - RNA, 13 nt, Human
gccagugugacaa

SEQ ID NO: 2222626 - RNA, 13 nt, Human
gccagugucuguc

SEQ ID NO: 2222627 - RNA, 23 nt, Human
gccagugccuuaccuccugccca

SEQ ID NO: 2222628 - RNA, 22 nt, Human
gccagugccuuaccuccugccc

SEQ ID NO: 2222629 - RNA, 20 nt, Human
gccagugccuuaccuccugc

SEQ ID NO: 2222630 - RNA, 21 nt, Human
gccagugccuuaccuccugcc

SEQ ID NO: 2222631 - RNA, 23 nt, Human
gccaguggcuggaucugugaggg

SEQ ID NO: 2222632 - RNA, 14 nt, Human
gccaguggcuggau

SEQ ID NO: 2222633 - RNA, 18 nt, Human
gccaguugaauuuaugga

SEQ ID NO: 2222634 - RNA, 15 nt, Human
gccaguucaguaccu

SEQ ID NO: 2222635 - RNA, 20 nt, Human
gccaguucaguaccuggagg

SEQ ID NO: 2222636 - RNA, 21 nt, Human
gccaguucaguaccuggagga

SEQ ID NO: 2222637 - RNA, 22 nt, Human
gccaguucaguaccuggaggag

SEQ ID NO: 2222638 - RNA, 20 nt, Human
gccaguuuuguuuccuuuca

SEQ ID NO: 2222639 - RNA, 22 nt, Human
gccauaaaacagguaauauaaa

SEQ ID NO: 2222640 - RNA, 13 nt, Human
gccauaaaacauu

SEQ ID NO: 2222641 - RNA, 14 nt, Human
gccauaaaacauua

SEQ ID NO: 2222642 - RNA, 20 nt, Human
gccauaaaacauuaagaaaa

SEQ ID NO: 2222643 - RNA, 21 nt, Human
gccauaaaacauuaagaaaau

SEQ ID NO: 2222644 - RNA, 22 nt, Human
gccaguuggucccccuuccaug

SEQ ID NO: 2222645 - RNA, 23 nt, Human
gccaguuggucccccuuccaugg

SEQ ID NO: 2222646 - RNA, 16 nt, Human
gccaguuggucccccu

SEQ ID NO: 2222647 - RNA, 18 nt, Human
gccaguuggucccccuuc

SEQ ID NO: 2222648 - RNA, 20 nt, Human
gccaguuggucccccuucca

SEQ ID NO: 2222649 - RNA, 21 nt, Human
gccaguuggucccccuuccau

SEQ ID NO: 2222650 - RNA, 18 nt, Human
gccauagcuccugcucca

SEQ ID NO: 2222651 - RNA, 23 nt, Human
gccauagcuccugcuccacagcc

SEQ ID NO: 2222652 - RNA, 16 nt, Human
gccauagaguuuaaca

SEQ ID NO: 2222653 - RNA, 12 nt, Human
gccauagcuccu

SEQ ID NO: 2222654 - RNA, 15 nt, Human
gccauagcuccugcu

SEQ ID NO: 2222655 - RNA, 16 nt, Human
gccauacuuugucuga

SEQ ID NO: 2222656 - RNA, 23 nt, Human
gccauacuggccucgccuggccu

SEQ ID NO: 2222657 - RNA, 20 nt, Human
gccauacuuaucucucugug

SEQ ID NO: 2222658 - RNA, 21 nt, Human
gccauacuuaucucucugugc

SEQ ID NO: 2222659 - RNA, 22 nt, Human
gccauacuuaucucucugugcu

SEQ ID NO: 2222660 - RNA, 22 nt, Human
gccauaaaacauuaagaaaauc

SEQ ID NO: 2222661 - RNA, 13 nt, Human
gccauacuggccu

SEQ ID NO: 2222662 - RNA, 14 nt, Human
gccauacuggccuc

SEQ ID NO: 2222663 - RNA, 15 nt, Human
gccauacuggccucg

SEQ ID NO: 2222664 - RNA, 18 nt, Human
gccauacuuaucucucug

SEQ ID NO: 2222665 - RNA, 21 nt, Human
gccauacuggccucgccuggc

SEQ ID NO: 2222666 - RNA, 22 nt, Human
gccauacuggccucgccuggcc

SEQ ID NO: 2222667 - RNA, 17 nt, Human
gccauacuggccucgcc

SEQ ID NO: 2222668 - RNA, 18 nt, Human
gccauacuggccucgccu

SEQ ID NO: 2222669 - RNA, 19 nt, Human
gccauacuggccucgccug

SEQ ID NO: 2222670 - RNA, 20 nt, Human
gccauacuggccucgccugg

SEQ ID NO: 2222671 - RNA, 16 nt, Human
gccauaugaaaaggcu

SEQ ID NO: 2222672 - RNA, 16 nt, Human
gccauagucacauggc

SEQ ID NO: 2222673 - RNA, 16 nt, Human
gccauauaaguuugaa

SEQ ID NO: 2222674 - RNA, 17 nt, Human
gccauauaaguuugaag

SEQ ID NO: 2222675 - RNA, 18 nt, Human
gccauauaaguuugaagg

SEQ ID NO: 2222676 - RNA, 19 nt, Human
gccauauaaguuugaagga

SEQ ID NO: 2222677 - RNA, 22 nt, Human
gccauauaaguuugaaggaaac

SEQ ID NO: 2222678 - RNA, 19 nt, Human
gccauauacucuucaagga

SEQ ID NO: 2222679 - RNA, 23 nt, Human
gccauauaaguuugaaggaaaca

SEQ ID NO: 2222680 - RNA, 17 nt, Human
gccauauuuucaccauu

SEQ ID NO: 2222681 - RNA, 12 nt, Human
gccaggccagcu

SEQ ID NO: 2222682 - RNA, 14 nt, Human
gccaggccagccuc

SEQ ID NO: 2222683 - RNA, 15 nt, Human
gccaggccagccucc

SEQ ID NO: 2222684 - RNA, 12 nt, Human
gccaggccagcc

SEQ ID NO: 2222685 - RNA, 13 nt, Human
gccaggccagccu

SEQ ID NO: 2222686 - RNA, 22 nt, Human
gccaggccagagggagugacag

SEQ ID NO: 2222687 - RNA, 15 nt, Human
gccaggccagaggga

SEQ ID NO: 2222688 - RNA, 21 nt, Human
gccaggccacaagacccuugu

SEQ ID NO: 2222689 - RNA, 23 nt, Human
gccaggcagaucugugccccaug

SEQ ID NO: 2222690 - RNA, 21 nt, Human
gccaggcagaucugugcccca

SEQ ID NO: 2222691 - RNA, 15 nt, Human
gccaggcagaucugu

SEQ ID NO: 2222692 - RNA, 14 nt, Human
gccaggcagaucug

SEQ ID NO: 2222693 - RNA, 18 nt, Human
gccaggcaggugccugga

SEQ ID NO: 2222694 - RNA, 19 nt, Human
gccaggcagguagccaggg

SEQ ID NO: 2222695 - RNA, 14 nt, Human
gccaggcaggggug

SEQ ID NO: 2222696 - RNA, 15 nt, Human
gccaggcaggggugg

SEQ ID NO: 2222697 - RNA, 16 nt, Human
gccaggcagggguggg

SEQ ID NO: 2222698 - RNA, 17 nt, Human
gccaggcaggggugggg

SEQ ID NO: 2222699 - RNA, 13 nt, Human
gccaggccacaag

SEQ ID NO: 2222700 - RNA, 18 nt, Human
gccaggccacaagacccu

SEQ ID NO: 2222701 - RNA, 13 nt, Human
gccaggccccagg

SEQ ID NO: 2222702 - RNA, 13 nt, Human
gccaggccagcug

SEQ ID NO: 2222703 - RNA, 14 nt, Human
gccaggccccaggc

SEQ ID NO: 2222704 - RNA, 18 nt, Human
gccaggcccccaagccug

SEQ ID NO: 2222705 - RNA, 19 nt, Human
gccaggccagccuccgaga

SEQ ID NO: 2222706 - RNA, 18 nt, Human
gccaggcccggggcuggc

SEQ ID NO: 2222707 - RNA, 17 nt, Human
gccaggcccggggcugg

SEQ ID NO: 2222708 - RNA, 16 nt, Human
gccaggcccggggcug

SEQ ID NO: 2222709 - RNA, 19 nt, Human
gccaggcccccaagccugc

SEQ ID NO: 2222710 - RNA, 23 nt, Human
gccaggcccccaagccugcaguc

SEQ ID NO: 2222711 - RNA, 13 nt, Human
gccaggcccucug

SEQ ID NO: 2222712 - RNA, 14 nt, Human
gccaggcccucugc

SEQ ID NO: 2222713 - RNA, 15 nt, Human
gccagccccacccag

SEQ ID NO: 2222714 - RNA, 14 nt, Human
gccagccccaccca

SEQ ID NO: 2222715 - RNA, 13 nt, Human
gccagccccaccc

SEQ ID NO: 2222716 - RNA, 18 nt, Human
gccagccccacagcccac

SEQ ID NO: 2222717 - RNA, 19 nt, Human
gccagccccacagcccacg

SEQ ID NO: 2222718 - RNA, 17 nt, Human
gccagccccacccagga

SEQ ID NO: 2222719 - RNA, 22 nt, Human
gccaggauggaacacggccaca

SEQ ID NO: 2222720 - RNA, 14 nt, Human
gccaggauggaaug

SEQ ID NO: 2222721 - RNA, 19 nt, Human
gccaggcacccccuggaga

SEQ ID NO: 2222722 - RNA, 20 nt, Human
gccaggcacccccuggagag

SEQ ID NO: 2222723 - RNA, 21 nt, Human
gccaggcacccccuggagaga

SEQ ID NO: 2222724 - RNA, 23 nt, Human
gccaggcacacacugugcuuucu

SEQ ID NO: 2222725 - RNA, 15 nt, Human
gccaggcacacacug

SEQ ID NO: 2222726 - RNA, 17 nt, Human
gccaggcacacacugug

SEQ ID NO: 2222727 - RNA, 22 nt, Human
gccaggcacacacugugcuuuc

SEQ ID NO: 2222728 - RNA, 19 nt, Human
gccagccagcagccagcuc

SEQ ID NO: 2222729 - RNA, 16 nt, Human
gccagccagcagccag

SEQ ID NO: 2222730 - RNA, 11 nt, Human
gccagccaggc

SEQ ID NO: 2222731 - RNA, 13 nt, Human
gccagccaggcgg

SEQ ID NO: 2222732 - RNA, 18 nt, Human
gccagccaggcgggcuca

SEQ ID NO: 2222733 - RNA, 19 nt, Human
gccagccagugaccugagg

SEQ ID NO: 2222734 - RNA, 21 nt, Human
gccagccaggcgggcucaagg

SEQ ID NO: 2222735 - RNA, 22 nt, Human
gccagccagugaccugaggaag

SEQ ID NO: 2222736 - RNA, 13 nt, Human
gccagccaugucu

SEQ ID NO: 2222737 - RNA, 13 nt, Human
gccagcccagccc

SEQ ID NO: 2222738 - RNA, 14 nt, Human
gccagcccagccca

SEQ ID NO: 2222739 - RNA, 14 nt, Human
gccagccccacagc

SEQ ID NO: 2222740 - RNA, 15 nt, Human
gccagccccacagcc

SEQ ID NO: 2222741 - RNA, 16 nt, Human
gccagccccacagccc

SEQ ID NO: 2222742 - RNA, 17 nt, Human
gccagccccacagccca

SEQ ID NO: 2222743 - RNA, 22 nt, Human
gcuggagcccagggagcggaaa

SEQ ID NO: 2222744 - RNA, 16 nt, Human
gcuggagcccagggag

SEQ ID NO: 2222745 - RNA, 16 nt, Human
gcuggagccacuaacu

SEQ ID NO: 2222746 - RNA, 19 nt, Human
gcuggagccacuaacuaga

SEQ ID NO: 2222747 - RNA, 15 nt, Human
gcuggagccacuaac

SEQ ID NO: 2222748 - RNA, 10 nt, Human
gcuggagccu

SEQ ID NO: 2222749 - RNA, 21 nt, Human
gcuggagccuagaacaggccu

SEQ ID NO: 2222750 - RNA, 11 nt, Human
gcuggagccug

SEQ ID NO: 2222751 - RNA, 17 nt, Human
gcuggagccuggugccc

SEQ ID NO: 2222752 - RNA, 13 nt, Human
gcuggagccugug

SEQ ID NO: 2222753 - RNA, 14 nt, Human
gcuggagccugugu

SEQ ID NO: 2222754 - RNA, 21 nt, Human
gcuggagccuguguaacagcu

SEQ ID NO: 2222755 - RNA, 13 nt, Human
gcuggagagguua

SEQ ID NO: 2222756 - RNA, 12 nt, Human
gcuggagagguu

SEQ ID NO: 2222757 - RNA, 15 nt, Human
gcuggagauguuuua

SEQ ID NO: 2222758 - RNA, 20 nt, Human
gcugcuccccucccuccucu

SEQ ID NO: 2222759 - RNA, 12 nt, Human
gcugcuccccuc

SEQ ID NO: 2222760 - RNA, 19 nt, Human
gcugcuccccagcagcgga

SEQ ID NO: 2222761 - RNA, 16 nt, Human
gcugcuccccagcagc

SEQ ID NO: 2222762 - RNA, 15 nt, Human
gcugcuccuagaggg

SEQ ID NO: 2222763 - RNA, 17 nt, Human
gcugccccuggcagccc

SEQ ID NO: 2222764 - RNA, 17 nt, Human
gcugccauccagguuca

SEQ ID NO: 2222765 - RNA, 13 nt, Human
gcugccccuggca

SEQ ID NO: 2222766 - RNA, 15 nt, Human
gcugccccuggcagc

SEQ ID NO: 2222767 - RNA, 16 nt, Human
gcugccccuggcagcc

SEQ ID NO: 2222768 - RNA, 18 nt, Human
gcugcugaccuccacagc

SEQ ID NO: 2222769 - RNA, 16 nt, Human
gcugcuccuagaggga

SEQ ID NO: 2222770 - RNA, 18 nt, Human
gcugcuccuagagggagg

SEQ ID NO: 2222771 - RNA, 12 nt, Human
gcugcugacagu

SEQ ID NO: 2222772 - RNA, 16 nt, Human
gcugcugacugauguu

SEQ ID NO: 2222773 - RNA, 19 nt, Human
gcugcugaccuccacagcu

SEQ ID NO: 2222774 - RNA, 15 nt, Human
gcugcugucccuccc

SEQ ID NO: 2222775 - RNA, 16 nt, Human
gcugcugucccucccc

SEQ ID NO: 2222776 - RNA, 18 nt, Human
gcugcugucccucccccu

SEQ ID NO: 2222777 - RNA, 22 nt, Human
gcugcugucccucccccuuguc

SEQ ID NO: 2222778 - RNA, 23 nt, Human
gcugcugucccucccccuugucc

SEQ ID NO: 2222779 - RNA, 22 nt, Human
gcugagucaugaucucccugcc

SEQ ID NO: 2222780 - RNA, 21 nt, Human
gcugagucaugaucucccugc

SEQ ID NO: 2222781 - RNA, 17 nt, Human
gcugaguaggaggccuc

SEQ ID NO: 2222782 - RNA, 21 nt, Human
gcugaguauguuaagcucuuu

SEQ ID NO: 2222783 - RNA, 23 nt, Human
gcugagucaugaucucccugccg

SEQ ID NO: 2222784 - RNA, 21 nt, Human
gcugaggugucuuaagccuuu

SEQ ID NO: 2222785 - RNA, 13 nt, Human
gcugagguuccuc

SEQ ID NO: 2222786 - RNA, 16 nt, Human
gcugagguuccucugc

SEQ ID NO: 2222787 - RNA, 17 nt, Human
gcugagguuccucugcc

SEQ ID NO: 2222788 - RNA, 13 nt, Human
gcugaggcuggca

SEQ ID NO: 2222789 - RNA, 16 nt, Human
gcugaggcgggagaau

SEQ ID NO: 2222790 - RNA, 23 nt, Human
gcugaggcucugacccagugaga

SEQ ID NO: 2222791 - RNA, 18 nt, Human
gcugagguuccucugccu

SEQ ID NO: 2222792 - RNA, 19 nt, Human
gcugagguuccucugccug

SEQ ID NO: 2222793 - RNA, 20 nt, Human
gcugagguuccucugccugc

SEQ ID NO: 2222794 - RNA, 21 nt, Human
gcugagguuccucugccugcc

SEQ ID NO: 2222795 - RNA, 22 nt, Human
gcugagguuccucugccugccc

SEQ ID NO: 2222796 - RNA, 23 nt, Human
gcugagguuccucugccugcccc

SEQ ID NO: 2222797 - RNA, 21 nt, Human
gcugagguugcgccacuacac

SEQ ID NO: 2222798 - RNA, 15 nt, Human
gcugaggugggagga

SEQ ID NO: 2222799 - RNA, 17 nt, Human
gcugaggccugggccgc

SEQ ID NO: 2222800 - RNA, 20 nt, Human
gcugaggccugggccgcugc

SEQ ID NO: 2222801 - RNA, 23 nt, Human
gcugaggccugggccgcugccac

SEQ ID NO: 2222802 - RNA, 21 nt, Human
gcugaggccuuaucauucauu

SEQ ID NO: 2222803 - RNA, 15 nt, Human
gcugaggcgggagaa

SEQ ID NO: 2222804 - RNA, 23 nt, Human
gcugcaccaacccagccgcugcc

SEQ ID NO: 2222805 - RNA, 15 nt, Human
gcugcacccucaggc

SEQ ID NO: 2222806 - RNA, 13 nt, Human
gcugcacccucag

SEQ ID NO: 2222807 - RNA, 18 nt, Human
gcugcagagacagagagg

SEQ ID NO: 2222808 - RNA, 17 nt, Human
gcugcagaaggccaaga

SEQ ID NO: 2222809 - RNA, 19 nt, Human
gcugcagaaggccaagaau

SEQ ID NO: 2222810 - RNA, 20 nt, Human
gcugcagagcagugggccug

SEQ ID NO: 2222811 - RNA, 13 nt, Human
gcugcagagccac

SEQ ID NO: 2222812 - RNA, 19 nt, Human
gcugcagagccacccugug

SEQ ID NO: 2222813 - RNA, 21 nt, Human
gcugcagagcagugggccugg

SEQ ID NO: 2222814 - RNA, 16 nt, Human
gcugcacccucaggca

SEQ ID NO: 2222815 - RNA, 22 nt, Human
gcugcacucugugcccaugggc

SEQ ID NO: 2222816 - RNA, 20 nt, Human
gcugcacugaugcugccccu

SEQ ID NO: 2222817 - RNA, 23 nt, Human
gcugcacucugugcccaugggca

SEQ ID NO: 2222818 - RNA, 16 nt, Human
gcugcagaaggccaag

SEQ ID NO: 2222819 - RNA, 12 nt, Human
gcugcaggggcu

SEQ ID NO: 2222820 - RNA, 11 nt, Human
gcugcaggggc

SEQ ID NO: 2222821 - RNA, 13 nt, Human
gcugcaggggcuc

SEQ ID NO: 2222822 - RNA, 15 nt, Human
gcugcaggggcucug

SEQ ID NO: 2222823 - RNA, 16 nt, Human
gcugcaggggcucugg

SEQ ID NO: 2222824 - RNA, 17 nt, Human
gcugcaggggcucugga

SEQ ID NO: 2222825 - RNA, 20 nt, Human
gcugcaggggcucuggagag

SEQ ID NO: 2222826 - RNA, 12 nt, Human
gcugccauccag

SEQ ID NO: 2222827 - RNA, 13 nt, Human
gcugccauccagg

SEQ ID NO: 2222828 - RNA, 17 nt, Human
gcugcaggacuugagaa

SEQ ID NO: 2222829 - RNA, 21 nt, Human
gcugcagaggggcaggcccug

SEQ ID NO: 2222830 - RNA, 20 nt, Human
gcugcagaggggcaggcccu

SEQ ID NO: 2222831 - RNA, 15 nt, Human
gcugcagcucaccca

SEQ ID NO: 2222832 - RNA, 21 nt, Human
gcugcagccugcgccaccgcc

SEQ ID NO: 2222833 - RNA, 16 nt, Human
gcugcagccugcgcca

SEQ ID NO: 2222834 - RNA, 15 nt, Human
gcugcagaggggcag

SEQ ID NO: 2222835 - RNA, 19 nt, Human
gcugcagaggggcaggccc

SEQ ID NO: 2222836 - RNA, 15 nt, Human
gcugcagaggccaga

SEQ ID NO: 2222837 - RNA, 18 nt, Human
gcugcagaggccagaggc

SEQ ID NO: 2222838 - RNA, 22 nt, Human
gcugcagaggccagaggccccc

SEQ ID NO: 2222839 - RNA, 12 nt, Human
gcugcagagggg

SEQ ID NO: 2222840 - RNA, 13 nt, Human
gcugcagaggggc

SEQ ID NO: 2222841 - RNA, 20 nt, Human
gcucucaggccagcugcuug

SEQ ID NO: 2222842 - RNA, 19 nt, Human
gcucucaggccagcugcuu

SEQ ID NO: 2222843 - RNA, 17 nt, Human
gcucucaggccagcugc

SEQ ID NO: 2222844 - RNA, 18 nt, Human
gcucucaggccagcugcu

SEQ ID NO: 2222845 - RNA, 21 nt, Human
gcucuacuggucuuguggaau

SEQ ID NO: 2222846 - RNA, 19 nt, Human
gcucuacccagggccugca

SEQ ID NO: 2222847 - RNA, 18 nt, Human
gcucuacccagggccugc

SEQ ID NO: 2222848 - RNA, 19 nt, Human
gcucuagacaacccugcaa

SEQ ID NO: 2222849 - RNA, 18 nt, Human
gcucuagacaacccugca

SEQ ID NO: 2222850 - RNA, 16 nt, Human
gcucuagacaacccug

SEQ ID NO: 2222851 - RNA, 19 nt, Human
gcucuacugaggugcuaug

SEQ ID NO: 2222852 - RNA, 15 nt, Human
gcucuacccagggcc

SEQ ID NO: 2222853 - RNA, 14 nt, Human
gcucuacccagggc

SEQ ID NO: 2222854 - RNA, 19 nt, Human
gcucuacaucuucugccuu

SEQ ID NO: 2222855 - RNA, 20 nt, Human
gcucuacaucuucugccuua

SEQ ID NO: 2222856 - RNA, 16 nt, Human
gcuccucuccccagca

SEQ ID NO: 2222857 - RNA, 19 nt, Human
gcuccucuccccagcaagu

SEQ ID NO: 2222858 - RNA, 23 nt, Human
gcuccucuccccagcccagagac

SEQ ID NO: 2222859 - RNA, 18 nt, Human
gcucuacaucuucugccu

SEQ ID NO: 2222860 - RNA, 22 nt, Human
gcuccucuccccagcccagaga

SEQ ID NO: 2222861 - RNA, 21 nt, Human
gcuccucuccccagcccagag

SEQ ID NO: 2222862 - RNA, 20 nt, Human
gcuccucuccccagcccaga

SEQ ID NO: 2222863 - RNA, 19 nt, Human
gcuccucuccccagcccag

SEQ ID NO: 2222864 - RNA, 18 nt, Human
gcuccucuccccagccca

SEQ ID NO: 2222865 - RNA, 16 nt, Human
gcuccucuccccagcc

SEQ ID NO: 2222866 - RNA, 14 nt, Human
gcucuagccugggc

SEQ ID NO: 2222867 - RNA, 14 nt, Human
gcucuagguggggc

SEQ ID NO: 2222868 - RNA, 14 nt, Human
gcucuagugggaag

SEQ ID NO: 2222869 - RNA, 21 nt, Human
gcucuagccugggcaacaaca

SEQ ID NO: 2222870 - RNA, 23 nt, Human
gcucuagauugagagaagagaca

SEQ ID NO: 2222871 - RNA, 16 nt, Human
gcucuauguuuacaaa

SEQ ID NO: 2222872 - RNA, 15 nt, Human
gcucuauguuuacaa

SEQ ID NO: 2222873 - RNA, 18 nt, Human
gcucuaugggcagaucua

SEQ ID NO: 2222874 - RNA, 21 nt, Human
gcucuaugggcagaucuaccc

SEQ ID NO: 2222875 - RNA, 15 nt, Human
gcucuagugccuucu

SEQ ID NO: 2222876 - RNA, 12 nt, Human
gcucuagugccu

SEQ ID NO: 2222877 - RNA, 19 nt, Human
gcucuaucuugcucuguaa

SEQ ID NO: 2222878 - RNA, 21 nt, Human
gcucuaucuugcucuguaauc

SEQ ID NO: 2222879 - RNA, 22 nt, Human
gcucuaucuugcucuguaaucu

SEQ ID NO: 2222880 - RNA, 18 nt, Human
gcucucaaguuaucaggg

SEQ ID NO: 2222881 - RNA, 19 nt, Human
gcucucaacccaggagcau

SEQ ID NO: 2222882 - RNA, 17 nt, Human
gcucuauuguagcauuu

SEQ ID NO: 2222883 - RNA, 12 nt, Human
gcucucagaagg

SEQ ID NO: 2222884 - RNA, 16 nt, Human
gcucucagcucagcgc

SEQ ID NO: 2222885 - RNA, 18 nt, Human
gcucucagcucagcgcca

SEQ ID NO: 2222886 - RNA, 17 nt, Human
gcucucagccaacgagu

SEQ ID NO: 2222887 - RNA, 11 nt, Human
gcucucagcca

SEQ ID NO: 2222888 - RNA, 10 nt, Human
gcucucagcc

SEQ ID NO: 2222889 - RNA, 13 nt, Human
gcucucagaagcc

SEQ ID NO: 2222890 - RNA, 11 nt, Human
gcucucagaag

SEQ ID NO: 2222891 - RNA, 13 nt, Human
gcucccagugucu

SEQ ID NO: 2222892 - RNA, 18 nt, Human
gcucccagugucuuccug

SEQ ID NO: 2222893 - RNA, 19 nt, Human
gcucccagugucuuccugu

SEQ ID NO: 2222894 - RNA, 20 nt, Human
gcucccagugucuuccugug

SEQ ID NO: 2222895 - RNA, 11 nt, Human
gcucccaggcc

SEQ ID NO: 2222896 - RNA, 12 nt, Human
gcucccaggccg

SEQ ID NO: 2222897 - RNA, 22 nt, Human
gcucccaggccgagaagccagu

SEQ ID NO: 2222898 - RNA, 23 nt, Human
gcucccaggccgagaagccagug

SEQ ID NO: 2222899 - RNA, 17 nt, Human
gcuccagcucaccagcc

SEQ ID NO: 2222900 - RNA, 23 nt, Human
gcucccaggcauuccccaggagg

SEQ ID NO: 2222901 - RNA, 13 nt, Human
gcuccagcucacc

SEQ ID NO: 2222902 - RNA, 14 nt, Human
gcuccagcucacca

SEQ ID NO: 2222903 - RNA, 23 nt, Human
gcuccagccaaccccuguggagc

SEQ ID NO: 2222904 - RNA, 22 nt, Human
gcuccagccaaccccuguggag

SEQ ID NO: 2222905 - RNA, 18 nt, Human
gcuccagccaaccccugu

SEQ ID NO: 2222906 - RNA, 17 nt, Human
gcuccagccaaccccug

SEQ ID NO: 2222907 - RNA, 16 nt, Human
gcuccagccaaccccu

SEQ ID NO: 2222908 - RNA, 14 nt, Human
gcuccagccaaccc

SEQ ID NO: 2222909 - RNA, 19 nt, Human
gcuccagcaccauccgcca

SEQ ID NO: 2222910 - RNA, 15 nt, Human
gcuccagccuggcuc

SEQ ID NO: 2222911 - RNA, 19 nt, Human
gcuccucccggugcccaag

SEQ ID NO: 2222912 - RNA, 15 nt, Human
gcucccauuucuacu

SEQ ID NO: 2222913 - RNA, 21 nt, Human
gcucccauucacucuuccaga

SEQ ID NO: 2222914 - RNA, 17 nt, Human
gcuccucccucugaggc

SEQ ID NO: 2222915 - RNA, 16 nt, Human
gcuccucccggugccc

SEQ ID NO: 2222916 - RNA, 20 nt, Human
gcucccauucacucuuccag

SEQ ID NO: 2222917 - RNA, 22 nt, Human
gcucccagugucuuccuguggg

SEQ ID NO: 2222918 - RNA, 23 nt, Human
gcucccagugucuuccugugggg

SEQ ID NO: 2222919 - RNA, 19 nt, Human
gcuccucccucugaggcug

SEQ ID NO: 2222920 - RNA, 20 nt, Human
gcuccucccucugaggcugu

SEQ ID NO: 2222921 - RNA, 21 nt, Human
gcuccucccucugaggcugua

SEQ ID NO: 2222922 - RNA, 22 nt, Human
gcuccucccucugaggcuguag

SEQ ID NO: 2222923 - RNA, 13 nt, Human
gcuccucccuggc

SEQ ID NO: 2222924 - RNA, 14 nt, Human
gcuccucccuggcu

SEQ ID NO: 2222925 - RNA, 15 nt, Human
gcuccucccuggcug

SEQ ID NO: 2222926 - RNA, 16 nt, Human
gcuccucccuggcugc

SEQ ID NO: 2222927 - RNA, 17 nt, Human
gcuccucccuggcugcc

SEQ ID NO: 2222928 - RNA, 18 nt, Human
gcuccucccuggcugccc

SEQ ID NO: 2222929 - RNA, 19 nt, Human
gcuccucccuggcugcccu

SEQ ID NO: 2222930 - RNA, 20 nt, Human
gcuccucccuggcugcccug

SEQ ID NO: 2222931 - RNA, 21 nt, Human
gcuccucccuggcugcccugg

SEQ ID NO: 2222932 - RNA, 22 nt, Human
gcuccucccuggcugcccuggc

SEQ ID NO: 2222933 - RNA, 23 nt, Human
gcuccucccuggcugcccuggcc

SEQ ID NO: 2222934 - RNA, 15 nt, Human
gcuccucuccccagc

SEQ ID NO: 2222935 - RNA, 12 nt, Human
gcuccucucagu

SEQ ID NO: 2222936 - RNA, 12 nt, Human
gcuccucuccag

SEQ ID NO: 2222937 - RNA, 13 nt, Human
gcuccucuccagg

SEQ ID NO: 2222938 - RNA, 14 nt, Human
gcuccucuccaggc

SEQ ID NO: 2222939 - RNA, 15 nt, Human
gcuccucuccaggca

SEQ ID NO: 2222940 - RNA, 16 nt, Human
gcuccucuccaggcac

SEQ ID NO: 2222941 - RNA, 17 nt, Human
gcuccucuccaggcacc

SEQ ID NO: 2222942 - RNA, 22 nt, Human
gcuccucuccaggcacccuucu

SEQ ID NO: 2222943 - RNA, 15 nt, Human
gcuccuccucccugc

SEQ ID NO: 2222944 - RNA, 14 nt, Human
gcuccuccucccug

SEQ ID NO: 2222945 - RNA, 14 nt, Human
gcuccuccgugcuu

SEQ ID NO: 2222946 - RNA, 20 nt, Human
gcuccuccgugcuuccucag

SEQ ID NO: 2222947 - RNA, 18 nt, Human
gcuccuccucccugcauc

SEQ ID NO: 2222948 - RNA, 16 nt, Human
gcuccuccucccugca

SEQ ID NO: 2222949 - RNA, 20 nt, Human
gcuccuccucccugcaucug

SEQ ID NO: 2222950 - RNA, 15 nt, Human
gcuccucgagggcag

SEQ ID NO: 2222951 - RNA, 17 nt, Human
gcuccucgagggcaggg

SEQ ID NO: 2222952 - RNA, 18 nt, Human
gcuccucgagggcaggga

SEQ ID NO: 2222953 - RNA, 20 nt, Human
gcuccucgagggcagggacu

SEQ ID NO: 2222954 - RNA, 9 nt, Human
gcuccagac

SEQ ID NO: 2222955 - RNA, 20 nt, Human
gcuccacuuggucugugaga

SEQ ID NO: 2222956 - RNA, 23 nt, Human
gcuccagacccccagcaacccuc

SEQ ID NO: 2222957 - RNA, 17 nt, Human
gcuccagacccccagca

SEQ ID NO: 2222958 - RNA, 12 nt, Human
gcuccagaccug

SEQ ID NO: 2222959 - RNA, 20 nt, Human
gcuccagaccugauccugga

SEQ ID NO: 2222960 - RNA, 13 nt, Human
gcuccagaccuga

SEQ ID NO: 2222961 - RNA, 22 nt, Human
gcuccagaccugauccuggagg

SEQ ID NO: 2222962 - RNA, 21 nt, Human
gcuccagaccugauccuggag

SEQ ID NO: 2222963 - RNA, 23 nt, Human
gcuccagaccugauccuggaggc

SEQ ID NO: 2222964 - RNA, 12 nt, Human
gcuccagagggc

SEQ ID NO: 2222965 - RNA, 22 nt, Human
gcuccagaugcagggcagucau

SEQ ID NO: 2222966 - RNA, 22 nt, Human
gcuccagacguaggggaggggu

SEQ ID NO: 2222967 - RNA, 21 nt, Human
gcuccagaugcagggcaguca

SEQ ID NO: 2222968 - RNA, 19 nt, Human
gcuccagaugcagggcagu

SEQ ID NO: 2222969 - RNA, 18 nt, Human
gcuccagaugcagggcag

SEQ ID NO: 2222970 - RNA, 17 nt, Human
gcuccagaugcagggca

SEQ ID NO: 2222971 - RNA, 21 nt, Human
gcuccagagggcacucugcuu

SEQ ID NO: 2222972 - RNA, 20 nt, Human
gcuccagagggcacucugcu

SEQ ID NO: 2222973 - RNA, 14 nt, Human
gcuccagaccccca

SEQ ID NO: 2222974 - RNA, 15 nt, Human
gcuccagacccccag

SEQ ID NO: 2222975 - RNA, 20 nt, Human
gcuccagaaaugucuaaaug

SEQ ID NO: 2222976 - RNA, 23 nt, Human
gcuccagacacauguccaagaag

SEQ ID NO: 2222977 - RNA, 18 nt, Human
gcuccagacacaugucca

SEQ ID NO: 2222978 - RNA, 21 nt, Human
gcuccagacacauguccaaga

SEQ ID NO: 2222979 - RNA, 19 nt, Human
gcugaaaaaucacauccug

SEQ ID NO: 2222980 - RNA, 11 nt, Human
gcugaaaauau

SEQ ID NO: 2222981 - RNA, 20 nt, Human
gcugaaaaaucacauccugg

SEQ ID NO: 2222982 - RNA, 16 nt, Human
gcucuguguugccaug

SEQ ID NO: 2222983 - RNA, 23 nt, Human
gcucugugggcugcacucugugc

SEQ ID NO: 2222984 - RNA, 24 nt, Human
gcucugugggcugcacucugugcc

SEQ ID NO: 2222985 - RNA, 14 nt, Human
gcucugugcaguca

SEQ ID NO: 2222986 - RNA, 19 nt, Human
gcucugugcagucacugga

SEQ ID NO: 2222987 - RNA, 21 nt, Human
gcucugugcagucacuggagg

SEQ ID NO: 2222988 - RNA, 14 nt, Human
gcucugugcugacc

SEQ ID NO: 2222989 - RNA, 15 nt, Human
gcucugugcugaccc

SEQ ID NO: 2222990 - RNA, 16 nt, Human
gcucugugcugacccu

SEQ ID NO: 2222991 - RNA, 18 nt, Human
gcucugugcugacccucc

SEQ ID NO: 2222992 - RNA, 22 nt, Human
gcucugugcugacccuccuguu

SEQ ID NO: 2222993 - RNA, 19 nt, Human
gcucugugcugacccuccu

SEQ ID NO: 2222994 - RNA, 21 nt, Human
gcucugugcugacccuccugu

SEQ ID NO: 2222995 - RNA, 12 nt, Human
gcucugugggcu

SEQ ID NO: 2222996 - RNA, 14 nt, Human
gcucugugggcugc

SEQ ID NO: 2222997 - RNA, 17 nt, Human
gcugaaacaggagagaa

SEQ ID NO: 2222998 - RNA, 16 nt, Human
gcugaaacaggagaga

SEQ ID NO: 2222999 - RNA, 23 nt, Human
gcugaaagaacauggacuuguau

SEQ ID NO: 2223000 - RNA, 16 nt, Human
gcugaaacagaauacu

SEQ ID NO: 2223001 - RNA, 20 nt, Human
gcugaaaaccuaaguccuuu

SEQ ID NO: 2223002 - RNA, 16 nt, Human
gcugaaacaacaaaua

SEQ ID NO: 2223003 - RNA, 13 nt, Human
gcugaaagccauu

SEQ ID NO: 2223004 - RNA, 18 nt, Human
gcugaaacaggagagaaa

SEQ ID NO: 2223005 - RNA, 23 nt, Human
gcugaacacuccaauuaaggauu

SEQ ID NO: 2223006 - RNA, 13 nt, Human
gcugaacagugga

SEQ ID NO: 2223007 - RNA, 22 nt, Human
gcugaacaguggaggaagaggg

SEQ ID NO: 2223008 - RNA, 17 nt, Human
gcugaacauugcauaua

SEQ ID NO: 2223009 - RNA, 15 nt, Human
gcugaacauugcaua

SEQ ID NO: 2223010 - RNA, 18 nt, Human
gcucuggugacaccagcc

SEQ ID NO: 2223011 - RNA, 15 nt, Human
gcucuggagagaaac

SEQ ID NO: 2223012 - RNA, 20 nt, Human
gcucuggugacaccagccuu

SEQ ID NO: 2223013 - RNA, 19 nt, Human
gcucuggugacaccagccu

SEQ ID NO: 2223014 - RNA, 18 nt, Human
gcucuguaaucucguuuc

SEQ ID NO: 2223015 - RNA, 19 nt, Human
gcucuguaaucucguuuca

SEQ ID NO: 2223016 - RNA, 23 nt, Human
gcucuguaaucucguuucaaaaa

SEQ ID NO: 2223017 - RNA, 17 nt, Human
gcucuggagcccacugu

SEQ ID NO: 2223018 - RNA, 19 nt, Human
gcucuggagacagccccag

SEQ ID NO: 2223019 - RNA, 20 nt, Human
gcucuggagacagccccaga

SEQ ID NO: 2223020 - RNA, 13 nt, Human
gcucuggagagaa

SEQ ID NO: 2223021 - RNA, 14 nt, Human
gcucuggagagaaa

SEQ ID NO: 2223022 - RNA, 14 nt, Human
gcucugugcaggga

SEQ ID NO: 2223023 - RNA, 17 nt, Human
gcucugugcccacccuc

SEQ ID NO: 2223024 - RNA, 23 nt, Human
gcucugucgcccaggcuggagug

SEQ ID NO: 2223025 - RNA, 16 nt, Human
gcucugucacccaggc

SEQ ID NO: 2223026 - RNA, 23 nt, Human
gcucuguaucaggacccagagga

SEQ ID NO: 2223027 - RNA, 22 nt, Human
gcucuguaucaggacccagagg

SEQ ID NO: 2223028 - RNA, 19 nt, Human
gcucuguaucaggacccag

SEQ ID NO: 2223029 - RNA, 18 nt, Human
gcucuguaucaggaccca

SEQ ID NO: 2223030 - RNA, 23 nt, Human
gcugacaaccaccgcuccccagc

SEQ ID NO: 2223031 - RNA, 22 nt, Human
gcugacaaccaccgcuccccag

SEQ ID NO: 2223032 - RNA, 21 nt, Human
gcugacaaccaccgcucccca

SEQ ID NO: 2223033 - RNA, 17 nt, Human
gcugacacaaaccugcc

SEQ ID NO: 2223034 - RNA, 18 nt, Human
gcugacacaaaccugccu

SEQ ID NO: 2223035 - RNA, 19 nt, Human
gcugacacaaaccugccug

SEQ ID NO: 2223036 - RNA, 20 nt, Human
gcugacacaaaccugccugg

SEQ ID NO: 2223037 - RNA, 19 nt, Human
gcugacaaccaccgcuccc

SEQ ID NO: 2223038 - RNA, 21 nt, Human
gcugaauuuucacaugaacau

SEQ ID NO: 2223039 - RNA, 18 nt, Human
gcugaauaaaugucuuuu

SEQ ID NO: 2223040 - RNA, 14 nt, Human
gcugaauuuucaca

SEQ ID NO: 2223041 - RNA, 12 nt, Human
gcugaauuuuca

SEQ ID NO: 2223042 - RNA, 17 nt, Human
gcugaauacagaggcaa

SEQ ID NO: 2223043 - RNA, 13 nt, Human
gcugaauaaaugu

SEQ ID NO: 2223044 - RNA, 14 nt, Human
gcugaauaaauguc

SEQ ID NO: 2223045 - RNA, 16 nt, Human
gcugaauaaaugucuu

SEQ ID NO: 2223046 - RNA, 17 nt, Human
gcugaauaaaugucuuu

SEQ ID NO: 2223047 - RNA, 17 nt, Human
gcugaacggggagaaaa

SEQ ID NO: 2223048 - RNA, 16 nt, Human
gcugaacggggagaaa

SEQ ID NO: 2223049 - RNA, 20 nt, Human
gcugaacccugugcuggugu

SEQ ID NO: 2223050 - RNA, 21 nt, Human
gcugaacccugugcugguguc

SEQ ID NO: 2223051 - RNA, 22 nt, Human
gcugaacccauuuugagugacu

SEQ ID NO: 2223052 - RNA, 13 nt, Human
gcugaacccugug

SEQ ID NO: 2223053 - RNA, 16 nt, Human
gcugaacccugugcug

SEQ ID NO: 2223054 - RNA, 17 nt, Human
gcugaacccugugcugg

SEQ ID NO: 2223055 - RNA, 18 nt, Human
gcugaagaugaaucaaug

SEQ ID NO: 2223056 - RNA, 15 nt, Human
gcugaacucaugaga

SEQ ID NO: 2223057 - RNA, 20 nt, Human
gcugaacuuguuuucuggga

SEQ ID NO: 2223058 - RNA, 23 nt, Human
gcugaaggcucgagcaugccugg

SEQ ID NO: 2223059 - RNA, 20 nt, Human
gcugaagugcauccaaaggu

SEQ ID NO: 2223060 - RNA, 12 nt, Human
gcugaauaaaug

SEQ ID NO: 2223061 - RNA, 13 nt, Human
gcugaagauggca

SEQ ID NO: 2223062 - RNA, 20 nt, Human
gcugaagggaccuugaaggg

SEQ ID NO: 2223063 - RNA, 15 nt, Human
gcugaagguugaaga

SEQ ID NO: 2223064 - RNA, 16 nt, Human
gcugaagguugaagag

SEQ ID NO: 2223065 - RNA, 14 nt, Human
gcugagcccuggca

SEQ ID NO: 2223066 - RNA, 13 nt, Human
gcugagcccuggc

SEQ ID NO: 2223067 - RNA, 19 nt, Human
gcugacacguccaccccag

SEQ ID NO: 2223068 - RNA, 21 nt, Human
gcugacacaaaccugccuggg

SEQ ID NO: 2223069 - RNA, 13 nt, Human
gcugacagacaca

SEQ ID NO: 2223070 - RNA, 16 nt, Human
gcugagcccuggcagg

SEQ ID NO: 2223071 - RNA, 15 nt, Human
gcugagcccuggcag

SEQ ID NO: 2223072 - RNA, 12 nt, Human
gcugagccucag

SEQ ID NO: 2223073 - RNA, 16 nt, Human
gcugagccucagucuc

SEQ ID NO: 2223074 - RNA, 14 nt, Human
gcugagccucucac

SEQ ID NO: 2223075 - RNA, 14 nt, Human
gcugagccuggcug

SEQ ID NO: 2223076 - RNA, 15 nt, Human
gcugagccuggcugg

SEQ ID NO: 2223077 - RNA, 14 nt, Human
gcugaggccucuca

SEQ ID NO: 2223078 - RNA, 20 nt, Human
gcugagccucugcuccccag

SEQ ID NO: 2223079 - RNA, 19 nt, Human
gcugagccucugcucccca

SEQ ID NO: 2223080 - RNA, 13 nt, Human
gcugagccucugc

SEQ ID NO: 2223081 - RNA, 12 nt, Human
gcugaggccugg

SEQ ID NO: 2223082 - RNA, 13 nt, Human
gcugaggccugga

SEQ ID NO: 2223083 - RNA, 14 nt, Human
gcugaggccuggac

SEQ ID NO: 2223084 - RNA, 21 nt, Human
gcugaggccuggacuuuccug

SEQ ID NO: 2223085 - RNA, 13 nt, Human
gcugaggccuggg

SEQ ID NO: 2223086 - RNA, 14 nt, Human
gcugaggccugggc

SEQ ID NO: 2223087 - RNA, 15 nt, Human
gcugaggccugggcc

SEQ ID NO: 2223088 - RNA, 16 nt, Human
gcugaggccugggccg

SEQ ID NO: 2223089 - RNA, 15 nt, Human
gcucugaaagccagc

SEQ ID NO: 2223090 - RNA, 16 nt, Human
gcucugaaaccagugu

SEQ ID NO: 2223091 - RNA, 19 nt, Human
gcucucuggccuuuuccua

SEQ ID NO: 2223092 - RNA, 19 nt, Human
gcucucugugggcuggcag

SEQ ID NO: 2223093 - RNA, 20 nt, Human
gcucugaucauccacugugc

SEQ ID NO: 2223094 - RNA, 22 nt, Human
gcucugaagucacaucacagga

SEQ ID NO: 2223095 - RNA, 17 nt, Human
gcucugaaagccagcug

SEQ ID NO: 2223096 - RNA, 23 nt, Human
gcucugaagucacaucacaggac

SEQ ID NO: 2223097 - RNA, 21 nt, Human
gcucugaauuaguccuugcuu

SEQ ID NO: 2223098 - RNA, 20 nt, Human
gcucucugugggcuggcagu

SEQ ID NO: 2223099 - RNA, 14 nt, Human
gcucuggagacagc

SEQ ID NO: 2223100 - RNA, 18 nt, Human
gcucuggagacagcccca

SEQ ID NO: 2223101 - RNA, 21 nt, Human
gcucugcccauccugccccug

SEQ ID NO: 2223102 - RNA, 15 nt, Human
gcucuggagcccacu

SEQ ID NO: 2223103 - RNA, 16 nt, Human
gcucuggagcccacug

SEQ ID NO: 2223104 - RNA, 21 nt, Human
gcucugaucauccacugugcc

SEQ ID NO: 2223105 - RNA, 22 nt, Human
gcucugaucauccacugugcca

SEQ ID NO: 2223106 - RNA, 16 nt, Human
gcucugacagaaagca

SEQ ID NO: 2223107 - RNA, 23 nt, Human
gcucugccacccuaccuguucag

SEQ ID NO: 2223108 - RNA, 18 nt, Human
gcucugccacccuaccug

SEQ ID NO: 2223109 - RNA, 22 nt, Human
gcucugccacccuaccuguuca

SEQ ID NO: 2223110 - RNA, 15 nt, Human
gcucugcccauccug

SEQ ID NO: 2223111 - RNA, 14 nt, Human
ggaagaauuuuaaa

SEQ ID NO: 2223112 - RNA, 19 nt, Human
ggaagaauuuuaaaaauga

SEQ ID NO: 2223113 - RNA, 15 nt, Human
ggaagaccccaccca

SEQ ID NO: 2223114 - RNA, 19 nt, Human
ggaagaccccacccaagcu

SEQ ID NO: 2223115 - RNA, 23 nt, Human
ggaagaccccacccaagcuuggc

SEQ ID NO: 2223116 - RNA, 18 nt, Human
ggaagaagggagaagaaa

SEQ ID NO: 2223117 - RNA, 17 nt, Human
ggaagacuucaucccuc

SEQ ID NO: 2223118 - RNA, 20 nt, Human
ggaagacuucaucccucugg

SEQ ID NO: 2223119 - RNA, 16 nt, Human
ggaagacgaggcccuc

SEQ ID NO: 2223120 - RNA, 16 nt, Human
ggaagacgccugagcu

SEQ ID NO: 2223121 - RNA, 15 nt, Human
ggaagacgccugagc

SEQ ID NO: 2223122 - RNA, 14 nt, Human
ggaagaccuggcaa

SEQ ID NO: 2223123 - RNA, 15 nt, Human
ggaagacgaggcccu

SEQ ID NO: 2223124 - RNA, 17 nt, Human
ggaacugaacauuccag

SEQ ID NO: 2223125 - RNA, 19 nt, Human
ggaacacuccuucacagau

SEQ ID NO: 2223126 - RNA, 15 nt, Human
ggaacacuccuucac

SEQ ID NO: 2223127 - RNA, 15 nt, Human
ggaacugcaugcugc

SEQ ID NO: 2223128 - RNA, 21 nt, Human
ggaacugcagaccuguccucc

SEQ ID NO: 2223129 - RNA, 15 nt, Human
ggaacugcagaccug

SEQ ID NO: 2223130 - RNA, 17 nt, Human
ggaacugcagaccuguc

SEQ ID NO: 2223131 - RNA, 16 nt, Human
ggaacugcaugcugcu

SEQ ID NO: 2223132 - RNA, 20 nt, Human
ggaacucuggcuuccaggua

SEQ ID NO: 2223133 - RNA, 19 nt, Human
ggaacucuggcuuccaggu

SEQ ID NO: 2223134 - RNA, 13 nt, Human
ggaacugcagacc

SEQ ID NO: 2223135 - RNA, 14 nt, Human
ggaacugcagaccu

SEQ ID NO: 2223136 - RNA, 17 nt, Human
ggaacaccauaggucac

SEQ ID NO: 2223137 - RNA, 14 nt, Human
ggaacacggccaca

SEQ ID NO: 2223138 - RNA, 13 nt, Human
ggaacaccuccuc

SEQ ID NO: 2223139 - RNA, 13 nt, Human
ggaacaaucuaaa

SEQ ID NO: 2223140 - RNA, 14 nt, Human
ggaacacacuugga

SEQ ID NO: 2223141 - RNA, 23 nt, Human
ggaacaaggcaaggcugucaauu

SEQ ID NO: 2223142 - RNA, 16 nt, Human
ggaagaacauagaacu

SEQ ID NO: 2223143 - RNA, 14 nt, Human
ggaagaacauagaa

SEQ ID NO: 2223144 - RNA, 13 nt, Human
ggaagaacauaga

SEQ ID NO: 2223145 - RNA, 23 nt, Human
ggaagaaauuccuguagcaucuu

SEQ ID NO: 2223146 - RNA, 11 nt, Human
ggaagaacacc

SEQ ID NO: 2223147 - RNA, 18 nt, Human
ggaagaaauuccuguagc

SEQ ID NO: 2223148 - RNA, 19 nt, Human
ggaagaaauuccuguagca

SEQ ID NO: 2223149 - RNA, 14 nt, Human
ggaagaaaagagcu

SEQ ID NO: 2223150 - RNA, 16 nt, Human
ggaagaaagagaagga

SEQ ID NO: 2223151 - RNA, 19 nt, Human
ggaagaaagagaaggagcc

SEQ ID NO: 2223152 - RNA, 16 nt, Human
ggaagaaauuccugua

SEQ ID NO: 2223153 - RNA, 15 nt, Human
ggaacugcugggcuu

SEQ ID NO: 2223154 - RNA, 23 nt, Human
ggaacuuggggaguuaagaccug

SEQ ID NO: 2223155 - RNA, 14 nt, Human
ggaacugcugggcu

SEQ ID NO: 2223156 - RNA, 16 nt, Human
ggaagacaaugugaaa

SEQ ID NO: 2223157 - RNA, 14 nt, Human
ggaagacaauguga

SEQ ID NO: 2223158 - RNA, 21 nt, Human
ggaagaacggggcucuucuca

SEQ ID NO: 2223159 - RNA, 15 nt, Human
ggaagaagagggaga

SEQ ID NO: 2223160 - RNA, 16 nt, Human
ggaagaagagggagag

SEQ ID NO: 2223161 - RNA, 18 nt, Human
ggaagaagcuuaggcagg

SEQ ID NO: 2223162 - RNA, 19 nt, Human
ggaagaagcuuaggcaggg

SEQ ID NO: 2223163 - RNA, 13 nt, Human
ggaagaagggaga

SEQ ID NO: 2223164 - RNA, 14 nt, Human
ggaagaagggagaa

SEQ ID NO: 2223165 - RNA, 15 nt, Human
ggaagaagggagaag

SEQ ID NO: 2223166 - RNA, 16 nt, Human
ggaagaagggagaaga

SEQ ID NO: 2223167 - RNA, 17 nt, Human
ggaaaugucaacaagua

SEQ ID NO: 2223168 - RNA, 19 nt, Human
ggaaaugguaugagcugag

SEQ ID NO: 2223169 - RNA, 22 nt, Human
ggaaauggaaccccaccacugu

SEQ ID NO: 2223170 - RNA, 15 nt, Human
ggaaauggaauacug

SEQ ID NO: 2223171 - RNA, 19 nt, Human
ggaaauuaagaagaaacua

SEQ ID NO: 2223172 - RNA, 19 nt, Human
ggaaauucccuucaucugg

SEQ ID NO: 2223173 - RNA, 14 nt, Human
ggaaauuaagaaga

SEQ ID NO: 2223174 - RNA, 13 nt, Human
ggaaauggugccu

SEQ ID NO: 2223175 - RNA, 20 nt, Human
ggaaauucccuucaucugga

SEQ ID NO: 2223176 - RNA, 23 nt, Human
ggaaauugagauuagagggaggu

SEQ ID NO: 2223177 - RNA, 22 nt, Human
ggaaauucccuucaucuggaac

SEQ ID NO: 2223178 - RNA, 18 nt, Human
ggaacaaggagucagaca

SEQ ID NO: 2223179 - RNA, 15 nt, Human
ggaacaaggcaaggc

SEQ ID NO: 2223180 - RNA, 17 nt, Human
ggaacaaggcaaggcug

SEQ ID NO: 2223181 - RNA, 21 nt, Human
ggaacaaggcaaggcugucaa

SEQ ID NO: 2223182 - RNA, 16 nt, Human
ggaaaugaaugugugu

SEQ ID NO: 2223183 - RNA, 15 nt, Human
ggaaaugaaagaaag

SEQ ID NO: 2223184 - RNA, 18 nt, Human
ggaaaugaucaguuuuuu

SEQ ID NO: 2223185 - RNA, 15 nt, Human
ggaaaugcugggcug

SEQ ID NO: 2223186 - RNA, 14 nt, Human
ggaaaugggcagag

SEQ ID NO: 2223187 - RNA, 15 nt, Human
ggaaaccuuggugua

SEQ ID NO: 2223188 - RNA, 16 nt, Human
ggaaaugggcagagca

SEQ ID NO: 2223189 - RNA, 17 nt, Human
ggaaaugggcagagcag

SEQ ID NO: 2223190 - RNA, 18 nt, Human
ggaaaugggcagagcaga

SEQ ID NO: 2223191 - RNA, 22 nt, Human
ggaaaugggcagagcagagacc

SEQ ID NO: 2223192 - RNA, 15 nt, Human
gcuuugaucccugac

SEQ ID NO: 2223193 - RNA, 14 nt, Human
gcuuugaucccuga

SEQ ID NO: 2223194 - RNA, 14 nt, Human
gcuuugaucccuuc

SEQ ID NO: 2223195 - RNA, 17 nt, Human
gcuuugaucccuucuua

SEQ ID NO: 2223196 - RNA, 22 nt, Human
gcuuuuccuuuguuuuuaugaa

SEQ ID NO: 2223197 - RNA, 13 nt, Human
gcuuuucuccucu

SEQ ID NO: 2223198 - RNA, 16 nt, Human
gcuuuucuccucuuuc

SEQ ID NO: 2223199 - RNA, 17 nt, Human
gcuuuucuccucuuucc

SEQ ID NO: 2223200 - RNA, 23 nt, Human
gcuuuuccuuggggcaggcagug

SEQ ID NO: 2223201 - RNA, 22 nt, Human
gcuuuuccuuggggcaggcagu

SEQ ID NO: 2223202 - RNA, 14 nt, Human
gcuuuucucagcug

SEQ ID NO: 2223203 - RNA, 21 nt, Human
gcuuuuccuuggggcaggcag

SEQ ID NO: 2223204 - RNA, 20 nt, Human
gcuuuuccuuggggcaggca

SEQ ID NO: 2223205 - RNA, 14 nt, Human
gcuuuuccuugggg

SEQ ID NO: 2223206 - RNA, 15 nt, Human
gcuuuuggucugugu

SEQ ID NO: 2223207 - RNA, 18 nt, Human
gcuuuugucuaugggacu

SEQ ID NO: 2223208 - RNA, 14 nt, Human
gcuuuucugcccug

SEQ ID NO: 2223209 - RNA, 15 nt, Human
gcuuuucugcccugg

SEQ ID NO: 2223210 - RNA, 16 nt, Human
gcuuuucugcccuggc

SEQ ID NO: 2223211 - RNA, 22 nt, Human
ggaaacagacucgauucauauu

SEQ ID NO: 2223212 - RNA, 12 nt, Human
ggaaaccugccc

SEQ ID NO: 2223213 - RNA, 19 nt, Human
ggaaaccugcccugccuga

SEQ ID NO: 2223214 - RNA, 22 nt, Human
ggaaaccugcccugccugaggg

SEQ ID NO: 2223215 - RNA, 13 nt, Human
ggaaaccugcccu

SEQ ID NO: 2223216 - RNA, 14 nt, Human
ggaaaccugcccug

SEQ ID NO: 2223217 - RNA, 17 nt, Human
ggaaaccugcccugccu

SEQ ID NO: 2223218 - RNA, 18 nt, Human
ggaaaccugcccugccug

SEQ ID NO: 2223219 - RNA, 13 nt, Human
ggaaacagacucg

SEQ ID NO: 2223220 - RNA, 16 nt, Human
ggaaacccagcucugg

SEQ ID NO: 2223221 - RNA, 13 nt, Human
ggaaacaacagcu

SEQ ID NO: 2223222 - RNA, 22 nt, Human
ggaaacaaagcuuagcaggaga

SEQ ID NO: 2223223 - RNA, 23 nt, Human
ggaaacaaagcuuagcaggagag

SEQ ID NO: 2223224 - RNA, 16 nt, Human
ggaaacaacagcuuua

SEQ ID NO: 2223225 - RNA, 12 nt, Human
ggaaacaauaua

SEQ ID NO: 2223226 - RNA, 14 nt, Human
ggaaacaaagcuua

SEQ ID NO: 2223227 - RNA, 17 nt, Human
gcuuuuuuguuuuggcu

SEQ ID NO: 2223228 - RNA, 16 nt, Human
gcuuuuugucuuuucu

SEQ ID NO: 2223229 - RNA, 20 nt, Human
gcuuuuugagguggcacuuu

SEQ ID NO: 2223230 - RNA, 18 nt, Human
ggaaaauuuuaaaaauac

SEQ ID NO: 2223231 - RNA, 15 nt, Human
gcuuuuuuaucaugu

SEQ ID NO: 2223232 - RNA, 11 nt, Human
gcuuuuucuga

SEQ ID NO: 2223233 - RNA, 12 nt, Human
gcuuuuucugac

SEQ ID NO: 2223234 - RNA, 14 nt, Human
gcuuuuucugacuc

SEQ ID NO: 2223235 - RNA, 18 nt, Human
gcuuuuucugacuccagu

SEQ ID NO: 2223236 - RNA, 21 nt, Human
gcuuuuugagguggcacuuuu

SEQ ID NO: 2223237 - RNA, 18 nt, Human
gcuuuuuuaucaugugaa

SEQ ID NO: 2223238 - RNA, 20 nt, Human
gcuuuuuuaucaugugaaau

SEQ ID NO: 2223239 - RNA, 12 nt, Human
gcuuuugugcau

SEQ ID NO: 2223240 - RNA, 13 nt, Human
gcuuuuuaauugu

SEQ ID NO: 2223241 - RNA, 15 nt, Human
gcuuuuuauuucugc

SEQ ID NO: 2223242 - RNA, 19 nt, Human
gcuuuuuauuccuccugcu

SEQ ID NO: 2223243 - RNA, 20 nt, Human
gcuuuuuaauuguuguuucu

SEQ ID NO: 2223244 - RNA, 21 nt, Human
gcuuuuuaauuguuguuucuu

SEQ ID NO: 2223245 - RNA, 22 nt, Human
gcuuuuuaauuguuguuucuuu

SEQ ID NO: 2223246 - RNA, 21 nt, Human
gcuuuuuauuucugcauaugu

SEQ ID NO: 2223247 - RNA, 17 nt, Human
gcuuuuuauuucugcau

SEQ ID NO: 2223248 - RNA, 13 nt, Human
gcuuuuuccagag

SEQ ID NO: 2223249 - RNA, 22 nt, Human
gcuuccagugaggcucugcccu

SEQ ID NO: 2223250 - RNA, 13 nt, Human
gcuuucugcucag

SEQ ID NO: 2223251 - RNA, 13 nt, Human
gcuuucuggagag

SEQ ID NO: 2223252 - RNA, 11 nt, Human
gcuuucugucu

SEQ ID NO: 2223253 - RNA, 21 nt, Human
gcuuucugcucagcuucuccu

SEQ ID NO: 2223254 - RNA, 22 nt, Human
gcuuucuggaaaagaggaguuu

SEQ ID NO: 2223255 - RNA, 19 nt, Human
gcuuucugcucagcuucuc

SEQ ID NO: 2223256 - RNA, 18 nt, Human
gcuuucugcucagcuucu

SEQ ID NO: 2223257 - RNA, 15 nt, Human
gcuuucuguugucau

SEQ ID NO: 2223258 - RNA, 22 nt, Human
gcuuugagguggaagagggcug

SEQ ID NO: 2223259 - RNA, 19 nt, Human
gcuuugagguggaagaggg

SEQ ID NO: 2223260 - RNA, 15 nt, Human
gcuuucuauuguaca

SEQ ID NO: 2223261 - RNA, 17 nt, Human
gcuuucuauuguacaga

SEQ ID NO: 2223262 - RNA, 19 nt, Human
gcuuuccucaucaggccau

SEQ ID NO: 2223263 - RNA, 16 nt, Human
gcuuucccuuaucaaa

SEQ ID NO: 2223264 - RNA, 15 nt, Human
gcuuucccugccucu

SEQ ID NO: 2223265 - RNA, 15 nt, Human
gcuuuccccuguggg

SEQ ID NO: 2223266 - RNA, 16 nt, Human
gcuuuccccugugggg

SEQ ID NO: 2223267 - RNA, 17 nt, Human
gcuuuccccugugggga

SEQ ID NO: 2223268 - RNA, 22 nt, Human
gcuuuccccuguggggaucuca

SEQ ID NO: 2223269 - RNA, 16 nt, Human
gcuuuccucuuccuga

SEQ ID NO: 2223270 - RNA, 18 nt, Human
gcuuguaaauagcucagg

SEQ ID NO: 2223271 - RNA, 19 nt, Human
gcuuguaaauagcucaggu

SEQ ID NO: 2223272 - RNA, 21 nt, Human
gcuuuccccaugucucgacuc

SEQ ID NO: 2223273 - RNA, 14 nt, Human
gcuugaccugaggc

SEQ ID NO: 2223274 - RNA, 22 nt, Human
gcuuuccccaugucucgacuca

SEQ ID NO: 2223275 - RNA, 12 nt, Human
gcuuuccccugu

SEQ ID NO: 2223276 - RNA, 14 nt, Human
gcuuuccccugugg

SEQ ID NO: 2223277 - RNA, 17 nt, Human
gcuuguaaauagcucag

SEQ ID NO: 2223278 - RNA, 22 nt, Human
gcuugaccuuuaagagaaauga

SEQ ID NO: 2223279 - RNA, 23 nt, Human
gcuugaccgugaggccagagaca

SEQ ID NO: 2223280 - RNA, 18 nt, Human
gcuugaccuuuaagagaa

SEQ ID NO: 2223281 - RNA, 19 nt, Human
gcuucuuaauauaacugcc

SEQ ID NO: 2223282 - RNA, 19 nt, Human
gcuuccuggcaauagucaa

SEQ ID NO: 2223283 - RNA, 20 nt, Human
gcuuccugcguccuccucac

SEQ ID NO: 2223284 - RNA, 23 nt, Human
gcuuccagugaggcucugcccuu

SEQ ID NO: 2223285 - RNA, 12 nt, Human
gcuuccauucca

SEQ ID NO: 2223286 - RNA, 19 nt, Human
gcuuccaugauucuauuua

SEQ ID NO: 2223287 - RNA, 17 nt, Human
gcuuccauuugugugug

SEQ ID NO: 2223288 - RNA, 17 nt, Human
gcuuccaugagaacagc

SEQ ID NO: 2223289 - RNA, 14 nt, Human
gcuuccaugauucu

SEQ ID NO: 2223290 - RNA, 18 nt, Human
gcuuccaugauucuauuu

SEQ ID NO: 2223291 - RNA, 15 nt, Human
gcuuccaugauucua

SEQ ID NO: 2223292 - RNA, 21 nt, Human
gcuucuuaauauaacugccuu

SEQ ID NO: 2223293 - RNA, 22 nt, Human
gcuucuuaauauaacugccuua

SEQ ID NO: 2223294 - RNA, 19 nt, Human
gcuucuuaaucuuuucaca

SEQ ID NO: 2223295 - RNA, 21 nt, Human
gcuucuuaaucuuuucacaaa

SEQ ID NO: 2223296 - RNA, 12 nt, Human
gcuucuucagag

SEQ ID NO: 2223297 - RNA, 13 nt, Human
gcuugaaagaaaa

SEQ ID NO: 2223298 - RNA, 22 nt, Human
gcuucuuaaucuuuucacaaau

SEQ ID NO: 2223299 - RNA, 23 nt, Human
gcuucuuaaucuuuucacaaaua

SEQ ID NO: 2223300 - RNA, 15 nt, Human
gcuucuucagagacu

SEQ ID NO: 2223301 - RNA, 20 nt, Human
gcuugaaagaaaauaugcau

SEQ ID NO: 2223302 - RNA, 21 nt, Human
gcuugaagaucguuaguaucu

SEQ ID NO: 2223303 - RNA, 13 nt, Human
gcuugaacccagg

SEQ ID NO: 2223304 - RNA, 22 nt, Human
gcuugaagaucguuaguaucua

SEQ ID NO: 2223305 - RNA, 11 nt, Human
gcuugaagcca

SEQ ID NO: 2223306 - RNA, 12 nt, Human
gcuugaagccaa

SEQ ID NO: 2223307 - RNA, 14 nt, Human
gcuugaagccaaag

SEQ ID NO: 2223308 - RNA, 15 nt, Human
gcuugaagccaaaga

SEQ ID NO: 2223309 - RNA, 16 nt, Human
gcuugaagccaaagaa

SEQ ID NO: 2223310 - RNA, 14 nt, Human
gcuugaagccaagu

SEQ ID NO: 2223311 - RNA, 18 nt, Human
gcuugaagccaaagaaaa

SEQ ID NO: 2223312 - RNA, 20 nt, Human
gcuugaagccaaagaaaaau

SEQ ID NO: 2223313 - RNA, 15 nt, Human
gcuugacaacaucug

SEQ ID NO: 2223314 - RNA, 20 nt, Human
gcuugaccgugaggccagag

SEQ ID NO: 2223315 - RNA, 18 nt, Human
gcuucaaccuugagacag

SEQ ID NO: 2223316 - RNA, 17 nt, Human
gcuuauuuuuaaaauuu

SEQ ID NO: 2223317 - RNA, 22 nt, Human
gcuuauuuuuaaaauuuuaaua

SEQ ID NO: 2223318 - RNA, 12 nt, Human
gcuuauuuuaaa

SEQ ID NO: 2223319 - RNA, 16 nt, Human
gcuucaaauuguaagc

SEQ ID NO: 2223320 - RNA, 14 nt, Human
gcuucaaggauccu

SEQ ID NO: 2223321 - RNA, 16 nt, Human
gcuucaaaauagagaa

SEQ ID NO: 2223322 - RNA, 23 nt, Human
gcuucagggcgcacagcaugaga

SEQ ID NO: 2223323 - RNA, 14 nt, Human
gcuucaguggcagc

SEQ ID NO: 2223324 - RNA, 17 nt, Human
gcuucagguuaucgaaa

SEQ ID NO: 2223325 - RNA, 12 nt, Human
gcuucagguuau

SEQ ID NO: 2223326 - RNA, 19 nt, Human
gcuucagguuaucgaaaua

SEQ ID NO: 2223327 - RNA, 20 nt, Human
gcuucagguuaucgaaauaa

SEQ ID NO: 2223328 - RNA, 21 nt, Human
gcuucagguuaucgaaauaac

SEQ ID NO: 2223329 - RNA, 22 nt, Human
gcuucagguuaucgaaauaaca

SEQ ID NO: 2223330 - RNA, 15 nt, Human
gcuucaguggcagcu

SEQ ID NO: 2223331 - RNA, 14 nt, Human
gcuucaguggagaa

SEQ ID NO: 2223332 - RNA, 23 nt, Human
gcuucagguuaucgaaauaacaa

SEQ ID NO: 2223333 - RNA, 12 nt, Human
gcuuaaugaaaa

SEQ ID NO: 2223334 - RNA, 18 nt, Human
gcuuaaugacacuagcua

SEQ ID NO: 2223335 - RNA, 15 nt, Human
gcuuaaaaaucauug

SEQ ID NO: 2223336 - RNA, 18 nt, Human
gcuguuuuguucuguggu

SEQ ID NO: 2223337 - RNA, 17 nt, Human
gcuguuuucccugaccu

SEQ ID NO: 2223338 - RNA, 21 nt, Human
gcuguuuuaguuaaauuucug

SEQ ID NO: 2223339 - RNA, 21 nt, Human
gcuguuuguuugacaaagaaa

SEQ ID NO: 2223340 - RNA, 15 nt, Human
gcuguuuuccucccu

SEQ ID NO: 2223341 - RNA, 18 nt, Human
gcuguuuuccucccuucu

SEQ ID NO: 2223342 - RNA, 16 nt, Human
gcuguuuuccucccuu

SEQ ID NO: 2223343 - RNA, 22 nt, Human
gcuguuuuccucccuucugcua

SEQ ID NO: 2223344 - RNA, 13 nt, Human
gcuguuuugugga

SEQ ID NO: 2223345 - RNA, 21 nt, Human
gcuguuuuccucccuucugcu

SEQ ID NO: 2223346 - RNA, 20 nt, Human
gcuguuuuccucccuucugc

SEQ ID NO: 2223347 - RNA, 19 nt, Human
gcuguuuuguggauuuuug

SEQ ID NO: 2223348 - RNA, 13 nt, Human
gcuuacaagccag

SEQ ID NO: 2223349 - RNA, 19 nt, Human
gcuuacaagccagcuggag

SEQ ID NO: 2223350 - RNA, 12 nt, Human
gcuuaauguuua

SEQ ID NO: 2223351 - RNA, 14 nt, Human
gcuuaaugcuucuu

SEQ ID NO: 2223352 - RNA, 16 nt, Human
gcuuaaugcuucuuuc

SEQ ID NO: 2223353 - RNA, 14 nt, Human
gcuuaauguuuauu

SEQ ID NO: 2223354 - RNA, 17 nt, Human
gcuuaauguuuauuccu

SEQ ID NO: 2223355 - RNA, 23 nt, Human
gcuuaauguuuauuccugauaau

SEQ ID NO: 2223356 - RNA, 13 nt, Human
gcuguuggcuggg

SEQ ID NO: 2223357 - RNA, 13 nt, Human
gcuguugcugaau

SEQ ID NO: 2223358 - RNA, 13 nt, Human
gcuguuggcacuc

SEQ ID NO: 2223359 - RNA, 16 nt, Human
gcuguugcugaauagg

SEQ ID NO: 2223360 - RNA, 19 nt, Human
gcuguugcugaauaggcga

SEQ ID NO: 2223361 - RNA, 14 nt, Human
gcuguuggcugggg

SEQ ID NO: 2223362 - RNA, 16 nt, Human
gcuguuggcacucaca

SEQ ID NO: 2223363 - RNA, 22 nt, Human
gcuguuggcacucacagaccug

SEQ ID NO: 2223364 - RNA, 23 nt, Human
gcuguuggcacucacagaccugg

SEQ ID NO: 2223365 - RNA, 16 nt, Human
gcuguuggcagugagu

SEQ ID NO: 2223366 - RNA, 12 nt, Human
gcuguuugucau

SEQ ID NO: 2223367 - RNA, 20 nt, Human
gcuguuuguuugacaaagaa

SEQ ID NO: 2223368 - RNA, 22 nt, Human
gcuguuggcagugagugagccu

SEQ ID NO: 2223369 - RNA, 23 nt, Human
gcuguuggccucugcaaaggaaa

SEQ ID NO: 2223370 - RNA, 12 nt, Human
gcugugccucug

SEQ ID NO: 2223371 - RNA, 14 nt, Human
gcuguugcugaaua

SEQ ID NO: 2223372 - RNA, 15 nt, Human
gcuguugcugaauag

SEQ ID NO: 2223373 - RNA, 17 nt, Human
gcugugccucccaaaau

SEQ ID NO: 2223374 - RNA, 19 nt, Human
gcugugccacccugggcuc

SEQ ID NO: 2223375 - RNA, 21 nt, Human
gcugugccacccugggcucug

SEQ ID NO: 2223376 - RNA, 22 nt, Human
gcugugccacccugggcucugu

SEQ ID NO: 2223377 - RNA, 16 nt, Human
gcugugcccucuugau

SEQ ID NO: 2223378 - RNA, 12 nt, Human
gcugugccaccc

SEQ ID NO: 2223379 - RNA, 16 nt, Human
gcugugcagccugucc

SEQ ID NO: 2223380 - RNA, 13 nt, Human
gcugugccacccu

SEQ ID NO: 2223381 - RNA, 14 nt, Human
gcugugccacccug

SEQ ID NO: 2223382 - RNA, 15 nt, Human
gcugugccacccugg

SEQ ID NO: 2223383 - RNA, 17 nt, Human
gcugugccacccugggc

SEQ ID NO: 2223384 - RNA, 18 nt, Human
gcugugccacccugggcu

SEQ ID NO: 2223385 - RNA, 13 nt, Human
gcuggaucuguga

SEQ ID NO: 2223386 - RNA, 23 nt, Human
gcuggaucacagcugcuuucugu

SEQ ID NO: 2223387 - RNA, 14 nt, Human
gcuggauaaaauga

SEQ ID NO: 2223388 - RNA, 19 nt, Human
gcuggaucacagcugcuuu

SEQ ID NO: 2223389 - RNA, 15 nt, Human
gcuggauaaaaugag

SEQ ID NO: 2223390 - RNA, 16 nt, Human
gcuggaguuucaugua

SEQ ID NO: 2223391 - RNA, 20 nt, Human
gcuggaguucagugguguga

SEQ ID NO: 2223392 - RNA, 20 nt, Human
gcuggagugcagugguguga

SEQ ID NO: 2223393 - RNA, 22 nt, Human
gcuggagccuguguaacagcuc

SEQ ID NO: 2223394 - RNA, 23 nt, Human
gcuggagccuguguaacagcucc

SEQ ID NO: 2223395 - RNA, 23 nt, Human
gcugguucaggguuggccccugc

SEQ ID NO: 2223396 - RNA, 24 nt, Human
gcugguugucauuuuugcaguaga

SEQ ID NO: 2223397 - RNA, 18 nt, Human
gcugguuggagagcuaga

SEQ ID NO: 2223398 - RNA, 15 nt, Human
gcugguuuccucauu

SEQ ID NO: 2223399 - RNA, 15 nt, Human
gcugguugcugugug

SEQ ID NO: 2223400 - RNA, 16 nt, Human
gcugguugcugugugg

SEQ ID NO: 2223401 - RNA, 16 nt, Human
gcugguuggagagcua

SEQ ID NO: 2223402 - RNA, 17 nt, Human
gcugguuggagagcuag

SEQ ID NO: 2223403 - RNA, 12 nt, Human
gcugguucugua

SEQ ID NO: 2223404 - RNA, 13 nt, Human
gcugguugcugug

SEQ ID NO: 2223405 - RNA, 14 nt, Human
gcugguugcugugu

SEQ ID NO: 2223406 - RNA, 20 nt, Human
gcugguucggauuuggggug

SEQ ID NO: 2223407 - RNA, 21 nt, Human
gcugguucggauuuggggugg

SEQ ID NO: 2223408 - RNA, 13 nt, Human
gcuguauuuuaaa

SEQ ID NO: 2223409 - RNA, 13 nt, Human
gcuguauucuucu

SEQ ID NO: 2223410 - RNA, 17 nt, Human
gcuguauugaaucaugu

SEQ ID NO: 2223411 - RNA, 18 nt, Human
gcuguauugaaucaugua

SEQ ID NO: 2223412 - RNA, 19 nt, Human
gcuguauuagucacagaga

SEQ ID NO: 2223413 - RNA, 12 nt, Human
gcuguauuuuaa

SEQ ID NO: 2223414 - RNA, 23 nt, Human
gcugguuuuccuaaaugcaguga

SEQ ID NO: 2223415 - RNA, 14 nt, Human
gcugguuuuccuaa

SEQ ID NO: 2223416 - RNA, 12 nt, Human
gcugguuuuccu

SEQ ID NO: 2223417 - RNA, 20 nt, Human
gcugguuuuguaagaugcug

SEQ ID NO: 2223418 - RNA, 21 nt, Human
gcugguuuuguaagaugcugg

SEQ ID NO: 2223419 - RNA, 22 nt, Human
gcuguacaucuauuuuggauug

SEQ ID NO: 2223420 - RNA, 20 nt, Human
gcuguacaucuauuuuggau

SEQ ID NO: 2223421 - RNA, 16 nt, Human
gcuguacaucuauuuu

SEQ ID NO: 2223422 - RNA, 12 nt, Human
gcuguacaucua

SEQ ID NO: 2223423 - RNA, 13 nt, Human
gcuguagaaggag

SEQ ID NO: 2223424 - RNA, 20 nt, Human
gcuguaggacucgcagucag

SEQ ID NO: 2223425 - RNA, 20 nt, Human
gcuguagacauuugcuauga

SEQ ID NO: 2223426 - RNA, 23 nt, Human
gcuguacaucuauuuuggauugu

SEQ ID NO: 2223427 - RNA, 20 nt, Human
gcuguacuucgucuucuaau

SEQ ID NO: 2223428 - RNA, 17 nt, Human
ggcucacugcagccuca

SEQ ID NO: 2223429 - RNA, 19 nt, Human
ggcucacugcauccuccgc

SEQ ID NO: 2223430 - RNA, 16 nt, Human
ggcucacugcauccuc

SEQ ID NO: 2223431 - RNA, 16 nt, Human
ggcgugguggcgggca

SEQ ID NO: 2223432 - RNA, 18 nt, Human
ggcguggucacugcuguc

SEQ ID NO: 2223433 - RNA, 19 nt, Human
ggcguggucacugcuguca

SEQ ID NO: 2223434 - RNA, 17 nt, Human
ggcguggucaagcacuc

SEQ ID NO: 2223435 - RNA, 15 nt, Human
ggcguggucacugcu

SEQ ID NO: 2223436 - RNA, 17 nt, Human
ggcguggucacugcugu

SEQ ID NO: 2223437 - RNA, 16 nt, Human
ggcucacugcagccuc

SEQ ID NO: 2223438 - RNA, 15 nt, Human
ggcgucugucuucaa

SEQ ID NO: 2223439 - RNA, 21 nt, Human
ggcguccgcgcgccagcacag

SEQ ID NO: 2223440 - RNA, 16 nt, Human
ggcgucuguauauuuu

SEQ ID NO: 2223441 - RNA, 19 nt, Human
ggcgucagccuccagccuc

SEQ ID NO: 2223442 - RNA, 20 nt, Human
ggcgucagccuccagccucu

SEQ ID NO: 2223443 - RNA, 22 nt, Human
ggcgucagccuccagccucugu

SEQ ID NO: 2223444 - RNA, 14 nt, Human
ggcgugcaguggug

SEQ ID NO: 2223445 - RNA, 12 nt, Human
ggcguggagcug

SEQ ID NO: 2223446 - RNA, 20 nt, Human
ggcguggagagcccggcgcc

SEQ ID NO: 2223447 - RNA, 16 nt, Human
ggcgucuguucccccu

SEQ ID NO: 2223448 - RNA, 15 nt, Human
ggcguggagcugccu

SEQ ID NO: 2223449 - RNA, 19 nt, Human
ggcgugcaguggugcgauc

SEQ ID NO: 2223450 - RNA, 12 nt, Human
ggcucagccugg

SEQ ID NO: 2223451 - RNA, 10 nt, Human
ggcucagccu

SEQ ID NO: 2223452 - RNA, 15 nt, Human
ggcucagccagcacu

SEQ ID NO: 2223453 - RNA, 19 nt, Human
ggcucagcaaaagaugcuu

SEQ ID NO: 2223454 - RNA, 13 nt, Human
ggcucacugccag

SEQ ID NO: 2223455 - RNA, 14 nt, Human
ggcucacugccagg

SEQ ID NO: 2223456 - RNA, 23 nt, Human
ggcucagcaaaagaugcuucuca

SEQ ID NO: 2223457 - RNA, 21 nt, Human
ggcucagcggggacagcuccu

SEQ ID NO: 2223458 - RNA, 22 nt, Human
ggcucagcggggacagcuccuu

SEQ ID NO: 2223459 - RNA, 23 nt, Human
ggcucagcggggacagcuccuuc

SEQ ID NO: 2223460 - RNA, 11 nt, Human
ggcucagccug

SEQ ID NO: 2223461 - RNA, 17 nt, Human
ggccucauuacuuuacc

SEQ ID NO: 2223462 - RNA, 20 nt, Human
ggccuccagaacucacuggg

SEQ ID NO: 2223463 - RNA, 15 nt, Human
ggccuccagaacuca

SEQ ID NO: 2223464 - RNA, 13 nt, Human
ggccuccauccug

SEQ ID NO: 2223465 - RNA, 19 nt, Human
ggccucauguggcuggaag

SEQ ID NO: 2223466 - RNA, 20 nt, Human
ggccucauguggcuggaaga

SEQ ID NO: 2223467 - RNA, 15 nt, Human
ggccucauguggcug

SEQ ID NO: 2223468 - RNA, 17 nt, Human
ggccggccaggugggcg

SEQ ID NO: 2223469 - RNA, 16 nt, Human
ggccucauguggcugg

SEQ ID NO: 2223470 - RNA, 17 nt, Human
ggccucauguggcugga

SEQ ID NO: 2223471 - RNA, 19 nt, Human
ggccgcuguucacccacag

SEQ ID NO: 2223472 - RNA, 16 nt, Human
ggccgcuguucaccca

SEQ ID NO: 2223473 - RNA, 23 nt, Human
ggccgcugccacccaccucccug

SEQ ID NO: 2223474 - RNA, 22 nt, Human
ggccgcugccacccaccucccu

SEQ ID NO: 2223475 - RNA, 15 nt, Human
ggccggccagccccu

SEQ ID NO: 2223476 - RNA, 20 nt, Human
ggccggagucagugccaggu

SEQ ID NO: 2223477 - RNA, 14 nt, Human
ggccggccaggugg

SEQ ID NO: 2223478 - RNA, 15 nt, Human
ggccggccagguggg

SEQ ID NO: 2223479 - RNA, 16 nt, Human
ggccggccaggugggc

SEQ ID NO: 2223480 - RNA, 12 nt, Human
ggccugagcugg

SEQ ID NO: 2223481 - RNA, 13 nt, Human
ggccugaggauga

SEQ ID NO: 2223482 - RNA, 18 nt, Human
ggccugaggaugagcugg

SEQ ID NO: 2223483 - RNA, 19 nt, Human
ggccugaggaugagcugga

SEQ ID NO: 2223484 - RNA, 22 nt, Human
ggccugaggaugagcuggaagg

SEQ ID NO: 2223485 - RNA, 18 nt, Human
ggccugaggucucgcuga

SEQ ID NO: 2223486 - RNA, 21 nt, Human
ggccugaggucucgcugaugc

SEQ ID NO: 2223487 - RNA, 15 nt, Human
ggccugagcugggau

SEQ ID NO: 2223488 - RNA, 21 nt, Human
ggcggugggcacccacccugg

SEQ ID NO: 2223489 - RNA, 22 nt, Human
ggcggugggcacccacccuggg

SEQ ID NO: 2223490 - RNA, 19 nt, Human
ggcgaccccgucacagccu

SEQ ID NO: 2223491 - RNA, 20 nt, Human
ggcgaccccgucacagccuc

SEQ ID NO: 2223492 - RNA, 13 nt, Human
ggcgucagccucc

SEQ ID NO: 2223493 - RNA, 14 nt, Human
ggcgucagccucca

SEQ ID NO: 2223494 - RNA, 16 nt, Human
ggcgucagccuccagc

SEQ ID NO: 2223495 - RNA, 17 nt, Human
ggcgucagccuccagcc

SEQ ID NO: 2223496 - RNA, 18 nt, Human
ggcgucagccuccagccu

SEQ ID NO: 2223497 - RNA, 12 nt, Human
ggccuuuuccua

SEQ ID NO: 2223498 - RNA, 14 nt, Human
ggccuuuggcuuca

SEQ ID NO: 2223499 - RNA, 18 nt, Human
ggcgacaguuuuccuucu

SEQ ID NO: 2223500 - RNA, 16 nt, Human
ggcgaagcccaggccc

SEQ ID NO: 2223501 - RNA, 23 nt, Human
ggcgacagagcgagagucugucu

SEQ ID NO: 2223502 - RNA, 20 nt, Human
ggcgacagagcgagacuccg

SEQ ID NO: 2223503 - RNA, 15 nt, Human
ggcgaaucauuuguu

SEQ ID NO: 2223504 - RNA, 14 nt, Human
ggccuuuaaaauuu

SEQ ID NO: 2223505 - RNA, 22 nt, Human
ggccuuuaaaauuuuuuuagaa

SEQ ID NO: 2223506 - RNA, 12 nt, Human
ggccuuguccca

SEQ ID NO: 2223507 - RNA, 13 nt, Human
ggccuuuggcuuc

SEQ ID NO: 2223508 - RNA, 23 nt, Human
ggccuuugagcccacaaagccuu

SEQ ID NO: 2223509 - RNA, 16 nt, Human
ggccuuucugugugug

SEQ ID NO: 2223510 - RNA, 19 nt, Human
ggccuuugagcccacaaag

SEQ ID NO: 2223511 - RNA, 16 nt, Human
ggccuugcccagagau

SEQ ID NO: 2223512 - RNA, 15 nt, Human
ggccuugcccagaga

SEQ ID NO: 2223513 - RNA, 22 nt, Human
ggccuugcgguauccgccccca

SEQ ID NO: 2223514 - RNA, 14 nt, Human
ggccuugcccagag

SEQ ID NO: 2223515 - RNA, 13 nt, Human
ggccuugcccaga

SEQ ID NO: 2223516 - RNA, 16 nt, Human
ggccuugaguccccca

SEQ ID NO: 2223517 - RNA, 15 nt, Human
ggccuucucugaagg

SEQ ID NO: 2223518 - RNA, 16 nt, Human
ggccuucucugaagga

SEQ ID NO: 2223519 - RNA, 23 nt, Human
ggccugcugggcucuccaccuca

SEQ ID NO: 2223520 - RNA, 22 nt, Human
ggccugcugggcucuccaccuc

SEQ ID NO: 2223521 - RNA, 10 nt, Human
ggccugcugu

SEQ ID NO: 2223522 - RNA, 19 nt, Human
ggccugcugugauuccacu

SEQ ID NO: 2223523 - RNA, 16 nt, Human
ggccuggaagacagag

SEQ ID NO: 2223524 - RNA, 17 nt, Human
ggccugcuuccugucuu

SEQ ID NO: 2223525 - RNA, 13 nt, Human
ggccuggaccugc

SEQ ID NO: 2223526 - RNA, 18 nt, Human
ggccuggacuuuccugca

SEQ ID NO: 2223527 - RNA, 21 nt, Human
ggccuggacuuuccugcaacu

SEQ ID NO: 2223528 - RNA, 15 nt, Human
ggccuggaccugccu

SEQ ID NO: 2223529 - RNA, 16 nt, Human
ggccuggaccugccuc

SEQ ID NO: 2223530 - RNA, 21 nt, Human
ggccuggaccugccuccugcc

SEQ ID NO: 2223531 - RNA, 22 nt, Human
ggccuggaccugccuccugccu

SEQ ID NO: 2223532 - RNA, 21 nt, Human
ggccugcugggcucuccaccu

SEQ ID NO: 2223533 - RNA, 18 nt, Human
ggccugaugacagagcga

SEQ ID NO: 2223534 - RNA, 20 nt, Human
ggccugcugggcucuccacc

SEQ ID NO: 2223535 - RNA, 14 nt, Human
ggccugaugacaga

SEQ ID NO: 2223536 - RNA, 20 nt, Human
ggccugaucagaccacggcu

SEQ ID NO: 2223537 - RNA, 21 nt, Human
ggccugaggucuggcugcuug

SEQ ID NO: 2223538 - RNA, 22 nt, Human
ggccugaggucucgcugaugcu

SEQ ID NO: 2223539 - RNA, 19 nt, Human
ggccugaggucuggcugcu

SEQ ID NO: 2223540 - RNA, 18 nt, Human
ggccugaucagaccacgg

SEQ ID NO: 2223541 - RNA, 15 nt, Human
ggccugaucagacca

SEQ ID NO: 2223542 - RNA, 18 nt, Human
ggccuggccaggagcucu

SEQ ID NO: 2223543 - RNA, 17 nt, Human
ggccuggccaggagcuc

SEQ ID NO: 2223544 - RNA, 16 nt, Human
ggccuggccaggagcu

SEQ ID NO: 2223545 - RNA, 15 nt, Human
ggccuggccaggagc

SEQ ID NO: 2223546 - RNA, 14 nt, Human
ggccuggccaggag

SEQ ID NO: 2223547 - RNA, 18 nt, Human
ggccuggagauccuccug

SEQ ID NO: 2223548 - RNA, 19 nt, Human
ggccuggagauccuccugc

SEQ ID NO: 2223549 - RNA, 21 nt, Human
ggccuggccagaugcaccagc

SEQ ID NO: 2223550 - RNA, 11 nt, Human
ggccuggagau

SEQ ID NO: 2223551 - RNA, 14 nt, Human
ggccuggagauccu

SEQ ID NO: 2223552 - RNA, 15 nt, Human
ggccuggagauccuc

SEQ ID NO: 2223553 - RNA, 17 nt, Human
ggccuggagauccuccu

SEQ ID NO: 2223554 - RNA, 23 nt, Human
ggccuggccaggagcucuucagg

SEQ ID NO: 2223555 - RNA, 13 nt, Human
ggccuggccaggc

SEQ ID NO: 2223556 - RNA, 14 nt, Human
ggccuggccaggca

SEQ ID NO: 2223557 - RNA, 22 nt, Human
ggccuggccagggccuggaaga

SEQ ID NO: 2223558 - RNA, 17 nt, Human
ggccuggccagggccug

SEQ ID NO: 2223559 - RNA, 18 nt, Human
ggccuggccagggccugg

SEQ ID NO: 2223560 - RNA, 20 nt, Human
ggccuguggaucaaauccag

SEQ ID NO: 2223561 - RNA, 23 nt, Human
ggccuggcccacagcaggugcug

SEQ ID NO: 2223562 - RNA, 18 nt, Human
ggccuguggccugugucc

SEQ ID NO: 2223563 - RNA, 20 nt, Human
ggccuguggccuguguccca

SEQ ID NO: 2223564 - RNA, 17 nt, Human
ggccugugggagccugc

SEQ ID NO: 2223565 - RNA, 20 nt, Human
ggccugugggagccugcaaa

SEQ ID NO: 2223566 - RNA, 21 nt, Human
ggccugugucuaguuguuuga

SEQ ID NO: 2223567 - RNA, 20 nt, Human
ggccugugucccaugaccca

SEQ ID NO: 2223568 - RNA, 22 nt, Human
ggccugugugugaaaggaagcu

SEQ ID NO: 2223569 - RNA, 21 nt, Human
ggccugugucccaugacccac

SEQ ID NO: 2223570 - RNA, 22 nt, Human
ggccugugucccaugacccacc

SEQ ID NO: 2223571 - RNA, 12 nt, Human
ggccuucucuga

SEQ ID NO: 2223572 - RNA, 23 nt, Human
ggccuucggccuccauccugagg

SEQ ID NO: 2223573 - RNA, 12 nt, Human
ggccaaaccucu

SEQ ID NO: 2223574 - RNA, 17 nt, Human
ggccaaacucaccugcc

SEQ ID NO: 2223575 - RNA, 23 nt, Human
ggccagagagccuggugcugcug

SEQ ID NO: 2223576 - RNA, 16 nt, Human
ggccaaaccucuguuc

SEQ ID NO: 2223577 - RNA, 15 nt, Human
ggccaaaccucuguu

SEQ ID NO: 2223578 - RNA, 21 nt, Human
ggccaaacucaccugccccuc

SEQ ID NO: 2223579 - RNA, 13 nt, Human
ggccagagccagg

SEQ ID NO: 2223580 - RNA, 12 nt, Human
ggccagagccag

SEQ ID NO: 2223581 - RNA, 11 nt, Human
ggccagagcca

SEQ ID NO: 2223582 - RNA, 22 nt, Human
ggccagagagccuggugcugcu

SEQ ID NO: 2223583 - RNA, 22 nt, Human
ggccagagcuacccgcagaguu

SEQ ID NO: 2223584 - RNA, 14 nt, Human
ggccagagccaggg

SEQ ID NO: 2223585 - RNA, 22 nt, Human
ggccagaggaacuguccagaga

SEQ ID NO: 2223586 - RNA, 21 nt, Human
ggccagagcugggaggcaugg

SEQ ID NO: 2223587 - RNA, 21 nt, Human
ggccagaggaacuguccagag

SEQ ID NO: 2223588 - RNA, 14 nt, Human
ggccagagcuggga

SEQ ID NO: 2223589 - RNA, 16 nt, Human
ggccagagcugggagg

SEQ ID NO: 2223590 - RNA, 17 nt, Human
ggccagagcugggaggc

SEQ ID NO: 2223591 - RNA, 13 nt, Human
ggccagcagcuug

SEQ ID NO: 2223592 - RNA, 12 nt, Human
ggccagcagcuu

SEQ ID NO: 2223593 - RNA, 11 nt, Human
ggccagccagg

SEQ ID NO: 2223594 - RNA, 12 nt, Human
ggccagccaggc

SEQ ID NO: 2223595 - RNA, 16 nt, Human
ggccagaggcccccag

SEQ ID NO: 2223596 - RNA, 18 nt, Human
ggccagaggcccccagcc

SEQ ID NO: 2223597 - RNA, 16 nt, Human
ggccaggcuggucuca

SEQ ID NO: 2223598 - RNA, 18 nt, Human
ggccaggcuggucucaaa

SEQ ID NO: 2223599 - RNA, 18 nt, Human
ggccagggagaagcuccu

SEQ ID NO: 2223600 - RNA, 17 nt, Human
ggccagggagaagcucc

SEQ ID NO: 2223601 - RNA, 16 nt, Human
ggccagggagaagcuc

SEQ ID NO: 2223602 - RNA, 15 nt, Human
ggccagggagaagcu

SEQ ID NO: 2223603 - RNA, 15 nt, Human
ggccagccccggccc

SEQ ID NO: 2223604 - RNA, 12 nt, Human
ggccaggcuggu

SEQ ID NO: 2223605 - RNA, 15 nt, Human
ggccagccccaccca

SEQ ID NO: 2223606 - RNA, 14 nt, Human
ggccagccccaccc

SEQ ID NO: 2223607 - RNA, 13 nt, Human
ggccagccccacc

SEQ ID NO: 2223608 - RNA, 18 nt, Human
ggccagccccacagccca

SEQ ID NO: 2223609 - RNA, 19 nt, Human
ggccagccccacagcccac

SEQ ID NO: 2223610 - RNA, 15 nt, Human
ggccagccaugucug

SEQ ID NO: 2223611 - RNA, 13 nt, Human
ggccagccccaca

SEQ ID NO: 2223612 - RNA, 14 nt, Human
ggccagccccacag

SEQ ID NO: 2223613 - RNA, 15 nt, Human
ggccagccccacagc

SEQ ID NO: 2223614 - RNA, 14 nt, Human
ggccagccaugucu

SEQ ID NO: 2223615 - RNA, 16 nt, Human
ggccagccaggcgggc

SEQ ID NO: 2223616 - RNA, 13 nt, Human
ggccagccaggcg

SEQ ID NO: 2223617 - RNA, 14 nt, Human
ggccagccaggcgg

SEQ ID NO: 2223618 - RNA, 21 nt, Human
ggccagccccacccaggaggg

SEQ ID NO: 2223619 - RNA, 23 nt, Human
ggccagccccacagcccacgucc

SEQ ID NO: 2223620 - RNA, 11 nt, Human
ggccagccccg

SEQ ID NO: 2223621 - RNA, 20 nt, Human
ggccagccccacccaggagg

SEQ ID NO: 2223622 - RNA, 16 nt, Human
ggccagccccacccag

SEQ ID NO: 2223623 - RNA, 14 nt, Human
ggccaggcuggucu

SEQ ID NO: 2223624 - RNA, 20 nt, Human
ggccauccuucccugucugc

SEQ ID NO: 2223625 - RNA, 23 nt, Human
ggccauccggcccccagagcgcc

SEQ ID NO: 2223626 - RNA, 15 nt, Human
ggccauccuguccca

SEQ ID NO: 2223627 - RNA, 19 nt, Human
ggccaucucuggaugccug

SEQ ID NO: 2223628 - RNA, 18 nt, Human
ggccaucuccacccccag

SEQ ID NO: 2223629 - RNA, 23 nt, Human
ggccaucuccacccccagcugcu

SEQ ID NO: 2223630 - RNA, 22 nt, Human
ggccaucugggcuccuccaggg

SEQ ID NO: 2223631 - RNA, 17 nt, Human
ggccaucuuccaggugg

SEQ ID NO: 2223632 - RNA, 18 nt, Human
ggccaucuuccagguggg

SEQ ID NO: 2223633 - RNA, 19 nt, Human
ggccaucuuccaggugggg

SEQ ID NO: 2223634 - RNA, 16 nt, Human
ggccaugagcuccaga

SEQ ID NO: 2223635 - RNA, 22 nt, Human
ggccaucuuccaggugggguga

SEQ ID NO: 2223636 - RNA, 14 nt, Human
ggccaugccucagc

SEQ ID NO: 2223637 - RNA, 21 nt, Human
ggccaugauucgcccaaagcc

SEQ ID NO: 2223638 - RNA, 22 nt, Human
ggccaugauggcaacagaucug

SEQ ID NO: 2223639 - RNA, 18 nt, Human
ggccaugauggcaacaga

SEQ ID NO: 2223640 - RNA, 22 nt, Human
ggccaugagcuccagaccccca

SEQ ID NO: 2223641 - RNA, 21 nt, Human
ggccaugagcuccagaccccc

SEQ ID NO: 2223642 - RNA, 18 nt, Human
ggccaugagcuccagacc

SEQ ID NO: 2223643 - RNA, 17 nt, Human
ggccaugagcuccagac

SEQ ID NO: 2223644 - RNA, 21 nt, Human
ggccaugaggccucaguggac

SEQ ID NO: 2223645 - RNA, 15 nt, Human
ggccaugauggcaac

SEQ ID NO: 2223646 - RNA, 18 nt, Human
ggccagggcccugcagag

SEQ ID NO: 2223647 - RNA, 12 nt, Human
ggccagggccug

SEQ ID NO: 2223648 - RNA, 17 nt, Human
ggccagggccuggaaga

SEQ ID NO: 2223649 - RNA, 17 nt, Human
ggccagggcccugcaga

SEQ ID NO: 2223650 - RNA, 16 nt, Human
ggccagggcccugcag

SEQ ID NO: 2223651 - RNA, 13 nt, Human
ggccagggcccug

SEQ ID NO: 2223652 - RNA, 23 nt, Human
ggccagggccccucacccugccu

SEQ ID NO: 2223653 - RNA, 13 nt, Human
ggccagggcagag

SEQ ID NO: 2223654 - RNA, 19 nt, Human
ggccagggccuggaagaca

SEQ ID NO: 2223655 - RNA, 23 nt, Human
ggccagggccuggaagacagaga

SEQ ID NO: 2223656 - RNA, 19 nt, Human
ggccagggcuauagcucag

SEQ ID NO: 2223657 - RNA, 20 nt, Human
ggccagggcuauagcucagg

SEQ ID NO: 2223658 - RNA, 14 nt, Human
ggccaucccacaag

SEQ ID NO: 2223659 - RNA, 19 nt, Human
ggccauccggcccccagag

SEQ ID NO: 2223660 - RNA, 22 nt, Human
ggccauccggcccccagagcgc

SEQ ID NO: 2223661 - RNA, 17 nt, Human
ggccauagcuccugcuc

SEQ ID NO: 2223662 - RNA, 22 nt, Human
ggccauacuggccucgccuggc

SEQ ID NO: 2223663 - RNA, 23 nt, Human
ggccauacuggccucgccuggcc

SEQ ID NO: 2223664 - RNA, 22 nt, Human
ggccagugucugucccgggguc

SEQ ID NO: 2223665 - RNA, 23 nt, Human
ggccagugucugucccggggucc

SEQ ID NO: 2223666 - RNA, 16 nt, Human
ggccauacuggccucg

SEQ ID NO: 2223667 - RNA, 16 nt, Human
ggccagugugacaagg

SEQ ID NO: 2223668 - RNA, 19 nt, Human
ggccaguggcuggaucugu

SEQ ID NO: 2223669 - RNA, 13 nt, Human
ggccagugucugu

SEQ ID NO: 2223670 - RNA, 20 nt, Human
ggcauccuuccucacaccag

SEQ ID NO: 2223671 - RNA, 13 nt, Human
ggcauccugugaa

SEQ ID NO: 2223672 - RNA, 21 nt, Human
ggcaucuccugugcaugggug

SEQ ID NO: 2223673 - RNA, 15 nt, Human
ggcaucucuaauugg

SEQ ID NO: 2223674 - RNA, 17 nt, Human
ggcaucuccugugcaug

SEQ ID NO: 2223675 - RNA, 16 nt, Human
ggcaucuccugugcau

SEQ ID NO: 2223676 - RNA, 18 nt, Human
ggcaucucuaauuggaag

SEQ ID NO: 2223677 - RNA, 18 nt, Human
ggcaucccaguggccuca

SEQ ID NO: 2223678 - RNA, 15 nt, Human
ggcaucccaggggac

SEQ ID NO: 2223679 - RNA, 21 nt, Human
ggcaucccaguggccucaacc

SEQ ID NO: 2223680 - RNA, 20 nt, Human
ggcauccucagguggucagg

SEQ ID NO: 2223681 - RNA, 18 nt, Human
ggcaucugccccuccccc

SEQ ID NO: 2223682 - RNA, 16 nt, Human
ggcaucugccccuccc

SEQ ID NO: 2223683 - RNA, 19 nt, Human
ggcaucugccccuccccca

SEQ ID NO: 2223684 - RNA, 22 nt, Human
ggcaucugcacccucgaugaag

SEQ ID NO: 2223685 - RNA, 14 nt, Human
ggcaucugccccuc

SEQ ID NO: 2223686 - RNA, 15 nt, Human
ggcaucugcacccuc

SEQ ID NO: 2223687 - RNA, 19 nt, Human
ggcaucuuugccuugggcu

SEQ ID NO: 2223688 - RNA, 17 nt, Human
ggcaucuuugccuuggg

SEQ ID NO: 2223689 - RNA, 16 nt, Human
ggcaucuuugccuugg

SEQ ID NO: 2223690 - RNA, 21 nt, Human
ggcaucuuugccuugggcugc

SEQ ID NO: 2223691 - RNA, 15 nt, Human
ggcauuuuuauuuua

SEQ ID NO: 2223692 - RNA, 18 nt, Human
ggcauuuuacuguacaga

SEQ ID NO: 2223693 - RNA, 22 nt, Human
ggcauauccaccaccucccuca

SEQ ID NO: 2223694 - RNA, 17 nt, Human
ggcauaggccugggugc

SEQ ID NO: 2223695 - RNA, 16 nt, Human
ggcauaggccugggug

SEQ ID NO: 2223696 - RNA, 15 nt, Human
ggcauaggccugggu

SEQ ID NO: 2223697 - RNA, 14 nt, Human
ggcauaggccuggg

SEQ ID NO: 2223698 - RNA, 21 nt, Human
ggcauagcccagacacagaag

SEQ ID NO: 2223699 - RNA, 17 nt, Human
ggcaucacagggcagag

SEQ ID NO: 2223700 - RNA, 16 nt, Human
ggcaucacagggcaga

SEQ ID NO: 2223701 - RNA, 14 nt, Human
ggcaucacagggca

SEQ ID NO: 2223702 - RNA, 13 nt, Human
ggcaucacagggc

SEQ ID NO: 2223703 - RNA, 18 nt, Human
ggcauccaguaucuugaa

SEQ ID NO: 2223704 - RNA, 21 nt, Human
ggcauagcuccccgcuucugc

SEQ ID NO: 2223705 - RNA, 20 nt, Human
ggcagugguaagcucuggcu

SEQ ID NO: 2223706 - RNA, 19 nt, Human
ggcauagcccagacacaga

SEQ ID NO: 2223707 - RNA, 20 nt, Human
ggcagugggucccacuuccc

SEQ ID NO: 2223708 - RNA, 23 nt, Human
ggcagugggucccacuuccccuc

SEQ ID NO: 2223709 - RNA, 18 nt, Human
ggcagugggagcugccug

SEQ ID NO: 2223710 - RNA, 19 nt, Human
ggcagugggagcugccugu

SEQ ID NO: 2223711 - RNA, 17 nt, Human
ggcagugggagcugccu

SEQ ID NO: 2223712 - RNA, 21 nt, Human
ggcacugggaugagccgcugu

SEQ ID NO: 2223713 - RNA, 19 nt, Human
ggcacugggaugagccgcu

SEQ ID NO: 2223714 - RNA, 20 nt, Human
ggcacugggaugagccgcug

SEQ ID NO: 2223715 - RNA, 24 nt, Human
ggcacugcuuccagugaggcucug

SEQ ID NO: 2223716 - RNA, 20 nt, Human
ggcacuggcauugucccugu

SEQ ID NO: 2223717 - RNA, 21 nt, Human
ggcacuggcauugucccugug

SEQ ID NO: 2223718 - RNA, 16 nt, Human
ggcaccagcagccugg

SEQ ID NO: 2223719 - RNA, 12 nt, Human
ggcaccagaggc

SEQ ID NO: 2223720 - RNA, 19 nt, Human
ggcaccagaggcugcagaa

SEQ ID NO: 2223721 - RNA, 22 nt, Human
ggcaccagaggcugcagaaggc

SEQ ID NO: 2223722 - RNA, 22 nt, Human
ggcacugcuuccagugaggcuc

SEQ ID NO: 2223723 - RNA, 15 nt, Human
ggcaccagcagccug

SEQ ID NO: 2223724 - RNA, 20 nt, Human
ggcaccagacacccaggacu

SEQ ID NO: 2223725 - RNA, 19 nt, Human
ggcaccagacacccaggac

SEQ ID NO: 2223726 - RNA, 18 nt, Human
ggcaccagacacccagga

SEQ ID NO: 2223727 - RNA, 17 nt, Human
ggcaccagacacccagg

SEQ ID NO: 2223728 - RNA, 17 nt, Human
ggcccaguaugagcccu

SEQ ID NO: 2223729 - RNA, 22 nt, Human
ggcccaguaugagcccuagaag

SEQ ID NO: 2223730 - RNA, 14 nt, Human
ggcccaguccuggc

SEQ ID NO: 2223731 - RNA, 22 nt, Human
ggcccagggcccagagcccagc

SEQ ID NO: 2223732 - RNA, 21 nt, Human
ggcccagggcccagagcccag

SEQ ID NO: 2223733 - RNA, 19 nt, Human
ggcccagggcccagagccc

SEQ ID NO: 2223734 - RNA, 13 nt, Human
ggccccacccugg

SEQ ID NO: 2223735 - RNA, 22 nt, Human
ggcccagugucaaguugugcuu

SEQ ID NO: 2223736 - RNA, 23 nt, Human
ggcccagugucaaguugugcuug

SEQ ID NO: 2223737 - RNA, 21 nt, Human
ggcccaguccuggccuggcuu

SEQ ID NO: 2223738 - RNA, 16 nt, Human
ggcccaguccuggccu

SEQ ID NO: 2223739 - RNA, 19 nt, Human
ggcccagugucaaguugug

SEQ ID NO: 2223740 - RNA, 23 nt, Human
ggccccagagacucagagggagg

SEQ ID NO: 2223741 - RNA, 18 nt, Human
ggccccagagacucagag

SEQ ID NO: 2223742 - RNA, 14 nt, Human
ggccccagagacuc

SEQ ID NO: 2223743 - RNA, 13 nt, Human
ggccccagagacu

SEQ ID NO: 2223744 - RNA, 12 nt, Human
ggccccagagac

SEQ ID NO: 2223745 - RNA, 11 nt, Human
ggccccagaga

SEQ ID NO: 2223746 - RNA, 19 nt, Human
ggccccagaaggcagggaa

SEQ ID NO: 2223747 - RNA, 12 nt, Human
ggccccacuggg

SEQ ID NO: 2223748 - RNA, 15 nt, Human
ggccccagcacagcu

SEQ ID NO: 2223749 - RNA, 20 nt, Human
ggccccugcuucuccagccu

SEQ ID NO: 2223750 - RNA, 21 nt, Human
ggccccugcuucuccagccug

SEQ ID NO: 2223751 - RNA, 13 nt, Human
ggccccuggccca

SEQ ID NO: 2223752 - RNA, 14 nt, Human
ggccccuggcccag

SEQ ID NO: 2223753 - RNA, 15 nt, Human
ggccccuggcccagc

SEQ ID NO: 2223754 - RNA, 15 nt, Human
ggccccacccugggc

SEQ ID NO: 2223755 - RNA, 17 nt, Human
ggccccacccugggccc

SEQ ID NO: 2223756 - RNA, 21 nt, Human
ggccccacccugggcccuggg

SEQ ID NO: 2223757 - RNA, 23 nt, Human
ggccccacccugggcccugggcu

SEQ ID NO: 2223758 - RNA, 17 nt, Human
ggcccagcggccccucc

SEQ ID NO: 2223759 - RNA, 18 nt, Human
ggcccagcggccccuccc

SEQ ID NO: 2223760 - RNA, 23 nt, Human
ggcccagcggccccucccacaca

SEQ ID NO: 2223761 - RNA, 12 nt, Human
ggcccagcuccc

SEQ ID NO: 2223762 - RNA, 14 nt, Human
ggcccagcuccccc

SEQ ID NO: 2223763 - RNA, 15 nt, Human
ggcccagcucccccg

SEQ ID NO: 2223764 - RNA, 16 nt, Human
ggcccagcucccccgg

SEQ ID NO: 2223765 - RNA, 14 nt, Human
ggcccagcugggcu

SEQ ID NO: 2223766 - RNA, 15 nt, Human
ggcccagcugggcuc

SEQ ID NO: 2223767 - RNA, 17 nt, Human
ggcccagcugggcucug

SEQ ID NO: 2223768 - RNA, 22 nt, Human
ggcccaggaccaucauccuacu

SEQ ID NO: 2223769 - RNA, 21 nt, Human
ggcccagcugggcucugccac

SEQ ID NO: 2223770 - RNA, 15 nt, Human
ggcccaggaccagcu

SEQ ID NO: 2223771 - RNA, 16 nt, Human
ggcccaggaccagcug

SEQ ID NO: 2223772 - RNA, 17 nt, Human
ggcccaggaccagcugg

SEQ ID NO: 2223773 - RNA, 18 nt, Human
ggcccagggcccagagcc

SEQ ID NO: 2223774 - RNA, 17 nt, Human
ggcccagggcccagagc

SEQ ID NO: 2223775 - RNA, 15 nt, Human
ggcccagggcccaga

SEQ ID NO: 2223776 - RNA, 18 nt, Human
ggcccaggaccagcuggg

SEQ ID NO: 2223777 - RNA, 16 nt, Human
ggcccagggcccagag

SEQ ID NO: 2223778 - RNA, 22 nt, Human
ggccccuucacuucugaccaca

SEQ ID NO: 2223779 - RNA, 20 nt, Human
ggccccuucacuucugacca

SEQ ID NO: 2223780 - RNA, 13 nt, Human
ggccccugugagu

SEQ ID NO: 2223781 - RNA, 21 nt, Human
ggccccuucacuucugaccac

SEQ ID NO: 2223782 - RNA, 20 nt, Human
ggccccuugacucuggggac

SEQ ID NO: 2223783 - RNA, 17 nt, Human
ggccccuggcccagcgg

SEQ ID NO: 2223784 - RNA, 18 nt, Human
ggccccuggcccagcggc

SEQ ID NO: 2223785 - RNA, 20 nt, Human
ggccccuggcccagcggccc

SEQ ID NO: 2223786 - RNA, 20 nt, Human
ggccccugggcuuggccugc

SEQ ID NO: 2223787 - RNA, 21 nt, Human
ggccccugggcuuggccugcu

SEQ ID NO: 2223788 - RNA, 22 nt, Human
ggccccugggcuuggccugcug

SEQ ID NO: 2223789 - RNA, 23 nt, Human
ggccccugggcuuggccugcugu

SEQ ID NO: 2223790 - RNA, 23 nt, Human
ggccccugggucagucugguggg

SEQ ID NO: 2223791 - RNA, 19 nt, Human
ggccccuuuuuacuccccu

SEQ ID NO: 2223792 - RNA, 20 nt, Human
ggccccuuuucacucccucc

SEQ ID NO: 2223793 - RNA, 16 nt, Human
ggccccuuuucacucc

SEQ ID NO: 2223794 - RNA, 18 nt, Human
ggccccuuuucacucccu

SEQ ID NO: 2223795 - RNA, 17 nt, Human
ggcccugugccuuggug

SEQ ID NO: 2223796 - RNA, 20 nt, Human
ggcccuucacugccuuugcu

SEQ ID NO: 2223797 - RNA, 19 nt, Human
ggcccuucccacaggacau

SEQ ID NO: 2223798 - RNA, 13 nt, Human
ggcccuuccucuc

SEQ ID NO: 2223799 - RNA, 15 nt, Human
ggcccuuccucucca

SEQ ID NO: 2223800 - RNA, 14 nt, Human
ggcccuuccuuuuc

SEQ ID NO: 2223801 - RNA, 16 nt, Human
ggcccuucucuccagc

SEQ ID NO: 2223802 - RNA, 17 nt, Human
ggcccuucucuccagcc

SEQ ID NO: 2223803 - RNA, 12 nt, Human
ggccgagaagca

SEQ ID NO: 2223804 - RNA, 15 nt, Human
ggccgagaagcaaga

SEQ ID NO: 2223805 - RNA, 21 nt, Human
ggcccuucacugccuuugcuc

SEQ ID NO: 2223806 - RNA, 14 nt, Human
ggccgacggagccg

SEQ ID NO: 2223807 - RNA, 16 nt, Human
ggccgacggagccggg

SEQ ID NO: 2223808 - RNA, 18 nt, Human
ggccgaggguccuggcuc

SEQ ID NO: 2223809 - RNA, 16 nt, Human
ggccgaggguccuggc

SEQ ID NO: 2223810 - RNA, 16 nt, Human
ggccgaguccaagcug

SEQ ID NO: 2223811 - RNA, 13 nt, Human
ggccgaguccaag

SEQ ID NO: 2223812 - RNA, 17 nt, Human
ggcccuuccucuccacu

SEQ ID NO: 2223813 - RNA, 18 nt, Human
ggcccuucucuccagccc

SEQ ID NO: 2223814 - RNA, 18 nt, Human
ggccgccccagccucuga

SEQ ID NO: 2223815 - RNA, 17 nt, Human
ggccgcauucccugagu

SEQ ID NO: 2223816 - RNA, 16 nt, Human
ggccgcauucccugag

SEQ ID NO: 2223817 - RNA, 15 nt, Human
ggccgcauucccuga

SEQ ID NO: 2223818 - RNA, 20 nt, Human
ggccgcagcucuugcccuuc

SEQ ID NO: 2223819 - RNA, 21 nt, Human
ggccgcagcucuugcccuucc

SEQ ID NO: 2223820 - RNA, 22 nt, Human
ggccgcagcucuugcccuuccc

SEQ ID NO: 2223821 - RNA, 23 nt, Human
ggccgcagcucuugcccuucccu

SEQ ID NO: 2223822 - RNA, 14 nt, Human
ggccgagugagagc

SEQ ID NO: 2223823 - RNA, 19 nt, Human
ggccgaucggggcacugca

SEQ ID NO: 2223824 - RNA, 18 nt, Human
ggccgcagcucuugcccu

SEQ ID NO: 2223825 - RNA, 21 nt, Human
ggccgcugccacccaccuccc

SEQ ID NO: 2223826 - RNA, 19 nt, Human
ggccgcugccacccaccuc

SEQ ID NO: 2223827 - RNA, 15 nt, Human
ggccgcugccaccca

SEQ ID NO: 2223828 - RNA, 13 nt, Human
ggccgcugccacc

SEQ ID NO: 2223829 - RNA, 12 nt, Human
ggccgcugccac

SEQ ID NO: 2223830 - RNA, 17 nt, Human
ggccgcugaguggcagg

SEQ ID NO: 2223831 - RNA, 12 nt, Human
ggccgcccccug

SEQ ID NO: 2223832 - RNA, 13 nt, Human
ggccgcuccaggg

SEQ ID NO: 2223833 - RNA, 16 nt, Human
ggccgcuccaggggug

SEQ ID NO: 2223834 - RNA, 19 nt, Human
ggccgcuccagggguggcu

SEQ ID NO: 2223835 - RNA, 13 nt, Human
ggaugucaccaau

SEQ ID NO: 2223836 - RNA, 16 nt, Human
ggaugucacagggcca

SEQ ID NO: 2223837 - RNA, 15 nt, Human
ggaugucacagggcc

SEQ ID NO: 2223838 - RNA, 17 nt, Human
ggauguccacagaugcc

SEQ ID NO: 2223839 - RNA, 18 nt, Human
ggaugucacucagaugga

SEQ ID NO: 2223840 - RNA, 18 nt, Human
ggauguccacagaugccu

SEQ ID NO: 2223841 - RNA, 23 nt, Human
ggauguauccaugggggcagggc

SEQ ID NO: 2223842 - RNA, 22 nt, Human
ggauguauccaugggggcaggg

SEQ ID NO: 2223843 - RNA, 18 nt, Human
ggauguauaugucaucuc

SEQ ID NO: 2223844 - RNA, 16 nt, Human
ggauguacauuuccaa

SEQ ID NO: 2223845 - RNA, 15 nt, Human
ggauguucugggaca

SEQ ID NO: 2223846 - RNA, 13 nt, Human
ggaugucugggcc

SEQ ID NO: 2223847 - RNA, 14 nt, Human
ggaugucugccaau

SEQ ID NO: 2223848 - RNA, 16 nt, Human
ggauguucugggacac

SEQ ID NO: 2223849 - RNA, 22 nt, Human
ggauguugaaaaaguucugcag

SEQ ID NO: 2223850 - RNA, 13 nt, Human
ggauguucuggga

SEQ ID NO: 2223851 - RNA, 20 nt, Human
ggaugucugccaauuuuugc

SEQ ID NO: 2223852 - RNA, 15 nt, Human
ggcacaggcccccuu

SEQ ID NO: 2223853 - RNA, 14 nt, Human
ggcacaggcccccu

SEQ ID NO: 2223854 - RNA, 16 nt, Human
ggcacagggcaguggg

SEQ ID NO: 2223855 - RNA, 16 nt, Human
ggcaccagacacccag

SEQ ID NO: 2223856 - RNA, 13 nt, Human
ggcaccagacacc

SEQ ID NO: 2223857 - RNA, 16 nt, Human
ggcacagaaaccucua

SEQ ID NO: 2223858 - RNA, 20 nt, Human
ggcacagcaacucuaagacu

SEQ ID NO: 2223859 - RNA, 18 nt, Human
ggcacagcggggccccag

SEQ ID NO: 2223860 - RNA, 13 nt, Human
ggcacagccuucu

SEQ ID NO: 2223861 - RNA, 14 nt, Human
ggcaauuuuguaac

SEQ ID NO: 2223862 - RNA, 22 nt, Human
ggcacaagcaaaagggugucug

SEQ ID NO: 2223863 - RNA, 22 nt, Human
ggcacaauggcuaauucccaga

SEQ ID NO: 2223864 - RNA, 22 nt, Human
ggcacaaucucggcucacugca

SEQ ID NO: 2223865 - RNA, 21 nt, Human
ggcacagaaacacaauauuuu

SEQ ID NO: 2223866 - RNA, 20 nt, Human
ggcacaauggcuaauuccca

SEQ ID NO: 2223867 - RNA, 21 nt, Human
ggcacacaccuguagucccag

SEQ ID NO: 2223868 - RNA, 13 nt, Human
ggcacacaccugu

SEQ ID NO: 2223869 - RNA, 24 nt, Human
ggcacagaaaauggaagacagcuc

SEQ ID NO: 2223870 - RNA, 13 nt, Human
ggauggccagugu

SEQ ID NO: 2223871 - RNA, 21 nt, Human
ggauggaggggugguccugac

SEQ ID NO: 2223872 - RNA, 19 nt, Human
ggauggaggggugguccug

SEQ ID NO: 2223873 - RNA, 14 nt, Human
ggauggaggagaag

SEQ ID NO: 2223874 - RNA, 13 nt, Human
ggauggccccagc

SEQ ID NO: 2223875 - RNA, 14 nt, Human
ggauggccccagca

SEQ ID NO: 2223876 - RNA, 15 nt, Human
ggauggcaccagagg

SEQ ID NO: 2223877 - RNA, 14 nt, Human
ggauggccaguguc

SEQ ID NO: 2223878 - RNA, 15 nt, Human
ggauggccagugucu

SEQ ID NO: 2223879 - RNA, 22 nt, Human
ggauggccagugucugucccgg

SEQ ID NO: 2223880 - RNA, 18 nt, Human
ggauggauuuccagccaa

SEQ ID NO: 2223881 - RNA, 12 nt, Human
ggauggcaagau

SEQ ID NO: 2223882 - RNA, 16 nt, Human
ggaugggcugcagcag

SEQ ID NO: 2223883 - RNA, 14 nt, Human
ggaugggccaccgc

SEQ ID NO: 2223884 - RNA, 21 nt, Human
ggauguacaaggacagccccu

SEQ ID NO: 2223885 - RNA, 16 nt, Human
ggauggggcugcaccg

SEQ ID NO: 2223886 - RNA, 17 nt, Human
ggaugggaaggagggag

SEQ ID NO: 2223887 - RNA, 15 nt, Human
ggaugggagugagac

SEQ ID NO: 2223888 - RNA, 15 nt, Human
ggaugggaaggaggg

SEQ ID NO: 2223889 - RNA, 12 nt, Human
ggaugggaagga

SEQ ID NO: 2223890 - RNA, 15 nt, Human
ggauggcgggugggg

SEQ ID NO: 2223891 - RNA, 16 nt, Human
ggauggcggguggggg

SEQ ID NO: 2223892 - RNA, 18 nt, Human
ggauggcgggugggggug

SEQ ID NO: 2223893 - RNA, 23 nt, Human
ggauggcggguggggguggaaua

SEQ ID NO: 2223894 - RNA, 21 nt, Human
ggauggccuggccagggccug

SEQ ID NO: 2223895 - RNA, 16 nt, Human
ggauggccuggccagg

SEQ ID NO: 2223896 - RNA, 16 nt, Human
ggauggccccagcaca

SEQ ID NO: 2223897 - RNA, 22 nt, Human
ggauggcccuucccacuggagg

SEQ ID NO: 2223898 - RNA, 15 nt, Human
ggaucugagaaucuu

SEQ ID NO: 2223899 - RNA, 14 nt, Human
ggaucugccccucc

SEQ ID NO: 2223900 - RNA, 15 nt, Human
ggaucugccccuccc

SEQ ID NO: 2223901 - RNA, 17 nt, Human
ggaucugccccucccug

SEQ ID NO: 2223902 - RNA, 20 nt, Human
ggaucugccccucccugcuu

SEQ ID NO: 2223903 - RNA, 19 nt, Human
ggaucugggacccuuuccu

SEQ ID NO: 2223904 - RNA, 17 nt, Human
ggaucuggagaaccuca

SEQ ID NO: 2223905 - RNA, 18 nt, Human
ggaucuggggcucuggga

SEQ ID NO: 2223906 - RNA, 21 nt, Human
ggaucugguagggggaaaaug

SEQ ID NO: 2223907 - RNA, 17 nt, Human
ggaucugguccuaccca

SEQ ID NO: 2223908 - RNA, 23 nt, Human
ggaucugggacccuuuccuuccu

SEQ ID NO: 2223909 - RNA, 19 nt, Human
ggaucugucacaccagcca

SEQ ID NO: 2223910 - RNA, 15 nt, Human
ggaucuguccaagga

SEQ ID NO: 2223911 - RNA, 16 nt, Human
ggaucuguccaaggaa

SEQ ID NO: 2223912 - RNA, 23 nt, Human
ggaucuguuguguacguggagag

SEQ ID NO: 2223913 - RNA, 15 nt, Human
ggaucuucaauggcu

SEQ ID NO: 2223914 - RNA, 16 nt, Human
ggaucugugcccagag

SEQ ID NO: 2223915 - RNA, 15 nt, Human
ggaucugugcccaga

SEQ ID NO: 2223916 - RNA, 15 nt, Human
ggauccuccaggugc

SEQ ID NO: 2223917 - RNA, 14 nt, Human
ggauccuccaggug

SEQ ID NO: 2223918 - RNA, 13 nt, Human
ggauccugagcca

SEQ ID NO: 2223919 - RNA, 14 nt, Human
ggauccugagccag

SEQ ID NO: 2223920 - RNA, 20 nt, Human
ggauaaugcuguugccucau

SEQ ID NO: 2223921 - RNA, 21 nt, Human
ggauaagguaccuuucacaua

SEQ ID NO: 2223922 - RNA, 14 nt, Human
ggauaaccuauaug

SEQ ID NO: 2223923 - RNA, 15 nt, Human
ggauaaaaugagguu

SEQ ID NO: 2223924 - RNA, 15 nt, Human
ggauaaagccacuga

SEQ ID NO: 2223925 - RNA, 14 nt, Human
ggauaaaaugaggu

SEQ ID NO: 2223926 - RNA, 20 nt, Human
ggaguuuuuguuuggagagc

SEQ ID NO: 2223927 - RNA, 15 nt, Human
ggauaaaaagauguu

SEQ ID NO: 2223928 - RNA, 18 nt, Human
ggaguuucuuuccugccu

SEQ ID NO: 2223929 - RNA, 20 nt, Human
ggaguuugaggcugcagcga

SEQ ID NO: 2223930 - RNA, 19 nt, Human
ggaguuugaggcugcagcg

SEQ ID NO: 2223931 - RNA, 22 nt, Human
ggaguugucaagucucugcugg

SEQ ID NO: 2223932 - RNA, 21 nt, Human
ggaguuggaagugugugaucu

SEQ ID NO: 2223933 - RNA, 13 nt, Human
ggaguuugaggcu

SEQ ID NO: 2223934 - RNA, 16 nt, Human
ggaguuucuuuccugc

SEQ ID NO: 2223935 - RNA, 19 nt, Human
ggaguggaagaagagggag

SEQ ID NO: 2223936 - RNA, 20 nt, Human
ggaguggaauaguauccucc

SEQ ID NO: 2223937 - RNA, 12 nt, Human
ggagugcagugg

SEQ ID NO: 2223938 - RNA, 14 nt, Human
ggaguggccacaga

SEQ ID NO: 2223939 - RNA, 13 nt, Human
ggaguggagugga

SEQ ID NO: 2223940 - RNA, 22 nt, Human
ggaguggaauaguauccuccag

SEQ ID NO: 2223941 - RNA, 23 nt, Human
ggaguggaauaguauccuccagg

SEQ ID NO: 2223942 - RNA, 16 nt, Human
ggaguucuaugcucuc

SEQ ID NO: 2223943 - RNA, 23 nt, Human
ggaguugaucgccuuucccaggu

SEQ ID NO: 2223944 - RNA, 20 nt, Human
ggaguugaucgccuuuccca

SEQ ID NO: 2223945 - RNA, 22 nt, Human
ggaguugaucuggaacccagac

SEQ ID NO: 2223946 - RNA, 21 nt, Human
ggaguugaucuggaacccaga

SEQ ID NO: 2223947 - RNA, 17 nt, Human
ggaguugaucuggaacc

SEQ ID NO: 2223948 - RNA, 14 nt, Human
ggaguugaucugga

SEQ ID NO: 2223949 - RNA, 21 nt, Human
ggaguucgaggcugcagucag

SEQ ID NO: 2223950 - RNA, 20 nt, Human
ggaguucgaggcugcaguca

SEQ ID NO: 2223951 - RNA, 15 nt, Human
ggaguucgaggcugc

SEQ ID NO: 2223952 - RNA, 20 nt, Human
ggaguucgagaccagccugg

SEQ ID NO: 2223953 - RNA, 15 nt, Human
ggaguucugguuccu

SEQ ID NO: 2223954 - RNA, 15 nt, Human
ggagugcagugagcc

SEQ ID NO: 2223955 - RNA, 14 nt, Human
ggagcaugggccug

SEQ ID NO: 2223956 - RNA, 19 nt, Human
ggagcauuggcugagagac

SEQ ID NO: 2223957 - RNA, 15 nt, Human
ggagcauggcuguga

SEQ ID NO: 2223958 - RNA, 17 nt, Human
ggagcauggcugugagg

SEQ ID NO: 2223959 - RNA, 16 nt, Human
ggagcaugggccuggc

SEQ ID NO: 2223960 - RNA, 21 nt, Human
ggagcaucucuugaggccagg

SEQ ID NO: 2223961 - RNA, 14 nt, Human
ggagcaucugacuc

SEQ ID NO: 2223962 - RNA, 16 nt, Human
ggagcaucugacucac

SEQ ID NO: 2223963 - RNA, 20 nt, Human
ggagcaucucuugaggccag

SEQ ID NO: 2223964 - RNA, 16 nt, Human
ggagcaucucuugagg

SEQ ID NO: 2223965 - RNA, 18 nt, Human
ggagcagugucuuccaua

SEQ ID NO: 2223966 - RNA, 18 nt, Human
ggagcauagaaggcaggu

SEQ ID NO: 2223967 - RNA, 17 nt, Human
ggagcauccaccuccuu

SEQ ID NO: 2223968 - RNA, 18 nt, Human
ggagcauccaccuccuuc

SEQ ID NO: 2223969 - RNA, 19 nt, Human
ggagcauccaccuccuucu

SEQ ID NO: 2223970 - RNA, 22 nt, Human
ggagcauccaccuccuucucug

SEQ ID NO: 2223971 - RNA, 17 nt, Human
ggagcagugucuuccau

SEQ ID NO: 2223972 - RNA, 13 nt, Human
ggagcagugucuu

SEQ ID NO: 2223973 - RNA, 16 nt, Human
ggagcaucagugcccu

SEQ ID NO: 2223974 - RNA, 20 nt, Human
ggagcuggccccgccgccug

SEQ ID NO: 2223975 - RNA, 18 nt, Human
ggagcuggccccgccgcc

SEQ ID NO: 2223976 - RNA, 21 nt, Human
ggagcugccuguucagcucca

SEQ ID NO: 2223977 - RNA, 13 nt, Human
ggagcugcccaga

SEQ ID NO: 2223978 - RNA, 22 nt, Human
ggagccccuggguggguggugg

SEQ ID NO: 2223979 - RNA, 12 nt, Human
ggagcugccugu

SEQ ID NO: 2223980 - RNA, 16 nt, Human
ggagccccgaggccuu

SEQ ID NO: 2223981 - RNA, 20 nt, Human
ggagcccccgccccgcccca

SEQ ID NO: 2223982 - RNA, 13 nt, Human
ggagccccugggu

SEQ ID NO: 2223983 - RNA, 13 nt, Human
ggagcccccgccc

SEQ ID NO: 2223984 - RNA, 14 nt, Human
ggagccccugggug

SEQ ID NO: 2223985 - RNA, 15 nt, Human
ggagccccugggugg

SEQ ID NO: 2223986 - RNA, 16 nt, Human
ggagccccuggguggg

SEQ ID NO: 2223987 - RNA, 21 nt, Human
ggagccccuggguggguggug

SEQ ID NO: 2223988 - RNA, 22 nt, Human
ggagccccgaggccuucucuga

SEQ ID NO: 2223989 - RNA, 18 nt, Human
ggagccacuaacuagagc

SEQ ID NO: 2223990 - RNA, 16 nt, Human
ggagccacuccucuga

SEQ ID NO: 2223991 - RNA, 21 nt, Human
ggagccagcucccucuauuua

SEQ ID NO: 2223992 - RNA, 21 nt, Human
ggagccacuccucugacucag

SEQ ID NO: 2223993 - RNA, 19 nt, Human
ggagccacuccucugacuc

SEQ ID NO: 2223994 - RNA, 15 nt, Human
ggagccaacugcugc

SEQ ID NO: 2223995 - RNA, 16 nt, Human
ggagccaacugcugcu

SEQ ID NO: 2223996 - RNA, 17 nt, Human
ggagccaacugcugcuu

SEQ ID NO: 2223997 - RNA, 20 nt, Human
ggagccaacagaagcuucca

SEQ ID NO: 2223998 - RNA, 15 nt, Human
ggagcauuuggagag

SEQ ID NO: 2223999 - RNA, 19 nt, Human
ggagcauuuggagagaagg

SEQ ID NO: 2224000 - RNA, 23 nt, Human
ggagccaaggguucagagacuca

SEQ ID NO: 2224001 - RNA, 17 nt, Human
ggagccaaguccagauu

SEQ ID NO: 2224002 - RNA, 16 nt, Human
ggagccaauggagacu

SEQ ID NO: 2224003 - RNA, 19 nt, Human
ggagcccaggcgggagcgg

SEQ ID NO: 2224004 - RNA, 22 nt, Human
ggagcccaggcgggagcggugg

SEQ ID NO: 2224005 - RNA, 16 nt, Human
ggagcccagcucugaa

SEQ ID NO: 2224006 - RNA, 19 nt, Human
ggagcccagcccuccccau

SEQ ID NO: 2224007 - RNA, 16 nt, Human
ggagcccagcccuccc

SEQ ID NO: 2224008 - RNA, 12 nt, Human
ggagccagcucu

SEQ ID NO: 2224009 - RNA, 17 nt, Human
ggagcccacuguccugg

SEQ ID NO: 2224010 - RNA, 14 nt, Human
ggagcccacugucc

SEQ ID NO: 2224011 - RNA, 23 nt, Human
ggagcccacuguccugggccugc

SEQ ID NO: 2224012 - RNA, 22 nt, Human
ggagcccacuguccugggccug

SEQ ID NO: 2224013 - RNA, 20 nt, Human
ggagcccacuguccugggcc

SEQ ID NO: 2224014 - RNA, 18 nt, Human
ggagcccacuguccuggg

SEQ ID NO: 2224015 - RNA, 21 nt, Human
ggaggaaggcuuacacccaca

SEQ ID NO: 2224016 - RNA, 13 nt, Human
ggaggaaggagag

SEQ ID NO: 2224017 - RNA, 13 nt, Human
ggaggaaggauug

SEQ ID NO: 2224018 - RNA, 13 nt, Human
ggaggaaggcaag

SEQ ID NO: 2224019 - RNA, 21 nt, Human
ggagcuuagccaaugugggag

SEQ ID NO: 2224020 - RNA, 20 nt, Human
ggagcuucauggcagaaggc

SEQ ID NO: 2224021 - RNA, 11 nt, Human
ggaggaaggau

SEQ ID NO: 2224022 - RNA, 20 nt, Human
ggaggaaggaaacccagcuc

SEQ ID NO: 2224023 - RNA, 23 nt, Human
ggaggaaggaaacccagcucugg

SEQ ID NO: 2224024 - RNA, 18 nt, Human
ggagcugggcagaaggcc

SEQ ID NO: 2224025 - RNA, 19 nt, Human
ggagcugggcagaaggcca

SEQ ID NO: 2224026 - RNA, 17 nt, Human
ggagcuggggaucccuc

SEQ ID NO: 2224027 - RNA, 17 nt, Human
ggagcuggcgucugucu

SEQ ID NO: 2224028 - RNA, 21 nt, Human
ggagcuggccgugggccuggg

SEQ ID NO: 2224029 - RNA, 15 nt, Human
ggagcugggaggaaa

SEQ ID NO: 2224030 - RNA, 14 nt, Human
ggagcugggaggaa

SEQ ID NO: 2224031 - RNA, 21 nt, Human
ggagcugggacacuuaacaga

SEQ ID NO: 2224032 - RNA, 19 nt, Human
ggaggaaggaaacccagcu

SEQ ID NO: 2224033 - RNA, 23 nt, Human
ggagcugguuagaaaugcagaau

SEQ ID NO: 2224034 - RNA, 18 nt, Human
ggagcugguuagaaaugc

SEQ ID NO: 2224035 - RNA, 18 nt, Human
ggagcuguaaaccagaga

SEQ ID NO: 2224036 - RNA, 20 nt, Human
ggaggccaagugcaggcugg

SEQ ID NO: 2224037 - RNA, 12 nt, Human
ggaggccaccuc

SEQ ID NO: 2224038 - RNA, 14 nt, Human
ggaggccaccucuc

SEQ ID NO: 2224039 - RNA, 18 nt, Human
ggaggccaccucuccaag

SEQ ID NO: 2224040 - RNA, 19 nt, Human
ggaggccaccucuccaagg

SEQ ID NO: 2224041 - RNA, 11 nt, Human
ggaggccagcc

SEQ ID NO: 2224042 - RNA, 16 nt, Human
ggaggccagccaguga

SEQ ID NO: 2224043 - RNA, 16 nt, Human
ggaggccccuggccca

SEQ ID NO: 2224044 - RNA, 17 nt, Human
ggaggccccuggcccag

SEQ ID NO: 2224045 - RNA, 17 nt, Human
ggaggccccacugggga

SEQ ID NO: 2224046 - RNA, 13 nt, Human
ggaggccagccag

SEQ ID NO: 2224047 - RNA, 12 nt, Human
ggaggccagcca

SEQ ID NO: 2224048 - RNA, 21 nt, Human
ggaggccaccucuccaagggc

SEQ ID NO: 2224049 - RNA, 12 nt, Human
ggaggccagccu

SEQ ID NO: 2224050 - RNA, 17 nt, Human
ggaggaaugcuccccca

SEQ ID NO: 2224051 - RNA, 13 nt, Human
ggaggacaauuca

SEQ ID NO: 2224052 - RNA, 14 nt, Human
ggaggacaauucau

SEQ ID NO: 2224053 - RNA, 18 nt, Human
ggaggaaugcucccccau

SEQ ID NO: 2224054 - RNA, 16 nt, Human
ggaggaaugcuccccc

SEQ ID NO: 2224055 - RNA, 15 nt, Human
ggaggaaugcucccc

SEQ ID NO: 2224056 - RNA, 23 nt, Human
ggaggaaucgaggaaccagagcc

SEQ ID NO: 2224057 - RNA, 22 nt, Human
ggaggaaucgaggaaccagagc

SEQ ID NO: 2224058 - RNA, 21 nt, Human
ggaggaaucgaggaaccagag

SEQ ID NO: 2224059 - RNA, 20 nt, Human
ggaggaaucgaggaaccaga

SEQ ID NO: 2224060 - RNA, 19 nt, Human
ggaggaaucgaggaaccag

SEQ ID NO: 2224061 - RNA, 14 nt, Human
ggaggaaggcaaga

SEQ ID NO: 2224062 - RNA, 20 nt, Human
ggaggccaaggugggaggau

SEQ ID NO: 2224063 - RNA, 18 nt, Human
ggaggccaagugcaggcu

SEQ ID NO: 2224064 - RNA, 19 nt, Human
ggaggacaauucaugaacu

SEQ ID NO: 2224065 - RNA, 20 nt, Human
ggaggaccagggcagggcca

SEQ ID NO: 2224066 - RNA, 14 nt, Human
ggaggccugggggc

SEQ ID NO: 2224067 - RNA, 18 nt, Human
ggaggccugggggcaggg

SEQ ID NO: 2224068 - RNA, 22 nt, Human
ggaggcgcacuuuccuccuggc

SEQ ID NO: 2224069 - RNA, 16 nt, Human
ggaggggggagguggg

SEQ ID NO: 2224070 - RNA, 18 nt, Human
ggaggccgggugcucagg

SEQ ID NO: 2224071 - RNA, 17 nt, Human
ggaggcccguccggcag

SEQ ID NO: 2224072 - RNA, 18 nt, Human
ggaggccccuggcccagc

SEQ ID NO: 2224073 - RNA, 19 nt, Human
ggaggccccuggcccagcg

SEQ ID NO: 2224074 - RNA, 22 nt, Human
ggaggccccuggcccagcggcc

SEQ ID NO: 2224075 - RNA, 23 nt, Human
ggaggccccuggcccagcggccc

SEQ ID NO: 2224076 - RNA, 17 nt, Human
ggaggggugguccugac

SEQ ID NO: 2224077 - RNA, 17 nt, Human
ggagggguguggcagug

SEQ ID NO: 2224078 - RNA, 15 nt, Human
ggagggguguggcuc

SEQ ID NO: 2224079 - RNA, 14 nt, Human
ggagggguugccac

SEQ ID NO: 2224080 - RNA, 16 nt, Human
ggagggguugccacag

SEQ ID NO: 2224081 - RNA, 18 nt, Human
ggaggggguuugggggcu

SEQ ID NO: 2224082 - RNA, 23 nt, Human
ggaggggguuugcuggggaacug

SEQ ID NO: 2224083 - RNA, 23 nt, Human
ggagggguaacuugcaccucuga

SEQ ID NO: 2224084 - RNA, 12 nt, Human
ggaggcgcgagc

SEQ ID NO: 2224085 - RNA, 22 nt, Human
ggaggggguuugcuggggaacu

SEQ ID NO: 2224086 - RNA, 21 nt, Human
ggagguagcuuugagguggaa

SEQ ID NO: 2224087 - RNA, 17 nt, Human
ggagggguugccacagg

SEQ ID NO: 2224088 - RNA, 18 nt, Human
ggagggguugccacaggc

SEQ ID NO: 2224089 - RNA, 19 nt, Human
ggagggguugccacaggcc

SEQ ID NO: 2224090 - RNA, 21 nt, Human
ggagggguugccacaggccuc

SEQ ID NO: 2224091 - RNA, 22 nt, Human
ggagggguugccacaggccucc

SEQ ID NO: 2224092 - RNA, 23 nt, Human
ggaggguaaaugauguggugccu

SEQ ID NO: 2224093 - RNA, 13 nt, Human
ggaggugccagca

SEQ ID NO: 2224094 - RNA, 13 nt, Human
ggaggugagggau

SEQ ID NO: 2224095 - RNA, 19 nt, Human
ggagguggagguugcagug

SEQ ID NO: 2224096 - RNA, 20 nt, Human
ggagguggaggcugcaguga

SEQ ID NO: 2224097 - RNA, 14 nt, Human
ggaggugccagcaa

SEQ ID NO: 2224098 - RNA, 19 nt, Human
ggaggugccagcaaagccc

SEQ ID NO: 2224099 - RNA, 22 nt, Human
ggaggugcuuaagcagaagcau

SEQ ID NO: 2224100 - RNA, 17 nt, Human
ggagguggaagaaggga

SEQ ID NO: 2224101 - RNA, 20 nt, Human
ggagguggagguugcaguga

SEQ ID NO: 2224102 - RNA, 20 nt, Human
ggagguggaagaagggagaa

SEQ ID NO: 2224103 - RNA, 22 nt, Human
ggagguauucguaaggauggga

SEQ ID NO: 2224104 - RNA, 20 nt, Human
ggagguagagguugugguga

SEQ ID NO: 2224105 - RNA, 19 nt, Human
ggaggucacauucaggaag

SEQ ID NO: 2224106 - RNA, 20 nt, Human
ggaggucacauucaggaaga

SEQ ID NO: 2224107 - RNA, 23 nt, Human
ggaggucacauucaggaagauga

SEQ ID NO: 2224108 - RNA, 13 nt, Human
ggaggucacugga

SEQ ID NO: 2224109 - RNA, 21 nt, Human
ggaggucacuggaaaggggag

SEQ ID NO: 2224110 - RNA, 20 nt, Human
ggaggucaaggcugcaguga

SEQ ID NO: 2224111 - RNA, 22 nt, Human
ggaggucgaccccaaagccccu

SEQ ID NO: 2224112 - RNA, 17 nt, Human
ggaggucacuggaaagg

SEQ ID NO: 2224113 - RNA, 17 nt, Human
ggaggucguguauuugg

SEQ ID NO: 2224114 - RNA, 14 nt, Human
ggaggucgaggcag

SEQ ID NO: 2224115 - RNA, 18 nt, Human
ggaggucgguagguucag

SEQ ID NO: 2224116 - RNA, 14 nt, Human
ggaggugaccccag

SEQ ID NO: 2224117 - RNA, 23 nt, Human
gggcagcgcccuuccucuccacc

SEQ ID NO: 2224118 - RNA, 16 nt, Human
gggcagcgcccuuccu

SEQ ID NO: 2224119 - RNA, 18 nt, Human
gggcagcgcccuuccucu

SEQ ID NO: 2224120 - RNA, 20 nt, Human
gggcagcgcccuuccucucc

SEQ ID NO: 2224121 - RNA, 21 nt, Human
gggcagcgcccuuccucucca

SEQ ID NO: 2224122 - RNA, 12 nt, Human
gggcagcugcca

SEQ ID NO: 2224123 - RNA, 18 nt, Human
gggcagcugccagagaag

SEQ ID NO: 2224124 - RNA, 16 nt, Human
gggcagcugccagaga

SEQ ID NO: 2224125 - RNA, 19 nt, Human
gggcagcccuugcuuguug

SEQ ID NO: 2224126 - RNA, 16 nt, Human
gggcagcgccaggcug

SEQ ID NO: 2224127 - RNA, 15 nt, Human
gggcagcgccaggcu

SEQ ID NO: 2224128 - RNA, 13 nt, Human
gggcagcgccagg

SEQ ID NO: 2224129 - RNA, 14 nt, Human
gggcagagggcaga

SEQ ID NO: 2224130 - RNA, 23 nt, Human
gggcagaggcuggaggcagggcc

SEQ ID NO: 2224131 - RNA, 21 nt, Human
gggcagaggcuggaggcaggg

SEQ ID NO: 2224132 - RNA, 16 nt, Human
gggcagaggcuggagg

SEQ ID NO: 2224133 - RNA, 20 nt, Human
gggcagagggcagaggcugg

SEQ ID NO: 2224134 - RNA, 15 nt, Human
gggcagagggcagag

SEQ ID NO: 2224135 - RNA, 14 nt, Human
gggcagaggcugga

SEQ ID NO: 2224136 - RNA, 15 nt, Human
gggcagaggcuggag

SEQ ID NO: 2224137 - RNA, 22 nt, Human
gggcaacagagcaagauccugu

SEQ ID NO: 2224138 - RNA, 16 nt, Human
gggcagagucacacgg

SEQ ID NO: 2224139 - RNA, 17 nt, Human
gggcagagugagaccca

SEQ ID NO: 2224140 - RNA, 12 nt, Human
gggcagagucac

SEQ ID NO: 2224141 - RNA, 14 nt, Human
gggcagcccuugcu

SEQ ID NO: 2224142 - RNA, 16 nt, Human
gggcagauuuucagca

SEQ ID NO: 2224143 - RNA, 23 nt, Human
aaaagguaaaacuuuuuauauuu

SEQ ID NO: 2224144 - RNA, 14 nt, Human
aaaagguaaaacuu

SEQ ID NO: 2224145 - RNA, 19 nt, Human
aaaagguaugcaaucaaau

SEQ ID NO: 2224146 - RNA, 19 nt, Human
aaaagggcucuuuagccag

SEQ ID NO: 2224147 - RNA, 19 nt, Human
aaaagggucuugggaaaua

SEQ ID NO: 2224148 - RNA, 21 nt, Human
aaaagggucuugggaaauaug

SEQ ID NO: 2224149 - RNA, 23 nt, Human
aaaagggcagggcaucuccugug

SEQ ID NO: 2224150 - RNA, 18 nt, Human
aaaagggauuacccaagc

SEQ ID NO: 2224151 - RNA, 19 nt, Human
aaaagggacugagaaauuu

SEQ ID NO: 2224152 - RNA, 12 nt, Human
gggcagggagcg

SEQ ID NO: 2224153 - RNA, 15 nt, Human
gggcaggccagagcu

SEQ ID NO: 2224154 - RNA, 13 nt, Human
gggcaggcccugc

SEQ ID NO: 2224155 - RNA, 14 nt, Human
gggcaggcccugca

SEQ ID NO: 2224156 - RNA, 17 nt, Human
gggcaggcccugcacug

SEQ ID NO: 2224157 - RNA, 19 nt, Human
gggcaggcccugcacuguc

SEQ ID NO: 2224158 - RNA, 11 nt, Human
gggcaggcagu

SEQ ID NO: 2224159 - RNA, 17 nt, Human
gggcaggcacagcacag

SEQ ID NO: 2224160 - RNA, 15 nt, Human
gggcaggcaugaagu

SEQ ID NO: 2224161 - RNA, 12 nt, Human
gggcaggcacag

SEQ ID NO: 2224162 - RNA, 13 nt, Human
gggcaggcacagc

SEQ ID NO: 2224163 - RNA, 14 nt, Human
gggcaggcacagca

SEQ ID NO: 2224164 - RNA, 15 nt, Human
gggcaggcacagcac

SEQ ID NO: 2224165 - RNA, 20 nt, Human
gggcagggaaggggaggcag

SEQ ID NO: 2224166 - RNA, 21 nt, Human
gggcaggcccugcacuguccu

SEQ ID NO: 2224167 - RNA, 22 nt, Human
gggcaggcccugcacuguccug

SEQ ID NO: 2224168 - RNA, 23 nt, Human
gggcaggcccugcacuguccugc

SEQ ID NO: 2224169 - RNA, 13 nt, Human
gggcaggcugaca

SEQ ID NO: 2224170 - RNA, 15 nt, Human
gggauuacaggugug

SEQ ID NO: 2224171 - RNA, 12 nt, Human
gggauuacaggu

SEQ ID NO: 2224172 - RNA, 20 nt, Human
gggauuacaggcgugagcca

SEQ ID NO: 2224173 - RNA, 15 nt, Human
gggauuacccaagca

SEQ ID NO: 2224174 - RNA, 16 nt, Human
gggauuacccaagcaa

SEQ ID NO: 2224175 - RNA, 21 nt, Human
gggauuacaggcuccugccac

SEQ ID NO: 2224176 - RNA, 16 nt, Human
gggauuacaggcuccu

SEQ ID NO: 2224177 - RNA, 13 nt, Human
gggauuacaggcu

SEQ ID NO: 2224178 - RNA, 14 nt, Human
gggauuacaggcgu

SEQ ID NO: 2224179 - RNA, 17 nt, Human
gggauuguaaaauggug

SEQ ID NO: 2224180 - RNA, 14 nt, Human
gggcaaagccuagu

SEQ ID NO: 2224181 - RNA, 16 nt, Human
gggauugggggcuggu

SEQ ID NO: 2224182 - RNA, 17 nt, Human
gggauugcugccacuuu

SEQ ID NO: 2224183 - RNA, 16 nt, Human
gggauuguaaaauggu

SEQ ID NO: 2224184 - RNA, 15 nt, Human
gggauugcugccacu

SEQ ID NO: 2224185 - RNA, 15 nt, Human
gggauugggccccug

SEQ ID NO: 2224186 - RNA, 16 nt, Human
gggcaacccccagccu

SEQ ID NO: 2224187 - RNA, 18 nt, Human
gggcaacccccagccugc

SEQ ID NO: 2224188 - RNA, 16 nt, Human
gggcagagcagagacc

SEQ ID NO: 2224189 - RNA, 17 nt, Human
gggcagagcagagacca

SEQ ID NO: 2224190 - RNA, 22 nt, Human
gggcagagcagagaccaucccu

SEQ ID NO: 2224191 - RNA, 14 nt, Human
gggcagaggaaagc

SEQ ID NO: 2224192 - RNA, 15 nt, Human
gggagcaggcggugg

SEQ ID NO: 2224193 - RNA, 21 nt, Human
gggagcaggagauugagaagg

SEQ ID NO: 2224194 - RNA, 12 nt, Human
gggagcaggaga

SEQ ID NO: 2224195 - RNA, 13 nt, Human
gggagcaggagau

SEQ ID NO: 2224196 - RNA, 18 nt, Human
gggagcaggagauugaga

SEQ ID NO: 2224197 - RNA, 21 nt, Human
gggagcaggcggugggcaccc

SEQ ID NO: 2224198 - RNA, 19 nt, Human
gggaggccaaggugggagg

SEQ ID NO: 2224199 - RNA, 20 nt, Human
gggaggcggagcuugcagug

SEQ ID NO: 2224200 - RNA, 13 nt, Human
gggaggcucaggu

SEQ ID NO: 2224201 - RNA, 14 nt, Human
gggaggcgcgagcc

SEQ ID NO: 2224202 - RNA, 20 nt, Human
gggaggcggacguuccagcc

SEQ ID NO: 2224203 - RNA, 21 nt, Human
gggaggcggacguuccagccg

SEQ ID NO: 2224204 - RNA, 18 nt, Human
gggaggcggagaguacag

SEQ ID NO: 2224205 - RNA, 18 nt, Human
gggaggccccacugggga

SEQ ID NO: 2224206 - RNA, 17 nt, Human
gggaggccuaggcgggc

SEQ ID NO: 2224207 - RNA, 16 nt, Human
gggaggccccacuggg

SEQ ID NO: 2224208 - RNA, 11 nt, Human
gggaggcccca

SEQ ID NO: 2224209 - RNA, 19 nt, Human
gggagauggaucaaucaaa

SEQ ID NO: 2224210 - RNA, 19 nt, Human
gggagauggaguucuugug

SEQ ID NO: 2224211 - RNA, 16 nt, Human
gggagaggugccagca

SEQ ID NO: 2224212 - RNA, 17 nt, Human
gggagagugcaggccug

SEQ ID NO: 2224213 - RNA, 13 nt, Human
gggagcagagaca

SEQ ID NO: 2224214 - RNA, 16 nt, Human
gggagcagacaggagg

SEQ ID NO: 2224215 - RNA, 14 nt, Human
gggagcacuggagu

SEQ ID NO: 2224216 - RNA, 16 nt, Human
gggagcacuggagugc

SEQ ID NO: 2224217 - RNA, 17 nt, Human
gggagauucaagggacc

SEQ ID NO: 2224218 - RNA, 11 nt, Human
gggagcacugg

SEQ ID NO: 2224219 - RNA, 15 nt, Human
gggagagggucugga

SEQ ID NO: 2224220 - RNA, 14 nt, Human
gggagacacuggcc

SEQ ID NO: 2224221 - RNA, 19 nt, Human
gggagacacuggccccuca

SEQ ID NO: 2224222 - RNA, 12 nt, Human
gggagacagcau

SEQ ID NO: 2224223 - RNA, 15 nt, Human
gggagacaugugaca

SEQ ID NO: 2224224 - RNA, 21 nt, Human
aaaagcacacucauccccuca

SEQ ID NO: 2224225 - RNA, 16 nt, Human
aaaagcaauuccaacc

SEQ ID NO: 2224226 - RNA, 14 nt, Human
aaaagcaagacugu

SEQ ID NO: 2224227 - RNA, 14 nt, Human
aaaagcaaaugaga

SEQ ID NO: 2224228 - RNA, 14 nt, Human
aaaagauguagauu

SEQ ID NO: 2224229 - RNA, 14 nt, Human
aaaagcaaaaucau

SEQ ID NO: 2224230 - RNA, 12 nt, Human
aaaagcaagacu

SEQ ID NO: 2224231 - RNA, 19 nt, Human
aaaagauggggucuguaaa

SEQ ID NO: 2224232 - RNA, 13 nt, Human
aaaagauguagau

SEQ ID NO: 2224233 - RNA, 21 nt, Human
aaaagauggggucuguaaaau

SEQ ID NO: 2224234 - RNA, 15 nt, Human
aaaagaugcaaugua

SEQ ID NO: 2224235 - RNA, 17 nt, Human
aaaagcagcucuccccu

SEQ ID NO: 2224236 - RNA, 15 nt, Human
aaaagcauaaaugca

SEQ ID NO: 2224237 - RNA, 13 nt, Human
aaaagcauaaaug

SEQ ID NO: 2224238 - RNA, 16 nt, Human
aaaagcagcucucccc

SEQ ID NO: 2224239 - RNA, 14 nt, Human
aaaagcagcuacca

SEQ ID NO: 2224240 - RNA, 19 nt, Human
aaaagcagcccuuggccag

SEQ ID NO: 2224241 - RNA, 14 nt, Human
aaaagcacaagaag

SEQ ID NO: 2224242 - RNA, 15 nt, Human
gggagaaucauguga

SEQ ID NO: 2224243 - RNA, 12 nt, Human
gggagaagcucc

SEQ ID NO: 2224244 - RNA, 22 nt, Human
gggagaaugucaguauguggaa

SEQ ID NO: 2224245 - RNA, 19 nt, Human
gggagaaugucaguaugug

SEQ ID NO: 2224246 - RNA, 12 nt, Human
aaaagcauguac

SEQ ID NO: 2224247 - RNA, 13 nt, Human
aaaagcauguaca

SEQ ID NO: 2224248 - RNA, 14 nt, Human
aaaagcauguacag

SEQ ID NO: 2224249 - RNA, 22 nt, Human
gggagaagaaaggugaguuuga

SEQ ID NO: 2224250 - RNA, 20 nt, Human
gggaggcggagaguacagug

SEQ ID NO: 2224251 - RNA, 15 nt, Human
gggaggcucaggucc

SEQ ID NO: 2224252 - RNA, 15 nt, Human
gggauggaggagaag

SEQ ID NO: 2224253 - RNA, 14 nt, Human
gggauggaggagaa

SEQ ID NO: 2224254 - RNA, 18 nt, Human
gggauggacugaugcuuu

SEQ ID NO: 2224255 - RNA, 15 nt, Human
gggauggaaaaggaa

SEQ ID NO: 2224256 - RNA, 16 nt, Human
gggaugcccuggaggu

SEQ ID NO: 2224257 - RNA, 16 nt, Human
gggaugguccuggggc

SEQ ID NO: 2224258 - RNA, 15 nt, Human
gggaugguccugggg

SEQ ID NO: 2224259 - RNA, 16 nt, Human
gggaugggccaccgcc

SEQ ID NO: 2224260 - RNA, 12 nt, Human
gggaugggaggu

SEQ ID NO: 2224261 - RNA, 13 nt, Human
gggaugggccacc

SEQ ID NO: 2224262 - RNA, 14 nt, Human
gggaugggccaccg

SEQ ID NO: 2224263 - RNA, 15 nt, Human
gggaugggccaccgc

SEQ ID NO: 2224264 - RNA, 18 nt, Human
gggauggaggagaagaau

SEQ ID NO: 2224265 - RNA, 16 nt, Human
gggauguucuggcccu

SEQ ID NO: 2224266 - RNA, 13 nt, Human
gggauguucuggc

SEQ ID NO: 2224267 - RNA, 22 nt, Human
gggauguucagcacugucccuu

SEQ ID NO: 2224268 - RNA, 20 nt, Human
gggauuaauaugaaaacuua

SEQ ID NO: 2224269 - RNA, 16 nt, Human
gggauuaaccucugca

SEQ ID NO: 2224270 - RNA, 22 nt, Human
gggaugugaauugccugcagag

SEQ ID NO: 2224271 - RNA, 23 nt, Human
gggauguauccaugggggcaggg

SEQ ID NO: 2224272 - RNA, 20 nt, Human
gggauguggcugcagcagcg

SEQ ID NO: 2224273 - RNA, 14 nt, Human
gggaugugggaggg

SEQ ID NO: 2224274 - RNA, 16 nt, Human
gggaugguguucaaaa

SEQ ID NO: 2224275 - RNA, 17 nt, Human
gggaugguggagggcca

SEQ ID NO: 2224276 - RNA, 12 nt, Human
gggauggugccc

SEQ ID NO: 2224277 - RNA, 14 nt, Human
gggaugucucucau

SEQ ID NO: 2224278 - RNA, 18 nt, Human
gggaugguggagggccac

SEQ ID NO: 2224279 - RNA, 13 nt, Human
gggauggugcccu

SEQ ID NO: 2224280 - RNA, 22 nt, Human
gggauguacaaggcgaucccau

SEQ ID NO: 2224281 - RNA, 19 nt, Human
gggaggucgaggcaggagg

SEQ ID NO: 2224282 - RNA, 18 nt, Human
gggaggucgaggcaggag

SEQ ID NO: 2224283 - RNA, 17 nt, Human
gggaggucgaggcagga

SEQ ID NO: 2224284 - RNA, 18 nt, Human
gggagggcuccagacaca

SEQ ID NO: 2224285 - RNA, 22 nt, Human
gggaggcucuggagcccacugu

SEQ ID NO: 2224286 - RNA, 14 nt, Human
gggagggcuccaga

SEQ ID NO: 2224287 - RNA, 15 nt, Human
gggagggcuccagac

SEQ ID NO: 2224288 - RNA, 17 nt, Human
gggagggcuccagacac

SEQ ID NO: 2224289 - RNA, 14 nt, Human
aaaaaugccuuuga

SEQ ID NO: 2224290 - RNA, 15 nt, Human
aaaaaugccuuugag

SEQ ID NO: 2224291 - RNA, 18 nt, Human
aaaaaugccuuugagaca

SEQ ID NO: 2224292 - RNA, 14 nt, Human
aaaaaugcugaaca

SEQ ID NO: 2224293 - RNA, 24 nt, Human
aaaaaugccuuugagacaguuucu

SEQ ID NO: 2224294 - RNA, 19 nt, Human
aaaaaugccuuugagacag

SEQ ID NO: 2224295 - RNA, 20 nt, Human
aaaaaugccuuugagacagu

SEQ ID NO: 2224296 - RNA, 21 nt, Human
aaaaaugccuuugagacaguu

SEQ ID NO: 2224297 - RNA, 22 nt, Human
aaaaaugccuuugagacaguuu

SEQ ID NO: 2224298 - RNA, 18 nt, Human
aaaaaucuaccuucugua

SEQ ID NO: 2224299 - RNA, 15 nt, Human
aaaaauccucuuccu

SEQ ID NO: 2224300 - RNA, 19 nt, Human
aaaaauccucuuccucuga

SEQ ID NO: 2224301 - RNA, 19 nt, Human
aaaaaucuaccuucuguag

SEQ ID NO: 2224302 - RNA, 22 nt, Human
aaaaaucuaccuucuguaguuu

SEQ ID NO: 2224303 - RNA, 14 nt, Human
aaaaaucucaaauu

SEQ ID NO: 2224304 - RNA, 14 nt, Human
aaaaauggcucaga

SEQ ID NO: 2224305 - RNA, 18 nt, Human
aaaacaggucaauacagu

SEQ ID NO: 2224306 - RNA, 21 nt, Human
aaaacaggucuucaucgaauc

SEQ ID NO: 2224307 - RNA, 18 nt, Human
aaaacagguggagaaauu

SEQ ID NO: 2224308 - RNA, 16 nt, Human
aaaaaugcugaacauu

SEQ ID NO: 2224309 - RNA, 15 nt, Human
aaaaaugcugaacau

SEQ ID NO: 2224310 - RNA, 19 nt, Human
aaaaaugcugaacauugca

SEQ ID NO: 2224311 - RNA, 23 nt, Human
aaaaauggaaacauuuauuccuu

SEQ ID NO: 2224312 - RNA, 22 nt, Human
aaaaauggaacauaaaauacaa

SEQ ID NO: 2224313 - RNA, 20 nt, Human
aaaacaguccuucaaacuuc

SEQ ID NO: 2224314 - RNA, 18 nt, Human
aaaacauaaucuucugcc

SEQ ID NO: 2224315 - RNA, 17 nt, Human
aaaacauaaucuucugc

SEQ ID NO: 2224316 - RNA, 24 nt, Human
aaaacauaaucuucugccuucuca

SEQ ID NO: 2224317 - RNA, 20 nt, Human
aaaacauaaucuucugccuu

SEQ ID NO: 2224318 - RNA, 16 nt, Human
aaaacaugguagaauu

SEQ ID NO: 2224319 - RNA, 14 nt, Human
aaaacaugguagaa

SEQ ID NO: 2224320 - RNA, 16 nt, Human
aaaaaugggacuucuu

SEQ ID NO: 2224321 - RNA, 19 nt, Human
aaaacauguaauauaaaga

SEQ ID NO: 2224322 - RNA, 14 nt, Human
aaaacauuaagaaa

SEQ ID NO: 2224323 - RNA, 15 nt, Human
aaaacaugcuacaca

SEQ ID NO: 2224324 - RNA, 13 nt, Human
aaaacauuguucc

SEQ ID NO: 2224325 - RNA, 12 nt, Human
aaaacauuguuc

SEQ ID NO: 2224326 - RNA, 16 nt, Human
aaaacauuccauccuu

SEQ ID NO: 2224327 - RNA, 19 nt, Human
aaaacauuaagaaaaucau

SEQ ID NO: 2224328 - RNA, 23 nt, Human
aaaacauuaagaaaaucauauug

SEQ ID NO: 2224329 - RNA, 15 nt, Human
aaaacauuaagaaaa

SEQ ID NO: 2224330 - RNA, 16 nt, Human
aaaacauuaagaaaau

SEQ ID NO: 2224331 - RNA, 18 nt, Human
aaaacauuaagaaaauca

SEQ ID NO: 2224332 - RNA, 21 nt, Human
aaaaccaauguucucucuucu

SEQ ID NO: 2224333 - RNA, 12 nt, Human
aaaaccacagca

SEQ ID NO: 2224334 - RNA, 14 nt, Human
aaaaccacagcagu

SEQ ID NO: 2224335 - RNA, 13 nt, Human
aaaaccacagcag

SEQ ID NO: 2224336 - RNA, 15 nt, Human
aaaacccagagagga

SEQ ID NO: 2224337 - RNA, 13 nt, Human
aaaacccagagag

SEQ ID NO: 2224338 - RNA, 15 nt, Human
aaaacccagauaaag

SEQ ID NO: 2224339 - RNA, 22 nt, Human
aaaaccucacccgaggcugccc

SEQ ID NO: 2224340 - RNA, 13 nt, Human
aaaaccugacaaa

SEQ ID NO: 2224341 - RNA, 20 nt, Human
aaaaccuaaguccuuuaugu

SEQ ID NO: 2224342 - RNA, 21 nt, Human
aaaaccuaaguccuuuaugug

SEQ ID NO: 2224343 - RNA, 22 nt, Human
aaaaccccacuacacagucugc

SEQ ID NO: 2224344 - RNA, 15 nt, Human
aaaacccugccccca

SEQ ID NO: 2224345 - RNA, 13 nt, Human
aaaagaugcuucu

SEQ ID NO: 2224346 - RNA, 17 nt, Human
aaaagaugaaaauauuu

SEQ ID NO: 2224347 - RNA, 23 nt, Human
aaaacugcugacuguuuucucuu

SEQ ID NO: 2224348 - RNA, 22 nt, Human
aaaacugcugacuguuuucucu

SEQ ID NO: 2224349 - RNA, 18 nt, Human
aaaacucuacuuaaucca

SEQ ID NO: 2224350 - RNA, 19 nt, Human
aaaacucuacuuaauccaa

SEQ ID NO: 2224351 - RNA, 20 nt, Human
aaaacugcugacuguuuucu

SEQ ID NO: 2224352 - RNA, 13 nt, Human
aaaacucauuuuu

SEQ ID NO: 2224353 - RNA, 22 nt, Human
aaaacucgaggacuguauuugu

SEQ ID NO: 2224354 - RNA, 12 nt, Human
aaaacucuacuu

SEQ ID NO: 2224355 - RNA, 15 nt, Human
aaaacucuacuuaau

SEQ ID NO: 2224356 - RNA, 14 nt, Human
gggaagagggggcg

SEQ ID NO: 2224357 - RNA, 16 nt, Human
gggaagaguguacugg

SEQ ID NO: 2224358 - RNA, 17 nt, Human
gggaagaguguacuggg

SEQ ID NO: 2224359 - RNA, 12 nt, Human
gggaagcccugg

SEQ ID NO: 2224360 - RNA, 22 nt, Human
gggaagcagaauagcaaggugc

SEQ ID NO: 2224361 - RNA, 22 nt, Human
gggaagauaggcucugcacaga

SEQ ID NO: 2224362 - RNA, 17 nt, Human
gggaagagaggaguuca

SEQ ID NO: 2224363 - RNA, 11 nt, Human
gggaagagagg

SEQ ID NO: 2224364 - RNA, 18 nt, Human
gggaagagaggaguucaa

SEQ ID NO: 2224365 - RNA, 21 nt, Human
gggaagagaggaguucaauga

SEQ ID NO: 2224366 - RNA, 22 nt, Human
gggaagagaggaguucaaugau

SEQ ID NO: 2224367 - RNA, 23 nt, Human
gggaagagaggaguucaaugauc

SEQ ID NO: 2224368 - RNA, 24 nt, Human
gggaagagaggaguucaaugaucu

SEQ ID NO: 2224369 - RNA, 14 nt, Human
gggaagagcacagc

SEQ ID NO: 2224370 - RNA, 15 nt, Human
gggaagagcacagcc

SEQ ID NO: 2224371 - RNA, 16 nt, Human
gggaagagcacagccc

SEQ ID NO: 2224372 - RNA, 18 nt, Human
gggaagagcacagcccuc

SEQ ID NO: 2224373 - RNA, 20 nt, Human
gggaagagcacagcccuccc

SEQ ID NO: 2224374 - RNA, 22 nt, Human
gggaagagcacagcccucccgc

SEQ ID NO: 2224375 - RNA, 16 nt, Human
gggacagcuccuucug

SEQ ID NO: 2224376 - RNA, 23 nt, Human
gggacagaggggguggccuccca

SEQ ID NO: 2224377 - RNA, 13 nt, Human
gggacagaggggg

SEQ ID NO: 2224378 - RNA, 22 nt, Human
gggacagaggggguggccuccc

SEQ ID NO: 2224379 - RNA, 23 nt, Human
gggaagcggagguugcagggagc

SEQ ID NO: 2224380 - RNA, 16 nt, Human
gggaagcuacagguua

SEQ ID NO: 2224381 - RNA, 21 nt, Human
gggaagcugaggcgggagaau

SEQ ID NO: 2224382 - RNA, 17 nt, Human
gggaaggaacucuggcu

SEQ ID NO: 2224383 - RNA, 17 nt, Human
gggaaggaggcuggcuu

SEQ ID NO: 2224384 - RNA, 20 nt, Human
gggaagcuucuuaaaugaga

SEQ ID NO: 2224385 - RNA, 20 nt, Human
gggaaggaggguuagggagg

SEQ ID NO: 2224386 - RNA, 17 nt, Human
gggacagaggccugccc

SEQ ID NO: 2224387 - RNA, 16 nt, Human
gggaaggauacaaaag

SEQ ID NO: 2224388 - RNA, 15 nt, Human
gggacagaggccugc

SEQ ID NO: 2224389 - RNA, 13 nt, Human
gggaaggauacaa

SEQ ID NO: 2224390 - RNA, 15 nt, Human
gggacagagucuggg

SEQ ID NO: 2224391 - RNA, 18 nt, Human
gggacagaggccugcccg

SEQ ID NO: 2224392 - RNA, 21 nt, Human
gggacagcuccuucuguccua

SEQ ID NO: 2224393 - RNA, 19 nt, Human
gggacauuugcucauggaa

SEQ ID NO: 2224394 - RNA, 13 nt, Human
gggaccaaggacc

SEQ ID NO: 2224395 - RNA, 12 nt, Human
gggacagggcug

SEQ ID NO: 2224396 - RNA, 16 nt, Human
gggaccaacugggccc

SEQ ID NO: 2224397 - RNA, 14 nt, Human
gggacagggcucgc

SEQ ID NO: 2224398 - RNA, 13 nt, Human
aaaaauauaaaac

SEQ ID NO: 2224399 - RNA, 14 nt, Human
aaaaauauaaaacu

SEQ ID NO: 2224400 - RNA, 14 nt, Human
aaaaauauaacuua

SEQ ID NO: 2224401 - RNA, 12 nt, Human
aaaaauauaaaa

SEQ ID NO: 2224402 - RNA, 20 nt, Human
gggacauuugcucauggaau

SEQ ID NO: 2224403 - RNA, 21 nt, Human
gggacauuugcucauggaauu

SEQ ID NO: 2224404 - RNA, 16 nt, Human
aaaaauccagaaagaa

SEQ ID NO: 2224405 - RNA, 15 nt, Human
aaaaaucacauccug

SEQ ID NO: 2224406 - RNA, 16 nt, Human
aaaaaucauguuugcu

SEQ ID NO: 2224407 - RNA, 17 nt, Human
aaaaaucauaaacugug

SEQ ID NO: 2224408 - RNA, 11 nt, Human
aaaaauauuua

SEQ ID NO: 2224409 - RNA, 13 nt, Human
aaaaauauuccau

SEQ ID NO: 2224410 - RNA, 20 nt, Human
aaaaauauggaacuucuaau

SEQ ID NO: 2224411 - RNA, 16 nt, Human
aaaaauauuauaacuu

SEQ ID NO: 2224412 - RNA, 13 nt, Human
aaaaauauauuua

SEQ ID NO: 2224413 - RNA, 15 nt, Human
aaaaauauauuuaau

SEQ ID NO: 2224414 - RNA, 19 nt, Human
aaaaauauauuuaaugaua

SEQ ID NO: 2224415 - RNA, 23 nt, Human
aaaaauaugaccacacuccagcu

SEQ ID NO: 2224416 - RNA, 21 nt, Human
aaaaauaugaccacacuccag

SEQ ID NO: 2224417 - RNA, 21 nt, Human
aaaaugaguuaccuacauuuu

SEQ ID NO: 2224418 - RNA, 19 nt, Human
aaaaugaggaauguauaug

SEQ ID NO: 2224419 - RNA, 16 nt, Human
aaaaugaggacauguu

SEQ ID NO: 2224420 - RNA, 23 nt, Human
aaaaugaguuuuuauggggcuga

SEQ ID NO: 2224421 - RNA, 18 nt, Human
aaaaugagguucaacugu

SEQ ID NO: 2224422 - RNA, 23 nt, Human
aaaaugagcucgcauuugucaau

SEQ ID NO: 2224423 - RNA, 15 nt, Human
aaaaugaauccuaca

SEQ ID NO: 2224424 - RNA, 16 nt, Human
aaaaugaauccuacac

SEQ ID NO: 2224425 - RNA, 15 nt, Human
aaaaugaggaaugua

SEQ ID NO: 2224426 - RNA, 16 nt, Human
aaaaugaggaauguau

SEQ ID NO: 2224427 - RNA, 18 nt, Human
aaaaugaggaauguauau

SEQ ID NO: 2224428 - RNA, 21 nt, Human
aaaaugagccuggcaagaaug

SEQ ID NO: 2224429 - RNA, 14 nt, Human
aaaaugagccuggc

SEQ ID NO: 2224430 - RNA, 19 nt, Human
aaaaugaaagcaugucuca

SEQ ID NO: 2224431 - RNA, 22 nt, Human
aaaaucuuucuuucuuagaaau

SEQ ID NO: 2224432 - RNA, 23 nt, Human
aaaaucuuucuuucuuagaaauu

SEQ ID NO: 2224433 - RNA, 17 nt, Human
aaaaucuuucuuucuua

SEQ ID NO: 2224434 - RNA, 19 nt, Human
aaaaucuuucuuucuuaga

SEQ ID NO: 2224435 - RNA, 20 nt, Human
aaaaucuuucuuucuuagaa

SEQ ID NO: 2224436 - RNA, 21 nt, Human
aaaaucuuucuuucuuagaaa

SEQ ID NO: 2224437 - RNA, 22 nt, Human
aaaaugaaagcaugucucaaua

SEQ ID NO: 2224438 - RNA, 20 nt, Human
aaaaugaagguuaggauuua

SEQ ID NO: 2224439 - RNA, 16 nt, Human
aaaaucuguggugguc

SEQ ID NO: 2224440 - RNA, 14 nt, Human
aaaaguauuuuccu

SEQ ID NO: 2224441 - RNA, 15 nt, Human
aaaaguauauguuag

SEQ ID NO: 2224442 - RNA, 14 nt, Human
aaaaguauuauuuu

SEQ ID NO: 2224443 - RNA, 20 nt, Human
aaaaguauuauuuuccaaaa

SEQ ID NO: 2224444 - RNA, 22 nt, Human
aaaaguauuauuuuccaaaagu

SEQ ID NO: 2224445 - RNA, 20 nt, Human
aaaaguagguuuacauucau

SEQ ID NO: 2224446 - RNA, 14 nt, Human
aaaaguauauguua

SEQ ID NO: 2224447 - RNA, 13 nt, Human
aaaaguauauguu

SEQ ID NO: 2224448 - RNA, 19 nt, Human
aaaaguauguuagugcaaa

SEQ ID NO: 2224449 - RNA, 17 nt, Human
aaaaucuuggcacagaa

SEQ ID NO: 2224450 - RNA, 18 nt, Human
aaaaucuuggcacagaaa

SEQ ID NO: 2224451 - RNA, 19 nt, Human
aaaaucuguuugaucccug

SEQ ID NO: 2224452 - RNA, 12 nt, Human
aaaaguauuuuc

SEQ ID NO: 2224453 - RNA, 17 nt, Human
gggccaggacaggcccg

SEQ ID NO: 2224454 - RNA, 16 nt, Human
gggccaggacaggccc

SEQ ID NO: 2224455 - RNA, 14 nt, Human
gggccaggacugag

SEQ ID NO: 2224456 - RNA, 17 nt, Human
gggccaggacugagccc

SEQ ID NO: 2224457 - RNA, 13 nt, Human
gggccaggcuggg

SEQ ID NO: 2224458 - RNA, 11 nt, Human
gggccaggagc

SEQ ID NO: 2224459 - RNA, 15 nt, Human
gggccagccccuccc

SEQ ID NO: 2224460 - RNA, 12 nt, Human
gggccagccccu

SEQ ID NO: 2224461 - RNA, 13 nt, Human
gggccagccccuc

SEQ ID NO: 2224462 - RNA, 17 nt, Human
gggccagccccucccac

SEQ ID NO: 2224463 - RNA, 12 nt, Human
gggccagccagg

SEQ ID NO: 2224464 - RNA, 13 nt, Human
gggccagccaggc

SEQ ID NO: 2224465 - RNA, 14 nt, Human
gggccagccaggcg

SEQ ID NO: 2224466 - RNA, 15 nt, Human
gggccagccaggcgg

SEQ ID NO: 2224467 - RNA, 16 nt, Human
gggccagccaggcggg

SEQ ID NO: 2224468 - RNA, 17 nt, Human
gggccagccaggcgggc

SEQ ID NO: 2224469 - RNA, 18 nt, Human
gggccagccaggcgggcu

SEQ ID NO: 2224470 - RNA, 22 nt, Human
gggccagccaggcgggcucaag

SEQ ID NO: 2224471 - RNA, 18 nt, Human
aaaaugcugaacauugca

SEQ ID NO: 2224472 - RNA, 16 nt, Human
aaaaugcugaacauug

SEQ ID NO: 2224473 - RNA, 15 nt, Human
aaaaugcugaacauu

SEQ ID NO: 2224474 - RNA, 20 nt, Human
aaaaugcugaacauugcaua

SEQ ID NO: 2224475 - RNA, 19 nt, Human
gggccagauccagccuggg

SEQ ID NO: 2224476 - RNA, 15 nt, Human
aaaaugccuuugaga

SEQ ID NO: 2224477 - RNA, 17 nt, Human
aaaaugccuuugagaca

SEQ ID NO: 2224478 - RNA, 22 nt, Human
aaaaugccuuugagacaguuuc

SEQ ID NO: 2224479 - RNA, 23 nt, Human
aaaaugccuuugagacaguuucu

SEQ ID NO: 2224480 - RNA, 16 nt, Human
aaaaugccucagugua

SEQ ID NO: 2224481 - RNA, 18 nt, Human
aaaaugccucaguguauu

SEQ ID NO: 2224482 - RNA, 19 nt, Human
aaaaugccucaguguauuu

SEQ ID NO: 2224483 - RNA, 20 nt, Human
aaaaugccucaguguauuug

SEQ ID NO: 2224484 - RNA, 22 nt, Human
aaaaugccucaguguauuugua

SEQ ID NO: 2224485 - RNA, 11 nt, Human
aaaaugccuuu

SEQ ID NO: 2224486 - RNA, 12 nt, Human
aaaaugccuuug

SEQ ID NO: 2224487 - RNA, 14 nt, Human
aaaaugccuuugag

SEQ ID NO: 2224488 - RNA, 16 nt, Human
gggccagggcccugca

SEQ ID NO: 2224489 - RNA, 14 nt, Human
gggccagggcccug

SEQ ID NO: 2224490 - RNA, 13 nt, Human
gggccagggcccu

SEQ ID NO: 2224491 - RNA, 21 nt, Human
gggccaggcugggucgcccug

SEQ ID NO: 2224492 - RNA, 14 nt, Human
gggccaggcugggu

SEQ ID NO: 2224493 - RNA, 15 nt, Human
gggccaggcuggguc

SEQ ID NO: 2224494 - RNA, 21 nt, Human
gggccaguccugccuggccag

SEQ ID NO: 2224495 - RNA, 20 nt, Human
gggccaguccugccuggcca

SEQ ID NO: 2224496 - RNA, 19 nt, Human
gggccaguccugccuggcc

SEQ ID NO: 2224497 - RNA, 18 nt, Human
gggccaguccugccuggc

SEQ ID NO: 2224498 - RNA, 22 nt, Human
gggccaguccugccuggccagg

SEQ ID NO: 2224499 - RNA, 15 nt, Human
gggccagucugggcu

SEQ ID NO: 2224500 - RNA, 16 nt, Human
gggccagucugggcug

SEQ ID NO: 2224501 - RNA, 22 nt, Human
gggccagucuguggaucagaga

SEQ ID NO: 2224502 - RNA, 15 nt, Human
gggccaguccugccu

SEQ ID NO: 2224503 - RNA, 23 nt, Human
gggccaggggucucccuggagug

SEQ ID NO: 2224504 - RNA, 21 nt, Human
gggccagucccugaggcaggu

SEQ ID NO: 2224505 - RNA, 18 nt, Human
gggccagggcccugcaga

SEQ ID NO: 2224506 - RNA, 18 nt, Human
gggccagucccugaggca

SEQ ID NO: 2224507 - RNA, 22 nt, Human
gggccguaccccacccucagca

SEQ ID NO: 2224508 - RNA, 23 nt, Human
gggccuagauccacacacagagg

SEQ ID NO: 2224509 - RNA, 20 nt, Human
gggccuagauccacacacag

SEQ ID NO: 2224510 - RNA, 17 nt, Human
gggccgugcccaggggc

SEQ ID NO: 2224511 - RNA, 17 nt, Human
gggccuacuagagucug

SEQ ID NO: 2224512 - RNA, 13 nt, Human
gggccgugcccag

SEQ ID NO: 2224513 - RNA, 14 nt, Human
gggccgugcccagg

SEQ ID NO: 2224514 - RNA, 22 nt, Human
gggccuagauccacacacagag

SEQ ID NO: 2224515 - RNA, 23 nt, Human
gggccuagcugcuacaaagaaga

SEQ ID NO: 2224516 - RNA, 14 nt, Human
gggccuaucagugu

SEQ ID NO: 2224517 - RNA, 17 nt, Human
gggccuaggccucagcc

SEQ ID NO: 2224518 - RNA, 15 nt, Human
gggccuaucagugug

SEQ ID NO: 2224519 - RNA, 18 nt, Human
gggccuaucagugugccc

SEQ ID NO: 2224520 - RNA, 20 nt, Human
gggccuaucagugugccccc

SEQ ID NO: 2224521 - RNA, 22 nt, Human
gggccuaucagugugcccccca

SEQ ID NO: 2224522 - RNA, 23 nt, Human
gggccuaucagugugccccccau

SEQ ID NO: 2224523 - RNA, 19 nt, Human
gggcccugguccuuccagg

SEQ ID NO: 2224524 - RNA, 17 nt, Human
gggccaugcugaggccu

SEQ ID NO: 2224525 - RNA, 21 nt, Human
gggcccugguguuucuagcac

SEQ ID NO: 2224526 - RNA, 21 nt, Human
gggcccuucacugccuuugcu

SEQ ID NO: 2224527 - RNA, 13 nt, Human
gggccgcaggcgg

SEQ ID NO: 2224528 - RNA, 23 nt, Human
gggccgcaggcgggaaaagcagc

SEQ ID NO: 2224529 - RNA, 17 nt, Human
gggcccuuugagugcag

SEQ ID NO: 2224530 - RNA, 18 nt, Human
gggccgaauccccucccu

SEQ ID NO: 2224531 - RNA, 18 nt, Human
gggccaugagcuccagac

SEQ ID NO: 2224532 - RNA, 22 nt, Human
gggccaugauggcaacagaucu

SEQ ID NO: 2224533 - RNA, 17 nt, Human
gggccauacuggccucg

SEQ ID NO: 2224534 - RNA, 22 nt, Human
gggccauacuggccucgccugg

SEQ ID NO: 2224535 - RNA, 15 nt, Human
gggccauagcuccug

SEQ ID NO: 2224536 - RNA, 17 nt, Human
gggccauccugucccac

SEQ ID NO: 2224537 - RNA, 20 nt, Human
gggccagucugggcugccgg

SEQ ID NO: 2224538 - RNA, 14 nt, Human
gggccauacuggcc

SEQ ID NO: 2224539 - RNA, 15 nt, Human
gggccauacuggccu

SEQ ID NO: 2224540 - RNA, 16 nt, Human
gggccauacuggccuc

SEQ ID NO: 2224541 - RNA, 19 nt, Human
gggccaugagcuccagacc

SEQ ID NO: 2224542 - RNA, 15 nt, Human
gggccaugcugaagg

SEQ ID NO: 2224543 - RNA, 14 nt, Human
gggccaugcugagg

SEQ ID NO: 2224544 - RNA, 15 nt, Human
gggccaugcugaggc

SEQ ID NO: 2224545 - RNA, 23 nt, Human
gggccaugauggcaacagaucug

SEQ ID NO: 2224546 - RNA, 14 nt, Human
gggccaugcugaag

SEQ ID NO: 2224547 - RNA, 14 nt, Human
gggccaguuggucc

SEQ ID NO: 2224548 - RNA, 18 nt, Human
gggccaguuggucccccu

SEQ ID NO: 2224549 - RNA, 22 nt, Human
gggccaguuggucccccuucca

SEQ ID NO: 2224550 - RNA, 23 nt, Human
gggccaguuggucccccuuccau

SEQ ID NO: 2224551 - RNA, 14 nt, Human
gggcggcagagagg

SEQ ID NO: 2224552 - RNA, 17 nt, Human
gggcggcaggggccugg

SEQ ID NO: 2224553 - RNA, 21 nt, Human
gggcggcaggggccuggagau

SEQ ID NO: 2224554 - RNA, 15 nt, Human
gggcgcuggcccagc

SEQ ID NO: 2224555 - RNA, 16 nt, Human
gggcgcuggcccagcc

SEQ ID NO: 2224556 - RNA, 17 nt, Human
gggcgcuggcccagccg

SEQ ID NO: 2224557 - RNA, 18 nt, Human
gggcgcuggcccagccgg

SEQ ID NO: 2224558 - RNA, 19 nt, Human
gggcgcuggcccagccggc

SEQ ID NO: 2224559 - RNA, 23 nt, Human
gggcgcuggcccagccggccucu

SEQ ID NO: 2224560 - RNA, 14 nt, Human
gggcggcacagccu

SEQ ID NO: 2224561 - RNA, 15 nt, Human
gggcgggaggauguu

SEQ ID NO: 2224562 - RNA, 14 nt, Human
gggcggggccuugc

SEQ ID NO: 2224563 - RNA, 20 nt, Human
gggcgggcagcacagcaagg

SEQ ID NO: 2224564 - RNA, 15 nt, Human
gggcgggccccucau

SEQ ID NO: 2224565 - RNA, 15 nt, Human
gggcgggcagcacag

SEQ ID NO: 2224566 - RNA, 13 nt, Human
gggcggcugagag

SEQ ID NO: 2224567 - RNA, 17 nt, Human
gggcgggacccaggcac

SEQ ID NO: 2224568 - RNA, 20 nt, Human
gggcuaagagcuagcgcugc

SEQ ID NO: 2224569 - RNA, 14 nt, Human
gggcguguuguuuu

SEQ ID NO: 2224570 - RNA, 23 nt, Human
gggcuaagagcuagcgcugccgc

SEQ ID NO: 2224571 - RNA, 23 nt, Human
gggcuacaccuuagccugcccuc

SEQ ID NO: 2224572 - RNA, 15 nt, Human
gggcgugguggugag

SEQ ID NO: 2224573 - RNA, 13 nt, Human
gggcuacccugag

SEQ ID NO: 2224574 - RNA, 15 nt, Human
gggcuacaaggaccc

SEQ ID NO: 2224575 - RNA, 19 nt, Human
gggcuacccugagcugagg

SEQ ID NO: 2224576 - RNA, 16 nt, Human
gggcuacccugagcug

SEQ ID NO: 2224577 - RNA, 15 nt, Human
gggccuccugugugu

SEQ ID NO: 2224578 - RNA, 22 nt, Human
gggccucggacuuagcugggag

SEQ ID NO: 2224579 - RNA, 14 nt, Human
gggccuccagaacu

SEQ ID NO: 2224580 - RNA, 21 nt, Human
gggccuccucuguccagggcc

SEQ ID NO: 2224581 - RNA, 19 nt, Human
gggccucaaaggcccgcuc

SEQ ID NO: 2224582 - RNA, 13 nt, Human
gggccuccugugu

SEQ ID NO: 2224583 - RNA, 23 nt, Human
gggccucuugcggucccuucuua

SEQ ID NO: 2224584 - RNA, 21 nt, Human
gggccucuuggaaaaagugau

SEQ ID NO: 2224585 - RNA, 19 nt, Human
gggccucuuaugggcuggg

SEQ ID NO: 2224586 - RNA, 20 nt, Human
gggccucuuaugggcugggu

SEQ ID NO: 2224587 - RNA, 18 nt, Human
gggccugagccuggccag

SEQ ID NO: 2224588 - RNA, 18 nt, Human
gggccugcaggaccugcc

SEQ ID NO: 2224589 - RNA, 23 nt, Human
gggccugaggucuggcugcuugc

SEQ ID NO: 2224590 - RNA, 16 nt, Human
gggccugauggggagg

SEQ ID NO: 2224591 - RNA, 16 nt, Human
gggccugagccuggcc

SEQ ID NO: 2224592 - RNA, 15 nt, Human
gggccugagccuggc

SEQ ID NO: 2224593 - RNA, 17 nt, Human
gggccugagccaagcua

SEQ ID NO: 2224594 - RNA, 21 nt, Human
aaacaaaaauuagguauuuug

SEQ ID NO: 2224595 - RNA, 20 nt, Human
aaacaagaccacguuucuaa

SEQ ID NO: 2224596 - RNA, 19 nt, Human
aaaauuuuuuuucauguuu

SEQ ID NO: 2224597 - RNA, 18 nt, Human
aaaauuuuuuuucauguu

SEQ ID NO: 2224598 - RNA, 17 nt, Human
aaaauuuuuuuucaugu

SEQ ID NO: 2224599 - RNA, 16 nt, Human
aaaauuuuuuuucaug

SEQ ID NO: 2224600 - RNA, 15 nt, Human
aaaauuuuuuuucau

SEQ ID NO: 2224601 - RNA, 16 nt, Human
aaaauuuuuuuagaaa

SEQ ID NO: 2224602 - RNA, 19 nt, Human
aaacaaaaauuaaaauccu

SEQ ID NO: 2224603 - RNA, 16 nt, Human
aaacaaaaagaacaaa

SEQ ID NO: 2224604 - RNA, 17 nt, Human
aaacaaaaagaacaaaa

SEQ ID NO: 2224605 - RNA, 13 nt, Human
aaacaaaaacacu

SEQ ID NO: 2224606 - RNA, 11 nt, Human
aaacaaaaaga

SEQ ID NO: 2224607 - RNA, 12 nt, Human
aaacaaaaagaa

SEQ ID NO: 2224608 - RNA, 20 nt, Human
aaacaagcacuaaacaaaga

SEQ ID NO: 2224609 - RNA, 12 nt, Human
aaacacauuuuu

SEQ ID NO: 2224610 - RNA, 19 nt, Human
aaacaagaugcuggauguc

SEQ ID NO: 2224611 - RNA, 15 nt, Human
aaacaagauuuuaaa

SEQ ID NO: 2224612 - RNA, 22 nt, Human
aaacaagauuuuaaagacaugu

SEQ ID NO: 2224613 - RNA, 16 nt, Human
aaacacauuuuucuua

SEQ ID NO: 2224614 - RNA, 12 nt, Human
aaacagugccug

SEQ ID NO: 2224615 - RNA, 14 nt, Human
aaacagugagccug

SEQ ID NO: 2224616 - RNA, 20 nt, Human
aaacagucucaggaaaucaa

SEQ ID NO: 2224617 - RNA, 17 nt, Human
aaacaccggguuccagc

SEQ ID NO: 2224618 - RNA, 19 nt, Human
aaacaccaacauguuggga

SEQ ID NO: 2224619 - RNA, 15 nt, Human
aaacacccucacacu

SEQ ID NO: 2224620 - RNA, 14 nt, Human
aaacaccuagcuuu

SEQ ID NO: 2224621 - RNA, 18 nt, Human
aaacaccuccucauguac

SEQ ID NO: 2224622 - RNA, 15 nt, Human
aaacaccuagcuuua

SEQ ID NO: 2224623 - RNA, 22 nt, Human
aaacaucaguuacucugaaggg

SEQ ID NO: 2224624 - RNA, 20 nt, Human
aaacaucaguuacucugaag

SEQ ID NO: 2224625 - RNA, 19 nt, Human
aaacaucaguuacucugaa

SEQ ID NO: 2224626 - RNA, 16 nt, Human
aaacaucaguuacucu

SEQ ID NO: 2224627 - RNA, 14 nt, Human
aaacaucacacaca

SEQ ID NO: 2224628 - RNA, 22 nt, Human
aaacaucacacacacagacaga

SEQ ID NO: 2224629 - RNA, 23 nt, Human
aaacaguuaacuuucagaagaga

SEQ ID NO: 2224630 - RNA, 18 nt, Human
aaacaguuaacuuucaga

SEQ ID NO: 2224631 - RNA, 14 nt, Human
aaacaguuaacuuu

SEQ ID NO: 2224632 - RNA, 13 nt, Human
aaacaguguuuug

SEQ ID NO: 2224633 - RNA, 18 nt, Human
aaacagugccugcugaau

SEQ ID NO: 2224634 - RNA, 14 nt, Human
ggggccuggaccug

SEQ ID NO: 2224635 - RNA, 19 nt, Human
ggggccuggagauccuccu

SEQ ID NO: 2224636 - RNA, 19 nt, Human
ggggccagauccagccugg

SEQ ID NO: 2224637 - RNA, 12 nt, Human
ggggccucccug

SEQ ID NO: 2224638 - RNA, 17 nt, Human
ggggccagauccagccu

SEQ ID NO: 2224639 - RNA, 14 nt, Human
ggggccagauccag

SEQ ID NO: 2224640 - RNA, 13 nt, Human
ggggccagaucca

SEQ ID NO: 2224641 - RNA, 13 nt, Human
ggggccagaggcu

SEQ ID NO: 2224642 - RNA, 19 nt, Human
ggggccacuuuugacuagg

SEQ ID NO: 2224643 - RNA, 12 nt, Human
ggggccagaggc

SEQ ID NO: 2224644 - RNA, 12 nt, Human
ggggccagagga

SEQ ID NO: 2224645 - RNA, 23 nt, Human
ggggccagaggaacuguccagag

SEQ ID NO: 2224646 - RNA, 16 nt, Human
ggggccacacagaaac

SEQ ID NO: 2224647 - RNA, 23 nt, Human
ggggcauguauuggccuggaggu

SEQ ID NO: 2224648 - RNA, 18 nt, Human
ggggcauguauuggccug

SEQ ID NO: 2224649 - RNA, 19 nt, Human
ggggcauguauuggccugg

SEQ ID NO: 2224650 - RNA, 16 nt, Human
ggggcaugcuggggca

SEQ ID NO: 2224651 - RNA, 13 nt, Human
ggggacagggaug

SEQ ID NO: 2224652 - RNA, 15 nt, Human
ggggacagggcuggc

SEQ ID NO: 2224653 - RNA, 20 nt, Human
aaacauccuucaagaacucu

SEQ ID NO: 2224654 - RNA, 18 nt, Human
aaacauccuucaagaacu

SEQ ID NO: 2224655 - RNA, 22 nt, Human
aaacauccuacaagacacagug

SEQ ID NO: 2224656 - RNA, 11 nt, Human
aaacaucugga

SEQ ID NO: 2224657 - RNA, 20 nt, Human
aaacaucuauucucuccaaa

SEQ ID NO: 2224658 - RNA, 15 nt, Human
aaacaucuauucucu

SEQ ID NO: 2224659 - RNA, 23 nt, Human
aaacaucaguuacucugaagggc

SEQ ID NO: 2224660 - RNA, 22 nt, Human
aaacauauuuguuaaauauuua

SEQ ID NO: 2224661 - RNA, 18 nt, Human
aaacauccuacaagacac

SEQ ID NO: 2224662 - RNA, 19 nt, Human
aaacauccaauauuuucuu

SEQ ID NO: 2224663 - RNA, 17 nt, Human
aaacauccaauauuuuc

SEQ ID NO: 2224664 - RNA, 12 nt, Human
aaacaugaagug

SEQ ID NO: 2224665 - RNA, 21 nt, Human
aaacaugacccuaaaucuuga

SEQ ID NO: 2224666 - RNA, 19 nt, Human
aaacaugacccuaaaucuu

SEQ ID NO: 2224667 - RNA, 12 nt, Human
ggggacagcucc

SEQ ID NO: 2224668 - RNA, 14 nt, Human
ggggacagcuccuu

SEQ ID NO: 2224669 - RNA, 20 nt, Human
ggggacagcuccuucugucc

SEQ ID NO: 2224670 - RNA, 19 nt, Human
aaaaugugcaaaacagcgu

SEQ ID NO: 2224671 - RNA, 19 nt, Human
aaaaugugcuauacugcau

SEQ ID NO: 2224672 - RNA, 18 nt, Human
aaaaugugauuuuucuga

SEQ ID NO: 2224673 - RNA, 17 nt, Human
aaaaugugcaaaacagc

SEQ ID NO: 2224674 - RNA, 13 nt, Human
aaaaugugauuuu

SEQ ID NO: 2224675 - RNA, 12 nt, Human
aaaaugugauuu

SEQ ID NO: 2224676 - RNA, 16 nt, Human
aaaaugugacccagau

SEQ ID NO: 2224677 - RNA, 15 nt, Human
aaaaugugauaugua

SEQ ID NO: 2224678 - RNA, 12 nt, Human
aaaaugugaagu

SEQ ID NO: 2224679 - RNA, 21 nt, Human
aaaaugucuguagcuccucaa

SEQ ID NO: 2224680 - RNA, 18 nt, Human
aaaaugugaauaaaauua

SEQ ID NO: 2224681 - RNA, 19 nt, Human
aaaaugugacccagauccu

SEQ ID NO: 2224682 - RNA, 18 nt, Human
aaaaugucuguuaacuua

SEQ ID NO: 2224683 - RNA, 18 nt, Human
aaaaugucuuguguuacc

SEQ ID NO: 2224684 - RNA, 21 nt, Human
gggcuggugacccagucagag

SEQ ID NO: 2224685 - RNA, 15 nt, Human
gggcuggugccagcc

SEQ ID NO: 2224686 - RNA, 16 nt, Human
gggcuggugccagccu

SEQ ID NO: 2224687 - RNA, 17 nt, Human
gggcuggugccagccuu

SEQ ID NO: 2224688 - RNA, 14 nt, Human
gggcugguucugua

SEQ ID NO: 2224689 - RNA, 20 nt, Human
gggcuggugccagccuuccu

SEQ ID NO: 2224690 - RNA, 16 nt, Human
gggcuggguuggcgca

SEQ ID NO: 2224691 - RNA, 19 nt, Human
gggcuggguuggcgcaccc

SEQ ID NO: 2224692 - RNA, 21 nt, Human
gggcuggguuggcgcacccuc

SEQ ID NO: 2224693 - RNA, 22 nt, Human
gggcuggguuggcgcacccucc

SEQ ID NO: 2224694 - RNA, 23 nt, Human
gggcuggguuggcgcacccuccc

SEQ ID NO: 2224695 - RNA, 17 nt, Human
gggcugguagcucaggu

SEQ ID NO: 2224696 - RNA, 18 nt, Human
gggcugguagcucaggug

SEQ ID NO: 2224697 - RNA, 22 nt, Human
gggcuggguucuacccaggugc

SEQ ID NO: 2224698 - RNA, 20 nt, Human
aaaauuucacauuaauauuu

SEQ ID NO: 2224699 - RNA, 13 nt, Human
aaaauuucacauu

SEQ ID NO: 2224700 - RNA, 23 nt, Human
aaaauuuccaguaccuuugucac

SEQ ID NO: 2224701 - RNA, 17 nt, Human
aaaauuuccaguaccuu

SEQ ID NO: 2224702 - RNA, 15 nt, Human
aaaauuucuauuaaa

SEQ ID NO: 2224703 - RNA, 17 nt, Human
aaaauguguaauuuugu

SEQ ID NO: 2224704 - RNA, 12 nt, Human
aaaaugugugug

SEQ ID NO: 2224705 - RNA, 16 nt, Human
aaaauguguaauuuug

SEQ ID NO: 2224706 - RNA, 20 nt, Human
aaaauguguaauuuuguucu

SEQ ID NO: 2224707 - RNA, 11 nt, Human
aaaauguguaa

SEQ ID NO: 2224708 - RNA, 20 nt, Human
aaaaugugcuauacugcaua

SEQ ID NO: 2224709 - RNA, 16 nt, Human
aaaauuugcccuccca

SEQ ID NO: 2224710 - RNA, 18 nt, Human
aaaauuuguuauuuugca

SEQ ID NO: 2224711 - RNA, 18 nt, Human
aaaauuugaaauuuagcu

SEQ ID NO: 2224712 - RNA, 19 nt, Human
aaaauuuguuugaaaucuu

SEQ ID NO: 2224713 - RNA, 14 nt, Human
aaaauuuuuuuaga

SEQ ID NO: 2224714 - RNA, 13 nt, Human
aaaauuuguugca

SEQ ID NO: 2224715 - RNA, 14 nt, Human
aaaauuuguugcau

SEQ ID NO: 2224716 - RNA, 22 nt, Human
aaaauuuuuucucuaggaaaua

SEQ ID NO: 2224717 - RNA, 19 nt, Human
gggcuggcggcuacucagc

SEQ ID NO: 2224718 - RNA, 15 nt, Human
gggcuggccuuccug

SEQ ID NO: 2224719 - RNA, 13 nt, Human
gggcuggcucccu

SEQ ID NO: 2224720 - RNA, 15 nt, Human
gggcuggcucccucu

SEQ ID NO: 2224721 - RNA, 12 nt, Human
gggcuggcuuca

SEQ ID NO: 2224722 - RNA, 17 nt, Human
gggcuggcuucaggagg

SEQ ID NO: 2224723 - RNA, 16 nt, Human
gggcugggagcucugc

SEQ ID NO: 2224724 - RNA, 18 nt, Human
gggcugggagcucugcag

SEQ ID NO: 2224725 - RNA, 20 nt, Human
gggcuggguucuacccaggu

SEQ ID NO: 2224726 - RNA, 12 nt, Human
gggcugcccugc

SEQ ID NO: 2224727 - RNA, 22 nt, Human
gggcugcccgcucccagugucu

SEQ ID NO: 2224728 - RNA, 14 nt, Human
gggcugcccgcucc

SEQ ID NO: 2224729 - RNA, 15 nt, Human
gggcugcccgcuccc

SEQ ID NO: 2224730 - RNA, 18 nt, Human
gggcugcccgcucccagu

SEQ ID NO: 2224731 - RNA, 19 nt, Human
gggcugcccgcucccagug

SEQ ID NO: 2224732 - RNA, 13 nt, Human
gggcugcccuggu

SEQ ID NO: 2224733 - RNA, 14 nt, Human
gggcugcccuggug

SEQ ID NO: 2224734 - RNA, 13 nt, Human
gggcugcccugcc

SEQ ID NO: 2224735 - RNA, 19 nt, Human
gggcuggcccagcccugcu

SEQ ID NO: 2224736 - RNA, 17 nt, Human
gggcuggcccagcccug

SEQ ID NO: 2224737 - RNA, 13 nt, Human
gggcuggccuagg

SEQ ID NO: 2224738 - RNA, 15 nt, Human
gggcuggccuaggag

SEQ ID NO: 2224739 - RNA, 19 nt, Human
gggcuggccucuggcucuc

SEQ ID NO: 2224740 - RNA, 15 nt, Human
gggcugcccuggugc

SEQ ID NO: 2224741 - RNA, 18 nt, Human
gggcucagcaaaagaugc

SEQ ID NO: 2224742 - RNA, 22 nt, Human
gggcugcaccggcuggccuggc

SEQ ID NO: 2224743 - RNA, 16 nt, Human
gggcucaagcagucua

SEQ ID NO: 2224744 - RNA, 13 nt, Human
gggcuacaagagg

SEQ ID NO: 2224745 - RNA, 20 nt, Human
gggcuacccugagcugaggc

SEQ ID NO: 2224746 - RNA, 10 nt, Human
gggcucagca

SEQ ID NO: 2224747 - RNA, 18 nt, Human
gggcugccaugugaagag

SEQ ID NO: 2224748 - RNA, 22 nt, Human
gggcugcagcauguugcugagg

SEQ ID NO: 2224749 - RNA, 19 nt, Human
gggcugcacucugugccca

SEQ ID NO: 2224750 - RNA, 20 nt, Human
gggcugcacucugugcccau

SEQ ID NO: 2224751 - RNA, 11 nt, Human
gggcugcagca

SEQ ID NO: 2224752 - RNA, 19 nt, Human
gggcugcagcauguugcug

SEQ ID NO: 2224753 - RNA, 21 nt, Human
gggcugcaugcgggcuuccuc

SEQ ID NO: 2224754 - RNA, 18 nt, Human
gggcugcaugcgggcuuc

SEQ ID NO: 2224755 - RNA, 18 nt, Human
gggcucagagugggguag

SEQ ID NO: 2224756 - RNA, 14 nt, Human
gggcucacacaccu

SEQ ID NO: 2224757 - RNA, 16 nt, Human
gggcugcacucugugc

SEQ ID NO: 2224758 - RNA, 18 nt, Human
gggcugcacucugugccc

SEQ ID NO: 2224759 - RNA, 16 nt, Human
gguccacaacacacag

SEQ ID NO: 2224760 - RNA, 15 nt, Human
gguauggaacucucu

SEQ ID NO: 2224761 - RNA, 15 nt, Human
gguaugagcugaggg

SEQ ID NO: 2224762 - RNA, 16 nt, Human
gguaugagcugagggg

SEQ ID NO: 2224763 - RNA, 14 nt, Human
gguaugagcugagg

SEQ ID NO: 2224764 - RNA, 14 nt, Human
gguaugcaaucaaa

SEQ ID NO: 2224765 - RNA, 22 nt, Human
gguaugaucacggcucacugca

SEQ ID NO: 2224766 - RNA, 21 nt, Human
gguaugaccuucuaggaagcu

SEQ ID NO: 2224767 - RNA, 14 nt, Human
gguagcuuuucccu

SEQ ID NO: 2224768 - RNA, 18 nt, Human
gguagcugccccuggcuc

SEQ ID NO: 2224769 - RNA, 21 nt, Human
gguagcuguaaggcaugaagg

SEQ ID NO: 2224770 - RNA, 17 nt, Human
gguagcuuugaggugga

SEQ ID NO: 2224771 - RNA, 15 nt, Human
gguagcugccccugg

SEQ ID NO: 2224772 - RNA, 17 nt, Human
gguagcucaggugggcg

SEQ ID NO: 2224773 - RNA, 12 nt, Human
gguagcucaggu

SEQ ID NO: 2224774 - RNA, 13 nt, Human
gguagcucaggug

SEQ ID NO: 2224775 - RNA, 19 nt, Human
gguagcugccccuggcucu

SEQ ID NO: 2224776 - RNA, 12 nt, Human
gguagcuguaag

SEQ ID NO: 2224777 - RNA, 20 nt, Human
gguccacaggaagugaagaa

SEQ ID NO: 2224778 - RNA, 17 nt, Human
gguccacaucccgggac

SEQ ID NO: 2224779 - RNA, 17 nt, Human
gguccacccaggagccc

SEQ ID NO: 2224780 - RNA, 12 nt, Human
gguccagggagc

SEQ ID NO: 2224781 - RNA, 16 nt, Human
gguccagggagcaggc

SEQ ID NO: 2224782 - RNA, 21 nt, Human
gguccagggaagcuggccgag

SEQ ID NO: 2224783 - RNA, 11 nt, Human
gguccagggaa

SEQ ID NO: 2224784 - RNA, 12 nt, Human
gguccagggcua

SEQ ID NO: 2224785 - RNA, 16 nt, Human
gguccacccagcaaag

SEQ ID NO: 2224786 - RNA, 15 nt, Human
gguccaggggccccu

SEQ ID NO: 2224787 - RNA, 17 nt, Human
gguccaggggccccucc

SEQ ID NO: 2224788 - RNA, 20 nt, Human
gguccaggggccccuccagc

SEQ ID NO: 2224789 - RNA, 22 nt, Human
gguccaggggccccuccagcuu

SEQ ID NO: 2224790 - RNA, 23 nt, Human
gguccaggggccccuccagcuug

SEQ ID NO: 2224791 - RNA, 12 nt, Human
gguccacccagg

SEQ ID NO: 2224792 - RNA, 13 nt, Human
gguccacccagga

SEQ ID NO: 2224793 - RNA, 15 nt, Human
gguccacccaggagc

SEQ ID NO: 2224794 - RNA, 16 nt, Human
gguccacccaggagcc

SEQ ID NO: 2224795 - RNA, 19 nt, Human
aaacuuuacuaagaugaca

SEQ ID NO: 2224796 - RNA, 21 nt, Human
aaacuuuacuaagaugacauu

SEQ ID NO: 2224797 - RNA, 18 nt, Human
aaagaaguggggacagag

SEQ ID NO: 2224798 - RNA, 15 nt, Human
aaagaauacagaaag

SEQ ID NO: 2224799 - RNA, 15 nt, Human
aaagaaguuugauau

SEQ ID NO: 2224800 - RNA, 17 nt, Human
aaagaauacagaaagau

SEQ ID NO: 2224801 - RNA, 18 nt, Human
aaacuuuacuauggcccu

SEQ ID NO: 2224802 - RNA, 18 nt, Human
aaacuuuacuaagaugac

SEQ ID NO: 2224803 - RNA, 14 nt, Human
gguccaugggcaga

SEQ ID NO: 2224804 - RNA, 12 nt, Human
aaacuuuacuau

SEQ ID NO: 2224805 - RNA, 13 nt, Human
gguccaggguuga

SEQ ID NO: 2224806 - RNA, 21 nt, Human
gguccaggguugaucacacuc

SEQ ID NO: 2224807 - RNA, 13 nt, Human
gguccaugggcag

SEQ ID NO: 2224808 - RNA, 17 nt, Human
gguccauggaaugcuug

SEQ ID NO: 2224809 - RNA, 15 nt, Human
gguccauagagagca

SEQ ID NO: 2224810 - RNA, 22 nt, Human
aaacuuuaccuuuuuuauacau

SEQ ID NO: 2224811 - RNA, 17 nt, Human
aaacuuuaccuuuuuua

SEQ ID NO: 2224812 - RNA, 17 nt, Human
aaagacuaucuaaaugu

SEQ ID NO: 2224813 - RNA, 14 nt, Human
aaagacuauucaaa

SEQ ID NO: 2224814 - RNA, 13 nt, Human
aaagacaccuacu

SEQ ID NO: 2224815 - RNA, 19 nt, Human
aaagacaccuacugagugg

SEQ ID NO: 2224816 - RNA, 20 nt, Human
aaagacaauucuuuauacaa

SEQ ID NO: 2224817 - RNA, 17 nt, Human
aaagacaauucuuuaua

SEQ ID NO: 2224818 - RNA, 19 nt, Human
aaagacaauucuuuauaca

SEQ ID NO: 2224819 - RNA, 12 nt, Human
aaagacaauucu

SEQ ID NO: 2224820 - RNA, 13 nt, Human
aaagacaauucuu

SEQ ID NO: 2224821 - RNA, 15 nt, Human
aaagacaauucuuua

SEQ ID NO: 2224822 - RNA, 16 nt, Human
aaagacaauucuuuau

SEQ ID NO: 2224823 - RNA, 13 nt, Human
aaagaaugaaaga

SEQ ID NO: 2224824 - RNA, 14 nt, Human
aaagaaugaaagag

SEQ ID NO: 2224825 - RNA, 16 nt, Human
aaagaaugaaagagua

SEQ ID NO: 2224826 - RNA, 22 nt, Human
aaagaaugagaaggagucagaa

SEQ ID NO: 2224827 - RNA, 22 nt, Human
aaagacaaauucuguuucuuga

SEQ ID NO: 2224828 - RNA, 19 nt, Human
aaagacaaauucuguuucu

SEQ ID NO: 2224829 - RNA, 13 nt, Human
aaagacaagacuu

SEQ ID NO: 2224830 - RNA, 17 nt, Human
aaagacaagacuucagu

SEQ ID NO: 2224831 - RNA, 11 nt, Human
aaagacaauuc

SEQ ID NO: 2224832 - RNA, 17 nt, Human
aaagacaaauucuguuu

SEQ ID NO: 2224833 - RNA, 16 nt, Human
aaagacaaauucuguu

SEQ ID NO: 2224834 - RNA, 16 nt, Human
aaagacaaaucaaagc

SEQ ID NO: 2224835 - RNA, 19 nt, Human
aaagacaaaucaaagcaga

SEQ ID NO: 2224836 - RNA, 17 nt, Human
gggugggguagggcuga

SEQ ID NO: 2224837 - RNA, 16 nt, Human
gggugggguagggcug

SEQ ID NO: 2224838 - RNA, 23 nt, Human
ggguggggacguccugccaccug

SEQ ID NO: 2224839 - RNA, 17 nt, Human
ggguggggucaugcccu

SEQ ID NO: 2224840 - RNA, 12 nt, Human
ggguggguauaa

SEQ ID NO: 2224841 - RNA, 12 nt, Human
ggguggugaccu

SEQ ID NO: 2224842 - RNA, 15 nt, Human
ggguggggggggugc

SEQ ID NO: 2224843 - RNA, 14 nt, Human
gggugggccaggcu

SEQ ID NO: 2224844 - RNA, 12 nt, Human
gggugggccucu

SEQ ID NO: 2224845 - RNA, 13 nt, Human
gggugggccucug

SEQ ID NO: 2224846 - RNA, 22 nt, Human
ggguggggaauguuugggcaga

SEQ ID NO: 2224847 - RNA, 18 nt, Human
ggguggggggggugcugg

SEQ ID NO: 2224848 - RNA, 13 nt, Human
gggugguccugac

SEQ ID NO: 2224849 - RNA, 16 nt, Human
ggguggucugcaggca

SEQ ID NO: 2224850 - RNA, 21 nt, Human
ggguggggucaugcccuccuc

SEQ ID NO: 2224851 - RNA, 15 nt, Human
gggugucuugggcag

SEQ ID NO: 2224852 - RNA, 21 nt, Human
gggugucuugggcagagcugg

SEQ ID NO: 2224853 - RNA, 17 nt, Human
ggguguggcgcagcaua

SEQ ID NO: 2224854 - RNA, 17 nt, Human
gggugugcacaucucug

SEQ ID NO: 2224855 - RNA, 21 nt, Human
gggugugcaaugucugaguga

SEQ ID NO: 2224856 - RNA, 23 nt, Human
gggugucuugggcagagcuggcu

SEQ ID NO: 2224857 - RNA, 13 nt, Human
gggugugcuggga

SEQ ID NO: 2224858 - RNA, 12 nt, Human
ggguguggcagu

SEQ ID NO: 2224859 - RNA, 16 nt, Human
ggguguggcccugcca

SEQ ID NO: 2224860 - RNA, 17 nt, Human
gggugggauggaggaga

SEQ ID NO: 2224861 - RNA, 23 nt, Human
ggguggauuuggguuggaaguga

SEQ ID NO: 2224862 - RNA, 19 nt, Human
gggugggccaggcugaugg

SEQ ID NO: 2224863 - RNA, 13 nt, Human
gggugggccaggc

SEQ ID NO: 2224864 - RNA, 15 nt, Human
gggugggcaggaaaa

SEQ ID NO: 2224865 - RNA, 20 nt, Human
ggguggggaccucaggccug

SEQ ID NO: 2224866 - RNA, 19 nt, Human
gggugggagagcccagcca

SEQ ID NO: 2224867 - RNA, 14 nt, Human
gggugggagagccc

SEQ ID NO: 2224868 - RNA, 15 nt, Human
ggggccuggaccugc

SEQ ID NO: 2224869 - RNA, 16 nt, Human
ggggccuggaccugcc

SEQ ID NO: 2224870 - RNA, 22 nt, Human
ggggccuggcgggaugggccac

SEQ ID NO: 2224871 - RNA, 19 nt, Human
gggugggacacccugugau

SEQ ID NO: 2224872 - RNA, 13 nt, Human
ggguggaugccug

SEQ ID NO: 2224873 - RNA, 11 nt, Human
ggggccuggca

SEQ ID NO: 2224874 - RNA, 12 nt, Human
ggggccuggcag

SEQ ID NO: 2224875 - RNA, 15 nt, Human
ggguggcaccagcag

SEQ ID NO: 2224876 - RNA, 17 nt, Human
ggguggaugccuggugg

SEQ ID NO: 2224877 - RNA, 15 nt, Human
gguacauuucccugu

SEQ ID NO: 2224878 - RNA, 18 nt, Human
gguacauuucccugugcu

SEQ ID NO: 2224879 - RNA, 18 nt, Human
gguagcccuggccagagg

SEQ ID NO: 2224880 - RNA, 15 nt, Human
gguagcccuggccag

SEQ ID NO: 2224881 - RNA, 16 nt, Human
gguagcccgccugcca

SEQ ID NO: 2224882 - RNA, 17 nt, Human
gguagcuagaggaacca

SEQ ID NO: 2224883 - RNA, 20 nt, Human
gguagcccuggccagaggcu

SEQ ID NO: 2224884 - RNA, 15 nt, Human
gguagcuagaggaac

SEQ ID NO: 2224885 - RNA, 14 nt, Human
gguaccacugauuu

SEQ ID NO: 2224886 - RNA, 17 nt, Human
gguaccagauaaaauua

SEQ ID NO: 2224887 - RNA, 15 nt, Human
gguaccaaugcugca

SEQ ID NO: 2224888 - RNA, 23 nt, Human
gguacaaccuguucugcuuuccu

SEQ ID NO: 2224889 - RNA, 22 nt, Human
gguaauuguugcuaaucuucuu

SEQ ID NO: 2224890 - RNA, 23 nt, Human
gguaauuauuuugguacuuuuau

SEQ ID NO: 2224891 - RNA, 24 nt, Human
gguacaaccuguucugcuuuccuc

SEQ ID NO: 2224892 - RNA, 17 nt, Human
gguaaucgaccugccuc

SEQ ID NO: 2224893 - RNA, 14 nt, Human
gguaaucgaccugc

SEQ ID NO: 2224894 - RNA, 18 nt, Human
gguaaucgaccugccucg

SEQ ID NO: 2224895 - RNA, 20 nt, Human
gguaaucuugcucugcuuga

SEQ ID NO: 2224896 - RNA, 22 nt, Human
ggguuuggcgggccaaggacug

SEQ ID NO: 2224897 - RNA, 20 nt, Human
ggguuuggcgggccaaggac

SEQ ID NO: 2224898 - RNA, 20 nt, Human
ggguuuggaccccagcuggg

SEQ ID NO: 2224899 - RNA, 21 nt, Human
ggguuuggaccccagcuggga

SEQ ID NO: 2224900 - RNA, 18 nt, Human
ggguuugaggauaggagu

SEQ ID NO: 2224901 - RNA, 18 nt, Human
ggguuuggaccccagcug

SEQ ID NO: 2224902 - RNA, 19 nt, Human
ggguuuggaccccagcugg

SEQ ID NO: 2224903 - RNA, 14 nt, Human
ggguuuuauauuuu

SEQ ID NO: 2224904 - RNA, 20 nt, Human
ggguuuuauuguuuaaaauc

SEQ ID NO: 2224905 - RNA, 21 nt, Human
ggguuuggcugugucuaaacu

SEQ ID NO: 2224906 - RNA, 13 nt, Human
ggguuuuaaugua

SEQ ID NO: 2224907 - RNA, 16 nt, Human
gggugugggaggcccg

SEQ ID NO: 2224908 - RNA, 13 nt, Human
gggugugggaggc

SEQ ID NO: 2224909 - RNA, 17 nt, Human
ggguuucgagaagcugc

SEQ ID NO: 2224910 - RNA, 20 nt, Human
ggguuucgucauguuggcca

SEQ ID NO: 2224911 - RNA, 22 nt, Human
ggguuucugagcugcucugaau

SEQ ID NO: 2224912 - RNA, 17 nt, Human
ggguuucuaaagcugcc

SEQ ID NO: 2224913 - RNA, 13 nt, Human
gguaacaggcaga

SEQ ID NO: 2224914 - RNA, 18 nt, Human
gguaacuagggaagauaa

SEQ ID NO: 2224915 - RNA, 19 nt, Human
gguaauaaguacuguguac

SEQ ID NO: 2224916 - RNA, 15 nt, Human
gguaauaaacuuaga

SEQ ID NO: 2224917 - RNA, 22 nt, Human
gguaacauccuuucuauugaaa

SEQ ID NO: 2224918 - RNA, 21 nt, Human
gguaacaguucauguuugcuu

SEQ ID NO: 2224919 - RNA, 14 nt, Human
gguaacaggcagau

SEQ ID NO: 2224920 - RNA, 20 nt, Human
gguaacaggcagauacagga

SEQ ID NO: 2224921 - RNA, 15 nt, Human
aaagcagcucucccc

SEQ ID NO: 2224922 - RNA, 19 nt, Human
aaagcagcucaaaggcaca

SEQ ID NO: 2224923 - RNA, 18 nt, Human
aaagcagcucaaaggcac

SEQ ID NO: 2224924 - RNA, 15 nt, Human
aaagcagcguuucua

SEQ ID NO: 2224925 - RNA, 17 nt, Human
aaagcaggcagaacuca

SEQ ID NO: 2224926 - RNA, 19 nt, Human
aaagcaggcagaacucauc

SEQ ID NO: 2224927 - RNA, 17 nt, Human
aaagcagggacuugaac

SEQ ID NO: 2224928 - RNA, 18 nt, Human
aaagcagcucuccccuca

SEQ ID NO: 2224929 - RNA, 15 nt, Human
aaagcauaaaugcaa

SEQ ID NO: 2224930 - RNA, 16 nt, Human
aaagcaucacuuggga

SEQ ID NO: 2224931 - RNA, 18 nt, Human
aaagcaucaccucaggcc

SEQ ID NO: 2224932 - RNA, 17 nt, Human
aaagcaucaccucaggc

SEQ ID NO: 2224933 - RNA, 16 nt, Human
aaagcaucaccucagg

SEQ ID NO: 2224934 - RNA, 13 nt, Human
aaagcauccaugu

SEQ ID NO: 2224935 - RNA, 20 nt, Human
aaagcaucauggcuaucugu

SEQ ID NO: 2224936 - RNA, 13 nt, Human
aaagcaugaaugg

SEQ ID NO: 2224937 - RNA, 14 nt, Human
gguggaugccuggu

SEQ ID NO: 2224938 - RNA, 16 nt, Human
ggugcuguggccaggg

SEQ ID NO: 2224939 - RNA, 19 nt, Human
ggugcuguggccaggguga

SEQ ID NO: 2224940 - RNA, 17 nt, Human
ggugcuuacacaucuca

SEQ ID NO: 2224941 - RNA, 22 nt, Human
gguggauggccccagcacagcu

SEQ ID NO: 2224942 - RNA, 14 nt, Human
gguggauggcccca

SEQ ID NO: 2224943 - RNA, 18 nt, Human
ggugcuuaagcagaagca

SEQ ID NO: 2224944 - RNA, 20 nt, Human
ggugcuuaagcagaagcauu

SEQ ID NO: 2224945 - RNA, 21 nt, Human
gguggaugccugguggcagcu

SEQ ID NO: 2224946 - RNA, 22 nt, Human
aaagcagcguuucuaugacaca

SEQ ID NO: 2224947 - RNA, 18 nt, Human
aaagcagcguuucuauga

SEQ ID NO: 2224948 - RNA, 16 nt, Human
aaagcagcguuucuau

SEQ ID NO: 2224949 - RNA, 17 nt, Human
gguggcacaggcccccu

SEQ ID NO: 2224950 - RNA, 18 nt, Human
gguggcacaggcccccuu

SEQ ID NO: 2224951 - RNA, 13 nt, Human
gguggcaagagcc

SEQ ID NO: 2224952 - RNA, 17 nt, Human
gguggcaaggcugugcu

SEQ ID NO: 2224953 - RNA, 20 nt, Human
gguggcaaggcugugcuccc

SEQ ID NO: 2224954 - RNA, 15 nt, Human
ggugcuguccucagg

SEQ ID NO: 2224955 - RNA, 19 nt, Human
ggugcuguccucagguggc

SEQ ID NO: 2224956 - RNA, 20 nt, Human
ggugcuguccucagguggcc

SEQ ID NO: 2224957 - RNA, 23 nt, Human
ggugcuguccucagguggccaug

SEQ ID NO: 2224958 - RNA, 19 nt, Human
ggugcugggccccugccuc

SEQ ID NO: 2224959 - RNA, 21 nt, Human
ggugccagguuuucugggugu

SEQ ID NO: 2224960 - RNA, 23 nt, Human
ggugccagccuuccucugcagcu

SEQ ID NO: 2224961 - RNA, 17 nt, Human
ggugccagguuuucugg

SEQ ID NO: 2224962 - RNA, 20 nt, Human
ggugcugggccccugccucu

SEQ ID NO: 2224963 - RNA, 14 nt, Human
ggugccagcaacug

SEQ ID NO: 2224964 - RNA, 15 nt, Human
ggugccagcaacuga

SEQ ID NO: 2224965 - RNA, 19 nt, Human
ggugccagcaacugaauaa

SEQ ID NO: 2224966 - RNA, 17 nt, Human
ggugccagcaacugaau

SEQ ID NO: 2224967 - RNA, 14 nt, Human
ggugccagccuucc

SEQ ID NO: 2224968 - RNA, 15 nt, Human
ggugccagccuuccu

SEQ ID NO: 2224969 - RNA, 20 nt, Human
ggugccagccuuccucugca

SEQ ID NO: 2224970 - RNA, 22 nt, Human
ggucuucuuacaugcauuugag

SEQ ID NO: 2224971 - RNA, 23 nt, Human
ggugccaaacaaaaagguucuca

SEQ ID NO: 2224972 - RNA, 23 nt, Human
ggugccaauuucaaguuccaagu

SEQ ID NO: 2224973 - RNA, 22 nt, Human
ggugccaacaguguuaggccug

SEQ ID NO: 2224974 - RNA, 22 nt, Human
ggugccaauggaaccuccuuuc

SEQ ID NO: 2224975 - RNA, 18 nt, Human
ggugccacaaauaaaaug

SEQ ID NO: 2224976 - RNA, 12 nt, Human
ggugccagcaaa

SEQ ID NO: 2224977 - RNA, 13 nt, Human
ggugccagcaaag

SEQ ID NO: 2224978 - RNA, 15 nt, Human
ggugccagcaaagcc

SEQ ID NO: 2224979 - RNA, 16 nt, Human
ggugccagcaaagccc

SEQ ID NO: 2224980 - RNA, 17 nt, Human
ggugccagcaaagcccc

SEQ ID NO: 2224981 - RNA, 18 nt, Human
ggugccagcaaagcccca

SEQ ID NO: 2224982 - RNA, 19 nt, Human
ggugccagcaaagccccau

SEQ ID NO: 2224983 - RNA, 19 nt, Human
ggucuucagggggccaggu

SEQ ID NO: 2224984 - RNA, 14 nt, Human
ggucuucagccauc

SEQ ID NO: 2224985 - RNA, 13 nt, Human
ggucuucccaggc

SEQ ID NO: 2224986 - RNA, 17 nt, Human
ggucuucccuaccucag

SEQ ID NO: 2224987 - RNA, 17 nt, Human
ggucuucccaggcuggg

SEQ ID NO: 2224988 - RNA, 20 nt, Human
ggucuucccaggcuggggcu

SEQ ID NO: 2224989 - RNA, 18 nt, Human
ggucuucagccucuuucu

SEQ ID NO: 2224990 - RNA, 17 nt, Human
ggucuguuuuccuuucu

SEQ ID NO: 2224991 - RNA, 21 nt, Human
ggucuguguguguguaugugg

SEQ ID NO: 2224992 - RNA, 20 nt, Human
ggucuguguguguguaugug

SEQ ID NO: 2224993 - RNA, 19 nt, Human
ggucuguuggcaggcuggc

SEQ ID NO: 2224994 - RNA, 20 nt, Human
ggucuguuggcaggcuggcc

SEQ ID NO: 2224995 - RNA, 20 nt, Human
ggucuguuuuccuuucucac

SEQ ID NO: 2224996 - RNA, 22 nt, Human
ggucuucccuaccucaggcagg

SEQ ID NO: 2224997 - RNA, 20 nt, Human
ggucuucccuaccucaggca

SEQ ID NO: 2224998 - RNA, 18 nt, Human
ggugcaaugaccuuucaa

SEQ ID NO: 2224999 - RNA, 19 nt, Human
ggugcaaugaccuuucaau

SEQ ID NO: 2225000 - RNA, 20 nt, Human
ggugcaaugaccuuucaaua

SEQ ID NO: 2225001 - RNA, 22 nt, Human
ggucgcuuacuuugagugaucc

SEQ ID NO: 2225002 - RNA, 15 nt, Human
ggucggaacccaagc

SEQ ID NO: 2225003 - RNA, 13 nt, Human
ggucggaccagcu

SEQ ID NO: 2225004 - RNA, 14 nt, Human
ggucggaaaacaug

SEQ ID NO: 2225005 - RNA, 14 nt, Human
ggucggaccagcuu

SEQ ID NO: 2225006 - RNA, 16 nt, Human
ggucggaggcuuggga

SEQ ID NO: 2225007 - RNA, 20 nt, Human
ggucgguagguucagccaag

SEQ ID NO: 2225008 - RNA, 19 nt, Human
ggucugugucucuuuucuc

SEQ ID NO: 2225009 - RNA, 18 nt, Human
ggucugugucucuuuucu

SEQ ID NO: 2225010 - RNA, 13 nt, Human
ggucugugucucu

SEQ ID NO: 2225011 - RNA, 22 nt, Human
ggucugugccaaagaagaaucc

SEQ ID NO: 2225012 - RNA, 23 nt, Human
ggucuauguaaaugcaucugucc

SEQ ID NO: 2225013 - RNA, 17 nt, Human
ggucuguguguguguau

SEQ ID NO: 2225014 - RNA, 11 nt, Human
ggucugugugu

SEQ ID NO: 2225015 - RNA, 18 nt, Human
ggucuaaagugagcucua

SEQ ID NO: 2225016 - RNA, 14 nt, Human
ggucuagggagaga

SEQ ID NO: 2225017 - RNA, 17 nt, Human
ggucuacacugugcuga

SEQ ID NO: 2225018 - RNA, 22 nt, Human
gguccuggggcucugugcaggg

SEQ ID NO: 2225019 - RNA, 15 nt, Human
gguccuggggcucug

SEQ ID NO: 2225020 - RNA, 12 nt, Human
gguccuggggcu

SEQ ID NO: 2225021 - RNA, 14 nt, Human
gguccuggggccuc

SEQ ID NO: 2225022 - RNA, 15 nt, Human
gguccuggcuccuga

SEQ ID NO: 2225023 - RNA, 14 nt, Human
gguccuggcuccug

SEQ ID NO: 2225024 - RNA, 16 nt, Human
gguccuggcuccugag

SEQ ID NO: 2225025 - RNA, 12 nt, Human
gguccuggggcc

SEQ ID NO: 2225026 - RNA, 12 nt, Human
gguccuggcucc

SEQ ID NO: 2225027 - RNA, 16 nt, Human
gguccuggccauccca

SEQ ID NO: 2225028 - RNA, 14 nt, Human
gguccuggccaucc

SEQ ID NO: 2225029 - RNA, 13 nt, Human
gguccuggccauc

SEQ ID NO: 2225030 - RNA, 12 nt, Human
gguccuggccau

SEQ ID NO: 2225031 - RNA, 17 nt, Human
gguccuggagcagacca

SEQ ID NO: 2225032 - RNA, 21 nt, Human
gguccuggagcagaccacccc

SEQ ID NO: 2225033 - RNA, 23 nt, Human
gguccuggggcucugugcaggga

SEQ ID NO: 2225034 - RNA, 21 nt, Human
gguccuggccaucccacaagu

SEQ ID NO: 2225035 - RNA, 20 nt, Human
ggucgcccuggacugugugc

SEQ ID NO: 2225036 - RNA, 13 nt, Human
ggucggaaaacau

SEQ ID NO: 2225037 - RNA, 12 nt, Human
ggucgcuccugc

SEQ ID NO: 2225038 - RNA, 13 nt, Human
ggucgcuccugcc

SEQ ID NO: 2225039 - RNA, 14 nt, Human
ggucgcuccugccc

SEQ ID NO: 2225040 - RNA, 14 nt, Human
aaagauuuuaauca

SEQ ID NO: 2225041 - RNA, 18 nt, Human
aaagauuuuaaucaaguu

SEQ ID NO: 2225042 - RNA, 15 nt, Human
aaagauuuuaaucaa

SEQ ID NO: 2225043 - RNA, 14 nt, Human
aaagauuucuugag

SEQ ID NO: 2225044 - RNA, 14 nt, Human
aaagcaaaacaaaa

SEQ ID NO: 2225045 - RNA, 13 nt, Human
aaagauuuucaga

SEQ ID NO: 2225046 - RNA, 13 nt, Human
aaagcaaaugaga

SEQ ID NO: 2225047 - RNA, 13 nt, Human
aaagcaaaggaga

SEQ ID NO: 2225048 - RNA, 14 nt, Human
aaagacuaauuuaa

SEQ ID NO: 2225049 - RNA, 20 nt, Human
aaagacuaauuuaaaaaaua

SEQ ID NO: 2225050 - RNA, 23 nt, Human
aaagacuaauuuaaaaaauaacu

SEQ ID NO: 2225051 - RNA, 15 nt, Human
aaagacuauucaaac

SEQ ID NO: 2225052 - RNA, 12 nt, Human
aaagauuuauca

SEQ ID NO: 2225053 - RNA, 13 nt, Human
aaagauuuaucaa

SEQ ID NO: 2225054 - RNA, 21 nt, Human
aaagauugcugaaauuuuaua

SEQ ID NO: 2225055 - RNA, 19 nt, Human
aaagauugcugaaauuuua

SEQ ID NO: 2225056 - RNA, 23 nt, Human
aaagauugaaguauuuugcugga

SEQ ID NO: 2225057 - RNA, 16 nt, Human
aaagcaaaugugaccu

SEQ ID NO: 2225058 - RNA, 19 nt, Human
aaagcaacugucuauuucu

SEQ ID NO: 2225059 - RNA, 13 nt, Human
aaagcaaaugucu

SEQ ID NO: 2225060 - RNA, 14 nt, Human
aaagcaagacuguu

SEQ ID NO: 2225061 - RNA, 21 nt, Human
aaagcaacugucuauuucugc

SEQ ID NO: 2225062 - RNA, 21 nt, Human
aaagcaacuguuaugaaauaa

SEQ ID NO: 2225063 - RNA, 21 nt, Human
gguccucagagaauuucuacc

SEQ ID NO: 2225064 - RNA, 14 nt, Human
gguccucagagaau

SEQ ID NO: 2225065 - RNA, 21 nt, Human
gguccucugauacccagagca

SEQ ID NO: 2225066 - RNA, 21 nt, Human
gguccugcugcaguugccagu

SEQ ID NO: 2225067 - RNA, 23 nt, Human
gguccugcugcaguugccaguca

SEQ ID NO: 2225068 - RNA, 23 nt, Human
gguccucugucagucacagccac

SEQ ID NO: 2225069 - RNA, 21 nt, Human
gguccucugucagucacagcc

SEQ ID NO: 2225070 - RNA, 13 nt, Human
gguccucugucag

SEQ ID NO: 2225071 - RNA, 15 nt, Human
gguccucuugccucc

SEQ ID NO: 2225072 - RNA, 13 nt, Human
gguccugagaccu

SEQ ID NO: 2225073 - RNA, 16 nt, Human
gguuugccugagggcg

SEQ ID NO: 2225074 - RNA, 14 nt, Human
gguuugcaaggaag

SEQ ID NO: 2225075 - RNA, 18 nt, Human
gguuugcagaugacaaaa

SEQ ID NO: 2225076 - RNA, 15 nt, Human
gguuuggaaugcuuc

SEQ ID NO: 2225077 - RNA, 12 nt, Human
gguuuggacccc

SEQ ID NO: 2225078 - RNA, 20 nt, Human
gguuuggaccccagcuggga

SEQ ID NO: 2225079 - RNA, 15 nt, Human
gguuugaauauaaac

SEQ ID NO: 2225080 - RNA, 15 nt, Human
gguuugaagccugga

SEQ ID NO: 2225081 - RNA, 17 nt, Human
gguuugaagccuggaac

SEQ ID NO: 2225082 - RNA, 18 nt, Human
gguuugaauauaaacacu

SEQ ID NO: 2225083 - RNA, 22 nt, Human
gguuugacuccgcuggaggugg

SEQ ID NO: 2225084 - RNA, 15 nt, Human
gguuucuggucucua

SEQ ID NO: 2225085 - RNA, 22 nt, Human
gguuucuucaacaggagaauuu

SEQ ID NO: 2225086 - RNA, 14 nt, Human
gguuuggcgggcca

SEQ ID NO: 2225087 - RNA, 23 nt, Human
gguuuggccaucucuggaugccu

SEQ ID NO: 2225088 - RNA, 19 nt, Human
gguuuggaccccagcuggg

SEQ ID NO: 2225089 - RNA, 19 nt, Human
gguuuggcgggccaaggac

SEQ ID NO: 2225090 - RNA, 17 nt, Human
gguuuggcgggccaagg

SEQ ID NO: 2225091 - RNA, 12 nt, Human
aaaguggugaga

SEQ ID NO: 2225092 - RNA, 16 nt, Human
aaaguggugcucaguu

SEQ ID NO: 2225093 - RNA, 15 nt, Human
gguuuggcugugucu

SEQ ID NO: 2225094 - RNA, 21 nt, Human
gguuuggcugugucuaaacug

SEQ ID NO: 2225095 - RNA, 19 nt, Human
aaaguggugcucaguugua

SEQ ID NO: 2225096 - RNA, 21 nt, Human
aaaguggugcucaguuguaga

SEQ ID NO: 2225097 - RNA, 22 nt, Human
aaaguggugcucaguuguagaa

SEQ ID NO: 2225098 - RNA, 14 nt, Human
aaagugguuguuag

SEQ ID NO: 2225099 - RNA, 11 nt, Human
aaaguguaaag

SEQ ID NO: 2225100 - RNA, 12 nt, Human
aaaguguaaagc

SEQ ID NO: 2225101 - RNA, 13 nt, Human
aaaguguaaagca

SEQ ID NO: 2225102 - RNA, 15 nt, Human
aaaguguaaagcauu

SEQ ID NO: 2225103 - RNA, 16 nt, Human
aaaguguaaagcauuc

SEQ ID NO: 2225104 - RNA, 17 nt, Human
aaaguguaaagcauucc

SEQ ID NO: 2225105 - RNA, 18 nt, Human
aaaguguaaagcauucca

SEQ ID NO: 2225106 - RNA, 22 nt, Human
aaaguguaaagcauuccaacaa

SEQ ID NO: 2225107 - RNA, 22 nt, Human
aaaguucauagggucucuucag

SEQ ID NO: 2225108 - RNA, 21 nt, Human
aaaguucccuacuuccuguga

SEQ ID NO: 2225109 - RNA, 17 nt, Human
aaaguguguuguugcuu

SEQ ID NO: 2225110 - RNA, 14 nt, Human
aaaguguguauuaa

SEQ ID NO: 2225111 - RNA, 15 nt, Human
aaaguguguauuaaa

SEQ ID NO: 2225112 - RNA, 17 nt, Human
aaaguguguauuaaaaa

SEQ ID NO: 2225113 - RNA, 22 nt, Human
aaaguguguauuaaaaaaaaca

SEQ ID NO: 2225114 - RNA, 23 nt, Human
aaaguguguauuaaaaaaaacaa

SEQ ID NO: 2225115 - RNA, 14 nt, Human
aaaguguguuguug

SEQ ID NO: 2225116 - RNA, 20 nt, Human
aaaguguguuguugcuuuag

SEQ ID NO: 2225117 - RNA, 19 nt, Human
aaaguguccauugacaugu

SEQ ID NO: 2225118 - RNA, 21 nt, Human
aaaguguccauugacauguac

SEQ ID NO: 2225119 - RNA, 22 nt, Human
aaaguguccauugacauguaca

SEQ ID NO: 2225120 - RNA, 23 nt, Human
aaaguguccauugacauguacag

SEQ ID NO: 2225121 - RNA, 20 nt, Human
aaaguguaaauccuuuuucu

SEQ ID NO: 2225122 - RNA, 18 nt, Human
aaagugugagcaaacuaa

SEQ ID NO: 2225123 - RNA, 14 nt, Human
aaagugugagcagu

SEQ ID NO: 2225124 - RNA, 19 nt, Human
aaagugugcuuuaugcuga

SEQ ID NO: 2225125 - RNA, 14 nt, Human
aaagugugcuuuau

SEQ ID NO: 2225126 - RNA, 13 nt, Human
aaagugugcuuua

SEQ ID NO: 2225127 - RNA, 22 nt, Human
aaagugugagcagugaguuaca

SEQ ID NO: 2225128 - RNA, 23 nt, Human
aaagugugcuuuaugcugaaaca

SEQ ID NO: 2225129 - RNA, 22 nt, Human
aaagugugcuuuaugcugaaac

SEQ ID NO: 2225130 - RNA, 12 nt, Human
aaaguguguauu

SEQ ID NO: 2225131 - RNA, 13 nt, Human
aaaguguguauua

SEQ ID NO: 2225132 - RNA, 19 nt, Human
aaaguguggucccaacagg

SEQ ID NO: 2225133 - RNA, 23 nt, Human
aaaguucccuacuuccugugacu

SEQ ID NO: 2225134 - RNA, 18 nt, Human
aaaguugcacggcugcug

SEQ ID NO: 2225135 - RNA, 19 nt, Human
aaaguuuacaaguguauau

SEQ ID NO: 2225136 - RNA, 21 nt, Human
aaaguuucucuuuucaaaaca

SEQ ID NO: 2225137 - RNA, 23 nt, Human
aaaguuucucuuuucaaaacauu

SEQ ID NO: 2225138 - RNA, 12 nt, Human
aaaguuucaaug

SEQ ID NO: 2225139 - RNA, 13 nt, Human
aaaguuucaaugu

SEQ ID NO: 2225140 - RNA, 13 nt, Human
aaaguuuccauau

SEQ ID NO: 2225141 - RNA, 14 nt, Human
aaaguuuccauaug

SEQ ID NO: 2225142 - RNA, 15 nt, Human
aaaguuuacaguaaa

SEQ ID NO: 2225143 - RNA, 18 nt, Human
aaaguuuacaguaaauaa

SEQ ID NO: 2225144 - RNA, 21 nt, Human
aaaguuuacaguaaauaaauu

SEQ ID NO: 2225145 - RNA, 22 nt, Human
aaaguuuacaguaaauaaauug

SEQ ID NO: 2225146 - RNA, 15 nt, Human
aaaguuugccagaag

SEQ ID NO: 2225147 - RNA, 13 nt, Human
aaaguuugccaga

SEQ ID NO: 2225148 - RNA, 15 nt, Human
aaaguuugcuuagaa

SEQ ID NO: 2225149 - RNA, 16 nt, Human
aaaguuugcuuagaaa

SEQ ID NO: 2225150 - RNA, 12 nt, Human
aaaguuucucag

SEQ ID NO: 2225151 - RNA, 13 nt, Human
aaaguuucucaga

SEQ ID NO: 2225152 - RNA, 17 nt, Human
aaaguuucucagauccu

SEQ ID NO: 2225153 - RNA, 16 nt, Human
aaaguuuguugaaaca

SEQ ID NO: 2225154 - RNA, 15 nt, Human
aaaguuuucccuuga

SEQ ID NO: 2225155 - RNA, 16 nt, Human
aaaguuuuauuuuucu

SEQ ID NO: 2225156 - RNA, 15 nt, Human
aaaguuuuccugaga

SEQ ID NO: 2225157 - RNA, 12 nt, Human
aaaguuuugaaa

SEQ ID NO: 2225158 - RNA, 13 nt, Human
aaaguuuugaaaa

SEQ ID NO: 2225159 - RNA, 14 nt, Human
aaaguuuugaaaag

SEQ ID NO: 2225160 - RNA, 19 nt, Human
aaaguuuugaaaagcuauu

SEQ ID NO: 2225161 - RNA, 22 nt, Human
aaauaaaaaaaagaaaaaagag

SEQ ID NO: 2225162 - RNA, 20 nt, Human
aaauaaaaaaaagaaaaaag

SEQ ID NO: 2225163 - RNA, 17 nt, Human
aaauaaaaaaaagaaaa

SEQ ID NO: 2225164 - RNA, 15 nt, Human
aaauaaaaaaaagaa

SEQ ID NO: 2225165 - RNA, 13 nt, Human
aaauaaaaaaaag

SEQ ID NO: 2225166 - RNA, 16 nt, Human
aaaguuuugaaaagcu

SEQ ID NO: 2225167 - RNA, 18 nt, Human
aaaguuuugaaaagcuau

SEQ ID NO: 2225168 - RNA, 18 nt, Human
aaauaagggcagagucac

SEQ ID NO: 2225169 - RNA, 13 nt, Human
aaauaaugucucu

SEQ ID NO: 2225170 - RNA, 12 nt, Human
aaauaaugucuc

SEQ ID NO: 2225171 - RNA, 12 nt, Human
aaauaaugugaa

SEQ ID NO: 2225172 - RNA, 20 nt, Human
aaauaagugguuauuucuca

SEQ ID NO: 2225173 - RNA, 13 nt, Human
aaauaaugugaaa

SEQ ID NO: 2225174 - RNA, 15 nt, Human
aaauaauuuuuauau

SEQ ID NO: 2225175 - RNA, 18 nt, Human
aaauaauuuuuauauuug

SEQ ID NO: 2225176 - RNA, 20 nt, Human
aaauaauuuuuauauuugaa

SEQ ID NO: 2225177 - RNA, 15 nt, Human
guaaaauauagcugu

SEQ ID NO: 2225178 - RNA, 16 nt, Human
guaaaauauagcugua

SEQ ID NO: 2225179 - RNA, 15 nt, Human
guaaaauauuuugaa

SEQ ID NO: 2225180 - RNA, 18 nt, Human
guaaaauauagcuguaca

SEQ ID NO: 2225181 - RNA, 20 nt, Human
guaaaauauagcuguacaaa

SEQ ID NO: 2225182 - RNA, 21 nt, Human
guaaaauauagcuguacaaau

SEQ ID NO: 2225183 - RNA, 21 nt, Human
guaaaauauuuugaaucaaua

SEQ ID NO: 2225184 - RNA, 18 nt, Human
guaaaauauuuugaauca

SEQ ID NO: 2225185 - RNA, 19 nt, Human
guaaaauauuuugaaucaa

SEQ ID NO: 2225186 - RNA, 21 nt, Human
guaaaaucuuucuuucuuaga

SEQ ID NO: 2225187 - RNA, 14 nt, Human
guaaaaucuuucuu

SEQ ID NO: 2225188 - RNA, 15 nt, Human
guaaaaucuuucuuu

SEQ ID NO: 2225189 - RNA, 12 nt, Human
guaaaaugugaa

SEQ ID NO: 2225190 - RNA, 19 nt, Human
guaaaaugugaagugaaug

SEQ ID NO: 2225191 - RNA, 20 nt, Human
guaaaaugugaagugaauga

SEQ ID NO: 2225192 - RNA, 22 nt, Human
guaaaaugugaagugaaugaaa

SEQ ID NO: 2225193 - RNA, 16 nt, Human
guaaagcauuccaaca

SEQ ID NO: 2225194 - RNA, 19 nt, Human
guaaauugaaucaguauaa

SEQ ID NO: 2225195 - RNA, 17 nt, Human
guaaauuuaugugaugg

SEQ ID NO: 2225196 - RNA, 16 nt, Human
guaaauuuaugugaug

SEQ ID NO: 2225197 - RNA, 17 nt, Human
guaacaaugaagauaaa

SEQ ID NO: 2225198 - RNA, 16 nt, Human
guaaagacuguagaag

SEQ ID NO: 2225199 - RNA, 15 nt, Human
guaaagacuggcuuu

SEQ ID NO: 2225200 - RNA, 19 nt, Human
guaaagacuggcuuuuauu

SEQ ID NO: 2225201 - RNA, 14 nt, Human
guaaagacuggcuu

SEQ ID NO: 2225202 - RNA, 14 nt, Human
guaaagagaccuac

SEQ ID NO: 2225203 - RNA, 21 nt, Human
guaaagagaccuaccucaggu

SEQ ID NO: 2225204 - RNA, 19 nt, Human
guaaagauauuuuuaucuu

SEQ ID NO: 2225205 - RNA, 22 nt, Human
guaaagagaccuaccucagguu

SEQ ID NO: 2225206 - RNA, 23 nt, Human
guaaagagaccuaccucagguug

SEQ ID NO: 2225207 - RNA, 22 nt, Human
guaaagauauuuuuaucuuuau

SEQ ID NO: 2225208 - RNA, 17 nt, Human
ggugggcacccacccug

SEQ ID NO: 2225209 - RNA, 17 nt, Human
ggugggauggaggagaa

SEQ ID NO: 2225210 - RNA, 16 nt, Human
ggugggauggaggaga

SEQ ID NO: 2225211 - RNA, 19 nt, Human
ggugggauccuccaggugc

SEQ ID NO: 2225212 - RNA, 18 nt, Human
ggugggcacccacccugg

SEQ ID NO: 2225213 - RNA, 14 nt, Human
ggugggcaggaaaa

SEQ ID NO: 2225214 - RNA, 20 nt, Human
ggugggccagccccucccac

SEQ ID NO: 2225215 - RNA, 16 nt, Human
ggugggccagccccuc

SEQ ID NO: 2225216 - RNA, 14 nt, Human
ggugggcagguggu

SEQ ID NO: 2225217 - RNA, 16 nt, Human
ggugggcagguggugg

SEQ ID NO: 2225218 - RNA, 14 nt, Human
ggugggccaggcug

SEQ ID NO: 2225219 - RNA, 12 nt, Human
ggugggccaggc

SEQ ID NO: 2225220 - RNA, 12 nt, Human
ggugggcccagg

SEQ ID NO: 2225221 - RNA, 17 nt, Human
ggugggcccaggaccag

SEQ ID NO: 2225222 - RNA, 18 nt, Human
ggugggcccaggaccagc

SEQ ID NO: 2225223 - RNA, 20 nt, Human
ggugggcccaggaccagcug

SEQ ID NO: 2225224 - RNA, 21 nt, Human
ggugggcccaggaccagcugg

SEQ ID NO: 2225225 - RNA, 22 nt, Human
ggugggcccaggaccagcuggg

SEQ ID NO: 2225226 - RNA, 13 nt, Human
gguggggcagcuu

SEQ ID NO: 2225227 - RNA, 23 nt, Human
ggugggcccaggaccagcugggg

SEQ ID NO: 2225228 - RNA, 16 nt, Human
ggugggccgcaggcgg

SEQ ID NO: 2225229 - RNA, 13 nt, Human
ggugggccucugg

SEQ ID NO: 2225230 - RNA, 14 nt, Human
ggugggccucuggu

SEQ ID NO: 2225231 - RNA, 17 nt, Human
gguggggcagcuugagg

SEQ ID NO: 2225232 - RNA, 11 nt, Human
gguggggaggg

SEQ ID NO: 2225233 - RNA, 12 nt, Human
gguggggagggg

SEQ ID NO: 2225234 - RNA, 13 nt, Human
gguggggaggggc

SEQ ID NO: 2225235 - RNA, 14 nt, Human
gguggggaggggcg

SEQ ID NO: 2225236 - RNA, 20 nt, Human
ggugggaggauugcuugagc

SEQ ID NO: 2225237 - RNA, 23 nt, Human
aaagccuugugucuacagagaac

SEQ ID NO: 2225238 - RNA, 14 nt, Human
aaagcgaauuuuaa

SEQ ID NO: 2225239 - RNA, 14 nt, Human
ggugggauccucca

SEQ ID NO: 2225240 - RNA, 15 nt, Human
ggugggauccuccag

SEQ ID NO: 2225241 - RNA, 11 nt, Human
aaagcauguac

SEQ ID NO: 2225242 - RNA, 14 nt, Human
aaagcaugaauggu

SEQ ID NO: 2225243 - RNA, 17 nt, Human
aaagccuuaucaagugu

SEQ ID NO: 2225244 - RNA, 21 nt, Human
aaagccuugugucuacagaga

SEQ ID NO: 2225245 - RNA, 16 nt, Human
aaagccuguuuaagag

SEQ ID NO: 2225246 - RNA, 18 nt, Human
aaagccuguuuaagagac

SEQ ID NO: 2225247 - RNA, 16 nt, Human
gguggggcgggaaagc

SEQ ID NO: 2225248 - RNA, 12 nt, Human
gguggggcggga

SEQ ID NO: 2225249 - RNA, 23 nt, Human
gguggggguagagcugauccaga

SEQ ID NO: 2225250 - RNA, 17 nt, Human
gguggggggggugcugg

SEQ ID NO: 2225251 - RNA, 15 nt, Human
gguggggucacucug

SEQ ID NO: 2225252 - RNA, 23 nt, Human
gguggggucacucuggcagcuca

SEQ ID NO: 2225253 - RNA, 13 nt, Human
ggugucgggcaug

SEQ ID NO: 2225254 - RNA, 19 nt, Human
gguggggucaugcccuccu

SEQ ID NO: 2225255 - RNA, 15 nt, Human
gguggggucaugccc

SEQ ID NO: 2225256 - RNA, 15 nt, Human
ggugucgcgccuucu

SEQ ID NO: 2225257 - RNA, 17 nt, Human
ggugucgcgccuucucc

SEQ ID NO: 2225258 - RNA, 16 nt, Human
gguggggguggaggcu

SEQ ID NO: 2225259 - RNA, 16 nt, Human
ggugucgggcaugaca

SEQ ID NO: 2225260 - RNA, 21 nt, Human
ggugucgcucugcuggccugg

SEQ ID NO: 2225261 - RNA, 20 nt, Human
ggugucgcgccuucuccccc

SEQ ID NO: 2225262 - RNA, 21 nt, Human
ggugucgcgccuucucccccc

SEQ ID NO: 2225263 - RNA, 20 nt, Human
ggugugaaagucagaugccc

SEQ ID NO: 2225264 - RNA, 16 nt, Human
ggugucugcacccagg

SEQ ID NO: 2225265 - RNA, 15 nt, Human
ggugugaccugaggg

SEQ ID NO: 2225266 - RNA, 16 nt, Human
ggugugacugaauuuc

SEQ ID NO: 2225267 - RNA, 16 nt, Human
ggugugaccacugcag

SEQ ID NO: 2225268 - RNA, 23 nt, Human
ggugucuguguuccaaccacuga

SEQ ID NO: 2225269 - RNA, 20 nt, Human
ggugucuugggcagagcugg

SEQ ID NO: 2225270 - RNA, 19 nt, Human
ggugucuccaaccccccag

SEQ ID NO: 2225271 - RNA, 23 nt, Human
ggugucuccaaccccccagcacu

SEQ ID NO: 2225272 - RNA, 14 nt, Human
ggugugccugcagc

SEQ ID NO: 2225273 - RNA, 13 nt, Human
ggugugccugcag

SEQ ID NO: 2225274 - RNA, 15 nt, Human
ggugugccugcagcc

SEQ ID NO: 2225275 - RNA, 24 nt, Human
ggugugcacguggcauguggccug

SEQ ID NO: 2225276 - RNA, 23 nt, Human
ggugugcacaucucugcuugagu

SEQ ID NO: 2225277 - RNA, 18 nt, Human
ggugugcacaucucugcu

SEQ ID NO: 2225278 - RNA, 16 nt, Human
ggugugcacaucucug

SEQ ID NO: 2225279 - RNA, 15 nt, Human
ggugugcacaucucu

SEQ ID NO: 2225280 - RNA, 17 nt, Human
ggugugcaccaggguug

SEQ ID NO: 2225281 - RNA, 16 nt, Human
ggugugcaccaggguu

SEQ ID NO: 2225282 - RNA, 18 nt, Human
ggugugagucaccaagcc

SEQ ID NO: 2225283 - RNA, 15 nt, Human
ggugugaucgucuga

SEQ ID NO: 2225284 - RNA, 20 nt, Human
ggugugcaaugucugaguga

SEQ ID NO: 2225285 - RNA, 18 nt, Human
ggugugaucgucugacug

SEQ ID NO: 2225286 - RNA, 22 nt, Human
gguuccuauggcuggccacugc

SEQ ID NO: 2225287 - RNA, 12 nt, Human
gguuccucugcc

SEQ ID NO: 2225288 - RNA, 14 nt, Human
gguuccucugccug

SEQ ID NO: 2225289 - RNA, 15 nt, Human
gguuccucugccugc

SEQ ID NO: 2225290 - RNA, 17 nt, Human
gguuccucugccugccc

SEQ ID NO: 2225291 - RNA, 20 nt, Human
gguuccuuccucugagccuu

SEQ ID NO: 2225292 - RNA, 19 nt, Human
gguuccuuccucugagccu

SEQ ID NO: 2225293 - RNA, 23 nt, Human
gguucucacagugggagccaggg

SEQ ID NO: 2225294 - RNA, 18 nt, Human
gguuccucugccugcccc

SEQ ID NO: 2225295 - RNA, 12 nt, Human
gguucucaucuu

SEQ ID NO: 2225296 - RNA, 18 nt, Human
gguucucagguguugcca

SEQ ID NO: 2225297 - RNA, 18 nt, Human
gguucucccccuuucucu

SEQ ID NO: 2225298 - RNA, 19 nt, Human
gguucuccguuagcuccug

SEQ ID NO: 2225299 - RNA, 20 nt, Human
gguucuccguuagcuccugu

SEQ ID NO: 2225300 - RNA, 21 nt, Human
gguucuccguuagcuccugug

SEQ ID NO: 2225301 - RNA, 12 nt, Human
gguucuggggcc

SEQ ID NO: 2225302 - RNA, 18 nt, Human
gguucuggugugaacuaa

SEQ ID NO: 2225303 - RNA, 19 nt, Human
gguucugccugccagcugc

SEQ ID NO: 2225304 - RNA, 12 nt, Human
gguucuggcugc

SEQ ID NO: 2225305 - RNA, 17 nt, Human
gguucuccucuccccuc

SEQ ID NO: 2225306 - RNA, 21 nt, Human
gguucugaugaugugccuggg

SEQ ID NO: 2225307 - RNA, 20 nt, Human
gguucugccugccagcugca

SEQ ID NO: 2225308 - RNA, 17 nt, Human
gguucuggggccccuuu

SEQ ID NO: 2225309 - RNA, 17 nt, Human
gguuuaggcugguggcc

SEQ ID NO: 2225310 - RNA, 22 nt, Human
gguuuaggcugguggcccagga

SEQ ID NO: 2225311 - RNA, 20 nt, Human
gguuuaggcugguggcccag

SEQ ID NO: 2225312 - RNA, 16 nt, Human
gguuuagaaagcuugc

SEQ ID NO: 2225313 - RNA, 13 nt, Human
gguuucugaaaau

SEQ ID NO: 2225314 - RNA, 14 nt, Human
gguuucugagcugc

SEQ ID NO: 2225315 - RNA, 17 nt, Human
gguuucugaguuccugc

SEQ ID NO: 2225316 - RNA, 21 nt, Human
gguuucucgcauaggaccuuu

SEQ ID NO: 2225317 - RNA, 14 nt, Human
gguuucagaaaugu

SEQ ID NO: 2225318 - RNA, 19 nt, Human
gguuucaccauguuggcca

SEQ ID NO: 2225319 - RNA, 19 nt, Human
gguuucaccauguugccca

SEQ ID NO: 2225320 - RNA, 13 nt, Human
gguuucagaaaug

SEQ ID NO: 2225321 - RNA, 12 nt, Human
gguuucagaaau

SEQ ID NO: 2225322 - RNA, 21 nt, Human
ggugugcggccuuuggcuuca

SEQ ID NO: 2225323 - RNA, 13 nt, Human
ggugugcucugau

SEQ ID NO: 2225324 - RNA, 12 nt, Human
gguguggaagag

SEQ ID NO: 2225325 - RNA, 12 nt, Human
ggugugcuggga

SEQ ID NO: 2225326 - RNA, 19 nt, Human
ggugugcugggagcuccac

SEQ ID NO: 2225327 - RNA, 22 nt, Human
gguucaggguuggccccugccc

SEQ ID NO: 2225328 - RNA, 21 nt, Human
gguucauaggucacuggcucu

SEQ ID NO: 2225329 - RNA, 22 nt, Human
ggugugcugggagcuccacucu

SEQ ID NO: 2225330 - RNA, 18 nt, Human
gguucaggguuggccccu

SEQ ID NO: 2225331 - RNA, 21 nt, Human
gguucaggguuggccccugcc

SEQ ID NO: 2225332 - RNA, 21 nt, Human
gguucccccagcccuguggaa

SEQ ID NO: 2225333 - RNA, 17 nt, Human
gguucccguuucuccac

SEQ ID NO: 2225334 - RNA, 15 nt, Human
gguuccccuguucac

SEQ ID NO: 2225335 - RNA, 24 nt, Human
gguuccagcaauucuccugccuca

SEQ ID NO: 2225336 - RNA, 16 nt, Human
gguucccccagcccug

SEQ ID NO: 2225337 - RNA, 19 nt, Human
gguucauuauuggaauuaa

SEQ ID NO: 2225338 - RNA, 18 nt, Human
gguucauuauuggaauua

SEQ ID NO: 2225339 - RNA, 17 nt, Human
gguucauuauuggaauu

SEQ ID NO: 2225340 - RNA, 16 nt, Human
gguucauuauuggaau

SEQ ID NO: 2225341 - RNA, 15 nt, Human
gguucaucugagcaa

SEQ ID NO: 2225342 - RNA, 23 nt, Human
gguucauuucaaauacaucuuug

SEQ ID NO: 2225343 - RNA, 23 nt, Human
gguuccagcaauucuccugccuc

SEQ ID NO: 2225344 - RNA, 22 nt, Human
gguucccuuuccuuccaucccu

SEQ ID NO: 2225345 - RNA, 17 nt, Human
gguucccuuuccuucca

SEQ ID NO: 2225346 - RNA, 13 nt, Human
gguucccucugag

SEQ ID NO: 2225347 - RNA, 16 nt, Human
gguucccucugagaau

SEQ ID NO: 2225348 - RNA, 21 nt, Human
gguucccuuugacgccauccc

SEQ ID NO: 2225349 - RNA, 18 nt, Human
gguuccuauggcuggcca

SEQ ID NO: 2225350 - RNA, 16 nt, Human
gguuccuccccuccuc

SEQ ID NO: 2225351 - RNA, 22 nt, Human
gguucccuuugacgccauccca

SEQ ID NO: 2225352 - RNA, 17 nt, Human
gacauucaccugcccca

SEQ ID NO: 2225353 - RNA, 16 nt, Human
gacauucaccugcccc

SEQ ID NO: 2225354 - RNA, 15 nt, Human
gacauucaccugccc

SEQ ID NO: 2225355 - RNA, 23 nt, Human
gacauuaacaguuuuccaugaaa

SEQ ID NO: 2225356 - RNA, 22 nt, Human
gacauuaacaguuuuccaugaa

SEQ ID NO: 2225357 - RNA, 19 nt, Human
gacauuaacaguuuuccau

SEQ ID NO: 2225358 - RNA, 18 nt, Human
gacauuaacaguuuucca

SEQ ID NO: 2225359 - RNA, 14 nt, Human
gacauucaccugcc

SEQ ID NO: 2225360 - RNA, 23 nt, Human
gacagacaacacugggaaacaga

SEQ ID NO: 2225361 - RNA, 22 nt, Human
gacacuguuuacaagaaaaaau

SEQ ID NO: 2225362 - RNA, 19 nt, Human
gacacuguuuacaagaaaa

SEQ ID NO: 2225363 - RNA, 20 nt, Human
gacacuuaauacuaccuuga

SEQ ID NO: 2225364 - RNA, 13 nt, Human
gacagaagcaggc

SEQ ID NO: 2225365 - RNA, 15 nt, Human
gacagaagcaggcug

SEQ ID NO: 2225366 - RNA, 16 nt, Human
gacagaagcaggcugg

SEQ ID NO: 2225367 - RNA, 17 nt, Human
gacagaagcaggcugga

SEQ ID NO: 2225368 - RNA, 12 nt, Human
gacagacacagg

SEQ ID NO: 2225369 - RNA, 21 nt, Human
gacagcccgggcucugccucc

SEQ ID NO: 2225370 - RNA, 22 nt, Human
gacagcccgggcucugccuccc

SEQ ID NO: 2225371 - RNA, 23 nt, Human
gacagcccgggcucugccuccca

SEQ ID NO: 2225372 - RNA, 23 nt, Human
gacacugaaauauacacacagca

SEQ ID NO: 2225373 - RNA, 17 nt, Human
gacacucugcucugccc

SEQ ID NO: 2225374 - RNA, 15 nt, Human
gacacucugcucugc

SEQ ID NO: 2225375 - RNA, 16 nt, Human
gacacucugcucugcc

SEQ ID NO: 2225376 - RNA, 15 nt, Human
gacacucuggcuggu

SEQ ID NO: 2225377 - RNA, 13 nt, Human
gacacugaugggc

SEQ ID NO: 2225378 - RNA, 13 nt, Human
gacacucugcucu

SEQ ID NO: 2225379 - RNA, 15 nt, Human
gacacugaugggcaa

SEQ ID NO: 2225380 - RNA, 12 nt, Human
gacacuguacaa

SEQ ID NO: 2225381 - RNA, 13 nt, Human
gacacuguacaag

SEQ ID NO: 2225382 - RNA, 16 nt, Human
gacacugccacacagg

SEQ ID NO: 2225383 - RNA, 16 nt, Human
gacacuuaaaaauggu

SEQ ID NO: 2225384 - RNA, 20 nt, Human
gacacugugcccagcccgga

SEQ ID NO: 2225385 - RNA, 16 nt, Human
gacacugugcccagcc

SEQ ID NO: 2225386 - RNA, 23 nt, Human
gacacugugcccagcccggaccu

SEQ ID NO: 2225387 - RNA, 16 nt, Human
gacagucaaggagugg

SEQ ID NO: 2225388 - RNA, 17 nt, Human
gacagucaaggaguggc

SEQ ID NO: 2225389 - RNA, 19 nt, Human
gacagucaaggaguggcuu

SEQ ID NO: 2225390 - RNA, 22 nt, Human
gacagucaaggaguggcuuacu

SEQ ID NO: 2225391 - RNA, 15 nt, Human
gacaguauuuguggg

SEQ ID NO: 2225392 - RNA, 14 nt, Human
gacaguccugggag

SEQ ID NO: 2225393 - RNA, 13 nt, Human
gacaguccuggga

SEQ ID NO: 2225394 - RNA, 14 nt, Human
gacagucaccccag

SEQ ID NO: 2225395 - RNA, 16 nt, Human
gacagucaccccagga

SEQ ID NO: 2225396 - RNA, 17 nt, Human
gacaguccucuccaccu

SEQ ID NO: 2225397 - RNA, 17 nt, Human
gacagucaccucaugga

SEQ ID NO: 2225398 - RNA, 18 nt, Human
gacaguccugggagaacc

SEQ ID NO: 2225399 - RNA, 15 nt, Human
gacaguccugggaga

SEQ ID NO: 2225400 - RNA, 23 nt, Human
gacaguccugggagaaccucagg

SEQ ID NO: 2225401 - RNA, 13 nt, Human
gacagucuugugc

SEQ ID NO: 2225402 - RNA, 24 nt, Human
gacaguccucuccaccuaguggcu

SEQ ID NO: 2225403 - RNA, 13 nt, Human
gacagucucacuu

SEQ ID NO: 2225404 - RNA, 17 nt, Human
gacauuaacaguuuucc

SEQ ID NO: 2225405 - RNA, 14 nt, Human
gacauuaacaguuu

SEQ ID NO: 2225406 - RNA, 12 nt, Human
gacauuaacagu

SEQ ID NO: 2225407 - RNA, 23 nt, Human
gacauuaaaucuaugaaguauau

SEQ ID NO: 2225408 - RNA, 15 nt, Human
gacagucuugugcuu

SEQ ID NO: 2225409 - RNA, 23 nt, Human
gacagucuuuggguaccuauuuu

SEQ ID NO: 2225410 - RNA, 14 nt, Human
gacagugaaagaaa

SEQ ID NO: 2225411 - RNA, 16 nt, Human
gacaggugugccgaca

SEQ ID NO: 2225412 - RNA, 17 nt, Human
gacaggucccucaccca

SEQ ID NO: 2225413 - RNA, 18 nt, Human
gacagcucccucugccug

SEQ ID NO: 2225414 - RNA, 17 nt, Human
gacagcucccucugccu

SEQ ID NO: 2225415 - RNA, 23 nt, Human
gacaggguuuggcugugucuaaa

SEQ ID NO: 2225416 - RNA, 14 nt, Human
gacagguaaauuaa

SEQ ID NO: 2225417 - RNA, 16 nt, Human
gacagcucccucugcc

SEQ ID NO: 2225418 - RNA, 18 nt, Human
gacagcuccacccuggcc

SEQ ID NO: 2225419 - RNA, 20 nt, Human
gacaggguuuugccauguug

SEQ ID NO: 2225420 - RNA, 22 nt, Human
gacaggguuuugccauguuggc

SEQ ID NO: 2225421 - RNA, 23 nt, Human
gacagccuguggcggugccuggg

SEQ ID NO: 2225422 - RNA, 22 nt, Human
gacagccuguggcggugccugg

SEQ ID NO: 2225423 - RNA, 20 nt, Human
gacagccuguggcggugccu

SEQ ID NO: 2225424 - RNA, 11 nt, Human
gacagccugua

SEQ ID NO: 2225425 - RNA, 12 nt, Human
gacagcuccacc

SEQ ID NO: 2225426 - RNA, 11 nt, Human
gacagcuccuu

SEQ ID NO: 2225427 - RNA, 13 nt, Human
gacagacacacac

SEQ ID NO: 2225428 - RNA, 15 nt, Human
gacagacacacacac

SEQ ID NO: 2225429 - RNA, 13 nt, Human
gacagccuggcac

SEQ ID NO: 2225430 - RNA, 19 nt, Human
gacagccuggcacagggca

SEQ ID NO: 2225431 - RNA, 14 nt, Human
gacacacugaagaa

SEQ ID NO: 2225432 - RNA, 15 nt, Human
gacacacgcacacac

SEQ ID NO: 2225433 - RNA, 16 nt, Human
gacaaacaccucccag

SEQ ID NO: 2225434 - RNA, 13 nt, Human
gacacacugaaga

SEQ ID NO: 2225435 - RNA, 21 nt, Human
gacacacagcucuguccuggg

SEQ ID NO: 2225436 - RNA, 12 nt, Human
gacacacaugaa

SEQ ID NO: 2225437 - RNA, 20 nt, Human
gaauuaucuugguugaaaau

SEQ ID NO: 2225438 - RNA, 20 nt, Human
gaauuugugaagguggaaau

SEQ ID NO: 2225439 - RNA, 22 nt, Human
gaauuaucuauacauaucuuua

SEQ ID NO: 2225440 - RNA, 15 nt, Human
gaauuuuaaaaauga

SEQ ID NO: 2225441 - RNA, 13 nt, Human
gaauuuguuauca

SEQ ID NO: 2225442 - RNA, 14 nt, Human
gaaugaggugggag

SEQ ID NO: 2225443 - RNA, 15 nt, Human
gaaugaggugggagg

SEQ ID NO: 2225444 - RNA, 22 nt, Human
gaaugaggucccaggcagagaa

SEQ ID NO: 2225445 - RNA, 21 nt, Human
gaaugaggucccaggcagaga

SEQ ID NO: 2225446 - RNA, 15 nt, Human
gaaugaggucccagg

SEQ ID NO: 2225447 - RNA, 14 nt, Human
gaaugaggucccag

SEQ ID NO: 2225448 - RNA, 18 nt, Human
gaaugaggcuugcugaga

SEQ ID NO: 2225449 - RNA, 20 nt, Human
gaaugaggaggaaggagaga

SEQ ID NO: 2225450 - RNA, 14 nt, Human
gaaugaggcuugcu

SEQ ID NO: 2225451 - RNA, 15 nt, Human
gaaugaggcuugcug

SEQ ID NO: 2225452 - RNA, 17 nt, Human
gaaugaggcuugcugag

SEQ ID NO: 2225453 - RNA, 14 nt, Human
gaaugaggaggaag

SEQ ID NO: 2225454 - RNA, 13 nt, Human
gaaugaggaggaa

SEQ ID NO: 2225455 - RNA, 23 nt, Human
gaaugaggaauaauaaguuaaac

SEQ ID NO: 2225456 - RNA, 19 nt, Human
gaaugaggucccaggcaga

SEQ ID NO: 2225457 - RNA, 18 nt, Human
gaaugaggucccaggcag

SEQ ID NO: 2225458 - RNA, 17 nt, Human
gaaugaggucccaggca

SEQ ID NO: 2225459 - RNA, 16 nt, Human
gaaugaggucccaggc

SEQ ID NO: 2225460 - RNA, 11 nt, Human
gaauuaguuuu

SEQ ID NO: 2225461 - RNA, 15 nt, Human
gaauuuuaagugcuu

SEQ ID NO: 2225462 - RNA, 23 nt, Human
gaauuuuacuguguuucuuuugg

SEQ ID NO: 2225463 - RNA, 23 nt, Human
gaauuuuaaaagaugcaauguag

SEQ ID NO: 2225464 - RNA, 21 nt, Human
gaauuuuaaaagaugcaaugu

SEQ ID NO: 2225465 - RNA, 15 nt, Human
gaauuuuaaaagaug

SEQ ID NO: 2225466 - RNA, 12 nt, Human
gaauuuuaaaag

SEQ ID NO: 2225467 - RNA, 22 nt, Human
gaauuuucacaugaacauacug

SEQ ID NO: 2225468 - RNA, 21 nt, Human
gaauuuuauuuuuugggaaaa

SEQ ID NO: 2225469 - RNA, 23 nt, Human
gaauuuucagaccccagcggcug

SEQ ID NO: 2225470 - RNA, 14 nt, Human
gaauuuucagaccc

SEQ ID NO: 2225471 - RNA, 13 nt, Human
gaauuuucugugu

SEQ ID NO: 2225472 - RNA, 14 nt, Human
gaauuuucccacug

SEQ ID NO: 2225473 - RNA, 23 nt, Human
gaauuuucuuuguguagcuuugc

SEQ ID NO: 2225474 - RNA, 21 nt, Human
gaauuuucuuuguguagcuuu

SEQ ID NO: 2225475 - RNA, 19 nt, Human
gaauuuuggcugugucucc

SEQ ID NO: 2225476 - RNA, 14 nt, Human
gacacacagcucug

SEQ ID NO: 2225477 - RNA, 21 nt, Human
gacaaaaauucaacucagacu

SEQ ID NO: 2225478 - RNA, 18 nt, Human
gacaaaaaguuuccauau

SEQ ID NO: 2225479 - RNA, 15 nt, Human
gacaaaacuagagac

SEQ ID NO: 2225480 - RNA, 15 nt, Human
gacacacagcucugu

SEQ ID NO: 2225481 - RNA, 17 nt, Human
gacacacagcucugucc

SEQ ID NO: 2225482 - RNA, 18 nt, Human
gacacacagcucuguccu

SEQ ID NO: 2225483 - RNA, 19 nt, Human
gacacacagcucuguccug

SEQ ID NO: 2225484 - RNA, 22 nt, Human
gaauuuuguuuggacuucuuuu

SEQ ID NO: 2225485 - RNA, 15 nt, Human
gaauuuuguugcugu

SEQ ID NO: 2225486 - RNA, 21 nt, Human
gacaaaaaugaacugaaguuu

SEQ ID NO: 2225487 - RNA, 16 nt, Human
gaauuuuucauugaua

SEQ ID NO: 2225488 - RNA, 16 nt, Human
gacaaaaaguuuccau

SEQ ID NO: 2225489 - RNA, 14 nt, Human
gaauuuuuauuauu

SEQ ID NO: 2225490 - RNA, 14 nt, Human
gaauuuuucucuaa

SEQ ID NO: 2225491 - RNA, 22 nt, Human
gaauuuucuuuuuaauaaaaag

SEQ ID NO: 2225492 - RNA, 17 nt, Human
gaauuuucuguguuuug

SEQ ID NO: 2225493 - RNA, 21 nt, Human
gaauuuugugcccccauguaa

SEQ ID NO: 2225494 - RNA, 20 nt, Human
gaauuuugugcccccaugua

SEQ ID NO: 2225495 - RNA, 23 nt, Human
gaauuuuggcugugucucccuuc

SEQ ID NO: 2225496 - RNA, 19 nt, Human
gaagugugggucugugugu

SEQ ID NO: 2225497 - RNA, 18 nt, Human
gaagugugggucugugug

SEQ ID NO: 2225498 - RNA, 17 nt, Human
gaagugugggucugugu

SEQ ID NO: 2225499 - RNA, 23 nt, Human
gaaguguaacagcugaggucucu

SEQ ID NO: 2225500 - RNA, 15 nt, Human
gaaguguaggcagac

SEQ ID NO: 2225501 - RNA, 18 nt, Human
gaaguguaacagcugagg

SEQ ID NO: 2225502 - RNA, 17 nt, Human
gaaguguaacagcugag

SEQ ID NO: 2225503 - RNA, 18 nt, Human
gaaguguaggcagacaca

SEQ ID NO: 2225504 - RNA, 20 nt, Human
gaagugugauugggaauaaa

SEQ ID NO: 2225505 - RNA, 23 nt, Human
gaagugugauugggaauaaauau

SEQ ID NO: 2225506 - RNA, 11 nt, Human
gaagugugauu

SEQ ID NO: 2225507 - RNA, 16 nt, Human
gaaguguaggcagaca

SEQ ID NO: 2225508 - RNA, 17 nt, Human
gaaguguaggcagacac

SEQ ID NO: 2225509 - RNA, 14 nt, Human
gaaugagaguguga

SEQ ID NO: 2225510 - RNA, 20 nt, Human
gaaugagccuacgcugaaga

SEQ ID NO: 2225511 - RNA, 22 nt, Human
gaaugagccuacgcugaagaug

SEQ ID NO: 2225512 - RNA, 13 nt, Human
gaaugagccucgg

SEQ ID NO: 2225513 - RNA, 11 nt, Human
gaaugagccuc

SEQ ID NO: 2225514 - RNA, 22 nt, Human
gaaugagagacacacugaagaa

SEQ ID NO: 2225515 - RNA, 23 nt, Human
gaaugagagacacacugaagaag

SEQ ID NO: 2225516 - RNA, 18 nt, Human
gaaugaccuuguugcaug

SEQ ID NO: 2225517 - RNA, 20 nt, Human
gaaugagagacacacugaag

SEQ ID NO: 2225518 - RNA, 14 nt, Human
gaaugaauuaaaua

SEQ ID NO: 2225519 - RNA, 13 nt, Human
gaaugacaaagag

SEQ ID NO: 2225520 - RNA, 16 nt, Human
gaaugaauuaaauaaa

SEQ ID NO: 2225521 - RNA, 16 nt, Human
gaaugacaacagaagc

SEQ ID NO: 2225522 - RNA, 11 nt, Human
gaaugaauguc

SEQ ID NO: 2225523 - RNA, 14 nt, Human
gaaugaaugucagu

SEQ ID NO: 2225524 - RNA, 18 nt, Human
gaaugaaugucaguguga

SEQ ID NO: 2225525 - RNA, 22 nt, Human
gaaugaaugucagugugacuga

SEQ ID NO: 2225526 - RNA, 17 nt, Human
gaagggauggauuccaa

SEQ ID NO: 2225527 - RNA, 14 nt, Human
gaagggaggugggg

SEQ ID NO: 2225528 - RNA, 22 nt, Human
gaagggcaggaaggagagccug

SEQ ID NO: 2225529 - RNA, 10 nt, Human
gaagggaggu

SEQ ID NO: 2225530 - RNA, 13 nt, Human
gaagggaggcugg

SEQ ID NO: 2225531 - RNA, 16 nt, Human
gaagggagagccagcu

SEQ ID NO: 2225532 - RNA, 21 nt, Human
gaagggacuaggagcacugua

SEQ ID NO: 2225533 - RNA, 12 nt, Human
gaagggagaagg

SEQ ID NO: 2225534 - RNA, 21 nt, Human
gaagggagaaggaucuagaau

SEQ ID NO: 2225535 - RNA, 15 nt, Human
gaagggaccaaggca

SEQ ID NO: 2225536 - RNA, 16 nt, Human
gaagggagaagaaagg

SEQ ID NO: 2225537 - RNA, 18 nt, Human
gaagggaccuugaagggu

SEQ ID NO: 2225538 - RNA, 20 nt, Human
gaagggaccuugaaggguaa

SEQ ID NO: 2225539 - RNA, 20 nt, Human
gaagggaccaaggcaaggca

SEQ ID NO: 2225540 - RNA, 21 nt, Human
gaagggaccaaggcaaggcag

SEQ ID NO: 2225541 - RNA, 22 nt, Human
gaagggaccaaggcaaggcagg

SEQ ID NO: 2225542 - RNA, 17 nt, Human
gaagggaccuugaaggg

SEQ ID NO: 2225543 - RNA, 19 nt, Human
gaaggcucgagcaugccug

SEQ ID NO: 2225544 - RNA, 15 nt, Human
gaaggcuauggggau

SEQ ID NO: 2225545 - RNA, 23 nt, Human
gaagcuguaguagcccuuucugu

SEQ ID NO: 2225546 - RNA, 21 nt, Human
gaagcugucauaaaaagacaa

SEQ ID NO: 2225547 - RNA, 20 nt, Human
gaagcuguguccuugcaccu

SEQ ID NO: 2225548 - RNA, 17 nt, Human
gaagcuguguccuugca

SEQ ID NO: 2225549 - RNA, 12 nt, Human
gaagcugugucc

SEQ ID NO: 2225550 - RNA, 22 nt, Human
gaagcuguguccuugcaccugc

SEQ ID NO: 2225551 - RNA, 16 nt, Human
gaaggcucgagcaugc

SEQ ID NO: 2225552 - RNA, 17 nt, Human
gaaggcucgagcaugcc

SEQ ID NO: 2225553 - RNA, 14 nt, Human
gaagcucccaggaa

SEQ ID NO: 2225554 - RNA, 15 nt, Human
gaagcucccaggaac

SEQ ID NO: 2225555 - RNA, 14 nt, Human
gaagcugccugcuu

SEQ ID NO: 2225556 - RNA, 13 nt, Human
gaagcugccugcu

SEQ ID NO: 2225557 - RNA, 16 nt, Human
gaagcugcccugccca

SEQ ID NO: 2225558 - RNA, 13 nt, Human
gaagcugcuccgu

SEQ ID NO: 2225559 - RNA, 17 nt, Human
gaagcugcucuggaauu

SEQ ID NO: 2225560 - RNA, 18 nt, Human
gaagcugcucuggaauuu

SEQ ID NO: 2225561 - RNA, 23 nt, Human
gaagcuggccgaggguccuggcu

SEQ ID NO: 2225562 - RNA, 17 nt, Human
gaagcuggccgaggguc

SEQ ID NO: 2225563 - RNA, 14 nt, Human
gaagugaacauuuc

SEQ ID NO: 2225564 - RNA, 15 nt, Human
gaagugaaugcuggg

SEQ ID NO: 2225565 - RNA, 16 nt, Human
gaagugaaugcuggga

SEQ ID NO: 2225566 - RNA, 13 nt, Human
gaagggccagagc

SEQ ID NO: 2225567 - RNA, 20 nt, Human
gaagggauuuuagucacacg

SEQ ID NO: 2225568 - RNA, 19 nt, Human
gaagggcauccuucugccu

SEQ ID NO: 2225569 - RNA, 14 nt, Human
gaagucuuuuguuc

SEQ ID NO: 2225570 - RNA, 14 nt, Human
gaagugaaacugcu

SEQ ID NO: 2225571 - RNA, 22 nt, Human
gaagugacagggaagcuacagg

SEQ ID NO: 2225572 - RNA, 20 nt, Human
gaagugacagggaagcuaca

SEQ ID NO: 2225573 - RNA, 21 nt, Human
gaagugacagggaagcuacag

SEQ ID NO: 2225574 - RNA, 13 nt, Human
gaagugacaggga

SEQ ID NO: 2225575 - RNA, 14 nt, Human
gaagugacagggaa

SEQ ID NO: 2225576 - RNA, 15 nt, Human
gaagugacagggaag

SEQ ID NO: 2225577 - RNA, 18 nt, Human
gaagugacagggaagcua

SEQ ID NO: 2225578 - RNA, 24 nt, Human
gaagugacaaggccccagagacuc

SEQ ID NO: 2225579 - RNA, 12 nt, Human
gaagugacaggg

SEQ ID NO: 2225580 - RNA, 23 nt, Human
gaagugacaaggccccagagacu

SEQ ID NO: 2225581 - RNA, 21 nt, Human
gaagugacaaggccccagaga

SEQ ID NO: 2225582 - RNA, 18 nt, Human
gaagugacaaggccccag

SEQ ID NO: 2225583 - RNA, 10 nt, Human
gaagggccag

SEQ ID NO: 2225584 - RNA, 17 nt, Human
gaagugaaugcugggac

SEQ ID NO: 2225585 - RNA, 18 nt, Human
gaagggcaucaugcaucu

SEQ ID NO: 2225586 - RNA, 23 nt, Human
gaagggcaggaaggagagccugc

SEQ ID NO: 2225587 - RNA, 19 nt, Human
gaagggcagggcugaggcc

SEQ ID NO: 2225588 - RNA, 18 nt, Human
gaagucuuuguacagaca

SEQ ID NO: 2225589 - RNA, 19 nt, Human
gaagucuuuguacagacaa

SEQ ID NO: 2225590 - RNA, 20 nt, Human
gaagucuuuguacagacaac

SEQ ID NO: 2225591 - RNA, 18 nt, Human
gaaguggaccaggacagg

SEQ ID NO: 2225592 - RNA, 16 nt, Human
gaaguggaccaggaca

SEQ ID NO: 2225593 - RNA, 21 nt, Human
gaagugcuuaguguacuugga

SEQ ID NO: 2225594 - RNA, 23 nt, Human
gaagugccccugcugccucccca

SEQ ID NO: 2225595 - RNA, 20 nt, Human
gaagugcuggcaaccacuaa

SEQ ID NO: 2225596 - RNA, 21 nt, Human
gaagugggccaggacaggccc

SEQ ID NO: 2225597 - RNA, 19 nt, Human
gaagugggccaggacaggc

SEQ ID NO: 2225598 - RNA, 18 nt, Human
gaagugggccaggacagg

SEQ ID NO: 2225599 - RNA, 16 nt, Human
gaagugggccaggaca

SEQ ID NO: 2225600 - RNA, 22 nt, Human
gaaguggaccaggacaggacca

SEQ ID NO: 2225601 - RNA, 17 nt, Human
gaaguggacuggccccu

SEQ ID NO: 2225602 - RNA, 18 nt, Human
gaaguggacuggccccug

SEQ ID NO: 2225603 - RNA, 20 nt, Human
gaaguggacuggccccuggg

SEQ ID NO: 2225604 - RNA, 16 nt, Human
gaaguguaacagcuga

SEQ ID NO: 2225605 - RNA, 15 nt, Human
gaaguguaacagcug

SEQ ID NO: 2225606 - RNA, 14 nt, Human
gaaguguaacagcu

SEQ ID NO: 2225607 - RNA, 15 nt, Human
gaaguggggacagag

SEQ ID NO: 2225608 - RNA, 22 nt, Human
gaagugccccugcugccucccc

SEQ ID NO: 2225609 - RNA, 18 nt, Human
gaagugccccugcugccu

SEQ ID NO: 2225610 - RNA, 15 nt, Human
gaagugccccugcug

SEQ ID NO: 2225611 - RNA, 14 nt, Human
gaagugccccugcu

SEQ ID NO: 2225612 - RNA, 13 nt, Human
gaagugccccugc

SEQ ID NO: 2225613 - RNA, 14 nt, Human
gaagugcauccaaa

SEQ ID NO: 2225614 - RNA, 18 nt, Human
gaagugcaaauuugauac

SEQ ID NO: 2225615 - RNA, 14 nt, Human
gaagugaggcauug

SEQ ID NO: 2225616 - RNA, 13 nt, Human
gaagugacuuugg

SEQ ID NO: 2225617 - RNA, 20 nt, Human
gaagugacuuuggcugcaug

SEQ ID NO: 2225618 - RNA, 15 nt, Human
gaagugacuuuggcu

SEQ ID NO: 2225619 - RNA, 21 nt, Human
gaagugacuuuggcugcaugc

SEQ ID NO: 2225620 - RNA, 16 nt, Human
gaagugagcacagccu

SEQ ID NO: 2225621 - RNA, 18 nt, Human
gaagugagcuuugcugcu

SEQ ID NO: 2225622 - RNA, 16 nt, Human
gaagugaggaagccag

SEQ ID NO: 2225623 - RNA, 14 nt, Human
gaagcuacagguua

SEQ ID NO: 2225624 - RNA, 15 nt, Human
gaagcuacagguuac

SEQ ID NO: 2225625 - RNA, 19 nt, Human
gaagcuacagguuacaaca

SEQ ID NO: 2225626 - RNA, 17 nt, Human
gaagcuaauuugcauua

SEQ ID NO: 2225627 - RNA, 16 nt, Human
gaagcuaauuugcauu

SEQ ID NO: 2225628 - RNA, 15 nt, Human
gaagcuaauuugcau

SEQ ID NO: 2225629 - RNA, 14 nt, Human
gaagcuaauuugca

SEQ ID NO: 2225630 - RNA, 21 nt, Human
gaagcucagcccaccccccuc

SEQ ID NO: 2225631 - RNA, 22 nt, Human
gaagcucagcccaccccccuca

SEQ ID NO: 2225632 - RNA, 23 nt, Human
gaagcuacagguuacaacagauu

SEQ ID NO: 2225633 - RNA, 23 nt, Human
gaagcuacugugugugugaauga

SEQ ID NO: 2225634 - RNA, 22 nt, Human
gaagcuacugugugugugaaug

SEQ ID NO: 2225635 - RNA, 20 nt, Human
gaagcuacugugugugugaa

SEQ ID NO: 2225636 - RNA, 15 nt, Human
gaagcuacugugugu

SEQ ID NO: 2225637 - RNA, 21 nt, Human
gaagcuacagguuacaacaga

SEQ ID NO: 2225638 - RNA, 22 nt, Human
gaagcuacagguuacaacagau

SEQ ID NO: 2225639 - RNA, 14 nt, Human
gaagcucagggccu

SEQ ID NO: 2225640 - RNA, 15 nt, Human
gaagcucagggccug

SEQ ID NO: 2225641 - RNA, 23 nt, Human
gaagcucagggccuggcucaggu

SEQ ID NO: 2225642 - RNA, 13 nt, Human
gaagcuccacugu

SEQ ID NO: 2225643 - RNA, 14 nt, Human
gaagcuccacuguc

SEQ ID NO: 2225644 - RNA, 15 nt, Human
gaagcuccacuguca

SEQ ID NO: 2225645 - RNA, 16 nt, Human
gaagcuccacugucac

SEQ ID NO: 2225646 - RNA, 18 nt, Human
gaagcuccacugucaccc

SEQ ID NO: 2225647 - RNA, 19 nt, Human
gaagcuccacugucacccu

SEQ ID NO: 2225648 - RNA, 23 nt, Human
gaagcuccacugucacccuccac

SEQ ID NO: 2225649 - RNA, 20 nt, Human
gaagcucagggccuggcuca

SEQ ID NO: 2225650 - RNA, 21 nt, Human
gaagcucagggccuggcucag

SEQ ID NO: 2225651 - RNA, 16 nt, Human
gaagcucagggccugg

SEQ ID NO: 2225652 - RNA, 17 nt, Human
gaagcucagggccuggc

SEQ ID NO: 2225653 - RNA, 18 nt, Human
gaagcucagggccuggcu

SEQ ID NO: 2225654 - RNA, 19 nt, Human
gaagcucagggccuggcuc

SEQ ID NO: 2225655 - RNA, 13 nt, Human
gaaauccagggug

SEQ ID NO: 2225656 - RNA, 18 nt, Human
gaaauccagggugguggu

SEQ ID NO: 2225657 - RNA, 14 nt, Human
gaaauccauucaca

SEQ ID NO: 2225658 - RNA, 17 nt, Human
gaaauccauccagaggc

SEQ ID NO: 2225659 - RNA, 12 nt, Human
gagaggcagaga

SEQ ID NO: 2225660 - RNA, 22 nt, Human
gagaggcagacuucccugaaug

SEQ ID NO: 2225661 - RNA, 18 nt, Human
gagacuccugcaggcagc

SEQ ID NO: 2225662 - RNA, 17 nt, Human
gagacuccugcaggcag

SEQ ID NO: 2225663 - RNA, 12 nt, Human
gagaggcaggca

SEQ ID NO: 2225664 - RNA, 11 nt, Human
gagaggcaggc

SEQ ID NO: 2225665 - RNA, 16 nt, Human
gagaggcagagaaaga

SEQ ID NO: 2225666 - RNA, 13 nt, Human
gagaggcagagag

SEQ ID NO: 2225667 - RNA, 14 nt, Human
gagaggcagagagc

SEQ ID NO: 2225668 - RNA, 16 nt, Human
gagaggcagagagcgg

SEQ ID NO: 2225669 - RNA, 14 nt, Human
gagaggcauccagu

SEQ ID NO: 2225670 - RNA, 13 nt, Human
gagacucagacag

SEQ ID NO: 2225671 - RNA, 23 nt, Human
gagacucaccucugccucaaugu

SEQ ID NO: 2225672 - RNA, 20 nt, Human
gagacucaccucugccucaa

SEQ ID NO: 2225673 - RNA, 19 nt, Human
gagacucaccucugccuca

SEQ ID NO: 2225674 - RNA, 18 nt, Human
gagacucaccucugccuc

SEQ ID NO: 2225675 - RNA, 17 nt, Human
gagacucaccucugccu

SEQ ID NO: 2225676 - RNA, 21 nt, Human
gagacuagauuuaugaauaca

SEQ ID NO: 2225677 - RNA, 18 nt, Human
gagacuaugcguuuuuau

SEQ ID NO: 2225678 - RNA, 20 nt, Human
gagacuaugcguuuuuauaa

SEQ ID NO: 2225679 - RNA, 16 nt, Human
gagacucaccucugcc

SEQ ID NO: 2225680 - RNA, 15 nt, Human
gagacucaccucugc

SEQ ID NO: 2225681 - RNA, 15 nt, Human
gagacuccugcaggc

SEQ ID NO: 2225682 - RNA, 16 nt, Human
gagacuccugcaggca

SEQ ID NO: 2225683 - RNA, 23 nt, Human
gagauggaucaaucaaacccggc

SEQ ID NO: 2225684 - RNA, 16 nt, Human
gagauggaggaggagg

SEQ ID NO: 2225685 - RNA, 18 nt, Human
gagauggaguucuugugc

SEQ ID NO: 2225686 - RNA, 14 nt, Human
gagauggaggagga

SEQ ID NO: 2225687 - RNA, 13 nt, Human
gagauggaggagg

SEQ ID NO: 2225688 - RNA, 12 nt, Human
gagauggaggag

SEQ ID NO: 2225689 - RNA, 23 nt, Human
gagauggaacccuuuuggccccc

SEQ ID NO: 2225690 - RNA, 20 nt, Human
gagauggaaguugcagugag

SEQ ID NO: 2225691 - RNA, 20 nt, Human
gagaugccuccaccgcugcc

SEQ ID NO: 2225692 - RNA, 15 nt, Human
gagaugccuccaccg

SEQ ID NO: 2225693 - RNA, 14 nt, Human
gagaugccuccacc

SEQ ID NO: 2225694 - RNA, 23 nt, Human
gagaugcauucuugguuggcugg

SEQ ID NO: 2225695 - RNA, 16 nt, Human
gagaugcagagguaaa

SEQ ID NO: 2225696 - RNA, 13 nt, Human
gagaugcagcugg

SEQ ID NO: 2225697 - RNA, 19 nt, Human
gagaugccuccaccgcugc

SEQ ID NO: 2225698 - RNA, 19 nt, Human
gagaugcuggagaagagag

SEQ ID NO: 2225699 - RNA, 20 nt, Human
gagaugcuggagaagagagg

SEQ ID NO: 2225700 - RNA, 21 nt, Human
gagaugcuggagaagagagga

SEQ ID NO: 2225701 - RNA, 21 nt, Human
gagaugaugccaugggcccuc

SEQ ID NO: 2225702 - RNA, 18 nt, Human
gagaugcaccaccaagcc

SEQ ID NO: 2225703 - RNA, 17 nt, Human
gagaugauucagaaggg

SEQ ID NO: 2225704 - RNA, 18 nt, Human
gagaugauucagaagggg

SEQ ID NO: 2225705 - RNA, 21 nt, Human
gagaugcaccaccaagccaag

SEQ ID NO: 2225706 - RNA, 12 nt, Human
gagaugcagagg

SEQ ID NO: 2225707 - RNA, 14 nt, Human
gagaugcagaggua

SEQ ID NO: 2225708 - RNA, 22 nt, Human
gagaggcauccaguaucuugaa

SEQ ID NO: 2225709 - RNA, 19 nt, Human
gagaugaugaaaauauuua

SEQ ID NO: 2225710 - RNA, 15 nt, Human
gagaggcaggcauag

SEQ ID NO: 2225711 - RNA, 21 nt, Human
gagaggcaggcauagaggcuu

SEQ ID NO: 2225712 - RNA, 20 nt, Human
gagaugaugaaaauauuuaa

SEQ ID NO: 2225713 - RNA, 18 nt, Human
gagauuucuuguugcuca

SEQ ID NO: 2225714 - RNA, 23 nt, Human
gagauuucaucugcucuccuucc

SEQ ID NO: 2225715 - RNA, 12 nt, Human
gagauuuuucau

SEQ ID NO: 2225716 - RNA, 12 nt, Human
gagauuuuccuu

SEQ ID NO: 2225717 - RNA, 13 nt, Human
gagauuuacaacu

SEQ ID NO: 2225718 - RNA, 13 nt, Human
gagauugagaagg

SEQ ID NO: 2225719 - RNA, 17 nt, Human
gagauugagaaggagag

SEQ ID NO: 2225720 - RNA, 18 nt, Human
gagauugagaaggagaga

SEQ ID NO: 2225721 - RNA, 20 nt, Human
gagauugagaaggagagaaa

SEQ ID NO: 2225722 - RNA, 23 nt, Human
gagauuuaauuaaucaugaaugu

SEQ ID NO: 2225723 - RNA, 13 nt, Human
gagauuucaucug

SEQ ID NO: 2225724 - RNA, 17 nt, Human
gagauuucaucugcucu

SEQ ID NO: 2225725 - RNA, 15 nt, Human
gagauuucaagagau

SEQ ID NO: 2225726 - RNA, 19 nt, Human
gagauuucaucugcucucc

SEQ ID NO: 2225727 - RNA, 20 nt, Human
gagauuucaucugcucuccu

SEQ ID NO: 2225728 - RNA, 21 nt, Human
gagauuucaucugcucuccuu

SEQ ID NO: 2225729 - RNA, 22 nt, Human
gagauuucaucugcucuccuuc

SEQ ID NO: 2225730 - RNA, 19 nt, Human
gagaugggacugggagggc

SEQ ID NO: 2225731 - RNA, 14 nt, Human
gagaugggagcucc

SEQ ID NO: 2225732 - RNA, 15 nt, Human
gagaugggagcuccu

SEQ ID NO: 2225733 - RNA, 22 nt, Human
gagaugggagcuccucuccugg

SEQ ID NO: 2225734 - RNA, 18 nt, Human
gagaugggcuuguuuucu

SEQ ID NO: 2225735 - RNA, 23 nt, Human
gagaugggagcuccucuccugga

SEQ ID NO: 2225736 - RNA, 17 nt, Human
gagaugggacugggagg

SEQ ID NO: 2225737 - RNA, 21 nt, Human
gagaugggaaugaggugggag

SEQ ID NO: 2225738 - RNA, 20 nt, Human
gagaugggaaugagguggga

SEQ ID NO: 2225739 - RNA, 15 nt, Human
gagauggccugagaa

SEQ ID NO: 2225740 - RNA, 15 nt, Human
gagauggaggaggag

SEQ ID NO: 2225741 - RNA, 14 nt, Human
gagauggggugggg

SEQ ID NO: 2225742 - RNA, 17 nt, Human
gagauguaaaagguauu

SEQ ID NO: 2225743 - RNA, 16 nt, Human
gagauguaaaagguau

SEQ ID NO: 2225744 - RNA, 14 nt, Human
gagauguagccccu

SEQ ID NO: 2225745 - RNA, 18 nt, Human
gagauugcaccacugcac

SEQ ID NO: 2225746 - RNA, 21 nt, Human
gagauugcaccacugcacucc

SEQ ID NO: 2225747 - RNA, 15 nt, Human
gagauguagcaaaac

SEQ ID NO: 2225748 - RNA, 14 nt, Human
gagauguaauuguu

SEQ ID NO: 2225749 - RNA, 16 nt, Human
gagauguaauuguuuu

SEQ ID NO: 2225750 - RNA, 12 nt, Human
gagaugucuucg

SEQ ID NO: 2225751 - RNA, 17 nt, Human
gagauucaguuuucauu

SEQ ID NO: 2225752 - RNA, 22 nt, Human
gagcauguacugagccuuguaa

SEQ ID NO: 2225753 - RNA, 22 nt, Human
gagcauggggauaaaggagaag

SEQ ID NO: 2225754 - RNA, 21 nt, Human
gagcauggggauaaaggagaa

SEQ ID NO: 2225755 - RNA, 15 nt, Human
gagcauggagcuggc

SEQ ID NO: 2225756 - RNA, 17 nt, Human
gagcauggagcuggccg

SEQ ID NO: 2225757 - RNA, 14 nt, Human
gagcauggcuguga

SEQ ID NO: 2225758 - RNA, 16 nt, Human
gagcauggcugugagg

SEQ ID NO: 2225759 - RNA, 19 nt, Human
gagcauggcugugaggaug

SEQ ID NO: 2225760 - RNA, 21 nt, Human
gagcauggcugugaggauggg

SEQ ID NO: 2225761 - RNA, 15 nt, Human
gagcaugggccuggc

SEQ ID NO: 2225762 - RNA, 22 nt, Human
gagcaugccuggauggggcugc

SEQ ID NO: 2225763 - RNA, 14 nt, Human
gagcauggagcugg

SEQ ID NO: 2225764 - RNA, 17 nt, Human
gagcaguuucuguccug

SEQ ID NO: 2225765 - RNA, 19 nt, Human
gagcagugucuuccauaau

SEQ ID NO: 2225766 - RNA, 18 nt, Human
gagcagugucuuccauaa

SEQ ID NO: 2225767 - RNA, 20 nt, Human
gagcaguuucuguccugcug

SEQ ID NO: 2225768 - RNA, 21 nt, Human
gagcaguuucuguccugcugg

SEQ ID NO: 2225769 - RNA, 21 nt, Human
gagcauaauaaauggaugagg

SEQ ID NO: 2225770 - RNA, 21 nt, Human
gagcagggcucagcggggaca

SEQ ID NO: 2225771 - RNA, 17 nt, Human
gagcagugucuuccaua

SEQ ID NO: 2225772 - RNA, 12 nt, Human
gagcaucaggcc

SEQ ID NO: 2225773 - RNA, 16 nt, Human
gagcauagaaggcagg

SEQ ID NO: 2225774 - RNA, 22 nt, Human
gagcaguuucuguccugcuggu

SEQ ID NO: 2225775 - RNA, 14 nt, Human
gagcauagaaggca

SEQ ID NO: 2225776 - RNA, 24 nt, Human
gagccccagggucuucccuaccuc

SEQ ID NO: 2225777 - RNA, 19 nt, Human
gagccccagggucuucccu

SEQ ID NO: 2225778 - RNA, 18 nt, Human
gagccccaucagcuccag

SEQ ID NO: 2225779 - RNA, 14 nt, Human
gagccccagugcca

SEQ ID NO: 2225780 - RNA, 12 nt, Human
gagccccagugc

SEQ ID NO: 2225781 - RNA, 16 nt, Human
gagccccauuccuggg

SEQ ID NO: 2225782 - RNA, 18 nt, Human
gagccccauuccugggaa

SEQ ID NO: 2225783 - RNA, 17 nt, Human
gagccccauuccuggga

SEQ ID NO: 2225784 - RNA, 17 nt, Human
gagccccagugccaagc

SEQ ID NO: 2225785 - RNA, 13 nt, Human
gagcccccccaac

SEQ ID NO: 2225786 - RNA, 14 nt, Human
gagccccagggucu

SEQ ID NO: 2225787 - RNA, 13 nt, Human
gagccccaggguc

SEQ ID NO: 2225788 - RNA, 12 nt, Human
gagccccagggu

SEQ ID NO: 2225789 - RNA, 18 nt, Human
gagccccaggccucugug

SEQ ID NO: 2225790 - RNA, 16 nt, Human
gagccccagcuacccu

SEQ ID NO: 2225791 - RNA, 19 nt, Human
gagccccagcccccuuugg

SEQ ID NO: 2225792 - RNA, 13 nt, Human
gagccccagcuga

SEQ ID NO: 2225793 - RNA, 14 nt, Human
gagccccagcugac

SEQ ID NO: 2225794 - RNA, 13 nt, Human
gagccccaggccu

SEQ ID NO: 2225795 - RNA, 16 nt, Human
gagccccaggccucug

SEQ ID NO: 2225796 - RNA, 17 nt, Human
gagccccaggccucugu

SEQ ID NO: 2225797 - RNA, 12 nt, Human
gagccccagccc

SEQ ID NO: 2225798 - RNA, 13 nt, Human
gagccccagcccc

SEQ ID NO: 2225799 - RNA, 17 nt, Human
gagcaugggccuggcca

SEQ ID NO: 2225800 - RNA, 18 nt, Human
gagcaggcuggcagcucu

SEQ ID NO: 2225801 - RNA, 19 nt, Human
gagcaggcuggcagcucuc

SEQ ID NO: 2225802 - RNA, 20 nt, Human
gagcaggcuggcagcucucc

SEQ ID NO: 2225803 - RNA, 21 nt, Human
gagcaggcuggcagcucucca

SEQ ID NO: 2225804 - RNA, 22 nt, Human
gagcaggcuggcagcucuccag

SEQ ID NO: 2225805 - RNA, 14 nt, Human
gagcagggcucagc

SEQ ID NO: 2225806 - RNA, 20 nt, Human
gagcagggauuaaccucugc

SEQ ID NO: 2225807 - RNA, 21 nt, Human
gagcagggauuaaccucugca

SEQ ID NO: 2225808 - RNA, 22 nt, Human
gagcagggauuaaccucugcac

SEQ ID NO: 2225809 - RNA, 11 nt, Human
gagcuggugca

SEQ ID NO: 2225810 - RNA, 21 nt, Human
gagcugguaguuaguagcaug

SEQ ID NO: 2225811 - RNA, 24 nt, Human
gagcugggggccaugagcuccaga

SEQ ID NO: 2225812 - RNA, 19 nt, Human
gagcugggggccaugagcu

SEQ ID NO: 2225813 - RNA, 16 nt, Human
gagcuggugcauuaca

SEQ ID NO: 2225814 - RNA, 14 nt, Human
gagcuggugcauua

SEQ ID NO: 2225815 - RNA, 17 nt, Human
gagcuggugcauuacag

SEQ ID NO: 2225816 - RNA, 18 nt, Human
gagcugggggccaugagc

SEQ ID NO: 2225817 - RNA, 19 nt, Human
gagcuggggaccugguacc

SEQ ID NO: 2225818 - RNA, 19 nt, Human
gagcuggggaugucucuca

SEQ ID NO: 2225819 - RNA, 18 nt, Human
gagcugggugucaagagg

SEQ ID NO: 2225820 - RNA, 17 nt, Human
gagcugggaggaaaaga

SEQ ID NO: 2225821 - RNA, 16 nt, Human
gagcugggaggaaaag

SEQ ID NO: 2225822 - RNA, 12 nt, Human
gagcugggaggc

SEQ ID NO: 2225823 - RNA, 17 nt, Human
gagcugggaggcauggc

SEQ ID NO: 2225824 - RNA, 16 nt, Human
gagcugggauccuaag

SEQ ID NO: 2225825 - RNA, 18 nt, Human
gagcugggaggcauggcc

SEQ ID NO: 2225826 - RNA, 17 nt, Human
gagcugggcagaaggcc

SEQ ID NO: 2225827 - RNA, 14 nt, Human
gagcugggaggaaa

SEQ ID NO: 2225828 - RNA, 21 nt, Human
gagcugggacacuuaacagau

SEQ ID NO: 2225829 - RNA, 22 nt, Human
gagcuggcucugagcgccucca

SEQ ID NO: 2225830 - RNA, 19 nt, Human
gagcugggcagaaggccaa

SEQ ID NO: 2225831 - RNA, 12 nt, Human
gagcuggggaag

SEQ ID NO: 2225832 - RNA, 13 nt, Human
gagcuggggaccu

SEQ ID NO: 2225833 - RNA, 15 nt, Human
gagcuggggaccugg

SEQ ID NO: 2225834 - RNA, 20 nt, Human
gagccuugguguccaccugg

SEQ ID NO: 2225835 - RNA, 19 nt, Human
gagccuugguguccaccug

SEQ ID NO: 2225836 - RNA, 17 nt, Human
gagccuuuggaugacca

SEQ ID NO: 2225837 - RNA, 22 nt, Human
gagccuugguguccaccuggcc

SEQ ID NO: 2225838 - RNA, 18 nt, Human
gagccuuugguucuggcc

SEQ ID NO: 2225839 - RNA, 13 nt, Human
gagcgaaacuccg

SEQ ID NO: 2225840 - RNA, 23 nt, Human
gagccuuugguucuggccagaau

SEQ ID NO: 2225841 - RNA, 23 nt, Human
gagccuuuucccucuuuggcucc

SEQ ID NO: 2225842 - RNA, 22 nt, Human
gagcccccgccccgccccacau

SEQ ID NO: 2225843 - RNA, 21 nt, Human
gagcccccgccccgccccaca

SEQ ID NO: 2225844 - RNA, 17 nt, Human
gagcccccgccccgccc

SEQ ID NO: 2225845 - RNA, 22 nt, Human
gagcccccccaacacugugccc

SEQ ID NO: 2225846 - RNA, 19 nt, Human
gagccuugaacuuugaccu

SEQ ID NO: 2225847 - RNA, 22 nt, Human
gagccuugaacuuugaccucug

SEQ ID NO: 2225848 - RNA, 14 nt, Human
gagccuuccagggg

SEQ ID NO: 2225849 - RNA, 15 nt, Human
gagccuuccaggggu

SEQ ID NO: 2225850 - RNA, 16 nt, Human
gagccuuccaggggug

SEQ ID NO: 2225851 - RNA, 17 nt, Human
gagccuuccaggggugg

SEQ ID NO: 2225852 - RNA, 20 nt, Human
gagcugccuguucagcucca

SEQ ID NO: 2225853 - RNA, 16 nt, Human
gagcggucucaggcug

SEQ ID NO: 2225854 - RNA, 11 nt, Human
gagcugccuuc

SEQ ID NO: 2225855 - RNA, 13 nt, Human
gagcugccuuccc

SEQ ID NO: 2225856 - RNA, 17 nt, Human
gagcggucucaggcugg

SEQ ID NO: 2225857 - RNA, 23 nt, Human
gagcugccuucccuagcuuuaga

SEQ ID NO: 2225858 - RNA, 14 nt, Human
gagcugccuucccu

SEQ ID NO: 2225859 - RNA, 19 nt, Human
gagcugccuucccuagcuu

SEQ ID NO: 2225860 - RNA, 13 nt, Human
gagcuggcucuga

SEQ ID NO: 2225861 - RNA, 17 nt, Human
gagcuggcucugagcgc

SEQ ID NO: 2225862 - RNA, 21 nt, Human
gagcugccuguucagcuccag

SEQ ID NO: 2225863 - RNA, 22 nt, Human
gagcugccuguucagcuccagc

SEQ ID NO: 2225864 - RNA, 14 nt, Human
gagcggucucaggc

SEQ ID NO: 2225865 - RNA, 14 nt, Human
gagcgggaccugug

SEQ ID NO: 2225866 - RNA, 16 nt, Human
gagcgggaccuguggc

SEQ ID NO: 2225867 - RNA, 17 nt, Human
gagcgggaccuguggcu

SEQ ID NO: 2225868 - RNA, 18 nt, Human
gagcggagaaaggaaggg

SEQ ID NO: 2225869 - RNA, 21 nt, Human
gagcggagaaaggaagggcug

SEQ ID NO: 2225870 - RNA, 20 nt, Human
gacugaaaaccucuccucau

SEQ ID NO: 2225871 - RNA, 18 nt, Human
gacugaaaaccucuccuc

SEQ ID NO: 2225872 - RNA, 17 nt, Human
gacugaaaaccucuccu

SEQ ID NO: 2225873 - RNA, 16 nt, Human
gacugaaaaccucucc

SEQ ID NO: 2225874 - RNA, 17 nt, Human
gacucuuuugccauuaa

SEQ ID NO: 2225875 - RNA, 19 nt, Human
gacucuuuuuagggccagg

SEQ ID NO: 2225876 - RNA, 20 nt, Human
gacucuuuuuagggccaggc

SEQ ID NO: 2225877 - RNA, 22 nt, Human
gacucuuuuuagggccaggcag

SEQ ID NO: 2225878 - RNA, 18 nt, Human
gacucuuuuuguaccugg

SEQ ID NO: 2225879 - RNA, 19 nt, Human
gacucuuugguggcuuugc

SEQ ID NO: 2225880 - RNA, 20 nt, Human
gacucuuugguggcuuugca

SEQ ID NO: 2225881 - RNA, 21 nt, Human
gacucuuugguggcuuugcau

SEQ ID NO: 2225882 - RNA, 18 nt, Human
gacucuuugguggcuuug

SEQ ID NO: 2225883 - RNA, 19 nt, Human
gacucuuguuuucaguuuc

SEQ ID NO: 2225884 - RNA, 22 nt, Human
gacucugucaauuucccugacu

SEQ ID NO: 2225885 - RNA, 17 nt, Human
gacucuuaagaagacug

SEQ ID NO: 2225886 - RNA, 18 nt, Human
gacucuuaagaagacugc

SEQ ID NO: 2225887 - RNA, 16 nt, Human
gacucuuaagaagacu

SEQ ID NO: 2225888 - RNA, 14 nt, Human
gacucucugugacc

SEQ ID NO: 2225889 - RNA, 15 nt, Human
gacucucugugaccu

SEQ ID NO: 2225890 - RNA, 22 nt, Human
gacucaaaacccaucugggcuc

SEQ ID NO: 2225891 - RNA, 23 nt, Human
gacucaaaacccaucugggcucc

SEQ ID NO: 2225892 - RNA, 19 nt, Human
gacucucugugaccugccc

SEQ ID NO: 2225893 - RNA, 14 nt, Human
gacucugaaaucug

SEQ ID NO: 2225894 - RNA, 15 nt, Human
gacucugaaaucuga

SEQ ID NO: 2225895 - RNA, 19 nt, Human
gacucugaggcucuuucug

SEQ ID NO: 2225896 - RNA, 23 nt, Human
gacucugaccucuuggccacaga

SEQ ID NO: 2225897 - RNA, 22 nt, Human
gacucugaggcucuuucugggc

SEQ ID NO: 2225898 - RNA, 12 nt, Human
gacucugcacau

SEQ ID NO: 2225899 - RNA, 18 nt, Human
gacucugaaaucugaaga

SEQ ID NO: 2225900 - RNA, 15 nt, Human
gacucugaagccucu

SEQ ID NO: 2225901 - RNA, 16 nt, Human
gacucugaagccucug

SEQ ID NO: 2225902 - RNA, 17 nt, Human
gacucugaagccucugg

SEQ ID NO: 2225903 - RNA, 18 nt, Human
gacucugaagccucuggg

SEQ ID NO: 2225904 - RNA, 19 nt, Human
gacucugaagccucuggga

SEQ ID NO: 2225905 - RNA, 20 nt, Human
gacucugaaucuuuuucaga

SEQ ID NO: 2225906 - RNA, 21 nt, Human
gacucugaaucuuuuucagaa

SEQ ID NO: 2225907 - RNA, 12 nt, Human
gacucugucuca

SEQ ID NO: 2225908 - RNA, 13 nt, Human
gacucuggccucc

SEQ ID NO: 2225909 - RNA, 16 nt, Human
gacucuggggacuccg

SEQ ID NO: 2225910 - RNA, 17 nt, Human
gacucugaccucuuggc

SEQ ID NO: 2225911 - RNA, 19 nt, Human
gacucugcacaugucuugu

SEQ ID NO: 2225912 - RNA, 14 nt, Human
gacucugcacauga

SEQ ID NO: 2225913 - RNA, 15 nt, Human
gacucugcacauguc

SEQ ID NO: 2225914 - RNA, 16 nt, Human
gacucuggcaaagcuu

SEQ ID NO: 2225915 - RNA, 15 nt, Human
gacucuggccuccac

SEQ ID NO: 2225916 - RNA, 20 nt, Human
gacuagggauucaggcugcu

SEQ ID NO: 2225917 - RNA, 19 nt, Human
gacuagggauucaggcugc

SEQ ID NO: 2225918 - RNA, 18 nt, Human
gacuagggauucaggcug

SEQ ID NO: 2225919 - RNA, 17 nt, Human
gacuagggauucaggcu

SEQ ID NO: 2225920 - RNA, 14 nt, Human
gacuaggagcacug

SEQ ID NO: 2225921 - RNA, 23 nt, Human
gacuagggaaaugaucaguuuuu

SEQ ID NO: 2225922 - RNA, 21 nt, Human
gacuagccccuguggagacug

SEQ ID NO: 2225923 - RNA, 14 nt, Human
gacuauucaguuuu

SEQ ID NO: 2225924 - RNA, 21 nt, Human
gacuaugaaugggcaaaacug

SEQ ID NO: 2225925 - RNA, 13 nt, Human
gacuauuuaugaa

SEQ ID NO: 2225926 - RNA, 16 nt, Human
gacuauuuaacuugag

SEQ ID NO: 2225927 - RNA, 23 nt, Human
gacuagccccuguggagacuggg

SEQ ID NO: 2225928 - RNA, 19 nt, Human
gacuaugaacuucucucag

SEQ ID NO: 2225929 - RNA, 20 nt, Human
gacuaugaacuucucucaga

SEQ ID NO: 2225930 - RNA, 16 nt, Human
gacuaugaaugggcaa

SEQ ID NO: 2225931 - RNA, 22 nt, Human
gacuaucaaacugaagccagaa

SEQ ID NO: 2225932 - RNA, 18 nt, Human
gacuaucaaacugaagcc

SEQ ID NO: 2225933 - RNA, 18 nt, Human
gacuaucugucugguggc

SEQ ID NO: 2225934 - RNA, 13 nt, Human
gacuaucagccca

SEQ ID NO: 2225935 - RNA, 22 nt, Human
gacuaucuaaauguugaaagau

SEQ ID NO: 2225936 - RNA, 21 nt, Human
gacuagggauucaggcugcuu

SEQ ID NO: 2225937 - RNA, 22 nt, Human
gacuauauuugggccugcucca

SEQ ID NO: 2225938 - RNA, 18 nt, Human
gacuaggguccuggggaa

SEQ ID NO: 2225939 - RNA, 16 nt, Human
gacuaggguccugggg

SEQ ID NO: 2225940 - RNA, 15 nt, Human
gacuaggguccuggg

SEQ ID NO: 2225941 - RNA, 17 nt, Human
gagaagugaaugcuggg

SEQ ID NO: 2225942 - RNA, 19 nt, Human
gagaagugaaugcugggac

SEQ ID NO: 2225943 - RNA, 20 nt, Human
gagaagugaaugcugggacu

SEQ ID NO: 2225944 - RNA, 23 nt, Human
gagaagucuuagacuugaaauac

SEQ ID NO: 2225945 - RNA, 24 nt, Human
gagaagugacagggaagcuacagg

SEQ ID NO: 2225946 - RNA, 21 nt, Human
gagaagugacagggaagcuac

SEQ ID NO: 2225947 - RNA, 23 nt, Human
gagaagugacagggaagcuacag

SEQ ID NO: 2225948 - RNA, 15 nt, Human
gagaagugacaggga

SEQ ID NO: 2225949 - RNA, 16 nt, Human
gagaagugacagggaa

SEQ ID NO: 2225950 - RNA, 17 nt, Human
gagaagugacagggaag

SEQ ID NO: 2225951 - RNA, 19 nt, Human
gagaagugacagggaagcu

SEQ ID NO: 2225952 - RNA, 14 nt, Human
gagaaucacuugaa

SEQ ID NO: 2225953 - RNA, 21 nt, Human
gagaaucauacuuagcaaagu

SEQ ID NO: 2225954 - RNA, 13 nt, Human
gagaaucacuuga

SEQ ID NO: 2225955 - RNA, 20 nt, Human
gagaaucagaucauuucaaa

SEQ ID NO: 2225956 - RNA, 15 nt, Human
gagaaucacuugaac

SEQ ID NO: 2225957 - RNA, 14 nt, Human
gagacccccacacc

SEQ ID NO: 2225958 - RNA, 13 nt, Human
gagacccccacac

SEQ ID NO: 2225959 - RNA, 12 nt, Human
gagacccccaca

SEQ ID NO: 2225960 - RNA, 14 nt, Human
gagacccaaggagg

SEQ ID NO: 2225961 - RNA, 18 nt, Human
gagacccagcccucaucc

SEQ ID NO: 2225962 - RNA, 16 nt, Human
gagacuagauugccuu

SEQ ID NO: 2225963 - RNA, 16 nt, Human
gagacuaagcccuguc

SEQ ID NO: 2225964 - RNA, 22 nt, Human
gagacuaagcccugucgagaca

SEQ ID NO: 2225965 - RNA, 18 nt, Human
gagaccugacaagcacug

SEQ ID NO: 2225966 - RNA, 19 nt, Human
gagaccugacaagcacugc

SEQ ID NO: 2225967 - RNA, 14 nt, Human
gagacuaagcccug

SEQ ID NO: 2225968 - RNA, 15 nt, Human
gagacuaagcccugu

SEQ ID NO: 2225969 - RNA, 23 nt, Human
gagacuaaccccaccacacccuc

SEQ ID NO: 2225970 - RNA, 22 nt, Human
gagacguuuuuggaagaguagu

SEQ ID NO: 2225971 - RNA, 13 nt, Human
gagaccugccccu

SEQ ID NO: 2225972 - RNA, 12 nt, Human
gagaccugcccc

SEQ ID NO: 2225973 - RNA, 11 nt, Human
gagaccugccc

SEQ ID NO: 2225974 - RNA, 13 nt, Human
gagaccuccugcc

SEQ ID NO: 2225975 - RNA, 15 nt, Human
gagaccuccugccuc

SEQ ID NO: 2225976 - RNA, 16 nt, Human
gagaccuccugccucc

SEQ ID NO: 2225977 - RNA, 15 nt, Human
gagaccucagccaug

SEQ ID NO: 2225978 - RNA, 11 nt, Human
gagaccucauc

SEQ ID NO: 2225979 - RNA, 12 nt, Human
gagaccucauca

SEQ ID NO: 2225980 - RNA, 18 nt, Human
gagaccucaucaggauga

SEQ ID NO: 2225981 - RNA, 19 nt, Human
gagaccucaucaggaugaa

SEQ ID NO: 2225982 - RNA, 20 nt, Human
gagaccucaucaggaugaac

SEQ ID NO: 2225983 - RNA, 21 nt, Human
gagaccucaucaggaugaacc

SEQ ID NO: 2225984 - RNA, 14 nt, Human
gagaccucagccau

SEQ ID NO: 2225985 - RNA, 13 nt, Human
gagaccucagcca

SEQ ID NO: 2225986 - RNA, 11 nt, Human
gagaccucagc

SEQ ID NO: 2225987 - RNA, 15 nt, Human
gagacccucugccac

SEQ ID NO: 2225988 - RNA, 21 nt, Human
gagacccucugccaccagaga

SEQ ID NO: 2225989 - RNA, 23 nt, Human
gagacccccacaccucaguuccc

SEQ ID NO: 2225990 - RNA, 15 nt, Human
gagacccccacaccu

SEQ ID NO: 2225991 - RNA, 13 nt, Human
gagaccccuggcc

SEQ ID NO: 2225992 - RNA, 14 nt, Human
gagaccccuggccu

SEQ ID NO: 2225993 - RNA, 15 nt, Human
gagaccccuggccuc

SEQ ID NO: 2225994 - RNA, 16 nt, Human
gagaccccuggccucc

SEQ ID NO: 2225995 - RNA, 19 nt, Human
gagacccucguggccuucc

SEQ ID NO: 2225996 - RNA, 17 nt, Human
gagaccccuggccuccg

SEQ ID NO: 2225997 - RNA, 17 nt, Human
gagacccuacaggagag

SEQ ID NO: 2225998 - RNA, 21 nt, Human
gagacccugucucaaaaaaag

SEQ ID NO: 2225999 - RNA, 21 nt, Human
gagaaggaaggagacucaccu

SEQ ID NO: 2226000 - RNA, 14 nt, Human
gagaaggaaggaga

SEQ ID NO: 2226001 - RNA, 22 nt, Human
gagaaggacccggaggggccug

SEQ ID NO: 2226002 - RNA, 12 nt, Human
gagaaggaagcc

SEQ ID NO: 2226003 - RNA, 20 nt, Human
gagaaggacccggaggggcc

SEQ ID NO: 2226004 - RNA, 22 nt, Human
gagaagcuuuugaauaaaaacu

SEQ ID NO: 2226005 - RNA, 21 nt, Human
gagaagcuuuugaauaaaaac

SEQ ID NO: 2226006 - RNA, 15 nt, Human
gagaagcggcuggca

SEQ ID NO: 2226007 - RNA, 13 nt, Human
gagaagcggcugg

SEQ ID NO: 2226008 - RNA, 16 nt, Human
gagaagcggcuggcag

SEQ ID NO: 2226009 - RNA, 17 nt, Human
gagaagcuuugcccucc

SEQ ID NO: 2226010 - RNA, 21 nt, Human
gacuuuucuuuguggcuuccu

SEQ ID NO: 2226011 - RNA, 23 nt, Human
gacuuuucuuucagccaagaauu

SEQ ID NO: 2226012 - RNA, 23 nt, Human
gacuuuuguauagguagauguuc

SEQ ID NO: 2226013 - RNA, 18 nt, Human
gacuuuugaaaagaggug

SEQ ID NO: 2226014 - RNA, 15 nt, Human
gacuuucugccugga

SEQ ID NO: 2226015 - RNA, 23 nt, Human
gacugggucucgcuuuguugccc

SEQ ID NO: 2226016 - RNA, 21 nt, Human
gacucuuuuuguaccugguga

SEQ ID NO: 2226017 - RNA, 16 nt, Human
gacuggguuuaugucc

SEQ ID NO: 2226018 - RNA, 14 nt, Human
gacuggguuucuag

SEQ ID NO: 2226019 - RNA, 21 nt, Human
gacuggguuuggaccccagcu

SEQ ID NO: 2226020 - RNA, 22 nt, Human
gacuggguuuggaccccagcug

SEQ ID NO: 2226021 - RNA, 14 nt, Human
gacuggugagcaga

SEQ ID NO: 2226022 - RNA, 15 nt, Human
gacugguccugugug

SEQ ID NO: 2226023 - RNA, 23 nt, Human
gacuggguuuggaccccagcugg

SEQ ID NO: 2226024 - RNA, 16 nt, Human
gacugguaaguaacug

SEQ ID NO: 2226025 - RNA, 17 nt, Human
gacuggugagcagacug

SEQ ID NO: 2226026 - RNA, 19 nt, Human
gacuggugcuauaggcugg

SEQ ID NO: 2226027 - RNA, 20 nt, Human
gacuggugcuauaggcugga

SEQ ID NO: 2226028 - RNA, 19 nt, Human
gacuuuccacccccucccu

SEQ ID NO: 2226029 - RNA, 18 nt, Human
gacuuuccacccccuccc

SEQ ID NO: 2226030 - RNA, 17 nt, Human
gacuuuccacccccucc

SEQ ID NO: 2226031 - RNA, 16 nt, Human
gacuuuccacccccuc

SEQ ID NO: 2226032 - RNA, 15 nt, Human
gacuuuccacccccu

SEQ ID NO: 2226033 - RNA, 13 nt, Human
gacuuuccacccc

SEQ ID NO: 2226034 - RNA, 22 nt, Human
gacuggugcuauaggcuggaga

SEQ ID NO: 2226035 - RNA, 23 nt, Human
gacuggugcuauaggcuggagaa

SEQ ID NO: 2226036 - RNA, 11 nt, Human
gacuuuccucu

SEQ ID NO: 2226037 - RNA, 23 nt, Human
gacuuucucagccucugaauaug

SEQ ID NO: 2226038 - RNA, 19 nt, Human
gacuuucggaguugggggu

SEQ ID NO: 2226039 - RNA, 12 nt, Human
gacuuucugccu

SEQ ID NO: 2226040 - RNA, 14 nt, Human
gacuuucugccugg

SEQ ID NO: 2226041 - RNA, 16 nt, Human
gacuuuccuaaauguu

SEQ ID NO: 2226042 - RNA, 11 nt, Human
gacuuuccugc

SEQ ID NO: 2226043 - RNA, 12 nt, Human
gacuuuccugca

SEQ ID NO: 2226044 - RNA, 18 nt, Human
gacuuucggaguuggggg

SEQ ID NO: 2226045 - RNA, 13 nt, Human
gauacgacuuuau

SEQ ID NO: 2226046 - RNA, 11 nt, Human
gauacuacagu

SEQ ID NO: 2226047 - RNA, 20 nt, Human
gauacuaaaaguucuucucc

SEQ ID NO: 2226048 - RNA, 16 nt, Human
gauacgcaucagacag

SEQ ID NO: 2226049 - RNA, 22 nt, Human
gauacuaaaaguucuucuccaa

SEQ ID NO: 2226050 - RNA, 16 nt, Human
gauacuacaguuuguu

SEQ ID NO: 2226051 - RNA, 13 nt, Human
gauaccccccucu

SEQ ID NO: 2226052 - RNA, 20 nt, Human
gauacccauagcuuccauga

SEQ ID NO: 2226053 - RNA, 21 nt, Human
gauaccccccucugucuugug

SEQ ID NO: 2226054 - RNA, 13 nt, Human
gauacccauccca

SEQ ID NO: 2226055 - RNA, 14 nt, Human
gauacccaucccau

SEQ ID NO: 2226056 - RNA, 16 nt, Human
gauauuaaaggaguua

SEQ ID NO: 2226057 - RNA, 18 nt, Human
gauauuccaugaauguau

SEQ ID NO: 2226058 - RNA, 16 nt, Human
gauauuccaugaaugu

SEQ ID NO: 2226059 - RNA, 15 nt, Human
gauauuauucuugua

SEQ ID NO: 2226060 - RNA, 20 nt, Human
gauauuccccccacuuaaga

SEQ ID NO: 2226061 - RNA, 21 nt, Human
gauauuccaugaauguaucag

SEQ ID NO: 2226062 - RNA, 19 nt, Human
gauauuccaugaauguauc

SEQ ID NO: 2226063 - RNA, 19 nt, Human
gauauguaaacauaauucu

SEQ ID NO: 2226064 - RNA, 20 nt, Human
gauauguaccuaacgaagua

SEQ ID NO: 2226065 - RNA, 17 nt, Human
gauaugggacauuuuug

SEQ ID NO: 2226066 - RNA, 16 nt, Human
gauaugggacauuuuu

SEQ ID NO: 2226067 - RNA, 21 nt, Human
gauaugguggguggacagggg

SEQ ID NO: 2226068 - RNA, 14 nt, Human
gauaugcuuaguaa

SEQ ID NO: 2226069 - RNA, 16 nt, Human
gauaugcuuaguaaug

SEQ ID NO: 2226070 - RNA, 12 nt, Human
gauauggagccc

SEQ ID NO: 2226071 - RNA, 15 nt, Human
gauauggagcccugu

SEQ ID NO: 2226072 - RNA, 21 nt, Human
gauauggagcccuguaauuuu

SEQ ID NO: 2226073 - RNA, 14 nt, Human
gauauggcagaaga

SEQ ID NO: 2226074 - RNA, 15 nt, Human
gauauggcagaagac

SEQ ID NO: 2226075 - RNA, 17 nt, Human
gauauggcagaagacac

SEQ ID NO: 2226076 - RNA, 14 nt, Human
gauaugcagaagga

SEQ ID NO: 2226077 - RNA, 18 nt, Human
gauaugcaguuuuccuua

SEQ ID NO: 2226078 - RNA, 17 nt, Human
gauacuugaaaauuaac

SEQ ID NO: 2226079 - RNA, 20 nt, Human
gauaugauuuaaaacaugua

SEQ ID NO: 2226080 - RNA, 16 nt, Human
gauacuugaaaauuaa

SEQ ID NO: 2226081 - RNA, 13 nt, Human
gaguccacuuugu

SEQ ID NO: 2226082 - RNA, 14 nt, Human
gaguccaggcccca

SEQ ID NO: 2226083 - RNA, 12 nt, Human
gaguccagggaa

SEQ ID NO: 2226084 - RNA, 13 nt, Human
gaguccaggcccc

SEQ ID NO: 2226085 - RNA, 11 nt, Human
gaguccacucc

SEQ ID NO: 2226086 - RNA, 22 nt, Human
gaguccacuuuguuucgugggg

SEQ ID NO: 2226087 - RNA, 13 nt, Human
gagucaccaagcc

SEQ ID NO: 2226088 - RNA, 14 nt, Human
gagucaccaagccc

SEQ ID NO: 2226089 - RNA, 16 nt, Human
gagucccaccuuggcu

SEQ ID NO: 2226090 - RNA, 20 nt, Human
gagucccaccuuggcugcag

SEQ ID NO: 2226091 - RNA, 13 nt, Human
gagugagggccug

SEQ ID NO: 2226092 - RNA, 14 nt, Human
gagugagggccuga

SEQ ID NO: 2226093 - RNA, 19 nt, Human
gagugagggguaaaagcug

SEQ ID NO: 2226094 - RNA, 18 nt, Human
gagugaggaugucugggc

SEQ ID NO: 2226095 - RNA, 21 nt, Human
gagugagggguaaaagcugau

SEQ ID NO: 2226096 - RNA, 22 nt, Human
gagugaggguuucugagcugcu

SEQ ID NO: 2226097 - RNA, 14 nt, Human
gagugcaguccuga

SEQ ID NO: 2226098 - RNA, 17 nt, Human
gagugcaggccugcuca

SEQ ID NO: 2226099 - RNA, 19 nt, Human
gagugcaggccugcucagg

SEQ ID NO: 2226100 - RNA, 11 nt, Human
gagugcaguga

SEQ ID NO: 2226101 - RNA, 12 nt, Human
gagugcagugag

SEQ ID NO: 2226102 - RNA, 24 nt, Human
gagugagcacuaaggugugcucug

SEQ ID NO: 2226103 - RNA, 21 nt, Human
gagucccaccuuggcugcagg

SEQ ID NO: 2226104 - RNA, 13 nt, Human
gaguccagucucu

SEQ ID NO: 2226105 - RNA, 22 nt, Human
gagugaggaauaguugagcccc

SEQ ID NO: 2226106 - RNA, 13 nt, Human
gagugagccuggc

SEQ ID NO: 2226107 - RNA, 13 nt, Human
gagucccaccuug

SEQ ID NO: 2226108 - RNA, 12 nt, Human
gagugagcuggu

SEQ ID NO: 2226109 - RNA, 20 nt, Human
gaggugggaggaucuuuuga

SEQ ID NO: 2226110 - RNA, 17 nt, Human
gaggugggagcaggaga

SEQ ID NO: 2226111 - RNA, 18 nt, Human
gaggugggagcaggagau

SEQ ID NO: 2226112 - RNA, 23 nt, Human
gaggugcuacugacuuucucagc

SEQ ID NO: 2226113 - RNA, 15 nt, Human
gaggugggagcagga

SEQ ID NO: 2226114 - RNA, 16 nt, Human
gaggugcugggaggga

SEQ ID NO: 2226115 - RNA, 12 nt, Human
gaggugggaucc

SEQ ID NO: 2226116 - RNA, 15 nt, Human
gagucaaugugcagu

SEQ ID NO: 2226117 - RNA, 19 nt, Human
gagucaauccccucauuca

SEQ ID NO: 2226118 - RNA, 20 nt, Human
gagucaauccccucauucag

SEQ ID NO: 2226119 - RNA, 16 nt, Human
gaggugggauaucccu

SEQ ID NO: 2226120 - RNA, 18 nt, Human
gaggugggagguggaaga

SEQ ID NO: 2226121 - RNA, 15 nt, Human
gaggugggaggugga

SEQ ID NO: 2226122 - RNA, 23 nt, Human
gaggugggagcaggagauugaga

SEQ ID NO: 2226123 - RNA, 11 nt, Human
gaggugggagg

SEQ ID NO: 2226124 - RNA, 13 nt, Human
gaggugccugucc

SEQ ID NO: 2226125 - RNA, 15 nt, Human
gaggugccuguccca

SEQ ID NO: 2226126 - RNA, 21 nt, Human
gaggugccugucccaccccca

SEQ ID NO: 2226127 - RNA, 14 nt, Human
gaggugccagcaaa

SEQ ID NO: 2226128 - RNA, 13 nt, Human
gaggugccagcaa

SEQ ID NO: 2226129 - RNA, 15 nt, Human
gaggugccagcaaag

SEQ ID NO: 2226130 - RNA, 16 nt, Human
gaggugccagcaaagc

SEQ ID NO: 2226131 - RNA, 17 nt, Human
gaggugccagcaaagcc

SEQ ID NO: 2226132 - RNA, 19 nt, Human
gaggugccagcaaagcccc

SEQ ID NO: 2226133 - RNA, 20 nt, Human
gaggugccagcaaagcccca

SEQ ID NO: 2226134 - RNA, 17 nt, Human
gaggugccagcaacuga

SEQ ID NO: 2226135 - RNA, 20 nt, Human
gaggugccagcaacugaaua

SEQ ID NO: 2226136 - RNA, 22 nt, Human
gaggugccagcaacugaauaaa

SEQ ID NO: 2226137 - RNA, 23 nt, Human
gaggucugcucggccgucuucac

SEQ ID NO: 2226138 - RNA, 19 nt, Human
gaggucugcucggccgucu

SEQ ID NO: 2226139 - RNA, 17 nt, Human
gaggucuggcugcuugc

SEQ ID NO: 2226140 - RNA, 21 nt, Human
gaggucuguacguuaccucuu

SEQ ID NO: 2226141 - RNA, 14 nt, Human
gaggucugaaaugg

SEQ ID NO: 2226142 - RNA, 18 nt, Human
gaggucucuugagggagc

SEQ ID NO: 2226143 - RNA, 17 nt, Human
gaggucucuugagggag

SEQ ID NO: 2226144 - RNA, 18 nt, Human
gaggugcagagugcccag

SEQ ID NO: 2226145 - RNA, 18 nt, Human
gaggucuuuugacaugug

SEQ ID NO: 2226146 - RNA, 19 nt, Human
gaggugcagagugcccaga

SEQ ID NO: 2226147 - RNA, 21 nt, Human
gaggugcagagugcccagaac

SEQ ID NO: 2226148 - RNA, 13 nt, Human
gaggucugugcug

SEQ ID NO: 2226149 - RNA, 15 nt, Human
gaggucugugcugag

SEQ ID NO: 2226150 - RNA, 16 nt, Human
gaggucugugcugagg

SEQ ID NO: 2226151 - RNA, 19 nt, Human
gaggucugugcugaggccu

SEQ ID NO: 2226152 - RNA, 14 nt, Human
gaggucuguucuuu

SEQ ID NO: 2226153 - RNA, 13 nt, Human
gaggucuguucuu

SEQ ID NO: 2226154 - RNA, 12 nt, Human
gaguuugguccc

SEQ ID NO: 2226155 - RNA, 18 nt, Human
gaguuuguguguugucuu

SEQ ID NO: 2226156 - RNA, 20 nt, Human
gaguuugggguaugggagag

SEQ ID NO: 2226157 - RNA, 18 nt, Human
gaguuugcuauuagagca

SEQ ID NO: 2226158 - RNA, 17 nt, Human
gaguuugucgcucaugu

SEQ ID NO: 2226159 - RNA, 18 nt, Human
gaguuugucgcucaugug

SEQ ID NO: 2226160 - RNA, 22 nt, Human
gaguuugucgcucaugugugca

SEQ ID NO: 2226161 - RNA, 15 nt, Human
gaguuuggucccugg

SEQ ID NO: 2226162 - RNA, 20 nt, Human
gaguuguggaaagccucugc

SEQ ID NO: 2226163 - RNA, 16 nt, Human
gaguuguggaaagccu

SEQ ID NO: 2226164 - RNA, 16 nt, Human
gaguuuagcuggaaaa

SEQ ID NO: 2226165 - RNA, 16 nt, Human
gaguuuccaaaaccag

SEQ ID NO: 2226166 - RNA, 15 nt, Human
gaguuuccucaggcu

SEQ ID NO: 2226167 - RNA, 18 nt, Human
gaguuucauucuccugcc

SEQ ID NO: 2226168 - RNA, 19 nt, Human
gaguuucauucuccugccu

SEQ ID NO: 2226169 - RNA, 20 nt, Human
gaguuucauucuccugccug

SEQ ID NO: 2226170 - RNA, 21 nt, Human
gaguuuagugaucugaacaga

SEQ ID NO: 2226171 - RNA, 18 nt, Human
gaguuucauguacaagau

SEQ ID NO: 2226172 - RNA, 15 nt, Human
gaguuucauguacaa

SEQ ID NO: 2226173 - RNA, 23 nt, Human
gaguuuccucaggcugcuggagg

SEQ ID NO: 2226174 - RNA, 20 nt, Human
gaguuuccucaggcugcugg

SEQ ID NO: 2226175 - RNA, 16 nt, Human
gaguuuccucaggcug

SEQ ID NO: 2226176 - RNA, 21 nt, Human
gaguuuccucaggcugcugga

SEQ ID NO: 2226177 - RNA, 15 nt, Human
gaguuucgagguaga

SEQ ID NO: 2226178 - RNA, 13 nt, Human
gaguuugcccugg

SEQ ID NO: 2226179 - RNA, 22 nt, Human
gaguuugaaggaggugagggau

SEQ ID NO: 2226180 - RNA, 17 nt, Human
gaguuugagcugccuuc

SEQ ID NO: 2226181 - RNA, 14 nt, Human
gagugcgugcucag

SEQ ID NO: 2226182 - RNA, 19 nt, Human
gaguggaauaguauccucc

SEQ ID NO: 2226183 - RNA, 18 nt, Human
gagugccuuacacaaugg

SEQ ID NO: 2226184 - RNA, 22 nt, Human
gagugcaguccugaucagagcc

SEQ ID NO: 2226185 - RNA, 18 nt, Human
gagugcaguccugaucag

SEQ ID NO: 2226186 - RNA, 17 nt, Human
gagugcaguccugauca

SEQ ID NO: 2226187 - RNA, 20 nt, Human
gaguuguuacauuuuuaagu

SEQ ID NO: 2226188 - RNA, 16 nt, Human
gaguuguuacauuuuu

SEQ ID NO: 2226189 - RNA, 19 nt, Human
gaguggacuguucccugag

SEQ ID NO: 2226190 - RNA, 17 nt, Human
gaguggacuggagugga

SEQ ID NO: 2226191 - RNA, 11 nt, Human
gaguugggggu

SEQ ID NO: 2226192 - RNA, 12 nt, Human
gaguuguaaaua

SEQ ID NO: 2226193 - RNA, 14 nt, Human
gaguuguaaauaua

SEQ ID NO: 2226194 - RNA, 15 nt, Human
gaguuguaaauauau

SEQ ID NO: 2226195 - RNA, 19 nt, Human
gaguuguaaauauauaaau

SEQ ID NO: 2226196 - RNA, 20 nt, Human
gaguggaauaguauccucca

SEQ ID NO: 2226197 - RNA, 22 nt, Human
gaguggaauaguauccuccagg

SEQ ID NO: 2226198 - RNA, 23 nt, Human
gaguggaauaguauccuccaggu

SEQ ID NO: 2226199 - RNA, 16 nt, Human
gaucucuugagccugg

SEQ ID NO: 2226200 - RNA, 12 nt, Human
gaucucuugagc

SEQ ID NO: 2226201 - RNA, 17 nt, Human
gaucucuugagccuggg

SEQ ID NO: 2226202 - RNA, 21 nt, Human
gauauuuuuucagaaauaugu

SEQ ID NO: 2226203 - RNA, 16 nt, Human
gauauuuuuucugaau

SEQ ID NO: 2226204 - RNA, 18 nt, Human
gauauuuuuccauuuuuu

SEQ ID NO: 2226205 - RNA, 17 nt, Human
gauauuuuuaucuuuau

SEQ ID NO: 2226206 - RNA, 15 nt, Human
gauauuuuuuucuuu

SEQ ID NO: 2226207 - RNA, 22 nt, Human
gauauugucagaguucugcucu

SEQ ID NO: 2226208 - RNA, 16 nt, Human
gauauuuugcuuugug

SEQ ID NO: 2226209 - RNA, 12 nt, Human
gauccaggacua

SEQ ID NO: 2226210 - RNA, 21 nt, Human
gauccagccuggggucuggag

SEQ ID NO: 2226211 - RNA, 13 nt, Human
gauccagccuggg

SEQ ID NO: 2226212 - RNA, 16 nt, Human
gauccagggacugaag

SEQ ID NO: 2226213 - RNA, 22 nt, Human
gauccagggacagaggccccag

SEQ ID NO: 2226214 - RNA, 18 nt, Human
gauccagggacagaggcc

SEQ ID NO: 2226215 - RNA, 15 nt, Human
gauccagggacagag

SEQ ID NO: 2226216 - RNA, 14 nt, Human
gauccagggacaga

SEQ ID NO: 2226217 - RNA, 13 nt, Human
gauccagggacag

SEQ ID NO: 2226218 - RNA, 12 nt, Human
gauccagggaca

SEQ ID NO: 2226219 - RNA, 19 nt, Human
gauccauguagcaggacug

SEQ ID NO: 2226220 - RNA, 16 nt, Human
gauccauguagcagga

SEQ ID NO: 2226221 - RNA, 22 nt, Human
gauccaugaguuugcccugguu

SEQ ID NO: 2226222 - RNA, 15 nt, Human
gaucucccugccgcc

SEQ ID NO: 2226223 - RNA, 14 nt, Human
gaucucccugccgc

SEQ ID NO: 2226224 - RNA, 13 nt, Human
gaucucccugccg

SEQ ID NO: 2226225 - RNA, 19 nt, Human
gaucuccauggcuuccucc

SEQ ID NO: 2226226 - RNA, 12 nt, Human
gaucucccugcc

SEQ ID NO: 2226227 - RNA, 20 nt, Human
gaucucccugccgccucaau

SEQ ID NO: 2226228 - RNA, 18 nt, Human
gaucucccugccgccuca

SEQ ID NO: 2226229 - RNA, 13 nt, Human
gaucuccugaccu

SEQ ID NO: 2226230 - RNA, 21 nt, Human
gaucucauuggacccuuccau

SEQ ID NO: 2226231 - RNA, 23 nt, Human
gaucucagugguuaagauuccua

SEQ ID NO: 2226232 - RNA, 17 nt, Human
gaucuccauauguuaca

SEQ ID NO: 2226233 - RNA, 20 nt, Human
gaucuccaaggaccagguua

SEQ ID NO: 2226234 - RNA, 16 nt, Human
gaucuccaaggaccag

SEQ ID NO: 2226235 - RNA, 19 nt, Human
gaucuccaaggaccagguu

SEQ ID NO: 2226236 - RNA, 13 nt, Human
gaucuccaaggac

SEQ ID NO: 2226237 - RNA, 13 nt, Human
gaugagaguuuug

SEQ ID NO: 2226238 - RNA, 18 nt, Human
gaugagaguuuuggaugc

SEQ ID NO: 2226239 - RNA, 21 nt, Human
gaugaugaaaugaggucagag

SEQ ID NO: 2226240 - RNA, 18 nt, Human
gaugcuggaugcuccuuc

SEQ ID NO: 2226241 - RNA, 17 nt, Human
gaugcuggaugucugcc

SEQ ID NO: 2226242 - RNA, 20 nt, Human
gaugcuggaugucugccaau

SEQ ID NO: 2226243 - RNA, 22 nt, Human
gaugcuggaugucugccaauuu

SEQ ID NO: 2226244 - RNA, 15 nt, Human
gaugcuggcccaggg

SEQ ID NO: 2226245 - RNA, 14 nt, Human
gaugcuggcccagg

SEQ ID NO: 2226246 - RNA, 13 nt, Human
gaugcuggcccag

SEQ ID NO: 2226247 - RNA, 12 nt, Human
gaugcuggccca

SEQ ID NO: 2226248 - RNA, 20 nt, Human
gaugaucuuugcagacaggc

SEQ ID NO: 2226249 - RNA, 21 nt, Human
gaugaucuuugcagacaggca

SEQ ID NO: 2226250 - RNA, 22 nt, Human
gaugagcauuuagggcaaggag

SEQ ID NO: 2226251 - RNA, 21 nt, Human
gaugagcauuuagggcaagga

SEQ ID NO: 2226252 - RNA, 18 nt, Human
gaugagcauuuagggcaa

SEQ ID NO: 2226253 - RNA, 12 nt, Human
gaugagcauuua

SEQ ID NO: 2226254 - RNA, 15 nt, Human
gaugagcccucagaa

SEQ ID NO: 2226255 - RNA, 21 nt, Human
gaugagaguuuuggaugcagu

SEQ ID NO: 2226256 - RNA, 16 nt, Human
gaugagcaucccagga

SEQ ID NO: 2226257 - RNA, 17 nt, Human
gaugagcaucccaggau

SEQ ID NO: 2226258 - RNA, 15 nt, Human
gaugagcauggagcu

SEQ ID NO: 2226259 - RNA, 16 nt, Human
gaugagcauggagcug

SEQ ID NO: 2226260 - RNA, 17 nt, Human
gaugagcauggagcugg

SEQ ID NO: 2226261 - RNA, 14 nt, Human
gaugaucuuugcag

SEQ ID NO: 2226262 - RNA, 22 nt, Human
gaugagcccucagaacccuugg

SEQ ID NO: 2226263 - RNA, 19 nt, Human
gaugagcccucagaacccu

SEQ ID NO: 2226264 - RNA, 13 nt, Human
gaugagccgcugu

SEQ ID NO: 2226265 - RNA, 23 nt, Human
gaugagccgcugugagccccugg

SEQ ID NO: 2226266 - RNA, 21 nt, Human
gauuauuuucuacacauacau

SEQ ID NO: 2226267 - RNA, 14 nt, Human
gauuauuucacuuu

SEQ ID NO: 2226268 - RNA, 22 nt, Human
gauuauuucacuuuagaugcug

SEQ ID NO: 2226269 - RNA, 21 nt, Human
gauuauuuguuauuuguacag

SEQ ID NO: 2226270 - RNA, 22 nt, Human
gauuauuuguuauuuguacagu

SEQ ID NO: 2226271 - RNA, 16 nt, Human
gauuauuuuuucagac

SEQ ID NO: 2226272 - RNA, 14 nt, Human
gauuauuuuuucag

SEQ ID NO: 2226273 - RNA, 23 nt, Human
gauuauuuguuauuuguacaguu

SEQ ID NO: 2226274 - RNA, 15 nt, Human
gauuauuuuuucaga

SEQ ID NO: 2226275 - RNA, 23 nt, Human
gauuauuaacuaauaugggcauu

SEQ ID NO: 2226276 - RNA, 14 nt, Human
gauuauuaucuaaa

SEQ ID NO: 2226277 - RNA, 17 nt, Human
gauuauuguauuuauuc

SEQ ID NO: 2226278 - RNA, 12 nt, Human
gauuauuuaaua

SEQ ID NO: 2226279 - RNA, 13 nt, Human
gauuauuuaauaa

SEQ ID NO: 2226280 - RNA, 14 nt, Human
gauuauuuaauaac

SEQ ID NO: 2226281 - RNA, 15 nt, Human
gauuauuuaauaaca

SEQ ID NO: 2226282 - RNA, 16 nt, Human
gauuauuuaauaacau

SEQ ID NO: 2226283 - RNA, 17 nt, Human
gauuauuuaauaacauu

SEQ ID NO: 2226284 - RNA, 18 nt, Human
gauuauuuaauaacauua

SEQ ID NO: 2226285 - RNA, 21 nt, Human
gauuauuuaauaacauuaccu

SEQ ID NO: 2226286 - RNA, 22 nt, Human
gauuauuuaauaacauuaccuu

SEQ ID NO: 2226287 - RNA, 23 nt, Human
gauuauuuaauaacauuaccuua

SEQ ID NO: 2226288 - RNA, 23 nt, Human
gauuauuucacuuuagaugcuga

SEQ ID NO: 2226289 - RNA, 15 nt, Human
gauuagaucuuuuaa

SEQ ID NO: 2226290 - RNA, 17 nt, Human
gauuagagggagguguu

SEQ ID NO: 2226291 - RNA, 20 nt, Human
gauuagagggagguguuuaa

SEQ ID NO: 2226292 - RNA, 18 nt, Human
gauuagaggcagaucugg

SEQ ID NO: 2226293 - RNA, 13 nt, Human
gauuagagggagg

SEQ ID NO: 2226294 - RNA, 14 nt, Human
gauuagagggaggu

SEQ ID NO: 2226295 - RNA, 19 nt, Human
gauuagcaaguuacaguga

SEQ ID NO: 2226296 - RNA, 12 nt, Human
gauuagcucugg

SEQ ID NO: 2226297 - RNA, 13 nt, Human
gauuagcucugga

SEQ ID NO: 2226298 - RNA, 17 nt, Human
gauuagggagagaagau

SEQ ID NO: 2226299 - RNA, 17 nt, Human
gauuaugguuuugugau

SEQ ID NO: 2226300 - RNA, 16 nt, Human
gauuaugguuuuguga

SEQ ID NO: 2226301 - RNA, 15 nt, Human
gauuaugguuuugug

SEQ ID NO: 2226302 - RNA, 20 nt, Human
gauuauuagccagguaaugu

SEQ ID NO: 2226303 - RNA, 19 nt, Human
gauuauguagcaaaauaca

SEQ ID NO: 2226304 - RNA, 15 nt, Human
gauuaguaaagaaau

SEQ ID NO: 2226305 - RNA, 16 nt, Human
gauuagcucuggacca

SEQ ID NO: 2226306 - RNA, 14 nt, Human
gauuagcucuggac

SEQ ID NO: 2226307 - RNA, 23 nt, Human
gauuagggcauuugagaaaugca

SEQ ID NO: 2226308 - RNA, 17 nt, Human
gauuauaacuugucuaa

SEQ ID NO: 2226309 - RNA, 13 nt, Human
gauuauacagaau

SEQ ID NO: 2226310 - RNA, 20 nt, Human
gauuacaggugugaaccacc

SEQ ID NO: 2226311 - RNA, 14 nt, Human
gauuacauaaucug

SEQ ID NO: 2226312 - RNA, 20 nt, Human
gauuacaggugugagccacc

SEQ ID NO: 2226313 - RNA, 23 nt, Human
gaugugaagccaauucagacagg

SEQ ID NO: 2226314 - RNA, 16 nt, Human
gaugcugggcuggcuc

SEQ ID NO: 2226315 - RNA, 21 nt, Human
gaugugaauugccugcagaga

SEQ ID NO: 2226316 - RNA, 22 nt, Human
gaugugaauugccugcagagag

SEQ ID NO: 2226317 - RNA, 23 nt, Human
gaugugaauugccugcagagaga

SEQ ID NO: 2226318 - RNA, 14 nt, Human
gaugugaagccaau

SEQ ID NO: 2226319 - RNA, 13 nt, Human
gaugugaagccaa

SEQ ID NO: 2226320 - RNA, 12 nt, Human
gaugugaagcca

SEQ ID NO: 2226321 - RNA, 17 nt, Human
gaugcugggcuggcucc

SEQ ID NO: 2226322 - RNA, 23 nt, Human
gaugcuggcccagggcccagagc

SEQ ID NO: 2226323 - RNA, 22 nt, Human
gaugcuggcccagggcccagag

SEQ ID NO: 2226324 - RNA, 11 nt, Human
gaugcugggau

SEQ ID NO: 2226325 - RNA, 12 nt, Human
gaugcugggcug

SEQ ID NO: 2226326 - RNA, 13 nt, Human
gaugcugggcugg

SEQ ID NO: 2226327 - RNA, 21 nt, Human
gaugcuggcccagggcccaga

SEQ ID NO: 2226328 - RNA, 19 nt, Human
gaugcuggcccagggccca

SEQ ID NO: 2226329 - RNA, 17 nt, Human
gaugcuggcccagggcc

SEQ ID NO: 2226330 - RNA, 16 nt, Human
gaugcuggcccagggc

SEQ ID NO: 2226331 - RNA, 16 nt, Human
gaugugaacacaucag

SEQ ID NO: 2226332 - RNA, 14 nt, Human
gaugugaacacauc

SEQ ID NO: 2226333 - RNA, 23 nt, Human
gauuacucuuugagauagaagaa

SEQ ID NO: 2226334 - RNA, 21 nt, Human
gauuagaaaugaccaauauua

SEQ ID NO: 2226335 - RNA, 17 nt, Human
gauuagaagcugaaaac

SEQ ID NO: 2226336 - RNA, 14 nt, Human
gauuagaaggcaag

SEQ ID NO: 2226337 - RNA, 17 nt, Human
gauuagaaugaaaauug

SEQ ID NO: 2226338 - RNA, 22 nt, Human
gauuagaaugaaaauuguaugu

SEQ ID NO: 2226339 - RNA, 12 nt, Human
gauuacucuuug

SEQ ID NO: 2226340 - RNA, 22 nt, Human
gauuaccuaguagucauuucau

SEQ ID NO: 2226341 - RNA, 17 nt, Human
gauuaccuccugagaaa

SEQ ID NO: 2226342 - RNA, 14 nt, Human
gauuaccuccugag

SEQ ID NO: 2226343 - RNA, 13 nt, Human
gauuaccuccuga

SEQ ID NO: 2226344 - RNA, 18 nt, Human
gauuacugccuauuuuaa

SEQ ID NO: 2226345 - RNA, 14 nt, Human
gauuacaugcaugu

SEQ ID NO: 2226346 - RNA, 15 nt, Human
gauuacauucaguug

SEQ ID NO: 2226347 - RNA, 15 nt, Human
gauuacauaaucugu

SEQ ID NO: 2226348 - RNA, 14 nt, Human
gauuacccaagcaa

SEQ ID NO: 2226349 - RNA, 21 nt, Human
gauuacccaagcaaaaucaug

SEQ ID NO: 2226350 - RNA, 14 nt, Human
gauuaccagggacu

SEQ ID NO: 2226351 - RNA, 12 nt, Human
gauucuccuuca

SEQ ID NO: 2226352 - RNA, 13 nt, Human
gauucuccuucag

SEQ ID NO: 2226353 - RNA, 17 nt, Human
gauucuccuucagcccu

SEQ ID NO: 2226354 - RNA, 11 nt, Human
gauucuccuuc

SEQ ID NO: 2226355 - RNA, 18 nt, Human
gauucuccuucagcccuc

SEQ ID NO: 2226356 - RNA, 16 nt, Human
gcaccuaauccaggca

SEQ ID NO: 2226357 - RNA, 15 nt, Human
gcaccuaauccaggc

SEQ ID NO: 2226358 - RNA, 15 nt, Human
gcaccguucugugca

SEQ ID NO: 2226359 - RNA, 19 nt, Human
gcaccuaaaccaccagugc

SEQ ID NO: 2226360 - RNA, 14 nt, Human
gcaccguucugugc

SEQ ID NO: 2226361 - RNA, 21 nt, Human
gcaccgucauggcuuaauguu

SEQ ID NO: 2226362 - RNA, 21 nt, Human
gcaccuaaaccaccagugccc

SEQ ID NO: 2226363 - RNA, 23 nt, Human
gcaccuaaaccaccagugcccaa

SEQ ID NO: 2226364 - RNA, 12 nt, Human
gcacugacauug

SEQ ID NO: 2226365 - RNA, 18 nt, Human
gcagaaagguucugcccg

SEQ ID NO: 2226366 - RNA, 22 nt, Human
gcacuuucuacaaugugaacuu

SEQ ID NO: 2226367 - RNA, 21 nt, Human
gcagaaagguucugcccggga

SEQ ID NO: 2226368 - RNA, 21 nt, Human
gcacuuucuacaaugugaacu

SEQ ID NO: 2226369 - RNA, 16 nt, Human
gcacuuuccuccuggc

SEQ ID NO: 2226370 - RNA, 17 nt, Human
gcacuuuccuccuggca

SEQ ID NO: 2226371 - RNA, 20 nt, Human
gcacuuuagggcuguaaaau

SEQ ID NO: 2226372 - RNA, 17 nt, Human
gcacugacugggcauag

SEQ ID NO: 2226373 - RNA, 12 nt, Human
gcacuuguauau

SEQ ID NO: 2226374 - RNA, 17 nt, Human
gcacuugugauuauuua

SEQ ID NO: 2226375 - RNA, 16 nt, Human
gcacuuguccagcuga

SEQ ID NO: 2226376 - RNA, 15 nt, Human
gcacuuguauauacg

SEQ ID NO: 2226377 - RNA, 23 nt, Human
gcacuugugauuauuuauuauuu

SEQ ID NO: 2226378 - RNA, 21 nt, Human
gcacuugugauuauuuauuau

SEQ ID NO: 2226379 - RNA, 20 nt, Human
gcacuugugauuauuuauua

SEQ ID NO: 2226380 - RNA, 16 nt, Human
gcacugacugggcaua

SEQ ID NO: 2226381 - RNA, 15 nt, Human
gcagaaaucuagaag

SEQ ID NO: 2226382 - RNA, 14 nt, Human
gcagaaaucuagaa

SEQ ID NO: 2226383 - RNA, 13 nt, Human
gcagaacacuaac

SEQ ID NO: 2226384 - RNA, 14 nt, Human
gcagaacacuaacc

SEQ ID NO: 2226385 - RNA, 15 nt, Human
gcagaacacuaaccu

SEQ ID NO: 2226386 - RNA, 21 nt, Human
gcagaacagccgcuccugucu

SEQ ID NO: 2226387 - RNA, 18 nt, Human
gcagaacagccgcuccug

SEQ ID NO: 2226388 - RNA, 17 nt, Human
gcagaacacuaaccuga

SEQ ID NO: 2226389 - RNA, 13 nt, Human
gcagagagaagcc

SEQ ID NO: 2226390 - RNA, 14 nt, Human
gcagagagaagccu

SEQ ID NO: 2226391 - RNA, 15 nt, Human
gcagagaggccaggu

SEQ ID NO: 2226392 - RNA, 21 nt, Human
gcagagagccauuuugugaau

SEQ ID NO: 2226393 - RNA, 19 nt, Human
gcagagagcggucucaggc

SEQ ID NO: 2226394 - RNA, 16 nt, Human
gcagagagaagccugu

SEQ ID NO: 2226395 - RNA, 15 nt, Human
gcagagagccauuuu

SEQ ID NO: 2226396 - RNA, 19 nt, Human
gcagagagccauuuuguga

SEQ ID NO: 2226397 - RNA, 22 nt, Human
gcagagauuggaaugggcagcu

SEQ ID NO: 2226398 - RNA, 23 nt, Human
gcagagauuggaaugggcagcuc

SEQ ID NO: 2226399 - RNA, 19 nt, Human
gcagagcaccuuagacagu

SEQ ID NO: 2226400 - RNA, 22 nt, Human
gcagagcaccuuagacaguccc

SEQ ID NO: 2226401 - RNA, 23 nt, Human
gcagagcaccuuagacagucccu

SEQ ID NO: 2226402 - RNA, 20 nt, Human
gcagagcaggggcaggguga

SEQ ID NO: 2226403 - RNA, 14 nt, Human
gcagagcaggggca

SEQ ID NO: 2226404 - RNA, 16 nt, Human
gcagagcaagucugca

SEQ ID NO: 2226405 - RNA, 17 nt, Human
gcagagcaagucugcag

SEQ ID NO: 2226406 - RNA, 18 nt, Human
gcagagcaagucugcagg

SEQ ID NO: 2226407 - RNA, 21 nt, Human
gcagagcagugggccuggcca

SEQ ID NO: 2226408 - RNA, 19 nt, Human
gcagagcagagaccauccc

SEQ ID NO: 2226409 - RNA, 20 nt, Human
gcagagcagagaccaucccu

SEQ ID NO: 2226410 - RNA, 24 nt, Human
gcagagcaccuuagacagucccug

SEQ ID NO: 2226411 - RNA, 12 nt, Human
gcagagcagaga

SEQ ID NO: 2226412 - RNA, 14 nt, Human
gcagagcagagacc

SEQ ID NO: 2226413 - RNA, 15 nt, Human
gcagagcagagacca

SEQ ID NO: 2226414 - RNA, 13 nt, Human
gauucugagagcu

SEQ ID NO: 2226415 - RNA, 12 nt, Human
gcaagucugcag

SEQ ID NO: 2226416 - RNA, 19 nt, Human
gcaagucucuuuauauggc

SEQ ID NO: 2226417 - RNA, 17 nt, Human
gcaagucuggaucuggg

SEQ ID NO: 2226418 - RNA, 21 nt, Human
gcaagucugcagcccggcgcc

SEQ ID NO: 2226419 - RNA, 13 nt, Human
gcaagucugcagg

SEQ ID NO: 2226420 - RNA, 20 nt, Human
gcaagucugcaggugcacca

SEQ ID NO: 2226421 - RNA, 13 nt, Human
gcaagugaagaaa

SEQ ID NO: 2226422 - RNA, 18 nt, Human
gcaagugaagguuuacaa

SEQ ID NO: 2226423 - RNA, 21 nt, Human
gcaagugaagguuuacaauuu

SEQ ID NO: 2226424 - RNA, 13 nt, Human
gcaagugagagcu

SEQ ID NO: 2226425 - RNA, 12 nt, Human
gcaauaaaugaa

SEQ ID NO: 2226426 - RNA, 21 nt, Human
gcaauaaaucugacccagugc

SEQ ID NO: 2226427 - RNA, 19 nt, Human
gcaauaaaucugacccagu

SEQ ID NO: 2226428 - RNA, 20 nt, Human
gcaauaaccucaaagugacu

SEQ ID NO: 2226429 - RNA, 20 nt, Human
gcaagugaauuuuucucuaa

SEQ ID NO: 2226430 - RNA, 17 nt, Human
gcaagugagagagaugg

SEQ ID NO: 2226431 - RNA, 22 nt, Human
gcaagugagagagaugggagcu

SEQ ID NO: 2226432 - RNA, 18 nt, Human
gcaauaaaucugacccag

SEQ ID NO: 2226433 - RNA, 16 nt, Human
gcaauaaaucugaccc

SEQ ID NO: 2226434 - RNA, 21 nt, Human
gcaauaaagcagcguuucuau

SEQ ID NO: 2226435 - RNA, 14 nt, Human
gcacaagcugcacc

SEQ ID NO: 2226436 - RNA, 23 nt, Human
gcacaagcuccaagcucccaggc

SEQ ID NO: 2226437 - RNA, 22 nt, Human
gcacaagcuccaagcucccagg

SEQ ID NO: 2226438 - RNA, 14 nt, Human
gcaccguacugugg

SEQ ID NO: 2226439 - RNA, 13 nt, Human
gcaccgccuucuc

SEQ ID NO: 2226440 - RNA, 17 nt, Human
gcaccgucauggcuuaa

SEQ ID NO: 2226441 - RNA, 18 nt, Human
gcaccggcuggccuggcc

SEQ ID NO: 2226442 - RNA, 21 nt, Human
gcaccggcuggccuggccccu

SEQ ID NO: 2226443 - RNA, 23 nt, Human
gcaccggcuggccuggccccuca

SEQ ID NO: 2226444 - RNA, 14 nt, Human
gcaccgccuucucu

SEQ ID NO: 2226445 - RNA, 19 nt, Human
gcaccggcuggccuggccc

SEQ ID NO: 2226446 - RNA, 16 nt, Human
gcacccuucuuuccuc

SEQ ID NO: 2226447 - RNA, 17 nt, Human
gcacccuucuuuccucu

SEQ ID NO: 2226448 - RNA, 17 nt, Human
gcacccuggggccugga

SEQ ID NO: 2226449 - RNA, 20 nt, Human
gcacccuggggccuggaccu

SEQ ID NO: 2226450 - RNA, 21 nt, Human
gcacccuggggccuggaccug

SEQ ID NO: 2226451 - RNA, 18 nt, Human
gcacccuucuuuccucuu

SEQ ID NO: 2226452 - RNA, 19 nt, Human
gcacccuucuuuccucuuc

SEQ ID NO: 2226453 - RNA, 21 nt, Human
gcacccuucuuuccucuuccc

SEQ ID NO: 2226454 - RNA, 16 nt, Human
gcacccuccgccuuca

SEQ ID NO: 2226455 - RNA, 19 nt, Human
gcacccucgaugaagccca

SEQ ID NO: 2226456 - RNA, 15 nt, Human
gcacccucuauccca

SEQ ID NO: 2226457 - RNA, 14 nt, Human
gcacccuggggccu

SEQ ID NO: 2226458 - RNA, 15 nt, Human
gcacccuggggccug

SEQ ID NO: 2226459 - RNA, 22 nt, Human
gcacaugcagauggggcucccg

SEQ ID NO: 2226460 - RNA, 22 nt, Human
gcacaugccucucucaggccaa

SEQ ID NO: 2226461 - RNA, 20 nt, Human
gcacaugccucucucaggcc

SEQ ID NO: 2226462 - RNA, 21 nt, Human
gcacaugccucucucaggcca

SEQ ID NO: 2226463 - RNA, 14 nt, Human
gcacaugccucucu

SEQ ID NO: 2226464 - RNA, 17 nt, Human
gcacaugccucucucag

SEQ ID NO: 2226465 - RNA, 18 nt, Human
gcacaugccucucucagg

SEQ ID NO: 2226466 - RNA, 19 nt, Human
gcacaugccucucucaggc

SEQ ID NO: 2226467 - RNA, 21 nt, Human
gcacaucugcauuuucacccc

SEQ ID NO: 2226468 - RNA, 13 nt, Human
gcacaucugcauu

SEQ ID NO: 2226469 - RNA, 14 nt, Human
gcacauauugagca

SEQ ID NO: 2226470 - RNA, 15 nt, Human
gcacaguuugaacaa

SEQ ID NO: 2226471 - RNA, 15 nt, Human
gcacaucagaaagga

SEQ ID NO: 2226472 - RNA, 21 nt, Human
gcacaucagcacgauuucugu

SEQ ID NO: 2226473 - RNA, 20 nt, Human
gcacaucagcacgauuucug

SEQ ID NO: 2226474 - RNA, 19 nt, Human
gcacaucagcacgauuucu

SEQ ID NO: 2226475 - RNA, 19 nt, Human
gcacaugacaacuuugcca

SEQ ID NO: 2226476 - RNA, 18 nt, Human
gcacaucugugucuuguu

SEQ ID NO: 2226477 - RNA, 16 nt, Human
gcacaucucugcuuga

SEQ ID NO: 2226478 - RNA, 17 nt, Human
gcacaucugugucuugu

SEQ ID NO: 2226479 - RNA, 13 nt, Human
gcacaugacucgg

SEQ ID NO: 2226480 - RNA, 13 nt, Human
gcacaugccucuc

SEQ ID NO: 2226481 - RNA, 19 nt, Human
gcacacacacacacaggag

SEQ ID NO: 2226482 - RNA, 20 nt, Human
gcacacacacacacaggagg

SEQ ID NO: 2226483 - RNA, 17 nt, Human
gcacacacacacacagg

SEQ ID NO: 2226484 - RNA, 16 nt, Human
gcacacacacacacag

SEQ ID NO: 2226485 - RNA, 14 nt, Human
gcacacacacacac

SEQ ID NO: 2226486 - RNA, 12 nt, Human
gcacacacacac

SEQ ID NO: 2226487 - RNA, 12 nt, Human
gcacacacacaa

SEQ ID NO: 2226488 - RNA, 10 nt, Human
gcacacacac

SEQ ID NO: 2226489 - RNA, 16 nt, Human
gcacaauucuguuuua

SEQ ID NO: 2226490 - RNA, 14 nt, Human
gcacaauucuguuu

SEQ ID NO: 2226491 - RNA, 22 nt, Human
gcacaaucucggcucacugcau

SEQ ID NO: 2226492 - RNA, 21 nt, Human
gcaauaagaauuuagggagaa

SEQ ID NO: 2226493 - RNA, 21 nt, Human
gcacaaucucggcucacugca

SEQ ID NO: 2226494 - RNA, 13 nt, Human
gcacauauggacu

SEQ ID NO: 2226495 - RNA, 18 nt, Human
gcacauauggacucugca

SEQ ID NO: 2226496 - RNA, 12 nt, Human
gcacaguuugaa

SEQ ID NO: 2226497 - RNA, 13 nt, Human
gcacaguuugaac

SEQ ID NO: 2226498 - RNA, 14 nt, Human
gcacaguuugaaca

SEQ ID NO: 2226499 - RNA, 18 nt, Human
gcacaguuuucugagaaa

SEQ ID NO: 2226500 - RNA, 17 nt, Human
gcacaguuuucugagaa

SEQ ID NO: 2226501 - RNA, 14 nt, Human
gcacaguuuucuga

SEQ ID NO: 2226502 - RNA, 12 nt, Human
gcagccaggcca

SEQ ID NO: 2226503 - RNA, 23 nt, Human
gcagccagaccuauuccuccugg

SEQ ID NO: 2226504 - RNA, 14 nt, Human
gcagccacuauugu

SEQ ID NO: 2226505 - RNA, 16 nt, Human
gcagagcccaagggaa

SEQ ID NO: 2226506 - RNA, 20 nt, Human
gcagagcgccgugaguucuc

SEQ ID NO: 2226507 - RNA, 22 nt, Human
gcagagcgccgugaguucucag

SEQ ID NO: 2226508 - RNA, 23 nt, Human
gcagagcgccgugaguucucagg

SEQ ID NO: 2226509 - RNA, 16 nt, Human
gcagccacauuccuga

SEQ ID NO: 2226510 - RNA, 14 nt, Human
gcagagcucugccg

SEQ ID NO: 2226511 - RNA, 13 nt, Human
gcagccaccagcg

SEQ ID NO: 2226512 - RNA, 22 nt, Human
gcagcccaugcccaccugccca

SEQ ID NO: 2226513 - RNA, 18 nt, Human
gcagcccaugcccaccug

SEQ ID NO: 2226514 - RNA, 17 nt, Human
gcagcccaugcccaccu

SEQ ID NO: 2226515 - RNA, 15 nt, Human
gcagcccaugcccac

SEQ ID NO: 2226516 - RNA, 13 nt, Human
gcagcccaugccc

SEQ ID NO: 2226517 - RNA, 17 nt, Human
gcagcccaggccggggu

SEQ ID NO: 2226518 - RNA, 20 nt, Human
gcagcccaugcccaccugcc

SEQ ID NO: 2226519 - RNA, 16 nt, Human
gcagccaggccacaag

SEQ ID NO: 2226520 - RNA, 13 nt, Human
gcagccaggccac

SEQ ID NO: 2226521 - RNA, 14 nt, Human
gcagccaggccaca

SEQ ID NO: 2226522 - RNA, 18 nt, Human
gcauaauaagcuaaagag

SEQ ID NO: 2226523 - RNA, 13 nt, Human
gcauaccuuuauu

SEQ ID NO: 2226524 - RNA, 14 nt, Human
gcauacguacacau

SEQ ID NO: 2226525 - RNA, 16 nt, Human
gcauaccuuuauugug

SEQ ID NO: 2226526 - RNA, 20 nt, Human
gcauaccuuuauugugaucu

SEQ ID NO: 2226527 - RNA, 14 nt, Human
gcauaauaagcuaa

SEQ ID NO: 2226528 - RNA, 14 nt, Human
gcaguuuuucugua

SEQ ID NO: 2226529 - RNA, 20 nt, Human
gcauaccacuuuuguucuug

SEQ ID NO: 2226530 - RNA, 17 nt, Human
gcauaccacuuuuguuc

SEQ ID NO: 2226531 - RNA, 14 nt, Human
gcaguuugggaggu

SEQ ID NO: 2226532 - RNA, 17 nt, Human
gcaguuuucaagucaaa

SEQ ID NO: 2226533 - RNA, 22 nt, Human
gcaguuuuucagaguggaaugc

SEQ ID NO: 2226534 - RNA, 22 nt, Human
gcauaacguauaaaagccuguu

SEQ ID NO: 2226535 - RNA, 21 nt, Human
gcaguuugccuggugcagugg

SEQ ID NO: 2226536 - RNA, 20 nt, Human
gcaguuucuguccugcuggu

SEQ ID NO: 2226537 - RNA, 16 nt, Human
gcaguuucuguccugc

SEQ ID NO: 2226538 - RNA, 16 nt, Human
gcaguuuaucauucaa

SEQ ID NO: 2226539 - RNA, 20 nt, Human
gcaguuuaucauucaagugu

SEQ ID NO: 2226540 - RNA, 13 nt, Human
gcagucgugccug

SEQ ID NO: 2226541 - RNA, 20 nt, Human
gcagucgucgcacagucucu

SEQ ID NO: 2226542 - RNA, 22 nt, Human
gcagucgucgcacagucucucu

SEQ ID NO: 2226543 - RNA, 15 nt, Human
gcagucgugccugug

SEQ ID NO: 2226544 - RNA, 15 nt, Human
gcaguuuaucauuca

SEQ ID NO: 2226545 - RNA, 16 nt, Human
gcagucgggggcuggc

SEQ ID NO: 2226546 - RNA, 17 nt, Human
gcagucgggggcuggcc

SEQ ID NO: 2226547 - RNA, 18 nt, Human
gcagucgggggcuggccu

SEQ ID NO: 2226548 - RNA, 20 nt, Human
gcagucgggggcuggccuag

SEQ ID NO: 2226549 - RNA, 21 nt, Human
gcagucgggggcuggccuagg

SEQ ID NO: 2226550 - RNA, 23 nt, Human
gcagucgggggcuggccuaggag

SEQ ID NO: 2226551 - RNA, 15 nt, Human
gcagucgucgcacag

SEQ ID NO: 2226552 - RNA, 18 nt, Human
gcagucgucgcacagucu

SEQ ID NO: 2226553 - RNA, 18 nt, Human
gcaguccugccucagccu

SEQ ID NO: 2226554 - RNA, 17 nt, Human
gcaguccugccucagcc

SEQ ID NO: 2226555 - RNA, 19 nt, Human
gcaguccugaucagagccg

SEQ ID NO: 2226556 - RNA, 20 nt, Human
gcaguccuggaagccagcuu

SEQ ID NO: 2226557 - RNA, 18 nt, Human
gcaguccuggaagccagc

SEQ ID NO: 2226558 - RNA, 23 nt, Human
gcagucaucuugaccaagcagga

SEQ ID NO: 2226559 - RNA, 19 nt, Human
gcagucauuauccagguaa

SEQ ID NO: 2226560 - RNA, 22 nt, Human
gcagucaucuugaccaagcagg

SEQ ID NO: 2226561 - RNA, 15 nt, Human
gcaggcugacaucug

SEQ ID NO: 2226562 - RNA, 21 nt, Human
gcagggaaaauuauuugcaua

SEQ ID NO: 2226563 - RNA, 22 nt, Human
gcagggagccgagaucacgcca

SEQ ID NO: 2226564 - RNA, 22 nt, Human
gcaggcuuuguuuauagcuugc

SEQ ID NO: 2226565 - RNA, 22 nt, Human
gcagggagaggagugacugagc

SEQ ID NO: 2226566 - RNA, 23 nt, Human
gcagggaggaagaagcuuaggca

SEQ ID NO: 2226567 - RNA, 16 nt, Human
gcagggaggaagaagc

SEQ ID NO: 2226568 - RNA, 19 nt, Human
gcagggagcggccggccag

SEQ ID NO: 2226569 - RNA, 21 nt, Human
gcagggagcauggcugugagg

SEQ ID NO: 2226570 - RNA, 13 nt, Human
gcagggaaacagc

SEQ ID NO: 2226571 - RNA, 19 nt, Human
gcagggacuugaacccaua

SEQ ID NO: 2226572 - RNA, 22 nt, Human
gcagguugaggggcuccuggaa

SEQ ID NO: 2226573 - RNA, 21 nt, Human
gcagguugaggggcuccugga

SEQ ID NO: 2226574 - RNA, 20 nt, Human
gcagguugaggggcuccugg

SEQ ID NO: 2226575 - RNA, 19 nt, Human
gcagguugaggggcuccug

SEQ ID NO: 2226576 - RNA, 23 nt, Human
gcagguugggccauacuggccuc

SEQ ID NO: 2226577 - RNA, 16 nt, Human
gcagguugaggggcuc

SEQ ID NO: 2226578 - RNA, 13 nt, Human
gcagggagggccu

SEQ ID NO: 2226579 - RNA, 10 nt, Human
gcagggaggg

SEQ ID NO: 2226580 - RNA, 20 nt, Human
gcaguagagucaucuccauc

SEQ ID NO: 2226581 - RNA, 18 nt, Human
gcaguagagucaucucca

SEQ ID NO: 2226582 - RNA, 21 nt, Human
gcaguagaggcuauggacagg

SEQ ID NO: 2226583 - RNA, 15 nt, Human
gcaguagauuuucuu

SEQ ID NO: 2226584 - RNA, 18 nt, Human
gcaguagauuuucuuuaa

SEQ ID NO: 2226585 - RNA, 20 nt, Human
gcaguagauuuucuuuaaaa

SEQ ID NO: 2226586 - RNA, 15 nt, Human
gcaguaucaugaagc

SEQ ID NO: 2226587 - RNA, 12 nt, Human
gcaguaucauga

SEQ ID NO: 2226588 - RNA, 12 nt, Human
gcaguagucucu

SEQ ID NO: 2226589 - RNA, 17 nt, Human
gcaguagucucugugcu

SEQ ID NO: 2226590 - RNA, 21 nt, Human
gcaguaucaugcccugugcaa

SEQ ID NO: 2226591 - RNA, 13 nt, Human
gcaguauugagca

SEQ ID NO: 2226592 - RNA, 15 nt, Human
gcaguaugaaaauaa

SEQ ID NO: 2226593 - RNA, 13 nt, Human
gcagucacugaau

SEQ ID NO: 2226594 - RNA, 17 nt, Human
gcagucacaucucuucc

SEQ ID NO: 2226595 - RNA, 24 nt, Human
gcagucacguggaggagcagugca

SEQ ID NO: 2226596 - RNA, 14 nt, Human
gcagucacuggagg

SEQ ID NO: 2226597 - RNA, 23 nt, Human
gcagucacuggagguugaagcca

SEQ ID NO: 2226598 - RNA, 19 nt, Human
gcaguagaaauaauaugca

SEQ ID NO: 2226599 - RNA, 20 nt, Human
gcaguagaaauaauaugcau

SEQ ID NO: 2226600 - RNA, 21 nt, Human
gcaguagaaauaauaugcauu

SEQ ID NO: 2226601 - RNA, 22 nt, Human
gcaguagaaggucggaggcuug

SEQ ID NO: 2226602 - RNA, 23 nt, Human
gcagguugggaaugaggcuugcu

SEQ ID NO: 2226603 - RNA, 22 nt, Human
gcagguugggccauacuggccu

SEQ ID NO: 2226604 - RNA, 13 nt, Human
gcaguaauaaaaa

SEQ ID NO: 2226605 - RNA, 15 nt, Human
gcaguaagucuuuuu

SEQ ID NO: 2226606 - RNA, 18 nt, Human
gcaguaagucuuuuuuga

SEQ ID NO: 2226607 - RNA, 16 nt, Human
gcaguaccuauaaagu

SEQ ID NO: 2226608 - RNA, 23 nt, Human
gcaguaccuauaaaguaaagcua

SEQ ID NO: 2226609 - RNA, 15 nt, Human
gcaggcuggcuggcc

SEQ ID NO: 2226610 - RNA, 11 nt, Human
gcaggcugaca

SEQ ID NO: 2226611 - RNA, 21 nt, Human
gcaggcuggcccugcccuggu

SEQ ID NO: 2226612 - RNA, 20 nt, Human
gcaggcuggcccugcccugg

SEQ ID NO: 2226613 - RNA, 19 nt, Human
gcaggcuggcccugcccug

SEQ ID NO: 2226614 - RNA, 17 nt, Human
gcaggcugucuggccag

SEQ ID NO: 2226615 - RNA, 18 nt, Human
gcaggcuggcccugcccu

SEQ ID NO: 2226616 - RNA, 17 nt, Human
gcaggcuggcccugccc

SEQ ID NO: 2226617 - RNA, 16 nt, Human
gcaggcuggcccugcc

SEQ ID NO: 2226618 - RNA, 15 nt, Human
gcaggcuggcccugc

SEQ ID NO: 2226619 - RNA, 14 nt, Human
gcaggcuggcccug

SEQ ID NO: 2226620 - RNA, 18 nt, Human
gcaggcucucaggccagc

SEQ ID NO: 2226621 - RNA, 23 nt, Human
gcaggcucucaggccagcugcuu

SEQ ID NO: 2226622 - RNA, 17 nt, Human
gcagcugcgguccaccc

SEQ ID NO: 2226623 - RNA, 19 nt, Human
gcagcugcgguccacccag

SEQ ID NO: 2226624 - RNA, 20 nt, Human
gcaggcucucaggccagcug

SEQ ID NO: 2226625 - RNA, 22 nt, Human
gcaggcucucaggccagcugcu

SEQ ID NO: 2226626 - RNA, 18 nt, Human
cuugaagccacugaagcu

SEQ ID NO: 2226627 - RNA, 17 nt, Human
cuugaagccacugaagc

SEQ ID NO: 2226628 - RNA, 16 nt, Human
cuugaagccacugaag

SEQ ID NO: 2226629 - RNA, 13 nt, Human
cuugaagccacug

SEQ ID NO: 2226630 - RNA, 20 nt, Human
cuugaagaucguuaguaucu

SEQ ID NO: 2226631 - RNA, 12 nt, Human
cuugaagcagua

SEQ ID NO: 2226632 - RNA, 12 nt, Human
cuugaagccaaa

SEQ ID NO: 2226633 - RNA, 13 nt, Human
cuugaagccaaag

SEQ ID NO: 2226634 - RNA, 14 nt, Human
cuugaagccaaaga

SEQ ID NO: 2226635 - RNA, 15 nt, Human
cuugaagccaaagaa

SEQ ID NO: 2226636 - RNA, 16 nt, Human
cuugaagccaaagaaa

SEQ ID NO: 2226637 - RNA, 19 nt, Human
cuugaagccaaagaaaaau

SEQ ID NO: 2226638 - RNA, 13 nt, Human
cuugaagaucguu

SEQ ID NO: 2226639 - RNA, 20 nt, Human
cuugaauuucuaaaaaacag

SEQ ID NO: 2226640 - RNA, 17 nt, Human
cuugaauuuucccacug

SEQ ID NO: 2226641 - RNA, 18 nt, Human
cuugaauuuucccacugc

SEQ ID NO: 2226642 - RNA, 19 nt, Human
cuugaauuuucccacugca

SEQ ID NO: 2226643 - RNA, 20 nt, Human
cuugaauuuucccacugcac

SEQ ID NO: 2226644 - RNA, 21 nt, Human
cuugaauuuucccacugcacc

SEQ ID NO: 2226645 - RNA, 19 nt, Human
cuugaauuguaaggaauga

SEQ ID NO: 2226646 - RNA, 21 nt, Human
cuugaagccacugaagcuggg

SEQ ID NO: 2226647 - RNA, 19 nt, Human
cuugaagccacugaagcug

SEQ ID NO: 2226648 - RNA, 13 nt, Human
cuugaagccaagu

SEQ ID NO: 2226649 - RNA, 18 nt, Human
cuugaauuguaaggaaug

SEQ ID NO: 2226650 - RNA, 14 nt, Human
cuugacagggcaca

SEQ ID NO: 2226651 - RNA, 15 nt, Human
cuugacagggcacac

SEQ ID NO: 2226652 - RNA, 13 nt, Human
cuugacagggcac

SEQ ID NO: 2226653 - RNA, 19 nt, Human
cuugacaaagucaagccac

SEQ ID NO: 2226654 - RNA, 16 nt, Human
cuugacaaagucaagc

SEQ ID NO: 2226655 - RNA, 16 nt, Human
cuugaguuugucgcuc

SEQ ID NO: 2226656 - RNA, 22 nt, Human
cuugacaaagucaagccacaug

SEQ ID NO: 2226657 - RNA, 22 nt, Human
cuugaauuuucccacugcaccc

SEQ ID NO: 2226658 - RNA, 16 nt, Human
cuugauaaagggccaa

SEQ ID NO: 2226659 - RNA, 16 nt, Human
cuugaguuuuauuuau

SEQ ID NO: 2226660 - RNA, 21 nt, Human
cuugaguuugucgcucaugug

SEQ ID NO: 2226661 - RNA, 16 nt, Human
cuugauaccccccucu

SEQ ID NO: 2226662 - RNA, 17 nt, Human
cuugauaccccccucug

SEQ ID NO: 2226663 - RNA, 18 nt, Human
cuugauaccccccucugu

SEQ ID NO: 2226664 - RNA, 19 nt, Human
cuugauaccccccucuguc

SEQ ID NO: 2226665 - RNA, 20 nt, Human
cuugauaccccccucugucu

SEQ ID NO: 2226666 - RNA, 21 nt, Human
cuugauaccccccucugucuu

SEQ ID NO: 2226667 - RNA, 22 nt, Human
cuugaucuguauauacaauaac

SEQ ID NO: 2226668 - RNA, 20 nt, Human
cuugaucuguauauacaaua

SEQ ID NO: 2226669 - RNA, 15 nt, Human
cuugaucuguauaua

SEQ ID NO: 2226670 - RNA, 22 nt, Human
cuugaucugcucagcccuggag

SEQ ID NO: 2226671 - RNA, 23 nt, Human
cuugaucugcucagcccuggagg

SEQ ID NO: 2226672 - RNA, 12 nt, Human
cuugaugaagaa

SEQ ID NO: 2226673 - RNA, 22 nt, Human
cuugauacuaaaaguucuucuc

SEQ ID NO: 2226674 - RNA, 23 nt, Human
cuugauacuaaaaguucuucucc

SEQ ID NO: 2226675 - RNA, 16 nt, Human
cuugaucugcucagcc

SEQ ID NO: 2226676 - RNA, 17 nt, Human
cuugaucugcucagccc

SEQ ID NO: 2226677 - RNA, 18 nt, Human
cuugaucugcucagcccu

SEQ ID NO: 2226678 - RNA, 19 nt, Human
cuugaucugcucagcccug

SEQ ID NO: 2226679 - RNA, 20 nt, Human
cuugaucugcucagcccugg

SEQ ID NO: 2226680 - RNA, 21 nt, Human
cuugaucugcucagcccugga

SEQ ID NO: 2226681 - RNA, 20 nt, Human
cuuggcgcugccccuggcag

SEQ ID NO: 2226682 - RNA, 19 nt, Human
cuuggcaucacagggcaga

SEQ ID NO: 2226683 - RNA, 18 nt, Human
cuuggcaucacagggcag

SEQ ID NO: 2226684 - RNA, 15 nt, Human
cuuggcagcugaacu

SEQ ID NO: 2226685 - RNA, 12 nt, Human
cuuggcgcugcc

SEQ ID NO: 2226686 - RNA, 14 nt, Human
cuuggcgcugcccc

SEQ ID NO: 2226687 - RNA, 17 nt, Human
cuuggcgcugccccugg

SEQ ID NO: 2226688 - RNA, 19 nt, Human
cuugaugccaguaggcuca

SEQ ID NO: 2226689 - RNA, 21 nt, Human
cuugaugcaugcacuguuccc

SEQ ID NO: 2226690 - RNA, 12 nt, Human
cuugaugccugg

SEQ ID NO: 2226691 - RNA, 21 nt, Human
cuugaugaccaaaguccuuuu

SEQ ID NO: 2226692 - RNA, 18 nt, Human
cuugaugaccaaaguccu

SEQ ID NO: 2226693 - RNA, 13 nt, Human
cuugaugaagaag

SEQ ID NO: 2226694 - RNA, 13 nt, Human
cuugccugcaggc

SEQ ID NO: 2226695 - RNA, 13 nt, Human
cuugaugccuggc

SEQ ID NO: 2226696 - RNA, 12 nt, Human
cuugccugcagg

SEQ ID NO: 2226697 - RNA, 22 nt, Human
cuugaugccaguaggcucaacu

SEQ ID NO: 2226698 - RNA, 20 nt, Human
cuugccuuauuagagugucu

SEQ ID NO: 2226699 - RNA, 18 nt, Human
cuugccuuauuagagugu

SEQ ID NO: 2226700 - RNA, 18 nt, Human
cuuggcagcaccugucuc

SEQ ID NO: 2226701 - RNA, 21 nt, Human
cuuggcaccagacacccagga

SEQ ID NO: 2226702 - RNA, 20 nt, Human
cuuggcaccagacacccagg

SEQ ID NO: 2226703 - RNA, 19 nt, Human
cuuggcagcccaggccggg

SEQ ID NO: 2226704 - RNA, 18 nt, Human
cuuggcagccgagcucgu

SEQ ID NO: 2226705 - RNA, 20 nt, Human
cuuggcagcaccugucuccu

SEQ ID NO: 2226706 - RNA, 19 nt, Human
cuuggcagcaccugucucc

SEQ ID NO: 2226707 - RNA, 19 nt, Human
cuugcgcuuuugcugguca

SEQ ID NO: 2226708 - RNA, 20 nt, Human
cuugcggaaucacucugucc

SEQ ID NO: 2226709 - RNA, 14 nt, Human
cuugcgcauucuca

SEQ ID NO: 2226710 - RNA, 22 nt, Human
cuugcgguauccgcccccaaua

SEQ ID NO: 2226711 - RNA, 19 nt, Human
cuuggcaccagacacccag

SEQ ID NO: 2226712 - RNA, 16 nt, Human
cuuggcaccagacacc

SEQ ID NO: 2226713 - RNA, 23 nt, Human
cuuggcacauuuaagagacaguc

SEQ ID NO: 2226714 - RNA, 20 nt, Human
cuugccuucuucacccagcu

SEQ ID NO: 2226715 - RNA, 12 nt, Human
cuugccuuucuc

SEQ ID NO: 2226716 - RNA, 19 nt, Human
cuugccuucuucacccagc

SEQ ID NO: 2226717 - RNA, 21 nt, Human
cuugccuuauuagagugucuu

SEQ ID NO: 2226718 - RNA, 20 nt, Human
cuucugccacuucccaggua

SEQ ID NO: 2226719 - RNA, 21 nt, Human
cuucuguugcugccucaugcu

SEQ ID NO: 2226720 - RNA, 23 nt, Human
cuucuucagagacuccugcaggc

SEQ ID NO: 2226721 - RNA, 14 nt, Human
cuucuucagagcug

SEQ ID NO: 2226722 - RNA, 18 nt, Human
cuucuucagaucagugcu

SEQ ID NO: 2226723 - RNA, 16 nt, Human
cuucuucagagcugac

SEQ ID NO: 2226724 - RNA, 21 nt, Human
cuucuucagccaccucucuuu

SEQ ID NO: 2226725 - RNA, 17 nt, Human
cuucuucagccaccucu

SEQ ID NO: 2226726 - RNA, 11 nt, Human
cuucugccacu

SEQ ID NO: 2226727 - RNA, 12 nt, Human
cuucugccacuu

SEQ ID NO: 2226728 - RNA, 14 nt, Human
cuucugccacuucc

SEQ ID NO: 2226729 - RNA, 16 nt, Human
cuucugccacuuccca

SEQ ID NO: 2226730 - RNA, 17 nt, Human
cuucugccacuucccag

SEQ ID NO: 2226731 - RNA, 18 nt, Human
cuucugccacuucccagg

SEQ ID NO: 2226732 - RNA, 15 nt, Human
cuucugcacccucca

SEQ ID NO: 2226733 - RNA, 16 nt, Human
cuucugcacccuccac

SEQ ID NO: 2226734 - RNA, 17 nt, Human
cuucugcacccuccacc

SEQ ID NO: 2226735 - RNA, 18 nt, Human
cuucugcacccuccaccc

SEQ ID NO: 2226736 - RNA, 19 nt, Human
cuucugcacccuccacccu

SEQ ID NO: 2226737 - RNA, 20 nt, Human
cuucugcacccuccacccug

SEQ ID NO: 2226738 - RNA, 21 nt, Human
cuucugcacccuccacccugu

SEQ ID NO: 2226739 - RNA, 22 nt, Human
cuucugcacccuccacccuguc

SEQ ID NO: 2226740 - RNA, 20 nt, Human
cuucuguugcugccucaugc

SEQ ID NO: 2226741 - RNA, 19 nt, Human
cuucuguugcugccucaug

SEQ ID NO: 2226742 - RNA, 18 nt, Human
cuucuguugcugccucau

SEQ ID NO: 2226743 - RNA, 17 nt, Human
cuucuguugcugccuca

SEQ ID NO: 2226744 - RNA, 19 nt, Human
cuucugcaauugcuuagga

SEQ ID NO: 2226745 - RNA, 12 nt, Human
cuucugcacccu

SEQ ID NO: 2226746 - RNA, 13 nt, Human
cuucugcacccuc

SEQ ID NO: 2226747 - RNA, 14 nt, Human
cuucugcacccucc

SEQ ID NO: 2226748 - RNA, 20 nt, Human
cuucugaggacauuccaaga

SEQ ID NO: 2226749 - RNA, 15 nt, Human
cuucugaggacauuc

SEQ ID NO: 2226750 - RNA, 23 nt, Human
cuucugacccaugcugcccugug

SEQ ID NO: 2226751 - RNA, 20 nt, Human
cuucugacccaugcugcccu

SEQ ID NO: 2226752 - RNA, 18 nt, Human
cuucucaagugccuuaau

SEQ ID NO: 2226753 - RNA, 14 nt, Human
cuucucaagugccu

SEQ ID NO: 2226754 - RNA, 15 nt, Human
cuucucaagugccuu

SEQ ID NO: 2226755 - RNA, 16 nt, Human
cuucucaagugccuua

SEQ ID NO: 2226756 - RNA, 17 nt, Human
cuucucaagugccuuaa

SEQ ID NO: 2226757 - RNA, 21 nt, Human
cuucugacccaugcugcccug

SEQ ID NO: 2226758 - RNA, 22 nt, Human
cuucugacccaugcugcccugu

SEQ ID NO: 2226759 - RNA, 17 nt, Human
cuucuucggggaacucc

SEQ ID NO: 2226760 - RNA, 14 nt, Human
cuucuucccucccu

SEQ ID NO: 2226761 - RNA, 15 nt, Human
cuucuuccugaagcu

SEQ ID NO: 2226762 - RNA, 20 nt, Human
cuucuucggggaacuccugg

SEQ ID NO: 2226763 - RNA, 18 nt, Human
cuucuuccaucccaggac

SEQ ID NO: 2226764 - RNA, 20 nt, Human
cuucuuccaucccaggacac

SEQ ID NO: 2226765 - RNA, 19 nt, Human
cuucuuccaggugcccagc

SEQ ID NO: 2226766 - RNA, 14 nt, Human
cuucuuccauccca

SEQ ID NO: 2226767 - RNA, 15 nt, Human
cuucuuccaucccag

SEQ ID NO: 2226768 - RNA, 13 nt, Human
cuucuaggaagcu

SEQ ID NO: 2226769 - RNA, 19 nt, Human
cuucuaggguuauugcauu

SEQ ID NO: 2226770 - RNA, 16 nt, Human
cuucuaggacgccacc

SEQ ID NO: 2226771 - RNA, 19 nt, Human
cuucuaggacgccacccag

SEQ ID NO: 2226772 - RNA, 17 nt, Human
cuucuagaaccaggcaa

SEQ ID NO: 2226773 - RNA, 13 nt, Human
cuucuauuuuauu

SEQ ID NO: 2226774 - RNA, 14 nt, Human
cuucuauuuuguaa

SEQ ID NO: 2226775 - RNA, 16 nt, Human
cuucuauuuuguaaac

SEQ ID NO: 2226776 - RNA, 15 nt, Human
cuucuauuuuguaaa

SEQ ID NO: 2226777 - RNA, 15 nt, Human
cuucucaagauacug

SEQ ID NO: 2226778 - RNA, 12 nt, Human
cuucucaagugc

SEQ ID NO: 2226779 - RNA, 22 nt, Human
cuucucaaaccuguuuaaauau

SEQ ID NO: 2226780 - RNA, 16 nt, Human
cuucucaaaccuugau

SEQ ID NO: 2226781 - RNA, 17 nt, Human
cuucuauuuuguaaacu

SEQ ID NO: 2226782 - RNA, 19 nt, Human
cuucucaaaccuguuuaaa

SEQ ID NO: 2226783 - RNA, 21 nt, Human
cuucuacuucugcccuugcca

SEQ ID NO: 2226784 - RNA, 20 nt, Human
cuucuaauauauuuuuauau

SEQ ID NO: 2226785 - RNA, 13 nt, Human
cuucuacuucugc

SEQ ID NO: 2226786 - RNA, 12 nt, Human
cuucuaauauau

SEQ ID NO: 2226787 - RNA, 14 nt, Human
cuucuaauauauuu

SEQ ID NO: 2226788 - RNA, 15 nt, Human
cuucuaauauauuuu

SEQ ID NO: 2226789 - RNA, 18 nt, Human
cuucuaauauauuuuuau

SEQ ID NO: 2226790 - RNA, 13 nt, Human
cuucuagaaccag

SEQ ID NO: 2226791 - RNA, 13 nt, Human
cuucuacuuuuaa

SEQ ID NO: 2226792 - RNA, 21 nt, Human
cuucuacuuuuaaguugcuga

SEQ ID NO: 2226793 - RNA, 17 nt, Human
cuuccugccaccugcug

SEQ ID NO: 2226794 - RNA, 11 nt, Human
cuucuaauaua

SEQ ID NO: 2226795 - RNA, 22 nt, Human
cuuccugcauucacccagacag

SEQ ID NO: 2226796 - RNA, 13 nt, Human
cuuccugccacca

SEQ ID NO: 2226797 - RNA, 21 nt, Human
cuuccugcauucacccagaca

SEQ ID NO: 2226798 - RNA, 20 nt, Human
cuuccugcauucacccagac

SEQ ID NO: 2226799 - RNA, 15 nt, Human
cuuccugccaccagu

SEQ ID NO: 2226800 - RNA, 16 nt, Human
cuuccugccaccaguc

SEQ ID NO: 2226801 - RNA, 18 nt, Human
cuuccugccaccagucac

SEQ ID NO: 2226802 - RNA, 21 nt, Human
cuuccugccaccagucacugu

SEQ ID NO: 2226803 - RNA, 17 nt, Human
cuuccugcauucaccca

SEQ ID NO: 2226804 - RNA, 13 nt, Human
cuuccugcaagga

SEQ ID NO: 2226805 - RNA, 15 nt, Human
cuuccugcaaggacu

SEQ ID NO: 2226806 - RNA, 23 nt, Human
cuucuaaguaaaaccacagcagu

SEQ ID NO: 2226807 - RNA, 22 nt, Human
cuucuaaguaaaaccacagcag

SEQ ID NO: 2226808 - RNA, 21 nt, Human
cuuccuccucccuccugccga

SEQ ID NO: 2226809 - RNA, 12 nt, Human
cuuccuccugga

SEQ ID NO: 2226810 - RNA, 14 nt, Human
cuuccuccugggcc

SEQ ID NO: 2226811 - RNA, 12 nt, Human
cuuccuccuggg

SEQ ID NO: 2226812 - RNA, 13 nt, Human
cuuccuccuggaa

SEQ ID NO: 2226813 - RNA, 14 nt, Human
cuuccuccuggaaa

SEQ ID NO: 2226814 - RNA, 14 nt, Human
cuuccugaguucag

SEQ ID NO: 2226815 - RNA, 22 nt, Human
cuuccuccugggcccucucugc

SEQ ID NO: 2226816 - RNA, 15 nt, Human
cuuccuccugggccc

SEQ ID NO: 2226817 - RNA, 17 nt, Human
cuuccugcaacaccuug

SEQ ID NO: 2226818 - RNA, 17 nt, Human
cuuccuccgaggccagu

SEQ ID NO: 2226819 - RNA, 20 nt, Human
cuuccuccgaggccaguacc

SEQ ID NO: 2226820 - RNA, 21 nt, Human
cuuccuccgaggccaguaccu

SEQ ID NO: 2226821 - RNA, 16 nt, Human
cuuccuccuccccacu

SEQ ID NO: 2226822 - RNA, 17 nt, Human
cuuccuccuccccacuu

SEQ ID NO: 2226823 - RNA, 14 nt, Human
cuuccuccucccuc

SEQ ID NO: 2226824 - RNA, 16 nt, Human
cuuccuccucccuccu

SEQ ID NO: 2226825 - RNA, 18 nt, Human
cuuccuccucccuccugc

SEQ ID NO: 2226826 - RNA, 19 nt, Human
cuuccuccucccuccugcc

SEQ ID NO: 2226827 - RNA, 21 nt, Human
cugugcugaggccuuaucauu

SEQ ID NO: 2226828 - RNA, 12 nt, Human
cugugcugaguc

SEQ ID NO: 2226829 - RNA, 20 nt, Human
cugugcuccgugccuccacc

SEQ ID NO: 2226830 - RNA, 21 nt, Human
cugugcuccgugccuccacca

SEQ ID NO: 2226831 - RNA, 22 nt, Human
cugugcuccgugccuccaccac

SEQ ID NO: 2226832 - RNA, 13 nt, Human
cugugcugacccu

SEQ ID NO: 2226833 - RNA, 14 nt, Human
cugugcugacccuc

SEQ ID NO: 2226834 - RNA, 17 nt, Human
cugugcugacccuccug

SEQ ID NO: 2226835 - RNA, 14 nt, Human
cugugcugagucug

SEQ ID NO: 2226836 - RNA, 19 nt, Human
cugugcugagucugaaggc

SEQ ID NO: 2226837 - RNA, 18 nt, Human
cugugcugacccuccugu

SEQ ID NO: 2226838 - RNA, 12 nt, Human
cugugcugaggc

SEQ ID NO: 2226839 - RNA, 13 nt, Human
cugugcugaggcc

SEQ ID NO: 2226840 - RNA, 16 nt, Human
cugugcugaggccuua

SEQ ID NO: 2226841 - RNA, 22 nt, Human
cuuaugccacgggaaguuuaga

SEQ ID NO: 2226842 - RNA, 21 nt, Human
cuuaugccauguuaauuucau

SEQ ID NO: 2226843 - RNA, 13 nt, Human
cuuauggaacacu

SEQ ID NO: 2226844 - RNA, 16 nt, Human
cuuauggaacacucug

SEQ ID NO: 2226845 - RNA, 19 nt, Human
cuucacggaagagccuugc

SEQ ID NO: 2226846 - RNA, 15 nt, Human
cuucacggaagagcc

SEQ ID NO: 2226847 - RNA, 18 nt, Human
cuucacgaaguguugcau

SEQ ID NO: 2226848 - RNA, 18 nt, Human
cuuauuguaccucucuua

SEQ ID NO: 2226849 - RNA, 22 nt, Human
cuucaccuuuguccccaccgca

SEQ ID NO: 2226850 - RNA, 13 nt, Human
cuuauuguaccuc

SEQ ID NO: 2226851 - RNA, 18 nt, Human
cuuauuggaacucugcuu

SEQ ID NO: 2226852 - RNA, 14 nt, Human
cuuauuguaccucu

SEQ ID NO: 2226853 - RNA, 15 nt, Human
cuuauuguaccucuc

SEQ ID NO: 2226854 - RNA, 18 nt, Human
cuuauuggcagcucuacu

SEQ ID NO: 2226855 - RNA, 17 nt, Human
cuuauuggaacucugcu

SEQ ID NO: 2226856 - RNA, 15 nt, Human
cuuauuggaacucug

SEQ ID NO: 2226857 - RNA, 21 nt, Human
cuucaccuuuguccccaccgc

SEQ ID NO: 2226858 - RNA, 12 nt, Human
cuuauucuguag

SEQ ID NO: 2226859 - RNA, 14 nt, Human
cuuauucuguagau

SEQ ID NO: 2226860 - RNA, 12 nt, Human
cuuauugcaaaa

SEQ ID NO: 2226861 - RNA, 17 nt, Human
cuuauuagggagaaaau

SEQ ID NO: 2226862 - RNA, 21 nt, Human
cuuauuagagugucuuuccac

SEQ ID NO: 2226863 - RNA, 20 nt, Human
cuuauuagagugucuuucca

SEQ ID NO: 2226864 - RNA, 17 nt, Human
cuuauuagagugucuuu

SEQ ID NO: 2226865 - RNA, 21 nt, Human
cuuauucaggaaaagccucug

SEQ ID NO: 2226866 - RNA, 17 nt, Human
cuuauggaacacucuga

SEQ ID NO: 2226867 - RNA, 19 nt, Human
cuuauggaacacucugaga

SEQ ID NO: 2226868 - RNA, 20 nt, Human
cuuauggaacacucugagac

SEQ ID NO: 2226869 - RNA, 21 nt, Human
cuuauggaacacucugagacu

SEQ ID NO: 2226870 - RNA, 18 nt, Human
cuucccacucuagggcag

SEQ ID NO: 2226871 - RNA, 17 nt, Human
cuucccacccaucgcug

SEQ ID NO: 2226872 - RNA, 15 nt, Human
cuucccacucacccc

SEQ ID NO: 2226873 - RNA, 21 nt, Human
cuucccacccaucgcugugug

SEQ ID NO: 2226874 - RNA, 21 nt, Human
cuucccaccucucucacuccu

SEQ ID NO: 2226875 - RNA, 23 nt, Human
cuucccaccucucucacuccuug

SEQ ID NO: 2226876 - RNA, 14 nt, Human
cuuccauagccuaa

SEQ ID NO: 2226877 - RNA, 16 nt, Human
cuuccauacagcucua

SEQ ID NO: 2226878 - RNA, 14 nt, Human
cuuccauaauuaug

SEQ ID NO: 2226879 - RNA, 14 nt, Human
cuuccauacagcuc

SEQ ID NO: 2226880 - RNA, 22 nt, Human
cuuccauagccuaaucccuggg

SEQ ID NO: 2226881 - RNA, 16 nt, Human
cuuccauaugaccuca

SEQ ID NO: 2226882 - RNA, 14 nt, Human
cuuccauaugaccu

SEQ ID NO: 2226883 - RNA, 11 nt, Human
cuucccaccuc

SEQ ID NO: 2226884 - RNA, 11 nt, Human
cuuccauaauu

SEQ ID NO: 2226885 - RNA, 23 nt, Human
cuuccauaauguauaaagaacaa

SEQ ID NO: 2226886 - RNA, 18 nt, Human
cuuccauaaugcuacugu

SEQ ID NO: 2226887 - RNA, 22 nt, Human
cuuccauaaugcuacugucuca

SEQ ID NO: 2226888 - RNA, 11 nt, Human
cuuccauaaug

SEQ ID NO: 2226889 - RNA, 11 nt, Human
cuuccauaauc

SEQ ID NO: 2226890 - RNA, 21 nt, Human
cuuccauaaucuggacuccuc

SEQ ID NO: 2226891 - RNA, 22 nt, Human
cuucaugcaaugacaucuucaa

SEQ ID NO: 2226892 - RNA, 21 nt, Human
cuuccagugaggcucugcccu

SEQ ID NO: 2226893 - RNA, 13 nt, Human
cuucaugcaauga

SEQ ID NO: 2226894 - RNA, 12 nt, Human
cuucaugcaaug

SEQ ID NO: 2226895 - RNA, 12 nt, Human
cuucaugacauu

SEQ ID NO: 2226896 - RNA, 17 nt, Human
cuucaucuucucagcuc

SEQ ID NO: 2226897 - RNA, 15 nt, Human
cuucaucuucucagc

SEQ ID NO: 2226898 - RNA, 16 nt, Human
cuucaucuucucagcu

SEQ ID NO: 2226899 - RNA, 20 nt, Human
cuucaucuucucagcuccca

SEQ ID NO: 2226900 - RNA, 17 nt, Human
cuucaugcaaugacauc

SEQ ID NO: 2226901 - RNA, 18 nt, Human
cuuccaguguccuuagaa

SEQ ID NO: 2226902 - RNA, 15 nt, Human
cuucaugcauggaaa

SEQ ID NO: 2226903 - RNA, 13 nt, Human
cuucaugcaugga

SEQ ID NO: 2226904 - RNA, 19 nt, Human
cuuccaguguccuuagaac

SEQ ID NO: 2226905 - RNA, 23 nt, Human
cuuccagugguuugagacacugg

SEQ ID NO: 2226906 - RNA, 22 nt, Human
cuuccagugaggcucugcccuu

SEQ ID NO: 2226907 - RNA, 23 nt, Human
cuuccagugaggcucugcccuug

SEQ ID NO: 2226908 - RNA, 18 nt, Human
cuucauagcagauuuuaa

SEQ ID NO: 2226909 - RNA, 21 nt, Human
cuucauacuuuuuuucacagu

SEQ ID NO: 2226910 - RNA, 22 nt, Human
cuucauacagggaugguguuca

SEQ ID NO: 2226911 - RNA, 20 nt, Human
cuucauaccuacauguauuu

SEQ ID NO: 2226912 - RNA, 12 nt, Human
cuucauaaucca

SEQ ID NO: 2226913 - RNA, 13 nt, Human
cuucauacaggga

SEQ ID NO: 2226914 - RNA, 12 nt, Human
cuucauacaggg

SEQ ID NO: 2226915 - RNA, 23 nt, Human
cuucaucuggcaacaucuuuauc

SEQ ID NO: 2226916 - RNA, 12 nt, Human
cuucaucuucuc

SEQ ID NO: 2226917 - RNA, 13 nt, Human
cuucaucuggcaa

SEQ ID NO: 2226918 - RNA, 19 nt, Human
cuucaucuggcaacaucuu

SEQ ID NO: 2226919 - RNA, 14 nt, Human
cuucaucuggcaac

SEQ ID NO: 2226920 - RNA, 15 nt, Human
cuucauauugcugag

SEQ ID NO: 2226921 - RNA, 11 nt, Human
cuucaucugga

SEQ ID NO: 2226922 - RNA, 15 nt, Human
cuucaucuggaacca

SEQ ID NO: 2226923 - RNA, 13 nt, Human
cuucaucuggaac

SEQ ID NO: 2226924 - RNA, 12 nt, Human
cuucaucuggaa

SEQ ID NO: 2226925 - RNA, 17 nt, Human
cuucacuguccuccaag

SEQ ID NO: 2226926 - RNA, 17 nt, Human
cuucacuguauaaauag

SEQ ID NO: 2226927 - RNA, 23 nt, Human
cuucacuguauaaauaggagagg

SEQ ID NO: 2226928 - RNA, 20 nt, Human
cuucagagacuccugcaggc

SEQ ID NO: 2226929 - RNA, 18 nt, Human
cuucagagacuccugcag

SEQ ID NO: 2226930 - RNA, 19 nt, Human
cuucagagacuccugcagg

SEQ ID NO: 2226931 - RNA, 14 nt, Human
cuucauaaaugaag

SEQ ID NO: 2226932 - RNA, 15 nt, Human
cuucauaacaauuuu

SEQ ID NO: 2226933 - RNA, 19 nt, Human
cuucauaacaauuuuagga

SEQ ID NO: 2226934 - RNA, 10 nt, Human
cuucauacac

SEQ ID NO: 2226935 - RNA, 9 nt, Human
cuucauaca

SEQ ID NO: 2226936 - RNA, 14 nt, Human
cuucaguuguuuuc

SEQ ID NO: 2226937 - RNA, 17 nt, Human
cuucaguuguuuucccg

SEQ ID NO: 2226938 - RNA, 17 nt, Human
cuucaguuuccuggucu

SEQ ID NO: 2226939 - RNA, 17 nt, Human
cuucacggcaggacaac

SEQ ID NO: 2226940 - RNA, 16 nt, Human
cuucacggcaggacaa

SEQ ID NO: 2226941 - RNA, 20 nt, Human
cuucacuccagccuggguga

SEQ ID NO: 2226942 - RNA, 13 nt, Human
cuucacggcagga

SEQ ID NO: 2226943 - RNA, 19 nt, Human
cuucacgaaguguugcaug

SEQ ID NO: 2226944 - RNA, 20 nt, Human
cuucacgaaguguugcaugg

SEQ ID NO: 2226945 - RNA, 17 nt, Human
cuucacucgcccccggg

SEQ ID NO: 2226946 - RNA, 15 nt, Human
cuucacucucugaag

SEQ ID NO: 2226947 - RNA, 24 nt, Human
cuucacuccggugugccugcagcc

SEQ ID NO: 2226948 - RNA, 23 nt, Human
cuucacuccggugugccugcagc

SEQ ID NO: 2226949 - RNA, 22 nt, Human
cuucacuccggugugccugcag

SEQ ID NO: 2226950 - RNA, 19 nt, Human
cuucacuccggugugccug

SEQ ID NO: 2226951 - RNA, 14 nt, Human
cuucacuccggugu

SEQ ID NO: 2226952 - RNA, 15 nt, Human
cuucacuguaaaaua

SEQ ID NO: 2226953 - RNA, 17 nt, Human
cuucagagacuccugca

SEQ ID NO: 2226954 - RNA, 13 nt, Human
cuucacugccuuu

SEQ ID NO: 2226955 - RNA, 14 nt, Human
cuucacugccuuug

SEQ ID NO: 2226956 - RNA, 15 nt, Human
cuucacugccuuugc

SEQ ID NO: 2226957 - RNA, 17 nt, Human
cuucacugccuuugcuc

SEQ ID NO: 2226958 - RNA, 19 nt, Human
cuucacugccuuugcuccu

SEQ ID NO: 2226959 - RNA, 13 nt, Human
cuucacuguauaa

SEQ ID NO: 2226960 - RNA, 16 nt, Human
cuucacuguauaaaua

SEQ ID NO: 2226961 - RNA, 22 nt, Human
gaaacuuuauucaaguaaaaau

SEQ ID NO: 2226962 - RNA, 17 nt, Human
gaaaggcucugaaagcc

SEQ ID NO: 2226963 - RNA, 15 nt, Human
gaaaggcucugaaag

SEQ ID NO: 2226964 - RNA, 19 nt, Human
gaaaggcucugaaagccag

SEQ ID NO: 2226965 - RNA, 20 nt, Human
gaaaggcuccaggagcagcc

SEQ ID NO: 2226966 - RNA, 22 nt, Human
gaaaggcuccaggagcagccac

SEQ ID NO: 2226967 - RNA, 21 nt, Human
gaaaggcuccaggagcagcca

SEQ ID NO: 2226968 - RNA, 17 nt, Human
gaaagacuauucaaaca

SEQ ID NO: 2226969 - RNA, 20 nt, Human
gaaagacuaucuaaauguug

SEQ ID NO: 2226970 - RNA, 21 nt, Human
gaaagaaaauaccaaggaaca

SEQ ID NO: 2226971 - RNA, 15 nt, Human
gaaagacuauucaaa

SEQ ID NO: 2226972 - RNA, 14 nt, Human
gaaagacuauucaa

SEQ ID NO: 2226973 - RNA, 18 nt, Human
gaaagguuacccuguaac

SEQ ID NO: 2226974 - RNA, 18 nt, Human
gaaaucaaauaugcaaag

SEQ ID NO: 2226975 - RNA, 18 nt, Human
gaaauauuuauuuuaaua

SEQ ID NO: 2226976 - RNA, 22 nt, Human
gaaauauuuauuuuaauaaugu

SEQ ID NO: 2226977 - RNA, 20 nt, Human
gaaaucaguaauauuuauau

SEQ ID NO: 2226978 - RNA, 18 nt, Human
gaaaucaguaauauuuau

SEQ ID NO: 2226979 - RNA, 13 nt, Human
gaaagguucugcc

SEQ ID NO: 2226980 - RNA, 19 nt, Human
gaaaucaccgaaaacgugg

SEQ ID NO: 2226981 - RNA, 20 nt, Human
gaaaucaaauaugcaaagca

SEQ ID NO: 2226982 - RNA, 19 nt, Human
gaaaucaaauaugcaaagc

SEQ ID NO: 2226983 - RNA, 19 nt, Human
gaaagggacuuggaagcuc

SEQ ID NO: 2226984 - RNA, 20 nt, Human
gaaagggacgcuacccggga

SEQ ID NO: 2226985 - RNA, 22 nt, Human
gaaagggagcuaucaggaacag

SEQ ID NO: 2226986 - RNA, 17 nt, Human
gaaaggggggagcuggg

SEQ ID NO: 2226987 - RNA, 22 nt, Human
gaaagggacuuggaagcuccgc

SEQ ID NO: 2226988 - RNA, 16 nt, Human
gaaagggugcugcuuc

SEQ ID NO: 2226989 - RNA, 15 nt, Human
gaaaggggugcuuuu

SEQ ID NO: 2226990 - RNA, 19 nt, Human
gaaagggugcugcuucccu

SEQ ID NO: 2226991 - RNA, 23 nt, Human
gaaaggguguuuuucuguuuuau

SEQ ID NO: 2226992 - RNA, 17 nt, Human
gaaaggggucggcugac

SEQ ID NO: 2226993 - RNA, 23 nt, Human
gaaagggggucccagugggaggg

SEQ ID NO: 2226994 - RNA, 14 nt, Human
gaaaggggugcuuu

SEQ ID NO: 2226995 - RNA, 16 nt, Human
gaaagggggucccagu

SEQ ID NO: 2226996 - RNA, 17 nt, Human
gaaagggggucccagug

SEQ ID NO: 2226997 - RNA, 18 nt, Human
gaaagggggucccagugg

SEQ ID NO: 2226998 - RNA, 22 nt, Human
gaaagggggucccagugggagg

SEQ ID NO: 2226999 - RNA, 22 nt, Human
gaaaggugaguuugagcugccu

SEQ ID NO: 2227000 - RNA, 23 nt, Human
gaaaggugaguuugagcugccuu

SEQ ID NO: 2227001 - RNA, 17 nt, Human
gaaauauuuauuuuaau

SEQ ID NO: 2227002 - RNA, 18 nt, Human
gaaaaugguccaggagaa

SEQ ID NO: 2227003 - RNA, 14 nt, Human
gaaaaugguauuuu

SEQ ID NO: 2227004 - RNA, 12 nt, Human
gaaaauguacug

SEQ ID NO: 2227005 - RNA, 18 nt, Human
gaaaauguaagcuguuua

SEQ ID NO: 2227006 - RNA, 19 nt, Human
gaaaauguacugagauuuu

SEQ ID NO: 2227007 - RNA, 17 nt, Human
gaaaauguaagcuguuu

SEQ ID NO: 2227008 - RNA, 19 nt, Human
gaaaauggacguguuauga

SEQ ID NO: 2227009 - RNA, 23 nt, Human
gaaaauggacguguuaugacucc

SEQ ID NO: 2227010 - RNA, 13 nt, Human
gaaaauucacuau

SEQ ID NO: 2227011 - RNA, 22 nt, Human
gaaaaugucagaaaccaguuau

SEQ ID NO: 2227012 - RNA, 21 nt, Human
gaaaaugucagaaaccaguua

SEQ ID NO: 2227013 - RNA, 18 nt, Human
gaaaauucacuauuggcu

SEQ ID NO: 2227014 - RNA, 15 nt, Human
gaaaauguaugugua

SEQ ID NO: 2227015 - RNA, 21 nt, Human
gaaaauuccuauugauuuucu

SEQ ID NO: 2227016 - RNA, 23 nt, Human
gaaaaugcuguauuagucacaga

SEQ ID NO: 2227017 - RNA, 21 nt, Human
gaaaauggaagacagcucuua

SEQ ID NO: 2227018 - RNA, 18 nt, Human
gaaaagaaaaaugagccu

SEQ ID NO: 2227019 - RNA, 20 nt, Human
gaaaagaaaaaaaaagaaaa

SEQ ID NO: 2227020 - RNA, 19 nt, Human
gaaaagaaaaaaaaagaaa

SEQ ID NO: 2227021 - RNA, 23 nt, Human
gaaaaugcagcagggaugcccug

SEQ ID NO: 2227022 - RNA, 21 nt, Human
gaaaaugcauuguaucgaugu

SEQ ID NO: 2227023 - RNA, 20 nt, Human
gaaaaacuuccaugaggcca

SEQ ID NO: 2227024 - RNA, 23 nt, Human
gaaaaacucugggaaauaagaga

SEQ ID NO: 2227025 - RNA, 14 nt, Human
gaaaaacugauuuu

SEQ ID NO: 2227026 - RNA, 17 nt, Human
gaaaagaaaaaaaaaga

SEQ ID NO: 2227027 - RNA, 12 nt, Human
gaaaagaaaaaa

SEQ ID NO: 2227028 - RNA, 11 nt, Human
gaaaagaaaaa

SEQ ID NO: 2227029 - RNA, 10 nt, Human
gaaaagaaaa

SEQ ID NO: 2227030 - RNA, 9 nt, Human
gaaaagaaa

SEQ ID NO: 2227031 - RNA, 16 nt, Human
gaaaacuuuucucaga

SEQ ID NO: 2227032 - RNA, 17 nt, Human
gaaaacuuuucucagau

SEQ ID NO: 2227033 - RNA, 15 nt, Human
gaaaacuuuucucag

SEQ ID NO: 2227034 - RNA, 16 nt, Human
gaaaauugcugugccu

SEQ ID NO: 2227035 - RNA, 22 nt, Human
gaaaauugcugugccucccaaa

SEQ ID NO: 2227036 - RNA, 15 nt, Human
gaaaauugcugugcc

SEQ ID NO: 2227037 - RNA, 21 nt, Human
gaaaauuuguuauuuugcaac

SEQ ID NO: 2227038 - RNA, 17 nt, Human
gaaaauuuguuauuuug

SEQ ID NO: 2227039 - RNA, 12 nt, Human
cuuuuguaauuu

SEQ ID NO: 2227040 - RNA, 20 nt, Human
cuuuuguaagacaaagguuu

SEQ ID NO: 2227041 - RNA, 13 nt, Human
cuuuuguaagaca

SEQ ID NO: 2227042 - RNA, 10 nt, Human
cuuuuguaag

SEQ ID NO: 2227043 - RNA, 18 nt, Human
cuuuugucuaugggacuc

SEQ ID NO: 2227044 - RNA, 14 nt, Human
cuuuugugaacuuu

SEQ ID NO: 2227045 - RNA, 13 nt, Human
cuuuuggcccccg

SEQ ID NO: 2227046 - RNA, 15 nt, Human
cuuuuggcacugaga

SEQ ID NO: 2227047 - RNA, 14 nt, Human
cuuuuggcuuccau

SEQ ID NO: 2227048 - RNA, 15 nt, Human
cuuuuggcauuuuac

SEQ ID NO: 2227049 - RNA, 13 nt, Human
cuuuuguaaaugu

SEQ ID NO: 2227050 - RNA, 13 nt, Human
cuuuugguuaagu

SEQ ID NO: 2227051 - RNA, 20 nt, Human
cuuuuggcccccgagcuggg

SEQ ID NO: 2227052 - RNA, 15 nt, Human
cuuuuggcuuccaug

SEQ ID NO: 2227053 - RNA, 20 nt, Human
cuuuugguuaagucuguuuu

SEQ ID NO: 2227054 - RNA, 16 nt, Human
cuuuugguuaagucug

SEQ ID NO: 2227055 - RNA, 15 nt, Human
cuuuugcaucauugu

SEQ ID NO: 2227056 - RNA, 13 nt, Human
cuuuugccauuga

SEQ ID NO: 2227057 - RNA, 13 nt, Human
cuuuuggagucag

SEQ ID NO: 2227058 - RNA, 16 nt, Human
cuuuugccguuauuaa

SEQ ID NO: 2227059 - RNA, 21 nt, Human
cuuuugcccuucacaguguuu

SEQ ID NO: 2227060 - RNA, 15 nt, Human
cuuuugcccuuugau

SEQ ID NO: 2227061 - RNA, 20 nt, Human
cuuuugcccuucacaguguu

SEQ ID NO: 2227062 - RNA, 17 nt, Human
cuuuugccauuaaacuu

SEQ ID NO: 2227063 - RNA, 23 nt, Human
cuuuugcccacacuugggagcaa

SEQ ID NO: 2227064 - RNA, 20 nt, Human
cuuuuuuggggauaugcuua

SEQ ID NO: 2227065 - RNA, 13 nt, Human
cuuuuuuguuuug

SEQ ID NO: 2227066 - RNA, 23 nt, Human
cuuuuuuggcugcugaaggcucg

SEQ ID NO: 2227067 - RNA, 13 nt, Human
cuuuugugcauua

SEQ ID NO: 2227068 - RNA, 12 nt, Human
cuuuugugcauu

SEQ ID NO: 2227069 - RNA, 23 nt, Human
cuuuuuuggcuuuagacacuggc

SEQ ID NO: 2227070 - RNA, 19 nt, Human
cuuuuuuuccaucuuuaca

SEQ ID NO: 2227071 - RNA, 18 nt, Human
cuuuuuuuuucucuuucu

SEQ ID NO: 2227072 - RNA, 22 nt, Human
cuuuuuuuuucucuuucucucc

SEQ ID NO: 2227073 - RNA, 16 nt, Human
cuuuuuuuuuccaaaa

SEQ ID NO: 2227074 - RNA, 15 nt, Human
cuuuuuuuuucucuu

SEQ ID NO: 2227075 - RNA, 17 nt, Human
cuuuuuuuuucucuuuc

SEQ ID NO: 2227076 - RNA, 20 nt, Human
cuuuuuuuuuuuugagacag

SEQ ID NO: 2227077 - RNA, 18 nt, Human
gaaaaacguguugccuug

SEQ ID NO: 2227078 - RNA, 18 nt, Human
gaaaaacaucugaaagcc

SEQ ID NO: 2227079 - RNA, 11 nt, Human
gaaaaacaggu

SEQ ID NO: 2227080 - RNA, 14 nt, Human
gaaaaacacaagca

SEQ ID NO: 2227081 - RNA, 19 nt, Human
gaaaaacaaauucaucaaa

SEQ ID NO: 2227082 - RNA, 15 nt, Human
gaaaaacacaagcaa

SEQ ID NO: 2227083 - RNA, 17 nt, Human
gaaaaacacaagcaaaa

SEQ ID NO: 2227084 - RNA, 19 nt, Human
gaaaaaaaucguccaggga

SEQ ID NO: 2227085 - RNA, 18 nt, Human
gaaaaaaaguuugccaga

SEQ ID NO: 2227086 - RNA, 13 nt, Human
gaaaaaaaugacu

SEQ ID NO: 2227087 - RNA, 20 nt, Human
gaaaaaaaguuugccagaag

SEQ ID NO: 2227088 - RNA, 20 nt, Human
gaaaaaaaauguucuuuggg

SEQ ID NO: 2227089 - RNA, 22 nt, Human
cuuuuuuuuuuuuuaaagacag

SEQ ID NO: 2227090 - RNA, 21 nt, Human
cuuuuuuuuuuuugagacaga

SEQ ID NO: 2227091 - RNA, 23 nt, Human
cuuuuuuuuuuuuuaaagacaga

SEQ ID NO: 2227092 - RNA, 21 nt, Human
gaaaaaaaaagucagacugcu

SEQ ID NO: 2227093 - RNA, 22 nt, Human
gaaaaaaaaguuucagagaagu

SEQ ID NO: 2227094 - RNA, 19 nt, Human
gaaaaaaaaguuucagaga

SEQ ID NO: 2227095 - RNA, 15 nt, Human
gaaaaaaaagaaagc

SEQ ID NO: 2227096 - RNA, 20 nt, Human
cuuuccuguagccuucugua

SEQ ID NO: 2227097 - RNA, 11 nt, Human
cuuuccugccu

SEQ ID NO: 2227098 - RNA, 20 nt, Human
cuuuccuggacacucagacc

SEQ ID NO: 2227099 - RNA, 23 nt, Human
cuuuccuggacacucagaccuga

SEQ ID NO: 2227100 - RNA, 13 nt, Human
cuuuccugcccca

SEQ ID NO: 2227101 - RNA, 14 nt, Human
cuuuccugccccag

SEQ ID NO: 2227102 - RNA, 18 nt, Human
cuuuccugccccaggccu

SEQ ID NO: 2227103 - RNA, 19 nt, Human
cuuuccugccccaggccug

SEQ ID NO: 2227104 - RNA, 16 nt, Human
cuuuccuuccuucccu

SEQ ID NO: 2227105 - RNA, 13 nt, Human
cuuuccuucuugc

SEQ ID NO: 2227106 - RNA, 15 nt, Human
cuuuccuuccuuccc

SEQ ID NO: 2227107 - RNA, 11 nt, Human
cuuuccuuccu

SEQ ID NO: 2227108 - RNA, 15 nt, Human
cuuuccuuccauccc

SEQ ID NO: 2227109 - RNA, 22 nt, Human
cuuuccugaggcugggcucccu

SEQ ID NO: 2227110 - RNA, 19 nt, Human
cuuuccugauggcaggaug

SEQ ID NO: 2227111 - RNA, 21 nt, Human
cuuuccugcaacucaaggacu

SEQ ID NO: 2227112 - RNA, 22 nt, Human
cuuuccugaugguacaggaaag

SEQ ID NO: 2227113 - RNA, 10 nt, Human
cuuuccugcc

SEQ ID NO: 2227114 - RNA, 12 nt, Human
cuuuccugcccc

SEQ ID NO: 2227115 - RNA, 17 nt, Human
cuuucacaaaauuuuau

SEQ ID NO: 2227116 - RNA, 14 nt, Human
cuuucacaaccuuc

SEQ ID NO: 2227117 - RNA, 21 nt, Human
cuuucaauuccguagccagcu

SEQ ID NO: 2227118 - RNA, 21 nt, Human
cuuucaaugguuugcaaggaa

SEQ ID NO: 2227119 - RNA, 22 nt, Human
cuuucaaugguuugcaaggaag

SEQ ID NO: 2227120 - RNA, 20 nt, Human
cuuucaaugguuugcaagga

SEQ ID NO: 2227121 - RNA, 23 nt, Human
cuuucaauaggaaaaacugauuu

SEQ ID NO: 2227122 - RNA, 20 nt, Human
cuuucagggaauuucaggaa

SEQ ID NO: 2227123 - RNA, 14 nt, Human
cuuucagcugugaa

SEQ ID NO: 2227124 - RNA, 13 nt, Human
cuuucagcuguga

SEQ ID NO: 2227125 - RNA, 20 nt, Human
cuuucacaaaauuuuauucc

SEQ ID NO: 2227126 - RNA, 23 nt, Human
cuuucagccaagaauucuuaaau

SEQ ID NO: 2227127 - RNA, 20 nt, Human
cuuucagccaagaauucuua

SEQ ID NO: 2227128 - RNA, 21 nt, Human
cuuugaugauuaauucaccuu

SEQ ID NO: 2227129 - RNA, 15 nt, Human
cuuugaucagguggg

SEQ ID NO: 2227130 - RNA, 22 nt, Human
cuuugauauuuucaacgcagcc

SEQ ID NO: 2227131 - RNA, 22 nt, Human
cuuugauaauguuaaauuugua

SEQ ID NO: 2227132 - RNA, 21 nt, Human
cuuugauaauguuaaauuugu

SEQ ID NO: 2227133 - RNA, 20 nt, Human
cuuuccuuuccccagcccag

SEQ ID NO: 2227134 - RNA, 16 nt, Human
cuuucuagccagagga

SEQ ID NO: 2227135 - RNA, 17 nt, Human
cuuucuacccagcgagc

SEQ ID NO: 2227136 - RNA, 17 nt, Human
cuuuccuuggcucccau

SEQ ID NO: 2227137 - RNA, 22 nt, Human
cuuuccuuggcucccauucacu

SEQ ID NO: 2227138 - RNA, 15 nt, Human
cuuuccuugcucaac

SEQ ID NO: 2227139 - RNA, 14 nt, Human
cuuuccuucuugcc

SEQ ID NO: 2227140 - RNA, 16 nt, Human
cuuuccuuggcuccca

SEQ ID NO: 2227141 - RNA, 17 nt, Human
cuuuccuuuccccagcc

SEQ ID NO: 2227142 - RNA, 19 nt, Human
cuuuccuuguuccccauca

SEQ ID NO: 2227143 - RNA, 16 nt, Human
cuuuccuuuccccagc

SEQ ID NO: 2227144 - RNA, 15 nt, Human
cuuucuagccagagg

SEQ ID NO: 2227145 - RNA, 21 nt, Human
cuuuguaagaguguagaagca

SEQ ID NO: 2227146 - RNA, 22 nt, Human
cuuuguaagaguguagaagcau

SEQ ID NO: 2227147 - RNA, 17 nt, Human
cuuuguaagaguguaga

SEQ ID NO: 2227148 - RNA, 18 nt, Human
cuuuguaagaguguagaa

SEQ ID NO: 2227149 - RNA, 19 nt, Human
cuuuguaagaguguagaag

SEQ ID NO: 2227150 - RNA, 20 nt, Human
cuuuguaagaguguagaagc

SEQ ID NO: 2227151 - RNA, 17 nt, Human
cuuugauguuaacacau

SEQ ID NO: 2227152 - RNA, 15 nt, Human
cuuugauguuaacac

SEQ ID NO: 2227153 - RNA, 23 nt, Human
cuuugguuuuuuucuucuguauu

SEQ ID NO: 2227154 - RNA, 15 nt, Human
cuuuguaaauuguca

SEQ ID NO: 2227155 - RNA, 14 nt, Human
cuuugggcugcccu

SEQ ID NO: 2227156 - RNA, 18 nt, Human
cuuugauguuaacacauu

SEQ ID NO: 2227157 - RNA, 18 nt, Human
cuuugaugucauauggaa

SEQ ID NO: 2227158 - RNA, 15 nt, Human
cuuugggcugcccug

SEQ ID NO: 2227159 - RNA, 19 nt, Human
cuuugggcugcccuggugc

SEQ ID NO: 2227160 - RNA, 20 nt, Human
cuuugggcugcccuggugcu

SEQ ID NO: 2227161 - RNA, 21 nt, Human
cuuugggcugcccuggugcug

SEQ ID NO: 2227162 - RNA, 14 nt, Human
cuuuguacuuugug

SEQ ID NO: 2227163 - RNA, 21 nt, Human
cuuuguaaucguuaugugugu

SEQ ID NO: 2227164 - RNA, 23 nt, Human
cuuuguaagaguguagaagcauu

SEQ ID NO: 2227165 - RNA, 19 nt, Human
cuuuguaaucguuaugugu

SEQ ID NO: 2227166 - RNA, 12 nt, Human
cuuuguaccccc

SEQ ID NO: 2227167 - RNA, 14 nt, Human
cuuuguacccccca

SEQ ID NO: 2227168 - RNA, 19 nt, Human
cuuuguaccccccaacccc

SEQ ID NO: 2227169 - RNA, 21 nt, Human
cuuuguaccccccaaccccug

SEQ ID NO: 2227170 - RNA, 12 nt, Human
cuuuguauauua

SEQ ID NO: 2227171 - RNA, 14 nt, Human
cuuuuauaaaccuc

SEQ ID NO: 2227172 - RNA, 16 nt, Human
cuuuuauaaaccucua

SEQ ID NO: 2227173 - RNA, 14 nt, Human
cuuuuauaaacuuu

SEQ ID NO: 2227174 - RNA, 13 nt, Human
cuuuuauaaacuu

SEQ ID NO: 2227175 - RNA, 10 nt, Human
cuuuguauau

SEQ ID NO: 2227176 - RNA, 18 nt, Human
cuuuuaguuguaucucuu

SEQ ID NO: 2227177 - RNA, 15 nt, Human
cuuuguauauuauuu

SEQ ID NO: 2227178 - RNA, 21 nt, Human
cuuuuaguuguaucucuuuug

SEQ ID NO: 2227179 - RNA, 20 nt, Human
cuuuuaguuguaucucuuuu

SEQ ID NO: 2227180 - RNA, 19 nt, Human
cuuuuaguuguaucucuuu

SEQ ID NO: 2227181 - RNA, 22 nt, Human
cuuuuaguuuuaguugcagaaa

SEQ ID NO: 2227182 - RNA, 21 nt, Human
cuuuuaguuuuaguugcagaa

SEQ ID NO: 2227183 - RNA, 17 nt, Human
cuuuuauccacuuaccu

SEQ ID NO: 2227184 - RNA, 19 nt, Human
cuuuuaucacgauauuauu

SEQ ID NO: 2227185 - RNA, 13 nt, Human
cuuuuaucaaaca

SEQ ID NO: 2227186 - RNA, 20 nt, Human
cuuuuauacucuuucuguau

SEQ ID NO: 2227187 - RNA, 19 nt, Human
cuuuuauacucuuucugua

SEQ ID NO: 2227188 - RNA, 17 nt, Human
cuuuuauacucuuucug

SEQ ID NO: 2227189 - RNA, 12 nt, Human
cuuuuauacucu

SEQ ID NO: 2227190 - RNA, 16 nt, Human
cuuuuauagaugguca

SEQ ID NO: 2227191 - RNA, 22 nt, Human
cuuuuauaaaccucuaauuuau

SEQ ID NO: 2227192 - RNA, 12 nt, Human
cuuuuauagcua

SEQ ID NO: 2227193 - RNA, 14 nt, Human
cuuuuauagcuauu

SEQ ID NO: 2227194 - RNA, 17 nt, Human
cuuuuauagcuauuacu

SEQ ID NO: 2227195 - RNA, 18 nt, Human
cuuuuauagcuauuacug

SEQ ID NO: 2227196 - RNA, 19 nt, Human
cuuuuauagcuauuacugu

SEQ ID NO: 2227197 - RNA, 17 nt, Human
cuuuuaugauguauauu

SEQ ID NO: 2227198 - RNA, 18 nt, Human
cuuuuaugauguauauuu

SEQ ID NO: 2227199 - RNA, 23 nt, Human
cuuuuauguaguaauugacaugu

SEQ ID NO: 2227200 - RNA, 22 nt, Human
cuuuuauguaguaauugacaug

SEQ ID NO: 2227201 - RNA, 18 nt, Human
cuuuuauguaguaauuga

SEQ ID NO: 2227202 - RNA, 15 nt, Human
cuuuuauguaguaau

SEQ ID NO: 2227203 - RNA, 14 nt, Human
cuuuuaugugaaac

SEQ ID NO: 2227204 - RNA, 17 nt, Human
cugggcagaaggaagac

SEQ ID NO: 2227205 - RNA, 12 nt, Human
cugggcagcugu

SEQ ID NO: 2227206 - RNA, 17 nt, Human
cuggggaaauaacagcu

SEQ ID NO: 2227207 - RNA, 15 nt, Human
cuggggaaccugacc

SEQ ID NO: 2227208 - RNA, 17 nt, Human
cuggggaaccugacccc

SEQ ID NO: 2227209 - RNA, 16 nt, Human
cuggggaaccugaccc

SEQ ID NO: 2227210 - RNA, 13 nt, Human
cugggcagaaggc

SEQ ID NO: 2227211 - RNA, 16 nt, Human
cugggcagaaggaaga

SEQ ID NO: 2227212 - RNA, 18 nt, Human
cugggcagaaggaagacu

SEQ ID NO: 2227213 - RNA, 14 nt, Human
cugggcagaaggcc

SEQ ID NO: 2227214 - RNA, 16 nt, Human
cugggcagaaggccaa

SEQ ID NO: 2227215 - RNA, 17 nt, Human
cugggcagaaggccaag

SEQ ID NO: 2227216 - RNA, 13 nt, Human
cugggcagaccuu

SEQ ID NO: 2227217 - RNA, 15 nt, Human
cuggggaugugggag

SEQ ID NO: 2227218 - RNA, 16 nt, Human
cuggggaugugggagg

SEQ ID NO: 2227219 - RNA, 16 nt, Human
cuggggauugggcccc

SEQ ID NO: 2227220 - RNA, 22 nt, Human
cuggggauugggccccugccag

SEQ ID NO: 2227221 - RNA, 18 nt, Human
cuggggauugggccccug

SEQ ID NO: 2227222 - RNA, 22 nt, Human
cuggggaaauaacagcuguggc

SEQ ID NO: 2227223 - RNA, 19 nt, Human
cuggggaaauaacagcugu

SEQ ID NO: 2227224 - RNA, 22 nt, Human
cuggggaugucucucaugacca

SEQ ID NO: 2227225 - RNA, 16 nt, Human
cuggggacagcaaggg

SEQ ID NO: 2227226 - RNA, 21 nt, Human
cuggggcaagucccugacucu

SEQ ID NO: 2227227 - RNA, 14 nt, Human
cuggggcaaguccc

SEQ ID NO: 2227228 - RNA, 17 nt, Human
cuggggaugugggaggg

SEQ ID NO: 2227229 - RNA, 22 nt, Human
cuggggaugugggagggagcag

SEQ ID NO: 2227230 - RNA, 18 nt, Human
cuggggccaggcuggguc

SEQ ID NO: 2227231 - RNA, 12 nt, Human
cuggggccccuu

SEQ ID NO: 2227232 - RNA, 16 nt, Human
cuggggcaagucccug

SEQ ID NO: 2227233 - RNA, 17 nt, Human
cuggggccuaucagugu

SEQ ID NO: 2227234 - RNA, 21 nt, Human
cuggggccuaucagugugccc

SEQ ID NO: 2227235 - RNA, 16 nt, Human
cuggggccgaaagaac

SEQ ID NO: 2227236 - RNA, 21 nt, Human
cuggugacugcgaucuucaga

SEQ ID NO: 2227237 - RNA, 22 nt, Human
cuggugacugcgaucuucagag

SEQ ID NO: 2227238 - RNA, 23 nt, Human
cuggugacuuuccucuuuggucu

SEQ ID NO: 2227239 - RNA, 16 nt, Human
cuggugagcagacugg

SEQ ID NO: 2227240 - RNA, 13 nt, Human
cuggugaggccuu

SEQ ID NO: 2227241 - RNA, 15 nt, Human
cuggugaggccuugc

SEQ ID NO: 2227242 - RNA, 16 nt, Human
cuggugaggccuugcu

SEQ ID NO: 2227243 - RNA, 23 nt, Human
cuggugagucuuggcggcagcag

SEQ ID NO: 2227244 - RNA, 17 nt, Human
cuggugaggccuugcuc

SEQ ID NO: 2227245 - RNA, 19 nt, Human
cuggugagucuuggcggca

SEQ ID NO: 2227246 - RNA, 20 nt, Human
cuggugagucuuggcggcag

SEQ ID NO: 2227247 - RNA, 21 nt, Human
cuggugagucuuggcggcagc

SEQ ID NO: 2227248 - RNA, 21 nt, Human
cuggugauggagguuucauac

SEQ ID NO: 2227249 - RNA, 22 nt, Human
cuggguggcaccagcagccugg

SEQ ID NO: 2227250 - RNA, 17 nt, Human
cuggggccuccagaacu

SEQ ID NO: 2227251 - RNA, 15 nt, Human
cuggggccuccagaa

SEQ ID NO: 2227252 - RNA, 12 nt, Human
cuggggccucca

SEQ ID NO: 2227253 - RNA, 11 nt, Human
cuggggccucc

SEQ ID NO: 2227254 - RNA, 20 nt, Human
cuggggccucggagccucau

SEQ ID NO: 2227255 - RNA, 22 nt, Human
cuggggccuaucagugugcccc

SEQ ID NO: 2227256 - RNA, 19 nt, Human
cuggggccucggagccuca

SEQ ID NO: 2227257 - RNA, 14 nt, Human
cuggguggcacugc

SEQ ID NO: 2227258 - RNA, 15 nt, Human
cuggguggcacugcc

SEQ ID NO: 2227259 - RNA, 16 nt, Human
cuggguggcacugcca

SEQ ID NO: 2227260 - RNA, 20 nt, Human
cuggguggcacugccaugca

SEQ ID NO: 2227261 - RNA, 23 nt, Human
cuggguggcaccagcagccugga

SEQ ID NO: 2227262 - RNA, 16 nt, Human
cuggguguggcgcagc

SEQ ID NO: 2227263 - RNA, 21 nt, Human
cuggguggcacugccaugcag

SEQ ID NO: 2227264 - RNA, 12 nt, Human
cuggguggccca

SEQ ID NO: 2227265 - RNA, 13 nt, Human
cuggguggcccau

SEQ ID NO: 2227266 - RNA, 14 nt, Human
cuggguggcccauc

SEQ ID NO: 2227267 - RNA, 15 nt, Human
cuggguggcccaucc

SEQ ID NO: 2227268 - RNA, 16 nt, Human
cuggguggcccauccc

SEQ ID NO: 2227269 - RNA, 20 nt, Human
cuggguggcccauccccccu

SEQ ID NO: 2227270 - RNA, 21 nt, Human
cuggguggcccauccccccuc

SEQ ID NO: 2227271 - RNA, 13 nt, Human
cuggguggccucg

SEQ ID NO: 2227272 - RNA, 16 nt, Human
cuggguggccucggga

SEQ ID NO: 2227273 - RNA, 17 nt, Human
cuggguguggcgcagca

SEQ ID NO: 2227274 - RNA, 14 nt, Human
cuggguucacugca

SEQ ID NO: 2227275 - RNA, 14 nt, Human
cuggguucccuuuc

SEQ ID NO: 2227276 - RNA, 22 nt, Human
cuggguuccagcaauucuccug

SEQ ID NO: 2227277 - RNA, 20 nt, Human
cuggguucccuuuccuucca

SEQ ID NO: 2227278 - RNA, 16 nt, Human
cuggguucccuuuccu

SEQ ID NO: 2227279 - RNA, 21 nt, Human
cuggguucccuuuccuuccau

SEQ ID NO: 2227280 - RNA, 13 nt, Human
cuggguuccugca

SEQ ID NO: 2227281 - RNA, 22 nt, Human
cuggguuccuuccucugagccu

SEQ ID NO: 2227282 - RNA, 18 nt, Human
cuggguuccuuccucuga

SEQ ID NO: 2227283 - RNA, 23 nt, Human
cuggguuccuuccucugagccuu

SEQ ID NO: 2227284 - RNA, 15 nt, Human
cuggugacuuuccuc

SEQ ID NO: 2227285 - RNA, 20 nt, Human
cuggugacuuuccucuuugg

SEQ ID NO: 2227286 - RNA, 21 nt, Human
cuggugacuuuccucuuuggu

SEQ ID NO: 2227287 - RNA, 20 nt, Human
cugggacccuuuccuuccuu

SEQ ID NO: 2227288 - RNA, 19 nt, Human
cugggacccuuuccuuccu

SEQ ID NO: 2227289 - RNA, 15 nt, Human
cugggacccuuuccu

SEQ ID NO: 2227290 - RNA, 23 nt, Human
cugggacccuuuccuuccuuccc

SEQ ID NO: 2227291 - RNA, 15 nt, Human
cugggaccuccccug

SEQ ID NO: 2227292 - RNA, 16 nt, Human
cugggaccuccccuga

SEQ ID NO: 2227293 - RNA, 20 nt, Human
cugggaccuccccugaggcu

SEQ ID NO: 2227294 - RNA, 17 nt, Human
cugggaccugccaggca

SEQ ID NO: 2227295 - RNA, 18 nt, Human
cugggaccugccaggcag

SEQ ID NO: 2227296 - RNA, 19 nt, Human
cugggaccugccaggcagg

SEQ ID NO: 2227297 - RNA, 20 nt, Human
cugggaccugccaggcaggg

SEQ ID NO: 2227298 - RNA, 13 nt, Human
cugggaccuuuag

SEQ ID NO: 2227299 - RNA, 20 nt, Human
cugggaccuuuagugguggc

SEQ ID NO: 2227300 - RNA, 17 nt, Human
cugggacguggcucagc

SEQ ID NO: 2227301 - RNA, 16 nt, Human
cugggacguggcucag

SEQ ID NO: 2227302 - RNA, 15 nt, Human
cugggacguggcuca

SEQ ID NO: 2227303 - RNA, 12 nt, Human
cuggcagcucag

SEQ ID NO: 2227304 - RNA, 17 nt, Human
cuggagacuaaccccac

SEQ ID NO: 2227305 - RNA, 20 nt, Human
cuggagacuccuaggcagga

SEQ ID NO: 2227306 - RNA, 18 nt, Human
cuggagacuccuaggcag

SEQ ID NO: 2227307 - RNA, 19 nt, Human
cuggagacuccuaggcagg

SEQ ID NO: 2227308 - RNA, 13 nt, Human
cuggcagcucaga

SEQ ID NO: 2227309 - RNA, 14 nt, Human
cuggcagcucagag

SEQ ID NO: 2227310 - RNA, 16 nt, Human
cuggacugugugcuca

SEQ ID NO: 2227311 - RNA, 22 nt, Human
cuggagacagccccagagcagg

SEQ ID NO: 2227312 - RNA, 23 nt, Human
cuggagacagccccagagcaggg

SEQ ID NO: 2227313 - RNA, 20 nt, Human
cuggacugucauagaaauua

SEQ ID NO: 2227314 - RNA, 19 nt, Human
cuggacugucauagaaauu

SEQ ID NO: 2227315 - RNA, 19 nt, Human
cuggagaccagggagccuu

SEQ ID NO: 2227316 - RNA, 18 nt, Human
cuggagaccagggagccu

SEQ ID NO: 2227317 - RNA, 17 nt, Human
cuggagaccagggagcc

SEQ ID NO: 2227318 - RNA, 18 nt, Human
cuggagacgggugggcgg

SEQ ID NO: 2227319 - RNA, 21 nt, Human
cuggagacgggugggcggcug

SEQ ID NO: 2227320 - RNA, 18 nt, Human
cuggagaccaugcagagc

SEQ ID NO: 2227321 - RNA, 20 nt, Human
cuggagaccaugcagagcgc

SEQ ID NO: 2227322 - RNA, 21 nt, Human
cuggagaccaugcagagcgcc

SEQ ID NO: 2227323 - RNA, 23 nt, Human
cuggccccgccgccugguacuca

SEQ ID NO: 2227324 - RNA, 20 nt, Human
cuggccccuagaaucagccu

SEQ ID NO: 2227325 - RNA, 18 nt, Human
cuggccccuagaaucagc

SEQ ID NO: 2227326 - RNA, 17 nt, Human
cuggcagggugggaugg

SEQ ID NO: 2227327 - RNA, 13 nt, Human
cuggccccucagg

SEQ ID NO: 2227328 - RNA, 12 nt, Human
cuggccccgccg

SEQ ID NO: 2227329 - RNA, 14 nt, Human
cuggccccgccgcc

SEQ ID NO: 2227330 - RNA, 16 nt, Human
cuggccccgccgccug

SEQ ID NO: 2227331 - RNA, 22 nt, Human
cuggccccgccgccugguacuc

SEQ ID NO: 2227332 - RNA, 18 nt, Human
cuggcagggugggaugga

SEQ ID NO: 2227333 - RNA, 20 nt, Human
cuggcaggaugacccugcga

SEQ ID NO: 2227334 - RNA, 18 nt, Human
cuggcaggaugacccugc

SEQ ID NO: 2227335 - RNA, 21 nt, Human
cuggcagcucuggacagcccc

SEQ ID NO: 2227336 - RNA, 20 nt, Human
cuggcagcucuggacagccc

SEQ ID NO: 2227337 - RNA, 18 nt, Human
cuggcagcucuggacagc

SEQ ID NO: 2227338 - RNA, 17 nt, Human
cuggcagcucuggacag

SEQ ID NO: 2227339 - RNA, 15 nt, Human
cuggcagcucagaga

SEQ ID NO: 2227340 - RNA, 15 nt, Human
cuggagacuuagggc

SEQ ID NO: 2227341 - RNA, 23 nt, Human
cuggcagccucccauccagggcc

SEQ ID NO: 2227342 - RNA, 12 nt, Human
cuggcagcucug

SEQ ID NO: 2227343 - RNA, 18 nt, Human
cuggcagcucuccaguca

SEQ ID NO: 2227344 - RNA, 23 nt, Human
cuggcagcucuccagucaggagg

SEQ ID NO: 2227345 - RNA, 14 nt, Human
cuggcagcucucca

SEQ ID NO: 2227346 - RNA, 15 nt, Human
cuggcagcucuccag

SEQ ID NO: 2227347 - RNA, 16 nt, Human
cuggcagcucuccagu

SEQ ID NO: 2227348 - RNA, 17 nt, Human
cuggcagcucuccaguc

SEQ ID NO: 2227349 - RNA, 13 nt, Human
cuggcucaucucu

SEQ ID NO: 2227350 - RNA, 24 nt, Human
cuggcucauauuccugcagccugg

SEQ ID NO: 2227351 - RNA, 23 nt, Human
cuggcucauauuccugcagccug

SEQ ID NO: 2227352 - RNA, 22 nt, Human
cuggcucauauuccugcagccu

SEQ ID NO: 2227353 - RNA, 21 nt, Human
cuggcucauauuccugcagcc

SEQ ID NO: 2227354 - RNA, 20 nt, Human
cuggcucauauuccugcagc

SEQ ID NO: 2227355 - RNA, 19 nt, Human
cuggcucauauuccugcag

SEQ ID NO: 2227356 - RNA, 22 nt, Human
cuggccccucaccugggcaccu

SEQ ID NO: 2227357 - RNA, 15 nt, Human
cuggccccucaccug

SEQ ID NO: 2227358 - RNA, 13 nt, Human
cuggccccucacc

SEQ ID NO: 2227359 - RNA, 12 nt, Human
cuggccccucac

SEQ ID NO: 2227360 - RNA, 21 nt, Human
cuggcuccagaugcagggcag

SEQ ID NO: 2227361 - RNA, 20 nt, Human
cuggcuccagaugcagggca

SEQ ID NO: 2227362 - RNA, 14 nt, Human
cuggcuccagaugc

SEQ ID NO: 2227363 - RNA, 20 nt, Human
cuggcuccaaacccucgagg

SEQ ID NO: 2227364 - RNA, 19 nt, Human
cuggcuccaaacccucgag

SEQ ID NO: 2227365 - RNA, 17 nt, Human
cuggccccucagggucc

SEQ ID NO: 2227366 - RNA, 18 nt, Human
cuggccccucaggguccc

SEQ ID NO: 2227367 - RNA, 20 nt, Human
cuggccccucagggucccug

SEQ ID NO: 2227368 - RNA, 21 nt, Human
cuggccccucagggucccugg

SEQ ID NO: 2227369 - RNA, 15 nt, Human
cuggcucccacaggc

SEQ ID NO: 2227370 - RNA, 17 nt, Human
cuggcucccacaggcag

SEQ ID NO: 2227371 - RNA, 18 nt, Human
cuggcucccacaggcagc

SEQ ID NO: 2227372 - RNA, 19 nt, Human
cuggcucccacaggcagcu

SEQ ID NO: 2227373 - RNA, 20 nt, Human
cuggcucccacaggcagcuu

SEQ ID NO: 2227374 - RNA, 16 nt, Human
cuggcuccaggccagg

SEQ ID NO: 2227375 - RNA, 20 nt, Human
cuggcuccagcuggccggga

SEQ ID NO: 2227376 - RNA, 18 nt, Human
cuggcuccagcuggccgg

SEQ ID NO: 2227377 - RNA, 14 nt, Human
cuggcuccagcugg

SEQ ID NO: 2227378 - RNA, 13 nt, Human
cuggcuccagcug

SEQ ID NO: 2227379 - RNA, 23 nt, Human
cugggacacuuaacagaugcaau

SEQ ID NO: 2227380 - RNA, 19 nt, Human
cugggacacuuaacagaug

SEQ ID NO: 2227381 - RNA, 14 nt, Human
cugggacccuuucc

SEQ ID NO: 2227382 - RNA, 10 nt, Human
cugggacagg

SEQ ID NO: 2227383 - RNA, 12 nt, Human
cugggacacagu

SEQ ID NO: 2227384 - RNA, 13 nt, Human
cugggacacaguu

SEQ ID NO: 2227385 - RNA, 13 nt, Human
cugucgcccaguc

SEQ ID NO: 2227386 - RNA, 16 nt, Human
cugucgcccaggcugg

SEQ ID NO: 2227387 - RNA, 15 nt, Human
cugucgauguaggca

SEQ ID NO: 2227388 - RNA, 14 nt, Human
cugucgagacacuu

SEQ ID NO: 2227389 - RNA, 18 nt, Human
cugucgagacacuugccu

SEQ ID NO: 2227390 - RNA, 13 nt, Human
cugucgagacacu

SEQ ID NO: 2227391 - RNA, 13 nt, Human
cuguccugcuggu

SEQ ID NO: 2227392 - RNA, 18 nt, Human
cuguccugcuccacagug

SEQ ID NO: 2227393 - RNA, 19 nt, Human
cuguccugcuccacagugu

SEQ ID NO: 2227394 - RNA, 14 nt, Human
cuguccugcuccac

SEQ ID NO: 2227395 - RNA, 15 nt, Human
cuguccugcuccaca

SEQ ID NO: 2227396 - RNA, 16 nt, Human
cuguccugcuccacag

SEQ ID NO: 2227397 - RNA, 17 nt, Human
cuguccugcuccacagu

SEQ ID NO: 2227398 - RNA, 22 nt, Human
cugugaacuuggggaacaaggg

SEQ ID NO: 2227399 - RNA, 14 nt, Human
cugugaaggacccu

SEQ ID NO: 2227400 - RNA, 23 nt, Human
cugugaagcauucgagacagaac

SEQ ID NO: 2227401 - RNA, 21 nt, Human
cugugaagcauucgagacaga

SEQ ID NO: 2227402 - RNA, 15 nt, Human
cugugagacccccac

SEQ ID NO: 2227403 - RNA, 14 nt, Human
cugugaaguaagga

SEQ ID NO: 2227404 - RNA, 16 nt, Human
cugugaaguccuucac

SEQ ID NO: 2227405 - RNA, 18 nt, Human
cugugaaguccuucaccu

SEQ ID NO: 2227406 - RNA, 24 nt, Human
cugugaaguccuucaccucacuga

SEQ ID NO: 2227407 - RNA, 16 nt, Human
cugugaacuuggggaa

SEQ ID NO: 2227408 - RNA, 15 nt, Human
cugugaacuugggga

SEQ ID NO: 2227409 - RNA, 14 nt, Human
cugugaacuugggg

SEQ ID NO: 2227410 - RNA, 15 nt, Human
cugugaagagaacca

SEQ ID NO: 2227411 - RNA, 19 nt, Human
cugugagacccccacaccu

SEQ ID NO: 2227412 - RNA, 18 nt, Human
cugugagacccccacacc

SEQ ID NO: 2227413 - RNA, 17 nt, Human
cugugagacccccacac

SEQ ID NO: 2227414 - RNA, 16 nt, Human
cugugagacccccaca

SEQ ID NO: 2227415 - RNA, 23 nt, Human
cugugagacccccacaccucagu

SEQ ID NO: 2227416 - RNA, 20 nt, Human
cugugagacccccacaccuc

SEQ ID NO: 2227417 - RNA, 18 nt, Human
cugugagacucgagaacu

SEQ ID NO: 2227418 - RNA, 20 nt, Human
cugugagacucgagaacuuu

SEQ ID NO: 2227419 - RNA, 21 nt, Human
cugugagaugcuagaacuccc

SEQ ID NO: 2227420 - RNA, 16 nt, Human
cugugagaugcuagaa

SEQ ID NO: 2227421 - RNA, 14 nt, Human
cugugcucuggaca

SEQ ID NO: 2227422 - RNA, 14 nt, Human
cugugcucccuggu

SEQ ID NO: 2227423 - RNA, 19 nt, Human
cugugcucaggacucagaa

SEQ ID NO: 2227424 - RNA, 18 nt, Human
cugugcucaggacucaga

SEQ ID NO: 2227425 - RNA, 23 nt, Human
cugugcucaggacucagaagccu

SEQ ID NO: 2227426 - RNA, 22 nt, Human
cugugcucccugguucugauga

SEQ ID NO: 2227427 - RNA, 10 nt, Human
cugugcuccg

SEQ ID NO: 2227428 - RNA, 15 nt, Human
cugugcuccgugccu

SEQ ID NO: 2227429 - RNA, 17 nt, Human
cugugcuccgugccucc

SEQ ID NO: 2227430 - RNA, 18 nt, Human
cugugcuccgugccucca

SEQ ID NO: 2227431 - RNA, 19 nt, Human
cugugcuccgugccuccac

SEQ ID NO: 2227432 - RNA, 15 nt, Human
cugguuuggaaugcu

SEQ ID NO: 2227433 - RNA, 21 nt, Human
cugguuugacuccgcuggagg

SEQ ID NO: 2227434 - RNA, 17 nt, Human
cugguuuggggcgaggc

SEQ ID NO: 2227435 - RNA, 22 nt, Human
cugguuuccugcccugggaggc

SEQ ID NO: 2227436 - RNA, 16 nt, Human
cugguuuccugcccug

SEQ ID NO: 2227437 - RNA, 21 nt, Human
cugguuuccugcccugggagg

SEQ ID NO: 2227438 - RNA, 18 nt, Human
cugguuuccugcccuggg

SEQ ID NO: 2227439 - RNA, 16 nt, Human
cugucacugcaggcac

SEQ ID NO: 2227440 - RNA, 16 nt, Human
cugucacccuccaccu

SEQ ID NO: 2227441 - RNA, 13 nt, Human
cugucacugcagg

SEQ ID NO: 2227442 - RNA, 23 nt, Human
cugucacucauugcugagccucu

SEQ ID NO: 2227443 - RNA, 22 nt, Human
cugucacucauugcugagccuc

SEQ ID NO: 2227444 - RNA, 19 nt, Human
cugucacuguuucucugcu

SEQ ID NO: 2227445 - RNA, 14 nt, Human
cugucacuguuucu

SEQ ID NO: 2227446 - RNA, 20 nt, Human
cugucacuguuucucugcug

SEQ ID NO: 2227447 - RNA, 12 nt, Human
cugucacuuugc

SEQ ID NO: 2227448 - RNA, 14 nt, Human
cugucacuuugcuc

SEQ ID NO: 2227449 - RNA, 15 nt, Human
cugucacuuugcucu

SEQ ID NO: 2227450 - RNA, 17 nt, Human
cugucacuuugcucugg

SEQ ID NO: 2227451 - RNA, 19 nt, Human
cugucacuuugcucugggu

SEQ ID NO: 2227452 - RNA, 18 nt, Human
cugucacuuugcucuggg

SEQ ID NO: 2227453 - RNA, 22 nt, Human
cugucagaugggaagacaugaa

SEQ ID NO: 2227454 - RNA, 21 nt, Human
cugucagaugggaagacauga

SEQ ID NO: 2227455 - RNA, 18 nt, Human
cugucagccauuccuguu

SEQ ID NO: 2227456 - RNA, 21 nt, Human
cugucagcuccccucggagaa

SEQ ID NO: 2227457 - RNA, 13 nt, Human
cugucagccgggc

SEQ ID NO: 2227458 - RNA, 16 nt, Human
cugucagccgggcccu

SEQ ID NO: 2227459 - RNA, 17 nt, Human
cugucagccgggcccug

SEQ ID NO: 2227460 - RNA, 18 nt, Human
cugucagccgggcccuga

SEQ ID NO: 2227461 - RNA, 22 nt, Human
cugucagccgggcccugaguaa

SEQ ID NO: 2227462 - RNA, 23 nt, Human
cugucagccgggcccugaguaau

SEQ ID NO: 2227463 - RNA, 18 nt, Human
cuguccugaccugucuca

SEQ ID NO: 2227464 - RNA, 20 nt, Human
cuguccugacuucaggggcu

SEQ ID NO: 2227465 - RNA, 17 nt, Human
cuguccugauggucagc

SEQ ID NO: 2227466 - RNA, 19 nt, Human
cuguccugauggucagcuc

SEQ ID NO: 2227467 - RNA, 17 nt, Human
cugucagcgcagguuua

SEQ ID NO: 2227468 - RNA, 12 nt, Human
cuguccugccua

SEQ ID NO: 2227469 - RNA, 13 nt, Human
cuguccugcucca

SEQ ID NO: 2227470 - RNA, 20 nt, Human
cuguccugauggucagcucc

SEQ ID NO: 2227471 - RNA, 21 nt, Human
cuguccugauggucagcuccc

SEQ ID NO: 2227472 - RNA, 22 nt, Human
cuguccugauggucagcucccu

SEQ ID NO: 2227473 - RNA, 17 nt, Human
cugucauuugagcaggg

SEQ ID NO: 2227474 - RNA, 18 nt, Human
cugucauuugagcagggc

SEQ ID NO: 2227475 - RNA, 16 nt, Human
cugucauuugagcagg

SEQ ID NO: 2227476 - RNA, 23 nt, Human
cugucagcuccccucggagaaga

SEQ ID NO: 2227477 - RNA, 15 nt, Human
cuguaaaaugaaauu

SEQ ID NO: 2227478 - RNA, 23 nt, Human
cuguaaaauauacuuaaauggaa

SEQ ID NO: 2227479 - RNA, 22 nt, Human
cuguaaaaucuuucuuucuuag

SEQ ID NO: 2227480 - RNA, 10 nt, Human
cuguaaaauc

SEQ ID NO: 2227481 - RNA, 11 nt, Human
cuguaaaaucu

SEQ ID NO: 2227482 - RNA, 16 nt, Human
cuguaaaaugaaauua

SEQ ID NO: 2227483 - RNA, 22 nt, Human
cuguaaaaugcaugauuuugua

SEQ ID NO: 2227484 - RNA, 16 nt, Human
cugguuuggggcgagg

SEQ ID NO: 2227485 - RNA, 17 nt, Human
cuguaaaauaaaagguc

SEQ ID NO: 2227486 - RNA, 22 nt, Human
cugguuugacuccgcuggaggu

SEQ ID NO: 2227487 - RNA, 17 nt, Human
cugguuuggaaugcuuc

SEQ ID NO: 2227488 - RNA, 22 nt, Human
cuguacuugcucuugaugccug

SEQ ID NO: 2227489 - RNA, 21 nt, Human
cuguacuugcucuugaugccu

SEQ ID NO: 2227490 - RNA, 22 nt, Human
cuguaaaccccuuuaguggcuu

SEQ ID NO: 2227491 - RNA, 20 nt, Human
cuguaaaccucucgagggca

SEQ ID NO: 2227492 - RNA, 19 nt, Human
cuguaaacucaaaacuuaa

SEQ ID NO: 2227493 - RNA, 23 nt, Human
cuguacuugcucuugaugccugg

SEQ ID NO: 2227494 - RNA, 14 nt, Human
cugucaccaagcuc

SEQ ID NO: 2227495 - RNA, 18 nt, Human
cuguagggcuggaccuau

SEQ ID NO: 2227496 - RNA, 23 nt, Human
cugucaccaagcucacaguuccu

SEQ ID NO: 2227497 - RNA, 21 nt, Human
cuguagggagggcggcagggg

SEQ ID NO: 2227498 - RNA, 14 nt, Human
cuguagggcuggac

SEQ ID NO: 2227499 - RNA, 15 nt, Human
cuguagggcuggacc

SEQ ID NO: 2227500 - RNA, 16 nt, Human
cuguagggcuggaccu

SEQ ID NO: 2227501 - RNA, 17 nt, Human
cuguagggcuggaccua

SEQ ID NO: 2227502 - RNA, 21 nt, Human
cuguagggcuggaccuauguc

SEQ ID NO: 2227503 - RNA, 21 nt, Human
cugucacucauugcugagccu

SEQ ID NO: 2227504 - RNA, 14 nt, Human
cugucacucauugc

SEQ ID NO: 2227505 - RNA, 13 nt, Human
cugucacccaggc

SEQ ID NO: 2227506 - RNA, 20 nt, Human
cugucacccaggcuggagua

SEQ ID NO: 2227507 - RNA, 14 nt, Human
cugucacccuccac

SEQ ID NO: 2227508 - RNA, 18 nt, Human
cugucacccuccaccucu

SEQ ID NO: 2227509 - RNA, 21 nt, Human
cuguaggaagguuaauguuca

SEQ ID NO: 2227510 - RNA, 14 nt, Human
cuguagggaacucu

SEQ ID NO: 2227511 - RNA, 20 nt, Human
cuguagggagggcggcaggg

SEQ ID NO: 2227512 - RNA, 19 nt, Human
cuguaggacucgcagucag

SEQ ID NO: 2227513 - RNA, 11 nt, Human
cugcugacagu

SEQ ID NO: 2227514 - RNA, 23 nt, Human
cugcugaauuuucacaugaacau

SEQ ID NO: 2227515 - RNA, 21 nt, Human
cugcugacagacacaggcccg

SEQ ID NO: 2227516 - RNA, 23 nt, Human
cugcugacagacacaggcccggc

SEQ ID NO: 2227517 - RNA, 15 nt, Human
cugcugacagacaca

SEQ ID NO: 2227518 - RNA, 18 nt, Human
cugcugacagacacaggc

SEQ ID NO: 2227519 - RNA, 19 nt, Human
cugcugacagacacaggcc

SEQ ID NO: 2227520 - RNA, 20 nt, Human
cugcugacagacacaggccc

SEQ ID NO: 2227521 - RNA, 13 nt, Human
cugcuuaacuuca

SEQ ID NO: 2227522 - RNA, 22 nt, Human
cugcuuuuuaaagaaugcucuu

SEQ ID NO: 2227523 - RNA, 17 nt, Human
cugcuuuuuauggccug

SEQ ID NO: 2227524 - RNA, 14 nt, Human
cugcuucagccucc

SEQ ID NO: 2227525 - RNA, 16 nt, Human
cugcuucagccucccg

SEQ ID NO: 2227526 - RNA, 13 nt, Human
cugcuucagccuc

SEQ ID NO: 2227527 - RNA, 17 nt, Human
cugcuuaacuucacaua

SEQ ID NO: 2227528 - RNA, 15 nt, Human
cugcuuaacuucaca

SEQ ID NO: 2227529 - RNA, 13 nt, Human
cuggacugggagg

SEQ ID NO: 2227530 - RNA, 14 nt, Human
cuggacugggaggu

SEQ ID NO: 2227531 - RNA, 16 nt, Human
cuggacugggagguag

SEQ ID NO: 2227532 - RNA, 17 nt, Human
cuggacugggagguaga

SEQ ID NO: 2227533 - RNA, 18 nt, Human
cuggacugucauagaaau

SEQ ID NO: 2227534 - RNA, 13 nt, Human
cuggacugugugc

SEQ ID NO: 2227535 - RNA, 21 nt, Human
cuggacuggcuagaguccuca

SEQ ID NO: 2227536 - RNA, 15 nt, Human
cuggacuggcuagag

SEQ ID NO: 2227537 - RNA, 19 nt, Human
cuggaacugucucucauga

SEQ ID NO: 2227538 - RNA, 17 nt, Human
cuggaacucagugugac

SEQ ID NO: 2227539 - RNA, 21 nt, Human
cuggaacucagugugacuccu

SEQ ID NO: 2227540 - RNA, 18 nt, Human
cuggaacugucucucaug

SEQ ID NO: 2227541 - RNA, 16 nt, Human
cuggaacugucucuca

SEQ ID NO: 2227542 - RNA, 23 nt, Human
cuggaaccucagccuggccagac

SEQ ID NO: 2227543 - RNA, 22 nt, Human
cuggaaccucagccuggccaga

SEQ ID NO: 2227544 - RNA, 20 nt, Human
cuggaaccucagccuggcca

SEQ ID NO: 2227545 - RNA, 18 nt, Human
cuggaaccucagccuggc

SEQ ID NO: 2227546 - RNA, 17 nt, Human
cuggaaccucagccugg

SEQ ID NO: 2227547 - RNA, 16 nt, Human
cuggaaccucagccug

SEQ ID NO: 2227548 - RNA, 15 nt, Human
cuggaaccucagccu

SEQ ID NO: 2227549 - RNA, 12 nt, Human
cuggaaccucag

SEQ ID NO: 2227550 - RNA, 22 nt, Human
cuggaacccagacucagacauu

SEQ ID NO: 2227551 - RNA, 19 nt, Human
cuggaacccagacucagac

SEQ ID NO: 2227552 - RNA, 18 nt, Human
cuggaacccagacucaga

SEQ ID NO: 2227553 - RNA, 16 nt, Human
cuggaacccagacuca

SEQ ID NO: 2227554 - RNA, 14 nt, Human
cuggaacccagacu

SEQ ID NO: 2227555 - RNA, 23 nt, Human
cuggaaauaucaguuacucagcc

SEQ ID NO: 2227556 - RNA, 17 nt, Human
cuggaacacuaaugagg

SEQ ID NO: 2227557 - RNA, 13 nt, Human
cuggaacccagac

SEQ ID NO: 2227558 - RNA, 16 nt, Human
cuggaaccaucagaaa

SEQ ID NO: 2227559 - RNA, 15 nt, Human
cuggaaccaucagaa

SEQ ID NO: 2227560 - RNA, 21 nt, Human
cuggaacagauucacacuguc

SEQ ID NO: 2227561 - RNA, 14 nt, Human
cuggaacagauuca

SEQ ID NO: 2227562 - RNA, 20 nt, Human
cuggaacaucaucaaggcac

SEQ ID NO: 2227563 - RNA, 16 nt, Human
cuggaaauauuaagaa

SEQ ID NO: 2227564 - RNA, 21 nt, Human
cuggaaaucaggguuaguauu

SEQ ID NO: 2227565 - RNA, 18 nt, Human
cugcuuuuuauggccugu

SEQ ID NO: 2227566 - RNA, 14 nt, Human
cugcccugugggcc

SEQ ID NO: 2227567 - RNA, 12 nt, Human
cugccugggcug

SEQ ID NO: 2227568 - RNA, 23 nt, Human
cugccugggaucccucauccuca

SEQ ID NO: 2227569 - RNA, 20 nt, Human
cugccugguauauccaaaag

SEQ ID NO: 2227570 - RNA, 21 nt, Human
cugccugggcuguuggcacuc

SEQ ID NO: 2227571 - RNA, 24 nt, Human
cugccugggcuguuggcacucaca

SEQ ID NO: 2227572 - RNA, 19 nt, Human
cugccuggggcgggccccu

SEQ ID NO: 2227573 - RNA, 22 nt, Human
cugccuggggcgggccccucau

SEQ ID NO: 2227574 - RNA, 15 nt, Human
cugccugggcuguug

SEQ ID NO: 2227575 - RNA, 16 nt, Human
cugccugggcuguugg

SEQ ID NO: 2227576 - RNA, 17 nt, Human
cugccugggcuguuggc

SEQ ID NO: 2227577 - RNA, 18 nt, Human
cugccugggcuguuggca

SEQ ID NO: 2227578 - RNA, 19 nt, Human
cugccugggcuguuggcac

SEQ ID NO: 2227579 - RNA, 20 nt, Human
cugccugggcuguuggcacu

SEQ ID NO: 2227580 - RNA, 12 nt, Human
cugccuguggcg

SEQ ID NO: 2227581 - RNA, 22 nt, Human
cugccuguggcgccgucuccag

SEQ ID NO: 2227582 - RNA, 23 nt, Human
cugccuguggcgccgucuccagg

SEQ ID NO: 2227583 - RNA, 17 nt, Human
cugccuguuauaacucu

SEQ ID NO: 2227584 - RNA, 18 nt, Human
cugccuguuauaacucug

SEQ ID NO: 2227585 - RNA, 20 nt, Human
cugccuguuauaacucugca

SEQ ID NO: 2227586 - RNA, 14 nt, Human
cugccuguucagcu

SEQ ID NO: 2227587 - RNA, 15 nt, Human
cugccuguucagcuc

SEQ ID NO: 2227588 - RNA, 15 nt, Human
cugccucgaacuggc

SEQ ID NO: 2227589 - RNA, 17 nt, Human
cugccucgaacuggcug

SEQ ID NO: 2227590 - RNA, 18 nt, Human
cugccucgaacuggcugc

SEQ ID NO: 2227591 - RNA, 22 nt, Human
cugccugggaucccucauccuc

SEQ ID NO: 2227592 - RNA, 17 nt, Human
cugcuacccagaaauca

SEQ ID NO: 2227593 - RNA, 16 nt, Human
cugcuacacauacagg

SEQ ID NO: 2227594 - RNA, 15 nt, Human
cugcuacagagcaga

SEQ ID NO: 2227595 - RNA, 12 nt, Human
cugcuaccucac

SEQ ID NO: 2227596 - RNA, 19 nt, Human
cugcuacccucccugcugu

SEQ ID NO: 2227597 - RNA, 20 nt, Human
cugcuacccucccugcuguc

SEQ ID NO: 2227598 - RNA, 13 nt, Human
cugcuacccuccc

SEQ ID NO: 2227599 - RNA, 16 nt, Human
cugcuacccucccugc

SEQ ID NO: 2227600 - RNA, 17 nt, Human
cugcuacccucccugcu

SEQ ID NO: 2227601 - RNA, 18 nt, Human
cugcuacccucccugcug

SEQ ID NO: 2227602 - RNA, 14 nt, Human
cugcuaccucacug

SEQ ID NO: 2227603 - RNA, 13 nt, Human
cugcuaccucacu

SEQ ID NO: 2227604 - RNA, 15 nt, Human
cugcuaccucacugg

SEQ ID NO: 2227605 - RNA, 17 nt, Human
cugcuaccucacugggg

SEQ ID NO: 2227606 - RNA, 12 nt, Human
cugcucagcccu

SEQ ID NO: 2227607 - RNA, 13 nt, Human
cugcucagcccug

SEQ ID NO: 2227608 - RNA, 13 nt, Human
cugcucagcagcu

SEQ ID NO: 2227609 - RNA, 13 nt, Human
cugcucagacaga

SEQ ID NO: 2227610 - RNA, 13 nt, Human
cugcucagcuucu

SEQ ID NO: 2227611 - RNA, 21 nt, Human
cugcucagcccuggaggugcc

SEQ ID NO: 2227612 - RNA, 22 nt, Human
cugcucagcucugggccauucu

SEQ ID NO: 2227613 - RNA, 16 nt, Human
cugcucagcucugggc

SEQ ID NO: 2227614 - RNA, 14 nt, Human
cugcucagcucugg

SEQ ID NO: 2227615 - RNA, 13 nt, Human
cugcucagcucug

SEQ ID NO: 2227616 - RNA, 17 nt, Human
cugcucagcccuggagg

SEQ ID NO: 2227617 - RNA, 18 nt, Human
cugcucagcccuggaggu

SEQ ID NO: 2227618 - RNA, 14 nt, Human
cugcucagcccugg

SEQ ID NO: 2227619 - RNA, 15 nt, Human
cugcucagcccugga

SEQ ID NO: 2227620 - RNA, 16 nt, Human
cugcucagcccuggag

SEQ ID NO: 2227621 - RNA, 23 nt, Human
cugcuacaaauacucuuaggaag

SEQ ID NO: 2227622 - RNA, 20 nt, Human
cugcuacaaagaagacaugu

SEQ ID NO: 2227623 - RNA, 22 nt, Human
cugcuacaaagaagacauguuu

SEQ ID NO: 2227624 - RNA, 15 nt, Human
cugcuacaaagaaga

SEQ ID NO: 2227625 - RNA, 17 nt, Human
cugcuacaaagaagaca

SEQ ID NO: 2227626 - RNA, 18 nt, Human
cugcuacaaagaagacau

SEQ ID NO: 2227627 - RNA, 19 nt, Human
cugcuacaaagaagacaug

SEQ ID NO: 2227628 - RNA, 18 nt, Human
cugcuaaucuucagggca

SEQ ID NO: 2227629 - RNA, 14 nt, Human
cugcuaaucuucag

SEQ ID NO: 2227630 - RNA, 12 nt, Human
cugcuacaaaga

SEQ ID NO: 2227631 - RNA, 16 nt, Human
cugcuaauaaaaccca

SEQ ID NO: 2227632 - RNA, 23 nt, Human
cugcuaaguauuucccagcacau

SEQ ID NO: 2227633 - RNA, 19 nt, Human
cugcuaaguauuucccagc

SEQ ID NO: 2227634 - RNA, 21 nt, Human
cugcuaaguauuucccagcac

SEQ ID NO: 2227635 - RNA, 21 nt, Human
cugccuguuauaacucugcac

SEQ ID NO: 2227636 - RNA, 22 nt, Human
cugccuguuauaacucugcacu

SEQ ID NO: 2227637 - RNA, 16 nt, Human
cugcuaauuccccaga

SEQ ID NO: 2227638 - RNA, 16 nt, Human
cugccuguugggccag

SEQ ID NO: 2227639 - RNA, 14 nt, Human
cugccuguugggcc

SEQ ID NO: 2227640 - RNA, 18 nt, Human
cugccuguugggccagga

SEQ ID NO: 2227641 - RNA, 19 nt, Human
cugccuguugggccaggag

SEQ ID NO: 2227642 - RNA, 18 nt, Human
cugaccuuugucaucuuu

SEQ ID NO: 2227643 - RNA, 22 nt, Human
cugaccuugaacuccugggcuc

SEQ ID NO: 2227644 - RNA, 21 nt, Human
cugaccuugaacuccugggcu

SEQ ID NO: 2227645 - RNA, 21 nt, Human
cugagacucagacaggaaagg

SEQ ID NO: 2227646 - RNA, 20 nt, Human
cugagacucagacaggaaag

SEQ ID NO: 2227647 - RNA, 17 nt, Human
cugagacucagacagga

SEQ ID NO: 2227648 - RNA, 14 nt, Human
cugagacucagaca

SEQ ID NO: 2227649 - RNA, 19 nt, Human
cugagacuccggggagcgc

SEQ ID NO: 2227650 - RNA, 17 nt, Human
cugagacucgcgacaau

SEQ ID NO: 2227651 - RNA, 19 nt, Human
cugagacucgcgacaaugc

SEQ ID NO: 2227652 - RNA, 23 nt, Human
cugagacuccggggagcgcccgc

SEQ ID NO: 2227653 - RNA, 20 nt, Human
cugagacucgcgacaaugca

SEQ ID NO: 2227654 - RNA, 14 nt, Human
cugcauuucugagu

SEQ ID NO: 2227655 - RNA, 9 nt, Human
cugcauuuu

SEQ ID NO: 2227656 - RNA, 20 nt, Human
cugcauuuuaauuuuaacca

SEQ ID NO: 2227657 - RNA, 21 nt, Human
cugcauuuuaauuuuaaccaa

SEQ ID NO: 2227658 - RNA, 22 nt, Human
cugcauuuuaauuuuaaccaaa

SEQ ID NO: 2227659 - RNA, 19 nt, Human
cugcauuuuauucuggaug

SEQ ID NO: 2227660 - RNA, 14 nt, Human
cugcauuuugcuau

SEQ ID NO: 2227661 - RNA, 20 nt, Human
cugcauuuuauucuggaugg

SEQ ID NO: 2227662 - RNA, 21 nt, Human
cugcauuuugcuauuguaaau

SEQ ID NO: 2227663 - RNA, 18 nt, Human
cugcauuuucaccccacc

SEQ ID NO: 2227664 - RNA, 17 nt, Human
cugcauuuucaccccac

SEQ ID NO: 2227665 - RNA, 14 nt, Human
cugcauuugugaaa

SEQ ID NO: 2227666 - RNA, 15 nt, Human
cugcauuugugaaau

SEQ ID NO: 2227667 - RNA, 17 nt, Human
cugcauuugugaaauga

SEQ ID NO: 2227668 - RNA, 22 nt, Human
cugcauuugugaaaugauggug

SEQ ID NO: 2227669 - RNA, 18 nt, Human
cugcauuuuuagaccauu

SEQ ID NO: 2227670 - RNA, 16 nt, Human
cugccaaaaugcucua

SEQ ID NO: 2227671 - RNA, 15 nt, Human
cugccaaaaugcucu

SEQ ID NO: 2227672 - RNA, 14 nt, Human
cugccaaaggaugu

SEQ ID NO: 2227673 - RNA, 16 nt, Human
cugccaaaggauguga

SEQ ID NO: 2227674 - RNA, 18 nt, Human
cugccaaaggaugugaua

SEQ ID NO: 2227675 - RNA, 19 nt, Human
cugccaaaggaugugauau

SEQ ID NO: 2227676 - RNA, 22 nt, Human
cugccaaaggaugugauauaua

SEQ ID NO: 2227677 - RNA, 21 nt, Human
cugccaaagggaaauaucauu

SEQ ID NO: 2227678 - RNA, 20 nt, Human
cugccaaauuuuggccaaag

SEQ ID NO: 2227679 - RNA, 22 nt, Human
cugccaaaaugcucuagugccu

SEQ ID NO: 2227680 - RNA, 15 nt, Human
cugccaaccauaccu

SEQ ID NO: 2227681 - RNA, 21 nt, Human
cugccaaccauaccuuccuuc

SEQ ID NO: 2227682 - RNA, 22 nt, Human
cugccaaccauaccuuccuucc

SEQ ID NO: 2227683 - RNA, 23 nt, Human
cugccaaccauaccuuccuuccc

SEQ ID NO: 2227684 - RNA, 21 nt, Human
cugccaacuucuucagagcug

SEQ ID NO: 2227685 - RNA, 15 nt, Human
cugccaaggccagag

SEQ ID NO: 2227686 - RNA, 22 nt, Human
cugccaacuucuucagagcuga

SEQ ID NO: 2227687 - RNA, 22 nt, Human
cugccaaggccagaguggccug

SEQ ID NO: 2227688 - RNA, 21 nt, Human
cugccaaggccagaguggccu

SEQ ID NO: 2227689 - RNA, 18 nt, Human
cugccaaggccagagugg

SEQ ID NO: 2227690 - RNA, 15 nt, Human
cugccaaugggagcu

SEQ ID NO: 2227691 - RNA, 17 nt, Human
cugccaaugggagcuca

SEQ ID NO: 2227692 - RNA, 20 nt, Human
cugcauuaccgcguuguaaa

SEQ ID NO: 2227693 - RNA, 21 nt, Human
cugcauuaccgcguuguaaaa

SEQ ID NO: 2227694 - RNA, 23 nt, Human
cugcauuaccgcguuguaaaaua

SEQ ID NO: 2227695 - RNA, 15 nt, Human
cugcauuagaaauua

SEQ ID NO: 2227696 - RNA, 22 nt, Human
cugcauucacccagacagcucc

SEQ ID NO: 2227697 - RNA, 21 nt, Human
cugcauucacccagacagcuc

SEQ ID NO: 2227698 - RNA, 20 nt, Human
cugcauucacccagacagcu

SEQ ID NO: 2227699 - RNA, 13 nt, Human
cugcauguuacau

SEQ ID NO: 2227700 - RNA, 15 nt, Human
cugcauguuugugau

SEQ ID NO: 2227701 - RNA, 13 nt, Human
cugcauuugugaa

SEQ ID NO: 2227702 - RNA, 18 nt, Human
cugcauuucgguggcuag

SEQ ID NO: 2227703 - RNA, 13 nt, Human
cugcauuucugag

SEQ ID NO: 2227704 - RNA, 17 nt, Human
cugcauuucgguggcua

SEQ ID NO: 2227705 - RNA, 22 nt, Human
cugcauuuaaaagauacaguua

SEQ ID NO: 2227706 - RNA, 20 nt, Human
cugcauuuaaaagauacagu

SEQ ID NO: 2227707 - RNA, 17 nt, Human
cugcauugagaacugca

SEQ ID NO: 2227708 - RNA, 19 nt, Human
cugcauucugccgugugcc

SEQ ID NO: 2227709 - RNA, 20 nt, Human
cugcauucaggaucaaaccc

SEQ ID NO: 2227710 - RNA, 14 nt, Human
cugcauucuuucug

SEQ ID NO: 2227711 - RNA, 15 nt, Human
cugcauucuuucugu

SEQ ID NO: 2227712 - RNA, 16 nt, Human
cugcauucuuucugua

SEQ ID NO: 2227713 - RNA, 20 nt, Human
cugcccuggugcugccacac

SEQ ID NO: 2227714 - RNA, 21 nt, Human
cugcccuggugcugccacacu

SEQ ID NO: 2227715 - RNA, 23 nt, Human
cugcccugguuuccugcccuggg

SEQ ID NO: 2227716 - RNA, 22 nt, Human
cugcccugguuuccugcccugg

SEQ ID NO: 2227717 - RNA, 21 nt, Human
cugcccuguaccccagcacuu

SEQ ID NO: 2227718 - RNA, 13 nt, Human
cugcccuguaccc

SEQ ID NO: 2227719 - RNA, 12 nt, Human
cugcccugugag

SEQ ID NO: 2227720 - RNA, 13 nt, Human
cugcccugugagu

SEQ ID NO: 2227721 - RNA, 15 nt, Human
cugcccugugggccc

SEQ ID NO: 2227722 - RNA, 16 nt, Human
cugcccugugggcccc

SEQ ID NO: 2227723 - RNA, 18 nt, Human
cugcccugugggccccca

SEQ ID NO: 2227724 - RNA, 17 nt, Human
cugcccuggugcugcca

SEQ ID NO: 2227725 - RNA, 16 nt, Human
cugcccuggugcugcc

SEQ ID NO: 2227726 - RNA, 18 nt, Human
cugcccuggugcugccac

SEQ ID NO: 2227727 - RNA, 19 nt, Human
cugcccuggugcugccaca

SEQ ID NO: 2227728 - RNA, 15 nt, Human
cugccccucccugcu

SEQ ID NO: 2227729 - RNA, 22 nt, Human
cugccccucccccaacccccac

SEQ ID NO: 2227730 - RNA, 14 nt, Human
cugccccuccccca

SEQ ID NO: 2227731 - RNA, 13 nt, Human
cugccccuccccc

SEQ ID NO: 2227732 - RNA, 16 nt, Human
cugccccucccagaac

SEQ ID NO: 2227733 - RNA, 15 nt, Human
cugccccucccagaa

SEQ ID NO: 2227734 - RNA, 14 nt, Human
cugccccucccaga

SEQ ID NO: 2227735 - RNA, 13 nt, Human
cugccccucccag

SEQ ID NO: 2227736 - RNA, 11 nt, Human
cugccccuccc

SEQ ID NO: 2227737 - RNA, 19 nt, Human
cugcccccucugcccugcg

SEQ ID NO: 2227738 - RNA, 18 nt, Human
cugcccccucugcccugc

SEQ ID NO: 2227739 - RNA, 17 nt, Human
cugcccccucugcccug

SEQ ID NO: 2227740 - RNA, 16 nt, Human
cugcccccucugcccu

SEQ ID NO: 2227741 - RNA, 14 nt, Human
cugccccucaacuc

SEQ ID NO: 2227742 - RNA, 22 nt, Human
cugccccucaacucuccuccag

SEQ ID NO: 2227743 - RNA, 19 nt, Human
cugccccagggcucccggc

SEQ ID NO: 2227744 - RNA, 13 nt, Human
cugccccaggccu

SEQ ID NO: 2227745 - RNA, 14 nt, Human
cugccccaggccug

SEQ ID NO: 2227746 - RNA, 21 nt, Human
cugccccauccuccagcaggg

SEQ ID NO: 2227747 - RNA, 18 nt, Human
cugccccauccuccagca

SEQ ID NO: 2227748 - RNA, 17 nt, Human
cugccccauccuccagc

SEQ ID NO: 2227749 - RNA, 16 nt, Human
cugccccauccuccag

SEQ ID NO: 2227750 - RNA, 13 nt, Human
cugccccauccuc

SEQ ID NO: 2227751 - RNA, 15 nt, Human
cugccccaggccuga

SEQ ID NO: 2227752 - RNA, 22 nt, Human
cugccccauccuccagcaggga

SEQ ID NO: 2227753 - RNA, 15 nt, Human
cugcccccucugccc

SEQ ID NO: 2227754 - RNA, 14 nt, Human
cugcccccucugcc

SEQ ID NO: 2227755 - RNA, 16 nt, Human
cugccccagcucuggc

SEQ ID NO: 2227756 - RNA, 21 nt, Human
cugccaggcccccaagccugc

SEQ ID NO: 2227757 - RNA, 18 nt, Human
cugccaggcccccaagcc

SEQ ID NO: 2227758 - RNA, 23 nt, Human
cugccaucauguuuacagaggac

SEQ ID NO: 2227759 - RNA, 19 nt, Human
cugccccagcucuggcuuc

SEQ ID NO: 2227760 - RNA, 18 nt, Human
cugccccagcucuggcuu

SEQ ID NO: 2227761 - RNA, 12 nt, Human
cugccccaggcc

SEQ ID NO: 2227762 - RNA, 12 nt, Human
cugccauccagg

SEQ ID NO: 2227763 - RNA, 22 nt, Human
cugccaucauguuuacagagga

SEQ ID NO: 2227764 - RNA, 17 nt, Human
cugccaucauguuuaca

SEQ ID NO: 2227765 - RNA, 22 nt, Human
cugccaggcccccaagccugca

SEQ ID NO: 2227766 - RNA, 13 nt, Human
cugccaggccccc

SEQ ID NO: 2227767 - RNA, 23 nt, Human
cugccaaggccagaguggccugg

SEQ ID NO: 2227768 - RNA, 11 nt, Human
cugccagggac

SEQ ID NO: 2227769 - RNA, 12 nt, Human
cugccagggaca

SEQ ID NO: 2227770 - RNA, 15 nt, Human
cugccagggacagag

SEQ ID NO: 2227771 - RNA, 20 nt, Human
cugccauauucuguuggcca

SEQ ID NO: 2227772 - RNA, 21 nt, Human
cugccauauucuguuggccag

SEQ ID NO: 2227773 - RNA, 22 nt, Human
cugccauauucuguuggccagu

SEQ ID NO: 2227774 - RNA, 23 nt, Human
cugccauauucuguuggccagug

SEQ ID NO: 2227775 - RNA, 13 nt, Human
cugacccuguaua

SEQ ID NO: 2227776 - RNA, 15 nt, Human
cugacccuguauaua

SEQ ID NO: 2227777 - RNA, 18 nt, Human
cugacccuguauauagcc

SEQ ID NO: 2227778 - RNA, 19 nt, Human
cugacccuguauauagccc

SEQ ID NO: 2227779 - RNA, 20 nt, Human
cugacccuguauauagccca

SEQ ID NO: 2227780 - RNA, 21 nt, Human
cugacccuguauauagcccag

SEQ ID NO: 2227781 - RNA, 22 nt, Human
cugacccuguauauagcccagc

SEQ ID NO: 2227782 - RNA, 13 nt, Human
cugacccugugga

SEQ ID NO: 2227783 - RNA, 12 nt, Human
cugacccuguau

SEQ ID NO: 2227784 - RNA, 23 nt, Human
cugacccugcuucaaauauuucc

SEQ ID NO: 2227785 - RNA, 18 nt, Human
cugacccaugcugcccug

SEQ ID NO: 2227786 - RNA, 17 nt, Human
cugacccaugcugcccu

SEQ ID NO: 2227787 - RNA, 19 nt, Human
cugacccaugcugcccugu

SEQ ID NO: 2227788 - RNA, 20 nt, Human
cugacccaugcugcccugug

SEQ ID NO: 2227789 - RNA, 16 nt, Human
cugaccuccacagcuu

SEQ ID NO: 2227790 - RNA, 11 nt, Human
cugaccuccca

SEQ ID NO: 2227791 - RNA, 12 nt, Human
cugaccucccag

SEQ ID NO: 2227792 - RNA, 13 nt, Human
cugaccucccagc

SEQ ID NO: 2227793 - RNA, 14 nt, Human
cugaccucccagcc

SEQ ID NO: 2227794 - RNA, 16 nt, Human
cugaccucccagcccu

SEQ ID NO: 2227795 - RNA, 17 nt, Human
cugaccucccagcccua

SEQ ID NO: 2227796 - RNA, 18 nt, Human
cugaccucccagcccuau

SEQ ID NO: 2227797 - RNA, 22 nt, Human
cugaccucccagcccuauggau

SEQ ID NO: 2227798 - RNA, 23 nt, Human
cugaccucccagcccuauggaug

SEQ ID NO: 2227799 - RNA, 18 nt, Human
cugaccucccucuaauuu

SEQ ID NO: 2227800 - RNA, 20 nt, Human
cugaccucccucuaauuuau

SEQ ID NO: 2227801 - RNA, 20 nt, Human
cugaccgaaacagcgcuggg

SEQ ID NO: 2227802 - RNA, 13 nt, Human
cugaccgugggcg

SEQ ID NO: 2227803 - RNA, 18 nt, Human
cugaccgaaacagcgcug

SEQ ID NO: 2227804 - RNA, 22 nt, Human
cugacccuuacagccucugacu

SEQ ID NO: 2227805 - RNA, 17 nt, Human
cugacccugguucucuc

SEQ ID NO: 2227806 - RNA, 20 nt, Human
cugacccuuacagccucuga

SEQ ID NO: 2227807 - RNA, 23 nt, Human
cugacccuuacagccucugacuu

SEQ ID NO: 2227808 - RNA, 15 nt, Human
cugaccuccacagcu

SEQ ID NO: 2227809 - RNA, 14 nt, Human
cugaccuccacagc

SEQ ID NO: 2227810 - RNA, 13 nt, Human
cugaccuccacag

SEQ ID NO: 2227811 - RNA, 22 nt, Human
cugaccgugggcggggccuugc

SEQ ID NO: 2227812 - RNA, 17 nt, Human
cugaccuaucacuucca

SEQ ID NO: 2227813 - RNA, 21 nt, Human
cugaccucccucuaauuuauc

SEQ ID NO: 2227814 - RNA, 12 nt, Human
cugaccucuggu

SEQ ID NO: 2227815 - RNA, 20 nt, Human
cugaccugugagcccagcug

SEQ ID NO: 2227816 - RNA, 18 nt, Human
cugaccugugagcccagc

SEQ ID NO: 2227817 - RNA, 17 nt, Human
cugaccugugagcccag

SEQ ID NO: 2227818 - RNA, 23 nt, Human
cugaccugucaugccccccucaa

SEQ ID NO: 2227819 - RNA, 20 nt, Human
cugaccuugaacuccugggc

SEQ ID NO: 2227820 - RNA, 22 nt, Human
cugaccuuccucgcagagaggc

SEQ ID NO: 2227821 - RNA, 23 nt, Human
cugaccuuccucgcagagaggcc

SEQ ID NO: 2227822 - RNA, 17 nt, Human
cugaccuuccucgcaga

SEQ ID NO: 2227823 - RNA, 18 nt, Human
cugaccuuccucgcagag

SEQ ID NO: 2227824 - RNA, 20 nt, Human
cugaccuuccucgcagagag

SEQ ID NO: 2227825 - RNA, 21 nt, Human
cugaccuuccucgcagagagg

SEQ ID NO: 2227826 - RNA, 16 nt, Human
cugaccuuccucgcag

SEQ ID NO: 2227827 - RNA, 21 nt, Human
cugaccugugagcccagcugg

SEQ ID NO: 2227828 - RNA, 12 nt, Human
cugaagggaggu

SEQ ID NO: 2227829 - RNA, 11 nt, Human
cugaagggagg

SEQ ID NO: 2227830 - RNA, 19 nt, Human
cugaaggggccaugauggc

SEQ ID NO: 2227831 - RNA, 15 nt, Human
cugaaggggccauga

SEQ ID NO: 2227832 - RNA, 23 nt, Human
cugaaggggccaugauggcaaca

SEQ ID NO: 2227833 - RNA, 20 nt, Human
cugaaggggcgucuguuccc

SEQ ID NO: 2227834 - RNA, 14 nt, Human
cugacagaaggacu

SEQ ID NO: 2227835 - RNA, 15 nt, Human
cugaagguaaaauug

SEQ ID NO: 2227836 - RNA, 17 nt, Human
cugaagggguucucaca

SEQ ID NO: 2227837 - RNA, 21 nt, Human
cugaagggguucucacagugg

SEQ ID NO: 2227838 - RNA, 15 nt, Human
cugacagacacaggc

SEQ ID NO: 2227839 - RNA, 17 nt, Human
cugaagguaaaauugaa

SEQ ID NO: 2227840 - RNA, 12 nt, Human
cugacagacaca

SEQ ID NO: 2227841 - RNA, 14 nt, Human
cugacagacacagg

SEQ ID NO: 2227842 - RNA, 14 nt, Human
cugaaggaaaaaca

SEQ ID NO: 2227843 - RNA, 16 nt, Human
cugaaggaaaaacaca

SEQ ID NO: 2227844 - RNA, 17 nt, Human
cugaaggaaaaacacaa

SEQ ID NO: 2227845 - RNA, 11 nt, Human
cugaaggaaaa

SEQ ID NO: 2227846 - RNA, 22 nt, Human
cugaaggaauaaauugcuccuu

SEQ ID NO: 2227847 - RNA, 18 nt, Human
cugaaggaaaaacacaag

SEQ ID NO: 2227848 - RNA, 21 nt, Human
cugaaggaaaaacacaagcaa

SEQ ID NO: 2227849 - RNA, 22 nt, Human
cugaaggaaaaacacaagcaaa

SEQ ID NO: 2227850 - RNA, 17 nt, Human
cugaaggacacuuccug

SEQ ID NO: 2227851 - RNA, 18 nt, Human
cugaaaauucgaaccagg

SEQ ID NO: 2227852 - RNA, 14 nt, Human
cugaagcugccugc

SEQ ID NO: 2227853 - RNA, 18 nt, Human
cugaagcugccugcuuuu

SEQ ID NO: 2227854 - RNA, 15 nt, Human
cugaagcugccugcu

SEQ ID NO: 2227855 - RNA, 16 nt, Human
cugaagcugccugcuu

SEQ ID NO: 2227856 - RNA, 16 nt, Human
cugaaaauuaacacug

SEQ ID NO: 2227857 - RNA, 17 nt, Human
cugaaaauuaacacugc

SEQ ID NO: 2227858 - RNA, 22 nt, Human
cugaaaauguuuuucugccagg

SEQ ID NO: 2227859 - RNA, 21 nt, Human
cugaaaaugugaauaaaauua

SEQ ID NO: 2227860 - RNA, 13 nt, Human
cugaaaaugugcu

SEQ ID NO: 2227861 - RNA, 12 nt, Human
cugaaaaugugc

SEQ ID NO: 2227862 - RNA, 13 nt, Human
cugaaaaugugaa

SEQ ID NO: 2227863 - RNA, 19 nt, Human
cugaaaagacucaguguuc

SEQ ID NO: 2227864 - RNA, 18 nt, Human
cugaaaagacucaguguu

SEQ ID NO: 2227865 - RNA, 16 nt, Human
cugaaaacggcccucu

SEQ ID NO: 2227866 - RNA, 16 nt, Human
cugaaaauguaugugu

SEQ ID NO: 2227867 - RNA, 19 nt, Human
cugaaggacauugcggaca

SEQ ID NO: 2227868 - RNA, 20 nt, Human
cugaaggacauugcggacag

SEQ ID NO: 2227869 - RNA, 21 nt, Human
cugaaggacauugcggacagc

SEQ ID NO: 2227870 - RNA, 18 nt, Human
cugaaggacacuuccugc

SEQ ID NO: 2227871 - RNA, 19 nt, Human
cugaaggacacuuccugcc

SEQ ID NO: 2227872 - RNA, 20 nt, Human
cugaaggacacuuccugccu

SEQ ID NO: 2227873 - RNA, 21 nt, Human
cugaaggacacuuccugccua

SEQ ID NO: 2227874 - RNA, 13 nt, Human
cugaaggccccgc

SEQ ID NO: 2227875 - RNA, 14 nt, Human
cugaaggccccgcc

SEQ ID NO: 2227876 - RNA, 17 nt, Human
cugaaggccccgcccag

SEQ ID NO: 2227877 - RNA, 20 nt, Human
cugaaaaccucuccucaugu

SEQ ID NO: 2227878 - RNA, 17 nt, Human
cugaaaaccucuccuca

SEQ ID NO: 2227879 - RNA, 15 nt, Human
cugaaaaccucuccu

SEQ ID NO: 2227880 - RNA, 14 nt, Human
cugaaaaccucucc

SEQ ID NO: 2227881 - RNA, 17 nt, Human
cugaaaacggcccucuu

SEQ ID NO: 2227882 - RNA, 17 nt, Human
cugaaaacccagagagg

SEQ ID NO: 2227883 - RNA, 19 nt, Human
cugaaaaccuaaguccuuu

SEQ ID NO: 2227884 - RNA, 15 nt, Human
cugaaaacccagaga

SEQ ID NO: 2227885 - RNA, 14 nt, Human
cugaaaacccagag

SEQ ID NO: 2227886 - RNA, 14 nt, Human
cugaaaacaucugg

SEQ ID NO: 2227887 - RNA, 15 nt, Human
cucuuggagccugca

SEQ ID NO: 2227888 - RNA, 17 nt, Human
cugaaaacacugugcac

SEQ ID NO: 2227889 - RNA, 15 nt, Human
cugaaaaauuccuuu

SEQ ID NO: 2227890 - RNA, 17 nt, Human
cucuugcggucccuucu

SEQ ID NO: 2227891 - RNA, 14 nt, Human
cucuugccuccugg

SEQ ID NO: 2227892 - RNA, 14 nt, Human
cucuugcuaaucag

SEQ ID NO: 2227893 - RNA, 21 nt, Human
cucuugcuaaucagugucuca

SEQ ID NO: 2227894 - RNA, 22 nt, Human
cucuugcuaaucagugucucac

SEQ ID NO: 2227895 - RNA, 12 nt, Human
cucuugcucaaa

SEQ ID NO: 2227896 - RNA, 19 nt, Human
cucuugcucaaaaaucugu

SEQ ID NO: 2227897 - RNA, 20 nt, Human
cucuugcucaaaaaucuguu

SEQ ID NO: 2227898 - RNA, 12 nt, Human
cucuugcucuuu

SEQ ID NO: 2227899 - RNA, 13 nt, Human
cucuugcucuuuc

SEQ ID NO: 2227900 - RNA, 15 nt, Human
cucuugcucuuucua

SEQ ID NO: 2227901 - RNA, 14 nt, Human
cucuugcucuuucu

SEQ ID NO: 2227902 - RNA, 16 nt, Human
cucuuggaaaaaguga

SEQ ID NO: 2227903 - RNA, 17 nt, Human
cucuuggaaaaagugau

SEQ ID NO: 2227904 - RNA, 12 nt, Human
cucuuggaccuc

SEQ ID NO: 2227905 - RNA, 17 nt, Human
cucuuggaccucugcuc

SEQ ID NO: 2227906 - RNA, 18 nt, Human
cucuuggaccucugcucu

SEQ ID NO: 2227907 - RNA, 14 nt, Human
cucuuggagccugc

SEQ ID NO: 2227908 - RNA, 19 nt, Human
cucuuggaccucugcucug

SEQ ID NO: 2227909 - RNA, 20 nt, Human
cucuuggaccucugcucuga

SEQ ID NO: 2227910 - RNA, 16 nt, Human
cucuugccacugccuc

SEQ ID NO: 2227911 - RNA, 21 nt, Human
cucuugccaaccuguaauaaa

SEQ ID NO: 2227912 - RNA, 22 nt, Human
cucuugccaaccuguaauaaau

SEQ ID NO: 2227913 - RNA, 23 nt, Human
cucuugccaaccuguaauaaaua

SEQ ID NO: 2227914 - RNA, 17 nt, Human
cucuugccacugccucu

SEQ ID NO: 2227915 - RNA, 18 nt, Human
cucuugccacugccucuu

SEQ ID NO: 2227916 - RNA, 19 nt, Human
cucuugccacugccucuuc

SEQ ID NO: 2227917 - RNA, 20 nt, Human
cucuugccacugccucuucc

SEQ ID NO: 2227918 - RNA, 18 nt, Human
cucuuagacuucugcuuu

SEQ ID NO: 2227919 - RNA, 21 nt, Human
cucuuagaugcaguucugaag

SEQ ID NO: 2227920 - RNA, 20 nt, Human
cucuuagaugcaguucugaa

SEQ ID NO: 2227921 - RNA, 18 nt, Human
cucugcaccguacugugg

SEQ ID NO: 2227922 - RNA, 16 nt, Human
cucugcacccccauau

SEQ ID NO: 2227923 - RNA, 18 nt, Human
cucugcacaugucuugua

SEQ ID NO: 2227924 - RNA, 16 nt, Human
cucugcacuacugaca

SEQ ID NO: 2227925 - RNA, 18 nt, Human
cucugcacuacugacaug

SEQ ID NO: 2227926 - RNA, 13 nt, Human
cucugcacuacuc

SEQ ID NO: 2227927 - RNA, 15 nt, Human
cucugcacuacuccu

SEQ ID NO: 2227928 - RNA, 20 nt, Human
cucugcacuacuccucugca

SEQ ID NO: 2227929 - RNA, 22 nt, Human
cucugcacuacuccucugcagu

SEQ ID NO: 2227930 - RNA, 20 nt, Human
cucugcacuacugacaugug

SEQ ID NO: 2227931 - RNA, 22 nt, Human
cucugcacuacugacauguggg

SEQ ID NO: 2227932 - RNA, 15 nt, Human
cucugcacaugucuu

SEQ ID NO: 2227933 - RNA, 16 nt, Human
cucugcacaugucuug

SEQ ID NO: 2227934 - RNA, 22 nt, Human
cucugcgugucaccugugcuuc

SEQ ID NO: 2227935 - RNA, 19 nt, Human
cucugcuacguuccuauug

SEQ ID NO: 2227936 - RNA, 14 nt, Human
cucugcuccaccac

SEQ ID NO: 2227937 - RNA, 13 nt, Human
cucugcuccacca

SEQ ID NO: 2227938 - RNA, 12 nt, Human
cucugcuccacc

SEQ ID NO: 2227939 - RNA, 16 nt, Human
cucugcuccaccacau

SEQ ID NO: 2227940 - RNA, 15 nt, Human
cucugcuccaccaca

SEQ ID NO: 2227941 - RNA, 18 nt, Human
cucugcuccaccacaucc

SEQ ID NO: 2227942 - RNA, 19 nt, Human
cucugcuccaccacauccu

SEQ ID NO: 2227943 - RNA, 13 nt, Human
cucugcagccagc

SEQ ID NO: 2227944 - RNA, 23 nt, Human
cucugcacuacuccucugcagug

SEQ ID NO: 2227945 - RNA, 14 nt, Human
cucugcagccagcc

SEQ ID NO: 2227946 - RNA, 23 nt, Human
cucugcagcaauaaagcagcguu

SEQ ID NO: 2227947 - RNA, 19 nt, Human
cucugcagcaauaaagcag

SEQ ID NO: 2227948 - RNA, 18 nt, Human
cucugcagcaauaaagca

SEQ ID NO: 2227949 - RNA, 15 nt, Human
cucugguuaucuaau

SEQ ID NO: 2227950 - RNA, 14 nt, Human
cucugguuccuccc

SEQ ID NO: 2227951 - RNA, 19 nt, Human
cucugguccauagagagca

SEQ ID NO: 2227952 - RNA, 16 nt, Human
cucugguccauagaga

SEQ ID NO: 2227953 - RNA, 18 nt, Human
cucugguccauagagagc

SEQ ID NO: 2227954 - RNA, 17 nt, Human
cucugcugacagacaca

SEQ ID NO: 2227955 - RNA, 18 nt, Human
cucugcugacagacacag

SEQ ID NO: 2227956 - RNA, 19 nt, Human
cucugcugacagacacagg

SEQ ID NO: 2227957 - RNA, 15 nt, Human
cucugguccauagag

SEQ ID NO: 2227958 - RNA, 22 nt, Human
cucugguccggacacuccuaga

SEQ ID NO: 2227959 - RNA, 13 nt, Human
cucugguucuuug

SEQ ID NO: 2227960 - RNA, 16 nt, Human
cucugguuuaauuaca

SEQ ID NO: 2227961 - RNA, 18 nt, Human
cucuguaaucucguuuca

SEQ ID NO: 2227962 - RNA, 21 nt, Human
cucuguaaaugaaaaaaccca

SEQ ID NO: 2227963 - RNA, 22 nt, Human
cucugguuuggggcgaggcaga

SEQ ID NO: 2227964 - RNA, 20 nt, Human
cucugguuuggggcgaggca

SEQ ID NO: 2227965 - RNA, 17 nt, Human
cucuguacagagcccac

SEQ ID NO: 2227966 - RNA, 21 nt, Human
cucuguacagagcccacgccc

SEQ ID NO: 2227967 - RNA, 15 nt, Human
cucugucaaugaaaa

SEQ ID NO: 2227968 - RNA, 16 nt, Human
cucuuagaaaugaagg

SEQ ID NO: 2227969 - RNA, 15 nt, Human
cucuuagaugcaguu

SEQ ID NO: 2227970 - RNA, 21 nt, Human
cucuguaaucucguuucaaaa

SEQ ID NO: 2227971 - RNA, 22 nt, Human
cucuguaucaggacccagagga

SEQ ID NO: 2227972 - RNA, 22 nt, Human
cucuguagggaacucugggguc

SEQ ID NO: 2227973 - RNA, 18 nt, Human
cucuguagggaacucugg

SEQ ID NO: 2227974 - RNA, 16 nt, Human
cucugaagccucuggg

SEQ ID NO: 2227975 - RNA, 14 nt, Human
cucuccuagagaca

SEQ ID NO: 2227976 - RNA, 21 nt, Human
cucuccuagagacagaagcag

SEQ ID NO: 2227977 - RNA, 15 nt, Human
cucuccggucucucu

SEQ ID NO: 2227978 - RNA, 21 nt, Human
cucuccgaccagacaccuuga

SEQ ID NO: 2227979 - RNA, 23 nt, Human
cucuccccagguccagcucugga

SEQ ID NO: 2227980 - RNA, 18 nt, Human
cucuccccagguccagcu

SEQ ID NO: 2227981 - RNA, 20 nt, Human
cucuccccagguccagcucu

SEQ ID NO: 2227982 - RNA, 23 nt, Human
cucucagccaacgaguaauuuau

SEQ ID NO: 2227983 - RNA, 11 nt, Human
cucucagccaa

SEQ ID NO: 2227984 - RNA, 21 nt, Human
cucucagccccugauccugug

SEQ ID NO: 2227985 - RNA, 15 nt, Human
cucuccccagcccag

SEQ ID NO: 2227986 - RNA, 13 nt, Human
cucuccccagccc

SEQ ID NO: 2227987 - RNA, 22 nt, Human
cucucagccccugauccuguga

SEQ ID NO: 2227988 - RNA, 20 nt, Human
cucuccccagcccagagaca

SEQ ID NO: 2227989 - RNA, 15 nt, Human
cucuccccaggucca

SEQ ID NO: 2227990 - RNA, 16 nt, Human
cucuccccagguccag

SEQ ID NO: 2227991 - RNA, 19 nt, Human
cucuccccagcccagagac

SEQ ID NO: 2227992 - RNA, 18 nt, Human
cucuccccagcccagaga

SEQ ID NO: 2227993 - RNA, 17 nt, Human
cucuccccagcccagag

SEQ ID NO: 2227994 - RNA, 16 nt, Human
cucuccccagcccaga

SEQ ID NO: 2227995 - RNA, 20 nt, Human
cucuccucauguucugcuuu

SEQ ID NO: 2227996 - RNA, 14 nt, Human
cucuccucaucucu

SEQ ID NO: 2227997 - RNA, 12 nt, Human
cucuccucaucu

SEQ ID NO: 2227998 - RNA, 23 nt, Human
cucuccucaucucuaacagcuca

SEQ ID NO: 2227999 - RNA, 16 nt, Human
cucuccuccaagacac

SEQ ID NO: 2228000 - RNA, 11 nt, Human
cucucuggccu

SEQ ID NO: 2228001 - RNA, 12 nt, Human
cucucuggccuu

SEQ ID NO: 2228002 - RNA, 20 nt, Human
cucuccuccaagacacugug

SEQ ID NO: 2228003 - RNA, 13 nt, Human
cucucuggccucc

SEQ ID NO: 2228004 - RNA, 14 nt, Human
cucucuggccuccc

SEQ ID NO: 2228005 - RNA, 15 nt, Human
cucucuggccuccca

SEQ ID NO: 2228006 - RNA, 16 nt, Human
cucucuggccucccac

SEQ ID NO: 2228007 - RNA, 17 nt, Human
cucucuggccucccacc

SEQ ID NO: 2228008 - RNA, 23 nt, Human
cucugaagaguggguuucacaag

SEQ ID NO: 2228009 - RNA, 22 nt, Human
cucugaagaguggguuucacaa

SEQ ID NO: 2228010 - RNA, 18 nt, Human
cucugaagaugaucauuu

SEQ ID NO: 2228011 - RNA, 20 nt, Human
cucucuggccucccacccga

SEQ ID NO: 2228012 - RNA, 11 nt, Human
cucugaagcau

SEQ ID NO: 2228013 - RNA, 21 nt, Human
cucugaagaguggguuucaca

SEQ ID NO: 2228014 - RNA, 13 nt, Human
cucugaagagugg

SEQ ID NO: 2228015 - RNA, 18 nt, Human
cucucuggccucccaccc

SEQ ID NO: 2228016 - RNA, 19 nt, Human
cucucuggccucccacccg

SEQ ID NO: 2228017 - RNA, 15 nt, Human
cucugaaggacauug

SEQ ID NO: 2228018 - RNA, 20 nt, Human
cucugaagcauguuucaugu

SEQ ID NO: 2228019 - RNA, 14 nt, Human
cucugaagcauguu

SEQ ID NO: 2228020 - RNA, 17 nt, Human
cucugaagcauguuuca

SEQ ID NO: 2228021 - RNA, 15 nt, Human
cucugaagccucugg

SEQ ID NO: 2228022 - RNA, 17 nt, Human
cucugaagccucuggga

SEQ ID NO: 2228023 - RNA, 15 nt, Human
cucuauguuuacaaa

SEQ ID NO: 2228024 - RNA, 18 nt, Human
cucuauuaagauuuccaa

SEQ ID NO: 2228025 - RNA, 20 nt, Human
cucuauguuuacaaauggac

SEQ ID NO: 2228026 - RNA, 23 nt, Human
cucgggcccaggccaucuuccag

SEQ ID NO: 2228027 - RNA, 13 nt, Human
cucgggcccagcc

SEQ ID NO: 2228028 - RNA, 14 nt, Human
cucgggcccagccc

SEQ ID NO: 2228029 - RNA, 15 nt, Human
cucgggcccagcccc

SEQ ID NO: 2228030 - RNA, 16 nt, Human
cucgggcccagccccc

SEQ ID NO: 2228031 - RNA, 18 nt, Human
cucgggcccagcccccac

SEQ ID NO: 2228032 - RNA, 12 nt, Human
cucgggcccagg

SEQ ID NO: 2228033 - RNA, 14 nt, Human
cucgggcccaggcc

SEQ ID NO: 2228034 - RNA, 16 nt, Human
cucgggcccaggccau

SEQ ID NO: 2228035 - RNA, 12 nt, Human
cucuauuuaaua

SEQ ID NO: 2228036 - RNA, 23 nt, Human
cucuauugauguacagucuguca

SEQ ID NO: 2228037 - RNA, 20 nt, Human
cucuauuguagcauuucuug

SEQ ID NO: 2228038 - RNA, 20 nt, Human
cucuauuaagauuuccaagu

SEQ ID NO: 2228039 - RNA, 14 nt, Human
cucuauuuagcaug

SEQ ID NO: 2228040 - RNA, 17 nt, Human
cucuauuuauguuugca

SEQ ID NO: 2228041 - RNA, 16 nt, Human
cucuauuuauguuugc

SEQ ID NO: 2228042 - RNA, 13 nt, Human
cucuauuuagcau

SEQ ID NO: 2228043 - RNA, 16 nt, Human
cucuauuuaauauuua

SEQ ID NO: 2228044 - RNA, 17 nt, Human
cucuauuuaauauuuau

SEQ ID NO: 2228045 - RNA, 21 nt, Human
cucuauuguagcauuucuuga

SEQ ID NO: 2228046 - RNA, 13 nt, Human
cucuauuuaauau

SEQ ID NO: 2228047 - RNA, 14 nt, Human
cucuauuuaauauu

SEQ ID NO: 2228048 - RNA, 15 nt, Human
cucuauuuaauauuu

SEQ ID NO: 2228049 - RNA, 22 nt, Human
cucucaaaucuuuuagucauua

SEQ ID NO: 2228050 - RNA, 20 nt, Human
cucucaaccaccuuucagau

SEQ ID NO: 2228051 - RNA, 16 nt, Human
cucucagaagguauuc

SEQ ID NO: 2228052 - RNA, 20 nt, Human
cucucagagcuacuugggcc

SEQ ID NO: 2228053 - RNA, 21 nt, Human
cucucagagcuacuugggcca

SEQ ID NO: 2228054 - RNA, 22 nt, Human
cucucagagcuacuugggccau

SEQ ID NO: 2228055 - RNA, 17 nt, Human
cucucagaauucuucag

SEQ ID NO: 2228056 - RNA, 14 nt, Human
cucucagaagggag

SEQ ID NO: 2228057 - RNA, 19 nt, Human
cucucagaagggaggcugg

SEQ ID NO: 2228058 - RNA, 19 nt, Human
cucucagauuguaccauug

SEQ ID NO: 2228059 - RNA, 12 nt, Human
cucucacugucu

SEQ ID NO: 2228060 - RNA, 15 nt, Human
cucucacuccuugaa

SEQ ID NO: 2228061 - RNA, 12 nt, Human
cucucacuccuu

SEQ ID NO: 2228062 - RNA, 14 nt, Human
cucucacuccuuga

SEQ ID NO: 2228063 - RNA, 17 nt, Human
cucucaacccaggagca

SEQ ID NO: 2228064 - RNA, 15 nt, Human
cucucaauaugcuua

SEQ ID NO: 2228065 - RNA, 16 nt, Human
cucucaauaugcuuac

SEQ ID NO: 2228066 - RNA, 22 nt, Human
cuccgucuuagaaguggaccag

SEQ ID NO: 2228067 - RNA, 22 nt, Human
cuccguccaggagccugugccu

SEQ ID NO: 2228068 - RNA, 20 nt, Human
cuccguccaggagccugugc

SEQ ID NO: 2228069 - RNA, 19 nt, Human
cuccguccaggagccuggc

SEQ ID NO: 2228070 - RNA, 22 nt, Human
cuccguccagccgccauugcca

SEQ ID NO: 2228071 - RNA, 18 nt, Human
cuccguccaggagccugg

SEQ ID NO: 2228072 - RNA, 13 nt, Human
cuccguggagcag

SEQ ID NO: 2228073 - RNA, 15 nt, Human
cuccguuagcuccug

SEQ ID NO: 2228074 - RNA, 16 nt, Human
cuccguuagcuccugu

SEQ ID NO: 2228075 - RNA, 13 nt, Human
cuccgugccucca

SEQ ID NO: 2228076 - RNA, 14 nt, Human
cuccgugccuccac

SEQ ID NO: 2228077 - RNA, 15 nt, Human
cuccgugccuccacc

SEQ ID NO: 2228078 - RNA, 16 nt, Human
cuccgugccuccacca

SEQ ID NO: 2228079 - RNA, 21 nt, Human
cuccgugccuccaccaccacu

SEQ ID NO: 2228080 - RNA, 22 nt, Human
cuccgugccuccaccaccacug

SEQ ID NO: 2228081 - RNA, 16 nt, Human
cuccgugcuuccucag

SEQ ID NO: 2228082 - RNA, 19 nt, Human
cuccgugcuuccucaguua

SEQ ID NO: 2228083 - RNA, 19 nt, Human
cucggcuuuucucagcugg

SEQ ID NO: 2228084 - RNA, 12 nt, Human
cucgggaaccuc

SEQ ID NO: 2228085 - RNA, 16 nt, Human
cucgggaaccucacuc

SEQ ID NO: 2228086 - RNA, 15 nt, Human
cucgggacaccugcc

SEQ ID NO: 2228087 - RNA, 20 nt, Human
cucgggacaccugcccugcc

SEQ ID NO: 2228088 - RNA, 15 nt, Human
cucgggaggcugaga

SEQ ID NO: 2228089 - RNA, 20 nt, Human
cucgggauuaguacacacuu

SEQ ID NO: 2228090 - RNA, 21 nt, Human
cucgggaggcugagacaggag

SEQ ID NO: 2228091 - RNA, 19 nt, Human
cucgggaggcugagacagg

SEQ ID NO: 2228092 - RNA, 13 nt, Human
cucgggcccaccu

SEQ ID NO: 2228093 - RNA, 14 nt, Human
cucgggcccaccug

SEQ ID NO: 2228094 - RNA, 16 nt, Human
cucgggcccaccuggc

SEQ ID NO: 2228095 - RNA, 17 nt, Human
cucgggcccaccuggcc

SEQ ID NO: 2228096 - RNA, 18 nt, Human
cucgggcccaccuggcca

SEQ ID NO: 2228097 - RNA, 19 nt, Human
cucgggcccaccuggccac

SEQ ID NO: 2228098 - RNA, 20 nt, Human
cucgggcccaccuggccacc

SEQ ID NO: 2228099 - RNA, 21 nt, Human
cucgggcccaccuggccaccu

SEQ ID NO: 2228100 - RNA, 12 nt, Human
cucgggcccagc

SEQ ID NO: 2228101 - RNA, 15 nt, Human
cuccagggguggcug

SEQ ID NO: 2228102 - RNA, 22 nt, Human
cuccaggggcugcuuccuccug

SEQ ID NO: 2228103 - RNA, 23 nt, Human
cuccaggggcugcuuccuccugg

SEQ ID NO: 2228104 - RNA, 16 nt, Human
cuccagggugugugcu

SEQ ID NO: 2228105 - RNA, 11 nt, Human
cuccaggugca

SEQ ID NO: 2228106 - RNA, 22 nt, Human
cuccagguccucuacuuaauga

SEQ ID NO: 2228107 - RNA, 16 nt, Human
cuccaggucucacggg

SEQ ID NO: 2228108 - RNA, 17 nt, Human
cuccaggucucacgggc

SEQ ID NO: 2228109 - RNA, 18 nt, Human
cuccaggucucacgggca

SEQ ID NO: 2228110 - RNA, 16 nt, Human
cuccaguccaaggaaa

SEQ ID NO: 2228111 - RNA, 15 nt, Human
cuccagucaggaggc

SEQ ID NO: 2228112 - RNA, 16 nt, Human
cuccagucaggaggca

SEQ ID NO: 2228113 - RNA, 15 nt, Human
cuccagaagauagcu

SEQ ID NO: 2228114 - RNA, 14 nt, Human
cuccagaagauagc

SEQ ID NO: 2228115 - RNA, 20 nt, Human
cuccagaaccgcagaagccu

SEQ ID NO: 2228116 - RNA, 19 nt, Human
cuccagaaccgcagaagcc

SEQ ID NO: 2228117 - RNA, 22 nt, Human
cuccagaaaugucuaaaugcug

SEQ ID NO: 2228118 - RNA, 15 nt, Human
cuccagaaacggcca

SEQ ID NO: 2228119 - RNA, 15 nt, Human
cuccacuuuguugga

SEQ ID NO: 2228120 - RNA, 22 nt, Human
cuccacuuucuagccagaggag

SEQ ID NO: 2228121 - RNA, 16 nt, Human
cuccaagaccuucucc

SEQ ID NO: 2228122 - RNA, 13 nt, Human
cuccaaccugcaa

SEQ ID NO: 2228123 - RNA, 17 nt, Human
cuccaagaccuucuccu

SEQ ID NO: 2228124 - RNA, 18 nt, Human
cuccaagaccuucuccuu

SEQ ID NO: 2228125 - RNA, 23 nt, Human
cuccagaagauagcuucacccca

SEQ ID NO: 2228126 - RNA, 15 nt, Human
cuccagaagccucug

SEQ ID NO: 2228127 - RNA, 14 nt, Human
cuccagaagccucu

SEQ ID NO: 2228128 - RNA, 19 nt, Human
cuccagaagccucuggcua

SEQ ID NO: 2228129 - RNA, 18 nt, Human
cuccagaagccucuggcu

SEQ ID NO: 2228130 - RNA, 17 nt, Human
cuccagaagccucuggc

SEQ ID NO: 2228131 - RNA, 16 nt, Human
cuccagaagccucugg

SEQ ID NO: 2228132 - RNA, 15 nt, Human
cuccagaauuuccca

SEQ ID NO: 2228133 - RNA, 18 nt, Human
cuccagaauuucccaaag

SEQ ID NO: 2228134 - RNA, 14 nt, Human
cuccagacccccag

SEQ ID NO: 2228135 - RNA, 22 nt, Human
cuccagacccccaccccuuccc

SEQ ID NO: 2228136 - RNA, 21 nt, Human
cuccagacccccaccccuucc

SEQ ID NO: 2228137 - RNA, 18 nt, Human
cuccagacccccaccccu

SEQ ID NO: 2228138 - RNA, 16 nt, Human
cuccagacccccaccc

SEQ ID NO: 2228139 - RNA, 12 nt, Human
cuccagaccccc

SEQ ID NO: 2228140 - RNA, 17 nt, Human
cuccagacccaccacac

SEQ ID NO: 2228141 - RNA, 21 nt, Human
cuccagaaucuaaagccagug

SEQ ID NO: 2228142 - RNA, 19 nt, Human
cuccagacacauguccaag

SEQ ID NO: 2228143 - RNA, 21 nt, Human
cuccagaagccucuggcuaga

SEQ ID NO: 2228144 - RNA, 20 nt, Human
cuccagaagccucuggcuag

SEQ ID NO: 2228145 - RNA, 17 nt, Human
cuccagacacaugucca

SEQ ID NO: 2228146 - RNA, 16 nt, Human
cuccagacccccagca

SEQ ID NO: 2228147 - RNA, 14 nt, Human
cucccugacccugu

SEQ ID NO: 2228148 - RNA, 16 nt, Human
cucccugacccuguau

SEQ ID NO: 2228149 - RNA, 17 nt, Human
cucccugacccuguaua

SEQ ID NO: 2228150 - RNA, 23 nt, Human
cucccugacccuguauauagccc

SEQ ID NO: 2228151 - RNA, 12 nt, Human
cucccugacccu

SEQ ID NO: 2228152 - RNA, 21 nt, Human
cucccuccucaccucuggacu

SEQ ID NO: 2228153 - RNA, 19 nt, Human
cucccuccucaccucugga

SEQ ID NO: 2228154 - RNA, 18 nt, Human
cucccuccucaccucugg

SEQ ID NO: 2228155 - RNA, 17 nt, Human
cucccuccucaccucug

SEQ ID NO: 2228156 - RNA, 12 nt, Human
cucccuccucug

SEQ ID NO: 2228157 - RNA, 15 nt, Human
cucccuccucugucc

SEQ ID NO: 2228158 - RNA, 20 nt, Human
cucccugcaucugaccagca

SEQ ID NO: 2228159 - RNA, 17 nt, Human
cucccuccugccgacuc

SEQ ID NO: 2228160 - RNA, 16 nt, Human
cuccccucagagugca

SEQ ID NO: 2228161 - RNA, 13 nt, Human
cuccccucagagu

SEQ ID NO: 2228162 - RNA, 20 nt, Human
cuccccucacagccucugac

SEQ ID NO: 2228163 - RNA, 14 nt, Human
cuccccgcuucugc

SEQ ID NO: 2228164 - RNA, 18 nt, Human
cuccccgccuguuccccc

SEQ ID NO: 2228165 - RNA, 17 nt, Human
cuccccgccuguucccc

SEQ ID NO: 2228166 - RNA, 19 nt, Human
cuccccucacagccucuga

SEQ ID NO: 2228167 - RNA, 23 nt, Human
cucccccugggcucugccccagc

SEQ ID NO: 2228168 - RNA, 12 nt, Human
cucccccugucc

SEQ ID NO: 2228169 - RNA, 13 nt, Human
cucccccuguccc

SEQ ID NO: 2228170 - RNA, 19 nt, Human
cucccccuguccccucagc

SEQ ID NO: 2228171 - RNA, 11 nt, Human
cucccccuucu

SEQ ID NO: 2228172 - RNA, 13 nt, Human
cucccccuucucc

SEQ ID NO: 2228173 - RNA, 14 nt, Human
cucccccuucuccc

SEQ ID NO: 2228174 - RNA, 14 nt, Human
cuccccgccuguuc

SEQ ID NO: 2228175 - RNA, 15 nt, Human
cuccccgccuguucc

SEQ ID NO: 2228176 - RNA, 16 nt, Human
cuccccgccuguuccc

SEQ ID NO: 2228177 - RNA, 14 nt, Human
cuccccucccuccu

SEQ ID NO: 2228178 - RNA, 15 nt, Human
cuccccuccccugcu

SEQ ID NO: 2228179 - RNA, 16 nt, Human
cuccccuccccugcug

SEQ ID NO: 2228180 - RNA, 17 nt, Human
cuccccuccccugcugc

SEQ ID NO: 2228181 - RNA, 18 nt, Human
cuccccuccccugcugca

SEQ ID NO: 2228182 - RNA, 15 nt, Human
cucccuccucaccuc

SEQ ID NO: 2228183 - RNA, 14 nt, Human
cucccuccucaccu

SEQ ID NO: 2228184 - RNA, 15 nt, Human
cuccccuccaaccug

SEQ ID NO: 2228185 - RNA, 13 nt, Human
cuccccuccccug

SEQ ID NO: 2228186 - RNA, 14 nt, Human
cuccccuccccugc

SEQ ID NO: 2228187 - RNA, 12 nt, Human
cuccagucugcu

SEQ ID NO: 2228188 - RNA, 21 nt, Human
cuccagugagacagcucugca

SEQ ID NO: 2228189 - RNA, 21 nt, Human
cuccagucugcugcccuccau

SEQ ID NO: 2228190 - RNA, 20 nt, Human
cuccagucugcugcccucca

SEQ ID NO: 2228191 - RNA, 17 nt, Human
cuccagucugcugcccu

SEQ ID NO: 2228192 - RNA, 15 nt, Human
cuccagucugcugcc

SEQ ID NO: 2228193 - RNA, 15 nt, Human
cucccacccgaugcu

SEQ ID NO: 2228194 - RNA, 17 nt, Human
cucccacccgaugcugc

SEQ ID NO: 2228195 - RNA, 17 nt, Human
cucccacccggcugcag

SEQ ID NO: 2228196 - RNA, 19 nt, Human
cucccacccggcugcagag

SEQ ID NO: 2228197 - RNA, 18 nt, Human
cucccacccgaugcugcu

SEQ ID NO: 2228198 - RNA, 20 nt, Human
cucccacccgaugcugcuuu

SEQ ID NO: 2228199 - RNA, 21 nt, Human
cucccacccgaugcugcuuuc

SEQ ID NO: 2228200 - RNA, 23 nt, Human
cucccacccgaugcugcuuuccc

SEQ ID NO: 2228201 - RNA, 12 nt, Human
cucccaccucag

SEQ ID NO: 2228202 - RNA, 18 nt, Human
cucccaccuagcagcacc

SEQ ID NO: 2228203 - RNA, 13 nt, Human
cucccccugggcu

SEQ ID NO: 2228204 - RNA, 12 nt, Human
cucccccugggc

SEQ ID NO: 2228205 - RNA, 11 nt, Human
cucccccuggg

SEQ ID NO: 2228206 - RNA, 19 nt, Human
cucccccugccagugccuu

SEQ ID NO: 2228207 - RNA, 18 nt, Human
cucccccugccagugccu

SEQ ID NO: 2228208 - RNA, 17 nt, Human
cucccccugccagugcc

SEQ ID NO: 2228209 - RNA, 16 nt, Human
cucccccugccagugc

SEQ ID NO: 2228210 - RNA, 13 nt, Human
cucccccugccag

SEQ ID NO: 2228211 - RNA, 13 nt, Human
cucccaccucagc

SEQ ID NO: 2228212 - RNA, 16 nt, Human
cuccgccucugcuggc

SEQ ID NO: 2228213 - RNA, 14 nt, Human
cuccgcuggaggug

SEQ ID NO: 2228214 - RNA, 21 nt, Human
cuccgccuucacuccggugug

SEQ ID NO: 2228215 - RNA, 19 nt, Human
cuccgcuuucuacccagcg

SEQ ID NO: 2228216 - RNA, 19 nt, Human
cuccgccuucacuccggug

SEQ ID NO: 2228217 - RNA, 18 nt, Human
cuccgccuucacuccggu

SEQ ID NO: 2228218 - RNA, 15 nt, Human
cuccgccucugcugg

SEQ ID NO: 2228219 - RNA, 15 nt, Human
cuccgccucccgggu

SEQ ID NO: 2228220 - RNA, 19 nt, Human
cuauccacccagcccauuc

SEQ ID NO: 2228221 - RNA, 16 nt, Human
cuauccacccagccca

SEQ ID NO: 2228222 - RNA, 15 nt, Human
cuauccacccagccc

SEQ ID NO: 2228223 - RNA, 14 nt, Human
cuauccacccagcc

SEQ ID NO: 2228224 - RNA, 13 nt, Human
cuauccacccagc

SEQ ID NO: 2228225 - RNA, 12 nt, Human
cuauccacccag

SEQ ID NO: 2228226 - RNA, 13 nt, Human
cucagccucccaa

SEQ ID NO: 2228227 - RNA, 16 nt, Human
cuaucccggcugcccu

SEQ ID NO: 2228228 - RNA, 15 nt, Human
cuaucccggcugccc

SEQ ID NO: 2228229 - RNA, 22 nt, Human
cucagccucccaaagugcuggg

SEQ ID NO: 2228230 - RNA, 13 nt, Human
cucagccucccga

SEQ ID NO: 2228231 - RNA, 20 nt, Human
cucagccuccggaguagcug

SEQ ID NO: 2228232 - RNA, 20 nt, Human
cucagccucccagagugcug

SEQ ID NO: 2228233 - RNA, 13 nt, Human
cucagccucccag

SEQ ID NO: 2228234 - RNA, 23 nt, Human
cucagccucccgaauagcuggga

SEQ ID NO: 2228235 - RNA, 21 nt, Human
cucagccucccaaagugcugg

SEQ ID NO: 2228236 - RNA, 17 nt, Human
cuauccacccagcccau

SEQ ID NO: 2228237 - RNA, 21 nt, Human
cuaucccaauaggcagacugg

SEQ ID NO: 2228238 - RNA, 17 nt, Human
cuaucccggcugcccuu

SEQ ID NO: 2228239 - RNA, 14 nt, Human
cucagccucccaaa

SEQ ID NO: 2228240 - RNA, 16 nt, Human
cucagccucccaaagu

SEQ ID NO: 2228241 - RNA, 14 nt, Human
cucagccuccugag

SEQ ID NO: 2228242 - RNA, 22 nt, Human
cucagccuccugaguagcugga

SEQ ID NO: 2228243 - RNA, 13 nt, Human
cucagccuccuga

SEQ ID NO: 2228244 - RNA, 12 nt, Human
cucagccuccug

SEQ ID NO: 2228245 - RNA, 14 nt, Human
cucagccugugcug

SEQ ID NO: 2228246 - RNA, 13 nt, Human
cucagccugugcu

SEQ ID NO: 2228247 - RNA, 20 nt, Human
cucagccuggugggccuccu

SEQ ID NO: 2228248 - RNA, 19 nt, Human
cucagccuggugggccucc

SEQ ID NO: 2228249 - RNA, 18 nt, Human
cucagccuggugggccuc

SEQ ID NO: 2228250 - RNA, 16 nt, Human
cucagccuggugggcc

SEQ ID NO: 2228251 - RNA, 12 nt, Human
cucagccuggug

SEQ ID NO: 2228252 - RNA, 17 nt, Human
cucagccuccucaucug

SEQ ID NO: 2228253 - RNA, 18 nt, Human
cucagccuccucaucugg

SEQ ID NO: 2228254 - RNA, 22 nt, Human
cucagccuuccccuugcccagg

SEQ ID NO: 2228255 - RNA, 19 nt, Human
cucagccuucagacagaga

SEQ ID NO: 2228256 - RNA, 16 nt, Human
cucagccuucagacag

SEQ ID NO: 2228257 - RNA, 17 nt, Human
cucagccuucagacaga

SEQ ID NO: 2228258 - RNA, 18 nt, Human
cucagccugugcugcccg

SEQ ID NO: 2228259 - RNA, 16 nt, Human
cucagccugugcugcc

SEQ ID NO: 2228260 - RNA, 15 nt, Human
cucagccuccugugu

SEQ ID NO: 2228261 - RNA, 15 nt, Human
cucagccuucagaca

SEQ ID NO: 2228262 - RNA, 23 nt, Human
cucagccuuccccuugcccaggg

SEQ ID NO: 2228263 - RNA, 15 nt, Human
cucagccuugccaga

SEQ ID NO: 2228264 - RNA, 17 nt, Human
cucagccuugccagaga

SEQ ID NO: 2228265 - RNA, 16 nt, Human
cucagccuugccagag

SEQ ID NO: 2228266 - RNA, 21 nt, Human
cucagccuugccagagaucca

SEQ ID NO: 2228267 - RNA, 20 nt, Human
cucagccuugccagagaucc

SEQ ID NO: 2228268 - RNA, 19 nt, Human
cucagccuugccagagauc

SEQ ID NO: 2228269 - RNA, 18 nt, Human
cucagccuugccagagau

SEQ ID NO: 2228270 - RNA, 23 nt, Human
cucaggccaccugcccccuucuc

SEQ ID NO: 2228271 - RNA, 22 nt, Human
cucaggccaccugcccccuucu

SEQ ID NO: 2228272 - RNA, 19 nt, Human
cucaggccaccugcccccu

SEQ ID NO: 2228273 - RNA, 18 nt, Human
cucaggccaccugccccc

SEQ ID NO: 2228274 - RNA, 13 nt, Human
cucaggccagcug

SEQ ID NO: 2228275 - RNA, 15 nt, Human
cucagccuuggauaa

SEQ ID NO: 2228276 - RNA, 11 nt, Human
cucagccuugg

SEQ ID NO: 2228277 - RNA, 22 nt, Human
cucagccuugccagagauccaa

SEQ ID NO: 2228278 - RNA, 14 nt, Human
cucagcgaaugaau

SEQ ID NO: 2228279 - RNA, 16 nt, Human
cucaggccaccugccc

SEQ ID NO: 2228280 - RNA, 13 nt, Human
cucaggccaccug

SEQ ID NO: 2228281 - RNA, 13 nt, Human
cucagcggggaca

SEQ ID NO: 2228282 - RNA, 14 nt, Human
cucaggccagcugc

SEQ ID NO: 2228283 - RNA, 15 nt, Human
cucaggccagcugcu

SEQ ID NO: 2228284 - RNA, 20 nt, Human
cucaggccagcugcuugggc

SEQ ID NO: 2228285 - RNA, 21 nt, Human
cucaggccagcugcuugggcu

SEQ ID NO: 2228286 - RNA, 22 nt, Human
cucaggccagcugcuugggcuu

SEQ ID NO: 2228287 - RNA, 18 nt, Human
cucaggccaggugcagug

SEQ ID NO: 2228288 - RNA, 15 nt, Human
cucaggccaggugca

SEQ ID NO: 2228289 - RNA, 16 nt, Human
cucaggcccaaagccu

SEQ ID NO: 2228290 - RNA, 13 nt, Human
cucaggccugggg

SEQ ID NO: 2228291 - RNA, 14 nt, Human
cucaggccuggggg

SEQ ID NO: 2228292 - RNA, 20 nt, Human
cucaggccugggggcugggc

SEQ ID NO: 2228293 - RNA, 21 nt, Human
cucaggccugggggcugggca

SEQ ID NO: 2228294 - RNA, 15 nt, Human
cuccaaaugagaucu

SEQ ID NO: 2228295 - RNA, 12 nt, Human
cuccaaaugcug

SEQ ID NO: 2228296 - RNA, 22 nt, Human
cuccaacaccaagcacagcagc

SEQ ID NO: 2228297 - RNA, 18 nt, Human
cuccaacaccaagcacag

SEQ ID NO: 2228298 - RNA, 16 nt, Human
cuccaacaccaagcac

SEQ ID NO: 2228299 - RNA, 15 nt, Human
cuccaacaccaagca

SEQ ID NO: 2228300 - RNA, 20 nt, Human
cucauggagaagcagaaaua

SEQ ID NO: 2228301 - RNA, 21 nt, Human
cucauggagaagcagaaauac

SEQ ID NO: 2228302 - RNA, 16 nt, Human
cuccaaagucucugga

SEQ ID NO: 2228303 - RNA, 14 nt, Human
cuccaaccccccag

SEQ ID NO: 2228304 - RNA, 23 nt, Human
cuccaacaccaagcacagcagcc

SEQ ID NO: 2228305 - RNA, 15 nt, Human
cuccaaccccccagc

SEQ ID NO: 2228306 - RNA, 17 nt, Human
cuccaaccccccagcac

SEQ ID NO: 2228307 - RNA, 18 nt, Human
cuccaaccccccagcacu

SEQ ID NO: 2228308 - RNA, 19 nt, Human
cuccaaccccccagcacug

SEQ ID NO: 2228309 - RNA, 20 nt, Human
cuccaaccccccagcacuga

SEQ ID NO: 2228310 - RNA, 21 nt, Human
cuccaaccccccagcacugag

SEQ ID NO: 2228311 - RNA, 22 nt, Human
cuccaaccccccagcacugagg

SEQ ID NO: 2228312 - RNA, 23 nt, Human
cuccaaccccccagcacugagga

SEQ ID NO: 2228313 - RNA, 14 nt, Human
cucaugcugaaagc

SEQ ID NO: 2228314 - RNA, 12 nt, Human
cucaugcugaaa

SEQ ID NO: 2228315 - RNA, 13 nt, Human
cucaugcugaaag

SEQ ID NO: 2228316 - RNA, 20 nt, Human
cucaugccucagccuccuga

SEQ ID NO: 2228317 - RNA, 18 nt, Human
cucaugccucagccuccu

SEQ ID NO: 2228318 - RNA, 21 nt, Human
cucaugccuguaaucccagca

SEQ ID NO: 2228319 - RNA, 15 nt, Human
cucaugcuaauauaa

SEQ ID NO: 2228320 - RNA, 15 nt, Human
cucaugcugaaagcc

SEQ ID NO: 2228321 - RNA, 19 nt, Human
cucauguucuuaauucuua

SEQ ID NO: 2228322 - RNA, 18 nt, Human
cucauguucuuaauucuu

SEQ ID NO: 2228323 - RNA, 14 nt, Human
cucauguucuuaau

SEQ ID NO: 2228324 - RNA, 12 nt, Human
cucauguucuua

SEQ ID NO: 2228325 - RNA, 22 nt, Human
cucagugucauuuaugaaaaga

SEQ ID NO: 2228326 - RNA, 18 nt, Human
cucagugucauuuaugaa

SEQ ID NO: 2228327 - RNA, 17 nt, Human
cucagugucauuuauga

SEQ ID NO: 2228328 - RNA, 14 nt, Human
cucagugucauuua

SEQ ID NO: 2228329 - RNA, 12 nt, Human
cucaguguauuu

SEQ ID NO: 2228330 - RNA, 16 nt, Human
cucaguguauuuguau

SEQ ID NO: 2228331 - RNA, 17 nt, Human
cucaguguauuuguauu

SEQ ID NO: 2228332 - RNA, 20 nt, Human
cucaguggacuuuccacccc

SEQ ID NO: 2228333 - RNA, 19 nt, Human
cucaguggacuuuccaccc

SEQ ID NO: 2228334 - RNA, 16 nt, Human
cucaguggacuuucca

SEQ ID NO: 2228335 - RNA, 22 nt, Human
cucaguggacuuuccacccccu

SEQ ID NO: 2228336 - RNA, 21 nt, Human
cucaguggcuucaucugucaa

SEQ ID NO: 2228337 - RNA, 18 nt, Human
cucaguggcuucaucugu

SEQ ID NO: 2228338 - RNA, 13 nt, Human
cucagugccacua

SEQ ID NO: 2228339 - RNA, 20 nt, Human
cucagucucugagcagugaa

SEQ ID NO: 2228340 - RNA, 14 nt, Human
cucagucucugagc

SEQ ID NO: 2228341 - RNA, 22 nt, Human
cucaucuuucauuaaaggcuuc

SEQ ID NO: 2228342 - RNA, 17 nt, Human
cucaucuucuucaccau

SEQ ID NO: 2228343 - RNA, 12 nt, Human
cucaucuuucuu

SEQ ID NO: 2228344 - RNA, 13 nt, Human
cucaucuuucuug

SEQ ID NO: 2228345 - RNA, 15 nt, Human
cucaucuuucuugau

SEQ ID NO: 2228346 - RNA, 13 nt, Human
cucaugaaucugc

SEQ ID NO: 2228347 - RNA, 21 nt, Human
cucaugaaccucaagcugcau

SEQ ID NO: 2228348 - RNA, 12 nt, Human
cucaugaaccuc

SEQ ID NO: 2228349 - RNA, 18 nt, Human
cucagucuggcccuuccu

SEQ ID NO: 2228350 - RNA, 17 nt, Human
cucagucuggcccuucc

SEQ ID NO: 2228351 - RNA, 13 nt, Human
cucagucucugag

SEQ ID NO: 2228352 - RNA, 15 nt, Human
cucagucucccuuuc

SEQ ID NO: 2228353 - RNA, 19 nt, Human
cuaaagaguuuauuuuaag

SEQ ID NO: 2228354 - RNA, 18 nt, Human
cuaaagaguuuauuuuaa

SEQ ID NO: 2228355 - RNA, 18 nt, Human
cuaaagaggcugaaagag

SEQ ID NO: 2228356 - RNA, 23 nt, Human
cuaaagagcccuugccuccccau

SEQ ID NO: 2228357 - RNA, 19 nt, Human
cuaaagagcccuugccucc

SEQ ID NO: 2228358 - RNA, 20 nt, Human
cuaaagagcccuugccuccc

SEQ ID NO: 2228359 - RNA, 21 nt, Human
cuaaagagcccuugccucccc

SEQ ID NO: 2228360 - RNA, 22 nt, Human
cuaaagagcccuugccucccca

SEQ ID NO: 2228361 - RNA, 17 nt, Human
cuaaccuggguucccuu

SEQ ID NO: 2228362 - RNA, 12 nt, Human
cuaaccugugac

SEQ ID NO: 2228363 - RNA, 15 nt, Human
cuaacuucaccauau

SEQ ID NO: 2228364 - RNA, 23 nt, Human
cuaagaaaagauacgacuuuauu

SEQ ID NO: 2228365 - RNA, 15 nt, Human
cuaagaaaagauuuu

SEQ ID NO: 2228366 - RNA, 14 nt, Human
cuaagaaaagauuu

SEQ ID NO: 2228367 - RNA, 22 nt, Human
cuaagaaaagauacgacuuuau

SEQ ID NO: 2228368 - RNA, 16 nt, Human
cuaacuuuccuucauu

SEQ ID NO: 2228369 - RNA, 16 nt, Human
cuaacuucaccauauu

SEQ ID NO: 2228370 - RNA, 20 nt, Human
cuaagaaaagauuuuaauca

SEQ ID NO: 2228371 - RNA, 21 nt, Human
cuaagaaaagauuuuaaucaa

SEQ ID NO: 2228372 - RNA, 16 nt, Human
cuaagaaagaggagug

SEQ ID NO: 2228373 - RNA, 19 nt, Human
cuaagaaagaggagugcuu

SEQ ID NO: 2228374 - RNA, 23 nt, Human
cggcuccugugcuuucccugaac

SEQ ID NO: 2228375 - RNA, 18 nt, Human
cggcucuagguggggcgg

SEQ ID NO: 2228376 - RNA, 16 nt, Human
cggcucuuuccuugcu

SEQ ID NO: 2228377 - RNA, 23 nt, Human
cggcucucuauagcaccagggcu

SEQ ID NO: 2228378 - RNA, 18 nt, Human
cggcucuuuccuugcuca

SEQ ID NO: 2228379 - RNA, 11 nt, Human
cggcugaccau

SEQ ID NO: 2228380 - RNA, 14 nt, Human
cggcugaccaugcu

SEQ ID NO: 2228381 - RNA, 15 nt, Human
cggcugaccaugcuc

SEQ ID NO: 2228382 - RNA, 16 nt, Human
cggcugaccaugcuca

SEQ ID NO: 2228383 - RNA, 22 nt, Human
cggcugaccaugcucaucugcu

SEQ ID NO: 2228384 - RNA, 23 nt, Human
cggcugaccaugcucaucugcug

SEQ ID NO: 2228385 - RNA, 11 nt, Human
cggcugagagc

SEQ ID NO: 2228386 - RNA, 14 nt, Human
cggcugagagcccc

SEQ ID NO: 2228387 - RNA, 19 nt, Human
cggcugagagccccagcug

SEQ ID NO: 2228388 - RNA, 20 nt, Human
cggcugagagccccagcuga

SEQ ID NO: 2228389 - RNA, 15 nt, Human
cggcugagagcccca

SEQ ID NO: 2228390 - RNA, 16 nt, Human
cggcugagagccccag

SEQ ID NO: 2228391 - RNA, 17 nt, Human
cggcugagagccccagc

SEQ ID NO: 2228392 - RNA, 18 nt, Human
cggcugagagccccagcu

SEQ ID NO: 2228393 - RNA, 16 nt, Human
cgugacagugccuggg

SEQ ID NO: 2228394 - RNA, 18 nt, Human
cgugacagacuccugagg

SEQ ID NO: 2228395 - RNA, 13 nt, Human
cgugacucaccca

SEQ ID NO: 2228396 - RNA, 20 nt, Human
cgugacgcugaauaaauguc

SEQ ID NO: 2228397 - RNA, 14 nt, Human
cgugacgcugaaua

SEQ ID NO: 2228398 - RNA, 16 nt, Human
cgugacgcugaauaaa

SEQ ID NO: 2228399 - RNA, 19 nt, Human
cgugacgcugaauaaaugu

SEQ ID NO: 2228400 - RNA, 18 nt, Human
cgugacauccccacccuu

SEQ ID NO: 2228401 - RNA, 17 nt, Human
cgugacagugccuggga

SEQ ID NO: 2228402 - RNA, 23 nt, Human
cgugaccaacuagacauucuguc

SEQ ID NO: 2228403 - RNA, 20 nt, Human
cgugaccggacuuuucugca

SEQ ID NO: 2228404 - RNA, 22 nt, Human
cgugggucuucagggggccagg

SEQ ID NO: 2228405 - RNA, 15 nt, Human
cguggucaagcacuc

SEQ ID NO: 2228406 - RNA, 15 nt, Human
cguggucacugcugu

SEQ ID NO: 2228407 - RNA, 16 nt, Human
cguggucacugcuguc

SEQ ID NO: 2228408 - RNA, 17 nt, Human
cguggucacugcuguca

SEQ ID NO: 2228409 - RNA, 21 nt, Human
cgugguccccaacagcgacau

SEQ ID NO: 2228410 - RNA, 18 nt, Human
cgugggucuguuuuccuu

SEQ ID NO: 2228411 - RNA, 19 nt, Human
cgugggucuguuuuccuuu

SEQ ID NO: 2228412 - RNA, 20 nt, Human
cgugggucuguuuuccuuuc

SEQ ID NO: 2228413 - RNA, 23 nt, Human
cguggguguguguagccaagguc

SEQ ID NO: 2228414 - RNA, 20 nt, Human
cguggggcagcacagagagg

SEQ ID NO: 2228415 - RNA, 14 nt, Human
cgugagccaccgcg

SEQ ID NO: 2228416 - RNA, 23 nt, Human
cgugagacgccaccauuccugga

SEQ ID NO: 2228417 - RNA, 15 nt, Human
cguggggugugcugg

SEQ ID NO: 2228418 - RNA, 17 nt, Human
cguggggugugcuggga

SEQ ID NO: 2228419 - RNA, 18 nt, Human
cguggggugugcugggag

SEQ ID NO: 2228420 - RNA, 17 nt, Human
cgugacugccccaacuc

SEQ ID NO: 2228421 - RNA, 16 nt, Human
cgugacugccccaacu

SEQ ID NO: 2228422 - RNA, 13 nt, Human
cgugacugcccca

SEQ ID NO: 2228423 - RNA, 18 nt, Human
cgugacucacccaagcau

SEQ ID NO: 2228424 - RNA, 17 nt, Human
cgugacucacccaagca

SEQ ID NO: 2228425 - RNA, 16 nt, Human
cgugacucacccaagc

SEQ ID NO: 2228426 - RNA, 15 nt, Human
cgugacucacccaag

SEQ ID NO: 2228427 - RNA, 14 nt, Human
cgugacucacccaa

SEQ ID NO: 2228428 - RNA, 23 nt, Human
cgugacugccccaacuccuggaa

SEQ ID NO: 2228429 - RNA, 22 nt, Human
cgugacugccccaacuccugga

SEQ ID NO: 2228430 - RNA, 21 nt, Human
cgugacugccccaacuccugg

SEQ ID NO: 2228431 - RNA, 20 nt, Human
cgugacugccccaacuccug

SEQ ID NO: 2228432 - RNA, 13 nt, Human
cgugagaccugcc

SEQ ID NO: 2228433 - RNA, 23 nt, Human
cgugagagugucuucacggcagg

SEQ ID NO: 2228434 - RNA, 21 nt, Human
cgugagacgccaccauuccug

SEQ ID NO: 2228435 - RNA, 23 nt, Human
cgugagccaccgugccuggccac

SEQ ID NO: 2228436 - RNA, 16 nt, Human
cgugagaccugccccu

SEQ ID NO: 2228437 - RNA, 14 nt, Human
cgugagaccugccc

SEQ ID NO: 2228438 - RNA, 13 nt, Human
cuaaacuuucaca

SEQ ID NO: 2228439 - RNA, 14 nt, Human
cuaaacuuucacac

SEQ ID NO: 2228440 - RNA, 15 nt, Human
cuaaagagcccuugc

SEQ ID NO: 2228441 - RNA, 16 nt, Human
cuaaagagcccuugcc

SEQ ID NO: 2228442 - RNA, 17 nt, Human
cuaaagagcccuugccu

SEQ ID NO: 2228443 - RNA, 18 nt, Human
cuaaagagcccuugccuc

SEQ ID NO: 2228444 - RNA, 18 nt, Human
cgugugcacacacaccac

SEQ ID NO: 2228445 - RNA, 18 nt, Human
cgugugauuuuucuggag

SEQ ID NO: 2228446 - RNA, 23 nt, Human
cuaaacugcccccucugcccugc

SEQ ID NO: 2228447 - RNA, 20 nt, Human
cuaaacuuccccaucuucua

SEQ ID NO: 2228448 - RNA, 16 nt, Human
cuaaacuuccccaucu

SEQ ID NO: 2228449 - RNA, 22 nt, Human
cgugucuguauuuaugugugag

SEQ ID NO: 2228450 - RNA, 21 nt, Human
cgugugagaagugaaugcugg

SEQ ID NO: 2228451 - RNA, 23 nt, Human
cgugugagaagugaaugcuggga

SEQ ID NO: 2228452 - RNA, 22 nt, Human
cuaaacugcccccucugcccug

SEQ ID NO: 2228453 - RNA, 22 nt, Human
cgugugagaagugaaugcuggg

SEQ ID NO: 2228454 - RNA, 11 nt, Human
cgugugauuuu

SEQ ID NO: 2228455 - RNA, 15 nt, Human
cgugugauuuuucug

SEQ ID NO: 2228456 - RNA, 14 nt, Human
cgugucuguauuua

SEQ ID NO: 2228457 - RNA, 21 nt, Human
cguggugaucaauuaaaugua

SEQ ID NO: 2228458 - RNA, 17 nt, Human
cuaauuuuuaagcaaaa

SEQ ID NO: 2228459 - RNA, 17 nt, Human
cuaauuuuuauucauaa

SEQ ID NO: 2228460 - RNA, 20 nt, Human
cuaauuuuuguaauuuuagu

SEQ ID NO: 2228461 - RNA, 14 nt, Human
cuaauuuuuguaau

SEQ ID NO: 2228462 - RNA, 23 nt, Human
cuacaaaaaauuagaaauuggcu

SEQ ID NO: 2228463 - RNA, 21 nt, Human
cuacaaacaaaauuucuauua

SEQ ID NO: 2228464 - RNA, 20 nt, Human
cuaauuuuuguauuuuucgu

SEQ ID NO: 2228465 - RNA, 10 nt, Human
cuacaaauca

SEQ ID NO: 2228466 - RNA, 19 nt, Human
cuacaaagaagacauguuu

SEQ ID NO: 2228467 - RNA, 20 nt, Human
cuacaaagaagacauguuuu

SEQ ID NO: 2228468 - RNA, 14 nt, Human
cuacaaagaagaca

SEQ ID NO: 2228469 - RNA, 15 nt, Human
cuacaaagaagacau

SEQ ID NO: 2228470 - RNA, 16 nt, Human
cuacaaagaagacaug

SEQ ID NO: 2228471 - RNA, 18 nt, Human
cuacaaagaagacauguu

SEQ ID NO: 2228472 - RNA, 14 nt, Human
cuacaacugagucc

SEQ ID NO: 2228473 - RNA, 20 nt, Human
cuacaaccaagcucucugca

SEQ ID NO: 2228474 - RNA, 14 nt, Human
cuacaacuucagca

SEQ ID NO: 2228475 - RNA, 13 nt, Human
cuacaaccaagcu

SEQ ID NO: 2228476 - RNA, 18 nt, Human
cuacaaccaagcucucug

SEQ ID NO: 2228477 - RNA, 16 nt, Human
cuacaacaagaguuua

SEQ ID NO: 2228478 - RNA, 19 nt, Human
cuaauuggccucuuuaaga

SEQ ID NO: 2228479 - RNA, 13 nt, Human
cuaauuguauaac

SEQ ID NO: 2228480 - RNA, 15 nt, Human
cuaauuguauaacag

SEQ ID NO: 2228481 - RNA, 16 nt, Human
cuaauuguauaacagg

SEQ ID NO: 2228482 - RNA, 17 nt, Human
cuaauuguauaacaggu

SEQ ID NO: 2228483 - RNA, 18 nt, Human
cuaauuguauaacagguu

SEQ ID NO: 2228484 - RNA, 14 nt, Human
cuaauuuaaaaaau

SEQ ID NO: 2228485 - RNA, 19 nt, Human
cuaauuguauaacagguua

SEQ ID NO: 2228486 - RNA, 20 nt, Human
cuaauuguauaacagguuau

SEQ ID NO: 2228487 - RNA, 22 nt, Human
cuaauuguauaacagguuauuu

SEQ ID NO: 2228488 - RNA, 12 nt, Human
cuaauuuaaaaa

SEQ ID NO: 2228489 - RNA, 22 nt, Human
cuaauuggcaugaaggugucau

SEQ ID NO: 2228490 - RNA, 21 nt, Human
cuaauuggaagaaauuccugu

SEQ ID NO: 2228491 - RNA, 22 nt, Human
cuaauuggaagaaauuccugua

SEQ ID NO: 2228492 - RNA, 19 nt, Human
cuaauuggaagaaauuccu

SEQ ID NO: 2228493 - RNA, 14 nt, Human
cuaagugauauaaa

SEQ ID NO: 2228494 - RNA, 16 nt, Human
cuaagugauauaaauc

SEQ ID NO: 2228495 - RNA, 14 nt, Human
cuaagugaaaaggu

SEQ ID NO: 2228496 - RNA, 16 nt, Human
cuaagucuuuccauug

SEQ ID NO: 2228497 - RNA, 13 nt, Human
cuaagugauauaa

SEQ ID NO: 2228498 - RNA, 18 nt, Human
cuaagugaggaugaaaaa

SEQ ID NO: 2228499 - RNA, 20 nt, Human
cuaagugauccucccaccuc

SEQ ID NO: 2228500 - RNA, 22 nt, Human
cuaagugauccucccaccucag

SEQ ID NO: 2228501 - RNA, 20 nt, Human
cuacaguguacagucuugua

SEQ ID NO: 2228502 - RNA, 23 nt, Human
cuacaguuaggguugaguuacuu

SEQ ID NO: 2228503 - RNA, 13 nt, Human
cuacaguugaaaa

SEQ ID NO: 2228504 - RNA, 15 nt, Human
cuacaguguacaguc

SEQ ID NO: 2228505 - RNA, 14 nt, Human
cuacaguguacagu

SEQ ID NO: 2228506 - RNA, 16 nt, Human
cuacaacuucagcagu

SEQ ID NO: 2228507 - RNA, 17 nt, Human
cuacaacuucagcagua

SEQ ID NO: 2228508 - RNA, 16 nt, Human
cuacaguguacagucu

SEQ ID NO: 2228509 - RNA, 17 nt, Human
cuacaguguacagucuu

SEQ ID NO: 2228510 - RNA, 15 nt, Human
cuacaguccucccau

SEQ ID NO: 2228511 - RNA, 16 nt, Human
cuacaguccucccauc

SEQ ID NO: 2228512 - RNA, 17 nt, Human
cuacaguccucccaucu

SEQ ID NO: 2228513 - RNA, 18 nt, Human
cuacaguccucccaucuc

SEQ ID NO: 2228514 - RNA, 18 nt, Human
cuacauacaauuccaaac

SEQ ID NO: 2228515 - RNA, 20 nt, Human
cuacauaaacugacuuuauc

SEQ ID NO: 2228516 - RNA, 14 nt, Human
cuacaugaaacaga

SEQ ID NO: 2228517 - RNA, 23 nt, Human
cuacauaaguaauucaagaaaac

SEQ ID NO: 2228518 - RNA, 12 nt, Human
cuacauaaacug

SEQ ID NO: 2228519 - RNA, 15 nt, Human
cuacauaaacugacu

SEQ ID NO: 2228520 - RNA, 22 nt, Human
cuacauaaguaauucaagaaaa

SEQ ID NO: 2228521 - RNA, 17 nt, Human
cuacauaaacugacuuu

SEQ ID NO: 2228522 - RNA, 18 nt, Human
cuacauaaacugacuuua

SEQ ID NO: 2228523 - RNA, 22 nt, Human
cuacauaaacugacuuuauccu

SEQ ID NO: 2228524 - RNA, 17 nt, Human
cuacaugagaacaaaca

SEQ ID NO: 2228525 - RNA, 14 nt, Human
cuacaugagaacaa

SEQ ID NO: 2228526 - RNA, 15 nt, Human
cuacaugagguacug

SEQ ID NO: 2228527 - RNA, 13 nt, Human
cuacaugagaaca

SEQ ID NO: 2228528 - RNA, 18 nt, Human
cuacaugaaacagaaaca

SEQ ID NO: 2228529 - RNA, 16 nt, Human
cuacaugaaacagaaa

SEQ ID NO: 2228530 - RNA, 15 nt, Human
cuacaugaaacagaa

SEQ ID NO: 2228531 - RNA, 23 nt, Human
cuaagugaaauaagccagacauc

SEQ ID NO: 2228532 - RNA, 20 nt, Human
cuaagugaaauaagccagac

SEQ ID NO: 2228533 - RNA, 14 nt, Human
cuaagucuuuccau

SEQ ID NO: 2228534 - RNA, 17 nt, Human
cuauaaaguaaagcuaa

SEQ ID NO: 2228535 - RNA, 23 nt, Human
cuauaaaugguguuuuuuuaaua

SEQ ID NO: 2228536 - RNA, 16 nt, Human
cuauaaaugguguuuu

SEQ ID NO: 2228537 - RNA, 18 nt, Human
cuauaaaugguguuuuuu

SEQ ID NO: 2228538 - RNA, 17 nt, Human
cuauaaauuccucuuug

SEQ ID NO: 2228539 - RNA, 15 nt, Human
cuauaaauuccucuu

SEQ ID NO: 2228540 - RNA, 18 nt, Human
cuauaaccccagcucccu

SEQ ID NO: 2228541 - RNA, 22 nt, Human
cuauaaauuccucuuugcuuug

SEQ ID NO: 2228542 - RNA, 19 nt, Human
cuauaaauuccucuuugcu

SEQ ID NO: 2228543 - RNA, 23 nt, Human
cuauaaauuccucuuugcuuugc

SEQ ID NO: 2228544 - RNA, 22 nt, Human
cuaguucuuuguucauagccca

SEQ ID NO: 2228545 - RNA, 23 nt, Human
cuaguugaucagcuuauugucua

SEQ ID NO: 2228546 - RNA, 22 nt, Human
cuaguuccaccaucaagccacc

SEQ ID NO: 2228547 - RNA, 17 nt, Human
cuaguucuguagaaaug

SEQ ID NO: 2228548 - RNA, 23 nt, Human
cuaguucuguagaaaugguugua

SEQ ID NO: 2228549 - RNA, 16 nt, Human
cuaguucuguagaaau

SEQ ID NO: 2228550 - RNA, 22 nt, Human
cuauaaccccagcucccuagga

SEQ ID NO: 2228551 - RNA, 13 nt, Human
cuagccucuccag

SEQ ID NO: 2228552 - RNA, 21 nt, Human
cuaggcuuaauaccuggguga

SEQ ID NO: 2228553 - RNA, 20 nt, Human
cuaggcuggagcccagggag

SEQ ID NO: 2228554 - RNA, 11 nt, Human
cuaggcugggg

SEQ ID NO: 2228555 - RNA, 17 nt, Human
cuaggcuggagcccagg

SEQ ID NO: 2228556 - RNA, 19 nt, Human
cuagggaaaaaccagcgug

SEQ ID NO: 2228557 - RNA, 20 nt, Human
cuagccgaccucagccuucc

SEQ ID NO: 2228558 - RNA, 19 nt, Human
cuagccgaccucagccuuc

SEQ ID NO: 2228559 - RNA, 18 nt, Human
cuagccgaccucagccuu

SEQ ID NO: 2228560 - RNA, 17 nt, Human
cuagccgaccucagccu

SEQ ID NO: 2228561 - RNA, 16 nt, Human
cuagccgaccucagcc

SEQ ID NO: 2228562 - RNA, 15 nt, Human
cuagccgaccucagc

SEQ ID NO: 2228563 - RNA, 14 nt, Human
cuagccgaccucag

SEQ ID NO: 2228564 - RNA, 13 nt, Human
cuagccgaccuca

SEQ ID NO: 2228565 - RNA, 19 nt, Human
cuagcccucucacauuuau

SEQ ID NO: 2228566 - RNA, 18 nt, Human
cuagcccucucacauuua

SEQ ID NO: 2228567 - RNA, 13 nt, Human
cuagcccucucac

SEQ ID NO: 2228568 - RNA, 16 nt, Human
cuagcccgaauacaaa

SEQ ID NO: 2228569 - RNA, 22 nt, Human
cuagcccauggacuucacauaa

SEQ ID NO: 2228570 - RNA, 14 nt, Human
cuagccccugugga

SEQ ID NO: 2228571 - RNA, 20 nt, Human
cuagccccuguggagacugg

SEQ ID NO: 2228572 - RNA, 21 nt, Human
cuagccccuguggagacuggg

SEQ ID NO: 2228573 - RNA, 16 nt, Human
cuagggauucaggcug

SEQ ID NO: 2228574 - RNA, 15 nt, Human
cuagggauucaggcu

SEQ ID NO: 2228575 - RNA, 19 nt, Human
cuagggauguucuggcccu

SEQ ID NO: 2228576 - RNA, 16 nt, Human
cuagggaguggucuuu

SEQ ID NO: 2228577 - RNA, 23 nt, Human
cuagggaucccucaucugucccu

SEQ ID NO: 2228578 - RNA, 18 nt, Human
cuagggauucaggcugcu

SEQ ID NO: 2228579 - RNA, 17 nt, Human
cuagggauucaggcugc

SEQ ID NO: 2228580 - RNA, 20 nt, Human
cuagggauucaggcugcuug

SEQ ID NO: 2228581 - RNA, 16 nt, Human
cuagggccaagcccag

SEQ ID NO: 2228582 - RNA, 23 nt, Human
cuaggcuucagcauauuuauagc

SEQ ID NO: 2228583 - RNA, 21 nt, Human
cuaggcuucagcauauuuaua

SEQ ID NO: 2228584 - RNA, 13 nt, Human
cuaggcuggggaa

SEQ ID NO: 2228585 - RNA, 22 nt, Human
cuaggcuggggaaguccucugg

SEQ ID NO: 2228586 - RNA, 17 nt, Human
cuagggaucccucaucu

SEQ ID NO: 2228587 - RNA, 13 nt, Human
cuagggaucccuc

SEQ ID NO: 2228588 - RNA, 21 nt, Human
cuagggaaaaaccagcgugug

SEQ ID NO: 2228589 - RNA, 15 nt, Human
cuagggccacugaag

SEQ ID NO: 2228590 - RNA, 19 nt, Human
cuaggggacacuucccucu

SEQ ID NO: 2228591 - RNA, 12 nt, Human
cuaggggagcag

SEQ ID NO: 2228592 - RNA, 17 nt, Human
cuaggggagcagggggc

SEQ ID NO: 2228593 - RNA, 15 nt, Human
cuagggccuggguuu

SEQ ID NO: 2228594 - RNA, 18 nt, Human
cuagggccaagcccagca

SEQ ID NO: 2228595 - RNA, 17 nt, Human
cuagggccaagcccagc

SEQ ID NO: 2228596 - RNA, 18 nt, Human
cuaguuccaccaucaagc

SEQ ID NO: 2228597 - RNA, 20 nt, Human
cuaguuccaccaucaagcca

SEQ ID NO: 2228598 - RNA, 23 nt, Human
cuagaaaugauccccagcuguuu

SEQ ID NO: 2228599 - RNA, 20 nt, Human
cuagaaauugacacaagugg

SEQ ID NO: 2228600 - RNA, 16 nt, Human
cuagaaauugacacaa

SEQ ID NO: 2228601 - RNA, 23 nt, Human
cuagaaauuuuucagaugcuucu

SEQ ID NO: 2228602 - RNA, 13 nt, Human
cuagaaauuuuuc

SEQ ID NO: 2228603 - RNA, 19 nt, Human
cuagaacacaggcaaaauc

SEQ ID NO: 2228604 - RNA, 14 nt, Human
cuagaacacaggca

SEQ ID NO: 2228605 - RNA, 19 nt, Human
cuagaaauuccccacccug

SEQ ID NO: 2228606 - RNA, 18 nt, Human
cuagaacucuccaucuua

SEQ ID NO: 2228607 - RNA, 22 nt, Human
cuagaacacaggcaaaauccuu

SEQ ID NO: 2228608 - RNA, 21 nt, Human
cuagaacacaggcaaaauccu

SEQ ID NO: 2228609 - RNA, 22 nt, Human
cuagcagcagggagggcuucug

SEQ ID NO: 2228610 - RNA, 12 nt, Human
cuagcagcaggg

SEQ ID NO: 2228611 - RNA, 19 nt, Human
cuagaacucccuuucaaca

SEQ ID NO: 2228612 - RNA, 18 nt, Human
cuagaacucccuuucaac

SEQ ID NO: 2228613 - RNA, 17 nt, Human
cuagaacucccuuucaa

SEQ ID NO: 2228614 - RNA, 16 nt, Human
cuagaacucccuuuca

SEQ ID NO: 2228615 - RNA, 23 nt, Human
cuagcagcagggagggcuucugc

SEQ ID NO: 2228616 - RNA, 20 nt, Human
cuagaagaugaauacaaaca

SEQ ID NO: 2228617 - RNA, 22 nt, Human
cuagcagugaugaaaaugaauc

SEQ ID NO: 2228618 - RNA, 16 nt, Human
cuagaacacagaaagc

SEQ ID NO: 2228619 - RNA, 15 nt, Human
cuagaagaugaauac

SEQ ID NO: 2228620 - RNA, 17 nt, Human
cuagcauggcugccaau

SEQ ID NO: 2228621 - RNA, 18 nt, Human
cuagccaccgccuccuac

SEQ ID NO: 2228622 - RNA, 23 nt, Human
cuagccaaaugguuuaacuucug

SEQ ID NO: 2228623 - RNA, 13 nt, Human
cuagccccugugg

SEQ ID NO: 2228624 - RNA, 14 nt, Human
cuagcccauggacu

SEQ ID NO: 2228625 - RNA, 19 nt, Human
cuagcccauggacuucaca

SEQ ID NO: 2228626 - RNA, 19 nt, Human
cuagcccaggagagagaaa

SEQ ID NO: 2228627 - RNA, 20 nt, Human
cuagcccaggagagagaaag

SEQ ID NO: 2228628 - RNA, 22 nt, Human
cuagcccaggagagagaaagcc

SEQ ID NO: 2228629 - RNA, 23 nt, Human
cuagcccaggagagagaaagcca

SEQ ID NO: 2228630 - RNA, 22 nt, Human
cuagccaccaacucuugcaggu

SEQ ID NO: 2228631 - RNA, 15 nt, Human
cuagccaccaacucu

SEQ ID NO: 2228632 - RNA, 21 nt, Human
cuagccaccaacucuugcagg

SEQ ID NO: 2228633 - RNA, 15 nt, Human
cuagcccaggagaga

SEQ ID NO: 2228634 - RNA, 16 nt, Human
cuagcccaggagagag

SEQ ID NO: 2228635 - RNA, 17 nt, Human
cuagcccaggagagaga

SEQ ID NO: 2228636 - RNA, 18 nt, Human
cuagcccaggagagagaa

SEQ ID NO: 2228637 - RNA, 15 nt, Human
cuaccugaggggccu

SEQ ID NO: 2228638 - RNA, 20 nt, Human
cuaccugacacucccuuggg

SEQ ID NO: 2228639 - RNA, 19 nt, Human
cuaccugacacucccuugg

SEQ ID NO: 2228640 - RNA, 11 nt, Human
cuaccugaggg

SEQ ID NO: 2228641 - RNA, 14 nt, Human
cuaccugaggggcc

SEQ ID NO: 2228642 - RNA, 19 nt, Human
cggcggagcuggccccgcc

SEQ ID NO: 2228643 - RNA, 21 nt, Human
cggcggagcuggccccgccgc

SEQ ID NO: 2228644 - RNA, 13 nt, Human
cggcggagcuggc

SEQ ID NO: 2228645 - RNA, 20 nt, Human
cggcgcgguggcucacgccu

SEQ ID NO: 2228646 - RNA, 13 nt, Human
cggcgcgguggcu

SEQ ID NO: 2228647 - RNA, 17 nt, Human
cggcgcccucuguccug

SEQ ID NO: 2228648 - RNA, 18 nt, Human
cggcgcccucuguccuga

SEQ ID NO: 2228649 - RNA, 18 nt, Human
cggcgccccugccaccuc

SEQ ID NO: 2228650 - RNA, 15 nt, Human
cggcgccaccauccu

SEQ ID NO: 2228651 - RNA, 17 nt, Human
cggcgccaccauccugc

SEQ ID NO: 2228652 - RNA, 13 nt, Human
cggcgccaccauc

SEQ ID NO: 2228653 - RNA, 16 nt, Human
cggaguccacucccag

SEQ ID NO: 2228654 - RNA, 20 nt, Human
cggaguccacucccagugcu

SEQ ID NO: 2228655 - RNA, 14 nt, Human
cggagucccaccuu

SEQ ID NO: 2228656 - RNA, 16 nt, Human
cggaggggccuggcag

SEQ ID NO: 2228657 - RNA, 18 nt, Human
cggaggggccuggcagcc

SEQ ID NO: 2228658 - RNA, 21 nt, Human
cggagccucauccgaggcagg

SEQ ID NO: 2228659 - RNA, 20 nt, Human
cggagccucauccgaggcag

SEQ ID NO: 2228660 - RNA, 22 nt, Human
cggagccucauccgaggcaggg

SEQ ID NO: 2228661 - RNA, 20 nt, Human
cggagccgggaaagaagagc

SEQ ID NO: 2228662 - RNA, 18 nt, Human
cggagcuaacacuggccc

SEQ ID NO: 2228663 - RNA, 17 nt, Human
cggagcuaacacuggcc

SEQ ID NO: 2228664 - RNA, 13 nt, Human
cggagguugcagg

SEQ ID NO: 2228665 - RNA, 16 nt, Human
cggagguguggagccg

SEQ ID NO: 2228666 - RNA, 18 nt, Human
cggaguaucugggaacug

SEQ ID NO: 2228667 - RNA, 15 nt, Human
cggagucagugccag

SEQ ID NO: 2228668 - RNA, 19 nt, Human
cggagucagugccaggucc

SEQ ID NO: 2228669 - RNA, 22 nt, Human
cggagguugggugggccggcuu

SEQ ID NO: 2228670 - RNA, 13 nt, Human
cggcuccugugcu

SEQ ID NO: 2228671 - RNA, 14 nt, Human
cggcuccugcugca

SEQ ID NO: 2228672 - RNA, 15 nt, Human
cggcuccugcugcac

SEQ ID NO: 2228673 - RNA, 17 nt, Human
cggcuccugcugcacca

SEQ ID NO: 2228674 - RNA, 23 nt, Human
cggcuccugcugcaccaacccag

SEQ ID NO: 2228675 - RNA, 20 nt, Human
cggcucgagcaguccugccu

SEQ ID NO: 2228676 - RNA, 14 nt, Human
cggcuccugugcuu

SEQ ID NO: 2228677 - RNA, 20 nt, Human
cggcucggaggaagccccca

SEQ ID NO: 2228678 - RNA, 16 nt, Human
cggcucggaggaagcc

SEQ ID NO: 2228679 - RNA, 12 nt, Human
cggcuccugcug

SEQ ID NO: 2228680 - RNA, 19 nt, Human
cggcuccucggacucugcu

SEQ ID NO: 2228681 - RNA, 13 nt, Human
cggcuccugcugc

SEQ ID NO: 2228682 - RNA, 21 nt, Human
cggcucacugcauccuccgcc

SEQ ID NO: 2228683 - RNA, 15 nt, Human
cggcucccuggagcc

SEQ ID NO: 2228684 - RNA, 19 nt, Human
cggcucacugcagccucaa

SEQ ID NO: 2228685 - RNA, 17 nt, Human
cggcucacugcauccuc

SEQ ID NO: 2228686 - RNA, 18 nt, Human
cggcucacugcagccuca

SEQ ID NO: 2228687 - RNA, 20 nt, Human
cggcgcuugccacuagggcu

SEQ ID NO: 2228688 - RNA, 12 nt, Human
cggcggcgccgg

SEQ ID NO: 2228689 - RNA, 11 nt, Human
cggagccacuc

SEQ ID NO: 2228690 - RNA, 17 nt, Human
cggagccacuccucuga

SEQ ID NO: 2228691 - RNA, 13 nt, Human
cggagccacuccu

SEQ ID NO: 2228692 - RNA, 21 nt, Human
cggagccacuccucugacuca

SEQ ID NO: 2228693 - RNA, 18 nt, Human
cggagccacuccucugac

SEQ ID NO: 2228694 - RNA, 12 nt, Human
cggagccccagg

SEQ ID NO: 2228695 - RNA, 14 nt, Human
cggagccccaggcc

SEQ ID NO: 2228696 - RNA, 22 nt, Human
cggagccccaggccucuguguc

SEQ ID NO: 2228697 - RNA, 19 nt, Human
cggagauuggacggccuga

SEQ ID NO: 2228698 - RNA, 16 nt, Human
cggagcaaacucugcu

SEQ ID NO: 2228699 - RNA, 17 nt, Human
cggagcaaacucugcug

SEQ ID NO: 2228700 - RNA, 22 nt, Human
cgccuccccgaaacaggcuacu

SEQ ID NO: 2228701 - RNA, 14 nt, Human
cgccucgcccaccg

SEQ ID NO: 2228702 - RNA, 13 nt, Human
cgccucgcccacc

SEQ ID NO: 2228703 - RNA, 15 nt, Human
cgccucccagccugg

SEQ ID NO: 2228704 - RNA, 22 nt, Human
cgccgugaguucucagggcucc

SEQ ID NO: 2228705 - RNA, 16 nt, Human
cgccuccccugcccca

SEQ ID NO: 2228706 - RNA, 24 nt, Human
cgccuccccacggccgcuccaggg

SEQ ID NO: 2228707 - RNA, 10 nt, Human
cgccuccccg

SEQ ID NO: 2228708 - RNA, 13 nt, Human
cgccucucccguc

SEQ ID NO: 2228709 - RNA, 15 nt, Human
cgccucucccgucag

SEQ ID NO: 2228710 - RNA, 21 nt, Human
cgccucucccgucagggccca

SEQ ID NO: 2228711 - RNA, 15 nt, Human
cgccucgcccaccgc

SEQ ID NO: 2228712 - RNA, 16 nt, Human
cgccucgcccaccgca

SEQ ID NO: 2228713 - RNA, 19 nt, Human
cgccucgcccaccgcaugc

SEQ ID NO: 2228714 - RNA, 22 nt, Human
cgccucgcccaccgcaugcccc

SEQ ID NO: 2228715 - RNA, 22 nt, Human
cgccucugcaagggcagaacac

SEQ ID NO: 2228716 - RNA, 22 nt, Human
cgagugugaagcuuccuuggcu

SEQ ID NO: 2228717 - RNA, 18 nt, Human
cgagugugugcaugugug

SEQ ID NO: 2228718 - RNA, 11 nt, Human
cgagugugugc

SEQ ID NO: 2228719 - RNA, 19 nt, Human
cgagugugugcaugugugu

SEQ ID NO: 2228720 - RNA, 15 nt, Human
cgagugcucauuuca

SEQ ID NO: 2228721 - RNA, 17 nt, Human
cgaguuacagacaaagc

SEQ ID NO: 2228722 - RNA, 18 nt, Human
cgaguuacagacaaagcg

SEQ ID NO: 2228723 - RNA, 13 nt, Human
cgaguagcuggga

SEQ ID NO: 2228724 - RNA, 14 nt, Human
cgaguagcugggac

SEQ ID NO: 2228725 - RNA, 15 nt, Human
cgaguagcugggacu

SEQ ID NO: 2228726 - RNA, 16 nt, Human
cgaguagcugggacua

SEQ ID NO: 2228727 - RNA, 19 nt, Human
cgccgcaaaccacacugga

SEQ ID NO: 2228728 - RNA, 20 nt, Human
cgccgcaaaccacacuggac

SEQ ID NO: 2228729 - RNA, 18 nt, Human
cgccgacuuuguaccccc

SEQ ID NO: 2228730 - RNA, 18 nt, Human
cgccgagucugucucugu

SEQ ID NO: 2228731 - RNA, 19 nt, Human
cgccgagucugucucuguc

SEQ ID NO: 2228732 - RNA, 23 nt, Human
cgccaaggcugggggaagaagcu

SEQ ID NO: 2228733 - RNA, 16 nt, Human
cgccaaggcuggggga

SEQ ID NO: 2228734 - RNA, 13 nt, Human
cgccaaggcuggg

SEQ ID NO: 2228735 - RNA, 12 nt, Human
cgccaaggcugg

SEQ ID NO: 2228736 - RNA, 20 nt, Human
cgcaggcuggcccugcccug

SEQ ID NO: 2228737 - RNA, 19 nt, Human
cgcaggcuggcccugcccu

SEQ ID NO: 2228738 - RNA, 18 nt, Human
cgcaggcuggcccugccc

SEQ ID NO: 2228739 - RNA, 17 nt, Human
cgcaggcuggcccugcc

SEQ ID NO: 2228740 - RNA, 15 nt, Human
cgcaggcuggcccug

SEQ ID NO: 2228741 - RNA, 14 nt, Human
cgcaggcuggcccu

SEQ ID NO: 2228742 - RNA, 14 nt, Human
cgccgccugguacu

SEQ ID NO: 2228743 - RNA, 15 nt, Human
cgccgccugguacuc

SEQ ID NO: 2228744 - RNA, 12 nt, Human
cgccgccucuuu

SEQ ID NO: 2228745 - RNA, 13 nt, Human
cgccgccucgccc

SEQ ID NO: 2228746 - RNA, 16 nt, Human
cgccgccucgcccacc

SEQ ID NO: 2228747 - RNA, 21 nt, Human
cgccgcaaaccacacuggacu

SEQ ID NO: 2228748 - RNA, 22 nt, Human
cgccgcaaaccacacuggacuc

SEQ ID NO: 2228749 - RNA, 23 nt, Human
cgccgcaaaccacacuggacucc

SEQ ID NO: 2228750 - RNA, 22 nt, Human
cgccgccggaguccacucccag

SEQ ID NO: 2228751 - RNA, 20 nt, Human
cgccgccugguacucaagcc

SEQ ID NO: 2228752 - RNA, 18 nt, Human
cgccgccucgcccaccgc

SEQ ID NO: 2228753 - RNA, 17 nt, Human
cgccgcuuuucuccucu

SEQ ID NO: 2228754 - RNA, 18 nt, Human
cgccggaguccacuccca

SEQ ID NO: 2228755 - RNA, 23 nt, Human
cgccggaguccacucccagugcu

SEQ ID NO: 2228756 - RNA, 22 nt, Human
cgccggcaaaacuuuggcacug

SEQ ID NO: 2228757 - RNA, 18 nt, Human
cgccggcgggcgggccgg

SEQ ID NO: 2228758 - RNA, 16 nt, Human
cgccggggacagaggc

SEQ ID NO: 2228759 - RNA, 17 nt, Human
cgccggggacagaggcc

SEQ ID NO: 2228760 - RNA, 19 nt, Human
cgccggggacagaggccug

SEQ ID NO: 2228761 - RNA, 16 nt, Human
cgccucccacuggggu

SEQ ID NO: 2228762 - RNA, 19 nt, Human
cgccucccacuggggucca

SEQ ID NO: 2228763 - RNA, 14 nt, Human
cgccucccagccug

SEQ ID NO: 2228764 - RNA, 11 nt, Human
cgccucccagc

SEQ ID NO: 2228765 - RNA, 15 nt, Human
cgccucccacugggg

SEQ ID NO: 2228766 - RNA, 13 nt, Human
cgccguggcugcg

SEQ ID NO: 2228767 - RNA, 23 nt, Human
cgccgugaguucucagggcuccu

SEQ ID NO: 2228768 - RNA, 14 nt, Human
cgccuacaggagug

SEQ ID NO: 2228769 - RNA, 15 nt, Human
cgccgucuccagggg

SEQ ID NO: 2228770 - RNA, 20 nt, Human
cgccggggacagaggccugc

SEQ ID NO: 2228771 - RNA, 22 nt, Human
cgccggggacagaggccugccc

SEQ ID NO: 2228772 - RNA, 17 nt, Human
cgccgugaguucucagg

SEQ ID NO: 2228773 - RNA, 18 nt, Human
cgccgugaguucucaggg

SEQ ID NO: 2228774 - RNA, 19 nt, Human
cgccgugaguucucagggc

SEQ ID NO: 2228775 - RNA, 21 nt, Human
cgccgugaguucucagggcuc

SEQ ID NO: 2228776 - RNA, 23 nt, Human
cgaccucguccucccccugccag

SEQ ID NO: 2228777 - RNA, 20 nt, Human
cgaccucuccaucuucagcu

SEQ ID NO: 2228778 - RNA, 22 nt, Human
cgaccucguccucccccugcca

SEQ ID NO: 2228779 - RNA, 19 nt, Human
cgaccucguccucccccug

SEQ ID NO: 2228780 - RNA, 16 nt, Human
cgaccucguccucccc

SEQ ID NO: 2228781 - RNA, 14 nt, Human
cgaccucguccucc

SEQ ID NO: 2228782 - RNA, 12 nt, Human
cgaccucggugg

SEQ ID NO: 2228783 - RNA, 15 nt, Human
cgaccucagccuucc

SEQ ID NO: 2228784 - RNA, 14 nt, Human
cgaccucagccuuc

SEQ ID NO: 2228785 - RNA, 13 nt, Human
cgaccucagccuu

SEQ ID NO: 2228786 - RNA, 12 nt, Human
cgaccucagccu

SEQ ID NO: 2228787 - RNA, 15 nt, Human
cgaccagagccccac

SEQ ID NO: 2228788 - RNA, 23 nt, Human
cgaccaccccugccuccacccuc

SEQ ID NO: 2228789 - RNA, 17 nt, Human
cgaccccaucugcccag

SEQ ID NO: 2228790 - RNA, 20 nt, Human
cgaccgaggcuggagcuggc

SEQ ID NO: 2228791 - RNA, 13 nt, Human
cgaccgcccccuc

SEQ ID NO: 2228792 - RNA, 14 nt, Human
cgaccccaucugcc

SEQ ID NO: 2228793 - RNA, 15 nt, Human
cgaccccaucugccc

SEQ ID NO: 2228794 - RNA, 16 nt, Human
cgaccccaucugccca

SEQ ID NO: 2228795 - RNA, 18 nt, Human
cgaccugauuuacaguuu

SEQ ID NO: 2228796 - RNA, 23 nt, Human
cgaccugauuuacaguuucaaaa

SEQ ID NO: 2228797 - RNA, 16 nt, Human
cgaccugccucggccu

SEQ ID NO: 2228798 - RNA, 18 nt, Human
cgaccugguuuuuaaaua

SEQ ID NO: 2228799 - RNA, 14 nt, Human
ccuuuugcaucauu

SEQ ID NO: 2228800 - RNA, 17 nt, Human
ccuuuugcaccugcucu

SEQ ID NO: 2228801 - RNA, 12 nt, Human
ccuuuuggcccc

SEQ ID NO: 2228802 - RNA, 12 nt, Human
ccuuuuggcacu

SEQ ID NO: 2228803 - RNA, 19 nt, Human
ccuuuugcggaugggaggg

SEQ ID NO: 2228804 - RNA, 18 nt, Human
ccuuuugcuugaaaccaa

SEQ ID NO: 2228805 - RNA, 19 nt, Human
ccuuuuguaccauggugug

SEQ ID NO: 2228806 - RNA, 23 nt, Human
ccuuuuggcccccgagcuggggg

SEQ ID NO: 2228807 - RNA, 21 nt, Human
ccuuuuggcccccgagcuggg

SEQ ID NO: 2228808 - RNA, 20 nt, Human
ccuuuuggcccccgagcugg

SEQ ID NO: 2228809 - RNA, 19 nt, Human
ccuuuuggcccccgagcug

SEQ ID NO: 2228810 - RNA, 15 nt, Human
ccuuuugucugccuc

SEQ ID NO: 2228811 - RNA, 13 nt, Human
ccuuuuuccuucc

SEQ ID NO: 2228812 - RNA, 21 nt, Human
ccuuuuuccccaaagucuuaa

SEQ ID NO: 2228813 - RNA, 14 nt, Human
ccuuuuucuccagc

SEQ ID NO: 2228814 - RNA, 13 nt, Human
ccuuuuuccuugu

SEQ ID NO: 2228815 - RNA, 14 nt, Human
ccuuuuuccuuguc

SEQ ID NO: 2228816 - RNA, 16 nt, Human
ccuuuuucuccagcug

SEQ ID NO: 2228817 - RNA, 17 nt, Human
ccuuuuuccuugucccc

SEQ ID NO: 2228818 - RNA, 18 nt, Human
ccuuuuucucccucugga

SEQ ID NO: 2228819 - RNA, 16 nt, Human
ccuuuuucuuuauaaa

SEQ ID NO: 2228820 - RNA, 20 nt, Human
ccuuuuucuuuauaaacuuu

SEQ ID NO: 2228821 - RNA, 21 nt, Human
ccuuuuucucccucuggauca

SEQ ID NO: 2228822 - RNA, 12 nt, Human
ccuuuuuuauac

SEQ ID NO: 2228823 - RNA, 19 nt, Human
cgacauggacccggagcua

SEQ ID NO: 2228824 - RNA, 14 nt, Human
cgaccacagggucu

SEQ ID NO: 2228825 - RNA, 23 nt, Human
cgaccacagggucugcacucuaa

SEQ ID NO: 2228826 - RNA, 15 nt, Human
cgaccaccccugccu

SEQ ID NO: 2228827 - RNA, 16 nt, Human
cgaccaccccugccuc

SEQ ID NO: 2228828 - RNA, 21 nt, Human
cgaccaccccugccuccaccc

SEQ ID NO: 2228829 - RNA, 22 nt, Human
cgacauagcccaucccugccug

SEQ ID NO: 2228830 - RNA, 12 nt, Human
ccuuuuugaagu

SEQ ID NO: 2228831 - RNA, 23 nt, Human
cgaccagacaccuugacagggca

SEQ ID NO: 2228832 - RNA, 12 nt, Human
cgaccaccugcc

SEQ ID NO: 2228833 - RNA, 14 nt, Human
cgaccaccugccca

SEQ ID NO: 2228834 - RNA, 18 nt, Human
ccuuuuuuauacauaaac

SEQ ID NO: 2228835 - RNA, 17 nt, Human
ccuuuuuuauacauaaa

SEQ ID NO: 2228836 - RNA, 16 nt, Human
cgacagugagacucug

SEQ ID NO: 2228837 - RNA, 15 nt, Human
cgacagugagacucu

SEQ ID NO: 2228838 - RNA, 22 nt, Human
ccuuuucuagcccgaauacaaa

SEQ ID NO: 2228839 - RNA, 14 nt, Human
ccuuuucugcauuu

SEQ ID NO: 2228840 - RNA, 22 nt, Human
ccuuuucugcauuuugcuauug

SEQ ID NO: 2228841 - RNA, 23 nt, Human
ccuuuugaacgcccccccccacc

SEQ ID NO: 2228842 - RNA, 23 nt, Human
ccuuuugaaguaguuuguauaac

SEQ ID NO: 2228843 - RNA, 17 nt, Human
ccuuuugcaccccuccc

SEQ ID NO: 2228844 - RNA, 18 nt, Human
ccuuuugcaccccuccca

SEQ ID NO: 2228845 - RNA, 19 nt, Human
ccuuuugcaccccucccau

SEQ ID NO: 2228846 - RNA, 20 nt, Human
ccuuuugcaccccucccauu

SEQ ID NO: 2228847 - RNA, 20 nt, Human
ccuuuugcaccugcucucuu

SEQ ID NO: 2228848 - RNA, 18 nt, Human
ccuuuucuuuucuacccu

SEQ ID NO: 2228849 - RNA, 22 nt, Human
ccuuuucuuuucuacccuagcc

SEQ ID NO: 2228850 - RNA, 21 nt, Human
ccuuuugaaauuaaccucuca

SEQ ID NO: 2228851 - RNA, 23 nt, Human
ccuuuucuuuucuacccuagcca

SEQ ID NO: 2228852 - RNA, 17 nt, Human
ccuuuccccagcccagg

SEQ ID NO: 2228853 - RNA, 18 nt, Human
ccuuuccccagcccaggg

SEQ ID NO: 2228854 - RNA, 13 nt, Human
ccuuuccccagcc

SEQ ID NO: 2228855 - RNA, 14 nt, Human
ccuuuccccagccc

SEQ ID NO: 2228856 - RNA, 15 nt, Human
ccuuuccccagccca

SEQ ID NO: 2228857 - RNA, 16 nt, Human
ccuuuccccagcccag

SEQ ID NO: 2228858 - RNA, 11 nt, Human
ccuuuccauaa

SEQ ID NO: 2228859 - RNA, 19 nt, Human
ccuuucccaggugcuacac

SEQ ID NO: 2228860 - RNA, 12 nt, Human
ccuuuccccagc

SEQ ID NO: 2228861 - RNA, 14 nt, Human
ccuuuagcgcccag

SEQ ID NO: 2228862 - RNA, 20 nt, Human
ccuuuagcgcccaguugggu

SEQ ID NO: 2228863 - RNA, 13 nt, Human
ccuuuagggcagc

SEQ ID NO: 2228864 - RNA, 14 nt, Human
ccuuuagggcagcu

SEQ ID NO: 2228865 - RNA, 15 nt, Human
ccuuuagggcagcuu

SEQ ID NO: 2228866 - RNA, 20 nt, Human
ccuuuagggcagcuugcccc

SEQ ID NO: 2228867 - RNA, 22 nt, Human
ccuuuagggcagcuugccccgg

SEQ ID NO: 2228868 - RNA, 19 nt, Human
ccuuuccaccacagccagc

SEQ ID NO: 2228869 - RNA, 13 nt, Human
ccuuuccagcaug

SEQ ID NO: 2228870 - RNA, 23 nt, Human
ccuuuccaccacagccagcaccu

SEQ ID NO: 2228871 - RNA, 14 nt, Human
ccuugccuccugug

SEQ ID NO: 2228872 - RNA, 18 nt, Human
ccuuggaaaccugcccug

SEQ ID NO: 2228873 - RNA, 19 nt, Human
ccuuggaaaccugcccugc

SEQ ID NO: 2228874 - RNA, 17 nt, Human
ccuuggaaaccugcccu

SEQ ID NO: 2228875 - RNA, 23 nt, Human
ccuuggaaaccugcccugccuga

SEQ ID NO: 2228876 - RNA, 20 nt, Human
ccuuggaaaccugcccugcc

SEQ ID NO: 2228877 - RNA, 22 nt, Human
ccuuggaaaccugcccugccug

SEQ ID NO: 2228878 - RNA, 22 nt, Human
ccuuggaaguugcauggcauca

SEQ ID NO: 2228879 - RNA, 15 nt, Human
ccuuggaaguuucau

SEQ ID NO: 2228880 - RNA, 19 nt, Human
ccuuuagccaaacccuugu

SEQ ID NO: 2228881 - RNA, 16 nt, Human
ccuuggacauccuccu

SEQ ID NO: 2228882 - RNA, 17 nt, Human
ccuuggacauccuccuc

SEQ ID NO: 2228883 - RNA, 15 nt, Human
ccuugccuccugugu

SEQ ID NO: 2228884 - RNA, 22 nt, Human
ccuugcuuggcugcuuggccuu

SEQ ID NO: 2228885 - RNA, 12 nt, Human
ccuugccuccug

SEQ ID NO: 2228886 - RNA, 23 nt, Human
ccuugccuccccauuucccaucu

SEQ ID NO: 2228887 - RNA, 21 nt, Human
ccuugcuuguugggauuccug

SEQ ID NO: 2228888 - RNA, 19 nt, Human
ccuugccucaaugccagua

SEQ ID NO: 2228889 - RNA, 20 nt, Human
ccuugccucaaugccaguaa

SEQ ID NO: 2228890 - RNA, 12 nt, Human
ccuugccucccc

SEQ ID NO: 2228891 - RNA, 14 nt, Human
ccuugccuccccau

SEQ ID NO: 2228892 - RNA, 17 nt, Human
ccuugccuccccauuuc

SEQ ID NO: 2228893 - RNA, 22 nt, Human
ccuugccuccccauuucccauc

SEQ ID NO: 2228894 - RNA, 20 nt, Human
ccuugcccagggcucagccu

SEQ ID NO: 2228895 - RNA, 15 nt, Human
ccuugccucaaugcc

SEQ ID NO: 2228896 - RNA, 16 nt, Human
ccuugccucaaugcca

SEQ ID NO: 2228897 - RNA, 20 nt, Human
ccuugccgucuaccugaggg

SEQ ID NO: 2228898 - RNA, 18 nt, Human
ccuugcccagggcucagc

SEQ ID NO: 2228899 - RNA, 17 nt, Human
ccuugcccagggcucag

SEQ ID NO: 2228900 - RNA, 16 nt, Human
ccuugcccagggcuca

SEQ ID NO: 2228901 - RNA, 15 nt, Human
ccuugcccagggcuc

SEQ ID NO: 2228902 - RNA, 17 nt, Human
ccuugccgucuaccuga

SEQ ID NO: 2228903 - RNA, 13 nt, Human
ccuugcccagggc

SEQ ID NO: 2228904 - RNA, 23 nt, Human
ccuugcccagagaugccuccacc

SEQ ID NO: 2228905 - RNA, 21 nt, Human
ccuugcccagagaugccucca

SEQ ID NO: 2228906 - RNA, 19 nt, Human
ccuugcccagagaugccuc

SEQ ID NO: 2228907 - RNA, 14 nt, Human
ccuugcccagagau

SEQ ID NO: 2228908 - RNA, 13 nt, Human
ccuugcccagaga

SEQ ID NO: 2228909 - RNA, 12 nt, Human
ccuugcccagag

SEQ ID NO: 2228910 - RNA, 11 nt, Human
ccuugcccaga

SEQ ID NO: 2228911 - RNA, 15 nt, Human
ccuugcccaccccac

SEQ ID NO: 2228912 - RNA, 18 nt, Human
ccuucuggccucccacag

SEQ ID NO: 2228913 - RNA, 18 nt, Human
ccuucuggauucuuggcc

SEQ ID NO: 2228914 - RNA, 19 nt, Human
ccuucuggauucuuggccc

SEQ ID NO: 2228915 - RNA, 20 nt, Human
ccuucuggccucccacagac

SEQ ID NO: 2228916 - RNA, 21 nt, Human
ccuucuggauucuuggcccgc

SEQ ID NO: 2228917 - RNA, 12 nt, Human
ccuucugggaaa

SEQ ID NO: 2228918 - RNA, 20 nt, Human
ccuucugggcagaccuugac

SEQ ID NO: 2228919 - RNA, 18 nt, Human
ccuucugggcaucuguuc

SEQ ID NO: 2228920 - RNA, 19 nt, Human
ccuucugggcaucuguucu

SEQ ID NO: 2228921 - RNA, 20 nt, Human
ccuucugggcaucuguucug

SEQ ID NO: 2228922 - RNA, 22 nt, Human
ccuucugggcaucuguucuggu

SEQ ID NO: 2228923 - RNA, 22 nt, Human
ccuucuguaaagguuuuuggaa

SEQ ID NO: 2228924 - RNA, 16 nt, Human
ccuucuguaguuuuau

SEQ ID NO: 2228925 - RNA, 18 nt, Human
ccuucugucccucacagc

SEQ ID NO: 2228926 - RNA, 19 nt, Human
ccuucugucccucacagca

SEQ ID NO: 2228927 - RNA, 17 nt, Human
ccuucuguaguuuuauc

SEQ ID NO: 2228928 - RNA, 17 nt, Human
ccuucuggccucccaca

SEQ ID NO: 2228929 - RNA, 21 nt, Human
ccuucugcuggauaaaaugag

SEQ ID NO: 2228930 - RNA, 17 nt, Human
ccuucuggauucuuggc

SEQ ID NO: 2228931 - RNA, 22 nt, Human
ccuucuggaauaaggagaauga

SEQ ID NO: 2228932 - RNA, 20 nt, Human
ccuucugcuggauaaaauga

SEQ ID NO: 2228933 - RNA, 17 nt, Human
ccuucugcucagcucug

SEQ ID NO: 2228934 - RNA, 13 nt, Human
ccuucugcuacug

SEQ ID NO: 2228935 - RNA, 16 nt, Human
ccuucugccugagcuu

SEQ ID NO: 2228936 - RNA, 12 nt, Human
ccuucugcucag

SEQ ID NO: 2228937 - RNA, 21 nt, Human
ccuucugaggacauuccaaga

SEQ ID NO: 2228938 - RNA, 18 nt, Human
ccuucugaggacauucca

SEQ ID NO: 2228939 - RNA, 23 nt, Human
ccuucugacccaugcugcccugu

SEQ ID NO: 2228940 - RNA, 21 nt, Human
ccuucugacccaugcugcccu

SEQ ID NO: 2228941 - RNA, 22 nt, Human
ccuucugacccaugcugcccug

SEQ ID NO: 2228942 - RNA, 20 nt, Human
ccuucugaaaaaguauccug

SEQ ID NO: 2228943 - RNA, 20 nt, Human
ccuggccugagcugggauga

SEQ ID NO: 2228944 - RNA, 14 nt, Human
ccuggccugagcug

SEQ ID NO: 2228945 - RNA, 15 nt, Human
ccuggccugagcugg

SEQ ID NO: 2228946 - RNA, 12 nt, Human
ccuucugaccca

SEQ ID NO: 2228947 - RNA, 16 nt, Human
ccuucugacccaugcu

SEQ ID NO: 2228948 - RNA, 17 nt, Human
ccuucugacccaugcug

SEQ ID NO: 2228949 - RNA, 20 nt, Human
ccuucugacccaugcugccc

SEQ ID NO: 2228950 - RNA, 18 nt, Human
ccagcuacaccuuucucc

SEQ ID NO: 2228951 - RNA, 19 nt, Human
ccagcuacaccuuucuccu

SEQ ID NO: 2228952 - RNA, 18 nt, Human
ccagccccugccccagcc

SEQ ID NO: 2228953 - RNA, 20 nt, Human
ccagccccugccccagccca

SEQ ID NO: 2228954 - RNA, 22 nt, Human
ccagccccugccccagcccaag

SEQ ID NO: 2228955 - RNA, 20 nt, Human
ccagcuacaccuuucuccuu

SEQ ID NO: 2228956 - RNA, 16 nt, Human
ccagcuacccuuuuuc

SEQ ID NO: 2228957 - RNA, 21 nt, Human
ccagcuacccuuuuucuccag

SEQ ID NO: 2228958 - RNA, 22 nt, Human
ccagcuacccuuuuucuccagc

SEQ ID NO: 2228959 - RNA, 14 nt, Human
ccagcuacucagga

SEQ ID NO: 2228960 - RNA, 13 nt, Human
ccagcuacucagg

SEQ ID NO: 2228961 - RNA, 23 nt, Human
ccagcuacucagaagccugaggc

SEQ ID NO: 2228962 - RNA, 21 nt, Human
ccagcuacucagaagccugag

SEQ ID NO: 2228963 - RNA, 20 nt, Human
ccagcuacucagaagccuga

SEQ ID NO: 2228964 - RNA, 17 nt, Human
ccagcuacucagaagcc

SEQ ID NO: 2228965 - RNA, 16 nt, Human
ccagcuacucagaagc

SEQ ID NO: 2228966 - RNA, 14 nt, Human
ccagcuacucagaa

SEQ ID NO: 2228967 - RNA, 20 nt, Human
ccagcuacucaagaggcuga

SEQ ID NO: 2228968 - RNA, 14 nt, Human
ccagccccucuggu

SEQ ID NO: 2228969 - RNA, 15 nt, Human
ccagccccucugguc

SEQ ID NO: 2228970 - RNA, 17 nt, Human
ccagccccucuggucgc

SEQ ID NO: 2228971 - RNA, 22 nt, Human
ccagccccucuggucgcuccug

SEQ ID NO: 2228972 - RNA, 23 nt, Human
ccagccccucuggucgcuccugc

SEQ ID NO: 2228973 - RNA, 15 nt, Human
ccagccccugcccca

SEQ ID NO: 2228974 - RNA, 11 nt, Human
ccagccccugg

SEQ ID NO: 2228975 - RNA, 12 nt, Human
ccagccccugga

SEQ ID NO: 2228976 - RNA, 15 nt, Human
ccagcucaccagccc

SEQ ID NO: 2228977 - RNA, 16 nt, Human
ccagcucaccagcccc

SEQ ID NO: 2228978 - RNA, 16 nt, Human
ccagcuguucagcugg

SEQ ID NO: 2228979 - RNA, 22 nt, Human
ccagcucaccagccccagugcc

SEQ ID NO: 2228980 - RNA, 20 nt, Human
ccagcuacucaggaggcuga

SEQ ID NO: 2228981 - RNA, 19 nt, Human
ccagcuacucaggaggcug

SEQ ID NO: 2228982 - RNA, 17 nt, Human
ccagcuacucaggaggc

SEQ ID NO: 2228983 - RNA, 15 nt, Human
ccagcuacucaggag

SEQ ID NO: 2228984 - RNA, 22 nt, Human
ccagcuguucugucccuuggag

SEQ ID NO: 2228985 - RNA, 22 nt, Human
ccagcucaauggacuggaaggg

SEQ ID NO: 2228986 - RNA, 17 nt, Human
ccagcuguucagcuggu

SEQ ID NO: 2228987 - RNA, 19 nt, Human
ccagcuuaaaggggcuaga

SEQ ID NO: 2228988 - RNA, 23 nt, Human
ccaggaaacucugcauucuagua

SEQ ID NO: 2228989 - RNA, 14 nt, Human
ccaggaaccuccuc

SEQ ID NO: 2228990 - RNA, 24 nt, Human
ccaggaaccacaccacaucuaagc

SEQ ID NO: 2228991 - RNA, 21 nt, Human
ccagcuuaaaguaaccggaug

SEQ ID NO: 2228992 - RNA, 16 nt, Human
ccaggaaaggcuccag

SEQ ID NO: 2228993 - RNA, 14 nt, Human
ccaggaaaggcucc

SEQ ID NO: 2228994 - RNA, 15 nt, Human
ccaggaaaggcucca

SEQ ID NO: 2228995 - RNA, 12 nt, Human
ccaggaagccag

SEQ ID NO: 2228996 - RNA, 14 nt, Human
ccaggaacugggcc

SEQ ID NO: 2228997 - RNA, 13 nt, Human
ccaggaagccagc

SEQ ID NO: 2228998 - RNA, 21 nt, Human
ccagcagccagcucucagcca

SEQ ID NO: 2228999 - RNA, 12 nt, Human
ccagcagcgccu

SEQ ID NO: 2229000 - RNA, 18 nt, Human
ccagcagcgccuuuccca

SEQ ID NO: 2229001 - RNA, 17 nt, Human
ccagcagcgccuuuccc

SEQ ID NO: 2229002 - RNA, 19 nt, Human
ccagcagcgccuuucccaa

SEQ ID NO: 2229003 - RNA, 24 nt, Human
ccagcagcggaaccgcccaggauc

SEQ ID NO: 2229004 - RNA, 13 nt, Human
ccagcaggcucuc

SEQ ID NO: 2229005 - RNA, 15 nt, Human
ccagcaggcucucag

SEQ ID NO: 2229006 - RNA, 20 nt, Human
ccagcagccagcucucagcc

SEQ ID NO: 2229007 - RNA, 19 nt, Human
ccagcagccagcucucagc

SEQ ID NO: 2229008 - RNA, 18 nt, Human
ccagcagccagcucucag

SEQ ID NO: 2229009 - RNA, 16 nt, Human
ccagcagccagcucuc

SEQ ID NO: 2229010 - RNA, 15 nt, Human
ccagcagccagcucu

SEQ ID NO: 2229011 - RNA, 21 nt, Human
ccagaguggggaugacaugca

SEQ ID NO: 2229012 - RNA, 23 nt, Human
ccagaguggccuggccaggagcu

SEQ ID NO: 2229013 - RNA, 21 nt, Human
ccagagugugggaagggagag

SEQ ID NO: 2229014 - RNA, 18 nt, Human
ccagagugugggaaggga

SEQ ID NO: 2229015 - RNA, 12 nt, Human
ccagagugugaa

SEQ ID NO: 2229016 - RNA, 22 nt, Human
ccagaguggccuggccaggagc

SEQ ID NO: 2229017 - RNA, 21 nt, Human
ccagaguggccuggccaggag

SEQ ID NO: 2229018 - RNA, 19 nt, Human
ccagaguggccuggccagg

SEQ ID NO: 2229019 - RNA, 18 nt, Human
ccagaguggccuggccag

SEQ ID NO: 2229020 - RNA, 17 nt, Human
ccagaguggccuggcca

SEQ ID NO: 2229021 - RNA, 16 nt, Human
ccagaguggccuggcc

SEQ ID NO: 2229022 - RNA, 15 nt, Human
ccagaguggccuggc

SEQ ID NO: 2229023 - RNA, 14 nt, Human
ccagaguggccugg

SEQ ID NO: 2229024 - RNA, 13 nt, Human
ccagaguggccug

SEQ ID NO: 2229025 - RNA, 21 nt, Human
ccagaguccuuuccaaggcuu

SEQ ID NO: 2229026 - RNA, 16 nt, Human
ccagaguccuuuccaa

SEQ ID NO: 2229027 - RNA, 17 nt, Human
ccagaucccagaaggac

SEQ ID NO: 2229028 - RNA, 16 nt, Human
ccagaucccagaagga

SEQ ID NO: 2229029 - RNA, 13 nt, Human
ccagaucccagaa

SEQ ID NO: 2229030 - RNA, 16 nt, Human
ccagauccagccuggg

SEQ ID NO: 2229031 - RNA, 15 nt, Human
ccagauccagccugg

SEQ ID NO: 2229032 - RNA, 14 nt, Human
ccagauccagccug

SEQ ID NO: 2229033 - RNA, 13 nt, Human
ccagauccagccu

SEQ ID NO: 2229034 - RNA, 18 nt, Human
ccagaguuccccaugcag

SEQ ID NO: 2229035 - RNA, 19 nt, Human
ccagaguuccccaugcaga

SEQ ID NO: 2229036 - RNA, 21 nt, Human
ccagaguuccccaugcagaca

SEQ ID NO: 2229037 - RNA, 13 nt, Human
ccagaguuccugc

SEQ ID NO: 2229038 - RNA, 18 nt, Human
ccagaucccagaaggacc

SEQ ID NO: 2229039 - RNA, 17 nt, Human
ccagauccucacaacca

SEQ ID NO: 2229040 - RNA, 14 nt, Human
ccagauccucacaa

SEQ ID NO: 2229041 - RNA, 15 nt, Human
ccagauccucuuggu

SEQ ID NO: 2229042 - RNA, 14 nt, Human
ccagauccucuugg

SEQ ID NO: 2229043 - RNA, 15 nt, Human
ccagauccuggaaau

SEQ ID NO: 2229044 - RNA, 16 nt, Human
ccaccuuggcucaagu

SEQ ID NO: 2229045 - RNA, 17 nt, Human
ccagagggccugcaagg

SEQ ID NO: 2229046 - RNA, 18 nt, Human
ccagagggccugcaaggg

SEQ ID NO: 2229047 - RNA, 19 nt, Human
ccagagggccugcaaggga

SEQ ID NO: 2229048 - RNA, 20 nt, Human
ccagagggccugcaagggag

SEQ ID NO: 2229049 - RNA, 18 nt, Human
ccagaugcaccagcccuu

SEQ ID NO: 2229050 - RNA, 17 nt, Human
ccagaugcaccagcccu

SEQ ID NO: 2229051 - RNA, 15 nt, Human
ccagaugcaccagcc

SEQ ID NO: 2229052 - RNA, 17 nt, Human
ccagggucacugaaggc

SEQ ID NO: 2229053 - RNA, 23 nt, Human
ccaggguagcccgccugccaguc

SEQ ID NO: 2229054 - RNA, 21 nt, Human
ccagggucacugaaggccugg

SEQ ID NO: 2229055 - RNA, 19 nt, Human
ccaggguagcccgccugcc

SEQ ID NO: 2229056 - RNA, 20 nt, Human
ccaggguagcccgccugcca

SEQ ID NO: 2229057 - RNA, 21 nt, Human
ccaggguagcccgccugccag

SEQ ID NO: 2229058 - RNA, 22 nt, Human
ccaggguagcccgccugccagu

SEQ ID NO: 2229059 - RNA, 13 nt, Human
ccagggucccugg

SEQ ID NO: 2229060 - RNA, 18 nt, Human
ccagggucccucugugua

SEQ ID NO: 2229061 - RNA, 16 nt, Human
ccagggucccucugug

SEQ ID NO: 2229062 - RNA, 17 nt, Human
ccagggucccucugugu

SEQ ID NO: 2229063 - RNA, 19 nt, Human
ccaggggaaaaucagccug

SEQ ID NO: 2229064 - RNA, 20 nt, Human
ccaggggaaaaucagccugc

SEQ ID NO: 2229065 - RNA, 13 nt, Human
ccaggggugggac

SEQ ID NO: 2229066 - RNA, 23 nt, Human
ccaggggugggacacccugugau

SEQ ID NO: 2229067 - RNA, 13 nt, Human
ccagggguuucuc

SEQ ID NO: 2229068 - RNA, 14 nt, Human
ccaggguagcccgc

SEQ ID NO: 2229069 - RNA, 16 nt, Human
ccaggguagcccgccu

SEQ ID NO: 2229070 - RNA, 19 nt, Human
ccaggggugggacacccug

SEQ ID NO: 2229071 - RNA, 19 nt, Human
ccaggggugcccccuccuc

SEQ ID NO: 2229072 - RNA, 20 nt, Human
ccaggggugcccccuccucu

SEQ ID NO: 2229073 - RNA, 14 nt, Human
ccaggggugggaca

SEQ ID NO: 2229074 - RNA, 17 nt, Human
ccaggggugggacaccc

SEQ ID NO: 2229075 - RNA, 20 nt, Human
ccaggcuccuuuagcgccca

SEQ ID NO: 2229076 - RNA, 21 nt, Human
ccaggcuccuuuagcgcccag

SEQ ID NO: 2229077 - RNA, 14 nt, Human
ccaggcuccuuccu

SEQ ID NO: 2229078 - RNA, 18 nt, Human
ccaggcagaucugugccc

SEQ ID NO: 2229079 - RNA, 22 nt, Human
ccaggcuccuuccugucuuccu

SEQ ID NO: 2229080 - RNA, 15 nt, Human
ccaggcuccuuccug

SEQ ID NO: 2229081 - RNA, 23 nt, Human
ccaggcuccuuccugucuuccug

SEQ ID NO: 2229082 - RNA, 16 nt, Human
ccaggcuggcgugcag

SEQ ID NO: 2229083 - RNA, 19 nt, Human
ccaggcuggcgugcagugg

SEQ ID NO: 2229084 - RNA, 22 nt, Human
ccagggcuggacugaggccuga

SEQ ID NO: 2229085 - RNA, 17 nt, Human
ccaggcuggcgugcagu

SEQ ID NO: 2229086 - RNA, 18 nt, Human
ccaggcuggcgugcagug

SEQ ID NO: 2229087 - RNA, 17 nt, Human
ccaggcagaucugugcc

SEQ ID NO: 2229088 - RNA, 13 nt, Human
ccaggcagaucug

SEQ ID NO: 2229089 - RNA, 19 nt, Human
ccaggcagauccaggacua

SEQ ID NO: 2229090 - RNA, 18 nt, Human
ccaggcagauccaggacu

SEQ ID NO: 2229091 - RNA, 17 nt, Human
ccaggcagauccaggac

SEQ ID NO: 2229092 - RNA, 16 nt, Human
ccaggcagauccagga

SEQ ID NO: 2229093 - RNA, 15 nt, Human
ccaggcagauccagg

SEQ ID NO: 2229094 - RNA, 13 nt, Human
ccaggcagaucca

SEQ ID NO: 2229095 - RNA, 23 nt, Human
ccaggcacgaacccaccugcuga

SEQ ID NO: 2229096 - RNA, 22 nt, Human
ccaggcacgaacccaccugcug

SEQ ID NO: 2229097 - RNA, 21 nt, Human
ccaggcacgaacccaccugcu

SEQ ID NO: 2229098 - RNA, 16 nt, Human
ccaggcacugcugccc

SEQ ID NO: 2229099 - RNA, 18 nt, Human
ccaggcacugcugcccag

SEQ ID NO: 2229100 - RNA, 16 nt, Human
ccaggcacccccugga

SEQ ID NO: 2229101 - RNA, 17 nt, Human
ccaggcacccccuggag

SEQ ID NO: 2229102 - RNA, 18 nt, Human
ccaggcacccccuggaga

SEQ ID NO: 2229103 - RNA, 19 nt, Human
ccaggcacccccuggagag

SEQ ID NO: 2229104 - RNA, 21 nt, Human
ccaggcacccccuggagagaa

SEQ ID NO: 2229105 - RNA, 20 nt, Human
ccaggcacgaacccaccugc

SEQ ID NO: 2229106 - RNA, 19 nt, Human
ccaggcacgaacccaccug

SEQ ID NO: 2229107 - RNA, 18 nt, Human
ccaggcacgaacccaccu

SEQ ID NO: 2229108 - RNA, 13 nt, Human
ccaggcacccuuc

SEQ ID NO: 2229109 - RNA, 14 nt, Human
ccaggcacccuucu

SEQ ID NO: 2229110 - RNA, 21 nt, Human
ccaggcacccuucuuuccucu

SEQ ID NO: 2229111 - RNA, 22 nt, Human
ccaggcacccuucuuuccucuu

SEQ ID NO: 2229112 - RNA, 22 nt, Human
ccaggcacacacugugcuuucu

SEQ ID NO: 2229113 - RNA, 20 nt, Human
ccauggugaauuaaucacuu

SEQ ID NO: 2229114 - RNA, 22 nt, Human
ccauggugaauuaaucacuuuu

SEQ ID NO: 2229115 - RNA, 20 nt, Human
ccauggucggaaaacaugcu

SEQ ID NO: 2229116 - RNA, 19 nt, Human
ccauggugugaucgucuga

SEQ ID NO: 2229117 - RNA, 18 nt, Human
ccauggugugaucgucug

SEQ ID NO: 2229118 - RNA, 14 nt, Human
ccaugguugagaaa

SEQ ID NO: 2229119 - RNA, 15 nt, Human
ccauguaacagaaag

SEQ ID NO: 2229120 - RNA, 16 nt, Human
ccauguaacagaaagg

SEQ ID NO: 2229121 - RNA, 16 nt, Human
ccaugagcuccagacc

SEQ ID NO: 2229122 - RNA, 15 nt, Human
ccaugagcuccagac

SEQ ID NO: 2229123 - RNA, 13 nt, Human
ccaugagcuccag

SEQ ID NO: 2229124 - RNA, 23 nt, Human
ccaugagcuccagacccccagca

SEQ ID NO: 2229125 - RNA, 19 nt, Human
ccaugagcuccagaccccc

SEQ ID NO: 2229126 - RNA, 18 nt, Human
ccaugagcuccagacccc

SEQ ID NO: 2229127 - RNA, 17 nt, Human
ccaugagcuccagaccc

SEQ ID NO: 2229128 - RNA, 21 nt, Human
ccaugagccucagcauccugg

SEQ ID NO: 2229129 - RNA, 23 nt, Human
ccaugagccucagcauccuggca

SEQ ID NO: 2229130 - RNA, 23 nt, Human
ccaugucaccggauccugggugg

SEQ ID NO: 2229131 - RNA, 22 nt, Human
ccaugucaccggauccugggug

SEQ ID NO: 2229132 - RNA, 13 nt, Human
ccaugucacugug

SEQ ID NO: 2229133 - RNA, 17 nt, Human
ccaugucagcaaaaagc

SEQ ID NO: 2229134 - RNA, 18 nt, Human
ccauguaagguaucaguu

SEQ ID NO: 2229135 - RNA, 23 nt, Human
ccauguauuuaucucuauuuaau

SEQ ID NO: 2229136 - RNA, 16 nt, Human
ccauguauuuaucucu

SEQ ID NO: 2229137 - RNA, 22 nt, Human
ccauguauuuaucucuauuuaa

SEQ ID NO: 2229138 - RNA, 18 nt, Human
ccaugucagcaaaaagca

SEQ ID NO: 2229139 - RNA, 21 nt, Human
ccaguuccuuucaaugguuug

SEQ ID NO: 2229140 - RNA, 22 nt, Human
ccaguuccuuucaaugguuugc

SEQ ID NO: 2229141 - RNA, 23 nt, Human
ccaguuggucccccuuccaugga

SEQ ID NO: 2229142 - RNA, 23 nt, Human
ccaguucaguaccuggaggagga

SEQ ID NO: 2229143 - RNA, 21 nt, Human
ccaguuucagguguuuaguug

SEQ ID NO: 2229144 - RNA, 18 nt, Human
ccaguuuaaccugaugca

SEQ ID NO: 2229145 - RNA, 19 nt, Human
ccaguuuaaucauugccug

SEQ ID NO: 2229146 - RNA, 17 nt, Human
ccaguuuaaccugaugc

SEQ ID NO: 2229147 - RNA, 13 nt, Human
ccaguuugcagaa

SEQ ID NO: 2229148 - RNA, 14 nt, Human
ccaucccagccuug

SEQ ID NO: 2229149 - RNA, 15 nt, Human
ccaucccagccuugg

SEQ ID NO: 2229150 - RNA, 23 nt, Human
ccaucccagccuuggcaucuaga

SEQ ID NO: 2229151 - RNA, 13 nt, Human
ccaucccagcccc

SEQ ID NO: 2229152 - RNA, 15 nt, Human
ccaucccagccccaa

SEQ ID NO: 2229153 - RNA, 14 nt, Human
ccaucccagcccca

SEQ ID NO: 2229154 - RNA, 12 nt, Human
ccaguuucugcc

SEQ ID NO: 2229155 - RNA, 14 nt, Human
ccaguuucugccuc

SEQ ID NO: 2229156 - RNA, 15 nt, Human
ccaguuucugccucu

SEQ ID NO: 2229157 - RNA, 19 nt, Human
ccaugaauguaucaggaaa

SEQ ID NO: 2229158 - RNA, 18 nt, Human
ccaugaauguaucaggaa

SEQ ID NO: 2229159 - RNA, 15 nt, Human
ccaugaaucgcuucu

SEQ ID NO: 2229160 - RNA, 17 nt, Human
ccaugaaucgcuucucu

SEQ ID NO: 2229161 - RNA, 18 nt, Human
ccaugaaucgcuucucuu

SEQ ID NO: 2229162 - RNA, 19 nt, Human
ccaugaaucgcuucucuuu

SEQ ID NO: 2229163 - RNA, 24 nt, Human
ccaucccaggacaccacacccagc

SEQ ID NO: 2229164 - RNA, 16 nt, Human
ccaugaaucaaagaca

SEQ ID NO: 2229165 - RNA, 17 nt, Human
ccaugaaucaaagacau

SEQ ID NO: 2229166 - RNA, 14 nt, Human
ccaucccaggacac

SEQ ID NO: 2229167 - RNA, 21 nt, Human
ccaucccaggacaccacaccc

SEQ ID NO: 2229168 - RNA, 22 nt, Human
ccaucccaggacaccacaccca

SEQ ID NO: 2229169 - RNA, 23 nt, Human
ccaucccaggacaccacacccag

SEQ ID NO: 2229170 - RNA, 14 nt, Human
ccaugaccauacug

SEQ ID NO: 2229171 - RNA, 12 nt, Human
ccaugacccacc

SEQ ID NO: 2229172 - RNA, 15 nt, Human
ccaugacccaccccu

SEQ ID NO: 2229173 - RNA, 16 nt, Human
ccaugacccaccccug

SEQ ID NO: 2229174 - RNA, 17 nt, Human
ccaugacccaccccugu

SEQ ID NO: 2229175 - RNA, 18 nt, Human
ccaugacccaccccugug

SEQ ID NO: 2229176 - RNA, 18 nt, Human
ccaugacccaggcugggc

SEQ ID NO: 2229177 - RNA, 16 nt, Human
ccaugacccaggcugg

SEQ ID NO: 2229178 - RNA, 17 nt, Human
ccaugacccaggcuggg

SEQ ID NO: 2229179 - RNA, 19 nt, Human
ccaugacccaccccugugc

SEQ ID NO: 2229180 - RNA, 20 nt, Human
ccaugacccaccccugugcu

SEQ ID NO: 2229181 - RNA, 14 nt, Human
ccaugacccaggcu

SEQ ID NO: 2229182 - RNA, 15 nt, Human
ccaugacccaggcug

SEQ ID NO: 2229183 - RNA, 14 nt, Human
ccaucccugaaggc

SEQ ID NO: 2229184 - RNA, 15 nt, Human
ccaucccugaaggcc

SEQ ID NO: 2229185 - RNA, 17 nt, Human
ccaucccugaaggcccc

SEQ ID NO: 2229186 - RNA, 20 nt, Human
ccaucccugaaggccccgcc

SEQ ID NO: 2229187 - RNA, 21 nt, Human
ccaguucaggagucccaagga

SEQ ID NO: 2229188 - RNA, 18 nt, Human
ccaguucaggagucccaa

SEQ ID NO: 2229189 - RNA, 14 nt, Human
ccaguucaggaguc

SEQ ID NO: 2229190 - RNA, 13 nt, Human
ccaguucacccug

SEQ ID NO: 2229191 - RNA, 17 nt, Human
ccaguuaugugaaugau

SEQ ID NO: 2229192 - RNA, 19 nt, Human
ccaguucaaucucccgcug

SEQ ID NO: 2229193 - RNA, 20 nt, Human
ccaguuauuuuccgcccuca

SEQ ID NO: 2229194 - RNA, 15 nt, Human
ccaguucagcuuggg

SEQ ID NO: 2229195 - RNA, 17 nt, Human
ccaguuggguggaugcc

SEQ ID NO: 2229196 - RNA, 17 nt, Human
ccaguucauugcacuuu

SEQ ID NO: 2229197 - RNA, 18 nt, Human
ccaguucauugcacuuug

SEQ ID NO: 2229198 - RNA, 17 nt, Human
ccaguucaguaccugga

SEQ ID NO: 2229199 - RNA, 19 nt, Human
ccaguucaguaccuggagg

SEQ ID NO: 2229200 - RNA, 20 nt, Human
ccaguucaguaccuggagga

SEQ ID NO: 2229201 - RNA, 21 nt, Human
ccaguucaguaccuggaggag

SEQ ID NO: 2229202 - RNA, 19 nt, Human
ccaguuggguggaugccug

SEQ ID NO: 2229203 - RNA, 20 nt, Human
ccaguuggguggaugccugg

SEQ ID NO: 2229204 - RNA, 13 nt, Human
cccauauuucauc

SEQ ID NO: 2229205 - RNA, 16 nt, Human
cccauauuucaucgug

SEQ ID NO: 2229206 - RNA, 17 nt, Human
cccauccuacccucggg

SEQ ID NO: 2229207 - RNA, 20 nt, Human
cccauauuuguacaccaaua

SEQ ID NO: 2229208 - RNA, 19 nt, Human
cccauagugaccggcugcu

SEQ ID NO: 2229209 - RNA, 13 nt, Human
cccauagcuucca

SEQ ID NO: 2229210 - RNA, 14 nt, Human
cccauauccugccu

SEQ ID NO: 2229211 - RNA, 16 nt, Human
cccauagcuuccauga

SEQ ID NO: 2229212 - RNA, 19 nt, Human
cccagggccugcaggaccu

SEQ ID NO: 2229213 - RNA, 16 nt, Human
cccagggccugcagga

SEQ ID NO: 2229214 - RNA, 14 nt, Human
cccagggccugcag

SEQ ID NO: 2229215 - RNA, 22 nt, Human
cccagggcccagagcccagcuc

SEQ ID NO: 2229216 - RNA, 13 nt, Human
cccagggccugag

SEQ ID NO: 2229217 - RNA, 19 nt, Human
cccagggccugagccuggc

SEQ ID NO: 2229218 - RNA, 15 nt, Human
cccagggccugagcc

SEQ ID NO: 2229219 - RNA, 22 nt, Human
cccagggccagggcccugcaga

SEQ ID NO: 2229220 - RNA, 13 nt, Human
cccagggcccaga

SEQ ID NO: 2229221 - RNA, 15 nt, Human
cccagggcccagagc

SEQ ID NO: 2229222 - RNA, 14 nt, Human
cccagggcccagag

SEQ ID NO: 2229223 - RNA, 20 nt, Human
cccagggcccagagcccagc

SEQ ID NO: 2229224 - RNA, 19 nt, Human
cccagggcccagagcccag

SEQ ID NO: 2229225 - RNA, 17 nt, Human
cccagggcccagagccc

SEQ ID NO: 2229226 - RNA, 16 nt, Human
cccagggcccagagcc

SEQ ID NO: 2229227 - RNA, 23 nt, Human
cccagcugcaccugccagccugg

SEQ ID NO: 2229228 - RNA, 15 nt, Human
cccagcuugaaaccu

SEQ ID NO: 2229229 - RNA, 19 nt, Human
cccagcuugggcccagcug

SEQ ID NO: 2229230 - RNA, 20 nt, Human
cccagcuugggcccagcugg

SEQ ID NO: 2229231 - RNA, 22 nt, Human
cccagcuugggcccagcugggc

SEQ ID NO: 2229232 - RNA, 23 nt, Human
cccagcuugggcccagcugggcu

SEQ ID NO: 2229233 - RNA, 13 nt, Human
cccagcuuugccc

SEQ ID NO: 2229234 - RNA, 18 nt, Human
cccagcuuugcccaacac

SEQ ID NO: 2229235 - RNA, 16 nt, Human
cccaggaaaggcccag

SEQ ID NO: 2229236 - RNA, 22 nt, Human
cccagcuuugcccaacaccagc

SEQ ID NO: 2229237 - RNA, 13 nt, Human
cccaggcuggcgu

SEQ ID NO: 2229238 - RNA, 20 nt, Human
cccaggcuggagugcaaugg

SEQ ID NO: 2229239 - RNA, 13 nt, Human
cccaggcuggcca

SEQ ID NO: 2229240 - RNA, 15 nt, Human
cccaggcuggccagc

SEQ ID NO: 2229241 - RNA, 19 nt, Human
cccaggcuggagugcagug

SEQ ID NO: 2229242 - RNA, 21 nt, Human
cccagggccagggcccugcag

SEQ ID NO: 2229243 - RNA, 22 nt, Human
cccaggcuggccagccccacag

SEQ ID NO: 2229244 - RNA, 23 nt, Human
cccaggcuggccagccccacagc

SEQ ID NO: 2229245 - RNA, 16 nt, Human
cccaggcuggccagcc

SEQ ID NO: 2229246 - RNA, 17 nt, Human
cccaggcuggccagccc

SEQ ID NO: 2229247 - RNA, 19 nt, Human
cccaggcuggccagcccca

SEQ ID NO: 2229248 - RNA, 20 nt, Human
cccaggcuggccagccccac

SEQ ID NO: 2229249 - RNA, 17 nt, Human
cccaggcuggcgugcag

SEQ ID NO: 2229250 - RNA, 13 nt, Human
cccauccuccccu

SEQ ID NO: 2229251 - RNA, 12 nt, Human
cccauccucccc

SEQ ID NO: 2229252 - RNA, 19 nt, Human
cccauccuccagcuucugg

SEQ ID NO: 2229253 - RNA, 14 nt, Human
cccauccuccagcu

SEQ ID NO: 2229254 - RNA, 15 nt, Human
cccauccuccagcuu

SEQ ID NO: 2229255 - RNA, 16 nt, Human
cccauccuccagcuuc

SEQ ID NO: 2229256 - RNA, 17 nt, Human
cccauccuccagcuucu

SEQ ID NO: 2229257 - RNA, 18 nt, Human
cccauccuccagcaggga

SEQ ID NO: 2229258 - RNA, 16 nt, Human
cccauccuccagcagg

SEQ ID NO: 2229259 - RNA, 15 nt, Human
cccauccuccagcag

SEQ ID NO: 2229260 - RNA, 14 nt, Human
cccauccuccagca

SEQ ID NO: 2229261 - RNA, 22 nt, Human
cccauccuaucagccugucucu

SEQ ID NO: 2229262 - RNA, 18 nt, Human
cccauccuacccucgggc

SEQ ID NO: 2229263 - RNA, 23 nt, Human
cccauccuacccucgggcccacc

SEQ ID NO: 2229264 - RNA, 18 nt, Human
cccauccuccccuucccu

SEQ ID NO: 2229265 - RNA, 16 nt, Human
cccauccuccccuucc

SEQ ID NO: 2229266 - RNA, 15 nt, Human
cccauccuccccuuc

SEQ ID NO: 2229267 - RNA, 14 nt, Human
cccauccuccccuu

SEQ ID NO: 2229268 - RNA, 22 nt, Human
cccauccuccccuucccugcaa

SEQ ID NO: 2229269 - RNA, 13 nt, Human
cccauccucugua

SEQ ID NO: 2229270 - RNA, 19 nt, Human
cccagccaccccgggcucu

SEQ ID NO: 2229271 - RNA, 14 nt, Human
cccagccaccccgg

SEQ ID NO: 2229272 - RNA, 22 nt, Human
cccagccaccccgggcucucug

SEQ ID NO: 2229273 - RNA, 17 nt, Human
cccagccagaguuccug

SEQ ID NO: 2229274 - RNA, 18 nt, Human
cccagccagaguuccugc

SEQ ID NO: 2229275 - RNA, 23 nt, Human
cccagcucugguccauagagagc

SEQ ID NO: 2229276 - RNA, 12 nt, Human
cccagcugcacc

SEQ ID NO: 2229277 - RNA, 22 nt, Human
cccagcugacaguccucuccac

SEQ ID NO: 2229278 - RNA, 15 nt, Human
cccagcugacaugga

SEQ ID NO: 2229279 - RNA, 20 nt, Human
cccagcucuucuccccaggu

SEQ ID NO: 2229280 - RNA, 17 nt, Human
cccagcugacaguccuc

SEQ ID NO: 2229281 - RNA, 19 nt, Human
cccagcugacaguccucuc

SEQ ID NO: 2229282 - RNA, 21 nt, Human
cccagcugacaguccucucca

SEQ ID NO: 2229283 - RNA, 22 nt, Human
cccagccagaguuccugcggag

SEQ ID NO: 2229284 - RNA, 22 nt, Human
cccagccagauggacuccagcc

SEQ ID NO: 2229285 - RNA, 13 nt, Human
cccagcucuggug

SEQ ID NO: 2229286 - RNA, 15 nt, Human
cccagcucuggugag

SEQ ID NO: 2229287 - RNA, 20 nt, Human
cccagcucuggugagucuug

SEQ ID NO: 2229288 - RNA, 22 nt, Human
cccagcucuggugagucuuggc

SEQ ID NO: 2229289 - RNA, 22 nt, Human
cccagcuuaaaggggcuagagu

SEQ ID NO: 2229290 - RNA, 22 nt, Human
cccagcugcaccugccagccug

SEQ ID NO: 2229291 - RNA, 21 nt, Human
cccagcugcaccugccagccu

SEQ ID NO: 2229292 - RNA, 18 nt, Human
cccagcugcaccugccag

SEQ ID NO: 2229293 - RNA, 13 nt, Human
cccagcugcaccu

SEQ ID NO: 2229294 - RNA, 17 nt, Human
cccagcugacauggaaa

SEQ ID NO: 2229295 - RNA, 15 nt, Human
cccacugccugccca

SEQ ID NO: 2229296 - RNA, 14 nt, Human
cccacugccugccc

SEQ ID NO: 2229297 - RNA, 14 nt, Human
cccacugccuuuga

SEQ ID NO: 2229298 - RNA, 17 nt, Human
cccacuguccugggcgc

SEQ ID NO: 2229299 - RNA, 19 nt, Human
cccacugcuuuuggucugu

SEQ ID NO: 2229300 - RNA, 12 nt, Human
cccacugcucug

SEQ ID NO: 2229301 - RNA, 13 nt, Human
cccacugcucugg

SEQ ID NO: 2229302 - RNA, 16 nt, Human
cccacugccugcccac

SEQ ID NO: 2229303 - RNA, 13 nt, Human
cccacugcucccc

SEQ ID NO: 2229304 - RNA, 18 nt, Human
cccacuguccugggcgcc

SEQ ID NO: 2229305 - RNA, 22 nt, Human
cccacuguccugggcgcccugg

SEQ ID NO: 2229306 - RNA, 23 nt, Human
cccacuguccugggcgcccugga

SEQ ID NO: 2229307 - RNA, 14 nt, Human
cccacuuccccucc

SEQ ID NO: 2229308 - RNA, 15 nt, Human
cccacuuccccuccu

SEQ ID NO: 2229309 - RNA, 17 nt, Human
cccacuuccccuccuac

SEQ ID NO: 2229310 - RNA, 19 nt, Human
cccacuuccccuccuaccc

SEQ ID NO: 2229311 - RNA, 23 nt, Human
cccacuuccccuccuaccccucc

SEQ ID NO: 2229312 - RNA, 12 nt, Human
cccacuucccug

SEQ ID NO: 2229313 - RNA, 16 nt, Human
cccacuucccugacac

SEQ ID NO: 2229314 - RNA, 17 nt, Human
cccacuucccugacacu

SEQ ID NO: 2229315 - RNA, 19 nt, Human
cccacuucccugacacugc

SEQ ID NO: 2229316 - RNA, 20 nt, Human
cccacuucccugacacugcg

SEQ ID NO: 2229317 - RNA, 24 nt, Human
cccacuucccugacacugcggggc

SEQ ID NO: 2229318 - RNA, 12 nt, Human
cccacuuccugu

SEQ ID NO: 2229319 - RNA, 13 nt, Human
cccacugccugcc

SEQ ID NO: 2229320 - RNA, 16 nt, Human
cccacugccucagguu

SEQ ID NO: 2229321 - RNA, 18 nt, Human
cccacugccuacugcauc

SEQ ID NO: 2229322 - RNA, 15 nt, Human
cccacugccucaggu

SEQ ID NO: 2229323 - RNA, 16 nt, Human
cccacugcccaccccc

SEQ ID NO: 2229324 - RNA, 17 nt, Human
cccacugcccacccccu

SEQ ID NO: 2229325 - RNA, 19 nt, Human
cccacugcccacccccuca

SEQ ID NO: 2229326 - RNA, 22 nt, Human
cccacugcccacccccucaagc

SEQ ID NO: 2229327 - RNA, 19 nt, Human
cccacugcaggccccgcuu

SEQ ID NO: 2229328 - RNA, 17 nt, Human
cccacugccauaaaaca

SEQ ID NO: 2229329 - RNA, 12 nt, Human
cccacugcccac

SEQ ID NO: 2229330 - RNA, 23 nt, Human
cccacugcaggccccgcuugucc

SEQ ID NO: 2229331 - RNA, 15 nt, Human
cccacugcaggcccc

SEQ ID NO: 2229332 - RNA, 23 nt, Human
cccacugcacccccuccugcugc

SEQ ID NO: 2229333 - RNA, 19 nt, Human
cccacugcacccccuccug

SEQ ID NO: 2229334 - RNA, 20 nt, Human
cccacugcacccccuccugc

SEQ ID NO: 2229335 - RNA, 21 nt, Human
cccacugcacccccuccugcu

SEQ ID NO: 2229336 - RNA, 22 nt, Human
cccacugcacccccuccugcug

SEQ ID NO: 2229337 - RNA, 17 nt, Human
cccacuccccaccuuca

SEQ ID NO: 2229338 - RNA, 18 nt, Human
cccacugcacccccuccu

SEQ ID NO: 2229339 - RNA, 21 nt, Human
cccacguucucacacccaccg

SEQ ID NO: 2229340 - RNA, 18 nt, Human
cccacuagacccacugga

SEQ ID NO: 2229341 - RNA, 17 nt, Human
cccacguucucacaccc

SEQ ID NO: 2229342 - RNA, 20 nt, Human
cccacguucucacacccacc

SEQ ID NO: 2229343 - RNA, 23 nt, Human
cccacucaagccaagcagccaag

SEQ ID NO: 2229344 - RNA, 20 nt, Human
cccacucaagccaagcagcc

SEQ ID NO: 2229345 - RNA, 19 nt, Human
cccacucaagccaagcagc

SEQ ID NO: 2229346 - RNA, 17 nt, Human
cccacucaagccaagca

SEQ ID NO: 2229347 - RNA, 16 nt, Human
cccacucaagccaagc

SEQ ID NO: 2229348 - RNA, 18 nt, Human
cccacucagcuccgugaa

SEQ ID NO: 2229349 - RNA, 14 nt, Human
cccaccccccucau

SEQ ID NO: 2229350 - RNA, 15 nt, Human
cccacccucccugga

SEQ ID NO: 2229351 - RNA, 18 nt, Human
cccacccucccuggagug

SEQ ID NO: 2229352 - RNA, 13 nt, Human
cccaccccccuca

SEQ ID NO: 2229353 - RNA, 15 nt, Human
cccacccccaccccc

SEQ ID NO: 2229354 - RNA, 12 nt, Human
cccacccccuca

SEQ ID NO: 2229355 - RNA, 19 nt, Human
cccacccuccugucuuccc

SEQ ID NO: 2229356 - RNA, 16 nt, Human
cccacccucccuggag

SEQ ID NO: 2229357 - RNA, 13 nt, Human
cccacccuccugu

SEQ ID NO: 2229358 - RNA, 14 nt, Human
cccacccuccuguc

SEQ ID NO: 2229359 - RNA, 15 nt, Human
cccacccuccugucu

SEQ ID NO: 2229360 - RNA, 18 nt, Human
cccacccugaaagcccug

SEQ ID NO: 2229361 - RNA, 12 nt, Human
cccacccccauc

SEQ ID NO: 2229362 - RNA, 13 nt, Human
cccacccccagcu

SEQ ID NO: 2229363 - RNA, 22 nt, Human
cccacccacaauccuauucucg

SEQ ID NO: 2229364 - RNA, 18 nt, Human
cccacccccacccccacc

SEQ ID NO: 2229365 - RNA, 17 nt, Human
cccacccccacccaagg

SEQ ID NO: 2229366 - RNA, 12 nt, Human
cccacccccacc

SEQ ID NO: 2229367 - RNA, 15 nt, Human
cccacccccacccaa

SEQ ID NO: 2229368 - RNA, 20 nt, Human
cccacccaagggccuggccu

SEQ ID NO: 2229369 - RNA, 21 nt, Human
cccacccaagggccuggccug

SEQ ID NO: 2229370 - RNA, 22 nt, Human
cccacccaagggccuggccuga

SEQ ID NO: 2229371 - RNA, 15 nt, Human
cccacuucccugggc

SEQ ID NO: 2229372 - RNA, 21 nt, Human
ccccagagacucagagggagg

SEQ ID NO: 2229373 - RNA, 10 nt, Human
ccccagagac

SEQ ID NO: 2229374 - RNA, 13 nt, Human
ccccagagcacug

SEQ ID NO: 2229375 - RNA, 11 nt, Human
ccccagagcug

SEQ ID NO: 2229376 - RNA, 23 nt, Human
ccccagagcuguuuauggccuca

SEQ ID NO: 2229377 - RNA, 22 nt, Human
ccccagagcuguuuauggccuc

SEQ ID NO: 2229378 - RNA, 21 nt, Human
ccccagagcuguuuauggccu

SEQ ID NO: 2229379 - RNA, 12 nt, Human
ccccagagcugu

SEQ ID NO: 2229380 - RNA, 21 nt, Human
ccccagcaagugagagcuggg

SEQ ID NO: 2229381 - RNA, 19 nt, Human
ccccagcacuaaagcagug

SEQ ID NO: 2229382 - RNA, 11 nt, Human
ccccagcacua

SEQ ID NO: 2229383 - RNA, 12 nt, Human
ccccagcacuga

SEQ ID NO: 2229384 - RNA, 13 nt, Human
ccccagcacugag

SEQ ID NO: 2229385 - RNA, 15 nt, Human
ccccagcacugagga

SEQ ID NO: 2229386 - RNA, 13 nt, Human
ccccauccuggcc

SEQ ID NO: 2229387 - RNA, 14 nt, Human
ccccauccuggccc

SEQ ID NO: 2229388 - RNA, 15 nt, Human
ccccauccuggccca

SEQ ID NO: 2229389 - RNA, 16 nt, Human
ccccauccuggcccau

SEQ ID NO: 2229390 - RNA, 17 nt, Human
ccccauccuggcccauc

SEQ ID NO: 2229391 - RNA, 22 nt, Human
ccccagcaagugagagcugggu

SEQ ID NO: 2229392 - RNA, 18 nt, Human
ccccagaggccucucucu

SEQ ID NO: 2229393 - RNA, 13 nt, Human
ccccagcacccgg

SEQ ID NO: 2229394 - RNA, 15 nt, Human
ccccagcacccgggc

SEQ ID NO: 2229395 - RNA, 19 nt, Human
ccccagcacccgggcucag

SEQ ID NO: 2229396 - RNA, 14 nt, Human
ccccaucucuacua

SEQ ID NO: 2229397 - RNA, 23 nt, Human
ccccaucucaugccccuggcugg

SEQ ID NO: 2229398 - RNA, 21 nt, Human
ccccaucucaugccccuggcu

SEQ ID NO: 2229399 - RNA, 16 nt, Human
ccccaucucucccucc

SEQ ID NO: 2229400 - RNA, 12 nt, Human
ccccaucucucc

SEQ ID NO: 2229401 - RNA, 19 nt, Human
ccccaucucucccuccccu

SEQ ID NO: 2229402 - RNA, 13 nt, Human
ccccaucugccca

SEQ ID NO: 2229403 - RNA, 18 nt, Human
ccccauuuagguuucuga

SEQ ID NO: 2229404 - RNA, 17 nt, Human
ccccauuuauccaccuc

SEQ ID NO: 2229405 - RNA, 21 nt, Human
ccccauuuauccaccuccauc

SEQ ID NO: 2229406 - RNA, 14 nt, Human
ccccaucugcccag

SEQ ID NO: 2229407 - RNA, 17 nt, Human
ccccaucugcccaggac

SEQ ID NO: 2229408 - RNA, 18 nt, Human
ccccaucugcccaggacg

SEQ ID NO: 2229409 - RNA, 13 nt, Human
ccccauuucuauu

SEQ ID NO: 2229410 - RNA, 20 nt, Human
ccccauuucccaucugcacc

SEQ ID NO: 2229411 - RNA, 22 nt, Human
ccccauuucccaucugcacccc

SEQ ID NO: 2229412 - RNA, 16 nt, Human
ccccauuucccaucug

SEQ ID NO: 2229413 - RNA, 17 nt, Human
ccccauuucccaucugc

SEQ ID NO: 2229414 - RNA, 18 nt, Human
ccccauuucccaucugca

SEQ ID NO: 2229415 - RNA, 19 nt, Human
ccccauuucccaucugcac

SEQ ID NO: 2229416 - RNA, 22 nt, Human
cccccaaauggaaaugggcaga

SEQ ID NO: 2229417 - RNA, 17 nt, Human
ccccauuucuauuuauu

SEQ ID NO: 2229418 - RNA, 20 nt, Human
ccccauuucuauuuauuuac

SEQ ID NO: 2229419 - RNA, 16 nt, Human
cccccaacacugugcc

SEQ ID NO: 2229420 - RNA, 15 nt, Human
ccccauuuucugugg

SEQ ID NO: 2229421 - RNA, 23 nt, Human
ccccgacccuugccgucuaccug

SEQ ID NO: 2229422 - RNA, 19 nt, Human
ccccaaacgggcugcccug

SEQ ID NO: 2229423 - RNA, 18 nt, Human
ccccaaacaccuuccagc

SEQ ID NO: 2229424 - RNA, 22 nt, Human
ccccaaacaccuuccagcuccu

SEQ ID NO: 2229425 - RNA, 14 nt, Human
ccccaaagagccug

SEQ ID NO: 2229426 - RNA, 19 nt, Human
ccccaaaccugcaagggcu

SEQ ID NO: 2229427 - RNA, 20 nt, Human
ccccagacuccaccaagccu

SEQ ID NO: 2229428 - RNA, 21 nt, Human
ccccagacuccaccaagccug

SEQ ID NO: 2229429 - RNA, 15 nt, Human
cccauuguggcuccu

SEQ ID NO: 2229430 - RNA, 20 nt, Human
cccauugucccucugcccca

SEQ ID NO: 2229431 - RNA, 19 nt, Human
cccauuguggcuccuaucu

SEQ ID NO: 2229432 - RNA, 21 nt, Human
ccccaaaacucuccucugcug

SEQ ID NO: 2229433 - RNA, 23 nt, Human
ccccaaaacucuccucugcugcu

SEQ ID NO: 2229434 - RNA, 22 nt, Human
ccccaaaacucuccucugcugc

SEQ ID NO: 2229435 - RNA, 23 nt, Human
cccauuguggucacaggaaguag

SEQ ID NO: 2229436 - RNA, 22 nt, Human
cccauuguggucacaggaagua

SEQ ID NO: 2229437 - RNA, 18 nt, Human
cccauugucccucugccc

SEQ ID NO: 2229438 - RNA, 15 nt, Human
cccauugucccucug

SEQ ID NO: 2229439 - RNA, 16 nt, Human
ccccggccaccucugc

SEQ ID NO: 2229440 - RNA, 17 nt, Human
ccccggccaccucugcg

SEQ ID NO: 2229441 - RNA, 12 nt, Human
ccccggccaccu

SEQ ID NO: 2229442 - RNA, 13 nt, Human
ccccggccaccuc

SEQ ID NO: 2229443 - RNA, 14 nt, Human
ccccggccaccucu

SEQ ID NO: 2229444 - RNA, 15 nt, Human
ccccggccaccucug

SEQ ID NO: 2229445 - RNA, 19 nt, Human
ccccgcuuguccagcgccu

SEQ ID NO: 2229446 - RNA, 18 nt, Human
ccccgcuuguccagcgcc

SEQ ID NO: 2229447 - RNA, 17 nt, Human
ccccgcuuguccagcgc

SEQ ID NO: 2229448 - RNA, 15 nt, Human
ccccgcuuguccagc

SEQ ID NO: 2229449 - RNA, 14 nt, Human
ccccgcuucugccu

SEQ ID NO: 2229450 - RNA, 22 nt, Human
ccccgcucugcaugcggcccag

SEQ ID NO: 2229451 - RNA, 14 nt, Human
ccccggcagacgcc

SEQ ID NO: 2229452 - RNA, 14 nt, Human
ccccggaguucagu

SEQ ID NO: 2229453 - RNA, 12 nt, Human
ccccgagcuggg

SEQ ID NO: 2229454 - RNA, 20 nt, Human
cccccaacacugugcccugg

SEQ ID NO: 2229455 - RNA, 21 nt, Human
cccccaacacugugcccuggu

SEQ ID NO: 2229456 - RNA, 13 nt, Human
ccccgagcugggg

SEQ ID NO: 2229457 - RNA, 13 nt, Human
ccccgcucugcau

SEQ ID NO: 2229458 - RNA, 17 nt, Human
ccccgaggacccagacc

SEQ ID NO: 2229459 - RNA, 14 nt, Human
ccccgcucugcaug

SEQ ID NO: 2229460 - RNA, 21 nt, Human
ccccgcucugcaugcggccca

SEQ ID NO: 2229461 - RNA, 23 nt, Human
ccccgcucugcaugcggcccagc

SEQ ID NO: 2229462 - RNA, 23 nt, Human
ccccgaggccuucucugaaggac

SEQ ID NO: 2229463 - RNA, 23 nt, Human
ccccuuuucuuuucuacccuagc

SEQ ID NO: 2229464 - RNA, 19 nt, Human
ccccuuuuuacuccccuug

SEQ ID NO: 2229465 - RNA, 18 nt, Human
ccccuuuuuacuccccuu

SEQ ID NO: 2229466 - RNA, 15 nt, Human
ccccuuuucuuuucu

SEQ ID NO: 2229467 - RNA, 17 nt, Human
ccccuuuucuuuucuac

SEQ ID NO: 2229468 - RNA, 19 nt, Human
ccccuuuucuuuucuaccc

SEQ ID NO: 2229469 - RNA, 20 nt, Human
ccccuuuucuuuucuacccu

SEQ ID NO: 2229470 - RNA, 14 nt, Human
ccccuuuucugcau

SEQ ID NO: 2229471 - RNA, 16 nt, Human
ccccuuuucugcauuu

SEQ ID NO: 2229472 - RNA, 16 nt, Human
ccccuuuucagcuucu

SEQ ID NO: 2229473 - RNA, 17 nt, Human
ccccuuuucagcuucug

SEQ ID NO: 2229474 - RNA, 19 nt, Human
ccccuuuucagcuucugcu

SEQ ID NO: 2229475 - RNA, 22 nt, Human
ccccuuuucagcuucugcuggg

SEQ ID NO: 2229476 - RNA, 20 nt, Human
ccccuuugaugauuaauuca

SEQ ID NO: 2229477 - RNA, 13 nt, Human
ccccuuugggccc

SEQ ID NO: 2229478 - RNA, 16 nt, Human
ccccuuugggcccagg

SEQ ID NO: 2229479 - RNA, 17 nt, Human
ccccuuugggcccaggg

SEQ ID NO: 2229480 - RNA, 18 nt, Human
ccccuuugggcccaggga

SEQ ID NO: 2229481 - RNA, 20 nt, Human
ccccuuugggcccagggaca

SEQ ID NO: 2229482 - RNA, 12 nt, Human
ccccuuugugcu

SEQ ID NO: 2229483 - RNA, 13 nt, Human
ccccuuugugcug

SEQ ID NO: 2229484 - RNA, 15 nt, Human
ccccuuugugcugug

SEQ ID NO: 2229485 - RNA, 16 nt, Human
ccccuuugugcugugg

SEQ ID NO: 2229486 - RNA, 14 nt, Human
cccgaauagcuggg

SEQ ID NO: 2229487 - RNA, 14 nt, Human
cccgaauacaaaca

SEQ ID NO: 2229488 - RNA, 20 nt, Human
cccgaauacaaacaccugga

SEQ ID NO: 2229489 - RNA, 23 nt, Human
cccgaauacaaacaccuggacuu

SEQ ID NO: 2229490 - RNA, 17 nt, Human
cccggcaugggaaagcc

SEQ ID NO: 2229491 - RNA, 12 nt, Human
cccggccaccuc

SEQ ID NO: 2229492 - RNA, 13 nt, Human
cccggccaccucu

SEQ ID NO: 2229493 - RNA, 14 nt, Human
cccggccaccucug

SEQ ID NO: 2229494 - RNA, 15 nt, Human
cccggccaccucugc

SEQ ID NO: 2229495 - RNA, 20 nt, Human
cccggccaccucugcggacc

SEQ ID NO: 2229496 - RNA, 21 nt, Human
cccggccaccucugcggaccc

SEQ ID NO: 2229497 - RNA, 15 nt, Human
ccccuugggcggcug

SEQ ID NO: 2229498 - RNA, 18 nt, Human
ccccucuugccccaaccc

SEQ ID NO: 2229499 - RNA, 15 nt, Human
ccccuuguccuuucc

SEQ ID NO: 2229500 - RNA, 18 nt, Human
ccccuuguccuuucccuu

SEQ ID NO: 2229501 - RNA, 22 nt, Human
ccccuugcucuccccugcccug

SEQ ID NO: 2229502 - RNA, 24 nt, Human
ccccuugcccuugcccugaccucc

SEQ ID NO: 2229503 - RNA, 13 nt, Human
ccccuugggcggc

SEQ ID NO: 2229504 - RNA, 23 nt, Human
ccccuuuccuggacacucagacc

SEQ ID NO: 2229505 - RNA, 10 nt, Human
ccccuuuccu

SEQ ID NO: 2229506 - RNA, 22 nt, Human
ccccuuuccuggacacucagac

SEQ ID NO: 2229507 - RNA, 24 nt, Human
ccccuuucagaugucuucugccug

SEQ ID NO: 2229508 - RNA, 12 nt, Human
ccccucuugccc

SEQ ID NO: 2229509 - RNA, 13 nt, Human
ccccucuugcccc

SEQ ID NO: 2229510 - RNA, 14 nt, Human
ccccucuugcccca

SEQ ID NO: 2229511 - RNA, 15 nt, Human
ccccucuugccccaa

SEQ ID NO: 2229512 - RNA, 12 nt, Human
ccccucugucuu

SEQ ID NO: 2229513 - RNA, 22 nt, Human
ccccucuguccaggcacugaga

SEQ ID NO: 2229514 - RNA, 14 nt, Human
ccccucuguccagg

SEQ ID NO: 2229515 - RNA, 21 nt, Human
ccccuugcccagggcucagcc

SEQ ID NO: 2229516 - RNA, 20 nt, Human
ccccuugcccagggcucagc

SEQ ID NO: 2229517 - RNA, 17 nt, Human
ccccuugcccagggcuc

SEQ ID NO: 2229518 - RNA, 23 nt, Human
ccccuugcccagggcucagccug

SEQ ID NO: 2229519 - RNA, 17 nt, Human
ccccuugcccuugcccu

SEQ ID NO: 2229520 - RNA, 18 nt, Human
ccccuugcccuugcccug

SEQ ID NO: 2229521 - RNA, 19 nt, Human
ccccuugcccuugcccuga

SEQ ID NO: 2229522 - RNA, 21 nt, Human
ccccuugcccuugcccugacc

SEQ ID NO: 2229523 - RNA, 23 nt, Human
ccccuugcccuugcccugaccuc

SEQ ID NO: 2229524 - RNA, 11 nt, Human
cccggcuccag

SEQ ID NO: 2229525 - RNA, 12 nt, Human
cccggcuccagg

SEQ ID NO: 2229526 - RNA, 13 nt, Human
cccggccaccugc

SEQ ID NO: 2229527 - RNA, 14 nt, Human
cccggccaccugcg

SEQ ID NO: 2229528 - RNA, 13 nt, Human
cccggcuccaggc

SEQ ID NO: 2229529 - RNA, 14 nt, Human
cccggcuccaggcu

SEQ ID NO: 2229530 - RNA, 15 nt, Human
cccggcuccaggcuc

SEQ ID NO: 2229531 - RNA, 16 nt, Human
cccggcuccaggcucc

SEQ ID NO: 2229532 - RNA, 22 nt, Human
cccggcucgagcaguccugccu

SEQ ID NO: 2229533 - RNA, 16 nt, Human
cccggcugcagaggcc

SEQ ID NO: 2229534 - RNA, 21 nt, Human
cccggcugcagaggccagagg

SEQ ID NO: 2229535 - RNA, 17 nt, Human
cccggccaccugcggug

SEQ ID NO: 2229536 - RNA, 17 nt, Human
cccggcucccaccgagg

SEQ ID NO: 2229537 - RNA, 23 nt, Human
cccgggacgcagggguugcagug

SEQ ID NO: 2229538 - RNA, 18 nt, Human
cccgggacgcagcaggag

SEQ ID NO: 2229539 - RNA, 22 nt, Human
cccgggaagggggcugggacau

SEQ ID NO: 2229540 - RNA, 23 nt, Human
cccgggaggcagagguugcagug

SEQ ID NO: 2229541 - RNA, 18 nt, Human
cccuauuagagaagagau

SEQ ID NO: 2229542 - RNA, 17 nt, Human
cccuauugguaaagaau

SEQ ID NO: 2229543 - RNA, 19 nt, Human
cccgggagcugcugcccug

SEQ ID NO: 2229544 - RNA, 19 nt, Human
ccccucuggcuccagcugg

SEQ ID NO: 2229545 - RNA, 12 nt, Human
ccccucuggucg

SEQ ID NO: 2229546 - RNA, 12 nt, Human
ccccucugucca

SEQ ID NO: 2229547 - RNA, 23 nt, Human
ccccucuggucgcuccugcccac

SEQ ID NO: 2229548 - RNA, 19 nt, Human
ccccucuggucgcuccugc

SEQ ID NO: 2229549 - RNA, 20 nt, Human
ccccucuggucgcuccugcc

SEQ ID NO: 2229550 - RNA, 21 nt, Human
ccgccaaaagcugcucaggga

SEQ ID NO: 2229551 - RNA, 23 nt, Human
ccgcauucccugagucaccagga

SEQ ID NO: 2229552 - RNA, 15 nt, Human
ccgcauucccugagu

SEQ ID NO: 2229553 - RNA, 23 nt, Human
ccgccaagguagccaucccauga

SEQ ID NO: 2229554 - RNA, 16 nt, Human
ccgccagacuguuaga

SEQ ID NO: 2229555 - RNA, 23 nt, Human
ccgccacauggcuuccuccugcg

SEQ ID NO: 2229556 - RNA, 17 nt, Human
ccgccaccuaucucgug

SEQ ID NO: 2229557 - RNA, 23 nt, Human
ccgccaccuaucucgugggagag

SEQ ID NO: 2229558 - RNA, 16 nt, Human
ccgccacuccugaacc

SEQ ID NO: 2229559 - RNA, 12 nt, Human
ccgccagggccc

SEQ ID NO: 2229560 - RNA, 12 nt, Human
ccgccaggcgag

SEQ ID NO: 2229561 - RNA, 18 nt, Human
ccgccagccuccucugga

SEQ ID NO: 2229562 - RNA, 23 nt, Human
ccgccagccuccucuggacggca

SEQ ID NO: 2229563 - RNA, 16 nt, Human
ccgccagauggggccu

SEQ ID NO: 2229564 - RNA, 19 nt, Human
ccgccagauggggccucug

SEQ ID NO: 2229565 - RNA, 11 nt, Human
ccgccagccuc

SEQ ID NO: 2229566 - RNA, 12 nt, Human
ccgccagccucc

SEQ ID NO: 2229567 - RNA, 13 nt, Human
ccgccagccuccu

SEQ ID NO: 2229568 - RNA, 14 nt, Human
ccgccagccuccuc

SEQ ID NO: 2229569 - RNA, 15 nt, Human
ccgccagccuccucu

SEQ ID NO: 2229570 - RNA, 22 nt, Human
ccgaccucguccucccccugcc

SEQ ID NO: 2229571 - RNA, 19 nt, Human
ccgaccucguccucccccu

SEQ ID NO: 2229572 - RNA, 13 nt, Human
ccgaccucguccu

SEQ ID NO: 2229573 - RNA, 21 nt, Human
ccgaccgaggcuggagcuggc

SEQ ID NO: 2229574 - RNA, 15 nt, Human
ccgaccucagccuuc

SEQ ID NO: 2229575 - RNA, 14 nt, Human
ccgaccucagccuu

SEQ ID NO: 2229576 - RNA, 17 nt, Human
ccgccaaggcuggggga

SEQ ID NO: 2229577 - RNA, 13 nt, Human
ccgaccucagccu

SEQ ID NO: 2229578 - RNA, 12 nt, Human
ccgaccucagcc

SEQ ID NO: 2229579 - RNA, 19 nt, Human
ccgaccgaggcuggagcug

SEQ ID NO: 2229580 - RNA, 16 nt, Human
ccgacccuugccgucu

SEQ ID NO: 2229581 - RNA, 23 nt, Human
ccgaaucucuuuuugcuuucgaa

SEQ ID NO: 2229582 - RNA, 19 nt, Human
ccgaauccccucccuguca

SEQ ID NO: 2229583 - RNA, 13 nt, Human
ccgaaugugcagg

SEQ ID NO: 2229584 - RNA, 21 nt, Human
cccuucuuggugcuuacacau

SEQ ID NO: 2229585 - RNA, 16 nt, Human
ccgaauccccucccug

SEQ ID NO: 2229586 - RNA, 18 nt, Human
ccgaauccccucccuguc

SEQ ID NO: 2229587 - RNA, 13 nt, Human
ccgaccagagccc

SEQ ID NO: 2229588 - RNA, 15 nt, Human
ccgacaaccgaugcu

SEQ ID NO: 2229589 - RNA, 20 nt, Human
ccgaaugugcagguuuguua

SEQ ID NO: 2229590 - RNA, 20 nt, Human
ccgacaaccgaugcuccagc

SEQ ID NO: 2229591 - RNA, 18 nt, Human
ccgacaaccgaugcucca

SEQ ID NO: 2229592 - RNA, 20 nt, Human
ccgaauagcugggacuacag

SEQ ID NO: 2229593 - RNA, 17 nt, Human
cccuucuuuccacagaa

SEQ ID NO: 2229594 - RNA, 23 nt, Human
cccuucugcucagcucugggcca

SEQ ID NO: 2229595 - RNA, 14 nt, Human
cccuucugcucagc

SEQ ID NO: 2229596 - RNA, 13 nt, Human
cccuucugcuacu

SEQ ID NO: 2229597 - RNA, 20 nt, Human
cccuucugggcaucuguucu

SEQ ID NO: 2229598 - RNA, 21 nt, Human
cccuucugggcaucuguucug

SEQ ID NO: 2229599 - RNA, 22 nt, Human
cccuucugggcaucuguucugg

SEQ ID NO: 2229600 - RNA, 17 nt, Human
cccuucugucccucaca

SEQ ID NO: 2229601 - RNA, 16 nt, Human
cccuucugucccucac

SEQ ID NO: 2229602 - RNA, 16 nt, Human
ccgcccccugcccucc

SEQ ID NO: 2229603 - RNA, 17 nt, Human
ccgcccccugcccuccc

SEQ ID NO: 2229604 - RNA, 11 nt, Human
ccgcccccugc

SEQ ID NO: 2229605 - RNA, 14 nt, Human
ccgccccagccucu

SEQ ID NO: 2229606 - RNA, 12 nt, Human
ccgcccccuccu

SEQ ID NO: 2229607 - RNA, 19 nt, Human
ccgcccccaguccccaccc

SEQ ID NO: 2229608 - RNA, 15 nt, Human
ccgccccagccucug

SEQ ID NO: 2229609 - RNA, 13 nt, Human
ccgccccacauuc

SEQ ID NO: 2229610 - RNA, 13 nt, Human
ccgcccccagucc

SEQ ID NO: 2229611 - RNA, 19 nt, Human
ccgccauugccaccaggag

SEQ ID NO: 2229612 - RNA, 16 nt, Human
ccgccauugccaccag

SEQ ID NO: 2229613 - RNA, 15 nt, Human
ccgccauugccacca

SEQ ID NO: 2229614 - RNA, 20 nt, Human
ccgcccaggcuuagucacug

SEQ ID NO: 2229615 - RNA, 20 nt, Human
ccgccauucucaagcccugc

SEQ ID NO: 2229616 - RNA, 21 nt, Human
ccgccagggcccacacccccu

SEQ ID NO: 2229617 - RNA, 15 nt, Human
ccgccauggcuucca

SEQ ID NO: 2229618 - RNA, 14 nt, Human
ccgccauugccacc

SEQ ID NO: 2229619 - RNA, 21 nt, Human
ccgccauucucaagcccugca

SEQ ID NO: 2229620 - RNA, 16 nt, Human
ccgccaugcuccuggc

SEQ ID NO: 2229621 - RNA, 21 nt, Human
cccuucugacccaugcugccc

SEQ ID NO: 2229622 - RNA, 22 nt, Human
cccuucugacccaugcugcccu

SEQ ID NO: 2229623 - RNA, 23 nt, Human
cccuucugacccaugcugcccug

SEQ ID NO: 2229624 - RNA, 18 nt, Human
cccugugcuccgugccuc

SEQ ID NO: 2229625 - RNA, 17 nt, Human
cccuucuaccugccacu

SEQ ID NO: 2229626 - RNA, 16 nt, Human
cccuucuaccugccac

SEQ ID NO: 2229627 - RNA, 17 nt, Human
cccugugcuccgugccu

SEQ ID NO: 2229628 - RNA, 16 nt, Human
cccuucuaccuuccug

SEQ ID NO: 2229629 - RNA, 16 nt, Human
cccuucgcuccugugu

SEQ ID NO: 2229630 - RNA, 18 nt, Human
cccuucgcuccugugucu

SEQ ID NO: 2229631 - RNA, 20 nt, Human
cccugugccuaacaccagcg

SEQ ID NO: 2229632 - RNA, 21 nt, Human
cccugugccuaacaccagcgu

SEQ ID NO: 2229633 - RNA, 22 nt, Human
cccugugccuaacaccagcguu

SEQ ID NO: 2229634 - RNA, 24 nt, Human
cccugugccuuggugugcuguauc

SEQ ID NO: 2229635 - RNA, 20 nt, Human
cccuggcccucaaggccucc

SEQ ID NO: 2229636 - RNA, 21 nt, Human
cccuggccucugugccuucuu

SEQ ID NO: 2229637 - RNA, 22 nt, Human
cccuggccugcugggcucucca

SEQ ID NO: 2229638 - RNA, 21 nt, Human
cccuggccugcugggcucucc

SEQ ID NO: 2229639 - RNA, 14 nt, Human
cccuggccugcugg

SEQ ID NO: 2229640 - RNA, 13 nt, Human
cccuggccugcug

SEQ ID NO: 2229641 - RNA, 19 nt, Human
cccuggccuguucuguuuu

SEQ ID NO: 2229642 - RNA, 15 nt, Human
cccuggccuguucug

SEQ ID NO: 2229643 - RNA, 17 nt, Human
cccuggccuuucauauu

SEQ ID NO: 2229644 - RNA, 14 nt, Human
cccuggccccagga

SEQ ID NO: 2229645 - RNA, 13 nt, Human
cccuggccccagg

SEQ ID NO: 2229646 - RNA, 21 nt, Human
cccuggcccagcggccccucc

SEQ ID NO: 2229647 - RNA, 13 nt, Human
cccuggcccucaa

SEQ ID NO: 2229648 - RNA, 15 nt, Human
cccuggccagaggcu

SEQ ID NO: 2229649 - RNA, 14 nt, Human
cccuggccagaggc

SEQ ID NO: 2229650 - RNA, 13 nt, Human
cccuggccagagg

SEQ ID NO: 2229651 - RNA, 23 nt, Human
cccuggcauuauguccacugugu

SEQ ID NO: 2229652 - RNA, 20 nt, Human
cccuggccaccaccccccac

SEQ ID NO: 2229653 - RNA, 23 nt, Human
cccuggccaccaccccccacucu

SEQ ID NO: 2229654 - RNA, 20 nt, Human
cccuggcaggaugacccugc

SEQ ID NO: 2229655 - RNA, 22 nt, Human
cccuggcaggaugacccugcga

SEQ ID NO: 2229656 - RNA, 14 nt, Human
cccuggcagccccu

SEQ ID NO: 2229657 - RNA, 16 nt, Human
cccuggcagccccugu

SEQ ID NO: 2229658 - RNA, 22 nt, Human
cccuggcugcugcccccacccc

SEQ ID NO: 2229659 - RNA, 19 nt, Human
cccuggcuuguaacuccac

SEQ ID NO: 2229660 - RNA, 23 nt, Human
cccuggcugggacguggcucagc

SEQ ID NO: 2229661 - RNA, 15 nt, Human
cccuggcugcugccc

SEQ ID NO: 2229662 - RNA, 18 nt, Human
cccuggcugcugccccca

SEQ ID NO: 2229663 - RNA, 20 nt, Human
cccuggcugcccuggcccug

SEQ ID NO: 2229664 - RNA, 22 nt, Human
cccuggcugcccuggcccugag

SEQ ID NO: 2229665 - RNA, 13 nt, Human
cccuggcugcugc

SEQ ID NO: 2229666 - RNA, 14 nt, Human
cccuggcugcugcc

SEQ ID NO: 2229667 - RNA, 17 nt, Human
cccuggcucccacaggc

SEQ ID NO: 2229668 - RNA, 19 nt, Human
cccuggcucccacaggccc

SEQ ID NO: 2229669 - RNA, 19 nt, Human
cccuggcugcccuggcccu

SEQ ID NO: 2229670 - RNA, 16 nt, Human
cccuggcuccaggcca

SEQ ID NO: 2229671 - RNA, 13 nt, Human
cccuggcuccagg

SEQ ID NO: 2229672 - RNA, 13 nt, Human
cccuggcuuuuca

SEQ ID NO: 2229673 - RNA, 23 nt, Human
cccuggcuuguaacuccaccaac

SEQ ID NO: 2229674 - RNA, 20 nt, Human
cccuggcuuguaacuccacc

SEQ ID NO: 2229675 - RNA, 13 nt, Human
cccucaccccugc

SEQ ID NO: 2229676 - RNA, 18 nt, Human
cccucacagccucugacc

SEQ ID NO: 2229677 - RNA, 12 nt, Human
cccucaccaaca

SEQ ID NO: 2229678 - RNA, 14 nt, Human
cccucaccaggggc

SEQ ID NO: 2229679 - RNA, 14 nt, Human
cccucacagccucu

SEQ ID NO: 2229680 - RNA, 15 nt, Human
cccucacagccucug

SEQ ID NO: 2229681 - RNA, 16 nt, Human
cccucacagccucuga

SEQ ID NO: 2229682 - RNA, 17 nt, Human
cccucacagccucugac

SEQ ID NO: 2229683 - RNA, 23 nt, Human
cccuauuuaacagggucucuagu

SEQ ID NO: 2229684 - RNA, 21 nt, Human
cccuauuuaacagggucucua

SEQ ID NO: 2229685 - RNA, 20 nt, Human
cccuauuuuuuuucuguuau

SEQ ID NO: 2229686 - RNA, 16 nt, Human
cccuauuuccccaccc

SEQ ID NO: 2229687 - RNA, 24 nt, Human
cccucaaaccuccucuucugacgu

SEQ ID NO: 2229688 - RNA, 20 nt, Human
cccucaaaccuccucuucug

SEQ ID NO: 2229689 - RNA, 21 nt, Human
cccucaaaccuccucuucuga

SEQ ID NO: 2229690 - RNA, 21 nt, Human
cccuauuuuuuuucuguuaua

SEQ ID NO: 2229691 - RNA, 15 nt, Human
cccucaaaccuccuc

SEQ ID NO: 2229692 - RNA, 19 nt, Human
cccucaaaccuccucuucu

SEQ ID NO: 2229693 - RNA, 13 nt, Human
cccugcccugugg

SEQ ID NO: 2229694 - RNA, 12 nt, Human
cccugcccugug

SEQ ID NO: 2229695 - RNA, 11 nt, Human
cccugcccugu

SEQ ID NO: 2229696 - RNA, 13 nt, Human
cccucaccccugg

SEQ ID NO: 2229697 - RNA, 20 nt, Human
cccucaccccugguucucau

SEQ ID NO: 2229698 - RNA, 22 nt, Human
cccucaccccugguucucaucu

SEQ ID NO: 2229699 - RNA, 21 nt, Human
cccucacccacuuuggccucc

SEQ ID NO: 2229700 - RNA, 15 nt, Human
cccucacccugagcc

SEQ ID NO: 2229701 - RNA, 14 nt, Human
cccugcccuguggg

SEQ ID NO: 2229702 - RNA, 15 nt, Human
cccugcccugugggc

SEQ ID NO: 2229703 - RNA, 16 nt, Human
cccugcccugugggcc

SEQ ID NO: 2229704 - RNA, 20 nt, Human
cccugcccugugggccccca

SEQ ID NO: 2229705 - RNA, 21 nt, Human
cccugcccugugggcccccaa

SEQ ID NO: 2229706 - RNA, 13 nt, Human
cccucacccugcc

SEQ ID NO: 2229707 - RNA, 20 nt, Human
cccucacccugagccccuuc

SEQ ID NO: 2229708 - RNA, 22 nt, Human
cccucacccugagccccuuccu

SEQ ID NO: 2229709 - RNA, 16 nt, Human
cccucacccugccuua

SEQ ID NO: 2229710 - RNA, 12 nt, Human
cccuggcagccc

SEQ ID NO: 2229711 - RNA, 13 nt, Human
cccuggcagcccc

SEQ ID NO: 2229712 - RNA, 12 nt, Human
ccgucacagccu

SEQ ID NO: 2229713 - RNA, 22 nt, Human
ccguaguucccugaaaacccag

SEQ ID NO: 2229714 - RNA, 12 nt, Human
ccguauuucaga

SEQ ID NO: 2229715 - RNA, 13 nt, Human
ccgucacagccuc

SEQ ID NO: 2229716 - RNA, 18 nt, Human
ccggcuaauuuuuguaau

SEQ ID NO: 2229717 - RNA, 14 nt, Human
ccguaguucccuga

SEQ ID NO: 2229718 - RNA, 16 nt, Human
ccguaguucccugaaa

SEQ ID NO: 2229719 - RNA, 15 nt, Human
ccguaguucccugaa

SEQ ID NO: 2229720 - RNA, 16 nt, Human
ccgucucaugaggggc

SEQ ID NO: 2229721 - RNA, 20 nt, Human
ccgucuccaggggcugcuuc

SEQ ID NO: 2229722 - RNA, 21 nt, Human
ccgucuccaggggcugcuucc

SEQ ID NO: 2229723 - RNA, 13 nt, Human
ccgucucucuccc

SEQ ID NO: 2229724 - RNA, 14 nt, Human
ccgucucucuccca

SEQ ID NO: 2229725 - RNA, 19 nt, Human
ccgucuaguuaacauuuca

SEQ ID NO: 2229726 - RNA, 21 nt, Human
ccgucucaguguugagccuuu

SEQ ID NO: 2229727 - RNA, 18 nt, Human
ccguccaggagccugugc

SEQ ID NO: 2229728 - RNA, 16 nt, Human
ccguccaggagccugg

SEQ ID NO: 2229729 - RNA, 22 nt, Human
ccguccagccgccauugccacc

SEQ ID NO: 2229730 - RNA, 17 nt, Human
ccgucauguuccucaaa

SEQ ID NO: 2229731 - RNA, 14 nt, Human
ccguccagaccuug

SEQ ID NO: 2229732 - RNA, 16 nt, Human
ccgucauguuccucaa

SEQ ID NO: 2229733 - RNA, 15 nt, Human
ccgucauguuccuca

SEQ ID NO: 2229734 - RNA, 21 nt, Human
ccgucauggcuuaauguuuau

SEQ ID NO: 2229735 - RNA, 20 nt, Human
ccgucaguaucaggccugcc

SEQ ID NO: 2229736 - RNA, 16 nt, Human
ccgucagggcccaagu

SEQ ID NO: 2229737 - RNA, 12 nt, Human
ccgucagggccc

SEQ ID NO: 2229738 - RNA, 14 nt, Human
ccgucagggcccaa

SEQ ID NO: 2229739 - RNA, 17 nt, Human
ccgucagccaaauguaa

SEQ ID NO: 2229740 - RNA, 22 nt, Human
ccggcuaugggggcacugagga

SEQ ID NO: 2229741 - RNA, 23 nt, Human
ccggcuaugggggcacugaggac

SEQ ID NO: 2229742 - RNA, 17 nt, Human
ccggcuaugggggcacu

SEQ ID NO: 2229743 - RNA, 19 nt, Human
ccggcuaauuuuuguauuu

SEQ ID NO: 2229744 - RNA, 16 nt, Human
ccguagguuauuuuca

SEQ ID NO: 2229745 - RNA, 22 nt, Human
ccggcgugguggaagaggggac

SEQ ID NO: 2229746 - RNA, 23 nt, Human
ccgucugggguucagccccuccu

SEQ ID NO: 2229747 - RNA, 22 nt, Human
ccgucugggguucagccccucc

SEQ ID NO: 2229748 - RNA, 18 nt, Human
ccuaagaguugagcucuc

SEQ ID NO: 2229749 - RNA, 16 nt, Human
ccuaagaguguuuaau

SEQ ID NO: 2229750 - RNA, 12 nt, Human
ccuaagaguguu

SEQ ID NO: 2229751 - RNA, 21 nt, Human
ccgucugggguucagccccuc

SEQ ID NO: 2229752 - RNA, 20 nt, Human
ccgucugggguucagccccu

SEQ ID NO: 2229753 - RNA, 19 nt, Human
ccgucugggguucagcccc

SEQ ID NO: 2229754 - RNA, 17 nt, Human
ccgucugggguucagcc

SEQ ID NO: 2229755 - RNA, 18 nt, Human
ccgucucugguuccuccc

SEQ ID NO: 2229756 - RNA, 19 nt, Human
ccgucucucucccauggag

SEQ ID NO: 2229757 - RNA, 22 nt, Human
ccgucucucucccauggagccc

SEQ ID NO: 2229758 - RNA, 21 nt, Human
ccuaagccaagggccucuugc

SEQ ID NO: 2229759 - RNA, 13 nt, Human
ccuaagccaaggg

SEQ ID NO: 2229760 - RNA, 19 nt, Human
ccuaagggcucaccguggc

SEQ ID NO: 2229761 - RNA, 22 nt, Human
ccuaaggcugcaagguuuaggc

SEQ ID NO: 2229762 - RNA, 23 nt, Human
ccuaagggacauguuuugauaaa

SEQ ID NO: 2229763 - RNA, 12 nt, Human
ccuaaggcugca

SEQ ID NO: 2229764 - RNA, 14 nt, Human
ccuaaggacacacu

SEQ ID NO: 2229765 - RNA, 13 nt, Human
ccuaaggacacac

SEQ ID NO: 2229766 - RNA, 22 nt, Human
ccuaaggaaaggaauuggcaug

SEQ ID NO: 2229767 - RNA, 18 nt, Human
ccuaaguccuuuaugugg

SEQ ID NO: 2229768 - RNA, 16 nt, Human
ccuaaguccuuuaugu

SEQ ID NO: 2229769 - RNA, 20 nt, Human
ccuaaguuucaguugauuuu

SEQ ID NO: 2229770 - RNA, 16 nt, Human
ccuaaguggcugcuga

SEQ ID NO: 2229771 - RNA, 15 nt, Human
ccuaaguggcugcug

SEQ ID NO: 2229772 - RNA, 14 nt, Human
ccuaaguggcugcu

SEQ ID NO: 2229773 - RNA, 14 nt, Human
ccuaauaaagcugu

SEQ ID NO: 2229774 - RNA, 17 nt, Human
ccuaaucaggcugaggu

SEQ ID NO: 2229775 - RNA, 13 nt, Human
ccuaauccaggca

SEQ ID NO: 2229776 - RNA, 15 nt, Human
ccuaauccaggcaga

SEQ ID NO: 2229777 - RNA, 14 nt, Human
ccuaauccaggcag

SEQ ID NO: 2229778 - RNA, 23 nt, Human
ccuagagugagggccugaggucu

SEQ ID NO: 2229779 - RNA, 22 nt, Human
ccuagaguagaguggagggagg

SEQ ID NO: 2229780 - RNA, 18 nt, Human
ccuagaguagaguggagg

SEQ ID NO: 2229781 - RNA, 18 nt, Human
ccuagagggaggggccua

SEQ ID NO: 2229782 - RNA, 23 nt, Human
ccuagagguacuuuccacuugau

SEQ ID NO: 2229783 - RNA, 21 nt, Human
ccuaauaaaguucuguacuca

SEQ ID NO: 2229784 - RNA, 16 nt, Human
ccuaauaaaguucugu

SEQ ID NO: 2229785 - RNA, 23 nt, Human
ccuaauaaagcuguguggcaguc

SEQ ID NO: 2229786 - RNA, 20 nt, Human
ccuaggagugccccauucuu

SEQ ID NO: 2229787 - RNA, 20 nt, Human
ccuaggagauaucugaggga

SEQ ID NO: 2229788 - RNA, 22 nt, Human
ccuaggagauaucugagggagg

SEQ ID NO: 2229789 - RNA, 16 nt, Human
ccuaggauugugccug

SEQ ID NO: 2229790 - RNA, 13 nt, Human
ccuaggcaggaca

SEQ ID NO: 2229791 - RNA, 18 nt, Human
ccuaggcaggacaugcug

SEQ ID NO: 2229792 - RNA, 22 nt, Human
ccuaggcaggacaugcugaagc

SEQ ID NO: 2229793 - RNA, 23 nt, Human
ccuaggcaggacaugcugaagcc

SEQ ID NO: 2229794 - RNA, 12 nt, Human
ccuaggagacca

SEQ ID NO: 2229795 - RNA, 17 nt, Human
ccuaggagauaucugag

SEQ ID NO: 2229796 - RNA, 19 nt, Human
ccuaggagauaucugaggg

SEQ ID NO: 2229797 - RNA, 17 nt, Human
ccuagcacacacuuuug

SEQ ID NO: 2229798 - RNA, 20 nt, Human
ccuagauccacacacagagg

SEQ ID NO: 2229799 - RNA, 19 nt, Human
ccuagauccacacacagag

SEQ ID NO: 2229800 - RNA, 17 nt, Human
ccuagauccacacacag

SEQ ID NO: 2229801 - RNA, 23 nt, Human
ccuagauggcagucacugaauuc

SEQ ID NO: 2229802 - RNA, 21 nt, Human
ccucagcccugacccugugga

SEQ ID NO: 2229803 - RNA, 19 nt, Human
ccucaaggccucccacagu

SEQ ID NO: 2229804 - RNA, 17 nt, Human
ccucaaggccucccaca

SEQ ID NO: 2229805 - RNA, 18 nt, Human
ccucaaggccucccacag

SEQ ID NO: 2229806 - RNA, 23 nt, Human
ccucaaggacuugaaagcaucca

SEQ ID NO: 2229807 - RNA, 22 nt, Human
ccucaaggacuugaaagcaucc

SEQ ID NO: 2229808 - RNA, 15 nt, Human
ccucaaggccuccca

SEQ ID NO: 2229809 - RNA, 16 nt, Human
ccucaaggccucccac

SEQ ID NO: 2229810 - RNA, 20 nt, Human
ccucagccuagacccuccuc

SEQ ID NO: 2229811 - RNA, 19 nt, Human
ccucagccuagacccuccu

SEQ ID NO: 2229812 - RNA, 16 nt, Human
ccucagccuagacccu

SEQ ID NO: 2229813 - RNA, 14 nt, Human
ccucagccuagacc

SEQ ID NO: 2229814 - RNA, 11 nt, Human
ccucagccucc

SEQ ID NO: 2229815 - RNA, 22 nt, Human
ccucagccucccaaagugcugg

SEQ ID NO: 2229816 - RNA, 21 nt, Human
ccucaaggacuugaaagcauc

SEQ ID NO: 2229817 - RNA, 20 nt, Human
ccucaaggacuugaaagcau

SEQ ID NO: 2229818 - RNA, 19 nt, Human
ccucaaggacuugaaagca

SEQ ID NO: 2229819 - RNA, 13 nt, Human
ccucaaggacuug

SEQ ID NO: 2229820 - RNA, 12 nt, Human
ccucaaggacuu

SEQ ID NO: 2229821 - RNA, 15 nt, Human
ccucaagcugcaucu

SEQ ID NO: 2229822 - RNA, 17 nt, Human
ccucaagaugaaggcaa

SEQ ID NO: 2229823 - RNA, 16 nt, Human
ccucaagaaauaaaag

SEQ ID NO: 2229824 - RNA, 16 nt, Human
ccucaagccaaucccc

SEQ ID NO: 2229825 - RNA, 18 nt, Human
ccucaagccaauccccuc

SEQ ID NO: 2229826 - RNA, 20 nt, Human
ccucaagccaauccccuccu

SEQ ID NO: 2229827 - RNA, 15 nt, Human
ccucaacucuccucc

SEQ ID NO: 2229828 - RNA, 15 nt, Human
ccucaagagaaggca

SEQ ID NO: 2229829 - RNA, 15 nt, Human
ccuauuuccccaccc

SEQ ID NO: 2229830 - RNA, 18 nt, Human
ccuauuuccauucaacaa

SEQ ID NO: 2229831 - RNA, 15 nt, Human
ccuauuuuaauaaac

SEQ ID NO: 2229832 - RNA, 22 nt, Human
ccuauugugauuugacuguuuu

SEQ ID NO: 2229833 - RNA, 17 nt, Human
ccuauuugccaugggcu

SEQ ID NO: 2229834 - RNA, 13 nt, Human
ccuauuuucauug

SEQ ID NO: 2229835 - RNA, 19 nt, Human
ccuauuuugaaaaauuccu

SEQ ID NO: 2229836 - RNA, 16 nt, Human
ccucaaccuccugggc

SEQ ID NO: 2229837 - RNA, 20 nt, Human
ccuauuuugaaaaauuccua

SEQ ID NO: 2229838 - RNA, 21 nt, Human
ccuauuuugaaaaauuccuau

SEQ ID NO: 2229839 - RNA, 22 nt, Human
ccuauuuugaaaaauuccuauu

SEQ ID NO: 2229840 - RNA, 23 nt, Human
ccuauuuugaaaaauuccuauug

SEQ ID NO: 2229841 - RNA, 14 nt, Human
ccucaaccugugau

SEQ ID NO: 2229842 - RNA, 19 nt, Human
ccucaacguugcuccccau

SEQ ID NO: 2229843 - RNA, 21 nt, Human
ccucaacucaccuaauguuua

SEQ ID NO: 2229844 - RNA, 13 nt, Human
ccucaaccuguga

SEQ ID NO: 2229845 - RNA, 18 nt, Human
ccucaacguauuguuucg

SEQ ID NO: 2229846 - RNA, 20 nt, Human
ccucaaccucuucuggcuca

SEQ ID NO: 2229847 - RNA, 17 nt, Human
ccucaaccucuucuggc

SEQ ID NO: 2229848 - RNA, 12 nt, Human
ccucaaccucuu

SEQ ID NO: 2229849 - RNA, 14 nt, Human
ccucagccuccuga

SEQ ID NO: 2229850 - RNA, 12 nt, Human
ccucagccuccg

SEQ ID NO: 2229851 - RNA, 18 nt, Human
ccucaugugaucacaauu

SEQ ID NO: 2229852 - RNA, 20 nt, Human
ccucauguccacugguucuu

SEQ ID NO: 2229853 - RNA, 13 nt, Human
ccucauguucuua

SEQ ID NO: 2229854 - RNA, 13 nt, Human
ccucauguggcug

SEQ ID NO: 2229855 - RNA, 15 nt, Human
ccucauguggcugga

SEQ ID NO: 2229856 - RNA, 16 nt, Human
ccucauguggcuggaa

SEQ ID NO: 2229857 - RNA, 17 nt, Human
ccucauguggcuggaag

SEQ ID NO: 2229858 - RNA, 23 nt, Human
ccucagccucccaaagugcuggg

SEQ ID NO: 2229859 - RNA, 22 nt, Human
ccucagccucccgaauagcugg

SEQ ID NO: 2229860 - RNA, 13 nt, Human
ccucagccuccug

SEQ ID NO: 2229861 - RNA, 22 nt, Human
ccucagccucccaaguagcugg

SEQ ID NO: 2229862 - RNA, 23 nt, Human
ccucagccgacugcacagcggcc

SEQ ID NO: 2229863 - RNA, 15 nt, Human
ccucauguccacugg

SEQ ID NO: 2229864 - RNA, 22 nt, Human
ccucauuacuuuaccaccccca

SEQ ID NO: 2229865 - RNA, 20 nt, Human
ccuccaaggaggggcuguaa

SEQ ID NO: 2229866 - RNA, 20 nt, Human
ccucaaggccucccacagug

SEQ ID NO: 2229867 - RNA, 21 nt, Human
ccuccaaggaggggcuguaaa

SEQ ID NO: 2229868 - RNA, 22 nt, Human
ccucccaaggggcccaaauucu

SEQ ID NO: 2229869 - RNA, 22 nt, Human
ccuccaaucccaccaacccuca

SEQ ID NO: 2229870 - RNA, 18 nt, Human
ccucauuagcauuuugcu

SEQ ID NO: 2229871 - RNA, 21 nt, Human
ccuccaagcuccaucuccacu

SEQ ID NO: 2229872 - RNA, 22 nt, Human
ccuccaagcuccaucuccacuc

SEQ ID NO: 2229873 - RNA, 19 nt, Human
ccucauguucuuaauucuu

SEQ ID NO: 2229874 - RNA, 17 nt, Human
ccucauuaaugacacuu

SEQ ID NO: 2229875 - RNA, 15 nt, Human
ccucauuaaugacac

SEQ ID NO: 2229876 - RNA, 18 nt, Human
ccucauguggcuggaaga

SEQ ID NO: 2229877 - RNA, 23 nt, Human
ccucauguggcuggaagauccug

SEQ ID NO: 2229878 - RNA, 12 nt, Human
ccucccagccug

SEQ ID NO: 2229879 - RNA, 18 nt, Human
ccucccagcccuauggau

SEQ ID NO: 2229880 - RNA, 19 nt, Human
ccucccagcccuauggaug

SEQ ID NO: 2229881 - RNA, 12 nt, Human
ccucccagcccu

SEQ ID NO: 2229882 - RNA, 13 nt, Human
ccucccagcccua

SEQ ID NO: 2229883 - RNA, 13 nt, Human
ccucccacccacc

SEQ ID NO: 2229884 - RNA, 21 nt, Human
ccucccagaucggaucuguug

SEQ ID NO: 2229885 - RNA, 15 nt, Human
ccucccaccacagca

SEQ ID NO: 2229886 - RNA, 14 nt, Human
ccucccaccacagc

SEQ ID NO: 2229887 - RNA, 12 nt, Human
ccucccaccaca

SEQ ID NO: 2229888 - RNA, 17 nt, Human
ccucccaaguggugccu

SEQ ID NO: 2229889 - RNA, 19 nt, Human
ccucccaauuucagacucc

SEQ ID NO: 2229890 - RNA, 20 nt, Human
ccucccaauuucagacuccc

SEQ ID NO: 2229891 - RNA, 11 nt, Human
ccucccacaca

SEQ ID NO: 2229892 - RNA, 12 nt, Human
ccucccacagug

SEQ ID NO: 2229893 - RNA, 13 nt, Human
ccucccacaguga

SEQ ID NO: 2229894 - RNA, 23 nt, Human
ccucccacagugacucgggcucc

SEQ ID NO: 2229895 - RNA, 14 nt, Human
ccucccaggcgccc

SEQ ID NO: 2229896 - RNA, 20 nt, Human
ccucccaggcgccccuuccc

SEQ ID NO: 2229897 - RNA, 11 nt, Human
ccucccagcug

SEQ ID NO: 2229898 - RNA, 20 nt, Human
ccucccagcccuauggaugu

SEQ ID NO: 2229899 - RNA, 12 nt, Human
ccucccagcuga

SEQ ID NO: 2229900 - RNA, 16 nt, Human
ccucccagcugacagu

SEQ ID NO: 2229901 - RNA, 19 nt, Human
ccucccagcugacaguccu

SEQ ID NO: 2229902 - RNA, 16 nt, Human
ccugcccauuggagag

SEQ ID NO: 2229903 - RNA, 16 nt, Human
ccugcccaugggagcu

SEQ ID NO: 2229904 - RNA, 21 nt, Human
ccugccccaacucuccccuga

SEQ ID NO: 2229905 - RNA, 23 nt, Human
ccugcccaugucgcgcucagcau

SEQ ID NO: 2229906 - RNA, 16 nt, Human
ccugcccaucugggaa

SEQ ID NO: 2229907 - RNA, 22 nt, Human
ccugcccaugucgcgcucagca

SEQ ID NO: 2229908 - RNA, 19 nt, Human
ccugcccagucccccaacc

SEQ ID NO: 2229909 - RNA, 21 nt, Human
ccugcccagucccccaacccc

SEQ ID NO: 2229910 - RNA, 22 nt, Human
ccugcccagucccccaacccca

SEQ ID NO: 2229911 - RNA, 23 nt, Human
ccugcccagucccccaaccccag

SEQ ID NO: 2229912 - RNA, 12 nt, Human
ccugcccagucc

SEQ ID NO: 2229913 - RNA, 15 nt, Human
ccugcccaguccccc

SEQ ID NO: 2229914 - RNA, 16 nt, Human
ccugcccaguccccca

SEQ ID NO: 2229915 - RNA, 20 nt, Human
ccugcugggcucuccaccuc

SEQ ID NO: 2229916 - RNA, 19 nt, Human
ccugcugggcucuccaccu

SEQ ID NO: 2229917 - RNA, 18 nt, Human
ccugcugggcucuccacc

SEQ ID NO: 2229918 - RNA, 17 nt, Human
ccugcugggcucuccac

SEQ ID NO: 2229919 - RNA, 16 nt, Human
ccugcugggcucucca

SEQ ID NO: 2229920 - RNA, 12 nt, Human
ccugcugggcuc

SEQ ID NO: 2229921 - RNA, 17 nt, Human
ccugcuggcucuucugc

SEQ ID NO: 2229922 - RNA, 19 nt, Human
ccugcuggcucuucugccc

SEQ ID NO: 2229923 - RNA, 12 nt, Human
ccugcugggugu

SEQ ID NO: 2229924 - RNA, 21 nt, Human
ccugcuggccccucaccuggg

SEQ ID NO: 2229925 - RNA, 13 nt, Human
ccugcuggccgcc

SEQ ID NO: 2229926 - RNA, 18 nt, Human
ccugcuggccccucaccu

SEQ ID NO: 2229927 - RNA, 17 nt, Human
ccugcuggccccucacc

SEQ ID NO: 2229928 - RNA, 16 nt, Human
ccugcuggccccucac

SEQ ID NO: 2229929 - RNA, 15 nt, Human
ccugcuggccccuca

SEQ ID NO: 2229930 - RNA, 14 nt, Human
ccugcuggccccuc

SEQ ID NO: 2229931 - RNA, 19 nt, Human
ccugcuggccgccucaccc

SEQ ID NO: 2229932 - RNA, 12 nt, Human
ccugcuggcucu

SEQ ID NO: 2229933 - RNA, 13 nt, Human
ccugcuggcucuu

SEQ ID NO: 2229934 - RNA, 14 nt, Human
ccugcuggccgccu

SEQ ID NO: 2229935 - RNA, 15 nt, Human
ccugcuggccgccuc

SEQ ID NO: 2229936 - RNA, 16 nt, Human
ccugcuggccgccuca

SEQ ID NO: 2229937 - RNA, 17 nt, Human
ccugcuggccgccucac

SEQ ID NO: 2229938 - RNA, 15 nt, Human
ccuggaggaggagca

SEQ ID NO: 2229939 - RNA, 20 nt, Human
ccuggaggaggagcaggggc

SEQ ID NO: 2229940 - RNA, 18 nt, Human
ccuggaggacggccggcu

SEQ ID NO: 2229941 - RNA, 17 nt, Human
ccugcuggguaaacugu

SEQ ID NO: 2229942 - RNA, 16 nt, Human
ccuggaggauuucauc

SEQ ID NO: 2229943 - RNA, 14 nt, Human
ccuggaggcacuga

SEQ ID NO: 2229944 - RNA, 12 nt, Human
ccuggaggccca

SEQ ID NO: 2229945 - RNA, 22 nt, Human
ccuggaggcacugaagugcuua

SEQ ID NO: 2229946 - RNA, 16 nt, Human
ccuggaggcccaguuc

SEQ ID NO: 2229947 - RNA, 14 nt, Human
ccuggaggcccagu

SEQ ID NO: 2229948 - RNA, 13 nt, Human
ccuggaggcccag

SEQ ID NO: 2229949 - RNA, 23 nt, Human
ccugcugggcucuccaccucagc

SEQ ID NO: 2229950 - RNA, 15 nt, Human
ccugcuggguaaacu

SEQ ID NO: 2229951 - RNA, 22 nt, Human
ccuggagcguuucuagcaagug

SEQ ID NO: 2229952 - RNA, 24 nt, Human
ccugcugggcucuccaccucagcc

SEQ ID NO: 2229953 - RNA, 22 nt, Human
ccugcugggcucuccaccucag

SEQ ID NO: 2229954 - RNA, 21 nt, Human
ccugcugggcucuccaccuca

SEQ ID NO: 2229955 - RNA, 22 nt, Human
ccuggagccccugggugggugg

SEQ ID NO: 2229956 - RNA, 14 nt, Human
ccugcugggugugg

SEQ ID NO: 2229957 - RNA, 20 nt, Human
ccugcuggguguggcgcagc

SEQ ID NO: 2229958 - RNA, 14 nt, Human
ccugcccaggcccc

SEQ ID NO: 2229959 - RNA, 15 nt, Human
ccugcccaggccccu

SEQ ID NO: 2229960 - RNA, 16 nt, Human
ccugcccaggccccug

SEQ ID NO: 2229961 - RNA, 22 nt, Human
ccuggaucuaccagcauaaaua

SEQ ID NO: 2229962 - RNA, 16 nt, Human
ccuggaucuaccagca

SEQ ID NO: 2229963 - RNA, 13 nt, Human
ccuggaugcagcc

SEQ ID NO: 2229964 - RNA, 21 nt, Human
ccuggauccaucaggccacuu

SEQ ID NO: 2229965 - RNA, 14 nt, Human
ccuggagugcaguu

SEQ ID NO: 2229966 - RNA, 19 nt, Human
ccuggaguguggcugagga

SEQ ID NO: 2229967 - RNA, 20 nt, Human
ccuggaguguggcugaggag

SEQ ID NO: 2229968 - RNA, 21 nt, Human
ccuggaguguggcugaggagg

SEQ ID NO: 2229969 - RNA, 18 nt, Human
ccuggauauuauucuugu

SEQ ID NO: 2229970 - RNA, 22 nt, Human
ccuggauauuauucuuguaguu

SEQ ID NO: 2229971 - RNA, 19 nt, Human
ccuggaucuccccacucua

SEQ ID NO: 2229972 - RNA, 21 nt, Human
ccuggcacacaucaggaguuc

SEQ ID NO: 2229973 - RNA, 19 nt, Human
ccuggaugcagccucacag

SEQ ID NO: 2229974 - RNA, 14 nt, Human
ccuggaugcagccu

SEQ ID NO: 2229975 - RNA, 17 nt, Human
ccuggaugcagccucac

SEQ ID NO: 2229976 - RNA, 15 nt, Human
ccuggaguucugguu

SEQ ID NO: 2229977 - RNA, 23 nt, Human
ccuggagguggcugagccccugu

SEQ ID NO: 2229978 - RNA, 22 nt, Human
ccuggagguggcugagccccug

SEQ ID NO: 2229979 - RNA, 15 nt, Human
ccuggaguauaauau

SEQ ID NO: 2229980 - RNA, 22 nt, Human
ccuggaguguaugacugcacau

SEQ ID NO: 2229981 - RNA, 20 nt, Human
ccuggaggugggguugggau

SEQ ID NO: 2229982 - RNA, 18 nt, Human
ccuggagucaugccaagc

SEQ ID NO: 2229983 - RNA, 16 nt, Human
ccuggaguucugguuc

SEQ ID NO: 2229984 - RNA, 17 nt, Human
ccuggaguucugguucc

SEQ ID NO: 2229985 - RNA, 21 nt, Human
ccuggagggaaugaaccugga

SEQ ID NO: 2229986 - RNA, 18 nt, Human
ccuggaggauugcaggug

SEQ ID NO: 2229987 - RNA, 12 nt, Human
ccuggagggcua

SEQ ID NO: 2229988 - RNA, 19 nt, Human
ccuggagggcuagaaccua

SEQ ID NO: 2229989 - RNA, 20 nt, Human
ccuggagggcuagaaccuag

SEQ ID NO: 2229990 - RNA, 21 nt, Human
ccuggagggcuagaaccuaga

SEQ ID NO: 2229991 - RNA, 21 nt, Human
ccuggagggcuagaaccugga

SEQ ID NO: 2229992 - RNA, 22 nt, Human
ccuggagggcuagaaccuggag

SEQ ID NO: 2229993 - RNA, 23 nt, Human
ccuggagggcuagaaccuggaga

SEQ ID NO: 2229994 - RNA, 18 nt, Human
ccuggagggcuagaacug

SEQ ID NO: 2229995 - RNA, 21 nt, Human
ccuggagguggcugagccccu

SEQ ID NO: 2229996 - RNA, 14 nt, Human
ccuggagguggcug

SEQ ID NO: 2229997 - RNA, 22 nt, Human
ccuggaggugccagcaaagccc

SEQ ID NO: 2229998 - RNA, 23 nt, Human
ccuggaggugccagcaaagcccc

SEQ ID NO: 2229999 - RNA, 16 nt, Human
ccuggaggugccagca

SEQ ID NO: 2230000 - RNA, 18 nt, Human
ccuggaggugccagcaaa

SEQ ID NO: 2230001 - RNA, 19 nt, Human
ccuggaggugccagcaaag

SEQ ID NO: 2230002 - RNA, 21 nt, Human
ccuggaggugccagcaaagcc

SEQ ID NO: 2230003 - RNA, 22 nt, Human
ccuggaggggcuagaaccuaga

SEQ ID NO: 2230004 - RNA, 20 nt, Human
ccuggaggggcuagaaccua

SEQ ID NO: 2230005 - RNA, 21 nt, Human
ccuggaggggcuagaaccuag

SEQ ID NO: 2230006 - RNA, 13 nt, Human
ccuggaggugcca

SEQ ID NO: 2230007 - RNA, 14 nt, Human
ccuggaggugccag

SEQ ID NO: 2230008 - RNA, 18 nt, Human
ccuggcacccggccccug

SEQ ID NO: 2230009 - RNA, 20 nt, Human
ccuggcacagugucugggcu

SEQ ID NO: 2230010 - RNA, 21 nt, Human
ccuggcacagugucugggcug

SEQ ID NO: 2230011 - RNA, 22 nt, Human
ccuggcacagugucugggcuga

SEQ ID NO: 2230012 - RNA, 23 nt, Human
ccuggcacagugucugggcugac

SEQ ID NO: 2230013 - RNA, 16 nt, Human
ccuggcacagggcagu

SEQ ID NO: 2230014 - RNA, 17 nt, Human
ccuggcacagggcagug

SEQ ID NO: 2230015 - RNA, 18 nt, Human
ccuggcacagggcagugg

SEQ ID NO: 2230016 - RNA, 12 nt, Human
ccuggcacagug

SEQ ID NO: 2230017 - RNA, 13 nt, Human
ccuggcacagugu

SEQ ID NO: 2230018 - RNA, 15 nt, Human
ccuggcacagugucu

SEQ ID NO: 2230019 - RNA, 19 nt, Human
ccuggcacagugucugggc

SEQ ID NO: 2230020 - RNA, 15 nt, Human
ccuggcccugaggug

SEQ ID NO: 2230021 - RNA, 16 nt, Human
ccuggcccugaggugu

SEQ ID NO: 2230022 - RNA, 23 nt, Human
ccuggcccucaaggccucccaca

SEQ ID NO: 2230023 - RNA, 12 nt, Human
ccuggcccucug

SEQ ID NO: 2230024 - RNA, 13 nt, Human
ccuggcccucugu

SEQ ID NO: 2230025 - RNA, 15 nt, Human
ccuggcccucugugu

SEQ ID NO: 2230026 - RNA, 12 nt, Human
ccuggccucugc

SEQ ID NO: 2230027 - RNA, 19 nt, Human
ccuggccgaguccaagcug

SEQ ID NO: 2230028 - RNA, 18 nt, Human
ccuggccgaguccaagcu

SEQ ID NO: 2230029 - RNA, 12 nt, Human
ccuggccgcccc

SEQ ID NO: 2230030 - RNA, 14 nt, Human
ccuggccgcccccu

SEQ ID NO: 2230031 - RNA, 16 nt, Human
ccuggccucugcacuc

SEQ ID NO: 2230032 - RNA, 15 nt, Human
ccuggccgcccccug

SEQ ID NO: 2230033 - RNA, 20 nt, Human
ccuggccgcccccugccccc

SEQ ID NO: 2230034 - RNA, 13 nt, Human
ccuggccugagcu

SEQ ID NO: 2230035 - RNA, 14 nt, Human
ccuggccucugcac

SEQ ID NO: 2230036 - RNA, 15 nt, Human
ccuggccucugcacu

SEQ ID NO: 2230037 - RNA, 13 nt, Human
ccuggcccucaag

SEQ ID NO: 2230038 - RNA, 22 nt, Human
ccuggcccucaaggccucccac

SEQ ID NO: 2230039 - RNA, 12 nt, Human
ccucucugcacc

SEQ ID NO: 2230040 - RNA, 20 nt, Human
ccucucugcaggucccuaau

SEQ ID NO: 2230041 - RNA, 15 nt, Human
ccucucugcaggucc

SEQ ID NO: 2230042 - RNA, 22 nt, Human
ccucucucuucugcuccacccu

SEQ ID NO: 2230043 - RNA, 21 nt, Human
ccucucucuucugcuccaccc

SEQ ID NO: 2230044 - RNA, 13 nt, Human
ccucucugcaggu

SEQ ID NO: 2230045 - RNA, 20 nt, Human
ccucucucuucugcuccacc

SEQ ID NO: 2230046 - RNA, 19 nt, Human
ccucucucuucugcuccac

SEQ ID NO: 2230047 - RNA, 18 nt, Human
ccucucucuucugcucca

SEQ ID NO: 2230048 - RNA, 16 nt, Human
ccucucucuucugcuc

SEQ ID NO: 2230049 - RNA, 12 nt, Human
ccucucucuucu

SEQ ID NO: 2230050 - RNA, 15 nt, Human
ccucucucugacucu

SEQ ID NO: 2230051 - RNA, 17 nt, Human
ccucucucugacucuca

SEQ ID NO: 2230052 - RNA, 11 nt, Human
ccucucucuga

SEQ ID NO: 2230053 - RNA, 12 nt, Human
ccucucucugac

SEQ ID NO: 2230054 - RNA, 13 nt, Human
ccucucucugacu

SEQ ID NO: 2230055 - RNA, 14 nt, Human
ccucucucugacuc

SEQ ID NO: 2230056 - RNA, 14 nt, Human
ccucucucaggcca

SEQ ID NO: 2230057 - RNA, 12 nt, Human
ccucucucccag

SEQ ID NO: 2230058 - RNA, 14 nt, Human
ccucucucccaguc

SEQ ID NO: 2230059 - RNA, 15 nt, Human
ccucucucccagucu

SEQ ID NO: 2230060 - RNA, 14 nt, Human
ccucucuccuuugc

SEQ ID NO: 2230061 - RNA, 12 nt, Human
ccucucucuccg

SEQ ID NO: 2230062 - RNA, 13 nt, Human
ccucucucacucc

SEQ ID NO: 2230063 - RNA, 14 nt, Human
ccucucucacuccu

SEQ ID NO: 2230064 - RNA, 15 nt, Human
ccucucucacuccuu

SEQ ID NO: 2230065 - RNA, 17 nt, Human
ccucucucacuccuuga

SEQ ID NO: 2230066 - RNA, 12 nt, Human
ccucucucaggc

SEQ ID NO: 2230067 - RNA, 14 nt, Human
ccucugcugccaug

SEQ ID NO: 2230068 - RNA, 22 nt, Human
ccucugcucugaggcuuccaga

SEQ ID NO: 2230069 - RNA, 18 nt, Human
ccucugcugauccuccca

SEQ ID NO: 2230070 - RNA, 15 nt, Human
ccucugcugauccuc

SEQ ID NO: 2230071 - RNA, 22 nt, Human
ccucugcuccuggagccuuuga

SEQ ID NO: 2230072 - RNA, 14 nt, Human
ccucugcucugagg

SEQ ID NO: 2230073 - RNA, 20 nt, Human
ccucugcucugaggcuucca

SEQ ID NO: 2230074 - RNA, 21 nt, Human
ccucugcucugaggcuuccag

SEQ ID NO: 2230075 - RNA, 13 nt, Human
ccucugcugcugg

SEQ ID NO: 2230076 - RNA, 14 nt, Human
ccucugcugcuggc

SEQ ID NO: 2230077 - RNA, 15 nt, Human
ccucugcugcuggcu

SEQ ID NO: 2230078 - RNA, 16 nt, Human
ccucugcugcuggcug

SEQ ID NO: 2230079 - RNA, 17 nt, Human
ccucugcugcuggcugg

SEQ ID NO: 2230080 - RNA, 18 nt, Human
ccucugcugcuggcuggu

SEQ ID NO: 2230081 - RNA, 18 nt, Human
ccucugccugucccucuc

SEQ ID NO: 2230082 - RNA, 13 nt, Human
ccucugcucccca

SEQ ID NO: 2230083 - RNA, 14 nt, Human
ccucugcuccccag

SEQ ID NO: 2230084 - RNA, 17 nt, Human
ccucugccugucccucu

SEQ ID NO: 2230085 - RNA, 13 nt, Human
ccucugcuccugg

SEQ ID NO: 2230086 - RNA, 18 nt, Human
ccucugcuccuggagccu

SEQ ID NO: 2230087 - RNA, 16 nt, Human
ccucugccugucccuc

SEQ ID NO: 2230088 - RNA, 15 nt, Human
ccucugccugucccu

SEQ ID NO: 2230089 - RNA, 14 nt, Human
ccucugccuguccc

SEQ ID NO: 2230090 - RNA, 21 nt, Human
ccucugccugccccgccccca

SEQ ID NO: 2230091 - RNA, 12 nt, Human
ccucugccuguc

SEQ ID NO: 2230092 - RNA, 17 nt, Human
ccucugccugcauucug

SEQ ID NO: 2230093 - RNA, 12 nt, Human
ccucugccugcc

SEQ ID NO: 2230094 - RNA, 13 nt, Human
ccucugccugccc

SEQ ID NO: 2230095 - RNA, 16 nt, Human
ccucugccugccccgc

SEQ ID NO: 2230096 - RNA, 16 nt, Human
ccucucugcaucugac

SEQ ID NO: 2230097 - RNA, 11 nt, Human
ccucugccugc

SEQ ID NO: 2230098 - RNA, 22 nt, Human
ccucugccugaagucacacagu

SEQ ID NO: 2230099 - RNA, 12 nt, Human
ccucucugcccu

SEQ ID NO: 2230100 - RNA, 23 nt, Human
ccucucugcaggucccuaauaaa

SEQ ID NO: 2230101 - RNA, 21 nt, Human
ccucucugcaggucccuaaua

SEQ ID NO: 2230102 - RNA, 22 nt, Human
ccucucugcaggucccuaauaa

SEQ ID NO: 2230103 - RNA, 15 nt, Human
ccucugcugccaugg

SEQ ID NO: 2230104 - RNA, 14 nt, Human
ccucugcugcuguc

SEQ ID NO: 2230105 - RNA, 19 nt, Human
ccucugcugcugucccucc

SEQ ID NO: 2230106 - RNA, 20 nt, Human
ccucugcugcugucccuccc

SEQ ID NO: 2230107 - RNA, 21 nt, Human
ccucugcuggcacauuucccc

SEQ ID NO: 2230108 - RNA, 15 nt, Human
ccucugcuucucacg

SEQ ID NO: 2230109 - RNA, 23 nt, Human
ccugacuggugcuauaggcugga

SEQ ID NO: 2230110 - RNA, 19 nt, Human
ccugacuucaggggcugcc

SEQ ID NO: 2230111 - RNA, 20 nt, Human
ccugacuucaggggcugccc

SEQ ID NO: 2230112 - RNA, 19 nt, Human
ccugacuuggggagaugga

SEQ ID NO: 2230113 - RNA, 21 nt, Human
ccugacuucaggggcugcccg

SEQ ID NO: 2230114 - RNA, 22 nt, Human
ccugacuucaggggcugcccgc

SEQ ID NO: 2230115 - RNA, 23 nt, Human
ccugacuuggggagauggaguuc

SEQ ID NO: 2230116 - RNA, 23 nt, Human
ccugacuucaggggcugcccgcu

SEQ ID NO: 2230117 - RNA, 13 nt, Human
ccugagaagagag

SEQ ID NO: 2230118 - RNA, 21 nt, Human
ccugacuggugcuauaggcug

SEQ ID NO: 2230119 - RNA, 15 nt, Human
ccugacucugccccc

SEQ ID NO: 2230120 - RNA, 16 nt, Human
ccugacucugcccccu

SEQ ID NO: 2230121 - RNA, 17 nt, Human
ccugacucugcccccug

SEQ ID NO: 2230122 - RNA, 22 nt, Human
ccugacucugcccccugcuggc

SEQ ID NO: 2230123 - RNA, 18 nt, Human
ccugacucucugugaccu

SEQ ID NO: 2230124 - RNA, 21 nt, Human
ccugacucgucugacugugug

SEQ ID NO: 2230125 - RNA, 13 nt, Human
ccugacucugaaa

SEQ ID NO: 2230126 - RNA, 18 nt, Human
ccugacucugaaaucuga

SEQ ID NO: 2230127 - RNA, 12 nt, Human
ccugacucugcc

SEQ ID NO: 2230128 - RNA, 13 nt, Human
ccugacucugccc

SEQ ID NO: 2230129 - RNA, 14 nt, Human
ccugacucugcccc

SEQ ID NO: 2230130 - RNA, 17 nt, Human
ccugacucucugugacc

SEQ ID NO: 2230131 - RNA, 16 nt, Human
ccugacucucugugac

SEQ ID NO: 2230132 - RNA, 15 nt, Human
ccugacucucuguga

SEQ ID NO: 2230133 - RNA, 13 nt, Human
ccugacucucugu

SEQ ID NO: 2230134 - RNA, 13 nt, Human
ccugaccugaggc

SEQ ID NO: 2230135 - RNA, 14 nt, Human
ccugaccugaggcu

SEQ ID NO: 2230136 - RNA, 14 nt, Human
ccugaccucccagc

SEQ ID NO: 2230137 - RNA, 15 nt, Human
ccugaccucccagcc

SEQ ID NO: 2230138 - RNA, 17 nt, Human
ccugaccucccagcccu

SEQ ID NO: 2230139 - RNA, 18 nt, Human
ccugaccucccagcccua

SEQ ID NO: 2230140 - RNA, 14 nt, Human
ccugaccugucuca

SEQ ID NO: 2230141 - RNA, 15 nt, Human
ccugaccugaggcuc

SEQ ID NO: 2230142 - RNA, 14 nt, Human
ccugacucucagca

SEQ ID NO: 2230143 - RNA, 12 nt, Human
ccucuuguaaau

SEQ ID NO: 2230144 - RNA, 13 nt, Human
ccucuuguaaaua

SEQ ID NO: 2230145 - RNA, 14 nt, Human
ccucuuguaaauaa

SEQ ID NO: 2230146 - RNA, 17 nt, Human
ccucuuguaaauaaagc

SEQ ID NO: 2230147 - RNA, 18 nt, Human
ccucuuguaaauaaagcc

SEQ ID NO: 2230148 - RNA, 20 nt, Human
ccucuuguaaauaaagcccu

SEQ ID NO: 2230149 - RNA, 13 nt, Human
ccucuuggguuca

SEQ ID NO: 2230150 - RNA, 21 nt, Human
ccucuuggucuucccaggcug

SEQ ID NO: 2230151 - RNA, 19 nt, Human
ccucuugagcaguggcugg

SEQ ID NO: 2230152 - RNA, 24 nt, Human
ccucuugagcaguggcugguccag

SEQ ID NO: 2230153 - RNA, 17 nt, Human
ccugacccuguauauag

SEQ ID NO: 2230154 - RNA, 12 nt, Human
ccucuuuaagag

SEQ ID NO: 2230155 - RNA, 12 nt, Human
ccucuuuagagu

SEQ ID NO: 2230156 - RNA, 19 nt, Human
ccucuuuagaguuagacug

SEQ ID NO: 2230157 - RNA, 17 nt, Human
ccucuuuagaguuagac

SEQ ID NO: 2230158 - RNA, 19 nt, Human
ccugacccuguauauagcc

SEQ ID NO: 2230159 - RNA, 16 nt, Human
ccugaccgugggcggg

SEQ ID NO: 2230160 - RNA, 13 nt, Human
ccugaccucccag

SEQ ID NO: 2230161 - RNA, 12 nt, Human
ccugaccuccca

SEQ ID NO: 2230162 - RNA, 16 nt, Human
ccugaccucccucuaa

SEQ ID NO: 2230163 - RNA, 14 nt, Human
ccucuugagcagug

SEQ ID NO: 2230164 - RNA, 15 nt, Human
ccucuugagcagugg

SEQ ID NO: 2230165 - RNA, 16 nt, Human
ccucuugagcaguggc

SEQ ID NO: 2230166 - RNA, 17 nt, Human
ccucuugagcaguggcu

SEQ ID NO: 2230167 - RNA, 19 nt, Human
ccucuugagccuugaacuu

SEQ ID NO: 2230168 - RNA, 13 nt, Human
ccucuugagccuu

SEQ ID NO: 2230169 - RNA, 20 nt, Human
ccugaguagcuggauuacag

SEQ ID NO: 2230170 - RNA, 19 nt, Human
ccugcacuugcagacucua

SEQ ID NO: 2230171 - RNA, 15 nt, Human
ccugaguagcuggau

SEQ ID NO: 2230172 - RNA, 19 nt, Human
ccugaguagcuggauuaca

SEQ ID NO: 2230173 - RNA, 22 nt, Human
ccugcacuugcagacucuacag

SEQ ID NO: 2230174 - RNA, 12 nt, Human
ccugcagccugg

SEQ ID NO: 2230175 - RNA, 15 nt, Human
ccugcagacucacug

SEQ ID NO: 2230176 - RNA, 16 nt, Human
ccugcagaauuugggu

SEQ ID NO: 2230177 - RNA, 16 nt, Human
ccugcagccuggaggc

SEQ ID NO: 2230178 - RNA, 15 nt, Human
ccugcagccuggagg

SEQ ID NO: 2230179 - RNA, 13 nt, Human
ccugcagccugga

SEQ ID NO: 2230180 - RNA, 22 nt, Human
ccugagaagugucuaaaaacac

SEQ ID NO: 2230181 - RNA, 15 nt, Human
ccugagacaaaugga

SEQ ID NO: 2230182 - RNA, 12 nt, Human
ccugagaagaga

SEQ ID NO: 2230183 - RNA, 22 nt, Human
ccugagaauaagaaaguuucac

SEQ ID NO: 2230184 - RNA, 19 nt, Human
ccugagacaaauggaggcc

SEQ ID NO: 2230185 - RNA, 20 nt, Human
ccugagacaaauggaggccu

SEQ ID NO: 2230186 - RNA, 21 nt, Human
ccugagacaaauggaggccug

SEQ ID NO: 2230187 - RNA, 12 nt, Human
ccugagaccaca

SEQ ID NO: 2230188 - RNA, 18 nt, Human
ccugagaccacagagaga

SEQ ID NO: 2230189 - RNA, 22 nt, Human
ccugagaccaguugggagcacu

SEQ ID NO: 2230190 - RNA, 21 nt, Human
ccugagaccaguugggagcac

SEQ ID NO: 2230191 - RNA, 15 nt, Human
ccugagaccccuggc

SEQ ID NO: 2230192 - RNA, 16 nt, Human
ccugagaccccuggcc

SEQ ID NO: 2230193 - RNA, 17 nt, Human
ccugagaccccuggccu

SEQ ID NO: 2230194 - RNA, 20 nt, Human
ccugagaccccuggccuccg

SEQ ID NO: 2230195 - RNA, 18 nt, Human
ccugagaccccuggccuc

SEQ ID NO: 2230196 - RNA, 19 nt, Human
ccugagaccccuggccucc

SEQ ID NO: 2230197 - RNA, 20 nt, Human
ccugagagaaacugagguca

SEQ ID NO: 2230198 - RNA, 22 nt, Human
ccugaggugugggggcugcagc

SEQ ID NO: 2230199 - RNA, 23 nt, Human
ccugaggugugggggcugcagca

SEQ ID NO: 2230200 - RNA, 17 nt, Human
ccugagaggcaggcaua

SEQ ID NO: 2230201 - RNA, 18 nt, Human
ccugagaggcaggcauag

SEQ ID NO: 2230202 - RNA, 12 nt, Human
ccugagaggcag

SEQ ID NO: 2230203 - RNA, 13 nt, Human
ccugagaggcagg

SEQ ID NO: 2230204 - RNA, 14 nt, Human
ccugagaggcaggc

SEQ ID NO: 2230205 - RNA, 15 nt, Human
ccugagaggcaggca

SEQ ID NO: 2230206 - RNA, 22 nt, Human
ccugaguaaaaaagcugugugc

SEQ ID NO: 2230207 - RNA, 20 nt, Human
ccugaguaaucgcuuaaaga

SEQ ID NO: 2230208 - RNA, 23 nt, Human
ccugaguaaucgcuuaaagaugu

SEQ ID NO: 2230209 - RNA, 21 nt, Human
ccugaguagaaaggccuuuaa

SEQ ID NO: 2230210 - RNA, 13 nt, Human
ccugaguagcugg

SEQ ID NO: 2230211 - RNA, 14 nt, Human
ccugaguagaaagg

SEQ ID NO: 2230212 - RNA, 20 nt, Human
ccugaguagaaaggccuuua

SEQ ID NO: 2230213 - RNA, 18 nt, Human
ccugcaggaccugccugu

SEQ ID NO: 2230214 - RNA, 17 nt, Human
ccugcaggaccugccug

SEQ ID NO: 2230215 - RNA, 16 nt, Human
ccugcaggaccugccu

SEQ ID NO: 2230216 - RNA, 15 nt, Human
ccugcaggaccugcc

SEQ ID NO: 2230217 - RNA, 16 nt, Human
cagggaggggaagagg

SEQ ID NO: 2230218 - RNA, 12 nt, Human
cagggaggggac

SEQ ID NO: 2230219 - RNA, 22 nt, Human
cagggaggagguggcagcccug

SEQ ID NO: 2230220 - RNA, 21 nt, Human
cagggaggggacuauuuauga

SEQ ID NO: 2230221 - RNA, 16 nt, Human
cagggcucagccuggu

SEQ ID NO: 2230222 - RNA, 15 nt, Human
cagggcucagccugg

SEQ ID NO: 2230223 - RNA, 19 nt, Human
cagggaggggacuauuuau

SEQ ID NO: 2230224 - RNA, 13 nt, Human
cagggaggggacu

SEQ ID NO: 2230225 - RNA, 16 nt, Human
cagggaggucauuuug

SEQ ID NO: 2230226 - RNA, 16 nt, Human
cagggagggcuucugc

SEQ ID NO: 2230227 - RNA, 18 nt, Human
cagggagggccugggccc

SEQ ID NO: 2230228 - RNA, 17 nt, Human
cagggagggccugggcc

SEQ ID NO: 2230229 - RNA, 19 nt, Human
cagggcucagccugguggg

SEQ ID NO: 2230230 - RNA, 16 nt, Human
cagggagguccgggag

SEQ ID NO: 2230231 - RNA, 19 nt, Human
cagggcuggacugaggccu

SEQ ID NO: 2230232 - RNA, 20 nt, Human
cagggcuggacugaggccug

SEQ ID NO: 2230233 - RNA, 21 nt, Human
cagggcuggacugaggccuga

SEQ ID NO: 2230234 - RNA, 20 nt, Human
cagggcucagcggggacagc

SEQ ID NO: 2230235 - RNA, 12 nt, Human
cagggcucagcg

SEQ ID NO: 2230236 - RNA, 15 nt, Human
cagggcucagcgggg

SEQ ID NO: 2230237 - RNA, 14 nt, Human
caggcugggcuuca

SEQ ID NO: 2230238 - RNA, 22 nt, Human
cagggaggacgcucucuggccu

SEQ ID NO: 2230239 - RNA, 21 nt, Human
cagggaggagguggcagcccu

SEQ ID NO: 2230240 - RNA, 20 nt, Human
cagggaggagguggcagccc

SEQ ID NO: 2230241 - RNA, 19 nt, Human
cagggaggagguggcagcc

SEQ ID NO: 2230242 - RNA, 18 nt, Human
cagggaggagguggcagc

SEQ ID NO: 2230243 - RNA, 12 nt, Human
cagggaggagag

SEQ ID NO: 2230244 - RNA, 22 nt, Human
cagggaggagaggggaagggcc

SEQ ID NO: 2230245 - RNA, 23 nt, Human
cagggaggagaggggaagggcca

SEQ ID NO: 2230246 - RNA, 14 nt, Human
caggccugggucug

SEQ ID NO: 2230247 - RNA, 20 nt, Human
caggcugggagagccuucca

SEQ ID NO: 2230248 - RNA, 19 nt, Human
caggcugggagagccuucc

SEQ ID NO: 2230249 - RNA, 16 nt, Human
caggcugggagagccu

SEQ ID NO: 2230250 - RNA, 18 nt, Human
caggcugggagagccuuc

SEQ ID NO: 2230251 - RNA, 17 nt, Human
caggcuggcgugcagug

SEQ ID NO: 2230252 - RNA, 23 nt, Human
caggccugggggcugggcagagg

SEQ ID NO: 2230253 - RNA, 18 nt, Human
caggcuggcgugcagugg

SEQ ID NO: 2230254 - RNA, 19 nt, Human
caggcuggcgugcaguggu

SEQ ID NO: 2230255 - RNA, 20 nt, Human
caggccugggggcugggcag

SEQ ID NO: 2230256 - RNA, 22 nt, Human
caggccugggggcugggcagag

SEQ ID NO: 2230257 - RNA, 17 nt, Human
caggccuggcaaguggg

SEQ ID NO: 2230258 - RNA, 20 nt, Human
caggccuggcaaguggguga

SEQ ID NO: 2230259 - RNA, 12 nt, Human
caggccugggcc

SEQ ID NO: 2230260 - RNA, 17 nt, Human
caggccugggccagagu

SEQ ID NO: 2230261 - RNA, 22 nt, Human
cagggcuggcccagcccugcug

SEQ ID NO: 2230262 - RNA, 22 nt, Human
cagggcuggacugaggccugag

SEQ ID NO: 2230263 - RNA, 23 nt, Human
cagggcuggacugaggccugagc

SEQ ID NO: 2230264 - RNA, 12 nt, Human
cagggcuggccc

SEQ ID NO: 2230265 - RNA, 13 nt, Human
cagggcuggccca

SEQ ID NO: 2230266 - RNA, 14 nt, Human
cagggcuggcccag

SEQ ID NO: 2230267 - RNA, 15 nt, Human
cagggcuggcccagc

SEQ ID NO: 2230268 - RNA, 16 nt, Human
cagggcuggcccagcc

SEQ ID NO: 2230269 - RNA, 17 nt, Human
cagggcuggcccagccc

SEQ ID NO: 2230270 - RNA, 18 nt, Human
cagggcuggcccagcccu

SEQ ID NO: 2230271 - RNA, 19 nt, Human
cagggcuggcccagcccug

SEQ ID NO: 2230272 - RNA, 20 nt, Human
cagggcuggcccagcccugc

SEQ ID NO: 2230273 - RNA, 21 nt, Human
cagggcuggcccagcccugcu

SEQ ID NO: 2230274 - RNA, 23 nt, Human
cagggcuggcccagcccugcugg

SEQ ID NO: 2230275 - RNA, 23 nt, Human
cagguuuuucaauuaaacggauu

SEQ ID NO: 2230276 - RNA, 21 nt, Human
cagguuuuucaauuaaacgga

SEQ ID NO: 2230277 - RNA, 22 nt, Human
cagguuuuucaauuaaacggau

SEQ ID NO: 2230278 - RNA, 23 nt, Human
cagguuuuuggucugacccacug

SEQ ID NO: 2230279 - RNA, 22 nt, Human
cagguugaggggcuccuggaaa

SEQ ID NO: 2230280 - RNA, 21 nt, Human
cagguugaggggcuccuggaa

SEQ ID NO: 2230281 - RNA, 20 nt, Human
cagguugaggggcuccugga

SEQ ID NO: 2230282 - RNA, 17 nt, Human
cagguugcugguugcug

SEQ ID NO: 2230283 - RNA, 18 nt, Human
cagguugcugguugcugu

SEQ ID NO: 2230284 - RNA, 18 nt, Human
cagguuuuucaauuaaac

SEQ ID NO: 2230285 - RNA, 19 nt, Human
cagguuuuucaauuaaacg

SEQ ID NO: 2230286 - RNA, 18 nt, Human
cagguucuucuuccugaa

SEQ ID NO: 2230287 - RNA, 20 nt, Human
caggugcugcuacccucccu

SEQ ID NO: 2230288 - RNA, 24 nt, Human
cagguucuccguuagcuccugugg

SEQ ID NO: 2230289 - RNA, 20 nt, Human
cagguucuucuuccugaagc

SEQ ID NO: 2230290 - RNA, 23 nt, Human
caggugcugacuucaucucccac

SEQ ID NO: 2230291 - RNA, 13 nt, Human
caggugcugcuac

SEQ ID NO: 2230292 - RNA, 21 nt, Human
caggugcugacuucaucuccc

SEQ ID NO: 2230293 - RNA, 20 nt, Human
caggugcugacuucaucucc

SEQ ID NO: 2230294 - RNA, 21 nt, Human
cagguucuccguuagcuccug

SEQ ID NO: 2230295 - RNA, 16 nt, Human
caggugcugcuacccu

SEQ ID NO: 2230296 - RNA, 19 nt, Human
caggugcugcuacccuccc

SEQ ID NO: 2230297 - RNA, 22 nt, Human
cagguucuccguuagcuccugu

SEQ ID NO: 2230298 - RNA, 23 nt, Human
cagguucuccguuagcuccugug

SEQ ID NO: 2230299 - RNA, 21 nt, Human
caggguugggcccagaucugg

SEQ ID NO: 2230300 - RNA, 19 nt, Human
caggguuucaccauguugc

SEQ ID NO: 2230301 - RNA, 17 nt, Human
cagggugggauggagga

SEQ ID NO: 2230302 - RNA, 17 nt, Human
caggguuucgagaagcu

SEQ ID NO: 2230303 - RNA, 19 nt, Human
caggguuucgagaagcugc

SEQ ID NO: 2230304 - RNA, 19 nt, Human
caggugcucaauaaaugau

SEQ ID NO: 2230305 - RNA, 20 nt, Human
caggguuucgagaagcugcu

SEQ ID NO: 2230306 - RNA, 20 nt, Human
caggguuuggcugugucuaa

SEQ ID NO: 2230307 - RNA, 21 nt, Human
caggguuuggcugugucuaaa

SEQ ID NO: 2230308 - RNA, 22 nt, Human
caggguuuggcugugucuaaac

SEQ ID NO: 2230309 - RNA, 13 nt, Human
caggugcugccau

SEQ ID NO: 2230310 - RNA, 14 nt, Human
caggugcugccauc

SEQ ID NO: 2230311 - RNA, 20 nt, Human
caggguugggcccagaucug

SEQ ID NO: 2230312 - RNA, 16 nt, Human
caggguugggcccaga

SEQ ID NO: 2230313 - RNA, 15 nt, Human
caggguugggcccag

SEQ ID NO: 2230314 - RNA, 14 nt, Human
caggguugggccca

SEQ ID NO: 2230315 - RNA, 13 nt, Human
caggguugggccc

SEQ ID NO: 2230316 - RNA, 17 nt, Human
caggguggacuuagaaa

SEQ ID NO: 2230317 - RNA, 18 nt, Human
cagggugggauggaggag

SEQ ID NO: 2230318 - RNA, 17 nt, Human
caggguuggccccugcc

SEQ ID NO: 2230319 - RNA, 21 nt, Human
caggguuggccccugcccggc

SEQ ID NO: 2230320 - RNA, 11 nt, Human
caguaaaauug

SEQ ID NO: 2230321 - RNA, 24 nt, Human
caguaaauaaauuguuugaccaug

SEQ ID NO: 2230322 - RNA, 18 nt, Human
caguaaaauugccauauu

SEQ ID NO: 2230323 - RNA, 19 nt, Human
caguaaauaaauuguuuga

SEQ ID NO: 2230324 - RNA, 15 nt, Human
caguaaaauugccau

SEQ ID NO: 2230325 - RNA, 16 nt, Human
caguaaaauugccaua

SEQ ID NO: 2230326 - RNA, 18 nt, Human
caguaaaugggggugcau

SEQ ID NO: 2230327 - RNA, 20 nt, Human
caguaaaucuuuuacaacug

SEQ ID NO: 2230328 - RNA, 12 nt, Human
caguaaaucuuu

SEQ ID NO: 2230329 - RNA, 21 nt, Human
caguauucuagguagugcccu

SEQ ID NO: 2230330 - RNA, 13 nt, Human
caguauucuuguc

SEQ ID NO: 2230331 - RNA, 15 nt, Human
caguauucuagguag

SEQ ID NO: 2230332 - RNA, 15 nt, Human
caguauugaagcauu

SEQ ID NO: 2230333 - RNA, 14 nt, Human
caguauugaagcau

SEQ ID NO: 2230334 - RNA, 12 nt, Human
caguauugaagc

SEQ ID NO: 2230335 - RNA, 16 nt, Human
caguauucuugucaaa

SEQ ID NO: 2230336 - RNA, 19 nt, Human
caguauucuugucaaaaaa

SEQ ID NO: 2230337 - RNA, 19 nt, Human
caguaaaugggggugcauu

SEQ ID NO: 2230338 - RNA, 15 nt, Human
caguauuugugggga

SEQ ID NO: 2230339 - RNA, 20 nt, Human
caguauugaagcauuuuaua

SEQ ID NO: 2230340 - RNA, 17 nt, Human
caguauugaagcauuuu

SEQ ID NO: 2230341 - RNA, 16 nt, Human
caguauugaagcauuu

SEQ ID NO: 2230342 - RNA, 20 nt, Human
caguauuguuuugguuugcu

SEQ ID NO: 2230343 - RNA, 16 nt, Human
caguauuuucccugcu

SEQ ID NO: 2230344 - RNA, 14 nt, Human
caguauuuuggaga

SEQ ID NO: 2230345 - RNA, 14 nt, Human
cagucaccccggcc

SEQ ID NO: 2230346 - RNA, 16 nt, Human
cagucaccccggccac

SEQ ID NO: 2230347 - RNA, 17 nt, Human
cagucaccccggccacc

SEQ ID NO: 2230348 - RNA, 21 nt, Human
cagggucucuaccauccccug

SEQ ID NO: 2230349 - RNA, 21 nt, Human
cagggucucuagugcugugaa

SEQ ID NO: 2230350 - RNA, 20 nt, Human
cagggucucuagugcuguga

SEQ ID NO: 2230351 - RNA, 19 nt, Human
cagggucucuagugcugug

SEQ ID NO: 2230352 - RNA, 22 nt, Human
cagggucuucccuaccucaggc

SEQ ID NO: 2230353 - RNA, 15 nt, Human
cagggucuuuucauc

SEQ ID NO: 2230354 - RNA, 21 nt, Human
cagggucuucccuaccucagg

SEQ ID NO: 2230355 - RNA, 22 nt, Human
cagggucucuagugcugugaaa

SEQ ID NO: 2230356 - RNA, 17 nt, Human
cagggucuuuucaucug

SEQ ID NO: 2230357 - RNA, 21 nt, Human
cagggucuuuucaucugggaa

SEQ ID NO: 2230358 - RNA, 22 nt, Human
cagggucuuuucaucugggaaa

SEQ ID NO: 2230359 - RNA, 23 nt, Human
cagggucuuuucaucugggaaag

SEQ ID NO: 2230360 - RNA, 14 nt, Human
cagggugagagcug

SEQ ID NO: 2230361 - RNA, 15 nt, Human
cagggugagagcugc

SEQ ID NO: 2230362 - RNA, 21 nt, Human
cagggugagagcugcucugga

SEQ ID NO: 2230363 - RNA, 22 nt, Human
cagggugagagcugcucuggaa

SEQ ID NO: 2230364 - RNA, 14 nt, Human
cagggugaggaugg

SEQ ID NO: 2230365 - RNA, 15 nt, Human
cagggugaugccagg

SEQ ID NO: 2230366 - RNA, 16 nt, Human
cagggugaugccaggu

SEQ ID NO: 2230367 - RNA, 20 nt, Human
cagggugcaguaucaugccc

SEQ ID NO: 2230368 - RNA, 18 nt, Human
cagggugaugccagguuc

SEQ ID NO: 2230369 - RNA, 13 nt, Human
cagggugcugugg

SEQ ID NO: 2230370 - RNA, 22 nt, Human
caggguggacuuagaaagcagg

SEQ ID NO: 2230371 - RNA, 15 nt, Human
caggguuggccccug

SEQ ID NO: 2230372 - RNA, 16 nt, Human
caggguuggccccugc

SEQ ID NO: 2230373 - RNA, 23 nt, Human
cagggucucacucugucgcccag

SEQ ID NO: 2230374 - RNA, 12 nt, Human
caggacaggacc

SEQ ID NO: 2230375 - RNA, 23 nt, Human
caggacaccacacccagccucag

SEQ ID NO: 2230376 - RNA, 13 nt, Human
caggacaggacca

SEQ ID NO: 2230377 - RNA, 12 nt, Human
caggacaggccc

SEQ ID NO: 2230378 - RNA, 13 nt, Human
caggacaggcccg

SEQ ID NO: 2230379 - RNA, 16 nt, Human
caggacagugcuucag

SEQ ID NO: 2230380 - RNA, 23 nt, Human
caggacagcccuucuuuccacag

SEQ ID NO: 2230381 - RNA, 24 nt, Human
caggacagcccuucuuuccacaga

SEQ ID NO: 2230382 - RNA, 21 nt, Human
caggacagugcuucagccuga

SEQ ID NO: 2230383 - RNA, 20 nt, Human
caggacagugcuucagccug

SEQ ID NO: 2230384 - RNA, 22 nt, Human
caggacagugcuucagccugag

SEQ ID NO: 2230385 - RNA, 18 nt, Human
caggacaugcgguagcca

SEQ ID NO: 2230386 - RNA, 14 nt, Human
caggaccagcucag

SEQ ID NO: 2230387 - RNA, 22 nt, Human
caggacaugcgguagccagcac

SEQ ID NO: 2230388 - RNA, 21 nt, Human
caggacaugcgguagccagca

SEQ ID NO: 2230389 - RNA, 20 nt, Human
caggacaugcgguagccagc

SEQ ID NO: 2230390 - RNA, 20 nt, Human
caggaccagcucaggacaga

SEQ ID NO: 2230391 - RNA, 12 nt, Human
caggaccagcug

SEQ ID NO: 2230392 - RNA, 13 nt, Human
caggaccagcugg

SEQ ID NO: 2230393 - RNA, 14 nt, Human
caggaccagcuggg

SEQ ID NO: 2230394 - RNA, 15 nt, Human
caggaccagcugggg

SEQ ID NO: 2230395 - RNA, 16 nt, Human
caggaccagcuggggc

SEQ ID NO: 2230396 - RNA, 19 nt, Human
caggaccagcucaggacag

SEQ ID NO: 2230397 - RNA, 17 nt, Human
caggaccagcucaggac

SEQ ID NO: 2230398 - RNA, 16 nt, Human
caggaccagcucagga

SEQ ID NO: 2230399 - RNA, 15 nt, Human
caggaccagcucagg

SEQ ID NO: 2230400 - RNA, 22 nt, Human
caggaccucagaguccaggccc

SEQ ID NO: 2230401 - RNA, 21 nt, Human
caggaccucagaguccaggcc

SEQ ID NO: 2230402 - RNA, 23 nt, Human
caggaggauugcuugagcccagg

SEQ ID NO: 2230403 - RNA, 15 nt, Human
caggaggcaggaccu

SEQ ID NO: 2230404 - RNA, 18 nt, Human
caggaggcaggaccuucg

SEQ ID NO: 2230405 - RNA, 20 nt, Human
caggaccucagaguccaggc

SEQ ID NO: 2230406 - RNA, 23 nt, Human
caggaccuaggauaucuucucca

SEQ ID NO: 2230407 - RNA, 22 nt, Human
caggaccuaggauaucuucucc

SEQ ID NO: 2230408 - RNA, 21 nt, Human
caggaccuaggauaucuucuc

SEQ ID NO: 2230409 - RNA, 13 nt, Human
caggaccucaggu

SEQ ID NO: 2230410 - RNA, 13 nt, Human
caggaccagggau

SEQ ID NO: 2230411 - RNA, 16 nt, Human
caggacccugaagggg

SEQ ID NO: 2230412 - RNA, 23 nt, Human
caggaccagcuggggcgugggga

SEQ ID NO: 2230413 - RNA, 13 nt, Human
caggaccaggacu

SEQ ID NO: 2230414 - RNA, 14 nt, Human
caggaccaggacua

SEQ ID NO: 2230415 - RNA, 18 nt, Human
caggaccaggcaauguga

SEQ ID NO: 2230416 - RNA, 18 nt, Human
caggacccugaaggggcc

SEQ ID NO: 2230417 - RNA, 17 nt, Human
caggacccugaaggggc

SEQ ID NO: 2230418 - RNA, 15 nt, Human
caggacacggggcag

SEQ ID NO: 2230419 - RNA, 13 nt, Human
caggacagaugcc

SEQ ID NO: 2230420 - RNA, 17 nt, Human
caggacagaugccacac

SEQ ID NO: 2230421 - RNA, 14 nt, Human
caggacagaugcca

SEQ ID NO: 2230422 - RNA, 15 nt, Human
caggccagcugccuc

SEQ ID NO: 2230423 - RNA, 16 nt, Human
caggccagccuccgag

SEQ ID NO: 2230424 - RNA, 19 nt, Human
caggccagccuccgagagg

SEQ ID NO: 2230425 - RNA, 21 nt, Human
caggccagccuccgagaggga

SEQ ID NO: 2230426 - RNA, 23 nt, Human
caggccagccuccgagagggaga

SEQ ID NO: 2230427 - RNA, 13 nt, Human
caggccaggcccu

SEQ ID NO: 2230428 - RNA, 14 nt, Human
caggccaggcccuc

SEQ ID NO: 2230429 - RNA, 15 nt, Human
caggccaggcccucu

SEQ ID NO: 2230430 - RNA, 16 nt, Human
caggccaggcccucug

SEQ ID NO: 2230431 - RNA, 16 nt, Human
caggccacggcagccu

SEQ ID NO: 2230432 - RNA, 11 nt, Human
caggccagccu

SEQ ID NO: 2230433 - RNA, 12 nt, Human
caggccagccuc

SEQ ID NO: 2230434 - RNA, 13 nt, Human
caggccagccucc

SEQ ID NO: 2230435 - RNA, 15 nt, Human
caggccagccuccga

SEQ ID NO: 2230436 - RNA, 21 nt, Human
caggccaccugcccccuucuc

SEQ ID NO: 2230437 - RNA, 19 nt, Human
caggccaccugcccccuuc

SEQ ID NO: 2230438 - RNA, 18 nt, Human
caggccaccugcccccuu

SEQ ID NO: 2230439 - RNA, 17 nt, Human
caggccaccugcccccu

SEQ ID NO: 2230440 - RNA, 23 nt, Human
caggccaccugcccccuucuccc

SEQ ID NO: 2230441 - RNA, 22 nt, Human
caggccaccugcccccuucucc

SEQ ID NO: 2230442 - RNA, 13 nt, Human
caggccagcugcu

SEQ ID NO: 2230443 - RNA, 15 nt, Human
caggccagcugcuug

SEQ ID NO: 2230444 - RNA, 23 nt, Human
caggcacugcugcccagccucca

SEQ ID NO: 2230445 - RNA, 11 nt, Human
caggccaccuc

SEQ ID NO: 2230446 - RNA, 16 nt, Human
caggccaccugccccc

SEQ ID NO: 2230447 - RNA, 15 nt, Human
caggccaccugcccc

SEQ ID NO: 2230448 - RNA, 13 nt, Human
caggccaccugcc

SEQ ID NO: 2230449 - RNA, 18 nt, Human
caggccaccuccagaaac

SEQ ID NO: 2230450 - RNA, 19 nt, Human
caggccaccuccccagcau

SEQ ID NO: 2230451 - RNA, 20 nt, Human
caggccaccuccccagcauu

SEQ ID NO: 2230452 - RNA, 16 nt, Human
caggccaccuccagaa

SEQ ID NO: 2230453 - RNA, 12 nt, Human
caggccaccucc

SEQ ID NO: 2230454 - RNA, 15 nt, Human
caggccaccucccca

SEQ ID NO: 2230455 - RNA, 16 nt, Human
caggccaccuccccag

SEQ ID NO: 2230456 - RNA, 21 nt, Human
caggcaaugcuggcuguuggc

SEQ ID NO: 2230457 - RNA, 16 nt, Human
caggcacugcugccca

SEQ ID NO: 2230458 - RNA, 17 nt, Human
caggcacugcugcccag

SEQ ID NO: 2230459 - RNA, 23 nt, Human
caggcacugagauaccagcgagg

SEQ ID NO: 2230460 - RNA, 19 nt, Human
caggcaaugcuggcuguug

SEQ ID NO: 2230461 - RNA, 20 nt, Human
caggcaaugcuggcuguugg

SEQ ID NO: 2230462 - RNA, 12 nt, Human
caggaggccagc

SEQ ID NO: 2230463 - RNA, 13 nt, Human
caggaggccagcc

SEQ ID NO: 2230464 - RNA, 22 nt, Human
cagcuguuagaguccaacgugg

SEQ ID NO: 2230465 - RNA, 16 nt, Human
cagcuguucagcuggu

SEQ ID NO: 2230466 - RNA, 15 nt, Human
cagcuguucagcugg

SEQ ID NO: 2230467 - RNA, 17 nt, Human
cagcuuaggggcugcug

SEQ ID NO: 2230468 - RNA, 17 nt, Human
cagcuuauucacaagac

SEQ ID NO: 2230469 - RNA, 16 nt, Human
cagcuuauucacaaga

SEQ ID NO: 2230470 - RNA, 17 nt, Human
caggaaaauccucuggc

SEQ ID NO: 2230471 - RNA, 16 nt, Human
caggaaaauccucugg

SEQ ID NO: 2230472 - RNA, 17 nt, Human
caggaaagggaaggccc

SEQ ID NO: 2230473 - RNA, 23 nt, Human
caggaaaggcuccaggagcagcc

SEQ ID NO: 2230474 - RNA, 21 nt, Human
caggaaaggcuccaggagcag

SEQ ID NO: 2230475 - RNA, 22 nt, Human
caggaaaggcuccaggagcagc

SEQ ID NO: 2230476 - RNA, 23 nt, Human
caggaaaauuguuugaacccagg

SEQ ID NO: 2230477 - RNA, 19 nt, Human
caggaaaagcugcugacag

SEQ ID NO: 2230478 - RNA, 20 nt, Human
caggaaaagcugcugacagu

SEQ ID NO: 2230479 - RNA, 23 nt, Human
caggaaauauauaugugugugua

SEQ ID NO: 2230480 - RNA, 22 nt, Human
caggaaaucaaauaugcaaagc

SEQ ID NO: 2230481 - RNA, 21 nt, Human
caggaaaucaaauaugcaaag

SEQ ID NO: 2230482 - RNA, 17 nt, Human
caggaaauauauaugug

SEQ ID NO: 2230483 - RNA, 16 nt, Human
caggaaauauauaugu

SEQ ID NO: 2230484 - RNA, 15 nt, Human
caggaaauauauaug

SEQ ID NO: 2230485 - RNA, 13 nt, Human
caggaaauauaua

SEQ ID NO: 2230486 - RNA, 21 nt, Human
caggaaagggaaggccccaca

SEQ ID NO: 2230487 - RNA, 13 nt, Human
caggaaauaaagu

SEQ ID NO: 2230488 - RNA, 19 nt, Human
caggaaaucaaauaugcaa

SEQ ID NO: 2230489 - RNA, 15 nt, Human
cagccagaguuccug

SEQ ID NO: 2230490 - RNA, 19 nt, Human
cagccagaguuccugcgga

SEQ ID NO: 2230491 - RNA, 20 nt, Human
cagccagaguuccugcggag

SEQ ID NO: 2230492 - RNA, 21 nt, Human
cagccagaguuccugcggagu

SEQ ID NO: 2230493 - RNA, 17 nt, Human
cagccagauccucuugg

SEQ ID NO: 2230494 - RNA, 22 nt, Human
cagccagauggacuccagccug

SEQ ID NO: 2230495 - RNA, 12 nt, Human
cagccagcaccu

SEQ ID NO: 2230496 - RNA, 13 nt, Human
cagccagcaccug

SEQ ID NO: 2230497 - RNA, 13 nt, Human
cagccagcaauga

SEQ ID NO: 2230498 - RNA, 20 nt, Human
cagccagcaaugauguccag

SEQ ID NO: 2230499 - RNA, 22 nt, Human
cagccagcaaugauguccagaa

SEQ ID NO: 2230500 - RNA, 23 nt, Human
cagccagcaaugauguccagaag

SEQ ID NO: 2230501 - RNA, 14 nt, Human
cagccagcagccag

SEQ ID NO: 2230502 - RNA, 15 nt, Human
cagccagcagccagc

SEQ ID NO: 2230503 - RNA, 23 nt, Human
cagcacuggcucucuccaggauc

SEQ ID NO: 2230504 - RNA, 11 nt, Human
cagccagcagc

SEQ ID NO: 2230505 - RNA, 12 nt, Human
cagccagcagcc

SEQ ID NO: 2230506 - RNA, 14 nt, Human
cagccagcaccugg

SEQ ID NO: 2230507 - RNA, 16 nt, Human
cagccagcaccuggca

SEQ ID NO: 2230508 - RNA, 20 nt, Human
cagauuggcucacacugaga

SEQ ID NO: 2230509 - RNA, 18 nt, Human
cagauuggcucacacuga

SEQ ID NO: 2230510 - RNA, 13 nt, Human
cagauuucacucu

SEQ ID NO: 2230511 - RNA, 14 nt, Human
cagauuugagcuca

SEQ ID NO: 2230512 - RNA, 13 nt, Human
cagauuugagcuc

SEQ ID NO: 2230513 - RNA, 20 nt, Human
cagauuugcuaauuuauccu

SEQ ID NO: 2230514 - RNA, 14 nt, Human
cagauuugggcugg

SEQ ID NO: 2230515 - RNA, 15 nt, Human
cagauuugggcugga

SEQ ID NO: 2230516 - RNA, 18 nt, Human
cagauuugggcuggaaca

SEQ ID NO: 2230517 - RNA, 16 nt, Human
cagauuugagcucagc

SEQ ID NO: 2230518 - RNA, 15 nt, Human
cagauuucacucucc

SEQ ID NO: 2230519 - RNA, 16 nt, Human
cagauuucacucuccu

SEQ ID NO: 2230520 - RNA, 18 nt, Human
cagauuucacucuccuug

SEQ ID NO: 2230521 - RNA, 18 nt, Human
cagauuggagaaacccuu

SEQ ID NO: 2230522 - RNA, 17 nt, Human
cagauuggcucacacug

SEQ ID NO: 2230523 - RNA, 21 nt, Human
cagauugcaugugacucugaa

SEQ ID NO: 2230524 - RNA, 23 nt, Human
cagauugcaugugacucugaagc

SEQ ID NO: 2230525 - RNA, 20 nt, Human
cagauugcaugugacucuga

SEQ ID NO: 2230526 - RNA, 18 nt, Human
cagauugcaugugacucu

SEQ ID NO: 2230527 - RNA, 21 nt, Human
cagauugcaacaggcugggcu

SEQ ID NO: 2230528 - RNA, 16 nt, Human
cagauugcaugugacu

SEQ ID NO: 2230529 - RNA, 15 nt, Human
cagauugcaugugac

SEQ ID NO: 2230530 - RNA, 13 nt, Human
cagauugcaugug

SEQ ID NO: 2230531 - RNA, 12 nt, Human
cagauugcaugu

SEQ ID NO: 2230532 - RNA, 21 nt, Human
cagcaccacccuagucccuuc

SEQ ID NO: 2230533 - RNA, 17 nt, Human
cagcacucacacaggac

SEQ ID NO: 2230534 - RNA, 22 nt, Human
cagcacucacacaggacccccu

SEQ ID NO: 2230535 - RNA, 11 nt, Human
cagcacugagg

SEQ ID NO: 2230536 - RNA, 12 nt, Human
cagcacugagga

SEQ ID NO: 2230537 - RNA, 13 nt, Human
cagcacugaggaa

SEQ ID NO: 2230538 - RNA, 15 nt, Human
cagcacugaggaaga

SEQ ID NO: 2230539 - RNA, 17 nt, Human
cagcacugaggaagaac

SEQ ID NO: 2230540 - RNA, 14 nt, Human
cagcacugauuuca

SEQ ID NO: 2230541 - RNA, 13 nt, Human
cagcacugcccaa

SEQ ID NO: 2230542 - RNA, 19 nt, Human
cagcacugcuugaggaaaa

SEQ ID NO: 2230543 - RNA, 12 nt, Human
cagcacuggcuc

SEQ ID NO: 2230544 - RNA, 18 nt, Human
cagcacugcuugaggaaa

SEQ ID NO: 2230545 - RNA, 16 nt, Human
cagcacugcuugagga

SEQ ID NO: 2230546 - RNA, 13 nt, Human
cagcaccacccua

SEQ ID NO: 2230547 - RNA, 22 nt, Human
cagcacagcuugaccugaggcu

SEQ ID NO: 2230548 - RNA, 18 nt, Human
cagcacagggauccgacu

SEQ ID NO: 2230549 - RNA, 13 nt, Human
cagcacagcuuga

SEQ ID NO: 2230550 - RNA, 15 nt, Human
cagcacagcuugacc

SEQ ID NO: 2230551 - RNA, 16 nt, Human
cagcacagcuugaccu

SEQ ID NO: 2230552 - RNA, 17 nt, Human
cagcacagcuugaccug

SEQ ID NO: 2230553 - RNA, 20 nt, Human
cagcacagcuugaccugagg

SEQ ID NO: 2230554 - RNA, 21 nt, Human
cagcacagcuugaccugaggc

SEQ ID NO: 2230555 - RNA, 19 nt, Human
cagcauagcaagacacauc

SEQ ID NO: 2230556 - RNA, 21 nt, Human
cagcacuggcucucuccagga

SEQ ID NO: 2230557 - RNA, 20 nt, Human
cagcauaugggggccuggau

SEQ ID NO: 2230558 - RNA, 18 nt, Human
cagcauauucaggaagcu

SEQ ID NO: 2230559 - RNA, 16 nt, Human
cagcauauucaggaag

SEQ ID NO: 2230560 - RNA, 17 nt, Human
cagcauauucaggaagc

SEQ ID NO: 2230561 - RNA, 14 nt, Human
cagcacuggcucuc

SEQ ID NO: 2230562 - RNA, 16 nt, Human
cagcacuggcucucuc

SEQ ID NO: 2230563 - RNA, 17 nt, Human
cagcacuggcucucucc

SEQ ID NO: 2230564 - RNA, 18 nt, Human
cagcacuggcucucucca

SEQ ID NO: 2230565 - RNA, 19 nt, Human
cagcacuggcucucuccag

SEQ ID NO: 2230566 - RNA, 20 nt, Human
cagcacuggcucucuccagg

SEQ ID NO: 2230567 - RNA, 23 nt, Human
cagcaguuccggauuggcuugug

SEQ ID NO: 2230568 - RNA, 21 nt, Human
cagcccccacagugcugucug

SEQ ID NO: 2230569 - RNA, 21 nt, Human
cagcccccacugccuuugacc

SEQ ID NO: 2230570 - RNA, 13 nt, Human
cagcccccacagu

SEQ ID NO: 2230571 - RNA, 17 nt, Human
cagcccccacagugcug

SEQ ID NO: 2230572 - RNA, 19 nt, Human
cagcccccacagugcuguc

SEQ ID NO: 2230573 - RNA, 20 nt, Human
cagcccccacagugcugucu

SEQ ID NO: 2230574 - RNA, 23 nt, Human
cagccccauucugccugcccagg

SEQ ID NO: 2230575 - RNA, 24 nt, Human
cagccccauucugccugcccaggc

SEQ ID NO: 2230576 - RNA, 19 nt, Human
cagccccauucugccugcc

SEQ ID NO: 2230577 - RNA, 20 nt, Human
cagccccauucugccugccc

SEQ ID NO: 2230578 - RNA, 22 nt, Human
cagccccauucugccugcccag

SEQ ID NO: 2230579 - RNA, 18 nt, Human
cagccccgcgccuccuuc

SEQ ID NO: 2230580 - RNA, 16 nt, Human
cagccccgcgccuccu

SEQ ID NO: 2230581 - RNA, 19 nt, Human
cagcccccuuugggcccag

SEQ ID NO: 2230582 - RNA, 20 nt, Human
cagcccccuuugggcccagg

SEQ ID NO: 2230583 - RNA, 21 nt, Human
cagcccccuuugggcccaggg

SEQ ID NO: 2230584 - RNA, 18 nt, Human
cagccccgccuccaggcc

SEQ ID NO: 2230585 - RNA, 15 nt, Human
cagcccccuuugggc

SEQ ID NO: 2230586 - RNA, 22 nt, Human
cagcccccuuugggcccaggga

SEQ ID NO: 2230587 - RNA, 19 nt, Human
cagccccgugggguuccuc

SEQ ID NO: 2230588 - RNA, 15 nt, Human
cagccccggcccugg

SEQ ID NO: 2230589 - RNA, 16 nt, Human
cagccccggcccuggg

SEQ ID NO: 2230590 - RNA, 17 nt, Human
cagccccggcccugggc

SEQ ID NO: 2230591 - RNA, 19 nt, Human
cagccccggcccugggcuc

SEQ ID NO: 2230592 - RNA, 12 nt, Human
cagccccuagcc

SEQ ID NO: 2230593 - RNA, 13 nt, Human
cagccccuagccc

SEQ ID NO: 2230594 - RNA, 15 nt, Human
cagccccuagcccag

SEQ ID NO: 2230595 - RNA, 16 nt, Human
cagccccuagcccagg

SEQ ID NO: 2230596 - RNA, 17 nt, Human
cagccccuagcccagga

SEQ ID NO: 2230597 - RNA, 22 nt, Human
cagccccuagcccaggagagag

SEQ ID NO: 2230598 - RNA, 23 nt, Human
cagccccuagcccaggagagaga

SEQ ID NO: 2230599 - RNA, 24 nt, Human
cagccccuagcccaggagagagaa

SEQ ID NO: 2230600 - RNA, 12 nt, Human
cagcccugucag

SEQ ID NO: 2230601 - RNA, 18 nt, Human
cagcccuggucucagcag

SEQ ID NO: 2230602 - RNA, 19 nt, Human
cagcccuggucucagcagc

SEQ ID NO: 2230603 - RNA, 12 nt, Human
cagcccuggucu

SEQ ID NO: 2230604 - RNA, 13 nt, Human
cagcccuggucuc

SEQ ID NO: 2230605 - RNA, 15 nt, Human
cagcccuggucucag

SEQ ID NO: 2230606 - RNA, 16 nt, Human
cagcccuggucucagc

SEQ ID NO: 2230607 - RNA, 20 nt, Human
cagccccugauccugugaag

SEQ ID NO: 2230608 - RNA, 21 nt, Human
cagccccugauccugugaagu

SEQ ID NO: 2230609 - RNA, 11 nt, Human
cagccccugcc

SEQ ID NO: 2230610 - RNA, 15 nt, Human
cagccccugccccag

SEQ ID NO: 2230611 - RNA, 17 nt, Human
cagccccugccccagcc

SEQ ID NO: 2230612 - RNA, 19 nt, Human
cagccccugccccagccca

SEQ ID NO: 2230613 - RNA, 22 nt, Human
cagccccugccccagcccaagu

SEQ ID NO: 2230614 - RNA, 22 nt, Human
cagccccucuugccccccaccc

SEQ ID NO: 2230615 - RNA, 21 nt, Human
cagccccucuugccccccacc

SEQ ID NO: 2230616 - RNA, 17 nt, Human
cagccccucuugccccc

SEQ ID NO: 2230617 - RNA, 15 nt, Human
cagccccucuugccc

SEQ ID NO: 2230618 - RNA, 23 nt, Human
cagccccucuugccccccacccc

SEQ ID NO: 2230619 - RNA, 13 nt, Human
cagccccugcaca

SEQ ID NO: 2230620 - RNA, 14 nt, Human
cagccccugauccu

SEQ ID NO: 2230621 - RNA, 19 nt, Human
cagccccugauccugugaa

SEQ ID NO: 2230622 - RNA, 11 nt, Human
cagccccucuu

SEQ ID NO: 2230623 - RNA, 23 nt, Human
cagccccuccucugccaccuccc

SEQ ID NO: 2230624 - RNA, 22 nt, Human
cagccccucuggucgcuccugc

SEQ ID NO: 2230625 - RNA, 18 nt, Human
cagccccucuggucgcuc

SEQ ID NO: 2230626 - RNA, 21 nt, Human
cagccccucuggucgcuccug

SEQ ID NO: 2230627 - RNA, 22 nt, Human
cagccccuccucugccaccucc

SEQ ID NO: 2230628 - RNA, 21 nt, Human
cagccccuccucugccaccuc

SEQ ID NO: 2230629 - RNA, 13 nt, Human
cagccccucuggu

SEQ ID NO: 2230630 - RNA, 14 nt, Human
cagccccucugguc

SEQ ID NO: 2230631 - RNA, 16 nt, Human
cagccccucuggucgc

SEQ ID NO: 2230632 - RNA, 20 nt, Human
cagccccuccucugccaccu

SEQ ID NO: 2230633 - RNA, 19 nt, Human
cagccccuccucugccacc

SEQ ID NO: 2230634 - RNA, 17 nt, Human
cagccccuccucugcca

SEQ ID NO: 2230635 - RNA, 16 nt, Human
cagccccuccucugcc

SEQ ID NO: 2230636 - RNA, 15 nt, Human
cagccccuccucugc

SEQ ID NO: 2230637 - RNA, 14 nt, Human
cagccccuccucug

SEQ ID NO: 2230638 - RNA, 13 nt, Human
cagccccuccucu

SEQ ID NO: 2230639 - RNA, 12 nt, Human
cagccccuccuc

SEQ ID NO: 2230640 - RNA, 21 nt, Human
cagccccucccaccacagcag

SEQ ID NO: 2230641 - RNA, 15 nt, Human
cagccccucccacca

SEQ ID NO: 2230642 - RNA, 14 nt, Human
cagccccucccacc

SEQ ID NO: 2230643 - RNA, 13 nt, Human
cagccccucccac

SEQ ID NO: 2230644 - RNA, 22 nt, Human
cagccccucccaccacagcagg

SEQ ID NO: 2230645 - RNA, 14 nt, Human
cagcguuucuauga

SEQ ID NO: 2230646 - RNA, 16 nt, Human
cagcguuucuaugaca

SEQ ID NO: 2230647 - RNA, 19 nt, Human
cagcguuucuaugacacau

SEQ ID NO: 2230648 - RNA, 13 nt, Human
cagcguugcaugu

SEQ ID NO: 2230649 - RNA, 14 nt, Human
cagcguugcauguc

SEQ ID NO: 2230650 - RNA, 17 nt, Human
cagcguugcaugucgug

SEQ ID NO: 2230651 - RNA, 16 nt, Human
cagcgggaauggcagc

SEQ ID NO: 2230652 - RNA, 18 nt, Human
cagcggcuggacuuggag

SEQ ID NO: 2230653 - RNA, 16 nt, Human
cagcggcuggacuugg

SEQ ID NO: 2230654 - RNA, 17 nt, Human
cagcggcuggaauuggg

SEQ ID NO: 2230655 - RNA, 19 nt, Human
cagcgugcuuuaaaaaaua

SEQ ID NO: 2230656 - RNA, 14 nt, Human
cagcggggacagcu

SEQ ID NO: 2230657 - RNA, 23 nt, Human
cagcgggaauggcagcugccacg

SEQ ID NO: 2230658 - RNA, 22 nt, Human
cagcgggaauggcagcugccac

SEQ ID NO: 2230659 - RNA, 15 nt, Human
cagccugccuggcag

SEQ ID NO: 2230660 - RNA, 19 nt, Human
cagccugccuggcaggcug

SEQ ID NO: 2230661 - RNA, 17 nt, Human
cagccugcccucuucau

SEQ ID NO: 2230662 - RNA, 17 nt, Human
cagcggccccuugacuc

SEQ ID NO: 2230663 - RNA, 20 nt, Human
cagcggccccugcauccccu

SEQ ID NO: 2230664 - RNA, 17 nt, Human
cagccugccacucaggc

SEQ ID NO: 2230665 - RNA, 16 nt, Human
cagccugccacucagg

SEQ ID NO: 2230666 - RNA, 12 nt, Human
cagccugccacu

SEQ ID NO: 2230667 - RNA, 11 nt, Human
cagccugccac

SEQ ID NO: 2230668 - RNA, 23 nt, Human
cagccucucuugguuuccuuccu

SEQ ID NO: 2230669 - RNA, 10 nt, Human
cagccugagu

SEQ ID NO: 2230670 - RNA, 19 nt, Human
cagccugaggcugagacug

SEQ ID NO: 2230671 - RNA, 18 nt, Human
cagccugaggcugagacu

SEQ ID NO: 2230672 - RNA, 15 nt, Human
cagccugaggcugag

SEQ ID NO: 2230673 - RNA, 12 nt, Human
cagccugaggcu

SEQ ID NO: 2230674 - RNA, 22 nt, Human
cagccucucucccagucuaccc

SEQ ID NO: 2230675 - RNA, 23 nt, Human
cagccucucucccagucuaccca

SEQ ID NO: 2230676 - RNA, 22 nt, Human
cagccucucuugguuuccuucc

SEQ ID NO: 2230677 - RNA, 18 nt, Human
cagccugcagacucacug

SEQ ID NO: 2230678 - RNA, 20 nt, Human
cagccugagucuccugugcc

SEQ ID NO: 2230679 - RNA, 14 nt, Human
cagccugagucucc

SEQ ID NO: 2230680 - RNA, 15 nt, Human
cagccugagucuccu

SEQ ID NO: 2230681 - RNA, 16 nt, Human
cagccugagucuccug

SEQ ID NO: 2230682 - RNA, 17 nt, Human
cagccugagucuccugu

SEQ ID NO: 2230683 - RNA, 18 nt, Human
cagccugagucuccugug

SEQ ID NO: 2230684 - RNA, 19 nt, Human
cagccugagucuccugugc

SEQ ID NO: 2230685 - RNA, 22 nt, Human
cagccugagucuccugugccca

SEQ ID NO: 2230686 - RNA, 23 nt, Human
cagccugagcgacagugagacuc

SEQ ID NO: 2230687 - RNA, 12 nt, Human
cagccucucucc

SEQ ID NO: 2230688 - RNA, 17 nt, Human
cagccucuccccugauu

SEQ ID NO: 2230689 - RNA, 19 nt, Human
cagccucuccccugauuac

SEQ ID NO: 2230690 - RNA, 15 nt, Human
cagccucucucccag

SEQ ID NO: 2230691 - RNA, 16 nt, Human
cagccucucucccagu

SEQ ID NO: 2230692 - RNA, 18 nt, Human
cagccucucucccagucu

SEQ ID NO: 2230693 - RNA, 16 nt, Human
cagccucuccccaggu

SEQ ID NO: 2230694 - RNA, 19 nt, Human
cagccucuccccaggucca

SEQ ID NO: 2230695 - RNA, 20 nt, Human
cagccucuccccagguccag

SEQ ID NO: 2230696 - RNA, 23 nt, Human
cagccucuccccagguccagcuc

SEQ ID NO: 2230697 - RNA, 21 nt, Human
cagcccugucagugcagcccg

SEQ ID NO: 2230698 - RNA, 20 nt, Human
cagcccugucagugcagccc

SEQ ID NO: 2230699 - RNA, 18 nt, Human
cagcccugucagugcagc

SEQ ID NO: 2230700 - RNA, 16 nt, Human
cagcccugucagugca

SEQ ID NO: 2230701 - RNA, 13 nt, Human
cagcccuuagcag

SEQ ID NO: 2230702 - RNA, 11 nt, Human
cagcccugugg

SEQ ID NO: 2230703 - RNA, 21 nt, Human
cagcccugucugaaggacacu

SEQ ID NO: 2230704 - RNA, 23 nt, Human
cagccgccaugcuccuggcccac

SEQ ID NO: 2230705 - RNA, 12 nt, Human
cagccgcuccug

SEQ ID NO: 2230706 - RNA, 14 nt, Human
cagccucuccccag

SEQ ID NO: 2230707 - RNA, 19 nt, Human
cagccgccauugccaccag

SEQ ID NO: 2230708 - RNA, 18 nt, Human
cagccgccauugccacca

SEQ ID NO: 2230709 - RNA, 17 nt, Human
cagccgccauugccacc

SEQ ID NO: 2230710 - RNA, 22 nt, Human
cagccgccauugccaccaggag

SEQ ID NO: 2230711 - RNA, 21 nt, Human
cagccgccauugccaccagga

SEQ ID NO: 2230712 - RNA, 23 nt, Human
cagccgccauugccaccaggaga

SEQ ID NO: 2230713 - RNA, 20 nt, Human
cagagcuacccgcagaguuc

SEQ ID NO: 2230714 - RNA, 16 nt, Human
cagagcugcgggcugg

SEQ ID NO: 2230715 - RNA, 9 nt, Human
cagagcugg

SEQ ID NO: 2230716 - RNA, 16 nt, Human
cagagcuacuugggcc

SEQ ID NO: 2230717 - RNA, 17 nt, Human
cagagcuacacagggga

SEQ ID NO: 2230718 - RNA, 22 nt, Human
cagagcuacacaggggaaaaga

SEQ ID NO: 2230719 - RNA, 20 nt, Human
cagagcgagagucugucuca

SEQ ID NO: 2230720 - RNA, 16 nt, Human
cagagccuuuggauga

SEQ ID NO: 2230721 - RNA, 18 nt, Human
cagagccuuuggaugacc

SEQ ID NO: 2230722 - RNA, 19 nt, Human
cagagccuuuggaugacca

SEQ ID NO: 2230723 - RNA, 20 nt, Human
cagagccuuuggaugaccag

SEQ ID NO: 2230724 - RNA, 23 nt, Human
cagagccuucugaggacauucca

SEQ ID NO: 2230725 - RNA, 15 nt, Human
cagagcgccccuccc

SEQ ID NO: 2230726 - RNA, 19 nt, Human
cagagcgccccucccuagu

SEQ ID NO: 2230727 - RNA, 19 nt, Human
cagagcgccgugaguucuc

SEQ ID NO: 2230728 - RNA, 20 nt, Human
cagagcgccgugaguucuca

SEQ ID NO: 2230729 - RNA, 21 nt, Human
cagagcgccgugaguucucag

SEQ ID NO: 2230730 - RNA, 22 nt, Human
cagagcgccgugaguucucagg

SEQ ID NO: 2230731 - RNA, 18 nt, Human
cagagaggacgugggcgg

SEQ ID NO: 2230732 - RNA, 21 nt, Human
cagagaggacgugggcggcag

SEQ ID NO: 2230733 - RNA, 18 nt, Human
cagagaggacuguaggga

SEQ ID NO: 2230734 - RNA, 20 nt, Human
cagagaggacuguagggagg

SEQ ID NO: 2230735 - RNA, 20 nt, Human
cagagaggagucagagagaa

SEQ ID NO: 2230736 - RNA, 17 nt, Human
cagagaggagucagaga

SEQ ID NO: 2230737 - RNA, 22 nt, Human
cagagaggagaaacacaucuuc

SEQ ID NO: 2230738 - RNA, 21 nt, Human
cagagaggagaaacacaucuu

SEQ ID NO: 2230739 - RNA, 18 nt, Human
cagagaggagaaacacau

SEQ ID NO: 2230740 - RNA, 17 nt, Human
cagagaggagaaacaca

SEQ ID NO: 2230741 - RNA, 16 nt, Human
cagagaggagaaacac

SEQ ID NO: 2230742 - RNA, 13 nt, Human
cagagaggagaaa

SEQ ID NO: 2230743 - RNA, 20 nt, Human
cagagaggccuuuuggaaug

SEQ ID NO: 2230744 - RNA, 16 nt, Human
cagagaggccaggugc

SEQ ID NO: 2230745 - RNA, 18 nt, Human
cagagaggccaggugcag

SEQ ID NO: 2230746 - RNA, 16 nt, Human
cagagagggugggagu

SEQ ID NO: 2230747 - RNA, 14 nt, Human
cagagccugcaguu

SEQ ID NO: 2230748 - RNA, 20 nt, Human
cagagagggugggagugggc

SEQ ID NO: 2230749 - RNA, 22 nt, Human
cagagagggugggagugggccc

SEQ ID NO: 2230750 - RNA, 16 nt, Human
cagagaggacgugggc

SEQ ID NO: 2230751 - RNA, 17 nt, Human
cagagaggacgugggcg

SEQ ID NO: 2230752 - RNA, 15 nt, Human
cagagaggaaucaga

SEQ ID NO: 2230753 - RNA, 13 nt, Human
cagagaggaauca

SEQ ID NO: 2230754 - RNA, 13 nt, Human
cagagagcuggua

SEQ ID NO: 2230755 - RNA, 19 nt, Human
cagagagcugguaguuagu

SEQ ID NO: 2230756 - RNA, 12 nt, Human
cagagagcuggu

SEQ ID NO: 2230757 - RNA, 22 nt, Human
cagagagcggucucaggcuggu

SEQ ID NO: 2230758 - RNA, 20 nt, Human
cagagagccuggugcugcug

SEQ ID NO: 2230759 - RNA, 18 nt, Human
cagagagcggucucaggc

SEQ ID NO: 2230760 - RNA, 21 nt, Human
cagagagcggucucaggcugg

SEQ ID NO: 2230761 - RNA, 19 nt, Human
cagagagccuggugcugcu

SEQ ID NO: 2230762 - RNA, 21 nt, Human
cagagagccauuuugugaaug

SEQ ID NO: 2230763 - RNA, 23 nt, Human
cagagagccauuuugugaaugga

SEQ ID NO: 2230764 - RNA, 15 nt, Human
cagagagccauuuug

SEQ ID NO: 2230765 - RNA, 18 nt, Human
cagagagccauuuuguga

SEQ ID NO: 2230766 - RNA, 19 nt, Human
cagagagccauuuugugaa

SEQ ID NO: 2230767 - RNA, 20 nt, Human
cagagagccauuuugugaau

SEQ ID NO: 2230768 - RNA, 12 nt, Human
cagagagagugu

SEQ ID NO: 2230769 - RNA, 20 nt, Human
cagagagcaacucugagauc

SEQ ID NO: 2230770 - RNA, 22 nt, Human
cagagagaggggagaagccugg

SEQ ID NO: 2230771 - RNA, 24 nt, Human
cagagagagaagugccccugcugc

SEQ ID NO: 2230772 - RNA, 21 nt, Human
cagagacuccugcaggcagcc

SEQ ID NO: 2230773 - RNA, 22 nt, Human
cagagacuccugcaggcagcca

SEQ ID NO: 2230774 - RNA, 20 nt, Human
cagagacuccugcaggcagc

SEQ ID NO: 2230775 - RNA, 21 nt, Human
cagauacuggaaguuuugcau

SEQ ID NO: 2230776 - RNA, 18 nt, Human
cagauacuggaaguuuug

SEQ ID NO: 2230777 - RNA, 16 nt, Human
cagaucauugugaaau

SEQ ID NO: 2230778 - RNA, 17 nt, Human
cagauacaugguuguga

SEQ ID NO: 2230779 - RNA, 14 nt, Human
cagauaccagcccc

SEQ ID NO: 2230780 - RNA, 17 nt, Human
cagauacauaugagugu

SEQ ID NO: 2230781 - RNA, 16 nt, Human
cagauaccagccccug

SEQ ID NO: 2230782 - RNA, 15 nt, Human
cagauaccucacccu

SEQ ID NO: 2230783 - RNA, 22 nt, Human
cagauacuggaaguuuugcauu

SEQ ID NO: 2230784 - RNA, 18 nt, Human
cagauccagccugggguc

SEQ ID NO: 2230785 - RNA, 17 nt, Human
cagauccagccuggggu

SEQ ID NO: 2230786 - RNA, 15 nt, Human
cagauccagccuggg

SEQ ID NO: 2230787 - RNA, 14 nt, Human
cagauccagccugg

SEQ ID NO: 2230788 - RNA, 13 nt, Human
cagauccagccug

SEQ ID NO: 2230789 - RNA, 19 nt, Human
cagaucauuucaaaacuca

SEQ ID NO: 2230790 - RNA, 12 nt, Human
cagauccagccu

SEQ ID NO: 2230791 - RNA, 23 nt, Human
cagaucauuaucagccugugcca

SEQ ID NO: 2230792 - RNA, 22 nt, Human
cagaucauugugaaauuauuca

SEQ ID NO: 2230793 - RNA, 13 nt, Human
cagagcugggagg

SEQ ID NO: 2230794 - RNA, 14 nt, Human
cagagcugggaggc

SEQ ID NO: 2230795 - RNA, 15 nt, Human
cagagcugggaggca

SEQ ID NO: 2230796 - RNA, 23 nt, Human
cagagcugggaggcauggcccug

SEQ ID NO: 2230797 - RNA, 15 nt, Human
cagaggucucugccg

SEQ ID NO: 2230798 - RNA, 20 nt, Human
cagagcugggaggcauggcc

SEQ ID NO: 2230799 - RNA, 19 nt, Human
cagaggucucugccggcuc

SEQ ID NO: 2230800 - RNA, 20 nt, Human
cagaggucucugccggcucu

SEQ ID NO: 2230801 - RNA, 23 nt, Human
cagaggucucugccggcucuuuc

SEQ ID NO: 2230802 - RNA, 14 nt, Human
cagaggucugugcu

SEQ ID NO: 2230803 - RNA, 15 nt, Human
cagaggucugugcug

SEQ ID NO: 2230804 - RNA, 10 nt, Human
cagagcuggg

SEQ ID NO: 2230805 - RNA, 18 nt, Human
cagagcuggcucugagcg

SEQ ID NO: 2230806 - RNA, 13 nt, Human
cagagcuggcucu

SEQ ID NO: 2230807 - RNA, 17 nt, Human
cagagcuggcucugagc

SEQ ID NO: 2230808 - RNA, 12 nt, Human
cagaggugggca

SEQ ID NO: 2230809 - RNA, 19 nt, Human
cagagguggccagagcugg

SEQ ID NO: 2230810 - RNA, 21 nt, Human
cagagguggccagagcuggga

SEQ ID NO: 2230811 - RNA, 16 nt, Human
cagaggucugugcuga

SEQ ID NO: 2230812 - RNA, 14 nt, Human
cagagguggccaga

SEQ ID NO: 2230813 - RNA, 17 nt, Human
cagagguggccagagcu

SEQ ID NO: 2230814 - RNA, 13 nt, Human
cagaggugggcag

SEQ ID NO: 2230815 - RNA, 14 nt, Human
cagaggugggcagg

SEQ ID NO: 2230816 - RNA, 15 nt, Human
cagaggugggcaggu

SEQ ID NO: 2230817 - RNA, 16 nt, Human
cagaggugggcaggug

SEQ ID NO: 2230818 - RNA, 17 nt, Human
cagaggugggcaggugg

SEQ ID NO: 2230819 - RNA, 20 nt, Human
cagaggugggcagguggugg

SEQ ID NO: 2230820 - RNA, 22 nt, Human
cagaggugggcaggugguggca

SEQ ID NO: 2230821 - RNA, 23 nt, Human
cagaggugggcaggugguggcac

SEQ ID NO: 2230822 - RNA, 23 nt, Human
cagauacaggaaaagcugcugac

SEQ ID NO: 2230823 - RNA, 18 nt, Human
cagagguuaucuguccca

SEQ ID NO: 2230824 - RNA, 19 nt, Human
cagagguuaucugucccag

SEQ ID NO: 2230825 - RNA, 21 nt, Human
cagagguuaucugucccaggu

SEQ ID NO: 2230826 - RNA, 12 nt, Human
cauacacacaca

SEQ ID NO: 2230827 - RNA, 13 nt, Human
cauacaaggccca

SEQ ID NO: 2230828 - RNA, 15 nt, Human
cauacaauuccaaac

SEQ ID NO: 2230829 - RNA, 14 nt, Human
cauaauuuucuuca

SEQ ID NO: 2230830 - RNA, 20 nt, Human
cauaauuuucuucaugcaau

SEQ ID NO: 2230831 - RNA, 21 nt, Human
cauaaugcgugcauaccacuu

SEQ ID NO: 2230832 - RNA, 23 nt, Human
cauagaugucccuuucuuggcca

SEQ ID NO: 2230833 - RNA, 20 nt, Human
cauacacacacacacacagc

SEQ ID NO: 2230834 - RNA, 19 nt, Human
cauacacacacacacacag

SEQ ID NO: 2230835 - RNA, 16 nt, Human
cauacacacacacaca

SEQ ID NO: 2230836 - RNA, 15 nt, Human
cauacacacacacac

SEQ ID NO: 2230837 - RNA, 14 nt, Human
cauacacacacaca

SEQ ID NO: 2230838 - RNA, 18 nt, Human
cauagauucccugagcag

SEQ ID NO: 2230839 - RNA, 17 nt, Human
cauagauucccugagca

SEQ ID NO: 2230840 - RNA, 18 nt, Human
cauagauugagaaguuuu

SEQ ID NO: 2230841 - RNA, 20 nt, Human
cauagcagcuuauucacaag

SEQ ID NO: 2230842 - RNA, 11 nt, Human
cauagcauuaa

SEQ ID NO: 2230843 - RNA, 18 nt, Human
cauagcaugacauuucuu

SEQ ID NO: 2230844 - RNA, 17 nt, Human
cauagcaugacauuucu

SEQ ID NO: 2230845 - RNA, 15 nt, Human
cauagcaugacauuu

SEQ ID NO: 2230846 - RNA, 15 nt, Human
cauagaugcagguga

SEQ ID NO: 2230847 - RNA, 21 nt, Human
cauagcauagcuagagauugg

SEQ ID NO: 2230848 - RNA, 23 nt, Human
cauagcauuaacuaaucuauugg

SEQ ID NO: 2230849 - RNA, 16 nt, Human
cauagcauuaacuaau

SEQ ID NO: 2230850 - RNA, 15 nt, Human
cauagcauuaacuaa

SEQ ID NO: 2230851 - RNA, 15 nt, Human
cauagccaccccaga

SEQ ID NO: 2230852 - RNA, 19 nt, Human
cauagccuaaucccugggc

SEQ ID NO: 2230853 - RNA, 12 nt, Human
cauagccuauau

SEQ ID NO: 2230854 - RNA, 13 nt, Human
cauagccuauauu

SEQ ID NO: 2230855 - RNA, 15 nt, Human
cauagccuauauuua

SEQ ID NO: 2230856 - RNA, 18 nt, Human
cauagccuaaucccuggg

SEQ ID NO: 2230857 - RNA, 23 nt, Human
cauagcccaucccugccugguca

SEQ ID NO: 2230858 - RNA, 17 nt, Human
cauagcccaucccugcc

SEQ ID NO: 2230859 - RNA, 18 nt, Human
cauagcccaucccugccu

SEQ ID NO: 2230860 - RNA, 19 nt, Human
cauagcccucacccugggg

SEQ ID NO: 2230861 - RNA, 15 nt, Human
cauagcccucacccu

SEQ ID NO: 2230862 - RNA, 12 nt, Human
cauagcccucac

SEQ ID NO: 2230863 - RNA, 15 nt, Human
cauagcccaguagac

SEQ ID NO: 2230864 - RNA, 13 nt, Human
cauagcccauccc

SEQ ID NO: 2230865 - RNA, 16 nt, Human
cauagcccaucccugc

SEQ ID NO: 2230866 - RNA, 15 nt, Human
cauagccaggaaacu

SEQ ID NO: 2230867 - RNA, 11 nt, Human
cauagcccagu

SEQ ID NO: 2230868 - RNA, 16 nt, Human
cauagcccagacacag

SEQ ID NO: 2230869 - RNA, 18 nt, Human
cauagcccagacacagaa

SEQ ID NO: 2230870 - RNA, 15 nt, Human
cauagggucucuuca

SEQ ID NO: 2230871 - RNA, 14 nt, Human
cauaggccugggug

SEQ ID NO: 2230872 - RNA, 13 nt, Human
cauaggcccagug

SEQ ID NO: 2230873 - RNA, 17 nt, Human
cauaggaggcuucuguu

SEQ ID NO: 2230874 - RNA, 23 nt, Human
cauaggacucaaaguuucagaga

SEQ ID NO: 2230875 - RNA, 16 nt, Human
cauaggaccuuuccac

SEQ ID NO: 2230876 - RNA, 18 nt, Human
cauaggaccuuuccacca

SEQ ID NO: 2230877 - RNA, 22 nt, Human
cauagcuaagaaauaaaacugu

SEQ ID NO: 2230878 - RNA, 21 nt, Human
cauagcuaagaaauaaaacug

SEQ ID NO: 2230879 - RNA, 16 nt, Human
cauagcuaucaagugu

SEQ ID NO: 2230880 - RNA, 20 nt, Human
cauagcuaucaagugugcuu

SEQ ID NO: 2230881 - RNA, 12 nt, Human
cauaggaaaagu

SEQ ID NO: 2230882 - RNA, 24 nt, Human
cauaggaagggaccaaggcaaggc

SEQ ID NO: 2230883 - RNA, 18 nt, Human
cauaggaaaaguacauuu

SEQ ID NO: 2230884 - RNA, 19 nt, Human
cauaggaaaaguacauuua

SEQ ID NO: 2230885 - RNA, 22 nt, Human
cauaggaaaaguacauuuaaua

SEQ ID NO: 2230886 - RNA, 23 nt, Human
cauaggaaaaguacauuuaauac

SEQ ID NO: 2230887 - RNA, 17 nt, Human
cauagggucucuucagg

SEQ ID NO: 2230888 - RNA, 19 nt, Human
cauaggccugggugcuggc

SEQ ID NO: 2230889 - RNA, 18 nt, Human
cauaggccugggugcugg

SEQ ID NO: 2230890 - RNA, 17 nt, Human
cauaggccugggugcug

SEQ ID NO: 2230891 - RNA, 15 nt, Human
cauaggccugggugc

SEQ ID NO: 2230892 - RNA, 17 nt, Human
cauauuaccacagacau

SEQ ID NO: 2230893 - RNA, 21 nt, Human
cauauuaccacagacauacua

SEQ ID NO: 2230894 - RNA, 20 nt, Human
cauauuaccacagacauacu

SEQ ID NO: 2230895 - RNA, 20 nt, Human
caguuuaaccugaugcaguc

SEQ ID NO: 2230896 - RNA, 18 nt, Human
caguuuaaaaaaauuggu

SEQ ID NO: 2230897 - RNA, 16 nt, Human
caguuuaaaaaaauug

SEQ ID NO: 2230898 - RNA, 13 nt, Human
caguuguuuuccc

SEQ ID NO: 2230899 - RNA, 14 nt, Human
caguuguuuucccg

SEQ ID NO: 2230900 - RNA, 13 nt, Human
caguuguuugaug

SEQ ID NO: 2230901 - RNA, 20 nt, Human
caguuguuggccuccggccu

SEQ ID NO: 2230902 - RNA, 15 nt, Human
caguuguuggccucc

SEQ ID NO: 2230903 - RNA, 14 nt, Human
caguuguuggccuc

SEQ ID NO: 2230904 - RNA, 23 nt, Human
cauaaucuggacuccucugucca

SEQ ID NO: 2230905 - RNA, 15 nt, Human
cauaaucuucugccu

SEQ ID NO: 2230906 - RNA, 13 nt, Human
cauaaucuucugc

SEQ ID NO: 2230907 - RNA, 22 nt, Human
cauaaucuucugccuucucaug

SEQ ID NO: 2230908 - RNA, 21 nt, Human
cauaaucuucugccuucucau

SEQ ID NO: 2230909 - RNA, 18 nt, Human
cauaaucuguacaaugaa

SEQ ID NO: 2230910 - RNA, 17 nt, Human
cauaaugcgugcauacc

SEQ ID NO: 2230911 - RNA, 14 nt, Human
cauaaugcgugcau

SEQ ID NO: 2230912 - RNA, 21 nt, Human
cauaaucuggacuccucuguc

SEQ ID NO: 2230913 - RNA, 22 nt, Human
cauaaucuggacuccucugucc

SEQ ID NO: 2230914 - RNA, 20 nt, Human
cauaaucuggacuccucugu

SEQ ID NO: 2230915 - RNA, 21 nt, Human
caguuugugugucuuaauuau

SEQ ID NO: 2230916 - RNA, 23 nt, Human
caguuugugugucuuaauuauua

SEQ ID NO: 2230917 - RNA, 13 nt, Human
caguuugucagac

SEQ ID NO: 2230918 - RNA, 14 nt, Human
caguuuguauauac

SEQ ID NO: 2230919 - RNA, 16 nt, Human
caguuugucacaugaa

SEQ ID NO: 2230920 - RNA, 15 nt, Human
caguuugugugucuu

SEQ ID NO: 2230921 - RNA, 16 nt, Human
caguuugugugucuua

SEQ ID NO: 2230922 - RNA, 19 nt, Human
cauaaucuggacuccucug

SEQ ID NO: 2230923 - RNA, 21 nt, Human
caguuuguacagacguaugcu

SEQ ID NO: 2230924 - RNA, 13 nt, Human
caguuuguauaua

SEQ ID NO: 2230925 - RNA, 17 nt, Human
caguuuggcaaacucuc

SEQ ID NO: 2230926 - RNA, 12 nt, Human
caguuugcuuug

SEQ ID NO: 2230927 - RNA, 12 nt, Human
caguuugcugua

SEQ ID NO: 2230928 - RNA, 19 nt, Human
caguuugcuguacuagaga

SEQ ID NO: 2230929 - RNA, 14 nt, Human
caguuugcuuugua

SEQ ID NO: 2230930 - RNA, 21 nt, Human
caguuugcuuuguaugcacuu

SEQ ID NO: 2230931 - RNA, 23 nt, Human
caguuugcagaaaagcaccugcc

SEQ ID NO: 2230932 - RNA, 22 nt, Human
caguuugcagaaaagcaccugc

SEQ ID NO: 2230933 - RNA, 21 nt, Human
caguuugcagaaaagcaccug

SEQ ID NO: 2230934 - RNA, 13 nt, Human
caguuuaucauuc

SEQ ID NO: 2230935 - RNA, 16 nt, Human
caguuuaauccuucua

SEQ ID NO: 2230936 - RNA, 21 nt, Human
caguuuaauccuucuaguuuc

SEQ ID NO: 2230937 - RNA, 18 nt, Human
cagucaccccggccaccu

SEQ ID NO: 2230938 - RNA, 17 nt, Human
caguauuuuggagaaau

SEQ ID NO: 2230939 - RNA, 18 nt, Human
caguauuuuggagaaauu

SEQ ID NO: 2230940 - RNA, 12 nt, Human
cauccuucugcc

SEQ ID NO: 2230941 - RNA, 15 nt, Human
cauccuucugccuuu

SEQ ID NO: 2230942 - RNA, 14 nt, Human
cauccuugagucaa

SEQ ID NO: 2230943 - RNA, 17 nt, Human
cauccuuuucugcagag

SEQ ID NO: 2230944 - RNA, 16 nt, Human
cauccuuugcacuguc

SEQ ID NO: 2230945 - RNA, 14 nt, Human
cauccuuuccagca

SEQ ID NO: 2230946 - RNA, 16 nt, Human
cauccuuucugccucu

SEQ ID NO: 2230947 - RNA, 18 nt, Human
cauccuuucugccucuca

SEQ ID NO: 2230948 - RNA, 19 nt, Human
cauccuuucugccucucaa

SEQ ID NO: 2230949 - RNA, 19 nt, Human
cauccuuuucugcagaggg

SEQ ID NO: 2230950 - RNA, 21 nt, Human
caucgaaucuacuaauuccac

SEQ ID NO: 2230951 - RNA, 12 nt, Human
caucgcaaugua

SEQ ID NO: 2230952 - RNA, 17 nt, Human
caucugucccugccuca

SEQ ID NO: 2230953 - RNA, 18 nt, Human
cauccccauccuccagcu

SEQ ID NO: 2230954 - RNA, 20 nt, Human
caucugucccuccgggaccu

SEQ ID NO: 2230955 - RNA, 12 nt, Human
caucuguccuca

SEQ ID NO: 2230956 - RNA, 18 nt, Human
caucugucccuccgggac

SEQ ID NO: 2230957 - RNA, 17 nt, Human
caucugucccuccggga

SEQ ID NO: 2230958 - RNA, 16 nt, Human
caucugucccuccggg

SEQ ID NO: 2230959 - RNA, 13 nt, Human
caucgaaugugua

SEQ ID NO: 2230960 - RNA, 15 nt, Human
caucgaauguguaca

SEQ ID NO: 2230961 - RNA, 18 nt, Human
caucugugaaaggaaaga

SEQ ID NO: 2230962 - RNA, 19 nt, Human
caucugugaaaggaaagag

SEQ ID NO: 2230963 - RNA, 19 nt, Human
caucuuaguauuugcauau

SEQ ID NO: 2230964 - RNA, 23 nt, Human
caucuuagagcaaagagccagca

SEQ ID NO: 2230965 - RNA, 22 nt, Human
caucuuacuguaccuguuccuu

SEQ ID NO: 2230966 - RNA, 15 nt, Human
caucuuacugaaggu

SEQ ID NO: 2230967 - RNA, 14 nt, Human
caucuuacugaagg

SEQ ID NO: 2230968 - RNA, 22 nt, Human
caucuuagguuggcaaaaaggc

SEQ ID NO: 2230969 - RNA, 21 nt, Human
caucuuagguuggcaaaaagg

SEQ ID NO: 2230970 - RNA, 13 nt, Human
caucuuacugaag

SEQ ID NO: 2230971 - RNA, 15 nt, Human
caucuuaagagaugc

SEQ ID NO: 2230972 - RNA, 13 nt, Human
caucugugaauaa

SEQ ID NO: 2230973 - RNA, 11 nt, Human
caucugugaau

SEQ ID NO: 2230974 - RNA, 17 nt, Human
caucagagcaaauuugg

SEQ ID NO: 2230975 - RNA, 16 nt, Human
caucagagcaaauuug

SEQ ID NO: 2230976 - RNA, 19 nt, Human
caucagcuguaagaagaga

SEQ ID NO: 2230977 - RNA, 17 nt, Human
caucagcuguaagaaga

SEQ ID NO: 2230978 - RNA, 20 nt, Human
caucagcuugcccuguuaaa

SEQ ID NO: 2230979 - RNA, 23 nt, Human
caucagcuuaggggcugcugacc

SEQ ID NO: 2230980 - RNA, 23 nt, Human
caucagcuguaagaagagacugg

SEQ ID NO: 2230981 - RNA, 13 nt, Human
caucaggacucuu

SEQ ID NO: 2230982 - RNA, 15 nt, Human
caucaggacucuugu

SEQ ID NO: 2230983 - RNA, 19 nt, Human
caucaggagaaaaagccuc

SEQ ID NO: 2230984 - RNA, 22 nt, Human
caucaggagaaaaagccuccag

SEQ ID NO: 2230985 - RNA, 13 nt, Human
caucaggaugaac

SEQ ID NO: 2230986 - RNA, 13 nt, Human
caucaggccaggc

SEQ ID NO: 2230987 - RNA, 15 nt, Human
caucagcugcugaaa

SEQ ID NO: 2230988 - RNA, 18 nt, Human
caucagcugcugaaacaa

SEQ ID NO: 2230989 - RNA, 17 nt, Human
caucagcugcugaaaca

SEQ ID NO: 2230990 - RNA, 15 nt, Human
caucagaaggagaag

SEQ ID NO: 2230991 - RNA, 23 nt, Human
caucagaaggagaaggaaggaga

SEQ ID NO: 2230992 - RNA, 14 nt, Human
caucagacagaugg

SEQ ID NO: 2230993 - RNA, 18 nt, Human
caucagcacgauuucugu

SEQ ID NO: 2230994 - RNA, 17 nt, Human
caucagcacgauuucug

SEQ ID NO: 2230995 - RNA, 23 nt, Human
cauccuggcacccggccccugcu

SEQ ID NO: 2230996 - RNA, 14 nt, Human
cauccccacucacg

SEQ ID NO: 2230997 - RNA, 15 nt, Human
cauccccauccucca

SEQ ID NO: 2230998 - RNA, 16 nt, Human
cauccccauccuccag

SEQ ID NO: 2230999 - RNA, 17 nt, Human
cauccccauccuccagc

SEQ ID NO: 2231000 - RNA, 12 nt, Human
cauccuggccca

SEQ ID NO: 2231001 - RNA, 11 nt, Human
cauccuggccc

SEQ ID NO: 2231002 - RNA, 13 nt, Human
cauccuggcccau

SEQ ID NO: 2231003 - RNA, 14 nt, Human
cauccuggcccauc

SEQ ID NO: 2231004 - RNA, 18 nt, Human
cauccuggccuggcacau

SEQ ID NO: 2231005 - RNA, 21 nt, Human
cauccuggccuggcacaucag

SEQ ID NO: 2231006 - RNA, 15 nt, Human
cauccugucccacca

SEQ ID NO: 2231007 - RNA, 18 nt, Human
cauccugucccaccaugc

SEQ ID NO: 2231008 - RNA, 20 nt, Human
cauccugucccaccaugcag

SEQ ID NO: 2231009 - RNA, 12 nt, Human
cauccugugaag

SEQ ID NO: 2231010 - RNA, 15 nt, Human
cauccuggcccauca

SEQ ID NO: 2231011 - RNA, 16 nt, Human
cauccuggcccaucag

SEQ ID NO: 2231012 - RNA, 19 nt, Human
cauccuggcccaucagugu

SEQ ID NO: 2231013 - RNA, 14 nt, Human
cauccuggccuggc

SEQ ID NO: 2231014 - RNA, 23 nt, Human
cauccuggccuggcacaucagaa

SEQ ID NO: 2231015 - RNA, 17 nt, Human
caucaggaugaacccag

SEQ ID NO: 2231016 - RNA, 19 nt, Human
caucaggaugaacccagga

SEQ ID NO: 2231017 - RNA, 17 nt, Human
caucccaugaacacacu

SEQ ID NO: 2231018 - RNA, 18 nt, Human
caucccaugauguagugc

SEQ ID NO: 2231019 - RNA, 12 nt, Human
caucccauugcc

SEQ ID NO: 2231020 - RNA, 19 nt, Human
caucccauguaacagaaag

SEQ ID NO: 2231021 - RNA, 15 nt, Human
caucccauguauuua

SEQ ID NO: 2231022 - RNA, 16 nt, Human
caucccauguaacaga

SEQ ID NO: 2231023 - RNA, 20 nt, Human
caucccaugauguagugccu

SEQ ID NO: 2231024 - RNA, 17 nt, Human
caucccauguaacagaa

SEQ ID NO: 2231025 - RNA, 21 nt, Human
cauccccaggggucccagcca

SEQ ID NO: 2231026 - RNA, 18 nt, Human
cauccccaggggucccag

SEQ ID NO: 2231027 - RNA, 12 nt, Human
cauccccagggg

SEQ ID NO: 2231028 - RNA, 11 nt, Human
cauccccaggg

SEQ ID NO: 2231029 - RNA, 17 nt, Human
caucccauugcccuggu

SEQ ID NO: 2231030 - RNA, 15 nt, Human
caucccauugcccug

SEQ ID NO: 2231031 - RNA, 13 nt, Human
caucccauugccc

SEQ ID NO: 2231032 - RNA, 16 nt, Human
cauccccacccuugga

SEQ ID NO: 2231033 - RNA, 16 nt, Human
caucccauugcccugg

SEQ ID NO: 2231034 - RNA, 17 nt, Human
caucccagccccaauga

SEQ ID NO: 2231035 - RNA, 16 nt, Human
caucccagccccaaug

SEQ ID NO: 2231036 - RNA, 13 nt, Human
caucccagcccca

SEQ ID NO: 2231037 - RNA, 14 nt, Human
caucccagccccaa

SEQ ID NO: 2231038 - RNA, 14 nt, Human
caucaggccaggcc

SEQ ID NO: 2231039 - RNA, 20 nt, Human
caucaggccaggcccucugc

SEQ ID NO: 2231040 - RNA, 21 nt, Human
caucaggccaggcccucugcc

SEQ ID NO: 2231041 - RNA, 22 nt, Human
caucaggccaggcccucugccc

SEQ ID NO: 2231042 - RNA, 23 nt, Human
caucaggccaggcccucugccca

SEQ ID NO: 2231043 - RNA, 13 nt, Human
caugacauuucuu

SEQ ID NO: 2231044 - RNA, 17 nt, Human
caugaccacauagcaug

SEQ ID NO: 2231045 - RNA, 17 nt, Human
caugacauguuauauau

SEQ ID NO: 2231046 - RNA, 19 nt, Human
caugacauguuauauauuu

SEQ ID NO: 2231047 - RNA, 23 nt, Human
caugacauuccuaaacuaucuuu

SEQ ID NO: 2231048 - RNA, 20 nt, Human
caugacaagccccaggcagg

SEQ ID NO: 2231049 - RNA, 12 nt, Human
caugacacagcu

SEQ ID NO: 2231050 - RNA, 22 nt, Human
caugacacagcuuuaucaccag

SEQ ID NO: 2231051 - RNA, 16 nt, Human
caugacauguuauaua

SEQ ID NO: 2231052 - RNA, 23 nt, Human
caugacacagcuuuaucaccaga

SEQ ID NO: 2231053 - RNA, 17 nt, Human
caugacacgaauauugc

SEQ ID NO: 2231054 - RNA, 18 nt, Human
caugacacgaauauugcu

SEQ ID NO: 2231055 - RNA, 12 nt, Human
caugauuagcaa

SEQ ID NO: 2231056 - RNA, 18 nt, Human
caugaccuaguuuuccau

SEQ ID NO: 2231057 - RNA, 19 nt, Human
caugacccaggcugggcaa

SEQ ID NO: 2231058 - RNA, 14 nt, Human
caugauucauuuua

SEQ ID NO: 2231059 - RNA, 13 nt, Human
caugauucauuuu

SEQ ID NO: 2231060 - RNA, 21 nt, Human
caugauucaugccaauuagca

SEQ ID NO: 2231061 - RNA, 16 nt, Human
caugauucaugccaau

SEQ ID NO: 2231062 - RNA, 18 nt, Human
caugaccauacugaggga

SEQ ID NO: 2231063 - RNA, 12 nt, Human
caugacccaccc

SEQ ID NO: 2231064 - RNA, 13 nt, Human
caugacccacccc

SEQ ID NO: 2231065 - RNA, 14 nt, Human
caugacccaccccu

SEQ ID NO: 2231066 - RNA, 15 nt, Human
caugacccaccccug

SEQ ID NO: 2231067 - RNA, 16 nt, Human
caugacccaccccugu

SEQ ID NO: 2231068 - RNA, 17 nt, Human
caugacccaccccugug

SEQ ID NO: 2231069 - RNA, 18 nt, Human
caugacccaccccugugc

SEQ ID NO: 2231070 - RNA, 19 nt, Human
caugacccaccccugugcu

SEQ ID NO: 2231071 - RNA, 13 nt, Human
caugacccaggcu

SEQ ID NO: 2231072 - RNA, 15 nt, Human
caugacccaggcugg

SEQ ID NO: 2231073 - RNA, 16 nt, Human
caugacccaggcuggg

SEQ ID NO: 2231074 - RNA, 17 nt, Human
caugacccaggcugggc

SEQ ID NO: 2231075 - RNA, 18 nt, Human
caugaauguaucaggaaa

SEQ ID NO: 2231076 - RNA, 17 nt, Human
caugaauguaucaggaa

SEQ ID NO: 2231077 - RNA, 13 nt, Human
caugaauguauca

SEQ ID NO: 2231078 - RNA, 18 nt, Human
caugaauucuuaugcuua

SEQ ID NO: 2231079 - RNA, 14 nt, Human
caugaauuugugaa

SEQ ID NO: 2231080 - RNA, 14 nt, Human
caugacacgaauau

SEQ ID NO: 2231081 - RNA, 19 nt, Human
caugacaagccccaggcag

SEQ ID NO: 2231082 - RNA, 20 nt, Human
caugaauucuuaugcuuaua

SEQ ID NO: 2231083 - RNA, 16 nt, Human
caugaauuaguuuuau

SEQ ID NO: 2231084 - RNA, 14 nt, Human
caugcugccuccag

SEQ ID NO: 2231085 - RNA, 19 nt, Human
caugcugcuggacaguauc

SEQ ID NO: 2231086 - RNA, 20 nt, Human
caugcugagucucccaaggc

SEQ ID NO: 2231087 - RNA, 12 nt, Human
caugcugccucc

SEQ ID NO: 2231088 - RNA, 22 nt, Human
cauggccuuugcuugaaagaaa

SEQ ID NO: 2231089 - RNA, 19 nt, Human
cauggccuuugcuugaaag

SEQ ID NO: 2231090 - RNA, 16 nt, Human
caugcugcccugugag

SEQ ID NO: 2231091 - RNA, 18 nt, Human
caugcugcccugugagua

SEQ ID NO: 2231092 - RNA, 21 nt, Human
caugcugagucucccaaggcu

SEQ ID NO: 2231093 - RNA, 21 nt, Human
caugauucgcccaaagccaga

SEQ ID NO: 2231094 - RNA, 14 nt, Human
caugauucuauuua

SEQ ID NO: 2231095 - RNA, 19 nt, Human
caugauuccuuccuguucu

SEQ ID NO: 2231096 - RNA, 16 nt, Human
caugauuccuuccugu

SEQ ID NO: 2231097 - RNA, 14 nt, Human
caugauuccuuccu

SEQ ID NO: 2231098 - RNA, 18 nt, Human
caugauucauuuuaacau

SEQ ID NO: 2231099 - RNA, 18 nt, Human
caugcaaggucauuuuuu

SEQ ID NO: 2231100 - RNA, 17 nt, Human
caugcaaggucauuuuu

SEQ ID NO: 2231101 - RNA, 16 nt, Human
caugcaaugacaucuu

SEQ ID NO: 2231102 - RNA, 15 nt, Human
caugcugaggccugg

SEQ ID NO: 2231103 - RNA, 16 nt, Human
caugcugaggccuggg

SEQ ID NO: 2231104 - RNA, 17 nt, Human
caugcugaggccugggc

SEQ ID NO: 2231105 - RNA, 18 nt, Human
caugcugaggccugggcc

SEQ ID NO: 2231106 - RNA, 19 nt, Human
caugcugaggccugggccg

SEQ ID NO: 2231107 - RNA, 14 nt, Human
caugcugagucucc

SEQ ID NO: 2231108 - RNA, 15 nt, Human
caugcugagucuccc

SEQ ID NO: 2231109 - RNA, 17 nt, Human
caugcugagucucccaa

SEQ ID NO: 2231110 - RNA, 19 nt, Human
caugcugagucucccaagg

SEQ ID NO: 2231111 - RNA, 22 nt, Human
caugcaaggucauuuuuuuuaa

SEQ ID NO: 2231112 - RNA, 23 nt, Human
cauugggaaggggacccccgccc

SEQ ID NO: 2231113 - RNA, 19 nt, Human
cauugggcagcgcccuucc

SEQ ID NO: 2231114 - RNA, 20 nt, Human
cauugggcagcgcccuuccu

SEQ ID NO: 2231115 - RNA, 22 nt, Human
cauugggcagcgcccuuccucu

SEQ ID NO: 2231116 - RNA, 23 nt, Human
cauugggcagcgcccuuccucuc

SEQ ID NO: 2231117 - RNA, 16 nt, Human
cauuuauucugcucac

SEQ ID NO: 2231118 - RNA, 22 nt, Human
cauuggcucuugaacugagcuu

SEQ ID NO: 2231119 - RNA, 14 nt, Human
cauuggcuauuuaa

SEQ ID NO: 2231120 - RNA, 18 nt, Human
cauuggcuauuuaaaacu

SEQ ID NO: 2231121 - RNA, 13 nt, Human
cauuggcuuuauc

SEQ ID NO: 2231122 - RNA, 22 nt, Human
cauuggcuuuauccucuuuaga

SEQ ID NO: 2231123 - RNA, 19 nt, Human
cauuggcuauuuaaaacuu

SEQ ID NO: 2231124 - RNA, 24 nt, Human
cauuggcagcaggugcugcuaccc

SEQ ID NO: 2231125 - RNA, 15 nt, Human
cauuggcugagagac

SEQ ID NO: 2231126 - RNA, 15 nt, Human
cauugcugguucuau

SEQ ID NO: 2231127 - RNA, 21 nt, Human
cauugcugguucuauuuaaug

SEQ ID NO: 2231128 - RNA, 22 nt, Human
cauugcugugaauuagcucacu

SEQ ID NO: 2231129 - RNA, 20 nt, Human
cauuggcaccuaauccaggc

SEQ ID NO: 2231130 - RNA, 21 nt, Human
cauugcuguugucccucugcu

SEQ ID NO: 2231131 - RNA, 17 nt, Human
cauugcuuacacggaug

SEQ ID NO: 2231132 - RNA, 21 nt, Human
cauuggcaccuaauccaggca

SEQ ID NO: 2231133 - RNA, 14 nt, Human
cauuggcagcaggu

SEQ ID NO: 2231134 - RNA, 16 nt, Human
cauuggcagcaggugc

SEQ ID NO: 2231135 - RNA, 17 nt, Human
cauuggcagcaggugcu

SEQ ID NO: 2231136 - RNA, 20 nt, Human
cauuggcagcaggugcugcu

SEQ ID NO: 2231137 - RNA, 21 nt, Human
cauuggcagcaggugcugcua

SEQ ID NO: 2231138 - RNA, 23 nt, Human
cauuggcagcaggugcugcuacc

SEQ ID NO: 2231139 - RNA, 17 nt, Human
cauuuauuuuuuacauu

SEQ ID NO: 2231140 - RNA, 19 nt, Human
cauuuauuuuuuacauuau

SEQ ID NO: 2231141 - RNA, 18 nt, Human
cauuuauuuuucucauga

SEQ ID NO: 2231142 - RNA, 13 nt, Human
cauuuauuuguga

SEQ ID NO: 2231143 - RNA, 13 nt, Human
cauuucaccccuc

SEQ ID NO: 2231144 - RNA, 14 nt, Human
cauuucaccccucc

SEQ ID NO: 2231145 - RNA, 15 nt, Human
cauuucaccccuccc

SEQ ID NO: 2231146 - RNA, 16 nt, Human
cauuucaccccucccu

SEQ ID NO: 2231147 - RNA, 15 nt, Human
cauuucaacuguuug

SEQ ID NO: 2231148 - RNA, 16 nt, Human
cauuucaauucucaaa

SEQ ID NO: 2231149 - RNA, 13 nt, Human
cauuucauuguau

SEQ ID NO: 2231150 - RNA, 16 nt, Human
cauuucauuguaugau

SEQ ID NO: 2231151 - RNA, 18 nt, Human
cauuucauuugugccaga

SEQ ID NO: 2231152 - RNA, 14 nt, Human
cauuucauuuccua

SEQ ID NO: 2231153 - RNA, 18 nt, Human
cauuucauuguaugaugu

SEQ ID NO: 2231154 - RNA, 20 nt, Human
cauuucauuguaugaugugu

SEQ ID NO: 2231155 - RNA, 18 nt, Human
cauuucaaaugugcuguc

SEQ ID NO: 2231156 - RNA, 23 nt, Human
cauuucaccccucccuuucuccc

SEQ ID NO: 2231157 - RNA, 21 nt, Human
cauuucaccccucccuuucuc

SEQ ID NO: 2231158 - RNA, 22 nt, Human
cauuucaccccucccuuucucc

SEQ ID NO: 2231159 - RNA, 17 nt, Human
cauuucaccccucccuu

SEQ ID NO: 2231160 - RNA, 18 nt, Human
cauuucaccccucccuuu

SEQ ID NO: 2231161 - RNA, 19 nt, Human
cauuucaccccucccuuuc

SEQ ID NO: 2231162 - RNA, 20 nt, Human
cauuucaccccucccuuucu

SEQ ID NO: 2231163 - RNA, 17 nt, Human
cauuuccaaauucacaa

SEQ ID NO: 2231164 - RNA, 23 nt, Human
cauuucauuguaugauguguugu

SEQ ID NO: 2231165 - RNA, 17 nt, Human
cauuuccaaaugaauga

SEQ ID NO: 2231166 - RNA, 21 nt, Human
cauuuccaaaugaaugaccuu

SEQ ID NO: 2231167 - RNA, 13 nt, Human
cauuuccaacacc

SEQ ID NO: 2231168 - RNA, 18 nt, Human
cauuuccaacaccacaga

SEQ ID NO: 2231169 - RNA, 19 nt, Human
cauuuccaacaccacagac

SEQ ID NO: 2231170 - RNA, 12 nt, Human
cauuuccaagca

SEQ ID NO: 2231171 - RNA, 23 nt, Human
cauuuggugguuucagaaaugug

SEQ ID NO: 2231172 - RNA, 22 nt, Human
cauuuggugguuucagaaaugu

SEQ ID NO: 2231173 - RNA, 18 nt, Human
cauuuuugaauacaggca

SEQ ID NO: 2231174 - RNA, 20 nt, Human
cauuuuugaauacaggcaua

SEQ ID NO: 2231175 - RNA, 22 nt, Human
cauuuccaacaccacagacaca

SEQ ID NO: 2231176 - RNA, 17 nt, Human
cauuuuugauuuaugca

SEQ ID NO: 2231177 - RNA, 12 nt, Human
cauuuuuguaca

SEQ ID NO: 2231178 - RNA, 13 nt, Human
cauuuuuguacag

SEQ ID NO: 2231179 - RNA, 14 nt, Human
cauuuuuguacagu

SEQ ID NO: 2231180 - RNA, 20 nt, Human
cauuuuuguacaguuugcug

SEQ ID NO: 2231181 - RNA, 21 nt, Human
cauuuuuguacaguuugcugu

SEQ ID NO: 2231182 - RNA, 23 nt, Human
cauuuuucuuagggaaggauaca

SEQ ID NO: 2231183 - RNA, 21 nt, Human
cauuugguucauuaauucuau

SEQ ID NO: 2231184 - RNA, 20 nt, Human
cauuugguucauuaauucua

SEQ ID NO: 2231185 - RNA, 16 nt, Human
cauuugguucauuaau

SEQ ID NO: 2231186 - RNA, 20 nt, Human
cauuuccaacaccacagaca

SEQ ID NO: 2231187 - RNA, 21 nt, Human
cauuuccaacaccacagacac

SEQ ID NO: 2231188 - RNA, 12 nt, Human
ccaaaacaaaca

SEQ ID NO: 2231189 - RNA, 19 nt, Human
ccaaaaagauuuucagaaa

SEQ ID NO: 2231190 - RNA, 15 nt, Human
ccaaaaccacagccc

SEQ ID NO: 2231191 - RNA, 18 nt, Human
ccaaaacaaacaaacaga

SEQ ID NO: 2231192 - RNA, 17 nt, Human
ccaaaacucuccucugc

SEQ ID NO: 2231193 - RNA, 15 nt, Human
ccaaaaagaccagac

SEQ ID NO: 2231194 - RNA, 16 nt, Human
ccaaaaagaccagacu

SEQ ID NO: 2231195 - RNA, 17 nt, Human
ccaaaaagaccagacua

SEQ ID NO: 2231196 - RNA, 22 nt, Human
ccaaaaaauucuacaacacaca

SEQ ID NO: 2231197 - RNA, 20 nt, Human
ccaaaaaauucuacaacaca

SEQ ID NO: 2231198 - RNA, 17 nt, Human
ccaaaaaaugcuugcuu

SEQ ID NO: 2231199 - RNA, 20 nt, Human
cauuuuuguauuuuguuuaa

SEQ ID NO: 2231200 - RNA, 22 nt, Human
cauuuuuguuucuaccucccag

SEQ ID NO: 2231201 - RNA, 23 nt, Human
cauuuuuguuucuaccucccaga

SEQ ID NO: 2231202 - RNA, 13 nt, Human
cauuuuuguauuu

SEQ ID NO: 2231203 - RNA, 22 nt, Human
cauuuuuguacaguuugcugua

SEQ ID NO: 2231204 - RNA, 13 nt, Human
cauugccuuuucu

SEQ ID NO: 2231205 - RNA, 21 nt, Human
cauugccuuaacuggagcccc

SEQ ID NO: 2231206 - RNA, 21 nt, Human
cauugcgcucuagccugggca

SEQ ID NO: 2231207 - RNA, 15 nt, Human
cauugcuaagaugcu

SEQ ID NO: 2231208 - RNA, 23 nt, Human
cauugcguuugaccuuuuaugua

SEQ ID NO: 2231209 - RNA, 15 nt, Human
cauugcugagccucu

SEQ ID NO: 2231210 - RNA, 14 nt, Human
cauugcugagccuc

SEQ ID NO: 2231211 - RNA, 16 nt, Human
cauugcuaagaugcuc

SEQ ID NO: 2231212 - RNA, 16 nt, Human
cauugcugaaaauggu

SEQ ID NO: 2231213 - RNA, 22 nt, Human
cauugcugaaaaugguauuuuc

SEQ ID NO: 2231214 - RNA, 18 nt, Human
cauugcugggcuugucug

SEQ ID NO: 2231215 - RNA, 21 nt, Human
cauugcugagccucugcuccc

SEQ ID NO: 2231216 - RNA, 18 nt, Human
cauugcugagccucugcu

SEQ ID NO: 2231217 - RNA, 17 nt, Human
cauugcugagccucugc

SEQ ID NO: 2231218 - RNA, 16 nt, Human
cauugcugagccucug

SEQ ID NO: 2231219 - RNA, 14 nt, Human
cauugcggacagcc

SEQ ID NO: 2231220 - RNA, 15 nt, Human
cauugcggacagcca

SEQ ID NO: 2231221 - RNA, 17 nt, Human
cauugcggacagccacg

SEQ ID NO: 2231222 - RNA, 21 nt, Human
cauugcggacagccacggcca

SEQ ID NO: 2231223 - RNA, 17 nt, Human
cauugccuuaacuggag

SEQ ID NO: 2231224 - RNA, 15 nt, Human
cauucucccagguac

SEQ ID NO: 2231225 - RNA, 23 nt, Human
cauucucccagguaccagcugcg

SEQ ID NO: 2231226 - RNA, 12 nt, Human
cauucucccagg

SEQ ID NO: 2231227 - RNA, 19 nt, Human
cauucucauggagaaguua

SEQ ID NO: 2231228 - RNA, 16 nt, Human
cauucuccuuguguua

SEQ ID NO: 2231229 - RNA, 22 nt, Human
cauucuccugccuguagcagug

SEQ ID NO: 2231230 - RNA, 23 nt, Human
cauucuccugccuguagcaguga

SEQ ID NO: 2231231 - RNA, 21 nt, Human
cauucucccagguaccagcug

SEQ ID NO: 2231232 - RNA, 11 nt, Human
cauucuccugc

SEQ ID NO: 2231233 - RNA, 13 nt, Human
cauucuccugccu

SEQ ID NO: 2231234 - RNA, 15 nt, Human
cauucuccugccugu

SEQ ID NO: 2231235 - RNA, 15 nt, Human
cauucucauggagaa

SEQ ID NO: 2231236 - RNA, 16 nt, Human
cauucucauggagaag

SEQ ID NO: 2231237 - RNA, 17 nt, Human
cauucucacuccuaccu

SEQ ID NO: 2231238 - RNA, 16 nt, Human
cauucucacuccuacc

SEQ ID NO: 2231239 - RNA, 22 nt, Human
cauuaugaugugggucaaggaa

SEQ ID NO: 2231240 - RNA, 23 nt, Human
cauuaugaugugggucaaggaau

SEQ ID NO: 2231241 - RNA, 19 nt, Human
cauuaggacaaucaguccc

SEQ ID NO: 2231242 - RNA, 22 nt, Human
cauuaggacaaucaguccccuc

SEQ ID NO: 2231243 - RNA, 18 nt, Human
cauuaucuagauacugua

SEQ ID NO: 2231244 - RNA, 14 nt, Human
cauuaugauucuuu

SEQ ID NO: 2231245 - RNA, 17 nt, Human
cauuauguaaaauguuu

SEQ ID NO: 2231246 - RNA, 20 nt, Human
cauuauguaaaauguuuuag

SEQ ID NO: 2231247 - RNA, 17 nt, Human
cauuauguccacugugu

SEQ ID NO: 2231248 - RNA, 19 nt, Human
cauuauguccacuguguau

SEQ ID NO: 2231249 - RNA, 20 nt, Human
cauuauguccacuguguaua

SEQ ID NO: 2231250 - RNA, 21 nt, Human
cauuauguccacuguguauag

SEQ ID NO: 2231251 - RNA, 22 nt, Human
cauuauguccacuguguauaga

SEQ ID NO: 2231252 - RNA, 13 nt, Human
cauuaugauucuu

SEQ ID NO: 2231253 - RNA, 21 nt, Human
cauuaugaugugggucaagga

SEQ ID NO: 2231254 - RNA, 13 nt, Human
cauuaugaugugu

SEQ ID NO: 2231255 - RNA, 17 nt, Human
cauggcugccaauggga

SEQ ID NO: 2231256 - RNA, 22 nt, Human
cauggcugccaaugggagcuca

SEQ ID NO: 2231257 - RNA, 19 nt, Human
cauggcgugucccucucgg

SEQ ID NO: 2231258 - RNA, 14 nt, Human
cauggcgugucccu

SEQ ID NO: 2231259 - RNA, 16 nt, Human
cauggcuaacuggcga

SEQ ID NO: 2231260 - RNA, 14 nt, Human
cauggcuaacuggc

SEQ ID NO: 2231261 - RNA, 13 nt, Human
cauguuccucaaa

SEQ ID NO: 2231262 - RNA, 15 nt, Human
cauguuccacuaacc

SEQ ID NO: 2231263 - RNA, 16 nt, Human
cauguuccacuaaccc

SEQ ID NO: 2231264 - RNA, 21 nt, Human
cauguuccucaaaagcacccu

SEQ ID NO: 2231265 - RNA, 12 nt, Human
cauguuccuuca

SEQ ID NO: 2231266 - RNA, 13 nt, Human
cauguuccuucaa

SEQ ID NO: 2231267 - RNA, 20 nt, Human
cauguucacaccgcugcacu

SEQ ID NO: 2231268 - RNA, 22 nt, Human
cauguucacaccgcugcacuca

SEQ ID NO: 2231269 - RNA, 14 nt, Human
cauguuccaauaaa

SEQ ID NO: 2231270 - RNA, 16 nt, Human
cauguuccaauaaaca

SEQ ID NO: 2231271 - RNA, 17 nt, Human
cauguuccaauaaacag

SEQ ID NO: 2231272 - RNA, 19 nt, Human
cauguuccaauaaacagga

SEQ ID NO: 2231273 - RNA, 15 nt, Human
cauggcuuccuccuc

SEQ ID NO: 2231274 - RNA, 13 nt, Human
cauggcuuccucc

SEQ ID NO: 2231275 - RNA, 14 nt, Human
cauggcuuccuccu

SEQ ID NO: 2231276 - RNA, 18 nt, Human
cauggcuuaaugcuucuu

SEQ ID NO: 2231277 - RNA, 15 nt, Human
cauggcuuaauguuu

SEQ ID NO: 2231278 - RNA, 17 nt, Human
cauggcuuaauguuuau

SEQ ID NO: 2231279 - RNA, 20 nt, Human
cauggcuuaauguuuauucc

SEQ ID NO: 2231280 - RNA, 21 nt, Human
cauggcugggaacugcagacc

SEQ ID NO: 2231281 - RNA, 23 nt, Human
cauggcugggaacugcagaccug

SEQ ID NO: 2231282 - RNA, 24 nt, Human
cauggcugggaacugcagaccugu

SEQ ID NO: 2231283 - RNA, 14 nt, Human
cauggcugugagga

SEQ ID NO: 2231284 - RNA, 17 nt, Human
cauggcuuaaugcuucu

SEQ ID NO: 2231285 - RNA, 15 nt, Human
cauguucucugagga

SEQ ID NO: 2231286 - RNA, 18 nt, Human
cauuagcaguuugcuuug

SEQ ID NO: 2231287 - RNA, 14 nt, Human
cauguuccuucaag

SEQ ID NO: 2231288 - RNA, 16 nt, Human
cauguuccuucaagau

SEQ ID NO: 2231289 - RNA, 20 nt, Human
cauguuccuucaagaucaug

SEQ ID NO: 2231290 - RNA, 23 nt, Human
cauguuccuucaagaucauguac

SEQ ID NO: 2231291 - RNA, 9 nt, Human
cauuagccu

SEQ ID NO: 2231292 - RNA, 14 nt, Human
cauuagccugagua

SEQ ID NO: 2231293 - RNA, 17 nt, Human
cauuagccugaguagaa

SEQ ID NO: 2231294 - RNA, 18 nt, Human
cauuagccugaguagaaa

SEQ ID NO: 2231295 - RNA, 19 nt, Human
cauuagccugaguagaaag

SEQ ID NO: 2231296 - RNA, 23 nt, Human
cauuagccugaguagaaaggccu

SEQ ID NO: 2231297 - RNA, 21 nt, Human
cauuaggaauuaaguuaucuu

SEQ ID NO: 2231298 - RNA, 17 nt, Human
cauuaucuagauacugu

SEQ ID NO: 2231299 - RNA, 16 nt, Human
cauuaucuagauacug

SEQ ID NO: 2231300 - RNA, 12 nt, Human
cauuaucuagau

SEQ ID NO: 2231301 - RNA, 15 nt, Human
cauuaggauggcuag

SEQ ID NO: 2231302 - RNA, 13 nt, Human
ccacccugggacc

SEQ ID NO: 2231303 - RNA, 12 nt, Human
ccacccugggcc

SEQ ID NO: 2231304 - RNA, 12 nt, Human
ccacccugggac

SEQ ID NO: 2231305 - RNA, 10 nt, Human
ccacccuggg

SEQ ID NO: 2231306 - RNA, 11 nt, Human
ccacccuggaa

SEQ ID NO: 2231307 - RNA, 20 nt, Human
ccacccuggccgaguccaag

SEQ ID NO: 2231308 - RNA, 22 nt, Human
ccacccuggccgaguccaagcu

SEQ ID NO: 2231309 - RNA, 21 nt, Human
ccacccuggccgaguccaagc

SEQ ID NO: 2231310 - RNA, 14 nt, Human
ccaccgcagacagg

SEQ ID NO: 2231311 - RNA, 17 nt, Human
ccaccgcagacaggacc

SEQ ID NO: 2231312 - RNA, 20 nt, Human
ccaccaggcugcucagggcu

SEQ ID NO: 2231313 - RNA, 18 nt, Human
ccaccaucaccagacagg

SEQ ID NO: 2231314 - RNA, 20 nt, Human
ccaccaucaagccaccaaca

SEQ ID NO: 2231315 - RNA, 13 nt, Human
ccacccugcucuc

SEQ ID NO: 2231316 - RNA, 21 nt, Human
ccaccaggccaccuccccagc

SEQ ID NO: 2231317 - RNA, 22 nt, Human
ccaccgggcugggagcucugca

SEQ ID NO: 2231318 - RNA, 13 nt, Human
ccacccugggccc

SEQ ID NO: 2231319 - RNA, 18 nt, Human
ccaccgcagacaggacca

SEQ ID NO: 2231320 - RNA, 23 nt, Human
ccaccgggcugggagcucugcag

SEQ ID NO: 2231321 - RNA, 13 nt, Human
ccaccguccgccc

SEQ ID NO: 2231322 - RNA, 14 nt, Human
ccaccguccgcccu

SEQ ID NO: 2231323 - RNA, 15 nt, Human
ccaccguccgcccug

SEQ ID NO: 2231324 - RNA, 16 nt, Human
ccaccguccgcccugc

SEQ ID NO: 2231325 - RNA, 17 nt, Human
ccaccguccgcccugcu

SEQ ID NO: 2231326 - RNA, 23 nt, Human
ccaccuacuuuucuuuccucaga

SEQ ID NO: 2231327 - RNA, 13 nt, Human
ccaccuuggcuca

SEQ ID NO: 2231328 - RNA, 16 nt, Human
ccaccguggaggagga

SEQ ID NO: 2231329 - RNA, 17 nt, Human
ccaccuaaucaggcuga

SEQ ID NO: 2231330 - RNA, 18 nt, Human
ccaccguccgcccugcuc

SEQ ID NO: 2231331 - RNA, 19 nt, Human
ccaccguccgcccugcucc

SEQ ID NO: 2231332 - RNA, 20 nt, Human
ccaccguccgcccugcuccu

SEQ ID NO: 2231333 - RNA, 13 nt, Human
ccaccguggagga

SEQ ID NO: 2231334 - RNA, 14 nt, Human
ccaccuuggcucaa

SEQ ID NO: 2231335 - RNA, 15 nt, Human
ccaccuuggcucaag

SEQ ID NO: 2231336 - RNA, 23 nt, Human
ccaccagacugacaaauguguau

SEQ ID NO: 2231337 - RNA, 23 nt, Human
ccaccacuggccaccaggcuggc

SEQ ID NO: 2231338 - RNA, 17 nt, Human
ccaccagagaccguccu

SEQ ID NO: 2231339 - RNA, 20 nt, Human
ccaccagagaccguccucac

SEQ ID NO: 2231340 - RNA, 21 nt, Human
ccaccagagaccguccucacc

SEQ ID NO: 2231341 - RNA, 22 nt, Human
ccaccagagaccguccucaccc

SEQ ID NO: 2231342 - RNA, 12 nt, Human
ccaccagagcug

SEQ ID NO: 2231343 - RNA, 14 nt, Human
ccaccagccugcac

SEQ ID NO: 2231344 - RNA, 11 nt, Human
ccaccagccug

SEQ ID NO: 2231345 - RNA, 18 nt, Human
ccaccagaagcccagaau

SEQ ID NO: 2231346 - RNA, 16 nt, Human
ccaccagaagcccaga

SEQ ID NO: 2231347 - RNA, 15 nt, Human
ccaccagaagcccag

SEQ ID NO: 2231348 - RNA, 14 nt, Human
ccaccagaagccca

SEQ ID NO: 2231349 - RNA, 14 nt, Human
ccaccaggagaacc

SEQ ID NO: 2231350 - RNA, 13 nt, Human
ccaccaggagaac

SEQ ID NO: 2231351 - RNA, 16 nt, Human
ccaccaggaaccucuu

SEQ ID NO: 2231352 - RNA, 14 nt, Human
ccaccaggaaccuc

SEQ ID NO: 2231353 - RNA, 19 nt, Human
ccaccaggagaaccacuac

SEQ ID NO: 2231354 - RNA, 18 nt, Human
ccaccaggaaccucuuca

SEQ ID NO: 2231355 - RNA, 18 nt, Human
ccaccaggaucccagggg

SEQ ID NO: 2231356 - RNA, 13 nt, Human
ccaccaggccacc

SEQ ID NO: 2231357 - RNA, 19 nt, Human
ccaccaggccaccucccca

SEQ ID NO: 2231358 - RNA, 16 nt, Human
ccaccaucaagccacc

SEQ ID NO: 2231359 - RNA, 17 nt, Human
ccaccaucaagccacca

SEQ ID NO: 2231360 - RNA, 21 nt, Human
ccacacuuguuccagcucuuu

SEQ ID NO: 2231361 - RNA, 20 nt, Human
ccacacuuguuccagcucuu

SEQ ID NO: 2231362 - RNA, 17 nt, Human
ccacagaagccaggagc

SEQ ID NO: 2231363 - RNA, 17 nt, Human
ccacacuugagaggaug

SEQ ID NO: 2231364 - RNA, 13 nt, Human
ccaccagaagccc

SEQ ID NO: 2231365 - RNA, 12 nt, Human
ccaccagaagcc

SEQ ID NO: 2231366 - RNA, 11 nt, Human
ccaccagaagc

SEQ ID NO: 2231367 - RNA, 19 nt, Human
ccacacuugagaggaugaa

SEQ ID NO: 2231368 - RNA, 18 nt, Human
ccacagaagccaggagca

SEQ ID NO: 2231369 - RNA, 19 nt, Human
ccaccacuggccaccaggc

SEQ ID NO: 2231370 - RNA, 20 nt, Human
ccaccacuggccaccaggcu

SEQ ID NO: 2231371 - RNA, 21 nt, Human
ccaccacuggccaccaggcug

SEQ ID NO: 2231372 - RNA, 18 nt, Human
ccacacuuccuguccaga

SEQ ID NO: 2231373 - RNA, 16 nt, Human
ccacacuuccugucca

SEQ ID NO: 2231374 - RNA, 13 nt, Human
ccacacuuccugu

SEQ ID NO: 2231375 - RNA, 12 nt, Human
ccacacuuccug

SEQ ID NO: 2231376 - RNA, 21 nt, Human
ccacacuuccuguccagagag

SEQ ID NO: 2231377 - RNA, 20 nt, Human
ccacacuuccuguccagaga

SEQ ID NO: 2231378 - RNA, 22 nt, Human
ccacacuucaggcucuucuccu

SEQ ID NO: 2231379 - RNA, 13 nt, Human
ccaaugccaaaaa

SEQ ID NO: 2231380 - RNA, 17 nt, Human
ccaaugcaugcagccac

SEQ ID NO: 2231381 - RNA, 21 nt, Human
ccaaugcaugcagccacugug

SEQ ID NO: 2231382 - RNA, 23 nt, Human
ccaaugcaugcagccacugugcu

SEQ ID NO: 2231383 - RNA, 20 nt, Human
ccaauguucucucuucucca

SEQ ID NO: 2231384 - RNA, 15 nt, Human
ccaauuaaccagaaa

SEQ ID NO: 2231385 - RNA, 18 nt, Human
ccaauuaaggauuuuaug

SEQ ID NO: 2231386 - RNA, 13 nt, Human
ccaauuaaggauu

SEQ ID NO: 2231387 - RNA, 23 nt, Human
ccaauuaggaaguguaacagcug

SEQ ID NO: 2231388 - RNA, 17 nt, Human
ccaauuaggaaguguaa

SEQ ID NO: 2231389 - RNA, 22 nt, Human
ccaauuaaggauuuuaugcuuu

SEQ ID NO: 2231390 - RNA, 22 nt, Human
ccaauuauaugagacguuuuug

SEQ ID NO: 2231391 - RNA, 17 nt, Human
ccaagcuuccuuuguuu

SEQ ID NO: 2231392 - RNA, 22 nt, Human
ccaagcugugccacccugggcu

SEQ ID NO: 2231393 - RNA, 18 nt, Human
ccaagcuguuuucuucua

SEQ ID NO: 2231394 - RNA, 17 nt, Human
ccaagcuguuuucuucu

SEQ ID NO: 2231395 - RNA, 14 nt, Human
ccaagcuguuuucu

SEQ ID NO: 2231396 - RNA, 16 nt, Human
ccaagcugugccaccc

SEQ ID NO: 2231397 - RNA, 17 nt, Human
ccaagcugugccacccu

SEQ ID NO: 2231398 - RNA, 18 nt, Human
ccaagcugugccacccug

SEQ ID NO: 2231399 - RNA, 21 nt, Human
ccaagcugugccacccugggc

SEQ ID NO: 2231400 - RNA, 20 nt, Human
ccaagcuggucccacucagu

SEQ ID NO: 2231401 - RNA, 13 nt, Human
ccaagcugugcca

SEQ ID NO: 2231402 - RNA, 22 nt, Human
ccaacuuuguggaugucuuccu

SEQ ID NO: 2231403 - RNA, 14 nt, Human
ccaagcugugccac

SEQ ID NO: 2231404 - RNA, 15 nt, Human
ccaagcugugccacc

SEQ ID NO: 2231405 - RNA, 13 nt, Human
ccaacuuucugua

SEQ ID NO: 2231406 - RNA, 14 nt, Human
ccaacuuucuguaa

SEQ ID NO: 2231407 - RNA, 17 nt, Human
ccaacuuucuguaaacu

SEQ ID NO: 2231408 - RNA, 23 nt, Human
ccaagcuuguccaacccgaggcc

SEQ ID NO: 2231409 - RNA, 17 nt, Human
ccaagcuuggcagccga

SEQ ID NO: 2231410 - RNA, 15 nt, Human
ccaagcuuggcagcc

SEQ ID NO: 2231411 - RNA, 16 nt, Human
ccaagcuuggcagccg

SEQ ID NO: 2231412 - RNA, 23 nt, Human
ccaaugcacuuuguucuggcucu

SEQ ID NO: 2231413 - RNA, 20 nt, Human
ccaaugcacuuuguucuggc

SEQ ID NO: 2231414 - RNA, 22 nt, Human
ccaaugcacuuuguucuggcuc

SEQ ID NO: 2231415 - RNA, 19 nt, Human
ccaaagugguauagaaaug

SEQ ID NO: 2231416 - RNA, 22 nt, Human
ccaaagugcugggauuacaggu

SEQ ID NO: 2231417 - RNA, 15 nt, Human
ccaaauccccuaagc

SEQ ID NO: 2231418 - RNA, 24 nt, Human
ccaaauccgaaccuccucugugaa

SEQ ID NO: 2231419 - RNA, 22 nt, Human
ccaaauccgaaccuccucugug

SEQ ID NO: 2231420 - RNA, 21 nt, Human
ccaaauccgaaccuccucugu

SEQ ID NO: 2231421 - RNA, 17 nt, Human
ccaaauccgaaccuccu

SEQ ID NO: 2231422 - RNA, 23 nt, Human
ccaaauccgaaccuccucuguga

SEQ ID NO: 2231423 - RNA, 13 nt, Human
ccaaauccucucc

SEQ ID NO: 2231424 - RNA, 18 nt, Human
ccaaauccucuccagcua

SEQ ID NO: 2231425 - RNA, 14 nt, Human
ccaaaucuggaagc

SEQ ID NO: 2231426 - RNA, 16 nt, Human
ccaaaugaaugaccuu

SEQ ID NO: 2231427 - RNA, 22 nt, Human
ccaaaugagggucuugguucca

SEQ ID NO: 2231428 - RNA, 18 nt, Human
ccaaauguucaucaauga

SEQ ID NO: 2231429 - RNA, 11 nt, Human
ccaaauuauuu

SEQ ID NO: 2231430 - RNA, 19 nt, Human
ccaaauguuuacagggagc

SEQ ID NO: 2231431 - RNA, 18 nt, Human
ccaaauguuuacagggag

SEQ ID NO: 2231432 - RNA, 23 nt, Human
ccaaauguuuacagggagccucc

SEQ ID NO: 2231433 - RNA, 15 nt, Human
ccaacguggggcagc

SEQ ID NO: 2231434 - RNA, 16 nt, Human
ccaacguggggcagca

SEQ ID NO: 2231435 - RNA, 16 nt, Human
ccaacgucugugccau

SEQ ID NO: 2231436 - RNA, 12 nt, Human
ccaaauuauuug

SEQ ID NO: 2231437 - RNA, 14 nt, Human
ccaaauuauuugug

SEQ ID NO: 2231438 - RNA, 17 nt, Human
ccaaauuauuuguguaa

SEQ ID NO: 2231439 - RNA, 18 nt, Human
ccaaauuauuuguguaau

SEQ ID NO: 2231440 - RNA, 20 nt, Human
ccaacguggggcagcacaga

SEQ ID NO: 2231441 - RNA, 20 nt, Human
ccaacuaaugccuuacucuu

SEQ ID NO: 2231442 - RNA, 19 nt, Human
ccaacuaaugccuuacucu

SEQ ID NO: 2231443 - RNA, 19 nt, Human
ccaacuaacaagaaacuca

SEQ ID NO: 2231444 - RNA, 16 nt, Human
ccaacuacaaccaagc

SEQ ID NO: 2231445 - RNA, 22 nt, Human
ccaacuacaaccaagcucucug

SEQ ID NO: 2231446 - RNA, 23 nt, Human
ccaacuacaaccaagcucucugc

SEQ ID NO: 2231447 - RNA, 13 nt, Human
ccaacuucccagu

SEQ ID NO: 2231448 - RNA, 21 nt, Human
ccaacuucauuugaugcuaaa

SEQ ID NO: 2231449 - RNA, 19 nt, Human
ccaacuucuucagagcuga

SEQ ID NO: 2231450 - RNA, 18 nt, Human
ccaacuucuucagagcug

SEQ ID NO: 2231451 - RNA, 19 nt, Human
ccaacuugagggcccagag

SEQ ID NO: 2231452 - RNA, 16 nt, Human
ccaacuagacauucug

SEQ ID NO: 2231453 - RNA, 17 nt, Human
ccaacuagacauucugu

SEQ ID NO: 2231454 - RNA, 18 nt, Human
ccaacuagacauucuguc

SEQ ID NO: 2231455 - RNA, 23 nt, Human
ccaacuuguauuaaagacagagg

SEQ ID NO: 2231456 - RNA, 17 nt, Human
ccaacuuguaaauacac

SEQ ID NO: 2231457 - RNA, 14 nt, Human
ccaacuuggcuuuc

SEQ ID NO: 2231458 - RNA, 11 nt, Human
ccaacuuguaa

SEQ ID NO: 2231459 - RNA, 13 nt, Human
ccaacuuggcuuu

SEQ ID NO: 2231460 - RNA, 20 nt, Human
ccaacuugagggcccagagc

SEQ ID NO: 2231461 - RNA, 21 nt, Human
ccaacuugagggcccagagca

SEQ ID NO: 2231462 - RNA, 22 nt, Human
ccaaagugcugggauuacaggg

SEQ ID NO: 2231463 - RNA, 22 nt, Human
ccaaagugcugggauuacaggc

SEQ ID NO: 2231464 - RNA, 19 nt, Human
ccaaagugcugggauuaca

SEQ ID NO: 2231465 - RNA, 14 nt, Human
ccaaaacuccugcc

SEQ ID NO: 2231466 - RNA, 13 nt, Human
caauuuaaagcaa

SEQ ID NO: 2231467 - RNA, 21 nt, Human
caauuuacaaaguguguauua

SEQ ID NO: 2231468 - RNA, 18 nt, Human
caauuuacaaagugugua

SEQ ID NO: 2231469 - RNA, 20 nt, Human
caauuuacaaaguguguauu

SEQ ID NO: 2231470 - RNA, 13 nt, Human
caauuuacaaagu

SEQ ID NO: 2231471 - RNA, 14 nt, Human
caauuuacaaagug

SEQ ID NO: 2231472 - RNA, 15 nt, Human
caauuuacaaagugu

SEQ ID NO: 2231473 - RNA, 17 nt, Human
caauuuacaaagugugu

SEQ ID NO: 2231474 - RNA, 20 nt, Human
caauucuucccuaucuuugc

SEQ ID NO: 2231475 - RNA, 21 nt, Human
caauucuucccuaucuuugcc

SEQ ID NO: 2231476 - RNA, 22 nt, Human
caauucuucccuaucuuugcca

SEQ ID NO: 2231477 - RNA, 12 nt, Human
caauucuuuaua

SEQ ID NO: 2231478 - RNA, 13 nt, Human
caauucuuuauac

SEQ ID NO: 2231479 - RNA, 23 nt, Human
caauucuuuauacaacagugcua

SEQ ID NO: 2231480 - RNA, 18 nt, Human
caauugaacuuaaauaaa

SEQ ID NO: 2231481 - RNA, 16 nt, Human
caauucuuuauacaac

SEQ ID NO: 2231482 - RNA, 19 nt, Human
caauucuuuauacaacagu

SEQ ID NO: 2231483 - RNA, 11 nt, Human
caauggcagcc

SEQ ID NO: 2231484 - RNA, 12 nt, Human
caauggcagccu

SEQ ID NO: 2231485 - RNA, 15 nt, Human
caauucuugccaaau

SEQ ID NO: 2231486 - RNA, 13 nt, Human
caauggauuugau

SEQ ID NO: 2231487 - RNA, 17 nt, Human
caauggauuugaugcug

SEQ ID NO: 2231488 - RNA, 19 nt, Human
caauggauuugaugcuguu

SEQ ID NO: 2231489 - RNA, 22 nt, Human
caauggauuugaugcuguuuga

SEQ ID NO: 2231490 - RNA, 20 nt, Human
caauggagacugucucaaga

SEQ ID NO: 2231491 - RNA, 16 nt, Human
caaugcuguauuuuaa

SEQ ID NO: 2231492 - RNA, 17 nt, Human
caaugcuguauuuuaaa

SEQ ID NO: 2231493 - RNA, 15 nt, Human
caaugcuguauuuua

SEQ ID NO: 2231494 - RNA, 20 nt, Human
cacaagagcccagcagggcc

SEQ ID NO: 2231495 - RNA, 23 nt, Human
caauuuauuaaaaugauuguaaa

SEQ ID NO: 2231496 - RNA, 14 nt, Human
caauuuauuaaaau

SEQ ID NO: 2231497 - RNA, 22 nt, Human
caauuuauuaaaaugauuguaa

SEQ ID NO: 2231498 - RNA, 14 nt, Human
cacaagagcccagg

SEQ ID NO: 2231499 - RNA, 21 nt, Human
caauuuauauuuaauaaaauu

SEQ ID NO: 2231500 - RNA, 14 nt, Human
caauuuaugaauug

SEQ ID NO: 2231501 - RNA, 18 nt, Human
cacaagacugcacaucaa

SEQ ID NO: 2231502 - RNA, 16 nt, Human
cacaagagcccaggcc

SEQ ID NO: 2231503 - RNA, 13 nt, Human
cacaagcuccaag

SEQ ID NO: 2231504 - RNA, 14 nt, Human
cacaagcuccaagc

SEQ ID NO: 2231505 - RNA, 15 nt, Human
cacaagcuccaagcu

SEQ ID NO: 2231506 - RNA, 23 nt, Human
cacaagcugcacccucaggcagg

SEQ ID NO: 2231507 - RNA, 17 nt, Human
cacaagcugcacccuca

SEQ ID NO: 2231508 - RNA, 17 nt, Human
cacaagcuccaagcucc

SEQ ID NO: 2231509 - RNA, 23 nt, Human
cacaagcuccaagcucccaggca

SEQ ID NO: 2231510 - RNA, 21 nt, Human
cacaagagcccagcagggccu

SEQ ID NO: 2231511 - RNA, 12 nt, Human
cacaagcuggaa

SEQ ID NO: 2231512 - RNA, 17 nt, Human
cacaagagcccaggccu

SEQ ID NO: 2231513 - RNA, 17 nt, Human
cacacagcucuguccug

SEQ ID NO: 2231514 - RNA, 20 nt, Human
cacacagcucuguccuggga

SEQ ID NO: 2231515 - RNA, 15 nt, Human
cacacagcugcagag

SEQ ID NO: 2231516 - RNA, 16 nt, Human
cacacagcucuguccu

SEQ ID NO: 2231517 - RNA, 13 nt, Human
cacacaggcaacu

SEQ ID NO: 2231518 - RNA, 18 nt, Human
cacacaggacccccuucc

SEQ ID NO: 2231519 - RNA, 19 nt, Human
cacacaggacccccuuccc

SEQ ID NO: 2231520 - RNA, 17 nt, Human
cacacaggacccccuuc

SEQ ID NO: 2231521 - RNA, 18 nt, Human
cacacagcugggcugugg

SEQ ID NO: 2231522 - RNA, 19 nt, Human
cacacaggcaacugaggca

SEQ ID NO: 2231523 - RNA, 16 nt, Human
cacacaggcaacugag

SEQ ID NO: 2231524 - RNA, 20 nt, Human
cacacaggcaacugaggcag

SEQ ID NO: 2231525 - RNA, 20 nt, Human
cacacaggacccccuucccc

SEQ ID NO: 2231526 - RNA, 12 nt, Human
cacacagggcag

SEQ ID NO: 2231527 - RNA, 19 nt, Human
cacacaggggccacccggg

SEQ ID NO: 2231528 - RNA, 18 nt, Human
cacacagugagucgagga

SEQ ID NO: 2231529 - RNA, 23 nt, Human
cacacagggucugcaaggucuuu

SEQ ID NO: 2231530 - RNA, 17 nt, Human
cacacaguauuaaguga

SEQ ID NO: 2231531 - RNA, 21 nt, Human
cacacaguauuaagugacagu

SEQ ID NO: 2231532 - RNA, 20 nt, Human
cacacaguauuacuucugcu

SEQ ID NO: 2231533 - RNA, 23 nt, Human
cacacaguauuacuucugcuaca

SEQ ID NO: 2231534 - RNA, 14 nt, Human
cacacauacacaca

SEQ ID NO: 2231535 - RNA, 21 nt, Human
cacacauauaaacaucacaca

SEQ ID NO: 2231536 - RNA, 23 nt, Human
cacacauauaaacaucacacaca

SEQ ID NO: 2231537 - RNA, 15 nt, Human
cacacauacacacac

SEQ ID NO: 2231538 - RNA, 21 nt, Human
cacacagugagucgaggacag

SEQ ID NO: 2231539 - RNA, 23 nt, Human
cacacagugagucgaggacaggg

SEQ ID NO: 2231540 - RNA, 13 nt, Human
cacacaucaggag

SEQ ID NO: 2231541 - RNA, 17 nt, Human
cacacaugaaguccaag

SEQ ID NO: 2231542 - RNA, 20 nt, Human
cacacaugagcaucaggcca

SEQ ID NO: 2231543 - RNA, 22 nt, Human
cacacaugaaguccaagcauuu

SEQ ID NO: 2231544 - RNA, 18 nt, Human
cacagaaacacaauauuu

SEQ ID NO: 2231545 - RNA, 21 nt, Human
cacagaaacacaauauuuugu

SEQ ID NO: 2231546 - RNA, 13 nt, Human
cacagaaacacaa

SEQ ID NO: 2231547 - RNA, 22 nt, Human
cacagaaaauauacuguaaaga

SEQ ID NO: 2231548 - RNA, 18 nt, Human
cacagacauacuaaccag

SEQ ID NO: 2231549 - RNA, 23 nt, Human
cacagaaaauggaagacagcucu

SEQ ID NO: 2231550 - RNA, 19 nt, Human
cacagaaaauucuucucca

SEQ ID NO: 2231551 - RNA, 11 nt, Human
cacagccucug

SEQ ID NO: 2231552 - RNA, 13 nt, Human
cacagacccugcc

SEQ ID NO: 2231553 - RNA, 21 nt, Human
cacagacauacuaaccagcag

SEQ ID NO: 2231554 - RNA, 19 nt, Human
cacagacauacuaaccagc

SEQ ID NO: 2231555 - RNA, 21 nt, Human
cacacaugagcaucaggccag

SEQ ID NO: 2231556 - RNA, 22 nt, Human
cacacaugagcaucaggccagg

SEQ ID NO: 2231557 - RNA, 21 nt, Human
cacagaaaauauacuguaaag

SEQ ID NO: 2231558 - RNA, 19 nt, Human
cacacaugcauacacacac

SEQ ID NO: 2231559 - RNA, 18 nt, Human
cacacaugcauacacaca

SEQ ID NO: 2231560 - RNA, 17 nt, Human
cacacaugcauacacac

SEQ ID NO: 2231561 - RNA, 16 nt, Human
cacacaugcauacaca

SEQ ID NO: 2231562 - RNA, 15 nt, Human
cacacaugcauacac

SEQ ID NO: 2231563 - RNA, 14 nt, Human
cacacaugcauaca

SEQ ID NO: 2231564 - RNA, 18 nt, Human
cacagaaaauggaagaca

SEQ ID NO: 2231565 - RNA, 19 nt, Human
cacagaaaauggaagacag

SEQ ID NO: 2231566 - RNA, 20 nt, Human
cacagaaaauggaagacagc

SEQ ID NO: 2231567 - RNA, 22 nt, Human
cacagaaaauggaagacagcuc

SEQ ID NO: 2231568 - RNA, 17 nt, Human
cacagcgagacuccguc

SEQ ID NO: 2231569 - RNA, 18 nt, Human
cacagccuucuccacugg

SEQ ID NO: 2231570 - RNA, 22 nt, Human
cacagcgcuggccgggaccccg

SEQ ID NO: 2231571 - RNA, 19 nt, Human
cacagcgcuggccgggacc

SEQ ID NO: 2231572 - RNA, 22 nt, Human
cacaggcccuuccucuccacug

SEQ ID NO: 2231573 - RNA, 18 nt, Human
cacaggcccuuuccucag

SEQ ID NO: 2231574 - RNA, 19 nt, Human
cacaggcccuuuccucagg

SEQ ID NO: 2231575 - RNA, 20 nt, Human
cacaggcccuuuccucaggc

SEQ ID NO: 2231576 - RNA, 22 nt, Human
cacaggcccuuuccucaggcaa

SEQ ID NO: 2231577 - RNA, 23 nt, Human
cacaggcccuuuccucaggcaag

SEQ ID NO: 2231578 - RNA, 23 nt, Human
cacaggcccuuccucuccacugc

SEQ ID NO: 2231579 - RNA, 20 nt, Human
cacagcggagguguggagcc

SEQ ID NO: 2231580 - RNA, 20 nt, Human
cacagacauucugccaggcc

SEQ ID NO: 2231581 - RNA, 18 nt, Human
cacagacauucugccagg

SEQ ID NO: 2231582 - RNA, 12 nt, Human
cacagccucuga

SEQ ID NO: 2231583 - RNA, 13 nt, Human
cacagccucugac

SEQ ID NO: 2231584 - RNA, 14 nt, Human
cacagccucugacc

SEQ ID NO: 2231585 - RNA, 15 nt, Human
cacagccucugaccc

SEQ ID NO: 2231586 - RNA, 17 nt, Human
cacagccucugaccccu

SEQ ID NO: 2231587 - RNA, 20 nt, Human
cacagccucugaccccuccu

SEQ ID NO: 2231588 - RNA, 17 nt, Human
cacagccucuuagaugc

SEQ ID NO: 2231589 - RNA, 22 nt, Human
cacagccucugaccccuccuca

SEQ ID NO: 2231590 - RNA, 23 nt, Human
cacagccucugaccccuccucac

SEQ ID NO: 2231591 - RNA, 21 nt, Human
cacagccucuuagaugcaguu

SEQ ID NO: 2231592 - RNA, 18 nt, Human
cacaggugggcuucccag

SEQ ID NO: 2231593 - RNA, 20 nt, Human
cacaggucuuuccuaaggcu

SEQ ID NO: 2231594 - RNA, 18 nt, Human
cacaggucuuuccuaagg

SEQ ID NO: 2231595 - RNA, 15 nt, Human
cacagggucugcucu

SEQ ID NO: 2231596 - RNA, 14 nt, Human
cacagggucugcac

SEQ ID NO: 2231597 - RNA, 13 nt, Human
cacagggcuaaga

SEQ ID NO: 2231598 - RNA, 22 nt, Human
cacaggccugagauuucaucug

SEQ ID NO: 2231599 - RNA, 23 nt, Human
cacaggccugagauuucaucugc

SEQ ID NO: 2231600 - RNA, 19 nt, Human
cacaggggaaaagaggagu

SEQ ID NO: 2231601 - RNA, 17 nt, Human
cacaggggaaaagagga

SEQ ID NO: 2231602 - RNA, 18 nt, Human
cacaggggaaaagaggag

SEQ ID NO: 2231603 - RNA, 13 nt, Human
cacaggccugaga

SEQ ID NO: 2231604 - RNA, 15 nt, Human
cacaggccucccugu

SEQ ID NO: 2231605 - RNA, 16 nt, Human
cacaggccucccuguu

SEQ ID NO: 2231606 - RNA, 11 nt, Human
cacaggccucc

SEQ ID NO: 2231607 - RNA, 12 nt, Human
cacaggccuccc

SEQ ID NO: 2231608 - RNA, 13 nt, Human
cacaggccucccu

SEQ ID NO: 2231609 - RNA, 14 nt, Human
cacaggccucccug

SEQ ID NO: 2231610 - RNA, 14 nt, Human
cacaggccugagau

SEQ ID NO: 2231611 - RNA, 15 nt, Human
cacaggccugagauu

SEQ ID NO: 2231612 - RNA, 19 nt, Human
cacaggccugagauuucau

SEQ ID NO: 2231613 - RNA, 20 nt, Human
cacaggccugagauuucauc

SEQ ID NO: 2231614 - RNA, 20 nt, Human
cacaguauuacuucugcuac

SEQ ID NO: 2231615 - RNA, 21 nt, Human
cacaguauuacuucugcuaca

SEQ ID NO: 2231616 - RNA, 19 nt, Human
cacagguucaugccaccau

SEQ ID NO: 2231617 - RNA, 15 nt, Human
cacagguguuuauac

SEQ ID NO: 2231618 - RNA, 20 nt, Human
cacagguucacgugcagcuc

SEQ ID NO: 2231619 - RNA, 21 nt, Human
caaguccagauuuacacuggg

SEQ ID NO: 2231620 - RNA, 22 nt, Human
caaguccagauuuacacuggga

SEQ ID NO: 2231621 - RNA, 14 nt, Human
caaguccaagcaua

SEQ ID NO: 2231622 - RNA, 17 nt, Human
caagucauuuuaacuuu

SEQ ID NO: 2231623 - RNA, 15 nt, Human
caaguccaaauguuu

SEQ ID NO: 2231624 - RNA, 12 nt, Human
caagucauuuua

SEQ ID NO: 2231625 - RNA, 19 nt, Human
caagucaaccaauguagaa

SEQ ID NO: 2231626 - RNA, 17 nt, Human
caagucaugugcauuuc

SEQ ID NO: 2231627 - RNA, 16 nt, Human
caagucaaauuaauaa

SEQ ID NO: 2231628 - RNA, 15 nt, Human
caagucaaauuaaua

SEQ ID NO: 2231629 - RNA, 14 nt, Human
caagucaaauuaau

SEQ ID NO: 2231630 - RNA, 17 nt, Human
caagucaagugaaaaag

SEQ ID NO: 2231631 - RNA, 13 nt, Human
caagucaagugaa

SEQ ID NO: 2231632 - RNA, 15 nt, Human
caaguaugugagugu

SEQ ID NO: 2231633 - RNA, 19 nt, Human
caaguaugaauaaagacac

SEQ ID NO: 2231634 - RNA, 21 nt, Human
caaguaugaauaaagacaccu

SEQ ID NO: 2231635 - RNA, 16 nt, Human
caaguaugaauaaaga

SEQ ID NO: 2231636 - RNA, 17 nt, Human
caaggccaaaggaagca

SEQ ID NO: 2231637 - RNA, 18 nt, Human
caaggccaaaggaagcac

SEQ ID NO: 2231638 - RNA, 15 nt, Human
caaggccaaaggaag

SEQ ID NO: 2231639 - RNA, 16 nt, Human
caaggccaaaggaagc

SEQ ID NO: 2231640 - RNA, 13 nt, Human
caaggcaggugcc

SEQ ID NO: 2231641 - RNA, 14 nt, Human
caaggcaggugccu

SEQ ID NO: 2231642 - RNA, 15 nt, Human
caaggcaggugccuc

SEQ ID NO: 2231643 - RNA, 16 nt, Human
caaggcaggugccucc

SEQ ID NO: 2231644 - RNA, 17 nt, Human
caaggcaggugccucca

SEQ ID NO: 2231645 - RNA, 18 nt, Human
caaggcaggugccuccag

SEQ ID NO: 2231646 - RNA, 19 nt, Human
caaggcaggugccuccagg

SEQ ID NO: 2231647 - RNA, 20 nt, Human
caaggcaggugccuccaggu

SEQ ID NO: 2231648 - RNA, 22 nt, Human
caaggcaggugccuccaggugu

SEQ ID NO: 2231649 - RNA, 23 nt, Human
caaggcaggugccuccaggugug

SEQ ID NO: 2231650 - RNA, 14 nt, Human
caaggcacugccug

SEQ ID NO: 2231651 - RNA, 15 nt, Human
caaggcacugccuga

SEQ ID NO: 2231652 - RNA, 16 nt, Human
caaggcacugccugau

SEQ ID NO: 2231653 - RNA, 18 nt, Human
caaggcacugccugaugg

SEQ ID NO: 2231654 - RNA, 20 nt, Human
caagcugcacccucaggcag

SEQ ID NO: 2231655 - RNA, 17 nt, Human
caagcucuagugggaag

SEQ ID NO: 2231656 - RNA, 13 nt, Human
caagcucucugca

SEQ ID NO: 2231657 - RNA, 12 nt, Human
caaggcacugcc

SEQ ID NO: 2231658 - RNA, 13 nt, Human
caaggcacugccu

SEQ ID NO: 2231659 - RNA, 18 nt, Human
caagcugcacccucaggc

SEQ ID NO: 2231660 - RNA, 14 nt, Human
caagcugcacccuc

SEQ ID NO: 2231661 - RNA, 13 nt, Human
caagcugcacccu

SEQ ID NO: 2231662 - RNA, 14 nt, Human
caagcucugcuccu

SEQ ID NO: 2231663 - RNA, 17 nt, Human
caagcuccuugggaggc

SEQ ID NO: 2231664 - RNA, 13 nt, Human
caagcuccaagcc

SEQ ID NO: 2231665 - RNA, 14 nt, Human
caagcuccaagccc

SEQ ID NO: 2231666 - RNA, 12 nt, Human
caagcuccaagc

SEQ ID NO: 2231667 - RNA, 13 nt, Human
caagcucugcucc

SEQ ID NO: 2231668 - RNA, 22 nt, Human
caagcuccuugggaggccccac

SEQ ID NO: 2231669 - RNA, 18 nt, Human
caagcucaggaccaggca

SEQ ID NO: 2231670 - RNA, 19 nt, Human
caagcuccaagccccaucu

SEQ ID NO: 2231671 - RNA, 19 nt, Human
caagcucuaucaccaagga

SEQ ID NO: 2231672 - RNA, 16 nt, Human
caagcuagaaccugga

SEQ ID NO: 2231673 - RNA, 17 nt, Human
caagcuagaaccuggag

SEQ ID NO: 2231674 - RNA, 18 nt, Human
caagcuagaaccuggagg

SEQ ID NO: 2231675 - RNA, 17 nt, Human
caagcuagaaggccaca

SEQ ID NO: 2231676 - RNA, 18 nt, Human
caagcuagaaggccacau

SEQ ID NO: 2231677 - RNA, 15 nt, Human
caagcuauccuggcu

SEQ ID NO: 2231678 - RNA, 16 nt, Human
caagcuauccuggcuc

SEQ ID NO: 2231679 - RNA, 22 nt, Human
caagcucacaguuccucgcccu

SEQ ID NO: 2231680 - RNA, 21 nt, Human
caagcucacaguuccucgccc

SEQ ID NO: 2231681 - RNA, 20 nt, Human
caagcucacaguuccucgcc

SEQ ID NO: 2231682 - RNA, 19 nt, Human
caagcucacaguuccucgc

SEQ ID NO: 2231683 - RNA, 16 nt, Human
caagcucacaguuccu

SEQ ID NO: 2231684 - RNA, 12 nt, Human
caagcucacagu

SEQ ID NO: 2231685 - RNA, 16 nt, Human
caagcucaaagcgugg

SEQ ID NO: 2231686 - RNA, 15 nt, Human
caagcucagaaggcu

SEQ ID NO: 2231687 - RNA, 21 nt, Human
caagcucagaggcgcacugug

SEQ ID NO: 2231688 - RNA, 17 nt, Human
caagcucagaaggcucu

SEQ ID NO: 2231689 - RNA, 16 nt, Human
caagcucaggaccagg

SEQ ID NO: 2231690 - RNA, 11 nt, Human
caauaaaguau

SEQ ID NO: 2231691 - RNA, 16 nt, Human
caauaaaguaucuaca

SEQ ID NO: 2231692 - RNA, 12 nt, Human
caauaaaguauc

SEQ ID NO: 2231693 - RNA, 19 nt, Human
caauaaagcauuuauaaau

SEQ ID NO: 2231694 - RNA, 13 nt, Human
caauaaaguauuu

SEQ ID NO: 2231695 - RNA, 18 nt, Human
caagucccugacucucug

SEQ ID NO: 2231696 - RNA, 14 nt, Human
caaguccccaagau

SEQ ID NO: 2231697 - RNA, 21 nt, Human
caagucccugacucucuguga

SEQ ID NO: 2231698 - RNA, 20 nt, Human
caagucccugacucucugug

SEQ ID NO: 2231699 - RNA, 23 nt, Human
caagucccugacucucugugacc

SEQ ID NO: 2231700 - RNA, 19 nt, Human
caauaaagcagcguuucua

SEQ ID NO: 2231701 - RNA, 14 nt, Human
caauaaagcauuua

SEQ ID NO: 2231702 - RNA, 16 nt, Human
caauaaagcauuuaua

SEQ ID NO: 2231703 - RNA, 15 nt, Human
caauaaagcauuuau

SEQ ID NO: 2231704 - RNA, 19 nt, Human
cacugggguccagggagca

SEQ ID NO: 2231705 - RNA, 15 nt, Human
cacugggguccuggg

SEQ ID NO: 2231706 - RNA, 19 nt, Human
cacugggguccuggggccu

SEQ ID NO: 2231707 - RNA, 18 nt, Human
cacugggguccuggggcc

SEQ ID NO: 2231708 - RNA, 23 nt, Human
cacugguggcccgacagccuggc

SEQ ID NO: 2231709 - RNA, 16 nt, Human
cacuggggcuggcaca

SEQ ID NO: 2231710 - RNA, 19 nt, Human
cacuggugugaccugaggg

SEQ ID NO: 2231711 - RNA, 23 nt, Human
cacuggugugagggccccugccu

SEQ ID NO: 2231712 - RNA, 22 nt, Human
cacugguguggauuaaccugcc

SEQ ID NO: 2231713 - RNA, 20 nt, Human
cacuggugugaccugagggc

SEQ ID NO: 2231714 - RNA, 22 nt, Human
cacugguucuucuuggucucag

SEQ ID NO: 2231715 - RNA, 21 nt, Human
cacuuaccuucaauaaaguau

SEQ ID NO: 2231716 - RNA, 19 nt, Human
cacuuaccuucaauaaagu

SEQ ID NO: 2231717 - RNA, 18 nt, Human
cacuuaccuucaauaaag

SEQ ID NO: 2231718 - RNA, 17 nt, Human
cacuuaccuucaauaaa

SEQ ID NO: 2231719 - RNA, 16 nt, Human
cacuuaccuucaauaa

SEQ ID NO: 2231720 - RNA, 15 nt, Human
cacuuaccuucaaua

SEQ ID NO: 2231721 - RNA, 14 nt, Human
cacuuaccuucaau

SEQ ID NO: 2231722 - RNA, 13 nt, Human
cacuuaccuucaa

SEQ ID NO: 2231723 - RNA, 15 nt, Human
cacugguugcacuua

SEQ ID NO: 2231724 - RNA, 18 nt, Human
cacuuaccuagauuuaca

SEQ ID NO: 2231725 - RNA, 20 nt, Human
cacugguugcacuuaugauu

SEQ ID NO: 2231726 - RNA, 18 nt, Human
cacuuacacuuuaugcac

SEQ ID NO: 2231727 - RNA, 16 nt, Human
cacuuacacuuuaugc

SEQ ID NO: 2231728 - RNA, 21 nt, Human
cacuuguauauacgcaucuau

SEQ ID NO: 2231729 - RNA, 13 nt, Human
cacuuguauauac

SEQ ID NO: 2231730 - RNA, 16 nt, Human
cacuuguauauacgca

SEQ ID NO: 2231731 - RNA, 16 nt, Human
cacuugucaauaaaau

SEQ ID NO: 2231732 - RNA, 15 nt, Human
cacuuguccagcuga

SEQ ID NO: 2231733 - RNA, 14 nt, Human
cacuuguccagcug

SEQ ID NO: 2231734 - RNA, 19 nt, Human
cacuuguguuuugcaagcc

SEQ ID NO: 2231735 - RNA, 12 nt, Human
cacuuaugauuu

SEQ ID NO: 2231736 - RNA, 20 nt, Human
cacuuauuccccauucuucc

SEQ ID NO: 2231737 - RNA, 16 nt, Human
cacuuaucccucucca

SEQ ID NO: 2231738 - RNA, 17 nt, Human
cacuuauucucaagaag

SEQ ID NO: 2231739 - RNA, 21 nt, Human
cacuuauuggaacucugcuug

SEQ ID NO: 2231740 - RNA, 24 nt, Human
cacuuagaaauugcauuuccugac

SEQ ID NO: 2231741 - RNA, 23 nt, Human
cacuuaggaacguaaucgugucc

SEQ ID NO: 2231742 - RNA, 15 nt, Human
cacuuagcuaucaga

SEQ ID NO: 2231743 - RNA, 22 nt, Human
cacuuauauguucuaauuaaua

SEQ ID NO: 2231744 - RNA, 15 nt, Human
cacuuaucccucucc

SEQ ID NO: 2231745 - RNA, 17 nt, Human
cacuuguuccagcucuu

SEQ ID NO: 2231746 - RNA, 16 nt, Human
cacuuguuccagcucu

SEQ ID NO: 2231747 - RNA, 18 nt, Human
cacuuguuccagcucuuu

SEQ ID NO: 2231748 - RNA, 15 nt, Human
cacuuguuccagcuc

SEQ ID NO: 2231749 - RNA, 13 nt, Human
cacuuguuccagc

SEQ ID NO: 2231750 - RNA, 22 nt, Human
cacuuguguuuugcaagccaga

SEQ ID NO: 2231751 - RNA, 16 nt, Human
cacugcauaccaaccu

SEQ ID NO: 2231752 - RNA, 16 nt, Human
cacugcaggccccgcu

SEQ ID NO: 2231753 - RNA, 13 nt, Human
cacugcaggggcc

SEQ ID NO: 2231754 - RNA, 13 nt, Human
cacugcaggcccc

SEQ ID NO: 2231755 - RNA, 13 nt, Human
cacugcagccuca

SEQ ID NO: 2231756 - RNA, 16 nt, Human
cacugcauccuccgcc

SEQ ID NO: 2231757 - RNA, 14 nt, Human
cacugcauccuccg

SEQ ID NO: 2231758 - RNA, 16 nt, Human
cacugcauguuuguga

SEQ ID NO: 2231759 - RNA, 11 nt, Human
cacugccacac

SEQ ID NO: 2231760 - RNA, 18 nt, Human
cacugcauccuccgccuc

SEQ ID NO: 2231761 - RNA, 18 nt, Human
cacugcaugagcuuuuau

SEQ ID NO: 2231762 - RNA, 22 nt, Human
cacugcaugagcuuuuauacua

SEQ ID NO: 2231763 - RNA, 19 nt, Human
cacugcauggcucccacag

SEQ ID NO: 2231764 - RNA, 18 nt, Human
cacugggaaacagaggcu

SEQ ID NO: 2231765 - RNA, 13 nt, Human
cacugggaaacag

SEQ ID NO: 2231766 - RNA, 16 nt, Human
cacuggggccuacagc

SEQ ID NO: 2231767 - RNA, 23 nt, Human
cacuggcugccuccacucccacu

SEQ ID NO: 2231768 - RNA, 14 nt, Human
cacuggggccuaca

SEQ ID NO: 2231769 - RNA, 17 nt, Human
cacugggacuugcaaaa

SEQ ID NO: 2231770 - RNA, 21 nt, Human
cacugggggaggggacauuga

SEQ ID NO: 2231771 - RNA, 18 nt, Human
cacugggggaggggacau

SEQ ID NO: 2231772 - RNA, 15 nt, Human
cacugggggagggga

SEQ ID NO: 2231773 - RNA, 14 nt, Human
cacugggggagggg

SEQ ID NO: 2231774 - RNA, 13 nt, Human
cacuggggcuggc

SEQ ID NO: 2231775 - RNA, 22 nt, Human
cacuggcugucaguaugacauu

SEQ ID NO: 2231776 - RNA, 19 nt, Human
cacuggcugccuccacucc

SEQ ID NO: 2231777 - RNA, 20 nt, Human
cacuggcugccuccacuccc

SEQ ID NO: 2231778 - RNA, 21 nt, Human
cacuggcugccuccacuccca

SEQ ID NO: 2231779 - RNA, 22 nt, Human
cacuggcugccuccacucccac

SEQ ID NO: 2231780 - RNA, 18 nt, Human
cacugggagaaaugaaaa

SEQ ID NO: 2231781 - RNA, 12 nt, Human
cacugccaggcc

SEQ ID NO: 2231782 - RNA, 14 nt, Human
cacuggcugccagc

SEQ ID NO: 2231783 - RNA, 15 nt, Human
cacuggcugccagcu

SEQ ID NO: 2231784 - RNA, 18 nt, Human
cacuggcugccagcuauu

SEQ ID NO: 2231785 - RNA, 20 nt, Human
cacuggcugccagcuauuuu

SEQ ID NO: 2231786 - RNA, 13 nt, Human
cacuggcugccuc

SEQ ID NO: 2231787 - RNA, 14 nt, Human
cacuggcugccucc

SEQ ID NO: 2231788 - RNA, 15 nt, Human
cacuggcugccucca

SEQ ID NO: 2231789 - RNA, 16 nt, Human
cacuggcugccuccac

SEQ ID NO: 2231790 - RNA, 17 nt, Human
cacuggcugccuccacu

SEQ ID NO: 2231791 - RNA, 18 nt, Human
cacuggcugccuccacuc

SEQ ID NO: 2231792 - RNA, 19 nt, Human
cacugcacuauagccuagg

SEQ ID NO: 2231793 - RNA, 19 nt, Human
cacugcacuccagccuggg

SEQ ID NO: 2231794 - RNA, 18 nt, Human
cacugcacuccagccugg

SEQ ID NO: 2231795 - RNA, 16 nt, Human
cacugcacuccagccu

SEQ ID NO: 2231796 - RNA, 15 nt, Human
cacugcacuccagcc

SEQ ID NO: 2231797 - RNA, 20 nt, Human
cacugcacuccagccugggc

SEQ ID NO: 2231798 - RNA, 17 nt, Human
cacugcacuccagccug

SEQ ID NO: 2231799 - RNA, 13 nt, Human
cacugcacuccgg

SEQ ID NO: 2231800 - RNA, 20 nt, Human
cacugcacuccagccugggu

SEQ ID NO: 2231801 - RNA, 12 nt, Human
cacugcagccuc

SEQ ID NO: 2231802 - RNA, 21 nt, Human
cacugcagaagacaguauggc

SEQ ID NO: 2231803 - RNA, 15 nt, Human
cacuccaauuaagga

SEQ ID NO: 2231804 - RNA, 13 nt, Human
cacuccaauuaag

SEQ ID NO: 2231805 - RNA, 20 nt, Human
cacuaggggauauaggagag

SEQ ID NO: 2231806 - RNA, 19 nt, Human
cacuccaagauauggacac

SEQ ID NO: 2231807 - RNA, 23 nt, Human
cacucauugcugagccucugcuc

SEQ ID NO: 2231808 - RNA, 21 nt, Human
cacucauugcugagccucugc

SEQ ID NO: 2231809 - RNA, 19 nt, Human
cacucauugcugagccucu

SEQ ID NO: 2231810 - RNA, 16 nt, Human
cacucauugcugagcc

SEQ ID NO: 2231811 - RNA, 21 nt, Human
cacuaggggauauaggagagg

SEQ ID NO: 2231812 - RNA, 16 nt, Human
cacuccagccugggug

SEQ ID NO: 2231813 - RNA, 18 nt, Human
cacuccaauuaaggauuu

SEQ ID NO: 2231814 - RNA, 17 nt, Human
cacuccaauuaaggauu

SEQ ID NO: 2231815 - RNA, 23 nt, Human
cacuccagccugggcgacagagc

SEQ ID NO: 2231816 - RNA, 13 nt, Human
cacuccagcuccu

SEQ ID NO: 2231817 - RNA, 15 nt, Human
cacuccagcugggau

SEQ ID NO: 2231818 - RNA, 13 nt, Human
cacuccccugcac

SEQ ID NO: 2231819 - RNA, 12 nt, Human
cacuccagcugg

SEQ ID NO: 2231820 - RNA, 11 nt, Human
cacuccagcug

SEQ ID NO: 2231821 - RNA, 14 nt, Human
cacuaggcuucugg

SEQ ID NO: 2231822 - RNA, 21 nt, Human
cacuagggcagggacaggaua

SEQ ID NO: 2231823 - RNA, 20 nt, Human
cacuagggcagggacaggau

SEQ ID NO: 2231824 - RNA, 19 nt, Human
cacugacacaaaaaguaga

SEQ ID NO: 2231825 - RNA, 23 nt, Human
cacugaauuaaugacagagccag

SEQ ID NO: 2231826 - RNA, 17 nt, Human
cacugaauuccauuuuu

SEQ ID NO: 2231827 - RNA, 14 nt, Human
cacugacaccuuug

SEQ ID NO: 2231828 - RNA, 16 nt, Human
cacugacaccuuugca

SEQ ID NO: 2231829 - RNA, 17 nt, Human
cacugacaccuuugcag

SEQ ID NO: 2231830 - RNA, 21 nt, Human
cacugacaccuuugcaggcau

SEQ ID NO: 2231831 - RNA, 22 nt, Human
cacugacaccuuugcaggcaug

SEQ ID NO: 2231832 - RNA, 13 nt, Human
cacugacacuggu

SEQ ID NO: 2231833 - RNA, 20 nt, Human
cacugacacugguauuccug

SEQ ID NO: 2231834 - RNA, 13 nt, Human
cacugaauauuua

SEQ ID NO: 2231835 - RNA, 14 nt, Human
cacugaauauuuau

SEQ ID NO: 2231836 - RNA, 21 nt, Human
cacugaaugccucaaugugac

SEQ ID NO: 2231837 - RNA, 15 nt, Human
cacugaauuaaucau

SEQ ID NO: 2231838 - RNA, 23 nt, Human
cacugacacugguauuccugccu

SEQ ID NO: 2231839 - RNA, 17 nt, Human
cacuccccugcacugga

SEQ ID NO: 2231840 - RNA, 14 nt, Human
cacuccccugcacu

SEQ ID NO: 2231841 - RNA, 15 nt, Human
cacuccccugcuggg

SEQ ID NO: 2231842 - RNA, 14 nt, Human
cacuccccugcugg

SEQ ID NO: 2231843 - RNA, 12 nt, Human
cacuccccugcu

SEQ ID NO: 2231844 - RNA, 13 nt, Human
cacuccccugcug

SEQ ID NO: 2231845 - RNA, 22 nt, Human
cacucuuguggauguuuuaauu

SEQ ID NO: 2231846 - RNA, 23 nt, Human
cacucuuggagccugcagagcug

SEQ ID NO: 2231847 - RNA, 22 nt, Human
cacucuuggagccugcagagcu

SEQ ID NO: 2231848 - RNA, 21 nt, Human
cacucuuggagccugcagagc

SEQ ID NO: 2231849 - RNA, 15 nt, Human
cacucuuuguaagag

SEQ ID NO: 2231850 - RNA, 23 nt, Human
cacucuuuugcuuuauuccagaa

SEQ ID NO: 2231851 - RNA, 15 nt, Human
cacucuuuugcuuua

SEQ ID NO: 2231852 - RNA, 12 nt, Human
cacucuuuguaa

SEQ ID NO: 2231853 - RNA, 20 nt, Human
caccuacaguguacagucuu

SEQ ID NO: 2231854 - RNA, 13 nt, Human
caccucagccucc

SEQ ID NO: 2231855 - RNA, 14 nt, Human
caccucagccuccc

SEQ ID NO: 2231856 - RNA, 18 nt, Human
caccucagccuccugugu

SEQ ID NO: 2231857 - RNA, 13 nt, Human
caccuacagugua

SEQ ID NO: 2231858 - RNA, 21 nt, Human
caccuaauguuuaugagccag

SEQ ID NO: 2231859 - RNA, 20 nt, Human
caccuaauguuuaugagcca

SEQ ID NO: 2231860 - RNA, 14 nt, Human
caccuaauguuuau

SEQ ID NO: 2231861 - RNA, 22 nt, Human
cacccugggcucugugggcugc

SEQ ID NO: 2231862 - RNA, 16 nt, Human
caccuacaguguacag

SEQ ID NO: 2231863 - RNA, 17 nt, Human
caccuacaguguacagu

SEQ ID NO: 2231864 - RNA, 22 nt, Human
caccuaauccaggcagauccag

SEQ ID NO: 2231865 - RNA, 21 nt, Human
caccuaauccaggcagaucca

SEQ ID NO: 2231866 - RNA, 20 nt, Human
caccuaauccaggcagaucc

SEQ ID NO: 2231867 - RNA, 19 nt, Human
cacccugggcucugugggc

SEQ ID NO: 2231868 - RNA, 21 nt, Human
cacccugggcucugugggcug

SEQ ID NO: 2231869 - RNA, 17 nt, Human
caccuaauccaggcaga

SEQ ID NO: 2231870 - RNA, 21 nt, Human
cacccugggcucugggagcag

SEQ ID NO: 2231871 - RNA, 15 nt, Human
cacccugggcucugu

SEQ ID NO: 2231872 - RNA, 16 nt, Human
cacccugggcucugug

SEQ ID NO: 2231873 - RNA, 17 nt, Human
cacccugggcucugugg

SEQ ID NO: 2231874 - RNA, 23 nt, Human
caccugccucggccucccaaagu

SEQ ID NO: 2231875 - RNA, 23 nt, Human
caccugccgaccucguccucccc

SEQ ID NO: 2231876 - RNA, 24 nt, Human
caccugccguggacuuggggucag

SEQ ID NO: 2231877 - RNA, 21 nt, Human
caccugccgaccucguccucc

SEQ ID NO: 2231878 - RNA, 23 nt, Human
caccugcccccuucucccacacu

SEQ ID NO: 2231879 - RNA, 13 nt, Human
caccugccgaccu

SEQ ID NO: 2231880 - RNA, 22 nt, Human
caccugcccccuucucccacac

SEQ ID NO: 2231881 - RNA, 21 nt, Human
caccugcccccuucucccaca

SEQ ID NO: 2231882 - RNA, 20 nt, Human
caccugcccccuucucccac

SEQ ID NO: 2231883 - RNA, 19 nt, Human
caccugcccccuucuccca

SEQ ID NO: 2231884 - RNA, 17 nt, Human
caccugcccccuucucc

SEQ ID NO: 2231885 - RNA, 15 nt, Human
caccugcccccuucu

SEQ ID NO: 2231886 - RNA, 23 nt, Human
caccucaggccaggugcaguggc

SEQ ID NO: 2231887 - RNA, 15 nt, Human
caccucagccuugga

SEQ ID NO: 2231888 - RNA, 15 nt, Human
caccucaggccaggu

SEQ ID NO: 2231889 - RNA, 13 nt, Human
caccucagccuug

SEQ ID NO: 2231890 - RNA, 12 nt, Human
caccucagccuu

SEQ ID NO: 2231891 - RNA, 14 nt, Human
caccugccccucaa

SEQ ID NO: 2231892 - RNA, 15 nt, Human
caccugccccucaac

SEQ ID NO: 2231893 - RNA, 16 nt, Human
caccugccccucaacu

SEQ ID NO: 2231894 - RNA, 16 nt, Human
cacccucucccaggac

SEQ ID NO: 2231895 - RNA, 12 nt, Human
cacccucugagc

SEQ ID NO: 2231896 - RNA, 13 nt, Human
cacccucugagcu

SEQ ID NO: 2231897 - RNA, 18 nt, Human
cacccucugagcuuugca

SEQ ID NO: 2231898 - RNA, 15 nt, Human
cacccucucccagga

SEQ ID NO: 2231899 - RNA, 16 nt, Human
cacccucuaucccaau

SEQ ID NO: 2231900 - RNA, 19 nt, Human
cacccuccugucuucccag

SEQ ID NO: 2231901 - RNA, 14 nt, Human
cacccucuauccca

SEQ ID NO: 2231902 - RNA, 22 nt, Human
cacccucugagcuuugcauguu

SEQ ID NO: 2231903 - RNA, 16 nt, Human
cacccucuaaauggga

SEQ ID NO: 2231904 - RNA, 17 nt, Human
cacccuccugucuuccc

SEQ ID NO: 2231905 - RNA, 18 nt, Human
cacccuccugucuuccca

SEQ ID NO: 2231906 - RNA, 16 nt, Human
cacccucccuggagug

SEQ ID NO: 2231907 - RNA, 14 nt, Human
cacccucccuggag

SEQ ID NO: 2231908 - RNA, 15 nt, Human
cacccucccuggagu

SEQ ID NO: 2231909 - RNA, 14 nt, Human
cacccuccugucuu

SEQ ID NO: 2231910 - RNA, 16 nt, Human
cacccuccugucuucc

SEQ ID NO: 2231911 - RNA, 17 nt, Human
cacccugaaagcccuga

SEQ ID NO: 2231912 - RNA, 23 nt, Human
cacccugggcccugggcuggaau

SEQ ID NO: 2231913 - RNA, 18 nt, Human
cacccugaaugguuccau

SEQ ID NO: 2231914 - RNA, 12 nt, Human
cacccugggcuc

SEQ ID NO: 2231915 - RNA, 15 nt, Human
cacccuggggagaaa

SEQ ID NO: 2231916 - RNA, 16 nt, Human
cacccuggggagaaag

SEQ ID NO: 2231917 - RNA, 14 nt, Human
cacccucaggcagg

SEQ ID NO: 2231918 - RNA, 21 nt, Human
cacccucaugcugugugacuc

SEQ ID NO: 2231919 - RNA, 16 nt, Human
cacccucaugcugugu

SEQ ID NO: 2231920 - RNA, 14 nt, Human
cacccucaugcugu

SEQ ID NO: 2231921 - RNA, 13 nt, Human
cacccucaugcug

SEQ ID NO: 2231922 - RNA, 19 nt, Human
cacccucagcaccccuucc

SEQ ID NO: 2231923 - RNA, 20 nt, Human
cacccucagcaccccuucca

SEQ ID NO: 2231924 - RNA, 21 nt, Human
cacccucagcaccccuuccau

SEQ ID NO: 2231925 - RNA, 20 nt, Human
cacccucccccgccacuccu

SEQ ID NO: 2231926 - RNA, 19 nt, Human
cacccucccagaccugccu

SEQ ID NO: 2231927 - RNA, 18 nt, Human
cacccuccacccuguccc

SEQ ID NO: 2231928 - RNA, 14 nt, Human
cacccuccaccucu

SEQ ID NO: 2231929 - RNA, 17 nt, Human
cacccuccaccucuuca

SEQ ID NO: 2231930 - RNA, 17 nt, Human
cacccucauucuacuga

SEQ ID NO: 2231931 - RNA, 22 nt, Human
cacccucagcaccccuuccaug

SEQ ID NO: 2231932 - RNA, 12 nt, Human
cacccuccaccc

SEQ ID NO: 2231933 - RNA, 13 nt, Human
cacccuccacccu

SEQ ID NO: 2231934 - RNA, 14 nt, Human
cacccuccacccug

SEQ ID NO: 2231935 - RNA, 16 nt, Human
cacccuccacccuguc

SEQ ID NO: 2231936 - RNA, 17 nt, Human
cacccuccacccugucc

SEQ ID NO: 2231937 - RNA, 22 nt, Human
cacccucccuccgauccuuccu

SEQ ID NO: 2231938 - RNA, 23 nt, Human
cacccucccuccgauccuuccuc

SEQ ID NO: 2231939 - RNA, 13 nt, Human
cacccucccugga

SEQ ID NO: 2231940 - RNA, 23 nt, Human
cacccuccccucucuugcacccg

SEQ ID NO: 2231941 - RNA, 17 nt, Human
cacccuccccucucuug

SEQ ID NO: 2231942 - RNA, 19 nt, Human
cacccuccccucucuugca

SEQ ID NO: 2231943 - RNA, 22 nt, Human
cacccucccagaccugccucuu

SEQ ID NO: 2231944 - RNA, 11 nt, Human
cacccuccccu

SEQ ID NO: 2231945 - RNA, 12 nt, Human
cacccuccccuc

SEQ ID NO: 2231946 - RNA, 13 nt, Human
cacccuccccucc

SEQ ID NO: 2231947 - RNA, 14 nt, Human
cacccuccccuccc

SEQ ID NO: 2231948 - RNA, 13 nt, Human
cacccuccccucu

SEQ ID NO: 2231949 - RNA, 15 nt, Human
cacccuccccucucu

SEQ ID NO: 2231950 - RNA, 16 nt, Human
cacccuccccucucuu

SEQ ID NO: 2231951 - RNA, 14 nt, Human
caccuuggcugcag

SEQ ID NO: 2231952 - RNA, 14 nt, Human
caccuuggcucaag

SEQ ID NO: 2231953 - RNA, 15 nt, Human
caccuuggcucaagu

SEQ ID NO: 2231954 - RNA, 13 nt, Human
caccuuggcugca

SEQ ID NO: 2231955 - RNA, 17 nt, Human
caccugccuguugggcc

SEQ ID NO: 2231956 - RNA, 20 nt, Human
caccugccucaggacugcga

SEQ ID NO: 2231957 - RNA, 14 nt, Human
caccugccucagga

SEQ ID NO: 2231958 - RNA, 13 nt, Human
caccugccucagg

SEQ ID NO: 2231959 - RNA, 19 nt, Human
caccugccuguugggccag

SEQ ID NO: 2231960 - RNA, 24 nt, Human
caccugccuguugggccaggagcc

SEQ ID NO: 2231961 - RNA, 24 nt, Human
caccccacuuaucccucuccauaa

SEQ ID NO: 2231962 - RNA, 11 nt, Human
caccccagccc

SEQ ID NO: 2231963 - RNA, 22 nt, Human
caccccacugcaauccugucuu

SEQ ID NO: 2231964 - RNA, 19 nt, Human
caccccacuuaucccucuc

SEQ ID NO: 2231965 - RNA, 14 nt, Human
caccccacccuucc

SEQ ID NO: 2231966 - RNA, 15 nt, Human
caccccacccucccu

SEQ ID NO: 2231967 - RNA, 19 nt, Human
caccccacccucccuggag

SEQ ID NO: 2231968 - RNA, 20 nt, Human
caccccacccucccuggagu

SEQ ID NO: 2231969 - RNA, 22 nt, Human
caccccacccccuucagugccc

SEQ ID NO: 2231970 - RNA, 13 nt, Human
caccccacccucc

SEQ ID NO: 2231971 - RNA, 18 nt, Human
auuuguuugugcuucuaa

SEQ ID NO: 2231972 - RNA, 16 nt, Human
auuuguuugugcuucu

SEQ ID NO: 2231973 - RNA, 17 nt, Human
auuuguuugugcuucua

SEQ ID NO: 2231974 - RNA, 15 nt, Human
auuuguuugugcuuc

SEQ ID NO: 2231975 - RNA, 12 nt, Human
auuuguuugcau

SEQ ID NO: 2231976 - RNA, 20 nt, Human
auuuguuugaacugauaaag

SEQ ID NO: 2231977 - RNA, 19 nt, Human
auuuuauagcuacuaauuu

SEQ ID NO: 2231978 - RNA, 16 nt, Human
auuuuaugaaugucuu

SEQ ID NO: 2231979 - RNA, 22 nt, Human
auuuuauagcucaguuuaucca

SEQ ID NO: 2231980 - RNA, 19 nt, Human
auuuuauagcucaguuuau

SEQ ID NO: 2231981 - RNA, 18 nt, Human
auuuuauagcucaguuua

SEQ ID NO: 2231982 - RNA, 14 nt, Human
auuuguuuucaugg

SEQ ID NO: 2231983 - RNA, 21 nt, Human
auuuuaugaaagguuuacauu

SEQ ID NO: 2231984 - RNA, 17 nt, Human
auuuuauagcuacuaau

SEQ ID NO: 2231985 - RNA, 14 nt, Human
auuuguguauuuaa

SEQ ID NO: 2231986 - RNA, 13 nt, Human
auuuguguaauag

SEQ ID NO: 2231987 - RNA, 22 nt, Human
auuuguggggagggauuugggg

SEQ ID NO: 2231988 - RNA, 11 nt, Human
auuuguggaau

SEQ ID NO: 2231989 - RNA, 12 nt, Human
auuuguggaaua

SEQ ID NO: 2231990 - RNA, 22 nt, Human
auuuguguauuuaacagggagg

SEQ ID NO: 2231991 - RNA, 21 nt, Human
auuuguguaauagaaaacuga

SEQ ID NO: 2231992 - RNA, 20 nt, Human
auuuguugaaauuauguaug

SEQ ID NO: 2231993 - RNA, 11 nt, Human
auuuguugcau

SEQ ID NO: 2231994 - RNA, 14 nt, Human
auuuguuggaauga

SEQ ID NO: 2231995 - RNA, 13 nt, Human
auuuguuggaaug

SEQ ID NO: 2231996 - RNA, 15 nt, Human
auuuguuuaaaagga

SEQ ID NO: 2231997 - RNA, 16 nt, Human
auuuguuuaaaaggau

SEQ ID NO: 2231998 - RNA, 12 nt, Human
auuuguuuaaaa

SEQ ID NO: 2231999 - RNA, 15 nt, Human
auuuguuggaaugaa

SEQ ID NO: 2232000 - RNA, 14 nt, Human
auuuguuuaaaagg

SEQ ID NO: 2232001 - RNA, 13 nt, Human
auuuguuuaaaag

SEQ ID NO: 2232002 - RNA, 23 nt, Human
auuuguuugaacugauaaagaug

SEQ ID NO: 2232003 - RNA, 22 nt, Human
auuuguuugaacugauaaagau

SEQ ID NO: 2232004 - RNA, 14 nt, Human
auuugugccagaau

SEQ ID NO: 2232005 - RNA, 21 nt, Human
auuugugaugacaacuggaau

SEQ ID NO: 2232006 - RNA, 18 nt, Human
auuugugauagcacuuuc

SEQ ID NO: 2232007 - RNA, 20 nt, Human
auuugugauacaaugcugug

SEQ ID NO: 2232008 - RNA, 17 nt, Human
auuugugauagcacuuu

SEQ ID NO: 2232009 - RNA, 15 nt, Human
auuugugauagcacu

SEQ ID NO: 2232010 - RNA, 17 nt, Human
auuugugauacaaugcu

SEQ ID NO: 2232011 - RNA, 15 nt, Human
auuugugauacaaug

SEQ ID NO: 2232012 - RNA, 13 nt, Human
auuuggaaaauaa

SEQ ID NO: 2232013 - RNA, 12 nt, Human
auuuggaaaaua

SEQ ID NO: 2232014 - RNA, 18 nt, Human
auuugcugggcaguuuuu

SEQ ID NO: 2232015 - RNA, 23 nt, Human
auuugcugggcuuuuuuuuucuc

SEQ ID NO: 2232016 - RNA, 13 nt, Human
auuugcuggggaa

SEQ ID NO: 2232017 - RNA, 18 nt, Human
auuugcuuuuucaccaga

SEQ ID NO: 2232018 - RNA, 11 nt, Human
auuugcuuuuu

SEQ ID NO: 2232019 - RNA, 13 nt, Human
auuugcuccuuuc

SEQ ID NO: 2232020 - RNA, 14 nt, Human
auuugcucauggaa

SEQ ID NO: 2232021 - RNA, 17 nt, Human
auuugcucauggaauug

SEQ ID NO: 2232022 - RNA, 20 nt, Human
auuuuaugccuuuuauuucu

SEQ ID NO: 2232023 - RNA, 14 nt, Human
auuuuaugcaaaua

SEQ ID NO: 2232024 - RNA, 21 nt, Human
auuuuaugccuuuuauuucuu

SEQ ID NO: 2232025 - RNA, 12 nt, Human
auuuuaugcuuu

SEQ ID NO: 2232026 - RNA, 17 nt, Human
auuuuaugcuuuaaaca

SEQ ID NO: 2232027 - RNA, 16 nt, Human
auuuuaugcaaauauu

SEQ ID NO: 2232028 - RNA, 15 nt, Human
auuugcauauguaug

SEQ ID NO: 2232029 - RNA, 21 nt, Human
auuugcauggcuccagaaaug

SEQ ID NO: 2232030 - RNA, 22 nt, Human
auuugcauggcuccagaaaugu

SEQ ID NO: 2232031 - RNA, 17 nt, Human
auuugcauauguaugac

SEQ ID NO: 2232032 - RNA, 23 nt, Human
auuugcauuaaauucacaaacuu

SEQ ID NO: 2232033 - RNA, 19 nt, Human
auuugcauuaaauucacaa

SEQ ID NO: 2232034 - RNA, 18 nt, Human
auuugcauuaaauucaca

SEQ ID NO: 2232035 - RNA, 21 nt, Human
auuugcagcugagagaaaaua

SEQ ID NO: 2232036 - RNA, 22 nt, Human
auuugcauaacaauuccucuac

SEQ ID NO: 2232037 - RNA, 21 nt, Human
auuugcauaacaauuccucua

SEQ ID NO: 2232038 - RNA, 20 nt, Human
auuugcaagggaaaagucuc

SEQ ID NO: 2232039 - RNA, 15 nt, Human
auuugcaagggaaaa

SEQ ID NO: 2232040 - RNA, 22 nt, Human
auuugcagcugagagaaaauaa

SEQ ID NO: 2232041 - RNA, 18 nt, Human
auuugcaagucauggcug

SEQ ID NO: 2232042 - RNA, 19 nt, Human
auuugcaagucauggcugu

SEQ ID NO: 2232043 - RNA, 23 nt, Human
auuugauucuguguguuuucaua

SEQ ID NO: 2232044 - RNA, 16 nt, Human
auuugauugauuugaa

SEQ ID NO: 2232045 - RNA, 13 nt, Human
auuugauugauuu

SEQ ID NO: 2232046 - RNA, 20 nt, Human
auuugauguuuacaggugga

SEQ ID NO: 2232047 - RNA, 13 nt, Human
auuugauuucuau

SEQ ID NO: 2232048 - RNA, 17 nt, Human
auuugauuucuauucaa

SEQ ID NO: 2232049 - RNA, 15 nt, Human
auuugcgaaugguuc

SEQ ID NO: 2232050 - RNA, 15 nt, Human
auuugccuugcugga

SEQ ID NO: 2232051 - RNA, 21 nt, Human
auuugccuguuucugcuugcu

SEQ ID NO: 2232052 - RNA, 14 nt, Human
auuugcccucccau

SEQ ID NO: 2232053 - RNA, 22 nt, Human
auuugccuauucccacaccucc

SEQ ID NO: 2232054 - RNA, 15 nt, Human
auuugccugugccac

SEQ ID NO: 2232055 - RNA, 20 nt, Human
auuugcuaugagcuggggau

SEQ ID NO: 2232056 - RNA, 16 nt, Human
auuugcuaugagcugg

SEQ ID NO: 2232057 - RNA, 15 nt, Human
auuugccaauaauaa

SEQ ID NO: 2232058 - RNA, 22 nt, Human
auuugcauugaacacaaacugu

SEQ ID NO: 2232059 - RNA, 21 nt, Human
auuugcauugaacacaaacug

SEQ ID NO: 2232060 - RNA, 16 nt, Human
auuugcauugaacaca

SEQ ID NO: 2232061 - RNA, 15 nt, Human
auuugccaugggcuu

SEQ ID NO: 2232062 - RNA, 19 nt, Human
auuugccaugggcuucacu

SEQ ID NO: 2232063 - RNA, 24 nt, Human
auuugccaugggcuucacuguaua

SEQ ID NO: 2232064 - RNA, 15 nt, Human
auuugcccuccuccu

SEQ ID NO: 2232065 - RNA, 16 nt, Human
auuugccaauaauaau

SEQ ID NO: 2232066 - RNA, 18 nt, Human
caaagauguuugucagau

SEQ ID NO: 2232067 - RNA, 16 nt, Human
caaagauguuugucag

SEQ ID NO: 2232068 - RNA, 13 nt, Human
caaagaucaaaau

SEQ ID NO: 2232069 - RNA, 23 nt, Human
caaagauauuuugcuuugugauu

SEQ ID NO: 2232070 - RNA, 22 nt, Human
caaagauauuuugcuuugugau

SEQ ID NO: 2232071 - RNA, 22 nt, Human
caaagauguuugucagauauga

SEQ ID NO: 2232072 - RNA, 17 nt, Human
caaagauucaaaauuga

SEQ ID NO: 2232073 - RNA, 21 nt, Human
caaagauucaaaauugacauu

SEQ ID NO: 2232074 - RNA, 15 nt, Human
caaagcaaggaaacu

SEQ ID NO: 2232075 - RNA, 13 nt, Human
caaagcaaggaaa

SEQ ID NO: 2232076 - RNA, 18 nt, Human
caaagcaaugcauuuugg

SEQ ID NO: 2232077 - RNA, 15 nt, Human
caaagcaaugcauuu

SEQ ID NO: 2232078 - RNA, 14 nt, Human
caaagcaauaauag

SEQ ID NO: 2232079 - RNA, 16 nt, Human
caaagcaauaauagua

SEQ ID NO: 2232080 - RNA, 13 nt, Human
caaagcacagugu

SEQ ID NO: 2232081 - RNA, 14 nt, Human
caaagcacaguguu

SEQ ID NO: 2232082 - RNA, 15 nt, Human
caaagcacaguguua

SEQ ID NO: 2232083 - RNA, 19 nt, Human
caaagcacaguguuaaaug

SEQ ID NO: 2232084 - RNA, 18 nt, Human
caaagcacauugaaagag

SEQ ID NO: 2232085 - RNA, 12 nt, Human
caaagcaccagc

SEQ ID NO: 2232086 - RNA, 20 nt, Human
caaagcacgaaauguuauuu

SEQ ID NO: 2232087 - RNA, 22 nt, Human
caaagcacgaaauguuauuuuu

SEQ ID NO: 2232088 - RNA, 21 nt, Human
caaagcaccagcuucuccagg

SEQ ID NO: 2232089 - RNA, 21 nt, Human
caaagcacuuggacucuugcu

SEQ ID NO: 2232090 - RNA, 15 nt, Human
caaagcagacagcuc

SEQ ID NO: 2232091 - RNA, 13 nt, Human
caaagcagacagc

SEQ ID NO: 2232092 - RNA, 12 nt, Human
caaagcagacag

SEQ ID NO: 2232093 - RNA, 22 nt, Human
caaagcacuuggacucuugcuc

SEQ ID NO: 2232094 - RNA, 23 nt, Human
caaagcacuuggacucuugcucu

SEQ ID NO: 2232095 - RNA, 19 nt, Human
caaagcagacagcuccacc

SEQ ID NO: 2232096 - RNA, 17 nt, Human
caaagcagacagcucca

SEQ ID NO: 2232097 - RNA, 16 nt, Human
caaagcagacagcucc

SEQ ID NO: 2232098 - RNA, 18 nt, Human
caaagcaggggaguaugc

SEQ ID NO: 2232099 - RNA, 21 nt, Human
caaagcaggggaguaugcaaa

SEQ ID NO: 2232100 - RNA, 22 nt, Human
caaagcaggggaguaugcaaaa

SEQ ID NO: 2232101 - RNA, 13 nt, Human
caaagcagccacg

SEQ ID NO: 2232102 - RNA, 12 nt, Human
caaagcagccac

SEQ ID NO: 2232103 - RNA, 17 nt, Human
caaagcacauugaaaga

SEQ ID NO: 2232104 - RNA, 17 nt, Human
caaagcacaguuugaac

SEQ ID NO: 2232105 - RNA, 22 nt, Human
caaagcacaguguuaaaugaaa

SEQ ID NO: 2232106 - RNA, 16 nt, Human
caaagcacaguuugaa

SEQ ID NO: 2232107 - RNA, 18 nt, Human
caaagcaccaaaauaaga

SEQ ID NO: 2232108 - RNA, 17 nt, Human
caaagcaccaaaauaag

SEQ ID NO: 2232109 - RNA, 24 nt, Human
caaagcaccaaaauaagaaaagau

SEQ ID NO: 2232110 - RNA, 22 nt, Human
caaagcaccaaaauaagaaaag

SEQ ID NO: 2232111 - RNA, 21 nt, Human
caaagcaccaaaauaagaaaa

SEQ ID NO: 2232112 - RNA, 19 nt, Human
caaagcaccaaaauaagaa

SEQ ID NO: 2232113 - RNA, 22 nt, Human
caaagcacugacuucuaaguaa

SEQ ID NO: 2232114 - RNA, 20 nt, Human
caaagcacugacuucuaagu

SEQ ID NO: 2232115 - RNA, 14 nt, Human
caaagguauaauuu

SEQ ID NO: 2232116 - RNA, 15 nt, Human
caaagcagggucugg

SEQ ID NO: 2232117 - RNA, 13 nt, Human
caaaggugaagga

SEQ ID NO: 2232118 - RNA, 16 nt, Human
caaaggugaaggaaua

SEQ ID NO: 2232119 - RNA, 18 nt, Human
caaaggugaaggaauaua

SEQ ID NO: 2232120 - RNA, 14 nt, Human
caaagguggcucuc

SEQ ID NO: 2232121 - RNA, 19 nt, Human
caaaggugaaggaauauau

SEQ ID NO: 2232122 - RNA, 13 nt, Human
caaagguggcucu

SEQ ID NO: 2232123 - RNA, 15 nt, Human
caaagcagugcaugc

SEQ ID NO: 2232124 - RNA, 17 nt, Human
caaagcagugcaugcug

SEQ ID NO: 2232125 - RNA, 16 nt, Human
caaaguaaaacuugcu

SEQ ID NO: 2232126 - RNA, 19 nt, Human
caaagguuuuccucuucua

SEQ ID NO: 2232127 - RNA, 11 nt, Human
caaagguuuuc

SEQ ID NO: 2232128 - RNA, 15 nt, Human
caaagguugagaugu

SEQ ID NO: 2232129 - RNA, 18 nt, Human
caaaguaaaacuugcugc

SEQ ID NO: 2232130 - RNA, 22 nt, Human
caaaguacacuguuucaaacuu

SEQ ID NO: 2232131 - RNA, 21 nt, Human
caaaguagaagucuuagaugu

SEQ ID NO: 2232132 - RNA, 14 nt, Human
caaaguagaagucu

SEQ ID NO: 2232133 - RNA, 21 nt, Human
caaagucucuggaauuugaaa

SEQ ID NO: 2232134 - RNA, 22 nt, Human
caaagugccacucauuccugua

SEQ ID NO: 2232135 - RNA, 16 nt, Human
caaagugccacucauu

SEQ ID NO: 2232136 - RNA, 13 nt, Human
caaagucugugug

SEQ ID NO: 2232137 - RNA, 20 nt, Human
caaagucugauuugugauga

SEQ ID NO: 2232138 - RNA, 14 nt, Human
caaagucuguguga

SEQ ID NO: 2232139 - RNA, 20 nt, Human
caaagucuuaaaauaacuua

SEQ ID NO: 2232140 - RNA, 22 nt, Human
caaagucuuaaaauaacuuaua

SEQ ID NO: 2232141 - RNA, 16 nt, Human
caaauccauccagaau

SEQ ID NO: 2232142 - RNA, 22 nt, Human
caaauccgaaccuccucuguga

SEQ ID NO: 2232143 - RNA, 16 nt, Human
caaauccgaaccuccu

SEQ ID NO: 2232144 - RNA, 13 nt, Human
caaauccuaugug

SEQ ID NO: 2232145 - RNA, 21 nt, Human
caaauccgaaccuccucugug

SEQ ID NO: 2232146 - RNA, 18 nt, Human
caaauccuaugugauuuu

SEQ ID NO: 2232147 - RNA, 17 nt, Human
caaauccuaugugauuu

SEQ ID NO: 2232148 - RNA, 16 nt, Human
caaauccuaugugauu

SEQ ID NO: 2232149 - RNA, 15 nt, Human
caaauccuaugugau

SEQ ID NO: 2232150 - RNA, 19 nt, Human
caacacgcaccugccucag

SEQ ID NO: 2232151 - RNA, 14 nt, Human
caacacuaacauga

SEQ ID NO: 2232152 - RNA, 20 nt, Human
caacaccucugcacaagcug

SEQ ID NO: 2232153 - RNA, 16 nt, Human
caacacccaucuguuu

SEQ ID NO: 2232154 - RNA, 17 nt, Human
caacaccagccccugcc

SEQ ID NO: 2232155 - RNA, 18 nt, Human
caacaccagccccugccc

SEQ ID NO: 2232156 - RNA, 22 nt, Human
caacaccagccccugccccagc

SEQ ID NO: 2232157 - RNA, 17 nt, Human
caacacgcaccugccuc

SEQ ID NO: 2232158 - RNA, 15 nt, Human
caacacgcaccugcc

SEQ ID NO: 2232159 - RNA, 23 nt, Human
caacacgagcaggcuacugucag

SEQ ID NO: 2232160 - RNA, 18 nt, Human
caacaauccuagugcuuu

SEQ ID NO: 2232161 - RNA, 17 nt, Human
caacaauccuagugcuu

SEQ ID NO: 2232162 - RNA, 15 nt, Human
caacaauccuagugc

SEQ ID NO: 2232163 - RNA, 13 nt, Human
caacaauaaaaua

SEQ ID NO: 2232164 - RNA, 22 nt, Human
caacaauacaugcugcuaauuc

SEQ ID NO: 2232165 - RNA, 17 nt, Human
caacaaucccaaggccc

SEQ ID NO: 2232166 - RNA, 13 nt, Human
caacaauaacacu

SEQ ID NO: 2232167 - RNA, 12 nt, Human
caacaccacaga

SEQ ID NO: 2232168 - RNA, 13 nt, Human
caacaccacagac

SEQ ID NO: 2232169 - RNA, 14 nt, Human
caacaccacagaca

SEQ ID NO: 2232170 - RNA, 22 nt, Human
caacaccaagcacagcagccug

SEQ ID NO: 2232171 - RNA, 15 nt, Human
caacaccaagcacag

SEQ ID NO: 2232172 - RNA, 15 nt, Human
caacaccacagacac

SEQ ID NO: 2232173 - RNA, 16 nt, Human
caacaccacagacaca

SEQ ID NO: 2232174 - RNA, 17 nt, Human
caacaccacagacacac

SEQ ID NO: 2232175 - RNA, 18 nt, Human
caacaccacagacacaca

SEQ ID NO: 2232176 - RNA, 19 nt, Human
caacaccacagacacacac

SEQ ID NO: 2232177 - RNA, 20 nt, Human
caacaccacagacacacaca

SEQ ID NO: 2232178 - RNA, 13 nt, Human
caacaccagcccc

SEQ ID NO: 2232179 - RNA, 14 nt, Human
caacaccagccccu

SEQ ID NO: 2232180 - RNA, 21 nt, Human
caacaagggagagaccucauc

SEQ ID NO: 2232181 - RNA, 15 nt, Human
caacaagggagagac

SEQ ID NO: 2232182 - RNA, 18 nt, Human
caacaagggagagaccuc

SEQ ID NO: 2232183 - RNA, 13 nt, Human
caacaaguaacuu

SEQ ID NO: 2232184 - RNA, 16 nt, Human
caacaauaaaauagca

SEQ ID NO: 2232185 - RNA, 14 nt, Human
caacaagagcgaaa

SEQ ID NO: 2232186 - RNA, 14 nt, Human
caaauggaaaggag

SEQ ID NO: 2232187 - RNA, 15 nt, Human
caacaagaguuuauu

SEQ ID NO: 2232188 - RNA, 14 nt, Human
caacaagggagaga

SEQ ID NO: 2232189 - RNA, 14 nt, Human
caacaagaguuuau

SEQ ID NO: 2232190 - RNA, 21 nt, Human
caaauggaaaugggcagagca

SEQ ID NO: 2232191 - RNA, 22 nt, Human
caaauggaaaugggcagagcag

SEQ ID NO: 2232192 - RNA, 21 nt, Human
caaauggaaaggagaggaaag

SEQ ID NO: 2232193 - RNA, 15 nt, Human
caaaugcuguauucu

SEQ ID NO: 2232194 - RNA, 17 nt, Human
caaaugcuuggcuucuc

SEQ ID NO: 2232195 - RNA, 18 nt, Human
caaaugcuuggcuucuca

SEQ ID NO: 2232196 - RNA, 13 nt, Human
caaauggaaagga

SEQ ID NO: 2232197 - RNA, 20 nt, Human
caaauggaaaugggcagagc

SEQ ID NO: 2232198 - RNA, 23 nt, Human
caaauccuaugugauuuuaacuc

SEQ ID NO: 2232199 - RNA, 13 nt, Human
caaauccucucca

SEQ ID NO: 2232200 - RNA, 22 nt, Human
caaauccuaugugauuuuaacu

SEQ ID NO: 2232201 - RNA, 21 nt, Human
caaauccuaugugauuuuaac

SEQ ID NO: 2232202 - RNA, 15 nt, Human
caaauccuugaagau

SEQ ID NO: 2232203 - RNA, 14 nt, Human
caaacaguagguug

SEQ ID NO: 2232204 - RNA, 19 nt, Human
caaacaguagguuggcagu

SEQ ID NO: 2232205 - RNA, 21 nt, Human
caaaccaucauugaaaucuuu

SEQ ID NO: 2232206 - RNA, 19 nt, Human
caaaccaucauugaaaucu

SEQ ID NO: 2232207 - RNA, 13 nt, Human
caaacagccacac

SEQ ID NO: 2232208 - RNA, 16 nt, Human
caaaagggugucugag

SEQ ID NO: 2232209 - RNA, 20 nt, Human
caaaagggugucugagcccu

SEQ ID NO: 2232210 - RNA, 24 nt, Human
caaaaggaucuuuguggccaagga

SEQ ID NO: 2232211 - RNA, 22 nt, Human
caaaaggaucuuuguggccaag

SEQ ID NO: 2232212 - RNA, 21 nt, Human
caaaaggaucuuuguggccaa

SEQ ID NO: 2232213 - RNA, 15 nt, Human
caaaaggcagaagca

SEQ ID NO: 2232214 - RNA, 18 nt, Human
caaaagaugcuucucacu

SEQ ID NO: 2232215 - RNA, 20 nt, Human
caaaaggaucuuuguggcca

SEQ ID NO: 2232216 - RNA, 19 nt, Human
caaaaggaucuuuguggcc

SEQ ID NO: 2232217 - RNA, 20 nt, Human
caaaagauugcugaaauuuu

SEQ ID NO: 2232218 - RNA, 19 nt, Human
caaaagauugcugaaauuu

SEQ ID NO: 2232219 - RNA, 16 nt, Human
caaaagauugcugaaa

SEQ ID NO: 2232220 - RNA, 16 nt, Human
caaaagaugcuucuca

SEQ ID NO: 2232221 - RNA, 19 nt, Human
caaaagaugcucuucugug

SEQ ID NO: 2232222 - RNA, 20 nt, Human
caaaagaugcucuucugugg

SEQ ID NO: 2232223 - RNA, 22 nt, Human
caaaaaaaaaaaaaagcaucua

SEQ ID NO: 2232224 - RNA, 20 nt, Human
caaaaaaaaaaaaaaauuag

SEQ ID NO: 2232225 - RNA, 19 nt, Human
auuuuuuuuuuaaauuauu

SEQ ID NO: 2232226 - RNA, 14 nt, Human
auuuuuuuuucuaa

SEQ ID NO: 2232227 - RNA, 15 nt, Human
auuuuuuuuucuaag

SEQ ID NO: 2232228 - RNA, 18 nt, Human
auuuuuuuuucuaagaga

SEQ ID NO: 2232229 - RNA, 19 nt, Human
auuuuuuuuucuaagagaa

SEQ ID NO: 2232230 - RNA, 23 nt, Human
auuuuuuuuuccuucagugccuu

SEQ ID NO: 2232231 - RNA, 20 nt, Human
caaagauauuuugcuuugug

SEQ ID NO: 2232232 - RNA, 18 nt, Human
caaagauauuuugcuuug

SEQ ID NO: 2232233 - RNA, 19 nt, Human
auugauauaaauaaaacau

SEQ ID NO: 2232234 - RNA, 21 nt, Human
auugauauacacggaugacuu

SEQ ID NO: 2232235 - RNA, 18 nt, Human
auugauauaaauaaaaca

SEQ ID NO: 2232236 - RNA, 18 nt, Human
auugauagaguguuauca

SEQ ID NO: 2232237 - RNA, 17 nt, Human
auugauaugcuuauaca

SEQ ID NO: 2232238 - RNA, 15 nt, Human
auugcuacuguccua

SEQ ID NO: 2232239 - RNA, 16 nt, Human
auugauaugaaaaaua

SEQ ID NO: 2232240 - RNA, 15 nt, Human
auugauaugaaaaau

SEQ ID NO: 2232241 - RNA, 14 nt, Human
auugauaugaaaaa

SEQ ID NO: 2232242 - RNA, 17 nt, Human
auugauaugaaaaauau

SEQ ID NO: 2232243 - RNA, 22 nt, Human
auugcuauguuuugacauuuuu

SEQ ID NO: 2232244 - RNA, 20 nt, Human
auugcuacuguccuacccac

SEQ ID NO: 2232245 - RNA, 22 nt, Human
auugcuacuguccuacccaccc

SEQ ID NO: 2232246 - RNA, 16 nt, Human
auugauaauugcauuc

SEQ ID NO: 2232247 - RNA, 19 nt, Human
auugauaacagcacugacu

SEQ ID NO: 2232248 - RNA, 16 nt, Human
auugauaagagggcac

SEQ ID NO: 2232249 - RNA, 16 nt, Human
auugaguuuucagugg

SEQ ID NO: 2232250 - RNA, 15 nt, Human
auugaguuuucagug

SEQ ID NO: 2232251 - RNA, 21 nt, Human
auugauaagaaccuuuugagu

SEQ ID NO: 2232252 - RNA, 15 nt, Human
auugagucaaauggu

SEQ ID NO: 2232253 - RNA, 23 nt, Human
auugagguguauggagagaaaac

SEQ ID NO: 2232254 - RNA, 21 nt, Human
auugaguauccuuucaguguu

SEQ ID NO: 2232255 - RNA, 16 nt, Human
auucuugaaagcugug

SEQ ID NO: 2232256 - RNA, 18 nt, Human
auucuugaaggaaaauga

SEQ ID NO: 2232257 - RNA, 22 nt, Human
auucuucuuccaacguggccca

SEQ ID NO: 2232258 - RNA, 15 nt, Human
auucuugaaggaaaa

SEQ ID NO: 2232259 - RNA, 14 nt, Human
auucuucugcuuca

SEQ ID NO: 2232260 - RNA, 14 nt, Human
auucuucugccuca

SEQ ID NO: 2232261 - RNA, 21 nt, Human
auucuucugaacucaaacuga

SEQ ID NO: 2232262 - RNA, 13 nt, Human
auucuugaguuua

SEQ ID NO: 2232263 - RNA, 11 nt, Human
auucuuuccug

SEQ ID NO: 2232264 - RNA, 14 nt, Human
auucucuuucaaag

SEQ ID NO: 2232265 - RNA, 18 nt, Human
auucauaguaacuucuua

SEQ ID NO: 2232266 - RNA, 17 nt, Human
auucauaguaacuucuu

SEQ ID NO: 2232267 - RNA, 16 nt, Human
auucauaguaacuucu

SEQ ID NO: 2232268 - RNA, 16 nt, Human
auucugaacaauucuc

SEQ ID NO: 2232269 - RNA, 15 nt, Human
auucugaaggagccc

SEQ ID NO: 2232270 - RNA, 17 nt, Human
auucugaagccauuguc

SEQ ID NO: 2232271 - RNA, 16 nt, Human
auucugaaggagcccc

SEQ ID NO: 2232272 - RNA, 11 nt, Human
auucuucugcu

SEQ ID NO: 2232273 - RNA, 12 nt, Human
auucuucugcuu

SEQ ID NO: 2232274 - RNA, 13 nt, Human
auucuucugaacu

SEQ ID NO: 2232275 - RNA, 20 nt, Human
auucugaccacccuucucau

SEQ ID NO: 2232276 - RNA, 10 nt, Human
auucugaaug

SEQ ID NO: 2232277 - RNA, 13 nt, Human
auucugaauguac

SEQ ID NO: 2232278 - RNA, 13 nt, Human
auucuuuccugag

SEQ ID NO: 2232279 - RNA, 21 nt, Human
auucuuucccaauucacaucu

SEQ ID NO: 2232280 - RNA, 12 nt, Human
auugugugaugu

SEQ ID NO: 2232281 - RNA, 13 nt, Human
auugugugauguu

SEQ ID NO: 2232282 - RNA, 16 nt, Human
auuguuagucucuuga

SEQ ID NO: 2232283 - RNA, 14 nt, Human
auuguuccaagaca

SEQ ID NO: 2232284 - RNA, 12 nt, Human
auuguuccaaga

SEQ ID NO: 2232285 - RNA, 20 nt, Human
auuguucauuuugagcugaa

SEQ ID NO: 2232286 - RNA, 18 nt, Human
auuguuccaaaugaaugu

SEQ ID NO: 2232287 - RNA, 12 nt, Human
auuguucauuuu

SEQ ID NO: 2232288 - RNA, 18 nt, Human
auuguucauuuugagcug

SEQ ID NO: 2232289 - RNA, 18 nt, Human
auugugucuuuugcauga

SEQ ID NO: 2232290 - RNA, 13 nt, Human
auugugucuuuug

SEQ ID NO: 2232291 - RNA, 15 nt, Human
auugugucuuuugca

SEQ ID NO: 2232292 - RNA, 16 nt, Human
auugugucuuuugcau

SEQ ID NO: 2232293 - RNA, 17 nt, Human
auugugucuuuugcaug

SEQ ID NO: 2232294 - RNA, 14 nt, Human
auugugucugcagg

SEQ ID NO: 2232295 - RNA, 21 nt, Human
auugugucucuugguccugcu

SEQ ID NO: 2232296 - RNA, 23 nt, Human
auugugucucuugguccugcugc

SEQ ID NO: 2232297 - RNA, 15 nt, Human
auuguaaaauuguau

SEQ ID NO: 2232298 - RNA, 15 nt, Human
auuguaaacaugugu

SEQ ID NO: 2232299 - RNA, 16 nt, Human
auuguaaacauguguu

SEQ ID NO: 2232300 - RNA, 23 nt, Human
auugcuugaaagaaaauaugcau

SEQ ID NO: 2232301 - RNA, 17 nt, Human
auuguaaaauuguauag

SEQ ID NO: 2232302 - RNA, 18 nt, Human
auugcuugagcucaggag

SEQ ID NO: 2232303 - RNA, 14 nt, Human
auuguaaaauggug

SEQ ID NO: 2232304 - RNA, 10 nt, Human
auuguaaaua

SEQ ID NO: 2232305 - RNA, 12 nt, Human
auuguaaucacu

SEQ ID NO: 2232306 - RNA, 14 nt, Human
auuguaaauaguau

SEQ ID NO: 2232307 - RNA, 23 nt, Human
auuguaauaggcguaacuaauuu

SEQ ID NO: 2232308 - RNA, 24 nt, Human
auuguaauguuacugaucaugcau

SEQ ID NO: 2232309 - RNA, 17 nt, Human
auuguaauguuacugau

SEQ ID NO: 2232310 - RNA, 15 nt, Human
auuguaauguuacug

SEQ ID NO: 2232311 - RNA, 13 nt, Human
auuguaauguuac

SEQ ID NO: 2232312 - RNA, 13 nt, Human
auuguaaucacug

SEQ ID NO: 2232313 - RNA, 21 nt, Human
auugcugagagaaauauggaa

SEQ ID NO: 2232314 - RNA, 16 nt, Human
auugcugaaauuuuau

SEQ ID NO: 2232315 - RNA, 13 nt, Human
auugcugaaauuu

SEQ ID NO: 2232316 - RNA, 22 nt, Human
auugcugagccucugcucccca

SEQ ID NO: 2232317 - RNA, 16 nt, Human
auugcugagccucugc

SEQ ID NO: 2232318 - RNA, 14 nt, Human
auugcugagccucu

SEQ ID NO: 2232319 - RNA, 23 nt, Human
auugcugagagaaauauggaacu

SEQ ID NO: 2232320 - RNA, 22 nt, Human
auugcugagagaaauauggaac

SEQ ID NO: 2232321 - RNA, 12 nt, Human
auugcuccuuga

SEQ ID NO: 2232322 - RNA, 12 nt, Human
auugcugaaauu

SEQ ID NO: 2232323 - RNA, 16 nt, Human
auugcugaaaauggua

SEQ ID NO: 2232324 - RNA, 18 nt, Human
auugcugaaaaugguauu

SEQ ID NO: 2232325 - RNA, 15 nt, Human
auugcugauggugca

SEQ ID NO: 2232326 - RNA, 16 nt, Human
auugcugauggugcaa

SEQ ID NO: 2232327 - RNA, 18 nt, Human
auugcugauggugcaaug

SEQ ID NO: 2232328 - RNA, 19 nt, Human
auugcugauggugcaauga

SEQ ID NO: 2232329 - RNA, 14 nt, Human
auugcuugagcuca

SEQ ID NO: 2232330 - RNA, 18 nt, Human
auugcuugagcccaggag

SEQ ID NO: 2232331 - RNA, 17 nt, Human
auugcuugagcccagga

SEQ ID NO: 2232332 - RNA, 16 nt, Human
auugcuugaaagaaaa

SEQ ID NO: 2232333 - RNA, 23 nt, Human
auugcuucuucuccuauguguaa

SEQ ID NO: 2232334 - RNA, 14 nt, Human
auugcugguucuau

SEQ ID NO: 2232335 - RNA, 22 nt, Human
auugcuggcaaagacagaagcc

SEQ ID NO: 2232336 - RNA, 18 nt, Human
auugcuggcuggaaggga

SEQ ID NO: 2232337 - RNA, 23 nt, Human
auugcugucaaguuccuuugggu

SEQ ID NO: 2232338 - RNA, 21 nt, Human
auugcugguucuauuuaaugg

SEQ ID NO: 2232339 - RNA, 22 nt, Human
auugcugguucuauuuaaugga

SEQ ID NO: 2232340 - RNA, 17 nt, Human
auugcuucuucuccuau

SEQ ID NO: 2232341 - RNA, 22 nt, Human
auugcuucuucuccuaugugua

SEQ ID NO: 2232342 - RNA, 20 nt, Human
auugcuggcaaagacagaag

SEQ ID NO: 2232343 - RNA, 19 nt, Human
auugcuggcaaagacagaa

SEQ ID NO: 2232344 - RNA, 15 nt, Human
auugcugcugguaau

SEQ ID NO: 2232345 - RNA, 21 nt, Human
auugcugccccaucagugcuc

SEQ ID NO: 2232346 - RNA, 12 nt, Human
auugcugcuuga

SEQ ID NO: 2232347 - RNA, 23 nt, Human
auugcugauggugcaaugaccuu

SEQ ID NO: 2232348 - RNA, 23 nt, Human
auugcugagccucugcuccccag

SEQ ID NO: 2232349 - RNA, 20 nt, Human
auugcugccccaucagugcu

SEQ ID NO: 2232350 - RNA, 14 nt, Human
auugcugccacuuu

SEQ ID NO: 2232351 - RNA, 21 nt, Human
auugcugccacuuuuuaacua

SEQ ID NO: 2232352 - RNA, 20 nt, Human
auuguuccaagacauuguca

SEQ ID NO: 2232353 - RNA, 18 nt, Human
auuguugacaguucugaa

SEQ ID NO: 2232354 - RNA, 21 nt, Human
auuguuccaagacauugucaa

SEQ ID NO: 2232355 - RNA, 17 nt, Human
auuguugacaguucuga

SEQ ID NO: 2232356 - RNA, 18 nt, Human
auuguuccaagacauugu

SEQ ID NO: 2232357 - RNA, 17 nt, Human
auuguuccaagacauug

SEQ ID NO: 2232358 - RNA, 16 nt, Human
auuguuccaagacauu

SEQ ID NO: 2232359 - RNA, 15 nt, Human
auuguuccaagacau

SEQ ID NO: 2232360 - RNA, 21 nt, Human
auuguugagguggucugaaug

SEQ ID NO: 2232361 - RNA, 20 nt, Human
auuguugagguggucugaau

SEQ ID NO: 2232362 - RNA, 19 nt, Human
auuguugagcuauugcugu

SEQ ID NO: 2232363 - RNA, 16 nt, Human
auuguugagcuauugc

SEQ ID NO: 2232364 - RNA, 21 nt, Human
auuguugacaguucugaagaa

SEQ ID NO: 2232365 - RNA, 22 nt, Human
auuguugacaguucugaagaau

SEQ ID NO: 2232366 - RNA, 23 nt, Human
auuguugagguggucugaauguu

SEQ ID NO: 2232367 - RNA, 22 nt, Human
auuguugagguggucugaaugu

SEQ ID NO: 2232368 - RNA, 12 nt, Human
auuguugcauua

SEQ ID NO: 2232369 - RNA, 20 nt, Human
auuguugguaauuauuuugg

SEQ ID NO: 2232370 - RNA, 21 nt, Human
auuguuguacacagaaauaca

SEQ ID NO: 2232371 - RNA, 18 nt, Human
auuguuggcacauccuau

SEQ ID NO: 2232372 - RNA, 20 nt, Human
auuagcugguuggagagcua

SEQ ID NO: 2232373 - RNA, 16 nt, Human
auuagcugugugaaau

SEQ ID NO: 2232374 - RNA, 20 nt, Human
auuaggaaguguaacagcug

SEQ ID NO: 2232375 - RNA, 15 nt, Human
auuaggaaaauaugg

SEQ ID NO: 2232376 - RNA, 20 nt, Human
auuagcuuuacuguuuguua

SEQ ID NO: 2232377 - RNA, 15 nt, Human
auuagcuuuacuguu

SEQ ID NO: 2232378 - RNA, 21 nt, Human
auuaggaaguguaacagcuga

SEQ ID NO: 2232379 - RNA, 22 nt, Human
auuaggacaaucaguccccucc

SEQ ID NO: 2232380 - RNA, 16 nt, Human
auuaggaauaaauaaa

SEQ ID NO: 2232381 - RNA, 13 nt, Human
auuaggaauaaau

SEQ ID NO: 2232382 - RNA, 22 nt, Human
auuaggaaguguaacagcugag

SEQ ID NO: 2232383 - RNA, 16 nt, Human
auuagggagagaagau

SEQ ID NO: 2232384 - RNA, 22 nt, Human
auuagggguugcuaagaagcga

SEQ ID NO: 2232385 - RNA, 13 nt, Human
auuagguauuuug

SEQ ID NO: 2232386 - RNA, 15 nt, Human
auuagggguugcuaa

SEQ ID NO: 2232387 - RNA, 23 nt, Human
auuagggagaaaauucaauugua

SEQ ID NO: 2232388 - RNA, 20 nt, Human
auuagggagaaaauucaauu

SEQ ID NO: 2232389 - RNA, 18 nt, Human
auuagggagaaaauucaa

SEQ ID NO: 2232390 - RNA, 17 nt, Human
auuagggagaaaauuca

SEQ ID NO: 2232391 - RNA, 18 nt, Human
auuagggcauuugagaaa

SEQ ID NO: 2232392 - RNA, 19 nt, Human
auuagggcauuugagaaau

SEQ ID NO: 2232393 - RNA, 18 nt, Human
auuaggugugacugaauu

SEQ ID NO: 2232394 - RNA, 16 nt, Human
auuaggugugacugaa

SEQ ID NO: 2232395 - RNA, 21 nt, Human
auuaggugugacugaauuucu

SEQ ID NO: 2232396 - RNA, 14 nt, Human
auuaugaauuacau

SEQ ID NO: 2232397 - RNA, 17 nt, Human
auuaugaauuacauuug

SEQ ID NO: 2232398 - RNA, 21 nt, Human
auuaugaugugggucaaggaa

SEQ ID NO: 2232399 - RNA, 20 nt, Human
auuaugagaggcaaugauug

SEQ ID NO: 2232400 - RNA, 16 nt, Human
auuaugaguuugcuua

SEQ ID NO: 2232401 - RNA, 19 nt, Human
auuaugacaguuauacugu

SEQ ID NO: 2232402 - RNA, 17 nt, Human
auuaugacaguuauacu

SEQ ID NO: 2232403 - RNA, 16 nt, Human
auuaugacaguuauac

SEQ ID NO: 2232404 - RNA, 15 nt, Human
auuaugacaguuaua

SEQ ID NO: 2232405 - RNA, 14 nt, Human
auuaugacaguuau

SEQ ID NO: 2232406 - RNA, 12 nt, Human
auuaugacaguu

SEQ ID NO: 2232407 - RNA, 18 nt, Human
auuaugaauuacauuugu

SEQ ID NO: 2232408 - RNA, 16 nt, Human
auuaugcagaauacuu

SEQ ID NO: 2232409 - RNA, 17 nt, Human
auuaugcagaauacuuu

SEQ ID NO: 2232410 - RNA, 23 nt, Human
auuaugcaugaaguaauaugcac

SEQ ID NO: 2232411 - RNA, 14 nt, Human
auucaauuccucug

SEQ ID NO: 2232412 - RNA, 16 nt, Human
auucaauuccucuggg

SEQ ID NO: 2232413 - RNA, 22 nt, Human
auucaauguuuaugcaaggaag

SEQ ID NO: 2232414 - RNA, 23 nt, Human
auucaauguuuaugcaaggaagg

SEQ ID NO: 2232415 - RNA, 22 nt, Human
auucaaucuguaaacuguguau

SEQ ID NO: 2232416 - RNA, 22 nt, Human
auucacaaugaaaugcucuccu

SEQ ID NO: 2232417 - RNA, 14 nt, Human
auucacaauagaaa

SEQ ID NO: 2232418 - RNA, 13 nt, Human
auucacaauagaa

SEQ ID NO: 2232419 - RNA, 18 nt, Human
auucaauuguaaauugaa

SEQ ID NO: 2232420 - RNA, 14 nt, Human
auucaauuguaaau

SEQ ID NO: 2232421 - RNA, 13 nt, Human
auucaauuguaaa

SEQ ID NO: 2232422 - RNA, 11 nt, Human
auucacacugu

SEQ ID NO: 2232423 - RNA, 15 nt, Human
auucacaccugacuc

SEQ ID NO: 2232424 - RNA, 17 nt, Human
auucaauuccucuggga

SEQ ID NO: 2232425 - RNA, 18 nt, Human
auucaauuccucugggaa

SEQ ID NO: 2232426 - RNA, 19 nt, Human
auucacaagacccaaaagg

SEQ ID NO: 2232427 - RNA, 14 nt, Human
auucauaaugacuu

SEQ ID NO: 2232428 - RNA, 15 nt, Human
auucauaaugacuua

SEQ ID NO: 2232429 - RNA, 21 nt, Human
auucauaauuauuauuuggcc

SEQ ID NO: 2232430 - RNA, 19 nt, Human
auucauaaugacuuaagca

SEQ ID NO: 2232431 - RNA, 22 nt, Human
auucauagcagcuuauucacaa

SEQ ID NO: 2232432 - RNA, 19 nt, Human
auucauagcagcuuauuca

SEQ ID NO: 2232433 - RNA, 13 nt, Human
auuagcucuggac

SEQ ID NO: 2232434 - RNA, 19 nt, Human
auuagcucacuuggugaua

SEQ ID NO: 2232435 - RNA, 12 nt, Human
auuagcucugga

SEQ ID NO: 2232436 - RNA, 17 nt, Human
auuagccugaguagaaa

SEQ ID NO: 2232437 - RNA, 18 nt, Human
auuagccgggcauggugg

SEQ ID NO: 2232438 - RNA, 17 nt, Human
auuagccagugaaaaac

SEQ ID NO: 2232439 - RNA, 14 nt, Human
auuagccugaguag

SEQ ID NO: 2232440 - RNA, 16 nt, Human
auuagccugaguagaa

SEQ ID NO: 2232441 - RNA, 14 nt, Human
auuagcauuuaguc

SEQ ID NO: 2232442 - RNA, 13 nt, Human
auuagccaggauc

SEQ ID NO: 2232443 - RNA, 17 nt, Human
auuagccacaaaauugg

SEQ ID NO: 2232444 - RNA, 14 nt, Human
auuagccaggauca

SEQ ID NO: 2232445 - RNA, 15 nt, Human
auuagccaggaucau

SEQ ID NO: 2232446 - RNA, 21 nt, Human
auuagccaggaucauggugua

SEQ ID NO: 2232447 - RNA, 22 nt, Human
auuagccaggaucaugguguaa

SEQ ID NO: 2232448 - RNA, 15 nt, Human
auuagccagguaaug

SEQ ID NO: 2232449 - RNA, 19 nt, Human
auuagcauuugucaacaaa

SEQ ID NO: 2232450 - RNA, 17 nt, Human
auuagcaguuugcuuug

SEQ ID NO: 2232451 - RNA, 22 nt, Human
auuagcaauugacugucacugu

SEQ ID NO: 2232452 - RNA, 23 nt, Human
auuagauuucucauuugccaaua

SEQ ID NO: 2232453 - RNA, 19 nt, Human
auuagauguucucuaucau

SEQ ID NO: 2232454 - RNA, 21 nt, Human
auuagauguucucuaucauuu

SEQ ID NO: 2232455 - RNA, 23 nt, Human
auuagauguucucuaucauuuaa

SEQ ID NO: 2232456 - RNA, 22 nt, Human
auuacagagaggagaaacacau

SEQ ID NO: 2232457 - RNA, 21 nt, Human
auuacagagaggagaaacaca

SEQ ID NO: 2232458 - RNA, 15 nt, Human
auuacagaggaaguu

SEQ ID NO: 2232459 - RNA, 17 nt, Human
auuacagaggaaguuau

SEQ ID NO: 2232460 - RNA, 19 nt, Human
auuacagaugggcaaauua

SEQ ID NO: 2232461 - RNA, 17 nt, Human
auuacaggaaguacugg

SEQ ID NO: 2232462 - RNA, 16 nt, Human
auuacaggugugaacc

SEQ ID NO: 2232463 - RNA, 22 nt, Human
auuacaggcaccugccaccaug

SEQ ID NO: 2232464 - RNA, 20 nt, Human
auuacaggcaccugccacca

SEQ ID NO: 2232465 - RNA, 21 nt, Human
auuacagaugggcaaauuaag

SEQ ID NO: 2232466 - RNA, 15 nt, Human
auuacagcuggagaa

SEQ ID NO: 2232467 - RNA, 19 nt, Human
auuaauucaccuuccagug

SEQ ID NO: 2232468 - RNA, 13 nt, Human
auuaauucuauaa

SEQ ID NO: 2232469 - RNA, 14 nt, Human
auuaauuaaaugca

SEQ ID NO: 2232470 - RNA, 14 nt, Human
auuaauucuauaag

SEQ ID NO: 2232471 - RNA, 14 nt, Human
auuaauugcuuuga

SEQ ID NO: 2232472 - RNA, 13 nt, Human
auuaauugcuuug

SEQ ID NO: 2232473 - RNA, 12 nt, Human
auuaauugcuuu

SEQ ID NO: 2232474 - RNA, 16 nt, Human
auuaauuggcagcaga

SEQ ID NO: 2232475 - RNA, 17 nt, Human
auuaauuggcagcagau

SEQ ID NO: 2232476 - RNA, 22 nt, Human
auuaauuuuuuuauuguuuaaa

SEQ ID NO: 2232477 - RNA, 22 nt, Human
auuacaaaaugacauuuugcca

SEQ ID NO: 2232478 - RNA, 19 nt, Human
auuacagagaggagaaaca

SEQ ID NO: 2232479 - RNA, 18 nt, Human
auuacagagaggagaaac

SEQ ID NO: 2232480 - RNA, 13 nt, Human
auuacaaauugcu

SEQ ID NO: 2232481 - RNA, 14 nt, Human
auuacaaauugcuu

SEQ ID NO: 2232482 - RNA, 15 nt, Human
auuacaaauugcuua

SEQ ID NO: 2232483 - RNA, 22 nt, Human
auuacaaauugcuuacuuugga

SEQ ID NO: 2232484 - RNA, 19 nt, Human
auuaauuggcagcagauuu

SEQ ID NO: 2232485 - RNA, 18 nt, Human
auuaauguuaauucagca

SEQ ID NO: 2232486 - RNA, 12 nt, Human
auuaauguuaau

SEQ ID NO: 2232487 - RNA, 13 nt, Human
auuaauguuaauu

SEQ ID NO: 2232488 - RNA, 18 nt, Human
auguuugccucugccucu

SEQ ID NO: 2232489 - RNA, 23 nt, Human
auguuugggagacugcugaguca

SEQ ID NO: 2232490 - RNA, 22 nt, Human
auguuucuucuagguucuaaaa

SEQ ID NO: 2232491 - RNA, 18 nt, Human
auguuugggcagaaggga

SEQ ID NO: 2232492 - RNA, 13 nt, Human
auguuuguggccu

SEQ ID NO: 2232493 - RNA, 10 nt, Human
auguuugugg

SEQ ID NO: 2232494 - RNA, 23 nt, Human
auguuuguccugaacacuuuugu

SEQ ID NO: 2232495 - RNA, 23 nt, Human
auguuugggcagaagggagaagg

SEQ ID NO: 2232496 - RNA, 14 nt, Human
auguuuguaaaacu

SEQ ID NO: 2232497 - RNA, 17 nt, Human
auguuuguggccucaga

SEQ ID NO: 2232498 - RNA, 16 nt, Human
auguuuguggccucag

SEQ ID NO: 2232499 - RNA, 15 nt, Human
auguuuguggccuca

SEQ ID NO: 2232500 - RNA, 14 nt, Human
auguuuguggccuc

SEQ ID NO: 2232501 - RNA, 18 nt, Human
aucugaugcaagcaagaa

SEQ ID NO: 2232502 - RNA, 18 nt, Human
aucugauggcuucuccag

SEQ ID NO: 2232503 - RNA, 18 nt, Human
aucugauuggacauuuuc

SEQ ID NO: 2232504 - RNA, 19 nt, Human
aucugauuggacauuuucu

SEQ ID NO: 2232505 - RNA, 14 nt, Human
aucugauggcuucu

SEQ ID NO: 2232506 - RNA, 17 nt, Human
aucugauggcuucucca

SEQ ID NO: 2232507 - RNA, 19 nt, Human
aucugauuuguuuuccucu

SEQ ID NO: 2232508 - RNA, 17 nt, Human
aucugauugugauguga

SEQ ID NO: 2232509 - RNA, 21 nt, Human
aucugcacccucgaugaagcc

SEQ ID NO: 2232510 - RNA, 21 nt, Human
aucugcaccccccugggcuga

SEQ ID NO: 2232511 - RNA, 17 nt, Human
aucugcaccccuucucu

SEQ ID NO: 2232512 - RNA, 18 nt, Human
aucugcaccccuucucuc

SEQ ID NO: 2232513 - RNA, 20 nt, Human
aucugcaccccuucucuccu

SEQ ID NO: 2232514 - RNA, 19 nt, Human
aucugcaccccccugggcu

SEQ ID NO: 2232515 - RNA, 18 nt, Human
aucugcaccccccugggc

SEQ ID NO: 2232516 - RNA, 17 nt, Human
aucugcaccccccuggg

SEQ ID NO: 2232517 - RNA, 15 nt, Human
aucugcaccccccug

SEQ ID NO: 2232518 - RNA, 10 nt, Human
aucugcaccc

SEQ ID NO: 2232519 - RNA, 20 nt, Human
aucugcagggggugugucug

SEQ ID NO: 2232520 - RNA, 17 nt, Human
aucugcaggcagacacg

SEQ ID NO: 2232521 - RNA, 19 nt, Human
aucugcaggcagacacgga

SEQ ID NO: 2232522 - RNA, 23 nt, Human
aucugcagaaggaaaaaugugua

SEQ ID NO: 2232523 - RNA, 14 nt, Human
aucugcaggcagac

SEQ ID NO: 2232524 - RNA, 15 nt, Human
aucugcaggcagaca

SEQ ID NO: 2232525 - RNA, 16 nt, Human
aucugcaggcagacac

SEQ ID NO: 2232526 - RNA, 21 nt, Human
aucugcaccccuucucuccuc

SEQ ID NO: 2232527 - RNA, 22 nt, Human
aucugcaccccuucucuccucc

SEQ ID NO: 2232528 - RNA, 23 nt, Human
aucugcaccccuucucuccuccc

SEQ ID NO: 2232529 - RNA, 11 nt, Human
aucugcagaag

SEQ ID NO: 2232530 - RNA, 13 nt, Human
aucugcagaagga

SEQ ID NO: 2232531 - RNA, 14 nt, Human
aucugcagaaggaa

SEQ ID NO: 2232532 - RNA, 20 nt, Human
aucugcagaaggaaaaaugu

SEQ ID NO: 2232533 - RNA, 22 nt, Human
aucugcagaaggaaaaaugugu

SEQ ID NO: 2232534 - RNA, 20 nt, Human
aucugagaggccacagugca

SEQ ID NO: 2232535 - RNA, 21 nt, Human
uugccuccccauuucccaucu

SEQ ID NO: 2232536 - RNA, 17 nt, Human
aucugagcaagagcugg

SEQ ID NO: 2232537 - RNA, 22 nt, Human
aucugagcaagagcuggcaaag

SEQ ID NO: 2232538 - RNA, 17 nt, Human
uugccuccccauuuccc

SEQ ID NO: 2232539 - RNA, 20 nt, Human
uugccuccccauuucccauc

SEQ ID NO: 2232540 - RNA, 21 nt, Human
uugccucagucccccaacaga

SEQ ID NO: 2232541 - RNA, 17 nt, Human
uugccuacuaugccaga

SEQ ID NO: 2232542 - RNA, 24 nt, Human
uugccuauucccacaccuccacag

SEQ ID NO: 2232543 - RNA, 14 nt, Human
aucugagggaggag

SEQ ID NO: 2232544 - RNA, 22 nt, Human
aucugagggaggaggccaccuc

SEQ ID NO: 2232545 - RNA, 23 nt, Human
aucugagggaggaggccaccucu

SEQ ID NO: 2232546 - RNA, 16 nt, Human
aucugagggaggaggc

SEQ ID NO: 2232547 - RNA, 19 nt, Human
aucugagggaggaggccac

SEQ ID NO: 2232548 - RNA, 20 nt, Human
aucugagggaggaggccacc

SEQ ID NO: 2232549 - RNA, 21 nt, Human
aucugagggaggaggccaccu

SEQ ID NO: 2232550 - RNA, 21 nt, Human
uugccgcgucgcccucccagg

SEQ ID NO: 2232551 - RNA, 18 nt, Human
uugccgcgucgcccuccc

SEQ ID NO: 2232552 - RNA, 13 nt, Human
uugccgucuaccu

SEQ ID NO: 2232553 - RNA, 18 nt, Human
uugcccuucacaguguuu

SEQ ID NO: 2232554 - RNA, 17 nt, Human
uugcccuucacaguguu

SEQ ID NO: 2232555 - RNA, 11 nt, Human
uugcccuuccc

SEQ ID NO: 2232556 - RNA, 13 nt, Human
uugcccuucccug

SEQ ID NO: 2232557 - RNA, 16 nt, Human
uugcccuucacagugu

SEQ ID NO: 2232558 - RNA, 14 nt, Human
uugcccuucacagu

SEQ ID NO: 2232559 - RNA, 23 nt, Human
uugcccugguuucacuggcccaa

SEQ ID NO: 2232560 - RNA, 14 nt, Human
uugcccuucccugu

SEQ ID NO: 2232561 - RNA, 17 nt, Human
uugcccuucccuguccc

SEQ ID NO: 2232562 - RNA, 19 nt, Human
uugcccuucccugucccuc

SEQ ID NO: 2232563 - RNA, 14 nt, Human
uugcccuugcccug

SEQ ID NO: 2232564 - RNA, 15 nt, Human
uugcccuugcccuga

SEQ ID NO: 2232565 - RNA, 16 nt, Human
uugcccuugcccugac

SEQ ID NO: 2232566 - RNA, 17 nt, Human
uugcccuugcccugacc

SEQ ID NO: 2232567 - RNA, 18 nt, Human
uugcccuugcccugaccu

SEQ ID NO: 2232568 - RNA, 10 nt, Human
uugcccuggu

SEQ ID NO: 2232569 - RNA, 18 nt, Human
uugcccugaccucccagc

SEQ ID NO: 2232570 - RNA, 21 nt, Human
uugcccugaccucccagcccu

SEQ ID NO: 2232571 - RNA, 11 nt, Human
uugcauucaaa

SEQ ID NO: 2232572 - RNA, 13 nt, Human
uugcccuguuaaa

SEQ ID NO: 2232573 - RNA, 22 nt, Human
uugcauuaaauucacaaacuuu

SEQ ID NO: 2232574 - RNA, 12 nt, Human
uugcauucaaau

SEQ ID NO: 2232575 - RNA, 21 nt, Human
uugcauuaaauucacaaacuu

SEQ ID NO: 2232576 - RNA, 20 nt, Human
uugcauuaaauucacaaacu

SEQ ID NO: 2232577 - RNA, 13 nt, Human
uugcauuaaauuc

SEQ ID NO: 2232578 - RNA, 22 nt, Human
uugccgcgucgcccucccaggc

SEQ ID NO: 2232579 - RNA, 19 nt, Human
uugccuaauaaacauccuu

SEQ ID NO: 2232580 - RNA, 14 nt, Human
uugccguuauuaaa

SEQ ID NO: 2232581 - RNA, 19 nt, Human
uugccgucuaccugagggg

SEQ ID NO: 2232582 - RNA, 15 nt, Human
uugccgucuaccuga

SEQ ID NO: 2232583 - RNA, 18 nt, Human
uugccgucuaccugaggg

SEQ ID NO: 2232584 - RNA, 17 nt, Human
aucugguagauuuuuaa

SEQ ID NO: 2232585 - RNA, 19 nt, Human
aucuggguucacugcaacc

SEQ ID NO: 2232586 - RNA, 17 nt, Human
aucuggguucacugcaa

SEQ ID NO: 2232587 - RNA, 19 nt, Human
aucugcauuuucaccccac

SEQ ID NO: 2232588 - RNA, 13 nt, Human
aucugcagucacu

SEQ ID NO: 2232589 - RNA, 16 nt, Human
aucugcagucacuucg

SEQ ID NO: 2232590 - RNA, 23 nt, Human
aucugcauuuucaccccacccuu

SEQ ID NO: 2232591 - RNA, 22 nt, Human
aucugcauuuucaccccacccu

SEQ ID NO: 2232592 - RNA, 15 nt, Human
aucuguacguaagaa

SEQ ID NO: 2232593 - RNA, 23 nt, Human
aucugugaaaggaaagagggagg

SEQ ID NO: 2232594 - RNA, 17 nt, Human
aucuguacuucuucgau

SEQ ID NO: 2232595 - RNA, 13 nt, Human
aucuguacaauga

SEQ ID NO: 2232596 - RNA, 16 nt, Human
aucuguaccucugccu

SEQ ID NO: 2232597 - RNA, 20 nt, Human
aucugguagggggaaaaugu

SEQ ID NO: 2232598 - RNA, 17 nt, Human
aucuggucccuugcagc

SEQ ID NO: 2232599 - RNA, 18 nt, Human
aucugguccuacccaucc

SEQ ID NO: 2232600 - RNA, 17 nt, Human
aucugguccuacccauc

SEQ ID NO: 2232601 - RNA, 14 nt, Human
aucugguccuaccc

SEQ ID NO: 2232602 - RNA, 21 nt, Human
aucugguccuacccauccccg

SEQ ID NO: 2232603 - RNA, 13 nt, Human
aucuguaaacugu

SEQ ID NO: 2232604 - RNA, 17 nt, Human
aucuguaaacuguguau

SEQ ID NO: 2232605 - RNA, 14 nt, Human
aucuguaaacugug

SEQ ID NO: 2232606 - RNA, 22 nt, Human
aucuguaaacuguguauuccaa

SEQ ID NO: 2232607 - RNA, 15 nt, Human
aucugguuuugcuau

SEQ ID NO: 2232608 - RNA, 15 nt, Human
aucuguacaaugaac

SEQ ID NO: 2232609 - RNA, 21 nt, Human
aucuugauaccaccuauauag

SEQ ID NO: 2232610 - RNA, 23 nt, Human
aucuugaccaagcaggaagcuca

SEQ ID NO: 2232611 - RNA, 16 nt, Human
aucuugaucugcucag

SEQ ID NO: 2232612 - RNA, 15 nt, Human
aucuugcucugcuug

SEQ ID NO: 2232613 - RNA, 22 nt, Human
aucuugaucugcucagcccugg

SEQ ID NO: 2232614 - RNA, 20 nt, Human
aucuugaucugcucagcccu

SEQ ID NO: 2232615 - RNA, 21 nt, Human
aucuugaucugcucagcccug

SEQ ID NO: 2232616 - RNA, 14 nt, Human
aucuugcuucccua

SEQ ID NO: 2232617 - RNA, 15 nt, Human
aucuugcuucccuaa

SEQ ID NO: 2232618 - RNA, 14 nt, Human
aucuugcucuguaa

SEQ ID NO: 2232619 - RNA, 15 nt, Human
aucuugcucuguaau

SEQ ID NO: 2232620 - RNA, 16 nt, Human
aucuugcucuguaauc

SEQ ID NO: 2232621 - RNA, 17 nt, Human
aucuugcucuguaaucu

SEQ ID NO: 2232622 - RNA, 17 nt, Human
aucuugcucugcugaca

SEQ ID NO: 2232623 - RNA, 19 nt, Human
aucuugcucugcugacaga

SEQ ID NO: 2232624 - RNA, 20 nt, Human
aucuuaggggagagcuuucu

SEQ ID NO: 2232625 - RNA, 18 nt, Human
aucuugaauuguaaggaa

SEQ ID NO: 2232626 - RNA, 22 nt, Human
aucuugaccaagcaggaagcuc

SEQ ID NO: 2232627 - RNA, 21 nt, Human
aucuugaccaagcaggaagcu

SEQ ID NO: 2232628 - RNA, 19 nt, Human
aucuugaccaagcaggaag

SEQ ID NO: 2232629 - RNA, 17 nt, Human
aucuugaccaagcagga

SEQ ID NO: 2232630 - RNA, 17 nt, Human
aucuugacauucaaggc

SEQ ID NO: 2232631 - RNA, 17 nt, Human
aucuugacuacagucag

SEQ ID NO: 2232632 - RNA, 22 nt, Human
aucuugagcaaguuccuucugg

SEQ ID NO: 2232633 - RNA, 23 nt, Human
aucuuaauuuugguuguauucuu

SEQ ID NO: 2232634 - RNA, 21 nt, Human
aucuguuuaaaguagauuaga

SEQ ID NO: 2232635 - RNA, 18 nt, Human
aucuuaauuuugguugua

SEQ ID NO: 2232636 - RNA, 19 nt, Human
aucuuaauuuugguuguau

SEQ ID NO: 2232637 - RNA, 22 nt, Human
aucuuaauuuugguuguauucu

SEQ ID NO: 2232638 - RNA, 23 nt, Human
aucuguuguguacguggagaggg

SEQ ID NO: 2232639 - RNA, 18 nt, Human
aucuguugcaaacucagc

SEQ ID NO: 2232640 - RNA, 12 nt, Human
aucuguuuacag

SEQ ID NO: 2232641 - RNA, 15 nt, Human
aucuguuguuuuguu

SEQ ID NO: 2232642 - RNA, 15 nt, Human
aucuuacugaaggua

SEQ ID NO: 2232643 - RNA, 14 nt, Human
aucuuacugaaggu

SEQ ID NO: 2232644 - RNA, 13 nt, Human
aucuuacagcugg

SEQ ID NO: 2232645 - RNA, 21 nt, Human
aucuguguuuuugaaauauua

SEQ ID NO: 2232646 - RNA, 18 nt, Human
aucuguguuuuugaaaua

SEQ ID NO: 2232647 - RNA, 16 nt, Human
aucuguguuuuugaaa

SEQ ID NO: 2232648 - RNA, 21 nt, Human
aucuguuguguacguggagag

SEQ ID NO: 2232649 - RNA, 19 nt, Human
aucuguucuuuaauuuauu

SEQ ID NO: 2232650 - RNA, 13 nt, Human
aucuguugcaaac

SEQ ID NO: 2232651 - RNA, 21 nt, Human
aucugugaaaugcuggcauuu

SEQ ID NO: 2232652 - RNA, 11 nt, Human
aucugugaaua

SEQ ID NO: 2232653 - RNA, 13 nt, Human
aucugugaauaag

SEQ ID NO: 2232654 - RNA, 12 nt, Human
aucugugaauaa

SEQ ID NO: 2232655 - RNA, 15 nt, Human
aucugugucuuguuu

SEQ ID NO: 2232656 - RNA, 14 nt, Human
aucuguagggcugg

SEQ ID NO: 2232657 - RNA, 16 nt, Human
aucugugaauucagau

SEQ ID NO: 2232658 - RNA, 17 nt, Human
aucugugaauucagauu

SEQ ID NO: 2232659 - RNA, 13 nt, Human
aucugugugaaaa

SEQ ID NO: 2232660 - RNA, 15 nt, Human
aucugugugaaaaug

SEQ ID NO: 2232661 - RNA, 17 nt, Human
aucugugugaaaauggg

SEQ ID NO: 2232662 - RNA, 15 nt, Human
uugaugcuggagagg

SEQ ID NO: 2232663 - RNA, 15 nt, Human
uugaugccaggacac

SEQ ID NO: 2232664 - RNA, 17 nt, Human
uugaugcuggagagguu

SEQ ID NO: 2232665 - RNA, 14 nt, Human
uugauggagauauu

SEQ ID NO: 2232666 - RNA, 15 nt, Human
uugaugggauuuggu

SEQ ID NO: 2232667 - RNA, 14 nt, Human
uugauggggaagga

SEQ ID NO: 2232668 - RNA, 13 nt, Human
uugauggguucua

SEQ ID NO: 2232669 - RNA, 21 nt, Human
uugaugguaaccauaauggaa

SEQ ID NO: 2232670 - RNA, 18 nt, Human
uugaugcuggagagguua

SEQ ID NO: 2232671 - RNA, 18 nt, Human
uugauggugguauguuuu

SEQ ID NO: 2232672 - RNA, 19 nt, Human
aucucuuauuuuacaauaa

SEQ ID NO: 2232673 - RNA, 16 nt, Human
aucucuuauuuuacaa

SEQ ID NO: 2232674 - RNA, 22 nt, Human
aucucuuagcuccccuccaacc

SEQ ID NO: 2232675 - RNA, 23 nt, Human
aucucuuagcuccccuccaaccu

SEQ ID NO: 2232676 - RNA, 22 nt, Human
aucucuuccuacccaaccacuc

SEQ ID NO: 2232677 - RNA, 23 nt, Human
uugaugcauuaaaagaaaauaaa

SEQ ID NO: 2232678 - RNA, 19 nt, Human
aucucuucuggguuccuuc

SEQ ID NO: 2232679 - RNA, 12 nt, Human
uugaugccuggc

SEQ ID NO: 2232680 - RNA, 14 nt, Human
uugauucagacagc

SEQ ID NO: 2232681 - RNA, 16 nt, Human
uugaugugugucuagg

SEQ ID NO: 2232682 - RNA, 20 nt, Human
uugauguguuuauuuauaga

SEQ ID NO: 2232683 - RNA, 11 nt, Human
uugauguguuu

SEQ ID NO: 2232684 - RNA, 23 nt, Human
uugauggugaugaaauguaaaua

SEQ ID NO: 2232685 - RNA, 19 nt, Human
uugauggugguauguuuuc

SEQ ID NO: 2232686 - RNA, 20 nt, Human
uugauguacagucugucaug

SEQ ID NO: 2232687 - RNA, 19 nt, Human
uugauguacagucugucau

SEQ ID NO: 2232688 - RNA, 19 nt, Human
uugcacaaaccaauuaaac

SEQ ID NO: 2232689 - RNA, 19 nt, Human
uugcacaauauugaacuuu

SEQ ID NO: 2232690 - RNA, 20 nt, Human
uugcacaauauugaacuuuu

SEQ ID NO: 2232691 - RNA, 21 nt, Human
uugcacaauauugaacuuuuu

SEQ ID NO: 2232692 - RNA, 15 nt, Human
uugauucagacagcu

SEQ ID NO: 2232693 - RNA, 16 nt, Human
uugauucagacagcug

SEQ ID NO: 2232694 - RNA, 13 nt, Human
uugcacacuugug

SEQ ID NO: 2232695 - RNA, 22 nt, Human
uugcacacuccccugcacugga

SEQ ID NO: 2232696 - RNA, 17 nt, Human
uugcacacuccccugca

SEQ ID NO: 2232697 - RNA, 21 nt, Human
uugcacacccacucagcuccg

SEQ ID NO: 2232698 - RNA, 19 nt, Human
uugcacacccacucagcuc

SEQ ID NO: 2232699 - RNA, 13 nt, Human
uugcacaugucuu

SEQ ID NO: 2232700 - RNA, 15 nt, Human
uugcacaugucuuaa

SEQ ID NO: 2232701 - RNA, 16 nt, Human
uugcacaugucuuaau

SEQ ID NO: 2232702 - RNA, 16 nt, Human
uugcacagcuaugaag

SEQ ID NO: 2232703 - RNA, 16 nt, Human
uugcacaguuagcaaa

SEQ ID NO: 2232704 - RNA, 21 nt, Human
uugcaucuggguagcuguaag

SEQ ID NO: 2232705 - RNA, 13 nt, Human
uugcaucuguaua

SEQ ID NO: 2232706 - RNA, 14 nt, Human
uugcaucuguauaa

SEQ ID NO: 2232707 - RNA, 19 nt, Human
uugcaucuguauaaguaag

SEQ ID NO: 2232708 - RNA, 23 nt, Human
uugcaucuguauaaguaagaaaa

SEQ ID NO: 2232709 - RNA, 20 nt, Human
uugcaucuggguagcuguaa

SEQ ID NO: 2232710 - RNA, 19 nt, Human
uugcaucuggguagcugua

SEQ ID NO: 2232711 - RNA, 18 nt, Human
uugcaucuggguagcugu

SEQ ID NO: 2232712 - RNA, 18 nt, Human
uugcauccaacuccagga

SEQ ID NO: 2232713 - RNA, 15 nt, Human
uugcaugugacucug

SEQ ID NO: 2232714 - RNA, 20 nt, Human
uugcaugugaaaaucaaaua

SEQ ID NO: 2232715 - RNA, 14 nt, Human
uugcaugugaaaau

SEQ ID NO: 2232716 - RNA, 17 nt, Human
uugcaugugacucugaa

SEQ ID NO: 2232717 - RNA, 16 nt, Human
uugcaugugacucuga

SEQ ID NO: 2232718 - RNA, 17 nt, Human
uugcauguuccacuaac

SEQ ID NO: 2232719 - RNA, 19 nt, Human
uugcauguuccacuaaccc

SEQ ID NO: 2232720 - RNA, 15 nt, Human
uugcauguggaucaa

SEQ ID NO: 2232721 - RNA, 14 nt, Human
uugcaucugaaaau

SEQ ID NO: 2232722 - RNA, 20 nt, Human
uugcaucucccagauaaugu

SEQ ID NO: 2232723 - RNA, 22 nt, Human
uugcacaugucuuaaugaaguu

SEQ ID NO: 2232724 - RNA, 17 nt, Human
uugcacaugucuuaaug

SEQ ID NO: 2232725 - RNA, 21 nt, Human
uugcacaugucuuaaugaagu

SEQ ID NO: 2232726 - RNA, 16 nt, Human
uugcacauguuuccuc

SEQ ID NO: 2232727 - RNA, 17 nt, Human
aucucagugcuguaaaa

SEQ ID NO: 2232728 - RNA, 23 nt, Human
aucucagugguuaagauuccuaa

SEQ ID NO: 2232729 - RNA, 21 nt, Human
aucucauuuccaagcaaguau

SEQ ID NO: 2232730 - RNA, 17 nt, Human
aucucauagguugccaa

SEQ ID NO: 2232731 - RNA, 23 nt, Human
aucucauagguugccaauaauac

SEQ ID NO: 2232732 - RNA, 15 nt, Human
aucuccacuccagau

SEQ ID NO: 2232733 - RNA, 13 nt, Human
aucuccaaaauaa

SEQ ID NO: 2232734 - RNA, 20 nt, Human
aucuccaggauugaagagca

SEQ ID NO: 2232735 - RNA, 12 nt, Human
aucuccaggauu

SEQ ID NO: 2232736 - RNA, 19 nt, Human
aucuccagggaguccccuc

SEQ ID NO: 2232737 - RNA, 20 nt, Human
aucuccagggaguccccucc

SEQ ID NO: 2232738 - RNA, 21 nt, Human
aucuccagggaguccccuccc

SEQ ID NO: 2232739 - RNA, 15 nt, Human
aucuccaguauucuu

SEQ ID NO: 2232740 - RNA, 19 nt, Human
aucucauagguugccaaua

SEQ ID NO: 2232741 - RNA, 15 nt, Human
aucucaucuaucuca

SEQ ID NO: 2232742 - RNA, 23 nt, Human
aucucauuuccaagcaaguauua

SEQ ID NO: 2232743 - RNA, 16 nt, Human
aucuccccaucauugg

SEQ ID NO: 2232744 - RNA, 20 nt, Human
aucucccaccuagcagcacc

SEQ ID NO: 2232745 - RNA, 19 nt, Human
aucucccagauaaugugaa

SEQ ID NO: 2232746 - RNA, 20 nt, Human
aucucccagauaaugugaaa

SEQ ID NO: 2232747 - RNA, 19 nt, Human
aucucccaccuagcagcac

SEQ ID NO: 2232748 - RNA, 18 nt, Human
aucucccaccuagcagca

SEQ ID NO: 2232749 - RNA, 18 nt, Human
aucuccaguauucuuguc

SEQ ID NO: 2232750 - RNA, 14 nt, Human
aucuccauggcuuc

SEQ ID NO: 2232751 - RNA, 15 nt, Human
aucuccauggcuucc

SEQ ID NO: 2232752 - RNA, 17 nt, Human
aucuccauggcuuccuc

SEQ ID NO: 2232753 - RNA, 18 nt, Human
aucuccauggcuuccucc

SEQ ID NO: 2232754 - RNA, 19 nt, Human
aucuccauggcuuccuccu

SEQ ID NO: 2232755 - RNA, 22 nt, Human
aucuccauggcuuccuccuccc

SEQ ID NO: 2232756 - RNA, 14 nt, Human
aucucccccagccc

SEQ ID NO: 2232757 - RNA, 18 nt, Human
aucucuuagcauuuuaau

SEQ ID NO: 2232758 - RNA, 14 nt, Human
aucuccccacucua

SEQ ID NO: 2232759 - RNA, 13 nt, Human
aucuccccacucu

SEQ ID NO: 2232760 - RNA, 13 nt, Human
aucucuuagcucc

SEQ ID NO: 2232761 - RNA, 16 nt, Human
aucucuuagcuccccu

SEQ ID NO: 2232762 - RNA, 18 nt, Human
aucucuuagcuccccucc

SEQ ID NO: 2232763 - RNA, 19 nt, Human
aucucuuagcuccccucca

SEQ ID NO: 2232764 - RNA, 12 nt, Human
aucucccccagc

SEQ ID NO: 2232765 - RNA, 13 nt, Human
aucucccccagcc

SEQ ID NO: 2232766 - RNA, 13 nt, Human
auccuaugcaaua

SEQ ID NO: 2232767 - RNA, 23 nt, Human
auccuaucagccugucucuucca

SEQ ID NO: 2232768 - RNA, 13 nt, Human
auccuagugcuuu

SEQ ID NO: 2232769 - RNA, 20 nt, Human
auccuaucagccugucucuu

SEQ ID NO: 2232770 - RNA, 19 nt, Human
auccuaucaacaacaaggu

SEQ ID NO: 2232771 - RNA, 15 nt, Human
auccuaguuccacca

SEQ ID NO: 2232772 - RNA, 19 nt, Human
auccuaguuccaccaucaa

SEQ ID NO: 2232773 - RNA, 16 nt, Human
aucucacacaugagca

SEQ ID NO: 2232774 - RNA, 16 nt, Human
aucucaauucuucccu

SEQ ID NO: 2232775 - RNA, 14 nt, Human
aucucaauucuucc

SEQ ID NO: 2232776 - RNA, 15 nt, Human
aucucacacaugagc

SEQ ID NO: 2232777 - RNA, 13 nt, Human
aucucaauauuuc

SEQ ID NO: 2232778 - RNA, 19 nt, Human
aucucacuuuucuccauga

SEQ ID NO: 2232779 - RNA, 15 nt, Human
aucucacuuuucucc

SEQ ID NO: 2232780 - RNA, 18 nt, Human
aucucacuugugccaaca

SEQ ID NO: 2232781 - RNA, 22 nt, Human
aucucacuugugccaacacuca

SEQ ID NO: 2232782 - RNA, 13 nt, Human
aucucacuugugc

SEQ ID NO: 2232783 - RNA, 11 nt, Human
aucucagccca

SEQ ID NO: 2232784 - RNA, 20 nt, Human
aucucagaucaguguaccau

SEQ ID NO: 2232785 - RNA, 20 nt, Human
aucucagaauuccuuuucua

SEQ ID NO: 2232786 - RNA, 17 nt, Human
aucucaggccaccugcc

SEQ ID NO: 2232787 - RNA, 15 nt, Human
aucucaggccaccug

SEQ ID NO: 2232788 - RNA, 14 nt, Human
aucucaggccaccu

SEQ ID NO: 2232789 - RNA, 20 nt, Human
aucucaggccaccugccccc

SEQ ID NO: 2232790 - RNA, 19 nt, Human
aucucaggccaccugcccc

SEQ ID NO: 2232791 - RNA, 23 nt, Human
uuggggggggcccgccuggcaga

SEQ ID NO: 2232792 - RNA, 16 nt, Human
uugggggcugugggga

SEQ ID NO: 2232793 - RNA, 14 nt, Human
uugggggcuggugc

SEQ ID NO: 2232794 - RNA, 16 nt, Human
uugggggcuggugcca

SEQ ID NO: 2232795 - RNA, 22 nt, Human
uuggggggcugaggugggagga

SEQ ID NO: 2232796 - RNA, 14 nt, Human
uugguucccuugug

SEQ ID NO: 2232797 - RNA, 20 nt, Human
uuggggggguggccgcugag

SEQ ID NO: 2232798 - RNA, 13 nt, Human
uuggggggguggc

SEQ ID NO: 2232799 - RNA, 16 nt, Human
uuggggcuugacuuuu

SEQ ID NO: 2232800 - RNA, 21 nt, Human
uuggggcgaggcagaggacag

SEQ ID NO: 2232801 - RNA, 12 nt, Human
uugggggcuggu

SEQ ID NO: 2232802 - RNA, 15 nt, Human
uuggggcuuauuuuu

SEQ ID NO: 2232803 - RNA, 18 nt, Human
uugggggacagggcuggc

SEQ ID NO: 2232804 - RNA, 21 nt, Human
uugggggacagggcuggccca

SEQ ID NO: 2232805 - RNA, 23 nt, Human
uugggggacagggcuggcccagc

SEQ ID NO: 2232806 - RNA, 17 nt, Human
uuggggcgaggcagagg

SEQ ID NO: 2232807 - RNA, 19 nt, Human
uugggccugcuccagaccu

SEQ ID NO: 2232808 - RNA, 12 nt, Human
uugggcccuccu

SEQ ID NO: 2232809 - RNA, 13 nt, Human
uugggcccaggga

SEQ ID NO: 2232810 - RNA, 14 nt, Human
uugggccccagccu

SEQ ID NO: 2232811 - RNA, 18 nt, Human
uugggccccagaggcugg

SEQ ID NO: 2232812 - RNA, 12 nt, Human
uugggcccagcu

SEQ ID NO: 2232813 - RNA, 16 nt, Human
uugggcccagcugggc

SEQ ID NO: 2232814 - RNA, 17 nt, Human
uugggcccagcugggcu

SEQ ID NO: 2232815 - RNA, 18 nt, Human
uugggcccagcugggcuc

SEQ ID NO: 2232816 - RNA, 22 nt, Human
uugggcccagcugggcucugcc

SEQ ID NO: 2232817 - RNA, 11 nt, Human
uugggcccagg

SEQ ID NO: 2232818 - RNA, 14 nt, Human
uuggggauauuuuu

SEQ ID NO: 2232819 - RNA, 17 nt, Human
uugggccugcuccagac

SEQ ID NO: 2232820 - RNA, 16 nt, Human
uugggccugcuccaga

SEQ ID NO: 2232821 - RNA, 13 nt, Human
augaauuaaauuu

SEQ ID NO: 2232822 - RNA, 17 nt, Human
uugggccauacuggccu

SEQ ID NO: 2232823 - RNA, 16 nt, Human
uugggccauacuggcc

SEQ ID NO: 2232824 - RNA, 23 nt, Human
uugggccauacuggccucgccug

SEQ ID NO: 2232825 - RNA, 18 nt, Human
uugggccauacuggccuc

SEQ ID NO: 2232826 - RNA, 19 nt, Human
uugggccauacuggccucg

SEQ ID NO: 2232827 - RNA, 17 nt, Human
uugggccagacaugcca

SEQ ID NO: 2232828 - RNA, 16 nt, Human
augaauuaaauaaacc

SEQ ID NO: 2232829 - RNA, 14 nt, Human
uugggccagacaug

SEQ ID NO: 2232830 - RNA, 21 nt, Human
augaaugugugugguuuuuuu

SEQ ID NO: 2232831 - RNA, 12 nt, Human
augaauguguaa

SEQ ID NO: 2232832 - RNA, 11 nt, Human
augaauguuua

SEQ ID NO: 2232833 - RNA, 22 nt, Human
augaauguuuacacucuuugua

SEQ ID NO: 2232834 - RNA, 14 nt, Human
augaauuaaauaaa

SEQ ID NO: 2232835 - RNA, 14 nt, Human
augaauuaaagugg

SEQ ID NO: 2232836 - RNA, 24 nt, Human
augaaccuucuggccucccacaga

SEQ ID NO: 2232837 - RNA, 21 nt, Human
augaaccuucuggccucccac

SEQ ID NO: 2232838 - RNA, 16 nt, Human
augaacggugagcauu

SEQ ID NO: 2232839 - RNA, 13 nt, Human
augaacuauuccc

SEQ ID NO: 2232840 - RNA, 15 nt, Human
augaacggugagcau

SEQ ID NO: 2232841 - RNA, 14 nt, Human
augaacugaaguuu

SEQ ID NO: 2232842 - RNA, 20 nt, Human
augaacuauuccccagcagg

SEQ ID NO: 2232843 - RNA, 20 nt, Human
augaacucuuagaaaugaag

SEQ ID NO: 2232844 - RNA, 14 nt, Human
augaacucaacuuu

SEQ ID NO: 2232845 - RNA, 16 nt, Human
augaacucuuaaucaa

SEQ ID NO: 2232846 - RNA, 15 nt, Human
augaacugaaguuuc

SEQ ID NO: 2232847 - RNA, 16 nt, Human
augaacugaaguuuca

SEQ ID NO: 2232848 - RNA, 17 nt, Human
augaacugaaguuucac

SEQ ID NO: 2232849 - RNA, 19 nt, Human
augaacugaaguuucacau

SEQ ID NO: 2232850 - RNA, 20 nt, Human
augaacugaaguuucacaug

SEQ ID NO: 2232851 - RNA, 15 nt, Human
augaaagggcccaga

SEQ ID NO: 2232852 - RNA, 18 nt, Human
augaaauauuauguuaaa

SEQ ID NO: 2232853 - RNA, 13 nt, Human
augaaauauuaug

SEQ ID NO: 2232854 - RNA, 17 nt, Human
augaaauauuauguuaa

SEQ ID NO: 2232855 - RNA, 16 nt, Human
augaacuuauucugua

SEQ ID NO: 2232856 - RNA, 22 nt, Human
augaagauauuuuuccauuuuu

SEQ ID NO: 2232857 - RNA, 20 nt, Human
augaagaucauauacgugaa

SEQ ID NO: 2232858 - RNA, 13 nt, Human
augaaugaauggc

SEQ ID NO: 2232859 - RNA, 18 nt, Human
augaagauguagaggaga

SEQ ID NO: 2232860 - RNA, 15 nt, Human
augaaugcacacuag

SEQ ID NO: 2232861 - RNA, 20 nt, Human
augaaugaggucccaggcag

SEQ ID NO: 2232862 - RNA, 19 nt, Human
augaaugaggucccaggca

SEQ ID NO: 2232863 - RNA, 16 nt, Human
augaaugagaaucuac

SEQ ID NO: 2232864 - RNA, 18 nt, Human
augaaugcccccagcugg

SEQ ID NO: 2232865 - RNA, 20 nt, Human
augaaugcccccagcuggcc

SEQ ID NO: 2232866 - RNA, 21 nt, Human
augaaugcccccagcuggccc

SEQ ID NO: 2232867 - RNA, 20 nt, Human
augaaugucagugugacuga

SEQ ID NO: 2232868 - RNA, 20 nt, Human
uuggaugggagugagacaga

SEQ ID NO: 2232869 - RNA, 21 nt, Human
uuggauggaguccagggaaga

SEQ ID NO: 2232870 - RNA, 21 nt, Human
uuggaugggagugagacagaa

SEQ ID NO: 2232871 - RNA, 23 nt, Human
uuggaugcagugcucgcuguugc

SEQ ID NO: 2232872 - RNA, 24 nt, Human
uuggaugcagugcucgcuguugcu

SEQ ID NO: 2232873 - RNA, 13 nt, Human
uuggauuauucau

SEQ ID NO: 2232874 - RNA, 17 nt, Human
uuggauuauucauuuaa

SEQ ID NO: 2232875 - RNA, 18 nt, Human
uuggauuauucauuuaaa

SEQ ID NO: 2232876 - RNA, 22 nt, Human
uuggauaaugcuguugccucau

SEQ ID NO: 2232877 - RNA, 19 nt, Human
uuggaucuucaauggcuuu

SEQ ID NO: 2232878 - RNA, 23 nt, Human
aucuugcuuuuuuucaccaauau

SEQ ID NO: 2232879 - RNA, 22 nt, Human
aucuugcucuguaaucucguuu

SEQ ID NO: 2232880 - RNA, 23 nt, Human
aucuugcuucccuaaucuauggu

SEQ ID NO: 2232881 - RNA, 22 nt, Human
uuggagugaguguggcuccccu

SEQ ID NO: 2232882 - RNA, 22 nt, Human
uuggaguguuccccuuccacug

SEQ ID NO: 2232883 - RNA, 19 nt, Human
uuggaguguuccccuucca

SEQ ID NO: 2232884 - RNA, 14 nt, Human
uuggcgggccaagg

SEQ ID NO: 2232885 - RNA, 17 nt, Human
uuggauuauuuaauaac

SEQ ID NO: 2232886 - RNA, 14 nt, Human
uuggauuauuuaau

SEQ ID NO: 2232887 - RNA, 15 nt, Human
uuggauuauuuaaua

SEQ ID NO: 2232888 - RNA, 18 nt, Human
uuggcuagagguucaaag

SEQ ID NO: 2232889 - RNA, 20 nt, Human
uuggauuauucauuuaaaau

SEQ ID NO: 2232890 - RNA, 23 nt, Human
uuggauuauucauuuaaaaugau

SEQ ID NO: 2232891 - RNA, 23 nt, Human
uuggcgcugccccuggcagcccc

SEQ ID NO: 2232892 - RNA, 20 nt, Human
uuggcuaacuauauuugcuu

SEQ ID NO: 2232893 - RNA, 13 nt, Human
uuggcucuggaga

SEQ ID NO: 2232894 - RNA, 22 nt, Human
uuggcucgaaucucugugccuu

SEQ ID NO: 2232895 - RNA, 23 nt, Human
uuggcugagauaugaacauauug

SEQ ID NO: 2232896 - RNA, 22 nt, Human
uuggcugaaauucuccuggagg

SEQ ID NO: 2232897 - RNA, 20 nt, Human
uuggcugaaauucuccugga

SEQ ID NO: 2232898 - RNA, 21 nt, Human
uuggcugaaauucuccuggag

SEQ ID NO: 2232899 - RNA, 14 nt, Human
uuggcucuggagac

SEQ ID NO: 2232900 - RNA, 17 nt, Human
uuggcucuggagacagc

SEQ ID NO: 2232901 - RNA, 19 nt, Human
uuggcucuggagacagccc

SEQ ID NO: 2232902 - RNA, 19 nt, Human
uuggcugaaauucuccugg

SEQ ID NO: 2232903 - RNA, 20 nt, Human
uuggcucuggagacagcccc

SEQ ID NO: 2232904 - RNA, 22 nt, Human
uuggcucuggagacagccccag

SEQ ID NO: 2232905 - RNA, 14 nt, Human
aucuuuugugagau

SEQ ID NO: 2232906 - RNA, 23 nt, Human
aucuuuugugagauguaauuguu

SEQ ID NO: 2232907 - RNA, 19 nt, Human
aucuuugcagguugcuuug

SEQ ID NO: 2232908 - RNA, 22 nt, Human
aucuuugccuugggcugcuccu

SEQ ID NO: 2232909 - RNA, 23 nt, Human
aucuuuggacagaagcagcucuu

SEQ ID NO: 2232910 - RNA, 13 nt, Human
aucuuuuuauuca

SEQ ID NO: 2232911 - RNA, 13 nt, Human
aucuuuuucuaac

SEQ ID NO: 2232912 - RNA, 18 nt, Human
augaaagcauguggcaug

SEQ ID NO: 2232913 - RNA, 12 nt, Human
augaaagcaugu

SEQ ID NO: 2232914 - RNA, 22 nt, Human
augaaagcuccucgagggcagg

SEQ ID NO: 2232915 - RNA, 23 nt, Human
aucuuuuuuagcauaaaauuuuc

SEQ ID NO: 2232916 - RNA, 19 nt, Human
aucuuuuuuagcauaaaau

SEQ ID NO: 2232917 - RNA, 18 nt, Human
aucuuuuuuagcauaaaa

SEQ ID NO: 2232918 - RNA, 16 nt, Human
aucuuuuuuagcauaa

SEQ ID NO: 2232919 - RNA, 14 nt, Human
aucuuuuucucuaa

SEQ ID NO: 2232920 - RNA, 15 nt, Human
augaaagcagggacu

SEQ ID NO: 2232921 - RNA, 13 nt, Human
aucuuugccuugg

SEQ ID NO: 2232922 - RNA, 15 nt, Human
aucuuugccacccuc

SEQ ID NO: 2232923 - RNA, 16 nt, Human
aucuuugccacccuca

SEQ ID NO: 2232924 - RNA, 20 nt, Human
aucuuugccuugggcugcuc

SEQ ID NO: 2232925 - RNA, 14 nt, Human
aucuuugccuuggg

SEQ ID NO: 2232926 - RNA, 22 nt, Human
aucuuuggacagaagcagcucu

SEQ ID NO: 2232927 - RNA, 18 nt, Human
aucuuugcagacaggcaa

SEQ ID NO: 2232928 - RNA, 23 nt, Human
uuggcucuggagacagccccaga

SEQ ID NO: 2232929 - RNA, 14 nt, Human
aucuuuauuaauca

SEQ ID NO: 2232930 - RNA, 13 nt, Human
aucuuuauuaauc

SEQ ID NO: 2232931 - RNA, 14 nt, Human
aucuuugccacccu

SEQ ID NO: 2232932 - RNA, 13 nt, Human
uuggcugcaggga

SEQ ID NO: 2232933 - RNA, 21 nt, Human
aucuuuacaaaacuacaugag

SEQ ID NO: 2232934 - RNA, 17 nt, Human
aucuuuacaaaacuaca

SEQ ID NO: 2232935 - RNA, 22 nt, Human
aucuuuaauuuuacauuuccua

SEQ ID NO: 2232936 - RNA, 16 nt, Human
aucuuuaauuuuacau

SEQ ID NO: 2232937 - RNA, 21 nt, Human
aucuuuaauuuuacauuuccu

SEQ ID NO: 2232938 - RNA, 18 nt, Human
uugguugucaauauuaaa

SEQ ID NO: 2232939 - RNA, 12 nt, Human
uugguuguauuc

SEQ ID NO: 2232940 - RNA, 15 nt, Human
uugguuggcuggccu

SEQ ID NO: 2232941 - RNA, 13 nt, Human
uugguuguauucu

SEQ ID NO: 2232942 - RNA, 16 nt, Human
uugguuguauucuuug

SEQ ID NO: 2232943 - RNA, 12 nt, Human
uugguugucaau

SEQ ID NO: 2232944 - RNA, 22 nt, Human
uugguugucaauauuaaauaca

SEQ ID NO: 2232945 - RNA, 13 nt, Human
uugguucuggggc

SEQ ID NO: 2232946 - RNA, 14 nt, Human
uugguucuggggcc

SEQ ID NO: 2232947 - RNA, 13 nt, Human
uugguucuguguc

SEQ ID NO: 2232948 - RNA, 15 nt, Human
uugguucuaauagaa

SEQ ID NO: 2232949 - RNA, 19 nt, Human
uugguucuaauagaacuca

SEQ ID NO: 2232950 - RNA, 16 nt, Human
uugguugaauaaacua

SEQ ID NO: 2232951 - RNA, 13 nt, Human
uugguugaauaaa

SEQ ID NO: 2232952 - RNA, 20 nt, Human
uugguugaaaauaaaaagau

SEQ ID NO: 2232953 - RNA, 22 nt, Human
uugguucuugguagagauucau

SEQ ID NO: 2232954 - RNA, 16 nt, Human
uugguugcuuuaauau

SEQ ID NO: 2232955 - RNA, 13 nt, Human
uugguugcuuuaa

SEQ ID NO: 2232956 - RNA, 19 nt, Human
uuguaggggucaaagaaau

SEQ ID NO: 2232957 - RNA, 18 nt, Human
uuguaguaaagaaauuua

SEQ ID NO: 2232958 - RNA, 15 nt, Human
uuguaguagucucau

SEQ ID NO: 2232959 - RNA, 20 nt, Human
uuguaguagucucauuacuu

SEQ ID NO: 2232960 - RNA, 16 nt, Human
uuguauaaaauaauuu

SEQ ID NO: 2232961 - RNA, 15 nt, Human
uuguauaaaauaauu

SEQ ID NO: 2232962 - RNA, 20 nt, Human
uuguaggcgaaucauuuguu

SEQ ID NO: 2232963 - RNA, 16 nt, Human
uuguagggaugccuuu

SEQ ID NO: 2232964 - RNA, 17 nt, Human
uuguaggggucaaagaa

SEQ ID NO: 2232965 - RNA, 20 nt, Human
uuguaggggucaaagaaaug

SEQ ID NO: 2232966 - RNA, 23 nt, Human
uuguacaaaauaaacaaauaaca

SEQ ID NO: 2232967 - RNA, 16 nt, Human
uuguauauugucagau

SEQ ID NO: 2232968 - RNA, 15 nt, Human
uuguauauuguguuu

SEQ ID NO: 2232969 - RNA, 13 nt, Human
uuguauauugugu

SEQ ID NO: 2232970 - RNA, 15 nt, Human
uuguauaguaaagug

SEQ ID NO: 2232971 - RNA, 14 nt, Human
uuguauaguaaagu

SEQ ID NO: 2232972 - RNA, 18 nt, Human
uuguauagguagauguuc

SEQ ID NO: 2232973 - RNA, 14 nt, Human
uuguauaguguaaa

SEQ ID NO: 2232974 - RNA, 15 nt, Human
uuguauaguguaaaa

SEQ ID NO: 2232975 - RNA, 16 nt, Human
uuguauaguguaaaau

SEQ ID NO: 2232976 - RNA, 17 nt, Human
uuguauagagauaugca

SEQ ID NO: 2232977 - RNA, 16 nt, Human
uuguauaauuguaucg

SEQ ID NO: 2232978 - RNA, 17 nt, Human
uuguauaauuguaucgu

SEQ ID NO: 2232979 - RNA, 17 nt, Human
uuguauaaaauaauuuu

SEQ ID NO: 2232980 - RNA, 15 nt, Human
uuguauaauuguauc

SEQ ID NO: 2232981 - RNA, 21 nt, Human
augaauuuggagacucugugg

SEQ ID NO: 2232982 - RNA, 20 nt, Human
augaauuuggagacucugug

SEQ ID NO: 2232983 - RNA, 15 nt, Human
augaauuuggagacu

SEQ ID NO: 2232984 - RNA, 11 nt, Human
augaauuuaaa

SEQ ID NO: 2232985 - RNA, 13 nt, Human
augaauugcauuu

SEQ ID NO: 2232986 - RNA, 18 nt, Human
uuguauauuuguacaaaa

SEQ ID NO: 2232987 - RNA, 13 nt, Human
augaauuuaaaua

SEQ ID NO: 2232988 - RNA, 14 nt, Human
augaauuuaaauau

SEQ ID NO: 2232989 - RNA, 16 nt, Human
augaauuuaaauauaa

SEQ ID NO: 2232990 - RNA, 19 nt, Human
uuguauauugucagauauu

SEQ ID NO: 2232991 - RNA, 13 nt, Human
uuguauauuugua

SEQ ID NO: 2232992 - RNA, 19 nt, Human
uuguauauuguguuugugu

SEQ ID NO: 2232993 - RNA, 14 nt, Human
uuguauauuuguac

SEQ ID NO: 2232994 - RNA, 15 nt, Human
uuguauauuuguaca

SEQ ID NO: 2232995 - RNA, 16 nt, Human
uuguauauuuguacaa

SEQ ID NO: 2232996 - RNA, 17 nt, Human
uuguauauuuguacaaa

SEQ ID NO: 2232997 - RNA, 16 nt, Human
uuguaucacaaaucuu

SEQ ID NO: 2232998 - RNA, 18 nt, Human
augaauuuucaaguaauu

SEQ ID NO: 2232999 - RNA, 22 nt, Human
augaauuuucaaguaauuguga

SEQ ID NO: 2233000 - RNA, 23 nt, Human
augaauuuuguuuggacuucuuu

SEQ ID NO: 2233001 - RNA, 23 nt, Human
augaauuuaaauauaauucugua

SEQ ID NO: 2233002 - RNA, 22 nt, Human
augacacaugcaaggucauuuu

SEQ ID NO: 2233003 - RNA, 14 nt, Human
augacacaugcaag

SEQ ID NO: 2233004 - RNA, 15 nt, Human
augagaagagggccu

SEQ ID NO: 2233005 - RNA, 16 nt, Human
augagaaggaacuucc

SEQ ID NO: 2233006 - RNA, 16 nt, Human
augagaagagggccug

SEQ ID NO: 2233007 - RNA, 18 nt, Human
augagaagagggccugug

SEQ ID NO: 2233008 - RNA, 18 nt, Human
augagaaggaauuugagu

SEQ ID NO: 2233009 - RNA, 21 nt, Human
augagaagagggccuguggga

SEQ ID NO: 2233010 - RNA, 15 nt, Human
augagaaggcagcca

SEQ ID NO: 2233011 - RNA, 22 nt, Human
augagaaguugauauagaacag

SEQ ID NO: 2233012 - RNA, 23 nt, Human
augagaaucuacccccagaucca

SEQ ID NO: 2233013 - RNA, 11 nt, Human
augagaaucua

SEQ ID NO: 2233014 - RNA, 18 nt, Human
augagacaggaccuagga

SEQ ID NO: 2233015 - RNA, 21 nt, Human
augagaauuugagugcucuga

SEQ ID NO: 2233016 - RNA, 21 nt, Human
augagacccauuccuauuucu

SEQ ID NO: 2233017 - RNA, 18 nt, Human
augagaccacuguuauca

SEQ ID NO: 2233018 - RNA, 20 nt, Human
augagacaggaccuaggaua

SEQ ID NO: 2233019 - RNA, 22 nt, Human
augagacauaggccaugaaaaa

SEQ ID NO: 2233020 - RNA, 13 nt, Human
augagagacacac

SEQ ID NO: 2233021 - RNA, 14 nt, Human
augagagacacacu

SEQ ID NO: 2233022 - RNA, 17 nt, Human
augagagacacacugaa

SEQ ID NO: 2233023 - RNA, 19 nt, Human
augagagacacacugaaga

SEQ ID NO: 2233024 - RNA, 14 nt, Human
augagaacucugag

SEQ ID NO: 2233025 - RNA, 23 nt, Human
augagaaaucuaaaaaacgaaaa

SEQ ID NO: 2233026 - RNA, 13 nt, Human
augagaacaaaca

SEQ ID NO: 2233027 - RNA, 21 nt, Human
augagaaagguugaagcacca

SEQ ID NO: 2233028 - RNA, 22 nt, Human
augagaaagguugaagcaccaa

SEQ ID NO: 2233029 - RNA, 15 nt, Human
augagaaaucuaaaa

SEQ ID NO: 2233030 - RNA, 18 nt, Human
augagaaaucuaaaaaac

SEQ ID NO: 2233031 - RNA, 21 nt, Human
augacauuucuuugugcuuug

SEQ ID NO: 2233032 - RNA, 22 nt, Human
augacauuucuuugugcuuugg

SEQ ID NO: 2233033 - RNA, 14 nt, Human
augacauuuugcca

SEQ ID NO: 2233034 - RNA, 18 nt, Human
augacauuuauuuuucau

SEQ ID NO: 2233035 - RNA, 22 nt, Human
augacauuuauaucacauguuu

SEQ ID NO: 2233036 - RNA, 23 nt, Human
augaccaauauuauacuaagaaa

SEQ ID NO: 2233037 - RNA, 17 nt, Human
augacauuuugccaaaa

SEQ ID NO: 2233038 - RNA, 15 nt, Human
augaccaaaguccuu

SEQ ID NO: 2233039 - RNA, 14 nt, Human
augacuuacuguac

SEQ ID NO: 2233040 - RNA, 22 nt, Human
augacuuaagcacacuugacau

SEQ ID NO: 2233041 - RNA, 18 nt, Human
augacauucaugccuggc

SEQ ID NO: 2233042 - RNA, 13 nt, Human
augacauugcuaa

SEQ ID NO: 2233043 - RNA, 14 nt, Human
augacauugcuaag

SEQ ID NO: 2233044 - RNA, 20 nt, Human
augacauugcuaagaugcuc

SEQ ID NO: 2233045 - RNA, 23 nt, Human
augacauugcuaagaugcucuau

SEQ ID NO: 2233046 - RNA, 21 nt, Human
augaauuuuuuucaucuucuc

SEQ ID NO: 2233047 - RNA, 22 nt, Human
augaauuuuuuucaucuucucu

SEQ ID NO: 2233048 - RNA, 17 nt, Human
augacacauuuggcagu

SEQ ID NO: 2233049 - RNA, 18 nt, Human
augacacgaauauugcug

SEQ ID NO: 2233050 - RNA, 14 nt, Human
augagaaaagaggc

SEQ ID NO: 2233051 - RNA, 17 nt, Human
augacuuuuccauguau

SEQ ID NO: 2233052 - RNA, 12 nt, Human
augacuuuggac

SEQ ID NO: 2233053 - RNA, 20 nt, Human
augacuuuuccauguaucua

SEQ ID NO: 2233054 - RNA, 16 nt, Human
augacuuuauugcauc

SEQ ID NO: 2233055 - RNA, 13 nt, Human
augacuuuauugc

SEQ ID NO: 2233056 - RNA, 23 nt, Human
augacuuuauauggaugauucag

SEQ ID NO: 2233057 - RNA, 21 nt, Human
augacuuuauugcaucugggu

SEQ ID NO: 2233058 - RNA, 11 nt, Human
augacuuugga

SEQ ID NO: 2233059 - RNA, 16 nt, Human
augacuucauuaauaa

SEQ ID NO: 2233060 - RNA, 17 nt, Human
augacuuacuguacaug

SEQ ID NO: 2233061 - RNA, 16 nt, Human
augacuuacuguacau

SEQ ID NO: 2233062 - RNA, 17 nt, Human
auggcuaauucccagag

SEQ ID NO: 2233063 - RNA, 18 nt, Human
auggcgcagugccucugg

SEQ ID NO: 2233064 - RNA, 16 nt, Human
auggcuaauucccaga

SEQ ID NO: 2233065 - RNA, 21 nt, Human
auggcuauaaacaauuacaug

SEQ ID NO: 2233066 - RNA, 20 nt, Human
auggcuaguaucaaaagaaa

SEQ ID NO: 2233067 - RNA, 19 nt, Human
auggccuugcagcacucac

SEQ ID NO: 2233068 - RNA, 12 nt, Human
auggccuggcca

SEQ ID NO: 2233069 - RNA, 14 nt, Human
auggcgcagugccu

SEQ ID NO: 2233070 - RNA, 16 nt, Human
auggcgcagugccucu

SEQ ID NO: 2233071 - RNA, 17 nt, Human
auggcgcagugccucug

SEQ ID NO: 2233072 - RNA, 19 nt, Human
auggcgcagugccucuggu

SEQ ID NO: 2233073 - RNA, 15 nt, Human
auggcgggugggggu

SEQ ID NO: 2233074 - RNA, 15 nt, Human
auggccguuggccac

SEQ ID NO: 2233075 - RNA, 18 nt, Human
auggccuaugcacauaug

SEQ ID NO: 2233076 - RNA, 20 nt, Human
auggccuauuauauuaaaau

SEQ ID NO: 2233077 - RNA, 21 nt, Human
auggccuauuauauuaaaaua

SEQ ID NO: 2233078 - RNA, 14 nt, Human
auggccucagcugc

SEQ ID NO: 2233079 - RNA, 13 nt, Human
auggccucagcug

SEQ ID NO: 2233080 - RNA, 21 nt, Human
auggccucaagaucaaugaaa

SEQ ID NO: 2233081 - RNA, 20 nt, Human
auggccugccuugaagccac

SEQ ID NO: 2233082 - RNA, 19 nt, Human
auggccugccuugaagcca

SEQ ID NO: 2233083 - RNA, 16 nt, Human
auggccugggggaugu

SEQ ID NO: 2233084 - RNA, 20 nt, Human
auggccuuugcuugaaagaa

SEQ ID NO: 2233085 - RNA, 13 nt, Human
auggccggccggg

SEQ ID NO: 2233086 - RNA, 18 nt, Human
auggccggagaggaccgg

SEQ ID NO: 2233087 - RNA, 16 nt, Human
auggccagugucuguc

SEQ ID NO: 2233088 - RNA, 21 nt, Human
auggccgggcgcgguggcuca

SEQ ID NO: 2233089 - RNA, 22 nt, Human
auggccagguggccacuccaga

SEQ ID NO: 2233090 - RNA, 15 nt, Human
auggccagugucugu

SEQ ID NO: 2233091 - RNA, 16 nt, Human
auggccagguggccac

SEQ ID NO: 2233092 - RNA, 22 nt, Human
auggccacaguagucuugauga

SEQ ID NO: 2233093 - RNA, 16 nt, Human
auggccaccuuuucag

SEQ ID NO: 2233094 - RNA, 17 nt, Human
auggccaccuuuucagc

SEQ ID NO: 2233095 - RNA, 21 nt, Human
auggcagaaggcaaacccauc

SEQ ID NO: 2233096 - RNA, 19 nt, Human
auggcagaggaauaucaau

SEQ ID NO: 2233097 - RNA, 15 nt, Human
auggcagaguuguaa

SEQ ID NO: 2233098 - RNA, 20 nt, Human
auggcagaaggcaaacccau

SEQ ID NO: 2233099 - RNA, 15 nt, Human
auggcagaaggcaaa

SEQ ID NO: 2233100 - RNA, 17 nt, Human
auggcagaguuguaaau

SEQ ID NO: 2233101 - RNA, 18 nt, Human
auggcagaguuguaaaua

SEQ ID NO: 2233102 - RNA, 20 nt, Human
auggcagaguuguaaauaua

SEQ ID NO: 2233103 - RNA, 21 nt, Human
auggcagaguuguaaauauau

SEQ ID NO: 2233104 - RNA, 19 nt, Human
auggcagaguuuguguguu

SEQ ID NO: 2233105 - RNA, 20 nt, Human
auggcagaguuuguguguug

SEQ ID NO: 2233106 - RNA, 22 nt, Human
auggcagaguuuguguguuguc

SEQ ID NO: 2233107 - RNA, 23 nt, Human
auggcagaguuuguguguugucu

SEQ ID NO: 2233108 - RNA, 23 nt, Human
auggcacagcccaaagaaggaaa

SEQ ID NO: 2233109 - RNA, 23 nt, Human
auggcaauucuuugaccucaacc

SEQ ID NO: 2233110 - RNA, 22 nt, Human
auggcacaaucucggcucacug

SEQ ID NO: 2233111 - RNA, 16 nt, Human
auggcaauuuuguaac

SEQ ID NO: 2233112 - RNA, 15 nt, Human
auggcaauuuuguaa

SEQ ID NO: 2233113 - RNA, 19 nt, Human
auggcaaggacugcaggga

SEQ ID NO: 2233114 - RNA, 23 nt, Human
auggcaagaaagcugguaaacua

SEQ ID NO: 2233115 - RNA, 18 nt, Human
auggcaaggcagcccugu

SEQ ID NO: 2233116 - RNA, 21 nt, Human
auggcaaggcagcccugucug

SEQ ID NO: 2233117 - RNA, 17 nt, Human
auggcaacagaucugga

SEQ ID NO: 2233118 - RNA, 16 nt, Human
auggcaacagaucugg

SEQ ID NO: 2233119 - RNA, 24 nt, Human
auggcaacagaucuggaaccucag

SEQ ID NO: 2233120 - RNA, 19 nt, Human
auggcaccaaagccaccag

SEQ ID NO: 2233121 - RNA, 16 nt, Human
auggcagaagacacca

SEQ ID NO: 2233122 - RNA, 13 nt, Human
auggcagaagaca

SEQ ID NO: 2233123 - RNA, 13 nt, Human
auggcagaaggca

SEQ ID NO: 2233124 - RNA, 22 nt, Human
auggcagaagacaccagagcag

SEQ ID NO: 2233125 - RNA, 24 nt, Human
auggcagaagacaccagagcagau

SEQ ID NO: 2233126 - RNA, 17 nt, Human
auggcagaagacaccag

SEQ ID NO: 2233127 - RNA, 19 nt, Human
auggcagaagacaccagag

SEQ ID NO: 2233128 - RNA, 20 nt, Human
auggcagaagacaccagagc

SEQ ID NO: 2233129 - RNA, 21 nt, Human
auggcagaagacaccagagca

SEQ ID NO: 2233130 - RNA, 23 nt, Human
auggcacaucagcacgauuucug

SEQ ID NO: 2233131 - RNA, 17 nt, Human
auggcacaucagcacga

SEQ ID NO: 2233132 - RNA, 14 nt, Human
auggauuugccugu

SEQ ID NO: 2233133 - RNA, 18 nt, Human
auggauuuucuauuguua

SEQ ID NO: 2233134 - RNA, 21 nt, Human
auggauuugccugugccaccc

SEQ ID NO: 2233135 - RNA, 20 nt, Human
auggauuuucuauuguuacu

SEQ ID NO: 2233136 - RNA, 21 nt, Human
auggauuuucuauuguuacuc

SEQ ID NO: 2233137 - RNA, 14 nt, Human
auggauuugaagca

SEQ ID NO: 2233138 - RNA, 15 nt, Human
auggauuugaagcaa

SEQ ID NO: 2233139 - RNA, 17 nt, Human
auggauuugaugcuguu

SEQ ID NO: 2233140 - RNA, 19 nt, Human
auggauuugaugcuguuug

SEQ ID NO: 2233141 - RNA, 14 nt, Human
auggcaaaaauggc

SEQ ID NO: 2233142 - RNA, 18 nt, Human
auggcaaaggaaggugga

SEQ ID NO: 2233143 - RNA, 15 nt, Human
auggcaacagaucug

SEQ ID NO: 2233144 - RNA, 14 nt, Human
auggcaacagaucu

SEQ ID NO: 2233145 - RNA, 18 nt, Human
auggauuuccagccaaag

SEQ ID NO: 2233146 - RNA, 23 nt, Human
auggacguguuaugacuccagaa

SEQ ID NO: 2233147 - RNA, 19 nt, Human
auggacguguuaugacucc

SEQ ID NO: 2233148 - RNA, 20 nt, Human
auggacguguuaugacucca

SEQ ID NO: 2233149 - RNA, 13 nt, Human
uuucauauuucuu

SEQ ID NO: 2233150 - RNA, 15 nt, Human
uuucauauguugcuc

SEQ ID NO: 2233151 - RNA, 12 nt, Human
uuucauauugug

SEQ ID NO: 2233152 - RNA, 14 nt, Human
uuucauauugugcc

SEQ ID NO: 2233153 - RNA, 15 nt, Human
uuucauauugugcca

SEQ ID NO: 2233154 - RNA, 13 nt, Human
uuucauauuuuag

SEQ ID NO: 2233155 - RNA, 21 nt, Human
uuucauauuuuagcuacuaua

SEQ ID NO: 2233156 - RNA, 17 nt, Human
uuucaucauauuauaca

SEQ ID NO: 2233157 - RNA, 16 nt, Human
uuucaucauauuauac

SEQ ID NO: 2233158 - RNA, 19 nt, Human
uuucaucaaucauuguaca

SEQ ID NO: 2233159 - RNA, 21 nt, Human
uuucaucaaucauuguacagu

SEQ ID NO: 2233160 - RNA, 22 nt, Human
uuucaucugcucuccuuccugg

SEQ ID NO: 2233161 - RNA, 14 nt, Human
uuucaucugggaaa

SEQ ID NO: 2233162 - RNA, 15 nt, Human
uuucaucugggaaag

SEQ ID NO: 2233163 - RNA, 14 nt, Human
uuucagaccccagc

SEQ ID NO: 2233164 - RNA, 10 nt, Human
uuucagaccc

SEQ ID NO: 2233165 - RNA, 11 nt, Human
uuucagacucc

SEQ ID NO: 2233166 - RNA, 22 nt, Human
uuucauauguugcucagucucc

SEQ ID NO: 2233167 - RNA, 23 nt, Human
uuucagaaccucuuccccagaaa

SEQ ID NO: 2233168 - RNA, 20 nt, Human
uuucagaaccucuuccccag

SEQ ID NO: 2233169 - RNA, 19 nt, Human
uuucagaaccucuucccca

SEQ ID NO: 2233170 - RNA, 18 nt, Human
uuucagaaccucuucccc

SEQ ID NO: 2233171 - RNA, 22 nt, Human
uuucagaagugagcuuugcugc

SEQ ID NO: 2233172 - RNA, 20 nt, Human
uuucacugcugcaaggccuu

SEQ ID NO: 2233173 - RNA, 21 nt, Human
uuucagaagugagcuuugcug

SEQ ID NO: 2233174 - RNA, 22 nt, Human
auggaauacaguguuauuuucu

SEQ ID NO: 2233175 - RNA, 17 nt, Human
auggaauacaguguuau

SEQ ID NO: 2233176 - RNA, 20 nt, Human
auggaaucuaccaacuguuu

SEQ ID NO: 2233177 - RNA, 21 nt, Human
auggaaugaugggucaguugu

SEQ ID NO: 2233178 - RNA, 16 nt, Human
auggaaugcuguguua

SEQ ID NO: 2233179 - RNA, 16 nt, Human
auggaauacaguguua

SEQ ID NO: 2233180 - RNA, 15 nt, Human
auggaauacaguguu

SEQ ID NO: 2233181 - RNA, 16 nt, Human
auggaagacacauuga

SEQ ID NO: 2233182 - RNA, 16 nt, Human
auggaauaacucugug

SEQ ID NO: 2233183 - RNA, 16 nt, Human
auggaagacagcucuu

SEQ ID NO: 2233184 - RNA, 20 nt, Human
uuucacugcuggcugccuua

SEQ ID NO: 2233185 - RNA, 22 nt, Human
uuucacugcuggcugccuuaga

SEQ ID NO: 2233186 - RNA, 13 nt, Human
uuucagaaaugug

SEQ ID NO: 2233187 - RNA, 14 nt, Human
uuucacugcuggcu

SEQ ID NO: 2233188 - RNA, 13 nt, Human
uuucacugccaua

SEQ ID NO: 2233189 - RNA, 17 nt, Human
uuucacugcuggcugcc

SEQ ID NO: 2233190 - RNA, 18 nt, Human
uuucacugcuggcugccu

SEQ ID NO: 2233191 - RNA, 19 nt, Human
auggacagaagaaggcagc

SEQ ID NO: 2233192 - RNA, 20 nt, Human
auggacagaagaaggcagca

SEQ ID NO: 2233193 - RNA, 14 nt, Human
auggacaggcuggc

SEQ ID NO: 2233194 - RNA, 19 nt, Human
auggacaggcuggcuccag

SEQ ID NO: 2233195 - RNA, 18 nt, Human
auggacagggcaugccac

SEQ ID NO: 2233196 - RNA, 14 nt, Human
auggacaugaucuu

SEQ ID NO: 2233197 - RNA, 21 nt, Human
auggacggugcuccaggcagg

SEQ ID NO: 2233198 - RNA, 22 nt, Human
auggacggugcuccaggcaggc

SEQ ID NO: 2233199 - RNA, 19 nt, Human
uuuccccccacucucccca

SEQ ID NO: 2233200 - RNA, 17 nt, Human
uuuccccccacucuccc

SEQ ID NO: 2233201 - RNA, 13 nt, Human
uuuccccccacuc

SEQ ID NO: 2233202 - RNA, 12 nt, Human
uuuccccccacu

SEQ ID NO: 2233203 - RNA, 21 nt, Human
uuuccccaggggaaaaugaag

SEQ ID NO: 2233204 - RNA, 23 nt, Human
uuuccccauuuagguuucugagu

SEQ ID NO: 2233205 - RNA, 19 nt, Human
uuuccccaggggaaaauga

SEQ ID NO: 2233206 - RNA, 11 nt, Human
uuuccccagcc

SEQ ID NO: 2233207 - RNA, 13 nt, Human
uuuccccagccca

SEQ ID NO: 2233208 - RNA, 16 nt, Human
uuucccauggggaggg

SEQ ID NO: 2233209 - RNA, 18 nt, Human
uuuccccaacagugugaa

SEQ ID NO: 2233210 - RNA, 19 nt, Human
uuuccccaacagugugaag

SEQ ID NO: 2233211 - RNA, 14 nt, Human
uuuccccaaagucu

SEQ ID NO: 2233212 - RNA, 21 nt, Human
uuuccccaaagucuuaaaaua

SEQ ID NO: 2233213 - RNA, 14 nt, Human
uuuccccaacagug

SEQ ID NO: 2233214 - RNA, 15 nt, Human
uuuccccaacagugu

SEQ ID NO: 2233215 - RNA, 21 nt, Human
uuucaugauuagcaaguuaca

SEQ ID NO: 2233216 - RNA, 19 nt, Human
uuucaucugggaaagacau

SEQ ID NO: 2233217 - RNA, 16 nt, Human
uuucaucugggaaaga

SEQ ID NO: 2233218 - RNA, 18 nt, Human
uuucaucugggaaagaca

SEQ ID NO: 2233219 - RNA, 19 nt, Human
uuucaugcuaucucugugu

SEQ ID NO: 2233220 - RNA, 16 nt, Human
uuucaugcuaucucug

SEQ ID NO: 2233221 - RNA, 16 nt, Human
uuucaugauuuugaaa

SEQ ID NO: 2233222 - RNA, 16 nt, Human
uuucauuaaagcauuu

SEQ ID NO: 2233223 - RNA, 14 nt, Human
uuucauuaaaggcu

SEQ ID NO: 2233224 - RNA, 14 nt, Human
uuucauuaaagcau

SEQ ID NO: 2233225 - RNA, 18 nt, Human
uuucauguuuugugacua

SEQ ID NO: 2233226 - RNA, 13 nt, Human
uuucauuaaagca

SEQ ID NO: 2233227 - RNA, 16 nt, Human
uuucauguuuugugac

SEQ ID NO: 2233228 - RNA, 17 nt, Human
uuucauguuuugugacu

SEQ ID NO: 2233229 - RNA, 16 nt, Human
uuucauuaaaggcuuc

SEQ ID NO: 2233230 - RNA, 23 nt, Human
uuucauuaaaggcuucucucuca

SEQ ID NO: 2233231 - RNA, 16 nt, Human
uuucauguuuuaacaa

SEQ ID NO: 2233232 - RNA, 19 nt, Human
uuucauguuuuaacaaaaa

SEQ ID NO: 2233233 - RNA, 17 nt, Human
uuucauguuuuaacaaa

SEQ ID NO: 2233234 - RNA, 23 nt, Human
uuucauguugcacacccacucag

SEQ ID NO: 2233235 - RNA, 23 nt, Human
uuucaugugcggggaucaucugc

SEQ ID NO: 2233236 - RNA, 18 nt, Human
uuuaggaaaugaaugugu

SEQ ID NO: 2233237 - RNA, 22 nt, Human
uuuagcuggaaaaguauguuag

SEQ ID NO: 2233238 - RNA, 15 nt, Human
uuuaguagagacagg

SEQ ID NO: 2233239 - RNA, 17 nt, Human
uuuaggagauuuuaggu

SEQ ID NO: 2233240 - RNA, 13 nt, Human
uuuaggagauuuu

SEQ ID NO: 2233241 - RNA, 21 nt, Human
uuuaguagauauuaccaguuu

SEQ ID NO: 2233242 - RNA, 23 nt, Human
uuuaguagauauuaccaguuuuc

SEQ ID NO: 2233243 - RNA, 16 nt, Human
uuuaguaucuuuuuau

SEQ ID NO: 2233244 - RNA, 17 nt, Human
uuuauagcuauuacugu

SEQ ID NO: 2233245 - RNA, 18 nt, Human
uuuagucugcaaaaugag

SEQ ID NO: 2233246 - RNA, 20 nt, Human
uuuauagcuauuacugucug

SEQ ID NO: 2233247 - RNA, 15 nt, Human
uuuagucaugugacc

SEQ ID NO: 2233248 - RNA, 12 nt, Human
uuuagucacuuu

SEQ ID NO: 2233249 - RNA, 16 nt, Human
uuuagucugcaaaaug

SEQ ID NO: 2233250 - RNA, 22 nt, Human
uuuagcagcagccuuuaaugca

SEQ ID NO: 2233251 - RNA, 23 nt, Human
uuuagcaauuuaauauuuugcac

SEQ ID NO: 2233252 - RNA, 22 nt, Human
uuuagcaauuuaauauuuugca

SEQ ID NO: 2233253 - RNA, 20 nt, Human
uuuagcuggaaaaguauguu

SEQ ID NO: 2233254 - RNA, 11 nt, Human
uuuagaugcug

SEQ ID NO: 2233255 - RNA, 19 nt, Human
uuuagauugaaaacuuuuc

SEQ ID NO: 2233256 - RNA, 13 nt, Human
uuuagaugcugau

SEQ ID NO: 2233257 - RNA, 22 nt, Human
uuuagauugaaaacuuuucuca

SEQ ID NO: 2233258 - RNA, 15 nt, Human
augccccagagcugu

SEQ ID NO: 2233259 - RNA, 13 nt, Human
augcccccagcug

SEQ ID NO: 2233260 - RNA, 14 nt, Human
augcccccagcugg

SEQ ID NO: 2233261 - RNA, 15 nt, Human
augcccccagcuggc

SEQ ID NO: 2233262 - RNA, 16 nt, Human
augcccccagcuggcc

SEQ ID NO: 2233263 - RNA, 13 nt, Human
augccccccucaa

SEQ ID NO: 2233264 - RNA, 15 nt, Human
augcccccucgugcc

SEQ ID NO: 2233265 - RNA, 21 nt, Human
augccccccucaaaccuccuc

SEQ ID NO: 2233266 - RNA, 22 nt, Human
augccccccucaaaccuccucu

SEQ ID NO: 2233267 - RNA, 18 nt, Human
augcccccucgugccagu

SEQ ID NO: 2233268 - RNA, 17 nt, Human
augcccccucgugccag

SEQ ID NO: 2233269 - RNA, 19 nt, Human
augccccggccaccucugc

SEQ ID NO: 2233270 - RNA, 20 nt, Human
augccccggccaccucugcg

SEQ ID NO: 2233271 - RNA, 13 nt, Human
augcccccuuuca

SEQ ID NO: 2233272 - RNA, 18 nt, Human
augcccccuuucagaugu

SEQ ID NO: 2233273 - RNA, 19 nt, Human
augcccccuuucagauguc

SEQ ID NO: 2233274 - RNA, 21 nt, Human
augcccccuuucagaugucuu

SEQ ID NO: 2233275 - RNA, 15 nt, Human
augccccggccaccu

SEQ ID NO: 2233276 - RNA, 16 nt, Human
augccccggccaccuc

SEQ ID NO: 2233277 - RNA, 17 nt, Human
augccccggccaccucu

SEQ ID NO: 2233278 - RNA, 18 nt, Human
augccccggccaccucug

SEQ ID NO: 2233279 - RNA, 22 nt, Human
uuuaugggucagaguuccgacu

SEQ ID NO: 2233280 - RNA, 14 nt, Human
uuuauauaaaugcu

SEQ ID NO: 2233281 - RNA, 24 nt, Human
uuuauggcuuuugugcauuaucua

SEQ ID NO: 2233282 - RNA, 22 nt, Human
uuuauggggcugaacggggaga

SEQ ID NO: 2233283 - RNA, 21 nt, Human
uuuaugguuucccccuucuac

SEQ ID NO: 2233284 - RNA, 17 nt, Human
uuuauaguuuguacaug

SEQ ID NO: 2233285 - RNA, 19 nt, Human
uuuauaguuuguacaugca

SEQ ID NO: 2233286 - RNA, 20 nt, Human
uuuauggcuuuugugcauua

SEQ ID NO: 2233287 - RNA, 16 nt, Human
uuuauagcucaguuua

SEQ ID NO: 2233288 - RNA, 13 nt, Human
uuuauauaagcuu

SEQ ID NO: 2233289 - RNA, 22 nt, Human
uuuaugugugaggagcugcugg

SEQ ID NO: 2233290 - RNA, 18 nt, Human
uuuaugugugaggagcug

SEQ ID NO: 2233291 - RNA, 12 nt, Human
uuuaugugaugg

SEQ ID NO: 2233292 - RNA, 13 nt, Human
uuuaugugugugu

SEQ ID NO: 2233293 - RNA, 11 nt, Human
uuuaugugugu

SEQ ID NO: 2233294 - RNA, 13 nt, Human
uuuauguuauuua

SEQ ID NO: 2233295 - RNA, 20 nt, Human
uuuauguuaagggaagaauu

SEQ ID NO: 2233296 - RNA, 20 nt, Human
uuuauguuacuacaugcacu

SEQ ID NO: 2233297 - RNA, 16 nt, Human
uuuauuaaaaucuuaa

SEQ ID NO: 2233298 - RNA, 14 nt, Human
uuuauuaaaaugau

SEQ ID NO: 2233299 - RNA, 15 nt, Human
uuuauuaaaaucuua

SEQ ID NO: 2233300 - RNA, 14 nt, Human
uuuauuaaaaucuu

SEQ ID NO: 2233301 - RNA, 13 nt, Human
uuuauuaaaaucu

SEQ ID NO: 2233302 - RNA, 21 nt, Human
uuuauuaaaaugauuguaaaa

SEQ ID NO: 2233303 - RNA, 22 nt, Human
uuuauuaaaaugauuguaaaau

SEQ ID NO: 2233304 - RNA, 23 nt, Human
uuuauuaaaaugauuguaaaaua

SEQ ID NO: 2233305 - RNA, 17 nt, Human
uuuauuaaacagauuuu

SEQ ID NO: 2233306 - RNA, 23 nt, Human
uuuauguuugcacuugugauuau

SEQ ID NO: 2233307 - RNA, 13 nt, Human
augcugguuuuuc

SEQ ID NO: 2233308 - RNA, 22 nt, Human
augcuguaacuuucugaaauaa

SEQ ID NO: 2233309 - RNA, 22 nt, Human
augcugguuuuccuaaaugcag

SEQ ID NO: 2233310 - RNA, 21 nt, Human
augcugguuuuccuaaaugca

SEQ ID NO: 2233311 - RNA, 23 nt, Human
augcuggcccagggcccagagcc

SEQ ID NO: 2233312 - RNA, 22 nt, Human
augcuggcccagggcccagagc

SEQ ID NO: 2233313 - RNA, 21 nt, Human
augcuggcccagggcccagag

SEQ ID NO: 2233314 - RNA, 20 nt, Human
augcuggcccagggcccaga

SEQ ID NO: 2233315 - RNA, 19 nt, Human
augcuggcccagggcccag

SEQ ID NO: 2233316 - RNA, 23 nt, Human
augcuggcauuugcaccuaccuc

SEQ ID NO: 2233317 - RNA, 12 nt, Human
augcuggcccag

SEQ ID NO: 2233318 - RNA, 22 nt, Human
augcuggaugucugccaauuuu

SEQ ID NO: 2233319 - RNA, 18 nt, Human
augcuggcccagggccca

SEQ ID NO: 2233320 - RNA, 16 nt, Human
augcuggcccagggcc

SEQ ID NO: 2233321 - RNA, 15 nt, Human
augcuggcccagggc

SEQ ID NO: 2233322 - RNA, 13 nt, Human
augcuggcccagg

SEQ ID NO: 2233323 - RNA, 22 nt, Human
augcucucugcagccagcccag

SEQ ID NO: 2233324 - RNA, 21 nt, Human
augcucucugcagccagccca

SEQ ID NO: 2233325 - RNA, 19 nt, Human
augcucucugcagccagcc

SEQ ID NO: 2233326 - RNA, 13 nt, Human
augcucucugcag

SEQ ID NO: 2233327 - RNA, 14 nt, Human
augcucuccuuucc

SEQ ID NO: 2233328 - RNA, 19 nt, Human
augcuggaugucugccaau

SEQ ID NO: 2233329 - RNA, 23 nt, Human
augcucucugcagccagcccagc

SEQ ID NO: 2233330 - RNA, 15 nt, Human
augcucugcauguua

SEQ ID NO: 2233331 - RNA, 16 nt, Human
uuuauuacaucuuuca

SEQ ID NO: 2233332 - RNA, 22 nt, Human
uuuauuaaacagauuuuuacaa

SEQ ID NO: 2233333 - RNA, 13 nt, Human
uuuauuaccucug

SEQ ID NO: 2233334 - RNA, 23 nt, Human
uuuauuacccccuccuucagaca

SEQ ID NO: 2233335 - RNA, 17 nt, Human
uuuauuacccccuccuu

SEQ ID NO: 2233336 - RNA, 12 nt, Human
uuuauuaccccc

SEQ ID NO: 2233337 - RNA, 14 nt, Human
uuuauuaccucuga

SEQ ID NO: 2233338 - RNA, 20 nt, Human
uuuauuaccucugauaccuc

SEQ ID NO: 2233339 - RNA, 13 nt, Human
uuuauuacugauu

SEQ ID NO: 2233340 - RNA, 15 nt, Human
augcuagaacucccu

SEQ ID NO: 2233341 - RNA, 19 nt, Human
augcuagaacucccuuuca

SEQ ID NO: 2233342 - RNA, 16 nt, Human
augcuagaacucccuu

SEQ ID NO: 2233343 - RNA, 17 nt, Human
augcucuagugccuucu

SEQ ID NO: 2233344 - RNA, 16 nt, Human
augcucuagugccuuc

SEQ ID NO: 2233345 - RNA, 19 nt, Human
augcucuaucuugcucugu

SEQ ID NO: 2233346 - RNA, 21 nt, Human
augcucuaucuugcucuguaa

SEQ ID NO: 2233347 - RNA, 18 nt, Human
augcuccuuguuccuaga

SEQ ID NO: 2233348 - RNA, 15 nt, Human
augcuccuuguuccu

SEQ ID NO: 2233349 - RNA, 16 nt, Human
augcuccuugggcccu

SEQ ID NO: 2233350 - RNA, 15 nt, Human
augcuccuugggccc

SEQ ID NO: 2233351 - RNA, 22 nt, Human
augcuacuuuauuuauacacug

SEQ ID NO: 2233352 - RNA, 19 nt, Human
auggaacucauuccugccu

SEQ ID NO: 2233353 - RNA, 16 nt, Human
auggaacacucugaga

SEQ ID NO: 2233354 - RNA, 22 nt, Human
auggaacucauuccugccuguc

SEQ ID NO: 2233355 - RNA, 18 nt, Human
auggaacuucuaauauau

SEQ ID NO: 2233356 - RNA, 19 nt, Human
auggaacuucuaauauauu

SEQ ID NO: 2233357 - RNA, 13 nt, Human
auggaagacacau

SEQ ID NO: 2233358 - RNA, 14 nt, Human
auggaagacacauu

SEQ ID NO: 2233359 - RNA, 15 nt, Human
auggaagacagcucu

SEQ ID NO: 2233360 - RNA, 11 nt, Human
auggaacacuc

SEQ ID NO: 2233361 - RNA, 23 nt, Human
augcuucauacagggaugguguu

SEQ ID NO: 2233362 - RNA, 22 nt, Human
augcuguacaucuauuuuggau

SEQ ID NO: 2233363 - RNA, 14 nt, Human
auggaacacucuga

SEQ ID NO: 2233364 - RNA, 15 nt, Human
auggaacacucugag

SEQ ID NO: 2233365 - RNA, 19 nt, Human
augcugucccuuacgugag

SEQ ID NO: 2233366 - RNA, 16 nt, Human
augcuguacaucuauu

SEQ ID NO: 2233367 - RNA, 12 nt, Human
augcuguacauc

SEQ ID NO: 2233368 - RNA, 23 nt, Human
augcugucccuuacgugaguccu

SEQ ID NO: 2233369 - RNA, 22 nt, Human
augcugucuacacuaagagaga

SEQ ID NO: 2233370 - RNA, 10 nt, Human
augcuucaua

SEQ ID NO: 2233371 - RNA, 21 nt, Human
augcuuauuuuaaaauuuuau

SEQ ID NO: 2233372 - RNA, 12 nt, Human
augcuucauaca

SEQ ID NO: 2233373 - RNA, 11 nt, Human
augcuucauac

SEQ ID NO: 2233374 - RNA, 19 nt, Human
augcuucauacagggaugg

SEQ ID NO: 2233375 - RNA, 16 nt, Human
augcuucauacaggga

SEQ ID NO: 2233376 - RNA, 15 nt, Human
augcuucauacaggg

SEQ ID NO: 2233377 - RNA, 13 nt, Human
augcuucauacag

SEQ ID NO: 2233378 - RNA, 15 nt, Human
augcaguauugagca

SEQ ID NO: 2233379 - RNA, 16 nt, Human
augcagugaauuguga

SEQ ID NO: 2233380 - RNA, 18 nt, Human
augcagugccccuagcuu

SEQ ID NO: 2233381 - RNA, 18 nt, Human
augcagugauauggcaga

SEQ ID NO: 2233382 - RNA, 19 nt, Human
augcagugauauggcagaa

SEQ ID NO: 2233383 - RNA, 21 nt, Human
augcagugauauggcagaaga

SEQ ID NO: 2233384 - RNA, 22 nt, Human
augcagugauauggcagaagac

SEQ ID NO: 2233385 - RNA, 13 nt, Human
augcagugcucgc

SEQ ID NO: 2233386 - RNA, 17 nt, Human
augcagugcucgcuguu

SEQ ID NO: 2233387 - RNA, 19 nt, Human
augcagugcucgcuguugc

SEQ ID NO: 2233388 - RNA, 20 nt, Human
augcagugcucgcuguugcu

SEQ ID NO: 2233389 - RNA, 21 nt, Human
augcagugcucgcuguugcug

SEQ ID NO: 2233390 - RNA, 23 nt, Human
augcagugcucgcuguugcugaa

SEQ ID NO: 2233391 - RNA, 24 nt, Human
augcagugcucgcuguugcugaau

SEQ ID NO: 2233392 - RNA, 23 nt, Human
augcagugauauggcagaagaca

SEQ ID NO: 2233393 - RNA, 15 nt, Human
augcaguucugaaga

SEQ ID NO: 2233394 - RNA, 17 nt, Human
augcaguucugaagaag

SEQ ID NO: 2233395 - RNA, 15 nt, Human
augcagggcagucau

SEQ ID NO: 2233396 - RNA, 22 nt, Human
augcagggauugcugccacuuu

SEQ ID NO: 2233397 - RNA, 19 nt, Human
augcagggccucacacggu

SEQ ID NO: 2233398 - RNA, 17 nt, Human
augcagccucacagucc

SEQ ID NO: 2233399 - RNA, 13 nt, Human
augcagggcaguc

SEQ ID NO: 2233400 - RNA, 19 nt, Human
augcagggauugcugccac

SEQ ID NO: 2233401 - RNA, 20 nt, Human
augcagggauugcugccacu

SEQ ID NO: 2233402 - RNA, 14 nt, Human
augcagccucacag

SEQ ID NO: 2233403 - RNA, 15 nt, Human
augcagccucacagu

SEQ ID NO: 2233404 - RNA, 21 nt, Human
augcagccgugaucaagggaa

SEQ ID NO: 2233405 - RNA, 15 nt, Human
uuuaauuuuguauuu

SEQ ID NO: 2233406 - RNA, 16 nt, Human
uuuaauuuuguauuuu

SEQ ID NO: 2233407 - RNA, 13 nt, Human
augcagccucaca

SEQ ID NO: 2233408 - RNA, 21 nt, Human
uuuaauuugauaucacagucu

SEQ ID NO: 2233409 - RNA, 22 nt, Human
uuuaauuuugacacuauaucug

SEQ ID NO: 2233410 - RNA, 11 nt, Human
uuuaauuuugu

SEQ ID NO: 2233411 - RNA, 15 nt, Human
augcaguuuuccuua

SEQ ID NO: 2233412 - RNA, 15 nt, Human
augcauaaagucagu

SEQ ID NO: 2233413 - RNA, 17 nt, Human
augcaguuuuucagagu

SEQ ID NO: 2233414 - RNA, 22 nt, Human
augcaguuuuucagaguggaau

SEQ ID NO: 2233415 - RNA, 18 nt, Human
augcaguucugaagaaga

SEQ ID NO: 2233416 - RNA, 19 nt, Human
augcaguucugaagaagau

SEQ ID NO: 2233417 - RNA, 22 nt, Human
augccaaagcuaggguggcccu

SEQ ID NO: 2233418 - RNA, 21 nt, Human
augcauaaauaugcagugaua

SEQ ID NO: 2233419 - RNA, 14 nt, Human
augcauaaauaugc

SEQ ID NO: 2233420 - RNA, 15 nt, Human
augcauaaauaugca

SEQ ID NO: 2233421 - RNA, 16 nt, Human
augcauaaauaugcag

SEQ ID NO: 2233422 - RNA, 17 nt, Human
augcauaaauaugcagu

SEQ ID NO: 2233423 - RNA, 20 nt, Human
augccaaauuguaguucuug

SEQ ID NO: 2233424 - RNA, 14 nt, Human
augccaacuugucc

SEQ ID NO: 2233425 - RNA, 23 nt, Human
augccaagaaguuuaaggaauau

SEQ ID NO: 2233426 - RNA, 16 nt, Human
augccaagcacugugc

SEQ ID NO: 2233427 - RNA, 17 nt, Human
augccaagcacugugcu

SEQ ID NO: 2233428 - RNA, 21 nt, Human
augccaagcacugugcucagg

SEQ ID NO: 2233429 - RNA, 18 nt, Human
augccaagcacugugcuc

SEQ ID NO: 2233430 - RNA, 19 nt, Human
augccaagcacugugcuca

SEQ ID NO: 2233431 - RNA, 16 nt, Human
augccaaguuguuuga

SEQ ID NO: 2233432 - RNA, 14 nt, Human
augccaaguuguuu

SEQ ID NO: 2233433 - RNA, 19 nt, Human
augcccaccugcccaucac

SEQ ID NO: 2233434 - RNA, 16 nt, Human
augcccaccugcccau

SEQ ID NO: 2233435 - RNA, 15 nt, Human
augcccaccugccca

SEQ ID NO: 2233436 - RNA, 19 nt, Human
augcccacccccugcccug

SEQ ID NO: 2233437 - RNA, 20 nt, Human
augcccacccccugcccugc

SEQ ID NO: 2233438 - RNA, 21 nt, Human
augcccaccugcccaucacag

SEQ ID NO: 2233439 - RNA, 20 nt, Human
augcccaccugcccaucaca

SEQ ID NO: 2233440 - RNA, 23 nt, Human
augcccagagggcccaggcaggc

SEQ ID NO: 2233441 - RNA, 22 nt, Human
augcccagagggcccaggcagg

SEQ ID NO: 2233442 - RNA, 21 nt, Human
augcccagagggcccaggcag

SEQ ID NO: 2233443 - RNA, 20 nt, Human
augcccagagggcccaggca

SEQ ID NO: 2233444 - RNA, 17 nt, Human
augcccaguuucugccu

SEQ ID NO: 2233445 - RNA, 18 nt, Human
augcccaguuucugccuc

SEQ ID NO: 2233446 - RNA, 19 nt, Human
augcccaguuucugccucu

SEQ ID NO: 2233447 - RNA, 17 nt, Human
augccacgggaaguuua

SEQ ID NO: 2233448 - RNA, 20 nt, Human
augccacccuguuuucagcu

SEQ ID NO: 2233449 - RNA, 19 nt, Human
augccacccuguuuucagc

SEQ ID NO: 2233450 - RNA, 23 nt, Human
augccaaguuguuugagaaauua

SEQ ID NO: 2233451 - RNA, 14 nt, Human
augccacugccuuc

SEQ ID NO: 2233452 - RNA, 15 nt, Human
augccacugccuucg

SEQ ID NO: 2233453 - RNA, 12 nt, Human
augcccaccccc

SEQ ID NO: 2233454 - RNA, 15 nt, Human
augcccacccccugc

SEQ ID NO: 2233455 - RNA, 16 nt, Human
augcccacccccugcc

SEQ ID NO: 2233456 - RNA, 17 nt, Human
augcccacccccugccc

SEQ ID NO: 2233457 - RNA, 18 nt, Human
augcccacccccugcccu

SEQ ID NO: 2233458 - RNA, 17 nt, Human
augccacuaaauugaca

SEQ ID NO: 2233459 - RNA, 15 nt, Human
augccacuaaauuga

SEQ ID NO: 2233460 - RNA, 23 nt, Human
uuuaagcauuguuugcuuauugu

SEQ ID NO: 2233461 - RNA, 20 nt, Human
uuuaagcccaucaauuauag

SEQ ID NO: 2233462 - RNA, 19 nt, Human
uuuaagccucauauuuaaa

SEQ ID NO: 2233463 - RNA, 16 nt, Human
uuuaagugcugcauuu

SEQ ID NO: 2233464 - RNA, 15 nt, Human
uuuaagugcugcauu

SEQ ID NO: 2233465 - RNA, 14 nt, Human
uuuaaugagauaau

SEQ ID NO: 2233466 - RNA, 13 nt, Human
uuuaagcuguaaa

SEQ ID NO: 2233467 - RNA, 19 nt, Human
uuuaagugcugcauuuaaa

SEQ ID NO: 2233468 - RNA, 17 nt, Human
uuuaagugcugcauuua

SEQ ID NO: 2233469 - RNA, 14 nt, Human
uuuaauguagccau

SEQ ID NO: 2233470 - RNA, 16 nt, Human
uuuaauucauguuucu

SEQ ID NO: 2233471 - RNA, 14 nt, Human
uuuaauucauguuu

SEQ ID NO: 2233472 - RNA, 23 nt, Human
uuuaauucauguuucuuaaaugg

SEQ ID NO: 2233473 - RNA, 23 nt, Human
uuuaauucaucccaacugucuuu

SEQ ID NO: 2233474 - RNA, 16 nt, Human
uuuaauuccaauauga

SEQ ID NO: 2233475 - RNA, 20 nt, Human
uuuaauggccggcuggaaau

SEQ ID NO: 2233476 - RNA, 23 nt, Human
uuuaaugccgauauacucuagau

SEQ ID NO: 2233477 - RNA, 22 nt, Human
uuuaauggccggcuggaaaugc

SEQ ID NO: 2233478 - RNA, 20 nt, Human
uuuaauggggguagcagcug

SEQ ID NO: 2233479 - RNA, 21 nt, Human
uuuaauggggguagcagcugg

SEQ ID NO: 2233480 - RNA, 22 nt, Human
uuuaauggggguagcagcugga

SEQ ID NO: 2233481 - RNA, 21 nt, Human
uuuaauggacaugagauaaug

SEQ ID NO: 2233482 - RNA, 12 nt, Human
uuuaauuuuaca

SEQ ID NO: 2233483 - RNA, 14 nt, Human
uuuaauugauuauu

SEQ ID NO: 2233484 - RNA, 13 nt, Human
uuuaauucucuug

SEQ ID NO: 2233485 - RNA, 11 nt, Human
uuuaauucucu

SEQ ID NO: 2233486 - RNA, 21 nt, Human
uuuaauuccaauaugaugacu

SEQ ID NO: 2233487 - RNA, 11 nt, Human
uuuaauuccau

SEQ ID NO: 2233488 - RNA, 13 nt, Human
uuuaauuccauga

SEQ ID NO: 2233489 - RNA, 22 nt, Human
uuuaauuccaugaaucgcuucu

SEQ ID NO: 2233490 - RNA, 16 nt, Human
uuguuuucaguguaca

SEQ ID NO: 2233491 - RNA, 13 nt, Human
uuguuuucagugu

SEQ ID NO: 2233492 - RNA, 15 nt, Human
augcacuuuguucug

SEQ ID NO: 2233493 - RNA, 15 nt, Human
uuguuuuacugucuu

SEQ ID NO: 2233494 - RNA, 17 nt, Human
uuguuuucccgccaagc

SEQ ID NO: 2233495 - RNA, 14 nt, Human
uuguuuucauuauc

SEQ ID NO: 2233496 - RNA, 19 nt, Human
uuguuuuaucaugacaugu

SEQ ID NO: 2233497 - RNA, 15 nt, Human
uuuaaaugucuaaug

SEQ ID NO: 2233498 - RNA, 16 nt, Human
uuuaaaugucuaaugu

SEQ ID NO: 2233499 - RNA, 14 nt, Human
uuuaaauguuuuuu

SEQ ID NO: 2233500 - RNA, 12 nt, Human
uuuaagauuuuu

SEQ ID NO: 2233501 - RNA, 14 nt, Human
uuuaagauaauuau

SEQ ID NO: 2233502 - RNA, 14 nt, Human
uuuaagauuuuucu

SEQ ID NO: 2233503 - RNA, 16 nt, Human
uuuaagauuuuucuca

SEQ ID NO: 2233504 - RNA, 18 nt, Human
uuuaagauuuuucucaaa

SEQ ID NO: 2233505 - RNA, 20 nt, Human
uuuaagcacuacauaaacug

SEQ ID NO: 2233506 - RNA, 21 nt, Human
uuuaagcauuguuugcuuauu

SEQ ID NO: 2233507 - RNA, 14 nt, Human
uuuaagcauuguuu

SEQ ID NO: 2233508 - RNA, 13 nt, Human
uuuaagcagcucu

SEQ ID NO: 2233509 - RNA, 20 nt, Human
uuuaagcagcucuugcuaau

SEQ ID NO: 2233510 - RNA, 13 nt, Human
uuuaagcauuguu

SEQ ID NO: 2233511 - RNA, 17 nt, Human
uuuaagauuuuucucaa

SEQ ID NO: 2233512 - RNA, 23 nt, Human
uuuaagcacuacauaaacugacu

SEQ ID NO: 2233513 - RNA, 15 nt, Human
uuuaagauaaauuau

SEQ ID NO: 2233514 - RNA, 15 nt, Human
uuuaagauaauuaua

SEQ ID NO: 2233515 - RNA, 18 nt, Human
uuuaagauaauaauauau

SEQ ID NO: 2233516 - RNA, 23 nt, Human
uuuaagauaauaauauauguuua

SEQ ID NO: 2233517 - RNA, 15 nt, Human
uuuaagauaauaguu

SEQ ID NO: 2233518 - RNA, 20 nt, Human
uuuaagauaauaguuuacau

SEQ ID NO: 2233519 - RNA, 18 nt, Human
uuuaaaugucuaauguau

SEQ ID NO: 2233520 - RNA, 18 nt, Human
uuuaaauguuuuucuaug

SEQ ID NO: 2233521 - RNA, 20 nt, Human
uuuaaauuauaacuuaaaau

SEQ ID NO: 2233522 - RNA, 21 nt, Human
uuuaaauucacaauagaaacu

SEQ ID NO: 2233523 - RNA, 19 nt, Human
uuuaaauucacaauagaaa

SEQ ID NO: 2233524 - RNA, 21 nt, Human
uuguggccugggccuccucac

SEQ ID NO: 2233525 - RNA, 13 nt, Human
uuguggccucaga

SEQ ID NO: 2233526 - RNA, 13 nt, Human
uuguggccuggga

SEQ ID NO: 2233527 - RNA, 20 nt, Human
uuguggccaaggagcugcua

SEQ ID NO: 2233528 - RNA, 14 nt, Human
uuguggcugggggc

SEQ ID NO: 2233529 - RNA, 18 nt, Human
uuguggcuccuaucugug

SEQ ID NO: 2233530 - RNA, 19 nt, Human
uuguggcuccuaucugugu

SEQ ID NO: 2233531 - RNA, 20 nt, Human
uuguggcugucagcaggaag

SEQ ID NO: 2233532 - RNA, 15 nt, Human
uuguggcugucagca

SEQ ID NO: 2233533 - RNA, 13 nt, Human
uugugggugggag

SEQ ID NO: 2233534 - RNA, 17 nt, Human
uuguggggaugaugaaa

SEQ ID NO: 2233535 - RNA, 20 nt, Human
uugugaggcccaugguugag

SEQ ID NO: 2233536 - RNA, 18 nt, Human
uugugagccaccacgucc

SEQ ID NO: 2233537 - RNA, 22 nt, Human
uugugaguuuaguaaggcugug

SEQ ID NO: 2233538 - RNA, 22 nt, Human
uugugaguuuaccuuguauacu

SEQ ID NO: 2233539 - RNA, 18 nt, Human
uugugauacaaugcugug

SEQ ID NO: 2233540 - RNA, 12 nt, Human
uuguggccucag

SEQ ID NO: 2233541 - RNA, 11 nt, Human
uuguggccuca

SEQ ID NO: 2233542 - RNA, 19 nt, Human
uuguggccaaggagcugcu

SEQ ID NO: 2233543 - RNA, 18 nt, Human
uuguggccaaggagcugc

SEQ ID NO: 2233544 - RNA, 22 nt, Human
uugugauaaguucuaguugcuu

SEQ ID NO: 2233545 - RNA, 19 nt, Human
uugugauacaaugcugugc

SEQ ID NO: 2233546 - RNA, 19 nt, Human
uugugacuauauagagaug

SEQ ID NO: 2233547 - RNA, 15 nt, Human
uugugacuauauaga

SEQ ID NO: 2233548 - RNA, 17 nt, Human
uugugaccuuaguguuu

SEQ ID NO: 2233549 - RNA, 19 nt, Human
uugugaccuuaguguuucu

SEQ ID NO: 2233550 - RNA, 20 nt, Human
uugugaccuuaguguuucug

SEQ ID NO: 2233551 - RNA, 14 nt, Human
uugugacuaauugu

SEQ ID NO: 2233552 - RNA, 16 nt, Human
uugugacuaauuguau

SEQ ID NO: 2233553 - RNA, 20 nt, Human
uugugacuaauuguauaaca

SEQ ID NO: 2233554 - RNA, 22 nt, Human
uugugacuaauuguauaacagg

SEQ ID NO: 2233555 - RNA, 23 nt, Human
uugugacuaauuguauaacaggu

SEQ ID NO: 2233556 - RNA, 12 nt, Human
uugugagauggg

SEQ ID NO: 2233557 - RNA, 23 nt, Human
uugugacuguauauaaaggaaaa

SEQ ID NO: 2233558 - RNA, 21 nt, Human
uugugacuauauagagauguu

SEQ ID NO: 2233559 - RNA, 22 nt, Human
uugugacuauauagagauguuu

SEQ ID NO: 2233560 - RNA, 16 nt, Human
uugugacuguauauaa

SEQ ID NO: 2233561 - RNA, 22 nt, Human
uugugacuguauauaaaggaaa

SEQ ID NO: 2233562 - RNA, 21 nt, Human
uugugaggaagccgcuggggc

SEQ ID NO: 2233563 - RNA, 23 nt, Human
augagacuuccaaaccugacaga

SEQ ID NO: 2233564 - RNA, 15 nt, Human
augagacuugcucuc

SEQ ID NO: 2233565 - RNA, 20 nt, Human
uugugaccugaaguucacca

SEQ ID NO: 2233566 - RNA, 16 nt, Human
uugugaccuuaguguu

SEQ ID NO: 2233567 - RNA, 23 nt, Human
augagagacacacugaagaagca

SEQ ID NO: 2233568 - RNA, 20 nt, Human
augagagacacacugaagaa

SEQ ID NO: 2233569 - RNA, 21 nt, Human
augagagacacacugaagaag

SEQ ID NO: 2233570 - RNA, 23 nt, Human
uuguucugugguuuuccccuccc

SEQ ID NO: 2233571 - RNA, 13 nt, Human
uuguguguuucac

SEQ ID NO: 2233572 - RNA, 12 nt, Human
uuguuggccucc

SEQ ID NO: 2233573 - RNA, 18 nt, Human
uuguuggccuccggccuc

SEQ ID NO: 2233574 - RNA, 21 nt, Human
uuguuggccuccggccucccc

SEQ ID NO: 2233575 - RNA, 20 nt, Human
uuguucuggcucuuccaggc

SEQ ID NO: 2233576 - RNA, 22 nt, Human
uuguucuggcucuuccaggcug

SEQ ID NO: 2233577 - RNA, 21 nt, Human
uuguguguuauuuaaaugagu

SEQ ID NO: 2233578 - RNA, 20 nt, Human
uuguguguuauuuaaaugag

SEQ ID NO: 2233579 - RNA, 12 nt, Human
uugugugugugc

SEQ ID NO: 2233580 - RNA, 13 nt, Human
uuguguguugucu

SEQ ID NO: 2233581 - RNA, 17 nt, Human
uuguguguuuauuguca

SEQ ID NO: 2233582 - RNA, 19 nt, Human
uuguucuggcucuuccagg

SEQ ID NO: 2233583 - RNA, 20 nt, Human
uuguguuaaguauguguaaa

SEQ ID NO: 2233584 - RNA, 15 nt, Human
uuguguguugucucu

SEQ ID NO: 2233585 - RNA, 17 nt, Human
uuguguguugucucuug

SEQ ID NO: 2233586 - RNA, 14 nt, Human
uugugguuuauguc

SEQ ID NO: 2233587 - RNA, 13 nt, Human
uugugguuaaucu

SEQ ID NO: 2233588 - RNA, 22 nt, Human
uuguguaacaauuuuaaugcua

SEQ ID NO: 2233589 - RNA, 23 nt, Human
uugugugaaagguacuucaaauc

SEQ ID NO: 2233590 - RNA, 18 nt, Human
uugugucuuuugcaugau

SEQ ID NO: 2233591 - RNA, 16 nt, Human
uuguguguuauuuaaa

SEQ ID NO: 2233592 - RNA, 15 nt, Human
uuguguguuauuuaa

SEQ ID NO: 2233593 - RNA, 13 nt, Human
uugugugauugaa

SEQ ID NO: 2233594 - RNA, 14 nt, Human
uugugugauuuaag

SEQ ID NO: 2233595 - RNA, 14 nt, Human
augcaacaacaugu

SEQ ID NO: 2233596 - RNA, 16 nt, Human
augcaacaacauguau

SEQ ID NO: 2233597 - RNA, 21 nt, Human
augcaacaacauguauaauau

SEQ ID NO: 2233598 - RNA, 19 nt, Human
augcacauauggacucugc

SEQ ID NO: 2233599 - RNA, 19 nt, Human
augcaaauccuaugugauu

SEQ ID NO: 2233600 - RNA, 18 nt, Human
augcaaauccuaugugau

SEQ ID NO: 2233601 - RNA, 11 nt, Human
augcaaauccu

SEQ ID NO: 2233602 - RNA, 18 nt, Human
augcaaaucaauuacugg

SEQ ID NO: 2233603 - RNA, 14 nt, Human
augcaccaccaagc

SEQ ID NO: 2233604 - RNA, 21 nt, Human
augcacauauggacucugcac

SEQ ID NO: 2233605 - RNA, 13 nt, Human
augcaccagcccu

SEQ ID NO: 2233606 - RNA, 22 nt, Human
augcacuuucuauccucuguaa

SEQ ID NO: 2233607 - RNA, 12 nt, Human
augcacuuuguu

SEQ ID NO: 2233608 - RNA, 14 nt, Human
augcaccagcccuu

SEQ ID NO: 2233609 - RNA, 19 nt, Human
augcacuuauaauuuuccu

SEQ ID NO: 2233610 - RNA, 21 nt, Human
augcaccaccaagccaaggga

SEQ ID NO: 2233611 - RNA, 15 nt, Human
augcaccaccaagcc

SEQ ID NO: 2233612 - RNA, 18 nt, Human
augcaccaccaagccaag

SEQ ID NO: 2233613 - RNA, 16 nt, Human
augauuuuauuugaca

SEQ ID NO: 2233614 - RNA, 18 nt, Human
augauuuuauuugacaaa

SEQ ID NO: 2233615 - RNA, 15 nt, Human
augcaaagcacugac

SEQ ID NO: 2233616 - RNA, 11 nt, Human
augauuuuuag

SEQ ID NO: 2233617 - RNA, 23 nt, Human
augauuuuauuugacaaaauuug

SEQ ID NO: 2233618 - RNA, 13 nt, Human
augauuuuuagau

SEQ ID NO: 2233619 - RNA, 13 nt, Human
augcaaaggcugg

SEQ ID NO: 2233620 - RNA, 15 nt, Human
augcaaaggcuggga

SEQ ID NO: 2233621 - RNA, 14 nt, Human
augcaaaggcuggg

SEQ ID NO: 2233622 - RNA, 18 nt, Human
augcaaauauuuuuuugu

SEQ ID NO: 2233623 - RNA, 19 nt, Human
augauuucagcucacugca

SEQ ID NO: 2233624 - RNA, 21 nt, Human
augauuucaugcuaucucugu

SEQ ID NO: 2233625 - RNA, 20 nt, Human
augauuucaugcuaucucug

SEQ ID NO: 2233626 - RNA, 21 nt, Human
augauuuccuugaauguggcu

SEQ ID NO: 2233627 - RNA, 19 nt, Human
augauuaaccacuucagcu

SEQ ID NO: 2233628 - RNA, 23 nt, Human
uuguuggcuuucccuuaucaaac

SEQ ID NO: 2233629 - RNA, 19 nt, Human
uuguugggauuccugaccc

SEQ ID NO: 2233630 - RNA, 22 nt, Human
uuguugggauuccugacccagg

SEQ ID NO: 2233631 - RNA, 20 nt, Human
uuguugggauuccugaccca

SEQ ID NO: 2233632 - RNA, 21 nt, Human
uuguugggauuccugacccag

SEQ ID NO: 2233633 - RNA, 21 nt, Human
augauuaaccacuucagcuga

SEQ ID NO: 2233634 - RNA, 20 nt, Human
augauuaaccacuucagcug

SEQ ID NO: 2233635 - RNA, 22 nt, Human
augauuaugaauuacauuugua

SEQ ID NO: 2233636 - RNA, 23 nt, Human
augauuagcaaguuacagugaug

SEQ ID NO: 2233637 - RNA, 14 nt, Human
augauuagcaaguu

SEQ ID NO: 2233638 - RNA, 15 nt, Human
augauuaguaaagaa

SEQ ID NO: 2233639 - RNA, 14 nt, Human
augauuauuuucaa

SEQ ID NO: 2233640 - RNA, 21 nt, Human
augauucaacagguuuuccug

SEQ ID NO: 2233641 - RNA, 13 nt, Human
augauucauuuua

SEQ ID NO: 2233642 - RNA, 16 nt, Human
augauucaguguuaaa

SEQ ID NO: 2233643 - RNA, 17 nt, Human
augauucagaaauugga

SEQ ID NO: 2233644 - RNA, 14 nt, Human
augauucagaaauu

SEQ ID NO: 2233645 - RNA, 17 nt, Human
augauuucagcucacug

SEQ ID NO: 2233646 - RNA, 13 nt, Human
augauuccuuccu

SEQ ID NO: 2233647 - RNA, 16 nt, Human
augauuccagguggca

SEQ ID NO: 2233648 - RNA, 15 nt, Human
augauuccagguggc

SEQ ID NO: 2233649 - RNA, 12 nt, Human
augauucccagc

SEQ ID NO: 2233650 - RNA, 11 nt, Human
auauuuuaauu

SEQ ID NO: 2233651 - RNA, 22 nt, Human
uucccagcaguggacucaaaac

SEQ ID NO: 2233652 - RNA, 14 nt, Human
uucccagauacuuc

SEQ ID NO: 2233653 - RNA, 14 nt, Human
uucccagcacauga

SEQ ID NO: 2233654 - RNA, 23 nt, Human
uucccagcagggccacucccggc

SEQ ID NO: 2233655 - RNA, 23 nt, Human
uucccagagcaaaauaauuuuaa

SEQ ID NO: 2233656 - RNA, 21 nt, Human
uucccagagugugaaacuucc

SEQ ID NO: 2233657 - RNA, 15 nt, Human
uucccagagacagga

SEQ ID NO: 2233658 - RNA, 23 nt, Human
uucccagaaucaaagcaaugcau

SEQ ID NO: 2233659 - RNA, 13 nt, Human
uucccagaaucaa

SEQ ID NO: 2233660 - RNA, 15 nt, Human
uucccagaaucaaag

SEQ ID NO: 2233661 - RNA, 22 nt, Human
uucccagagacaggaaaauccu

SEQ ID NO: 2233662 - RNA, 19 nt, Human
uucccagagacaggaaaau

SEQ ID NO: 2233663 - RNA, 18 nt, Human
uucccagagcaaaauaau

SEQ ID NO: 2233664 - RNA, 13 nt, Human
uucccagaaggca

SEQ ID NO: 2233665 - RNA, 23 nt, Human
uucccagaaggcauaucagucuc

SEQ ID NO: 2233666 - RNA, 12 nt, Human
uucccagaauca

SEQ ID NO: 2233667 - RNA, 11 nt, Human
uucccacugca

SEQ ID NO: 2233668 - RNA, 15 nt, Human
uucccacucaccccg

SEQ ID NO: 2233669 - RNA, 18 nt, Human
uucccacucuagggcagu

SEQ ID NO: 2233670 - RNA, 15 nt, Human
uucccacuguuuaag

SEQ ID NO: 2233671 - RNA, 23 nt, Human
uucccacugcacccccuccugcu

SEQ ID NO: 2233672 - RNA, 24 nt, Human
uucccacugcacccccuccugcug

SEQ ID NO: 2233673 - RNA, 13 nt, Human
uucccacugcacc

SEQ ID NO: 2233674 - RNA, 18 nt, Human
uucccacugcacccccuc

SEQ ID NO: 2233675 - RNA, 19 nt, Human
uucccacugcacccccucc

SEQ ID NO: 2233676 - RNA, 20 nt, Human
uucccacugcacccccuccu

SEQ ID NO: 2233677 - RNA, 17 nt, Human
uuccccucccuggcucc

SEQ ID NO: 2233678 - RNA, 16 nt, Human
uuccccucccuggcuc

SEQ ID NO: 2233679 - RNA, 13 nt, Human
uuccccucccugg

SEQ ID NO: 2233680 - RNA, 21 nt, Human
uuccccuacccccuccucucu

SEQ ID NO: 2233681 - RNA, 22 nt, Human
uuccccuaguaagugccuucca

SEQ ID NO: 2233682 - RNA, 19 nt, Human
uuccccucacuggaugaaa

SEQ ID NO: 2233683 - RNA, 14 nt, Human
uuccccucccuggg

SEQ ID NO: 2233684 - RNA, 13 nt, Human
uuccccuccuacc

SEQ ID NO: 2233685 - RNA, 16 nt, Human
uuccccuccuaccccu

SEQ ID NO: 2233686 - RNA, 17 nt, Human
uuccccuccuaccccuc

SEQ ID NO: 2233687 - RNA, 19 nt, Human
uuccccuccuaccccuccc

SEQ ID NO: 2233688 - RNA, 20 nt, Human
uuccccuccuaccccuccca

SEQ ID NO: 2233689 - RNA, 21 nt, Human
uuccccuccuaccccucccag

SEQ ID NO: 2233690 - RNA, 18 nt, Human
uuccccuccuucucccuu

SEQ ID NO: 2233691 - RNA, 12 nt, Human
uuccccucugcu

SEQ ID NO: 2233692 - RNA, 17 nt, Human
uuccccuccuucucccu

SEQ ID NO: 2233693 - RNA, 15 nt, Human
uuccccuccuccacu

SEQ ID NO: 2233694 - RNA, 14 nt, Human
uuccccucugcugc

SEQ ID NO: 2233695 - RNA, 15 nt, Human
uuccccucugcugcu

SEQ ID NO: 2233696 - RNA, 18 nt, Human
uuccccucugcugcuguc

SEQ ID NO: 2233697 - RNA, 16 nt, Human
uuccccggucccuuga

SEQ ID NO: 2233698 - RNA, 22 nt, Human
uuccccgagggaugaugccaca

SEQ ID NO: 2233699 - RNA, 23 nt, Human
uuccccgagggaugaugccacac

SEQ ID NO: 2233700 - RNA, 19 nt, Human
uuccccuaaccucauuccc

SEQ ID NO: 2233701 - RNA, 17 nt, Human
uuccccggucccuugag

SEQ ID NO: 2233702 - RNA, 19 nt, Human
uucccccuuuucugcauuu

SEQ ID NO: 2233703 - RNA, 16 nt, Human
uuccccgagggaugau

SEQ ID NO: 2233704 - RNA, 22 nt, Human
uucccccuggccaccacccccc

SEQ ID NO: 2233705 - RNA, 17 nt, Human
uucccccuucacaaagc

SEQ ID NO: 2233706 - RNA, 15 nt, Human
uucccccucccaggg

SEQ ID NO: 2233707 - RNA, 19 nt, Human
uucccccuccaaucccacc

SEQ ID NO: 2233708 - RNA, 23 nt, Human
auauuuuacauucuuggaaaguc

SEQ ID NO: 2233709 - RNA, 17 nt, Human
auauuuuaccucuuauu

SEQ ID NO: 2233710 - RNA, 23 nt, Human
auauuuuaccucuuauugcaaaa

SEQ ID NO: 2233711 - RNA, 20 nt, Human
uucccccuggccaccacccc

SEQ ID NO: 2233712 - RNA, 22 nt, Human
uucccccugcuuccaccucacc

SEQ ID NO: 2233713 - RNA, 21 nt, Human
uucccuuuuacauacugcugu

SEQ ID NO: 2233714 - RNA, 19 nt, Human
uucccuuuuacauacugcu

SEQ ID NO: 2233715 - RNA, 18 nt, Human
uucccuuuuacauacugc

SEQ ID NO: 2233716 - RNA, 17 nt, Human
uucccuuuuacauacug

SEQ ID NO: 2233717 - RNA, 18 nt, Human
uucccuuuuuuggcugcu

SEQ ID NO: 2233718 - RNA, 19 nt, Human
uucccuuuuuuggcugcug

SEQ ID NO: 2233719 - RNA, 20 nt, Human
uucccuuuuuuggcugcuga

SEQ ID NO: 2233720 - RNA, 13 nt, Human
uucccuaucuuuu

SEQ ID NO: 2233721 - RNA, 18 nt, Human
uuccuacacccuuggacu

SEQ ID NO: 2233722 - RNA, 18 nt, Human
uuccuacagauagucaaa

SEQ ID NO: 2233723 - RNA, 18 nt, Human
uuccuacagccccuuuuu

SEQ ID NO: 2233724 - RNA, 21 nt, Human
uuccuacacccuuggacuuga

SEQ ID NO: 2233725 - RNA, 17 nt, Human
uuccuacagauagucaa

SEQ ID NO: 2233726 - RNA, 12 nt, Human
uuccuacagccc

SEQ ID NO: 2233727 - RNA, 14 nt, Human
uuccuacagccccu

SEQ ID NO: 2233728 - RNA, 15 nt, Human
uuccuaccucccugc

SEQ ID NO: 2233729 - RNA, 16 nt, Human
uuccuaccucccugca

SEQ ID NO: 2233730 - RNA, 13 nt, Human
uuccuaccucccu

SEQ ID NO: 2233731 - RNA, 23 nt, Human
uuccuacccacaccucugccaga

SEQ ID NO: 2233732 - RNA, 16 nt, Human
uuccuacccaaccacu

SEQ ID NO: 2233733 - RNA, 17 nt, Human
uuccuacccaaccacuc

SEQ ID NO: 2233734 - RNA, 20 nt, Human
uuccuacccacaccucugcc

SEQ ID NO: 2233735 - RNA, 21 nt, Human
uuccuacccacaccucugcca

SEQ ID NO: 2233736 - RNA, 17 nt, Human
uuccccuguucacucua

SEQ ID NO: 2233737 - RNA, 14 nt, Human
uuccccuguucacu

SEQ ID NO: 2233738 - RNA, 22 nt, Human
uuccccuccuaccccucccagc

SEQ ID NO: 2233739 - RNA, 13 nt, Human
uuccccuguccug

SEQ ID NO: 2233740 - RNA, 15 nt, Human
uuccccuguggggau

SEQ ID NO: 2233741 - RNA, 21 nt, Human
uuccccuuccacugagggcag

SEQ ID NO: 2233742 - RNA, 22 nt, Human
uuccccuuccuaauuccacagc

SEQ ID NO: 2233743 - RNA, 15 nt, Human
uuccccuuccacuga

SEQ ID NO: 2233744 - RNA, 14 nt, Human
uuccccuuccacug

SEQ ID NO: 2233745 - RNA, 21 nt, Human
uucccuaggggacacuucccu

SEQ ID NO: 2233746 - RNA, 19 nt, Human
uucccuagucuauucauua

SEQ ID NO: 2233747 - RNA, 16 nt, Human
uucccuaucuuugcca

SEQ ID NO: 2233748 - RNA, 18 nt, Human
uucccuaggggacacuuc

SEQ ID NO: 2233749 - RNA, 19 nt, Human
uucccuaggggacacuucc

SEQ ID NO: 2233750 - RNA, 22 nt, Human
uucccuagaaacuuccaaaucc

SEQ ID NO: 2233751 - RNA, 17 nt, Human
uucccuacuuccuguga

SEQ ID NO: 2233752 - RNA, 14 nt, Human
uucccuacuuccug

SEQ ID NO: 2233753 - RNA, 16 nt, Human
uucccuacuuccugug

SEQ ID NO: 2233754 - RNA, 22 nt, Human
uuccccuugcccagggcucagc

SEQ ID NO: 2233755 - RNA, 23 nt, Human
uuccccuugcccagggcucagcc

SEQ ID NO: 2233756 - RNA, 13 nt, Human
uucccuacuuccu

SEQ ID NO: 2233757 - RNA, 15 nt, Human
auauuuuuaauuaaa

SEQ ID NO: 2233758 - RNA, 13 nt, Human
auauuuuuagaua

SEQ ID NO: 2233759 - RNA, 14 nt, Human
auauuuuuauagac

SEQ ID NO: 2233760 - RNA, 13 nt, Human
auauuuuuauaga

SEQ ID NO: 2233761 - RNA, 20 nt, Human
auauuuuuaagauaauaaua

SEQ ID NO: 2233762 - RNA, 14 nt, Human
auauuuuuaagaua

SEQ ID NO: 2233763 - RNA, 16 nt, Human
auauuuuuaagauaau

SEQ ID NO: 2233764 - RNA, 20 nt, Human
auauuuuuaaaauauuuauu

SEQ ID NO: 2233765 - RNA, 14 nt, Human
auauuuugucuaaa

SEQ ID NO: 2233766 - RNA, 12 nt, Human
auauuuuuaaga

SEQ ID NO: 2233767 - RNA, 19 nt, Human
auauuuucuuccaagcaaa

SEQ ID NO: 2233768 - RNA, 17 nt, Human
auauuuugucuaaaaug

SEQ ID NO: 2233769 - RNA, 19 nt, Human
auauuuuuauagacaaaua

SEQ ID NO: 2233770 - RNA, 16 nt, Human
auauuuuuauauuuag

SEQ ID NO: 2233771 - RNA, 13 nt, Human
aucaaauauuaga

SEQ ID NO: 2233772 - RNA, 14 nt, Human
aucaaauauuagau

SEQ ID NO: 2233773 - RNA, 15 nt, Human
aucaaauauuagaug

SEQ ID NO: 2233774 - RNA, 16 nt, Human
aucaaauauuagaugu

SEQ ID NO: 2233775 - RNA, 18 nt, Human
aucaaauauuagauguga

SEQ ID NO: 2233776 - RNA, 20 nt, Human
aucaaauaugcaaagcacug

SEQ ID NO: 2233777 - RNA, 18 nt, Human
auauuuuuauauuuaguu

SEQ ID NO: 2233778 - RNA, 19 nt, Human
aucaaauauuagaugugau

SEQ ID NO: 2233779 - RNA, 21 nt, Human
aucaaauauuagaugugauuu

SEQ ID NO: 2233780 - RNA, 21 nt, Human
aucaaauggaagacacauuga

SEQ ID NO: 2233781 - RNA, 22 nt, Human
aucaaauggaaaggagaggaaa

SEQ ID NO: 2233782 - RNA, 17 nt, Human
aucaaauggaagacaca

SEQ ID NO: 2233783 - RNA, 12 nt, Human
aucaagucaccg

SEQ ID NO: 2233784 - RNA, 20 nt, Human
aucaaguauuugggaaguga

SEQ ID NO: 2233785 - RNA, 21 nt, Human
aucaaguauuugggaagugaa

SEQ ID NO: 2233786 - RNA, 13 nt, Human
aucaagugucuuc

SEQ ID NO: 2233787 - RNA, 16 nt, Human
aucaagugucuuccau

SEQ ID NO: 2233788 - RNA, 22 nt, Human
aucaaguuauugacaaacucuc

SEQ ID NO: 2233789 - RNA, 15 nt, Human
aucaaguugaauuga

SEQ ID NO: 2233790 - RNA, 15 nt, Human
aucaagugugcuuua

SEQ ID NO: 2233791 - RNA, 16 nt, Human
aucaagugugcuuuag

SEQ ID NO: 2233792 - RNA, 22 nt, Human
aucaaguuggcuucuaaucaaa

SEQ ID NO: 2233793 - RNA, 23 nt, Human
aucaaguuggcuucuaaucaaag

SEQ ID NO: 2233794 - RNA, 19 nt, Human
aucaaccccuucgcuccug

SEQ ID NO: 2233795 - RNA, 20 nt, Human
aucaaccccuucgcuccugu

SEQ ID NO: 2233796 - RNA, 22 nt, Human
aucaaccccuucgcuccugugu

SEQ ID NO: 2233797 - RNA, 16 nt, Human
aucaaguauuugggaa

SEQ ID NO: 2233798 - RNA, 18 nt, Human
auauuuuccaugaaaaug

SEQ ID NO: 2233799 - RNA, 16 nt, Human
auauuuuccaugaaaa

SEQ ID NO: 2233800 - RNA, 23 nt, Human
auauuuucuuccaagcaaaggug

SEQ ID NO: 2233801 - RNA, 13 nt, Human
auauuuucuguuu

SEQ ID NO: 2233802 - RNA, 12 nt, Human
auauuuucuguu

SEQ ID NO: 2233803 - RNA, 23 nt, Human
uuccuuauguauauuuaaaagaa

SEQ ID NO: 2233804 - RNA, 22 nt, Human
uuccuuagguuuuuuuccuucu

SEQ ID NO: 2233805 - RNA, 23 nt, Human
uuccuuagguuuuuuuccuucug

SEQ ID NO: 2233806 - RNA, 23 nt, Human
uuccuuagcuuagaccucagccu

SEQ ID NO: 2233807 - RNA, 22 nt, Human
uuccuuagcuuagaccucagcc

SEQ ID NO: 2233808 - RNA, 20 nt, Human
uuccuuagcuuagaccucag

SEQ ID NO: 2233809 - RNA, 21 nt, Human
uuccuuagcuuagaccucagc

SEQ ID NO: 2233810 - RNA, 17 nt, Human
uuccuucacauccugug

SEQ ID NO: 2233811 - RNA, 20 nt, Human
uuccuucaaagcaaaugucu

SEQ ID NO: 2233812 - RNA, 15 nt, Human
uuccuguccagagag

SEQ ID NO: 2233813 - RNA, 15 nt, Human
uuccuguccagcucc

SEQ ID NO: 2233814 - RNA, 17 nt, Human
uuccuguccagcuccaa

SEQ ID NO: 2233815 - RNA, 16 nt, Human
uuccuguccagcucca

SEQ ID NO: 2233816 - RNA, 22 nt, Human
uuccuguccagcuccaaccugc

SEQ ID NO: 2233817 - RNA, 14 nt, Human
uuccugucccaccu

SEQ ID NO: 2233818 - RNA, 15 nt, Human
uuccugucccaccuc

SEQ ID NO: 2233819 - RNA, 16 nt, Human
uuccuguauguugucc

SEQ ID NO: 2233820 - RNA, 15 nt, Human
uuccuguagcaucuu

SEQ ID NO: 2233821 - RNA, 17 nt, Human
uuccuguagcaucuucu

SEQ ID NO: 2233822 - RNA, 18 nt, Human
uuccuguagcaucuucug

SEQ ID NO: 2233823 - RNA, 22 nt, Human
uuccuguagccuucuguaggaa

SEQ ID NO: 2233824 - RNA, 21 nt, Human
uuccuguaaaaaaaaaaaagu

SEQ ID NO: 2233825 - RNA, 11 nt, Human
uuccuguaaca

SEQ ID NO: 2233826 - RNA, 19 nt, Human
uuccuguaacacaagccac

SEQ ID NO: 2233827 - RNA, 21 nt, Human
uuccuguaacacaagccacag

SEQ ID NO: 2233828 - RNA, 22 nt, Human
uuccuguaacacaagccacaga

SEQ ID NO: 2233829 - RNA, 23 nt, Human
uuccuguaacacaagccacagaa

SEQ ID NO: 2233830 - RNA, 13 nt, Human
uuccucuccacug

SEQ ID NO: 2233831 - RNA, 14 nt, Human
uuccucuccacugc

SEQ ID NO: 2233832 - RNA, 15 nt, Human
uuccucuccacugcc

SEQ ID NO: 2233833 - RNA, 17 nt, Human
uuccucuccacccuccc

SEQ ID NO: 2233834 - RNA, 19 nt, Human
uuccucucacuaaacuuua

SEQ ID NO: 2233835 - RNA, 12 nt, Human
uuccucuccacc

SEQ ID NO: 2233836 - RNA, 12 nt, Human
uuccucuccacu

SEQ ID NO: 2233837 - RNA, 19 nt, Human
uuccuagaaguuacugaau

SEQ ID NO: 2233838 - RNA, 23 nt, Human
uuccucuauugauguacagucug

SEQ ID NO: 2233839 - RNA, 17 nt, Human
uuccucucacuaaacuu

SEQ ID NO: 2233840 - RNA, 18 nt, Human
uuccucucacuaaacuuu

SEQ ID NO: 2233841 - RNA, 22 nt, Human
uucgcgauggacagacucacaa

SEQ ID NO: 2233842 - RNA, 19 nt, Human
uucgcgugcccucgcugcu

SEQ ID NO: 2233843 - RNA, 22 nt, Human
uucgcaucaaaagacaauucuu

SEQ ID NO: 2233844 - RNA, 13 nt, Human
uucgcuccugugu

SEQ ID NO: 2233845 - RNA, 15 nt, Human
uucuaaaguaaaaac

SEQ ID NO: 2233846 - RNA, 13 nt, Human
uucuaaaguaaaa

SEQ ID NO: 2233847 - RNA, 13 nt, Human
uucuaaauagcaa

SEQ ID NO: 2233848 - RNA, 19 nt, Human
uucuaaaucuccaaaauaa

SEQ ID NO: 2233849 - RNA, 14 nt, Human
uucuaacaagucau

SEQ ID NO: 2233850 - RNA, 19 nt, Human
uucuaacaaaaaaauauau

SEQ ID NO: 2233851 - RNA, 20 nt, Human
uucuaacaaaaaaauauauu

SEQ ID NO: 2233852 - RNA, 18 nt, Human
uucuaaggaauaugagcu

SEQ ID NO: 2233853 - RNA, 14 nt, Human
uucuaaggaauaug

SEQ ID NO: 2233854 - RNA, 17 nt, Human
uucuaaguaaaaccaca

SEQ ID NO: 2233855 - RNA, 20 nt, Human
uucuaaguaaaaccacagca

SEQ ID NO: 2233856 - RNA, 19 nt, Human
uucuaaguaaaaccacagc

SEQ ID NO: 2233857 - RNA, 15 nt, Human
uucuaacuccaguga

SEQ ID NO: 2233858 - RNA, 18 nt, Human
uucuaagagaaguuauuu

SEQ ID NO: 2233859 - RNA, 14 nt, Human
uucgagaccagccu

SEQ ID NO: 2233860 - RNA, 18 nt, Human
uucgagaccaaccugacc

SEQ ID NO: 2233861 - RNA, 21 nt, Human
uucgagaagcugcucuggaau

SEQ ID NO: 2233862 - RNA, 17 nt, Human
uucgacuugcauuuuug

SEQ ID NO: 2233863 - RNA, 15 nt, Human
uucgagaagcugcuc

SEQ ID NO: 2233864 - RNA, 20 nt, Human
uucgagaagcugcucuggaa

SEQ ID NO: 2233865 - RNA, 19 nt, Human
uucgagaccagccuggcca

SEQ ID NO: 2233866 - RNA, 17 nt, Human
uucgagaccagccuggc

SEQ ID NO: 2233867 - RNA, 16 nt, Human
uucgagaccagccugg

SEQ ID NO: 2233868 - RNA, 15 nt, Human
uucgagaccagccug

SEQ ID NO: 2233869 - RNA, 17 nt, Human
uucgaccugauuuacag

SEQ ID NO: 2233870 - RNA, 19 nt, Human
uucgacugugaccuguggg

SEQ ID NO: 2233871 - RNA, 18 nt, Human
uucgaccugauuuacagu

SEQ ID NO: 2233872 - RNA, 17 nt, Human
uucgacucagccucagg

SEQ ID NO: 2233873 - RNA, 22 nt, Human
uucgaagcucagcccacccccc

SEQ ID NO: 2233874 - RNA, 17 nt, Human
aucaauaaaaugugauu

SEQ ID NO: 2233875 - RNA, 16 nt, Human
aucaauaaaaugugau

SEQ ID NO: 2233876 - RNA, 15 nt, Human
aucaauaaaauguga

SEQ ID NO: 2233877 - RNA, 16 nt, Human
uucgaagcucagccca

SEQ ID NO: 2233878 - RNA, 14 nt, Human
uucgaagcucagcc

SEQ ID NO: 2233879 - RNA, 22 nt, Human
uucgaaaccugggauucaggaa

SEQ ID NO: 2233880 - RNA, 19 nt, Human
aucaauaaacgauuuaauu

SEQ ID NO: 2233881 - RNA, 14 nt, Human
aucaauaaacgauu

SEQ ID NO: 2233882 - RNA, 15 nt, Human
aucaauaaacgauuu

SEQ ID NO: 2233883 - RNA, 21 nt, Human
uucgaugggcccaauucuuac

SEQ ID NO: 2233884 - RNA, 20 nt, Human
uucgaugggcccaauucuua

SEQ ID NO: 2233885 - RNA, 14 nt, Human
uucgcacagcaguu

SEQ ID NO: 2233886 - RNA, 20 nt, Human
uucgauacaccgggccugga

SEQ ID NO: 2233887 - RNA, 21 nt, Human
uucgcaggauucuuccucccu

SEQ ID NO: 2233888 - RNA, 23 nt, Human
uucgcaccuaccaucagggacag

SEQ ID NO: 2233889 - RNA, 14 nt, Human
uucgccguggcugc

SEQ ID NO: 2233890 - RNA, 19 nt, Human
uucgcccaaagccagacag

SEQ ID NO: 2233891 - RNA, 20 nt, Human
uucgccguggcugcggcacc

SEQ ID NO: 2233892 - RNA, 21 nt, Human
uucgccguggcugcggcaccc

SEQ ID NO: 2233893 - RNA, 23 nt, Human
uucgcauggucacacacugaugc

SEQ ID NO: 2233894 - RNA, 21 nt, Human
uucgcauggucacacacugau

SEQ ID NO: 2233895 - RNA, 20 nt, Human
uucgcauggucacacacuga

SEQ ID NO: 2233896 - RNA, 19 nt, Human
uucgcauggucacacacug

SEQ ID NO: 2233897 - RNA, 18 nt, Human
uucgcauggucacacacu

SEQ ID NO: 2233898 - RNA, 17 nt, Human
uucgcauggucacacac

SEQ ID NO: 2233899 - RNA, 16 nt, Human
uucgcauggucacaca

SEQ ID NO: 2233900 - RNA, 14 nt, Human
uucgcauggucaca

SEQ ID NO: 2233901 - RNA, 14 nt, Human
uucgcaucaaaaga

SEQ ID NO: 2233902 - RNA, 18 nt, Human
uucgcaucaaaagacaau

SEQ ID NO: 2233903 - RNA, 19 nt, Human
uucgcaucaaaagacaauu

SEQ ID NO: 2233904 - RNA, 20 nt, Human
uucgcaucaaaagacaauuc

SEQ ID NO: 2233905 - RNA, 21 nt, Human
uucgcaucaaaagacaauucu

SEQ ID NO: 2233906 - RNA, 21 nt, Human
uucucacugccaugccagcuu

SEQ ID NO: 2233907 - RNA, 22 nt, Human
uucucagaaggcaaaugacuuu

SEQ ID NO: 2233908 - RNA, 13 nt, Human
uucucagaaucua

SEQ ID NO: 2233909 - RNA, 15 nt, Human
uucucagaaucuacc

SEQ ID NO: 2233910 - RNA, 21 nt, Human
uucucagaaggcaaaugacuu

SEQ ID NO: 2233911 - RNA, 19 nt, Human
uucucagaaggcaaaugac

SEQ ID NO: 2233912 - RNA, 18 nt, Human
uucucagaaggcaaauga

SEQ ID NO: 2233913 - RNA, 18 nt, Human
uucucacuguucccucug

SEQ ID NO: 2233914 - RNA, 21 nt, Human
uucuauaaguuuuauguuaaa

SEQ ID NO: 2233915 - RNA, 22 nt, Human
uucuaguggucuuuguaagagu

SEQ ID NO: 2233916 - RNA, 22 nt, Human
uucuauaaguuuuauguuaaau

SEQ ID NO: 2233917 - RNA, 14 nt, Human
uucuauaauuuaaa

SEQ ID NO: 2233918 - RNA, 13 nt, Human
uucuauaauuuaa

SEQ ID NO: 2233919 - RNA, 21 nt, Human
uucuagaauuuaucacacuuc

SEQ ID NO: 2233920 - RNA, 15 nt, Human
uucuagaauuuauca

SEQ ID NO: 2233921 - RNA, 22 nt, Human
uucuagaacaucccugccagcu

SEQ ID NO: 2233922 - RNA, 17 nt, Human
uucuagaaagccuguuc

SEQ ID NO: 2233923 - RNA, 23 nt, Human
uucuagaaagccuguuccccuca

SEQ ID NO: 2233924 - RNA, 21 nt, Human
uucuagaacaucccugccagc

SEQ ID NO: 2233925 - RNA, 15 nt, Human
uucuagacuuucugu

SEQ ID NO: 2233926 - RNA, 12 nt, Human
uucuagagaaga

SEQ ID NO: 2233927 - RNA, 14 nt, Human
uucuagagaagagg

SEQ ID NO: 2233928 - RNA, 21 nt, Human
uucuaaguaaaaccacagcag

SEQ ID NO: 2233929 - RNA, 22 nt, Human
uucuagagaagaggcuggugcu

SEQ ID NO: 2233930 - RNA, 21 nt, Human
uucuagucuccuuugcacuga

SEQ ID NO: 2233931 - RNA, 22 nt, Human
uucuagucuccuuugcacugag

SEQ ID NO: 2233932 - RNA, 12 nt, Human
uucuagugcugc

SEQ ID NO: 2233933 - RNA, 23 nt, Human
uucuagucuccuuugcacugagg

SEQ ID NO: 2233934 - RNA, 14 nt, Human
uucuagucucucug

SEQ ID NO: 2233935 - RNA, 13 nt, Human
uucuagugcugcu

SEQ ID NO: 2233936 - RNA, 14 nt, Human
uucuagugcugcug

SEQ ID NO: 2233937 - RNA, 16 nt, Human
uucuagugcugcugaa

SEQ ID NO: 2233938 - RNA, 18 nt, Human
uucuagugcugcugaaga

SEQ ID NO: 2233939 - RNA, 20 nt, Human
uucuaguggucuuuguaaga

SEQ ID NO: 2233940 - RNA, 21 nt, Human
uucuaguggucuuuguaagag

SEQ ID NO: 2233941 - RNA, 15 nt, Human
uucuaguggucuuug

SEQ ID NO: 2233942 - RNA, 17 nt, Human
uucuaguggucuuugua

SEQ ID NO: 2233943 - RNA, 18 nt, Human
uucuaguggucuuuguaa

SEQ ID NO: 2233944 - RNA, 19 nt, Human
uucuaguggucuuuguaag

SEQ ID NO: 2233945 - RNA, 20 nt, Human
aucacuuucucaguuuucau

SEQ ID NO: 2233946 - RNA, 16 nt, Human
uucucagcucccccug

SEQ ID NO: 2233947 - RNA, 13 nt, Human
aucacuuuucagu

SEQ ID NO: 2233948 - RNA, 14 nt, Human
aucacuuuucagug

SEQ ID NO: 2233949 - RNA, 15 nt, Human
aucacuuuucaguga

SEQ ID NO: 2233950 - RNA, 21 nt, Human
aucacuuucucaguuuucaua

SEQ ID NO: 2233951 - RNA, 18 nt, Human
aucacuuucucaguuuuc

SEQ ID NO: 2233952 - RNA, 14 nt, Human
uucucagcuccccc

SEQ ID NO: 2233953 - RNA, 15 nt, Human
uucucagcucccccu

SEQ ID NO: 2233954 - RNA, 13 nt, Human
aucagaaaaggga

SEQ ID NO: 2233955 - RNA, 15 nt, Human
aucagaaaagggaag

SEQ ID NO: 2233956 - RNA, 14 nt, Human
aucacuuuuuucca

SEQ ID NO: 2233957 - RNA, 20 nt, Human
aucagaaacacccucacacu

SEQ ID NO: 2233958 - RNA, 16 nt, Human
aucagaaacacccuca

SEQ ID NO: 2233959 - RNA, 20 nt, Human
uucucagauauuuauauuuu

SEQ ID NO: 2233960 - RNA, 15 nt, Human
uucucagauccuugu

SEQ ID NO: 2233961 - RNA, 15 nt, Human
uucucagauauuuau

SEQ ID NO: 2233962 - RNA, 14 nt, Human
uucucagauauuua

SEQ ID NO: 2233963 - RNA, 19 nt, Human
uucucagauccuuguuuca

SEQ ID NO: 2233964 - RNA, 21 nt, Human
uucucagauggauugauaauu

SEQ ID NO: 2233965 - RNA, 13 nt, Human
uucucagauauuu

SEQ ID NO: 2233966 - RNA, 19 nt, Human
uucucagaaucuacccaaa

SEQ ID NO: 2233967 - RNA, 23 nt, Human
uucucagaaucuacccaaaggau

SEQ ID NO: 2233968 - RNA, 13 nt, Human
uucucagaaucuc

SEQ ID NO: 2233969 - RNA, 13 nt, Human
uucucagcuccca

SEQ ID NO: 2233970 - RNA, 14 nt, Human
uucucagcucccau

SEQ ID NO: 2233971 - RNA, 18 nt, Human
uucucagcucccauuucu

SEQ ID NO: 2233972 - RNA, 19 nt, Human
uucucagcucccauuucua

SEQ ID NO: 2233973 - RNA, 13 nt, Human
uucucagcucccc

SEQ ID NO: 2233974 - RNA, 12 nt, Human
uucucagcuccc

SEQ ID NO: 2233975 - RNA, 20 nt, Human
aucagacccuaccccaccac

SEQ ID NO: 2233976 - RNA, 19 nt, Human
aucagacccuaccccacca

SEQ ID NO: 2233977 - RNA, 18 nt, Human
aucagacccuaccccacc

SEQ ID NO: 2233978 - RNA, 16 nt, Human
aucagacccuacccca

SEQ ID NO: 2233979 - RNA, 15 nt, Human
aucagacccuacccc

SEQ ID NO: 2233980 - RNA, 14 nt, Human
aucagacccuaccc

SEQ ID NO: 2233981 - RNA, 20 nt, Human
aucagaccauaauguuacau

SEQ ID NO: 2233982 - RNA, 16 nt, Human
aucagaccauaauguu

SEQ ID NO: 2233983 - RNA, 19 nt, Human
aucagacacucuggcuggu

SEQ ID NO: 2233984 - RNA, 18 nt, Human
aucagacuucacacugca

SEQ ID NO: 2233985 - RNA, 22 nt, Human
aucagacuagugacaagcuccu

SEQ ID NO: 2233986 - RNA, 22 nt, Human
aucagaccuuggaucagaugaa

SEQ ID NO: 2233987 - RNA, 19 nt, Human
aucagacuaugaaguuuuu

SEQ ID NO: 2233988 - RNA, 13 nt, Human
aucaggccaggcc

SEQ ID NO: 2233989 - RNA, 19 nt, Human
aucaggaugaacccaggac

SEQ ID NO: 2233990 - RNA, 13 nt, Human
aucaggaugaacc

SEQ ID NO: 2233991 - RNA, 18 nt, Human
aucaggaugaacccagga

SEQ ID NO: 2233992 - RNA, 14 nt, Human
aucaggccaggccc

SEQ ID NO: 2233993 - RNA, 20 nt, Human
aucaggacccagaggaaggg

SEQ ID NO: 2233994 - RNA, 18 nt, Human
aucaggacccagaggaag

SEQ ID NO: 2233995 - RNA, 13 nt, Human
aucaggagaaaaa

SEQ ID NO: 2233996 - RNA, 22 nt, Human
aucaggagaaaaagccuccagu

SEQ ID NO: 2233997 - RNA, 12 nt, Human
aucaggaugaac

SEQ ID NO: 2233998 - RNA, 16 nt, Human
aucaggacccagagga

SEQ ID NO: 2233999 - RNA, 22 nt, Human
aucaggaauauuuuccaaagag

SEQ ID NO: 2234000 - RNA, 19 nt, Human
aucaggaauauuuuccaaa

SEQ ID NO: 2234001 - RNA, 16 nt, Human
uucucuuucucuccuu

SEQ ID NO: 2234002 - RNA, 22 nt, Human
uucucuuuccuuggcucccauu

SEQ ID NO: 2234003 - RNA, 13 nt, Human
uucucuuucucuc

SEQ ID NO: 2234004 - RNA, 14 nt, Human
uucucuuucucucc

SEQ ID NO: 2234005 - RNA, 16 nt, Human
uucucuuuucaaaaca

SEQ ID NO: 2234006 - RNA, 19 nt, Human
uucugacaaaaaguuucca

SEQ ID NO: 2234007 - RNA, 22 nt, Human
uucugacaaaaaguuuccauau

SEQ ID NO: 2234008 - RNA, 13 nt, Human
uucucuuucaaag

SEQ ID NO: 2234009 - RNA, 19 nt, Human
uucucuagcuggugguuuc

SEQ ID NO: 2234010 - RNA, 13 nt, Human
uucucuuuccuug

SEQ ID NO: 2234011 - RNA, 20 nt, Human
uucucuacagacuucuccag

SEQ ID NO: 2234012 - RNA, 19 nt, Human
uucucuacuuugaggaaac

SEQ ID NO: 2234013 - RNA, 20 nt, Human
uucucuacuuugaggaaacc

SEQ ID NO: 2234014 - RNA, 17 nt, Human
uucucuacucuagggaa

SEQ ID NO: 2234015 - RNA, 21 nt, Human
uucucuaaguuccacugagcu

SEQ ID NO: 2234016 - RNA, 23 nt, Human
uucucuaaguuccacugagcucc

SEQ ID NO: 2234017 - RNA, 24 nt, Human
uucucuaagagaacaaugugcuau

SEQ ID NO: 2234018 - RNA, 18 nt, Human
uucucuaaguuccacuga

SEQ ID NO: 2234019 - RNA, 20 nt, Human
uucucuaaguuccacugagc

SEQ ID NO: 2234020 - RNA, 15 nt, Human
uucugcacugagcag

SEQ ID NO: 2234021 - RNA, 17 nt, Human
uucugcacugagcagag

SEQ ID NO: 2234022 - RNA, 20 nt, Human
uucugcacugagcagagucu

SEQ ID NO: 2234023 - RNA, 20 nt, Human
uucugcagcaugaccuguga

SEQ ID NO: 2234024 - RNA, 23 nt, Human
uucugcagaguuuccaaaaccag

SEQ ID NO: 2234025 - RNA, 22 nt, Human
uucugcacccuccacccugucc

SEQ ID NO: 2234026 - RNA, 23 nt, Human
uucugcacccuccacccuguccc

SEQ ID NO: 2234027 - RNA, 13 nt, Human
uucugcacccucc

SEQ ID NO: 2234028 - RNA, 16 nt, Human
uucugcacccuccacc

SEQ ID NO: 2234029 - RNA, 17 nt, Human
uucugcacccuccaccc

SEQ ID NO: 2234030 - RNA, 19 nt, Human
uucugcacccuccacccug

SEQ ID NO: 2234031 - RNA, 23 nt, Human
uucugcagcaugaccugugacca

SEQ ID NO: 2234032 - RNA, 19 nt, Human
uucugcccuggcugcugcc

SEQ ID NO: 2234033 - RNA, 22 nt, Human
uucugcagcaugaccugugacc

SEQ ID NO: 2234034 - RNA, 21 nt, Human
uucugcagcaugaccugugac

SEQ ID NO: 2234035 - RNA, 18 nt, Human
uucugcccuggcugcugc

SEQ ID NO: 2234036 - RNA, 13 nt, Human
uucugccgcagcc

SEQ ID NO: 2234037 - RNA, 13 nt, Human
uucugaccacacu

SEQ ID NO: 2234038 - RNA, 23 nt, Human
uucugacauuaacaguuuuccau

SEQ ID NO: 2234039 - RNA, 22 nt, Human
uucugacauuaacaguuuucca

SEQ ID NO: 2234040 - RNA, 20 nt, Human
uucugacauuaacaguuuuc

SEQ ID NO: 2234041 - RNA, 15 nt, Human
uucugacauuaacag

SEQ ID NO: 2234042 - RNA, 14 nt, Human
uucugacauuaaca

SEQ ID NO: 2234043 - RNA, 23 nt, Human
uucugacaucuuaguauuugcau

SEQ ID NO: 2234044 - RNA, 14 nt, Human
uucugacccaugcu

SEQ ID NO: 2234045 - RNA, 22 nt, Human
uucugaccacacuuccugucca

SEQ ID NO: 2234046 - RNA, 14 nt, Human
uucugaccacacuu

SEQ ID NO: 2234047 - RNA, 17 nt, Human
uucugaccacagcauca

SEQ ID NO: 2234048 - RNA, 20 nt, Human
uucugaccacagcaucauuu

SEQ ID NO: 2234049 - RNA, 22 nt, Human
uucugcaagcacaucugcauuu

SEQ ID NO: 2234050 - RNA, 14 nt, Human
uucugaccauuuca

SEQ ID NO: 2234051 - RNA, 13 nt, Human
uucugcaagccug

SEQ ID NO: 2234052 - RNA, 15 nt, Human
uucugcaagccugcg

SEQ ID NO: 2234053 - RNA, 12 nt, Human
uucugcacccuc

SEQ ID NO: 2234054 - RNA, 15 nt, Human
uucugcacacagcac

SEQ ID NO: 2234055 - RNA, 22 nt, Human
uucuccucuuguaaauaaagcc

SEQ ID NO: 2234056 - RNA, 18 nt, Human
uucuccugacccaguccc

SEQ ID NO: 2234057 - RNA, 17 nt, Human
uucuccucuuguaaaua

SEQ ID NO: 2234058 - RNA, 19 nt, Human
uucuccucuuguaaauaaa

SEQ ID NO: 2234059 - RNA, 13 nt, Human
uucuccucuugua

SEQ ID NO: 2234060 - RNA, 14 nt, Human
uucuccucuuguaa

SEQ ID NO: 2234061 - RNA, 14 nt, Human
uucuccucuccccu

SEQ ID NO: 2234062 - RNA, 20 nt, Human
uucuccucccuuccuuuucc

SEQ ID NO: 2234063 - RNA, 11 nt, Human
uucuccucccc

SEQ ID NO: 2234064 - RNA, 19 nt, Human
uucuccucccuuccuuuuc

SEQ ID NO: 2234065 - RNA, 21 nt, Human
uucucuaacuucaaggcccau

SEQ ID NO: 2234066 - RNA, 19 nt, Human
uucucuaagagaacaaugu

SEQ ID NO: 2234067 - RNA, 14 nt, Human
uucuccugccucag

SEQ ID NO: 2234068 - RNA, 13 nt, Human
uucuccugccuca

SEQ ID NO: 2234069 - RNA, 12 nt, Human
uucuccugccuc

SEQ ID NO: 2234070 - RNA, 19 nt, Human
aucauuuauuuuuuacauu

SEQ ID NO: 2234071 - RNA, 18 nt, Human
aucauugcuuugaagcag

SEQ ID NO: 2234072 - RNA, 21 nt, Human
aucauuuaauaauauacuugu

SEQ ID NO: 2234073 - RNA, 14 nt, Human
aucauuuaauaaua

SEQ ID NO: 2234074 - RNA, 17 nt, Human
aucauuuaauaauauac

SEQ ID NO: 2234075 - RNA, 18 nt, Human
aucauuuaauaauauacu

SEQ ID NO: 2234076 - RNA, 19 nt, Human
aucauuuaauaauauacuu

SEQ ID NO: 2234077 - RNA, 22 nt, Human
aucauuuauuuuuuacauuauu

SEQ ID NO: 2234078 - RNA, 15 nt, Human
aucauuucuauuucu

SEQ ID NO: 2234079 - RNA, 13 nt, Human
uucuccucccagg

SEQ ID NO: 2234080 - RNA, 20 nt, Human
aucauuucugcaucagcugc

SEQ ID NO: 2234081 - RNA, 13 nt, Human
aucauuguacagu

SEQ ID NO: 2234082 - RNA, 23 nt, Human
aucauugcuuugaagcaguugug

SEQ ID NO: 2234083 - RNA, 12 nt, Human
aucauuuaauaa

SEQ ID NO: 2234084 - RNA, 13 nt, Human
aucauuuaauaau

SEQ ID NO: 2234085 - RNA, 22 nt, Human
aucauuggauucugagagcugu

SEQ ID NO: 2234086 - RNA, 21 nt, Human
aucauuggauucugagagcug

SEQ ID NO: 2234087 - RNA, 18 nt, Human
aucauugauugucagcua

SEQ ID NO: 2234088 - RNA, 21 nt, Human
aucauugcacucuagccuggg

SEQ ID NO: 2234089 - RNA, 22 nt, Human
aucauugcacucuagccugggc

SEQ ID NO: 2234090 - RNA, 13 nt, Human
aucauugccuggu

SEQ ID NO: 2234091 - RNA, 21 nt, Human
aucauugaaaucuuuuugcuu

SEQ ID NO: 2234092 - RNA, 21 nt, Human
aucaggccaggcccucugccc

SEQ ID NO: 2234093 - RNA, 22 nt, Human
aucaggccaggcccucugccca

SEQ ID NO: 2234094 - RNA, 23 nt, Human
aucaggccaggcccucugcccac

SEQ ID NO: 2234095 - RNA, 20 nt, Human
aucaggccaggcccucugcc

SEQ ID NO: 2234096 - RNA, 20 nt, Human
uucuggugugaacuaaacuu

SEQ ID NO: 2234097 - RNA, 15 nt, Human
uucugguuccagggu

SEQ ID NO: 2234098 - RNA, 17 nt, Human
uucugguuccagggucc

SEQ ID NO: 2234099 - RNA, 22 nt, Human
uucuggcucucccauuuccuga

SEQ ID NO: 2234100 - RNA, 14 nt, Human
uucuggugugaacu

SEQ ID NO: 2234101 - RNA, 21 nt, Human
uucuggugugaacuaaacuuu

SEQ ID NO: 2234102 - RNA, 10 nt, Human
uucuggcuca

SEQ ID NO: 2234103 - RNA, 20 nt, Human
uucugcccuggcugcugccc

SEQ ID NO: 2234104 - RNA, 16 nt, Human
uucuggcucucccauu

SEQ ID NO: 2234105 - RNA, 17 nt, Human
uucuggcucagggaggu

SEQ ID NO: 2234106 - RNA, 17 nt, Human
uucuggcuccucaaaca

SEQ ID NO: 2234107 - RNA, 20 nt, Human
uucuggcuaugcauuugaaa

SEQ ID NO: 2234108 - RNA, 18 nt, Human
uucuggcuaugcauuuga

SEQ ID NO: 2234109 - RNA, 14 nt, Human
uucugccgcagccc

SEQ ID NO: 2234110 - RNA, 15 nt, Human
uucugccgcagcccu

SEQ ID NO: 2234111 - RNA, 22 nt, Human
uucugguugaugccugugaacu

SEQ ID NO: 2234112 - RNA, 17 nt, Human
uucuguaaaaugucugu

SEQ ID NO: 2234113 - RNA, 13 nt, Human
uucuguagaaaug

SEQ ID NO: 2234114 - RNA, 19 nt, Human
uucuguaaacucaaaacuu

SEQ ID NO: 2234115 - RNA, 20 nt, Human
uucuguaaacucaaaacuua

SEQ ID NO: 2234116 - RNA, 14 nt, Human
uucuguagaaaugg

SEQ ID NO: 2234117 - RNA, 15 nt, Human
uucuguagaaauggu

SEQ ID NO: 2234118 - RNA, 11 nt, Human
uucuguauaaa

SEQ ID NO: 2234119 - RNA, 21 nt, Human
uucuguauaaagccuguauuc

SEQ ID NO: 2234120 - RNA, 13 nt, Human
uucuguagauucu

SEQ ID NO: 2234121 - RNA, 23 nt, Human
uucuguaaacucaaaacuuaaca

SEQ ID NO: 2234122 - RNA, 16 nt, Human
uucuguagguucugug

SEQ ID NO: 2234123 - RNA, 18 nt, Human
uucuguagaaaugguugu

SEQ ID NO: 2234124 - RNA, 20 nt, Human
uucuguagaaaugguuguau

SEQ ID NO: 2234125 - RNA, 21 nt, Human
uucuguagaaaugguuguauu

SEQ ID NO: 2234126 - RNA, 22 nt, Human
uucuguagaaaugguuguauua

SEQ ID NO: 2234127 - RNA, 14 nt, Human
aucauuuuuguauc

SEQ ID NO: 2234128 - RNA, 20 nt, Human
aucauuuuuguacaguuugc

SEQ ID NO: 2234129 - RNA, 22 nt, Human
aucauuuuuguacaguuugcug

SEQ ID NO: 2234130 - RNA, 14 nt, Human
aucauuuuuguaca

SEQ ID NO: 2234131 - RNA, 15 nt, Human
aucauuuuuguacag

SEQ ID NO: 2234132 - RNA, 16 nt, Human
aucauuuuuguacagu

SEQ ID NO: 2234133 - RNA, 22 nt, Human
auccaaugcucaagaaacaacu

SEQ ID NO: 2234134 - RNA, 20 nt, Human
auccaauccucacugggugg

SEQ ID NO: 2234135 - RNA, 20 nt, Human
auccaaucuaaccacaucaa

SEQ ID NO: 2234136 - RNA, 19 nt, Human
auccaauccucacugggug

SEQ ID NO: 2234137 - RNA, 18 nt, Human
auccaauccucacugggu

SEQ ID NO: 2234138 - RNA, 17 nt, Human
auccaauccucacuggg

SEQ ID NO: 2234139 - RNA, 14 nt, Human
auccaauccucacu

SEQ ID NO: 2234140 - RNA, 22 nt, Human
auccaauauuuucuuuaaugcu

SEQ ID NO: 2234141 - RNA, 19 nt, Human
auccaauauuuucuuuaau

SEQ ID NO: 2234142 - RNA, 24 nt, Human
auccaauauuuucuuuaaugcuuu

SEQ ID NO: 2234143 - RNA, 14 nt, Human
auccaaggagaaac

SEQ ID NO: 2234144 - RNA, 13 nt, Human
auccaaggagaaa

SEQ ID NO: 2234145 - RNA, 23 nt, Human
auccaagcuuuuuuaaaguaaaa

SEQ ID NO: 2234146 - RNA, 20 nt, Human
auccaaacuuggauuuuuga

SEQ ID NO: 2234147 - RNA, 22 nt, Human
auccaaggagaaacagagacag

SEQ ID NO: 2234148 - RNA, 19 nt, Human
auccaaggagaaacagaga

SEQ ID NO: 2234149 - RNA, 12 nt, Human
auccaagugaac

SEQ ID NO: 2234150 - RNA, 13 nt, Human
auccaaaagaagc

SEQ ID NO: 2234151 - RNA, 19 nt, Human
auccaaaagaagcccccag

SEQ ID NO: 2234152 - RNA, 18 nt, Human
auccaaaagaagccccca

SEQ ID NO: 2234153 - RNA, 22 nt, Human
auccaaaagaagcccccagcua

SEQ ID NO: 2234154 - RNA, 13 nt, Human
auccaaaagcuuu

SEQ ID NO: 2234155 - RNA, 23 nt, Human
auccauuucaucuauuucugaga

SEQ ID NO: 2234156 - RNA, 22 nt, Human
auccauuucaucuauuucugag

SEQ ID NO: 2234157 - RNA, 21 nt, Human
auccauuucaucuauuucuga

SEQ ID NO: 2234158 - RNA, 20 nt, Human
auccauuucaucuauuucug

SEQ ID NO: 2234159 - RNA, 18 nt, Human
auccauuucaucuauuuc

SEQ ID NO: 2234160 - RNA, 16 nt, Human
auccauucuuucugau

SEQ ID NO: 2234161 - RNA, 15 nt, Human
auccauucuuucuga

SEQ ID NO: 2234162 - RNA, 13 nt, Human
auccauucuuucu

SEQ ID NO: 2234163 - RNA, 13 nt, Human
auccauaaagaag

SEQ ID NO: 2234164 - RNA, 14 nt, Human
auccauaaagaagc

SEQ ID NO: 2234165 - RNA, 16 nt, Human
auccauaaagaagcaa

SEQ ID NO: 2234166 - RNA, 17 nt, Human
auccauaaagaagcaau

SEQ ID NO: 2234167 - RNA, 21 nt, Human
auccauaaagaagcaauaaag

SEQ ID NO: 2234168 - RNA, 14 nt, Human
auccauacauuugu

SEQ ID NO: 2234169 - RNA, 15 nt, Human
aucccaagugccagu

SEQ ID NO: 2234170 - RNA, 14 nt, Human
aucccacacccugg

SEQ ID NO: 2234171 - RNA, 15 nt, Human
aucccaccaacccuc

SEQ ID NO: 2234172 - RNA, 14 nt, Human
aucccacccacaug

SEQ ID NO: 2234173 - RNA, 23 nt, Human
auccauuugcguuccaugaugcu

SEQ ID NO: 2234174 - RNA, 15 nt, Human
uucuuacaaacaugu

SEQ ID NO: 2234175 - RNA, 20 nt, Human
uucuuaauugcacucuaaaa

SEQ ID NO: 2234176 - RNA, 13 nt, Human
uucuuaauucuua

SEQ ID NO: 2234177 - RNA, 17 nt, Human
uucuuaaacaaauguau

SEQ ID NO: 2234178 - RNA, 15 nt, Human
uucuuaaaauauauu

SEQ ID NO: 2234179 - RNA, 13 nt, Human
uucuuaaagaguu

SEQ ID NO: 2234180 - RNA, 17 nt, Human
uucuuaaagucaagauu

SEQ ID NO: 2234181 - RNA, 22 nt, Human
uucuuaaucuuuucacaaauaa

SEQ ID NO: 2234182 - RNA, 23 nt, Human
uucuuaaucuuuucacaaauaaa

SEQ ID NO: 2234183 - RNA, 23 nt, Human
uucuuccucccucccucuuuccc

SEQ ID NO: 2234184 - RNA, 12 nt, Human
uucuuacaagga

SEQ ID NO: 2234185 - RNA, 14 nt, Human
uucuuaauugcacu

SEQ ID NO: 2234186 - RNA, 13 nt, Human
uucuuacagacug

SEQ ID NO: 2234187 - RNA, 13 nt, Human
uucuuacauaauu

SEQ ID NO: 2234188 - RNA, 16 nt, Human
uucuuacauaauuuuu

SEQ ID NO: 2234189 - RNA, 11 nt, Human
uucuuccucug

SEQ ID NO: 2234190 - RNA, 12 nt, Human
uucuuccucugc

SEQ ID NO: 2234191 - RNA, 13 nt, Human
uucuuccucugcu

SEQ ID NO: 2234192 - RNA, 20 nt, Human
uucuguuuuucuaggccugg

SEQ ID NO: 2234193 - RNA, 21 nt, Human
uucuuaaaauauauuucagau

SEQ ID NO: 2234194 - RNA, 21 nt, Human
uucuguuggccagugugacaa

SEQ ID NO: 2234195 - RNA, 16 nt, Human
uucuguuuugccugaa

SEQ ID NO: 2234196 - RNA, 17 nt, Human
uucuguugcugccucau

SEQ ID NO: 2234197 - RNA, 17 nt, Human
uucuguuuugccugaag

SEQ ID NO: 2234198 - RNA, 16 nt, Human
aucccacgcuucucuu

SEQ ID NO: 2234199 - RNA, 17 nt, Human
aucccacgcacuccaug

SEQ ID NO: 2234200 - RNA, 18 nt, Human
aucccacgcacuccauga

SEQ ID NO: 2234201 - RNA, 21 nt, Human
uucuguuuugccugaaguugg

SEQ ID NO: 2234202 - RNA, 16 nt, Human
aucccacgcacuccau

SEQ ID NO: 2234203 - RNA, 18 nt, Human
aucccacgcuucucuuug

SEQ ID NO: 2234204 - RNA, 15 nt, Human
aucccacccacaugu

SEQ ID NO: 2234205 - RNA, 18 nt, Human
aucccacccacaugugac

SEQ ID NO: 2234206 - RNA, 20 nt, Human
aucccacccacaugugacac

SEQ ID NO: 2234207 - RNA, 23 nt, Human
aucccacccacaugugacacaua

SEQ ID NO: 2234208 - RNA, 16 nt, Human
uucuguugcugccuca

SEQ ID NO: 2234209 - RNA, 15 nt, Human
uucuguugcugccuc

SEQ ID NO: 2234210 - RNA, 18 nt, Human
uucuguucuuucuggcua

SEQ ID NO: 2234211 - RNA, 19 nt, Human
uucuuuguguagcuuugcu

SEQ ID NO: 2234212 - RNA, 12 nt, Human
uucuuuguguag

SEQ ID NO: 2234213 - RNA, 16 nt, Human
uucuuuguuacaggca

SEQ ID NO: 2234214 - RNA, 21 nt, Human
uucuuuuaaaggggcagaaaa

SEQ ID NO: 2234215 - RNA, 15 nt, Human
uucuuugaaauuguu

SEQ ID NO: 2234216 - RNA, 20 nt, Human
uucuuucuuagaaauuuauu

SEQ ID NO: 2234217 - RNA, 16 nt, Human
uucuuucuuugggaau

SEQ ID NO: 2234218 - RNA, 16 nt, Human
uucuuuguaaugaaaa

SEQ ID NO: 2234219 - RNA, 13 nt, Human
uucuuucuuccuc

SEQ ID NO: 2234220 - RNA, 15 nt, Human
uucuuucuuccucug

SEQ ID NO: 2234221 - RNA, 13 nt, Human
uucuuucuuagaa

SEQ ID NO: 2234222 - RNA, 19 nt, Human
uucuugguucauaaaugaa

SEQ ID NO: 2234223 - RNA, 14 nt, Human
uucuuucuuagaaa

SEQ ID NO: 2234224 - RNA, 15 nt, Human
uucuuucuuagaaau

SEQ ID NO: 2234225 - RNA, 22 nt, Human
uucuuucuggcuaugcauuuga

SEQ ID NO: 2234226 - RNA, 18 nt, Human
uucuuggggcccuacacc

SEQ ID NO: 2234227 - RNA, 14 nt, Human
uucuugguagagau

SEQ ID NO: 2234228 - RNA, 16 nt, Human
uucuugguagagauuc

SEQ ID NO: 2234229 - RNA, 15 nt, Human
uucuugguagagauu

SEQ ID NO: 2234230 - RNA, 21 nt, Human
uucuuggugcuuacacaucuc

SEQ ID NO: 2234231 - RNA, 17 nt, Human
uucuugguucauaaaug

SEQ ID NO: 2234232 - RNA, 18 nt, Human
uucuugguucauaaauga

SEQ ID NO: 2234233 - RNA, 23 nt, Human
uucuugcugguugucauuuuugc

SEQ ID NO: 2234234 - RNA, 13 nt, Human
uucuugcaaagua

SEQ ID NO: 2234235 - RNA, 14 nt, Human
uucuugggcccucc

SEQ ID NO: 2234236 - RNA, 20 nt, Human
uucuuggggcccuacaccuu

SEQ ID NO: 2234237 - RNA, 14 nt, Human
uucuugcugguugu

SEQ ID NO: 2234238 - RNA, 18 nt, Human
uucuuggagucuuccaaa

SEQ ID NO: 2234239 - RNA, 22 nt, Human
uucuuccuuaauucacucccac

SEQ ID NO: 2234240 - RNA, 21 nt, Human
uucuugaauuuaauaaucugu

SEQ ID NO: 2234241 - RNA, 21 nt, Human
uucuugaucaacaucuuuucu

SEQ ID NO: 2234242 - RNA, 16 nt, Human
uucuugauguugcuua

SEQ ID NO: 2234243 - RNA, 12 nt, Human
uucuugcaaagu

SEQ ID NO: 2234244 - RNA, 17 nt, Human
uugaacccaggaguuca

SEQ ID NO: 2234245 - RNA, 12 nt, Human
uugaacccagga

SEQ ID NO: 2234246 - RNA, 21 nt, Human
auccuaagcuauucaguaaua

SEQ ID NO: 2234247 - RNA, 13 nt, Human
uugaacccaggag

SEQ ID NO: 2234248 - RNA, 18 nt, Human
uugaacacucaugcugaa

SEQ ID NO: 2234249 - RNA, 19 nt, Human
uugaacacucaugcugaaa

SEQ ID NO: 2234250 - RNA, 21 nt, Human
uugaacacaaacuguaaauaa

SEQ ID NO: 2234251 - RNA, 20 nt, Human
uugaacacaaacuguaaaua

SEQ ID NO: 2234252 - RNA, 13 nt, Human
uugaacacugggg

SEQ ID NO: 2234253 - RNA, 20 nt, Human
uugaacacucaugcugaaag

SEQ ID NO: 2234254 - RNA, 16 nt, Human
uugaaccacuucccuc

SEQ ID NO: 2234255 - RNA, 18 nt, Human
uugaacccgggaggcaga

SEQ ID NO: 2234256 - RNA, 21 nt, Human
auccuaggcauuugcugaaua

SEQ ID NO: 2234257 - RNA, 20 nt, Human
auccuagguaggguuuaauc

SEQ ID NO: 2234258 - RNA, 17 nt, Human
auccuagggccuggguu

SEQ ID NO: 2234259 - RNA, 13 nt, Human
auccuagggccug

SEQ ID NO: 2234260 - RNA, 20 nt, Human
auccuaauuucuccucccuu

SEQ ID NO: 2234261 - RNA, 23 nt, Human
auccuaauuucuccucccuuccu

SEQ ID NO: 2234262 - RNA, 13 nt, Human
auccuaguuccac

SEQ ID NO: 2234263 - RNA, 20 nt, Human
auccuagucucuaucauuaa

SEQ ID NO: 2234264 - RNA, 23 nt, Human
auccuagucucuaucauuaaagu

SEQ ID NO: 2234265 - RNA, 12 nt, Human
auccuaaugaau

SEQ ID NO: 2234266 - RNA, 13 nt, Human
auccuaaugaaug

SEQ ID NO: 2234267 - RNA, 19 nt, Human
auccuaaucauccaaugcu

SEQ ID NO: 2234268 - RNA, 21 nt, Human
auccuaaugacuucuaaaaau

SEQ ID NO: 2234269 - RNA, 19 nt, Human
auccuaaugaaugcauaaa

SEQ ID NO: 2234270 - RNA, 15 nt, Human
auccuaauuucuccu

SEQ ID NO: 2234271 - RNA, 16 nt, Human
auccuaauuucuccuc

SEQ ID NO: 2234272 - RNA, 18 nt, Human
auccuaauuucuccuccc

SEQ ID NO: 2234273 - RNA, 19 nt, Human
auccuaauuucuccucccu

SEQ ID NO: 2234274 - RNA, 15 nt, Human
uucuuuuuauugaau

SEQ ID NO: 2234275 - RNA, 15 nt, Human
uucuuuuuauuuucu

SEQ ID NO: 2234276 - RNA, 20 nt, Human
uucuuuuguauguaaaugug

SEQ ID NO: 2234277 - RNA, 13 nt, Human
uucuuuuguaauu

SEQ ID NO: 2234278 - RNA, 14 nt, Human
uucuuuuguaugua

SEQ ID NO: 2234279 - RNA, 18 nt, Human
uucuuuuguauguaaaug

SEQ ID NO: 2234280 - RNA, 23 nt, Human
uucuuuucgccguggcugcggca

SEQ ID NO: 2234281 - RNA, 19 nt, Human
uucuuuucacauucuuaua

SEQ ID NO: 2234282 - RNA, 20 nt, Human
uucuuuucacauucuuauaa

SEQ ID NO: 2234283 - RNA, 19 nt, Human
uucuuuuacucaugaucuu

SEQ ID NO: 2234284 - RNA, 12 nt, Human
uucuuuucacau

SEQ ID NO: 2234285 - RNA, 15 nt, Human
uucuuuucacauucu

SEQ ID NO: 2234286 - RNA, 17 nt, Human
uucuuuucacauucuua

SEQ ID NO: 2234287 - RNA, 12 nt, Human
uucuuuuaucac

SEQ ID NO: 2234288 - RNA, 16 nt, Human
uugaaaguuuacagga

SEQ ID NO: 2234289 - RNA, 16 nt, Human
uucuuuuuauuuucuu

SEQ ID NO: 2234290 - RNA, 18 nt, Human
uucuuuuucuucuucccu

SEQ ID NO: 2234291 - RNA, 15 nt, Human
uugaaauaauaaauc

SEQ ID NO: 2234292 - RNA, 17 nt, Human
uugaaaguuuucagaac

SEQ ID NO: 2234293 - RNA, 20 nt, Human
uugaacaaguuguuucauug

SEQ ID NO: 2234294 - RNA, 14 nt, Human
uugaacacaaacug

SEQ ID NO: 2234295 - RNA, 18 nt, Human
uugaacacaaacuguaaa

SEQ ID NO: 2234296 - RNA, 15 nt, Human
uugaacacaaacugu

SEQ ID NO: 2234297 - RNA, 12 nt, Human
uugaaauuuuaa

SEQ ID NO: 2234298 - RNA, 21 nt, Human
uugaaauuuuuauuaaauuau

SEQ ID NO: 2234299 - RNA, 21 nt, Human
uugaaaugaaaguauaacuga

SEQ ID NO: 2234300 - RNA, 15 nt, Human
uugaaaucuguaucu

SEQ ID NO: 2234301 - RNA, 13 nt, Human
uugaaaucuuuua

SEQ ID NO: 2234302 - RNA, 11 nt, Human
uugaaaucuuu

SEQ ID NO: 2234303 - RNA, 20 nt, Human
uugaaauauaggaacuuaaa

SEQ ID NO: 2234304 - RNA, 19 nt, Human
uugaaauauugacuuuuua

SEQ ID NO: 2234305 - RNA, 14 nt, Human
uucauauugaauau

SEQ ID NO: 2234306 - RNA, 18 nt, Human
uucauauugcugagagaa

SEQ ID NO: 2234307 - RNA, 18 nt, Human
uucauauguugcucaguc

SEQ ID NO: 2234308 - RNA, 14 nt, Human
uucauauguugcuc

SEQ ID NO: 2234309 - RNA, 16 nt, Human
uucauauguugcucag

SEQ ID NO: 2234310 - RNA, 20 nt, Human
uucauauguaccauguacau

SEQ ID NO: 2234311 - RNA, 13 nt, Human
uucauauguugcu

SEQ ID NO: 2234312 - RNA, 13 nt, Human
uucauaugcugua

SEQ ID NO: 2234313 - RNA, 18 nt, Human
uucauacacagccugggc

SEQ ID NO: 2234314 - RNA, 12 nt, Human
uucauacaaggc

SEQ ID NO: 2234315 - RNA, 21 nt, Human
uucauacagggaugguguuca

SEQ ID NO: 2234316 - RNA, 19 nt, Human
uucauaauuauuauuuggc

SEQ ID NO: 2234317 - RNA, 18 nt, Human
uucagugccuuauggaac

SEQ ID NO: 2234318 - RNA, 13 nt, Human
uucagaaauaugu

SEQ ID NO: 2234319 - RNA, 15 nt, Human
uucagaaaugcugcc

SEQ ID NO: 2234320 - RNA, 16 nt, Human
uucagaaaugcugccu

SEQ ID NO: 2234321 - RNA, 17 nt, Human
uucagaaaugcugccug

SEQ ID NO: 2234322 - RNA, 18 nt, Human
uucagaaagugugcuuua

SEQ ID NO: 2234323 - RNA, 16 nt, Human
uucagaaagugugcuu

SEQ ID NO: 2234324 - RNA, 13 nt, Human
uucagaaaugugu

SEQ ID NO: 2234325 - RNA, 11 nt, Human
uucagaaaugu

SEQ ID NO: 2234326 - RNA, 14 nt, Human
uucagugcccacca

SEQ ID NO: 2234327 - RNA, 10 nt, Human
uucagugccc

SEQ ID NO: 2234328 - RNA, 22 nt, Human
uucagaaaugcugccugccugu

SEQ ID NO: 2234329 - RNA, 13 nt, Human
uucagugccaaua

SEQ ID NO: 2234330 - RNA, 18 nt, Human
uucagaaaugcugccugc

SEQ ID NO: 2234331 - RNA, 19 nt, Human
uucagaaaugcugccugcc

SEQ ID NO: 2234332 - RNA, 20 nt, Human
uucagaaaugcugccugccu

SEQ ID NO: 2234333 - RNA, 21 nt, Human
uucagaaaugcugccugccug

SEQ ID NO: 2234334 - RNA, 16 nt, Human
uucagugccaaaaaca

SEQ ID NO: 2234335 - RNA, 12 nt, Human
uucagugccuua

SEQ ID NO: 2234336 - RNA, 13 nt, Human
uucagugccuuau

SEQ ID NO: 2234337 - RNA, 21 nt, Human
uucaucccucuggggcuguuc

SEQ ID NO: 2234338 - RNA, 12 nt, Human
auauauguauuu

SEQ ID NO: 2234339 - RNA, 12 nt, Human
auauaugugaac

SEQ ID NO: 2234340 - RNA, 18 nt, Human
auauaugugaacauuuau

SEQ ID NO: 2234341 - RNA, 12 nt, Human
auauauguguau

SEQ ID NO: 2234342 - RNA, 16 nt, Human
uucaucccaugaugua

SEQ ID NO: 2234343 - RNA, 18 nt, Human
uucaucccaugauguagu

SEQ ID NO: 2234344 - RNA, 19 nt, Human
uucaucccaugauguagug

SEQ ID NO: 2234345 - RNA, 21 nt, Human
uucaucccaugauguagugcc

SEQ ID NO: 2234346 - RNA, 17 nt, Human
uucaucccucuggggcu

SEQ ID NO: 2234347 - RNA, 12 nt, Human
uucauauugugc

SEQ ID NO: 2234348 - RNA, 14 nt, Human
uucauauugugcca

SEQ ID NO: 2234349 - RNA, 16 nt, Human
uucauauugugccaau

SEQ ID NO: 2234350 - RNA, 22 nt, Human
uucauauugugccaauauguau

SEQ ID NO: 2234351 - RNA, 19 nt, Human
uucaucccaacugucuuuu

SEQ ID NO: 2234352 - RNA, 20 nt, Human
uucauauuguggcacaagca

SEQ ID NO: 2234353 - RNA, 23 nt, Human
uucauccacucugccugcuuaca

SEQ ID NO: 2234354 - RNA, 13 nt, Human
auauauuugugua

SEQ ID NO: 2234355 - RNA, 15 nt, Human
auauauuuaaugaua

SEQ ID NO: 2234356 - RNA, 13 nt, Human
auauauuuaauga

SEQ ID NO: 2234357 - RNA, 12 nt, Human
auauauuuuaag

SEQ ID NO: 2234358 - RNA, 13 nt, Human
auauauuuuaaga

SEQ ID NO: 2234359 - RNA, 12 nt, Human
auauauuuaaaa

SEQ ID NO: 2234360 - RNA, 19 nt, Human
auauauugguaacauccuu

SEQ ID NO: 2234361 - RNA, 21 nt, Human
auauauugguaacauccuuuc

SEQ ID NO: 2234362 - RNA, 13 nt, Human
auauauugaauua

SEQ ID NO: 2234363 - RNA, 14 nt, Human
auauauugaauuaa

SEQ ID NO: 2234364 - RNA, 23 nt, Human
auauauguguguuuaaauaaagu

SEQ ID NO: 2234365 - RNA, 12 nt, Human
auauauugcugc

SEQ ID NO: 2234366 - RNA, 16 nt, Human
auauauguguguuuaa

SEQ ID NO: 2234367 - RNA, 18 nt, Human
auauauguguguuuaaau

SEQ ID NO: 2234368 - RNA, 20 nt, Human
auauauguguguuuaaauaa

SEQ ID NO: 2234369 - RNA, 21 nt, Human
auauauguguguuuaaauaaa

SEQ ID NO: 2234370 - RNA, 16 nt, Human
auauauguguguguau

SEQ ID NO: 2234371 - RNA, 19 nt, Human
auauauguguguguauguu

SEQ ID NO: 2234372 - RNA, 14 nt, Human
auauaugugaugau

SEQ ID NO: 2234373 - RNA, 13 nt, Human
auauauguguaug

SEQ ID NO: 2234374 - RNA, 15 nt, Human
auauauguguaugua

SEQ ID NO: 2234375 - RNA, 22 nt, Human
auauauuuguguauuuaacagg

SEQ ID NO: 2234376 - RNA, 17 nt, Human
auauauuuguguauuua

SEQ ID NO: 2234377 - RNA, 21 nt, Human
auauauuuguguauuuaacag

SEQ ID NO: 2234378 - RNA, 14 nt, Human
auauauuuuaagac

SEQ ID NO: 2234379 - RNA, 14 nt, Human
auaucuauauauaa

SEQ ID NO: 2234380 - RNA, 16 nt, Human
auaucuauauauaauu

SEQ ID NO: 2234381 - RNA, 21 nt, Human
auaucuauauauaauucugua

SEQ ID NO: 2234382 - RNA, 17 nt, Human
auaucuauauguacuug

SEQ ID NO: 2234383 - RNA, 17 nt, Human
auaucuauauauaauuc

SEQ ID NO: 2234384 - RNA, 20 nt, Human
auaucuauauauaauucugu

SEQ ID NO: 2234385 - RNA, 23 nt, Human
auaucuauauauaauucuguaca

SEQ ID NO: 2234386 - RNA, 17 nt, Human
auaugaaaaauaugaua

SEQ ID NO: 2234387 - RNA, 14 nt, Human
auaugaaaaauaug

SEQ ID NO: 2234388 - RNA, 13 nt, Human
auaugaaaaauau

SEQ ID NO: 2234389 - RNA, 14 nt, Human
auaucuuuugaccu

SEQ ID NO: 2234390 - RNA, 20 nt, Human
auaugaaaaaaaugcauuuu

SEQ ID NO: 2234391 - RNA, 19 nt, Human
auaugaaaaauaugauauu

SEQ ID NO: 2234392 - RNA, 18 nt, Human
auaugaaaaauaugauau

SEQ ID NO: 2234393 - RNA, 16 nt, Human
auaugaaaauacaacu

SEQ ID NO: 2234394 - RNA, 16 nt, Human
auaucuuuauuaauca

SEQ ID NO: 2234395 - RNA, 13 nt, Human
auaucuuuauuaa

SEQ ID NO: 2234396 - RNA, 20 nt, Human
auaucugaaaauguaugugu

SEQ ID NO: 2234397 - RNA, 17 nt, Human
auaucugaaaauguaug

SEQ ID NO: 2234398 - RNA, 16 nt, Human
auaucugaaaauguau

SEQ ID NO: 2234399 - RNA, 12 nt, Human
auaucucaucuc

SEQ ID NO: 2234400 - RNA, 22 nt, Human
auauggguugcauuuggucaag

SEQ ID NO: 2234401 - RNA, 16 nt, Human
auaugcacacauuuuu

SEQ ID NO: 2234402 - RNA, 15 nt, Human
auaugcacacauuuu

SEQ ID NO: 2234403 - RNA, 14 nt, Human
auaugcacacauuu

SEQ ID NO: 2234404 - RNA, 23 nt, Human
auaugaggaugcagagucagcag

SEQ ID NO: 2234405 - RNA, 23 nt, Human
auaugaaaauacaacuuaaauaa

SEQ ID NO: 2234406 - RNA, 20 nt, Human
auaugagcuuuauguaauaa

SEQ ID NO: 2234407 - RNA, 16 nt, Human
auaugauauguaaaca

SEQ ID NO: 2234408 - RNA, 21 nt, Human
auaugaguuucauagcuaaga

SEQ ID NO: 2234409 - RNA, 14 nt, Human
auaugauauguaaa

SEQ ID NO: 2234410 - RNA, 20 nt, Human
auaugaguguggaagccgga

SEQ ID NO: 2234411 - RNA, 23 nt, Human
auaugaguguggaagccggaggg

SEQ ID NO: 2234412 - RNA, 17 nt, Human
auaugaguuucauagcu

SEQ ID NO: 2234413 - RNA, 19 nt, Human
auaugaguuucauagcuaa

SEQ ID NO: 2234414 - RNA, 16 nt, Human
auaugauauugcauau

SEQ ID NO: 2234415 - RNA, 15 nt, Human
auaugauauugcaua

SEQ ID NO: 2234416 - RNA, 16 nt, Human
auauguaaaauaaaau

SEQ ID NO: 2234417 - RNA, 15 nt, Human
auauguaaaauaaaa

SEQ ID NO: 2234418 - RNA, 14 nt, Human
auauguaaaauaaa

SEQ ID NO: 2234419 - RNA, 13 nt, Human
auauguaaaauaa

SEQ ID NO: 2234420 - RNA, 16 nt, Human
auauguaacaagccac

SEQ ID NO: 2234421 - RNA, 12 nt, Human
auauguaaaaua

SEQ ID NO: 2234422 - RNA, 21 nt, Human
auaugauuaguaaagaaauga

SEQ ID NO: 2234423 - RNA, 17 nt, Human
auauguaacaagccacc

SEQ ID NO: 2234424 - RNA, 20 nt, Human
auauguaaaauaaaauuaug

SEQ ID NO: 2234425 - RNA, 11 nt, Human
auaugugaauc

SEQ ID NO: 2234426 - RNA, 19 nt, Human
auaugugaacauuuaucaa

SEQ ID NO: 2234427 - RNA, 19 nt, Human
auauguaccauguacauga

SEQ ID NO: 2234428 - RNA, 14 nt, Human
auauguaccaugua

SEQ ID NO: 2234429 - RNA, 14 nt, Human
auauguacaugaga

SEQ ID NO: 2234430 - RNA, 12 nt, Human
uuccaagagcug

SEQ ID NO: 2234431 - RNA, 13 nt, Human
uuccaagagcuga

SEQ ID NO: 2234432 - RNA, 22 nt, Human
uuccaagagccugagagugagg

SEQ ID NO: 2234433 - RNA, 14 nt, Human
uuccaagagccuga

SEQ ID NO: 2234434 - RNA, 17 nt, Human
uuccaaggguacuaagg

SEQ ID NO: 2234435 - RNA, 15 nt, Human
uuccaaggguacuaa

SEQ ID NO: 2234436 - RNA, 17 nt, Human
uucauuguauaaaaaua

SEQ ID NO: 2234437 - RNA, 13 nt, Human
uucauuguauaaa

SEQ ID NO: 2234438 - RNA, 16 nt, Human
uucauuguaugaugug

SEQ ID NO: 2234439 - RNA, 13 nt, Human
uucauuuacugug

SEQ ID NO: 2234440 - RNA, 17 nt, Human
uucauuuaaaaugauua

SEQ ID NO: 2234441 - RNA, 14 nt, Human
uucauuguaugaug

SEQ ID NO: 2234442 - RNA, 13 nt, Human
uucauuuaaaaug

SEQ ID NO: 2234443 - RNA, 14 nt, Human
uucauuuaaaauga

SEQ ID NO: 2234444 - RNA, 15 nt, Human
uucauuuaaaaugau

SEQ ID NO: 2234445 - RNA, 16 nt, Human
uucauuuaaaaugauu

SEQ ID NO: 2234446 - RNA, 21 nt, Human
uucauuuagcuaaacggauuc

SEQ ID NO: 2234447 - RNA, 13 nt, Human
uuccaagagccug

SEQ ID NO: 2234448 - RNA, 18 nt, Human
uucauuuaggugaggaag

SEQ ID NO: 2234449 - RNA, 16 nt, Human
uucauuuacuguggcu

SEQ ID NO: 2234450 - RNA, 19 nt, Human
uucauuuacuguggcuucu

SEQ ID NO: 2234451 - RNA, 18 nt, Human
auaugugcuugccucagu

SEQ ID NO: 2234452 - RNA, 19 nt, Human
auaugugcuggaauucuaa

SEQ ID NO: 2234453 - RNA, 9 nt, Human
uucauucag

SEQ ID NO: 2234454 - RNA, 16 nt, Human
auauguggaguucauc

SEQ ID NO: 2234455 - RNA, 18 nt, Human
auaugugcuggaauucua

SEQ ID NO: 2234456 - RNA, 21 nt, Human
auaugugaauccucuucuuua

SEQ ID NO: 2234457 - RNA, 15 nt, Human
auauguggaguucau

SEQ ID NO: 2234458 - RNA, 20 nt, Human
uucauuguaauguuacugau

SEQ ID NO: 2234459 - RNA, 18 nt, Human
uucauuguaauguuacug

SEQ ID NO: 2234460 - RNA, 17 nt, Human
uucauuguaauguuacu

SEQ ID NO: 2234461 - RNA, 13 nt, Human
uucauucuccugc

SEQ ID NO: 2234462 - RNA, 15 nt, Human
uucauucuccugccu

SEQ ID NO: 2234463 - RNA, 18 nt, Human
uucauuccuaacacagca

SEQ ID NO: 2234464 - RNA, 22 nt, Human
uucauucaugucauguguacaa

SEQ ID NO: 2234465 - RNA, 16 nt, Human
uucauuccauucugga

SEQ ID NO: 2234466 - RNA, 18 nt, Human
uuccacacucaccucuaa

SEQ ID NO: 2234467 - RNA, 22 nt, Human
uuccacaccuuuuauugacaca

SEQ ID NO: 2234468 - RNA, 15 nt, Human
uuccacaccuuuuau

SEQ ID NO: 2234469 - RNA, 22 nt, Human
uuccacacccccaccccuugcu

SEQ ID NO: 2234470 - RNA, 19 nt, Human
uuccacaccuggcacugcu

SEQ ID NO: 2234471 - RNA, 19 nt, Human
uuccaccaucaagccacca

SEQ ID NO: 2234472 - RNA, 19 nt, Human
uuccacaccuagcaucuca

SEQ ID NO: 2234473 - RNA, 16 nt, Human
uuccacacccccaccc

SEQ ID NO: 2234474 - RNA, 17 nt, Human
uuccacacccccacccc

SEQ ID NO: 2234475 - RNA, 18 nt, Human
uuccacaccaagcagcaa

SEQ ID NO: 2234476 - RNA, 13 nt, Human
uuccacaccccca

SEQ ID NO: 2234477 - RNA, 15 nt, Human
uuccacacccccacc

SEQ ID NO: 2234478 - RNA, 21 nt, Human
uuccacaagauucccagagac

SEQ ID NO: 2234479 - RNA, 20 nt, Human
uuccacaagauucccagaga

SEQ ID NO: 2234480 - RNA, 19 nt, Human
uuccacaagauucccagag

SEQ ID NO: 2234481 - RNA, 13 nt, Human
uuccaaugucugc

SEQ ID NO: 2234482 - RNA, 16 nt, Human
uuccaaggaguuccau

SEQ ID NO: 2234483 - RNA, 13 nt, Human
uuccaaggcuucu

SEQ ID NO: 2234484 - RNA, 20 nt, Human
uuccaagguggucugcucgg

SEQ ID NO: 2234485 - RNA, 12 nt, Human
uuccaagugugc

SEQ ID NO: 2234486 - RNA, 16 nt, Human
uuccaaguugcuaaua

SEQ ID NO: 2234487 - RNA, 14 nt, Human
uuccaagugugcau

SEQ ID NO: 2234488 - RNA, 20 nt, Human
uuccaagugugcauauugua

SEQ ID NO: 2234489 - RNA, 16 nt, Human
uuccaauaugaugacu

SEQ ID NO: 2234490 - RNA, 22 nt, Human
uuccaagugugcauauuguaca

SEQ ID NO: 2234491 - RNA, 13 nt, Human
uuccaauaaacag

SEQ ID NO: 2234492 - RNA, 13 nt, Human
uuccaauaaacca

SEQ ID NO: 2234493 - RNA, 21 nt, Human
uuccaauaaaccagguuuaga

SEQ ID NO: 2234494 - RNA, 22 nt, Human
uuccacaagagcccaggccucc

SEQ ID NO: 2234495 - RNA, 13 nt, Human
uuccacccuggaa

SEQ ID NO: 2234496 - RNA, 11 nt, Human
uuccacccugg

SEQ ID NO: 2234497 - RNA, 20 nt, Human
uuccacccccucccuggccu

SEQ ID NO: 2234498 - RNA, 18 nt, Human
uuccacccccucccuggc

SEQ ID NO: 2234499 - RNA, 15 nt, Human
uuccacccccucccu

SEQ ID NO: 2234500 - RNA, 14 nt, Human
uuccacccccuccc

SEQ ID NO: 2234501 - RNA, 20 nt, Human
uuccagcucaccccccacac

SEQ ID NO: 2234502 - RNA, 23 nt, Human
uuccagcucaccccccacacuca

SEQ ID NO: 2234503 - RNA, 13 nt, Human
uuccaccucaccc

SEQ ID NO: 2234504 - RNA, 15 nt, Human
uuccaccucacccca

SEQ ID NO: 2234505 - RNA, 12 nt, Human
uuccaccucccu

SEQ ID NO: 2234506 - RNA, 13 nt, Human
uuccaccucccuc

SEQ ID NO: 2234507 - RNA, 13 nt, Human
uuccacccccucc

SEQ ID NO: 2234508 - RNA, 12 nt, Human
uuccacccccuc

SEQ ID NO: 2234509 - RNA, 21 nt, Human
uuccacaccuggcacugcugu

SEQ ID NO: 2234510 - RNA, 21 nt, Human
uuccaggaaacuccacaucug

SEQ ID NO: 2234511 - RNA, 13 nt, Human
uuccagcuccuca

SEQ ID NO: 2234512 - RNA, 22 nt, Human
uuccaggaaacuccacaucugc

SEQ ID NO: 2234513 - RNA, 24 nt, Human
uuccaggaaacuccacaucugccu

SEQ ID NO: 2234514 - RNA, 18 nt, Human
uuccagcuggaugagaau

SEQ ID NO: 2234515 - RNA, 11 nt, Human
uuccagcuccu

SEQ ID NO: 2234516 - RNA, 14 nt, Human
uuccagcuccugua

SEQ ID NO: 2234517 - RNA, 21 nt, Human
uuccaggcuaaacauccaaua

SEQ ID NO: 2234518 - RNA, 23 nt, Human
uuccaggaaacuccacaucugcc

SEQ ID NO: 2234519 - RNA, 17 nt, Human
uuccaggggugggacac

SEQ ID NO: 2234520 - RNA, 21 nt, Human
uuccagugcaacacugaagcu

SEQ ID NO: 2234521 - RNA, 19 nt, Human
uuccagugcaacacugaag

SEQ ID NO: 2234522 - RNA, 15 nt, Human
uuccagugcaacacu

SEQ ID NO: 2234523 - RNA, 23 nt, Human
uuccagugguccauggaaugcuu

SEQ ID NO: 2234524 - RNA, 18 nt, Human
uuccaguguccuuagaac

SEQ ID NO: 2234525 - RNA, 15 nt, Human
uuccauaaacaccca

SEQ ID NO: 2234526 - RNA, 11 nt, Human
uuccaguuccc

SEQ ID NO: 2234527 - RNA, 18 nt, Human
uuccauaaagaagauguu

SEQ ID NO: 2234528 - RNA, 22 nt, Human
uuccauaaagaagauguuuaac

SEQ ID NO: 2234529 - RNA, 19 nt, Human
uuccauaaucuggacuccu

SEQ ID NO: 2234530 - RNA, 22 nt, Human
uuccauaaucuggacuccucug

SEQ ID NO: 2234531 - RNA, 23 nt, Human
uuccauaaucuggacuccucugu

SEQ ID NO: 2234532 - RNA, 16 nt, Human
uuccauaauuaugaca

SEQ ID NO: 2234533 - RNA, 14 nt, Human
uuccauaauuauga

SEQ ID NO: 2234534 - RNA, 13 nt, Human
uuccauaauuaug

SEQ ID NO: 2234535 - RNA, 12 nt, Human
uuccauaauuau

SEQ ID NO: 2234536 - RNA, 19 nt, Human
uuccauaauguauaaagaa

SEQ ID NO: 2234537 - RNA, 16 nt, Human
uuccauaauguauaaa

SEQ ID NO: 2234538 - RNA, 19 nt, Human
uuccauaaggaauguagcu

SEQ ID NO: 2234539 - RNA, 17 nt, Human
uuccauaaggaauguag

SEQ ID NO: 2234540 - RNA, 22 nt, Human
uuccauaauuaugacaguuaua

SEQ ID NO: 2234541 - RNA, 18 nt, Human
uuccauaauuaugacagu

SEQ ID NO: 2234542 - RNA, 15 nt, Human
uuccauacagcucua

SEQ ID NO: 2234543 - RNA, 16 nt, Human
uucccaaaggacucca

SEQ ID NO: 2234544 - RNA, 17 nt, Human
uucccaaaggacuccac

SEQ ID NO: 2234545 - RNA, 19 nt, Human
uucccaaaggacuccaccc

SEQ ID NO: 2234546 - RNA, 20 nt, Human
uucccaaaggacuccaccca

SEQ ID NO: 2234547 - RNA, 23 nt, Human
uucccaaagcagugcaugcuguc

SEQ ID NO: 2234548 - RNA, 18 nt, Human
uuccagguaucuccagga

SEQ ID NO: 2234549 - RNA, 19 nt, Human
uuccagguaucuccaggau

SEQ ID NO: 2234550 - RNA, 15 nt, Human
uuccaggugggguga

SEQ ID NO: 2234551 - RNA, 17 nt, Human
uuccagguaucuccagg

SEQ ID NO: 2234552 - RNA, 20 nt, Human
uuccagggucccucugugua

SEQ ID NO: 2234553 - RNA, 17 nt, Human
uuccagugaggcucugc

SEQ ID NO: 2234554 - RNA, 21 nt, Human
uuccaggggugggacacccug

SEQ ID NO: 2234555 - RNA, 16 nt, Human
uuccagggucccucug

SEQ ID NO: 2234556 - RNA, 18 nt, Human
uuccagggucccucugug

SEQ ID NO: 2234557 - RNA, 19 nt, Human
uuccagggucccucugugu

SEQ ID NO: 2234558 - RNA, 19 nt, Human
uuccagugaggcucugccc

SEQ ID NO: 2234559 - RNA, 20 nt, Human
uuccagugaggcucugcccu

SEQ ID NO: 2234560 - RNA, 21 nt, Human
uuccagugaggcucugcccuu

SEQ ID NO: 2234561 - RNA, 22 nt, Human
uuccagugaggcucugcccuug

SEQ ID NO: 2234562 - RNA, 18 nt, Human
uucccaccaggcugcuca

SEQ ID NO: 2234563 - RNA, 15 nt, Human
uucccaccaaggucu

SEQ ID NO: 2234564 - RNA, 12 nt, Human
uucccaccucuc

SEQ ID NO: 2234565 - RNA, 22 nt, Human
uucccaccucucucacuccuug

SEQ ID NO: 2234566 - RNA, 15 nt, Human
uucccacccaucgcu

SEQ ID NO: 2234567 - RNA, 14 nt, Human
uucccaauuaggaa

SEQ ID NO: 2234568 - RNA, 23 nt, Human
uucccaauagcaacguagcuucu

SEQ ID NO: 2234569 - RNA, 14 nt, Human
uucccaauucacau

SEQ ID NO: 2234570 - RNA, 18 nt, Human
uucccacaggacauuucu

SEQ ID NO: 2234571 - RNA, 21 nt, Human
uucccacaccuccacaguuca

SEQ ID NO: 2234572 - RNA, 13 nt, Human
uucccaauugcuu

SEQ ID NO: 2234573 - RNA, 16 nt, Human
uucccacaccuccaca

SEQ ID NO: 2234574 - RNA, 17 nt, Human
uucccacaccuccacag

SEQ ID NO: 2234575 - RNA, 20 nt, Human
uucccaauagcaacguagcu

SEQ ID NO: 2234576 - RNA, 11 nt, Human
uucccaagcuc

SEQ ID NO: 2234577 - RNA, 18 nt, Human
uucccaagcucugcuccu

SEQ ID NO: 2234578 - RNA, 15 nt, Human
uucccaacucuagcu

SEQ ID NO: 2234579 - RNA, 18 nt, Human
uucccaacucuagcuggg

SEQ ID NO: 2234580 - RNA, 17 nt, Human
uucccaacucuagcugg

SEQ ID NO: 2234581 - RNA, 18 nt, Human
uucccaacuccagaaagu

SEQ ID NO: 2234582 - RNA, 12 nt, Human
uucccaaauuuc

SEQ ID NO: 2234583 - RNA, 13 nt, Human
uucccaagcucug

SEQ ID NO: 2234584 - RNA, 14 nt, Human
uucccaagcucugc

SEQ ID NO: 2234585 - RNA, 15 nt, Human
uucccaagcucugcu

SEQ ID NO: 2234586 - RNA, 16 nt, Human
uucccaagcucugcuc

SEQ ID NO: 2234587 - RNA, 18 nt, Human
auaggaaaaguacauuua

SEQ ID NO: 2234588 - RNA, 17 nt, Human
auagcuuuuauuguaua

SEQ ID NO: 2234589 - RNA, 18 nt, Human
auagcuuuuauuguauaa

SEQ ID NO: 2234590 - RNA, 21 nt, Human
auaggaaaguauuuuuuuaag

SEQ ID NO: 2234591 - RNA, 19 nt, Human
auaggaaaaguacauuuaa

SEQ ID NO: 2234592 - RNA, 21 nt, Human
auaggaacauaugaaaauaca

SEQ ID NO: 2234593 - RNA, 18 nt, Human
auaggaacauaugaaaau

SEQ ID NO: 2234594 - RNA, 16 nt, Human
auaggaacauaugaaa

SEQ ID NO: 2234595 - RNA, 15 nt, Human
auaggaacauaugaa

SEQ ID NO: 2234596 - RNA, 22 nt, Human
auaggaauugacccacaagaaa

SEQ ID NO: 2234597 - RNA, 22 nt, Human
auaggacucaaaguuucagaga

SEQ ID NO: 2234598 - RNA, 23 nt, Human
auaggaccuuuccaccacagcca

SEQ ID NO: 2234599 - RNA, 14 nt, Human
auaggaccuuucca

SEQ ID NO: 2234600 - RNA, 20 nt, Human
auaggaccuuuccaccacag

SEQ ID NO: 2234601 - RNA, 14 nt, Human
auaggagaggauga

SEQ ID NO: 2234602 - RNA, 19 nt, Human
auaggagaggaugagagcc

SEQ ID NO: 2234603 - RNA, 20 nt, Human
auaggagaggaugagagccc

SEQ ID NO: 2234604 - RNA, 21 nt, Human
auaggagaggaugagagccca

SEQ ID NO: 2234605 - RNA, 14 nt, Human
auaggccugggugc

SEQ ID NO: 2234606 - RNA, 15 nt, Human
auaggagccugcugg

SEQ ID NO: 2234607 - RNA, 16 nt, Human
auaggagccugcuggu

SEQ ID NO: 2234608 - RNA, 23 nt, Human
auaggagaggaugagagcccaga

SEQ ID NO: 2234609 - RNA, 24 nt, Human
auaggagaggaugagagcccagag

SEQ ID NO: 2234610 - RNA, 12 nt, Human
auaggagccugc

SEQ ID NO: 2234611 - RNA, 13 nt, Human
auaggagccugcu

SEQ ID NO: 2234612 - RNA, 17 nt, Human
auaggcguaacuaauuu

SEQ ID NO: 2234613 - RNA, 22 nt, Human
uucacauuaauauuugcugaca

SEQ ID NO: 2234614 - RNA, 12 nt, Human
uucacauucuua

SEQ ID NO: 2234615 - RNA, 13 nt, Human
uucacauucuuau

SEQ ID NO: 2234616 - RNA, 16 nt, Human
uucacauucuuauaaa

SEQ ID NO: 2234617 - RNA, 20 nt, Human
uucacauucuuauaaauaug

SEQ ID NO: 2234618 - RNA, 22 nt, Human
auagcuuuucccuuuuuuuaag

SEQ ID NO: 2234619 - RNA, 14 nt, Human
auagcuuuuauugu

SEQ ID NO: 2234620 - RNA, 19 nt, Human
uucacauucuuauaaauau

SEQ ID NO: 2234621 - RNA, 15 nt, Human
auagcuuuuauugua

SEQ ID NO: 2234622 - RNA, 12 nt, Human
auaggaaaaacu

SEQ ID NO: 2234623 - RNA, 14 nt, Human
auaggaaaaacuga

SEQ ID NO: 2234624 - RNA, 16 nt, Human
auaggaaaaacugauu

SEQ ID NO: 2234625 - RNA, 17 nt, Human
auaggaaaaacugauuu

SEQ ID NO: 2234626 - RNA, 21 nt, Human
uucacacacaggcaacugagg

SEQ ID NO: 2234627 - RNA, 20 nt, Human
uucacaaugaaaugcucucc

SEQ ID NO: 2234628 - RNA, 13 nt, Human
uucacaauagaaa

SEQ ID NO: 2234629 - RNA, 16 nt, Human
uucaagucaccuccuu

SEQ ID NO: 2234630 - RNA, 15 nt, Human
uucacacuuccacca

SEQ ID NO: 2234631 - RNA, 12 nt, Human
uucacacuucca

SEQ ID NO: 2234632 - RNA, 21 nt, Human
uucacacugcaagagccuugg

SEQ ID NO: 2234633 - RNA, 13 nt, Human
uucacacugucug

SEQ ID NO: 2234634 - RNA, 14 nt, Human
uucacacucucaca

SEQ ID NO: 2234635 - RNA, 22 nt, Human
uucacacucucacauguuuaga

SEQ ID NO: 2234636 - RNA, 14 nt, Human
uucacaccugacuc

SEQ ID NO: 2234637 - RNA, 19 nt, Human
uucacaccugacucugaaa

SEQ ID NO: 2234638 - RNA, 21 nt, Human
uucacaccugacucugaaauc

SEQ ID NO: 2234639 - RNA, 17 nt, Human
uucaagugaaucuaaaa

SEQ ID NO: 2234640 - RNA, 21 nt, Human
uucaaguauuagggguaauau

SEQ ID NO: 2234641 - RNA, 16 nt, Human
uucaaguaauugugaa

SEQ ID NO: 2234642 - RNA, 15 nt, Human
uucaaguaauucugc

SEQ ID NO: 2234643 - RNA, 18 nt, Human
uucaaguaauucugcugu

SEQ ID NO: 2234644 - RNA, 21 nt, Human
uucaaguacuguaacuguguc

SEQ ID NO: 2234645 - RNA, 17 nt, Human
uucaagugauucucaug

SEQ ID NO: 2234646 - RNA, 23 nt, Human
uucacaagacccaaaaggcagaa

SEQ ID NO: 2234647 - RNA, 13 nt, Human
uucacaguuuuuc

SEQ ID NO: 2234648 - RNA, 19 nt, Human
uucacauccuguguuucua

SEQ ID NO: 2234649 - RNA, 21 nt, Human
uucacaguucuuugggccaga

SEQ ID NO: 2234650 - RNA, 23 nt, Human
uucacaguuggcuggaugaaauu

SEQ ID NO: 2234651 - RNA, 13 nt, Human
uucacaguucucu

SEQ ID NO: 2234652 - RNA, 20 nt, Human
uucacaguucuuugggccag

SEQ ID NO: 2234653 - RNA, 12 nt, Human
uucacagcuccu

SEQ ID NO: 2234654 - RNA, 21 nt, Human
uucacauccuguguuucuagg

SEQ ID NO: 2234655 - RNA, 19 nt, Human
uucacaucuaaccucaucu

SEQ ID NO: 2234656 - RNA, 18 nt, Human
uucacaucuaaccucauc

SEQ ID NO: 2234657 - RNA, 18 nt, Human
uucacaugcaucaaguua

SEQ ID NO: 2234658 - RNA, 14 nt, Human
uucacaugaacaua

SEQ ID NO: 2234659 - RNA, 19 nt, Human
uucacaugagcuauuucca

SEQ ID NO: 2234660 - RNA, 20 nt, Human
uucacaucuaaccucaucuu

SEQ ID NO: 2234661 - RNA, 13 nt, Human
uucacaugaacau

SEQ ID NO: 2234662 - RNA, 19 nt, Human
uucacacuuccaccagccu

SEQ ID NO: 2234663 - RNA, 18 nt, Human
uucacacuuccaccagcc

SEQ ID NO: 2234664 - RNA, 20 nt, Human
uucacacuuccaccagccug

SEQ ID NO: 2234665 - RNA, 21 nt, Human
uucacagagugugcuggagga

SEQ ID NO: 2234666 - RNA, 12 nt, Human
uucacagagugu

SEQ ID NO: 2234667 - RNA, 20 nt, Human
uucacagaugggugcuugga

SEQ ID NO: 2234668 - RNA, 15 nt, Human
uucacaguucucucc

SEQ ID NO: 2234669 - RNA, 20 nt, Human
uucacaguucucuccuucuu

SEQ ID NO: 2234670 - RNA, 17 nt, Human
uucaaaaguugaaauua

SEQ ID NO: 2234671 - RNA, 16 nt, Human
uucaaaaguugaaauu

SEQ ID NO: 2234672 - RNA, 21 nt, Human
uucaaaaguauuuuccuguaa

SEQ ID NO: 2234673 - RNA, 21 nt, Human
uucaaaagaaucagaaacagg

SEQ ID NO: 2234674 - RNA, 20 nt, Human
uucaaaaguauuuuccugua

SEQ ID NO: 2234675 - RNA, 17 nt, Human
uucaaaauaaaaaugag

SEQ ID NO: 2234676 - RNA, 14 nt, Human
uucaaaauaaaaac

SEQ ID NO: 2234677 - RNA, 21 nt, Human
uucaaaauuguuacaaauugu

SEQ ID NO: 2234678 - RNA, 15 nt, Human
uucaaacacaaaugc

SEQ ID NO: 2234679 - RNA, 17 nt, Human
uucaaacacaaaugcag

SEQ ID NO: 2234680 - RNA, 16 nt, Human
uucaaaauuguuacaa

SEQ ID NO: 2234681 - RNA, 14 nt, Human
uucaaacacaaaug

SEQ ID NO: 2234682 - RNA, 23 nt, Human
uucaagaauaaucacgcuuuccu

SEQ ID NO: 2234683 - RNA, 14 nt, Human
uucaaacauauaua

SEQ ID NO: 2234684 - RNA, 18 nt, Human
uucaaacagucucaggaa

SEQ ID NO: 2234685 - RNA, 17 nt, Human
uucaagguggccaaauu

SEQ ID NO: 2234686 - RNA, 22 nt, Human
uucaagguggccaaauuauuug

SEQ ID NO: 2234687 - RNA, 18 nt, Human
uucaagguggccaaauua

SEQ ID NO: 2234688 - RNA, 20 nt, Human
uucaagguggccaaauuauu

SEQ ID NO: 2234689 - RNA, 19 nt, Human
uucaagguaauuucuugug

SEQ ID NO: 2234690 - RNA, 21 nt, Human
uucaagcgauucuucugcuuc

SEQ ID NO: 2234691 - RNA, 20 nt, Human
uucaagcgauucuucugccu

SEQ ID NO: 2234692 - RNA, 17 nt, Human
uucaagcagauuggaga

SEQ ID NO: 2234693 - RNA, 17 nt, Human
uucaagcagucgugccu

SEQ ID NO: 2234694 - RNA, 18 nt, Human
uucaagcagucgugccug

SEQ ID NO: 2234695 - RNA, 22 nt, Human
uucaagcagucgugccuguguc

SEQ ID NO: 2234696 - RNA, 15 nt, Human
uucaagcauuaagaa

SEQ ID NO: 2234697 - RNA, 23 nt, Human
uucaagcagucgugccugugucc

SEQ ID NO: 2234698 - RNA, 18 nt, Human
uucaagaccuucucccca

SEQ ID NO: 2234699 - RNA, 18 nt, Human
uucaagacauuaaaucua

SEQ ID NO: 2234700 - RNA, 18 nt, Human
uucaagagauuuaauuaa

SEQ ID NO: 2234701 - RNA, 18 nt, Human
uuauuuuuagacagaguc

SEQ ID NO: 2234702 - RNA, 20 nt, Human
uuauuuuuauaucagccuga

SEQ ID NO: 2234703 - RNA, 18 nt, Human
uuauuuuuacauucugaa

SEQ ID NO: 2234704 - RNA, 17 nt, Human
uuauuuuuagacagagu

SEQ ID NO: 2234705 - RNA, 19 nt, Human
uuaguuuuuguaauuuauu

SEQ ID NO: 2234706 - RNA, 13 nt, Human
uuauuuuuaaaau

SEQ ID NO: 2234707 - RNA, 18 nt, Human
uuaguuuuuguaauuuau

SEQ ID NO: 2234708 - RNA, 17 nt, Human
uuaguuuuuguaauuua

SEQ ID NO: 2234709 - RNA, 17 nt, Human
uuaguuuuaguugcaga

SEQ ID NO: 2234710 - RNA, 15 nt, Human
uuaguuuuaguugca

SEQ ID NO: 2234711 - RNA, 16 nt, Human
uuaguuuguguguugu

SEQ ID NO: 2234712 - RNA, 16 nt, Human
uuaguuuugaugaguu

SEQ ID NO: 2234713 - RNA, 12 nt, Human
uuaguuuugauu

SEQ ID NO: 2234714 - RNA, 20 nt, Human
uuaguuuuuaaaauaucuuu

SEQ ID NO: 2234715 - RNA, 14 nt, Human
uuauuuuuuucuac

SEQ ID NO: 2234716 - RNA, 17 nt, Human
uucaaaaccuuuugaaa

SEQ ID NO: 2234717 - RNA, 17 nt, Human
uuauuuuuuucugaauu

SEQ ID NO: 2234718 - RNA, 13 nt, Human
uuauuuuuuucug

SEQ ID NO: 2234719 - RNA, 14 nt, Human
uuauuuuuucagac

SEQ ID NO: 2234720 - RNA, 15 nt, Human
uuauuuuuucagacc

SEQ ID NO: 2234721 - RNA, 16 nt, Human
uuauuuuuucagaccg

SEQ ID NO: 2234722 - RNA, 19 nt, Human
uuauuuuuucagaccgaaa

SEQ ID NO: 2234723 - RNA, 13 nt, Human
uuauuuuuuccca

SEQ ID NO: 2234724 - RNA, 20 nt, Human
uuauuuuuucagaccgaaaa

SEQ ID NO: 2234725 - RNA, 20 nt, Human
uuauuuuuuuaagcuguaaa

SEQ ID NO: 2234726 - RNA, 13 nt, Human
uuauuuuuuauug

SEQ ID NO: 2234727 - RNA, 12 nt, Human
uuauuuuuucag

SEQ ID NO: 2234728 - RNA, 13 nt, Human
uuauuuuuucaga

SEQ ID NO: 2234729 - RNA, 14 nt, Human
uuauuuuuuacauu

SEQ ID NO: 2234730 - RNA, 18 nt, Human
uuauuuuuuacauuauua

SEQ ID NO: 2234731 - RNA, 18 nt, Human
uuauuuuuuaaguauuua

SEQ ID NO: 2234732 - RNA, 23 nt, Human
uuauuuuuguuucuuccaaagca

SEQ ID NO: 2234733 - RNA, 14 nt, Human
uuauuuuuuaauua

SEQ ID NO: 2234734 - RNA, 16 nt, Human
uuauuuuuuaauuauu

SEQ ID NO: 2234735 - RNA, 14 nt, Human
uuauuuuucauauu

SEQ ID NO: 2234736 - RNA, 16 nt, Human
uuauuuuucauauugu

SEQ ID NO: 2234737 - RNA, 19 nt, Human
uuauuuuucauauugugcc

SEQ ID NO: 2234738 - RNA, 10 nt, Human
uuauuuuucu

SEQ ID NO: 2234739 - RNA, 23 nt, Human
uuauuuuugacaguguugaaaau

SEQ ID NO: 2234740 - RNA, 14 nt, Human
uuauuuuucuaaaa

SEQ ID NO: 2234741 - RNA, 22 nt, Human
uuauuuuucuaagguucucaua

SEQ ID NO: 2234742 - RNA, 16 nt, Human
auaguggggagacuuc

SEQ ID NO: 2234743 - RNA, 20 nt, Human
auagugggcaccccacugca

SEQ ID NO: 2234744 - RNA, 22 nt, Human
auaguggacauuguuggcagca

SEQ ID NO: 2234745 - RNA, 17 nt, Human
auagugcuuaaaaauca

SEQ ID NO: 2234746 - RNA, 15 nt, Human
auaguggugugauuu

SEQ ID NO: 2234747 - RNA, 17 nt, Human
auaguggcuuaaaacaa

SEQ ID NO: 2234748 - RNA, 20 nt, Human
auagugcucgcuuucuaugu

SEQ ID NO: 2234749 - RNA, 23 nt, Human
auagugcucgcuuucuauguagu

SEQ ID NO: 2234750 - RNA, 23 nt, Human
auaguguguucugauuagaaaug

SEQ ID NO: 2234751 - RNA, 12 nt, Human
auaguguuaauc

SEQ ID NO: 2234752 - RNA, 15 nt, Human
auaguguuaaucaau

SEQ ID NO: 2234753 - RNA, 21 nt, Human
auaguguguucugauuagaaa

SEQ ID NO: 2234754 - RNA, 19 nt, Human
auaguguguucugauuaga

SEQ ID NO: 2234755 - RNA, 17 nt, Human
auaguguguucugauua

SEQ ID NO: 2234756 - RNA, 15 nt, Human
auaguguguucugau

SEQ ID NO: 2234757 - RNA, 22 nt, Human
auaguguucugcaaaaauauuu

SEQ ID NO: 2234758 - RNA, 16 nt, Human
auaguguuaaucaauu

SEQ ID NO: 2234759 - RNA, 18 nt, Human
auaguguuaaucaauuua

SEQ ID NO: 2234760 - RNA, 20 nt, Human
auaguguuaaucaauuuaaa

SEQ ID NO: 2234761 - RNA, 21 nt, Human
auaguguuaaucaauuuaaac

SEQ ID NO: 2234762 - RNA, 13 nt, Human
auaguguaaaaua

SEQ ID NO: 2234763 - RNA, 22 nt, Human
auagugggcccuccgacagccc

SEQ ID NO: 2234764 - RNA, 14 nt, Human
auaguguaaaauaa

SEQ ID NO: 2234765 - RNA, 14 nt, Human
auaguguguucuga

SEQ ID NO: 2234766 - RNA, 13 nt, Human
auaguguguucug

SEQ ID NO: 2234767 - RNA, 12 nt, Human
auaguguguucu

SEQ ID NO: 2234768 - RNA, 23 nt, Human
auaguguggaaauuaagaagaaa

SEQ ID NO: 2234769 - RNA, 22 nt, Human
auaggcucugcacagauggauu

SEQ ID NO: 2234770 - RNA, 19 nt, Human
auaggcucugcacagaugg

SEQ ID NO: 2234771 - RNA, 15 nt, Human
auaggcucugcacag

SEQ ID NO: 2234772 - RNA, 14 nt, Human
auaggcucugcaca

SEQ ID NO: 2234773 - RNA, 13 nt, Human
auaggcucugcac

SEQ ID NO: 2234774 - RNA, 12 nt, Human
auaggcucugca

SEQ ID NO: 2234775 - RNA, 11 nt, Human
auaggcucugc

SEQ ID NO: 2234776 - RNA, 21 nt, Human
auaggcgaucacaacgugcau

SEQ ID NO: 2234777 - RNA, 20 nt, Human
auagucuagauggcuccucu

SEQ ID NO: 2234778 - RNA, 13 nt, Human
auagucuuucagu

SEQ ID NO: 2234779 - RNA, 13 nt, Human
auagucuguguga

SEQ ID NO: 2234780 - RNA, 14 nt, Human
auagucuuuugcuu

SEQ ID NO: 2234781 - RNA, 16 nt, Human
auagucuuuugcuuuu

SEQ ID NO: 2234782 - RNA, 17 nt, Human
auagucuuuugcuuuug

SEQ ID NO: 2234783 - RNA, 18 nt, Human
auagugacuaugaacuuc

SEQ ID NO: 2234784 - RNA, 20 nt, Human
auagugauguaaucuugaau

SEQ ID NO: 2234785 - RNA, 21 nt, Human
auagugaggcaucgcaaugua

SEQ ID NO: 2234786 - RNA, 14 nt, Human
auauaaaaaacuuu

SEQ ID NO: 2234787 - RNA, 19 nt, Human
auaguuuuuaagguuauuu

SEQ ID NO: 2234788 - RNA, 20 nt, Human
auaguuuuuaagguuauuua

SEQ ID NO: 2234789 - RNA, 23 nt, Human
auauaaaaaccccaaacuguuga

SEQ ID NO: 2234790 - RNA, 17 nt, Human
auauaaaaagaaaagau

SEQ ID NO: 2234791 - RNA, 18 nt, Human
auauaaaaagaaaagaua

SEQ ID NO: 2234792 - RNA, 20 nt, Human
auauaaaaagaaaagauaaa

SEQ ID NO: 2234793 - RNA, 23 nt, Human
auauaaaaagaaaagauaaagau

SEQ ID NO: 2234794 - RNA, 22 nt, Human
auauaaaaagaaaagauaaaga

SEQ ID NO: 2234795 - RNA, 13 nt, Human
auauaaaacugcg

SEQ ID NO: 2234796 - RNA, 22 nt, Human
auauaaaacugcguuaaaggcu

SEQ ID NO: 2234797 - RNA, 17 nt, Human
auauaaaacuguacuuc

SEQ ID NO: 2234798 - RNA, 22 nt, Human
auaguuuacuauuuuacuucua

SEQ ID NO: 2234799 - RNA, 16 nt, Human
auaguuuacuauuuua

SEQ ID NO: 2234800 - RNA, 15 nt, Human
auaguuuacuauuuu

SEQ ID NO: 2234801 - RNA, 17 nt, Human
auaguuuaccugaauaa

SEQ ID NO: 2234802 - RNA, 13 nt, Human
auaguuuauugac

SEQ ID NO: 2234803 - RNA, 14 nt, Human
auaguuuauugaca

SEQ ID NO: 2234804 - RNA, 18 nt, Human
auaguuuuuaagguuauu

SEQ ID NO: 2234805 - RNA, 19 nt, Human
auaguugcuccgccucugc

SEQ ID NO: 2234806 - RNA, 13 nt, Human
auaguugagcccc

SEQ ID NO: 2234807 - RNA, 20 nt, Human
auaguugagccagcagacau

SEQ ID NO: 2234808 - RNA, 21 nt, Human
auaguugagccagcagacauu

SEQ ID NO: 2234809 - RNA, 22 nt, Human
auaguugagccagcagacauug

SEQ ID NO: 2234810 - RNA, 23 nt, Human
auaguugagccagcagacauugu

SEQ ID NO: 2234811 - RNA, 22 nt, Human
auaguuggcuaggaccccucca

SEQ ID NO: 2234812 - RNA, 20 nt, Human
auaguuguaccgcaauguga

SEQ ID NO: 2234813 - RNA, 13 nt, Human
auaguuguaacua

SEQ ID NO: 2234814 - RNA, 17 nt, Human
auaguuguggacauuua

SEQ ID NO: 2234815 - RNA, 18 nt, Human
auaguugugggugggaga

SEQ ID NO: 2234816 - RNA, 14 nt, Human
auaguuuacaugua

SEQ ID NO: 2234817 - RNA, 17 nt, Human
auaguugagccagcaga

SEQ ID NO: 2234818 - RNA, 18 nt, Human
auaguugagccagcagac

SEQ ID NO: 2234819 - RNA, 22 nt, Human
auaguucccuagucuauucauu

SEQ ID NO: 2234820 - RNA, 17 nt, Human
auaguucccauguuaaa

SEQ ID NO: 2234821 - RNA, 15 nt, Human
auaguucaaagccaa

SEQ ID NO: 2234822 - RNA, 16 nt, Human
auaguuacuguuguga

SEQ ID NO: 2234823 - RNA, 23 nt, Human
auaguuaggauagcauuuuugau

SEQ ID NO: 2234824 - RNA, 22 nt, Human
auaguuaagcgugcauaaguua

SEQ ID NO: 2234825 - RNA, 20 nt, Human
auaguuacuccagugccaac

SEQ ID NO: 2234826 - RNA, 12 nt, Human
auaguuacuguu

SEQ ID NO: 2234827 - RNA, 15 nt, Human
auaguuagaaccugg

SEQ ID NO: 2234828 - RNA, 22 nt, Human
uucacuguccuccaagccagcg

SEQ ID NO: 2234829 - RNA, 22 nt, Human
uucacugucaggaagaaaucac

SEQ ID NO: 2234830 - RNA, 13 nt, Human
auauaugaggacu

SEQ ID NO: 2234831 - RNA, 21 nt, Human
uucacugucaggaagaaauca

SEQ ID NO: 2234832 - RNA, 22 nt, Human
uucacuguauaaauaggagagg

SEQ ID NO: 2234833 - RNA, 23 nt, Human
uucacuguauaaauaggagagga

SEQ ID NO: 2234834 - RNA, 15 nt, Human
uucacuuauauguuc

SEQ ID NO: 2234835 - RNA, 15 nt, Human
uucacuuacagcacc

SEQ ID NO: 2234836 - RNA, 21 nt, Human
uucacuguugaaaauuauuuu

SEQ ID NO: 2234837 - RNA, 14 nt, Human
auauaucuaucuua

SEQ ID NO: 2234838 - RNA, 17 nt, Human
auauaucuaaauuuaga

SEQ ID NO: 2234839 - RNA, 18 nt, Human
auauaucuaaauugaaua

SEQ ID NO: 2234840 - RNA, 19 nt, Human
auauaucuaaauugaauaa

SEQ ID NO: 2234841 - RNA, 12 nt, Human
auauauccucug

SEQ ID NO: 2234842 - RNA, 16 nt, Human
auauaucccagaaauu

SEQ ID NO: 2234843 - RNA, 15 nt, Human
auauaucuaucuuau

SEQ ID NO: 2234844 - RNA, 19 nt, Human
auauaucugcuguccagac

SEQ ID NO: 2234845 - RNA, 20 nt, Human
auauaucugcuguccagaca

SEQ ID NO: 2234846 - RNA, 15 nt, Human
auauaucugcuucag

SEQ ID NO: 2234847 - RNA, 17 nt, Human
auauaucugcuucagug

SEQ ID NO: 2234848 - RNA, 18 nt, Human
auauaucugcuucagugg

SEQ ID NO: 2234849 - RNA, 13 nt, Human
auauauauuuuaa

SEQ ID NO: 2234850 - RNA, 10 nt, Human
auauauauuu

SEQ ID NO: 2234851 - RNA, 15 nt, Human
auauaucaugaguga

SEQ ID NO: 2234852 - RNA, 13 nt, Human
auauaucauauug

SEQ ID NO: 2234853 - RNA, 20 nt, Human
auauaucauauugguauuca

SEQ ID NO: 2234854 - RNA, 20 nt, Human
auauauauguguguguaugu

SEQ ID NO: 2234855 - RNA, 21 nt, Human
auauauaucugcuguccagac

SEQ ID NO: 2234856 - RNA, 16 nt, Human
auauauaugccaugau

SEQ ID NO: 2234857 - RNA, 12 nt, Human
auauauauaaau

SEQ ID NO: 2234858 - RNA, 22 nt, Human
auauauaagauggaagcuucca

SEQ ID NO: 2234859 - RNA, 15 nt, Human
auauauaauucugua

SEQ ID NO: 2234860 - RNA, 14 nt, Human
auauauauauauaa

SEQ ID NO: 2234861 - RNA, 19 nt, Human
auauauaauucuguacaua

SEQ ID NO: 2234862 - RNA, 14 nt, Human
auauauauaaauaa

SEQ ID NO: 2234863 - RNA, 13 nt, Human
auauauauauaaa

SEQ ID NO: 2234864 - RNA, 14 nt, Human
auauauauccucug

SEQ ID NO: 2234865 - RNA, 15 nt, Human
auauauauauauauu

SEQ ID NO: 2234866 - RNA, 16 nt, Human
auauauauauauauaa

SEQ ID NO: 2234867 - RNA, 18 nt, Human
auauaaauaaaacauuuu

SEQ ID NO: 2234868 - RNA, 14 nt, Human
auauaaauaaauau

SEQ ID NO: 2234869 - RNA, 15 nt, Human
auauaaauaaaacau

SEQ ID NO: 2234870 - RNA, 22 nt, Human
auauaaauaaauauauauaucc

SEQ ID NO: 2234871 - RNA, 15 nt, Human
auauaaauaaauaua

SEQ ID NO: 2234872 - RNA, 16 nt, Human
auauaaauaaauauau

SEQ ID NO: 2234873 - RNA, 17 nt, Human
auauaaauaaauauaua

SEQ ID NO: 2234874 - RNA, 19 nt, Human
auauaaauaaauauauaua

SEQ ID NO: 2234875 - RNA, 16 nt, Human
auauaaaagacugacc

SEQ ID NO: 2234876 - RNA, 14 nt, Human
auauaaagauguua

SEQ ID NO: 2234877 - RNA, 13 nt, Human
auauaaaggaaaa

SEQ ID NO: 2234878 - RNA, 22 nt, Human
auauaaaacuguacuucacugu

SEQ ID NO: 2234879 - RNA, 20 nt, Human
auauaaaaggcaaaugugua

SEQ ID NO: 2234880 - RNA, 19 nt, Human
auauaaaguaguccuguga

SEQ ID NO: 2234881 - RNA, 13 nt, Human
auauaacugccuu

SEQ ID NO: 2234882 - RNA, 18 nt, Human
auauaacuauugcccagg

SEQ ID NO: 2234883 - RNA, 20 nt, Human
auauaacugccuuaaaacuu

SEQ ID NO: 2234884 - RNA, 14 nt, Human
auauaaauauauau

SEQ ID NO: 2234885 - RNA, 21 nt, Human
auauaacuuauauuguaagaa

SEQ ID NO: 2234886 - RNA, 20 nt, Human
auauaacuuauauuguaaga

SEQ ID NO: 2234887 - RNA, 16 nt, Human
auauaacuuauauugu

SEQ ID NO: 2234888 - RNA, 21 nt, Human
auauaacuuaaaaauguaaau

SEQ ID NO: 2234889 - RNA, 23 nt, Human
auauaaccacaaagcacaguuug

SEQ ID NO: 2234890 - RNA, 11 nt, Human
auauaaauaua

SEQ ID NO: 2234891 - RNA, 12 nt, Human
auauaaauauau

SEQ ID NO: 2234892 - RNA, 13 nt, Human
auauaaauauaua

SEQ ID NO: 2234893 - RNA, 15 nt, Human
auauaaauauauaua

SEQ ID NO: 2234894 - RNA, 22 nt, Human
auauaacuuauauuguaagaaa

SEQ ID NO: 2234895 - RNA, 21 nt, Human
auauauaaaaagaaaagauaa

SEQ ID NO: 2234896 - RNA, 13 nt, Human
auauauaaaauaa

SEQ ID NO: 2234897 - RNA, 14 nt, Human
auauauaaaauaaa

SEQ ID NO: 2234898 - RNA, 16 nt, Human
auauauaaaauaaaua

SEQ ID NO: 2234899 - RNA, 10 nt, Human
auauauaaau

SEQ ID NO: 2234900 - RNA, 18 nt, Human
auauauaaaauaaauaua

SEQ ID NO: 2234901 - RNA, 20 nt, Human
auauauaaaauaaauauaua

SEQ ID NO: 2234902 - RNA, 21 nt, Human
auauauaaaccuaaaaaagau

SEQ ID NO: 2234903 - RNA, 14 nt, Human
auauauaacaaugc

SEQ ID NO: 2234904 - RNA, 11 nt, Human
auauauaaaua

SEQ ID NO: 2234905 - RNA, 12 nt, Human
auauauaaauaa

SEQ ID NO: 2234906 - RNA, 13 nt, Human
auauauaaauaaa

SEQ ID NO: 2234907 - RNA, 13 nt, Human
auauauaaauaua

SEQ ID NO: 2234908 - RNA, 16 nt, Human
auauauaaauaaauau

SEQ ID NO: 2234909 - RNA, 17 nt, Human
auauauaaauaaauaua

SEQ ID NO: 2234910 - RNA, 12 nt, Human
auauauaaccag

SEQ ID NO: 2234911 - RNA, 14 nt, Human
auauauaaauauau

SEQ ID NO: 2234912 - RNA, 18 nt, Human
auauauaaauauauauaa

SEQ ID NO: 2234913 - RNA, 13 nt, Human
auauauaaccagu

SEQ ID NO: 2234914 - RNA, 15 nt, Human
auauauaaguguaca

SEQ ID NO: 2234915 - RNA, 16 nt, Human
auauauaaguguacau

SEQ ID NO: 2234916 - RNA, 20 nt, Human
auauauaaguguacauaugu

SEQ ID NO: 2234917 - RNA, 22 nt, Human
auuuguaaaaacagcauugcuu

SEQ ID NO: 2234918 - RNA, 23 nt, Human
auuuguaaaaacagcauugcuuu

SEQ ID NO: 2234919 - RNA, 23 nt, Human
auuuguaaaagaacaguaaacau

SEQ ID NO: 2234920 - RNA, 23 nt, Human
auuuguacugaaaaaugguaauu

SEQ ID NO: 2234921 - RNA, 18 nt, Human
auuuguaguguuggagaa

SEQ ID NO: 2234922 - RNA, 20 nt, Human
auuuggugguuucagaaaug

SEQ ID NO: 2234923 - RNA, 18 nt, Human
auuuggugguuucagaaa

SEQ ID NO: 2234924 - RNA, 18 nt, Human
auuuggaauuuauauaca

SEQ ID NO: 2234925 - RNA, 20 nt, Human
auuuggagacacaacuauuu

SEQ ID NO: 2234926 - RNA, 13 nt, Human
auuuggaauacuu

SEQ ID NO: 2234927 - RNA, 15 nt, Human
auuuggaauacuuuu

SEQ ID NO: 2234928 - RNA, 14 nt, Human
auuuggaauacuuu

SEQ ID NO: 2234929 - RNA, 21 nt, Human
auuugggguagcuagaggaac

SEQ ID NO: 2234930 - RNA, 16 nt, Human
auuuggggcuuauuuu

SEQ ID NO: 2234931 - RNA, 21 nt, Human
auuuggggcuugcaugccaaa

SEQ ID NO: 2234932 - RNA, 23 nt, Human
auuugggguagcuagaggaacca

SEQ ID NO: 2234933 - RNA, 12 nt, Human
auuuggggugga

SEQ ID NO: 2234934 - RNA, 21 nt, Human
auuuggagacacaacuauuuu

SEQ ID NO: 2234935 - RNA, 23 nt, Human
auuugguaaggggaauugaggac

SEQ ID NO: 2234936 - RNA, 21 nt, Human
auuugguaaauuaguauuuau

SEQ ID NO: 2234937 - RNA, 17 nt, Human
auuuggguucugccugc

SEQ ID NO: 2234938 - RNA, 23 nt, Human
auuuggucaagauuuugaaugcu

SEQ ID NO: 2234939 - RNA, 17 nt, Human
auuuggugguuucagaa

SEQ ID NO: 2234940 - RNA, 18 nt, Human
auuugaauggguccauuu

SEQ ID NO: 2234941 - RNA, 17 nt, Human
auuugaauggguccauu

SEQ ID NO: 2234942 - RNA, 18 nt, Human
auuugaaugcauuuuguu

SEQ ID NO: 2234943 - RNA, 15 nt, Human
auuugaaugcauuuu

SEQ ID NO: 2234944 - RNA, 16 nt, Human
auuugaaugcauuuug

SEQ ID NO: 2234945 - RNA, 18 nt, Human
auuugaauguaugcuuca

SEQ ID NO: 2234946 - RNA, 17 nt, Human
auuugaauguaugcuuc

SEQ ID NO: 2234947 - RNA, 22 nt, Human
auuugaauguaugcuucauaca

SEQ ID NO: 2234948 - RNA, 21 nt, Human
auuugaauguaugcuucauac

SEQ ID NO: 2234949 - RNA, 20 nt, Human
auuugaauguaugcuucaua

SEQ ID NO: 2234950 - RNA, 19 nt, Human
auuugaaugaaaaauuuaa

SEQ ID NO: 2234951 - RNA, 12 nt, Human
auuugaaugcau

SEQ ID NO: 2234952 - RNA, 14 nt, Human
auuugaaugcauuu

SEQ ID NO: 2234953 - RNA, 20 nt, Human
auuucuuuugccguuauuaa

SEQ ID NO: 2234954 - RNA, 19 nt, Human
auuucuuugugcuuuggcu

SEQ ID NO: 2234955 - RNA, 21 nt, Human
auuucuuuguuaucaaacuuc

SEQ ID NO: 2234956 - RNA, 23 nt, Human
auuucuuugccuguucaguuaca

SEQ ID NO: 2234957 - RNA, 22 nt, Human
auuucuuuguuaucaaacuuca

SEQ ID NO: 2234958 - RNA, 23 nt, Human
auuucuuuguuaucaaacuucag

SEQ ID NO: 2234959 - RNA, 17 nt, Human
auuucuuugccuguuca

SEQ ID NO: 2234960 - RNA, 19 nt, Human
auuucuuugccuguucagu

SEQ ID NO: 2234961 - RNA, 20 nt, Human
auuucuuugccuguucaguu

SEQ ID NO: 2234962 - RNA, 21 nt, Human
auuucuuugccuguucaguua

SEQ ID NO: 2234963 - RNA, 22 nt, Human
auuugaggucaaguaagaagac

SEQ ID NO: 2234964 - RNA, 13 nt, Human
auuugaggucaag

SEQ ID NO: 2234965 - RNA, 17 nt, Human
auuugaggggaaaacac

SEQ ID NO: 2234966 - RNA, 22 nt, Human
auuugaggggaaaacaccauaa

SEQ ID NO: 2234967 - RNA, 15 nt, Human
auuugaggucuguuc

SEQ ID NO: 2234968 - RNA, 23 nt, Human
auuugaggucuguucuuuccaaa

SEQ ID NO: 2234969 - RNA, 17 nt, Human
auuugagcagggcucag

SEQ ID NO: 2234970 - RNA, 22 nt, Human
auuugaggacaaccauuccaga

SEQ ID NO: 2234971 - RNA, 19 nt, Human
auuugaggagcagcuucag

SEQ ID NO: 2234972 - RNA, 22 nt, Human
auuugaggagcagcuucaguug

SEQ ID NO: 2234973 - RNA, 23 nt, Human
auuugaggagcagcuucaguugu

SEQ ID NO: 2234974 - RNA, 12 nt, Human
auuugaguguuu

SEQ ID NO: 2234975 - RNA, 16 nt, Human
auuugagugcucugau

SEQ ID NO: 2234976 - RNA, 14 nt, Human
auuugagugcucug

SEQ ID NO: 2234977 - RNA, 19 nt, Human
auuugaguguuuuaagaua

SEQ ID NO: 2234978 - RNA, 22 nt, Human
auuugaggucuguucuuuccaa

SEQ ID NO: 2234979 - RNA, 18 nt, Human
auuugagugauuauuugu

SEQ ID NO: 2234980 - RNA, 18 nt, Human
auuugagguuaagacaaa

SEQ ID NO: 2234981 - RNA, 23 nt, Human
auuuagcuaaacggauuccaaag

SEQ ID NO: 2234982 - RNA, 16 nt, Human
auuuagggaacugcuu

SEQ ID NO: 2234983 - RNA, 22 nt, Human
auuuaggcagauugaaaaggac

SEQ ID NO: 2234984 - RNA, 21 nt, Human
auuuagggaaagguaguguau

SEQ ID NO: 2234985 - RNA, 17 nt, Human
auuuaggagaagccagg

SEQ ID NO: 2234986 - RNA, 14 nt, Human
auuuaggagaagcc

SEQ ID NO: 2234987 - RNA, 15 nt, Human
auuuagggcaaggag

SEQ ID NO: 2234988 - RNA, 14 nt, Human
auuuagguuucuga

SEQ ID NO: 2234989 - RNA, 21 nt, Human
auuuagguuucugaguuccug

SEQ ID NO: 2234990 - RNA, 17 nt, Human
auuuagguuucugaguu

SEQ ID NO: 2234991 - RNA, 18 nt, Human
auuuagggaacugcuuga

SEQ ID NO: 2234992 - RNA, 20 nt, Human
auuuagggagaaauguuguu

SEQ ID NO: 2234993 - RNA, 22 nt, Human
auuuagggagaaauguuguuca

SEQ ID NO: 2234994 - RNA, 17 nt, Human
auuuacgcuuugauuca

SEQ ID NO: 2234995 - RNA, 15 nt, Human
auuuacgcuuugauu

SEQ ID NO: 2234996 - RNA, 19 nt, Human
auuuacgcuuugauucaua

SEQ ID NO: 2234997 - RNA, 16 nt, Human
auuuacguuuuuguaa

SEQ ID NO: 2234998 - RNA, 18 nt, Human
auuuagcguagcuaagug

SEQ ID NO: 2234999 - RNA, 22 nt, Human
auuuagcuaaacggauuccaaa

SEQ ID NO: 2235000 - RNA, 21 nt, Human
auuuagcuaaacggauuccaa

SEQ ID NO: 2235001 - RNA, 18 nt, Human
auuuagccaccaucuuug

SEQ ID NO: 2235002 - RNA, 17 nt, Human
auuuagccaaugcuuac

SEQ ID NO: 2235003 - RNA, 13 nt, Human
auuuauuauggca

SEQ ID NO: 2235004 - RNA, 22 nt, Human
auuuauuaaaugcccagccccu

SEQ ID NO: 2235005 - RNA, 16 nt, Human
auuuauuaguuaauau

SEQ ID NO: 2235006 - RNA, 20 nt, Human
auuuauuaaaugcccagccc

SEQ ID NO: 2235007 - RNA, 22 nt, Human
auuuauuacuguaagaaaauau

SEQ ID NO: 2235008 - RNA, 17 nt, Human
auuuagguuuuuauuag

SEQ ID NO: 2235009 - RNA, 23 nt, Human
auuuagguuucugaguuccugca

SEQ ID NO: 2235010 - RNA, 19 nt, Human
auuuagguuuuuauuagua

SEQ ID NO: 2235011 - RNA, 18 nt, Human
auuuagguuuuuauuagu

SEQ ID NO: 2235012 - RNA, 23 nt, Human
auuuagguuuuuguuuguuuccu

SEQ ID NO: 2235013 - RNA, 22 nt, Human
auuuauguuugcacuugugauu

SEQ ID NO: 2235014 - RNA, 19 nt, Human
auuuauuaaaaugauugua

SEQ ID NO: 2235015 - RNA, 21 nt, Human
auuuauuaaaaugauuguaaa

SEQ ID NO: 2235016 - RNA, 23 nt, Human
auuuauuaaaaugauuguaaaau

SEQ ID NO: 2235017 - RNA, 22 nt, Human
auuuauuaaacagauuuuuaca

SEQ ID NO: 2235018 - RNA, 23 nt, Human
auuuauuaaacagauuuuuacaa

SEQ ID NO: 2235019 - RNA, 18 nt, Human
auuuccuuaaacugugug

SEQ ID NO: 2235020 - RNA, 14 nt, Human
auuuccuugaaugu

SEQ ID NO: 2235021 - RNA, 21 nt, Human
auuucuaaaucuccaaaauaa

SEQ ID NO: 2235022 - RNA, 13 nt, Human
auuucuaaaucuc

SEQ ID NO: 2235023 - RNA, 12 nt, Human
auuucuaaaucu

SEQ ID NO: 2235024 - RNA, 14 nt, Human
auuuccugugucuu

SEQ ID NO: 2235025 - RNA, 12 nt, Human
auuuauuauuga

SEQ ID NO: 2235026 - RNA, 17 nt, Human
auuuccuggugugaagg

SEQ ID NO: 2235027 - RNA, 21 nt, Human
auuuccuggugugaagguccu

SEQ ID NO: 2235028 - RNA, 16 nt, Human
auuuccuguuggauuu

SEQ ID NO: 2235029 - RNA, 21 nt, Human
auuuccuguuggauuuguuua

SEQ ID NO: 2235030 - RNA, 22 nt, Human
auuuccuguuggauuuguuuaa

SEQ ID NO: 2235031 - RNA, 23 nt, Human
auuuccuguuggauuuguuuaaa

SEQ ID NO: 2235032 - RNA, 16 nt, Human
auuuauuauggcacau

SEQ ID NO: 2235033 - RNA, 14 nt, Human
auuuuauuugacaa

SEQ ID NO: 2235034 - RNA, 22 nt, Human
auuuuauuguaacagacauugu

SEQ ID NO: 2235035 - RNA, 19 nt, Human
auuuuauuuagacaagaga

SEQ ID NO: 2235036 - RNA, 23 nt, Human
auuuuauuuccuggacauccucu

SEQ ID NO: 2235037 - RNA, 17 nt, Human
auuuuauuuagacaaga

SEQ ID NO: 2235038 - RNA, 20 nt, Human
auuuuauuguaacagacauu

SEQ ID NO: 2235039 - RNA, 21 nt, Human
auuuuauuguaacagacauug

SEQ ID NO: 2235040 - RNA, 22 nt, Human
auuuuauuuagacaagagaugg

SEQ ID NO: 2235041 - RNA, 14 nt, Human
auuuuauugcuuga

SEQ ID NO: 2235042 - RNA, 14 nt, Human
auuuuauuguaaca

SEQ ID NO: 2235043 - RNA, 15 nt, Human
auuuuauuguaacag

SEQ ID NO: 2235044 - RNA, 16 nt, Human
auuuuauuguaacaga

SEQ ID NO: 2235045 - RNA, 18 nt, Human
auuuuauuguaacagaca

SEQ ID NO: 2235046 - RNA, 15 nt, Human
auuuuauuaugcaug

SEQ ID NO: 2235047 - RNA, 14 nt, Human
auuuuauuaugcau

SEQ ID NO: 2235048 - RNA, 17 nt, Human
auuuuauuaugcaugaa

SEQ ID NO: 2235049 - RNA, 20 nt, Human
auuuuauuacaucuuucaca

SEQ ID NO: 2235050 - RNA, 18 nt, Human
auuuuacuacuguggaaa

SEQ ID NO: 2235051 - RNA, 14 nt, Human
auuuuauguugcau

SEQ ID NO: 2235052 - RNA, 21 nt, Human
auuuuauguugcauagaauaa

SEQ ID NO: 2235053 - RNA, 21 nt, Human
auuuuacuuuaaaaggagcca

SEQ ID NO: 2235054 - RNA, 18 nt, Human
auuuuauguugcauagaa

SEQ ID NO: 2235055 - RNA, 13 nt, Human
auuuuauuaugca

SEQ ID NO: 2235056 - RNA, 20 nt, Human
auuuguagaaggguuauauu

SEQ ID NO: 2235057 - RNA, 16 nt, Human
auuuguauaguugcuu

SEQ ID NO: 2235058 - RNA, 21 nt, Human
auuuguauaaaauaauuuuua

SEQ ID NO: 2235059 - RNA, 19 nt, Human
auuuguaucucugaagcau

SEQ ID NO: 2235060 - RNA, 20 nt, Human
auuuguaucucugaagcaug

SEQ ID NO: 2235061 - RNA, 21 nt, Human
auuuguaucucugaagcaugu

SEQ ID NO: 2235062 - RNA, 18 nt, Human
auuuguauaguugcuugc

SEQ ID NO: 2235063 - RNA, 21 nt, Human
auuuguauaguugcuugccug

SEQ ID NO: 2235064 - RNA, 15 nt, Human
auuuguaucacaaau

SEQ ID NO: 2235065 - RNA, 14 nt, Human
auuuuaauaauguu

SEQ ID NO: 2235066 - RNA, 22 nt, Human
auuuguaucucugaagcauguu

SEQ ID NO: 2235067 - RNA, 23 nt, Human
auuuguaucucugaagcauguuu

SEQ ID NO: 2235068 - RNA, 14 nt, Human
auuuguaucugaag

SEQ ID NO: 2235069 - RNA, 17 nt, Human
auuuguaucugaaggag

SEQ ID NO: 2235070 - RNA, 15 nt, Human
auuuuaauaauguuu

SEQ ID NO: 2235071 - RNA, 16 nt, Human
auuuuaauaauguuuc

SEQ ID NO: 2235072 - RNA, 18 nt, Human
auuuuacuucuagagaua

SEQ ID NO: 2235073 - RNA, 22 nt, Human
auuuuacuacuguggaaaaaua

SEQ ID NO: 2235074 - RNA, 17 nt, Human
auuuuacuacuguggaa

SEQ ID NO: 2235075 - RNA, 22 nt, Human
auuuuacuguacagacagaaaa

SEQ ID NO: 2235076 - RNA, 20 nt, Human
auuuuacuguacagacagaa

SEQ ID NO: 2235077 - RNA, 17 nt, Human
auuuuaccuuugacaaa

SEQ ID NO: 2235078 - RNA, 21 nt, Human
auuuuacaauugaaaugacua

SEQ ID NO: 2235079 - RNA, 17 nt, Human
auuuuacaauugaaaug

SEQ ID NO: 2235080 - RNA, 12 nt, Human
auuuuacaauuu

SEQ ID NO: 2235081 - RNA, 18 nt, Human
auuuuaauuuaugaguuu

SEQ ID NO: 2235082 - RNA, 21 nt, Human
auuuguaucugaaggagauuu

SEQ ID NO: 2235083 - RNA, 18 nt, Human
auuuuaauuuuaaccaaa

SEQ ID NO: 2235084 - RNA, 13 nt, Human
auuuuacaauuga

SEQ ID NO: 2235085 - RNA, 23 nt, Human
auuucuuuugccguuauuaaaaa

SEQ ID NO: 2235086 - RNA, 14 nt, Human
auucucagaaucuc

SEQ ID NO: 2235087 - RNA, 16 nt, Human
auucucacuccaccac

SEQ ID NO: 2235088 - RNA, 15 nt, Human
auucucacuccacca

SEQ ID NO: 2235089 - RNA, 14 nt, Human
auucucacuccacc

SEQ ID NO: 2235090 - RNA, 16 nt, Human
auucucaccaggaagg

SEQ ID NO: 2235091 - RNA, 13 nt, Human
auucucaccagga

SEQ ID NO: 2235092 - RNA, 14 nt, Human
auucucaccaggaa

SEQ ID NO: 2235093 - RNA, 17 nt, Human
auucuacuuuaagcacu

SEQ ID NO: 2235094 - RNA, 13 nt, Human
auucuacacagag

SEQ ID NO: 2235095 - RNA, 16 nt, Human
auucuacuuugagugc

SEQ ID NO: 2235096 - RNA, 13 nt, Human
auucuacuuugag

SEQ ID NO: 2235097 - RNA, 16 nt, Human
auucucagauauuuau

SEQ ID NO: 2235098 - RNA, 17 nt, Human
auucucacuccaccacc

SEQ ID NO: 2235099 - RNA, 23 nt, Human
auucucagauauuuauauuuuua

SEQ ID NO: 2235100 - RNA, 13 nt, Human
auucuccaccugc

SEQ ID NO: 2235101 - RNA, 20 nt, Human
auucucagaaucucaaauaa

SEQ ID NO: 2235102 - RNA, 18 nt, Human
auucucagaaucucaaau

SEQ ID NO: 2235103 - RNA, 20 nt, Human
auugacacuuaaaaaugguu

SEQ ID NO: 2235104 - RNA, 13 nt, Human
auugacagaagcu

SEQ ID NO: 2235105 - RNA, 21 nt, Human
auugacagaucaagcugugag

SEQ ID NO: 2235106 - RNA, 16 nt, Human
auucuccaccugccag

SEQ ID NO: 2235107 - RNA, 17 nt, Human
auucuccaccugccagg

SEQ ID NO: 2235108 - RNA, 18 nt, Human
auucuccaccugccaggg

SEQ ID NO: 2235109 - RNA, 13 nt, Human
auugcacaauauu

SEQ ID NO: 2235110 - RNA, 11 nt, Human
auugcacaaua

SEQ ID NO: 2235111 - RNA, 16 nt, Human
auugcaacaggcuggg

SEQ ID NO: 2235112 - RNA, 21 nt, Human
auugcaacaggcugggcuuca

SEQ ID NO: 2235113 - RNA, 16 nt, Human
auugcagguggaacuc

SEQ ID NO: 2235114 - RNA, 17 nt, Human
auugcagguggaacuca

SEQ ID NO: 2235115 - RNA, 23 nt, Human
auugcaggagucccugccaucau

SEQ ID NO: 2235116 - RNA, 22 nt, Human
auugcagaacuaaacucauuua

SEQ ID NO: 2235117 - RNA, 20 nt, Human
auugcagaacuaaacucauu

SEQ ID NO: 2235118 - RNA, 21 nt, Human
auugcacaugucuuaaugaag

SEQ ID NO: 2235119 - RNA, 23 nt, Human
auugcacucuaaaagguucaggg

SEQ ID NO: 2235120 - RNA, 14 nt, Human
auugcacagggaga

SEQ ID NO: 2235121 - RNA, 13 nt, Human
auugcacuuuuaa

SEQ ID NO: 2235122 - RNA, 16 nt, Human
auugcacaugucuuaa

SEQ ID NO: 2235123 - RNA, 22 nt, Human
auugcacaauauugaacuuuuu

SEQ ID NO: 2235124 - RNA, 18 nt, Human
auugcacaugucuuaaug

SEQ ID NO: 2235125 - RNA, 20 nt, Human
auugcacaugucuuaaugaa

SEQ ID NO: 2235126 - RNA, 18 nt, Human
auugacaggauuauugga

SEQ ID NO: 2235127 - RNA, 19 nt, Human
auugacagcuuugcugcug

SEQ ID NO: 2235128 - RNA, 18 nt, Human
auugacagcuuugcugcu

SEQ ID NO: 2235129 - RNA, 16 nt, Human
auugacagcuuugcug

SEQ ID NO: 2235130 - RNA, 15 nt, Human
auugacagcuuugcu

SEQ ID NO: 2235131 - RNA, 14 nt, Human
auugacagcuuugc

SEQ ID NO: 2235132 - RNA, 13 nt, Human
auugacagcuuug

SEQ ID NO: 2235133 - RNA, 16 nt, Human
auucuccacagcaacc

SEQ ID NO: 2235134 - RNA, 18 nt, Human
auugacagaucaagcugu

SEQ ID NO: 2235135 - RNA, 21 nt, Human
auugacccacaagaaaugaaa

SEQ ID NO: 2235136 - RNA, 23 nt, Human
auugaccgcgacuaauuucaaaa

SEQ ID NO: 2235137 - RNA, 20 nt, Human
auugaccgcgacuaauuuca

SEQ ID NO: 2235138 - RNA, 17 nt, Human
auugaccgcgacuaauu

SEQ ID NO: 2235139 - RNA, 15 nt, Human
auugcaacaggcugg

SEQ ID NO: 2235140 - RNA, 19 nt, Human
auugcaaaucuugaaauua

SEQ ID NO: 2235141 - RNA, 17 nt, Human
auugcaaaucuugaaau

SEQ ID NO: 2235142 - RNA, 16 nt, Human
auugcaaaucuugaaa

SEQ ID NO: 2235143 - RNA, 12 nt, Human
auugcaaaucuu

SEQ ID NO: 2235144 - RNA, 23 nt, Human
auugcaaagguuccaacuguaua

SEQ ID NO: 2235145 - RNA, 13 nt, Human
auugaccugaggc

SEQ ID NO: 2235146 - RNA, 11 nt, Human
auugcccuggu

SEQ ID NO: 2235147 - RNA, 14 nt, Human
auugccuauuucag

SEQ ID NO: 2235148 - RNA, 13 nt, Human
auugccuccuccu

SEQ ID NO: 2235149 - RNA, 14 nt, Human
auugccugcagaga

SEQ ID NO: 2235150 - RNA, 18 nt, Human
auugccuauuucaguggc

SEQ ID NO: 2235151 - RNA, 16 nt, Human
auugcggacagccacg

SEQ ID NO: 2235152 - RNA, 18 nt, Human
auugcggacagccacggc

SEQ ID NO: 2235153 - RNA, 19 nt, Human
auugcggacagccacggcc

SEQ ID NO: 2235154 - RNA, 17 nt, Human
auugcccacgcuggagu

SEQ ID NO: 2235155 - RNA, 21 nt, Human
auugcccacgcuggagugcag

SEQ ID NO: 2235156 - RNA, 18 nt, Human
auugccauauugcacaug

SEQ ID NO: 2235157 - RNA, 19 nt, Human
auugccauauugcacaugu

SEQ ID NO: 2235158 - RNA, 22 nt, Human
auugccauauugcacaugucuu

SEQ ID NO: 2235159 - RNA, 13 nt, Human
auugccuauuuca

SEQ ID NO: 2235160 - RNA, 16 nt, Human
auugcccccagggcac

SEQ ID NO: 2235161 - RNA, 22 nt, Human
auugcccccagggcacuucaca

SEQ ID NO: 2235162 - RNA, 18 nt, Human
auugcccauccaucugcu

SEQ ID NO: 2235163 - RNA, 18 nt, Human
auugccauucccugccug

SEQ ID NO: 2235164 - RNA, 15 nt, Human
auugcccccagggca

SEQ ID NO: 2235165 - RNA, 21 nt, Human
auugccaccaggagaaccacu

SEQ ID NO: 2235166 - RNA, 22 nt, Human
auugccaagcucaggaccaggc

SEQ ID NO: 2235167 - RNA, 15 nt, Human
auugccaccaggaga

SEQ ID NO: 2235168 - RNA, 14 nt, Human
auugccaccaggag

SEQ ID NO: 2235169 - RNA, 14 nt, Human
auugccaagggcuu

SEQ ID NO: 2235170 - RNA, 23 nt, Human
auugccauuucuuccacaagagc

SEQ ID NO: 2235171 - RNA, 12 nt, Human
auugccauauug

SEQ ID NO: 2235172 - RNA, 15 nt, Human
auugccauauugcac

SEQ ID NO: 2235173 - RNA, 16 nt, Human
auugccauauugcaca

SEQ ID NO: 2235174 - RNA, 17 nt, Human
auugccauauugcacau

SEQ ID NO: 2235175 - RNA, 16 nt, Human
auugcauuuccugaca

SEQ ID NO: 2235176 - RNA, 23 nt, Human
auugcaguuuaucauucaagugu

SEQ ID NO: 2235177 - RNA, 17 nt, Human
auugcauuuccugacag

SEQ ID NO: 2235178 - RNA, 14 nt, Human
auugcaguuuauca

SEQ ID NO: 2235179 - RNA, 17 nt, Human
auugcaguuuaucauuc

SEQ ID NO: 2235180 - RNA, 18 nt, Human
auugcaguuuaucauuca

SEQ ID NO: 2235181 - RNA, 19 nt, Human
auugcaguuuaucauucaa

SEQ ID NO: 2235182 - RNA, 14 nt, Human
auugcuacuguccu

SEQ ID NO: 2235183 - RNA, 23 nt, Human
auugucuucggaaaccuuggugu

SEQ ID NO: 2235184 - RNA, 18 nt, Human
auugucuucggaaaccuu

SEQ ID NO: 2235185 - RNA, 20 nt, Human
auugucuucggaaaccuugg

SEQ ID NO: 2235186 - RNA, 14 nt, Human
auugucuuguucug

SEQ ID NO: 2235187 - RNA, 15 nt, Human
auugugaaauuauuc

SEQ ID NO: 2235188 - RNA, 13 nt, Human
auugugccccugc

SEQ ID NO: 2235189 - RNA, 15 nt, Human
auuguauuacaaauc

SEQ ID NO: 2235190 - RNA, 15 nt, Human
auugucuccuugagu

SEQ ID NO: 2235191 - RNA, 18 nt, Human
auugucucuaaauugugg

SEQ ID NO: 2235192 - RNA, 14 nt, Human
auuguauuacaaau

SEQ ID NO: 2235193 - RNA, 13 nt, Human
auuguuugcuuau

SEQ ID NO: 2235194 - RNA, 20 nt, Human
auuguuugaaacaaagaagg

SEQ ID NO: 2235195 - RNA, 18 nt, Human
auuguuugcuuauuguuc

SEQ ID NO: 2235196 - RNA, 16 nt, Human
auuguuugcuuauugu

SEQ ID NO: 2235197 - RNA, 15 nt, Human
auuguuugcuuauug

SEQ ID NO: 2235198 - RNA, 14 nt, Human
auuguuugcuuauu

SEQ ID NO: 2235199 - RNA, 19 nt, Human
auuguuucuuuaagaaagu

SEQ ID NO: 2235200 - RNA, 20 nt, Human
auuguuucuuuaagaaagua

SEQ ID NO: 2235201 - RNA, 13 nt, Human
auuguuugaaaca

SEQ ID NO: 2235202 - RNA, 17 nt, Human
auuguuugaaacaaaga

SEQ ID NO: 2235203 - RNA, 18 nt, Human
auuguuugaaacaaagaa

SEQ ID NO: 2235204 - RNA, 19 nt, Human
auuguuugaaacaaagaag

SEQ ID NO: 2235205 - RNA, 22 nt, Human
auuguuugcuuauuguuccaag

SEQ ID NO: 2235206 - RNA, 15 nt, Human
auuuaaaacagacac

SEQ ID NO: 2235207 - RNA, 23 nt, Human
auuguuugcuuauuguuccaaga

SEQ ID NO: 2235208 - RNA, 21 nt, Human
auuguuugcuuauuguuccaa

SEQ ID NO: 2235209 - RNA, 19 nt, Human
auuguuugcuuauuguucc

SEQ ID NO: 2235210 - RNA, 23 nt, Human
auuuaaaacagacacuggcaugg

SEQ ID NO: 2235211 - RNA, 18 nt, Human
auuuaaaacagacacugg

SEQ ID NO: 2235212 - RNA, 17 nt, Human
auuuaaaacagacacug

SEQ ID NO: 2235213 - RNA, 16 nt, Human
auuuaaaacagacacu

SEQ ID NO: 2235214 - RNA, 22 nt, Human
auuguuucauugcgaaucuuuu

SEQ ID NO: 2235215 - RNA, 13 nt, Human
auuguuucaauug

SEQ ID NO: 2235216 - RNA, 22 nt, Human
auuguuucaauugcaucuccca

SEQ ID NO: 2235217 - RNA, 15 nt, Human
auugugcuucuuucu

SEQ ID NO: 2235218 - RNA, 23 nt, Human
auugugaaauaaaacuggcuuug

SEQ ID NO: 2235219 - RNA, 21 nt, Human
auuguaucuagugcagcugau

SEQ ID NO: 2235220 - RNA, 19 nt, Human
auuguaucuagugcagcug

SEQ ID NO: 2235221 - RNA, 18 nt, Human
auuguaucuagugcagcu

SEQ ID NO: 2235222 - RNA, 16 nt, Human
auuguaucuagugcag

SEQ ID NO: 2235223 - RNA, 15 nt, Human
auuguaucuagugca

SEQ ID NO: 2235224 - RNA, 14 nt, Human
auuguaucuagugc

SEQ ID NO: 2235225 - RNA, 24 nt, Human
auuguaucguauagcuguauugaa

SEQ ID NO: 2235226 - RNA, 13 nt, Human
auuguaugaugug

SEQ ID NO: 2235227 - RNA, 12 nt, Human
auuguaugaugu

SEQ ID NO: 2235228 - RNA, 21 nt, Human
auuguaugauguguugugaua

SEQ ID NO: 2235229 - RNA, 14 nt, Human
auuguaugaugugu

SEQ ID NO: 2235230 - RNA, 15 nt, Human
auuguaugauguguu

SEQ ID NO: 2235231 - RNA, 17 nt, Human
auuguauauuguguuug

SEQ ID NO: 2235232 - RNA, 14 nt, Human
auuguaucagaggc

SEQ ID NO: 2235233 - RNA, 15 nt, Human
auuguaucagaggcc

SEQ ID NO: 2235234 - RNA, 15 nt, Human
auuguaucgauguua

SEQ ID NO: 2235235 - RNA, 14 nt, Human
auuguauccugagg

SEQ ID NO: 2235236 - RNA, 16 nt, Human
auuguaucguauagcu

SEQ ID NO: 2235237 - RNA, 17 nt, Human
auuguaucguauagcug

SEQ ID NO: 2235238 - RNA, 17 nt, Human
auuguaucagaggccua

SEQ ID NO: 2235239 - RNA, 19 nt, Human
auuguaucagaggccuaua

SEQ ID NO: 2235240 - RNA, 20 nt, Human
auuguaucagaggccuauaa

SEQ ID NO: 2235241 - RNA, 21 nt, Human
auuguaucagaggccuauaau

SEQ ID NO: 2235242 - RNA, 15 nt, Human
auuguauauucacuu

SEQ ID NO: 2235243 - RNA, 22 nt, Human
auuguauauauguguguuuaaa

SEQ ID NO: 2235244 - RNA, 13 nt, Human
auuguauauucac

SEQ ID NO: 2235245 - RNA, 14 nt, Human
auuguauauucacu

SEQ ID NO: 2235246 - RNA, 13 nt, Human
auuguauauaugu

SEQ ID NO: 2235247 - RNA, 15 nt, Human
auuguauauaugugu

SEQ ID NO: 2235248 - RNA, 15 nt, Human
auuguauagagauau

SEQ ID NO: 2235249 - RNA, 21 nt, Human
auuguauagagauaugcagaa

SEQ ID NO: 2235250 - RNA, 22 nt, Human
auuguauagagauaugcagaag

SEQ ID NO: 2235251 - RNA, 11 nt, Human
auuguauauau

SEQ ID NO: 2235252 - RNA, 13 nt, Human
auuguauaacagg

SEQ ID NO: 2235253 - RNA, 14 nt, Human
auuguauaacaggu

SEQ ID NO: 2235254 - RNA, 15 nt, Human
auuguauaacagguu

SEQ ID NO: 2235255 - RNA, 16 nt, Human
auuguauaacagguua

SEQ ID NO: 2235256 - RNA, 17 nt, Human
auuguauaacagguuau

SEQ ID NO: 2235257 - RNA, 18 nt, Human
auuguauaacagguuauu

SEQ ID NO: 2235258 - RNA, 21 nt, Human
auuguauaagauuagaaugaa

SEQ ID NO: 2235259 - RNA, 22 nt, Human
auuguauaagauuagaaugaaa

SEQ ID NO: 2235260 - RNA, 19 nt, Human
auugcgccauugcacucca

SEQ ID NO: 2235261 - RNA, 15 nt, Human
auugccugcagagag

SEQ ID NO: 2235262 - RNA, 20 nt, Human
auugcguuugaccuuuuaug

SEQ ID NO: 2235263 - RNA, 21 nt, Human
auugcguuugaccuuuuaugu

SEQ ID NO: 2235264 - RNA, 13 nt, Human
auugcuaaaugua

SEQ ID NO: 2235265 - RNA, 14 nt, Human
auugcuaaauguaa

SEQ ID NO: 2235266 - RNA, 16 nt, Human
auugcuaaauguaaca

SEQ ID NO: 2235267 - RNA, 17 nt, Human
auugcuaaauguaacag

SEQ ID NO: 2235268 - RNA, 18 nt, Human
auugcuaaauguaacagu

SEQ ID NO: 2235269 - RNA, 21 nt, Human
auuggcucuugaacugagcuu

SEQ ID NO: 2235270 - RNA, 21 nt, Human
auuggcucacacugagaaugu

SEQ ID NO: 2235271 - RNA, 15 nt, Human
auugcuaagaugcuc

SEQ ID NO: 2235272 - RNA, 21 nt, Human
auugcuacuacuuaccuacca

SEQ ID NO: 2235273 - RNA, 21 nt, Human
auugcuaaucaccaaaggcuc

SEQ ID NO: 2235274 - RNA, 23 nt, Human
auuggcuuuaaacacccuucaca

SEQ ID NO: 2235275 - RNA, 21 nt, Human
auuguauaaaaauagaagaau

SEQ ID NO: 2235276 - RNA, 13 nt, Human
auuguauaaacua

SEQ ID NO: 2235277 - RNA, 17 nt, Human
auuguauaaacuaucag

SEQ ID NO: 2235278 - RNA, 21 nt, Human
auuguauaaacuaucaguuug

SEQ ID NO: 2235279 - RNA, 22 nt, Human
auuguauaaacuaucaguuugu

SEQ ID NO: 2235280 - RNA, 23 nt, Human
auuggcuuuggguugcaggaccu

SEQ ID NO: 2235281 - RNA, 14 nt, Human
auuggcuuuauccu

SEQ ID NO: 2235282 - RNA, 18 nt, Human
auuggcuuguguguuuca

SEQ ID NO: 2235283 - RNA, 22 nt, Human
auuggcuuguguguuucacuuu

SEQ ID NO: 2235284 - RNA, 17 nt, Human
auuggcuuuauccucuu

SEQ ID NO: 2235285 - RNA, 21 nt, Human
auuggcuuuauccucuuuaga

SEQ ID NO: 2235286 - RNA, 17 nt, Human
auuggcugggaguggug

SEQ ID NO: 2235287 - RNA, 21 nt, Human
auuggcucacccaagcaaggc

SEQ ID NO: 2235288 - RNA, 22 nt, Human
auuggcugaacucaugagaagu

SEQ ID NO: 2235289 - RNA, 14 nt, Human
auuggcugagagac

SEQ ID NO: 2235290 - RNA, 17 nt, Human
auuggcuuguguguuuc

SEQ ID NO: 2235291 - RNA, 14 nt, Human
auuuaaacagcagu

SEQ ID NO: 2235292 - RNA, 19 nt, Human
auuuaaacaggcccagcau

SEQ ID NO: 2235293 - RNA, 17 nt, Human
auuuaaacaggcccagc

SEQ ID NO: 2235294 - RNA, 18 nt, Human
auuuaaacaggcccagca

SEQ ID NO: 2235295 - RNA, 15 nt, Human
auuuaaacagcagug

SEQ ID NO: 2235296 - RNA, 16 nt, Human
auuuaaacagcagugu

SEQ ID NO: 2235297 - RNA, 20 nt, Human
auuuaaacagcaguguuccc

SEQ ID NO: 2235298 - RNA, 15 nt, Human
auuuaaacaggccca

SEQ ID NO: 2235299 - RNA, 19 nt, Human
auuuaaagcuuauuaaaac

SEQ ID NO: 2235300 - RNA, 15 nt, Human
auuuaaagccuccuc

SEQ ID NO: 2235301 - RNA, 15 nt, Human
auuuaaaagacacug

SEQ ID NO: 2235302 - RNA, 19 nt, Human
auuuaaaauugugaugugu

SEQ ID NO: 2235303 - RNA, 19 nt, Human
auuuaaacaauaaaugugc

SEQ ID NO: 2235304 - RNA, 20 nt, Human
auuuaaaauugugauguguc

SEQ ID NO: 2235305 - RNA, 13 nt, Human
auuuaaaacaugu

SEQ ID NO: 2235306 - RNA, 14 nt, Human
auuuaaaacaugua

SEQ ID NO: 2235307 - RNA, 15 nt, Human
auuuaaaacauguaa

SEQ ID NO: 2235308 - RNA, 11 nt, Human
auuuaaaacuu

SEQ ID NO: 2235309 - RNA, 20 nt, Human
auuuaaaggguguacuuaua

SEQ ID NO: 2235310 - RNA, 21 nt, Human
auuuaaaggcccuaucuguuu

SEQ ID NO: 2235311 - RNA, 20 nt, Human
auuuaaaggcccuaucuguu

SEQ ID NO: 2235312 - RNA, 18 nt, Human
auuuaaaggcccuaucug

SEQ ID NO: 2235313 - RNA, 16 nt, Human
auuuaacagaaaugua

SEQ ID NO: 2235314 - RNA, 15 nt, Human
auuuaacagaaaugu

SEQ ID NO: 2235315 - RNA, 19 nt, Human
auuuaacagaaauguacag

SEQ ID NO: 2235316 - RNA, 17 nt, Human
auuuaacagaaauguac

SEQ ID NO: 2235317 - RNA, 20 nt, Human
auuuaacagaaauguacagc

SEQ ID NO: 2235318 - RNA, 21 nt, Human
auuuaacagcugaauuaucua

SEQ ID NO: 2235319 - RNA, 15 nt, Human
auuuaacagcugaau

SEQ ID NO: 2235320 - RNA, 17 nt, Human
auuuaacagggagggga

SEQ ID NO: 2235321 - RNA, 22 nt, Human
auuuaacagggucucuagugcu

SEQ ID NO: 2235322 - RNA, 22 nt, Human
auuuaacagcugaauuaucuau

SEQ ID NO: 2235323 - RNA, 15 nt, Human
auuuaacagucauuu

SEQ ID NO: 2235324 - RNA, 16 nt, Human
auuuaacagucauuua

SEQ ID NO: 2235325 - RNA, 17 nt, Human
auuuaacagucauuuaa

SEQ ID NO: 2235326 - RNA, 18 nt, Human
auuuaacagucauuuaaa

SEQ ID NO: 2235327 - RNA, 13 nt, Human
auuuaauuuugac

SEQ ID NO: 2235328 - RNA, 19 nt, Human
auuuaacuugagcuuuaaa

SEQ ID NO: 2235329 - RNA, 18 nt, Human
auuuaauuugauaucaca

SEQ ID NO: 2235330 - RNA, 21 nt, Human
auuuaacuuaacauucuguaa

SEQ ID NO: 2235331 - RNA, 17 nt, Human
auuuaacuugagcuuua

SEQ ID NO: 2235332 - RNA, 13 nt, Human
auuuaacuugagc

SEQ ID NO: 2235333 - RNA, 13 nt, Human
auuuaacuggcuu

SEQ ID NO: 2235334 - RNA, 20 nt, Human
auuuaacuuaacauucugua

SEQ ID NO: 2235335 - RNA, 13 nt, Human
auuuaacugccuu

SEQ ID NO: 2235336 - RNA, 19 nt, Human
auuuaauuuuuuugagaca

SEQ ID NO: 2235337 - RNA, 23 nt, Human
auuuaauuuuuuugagacagagu

SEQ ID NO: 2235338 - RNA, 19 nt, Human
auuuacccuucuuuucuga

SEQ ID NO: 2235339 - RNA, 23 nt, Human
auuuaccagccuccguauuucag

SEQ ID NO: 2235340 - RNA, 22 nt, Human
auuuacaacugggggaggguga

SEQ ID NO: 2235341 - RNA, 19 nt, Human
auuuacaaaguguguauua

SEQ ID NO: 2235342 - RNA, 20 nt, Human
auuuacaaaguguguauuaa

SEQ ID NO: 2235343 - RNA, 15 nt, Human
auuuacaaagugugu

SEQ ID NO: 2235344 - RNA, 16 nt, Human
auuuacaaagugugua

SEQ ID NO: 2235345 - RNA, 17 nt, Human
auuuacaaaguguguau

SEQ ID NO: 2235346 - RNA, 18 nt, Human
auuuacaaaguguguauu

SEQ ID NO: 2235347 - RNA, 16 nt, Human
auuuacaaaugggaaa

SEQ ID NO: 2235348 - RNA, 19 nt, Human
auuuacaaaaauauaaaau

SEQ ID NO: 2235349 - RNA, 19 nt, Human
auuuaauuuugacacuaua

SEQ ID NO: 2235350 - RNA, 22 nt, Human
auuuaauuugauaucacagucu

SEQ ID NO: 2235351 - RNA, 14 nt, Human
auuuaauuuugaca

SEQ ID NO: 2235352 - RNA, 16 nt, Human
auuuaauuuugacacu

SEQ ID NO: 2235353 - RNA, 18 nt, Human
auuuaauuuugacacuau

SEQ ID NO: 2235354 - RNA, 20 nt, Human
auuuacaaaaauauaaaaua

SEQ ID NO: 2235355 - RNA, 23 nt, Human
auuuacaaaaauauaaaauauga

SEQ ID NO: 2235356 - RNA, 13 nt, Human
auuuacaaagugu

SEQ ID NO: 2235357 - RNA, 14 nt, Human
auuuacaaagugug

SEQ ID NO: 2235358 - RNA, 15 nt, Human
auuuauuauugaaau

SEQ ID NO: 2235359 - RNA, 19 nt, Human
auucccuucaucuggaacc

SEQ ID NO: 2235360 - RNA, 16 nt, Human
auucccuucaucugga

SEQ ID NO: 2235361 - RNA, 21 nt, Human
auucccuguacaauauuuaaa

SEQ ID NO: 2235362 - RNA, 19 nt, Human
auucccuguacaauauuua

SEQ ID NO: 2235363 - RNA, 21 nt, Human
auucccuggccuuucauauuu

SEQ ID NO: 2235364 - RNA, 19 nt, Human
auuccccaggaggccagcc

SEQ ID NO: 2235365 - RNA, 21 nt, Human
auuccgacaaccgaugcucca

SEQ ID NO: 2235366 - RNA, 23 nt, Human
auuccguagccagcugcucccca

SEQ ID NO: 2235367 - RNA, 16 nt, Human
auuccguagccagcug

SEQ ID NO: 2235368 - RNA, 17 nt, Human
auuccauuuaucuuucu

SEQ ID NO: 2235369 - RNA, 18 nt, Human
auuccauuuaucuuucua

SEQ ID NO: 2235370 - RNA, 16 nt, Human
auuccauugugugagu

SEQ ID NO: 2235371 - RNA, 15 nt, Human
auuccauugugugag

SEQ ID NO: 2235372 - RNA, 15 nt, Human
auuccauuuaucuuu

SEQ ID NO: 2235373 - RNA, 16 nt, Human
auuccccaggaggcca

SEQ ID NO: 2235374 - RNA, 20 nt, Human
auuccccagauugcaacagg

SEQ ID NO: 2235375 - RNA, 22 nt, Human
auuccccacccugaaagcccug

SEQ ID NO: 2235376 - RNA, 16 nt, Human
auuccacuacaccugg

SEQ ID NO: 2235377 - RNA, 11 nt, Human
auucauaauaa

SEQ ID NO: 2235378 - RNA, 12 nt, Human
auuccacaucua

SEQ ID NO: 2235379 - RNA, 16 nt, Human
auuccaccugcaauca

SEQ ID NO: 2235380 - RNA, 20 nt, Human
auuccacuuauaggaauuga

SEQ ID NO: 2235381 - RNA, 13 nt, Human
auuccacagcugc

SEQ ID NO: 2235382 - RNA, 21 nt, Human
auucauaagccaauuuuucug

SEQ ID NO: 2235383 - RNA, 23 nt, Human
auucauaagccaauuuuucugca

SEQ ID NO: 2235384 - RNA, 14 nt, Human
auucaguuuucauu

SEQ ID NO: 2235385 - RNA, 12 nt, Human
auucauaaaucu

SEQ ID NO: 2235386 - RNA, 15 nt, Human
auucaguuuucauuu

SEQ ID NO: 2235387 - RNA, 13 nt, Human
auucaguuuucau

SEQ ID NO: 2235388 - RNA, 21 nt, Human
auuccauucuggaagugacuu

SEQ ID NO: 2235389 - RNA, 16 nt, Human
auuccauucuggauuu

SEQ ID NO: 2235390 - RNA, 12 nt, Human
auuccacuggac

SEQ ID NO: 2235391 - RNA, 17 nt, Human
auuccacuacaccuggc

SEQ ID NO: 2235392 - RNA, 18 nt, Human
auuccacuacaccuggcu

SEQ ID NO: 2235393 - RNA, 19 nt, Human
auuccacuacaccuggcug

SEQ ID NO: 2235394 - RNA, 22 nt, Human
auuccacuacaccuggcugagg

SEQ ID NO: 2235395 - RNA, 16 nt, Human
auuccaugaauguauc

SEQ ID NO: 2235396 - RNA, 15 nt, Human
auuccaugaauguau

SEQ ID NO: 2235397 - RNA, 18 nt, Human
auuccacugcguugucca

SEQ ID NO: 2235398 - RNA, 12 nt, Human
auuccagaauau

SEQ ID NO: 2235399 - RNA, 13 nt, Human
auuccaugaaugu

SEQ ID NO: 2235400 - RNA, 18 nt, Human
auuccaugaauguaucag

SEQ ID NO: 2235401 - RNA, 17 nt, Human
auuccaugaauguauca

SEQ ID NO: 2235402 - RNA, 23 nt, Human
auuccaugaauguaucaggaaau

SEQ ID NO: 2235403 - RNA, 18 nt, Human
auucagcucugcaagaau

SEQ ID NO: 2235404 - RNA, 14 nt, Human
auucagcucugcaa

SEQ ID NO: 2235405 - RNA, 21 nt, Human
auucaggaagcucagggccug

SEQ ID NO: 2235406 - RNA, 22 nt, Human
auucaggaagcucagggccugg

SEQ ID NO: 2235407 - RNA, 21 nt, Human
auucaguuguuagugugucuu

SEQ ID NO: 2235408 - RNA, 21 nt, Human
auucaggaauguguggccugc

SEQ ID NO: 2235409 - RNA, 21 nt, Human
auucaggacuuaacggcucca

SEQ ID NO: 2235410 - RNA, 22 nt, Human
auucagcuagaacuuugaagga

SEQ ID NO: 2235411 - RNA, 23 nt, Human
auucaggaagcucagggccuggc

SEQ ID NO: 2235412 - RNA, 16 nt, Human
auucaguuguuagugu

SEQ ID NO: 2235413 - RNA, 16 nt, Human
auucaaaaguugaaau

SEQ ID NO: 2235414 - RNA, 14 nt, Human
auuauuuuccaaaa

SEQ ID NO: 2235415 - RNA, 16 nt, Human
auucaaaaugauguau

SEQ ID NO: 2235416 - RNA, 19 nt, Human
auucaaaauugacauugcu

SEQ ID NO: 2235417 - RNA, 21 nt, Human
auucaaaauugacauugcuuu

SEQ ID NO: 2235418 - RNA, 13 nt, Human
auuauuuuccaaa

SEQ ID NO: 2235419 - RNA, 15 nt, Human
auuauuuuaaacaaa

SEQ ID NO: 2235420 - RNA, 21 nt, Human
auuauuuuaaacaaaauagaa

SEQ ID NO: 2235421 - RNA, 13 nt, Human
auuauuuucaagg

SEQ ID NO: 2235422 - RNA, 17 nt, Human
auucagcggaauauuga

SEQ ID NO: 2235423 - RNA, 22 nt, Human
auucaaaauugacauugcuuua

SEQ ID NO: 2235424 - RNA, 14 nt, Human
auucagcucaugga

SEQ ID NO: 2235425 - RNA, 15 nt, Human
auucaaacagucuca

SEQ ID NO: 2235426 - RNA, 14 nt, Human
auucaaacagucuc

SEQ ID NO: 2235427 - RNA, 22 nt, Human
uuuuuguucuuaauugcacucu

SEQ ID NO: 2235428 - RNA, 20 nt, Human
uuuuuguucuuaauugcacu

SEQ ID NO: 2235429 - RNA, 23 nt, Human
uuuuuuaaaaaagaaacauuugg

SEQ ID NO: 2235430 - RNA, 17 nt, Human
auuaagaggcagaaaau

SEQ ID NO: 2235431 - RNA, 21 nt, Human
auuaagauaugggacauuuuu

SEQ ID NO: 2235432 - RNA, 23 nt, Human
auuaagauggauucucagauauu

SEQ ID NO: 2235433 - RNA, 20 nt, Human
auuaagauggauucucagau

SEQ ID NO: 2235434 - RNA, 15 nt, Human
auuaagauggauucu

SEQ ID NO: 2235435 - RNA, 16 nt, Human
auuaagaucucagugg

SEQ ID NO: 2235436 - RNA, 22 nt, Human
uuuuuguuccacaaguuaaaua

SEQ ID NO: 2235437 - RNA, 20 nt, Human
auuaauauggggaugcagca

SEQ ID NO: 2235438 - RNA, 19 nt, Human
auuaaucaugaauguguaa

SEQ ID NO: 2235439 - RNA, 15 nt, Human
auuaauaugaaaacu

SEQ ID NO: 2235440 - RNA, 14 nt, Human
auuaauaugaaaac

SEQ ID NO: 2235441 - RNA, 12 nt, Human
auuaauaugaaa

SEQ ID NO: 2235442 - RNA, 18 nt, Human
auuaauaucccuacaugu

SEQ ID NO: 2235443 - RNA, 19 nt, Human
auuaauaucccuacaugua

SEQ ID NO: 2235444 - RNA, 20 nt, Human
auuaauaucccuacauguau

SEQ ID NO: 2235445 - RNA, 14 nt, Human
auuaauccagaaua

SEQ ID NO: 2235446 - RNA, 18 nt, Human
auuaauagcuuuuauugu

SEQ ID NO: 2235447 - RNA, 19 nt, Human
auuaauagcuuuuauugua

SEQ ID NO: 2235448 - RNA, 23 nt, Human
auuaauagcuuuuauuguauaaa

SEQ ID NO: 2235449 - RNA, 13 nt, Human
auuaaguaaugau

SEQ ID NO: 2235450 - RNA, 15 nt, Human
auuaaguaaugauaa

SEQ ID NO: 2235451 - RNA, 12 nt, Human
auuacugcuaag

SEQ ID NO: 2235452 - RNA, 16 nt, Human
auuacugcuaaguauu

SEQ ID NO: 2235453 - RNA, 17 nt, Human
auuacugcuaaguauuu

SEQ ID NO: 2235454 - RNA, 20 nt, Human
auuacugccauucacuucau

SEQ ID NO: 2235455 - RNA, 13 nt, Human
auuacugccauuc

SEQ ID NO: 2235456 - RNA, 17 nt, Human
auuacugcaugcacuuc

SEQ ID NO: 2235457 - RNA, 14 nt, Human
auuacugcaugcac

SEQ ID NO: 2235458 - RNA, 12 nt, Human
auuaccuucucc

SEQ ID NO: 2235459 - RNA, 13 nt, Human
auuaccuuacugu

SEQ ID NO: 2235460 - RNA, 21 nt, Human
auuaccuuagauuagcucugg

SEQ ID NO: 2235461 - RNA, 13 nt, Human
auuaccucugaua

SEQ ID NO: 2235462 - RNA, 21 nt, Human
auuaccuaguagucauuucau

SEQ ID NO: 2235463 - RNA, 23 nt, Human
auuaccagacgguucaccagccu

SEQ ID NO: 2235464 - RNA, 17 nt, Human
auuaccagaguuguucu

SEQ ID NO: 2235465 - RNA, 19 nt, Human
auuaccgcguuguaaaaua

SEQ ID NO: 2235466 - RNA, 20 nt, Human
auuaccgcguuguaaaauau

SEQ ID NO: 2235467 - RNA, 20 nt, Human
auuaccagacgguucaccag

SEQ ID NO: 2235468 - RNA, 14 nt, Human
auuaccaaccuguu

SEQ ID NO: 2235469 - RNA, 22 nt, Human
auuaccugaauuuuggcugugu

SEQ ID NO: 2235470 - RNA, 17 nt, Human
auuaccuccugagaaaa

SEQ ID NO: 2235471 - RNA, 13 nt, Human
auuaccuccugag

SEQ ID NO: 2235472 - RNA, 12 nt, Human
auuaccuccuga

SEQ ID NO: 2235473 - RNA, 21 nt, Human
auuaccgcguuguaaaauaua

SEQ ID NO: 2235474 - RNA, 16 nt, Human
auuaaugacagagcca

SEQ ID NO: 2235475 - RNA, 20 nt, Human
auuaaugacacuugucccca

SEQ ID NO: 2235476 - RNA, 16 nt, Human
auuaaugacacuuguc

SEQ ID NO: 2235477 - RNA, 19 nt, Human
auuaaugaaauaucuguau

SEQ ID NO: 2235478 - RNA, 13 nt, Human
auuaaugaaauau

SEQ ID NO: 2235479 - RNA, 15 nt, Human
auuaaugaaauaucu

SEQ ID NO: 2235480 - RNA, 17 nt, Human
auuaaugaaauaucugu

SEQ ID NO: 2235481 - RNA, 18 nt, Human
auuaaugaaauaucugua

SEQ ID NO: 2235482 - RNA, 17 nt, Human
auuaaugaaaauaagaa

SEQ ID NO: 2235483 - RNA, 18 nt, Human
auuaaucuuucuuuaccu

SEQ ID NO: 2235484 - RNA, 23 nt, Human
auuaaucuuucuuuaccugagac

SEQ ID NO: 2235485 - RNA, 19 nt, Human
auuaaugaaaauaagaauu

SEQ ID NO: 2235486 - RNA, 17 nt, Human
auuaaucuuuuauauug

SEQ ID NO: 2235487 - RNA, 12 nt, Human
auuaaugaaaua

SEQ ID NO: 2235488 - RNA, 11 nt, Human
auuaaugcacu

SEQ ID NO: 2235489 - RNA, 22 nt, Human
auuacauuuccaaaugaaugac

SEQ ID NO: 2235490 - RNA, 13 nt, Human
auuacauuuguau

SEQ ID NO: 2235491 - RNA, 18 nt, Human
auuaccaaaaaucuuggg

SEQ ID NO: 2235492 - RNA, 16 nt, Human
auuaccaaccuguuac

SEQ ID NO: 2235493 - RNA, 19 nt, Human
auuaccacagacauacuaa

SEQ ID NO: 2235494 - RNA, 15 nt, Human
auuacauuuguauaa

SEQ ID NO: 2235495 - RNA, 16 nt, Human
auuacauuuguauaaa

SEQ ID NO: 2235496 - RNA, 21 nt, Human
auuagagcagaugaccccucc

SEQ ID NO: 2235497 - RNA, 13 nt, Human
auuagagcaggcg

SEQ ID NO: 2235498 - RNA, 14 nt, Human
auuagagcauugaa

SEQ ID NO: 2235499 - RNA, 16 nt, Human
auuauaacuuaaaaua

SEQ ID NO: 2235500 - RNA, 20 nt, Human
auuagagauuaccuccugag

SEQ ID NO: 2235501 - RNA, 13 nt, Human
auuagaauuauuu

SEQ ID NO: 2235502 - RNA, 20 nt, Human
auuauaacuuaaaauauuuu

SEQ ID NO: 2235503 - RNA, 22 nt, Human
auuauaacuugucuaaauaagu

SEQ ID NO: 2235504 - RNA, 20 nt, Human
auuauaagaggcugauaauu

SEQ ID NO: 2235505 - RNA, 22 nt, Human
auuauaauauacuauauuuaug

SEQ ID NO: 2235506 - RNA, 20 nt, Human
auuagaaguguuaacuuagc

SEQ ID NO: 2235507 - RNA, 18 nt, Human
auuagaaguguuaacuua

SEQ ID NO: 2235508 - RNA, 14 nt, Human
auuagaaguguuaa

SEQ ID NO: 2235509 - RNA, 21 nt, Human
auuagaagauauuagucuugg

SEQ ID NO: 2235510 - RNA, 22 nt, Human
auuagaauaguguucugcaaaa

SEQ ID NO: 2235511 - RNA, 13 nt, Human
auuagaauagugu

SEQ ID NO: 2235512 - RNA, 14 nt, Human
auuagaaugaaaau

SEQ ID NO: 2235513 - RNA, 14 nt, Human
auuagaauuauuua

SEQ ID NO: 2235514 - RNA, 11 nt, Human
auuagaaauga

SEQ ID NO: 2235515 - RNA, 22 nt, Human
auuagaaauagacaguauauuu

SEQ ID NO: 2235516 - RNA, 17 nt, Human
auuagaaacauaaauaa

SEQ ID NO: 2235517 - RNA, 16 nt, Human
auuagaaauagacagu

SEQ ID NO: 2235518 - RNA, 22 nt, Human
auuagaaaauguuauuuaacag

SEQ ID NO: 2235519 - RNA, 19 nt, Human
auuagaaaauguuauuuaa

SEQ ID NO: 2235520 - RNA, 18 nt, Human
auuagaaaauguuauuua

SEQ ID NO: 2235521 - RNA, 13 nt, Human
auuagaaaauguu

SEQ ID NO: 2235522 - RNA, 17 nt, Human
auuagaaauuggcugga

SEQ ID NO: 2235523 - RNA, 23 nt, Human
auuagaaauuagcugugugaaau

SEQ ID NO: 2235524 - RNA, 20 nt, Human
auuagaaauuagcuguguga

SEQ ID NO: 2235525 - RNA, 15 nt, Human
auuagaaauuagcug

SEQ ID NO: 2235526 - RNA, 23 nt, Human
auuagaacaggcaagugaagaaa

SEQ ID NO: 2235527 - RNA, 18 nt, Human
auuagaacaggcaaguga

SEQ ID NO: 2235528 - RNA, 19 nt, Human
auuagaacaggcaagugaa

SEQ ID NO: 2235529 - RNA, 13 nt, Human
auuagaagacauu

SEQ ID NO: 2235530 - RNA, 19 nt, Human
auuacugcuaaguauuucc

SEQ ID NO: 2235531 - RNA, 21 nt, Human
auuacugcuaaguauuuccca

SEQ ID NO: 2235532 - RNA, 23 nt, Human
auuacugcuaaguauuucccagc

SEQ ID NO: 2235533 - RNA, 21 nt, Human
auuacuuuuccacaaaucagu

SEQ ID NO: 2235534 - RNA, 14 nt, Human
auuacuuugugaau

SEQ ID NO: 2235535 - RNA, 12 nt, Human
auuacuuuacca

SEQ ID NO: 2235536 - RNA, 23 nt, Human
auuacuuuaccacccccacaccu

SEQ ID NO: 2235537 - RNA, 16 nt, Human
auuauaggccaaacug

SEQ ID NO: 2235538 - RNA, 17 nt, Human
auuauaggaucauuugu

SEQ ID NO: 2235539 - RNA, 16 nt, Human
auuauauuuacaaaug

SEQ ID NO: 2235540 - RNA, 13 nt, Human
auuauaaugaauu

SEQ ID NO: 2235541 - RNA, 13 nt, Human
auuauaauuguau

SEQ ID NO: 2235542 - RNA, 15 nt, Human
auuauaauuguauca

SEQ ID NO: 2235543 - RNA, 23 nt, Human
auuauaauuguaucagaggccua

SEQ ID NO: 2235544 - RNA, 15 nt, Human
auuauaauuuaaugc

SEQ ID NO: 2235545 - RNA, 21 nt, Human
auuauagaugggaaugaagcu

SEQ ID NO: 2235546 - RNA, 17 nt, Human
auuaucaugcaaaugcu

SEQ ID NO: 2235547 - RNA, 12 nt, Human
auuaucaugugu

SEQ ID NO: 2235548 - RNA, 13 nt, Human
auuaucaugugua

SEQ ID NO: 2235549 - RNA, 14 nt, Human
auuaucauguguaa

SEQ ID NO: 2235550 - RNA, 16 nt, Human
auuaucauguguaauc

SEQ ID NO: 2235551 - RNA, 17 nt, Human
auuaucauguguaauca

SEQ ID NO: 2235552 - RNA, 19 nt, Human
auuaucauguguaaucaau

SEQ ID NO: 2235553 - RNA, 15 nt, Human
auuaucaugcaaaug

SEQ ID NO: 2235554 - RNA, 12 nt, Human
auuaucagaugc

SEQ ID NO: 2235555 - RNA, 16 nt, Human
auuaucggaagcagug

SEQ ID NO: 2235556 - RNA, 23 nt, Human
auuaucauuuuagaagacucuac

SEQ ID NO: 2235557 - RNA, 16 nt, Human
auuauccuugcuauga

SEQ ID NO: 2235558 - RNA, 12 nt, Human
auuaucccugaa

SEQ ID NO: 2235559 - RNA, 17 nt, Human
auuauccauauugaguc

SEQ ID NO: 2235560 - RNA, 14 nt, Human
auuauccauauuga

SEQ ID NO: 2235561 - RNA, 17 nt, Human
auuauccagguaaucca

SEQ ID NO: 2235562 - RNA, 21 nt, Human
auuaucauguguaaucaauaa

SEQ ID NO: 2235563 - RNA, 22 nt, Human
auuaucauguguaaucaauaaa

SEQ ID NO: 2235564 - RNA, 17 nt, Human
auuauauuuacaaaugg

SEQ ID NO: 2235565 - RNA, 20 nt, Human
auuaucgggaacaguguuuc

SEQ ID NO: 2235566 - RNA, 19 nt, Human
auuaucgggaacaguguuu

SEQ ID NO: 2235567 - RNA, 18 nt, Human
auuaucgggaacaguguu

SEQ ID NO: 2235568 - RNA, 17 nt, Human
auuaucgggaacagugu

SEQ ID NO: 2235569 - RNA, 16 nt, Human
auuaucgggaacagug

SEQ ID NO: 2235570 - RNA, 21 nt, Human
auuaucggaagcagugccuuc

SEQ ID NO: 2235571 - RNA, 19 nt, Human
auuaucggaagcagugccu

SEQ ID NO: 2235572 - RNA, 17 nt, Human
auuaucggaagcagugc

SEQ ID NO: 2235573 - RNA, 19 nt, Human
auuaucgggagcagugucu

SEQ ID NO: 2235574 - RNA, 17 nt, Human
auuaucgggagcagugu

SEQ ID NO: 2235575 - RNA, 16 nt, Human
auuaucgggagcagug

SEQ ID NO: 2235576 - RNA, 22 nt, Human
auuaucgggaacaguguuuccc

SEQ ID NO: 2235577 - RNA, 21 nt, Human
auuaucgggagcagugucuuc

SEQ ID NO: 2235578 - RNA, 20 nt, Human
auuaucgggagcagugucuu

SEQ ID NO: 2235579 - RNA, 22 nt, Human
auuaucuauacauaucuuuauu

SEQ ID NO: 2235580 - RNA, 23 nt, Human
auuaucucaaaacugcacuguca

SEQ ID NO: 2235581 - RNA, 18 nt, Human
auuaucucaaaacugcac

SEQ ID NO: 2235582 - RNA, 18 nt, Human
auuaucuuggaaagaaac

SEQ ID NO: 2235583 - RNA, 17 nt, Human
auuaucucacuugugcc

SEQ ID NO: 2235584 - RNA, 12 nt, Human
auuauguuuaua

SEQ ID NO: 2235585 - RNA, 16 nt, Human
auuauguuuauauaaa

SEQ ID NO: 2235586 - RNA, 20 nt, Human
auuauguuuauauaaaugcu

SEQ ID NO: 2235587 - RNA, 16 nt, Human
auuauguuuuuuaaaa

SEQ ID NO: 2235588 - RNA, 20 nt, Human
auuauguuuuuuaaaauauu

SEQ ID NO: 2235589 - RNA, 14 nt, Human
auuauuaaugaaaa

SEQ ID NO: 2235590 - RNA, 18 nt, Human
auuauuuuauguugcaua

SEQ ID NO: 2235591 - RNA, 16 nt, Human
auuauuuuauguugca

SEQ ID NO: 2235592 - RNA, 14 nt, Human
auuauuuuaaaaga

SEQ ID NO: 2235593 - RNA, 22 nt, Human
auuauuuguuauuuguacaguu

SEQ ID NO: 2235594 - RNA, 14 nt, Human
auuauuuguuuucc

SEQ ID NO: 2235595 - RNA, 13 nt, Human
auuauuuuaaaca

SEQ ID NO: 2235596 - RNA, 14 nt, Human
auuauuuuaaacaa

SEQ ID NO: 2235597 - RNA, 18 nt, Human
auuauuuguguaauagaa

SEQ ID NO: 2235598 - RNA, 13 nt, Human
auuauuuauuauu

SEQ ID NO: 2235599 - RNA, 12 nt, Human
auuauuuguguu

SEQ ID NO: 2235600 - RNA, 20 nt, Human
auuauuuguguaauagaaaa

SEQ ID NO: 2235601 - RNA, 23 nt, Human
auuauuuguguaauagaaaacug

SEQ ID NO: 2235602 - RNA, 13 nt, Human
auuauuuuaaaag

SEQ ID NO: 2235603 - RNA, 15 nt, Human
auuauuuguguuuua

SEQ ID NO: 2235604 - RNA, 22 nt, Human
auuauuuguguuuuaauuuaaa

SEQ ID NO: 2235605 - RNA, 23 nt, Human
auuauuuauuaaaugcccagccc

SEQ ID NO: 2235606 - RNA, 13 nt, Human
auuauucugcagc

SEQ ID NO: 2235607 - RNA, 16 nt, Human
auuauucugauuccac

SEQ ID NO: 2235608 - RNA, 12 nt, Human
auuauucuugua

SEQ ID NO: 2235609 - RNA, 13 nt, Human
auuauucuuguag

SEQ ID NO: 2235610 - RNA, 12 nt, Human
auuauugaaauu

SEQ ID NO: 2235611 - RNA, 13 nt, Human
auuauuuaauaac

SEQ ID NO: 2235612 - RNA, 14 nt, Human
auuauuuaauaaca

SEQ ID NO: 2235613 - RNA, 15 nt, Human
auuauuuaauaacau

SEQ ID NO: 2235614 - RNA, 18 nt, Human
auuauuuaauaacauuac

SEQ ID NO: 2235615 - RNA, 16 nt, Human
auuauuuauauaugua

SEQ ID NO: 2235616 - RNA, 21 nt, Human
auuauuuaauaacauuaccuu

SEQ ID NO: 2235617 - RNA, 22 nt, Human
auuauuuaauaacauuaccuua

SEQ ID NO: 2235618 - RNA, 22 nt, Human
auuauucccuguacaauauuua

SEQ ID NO: 2235619 - RNA, 21 nt, Human
auuauucccuguacaauauuu

SEQ ID NO: 2235620 - RNA, 17 nt, Human
auuauucccuguacaau

SEQ ID NO: 2235621 - RNA, 12 nt, Human
auuauucccucu

SEQ ID NO: 2235622 - RNA, 21 nt, Human
auuauucauuuaaaaugauua

SEQ ID NO: 2235623 - RNA, 20 nt, Human
auuauucauuuaaaaugauu

SEQ ID NO: 2235624 - RNA, 15 nt, Human
auuauuccagaucug

SEQ ID NO: 2235625 - RNA, 13 nt, Human
auuauucauuuaa

SEQ ID NO: 2235626 - RNA, 14 nt, Human
auuauucauuuaaa

SEQ ID NO: 2235627 - RNA, 15 nt, Human
auuauucauuuaaaa

SEQ ID NO: 2235628 - RNA, 16 nt, Human
auuauucauuuaaaau

SEQ ID NO: 2235629 - RNA, 18 nt, Human
auuauucauuuaaaauga

SEQ ID NO: 2235630 - RNA, 19 nt, Human
auuauucauuuaaaaugau

SEQ ID NO: 2235631 - RNA, 22 nt, Human
auuauuaaugaaaauaagaauu

SEQ ID NO: 2235632 - RNA, 20 nt, Human
auuauuaccuuacagaaguu

SEQ ID NO: 2235633 - RNA, 13 nt, Human
auguuuauuuaua

SEQ ID NO: 2235634 - RNA, 21 nt, Human
auguuuauuuauucugcauuu

SEQ ID NO: 2235635 - RNA, 17 nt, Human
auguuuauuuacuaauu

SEQ ID NO: 2235636 - RNA, 18 nt, Human
auguuucaaacauauaua

SEQ ID NO: 2235637 - RNA, 14 nt, Human
auguuuuccaugag

SEQ ID NO: 2235638 - RNA, 21 nt, Human
auguuucaaacauauauaaca

SEQ ID NO: 2235639 - RNA, 22 nt, Human
auguuuacagguggacacacaa

SEQ ID NO: 2235640 - RNA, 22 nt, Human
auguuuacacucuuuguaagag

SEQ ID NO: 2235641 - RNA, 19 nt, Human
auguuuacagaggacagua

SEQ ID NO: 2235642 - RNA, 17 nt, Human
auguuuacagaggacag

SEQ ID NO: 2235643 - RNA, 15 nt, Human
auguuuacagaggac

SEQ ID NO: 2235644 - RNA, 14 nt, Human
auguuuaguaaacu

SEQ ID NO: 2235645 - RNA, 18 nt, Human
auguuuaccuuuuaauua

SEQ ID NO: 2235646 - RNA, 19 nt, Human
auguuuaccuuuuaauuaa

SEQ ID NO: 2235647 - RNA, 21 nt, Human
auguuuacagggagccuccug

SEQ ID NO: 2235648 - RNA, 13 nt, Human
auguuuacauauc

SEQ ID NO: 2235649 - RNA, 20 nt, Human
auguuuacauaucaccucau

SEQ ID NO: 2235650 - RNA, 15 nt, Human
auguuuaccuuuuaa

SEQ ID NO: 2235651 - RNA, 21 nt, Human
auguuguguuucuguucaccu

SEQ ID NO: 2235652 - RNA, 16 nt, Human
auguuguguucuaaua

SEQ ID NO: 2235653 - RNA, 15 nt, Human
auguugugauguauu

SEQ ID NO: 2235654 - RNA, 18 nt, Human
auguuguaaacaggaagc

SEQ ID NO: 2235655 - RNA, 22 nt, Human
auguuguccaauuguugacagu

SEQ ID NO: 2235656 - RNA, 14 nt, Human
auguugucaaagag

SEQ ID NO: 2235657 - RNA, 15 nt, Human
auguugucaaagaga

SEQ ID NO: 2235658 - RNA, 13 nt, Human
auguugucaaaga

SEQ ID NO: 2235659 - RNA, 20 nt, Human
uuuucuccaauaucagugcu

SEQ ID NO: 2235660 - RNA, 21 nt, Human
uuuucuccaauaucagugcuc

SEQ ID NO: 2235661 - RNA, 12 nt, Human
uuuucucagcug

SEQ ID NO: 2235662 - RNA, 19 nt, Human
uuuucucaaaguuuugaaa

SEQ ID NO: 2235663 - RNA, 20 nt, Human
uuuucucaaaguuuugaaaa

SEQ ID NO: 2235664 - RNA, 15 nt, Human
uuuucucaaaguuuu

SEQ ID NO: 2235665 - RNA, 23 nt, Human
uuuucucaaaguuuugaaaagcu

SEQ ID NO: 2235666 - RNA, 23 nt, Human
uuuucuauuguuacucugguucu

SEQ ID NO: 2235667 - RNA, 17 nt, Human
auguuuuuguguauuug

SEQ ID NO: 2235668 - RNA, 19 nt, Human
auguuuuuguucaaagcca

SEQ ID NO: 2235669 - RNA, 19 nt, Human
auguuuuugaaggcagaaa

SEQ ID NO: 2235670 - RNA, 15 nt, Human
auguuuuugaaggca

SEQ ID NO: 2235671 - RNA, 21 nt, Human
auguuuuugaaggcagaaagc

SEQ ID NO: 2235672 - RNA, 18 nt, Human
auguuuuucuucucccuc

SEQ ID NO: 2235673 - RNA, 14 nt, Human
auguuuuugaaggc

SEQ ID NO: 2235674 - RNA, 12 nt, Human
auguuuuugaag

SEQ ID NO: 2235675 - RNA, 12 nt, Human
auguuuugauaa

SEQ ID NO: 2235676 - RNA, 18 nt, Human
auguuuugauaaaguagu

SEQ ID NO: 2235677 - RNA, 20 nt, Human
auguuuugauaaaguaguaa

SEQ ID NO: 2235678 - RNA, 17 nt, Human
auguuuuugaaacagaa

SEQ ID NO: 2235679 - RNA, 18 nt, Human
auguuuucuuugcuuuaa

SEQ ID NO: 2235680 - RNA, 12 nt, Human
auguuuugacau

SEQ ID NO: 2235681 - RNA, 14 nt, Human
auguuuugacauuu

SEQ ID NO: 2235682 - RNA, 16 nt, Human
auguuuugacauuuuu

SEQ ID NO: 2235683 - RNA, 17 nt, Human
auguuuuucuucucccu

SEQ ID NO: 2235684 - RNA, 23 nt, Human
auguuuuccuuugucaucauugu

SEQ ID NO: 2235685 - RNA, 19 nt, Human
auguuuuccagcuccucau

SEQ ID NO: 2235686 - RNA, 16 nt, Human
auguuuuccauuguuu

SEQ ID NO: 2235687 - RNA, 20 nt, Human
auguuuuccauuguuugaaa

SEQ ID NO: 2235688 - RNA, 18 nt, Human
auguuuucugaaaauaua

SEQ ID NO: 2235689 - RNA, 20 nt, Human
auguuuucugaaaauauaac

SEQ ID NO: 2235690 - RNA, 21 nt, Human
auguuuucugaaaauauaacc

SEQ ID NO: 2235691 - RNA, 19 nt, Human
auuaaaauaaauaaaugca

SEQ ID NO: 2235692 - RNA, 22 nt, Human
auuaaaagggauuacccaagca

SEQ ID NO: 2235693 - RNA, 21 nt, Human
auuaaaaauauggaacuucua

SEQ ID NO: 2235694 - RNA, 14 nt, Human
auuaaaagaauuuu

SEQ ID NO: 2235695 - RNA, 16 nt, Human
auuaaaagaauauuuu

SEQ ID NO: 2235696 - RNA, 12 nt, Human
auuaaaaaauuu

SEQ ID NO: 2235697 - RNA, 21 nt, Human
auguuuugauaaaguaguaaa

SEQ ID NO: 2235698 - RNA, 21 nt, Human
auguuuuuguuuucuuugaau

SEQ ID NO: 2235699 - RNA, 17 nt, Human
auuaaaaaauuuccagu

SEQ ID NO: 2235700 - RNA, 12 nt, Human
auuaaaaauaua

SEQ ID NO: 2235701 - RNA, 13 nt, Human
auuaaaaauauaa

SEQ ID NO: 2235702 - RNA, 15 nt, Human
auuaaaaauauaaaa

SEQ ID NO: 2235703 - RNA, 14 nt, Human
auuaaaaauaugga

SEQ ID NO: 2235704 - RNA, 16 nt, Human
auuaaaaauauaaaac

SEQ ID NO: 2235705 - RNA, 17 nt, Human
auuaaaaauauaaaacu

SEQ ID NO: 2235706 - RNA, 14 nt, Human
auuaagaaagacua

SEQ ID NO: 2235707 - RNA, 13 nt, Human
auuaagaaagacu

SEQ ID NO: 2235708 - RNA, 18 nt, Human
auuaacuucucuggaaag

SEQ ID NO: 2235709 - RNA, 12 nt, Human
auuaagaaaauc

SEQ ID NO: 2235710 - RNA, 13 nt, Human
auuaagaaaauca

SEQ ID NO: 2235711 - RNA, 14 nt, Human
auuaagaaaaucau

SEQ ID NO: 2235712 - RNA, 23 nt, Human
auuaacuuuuauaaacuuuaccu

SEQ ID NO: 2235713 - RNA, 14 nt, Human
auuaagaagaaacu

SEQ ID NO: 2235714 - RNA, 20 nt, Human
auuaagaacacuuuuaauaa

SEQ ID NO: 2235715 - RNA, 15 nt, Human
auuaagaaaaucuau

SEQ ID NO: 2235716 - RNA, 15 nt, Human
auuaagaaaaucaua

SEQ ID NO: 2235717 - RNA, 16 nt, Human
auuaagaaaaucauau

SEQ ID NO: 2235718 - RNA, 20 nt, Human
auuaagaaaaucauauugcu

SEQ ID NO: 2235719 - RNA, 22 nt, Human
auuaagaaggcaaaaauguaaa

SEQ ID NO: 2235720 - RNA, 19 nt, Human
auuaagaaggcaaaaaugu

SEQ ID NO: 2235721 - RNA, 15 nt, Human
auuaagaaggcaaaa

SEQ ID NO: 2235722 - RNA, 22 nt, Human
auuaagaaugaaauacuguuug

SEQ ID NO: 2235723 - RNA, 21 nt, Human
auuaagaaugaaauacuguuu

SEQ ID NO: 2235724 - RNA, 20 nt, Human
auuaagaaugaaauacuguu

SEQ ID NO: 2235725 - RNA, 16 nt, Human
auuaagaaugaaauac

SEQ ID NO: 2235726 - RNA, 15 nt, Human
auuaacuuagcaugu

SEQ ID NO: 2235727 - RNA, 12 nt, Human
auuaacuuuuau

SEQ ID NO: 2235728 - RNA, 17 nt, Human
auuaaccuggugcugga

SEQ ID NO: 2235729 - RNA, 14 nt, Human
auuaaccuggugcu

SEQ ID NO: 2235730 - RNA, 22 nt, Human
auuaaccugccagggagacaga

SEQ ID NO: 2235731 - RNA, 14 nt, Human
auuaaccucugcac

SEQ ID NO: 2235732 - RNA, 17 nt, Human
auuaacuaaucuauugg

SEQ ID NO: 2235733 - RNA, 16 nt, Human
auuaaccuggugcugg

SEQ ID NO: 2235734 - RNA, 20 nt, Human
auuaacuuuuauaaacuuua

SEQ ID NO: 2235735 - RNA, 19 nt, Human
auuaacuuuuauaaacuuu

SEQ ID NO: 2235736 - RNA, 17 nt, Human
auuaacuuuuauaaacu

SEQ ID NO: 2235737 - RNA, 16 nt, Human
auuaacuuuuauaaac

SEQ ID NO: 2235738 - RNA, 18 nt, Human
auuaaagcuaaaguaucu

SEQ ID NO: 2235739 - RNA, 14 nt, Human
auuaaaggaauaaa

SEQ ID NO: 2235740 - RNA, 17 nt, Human
auuaaagcuaaaguauc

SEQ ID NO: 2235741 - RNA, 16 nt, Human
auuaaaggcuucucuc

SEQ ID NO: 2235742 - RNA, 20 nt, Human
auuaaaggcuucucucucac

SEQ ID NO: 2235743 - RNA, 18 nt, Human
auuaaagugauacugaaa

SEQ ID NO: 2235744 - RNA, 21 nt, Human
auuaaacuuaaucuaaaugga

SEQ ID NO: 2235745 - RNA, 19 nt, Human
auuaaacuuaaucuaaaug

SEQ ID NO: 2235746 - RNA, 16 nt, Human
auuaaacuuaaucuaa

SEQ ID NO: 2235747 - RNA, 17 nt, Human
auuaaacuuaaucuaaa

SEQ ID NO: 2235748 - RNA, 21 nt, Human
auuaacauugggaaaucuuau

SEQ ID NO: 2235749 - RNA, 19 nt, Human
auuaacauugggaaaucuu

SEQ ID NO: 2235750 - RNA, 19 nt, Human
auuaaaggcuucucucuca

SEQ ID NO: 2235751 - RNA, 17 nt, Human
auuaaccacuucagcug

SEQ ID NO: 2235752 - RNA, 20 nt, Human
auuaaccacuucagcugacu

SEQ ID NO: 2235753 - RNA, 18 nt, Human
auuaaccacuucagcuga

SEQ ID NO: 2235754 - RNA, 15 nt, Human
auuaaccauagaugu

SEQ ID NO: 2235755 - RNA, 18 nt, Human
auuaaccagaaauccagu

SEQ ID NO: 2235756 - RNA, 22 nt, Human
auuaacauugggaaaucuuaua

SEQ ID NO: 2235757 - RNA, 17 nt, Human
auuaaccaaaaaaguua

SEQ ID NO: 2235758 - RNA, 19 nt, Human
auuaaccaaaaaaguuaca

SEQ ID NO: 2235759 - RNA, 13 nt, Human
auuaaccucucac

SEQ ID NO: 2235760 - RNA, 13 nt, Human
auuaaccucugca

SEQ ID NO: 2235761 - RNA, 19 nt, Human
uuuuaugccuuuuauuucu

SEQ ID NO: 2235762 - RNA, 18 nt, Human
uuuuaugcuuuaaacauu

SEQ ID NO: 2235763 - RNA, 14 nt, Human
uuuuauaauuuugu

SEQ ID NO: 2235764 - RNA, 20 nt, Human
uuuuauaaaucgcuuuugau

SEQ ID NO: 2235765 - RNA, 12 nt, Human
uuuuauaaaucg

SEQ ID NO: 2235766 - RNA, 19 nt, Human
uuuuauaaaccucuaauuu

SEQ ID NO: 2235767 - RNA, 20 nt, Human
uuuuauaacuaguccuuuac

SEQ ID NO: 2235768 - RNA, 16 nt, Human
uuuuauaaaaaauggu

SEQ ID NO: 2235769 - RNA, 19 nt, Human
uuuuauaaacuuuaccuuu

SEQ ID NO: 2235770 - RNA, 17 nt, Human
uuuuauaaacuuuaccu

SEQ ID NO: 2235771 - RNA, 14 nt, Human
uuuuauaaacuuua

SEQ ID NO: 2235772 - RNA, 23 nt, Human
uuuuauaauaaaaggaaaagcaa

SEQ ID NO: 2235773 - RNA, 18 nt, Human
uuuuaugugaaacauguu

SEQ ID NO: 2235774 - RNA, 19 nt, Human
uuuuauggcacuaguauuu

SEQ ID NO: 2235775 - RNA, 23 nt, Human
uuuuauggaggcuuugcauagau

SEQ ID NO: 2235776 - RNA, 18 nt, Human
uuuuaugugagagaaagu

SEQ ID NO: 2235777 - RNA, 19 nt, Human
uuuuauguaguaauugaca

SEQ ID NO: 2235778 - RNA, 19 nt, Human
uuuuaugugaaacauguuu

SEQ ID NO: 2235779 - RNA, 22 nt, Human
uuuuauguugcauagaauaaaa

SEQ ID NO: 2235780 - RNA, 18 nt, Human
uuuuccaugaaaaugcaa

SEQ ID NO: 2235781 - RNA, 19 nt, Human
uuuuccaugaaaaugcaac

SEQ ID NO: 2235782 - RNA, 16 nt, Human
uuuuccaugaaaacgu

SEQ ID NO: 2235783 - RNA, 14 nt, Human
uuuuccaugaaaac

SEQ ID NO: 2235784 - RNA, 11 nt, Human
uuuuccaugaa

SEQ ID NO: 2235785 - RNA, 14 nt, Human
uuuuccauaaagaa

SEQ ID NO: 2235786 - RNA, 19 nt, Human
uuuuccagguuuaagcugu

SEQ ID NO: 2235787 - RNA, 13 nt, Human
uuuuccaggcugg

SEQ ID NO: 2235788 - RNA, 21 nt, Human
uuuucauucagguauuuguaa

SEQ ID NO: 2235789 - RNA, 14 nt, Human
uuuucaugugugau

SEQ ID NO: 2235790 - RNA, 21 nt, Human
uuuucauggugaaaauguacu

SEQ ID NO: 2235791 - RNA, 16 nt, Human
uuuucauguuuuaaca

SEQ ID NO: 2235792 - RNA, 12 nt, Human
uuuucauguuuu

SEQ ID NO: 2235793 - RNA, 20 nt, Human
uuuucauguuuuaacaaaaa

SEQ ID NO: 2235794 - RNA, 19 nt, Human
uuuucauguuuuaacaaaa

SEQ ID NO: 2235795 - RNA, 19 nt, Human
uuuucagcccauauuucau

SEQ ID NO: 2235796 - RNA, 19 nt, Human
uuuucagcaaacucuuuuc

SEQ ID NO: 2235797 - RNA, 18 nt, Human
uuuucauggugaaaaugu

SEQ ID NO: 2235798 - RNA, 18 nt, Human
uuuucagcgauguaugca

SEQ ID NO: 2235799 - RNA, 18 nt, Human
uuuucagcaaacucuuuu

SEQ ID NO: 2235800 - RNA, 22 nt, Human
uuuucagauauaaaagacugac

SEQ ID NO: 2235801 - RNA, 20 nt, Human
uuuuauucauaagccaauuu

SEQ ID NO: 2235802 - RNA, 19 nt, Human
uuuucagauauaaaagacu

SEQ ID NO: 2235803 - RNA, 21 nt, Human
uuuucagauauaaaagacuga

SEQ ID NO: 2235804 - RNA, 17 nt, Human
uuuucagauauaaaaga

SEQ ID NO: 2235805 - RNA, 14 nt, Human
uuuuauucaaguua

SEQ ID NO: 2235806 - RNA, 13 nt, Human
uuuuauuauuugu

SEQ ID NO: 2235807 - RNA, 18 nt, Human
uuuuauucauaagccaau

SEQ ID NO: 2235808 - RNA, 21 nt, Human
uuuuauucagcucauggacuu

SEQ ID NO: 2235809 - RNA, 16 nt, Human
uuuuauuauuacuguu

SEQ ID NO: 2235810 - RNA, 16 nt, Human
uuuuagaucaaauacu

SEQ ID NO: 2235811 - RNA, 23 nt, Human
uuuuagaguugauacuacaguuu

SEQ ID NO: 2235812 - RNA, 20 nt, Human
uuuuagaugagauuguuuua

SEQ ID NO: 2235813 - RNA, 17 nt, Human
uuuuagaucaaauacuu

SEQ ID NO: 2235814 - RNA, 19 nt, Human
uuuuagaucaaauacuuua

SEQ ID NO: 2235815 - RNA, 19 nt, Human
uuuuagaugagauuguuuu

SEQ ID NO: 2235816 - RNA, 19 nt, Human
uuuuagccuaguucaucca

SEQ ID NO: 2235817 - RNA, 22 nt, Human
uuuuagcauguguuugguucug

SEQ ID NO: 2235818 - RNA, 16 nt, Human
uuuuagccuucucugu

SEQ ID NO: 2235819 - RNA, 23 nt, Human
uuuuagccuucucuguucauuuc

SEQ ID NO: 2235820 - RNA, 19 nt, Human
uuuuagcuccuugacuccu

SEQ ID NO: 2235821 - RNA, 20 nt, Human
uuuuagcugaugaacuuauu

SEQ ID NO: 2235822 - RNA, 21 nt, Human
uuuuagcaauuuauacaauau

SEQ ID NO: 2235823 - RNA, 23 nt, Human
uuuuagcaaagauaucucaucuc

SEQ ID NO: 2235824 - RNA, 11 nt, Human
uuuuagcaugu

SEQ ID NO: 2235825 - RNA, 13 nt, Human
uuuuaguuuuagu

SEQ ID NO: 2235826 - RNA, 22 nt, Human
uuuuaguuucuguucuguggaa

SEQ ID NO: 2235827 - RNA, 20 nt, Human
uuuuaguuucuguucugugg

SEQ ID NO: 2235828 - RNA, 21 nt, Human
uuuuaguuucuguucugugga

SEQ ID NO: 2235829 - RNA, 19 nt, Human
uuuuaguugcaacuuugua

SEQ ID NO: 2235830 - RNA, 20 nt, Human
uuuuaguuuaaaaaccuugu

SEQ ID NO: 2235831 - RNA, 18 nt, Human
uuuuaguuucuguucugu

SEQ ID NO: 2235832 - RNA, 19 nt, Human
uuuuaguuucuguucugug

SEQ ID NO: 2235833 - RNA, 13 nt, Human
uuuuauaaacuuu

SEQ ID NO: 2235834 - RNA, 12 nt, Human
uuuuauaaacuu

SEQ ID NO: 2235835 - RNA, 20 nt, Human
auguugagggaacagacagg

SEQ ID NO: 2235836 - RNA, 14 nt, Human
auguugagggaaca

SEQ ID NO: 2235837 - RNA, 18 nt, Human
auguugagccaggccugg

SEQ ID NO: 2235838 - RNA, 22 nt, Human
auguugagaaucccaaauuuga

SEQ ID NO: 2235839 - RNA, 16 nt, Human
auguugagaaucccaa

SEQ ID NO: 2235840 - RNA, 22 nt, Human
auguugaaugcccacaggcaaa

SEQ ID NO: 2235841 - RNA, 16 nt, Human
auguuggccaggcugg

SEQ ID NO: 2235842 - RNA, 16 nt, Human
auguuggccaggcugc

SEQ ID NO: 2235843 - RNA, 22 nt, Human
auguugcacacccacucagcuc

SEQ ID NO: 2235844 - RNA, 21 nt, Human
auguugcacacccacucagcu

SEQ ID NO: 2235845 - RNA, 13 nt, Human
auguuggccaggc

SEQ ID NO: 2235846 - RNA, 14 nt, Human
auguuggccaggcu

SEQ ID NO: 2235847 - RNA, 21 nt, Human
uuuuaaguuacacauuuuuca

SEQ ID NO: 2235848 - RNA, 22 nt, Human
uuuuaaguuacacauuuuucag

SEQ ID NO: 2235849 - RNA, 14 nt, Human
uuuuaaguugcuga

SEQ ID NO: 2235850 - RNA, 19 nt, Human
uuuuaaguauuuauauauu

SEQ ID NO: 2235851 - RNA, 19 nt, Human
uuuuaagugcuuuguaaug

SEQ ID NO: 2235852 - RNA, 17 nt, Human
uuuuaagugcuuuguaa

SEQ ID NO: 2235853 - RNA, 21 nt, Human
uuuuaagugcugcauuuaaaa

SEQ ID NO: 2235854 - RNA, 17 nt, Human
uuuuaagugcugcauuu

SEQ ID NO: 2235855 - RNA, 16 nt, Human
uuuuaagugcugcauu

SEQ ID NO: 2235856 - RNA, 23 nt, Human
auguucauuguaauguuacugau

SEQ ID NO: 2235857 - RNA, 15 nt, Human
auguuccaauaaaca

SEQ ID NO: 2235858 - RNA, 11 nt, Human
auguucauuua

SEQ ID NO: 2235859 - RNA, 22 nt, Human
auguucauuguaauguuacuga

SEQ ID NO: 2235860 - RNA, 21 nt, Human
auguucauuguaauguuacug

SEQ ID NO: 2235861 - RNA, 14 nt, Human
auguucauuguaau

SEQ ID NO: 2235862 - RNA, 19 nt, Human
auguucaucccaugaugua

SEQ ID NO: 2235863 - RNA, 15 nt, Human
auguugaagccuuug

SEQ ID NO: 2235864 - RNA, 16 nt, Human
auguugaagccuuugu

SEQ ID NO: 2235865 - RNA, 19 nt, Human
auguugaauacuuuuuaca

SEQ ID NO: 2235866 - RNA, 15 nt, Human
auguugaauacuuuu

SEQ ID NO: 2235867 - RNA, 14 nt, Human
auguugaauacuuu

SEQ ID NO: 2235868 - RNA, 16 nt, Human
auguuccaauaaacag

SEQ ID NO: 2235869 - RNA, 18 nt, Human
auguuccaauaaacagga

SEQ ID NO: 2235870 - RNA, 15 nt, Human
auguugacaugggac

SEQ ID NO: 2235871 - RNA, 21 nt, Human
auguucaucauccuaagcuau

SEQ ID NO: 2235872 - RNA, 19 nt, Human
auguucaucaaugaaugaa

SEQ ID NO: 2235873 - RNA, 13 nt, Human
auguuauauauuu

SEQ ID NO: 2235874 - RNA, 17 nt, Human
auguuauauauuuuuug

SEQ ID NO: 2235875 - RNA, 13 nt, Human
uuuguuugugcau

SEQ ID NO: 2235876 - RNA, 15 nt, Human
uuuguuugcuaucuu

SEQ ID NO: 2235877 - RNA, 12 nt, Human
uuuguuugugcu

SEQ ID NO: 2235878 - RNA, 15 nt, Human
uuuguuugugcuucu

SEQ ID NO: 2235879 - RNA, 16 nt, Human
uuuguuugugcuucua

SEQ ID NO: 2235880 - RNA, 13 nt, Human
uuuuaaaaaagaa

SEQ ID NO: 2235881 - RNA, 18 nt, Human
uuuguuugaacugauaaa

SEQ ID NO: 2235882 - RNA, 15 nt, Human
uuuguuugguauugu

SEQ ID NO: 2235883 - RNA, 13 nt, Human
uuuguuugcuauc

SEQ ID NO: 2235884 - RNA, 16 nt, Human
uuuguuugguauugua

SEQ ID NO: 2235885 - RNA, 18 nt, Human
uuuguuugguauuguauu

SEQ ID NO: 2235886 - RNA, 22 nt, Human
uuuuaaaaagaaacaagaugcu

SEQ ID NO: 2235887 - RNA, 23 nt, Human
uuuuaaaaaucauaaacugugug

SEQ ID NO: 2235888 - RNA, 22 nt, Human
uuuuaaaaaucuaccuucugua

SEQ ID NO: 2235889 - RNA, 12 nt, Human
uuuuaaaaauga

SEQ ID NO: 2235890 - RNA, 22 nt, Human
uuuuaaaaaucauaaacugugu

SEQ ID NO: 2235891 - RNA, 15 nt, Human
uuuuaaaaaucauaa

SEQ ID NO: 2235892 - RNA, 17 nt, Human
uuuuaaaaauagacacu

SEQ ID NO: 2235893 - RNA, 14 nt, Human
uuuuaaaaaugcaa

SEQ ID NO: 2235894 - RNA, 16 nt, Human
uuuuaaaaaugaaauu

SEQ ID NO: 2235895 - RNA, 14 nt, Human
uuuuaaaaaugaau

SEQ ID NO: 2235896 - RNA, 22 nt, Human
uuuuaaaaauuaaaucaaccuu

SEQ ID NO: 2235897 - RNA, 20 nt, Human
uuuuaaaaauuguuaauuuu

SEQ ID NO: 2235898 - RNA, 15 nt, Human
uuuuaaaaaugaauc

SEQ ID NO: 2235899 - RNA, 16 nt, Human
uuuuaaaacacuucca

SEQ ID NO: 2235900 - RNA, 22 nt, Human
uuuuaaaacacuuccauaaucu

SEQ ID NO: 2235901 - RNA, 13 nt, Human
uuuuaaaacccag

SEQ ID NO: 2235902 - RNA, 17 nt, Human
uuuuaacaccugaugug

SEQ ID NO: 2235903 - RNA, 19 nt, Human
uuuuaacaccugaugugua

SEQ ID NO: 2235904 - RNA, 20 nt, Human
uuuuaacaccugauguguac

SEQ ID NO: 2235905 - RNA, 12 nt, Human
uuuuaaccaaag

SEQ ID NO: 2235906 - RNA, 22 nt, Human
uuuuaacaauaacuacuguguu

SEQ ID NO: 2235907 - RNA, 21 nt, Human
uuuuaacaauaacuacugugu

SEQ ID NO: 2235908 - RNA, 14 nt, Human
uuuuaaaagaauga

SEQ ID NO: 2235909 - RNA, 15 nt, Human
uuuuaaaagaaugau

SEQ ID NO: 2235910 - RNA, 19 nt, Human
uuuuaagacguguuugugu

SEQ ID NO: 2235911 - RNA, 22 nt, Human
uuuuaagauaaauuauaaguua

SEQ ID NO: 2235912 - RNA, 16 nt, Human
uuuuaagaggcagggu

SEQ ID NO: 2235913 - RNA, 15 nt, Human
uuuuaagaggcaggg

SEQ ID NO: 2235914 - RNA, 11 nt, Human
uuuuaagaaau

SEQ ID NO: 2235915 - RNA, 21 nt, Human
uuuuaaccauugucuuguucu

SEQ ID NO: 2235916 - RNA, 14 nt, Human
uuuuaaccaaaggu

SEQ ID NO: 2235917 - RNA, 15 nt, Human
uuuuaaccaaaggug

SEQ ID NO: 2235918 - RNA, 16 nt, Human
uuuuaaccaaagguga

SEQ ID NO: 2235919 - RNA, 21 nt, Human
uuuuaaccaaaggugaaggaa

SEQ ID NO: 2235920 - RNA, 12 nt, Human
uuuuaacuagaa

SEQ ID NO: 2235921 - RNA, 13 nt, Human
uuuuaacucaaua

SEQ ID NO: 2235922 - RNA, 16 nt, Human
uuuuaacuagaauuua

SEQ ID NO: 2235923 - RNA, 12 nt, Human
uuuuaacucacc

SEQ ID NO: 2235924 - RNA, 14 nt, Human
uuuuaacucugucu

SEQ ID NO: 2235925 - RNA, 16 nt, Human
uuuuaacuuuaaguuu

SEQ ID NO: 2235926 - RNA, 19 nt, Human
uuuuaacuuuaaguuucag

SEQ ID NO: 2235927 - RNA, 18 nt, Human
uuuuaaguauuuauauau

SEQ ID NO: 2235928 - RNA, 17 nt, Human
uuuuaaguauuuauaua

SEQ ID NO: 2235929 - RNA, 15 nt, Human
uuuuaaguauuuagg

SEQ ID NO: 2235930 - RNA, 21 nt, Human
uuuuaaguauugcaucuguau

SEQ ID NO: 2235931 - RNA, 15 nt, Human
uuuuaagugcugcau

SEQ ID NO: 2235932 - RNA, 23 nt, Human
uuuuaaggguuuguggaaaauga

SEQ ID NO: 2235933 - RNA, 16 nt, Human
uuuuaaguaaggaauu

SEQ ID NO: 2235934 - RNA, 12 nt, Human
uuuuaagcuguu

SEQ ID NO: 2235935 - RNA, 12 nt, Human
uuuuaaggaaac

SEQ ID NO: 2235936 - RNA, 21 nt, Human
uuuuaagcguaauuuugccaa

SEQ ID NO: 2235937 - RNA, 22 nt, Human
uuuuaagcuguaaaaagagaga

SEQ ID NO: 2235938 - RNA, 20 nt, Human
uuuuaaggguuuguggaaaa

SEQ ID NO: 2235939 - RNA, 12 nt, Human
uuuuaagauuuu

SEQ ID NO: 2235940 - RNA, 21 nt, Human
uuuuaagauaauaauauaugu

SEQ ID NO: 2235941 - RNA, 17 nt, Human
uuuuaagauuuuucuca

SEQ ID NO: 2235942 - RNA, 18 nt, Human
uuuuaagauuuuucucaa

SEQ ID NO: 2235943 - RNA, 19 nt, Human
uuuuaagauuuuucucaaa

SEQ ID NO: 2235944 - RNA, 15 nt, Human
uuuuaagcaaaauau

SEQ ID NO: 2235945 - RNA, 23 nt, Human
uuuuaagcccaucaauuauagaa

SEQ ID NO: 2235946 - RNA, 21 nt, Human
uuuuaagauuuuucucaaagu

SEQ ID NO: 2235947 - RNA, 11 nt, Human
augucugugcu

SEQ ID NO: 2235948 - RNA, 19 nt, Human
augucuguagcuccucaac

SEQ ID NO: 2235949 - RNA, 18 nt, Human
augucuguagcuccucaa

SEQ ID NO: 2235950 - RNA, 16 nt, Human
augucuguagcuccuc

SEQ ID NO: 2235951 - RNA, 13 nt, Human
augucuguuacca

SEQ ID NO: 2235952 - RNA, 12 nt, Human
augucugugcua

SEQ ID NO: 2235953 - RNA, 20 nt, Human
augucugugcuagggaaacu

SEQ ID NO: 2235954 - RNA, 14 nt, Human
augucuguucuaca

SEQ ID NO: 2235955 - RNA, 20 nt, Human
augucuguuaccaugucacu

SEQ ID NO: 2235956 - RNA, 23 nt, Human
augucuguuaccaugucacugug

SEQ ID NO: 2235957 - RNA, 16 nt, Human
augucuguugaugacu

SEQ ID NO: 2235958 - RNA, 12 nt, Human
augucuuaauga

SEQ ID NO: 2235959 - RNA, 16 nt, Human
augucuguucuacaua

SEQ ID NO: 2235960 - RNA, 13 nt, Human
augucuuaaugaa

SEQ ID NO: 2235961 - RNA, 16 nt, Human
augucuuaaugaaguu

SEQ ID NO: 2235962 - RNA, 18 nt, Human
augucuuaaugaaguuug

SEQ ID NO: 2235963 - RNA, 20 nt, Human
augucugcugaauaauaaac

SEQ ID NO: 2235964 - RNA, 23 nt, Human
augucugccaauuuuugccuuca

SEQ ID NO: 2235965 - RNA, 15 nt, Human
augucugccacacaa

SEQ ID NO: 2235966 - RNA, 22 nt, Human
augucugagugaaccuguauaa

SEQ ID NO: 2235967 - RNA, 15 nt, Human
augucuauuuaagcc

SEQ ID NO: 2235968 - RNA, 23 nt, Human
augucuauuuaagccucauauuu

SEQ ID NO: 2235969 - RNA, 17 nt, Human
augucugaacucuccag

SEQ ID NO: 2235970 - RNA, 16 nt, Human
augucugagugaaccu

SEQ ID NO: 2235971 - RNA, 15 nt, Human
augucugagugaacc

SEQ ID NO: 2235972 - RNA, 14 nt, Human
augucugcauuucg

SEQ ID NO: 2235973 - RNA, 13 nt, Human
augucugccaauu

SEQ ID NO: 2235974 - RNA, 14 nt, Human
augucugccaauuu

SEQ ID NO: 2235975 - RNA, 16 nt, Human
augucugccaauuuuu

SEQ ID NO: 2235976 - RNA, 21 nt, Human
augucugccaauuuuugccuu

SEQ ID NO: 2235977 - RNA, 14 nt, Human
uuuguaccauggug

SEQ ID NO: 2235978 - RNA, 19 nt, Human
uuuguacauauguaaaaua

SEQ ID NO: 2235979 - RNA, 18 nt, Human
uuuguaaccucagcucug

SEQ ID NO: 2235980 - RNA, 19 nt, Human
uuuguaaccucagcucugg

SEQ ID NO: 2235981 - RNA, 21 nt, Human
uuuguaacccagauuuugcug

SEQ ID NO: 2235982 - RNA, 15 nt, Human
uuuguaaccucagcu

SEQ ID NO: 2235983 - RNA, 16 nt, Human
uuuguaaccucagcuc

SEQ ID NO: 2235984 - RNA, 13 nt, Human
uuuguaaauuguc

SEQ ID NO: 2235985 - RNA, 20 nt, Human
uuuguaacccagauuuugcu

SEQ ID NO: 2235986 - RNA, 17 nt, Human
uuuguaaauuuauguga

SEQ ID NO: 2235987 - RNA, 13 nt, Human
uuuguagagccag

SEQ ID NO: 2235988 - RNA, 16 nt, Human
uuuguacuguaaagag

SEQ ID NO: 2235989 - RNA, 13 nt, Human
uuuguacuguaaa

SEQ ID NO: 2235990 - RNA, 15 nt, Human
uuuguacuguaaaga

SEQ ID NO: 2235991 - RNA, 20 nt, Human
uuuguacuguaaagagaccu

SEQ ID NO: 2235992 - RNA, 17 nt, Human
uuuguaccaugguguga

SEQ ID NO: 2235993 - RNA, 18 nt, Human
uuuguaccccccaacccc

SEQ ID NO: 2235994 - RNA, 15 nt, Human
uuuguacugaaaaau

SEQ ID NO: 2235995 - RNA, 14 nt, Human
uuuguacugaaaaa

SEQ ID NO: 2235996 - RNA, 19 nt, Human
uuuguaccccccaaccccu

SEQ ID NO: 2235997 - RNA, 20 nt, Human
uuuguaccccccaaccccug

SEQ ID NO: 2235998 - RNA, 17 nt, Human
uuuguagccuuccucca

SEQ ID NO: 2235999 - RNA, 19 nt, Human
uuuguaggggucaaagaaa

SEQ ID NO: 2236000 - RNA, 20 nt, Human
uuuguaggggucaaagaaau

SEQ ID NO: 2236001 - RNA, 21 nt, Human
uuuguaggggucaaagaaaug

SEQ ID NO: 2236002 - RNA, 23 nt, Human
uuuguaggggucaaagaaaugcu

SEQ ID NO: 2236003 - RNA, 16 nt, Human
uuugucgaauuuuuau

SEQ ID NO: 2236004 - RNA, 20 nt, Human
uuugucgaauuuuuauuauu

SEQ ID NO: 2236005 - RNA, 19 nt, Human
uuugucgcucaugugugca

SEQ ID NO: 2236006 - RNA, 19 nt, Human
uuugucuaaaacaauaaaa

SEQ ID NO: 2236007 - RNA, 16 nt, Human
uuugucuaaaacaaua

SEQ ID NO: 2236008 - RNA, 14 nt, Human
uuugucuaaaacaa

SEQ ID NO: 2236009 - RNA, 11 nt, Human
uuugucuaaaa

SEQ ID NO: 2236010 - RNA, 17 nt, Human
uuugucugucuucauag

SEQ ID NO: 2236011 - RNA, 20 nt, Human
uuugugacuauauagagaug

SEQ ID NO: 2236012 - RNA, 22 nt, Human
uuugugacuauauagagauguu

SEQ ID NO: 2236013 - RNA, 16 nt, Human
uuugugagcaggcugu

SEQ ID NO: 2236014 - RNA, 14 nt, Human
uuugucugaaaaau

SEQ ID NO: 2236015 - RNA, 14 nt, Human
uuugucucauccca

SEQ ID NO: 2236016 - RNA, 19 nt, Human
uuugucucaucccauucug

SEQ ID NO: 2236017 - RNA, 15 nt, Human
uuugucuaaaaugcc

SEQ ID NO: 2236018 - RNA, 23 nt, Human
uuugugacuauauagagauguuu

SEQ ID NO: 2236019 - RNA, 18 nt, Human
uuugugaggaagccgcug

SEQ ID NO: 2236020 - RNA, 19 nt, Human
uuugugaggaagccgcugg

SEQ ID NO: 2236021 - RNA, 16 nt, Human
uuuguuucuuccaaag

SEQ ID NO: 2236022 - RNA, 12 nt, Human
uuuguuugaacu

SEQ ID NO: 2236023 - RNA, 14 nt, Human
uuuguuugaacuga

SEQ ID NO: 2236024 - RNA, 13 nt, Human
uuuguuugaacug

SEQ ID NO: 2236025 - RNA, 14 nt, Human
auguagugccucuu

SEQ ID NO: 2236026 - RNA, 16 nt, Human
auguagugccucuuuc

SEQ ID NO: 2236027 - RNA, 22 nt, Human
uuugggggaaaauuuagaaaua

SEQ ID NO: 2236028 - RNA, 13 nt, Human
auguaucaggaaa

SEQ ID NO: 2236029 - RNA, 21 nt, Human
auguaucaggaaauauauaug

SEQ ID NO: 2236030 - RNA, 16 nt, Human
auguaucauagaaaug

SEQ ID NO: 2236031 - RNA, 20 nt, Human
auguauccaugggggcaggg

SEQ ID NO: 2236032 - RNA, 12 nt, Human
auguaucaucug

SEQ ID NO: 2236033 - RNA, 17 nt, Human
auguaucauagaaaugu

SEQ ID NO: 2236034 - RNA, 17 nt, Human
auguauaaagaacaagg

SEQ ID NO: 2236035 - RNA, 21 nt, Human
auguauaaagcaacuguuaug

SEQ ID NO: 2236036 - RNA, 22 nt, Human
auguauaaagcaacuguuauga

SEQ ID NO: 2236037 - RNA, 15 nt, Human
auguaucaaugagua

SEQ ID NO: 2236038 - RNA, 23 nt, Human
augucaggggcggggagggugac

SEQ ID NO: 2236039 - RNA, 12 nt, Human
augucaggccug

SEQ ID NO: 2236040 - RNA, 16 nt, Human
augucaggccugugug

SEQ ID NO: 2236041 - RNA, 13 nt, Human
augucaguaugug

SEQ ID NO: 2236042 - RNA, 20 nt, Human
augucaggaacagaaggaug

SEQ ID NO: 2236043 - RNA, 19 nt, Human
augucaggaacagaaggau

SEQ ID NO: 2236044 - RNA, 17 nt, Human
augucaggaacagaagg

SEQ ID NO: 2236045 - RNA, 15 nt, Human
augucaggaacagaa

SEQ ID NO: 2236046 - RNA, 12 nt, Human
auguauguguaa

SEQ ID NO: 2236047 - RNA, 19 nt, Human
augucagccgagccgggcc

SEQ ID NO: 2236048 - RNA, 23 nt, Human
augucagccgagccgggccuggg

SEQ ID NO: 2236049 - RNA, 20 nt, Human
auguaugugcacugucacuu

SEQ ID NO: 2236050 - RNA, 15 nt, Human
auguaugugcacugu

SEQ ID NO: 2236051 - RNA, 16 nt, Human
auguaugugcacuguc

SEQ ID NO: 2236052 - RNA, 17 nt, Human
auguaugugcacuguca

SEQ ID NO: 2236053 - RNA, 21 nt, Human
auguauggaauacaguguuau

SEQ ID NO: 2236054 - RNA, 20 nt, Human
auguauggaauacaguguua

SEQ ID NO: 2236055 - RNA, 18 nt, Human
auguauggaauacagugu

SEQ ID NO: 2236056 - RNA, 20 nt, Human
auguaugcuucauacaggga

SEQ ID NO: 2236057 - RNA, 15 nt, Human
auguaucugagcagg

SEQ ID NO: 2236058 - RNA, 15 nt, Human
auguaucuaccucac

SEQ ID NO: 2236059 - RNA, 17 nt, Human
auguaugcuucauacag

SEQ ID NO: 2236060 - RNA, 20 nt, Human
auguccacagaugccuccac

SEQ ID NO: 2236061 - RNA, 16 nt, Human
auguccacagaugccu

SEQ ID NO: 2236062 - RNA, 23 nt, Human
auguccaagaagcccaggaaagg

SEQ ID NO: 2236063 - RNA, 19 nt, Human
auguccaagaagcccagga

SEQ ID NO: 2236064 - RNA, 18 nt, Human
auguccaagaagcccagg

SEQ ID NO: 2236065 - RNA, 21 nt, Human
augucagugugacugaucucu

SEQ ID NO: 2236066 - RNA, 14 nt, Human
augucaguaugugg

SEQ ID NO: 2236067 - RNA, 17 nt, Human
augucaguaccuucaaa

SEQ ID NO: 2236068 - RNA, 15 nt, Human
augucagugugacug

SEQ ID NO: 2236069 - RNA, 16 nt, Human
augucagugugacuga

SEQ ID NO: 2236070 - RNA, 20 nt, Human
augucucaauaguaaaagau

SEQ ID NO: 2236071 - RNA, 17 nt, Human
augucuauuaaggugau

SEQ ID NO: 2236072 - RNA, 12 nt, Human
augucuauuuaa

SEQ ID NO: 2236073 - RNA, 13 nt, Human
augucuauuuaag

SEQ ID NO: 2236074 - RNA, 14 nt, Human
augucuauuuaagc

SEQ ID NO: 2236075 - RNA, 16 nt, Human
augucuauucagcuuc

SEQ ID NO: 2236076 - RNA, 15 nt, Human
augucuauucagcuu

SEQ ID NO: 2236077 - RNA, 14 nt, Human
augucuauucagcu

SEQ ID NO: 2236078 - RNA, 22 nt, Human
augucuauaaucccagcacuuu

SEQ ID NO: 2236079 - RNA, 19 nt, Human
augucuaaaugcugaaaaa

SEQ ID NO: 2236080 - RNA, 14 nt, Human
augucccuucucau

SEQ ID NO: 2236081 - RNA, 21 nt, Human
augucccuucacauaguuuuu

SEQ ID NO: 2236082 - RNA, 17 nt, Human
augucuaauguauuuua

SEQ ID NO: 2236083 - RNA, 18 nt, Human
augucuaauguauuuuau

SEQ ID NO: 2236084 - RNA, 19 nt, Human
augucuaauguauuuuauu

SEQ ID NO: 2236085 - RNA, 21 nt, Human
augucuaauguauuuuauugu

SEQ ID NO: 2236086 - RNA, 20 nt, Human
augucccaacuuguaaaaau

SEQ ID NO: 2236087 - RNA, 18 nt, Human
augucccaccucucugag

SEQ ID NO: 2236088 - RNA, 24 nt, Human
augucccuaccgagucucuucucc

SEQ ID NO: 2236089 - RNA, 21 nt, Human
augucccuacaccccuccccu

SEQ ID NO: 2236090 - RNA, 19 nt, Human
auguccccaaaccugcaag

SEQ ID NO: 2236091 - RNA, 16 nt, Human
auguccccaaaccugc

SEQ ID NO: 2236092 - RNA, 18 nt, Human
auguccccaaaccugcaa

SEQ ID NO: 2236093 - RNA, 19 nt, Human
uuuggcgggccaaggacug

SEQ ID NO: 2236094 - RNA, 12 nt, Human
uuugggaagggg

SEQ ID NO: 2236095 - RNA, 22 nt, Human
uuugggaagugaagacuggaag

SEQ ID NO: 2236096 - RNA, 20 nt, Human
uuugggaagugaagacugga

SEQ ID NO: 2236097 - RNA, 17 nt, Human
uuuggcgggccaaggac

SEQ ID NO: 2236098 - RNA, 14 nt, Human
uuuggcgggccaag

SEQ ID NO: 2236099 - RNA, 17 nt, Human
uuuggccugcacuaauu

SEQ ID NO: 2236100 - RNA, 18 nt, Human
uuuggccucauuacuuua

SEQ ID NO: 2236101 - RNA, 16 nt, Human
uuugggaauauuugaa

SEQ ID NO: 2236102 - RNA, 17 nt, Human
uuugggaauauuugaau

SEQ ID NO: 2236103 - RNA, 17 nt, Human
uuugggaauguuugucu

SEQ ID NO: 2236104 - RNA, 21 nt, Human
uuugggagacaugugacauuu

SEQ ID NO: 2236105 - RNA, 16 nt, Human
uuugggagacauguga

SEQ ID NO: 2236106 - RNA, 18 nt, Human
uuugggagacaugugaca

SEQ ID NO: 2236107 - RNA, 20 nt, Human
uuuggggagcagagacacua

SEQ ID NO: 2236108 - RNA, 16 nt, Human
uuuggggauaugcuua

SEQ ID NO: 2236109 - RNA, 22 nt, Human
uuugggaggccaaggugggagg

SEQ ID NO: 2236110 - RNA, 13 nt, Human
uuuggggccggga

SEQ ID NO: 2236111 - RNA, 14 nt, Human
uuuggggcgaggca

SEQ ID NO: 2236112 - RNA, 18 nt, Human
uuuggggcgaggcagagg

SEQ ID NO: 2236113 - RNA, 19 nt, Human
uuuggggcgaggcagagga

SEQ ID NO: 2236114 - RNA, 14 nt, Human
uuuggggauauuuu

SEQ ID NO: 2236115 - RNA, 15 nt, Human
uuugcuucaaaaaca

SEQ ID NO: 2236116 - RNA, 19 nt, Human
uuugcuuauuguuccaaga

SEQ ID NO: 2236117 - RNA, 17 nt, Human
uuugcuuauuguuccaa

SEQ ID NO: 2236118 - RNA, 16 nt, Human
uuugcuuauuguucca

SEQ ID NO: 2236119 - RNA, 15 nt, Human
uuugcuuauuguucc

SEQ ID NO: 2236120 - RNA, 20 nt, Human
uuugcuucauaaaugaagca

SEQ ID NO: 2236121 - RNA, 13 nt, Human
uuugcuucauaaa

SEQ ID NO: 2236122 - RNA, 21 nt, Human
uuuggcccccgagcugggggc

SEQ ID NO: 2236123 - RNA, 21 nt, Human
uuuggcccuucuccuuuugaa

SEQ ID NO: 2236124 - RNA, 20 nt, Human
uuuggcccccgagcuggggg

SEQ ID NO: 2236125 - RNA, 12 nt, Human
uuuggcccccga

SEQ ID NO: 2236126 - RNA, 13 nt, Human
uuuggccaucucu

SEQ ID NO: 2236127 - RNA, 23 nt, Human
uuuggccaucucuggaugccuga

SEQ ID NO: 2236128 - RNA, 13 nt, Human
uuugcuguagaag

SEQ ID NO: 2236129 - RNA, 18 nt, Human
uuugcuguauauuuguga

SEQ ID NO: 2236130 - RNA, 17 nt, Human
uuugcugugaggcuguc

SEQ ID NO: 2236131 - RNA, 16 nt, Human
uuugcuuagaaaagaa

SEQ ID NO: 2236132 - RNA, 12 nt, Human
uuugcuuagaaa

SEQ ID NO: 2236133 - RNA, 19 nt, Human
uuugcugugaggcuguccu

SEQ ID NO: 2236134 - RNA, 21 nt, Human
uuugcugugaggcuguccugu

SEQ ID NO: 2236135 - RNA, 21 nt, Human
uuugcuguagaagauggcacu

SEQ ID NO: 2236136 - RNA, 13 nt, Human
uuugcucauggaa

SEQ ID NO: 2236137 - RNA, 16 nt, Human
uuugcucaccuggggu

SEQ ID NO: 2236138 - RNA, 16 nt, Human
uuugcuauuguaaaua

SEQ ID NO: 2236139 - RNA, 23 nt, Human
uuugcucacacgggguauuuuag

SEQ ID NO: 2236140 - RNA, 23 nt, Human
uuugcucagugucuggcugcaga

SEQ ID NO: 2236141 - RNA, 23 nt, Human
uuugcuauugacaagucauuuua

SEQ ID NO: 2236142 - RNA, 20 nt, Human
uuugcuauugacaagucauu

SEQ ID NO: 2236143 - RNA, 13 nt, Human
uuugcuauugaca

SEQ ID NO: 2236144 - RNA, 19 nt, Human
uuugcuaucuuaauuuugg

SEQ ID NO: 2236145 - RNA, 19 nt, Human
uuugcuaugagcuggggau

SEQ ID NO: 2236146 - RNA, 11 nt, Human
uuugcucaugg

SEQ ID NO: 2236147 - RNA, 12 nt, Human
uuugcucaugga

SEQ ID NO: 2236148 - RNA, 19 nt, Human
uuugcccugguuucacugg

SEQ ID NO: 2236149 - RNA, 19 nt, Human
uuugcccugguagggcagu

SEQ ID NO: 2236150 - RNA, 21 nt, Human
uuugcccugguagggcaguaa

SEQ ID NO: 2236151 - RNA, 15 nt, Human
uuugcccuuaaggac

SEQ ID NO: 2236152 - RNA, 13 nt, Human
uuugcccucccau

SEQ ID NO: 2236153 - RNA, 13 nt, Human
uuugcuaguuuuu

SEQ ID NO: 2236154 - RNA, 18 nt, Human
uuugcuaucuuaauuuug

SEQ ID NO: 2236155 - RNA, 23 nt, Human
uuugcccaacaccagccccugcc

SEQ ID NO: 2236156 - RNA, 18 nt, Human
uuugcccagaaagaagau

SEQ ID NO: 2236157 - RNA, 14 nt, Human
uuugcccaacacca

SEQ ID NO: 2236158 - RNA, 16 nt, Human
uuugcccaacaccagc

SEQ ID NO: 2236159 - RNA, 18 nt, Human
uuugcccaacaccagccc

SEQ ID NO: 2236160 - RNA, 21 nt, Human
uuugcccaacaccagccccug

SEQ ID NO: 2236161 - RNA, 22 nt, Human
uuugccauguuggccaggcugg

SEQ ID NO: 2236162 - RNA, 16 nt, Human
uuugcacagcucuccg

SEQ ID NO: 2236163 - RNA, 12 nt, Human
uuugcacagcuc

SEQ ID NO: 2236164 - RNA, 19 nt, Human
uuugcacauguuuccucua

SEQ ID NO: 2236165 - RNA, 19 nt, Human
uuugcaauggcuauauggc

SEQ ID NO: 2236166 - RNA, 18 nt, Human
uuugcaagucauggcugu

SEQ ID NO: 2236167 - RNA, 21 nt, Human
uuugcaagucauggcugugcc

SEQ ID NO: 2236168 - RNA, 13 nt, Human
uuugcaagugaag

SEQ ID NO: 2236169 - RNA, 15 nt, Human
uuugcaagugaaggu

SEQ ID NO: 2236170 - RNA, 16 nt, Human
uuugcaagugaagguu

SEQ ID NO: 2236171 - RNA, 21 nt, Human
uuugcaagugaagguuuacaa

SEQ ID NO: 2236172 - RNA, 22 nt, Human
uuugcaagugaagguuuacaau

SEQ ID NO: 2236173 - RNA, 15 nt, Human
auggcuauaggugcu

SEQ ID NO: 2236174 - RNA, 17 nt, Human
uuugcaagucauggcug

SEQ ID NO: 2236175 - RNA, 16 nt, Human
auggcuauaaauauau

SEQ ID NO: 2236176 - RNA, 21 nt, Human
auggcuauaaauauauaaaaa

SEQ ID NO: 2236177 - RNA, 22 nt, Human
auggcuagaauauccuacuucu

SEQ ID NO: 2236178 - RNA, 13 nt, Human
auggcuauaaaua

SEQ ID NO: 2236179 - RNA, 14 nt, Human
auggcuauaaauau

SEQ ID NO: 2236180 - RNA, 15 nt, Human
auggcuauaaauaua

SEQ ID NO: 2236181 - RNA, 22 nt, Human
auaaauauauauaaaccuaaaa

SEQ ID NO: 2236182 - RNA, 14 nt, Human
auaaaucaauguca

SEQ ID NO: 2236183 - RNA, 14 nt, Human
auaaauauuuaugu

SEQ ID NO: 2236184 - RNA, 20 nt, Human
auaaauauuuauguagaugu

SEQ ID NO: 2236185 - RNA, 18 nt, Human
auaaauauuuuugccaua

SEQ ID NO: 2236186 - RNA, 16 nt, Human
auaaauaggagaggau

SEQ ID NO: 2236187 - RNA, 23 nt, Human
auaaauauauaaaaagaaaagau

SEQ ID NO: 2236188 - RNA, 12 nt, Human
auaaauauauau

SEQ ID NO: 2236189 - RNA, 15 nt, Human
auaaauauauauaaa

SEQ ID NO: 2236190 - RNA, 16 nt, Human
auaaauauauauaaac

SEQ ID NO: 2236191 - RNA, 21 nt, Human
auaaauauauauaaaccuaaa

SEQ ID NO: 2236192 - RNA, 15 nt, Human
auaaauaguuuauga

SEQ ID NO: 2236193 - RNA, 21 nt, Human
auaaauagcuauauccaugua

SEQ ID NO: 2236194 - RNA, 15 nt, Human
auaaauagcuauauc

SEQ ID NO: 2236195 - RNA, 14 nt, Human
auaaauagcuauau

SEQ ID NO: 2236196 - RNA, 16 nt, Human
auaaaguaguaaaaau

SEQ ID NO: 2236197 - RNA, 14 nt, Human
auaaauaaaaauaa

SEQ ID NO: 2236198 - RNA, 19 nt, Human
auaaaggugguaugugugu

SEQ ID NO: 2236199 - RNA, 14 nt, Human
auaaaggccuuuuu

SEQ ID NO: 2236200 - RNA, 21 nt, Human
auaaaggugguaugugugugu

SEQ ID NO: 2236201 - RNA, 20 nt, Human
auaaaggugguaugugugug

SEQ ID NO: 2236202 - RNA, 15 nt, Human
auaaagguucaugca

SEQ ID NO: 2236203 - RNA, 16 nt, Human
uuaauuggcagcagau

SEQ ID NO: 2236204 - RNA, 18 nt, Human
uuaauuggcagcagauuu

SEQ ID NO: 2236205 - RNA, 19 nt, Human
uuaauuggcagcagauuuu

SEQ ID NO: 2236206 - RNA, 22 nt, Human
auaaagguugacaauaaaugug

SEQ ID NO: 2236207 - RNA, 14 nt, Human
auaaaguaaagcua

SEQ ID NO: 2236208 - RNA, 21 nt, Human
auaaagguugacaauaaaugu

SEQ ID NO: 2236209 - RNA, 16 nt, Human
auaaagguugacaaua

SEQ ID NO: 2236210 - RNA, 13 nt, Human
auaaaguaguaaa

SEQ ID NO: 2236211 - RNA, 17 nt, Human
auaaaguaaagcuaaaa

SEQ ID NO: 2236212 - RNA, 17 nt, Human
auaaagguucaugcaaa

SEQ ID NO: 2236213 - RNA, 13 nt, Human
auaaauaaaaaua

SEQ ID NO: 2236214 - RNA, 20 nt, Human
auaaccccagcucccuagga

SEQ ID NO: 2236215 - RNA, 12 nt, Human
auaaccccaccc

SEQ ID NO: 2236216 - RNA, 13 nt, Human
auaaccuauauga

SEQ ID NO: 2236217 - RNA, 18 nt, Human
auaaccuauaugauuuau

SEQ ID NO: 2236218 - RNA, 23 nt, Human
auaaccguuuccuuucauuuacu

SEQ ID NO: 2236219 - RNA, 15 nt, Human
auaaauuccacugga

SEQ ID NO: 2236220 - RNA, 21 nt, Human
auaaauucccuggccuuucau

SEQ ID NO: 2236221 - RNA, 16 nt, Human
auaaauucagauauau

SEQ ID NO: 2236222 - RNA, 13 nt, Human
auaaauucagaua

SEQ ID NO: 2236223 - RNA, 12 nt, Human
auaaauucagau

SEQ ID NO: 2236224 - RNA, 22 nt, Human
auaaauucagauauauuuuuca

SEQ ID NO: 2236225 - RNA, 13 nt, Human
auaaauuccucuu

SEQ ID NO: 2236226 - RNA, 22 nt, Human
auaaauucccuggccuuucaua

SEQ ID NO: 2236227 - RNA, 20 nt, Human
auaaauuccucuuugcuuug

SEQ ID NO: 2236228 - RNA, 11 nt, Human
auaaauuauuu

SEQ ID NO: 2236229 - RNA, 14 nt, Human
auaaauuauuuauu

SEQ ID NO: 2236230 - RNA, 15 nt, Human
auaaauucaccuagu

SEQ ID NO: 2236231 - RNA, 19 nt, Human
auaaauucaccuagucuaa

SEQ ID NO: 2236232 - RNA, 15 nt, Human
auaaaucaaugucac

SEQ ID NO: 2236233 - RNA, 19 nt, Human
auaacuuaaaaaaaugaca

SEQ ID NO: 2236234 - RNA, 16 nt, Human
auaacuuaaaaaaaug

SEQ ID NO: 2236235 - RNA, 12 nt, Human
auaacuuaaaaa

SEQ ID NO: 2236236 - RNA, 22 nt, Human
auaacuguuauuuauaaucacu

SEQ ID NO: 2236237 - RNA, 20 nt, Human
auaacuguuauuuauaauca

SEQ ID NO: 2236238 - RNA, 18 nt, Human
auaacuguuauuuauaau

SEQ ID NO: 2236239 - RNA, 13 nt, Human
auaacugugaagu

SEQ ID NO: 2236240 - RNA, 17 nt, Human
auaacguuuuuccuuua

SEQ ID NO: 2236241 - RNA, 18 nt, Human
auaacguuuuuccuuuaa

SEQ ID NO: 2236242 - RNA, 15 nt, Human
auaacguuuuuccuu

SEQ ID NO: 2236243 - RNA, 13 nt, Human
auaacguuuuucc

SEQ ID NO: 2236244 - RNA, 20 nt, Human
auaacggaucagaaauacag

SEQ ID NO: 2236245 - RNA, 21 nt, Human
auaacggaucagaaauacaga

SEQ ID NO: 2236246 - RNA, 23 nt, Human
auaaccuauuuugaaaaauuccu

SEQ ID NO: 2236247 - RNA, 13 nt, Human
auaacgccccaga

SEQ ID NO: 2236248 - RNA, 21 nt, Human
auaacgccccagauaccagcc

SEQ ID NO: 2236249 - RNA, 14 nt, Human
auaacguauaaaag

SEQ ID NO: 2236250 - RNA, 22 nt, Human
auaacgauaaaagacagugaaa

SEQ ID NO: 2236251 - RNA, 16 nt, Human
uuacccuccuguaaau

SEQ ID NO: 2236252 - RNA, 16 nt, Human
uuaccuaccacagugu

SEQ ID NO: 2236253 - RNA, 16 nt, Human
uuaccccuuagccucc

SEQ ID NO: 2236254 - RNA, 22 nt, Human
uuacccucaggcauaggccugg

SEQ ID NO: 2236255 - RNA, 21 nt, Human
uuaccuaccacagugucugua

SEQ ID NO: 2236256 - RNA, 19 nt, Human
uuaccuaccacaugccaag

SEQ ID NO: 2236257 - RNA, 18 nt, Human
uuaccuaccacagugucu

SEQ ID NO: 2236258 - RNA, 17 nt, Human
uuaccuaccacaguguc

SEQ ID NO: 2236259 - RNA, 23 nt, Human
uuaccuacuuugacuuuuugcau

SEQ ID NO: 2236260 - RNA, 13 nt, Human
uuaccuacuuuga

SEQ ID NO: 2236261 - RNA, 20 nt, Human
uuaccuaguagucauuucau

SEQ ID NO: 2236262 - RNA, 19 nt, Human
uuaccuccugagaaaaaag

SEQ ID NO: 2236263 - RNA, 11 nt, Human
uuaccuccuga

SEQ ID NO: 2236264 - RNA, 15 nt, Human
uuaccuccugcccag

SEQ ID NO: 2236265 - RNA, 14 nt, Human
uuaccuccugccca

SEQ ID NO: 2236266 - RNA, 13 nt, Human
uuaccuccugccc

SEQ ID NO: 2236267 - RNA, 12 nt, Human
uuaccuccugcc

SEQ ID NO: 2236268 - RNA, 19 nt, Human
uuaccuccugcccaggaga

SEQ ID NO: 2236269 - RNA, 22 nt, Human
uuaccuuagauuagcucuggac

SEQ ID NO: 2236270 - RNA, 19 nt, Human
uuaccuucaauaaaguauc

SEQ ID NO: 2236271 - RNA, 18 nt, Human
uuaccuucaauaaaguau

SEQ ID NO: 2236272 - RNA, 17 nt, Human
uuaccuucaauaaagua

SEQ ID NO: 2236273 - RNA, 16 nt, Human
uuaccuucaauaaagu

SEQ ID NO: 2236274 - RNA, 15 nt, Human
uuaccuucaauaaag

SEQ ID NO: 2236275 - RNA, 14 nt, Human
uuaccuucaauaaa

SEQ ID NO: 2236276 - RNA, 15 nt, Human
uuaccuuauugcacu

SEQ ID NO: 2236277 - RNA, 13 nt, Human
uuaccuuugacaa

SEQ ID NO: 2236278 - RNA, 20 nt, Human
uuaccuuugacaaagguaaa

SEQ ID NO: 2236279 - RNA, 21 nt, Human
uuacccagagaauauauacau

SEQ ID NO: 2236280 - RNA, 22 nt, Human
uuacccagagaauauauacauu

SEQ ID NO: 2236281 - RNA, 16 nt, Human
uuacccagaguuuuua

SEQ ID NO: 2236282 - RNA, 13 nt, Human
uuacccauauccc

SEQ ID NO: 2236283 - RNA, 16 nt, Human
uuacccauauccccuc

SEQ ID NO: 2236284 - RNA, 17 nt, Human
uuacccauauccccucu

SEQ ID NO: 2236285 - RNA, 18 nt, Human
uuacccauauccccucuc

SEQ ID NO: 2236286 - RNA, 14 nt, Human
uuacagggagccuc

SEQ ID NO: 2236287 - RNA, 15 nt, Human
uuacagggagccucc

SEQ ID NO: 2236288 - RNA, 16 nt, Human
uuacagggagccuccu

SEQ ID NO: 2236289 - RNA, 17 nt, Human
uuacagggagccuccug

SEQ ID NO: 2236290 - RNA, 18 nt, Human
uuacagggagccuccugc

SEQ ID NO: 2236291 - RNA, 19 nt, Human
uuacagggagccuccugcc

SEQ ID NO: 2236292 - RNA, 14 nt, Human
uuaccccuuagccu

SEQ ID NO: 2236293 - RNA, 20 nt, Human
uuacccauauccccucuccc

SEQ ID NO: 2236294 - RNA, 19 nt, Human
uuacccucauguucuuaau

SEQ ID NO: 2236295 - RNA, 24 nt, Human
uuacaggcaccgagaauguuguau

SEQ ID NO: 2236296 - RNA, 18 nt, Human
uuacaggcaccgagaaug

SEQ ID NO: 2236297 - RNA, 24 nt, Human
uuacaggcgugagccaccgugccu

SEQ ID NO: 2236298 - RNA, 18 nt, Human
uuacaggcuccugccacc

SEQ ID NO: 2236299 - RNA, 16 nt, Human
uuacaggcuccugcca

SEQ ID NO: 2236300 - RNA, 16 nt, Human
auaacuuaaaauauuu

SEQ ID NO: 2236301 - RNA, 12 nt, Human
auaacuuaaaau

SEQ ID NO: 2236302 - RNA, 21 nt, Human
auaacuuaaaaauguaaauau

SEQ ID NO: 2236303 - RNA, 19 nt, Human
auaacuuaaaaauguaaau

SEQ ID NO: 2236304 - RNA, 20 nt, Human
auaacuuaaaaauguaaaua

SEQ ID NO: 2236305 - RNA, 17 nt, Human
uuacaggcaccgagaau

SEQ ID NO: 2236306 - RNA, 15 nt, Human
uuacaggcaccgaga

SEQ ID NO: 2236307 - RNA, 17 nt, Human
uuacaggcacaaaauga

SEQ ID NO: 2236308 - RNA, 15 nt, Human
auaacuuauauugua

SEQ ID NO: 2236309 - RNA, 17 nt, Human
uuagaaauuuauuuccu

SEQ ID NO: 2236310 - RNA, 18 nt, Human
uuagaacaggcaagugaa

SEQ ID NO: 2236311 - RNA, 20 nt, Human
uuagaacaggcaagugaaga

SEQ ID NO: 2236312 - RNA, 22 nt, Human
uuagaacaggcaagugaagaaa

SEQ ID NO: 2236313 - RNA, 13 nt, Human
uuagacagagucu

SEQ ID NO: 2236314 - RNA, 20 nt, Human
uuagacagagucucacuguu

SEQ ID NO: 2236315 - RNA, 13 nt, Human
uuagacagucccu

SEQ ID NO: 2236316 - RNA, 17 nt, Human
uuagaaaugaccaauau

SEQ ID NO: 2236317 - RNA, 23 nt, Human
uuagaaagcauuugaaugcauuu

SEQ ID NO: 2236318 - RNA, 21 nt, Human
uuagaaaguagccacguaugg

SEQ ID NO: 2236319 - RNA, 17 nt, Human
uuagaaagcauuugaau

SEQ ID NO: 2236320 - RNA, 18 nt, Human
uuagaaagcauuugaaug

SEQ ID NO: 2236321 - RNA, 19 nt, Human
uuagaaagcauuugaaugc

SEQ ID NO: 2236322 - RNA, 21 nt, Human
uuagaaagcauuugaaugcau

SEQ ID NO: 2236323 - RNA, 18 nt, Human
uuagaaaugaccaauauu

SEQ ID NO: 2236324 - RNA, 16 nt, Human
uuagaaaugcagaauc

SEQ ID NO: 2236325 - RNA, 17 nt, Human
uuagaaauugcauuucc

SEQ ID NO: 2236326 - RNA, 16 nt, Human
uuacugaagccuuucu

SEQ ID NO: 2236327 - RNA, 23 nt, Human
uuacugaacaaucaaagcacuug

SEQ ID NO: 2236328 - RNA, 23 nt, Human
uuacucuucaguuaagccuuugg

SEQ ID NO: 2236329 - RNA, 13 nt, Human
uuacucugaaggg

SEQ ID NO: 2236330 - RNA, 19 nt, Human
uuacucuccaaccuggaca

SEQ ID NO: 2236331 - RNA, 22 nt, Human
uuacucugaagggcaucaugca

SEQ ID NO: 2236332 - RNA, 16 nt, Human
uuacucuccaaccugg

SEQ ID NO: 2236333 - RNA, 19 nt, Human
uuaccuuuuaauuaaugaa

SEQ ID NO: 2236334 - RNA, 16 nt, Human
uuaccuuguauacugu

SEQ ID NO: 2236335 - RNA, 22 nt, Human
uuagaaagaagcccaauauuau

SEQ ID NO: 2236336 - RNA, 12 nt, Human
uuagaaagcauu

SEQ ID NO: 2236337 - RNA, 13 nt, Human
uuagaaagcauuu

SEQ ID NO: 2236338 - RNA, 14 nt, Human
uuagaaagcauuug

SEQ ID NO: 2236339 - RNA, 15 nt, Human
uuagaaagcauuuga

SEQ ID NO: 2236340 - RNA, 16 nt, Human
uuagaaagcauuugaa

SEQ ID NO: 2236341 - RNA, 20 nt, Human
uuacugaagguaaaauugaa

SEQ ID NO: 2236342 - RNA, 12 nt, Human
uuacugaaugca

SEQ ID NO: 2236343 - RNA, 19 nt, Human
uuacugaagguaaaauuga

SEQ ID NO: 2236344 - RNA, 18 nt, Human
uuacugaagguaaaauug

SEQ ID NO: 2236345 - RNA, 18 nt, Human
uuagaaaccuuaauaugu

SEQ ID NO: 2236346 - RNA, 17 nt, Human
uuagaaacaugguuuug

SEQ ID NO: 2236347 - RNA, 14 nt, Human
uuagaaaccuuaau

SEQ ID NO: 2236348 - RNA, 13 nt, Human
uuagaaacauaaa

SEQ ID NO: 2236349 - RNA, 16 nt, Human
uuagaaacauaaauaa

SEQ ID NO: 2236350 - RNA, 22 nt, Human
auaauacuauauuuauacugua

SEQ ID NO: 2236351 - RNA, 13 nt, Human
auaauagaagaac

SEQ ID NO: 2236352 - RNA, 12 nt, Human
auaauagaagaa

SEQ ID NO: 2236353 - RNA, 19 nt, Human
auaauacuugcuuuggaaa

SEQ ID NO: 2236354 - RNA, 12 nt, Human
auaauacaccac

SEQ ID NO: 2236355 - RNA, 15 nt, Human
auaauaaauguacau

SEQ ID NO: 2236356 - RNA, 16 nt, Human
auaauaaagcuacuga

SEQ ID NO: 2236357 - RNA, 20 nt, Human
auaauacaccacuacauucu

SEQ ID NO: 2236358 - RNA, 18 nt, Human
auaauacaccacuacauu

SEQ ID NO: 2236359 - RNA, 23 nt, Human
uuagacagucaaggaguggcuua

SEQ ID NO: 2236360 - RNA, 21 nt, Human
auaagaauaaaauguugaaaa

SEQ ID NO: 2236361 - RNA, 21 nt, Human
auaagaaugcugguuuuccua

SEQ ID NO: 2236362 - RNA, 18 nt, Human
auaagaaugguugccuua

SEQ ID NO: 2236363 - RNA, 22 nt, Human
auaagaaugcugguuuuccuaa

SEQ ID NO: 2236364 - RNA, 19 nt, Human
auaagaaugcugguuuucc

SEQ ID NO: 2236365 - RNA, 16 nt, Human
auaagaaugcugguuu

SEQ ID NO: 2236366 - RNA, 14 nt, Human
auaagacauaacgu

SEQ ID NO: 2236367 - RNA, 17 nt, Human
auaagaauuauuuugau

SEQ ID NO: 2236368 - RNA, 17 nt, Human
auaagacggauuuauuu

SEQ ID NO: 2236369 - RNA, 21 nt, Human
auaagacggauuuauuuuucc

SEQ ID NO: 2236370 - RNA, 23 nt, Human
auaagacauaacguuuuuccuuu

SEQ ID NO: 2236371 - RNA, 17 nt, Human
auaagacauaacguuuu

SEQ ID NO: 2236372 - RNA, 22 nt, Human
auaagaccaccaccucagagua

SEQ ID NO: 2236373 - RNA, 19 nt, Human
auaauaaacuuuuuugaaa

SEQ ID NO: 2236374 - RNA, 12 nt, Human
auaauaaacuuu

SEQ ID NO: 2236375 - RNA, 14 nt, Human
auaauaaaaggaaa

SEQ ID NO: 2236376 - RNA, 15 nt, Human
auaauaaaaggaaaa

SEQ ID NO: 2236377 - RNA, 20 nt, Human
auaauaaaaggaaaagcaaa

SEQ ID NO: 2236378 - RNA, 16 nt, Human
auaagagagucauaaa

SEQ ID NO: 2236379 - RNA, 20 nt, Human
auaagagagaacaacuacug

SEQ ID NO: 2236380 - RNA, 19 nt, Human
auaagagagucauaaaccu

SEQ ID NO: 2236381 - RNA, 15 nt, Human
auaagagaaucaaca

SEQ ID NO: 2236382 - RNA, 14 nt, Human
auaagagaaagaaa

SEQ ID NO: 2236383 - RNA, 18 nt, Human
auaagagaaagaaaauga

SEQ ID NO: 2236384 - RNA, 14 nt, Human
auaauaaaguguuu

SEQ ID NO: 2236385 - RNA, 14 nt, Human
auaaucuauuucua

SEQ ID NO: 2236386 - RNA, 17 nt, Human
auaaucuauuucuauga

SEQ ID NO: 2236387 - RNA, 21 nt, Human
auaaucuauuucuaugagaaa

SEQ ID NO: 2236388 - RNA, 18 nt, Human
auaaucucuccauucccg

SEQ ID NO: 2236389 - RNA, 22 nt, Human
auaaucggcccacagcucccac

SEQ ID NO: 2236390 - RNA, 12 nt, Human
auaaucuagaac

SEQ ID NO: 2236391 - RNA, 15 nt, Human
auaaucuagaacaca

SEQ ID NO: 2236392 - RNA, 18 nt, Human
auaaucuggacuccucug

SEQ ID NO: 2236393 - RNA, 19 nt, Human
auaaucuggacuccucugu

SEQ ID NO: 2236394 - RNA, 20 nt, Human
auaaucuggacuccucuguc

SEQ ID NO: 2236395 - RNA, 14 nt, Human
auaauaguuuacau

SEQ ID NO: 2236396 - RNA, 20 nt, Human
auaauaguuuacauguagua

SEQ ID NO: 2236397 - RNA, 16 nt, Human
auaaucccagcacuuu

SEQ ID NO: 2236398 - RNA, 17 nt, Human
auaaucccagcacuuug

SEQ ID NO: 2236399 - RNA, 18 nt, Human
auaauccuaaacauauga

SEQ ID NO: 2236400 - RNA, 19 nt, Human
auaauucuuguauauuaug

SEQ ID NO: 2236401 - RNA, 14 nt, Human
auaauucuuguaua

SEQ ID NO: 2236402 - RNA, 23 nt, Human
auaauucuguacauagccuauau

SEQ ID NO: 2236403 - RNA, 15 nt, Human
auaauucuguacuga

SEQ ID NO: 2236404 - RNA, 17 nt, Human
auaauucuguacugauu

SEQ ID NO: 2236405 - RNA, 18 nt, Human
auaaugccggugagaaua

SEQ ID NO: 2236406 - RNA, 12 nt, Human
auaauucuguaa

SEQ ID NO: 2236407 - RNA, 13 nt, Human
auaauucuguaaa

SEQ ID NO: 2236408 - RNA, 14 nt, Human
auaauucuguaaau

SEQ ID NO: 2236409 - RNA, 13 nt, Human
auaauucuguaca

SEQ ID NO: 2236410 - RNA, 14 nt, Human
auaauucuguacau

SEQ ID NO: 2236411 - RNA, 22 nt, Human
auaauucuguacauagccuaua

SEQ ID NO: 2236412 - RNA, 22 nt, Human
auaauugacaggauuauuggaa

SEQ ID NO: 2236413 - RNA, 15 nt, Human
auaaugaaugaaaca

SEQ ID NO: 2236414 - RNA, 13 nt, Human
auaaucugauuug

SEQ ID NO: 2236415 - RNA, 22 nt, Human
auaaugaggaugauuauuuuca

SEQ ID NO: 2236416 - RNA, 22 nt, Human
auaaugaugaugggaauugugu

SEQ ID NO: 2236417 - RNA, 17 nt, Human
auaaugccggugagaau

SEQ ID NO: 2236418 - RNA, 15 nt, Human
auaaugcgugcauac

SEQ ID NO: 2236419 - RNA, 22 nt, Human
uuagguuuuguacaauugaacu

SEQ ID NO: 2236420 - RNA, 14 nt, Human
uuagguuuuguaca

SEQ ID NO: 2236421 - RNA, 19 nt, Human
uuagguuuuuuuguauagu

SEQ ID NO: 2236422 - RNA, 16 nt, Human
uuagguuuuguacaau

SEQ ID NO: 2236423 - RNA, 18 nt, Human
uuagguggcaagcuguga

SEQ ID NO: 2236424 - RNA, 14 nt, Human
uuaguaaagaaaug

SEQ ID NO: 2236425 - RNA, 15 nt, Human
uuaguaaagaaauga

SEQ ID NO: 2236426 - RNA, 24 nt, Human
uuaguaacaugaggggacauuuug

SEQ ID NO: 2236427 - RNA, 23 nt, Human
uuaguaacauguguuaaguauuu

SEQ ID NO: 2236428 - RNA, 12 nt, Human
uuaguaacaugu

SEQ ID NO: 2236429 - RNA, 22 nt, Human
uuaguuuguaugccaagugaga

SEQ ID NO: 2236430 - RNA, 15 nt, Human
uuaguuuguguguug

SEQ ID NO: 2236431 - RNA, 18 nt, Human
uuaguuuggauucuuaug

SEQ ID NO: 2236432 - RNA, 14 nt, Human
uuaguuuggauucu

SEQ ID NO: 2236433 - RNA, 22 nt, Human
uuaguuugcaguuacacuaaaa

SEQ ID NO: 2236434 - RNA, 14 nt, Human
uuaguuucuuuggg

SEQ ID NO: 2236435 - RNA, 20 nt, Human
uuaguuucuguucuguggaa

SEQ ID NO: 2236436 - RNA, 21 nt, Human
uuaguuucuguucuguggaaa

SEQ ID NO: 2236437 - RNA, 15 nt, Human
uuaguuucuguucug

SEQ ID NO: 2236438 - RNA, 19 nt, Human
uuaguuucuguucugugga

SEQ ID NO: 2236439 - RNA, 15 nt, Human
uuaguuucuccaagc

SEQ ID NO: 2236440 - RNA, 17 nt, Human
uuagggaaaacauucca

SEQ ID NO: 2236441 - RNA, 15 nt, Human
uuagggaaaacauuc

SEQ ID NO: 2236442 - RNA, 20 nt, Human
uuagggaaggauacaaaagc

SEQ ID NO: 2236443 - RNA, 23 nt, Human
uuagggacucaauuucuccccag

SEQ ID NO: 2236444 - RNA, 14 nt, Human
uuagggaagggccu

SEQ ID NO: 2236445 - RNA, 14 nt, Human
uuagggagagaaga

SEQ ID NO: 2236446 - RNA, 15 nt, Human
uuaggugaggaagca

SEQ ID NO: 2236447 - RNA, 16 nt, Human
uuaggugugacugaau

SEQ ID NO: 2236448 - RNA, 16 nt, Human
uuaggugaggaagcaa

SEQ ID NO: 2236449 - RNA, 21 nt, Human
uuaggugugacugaauuucuu

SEQ ID NO: 2236450 - RNA, 17 nt, Human
uuagggagaaaauucaa

SEQ ID NO: 2236451 - RNA, 13 nt, Human
uuagggagaaaau

SEQ ID NO: 2236452 - RNA, 18 nt, Human
uuagcaaauucuguuuuu

SEQ ID NO: 2236453 - RNA, 14 nt, Human
uuagcaaacuuugu

SEQ ID NO: 2236454 - RNA, 15 nt, Human
uuagcaaauacauau

SEQ ID NO: 2236455 - RNA, 19 nt, Human
uuagcaaagaguuaauaua

SEQ ID NO: 2236456 - RNA, 13 nt, Human
uuagcaaagaguu

SEQ ID NO: 2236457 - RNA, 20 nt, Human
uuagcaaagaguuaauauau

SEQ ID NO: 2236458 - RNA, 22 nt, Human
uuagcaaagauaucucaucucu

SEQ ID NO: 2236459 - RNA, 15 nt, Human
auaauuuaaugcaug

SEQ ID NO: 2236460 - RNA, 18 nt, Human
auaauuuaccugaagucu

SEQ ID NO: 2236461 - RNA, 13 nt, Human
uuagccacaaaau

SEQ ID NO: 2236462 - RNA, 22 nt, Human
uuagcauuuaguccaaugucuu

SEQ ID NO: 2236463 - RNA, 17 nt, Human
uuagcauguguugaaaa

SEQ ID NO: 2236464 - RNA, 16 nt, Human
uuagcauguuugcuga

SEQ ID NO: 2236465 - RNA, 19 nt, Human
uuagccagguaaugugaau

SEQ ID NO: 2236466 - RNA, 23 nt, Human
uuagccaggaucaugguguaaua

SEQ ID NO: 2236467 - RNA, 15 nt, Human
uuagccaggaucaug

SEQ ID NO: 2236468 - RNA, 17 nt, Human
uuagccaggaucauggu

SEQ ID NO: 2236469 - RNA, 18 nt, Human
uuagccaagugugguaga

SEQ ID NO: 2236470 - RNA, 24 nt, Human
uuagcaugacaagccccaggcagg

SEQ ID NO: 2236471 - RNA, 22 nt, Human
uuagcaugacaagccccaggca

SEQ ID NO: 2236472 - RNA, 21 nt, Human
uuagcaugacaagccccaggc

SEQ ID NO: 2236473 - RNA, 14 nt, Human
uuagccuucucugu

SEQ ID NO: 2236474 - RNA, 12 nt, Human
uuagccuucucu

SEQ ID NO: 2236475 - RNA, 16 nt, Human
uuagccuuugucccag

SEQ ID NO: 2236476 - RNA, 17 nt, Human
uuagccuucucuguuca

SEQ ID NO: 2236477 - RNA, 15 nt, Human
uuagccuucucuguu

SEQ ID NO: 2236478 - RNA, 14 nt, Human
uuagcggagacgga

SEQ ID NO: 2236479 - RNA, 21 nt, Human
uuagccuucucuguucauuuc

SEQ ID NO: 2236480 - RNA, 22 nt, Human
uuaaacaaauguaugauuacau

SEQ ID NO: 2236481 - RNA, 13 nt, Human
uuaaacaccuccu

SEQ ID NO: 2236482 - RNA, 16 nt, Human
uuaaacaccuccucau

SEQ ID NO: 2236483 - RNA, 14 nt, Human
uuaaacaaagguug

SEQ ID NO: 2236484 - RNA, 16 nt, Human
uuaaacagauuuuuac

SEQ ID NO: 2236485 - RNA, 12 nt, Human
uuaaacagcagu

SEQ ID NO: 2236486 - RNA, 14 nt, Human
uuaaacagcagugu

SEQ ID NO: 2236487 - RNA, 23 nt, Human
uuaaacagugagccugaauuuug

SEQ ID NO: 2236488 - RNA, 18 nt, Human
uuaaacagugagccugaa

SEQ ID NO: 2236489 - RNA, 15 nt, Human
uuaaacaggcccagc

SEQ ID NO: 2236490 - RNA, 16 nt, Human
uuaaacaggcccagca

SEQ ID NO: 2236491 - RNA, 21 nt, Human
uuaaacagggcaucuccagga

SEQ ID NO: 2236492 - RNA, 17 nt, Human
uuaaaaaucucaaauuu

SEQ ID NO: 2236493 - RNA, 18 nt, Human
uuaaaauuuuuuuagaaa

SEQ ID NO: 2236494 - RNA, 20 nt, Human
uuaaacaaaauagaagcugu

SEQ ID NO: 2236495 - RNA, 16 nt, Human
uuaaaaaucucaaauu

SEQ ID NO: 2236496 - RNA, 15 nt, Human
uuaaaaaucucaaau

SEQ ID NO: 2236497 - RNA, 14 nt, Human
uuaaaaaucucaaa

SEQ ID NO: 2236498 - RNA, 18 nt, Human
uuaaagucagguccaauu

SEQ ID NO: 2236499 - RNA, 13 nt, Human
uuaaaguauucuu

SEQ ID NO: 2236500 - RNA, 18 nt, Human
uuaaaguaugaaucuaug

SEQ ID NO: 2236501 - RNA, 18 nt, Human
uuaaaguauguuauugca

SEQ ID NO: 2236502 - RNA, 23 nt, Human
uuaaaguauguuauugcauaauu

SEQ ID NO: 2236503 - RNA, 17 nt, Human
uuaaagugauacugaaa

SEQ ID NO: 2236504 - RNA, 12 nt, Human
uuaaagugauua

SEQ ID NO: 2236505 - RNA, 19 nt, Human
uuaaagucgagcuuuucua

SEQ ID NO: 2236506 - RNA, 19 nt, Human
uuaaaguguccauugacau

SEQ ID NO: 2236507 - RNA, 22 nt, Human
uuaaaguguccauugacaugua

SEQ ID NO: 2236508 - RNA, 15 nt, Human
uuaaauaaugugaaa

SEQ ID NO: 2236509 - RNA, 15 nt, Human
uuaaacauugaagua

SEQ ID NO: 2236510 - RNA, 13 nt, Human
uuaaacauugaag

SEQ ID NO: 2236511 - RNA, 16 nt, Human
uuaaaguauauauuua

SEQ ID NO: 2236512 - RNA, 15 nt, Human
uuaaaguaugaaucu

SEQ ID NO: 2236513 - RNA, 13 nt, Human
uuaaaguauauau

SEQ ID NO: 2236514 - RNA, 17 nt, Human
uuaaaggugucuuccuc

SEQ ID NO: 2236515 - RNA, 13 nt, Human
uuaaacauaaaua

SEQ ID NO: 2236516 - RNA, 16 nt, Human
uuaacacaaguccugu

SEQ ID NO: 2236517 - RNA, 11 nt, Human
uuaacacauuu

SEQ ID NO: 2236518 - RNA, 16 nt, Human
uuaacaauuccaaagg

SEQ ID NO: 2236519 - RNA, 15 nt, Human
uuaacaauuucuguc

SEQ ID NO: 2236520 - RNA, 23 nt, Human
uuaacaauuucuguccuucagau

SEQ ID NO: 2236521 - RNA, 12 nt, Human
uuaacacauuuu

SEQ ID NO: 2236522 - RNA, 14 nt, Human
uuaacacauuuugu

SEQ ID NO: 2236523 - RNA, 17 nt, Human
uuaacacauuuuguaua

SEQ ID NO: 2236524 - RNA, 22 nt, Human
uuaacacauuuuguauaauugu

SEQ ID NO: 2236525 - RNA, 15 nt, Human
uuaacaccugaugug

SEQ ID NO: 2236526 - RNA, 16 nt, Human
uuaacaccugaugugu

SEQ ID NO: 2236527 - RNA, 17 nt, Human
uuaacaccugaugugua

SEQ ID NO: 2236528 - RNA, 19 nt, Human
uuaacaccugauguguaca

SEQ ID NO: 2236529 - RNA, 20 nt, Human
uuaacaccugauguguacau

SEQ ID NO: 2236530 - RNA, 18 nt, Human
uuaacaccuuuaaagugu

SEQ ID NO: 2236531 - RNA, 19 nt, Human
uuaacagaaauguacagca

SEQ ID NO: 2236532 - RNA, 14 nt, Human
uuaacagagacaga

SEQ ID NO: 2236533 - RNA, 21 nt, Human
aguuucauguacaagaugaag

SEQ ID NO: 2236534 - RNA, 18 nt, Human
aguuucauguacaagaug

SEQ ID NO: 2236535 - RNA, 15 nt, Human
aguuucauguacaag

SEQ ID NO: 2236536 - RNA, 18 nt, Human
aguuucauagcuaagaaa

SEQ ID NO: 2236537 - RNA, 13 nt, Human
uuaacacugagcu

SEQ ID NO: 2236538 - RNA, 20 nt, Human
uuaacagaaauguacagcaa

SEQ ID NO: 2236539 - RNA, 23 nt, Human
uuaacaauaacuacuguguuccu

SEQ ID NO: 2236540 - RNA, 17 nt, Human
uuaacaaugauauaugg

SEQ ID NO: 2236541 - RNA, 21 nt, Human
uuaacaauaacuacuguguuc

SEQ ID NO: 2236542 - RNA, 20 nt, Human
uuaacaauaacuacuguguu

SEQ ID NO: 2236543 - RNA, 19 nt, Human
uuaacaauaacuacugugu

SEQ ID NO: 2236544 - RNA, 18 nt, Human
uuaacaauaacuacugug

SEQ ID NO: 2236545 - RNA, 19 nt, Human
uuaaauagaguauaugcac

SEQ ID NO: 2236546 - RNA, 19 nt, Human
uuaaauacgcacuacaugu

SEQ ID NO: 2236547 - RNA, 19 nt, Human
uuaacaagcucccaggccg

SEQ ID NO: 2236548 - RNA, 13 nt, Human
uuaaauacagucu

SEQ ID NO: 2236549 - RNA, 18 nt, Human
uuaaauagaguuugcuau

SEQ ID NO: 2236550 - RNA, 20 nt, Human
uuaaauacagacacuaaguu

SEQ ID NO: 2236551 - RNA, 18 nt, Human
uuaaauacagacacuaag

SEQ ID NO: 2236552 - RNA, 19 nt, Human
uuaaauacagacacuaagu

SEQ ID NO: 2236553 - RNA, 18 nt, Human
uuaaauaaugugaaacug

SEQ ID NO: 2236554 - RNA, 16 nt, Human
uuaaauaaugugaaac

SEQ ID NO: 2236555 - RNA, 13 nt, Human
uuaaauaauguga

SEQ ID NO: 2236556 - RNA, 18 nt, Human
uuaaauacaaaacuucca

SEQ ID NO: 2236557 - RNA, 17 nt, Human
uuaaauacagacacuaa

SEQ ID NO: 2236558 - RNA, 16 nt, Human
uuaaauacagacacua

SEQ ID NO: 2236559 - RNA, 16 nt, Human
uuaaauacaaaacuuc

SEQ ID NO: 2236560 - RNA, 21 nt, Human
uuaaaguguccauugacaugu

SEQ ID NO: 2236561 - RNA, 15 nt, Human
uuaaauacaaaacuu

SEQ ID NO: 2236562 - RNA, 13 nt, Human
uuaaaaaaaaucc

SEQ ID NO: 2236563 - RNA, 19 nt, Human
uuaaaaaaaggcauuguuu

SEQ ID NO: 2236564 - RNA, 17 nt, Human
uuaaaaaaauaaaacau

SEQ ID NO: 2236565 - RNA, 21 nt, Human
uuaaaaaaaggcauuguuuga

SEQ ID NO: 2236566 - RNA, 18 nt, Human
uuaaaaaaauaaaacauu

SEQ ID NO: 2236567 - RNA, 19 nt, Human
uuaaaaaaauaaaacauuu

SEQ ID NO: 2236568 - RNA, 23 nt, Human
uuaaaaaaauaaaacauuuuaaa

SEQ ID NO: 2236569 - RNA, 20 nt, Human
uuaaaaaaauugguuggaga

SEQ ID NO: 2236570 - RNA, 21 nt, Human
uuaaaaaucuaccuucuguag

SEQ ID NO: 2236571 - RNA, 14 nt, Human
uuaaaaaaaugaca

SEQ ID NO: 2236572 - RNA, 18 nt, Human
aguuuaauugacuuauuu

SEQ ID NO: 2236573 - RNA, 15 nt, Human
aguuuacaaguguau

SEQ ID NO: 2236574 - RNA, 16 nt, Human
aguuuacaaguguaua

SEQ ID NO: 2236575 - RNA, 17 nt, Human
aguuuacaaguguauau

SEQ ID NO: 2236576 - RNA, 14 nt, Human
aguuuaauugacuu

SEQ ID NO: 2236577 - RNA, 15 nt, Human
aguuuaauugacuua

SEQ ID NO: 2236578 - RNA, 23 nt, Human
uuaaaaaaaacaaaaagaacaaa

SEQ ID NO: 2236579 - RNA, 18 nt, Human
aguuuacaguaaauaaau

SEQ ID NO: 2236580 - RNA, 20 nt, Human
aguuuacaguaaauaaauug

SEQ ID NO: 2236581 - RNA, 22 nt, Human
aguuuacaguaaauaaauuguu

SEQ ID NO: 2236582 - RNA, 22 nt, Human
aguuuacaucauuuuuguaucu

SEQ ID NO: 2236583 - RNA, 19 nt, Human
aguuuacaaguguauauca

SEQ ID NO: 2236584 - RNA, 21 nt, Human
aguuuacaaguguauaucaga

SEQ ID NO: 2236585 - RNA, 23 nt, Human
aguuuacaaguguauaucagaaa

SEQ ID NO: 2236586 - RNA, 13 nt, Human
aguuuacaguaaa

SEQ ID NO: 2236587 - RNA, 14 nt, Human
aguuuacaguaaau

SEQ ID NO: 2236588 - RNA, 16 nt, Human
aguuuacaguaaauaa

SEQ ID NO: 2236589 - RNA, 15 nt, Human
aguuuaaaaaaauug

SEQ ID NO: 2236590 - RNA, 14 nt, Human
aguuuaaaaaaauu

SEQ ID NO: 2236591 - RNA, 17 nt, Human
aguuggucccccuucca

SEQ ID NO: 2236592 - RNA, 11 nt, Human
aguuggucccc

SEQ ID NO: 2236593 - RNA, 13 nt, Human
aguuggucccccu

SEQ ID NO: 2236594 - RNA, 12 nt, Human
aguuuaaagcaa

SEQ ID NO: 2236595 - RNA, 21 nt, Human
aguuuaaagcucgaaaacaau

SEQ ID NO: 2236596 - RNA, 22 nt, Human
aguuuaauggugccuucauuug

SEQ ID NO: 2236597 - RNA, 18 nt, Human
aguuuaaaacagaagccu

SEQ ID NO: 2236598 - RNA, 14 nt, Human
aguuuaaauuguaa

SEQ ID NO: 2236599 - RNA, 16 nt, Human
uguuucaaaauaaaaa

SEQ ID NO: 2236600 - RNA, 17 nt, Human
uguuucaaacacaaaug

SEQ ID NO: 2236601 - RNA, 18 nt, Human
uguuucaaacacaaaugc

SEQ ID NO: 2236602 - RNA, 23 nt, Human
aguugccagucaccccggccacc

SEQ ID NO: 2236603 - RNA, 13 nt, Human
uguuucaaacaua

SEQ ID NO: 2236604 - RNA, 12 nt, Human
uguuuauuuuuc

SEQ ID NO: 2236605 - RNA, 14 nt, Human
uguuuauuuuucau

SEQ ID NO: 2236606 - RNA, 15 nt, Human
uguuuauuuuucaua

SEQ ID NO: 2236607 - RNA, 19 nt, Human
uguuuauuuuucauauugu

SEQ ID NO: 2236608 - RNA, 16 nt, Human
uguuuauuuuucauau

SEQ ID NO: 2236609 - RNA, 18 nt, Human
uguuuauuuuucauauug

SEQ ID NO: 2236610 - RNA, 19 nt, Human
uguuucaaacacaaaugca

SEQ ID NO: 2236611 - RNA, 17 nt, Human
aguugcugggagcugaa

SEQ ID NO: 2236612 - RNA, 19 nt, Human
aguugggcuuccucauagu

SEQ ID NO: 2236613 - RNA, 21 nt, Human
aguuggggucuggcagccucc

SEQ ID NO: 2236614 - RNA, 17 nt, Human
aguuggggucuggcagc

SEQ ID NO: 2236615 - RNA, 15 nt, Human
aguugggugagaaca

SEQ ID NO: 2236616 - RNA, 13 nt, Human
aguugggcuuccu

SEQ ID NO: 2236617 - RNA, 19 nt, Human
aguuggagugaguguggcu

SEQ ID NO: 2236618 - RNA, 14 nt, Human
aguugcugucauaa

SEQ ID NO: 2236619 - RNA, 14 nt, Human
aguugcuuguaaaa

SEQ ID NO: 2236620 - RNA, 14 nt, Human
aguuggaaauauuc

SEQ ID NO: 2236621 - RNA, 21 nt, Human
uuaagggauggaaaaggaaga

SEQ ID NO: 2236622 - RNA, 9 nt, Human
uuaaggugg

SEQ ID NO: 2236623 - RNA, 15 nt, Human
uuaaggguuaagaaa

SEQ ID NO: 2236624 - RNA, 18 nt, Human
uuaaggugauauauuuaa

SEQ ID NO: 2236625 - RNA, 14 nt, Human
uuaagguuauuuau

SEQ ID NO: 2236626 - RNA, 17 nt, Human
uuaaguaucugacaucu

SEQ ID NO: 2236627 - RNA, 22 nt, Human
uuaagaaagacuaucuaaaugu

SEQ ID NO: 2236628 - RNA, 22 nt, Human
uuaagaaaaucauauugcuucu

SEQ ID NO: 2236629 - RNA, 14 nt, Human
uuaagaaaaucaua

SEQ ID NO: 2236630 - RNA, 13 nt, Human
uuaagaagaaacu

SEQ ID NO: 2236631 - RNA, 20 nt, Human
uuaagaagacugcauuauau

SEQ ID NO: 2236632 - RNA, 16 nt, Human
uuaaguauuuauauau

SEQ ID NO: 2236633 - RNA, 11 nt, Human
uuaaguauuua

SEQ ID NO: 2236634 - RNA, 15 nt, Human
uuaaguauugcaucu

SEQ ID NO: 2236635 - RNA, 19 nt, Human
uuaaguauugcaucuguau

SEQ ID NO: 2236636 - RNA, 20 nt, Human
uuaaguauugcaucuguaua

SEQ ID NO: 2236637 - RNA, 21 nt, Human
uuaaguauugcaucuguauaa

SEQ ID NO: 2236638 - RNA, 13 nt, Human
uuaaguauugcau

SEQ ID NO: 2236639 - RNA, 14 nt, Human
uuaaguaucuuuuu

SEQ ID NO: 2236640 - RNA, 19 nt, Human
uuaaguaucuuuuuucaaa

SEQ ID NO: 2236641 - RNA, 14 nt, Human
uuaaguauguguaa

SEQ ID NO: 2236642 - RNA, 19 nt, Human
uuaaguauuuauauauuua

SEQ ID NO: 2236643 - RNA, 17 nt, Human
uuaaguauuuauauauu

SEQ ID NO: 2236644 - RNA, 19 nt, Human
uuaagucuaaauauuuccu

SEQ ID NO: 2236645 - RNA, 14 nt, Human
uuaagugcugcauu

SEQ ID NO: 2236646 - RNA, 15 nt, Human
uuaagucuguuuuau

SEQ ID NO: 2236647 - RNA, 14 nt, Human
uuaagucuguuuua

SEQ ID NO: 2236648 - RNA, 19 nt, Human
uuaagugcugcauuuaaaa

SEQ ID NO: 2236649 - RNA, 12 nt, Human
uuaauauuuaaa

SEQ ID NO: 2236650 - RNA, 15 nt, Human
uuaauauuuaaacag

SEQ ID NO: 2236651 - RNA, 16 nt, Human
uuaauauuuaaacagc

SEQ ID NO: 2236652 - RNA, 17 nt, Human
uuaauauuuaaacagca

SEQ ID NO: 2236653 - RNA, 16 nt, Human
uuaagugcugcauuua

SEQ ID NO: 2236654 - RNA, 15 nt, Human
uuaagugcugcauuu

SEQ ID NO: 2236655 - RNA, 17 nt, Human
uuaaucuuuucacaaau

SEQ ID NO: 2236656 - RNA, 18 nt, Human
uuaaucuuuucacaaaua

SEQ ID NO: 2236657 - RNA, 19 nt, Human
uuaaucuuuucacaaauaa

SEQ ID NO: 2236658 - RNA, 20 nt, Human
uuaaucuuuucacaaauaaa

SEQ ID NO: 2236659 - RNA, 18 nt, Human
uuaaugaaagacuguaca

SEQ ID NO: 2236660 - RNA, 22 nt, Human
uuaaucugguuuauuuuuguuc

SEQ ID NO: 2236661 - RNA, 16 nt, Human
uuaaucuguauuuccc

SEQ ID NO: 2236662 - RNA, 21 nt, Human
uuaauugacuuauuuauauaa

SEQ ID NO: 2236663 - RNA, 13 nt, Human
uuaauugaaauuu

SEQ ID NO: 2236664 - RNA, 13 nt, Human
uuaauugcuuuga

SEQ ID NO: 2236665 - RNA, 12 nt, Human
uuaauugcuuug

SEQ ID NO: 2236666 - RNA, 22 nt, Human
uuaauugauuauucugauucca

SEQ ID NO: 2236667 - RNA, 16 nt, Human
uuaaugaaaaugucag

SEQ ID NO: 2236668 - RNA, 15 nt, Human
uuaaugaaaauguca

SEQ ID NO: 2236669 - RNA, 14 nt, Human
uuaaugaaaauguc

SEQ ID NO: 2236670 - RNA, 15 nt, Human
uuaaugaaaauaaga

SEQ ID NO: 2236671 - RNA, 19 nt, Human
uuaaugaaagacuguacaa

SEQ ID NO: 2236672 - RNA, 20 nt, Human
uuaauauuugcugacagcug

SEQ ID NO: 2236673 - RNA, 19 nt, Human
uuaauauuugcugacagcu

SEQ ID NO: 2236674 - RNA, 12 nt, Human
uuaauauuugcu

SEQ ID NO: 2236675 - RNA, 22 nt, Human
uuaauauuuauaggucacuuug

SEQ ID NO: 2236676 - RNA, 18 nt, Human
uuaauauuuaaacagcag

SEQ ID NO: 2236677 - RNA, 21 nt, Human
uuaauauuuaaacagcagugu

SEQ ID NO: 2236678 - RNA, 22 nt, Human
uuaauauuuaaacagcaguguu

SEQ ID NO: 2236679 - RNA, 13 nt, Human
uuaaucauuaggu

SEQ ID NO: 2236680 - RNA, 14 nt, Human
uuaaucaaguugaa

SEQ ID NO: 2236681 - RNA, 17 nt, Human
uuaaucaaguugaauug

SEQ ID NO: 2236682 - RNA, 13 nt, Human
uuaaucaugaaau

SEQ ID NO: 2236683 - RNA, 17 nt, Human
uuaaucaugaaugugua

SEQ ID NO: 2236684 - RNA, 13 nt, Human
uuaaucauugccu

SEQ ID NO: 2236685 - RNA, 18 nt, Human
uuaaucaugaauguguaa

SEQ ID NO: 2236686 - RNA, 15 nt, Human
uuaagguuauuuauu

SEQ ID NO: 2236687 - RNA, 21 nt, Human
uuaaucugggccagaauuuca

SEQ ID NO: 2236688 - RNA, 23 nt, Human
uuaaucauuaggugugacugaau

SEQ ID NO: 2236689 - RNA, 22 nt, Human
uuaaucauuaggugugacugaa

SEQ ID NO: 2236690 - RNA, 15 nt, Human
aguuuuuauugcuug

SEQ ID NO: 2236691 - RNA, 17 nt, Human
aguuuuuauggggcuga

SEQ ID NO: 2236692 - RNA, 18 nt, Human
aguuuuuauuccuuguga

SEQ ID NO: 2236693 - RNA, 19 nt, Human
auaaaagauggggucugua

SEQ ID NO: 2236694 - RNA, 21 nt, Human
auaaaagauggggucuguaaa

SEQ ID NO: 2236695 - RNA, 15 nt, Human
auaaaagcauaaaug

SEQ ID NO: 2236696 - RNA, 20 nt, Human
auaaaagcagcaucugcuaa

SEQ ID NO: 2236697 - RNA, 16 nt, Human
auaaaagcagcaucug

SEQ ID NO: 2236698 - RNA, 20 nt, Human
auaaaagcaauuccaaccuu

SEQ ID NO: 2236699 - RNA, 22 nt, Human
auaaaagauggggucuguaaaa

SEQ ID NO: 2236700 - RNA, 17 nt, Human
auaaaagcaauuccaac

SEQ ID NO: 2236701 - RNA, 19 nt, Human
auaaaagcaauuccaaccu

SEQ ID NO: 2236702 - RNA, 13 nt, Human
auaaaagccuguu

SEQ ID NO: 2236703 - RNA, 15 nt, Human
auaaaauaauucuaa

SEQ ID NO: 2236704 - RNA, 23 nt, Human
auaaaauaaugggauuuucuuuu

SEQ ID NO: 2236705 - RNA, 15 nt, Human
auaaaauaaauauau

SEQ ID NO: 2236706 - RNA, 16 nt, Human
auaaaauaaauauaua

SEQ ID NO: 2236707 - RNA, 21 nt, Human
auaaaauaaauauauauaaac

SEQ ID NO: 2236708 - RNA, 12 nt, Human
auaaaauaauuu

SEQ ID NO: 2236709 - RNA, 20 nt, Human
auaaaagcauaaaugcaaac

SEQ ID NO: 2236710 - RNA, 18 nt, Human
auaaaagcauaaaugcaa

SEQ ID NO: 2236711 - RNA, 14 nt, Human
auaaaauaaauaua

SEQ ID NO: 2236712 - RNA, 13 nt, Human
auaaaauaaauau

SEQ ID NO: 2236713 - RNA, 18 nt, Human
auaaaagccuguuuaaga

SEQ ID NO: 2236714 - RNA, 20 nt, Human
auaaaauagcaauccuaaag

SEQ ID NO: 2236715 - RNA, 21 nt, Human
auaaaauaugaagacauaaac

SEQ ID NO: 2236716 - RNA, 19 nt, Human
auaaaauauuuucauacag

SEQ ID NO: 2236717 - RNA, 15 nt, Human
auaaaauaauuuuua

SEQ ID NO: 2236718 - RNA, 16 nt, Human
auaaaauaauucuaaa

SEQ ID NO: 2236719 - RNA, 17 nt, Human
auaaaauaauucuaaag

SEQ ID NO: 2236720 - RNA, 18 nt, Human
auaaaauaauucuaaagg

SEQ ID NO: 2236721 - RNA, 16 nt, Human
auaaaauacuauuuuu

SEQ ID NO: 2236722 - RNA, 19 nt, Human
auaaaauacuauuuuuacu

SEQ ID NO: 2236723 - RNA, 11 nt, Human
uuaagaaaauc

SEQ ID NO: 2236724 - RNA, 15 nt, Human
auaaaaucagccaau

SEQ ID NO: 2236725 - RNA, 14 nt, Human
uuaagaaaagagau

SEQ ID NO: 2236726 - RNA, 21 nt, Human
uuaagaaaaaggaugcacaga

SEQ ID NO: 2236727 - RNA, 19 nt, Human
uuaagaaaaaggaugcaca

SEQ ID NO: 2236728 - RNA, 11 nt, Human
auaaaaucagc

SEQ ID NO: 2236729 - RNA, 20 nt, Human
uuaagaaaaaggaugcacag

SEQ ID NO: 2236730 - RNA, 14 nt, Human
aguuuuguauucau

SEQ ID NO: 2236731 - RNA, 19 nt, Human
aguuuuuaagguuauuuau

SEQ ID NO: 2236732 - RNA, 14 nt, Human
aguuuugucuugaa

SEQ ID NO: 2236733 - RNA, 12 nt, Human
aguuuugucuug

SEQ ID NO: 2236734 - RNA, 13 nt, Human
aguuuugucuuga

SEQ ID NO: 2236735 - RNA, 16 nt, Human
aguuuuuacuuucugu

SEQ ID NO: 2236736 - RNA, 23 nt, Human
aguuuuuaccuaccacagugucu

SEQ ID NO: 2236737 - RNA, 15 nt, Human
aguuuuuacugaaca

SEQ ID NO: 2236738 - RNA, 22 nt, Human
aguuuuuaccuaccacaguguc

SEQ ID NO: 2236739 - RNA, 21 nt, Human
aguuuuuaccuaccacagugu

SEQ ID NO: 2236740 - RNA, 17 nt, Human
aguuuuuaccuaccaca

SEQ ID NO: 2236741 - RNA, 23 nt, Human
aguuuuuauggcuuuugugcauu

SEQ ID NO: 2236742 - RNA, 16 nt, Human
aguuuugcauuuaugg

SEQ ID NO: 2236743 - RNA, 19 nt, Human
aguuuugccagaacaguuu

SEQ ID NO: 2236744 - RNA, 15 nt, Human
aguuuuggaugcagu

SEQ ID NO: 2236745 - RNA, 17 nt, Human
aguuuuggaugcagugc

SEQ ID NO: 2236746 - RNA, 18 nt, Human
aguuuuggaugcagugcu

SEQ ID NO: 2236747 - RNA, 19 nt, Human
aguuuuggaugcagugcuc

SEQ ID NO: 2236748 - RNA, 22 nt, Human
aguuuugguugcuuuaauauca

SEQ ID NO: 2236749 - RNA, 21 nt, Human
aguuuugguugcuuuaauauc

SEQ ID NO: 2236750 - RNA, 15 nt, Human
aguuuugguugcuuu

SEQ ID NO: 2236751 - RNA, 17 nt, Human
aguuuccucaggcugcu

SEQ ID NO: 2236752 - RNA, 19 nt, Human
aguuuucugagaaagacua

SEQ ID NO: 2236753 - RNA, 15 nt, Human
aguuuccaaaaccag

SEQ ID NO: 2236754 - RNA, 17 nt, Human
aguuucauucuccugcc

SEQ ID NO: 2236755 - RNA, 20 nt, Human
aguuucauucuccugccugu

SEQ ID NO: 2236756 - RNA, 16 nt, Human
aguuuccaaaaccaga

SEQ ID NO: 2236757 - RNA, 13 nt, Human
aguuuccucaggc

SEQ ID NO: 2236758 - RNA, 13 nt, Human
aguuuucuggcug

SEQ ID NO: 2236759 - RNA, 18 nt, Human
aguuuucuggcuggagcc

SEQ ID NO: 2236760 - RNA, 19 nt, Human
aguuuucuggcuggagccu

SEQ ID NO: 2236761 - RNA, 14 nt, Human
aguuuucuucugug

SEQ ID NO: 2236762 - RNA, 23 nt, Human
aguuuucugagaaagacuauuca

SEQ ID NO: 2236763 - RNA, 12 nt, Human
aguuuugaaaag

SEQ ID NO: 2236764 - RNA, 14 nt, Human
aguuuugaaaagcu

SEQ ID NO: 2236765 - RNA, 15 nt, Human
aguuuugaaaagcua

SEQ ID NO: 2236766 - RNA, 16 nt, Human
aguuuugaaaagcuau

SEQ ID NO: 2236767 - RNA, 17 nt, Human
aguuuugaaaagcuauu

SEQ ID NO: 2236768 - RNA, 11 nt, Human
uguuguuauuu

SEQ ID NO: 2236769 - RNA, 13 nt, Human
uguuguuauuuaa

SEQ ID NO: 2236770 - RNA, 20 nt, Human
uguuuagauaauacaccacu

SEQ ID NO: 2236771 - RNA, 21 nt, Human
uguuguguacguggagaggga

SEQ ID NO: 2236772 - RNA, 13 nt, Human
uguugugaauguc

SEQ ID NO: 2236773 - RNA, 15 nt, Human
uguugugugugggag

SEQ ID NO: 2236774 - RNA, 14 nt, Human
uguuguguguggga

SEQ ID NO: 2236775 - RNA, 18 nt, Human
uguuguuaaugaaaaugu

SEQ ID NO: 2236776 - RNA, 17 nt, Human
uguuguuaaugaaaaug

SEQ ID NO: 2236777 - RNA, 14 nt, Human
uguuguuaaauauc

SEQ ID NO: 2236778 - RNA, 21 nt, Human
uguuguuaaugaaaaugucag

SEQ ID NO: 2236779 - RNA, 20 nt, Human
uguuguuaaugaaaauguca

SEQ ID NO: 2236780 - RNA, 14 nt, Human
uguuguguuucugu

SEQ ID NO: 2236781 - RNA, 16 nt, Human
uguugugugugggagu

SEQ ID NO: 2236782 - RNA, 14 nt, Human
uguugguuccaagc

SEQ ID NO: 2236783 - RNA, 21 nt, Human
uguugguaauuauuuugguac

SEQ ID NO: 2236784 - RNA, 14 nt, Human
uguuggucauuuua

SEQ ID NO: 2236785 - RNA, 22 nt, Human
uguugggguggguauaaaagau

SEQ ID NO: 2236786 - RNA, 23 nt, Human
uguugggguggguauaaaagaug

SEQ ID NO: 2236787 - RNA, 14 nt, Human
uguugguuuugacu

SEQ ID NO: 2236788 - RNA, 17 nt, Human
uguugguuuugacugga

SEQ ID NO: 2236789 - RNA, 15 nt, Human
uguugucucuugagu

SEQ ID NO: 2236790 - RNA, 16 nt, Human
uguugguuccaagccc

SEQ ID NO: 2236791 - RNA, 19 nt, Human
uguugguuccaagcccugg

SEQ ID NO: 2236792 - RNA, 16 nt, Human
uguugucuugaaagau

SEQ ID NO: 2236793 - RNA, 17 nt, Human
uguugucuguuuguucu

SEQ ID NO: 2236794 - RNA, 12 nt, Human
uguugucuugaa

SEQ ID NO: 2236795 - RNA, 12 nt, Human
uguugugaaugu

SEQ ID NO: 2236796 - RNA, 13 nt, Human
uguugugaauguu

SEQ ID NO: 2236797 - RNA, 14 nt, Human
uguugugauguauu

SEQ ID NO: 2236798 - RNA, 20 nt, Human
uguugugauguauucuagcu

SEQ ID NO: 2236799 - RNA, 24 nt, Human
uguuuauggccucagcugccucac

SEQ ID NO: 2236800 - RNA, 21 nt, Human
uguuuaugcaaggaaggaaag

SEQ ID NO: 2236801 - RNA, 21 nt, Human
uguuuaugagccagacaaaug

SEQ ID NO: 2236802 - RNA, 16 nt, Human
uguuuaugagccagac

SEQ ID NO: 2236803 - RNA, 14 nt, Human
uguuuaugagccag

SEQ ID NO: 2236804 - RNA, 23 nt, Human
uguuuauggccucagcugccuca

SEQ ID NO: 2236805 - RNA, 15 nt, Human
uguuuauggccucag

SEQ ID NO: 2236806 - RNA, 14 nt, Human
uguuuauggccuca

SEQ ID NO: 2236807 - RNA, 13 nt, Human
uguuuauggccuc

SEQ ID NO: 2236808 - RNA, 16 nt, Human
uguuuauuuuauauua

SEQ ID NO: 2236809 - RNA, 14 nt, Human
uguuuauugucaaa

SEQ ID NO: 2236810 - RNA, 18 nt, Human
uguuuauuccugauaaua

SEQ ID NO: 2236811 - RNA, 13 nt, Human
uguuuauuccuug

SEQ ID NO: 2236812 - RNA, 13 nt, Human
uguuuauuccuga

SEQ ID NO: 2236813 - RNA, 13 nt, Human
uguuuaguaauca

SEQ ID NO: 2236814 - RNA, 19 nt, Human
uguuuaguaaacucaauaa

SEQ ID NO: 2236815 - RNA, 16 nt, Human
uguuuagcaaauacau

SEQ ID NO: 2236816 - RNA, 22 nt, Human
uguuuagcagcagccuuuaaug

SEQ ID NO: 2236817 - RNA, 17 nt, Human
uguuuagcagcagccuu

SEQ ID NO: 2236818 - RNA, 14 nt, Human
uguuuaguaaucau

SEQ ID NO: 2236819 - RNA, 17 nt, Human
uguuuaguaaucauauu

SEQ ID NO: 2236820 - RNA, 21 nt, Human
aguucgaugggcccaauucuu

SEQ ID NO: 2236821 - RNA, 15 nt, Human
aguucuacauaagua

SEQ ID NO: 2236822 - RNA, 20 nt, Human
aguucuaccucaggcagcuc

SEQ ID NO: 2236823 - RNA, 20 nt, Human
aguuccugcggagugaagag

SEQ ID NO: 2236824 - RNA, 16 nt, Human
aguuccucuuugcaug

SEQ ID NO: 2236825 - RNA, 18 nt, Human
aguuccugaaccugaugc

SEQ ID NO: 2236826 - RNA, 23 nt, Human
aguuccugcuacaacuucagcag

SEQ ID NO: 2236827 - RNA, 19 nt, Human
aguuccugaaccugaugcu

SEQ ID NO: 2236828 - RNA, 21 nt, Human
aguuccugcggagugaagagg

SEQ ID NO: 2236829 - RNA, 20 nt, Human
aguucggugagcuacaaaug

SEQ ID NO: 2236830 - RNA, 17 nt, Human
aguuccucgcccugggu

SEQ ID NO: 2236831 - RNA, 16 nt, Human
aguuccucgcccuggg

SEQ ID NO: 2236832 - RNA, 18 nt, Human
aguuccucuagugcccuc

SEQ ID NO: 2236833 - RNA, 15 nt, Human
aguuccucuuugcau

SEQ ID NO: 2236834 - RNA, 21 nt, Human
aguuccucuuugcauggaauu

SEQ ID NO: 2236835 - RNA, 15 nt, Human
aguuccucgcccugg

SEQ ID NO: 2236836 - RNA, 14 nt, Human
aguuccucgcccug

SEQ ID NO: 2236837 - RNA, 13 nt, Human
aguuccucgcccu

SEQ ID NO: 2236838 - RNA, 12 nt, Human
aguuccucgccc

SEQ ID NO: 2236839 - RNA, 19 nt, Human
aguucggugagcuacaaau

SEQ ID NO: 2236840 - RNA, 12 nt, Human
aguucucacugu

SEQ ID NO: 2236841 - RNA, 18 nt, Human
aguucucacuguucccuc

SEQ ID NO: 2236842 - RNA, 19 nt, Human
aguucucacuguucccucu

SEQ ID NO: 2236843 - RNA, 20 nt, Human
aguucucacuguucccucug

SEQ ID NO: 2236844 - RNA, 12 nt, Human
aguucucagggc

SEQ ID NO: 2236845 - RNA, 14 nt, Human
aguucucagggcuc

SEQ ID NO: 2236846 - RNA, 15 nt, Human
aguucucagggcucc

SEQ ID NO: 2236847 - RNA, 17 nt, Human
aguucuaguuugcauuc

SEQ ID NO: 2236848 - RNA, 15 nt, Human
aguucuaguugcuug

SEQ ID NO: 2236849 - RNA, 15 nt, Human
aguucuaguuugcau

SEQ ID NO: 2236850 - RNA, 16 nt, Human
aguucuaguuugcauu

SEQ ID NO: 2236851 - RNA, 17 nt, Human
uguugggguggguauaa

SEQ ID NO: 2236852 - RNA, 18 nt, Human
uguugggguggguauaaa

SEQ ID NO: 2236853 - RNA, 20 nt, Human
uguugggguggguauaaaag

SEQ ID NO: 2236854 - RNA, 15 nt, Human
uguuggggcaguggu

SEQ ID NO: 2236855 - RNA, 17 nt, Human
aguucucagggcuccug

SEQ ID NO: 2236856 - RNA, 18 nt, Human
aguucucagggcuccugc

SEQ ID NO: 2236857 - RNA, 19 nt, Human
aguucucagggcuccugcc

SEQ ID NO: 2236858 - RNA, 23 nt, Human
aguucucagggcuccugccuucu

SEQ ID NO: 2236859 - RNA, 17 nt, Human
aguucuagucucucugg

SEQ ID NO: 2236860 - RNA, 19 nt, Human
aguucuagucucucugggg

SEQ ID NO: 2236861 - RNA, 15 nt, Human
aguucuagagaagag

SEQ ID NO: 2236862 - RNA, 16 nt, Human
aguucuagagaagagg

SEQ ID NO: 2236863 - RNA, 17 nt, Human
aguucuagagaagaggc

SEQ ID NO: 2236864 - RNA, 20 nt, Human
aguucuagagaagaggcugg

SEQ ID NO: 2236865 - RNA, 22 nt, Human
aguucuaccucaggcagcucaa

SEQ ID NO: 2236866 - RNA, 23 nt, Human
aguucuaccucaggcagcucaag

SEQ ID NO: 2236867 - RNA, 13 nt, Human
aguucuagagaag

SEQ ID NO: 2236868 - RNA, 14 nt, Human
aguucuagagaaga

SEQ ID NO: 2236869 - RNA, 21 nt, Human
aguucacuauaaaugguguuu

SEQ ID NO: 2236870 - RNA, 15 nt, Human
aguucacuucaucuu

SEQ ID NO: 2236871 - RNA, 16 nt, Human
aguucacuauaaaugg

SEQ ID NO: 2236872 - RNA, 22 nt, Human
aguucacuucaucuucucagcu

SEQ ID NO: 2236873 - RNA, 12 nt, Human
aguucccagaau

SEQ ID NO: 2236874 - RNA, 13 nt, Human
aguucccagaauc

SEQ ID NO: 2236875 - RNA, 14 nt, Human
aguucccagaauca

SEQ ID NO: 2236876 - RNA, 14 nt, Human
aguucaauggcugc

SEQ ID NO: 2236877 - RNA, 17 nt, Human
aguucaauggcugcuga

SEQ ID NO: 2236878 - RNA, 18 nt, Human
aguucaauggcugcugaa

SEQ ID NO: 2236879 - RNA, 14 nt, Human
aguucaccauuaaa

SEQ ID NO: 2236880 - RNA, 23 nt, Human
aguuccucauuagcauuuugcua

SEQ ID NO: 2236881 - RNA, 15 nt, Human
aguucccuacuuccu

SEQ ID NO: 2236882 - RNA, 15 nt, Human
aguucccauguuaaa

SEQ ID NO: 2236883 - RNA, 14 nt, Human
aguuccccaugcag

SEQ ID NO: 2236884 - RNA, 16 nt, Human
aguuccccaugcagac

SEQ ID NO: 2236885 - RNA, 18 nt, Human
aguucccccaaccucaga

SEQ ID NO: 2236886 - RNA, 17 nt, Human
aguuccccaugcagaca

SEQ ID NO: 2236887 - RNA, 15 nt, Human
aguucccccaaccuc

SEQ ID NO: 2236888 - RNA, 15 nt, Human
aguucccagaaucaa

SEQ ID NO: 2236889 - RNA, 16 nt, Human
aguucccagaaucaaa

SEQ ID NO: 2236890 - RNA, 16 nt, Human
aguuaucuaaaagaaa

SEQ ID NO: 2236891 - RNA, 15 nt, Human
aguuauaguuucaga

SEQ ID NO: 2236892 - RNA, 16 nt, Human
aguuauaguuucagau

SEQ ID NO: 2236893 - RNA, 18 nt, Human
aguuauaguuucagauau

SEQ ID NO: 2236894 - RNA, 21 nt, Human
aguuauauagguuuuguuugc

SEQ ID NO: 2236895 - RNA, 23 nt, Human
aguuauauagguuuuguuugcua

SEQ ID NO: 2236896 - RNA, 22 nt, Human
aguuauauagguuuuguuugcu

SEQ ID NO: 2236897 - RNA, 21 nt, Human
aguuaucagacacucuggcug

SEQ ID NO: 2236898 - RNA, 18 nt, Human
aguuaucaugcauguuau

SEQ ID NO: 2236899 - RNA, 23 nt, Human
aguuaucagacacucuggcuggu

SEQ ID NO: 2236900 - RNA, 16 nt, Human
aguucaauucucauuu

SEQ ID NO: 2236901 - RNA, 13 nt, Human
aguucaaugaucu

SEQ ID NO: 2236902 - RNA, 14 nt, Human
aguucaaugaucua

SEQ ID NO: 2236903 - RNA, 15 nt, Human
aguucaaugaucuag

SEQ ID NO: 2236904 - RNA, 16 nt, Human
aguucaaugaucuagg

SEQ ID NO: 2236905 - RNA, 20 nt, Human
aguucaaugaucuagguuua

SEQ ID NO: 2236906 - RNA, 21 nt, Human
aguucaaugaucuagguuuaa

SEQ ID NO: 2236907 - RNA, 22 nt, Human
aguucaaugaucuagguuuaac

SEQ ID NO: 2236908 - RNA, 23 nt, Human
aguucaaugaucuagguuuaacu

SEQ ID NO: 2236909 - RNA, 18 nt, Human
aguucaauaaaugucugu

SEQ ID NO: 2236910 - RNA, 19 nt, Human
aguucaauaaaugucuguu

SEQ ID NO: 2236911 - RNA, 21 nt, Human
aguucaauaaaugucuguuga

SEQ ID NO: 2236912 - RNA, 13 nt, Human
aguucaauccuac

SEQ ID NO: 2236913 - RNA, 15 nt, Human
aguucaaucucccgc

SEQ ID NO: 2236914 - RNA, 22 nt, Human
aguucaaucucccgcugcugcu

SEQ ID NO: 2236915 - RNA, 10 nt, Human
aguucaauga

SEQ ID NO: 2236916 - RNA, 11 nt, Human
aguucaaugau

SEQ ID NO: 2236917 - RNA, 12 nt, Human
aguucaaugauc

SEQ ID NO: 2236918 - RNA, 18 nt, Human
uguucuacucauauauau

SEQ ID NO: 2236919 - RNA, 15 nt, Human
uguucuaguuuucag

SEQ ID NO: 2236920 - RNA, 16 nt, Human
uguucuaguuuucagu

SEQ ID NO: 2236921 - RNA, 18 nt, Human
uguucuuaguuugcaguu

SEQ ID NO: 2236922 - RNA, 13 nt, Human
uguucuugaagca

SEQ ID NO: 2236923 - RNA, 18 nt, Human
uguucccucucccuguug

SEQ ID NO: 2236924 - RNA, 18 nt, Human
uguuauuucuuacaggca

SEQ ID NO: 2236925 - RNA, 21 nt, Human
uguuccccucacuggaugaaa

SEQ ID NO: 2236926 - RNA, 17 nt, Human
uguucuaagucuuucca

SEQ ID NO: 2236927 - RNA, 18 nt, Human
uguucuagcauggcugcc

SEQ ID NO: 2236928 - RNA, 22 nt, Human
uguucuaauuaauaaauuauuu

SEQ ID NO: 2236929 - RNA, 23 nt, Human
uguuccccuuccacugagggcag

SEQ ID NO: 2236930 - RNA, 21 nt, Human
uguuccccuuccacugagggc

SEQ ID NO: 2236931 - RNA, 20 nt, Human
uguuccccuuccacugaggg

SEQ ID NO: 2236932 - RNA, 17 nt, Human
uguuccccuccuccacu

SEQ ID NO: 2236933 - RNA, 19 nt, Human
uguuccccuccuccacucu

SEQ ID NO: 2236934 - RNA, 17 nt, Human
uguuccccuuccacuga

SEQ ID NO: 2236935 - RNA, 14 nt, Human
uguuccccuuccac

SEQ ID NO: 2236936 - RNA, 23 nt, Human
uguuccccuccuccacucucccc

SEQ ID NO: 2236937 - RNA, 13 nt, Human
uguuccccuccuc

SEQ ID NO: 2236938 - RNA, 15 nt, Human
uguuccccuccucca

SEQ ID NO: 2236939 - RNA, 12 nt, Human
uguuccccuccu

SEQ ID NO: 2236940 - RNA, 17 nt, Human
uguuauuucucagacuu

SEQ ID NO: 2236941 - RNA, 15 nt, Human
uguuauuuaaaugag

SEQ ID NO: 2236942 - RNA, 14 nt, Human
uguuauuuaaagaa

SEQ ID NO: 2236943 - RNA, 22 nt, Human
uguuauugggcaagugauugaa

SEQ ID NO: 2236944 - RNA, 18 nt, Human
uguuauuuaacagcugaa

SEQ ID NO: 2236945 - RNA, 18 nt, Human
uguuauuuauaaucacuu

SEQ ID NO: 2236946 - RNA, 21 nt, Human
uguuauuuauaaucacuuuuu

SEQ ID NO: 2236947 - RNA, 17 nt, Human
uguuauuuagacucauc

SEQ ID NO: 2236948 - RNA, 14 nt, Human
uguuauuuauauau

SEQ ID NO: 2236949 - RNA, 21 nt, Human
uguuauuucuauuuuuguaga

SEQ ID NO: 2236950 - RNA, 22 nt, Human
uguuauuucuauuuuuguagaa

SEQ ID NO: 2236951 - RNA, 13 nt, Human
uguuauuucucag

SEQ ID NO: 2236952 - RNA, 23 nt, Human
uguuauuagagauuaccuccuga

SEQ ID NO: 2236953 - RNA, 21 nt, Human
uguuauuagagauuaccuccu

SEQ ID NO: 2236954 - RNA, 12 nt, Human
uguuauuauaua

SEQ ID NO: 2236955 - RNA, 22 nt, Human
uguuauuauuacuuauuuuuga

SEQ ID NO: 2236956 - RNA, 21 nt, Human
uguuauugggcaagugauuga

SEQ ID NO: 2236957 - RNA, 21 nt, Human
agugugguagggacuuaaaaa

SEQ ID NO: 2236958 - RNA, 23 nt, Human
aguggaucuccaaggaccagguu

SEQ ID NO: 2236959 - RNA, 18 nt, Human
aguggaucuccaaggacc

SEQ ID NO: 2236960 - RNA, 17 nt, Human
aguguggucccaacagg

SEQ ID NO: 2236961 - RNA, 23 nt, Human
agugugggucuguguguguguau

SEQ ID NO: 2236962 - RNA, 19 nt, Human
agugugggucugugugugu

SEQ ID NO: 2236963 - RNA, 20 nt, Human
uguuaucaaaacuuucuuuu

SEQ ID NO: 2236964 - RNA, 21 nt, Human
uguuaucagucaauauuuuua

SEQ ID NO: 2236965 - RNA, 19 nt, Human
uguuaucaccgugggcucc

SEQ ID NO: 2236966 - RNA, 13 nt, Human
uguuaucaaacuu

SEQ ID NO: 2236967 - RNA, 16 nt, Human
aguggagaauuauaua

SEQ ID NO: 2236968 - RNA, 22 nt, Human
aguggacuuuccacccccuccc

SEQ ID NO: 2236969 - RNA, 20 nt, Human
aguggacuuuccacccccuc

SEQ ID NO: 2236970 - RNA, 19 nt, Human
aguggacuuuccacccccu

SEQ ID NO: 2236971 - RNA, 18 nt, Human
aguggacuuuccaccccc

SEQ ID NO: 2236972 - RNA, 17 nt, Human
aguggacuuuccacccc

SEQ ID NO: 2236973 - RNA, 15 nt, Human
aguggacuuuccacc

SEQ ID NO: 2236974 - RNA, 17 nt, Human
aguggaagaagcagaug

SEQ ID NO: 2236975 - RNA, 16 nt, Human
aguggaagaagaggga

SEQ ID NO: 2236976 - RNA, 17 nt, Human
aguggaagaagagggag

SEQ ID NO: 2236977 - RNA, 22 nt, Human
aguggaaagacagcuucucauc

SEQ ID NO: 2236978 - RNA, 15 nt, Human
aguggaaauguucua

SEQ ID NO: 2236979 - RNA, 14 nt, Human
aguggaucuccaag

SEQ ID NO: 2236980 - RNA, 15 nt, Human
agugugggucugugu

SEQ ID NO: 2236981 - RNA, 17 nt, Human
agugugggucugugugu

SEQ ID NO: 2236982 - RNA, 16 nt, Human
agugugggucugugug

SEQ ID NO: 2236983 - RNA, 17 nt, Human
aguggaggcacuuuagg

SEQ ID NO: 2236984 - RNA, 14 nt, Human
aguggaggcacuuu

SEQ ID NO: 2236985 - RNA, 22 nt, Human
aguggagguuaaggcugaggaa

SEQ ID NO: 2236986 - RNA, 23 nt, Human
aguggagguuaaggcugaggaaa

SEQ ID NO: 2236987 - RNA, 14 nt, Human
aguuagaauuccuu

SEQ ID NO: 2236988 - RNA, 15 nt, Human
aguuagaauuccuuc

SEQ ID NO: 2236989 - RNA, 19 nt, Human
aguuagaauuccuucaggg

SEQ ID NO: 2236990 - RNA, 12 nt, Human
aguuagacuguu

SEQ ID NO: 2236991 - RNA, 21 nt, Human
aguuagaauuccuucagggug

SEQ ID NO: 2236992 - RNA, 13 nt, Human
aguuauaguuuca

SEQ ID NO: 2236993 - RNA, 19 nt, Human
aguuacuuugucagaggca

SEQ ID NO: 2236994 - RNA, 15 nt, Human
aguuacuuccuauca

SEQ ID NO: 2236995 - RNA, 14 nt, Human
aguuacuuccuauc

SEQ ID NO: 2236996 - RNA, 17 nt, Human
aguuacuguugugaccu

SEQ ID NO: 2236997 - RNA, 22 nt, Human
aguuacuucacuuuaauucuca

SEQ ID NO: 2236998 - RNA, 17 nt, Human
aguuacuguuauagagg

SEQ ID NO: 2236999 - RNA, 13 nt, Human
aguuacuguugug

SEQ ID NO: 2237000 - RNA, 16 nt, Human
aguuacucugaagggc

SEQ ID NO: 2237001 - RNA, 21 nt, Human
aguuacuccagugccaacaau

SEQ ID NO: 2237002 - RNA, 12 nt, Human
aguuacugaaug

SEQ ID NO: 2237003 - RNA, 13 nt, Human
aguuacugaaugc

SEQ ID NO: 2237004 - RNA, 14 nt, Human
aguuacugaaugca

SEQ ID NO: 2237005 - RNA, 18 nt, Human
aguuacugauucacugca

SEQ ID NO: 2237006 - RNA, 15 nt, Human
aguuacucugaaggg

SEQ ID NO: 2237007 - RNA, 17 nt, Human
aguuacuccagugccaa

SEQ ID NO: 2237008 - RNA, 21 nt, Human
aguuacucuucaguuaagccu

SEQ ID NO: 2237009 - RNA, 23 nt, Human
aguguuggagaagaacugaaauc

SEQ ID NO: 2237010 - RNA, 17 nt, Human
aguguuggagaagaacu

SEQ ID NO: 2237011 - RNA, 18 nt, Human
aguguuggagaagaacug

SEQ ID NO: 2237012 - RNA, 17 nt, Human
aguguugagccuuuucc

SEQ ID NO: 2237013 - RNA, 16 nt, Human
aguguugcauggaugu

SEQ ID NO: 2237014 - RNA, 14 nt, Human
aguguuggagaaga

SEQ ID NO: 2237015 - RNA, 16 nt, Human
aguguuggagaagaac

SEQ ID NO: 2237016 - RNA, 15 nt, Human
uguugcccaggcugg

SEQ ID NO: 2237017 - RNA, 14 nt, Human
uguugcccaggcug

SEQ ID NO: 2237018 - RNA, 21 nt, Human
uguugcccaggcuggagugca

SEQ ID NO: 2237019 - RNA, 13 nt, Human
uguugcccaggcu

SEQ ID NO: 2237020 - RNA, 19 nt, Human
uguucuuucacccuuuucu

SEQ ID NO: 2237021 - RNA, 23 nt, Human
uguucuugaauuuaauaaucugu

SEQ ID NO: 2237022 - RNA, 13 nt, Human
uguucuugaauuu

SEQ ID NO: 2237023 - RNA, 20 nt, Human
uguucuugguuuguaaauua

SEQ ID NO: 2237024 - RNA, 15 nt, Human
uguucuuuaggagau

SEQ ID NO: 2237025 - RNA, 20 nt, Human
uguucuugaagcaguagccu

SEQ ID NO: 2237026 - RNA, 22 nt, Human
uguucuugguuuguaaauuaac

SEQ ID NO: 2237027 - RNA, 22 nt, Human
aguguguuguugcuuuaggcuc

SEQ ID NO: 2237028 - RNA, 15 nt, Human
aguguuaaaugugau

SEQ ID NO: 2237029 - RNA, 15 nt, Human
aguguuaauacuagu

SEQ ID NO: 2237030 - RNA, 16 nt, Human
aguguuaauacuaguu

SEQ ID NO: 2237031 - RNA, 19 nt, Human
aguguuaauacuaguugug

SEQ ID NO: 2237032 - RNA, 20 nt, Human
aguguuaauacuaguuguga

SEQ ID NO: 2237033 - RNA, 20 nt, Human
aguguuaaucaauuuaaacc

SEQ ID NO: 2237034 - RNA, 12 nt, Human
aguguuaaucaa

SEQ ID NO: 2237035 - RNA, 15 nt, Human
aguguuaaucaauuu

SEQ ID NO: 2237036 - RNA, 15 nt, Human
aguguuaggccuggc

SEQ ID NO: 2237037 - RNA, 16 nt, Human
aguguuaggccuggca

SEQ ID NO: 2237038 - RNA, 20 nt, Human
aguguguuuccuucagugca

SEQ ID NO: 2237039 - RNA, 19 nt, Human
aguguguuuccuucagugc

SEQ ID NO: 2237040 - RNA, 21 nt, Human
aguguguucugauuagaaaug

SEQ ID NO: 2237041 - RNA, 15 nt, Human
aguguguuguugcuu

SEQ ID NO: 2237042 - RNA, 20 nt, Human
aguguguucugauuagaaau

SEQ ID NO: 2237043 - RNA, 17 nt, Human
aguguguucugauuaga

SEQ ID NO: 2237044 - RNA, 13 nt, Human
aguguguucugau

SEQ ID NO: 2237045 - RNA, 12 nt, Human
aguguguucuga

SEQ ID NO: 2237046 - RNA, 19 nt, Human
aguguguguuuuucauaaa

SEQ ID NO: 2237047 - RNA, 22 nt, Human
aguguuauuuucuuugaaauug

SEQ ID NO: 2237048 - RNA, 17 nt, Human
aguguugaaaauguuca

SEQ ID NO: 2237049 - RNA, 22 nt, Human
aguguuauuaguguaugcuuug

SEQ ID NO: 2237050 - RNA, 19 nt, Human
aguguuaugcggucuaggg

SEQ ID NO: 2237051 - RNA, 16 nt, Human
aguguuaucagucaua

SEQ ID NO: 2237052 - RNA, 23 nt, Human
aguguuaucagucauaacuaaau

SEQ ID NO: 2237053 - RNA, 20 nt, Human
aguguuaggccuggcacagu

SEQ ID NO: 2237054 - RNA, 23 nt, Human
aguguuagggaagggccugccac

SEQ ID NO: 2237055 - RNA, 19 nt, Human
aguguuagggaagggccug

SEQ ID NO: 2237056 - RNA, 18 nt, Human
aguguuagggaagggccu

SEQ ID NO: 2237057 - RNA, 15 nt, Human
aguguuagggaaggg

SEQ ID NO: 2237058 - RNA, 17 nt, Human
aguguuaggccuggcac

SEQ ID NO: 2237059 - RNA, 19 nt, Human
aguguuaggccuggcacag

SEQ ID NO: 2237060 - RNA, 16 nt, Human
ugugccuccucacccc

SEQ ID NO: 2237061 - RNA, 14 nt, Human
ugugccucccaaaa

SEQ ID NO: 2237062 - RNA, 15 nt, Human
ugugccuccucaccc

SEQ ID NO: 2237063 - RNA, 14 nt, Human
ugugccuccucacc

SEQ ID NO: 2237064 - RNA, 12 nt, Human
ugugccucugcc

SEQ ID NO: 2237065 - RNA, 21 nt, Human
ugugccucggcuuuucucagc

SEQ ID NO: 2237066 - RNA, 12 nt, Human
ugugccucggcu

SEQ ID NO: 2237067 - RNA, 22 nt, Human
ugugcucugaucauccacugug

SEQ ID NO: 2237068 - RNA, 12 nt, Human
ugugcucugauc

SEQ ID NO: 2237069 - RNA, 23 nt, Human
ugugcucugaucauccacugugc

SEQ ID NO: 2237070 - RNA, 15 nt, Human
ugugcucuggacagg

SEQ ID NO: 2237071 - RNA, 21 nt, Human
agucucacuguugcccaggcu

SEQ ID NO: 2237072 - RNA, 13 nt, Human
ugugccccccauc

SEQ ID NO: 2237073 - RNA, 20 nt, Human
agucucacuguugcccaggc

SEQ ID NO: 2237074 - RNA, 18 nt, Human
agucucacuguugcccag

SEQ ID NO: 2237075 - RNA, 19 nt, Human
agucucacuguugcccagg

SEQ ID NO: 2237076 - RNA, 21 nt, Human
ugugcccuaaaguguauuuuu

SEQ ID NO: 2237077 - RNA, 14 nt, Human
ugugcccccucuac

SEQ ID NO: 2237078 - RNA, 20 nt, Human
ugugcccuaaaguguauuuu

SEQ ID NO: 2237079 - RNA, 15 nt, Human
ugugccccccauccu

SEQ ID NO: 2237080 - RNA, 16 nt, Human
ugugccccccauccug

SEQ ID NO: 2237081 - RNA, 18 nt, Human
ugugccccccauccuggc

SEQ ID NO: 2237082 - RNA, 19 nt, Human
ugugccccccauccuggcc

SEQ ID NO: 2237083 - RNA, 20 nt, Human
ugugccccccauccuggccc

SEQ ID NO: 2237084 - RNA, 21 nt, Human
ugugccccccauccuggccca

SEQ ID NO: 2237085 - RNA, 22 nt, Human
ugugccccccauccuggcccau

SEQ ID NO: 2237086 - RNA, 23 nt, Human
ugugccccccauccuggcccauc

SEQ ID NO: 2237087 - RNA, 12 nt, Human
ugugcugcccug

SEQ ID NO: 2237088 - RNA, 19 nt, Human
ugugcucuggacaggcaug

SEQ ID NO: 2237089 - RNA, 16 nt, Human
ugugcucuggacaggc

SEQ ID NO: 2237090 - RNA, 18 nt, Human
ugugcucuggacaggcau

SEQ ID NO: 2237091 - RNA, 13 nt, Human
ugugcugcccugc

SEQ ID NO: 2237092 - RNA, 14 nt, Human
ugugcugcccugcc

SEQ ID NO: 2237093 - RNA, 15 nt, Human
ugugcugcccugccc

SEQ ID NO: 2237094 - RNA, 18 nt, Human
uguggcaagccccugccc

SEQ ID NO: 2237095 - RNA, 22 nt, Human
uguggcaaagccuucauugccu

SEQ ID NO: 2237096 - RNA, 21 nt, Human
uguggauuuuugugguaguga

SEQ ID NO: 2237097 - RNA, 20 nt, Human
uguggagccgaggccuaccc

SEQ ID NO: 2237098 - RNA, 12 nt, Human
uguggaggaagg

SEQ ID NO: 2237099 - RNA, 14 nt, Human
uguggaggaaggau

SEQ ID NO: 2237100 - RNA, 15 nt, Human
uguggaggaaggauu

SEQ ID NO: 2237101 - RNA, 16 nt, Human
uguggaggaaggauug

SEQ ID NO: 2237102 - RNA, 17 nt, Human
uguggaggaaggauugu

SEQ ID NO: 2237103 - RNA, 20 nt, Human
uguggaggaaggauuguaaa

SEQ ID NO: 2237104 - RNA, 19 nt, Human
uguggagcccgcaccccca

SEQ ID NO: 2237105 - RNA, 18 nt, Human
uguggagcccgcaccccc

SEQ ID NO: 2237106 - RNA, 16 nt, Human
uguggagcccgcaccc

SEQ ID NO: 2237107 - RNA, 16 nt, Human
uguggagccgaggccu

SEQ ID NO: 2237108 - RNA, 19 nt, Human
uguggagccgaggccuacc

SEQ ID NO: 2237109 - RNA, 19 nt, Human
uguggagagugcaacagua

SEQ ID NO: 2237110 - RNA, 13 nt, Human
uguggagacuggg

SEQ ID NO: 2237111 - RNA, 14 nt, Human
uguggcacauucuu

SEQ ID NO: 2237112 - RNA, 17 nt, Human
uguggcaaggaaaaaca

SEQ ID NO: 2237113 - RNA, 19 nt, Human
uguggcaauagugggcccu

SEQ ID NO: 2237114 - RNA, 12 nt, Human
uguggccccacc

SEQ ID NO: 2237115 - RNA, 13 nt, Human
uguggccccaccc

SEQ ID NO: 2237116 - RNA, 17 nt, Human
uguggccccacccuggg

SEQ ID NO: 2237117 - RNA, 19 nt, Human
uguggccccacccugggcc

SEQ ID NO: 2237118 - RNA, 20 nt, Human
agugccccauucuuuuguaa

SEQ ID NO: 2237119 - RNA, 14 nt, Human
agugcccccacuga

SEQ ID NO: 2237120 - RNA, 16 nt, Human
agugcccccacugacc

SEQ ID NO: 2237121 - RNA, 17 nt, Human
agugcccauuccucacc

SEQ ID NO: 2237122 - RNA, 19 nt, Human
agugccccauucuuuugua

SEQ ID NO: 2237123 - RNA, 23 nt, Human
agugcccagaacuggacucagga

SEQ ID NO: 2237124 - RNA, 19 nt, Human
agugcccaccaacauccca

SEQ ID NO: 2237125 - RNA, 13 nt, Human
agugcccauuccu

SEQ ID NO: 2237126 - RNA, 20 nt, Human
agugcccaccaacaucccau

SEQ ID NO: 2237127 - RNA, 17 nt, Human
agugcccaacuguuaua

SEQ ID NO: 2237128 - RNA, 16 nt, Human
agugcccaccaacauc

SEQ ID NO: 2237129 - RNA, 14 nt, Human
agugcccacaggau

SEQ ID NO: 2237130 - RNA, 19 nt, Human
agugccacucauuccugua

SEQ ID NO: 2237131 - RNA, 20 nt, Human
agugccacugcccgagcugg

SEQ ID NO: 2237132 - RNA, 14 nt, Human
agugccaagcacag

SEQ ID NO: 2237133 - RNA, 19 nt, Human
agugccaagcacagugccu

SEQ ID NO: 2237134 - RNA, 21 nt, Human
agugccaacaauccuagugcu

SEQ ID NO: 2237135 - RNA, 22 nt, Human
agugccacugcccgagcuggug

SEQ ID NO: 2237136 - RNA, 21 nt, Human
agugccacugcccgagcuggu

SEQ ID NO: 2237137 - RNA, 15 nt, Human
agugcccaacuguua

SEQ ID NO: 2237138 - RNA, 16 nt, Human
agugccaaaaacaaca

SEQ ID NO: 2237139 - RNA, 16 nt, Human
agugccaacaauccua

SEQ ID NO: 2237140 - RNA, 13 nt, Human
agugcacccacuc

SEQ ID NO: 2237141 - RNA, 24 nt, Human
agugcagcccguguggccccuuca

SEQ ID NO: 2237142 - RNA, 23 nt, Human
agugcagcccguguggccccuuc

SEQ ID NO: 2237143 - RNA, 17 nt, Human
agugcacccacucugcu

SEQ ID NO: 2237144 - RNA, 18 nt, Human
agugcagccguuugagaa

SEQ ID NO: 2237145 - RNA, 17 nt, Human
agugcagccguuugaga

SEQ ID NO: 2237146 - RNA, 17 nt, Human
agugcagcugauuuuaa

SEQ ID NO: 2237147 - RNA, 16 nt, Human
agugcagcugauuuua

SEQ ID NO: 2237148 - RNA, 15 nt, Human
agugcagcugauuuu

SEQ ID NO: 2237149 - RNA, 14 nt, Human
agugcagcugauuu

SEQ ID NO: 2237150 - RNA, 20 nt, Human
agugcagcugauuuuaacaa

SEQ ID NO: 2237151 - RNA, 18 nt, Human
agugcagcugauuuuaac

SEQ ID NO: 2237152 - RNA, 15 nt, Human
agugcaggcuggcac

SEQ ID NO: 2237153 - RNA, 13 nt, Human
agugcaggcuggc

SEQ ID NO: 2237154 - RNA, 11 nt, Human
agugcaggcug

SEQ ID NO: 2237155 - RNA, 22 nt, Human
agugcaguccugaucagagccg

SEQ ID NO: 2237156 - RNA, 16 nt, Human
agugcaguccugauca

SEQ ID NO: 2237157 - RNA, 15 nt, Human
agugcaucucagccc

SEQ ID NO: 2237158 - RNA, 14 nt, Human
agugcaucucagcc

SEQ ID NO: 2237159 - RNA, 22 nt, Human
agugcaugcucucugcagccag

SEQ ID NO: 2237160 - RNA, 20 nt, Human
agugcaugcucucugcagcc

SEQ ID NO: 2237161 - RNA, 17 nt, Human
agugcaugcucucugca

SEQ ID NO: 2237162 - RNA, 16 nt, Human
agugcaugcucucugc

SEQ ID NO: 2237163 - RNA, 15 nt, Human
agugcaugcucucug

SEQ ID NO: 2237164 - RNA, 16 nt, Human
agugcaucucagccca

SEQ ID NO: 2237165 - RNA, 17 nt, Human
agugcaucucagcccac

SEQ ID NO: 2237166 - RNA, 18 nt, Human
agugcaaugacacagucu

SEQ ID NO: 2237167 - RNA, 23 nt, Human
agugcaauggcgugaucucggcu

SEQ ID NO: 2237168 - RNA, 22 nt, Human
agugcaaugguauaaauuucaa

SEQ ID NO: 2237169 - RNA, 16 nt, Human
agugcaaugacacagu

SEQ ID NO: 2237170 - RNA, 18 nt, Human
uguggccguuaucuggaa

SEQ ID NO: 2237171 - RNA, 13 nt, Human
agugauuucuaga

SEQ ID NO: 2237172 - RNA, 15 nt, Human
agugauuucuagaaa

SEQ ID NO: 2237173 - RNA, 22 nt, Human
agugcaaauugucacaggacag

SEQ ID NO: 2237174 - RNA, 21 nt, Human
agugaguguggcuccccucua

SEQ ID NO: 2237175 - RNA, 16 nt, Human
agugauuguaugaauu

SEQ ID NO: 2237176 - RNA, 22 nt, Human
agugaguuacagcgagaggcag

SEQ ID NO: 2237177 - RNA, 15 nt, Human
agugauuguuggcac

SEQ ID NO: 2237178 - RNA, 17 nt, Human
agugauugggacagagg

SEQ ID NO: 2237179 - RNA, 18 nt, Human
agugcaaauugucacagg

SEQ ID NO: 2237180 - RNA, 21 nt, Human
agugcaaauugucacaggaca

SEQ ID NO: 2237181 - RNA, 22 nt, Human
agugauucuccugccucagccu

SEQ ID NO: 2237182 - RNA, 24 nt, Human
agugauucuccugccucagccucc

SEQ ID NO: 2237183 - RNA, 19 nt, Human
agugaguguggcuccccuc

SEQ ID NO: 2237184 - RNA, 18 nt, Human
agugaguguggcuccccu

SEQ ID NO: 2237185 - RNA, 16 nt, Human
agugaguguggcuccc

SEQ ID NO: 2237186 - RNA, 23 nt, Human
agugagugcaaaaagcugaguau

SEQ ID NO: 2237187 - RNA, 14 nt, Human
agugagugagccug

SEQ ID NO: 2237188 - RNA, 16 nt, Human
agugagugagccuggc

SEQ ID NO: 2237189 - RNA, 16 nt, Human
agugagucucuucaga

SEQ ID NO: 2237190 - RNA, 14 nt, Human
agugagucugucag

SEQ ID NO: 2237191 - RNA, 15 nt, Human
agugagucugucagc

SEQ ID NO: 2237192 - RNA, 13 nt, Human
agugagugagccu

SEQ ID NO: 2237193 - RNA, 12 nt, Human
uguggcccuggc

SEQ ID NO: 2237194 - RNA, 21 nt, Human
uguggcccugccaucuuccca

SEQ ID NO: 2237195 - RNA, 22 nt, Human
uguggcccugccaucuucccag

SEQ ID NO: 2237196 - RNA, 13 nt, Human
uguggccccuuca

SEQ ID NO: 2237197 - RNA, 13 nt, Human
uguggcccugcca

SEQ ID NO: 2237198 - RNA, 14 nt, Human
uguggcccugccau

SEQ ID NO: 2237199 - RNA, 12 nt, Human
uguggccccuuc

SEQ ID NO: 2237200 - RNA, 22 nt, Human
uguggccccugaacaagaauug

SEQ ID NO: 2237201 - RNA, 17 nt, Human
uguggccccugaacaag

SEQ ID NO: 2237202 - RNA, 23 nt, Human
uguggccccacccugggcccugg

SEQ ID NO: 2237203 - RNA, 20 nt, Human
uguggcccuggccugcuggg

SEQ ID NO: 2237204 - RNA, 14 nt, Human
uguggcccuggccu

SEQ ID NO: 2237205 - RNA, 23 nt, Human
uguggcccugccaucuucccagc

SEQ ID NO: 2237206 - RNA, 17 nt, Human
uguggcccuggccugcu

SEQ ID NO: 2237207 - RNA, 16 nt, Human
agugagucgaggacag

SEQ ID NO: 2237208 - RNA, 15 nt, Human
uguuaaccucagugu

SEQ ID NO: 2237209 - RNA, 16 nt, Human
uguuaaccagaauaaa

SEQ ID NO: 2237210 - RNA, 17 nt, Human
uguuaaccucaguguca

SEQ ID NO: 2237211 - RNA, 17 nt, Human
uguuaacucuugucuau

SEQ ID NO: 2237212 - RNA, 19 nt, Human
uguuaaccucagugucauu

SEQ ID NO: 2237213 - RNA, 19 nt, Human
uguuaacucuugucuauuu

SEQ ID NO: 2237214 - RNA, 12 nt, Human
uguuaaucaauu

SEQ ID NO: 2237215 - RNA, 13 nt, Human
uguuaaucaauuu

SEQ ID NO: 2237216 - RNA, 21 nt, Human
uguuaacauggacaugaucuu

SEQ ID NO: 2237217 - RNA, 18 nt, Human
uguuaacacauuuuguau

SEQ ID NO: 2237218 - RNA, 20 nt, Human
uguuaacacauuuuguauaa

SEQ ID NO: 2237219 - RNA, 21 nt, Human
uguuaacacauuuuguauaau

SEQ ID NO: 2237220 - RNA, 22 nt, Human
uguuaacacauuuuguauaauu

SEQ ID NO: 2237221 - RNA, 18 nt, Human
uguguugccaugugugcu

SEQ ID NO: 2237222 - RNA, 23 nt, Human
uguguugccacaggacacaguca

SEQ ID NO: 2237223 - RNA, 18 nt, Human
uguguugccacaggacac

SEQ ID NO: 2237224 - RNA, 16 nt, Human
uguguugccaagcucc

SEQ ID NO: 2237225 - RNA, 12 nt, Human
uguguuggcuug

SEQ ID NO: 2237226 - RNA, 22 nt, Human
uguguugggauugagucugugc

SEQ ID NO: 2237227 - RNA, 15 nt, Human
uguguugcuauccug

SEQ ID NO: 2237228 - RNA, 13 nt, Human
uguguugugaaug

SEQ ID NO: 2237229 - RNA, 18 nt, Human
uguguugucuugaaagau

SEQ ID NO: 2237230 - RNA, 13 nt, Human
uguuaacacauuu

SEQ ID NO: 2237231 - RNA, 13 nt, Human
uguguugucucua

SEQ ID NO: 2237232 - RNA, 19 nt, Human
uguguuggggccuuggccu

SEQ ID NO: 2237233 - RNA, 19 nt, Human
uguguugucucuugaguuu

SEQ ID NO: 2237234 - RNA, 14 nt, Human
uguguugucuugaa

SEQ ID NO: 2237235 - RNA, 19 nt, Human
agugcuuguccccuaagag

SEQ ID NO: 2237236 - RNA, 17 nt, Human
uguuaaugguuugaaua

SEQ ID NO: 2237237 - RNA, 19 nt, Human
uguuaaugaaaaugucaga

SEQ ID NO: 2237238 - RNA, 17 nt, Human
uguuaaugaaaauguca

SEQ ID NO: 2237239 - RNA, 14 nt, Human
uguuaaugaaaaug

SEQ ID NO: 2237240 - RNA, 23 nt, Human
uguuaaucuuaggggagagcuuu

SEQ ID NO: 2237241 - RNA, 14 nt, Human
uguuaaucaauuua

SEQ ID NO: 2237242 - RNA, 17 nt, Human
uguuaaucaauuuaaac

SEQ ID NO: 2237243 - RNA, 20 nt, Human
uguuaaucaauuuaaaccca

SEQ ID NO: 2237244 - RNA, 22 nt, Human
uguuaaucaauuuaaacccauu

SEQ ID NO: 2237245 - RNA, 19 nt, Human
uguuaaugauagcuacugu

SEQ ID NO: 2237246 - RNA, 19 nt, Human
aguggaaaaauagccugcc

SEQ ID NO: 2237247 - RNA, 18 nt, Human
aguggaaaaauagccugc

SEQ ID NO: 2237248 - RNA, 13 nt, Human
agugcuuuguaau

SEQ ID NO: 2237249 - RNA, 20 nt, Human
uguuaauggugcaaauccua

SEQ ID NO: 2237250 - RNA, 19 nt, Human
agugcuuuccuuuuuuaaa

SEQ ID NO: 2237251 - RNA, 22 nt, Human
agugcuuuccuuuuuuaaaaau

SEQ ID NO: 2237252 - RNA, 11 nt, Human
aguggaaaaau

SEQ ID NO: 2237253 - RNA, 19 nt, Human
ugugucuaggcaggaccug

SEQ ID NO: 2237254 - RNA, 13 nt, Human
ugugucuacagag

SEQ ID NO: 2237255 - RNA, 14 nt, Human
ugugucuacagaga

SEQ ID NO: 2237256 - RNA, 21 nt, Human
ugugucuacagagaaccugga

SEQ ID NO: 2237257 - RNA, 13 nt, Human
ugugucucuuggu

SEQ ID NO: 2237258 - RNA, 20 nt, Human
ugugucuaggcaggaccugu

SEQ ID NO: 2237259 - RNA, 16 nt, Human
ugugucucuugguccu

SEQ ID NO: 2237260 - RNA, 11 nt, Human
ugugugugugu

SEQ ID NO: 2237261 - RNA, 14 nt, Human
ugugugugugcgug

SEQ ID NO: 2237262 - RNA, 12 nt, Human
ugugugugugca

SEQ ID NO: 2237263 - RNA, 11 nt, Human
ugugugugugc

SEQ ID NO: 2237264 - RNA, 17 nt, Human
ugugucagguggggcag

SEQ ID NO: 2237265 - RNA, 19 nt, Human
ugugucagguggggcagcu

SEQ ID NO: 2237266 - RNA, 14 nt, Human
ugugguuuauguca

SEQ ID NO: 2237267 - RNA, 15 nt, Human
uguguguguguauga

SEQ ID NO: 2237268 - RNA, 12 nt, Human
ugugugugugug

SEQ ID NO: 2237269 - RNA, 13 nt, Human
ugugugugugugu

SEQ ID NO: 2237270 - RNA, 15 nt, Human
ugugugugugugucc

SEQ ID NO: 2237271 - RNA, 23 nt, Human
uguguuaucacccagaagaaaau

SEQ ID NO: 2237272 - RNA, 16 nt, Human
uguguguguguaugug

SEQ ID NO: 2237273 - RNA, 13 nt, Human
uguguguguguau

SEQ ID NO: 2237274 - RNA, 14 nt, Human
uguguuaugaagca

SEQ ID NO: 2237275 - RNA, 16 nt, Human
uguguuauuuaaauga

SEQ ID NO: 2237276 - RNA, 14 nt, Human
uguguuauuuaaau

SEQ ID NO: 2237277 - RNA, 13 nt, Human
uguguuauuuaaa

SEQ ID NO: 2237278 - RNA, 16 nt, Human
uguguuccaaccacug

SEQ ID NO: 2237279 - RNA, 15 nt, Human
uguguuccaaccacu

SEQ ID NO: 2237280 - RNA, 16 nt, Human
uguguucccauuucag

SEQ ID NO: 2237281 - RNA, 19 nt, Human
uguguuccaacugccccca

SEQ ID NO: 2237282 - RNA, 13 nt, Human
uguguugccaagc

SEQ ID NO: 2237283 - RNA, 20 nt, Human
ugugguuaaugccauggaca

SEQ ID NO: 2237284 - RNA, 15 nt, Human
ugugguuaaugccau

SEQ ID NO: 2237285 - RNA, 23 nt, Human
ugugguggguucuuuggaaggag

SEQ ID NO: 2237286 - RNA, 17 nt, Human
ugugguuauuucucuga

SEQ ID NO: 2237287 - RNA, 18 nt, Human
ugugguuuacuagcagga

SEQ ID NO: 2237288 - RNA, 12 nt, Human
ugugguuucauu

SEQ ID NO: 2237289 - RNA, 19 nt, Human
ugugucagcauagaaguaa

SEQ ID NO: 2237290 - RNA, 14 nt, Human
ugugguuaaugcca

SEQ ID NO: 2237291 - RNA, 13 nt, Human
uguggugcugaca

SEQ ID NO: 2237292 - RNA, 22 nt, Human
ugugguggguucuuuggaagga

SEQ ID NO: 2237293 - RNA, 17 nt, Human
uguggugcagugugaaa

SEQ ID NO: 2237294 - RNA, 16 nt, Human
uguggugcagugugaa

SEQ ID NO: 2237295 - RNA, 17 nt, Human
uguggucuccuuggaaa

SEQ ID NO: 2237296 - RNA, 15 nt, Human
uguggugccugaggu

SEQ ID NO: 2237297 - RNA, 19 nt, Human
uguggugccugaggucugu

SEQ ID NO: 2237298 - RNA, 16 nt, Human
uguggugcugacaaag

SEQ ID NO: 2237299 - RNA, 13 nt, Human
uguggugaugaaa

SEQ ID NO: 2237300 - RNA, 13 nt, Human
uguggucuccacu

SEQ ID NO: 2237301 - RNA, 21 nt, Human
agugcuucuuaaagaguucuu

SEQ ID NO: 2237302 - RNA, 14 nt, Human
agugcuucucuaca

SEQ ID NO: 2237303 - RNA, 16 nt, Human
agugcuuccaaggcag

SEQ ID NO: 2237304 - RNA, 17 nt, Human
agugcuuccaaggcaga

SEQ ID NO: 2237305 - RNA, 20 nt, Human
agugcuucagccugaggcug

SEQ ID NO: 2237306 - RNA, 19 nt, Human
agugcuucagccugaggcu

SEQ ID NO: 2237307 - RNA, 19 nt, Human
agugcuugaguuuggggaa

SEQ ID NO: 2237308 - RNA, 15 nt, Human
agugcuugccacaga

SEQ ID NO: 2237309 - RNA, 16 nt, Human
agugcuugccacagag

SEQ ID NO: 2237310 - RNA, 17 nt, Human
agugcuugccacagagc

SEQ ID NO: 2237311 - RNA, 19 nt, Human
agugcuugccacagagcgg

SEQ ID NO: 2237312 - RNA, 18 nt, Human
agugcuucagccugaggc

SEQ ID NO: 2237313 - RNA, 17 nt, Human
agugcuucagccugagg

SEQ ID NO: 2237314 - RNA, 16 nt, Human
agugcuucagccugag

SEQ ID NO: 2237315 - RNA, 15 nt, Human
agugcuucagccuga

SEQ ID NO: 2237316 - RNA, 16 nt, Human
agugcuuccaaggaug

SEQ ID NO: 2237317 - RNA, 16 nt, Human
uguggucccaccccac

SEQ ID NO: 2237318 - RNA, 17 nt, Human
agugcugggauuacagg

SEQ ID NO: 2237319 - RNA, 20 nt, Human
agugcugggauuacaggcgu

SEQ ID NO: 2237320 - RNA, 19 nt, Human
agugcugggauuacaggug

SEQ ID NO: 2237321 - RNA, 14 nt, Human
agugcuucagccug

SEQ ID NO: 2237322 - RNA, 19 nt, Human
agugcuuaaaaaucauuga

SEQ ID NO: 2237323 - RNA, 17 nt, Human
agugcuuaaaaaucauu

SEQ ID NO: 2237324 - RNA, 16 nt, Human
agugcuuaaaaaucau

SEQ ID NO: 2237325 - RNA, 20 nt, Human
agugcugggauuacaggcau

SEQ ID NO: 2237326 - RNA, 19 nt, Human
agugcugggauuacaggcu

SEQ ID NO: 2237327 - RNA, 22 nt, Human
agugcugggauuacaggcauga

SEQ ID NO: 2237328 - RNA, 22 nt, Human
agugccugggaauguauuauuc

SEQ ID NO: 2237329 - RNA, 20 nt, Human
agugccuuaauaguagggua

SEQ ID NO: 2237330 - RNA, 18 nt, Human
agugccugggaauguauu

SEQ ID NO: 2237331 - RNA, 17 nt, Human
agugccugggaauguau

SEQ ID NO: 2237332 - RNA, 15 nt, Human
agugcugcugaagau

SEQ ID NO: 2237333 - RNA, 22 nt, Human
agugcugcauuuaaaagauaca

SEQ ID NO: 2237334 - RNA, 20 nt, Human
agugcugggauuacaagcgu

SEQ ID NO: 2237335 - RNA, 13 nt, Human
agugccugggaau

SEQ ID NO: 2237336 - RNA, 18 nt, Human
agugccucuuucauccac

SEQ ID NO: 2237337 - RNA, 12 nt, Human
agugccugcuga

SEQ ID NO: 2237338 - RNA, 12 nt, Human
agugccucuggu

SEQ ID NO: 2237339 - RNA, 14 nt, Human
agugccucuggucu

SEQ ID NO: 2237340 - RNA, 23 nt, Human
agugccgccgccucgcccaccgc

SEQ ID NO: 2237341 - RNA, 16 nt, Human
agugccgccgccucgc

SEQ ID NO: 2237342 - RNA, 17 nt, Human
agugccgccgccucgcc

SEQ ID NO: 2237343 - RNA, 19 nt, Human
agugccgccgccucgccca

SEQ ID NO: 2237344 - RNA, 20 nt, Human
agugccgccgccucgcccac

SEQ ID NO: 2237345 - RNA, 22 nt, Human
agugccgccgccucgcccaccg

SEQ ID NO: 2237346 - RNA, 20 nt, Human
agugcugcauuuaaaagaua

SEQ ID NO: 2237347 - RNA, 17 nt, Human
agugccuuacacaaugg

SEQ ID NO: 2237348 - RNA, 15 nt, Human
agugccuuacacaau

SEQ ID NO: 2237349 - RNA, 21 nt, Human
agugccuguaaucacagcuac

SEQ ID NO: 2237350 - RNA, 20 nt, Human
aguccagaaacuguucccac

SEQ ID NO: 2237351 - RNA, 16 nt, Human
agucagggaccccugc

SEQ ID NO: 2237352 - RNA, 14 nt, Human
agucaggggcagcu

SEQ ID NO: 2237353 - RNA, 19 nt, Human
agucagggaccccugcccu

SEQ ID NO: 2237354 - RNA, 22 nt, Human
agucaggccuuaauuuucagua

SEQ ID NO: 2237355 - RNA, 11 nt, Human
agucaggauga

SEQ ID NO: 2237356 - RNA, 12 nt, Human
agucaggaaagg

SEQ ID NO: 2237357 - RNA, 22 nt, Human
agucagaggauggccagugucu

SEQ ID NO: 2237358 - RNA, 12 nt, Human
aguccaggcccc

SEQ ID NO: 2237359 - RNA, 19 nt, Human
aguccaggccauggaggca

SEQ ID NO: 2237360 - RNA, 13 nt, Human
aguccagccugga

SEQ ID NO: 2237361 - RNA, 22 nt, Human
aguccaggaugcuaacaucuaa

SEQ ID NO: 2237362 - RNA, 17 nt, Human
agucaggggcagcugac

SEQ ID NO: 2237363 - RNA, 15 nt, Human
aguccagauuuacac

SEQ ID NO: 2237364 - RNA, 16 nt, Human
aguccagauuuacacu

SEQ ID NO: 2237365 - RNA, 18 nt, Human
aguccagauuuacacugg

SEQ ID NO: 2237366 - RNA, 22 nt, Human
aguccagauuuacacugggaga

SEQ ID NO: 2237367 - RNA, 23 nt, Human
aguccagauuuacacugggagag

SEQ ID NO: 2237368 - RNA, 15 nt, Human
aguccagccuggaga

SEQ ID NO: 2237369 - RNA, 15 nt, Human
agucccgucaggacg

SEQ ID NO: 2237370 - RNA, 15 nt, Human
agucccuauguauuu

SEQ ID NO: 2237371 - RNA, 23 nt, Human
aguccaggccccaaaaccacagc

SEQ ID NO: 2237372 - RNA, 13 nt, Human
agucccgucagga

SEQ ID NO: 2237373 - RNA, 19 nt, Human
agucccugacucucuguga

SEQ ID NO: 2237374 - RNA, 20 nt, Human
agucccuauguauuugcagu

SEQ ID NO: 2237375 - RNA, 20 nt, Human
agucccugaggcaggucccc

SEQ ID NO: 2237376 - RNA, 19 nt, Human
agucccugaggcagguccc

SEQ ID NO: 2237377 - RNA, 18 nt, Human
aguccaggccccaaaacc

SEQ ID NO: 2237378 - RNA, 13 nt, Human
aguccaggcccca

SEQ ID NO: 2237379 - RNA, 14 nt, Human
aguccaggcugccg

SEQ ID NO: 2237380 - RNA, 17 nt, Human
aguccaggcugccgugg

SEQ ID NO: 2237381 - RNA, 18 nt, Human
aguccaggcugccguggg

SEQ ID NO: 2237382 - RNA, 22 nt, Human
aguccaggcuuuuuuaucaugu

SEQ ID NO: 2237383 - RNA, 21 nt, Human
agucccugacucucugugacc

SEQ ID NO: 2237384 - RNA, 12 nt, Human
agucccugccaa

SEQ ID NO: 2237385 - RNA, 23 nt, Human
agucccugaggcagguccccaga

SEQ ID NO: 2237386 - RNA, 22 nt, Human
agucccugaggcagguccccag

SEQ ID NO: 2237387 - RNA, 22 nt, Human
agucccugggggaagcccugga

SEQ ID NO: 2237388 - RNA, 17 nt, Human
agucccuguuuucugag

SEQ ID NO: 2237389 - RNA, 18 nt, Human
agucccuguuuucugagc

SEQ ID NO: 2237390 - RNA, 19 nt, Human
agucccuguuuucugagcc

SEQ ID NO: 2237391 - RNA, 20 nt, Human
agucccuguuuucugagccc

SEQ ID NO: 2237392 - RNA, 21 nt, Human
agucccuguuuucugagcccg

SEQ ID NO: 2237393 - RNA, 22 nt, Human
agucccuguuuucugagcccgg

SEQ ID NO: 2237394 - RNA, 15 nt, Human
agucccuuccacacc

SEQ ID NO: 2237395 - RNA, 13 nt, Human
agucccuguuuuc

SEQ ID NO: 2237396 - RNA, 23 nt, Human
agucccuguaauuguuguuugua

SEQ ID NO: 2237397 - RNA, 20 nt, Human
agucccuguaauuguuguuu

SEQ ID NO: 2237398 - RNA, 21 nt, Human
agucccugggggaagcccugg

SEQ ID NO: 2237399 - RNA, 20 nt, Human
agucccugggggaagcccug

SEQ ID NO: 2237400 - RNA, 17 nt, Human
agucccugggggaagcc

SEQ ID NO: 2237401 - RNA, 14 nt, Human
agucccugggggaa

SEQ ID NO: 2237402 - RNA, 18 nt, Human
agucccuguaauuguugu

SEQ ID NO: 2237403 - RNA, 16 nt, Human
agucccuguaauuguu

SEQ ID NO: 2237404 - RNA, 22 nt, Human
agucccuuccccucccuggcuc

SEQ ID NO: 2237405 - RNA, 21 nt, Human
agucccuuccccucccuggcu

SEQ ID NO: 2237406 - RNA, 20 nt, Human
agucccuuccccucccuggc

SEQ ID NO: 2237407 - RNA, 19 nt, Human
agucccuuccccucccugg

SEQ ID NO: 2237408 - RNA, 17 nt, Human
agucccuuccccucccu

SEQ ID NO: 2237409 - RNA, 15 nt, Human
agucccuuccccucc

SEQ ID NO: 2237410 - RNA, 14 nt, Human
agucccuuccccuc

SEQ ID NO: 2237411 - RNA, 13 nt, Human
agucccuuccccu

SEQ ID NO: 2237412 - RNA, 23 nt, Human
aguccgaaagggacuuggaagcu

SEQ ID NO: 2237413 - RNA, 23 nt, Human
agucccuuccccucccuggcucc

SEQ ID NO: 2237414 - RNA, 19 nt, Human
agucccuuccacaccccca

SEQ ID NO: 2237415 - RNA, 17 nt, Human
aguccgaggggcgggac

SEQ ID NO: 2237416 - RNA, 20 nt, Human
aguccgugcugacagcugcu

SEQ ID NO: 2237417 - RNA, 21 nt, Human
aguccgugcugacagcugcuc

SEQ ID NO: 2237418 - RNA, 23 nt, Human
aguccgugcugacagcugcuccu

SEQ ID NO: 2237419 - RNA, 22 nt, Human
aguccgugcugacagcugcucc

SEQ ID NO: 2237420 - RNA, 18 nt, Human
agucgugagcucuuguga

SEQ ID NO: 2237421 - RNA, 18 nt, Human
agucgucgcacagucucu

SEQ ID NO: 2237422 - RNA, 21 nt, Human
agucgugagcucuugugagga

SEQ ID NO: 2237423 - RNA, 12 nt, Human
agucgugccugu

SEQ ID NO: 2237424 - RNA, 13 nt, Human
agucgugccugug

SEQ ID NO: 2237425 - RNA, 14 nt, Human
agucgugccugugu

SEQ ID NO: 2237426 - RNA, 15 nt, Human
agucgugccuguguc

SEQ ID NO: 2237427 - RNA, 18 nt, Human
agucguggagaugucuuc

SEQ ID NO: 2237428 - RNA, 17 nt, Human
agucguggggugugcug

SEQ ID NO: 2237429 - RNA, 19 nt, Human
agucguggagaugucuucg

SEQ ID NO: 2237430 - RNA, 21 nt, Human
agucguggagaugucuucgua

SEQ ID NO: 2237431 - RNA, 16 nt, Human
agucucacuguugccc

SEQ ID NO: 2237432 - RNA, 17 nt, Human
agucucacuguugccca

SEQ ID NO: 2237433 - RNA, 16 nt, Human
agucuaggagcuggga

SEQ ID NO: 2237434 - RNA, 20 nt, Human
agucuagauggcuccucuca

SEQ ID NO: 2237435 - RNA, 19 nt, Human
agucuagauggcuccucuc

SEQ ID NO: 2237436 - RNA, 18 nt, Human
agucuagauggcuccucu

SEQ ID NO: 2237437 - RNA, 17 nt, Human
agucuagauggcuccuc

SEQ ID NO: 2237438 - RNA, 19 nt, Human
agucuacucuuaagccauc

SEQ ID NO: 2237439 - RNA, 20 nt, Human
agucuacucuuaagccaucu

SEQ ID NO: 2237440 - RNA, 21 nt, Human
agucuacucuuaagccaucuu

SEQ ID NO: 2237441 - RNA, 14 nt, Human
agucuagaaguugu

SEQ ID NO: 2237442 - RNA, 18 nt, Human
agucguggggugugcugg

SEQ ID NO: 2237443 - RNA, 19 nt, Human
agucguggggugugcuggg

SEQ ID NO: 2237444 - RNA, 20 nt, Human
agucguggggugugcuggga

SEQ ID NO: 2237445 - RNA, 21 nt, Human
agucguggggugugcugggag

SEQ ID NO: 2237446 - RNA, 14 nt, Human
agucguugugaggg

SEQ ID NO: 2237447 - RNA, 20 nt, Human
agucuacgcucuccuuucuu

SEQ ID NO: 2237448 - RNA, 13 nt, Human
agucuacucuuaa

SEQ ID NO: 2237449 - RNA, 18 nt, Human
agucuacucuuaagccau

SEQ ID NO: 2237450 - RNA, 13 nt, Human
ugucuaaaacaau

SEQ ID NO: 2237451 - RNA, 17 nt, Human
ugucuaaaacaauaaaa

SEQ ID NO: 2237452 - RNA, 15 nt, Human
ugucuaaaacaauaa

SEQ ID NO: 2237453 - RNA, 17 nt, Human
ugucuaaacaaugcuga

SEQ ID NO: 2237454 - RNA, 16 nt, Human
ugucuaaacaaugcug

SEQ ID NO: 2237455 - RNA, 13 nt, Human
ugucuaaaaacac

SEQ ID NO: 2237456 - RNA, 20 nt, Human
ugucguugacuuuagggacu

SEQ ID NO: 2237457 - RNA, 22 nt, Human
ugucguugacuuuagggacuca

SEQ ID NO: 2237458 - RNA, 15 nt, Human
agucagacugcuggg

SEQ ID NO: 2237459 - RNA, 22 nt, Human
ugucuaaacaaugcugauuugg

SEQ ID NO: 2237460 - RNA, 22 nt, Human
ugucuaaaaugccucaguguau

SEQ ID NO: 2237461 - RNA, 16 nt, Human
agucagacagaugugg

SEQ ID NO: 2237462 - RNA, 22 nt, Human
agucagaaguuucugccgcagc

SEQ ID NO: 2237463 - RNA, 21 nt, Human
ugucuaaacaaugcugauuug

SEQ ID NO: 2237464 - RNA, 20 nt, Human
ugucuaaacaaugcugauuu

SEQ ID NO: 2237465 - RNA, 14 nt, Human
agucagagagaauc

SEQ ID NO: 2237466 - RNA, 17 nt, Human
agucagagagaguguuu

SEQ ID NO: 2237467 - RNA, 14 nt, Human
agucagaggauggc

SEQ ID NO: 2237468 - RNA, 17 nt, Human
agucagaggauggccag

SEQ ID NO: 2237469 - RNA, 18 nt, Human
agucagaggauggccagu

SEQ ID NO: 2237470 - RNA, 19 nt, Human
agucagaggauggccagug

SEQ ID NO: 2237471 - RNA, 20 nt, Human
agucagaggauggccagugu

SEQ ID NO: 2237472 - RNA, 16 nt, Human
agucaggaaagagaac

SEQ ID NO: 2237473 - RNA, 15 nt, Human
agucaggaaagagaa

SEQ ID NO: 2237474 - RNA, 21 nt, Human
ugucguggguguguguagcca

SEQ ID NO: 2237475 - RNA, 23 nt, Human
ugucguagccaaggugggcugag

SEQ ID NO: 2237476 - RNA, 23 nt, Human
ugucgguuuuuuuuaaauaaaag

SEQ ID NO: 2237477 - RNA, 19 nt, Human
ugucggccugguguucugu

SEQ ID NO: 2237478 - RNA, 14 nt, Human
ugucgggcaugaca

SEQ ID NO: 2237479 - RNA, 15 nt, Human
ugucgggcaugacac

SEQ ID NO: 2237480 - RNA, 23 nt, Human
ugucggccucuaaccccaggccc

SEQ ID NO: 2237481 - RNA, 12 nt, Human
ugucgggcauga

SEQ ID NO: 2237482 - RNA, 14 nt, Human
ugucgcccagucug

SEQ ID NO: 2237483 - RNA, 15 nt, Human
ugucgcccagucugg

SEQ ID NO: 2237484 - RNA, 18 nt, Human
ugucauuuuugcaguaga

SEQ ID NO: 2237485 - RNA, 15 nt, Human
ugucauuuucuccau

SEQ ID NO: 2237486 - RNA, 15 nt, Human
ugucauuuuugcagu

SEQ ID NO: 2237487 - RNA, 14 nt, Human
ugucauuuucucca

SEQ ID NO: 2237488 - RNA, 12 nt, Human
ugucauuugcuu

SEQ ID NO: 2237489 - RNA, 17 nt, Human
ugucccuuuuccuuuuu

SEQ ID NO: 2237490 - RNA, 15 nt, Human
uguccgacucuucug

SEQ ID NO: 2237491 - RNA, 15 nt, Human
uguccgcuggguggu

SEQ ID NO: 2237492 - RNA, 20 nt, Human
uguccgcugggugguacccu

SEQ ID NO: 2237493 - RNA, 22 nt, Human
uguccuaaaacaccugguagga

SEQ ID NO: 2237494 - RNA, 22 nt, Human
uguccgcugggugguacccucu

SEQ ID NO: 2237495 - RNA, 23 nt, Human
uguccgcugggugguacccucug

SEQ ID NO: 2237496 - RNA, 14 nt, Human
uguccgagcuuuga

SEQ ID NO: 2237497 - RNA, 13 nt, Human
uguccgagcuuug

SEQ ID NO: 2237498 - RNA, 18 nt, Human
uguccuuucccuccacuc

SEQ ID NO: 2237499 - RNA, 17 nt, Human
uguccuuucccuccacu

SEQ ID NO: 2237500 - RNA, 13 nt, Human
uguccuuucccuu

SEQ ID NO: 2237501 - RNA, 14 nt, Human
uguccuuucccuuc

SEQ ID NO: 2237502 - RNA, 16 nt, Human
uguccuacccacccuc

SEQ ID NO: 2237503 - RNA, 15 nt, Human
uguccuaaggacaca

SEQ ID NO: 2237504 - RNA, 16 nt, Human
uguccuaaggacacac

SEQ ID NO: 2237505 - RNA, 18 nt, Human
uguccuaaggacacacua

SEQ ID NO: 2237506 - RNA, 20 nt, Human
uguccuaaggacacacuaau

SEQ ID NO: 2237507 - RNA, 16 nt, Human
uguccuuuuuguuauu

SEQ ID NO: 2237508 - RNA, 23 nt, Human
uguccuuucccuucaguacccuc

SEQ ID NO: 2237509 - RNA, 17 nt, Human
uguccuuuuuguuauua

SEQ ID NO: 2237510 - RNA, 21 nt, Human
ugucgaauuuuuauuauuugu

SEQ ID NO: 2237511 - RNA, 22 nt, Human
ugucgauguaggcauucuggag

SEQ ID NO: 2237512 - RNA, 13 nt, Human
ugucgagacacuu

SEQ ID NO: 2237513 - RNA, 15 nt, Human
ugucgagacacuugc

SEQ ID NO: 2237514 - RNA, 16 nt, Human
ugucgcccaggcugga

SEQ ID NO: 2237515 - RNA, 15 nt, Human
ugucgcccaggcugg

SEQ ID NO: 2237516 - RNA, 16 nt, Human
uguauuuuuuuacuaa

SEQ ID NO: 2237517 - RNA, 14 nt, Human
ugucaagaaagagc

SEQ ID NO: 2237518 - RNA, 19 nt, Human
ugucaagaagaugaucaga

SEQ ID NO: 2237519 - RNA, 14 nt, Human
uguauuuuuuuacu

SEQ ID NO: 2237520 - RNA, 14 nt, Human
uguauuuuuaaugg

SEQ ID NO: 2237521 - RNA, 19 nt, Human
uguauuuuucaauaaagca

SEQ ID NO: 2237522 - RNA, 21 nt, Human
ugucaauaaaauccauacauu

SEQ ID NO: 2237523 - RNA, 15 nt, Human
ugucaagccauaauu

SEQ ID NO: 2237524 - RNA, 19 nt, Human
ugucaagagggucugagga

SEQ ID NO: 2237525 - RNA, 15 nt, Human
uguaguaaagaaauu

SEQ ID NO: 2237526 - RNA, 13 nt, Human
uguaguaaagaaa

SEQ ID NO: 2237527 - RNA, 19 nt, Human
uguaguaaagccguuguuu

SEQ ID NO: 2237528 - RNA, 20 nt, Human
uguaguaaagccguuguuua

SEQ ID NO: 2237529 - RNA, 19 nt, Human
uguaguaaacuauuuaucu

SEQ ID NO: 2237530 - RNA, 22 nt, Human
uguaguaaagccguuguuuacu

SEQ ID NO: 2237531 - RNA, 16 nt, Human
uguauuauucugcagc

SEQ ID NO: 2237532 - RNA, 16 nt, Human
uguaguaauugacaug

SEQ ID NO: 2237533 - RNA, 15 nt, Human
uguaguaauugacau

SEQ ID NO: 2237534 - RNA, 14 nt, Human
uguaguaauugaca

SEQ ID NO: 2237535 - RNA, 17 nt, Human
uguauucagugaggguc

SEQ ID NO: 2237536 - RNA, 14 nt, Human
uguauucagcuuua

SEQ ID NO: 2237537 - RNA, 17 nt, Human
uguauucaucuuuugua

SEQ ID NO: 2237538 - RNA, 21 nt, Human
uguauucacccguccagaccu

SEQ ID NO: 2237539 - RNA, 21 nt, Human
uguauuauuucauuauguaaa

SEQ ID NO: 2237540 - RNA, 13 nt, Human
uguauuauuucau

SEQ ID NO: 2237541 - RNA, 20 nt, Human
uguauuauuucauuauguaa

SEQ ID NO: 2237542 - RNA, 22 nt, Human
uguauucauugaagucagaugu

SEQ ID NO: 2237543 - RNA, 21 nt, Human
uguauuccaagacaugucugu

SEQ ID NO: 2237544 - RNA, 20 nt, Human
uguauuccaagacaugucug

SEQ ID NO: 2237545 - RNA, 15 nt, Human
uguauuccaagacau

SEQ ID NO: 2237546 - RNA, 13 nt, Human
uguauuccaagac

SEQ ID NO: 2237547 - RNA, 20 nt, Human
aguagcuugggacaaaucaa

SEQ ID NO: 2237548 - RNA, 13 nt, Human
aguaggagcccag

SEQ ID NO: 2237549 - RNA, 13 nt, Human
aguagucauuuca

SEQ ID NO: 2237550 - RNA, 12 nt, Human
aguagucauuuc

SEQ ID NO: 2237551 - RNA, 14 nt, Human
aguagucauuucau

SEQ ID NO: 2237552 - RNA, 13 nt, Human
aguagggggucua

SEQ ID NO: 2237553 - RNA, 13 nt, Human
aguagucucugug

SEQ ID NO: 2237554 - RNA, 14 nt, Human
aguaguccugugaa

SEQ ID NO: 2237555 - RNA, 12 nt, Human
aguaguccugug

SEQ ID NO: 2237556 - RNA, 13 nt, Human
aguaguccuguga

SEQ ID NO: 2237557 - RNA, 15 nt, Human
aguaguuaauucugu

SEQ ID NO: 2237558 - RNA, 14 nt, Human
aguaguuaauucug

SEQ ID NO: 2237559 - RNA, 14 nt, Human
aguaguuccugcua

SEQ ID NO: 2237560 - RNA, 13 nt, Human
ugucaauauuaaa

SEQ ID NO: 2237561 - RNA, 14 nt, Human
ugucaauauuaaau

SEQ ID NO: 2237562 - RNA, 17 nt, Human
ugucaauauuaaauaca

SEQ ID NO: 2237563 - RNA, 18 nt, Human
ugucaauauuaaauacag

SEQ ID NO: 2237564 - RNA, 19 nt, Human
ugucaauauuaaauacaga

SEQ ID NO: 2237565 - RNA, 21 nt, Human
ugucaauauuaaauacagaca

SEQ ID NO: 2237566 - RNA, 23 nt, Human
ugucaauauuaaauacagacacu

SEQ ID NO: 2237567 - RNA, 20 nt, Human
ugucaaucagccuaguugau

SEQ ID NO: 2237568 - RNA, 17 nt, Human
ugucaauauuuaaacau

SEQ ID NO: 2237569 - RNA, 16 nt, Human
aguaggaagacuuugg

SEQ ID NO: 2237570 - RNA, 17 nt, Human
aguaggaagacuuugga

SEQ ID NO: 2237571 - RNA, 18 nt, Human
aguaggaagacuuuggaa

SEQ ID NO: 2237572 - RNA, 19 nt, Human
aguaggaagacuuuggaaa

SEQ ID NO: 2237573 - RNA, 22 nt, Human
aguaggaagacuuuggaaagac

SEQ ID NO: 2237574 - RNA, 22 nt, Human
ugucaggggcggggagggugac

SEQ ID NO: 2237575 - RNA, 20 nt, Human
ugucaggcugcuggcgccuc

SEQ ID NO: 2237576 - RNA, 22 nt, Human
ugucaggcugcuggcgccucug

SEQ ID NO: 2237577 - RNA, 23 nt, Human
ugucaggcugcuggcgccucugc

SEQ ID NO: 2237578 - RNA, 24 nt, Human
ugucaggcugcuggcgccucugca

SEQ ID NO: 2237579 - RNA, 16 nt, Human
ugucagguggggcagc

SEQ ID NO: 2237580 - RNA, 21 nt, Human
ugucaggccugacggggagga

SEQ ID NO: 2237581 - RNA, 14 nt, Human
ugucaggccugugu

SEQ ID NO: 2237582 - RNA, 15 nt, Human
ugucaggcugcuggc

SEQ ID NO: 2237583 - RNA, 16 nt, Human
ugucaggcugcuggcg

SEQ ID NO: 2237584 - RNA, 17 nt, Human
ugucaggcugcuggcgc

SEQ ID NO: 2237585 - RNA, 19 nt, Human
ugucaggcugcuggcgccu

SEQ ID NO: 2237586 - RNA, 23 nt, Human
ugucauuugcuggagcucugccc

SEQ ID NO: 2237587 - RNA, 20 nt, Human
ugucaguaucuguaucucuc

SEQ ID NO: 2237588 - RNA, 22 nt, Human
ugucaguauguggaaguguggg

SEQ ID NO: 2237589 - RNA, 20 nt, Human
ugucaguaccuucaaacuag

SEQ ID NO: 2237590 - RNA, 18 nt, Human
ugucaguauguggaagug

SEQ ID NO: 2237591 - RNA, 20 nt, Human
ugucaguauguggaagugug

SEQ ID NO: 2237592 - RNA, 19 nt, Human
ugucaguauguggaagugu

SEQ ID NO: 2237593 - RNA, 16 nt, Human
ugucagcugaaccugg

SEQ ID NO: 2237594 - RNA, 13 nt, Human
agucacugcacag

SEQ ID NO: 2237595 - RNA, 19 nt, Human
agucacugagacagcccgg

SEQ ID NO: 2237596 - RNA, 18 nt, Human
agucacugagacagcccg

SEQ ID NO: 2237597 - RNA, 20 nt, Human
agucacugccucucccuggc

SEQ ID NO: 2237598 - RNA, 17 nt, Human
agucacugccucucccu

SEQ ID NO: 2237599 - RNA, 14 nt, Human
agucacugccucuc

SEQ ID NO: 2237600 - RNA, 11 nt, Human
agucacugccu

SEQ ID NO: 2237601 - RNA, 19 nt, Human
ugucagcugaaccugggua

SEQ ID NO: 2237602 - RNA, 17 nt, Human
ugucaggaacagaagga

SEQ ID NO: 2237603 - RNA, 16 nt, Human
ugucaggaacagaagg

SEQ ID NO: 2237604 - RNA, 18 nt, Human
ugucagcuuuugcuucau

SEQ ID NO: 2237605 - RNA, 20 nt, Human
ugucaggaacagaaggauga

SEQ ID NO: 2237606 - RNA, 18 nt, Human
ugucaggaacagaaggau

SEQ ID NO: 2237607 - RNA, 17 nt, Human
ugucaggaagaaaucac

SEQ ID NO: 2237608 - RNA, 14 nt, Human
ugucaggagagcag

SEQ ID NO: 2237609 - RNA, 16 nt, Human
ugucaggagagcagcg

SEQ ID NO: 2237610 - RNA, 16 nt, Human
aguauuugcauauucu

SEQ ID NO: 2237611 - RNA, 17 nt, Human
aguauuugggaagugaa

SEQ ID NO: 2237612 - RNA, 16 nt, Human
aguauuugagaguucu

SEQ ID NO: 2237613 - RNA, 23 nt, Human
aguauuugaaacugaauguuuau

SEQ ID NO: 2237614 - RNA, 13 nt, Human
aguauuucccagc

SEQ ID NO: 2237615 - RNA, 22 nt, Human
aguauuucuaugaaauauuaug

SEQ ID NO: 2237616 - RNA, 13 nt, Human
agucaccaagccc

SEQ ID NO: 2237617 - RNA, 14 nt, Human
agucaccaagccca

SEQ ID NO: 2237618 - RNA, 21 nt, Human
aguauuugggaagugaagacu

SEQ ID NO: 2237619 - RNA, 19 nt, Human
aguauguggaagugugggu

SEQ ID NO: 2237620 - RNA, 23 nt, Human
aguaugugggcagauuuucagca

SEQ ID NO: 2237621 - RNA, 20 nt, Human
aguauuucaaauuggagcuu

SEQ ID NO: 2237622 - RNA, 21 nt, Human
aguauguaaaguauguaaaca

SEQ ID NO: 2237623 - RNA, 14 nt, Human
aguauguguaaaau

SEQ ID NO: 2237624 - RNA, 16 nt, Human
aguauuucaugcuggg

SEQ ID NO: 2237625 - RNA, 13 nt, Human
aguauuucuauga

SEQ ID NO: 2237626 - RNA, 15 nt, Human
aguauuucuaugaaa

SEQ ID NO: 2237627 - RNA, 17 nt, Human
aguauguggaagugugg

SEQ ID NO: 2237628 - RNA, 15 nt, Human
aguauguggaagugu

SEQ ID NO: 2237629 - RNA, 18 nt, Human
aguauaaaugguugucug

SEQ ID NO: 2237630 - RNA, 15 nt, Human
aguauguaaaguaug

SEQ ID NO: 2237631 - RNA, 16 nt, Human
aguauguaaaguaugu

SEQ ID NO: 2237632 - RNA, 12 nt, Human
aguaguuuguau

SEQ ID NO: 2237633 - RNA, 17 nt, Human
aguaguuuguauaacuu

SEQ ID NO: 2237634 - RNA, 19 nt, Human
aguauaaacaaaguuacua

SEQ ID NO: 2237635 - RNA, 17 nt, Human
aguauaaacaaaguuac

SEQ ID NO: 2237636 - RNA, 16 nt, Human
aguauaaacaaaguua

SEQ ID NO: 2237637 - RNA, 13 nt, Human
aguauaaacaaag

SEQ ID NO: 2237638 - RNA, 13 nt, Human
aguauaaaaacaa

SEQ ID NO: 2237639 - RNA, 22 nt, Human
uguaaauccuuuuucuuuauaa

SEQ ID NO: 2237640 - RNA, 20 nt, Human
uguaaauccuuuuucuuuau

SEQ ID NO: 2237641 - RNA, 15 nt, Human
aggugcacaagcucc

SEQ ID NO: 2237642 - RNA, 19 nt, Human
uguaaauccuuuuucuuua

SEQ ID NO: 2237643 - RNA, 12 nt, Human
uguaaauccuuu

SEQ ID NO: 2237644 - RNA, 19 nt, Human
aggucuuuugacaugugga

SEQ ID NO: 2237645 - RNA, 16 nt, Human
aggugcacaagcucca

SEQ ID NO: 2237646 - RNA, 17 nt, Human
aggugcacaagcuccaa

SEQ ID NO: 2237647 - RNA, 18 nt, Human
aggugcacaagcuccaag

SEQ ID NO: 2237648 - RNA, 20 nt, Human
aggugcacaagcuccaagcu

SEQ ID NO: 2237649 - RNA, 18 nt, Human
aggucuuuugacaugugg

SEQ ID NO: 2237650 - RNA, 16 nt, Human
aggucuuuugacaugu

SEQ ID NO: 2237651 - RNA, 15 nt, Human
aggucuuuugacaug

SEQ ID NO: 2237652 - RNA, 14 nt, Human
aggucuuuugacau

SEQ ID NO: 2237653 - RNA, 19 nt, Human
aggucuuggagcugagccu

SEQ ID NO: 2237654 - RNA, 21 nt, Human
aggucuuggagcugagccucu

SEQ ID NO: 2237655 - RNA, 22 nt, Human
aggucuuggagcugagccucuc

SEQ ID NO: 2237656 - RNA, 11 nt, Human
aggucuuuccu

SEQ ID NO: 2237657 - RNA, 18 nt, Human
aggucuuugguucagcua

SEQ ID NO: 2237658 - RNA, 14 nt, Human
aggucccaggcaga

SEQ ID NO: 2237659 - RNA, 18 nt, Human
agguccccagcuuuggcu

SEQ ID NO: 2237660 - RNA, 23 nt, Human
aggucuugaacuccuggccucaa

SEQ ID NO: 2237661 - RNA, 10 nt, Human
aggucccuaa

SEQ ID NO: 2237662 - RNA, 17 nt, Human
agguccccagcuuuggc

SEQ ID NO: 2237663 - RNA, 11 nt, Human
agguccccaga

SEQ ID NO: 2237664 - RNA, 18 nt, Human
agguggccaugccucagc

SEQ ID NO: 2237665 - RNA, 19 nt, Human
agguggccaugccucagcc

SEQ ID NO: 2237666 - RNA, 23 nt, Human
agguggccucuccuuguggccug

SEQ ID NO: 2237667 - RNA, 20 nt, Human
agguggcugacccagucccu

SEQ ID NO: 2237668 - RNA, 19 nt, Human
agguggcucuccaguuagu

SEQ ID NO: 2237669 - RNA, 19 nt, Human
agguggcugacccaguccc

SEQ ID NO: 2237670 - RNA, 17 nt, Human
agguggcuauggccacc

SEQ ID NO: 2237671 - RNA, 14 nt, Human
agguggcucuccag

SEQ ID NO: 2237672 - RNA, 15 nt, Human
agguggcucuccagu

SEQ ID NO: 2237673 - RNA, 17 nt, Human
agguggcucuccaguua

SEQ ID NO: 2237674 - RNA, 22 nt, Human
agguggcugacccagucccugg

SEQ ID NO: 2237675 - RNA, 21 nt, Human
agguggcugacccagucccug

SEQ ID NO: 2237676 - RNA, 22 nt, Human
aggugggcaggugguggcacug

SEQ ID NO: 2237677 - RNA, 13 nt, Human
aggugggcaggug

SEQ ID NO: 2237678 - RNA, 20 nt, Human
aggugggauccuccaggugc

SEQ ID NO: 2237679 - RNA, 23 nt, Human
agguggucugaauguucugacau

SEQ ID NO: 2237680 - RNA, 22 nt, Human
agguggucugaauguucugaca

SEQ ID NO: 2237681 - RNA, 20 nt, Human
agguggucugcucgggccca

SEQ ID NO: 2237682 - RNA, 21 nt, Human
agguggucugcucgggcccag

SEQ ID NO: 2237683 - RNA, 21 nt, Human
agguggucugaauguucugac

SEQ ID NO: 2237684 - RNA, 20 nt, Human
agguggucugaauguucuga

SEQ ID NO: 2237685 - RNA, 19 nt, Human
agguggucugaauguucug

SEQ ID NO: 2237686 - RNA, 23 nt, Human
aggugggccgcaggcgggaaaag

SEQ ID NO: 2237687 - RNA, 22 nt, Human
agguggucugcucgggcccagg

SEQ ID NO: 2237688 - RNA, 15 nt, Human
agguggugcuuacau

SEQ ID NO: 2237689 - RNA, 19 nt, Human
aggugguggcacugagccc

SEQ ID NO: 2237690 - RNA, 20 nt, Human
aggugguggcacugagcccc

SEQ ID NO: 2237691 - RNA, 22 nt, Human
aggugggccagccccucccacc

SEQ ID NO: 2237692 - RNA, 21 nt, Human
aggugggccagccccucccac

SEQ ID NO: 2237693 - RNA, 19 nt, Human
aggugggccagccccuccc

SEQ ID NO: 2237694 - RNA, 18 nt, Human
aggugggccagccccucc

SEQ ID NO: 2237695 - RNA, 17 nt, Human
aggugggccagccccuc

SEQ ID NO: 2237696 - RNA, 16 nt, Human
aggugggccagccccu

SEQ ID NO: 2237697 - RNA, 15 nt, Human
aggugggccagcccc

SEQ ID NO: 2237698 - RNA, 14 nt, Human
aggugggccagccc

SEQ ID NO: 2237699 - RNA, 23 nt, Human
aggugggcccaggaccagcuggg

SEQ ID NO: 2237700 - RNA, 18 nt, Human
aggugggcccaggaccag

SEQ ID NO: 2237701 - RNA, 22 nt, Human
aggugggcccaggaccagcugg

SEQ ID NO: 2237702 - RNA, 12 nt, Human
aggugggcccag

SEQ ID NO: 2237703 - RNA, 13 nt, Human
aggugggcccagg

SEQ ID NO: 2237704 - RNA, 14 nt, Human
aggugggcccagga

SEQ ID NO: 2237705 - RNA, 16 nt, Human
aggugggcccaggacc

SEQ ID NO: 2237706 - RNA, 16 nt, Human
aggugcaguggcucac

SEQ ID NO: 2237707 - RNA, 11 nt, Human
aggugcagugg

SEQ ID NO: 2237708 - RNA, 12 nt, Human
agguggccaugc

SEQ ID NO: 2237709 - RNA, 17 nt, Human
agguggccacuccagac

SEQ ID NO: 2237710 - RNA, 14 nt, Human
agguggccacucca

SEQ ID NO: 2237711 - RNA, 15 nt, Human
agguggcaucucuaa

SEQ ID NO: 2237712 - RNA, 16 nt, Human
aggugcaguuccccca

SEQ ID NO: 2237713 - RNA, 23 nt, Human
aggugcaguucccccaaccucag

SEQ ID NO: 2237714 - RNA, 20 nt, Human
aggugcagagugcccagaac

SEQ ID NO: 2237715 - RNA, 19 nt, Human
aggugcagagugcccagaa

SEQ ID NO: 2237716 - RNA, 18 nt, Human
aggugcagagugcccaga

SEQ ID NO: 2237717 - RNA, 17 nt, Human
aggugcagagugcccag

SEQ ID NO: 2237718 - RNA, 23 nt, Human
aggugcacagacgucccuccacg

SEQ ID NO: 2237719 - RNA, 22 nt, Human
aggugcacagacgucccuccac

SEQ ID NO: 2237720 - RNA, 21 nt, Human
aggugcacaagcuccaagcuc

SEQ ID NO: 2237721 - RNA, 17 nt, Human
agguuguaaauguguuu

SEQ ID NO: 2237722 - RNA, 17 nt, Human
uguaacuuucugaaaua

SEQ ID NO: 2237723 - RNA, 14 nt, Human
agguuggugggggc

SEQ ID NO: 2237724 - RNA, 17 nt, Human
agguuguaguaaagaaa

SEQ ID NO: 2237725 - RNA, 19 nt, Human
agguugggguguacuaguu

SEQ ID NO: 2237726 - RNA, 19 nt, Human
uguaagaagagacugggaa

SEQ ID NO: 2237727 - RNA, 20 nt, Human
uguaagacaaagguuuuccu

SEQ ID NO: 2237728 - RNA, 21 nt, Human
uguaagaagagacugggaaga

SEQ ID NO: 2237729 - RNA, 17 nt, Human
uguaagaagagacuggg

SEQ ID NO: 2237730 - RNA, 19 nt, Human
uguaagacaauccauguaa

SEQ ID NO: 2237731 - RNA, 21 nt, Human
uguaagacaaagguuuuccuc

SEQ ID NO: 2237732 - RNA, 18 nt, Human
uguaagagcaccuuccuc

SEQ ID NO: 2237733 - RNA, 19 nt, Human
uguaagaacuacaaacaaa

SEQ ID NO: 2237734 - RNA, 20 nt, Human
uguaacuuuuguaagacaaa

SEQ ID NO: 2237735 - RNA, 17 nt, Human
uguaacuuucucuauga

SEQ ID NO: 2237736 - RNA, 18 nt, Human
uguaacuuucucuaugaa

SEQ ID NO: 2237737 - RNA, 16 nt, Human
uguaacuuuuguaaga

SEQ ID NO: 2237738 - RNA, 15 nt, Human
uguaacuuuuguaag

SEQ ID NO: 2237739 - RNA, 12 nt, Human
agguugcaggga

SEQ ID NO: 2237740 - RNA, 18 nt, Human
agguugcagggagccgag

SEQ ID NO: 2237741 - RNA, 16 nt, Human
agguugaucagaucug

SEQ ID NO: 2237742 - RNA, 20 nt, Human
agguugauaacuuugcuugc

SEQ ID NO: 2237743 - RNA, 16 nt, Human
agguugauaacuuugc

SEQ ID NO: 2237744 - RNA, 17 nt, Human
agguugauaacuuugcu

SEQ ID NO: 2237745 - RNA, 18 nt, Human
agguugauaacuuugcuu

SEQ ID NO: 2237746 - RNA, 19 nt, Human
agguugauaacuuugcuug

SEQ ID NO: 2237747 - RNA, 22 nt, Human
agguugggaaugaggcuugcug

SEQ ID NO: 2237748 - RNA, 20 nt, Human
agguugggaaugaggcuugc

SEQ ID NO: 2237749 - RNA, 16 nt, Human
agguugggguguacua

SEQ ID NO: 2237750 - RNA, 22 nt, Human
agguugggccauacuggccucg

SEQ ID NO: 2237751 - RNA, 20 nt, Human
agguugggccauacuggccu

SEQ ID NO: 2237752 - RNA, 21 nt, Human
agguugggccauacuggccuc

SEQ ID NO: 2237753 - RNA, 23 nt, Human
agguugggagaaugucaguaugu

SEQ ID NO: 2237754 - RNA, 20 nt, Human
agguugaggggcuccuggaa

SEQ ID NO: 2237755 - RNA, 17 nt, Human
agguugaggggcuccug

SEQ ID NO: 2237756 - RNA, 17 nt, Human
agguugagcucuucuua

SEQ ID NO: 2237757 - RNA, 24 nt, Human
agguugagcucuucuuaaaguauu

SEQ ID NO: 2237758 - RNA, 11 nt, Human
agguugauaac

SEQ ID NO: 2237759 - RNA, 12 nt, Human
agguugauaacu

SEQ ID NO: 2237760 - RNA, 14 nt, Human
agguugauaacuuu

SEQ ID NO: 2237761 - RNA, 15 nt, Human
agguugauaacuuug

SEQ ID NO: 2237762 - RNA, 17 nt, Human
aggugguuauggagagg

SEQ ID NO: 2237763 - RNA, 21 nt, Human
agguugacaauaaaugugcuu

SEQ ID NO: 2237764 - RNA, 19 nt, Human
uguaagaucguucucugcc

SEQ ID NO: 2237765 - RNA, 20 nt, Human
uguaagaucguucucugccu

SEQ ID NO: 2237766 - RNA, 15 nt, Human
uguaagaguguagaa

SEQ ID NO: 2237767 - RNA, 19 nt, Human
uguaagagcaccuuccuca

SEQ ID NO: 2237768 - RNA, 22 nt, Human
uguaagagcaccuuccucacuu

SEQ ID NO: 2237769 - RNA, 18 nt, Human
uguaagaguguagaagca

SEQ ID NO: 2237770 - RNA, 19 nt, Human
uguaagaguguagaagcau

SEQ ID NO: 2237771 - RNA, 20 nt, Human
uguaagaguguagaagcauu

SEQ ID NO: 2237772 - RNA, 21 nt, Human
uguaagaguguagaagcauuc

SEQ ID NO: 2237773 - RNA, 12 nt, Human
uguaagaugcug

SEQ ID NO: 2237774 - RNA, 14 nt, Human
uguaagaugcuggg

SEQ ID NO: 2237775 - RNA, 15 nt, Human
uguaagaugcugggu

SEQ ID NO: 2237776 - RNA, 17 nt, Human
uguaagaugcuggguug

SEQ ID NO: 2237777 - RNA, 14 nt, Human
uguaaguaauuauc

SEQ ID NO: 2237778 - RNA, 21 nt, Human
uguaagugugaguaagagcug

SEQ ID NO: 2237779 - RNA, 17 nt, Human
uguaagugugaguaaga

SEQ ID NO: 2237780 - RNA, 14 nt, Human
uguaagugugagua

SEQ ID NO: 2237781 - RNA, 12 nt, Human
uguaagugugag

SEQ ID NO: 2237782 - RNA, 15 nt, Human
uguaagugugugugu

SEQ ID NO: 2237783 - RNA, 23 nt, Human
uguaauuaaguacuauguaucaa

SEQ ID NO: 2237784 - RNA, 20 nt, Human
uguaaguuuaccuauguaac

SEQ ID NO: 2237785 - RNA, 19 nt, Human
uguaaguuuaugucuaaag

SEQ ID NO: 2237786 - RNA, 20 nt, Human
uguaaguuuaugucuaaaga

SEQ ID NO: 2237787 - RNA, 13 nt, Human
uguaaguuucagg

SEQ ID NO: 2237788 - RNA, 19 nt, Human
uguaauuguuguuuguaug

SEQ ID NO: 2237789 - RNA, 17 nt, Human
uguaauuguuguuugua

SEQ ID NO: 2237790 - RNA, 11 nt, Human
uguaauuauug

SEQ ID NO: 2237791 - RNA, 12 nt, Human
uguaauuauugu

SEQ ID NO: 2237792 - RNA, 14 nt, Human
uguaauuauuguga

SEQ ID NO: 2237793 - RNA, 20 nt, Human
uguaauuuaaaauugugaug

SEQ ID NO: 2237794 - RNA, 18 nt, Human
uguaauuuaaaauuguga

SEQ ID NO: 2237795 - RNA, 23 nt, Human
uguaauuguuguuuguauguaua

SEQ ID NO: 2237796 - RNA, 20 nt, Human
uguaauuguuguuuguaugu

SEQ ID NO: 2237797 - RNA, 17 nt, Human
uguaauuuaaaauugug

SEQ ID NO: 2237798 - RNA, 18 nt, Human
uguagaggagaaacugga

SEQ ID NO: 2237799 - RNA, 14 nt, Human
uguagagugggagc

SEQ ID NO: 2237800 - RNA, 13 nt, Human
uguagagugggag

SEQ ID NO: 2237801 - RNA, 13 nt, Human
uguacuuugugcu

SEQ ID NO: 2237802 - RNA, 12 nt, Human
uguaccauguac

SEQ ID NO: 2237803 - RNA, 17 nt, Human
uguaccauguacaugaa

SEQ ID NO: 2237804 - RNA, 16 nt, Human
uguacuuuuaaggcag

SEQ ID NO: 2237805 - RNA, 15 nt, Human
uguacuuuuuccaga

SEQ ID NO: 2237806 - RNA, 21 nt, Human
uguaccaugaaacaaagcugc

SEQ ID NO: 2237807 - RNA, 20 nt, Human
uguaccagcccagauguuuu

SEQ ID NO: 2237808 - RNA, 17 nt, Human
uguaccagcccagaugu

SEQ ID NO: 2237809 - RNA, 23 nt, Human
uguaauuucuuugccuguucagu

SEQ ID NO: 2237810 - RNA, 21 nt, Human
uguaauuucuuugccuguuca

SEQ ID NO: 2237811 - RNA, 22 nt, Human
uguaauuuaaacaggcccagca

SEQ ID NO: 2237812 - RNA, 23 nt, Human
uguaauuuaaacaggcccagcau

SEQ ID NO: 2237813 - RNA, 18 nt, Human
uguaauuucuuugccugu

SEQ ID NO: 2237814 - RNA, 14 nt, Human
uguaauuugugaua

SEQ ID NO: 2237815 - RNA, 22 nt, Human
uguaauuuaaaauugugaugug

SEQ ID NO: 2237816 - RNA, 21 nt, Human
uguaauuuaaaauugugaugu

SEQ ID NO: 2237817 - RNA, 19 nt, Human
uguaauuguuugucuuuaa

SEQ ID NO: 2237818 - RNA, 15 nt, Human
uguaauuguuugucu

SEQ ID NO: 2237819 - RNA, 14 nt, Human
uguaauuuaaacag

SEQ ID NO: 2237820 - RNA, 15 nt, Human
uguaauuuaaacagg

SEQ ID NO: 2237821 - RNA, 16 nt, Human
uguaauuuaaacaggc

SEQ ID NO: 2237822 - RNA, 19 nt, Human
uguaauuuaaacaggccca

SEQ ID NO: 2237823 - RNA, 20 nt, Human
uguaauuuaaacaggcccag

SEQ ID NO: 2237824 - RNA, 21 nt, Human
uguaauuuaaacaggcccagc

SEQ ID NO: 2237825 - RNA, 19 nt, Human
aguaaaaauacaaaaauua

SEQ ID NO: 2237826 - RNA, 15 nt, Human
aguaaaaauuaaaaa

SEQ ID NO: 2237827 - RNA, 23 nt, Human
aguaaggaauuuuauuuuuuucu

SEQ ID NO: 2237828 - RNA, 12 nt, Human
aguaaggcugug

SEQ ID NO: 2237829 - RNA, 13 nt, Human
aguaaggcugugu

SEQ ID NO: 2237830 - RNA, 18 nt, Human
aguaagcugcucuauugu

SEQ ID NO: 2237831 - RNA, 20 nt, Human
aguaagcugcucuauuguag

SEQ ID NO: 2237832 - RNA, 16 nt, Human
aguaagggaaauagaa

SEQ ID NO: 2237833 - RNA, 17 nt, Human
aguaagggaaauagaaa

SEQ ID NO: 2237834 - RNA, 14 nt, Human
aguaaggugcaguu

SEQ ID NO: 2237835 - RNA, 17 nt, Human
aguaaguaccacucagg

SEQ ID NO: 2237836 - RNA, 18 nt, Human
aguaauauuuauauauuu

SEQ ID NO: 2237837 - RNA, 17 nt, Human
aguaauaugcacacauu

SEQ ID NO: 2237838 - RNA, 20 nt, Human
aguaauaugcacacauuuuu

SEQ ID NO: 2237839 - RNA, 19 nt, Human
aguaauaugcacacauuuu

SEQ ID NO: 2237840 - RNA, 18 nt, Human
aguaauaugcacacauuu

SEQ ID NO: 2237841 - RNA, 13 nt, Human
aguaaaaauacaa

SEQ ID NO: 2237842 - RNA, 12 nt, Human
aguaaaaauaca

SEQ ID NO: 2237843 - RNA, 15 nt, Human
aguaaaaauaaaauu

SEQ ID NO: 2237844 - RNA, 12 nt, Human
aguaaaaauaaa

SEQ ID NO: 2237845 - RNA, 14 nt, Human
agguuuuuaagccu

SEQ ID NO: 2237846 - RNA, 20 nt, Human
aguaagccgugauuuucauu

SEQ ID NO: 2237847 - RNA, 15 nt, Human
aguaaaaccacagca

SEQ ID NO: 2237848 - RNA, 15 nt, Human
agguuuuguaaagau

SEQ ID NO: 2237849 - RNA, 13 nt, Human
agguuuuguacaa

SEQ ID NO: 2237850 - RNA, 13 nt, Human
agguuuuguaaag

SEQ ID NO: 2237851 - RNA, 12 nt, Human
agguuuuguugu

SEQ ID NO: 2237852 - RNA, 17 nt, Human
agguuuuguuguuuuau

SEQ ID NO: 2237853 - RNA, 16 nt, Human
agguuuuguuugcuau

SEQ ID NO: 2237854 - RNA, 17 nt, Human
agguuuuguuugcuauc

SEQ ID NO: 2237855 - RNA, 18 nt, Human
agguuuuguuugcuaucu

SEQ ID NO: 2237856 - RNA, 19 nt, Human
agguuuuguuugcuaucuu

SEQ ID NO: 2237857 - RNA, 22 nt, Human
agguuuuguuugcuaucuuaau

SEQ ID NO: 2237858 - RNA, 23 nt, Human
agguuuuguuugcuaucuuaauu

SEQ ID NO: 2237859 - RNA, 14 nt, Human
agguuuucuccacu

SEQ ID NO: 2237860 - RNA, 14 nt, Human
uguagagggcccug

SEQ ID NO: 2237861 - RNA, 13 nt, Human
agguuuucuccac

SEQ ID NO: 2237862 - RNA, 22 nt, Human
agguuuuccucuucuauuuugu

SEQ ID NO: 2237863 - RNA, 11 nt, Human
agguuuuccug

SEQ ID NO: 2237864 - RNA, 20 nt, Human
aguagaaagacagagcuggg

SEQ ID NO: 2237865 - RNA, 21 nt, Human
aguagaaagacagagcuggga

SEQ ID NO: 2237866 - RNA, 14 nt, Human
aguagaaaggccuu

SEQ ID NO: 2237867 - RNA, 15 nt, Human
aguagaaaggccuuu

SEQ ID NO: 2237868 - RNA, 16 nt, Human
aguagaaaggccuuua

SEQ ID NO: 2237869 - RNA, 17 nt, Human
aguagaaaggccuuuaa

SEQ ID NO: 2237870 - RNA, 19 nt, Human
aguacuuuuggcauuuuac

SEQ ID NO: 2237871 - RNA, 19 nt, Human
aguacuuuggaggccccua

SEQ ID NO: 2237872 - RNA, 17 nt, Human
aguacuuuggaggcccc

SEQ ID NO: 2237873 - RNA, 22 nt, Human
aguacuuuggaggccccuaugu

SEQ ID NO: 2237874 - RNA, 14 nt, Human
aguacacuguuuca

SEQ ID NO: 2237875 - RNA, 20 nt, Human
aguacacuguuucaaacuuu

SEQ ID NO: 2237876 - RNA, 16 nt, Human
aguacacuguuucaaa

SEQ ID NO: 2237877 - RNA, 19 nt, Human
aguacaccacaagggucac

SEQ ID NO: 2237878 - RNA, 22 nt, Human
aguaaucccgccaccuaucucg

SEQ ID NO: 2237879 - RNA, 15 nt, Human
aguaauuugaggaca

SEQ ID NO: 2237880 - RNA, 15 nt, Human
aguaauuuguagauu

SEQ ID NO: 2237881 - RNA, 14 nt, Human
aguaauccaccugc

SEQ ID NO: 2237882 - RNA, 14 nt, Human
aguaaucccgccac

SEQ ID NO: 2237883 - RNA, 17 nt, Human
aguaaucccgccaccua

SEQ ID NO: 2237884 - RNA, 19 nt, Human
aguaaucccgccaccuauc

SEQ ID NO: 2237885 - RNA, 21 nt, Human
aguaauccaagcaaaugugaa

SEQ ID NO: 2237886 - RNA, 19 nt, Human
aguaaguaccacucaggcc

SEQ ID NO: 2237887 - RNA, 15 nt, Human
aguaauccaagcaaa

SEQ ID NO: 2237888 - RNA, 17 nt, Human
uguagguaugaauaagu

SEQ ID NO: 2237889 - RNA, 22 nt, Human
uguaggagcugccuuggcucag

SEQ ID NO: 2237890 - RNA, 19 nt, Human
uguaggugucugcacccag

SEQ ID NO: 2237891 - RNA, 20 nt, Human
uguaggugucugcacccagg

SEQ ID NO: 2237892 - RNA, 15 nt, Human
uguaggagcugccuu

SEQ ID NO: 2237893 - RNA, 12 nt, Human
uguaggagcugc

SEQ ID NO: 2237894 - RNA, 11 nt, Human
uguaggagaau

SEQ ID NO: 2237895 - RNA, 23 nt, Human
uguaggaauucuuuuggggaagu

SEQ ID NO: 2237896 - RNA, 21 nt, Human
aguagauggugaaauuuauua

SEQ ID NO: 2237897 - RNA, 20 nt, Human
uguaggaauucuuuugggga

SEQ ID NO: 2237898 - RNA, 21 nt, Human
uguaggaauucuuuuggggaa

SEQ ID NO: 2237899 - RNA, 20 nt, Human
uguaggaagguuaauguuca

SEQ ID NO: 2237900 - RNA, 17 nt, Human
aguagagucaucuccau

SEQ ID NO: 2237901 - RNA, 19 nt, Human
aguagauaggccaugggca

SEQ ID NO: 2237902 - RNA, 18 nt, Human
uguaggaagguuaauguu

SEQ ID NO: 2237903 - RNA, 15 nt, Human
aguagauggugaaau

SEQ ID NO: 2237904 - RNA, 16 nt, Human
aguagauggugaaauu

SEQ ID NO: 2237905 - RNA, 17 nt, Human
aguagauggugaaauuu

SEQ ID NO: 2237906 - RNA, 17 nt, Human
aguagaagucuuagaug

SEQ ID NO: 2237907 - RNA, 15 nt, Human
aguagaggcuuagag

SEQ ID NO: 2237908 - RNA, 21 nt, Human
aguagaaggucggaggcuugg

SEQ ID NO: 2237909 - RNA, 23 nt, Human
aguagagucaucuccaucagcug

SEQ ID NO: 2237910 - RNA, 16 nt, Human
aguagagucaucucca

SEQ ID NO: 2237911 - RNA, 14 nt, Human
aguagagucaucuc

SEQ ID NO: 2237912 - RNA, 19 nt, Human
aguagaaauaauaugcauu

SEQ ID NO: 2237913 - RNA, 18 nt, Human
aguagaaauaauaugcau

SEQ ID NO: 2237914 - RNA, 18 nt, Human
aguagaaaggccuuuaaa

SEQ ID NO: 2237915 - RNA, 13 nt, Human
aguagaacagaua

SEQ ID NO: 2237916 - RNA, 19 nt, Human
aguagaacagauaaucagu

SEQ ID NO: 2237917 - RNA, 12 nt, Human
aguagagacagg

SEQ ID NO: 2237918 - RNA, 20 nt, Human
aguagaagauuugaugcugg

SEQ ID NO: 2237919 - RNA, 16 nt, Human
aguagaaggucggagg

SEQ ID NO: 2237920 - RNA, 19 nt, Human
ugggcuggcucccucuugg

SEQ ID NO: 2237921 - RNA, 19 nt, Human
ugggcuggcaguccuggaa

SEQ ID NO: 2237922 - RNA, 16 nt, Human
ugggcugcuccucaug

SEQ ID NO: 2237923 - RNA, 15 nt, Human
ugggcugcuccucau

SEQ ID NO: 2237924 - RNA, 18 nt, Human
ugggcuggaaucaggaau

SEQ ID NO: 2237925 - RNA, 18 nt, Human
ugggcuggaacagauuca

SEQ ID NO: 2237926 - RNA, 18 nt, Human
ugggcuggguucuaccca

SEQ ID NO: 2237927 - RNA, 19 nt, Human
ugggcuggguucuacccag

SEQ ID NO: 2237928 - RNA, 18 nt, Human
uggggaagcuucuuaaau

SEQ ID NO: 2237929 - RNA, 13 nt, Human
uggggaaggaggc

SEQ ID NO: 2237930 - RNA, 16 nt, Human
uggggaagugaggaag

SEQ ID NO: 2237931 - RNA, 17 nt, Human
uggggaagacuguggcu

SEQ ID NO: 2237932 - RNA, 16 nt, Human
uggggaagacuguggc

SEQ ID NO: 2237933 - RNA, 24 nt, Human
uggggaagacuguggcugcuagca

SEQ ID NO: 2237934 - RNA, 14 nt, Human
uggggaagacugug

SEQ ID NO: 2237935 - RNA, 20 nt, Human
ugggcugggugcgaccccau

SEQ ID NO: 2237936 - RNA, 18 nt, Human
ugggcuggggccugaugg

SEQ ID NO: 2237937 - RNA, 17 nt, Human
uggggacagagcagaac

SEQ ID NO: 2237938 - RNA, 14 nt, Human
uggggaauuuccuc

SEQ ID NO: 2237939 - RNA, 16 nt, Human
uggggaauuuccucua

SEQ ID NO: 2237940 - RNA, 13 nt, Human
uggggacagggcu

SEQ ID NO: 2237941 - RNA, 22 nt, Human
uggggacaggggcaggaggaag

SEQ ID NO: 2237942 - RNA, 20 nt, Human
uggggacaggggcaggagga

SEQ ID NO: 2237943 - RNA, 14 nt, Human
uggggaccagagcu

SEQ ID NO: 2237944 - RNA, 15 nt, Human
uggggaccagagcug

SEQ ID NO: 2237945 - RNA, 18 nt, Human
uggggacaucucuuugaa

SEQ ID NO: 2237946 - RNA, 20 nt, Human
uggggacaucucuuugaauu

SEQ ID NO: 2237947 - RNA, 13 nt, Human
uggggaccucagg

SEQ ID NO: 2237948 - RNA, 17 nt, Human
uggggaccagagcugcc

SEQ ID NO: 2237949 - RNA, 18 nt, Human
uggggaccagagcugcca

SEQ ID NO: 2237950 - RNA, 12 nt, Human
ugggcugagccc

SEQ ID NO: 2237951 - RNA, 23 nt, Human
ugggcugagacuggauacugccc

SEQ ID NO: 2237952 - RNA, 15 nt, Human
ugggcugagacugga

SEQ ID NO: 2237953 - RNA, 14 nt, Human
ugggcugagacugg

SEQ ID NO: 2237954 - RNA, 18 nt, Human
ugggcugacggugcaguc

SEQ ID NO: 2237955 - RNA, 21 nt, Human
ugggcucugugggcugcacuc

SEQ ID NO: 2237956 - RNA, 19 nt, Human
ugggcugaacacuccaauu

SEQ ID NO: 2237957 - RNA, 17 nt, Human
ugggcugaacacuccaa

SEQ ID NO: 2237958 - RNA, 18 nt, Human
ugggcucugugcagucac

SEQ ID NO: 2237959 - RNA, 17 nt, Human
ugggcucugugggcugc

SEQ ID NO: 2237960 - RNA, 20 nt, Human
ugggcucccuucccaccucu

SEQ ID NO: 2237961 - RNA, 16 nt, Human
ugggcucugggagcag

SEQ ID NO: 2237962 - RNA, 12 nt, Human
ugggcucugugc

SEQ ID NO: 2237963 - RNA, 17 nt, Human
ugggcucugugcaguca

SEQ ID NO: 2237964 - RNA, 16 nt, Human
ugggcugagcccuggc

SEQ ID NO: 2237965 - RNA, 15 nt, Human
ugggcugagcccugg

SEQ ID NO: 2237966 - RNA, 14 nt, Human
ugggcugagccccu

SEQ ID NO: 2237967 - RNA, 17 nt, Human
ugggcugagccccuacc

SEQ ID NO: 2237968 - RNA, 18 nt, Human
ugggcugagccccuaccc

SEQ ID NO: 2237969 - RNA, 19 nt, Human
ugggcugagccccuacccc

SEQ ID NO: 2237970 - RNA, 18 nt, Human
ugggcugagcccuggcag

SEQ ID NO: 2237971 - RNA, 17 nt, Human
ugggcugagcccuggca

SEQ ID NO: 2237972 - RNA, 17 nt, Human
ugggcugcccuggugcu

SEQ ID NO: 2237973 - RNA, 19 nt, Human
ugggcugcccuggugcugc

SEQ ID NO: 2237974 - RNA, 20 nt, Human
ugggcugcccuggugcugcc

SEQ ID NO: 2237975 - RNA, 17 nt, Human
ugggcugcuacccagaa

SEQ ID NO: 2237976 - RNA, 16 nt, Human
ugggcugcccuggugc

SEQ ID NO: 2237977 - RNA, 21 nt, Human
ugggcugcccuggugcugcca

SEQ ID NO: 2237978 - RNA, 15 nt, Human
agggccugagccugg

SEQ ID NO: 2237979 - RNA, 20 nt, Human
agggccucaaaggcccgcuc

SEQ ID NO: 2237980 - RNA, 20 nt, Human
agggccuagcugcuacaaag

SEQ ID NO: 2237981 - RNA, 21 nt, Human
agggccuagcugcuacaaaga

SEQ ID NO: 2237982 - RNA, 17 nt, Human
agggccguaccccaccc

SEQ ID NO: 2237983 - RNA, 18 nt, Human
agggccguaccccacccu

SEQ ID NO: 2237984 - RNA, 19 nt, Human
agggccguaccccacccuc

SEQ ID NO: 2237985 - RNA, 20 nt, Human
agggccguaccccacccuca

SEQ ID NO: 2237986 - RNA, 15 nt, Human
agggccuagcugcua

SEQ ID NO: 2237987 - RNA, 16 nt, Human
agggccuagcugcuac

SEQ ID NO: 2237988 - RNA, 18 nt, Human
agggccuagcugcuacaa

SEQ ID NO: 2237989 - RNA, 19 nt, Human
agggccuagcugcuacaaa

SEQ ID NO: 2237990 - RNA, 23 nt, Human
agggcuucugccauuucugagau

SEQ ID NO: 2237991 - RNA, 12 nt, Human
agggcuuccucu

SEQ ID NO: 2237992 - RNA, 20 nt, Human
agggcuuccucuagaagcca

SEQ ID NO: 2237993 - RNA, 21 nt, Human
agggcuuccucuagaagccaa

SEQ ID NO: 2237994 - RNA, 22 nt, Human
agggcuuccucuagaagccaag

SEQ ID NO: 2237995 - RNA, 13 nt, Human
agggcuucugcac

SEQ ID NO: 2237996 - RNA, 14 nt, Human
agggcuucugcacc

SEQ ID NO: 2237997 - RNA, 15 nt, Human
agggcuucugcaccc

SEQ ID NO: 2237998 - RNA, 16 nt, Human
agggcuucugcacccu

SEQ ID NO: 2237999 - RNA, 17 nt, Human
agggcuucugcacccuc

SEQ ID NO: 2238000 - RNA, 18 nt, Human
agggcuucugcacccucc

SEQ ID NO: 2238001 - RNA, 19 nt, Human
agggcuucugcacccucca

SEQ ID NO: 2238002 - RNA, 22 nt, Human
agggcuucugcacccuccaccc

SEQ ID NO: 2238003 - RNA, 18 nt, Human
ugggcucccuucccaccu

SEQ ID NO: 2238004 - RNA, 19 nt, Human
ugggcucccuucccaccuc

SEQ ID NO: 2238005 - RNA, 13 nt, Human
uggggagugggac

SEQ ID NO: 2238006 - RNA, 19 nt, Human
uggggaguaggacauacca

SEQ ID NO: 2238007 - RNA, 19 nt, Human
uggggagugggacagaguc

SEQ ID NO: 2238008 - RNA, 16 nt, Human
uggggagugggacaga

SEQ ID NO: 2238009 - RNA, 16 nt, Human
uggggaguuaagaccu

SEQ ID NO: 2238010 - RNA, 20 nt, Human
uggggaguuaagaccuggca

SEQ ID NO: 2238011 - RNA, 19 nt, Human
uggggaguuaagaccuggc

SEQ ID NO: 2238012 - RNA, 18 nt, Human
uggggaguuaagaccugg

SEQ ID NO: 2238013 - RNA, 17 nt, Human
uggggaguuaagaccug

SEQ ID NO: 2238014 - RNA, 14 nt, Human
uggggcccugccuc

SEQ ID NO: 2238015 - RNA, 20 nt, Human
uggggacguccugccaccug

SEQ ID NO: 2238016 - RNA, 22 nt, Human
uggggacggggggccccaguca

SEQ ID NO: 2238017 - RNA, 19 nt, Human
uggggacggggggccccag

SEQ ID NO: 2238018 - RNA, 20 nt, Human
uggggacggggggccccagu

SEQ ID NO: 2238019 - RNA, 18 nt, Human
uggggaccugguacccuc

SEQ ID NO: 2238020 - RNA, 23 nt, Human
uggggaccucaggccugggggcu

SEQ ID NO: 2238021 - RNA, 12 nt, Human
uggggagaaagu

SEQ ID NO: 2238022 - RNA, 21 nt, Human
uggggacguccugccaccugg

SEQ ID NO: 2238023 - RNA, 15 nt, Human
uggggaggggcugug

SEQ ID NO: 2238024 - RNA, 18 nt, Human
uggggccuagauccacac

SEQ ID NO: 2238025 - RNA, 19 nt, Human
uggggccgccgccucuuuc

SEQ ID NO: 2238026 - RNA, 12 nt, Human
uggggccuuggu

SEQ ID NO: 2238027 - RNA, 13 nt, Human
uggggcgaggcag

SEQ ID NO: 2238028 - RNA, 14 nt, Human
uggggcgaggcaga

SEQ ID NO: 2238029 - RNA, 18 nt, Human
uggggccuacagcuuuga

SEQ ID NO: 2238030 - RNA, 14 nt, Human
uggggccuuggccu

SEQ ID NO: 2238031 - RNA, 15 nt, Human
uggggcccugccucc

SEQ ID NO: 2238032 - RNA, 16 nt, Human
uggggcccugccuccu

SEQ ID NO: 2238033 - RNA, 15 nt, Human
uggggcucugugcag

SEQ ID NO: 2238034 - RNA, 13 nt, Human
uggggcucuggga

SEQ ID NO: 2238035 - RNA, 13 nt, Human
uggggcucucagu

SEQ ID NO: 2238036 - RNA, 23 nt, Human
uggggcuaggaaauccagggugg

SEQ ID NO: 2238037 - RNA, 19 nt, Human
uggggcguggggagggccg

SEQ ID NO: 2238038 - RNA, 18 nt, Human
uggggcggugagagggga

SEQ ID NO: 2238039 - RNA, 15 nt, Human
uggggcgaggcagag

SEQ ID NO: 2238040 - RNA, 17 nt, Human
uggggcgaggcagagga

SEQ ID NO: 2238041 - RNA, 19 nt, Human
uggggcgaggcagaggaca

SEQ ID NO: 2238042 - RNA, 18 nt, Human
uggggcgaggcagaggac

SEQ ID NO: 2238043 - RNA, 17 nt, Human
uggggcgggaaagccag

SEQ ID NO: 2238044 - RNA, 19 nt, Human
uggggcgggaaagccagug

SEQ ID NO: 2238045 - RNA, 14 nt, Human
uggggcguggggag

SEQ ID NO: 2238046 - RNA, 16 nt, Human
ugggguagggcugacu

SEQ ID NO: 2238047 - RNA, 13 nt, Human
ugggguagggcug

SEQ ID NO: 2238048 - RNA, 15 nt, Human
ugggguagguuggga

SEQ ID NO: 2238049 - RNA, 15 nt, Human
ugggguaugggagag

SEQ ID NO: 2238050 - RNA, 21 nt, Human
ugggguagguugggagaaugu

SEQ ID NO: 2238051 - RNA, 17 nt, Human
uggggucacucuggcag

SEQ ID NO: 2238052 - RNA, 18 nt, Human
uggggucacucuggcagc

SEQ ID NO: 2238053 - RNA, 15 nt, Human
ugggguacccacugc

SEQ ID NO: 2238054 - RNA, 16 nt, Human
ugggguacccacugcu

SEQ ID NO: 2238055 - RNA, 20 nt, Human
ugggguagcuagaggaacca

SEQ ID NO: 2238056 - RNA, 18 nt, Human
ugggguagcuagaggaac

SEQ ID NO: 2238057 - RNA, 21 nt, Human
ugggguaccaagagacuccuu

SEQ ID NO: 2238058 - RNA, 14 nt, Human
ugggggaagcccug

SEQ ID NO: 2238059 - RNA, 20 nt, Human
ugggguacccacugcucugg

SEQ ID NO: 2238060 - RNA, 14 nt, Human
uggggcugauugua

SEQ ID NO: 2238061 - RNA, 19 nt, Human
uggggcugguagcucaggu

SEQ ID NO: 2238062 - RNA, 16 nt, Human
uggggcugguucugua

SEQ ID NO: 2238063 - RNA, 18 nt, Human
uggggcugaccuuccucg

SEQ ID NO: 2238064 - RNA, 23 nt, Human
uggggcugaccuuccucgcagag

SEQ ID NO: 2238065 - RNA, 11 nt, Human
uggggcugaac

SEQ ID NO: 2238066 - RNA, 20 nt, Human
uggggcugaagguugaagag

SEQ ID NO: 2238067 - RNA, 17 nt, Human
uggggcucugugcaggg

SEQ ID NO: 2238068 - RNA, 20 nt, Human
uggggcugcaccggcuggcc

SEQ ID NO: 2238069 - RNA, 15 nt, Human
uggggcuucuccuga

SEQ ID NO: 2238070 - RNA, 16 nt, Human
uggggcuucuccugac

SEQ ID NO: 2238071 - RNA, 18 nt, Human
uggggcuucuccugaccc

SEQ ID NO: 2238072 - RNA, 18 nt, Human
ugggggaacucagaucca

SEQ ID NO: 2238073 - RNA, 17 nt, Human
ugggggaaauggugccu

SEQ ID NO: 2238074 - RNA, 15 nt, Human
ugggggaaagcacag

SEQ ID NO: 2238075 - RNA, 14 nt, Human
ugggguacccacug

SEQ ID NO: 2238076 - RNA, 20 nt, Human
ugggggaacucagauccagg

SEQ ID NO: 2238077 - RNA, 17 nt, Human
ugggggaagaccuggca

SEQ ID NO: 2238078 - RNA, 18 nt, Human
ugggggaagagcacagcc

SEQ ID NO: 2238079 - RNA, 19 nt, Human
ugggggaagagcacagccc

SEQ ID NO: 2238080 - RNA, 21 nt, Human
ugggggaagagcacagcccuc

SEQ ID NO: 2238081 - RNA, 22 nt, Human
ugggggaagagcacagcccucc

SEQ ID NO: 2238082 - RNA, 23 nt, Human
ugggggaagagcacagcccuccc

SEQ ID NO: 2238083 - RNA, 23 nt, Human
ugggcccaagacagaugccccag

SEQ ID NO: 2238084 - RNA, 22 nt, Human
ugggcccaagacagaugcccca

SEQ ID NO: 2238085 - RNA, 14 nt, Human
ugggcccaacccug

SEQ ID NO: 2238086 - RNA, 16 nt, Human
ugggcccaacccuguc

SEQ ID NO: 2238087 - RNA, 12 nt, Human
ugggcccagaag

SEQ ID NO: 2238088 - RNA, 18 nt, Human
ugggcccaacccugucug

SEQ ID NO: 2238089 - RNA, 14 nt, Human
ugggcccagaucug

SEQ ID NO: 2238090 - RNA, 13 nt, Human
ugggcccagaucu

SEQ ID NO: 2238091 - RNA, 12 nt, Human
ugggcccagcug

SEQ ID NO: 2238092 - RNA, 13 nt, Human
ugggcccagcugg

SEQ ID NO: 2238093 - RNA, 14 nt, Human
ugggcccagcuggg

SEQ ID NO: 2238094 - RNA, 15 nt, Human
ugggcccagcugggc

SEQ ID NO: 2238095 - RNA, 16 nt, Human
ugggcccagcugggcu

SEQ ID NO: 2238096 - RNA, 17 nt, Human
ugggcccagcugggcuc

SEQ ID NO: 2238097 - RNA, 19 nt, Human
ugggcccagcugggcucug

SEQ ID NO: 2238098 - RNA, 20 nt, Human
ugggcccagcugggcucugc

SEQ ID NO: 2238099 - RNA, 22 nt, Human
ugggcccagcugggcucugcca

SEQ ID NO: 2238100 - RNA, 10 nt, Human
ugggcccagg

SEQ ID NO: 2238101 - RNA, 14 nt, Human
ugggcccaggacca

SEQ ID NO: 2238102 - RNA, 15 nt, Human
ugggcccaggaccag

SEQ ID NO: 2238103 - RNA, 23 nt, Human
ugggccccaccaccuaggccacu

SEQ ID NO: 2238104 - RNA, 18 nt, Human
ugggccccaccaccuagg

SEQ ID NO: 2238105 - RNA, 17 nt, Human
ugggccccaccaccuag

SEQ ID NO: 2238106 - RNA, 19 nt, Human
ugggcccagggacaccagc

SEQ ID NO: 2238107 - RNA, 23 nt, Human
ugggcccaggaccagcuggggcg

SEQ ID NO: 2238108 - RNA, 13 nt, Human
ugggcccagggac

SEQ ID NO: 2238109 - RNA, 22 nt, Human
ugggcccagggacaccagccag

SEQ ID NO: 2238110 - RNA, 12 nt, Human
ugggcccaggga

SEQ ID NO: 2238111 - RNA, 21 nt, Human
ugggcccaggaccagcugggg

SEQ ID NO: 2238112 - RNA, 22 nt, Human
ugggcccaggaccagcuggggc

SEQ ID NO: 2238113 - RNA, 17 nt, Human
ugggcccaggaccagcu

SEQ ID NO: 2238114 - RNA, 18 nt, Human
ugggcccaggaccagcug

SEQ ID NO: 2238115 - RNA, 19 nt, Human
ugggcccaggaccagcugg

SEQ ID NO: 2238116 - RNA, 20 nt, Human
ugggcccaggaccagcuggg

SEQ ID NO: 2238117 - RNA, 12 nt, Human
agggaggggacu

SEQ ID NO: 2238118 - RNA, 12 nt, Human
agggaggggccu

SEQ ID NO: 2238119 - RNA, 15 nt, Human
ugggccccagcccac

SEQ ID NO: 2238120 - RNA, 13 nt, Human
ugggccccagccc

SEQ ID NO: 2238121 - RNA, 14 nt, Human
ugggccccagccca

SEQ ID NO: 2238122 - RNA, 15 nt, Human
agggagggcuucugc

SEQ ID NO: 2238123 - RNA, 17 nt, Human
agggaggugaccccagg

SEQ ID NO: 2238124 - RNA, 20 nt, Human
agggaggggccuaggccuca

SEQ ID NO: 2238125 - RNA, 21 nt, Human
agggagguggggaugagaaga

SEQ ID NO: 2238126 - RNA, 21 nt, Human
agggaggucacuggaaagggg

SEQ ID NO: 2238127 - RNA, 19 nt, Human
agggaggggccuaggccuc

SEQ ID NO: 2238128 - RNA, 15 nt, Human
agggaggggccuagg

SEQ ID NO: 2238129 - RNA, 20 nt, Human
agggaggucacuggaaaggg

SEQ ID NO: 2238130 - RNA, 17 nt, Human
agggagugacagaggca

SEQ ID NO: 2238131 - RNA, 18 nt, Human
agggagugacagaggcag

SEQ ID NO: 2238132 - RNA, 19 nt, Human
agggagugacagaggcagc

SEQ ID NO: 2238133 - RNA, 19 nt, Human
agggcagagugagacccag

SEQ ID NO: 2238134 - RNA, 15 nt, Human
agggcagcagaaggg

SEQ ID NO: 2238135 - RNA, 21 nt, Human
agggcagcagaaggggguggu

SEQ ID NO: 2238136 - RNA, 16 nt, Human
agggccguaccccacc

SEQ ID NO: 2238137 - RNA, 16 nt, Human
agggcccagagcccag

SEQ ID NO: 2238138 - RNA, 18 nt, Human
agggcccagagcaggaag

SEQ ID NO: 2238139 - RNA, 15 nt, Human
agggccgagugagag

SEQ ID NO: 2238140 - RNA, 15 nt, Human
agggcccagagccca

SEQ ID NO: 2238141 - RNA, 14 nt, Human
agggcccagagccc

SEQ ID NO: 2238142 - RNA, 13 nt, Human
agggcccagagcc

SEQ ID NO: 2238143 - RNA, 15 nt, Human
agggcccagagcagg

SEQ ID NO: 2238144 - RNA, 17 nt, Human
agggcccagagcaggaa

SEQ ID NO: 2238145 - RNA, 12 nt, Human
agggcccagagc

SEQ ID NO: 2238146 - RNA, 13 nt, Human
agggcccagagca

SEQ ID NO: 2238147 - RNA, 14 nt, Human
agggcccagagcag

SEQ ID NO: 2238148 - RNA, 16 nt, Human
agggccaguccugccu

SEQ ID NO: 2238149 - RNA, 13 nt, Human
agggccaguccug

SEQ ID NO: 2238150 - RNA, 22 nt, Human
agggccagggcccugcagaggg

SEQ ID NO: 2238151 - RNA, 20 nt, Human
agggccaggggucucccugg

SEQ ID NO: 2238152 - RNA, 21 nt, Human
agggccaggggucucccugga

SEQ ID NO: 2238153 - RNA, 19 nt, Human
agggccagggcccugcaga

SEQ ID NO: 2238154 - RNA, 15 nt, Human
agggccagggcccug

SEQ ID NO: 2238155 - RNA, 14 nt, Human
agggccagggcccu

SEQ ID NO: 2238156 - RNA, 12 nt, Human
agggccagggcc

SEQ ID NO: 2238157 - RNA, 23 nt, Human
agggcccagagaggguggugacc

SEQ ID NO: 2238158 - RNA, 18 nt, Human
agggccaguccugccugg

SEQ ID NO: 2238159 - RNA, 17 nt, Human
agggccaguccugccug

SEQ ID NO: 2238160 - RNA, 18 nt, Human
agggcccagagagggugg

SEQ ID NO: 2238161 - RNA, 17 nt, Human
agggcagggcaucuccu

SEQ ID NO: 2238162 - RNA, 12 nt, Human
agggcagggcca

SEQ ID NO: 2238163 - RNA, 12 nt, Human
agggcagggccc

SEQ ID NO: 2238164 - RNA, 16 nt, Human
agggcagggcucugau

SEQ ID NO: 2238165 - RNA, 15 nt, Human
agggcagggcucuga

SEQ ID NO: 2238166 - RNA, 17 nt, Human
agggcagggccccaggc

SEQ ID NO: 2238167 - RNA, 16 nt, Human
agggcaggugcuucag

SEQ ID NO: 2238168 - RNA, 20 nt, Human
agggcagucauuggcugucu

SEQ ID NO: 2238169 - RNA, 12 nt, Human
agggccaggacu

SEQ ID NO: 2238170 - RNA, 17 nt, Human
agggccaggacugagcc

SEQ ID NO: 2238171 - RNA, 19 nt, Human
agggccaggacugagcccc

SEQ ID NO: 2238172 - RNA, 21 nt, Human
agggccaggacugagccccgc

SEQ ID NO: 2238173 - RNA, 10 nt, Human
agggccaggc

SEQ ID NO: 2238174 - RNA, 12 nt, Human
agggccaggcag

SEQ ID NO: 2238175 - RNA, 13 nt, Human
agggccaggcagg

SEQ ID NO: 2238176 - RNA, 14 nt, Human
agggccaggcaggu

SEQ ID NO: 2238177 - RNA, 21 nt, Human
agggccaggcaggugccugga

SEQ ID NO: 2238178 - RNA, 22 nt, Human
agggccaggcaggugccuggac

SEQ ID NO: 2238179 - RNA, 14 nt, Human
agggcagcgccagg

SEQ ID NO: 2238180 - RNA, 15 nt, Human
agggcagcagggcua

SEQ ID NO: 2238181 - RNA, 14 nt, Human
agggcagcagggcu

SEQ ID NO: 2238182 - RNA, 13 nt, Human
agggcagggcauc

SEQ ID NO: 2238183 - RNA, 12 nt, Human
agggcagggacu

SEQ ID NO: 2238184 - RNA, 22 nt, Human
agggcagggaccacacccugua

SEQ ID NO: 2238185 - RNA, 16 nt, Human
agggcagcgccaggcu

SEQ ID NO: 2238186 - RNA, 17 nt, Human
agggcagggacaggaua

SEQ ID NO: 2238187 - RNA, 20 nt, Human
ugggagguggagguugcagu

SEQ ID NO: 2238188 - RNA, 19 nt, Human
ugggagguugaucagaucu

SEQ ID NO: 2238189 - RNA, 22 nt, Human
ugggagguggaagaagggagaa

SEQ ID NO: 2238190 - RNA, 17 nt, Human
ugggauucaggaaugug

SEQ ID NO: 2238191 - RNA, 20 nt, Human
ugggauucccaccaaggucu

SEQ ID NO: 2238192 - RNA, 23 nt, Human
ugggauucccaccaaggucuuca

SEQ ID NO: 2238193 - RNA, 15 nt, Human
ugggauuccugaccc

SEQ ID NO: 2238194 - RNA, 16 nt, Human
ugggauuccugaccca

SEQ ID NO: 2238195 - RNA, 17 nt, Human
ugggauuccugacccag

SEQ ID NO: 2238196 - RNA, 20 nt, Human
ugggauuccugacccaggcc

SEQ ID NO: 2238197 - RNA, 21 nt, Human
ugggauuccugacccaggccg

SEQ ID NO: 2238198 - RNA, 13 nt, Human
ugggaggucgagg

SEQ ID NO: 2238199 - RNA, 19 nt, Human
ugggagguggaagaaggga

SEQ ID NO: 2238200 - RNA, 18 nt, Human
ugggagguggaagaaggg

SEQ ID NO: 2238201 - RNA, 10 nt, Human
ugggauugcu

SEQ ID NO: 2238202 - RNA, 14 nt, Human
ugggauugggggcu

SEQ ID NO: 2238203 - RNA, 18 nt, Human
ugggauugggggcuggug

SEQ ID NO: 2238204 - RNA, 19 nt, Human
ugggauugagucugugcca

SEQ ID NO: 2238205 - RNA, 16 nt, Human
ugggauugagucugug

SEQ ID NO: 2238206 - RNA, 23 nt, Human
ugggauugacagaagcuucugcc

SEQ ID NO: 2238207 - RNA, 22 nt, Human
ugggauuccugacccaggccgc

SEQ ID NO: 2238208 - RNA, 24 nt, Human
ugggauuccugacccaggccgcag

SEQ ID NO: 2238209 - RNA, 17 nt, Human
ugggauucuacuuuaag

SEQ ID NO: 2238210 - RNA, 22 nt, Human
ugggauucuacuuuaagcacua

SEQ ID NO: 2238211 - RNA, 16 nt, Human
ugggcaacccccagcc

SEQ ID NO: 2238212 - RNA, 19 nt, Human
ugggauugggggcuggugc

SEQ ID NO: 2238213 - RNA, 21 nt, Human
ugggauugggggcuggugcca

SEQ ID NO: 2238214 - RNA, 19 nt, Human
ugggauugugguacaaucu

SEQ ID NO: 2238215 - RNA, 19 nt, Human
aggccuuaucuccaagacc

SEQ ID NO: 2238216 - RNA, 17 nt, Human
aggccuuaucuccaaga

SEQ ID NO: 2238217 - RNA, 18 nt, Human
aggccuuaucauucauuc

SEQ ID NO: 2238218 - RNA, 19 nt, Human
aggccuuaucauucauucu

SEQ ID NO: 2238219 - RNA, 15 nt, Human
aggccuuccucucuc

SEQ ID NO: 2238220 - RNA, 20 nt, Human
aggccuuaucauucauucuu

SEQ ID NO: 2238221 - RNA, 17 nt, Human
ugggaggucaaggcugc

SEQ ID NO: 2238222 - RNA, 19 nt, Human
aggccuuccucucuccaga

SEQ ID NO: 2238223 - RNA, 13 nt, Human
aggccuucuccuc

SEQ ID NO: 2238224 - RNA, 22 nt, Human
aggccuucuccuccccacccgc

SEQ ID NO: 2238225 - RNA, 18 nt, Human
aggccuuccucucuccag

SEQ ID NO: 2238226 - RNA, 16 nt, Human
aggccuuccucucucc

SEQ ID NO: 2238227 - RNA, 23 nt, Human
ugggaggucaaggcugcagugag

SEQ ID NO: 2238228 - RNA, 20 nt, Human
ugggaggucaaggcugcagu

SEQ ID NO: 2238229 - RNA, 19 nt, Human
ugggaggucaaggcugcag

SEQ ID NO: 2238230 - RNA, 18 nt, Human
ugggaggucaaggcugca

SEQ ID NO: 2238231 - RNA, 22 nt, Human
ugggcacacgccucccacuggg

SEQ ID NO: 2238232 - RNA, 14 nt, Human
ugggcacaguuugg

SEQ ID NO: 2238233 - RNA, 17 nt, Human
ugggcaacccccagccu

SEQ ID NO: 2238234 - RNA, 20 nt, Human
ugggcaacccccagccugcu

SEQ ID NO: 2238235 - RNA, 20 nt, Human
ugggcacccacccugggacc

SEQ ID NO: 2238236 - RNA, 21 nt, Human
ugggcacccagccucuaggga

SEQ ID NO: 2238237 - RNA, 16 nt, Human
ugggcaccccacugca

SEQ ID NO: 2238238 - RNA, 14 nt, Human
ugggcacccacccu

SEQ ID NO: 2238239 - RNA, 16 nt, Human
ugggcacccacccugg

SEQ ID NO: 2238240 - RNA, 17 nt, Human
ugggccagaauuucaaa

SEQ ID NO: 2238241 - RNA, 22 nt, Human
ugggccacuucuggguggggca

SEQ ID NO: 2238242 - RNA, 18 nt, Human
ugggccaggacaggcccg

SEQ ID NO: 2238243 - RNA, 17 nt, Human
ugggccaggacaggccc

SEQ ID NO: 2238244 - RNA, 20 nt, Human
ugggccauucuccacagcaa

SEQ ID NO: 2238245 - RNA, 19 nt, Human
ugggccauucuccacagca

SEQ ID NO: 2238246 - RNA, 20 nt, Human
ugggcccaaugcacuuuguu

SEQ ID NO: 2238247 - RNA, 14 nt, Human
ugggccaggagccu

SEQ ID NO: 2238248 - RNA, 16 nt, Human
ugggccaggagccucc

SEQ ID NO: 2238249 - RNA, 23 nt, Human
ugggccagccccucccaccacag

SEQ ID NO: 2238250 - RNA, 22 nt, Human
ugggccagccccucccaccaca

SEQ ID NO: 2238251 - RNA, 14 nt, Human
ugggccaggacagg

SEQ ID NO: 2238252 - RNA, 20 nt, Human
ugggccagccccucccacca

SEQ ID NO: 2238253 - RNA, 18 nt, Human
ugggccagccccucccac

SEQ ID NO: 2238254 - RNA, 16 nt, Human
ugggccagccccuccc

SEQ ID NO: 2238255 - RNA, 13 nt, Human
ugggccaggagcc

SEQ ID NO: 2238256 - RNA, 15 nt, Human
ugggccagccccucc

SEQ ID NO: 2238257 - RNA, 14 nt, Human
ugggccagccccuc

SEQ ID NO: 2238258 - RNA, 13 nt, Human
ugggccagccccu

SEQ ID NO: 2238259 - RNA, 19 nt, Human
ugggccagacaugccacaa

SEQ ID NO: 2238260 - RNA, 18 nt, Human
ugggccagaauuucaaac

SEQ ID NO: 2238261 - RNA, 18 nt, Human
ugggccagacaugccaca

SEQ ID NO: 2238262 - RNA, 13 nt, Human
ugggccagacaug

SEQ ID NO: 2238263 - RNA, 23 nt, Human
aggggcgccgcaaaccacacugg

SEQ ID NO: 2238264 - RNA, 17 nt, Human
aggggagagggucugga

SEQ ID NO: 2238265 - RNA, 14 nt, Human
aggggcgcccaccu

SEQ ID NO: 2238266 - RNA, 10 nt, Human
aggggagagg

SEQ ID NO: 2238267 - RNA, 22 nt, Human
aggggagagccugcuggcaccc

SEQ ID NO: 2238268 - RNA, 18 nt, Human
aggggccuggcagccgug

SEQ ID NO: 2238269 - RNA, 23 nt, Human
aggggccuggcagccgugccuuc

SEQ ID NO: 2238270 - RNA, 23 nt, Human
aggggagcaaaaucgaugcagug

SEQ ID NO: 2238271 - RNA, 15 nt, Human
aggggccuggcagcc

SEQ ID NO: 2238272 - RNA, 15 nt, Human
aggggagagccugcu

SEQ ID NO: 2238273 - RNA, 16 nt, Human
aggggagagccugcug

SEQ ID NO: 2238274 - RNA, 17 nt, Human
aggggagagccugcugg

SEQ ID NO: 2238275 - RNA, 19 nt, Human
aggggacuauuuaugaagg

SEQ ID NO: 2238276 - RNA, 21 nt, Human
ugggguaggaggaugggcucg

SEQ ID NO: 2238277 - RNA, 20 nt, Human
uggggucacucuggcagcuc

SEQ ID NO: 2238278 - RNA, 19 nt, Human
uggggucacucuggcagcu

SEQ ID NO: 2238279 - RNA, 17 nt, Human
aggggacucagcccuga

SEQ ID NO: 2238280 - RNA, 14 nt, Human
aggggacucagccc

SEQ ID NO: 2238281 - RNA, 22 nt, Human
aggggacucagcccugagguga

SEQ ID NO: 2238282 - RNA, 20 nt, Human
aggggcgugggaguggccug

SEQ ID NO: 2238283 - RNA, 22 nt, Human
aggggcgucuguucccccuuca

SEQ ID NO: 2238284 - RNA, 22 nt, Human
aggggcguggagggcguggagg

SEQ ID NO: 2238285 - RNA, 21 nt, Human
aggggcgucuguucccccuuc

SEQ ID NO: 2238286 - RNA, 19 nt, Human
aggggcgucuguucccccu

SEQ ID NO: 2238287 - RNA, 16 nt, Human
aggggcgucuguuccc

SEQ ID NO: 2238288 - RNA, 19 nt, Human
aggggcgggacccaggcac

SEQ ID NO: 2238289 - RNA, 17 nt, Human
aggggcguguggcucac

SEQ ID NO: 2238290 - RNA, 14 nt, Human
aggggcguguggcu

SEQ ID NO: 2238291 - RNA, 15 nt, Human
aggggcuacaagagg

SEQ ID NO: 2238292 - RNA, 17 nt, Human
aggggcuacaagaggga

SEQ ID NO: 2238293 - RNA, 23 nt, Human
aggggcgcuggcccagccggccu

SEQ ID NO: 2238294 - RNA, 18 nt, Human
aggggcgggacccaggca

SEQ ID NO: 2238295 - RNA, 19 nt, Human
aggggcgcuggcccagccg

SEQ ID NO: 2238296 - RNA, 20 nt, Human
aggggcgcuggcccagccgg

SEQ ID NO: 2238297 - RNA, 21 nt, Human
aggggcgcuggcccagccggc

SEQ ID NO: 2238298 - RNA, 22 nt, Human
aggggcgcuggcccagccggcc

SEQ ID NO: 2238299 - RNA, 16 nt, Human
aggggcgcccaccucc

SEQ ID NO: 2238300 - RNA, 20 nt, Human
aggggcgcucgcuuccgcau

SEQ ID NO: 2238301 - RNA, 13 nt, Human
aggggcgcuggcc

SEQ ID NO: 2238302 - RNA, 14 nt, Human
aggggcgcuggccc

SEQ ID NO: 2238303 - RNA, 15 nt, Human
aggggcgcuggccca

SEQ ID NO: 2238304 - RNA, 16 nt, Human
aggggcgcuggcccag

SEQ ID NO: 2238305 - RNA, 17 nt, Human
aggggcgcuggcccagc

SEQ ID NO: 2238306 - RNA, 18 nt, Human
aggggcgcuggcccagcc

SEQ ID NO: 2238307 - RNA, 17 nt, Human
agggggauaugaaugga

SEQ ID NO: 2238308 - RNA, 22 nt, Human
agggggagccccuucugcucag

SEQ ID NO: 2238309 - RNA, 21 nt, Human
agggggagccccuucugcuca

SEQ ID NO: 2238310 - RNA, 15 nt, Human
agggggaaggcaggg

SEQ ID NO: 2238311 - RNA, 22 nt, Human
agggggaaggugggguccugga

SEQ ID NO: 2238312 - RNA, 15 nt, Human
aggggcucaggaaaa

SEQ ID NO: 2238313 - RNA, 18 nt, Human
aggggcuacaagagggaa

SEQ ID NO: 2238314 - RNA, 20 nt, Human
aggggcuagaaccuagagaa

SEQ ID NO: 2238315 - RNA, 21 nt, Human
agggguggguuccucuucccc

SEQ ID NO: 2238316 - RNA, 20 nt, Human
agggguggguuccucuuccc

SEQ ID NO: 2238317 - RNA, 15 nt, Human
aggggguggaggggu

SEQ ID NO: 2238318 - RNA, 19 nt, Human
agggguggggguggaggcu

SEQ ID NO: 2238319 - RNA, 22 nt, Human
aggggugggacacccugugaug

SEQ ID NO: 2238320 - RNA, 20 nt, Human
aggggugggacacccuguga

SEQ ID NO: 2238321 - RNA, 23 nt, Human
agggggugauuagagggaggaga

SEQ ID NO: 2238322 - RNA, 15 nt, Human
aggggguggccuccc

SEQ ID NO: 2238323 - RNA, 19 nt, Human
agggggauccgacugcuuu

SEQ ID NO: 2238324 - RNA, 20 nt, Human
agggggauccgacugcuuug

SEQ ID NO: 2238325 - RNA, 17 nt, Human
aggggguggccucccaa

SEQ ID NO: 2238326 - RNA, 18 nt, Human
aggggguggccucccaac

SEQ ID NO: 2238327 - RNA, 15 nt, Human
aggggugguccugac

SEQ ID NO: 2238328 - RNA, 13 nt, Human
aggggugguccug

SEQ ID NO: 2238329 - RNA, 14 nt, Human
aggggugucuuggg

SEQ ID NO: 2238330 - RNA, 22 nt, Human
aggggugucuugggcagagcug

SEQ ID NO: 2238331 - RNA, 24 nt, Human
aggggugucuugggcagagcuggc

SEQ ID NO: 2238332 - RNA, 24 nt, Human
agggguucccuuuuuuggcugcug

SEQ ID NO: 2238333 - RNA, 18 nt, Human
aggggugguccugacuca

SEQ ID NO: 2238334 - RNA, 16 nt, Human
agggguguggcagugg

SEQ ID NO: 2238335 - RNA, 15 nt, Human
agggguguggcuccu

SEQ ID NO: 2238336 - RNA, 18 nt, Human
agggguguggcagugguu

SEQ ID NO: 2238337 - RNA, 15 nt, Human
agggguucgagacca

SEQ ID NO: 2238338 - RNA, 20 nt, Human
agggguucgagaccagucug

SEQ ID NO: 2238339 - RNA, 21 nt, Human
agggucucacuauguugccca

SEQ ID NO: 2238340 - RNA, 23 nt, Human
agggguugagcagggauccuggu

SEQ ID NO: 2238341 - RNA, 18 nt, Human
agggguugcagugagcgg

SEQ ID NO: 2238342 - RNA, 16 nt, Human
agggguugccacaggc

SEQ ID NO: 2238343 - RNA, 19 nt, Human
agggguugccacaggccuc

SEQ ID NO: 2238344 - RNA, 21 nt, Human
agggguugccacaggccuccc

SEQ ID NO: 2238345 - RNA, 22 nt, Human
agggucucacuauguugcccag

SEQ ID NO: 2238346 - RNA, 23 nt, Human
agggucucacuauguugcccagg

SEQ ID NO: 2238347 - RNA, 21 nt, Human
uggguggggcugcuccuccag

SEQ ID NO: 2238348 - RNA, 18 nt, Human
ugggugggcaggaaaagg

SEQ ID NO: 2238349 - RNA, 15 nt, Human
ugggugggcucugug

SEQ ID NO: 2238350 - RNA, 16 nt, Human
ugggugggcucugugc

SEQ ID NO: 2238351 - RNA, 19 nt, Human
ugggugggcucugugcagu

SEQ ID NO: 2238352 - RNA, 16 nt, Human
uggguggggggcuuca

SEQ ID NO: 2238353 - RNA, 18 nt, Human
ugggugcuggcugcccag

SEQ ID NO: 2238354 - RNA, 15 nt, Human
uggguggcacugcca

SEQ ID NO: 2238355 - RNA, 14 nt, Human
ugggugcuggcugc

SEQ ID NO: 2238356 - RNA, 14 nt, Human
uggguggcccaucc

SEQ ID NO: 2238357 - RNA, 15 nt, Human
uggguggcccauccc

SEQ ID NO: 2238358 - RNA, 21 nt, Human
uggguggcccauccccccuca

SEQ ID NO: 2238359 - RNA, 15 nt, Human
uggguggccucggga

SEQ ID NO: 2238360 - RNA, 16 nt, Human
ugggugggcaggaaaa

SEQ ID NO: 2238361 - RNA, 12 nt, Human
ugggugggagag

SEQ ID NO: 2238362 - RNA, 13 nt, Human
uggguggggcugc

SEQ ID NO: 2238363 - RNA, 13 nt, Human
ugguaagcucugg

SEQ ID NO: 2238364 - RNA, 14 nt, Human
ugguaagcucuggc

SEQ ID NO: 2238365 - RNA, 15 nt, Human
ugguaagcucuggcu

SEQ ID NO: 2238366 - RNA, 20 nt, Human
ugguaaggggaauugaggac

SEQ ID NO: 2238367 - RNA, 14 nt, Human
ugguaauauugacu

SEQ ID NO: 2238368 - RNA, 21 nt, Human
ugguaauuaucauuuuagaag

SEQ ID NO: 2238369 - RNA, 22 nt, Human
ugguaauuauuuugguacuuuu

SEQ ID NO: 2238370 - RNA, 15 nt, Human
ugguaaucuugcucu

SEQ ID NO: 2238371 - RNA, 17 nt, Human
ugguacucauuaaaaaa

SEQ ID NO: 2238372 - RNA, 18 nt, Human
ugguacggagauguuuca

SEQ ID NO: 2238373 - RNA, 20 nt, Human
ugguacuacuagaugucuuu

SEQ ID NO: 2238374 - RNA, 16 nt, Human
ugguacuaacuuuccu

SEQ ID NO: 2238375 - RNA, 19 nt, Human
ugguacuuuuaugauguau

SEQ ID NO: 2238376 - RNA, 17 nt, Human
ugguacuuauuacugcu

SEQ ID NO: 2238377 - RNA, 18 nt, Human
ugguacuuauuacugcua

SEQ ID NO: 2238378 - RNA, 20 nt, Human
ugguagcuuuucccuucuuu

SEQ ID NO: 2238379 - RNA, 13 nt, Human
ugguacucuccua

SEQ ID NO: 2238380 - RNA, 17 nt, Human
ugguacucuccuagaga

SEQ ID NO: 2238381 - RNA, 21 nt, Human
ugguagcuuuucccuucuuuu

SEQ ID NO: 2238382 - RNA, 13 nt, Human
ugguaggaacugc

SEQ ID NO: 2238383 - RNA, 19 nt, Human
ugguacuuauuacugcuaa

SEQ ID NO: 2238384 - RNA, 17 nt, Human
ugguagcuuuucccuuc

SEQ ID NO: 2238385 - RNA, 20 nt, Human
ugguaggaacugcugggcuu

SEQ ID NO: 2238386 - RNA, 22 nt, Human
uggucacaggacucugccuccu

SEQ ID NO: 2238387 - RNA, 23 nt, Human
uggucacaggacucugccuccuc

SEQ ID NO: 2238388 - RNA, 20 nt, Human
uggucacaggacucugccuc

SEQ ID NO: 2238389 - RNA, 16 nt, Human
ugguaggaccaagcau

SEQ ID NO: 2238390 - RNA, 22 nt, Human
ugguaggaccaagcaucuuggg

SEQ ID NO: 2238391 - RNA, 13 nt, Human
ugggugcucccua

SEQ ID NO: 2238392 - RNA, 22 nt, Human
uggguggcaccagcagccugga

SEQ ID NO: 2238393 - RNA, 22 nt, Human
ugggugcuuggaggaaggaaac

SEQ ID NO: 2238394 - RNA, 15 nt, Human
ugggugcuuggagga

SEQ ID NO: 2238395 - RNA, 19 nt, Human
ugggugcuuggaggaagga

SEQ ID NO: 2238396 - RNA, 20 nt, Human
ugggucugugucucuuuucu

SEQ ID NO: 2238397 - RNA, 19 nt, Human
ugggucugugucucuuuuc

SEQ ID NO: 2238398 - RNA, 14 nt, Human
ugggucugugucuc

SEQ ID NO: 2238399 - RNA, 12 nt, Human
ugggucugugug

SEQ ID NO: 2238400 - RNA, 22 nt, Human
ugggucucgcuuuguugcccag

SEQ ID NO: 2238401 - RNA, 19 nt, Human
ugggucugagucauggccg

SEQ ID NO: 2238402 - RNA, 15 nt, Human
ugggucuggcugagc

SEQ ID NO: 2238403 - RNA, 17 nt, Human
ugggucuggcugagcug

SEQ ID NO: 2238404 - RNA, 20 nt, Human
ugggucucgcuuuguugccc

SEQ ID NO: 2238405 - RNA, 23 nt, Human
ugggucuaagggguugguugagg

SEQ ID NO: 2238406 - RNA, 21 nt, Human
ugggucgcccuggacugugug

SEQ ID NO: 2238407 - RNA, 15 nt, Human
agggugggagugggc

SEQ ID NO: 2238408 - RNA, 19 nt, Human
agggugggagagcccagcc

SEQ ID NO: 2238409 - RNA, 18 nt, Human
agggugggagagcccagc

SEQ ID NO: 2238410 - RNA, 17 nt, Human
agggugggagagcccag

SEQ ID NO: 2238411 - RNA, 16 nt, Human
agggugggagagccca

SEQ ID NO: 2238412 - RNA, 14 nt, Human
aggguggcccuugc

SEQ ID NO: 2238413 - RNA, 11 nt, Human
aggguggcccu

SEQ ID NO: 2238414 - RNA, 18 nt, Human
aggguggcccuugcaguu

SEQ ID NO: 2238415 - RNA, 21 nt, Human
aggguggcuggguccagggga

SEQ ID NO: 2238416 - RNA, 21 nt, Human
aggguggcaucccaguggccu

SEQ ID NO: 2238417 - RNA, 15 nt, Human
aggguggcaucccag

SEQ ID NO: 2238418 - RNA, 21 nt, Human
aggguggagacuaagcccugu

SEQ ID NO: 2238419 - RNA, 14 nt, Human
aggguggcagguga

SEQ ID NO: 2238420 - RNA, 16 nt, Human
agggucucugcugccg

SEQ ID NO: 2238421 - RNA, 12 nt, Human
aggguggagacu

SEQ ID NO: 2238422 - RNA, 22 nt, Human
agggucucacucugucgcccag

SEQ ID NO: 2238423 - RNA, 21 nt, Human
agggucucacucugucgccca

SEQ ID NO: 2238424 - RNA, 22 nt, Human
agggucucuagugcugugaaaa

SEQ ID NO: 2238425 - RNA, 21 nt, Human
agggucucuagugcugugaaa

SEQ ID NO: 2238426 - RNA, 13 nt, Human
agggucucugcug

SEQ ID NO: 2238427 - RNA, 14 nt, Human
agggucucugcugc

SEQ ID NO: 2238428 - RNA, 15 nt, Human
agggucucugcugcc

SEQ ID NO: 2238429 - RNA, 20 nt, Human
agggucucuagugcugugaa

SEQ ID NO: 2238430 - RNA, 18 nt, Human
agggucucuagugcugug

SEQ ID NO: 2238431 - RNA, 16 nt, Human
agggucucuagugcug

SEQ ID NO: 2238432 - RNA, 20 nt, Human
agggguugccacaggccucc

SEQ ID NO: 2238433 - RNA, 20 nt, Human
agguauucaauauccuuugc

SEQ ID NO: 2238434 - RNA, 22 nt, Human
agguauuccuuuuguguacagu

SEQ ID NO: 2238435 - RNA, 22 nt, Human
agguauggaaggguuuguggcu

SEQ ID NO: 2238436 - RNA, 20 nt, Human
agguauggaaggguuugugg

SEQ ID NO: 2238437 - RNA, 14 nt, Human
agguauguugccuu

SEQ ID NO: 2238438 - RNA, 20 nt, Human
agguauguugccuuuauggu

SEQ ID NO: 2238439 - RNA, 22 nt, Human
aggucaauacaguacaggcagc

SEQ ID NO: 2238440 - RNA, 21 nt, Human
aggucaauacaguacaggcag

SEQ ID NO: 2238441 - RNA, 21 nt, Human
aggucaaugccagagacggaa

SEQ ID NO: 2238442 - RNA, 23 nt, Human
aggucaauacaguacaggcagca

SEQ ID NO: 2238443 - RNA, 23 nt, Human
aggucacacgaggggccccgugu

SEQ ID NO: 2238444 - RNA, 15 nt, Human
aggucacauucagga

SEQ ID NO: 2238445 - RNA, 18 nt, Human
aggucaauacaguacagg

SEQ ID NO: 2238446 - RNA, 17 nt, Human
agguauucgugcagcau

SEQ ID NO: 2238447 - RNA, 22 nt, Human
aggucaaguaagaagacaugaa

SEQ ID NO: 2238448 - RNA, 19 nt, Human
aggucaaguaagaagacau

SEQ ID NO: 2238449 - RNA, 19 nt, Human
aggucacuccuggggccuc

SEQ ID NO: 2238450 - RNA, 21 nt, Human
aggucacucuuccugcaagga

SEQ ID NO: 2238451 - RNA, 23 nt, Human
aggucacucuuccugcaaggacu

SEQ ID NO: 2238452 - RNA, 16 nt, Human
aggucacuggaaaggg

SEQ ID NO: 2238453 - RNA, 20 nt, Human
aggucacuggaaaggggaga

SEQ ID NO: 2238454 - RNA, 21 nt, Human
aggucacuggaaaggggagag

SEQ ID NO: 2238455 - RNA, 14 nt, Human
aggucacuggcucu

SEQ ID NO: 2238456 - RNA, 15 nt, Human
aggucacuggcucuc

SEQ ID NO: 2238457 - RNA, 18 nt, Human
aggucacuccuggggccu

SEQ ID NO: 2238458 - RNA, 15 nt, Human
aggucacuccugggg

SEQ ID NO: 2238459 - RNA, 14 nt, Human
aggucacuccuggg

SEQ ID NO: 2238460 - RNA, 19 nt, Human
aggucacuagauggcgagc

SEQ ID NO: 2238461 - RNA, 19 nt, Human
aggucaccuuuauucuggc

SEQ ID NO: 2238462 - RNA, 12 nt, Human
aggucaccagca

SEQ ID NO: 2238463 - RNA, 15 nt, Human
aggucacccuuugcu

SEQ ID NO: 2238464 - RNA, 18 nt, Human
aggucacauucaggaaga

SEQ ID NO: 2238465 - RNA, 19 nt, Human
aggucacauucaggaagau

SEQ ID NO: 2238466 - RNA, 18 nt, Human
aggucaccuuuauucugg

SEQ ID NO: 2238467 - RNA, 13 nt, Human
aggucccaggcag

SEQ ID NO: 2238468 - RNA, 12 nt, Human
aggucccaggca

SEQ ID NO: 2238469 - RNA, 11 nt, Human
aggucccaggc

SEQ ID NO: 2238470 - RNA, 23 nt, Human
agguccagcucuggaggggaggg

SEQ ID NO: 2238471 - RNA, 18 nt, Human
agguccagcucuggaggg

SEQ ID NO: 2238472 - RNA, 20 nt, Human
aggucauuuuuuuuaagaaa

SEQ ID NO: 2238473 - RNA, 17 nt, Human
aggucauuuuuuuuaag

SEQ ID NO: 2238474 - RNA, 12 nt, Human
aggucagagccu

SEQ ID NO: 2238475 - RNA, 16 nt, Human
aggucacuggcucucc

SEQ ID NO: 2238476 - RNA, 17 nt, Human
aggucacuggcucucca

SEQ ID NO: 2238477 - RNA, 18 nt, Human
aggucacuggcucuccaa

SEQ ID NO: 2238478 - RNA, 19 nt, Human
aggucacuggcucuccaag

SEQ ID NO: 2238479 - RNA, 18 nt, Human
aggucauggaauggaaac

SEQ ID NO: 2238480 - RNA, 20 nt, Human
aggucacuggcucuccaagu

SEQ ID NO: 2238481 - RNA, 21 nt, Human
aggucacuggcucuccaagug

SEQ ID NO: 2238482 - RNA, 21 nt, Human
agguaugcaaucaaaucugcu

SEQ ID NO: 2238483 - RNA, 15 nt, Human
agguauaauuuuaug

SEQ ID NO: 2238484 - RNA, 11 nt, Human
agguauaauuu

SEQ ID NO: 2238485 - RNA, 20 nt, Human
agguauaaguggugugugua

SEQ ID NO: 2238486 - RNA, 19 nt, Human
agguauaaguggugugugu

SEQ ID NO: 2238487 - RNA, 23 nt, Human
agguauaauucacauuguauuca

SEQ ID NO: 2238488 - RNA, 23 nt, Human
agguagaaauaucugaaaaugua

SEQ ID NO: 2238489 - RNA, 20 nt, Human
agguagguggaucaccugag

SEQ ID NO: 2238490 - RNA, 15 nt, Human
agguaggguuuaauc

SEQ ID NO: 2238491 - RNA, 12 nt, Human
agguaggguuua

SEQ ID NO: 2238492 - RNA, 19 nt, Human
agguagaaauaucugaaaa

SEQ ID NO: 2238493 - RNA, 17 nt, Human
agguagaaauaucugaa

SEQ ID NO: 2238494 - RNA, 23 nt, Human
agguacuucaaauccuugaagau

SEQ ID NO: 2238495 - RNA, 18 nt, Human
aggguuggccccugcccg

SEQ ID NO: 2238496 - RNA, 23 nt, Human
aggguuggccccugcccggcugc

SEQ ID NO: 2238497 - RNA, 17 nt, Human
aggguuggccccugccc

SEQ ID NO: 2238498 - RNA, 15 nt, Human
aggguugggcccaga

SEQ ID NO: 2238499 - RNA, 13 nt, Human
uggucagcucccu

SEQ ID NO: 2238500 - RNA, 19 nt, Human
uggucagcucccuucucug

SEQ ID NO: 2238501 - RNA, 22 nt, Human
uggucagcccuaggguggagag

SEQ ID NO: 2238502 - RNA, 16 nt, Human
uggucagcguugcaug

SEQ ID NO: 2238503 - RNA, 17 nt, Human
uggucagcguugcaugu

SEQ ID NO: 2238504 - RNA, 13 nt, Human
uggucacagggca

SEQ ID NO: 2238505 - RNA, 17 nt, Human
uggucacagggcaugcc

SEQ ID NO: 2238506 - RNA, 19 nt, Human
uggucagcccuagggugga

SEQ ID NO: 2238507 - RNA, 15 nt, Human
uggucagcccuaggg

SEQ ID NO: 2238508 - RNA, 14 nt, Human
uggucccaccccac

SEQ ID NO: 2238509 - RNA, 15 nt, Human
uggucccaccccaca

SEQ ID NO: 2238510 - RNA, 20 nt, Human
uggucaccaaaucagcugcu

SEQ ID NO: 2238511 - RNA, 10 nt, Human
uggucagccc

SEQ ID NO: 2238512 - RNA, 12 nt, Human
uggucagcccaa

SEQ ID NO: 2238513 - RNA, 11 nt, Human
uggucagccca

SEQ ID NO: 2238514 - RNA, 22 nt, Human
uggucagauuugaacucuucaa

SEQ ID NO: 2238515 - RNA, 18 nt, Human
uggucaccaaaucagcug

SEQ ID NO: 2238516 - RNA, 18 nt, Human
uggucucaaacuccugac

SEQ ID NO: 2238517 - RNA, 15 nt, Human
uggucuauugucugu

SEQ ID NO: 2238518 - RNA, 14 nt, Human
uggucuccacuggg

SEQ ID NO: 2238519 - RNA, 12 nt, Human
uggucucagaaa

SEQ ID NO: 2238520 - RNA, 17 nt, Human
uggucucaaacucuuga

SEQ ID NO: 2238521 - RNA, 23 nt, Human
uggucucaaacucuugaccucag

SEQ ID NO: 2238522 - RNA, 16 nt, Human
uggucucaaacucuug

SEQ ID NO: 2238523 - RNA, 21 nt, Human
uggucauagcccagaucagcu

SEQ ID NO: 2238524 - RNA, 19 nt, Human
uggucuaucuuugagcgcc

SEQ ID NO: 2238525 - RNA, 16 nt, Human
uggucccaccccacac

SEQ ID NO: 2238526 - RNA, 16 nt, Human
uggucuccuuggaaau

SEQ ID NO: 2238527 - RNA, 17 nt, Human
uggucuccucagccucc

SEQ ID NO: 2238528 - RNA, 22 nt, Human
uggucucagcagcgaccacccc

SEQ ID NO: 2238529 - RNA, 19 nt, Human
uggucucagcagcgaccac

SEQ ID NO: 2238530 - RNA, 17 nt, Human
uggucugaauguucuga

SEQ ID NO: 2238531 - RNA, 16 nt, Human
uggucugaauguucug

SEQ ID NO: 2238532 - RNA, 15 nt, Human
uggucugaauguucu

SEQ ID NO: 2238533 - RNA, 14 nt, Human
uggucugaauguuc

SEQ ID NO: 2238534 - RNA, 13 nt, Human
uggucugaauguu

SEQ ID NO: 2238535 - RNA, 23 nt, Human
uggucuccucagccuccucaucu

SEQ ID NO: 2238536 - RNA, 22 nt, Human
uggucuccuuggaaauccgucu

SEQ ID NO: 2238537 - RNA, 16 nt, Human
uggucugacccacugc

SEQ ID NO: 2238538 - RNA, 17 nt, Human
uggucugacccacugcu

SEQ ID NO: 2238539 - RNA, 22 nt, Human
uggucugaauguucugacauua

SEQ ID NO: 2238540 - RNA, 21 nt, Human
uggucugaauguucugacauu

SEQ ID NO: 2238541 - RNA, 19 nt, Human
uggucugaauguucugaca

SEQ ID NO: 2238542 - RNA, 18 nt, Human
uggucugaauguucugac

SEQ ID NO: 2238543 - RNA, 15 nt, Human
uggucuucagccucu

SEQ ID NO: 2238544 - RNA, 17 nt, Human
uggucuugagaugucuu

SEQ ID NO: 2238545 - RNA, 17 nt, Human
uggucuuggcagcaccu

SEQ ID NO: 2238546 - RNA, 14 nt, Human
uggucuucccaggc

SEQ ID NO: 2238547 - RNA, 17 nt, Human
uggucuucccaggcugg

SEQ ID NO: 2238548 - RNA, 20 nt, Human
uggucuuggcagcaccuguc

SEQ ID NO: 2238549 - RNA, 16 nt, Human
uggucuuguggaauug

SEQ ID NO: 2238550 - RNA, 14 nt, Human
uggucuuuaaugaa

SEQ ID NO: 2238551 - RNA, 22 nt, Human
uggucuuuccuaucauggagug

SEQ ID NO: 2238552 - RNA, 17 nt, Human
uggucuuucuggagagg

SEQ ID NO: 2238553 - RNA, 15 nt, Human
uggucuuucuggaga

SEQ ID NO: 2238554 - RNA, 14 nt, Human
uggucuuucuggag

SEQ ID NO: 2238555 - RNA, 14 nt, Human
uggucuuuccucug

SEQ ID NO: 2238556 - RNA, 13 nt, Human
uggucuuuguaag

SEQ ID NO: 2238557 - RNA, 20 nt, Human
uggucuuucuuacaaggaag

SEQ ID NO: 2238558 - RNA, 15 nt, Human
aggguuauauuuuac

SEQ ID NO: 2238559 - RNA, 18 nt, Human
aggguuacuaugcacaau

SEQ ID NO: 2238560 - RNA, 16 nt, Human
aggguuagggaggggu

SEQ ID NO: 2238561 - RNA, 15 nt, Human
aggguuagggagggg

SEQ ID NO: 2238562 - RNA, 13 nt, Human
aggguuagggagg

SEQ ID NO: 2238563 - RNA, 17 nt, Human
aggguuaugauuaagua

SEQ ID NO: 2238564 - RNA, 13 nt, Human
aggguuauaauaa

SEQ ID NO: 2238565 - RNA, 12 nt, Human
agggugugugcu

SEQ ID NO: 2238566 - RNA, 22 nt, Human
aggguguggcccugccaucuuc

SEQ ID NO: 2238567 - RNA, 21 nt, Human
aggguguugggauacugcagg

SEQ ID NO: 2238568 - RNA, 17 nt, Human
aggguuaagaaaagaga

SEQ ID NO: 2238569 - RNA, 14 nt, Human
aggguguuuaugua

SEQ ID NO: 2238570 - RNA, 13 nt, Human
aggguuaagaaaa

SEQ ID NO: 2238571 - RNA, 21 nt, Human
aggguggugaccucugccuga

SEQ ID NO: 2238572 - RNA, 14 nt, Human
uggucuuuguaaga

SEQ ID NO: 2238573 - RNA, 15 nt, Human
uggucuuuguaagag

SEQ ID NO: 2238574 - RNA, 21 nt, Human
uggucuuuguaagaguguaga

SEQ ID NO: 2238575 - RNA, 22 nt, Human
uggucuuuguaagaguguagaa

SEQ ID NO: 2238576 - RNA, 22 nt, Human
aggguguccggucccuguccca

SEQ ID NO: 2238577 - RNA, 15 nt, Human
agggugguggagcca

SEQ ID NO: 2238578 - RNA, 17 nt, Human
agggugguggagccagu

SEQ ID NO: 2238579 - RNA, 14 nt, Human
aggguggugcuggg

SEQ ID NO: 2238580 - RNA, 16 nt, Human
aggguggugcugggac

SEQ ID NO: 2238581 - RNA, 17 nt, Human
aggguggugcugggacu

SEQ ID NO: 2238582 - RNA, 23 nt, Human
aggguggugcugggacugagcca

SEQ ID NO: 2238583 - RNA, 23 nt, Human
uggucuuuguaagaguguagaag

SEQ ID NO: 2238584 - RNA, 18 nt, Human
aggguguggcccugccau

SEQ ID NO: 2238585 - RNA, 13 nt, Human
agcuggccccgcc

SEQ ID NO: 2238586 - RNA, 21 nt, Human
agcuggcauuacagcuggaga

SEQ ID NO: 2238587 - RNA, 15 nt, Human
agcuggcauuacagc

SEQ ID NO: 2238588 - RNA, 23 nt, Human
agcuggauuggguuaugaauauu

SEQ ID NO: 2238589 - RNA, 19 nt, Human
agcuggcaaagguggcucu

SEQ ID NO: 2238590 - RNA, 22 nt, Human
agcuggaucuccauucucucag

SEQ ID NO: 2238591 - RNA, 20 nt, Human
agcuggaugauggucuucag

SEQ ID NO: 2238592 - RNA, 14 nt, Human
agcuggaugagaau

SEQ ID NO: 2238593 - RNA, 21 nt, Human
agcugcuuuugucuaugggac

SEQ ID NO: 2238594 - RNA, 21 nt, Human
agcugcuugugucccuccugg

SEQ ID NO: 2238595 - RNA, 19 nt, Human
agcugcuuucuguugucau

SEQ ID NO: 2238596 - RNA, 20 nt, Human
agcugcuuucuguugucauu

SEQ ID NO: 2238597 - RNA, 19 nt, Human
agcugccuguucagcucca

SEQ ID NO: 2238598 - RNA, 14 nt, Human
agcugcuugugucc

SEQ ID NO: 2238599 - RNA, 15 nt, Human
agcugcuuguguccc

SEQ ID NO: 2238600 - RNA, 20 nt, Human
agcugcuugugucccuccug

SEQ ID NO: 2238601 - RNA, 21 nt, Human
agcugcuugggcuucauccuc

SEQ ID NO: 2238602 - RNA, 21 nt, Human
agcugccuguucagcuccagc

SEQ ID NO: 2238603 - RNA, 22 nt, Human
agcugccuguucagcuccagcu

SEQ ID NO: 2238604 - RNA, 20 nt, Human
ugccuggagacuuagggcac

SEQ ID NO: 2238605 - RNA, 14 nt, Human
ugccuggauggggc

SEQ ID NO: 2238606 - RNA, 23 nt, Human
ugccuggaguguaugacugcaca

SEQ ID NO: 2238607 - RNA, 15 nt, Human
ugccuggauggggcu

SEQ ID NO: 2238608 - RNA, 18 nt, Human
agcugccgaccagagccc

SEQ ID NO: 2238609 - RNA, 17 nt, Human
agcugccgaccagagcc

SEQ ID NO: 2238610 - RNA, 13 nt, Human
agcugccgaccag

SEQ ID NO: 2238611 - RNA, 13 nt, Human
agcugccucacuu

SEQ ID NO: 2238612 - RNA, 20 nt, Human
agcugccuguucagcuccag

SEQ ID NO: 2238613 - RNA, 23 nt, Human
ugcccaggagagccagcccuccc

SEQ ID NO: 2238614 - RNA, 22 nt, Human
ugcccaggagagccagcccucc

SEQ ID NO: 2238615 - RNA, 12 nt, Human
ugcccaggcagg

SEQ ID NO: 2238616 - RNA, 13 nt, Human
ugcccaggcaggu

SEQ ID NO: 2238617 - RNA, 14 nt, Human
ugcccaggcagguc

SEQ ID NO: 2238618 - RNA, 13 nt, Human
ugccucugccucu

SEQ ID NO: 2238619 - RNA, 14 nt, Human
ugccucugccucug

SEQ ID NO: 2238620 - RNA, 13 nt, Human
ugccugcccaggc

SEQ ID NO: 2238621 - RNA, 15 nt, Human
ugccucugccucuga

SEQ ID NO: 2238622 - RNA, 18 nt, Human
ugccugccccaaacaaau

SEQ ID NO: 2238623 - RNA, 20 nt, Human
ugccugccccaaacaaauau

SEQ ID NO: 2238624 - RNA, 17 nt, Human
ugccugccccgccccca

SEQ ID NO: 2238625 - RNA, 18 nt, Human
ugccugccccccucaucu

SEQ ID NO: 2238626 - RNA, 12 nt, Human
ugccugccccgc

SEQ ID NO: 2238627 - RNA, 15 nt, Human
ugccugcccuauucu

SEQ ID NO: 2238628 - RNA, 14 nt, Human
ugccugccugucug

SEQ ID NO: 2238629 - RNA, 15 nt, Human
ugccugccugucugu

SEQ ID NO: 2238630 - RNA, 14 nt, Human
ugccugcccaggcc

SEQ ID NO: 2238631 - RNA, 15 nt, Human
ugccugcccaggccc

SEQ ID NO: 2238632 - RNA, 24 nt, Human
ugccugcccaggccccugccaccc

SEQ ID NO: 2238633 - RNA, 16 nt, Human
ugccugcccaggcccc

SEQ ID NO: 2238634 - RNA, 14 nt, Human
agcuggccccgccg

SEQ ID NO: 2238635 - RNA, 15 nt, Human
agcuggccccgccgc

SEQ ID NO: 2238636 - RNA, 18 nt, Human
agcuggccccgccgccug

SEQ ID NO: 2238637 - RNA, 19 nt, Human
agcuggccccgccgccugg

SEQ ID NO: 2238638 - RNA, 20 nt, Human
agcuggccgaggguccuggc

SEQ ID NO: 2238639 - RNA, 16 nt, Human
agcuggcagcagagug

SEQ ID NO: 2238640 - RNA, 15 nt, Human
agcuggcccgugaca

SEQ ID NO: 2238641 - RNA, 21 nt, Human
agcuggccgaggguccuggcu

SEQ ID NO: 2238642 - RNA, 18 nt, Human
agcuggcccgugacagac

SEQ ID NO: 2238643 - RNA, 23 nt, Human
agcuggcucugagcgccuccauc

SEQ ID NO: 2238644 - RNA, 13 nt, Human
agcuggcucugag

SEQ ID NO: 2238645 - RNA, 14 nt, Human
agcuggcucugagc

SEQ ID NO: 2238646 - RNA, 19 nt, Human
agcuggcucugagcgccuc

SEQ ID NO: 2238647 - RNA, 20 nt, Human
agcuggcucugagcgccucc

SEQ ID NO: 2238648 - RNA, 22 nt, Human
agcugucccugucaccaagcuc

SEQ ID NO: 2238649 - RNA, 18 nt, Human
agcugucccugucaccaa

SEQ ID NO: 2238650 - RNA, 15 nt, Human
agcugucccugucac

SEQ ID NO: 2238651 - RNA, 14 nt, Human
agcugucccuguca

SEQ ID NO: 2238652 - RNA, 21 nt, Human
agcugucacuucgcgugcccu

SEQ ID NO: 2238653 - RNA, 21 nt, Human
agcugugcucuggacaggcau

SEQ ID NO: 2238654 - RNA, 23 nt, Human
agcugugcucuggacaggcaugu

SEQ ID NO: 2238655 - RNA, 18 nt, Human
agcugugugcucuccaag

SEQ ID NO: 2238656 - RNA, 14 nt, Human
agcuguguggcagu

SEQ ID NO: 2238657 - RNA, 16 nt, Human
agcuguguggcagucu

SEQ ID NO: 2238658 - RNA, 20 nt, Human
agcugucccugucaccaagc

SEQ ID NO: 2238659 - RNA, 11 nt, Human
agcugucugcu

SEQ ID NO: 2238660 - RNA, 17 nt, Human
agcugucugcucagaca

SEQ ID NO: 2238661 - RNA, 20 nt, Human
agcugucuuguccuugcugg

SEQ ID NO: 2238662 - RNA, 19 nt, Human
agcugugcucuggacaggc

SEQ ID NO: 2238663 - RNA, 20 nt, Human
agcugugcucuggacaggca

SEQ ID NO: 2238664 - RNA, 15 nt, Human
ugccuuaaaacuuua

SEQ ID NO: 2238665 - RNA, 13 nt, Human
ugccuuaaagaaa

SEQ ID NO: 2238666 - RNA, 15 nt, Human
ugccuuaaagaaagu

SEQ ID NO: 2238667 - RNA, 17 nt, Human
ugccuuagagccaggca

SEQ ID NO: 2238668 - RNA, 15 nt, Human
ugccuuagucucagu

SEQ ID NO: 2238669 - RNA, 18 nt, Human
ugccuuagagccaggcac

SEQ ID NO: 2238670 - RNA, 19 nt, Human
ugccuuagagccaggcaca

SEQ ID NO: 2238671 - RNA, 23 nt, Human
ugccuuagagccaggcacacacu

SEQ ID NO: 2238672 - RNA, 15 nt, Human
ugccuuauggaacac

SEQ ID NO: 2238673 - RNA, 16 nt, Human
ugccuuauggaacacu

SEQ ID NO: 2238674 - RNA, 21 nt, Human
ugccuguucagcuccagcuca

SEQ ID NO: 2238675 - RNA, 19 nt, Human
ugccuguugggccaggagc

SEQ ID NO: 2238676 - RNA, 20 nt, Human
ugccuguugggccaggagcc

SEQ ID NO: 2238677 - RNA, 15 nt, Human
ugccuuaaaaccaaa

SEQ ID NO: 2238678 - RNA, 16 nt, Human
ugccuuaaaaccaaag

SEQ ID NO: 2238679 - RNA, 18 nt, Human
ugccuuaaaaccaaagag

SEQ ID NO: 2238680 - RNA, 20 nt, Human
ugccuuaaaaccaaagaggg

SEQ ID NO: 2238681 - RNA, 22 nt, Human
ugccuuaaaaccaaagagggcu

SEQ ID NO: 2238682 - RNA, 14 nt, Human
agcuguucagcugg

SEQ ID NO: 2238683 - RNA, 13 nt, Human
agcuguucagcug

SEQ ID NO: 2238684 - RNA, 18 nt, Human
ugccuguucagcuccagc

SEQ ID NO: 2238685 - RNA, 20 nt, Human
ugccuguucagcuccagcuc

SEQ ID NO: 2238686 - RNA, 20 nt, Human
agcugugugcucuccaagcc

SEQ ID NO: 2238687 - RNA, 19 nt, Human
agcuguucacagccagacu

SEQ ID NO: 2238688 - RNA, 16 nt, Human
agcuguucacagccag

SEQ ID NO: 2238689 - RNA, 22 nt, Human
agcuucuuccaggugcccagcu

SEQ ID NO: 2238690 - RNA, 20 nt, Human
agcuucuuccaggugcccag

SEQ ID NO: 2238691 - RNA, 17 nt, Human
agcuugaaacugagaug

SEQ ID NO: 2238692 - RNA, 17 nt, Human
agcuugaaaguuuucag

SEQ ID NO: 2238693 - RNA, 16 nt, Human
agcuugaaaguuuuca

SEQ ID NO: 2238694 - RNA, 22 nt, Human
agcuugaaaguuuucagaaccu

SEQ ID NO: 2238695 - RNA, 22 nt, Human
agcuugaagaucguuaguaucu

SEQ ID NO: 2238696 - RNA, 19 nt, Human
agcuugaccgugaggccag

SEQ ID NO: 2238697 - RNA, 19 nt, Human
agcuuagaccucagccugu

SEQ ID NO: 2238698 - RNA, 18 nt, Human
agcuuagaccucagccug

SEQ ID NO: 2238699 - RNA, 17 nt, Human
agcuuagaccucagccu

SEQ ID NO: 2238700 - RNA, 16 nt, Human
agcuuagaccucagcc

SEQ ID NO: 2238701 - RNA, 20 nt, Human
agcuuagaccucagccugug

SEQ ID NO: 2238702 - RNA, 15 nt, Human
agcuuagacuaaggc

SEQ ID NO: 2238703 - RNA, 12 nt, Human
agcuucuuccag

SEQ ID NO: 2238704 - RNA, 15 nt, Human
agcuuagagccuccc

SEQ ID NO: 2238705 - RNA, 15 nt, Human
agcuuagaccucagc

SEQ ID NO: 2238706 - RNA, 14 nt, Human
agcuuagaccucag

SEQ ID NO: 2238707 - RNA, 10 nt, Human
agcuuagaac

SEQ ID NO: 2238708 - RNA, 20 nt, Human
agcuuaccagaagcuuccau

SEQ ID NO: 2238709 - RNA, 16 nt, Human
agcuguuguacauuua

SEQ ID NO: 2238710 - RNA, 22 nt, Human
agcuuaccagaagcuuccauag

SEQ ID NO: 2238711 - RNA, 19 nt, Human
agcuugaaggaucuguuuu

SEQ ID NO: 2238712 - RNA, 21 nt, Human
agcuugagccgggccccuggg

SEQ ID NO: 2238713 - RNA, 20 nt, Human
agcuugaccugaggcugugg

SEQ ID NO: 2238714 - RNA, 23 nt, Human
agcuugagccgggccccugggcu

SEQ ID NO: 2238715 - RNA, 24 nt, Human
agcuugagccgggccccugggcuu

SEQ ID NO: 2238716 - RNA, 13 nt, Human
agcuugagccuga

SEQ ID NO: 2238717 - RNA, 15 nt, Human
agcuugagccugaaa

SEQ ID NO: 2238718 - RNA, 14 nt, Human
agcuugaggguugg

SEQ ID NO: 2238719 - RNA, 18 nt, Human
agcuugaggguugggcug

SEQ ID NO: 2238720 - RNA, 18 nt, Human
agcuugggaggcuucccc

SEQ ID NO: 2238721 - RNA, 18 nt, Human
agcuuggguuuuuguuac

SEQ ID NO: 2238722 - RNA, 18 nt, Human
agcuuguaaauagcucag

SEQ ID NO: 2238723 - RNA, 10 nt, Human
agcuugggcc

SEQ ID NO: 2238724 - RNA, 12 nt, Human
agcuugggccca

SEQ ID NO: 2238725 - RNA, 16 nt, Human
agcuugggcccagcug

SEQ ID NO: 2238726 - RNA, 17 nt, Human
agcuugggcccagcugg

SEQ ID NO: 2238727 - RNA, 18 nt, Human
agcuugggcccagcuggg

SEQ ID NO: 2238728 - RNA, 19 nt, Human
agcuugggcccagcugggc

SEQ ID NO: 2238729 - RNA, 23 nt, Human
agcuuggggacaggggcaggagg

SEQ ID NO: 2238730 - RNA, 23 nt, Human
agcuugggcccagcugggcucug

SEQ ID NO: 2238731 - RNA, 20 nt, Human
agcuugggcccagcugggcu

SEQ ID NO: 2238732 - RNA, 21 nt, Human
agcuugggcccagcugggcuc

SEQ ID NO: 2238733 - RNA, 15 nt, Human
agcuguugagcuguu

SEQ ID NO: 2238734 - RNA, 16 nt, Human
agcuguugagcuguuu

SEQ ID NO: 2238735 - RNA, 17 nt, Human
agcuguugagcuguuuu

SEQ ID NO: 2238736 - RNA, 22 nt, Human
agcuguuggccucugcaaagga

SEQ ID NO: 2238737 - RNA, 13 nt, Human
agcuguugccuca

SEQ ID NO: 2238738 - RNA, 15 nt, Human
agcuguuguacauuu

SEQ ID NO: 2238739 - RNA, 19 nt, Human
agcuuacaagccagcugga

SEQ ID NO: 2238740 - RNA, 13 nt, Human
agcuguugagcug

SEQ ID NO: 2238741 - RNA, 14 nt, Human
agcuguugagcugu

SEQ ID NO: 2238742 - RNA, 19 nt, Human
ugcuacaacuucagcagua

SEQ ID NO: 2238743 - RNA, 15 nt, Human
agcuguucugucccu

SEQ ID NO: 2238744 - RNA, 20 nt, Human
agcuguucugucccuuggag

SEQ ID NO: 2238745 - RNA, 22 nt, Human
agcuguucugucccuuggagcu

SEQ ID NO: 2238746 - RNA, 20 nt, Human
ugcuacaaaaacacagcaag

SEQ ID NO: 2238747 - RNA, 12 nt, Human
ugcuacaaagaa

SEQ ID NO: 2238748 - RNA, 16 nt, Human
ugcuacaaagaagaca

SEQ ID NO: 2238749 - RNA, 17 nt, Human
ugcuacaaagaagacau

SEQ ID NO: 2238750 - RNA, 18 nt, Human
ugcuacaaagaagacaug

SEQ ID NO: 2238751 - RNA, 20 nt, Human
ugcuacaaagaagacauguu

SEQ ID NO: 2238752 - RNA, 21 nt, Human
ugcuacaaagaagacauguuu

SEQ ID NO: 2238753 - RNA, 23 nt, Human
ugcuacaaagaagacauguuuua

SEQ ID NO: 2238754 - RNA, 13 nt, Human
ugcuacaacuuca

SEQ ID NO: 2238755 - RNA, 12 nt, Human
ugcuaaguauuu

SEQ ID NO: 2238756 - RNA, 16 nt, Human
ugcuaaguauuuccca

SEQ ID NO: 2238757 - RNA, 17 nt, Human
ugcuaaguauuucccag

SEQ ID NO: 2238758 - RNA, 20 nt, Human
ugcuaagccccagcaagcaa

SEQ ID NO: 2238759 - RNA, 19 nt, Human
ugcuacaaaaacacagcaa

SEQ ID NO: 2238760 - RNA, 18 nt, Human
ugcuacaaaaacacagca

SEQ ID NO: 2238761 - RNA, 17 nt, Human
ugcuacaaaaacacagc

SEQ ID NO: 2238762 - RNA, 16 nt, Human
ugcuacaaaaacacag

SEQ ID NO: 2238763 - RNA, 17 nt, Human
ugccuuuggcagaguuc

SEQ ID NO: 2238764 - RNA, 15 nt, Human
ugccuuuguuuugau

SEQ ID NO: 2238765 - RNA, 22 nt, Human
ugccuuugaguuuccucaggcu

SEQ ID NO: 2238766 - RNA, 21 nt, Human
ugccuuugaguuuccucaggc

SEQ ID NO: 2238767 - RNA, 19 nt, Human
ugccuuugaguuuccucag

SEQ ID NO: 2238768 - RNA, 18 nt, Human
ugccuuugaguuuccuca

SEQ ID NO: 2238769 - RNA, 23 nt, Human
ugccuuugagacaguuucuuagc

SEQ ID NO: 2238770 - RNA, 12 nt, Human
ugccuuugagac

SEQ ID NO: 2238771 - RNA, 13 nt, Human
ugccuuugagaca

SEQ ID NO: 2238772 - RNA, 15 nt, Human
ugccuuugagacagu

SEQ ID NO: 2238773 - RNA, 17 nt, Human
ugccuuugagacaguuu

SEQ ID NO: 2238774 - RNA, 18 nt, Human
ugccuuugagacaguuuc

SEQ ID NO: 2238775 - RNA, 19 nt, Human
ugccuuugagacaguuucu

SEQ ID NO: 2238776 - RNA, 20 nt, Human
ugccuuugagacaguuucuu

SEQ ID NO: 2238777 - RNA, 21 nt, Human
ugccuuugagacaguuucuua

SEQ ID NO: 2238778 - RNA, 13 nt, Human
ugccuuucuaguc

SEQ ID NO: 2238779 - RNA, 16 nt, Human
ugccuuagucucaguu

SEQ ID NO: 2238780 - RNA, 20 nt, Human
ugccuuagucucaguuugug

SEQ ID NO: 2238781 - RNA, 14 nt, Human
ugccuuaucuugca

SEQ ID NO: 2238782 - RNA, 11 nt, Human
ugccuuucucg

SEQ ID NO: 2238783 - RNA, 20 nt, Human
ugccuuucucgauuuuaucu

SEQ ID NO: 2238784 - RNA, 13 nt, Human
ugccuuugaccug

SEQ ID NO: 2238785 - RNA, 23 nt, Human
ugccuuugaccugccucccuuca

SEQ ID NO: 2238786 - RNA, 17 nt, Human
ugccuuugaccugccuc

SEQ ID NO: 2238787 - RNA, 18 nt, Human
ugcggccgcauucccuga

SEQ ID NO: 2238788 - RNA, 16 nt, Human
ugcggcccagcccggc

SEQ ID NO: 2238789 - RNA, 18 nt, Human
ugcggcccagcccggcuc

SEQ ID NO: 2238790 - RNA, 17 nt, Human
ugcggcauuaaagccau

SEQ ID NO: 2238791 - RNA, 13 nt, Human
ugcggcccagccc

SEQ ID NO: 2238792 - RNA, 14 nt, Human
ugcggcccagcccg

SEQ ID NO: 2238793 - RNA, 15 nt, Human
ugcggcccagcccgg

SEQ ID NO: 2238794 - RNA, 13 nt, Human
ugcggauggccgg

SEQ ID NO: 2238795 - RNA, 23 nt, Human
ugcggcagguucacaggcgaggc

SEQ ID NO: 2238796 - RNA, 20 nt, Human
ugcggagugaagaggggcag

SEQ ID NO: 2238797 - RNA, 14 nt, Human
ugcggaucucugga

SEQ ID NO: 2238798 - RNA, 15 nt, Human
ugcggaucucuggag

SEQ ID NO: 2238799 - RNA, 15 nt, Human
ugcggagugaagagg

SEQ ID NO: 2238800 - RNA, 16 nt, Human
ugcggagugaagaggg

SEQ ID NO: 2238801 - RNA, 21 nt, Human
ugcggagugaagaggggcagc

SEQ ID NO: 2238802 - RNA, 23 nt, Human
ugcggaccccagcugugagccuu

SEQ ID NO: 2238803 - RNA, 15 nt, Human
ugcggagaacaaaug

SEQ ID NO: 2238804 - RNA, 19 nt, Human
ugcggagaaccuugugccu

SEQ ID NO: 2238805 - RNA, 13 nt, Human
ugcggagaacaaa

SEQ ID NO: 2238806 - RNA, 14 nt, Human
ugcggaccccagcu

SEQ ID NO: 2238807 - RNA, 22 nt, Human
ugcggaccccagcugugagccu

SEQ ID NO: 2238808 - RNA, 13 nt, Human
ugcggaccccagc

SEQ ID NO: 2238809 - RNA, 23 nt, Human
ugcggacagccacggccaggcca

SEQ ID NO: 2238810 - RNA, 22 nt, Human
ugcggacagccacggccaggcc

SEQ ID NO: 2238811 - RNA, 13 nt, Human
ugccuuuuauagc

SEQ ID NO: 2238812 - RNA, 17 nt, Human
ugccuuuuauagcuauu

SEQ ID NO: 2238813 - RNA, 22 nt, Human
ugccuuuuauagcuauuacugu

SEQ ID NO: 2238814 - RNA, 17 nt, Human
ugcgggcugggcagcug

SEQ ID NO: 2238815 - RNA, 17 nt, Human
ugcgggcuuuuccccgg

SEQ ID NO: 2238816 - RNA, 21 nt, Human
ugcgggaccgguacagaaagg

SEQ ID NO: 2238817 - RNA, 16 nt, Human
ugcgggucacaggagg

SEQ ID NO: 2238818 - RNA, 14 nt, Human
ugcgggucacagga

SEQ ID NO: 2238819 - RNA, 17 nt, Human
ugcgguccacccaggag

SEQ ID NO: 2238820 - RNA, 17 nt, Human
ugcgggucacaggaggg

SEQ ID NO: 2238821 - RNA, 21 nt, Human
ugcgggugaacaaagcagcca

SEQ ID NO: 2238822 - RNA, 18 nt, Human
ugcgggugaacaaagcag

SEQ ID NO: 2238823 - RNA, 18 nt, Human
ugcgguccacccaggagc

SEQ ID NO: 2238824 - RNA, 23 nt, Human
ugcgggugaacaaagcagccacg

SEQ ID NO: 2238825 - RNA, 22 nt, Human
ugcgggugaacaaagcagccac

SEQ ID NO: 2238826 - RNA, 23 nt, Human
ugcggguggggcuuggggcucac

SEQ ID NO: 2238827 - RNA, 14 nt, Human
ugcggucuagggaa

SEQ ID NO: 2238828 - RNA, 17 nt, Human
ugcggugcuaucucccc

SEQ ID NO: 2238829 - RNA, 21 nt, Human
ugcggugcuaucucccccagc

SEQ ID NO: 2238830 - RNA, 13 nt, Human
ugcgggcugggca

SEQ ID NO: 2238831 - RNA, 14 nt, Human
ugcgggcugggcag

SEQ ID NO: 2238832 - RNA, 15 nt, Human
ugcgggcugggcagc

SEQ ID NO: 2238833 - RNA, 16 nt, Human
ugcgggcugggcagcu

SEQ ID NO: 2238834 - RNA, 20 nt, Human
ugcgggcuuccuccuggugu

SEQ ID NO: 2238835 - RNA, 19 nt, Human
ugcgggaugguccuggggc

SEQ ID NO: 2238836 - RNA, 18 nt, Human
ugcgggaugguccugggg

SEQ ID NO: 2238837 - RNA, 17 nt, Human
ugcgggaugguccuggg

SEQ ID NO: 2238838 - RNA, 13 nt, Human
ugcggcugugcag

SEQ ID NO: 2238839 - RNA, 20 nt, Human
ugcggcugugcagccugucc

SEQ ID NO: 2238840 - RNA, 21 nt, Human
ugcggcugugcagccuguccu

SEQ ID NO: 2238841 - RNA, 19 nt, Human
ugcggccuuuggcuucacg

SEQ ID NO: 2238842 - RNA, 17 nt, Human
ugcggccuuuggcuuca

SEQ ID NO: 2238843 - RNA, 19 nt, Human
ugcggccgcauucccugag

SEQ ID NO: 2238844 - RNA, 21 nt, Human
ugcggcccagcccggcuccca

SEQ ID NO: 2238845 - RNA, 16 nt, Human
ugcuauuguaaauaug

SEQ ID NO: 2238846 - RNA, 17 nt, Human
ugcuauuguaaauaugu

SEQ ID NO: 2238847 - RNA, 14 nt, Human
ugcucauggaauug

SEQ ID NO: 2238848 - RNA, 21 nt, Human
ugcucccccauccuccccuuc

SEQ ID NO: 2238849 - RNA, 20 nt, Human
ugcucccccauccuccccuu

SEQ ID NO: 2238850 - RNA, 19 nt, Human
ugcucccccauccuccccu

SEQ ID NO: 2238851 - RNA, 18 nt, Human
ugcucccccauccucccc

SEQ ID NO: 2238852 - RNA, 14 nt, Human
ugcuccaccacauc

SEQ ID NO: 2238853 - RNA, 13 nt, Human
ugcuccacagugu

SEQ ID NO: 2238854 - RNA, 12 nt, Human
ugcuccacagug

SEQ ID NO: 2238855 - RNA, 14 nt, Human
ugcucauuucagga

SEQ ID NO: 2238856 - RNA, 18 nt, Human
ugcucccuccccugcccu

SEQ ID NO: 2238857 - RNA, 17 nt, Human
ugcucccuccccugccc

SEQ ID NO: 2238858 - RNA, 15 nt, Human
ugcuccgugccucca

SEQ ID NO: 2238859 - RNA, 16 nt, Human
ugcuccgugccuccac

SEQ ID NO: 2238860 - RNA, 17 nt, Human
ugcuccgugccuccacc

SEQ ID NO: 2238861 - RNA, 15 nt, Human
ugcucccuccccugc

SEQ ID NO: 2238862 - RNA, 14 nt, Human
ugcucccuccccug

SEQ ID NO: 2238863 - RNA, 13 nt, Human
ugcucccuccccu

SEQ ID NO: 2238864 - RNA, 20 nt, Human
ugcucccuaccaccucccca

SEQ ID NO: 2238865 - RNA, 16 nt, Human
ugcucccuaccaccuc

SEQ ID NO: 2238866 - RNA, 15 nt, Human
ugcucccucacaugu

SEQ ID NO: 2238867 - RNA, 17 nt, Human
ugcuccccucccuccuc

SEQ ID NO: 2238868 - RNA, 16 nt, Human
ugcuccccucccuccu

SEQ ID NO: 2238869 - RNA, 14 nt, Human
ugcuccccucccuc

SEQ ID NO: 2238870 - RNA, 23 nt, Human
ugcucccccauccuccccuuccc

SEQ ID NO: 2238871 - RNA, 22 nt, Human
ugcucccccauccuccccuucc

SEQ ID NO: 2238872 - RNA, 13 nt, Human
ugcuccgugcuug

SEQ ID NO: 2238873 - RNA, 18 nt, Human
ugcuccgugccuccacca

SEQ ID NO: 2238874 - RNA, 19 nt, Human
ugcuccgugccuccaccac

SEQ ID NO: 2238875 - RNA, 24 nt, Human
ugcuccuagagggaggggccuagg

SEQ ID NO: 2238876 - RNA, 14 nt, Human
ugcuccuagaggga

SEQ ID NO: 2238877 - RNA, 20 nt, Human
ugcuccgugccuccaccacc

SEQ ID NO: 2238878 - RNA, 22 nt, Human
ugcuccuccagggccacgugcc

SEQ ID NO: 2238879 - RNA, 21 nt, Human
ugcuccuccagggccacgugc

SEQ ID NO: 2238880 - RNA, 16 nt, Human
ugcuccuccagggcca

SEQ ID NO: 2238881 - RNA, 13 nt, Human
ugcuccuccaggg

SEQ ID NO: 2238882 - RNA, 12 nt, Human
ugcuccuccagg

SEQ ID NO: 2238883 - RNA, 11 nt, Human
ugcuccuccag

SEQ ID NO: 2238884 - RNA, 20 nt, Human
ugcuccuagagggaggggcc

SEQ ID NO: 2238885 - RNA, 14 nt, Human
ugcucuggacaggc

SEQ ID NO: 2238886 - RNA, 12 nt, Human
ugcuccucccug

SEQ ID NO: 2238887 - RNA, 13 nt, Human
ugcuccucccugg

SEQ ID NO: 2238888 - RNA, 14 nt, Human
ugcuccucccuggc

SEQ ID NO: 2238889 - RNA, 15 nt, Human
ugcuccucccuggcu

SEQ ID NO: 2238890 - RNA, 17 nt, Human
ugcuccucccuggcugc

SEQ ID NO: 2238891 - RNA, 19 nt, Human
ugcuccucccuggcugccc

SEQ ID NO: 2238892 - RNA, 20 nt, Human
ugcuccucccuggcugcccu

SEQ ID NO: 2238893 - RNA, 22 nt, Human
ugcuccucccuggcugcccugg

SEQ ID NO: 2238894 - RNA, 15 nt, Human
ugcucuggacaggca

SEQ ID NO: 2238895 - RNA, 16 nt, Human
ugcucuggacaggcau

SEQ ID NO: 2238896 - RNA, 14 nt, Human
ugcugacuguacuc

SEQ ID NO: 2238897 - RNA, 19 nt, Human
ugcuccuccuuggugccug

SEQ ID NO: 2238898 - RNA, 23 nt, Human
ugcuccucccuggcugcccuggc

SEQ ID NO: 2238899 - RNA, 16 nt, Human
ugcucuggaagagagg

SEQ ID NO: 2238900 - RNA, 16 nt, Human
ugcugacuguacuccu

SEQ ID NO: 2238901 - RNA, 19 nt, Human
ugcugacuguacuccuccc

SEQ ID NO: 2238902 - RNA, 15 nt, Human
agcuuuaaaagaaaa

SEQ ID NO: 2238903 - RNA, 13 nt, Human
agcuuuaaaagaa

SEQ ID NO: 2238904 - RNA, 21 nt, Human
agcuugggggaugacuagagg

SEQ ID NO: 2238905 - RNA, 15 nt, Human
agcuuuaaacaaauu

SEQ ID NO: 2238906 - RNA, 19 nt, Human
agcuuuaaacucagggaca

SEQ ID NO: 2238907 - RNA, 20 nt, Human
agcuuuaaacucagggacag

SEQ ID NO: 2238908 - RNA, 21 nt, Human
agcuuuaaacucagggacaga

SEQ ID NO: 2238909 - RNA, 20 nt, Human
agcuuuaaccauuaaaacug

SEQ ID NO: 2238910 - RNA, 22 nt, Human
agcuuuaaccauuaaaacugaa

SEQ ID NO: 2238911 - RNA, 21 nt, Human
agcuuuacaugcaauuuauua

SEQ ID NO: 2238912 - RNA, 15 nt, Human
agcuuuacaugcaau

SEQ ID NO: 2238913 - RNA, 19 nt, Human
agcuuuacaugcaauuuau

SEQ ID NO: 2238914 - RNA, 20 nt, Human
agcuuuacccucaggcauag

SEQ ID NO: 2238915 - RNA, 17 nt, Human
agcuuuacccucaggca

SEQ ID NO: 2238916 - RNA, 13 nt, Human
agcuuuacccuca

SEQ ID NO: 2238917 - RNA, 15 nt, Human
agcuuuacuguuugu

SEQ ID NO: 2238918 - RNA, 18 nt, Human
agcuuuacccucaggcau

SEQ ID NO: 2238919 - RNA, 13 nt, Human
agcuuuagacccu

SEQ ID NO: 2238920 - RNA, 16 nt, Human
agcuuuagacccuggg

SEQ ID NO: 2238921 - RNA, 17 nt, Human
agcuuuagacccugggu

SEQ ID NO: 2238922 - RNA, 22 nt, Human
agcuuuauguaauaaugugaau

SEQ ID NO: 2238923 - RNA, 14 nt, Human
agcuuuauguaaua

SEQ ID NO: 2238924 - RNA, 14 nt, Human
agcuuuauacgugu

SEQ ID NO: 2238925 - RNA, 23 nt, Human
agcuuuaucaccagagagggacu

SEQ ID NO: 2238926 - RNA, 19 nt, Human
agcuuuagacccugggugg

SEQ ID NO: 2238927 - RNA, 22 nt, Human
agcuuuagacccugggugggcu

SEQ ID NO: 2238928 - RNA, 18 nt, Human
agcuuuauacguguagcu

SEQ ID NO: 2238929 - RNA, 22 nt, Human
agcuuuauuuuuuaaguauuua

SEQ ID NO: 2238930 - RNA, 19 nt, Human
agcuuuauuuuuuaaguau

SEQ ID NO: 2238931 - RNA, 16 nt, Human
agcuuuauguaauaau

SEQ ID NO: 2238932 - RNA, 14 nt, Human
agcuuuauucuuca

SEQ ID NO: 2238933 - RNA, 19 nt, Human
ugcuaucucccccagcccc

SEQ ID NO: 2238934 - RNA, 16 nt, Human
ugcuauugacaaguca

SEQ ID NO: 2238935 - RNA, 13 nt, Human
ugcuauuguaaau

SEQ ID NO: 2238936 - RNA, 15 nt, Human
ugcuauuguaaauau

SEQ ID NO: 2238937 - RNA, 18 nt, Human
ugcuauuguagagccaga

SEQ ID NO: 2238938 - RNA, 14 nt, Human
ugcuauuagacugu

SEQ ID NO: 2238939 - RNA, 20 nt, Human
ugcuauguuuugacauuuuu

SEQ ID NO: 2238940 - RNA, 17 nt, Human
agcuuucaaagaaggaa

SEQ ID NO: 2238941 - RNA, 16 nt, Human
ugcuaucucugugugc

SEQ ID NO: 2238942 - RNA, 20 nt, Human
ugcuaucucccccagcccca

SEQ ID NO: 2238943 - RNA, 22 nt, Human
ugcuauggggagaaaagacaug

SEQ ID NO: 2238944 - RNA, 17 nt, Human
ugcuaucuuaauuuugg

SEQ ID NO: 2238945 - RNA, 18 nt, Human
ugcuaucuuaauuuuggu

SEQ ID NO: 2238946 - RNA, 16 nt, Human
ugcuaucuuaauuuug

SEQ ID NO: 2238947 - RNA, 20 nt, Human
ugcuaucucugugugcacaa

SEQ ID NO: 2238948 - RNA, 21 nt, Human
ugcuaucucugugugcacaaa

SEQ ID NO: 2238949 - RNA, 20 nt, Human
aggaaauaagaaaaaucaug

SEQ ID NO: 2238950 - RNA, 20 nt, Human
aggaaauauauaugugugug

SEQ ID NO: 2238951 - RNA, 14 nt, Human
aggaaauccagggu

SEQ ID NO: 2238952 - RNA, 11 nt, Human
aggaagcacau

SEQ ID NO: 2238953 - RNA, 16 nt, Human
aggaagcacaugccuc

SEQ ID NO: 2238954 - RNA, 17 nt, Human
aggaagcacaugccucu

SEQ ID NO: 2238955 - RNA, 15 nt, Human
aggaaaucaccgaaa

SEQ ID NO: 2238956 - RNA, 19 nt, Human
aggaaaucaccgaaaacgu

SEQ ID NO: 2238957 - RNA, 13 nt, Human
aggaaauauuuau

SEQ ID NO: 2238958 - RNA, 23 nt, Human
aggaaaucaaauaugcaaagcac

SEQ ID NO: 2238959 - RNA, 22 nt, Human
aggaaauaaaaccuuucaaauu

SEQ ID NO: 2238960 - RNA, 16 nt, Human
aggaaauaagaaaaau

SEQ ID NO: 2238961 - RNA, 18 nt, Human
aggaaauaagaaaaauca

SEQ ID NO: 2238962 - RNA, 21 nt, Human
aggaaauaaaaccuuucaaau

SEQ ID NO: 2238963 - RNA, 20 nt, Human
aggaaauaaaaccuuucaaa

SEQ ID NO: 2238964 - RNA, 12 nt, Human
aggaaauauuua

SEQ ID NO: 2238965 - RNA, 19 nt, Human
aggaaauaaaaccuuucaa

SEQ ID NO: 2238966 - RNA, 24 nt, Human
aggaaaggccagcuggcagcagag

SEQ ID NO: 2238967 - RNA, 16 nt, Human
aggaaaggcuccagga

SEQ ID NO: 2238968 - RNA, 15 nt, Human
aggaaaggcuccagg

SEQ ID NO: 2238969 - RNA, 16 nt, Human
ugcugacuguuuucuc

SEQ ID NO: 2238970 - RNA, 14 nt, Human
ugcucuggaauuug

SEQ ID NO: 2238971 - RNA, 21 nt, Human
ugcugacuguacuccucccag

SEQ ID NO: 2238972 - RNA, 22 nt, Human
ugcugacuguacuccucccagg

SEQ ID NO: 2238973 - RNA, 13 nt, Human
aggaaaggcucca

SEQ ID NO: 2238974 - RNA, 14 nt, Human
aggaaaggcuccag

SEQ ID NO: 2238975 - RNA, 12 nt, Human
aggaaggaaaga

SEQ ID NO: 2238976 - RNA, 17 nt, Human
aggaagcucagacuggu

SEQ ID NO: 2238977 - RNA, 16 nt, Human
aggaagcucagacugg

SEQ ID NO: 2238978 - RNA, 14 nt, Human
aggaagcucagacu

SEQ ID NO: 2238979 - RNA, 20 nt, Human
aggaagccugcaguccugga

SEQ ID NO: 2238980 - RNA, 23 nt, Human
aggaaggaaacccagcucugguc

SEQ ID NO: 2238981 - RNA, 20 nt, Human
aggaaggaaacccagcucug

SEQ ID NO: 2238982 - RNA, 22 nt, Human
aggaaggaaacccagcucuggu

SEQ ID NO: 2238983 - RNA, 21 nt, Human
aggaagccgugcccugccccc

SEQ ID NO: 2238984 - RNA, 20 nt, Human
aggaagccgugcccugcccc

SEQ ID NO: 2238985 - RNA, 22 nt, Human
aggaagcccccaccgugggcag

SEQ ID NO: 2238986 - RNA, 12 nt, Human
aggaagcucagg

SEQ ID NO: 2238987 - RNA, 19 nt, Human
aggaagccugcaguccugg

SEQ ID NO: 2238988 - RNA, 18 nt, Human
aggaagccgcuggggcca

SEQ ID NO: 2238989 - RNA, 18 nt, Human
aggaagccagcaggcucu

SEQ ID NO: 2238990 - RNA, 19 nt, Human
aggaagccgcuggggccag

SEQ ID NO: 2238991 - RNA, 20 nt, Human
aggaagccgcuggggccagu

SEQ ID NO: 2238992 - RNA, 22 nt, Human
aggaagcacaugccucucucag

SEQ ID NO: 2238993 - RNA, 16 nt, Human
aggaaauauugcuggg

SEQ ID NO: 2238994 - RNA, 21 nt, Human
aggaagccagcaggcucucag

SEQ ID NO: 2238995 - RNA, 22 nt, Human
aggaagccagcaggcucucagg

SEQ ID NO: 2238996 - RNA, 23 nt, Human
aggaagccagcaggcucucaggc

SEQ ID NO: 2238997 - RNA, 13 nt, Human
ugcuucaaaaaca

SEQ ID NO: 2238998 - RNA, 21 nt, Human
ugcuucaaaaacauucuuaca

SEQ ID NO: 2238999 - RNA, 21 nt, Human
ugcuuauuguuccaagacauu

SEQ ID NO: 2239000 - RNA, 17 nt, Human
ugcuuauuguuccaaga

SEQ ID NO: 2239001 - RNA, 23 nt, Human
ugcuuauuguuccaagacauugu

SEQ ID NO: 2239002 - RNA, 23 nt, Human
ugcuuauuugacaacguuucagc

SEQ ID NO: 2239003 - RNA, 16 nt, Human
ugcuuauuguuccaag

SEQ ID NO: 2239004 - RNA, 15 nt, Human
ugcuuauuguuccaa

SEQ ID NO: 2239005 - RNA, 14 nt, Human
ugcuuauuguucca

SEQ ID NO: 2239006 - RNA, 18 nt, Human
ugcuuagucacugccugc

SEQ ID NO: 2239007 - RNA, 18 nt, Human
ugcuuaguaaugcuacgu

SEQ ID NO: 2239008 - RNA, 14 nt, Human
ugcuuagucacugc

SEQ ID NO: 2239009 - RNA, 15 nt, Human
ugcuuagucacugcc

SEQ ID NO: 2239010 - RNA, 16 nt, Human
ugcuuagucacugccu

SEQ ID NO: 2239011 - RNA, 14 nt, Human
ugcuuaggaugugu

SEQ ID NO: 2239012 - RNA, 16 nt, Human
ugcuuaggaugugugc

SEQ ID NO: 2239013 - RNA, 23 nt, Human
ugcuuaggauguuuuucaugaaa

SEQ ID NO: 2239014 - RNA, 14 nt, Human
ugcuuaggauguuu

SEQ ID NO: 2239015 - RNA, 13 nt, Human
ugcuuaguaaugc

SEQ ID NO: 2239016 - RNA, 14 nt, Human
ugcuuaguaaugcu

SEQ ID NO: 2239017 - RNA, 15 nt, Human
ugcuuaguaaugcua

SEQ ID NO: 2239018 - RNA, 15 nt, Human
ugcuguggccugggc

SEQ ID NO: 2239019 - RNA, 14 nt, Human
ugcuguggccuggg

SEQ ID NO: 2239020 - RNA, 12 nt, Human
ugcuguggccug

SEQ ID NO: 2239021 - RNA, 17 nt, Human
ugcuguggccaggguga

SEQ ID NO: 2239022 - RNA, 23 nt, Human
ugcuguggccagggugagagcug

SEQ ID NO: 2239023 - RNA, 16 nt, Human
ugcuguggccugggca

SEQ ID NO: 2239024 - RNA, 10 nt, Human
ugcuguggga

SEQ ID NO: 2239025 - RNA, 23 nt, Human
ugcuuacuaagcuuugccagcug

SEQ ID NO: 2239026 - RNA, 22 nt, Human
ugcuuacugauauauuuuacaa

SEQ ID NO: 2239027 - RNA, 14 nt, Human
ugcuuacugauaua

SEQ ID NO: 2239028 - RNA, 14 nt, Human
ugcuuacuuuggaa

SEQ ID NO: 2239029 - RNA, 18 nt, Human
ugcuuacuuuggaauaca

SEQ ID NO: 2239030 - RNA, 22 nt, Human
ugcuuacuuuggaauacauuuc

SEQ ID NO: 2239031 - RNA, 17 nt, Human
ugcuuagacauaacaaa

SEQ ID NO: 2239032 - RNA, 19 nt, Human
ugcuuagaauccaaacuug

SEQ ID NO: 2239033 - RNA, 14 nt, Human
ugcuuagccuccug

SEQ ID NO: 2239034 - RNA, 14 nt, Human
ugcuuagaaaagaa

SEQ ID NO: 2239035 - RNA, 15 nt, Human
ugcuuagccuccuga

SEQ ID NO: 2239036 - RNA, 18 nt, Human
ugcuuagccuccugaccu

SEQ ID NO: 2239037 - RNA, 19 nt, Human
ugcuuagccuccugaccug

SEQ ID NO: 2239038 - RNA, 18 nt, Human
ugcuuagcucaucuuaga

SEQ ID NO: 2239039 - RNA, 17 nt, Human
ugcugucccuuacguga

SEQ ID NO: 2239040 - RNA, 21 nt, Human
ugcuguauauuugugauagca

SEQ ID NO: 2239041 - RNA, 23 nt, Human
ugcuguauuuuaaaagaaugauu

SEQ ID NO: 2239042 - RNA, 19 nt, Human
ugcugucccuuacgugagu

SEQ ID NO: 2239043 - RNA, 15 nt, Human
ugcugucccuuuucc

SEQ ID NO: 2239044 - RNA, 15 nt, Human
ugcugugccucccaa

SEQ ID NO: 2239045 - RNA, 13 nt, Human
ugcuguggaagca

SEQ ID NO: 2239046 - RNA, 14 nt, Human
ugcuguggccaggg

SEQ ID NO: 2239047 - RNA, 12 nt, Human
ugcuguggccag

SEQ ID NO: 2239048 - RNA, 13 nt, Human
ugcugugcaaaug

SEQ ID NO: 2239049 - RNA, 17 nt, Human
ugcugucccuuuuccuu

SEQ ID NO: 2239050 - RNA, 17 nt, Human
ugcuucaaauccaucca

SEQ ID NO: 2239051 - RNA, 19 nt, Human
ugcuucaaauccauccaga

SEQ ID NO: 2239052 - RNA, 17 nt, Human
ugcuuauuuuaaaauuu

SEQ ID NO: 2239053 - RNA, 15 nt, Human
ugcuuauuuuaaaau

SEQ ID NO: 2239054 - RNA, 20 nt, Human
ugcuucaaggauccugagcc

SEQ ID NO: 2239055 - RNA, 21 nt, Human
ugcuucaaggauccugagcca

SEQ ID NO: 2239056 - RNA, 23 nt, Human
ugcuucaaggauccugagccaga

SEQ ID NO: 2239057 - RNA, 17 nt, Human
ugcuucaugcucagccc

SEQ ID NO: 2239058 - RNA, 23 nt, Human
ugcuucaauacccaaauccucuc

SEQ ID NO: 2239059 - RNA, 15 nt, Human
ugcuucaauuaauaa

SEQ ID NO: 2239060 - RNA, 16 nt, Human
ugcuucaauuaauaaa

SEQ ID NO: 2239061 - RNA, 23 nt, Human
ugcuucaauuaauaaaaaaugga

SEQ ID NO: 2239062 - RNA, 16 nt, Human
ugcuuccaggaaacuc

SEQ ID NO: 2239063 - RNA, 17 nt, Human
ugcuuccaccucacccc

SEQ ID NO: 2239064 - RNA, 18 nt, Human
ugcuuccaccucacccca

SEQ ID NO: 2239065 - RNA, 19 nt, Human
ugcuuccaccucaccccac

SEQ ID NO: 2239066 - RNA, 20 nt, Human
ugcuuccaccucaccccacu

SEQ ID NO: 2239067 - RNA, 15 nt, Human
ugcuuccaauuuucu

SEQ ID NO: 2239068 - RNA, 11 nt, Human
ugcuuccaccu

SEQ ID NO: 2239069 - RNA, 14 nt, Human
ugcuuccaccucac

SEQ ID NO: 2239070 - RNA, 15 nt, Human
ugcuuccaccucacc

SEQ ID NO: 2239071 - RNA, 16 nt, Human
ugcuuccaccucaccc

SEQ ID NO: 2239072 - RNA, 18 nt, Human
aggacacuaaccacgcug

SEQ ID NO: 2239073 - RNA, 19 nt, Human
ugcuuccaggaaacuccac

SEQ ID NO: 2239074 - RNA, 17 nt, Human
aggacaccacacccagc

SEQ ID NO: 2239075 - RNA, 18 nt, Human
aggacaccacacccagcc

SEQ ID NO: 2239076 - RNA, 19 nt, Human
aggacaccacacccagccu

SEQ ID NO: 2239077 - RNA, 20 nt, Human
aggacaccacacccagccuc

SEQ ID NO: 2239078 - RNA, 21 nt, Human
aggacaccacacccagccuca

SEQ ID NO: 2239079 - RNA, 22 nt, Human
aggacaccacacccagccucag

SEQ ID NO: 2239080 - RNA, 23 nt, Human
aggacaccacacccagccucagu

SEQ ID NO: 2239081 - RNA, 16 nt, Human
ugcuuccagugaggcu

SEQ ID NO: 2239082 - RNA, 15 nt, Human
aggacaccacaccca

SEQ ID NO: 2239083 - RNA, 14 nt, Human
aggacacuuccugc

SEQ ID NO: 2239084 - RNA, 17 nt, Human
aggacacugauaugggu

SEQ ID NO: 2239085 - RNA, 15 nt, Human
aggacacuuccugcc

SEQ ID NO: 2239086 - RNA, 16 nt, Human
aggacacuuccugccu

SEQ ID NO: 2239087 - RNA, 17 nt, Human
aggacagccccuccucc

SEQ ID NO: 2239088 - RNA, 19 nt, Human
aggacagauccagggacug

SEQ ID NO: 2239089 - RNA, 19 nt, Human
ugcugggauuacaagcgug

SEQ ID NO: 2239090 - RNA, 16 nt, Human
ugcugggacucagccu

SEQ ID NO: 2239091 - RNA, 18 nt, Human
ugcugggacucagccuuc

SEQ ID NO: 2239092 - RNA, 22 nt, Human
ugcugggacucagccuucagac

SEQ ID NO: 2239093 - RNA, 23 nt, Human
ugcugggacucagccuucagaca

SEQ ID NO: 2239094 - RNA, 19 nt, Human
ugcuggcuguuggcugggg

SEQ ID NO: 2239095 - RNA, 21 nt, Human
ugcuggcuguuggcugggggc

SEQ ID NO: 2239096 - RNA, 21 nt, Human
ugcuggcugcccagaccccuc

SEQ ID NO: 2239097 - RNA, 14 nt, Human
ugcuggcugcccag

SEQ ID NO: 2239098 - RNA, 13 nt, Human
ugcuggcugccca

SEQ ID NO: 2239099 - RNA, 16 nt, Human
ugcuggcgccucugca

SEQ ID NO: 2239100 - RNA, 13 nt, Human
ugcuggcucuucu

SEQ ID NO: 2239101 - RNA, 14 nt, Human
ugcuggcgccucug

SEQ ID NO: 2239102 - RNA, 15 nt, Human
ugcuggcgccucugc

SEQ ID NO: 2239103 - RNA, 13 nt, Human
ugcuggcugccuu

SEQ ID NO: 2239104 - RNA, 17 nt, Human
ugcuggccgccucaccc

SEQ ID NO: 2239105 - RNA, 15 nt, Human
ugcuggccgccucac

SEQ ID NO: 2239106 - RNA, 12 nt, Human
ugcuggccugga

SEQ ID NO: 2239107 - RNA, 14 nt, Human
ugcuggccuggauc

SEQ ID NO: 2239108 - RNA, 15 nt, Human
ugcuggccuggaucu

SEQ ID NO: 2239109 - RNA, 16 nt, Human
ugcuggccuggaucuc

SEQ ID NO: 2239110 - RNA, 18 nt, Human
ugcuggccuggaucuccc

SEQ ID NO: 2239111 - RNA, 13 nt, Human
ugcuggccuggcc

SEQ ID NO: 2239112 - RNA, 21 nt, Human
ugcugggauuacaagcgugag

SEQ ID NO: 2239113 - RNA, 17 nt, Human
ugcugggauuacaggug

SEQ ID NO: 2239114 - RNA, 15 nt, Human
ugcugggacugagcc

SEQ ID NO: 2239115 - RNA, 15 nt, Human
ugcuguagacauuug

SEQ ID NO: 2239116 - RNA, 13 nt, Human
ugcuguauaaaau

SEQ ID NO: 2239117 - RNA, 14 nt, Human
ugcuguauaaaauc

SEQ ID NO: 2239118 - RNA, 15 nt, Human
ugcuguauaaaauca

SEQ ID NO: 2239119 - RNA, 16 nt, Human
ugcuguauaaaaucag

SEQ ID NO: 2239120 - RNA, 23 nt, Human
ugcuguauccauccauggggcug

SEQ ID NO: 2239121 - RNA, 17 nt, Human
ugcuguauaaaaucagc

SEQ ID NO: 2239122 - RNA, 18 nt, Human
ugcuguauaaaaucagcc

SEQ ID NO: 2239123 - RNA, 13 nt, Human
ugcuguauuuuaa

SEQ ID NO: 2239124 - RNA, 21 nt, Human
ugcuguauuuuaaaagaauga

SEQ ID NO: 2239125 - RNA, 22 nt, Human
ugcuguauuuuaaaagaaugau

SEQ ID NO: 2239126 - RNA, 22 nt, Human
ugcuggauauuuucaaauugua

SEQ ID NO: 2239127 - RNA, 22 nt, Human
ugcuggaucacagcugcuuucu

SEQ ID NO: 2239128 - RNA, 17 nt, Human
ugcuggauauuuucaaa

SEQ ID NO: 2239129 - RNA, 16 nt, Human
ugcuggauauuuucaa

SEQ ID NO: 2239130 - RNA, 17 nt, Human
ugcuggauaaaaugagg

SEQ ID NO: 2239131 - RNA, 15 nt, Human
ugcuggauaaaauga

SEQ ID NO: 2239132 - RNA, 20 nt, Human
ugcuggaguuucauguacaa

SEQ ID NO: 2239133 - RNA, 13 nt, Human
ugcugcccugcgg

SEQ ID NO: 2239134 - RNA, 17 nt, Human
ugcuggaggugggagca

SEQ ID NO: 2239135 - RNA, 18 nt, Human
ugcuggaggugggagcag

SEQ ID NO: 2239136 - RNA, 22 nt, Human
ugcuggaggugggagcaggaga

SEQ ID NO: 2239137 - RNA, 23 nt, Human
ugcuggaggugggagcaggagau

SEQ ID NO: 2239138 - RNA, 17 nt, Human
ugcuggauggagcccag

SEQ ID NO: 2239139 - RNA, 23 nt, Human
ugcuggaucacagcugcuuucug

SEQ ID NO: 2239140 - RNA, 18 nt, Human
ugcuggauggagcccagg

SEQ ID NO: 2239141 - RNA, 19 nt, Human
ugcuggauggagcccaggc

SEQ ID NO: 2239142 - RNA, 20 nt, Human
ugcuggauggagcccaggcg

SEQ ID NO: 2239143 - RNA, 18 nt, Human
ugcuggaugucugccaau

SEQ ID NO: 2239144 - RNA, 22 nt, Human
ugcuggaugucugccaauuuuu

SEQ ID NO: 2239145 - RNA, 20 nt, Human
ugcuggcacauuuccccaga

SEQ ID NO: 2239146 - RNA, 18 nt, Human
ugcuggcacauuucccca

SEQ ID NO: 2239147 - RNA, 24 nt, Human
ugcuggccccucaccugggcaccu

SEQ ID NO: 2239148 - RNA, 22 nt, Human
ugcuggccccucaccugggcac

SEQ ID NO: 2239149 - RNA, 20 nt, Human
ugcuggccccucaccugggc

SEQ ID NO: 2239150 - RNA, 11 nt, Human
ugcugcccugu

SEQ ID NO: 2239151 - RNA, 19 nt, Human
ugcugcccugcccaccugg

SEQ ID NO: 2239152 - RNA, 21 nt, Human
ugcugcccugcccaccuggcc

SEQ ID NO: 2239153 - RNA, 20 nt, Human
aggaaugcucccccauccuc

SEQ ID NO: 2239154 - RNA, 22 nt, Human
aggaaugcucccccauccuccc

SEQ ID NO: 2239155 - RNA, 12 nt, Human
aggaauggacag

SEQ ID NO: 2239156 - RNA, 20 nt, Human
aggaauggacagacagagga

SEQ ID NO: 2239157 - RNA, 21 nt, Human
aggaaggagacucaccucugc

SEQ ID NO: 2239158 - RNA, 20 nt, Human
aggaagcucagacugguuga

SEQ ID NO: 2239159 - RNA, 14 nt, Human
aggaaggacccuga

SEQ ID NO: 2239160 - RNA, 19 nt, Human
aggaaggagacucaccucu

SEQ ID NO: 2239161 - RNA, 15 nt, Human
aggaaugcuccccca

SEQ ID NO: 2239162 - RNA, 14 nt, Human
aggaaugcuccccc

SEQ ID NO: 2239163 - RNA, 13 nt, Human
aggaaugcucccc

SEQ ID NO: 2239164 - RNA, 16 nt, Human
aggaaugccuguguga

SEQ ID NO: 2239165 - RNA, 12 nt, Human
aggaaugcuccc

SEQ ID NO: 2239166 - RNA, 24 nt, Human
aggaaugccuccucccugggcaga

SEQ ID NO: 2239167 - RNA, 13 nt, Human
ugcugcccugccc

SEQ ID NO: 2239168 - RNA, 16 nt, Human
ugcugcccugcccacc

SEQ ID NO: 2239169 - RNA, 17 nt, Human
ugcugcccugcccaccu

SEQ ID NO: 2239170 - RNA, 18 nt, Human
ugcugcccugcccaccug

SEQ ID NO: 2239171 - RNA, 13 nt, Human
aggagcuucucug

SEQ ID NO: 2239172 - RNA, 21 nt, Human
aggagcuggggaucccucccc

SEQ ID NO: 2239173 - RNA, 17 nt, Human
aggagcugggaggaaaa

SEQ ID NO: 2239174 - RNA, 16 nt, Human
aggagcugggaggaaa

SEQ ID NO: 2239175 - RNA, 21 nt, Human
aggagcugcuggcuugcagug

SEQ ID NO: 2239176 - RNA, 20 nt, Human
aggagcugggcagaaggcca

SEQ ID NO: 2239177 - RNA, 18 nt, Human
aggagcugggauccuaag

SEQ ID NO: 2239178 - RNA, 20 nt, Human
aggagcuggggaucccuccc

SEQ ID NO: 2239179 - RNA, 12 nt, Human
aggagcugggga

SEQ ID NO: 2239180 - RNA, 21 nt, Human
aggagcucuucaggccucccu

SEQ ID NO: 2239181 - RNA, 19 nt, Human
aggagcucuucaggccucc

SEQ ID NO: 2239182 - RNA, 17 nt, Human
aggagcucuucaggccu

SEQ ID NO: 2239183 - RNA, 23 nt, Human
aggagcucacuguggugucugug

SEQ ID NO: 2239184 - RNA, 15 nt, Human
aggaucccucucugg

SEQ ID NO: 2239185 - RNA, 19 nt, Human
aggaucccucucuggauug

SEQ ID NO: 2239186 - RNA, 16 nt, Human
aggaucccucucugga

SEQ ID NO: 2239187 - RNA, 17 nt, Human
aggaucccucucuggau

SEQ ID NO: 2239188 - RNA, 20 nt, Human
aggauccuauucucaccagg

SEQ ID NO: 2239189 - RNA, 21 nt, Human
aggauccuauucucaccagga

SEQ ID NO: 2239190 - RNA, 22 nt, Human
aggauccuauucucaccaggaa

SEQ ID NO: 2239191 - RNA, 13 nt, Human
aggauccugagcc

SEQ ID NO: 2239192 - RNA, 14 nt, Human
aggauccugagcca

SEQ ID NO: 2239193 - RNA, 23 nt, Human
aggauagaaguauaccugauuuu

SEQ ID NO: 2239194 - RNA, 18 nt, Human
aggauacuguaacacuuu

SEQ ID NO: 2239195 - RNA, 22 nt, Human
aggauacuguaacacuuuacaa

SEQ ID NO: 2239196 - RNA, 16 nt, Human
aggauacucugucaga

SEQ ID NO: 2239197 - RNA, 13 nt, Human
aggauacucuguc

SEQ ID NO: 2239198 - RNA, 18 nt, Human
aggauacuauauuuuagg

SEQ ID NO: 2239199 - RNA, 22 nt, Human
aggauaccauauacagcucaga

SEQ ID NO: 2239200 - RNA, 15 nt, Human
aggauaccauauaca

SEQ ID NO: 2239201 - RNA, 14 nt, Human
aggauacaugugcc

SEQ ID NO: 2239202 - RNA, 21 nt, Human
aggauacaugugccgaaugug

SEQ ID NO: 2239203 - RNA, 15 nt, Human
uggaagggacuagga

SEQ ID NO: 2239204 - RNA, 14 nt, Human
uggaaggaggcgca

SEQ ID NO: 2239205 - RNA, 19 nt, Human
uggaaggaccacauuuuau

SEQ ID NO: 2239206 - RNA, 14 nt, Human
uggaagcuuccagu

SEQ ID NO: 2239207 - RNA, 22 nt, Human
uggaaggaccacauuuuauauu

SEQ ID NO: 2239208 - RNA, 20 nt, Human
uggaagcuucuggugaccuu

SEQ ID NO: 2239209 - RNA, 21 nt, Human
uggaagguuuguauauuguca

SEQ ID NO: 2239210 - RNA, 20 nt, Human
uggaaguaaccauuugcacu

SEQ ID NO: 2239211 - RNA, 13 nt, Human
uggaaggugggga

SEQ ID NO: 2239212 - RNA, 20 nt, Human
uggaagguuuggugugugga

SEQ ID NO: 2239213 - RNA, 17 nt, Human
uggaaggguuuguggcu

SEQ ID NO: 2239214 - RNA, 15 nt, Human
uggaaggugcuguua

SEQ ID NO: 2239215 - RNA, 21 nt, Human
uggaaggugcuguuauccaug

SEQ ID NO: 2239216 - RNA, 18 nt, Human
uggaaguacuauaauuua

SEQ ID NO: 2239217 - RNA, 15 nt, Human
uggaaggguuugugg

SEQ ID NO: 2239218 - RNA, 18 nt, Human
uggaaggguucuggcugc

SEQ ID NO: 2239219 - RNA, 19 nt, Human
uggaaggguucuggcugcc

SEQ ID NO: 2239220 - RNA, 23 nt, Human
uggaaggggacacgugacagccg

SEQ ID NO: 2239221 - RNA, 16 nt, Human
uggaagcacagcuuca

SEQ ID NO: 2239222 - RNA, 16 nt, Human
uggaagauuuuaaauu

SEQ ID NO: 2239223 - RNA, 14 nt, Human
uggaagauuuuaaa

SEQ ID NO: 2239224 - RNA, 18 nt, Human
uggaagcaacaggaauca

SEQ ID NO: 2239225 - RNA, 13 nt, Human
uggaagauccugc

SEQ ID NO: 2239226 - RNA, 21 nt, Human
uggaagauccugcgggugggg

SEQ ID NO: 2239227 - RNA, 21 nt, Human
uggaagaggggacaggucccu

SEQ ID NO: 2239228 - RNA, 16 nt, Human
uggaaaugcugggcug

SEQ ID NO: 2239229 - RNA, 16 nt, Human
uggaagaggggacagg

SEQ ID NO: 2239230 - RNA, 17 nt, Human
uggaaaugggcagagca

SEQ ID NO: 2239231 - RNA, 15 nt, Human
uggaaaugcugggcu

SEQ ID NO: 2239232 - RNA, 20 nt, Human
uggaaaugcugggcugacgg

SEQ ID NO: 2239233 - RNA, 18 nt, Human
uggaaaugggcagagcag

SEQ ID NO: 2239234 - RNA, 13 nt, Human
uggaaaggcucag

SEQ ID NO: 2239235 - RNA, 23 nt, Human
uggaaaggcucagucucaggagc

SEQ ID NO: 2239236 - RNA, 21 nt, Human
uggaaaggcucagucucagga

SEQ ID NO: 2239237 - RNA, 20 nt, Human
uggaaaggcucagucucagg

SEQ ID NO: 2239238 - RNA, 17 nt, Human
uggaaaggcucagucuc

SEQ ID NO: 2239239 - RNA, 23 nt, Human
uggaaagggugcugcuucccucu

SEQ ID NO: 2239240 - RNA, 23 nt, Human
uggaaaggggagagccugcuggc

SEQ ID NO: 2239241 - RNA, 17 nt, Human
uggaaaggggggagcug

SEQ ID NO: 2239242 - RNA, 18 nt, Human
uggaaaggggggagcugg

SEQ ID NO: 2239243 - RNA, 19 nt, Human
uggaaaggggggagcuggg

SEQ ID NO: 2239244 - RNA, 13 nt, Human
uggaaaggggaga

SEQ ID NO: 2239245 - RNA, 14 nt, Human
uggaaaggggagag

SEQ ID NO: 2239246 - RNA, 15 nt, Human
uggaaaggggagagc

SEQ ID NO: 2239247 - RNA, 17 nt, Human
uggaaaggggagagccu

SEQ ID NO: 2239248 - RNA, 19 nt, Human
uggaaaggggagagccugc

SEQ ID NO: 2239249 - RNA, 21 nt, Human
uggaaaggggagagccugcug

SEQ ID NO: 2239250 - RNA, 22 nt, Human
uggaaaggggagagccugcugg

SEQ ID NO: 2239251 - RNA, 14 nt, Human
ugcuuuuggucugu

SEQ ID NO: 2239252 - RNA, 17 nt, Human
ugcuuuuggucugugug

SEQ ID NO: 2239253 - RNA, 14 nt, Human
ugcuuugugaacaa

SEQ ID NO: 2239254 - RNA, 16 nt, Human
ugcuuuucugcccugg

SEQ ID NO: 2239255 - RNA, 18 nt, Human
ugcuuuucugcccuggcu

SEQ ID NO: 2239256 - RNA, 17 nt, Human
ugcuuuucuguauuuua

SEQ ID NO: 2239257 - RNA, 13 nt, Human
ugcuuuucugucu

SEQ ID NO: 2239258 - RNA, 19 nt, Human
ugcuuuuggcaaaacucua

SEQ ID NO: 2239259 - RNA, 21 nt, Human
ugcuuuuggcaaaacucuacu

SEQ ID NO: 2239260 - RNA, 15 nt, Human
ugcuuguauagguuu

SEQ ID NO: 2239261 - RNA, 22 nt, Human
ugcuuguacauaaugcgugcau

SEQ ID NO: 2239262 - RNA, 16 nt, Human
ugcuuguacauaaugc

SEQ ID NO: 2239263 - RNA, 14 nt, Human
ugcuuguacauaau

SEQ ID NO: 2239264 - RNA, 22 nt, Human
ugcuuggguggagaagccauug

SEQ ID NO: 2239265 - RNA, 12 nt, Human
ugcuuugugauu

SEQ ID NO: 2239266 - RNA, 16 nt, Human
ugcuuugugauuuuug

SEQ ID NO: 2239267 - RNA, 14 nt, Human
ugcuuugugauuuu

SEQ ID NO: 2239268 - RNA, 20 nt, Human
ugcuuggguggagaagccau

SEQ ID NO: 2239269 - RNA, 21 nt, Human
ugcuuggguggagaagccauu

SEQ ID NO: 2239270 - RNA, 13 nt, Human
ugcuuguacauaa

SEQ ID NO: 2239271 - RNA, 12 nt, Human
ugcuuguacaua

SEQ ID NO: 2239272 - RNA, 14 nt, Human
ugcuuggaggaagg

SEQ ID NO: 2239273 - RNA, 19 nt, Human
ugcuugcaguagauuuucu

SEQ ID NO: 2239274 - RNA, 15 nt, Human
ugcuuggaggaagga

SEQ ID NO: 2239275 - RNA, 16 nt, Human
ugcuuggaggaaggaa

SEQ ID NO: 2239276 - RNA, 22 nt, Human
aggacagugcuucagccugagg

SEQ ID NO: 2239277 - RNA, 21 nt, Human
aggacagugcuucagccugag

SEQ ID NO: 2239278 - RNA, 20 nt, Human
aggacagugcuucagccuga

SEQ ID NO: 2239279 - RNA, 19 nt, Human
aggacagugcuucagccug

SEQ ID NO: 2239280 - RNA, 18 nt, Human
aggacagugcuucagccu

SEQ ID NO: 2239281 - RNA, 17 nt, Human
aggacagugcuucagcc

SEQ ID NO: 2239282 - RNA, 16 nt, Human
aggacagugcuucagc

SEQ ID NO: 2239283 - RNA, 15 nt, Human
aggacagugcuucag

SEQ ID NO: 2239284 - RNA, 23 nt, Human
aggacagcccuucuuuccacaga

SEQ ID NO: 2239285 - RNA, 19 nt, Human
aggacaguauuugugggga

SEQ ID NO: 2239286 - RNA, 12 nt, Human
aggacaguauuu

SEQ ID NO: 2239287 - RNA, 12 nt, Human
ugcuugauuuuu

SEQ ID NO: 2239288 - RNA, 22 nt, Human
ugcuugcacuuuguaacauguu

SEQ ID NO: 2239289 - RNA, 15 nt, Human
ugcuugcaguagauu

SEQ ID NO: 2239290 - RNA, 16 nt, Human
ugcuugcaguagauuu

SEQ ID NO: 2239291 - RNA, 17 nt, Human
ugcuugcaguagauuuu

SEQ ID NO: 2239292 - RNA, 23 nt, Human
ugcuugagucagguuugaguaga

SEQ ID NO: 2239293 - RNA, 20 nt, Human
aggacauaaauuagaggucu

SEQ ID NO: 2239294 - RNA, 13 nt, Human
aggacauaauggg

SEQ ID NO: 2239295 - RNA, 20 nt, Human
ugcuugagucagguuugagu

SEQ ID NO: 2239296 - RNA, 14 nt, Human
ugcuugagucaggu

SEQ ID NO: 2239297 - RNA, 15 nt, Human
aggacauaauggggu

SEQ ID NO: 2239298 - RNA, 21 nt, Human
ugcuugaggcaacucaucuua

SEQ ID NO: 2239299 - RNA, 19 nt, Human
aggcaccucacagaaauga

SEQ ID NO: 2239300 - RNA, 20 nt, Human
aggcaccucacaggccccag

SEQ ID NO: 2239301 - RNA, 20 nt, Human
aggcaccuaccaccacgccc

SEQ ID NO: 2239302 - RNA, 16 nt, Human
aggcacccccuggaga

SEQ ID NO: 2239303 - RNA, 15 nt, Human
aggcacccccuggag

SEQ ID NO: 2239304 - RNA, 18 nt, Human
aggcaccgagaauguugu

SEQ ID NO: 2239305 - RNA, 16 nt, Human
aggcaccgagaauguu

SEQ ID NO: 2239306 - RNA, 15 nt, Human
aggcaccgagaaugu

SEQ ID NO: 2239307 - RNA, 20 nt, Human
aggcacccuucuuuccucuu

SEQ ID NO: 2239308 - RNA, 20 nt, Human
aggcacccccuggagagaag

SEQ ID NO: 2239309 - RNA, 17 nt, Human
aggcacccccuggagag

SEQ ID NO: 2239310 - RNA, 19 nt, Human
aggcacccccuggagagaa

SEQ ID NO: 2239311 - RNA, 14 nt, Human
aggcaaugcuggcu

SEQ ID NO: 2239312 - RNA, 20 nt, Human
aggcacccaccaucaugucu

SEQ ID NO: 2239313 - RNA, 21 nt, Human
aggcacccaccaucaugucug

SEQ ID NO: 2239314 - RNA, 22 nt, Human
aggcacccaccaucaugucugg

SEQ ID NO: 2239315 - RNA, 13 nt, Human
aggcaagugaaga

SEQ ID NO: 2239316 - RNA, 13 nt, Human
aggcaaggucugg

SEQ ID NO: 2239317 - RNA, 15 nt, Human
aggcaaguuucuagc

SEQ ID NO: 2239318 - RNA, 17 nt, Human
aggcaagugaagaaaag

SEQ ID NO: 2239319 - RNA, 14 nt, Human
uggagcucguggaa

SEQ ID NO: 2239320 - RNA, 17 nt, Human
aggcaauaaaaaucaua

SEQ ID NO: 2239321 - RNA, 22 nt, Human
aggcaaugauuguuaauuuaca

SEQ ID NO: 2239322 - RNA, 14 nt, Human
aggcaauaaaaauc

SEQ ID NO: 2239323 - RNA, 18 nt, Human
aggcaaguuucuagcuag

SEQ ID NO: 2239324 - RNA, 13 nt, Human
aggcaaucauggu

SEQ ID NO: 2239325 - RNA, 16 nt, Human
uggagcgcaccugccc

SEQ ID NO: 2239326 - RNA, 14 nt, Human
uggagcgcaccugc

SEQ ID NO: 2239327 - RNA, 21 nt, Human
uggagccuguguaacagcucc

SEQ ID NO: 2239328 - RNA, 22 nt, Human
uggagccuguguaacagcuccu

SEQ ID NO: 2239329 - RNA, 19 nt, Human
uggagccuuugaauaaaaa

SEQ ID NO: 2239330 - RNA, 19 nt, Human
uggagcccgcacccccacc

SEQ ID NO: 2239331 - RNA, 17 nt, Human
uggagccuguguaacag

SEQ ID NO: 2239332 - RNA, 18 nt, Human
uggagccuguguaacagc

SEQ ID NO: 2239333 - RNA, 20 nt, Human
uggagccuguguaacagcuc

SEQ ID NO: 2239334 - RNA, 22 nt, Human
uggagcccgcacccccacccuu

SEQ ID NO: 2239335 - RNA, 15 nt, Human
uggagcccuuggguu

SEQ ID NO: 2239336 - RNA, 18 nt, Human
uggagcucagagagggca

SEQ ID NO: 2239337 - RNA, 22 nt, Human
uggagcgcaccugcccccuggu

SEQ ID NO: 2239338 - RNA, 21 nt, Human
uggagcgcaccugcccccugg

SEQ ID NO: 2239339 - RNA, 19 nt, Human
uggacuuuccacccccucc

SEQ ID NO: 2239340 - RNA, 18 nt, Human
uggacuuuccacccccuc

SEQ ID NO: 2239341 - RNA, 13 nt, Human
uggacuuuccugc

SEQ ID NO: 2239342 - RNA, 16 nt, Human
uggacuuuccaccccc

SEQ ID NO: 2239343 - RNA, 15 nt, Human
uggacuuguccucag

SEQ ID NO: 2239344 - RNA, 20 nt, Human
uggacuuguccucagcagcu

SEQ ID NO: 2239345 - RNA, 13 nt, Human
uggacuuguauau

SEQ ID NO: 2239346 - RNA, 14 nt, Human
uggacuuguauauu

SEQ ID NO: 2239347 - RNA, 15 nt, Human
uggacuuguauauuu

SEQ ID NO: 2239348 - RNA, 17 nt, Human
uggacuuguauauuugu

SEQ ID NO: 2239349 - RNA, 18 nt, Human
uggacuuguauauuugua

SEQ ID NO: 2239350 - RNA, 20 nt, Human
uggacuuguauauuuguaca

SEQ ID NO: 2239351 - RNA, 21 nt, Human
uggacuuguauauuuguacaa

SEQ ID NO: 2239352 - RNA, 22 nt, Human
uggacuuguauauuuguacaaa

SEQ ID NO: 2239353 - RNA, 17 nt, Human
uggacuugagcuuggca

SEQ ID NO: 2239354 - RNA, 14 nt, Human
uggaccuuccugcc

SEQ ID NO: 2239355 - RNA, 19 nt, Human
uggaccuuccugccaccag

SEQ ID NO: 2239356 - RNA, 18 nt, Human
uggacuuggucaccagcu

SEQ ID NO: 2239357 - RNA, 18 nt, Human
uggacuugaggauuuuga

SEQ ID NO: 2239358 - RNA, 20 nt, Human
uggacuuggucaccagcucc

SEQ ID NO: 2239359 - RNA, 15 nt, Human
uggacugugugcuca

SEQ ID NO: 2239360 - RNA, 15 nt, Human
uggagaacuccuagg

SEQ ID NO: 2239361 - RNA, 21 nt, Human
uggagaacuagaaccuggagg

SEQ ID NO: 2239362 - RNA, 19 nt, Human
uggagaacuagaaccugga

SEQ ID NO: 2239363 - RNA, 20 nt, Human
uggagaacuagaaccuggag

SEQ ID NO: 2239364 - RNA, 14 nt, Human
uggagaacuagaga

SEQ ID NO: 2239365 - RNA, 13 nt, Human
uggagaagaacug

SEQ ID NO: 2239366 - RNA, 20 nt, Human
uggacuuuccacccccuccc

SEQ ID NO: 2239367 - RNA, 19 nt, Human
uggacuuuccugcaacuca

SEQ ID NO: 2239368 - RNA, 18 nt, Human
uggagaacuagaaccugg

SEQ ID NO: 2239369 - RNA, 21 nt, Human
uggagaaauuauuuaauaaaa

SEQ ID NO: 2239370 - RNA, 14 nt, Human
uggacuuuccugca

SEQ ID NO: 2239371 - RNA, 18 nt, Human
uggacuuuccugcaacuc

SEQ ID NO: 2239372 - RNA, 18 nt, Human
uggagcccgcacccccac

SEQ ID NO: 2239373 - RNA, 17 nt, Human
uggagcccgcaccccca

SEQ ID NO: 2239374 - RNA, 16 nt, Human
uggagcccgcaccccc

SEQ ID NO: 2239375 - RNA, 13 nt, Human
uggagccccuggg

SEQ ID NO: 2239376 - RNA, 14 nt, Human
uggagccccugggu

SEQ ID NO: 2239377 - RNA, 15 nt, Human
uggagccccugggug

SEQ ID NO: 2239378 - RNA, 23 nt, Human
uggagccccuggguggguggugg

SEQ ID NO: 2239379 - RNA, 14 nt, Human
uggagccccaucag

SEQ ID NO: 2239380 - RNA, 22 nt, Human
uggagccccagcccccuuuggg

SEQ ID NO: 2239381 - RNA, 12 nt, Human
uggagccccugg

SEQ ID NO: 2239382 - RNA, 13 nt, Human
uggagccccagcc

SEQ ID NO: 2239383 - RNA, 14 nt, Human
uggagccccagccc

SEQ ID NO: 2239384 - RNA, 15 nt, Human
uggagccccagcccc

SEQ ID NO: 2239385 - RNA, 16 nt, Human
uggagccccagccccc

SEQ ID NO: 2239386 - RNA, 12 nt, Human
uggagccccagc

SEQ ID NO: 2239387 - RNA, 20 nt, Human
uggagcccagggagcggaaa

SEQ ID NO: 2239388 - RNA, 15 nt, Human
uggagccccacacug

SEQ ID NO: 2239389 - RNA, 15 nt, Human
uggagcccagggagc

SEQ ID NO: 2239390 - RNA, 22 nt, Human
uggagcccaggcgggagcggug

SEQ ID NO: 2239391 - RNA, 14 nt, Human
uggagccccacacu

SEQ ID NO: 2239392 - RNA, 18 nt, Human
uggagcccaggcgggagc

SEQ ID NO: 2239393 - RNA, 16 nt, Human
uggagaagcucaccca

SEQ ID NO: 2239394 - RNA, 19 nt, Human
uggagaagcucccaggaac

SEQ ID NO: 2239395 - RNA, 14 nt, Human
uggagaagccauug

SEQ ID NO: 2239396 - RNA, 17 nt, Human
uggagaagccauugucu

SEQ ID NO: 2239397 - RNA, 18 nt, Human
uggagaagccauugucuu

SEQ ID NO: 2239398 - RNA, 19 nt, Human
uggagaagccauugucuuc

SEQ ID NO: 2239399 - RNA, 17 nt, Human
uggagaacuccuagggu

SEQ ID NO: 2239400 - RNA, 22 nt, Human
uggagaagccacaggccugaga

SEQ ID NO: 2239401 - RNA, 23 nt, Human
uggagaagccacaggccugagau

SEQ ID NO: 2239402 - RNA, 12 nt, Human
uggagaagccau

SEQ ID NO: 2239403 - RNA, 13 nt, Human
uggagaagccauu

SEQ ID NO: 2239404 - RNA, 14 nt, Human
uggagaagaacuga

SEQ ID NO: 2239405 - RNA, 22 nt, Human
uggagaagcggcuggcagccca

SEQ ID NO: 2239406 - RNA, 13 nt, Human
uggagaagcggcu

SEQ ID NO: 2239407 - RNA, 18 nt, Human
uggacaccaggagucccu

SEQ ID NO: 2239408 - RNA, 23 nt, Human
uggacacagcucuucuccaggcu

SEQ ID NO: 2239409 - RNA, 16 nt, Human
uggacccugaggccca

SEQ ID NO: 2239410 - RNA, 18 nt, Human
uggacccugaggcccaga

SEQ ID NO: 2239411 - RNA, 23 nt, Human
uggacccuguggaugauaaaaca

SEQ ID NO: 2239412 - RNA, 21 nt, Human
uggacccugaggcccagaggg

SEQ ID NO: 2239413 - RNA, 19 nt, Human
uggacccugaggcccagag

SEQ ID NO: 2239414 - RNA, 20 nt, Human
uggacccugaggcccagagg

SEQ ID NO: 2239415 - RNA, 16 nt, Human
uggaccugccuccugc

SEQ ID NO: 2239416 - RNA, 15 nt, Human
uggacccuguugcua

SEQ ID NO: 2239417 - RNA, 16 nt, Human
uggacccuguugcuaa

SEQ ID NO: 2239418 - RNA, 17 nt, Human
uggaccugccuccugcc

SEQ ID NO: 2239419 - RNA, 18 nt, Human
uggaccugccuccugccu

SEQ ID NO: 2239420 - RNA, 19 nt, Human
uggaccugccuccugccug

SEQ ID NO: 2239421 - RNA, 15 nt, Human
uggacccugaggccc

SEQ ID NO: 2239422 - RNA, 13 nt, Human
uggacccuguugc

SEQ ID NO: 2239423 - RNA, 14 nt, Human
uggacccuguugcu

SEQ ID NO: 2239424 - RNA, 21 nt, Human
uggaccuuaggccuuccucuc

SEQ ID NO: 2239425 - RNA, 12 nt, Human
uggaccuuccug

SEQ ID NO: 2239426 - RNA, 13 nt, Human
uggaccuuccugc

SEQ ID NO: 2239427 - RNA, 19 nt, Human
uggaccuuaggccuuccuc

SEQ ID NO: 2239428 - RNA, 17 nt, Human
uggaccuuaggccuucc

SEQ ID NO: 2239429 - RNA, 16 nt, Human
uggaccuuaggccuuc

SEQ ID NO: 2239430 - RNA, 15 nt, Human
uggaccuuaggccuu

SEQ ID NO: 2239431 - RNA, 20 nt, Human
uggaccugccuccugccugc

SEQ ID NO: 2239432 - RNA, 20 nt, Human
uggaccuugaacuggguacu

SEQ ID NO: 2239433 - RNA, 22 nt, Human
aggcaaacccaucaacaaaaau

SEQ ID NO: 2239434 - RNA, 20 nt, Human
uggaauuauuuuaaaagaua

SEQ ID NO: 2239435 - RNA, 14 nt, Human
aggcaaauguguac

SEQ ID NO: 2239436 - RNA, 19 nt, Human
uggaauuauuuuaaaagau

SEQ ID NO: 2239437 - RNA, 13 nt, Human
aggcaaaugugua

SEQ ID NO: 2239438 - RNA, 18 nt, Human
aggcaaaugacuuuggac

SEQ ID NO: 2239439 - RNA, 14 nt, Human
aggcaaaugcccaa

SEQ ID NO: 2239440 - RNA, 15 nt, Human
aggcaaaugcccaag

SEQ ID NO: 2239441 - RNA, 15 nt, Human
aggcaaaugacuuug

SEQ ID NO: 2239442 - RNA, 14 nt, Human
aggcaaaugacuuu

SEQ ID NO: 2239443 - RNA, 18 nt, Human
aggaucucuugagccugg

SEQ ID NO: 2239444 - RNA, 17 nt, Human
aggaucucuugagccug

SEQ ID NO: 2239445 - RNA, 19 nt, Human
aggaucucuugagccuggg

SEQ ID NO: 2239446 - RNA, 20 nt, Human
aggcaaaauugcaaaucuug

SEQ ID NO: 2239447 - RNA, 19 nt, Human
aggcaaaauugcaaaucuu

SEQ ID NO: 2239448 - RNA, 12 nt, Human
aggaucucuuga

SEQ ID NO: 2239449 - RNA, 16 nt, Human
uggacaaucaugaaau

SEQ ID NO: 2239450 - RNA, 14 nt, Human
uggacaaggagguc

SEQ ID NO: 2239451 - RNA, 16 nt, Human
uggacaaggaggucug

SEQ ID NO: 2239452 - RNA, 13 nt, Human
uggacaaggaggu

SEQ ID NO: 2239453 - RNA, 22 nt, Human
uggaauugauuugcauugaaca

SEQ ID NO: 2239454 - RNA, 17 nt, Human
uggacaagccaacuugu

SEQ ID NO: 2239455 - RNA, 20 nt, Human
uggaauugauuugcauugaa

SEQ ID NO: 2239456 - RNA, 19 nt, Human
uggaauugauuugcauuga

SEQ ID NO: 2239457 - RNA, 18 nt, Human
uggaauugauuugcauug

SEQ ID NO: 2239458 - RNA, 17 nt, Human
uggaauugauuugcauu

SEQ ID NO: 2239459 - RNA, 16 nt, Human
uggaauugauuugcau

SEQ ID NO: 2239460 - RNA, 15 nt, Human
uggaauugauuugca

SEQ ID NO: 2239461 - RNA, 12 nt, Human
uggaauugauuu

SEQ ID NO: 2239462 - RNA, 13 nt, Human
uggaauucuaaca

SEQ ID NO: 2239463 - RNA, 17 nt, Human
uggacacacaaggugca

SEQ ID NO: 2239464 - RNA, 18 nt, Human
uggacaauacccccaggc

SEQ ID NO: 2239465 - RNA, 21 nt, Human
uggacacagcucuucuccagg

SEQ ID NO: 2239466 - RNA, 22 nt, Human
uggacacagcucuucuccaggc

SEQ ID NO: 2239467 - RNA, 13 nt, Human
uggacacagcucu

SEQ ID NO: 2239468 - RNA, 14 nt, Human
uggacacagcucuu

SEQ ID NO: 2239469 - RNA, 14 nt, Human
uggccaucucugga

SEQ ID NO: 2239470 - RNA, 13 nt, Human
uggccaucuccac

SEQ ID NO: 2239471 - RNA, 17 nt, Human
uggccaucucuggaugc

SEQ ID NO: 2239472 - RNA, 16 nt, Human
uggccaucuccacccc

SEQ ID NO: 2239473 - RNA, 16 nt, Human
uggccaucucuggaug

SEQ ID NO: 2239474 - RNA, 16 nt, Human
uggccaguuaucccuu

SEQ ID NO: 2239475 - RNA, 13 nt, Human
uggccaucccaca

SEQ ID NO: 2239476 - RNA, 16 nt, Human
uggccagugugauccc

SEQ ID NO: 2239477 - RNA, 14 nt, Human
uggccagugucugu

SEQ ID NO: 2239478 - RNA, 23 nt, Human
uggccagugugacaaggauugcu

SEQ ID NO: 2239479 - RNA, 16 nt, Human
uggccagguggccacu

SEQ ID NO: 2239480 - RNA, 17 nt, Human
uggccagguggccacuc

SEQ ID NO: 2239481 - RNA, 19 nt, Human
uggccagguggccacucca

SEQ ID NO: 2239482 - RNA, 14 nt, Human
uggccaguccaggc

SEQ ID NO: 2239483 - RNA, 15 nt, Human
uggccaguccaggcu

SEQ ID NO: 2239484 - RNA, 21 nt, Human
uggccaaagccaaagcuaggc

SEQ ID NO: 2239485 - RNA, 23 nt, Human
uggccaaagccaaagcuaggccu

SEQ ID NO: 2239486 - RNA, 20 nt, Human
uggccaccucucuccuuugc

SEQ ID NO: 2239487 - RNA, 15 nt, Human
uggccaccucucucc

SEQ ID NO: 2239488 - RNA, 23 nt, Human
uggccaccaggcuggcgcagcca

SEQ ID NO: 2239489 - RNA, 22 nt, Human
uggccacccguucugcuggccu

SEQ ID NO: 2239490 - RNA, 19 nt, Human
uggccacccguucugcugg

SEQ ID NO: 2239491 - RNA, 21 nt, Human
uggccaccaggcuggcgcagc

SEQ ID NO: 2239492 - RNA, 22 nt, Human
uggccaccaggcuggcgcagcc

SEQ ID NO: 2239493 - RNA, 11 nt, Human
uggccaggugg

SEQ ID NO: 2239494 - RNA, 15 nt, Human
uggccagguggccac

SEQ ID NO: 2239495 - RNA, 17 nt, Human
uggccacaguagucuug

SEQ ID NO: 2239496 - RNA, 13 nt, Human
uggccaccacccc

SEQ ID NO: 2239497 - RNA, 15 nt, Human
uggccaccacccccc

SEQ ID NO: 2239498 - RNA, 18 nt, Human
uggccaccaccccccacu

SEQ ID NO: 2239499 - RNA, 23 nt, Human
uggccaccaccccccacucugug

SEQ ID NO: 2239500 - RNA, 12 nt, Human
uggccaccaggc

SEQ ID NO: 2239501 - RNA, 13 nt, Human
uggccaccaggcu

SEQ ID NO: 2239502 - RNA, 14 nt, Human
uggccaccaggcug

SEQ ID NO: 2239503 - RNA, 15 nt, Human
uggccaccaggcugg

SEQ ID NO: 2239504 - RNA, 16 nt, Human
uggccaccaggcuggc

SEQ ID NO: 2239505 - RNA, 17 nt, Human
uggccaccaggcuggcg

SEQ ID NO: 2239506 - RNA, 18 nt, Human
uggccaccaggcuggcgc

SEQ ID NO: 2239507 - RNA, 19 nt, Human
uggccaccaggcuggcgca

SEQ ID NO: 2239508 - RNA, 20 nt, Human
uggccaccaggcuggcgcag

SEQ ID NO: 2239509 - RNA, 18 nt, Human
aggccccgcuuguccagc

SEQ ID NO: 2239510 - RNA, 17 nt, Human
aggccccgcuuguccag

SEQ ID NO: 2239511 - RNA, 15 nt, Human
aggccccgcuugucc

SEQ ID NO: 2239512 - RNA, 13 nt, Human
aggccccaggaag

SEQ ID NO: 2239513 - RNA, 21 nt, Human
aggccccgcuuguccagcgcc

SEQ ID NO: 2239514 - RNA, 20 nt, Human
aggccccgcuuguccagcgc

SEQ ID NO: 2239515 - RNA, 22 nt, Human
aggccccgcuuguccagcgccu

SEQ ID NO: 2239516 - RNA, 21 nt, Human
aggccccuauguaguccgugc

SEQ ID NO: 2239517 - RNA, 17 nt, Human
aggccccgcccaggcuu

SEQ ID NO: 2239518 - RNA, 12 nt, Human
aggccccugcca

SEQ ID NO: 2239519 - RNA, 16 nt, Human
aggccugagauuucau

SEQ ID NO: 2239520 - RNA, 14 nt, Human
aggccugaggauga

SEQ ID NO: 2239521 - RNA, 22 nt, Human
aggccugagcgcuccugccgca

SEQ ID NO: 2239522 - RNA, 19 nt, Human
aggccugagcgcuccugcc

SEQ ID NO: 2239523 - RNA, 21 nt, Human
aggccugagcgcuccugccgc

SEQ ID NO: 2239524 - RNA, 17 nt, Human
aggccugagauuucauc

SEQ ID NO: 2239525 - RNA, 19 nt, Human
aggccugagauuucaucug

SEQ ID NO: 2239526 - RNA, 20 nt, Human
aggccugagauuucaucugc

SEQ ID NO: 2239527 - RNA, 21 nt, Human
aggccugagauuucaucugcu

SEQ ID NO: 2239528 - RNA, 22 nt, Human
aggccugagauuucaucugcuc

SEQ ID NO: 2239529 - RNA, 23 nt, Human
aggccugagauuucaucugcucu

SEQ ID NO: 2239530 - RNA, 14 nt, Human
aggccugagcgcuc

SEQ ID NO: 2239531 - RNA, 18 nt, Human
aggccugagcgcuccugc

SEQ ID NO: 2239532 - RNA, 20 nt, Human
uggcaucuuugccuugggcu

SEQ ID NO: 2239533 - RNA, 16 nt, Human
uggcaucuuugccuug

SEQ ID NO: 2239534 - RNA, 17 nt, Human
uggcauccugugaaguc

SEQ ID NO: 2239535 - RNA, 21 nt, Human
uggcaucgcaccauucugacu

SEQ ID NO: 2239536 - RNA, 15 nt, Human
uggcauccugugaag

SEQ ID NO: 2239537 - RNA, 16 nt, Human
uggcauccugugaagu

SEQ ID NO: 2239538 - RNA, 22 nt, Human
uggcaucgcaccauucugacuc

SEQ ID NO: 2239539 - RNA, 23 nt, Human
uggcaucgcaccauucugacucg

SEQ ID NO: 2239540 - RNA, 20 nt, Human
uggcauugucccugugccua

SEQ ID NO: 2239541 - RNA, 16 nt, Human
uggcauugucccugug

SEQ ID NO: 2239542 - RNA, 19 nt, Human
uggcauugucccugugccu

SEQ ID NO: 2239543 - RNA, 19 nt, Human
uggcauuggcagcaggugc

SEQ ID NO: 2239544 - RNA, 20 nt, Human
uggcauuggcagcaggugcu

SEQ ID NO: 2239545 - RNA, 21 nt, Human
uggcauuggcagcaggugcug

SEQ ID NO: 2239546 - RNA, 23 nt, Human
uggcaucuuugccuugggcugcu

SEQ ID NO: 2239547 - RNA, 21 nt, Human
uggcaucuuugccuugggcug

SEQ ID NO: 2239548 - RNA, 14 nt, Human
uggcauuggcagca

SEQ ID NO: 2239549 - RNA, 16 nt, Human
aggccugaggaugagc

SEQ ID NO: 2239550 - RNA, 17 nt, Human
uggcauagcccagacac

SEQ ID NO: 2239551 - RNA, 22 nt, Human
uggcauacgccuguaguccuag

SEQ ID NO: 2239552 - RNA, 19 nt, Human
uggcauagcccagacacag

SEQ ID NO: 2239553 - RNA, 13 nt, Human
uggcauccuguga

SEQ ID NO: 2239554 - RNA, 21 nt, Human
uggccugaagaguccucugaa

SEQ ID NO: 2239555 - RNA, 23 nt, Human
uggccucuuuucagaucauggca

SEQ ID NO: 2239556 - RNA, 14 nt, Human
uggccugagaagag

SEQ ID NO: 2239557 - RNA, 12 nt, Human
uggccuggcccc

SEQ ID NO: 2239558 - RNA, 22 nt, Human
uggccguugauguuggcuggga

SEQ ID NO: 2239559 - RNA, 14 nt, Human
uggccguuggccac

SEQ ID NO: 2239560 - RNA, 17 nt, Human
uggccucuugagcagug

SEQ ID NO: 2239561 - RNA, 19 nt, Human
uggccucuugagcaguggc

SEQ ID NO: 2239562 - RNA, 22 nt, Human
uggccucuuugucuaaaacaau

SEQ ID NO: 2239563 - RNA, 14 nt, Human
uggccucuuuucag

SEQ ID NO: 2239564 - RNA, 14 nt, Human
uggccucuuugucu

SEQ ID NO: 2239565 - RNA, 20 nt, Human
uggccucuugagcaguggcu

SEQ ID NO: 2239566 - RNA, 22 nt, Human
uggccucuugagcaguggcugg

SEQ ID NO: 2239567 - RNA, 13 nt, Human
uggccugggagag

SEQ ID NO: 2239568 - RNA, 13 nt, Human
uggccuggccggc

SEQ ID NO: 2239569 - RNA, 16 nt, Human
uggccuggcuucuccu

SEQ ID NO: 2239570 - RNA, 21 nt, Human
uggccuguucuucuauggguu

SEQ ID NO: 2239571 - RNA, 16 nt, Human
uggccuggccggcaac

SEQ ID NO: 2239572 - RNA, 18 nt, Human
uggccuggccccucaggg

SEQ ID NO: 2239573 - RNA, 21 nt, Human
uggccuggccccucagggucc

SEQ ID NO: 2239574 - RNA, 12 nt, Human
aggccuggggac

SEQ ID NO: 2239575 - RNA, 18 nt, Human
aggccugggggcugggca

SEQ ID NO: 2239576 - RNA, 17 nt, Human
aggccugggggcaggga

SEQ ID NO: 2239577 - RNA, 12 nt, Human
aggccugugugu

SEQ ID NO: 2239578 - RNA, 23 nt, Human
aggccugugugugaaaggaagcu

SEQ ID NO: 2239579 - RNA, 20 nt, Human
aggccugggggcugggcaga

SEQ ID NO: 2239580 - RNA, 17 nt, Human
uggccuuccccagccuc

SEQ ID NO: 2239581 - RNA, 23 nt, Human
uggccuguuuuagaagguucucu

SEQ ID NO: 2239582 - RNA, 16 nt, Human
uggccuuccccagccu

SEQ ID NO: 2239583 - RNA, 18 nt, Human
uggccuuccauuuauaug

SEQ ID NO: 2239584 - RNA, 18 nt, Human
uggccuguuucaacacag

SEQ ID NO: 2239585 - RNA, 18 nt, Human
uggccuuccccagccucu

SEQ ID NO: 2239586 - RNA, 14 nt, Human
uggccuuccugccc

SEQ ID NO: 2239587 - RNA, 16 nt, Human
uggccuuccugcccua

SEQ ID NO: 2239588 - RNA, 20 nt, Human
aggccugggccgcugccacg

SEQ ID NO: 2239589 - RNA, 21 nt, Human
aggccugggccgcugccacgu

SEQ ID NO: 2239590 - RNA, 14 nt, Human
uggccuucggccuc

SEQ ID NO: 2239591 - RNA, 14 nt, Human
uggccaugccucag

SEQ ID NO: 2239592 - RNA, 15 nt, Human
uggccaugccucagc

SEQ ID NO: 2239593 - RNA, 17 nt, Human
uggccaugccucagccc

SEQ ID NO: 2239594 - RNA, 18 nt, Human
uggccaugccucagcccu

SEQ ID NO: 2239595 - RNA, 20 nt, Human
uggccaugccucagcccuga

SEQ ID NO: 2239596 - RNA, 22 nt, Human
uggccaugccacccuguuuuca

SEQ ID NO: 2239597 - RNA, 16 nt, Human
uggccaugguaccccc

SEQ ID NO: 2239598 - RNA, 18 nt, Human
uggccaugguacccccuu

SEQ ID NO: 2239599 - RNA, 22 nt, Human
uggccaugguacccccuucugg

SEQ ID NO: 2239600 - RNA, 13 nt, Human
uggcccacgcacu

SEQ ID NO: 2239601 - RNA, 14 nt, Human
uggcccugcccugg

SEQ ID NO: 2239602 - RNA, 16 nt, Human
uggccauuuagccacc

SEQ ID NO: 2239603 - RNA, 17 nt, Human
uggccauucuauugugg

SEQ ID NO: 2239604 - RNA, 15 nt, Human
uggccauuugcuuuu

SEQ ID NO: 2239605 - RNA, 14 nt, Human
uggccauuugcuuu

SEQ ID NO: 2239606 - RNA, 19 nt, Human
uggcccaaguggcagagcu

SEQ ID NO: 2239607 - RNA, 21 nt, Human
uggcccaaguggcagagcuug

SEQ ID NO: 2239608 - RNA, 19 nt, Human
uggcccacagcaggugcug

SEQ ID NO: 2239609 - RNA, 19 nt, Human
uggccauuuagccaccauc

SEQ ID NO: 2239610 - RNA, 19 nt, Human
uggcccaaaacgucuuauu

SEQ ID NO: 2239611 - RNA, 12 nt, Human
uggcccuggggu

SEQ ID NO: 2239612 - RNA, 13 nt, Human
uggcccugggguc

SEQ ID NO: 2239613 - RNA, 13 nt, Human
uggcccugucccu

SEQ ID NO: 2239614 - RNA, 23 nt, Human
uggccgggcgcgguggcucacgc

SEQ ID NO: 2239615 - RNA, 18 nt, Human
uggcccuggccugcuggg

SEQ ID NO: 2239616 - RNA, 17 nt, Human
uggcccuggccugcugg

SEQ ID NO: 2239617 - RNA, 16 nt, Human
uggcccuggccugcug

SEQ ID NO: 2239618 - RNA, 15 nt, Human
uggcccuggccugcu

SEQ ID NO: 2239619 - RNA, 14 nt, Human
uggcccuggccugc

SEQ ID NO: 2239620 - RNA, 13 nt, Human
uggcccuggccug

SEQ ID NO: 2239621 - RNA, 12 nt, Human
uggcccugccuu

SEQ ID NO: 2239622 - RNA, 11 nt, Human
uggcccugccu

SEQ ID NO: 2239623 - RNA, 16 nt, Human
uggcccugccuucuuc

SEQ ID NO: 2239624 - RNA, 16 nt, Human
uggccuaaaaaugcaa

SEQ ID NO: 2239625 - RNA, 13 nt, Human
uggccucuucaga

SEQ ID NO: 2239626 - RNA, 14 nt, Human
uggccgugggccug

SEQ ID NO: 2239627 - RNA, 22 nt, Human
uggccggucugcaagucagagg

SEQ ID NO: 2239628 - RNA, 19 nt, Human
uggccgugggccuggggua

SEQ ID NO: 2239629 - RNA, 14 nt, Human
uggccguuaucugg

SEQ ID NO: 2239630 - RNA, 19 nt, Human
uggccguugauguuggcug

SEQ ID NO: 2239631 - RNA, 21 nt, Human
uggccguugauguuggcuggg

SEQ ID NO: 2239632 - RNA, 19 nt, Human
uggcccuggggucccacga

SEQ ID NO: 2239633 - RNA, 15 nt, Human
uggcccugucccucc

SEQ ID NO: 2239634 - RNA, 17 nt, Human
uggccgggugcgguggc

SEQ ID NO: 2239635 - RNA, 18 nt, Human
uggccgggugcgguggcu

SEQ ID NO: 2239636 - RNA, 15 nt, Human
uggccggucugcaag

SEQ ID NO: 2239637 - RNA, 18 nt, Human
uggccggucugcaaguca

SEQ ID NO: 2239638 - RNA, 20 nt, Human
uggccggucugcaagucaga

SEQ ID NO: 2239639 - RNA, 21 nt, Human
uggccggucugcaagucagag

SEQ ID NO: 2239640 - RNA, 18 nt, Human
aggccaaggcggguggau

SEQ ID NO: 2239641 - RNA, 17 nt, Human
aggccaaggccuucucc

SEQ ID NO: 2239642 - RNA, 16 nt, Human
aggccaaggugggagg

SEQ ID NO: 2239643 - RNA, 20 nt, Human
aggccaagagcagaggcagc

SEQ ID NO: 2239644 - RNA, 18 nt, Human
aggccaagagcagaggca

SEQ ID NO: 2239645 - RNA, 17 nt, Human
aggccaagagcagaggc

SEQ ID NO: 2239646 - RNA, 14 nt, Human
aggccaagagcaga

SEQ ID NO: 2239647 - RNA, 14 nt, Human
aggccaagaggcug

SEQ ID NO: 2239648 - RNA, 20 nt, Human
uggaggggugguccugacuc

SEQ ID NO: 2239649 - RNA, 19 nt, Human
uggaggggugguccugacu

SEQ ID NO: 2239650 - RNA, 13 nt, Human
uggaggggugugg

SEQ ID NO: 2239651 - RNA, 14 nt, Human
uggagggguguggc

SEQ ID NO: 2239652 - RNA, 11 nt, Human
uggaggggugu

SEQ ID NO: 2239653 - RNA, 17 nt, Human
uggagggguguggcagu

SEQ ID NO: 2239654 - RNA, 18 nt, Human
uggagggguguggcagug

SEQ ID NO: 2239655 - RNA, 19 nt, Human
uggagggguguggcagugg

SEQ ID NO: 2239656 - RNA, 14 nt, Human
uggagguacacucu

SEQ ID NO: 2239657 - RNA, 20 nt, Human
uggagggugggagagcccag

SEQ ID NO: 2239658 - RNA, 20 nt, Human
uggagguacgaaaagagggg

SEQ ID NO: 2239659 - RNA, 23 nt, Human
uggagggguguggcuccuuccca

SEQ ID NO: 2239660 - RNA, 15 nt, Human
uggagggucccaagc

SEQ ID NO: 2239661 - RNA, 16 nt, Human
uggagggucccaagcu

SEQ ID NO: 2239662 - RNA, 17 nt, Human
uggagggucccaagcug

SEQ ID NO: 2239663 - RNA, 18 nt, Human
uggagggucccaagcugg

SEQ ID NO: 2239664 - RNA, 19 nt, Human
uggagggucccaagcuggg

SEQ ID NO: 2239665 - RNA, 21 nt, Human
uggagggucccaagcugggcc

SEQ ID NO: 2239666 - RNA, 21 nt, Human
aggcaccuauaaaacagguca

SEQ ID NO: 2239667 - RNA, 22 nt, Human
aggcaccucacagaaaugagau

SEQ ID NO: 2239668 - RNA, 18 nt, Human
aggcagccaggccacaag

SEQ ID NO: 2239669 - RNA, 16 nt, Human
aggcagccccauucug

SEQ ID NO: 2239670 - RNA, 17 nt, Human
aggcagccccauucugc

SEQ ID NO: 2239671 - RNA, 16 nt, Human
aggccaaaggaagcac

SEQ ID NO: 2239672 - RNA, 18 nt, Human
aggccaaaggaagcacau

SEQ ID NO: 2239673 - RNA, 19 nt, Human
aggccaaaggaagcacaug

SEQ ID NO: 2239674 - RNA, 14 nt, Human
aggccaagaaucaa

SEQ ID NO: 2239675 - RNA, 17 nt, Human
uggauugguguaaaagg

SEQ ID NO: 2239676 - RNA, 18 nt, Human
uggauuggguuaugaaua

SEQ ID NO: 2239677 - RNA, 14 nt, Human
uggauugggguccc

SEQ ID NO: 2239678 - RNA, 23 nt, Human
uggauuggauuauuuaauaacau

SEQ ID NO: 2239679 - RNA, 15 nt, Human
uggauuauuuaauaa

SEQ ID NO: 2239680 - RNA, 20 nt, Human
uggauuggagauagggaaag

SEQ ID NO: 2239681 - RNA, 21 nt, Human
uggauuggagauagggaaaga

SEQ ID NO: 2239682 - RNA, 15 nt, Human
uggauuggauuauuu

SEQ ID NO: 2239683 - RNA, 16 nt, Human
uggauuggauuauuua

SEQ ID NO: 2239684 - RNA, 17 nt, Human
uggauuggauuauuuaa

SEQ ID NO: 2239685 - RNA, 20 nt, Human
uggauuggauuauuuaauaa

SEQ ID NO: 2239686 - RNA, 21 nt, Human
uggauuggauuauuuaauaac

SEQ ID NO: 2239687 - RNA, 21 nt, Human
uggauuguccccgacccuugc

SEQ ID NO: 2239688 - RNA, 13 nt, Human
uggcaauauagaa

SEQ ID NO: 2239689 - RNA, 13 nt, Human
uggauuguccccg

SEQ ID NO: 2239690 - RNA, 20 nt, Human
uggauuacugccauucacuu

SEQ ID NO: 2239691 - RNA, 17 nt, Human
uggauuauauuaugaag

SEQ ID NO: 2239692 - RNA, 17 nt, Human
uggauuaauuaaaugca

SEQ ID NO: 2239693 - RNA, 13 nt, Human
uggauuauucauu

SEQ ID NO: 2239694 - RNA, 14 nt, Human
uggauuauucauuu

SEQ ID NO: 2239695 - RNA, 16 nt, Human
uggauuauucauuuaa

SEQ ID NO: 2239696 - RNA, 17 nt, Human
uggauuauucauuuaaa

SEQ ID NO: 2239697 - RNA, 18 nt, Human
uggauuauucauuuaaaa

SEQ ID NO: 2239698 - RNA, 19 nt, Human
uggauuauucauuuaaaau

SEQ ID NO: 2239699 - RNA, 20 nt, Human
uggauuauucauuuaaaaug

SEQ ID NO: 2239700 - RNA, 13 nt, Human
uggauuauuuaau

SEQ ID NO: 2239701 - RNA, 14 nt, Human
uggauuauuuaaua

SEQ ID NO: 2239702 - RNA, 16 nt, Human
uggauuauuuaauaac

SEQ ID NO: 2239703 - RNA, 14 nt, Human
uggagguugcagug

SEQ ID NO: 2239704 - RNA, 20 nt, Human
uggagguugauaacuuugcu

SEQ ID NO: 2239705 - RNA, 14 nt, Human
uggagguugauaac

SEQ ID NO: 2239706 - RNA, 17 nt, Human
uggagguugauaacuuu

SEQ ID NO: 2239707 - RNA, 15 nt, Human
uggagguugaagcca

SEQ ID NO: 2239708 - RNA, 17 nt, Human
uggagguugaagccaag

SEQ ID NO: 2239709 - RNA, 18 nt, Human
uggagguugaagccaagu

SEQ ID NO: 2239710 - RNA, 22 nt, Human
uggagguugaagccaagugggg

SEQ ID NO: 2239711 - RNA, 22 nt, Human
uggagguuaaggcugaggaaag

SEQ ID NO: 2239712 - RNA, 21 nt, Human
uggagguuaaggcugaggaaa

SEQ ID NO: 2239713 - RNA, 20 nt, Human
uggagguuaaggcugaggaa

SEQ ID NO: 2239714 - RNA, 22 nt, Human
uggagggucccaagcugggccc

SEQ ID NO: 2239715 - RNA, 24 nt, Human
uggagguuaaggcugaggaaaggc

SEQ ID NO: 2239716 - RNA, 14 nt, Human
uggaguauauguca

SEQ ID NO: 2239717 - RNA, 16 nt, Human
uggaguauaauauuca

SEQ ID NO: 2239718 - RNA, 15 nt, Human
uggagguuucauacu

SEQ ID NO: 2239719 - RNA, 20 nt, Human
uggagguugcagugagcuga

SEQ ID NO: 2239720 - RNA, 21 nt, Human
uggagguugcagugagccaag

SEQ ID NO: 2239721 - RNA, 13 nt, Human
uggauggcuucua

SEQ ID NO: 2239722 - RNA, 21 nt, Human
uggauggccccagcacagcuu

SEQ ID NO: 2239723 - RNA, 17 nt, Human
uggaugggagugagaca

SEQ ID NO: 2239724 - RNA, 21 nt, Human
uggaugggggaaauggugccu

SEQ ID NO: 2239725 - RNA, 22 nt, Human
uggaugggggaacucagaucca

SEQ ID NO: 2239726 - RNA, 21 nt, Human
uggaugggggaacucagaucc

SEQ ID NO: 2239727 - RNA, 18 nt, Human
uggaugggggaacucaga

SEQ ID NO: 2239728 - RNA, 15 nt, Human
uggauggaaggggcu

SEQ ID NO: 2239729 - RNA, 15 nt, Human
uggauggagcccagg

SEQ ID NO: 2239730 - RNA, 14 nt, Human
uggauggccccagc

SEQ ID NO: 2239731 - RNA, 15 nt, Human
uggauggccccagca

SEQ ID NO: 2239732 - RNA, 16 nt, Human
uggauggccccagcac

SEQ ID NO: 2239733 - RNA, 17 nt, Human
uggauggccccagcaca

SEQ ID NO: 2239734 - RNA, 18 nt, Human
uggauggccccagcacag

SEQ ID NO: 2239735 - RNA, 18 nt, Human
aggccccaaaaccacagc

SEQ ID NO: 2239736 - RNA, 18 nt, Human
aggcccaugguugagaaa

SEQ ID NO: 2239737 - RNA, 17 nt, Human
aggcccagugagaugca

SEQ ID NO: 2239738 - RNA, 17 nt, Human
aggcccaguucacccug

SEQ ID NO: 2239739 - RNA, 13 nt, Human
aggcccagugaga

SEQ ID NO: 2239740 - RNA, 13 nt, Human
aggcccagcauug

SEQ ID NO: 2239741 - RNA, 10 nt, Human
aggcccagca

SEQ ID NO: 2239742 - RNA, 18 nt, Human
aggcccagcauugcuggu

SEQ ID NO: 2239743 - RNA, 19 nt, Human
aggcccagcauugcugguu

SEQ ID NO: 2239744 - RNA, 20 nt, Human
aggcccagcauugcugguuc

SEQ ID NO: 2239745 - RNA, 21 nt, Human
aggcccagcauugcugguucu

SEQ ID NO: 2239746 - RNA, 22 nt, Human
aggcccagcauugcugguucua

SEQ ID NO: 2239747 - RNA, 12 nt, Human
aggccccaggaa

SEQ ID NO: 2239748 - RNA, 22 nt, Human
aggccccagagacucagaggga

SEQ ID NO: 2239749 - RNA, 14 nt, Human
aggccccagccucc

SEQ ID NO: 2239750 - RNA, 13 nt, Human
aggccccagccuc

SEQ ID NO: 2239751 - RNA, 12 nt, Human
aggccccagccu

SEQ ID NO: 2239752 - RNA, 16 nt, Human
aggccccgcccaggcu

SEQ ID NO: 2239753 - RNA, 20 nt, Human
aggccccagagacucagagg

SEQ ID NO: 2239754 - RNA, 14 nt, Human
aggccccagagacu

SEQ ID NO: 2239755 - RNA, 13 nt, Human
aggccccagagac

SEQ ID NO: 2239756 - RNA, 17 nt, Human
aggccccacuggggaaa

SEQ ID NO: 2239757 - RNA, 15 nt, Human
aggccccacugggga

SEQ ID NO: 2239758 - RNA, 13 nt, Human
aggccccacuggg

SEQ ID NO: 2239759 - RNA, 23 nt, Human
aggccccaaaaccacagcccugu

SEQ ID NO: 2239760 - RNA, 21 nt, Human
aggccccaaaaccacagcccu

SEQ ID NO: 2239761 - RNA, 13 nt, Human
aggccccaaagga

SEQ ID NO: 2239762 - RNA, 21 nt, Human
aggccccaaaggaaaaagcac

SEQ ID NO: 2239763 - RNA, 22 nt, Human
aggccccaaaggaaaaagcaca

SEQ ID NO: 2239764 - RNA, 16 nt, Human
aggccagccccaccca

SEQ ID NO: 2239765 - RNA, 15 nt, Human
aggccagccccaccc

SEQ ID NO: 2239766 - RNA, 14 nt, Human
aggccagccccacc

SEQ ID NO: 2239767 - RNA, 13 nt, Human
aggccagccccac

SEQ ID NO: 2239768 - RNA, 18 nt, Human
aggccagccccacccagg

SEQ ID NO: 2239769 - RNA, 17 nt, Human
aggccagccccacccag

SEQ ID NO: 2239770 - RNA, 21 nt, Human
aggccagccccacccaggagg

SEQ ID NO: 2239771 - RNA, 10 nt, Human
aggccagccu

SEQ ID NO: 2239772 - RNA, 21 nt, Human
aggcccagagggccugcaagg

SEQ ID NO: 2239773 - RNA, 23 nt, Human
aggccagccuccgagagggagag

SEQ ID NO: 2239774 - RNA, 18 nt, Human
aggccagccuccgagagg

SEQ ID NO: 2239775 - RNA, 22 nt, Human
aggccagccuccgagagggaga

SEQ ID NO: 2239776 - RNA, 11 nt, Human
aggccagccuc

SEQ ID NO: 2239777 - RNA, 13 nt, Human
aggccagccuccg

SEQ ID NO: 2239778 - RNA, 14 nt, Human
aggccagccuccga

SEQ ID NO: 2239779 - RNA, 17 nt, Human
aggccagccuccgagag

SEQ ID NO: 2239780 - RNA, 22 nt, Human
aggccagaguggccuggccagg

SEQ ID NO: 2239781 - RNA, 21 nt, Human
aggccagaguggccuggccag

SEQ ID NO: 2239782 - RNA, 20 nt, Human
aggccagaguggccuggcca

SEQ ID NO: 2239783 - RNA, 19 nt, Human
aggccagaguggccuggcc

SEQ ID NO: 2239784 - RNA, 22 nt, Human
aggccagccagugaccugagga

SEQ ID NO: 2239785 - RNA, 13 nt, Human
aggccagccagug

SEQ ID NO: 2239786 - RNA, 17 nt, Human
aggccagaguggccugg

SEQ ID NO: 2239787 - RNA, 16 nt, Human
aggccagaguggccug

SEQ ID NO: 2239788 - RNA, 22 nt, Human
aggccagaggcccccagcccag

SEQ ID NO: 2239789 - RNA, 20 nt, Human
aggccagagggagugacaga

SEQ ID NO: 2239790 - RNA, 17 nt, Human
uggcagccuuggcaaac

SEQ ID NO: 2239791 - RNA, 15 nt, Human
uggcagcucaccucu

SEQ ID NO: 2239792 - RNA, 16 nt, Human
aggccacaagacccuu

SEQ ID NO: 2239793 - RNA, 19 nt, Human
uggcagcucaccucucccu

SEQ ID NO: 2239794 - RNA, 14 nt, Human
aggccagagggagu

SEQ ID NO: 2239795 - RNA, 19 nt, Human
aggccacaagacccuugug

SEQ ID NO: 2239796 - RNA, 17 nt, Human
aggccacaagacccuug

SEQ ID NO: 2239797 - RNA, 18 nt, Human
aggccacaagacccuugu

SEQ ID NO: 2239798 - RNA, 23 nt, Human
uggcaauucuuugaccucaaccu

SEQ ID NO: 2239799 - RNA, 13 nt, Human
uggcaauuuugua

SEQ ID NO: 2239800 - RNA, 15 nt, Human
uggcaauuuuguaac

SEQ ID NO: 2239801 - RNA, 14 nt, Human
uggcaauuuuguaa

SEQ ID NO: 2239802 - RNA, 18 nt, Human
uggcacagggcaguggga

SEQ ID NO: 2239803 - RNA, 23 nt, Human
uggcacaauggcuaauucccaga

SEQ ID NO: 2239804 - RNA, 16 nt, Human
uggcacagggcagugg

SEQ ID NO: 2239805 - RNA, 14 nt, Human
uggcaauucuuuga

SEQ ID NO: 2239806 - RNA, 19 nt, Human
uggcaaugccaucaucucc

SEQ ID NO: 2239807 - RNA, 16 nt, Human
uggcacagugucuggg

SEQ ID NO: 2239808 - RNA, 18 nt, Human
uggcacagugucugggcu

SEQ ID NO: 2239809 - RNA, 19 nt, Human
uggcacagugucugggcug

SEQ ID NO: 2239810 - RNA, 20 nt, Human
uggcacagugucugggcuga

SEQ ID NO: 2239811 - RNA, 18 nt, Human
uggcacaguuuucugaga

SEQ ID NO: 2239812 - RNA, 13 nt, Human
uggcagccuuggc

SEQ ID NO: 2239813 - RNA, 19 nt, Human
uggcacaguuuucugagaa

SEQ ID NO: 2239814 - RNA, 23 nt, Human
ugcaccauugcgcucuagccugg

SEQ ID NO: 2239815 - RNA, 23 nt, Human
ugcaccaucccuuuuugaagugu

SEQ ID NO: 2239816 - RNA, 21 nt, Human
ugcaccaucccuuuuugaagu

SEQ ID NO: 2239817 - RNA, 22 nt, Human
ugcaccaucccuuuuugaagug

SEQ ID NO: 2239818 - RNA, 21 nt, Human
ugcacccacucugcuuugacu

SEQ ID NO: 2239819 - RNA, 18 nt, Human
ugcacccacccaggagug

SEQ ID NO: 2239820 - RNA, 17 nt, Human
ugcacccacccaggagu

SEQ ID NO: 2239821 - RNA, 19 nt, Human
ugcacacuagccucuccag

SEQ ID NO: 2239822 - RNA, 21 nt, Human
ugcacacuccccugcacugga

SEQ ID NO: 2239823 - RNA, 21 nt, Human
ugcacacuagccucuccagga

SEQ ID NO: 2239824 - RNA, 18 nt, Human
ugcacacuccccugcacu

SEQ ID NO: 2239825 - RNA, 16 nt, Human
ugcaccaucccuuuuu

SEQ ID NO: 2239826 - RNA, 19 nt, Human
agcccuggagucaugccaa

SEQ ID NO: 2239827 - RNA, 14 nt, Human
ugcacacccacuca

SEQ ID NO: 2239828 - RNA, 14 nt, Human
ugcacacagugcuu

SEQ ID NO: 2239829 - RNA, 17 nt, Human
ugcacacccacucagcu

SEQ ID NO: 2239830 - RNA, 16 nt, Human
ugcacacccacucagc

SEQ ID NO: 2239831 - RNA, 18 nt, Human
ugcacacccacucagcuc

SEQ ID NO: 2239832 - RNA, 20 nt, Human
ugcacacauuuuuuaaaugc

SEQ ID NO: 2239833 - RNA, 10 nt, Human
ugcacacauu

SEQ ID NO: 2239834 - RNA, 17 nt, Human
ugcacccucaggcaggu

SEQ ID NO: 2239835 - RNA, 16 nt, Human
ugcacccucaggcagg

SEQ ID NO: 2239836 - RNA, 13 nt, Human
ugcacccagcccu

SEQ ID NO: 2239837 - RNA, 14 nt, Human
ugcacccagcccug

SEQ ID NO: 2239838 - RNA, 15 nt, Human
ugcacccagcccugg

SEQ ID NO: 2239839 - RNA, 16 nt, Human
ugcacccagcccuggu

SEQ ID NO: 2239840 - RNA, 17 nt, Human
ugcacccagcccugguc

SEQ ID NO: 2239841 - RNA, 15 nt, Human
ugcacccaggggugg

SEQ ID NO: 2239842 - RNA, 15 nt, Human
ugcacccaugggcuc

SEQ ID NO: 2239843 - RNA, 18 nt, Human
ugcacccaugggcucuga

SEQ ID NO: 2239844 - RNA, 20 nt, Human
ugcacccaugggcucugaca

SEQ ID NO: 2239845 - RNA, 21 nt, Human
ugcacccaugggcucugacag

SEQ ID NO: 2239846 - RNA, 22 nt, Human
ugcacccaugggcucugacaga

SEQ ID NO: 2239847 - RNA, 15 nt, Human
ugcaccccuucucuc

SEQ ID NO: 2239848 - RNA, 19 nt, Human
ugcaccccuucucuccucc

SEQ ID NO: 2239849 - RNA, 20 nt, Human
ugcaccccuucucuccuccc

SEQ ID NO: 2239850 - RNA, 14 nt, Human
ugcacccgccucuc

SEQ ID NO: 2239851 - RNA, 14 nt, Human
ugcacccuccgccu

SEQ ID NO: 2239852 - RNA, 17 nt, Human
ugcacccuccacccugu

SEQ ID NO: 2239853 - RNA, 18 nt, Human
ugcacccuccacccuguc

SEQ ID NO: 2239854 - RNA, 16 nt, Human
ugcacccgccucuccc

SEQ ID NO: 2239855 - RNA, 14 nt, Human
ugcacccuccaccc

SEQ ID NO: 2239856 - RNA, 15 nt, Human
ugcacccuccacccu

SEQ ID NO: 2239857 - RNA, 16 nt, Human
ugcacccuccacccug

SEQ ID NO: 2239858 - RNA, 12 nt, Human
ugcacgugugca

SEQ ID NO: 2239859 - RNA, 22 nt, Human
ugcacguggccucuugagcagu

SEQ ID NO: 2239860 - RNA, 16 nt, Human
ugcacccuccgccuuc

SEQ ID NO: 2239861 - RNA, 19 nt, Human
ugcacguggccucuugagc

SEQ ID NO: 2239862 - RNA, 14 nt, Human
ugcacgugugugca

SEQ ID NO: 2239863 - RNA, 15 nt, Human
ugcacgugugugcac

SEQ ID NO: 2239864 - RNA, 20 nt, Human
agccccuugcucuccccugc

SEQ ID NO: 2239865 - RNA, 17 nt, Human
agccccuugagaaaccu

SEQ ID NO: 2239866 - RNA, 21 nt, Human
agcccugcuuugggcugcccu

SEQ ID NO: 2239867 - RNA, 22 nt, Human
agccccuucugcucagcucugg

SEQ ID NO: 2239868 - RNA, 19 nt, Human
agccccuucugcucagcuc

SEQ ID NO: 2239869 - RNA, 16 nt, Human
agccccuucugcucag

SEQ ID NO: 2239870 - RNA, 15 nt, Human
agccccuucugcuca

SEQ ID NO: 2239871 - RNA, 20 nt, Human
agccccuucugacccaugcu

SEQ ID NO: 2239872 - RNA, 24 nt, Human
agccccuucugacccaugcugccc

SEQ ID NO: 2239873 - RNA, 21 nt, Human
agcccugguggcagugggagc

SEQ ID NO: 2239874 - RNA, 23 nt, Human
agcccuggagccaacugcugcuu

SEQ ID NO: 2239875 - RNA, 11 nt, Human
agcccuggagg

SEQ ID NO: 2239876 - RNA, 12 nt, Human
agcccuggaggu

SEQ ID NO: 2239877 - RNA, 15 nt, Human
agcccuggaggugcc

SEQ ID NO: 2239878 - RNA, 16 nt, Human
agcccuggaggugcca

SEQ ID NO: 2239879 - RNA, 17 nt, Human
agcccuggaggugccag

SEQ ID NO: 2239880 - RNA, 18 nt, Human
agcccuggaggugccagc

SEQ ID NO: 2239881 - RNA, 21 nt, Human
agcccuggaggugccagcaaa

SEQ ID NO: 2239882 - RNA, 22 nt, Human
agcccugcuuugggcugcccug

SEQ ID NO: 2239883 - RNA, 23 nt, Human
agcccugcuuugggcugcccugg

SEQ ID NO: 2239884 - RNA, 23 nt, Human
agccccuugcucuccccugcccu

SEQ ID NO: 2239885 - RNA, 18 nt, Human
agcccuggagccaacugc

SEQ ID NO: 2239886 - RNA, 19 nt, Human
agcccuggagccaacugcu

SEQ ID NO: 2239887 - RNA, 20 nt, Human
agcccuggagccaacugcug

SEQ ID NO: 2239888 - RNA, 21 nt, Human
agcccuggagccaacugcugc

SEQ ID NO: 2239889 - RNA, 22 nt, Human
agcccuggagccaacugcugcu

SEQ ID NO: 2239890 - RNA, 21 nt, Human
ugcacaagcugcacccucagg

SEQ ID NO: 2239891 - RNA, 18 nt, Human
ugcacaagcugcacccuc

SEQ ID NO: 2239892 - RNA, 22 nt, Human
ugcacacaccagagcccaccuu

SEQ ID NO: 2239893 - RNA, 24 nt, Human
ugcacacagcacgggggccaagga

SEQ ID NO: 2239894 - RNA, 12 nt, Human
ugcacacagcac

SEQ ID NO: 2239895 - RNA, 14 nt, Human
agcccugucagugc

SEQ ID NO: 2239896 - RNA, 22 nt, Human
agcccuggaggugccagcaaag

SEQ ID NO: 2239897 - RNA, 15 nt, Human
agcccuguaauuuuu

SEQ ID NO: 2239898 - RNA, 15 nt, Human
ugcacaagcugcacc

SEQ ID NO: 2239899 - RNA, 22 nt, Human
agcccugguggcagugggagcu

SEQ ID NO: 2239900 - RNA, 23 nt, Human
agcccugguggcagugggagcug

SEQ ID NO: 2239901 - RNA, 19 nt, Human
ugauucuccugccucagcc

SEQ ID NO: 2239902 - RNA, 15 nt, Human
ugauucuccugccuc

SEQ ID NO: 2239903 - RNA, 16 nt, Human
ugauucgcccaaagcc

SEQ ID NO: 2239904 - RNA, 22 nt, Human
ugauucgcccaaagccagacag

SEQ ID NO: 2239905 - RNA, 21 nt, Human
ugauucgcccaaagccagaca

SEQ ID NO: 2239906 - RNA, 15 nt, Human
ugauucuaaugucuu

SEQ ID NO: 2239907 - RNA, 22 nt, Human
ugauucuauuuauauguacaug

SEQ ID NO: 2239908 - RNA, 11 nt, Human
ugauucucagg

SEQ ID NO: 2239909 - RNA, 12 nt, Human
ugauucucaggg

SEQ ID NO: 2239910 - RNA, 21 nt, Human
ugauucuauuuauauguacau

SEQ ID NO: 2239911 - RNA, 17 nt, Human
ugauucuaaugucuuca

SEQ ID NO: 2239912 - RNA, 19 nt, Human
ugauucuaaugucuucauu

SEQ ID NO: 2239913 - RNA, 22 nt, Human
agcccaggguucccccagcccu

SEQ ID NO: 2239914 - RNA, 21 nt, Human
agcccaggguucccccagccc

SEQ ID NO: 2239915 - RNA, 19 nt, Human
agcccaggguucccccagc

SEQ ID NO: 2239916 - RNA, 18 nt, Human
agcccaggguucccccag

SEQ ID NO: 2239917 - RNA, 15 nt, Human
agcccaguagaccuu

SEQ ID NO: 2239918 - RNA, 23 nt, Human
agcccagguccucugauacccag

SEQ ID NO: 2239919 - RNA, 23 nt, Human
agcccaggguucccccagcccug

SEQ ID NO: 2239920 - RNA, 18 nt, Human
agcccaguagaccuuguu

SEQ ID NO: 2239921 - RNA, 18 nt, Human
agcccaguucagcuuggg

SEQ ID NO: 2239922 - RNA, 17 nt, Human
agcccaggguuccccca

SEQ ID NO: 2239923 - RNA, 16 nt, Human
agcccaggguuccccc

SEQ ID NO: 2239924 - RNA, 15 nt, Human
ugauucucagggucu

SEQ ID NO: 2239925 - RNA, 19 nt, Human
ugauucucagggucucugc

SEQ ID NO: 2239926 - RNA, 20 nt, Human
ugauucucagggucucugcu

SEQ ID NO: 2239927 - RNA, 20 nt, Human
ugauucuccugccucagccu

SEQ ID NO: 2239928 - RNA, 20 nt, Human
agcccaugcccaccugccca

SEQ ID NO: 2239929 - RNA, 16 nt, Human
agcccaugcccaccug

SEQ ID NO: 2239930 - RNA, 22 nt, Human
agcccaugcccaccugcccauc

SEQ ID NO: 2239931 - RNA, 17 nt, Human
agcccauggacuucaca

SEQ ID NO: 2239932 - RNA, 11 nt, Human
agcccaugccc

SEQ ID NO: 2239933 - RNA, 17 nt, Human
agcccaugaguccuuga

SEQ ID NO: 2239934 - RNA, 13 nt, Human
agcccaucaauua

SEQ ID NO: 2239935 - RNA, 20 nt, Human
agcccaucccugccugguca

SEQ ID NO: 2239936 - RNA, 13 nt, Human
agcccaucccugc

SEQ ID NO: 2239937 - RNA, 15 nt, Human
agcccaucccugccu

SEQ ID NO: 2239938 - RNA, 17 nt, Human
agcccaucccugccugg

SEQ ID NO: 2239939 - RNA, 18 nt, Human
agcccaucccugccuggu

SEQ ID NO: 2239940 - RNA, 21 nt, Human
agccccaaaacucuccucugc

SEQ ID NO: 2239941 - RNA, 22 nt, Human
agccccaaaacucuccucugcu

SEQ ID NO: 2239942 - RNA, 20 nt, Human
agccccaaaacucuccucug

SEQ ID NO: 2239943 - RNA, 18 nt, Human
agcccauggcacucuaug

SEQ ID NO: 2239944 - RNA, 17 nt, Human
agccccgaggccuucuc

SEQ ID NO: 2239945 - RNA, 22 nt, Human
agccccgaggccuucucugaag

SEQ ID NO: 2239946 - RNA, 16 nt, Human
agccccgaggccuucu

SEQ ID NO: 2239947 - RNA, 22 nt, Human
agcccccagcuaagaaccugga

SEQ ID NO: 2239948 - RNA, 20 nt, Human
agcccccagcuaagaaccug

SEQ ID NO: 2239949 - RNA, 19 nt, Human
agcccccagcuaagaaccu

SEQ ID NO: 2239950 - RNA, 24 nt, Human
agccccaaaacucuccucugcugc

SEQ ID NO: 2239951 - RNA, 16 nt, Human
agcccccacagugcug

SEQ ID NO: 2239952 - RNA, 19 nt, Human
agcccccacagugcugucu

SEQ ID NO: 2239953 - RNA, 19 nt, Human
agcccccacccacuucccu

SEQ ID NO: 2239954 - RNA, 12 nt, Human
agcccccagcua

SEQ ID NO: 2239955 - RNA, 19 nt, Human
agcccccaccgugggcagg

SEQ ID NO: 2239956 - RNA, 17 nt, Human
agccccucccaccacag

SEQ ID NO: 2239957 - RNA, 16 nt, Human
agccccucccaccaca

SEQ ID NO: 2239958 - RNA, 22 nt, Human
agccccuggaugcagccucaca

SEQ ID NO: 2239959 - RNA, 19 nt, Human
agccccuggaugcagccuc

SEQ ID NO: 2239960 - RNA, 17 nt, Human
agccccuggaugcagcc

SEQ ID NO: 2239961 - RNA, 18 nt, Human
agccccuggaugcagccu

SEQ ID NO: 2239962 - RNA, 14 nt, Human
agccccucccacca

SEQ ID NO: 2239963 - RNA, 13 nt, Human
agccccucccacc

SEQ ID NO: 2239964 - RNA, 21 nt, Human
agccccuagcccaggagagag

SEQ ID NO: 2239965 - RNA, 22 nt, Human
agccccuagcccaggagagaga

SEQ ID NO: 2239966 - RNA, 23 nt, Human
agccccuagcccaggagagagaa

SEQ ID NO: 2239967 - RNA, 18 nt, Human
agccccgcagaccucccc

SEQ ID NO: 2239968 - RNA, 21 nt, Human
agccccuaccccacaccaggc

SEQ ID NO: 2239969 - RNA, 12 nt, Human
agccccuagccc

SEQ ID NO: 2239970 - RNA, 14 nt, Human
agccccuagcccag

SEQ ID NO: 2239971 - RNA, 15 nt, Human
agccccuagcccagg

SEQ ID NO: 2239972 - RNA, 16 nt, Human
agccccuagcccagga

SEQ ID NO: 2239973 - RNA, 18 nt, Human
agccccuagcccaggaga

SEQ ID NO: 2239974 - RNA, 19 nt, Human
agccccuagcccaggagag

SEQ ID NO: 2239975 - RNA, 14 nt, Human
agccccgcagaccu

SEQ ID NO: 2239976 - RNA, 19 nt, Human
agccccgcagaccucccca

SEQ ID NO: 2239977 - RNA, 16 nt, Human
agccccgcagaccucc

SEQ ID NO: 2239978 - RNA, 17 nt, Human
agccccuaccccacacc

SEQ ID NO: 2239979 - RNA, 12 nt, Human
agccucaucucu

SEQ ID NO: 2239980 - RNA, 19 nt, Human
agccucauccgaggcaggg

SEQ ID NO: 2239981 - RNA, 15 nt, Human
agccucauguccacu

SEQ ID NO: 2239982 - RNA, 22 nt, Human
agccucagcauccuggcacccg

SEQ ID NO: 2239983 - RNA, 23 nt, Human
agccucagcauccuggcacccgg

SEQ ID NO: 2239984 - RNA, 18 nt, Human
agccuccaugcugccucc

SEQ ID NO: 2239985 - RNA, 20 nt, Human
agccuccaugcugccuccag

SEQ ID NO: 2239986 - RNA, 20 nt, Human
agccucauguccacugguuc

SEQ ID NO: 2239987 - RNA, 17 nt, Human
agccuccauuuaguucu

SEQ ID NO: 2239988 - RNA, 15 nt, Human
agccuccauuuaguu

SEQ ID NO: 2239989 - RNA, 20 nt, Human
agccucauccgaggcagggu

SEQ ID NO: 2239990 - RNA, 21 nt, Human
agccuccauuuaguucuuugu

SEQ ID NO: 2239991 - RNA, 20 nt, Human
agccuccauuuaguucuuug

SEQ ID NO: 2239992 - RNA, 16 nt, Human
agccucccaaagugcu

SEQ ID NO: 2239993 - RNA, 17 nt, Human
agccucagcauccuggc

SEQ ID NO: 2239994 - RNA, 19 nt, Human
agccucagcauccuggcac

SEQ ID NO: 2239995 - RNA, 20 nt, Human
agccucagcauccuggcacc

SEQ ID NO: 2239996 - RNA, 21 nt, Human
agccucagcauccuggcaccc

SEQ ID NO: 2239997 - RNA, 16 nt, Human
agccucagcauccugg

SEQ ID NO: 2239998 - RNA, 21 nt, Human
agccuagccgaccucagccuu

SEQ ID NO: 2239999 - RNA, 20 nt, Human
agccuagccgaccucagccu

SEQ ID NO: 2240000 - RNA, 19 nt, Human
agccuagccgaccucagcc

SEQ ID NO: 2240001 - RNA, 18 nt, Human
agccuagccgaccucagc

SEQ ID NO: 2240002 - RNA, 17 nt, Human
agccuagccgaccucag

SEQ ID NO: 2240003 - RNA, 19 nt, Human
agccuagaagagcuucuga

SEQ ID NO: 2240004 - RNA, 17 nt, Human
agccuagaagagcuucu

SEQ ID NO: 2240005 - RNA, 17 nt, Human
agccuaccugcucucca

SEQ ID NO: 2240006 - RNA, 18 nt, Human
agccuagacccuccuccu

SEQ ID NO: 2240007 - RNA, 15 nt, Human
agccuagacccuccu

SEQ ID NO: 2240008 - RNA, 16 nt, Human
agccuacgcugaagau

SEQ ID NO: 2240009 - RNA, 15 nt, Human
agccuagagugaggg

SEQ ID NO: 2240010 - RNA, 17 nt, Human
ugcacguuaugguguuu

SEQ ID NO: 2240011 - RNA, 19 nt, Human
ugcacguuaugguguuucu

SEQ ID NO: 2240012 - RNA, 15 nt, Human
ugcacuaugaggaau

SEQ ID NO: 2240013 - RNA, 23 nt, Human
ugcacuauagccuaggugacaga

SEQ ID NO: 2240014 - RNA, 14 nt, Human
ugcacccucuaucc

SEQ ID NO: 2240015 - RNA, 15 nt, Human
ugcacguuauggugu

SEQ ID NO: 2240016 - RNA, 23 nt, Human
agcccuucuaccuuccugcaaca

SEQ ID NO: 2240017 - RNA, 21 nt, Human
agccgagagccugcuccccca

SEQ ID NO: 2240018 - RNA, 16 nt, Human
agccuaccugcucucc

SEQ ID NO: 2240019 - RNA, 16 nt, Human
agccgugguccuuugg

SEQ ID NO: 2240020 - RNA, 22 nt, Human
agccguggcuucccgcucagcc

SEQ ID NO: 2240021 - RNA, 23 nt, Human
agccguggcuucccgcucagccc

SEQ ID NO: 2240022 - RNA, 14 nt, Human
agccguggcuuccc

SEQ ID NO: 2240023 - RNA, 21 nt, Human
agccguggcuucccgcucagc

SEQ ID NO: 2240024 - RNA, 18 nt, Human
agccgagagccugcuccc

SEQ ID NO: 2240025 - RNA, 17 nt, Human
agccgagagccugcucc

SEQ ID NO: 2240026 - RNA, 16 nt, Human
agccgagagccugcuc

SEQ ID NO: 2240027 - RNA, 15 nt, Human
agccgagagccugcu

SEQ ID NO: 2240028 - RNA, 13 nt, Human
agccguggcuucc

SEQ ID NO: 2240029 - RNA, 13 nt, Human
agccgaccucagc

SEQ ID NO: 2240030 - RNA, 12 nt, Human
agccgaccucag

SEQ ID NO: 2240031 - RNA, 17 nt, Human
agcccuucuuuccacag

SEQ ID NO: 2240032 - RNA, 14 nt, Human
agccgagagccugc

SEQ ID NO: 2240033 - RNA, 13 nt, Human
agccgagagccug

SEQ ID NO: 2240034 - RNA, 23 nt, Human
agccgacugcacagcggccccug

SEQ ID NO: 2240035 - RNA, 17 nt, Human
agccgacuccacuuuca

SEQ ID NO: 2240036 - RNA, 15 nt, Human
agccgaccucagccu

SEQ ID NO: 2240037 - RNA, 14 nt, Human
agccgaccucagcc

SEQ ID NO: 2240038 - RNA, 16 nt, Human
agccgaccucagccuu

SEQ ID NO: 2240039 - RNA, 22 nt, Human
ugcaguagagucaucuccauca

SEQ ID NO: 2240040 - RNA, 19 nt, Human
ugcaguagagucaucucca

SEQ ID NO: 2240041 - RNA, 16 nt, Human
ugcaguagagucaucu

SEQ ID NO: 2240042 - RNA, 18 nt, Human
ugcaguacuuuaccuccu

SEQ ID NO: 2240043 - RNA, 21 nt, Human
ugcaguaaaucuuuuacaacu

SEQ ID NO: 2240044 - RNA, 18 nt, Human
ugcaguaaaucuuuuaca

SEQ ID NO: 2240045 - RNA, 14 nt, Human
ugcagcuaucuggu

SEQ ID NO: 2240046 - RNA, 15 nt, Human
ugcaguaaaucuuuu

SEQ ID NO: 2240047 - RNA, 14 nt, Human
ugcaguaaaucuuu

SEQ ID NO: 2240048 - RNA, 13 nt, Human
ugcaguaaaucuu

SEQ ID NO: 2240049 - RNA, 12 nt, Human
ugcaggucccua

SEQ ID NO: 2240050 - RNA, 14 nt, Human
ugcaggucccuaau

SEQ ID NO: 2240051 - RNA, 15 nt, Human
ugcaggucccuaaua

SEQ ID NO: 2240052 - RNA, 16 nt, Human
ugcaggucccuaauaa

SEQ ID NO: 2240053 - RNA, 14 nt, Human
ugcagucuggcuga

SEQ ID NO: 2240054 - RNA, 13 nt, Human
ugcaguccuggga

SEQ ID NO: 2240055 - RNA, 19 nt, Human
ugcagucuggcugagcccu

SEQ ID NO: 2240056 - RNA, 22 nt, Human
ugcaguccugaucagagccgug

SEQ ID NO: 2240057 - RNA, 19 nt, Human
ugcaguccugaucagagcc

SEQ ID NO: 2240058 - RNA, 14 nt, Human
ugcaguccugggau

SEQ ID NO: 2240059 - RNA, 14 nt, Human
ugcaguagauuuuc

SEQ ID NO: 2240060 - RNA, 17 nt, Human
ugcauaaguuaacuucc

SEQ ID NO: 2240061 - RNA, 14 nt, Human
ugcauaaguuaacu

SEQ ID NO: 2240062 - RNA, 13 nt, Human
ugcagucugggug

SEQ ID NO: 2240063 - RNA, 20 nt, Human
ugcagucuggcugagcccug

SEQ ID NO: 2240064 - RNA, 21 nt, Human
ugcagucuggcugagcccugc

SEQ ID NO: 2240065 - RNA, 22 nt, Human
ugcauaacguauaaaagccugu

SEQ ID NO: 2240066 - RNA, 23 nt, Human
ugcauaacguauaaaagccuguu

SEQ ID NO: 2240067 - RNA, 14 nt, Human
ugcagccuccuccu

SEQ ID NO: 2240068 - RNA, 15 nt, Human
ugcagccuccuccug

SEQ ID NO: 2240069 - RNA, 16 nt, Human
ugcagccuccuccuga

SEQ ID NO: 2240070 - RNA, 17 nt, Human
ugcagccuccuccugac

SEQ ID NO: 2240071 - RNA, 14 nt, Human
ugcagccugcgcca

SEQ ID NO: 2240072 - RNA, 19 nt, Human
ugcagccuccuccugacca

SEQ ID NO: 2240073 - RNA, 15 nt, Human
ugcagccuggaggcc

SEQ ID NO: 2240074 - RNA, 14 nt, Human
ugcagccuggaggc

SEQ ID NO: 2240075 - RNA, 12 nt, Human
ugcagccugggu

SEQ ID NO: 2240076 - RNA, 20 nt, Human
ugcagccuguccugggcugg

SEQ ID NO: 2240077 - RNA, 19 nt, Human
ugcagcgaaccaauauuug

SEQ ID NO: 2240078 - RNA, 13 nt, Human
ugcagcuaucugg

SEQ ID NO: 2240079 - RNA, 23 nt, Human
ugcagccuuugccuccccggcuc

SEQ ID NO: 2240080 - RNA, 11 nt, Human
ugcaggucccu

SEQ ID NO: 2240081 - RNA, 16 nt, Human
ugcagccucacagucc

SEQ ID NO: 2240082 - RNA, 13 nt, Human
ugcagccucacag

SEQ ID NO: 2240083 - RNA, 15 nt, Human
ugcagccucacaguc

SEQ ID NO: 2240084 - RNA, 21 nt, Human
ugcagccccgcgccuccuucc

SEQ ID NO: 2240085 - RNA, 20 nt, Human
ugcagcccggcgccaccauc

SEQ ID NO: 2240086 - RNA, 22 nt, Human
ugcagcccggcgccaccauccu

SEQ ID NO: 2240087 - RNA, 20 nt, Human
ugcagccccgccuccaggcc

SEQ ID NO: 2240088 - RNA, 21 nt, Human
ugcagccccgccuccaggcca

SEQ ID NO: 2240089 - RNA, 23 nt, Human
ugcagccccgccuccaggccaca

SEQ ID NO: 2240090 - RNA, 23 nt, Human
ugcagcccguguggccccuucac

SEQ ID NO: 2240091 - RNA, 21 nt, Human
ugcagcccguguggccccuuc

SEQ ID NO: 2240092 - RNA, 19 nt, Human
ugcagcccguguggccccu

SEQ ID NO: 2240093 - RNA, 23 nt, Human
ugcagccucaaccuccugggcua

SEQ ID NO: 2240094 - RNA, 21 nt, Human
ugcagcccaugcccaccugcc

SEQ ID NO: 2240095 - RNA, 19 nt, Human
ugcagcccaugcccaccug

SEQ ID NO: 2240096 - RNA, 18 nt, Human
ugcagcccaugcccaccu

SEQ ID NO: 2240097 - RNA, 14 nt, Human
ugcagcccaugccc

SEQ ID NO: 2240098 - RNA, 23 nt, Human
ugcagcccaugcccaccugccca

SEQ ID NO: 2240099 - RNA, 23 nt, Human
ugcagcccccacugccuuugacc

SEQ ID NO: 2240100 - RNA, 17 nt, Human
ugcagcccccacugccu

SEQ ID NO: 2240101 - RNA, 22 nt, Human
agccugaaggggcgucuguucc

SEQ ID NO: 2240102 - RNA, 22 nt, Human
agccugaaagaggaaugaagua

SEQ ID NO: 2240103 - RNA, 20 nt, Human
agccugaccaacauggagaa

SEQ ID NO: 2240104 - RNA, 21 nt, Human
agccugaauuuuguugcuguu

SEQ ID NO: 2240105 - RNA, 20 nt, Human
agccugaauuuuguugcugu

SEQ ID NO: 2240106 - RNA, 16 nt, Human
agccuuccacacucac

SEQ ID NO: 2240107 - RNA, 18 nt, Human
agccuugguguccaccug

SEQ ID NO: 2240108 - RNA, 17 nt, Human
agccuugguguccaccu

SEQ ID NO: 2240109 - RNA, 16 nt, Human
agccuugguguccacc

SEQ ID NO: 2240110 - RNA, 20 nt, Human
agccuuggggcugaugcagu

SEQ ID NO: 2240111 - RNA, 21 nt, Human
agccuugguguccaccuggcc

SEQ ID NO: 2240112 - RNA, 19 nt, Human
agccuugguguccaccugg

SEQ ID NO: 2240113 - RNA, 16 nt, Human
agccuuguaauucuaa

SEQ ID NO: 2240114 - RNA, 22 nt, Human
agccuugguguccaccuggccc

SEQ ID NO: 2240115 - RNA, 18 nt, Human
agccuuguaauucuaaau

SEQ ID NO: 2240116 - RNA, 16 nt, Human
agccuugugucuacag

SEQ ID NO: 2240117 - RNA, 17 nt, Human
agccuugugucuacaga

SEQ ID NO: 2240118 - RNA, 22 nt, Human
agcgccuaguggggucucccuc

SEQ ID NO: 2240119 - RNA, 11 nt, Human
agccuuccagg

SEQ ID NO: 2240120 - RNA, 14 nt, Human
agccuuccaggggu

SEQ ID NO: 2240121 - RNA, 16 nt, Human
agccuuccaggggugg

SEQ ID NO: 2240122 - RNA, 17 nt, Human
agccuuccagggguggg

SEQ ID NO: 2240123 - RNA, 19 nt, Human
agcgccugccccucccaga

SEQ ID NO: 2240124 - RNA, 12 nt, Human
agcgccugcccc

SEQ ID NO: 2240125 - RNA, 23 nt, Human
agcgccuaguggggucucccucu

SEQ ID NO: 2240126 - RNA, 22 nt, Human
agcgccuccauccaaggccagg

SEQ ID NO: 2240127 - RNA, 16 nt, Human
agcggagaaaggaagg

SEQ ID NO: 2240128 - RNA, 18 nt, Human
agcgccuccauccaaggc

SEQ ID NO: 2240129 - RNA, 20 nt, Human
agcgccuccauccaaggcca

SEQ ID NO: 2240130 - RNA, 23 nt, Human
agcgccuccauccaaggccaggu

SEQ ID NO: 2240131 - RNA, 18 nt, Human
agcgccugccccucccag

SEQ ID NO: 2240132 - RNA, 15 nt, Human
agcgccugccccucc

SEQ ID NO: 2240133 - RNA, 20 nt, Human
agcgccuuucccaacucuag

SEQ ID NO: 2240134 - RNA, 17 nt, Human
agcgccuuucccaacuc

SEQ ID NO: 2240135 - RNA, 14 nt, Human
agcggaggugugga

SEQ ID NO: 2240136 - RNA, 20 nt, Human
ugcauuaucuagauacugua

SEQ ID NO: 2240137 - RNA, 18 nt, Human
agcggagacggaguccca

SEQ ID NO: 2240138 - RNA, 20 nt, Human
agcggagaaaggaagggcug

SEQ ID NO: 2240139 - RNA, 15 nt, Human
ugccaauuagcaauu

SEQ ID NO: 2240140 - RNA, 13 nt, Human
ugccaauuucaag

SEQ ID NO: 2240141 - RNA, 22 nt, Human
ugccaauaauaauaccucccuu

SEQ ID NO: 2240142 - RNA, 21 nt, Human
ugccaauaauaauaccucccu

SEQ ID NO: 2240143 - RNA, 20 nt, Human
ugccaaguuguuugagaaau

SEQ ID NO: 2240144 - RNA, 19 nt, Human
ugccaaguuguuugagaaa

SEQ ID NO: 2240145 - RNA, 15 nt, Human
ugccaaguuguuuga

SEQ ID NO: 2240146 - RNA, 13 nt, Human
ugccacacuucag

SEQ ID NO: 2240147 - RNA, 14 nt, Human
ugccacacuucagg

SEQ ID NO: 2240148 - RNA, 15 nt, Human
ugccacacuucaggc

SEQ ID NO: 2240149 - RNA, 16 nt, Human
ugccacacuucaggcu

SEQ ID NO: 2240150 - RNA, 19 nt, Human
ugccaauuuuugccuucau

SEQ ID NO: 2240151 - RNA, 16 nt, Human
ugccacaaggacuucc

SEQ ID NO: 2240152 - RNA, 15 nt, Human
ugccacaaggacuuc

SEQ ID NO: 2240153 - RNA, 17 nt, Human
ugccaauuuuugccuuc

SEQ ID NO: 2240154 - RNA, 18 nt, Human
ugccaauuuuugccuuca

SEQ ID NO: 2240155 - RNA, 21 nt, Human
ugccaauuuuugccuucauua

SEQ ID NO: 2240156 - RNA, 17 nt, Human
ugcauugagaacugcau

SEQ ID NO: 2240157 - RNA, 15 nt, Human
ugcauugagaacugc

SEQ ID NO: 2240158 - RNA, 15 nt, Human
ugcauugaauauauu

SEQ ID NO: 2240159 - RNA, 20 nt, Human
ugcauugaccgcgacuaauu

SEQ ID NO: 2240160 - RNA, 22 nt, Human
ugcauugaccgcgacuaauuuc

SEQ ID NO: 2240161 - RNA, 19 nt, Human
ugcauugcugugaauuagc

SEQ ID NO: 2240162 - RNA, 18 nt, Human
ugcauuggaagaccccac

SEQ ID NO: 2240163 - RNA, 21 nt, Human
ugccaagggcuuuguuuugca

SEQ ID NO: 2240164 - RNA, 23 nt, Human
agcggagguugcagggagccgag

SEQ ID NO: 2240165 - RNA, 18 nt, Human
ugcauuaucuagauacug

SEQ ID NO: 2240166 - RNA, 16 nt, Human
ugcauugaauauauua

SEQ ID NO: 2240167 - RNA, 14 nt, Human
ugcauugaauauau

SEQ ID NO: 2240168 - RNA, 13 nt, Human
ugcauugaauaua

SEQ ID NO: 2240169 - RNA, 23 nt, Human
ugcauugaacacaaacuguaaau

SEQ ID NO: 2240170 - RNA, 22 nt, Human
ugcauuaucuagauacuguauc

SEQ ID NO: 2240171 - RNA, 21 nt, Human
ugcauuaucuagauacuguau

SEQ ID NO: 2240172 - RNA, 18 nt, Human
ugcauaccaaccugggca

SEQ ID NO: 2240173 - RNA, 14 nt, Human
ugcauaccaaccug

SEQ ID NO: 2240174 - RNA, 12 nt, Human
ugcauaccaacc

SEQ ID NO: 2240175 - RNA, 12 nt, Human
ugcauaccacuu

SEQ ID NO: 2240176 - RNA, 14 nt, Human
ugcauacacacaca

SEQ ID NO: 2240177 - RNA, 16 nt, Human
ugcauacacacacaca

SEQ ID NO: 2240178 - RNA, 15 nt, Human
ugcauacacacacac

SEQ ID NO: 2240179 - RNA, 23 nt, Human
ugcauacacacacacacacagcc

SEQ ID NO: 2240180 - RNA, 22 nt, Human
ugcauacacacacacacacagc

SEQ ID NO: 2240181 - RNA, 21 nt, Human
ugcauacacacacacacacag

SEQ ID NO: 2240182 - RNA, 17 nt, Human
agccugcuccagcuguu

SEQ ID NO: 2240183 - RNA, 16 nt, Human
agccugcuccagcugu

SEQ ID NO: 2240184 - RNA, 15 nt, Human
agccugcuccagcug

SEQ ID NO: 2240185 - RNA, 14 nt, Human
agccugcuccagcu

SEQ ID NO: 2240186 - RNA, 22 nt, Human
agccugcuccagcuguucagcu

SEQ ID NO: 2240187 - RNA, 19 nt, Human
agccugcuccagcuguuca

SEQ ID NO: 2240188 - RNA, 17 nt, Human
agccugcucccccaccc

SEQ ID NO: 2240189 - RNA, 15 nt, Human
agccugcucccccac

SEQ ID NO: 2240190 - RNA, 14 nt, Human
agccugcuccccca

SEQ ID NO: 2240191 - RNA, 11 nt, Human
agccugcuccc

SEQ ID NO: 2240192 - RNA, 21 nt, Human
agccugcucccccacccccuc

SEQ ID NO: 2240193 - RNA, 19 nt, Human
agccugcucccccaccccc

SEQ ID NO: 2240194 - RNA, 23 nt, Human
agccugcucccccacccccuccc

SEQ ID NO: 2240195 - RNA, 20 nt, Human
agccugcuccuucccaggag

SEQ ID NO: 2240196 - RNA, 22 nt, Human
agccugcuccuucccaggagug

SEQ ID NO: 2240197 - RNA, 22 nt, Human
agccugggugacagagcaagug

SEQ ID NO: 2240198 - RNA, 15 nt, Human
agccuggggucugga

SEQ ID NO: 2240199 - RNA, 16 nt, Human
agccuggucagcccaa

SEQ ID NO: 2240200 - RNA, 15 nt, Human
agccuggucagccca

SEQ ID NO: 2240201 - RNA, 23 nt, Human
agccugggguggggucaugcccu

SEQ ID NO: 2240202 - RNA, 19 nt, Human
agccugggguggggucaug

SEQ ID NO: 2240203 - RNA, 20 nt, Human
agccugggguggggucaugc

SEQ ID NO: 2240204 - RNA, 21 nt, Human
agccugggugacagagugaga

SEQ ID NO: 2240205 - RNA, 23 nt, Human
agccuucagucuugaauuucuaa

SEQ ID NO: 2240206 - RNA, 15 nt, Human
agccuuauccucuga

SEQ ID NO: 2240207 - RNA, 17 nt, Human
agccuuauccucugauc

SEQ ID NO: 2240208 - RNA, 18 nt, Human
agccuuauccucugaucu

SEQ ID NO: 2240209 - RNA, 14 nt, Human
agccuuaucaagug

SEQ ID NO: 2240210 - RNA, 15 nt, Human
agccuuaucaagugu

SEQ ID NO: 2240211 - RNA, 17 nt, Human
agccuuaucaagugucu

SEQ ID NO: 2240212 - RNA, 18 nt, Human
agccuuaucaagugucuu

SEQ ID NO: 2240213 - RNA, 19 nt, Human
agccuuaucaagugucuuc

SEQ ID NO: 2240214 - RNA, 14 nt, Human
agccuuauccucug

SEQ ID NO: 2240215 - RNA, 14 nt, Human
agccuguuggaccc

SEQ ID NO: 2240216 - RNA, 20 nt, Human
agccuguuccccucacugga

SEQ ID NO: 2240217 - RNA, 22 nt, Human
agccuguuccccucacuggaug

SEQ ID NO: 2240218 - RNA, 22 nt, Human
agccuguuggacccgcucugga

SEQ ID NO: 2240219 - RNA, 21 nt, Human
agccuguguaacagcuccuug

SEQ ID NO: 2240220 - RNA, 19 nt, Human
agccuguguaacagcuccu

SEQ ID NO: 2240221 - RNA, 20 nt, Human
agccuguguaacagcuccuu

SEQ ID NO: 2240222 - RNA, 14 nt, Human
agccuguuccccuc

SEQ ID NO: 2240223 - RNA, 17 nt, Human
agccuguuccccucacu

SEQ ID NO: 2240224 - RNA, 18 nt, Human
agccuguuccccucacug

SEQ ID NO: 2240225 - RNA, 13 nt, Human
agccuguuuaaga

SEQ ID NO: 2240226 - RNA, 20 nt, Human
agccuguggcggugccuggg

SEQ ID NO: 2240227 - RNA, 13 nt, Human
agccuguguaaca

SEQ ID NO: 2240228 - RNA, 19 nt, Human
agccuguggcggugccugg

SEQ ID NO: 2240229 - RNA, 18 nt, Human
agccuguggcggugccug

SEQ ID NO: 2240230 - RNA, 15 nt, Human
agccuguguaacagc

SEQ ID NO: 2240231 - RNA, 16 nt, Human
agccuguguaacagcu

SEQ ID NO: 2240232 - RNA, 17 nt, Human
agccuguguaacagcuc

SEQ ID NO: 2240233 - RNA, 18 nt, Human
agccuguguaacagcucc

SEQ ID NO: 2240234 - RNA, 22 nt, Human
agccuguggcggugccugggug

SEQ ID NO: 2240235 - RNA, 21 nt, Human
agccuguggcaucuuugccuu

SEQ ID NO: 2240236 - RNA, 17 nt, Human
agccuguggcggugccu

SEQ ID NO: 2240237 - RNA, 22 nt, Human
agccuguggcaucuuugccuug

SEQ ID NO: 2240238 - RNA, 14 nt, Human
agccuguggcaucu

SEQ ID NO: 2240239 - RNA, 11 nt, Human
agccuguggca

SEQ ID NO: 2240240 - RNA, 22 nt, Human
agccuggugggccuccucuguc

SEQ ID NO: 2240241 - RNA, 21 nt, Human
agccuggugggccuccucugu

SEQ ID NO: 2240242 - RNA, 18 nt, Human
agccuggugggccuccuc

SEQ ID NO: 2240243 - RNA, 16 nt, Human
agccuggugggccucc

SEQ ID NO: 2240244 - RNA, 14 nt, Human
agccuggugggccu

SEQ ID NO: 2240245 - RNA, 11 nt, Human
agccugguggg

SEQ ID NO: 2240246 - RNA, 21 nt, Human
agccugugccucugggacugg

SEQ ID NO: 2240247 - RNA, 16 nt, Human
agccuggugcugcugc

SEQ ID NO: 2240248 - RNA, 15 nt, Human
agccuggugcugcug

SEQ ID NO: 2240249 - RNA, 14 nt, Human
agccuggugcugcu

SEQ ID NO: 2240250 - RNA, 20 nt, Human
agccuggucagcccaaacca

SEQ ID NO: 2240251 - RNA, 11 nt, Human
agccuggugcc

SEQ ID NO: 2240252 - RNA, 20 nt, Human
ugcccagcccggaccuuggc

SEQ ID NO: 2240253 - RNA, 14 nt, Human
ugcccacaggccgc

SEQ ID NO: 2240254 - RNA, 21 nt, Human
ugcccagccccuucugaccca

SEQ ID NO: 2240255 - RNA, 20 nt, Human
ugcccagccccuucugaccc

SEQ ID NO: 2240256 - RNA, 20 nt, Human
ugcccacaggaucagucuga

SEQ ID NO: 2240257 - RNA, 12 nt, Human
ugcccacaggcc

SEQ ID NO: 2240258 - RNA, 20 nt, Human
ugcccaagccagaggcuggg

SEQ ID NO: 2240259 - RNA, 16 nt, Human
ugcccaagccagaggc

SEQ ID NO: 2240260 - RNA, 18 nt, Human
ugcccaagccagaggcug

SEQ ID NO: 2240261 - RNA, 19 nt, Human
ugcccacaggaucagucug

SEQ ID NO: 2240262 - RNA, 16 nt, Human
ugcccacaggaucagu

SEQ ID NO: 2240263 - RNA, 19 nt, Human
agcucaguuuauccaaggu

SEQ ID NO: 2240264 - RNA, 23 nt, Human
agcucaguucuagucucucuggg

SEQ ID NO: 2240265 - RNA, 14 nt, Human
agcucaucucuguc

SEQ ID NO: 2240266 - RNA, 14 nt, Human
agcucauauuuugu

SEQ ID NO: 2240267 - RNA, 15 nt, Human
agcucauauuuugua

SEQ ID NO: 2240268 - RNA, 18 nt, Human
agcucauauuuuguauau

SEQ ID NO: 2240269 - RNA, 21 nt, Human
agcucauucuccuuguguuac

SEQ ID NO: 2240270 - RNA, 20 nt, Human
agcucauucuccuuguguua

SEQ ID NO: 2240271 - RNA, 21 nt, Human
ugcccaagaauagaugcugac

SEQ ID NO: 2240272 - RNA, 18 nt, Human
agcuccaaccugcaaaga

SEQ ID NO: 2240273 - RNA, 16 nt, Human
agcuccaaccugcaaa

SEQ ID NO: 2240274 - RNA, 15 nt, Human
agcuccaaccugcaa

SEQ ID NO: 2240275 - RNA, 14 nt, Human
agcuccaaccugca

SEQ ID NO: 2240276 - RNA, 13 nt, Human
agcuccaaccugc

SEQ ID NO: 2240277 - RNA, 12 nt, Human
agcucauuucac

SEQ ID NO: 2240278 - RNA, 15 nt, Human
agcucauuucacuuu

SEQ ID NO: 2240279 - RNA, 22 nt, Human
ugcccaagaauagaugcugacu

SEQ ID NO: 2240280 - RNA, 23 nt, Human
ugcccaagaauagaugcugacug

SEQ ID NO: 2240281 - RNA, 11 nt, Human
ugcccaagcca

SEQ ID NO: 2240282 - RNA, 13 nt, Human
ugcccaagccaga

SEQ ID NO: 2240283 - RNA, 14 nt, Human
ugcccaagccagag

SEQ ID NO: 2240284 - RNA, 15 nt, Human
ugcccaagccagagg

SEQ ID NO: 2240285 - RNA, 12 nt, Human
agcuaggccugg

SEQ ID NO: 2240286 - RNA, 13 nt, Human
agcuaggaaugaa

SEQ ID NO: 2240287 - RNA, 12 nt, Human
agcuaggaauga

SEQ ID NO: 2240288 - RNA, 18 nt, Human
agcuaggaauuguguuua

SEQ ID NO: 2240289 - RNA, 16 nt, Human
agcuaggccuggccag

SEQ ID NO: 2240290 - RNA, 21 nt, Human
agcucagcuacugauuuuugu

SEQ ID NO: 2240291 - RNA, 17 nt, Human
agcucagcgccagccug

SEQ ID NO: 2240292 - RNA, 14 nt, Human
agcuaggccuggcc

SEQ ID NO: 2240293 - RNA, 15 nt, Human
agcuaggccuggcca

SEQ ID NO: 2240294 - RNA, 22 nt, Human
agcucagcuuuuugucuuuucu

SEQ ID NO: 2240295 - RNA, 20 nt, Human
agcucagcuuuuugucuuuu

SEQ ID NO: 2240296 - RNA, 18 nt, Human
agcucaggugucccugca

SEQ ID NO: 2240297 - RNA, 18 nt, Human
agcucaggacagaugcca

SEQ ID NO: 2240298 - RNA, 17 nt, Human
agcucaggacagaugcc

SEQ ID NO: 2240299 - RNA, 13 nt, Human
agcucaggacaga

SEQ ID NO: 2240300 - RNA, 21 nt, Human
agcucagucccaucagagagc

SEQ ID NO: 2240301 - RNA, 13 nt, Human
agcucagucccau

SEQ ID NO: 2240302 - RNA, 21 nt, Human
agcucaguucuagucucucug

SEQ ID NO: 2240303 - RNA, 22 nt, Human
agcucaguucuagucucucugg

SEQ ID NO: 2240304 - RNA, 22 nt, Human
agcucaggugucccugcacuug

SEQ ID NO: 2240305 - RNA, 20 nt, Human
agcucaggugucccugcacu

SEQ ID NO: 2240306 - RNA, 21 nt, Human
agcucaggugucccugcacuu

SEQ ID NO: 2240307 - RNA, 23 nt, Human
agcuaccucaaccaaugccaaaa

SEQ ID NO: 2240308 - RNA, 20 nt, Human
agcuacccuuuuucuccagc

SEQ ID NO: 2240309 - RNA, 14 nt, Human
agcuaccucaacca

SEQ ID NO: 2240310 - RNA, 16 nt, Human
agcuaccucaaacuuc

SEQ ID NO: 2240311 - RNA, 23 nt, Human
agcguagcuaagugaaaagguca

SEQ ID NO: 2240312 - RNA, 19 nt, Human
agcgugcaccaucccuuuu

SEQ ID NO: 2240313 - RNA, 21 nt, Human
agcuacccuuuuucuccagcu

SEQ ID NO: 2240314 - RNA, 19 nt, Human
agcuacuaauuuuaaaaug

SEQ ID NO: 2240315 - RNA, 18 nt, Human
agcguacucaucaucaac

SEQ ID NO: 2240316 - RNA, 22 nt, Human
agcgguuuggggagcagagaca

SEQ ID NO: 2240317 - RNA, 14 nt, Human
agcguagccucucc

SEQ ID NO: 2240318 - RNA, 19 nt, Human
agcgguuuggggagcagag

SEQ ID NO: 2240319 - RNA, 19 nt, Human
agcgugagccacugcaccg

SEQ ID NO: 2240320 - RNA, 15 nt, Human
agcgugcauaaguua

SEQ ID NO: 2240321 - RNA, 22 nt, Human
agcgugagccacugcaccgggc

SEQ ID NO: 2240322 - RNA, 22 nt, Human
agcggugcuguccucagguggc

SEQ ID NO: 2240323 - RNA, 13 nt, Human
agcggucucaggc

SEQ ID NO: 2240324 - RNA, 22 nt, Human
agcggucucaggcuggugggag

SEQ ID NO: 2240325 - RNA, 14 nt, Human
agcgguuuggggag

SEQ ID NO: 2240326 - RNA, 15 nt, Human
agcgguggcccuguc

SEQ ID NO: 2240327 - RNA, 23 nt, Human
agcggucucaggcuggugggagg

SEQ ID NO: 2240328 - RNA, 12 nt, Human
agcgguggcccu

SEQ ID NO: 2240329 - RNA, 21 nt, Human
agcgguggcccugucccuccc

SEQ ID NO: 2240330 - RNA, 16 nt, Human
agcgggggccagggaa

SEQ ID NO: 2240331 - RNA, 21 nt, Human
ugccagacggcacccacccag

SEQ ID NO: 2240332 - RNA, 20 nt, Human
ugccagaagauccccucagg

SEQ ID NO: 2240333 - RNA, 21 nt, Human
ugccagagacggaagccuuuu

SEQ ID NO: 2240334 - RNA, 22 nt, Human
ugccagagacggaagccuuuuu

SEQ ID NO: 2240335 - RNA, 20 nt, Human
ugccagaacaguuuguacag

SEQ ID NO: 2240336 - RNA, 18 nt, Human
ugccagaagauccccuca

SEQ ID NO: 2240337 - RNA, 21 nt, Human
ugccagaagauccccucagga

SEQ ID NO: 2240338 - RNA, 19 nt, Human
ugccagaacaguuuguaca

SEQ ID NO: 2240339 - RNA, 18 nt, Human
ugccagaacaguuuguac

SEQ ID NO: 2240340 - RNA, 14 nt, Human
ugccagaacaguuu

SEQ ID NO: 2240341 - RNA, 12 nt, Human
ugccacuuuuua

SEQ ID NO: 2240342 - RNA, 13 nt, Human
ugccagacaugug

SEQ ID NO: 2240343 - RNA, 12 nt, Human
ugccagacaugu

SEQ ID NO: 2240344 - RNA, 17 nt, Human
ugccagacccccuggag

SEQ ID NO: 2240345 - RNA, 22 nt, Human
ugccacacuucaggcucuucuc

SEQ ID NO: 2240346 - RNA, 23 nt, Human
ugccacacuucaggcucuucucc

SEQ ID NO: 2240347 - RNA, 23 nt, Human
ugccacuuugguacauggccagu

SEQ ID NO: 2240348 - RNA, 19 nt, Human
ugccacuuugcaaaggagc

SEQ ID NO: 2240349 - RNA, 19 nt, Human
ugcauuggaagaccccacc

SEQ ID NO: 2240350 - RNA, 18 nt, Human
agcuagcgcugccgcacc

SEQ ID NO: 2240351 - RNA, 16 nt, Human
agcuagcgcugccgca

SEQ ID NO: 2240352 - RNA, 14 nt, Human
agcuagcgcugccg

SEQ ID NO: 2240353 - RNA, 20 nt, Human
agcuagaggaaccaaccccc

SEQ ID NO: 2240354 - RNA, 12 nt, Human
agcuagaggaac

SEQ ID NO: 2240355 - RNA, 21 nt, Human
agcuagcgcugccgcacccca

SEQ ID NO: 2240356 - RNA, 20 nt, Human
agcuagcgcugccgcacccc

SEQ ID NO: 2240357 - RNA, 14 nt, Human
agcuagcuccccuc

SEQ ID NO: 2240358 - RNA, 15 nt, Human
agcuagcuccccucc

SEQ ID NO: 2240359 - RNA, 16 nt, Human
agcuagcuccccuccu

SEQ ID NO: 2240360 - RNA, 17 nt, Human
agcuagcuccccuccuc

SEQ ID NO: 2240361 - RNA, 17 nt, Human
agcuagcugcagagcca

SEQ ID NO: 2240362 - RNA, 18 nt, Human
agcuagcuccccuccucu

SEQ ID NO: 2240363 - RNA, 20 nt, Human
agcuagcuccccuccucucc

SEQ ID NO: 2240364 - RNA, 21 nt, Human
agcuagcuccccuccucuccc

SEQ ID NO: 2240365 - RNA, 23 nt, Human
agcuagcuccccuccucuccccu

SEQ ID NO: 2240366 - RNA, 18 nt, Human
agcuagacgagcaggcuu

SEQ ID NO: 2240367 - RNA, 22 nt, Human
agcuagaauucccucucucuga

SEQ ID NO: 2240368 - RNA, 12 nt, Human
agcuagaaauga

SEQ ID NO: 2240369 - RNA, 19 nt, Human
agcuacuugggccauagcu

SEQ ID NO: 2240370 - RNA, 15 nt, Human
agcuagaaauaugau

SEQ ID NO: 2240371 - RNA, 16 nt, Human
agcuagaacccggcag

SEQ ID NO: 2240372 - RNA, 15 nt, Human
agcuagaaccuggag

SEQ ID NO: 2240373 - RNA, 16 nt, Human
agcuagaaccuggaga

SEQ ID NO: 2240374 - RNA, 18 nt, Human
agcuagaaccuggagagc

SEQ ID NO: 2240375 - RNA, 16 nt, Human
agcuagaaccuggagg

SEQ ID NO: 2240376 - RNA, 19 nt, Human
agcuagaacuuugaaggac

SEQ ID NO: 2240377 - RNA, 24 nt, Human
agcuagaagugggccaggacaggc

SEQ ID NO: 2240378 - RNA, 22 nt, Human
agcuagaagugggccaggacag

SEQ ID NO: 2240379 - RNA, 21 nt, Human
agcuagaagugggccaggaca

SEQ ID NO: 2240380 - RNA, 19 nt, Human
agcuagaagugggccagga

SEQ ID NO: 2240381 - RNA, 15 nt, Human
agcuagaagugggcc

SEQ ID NO: 2240382 - RNA, 16 nt, Human
agcuagaaggccacau

SEQ ID NO: 2240383 - RNA, 14 nt, Human
agcuagaaggccac

SEQ ID NO: 2240384 - RNA, 15 nt, Human
agcuagaaggccaca

SEQ ID NO: 2240385 - RNA, 11 nt, Human
agcuagaaaug

SEQ ID NO: 2240386 - RNA, 14 nt, Human
agcuacuugggcca

SEQ ID NO: 2240387 - RNA, 15 nt, Human
agcuacuugggccau

SEQ ID NO: 2240388 - RNA, 22 nt, Human
agcuacuugggccauagcuccu

SEQ ID NO: 2240389 - RNA, 18 nt, Human
agcuacuaaugauguuuu

SEQ ID NO: 2240390 - RNA, 16 nt, Human
agcuacuaaugauguu

SEQ ID NO: 2240391 - RNA, 13 nt, Human
agcuacuaaugau

SEQ ID NO: 2240392 - RNA, 16 nt, Human
agcuacuugggaggcu

SEQ ID NO: 2240393 - RNA, 13 nt, Human
agcuacuugggcc

SEQ ID NO: 2240394 - RNA, 17 nt, Human
agcuacuugggaggcug

SEQ ID NO: 2240395 - RNA, 18 nt, Human
agcuacuugggaggcuga

SEQ ID NO: 2240396 - RNA, 15 nt, Human
ugaugagcuccucuu

SEQ ID NO: 2240397 - RNA, 16 nt, Human
ugaugagcuccucuuc

SEQ ID NO: 2240398 - RNA, 21 nt, Human
ugaugacaacuggaauaguuu

SEQ ID NO: 2240399 - RNA, 19 nt, Human
ugaugacaacuggaauagu

SEQ ID NO: 2240400 - RNA, 14 nt, Human
ugaugaauacugua

SEQ ID NO: 2240401 - RNA, 17 nt, Human
ugaugaggccucuugga

SEQ ID NO: 2240402 - RNA, 18 nt, Human
ugaugaggccucuuggac

SEQ ID NO: 2240403 - RNA, 22 nt, Human
ugaugaggccucuuggaccucu

SEQ ID NO: 2240404 - RNA, 14 nt, Human
ugaugaagaggagu

SEQ ID NO: 2240405 - RNA, 13 nt, Human
ugaugaagaggag

SEQ ID NO: 2240406 - RNA, 19 nt, Human
ugaucgugacgcugaauaa

SEQ ID NO: 2240407 - RNA, 20 nt, Human
ugaucgugacgcugaauaaa

SEQ ID NO: 2240408 - RNA, 21 nt, Human
ugaucgugacgcugaauaaau

SEQ ID NO: 2240409 - RNA, 23 nt, Human
ugaucgugacgcugaauaaaugu

SEQ ID NO: 2240410 - RNA, 17 nt, Human
ugaucgccuuucccagg

SEQ ID NO: 2240411 - RNA, 15 nt, Human
ugaucgccuuuccca

SEQ ID NO: 2240412 - RNA, 18 nt, Human
ugaucggagccuccucuc

SEQ ID NO: 2240413 - RNA, 15 nt, Human
ugaucgugacgcuga

SEQ ID NO: 2240414 - RNA, 16 nt, Human
ugaucgugacgcugaa

SEQ ID NO: 2240415 - RNA, 17 nt, Human
ugaugaagaaguugaua

SEQ ID NO: 2240416 - RNA, 21 nt, Human
ugauccaugaguuugcccugg

SEQ ID NO: 2240417 - RNA, 18 nt, Human
ugauccagccucuccccu

SEQ ID NO: 2240418 - RNA, 19 nt, Human
ugauccagccucuccccug

SEQ ID NO: 2240419 - RNA, 20 nt, Human
ugauccuggaggcccaguuc

SEQ ID NO: 2240420 - RNA, 13 nt, Human
ugauccugugaag

SEQ ID NO: 2240421 - RNA, 18 nt, Human
ugauccuuuuggagucag

SEQ ID NO: 2240422 - RNA, 15 nt, Human
ugauccuuacaaguu

SEQ ID NO: 2240423 - RNA, 14 nt, Human
ugauccugugaagu

SEQ ID NO: 2240424 - RNA, 20 nt, Human
ugauccuuuuauguuauuua

SEQ ID NO: 2240425 - RNA, 15 nt, Human
agccacggccaggcc

SEQ ID NO: 2240426 - RNA, 23 nt, Human
agccaccuuuugggaauguuuua

SEQ ID NO: 2240427 - RNA, 15 nt, Human
ugauccagcccugag

SEQ ID NO: 2240428 - RNA, 18 nt, Human
ugauccagcccugaguuc

SEQ ID NO: 2240429 - RNA, 17 nt, Human
ugauccagcccugaguu

SEQ ID NO: 2240430 - RNA, 16 nt, Human
agccaccaacucuugc

SEQ ID NO: 2240431 - RNA, 17 nt, Human
agccaccaacucuugca

SEQ ID NO: 2240432 - RNA, 13 nt, Human
agccaccaacucu

SEQ ID NO: 2240433 - RNA, 23 nt, Human
agccacauuuggaauacuuuuug

SEQ ID NO: 2240434 - RNA, 22 nt, Human
agccacauuuggaauacuuuuu

SEQ ID NO: 2240435 - RNA, 21 nt, Human
agccacauuuggaauacuuuu

SEQ ID NO: 2240436 - RNA, 21 nt, Human
agccaccgaagccgccugugg

SEQ ID NO: 2240437 - RNA, 20 nt, Human
agccaccgaagccgccugug

SEQ ID NO: 2240438 - RNA, 15 nt, Human
agccaccgaagccgc

SEQ ID NO: 2240439 - RNA, 14 nt, Human
agccaccucucuuu

SEQ ID NO: 2240440 - RNA, 16 nt, Human
agccaccucucccuca

SEQ ID NO: 2240441 - RNA, 22 nt, Human
agccaccucucccucaacaagg

SEQ ID NO: 2240442 - RNA, 12 nt, Human
agccaccucucc

SEQ ID NO: 2240443 - RNA, 14 nt, Human
agccaccucucccu

SEQ ID NO: 2240444 - RNA, 15 nt, Human
agccaccucucccuc

SEQ ID NO: 2240445 - RNA, 18 nt, Human
agccaccgugccuggcca

SEQ ID NO: 2240446 - RNA, 22 nt, Human
agccaccgaagccgccugugga

SEQ ID NO: 2240447 - RNA, 22 nt, Human
agccaccuuuugggaauguuuu

SEQ ID NO: 2240448 - RNA, 18 nt, Human
agccaccucucuuuuuca

SEQ ID NO: 2240449 - RNA, 14 nt, Human
agccacggccaggc

SEQ ID NO: 2240450 - RNA, 14 nt, Human
agccacauuccuga

SEQ ID NO: 2240451 - RNA, 18 nt, Human
agccacauuccugaugcu

SEQ ID NO: 2240452 - RNA, 11 nt, Human
agcauuugaau

SEQ ID NO: 2240453 - RNA, 13 nt, Human
agcauuucugaag

SEQ ID NO: 2240454 - RNA, 12 nt, Human
agcauuugaaug

SEQ ID NO: 2240455 - RNA, 13 nt, Human
agcauuugaaugc

SEQ ID NO: 2240456 - RNA, 14 nt, Human
agcauuugaaugca

SEQ ID NO: 2240457 - RNA, 15 nt, Human
agcauuugaaugcau

SEQ ID NO: 2240458 - RNA, 11 nt, Human
agccacauccc

SEQ ID NO: 2240459 - RNA, 19 nt, Human
agccaccaacauacuccca

SEQ ID NO: 2240460 - RNA, 20 nt, Human
agccacauuuggaauacuuu

SEQ ID NO: 2240461 - RNA, 15 nt, Human
agccacauuuggaau

SEQ ID NO: 2240462 - RNA, 22 nt, Human
agccacaguuuccucaucuguc

SEQ ID NO: 2240463 - RNA, 22 nt, Human
agcauuucugaaguggacucuu

SEQ ID NO: 2240464 - RNA, 23 nt, Human
agccacaucccuuugaaacaaga

SEQ ID NO: 2240465 - RNA, 20 nt, Human
agccaccaacauacucccau

SEQ ID NO: 2240466 - RNA, 23 nt, Human
agccaccaacauacucccaucug

SEQ ID NO: 2240467 - RNA, 16 nt, Human
agccacugaagcuggg

SEQ ID NO: 2240468 - RNA, 13 nt, Human
agccacugaagcu

SEQ ID NO: 2240469 - RNA, 12 nt, Human
agccacugaagc

SEQ ID NO: 2240470 - RNA, 22 nt, Human
agccacuccucugacucagggc

SEQ ID NO: 2240471 - RNA, 21 nt, Human
agccacuccucugacucaggg

SEQ ID NO: 2240472 - RNA, 15 nt, Human
agccacucgggaggc

SEQ ID NO: 2240473 - RNA, 19 nt, Human
agccacucgggaggcugag

SEQ ID NO: 2240474 - RNA, 14 nt, Human
ugauuaccagggac

SEQ ID NO: 2240475 - RNA, 15 nt, Human
agccacuccucugac

SEQ ID NO: 2240476 - RNA, 14 nt, Human
agccacuccucuga

SEQ ID NO: 2240477 - RNA, 13 nt, Human
agccacuccucug

SEQ ID NO: 2240478 - RNA, 14 nt, Human
ugauuacacaaaac

SEQ ID NO: 2240479 - RNA, 15 nt, Human
ugauuacacaaaaca

SEQ ID NO: 2240480 - RNA, 17 nt, Human
ugauuacacaaaacaaa

SEQ ID NO: 2240481 - RNA, 14 nt, Human
ugauuacacaguug

SEQ ID NO: 2240482 - RNA, 13 nt, Human
ugauuacacaguu

SEQ ID NO: 2240483 - RNA, 18 nt, Human
ugauuacaccagccucgu

SEQ ID NO: 2240484 - RNA, 21 nt, Human
ugauuaauucaccuuccagug

SEQ ID NO: 2240485 - RNA, 20 nt, Human
ugauuaaacgugcagacuau

SEQ ID NO: 2240486 - RNA, 15 nt, Human
ugauuaauuaaaaca

SEQ ID NO: 2240487 - RNA, 12 nt, Human
ugauuaaaccaa

SEQ ID NO: 2240488 - RNA, 14 nt, Human
agccacugugcuga

SEQ ID NO: 2240489 - RNA, 17 nt, Human
agccacuuaaaauguuc

SEQ ID NO: 2240490 - RNA, 22 nt, Human
agccacuuaccuucaauaaagu

SEQ ID NO: 2240491 - RNA, 21 nt, Human
agccacuuaccuucaauaaag

SEQ ID NO: 2240492 - RNA, 18 nt, Human
agccacuuaccuucaaua

SEQ ID NO: 2240493 - RNA, 17 nt, Human
agccacuuaccuucaau

SEQ ID NO: 2240494 - RNA, 16 nt, Human
agccacuuaccuucaa

SEQ ID NO: 2240495 - RNA, 15 nt, Human
agccacuuaccuuca

SEQ ID NO: 2240496 - RNA, 13 nt, Human
agccacuuaccuu

SEQ ID NO: 2240497 - RNA, 18 nt, Human
agccacugugcugaauuc

SEQ ID NO: 2240498 - RNA, 23 nt, Human
agccagaaauaaaguuggugaca

SEQ ID NO: 2240499 - RNA, 14 nt, Human
agccagaaccugga

SEQ ID NO: 2240500 - RNA, 20 nt, Human
agccagaacguggcucugcu

SEQ ID NO: 2240501 - RNA, 19 nt, Human
agccagaaauaaaguuggu

SEQ ID NO: 2240502 - RNA, 23 nt, Human
agccacuuaccuucaauaaagua

SEQ ID NO: 2240503 - RNA, 13 nt, Human
agccacugcaccg

SEQ ID NO: 2240504 - RNA, 21 nt, Human
agccacugcaccgggccacag

SEQ ID NO: 2240505 - RNA, 22 nt, Human
agccacugcaccgggccacaga

SEQ ID NO: 2240506 - RNA, 20 nt, Human
ugaugauccuaggcauuugc

SEQ ID NO: 2240507 - RNA, 14 nt, Human
ugaugaucuuuaaa

SEQ ID NO: 2240508 - RNA, 13 nt, Human
ugaugaguuguga

SEQ ID NO: 2240509 - RNA, 14 nt, Human
ugaugaggggaggg

SEQ ID NO: 2240510 - RNA, 15 nt, Human
ugaugaggggagggg

SEQ ID NO: 2240511 - RNA, 14 nt, Human
ugaugauccuaggc

SEQ ID NO: 2240512 - RNA, 17 nt, Human
ugauggugcaaugaccu

SEQ ID NO: 2240513 - RNA, 23 nt, Human
ugauggugcaaugaccuuucaau

SEQ ID NO: 2240514 - RNA, 16 nt, Human
ugauggugcaaugacc

SEQ ID NO: 2240515 - RNA, 17 nt, Human
ugaugaucuuuaaaaua

SEQ ID NO: 2240516 - RNA, 18 nt, Human
ugauguuuuccuauaaua

SEQ ID NO: 2240517 - RNA, 18 nt, Human
ugauguuuuaaggaugcu

SEQ ID NO: 2240518 - RNA, 17 nt, Human
ugauguuuuaaggaugc

SEQ ID NO: 2240519 - RNA, 21 nt, Human
ugaugaucagcuguuugucau

SEQ ID NO: 2240520 - RNA, 15 nt, Human
ugaugauacaagauu

SEQ ID NO: 2240521 - RNA, 15 nt, Human
ugauggugcugaccu

SEQ ID NO: 2240522 - RNA, 20 nt, Human
ugauguuuguggccucagaa

SEQ ID NO: 2240523 - RNA, 19 nt, Human
ugauguuuguggccucaga

SEQ ID NO: 2240524 - RNA, 18 nt, Human
ugauguuuguggccucag

SEQ ID NO: 2240525 - RNA, 17 nt, Human
ugauguuuguggccuca

SEQ ID NO: 2240526 - RNA, 11 nt, Human
ugauguuugug

SEQ ID NO: 2240527 - RNA, 13 nt, Human
ugauguuuguccu

SEQ ID NO: 2240528 - RNA, 16 nt, Human
ugauguuuguggccuc

SEQ ID NO: 2240529 - RNA, 14 nt, Human
agccaggccccagg

SEQ ID NO: 2240530 - RNA, 23 nt, Human
agccaggcacacacugugcuuuc

SEQ ID NO: 2240531 - RNA, 21 nt, Human
agccaggcagguagccagggg

SEQ ID NO: 2240532 - RNA, 15 nt, Human
agccaggccccaggc

SEQ ID NO: 2240533 - RNA, 12 nt, Human
agccaggccugg

SEQ ID NO: 2240534 - RNA, 15 nt, Human
agccaggccacuggc

SEQ ID NO: 2240535 - RNA, 12 nt, Human
agccaggcacac

SEQ ID NO: 2240536 - RNA, 17 nt, Human
agccaggcacacacugu

SEQ ID NO: 2240537 - RNA, 18 nt, Human
agccaggcacacacugug

SEQ ID NO: 2240538 - RNA, 20 nt, Human
agccaggcacacacugugcu

SEQ ID NO: 2240539 - RNA, 21 nt, Human
agccaggccacaagacccuug

SEQ ID NO: 2240540 - RNA, 22 nt, Human
agccaggccacaagacccuugu

SEQ ID NO: 2240541 - RNA, 12 nt, Human
agccagggucuc

SEQ ID NO: 2240542 - RNA, 23 nt, Human
agccagggggacuagccccugug

SEQ ID NO: 2240543 - RNA, 21 nt, Human
agccagggggacuagccccug

SEQ ID NO: 2240544 - RNA, 22 nt, Human
agccagggggacuagccccugu

SEQ ID NO: 2240545 - RNA, 18 nt, Human
agccaggcgggcucaagg

SEQ ID NO: 2240546 - RNA, 18 nt, Human
agccagggggacuagccc

SEQ ID NO: 2240547 - RNA, 22 nt, Human
agccaggccugggucugugucu

SEQ ID NO: 2240548 - RNA, 13 nt, Human
agccaggcgggcu

SEQ ID NO: 2240549 - RNA, 14 nt, Human
agccaggcgggcuc

SEQ ID NO: 2240550 - RNA, 15 nt, Human
agccaggcgggcuca

SEQ ID NO: 2240551 - RNA, 19 nt, Human
agccaggcgggcucaagga

SEQ ID NO: 2240552 - RNA, 21 nt, Human
agccagugaccugaggaagcg

SEQ ID NO: 2240553 - RNA, 19 nt, Human
agccagugaccugaggaag

SEQ ID NO: 2240554 - RNA, 18 nt, Human
agccagugaccugaggaa

SEQ ID NO: 2240555 - RNA, 17 nt, Human
agccagugaccugagga

SEQ ID NO: 2240556 - RNA, 13 nt, Human
agccagucuuuac

SEQ ID NO: 2240557 - RNA, 14 nt, Human
agccagucccaggg

SEQ ID NO: 2240558 - RNA, 22 nt, Human
agccaguaaaugggggugcauu

SEQ ID NO: 2240559 - RNA, 23 nt, Human
agccaguaaaugggggugcauuu

SEQ ID NO: 2240560 - RNA, 21 nt, Human
agccaggguguggcccugcca

SEQ ID NO: 2240561 - RNA, 22 nt, Human
agccaggguguggcccugccau

SEQ ID NO: 2240562 - RNA, 18 nt, Human
agccagguaaugagggac

SEQ ID NO: 2240563 - RNA, 23 nt, Human
agccagguaaugagggacuggaa

SEQ ID NO: 2240564 - RNA, 22 nt, Human
agccauacuuaucucucugugc

SEQ ID NO: 2240565 - RNA, 16 nt, Human
agccauacuuaucucu

SEQ ID NO: 2240566 - RNA, 19 nt, Human
agccauacuuaucucucug

SEQ ID NO: 2240567 - RNA, 21 nt, Human
agccauauaaguuugaaggaa

SEQ ID NO: 2240568 - RNA, 21 nt, Human
agccaguucaguaccuggagg

SEQ ID NO: 2240569 - RNA, 22 nt, Human
agccaguucaguaccuggagga

SEQ ID NO: 2240570 - RNA, 17 nt, Human
agccaguucaguaccug

SEQ ID NO: 2240571 - RNA, 19 nt, Human
agccaguucaguaccugga

SEQ ID NO: 2240572 - RNA, 13 nt, Human
agccagugacucc

SEQ ID NO: 2240573 - RNA, 15 nt, Human
agccagugacuccag

SEQ ID NO: 2240574 - RNA, 16 nt, Human
agccagugacuccagg

SEQ ID NO: 2240575 - RNA, 17 nt, Human
agccagugacuccagga

SEQ ID NO: 2240576 - RNA, 18 nt, Human
agccagugacuccaggag

SEQ ID NO: 2240577 - RNA, 19 nt, Human
agccagugacuccaggaga

SEQ ID NO: 2240578 - RNA, 21 nt, Human
agccagugacuccaggagagg

SEQ ID NO: 2240579 - RNA, 22 nt, Human
agccagugacuccaggagagga

SEQ ID NO: 2240580 - RNA, 14 nt, Human
agccaggagcuggg

SEQ ID NO: 2240581 - RNA, 18 nt, Human
agccaggagcugggcaga

SEQ ID NO: 2240582 - RNA, 14 nt, Human
agccaggaucaugg

SEQ ID NO: 2240583 - RNA, 15 nt, Human
agccaggaucauggu

SEQ ID NO: 2240584 - RNA, 18 nt, Human
agccaggaucauggugua

SEQ ID NO: 2240585 - RNA, 20 nt, Human
agccaggaucaugguguaau

SEQ ID NO: 2240586 - RNA, 23 nt, Human
agccaggaucaugguguaauaag

SEQ ID NO: 2240587 - RNA, 22 nt, Human
agccaggaucaugguguaauaa

SEQ ID NO: 2240588 - RNA, 11 nt, Human
agccaggcaca

SEQ ID NO: 2240589 - RNA, 12 nt, Human
agccaggccaca

SEQ ID NO: 2240590 - RNA, 14 nt, Human
agccaggccacaag

SEQ ID NO: 2240591 - RNA, 19 nt, Human
agccaggaauuucccagga

SEQ ID NO: 2240592 - RNA, 17 nt, Human
agccaggaauuucccag

SEQ ID NO: 2240593 - RNA, 22 nt, Human
agccagcuuucccugccucuca

SEQ ID NO: 2240594 - RNA, 18 nt, Human
agccagcuuucccugccu

SEQ ID NO: 2240595 - RNA, 16 nt, Human
agccagcuuucccugc

SEQ ID NO: 2240596 - RNA, 23 nt, Human
agccaggaauuucccaggacccu

SEQ ID NO: 2240597 - RNA, 22 nt, Human
agccaggaauuucccaggaccc

SEQ ID NO: 2240598 - RNA, 21 nt, Human
agccaggaauuucccaggacc

SEQ ID NO: 2240599 - RNA, 20 nt, Human
agccaggaauuucccaggac

SEQ ID NO: 2240600 - RNA, 13 nt, Human
agccaggagcaaa

SEQ ID NO: 2240601 - RNA, 22 nt, Human
agccaggagcaaauguuucugc

SEQ ID NO: 2240602 - RNA, 23 nt, Human
agccaggagcaaauguuucugca

SEQ ID NO: 2240603 - RNA, 16 nt, Human
agccagcucugcauua

SEQ ID NO: 2240604 - RNA, 18 nt, Human
agccagacucuggucuuc

SEQ ID NO: 2240605 - RNA, 14 nt, Human
agccagacucuggu

SEQ ID NO: 2240606 - RNA, 16 nt, Human
agccagacucuggucu

SEQ ID NO: 2240607 - RNA, 19 nt, Human
agccagacuggcacaguuu

SEQ ID NO: 2240608 - RNA, 16 nt, Human
agccagcugccgacca

SEQ ID NO: 2240609 - RNA, 20 nt, Human
agccagcugccgaccagagc

SEQ ID NO: 2240610 - RNA, 16 nt, Human
agccagcugcucccca

SEQ ID NO: 2240611 - RNA, 14 nt, Human
agccagcuuucccu

SEQ ID NO: 2240612 - RNA, 13 nt, Human
agccagcuuuccc

SEQ ID NO: 2240613 - RNA, 21 nt, Human
agccagacagcaacggggagg

SEQ ID NO: 2240614 - RNA, 18 nt, Human
agccagaccuauuccucc

SEQ ID NO: 2240615 - RNA, 20 nt, Human
agccagaccuauuccuccug

SEQ ID NO: 2240616 - RNA, 20 nt, Human
agccagacacucugcucugc

SEQ ID NO: 2240617 - RNA, 19 nt, Human
agccagaccuauuccuccu

SEQ ID NO: 2240618 - RNA, 14 nt, Human
agccagacuggcac

SEQ ID NO: 2240619 - RNA, 15 nt, Human
agccagaagcugagc

SEQ ID NO: 2240620 - RNA, 14 nt, Human
agccagacacucug

SEQ ID NO: 2240621 - RNA, 20 nt, Human
agccagaagcugagcaccag

SEQ ID NO: 2240622 - RNA, 16 nt, Human
agccagacacucugcu

SEQ ID NO: 2240623 - RNA, 19 nt, Human
agccagacacucugcucug

SEQ ID NO: 2240624 - RNA, 22 nt, Human
agccagacacucugcucugccc

SEQ ID NO: 2240625 - RNA, 14 nt, Human
agccagaagcugag

SEQ ID NO: 2240626 - RNA, 12 nt, Human
agccagaagcug

SEQ ID NO: 2240627 - RNA, 21 nt, Human
agccagaacguggcucugcug

SEQ ID NO: 2240628 - RNA, 22 nt, Human
agccagaacguggcucugcugg

SEQ ID NO: 2240629 - RNA, 14 nt, Human
agccaugucugcau

SEQ ID NO: 2240630 - RNA, 22 nt, Human
agccauguagaagcugcaucuu

SEQ ID NO: 2240631 - RNA, 16 nt, Human
agccaucaaaaugcuu

SEQ ID NO: 2240632 - RNA, 15 nt, Human
agccaucaaaaugcu

SEQ ID NO: 2240633 - RNA, 14 nt, Human
agccaucaaaaugc

SEQ ID NO: 2240634 - RNA, 13 nt, Human
agccaucaaaaug

SEQ ID NO: 2240635 - RNA, 15 nt, Human
agccaugucugcauu

SEQ ID NO: 2240636 - RNA, 12 nt, Human
agcccagacaaa

SEQ ID NO: 2240637 - RNA, 11 nt, Human
agcccagagac

SEQ ID NO: 2240638 - RNA, 10 nt, Human
agcccagaga

SEQ ID NO: 2240639 - RNA, 22 nt, Human
agcccagagacauacuugaagg

SEQ ID NO: 2240640 - RNA, 15 nt, Human
agcccagacacagaa

SEQ ID NO: 2240641 - RNA, 21 nt, Human
agcccagagacauacuugaag

SEQ ID NO: 2240642 - RNA, 12 nt, Human
agcccagagaca

SEQ ID NO: 2240643 - RNA, 22 nt, Human
agcccacuucugccauauucug

SEQ ID NO: 2240644 - RNA, 17 nt, Human
agcccagaaaaggacag

SEQ ID NO: 2240645 - RNA, 23 nt, Human
agccaugugcugcgugccugugg

SEQ ID NO: 2240646 - RNA, 13 nt, Human
agcccagcccucc

SEQ ID NO: 2240647 - RNA, 12 nt, Human
agcccagcucca

SEQ ID NO: 2240648 - RNA, 16 nt, Human
agcccagcccagcugg

SEQ ID NO: 2240649 - RNA, 23 nt, Human
agcccagccauuaccauggagac

SEQ ID NO: 2240650 - RNA, 15 nt, Human
agcccagcccagcug

SEQ ID NO: 2240651 - RNA, 12 nt, Human
agcccagaggag

SEQ ID NO: 2240652 - RNA, 14 nt, Human
agcccagaggaggg

SEQ ID NO: 2240653 - RNA, 15 nt, Human
agcccagaggagggc

SEQ ID NO: 2240654 - RNA, 19 nt, Human
agcccaggaaaggcuccag

SEQ ID NO: 2240655 - RNA, 16 nt, Human
agcccagcugggucag

SEQ ID NO: 2240656 - RNA, 15 nt, Human
agcccagcuggguca

SEQ ID NO: 2240657 - RNA, 13 nt, Human
agcccagcugggu

SEQ ID NO: 2240658 - RNA, 14 nt, Human
agcccagcucugaa

SEQ ID NO: 2240659 - RNA, 20 nt, Human
agcccaggaaaggcuccagg

SEQ ID NO: 2240660 - RNA, 21 nt, Human
agcccaggaaaggcuccagga

SEQ ID NO: 2240661 - RNA, 19 nt, Human
ugauuccuuccuguucuga

SEQ ID NO: 2240662 - RNA, 18 nt, Human
ugauuccuuccuguucug

SEQ ID NO: 2240663 - RNA, 15 nt, Human
ugauuccacuuuuau

SEQ ID NO: 2240664 - RNA, 20 nt, Human
ugauuccuuccuguucugaa

SEQ ID NO: 2240665 - RNA, 22 nt, Human
ugauuccuugauggagauauuu

SEQ ID NO: 2240666 - RNA, 17 nt, Human
ugauuccuuugaagagg

SEQ ID NO: 2240667 - RNA, 20 nt, Human
ugauuccuuugaagaggaaa

SEQ ID NO: 2240668 - RNA, 21 nt, Human
ugauuccuuugaagaggaaaa

SEQ ID NO: 2240669 - RNA, 19 nt, Human
ugauucccaagcucugcuc

SEQ ID NO: 2240670 - RNA, 21 nt, Human
ugauucccaagcucugcuccu

SEQ ID NO: 2240671 - RNA, 17 nt, Human
ugauucauaauaaauau

SEQ ID NO: 2240672 - RNA, 19 nt, Human
ugauuccacuacaccuggc

SEQ ID NO: 2240673 - RNA, 22 nt, Human
ugauucauuuuaacaucugaga

SEQ ID NO: 2240674 - RNA, 20 nt, Human
ugauuccacuacaccuggcu

SEQ ID NO: 2240675 - RNA, 21 nt, Human
ugauuccacuacaccuggcug

SEQ ID NO: 2240676 - RNA, 22 nt, Human
ugauuccacuacaccuggcuga

SEQ ID NO: 2240677 - RNA, 23 nt, Human
ugauuccacuacaccuggcugag

SEQ ID NO: 2240678 - RNA, 15 nt, Human
ugauucccaagcucu

SEQ ID NO: 2240679 - RNA, 16 nt, Human
ugauucccaagcucug

SEQ ID NO: 2240680 - RNA, 18 nt, Human
ugauucccaagcucugcu

SEQ ID NO: 2240681 - RNA, 13 nt, Human
agcccaggagaga

SEQ ID NO: 2240682 - RNA, 14 nt, Human
agcccaggagagag

SEQ ID NO: 2240683 - RNA, 15 nt, Human
agcccaggagagaga

SEQ ID NO: 2240684 - RNA, 18 nt, Human
agcccaggaaaggcucca

SEQ ID NO: 2240685 - RNA, 24 nt, Human
agcccaggaaaggcuccaggagca

SEQ ID NO: 2240686 - RNA, 22 nt, Human
agcccaggaaaggcuccaggag

SEQ ID NO: 2240687 - RNA, 23 nt, Human
agcccaggaaaggcuccaggagc

SEQ ID NO: 2240688 - RNA, 14 nt, Human
ugauucagcucugc

SEQ ID NO: 2240689 - RNA, 13 nt, Human
ugauucagcucug

SEQ ID NO: 2240690 - RNA, 15 nt, Human
ugauucauaaugacu

SEQ ID NO: 2240691 - RNA, 17 nt, Human
ugauucauuuuaacauc

SEQ ID NO: 2240692 - RNA, 24 nt, Human
ugauucaguguuaaaugugaugaa

SEQ ID NO: 2240693 - RNA, 20 nt, Human
ugauucauuuuaacaucuga

SEQ ID NO: 2240694 - RNA, 21 nt, Human
ugauucaguguuaaaugugau

SEQ ID NO: 2240695 - RNA, 12 nt, Human
ugauucaguguu

SEQ ID NO: 2240696 - RNA, 16 nt, Human
agcccaggagagagaa

SEQ ID NO: 2240697 - RNA, 17 nt, Human
agcccaggagagagaaa

SEQ ID NO: 2240698 - RNA, 20 nt, Human
ugaguggacuggaguggagc

SEQ ID NO: 2240699 - RNA, 21 nt, Human
ugagugggguuaucucugugu

SEQ ID NO: 2240700 - RNA, 14 nt, Human
ugaguguaagugug

SEQ ID NO: 2240701 - RNA, 22 nt, Human
ugagugggguuaucucuguguu

SEQ ID NO: 2240702 - RNA, 11 nt, Human
ugaguguacca

SEQ ID NO: 2240703 - RNA, 15 nt, Human
ugaguguaaguguga

SEQ ID NO: 2240704 - RNA, 18 nt, Human
ugagugucuuaauuaaaa

SEQ ID NO: 2240705 - RNA, 15 nt, Human
ugaguucagguagcu

SEQ ID NO: 2240706 - RNA, 14 nt, Human
ugaguuauuuuaau

SEQ ID NO: 2240707 - RNA, 18 nt, Human
ugaguucauaaauuuaug

SEQ ID NO: 2240708 - RNA, 20 nt, Human
ugaguuauauguucacuguc

SEQ ID NO: 2240709 - RNA, 21 nt, Human
ugagugggugaauaauacagu

SEQ ID NO: 2240710 - RNA, 23 nt, Human
ugagugggggaucacagccucug

SEQ ID NO: 2240711 - RNA, 19 nt, Human
ugagugcucugaucccucu

SEQ ID NO: 2240712 - RNA, 13 nt, Human
ugaguggacugga

SEQ ID NO: 2240713 - RNA, 13 nt, Human
ugagugcucugau

SEQ ID NO: 2240714 - RNA, 12 nt, Human
ugagugcucuga

SEQ ID NO: 2240715 - RNA, 18 nt, Human
ugagucaaugugcagugu

SEQ ID NO: 2240716 - RNA, 15 nt, Human
ugagucaaugugcag

SEQ ID NO: 2240717 - RNA, 15 nt, Human
ugagucaaaaaaucu

SEQ ID NO: 2240718 - RNA, 13 nt, Human
ugagucaaugugc

SEQ ID NO: 2240719 - RNA, 14 nt, Human
ugagucaccaagcc

SEQ ID NO: 2240720 - RNA, 21 nt, Human
ugaguaucuccucgcaagcug

SEQ ID NO: 2240721 - RNA, 15 nt, Human
ugaguaucuccucgc

SEQ ID NO: 2240722 - RNA, 21 nt, Human
ugaguauccuuucaguguuau

SEQ ID NO: 2240723 - RNA, 16 nt, Human
ugagucaccaagccca

SEQ ID NO: 2240724 - RNA, 17 nt, Human
ugagucaccaagcccag

SEQ ID NO: 2240725 - RNA, 17 nt, Human
ugagugccuuacacaau

SEQ ID NO: 2240726 - RNA, 20 nt, Human
ugagugccuuacacaauggu

SEQ ID NO: 2240727 - RNA, 23 nt, Human
ugauacacuaugaagauguuuca

SEQ ID NO: 2240728 - RNA, 17 nt, Human
ugauacuaaaaguucuu

SEQ ID NO: 2240729 - RNA, 19 nt, Human
ugauacgcaacauaauuaa

SEQ ID NO: 2240730 - RNA, 17 nt, Human
ugauacuacaguuuguu

SEQ ID NO: 2240731 - RNA, 14 nt, Human
ugauacuacaguuu

SEQ ID NO: 2240732 - RNA, 21 nt, Human
ugauacaaugcugugcccuaa

SEQ ID NO: 2240733 - RNA, 20 nt, Human
ugauacaaugcugugcccua

SEQ ID NO: 2240734 - RNA, 14 nt, Human
ugauaauugcauuc

SEQ ID NO: 2240735 - RNA, 16 nt, Human
ugauaauugcauucau

SEQ ID NO: 2240736 - RNA, 19 nt, Human
ugauaauugcauucaucuu

SEQ ID NO: 2240737 - RNA, 18 nt, Human
ugauacaaugcugugccc

SEQ ID NO: 2240738 - RNA, 16 nt, Human
ugaguucagguagcug

SEQ ID NO: 2240739 - RNA, 17 nt, Human
ugaguuauuuuaauuau

SEQ ID NO: 2240740 - RNA, 17 nt, Human
ugauaagagaaucaaca

SEQ ID NO: 2240741 - RNA, 18 nt, Human
ugauaagagaaucaacau

SEQ ID NO: 2240742 - RNA, 24 nt, Human
ugauaagcagucauccucagauca

SEQ ID NO: 2240743 - RNA, 19 nt, Human
ugauaagagggcacacacu

SEQ ID NO: 2240744 - RNA, 21 nt, Human
ugauaagagggcacacacugu

SEQ ID NO: 2240745 - RNA, 17 nt, Human
ugaguucauacccuguu

SEQ ID NO: 2240746 - RNA, 20 nt, Human
ugauaagaaccuuuugagug

SEQ ID NO: 2240747 - RNA, 15 nt, Human
ugauaauuccagugg

SEQ ID NO: 2240748 - RNA, 17 nt, Human
ugauaauuccagugguc

SEQ ID NO: 2240749 - RNA, 21 nt, Human
ugauaauguuaaauuuguaag

SEQ ID NO: 2240750 - RNA, 22 nt, Human
ugauaauguuaaauuuguaagu

SEQ ID NO: 2240751 - RNA, 15 nt, Human
ugauaauguuaaauu

SEQ ID NO: 2240752 - RNA, 16 nt, Human
ugauaauguuaaauuu

SEQ ID NO: 2240753 - RNA, 17 nt, Human
ugauaauguuaaauuug

SEQ ID NO: 2240754 - RNA, 18 nt, Human
ugauaauguuaaauuugu

SEQ ID NO: 2240755 - RNA, 13 nt, Human
ugauaauguuaaa

SEQ ID NO: 2240756 - RNA, 14 nt, Human
ugauaauguuaaau

SEQ ID NO: 2240757 - RNA, 20 nt, Human
ugauaaggaucagaacagca

SEQ ID NO: 2240758 - RNA, 16 nt, Human
ugauaaggaucagaac

SEQ ID NO: 2240759 - RNA, 12 nt, Human
ugauaaguaaau

SEQ ID NO: 2240760 - RNA, 14 nt, Human
ugauaaucaacugg

SEQ ID NO: 2240761 - RNA, 24 nt, Human
ugauaaucaacugggcugaacacu

SEQ ID NO: 2240762 - RNA, 18 nt, Human
ugauaaucaacugggcug

SEQ ID NO: 2240763 - RNA, 13 nt, Human
agcauaaaugcaa

SEQ ID NO: 2240764 - RNA, 14 nt, Human
agcauaaaugcaaa

SEQ ID NO: 2240765 - RNA, 20 nt, Human
agcauaacaagguccaagau

SEQ ID NO: 2240766 - RNA, 17 nt, Human
agcauaaguuucuggga

SEQ ID NO: 2240767 - RNA, 23 nt, Human
agcauaaguuucugggaccucag

SEQ ID NO: 2240768 - RNA, 23 nt, Human
agcauaaauguugacaugggaca

SEQ ID NO: 2240769 - RNA, 21 nt, Human
agcauaauacuugcuuuggaa

SEQ ID NO: 2240770 - RNA, 15 nt, Human
agcauacguacacau

SEQ ID NO: 2240771 - RNA, 23 nt, Human
ugagaauuuuaaauuauaacuua

SEQ ID NO: 2240772 - RNA, 15 nt, Human
ugagaauuuuaaauu

SEQ ID NO: 2240773 - RNA, 13 nt, Human
ugagaauuuuaaa

SEQ ID NO: 2240774 - RNA, 20 nt, Human
ugagaauugugcucaaaauu

SEQ ID NO: 2240775 - RNA, 18 nt, Human
ugagacaaauggaggccu

SEQ ID NO: 2240776 - RNA, 20 nt, Human
ugagaaucagaucauuucaa

SEQ ID NO: 2240777 - RNA, 16 nt, Human
ugagaauuccaaggag

SEQ ID NO: 2240778 - RNA, 15 nt, Human
ugagaauuccaagga

SEQ ID NO: 2240779 - RNA, 20 nt, Human
ugagaauuugagugcucuga

SEQ ID NO: 2240780 - RNA, 19 nt, Human
ugagaauuuaaaaauaaga

SEQ ID NO: 2240781 - RNA, 12 nt, Human
ugagaauuaccc

SEQ ID NO: 2240782 - RNA, 21 nt, Human
agcauacguacacauuuuauu

SEQ ID NO: 2240783 - RNA, 20 nt, Human
agcauacguacacauuuuau

SEQ ID NO: 2240784 - RNA, 16 nt, Human
agcauaccuuuauugu

SEQ ID NO: 2240785 - RNA, 17 nt, Human
agcauaccuuuauugug

SEQ ID NO: 2240786 - RNA, 19 nt, Human
agcauaccuuuauugugau

SEQ ID NO: 2240787 - RNA, 17 nt, Human
agcauaucugccuuuau

SEQ ID NO: 2240788 - RNA, 20 nt, Human
agcauaucugccuuuauugu

SEQ ID NO: 2240789 - RNA, 22 nt, Human
agcauaucugccuuuauugugu

SEQ ID NO: 2240790 - RNA, 23 nt, Human
agcauaucugccuuuauuguguu

SEQ ID NO: 2240791 - RNA, 19 nt, Human
agcauacguacacauuuua

SEQ ID NO: 2240792 - RNA, 18 nt, Human
agcauacguacacauuuu

SEQ ID NO: 2240793 - RNA, 17 nt, Human
agcauacguacacauuu

SEQ ID NO: 2240794 - RNA, 16 nt, Human
agcauacguacacauu

SEQ ID NO: 2240795 - RNA, 17 nt, Human
ugaguaagaaaugcugc

SEQ ID NO: 2240796 - RNA, 15 nt, Human
ugaguacuacagucc

SEQ ID NO: 2240797 - RNA, 22 nt, Human
ugaguaacugauuuguaacaag

SEQ ID NO: 2240798 - RNA, 21 nt, Human
ugaguaaaggaguaagaaccu

SEQ ID NO: 2240799 - RNA, 15 nt, Human
ugagguuuuuaagcc

SEQ ID NO: 2240800 - RNA, 14 nt, Human
agcauauucaggaa

SEQ ID NO: 2240801 - RNA, 23 nt, Human
agcauaugaggaugcagagucag

SEQ ID NO: 2240802 - RNA, 16 nt, Human
agcauaugaggaugca

SEQ ID NO: 2240803 - RNA, 16 nt, Human
agcauaugaguuucau

SEQ ID NO: 2240804 - RNA, 20 nt, Human
agcauaugaguuucauagcu

SEQ ID NO: 2240805 - RNA, 21 nt, Human
agcauaugaguuucauagcua

SEQ ID NO: 2240806 - RNA, 16 nt, Human
agcauauguguuggcu

SEQ ID NO: 2240807 - RNA, 18 nt, Human
agcauauguguuggcuug

SEQ ID NO: 2240808 - RNA, 12 nt, Human
agcauaugagga

SEQ ID NO: 2240809 - RNA, 16 nt, Human
agcauaucugccuuua

SEQ ID NO: 2240810 - RNA, 13 nt, Human
ugaguagcuggau

SEQ ID NO: 2240811 - RNA, 13 nt, Human
ugaguagcuggga

SEQ ID NO: 2240812 - RNA, 13 nt, Human
ugaguaagagcug

SEQ ID NO: 2240813 - RNA, 17 nt, Human
ugaguagaaaggccuuu

SEQ ID NO: 2240814 - RNA, 19 nt, Human
ugaguaagaaaugcugccc

SEQ ID NO: 2240815 - RNA, 14 nt, Human
ugaguagaggcuua

SEQ ID NO: 2240816 - RNA, 18 nt, Human
ugaguagaaaggccuuua

SEQ ID NO: 2240817 - RNA, 23 nt, Human
ugaguagaaaggccuuuaaaauu

SEQ ID NO: 2240818 - RNA, 17 nt, Human
ugaguacuacaguccuc

SEQ ID NO: 2240819 - RNA, 21 nt, Human
ugaguacuacaguccucccau

SEQ ID NO: 2240820 - RNA, 22 nt, Human
ugaguacuacaguccucccauc

SEQ ID NO: 2240821 - RNA, 23 nt, Human
ugaguacuacaguccucccaucu

SEQ ID NO: 2240822 - RNA, 17 nt, Human
agcauugcuuucugaaa

SEQ ID NO: 2240823 - RNA, 16 nt, Human
agcauugcuuucugaa

SEQ ID NO: 2240824 - RNA, 15 nt, Human
agcauugcuuucuga

SEQ ID NO: 2240825 - RNA, 14 nt, Human
agcauugcuuucug

SEQ ID NO: 2240826 - RNA, 13 nt, Human
agcauugcuuucu

SEQ ID NO: 2240827 - RNA, 12 nt, Human
agcauugcuuuc

SEQ ID NO: 2240828 - RNA, 11 nt, Human
agcauugcuuu

SEQ ID NO: 2240829 - RNA, 18 nt, Human
agcauuguaaaugugcuu

SEQ ID NO: 2240830 - RNA, 17 nt, Human
agcauuguaaaugugcu

SEQ ID NO: 2240831 - RNA, 20 nt, Human
agcauuucgcgauggacaga

SEQ ID NO: 2240832 - RNA, 23 nt, Human
agcauuuccaacaccacagacac

SEQ ID NO: 2240833 - RNA, 20 nt, Human
agcauuucauucuucucuag

SEQ ID NO: 2240834 - RNA, 21 nt, Human
agcauuucauucuucucuagc

SEQ ID NO: 2240835 - RNA, 14 nt, Human
agcauuuccaacac

SEQ ID NO: 2240836 - RNA, 17 nt, Human
agcauuuccaacaccac

SEQ ID NO: 2240837 - RNA, 18 nt, Human
agcauuuccaacaccaca

SEQ ID NO: 2240838 - RNA, 19 nt, Human
agcauuuccaacaccacag

SEQ ID NO: 2240839 - RNA, 21 nt, Human
agcauuuccaacaccacagac

SEQ ID NO: 2240840 - RNA, 22 nt, Human
agcauuuccaacaccacagaca

SEQ ID NO: 2240841 - RNA, 15 nt, Human
agcauuguuugcuua

SEQ ID NO: 2240842 - RNA, 17 nt, Human
agcauuguuugcuuauu

SEQ ID NO: 2240843 - RNA, 13 nt, Human
agcauuucauucu

SEQ ID NO: 2240844 - RNA, 21 nt, Human
agcauuguggcugucagcagg

SEQ ID NO: 2240845 - RNA, 20 nt, Human
agcauuguggcugucagcag

SEQ ID NO: 2240846 - RNA, 17 nt, Human
agcauugugaacugaca

SEQ ID NO: 2240847 - RNA, 21 nt, Human
agcauugugaacugacaggca

SEQ ID NO: 2240848 - RNA, 15 nt, Human
agcauuacaaauugc

SEQ ID NO: 2240849 - RNA, 13 nt, Human
agcauugcaugga

SEQ ID NO: 2240850 - RNA, 13 nt, Human
agcauugccauuc

SEQ ID NO: 2240851 - RNA, 14 nt, Human
agcauugcugguuc

SEQ ID NO: 2240852 - RNA, 14 nt, Human
agcauugccauucc

SEQ ID NO: 2240853 - RNA, 22 nt, Human
agcauugccauucccugccugg

SEQ ID NO: 2240854 - RNA, 15 nt, Human
agcauugcugguucu

SEQ ID NO: 2240855 - RNA, 16 nt, Human
agcauugcugguucua

SEQ ID NO: 2240856 - RNA, 23 nt, Human
agcauugcugguucuauuuaaug

SEQ ID NO: 2240857 - RNA, 18 nt, Human
agcauuaacuaaucuauu

SEQ ID NO: 2240858 - RNA, 17 nt, Human
agcauuaacuucucugg

SEQ ID NO: 2240859 - RNA, 18 nt, Human
agcauuaacuucucugga

SEQ ID NO: 2240860 - RNA, 17 nt, Human
agcauuaagaacacuuu

SEQ ID NO: 2240861 - RNA, 14 nt, Human
agcauuaacuaauc

SEQ ID NO: 2240862 - RNA, 20 nt, Human
agcauguuugcugaacaccu

SEQ ID NO: 2240863 - RNA, 16 nt, Human
agcauguuugcugaac

SEQ ID NO: 2240864 - RNA, 17 nt, Human
agcauguuugcugaaca

SEQ ID NO: 2240865 - RNA, 18 nt, Human
agcauguuucauguuuug

SEQ ID NO: 2240866 - RNA, 21 nt, Human
agcauguuucauguuuuguga

SEQ ID NO: 2240867 - RNA, 14 nt, Human
agcauguuugcuga

SEQ ID NO: 2240868 - RNA, 15 nt, Human
agcauguuugcugaa

SEQ ID NO: 2240869 - RNA, 21 nt, Human
agcauguugagccaggccugg

SEQ ID NO: 2240870 - RNA, 20 nt, Human
agcauguugagccaggccug

SEQ ID NO: 2240871 - RNA, 19 nt, Human
agcauguugagccaggccu

SEQ ID NO: 2240872 - RNA, 22 nt, Human
agcauguguuugguucuggggc

SEQ ID NO: 2240873 - RNA, 17 nt, Human
agcauguugcugaggag

SEQ ID NO: 2240874 - RNA, 18 nt, Human
agcauguugcugaggagu

SEQ ID NO: 2240875 - RNA, 14 nt, Human
agcauguuucaugu

SEQ ID NO: 2240876 - RNA, 17 nt, Human
agcauguuucauguuuu

SEQ ID NO: 2240877 - RNA, 16 nt, Human
agcauguguugaaaaa

SEQ ID NO: 2240878 - RNA, 18 nt, Human
agcauguggcauguucau

SEQ ID NO: 2240879 - RNA, 16 nt, Human
agcauguugagccagg

SEQ ID NO: 2240880 - RNA, 19 nt, Human
agcauguguauuuccagug

SEQ ID NO: 2240881 - RNA, 17 nt, Human
agcauguggcauguuca

SEQ ID NO: 2240882 - RNA, 22 nt, Human
agcauguauugugucuuuugca

SEQ ID NO: 2240883 - RNA, 19 nt, Human
agcaugucuauucagcuuc

SEQ ID NO: 2240884 - RNA, 17 nt, Human
agcaugucuauucagcu

SEQ ID NO: 2240885 - RNA, 14 nt, Human
agcauguauugugu

SEQ ID NO: 2240886 - RNA, 16 nt, Human
agcauguauugugucu

SEQ ID NO: 2240887 - RNA, 23 nt, Human
agcauguauugugucuuuugcau

SEQ ID NO: 2240888 - RNA, 15 nt, Human
agcauguaggagaau

SEQ ID NO: 2240889 - RNA, 21 nt, Human
agcauguacugagccuuguaa

SEQ ID NO: 2240890 - RNA, 19 nt, Human
agcauguacaguguucugu

SEQ ID NO: 2240891 - RNA, 18 nt, Human
agcauggcucaaagugca

SEQ ID NO: 2240892 - RNA, 12 nt, Human
agcauggcugcc

SEQ ID NO: 2240893 - RNA, 20 nt, Human
agcaugucgucaaagcugaa

SEQ ID NO: 2240894 - RNA, 17 nt, Human
agcaugucgucaaagcu

SEQ ID NO: 2240895 - RNA, 14 nt, Human
agcaucaggccagg

SEQ ID NO: 2240896 - RNA, 16 nt, Human
agcaucaggccaggcc

SEQ ID NO: 2240897 - RNA, 17 nt, Human
agcaucaggccaggccc

SEQ ID NO: 2240898 - RNA, 18 nt, Human
agcaucaggccaggcccu

SEQ ID NO: 2240899 - RNA, 19 nt, Human
agcaucaggccaggcccuc

SEQ ID NO: 2240900 - RNA, 20 nt, Human
agcaucaggccaggcccucu

SEQ ID NO: 2240901 - RNA, 18 nt, Human
ugaucaaagccacacucu

SEQ ID NO: 2240902 - RNA, 20 nt, Human
ugauauuuucugugccugaa

SEQ ID NO: 2240903 - RNA, 17 nt, Human
ugauauuuucugugccu

SEQ ID NO: 2240904 - RNA, 19 nt, Human
ugauauuuuaccucuuauu

SEQ ID NO: 2240905 - RNA, 16 nt, Human
ugaucaaauucauuuu

SEQ ID NO: 2240906 - RNA, 17 nt, Human
ugaucaaauucauuuuu

SEQ ID NO: 2240907 - RNA, 22 nt, Human
ugaucaaauucauuuuuuucac

SEQ ID NO: 2240908 - RNA, 15 nt, Human
ugaucaaauucauuu

SEQ ID NO: 2240909 - RNA, 20 nt, Human
ugaucaaaguccgaggggcg

SEQ ID NO: 2240910 - RNA, 16 nt, Human
ugaucaauaaaaugug

SEQ ID NO: 2240911 - RNA, 15 nt, Human
ugaucaauaaaaugu

SEQ ID NO: 2240912 - RNA, 13 nt, Human
ugaucaauaaaau

SEQ ID NO: 2240913 - RNA, 22 nt, Human
ugaucaagggaauguaacugcu

SEQ ID NO: 2240914 - RNA, 19 nt, Human
ugaucacggcucacugcag

SEQ ID NO: 2240915 - RNA, 23 nt, Human
ugaucaacaucuuuucuugccuc

SEQ ID NO: 2240916 - RNA, 23 nt, Human
ugaucaaauucauuuuuuucacu

SEQ ID NO: 2240917 - RNA, 20 nt, Human
ugaucaagggaauguaacug

SEQ ID NO: 2240918 - RNA, 17 nt, Human
ugaucaagggaauguaa

SEQ ID NO: 2240919 - RNA, 14 nt, Human
ugaucaacaucuuu

SEQ ID NO: 2240920 - RNA, 17 nt, Human
ugaucaacaucuuuucu

SEQ ID NO: 2240921 - RNA, 18 nt, Human
ugaucaacaucuuuucuu

SEQ ID NO: 2240922 - RNA, 21 nt, Human
ugaucaacaucuuuucuugcc

SEQ ID NO: 2240923 - RNA, 14 nt, Human
agcaucaaacucuu

SEQ ID NO: 2240924 - RNA, 13 nt, Human
agcaucaaacucu

SEQ ID NO: 2240925 - RNA, 21 nt, Human
agcauauuuguauaguugcuu

SEQ ID NO: 2240926 - RNA, 22 nt, Human
agcauauuuguauaguugcuug

SEQ ID NO: 2240927 - RNA, 18 nt, Human
ugaucaauaaaaugugau

SEQ ID NO: 2240928 - RNA, 18 nt, Human
agcauauuuguauaguug

SEQ ID NO: 2240929 - RNA, 20 nt, Human
agcauauuuguauaguugcu

SEQ ID NO: 2240930 - RNA, 22 nt, Human
agcauauucaggaagcucaggg

SEQ ID NO: 2240931 - RNA, 20 nt, Human
ugaucacggcucacugcagc

SEQ ID NO: 2240932 - RNA, 21 nt, Human
ugaucacggcucacugcagcc

SEQ ID NO: 2240933 - RNA, 17 nt, Human
agcaucacaguuuuggu

SEQ ID NO: 2240934 - RNA, 15 nt, Human
agcaucacaguuuug

SEQ ID NO: 2240935 - RNA, 13 nt, Human
agcaucaggccag

SEQ ID NO: 2240936 - RNA, 12 nt, Human
agcaucaggcca

SEQ ID NO: 2240937 - RNA, 23 nt, Human
ugauauuucccuccccuggggac

SEQ ID NO: 2240938 - RNA, 19 nt, Human
ugauauuuccccaugguuu

SEQ ID NO: 2240939 - RNA, 19 nt, Human
ugauauuuucaacgcagcc

SEQ ID NO: 2240940 - RNA, 21 nt, Human
ugauauuuucaacgcagcccu

SEQ ID NO: 2240941 - RNA, 22 nt, Human
ugauauuuucaacgcagcccug

SEQ ID NO: 2240942 - RNA, 23 nt, Human
ugauauuuucaacgcagcccugc

SEQ ID NO: 2240943 - RNA, 21 nt, Human
ugauauguaaacauaauucuu

SEQ ID NO: 2240944 - RNA, 13 nt, Human
ugauauuaaagga

SEQ ID NO: 2240945 - RNA, 20 nt, Human
ugauauucaaauggacaaac

SEQ ID NO: 2240946 - RNA, 16 nt, Human
ugauauuaaaggaguu

SEQ ID NO: 2240947 - RNA, 23 nt, Human
ugauauuaaaggaguuaagagua

SEQ ID NO: 2240948 - RNA, 22 nt, Human
ugauauuccaugaauguaucag

SEQ ID NO: 2240949 - RNA, 20 nt, Human
ugauauuccaugaauguauc

SEQ ID NO: 2240950 - RNA, 19 nt, Human
ugauauuccaugaauguau

SEQ ID NO: 2240951 - RNA, 18 nt, Human
ugauauuccaugaaugua

SEQ ID NO: 2240952 - RNA, 16 nt, Human
ugauauuccaugaaug

SEQ ID NO: 2240953 - RNA, 21 nt, Human
ugauauuccccccacuuaaga

SEQ ID NO: 2240954 - RNA, 17 nt, Human
ugauauugcauaugcau

SEQ ID NO: 2240955 - RNA, 19 nt, Human
ugauauguugguagauucu

SEQ ID NO: 2240956 - RNA, 15 nt, Human
ugauauguaaacaua

SEQ ID NO: 2240957 - RNA, 19 nt, Human
ugauauggcagaagacacc

SEQ ID NO: 2240958 - RNA, 20 nt, Human
ugauauggcagaagacacca

SEQ ID NO: 2240959 - RNA, 17 nt, Human
ugauauggcagaagaca

SEQ ID NO: 2240960 - RNA, 18 nt, Human
ugauauggcagaagacac

SEQ ID NO: 2240961 - RNA, 12 nt, Human
ugauaugggucu

SEQ ID NO: 2240962 - RNA, 15 nt, Human
ugauacuuuugacaa

SEQ ID NO: 2240963 - RNA, 15 nt, Human
ugauacuuuuaagag

SEQ ID NO: 2240964 - RNA, 21 nt, Human
ugauacuuuugacaacaaauu

SEQ ID NO: 2240965 - RNA, 21 nt, Human
ugauagaaggcuauggggaua

SEQ ID NO: 2240966 - RNA, 17 nt, Human
ugaccuucuaggaagcu

SEQ ID NO: 2240967 - RNA, 14 nt, Human
ugaccuucugggaa

SEQ ID NO: 2240968 - RNA, 13 nt, Human
ugaccuucuggga

SEQ ID NO: 2240969 - RNA, 20 nt, Human
ugaccuugaacuccugggcu

SEQ ID NO: 2240970 - RNA, 19 nt, Human
ugaccuugaacuccugggc

SEQ ID NO: 2240971 - RNA, 18 nt, Human
ugaccuugaacuccuggg

SEQ ID NO: 2240972 - RNA, 17 nt, Human
ugaccuugaacuccugg

SEQ ID NO: 2240973 - RNA, 22 nt, Human
ugaccuugaggagucuugugug

SEQ ID NO: 2240974 - RNA, 21 nt, Human
ugacuagaagggccaguccug

SEQ ID NO: 2240975 - RNA, 20 nt, Human
ugaccuugaggagucuugug

SEQ ID NO: 2240976 - RNA, 21 nt, Human
ugaccuugaggagucuugugu

SEQ ID NO: 2240977 - RNA, 19 nt, Human
ugacuagggauucaggcug

SEQ ID NO: 2240978 - RNA, 18 nt, Human
ugacuagggauucaggcu

SEQ ID NO: 2240979 - RNA, 17 nt, Human
ugacuagggauucaggc

SEQ ID NO: 2240980 - RNA, 21 nt, Human
ugacuagaggcagggagggga

SEQ ID NO: 2240981 - RNA, 17 nt, Human
ugacuagaggcagggag

SEQ ID NO: 2240982 - RNA, 23 nt, Human
ugacuagaugauggaugccaaua

SEQ ID NO: 2240983 - RNA, 17 nt, Human
ugacuagggaaaugauc

SEQ ID NO: 2240984 - RNA, 20 nt, Human
ugacucaagugucucagucc

SEQ ID NO: 2240985 - RNA, 19 nt, Human
ugacucacaagaagaccag

SEQ ID NO: 2240986 - RNA, 23 nt, Human
ugacucaacauguuacugaccag

SEQ ID NO: 2240987 - RNA, 23 nt, Human
ugacuagggauucaggcugcuug

SEQ ID NO: 2240988 - RNA, 21 nt, Human
ugacuagggauucaggcugcu

SEQ ID NO: 2240989 - RNA, 20 nt, Human
ugacuagggauucaggcugc

SEQ ID NO: 2240990 - RNA, 22 nt, Human
ugacucaacauguuacugacca

SEQ ID NO: 2240991 - RNA, 15 nt, Human
ugacucaacauguua

SEQ ID NO: 2240992 - RNA, 14 nt, Human
ugacucaacauguu

SEQ ID NO: 2240993 - RNA, 16 nt, Human
ugacucaaaucuccag

SEQ ID NO: 2240994 - RNA, 19 nt, Human
ugacuagugaggaaagauu

SEQ ID NO: 2240995 - RNA, 13 nt, Human
ugacucacccaag

SEQ ID NO: 2240996 - RNA, 12 nt, Human
ugacucacccaa

SEQ ID NO: 2240997 - RNA, 11 nt, Human
ugacucaccca

SEQ ID NO: 2240998 - RNA, 20 nt, Human
ugacucacaagaagaccaga

SEQ ID NO: 2240999 - RNA, 15 nt, Human
ugacucacccaagca

SEQ ID NO: 2241000 - RNA, 14 nt, Human
ugacucacccaagc

SEQ ID NO: 2241001 - RNA, 18 nt, Human
ugacuccaggagaggagc

SEQ ID NO: 2241002 - RNA, 23 nt, Human
ugacuccaguggggcaagauuuu

SEQ ID NO: 2241003 - RNA, 21 nt, Human
ugacucgaggguuggguucau

SEQ ID NO: 2241004 - RNA, 15 nt, Human
ugacucgggcuccug

SEQ ID NO: 2241005 - RNA, 16 nt, Human
ugacucgggcuccugu

SEQ ID NO: 2241006 - RNA, 22 nt, Human
ugacuccuuagagacaucaaaa

SEQ ID NO: 2241007 - RNA, 20 nt, Human
ugacuccuaugaucucaggu

SEQ ID NO: 2241008 - RNA, 14 nt, Human
ugacuccuuguggu

SEQ ID NO: 2241009 - RNA, 21 nt, Human
ugacuccuugugguuuauguc

SEQ ID NO: 2241010 - RNA, 22 nt, Human
ugacucccuuaaaauagaaaua

SEQ ID NO: 2241011 - RNA, 16 nt, Human
ugacuccgcuggaggu

SEQ ID NO: 2241012 - RNA, 21 nt, Human
ugacuccgcuggagguggggc

SEQ ID NO: 2241013 - RNA, 17 nt, Human
ugacuccucuaagccac

SEQ ID NO: 2241014 - RNA, 16 nt, Human
ugacuuacuguacaug

SEQ ID NO: 2241015 - RNA, 15 nt, Human
ugacuuacuguacau

SEQ ID NO: 2241016 - RNA, 13 nt, Human
ugacuuacuguac

SEQ ID NO: 2241017 - RNA, 16 nt, Human
ugacucgggggugggg

SEQ ID NO: 2241018 - RNA, 17 nt, Human
ugacucgggggugggga

SEQ ID NO: 2241019 - RNA, 17 nt, Human
ugacucgggcuccugug

SEQ ID NO: 2241020 - RNA, 18 nt, Human
ugacucgggcuccugugc

SEQ ID NO: 2241021 - RNA, 19 nt, Human
ugacucgggcuccugugcc

SEQ ID NO: 2241022 - RNA, 20 nt, Human
ugacucgggcuccugugccc

SEQ ID NO: 2241023 - RNA, 20 nt, Human
ugaccugcaggccaagagca

SEQ ID NO: 2241024 - RNA, 11 nt, Human
ugaccugcagg

SEQ ID NO: 2241025 - RNA, 17 nt, Human
ugaccugaggcuguggu

SEQ ID NO: 2241026 - RNA, 20 nt, Human
ugaccugaggcuccugugcu

SEQ ID NO: 2241027 - RNA, 12 nt, Human
ugaccugagggc

SEQ ID NO: 2241028 - RNA, 12 nt, Human
ugaccugaggcu

SEQ ID NO: 2241029 - RNA, 18 nt, Human
ugaccugaggcuccugug

SEQ ID NO: 2241030 - RNA, 15 nt, Human
ugaccugaggcugug

SEQ ID NO: 2241031 - RNA, 15 nt, Human
ugaccugugucacua

SEQ ID NO: 2241032 - RNA, 14 nt, Human
ugaccugugucacu

SEQ ID NO: 2241033 - RNA, 14 nt, Human
ugaccuguggugca

SEQ ID NO: 2241034 - RNA, 23 nt, Human
ugaccuguggggauuucucccag

SEQ ID NO: 2241035 - RNA, 22 nt, Human
ugaccuguggggauuucuccca

SEQ ID NO: 2241036 - RNA, 21 nt, Human
ugaccuguggggauuucuccc

SEQ ID NO: 2241037 - RNA, 19 nt, Human
ugaccuguggggauuucuc

SEQ ID NO: 2241038 - RNA, 15 nt, Human
ugaccugugaccagc

SEQ ID NO: 2241039 - RNA, 13 nt, Human
ugaccugugacca

SEQ ID NO: 2241040 - RNA, 20 nt, Human
ugaccugucaugccccccuc

SEQ ID NO: 2241041 - RNA, 21 nt, Human
ugaccugucaugccccccuca

SEQ ID NO: 2241042 - RNA, 22 nt, Human
ugaccugugaccagcacugucu

SEQ ID NO: 2241043 - RNA, 18 nt, Human
ugaccugugaccagcacu

SEQ ID NO: 2241044 - RNA, 20 nt, Human
ugaccugugagcccagcugg

SEQ ID NO: 2241045 - RNA, 13 nt, Human
ugaccuuacauuu

SEQ ID NO: 2241046 - RNA, 15 nt, Human
ugaccuuaguguuuc

SEQ ID NO: 2241047 - RNA, 16 nt, Human
ugaccuuaguguuucu

SEQ ID NO: 2241048 - RNA, 21 nt, Human
ugaccuuaguguuucugugca

SEQ ID NO: 2241049 - RNA, 18 nt, Human
ugaccuuccaagagccug

SEQ ID NO: 2241050 - RNA, 23 nt, Human
ugaccuuaguguuucugugcaug

SEQ ID NO: 2241051 - RNA, 20 nt, Human
ugaccuuccaagagccugag

SEQ ID NO: 2241052 - RNA, 19 nt, Human
ugaccuuccaagagccuga

SEQ ID NO: 2241053 - RNA, 22 nt, Human
ugaccuuaguguuucugugcau

SEQ ID NO: 2241054 - RNA, 18 nt, Human
ugaccuuccucgcagaga

SEQ ID NO: 2241055 - RNA, 20 nt, Human
ugaccuuccucgcagagagg

SEQ ID NO: 2241056 - RNA, 21 nt, Human
ugaccuuccucgcagagaggc

SEQ ID NO: 2241057 - RNA, 23 nt, Human
ugaccuuccucgcagagaggcca

SEQ ID NO: 2241058 - RNA, 21 nt, Human
ugaccccuccucacuggccau

SEQ ID NO: 2241059 - RNA, 13 nt, Human
ugaccccugcuca

SEQ ID NO: 2241060 - RNA, 22 nt, Human
ugaccccuccucacuggccauc

SEQ ID NO: 2241061 - RNA, 23 nt, Human
ugaccccucauagcccucacccu

SEQ ID NO: 2241062 - RNA, 13 nt, Human
ugaccccuccuca

SEQ ID NO: 2241063 - RNA, 15 nt, Human
ugaccccuccucacu

SEQ ID NO: 2241064 - RNA, 20 nt, Human
ugaccccuccucacuggcca

SEQ ID NO: 2241065 - RNA, 13 nt, Human
ugaccccagagga

SEQ ID NO: 2241066 - RNA, 22 nt, Human
ugaccccaaacaccuuccagcu

SEQ ID NO: 2241067 - RNA, 19 nt, Human
ugaccccaaagagccugga

SEQ ID NO: 2241068 - RNA, 22 nt, Human
ugaccccaaagagccuggagaa

SEQ ID NO: 2241069 - RNA, 21 nt, Human
ugaccccuuuucagcuucugc

SEQ ID NO: 2241070 - RNA, 22 nt, Human
ugaccccuuuucagcuucugcu

SEQ ID NO: 2241071 - RNA, 14 nt, Human
ugacccggaggcca

SEQ ID NO: 2241072 - RNA, 21 nt, Human
ugacccggaggccacaugagu

SEQ ID NO: 2241073 - RNA, 17 nt, Human
ugacccggaggccacau

SEQ ID NO: 2241074 - RNA, 20 nt, Human
ugacccggaggccacaugag

SEQ ID NO: 2241075 - RNA, 18 nt, Human
ugaccugaggcccuucuc

SEQ ID NO: 2241076 - RNA, 19 nt, Human
ugaccugaggcccuucucu

SEQ ID NO: 2241077 - RNA, 22 nt, Human
agauggaacccuuuuggccccc

SEQ ID NO: 2241078 - RNA, 18 nt, Human
agauggaaccgcaggaag

SEQ ID NO: 2241079 - RNA, 17 nt, Human
agauggaaccgcaggaa

SEQ ID NO: 2241080 - RNA, 13 nt, Human
agaugcugauguu

SEQ ID NO: 2241081 - RNA, 14 nt, Human
agaugcugauguuc

SEQ ID NO: 2241082 - RNA, 15 nt, Human
agaugcugauguuca

SEQ ID NO: 2241083 - RNA, 22 nt, Human
agaugcugaaacaggagagaaa

SEQ ID NO: 2241084 - RNA, 11 nt, Human
agaugcugaug

SEQ ID NO: 2241085 - RNA, 21 nt, Human
agaugcugaaacaggagagaa

SEQ ID NO: 2241086 - RNA, 15 nt, Human
agaugcucuucugug

SEQ ID NO: 2241087 - RNA, 23 nt, Human
agaugcugacuguacuccuccca

SEQ ID NO: 2241088 - RNA, 13 nt, Human
agaugcucuuuua

SEQ ID NO: 2241089 - RNA, 18 nt, Human
agaugcugaaacaggaga

SEQ ID NO: 2241090 - RNA, 20 nt, Human
agaugcugacuguacuccuc

SEQ ID NO: 2241091 - RNA, 20 nt, Human
agaugcuccuugggcccuuu

SEQ ID NO: 2241092 - RNA, 15 nt, Human
agaugcuccuugggc

SEQ ID NO: 2241093 - RNA, 17 nt, Human
agaugcucuaucuugcu

SEQ ID NO: 2241094 - RNA, 18 nt, Human
agaugcucuaucuugcuc

SEQ ID NO: 2241095 - RNA, 21 nt, Human
agaugcucuaucuugcucugu

SEQ ID NO: 2241096 - RNA, 23 nt, Human
agaugcucuaucuugcucuguaa

SEQ ID NO: 2241097 - RNA, 21 nt, Human
agaugccuccaccgcugccua

SEQ ID NO: 2241098 - RNA, 17 nt, Human
agaugccuccaccgcug

SEQ ID NO: 2241099 - RNA, 16 nt, Human
agaugccuccaccgcu

SEQ ID NO: 2241100 - RNA, 15 nt, Human
agaugccuccaccgc

SEQ ID NO: 2241101 - RNA, 14 nt, Human
agaugccuccaccg

SEQ ID NO: 2241102 - RNA, 22 nt, Human
agaugccuccaccccccagaac

SEQ ID NO: 2241103 - RNA, 21 nt, Human
agaugccuccaccccccagaa

SEQ ID NO: 2241104 - RNA, 13 nt, Human
agaugccuccacc

SEQ ID NO: 2241105 - RNA, 12 nt, Human
agaugccuccac

SEQ ID NO: 2241106 - RNA, 17 nt, Human
agaugccccagagcugu

SEQ ID NO: 2241107 - RNA, 11 nt, Human
agaugcccuga

SEQ ID NO: 2241108 - RNA, 12 nt, Human
agaugccccaga

SEQ ID NO: 2241109 - RNA, 22 nt, Human
agaugcccagagggcccaggca

SEQ ID NO: 2241110 - RNA, 21 nt, Human
agaugcccagagggcccaggc

SEQ ID NO: 2241111 - RNA, 16 nt, Human
agaugcagggcaguca

SEQ ID NO: 2241112 - RNA, 16 nt, Human
agaugccgcauuugga

SEQ ID NO: 2241113 - RNA, 16 nt, Human
agaugcaguucugaag

SEQ ID NO: 2241114 - RNA, 19 nt, Human
agaugcagcaaaaugugaa

SEQ ID NO: 2241115 - RNA, 21 nt, Human
agaugcagcaaaaugugaaug

SEQ ID NO: 2241116 - RNA, 14 nt, Human
ugacacuuccaguc

SEQ ID NO: 2241117 - RNA, 19 nt, Human
agaugcagagagccauuuu

SEQ ID NO: 2241118 - RNA, 20 nt, Human
agaugcagagagccauuuug

SEQ ID NO: 2241119 - RNA, 14 nt, Human
agaugcagcaaaau

SEQ ID NO: 2241120 - RNA, 12 nt, Human
agaugcagcugg

SEQ ID NO: 2241121 - RNA, 13 nt, Human
agaugcagggcag

SEQ ID NO: 2241122 - RNA, 13 nt, Human
agaugcagcugga

SEQ ID NO: 2241123 - RNA, 15 nt, Human
agaugcagcuggaaa

SEQ ID NO: 2241124 - RNA, 16 nt, Human
ugacacuucagagagc

SEQ ID NO: 2241125 - RNA, 14 nt, Human
ugacacucccuugg

SEQ ID NO: 2241126 - RNA, 20 nt, Human
ugacacuucagagagcuggu

SEQ ID NO: 2241127 - RNA, 19 nt, Human
ugacacuucagagagcugg

SEQ ID NO: 2241128 - RNA, 18 nt, Human
ugacacuucagagagcug

SEQ ID NO: 2241129 - RNA, 17 nt, Human
ugacacuucagagagcu

SEQ ID NO: 2241130 - RNA, 24 nt, Human
ugacacuucagagagcugguaguu

SEQ ID NO: 2241131 - RNA, 23 nt, Human
ugacacuucagagagcugguagu

SEQ ID NO: 2241132 - RNA, 15 nt, Human
ugacacuugucccca

SEQ ID NO: 2241133 - RNA, 16 nt, Human
ugacacuuaaaaaugg

SEQ ID NO: 2241134 - RNA, 17 nt, Human
ugacacuuaaaaauggu

SEQ ID NO: 2241135 - RNA, 16 nt, Human
agauggaggaggaggc

SEQ ID NO: 2241136 - RNA, 12 nt, Human
agauggacacac

SEQ ID NO: 2241137 - RNA, 20 nt, Human
agauguucucuaucauuuaa

SEQ ID NO: 2241138 - RNA, 18 nt, Human
agauggaaugcuguguua

SEQ ID NO: 2241139 - RNA, 21 nt, Human
agauguucucuaucauuuaau

SEQ ID NO: 2241140 - RNA, 20 nt, Human
agauguucucucccaggggc

SEQ ID NO: 2241141 - RNA, 21 nt, Human
agauggaaccgcaggaagcug

SEQ ID NO: 2241142 - RNA, 20 nt, Human
agauggaaccgcaggaagcu

SEQ ID NO: 2241143 - RNA, 12 nt, Human
agauggaagcuu

SEQ ID NO: 2241144 - RNA, 16 nt, Human
agauggaagcuuccag

SEQ ID NO: 2241145 - RNA, 22 nt, Human
agauggaaguugcagugagcug

SEQ ID NO: 2241146 - RNA, 23 nt, Human
agauggaaguugcagugagcuga

SEQ ID NO: 2241147 - RNA, 13 nt, Human
agauggaaugcug

SEQ ID NO: 2241148 - RNA, 15 nt, Human
agauggaaugcugug

SEQ ID NO: 2241149 - RNA, 19 nt, Human
agauguuugucagauauga

SEQ ID NO: 2241150 - RNA, 17 nt, Human
agauguuugucagauau

SEQ ID NO: 2241151 - RNA, 15 nt, Human
agauguuugucagau

SEQ ID NO: 2241152 - RNA, 22 nt, Human
agauguuucuuuuguauguaaa

SEQ ID NO: 2241153 - RNA, 18 nt, Human
agauguuucuuuuguaug

SEQ ID NO: 2241154 - RNA, 21 nt, Human
agauguuucuuuuguauguaa

SEQ ID NO: 2241155 - RNA, 14 nt, Human
agauguuucacgaa

SEQ ID NO: 2241156 - RNA, 14 nt, Human
agauguuuccagac

SEQ ID NO: 2241157 - RNA, 23 nt, Human
agauguuuccagacuuccuugag

SEQ ID NO: 2241158 - RNA, 21 nt, Human
agauguuuccagacuuccuug

SEQ ID NO: 2241159 - RNA, 24 nt, Human
agauguuugucagauaugauaugu

SEQ ID NO: 2241160 - RNA, 22 nt, Human
agauguuuuaccguaauaauua

SEQ ID NO: 2241161 - RNA, 17 nt, Human
agauguuuuacgucugg

SEQ ID NO: 2241162 - RNA, 11 nt, Human
agauguuuuag

SEQ ID NO: 2241163 - RNA, 23 nt, Human
agauguuuuagaguuaacaauga

SEQ ID NO: 2241164 - RNA, 13 nt, Human
agauguuuuuaaa

SEQ ID NO: 2241165 - RNA, 16 nt, Human
agauguuuuuaaaagu

SEQ ID NO: 2241166 - RNA, 22 nt, Human
agauguuuuuaaaaguuucaau

SEQ ID NO: 2241167 - RNA, 18 nt, Human
agauguuuuuaaaaguuu

SEQ ID NO: 2241168 - RNA, 20 nt, Human
agauguuuuuaaaaguuuca

SEQ ID NO: 2241169 - RNA, 14 nt, Human
ugacccaugcugcc

SEQ ID NO: 2241170 - RNA, 15 nt, Human
ugacccaugcugccc

SEQ ID NO: 2241171 - RNA, 21 nt, Human
ugaccccaaacaccuuccagc

SEQ ID NO: 2241172 - RNA, 21 nt, Human
ugacccaugcugcccugugag

SEQ ID NO: 2241173 - RNA, 12 nt, Human
ugacccaugcug

SEQ ID NO: 2241174 - RNA, 16 nt, Human
ugacccaugcugcccu

SEQ ID NO: 2241175 - RNA, 21 nt, Human
agauuccccauugccuccucc

SEQ ID NO: 2241176 - RNA, 22 nt, Human
agauuccccauugccuccuccu

SEQ ID NO: 2241177 - RNA, 23 nt, Human
agauuccccauugccuccuccuu

SEQ ID NO: 2241178 - RNA, 24 nt, Human
agauuccccauugccuccuccuuc

SEQ ID NO: 2241179 - RNA, 19 nt, Human
agauuccccauugccuccu

SEQ ID NO: 2241180 - RNA, 17 nt, Human
agauucauuuuucuuuc

SEQ ID NO: 2241181 - RNA, 15 nt, Human
agauucccugagcag

SEQ ID NO: 2241182 - RNA, 22 nt, Human
agauugcugaaauuuuauaugc

SEQ ID NO: 2241183 - RNA, 16 nt, Human
agauucgcuuuccaug

SEQ ID NO: 2241184 - RNA, 13 nt, Human
agauuggaaggaa

SEQ ID NO: 2241185 - RNA, 16 nt, Human
agauugcuuaaaauag

SEQ ID NO: 2241186 - RNA, 15 nt, Human
agauugcuuaaaaua

SEQ ID NO: 2241187 - RNA, 23 nt, Human
agauuggagaaacccuugaaaag

SEQ ID NO: 2241188 - RNA, 23 nt, Human
agauugcuuugauuaauccagaa

SEQ ID NO: 2241189 - RNA, 22 nt, Human
agauucauauuuacuucuuaua

SEQ ID NO: 2241190 - RNA, 24 nt, Human
ugacuucuaaguaaaaccacagca

SEQ ID NO: 2241191 - RNA, 15 nt, Human
agauucauccauuua

SEQ ID NO: 2241192 - RNA, 12 nt, Human
agauucauuuuu

SEQ ID NO: 2241193 - RNA, 18 nt, Human
agauuccagagaguggcu

SEQ ID NO: 2241194 - RNA, 21 nt, Human
ugacucgggcuccugugcccu

SEQ ID NO: 2241195 - RNA, 21 nt, Human
agauucauuauuuuuccacuu

SEQ ID NO: 2241196 - RNA, 17 nt, Human
agauucauuuuuaauca

SEQ ID NO: 2241197 - RNA, 20 nt, Human
agauucauuuuuaaucauga

SEQ ID NO: 2241198 - RNA, 19 nt, Human
ugacuuacuguacaugaaa

SEQ ID NO: 2241199 - RNA, 15 nt, Human
ugacuucuaaguaaa

SEQ ID NO: 2241200 - RNA, 23 nt, Human
ugacuucuaaguaaaaccacagc

SEQ ID NO: 2241201 - RNA, 22 nt, Human
ugacuucuaaguaaaaccacag

SEQ ID NO: 2241202 - RNA, 17 nt, Human
agauuugaacucuucaa

SEQ ID NO: 2241203 - RNA, 20 nt, Human
agauuucucauuugccaaua

SEQ ID NO: 2241204 - RNA, 23 nt, Human
agauuuccagucuccaccaggaa

SEQ ID NO: 2241205 - RNA, 18 nt, Human
agauuuccauauaaauau

SEQ ID NO: 2241206 - RNA, 14 nt, Human
agauuggcucacac

SEQ ID NO: 2241207 - RNA, 19 nt, Human
agauuggcucacacugaga

SEQ ID NO: 2241208 - RNA, 15 nt, Human
agauuuccagucucc

SEQ ID NO: 2241209 - RNA, 22 nt, Human
agauuggcucacacugagaaug

SEQ ID NO: 2241210 - RNA, 19 nt, Human
agauuucuugaguuuuguu

SEQ ID NO: 2241211 - RNA, 14 nt, Human
agauuuuagguguu

SEQ ID NO: 2241212 - RNA, 15 nt, Human
agauuuuagguguug

SEQ ID NO: 2241213 - RNA, 14 nt, Human
agauuuucuuuaaa

SEQ ID NO: 2241214 - RNA, 17 nt, Human
agauuuucuuuaaaaga

SEQ ID NO: 2241215 - RNA, 18 nt, Human
agauuuucuuuaaaagaa

SEQ ID NO: 2241216 - RNA, 20 nt, Human
agauuuucuuuaaaagaaug

SEQ ID NO: 2241217 - RNA, 21 nt, Human
agauuuugaaauuuuuauuaa

SEQ ID NO: 2241218 - RNA, 13 nt, Human
agauuuucuuuaa

SEQ ID NO: 2241219 - RNA, 14 nt, Human
agauuuugaaugcu

SEQ ID NO: 2241220 - RNA, 15 nt, Human
agauuuugauagcaa

SEQ ID NO: 2241221 - RNA, 18 nt, Human
agauuuugauagcaaagc

SEQ ID NO: 2241222 - RNA, 19 nt, Human
agauuuugauagcaaagcg

SEQ ID NO: 2241223 - RNA, 16 nt, Human
agauuuugcuuuucca

SEQ ID NO: 2241224 - RNA, 22 nt, Human
agauuuugggguuguguuguca

SEQ ID NO: 2241225 - RNA, 16 nt, Human
agauuuuguuuugcuu

SEQ ID NO: 2241226 - RNA, 17 nt, Human
agauuuuguuuugcuuu

SEQ ID NO: 2241227 - RNA, 21 nt, Human
agauuuuguuuugcuuuuucu

SEQ ID NO: 2241228 - RNA, 14 nt, Human
agauuuuguuuugc

SEQ ID NO: 2241229 - RNA, 17 nt, Human
agauuuuucaugauuuu

SEQ ID NO: 2241230 - RNA, 13 nt, Human
agauuuuuacaaa

SEQ ID NO: 2241231 - RNA, 22 nt, Human
agauuuuguuuugcuuuuucug

SEQ ID NO: 2241232 - RNA, 23 nt, Human
agauuuuguuuugcuuuuucuga

SEQ ID NO: 2241233 - RNA, 24 nt, Human
agauuuuguuuugcuuuuucugac

SEQ ID NO: 2241234 - RNA, 16 nt, Human
agcaagacuguugcuc

SEQ ID NO: 2241235 - RNA, 12 nt, Human
agcaagacucug

SEQ ID NO: 2241236 - RNA, 23 nt, Human
agcaagacgcugugcugcccugc

SEQ ID NO: 2241237 - RNA, 17 nt, Human
agcaagagcuggcaaag

SEQ ID NO: 2241238 - RNA, 23 nt, Human
agcaagagcuggcaaagguggcu

SEQ ID NO: 2241239 - RNA, 21 nt, Human
agcaagauccugucuuuaagg

SEQ ID NO: 2241240 - RNA, 12 nt, Human
agcaagagagau

SEQ ID NO: 2241241 - RNA, 15 nt, Human
agcaagagagauguu

SEQ ID NO: 2241242 - RNA, 13 nt, Human
agcaagagcuggc

SEQ ID NO: 2241243 - RNA, 17 nt, Human
agcaagacgcugugcug

SEQ ID NO: 2241244 - RNA, 20 nt, Human
agcaagacgcugugcugccc

SEQ ID NO: 2241245 - RNA, 21 nt, Human
agcaagacgcugugcugcccu

SEQ ID NO: 2241246 - RNA, 22 nt, Human
agcaagacgcugugcugcccug

SEQ ID NO: 2241247 - RNA, 16 nt, Human
ugagaagauugugaau

SEQ ID NO: 2241248 - RNA, 16 nt, Human
ugagaaggcagccacc

SEQ ID NO: 2241249 - RNA, 17 nt, Human
ugagaaggcagccacca

SEQ ID NO: 2241250 - RNA, 16 nt, Human
ugagaagguccuuaau

SEQ ID NO: 2241251 - RNA, 20 nt, Human
ugagaaggcagccaccagcg

SEQ ID NO: 2241252 - RNA, 18 nt, Human
ugagaaguccccuuccau

SEQ ID NO: 2241253 - RNA, 18 nt, Human
ugagaagugaaugcuggg

SEQ ID NO: 2241254 - RNA, 19 nt, Human
ugagaagugaaugcuggga

SEQ ID NO: 2241255 - RNA, 17 nt, Human
ugagaaucagaucauuu

SEQ ID NO: 2241256 - RNA, 17 nt, Human
ugagaauaagagaguca

SEQ ID NO: 2241257 - RNA, 19 nt, Human
ugagaauaagagagucaua

SEQ ID NO: 2241258 - RNA, 16 nt, Human
ugagaaucaaaacucu

SEQ ID NO: 2241259 - RNA, 21 nt, Human
ugagaagugaaugcugggacu

SEQ ID NO: 2241260 - RNA, 22 nt, Human
ugagaagugaaugcugggacuc

SEQ ID NO: 2241261 - RNA, 19 nt, Human
ugagaaguccccuuccauc

SEQ ID NO: 2241262 - RNA, 17 nt, Human
ugagaaguuuuguacag

SEQ ID NO: 2241263 - RNA, 18 nt, Human
ugagaaguuuuguacaga

SEQ ID NO: 2241264 - RNA, 24 nt, Human
ugagaaguuuuguacagagaauua

SEQ ID NO: 2241265 - RNA, 23 nt, Human
ugagaagagggccugugggagcc

SEQ ID NO: 2241266 - RNA, 20 nt, Human
ugagaagagggccuguggga

SEQ ID NO: 2241267 - RNA, 21 nt, Human
ugagaagagggccugugggag

SEQ ID NO: 2241268 - RNA, 20 nt, Human
ugagaagcagaggaaggaga

SEQ ID NO: 2241269 - RNA, 18 nt, Human
ugagaagagagaucaaau

SEQ ID NO: 2241270 - RNA, 23 nt, Human
ugagaagaaaacaucuauucucu

SEQ ID NO: 2241271 - RNA, 15 nt, Human
ugagaagagggccug

SEQ ID NO: 2241272 - RNA, 16 nt, Human
ugagaagagggccugu

SEQ ID NO: 2241273 - RNA, 17 nt, Human
ugagaagagggccugug

SEQ ID NO: 2241274 - RNA, 17 nt, Human
ugagaagaaaacaucua

SEQ ID NO: 2241275 - RNA, 14 nt, Human
ugagaagaaaacau

SEQ ID NO: 2241276 - RNA, 20 nt, Human
ugagaacugcauauguuucg

SEQ ID NO: 2241277 - RNA, 17 nt, Human
ugagaacugcauauguu

SEQ ID NO: 2241278 - RNA, 19 nt, Human
ugagaacuacucagggaau

SEQ ID NO: 2241279 - RNA, 16 nt, Human
agauuuuuaacgaaug

SEQ ID NO: 2241280 - RNA, 13 nt, Human
agauuuuucucaa

SEQ ID NO: 2241281 - RNA, 22 nt, Human
agauuuuucucaaaguuuugaa

SEQ ID NO: 2241282 - RNA, 20 nt, Human
agcaacguagcuucuaccau

SEQ ID NO: 2241283 - RNA, 14 nt, Human
agcaacucuugauu

SEQ ID NO: 2241284 - RNA, 23 nt, Human
agcaaaaaaaaaaaaaagcaucu

SEQ ID NO: 2241285 - RNA, 23 nt, Human
agcaacgcaggcccccaggugcc

SEQ ID NO: 2241286 - RNA, 15 nt, Human
agcaacuugucuuuu

SEQ ID NO: 2241287 - RNA, 21 nt, Human
agcaacuguuaugaaauaaag

SEQ ID NO: 2241288 - RNA, 17 nt, Human
agcaacugucuauuucu

SEQ ID NO: 2241289 - RNA, 20 nt, Human
agcaacugucuauuucugcu

SEQ ID NO: 2241290 - RNA, 21 nt, Human
agcaacugucuauuucugcug

SEQ ID NO: 2241291 - RNA, 22 nt, Human
agcaacugucuauuucugcuga

SEQ ID NO: 2241292 - RNA, 13 nt, Human
agcaacuguuaug

SEQ ID NO: 2241293 - RNA, 17 nt, Human
agcaacuguuaugaaau

SEQ ID NO: 2241294 - RNA, 18 nt, Human
agcaacuguuaugaaaua

SEQ ID NO: 2241295 - RNA, 20 nt, Human
agcaacuguuaugaaauaaa

SEQ ID NO: 2241296 - RNA, 20 nt, Human
agcaacucuugauuauccau

SEQ ID NO: 2241297 - RNA, 16 nt, Human
agcaacucuugauuau

SEQ ID NO: 2241298 - RNA, 23 nt, Human
agcaacucuaagacuacagcaca

SEQ ID NO: 2241299 - RNA, 12 nt, Human
agcaacugaaua

SEQ ID NO: 2241300 - RNA, 13 nt, Human
agcaacugaauaa

SEQ ID NO: 2241301 - RNA, 14 nt, Human
agcaacugaauaaa

SEQ ID NO: 2241302 - RNA, 15 nt, Human
agcaacugaauaaau

SEQ ID NO: 2241303 - RNA, 19 nt, Human
agcaacugaauaaauaccu

SEQ ID NO: 2241304 - RNA, 21 nt, Human
agcaacugaauaaauaccucu

SEQ ID NO: 2241305 - RNA, 22 nt, Human
agcaacugaauaaauaccucuu

SEQ ID NO: 2241306 - RNA, 23 nt, Human
agcaacugaauaaauaccucuua

SEQ ID NO: 2241307 - RNA, 19 nt, Human
agcaacugcuguuggaagg

SEQ ID NO: 2241308 - RNA, 13 nt, Human
agcaacugucuau

SEQ ID NO: 2241309 - RNA, 16 nt, Human
agcaacugucuauuuc

SEQ ID NO: 2241310 - RNA, 23 nt, Human
agcaacuugucuuuuucuggacu

SEQ ID NO: 2241311 - RNA, 21 nt, Human
agcaacuugucuuuuucugga

SEQ ID NO: 2241312 - RNA, 20 nt, Human
agcaacuugucuuuuucugg

SEQ ID NO: 2241313 - RNA, 13 nt, Human
agcaacuuucuua

SEQ ID NO: 2241314 - RNA, 15 nt, Human
agcaagaaagaaacc

SEQ ID NO: 2241315 - RNA, 21 nt, Human
agcaagaagauccuaaaacaa

SEQ ID NO: 2241316 - RNA, 12 nt, Human
agcaagaaagaa

SEQ ID NO: 2241317 - RNA, 17 nt, Human
agcaacuuguucguggg

SEQ ID NO: 2241318 - RNA, 13 nt, Human
agcaagacgcugu

SEQ ID NO: 2241319 - RNA, 16 nt, Human
agcaagacgcugugcu

SEQ ID NO: 2241320 - RNA, 17 nt, Human
ugaauaaaguugaagcu

SEQ ID NO: 2241321 - RNA, 13 nt, Human
ugaauaaauaccu

SEQ ID NO: 2241322 - RNA, 16 nt, Human
ugaauaaauaaaugua

SEQ ID NO: 2241323 - RNA, 20 nt, Human
ugaauaaagccugcuuuuua

SEQ ID NO: 2241324 - RNA, 18 nt, Human
ugaagucacaucacagga

SEQ ID NO: 2241325 - RNA, 18 nt, Human
ugaauaaagccugcuuuu

SEQ ID NO: 2241326 - RNA, 15 nt, Human
ugaagucacugcaca

SEQ ID NO: 2241327 - RNA, 16 nt, Human
ugaagucacugcacag

SEQ ID NO: 2241328 - RNA, 21 nt, Human
ugaagucacugcacagugcau

SEQ ID NO: 2241329 - RNA, 16 nt, Human
ugaauaaagacaccua

SEQ ID NO: 2241330 - RNA, 21 nt, Human
ugaagguaaaauugaaaggca

SEQ ID NO: 2241331 - RNA, 14 nt, Human
ugaagucacacagu

SEQ ID NO: 2241332 - RNA, 22 nt, Human
ugaaggucacucuuccugcaag

SEQ ID NO: 2241333 - RNA, 14 nt, Human
ugaagucacugcac

SEQ ID NO: 2241334 - RNA, 16 nt, Human
ugaauacuguauuuug

SEQ ID NO: 2241335 - RNA, 15 nt, Human
ugaauacuuuauaaa

SEQ ID NO: 2241336 - RNA, 12 nt, Human
ugaauaaauguc

SEQ ID NO: 2241337 - RNA, 23 nt, Human
ugaauaaauaccucuuagcugag

SEQ ID NO: 2241338 - RNA, 14 nt, Human
ugaauaaauaccuc

SEQ ID NO: 2241339 - RNA, 15 nt, Human
ugaauaaauaccucu

SEQ ID NO: 2241340 - RNA, 17 nt, Human
ugaauaaauaccucuua

SEQ ID NO: 2241341 - RNA, 19 nt, Human
ugaauaaauaccucuuagc

SEQ ID NO: 2241342 - RNA, 13 nt, Human
ugaauaaaugucu

SEQ ID NO: 2241343 - RNA, 14 nt, Human
ugaauaaaugucuu

SEQ ID NO: 2241344 - RNA, 16 nt, Human
ugaauguaucaggaaa

SEQ ID NO: 2241345 - RNA, 15 nt, Human
ugaauguaucaggaa

SEQ ID NO: 2241346 - RNA, 18 nt, Human
ugaaugggaaaagagaug

SEQ ID NO: 2241347 - RNA, 17 nt, Human
ugaaugggcaaaacuga

SEQ ID NO: 2241348 - RNA, 18 nt, Human
ugaauauuguucauauug

SEQ ID NO: 2241349 - RNA, 17 nt, Human
ugaauauuuacguuuuu

SEQ ID NO: 2241350 - RNA, 22 nt, Human
ugaauauuuacguuuuuguaaa

SEQ ID NO: 2241351 - RNA, 14 nt, Human
ugaaugggaaaaga

SEQ ID NO: 2241352 - RNA, 16 nt, Human
ugaauguauugaacuu

SEQ ID NO: 2241353 - RNA, 11 nt, Human
ugaauguauuu

SEQ ID NO: 2241354 - RNA, 15 nt, Human
ugaauguaugugcac

SEQ ID NO: 2241355 - RNA, 18 nt, Human
ugaauguaugugcacugu

SEQ ID NO: 2241356 - RNA, 23 nt, Human
ugaauguaugcuucauacaggga

SEQ ID NO: 2241357 - RNA, 20 nt, Human
ugaauguaugcuucauacag

SEQ ID NO: 2241358 - RNA, 19 nt, Human
ugaauguaugcuucauaca

SEQ ID NO: 2241359 - RNA, 14 nt, Human
ugaauguaugcuuc

SEQ ID NO: 2241360 - RNA, 20 nt, Human
ugaauaugaacggugagcau

SEQ ID NO: 2241361 - RNA, 22 nt, Human
ugaauaugaggcauuuggcauu

SEQ ID NO: 2241362 - RNA, 18 nt, Human
ugaauaggcgaucacaac

SEQ ID NO: 2241363 - RNA, 19 nt, Human
ugaauaggcgaucacaacg

SEQ ID NO: 2241364 - RNA, 16 nt, Human
ugaauacuuuuuacaa

SEQ ID NO: 2241365 - RNA, 17 nt, Human
ugaauaggcgaucacaa

SEQ ID NO: 2241366 - RNA, 19 nt, Human
ugaauaugauuaguaaaga

SEQ ID NO: 2241367 - RNA, 21 nt, Human
ugaauauggacucaguuuucu

SEQ ID NO: 2241368 - RNA, 22 nt, Human
ugaaggggccaaggagggugag

SEQ ID NO: 2241369 - RNA, 23 nt, Human
ugaagcucaccuguugcuuacaa

SEQ ID NO: 2241370 - RNA, 10 nt, Human
ugaaggggcg

SEQ ID NO: 2241371 - RNA, 19 nt, Human
ugaagggggauaugaaugg

SEQ ID NO: 2241372 - RNA, 19 nt, Human
ugaagggccagagccaggg

SEQ ID NO: 2241373 - RNA, 18 nt, Human
ugaagggccagagccagg

SEQ ID NO: 2241374 - RNA, 16 nt, Human
ugaagcucacuucugg

SEQ ID NO: 2241375 - RNA, 18 nt, Human
ugaagcucaccuguugcu

SEQ ID NO: 2241376 - RNA, 19 nt, Human
ugaagcucaccuguugcuu

SEQ ID NO: 2241377 - RNA, 14 nt, Human
ugaagcuacugugu

SEQ ID NO: 2241378 - RNA, 19 nt, Human
ugaagcuauuuaucuguag

SEQ ID NO: 2241379 - RNA, 15 nt, Human
ugaagcuaagauuua

SEQ ID NO: 2241380 - RNA, 22 nt, Human
ugaagcuacugugugugugaau

SEQ ID NO: 2241381 - RNA, 20 nt, Human
ugaagcuaucguaaaauuaa

SEQ ID NO: 2241382 - RNA, 18 nt, Human
ugaagccuuucuuuugga

SEQ ID NO: 2241383 - RNA, 12 nt, Human
ugaagccuuugu

SEQ ID NO: 2241384 - RNA, 16 nt, Human
ugaagccacugaagcu

SEQ ID NO: 2241385 - RNA, 23 nt, Human
ugaagccaaguggggugcuggga

SEQ ID NO: 2241386 - RNA, 13 nt, Human
ugaagccuuucuu

SEQ ID NO: 2241387 - RNA, 19 nt, Human
ugaagccaauucagacagg

SEQ ID NO: 2241388 - RNA, 21 nt, Human
ugaagccaaguggggugcugg

SEQ ID NO: 2241389 - RNA, 22 nt, Human
ugaagccaaguggggugcuggg

SEQ ID NO: 2241390 - RNA, 22 nt, Human
ugaagcauuuuauaaaucgcuu

SEQ ID NO: 2241391 - RNA, 23 nt, Human
agaguauuggucuccucucagcc

SEQ ID NO: 2241392 - RNA, 11 nt, Human
ugaagccaaag

SEQ ID NO: 2241393 - RNA, 12 nt, Human
ugaagccaaaga

SEQ ID NO: 2241394 - RNA, 14 nt, Human
ugaagccaaagaaa

SEQ ID NO: 2241395 - RNA, 15 nt, Human
ugaagccaaagccaa

SEQ ID NO: 2241396 - RNA, 14 nt, Human
ugaagccaaguggg

SEQ ID NO: 2241397 - RNA, 18 nt, Human
ugaagcauuuuauaaauc

SEQ ID NO: 2241398 - RNA, 17 nt, Human
ugaagcauuuuauaaau

SEQ ID NO: 2241399 - RNA, 16 nt, Human
ugaagcauuuuauaaa

SEQ ID NO: 2241400 - RNA, 15 nt, Human
ugaagcauuuuauaa

SEQ ID NO: 2241401 - RNA, 16 nt, Human
agagguggggagcaga

SEQ ID NO: 2241402 - RNA, 23 nt, Human
agaggugugcaagagagggaugc

SEQ ID NO: 2241403 - RNA, 22 nt, Human
agaggugugcaagagagggaug

SEQ ID NO: 2241404 - RNA, 15 nt, Human
agagguuaagguggg

SEQ ID NO: 2241405 - RNA, 18 nt, Human
agagggaggcaagcccug

SEQ ID NO: 2241406 - RNA, 17 nt, Human
agagguuaucuguccca

SEQ ID NO: 2241407 - RNA, 14 nt, Human
agaguagcauuuca

SEQ ID NO: 2241408 - RNA, 24 nt, Human
agaggugggccagucuguggauca

SEQ ID NO: 2241409 - RNA, 16 nt, Human
agagguuaaggugcaa

SEQ ID NO: 2241410 - RNA, 19 nt, Human
agaguagccgagagccugc

SEQ ID NO: 2241411 - RNA, 18 nt, Human
agaguagccgagagccug

SEQ ID NO: 2241412 - RNA, 17 nt, Human
agaguagccgagagccu

SEQ ID NO: 2241413 - RNA, 13 nt, Human
agaguagccgaga

SEQ ID NO: 2241414 - RNA, 20 nt, Human
agagguuaucugucccaggu

SEQ ID NO: 2241415 - RNA, 15 nt, Human
agaguagcauuucau

SEQ ID NO: 2241416 - RNA, 18 nt, Human
agaguagcauuucauucu

SEQ ID NO: 2241417 - RNA, 23 nt, Human
agaguagccaggguguggcccug

SEQ ID NO: 2241418 - RNA, 23 nt, Human
agaguagccgagagccugcuccc

SEQ ID NO: 2241419 - RNA, 14 nt, Human
agaguaguccaggu

SEQ ID NO: 2241420 - RNA, 22 nt, Human
agaguagccgagagccugcucc

SEQ ID NO: 2241421 - RNA, 18 nt, Human
agaguauauuauguauuu

SEQ ID NO: 2241422 - RNA, 13 nt, Human
agaguauaugcac

SEQ ID NO: 2241423 - RNA, 14 nt, Human
ugaagcauuuuaua

SEQ ID NO: 2241424 - RNA, 14 nt, Human
agaguaugaacacc

SEQ ID NO: 2241425 - RNA, 13 nt, Human
agaguauggagcu

SEQ ID NO: 2241426 - RNA, 14 nt, Human
agaguauggagcuc

SEQ ID NO: 2241427 - RNA, 21 nt, Human
agaguauggagcucagagagg

SEQ ID NO: 2241428 - RNA, 16 nt, Human
ugaaaguccagaaacu

SEQ ID NO: 2241429 - RNA, 18 nt, Human
ugaaagucagaugcccag

SEQ ID NO: 2241430 - RNA, 15 nt, Human
ugaaagucagaugcc

SEQ ID NO: 2241431 - RNA, 15 nt, Human
ugaaaguauaacuga

SEQ ID NO: 2241432 - RNA, 23 nt, Human
ugaaaguacauuuggagacacaa

SEQ ID NO: 2241433 - RNA, 15 nt, Human
ugaaagguuuacauu

SEQ ID NO: 2241434 - RNA, 14 nt, Human
ugaaaguacauuug

SEQ ID NO: 2241435 - RNA, 18 nt, Human
ugaaaguccagaaacugu

SEQ ID NO: 2241436 - RNA, 12 nt, Human
agaggccccagc

SEQ ID NO: 2241437 - RNA, 16 nt, Human
agaggccccagccucc

SEQ ID NO: 2241438 - RNA, 15 nt, Human
agaggccccagccuc

SEQ ID NO: 2241439 - RNA, 14 nt, Human
agaggccccagccu

SEQ ID NO: 2241440 - RNA, 13 nt, Human
agaggccccagcc

SEQ ID NO: 2241441 - RNA, 23 nt, Human
agaggccccagccucccugaagc

SEQ ID NO: 2241442 - RNA, 14 nt, Human
agaggcccccagcc

SEQ ID NO: 2241443 - RNA, 16 nt, Human
agaggcccccagccca

SEQ ID NO: 2241444 - RNA, 17 nt, Human
agaggcccccagcccag

SEQ ID NO: 2241445 - RNA, 20 nt, Human
agaggcccccagcccagggc

SEQ ID NO: 2241446 - RNA, 21 nt, Human
agaggcccccagcccagggcu

SEQ ID NO: 2241447 - RNA, 22 nt, Human
agaggcccccagcccagggcuc

SEQ ID NO: 2241448 - RNA, 22 nt, Human
agaggcuggaggcagggccuug

SEQ ID NO: 2241449 - RNA, 20 nt, Human
agaggcuggaggcagggccu

SEQ ID NO: 2241450 - RNA, 14 nt, Human
agaggcuggguuca

SEQ ID NO: 2241451 - RNA, 14 nt, Human
agaggcuggugcug

SEQ ID NO: 2241452 - RNA, 16 nt, Human
agaggcuggugcugug

SEQ ID NO: 2241453 - RNA, 21 nt, Human
agaggcuggugcuguggccag

SEQ ID NO: 2241454 - RNA, 19 nt, Human
agaggcuggaggcagggcc

SEQ ID NO: 2241455 - RNA, 17 nt, Human
agaggcuggaggcaggg

SEQ ID NO: 2241456 - RNA, 18 nt, Human
agaggcccucuggagugg

SEQ ID NO: 2241457 - RNA, 14 nt, Human
agaggcccucugga

SEQ ID NO: 2241458 - RNA, 19 nt, Human
agaggcccucgcugccagc

SEQ ID NO: 2241459 - RNA, 14 nt, Human
agaggcccucgcug

SEQ ID NO: 2241460 - RNA, 22 nt, Human
agaggcuguucccaccaggcug

SEQ ID NO: 2241461 - RNA, 20 nt, Human
agaggcuuccuucauuuccu

SEQ ID NO: 2241462 - RNA, 16 nt, Human
agaggcugguuccaga

SEQ ID NO: 2241463 - RNA, 22 nt, Human
agaggcuggugcuguggccagg

SEQ ID NO: 2241464 - RNA, 12 nt, Human
agaggcuucucc

SEQ ID NO: 2241465 - RNA, 16 nt, Human
agaggcuucuccgcca

SEQ ID NO: 2241466 - RNA, 17 nt, Human
agaggcuucuccgccag

SEQ ID NO: 2241467 - RNA, 19 nt, Human
agaggcuucuccgccagcc

SEQ ID NO: 2241468 - RNA, 20 nt, Human
agaggcuucuccgccagccu

SEQ ID NO: 2241469 - RNA, 21 nt, Human
agaggcuucuccgccagccuc

SEQ ID NO: 2241470 - RNA, 22 nt, Human
agaggcuucuccgccagccucc

SEQ ID NO: 2241471 - RNA, 19 nt, Human
agagggagaagggauggag

SEQ ID NO: 2241472 - RNA, 12 nt, Human
agagggagagag

SEQ ID NO: 2241473 - RNA, 13 nt, Human
agagggagagaga

SEQ ID NO: 2241474 - RNA, 19 nt, Human
agagggagaagcaugaaaa

SEQ ID NO: 2241475 - RNA, 16 nt, Human
agagggagaagcauga

SEQ ID NO: 2241476 - RNA, 14 nt, Human
agagggagaagaag

SEQ ID NO: 2241477 - RNA, 15 nt, Human
agagggagaagaagu

SEQ ID NO: 2241478 - RNA, 13 nt, Human
agagggagaagaa

SEQ ID NO: 2241479 - RNA, 14 nt, Human
agaggcuucuucag

SEQ ID NO: 2241480 - RNA, 23 nt, Human
agaggcuucuccgccagccuccu

SEQ ID NO: 2241481 - RNA, 22 nt, Human
agagggacuguucuuuuguccc

SEQ ID NO: 2241482 - RNA, 16 nt, Human
agagggagggagggcu

SEQ ID NO: 2241483 - RNA, 17 nt, Human
agagggaggcaagcccu

SEQ ID NO: 2241484 - RNA, 16 nt, Human
agagggaggcaagccc

SEQ ID NO: 2241485 - RNA, 24 nt, Human
agagggaggagaaugagccucggc

SEQ ID NO: 2241486 - RNA, 16 nt, Human
agaguuuaguuguagc

SEQ ID NO: 2241487 - RNA, 13 nt, Human
agaguuuccugaa

SEQ ID NO: 2241488 - RNA, 23 nt, Human
ugaauguaugugcacugucacuu

SEQ ID NO: 2241489 - RNA, 20 nt, Human
agagucacacgggggcagcu

SEQ ID NO: 2241490 - RNA, 21 nt, Human
agagucacacgggggcagcug

SEQ ID NO: 2241491 - RNA, 20 nt, Human
agaguuguuacauuuuuaag

SEQ ID NO: 2241492 - RNA, 19 nt, Human
agaguuguuacauuuuuaa

SEQ ID NO: 2241493 - RNA, 17 nt, Human
agaguuguuacauuuuu

SEQ ID NO: 2241494 - RNA, 22 nt, Human
agagucagaaguuucugccgca

SEQ ID NO: 2241495 - RNA, 15 nt, Human
agagucacuggaaca

SEQ ID NO: 2241496 - RNA, 15 nt, Human
ugaauguauuuauuu

SEQ ID NO: 2241497 - RNA, 22 nt, Human
agaguuuguguguugucuugaa

SEQ ID NO: 2241498 - RNA, 18 nt, Human
agaguuuguguguugucu

SEQ ID NO: 2241499 - RNA, 19 nt, Human
agaguuuguguguugucuu

SEQ ID NO: 2241500 - RNA, 13 nt, Human
agaguuugugugu

SEQ ID NO: 2241501 - RNA, 16 nt, Human
agaguuuguguguugu

SEQ ID NO: 2241502 - RNA, 13 nt, Human
agaguuugaagga

SEQ ID NO: 2241503 - RNA, 19 nt, Human
agaguuugaaggaggugag

SEQ ID NO: 2241504 - RNA, 13 nt, Human
agauaacuaggaa

SEQ ID NO: 2241505 - RNA, 21 nt, Human
agauaaccagcuguaacacag

SEQ ID NO: 2241506 - RNA, 20 nt, Human
agaguuuuggaugcagugcu

SEQ ID NO: 2241507 - RNA, 13 nt, Human
agaguuuuggaug

SEQ ID NO: 2241508 - RNA, 17 nt, Human
agaguuuuggaugcagu

SEQ ID NO: 2241509 - RNA, 18 nt, Human
agaguuuuggaugcagug

SEQ ID NO: 2241510 - RNA, 19 nt, Human
agaguuuuggaugcagugc

SEQ ID NO: 2241511 - RNA, 16 nt, Human
agauaacuguuauuua

SEQ ID NO: 2241512 - RNA, 14 nt, Human
agauaacugagaau

SEQ ID NO: 2241513 - RNA, 22 nt, Human
agauaagaaugcugguuuuccu

SEQ ID NO: 2241514 - RNA, 19 nt, Human
agauaacuguuauuuauaa

SEQ ID NO: 2241515 - RNA, 20 nt, Human
agauaacuguuauuuauaau

SEQ ID NO: 2241516 - RNA, 20 nt, Human
agauaagcaagagagauguu

SEQ ID NO: 2241517 - RNA, 17 nt, Human
agauaagcaagagagau

SEQ ID NO: 2241518 - RNA, 16 nt, Human
agauaagcaagagaga

SEQ ID NO: 2241519 - RNA, 13 nt, Human
agauaagcaagag

SEQ ID NO: 2241520 - RNA, 15 nt, Human
agauaauaugagaau

SEQ ID NO: 2241521 - RNA, 22 nt, Human
agauaagcaagagagauguuuu

SEQ ID NO: 2241522 - RNA, 13 nt, Human
agauaauaguuua

SEQ ID NO: 2241523 - RNA, 18 nt, Human
agauaauacaccacuaca

SEQ ID NO: 2241524 - RNA, 18 nt, Human
agaucaaaagguuaauaa

SEQ ID NO: 2241525 - RNA, 12 nt, Human
agaucaaaauaa

SEQ ID NO: 2241526 - RNA, 21 nt, Human
agauauuuugcuuugugauuu

SEQ ID NO: 2241527 - RNA, 20 nt, Human
agauauuuugcuuugugauu

SEQ ID NO: 2241528 - RNA, 23 nt, Human
agauauuuauauuuuuauuuuau

SEQ ID NO: 2241529 - RNA, 20 nt, Human
agauauuuauauuuuuauuu

SEQ ID NO: 2241530 - RNA, 17 nt, Human
agauauuuauauuuuua

SEQ ID NO: 2241531 - RNA, 17 nt, Human
agauauuuauauauauu

SEQ ID NO: 2241532 - RNA, 18 nt, Human
agauacauaugagugugg

SEQ ID NO: 2241533 - RNA, 22 nt, Human
agauacauaugaguguggaagc

SEQ ID NO: 2241534 - RNA, 23 nt, Human
agauauuuauuguuuauuuauca

SEQ ID NO: 2241535 - RNA, 15 nt, Human
agauauuuuaaaaug

SEQ ID NO: 2241536 - RNA, 18 nt, Human
agauauuuuaaaaugaga

SEQ ID NO: 2241537 - RNA, 16 nt, Human
agauacuguaucauga

SEQ ID NO: 2241538 - RNA, 15 nt, Human
agauacuguaucaug

SEQ ID NO: 2241539 - RNA, 22 nt, Human
agauaauauuaaggaagacaau

SEQ ID NO: 2241540 - RNA, 18 nt, Human
agauaauauuaaggaaga

SEQ ID NO: 2241541 - RNA, 20 nt, Human
agauacaggaaaagcugcug

SEQ ID NO: 2241542 - RNA, 13 nt, Human
agauacaguuacu

SEQ ID NO: 2241543 - RNA, 17 nt, Human
agauaauaugagaauca

SEQ ID NO: 2241544 - RNA, 14 nt, Human
agauaaucagccuc

SEQ ID NO: 2241545 - RNA, 22 nt, Human
agauacaguuacucagaauucu

SEQ ID NO: 2241546 - RNA, 11 nt, Human
agauacuguau

SEQ ID NO: 2241547 - RNA, 22 nt, Human
ugacacagucuuggcucacugc

SEQ ID NO: 2241548 - RNA, 23 nt, Human
ugacacagucuuggcucacugca

SEQ ID NO: 2241549 - RNA, 17 nt, Human
ugacacaggucuuuccu

SEQ ID NO: 2241550 - RNA, 16 nt, Human
ugacacaggucuuucc

SEQ ID NO: 2241551 - RNA, 16 nt, Human
ugacacagcagcuuca

SEQ ID NO: 2241552 - RNA, 16 nt, Human
ugacacaggaugaagg

SEQ ID NO: 2241553 - RNA, 22 nt, Human
ugacacagcagcuucaccagag

SEQ ID NO: 2241554 - RNA, 19 nt, Human
ugacacacagcucuguccu

SEQ ID NO: 2241555 - RNA, 23 nt, Human
ugacacagaaaauguugagaauc

SEQ ID NO: 2241556 - RNA, 19 nt, Human
ugacaaagaaacccaagug

SEQ ID NO: 2241557 - RNA, 16 nt, Human
ugacaaagcuuggaag

SEQ ID NO: 2241558 - RNA, 17 nt, Human
ugacaaaggcaagcacu

SEQ ID NO: 2241559 - RNA, 21 nt, Human
ugacaaagaguagacauuucu

SEQ ID NO: 2241560 - RNA, 19 nt, Human
ugacaaagacugaguacgu

SEQ ID NO: 2241561 - RNA, 16 nt, Human
ugacacacagcucugu

SEQ ID NO: 2241562 - RNA, 18 nt, Human
ugacacacagcucugucc

SEQ ID NO: 2241563 - RNA, 22 nt, Human
ugacaccagccuuucucccagg

SEQ ID NO: 2241564 - RNA, 16 nt, Human
ugacaccagccuuucu

SEQ ID NO: 2241565 - RNA, 15 nt, Human
ugacaccagccuuuc

SEQ ID NO: 2241566 - RNA, 13 nt, Human
ugacaccagccuu

SEQ ID NO: 2241567 - RNA, 12 nt, Human
ugacaccagccu

SEQ ID NO: 2241568 - RNA, 18 nt, Human
ugacacaggucuuuccua

SEQ ID NO: 2241569 - RNA, 21 nt, Human
ugacacauaugcaccuugugu

SEQ ID NO: 2241570 - RNA, 22 nt, Human
ugacacauaugcaccuuguguc

SEQ ID NO: 2241571 - RNA, 22 nt, Human
ugacacauggccccucccccug

SEQ ID NO: 2241572 - RNA, 16 nt, Human
ugacacauggccccuc

SEQ ID NO: 2241573 - RNA, 20 nt, Human
ugacacaugcaaggucauuu

SEQ ID NO: 2241574 - RNA, 12 nt, Human
ugacacaugcaa

SEQ ID NO: 2241575 - RNA, 17 nt, Human
ugacacguccaccccag

SEQ ID NO: 2241576 - RNA, 18 nt, Human
ugacacuagcccaaugaa

SEQ ID NO: 2241577 - RNA, 21 nt, Human
ugacacuagcccaaugaaaug

SEQ ID NO: 2241578 - RNA, 19 nt, Human
ugacacuagcccaaugaaa

SEQ ID NO: 2241579 - RNA, 23 nt, Human
ugacaccagccuuucucccaggc

SEQ ID NO: 2241580 - RNA, 13 nt, Human
ugacacccauguu

SEQ ID NO: 2241581 - RNA, 24 nt, Human
ugacaccagcuguucugucccuug

SEQ ID NO: 2241582 - RNA, 19 nt, Human
ugacacccauguuucucug

SEQ ID NO: 2241583 - RNA, 22 nt, Human
ugacacucccuugggcucccug

SEQ ID NO: 2241584 - RNA, 22 nt, Human
ugacacuauaucuguauauaaa

SEQ ID NO: 2241585 - RNA, 17 nt, Human
ugacacuauaucuguau

SEQ ID NO: 2241586 - RNA, 18 nt, Human
ugacacuauaucuguaua

SEQ ID NO: 2241587 - RNA, 19 nt, Human
ugacacuauaucuguauau

SEQ ID NO: 2241588 - RNA, 23 nt, Human
ugacacuagcccaaugaaaugaa

SEQ ID NO: 2241589 - RNA, 22 nt, Human
ugacacuagcccaaugaaauga

SEQ ID NO: 2241590 - RNA, 20 nt, Human
ugaauuuggccugcacuaau

SEQ ID NO: 2241591 - RNA, 20 nt, Human
ugaauuuggagacucugugg

SEQ ID NO: 2241592 - RNA, 17 nt, Human
ugaauuuggagacucug

SEQ ID NO: 2241593 - RNA, 15 nt, Human
ugaauuuggagacuc

SEQ ID NO: 2241594 - RNA, 14 nt, Human
ugaauuuggagacu

SEQ ID NO: 2241595 - RNA, 18 nt, Human
ugaauuugaaugaaaaau

SEQ ID NO: 2241596 - RNA, 17 nt, Human
ugaauuugaaugaaaaa

SEQ ID NO: 2241597 - RNA, 16 nt, Human
ugaauuugaaugaaaa

SEQ ID NO: 2241598 - RNA, 15 nt, Human
ugaauuugaaugaaa

SEQ ID NO: 2241599 - RNA, 13 nt, Human
ugaauuugaauga

SEQ ID NO: 2241600 - RNA, 13 nt, Human
ugaauuugugaag

SEQ ID NO: 2241601 - RNA, 21 nt, Human
ugaauuugugaagguggaaau

SEQ ID NO: 2241602 - RNA, 23 nt, Human
agaucaaauuucacgucgucuuc

SEQ ID NO: 2241603 - RNA, 14 nt, Human
agaucaaauuucac

SEQ ID NO: 2241604 - RNA, 20 nt, Human
agaucaaauacuuuaaagga

SEQ ID NO: 2241605 - RNA, 16 nt, Human
agaucaaauacuuuaa

SEQ ID NO: 2241606 - RNA, 16 nt, Human
agaucaaauggaaagg

SEQ ID NO: 2241607 - RNA, 17 nt, Human
agaucaaaauaaaaagu

SEQ ID NO: 2241608 - RNA, 14 nt, Human
agaucaaaauaaaa

SEQ ID NO: 2241609 - RNA, 16 nt, Human
agaucaaaauaaaaag

SEQ ID NO: 2241610 - RNA, 13 nt, Human
agaucaaauacuu

SEQ ID NO: 2241611 - RNA, 14 nt, Human
agaucaaauacuuu

SEQ ID NO: 2241612 - RNA, 15 nt, Human
agaucaaauacuuua

SEQ ID NO: 2241613 - RNA, 23 nt, Human
ugaauuucuuuugccguuauuaa

SEQ ID NO: 2241614 - RNA, 21 nt, Human
ugaauuuggccugcacuaauu

SEQ ID NO: 2241615 - RNA, 19 nt, Human
ugaauuugaaugaaaaauu

SEQ ID NO: 2241616 - RNA, 23 nt, Human
ugaauuugugaagguggaaauaa

SEQ ID NO: 2241617 - RNA, 14 nt, Human
ugaauuuuguugcu

SEQ ID NO: 2241618 - RNA, 18 nt, Human
ugaauuuuguuuggacuu

SEQ ID NO: 2241619 - RNA, 16 nt, Human
ugaauuuuguugcugu

SEQ ID NO: 2241620 - RNA, 22 nt, Human
ugaauuuuuaaaacccauuuaa

SEQ ID NO: 2241621 - RNA, 13 nt, Human
ugaauuuuucucu

SEQ ID NO: 2241622 - RNA, 15 nt, Human
ugaauuuuucucuaa

SEQ ID NO: 2241623 - RNA, 17 nt, Human
ugacaaaccucuaaccc

SEQ ID NO: 2241624 - RNA, 17 nt, Human
ugacaaagaaacccaag

SEQ ID NO: 2241625 - RNA, 18 nt, Human
ugacaaaauuuguugaaa

SEQ ID NO: 2241626 - RNA, 15 nt, Human
ugacaaagaaaccca

SEQ ID NO: 2241627 - RNA, 13 nt, Human
agacauugucaau

SEQ ID NO: 2241628 - RNA, 19 nt, Human
agacauucugccaggcccc

SEQ ID NO: 2241629 - RNA, 12 nt, Human
agacauucuguc

SEQ ID NO: 2241630 - RNA, 15 nt, Human
agacauuggcaccua

SEQ ID NO: 2241631 - RNA, 15 nt, Human
agacauucugccagg

SEQ ID NO: 2241632 - RNA, 14 nt, Human
agacauucugccag

SEQ ID NO: 2241633 - RNA, 19 nt, Human
agacauucuuccaaaaaga

SEQ ID NO: 2241634 - RNA, 12 nt, Human
agacauuaaauc

SEQ ID NO: 2241635 - RNA, 14 nt, Human
agacauuaaaucua

SEQ ID NO: 2241636 - RNA, 15 nt, Human
agacauuaaaucuau

SEQ ID NO: 2241637 - RNA, 22 nt, Human
agacauuaaaucuaugaaguau

SEQ ID NO: 2241638 - RNA, 17 nt, Human
agacauuccugggcaca

SEQ ID NO: 2241639 - RNA, 16 nt, Human
agacaucucugcaccc

SEQ ID NO: 2241640 - RNA, 18 nt, Human
agacauguuuuccgugaa

SEQ ID NO: 2241641 - RNA, 18 nt, Human
agacauccauguuuguaa

SEQ ID NO: 2241642 - RNA, 21 nt, Human
agacauccauguuuguaaaac

SEQ ID NO: 2241643 - RNA, 22 nt, Human
agacauccauguuuguaaaacu

SEQ ID NO: 2241644 - RNA, 14 nt, Human
agacaucucugcac

SEQ ID NO: 2241645 - RNA, 16 nt, Human
agacauugucaauaaa

SEQ ID NO: 2241646 - RNA, 13 nt, Human
agacauugucagc

SEQ ID NO: 2241647 - RNA, 17 nt, Human
agacauugucagcaaau

SEQ ID NO: 2241648 - RNA, 19 nt, Human
agacauuguuuugccaaca

SEQ ID NO: 2241649 - RNA, 23 nt, Human
agacccccccccccaacagaaca

SEQ ID NO: 2241650 - RNA, 22 nt, Human
agacauuguuuugccaacauug

SEQ ID NO: 2241651 - RNA, 23 nt, Human
agacauuguuuugccaacauugc

SEQ ID NO: 2241652 - RNA, 14 nt, Human
agacccccuggaga

SEQ ID NO: 2241653 - RNA, 13 nt, Human
agacccccuggag

SEQ ID NO: 2241654 - RNA, 22 nt, Human
agaccccucuggccaggaugga

SEQ ID NO: 2241655 - RNA, 21 nt, Human
agaccccucuggccaggaugg

SEQ ID NO: 2241656 - RNA, 19 nt, Human
agaccccucuggccaggau

SEQ ID NO: 2241657 - RNA, 17 nt, Human
agaccccucuggccagg

SEQ ID NO: 2241658 - RNA, 19 nt, Human
agacccccggaacaagccu

SEQ ID NO: 2241659 - RNA, 14 nt, Human
agaccccucuggcc

SEQ ID NO: 2241660 - RNA, 19 nt, Human
agacccccuggagacuaac

SEQ ID NO: 2241661 - RNA, 15 nt, Human
agacccccuggagac

SEQ ID NO: 2241662 - RNA, 14 nt, Human
agacauaacguuuu

SEQ ID NO: 2241663 - RNA, 20 nt, Human
agacauaacguuuuuccuuu

SEQ ID NO: 2241664 - RNA, 19 nt, Human
agacauacuaaccagcaga

SEQ ID NO: 2241665 - RNA, 21 nt, Human
agacauagaauuaacacauga

SEQ ID NO: 2241666 - RNA, 20 nt, Human
agacaucaagcacagaagga

SEQ ID NO: 2241667 - RNA, 17 nt, Human
agacaucaagcacagaa

SEQ ID NO: 2241668 - RNA, 18 nt, Human
agacauaggccaugaaaa

SEQ ID NO: 2241669 - RNA, 17 nt, Human
agacauaacguuuuucc

SEQ ID NO: 2241670 - RNA, 19 nt, Human
agacauaggccaugaaaaa

SEQ ID NO: 2241671 - RNA, 15 nt, Human
agacauccauaaaga

SEQ ID NO: 2241672 - RNA, 18 nt, Human
agacauccauaaagaagc

SEQ ID NO: 2241673 - RNA, 19 nt, Human
agacauccauaaagaagca

SEQ ID NO: 2241674 - RNA, 22 nt, Human
agacauccauaaagaagcaaua

SEQ ID NO: 2241675 - RNA, 17 nt, Human
agacauccauguuugua

SEQ ID NO: 2241676 - RNA, 18 nt, Human
agacaucaacagauaaau

SEQ ID NO: 2241677 - RNA, 17 nt, Human
agacaucaacagauaaa

SEQ ID NO: 2241678 - RNA, 13 nt, Human
ucuucuuaacuua

SEQ ID NO: 2241679 - RNA, 16 nt, Human
ucuucuguuuucuguu

SEQ ID NO: 2241680 - RNA, 17 nt, Human
ucuucuguuuucuguuu

SEQ ID NO: 2241681 - RNA, 13 nt, Human
ucuucuguggacc

SEQ ID NO: 2241682 - RNA, 20 nt, Human
ucuucuguggguuucuaaag

SEQ ID NO: 2241683 - RNA, 15 nt, Human
agacaguuucuuagc

SEQ ID NO: 2241684 - RNA, 18 nt, Human
ucuucuguuuucuguuuc

SEQ ID NO: 2241685 - RNA, 18 nt, Human
ucuucuuaagacuuuugg

SEQ ID NO: 2241686 - RNA, 21 nt, Human
agacaguuucuuagcuuuuua

SEQ ID NO: 2241687 - RNA, 18 nt, Human
agacaguuucuuagcuuu

SEQ ID NO: 2241688 - RNA, 20 nt, Human
agacaguuucuuagcuuuuu

SEQ ID NO: 2241689 - RNA, 22 nt, Human
agacaguuucuuagcuuuuuaa

SEQ ID NO: 2241690 - RNA, 15 nt, Human
ucuucuguacgucug

SEQ ID NO: 2241691 - RNA, 22 nt, Human
ucuucuguauuuuuuuuucuaa

SEQ ID NO: 2241692 - RNA, 23 nt, Human
ucuucugugauucgguggagacu

SEQ ID NO: 2241693 - RNA, 14 nt, Human
ucuucuguauuuuu

SEQ ID NO: 2241694 - RNA, 19 nt, Human
ucuucuguauacuguggag

SEQ ID NO: 2241695 - RNA, 18 nt, Human
ucuucuggguuccuuccu

SEQ ID NO: 2241696 - RNA, 20 nt, Human
ucuucugcuccacccuuggc

SEQ ID NO: 2241697 - RNA, 19 nt, Human
ucuucugcuccacccuugg

SEQ ID NO: 2241698 - RNA, 17 nt, Human
ucuucugcuccacccuu

SEQ ID NO: 2241699 - RNA, 16 nt, Human
ucuucugcuccacccu

SEQ ID NO: 2241700 - RNA, 15 nt, Human
ucuucugcuccaccc

SEQ ID NO: 2241701 - RNA, 14 nt, Human
ucuucugcuccacc

SEQ ID NO: 2241702 - RNA, 24 nt, Human
ucuucugaacucaaacugaggaau

SEQ ID NO: 2241703 - RNA, 15 nt, Human
ucuucucuuccugua

SEQ ID NO: 2241704 - RNA, 21 nt, Human
ucuucugaacuuggcgcugcc

SEQ ID NO: 2241705 - RNA, 19 nt, Human
ucuucugaacucaaacuga

SEQ ID NO: 2241706 - RNA, 21 nt, Human
ucuucucuuccuuuuaucagu

SEQ ID NO: 2241707 - RNA, 19 nt, Human
ucuucucuuccuuuuauca

SEQ ID NO: 2241708 - RNA, 14 nt, Human
ucuucucuuccugu

SEQ ID NO: 2241709 - RNA, 23 nt, Human
ucuucugcuccacccuuggccug

SEQ ID NO: 2241710 - RNA, 22 nt, Human
ucuucugcuccacccuuggccu

SEQ ID NO: 2241711 - RNA, 23 nt, Human
ucuucugggagggcagcagggcu

SEQ ID NO: 2241712 - RNA, 22 nt, Human
ucuucugggagggcagcagggc

SEQ ID NO: 2241713 - RNA, 18 nt, Human
ucuucugcuuaggagaga

SEQ ID NO: 2241714 - RNA, 12 nt, Human
ucuucugcuuca

SEQ ID NO: 2241715 - RNA, 19 nt, Human
ucuucugcuucagccuccc

SEQ ID NO: 2241716 - RNA, 15 nt, Human
ucuucaacucccugc

SEQ ID NO: 2241717 - RNA, 16 nt, Human
ucuucaacugaccagc

SEQ ID NO: 2241718 - RNA, 19 nt, Human
ucuucaacugaccagccuc

SEQ ID NO: 2241719 - RNA, 22 nt, Human
agaaucacuucugagaacucau

SEQ ID NO: 2241720 - RNA, 14 nt, Human
agaaucacuugaac

SEQ ID NO: 2241721 - RNA, 17 nt, Human
ucuucagagacuccugc

SEQ ID NO: 2241722 - RNA, 18 nt, Human
ucuucagagacuccugca

SEQ ID NO: 2241723 - RNA, 12 nt, Human
ucuucagagacu

SEQ ID NO: 2241724 - RNA, 15 nt, Human
ucuucacaacagauu

SEQ ID NO: 2241725 - RNA, 13 nt, Human
ucuucacaaaauc

SEQ ID NO: 2241726 - RNA, 14 nt, Human
ucuucaagaaaucu

SEQ ID NO: 2241727 - RNA, 21 nt, Human
ucuuccaggcugggagagccu

SEQ ID NO: 2241728 - RNA, 14 nt, Human
ucuuccauuugcaa

SEQ ID NO: 2241729 - RNA, 18 nt, Human
ucuucccaggcuggggcu

SEQ ID NO: 2241730 - RNA, 12 nt, Human
ucuucccagggu

SEQ ID NO: 2241731 - RNA, 14 nt, Human
ucuucccaggguag

SEQ ID NO: 2241732 - RNA, 21 nt, Human
ucuucccaggguagcccgccu

SEQ ID NO: 2241733 - RNA, 13 nt, Human
ucuuccauuugca

SEQ ID NO: 2241734 - RNA, 16 nt, Human
ucuuccaucccaggac

SEQ ID NO: 2241735 - RNA, 20 nt, Human
ucuucagagacuccugcagg

SEQ ID NO: 2241736 - RNA, 15 nt, Human
ucuuccaggcuggga

SEQ ID NO: 2241737 - RNA, 17 nt, Human
ucuuccaggcugggaga

SEQ ID NO: 2241738 - RNA, 20 nt, Human
ucuuccaggcugggagagcc

SEQ ID NO: 2241739 - RNA, 17 nt, Human
ucuucccaucacuggag

SEQ ID NO: 2241740 - RNA, 16 nt, Human
ucuucccaucacugga

SEQ ID NO: 2241741 - RNA, 19 nt, Human
ucuuccccacuccccaccu

SEQ ID NO: 2241742 - RNA, 14 nt, Human
ucuuccccacuccc

SEQ ID NO: 2241743 - RNA, 20 nt, Human
ucuuccccagaaaggagacu

SEQ ID NO: 2241744 - RNA, 17 nt, Human
ucuucccgaaccccaag

SEQ ID NO: 2241745 - RNA, 23 nt, Human
ucuuccccuugcccuugcccuga

SEQ ID NO: 2241746 - RNA, 16 nt, Human
ucuuccccuugcccuu

SEQ ID NO: 2241747 - RNA, 22 nt, Human
ucuuccccuugcccuugcccug

SEQ ID NO: 2241748 - RNA, 14 nt, Human
ucuuccccucucag

SEQ ID NO: 2241749 - RNA, 13 nt, Human
ucuuccccuugcc

SEQ ID NO: 2241750 - RNA, 15 nt, Human
ucuuccccuugcccu

SEQ ID NO: 2241751 - RNA, 18 nt, Human
ucuucccccacuccucuu

SEQ ID NO: 2241752 - RNA, 22 nt, Human
ucuucccuacaguugaaaaaca

SEQ ID NO: 2241753 - RNA, 19 nt, Human
ucuucccuacaguugaaaa

SEQ ID NO: 2241754 - RNA, 14 nt, Human
ucuuccucccuccc

SEQ ID NO: 2241755 - RNA, 19 nt, Human
ucuucccgaaccccaagga

SEQ ID NO: 2241756 - RNA, 18 nt, Human
ucuucccgaaccccaagg

SEQ ID NO: 2241757 - RNA, 15 nt, Human
ucuuccucccucccu

SEQ ID NO: 2241758 - RNA, 17 nt, Human
ucuuccuccgaggccag

SEQ ID NO: 2241759 - RNA, 18 nt, Human
ucuuccuccgaggccagu

SEQ ID NO: 2241760 - RNA, 13 nt, Human
ucuuccucccaag

SEQ ID NO: 2241761 - RNA, 14 nt, Human
ucuuccucccaagu

SEQ ID NO: 2241762 - RNA, 22 nt, Human
ucuuccucccaaguggugccua

SEQ ID NO: 2241763 - RNA, 11 nt, Human
ucuuccucugc

SEQ ID NO: 2241764 - RNA, 12 nt, Human
ucuuccucugcu

SEQ ID NO: 2241765 - RNA, 14 nt, Human
ucuuccucugcuga

SEQ ID NO: 2241766 - RNA, 16 nt, Human
ucuuccucugaggcug

SEQ ID NO: 2241767 - RNA, 13 nt, Human
ucuuccucugagg

SEQ ID NO: 2241768 - RNA, 14 nt, Human
ucuuccucugaggc

SEQ ID NO: 2241769 - RNA, 21 nt, Human
ucuucucuggcgacaguuuuc

SEQ ID NO: 2241770 - RNA, 13 nt, Human
ucuucucuuccug

SEQ ID NO: 2241771 - RNA, 20 nt, Human
ucuucucucucaauuuuauc

SEQ ID NO: 2241772 - RNA, 13 nt, Human
ucuuccugacacu

SEQ ID NO: 2241773 - RNA, 16 nt, Human
ucuuccugacacuuua

SEQ ID NO: 2241774 - RNA, 15 nt, Human
ucuuccugacacuuu

SEQ ID NO: 2241775 - RNA, 14 nt, Human
ucuuccugaguggu

SEQ ID NO: 2241776 - RNA, 18 nt, Human
ucuuccugaguggugcca

SEQ ID NO: 2241777 - RNA, 18 nt, Human
ucuuccugcaaggacuac

SEQ ID NO: 2241778 - RNA, 18 nt, Human
agaccuguuagcagacag

SEQ ID NO: 2241779 - RNA, 17 nt, Human
agaccuguccuccuggu

SEQ ID NO: 2241780 - RNA, 15 nt, Human
agaccuguccuccug

SEQ ID NO: 2241781 - RNA, 18 nt, Human
agaccuggcagcucugga

SEQ ID NO: 2241782 - RNA, 17 nt, Human
agaccuggcagcucugg

SEQ ID NO: 2241783 - RNA, 23 nt, Human
agaccuggcagcucuggacagcc

SEQ ID NO: 2241784 - RNA, 13 nt, Human
agaccuguaauca

SEQ ID NO: 2241785 - RNA, 22 nt, Human
agaccuggcaaggacacagaug

SEQ ID NO: 2241786 - RNA, 12 nt, Human
agaccccuggcc

SEQ ID NO: 2241787 - RNA, 13 nt, Human
agaccccuggccu

SEQ ID NO: 2241788 - RNA, 14 nt, Human
agaccccuggccuc

SEQ ID NO: 2241789 - RNA, 16 nt, Human
agaccccuggccuccg

SEQ ID NO: 2241790 - RNA, 16 nt, Human
agaccuggcagcucug

SEQ ID NO: 2241791 - RNA, 15 nt, Human
agaccuggcagcucu

SEQ ID NO: 2241792 - RNA, 14 nt, Human
agaccuggcagcuc

SEQ ID NO: 2241793 - RNA, 11 nt, Human
agaccuggcag

SEQ ID NO: 2241794 - RNA, 11 nt, Human
agaccuucucc

SEQ ID NO: 2241795 - RNA, 19 nt, Human
agaccuguuagcagacagg

SEQ ID NO: 2241796 - RNA, 21 nt, Human
agaccuguugguuccaagccc

SEQ ID NO: 2241797 - RNA, 16 nt, Human
agaccuucaccaaaca

SEQ ID NO: 2241798 - RNA, 13 nt, Human
agaccuuccauaa

SEQ ID NO: 2241799 - RNA, 22 nt, Human
agaccuuccauaaugcuacugu

SEQ ID NO: 2241800 - RNA, 23 nt, Human
agaccuuccauaaugcuacuguc

SEQ ID NO: 2241801 - RNA, 18 nt, Human
agaccuucuaggacgcca

SEQ ID NO: 2241802 - RNA, 15 nt, Human
agaccuucuccuuca

SEQ ID NO: 2241803 - RNA, 18 nt, Human
agaccuucuccuucaccu

SEQ ID NO: 2241804 - RNA, 19 nt, Human
agaccuucuccaaaugaga

SEQ ID NO: 2241805 - RNA, 23 nt, Human
agaccuuggaucagaugaacucu

SEQ ID NO: 2241806 - RNA, 18 nt, Human
agaccuucuccaaaugag

SEQ ID NO: 2241807 - RNA, 16 nt, Human
agaccuucuccaaaug

SEQ ID NO: 2241808 - RNA, 18 nt, Human
agaccuuguuacuucuga

SEQ ID NO: 2241809 - RNA, 15 nt, Human
agaccuuguguguau

SEQ ID NO: 2241810 - RNA, 18 nt, Human
agaccuuguguguaugug

SEQ ID NO: 2241811 - RNA, 19 nt, Human
agaccuuguuacuucugag

SEQ ID NO: 2241812 - RNA, 21 nt, Human
agaccuuguuacuucugaggu

SEQ ID NO: 2241813 - RNA, 22 nt, Human
agaccuuguuacuucugaggua

SEQ ID NO: 2241814 - RNA, 16 nt, Human
agaccuuguucacacu

SEQ ID NO: 2241815 - RNA, 20 nt, Human
agaccuuguucacacucuca

SEQ ID NO: 2241816 - RNA, 21 nt, Human
agaccuucuccuucaccuuug

SEQ ID NO: 2241817 - RNA, 23 nt, Human
agaccuucuccuucaccuuuguc

SEQ ID NO: 2241818 - RNA, 14 nt, Human
agacuauucaaaca

SEQ ID NO: 2241819 - RNA, 12 nt, Human
agacuauucaaa

SEQ ID NO: 2241820 - RNA, 15 nt, Human
agacuauucaaacag

SEQ ID NO: 2241821 - RNA, 16 nt, Human
agacuauucaaacagu

SEQ ID NO: 2241822 - RNA, 21 nt, Human
agaccuuguucacacucucac

SEQ ID NO: 2241823 - RNA, 14 nt, Human
ucuugagggagcuu

SEQ ID NO: 2241824 - RNA, 16 nt, Human
ucuugaggccaggagu

SEQ ID NO: 2241825 - RNA, 15 nt, Human
ucuugaggccaggag

SEQ ID NO: 2241826 - RNA, 22 nt, Human
ucuugagcaguggcugguccag

SEQ ID NO: 2241827 - RNA, 13 nt, Human
ucuugaguuuguc

SEQ ID NO: 2241828 - RNA, 14 nt, Human
ucuugaguuugucg

SEQ ID NO: 2241829 - RNA, 20 nt, Human
ucuugaguuugucgcucaug

SEQ ID NO: 2241830 - RNA, 20 nt, Human
ucuugagguacucugcacau

SEQ ID NO: 2241831 - RNA, 13 nt, Human
ucuugauucauaa

SEQ ID NO: 2241832 - RNA, 23 nt, Human
ucuugauuauccauauugaguca

SEQ ID NO: 2241833 - RNA, 14 nt, Human
ucuugauuauccau

SEQ ID NO: 2241834 - RNA, 21 nt, Human
ucuugaugccuggcggggugg

SEQ ID NO: 2241835 - RNA, 16 nt, Human
ucuugauguugcuuag

SEQ ID NO: 2241836 - RNA, 18 nt, Human
ucuugauguggugaggca

SEQ ID NO: 2241837 - RNA, 19 nt, Human
agacucaccucugccucaa

SEQ ID NO: 2241838 - RNA, 20 nt, Human
agacucaggccaagaaacgu

SEQ ID NO: 2241839 - RNA, 19 nt, Human
agacucaggccaagaaacg

SEQ ID NO: 2241840 - RNA, 15 nt, Human
agacucagacuccau

SEQ ID NO: 2241841 - RNA, 18 nt, Human
agacucaccucugccuca

SEQ ID NO: 2241842 - RNA, 17 nt, Human
agacucaccucugccuc

SEQ ID NO: 2241843 - RNA, 16 nt, Human
agacucaccucugccu

SEQ ID NO: 2241844 - RNA, 17 nt, Human
agacucagggccccagc

SEQ ID NO: 2241845 - RNA, 16 nt, Human
agacucagggccccag

SEQ ID NO: 2241846 - RNA, 12 nt, Human
agacucagggcc

SEQ ID NO: 2241847 - RNA, 23 nt, Human
agacucaggccaagaaacgucuu

SEQ ID NO: 2241848 - RNA, 20 nt, Human
agacucagggccccagcacu

SEQ ID NO: 2241849 - RNA, 18 nt, Human
agacucagggccccagca

SEQ ID NO: 2241850 - RNA, 21 nt, Human
agacucagggccccagcacua

SEQ ID NO: 2241851 - RNA, 16 nt, Human
ucuugacuacagucag

SEQ ID NO: 2241852 - RNA, 16 nt, Human
ucuugagccugggagg

SEQ ID NO: 2241853 - RNA, 13 nt, Human
ucuugagccuggg

SEQ ID NO: 2241854 - RNA, 16 nt, Human
ucuugagaugucuucu

SEQ ID NO: 2241855 - RNA, 17 nt, Human
ucuugagcaaguuccuu

SEQ ID NO: 2241856 - RNA, 14 nt, Human
ucuugagcaguggc

SEQ ID NO: 2241857 - RNA, 20 nt, Human
ucuugagccuugaacuuuga

SEQ ID NO: 2241858 - RNA, 16 nt, Human
ucuugagccuugaacu

SEQ ID NO: 2241859 - RNA, 17 nt, Human
ucuuggcuuggugagga

SEQ ID NO: 2241860 - RNA, 19 nt, Human
ucuuggcuuacugcagccu

SEQ ID NO: 2241861 - RNA, 11 nt, Human
ucuugggaaau

SEQ ID NO: 2241862 - RNA, 15 nt, Human
ucuuggcuuucaugu

SEQ ID NO: 2241863 - RNA, 16 nt, Human
ucuuggcuuucauguu

SEQ ID NO: 2241864 - RNA, 12 nt, Human
ucuugggaaaua

SEQ ID NO: 2241865 - RNA, 14 nt, Human
ucuugggaaauaug

SEQ ID NO: 2241866 - RNA, 19 nt, Human
ucuugggaaauaugaaugc

SEQ ID NO: 2241867 - RNA, 20 nt, Human
ucuugggaaauaugaaugcc

SEQ ID NO: 2241868 - RNA, 13 nt, Human
ucuuggcagucac

SEQ ID NO: 2241869 - RNA, 21 nt, Human
ucuuggcccgcacagagcugg

SEQ ID NO: 2241870 - RNA, 18 nt, Human
ucuuggcccgcacagagc

SEQ ID NO: 2241871 - RNA, 15 nt, Human
ucuuggcggcagcag

SEQ ID NO: 2241872 - RNA, 18 nt, Human
ucuuggcggcagcagcca

SEQ ID NO: 2241873 - RNA, 19 nt, Human
ucuuggcggcagcagccau

SEQ ID NO: 2241874 - RNA, 13 nt, Human
ucuuggcucacug

SEQ ID NO: 2241875 - RNA, 19 nt, Human
ucuugcaauggcagccuug

SEQ ID NO: 2241876 - RNA, 18 nt, Human
ucuugcaauggcagccuu

SEQ ID NO: 2241877 - RNA, 22 nt, Human
ucuugcaauggcagccuuggca

SEQ ID NO: 2241878 - RNA, 19 nt, Human
ucuuggcagcaccugucuc

SEQ ID NO: 2241879 - RNA, 18 nt, Human
ucuuggcagcaccugucu

SEQ ID NO: 2241880 - RNA, 13 nt, Human
ucuugggcccucc

SEQ ID NO: 2241881 - RNA, 11 nt, Human
ucuugggcccu

SEQ ID NO: 2241882 - RNA, 23 nt, Human
ucuugggcagagcuggcucugag

SEQ ID NO: 2241883 - RNA, 17 nt, Human
ucuuggggacaucucuu

SEQ ID NO: 2241884 - RNA, 21 nt, Human
ucuuggggacaucucuuugaa

SEQ ID NO: 2241885 - RNA, 19 nt, Human
ucuugggcagagcuggcuc

SEQ ID NO: 2241886 - RNA, 20 nt, Human
ucuugggcagagcuggcucu

SEQ ID NO: 2241887 - RNA, 21 nt, Human
ucuugggcagagcuggcucug

SEQ ID NO: 2241888 - RNA, 16 nt, Human
ucuugggacuggguuu

SEQ ID NO: 2241889 - RNA, 22 nt, Human
ucuugggacuggguuuggaccc

SEQ ID NO: 2241890 - RNA, 14 nt, Human
ucuugggaacugaa

SEQ ID NO: 2241891 - RNA, 13 nt, Human
ucuugggaacuga

SEQ ID NO: 2241892 - RNA, 17 nt, Human
ucuuggucagauuugaa

SEQ ID NO: 2241893 - RNA, 14 nt, Human
ucuugguccugcug

SEQ ID NO: 2241894 - RNA, 14 nt, Human
ucuugguaagaagc

SEQ ID NO: 2241895 - RNA, 16 nt, Human
ucuugggucuaugccu

SEQ ID NO: 2241896 - RNA, 16 nt, Human
ucuuggguaggcggga

SEQ ID NO: 2241897 - RNA, 20 nt, Human
ucuuggggggguggccgcug

SEQ ID NO: 2241898 - RNA, 20 nt, Human
ucuugggggacagggcuggc

SEQ ID NO: 2241899 - RNA, 21 nt, Human
ucuugggggacagggcuggcc

SEQ ID NO: 2241900 - RNA, 22 nt, Human
ucuugggggacagggcuggccc

SEQ ID NO: 2241901 - RNA, 19 nt, Human
ucuuggggggguggccgcu

SEQ ID NO: 2241902 - RNA, 23 nt, Human
ucuugggggacagggcuggccca

SEQ ID NO: 2241903 - RNA, 24 nt, Human
ucuugggggacagggcuggcccag

SEQ ID NO: 2241904 - RNA, 15 nt, Human
ucuuuaugacuguuu

SEQ ID NO: 2241905 - RNA, 16 nt, Human
ucuuuauuaaucacua

SEQ ID NO: 2241906 - RNA, 13 nt, Human
ucuuuauugagaa

SEQ ID NO: 2241907 - RNA, 14 nt, Human
ucuuuauugagaaa

SEQ ID NO: 2241908 - RNA, 15 nt, Human
ucuuuauugagaaag

SEQ ID NO: 2241909 - RNA, 16 nt, Human
ucuuuauugagaaaga

SEQ ID NO: 2241910 - RNA, 19 nt, Human
ucuuuauugagaaagagca

SEQ ID NO: 2241911 - RNA, 15 nt, Human
ucuuuccuucuugcc

SEQ ID NO: 2241912 - RNA, 10 nt, Human
ucuuuccuug

SEQ ID NO: 2241913 - RNA, 13 nt, Human
ucuuuccuugcuc

SEQ ID NO: 2241914 - RNA, 18 nt, Human
ucuuuccuguuguuguua

SEQ ID NO: 2241915 - RNA, 11 nt, Human
ucuuuccuguc

SEQ ID NO: 2241916 - RNA, 14 nt, Human
ucuuuccugccuuc

SEQ ID NO: 2241917 - RNA, 16 nt, Human
ucuuuccugccuucuu

SEQ ID NO: 2241918 - RNA, 17 nt, Human
ucuuuccugaggcuggg

SEQ ID NO: 2241919 - RNA, 21 nt, Human
ucuuucuaacuccagugaagu

SEQ ID NO: 2241920 - RNA, 17 nt, Human
ucuuucgcacagcaguu

SEQ ID NO: 2241921 - RNA, 18 nt, Human
ucuuucuaaugugugaau

SEQ ID NO: 2241922 - RNA, 15 nt, Human
ucuugguagagauuc

SEQ ID NO: 2241923 - RNA, 15 nt, Human
ucuuuaacucauaaa

SEQ ID NO: 2241924 - RNA, 15 nt, Human
ucuuuaaucuucagu

SEQ ID NO: 2241925 - RNA, 14 nt, Human
ucuuuaaucuucag

SEQ ID NO: 2241926 - RNA, 23 nt, Human
ucuuuaaucauuuugccucuuuu

SEQ ID NO: 2241927 - RNA, 15 nt, Human
ucuuuauaugaagaa

SEQ ID NO: 2241928 - RNA, 11 nt, Human
ucuuuauauga

SEQ ID NO: 2241929 - RNA, 20 nt, Human
ucuuuaacuuaauugcuaug

SEQ ID NO: 2241930 - RNA, 14 nt, Human
ucuuuaagaaagua

SEQ ID NO: 2241931 - RNA, 15 nt, Human
ucuugguccugcugc

SEQ ID NO: 2241932 - RNA, 17 nt, Human
ucuugguccugcugcag

SEQ ID NO: 2241933 - RNA, 19 nt, Human
ucuugguccugcugcaguu

SEQ ID NO: 2241934 - RNA, 22 nt, Human
ucuugguaaauuuccccaacag

SEQ ID NO: 2241935 - RNA, 14 nt, Human
ucuugguagagauu

SEQ ID NO: 2241936 - RNA, 14 nt, Human
ucuugguauucuua

SEQ ID NO: 2241937 - RNA, 11 nt, Human
agagcugaggc

SEQ ID NO: 2241938 - RNA, 23 nt, Human
agagcugacacaaaccugccugg

SEQ ID NO: 2241939 - RNA, 23 nt, Human
agagcugacacaggaugaaggca

SEQ ID NO: 2241940 - RNA, 13 nt, Human
agagcugauccag

SEQ ID NO: 2241941 - RNA, 14 nt, Human
agagcugauccaga

SEQ ID NO: 2241942 - RNA, 17 nt, Human
agagcugauccagagca

SEQ ID NO: 2241943 - RNA, 18 nt, Human
agagcugauccagagcac

SEQ ID NO: 2241944 - RNA, 15 nt, Human
agagcucuccagcuc

SEQ ID NO: 2241945 - RNA, 18 nt, Human
agagcugacacaaaccug

SEQ ID NO: 2241946 - RNA, 20 nt, Human
agagcugacacaaaccugcc

SEQ ID NO: 2241947 - RNA, 22 nt, Human
agagcugacacaaaccugccug

SEQ ID NO: 2241948 - RNA, 14 nt, Human
agagcugccaccug

SEQ ID NO: 2241949 - RNA, 19 nt, Human
agagcugauccagagcaca

SEQ ID NO: 2241950 - RNA, 21 nt, Human
agagcugauccagagcacaga

SEQ ID NO: 2241951 - RNA, 16 nt, Human
agagcucuccagcucc

SEQ ID NO: 2241952 - RNA, 14 nt, Human
agagcucuccagcu

SEQ ID NO: 2241953 - RNA, 20 nt, Human
agagcucccggcguggugga

SEQ ID NO: 2241954 - RNA, 23 nt, Human
agagcuauuuaauggccggcugg

SEQ ID NO: 2241955 - RNA, 14 nt, Human
agagcuagcgcugc

SEQ ID NO: 2241956 - RNA, 13 nt, Human
agagcuagcgcug

SEQ ID NO: 2241957 - RNA, 18 nt, Human
agagcuagaaccuggagg

SEQ ID NO: 2241958 - RNA, 22 nt, Human
agagcuagaaccuggagggcua

SEQ ID NO: 2241959 - RNA, 21 nt, Human
agagcuagcgcugccgcaccc

SEQ ID NO: 2241960 - RNA, 16 nt, Human
agagcuagcgcugccg

SEQ ID NO: 2241961 - RNA, 20 nt, Human
agagcuagcagcagggaggg

SEQ ID NO: 2241962 - RNA, 18 nt, Human
agagcuagaacauggaga

SEQ ID NO: 2241963 - RNA, 19 nt, Human
agagcuagaacauggagag

SEQ ID NO: 2241964 - RNA, 22 nt, Human
agagcuagaacauggagagcua

SEQ ID NO: 2241965 - RNA, 23 nt, Human
agagcuagaacccggcaggcuag

SEQ ID NO: 2241966 - RNA, 16 nt, Human
agagcuagaaccugga

SEQ ID NO: 2241967 - RNA, 18 nt, Human
agagcuagaaccuggaga

SEQ ID NO: 2241968 - RNA, 22 nt, Human
agagcuagaaccuggagaacua

SEQ ID NO: 2241969 - RNA, 19 nt, Human
agagcuagaaccuggagag

SEQ ID NO: 2241970 - RNA, 23 nt, Human
agagccaggggggugaggagcug

SEQ ID NO: 2241971 - RNA, 20 nt, Human
agagccaggcacacacugug

SEQ ID NO: 2241972 - RNA, 16 nt, Human
agagcuacuugggcca

SEQ ID NO: 2241973 - RNA, 21 nt, Human
agagcuacuugggccauagcu

SEQ ID NO: 2241974 - RNA, 17 nt, Human
agagcuagaacauggag

SEQ ID NO: 2241975 - RNA, 13 nt, Human
agagccuuccagg

SEQ ID NO: 2241976 - RNA, 15 nt, Human
agagccuuccagggg

SEQ ID NO: 2241977 - RNA, 17 nt, Human
agagccuuccaggggug

SEQ ID NO: 2241978 - RNA, 22 nt, Human
agagccuuccaggggugggaca

SEQ ID NO: 2241979 - RNA, 21 nt, Human
agagccagcccucccuguccu

SEQ ID NO: 2241980 - RNA, 20 nt, Human
agagccagcccucccugucc

SEQ ID NO: 2241981 - RNA, 17 nt, Human
agagccagcccucccug

SEQ ID NO: 2241982 - RNA, 16 nt, Human
agagccagcccucccu

SEQ ID NO: 2241983 - RNA, 14 nt, Human
agagccagcccucc

SEQ ID NO: 2241984 - RNA, 13 nt, Human
agagccagcccuc

SEQ ID NO: 2241985 - RNA, 12 nt, Human
agagccagcccu

SEQ ID NO: 2241986 - RNA, 13 nt, Human
agagccagcaacu

SEQ ID NO: 2241987 - RNA, 23 nt, Human
agagcauccugcuucuaccaugu

SEQ ID NO: 2241988 - RNA, 17 nt, Human
agagcauuacgugagcc

SEQ ID NO: 2241989 - RNA, 20 nt, Human
agagccagagaagugacagg

SEQ ID NO: 2241990 - RNA, 21 nt, Human
agagccagagaagugacaggg

SEQ ID NO: 2241991 - RNA, 22 nt, Human
agagccagcccucccuguccuc

SEQ ID NO: 2241992 - RNA, 13 nt, Human
agagccagcuccc

SEQ ID NO: 2241993 - RNA, 22 nt, Human
agagccaggggggugaggagcu

SEQ ID NO: 2241994 - RNA, 19 nt, Human
agagccaggcacacacugu

SEQ ID NO: 2241995 - RNA, 13 nt, Human
agagccaggcaca

SEQ ID NO: 2241996 - RNA, 22 nt, Human
agagcaguuucuguccugcugg

SEQ ID NO: 2241997 - RNA, 23 nt, Human
agagcaguuucuguccugcuggu

SEQ ID NO: 2241998 - RNA, 14 nt, Human
agagcaagacucug

SEQ ID NO: 2241999 - RNA, 14 nt, Human
agagcaacucugag

SEQ ID NO: 2242000 - RNA, 14 nt, Human
agagcaccuuccuc

SEQ ID NO: 2242001 - RNA, 20 nt, Human
agagcaccuuccucacuucc

SEQ ID NO: 2242002 - RNA, 21 nt, Human
agagcaccuuccucacuucca

SEQ ID NO: 2242003 - RNA, 23 nt, Human
agagcaccuuagacagucccugc

SEQ ID NO: 2242004 - RNA, 22 nt, Human
agagcaccuuagacagucccug

SEQ ID NO: 2242005 - RNA, 21 nt, Human
agagcaccuuagacagucccu

SEQ ID NO: 2242006 - RNA, 17 nt, Human
agagcagccuguggcau

SEQ ID NO: 2242007 - RNA, 16 nt, Human
agagcagccuguggca

SEQ ID NO: 2242008 - RNA, 12 nt, Human
agagcagccugu

SEQ ID NO: 2242009 - RNA, 23 nt, Human
agagcagcagugaaaacaagugc

SEQ ID NO: 2242010 - RNA, 19 nt, Human
agagcagcagugaaaacaa

SEQ ID NO: 2242011 - RNA, 19 nt, Human
agagcagccuguggcaucu

SEQ ID NO: 2242012 - RNA, 23 nt, Human
agagcagcggggcgaagcccagg

SEQ ID NO: 2242013 - RNA, 13 nt, Human
agagcagcuucug

SEQ ID NO: 2242014 - RNA, 20 nt, Human
agagcagcuucugccacuuc

SEQ ID NO: 2242015 - RNA, 23 nt, Human
agagcagcuucugccacuuccca

SEQ ID NO: 2242016 - RNA, 18 nt, Human
agagcagcuuuaaacuca

SEQ ID NO: 2242017 - RNA, 23 nt, Human
agagcaggaagcauucagagagc

SEQ ID NO: 2242018 - RNA, 20 nt, Human
agagcagcuuuaaacucagg

SEQ ID NO: 2242019 - RNA, 21 nt, Human
agagcagcuuuaaacucaggg

SEQ ID NO: 2242020 - RNA, 18 nt, Human
agagcaggaagcauucag

SEQ ID NO: 2242021 - RNA, 20 nt, Human
agagcaggaagcauucagag

SEQ ID NO: 2242022 - RNA, 20 nt, Human
agagacucagggccccagca

SEQ ID NO: 2242023 - RNA, 19 nt, Human
agagacucagggccccagc

SEQ ID NO: 2242024 - RNA, 16 nt, Human
agagacuccagcuggg

SEQ ID NO: 2242025 - RNA, 15 nt, Human
agagacuccugcagg

SEQ ID NO: 2242026 - RNA, 17 nt, Human
agagacuccugcaggca

SEQ ID NO: 2242027 - RNA, 18 nt, Human
agagacuccugcaggcag

SEQ ID NO: 2242028 - RNA, 19 nt, Human
agagacuccugcaggcagc

SEQ ID NO: 2242029 - RNA, 20 nt, Human
agagacuccugcaggcagcc

SEQ ID NO: 2242030 - RNA, 21 nt, Human
agagacuccugcaggcagcca

SEQ ID NO: 2242031 - RNA, 22 nt, Human
agagacuccugcaggcagccag

SEQ ID NO: 2242032 - RNA, 23 nt, Human
ugaaacuuauuuuuuucugauug

SEQ ID NO: 2242033 - RNA, 21 nt, Human
ugaaacuuauuuuuuucugau

SEQ ID NO: 2242034 - RNA, 22 nt, Human
ugaaacuuauuuuuuucugauu

SEQ ID NO: 2242035 - RNA, 20 nt, Human
ugaaagaacauggacuugua

SEQ ID NO: 2242036 - RNA, 17 nt, Human
ugaaagaccuucuccaa

SEQ ID NO: 2242037 - RNA, 12 nt, Human
ugaaagaccuuc

SEQ ID NO: 2242038 - RNA, 19 nt, Human
ugaaagaccuucuccaaau

SEQ ID NO: 2242039 - RNA, 16 nt, Human
agagaccucaucagga

SEQ ID NO: 2242040 - RNA, 19 nt, Human
agagaccucaucaggauga

SEQ ID NO: 2242041 - RNA, 15 nt, Human
agagaccuccugccu

SEQ ID NO: 2242042 - RNA, 14 nt, Human
agagacguguacau

SEQ ID NO: 2242043 - RNA, 15 nt, Human
ugaaagacuguacaa

SEQ ID NO: 2242044 - RNA, 13 nt, Human
ugaaagacuguac

SEQ ID NO: 2242045 - RNA, 20 nt, Human
agagcaaaauugauguguuu

SEQ ID NO: 2242046 - RNA, 19 nt, Human
agagcaagacgcugugcug

SEQ ID NO: 2242047 - RNA, 23 nt, Human
agagcaagacgcugugcugcccu

SEQ ID NO: 2242048 - RNA, 19 nt, Human
agagaucaaauggaaagga

SEQ ID NO: 2242049 - RNA, 15 nt, Human
agagauggaggagga

SEQ ID NO: 2242050 - RNA, 21 nt, Human
agagaucauccuuuccagcau

SEQ ID NO: 2242051 - RNA, 18 nt, Human
agagauggaggaggaggc

SEQ ID NO: 2242052 - RNA, 20 nt, Human
agagauggccugagaagaga

SEQ ID NO: 2242053 - RNA, 22 nt, Human
agagaugggacugggagggccc

SEQ ID NO: 2242054 - RNA, 16 nt, Human
agagaugggacuggga

SEQ ID NO: 2242055 - RNA, 19 nt, Human
agagaugggaaugaggugg

SEQ ID NO: 2242056 - RNA, 23 nt, Human
agagaugggacugggagggccca

SEQ ID NO: 2242057 - RNA, 15 nt, Human
agagaugggagcucc

SEQ ID NO: 2242058 - RNA, 17 nt, Human
agagaugggagcuccuc

SEQ ID NO: 2242059 - RNA, 19 nt, Human
agagaugggagcuccucuc

SEQ ID NO: 2242060 - RNA, 20 nt, Human
agagaugggagcuccucucc

SEQ ID NO: 2242061 - RNA, 21 nt, Human
agagaugggagcuccucuccu

SEQ ID NO: 2242062 - RNA, 24 nt, Human
agagaugggagcuccucuccugga

SEQ ID NO: 2242063 - RNA, 17 nt, Human
agagaugugcacccaug

SEQ ID NO: 2242064 - RNA, 14 nt, Human
agagaugugcaccc

SEQ ID NO: 2242065 - RNA, 15 nt, Human
agagaugugcaccca

SEQ ID NO: 2242066 - RNA, 21 nt, Human
agagagaaagaaguaggcaug

SEQ ID NO: 2242067 - RNA, 14 nt, Human
agagagaaagccag

SEQ ID NO: 2242068 - RNA, 22 nt, Human
agagagaaaauaaaaaguuaaa

SEQ ID NO: 2242069 - RNA, 20 nt, Human
agagagaaaauaaaaaguua

SEQ ID NO: 2242070 - RNA, 18 nt, Human
agagagaaaauaaaaagu

SEQ ID NO: 2242071 - RNA, 17 nt, Human
agagagaaaauaaaaag

SEQ ID NO: 2242072 - RNA, 16 nt, Human
agagagaaaauaaaaa

SEQ ID NO: 2242073 - RNA, 15 nt, Human
agagagaaaauaaaa

SEQ ID NO: 2242074 - RNA, 23 nt, Human
agagacuccugcaggcagccagg

SEQ ID NO: 2242075 - RNA, 14 nt, Human
agagagaaaauaaa

SEQ ID NO: 2242076 - RNA, 13 nt, Human
agagagaaaauaa

SEQ ID NO: 2242077 - RNA, 18 nt, Human
agagagaagacccuucuc

SEQ ID NO: 2242078 - RNA, 13 nt, Human
agagauauuuuaa

SEQ ID NO: 2242079 - RNA, 17 nt, Human
agagauauuuuaaaaug

SEQ ID NO: 2242080 - RNA, 20 nt, Human
agagauauuuuaaaaugaga

SEQ ID NO: 2242081 - RNA, 20 nt, Human
agagagaacaacuacuguga

SEQ ID NO: 2242082 - RNA, 22 nt, Human
agagagaaagccaggcagguag

SEQ ID NO: 2242083 - RNA, 15 nt, Human
agagagaaagccagg

SEQ ID NO: 2242084 - RNA, 16 nt, Human
agagagaaagccaggc

SEQ ID NO: 2242085 - RNA, 22 nt, Human
agagaucaaccccuucgcuccu

SEQ ID NO: 2242086 - RNA, 18 nt, Human
agagauauuuuaaaauga

SEQ ID NO: 2242087 - RNA, 15 nt, Human
agagaucaaauggaa

SEQ ID NO: 2242088 - RNA, 13 nt, Human
ugaaaaagcaugu

SEQ ID NO: 2242089 - RNA, 21 nt, Human
ugaaaaagcagcuaccaggug

SEQ ID NO: 2242090 - RNA, 14 nt, Human
ugaaaaagcaugua

SEQ ID NO: 2242091 - RNA, 15 nt, Human
ugaaaaagcauguac

SEQ ID NO: 2242092 - RNA, 16 nt, Human
ugaaaaagcauguaca

SEQ ID NO: 2242093 - RNA, 17 nt, Human
ugaaaaagcauguacag

SEQ ID NO: 2242094 - RNA, 22 nt, Human
ugaaaaagaccuuuggagcaaa

SEQ ID NO: 2242095 - RNA, 16 nt, Human
ugaaaaaggaggaaga

SEQ ID NO: 2242096 - RNA, 18 nt, Human
ugaaaaagcauguacagu

SEQ ID NO: 2242097 - RNA, 20 nt, Human
ugaaaaagcauguacagugu

SEQ ID NO: 2242098 - RNA, 21 nt, Human
ugaaaaagcauguacaguguu

SEQ ID NO: 2242099 - RNA, 23 nt, Human
ugaaaaagcauguacaguguucu

SEQ ID NO: 2242100 - RNA, 12 nt, Human
ugaaaaacuucc

SEQ ID NO: 2242101 - RNA, 18 nt, Human
ugaaaaaauguauaugca

SEQ ID NO: 2242102 - RNA, 23 nt, Human
ugaaaaaauauauaucaaauaua

SEQ ID NO: 2242103 - RNA, 18 nt, Human
ugaaaaaaggacaauuuc

SEQ ID NO: 2242104 - RNA, 22 nt, Human
ugaaaaaauagagccugaggga

SEQ ID NO: 2242105 - RNA, 21 nt, Human
ugaaaaaaggacaauuucaaa

SEQ ID NO: 2242106 - RNA, 16 nt, Human
ugaaaaaaaguuuaca

SEQ ID NO: 2242107 - RNA, 17 nt, Human
ugaaaaaaaguuuacaa

SEQ ID NO: 2242108 - RNA, 16 nt, Human
ugaaaaaaaaguuuca

SEQ ID NO: 2242109 - RNA, 14 nt, Human
ugaaaaaaaaguuu

SEQ ID NO: 2242110 - RNA, 18 nt, Human
ucuuuuacucaugaucuu

SEQ ID NO: 2242111 - RNA, 14 nt, Human
ucuuuuacauucug

SEQ ID NO: 2242112 - RNA, 12 nt, Human
ucuuuuacaacu

SEQ ID NO: 2242113 - RNA, 21 nt, Human
ucuuuuaaaagacaagacuuc

SEQ ID NO: 2242114 - RNA, 14 nt, Human
ucuuuuaaaagaca

SEQ ID NO: 2242115 - RNA, 16 nt, Human
ucuuuuaaaagacaag

SEQ ID NO: 2242116 - RNA, 15 nt, Human
ucuuuguuacaggca

SEQ ID NO: 2242117 - RNA, 21 nt, Human
ucuuuguuaucaaacuucagc

SEQ ID NO: 2242118 - RNA, 16 nt, Human
ucuuuguucauagccc

SEQ ID NO: 2242119 - RNA, 23 nt, Human
ucuuuguucauagcccaguagac

SEQ ID NO: 2242120 - RNA, 12 nt, Human
ucuuuguucuca

SEQ ID NO: 2242121 - RNA, 16 nt, Human
ucuuuguucucagcuc

SEQ ID NO: 2242122 - RNA, 17 nt, Human
ucuuuguucucagcucc

SEQ ID NO: 2242123 - RNA, 18 nt, Human
ucuuuguucucagcuccc

SEQ ID NO: 2242124 - RNA, 19 nt, Human
ucuuuguucucagcucccc

SEQ ID NO: 2242125 - RNA, 20 nt, Human
ucuuuguucucagcuccccc

SEQ ID NO: 2242126 - RNA, 18 nt, Human
ucuuuguuggaaaagaau

SEQ ID NO: 2242127 - RNA, 22 nt, Human
ucuuuguucucagcucccccug

SEQ ID NO: 2242128 - RNA, 18 nt, Human
ucuuuuaaaaauucaaau

SEQ ID NO: 2242129 - RNA, 19 nt, Human
ucuuuuaaaaauucaaaug

SEQ ID NO: 2242130 - RNA, 13 nt, Human
ucuuuuaaaagac

SEQ ID NO: 2242131 - RNA, 18 nt, Human
ucuuuguguagcuuugcu

SEQ ID NO: 2242132 - RNA, 15 nt, Human
ucuuuguguagcuuu

SEQ ID NO: 2242133 - RNA, 13 nt, Human
ucuuuguguagcu

SEQ ID NO: 2242134 - RNA, 13 nt, Human
ucuuuguaagagu

SEQ ID NO: 2242135 - RNA, 14 nt, Human
ucuuuguaagagug

SEQ ID NO: 2242136 - RNA, 18 nt, Human
ucuuuguaagaguguaga

SEQ ID NO: 2242137 - RNA, 17 nt, Human
ucuuugguggcuuugca

SEQ ID NO: 2242138 - RNA, 12 nt, Human
agagacauuccu

SEQ ID NO: 2242139 - RNA, 14 nt, Human
agagacauuccucc

SEQ ID NO: 2242140 - RNA, 22 nt, Human
ucuuuggucuacacugugcuga

SEQ ID NO: 2242141 - RNA, 18 nt, Human
agagacaggcccaagaga

SEQ ID NO: 2242142 - RNA, 15 nt, Human
agagacaggcccaag

SEQ ID NO: 2242143 - RNA, 20 nt, Human
agagacaggcccaagagaug

SEQ ID NO: 2242144 - RNA, 22 nt, Human
agagacaguugggugagaacaa

SEQ ID NO: 2242145 - RNA, 20 nt, Human
agagacaguugggugagaac

SEQ ID NO: 2242146 - RNA, 12 nt, Human
agagacagucac

SEQ ID NO: 2242147 - RNA, 23 nt, Human
agagacaguugggugagaacaac

SEQ ID NO: 2242148 - RNA, 23 nt, Human
agagacauacuugaagggccaga

SEQ ID NO: 2242149 - RNA, 22 nt, Human
agagacauacuugaagggccag

SEQ ID NO: 2242150 - RNA, 17 nt, Human
agagacauacuugaagg

SEQ ID NO: 2242151 - RNA, 23 nt, Human
agagacaggaaaauccucuggcu

SEQ ID NO: 2242152 - RNA, 14 nt, Human
agagacaggagggc

SEQ ID NO: 2242153 - RNA, 14 nt, Human
ucuuucuuagaaau

SEQ ID NO: 2242154 - RNA, 20 nt, Human
ucuuucuuacaaggaaggug

SEQ ID NO: 2242155 - RNA, 15 nt, Human
agagacaggagggca

SEQ ID NO: 2242156 - RNA, 14 nt, Human
ucuuucuguauuga

SEQ ID NO: 2242157 - RNA, 13 nt, Human
ucuuucugucccu

SEQ ID NO: 2242158 - RNA, 14 nt, Human
ucuuucugucccuu

SEQ ID NO: 2242159 - RNA, 13 nt, Human
ucuuucuuagaaa

SEQ ID NO: 2242160 - RNA, 16 nt, Human
ucuuucugaugucaaa

SEQ ID NO: 2242161 - RNA, 10 nt, Human
ucuuucugua

SEQ ID NO: 2242162 - RNA, 21 nt, Human
ucuuucuggcuaugcauuuga

SEQ ID NO: 2242163 - RNA, 20 nt, Human
ucuuucuggcuaugcauuug

SEQ ID NO: 2242164 - RNA, 18 nt, Human
ucuuucugagcacacuuu

SEQ ID NO: 2242165 - RNA, 19 nt, Human
ucuuucugagcacacuuua

SEQ ID NO: 2242166 - RNA, 21 nt, Human
ucuuucugagcacacuuuagu

SEQ ID NO: 2242167 - RNA, 23 nt, Human
ucuuucugauaacuagauggugc

SEQ ID NO: 2242168 - RNA, 20 nt, Human
ucuuucugauaacuagaugg

SEQ ID NO: 2242169 - RNA, 14 nt, Human
ucuuucugauaacu

SEQ ID NO: 2242170 - RNA, 11 nt, Human
ucuuucucugc

SEQ ID NO: 2242171 - RNA, 12 nt, Human
ucuuucucugcc

SEQ ID NO: 2242172 - RNA, 13 nt, Human
ucuuucucugcca

SEQ ID NO: 2242173 - RNA, 15 nt, Human
ucuuucucugccagu

SEQ ID NO: 2242174 - RNA, 16 nt, Human
ucuuucucugccagug

SEQ ID NO: 2242175 - RNA, 17 nt, Human
ucuuucucugccaguga

SEQ ID NO: 2242176 - RNA, 16 nt, Human
ugaaaaggugaccuug

SEQ ID NO: 2242177 - RNA, 23 nt, Human
ugaaaaggugaccuugcaacuuc

SEQ ID NO: 2242178 - RNA, 16 nt, Human
ugaaaauauaaccagc

SEQ ID NO: 2242179 - RNA, 14 nt, Human
ugaaaauauaacca

SEQ ID NO: 2242180 - RNA, 12 nt, Human
ugaaaagucaaa

SEQ ID NO: 2242181 - RNA, 14 nt, Human
ugaaaagucaaacu

SEQ ID NO: 2242182 - RNA, 20 nt, Human
ugaaaaguuacuaccuguca

SEQ ID NO: 2242183 - RNA, 16 nt, Human
ugaaaaucgugacaac

SEQ ID NO: 2242184 - RNA, 14 nt, Human
ugaaaauauuuaaa

SEQ ID NO: 2242185 - RNA, 13 nt, Human
ugaaaauauuuaa

SEQ ID NO: 2242186 - RNA, 12 nt, Human
ugaaaauauuua

SEQ ID NO: 2242187 - RNA, 11 nt, Human
ugaaaauauuu

SEQ ID NO: 2242188 - RNA, 20 nt, Human
ugaaaauaugauguuucaca

SEQ ID NO: 2242189 - RNA, 22 nt, Human
ugaaaaaguauccugcuucuga

SEQ ID NO: 2242190 - RNA, 22 nt, Human
ugaaaaaguucugcagauaaac

SEQ ID NO: 2242191 - RNA, 22 nt, Human
ugaaaaaggaggaagagaaaaa

SEQ ID NO: 2242192 - RNA, 20 nt, Human
ugaaaaaggaggaagagaaa

SEQ ID NO: 2242193 - RNA, 19 nt, Human
ugaaaaauuuaagcauugu

SEQ ID NO: 2242194 - RNA, 18 nt, Human
ugaaaaauuuaagcauug

SEQ ID NO: 2242195 - RNA, 13 nt, Human
ugaaaaauucuca

SEQ ID NO: 2242196 - RNA, 19 nt, Human
ugaaaaauuccuuuguguu

SEQ ID NO: 2242197 - RNA, 20 nt, Human
ugaaaaauuccuauugugau

SEQ ID NO: 2242198 - RNA, 22 nt, Human
ugaaaaauuccuauugugauuu

SEQ ID NO: 2242199 - RNA, 12 nt, Human
ugaaaaauuccu

SEQ ID NO: 2242200 - RNA, 20 nt, Human
ugaaaaaugugcaaaacagc

SEQ ID NO: 2242201 - RNA, 13 nt, Human
ugaaaaauuccua

SEQ ID NO: 2242202 - RNA, 18 nt, Human
ugaaaaaucggcuuacca

SEQ ID NO: 2242203 - RNA, 16 nt, Human
ugaaaaaugugcaaaa

SEQ ID NO: 2242204 - RNA, 16 nt, Human
ugaaacuuacacacaa

SEQ ID NO: 2242205 - RNA, 12 nt, Human
ugaaacuuauuu

SEQ ID NO: 2242206 - RNA, 12 nt, Human
ugaaacuuggau

SEQ ID NO: 2242207 - RNA, 22 nt, Human
ugaaacugagaugugaacacau

SEQ ID NO: 2242208 - RNA, 19 nt, Human
ugaaacucguuaauuugua

SEQ ID NO: 2242209 - RNA, 21 nt, Human
ugaaacuccaccuugcgggga

SEQ ID NO: 2242210 - RNA, 13 nt, Human
ugaaacuccaccu

SEQ ID NO: 2242211 - RNA, 18 nt, Human
ugaaaaugucagaaacca

SEQ ID NO: 2242212 - RNA, 15 nt, Human
ugaaaaugucagaaa

SEQ ID NO: 2242213 - RNA, 14 nt, Human
ugaaaaugucagaa

SEQ ID NO: 2242214 - RNA, 14 nt, Human
ugaaaaugucaaag

SEQ ID NO: 2242215 - RNA, 21 nt, Human
ugaaaaugucagaaaccaguu

SEQ ID NO: 2242216 - RNA, 13 nt, Human
ugaaaaugucuug

SEQ ID NO: 2242217 - RNA, 16 nt, Human
ugaaacgcaaccacca

SEQ ID NO: 2242218 - RNA, 15 nt, Human
ugaaaaugucuugug

SEQ ID NO: 2242219 - RNA, 14 nt, Human
ugaaaaugucuugu

SEQ ID NO: 2242220 - RNA, 14 nt, Human
ugaaaaucuaauau

SEQ ID NO: 2242221 - RNA, 15 nt, Human
ugaaaaucuaauauu

SEQ ID NO: 2242222 - RNA, 17 nt, Human
ugaaaaucuaauauuaa

SEQ ID NO: 2242223 - RNA, 21 nt, Human
ugaaaaucuaauauuaaaaau

SEQ ID NO: 2242224 - RNA, 12 nt, Human
ugaaaauguacu

SEQ ID NO: 2242225 - RNA, 13 nt, Human
ugaaaauguacug

SEQ ID NO: 2242226 - RNA, 16 nt, Human
ugaaaauguacugaga

SEQ ID NO: 2242227 - RNA, 17 nt, Human
ugaaaauguauguguaa

SEQ ID NO: 2242228 - RNA, 19 nt, Human
ugaaaaucgugacaacacu

SEQ ID NO: 2242229 - RNA, 20 nt, Human
ugaaaaucuuauaauuuaaa

SEQ ID NO: 2242230 - RNA, 21 nt, Human
agaagcugaagugcauccaaa

SEQ ID NO: 2242231 - RNA, 23 nt, Human
agaagcuccucuccccagcccag

SEQ ID NO: 2242232 - RNA, 22 nt, Human
agaagcuccucuccccagccca

SEQ ID NO: 2242233 - RNA, 13 nt, Human
agaaggagagaaa

SEQ ID NO: 2242234 - RNA, 17 nt, Human
agaaggagacagagcug

SEQ ID NO: 2242235 - RNA, 14 nt, Human
agaaggagacagag

SEQ ID NO: 2242236 - RNA, 15 nt, Human
agaaggagaaggaag

SEQ ID NO: 2242237 - RNA, 15 nt, Human
agaaggaauuugagu

SEQ ID NO: 2242238 - RNA, 22 nt, Human
agaaggaauucuaggcauccca

SEQ ID NO: 2242239 - RNA, 23 nt, Human
agaagcucccugaaguaagcaaa

SEQ ID NO: 2242240 - RNA, 18 nt, Human
agaagcucccaggaacaa

SEQ ID NO: 2242241 - RNA, 20 nt, Human
agaagcuccucuccccagcc

SEQ ID NO: 2242242 - RNA, 18 nt, Human
agaagcuccucuccccag

SEQ ID NO: 2242243 - RNA, 17 nt, Human
agaagcuccucucccca

SEQ ID NO: 2242244 - RNA, 14 nt, Human
agaagcuccucucc

SEQ ID NO: 2242245 - RNA, 16 nt, Human
agaaggauguacauuu

SEQ ID NO: 2242246 - RNA, 21 nt, Human
agaaggaugaaugagguccca

SEQ ID NO: 2242247 - RNA, 14 nt, Human
agaaggaugaauga

SEQ ID NO: 2242248 - RNA, 20 nt, Human
agaaggagucagaaacuguu

SEQ ID NO: 2242249 - RNA, 20 nt, Human
agaaggagacagagcugguu

SEQ ID NO: 2242250 - RNA, 14 nt, Human
agaaggagagaaag

SEQ ID NO: 2242251 - RNA, 18 nt, Human
agaaggagagaaaguggg

SEQ ID NO: 2242252 - RNA, 19 nt, Human
agaaggagagaaagugggu

SEQ ID NO: 2242253 - RNA, 17 nt, Human
agaaggauguacauuuc

SEQ ID NO: 2242254 - RNA, 11 nt, Human
agaaggcaaaa

SEQ ID NO: 2242255 - RNA, 18 nt, Human
agaagugacagggaagcu

SEQ ID NO: 2242256 - RNA, 19 nt, Human
agaagugacagggaagcua

SEQ ID NO: 2242257 - RNA, 22 nt, Human
agaagugacagggaagcuacag

SEQ ID NO: 2242258 - RNA, 23 nt, Human
agaagugacagggaagcuacagg

SEQ ID NO: 2242259 - RNA, 22 nt, Human
agaaguuugagaucagccuggg

SEQ ID NO: 2242260 - RNA, 16 nt, Human
agaaguuucuggcccu

SEQ ID NO: 2242261 - RNA, 23 nt, Human
agaaguuucuggcccuggcugac

SEQ ID NO: 2242262 - RNA, 17 nt, Human
agaaguuuaaggaauau

SEQ ID NO: 2242263 - RNA, 16 nt, Human
agaaguuuaaggaaua

SEQ ID NO: 2242264 - RNA, 15 nt, Human
agaaguuuaaggaau

SEQ ID NO: 2242265 - RNA, 19 nt, Human
agaaguugaaugggcacag

SEQ ID NO: 2242266 - RNA, 18 nt, Human
agaaguugauauagaaca

SEQ ID NO: 2242267 - RNA, 19 nt, Human
agaaguugauauagaacag

SEQ ID NO: 2242268 - RNA, 14 nt, Human
agaaguuguuuguc

SEQ ID NO: 2242269 - RNA, 15 nt, Human
agaaguggaccagga

SEQ ID NO: 2242270 - RNA, 19 nt, Human
agaagugccccugcugccu

SEQ ID NO: 2242271 - RNA, 22 nt, Human
agaagugccccugcugccuccc

SEQ ID NO: 2242272 - RNA, 16 nt, Human
agaagugccccugcug

SEQ ID NO: 2242273 - RNA, 14 nt, Human
agaagugccccugc

SEQ ID NO: 2242274 - RNA, 13 nt, Human
agaagugccccug

SEQ ID NO: 2242275 - RNA, 23 nt, Human
agaagugagcuuugcugcuacag

SEQ ID NO: 2242276 - RNA, 21 nt, Human
agaagugagaauaggcagccc

SEQ ID NO: 2242277 - RNA, 18 nt, Human
agaagugagaauaggcag

SEQ ID NO: 2242278 - RNA, 19 nt, Human
agaagugagcuuugcugcu

SEQ ID NO: 2242279 - RNA, 19 nt, Human
agaaguggaccaggacagg

SEQ ID NO: 2242280 - RNA, 18 nt, Human
agaaguggaccaggacag

SEQ ID NO: 2242281 - RNA, 17 nt, Human
agaaguggaccaggaca

SEQ ID NO: 2242282 - RNA, 13 nt, Human
agaaguugauaug

SEQ ID NO: 2242283 - RNA, 16 nt, Human
agaauauaaaaaacuu

SEQ ID NO: 2242284 - RNA, 13 nt, Human
agaauauaauacu

SEQ ID NO: 2242285 - RNA, 23 nt, Human
agaauauaauuaucggaagcagu

SEQ ID NO: 2242286 - RNA, 15 nt, Human
agaauauaauuaucg

SEQ ID NO: 2242287 - RNA, 14 nt, Human
agaauauaauuauc

SEQ ID NO: 2242288 - RNA, 14 nt, Human
agaaucaaaacucu

SEQ ID NO: 2242289 - RNA, 17 nt, Human
agaauauaauuaucgga

SEQ ID NO: 2242290 - RNA, 20 nt, Human
agaauauuuuaaguauugca

SEQ ID NO: 2242291 - RNA, 13 nt, Human
agaauauauacau

SEQ ID NO: 2242292 - RNA, 13 nt, Human
agaaucaaagcaa

SEQ ID NO: 2242293 - RNA, 19 nt, Human
agaaucaaagcaaugcauu

SEQ ID NO: 2242294 - RNA, 21 nt, Human
agaaucaaagcaaugcauuuu

SEQ ID NO: 2242295 - RNA, 21 nt, Human
agaaucaacauuucucaauaa

SEQ ID NO: 2242296 - RNA, 23 nt, Human
agaaucaacauuucucaauaauu

SEQ ID NO: 2242297 - RNA, 18 nt, Human
agaauacaguaagcugcu

SEQ ID NO: 2242298 - RNA, 19 nt, Human
agaauagccacauuuggaa

SEQ ID NO: 2242299 - RNA, 20 nt, Human
agaauagccacauuuggaau

SEQ ID NO: 2242300 - RNA, 21 nt, Human
agaauagccacauuuggaaua

SEQ ID NO: 2242301 - RNA, 21 nt, Human
agaauacagaaagauggaugu

SEQ ID NO: 2242302 - RNA, 22 nt, Human
agaauacaguaagcugcucuau

SEQ ID NO: 2242303 - RNA, 18 nt, Human
agaauacagaaagaugga

SEQ ID NO: 2242304 - RNA, 12 nt, Human
agaauacagaaa

SEQ ID NO: 2242305 - RNA, 16 nt, Human
agaauacaaacauauu

SEQ ID NO: 2242306 - RNA, 15 nt, Human
agaauacaaacauau

SEQ ID NO: 2242307 - RNA, 16 nt, Human
agaauaaucuuugggu

SEQ ID NO: 2242308 - RNA, 15 nt, Human
agaauaaugaaugga

SEQ ID NO: 2242309 - RNA, 15 nt, Human
agaaguuugucaagu

SEQ ID NO: 2242310 - RNA, 20 nt, Human
agaaguuugauauuaaagga

SEQ ID NO: 2242311 - RNA, 16 nt, Human
agaaguuuuguacaga

SEQ ID NO: 2242312 - RNA, 11 nt, Human
agaaguuuuug

SEQ ID NO: 2242313 - RNA, 12 nt, Human
agaaguuuuugu

SEQ ID NO: 2242314 - RNA, 14 nt, Human
agaaguuuuuguac

SEQ ID NO: 2242315 - RNA, 15 nt, Human
agaaguuuuuguacu

SEQ ID NO: 2242316 - RNA, 11 nt, Human
agaauaaagca

SEQ ID NO: 2242317 - RNA, 12 nt, Human
agaauaaagcaa

SEQ ID NO: 2242318 - RNA, 13 nt, Human
agaauaaagcaau

SEQ ID NO: 2242319 - RNA, 14 nt, Human
agaauaaagcaauu

SEQ ID NO: 2242320 - RNA, 15 nt, Human
agaauaaagcaauuu

SEQ ID NO: 2242321 - RNA, 16 nt, Human
agaauaaagcaauuuu

SEQ ID NO: 2242322 - RNA, 17 nt, Human
agaauaaagcaauuuuc

SEQ ID NO: 2242323 - RNA, 13 nt, Human
agaauaaacuggc

SEQ ID NO: 2242324 - RNA, 16 nt, Human
agaaguuuuuguacug

SEQ ID NO: 2242325 - RNA, 17 nt, Human
agaaguuuuuguacugu

SEQ ID NO: 2242326 - RNA, 19 nt, Human
agaaguuuuuguacuguaa

SEQ ID NO: 2242327 - RNA, 13 nt, Human
agaauaaucuuug

SEQ ID NO: 2242328 - RNA, 21 nt, Human
agaauaaucacgcuuuccuga

SEQ ID NO: 2242329 - RNA, 20 nt, Human
agaauaaucacgcuuuccug

SEQ ID NO: 2242330 - RNA, 17 nt, Human
agaauaaucacgcuuuc

SEQ ID NO: 2242331 - RNA, 17 nt, Human
agaauaaaguucugagu

SEQ ID NO: 2242332 - RNA, 21 nt, Human
agaauaaaguucugaguguuu

SEQ ID NO: 2242333 - RNA, 23 nt, Human
agaauaaagcaauuuuccuugaa

SEQ ID NO: 2242334 - RNA, 18 nt, Human
agaauaaagcaauuuucc

SEQ ID NO: 2242335 - RNA, 19 nt, Human
agaauaaagcaauuuuccu

SEQ ID NO: 2242336 - RNA, 20 nt, Human
agaauaaagcaauuuuccuu

SEQ ID NO: 2242337 - RNA, 22 nt, Human
agaauaaagcaauuuuccuuga

SEQ ID NO: 2242338 - RNA, 14 nt, Human
ucuggccucccaca

SEQ ID NO: 2242339 - RNA, 13 nt, Human
ucuggccucccac

SEQ ID NO: 2242340 - RNA, 18 nt, Human
ucuggccuagucccuucc

SEQ ID NO: 2242341 - RNA, 20 nt, Human
ucuggccuagucccuuccac

SEQ ID NO: 2242342 - RNA, 13 nt, Human
ucuggccucaggu

SEQ ID NO: 2242343 - RNA, 18 nt, Human
ucuggccucaggugggcc

SEQ ID NO: 2242344 - RNA, 20 nt, Human
ucuggcagggugggauggag

SEQ ID NO: 2242345 - RNA, 13 nt, Human
ucuggccuagucc

SEQ ID NO: 2242346 - RNA, 19 nt, Human
ucuggcagggugggaugga

SEQ ID NO: 2242347 - RNA, 18 nt, Human
ucuggcagcucagagagg

SEQ ID NO: 2242348 - RNA, 21 nt, Human
ucuggcagcucagagagggug

SEQ ID NO: 2242349 - RNA, 17 nt, Human
ucuggcagcucagagag

SEQ ID NO: 2242350 - RNA, 20 nt, Human
ucuggcagaguugaagacag

SEQ ID NO: 2242351 - RNA, 23 nt, Human
ucuggcagaguugaagacagagc

SEQ ID NO: 2242352 - RNA, 14 nt, Human
agaagccucuggcu

SEQ ID NO: 2242353 - RNA, 13 nt, Human
agaagccucuggc

SEQ ID NO: 2242354 - RNA, 12 nt, Human
agaagccucugg

SEQ ID NO: 2242355 - RNA, 15 nt, Human
agaagccuccccagc

SEQ ID NO: 2242356 - RNA, 23 nt, Human
agaagccucuggcuagaggccag

SEQ ID NO: 2242357 - RNA, 16 nt, Human
agaagccucuggcuag

SEQ ID NO: 2242358 - RNA, 23 nt, Human
agaagccucugggucaguggucc

SEQ ID NO: 2242359 - RNA, 22 nt, Human
agaagccucugggucagugguc

SEQ ID NO: 2242360 - RNA, 14 nt, Human
agaagccugaggcu

SEQ ID NO: 2242361 - RNA, 12 nt, Human
agaagccugagg

SEQ ID NO: 2242362 - RNA, 17 nt, Human
agaagccugaggcuggg

SEQ ID NO: 2242363 - RNA, 17 nt, Human
agaagccugaugcugac

SEQ ID NO: 2242364 - RNA, 14 nt, Human
agaagccgugggug

SEQ ID NO: 2242365 - RNA, 15 nt, Human
agaagcucccaggaa

SEQ ID NO: 2242366 - RNA, 16 nt, Human
agaagcucccaggaac

SEQ ID NO: 2242367 - RNA, 17 nt, Human
agaagcucccaggaaca

SEQ ID NO: 2242368 - RNA, 22 nt, Human
agaagccgggaacagacaacag

SEQ ID NO: 2242369 - RNA, 18 nt, Human
agaagccgggaacagaca

SEQ ID NO: 2242370 - RNA, 16 nt, Human
agaagccgggaacaga

SEQ ID NO: 2242371 - RNA, 14 nt, Human
agaagccgggaaca

SEQ ID NO: 2242372 - RNA, 10 nt, Human
ucuggccuuc

SEQ ID NO: 2242373 - RNA, 23 nt, Human
ucuggccucccacccgaugcugc

SEQ ID NO: 2242374 - RNA, 11 nt, Human
ucuggccucca

SEQ ID NO: 2242375 - RNA, 14 nt, Human
ucuggccucccacc

SEQ ID NO: 2242376 - RNA, 15 nt, Human
ucuggccucccaccc

SEQ ID NO: 2242377 - RNA, 16 nt, Human
ucuggccucccacccg

SEQ ID NO: 2242378 - RNA, 20 nt, Human
ucuggaagagaggaaugccu

SEQ ID NO: 2242379 - RNA, 13 nt, Human
ucuggaagagagg

SEQ ID NO: 2242380 - RNA, 23 nt, Human
ucuggaaccucagccuggccaga

SEQ ID NO: 2242381 - RNA, 21 nt, Human
ucuggaaccucagccuggcca

SEQ ID NO: 2242382 - RNA, 20 nt, Human
ucuggaaccucagccuggcc

SEQ ID NO: 2242383 - RNA, 19 nt, Human
ucuggaaccucagccuggc

SEQ ID NO: 2242384 - RNA, 18 nt, Human
ucuggaaccucagccugg

SEQ ID NO: 2242385 - RNA, 13 nt, Human
ucuggaaguccaa

SEQ ID NO: 2242386 - RNA, 18 nt, Human
ucuggaagugacuuuggc

SEQ ID NO: 2242387 - RNA, 22 nt, Human
ucuggaagugacuuuggcugca

SEQ ID NO: 2242388 - RNA, 19 nt, Human
ucuggaagugacuuuggcu

SEQ ID NO: 2242389 - RNA, 14 nt, Human
ucuggauuguggga

SEQ ID NO: 2242390 - RNA, 16 nt, Human
ucuggauucuuggccc

SEQ ID NO: 2242391 - RNA, 15 nt, Human
ucuggauucuuggcc

SEQ ID NO: 2242392 - RNA, 16 nt, Human
ucuggcaacaucuuua

SEQ ID NO: 2242393 - RNA, 15 nt, Human
ucuggcaacaucuuu

SEQ ID NO: 2242394 - RNA, 13 nt, Human
ucuggauucccag

SEQ ID NO: 2242395 - RNA, 14 nt, Human
ucuggauucccagg

SEQ ID NO: 2242396 - RNA, 17 nt, Human
ucuggauucccaggaug

SEQ ID NO: 2242397 - RNA, 21 nt, Human
ucuggauucccaggaugagca

SEQ ID NO: 2242398 - RNA, 22 nt, Human
ucuggauucccaggaugagcau

SEQ ID NO: 2242399 - RNA, 22 nt, Human
ucuggcacacaguaggugcuca

SEQ ID NO: 2242400 - RNA, 21 nt, Human
ucuggcaaagcuuuuagaaau

SEQ ID NO: 2242401 - RNA, 22 nt, Human
ucugcuuugggguuuaucagaa

SEQ ID NO: 2242402 - RNA, 21 nt, Human
ucugcuuugacugagcagacu

SEQ ID NO: 2242403 - RNA, 20 nt, Human
ucugcuuugcucuucaagaa

SEQ ID NO: 2242404 - RNA, 18 nt, Human
ucugcuuuuaccaugccc

SEQ ID NO: 2242405 - RNA, 17 nt, Human
ucuggaaccucagccug

SEQ ID NO: 2242406 - RNA, 21 nt, Human
ucugcuuuucugcccuggcug

SEQ ID NO: 2242407 - RNA, 22 nt, Human
ucugcuuuucugcccuggcugc

SEQ ID NO: 2242408 - RNA, 13 nt, Human
ucugcuuuuacca

SEQ ID NO: 2242409 - RNA, 15 nt, Human
ucugcuuuucugccc

SEQ ID NO: 2242410 - RNA, 16 nt, Human
ucugcuuuucugcccu

SEQ ID NO: 2242411 - RNA, 17 nt, Human
ucugcuuuucugcccug

SEQ ID NO: 2242412 - RNA, 18 nt, Human
ucugcuuuucugcccugg

SEQ ID NO: 2242413 - RNA, 19 nt, Human
ucugcuuuucugcccuggc

SEQ ID NO: 2242414 - RNA, 20 nt, Human
ucugcuuuucugcccuggcu

SEQ ID NO: 2242415 - RNA, 16 nt, Human
ucugccuguggaacug

SEQ ID NO: 2242416 - RNA, 15 nt, Human
ucugccuguuauaac

SEQ ID NO: 2242417 - RNA, 19 nt, Human
ucugccuguuauaacucug

SEQ ID NO: 2242418 - RNA, 21 nt, Human
ucugccuguuauaacucugca

SEQ ID NO: 2242419 - RNA, 22 nt, Human
ucugccuguuauaacucugcac

SEQ ID NO: 2242420 - RNA, 16 nt, Human
ucugccuuaaaaccaa

SEQ ID NO: 2242421 - RNA, 17 nt, Human
ucugccuuaaaaccaaa

SEQ ID NO: 2242422 - RNA, 15 nt, Human
ucugccuuagucuca

SEQ ID NO: 2242423 - RNA, 20 nt, Human
ucugccuuaaaaccaaagag

SEQ ID NO: 2242424 - RNA, 19 nt, Human
ucugccuuagucucaguuu

SEQ ID NO: 2242425 - RNA, 13 nt, Human
ucugccuuccuug

SEQ ID NO: 2242426 - RNA, 18 nt, Human
ucugcuuugacugagcag

SEQ ID NO: 2242427 - RNA, 21 nt, Human
ucugccugucccucucaggca

SEQ ID NO: 2242428 - RNA, 18 nt, Human
ucugccugucccucucag

SEQ ID NO: 2242429 - RNA, 17 nt, Human
ucugccugucccucuca

SEQ ID NO: 2242430 - RNA, 13 nt, Human
ucugccugucccu

SEQ ID NO: 2242431 - RNA, 18 nt, Human
ucugcccuugccaacgga

SEQ ID NO: 2242432 - RNA, 17 nt, Human
ucugcccuggcugcugc

SEQ ID NO: 2242433 - RNA, 16 nt, Human
ucugcccuucacccca

SEQ ID NO: 2242434 - RNA, 12 nt, Human
ucugccugucuc

SEQ ID NO: 2242435 - RNA, 14 nt, Human
ucugccugucuccc

SEQ ID NO: 2242436 - RNA, 23 nt, Human
agaacuuggauguaccugccccc

SEQ ID NO: 2242437 - RNA, 18 nt, Human
agaacuuggauguaccug

SEQ ID NO: 2242438 - RNA, 16 nt, Human
agaacuuugaaggaca

SEQ ID NO: 2242439 - RNA, 14 nt, Human
agaacuuucauuuu

SEQ ID NO: 2242440 - RNA, 15 nt, Human
agaacuuucauuuuu

SEQ ID NO: 2242441 - RNA, 16 nt, Human
agaacuuucauuuuuu

SEQ ID NO: 2242442 - RNA, 18 nt, Human
agaacuuucauuuuuuuc

SEQ ID NO: 2242443 - RNA, 16 nt, Human
agaagcagaggaagga

SEQ ID NO: 2242444 - RNA, 19 nt, Human
agaagcaccaaucaugaau

SEQ ID NO: 2242445 - RNA, 15 nt, Human
agaagcaagaaagaa

SEQ ID NO: 2242446 - RNA, 19 nt, Human
agaagcaacccaaauguuc

SEQ ID NO: 2242447 - RNA, 15 nt, Human
agaagcauacaacuu

SEQ ID NO: 2242448 - RNA, 23 nt, Human
agaagcagugagccgcaucuucu

SEQ ID NO: 2242449 - RNA, 17 nt, Human
agaagcagugagccgca

SEQ ID NO: 2242450 - RNA, 14 nt, Human
agaagcagugagcc

SEQ ID NO: 2242451 - RNA, 13 nt, Human
agaagcagugagc

SEQ ID NO: 2242452 - RNA, 16 nt, Human
agaagcaugaaaaagc

SEQ ID NO: 2242453 - RNA, 15 nt, Human
agaagcaugaaaaag

SEQ ID NO: 2242454 - RNA, 13 nt, Human
agaagcaugaaaa

SEQ ID NO: 2242455 - RNA, 18 nt, Human
agaagcauuaacuucucu

SEQ ID NO: 2242456 - RNA, 21 nt, Human
agaagcauuaacuucucugga

SEQ ID NO: 2242457 - RNA, 13 nt, Human
agaagcauuccuu

SEQ ID NO: 2242458 - RNA, 14 nt, Human
agaagcauuccuuc

SEQ ID NO: 2242459 - RNA, 18 nt, Human
agaagccacaggccugag

SEQ ID NO: 2242460 - RNA, 13 nt, Human
agaagcagcucuu

SEQ ID NO: 2242461 - RNA, 15 nt, Human
agaagcagaaauaca

SEQ ID NO: 2242462 - RNA, 13 nt, Human
agaagcagaugag

SEQ ID NO: 2242463 - RNA, 18 nt, Human
agaagcaggcuacacuga

SEQ ID NO: 2242464 - RNA, 14 nt, Human
agaagcaggcugga

SEQ ID NO: 2242465 - RNA, 12 nt, Human
agaagcagcucu

SEQ ID NO: 2242466 - RNA, 21 nt, Human
agaagcaauaaagaagagugc

SEQ ID NO: 2242467 - RNA, 20 nt, Human
agaagcaauaaagaagagug

SEQ ID NO: 2242468 - RNA, 14 nt, Human
agaagcagaaauac

SEQ ID NO: 2242469 - RNA, 18 nt, Human
agaagcccaauauuauaa

SEQ ID NO: 2242470 - RNA, 14 nt, Human
agaagccauugucu

SEQ ID NO: 2242471 - RNA, 15 nt, Human
agaagccauugucuu

SEQ ID NO: 2242472 - RNA, 10 nt, Human
agaagccauu

SEQ ID NO: 2242473 - RNA, 11 nt, Human
agaagccauug

SEQ ID NO: 2242474 - RNA, 12 nt, Human
agaagccauugu

SEQ ID NO: 2242475 - RNA, 22 nt, Human
agaagccaggaauuucccagga

SEQ ID NO: 2242476 - RNA, 12 nt, Human
agaagccaggag

SEQ ID NO: 2242477 - RNA, 14 nt, Human
agaagccaggagca

SEQ ID NO: 2242478 - RNA, 20 nt, Human
agaagccaggagcaaauguu

SEQ ID NO: 2242479 - RNA, 19 nt, Human
agaagccacaggccugaga

SEQ ID NO: 2242480 - RNA, 21 nt, Human
agaagccacaggccugagauu

SEQ ID NO: 2242481 - RNA, 13 nt, Human
agaagccaggaau

SEQ ID NO: 2242482 - RNA, 12 nt, Human
agaagccaggaa

SEQ ID NO: 2242483 - RNA, 12 nt, Human
ucugcccagcuu

SEQ ID NO: 2242484 - RNA, 20 nt, Human
agaagcccgugugagaagug

SEQ ID NO: 2242485 - RNA, 19 nt, Human
ucugcccagcuugggccca

SEQ ID NO: 2242486 - RNA, 16 nt, Human
ucugcccagcuugggc

SEQ ID NO: 2242487 - RNA, 23 nt, Human
ucugcccacucccugcaaccuga

SEQ ID NO: 2242488 - RNA, 12 nt, Human
ucugcccaggac

SEQ ID NO: 2242489 - RNA, 23 nt, Human
ucugcccaggacggggccggcca

SEQ ID NO: 2242490 - RNA, 14 nt, Human
ucugcccaggggug

SEQ ID NO: 2242491 - RNA, 19 nt, Human
ucugcccaggggugccccc

SEQ ID NO: 2242492 - RNA, 20 nt, Human
ucugcccauccugccccuga

SEQ ID NO: 2242493 - RNA, 23 nt, Human
agaagcccaggaaaggcuccagg

SEQ ID NO: 2242494 - RNA, 14 nt, Human
agaagcccccagcu

SEQ ID NO: 2242495 - RNA, 12 nt, Human
agaagcccccag

SEQ ID NO: 2242496 - RNA, 24 nt, Human
agaagcccccagcuaagaaccugg

SEQ ID NO: 2242497 - RNA, 20 nt, Human
agaagccauugucuucggaa

SEQ ID NO: 2242498 - RNA, 15 nt, Human
agaagccccuucccc

SEQ ID NO: 2242499 - RNA, 23 nt, Human
agaagcccccagcuaagaaccug

SEQ ID NO: 2242500 - RNA, 17 nt, Human
agaagcccccagcuaag

SEQ ID NO: 2242501 - RNA, 20 nt, Human
agaagccccuuccccauggg

SEQ ID NO: 2242502 - RNA, 21 nt, Human
agaagccccuuccccauggga

SEQ ID NO: 2242503 - RNA, 17 nt, Human
ucugccccagcucuggc

SEQ ID NO: 2242504 - RNA, 16 nt, Human
ucugccccagcucugg

SEQ ID NO: 2242505 - RNA, 20 nt, Human
ucugccccagcucuggcuuc

SEQ ID NO: 2242506 - RNA, 21 nt, Human
ucugccccauccuccagcagg

SEQ ID NO: 2242507 - RNA, 19 nt, Human
ucugccccauccuccagca

SEQ ID NO: 2242508 - RNA, 18 nt, Human
ucugccccauccuccagc

SEQ ID NO: 2242509 - RNA, 15 nt, Human
ucugccccauccucc

SEQ ID NO: 2242510 - RNA, 14 nt, Human
ucugccccagcucu

SEQ ID NO: 2242511 - RNA, 14 nt, Human
ucugccccagaggc

SEQ ID NO: 2242512 - RNA, 15 nt, Human
ucugccccagaggcc

SEQ ID NO: 2242513 - RNA, 18 nt, Human
ucugccccagaggccucu

SEQ ID NO: 2242514 - RNA, 20 nt, Human
ucugcccaggggugcccccu

SEQ ID NO: 2242515 - RNA, 21 nt, Human
ucugcccaggggugcccccuc

SEQ ID NO: 2242516 - RNA, 22 nt, Human
ucugcccaggggugcccccucc

SEQ ID NO: 2242517 - RNA, 23 nt, Human
ucugcccaggggugcccccuccu

SEQ ID NO: 2242518 - RNA, 22 nt, Human
ucugcccugcgggucacaggag

SEQ ID NO: 2242519 - RNA, 14 nt, Human
ucugcccccugcug

SEQ ID NO: 2242520 - RNA, 16 nt, Human
ucugcccccugcuggc

SEQ ID NO: 2242521 - RNA, 13 nt, Human
ucugcccuggcug

SEQ ID NO: 2242522 - RNA, 14 nt, Human
ucugcccuggcugc

SEQ ID NO: 2242523 - RNA, 15 nt, Human
ucugcccuggcugcu

SEQ ID NO: 2242524 - RNA, 16 nt, Human
ucugcccuggcugcug

SEQ ID NO: 2242525 - RNA, 21 nt, Human
ucugcccuggcugcugccccc

SEQ ID NO: 2242526 - RNA, 12 nt, Human
ucugcccuuggu

SEQ ID NO: 2242527 - RNA, 23 nt, Human
ucugcccuugguuaggcauugug

SEQ ID NO: 2242528 - RNA, 15 nt, Human
agaacugagcuccuc

SEQ ID NO: 2242529 - RNA, 12 nt, Human
agaacugagcuc

SEQ ID NO: 2242530 - RNA, 14 nt, Human
agaacuccuagggu

SEQ ID NO: 2242531 - RNA, 15 nt, Human
agaacugaaugagaa

SEQ ID NO: 2242532 - RNA, 22 nt, Human
agaacugagcuccucugggcag

SEQ ID NO: 2242533 - RNA, 16 nt, Human
agaacugagcuccucu

SEQ ID NO: 2242534 - RNA, 12 nt, Human
agaacugcaggc

SEQ ID NO: 2242535 - RNA, 15 nt, Human
agaacugcaggcccu

SEQ ID NO: 2242536 - RNA, 21 nt, Human
agaacugcauauguuucgcug

SEQ ID NO: 2242537 - RNA, 20 nt, Human
agaacugcauauguuucgcu

SEQ ID NO: 2242538 - RNA, 19 nt, Human
agaacugcauauguuucgc

SEQ ID NO: 2242539 - RNA, 15 nt, Human
agaacugcauauguu

SEQ ID NO: 2242540 - RNA, 20 nt, Human
agaacugcaggcccuggccu

SEQ ID NO: 2242541 - RNA, 16 nt, Human
agaacugcaggcccug

SEQ ID NO: 2242542 - RNA, 18 nt, Human
agaacugcaggcccuggc

SEQ ID NO: 2242543 - RNA, 11 nt, Human
agaacuccuag

SEQ ID NO: 2242544 - RNA, 16 nt, Human
agaacucacuggggcc

SEQ ID NO: 2242545 - RNA, 14 nt, Human
agaacucacugggg

SEQ ID NO: 2242546 - RNA, 20 nt, Human
agaacucaaauggggccaga

SEQ ID NO: 2242547 - RNA, 17 nt, Human
agaacucccuuucaaca

SEQ ID NO: 2242548 - RNA, 16 nt, Human
agaacucccuuucaac

SEQ ID NO: 2242549 - RNA, 15 nt, Human
agaacucccuuucaa

SEQ ID NO: 2242550 - RNA, 16 nt, Human
agaacuauaugugaau

SEQ ID NO: 2242551 - RNA, 19 nt, Human
agaacuauaugugaauccu

SEQ ID NO: 2242552 - RNA, 21 nt, Human
agaacuauaugugaauccucu

SEQ ID NO: 2242553 - RNA, 19 nt, Human
agaacucaaauggggccag

SEQ ID NO: 2242554 - RNA, 22 nt, Human
agaacuacucagggaaugaagg

SEQ ID NO: 2242555 - RNA, 19 nt, Human
agaacuacucagggaauga

SEQ ID NO: 2242556 - RNA, 17 nt, Human
agaacuagaaccuggag

SEQ ID NO: 2242557 - RNA, 18 nt, Human
agaacuagaaccuggagg

SEQ ID NO: 2242558 - RNA, 17 nt, Human
agaacuagaauuugauu

SEQ ID NO: 2242559 - RNA, 21 nt, Human
agaacggagccccaggccucu

SEQ ID NO: 2242560 - RNA, 21 nt, Human
agaaccuguccuugcacacuc

SEQ ID NO: 2242561 - RNA, 14 nt, Human
agaaccuguccuug

SEQ ID NO: 2242562 - RNA, 14 nt, Human
agaaccuugccuga

SEQ ID NO: 2242563 - RNA, 19 nt, Human
agaaccuugccugaacauc

SEQ ID NO: 2242564 - RNA, 22 nt, Human
agaaccuugccugaacauccuu

SEQ ID NO: 2242565 - RNA, 19 nt, Human
agaaccuuuugagugccuu

SEQ ID NO: 2242566 - RNA, 23 nt, Human
agaacgcagcccuagagccugcc

SEQ ID NO: 2242567 - RNA, 13 nt, Human
agaacgcagcccu

SEQ ID NO: 2242568 - RNA, 22 nt, Human
agaacgcagcccuagagccugc

SEQ ID NO: 2242569 - RNA, 17 nt, Human
agaaccuugugccuggc

SEQ ID NO: 2242570 - RNA, 22 nt, Human
agaaccuugugccuggcucaga

SEQ ID NO: 2242571 - RNA, 23 nt, Human
agaaccuugugccuggcucagag

SEQ ID NO: 2242572 - RNA, 23 nt, Human
agaaccuuuugagugccuuacac

SEQ ID NO: 2242573 - RNA, 14 nt, Human
agaaauuagccggg

SEQ ID NO: 2242574 - RNA, 15 nt, Human
agaaauuagcugugu

SEQ ID NO: 2242575 - RNA, 17 nt, Human
agaaauuagaaaccuua

SEQ ID NO: 2242576 - RNA, 15 nt, Human
agaaauuagccgggc

SEQ ID NO: 2242577 - RNA, 17 nt, Human
agaaauuagcuguguga

SEQ ID NO: 2242578 - RNA, 13 nt, Human
ucugaaugcugcu

SEQ ID NO: 2242579 - RNA, 16 nt, Human
ucugaaugcugcuacu

SEQ ID NO: 2242580 - RNA, 15 nt, Human
ucugcaguaaaucuu

SEQ ID NO: 2242581 - RNA, 21 nt, Human
ucugcagguucuucuuccuga

SEQ ID NO: 2242582 - RNA, 17 nt, Human
agaaauuaaguaucuga

SEQ ID NO: 2242583 - RNA, 13 nt, Human
agaaauuaaguau

SEQ ID NO: 2242584 - RNA, 18 nt, Human
agaaauuacacccaaaga

SEQ ID NO: 2242585 - RNA, 17 nt, Human
ucugaaugcugcuacuu

SEQ ID NO: 2242586 - RNA, 13 nt, Human
agaaccuguccuu

SEQ ID NO: 2242587 - RNA, 12 nt, Human
agaaccuguccu

SEQ ID NO: 2242588 - RNA, 17 nt, Human
agaaccuguagagcuag

SEQ ID NO: 2242589 - RNA, 16 nt, Human
agaaccuggaagggcu

SEQ ID NO: 2242590 - RNA, 12 nt, Human
agaaccuggaga

SEQ ID NO: 2242591 - RNA, 17 nt, Human
agaaccuggagagcuag

SEQ ID NO: 2242592 - RNA, 12 nt, Human
agaaccuggagg

SEQ ID NO: 2242593 - RNA, 23 nt, Human
agaaccuggagggcuagaacugg

SEQ ID NO: 2242594 - RNA, 17 nt, Human
agaaccuggagggcugg

SEQ ID NO: 2242595 - RNA, 17 nt, Human
agaaccuggaguuccug

SEQ ID NO: 2242596 - RNA, 18 nt, Human
agaaccuggaguuccuga

SEQ ID NO: 2242597 - RNA, 12 nt, Human
agaaauuaugug

SEQ ID NO: 2242598 - RNA, 21 nt, Human
agaaccuggaacuuggggagu

SEQ ID NO: 2242599 - RNA, 15 nt, Human
agaaccuggaagggc

SEQ ID NO: 2242600 - RNA, 20 nt, Human
agaaccuggaacuuggggag

SEQ ID NO: 2242601 - RNA, 13 nt, Human
agaaccuggaacu

SEQ ID NO: 2242602 - RNA, 13 nt, Human
ucugaauccuaag

SEQ ID NO: 2242603 - RNA, 14 nt, Human
ucugaauaugcugc

SEQ ID NO: 2242604 - RNA, 16 nt, Human
ucugaauaauuucuua

SEQ ID NO: 2242605 - RNA, 15 nt, Human
ucugaauaauuucuu

SEQ ID NO: 2242606 - RNA, 16 nt, Human
ucugaauaacauuugu

SEQ ID NO: 2242607 - RNA, 14 nt, Human
ucugaagggaggug

SEQ ID NO: 2242608 - RNA, 16 nt, Human
ucugaagugaaacugc

SEQ ID NO: 2242609 - RNA, 12 nt, Human
ucugaagggagg

SEQ ID NO: 2242610 - RNA, 13 nt, Human
ucugaagggaggu

SEQ ID NO: 2242611 - RNA, 22 nt, Human
ucugaagugaaacugcuuguuu

SEQ ID NO: 2242612 - RNA, 18 nt, Human
ucugaagugaaacugcuu

SEQ ID NO: 2242613 - RNA, 21 nt, Human
ucugcaggucccuaauaaagc

SEQ ID NO: 2242614 - RNA, 19 nt, Human
ucugcaggucccuaauaaa

SEQ ID NO: 2242615 - RNA, 22 nt, Human
ucugcaggucccuaauaaagcu

SEQ ID NO: 2242616 - RNA, 23 nt, Human
ucugcaggucccuaauaaagcug

SEQ ID NO: 2242617 - RNA, 21 nt, Human
agaaacuguucccaccugcug

SEQ ID NO: 2242618 - RNA, 15 nt, Human
agaaacuguucccac

SEQ ID NO: 2242619 - RNA, 22 nt, Human
agaaacuguucccaccugcugg

SEQ ID NO: 2242620 - RNA, 23 nt, Human
agaaacuuaagguuaccuuuguu

SEQ ID NO: 2242621 - RNA, 20 nt, Human
agaaacuguagucucaggac

SEQ ID NO: 2242622 - RNA, 14 nt, Human
agaaacuguagucu

SEQ ID NO: 2242623 - RNA, 15 nt, Human
agaaacauuugguaa

SEQ ID NO: 2242624 - RNA, 23 nt, Human
agaaacaucaguuacucugaagg

SEQ ID NO: 2242625 - RNA, 21 nt, Human
agaaacaucaguuacucugaa

SEQ ID NO: 2242626 - RNA, 23 nt, Human
agaaacauaaauaaaaugaccag

SEQ ID NO: 2242627 - RNA, 14 nt, Human
agaaacaugguuuu

SEQ ID NO: 2242628 - RNA, 14 nt, Human
agaaacauugaaga

SEQ ID NO: 2242629 - RNA, 15 nt, Human
agaaacauugaagau

SEQ ID NO: 2242630 - RNA, 16 nt, Human
agaaacaucaguuacu

SEQ ID NO: 2242631 - RNA, 14 nt, Human
agaaacaucaguua

SEQ ID NO: 2242632 - RNA, 15 nt, Human
agaaacauaaauaaa

SEQ ID NO: 2242633 - RNA, 16 nt, Human
agaaacauaaauaaaa

SEQ ID NO: 2242634 - RNA, 17 nt, Human
agaaacauaaauaaaau

SEQ ID NO: 2242635 - RNA, 22 nt, Human
agaaacauaaauaaaaugacca

SEQ ID NO: 2242636 - RNA, 22 nt, Human
agaaacacacugaggcagggaa

SEQ ID NO: 2242637 - RNA, 20 nt, Human
agaaaagauacgacuuuauu

SEQ ID NO: 2242638 - RNA, 15 nt, Human
agaaaagauaaagau

SEQ ID NO: 2242639 - RNA, 16 nt, Human
agaaaagauaaagaug

SEQ ID NO: 2242640 - RNA, 19 nt, Human
agaaaagagauauuuuaaa

SEQ ID NO: 2242641 - RNA, 23 nt, Human
agaaaagagauauuuuaaaauga

SEQ ID NO: 2242642 - RNA, 16 nt, Human
agaaaacaaggaugaa

SEQ ID NO: 2242643 - RNA, 18 nt, Human
agaaaagcaccugccgac

SEQ ID NO: 2242644 - RNA, 16 nt, Human
agaaaagcaccugccg

SEQ ID NO: 2242645 - RNA, 15 nt, Human
agaaaagcaccugcc

SEQ ID NO: 2242646 - RNA, 20 nt, Human
agaaaagauuuuaaucaagu

SEQ ID NO: 2242647 - RNA, 18 nt, Human
agaaaagauuuuaaucaa

SEQ ID NO: 2242648 - RNA, 15 nt, Human
agaaaagauuuuaau

SEQ ID NO: 2242649 - RNA, 19 nt, Human
agaaaagauguagauuuau

SEQ ID NO: 2242650 - RNA, 12 nt, Human
agaaaagauuuu

SEQ ID NO: 2242651 - RNA, 17 nt, Human
agaaaagauaaagauga

SEQ ID NO: 2242652 - RNA, 20 nt, Human
agaaacacacugaggcaggg

SEQ ID NO: 2242653 - RNA, 19 nt, Human
agaaacacacugaggcagg

SEQ ID NO: 2242654 - RNA, 17 nt, Human
agaaacacacugaggca

SEQ ID NO: 2242655 - RNA, 15 nt, Human
agaaacacacugagg

SEQ ID NO: 2242656 - RNA, 14 nt, Human
agaaacacaauauu

SEQ ID NO: 2242657 - RNA, 16 nt, Human
agaaacacaacuauau

SEQ ID NO: 2242658 - RNA, 20 nt, Human
agaaacaacucuuugagaaa

SEQ ID NO: 2242659 - RNA, 14 nt, Human
agaaacaauaaaga

SEQ ID NO: 2242660 - RNA, 14 nt, Human
agaaaaggacagaa

SEQ ID NO: 2242661 - RNA, 15 nt, Human
agaaacaauaaagag

SEQ ID NO: 2242662 - RNA, 16 nt, Human
agaaacaauaaagaga

SEQ ID NO: 2242663 - RNA, 17 nt, Human
agaaacaauaaagagau

SEQ ID NO: 2242664 - RNA, 14 nt, Human
agaaaagcuuugaa

SEQ ID NO: 2242665 - RNA, 21 nt, Human
agaaaagcuauaaaaugaaua

SEQ ID NO: 2242666 - RNA, 13 nt, Human
agaaaagcuauaa

SEQ ID NO: 2242667 - RNA, 18 nt, Human
agaaaaaugagccuggca

SEQ ID NO: 2242668 - RNA, 19 nt, Human
ucucuugguuuccuuccuu

SEQ ID NO: 2242669 - RNA, 20 nt, Human
agaaaacaaaaaaaccucua

SEQ ID NO: 2242670 - RNA, 15 nt, Human
agaaaaauuauugua

SEQ ID NO: 2242671 - RNA, 19 nt, Human
agaaaaauuuacauggcaa

SEQ ID NO: 2242672 - RNA, 23 nt, Human
agaaaaaauauuuuccugccagg

SEQ ID NO: 2242673 - RNA, 17 nt, Human
agaaaaaauauuuuccu

SEQ ID NO: 2242674 - RNA, 18 nt, Human
ucucuugguuuccuuccu

SEQ ID NO: 2242675 - RNA, 17 nt, Human
ucucuugguuuccuucc

SEQ ID NO: 2242676 - RNA, 16 nt, Human
ucucuugguuuccuuc

SEQ ID NO: 2242677 - RNA, 18 nt, Human
ucucugcaggucccuaau

SEQ ID NO: 2242678 - RNA, 22 nt, Human
ucucuccccucaaagucugcaa

SEQ ID NO: 2242679 - RNA, 18 nt, Human
ucucugcaucuacuccca

SEQ ID NO: 2242680 - RNA, 19 nt, Human
agaaaaaauauuuucccua

SEQ ID NO: 2242681 - RNA, 14 nt, Human
ucucucccuccccu

SEQ ID NO: 2242682 - RNA, 20 nt, Human
ucucuccccucaaagucugc

SEQ ID NO: 2242683 - RNA, 21 nt, Human
ucucuccccucaaagucugca

SEQ ID NO: 2242684 - RNA, 20 nt, Human
ucucucccauggagccccag

SEQ ID NO: 2242685 - RNA, 21 nt, Human
ucucucccauggagccccagc

SEQ ID NO: 2242686 - RNA, 23 nt, Human
ucucucccauggagccccagccc

SEQ ID NO: 2242687 - RNA, 13 nt, Human
ucucuccccucaa

SEQ ID NO: 2242688 - RNA, 19 nt, Human
ucucugcaggucccuaaua

SEQ ID NO: 2242689 - RNA, 20 nt, Human
ucucugcaggucccuaauaa

SEQ ID NO: 2242690 - RNA, 21 nt, Human
ucucugcaggucccuaauaaa

SEQ ID NO: 2242691 - RNA, 22 nt, Human
ucucugcaggucccuaauaaag

SEQ ID NO: 2242692 - RNA, 16 nt, Human
ucucuugguccugcug

SEQ ID NO: 2242693 - RNA, 17 nt, Human
ucucuugguccugcugc

SEQ ID NO: 2242694 - RNA, 18 nt, Human
ucucuugguccugcugca

SEQ ID NO: 2242695 - RNA, 18 nt, Human
agaaagacagagcuggga

SEQ ID NO: 2242696 - RNA, 12 nt, Human
agaaagacugag

SEQ ID NO: 2242697 - RNA, 15 nt, Human
agaaagacagagcug

SEQ ID NO: 2242698 - RNA, 16 nt, Human
agaaagacuauucaaa

SEQ ID NO: 2242699 - RNA, 22 nt, Human
agaaagacuaucuaaauguuga

SEQ ID NO: 2242700 - RNA, 20 nt, Human
agaaagacuaucuaaauguu

SEQ ID NO: 2242701 - RNA, 13 nt, Human
agaaagagcacuu

SEQ ID NO: 2242702 - RNA, 23 nt, Human
agaaagagagagaauucuuucaa

SEQ ID NO: 2242703 - RNA, 22 nt, Human
agaaagagcacuuaagagaaua

SEQ ID NO: 2242704 - RNA, 19 nt, Human
agaaagagcacuuaagaga

SEQ ID NO: 2242705 - RNA, 16 nt, Human
agaaagaggagugcuu

SEQ ID NO: 2242706 - RNA, 22 nt, Human
agaaagagagaaaauaaaaagu

SEQ ID NO: 2242707 - RNA, 18 nt, Human
agaaagagagaaaauaaa

SEQ ID NO: 2242708 - RNA, 17 nt, Human
agaaagagagaaaauaa

SEQ ID NO: 2242709 - RNA, 16 nt, Human
agaaagagagaaaaua

SEQ ID NO: 2242710 - RNA, 11 nt, Human
agaaagagaga

SEQ ID NO: 2242711 - RNA, 10 nt, Human
agaaagagag

SEQ ID NO: 2242712 - RNA, 15 nt, Human
agaaagagagaaaau

SEQ ID NO: 2242713 - RNA, 14 nt, Human
agaaagagagaaaa

SEQ ID NO: 2242714 - RNA, 13 nt, Human
agaaagagagaaa

SEQ ID NO: 2242715 - RNA, 12 nt, Human
agaaagagagaa

SEQ ID NO: 2242716 - RNA, 19 nt, Human
agaaagauggaugugcuuu

SEQ ID NO: 2242717 - RNA, 18 nt, Human
agaaagaucauugaaauu

SEQ ID NO: 2242718 - RNA, 17 nt, Human
agaaagaucauugaaau

SEQ ID NO: 2242719 - RNA, 20 nt, Human
agaaagauuacuuagaggaa

SEQ ID NO: 2242720 - RNA, 21 nt, Human
agaaagcaaaauuauguuugc

SEQ ID NO: 2242721 - RNA, 17 nt, Human
agaaagcaaaauuaugu

SEQ ID NO: 2242722 - RNA, 15 nt, Human
agaaagcaaaauuau

SEQ ID NO: 2242723 - RNA, 18 nt, Human
agaaagcagaacagugau

SEQ ID NO: 2242724 - RNA, 17 nt, Human
agaaagcagaacaguga

SEQ ID NO: 2242725 - RNA, 14 nt, Human
agaaagcauaaaau

SEQ ID NO: 2242726 - RNA, 12 nt, Human
agaaagcagggg

SEQ ID NO: 2242727 - RNA, 14 nt, Human
agaaagcaggggcu

SEQ ID NO: 2242728 - RNA, 21 nt, Human
agaaagcagauaccucacccu

SEQ ID NO: 2242729 - RNA, 20 nt, Human
agaaagcagaacagugauua

SEQ ID NO: 2242730 - RNA, 19 nt, Human
agaaauacaauucuacauu

SEQ ID NO: 2242731 - RNA, 20 nt, Human
agaaagcaggggcuacaaga

SEQ ID NO: 2242732 - RNA, 13 nt, Human
agaaagcauuuga

SEQ ID NO: 2242733 - RNA, 16 nt, Human
agaaagcauuacauuu

SEQ ID NO: 2242734 - RNA, 20 nt, Human
agaaaugcugguuuuucagu

SEQ ID NO: 2242735 - RNA, 21 nt, Human
agaaaugcugguuuuucaguu

SEQ ID NO: 2242736 - RNA, 20 nt, Human
agaaaugggacuuaacuccu

SEQ ID NO: 2242737 - RNA, 23 nt, Human
agaaaugcugccugccugucugu

SEQ ID NO: 2242738 - RNA, 15 nt, Human
agaaaugcugcccau

SEQ ID NO: 2242739 - RNA, 13 nt, Human
agaaaugcugccu

SEQ ID NO: 2242740 - RNA, 14 nt, Human
agaaaugcugccug

SEQ ID NO: 2242741 - RNA, 15 nt, Human
agaaaugcugccugc

SEQ ID NO: 2242742 - RNA, 22 nt, Human
agaaaugcugccugccugucug

SEQ ID NO: 2242743 - RNA, 15 nt, Human
agaaaugccuuaccc

SEQ ID NO: 2242744 - RNA, 19 nt, Human
ucugaaggagauuuuccuu

SEQ ID NO: 2242745 - RNA, 21 nt, Human
ucugaaggagccccauuccug

SEQ ID NO: 2242746 - RNA, 12 nt, Human
ucugaaggagau

SEQ ID NO: 2242747 - RNA, 20 nt, Human
ucugaaggagccccauuccu

SEQ ID NO: 2242748 - RNA, 15 nt, Human
agaaaugguuguauu

SEQ ID NO: 2242749 - RNA, 16 nt, Human
agaaaugguuguauua

SEQ ID NO: 2242750 - RNA, 18 nt, Human
ucugaaggcuggguucug

SEQ ID NO: 2242751 - RNA, 23 nt, Human
ucugaaggcgucaacgugcauuu

SEQ ID NO: 2242752 - RNA, 18 nt, Human
agaaaucucacuuuucuc

SEQ ID NO: 2242753 - RNA, 13 nt, Human
agaaaugaaaaaa

SEQ ID NO: 2242754 - RNA, 14 nt, Human
agaaaucuagaaga

SEQ ID NO: 2242755 - RNA, 23 nt, Human
agaaaucuaguauuucaugcugg

SEQ ID NO: 2242756 - RNA, 22 nt, Human
agaaaucuauagaacugaauga

SEQ ID NO: 2242757 - RNA, 12 nt, Human
agaaaugaaaaa

SEQ ID NO: 2242758 - RNA, 18 nt, Human
agaaauaccaaaauuauu

SEQ ID NO: 2242759 - RNA, 23 nt, Human
agaaauaccaaaauuauuucaga

SEQ ID NO: 2242760 - RNA, 16 nt, Human
agaaauacagauuuug

SEQ ID NO: 2242761 - RNA, 21 nt, Human
agaaauacagauuuugauagc

SEQ ID NO: 2242762 - RNA, 16 nt, Human
agaaauacuguacaau

SEQ ID NO: 2242763 - RNA, 14 nt, Human
agaaauacuguaca

SEQ ID NO: 2242764 - RNA, 13 nt, Human
agaaauacuguac

SEQ ID NO: 2242765 - RNA, 20 nt, Human
agaaauagccugcgcuguuu

SEQ ID NO: 2242766 - RNA, 18 nt, Human
agaaauagacaguauauu

SEQ ID NO: 2242767 - RNA, 19 nt, Human
agaaauagcuccguggagc

SEQ ID NO: 2242768 - RNA, 10 nt, Human
acuuugugcu

SEQ ID NO: 2242769 - RNA, 16 nt, Human
acuuuguguucaccuu

SEQ ID NO: 2242770 - RNA, 15 nt, Human
acuuugucagaggca

SEQ ID NO: 2242771 - RNA, 20 nt, Human
acuuugucgcccaggcugga

SEQ ID NO: 2242772 - RNA, 22 nt, Human
acuuuguaugucauuuccuuca

SEQ ID NO: 2242773 - RNA, 14 nt, Human
acuuugucugaaaa

SEQ ID NO: 2242774 - RNA, 14 nt, Human
acuuugugaauaga

SEQ ID NO: 2242775 - RNA, 15 nt, Human
acuuugucugaaaaa

SEQ ID NO: 2242776 - RNA, 17 nt, Human
acuuugucugaaaaauu

SEQ ID NO: 2242777 - RNA, 18 nt, Human
acuuuguguucaccuugu

SEQ ID NO: 2242778 - RNA, 18 nt, Human
agaaaaaaaaagaaaaaa

SEQ ID NO: 2242779 - RNA, 17 nt, Human
agaaaaaaaaagaaaaa

SEQ ID NO: 2242780 - RNA, 16 nt, Human
acuuuguggaugucuu

SEQ ID NO: 2242781 - RNA, 17 nt, Human
acuuuguggaugucuuc

SEQ ID NO: 2242782 - RNA, 19 nt, Human
acuuuguggaugucuuccu

SEQ ID NO: 2242783 - RNA, 21 nt, Human
acuuuguggaugucuuccuug

SEQ ID NO: 2242784 - RNA, 21 nt, Human
agaaaaaaaguuugccagaag

SEQ ID NO: 2242785 - RNA, 17 nt, Human
agaaaaaaagauuuauu

SEQ ID NO: 2242786 - RNA, 19 nt, Human
agaaaaaaaaagaaaaaag

SEQ ID NO: 2242787 - RNA, 14 nt, Human
ucuccuuagucuuc

SEQ ID NO: 2242788 - RNA, 16 nt, Human
ucuccuuccugugugu

SEQ ID NO: 2242789 - RNA, 21 nt, Human
ucuccuuggugucgggcauga

SEQ ID NO: 2242790 - RNA, 23 nt, Human
ucuccuuggugucgggcaugaca

SEQ ID NO: 2242791 - RNA, 23 nt, Human
ucuccugugcaugggugaaggga

SEQ ID NO: 2242792 - RNA, 16 nt, Human
ucuccuguccaaccua

SEQ ID NO: 2242793 - RNA, 17 nt, Human
ucuccugugcaugggug

SEQ ID NO: 2242794 - RNA, 15 nt, Human
ucuccugugcccaca

SEQ ID NO: 2242795 - RNA, 16 nt, Human
ucuccugugcccacau

SEQ ID NO: 2242796 - RNA, 18 nt, Human
ucuccugugcccacaucc

SEQ ID NO: 2242797 - RNA, 17 nt, Human
ucuccugugcccacauc

SEQ ID NO: 2242798 - RNA, 14 nt, Human
ucuccuguuuuucu

SEQ ID NO: 2242799 - RNA, 17 nt, Human
ucuccuguuuuucuggg

SEQ ID NO: 2242800 - RNA, 19 nt, Human
ucuccuguuuuucugggug

SEQ ID NO: 2242801 - RNA, 14 nt, Human
ucuccuguccaacc

SEQ ID NO: 2242802 - RNA, 10 nt, Human
agaaaaaaga

SEQ ID NO: 2242803 - RNA, 17 nt, Human
ucucgcucuguugccca

SEQ ID NO: 2242804 - RNA, 20 nt, Human
ucucgcuauugucaccaggg

SEQ ID NO: 2242805 - RNA, 16 nt, Human
ucucgcauaggaccuu

SEQ ID NO: 2242806 - RNA, 23 nt, Human
ucucgcauaggaccuuuccacca

SEQ ID NO: 2242807 - RNA, 17 nt, Human
ucucggaaggcuggcug

SEQ ID NO: 2242808 - RNA, 21 nt, Human
ucucggaacugcaugcugcug

SEQ ID NO: 2242809 - RNA, 22 nt, Human
ucucgcugaugcugggcugggu

SEQ ID NO: 2242810 - RNA, 21 nt, Human
ucucggaccuuucagcuguga

SEQ ID NO: 2242811 - RNA, 19 nt, Human
ucucggacuaagccuaccu

SEQ ID NO: 2242812 - RNA, 18 nt, Human
ucucgcugaugcugggcu

SEQ ID NO: 2242813 - RNA, 19 nt, Human
ucucgcugaugcugggcug

SEQ ID NO: 2242814 - RNA, 20 nt, Human
ucucgcugaugcugggcugg

SEQ ID NO: 2242815 - RNA, 15 nt, Human
ucucgcucugucacc

SEQ ID NO: 2242816 - RNA, 23 nt, Human
ucucgaacauggaacucauuccu

SEQ ID NO: 2242817 - RNA, 14 nt, Human
ucuccuuguggccu

SEQ ID NO: 2242818 - RNA, 14 nt, Human
ucucgauuuuaucu

SEQ ID NO: 2242819 - RNA, 17 nt, Human
ucucgaugcaaugaaca

SEQ ID NO: 2242820 - RNA, 14 nt, Human
ucucgaugcaauga

SEQ ID NO: 2242821 - RNA, 15 nt, Human
ucuccuugcuaccca

SEQ ID NO: 2242822 - RNA, 18 nt, Human
ucuccuugcuacccagaa

SEQ ID NO: 2242823 - RNA, 17 nt, Human
ucucgaacuccugaccu

SEQ ID NO: 2242824 - RNA, 19 nt, Human
ucuccuuuuccucucuccc

SEQ ID NO: 2242825 - RNA, 14 nt, Human
ucucuccauucccg

SEQ ID NO: 2242826 - RNA, 17 nt, Human
ucucuccaucuaccuuc

SEQ ID NO: 2242827 - RNA, 14 nt, Human
ucucucccaggggc

SEQ ID NO: 2242828 - RNA, 20 nt, Human
ucucucccaggggcuggcuu

SEQ ID NO: 2242829 - RNA, 22 nt, Human
ucucucccaggggcuggcuuca

SEQ ID NO: 2242830 - RNA, 19 nt, Human
ucucucccagucuacccag

SEQ ID NO: 2242831 - RNA, 21 nt, Human
ucucucccagucuacccagag

SEQ ID NO: 2242832 - RNA, 22 nt, Human
ucucucccagucuacccagaga

SEQ ID NO: 2242833 - RNA, 23 nt, Human
ucucucccagucuacccagagaa

SEQ ID NO: 2242834 - RNA, 13 nt, Human
ucucucccaugga

SEQ ID NO: 2242835 - RNA, 15 nt, Human
ucucucccauggagc

SEQ ID NO: 2242836 - RNA, 17 nt, Human
ucucucccauggagccc

SEQ ID NO: 2242837 - RNA, 11 nt, Human
ucucuccaucu

SEQ ID NO: 2242838 - RNA, 11 nt, Human
ucucuccagga

SEQ ID NO: 2242839 - RNA, 13 nt, Human
ucucuccaggauc

SEQ ID NO: 2242840 - RNA, 21 nt, Human
ucucucaggccaaacucaccu

SEQ ID NO: 2242841 - RNA, 21 nt, Human
ucucucaggagcacaggcagc

SEQ ID NO: 2242842 - RNA, 22 nt, Human
ucucucaggagcacaggcagcu

SEQ ID NO: 2242843 - RNA, 19 nt, Human
ucucggaguaucugggaac

SEQ ID NO: 2242844 - RNA, 15 nt, Human
ucucggcucacugca

SEQ ID NO: 2242845 - RNA, 16 nt, Human
ucucucagaagggagg

SEQ ID NO: 2242846 - RNA, 12 nt, Human
ucucucaggcca

SEQ ID NO: 2242847 - RNA, 17 nt, Human
ucucucagaagggaggc

SEQ ID NO: 2242848 - RNA, 20 nt, Human
ucucucagaagggaggcugg

SEQ ID NO: 2242849 - RNA, 13 nt, Human
ucucucaggagca

SEQ ID NO: 2242850 - RNA, 14 nt, Human
ucucucaggagcac

SEQ ID NO: 2242851 - RNA, 15 nt, Human
ucucucaggagcaca

SEQ ID NO: 2242852 - RNA, 17 nt, Human
ucucucaggagcacagg

SEQ ID NO: 2242853 - RNA, 18 nt, Human
ucucucaggagcacaggc

SEQ ID NO: 2242854 - RNA, 19 nt, Human
ucucucaggagcacaggca

SEQ ID NO: 2242855 - RNA, 12 nt, Human
acuuugaaggac

SEQ ID NO: 2242856 - RNA, 23 nt, Human
acuuugaaauguguuucuguaua

SEQ ID NO: 2242857 - RNA, 17 nt, Human
acuuugaaauguguuuc

SEQ ID NO: 2242858 - RNA, 19 nt, Human
acuuugaaauguguuucug

SEQ ID NO: 2242859 - RNA, 17 nt, Human
acuuugcacugauauau

SEQ ID NO: 2242860 - RNA, 17 nt, Human
acuuugcucuuucuuga

SEQ ID NO: 2242861 - RNA, 20 nt, Human
acuuugcuugcaguagauuu

SEQ ID NO: 2242862 - RNA, 14 nt, Human
acuuugcuucccau

SEQ ID NO: 2242863 - RNA, 15 nt, Human
acuuugcucuuucuu

SEQ ID NO: 2242864 - RNA, 14 nt, Human
acuuugcucugggu

SEQ ID NO: 2242865 - RNA, 20 nt, Human
acuuugccuuuccauaauca

SEQ ID NO: 2242866 - RNA, 21 nt, Human
acuuugcacugauauaucaug

SEQ ID NO: 2242867 - RNA, 18 nt, Human
acuuugcacugauauauc

SEQ ID NO: 2242868 - RNA, 19 nt, Human
acuuugcacugauauauca

SEQ ID NO: 2242869 - RNA, 23 nt, Human
acuuugcagccggcacagggucu

SEQ ID NO: 2242870 - RNA, 19 nt, Human
acuuugccagcuuuuccuc

SEQ ID NO: 2242871 - RNA, 23 nt, Human
acuuugccagcuuuuccucccuu

SEQ ID NO: 2242872 - RNA, 19 nt, Human
acuuuguaugucauuuccu

SEQ ID NO: 2242873 - RNA, 18 nt, Human
acuuuggaaaaugcauug

SEQ ID NO: 2242874 - RNA, 15 nt, Human
acuuuggaaaaugca

SEQ ID NO: 2242875 - RNA, 19 nt, Human
acuuuguauaaaagggacu

SEQ ID NO: 2242876 - RNA, 23 nt, Human
acuuuggaaagaguaggaagacu

SEQ ID NO: 2242877 - RNA, 23 nt, Human
acuuuggaaagacuuuuccaacc

SEQ ID NO: 2242878 - RNA, 12 nt, Human
acuuuggaaaga

SEQ ID NO: 2242879 - RNA, 13 nt, Human
acuuuggaaagag

SEQ ID NO: 2242880 - RNA, 14 nt, Human
acuuuggaaagagu

SEQ ID NO: 2242881 - RNA, 20 nt, Human
acuuucuuuucgccguggcu

SEQ ID NO: 2242882 - RNA, 21 nt, Human
acuuucuuuucgccguggcug

SEQ ID NO: 2242883 - RNA, 15 nt, Human
acuuucuuuucugga

SEQ ID NO: 2242884 - RNA, 19 nt, Human
acuuucuuuucuggaaugu

SEQ ID NO: 2242885 - RNA, 15 nt, Human
acuuuagaugcugau

SEQ ID NO: 2242886 - RNA, 13 nt, Human
acuuuagaugcug

SEQ ID NO: 2242887 - RNA, 14 nt, Human
acuuuagaugcuga

SEQ ID NO: 2242888 - RNA, 13 nt, Human
acuuuagggaagu

SEQ ID NO: 2242889 - RNA, 22 nt, Human
acuuuagcugcauccuccaaga

SEQ ID NO: 2242890 - RNA, 21 nt, Human
acuuuagaguagcaugagaga

SEQ ID NO: 2242891 - RNA, 19 nt, Human
acuuuagaguagcaugaga

SEQ ID NO: 2242892 - RNA, 15 nt, Human
acuuuagaguagcau

SEQ ID NO: 2242893 - RNA, 15 nt, Human
acuuuagaaugagag

SEQ ID NO: 2242894 - RNA, 15 nt, Human
acuuuacuaagauga

SEQ ID NO: 2242895 - RNA, 16 nt, Human
acuuuacuaagaugac

SEQ ID NO: 2242896 - RNA, 18 nt, Human
acuuuacuaagaugacau

SEQ ID NO: 2242897 - RNA, 22 nt, Human
acuuuacuaagaugacauugcu

SEQ ID NO: 2242898 - RNA, 22 nt, Human
acuugugcugaucgugcuaaau

SEQ ID NO: 2242899 - RNA, 16 nt, Human
acuuguuuucugggaa

SEQ ID NO: 2242900 - RNA, 16 nt, Human
acuuuaaaaggagcca

SEQ ID NO: 2242901 - RNA, 16 nt, Human
acuugugauuauuuau

SEQ ID NO: 2242902 - RNA, 14 nt, Human
acuuguggacacag

SEQ ID NO: 2242903 - RNA, 13 nt, Human
acuugugccaaca

SEQ ID NO: 2242904 - RNA, 18 nt, Human
acuugugccaacacucaa

SEQ ID NO: 2242905 - RNA, 20 nt, Human
acuugugauuauuuauuauu

SEQ ID NO: 2242906 - RNA, 17 nt, Human
acuugugauuauuuauu

SEQ ID NO: 2242907 - RNA, 23 nt, Human
acuugccgcgucgcccucccagg

SEQ ID NO: 2242908 - RNA, 22 nt, Human
acuugccgcgucgcccucccag

SEQ ID NO: 2242909 - RNA, 21 nt, Human
acuuggaaaaauccagaaaga

SEQ ID NO: 2242910 - RNA, 12 nt, Human
acuugccucuuc

SEQ ID NO: 2242911 - RNA, 14 nt, Human
acuuggaagcuccg

SEQ ID NO: 2242912 - RNA, 11 nt, Human
acuuggagcca

SEQ ID NO: 2242913 - RNA, 18 nt, Human
acuuggacucuugcucuu

SEQ ID NO: 2242914 - RNA, 19 nt, Human
acuuggacucuugcucuuu

SEQ ID NO: 2242915 - RNA, 15 nt, Human
acuuggacucuugcu

SEQ ID NO: 2242916 - RNA, 16 nt, Human
acuuggacucuugcuc

SEQ ID NO: 2242917 - RNA, 22 nt, Human
acuuggaauuuguaaccucagc

SEQ ID NO: 2242918 - RNA, 23 nt, Human
acuuggaauuuguaaccucagcu

SEQ ID NO: 2242919 - RNA, 22 nt, Human
acuuggaaaaauccagaaagaa

SEQ ID NO: 2242920 - RNA, 16 nt, Human
acuuggaauuuguaac

SEQ ID NO: 2242921 - RNA, 18 nt, Human
acuuggaauuuguaaccu

SEQ ID NO: 2242922 - RNA, 21 nt, Human
acuuggaauuuguaaccucag

SEQ ID NO: 2242923 - RNA, 15 nt, Human
acuugaguuuuauuu

SEQ ID NO: 2242924 - RNA, 21 nt, Human
acuugaguuuuauuuauuuua

SEQ ID NO: 2242925 - RNA, 19 nt, Human
acuugcauccaacuccagg

SEQ ID NO: 2242926 - RNA, 11 nt, Human
acuugcauuuc

SEQ ID NO: 2242927 - RNA, 14 nt, Human
acuugcauuuuugc

SEQ ID NO: 2242928 - RNA, 13 nt, Human
acuugcaucugug

SEQ ID NO: 2242929 - RNA, 15 nt, Human
acuugcauggagcag

SEQ ID NO: 2242930 - RNA, 19 nt, Human
acuugcauugaauauauua

SEQ ID NO: 2242931 - RNA, 19 nt, Human
acuugcauuuuugcaggag

SEQ ID NO: 2242932 - RNA, 18 nt, Human
acuugcauuuuugcagga

SEQ ID NO: 2242933 - RNA, 17 nt, Human
acuugcauuuuugcagg

SEQ ID NO: 2242934 - RNA, 21 nt, Human
acuugcccacaccgagggcga

SEQ ID NO: 2242935 - RNA, 19 nt, Human
acuuggagccaaggguuca

SEQ ID NO: 2242936 - RNA, 14 nt, Human
acuuggagccaagg

SEQ ID NO: 2242937 - RNA, 14 nt, Human
acuuggagccccag

SEQ ID NO: 2242938 - RNA, 21 nt, Human
acuuggacuuguccucagcag

SEQ ID NO: 2242939 - RNA, 14 nt, Human
acuuguauauuuua

SEQ ID NO: 2242940 - RNA, 14 nt, Human
acuuguaugaaaga

SEQ ID NO: 2242941 - RNA, 19 nt, Human
acuuguauauuuguacaaa

SEQ ID NO: 2242942 - RNA, 20 nt, Human
acuuguauauuuuaagaaau

SEQ ID NO: 2242943 - RNA, 13 nt, Human
acuuguauuaugu

SEQ ID NO: 2242944 - RNA, 14 nt, Human
acuuguauuaugug

SEQ ID NO: 2242945 - RNA, 18 nt, Human
acuuguauuaaagacaga

SEQ ID NO: 2242946 - RNA, 23 nt, Human
acuuguccuuuuguaccauggug

SEQ ID NO: 2242947 - RNA, 15 nt, Human
acuuguauuaugugu

SEQ ID NO: 2242948 - RNA, 14 nt, Human
acuugucuuuggac

SEQ ID NO: 2242949 - RNA, 16 nt, Human
acuugucuauuaccug

SEQ ID NO: 2242950 - RNA, 15 nt, Human
acuugucuaaauaag

SEQ ID NO: 2242951 - RNA, 19 nt, Human
acuugucuaaauaaguuug

SEQ ID NO: 2242952 - RNA, 20 nt, Human
acuugucuaaauaaguuugc

SEQ ID NO: 2242953 - RNA, 22 nt, Human
acuugucuaaauaaguuugcaa

SEQ ID NO: 2242954 - RNA, 17 nt, Human
acuugacagaacacugu

SEQ ID NO: 2242955 - RNA, 18 nt, Human
acuugaauuuucccacug

SEQ ID NO: 2242956 - RNA, 19 nt, Human
acuugaauuuucccacugc

SEQ ID NO: 2242957 - RNA, 18 nt, Human
acuugacagaacacuguc

SEQ ID NO: 2242958 - RNA, 20 nt, Human
acuugacagaacacugucuu

SEQ ID NO: 2242959 - RNA, 19 nt, Human
acuugacccccuugagggu

SEQ ID NO: 2242960 - RNA, 20 nt, Human
acuugaauuuucccacugca

SEQ ID NO: 2242961 - RNA, 17 nt, Human
acuugacuuuuaaggcu

SEQ ID NO: 2242962 - RNA, 18 nt, Human
acuugaggauuuugagua

SEQ ID NO: 2242963 - RNA, 12 nt, Human
acuugaggauuu

SEQ ID NO: 2242964 - RNA, 19 nt, Human
acuugagaauuacccuuuu

SEQ ID NO: 2242965 - RNA, 17 nt, Human
acuugaggguaauaaac

SEQ ID NO: 2242966 - RNA, 18 nt, Human
acuugaggguaauaaacu

SEQ ID NO: 2242967 - RNA, 19 nt, Human
acuugaggguaauaaacuu

SEQ ID NO: 2242968 - RNA, 15 nt, Human
acuugagggcccaga

SEQ ID NO: 2242969 - RNA, 16 nt, Human
acuugagggcccagag

SEQ ID NO: 2242970 - RNA, 17 nt, Human
acuugagggcccagagc

SEQ ID NO: 2242971 - RNA, 18 nt, Human
acuugagggcccagagca

SEQ ID NO: 2242972 - RNA, 19 nt, Human
acuugagggcccagagcag

SEQ ID NO: 2242973 - RNA, 20 nt, Human
acuugagggcccagagcagg

SEQ ID NO: 2242974 - RNA, 21 nt, Human
acuugagggcccagagcagga

SEQ ID NO: 2242975 - RNA, 15 nt, Human
acuugaggguaauaa

SEQ ID NO: 2242976 - RNA, 20 nt, Human
acuugaaagcauccaugugu

SEQ ID NO: 2242977 - RNA, 18 nt, Human
acuugaaauaccagugaa

SEQ ID NO: 2242978 - RNA, 18 nt, Human
acuugaaagcauccaugu

SEQ ID NO: 2242979 - RNA, 14 nt, Human
acuugaaagcaucc

SEQ ID NO: 2242980 - RNA, 18 nt, Human
acuugaaaucuaggauua

SEQ ID NO: 2242981 - RNA, 19 nt, Human
acuugaaauaccagugaac

SEQ ID NO: 2242982 - RNA, 23 nt, Human
acuugaacccgggaggcagaggu

SEQ ID NO: 2242983 - RNA, 13 nt, Human
acuugaaagcauc

SEQ ID NO: 2242984 - RNA, 16 nt, Human
acuugaaaauuaacau

SEQ ID NO: 2242985 - RNA, 18 nt, Human
acuugaaaauuaacauga

SEQ ID NO: 2242986 - RNA, 17 nt, Human
acuugaaaauuaacaug

SEQ ID NO: 2242987 - RNA, 20 nt, Human
acuucucuggaaagggggga

SEQ ID NO: 2242988 - RNA, 13 nt, Human
acuucucugaagg

SEQ ID NO: 2242989 - RNA, 14 nt, Human
acuucucugaaggg

SEQ ID NO: 2242990 - RNA, 17 nt, Human
acuucucugaagggagg

SEQ ID NO: 2242991 - RNA, 10 nt, Human
acuucuccca

SEQ ID NO: 2242992 - RNA, 13 nt, Human
acuucuccagccu

SEQ ID NO: 2242993 - RNA, 15 nt, Human
acuucuccagccuag

SEQ ID NO: 2242994 - RNA, 16 nt, Human
acuucuccaggucuca

SEQ ID NO: 2242995 - RNA, 22 nt, Human
acuucuccauccuuucugccuc

SEQ ID NO: 2242996 - RNA, 22 nt, Human
acuucggcagauacugucucuu

SEQ ID NO: 2242997 - RNA, 22 nt, Human
acuucuccagacccaccacacc

SEQ ID NO: 2242998 - RNA, 21 nt, Human
acuucuaaguaaaaccacagc

SEQ ID NO: 2242999 - RNA, 18 nt, Human
acuucuccacccugcucu

SEQ ID NO: 2243000 - RNA, 20 nt, Human
acuucgcaucaaaagacaau

SEQ ID NO: 2243001 - RNA, 22 nt, Human
acuucgcaucaaaagacaauuc

SEQ ID NO: 2243002 - RNA, 23 nt, Human
acuucgcaucaaaagacaauucu

SEQ ID NO: 2243003 - RNA, 24 nt, Human
acuucgcaucaaaagacaauucuu

SEQ ID NO: 2243004 - RNA, 13 nt, Human
acuucuaaguaaa

SEQ ID NO: 2243005 - RNA, 19 nt, Human
acuucuaaguaaaaccaca

SEQ ID NO: 2243006 - RNA, 18 nt, Human
acuucuaaguaaaaccac

SEQ ID NO: 2243007 - RNA, 18 nt, Human
acuuccuccuccccacuu

SEQ ID NO: 2243008 - RNA, 15 nt, Human
acuuccuccucccca

SEQ ID NO: 2243009 - RNA, 17 nt, Human
acuuccuccuccccacu

SEQ ID NO: 2243010 - RNA, 22 nt, Human
acuucccuuucugcuuguguua

SEQ ID NO: 2243011 - RNA, 16 nt, Human
ucucacuccuaccugg

SEQ ID NO: 2243012 - RNA, 17 nt, Human
ucucacuccuaccuggu

SEQ ID NO: 2243013 - RNA, 18 nt, Human
ucucacuccuaccuggua

SEQ ID NO: 2243014 - RNA, 14 nt, Human
acuucccuuucugc

SEQ ID NO: 2243015 - RNA, 20 nt, Human
acuucgggaggucgaggcag

SEQ ID NO: 2243016 - RNA, 17 nt, Human
acuucgggaggucgagg

SEQ ID NO: 2243017 - RNA, 12 nt, Human
acuuccugccua

SEQ ID NO: 2243018 - RNA, 14 nt, Human
acuuccuguccaga

SEQ ID NO: 2243019 - RNA, 14 nt, Human
acuucgacugugac

SEQ ID NO: 2243020 - RNA, 16 nt, Human
acuucgcaucaaaaga

SEQ ID NO: 2243021 - RNA, 17 nt, Human
acuucgcaucaaaagac

SEQ ID NO: 2243022 - RNA, 13 nt, Human
acuuccuguccag

SEQ ID NO: 2243023 - RNA, 12 nt, Human
acuuccugucca

SEQ ID NO: 2243024 - RNA, 13 nt, Human
ucuauauauaauu

SEQ ID NO: 2243025 - RNA, 14 nt, Human
ucuauauauaauuc

SEQ ID NO: 2243026 - RNA, 18 nt, Human
ucuauauauaauucugua

SEQ ID NO: 2243027 - RNA, 19 nt, Human
ucuauauauaauucuguac

SEQ ID NO: 2243028 - RNA, 20 nt, Human
ucuauauauaauucuguaca

SEQ ID NO: 2243029 - RNA, 21 nt, Human
ucuauauauaauucuguacau

SEQ ID NO: 2243030 - RNA, 23 nt, Human
ucuauauauaauucuguacauag

SEQ ID NO: 2243031 - RNA, 14 nt, Human
ucuauauaugugua

SEQ ID NO: 2243032 - RNA, 15 nt, Human
ucuauauauguguau

SEQ ID NO: 2243033 - RNA, 18 nt, Human
ucuauuggguucauuauu

SEQ ID NO: 2243034 - RNA, 17 nt, Human
ucuauuggguucauuau

SEQ ID NO: 2243035 - RNA, 16 nt, Human
ucuauuggguucauua

SEQ ID NO: 2243036 - RNA, 15 nt, Human
ucuauuggguucauu

SEQ ID NO: 2243037 - RNA, 16 nt, Human
ucuauauauguguaug

SEQ ID NO: 2243038 - RNA, 19 nt, Human
ucuauauauguguauguac

SEQ ID NO: 2243039 - RNA, 12 nt, Human
ucuauaugaauu

SEQ ID NO: 2243040 - RNA, 14 nt, Human
ucuauaugaauuua

SEQ ID NO: 2243041 - RNA, 22 nt, Human
ucuauuggguucauuauuggaa

SEQ ID NO: 2243042 - RNA, 14 nt, Human
ucuauuguagcauu

SEQ ID NO: 2243043 - RNA, 13 nt, Human
ucuauuguacaga

SEQ ID NO: 2243044 - RNA, 15 nt, Human
ucuauuguagcauuu

SEQ ID NO: 2243045 - RNA, 17 nt, Human
ucuauuguagcauuucu

SEQ ID NO: 2243046 - RNA, 18 nt, Human
ucuauuguagcauuucuu

SEQ ID NO: 2243047 - RNA, 19 nt, Human
ucuauuguagcauuucuug

SEQ ID NO: 2243048 - RNA, 16 nt, Human
ucucaaaaaaagaaaa

SEQ ID NO: 2243049 - RNA, 12 nt, Human
ucuauuuaagcc

SEQ ID NO: 2243050 - RNA, 17 nt, Human
ucuauuguuuauucuuu

SEQ ID NO: 2243051 - RNA, 16 nt, Human
ucuauuguuucuuuca

SEQ ID NO: 2243052 - RNA, 22 nt, Human
ucuauuguuguacacagaaaua

SEQ ID NO: 2243053 - RNA, 20 nt, Human
ucuauuguagcauuucuuga

SEQ ID NO: 2243054 - RNA, 12 nt, Human
ucuauuguuacu

SEQ ID NO: 2243055 - RNA, 23 nt, Human
ucuauuguuguacacagaaauac

SEQ ID NO: 2243056 - RNA, 16 nt, Human
ucuauuguuacucugg

SEQ ID NO: 2243057 - RNA, 16 nt, Human
ucuauuguuuauucuu

SEQ ID NO: 2243058 - RNA, 12 nt, Human
ucucacaguggg

SEQ ID NO: 2243059 - RNA, 14 nt, Human
ucucaaaaauaaau

SEQ ID NO: 2243060 - RNA, 19 nt, Human
ucucacagugggagccagg

SEQ ID NO: 2243061 - RNA, 21 nt, Human
ucucacagugggagccagggc

SEQ ID NO: 2243062 - RNA, 22 nt, Human
ucucacagugggagccagggcu

SEQ ID NO: 2243063 - RNA, 23 nt, Human
ucucacagugggagccagggcug

SEQ ID NO: 2243064 - RNA, 14 nt, Human
ucuauuuuuguaga

SEQ ID NO: 2243065 - RNA, 13 nt, Human
ucuauuuuugucu

SEQ ID NO: 2243066 - RNA, 13 nt, Human
ucucaaaaaauaa

SEQ ID NO: 2243067 - RNA, 22 nt, Human
ucucaaaaaaaaaaaaaugcac

SEQ ID NO: 2243068 - RNA, 17 nt, Human
ucucaaaacugcacugu

SEQ ID NO: 2243069 - RNA, 17 nt, Human
ucucacuccaccaccca

SEQ ID NO: 2243070 - RNA, 18 nt, Human
ucucacuccaccacccaa

SEQ ID NO: 2243071 - RNA, 13 nt, Human
ucucacuccuacc

SEQ ID NO: 2243072 - RNA, 15 nt, Human
ucucacuccaccacc

SEQ ID NO: 2243073 - RNA, 14 nt, Human
ucucacuccaccac

SEQ ID NO: 2243074 - RNA, 13 nt, Human
ucucacuccacca

SEQ ID NO: 2243075 - RNA, 12 nt, Human
ucucacuccacc

SEQ ID NO: 2243076 - RNA, 12 nt, Human
ucucaccaggaa

SEQ ID NO: 2243077 - RNA, 15 nt, Human
ucucaccaggaaggg

SEQ ID NO: 2243078 - RNA, 23 nt, Human
ucucacauggugcuacgccugca

SEQ ID NO: 2243079 - RNA, 22 nt, Human
ucucacauggugcuacgccugc

SEQ ID NO: 2243080 - RNA, 17 nt, Human
ucuagcuggugguuuca

SEQ ID NO: 2243081 - RNA, 18 nt, Human
ucuagcuguugagcuguu

SEQ ID NO: 2243082 - RNA, 19 nt, Human
ucuagcuguugagcuguuu

SEQ ID NO: 2243083 - RNA, 11 nt, Human
ucuagcuguug

SEQ ID NO: 2243084 - RNA, 21 nt, Human
ucuagcugggggugggccagg

SEQ ID NO: 2243085 - RNA, 22 nt, Human
ucuaguggucuuuguaagagug

SEQ ID NO: 2243086 - RNA, 23 nt, Human
ucuaguggucuuuguaagagugu

SEQ ID NO: 2243087 - RNA, 13 nt, Human
ucuaguuugcauu

SEQ ID NO: 2243088 - RNA, 23 nt, Human
ucuaguuugauuaaauucuugca

SEQ ID NO: 2243089 - RNA, 21 nt, Human
ucuauaggaacauaugaaaau

SEQ ID NO: 2243090 - RNA, 20 nt, Human
ucuauaggaacauaugaaaa

SEQ ID NO: 2243091 - RNA, 18 nt, Human
ucuauaggaacauaugaa

SEQ ID NO: 2243092 - RNA, 15 nt, Human
ucuauacauaucuuu

SEQ ID NO: 2243093 - RNA, 18 nt, Human
ucuauacauaucuuuauu

SEQ ID NO: 2243094 - RNA, 19 nt, Human
ucuauaaucccagcacuuu

SEQ ID NO: 2243095 - RNA, 20 nt, Human
ucuauaaucccagcacuuug

SEQ ID NO: 2243096 - RNA, 21 nt, Human
ucuauaaucccagcacuuugg

SEQ ID NO: 2243097 - RNA, 13 nt, Human
ucuaguuuuguca

SEQ ID NO: 2243098 - RNA, 15 nt, Human
ucuaguuugcauucc

SEQ ID NO: 2243099 - RNA, 18 nt, Human
ucuaguuugcauuccuga

SEQ ID NO: 2243100 - RNA, 11 nt, Human
ucuaguuuuca

SEQ ID NO: 2243101 - RNA, 12 nt, Human
ucuaguuuucag

SEQ ID NO: 2243102 - RNA, 14 nt, Human
ucuaguuuucaguu

SEQ ID NO: 2243103 - RNA, 17 nt, Human
ucuaguuuucaguuugu

SEQ ID NO: 2243104 - RNA, 18 nt, Human
ucuaguuuucaguuugua

SEQ ID NO: 2243105 - RNA, 20 nt, Human
ucuaguuuucaguuuguaua

SEQ ID NO: 2243106 - RNA, 13 nt, Human
ucuauaauuuaaa

SEQ ID NO: 2243107 - RNA, 19 nt, Human
acuucccauuuuggaaguu

SEQ ID NO: 2243108 - RNA, 24 nt, Human
ucuagauacuguaucaugacaaag

SEQ ID NO: 2243109 - RNA, 24 nt, Human
acuucccaguucaggagucccaag

SEQ ID NO: 2243110 - RNA, 23 nt, Human
acuucccaguucaggagucccaa

SEQ ID NO: 2243111 - RNA, 22 nt, Human
acuucccaguucaggaguccca

SEQ ID NO: 2243112 - RNA, 20 nt, Human
acuuccauggcccucauuaa

SEQ ID NO: 2243113 - RNA, 20 nt, Human
acuucccacucuagggcagu

SEQ ID NO: 2243114 - RNA, 17 nt, Human
acuucccagugaauucu

SEQ ID NO: 2243115 - RNA, 21 nt, Human
ucuagauuacccccucauugu

SEQ ID NO: 2243116 - RNA, 20 nt, Human
ucuagauggcuccucucagu

SEQ ID NO: 2243117 - RNA, 19 nt, Human
ucuagauggcuccucucag

SEQ ID NO: 2243118 - RNA, 18 nt, Human
ucuagauggcuccucuca

SEQ ID NO: 2243119 - RNA, 23 nt, Human
ucuagaugaaguuuuacauuguu

SEQ ID NO: 2243120 - RNA, 22 nt, Human
ucuagaugaaguuuuacauugu

SEQ ID NO: 2243121 - RNA, 15 nt, Human
ucuagauaucgacuu

SEQ ID NO: 2243122 - RNA, 21 nt, Human
ucuagaugaaguuuuacauug

SEQ ID NO: 2243123 - RNA, 20 nt, Human
ucuagaugaaguuuuacauu

SEQ ID NO: 2243124 - RNA, 19 nt, Human
ucuagaugaaguuuuacau

SEQ ID NO: 2243125 - RNA, 16 nt, Human
ucuagcuagaaauaug

SEQ ID NO: 2243126 - RNA, 21 nt, Human
ucuagcuagaaauaugauuuu

SEQ ID NO: 2243127 - RNA, 23 nt, Human
ucuagcuagaaauaugauuuuau

SEQ ID NO: 2243128 - RNA, 12 nt, Human
ucuagccugggc

SEQ ID NO: 2243129 - RNA, 13 nt, Human
ucuagcccaugga

SEQ ID NO: 2243130 - RNA, 23 nt, Human
ucuagauuacccccucauuguuu

SEQ ID NO: 2243131 - RNA, 15 nt, Human
ucuagauugagagaa

SEQ ID NO: 2243132 - RNA, 16 nt, Human
ucuagcaaauguuaug

SEQ ID NO: 2243133 - RNA, 23 nt, Human
ucuagcaaucacaacacuggcug

SEQ ID NO: 2243134 - RNA, 15 nt, Human
ucuagcaaauguuau

SEQ ID NO: 2243135 - RNA, 19 nt, Human
ucuagauuuuguuuugcuu

SEQ ID NO: 2243136 - RNA, 17 nt, Human
ucuagcacuggccugca

SEQ ID NO: 2243137 - RNA, 14 nt, Human
ucuagcacuggccu

SEQ ID NO: 2243138 - RNA, 15 nt, Human
ucuagcacuggccug

SEQ ID NO: 2243139 - RNA, 16 nt, Human
ucuagcacuggccugc

SEQ ID NO: 2243140 - RNA, 19 nt, Human
acuucaucuucucagcucc

SEQ ID NO: 2243141 - RNA, 15 nt, Human
acuucaucuucucag

SEQ ID NO: 2243142 - RNA, 16 nt, Human
acuucaucuucucagc

SEQ ID NO: 2243143 - RNA, 14 nt, Human
acuucauucuugaa

SEQ ID NO: 2243144 - RNA, 15 nt, Human
acuucauucuugaaa

SEQ ID NO: 2243145 - RNA, 17 nt, Human
acuucauuaauaauaaa

SEQ ID NO: 2243146 - RNA, 19 nt, Human
acuucauucuugaaagcug

SEQ ID NO: 2243147 - RNA, 21 nt, Human
acuucauucuugaaagcugug

SEQ ID NO: 2243148 - RNA, 14 nt, Human
acuucaugucaacu

SEQ ID NO: 2243149 - RNA, 21 nt, Human
acuucauugagaguuuugucu

SEQ ID NO: 2243150 - RNA, 20 nt, Human
acuuccaaaccugacagaug

SEQ ID NO: 2243151 - RNA, 14 nt, Human
acuuaucuuaugcc

SEQ ID NO: 2243152 - RNA, 20 nt, Human
acuucaggcucuucuccuuu

SEQ ID NO: 2243153 - RNA, 17 nt, Human
acuucaggcucuucucc

SEQ ID NO: 2243154 - RNA, 18 nt, Human
acuucaggcucuucuccu

SEQ ID NO: 2243155 - RNA, 23 nt, Human
acuucagggcagggcucugauau

SEQ ID NO: 2243156 - RNA, 21 nt, Human
acuucagggcagggcucugau

SEQ ID NO: 2243157 - RNA, 15 nt, Human
acuucaggggcugcc

SEQ ID NO: 2243158 - RNA, 20 nt, Human
acuucagggcagggcucuga

SEQ ID NO: 2243159 - RNA, 19 nt, Human
acuucagggcagggcucug

SEQ ID NO: 2243160 - RNA, 20 nt, Human
acuuccagugcaacacugaa

SEQ ID NO: 2243161 - RNA, 16 nt, Human
acuuccauacagcucu

SEQ ID NO: 2243162 - RNA, 17 nt, Human
acuuccauacagcucua

SEQ ID NO: 2243163 - RNA, 17 nt, Human
acuuccauaaucuggac

SEQ ID NO: 2243164 - RNA, 17 nt, Human
acuuccaugaggccaaa

SEQ ID NO: 2243165 - RNA, 18 nt, Human
acuuccauggcccucauu

SEQ ID NO: 2243166 - RNA, 17 nt, Human
acuuccauggcccucau

SEQ ID NO: 2243167 - RNA, 21 nt, Human
acuuccagguguuacuguaau

SEQ ID NO: 2243168 - RNA, 20 nt, Human
acuuccagguguuacuguaa

SEQ ID NO: 2243169 - RNA, 20 nt, Human
acuuccagauccuggaaauc

SEQ ID NO: 2243170 - RNA, 18 nt, Human
acuuccaccagccugcac

SEQ ID NO: 2243171 - RNA, 16 nt, Human
acuuccaccagccugc

SEQ ID NO: 2243172 - RNA, 15 nt, Human
acuuccaccagccug

SEQ ID NO: 2243173 - RNA, 14 nt, Human
acuuccaccagccu

SEQ ID NO: 2243174 - RNA, 17 nt, Human
acuuccacugccauccu

SEQ ID NO: 2243175 - RNA, 21 nt, Human
acuuccaaauccccuaagcag

SEQ ID NO: 2243176 - RNA, 19 nt, Human
acuuccaaauccccuaagc

SEQ ID NO: 2243177 - RNA, 18 nt, Human
acuuccaauuuacauacu

SEQ ID NO: 2243178 - RNA, 20 nt, Human
acuuagagguggggagcaga

SEQ ID NO: 2243179 - RNA, 15 nt, Human
acuuacuguacauga

SEQ ID NO: 2243180 - RNA, 14 nt, Human
acuuacuguacaug

SEQ ID NO: 2243181 - RNA, 13 nt, Human
acuuacuguacau

SEQ ID NO: 2243182 - RNA, 12 nt, Human
ucuaccugaggg

SEQ ID NO: 2243183 - RNA, 19 nt, Human
ucuaccugaggggccucuu

SEQ ID NO: 2243184 - RNA, 15 nt, Human
ucuaccucuuggcug

SEQ ID NO: 2243185 - RNA, 12 nt, Human
ucuaccugccac

SEQ ID NO: 2243186 - RNA, 19 nt, Human
ucuaccucaggcagcucaa

SEQ ID NO: 2243187 - RNA, 16 nt, Human
ucuaccugccacucac

SEQ ID NO: 2243188 - RNA, 14 nt, Human
ucuaccugccacuc

SEQ ID NO: 2243189 - RNA, 15 nt, Human
ucuaccugccacuca

SEQ ID NO: 2243190 - RNA, 21 nt, Human
ucuaccugccacucacacagc

SEQ ID NO: 2243191 - RNA, 18 nt, Human
acuuauccuaaaacaaau

SEQ ID NO: 2243192 - RNA, 19 nt, Human
acuuauccuaaaacaaaua

SEQ ID NO: 2243193 - RNA, 20 nt, Human
acuuaucauccacauuguuu

SEQ ID NO: 2243194 - RNA, 22 nt, Human
acuuaucauccacauuguuuua

SEQ ID NO: 2243195 - RNA, 15 nt, Human
acuuaucccucucca

SEQ ID NO: 2243196 - RNA, 16 nt, Human
acuucaggcucuucuc

SEQ ID NO: 2243197 - RNA, 14 nt, Human
acuuaucccucucc

SEQ ID NO: 2243198 - RNA, 16 nt, Human
acuuaucucucugugc

SEQ ID NO: 2243199 - RNA, 17 nt, Human
acuuaucucucugugcu

SEQ ID NO: 2243200 - RNA, 22 nt, Human
acuuaucucucugugcugugga

SEQ ID NO: 2243201 - RNA, 19 nt, Human
acuuaucauccacauuguu

SEQ ID NO: 2243202 - RNA, 21 nt, Human
acuuauauuguaagaaauacu

SEQ ID NO: 2243203 - RNA, 20 nt, Human
acuuauauuguaagaaauac

SEQ ID NO: 2243204 - RNA, 19 nt, Human
acuuauauuguaagaaaua

SEQ ID NO: 2243205 - RNA, 18 nt, Human
acuuauauuguaagaaau

SEQ ID NO: 2243206 - RNA, 17 nt, Human
acuuauauuguaagaaa

SEQ ID NO: 2243207 - RNA, 15 nt, Human
acuuauauuguaaga

SEQ ID NO: 2243208 - RNA, 21 nt, Human
acuuagaggaaauaagaaaaa

SEQ ID NO: 2243209 - RNA, 18 nt, Human
acuuagaucuccaggaga

SEQ ID NO: 2243210 - RNA, 20 nt, Human
acuguaucaugacaaagacu

SEQ ID NO: 2243211 - RNA, 16 nt, Human
acuguaucaugacaaa

SEQ ID NO: 2243212 - RNA, 20 nt, Human
acuguauuuuuaccuuuuuc

SEQ ID NO: 2243213 - RNA, 23 nt, Human
acugucaaaaaguuugguucugu

SEQ ID NO: 2243214 - RNA, 15 nt, Human
acugucaaaauaauu

SEQ ID NO: 2243215 - RNA, 21 nt, Human
acuguauuuuguauuguuuca

SEQ ID NO: 2243216 - RNA, 22 nt, Human
acuguauuugugacuaauugua

SEQ ID NO: 2243217 - RNA, 23 nt, Human
acuguauuugugacuaauuguau

SEQ ID NO: 2243218 - RNA, 13 nt, Human
acuguauuuguau

SEQ ID NO: 2243219 - RNA, 14 nt, Human
acuguauuuguauc

SEQ ID NO: 2243220 - RNA, 13 nt, Human
acuguauuuguga

SEQ ID NO: 2243221 - RNA, 14 nt, Human
acuguauuugugac

SEQ ID NO: 2243222 - RNA, 15 nt, Human
acuguauuugugacu

SEQ ID NO: 2243223 - RNA, 16 nt, Human
acuguauuugugacua

SEQ ID NO: 2243224 - RNA, 17 nt, Human
acuguauuugugacuaa

SEQ ID NO: 2243225 - RNA, 20 nt, Human
acuguauuugugacuaauug

SEQ ID NO: 2243226 - RNA, 13 nt, Human
acuguaugcugga

SEQ ID NO: 2243227 - RNA, 11 nt, Human
acuguauggaa

SEQ ID NO: 2243228 - RNA, 12 nt, Human
acuguauugaug

SEQ ID NO: 2243229 - RNA, 13 nt, Human
acuguauuaagag

SEQ ID NO: 2243230 - RNA, 21 nt, Human
acuguauuaagagugaaaauu

SEQ ID NO: 2243231 - RNA, 18 nt, Human
acuguccuccaagccagc

SEQ ID NO: 2243232 - RNA, 16 nt, Human
acuguccuccaagcca

SEQ ID NO: 2243233 - RNA, 20 nt, Human
acugucccucaaaugaccca

SEQ ID NO: 2243234 - RNA, 13 nt, Human
acugucauagaaa

SEQ ID NO: 2243235 - RNA, 12 nt, Human
acugucaggaag

SEQ ID NO: 2243236 - RNA, 16 nt, Human
acugucaggaagaaau

SEQ ID NO: 2243237 - RNA, 13 nt, Human
acugucccucaaa

SEQ ID NO: 2243238 - RNA, 15 nt, Human
acuguccagagagca

SEQ ID NO: 2243239 - RNA, 14 nt, Human
acugucccucaaau

SEQ ID NO: 2243240 - RNA, 22 nt, Human
acugucaggaagaaaucacaga

SEQ ID NO: 2243241 - RNA, 13 nt, Human
acuguccagagag

SEQ ID NO: 2243242 - RNA, 14 nt, Human
acuguccagagagc

SEQ ID NO: 2243243 - RNA, 14 nt, Human
acugucacccucca

SEQ ID NO: 2243244 - RNA, 20 nt, Human
acugucaaggcugcuuagaa

SEQ ID NO: 2243245 - RNA, 19 nt, Human
acugucaaaauaauuuuau

SEQ ID NO: 2243246 - RNA, 15 nt, Human
acugucacucauugc

SEQ ID NO: 2243247 - RNA, 14 nt, Human
acugucacucauug

SEQ ID NO: 2243248 - RNA, 22 nt, Human
acugucaaggcugcuuagaauc

SEQ ID NO: 2243249 - RNA, 21 nt, Human
acugucaaggcugcuuagaau

SEQ ID NO: 2243250 - RNA, 15 nt, Human
acugucacccuccac

SEQ ID NO: 2243251 - RNA, 17 nt, Human
acugucacccuccaccu

SEQ ID NO: 2243252 - RNA, 23 nt, Human
acugucagcuccccucggagaag

SEQ ID NO: 2243253 - RNA, 22 nt, Human
acugucagcuccccucggagaa

SEQ ID NO: 2243254 - RNA, 18 nt, Human
acuguacuuaauaaauuc

SEQ ID NO: 2243255 - RNA, 17 nt, Human
acuguacuuaauaaauu

SEQ ID NO: 2243256 - RNA, 16 nt, Human
acuguacuucacuguc

SEQ ID NO: 2243257 - RNA, 13 nt, Human
acuguacuucacu

SEQ ID NO: 2243258 - RNA, 15 nt, Human
acuguacuucacugu

SEQ ID NO: 2243259 - RNA, 23 nt, Human
acuguacuugcucuugaugccug

SEQ ID NO: 2243260 - RNA, 14 nt, Human
acuguaucaugaca

SEQ ID NO: 2243261 - RNA, 20 nt, Human
acuguacuccucccaggcgc

SEQ ID NO: 2243262 - RNA, 15 nt, Human
acuguacuccuccca

SEQ ID NO: 2243263 - RNA, 22 nt, Human
acuguacaaugacuuuauugca

SEQ ID NO: 2243264 - RNA, 15 nt, Human
acuguacuugcucuu

SEQ ID NO: 2243265 - RNA, 21 nt, Human
acuguacaugaaaacacauuu

SEQ ID NO: 2243266 - RNA, 20 nt, Human
acuguacaugaaaacacauu

SEQ ID NO: 2243267 - RNA, 18 nt, Human
acuguacagacagaaaaa

SEQ ID NO: 2243268 - RNA, 16 nt, Human
acuguacaugaaaaca

SEQ ID NO: 2243269 - RNA, 19 nt, Human
acuguacaugaaaacacau

SEQ ID NO: 2243270 - RNA, 22 nt, Human
acuguacaaaguagaagucuua

SEQ ID NO: 2243271 - RNA, 16 nt, Human
acuguacaaaguagaa

SEQ ID NO: 2243272 - RNA, 17 nt, Human
acuggguacuuguggac

SEQ ID NO: 2243273 - RNA, 18 nt, Human
acuggguacuuguggaca

SEQ ID NO: 2243274 - RNA, 16 nt, Human
acugaaauauacacac

SEQ ID NO: 2243275 - RNA, 15 nt, Human
acugaaauauacaca

SEQ ID NO: 2243276 - RNA, 13 nt, Human
acugaaagguuac

SEQ ID NO: 2243277 - RNA, 22 nt, Human
acugaacaaacuaucagaggaa

SEQ ID NO: 2243278 - RNA, 17 nt, Human
acugaaauauacacaca

SEQ ID NO: 2243279 - RNA, 22 nt, Human
acugaagaagcaccaaucauga

SEQ ID NO: 2243280 - RNA, 18 nt, Human
acugaagccagaaauaaa

SEQ ID NO: 2243281 - RNA, 21 nt, Human
acugaagcagccucuccccag

SEQ ID NO: 2243282 - RNA, 13 nt, Human
acugaagcagccu

SEQ ID NO: 2243283 - RNA, 14 nt, Human
acugaagcagccuc

SEQ ID NO: 2243284 - RNA, 19 nt, Human
acugaagccugcaggaguu

SEQ ID NO: 2243285 - RNA, 16 nt, Human
acugaagccugcagga

SEQ ID NO: 2243286 - RNA, 15 nt, Human
ucgccccagaucacc

SEQ ID NO: 2243287 - RNA, 15 nt, Human
acugaagccugcagg

SEQ ID NO: 2243288 - RNA, 14 nt, Human
acugaagccugcag

SEQ ID NO: 2243289 - RNA, 12 nt, Human
acugaagccugc

SEQ ID NO: 2243290 - RNA, 20 nt, Human
ucgccccagcaggugcugac

SEQ ID NO: 2243291 - RNA, 22 nt, Human
ucgccccagaucaccagcccgg

SEQ ID NO: 2243292 - RNA, 13 nt, Human
ucgcccccaccuc

SEQ ID NO: 2243293 - RNA, 14 nt, Human
ucgccccagcaggu

SEQ ID NO: 2243294 - RNA, 18 nt, Human
ucgccccagaucaccagc

SEQ ID NO: 2243295 - RNA, 20 nt, Human
ucgccccagaucaccagccc

SEQ ID NO: 2243296 - RNA, 11 nt, Human
ucgcccgccca

SEQ ID NO: 2243297 - RNA, 13 nt, Human
ucgcccgcccacu

SEQ ID NO: 2243298 - RNA, 15 nt, Human
ucgcccgcccacugu

SEQ ID NO: 2243299 - RNA, 17 nt, Human
ucgcccgcccacugucc

SEQ ID NO: 2243300 - RNA, 18 nt, Human
ucgcccgcccacuguccu

SEQ ID NO: 2243301 - RNA, 19 nt, Human
ucgcccgcccacuguccug

SEQ ID NO: 2243302 - RNA, 20 nt, Human
ucgcccgcccacuguccugg

SEQ ID NO: 2243303 - RNA, 17 nt, Human
ucgcccucccaggcucu

SEQ ID NO: 2243304 - RNA, 13 nt, Human
ucgcccucccagg

SEQ ID NO: 2243305 - RNA, 21 nt, Human
ucgcccgcccacuguccuggg

SEQ ID NO: 2243306 - RNA, 22 nt, Human
ucgcccgcccacuguccugggc

SEQ ID NO: 2243307 - RNA, 18 nt, Human
ucgcccuggacugugugc

SEQ ID NO: 2243308 - RNA, 14 nt, Human
ucgcccucccaggc

SEQ ID NO: 2243309 - RNA, 23 nt, Human
ucgcccgcccacuguccugggcg

SEQ ID NO: 2243310 - RNA, 14 nt, Human
ucgccguggcugcg

SEQ ID NO: 2243311 - RNA, 15 nt, Human
ucgccgucugugaau

SEQ ID NO: 2243312 - RNA, 14 nt, Human
ucgcuccugugucu

SEQ ID NO: 2243313 - RNA, 12 nt, Human
ucgccuguaauc

SEQ ID NO: 2243314 - RNA, 15 nt, Human
ucgcucugcuggccu

SEQ ID NO: 2243315 - RNA, 17 nt, Human
ucgcucugcuggccugg

SEQ ID NO: 2243316 - RNA, 20 nt, Human
ucgcucugcuggccuggccg

SEQ ID NO: 2243317 - RNA, 21 nt, Human
ucgcucugcuggccuggccgg

SEQ ID NO: 2243318 - RNA, 23 nt, Human
ucgcucugcuggccuggccggca

SEQ ID NO: 2243319 - RNA, 17 nt, Human
ucgccguugaagaggaa

SEQ ID NO: 2243320 - RNA, 11 nt, Human
ucgccugacaa

SEQ ID NO: 2243321 - RNA, 20 nt, Human
ucgccugacaaccacugguc

SEQ ID NO: 2243322 - RNA, 21 nt, Human
ucgccugacaaccacuggucu

SEQ ID NO: 2243323 - RNA, 22 nt, Human
ucgccugacaaccacuggucug

SEQ ID NO: 2243324 - RNA, 14 nt, Human
ucgccuggccugag

SEQ ID NO: 2243325 - RNA, 15 nt, Human
ucgccuggccugagg

SEQ ID NO: 2243326 - RNA, 16 nt, Human
ucgcugugguuguuuu

SEQ ID NO: 2243327 - RNA, 13 nt, Human
acugggcccugcc

SEQ ID NO: 2243328 - RNA, 16 nt, Human
acugggcccugccucu

SEQ ID NO: 2243329 - RNA, 16 nt, Human
acugggcugaacacuc

SEQ ID NO: 2243330 - RNA, 23 nt, Human
ucgcuggacucucagucucugag

SEQ ID NO: 2243331 - RNA, 16 nt, Human
ucgcugucacaggcgg

SEQ ID NO: 2243332 - RNA, 23 nt, Human
ucgcugugucagcauagaaguaa

SEQ ID NO: 2243333 - RNA, 21 nt, Human
ucgcucuguugcccaggcugg

SEQ ID NO: 2243334 - RNA, 18 nt, Human
ucgcucugucacccaggc

SEQ ID NO: 2243335 - RNA, 22 nt, Human
ucgcucugucacccaggcugga

SEQ ID NO: 2243336 - RNA, 22 nt, Human
ucgcugauauauguguuuuuca

SEQ ID NO: 2243337 - RNA, 14 nt, Human
ucgcugaugcuggg

SEQ ID NO: 2243338 - RNA, 19 nt, Human
ucgcugauauauguguuuu

SEQ ID NO: 2243339 - RNA, 22 nt, Human
ucgcuggacucucagucucuga

SEQ ID NO: 2243340 - RNA, 20 nt, Human
ucgcuggacucucagucucu

SEQ ID NO: 2243341 - RNA, 20 nt, Human
ucgcugccagcucuguauca

SEQ ID NO: 2243342 - RNA, 11 nt, Human
ucgcugcugcg

SEQ ID NO: 2243343 - RNA, 19 nt, Human
ucgcugccagcucuguauc

SEQ ID NO: 2243344 - RNA, 20 nt, Human
ucgcugaugcugggcugggu

SEQ ID NO: 2243345 - RNA, 22 nt, Human
ucgcugaugcugggcugggugc

SEQ ID NO: 2243346 - RNA, 16 nt, Human
ucgcugaugcugggcu

SEQ ID NO: 2243347 - RNA, 17 nt, Human
ucgcugaugcugggcug

SEQ ID NO: 2243348 - RNA, 18 nt, Human
ucgcugaugcugggcugg

SEQ ID NO: 2243349 - RNA, 19 nt, Human
ucgcugaugcugggcuggg

SEQ ID NO: 2243350 - RNA, 13 nt, Human
acugggggagggg

SEQ ID NO: 2243351 - RNA, 13 nt, Human
acuggggggcuug

SEQ ID NO: 2243352 - RNA, 16 nt, Human
acuggggcuggcacaa

SEQ ID NO: 2243353 - RNA, 17 nt, Human
acuggggccuccagaac

SEQ ID NO: 2243354 - RNA, 14 nt, Human
acuggggcugaagg

SEQ ID NO: 2243355 - RNA, 15 nt, Human
acuggggcuggcaca

SEQ ID NO: 2243356 - RNA, 20 nt, Human
acugggguccuggggccucg

SEQ ID NO: 2243357 - RNA, 18 nt, Human
acugggguccuggggccu

SEQ ID NO: 2243358 - RNA, 19 nt, Human
acuggggguugcgggggga

SEQ ID NO: 2243359 - RNA, 15 nt, Human
acuggggugccgccu

SEQ ID NO: 2243360 - RNA, 19 nt, Human
acuggggugccgccugccc

SEQ ID NO: 2243361 - RNA, 15 nt, Human
acuggguacuugugg

SEQ ID NO: 2243362 - RNA, 21 nt, Human
acugggcuuggggaccagagc

SEQ ID NO: 2243363 - RNA, 17 nt, Human
acugggcugagggagcc

SEQ ID NO: 2243364 - RNA, 14 nt, Human
acugggcugaggga

SEQ ID NO: 2243365 - RNA, 13 nt, Human
acugggcugaggg

SEQ ID NO: 2243366 - RNA, 21 nt, Human
acugggcugaacacuccaauu

SEQ ID NO: 2243367 - RNA, 16 nt, Human
acuggggccuccagaa

SEQ ID NO: 2243368 - RNA, 13 nt, Human
acuggggccucca

SEQ ID NO: 2243369 - RNA, 12 nt, Human
acuggggccucc

SEQ ID NO: 2243370 - RNA, 21 nt, Human
acuggggccuacagcuuugau

SEQ ID NO: 2243371 - RNA, 21 nt, Human
ucuaaagaguuuauuuuaaga

SEQ ID NO: 2243372 - RNA, 17 nt, Human
ucuaaagcugccagccg

SEQ ID NO: 2243373 - RNA, 16 nt, Human
ucuaaaggcuaccuuu

SEQ ID NO: 2243374 - RNA, 13 nt, Human
ucuaaaggcuacc

SEQ ID NO: 2243375 - RNA, 20 nt, Human
ucuaaagaguuuauuuuaag

SEQ ID NO: 2243376 - RNA, 17 nt, Human
ucuaaacuuccccaucu

SEQ ID NO: 2243377 - RNA, 17 nt, Human
ucuaaacauuaaucaau

SEQ ID NO: 2243378 - RNA, 14 nt, Human
ucuaaacugcauua

SEQ ID NO: 2243379 - RNA, 21 nt, Human
ucuaaacuggauucacagcuc

SEQ ID NO: 2243380 - RNA, 23 nt, Human
ucuaaacugcccccucugcccug

SEQ ID NO: 2243381 - RNA, 22 nt, Human
ucuaaacugcccccucugcccu

SEQ ID NO: 2243382 - RNA, 16 nt, Human
ucuaaacugcccccuc

SEQ ID NO: 2243383 - RNA, 13 nt, Human
ucuaaacugcccc

SEQ ID NO: 2243384 - RNA, 20 nt, Human
ucuaagagaacaaugugcua

SEQ ID NO: 2243385 - RNA, 12 nt, Human
ucuaagagaagu

SEQ ID NO: 2243386 - RNA, 21 nt, Human
ucuaagauaguaacaaugaag

SEQ ID NO: 2243387 - RNA, 17 nt, Human
ucuaagccuuuccauaa

SEQ ID NO: 2243388 - RNA, 16 nt, Human
ucuaagccugaagggg

SEQ ID NO: 2243389 - RNA, 15 nt, Human
ucuaagccugaaggg

SEQ ID NO: 2243390 - RNA, 14 nt, Human
ucuaagccugaagg

SEQ ID NO: 2243391 - RNA, 14 nt, Human
ucuaagcagcauuu

SEQ ID NO: 2243392 - RNA, 21 nt, Human
ucuaagauucauccauuuauu

SEQ ID NO: 2243393 - RNA, 17 nt, Human
ucuaaguuccacugagc

SEQ ID NO: 2243394 - RNA, 19 nt, Human
ucuaagucaauccaagagu

SEQ ID NO: 2243395 - RNA, 16 nt, Human
ucuaaguauuugaaac

SEQ ID NO: 2243396 - RNA, 13 nt, Human
ucuaagugauaua

SEQ ID NO: 2243397 - RNA, 14 nt, Human
ucuaagucuuucca

SEQ ID NO: 2243398 - RNA, 13 nt, Human
ucuaagucuuucc

SEQ ID NO: 2243399 - RNA, 16 nt, Human
ucuacccucccacccc

SEQ ID NO: 2243400 - RNA, 15 nt, Human
ucuacccucccaccc

SEQ ID NO: 2243401 - RNA, 18 nt, Human
ucuacccucccacccccu

SEQ ID NO: 2243402 - RNA, 21 nt, Human
ucuacccucuuagaaaaacca

SEQ ID NO: 2243403 - RNA, 14 nt, Human
ucuacauuucuuag

SEQ ID NO: 2243404 - RNA, 15 nt, Human
ucuaccccuuacuua

SEQ ID NO: 2243405 - RNA, 16 nt, Human
ucuacauauucuuuaa

SEQ ID NO: 2243406 - RNA, 15 nt, Human
ucuacaucuucugcc

SEQ ID NO: 2243407 - RNA, 15 nt, Human
ucuacauauucuuua

SEQ ID NO: 2243408 - RNA, 23 nt, Human
ucuacauacuuucauccugacuc

SEQ ID NO: 2243409 - RNA, 16 nt, Human
ucuacaucuucugccu

SEQ ID NO: 2243410 - RNA, 17 nt, Human
ucuacaucuucugccuu

SEQ ID NO: 2243411 - RNA, 19 nt, Human
ucuacaucuuuuuucacaa

SEQ ID NO: 2243412 - RNA, 22 nt, Human
ucuacaucuuuuuucacaaauu

SEQ ID NO: 2243413 - RNA, 15 nt, Human
ucuacccauauuaca

SEQ ID NO: 2243414 - RNA, 17 nt, Human
ucuaccaaaaaucucaa

SEQ ID NO: 2243415 - RNA, 22 nt, Human
acuguggggugugcacaucucu

SEQ ID NO: 2243416 - RNA, 23 nt, Human
acuguggccguuaucuggaagua

SEQ ID NO: 2243417 - RNA, 20 nt, Human
acugugggaaggccagcugc

SEQ ID NO: 2243418 - RNA, 13 nt, Human
acuguggguagac

SEQ ID NO: 2243419 - RNA, 22 nt, Human
acugugugugugaaugaacacu

SEQ ID NO: 2243420 - RNA, 18 nt, Human
acugugugugugaaugaa

SEQ ID NO: 2243421 - RNA, 16 nt, Human
acugugugugugaaug

SEQ ID NO: 2243422 - RNA, 15 nt, Human
acugugugugugaau

SEQ ID NO: 2243423 - RNA, 20 nt, Human
acuguguguggaggagucca

SEQ ID NO: 2243424 - RNA, 19 nt, Human
acuguggcugcuagcacuu

SEQ ID NO: 2243425 - RNA, 20 nt, Human
acuguggccguuaucuggaa

SEQ ID NO: 2243426 - RNA, 12 nt, Human
acuguggcugcu

SEQ ID NO: 2243427 - RNA, 15 nt, Human
acuguggcacacgcc

SEQ ID NO: 2243428 - RNA, 23 nt, Human
acuguggaggaaggauuguaaaa

SEQ ID NO: 2243429 - RNA, 17 nt, Human
acuguggccguuaucug

SEQ ID NO: 2243430 - RNA, 10 nt, Human
acuguccugc

SEQ ID NO: 2243431 - RNA, 12 nt, Human
acuguccugcuc

SEQ ID NO: 2243432 - RNA, 13 nt, Human
acuguccugcucc

SEQ ID NO: 2243433 - RNA, 16 nt, Human
acuguccugcuccaca

SEQ ID NO: 2243434 - RNA, 17 nt, Human
acuguccugcuccacag

SEQ ID NO: 2243435 - RNA, 14 nt, Human
acuguccugggccu

SEQ ID NO: 2243436 - RNA, 22 nt, Human
acuguggaggaaggauuguaaa

SEQ ID NO: 2243437 - RNA, 18 nt, Human
acuguccugcuccacagu

SEQ ID NO: 2243438 - RNA, 19 nt, Human
acuguccugcuccacagug

SEQ ID NO: 2243439 - RNA, 20 nt, Human
acuguccugcuccacagugu

SEQ ID NO: 2243440 - RNA, 12 nt, Human
acuguccugggc

SEQ ID NO: 2243441 - RNA, 12 nt, Human
acuguguuccug

SEQ ID NO: 2243442 - RNA, 14 nt, Human
acuguguucauuag

SEQ ID NO: 2243443 - RNA, 22 nt, Human
acuguguguugccacaggacac

SEQ ID NO: 2243444 - RNA, 20 nt, Human
acuguguguugccacaggac

SEQ ID NO: 2243445 - RNA, 19 nt, Human
acuguguguugccacagga

SEQ ID NO: 2243446 - RNA, 14 nt, Human
acuguguguugcca

SEQ ID NO: 2243447 - RNA, 15 nt, Human
acuguguuccuggca

SEQ ID NO: 2243448 - RNA, 15 nt, Human
acuguguuucaaguu

SEQ ID NO: 2243449 - RNA, 14 nt, Human
acuguguuucaagu

SEQ ID NO: 2243450 - RNA, 17 nt, Human
acuguuaauaguucagg

SEQ ID NO: 2243451 - RNA, 16 nt, Human
acuguuaaaggaaaaa

SEQ ID NO: 2243452 - RNA, 20 nt, Human
acuguuaaauugcuguguau

SEQ ID NO: 2243453 - RNA, 18 nt, Human
acuguguuucaaguucaa

SEQ ID NO: 2243454 - RNA, 21 nt, Human
acuguuaauaguucagguaac

SEQ ID NO: 2243455 - RNA, 15 nt, Human
ucgggaaccucacuc

SEQ ID NO: 2243456 - RNA, 16 nt, Human
ucgggaaccucacucu

SEQ ID NO: 2243457 - RNA, 12 nt, Human
ucgggaagagag

SEQ ID NO: 2243458 - RNA, 15 nt, Human
ucgggaagagaggag

SEQ ID NO: 2243459 - RNA, 19 nt, Human
ucgggacaccugcccugcc

SEQ ID NO: 2243460 - RNA, 20 nt, Human
ucgggacaccugcccugccc

SEQ ID NO: 2243461 - RNA, 16 nt, Human
ucgggagacagcauca

SEQ ID NO: 2243462 - RNA, 21 nt, Human
ucgggagacagcaucaggguu

SEQ ID NO: 2243463 - RNA, 16 nt, Human
ucgggaagagaggagu

SEQ ID NO: 2243464 - RNA, 20 nt, Human
ucgggaagagaggaguucaa

SEQ ID NO: 2243465 - RNA, 21 nt, Human
ucgggaagagaggaguucaau

SEQ ID NO: 2243466 - RNA, 22 nt, Human
ucgggaagagaggaguucaaug

SEQ ID NO: 2243467 - RNA, 23 nt, Human
ucgggaagagaggaguucaauga

SEQ ID NO: 2243468 - RNA, 24 nt, Human
ucgggaagagaggaguucaaugau

SEQ ID NO: 2243469 - RNA, 20 nt, Human
ucgggaauacuagggagaag

SEQ ID NO: 2243470 - RNA, 16 nt, Human
ucgggacaccugcccu

SEQ ID NO: 2243471 - RNA, 19 nt, Human
ucguuaguaucuaacaugu

SEQ ID NO: 2243472 - RNA, 15 nt, Human
ucguuauguguguau

SEQ ID NO: 2243473 - RNA, 23 nt, Human
ucgucacugcuuaacuucacaua

SEQ ID NO: 2243474 - RNA, 13 nt, Human
ucguucucugccu

SEQ ID NO: 2243475 - RNA, 15 nt, Human
ucguucuguuuacau

SEQ ID NO: 2243476 - RNA, 11 nt, Human
ucguucugugg

SEQ ID NO: 2243477 - RNA, 19 nt, Human
ucguucuguuuacaucagu

SEQ ID NO: 2243478 - RNA, 21 nt, Human
ucguucuguuuacaucaguuu

SEQ ID NO: 2243479 - RNA, 17 nt, Human
ucguugacuuuagggac

SEQ ID NO: 2243480 - RNA, 16 nt, Human
ucguugacuuuaggga

SEQ ID NO: 2243481 - RNA, 12 nt, Human
ucguugugaggg

SEQ ID NO: 2243482 - RNA, 20 nt, Human
ucuaaacaaugcugauuugg

SEQ ID NO: 2243483 - RNA, 18 nt, Human
ucuaaacaagaaucaguc

SEQ ID NO: 2243484 - RNA, 19 nt, Human
ucuaaacaagauuuuaaag

SEQ ID NO: 2243485 - RNA, 19 nt, Human
ucuaaacccaauccaaaug

SEQ ID NO: 2243486 - RNA, 16 nt, Human
ucuaaacccaauccaa

SEQ ID NO: 2243487 - RNA, 13 nt, Human
ucuaaacauuaau

SEQ ID NO: 2243488 - RNA, 14 nt, Human
ucuaaacauuaauc

SEQ ID NO: 2243489 - RNA, 15 nt, Human
ucguuuacuaugccu

SEQ ID NO: 2243490 - RNA, 19 nt, Human
ucguuuauuuucaagaaua

SEQ ID NO: 2243491 - RNA, 12 nt, Human
ucguuucaaaaa

SEQ ID NO: 2243492 - RNA, 16 nt, Human
ucguuucaaaaacaca

SEQ ID NO: 2243493 - RNA, 19 nt, Human
ucguuucaaaaacacagug

SEQ ID NO: 2243494 - RNA, 21 nt, Human
ucuaaaaugccucaguguauu

SEQ ID NO: 2243495 - RNA, 22 nt, Human
ucuaaaaugccucaguguauuu

SEQ ID NO: 2243496 - RNA, 22 nt, Human
ucgggagcagugucuuccauaa

SEQ ID NO: 2243497 - RNA, 19 nt, Human
ucgggagcagugucuucca

SEQ ID NO: 2243498 - RNA, 16 nt, Human
ucgggaggcugagaca

SEQ ID NO: 2243499 - RNA, 16 nt, Human
ucgggagcagugucuu

SEQ ID NO: 2243500 - RNA, 15 nt, Human
ucgggagcagugucu

SEQ ID NO: 2243501 - RNA, 14 nt, Human
ucgggagcaguguc

SEQ ID NO: 2243502 - RNA, 13 nt, Human
ucgggagcagugu

SEQ ID NO: 2243503 - RNA, 23 nt, Human
ucgggagcagugucuuccauaau

SEQ ID NO: 2243504 - RNA, 15 nt, Human
ucgggcuccugugcc

SEQ ID NO: 2243505 - RNA, 14 nt, Human
ucgggcuccugugc

SEQ ID NO: 2243506 - RNA, 12 nt, Human
ucgggcugugcc

SEQ ID NO: 2243507 - RNA, 16 nt, Human
ucggggaacuccugga

SEQ ID NO: 2243508 - RNA, 15 nt, Human
ucggggaacuccugg

SEQ ID NO: 2243509 - RNA, 16 nt, Human
ucgggcuccugugccc

SEQ ID NO: 2243510 - RNA, 17 nt, Human
ucgggcuccugugcccu

SEQ ID NO: 2243511 - RNA, 13 nt, Human
ucgggcugugccc

SEQ ID NO: 2243512 - RNA, 19 nt, Human
ucggggagaggcugaggac

SEQ ID NO: 2243513 - RNA, 18 nt, Human
ucggggcaugcuggggca

SEQ ID NO: 2243514 - RNA, 17 nt, Human
ucggggcaugcuggggc

SEQ ID NO: 2243515 - RNA, 16 nt, Human
ucggggcaugcugggg

SEQ ID NO: 2243516 - RNA, 16 nt, Human
ucguacagaaagcugc

SEQ ID NO: 2243517 - RNA, 15 nt, Human
ucguacagaaagcug

SEQ ID NO: 2243518 - RNA, 21 nt, Human
ucguauaacacaauaugaaua

SEQ ID NO: 2243519 - RNA, 22 nt, Human
ucguagcuuucccaaauaaacu

SEQ ID NO: 2243520 - RNA, 12 nt, Human
ucguagcuuucc

SEQ ID NO: 2243521 - RNA, 14 nt, Human
ucguacaguucuuc

SEQ ID NO: 2243522 - RNA, 15 nt, Human
ucguacaguucuucg

SEQ ID NO: 2243523 - RNA, 17 nt, Human
ucguauagcuguauuga

SEQ ID NO: 2243524 - RNA, 21 nt, Human
ucguauagcuguauugaauca

SEQ ID NO: 2243525 - RNA, 19 nt, Human
ucagaaucuacccaaagga

SEQ ID NO: 2243526 - RNA, 20 nt, Human
ucagaaucuacccaaaggau

SEQ ID NO: 2243527 - RNA, 22 nt, Human
ucagaauccaagugaacacuag

SEQ ID NO: 2243528 - RNA, 14 nt, Human
ucagaaucuaccca

SEQ ID NO: 2243529 - RNA, 23 nt, Human
ucagaauagccacauuuggaaua

SEQ ID NO: 2243530 - RNA, 22 nt, Human
ucagaauagccacauuuggaau

SEQ ID NO: 2243531 - RNA, 17 nt, Human
ucagaaucacuucugag

SEQ ID NO: 2243532 - RNA, 19 nt, Human
ucagaaucacuucugagaa

SEQ ID NO: 2243533 - RNA, 16 nt, Human
ucagaauagaaauuag

SEQ ID NO: 2243534 - RNA, 21 nt, Human
ucagaauagccacauuuggaa

SEQ ID NO: 2243535 - RNA, 17 nt, Human
ucagaaguuuggcaaua

SEQ ID NO: 2243536 - RNA, 20 nt, Human
acccagccaucugcccaggg

SEQ ID NO: 2243537 - RNA, 21 nt, Human
acccagccaucugcccagggg

SEQ ID NO: 2243538 - RNA, 17 nt, Human
acccagcaacuccaacu

SEQ ID NO: 2243539 - RNA, 20 nt, Human
acccagauuuugcuguauau

SEQ ID NO: 2243540 - RNA, 19 nt, Human
acccagauuuugcuguaua

SEQ ID NO: 2243541 - RNA, 13 nt, Human
acccagccaucug

SEQ ID NO: 2243542 - RNA, 15 nt, Human
acccagccaucugcc

SEQ ID NO: 2243543 - RNA, 18 nt, Human
acccagccaucugcccag

SEQ ID NO: 2243544 - RNA, 19 nt, Human
acccagccaucugcccagg

SEQ ID NO: 2243545 - RNA, 15 nt, Human
acccagcccacuucu

SEQ ID NO: 2243546 - RNA, 23 nt, Human
ucagaaguuucugccgcagcccu

SEQ ID NO: 2243547 - RNA, 12 nt, Human
ucagaauucuca

SEQ ID NO: 2243548 - RNA, 10 nt, Human
ucagaauucu

SEQ ID NO: 2243549 - RNA, 20 nt, Human
ucagaauucucagaaucuca

SEQ ID NO: 2243550 - RNA, 13 nt, Human
ucagagaauuucu

SEQ ID NO: 2243551 - RNA, 23 nt, Human
ucagagaauuucuaccauuucag

SEQ ID NO: 2243552 - RNA, 20 nt, Human
ucagagacaggaagucuuca

SEQ ID NO: 2243553 - RNA, 23 nt, Human
ucagagacaggaagucuucaggg

SEQ ID NO: 2243554 - RNA, 15 nt, Human
ucagagaccauugca

SEQ ID NO: 2243555 - RNA, 20 nt, Human
ucagagacucagggccccag

SEQ ID NO: 2243556 - RNA, 19 nt, Human
ucagagacucagggcccca

SEQ ID NO: 2243557 - RNA, 17 nt, Human
ucagagacucagggccc

SEQ ID NO: 2243558 - RNA, 14 nt, Human
ucagagacucaggg

SEQ ID NO: 2243559 - RNA, 22 nt, Human
ucagagacuccugcaggcagcc

SEQ ID NO: 2243560 - RNA, 16 nt, Human
ucagagagcugguagu

SEQ ID NO: 2243561 - RNA, 14 nt, Human
ucagagagcuggua

SEQ ID NO: 2243562 - RNA, 13 nt, Human
ucagagagcuggu

SEQ ID NO: 2243563 - RNA, 22 nt, Human
ucagagagcgagcgcuacccac

SEQ ID NO: 2243564 - RNA, 20 nt, Human
ucagagaggagucagagaga

SEQ ID NO: 2243565 - RNA, 17 nt, Human
ucagagaggagucagag

SEQ ID NO: 2243566 - RNA, 16 nt, Human
ucagagaugcaccacc

SEQ ID NO: 2243567 - RNA, 21 nt, Human
ucagagaugcaccaccaagcc

SEQ ID NO: 2243568 - RNA, 14 nt, Human
ucagagagaguguu

SEQ ID NO: 2243569 - RNA, 15 nt, Human
ucagagacugcugug

SEQ ID NO: 2243570 - RNA, 12 nt, Human
ucagagagcagc

SEQ ID NO: 2243571 - RNA, 23 nt, Human
ucagagacuccugcaggcagcca

SEQ ID NO: 2243572 - RNA, 21 nt, Human
ucagagccaccccuaaagaga

SEQ ID NO: 2243573 - RNA, 17 nt, Human
ucagagcagcagugaaa

SEQ ID NO: 2243574 - RNA, 20 nt, Human
ucagagcagcagugaaaaca

SEQ ID NO: 2243575 - RNA, 21 nt, Human
ucagagcagcagugaaaacaa

SEQ ID NO: 2243576 - RNA, 16 nt, Human
ucagagcaaauuuggg

SEQ ID NO: 2243577 - RNA, 17 nt, Human
ucagagaugugcaccca

SEQ ID NO: 2243578 - RNA, 22 nt, Human
ucagagaugcaccaccaagcca

SEQ ID NO: 2243579 - RNA, 16 nt, Human
ucagagccgugguccu

SEQ ID NO: 2243580 - RNA, 14 nt, Human
ucagagcagggguc

SEQ ID NO: 2243581 - RNA, 22 nt, Human
ucagaugcccagagggcccagg

SEQ ID NO: 2243582 - RNA, 18 nt, Human
ucagaugcuucugggaga

SEQ ID NO: 2243583 - RNA, 14 nt, Human
ucagaugcuucugg

SEQ ID NO: 2243584 - RNA, 13 nt, Human
ucagaugcuucug

SEQ ID NO: 2243585 - RNA, 21 nt, Human
ucagaugcugugcaaauguua

SEQ ID NO: 2243586 - RNA, 23 nt, Human
ucagaucugacaugauuccuucc

SEQ ID NO: 2243587 - RNA, 16 nt, Human
ucagaucucuaacuuc

SEQ ID NO: 2243588 - RNA, 15 nt, Human
ucagaucucuaacuu

SEQ ID NO: 2243589 - RNA, 20 nt, Human
ucagagccgugguccuuugg

SEQ ID NO: 2243590 - RNA, 20 nt, Human
ucagauggaaccgcaggaag

SEQ ID NO: 2243591 - RNA, 22 nt, Human
ucagauggaaccgcaggaagcu

SEQ ID NO: 2243592 - RNA, 21 nt, Human
ucagauggaaccgcaggaagc

SEQ ID NO: 2243593 - RNA, 19 nt, Human
ucagauucccagagcaaaa

SEQ ID NO: 2243594 - RNA, 22 nt, Human
ucagauucccagagcaaaauaa

SEQ ID NO: 2243595 - RNA, 21 nt, Human
ucagauucccagagcaaaaua

SEQ ID NO: 2243596 - RNA, 23 nt, Human
ucagauggaaccgcaggaagcug

SEQ ID NO: 2243597 - RNA, 14 nt, Human
ucagauugcaugug

SEQ ID NO: 2243598 - RNA, 22 nt, Human
ucagauugcaugugacucugaa

SEQ ID NO: 2243599 - RNA, 21 nt, Human
ucagauugcaugugacucuga

SEQ ID NO: 2243600 - RNA, 19 nt, Human
ucagauugcaugugacucu

SEQ ID NO: 2243601 - RNA, 18 nt, Human
ucagauugcaugugacuc

SEQ ID NO: 2243602 - RNA, 17 nt, Human
ucagauugcaugugacu

SEQ ID NO: 2243603 - RNA, 16 nt, Human
ucagauugcaugugac

SEQ ID NO: 2243604 - RNA, 15 nt, Human
ucagauugcauguga

SEQ ID NO: 2243605 - RNA, 23 nt, Human
ucagccccucuugccccccaccc

SEQ ID NO: 2243606 - RNA, 22 nt, Human
ucagccccucuugccccccacc

SEQ ID NO: 2243607 - RNA, 21 nt, Human
ucagccccucuugccccccac

SEQ ID NO: 2243608 - RNA, 20 nt, Human
ucagccccucuugcccccca

SEQ ID NO: 2243609 - RNA, 19 nt, Human
ucagcccuaggguggagag

SEQ ID NO: 2243610 - RNA, 14 nt, Human
ucagccccugaucc

SEQ ID NO: 2243611 - RNA, 22 nt, Human
ucagccccugauccugugaagu

SEQ ID NO: 2243612 - RNA, 12 nt, Human
ucagccccucuu

SEQ ID NO: 2243613 - RNA, 11 nt, Human
ucagccccucu

SEQ ID NO: 2243614 - RNA, 23 nt, Human
ucagccccuccucugccaccucc

SEQ ID NO: 2243615 - RNA, 22 nt, Human
ucagccccuccucugccaccuc

SEQ ID NO: 2243616 - RNA, 21 nt, Human
ucagccccuccucugccaccu

SEQ ID NO: 2243617 - RNA, 20 nt, Human
ucagccccuccucugccacc

SEQ ID NO: 2243618 - RNA, 19 nt, Human
ucagccccuccucugccac

SEQ ID NO: 2243619 - RNA, 17 nt, Human
ucagauuuccagucucc

SEQ ID NO: 2243620 - RNA, 15 nt, Human
ucagauuuccagucu

SEQ ID NO: 2243621 - RNA, 13 nt, Human
acccaggagcccc

SEQ ID NO: 2243622 - RNA, 15 nt, Human
acccagccuguuuua

SEQ ID NO: 2243623 - RNA, 18 nt, Human
acccaggacgcuucugaa

SEQ ID NO: 2243624 - RNA, 23 nt, Human
acccaggagauggaaguugcagu

SEQ ID NO: 2243625 - RNA, 23 nt, Human
acccaggacuuauuuaaacucug

SEQ ID NO: 2243626 - RNA, 15 nt, Human
acccagggccugcag

SEQ ID NO: 2243627 - RNA, 22 nt, Human
acccaggagcauccaccuccuu

SEQ ID NO: 2243628 - RNA, 23 nt, Human
acccaggagcauccaccuccuuc

SEQ ID NO: 2243629 - RNA, 15 nt, Human
acccaggagccccga

SEQ ID NO: 2243630 - RNA, 23 nt, Human
ucagcccuaggguggagagccac

SEQ ID NO: 2243631 - RNA, 22 nt, Human
acccagccucaguccuccccuc

SEQ ID NO: 2243632 - RNA, 23 nt, Human
acccagccucaguccuccccuca

SEQ ID NO: 2243633 - RNA, 13 nt, Human
acccagcgagccc

SEQ ID NO: 2243634 - RNA, 16 nt, Human
acccagcgagcccugg

SEQ ID NO: 2243635 - RNA, 17 nt, Human
acccagcgagcccuggu

SEQ ID NO: 2243636 - RNA, 18 nt, Human
acccccacucucauuccc

SEQ ID NO: 2243637 - RNA, 17 nt, Human
acccccacucucauucc

SEQ ID NO: 2243638 - RNA, 13 nt, Human
acccccacucuca

SEQ ID NO: 2243639 - RNA, 15 nt, Human
acccccacuccagcu

SEQ ID NO: 2243640 - RNA, 12 nt, Human
acccccacccuu

SEQ ID NO: 2243641 - RNA, 11 nt, Human
acccccacccu

SEQ ID NO: 2243642 - RNA, 16 nt, Human
acccccaccccuugcu

SEQ ID NO: 2243643 - RNA, 17 nt, Human
acccccaccccuugcuc

SEQ ID NO: 2243644 - RNA, 20 nt, Human
acccccaccccuuccccacu

SEQ ID NO: 2243645 - RNA, 15 nt, Human
acccccaccccuucc

SEQ ID NO: 2243646 - RNA, 14 nt, Human
acccccaccccuuc

SEQ ID NO: 2243647 - RNA, 13 nt, Human
acccccaccccuu

SEQ ID NO: 2243648 - RNA, 18 nt, Human
acccccacccccagcuca

SEQ ID NO: 2243649 - RNA, 19 nt, Human
acccccacccccagcucaa

SEQ ID NO: 2243650 - RNA, 16 nt, Human
acccccaccccacacu

SEQ ID NO: 2243651 - RNA, 17 nt, Human
accccaguucugcuccu

SEQ ID NO: 2243652 - RNA, 15 nt, Human
acccccaccccacac

SEQ ID NO: 2243653 - RNA, 17 nt, Human
accccaguggccacuca

SEQ ID NO: 2243654 - RNA, 19 nt, Human
accccaguggccacucagc

SEQ ID NO: 2243655 - RNA, 23 nt, Human
accccaguggccacucagcuucc

SEQ ID NO: 2243656 - RNA, 15 nt, Human
accccaguucugcuc

SEQ ID NO: 2243657 - RNA, 17 nt, Human
acccccaccccacacuu

SEQ ID NO: 2243658 - RNA, 16 nt, Human
accccaguucugcucc

SEQ ID NO: 2243659 - RNA, 16 nt, Human
acccccacccccacca

SEQ ID NO: 2243660 - RNA, 14 nt, Human
acccccacccccag

SEQ ID NO: 2243661 - RNA, 15 nt, Human
acccccacccccagc

SEQ ID NO: 2243662 - RNA, 13 nt, Human
accccagguuucu

SEQ ID NO: 2243663 - RNA, 24 nt, Human
accccagggccugagccuggccag

SEQ ID NO: 2243664 - RNA, 17 nt, Human
accccagggccugagcc

SEQ ID NO: 2243665 - RNA, 16 nt, Human
accccaguggccacuc

SEQ ID NO: 2243666 - RNA, 15 nt, Human
accccagggccugag

SEQ ID NO: 2243667 - RNA, 14 nt, Human
accccagggccuga

SEQ ID NO: 2243668 - RNA, 13 nt, Human
accccagggccug

SEQ ID NO: 2243669 - RNA, 11 nt, Human
accccagggcc

SEQ ID NO: 2243670 - RNA, 20 nt, Human
accccagcugggaggcaaga

SEQ ID NO: 2243671 - RNA, 13 nt, Human
accccagcuggga

SEQ ID NO: 2243672 - RNA, 14 nt, Human
accccagcugggag

SEQ ID NO: 2243673 - RNA, 15 nt, Human
accccagcugggagg

SEQ ID NO: 2243674 - RNA, 17 nt, Human
accccagcugggaggca

SEQ ID NO: 2243675 - RNA, 23 nt, Human
accccagcucccuaggagaccaa

SEQ ID NO: 2243676 - RNA, 11 nt, Human
accccagcugg

SEQ ID NO: 2243677 - RNA, 12 nt, Human
accccagcuggg

SEQ ID NO: 2243678 - RNA, 10 nt, Human
accccagcug

SEQ ID NO: 2243679 - RNA, 17 nt, Human
accccagcucccuagga

SEQ ID NO: 2243680 - RNA, 14 nt, Human
accccagcucccua

SEQ ID NO: 2243681 - RNA, 13 nt, Human
accccagcggcug

SEQ ID NO: 2243682 - RNA, 22 nt, Human
ucagauggauugauaauugcau

SEQ ID NO: 2243683 - RNA, 19 nt, Human
accccagcuggggccaggc

SEQ ID NO: 2243684 - RNA, 22 nt, Human
accccagcuggggccaggcugg

SEQ ID NO: 2243685 - RNA, 11 nt, Human
acccaggugcu

SEQ ID NO: 2243686 - RNA, 23 nt, Human
acccaggugcuaggaacacuccu

SEQ ID NO: 2243687 - RNA, 13 nt, Human
acccagggguggg

SEQ ID NO: 2243688 - RNA, 17 nt, Human
acccagggccugcagga

SEQ ID NO: 2243689 - RNA, 20 nt, Human
accaugcccggcuaauuuuu

SEQ ID NO: 2243690 - RNA, 19 nt, Human
accaugcucaucugcuggu

SEQ ID NO: 2243691 - RNA, 20 nt, Human
accaugcucaucugcugguc

SEQ ID NO: 2243692 - RNA, 18 nt, Human
accaguaauugugaaaau

SEQ ID NO: 2243693 - RNA, 14 nt, Human
accaugcagagcgc

SEQ ID NO: 2243694 - RNA, 16 nt, Human
accaugcaaaugcuau

SEQ ID NO: 2243695 - RNA, 19 nt, Human
accagguguucuacacuca

SEQ ID NO: 2243696 - RNA, 22 nt, Human
accaggucuuggagcugagccu

SEQ ID NO: 2243697 - RNA, 23 nt, Human
accagguguucuacacucaucuu

SEQ ID NO: 2243698 - RNA, 20 nt, Human
accagguguucuacacucau

SEQ ID NO: 2243699 - RNA, 14 nt, Human
accagguugaaaga

SEQ ID NO: 2243700 - RNA, 19 nt, Human
accaggucuccuccaccgc

SEQ ID NO: 2243701 - RNA, 20 nt, Human
accaggucuccuccaccgcc

SEQ ID NO: 2243702 - RNA, 16 nt, Human
accaggucuuggagcu

SEQ ID NO: 2243703 - RNA, 21 nt, Human
accaggguugaccccagagga

SEQ ID NO: 2243704 - RNA, 20 nt, Human
accaggguugaccccagagg

SEQ ID NO: 2243705 - RNA, 18 nt, Human
ucacuucugaccacacuu

SEQ ID NO: 2243706 - RNA, 17 nt, Human
ucacuucugagaacuca

SEQ ID NO: 2243707 - RNA, 14 nt, Human
accagggguuucuc

SEQ ID NO: 2243708 - RNA, 16 nt, Human
accagggguuucucgc

SEQ ID NO: 2243709 - RNA, 17 nt, Human
accagggguuucucgca

SEQ ID NO: 2243710 - RNA, 13 nt, Human
accaugugccuga

SEQ ID NO: 2243711 - RNA, 22 nt, Human
accaugucagcaaaaagcaaaa

SEQ ID NO: 2243712 - RNA, 19 nt, Human
accaugucagcaaaaagca

SEQ ID NO: 2243713 - RNA, 21 nt, Human
accaugucagcaaaaagcaaa

SEQ ID NO: 2243714 - RNA, 13 nt, Human
accaugucacugu

SEQ ID NO: 2243715 - RNA, 23 nt, Human
accauggcugaaggaaaccagug

SEQ ID NO: 2243716 - RNA, 12 nt, Human
accaugggacca

SEQ ID NO: 2243717 - RNA, 20 nt, Human
accaugggaccaggucuugg

SEQ ID NO: 2243718 - RNA, 15 nt, Human
accaugucacugugg

SEQ ID NO: 2243719 - RNA, 15 nt, Human
accaugucagcaaaa

SEQ ID NO: 2243720 - RNA, 18 nt, Human
accaugucagcaaaaagc

SEQ ID NO: 2243721 - RNA, 15 nt, Human
accauggccagccaa

SEQ ID NO: 2243722 - RNA, 15 nt, Human
accauggcugaagga

SEQ ID NO: 2243723 - RNA, 16 nt, Human
accauggagacaagaa

SEQ ID NO: 2243724 - RNA, 12 nt, Human
accauguuugag

SEQ ID NO: 2243725 - RNA, 13 nt, Human
accauucugacuc

SEQ ID NO: 2243726 - RNA, 21 nt, Human
accauucugacucgguuucuc

SEQ ID NO: 2243727 - RNA, 22 nt, Human
accauuuugcugucccuuuucc

SEQ ID NO: 2243728 - RNA, 21 nt, Human
accauuuugggguacccacug

SEQ ID NO: 2243729 - RNA, 23 nt, Human
accauuuugcugucccuuuuccu

SEQ ID NO: 2243730 - RNA, 18 nt, Human
accauguuggccaggcug

SEQ ID NO: 2243731 - RNA, 16 nt, Human
accaugugccugaucc

SEQ ID NO: 2243732 - RNA, 19 nt, Human
accauucuccaccugccag

SEQ ID NO: 2243733 - RNA, 20 nt, Human
accauucuccaccugccagg

SEQ ID NO: 2243734 - RNA, 21 nt, Human
accauucuccaccugccaggg

SEQ ID NO: 2243735 - RNA, 20 nt, Human
acccacugcuuuuggucugu

SEQ ID NO: 2243736 - RNA, 17 nt, Human
acccacuggacucaccu

SEQ ID NO: 2243737 - RNA, 14 nt, Human
acccacuggacuca

SEQ ID NO: 2243738 - RNA, 21 nt, Human
acccacuggacucaccucccc

SEQ ID NO: 2243739 - RNA, 16 nt, Human
acccacuucccugggc

SEQ ID NO: 2243740 - RNA, 21 nt, Human
acccagauaaagguucaugca

SEQ ID NO: 2243741 - RNA, 14 nt, Human
acccagauccucac

SEQ ID NO: 2243742 - RNA, 22 nt, Human
acccagaugggggaaagcacag

SEQ ID NO: 2243743 - RNA, 19 nt, Human
accauguuugagcucagac

SEQ ID NO: 2243744 - RNA, 18 nt, Human
acccaaagagguauuuau

SEQ ID NO: 2243745 - RNA, 18 nt, Human
acccaaagaccaauauuc

SEQ ID NO: 2243746 - RNA, 14 nt, Human
acccaaauccucuc

SEQ ID NO: 2243747 - RNA, 15 nt, Human
acccaaauccucucc

SEQ ID NO: 2243748 - RNA, 17 nt, Human
acccaaauccucuccag

SEQ ID NO: 2243749 - RNA, 20 nt, Human
acccaaauguucaucaauga

SEQ ID NO: 2243750 - RNA, 16 nt, Human
acccaaauguucauca

SEQ ID NO: 2243751 - RNA, 15 nt, Human
ucacuucacccugga

SEQ ID NO: 2243752 - RNA, 19 nt, Human
ucacuuaucccaagagaau

SEQ ID NO: 2243753 - RNA, 17 nt, Human
ucacuuauauguucuaa

SEQ ID NO: 2243754 - RNA, 16 nt, Human
ucacuucauaauccag

SEQ ID NO: 2243755 - RNA, 14 nt, Human
ucacuucaucuucu

SEQ ID NO: 2243756 - RNA, 15 nt, Human
ucacuucaucuucuc

SEQ ID NO: 2243757 - RNA, 17 nt, Human
ucacuucugaccacacu

SEQ ID NO: 2243758 - RNA, 12 nt, Human
ucacuucuccca

SEQ ID NO: 2243759 - RNA, 16 nt, Human
ucacuucuaaaugcau

SEQ ID NO: 2243760 - RNA, 13 nt, Human
ucacuucuaaaug

SEQ ID NO: 2243761 - RNA, 16 nt, Human
ucacuucgugggaucu

SEQ ID NO: 2243762 - RNA, 23 nt, Human
ucacuucgcgugcccucgcugcu

SEQ ID NO: 2243763 - RNA, 17 nt, Human
ucacuuccuacaagagc

SEQ ID NO: 2243764 - RNA, 22 nt, Human
ucacuuccauacagcucuacgu

SEQ ID NO: 2243765 - RNA, 22 nt, Human
ucacuucgcgugcccucgcugc

SEQ ID NO: 2243766 - RNA, 19 nt, Human
ucacuucaucuucucagcu

SEQ ID NO: 2243767 - RNA, 20 nt, Human
ucacuucaucuucucagcuc

SEQ ID NO: 2243768 - RNA, 18 nt, Human
ucacuuccauacagcucu

SEQ ID NO: 2243769 - RNA, 19 nt, Human
ucacuuccauacagcucua

SEQ ID NO: 2243770 - RNA, 20 nt, Human
ucacuguuucucugcuguug

SEQ ID NO: 2243771 - RNA, 19 nt, Human
ucacuguugaaaauuauuu

SEQ ID NO: 2243772 - RNA, 20 nt, Human
ucacuguugaaaauuauuuu

SEQ ID NO: 2243773 - RNA, 15 nt, Human
ucacuguugcccagg

SEQ ID NO: 2243774 - RNA, 17 nt, Human
ucacuuaccuagauuua

SEQ ID NO: 2243775 - RNA, 15 nt, Human
ucacuuacuguuucu

SEQ ID NO: 2243776 - RNA, 16 nt, Human
ucacuuacuguuucug

SEQ ID NO: 2243777 - RNA, 21 nt, Human
ucacuuaggaaauggcuuugu

SEQ ID NO: 2243778 - RNA, 19 nt, Human
ucacuuacuguuucuguca

SEQ ID NO: 2243779 - RNA, 22 nt, Human
ucacuuacuguuucugucagga

SEQ ID NO: 2243780 - RNA, 16 nt, Human
ucacuuaauugcuaca

SEQ ID NO: 2243781 - RNA, 17 nt, Human
ucacugcaacuucugcc

SEQ ID NO: 2243782 - RNA, 18 nt, Human
ucacugcaacuucugccu

SEQ ID NO: 2243783 - RNA, 18 nt, Human
ucacugcaagcuccgccu

SEQ ID NO: 2243784 - RNA, 15 nt, Human
ucacugcacagugca

SEQ ID NO: 2243785 - RNA, 14 nt, Human
ucacuguugcccag

SEQ ID NO: 2243786 - RNA, 18 nt, Human
ucacuguucccucugcuc

SEQ ID NO: 2243787 - RNA, 19 nt, Human
ucacuguucccucugcucc

SEQ ID NO: 2243788 - RNA, 20 nt, Human
ucacuguucccucugcuccu

SEQ ID NO: 2243789 - RNA, 21 nt, Human
ucacuguucccucugcuccug

SEQ ID NO: 2243790 - RNA, 22 nt, Human
ucacuguucccucugcuccugg

SEQ ID NO: 2243791 - RNA, 22 nt, Human
ucacuguucuauucaucucaag

SEQ ID NO: 2243792 - RNA, 15 nt, Human
ucacuguugaaaauu

SEQ ID NO: 2243793 - RNA, 18 nt, Human
ucacuguugaaaauuauu

SEQ ID NO: 2243794 - RNA, 18 nt, Human
ucacugcaaccuccgccu

SEQ ID NO: 2243795 - RNA, 21 nt, Human
ucacugcaaccuucgccaccu

SEQ ID NO: 2243796 - RNA, 18 nt, Human
ucacugcaaccucugccu

SEQ ID NO: 2243797 - RNA, 16 nt, Human
ucacuccaccacccaa

SEQ ID NO: 2243798 - RNA, 15 nt, Human
ucacuccaccaccca

SEQ ID NO: 2243799 - RNA, 14 nt, Human
ucacuccaccaccc

SEQ ID NO: 2243800 - RNA, 13 nt, Human
ucacuccaccacc

SEQ ID NO: 2243801 - RNA, 22 nt, Human
ucacucauugcugagccucugc

SEQ ID NO: 2243802 - RNA, 20 nt, Human
ucacucauugcugagccucu

SEQ ID NO: 2243803 - RNA, 19 nt, Human
ucacucauugcugagccuc

SEQ ID NO: 2243804 - RNA, 18 nt, Human
ucacucauugcugagccu

SEQ ID NO: 2243805 - RNA, 17 nt, Human
ucacucauugcugagcc

SEQ ID NO: 2243806 - RNA, 15 nt, Human
ucacucauugcugag

SEQ ID NO: 2243807 - RNA, 18 nt, Human
ucacucuuggagccugca

SEQ ID NO: 2243808 - RNA, 17 nt, Human
ucacucuuggagccugc

SEQ ID NO: 2243809 - RNA, 16 nt, Human
ucacucuuggagccug

SEQ ID NO: 2243810 - RNA, 14 nt, Human
ucacucuuggagcc

SEQ ID NO: 2243811 - RNA, 16 nt, Human
ucacugaaggccuggc

SEQ ID NO: 2243812 - RNA, 22 nt, Human
ucacugaaugccucaaugugac

SEQ ID NO: 2243813 - RNA, 23 nt, Human
ucacugagacagcccgggcucug

SEQ ID NO: 2243814 - RNA, 14 nt, Human
ucacuccagccugg

SEQ ID NO: 2243815 - RNA, 21 nt, Human
ucacucuuguggauguuuuaa

SEQ ID NO: 2243816 - RNA, 20 nt, Human
ucacucuuguggauguuuua

SEQ ID NO: 2243817 - RNA, 17 nt, Human
ucacugaaaacaucugg

SEQ ID NO: 2243818 - RNA, 20 nt, Human
ucacugaaaacaucuggaag

SEQ ID NO: 2243819 - RNA, 18 nt, Human
ucacugaaaacaucugga

SEQ ID NO: 2243820 - RNA, 21 nt, Human
ucacugaacuuugcugagccu

SEQ ID NO: 2243821 - RNA, 14 nt, Human
ucacucagauggaa

SEQ ID NO: 2243822 - RNA, 13 nt, Human
ucacucauugcug

SEQ ID NO: 2243823 - RNA, 17 nt, Human
ucacucauacaucuggc

SEQ ID NO: 2243824 - RNA, 20 nt, Human
ucacuauuuuuauuuauauu

SEQ ID NO: 2243825 - RNA, 18 nt, Human
ucacuauuuccuuuauaa

SEQ ID NO: 2243826 - RNA, 19 nt, Human
ucacuauuuccuuuauaau

SEQ ID NO: 2243827 - RNA, 18 nt, Human
ucacuauucaaguauuag

SEQ ID NO: 2243828 - RNA, 13 nt, Human
ucacuauuuccuu

SEQ ID NO: 2243829 - RNA, 15 nt, Human
ucacuauuuccuuua

SEQ ID NO: 2243830 - RNA, 17 nt, Human
ucacuauuuccuuuaua

SEQ ID NO: 2243831 - RNA, 18 nt, Human
ucacuauuuuuauuuaua

SEQ ID NO: 2243832 - RNA, 22 nt, Human
ucaccagccccagugcccacag

SEQ ID NO: 2243833 - RNA, 13 nt, Human
ucaccagcuccuc

SEQ ID NO: 2243834 - RNA, 19 nt, Human
ucaccagcccggccugcuc

SEQ ID NO: 2243835 - RNA, 15 nt, Human
ucaccagcuccuccc

SEQ ID NO: 2243836 - RNA, 21 nt, Human
ucacuauguugcccaggcagg

SEQ ID NO: 2243837 - RNA, 14 nt, Human
ucaccagcugccuc

SEQ ID NO: 2243838 - RNA, 23 nt, Human
acccugaggcccagagggccugc

SEQ ID NO: 2243839 - RNA, 18 nt, Human
acccugcaaaggacuguu

SEQ ID NO: 2243840 - RNA, 20 nt, Human
acccugauuuaggagaagcc

SEQ ID NO: 2243841 - RNA, 23 nt, Human
acccugauuuaggagaagccagg

SEQ ID NO: 2243842 - RNA, 22 nt, Human
acccugauuuaggagaagccag

SEQ ID NO: 2243843 - RNA, 22 nt, Human
acccugcgcccaguccuuccac

SEQ ID NO: 2243844 - RNA, 22 nt, Human
acccugcgaaggggcccugguc

SEQ ID NO: 2243845 - RNA, 20 nt, Human
acccugcgaaggggcccugg

SEQ ID NO: 2243846 - RNA, 19 nt, Human
acccugcgaaggggcccug

SEQ ID NO: 2243847 - RNA, 18 nt, Human
acccugcgaaggggcccu

SEQ ID NO: 2243848 - RNA, 18 nt, Human
acccugccuuaucuugca

SEQ ID NO: 2243849 - RNA, 14 nt, Human
acccugccuuaucu

SEQ ID NO: 2243850 - RNA, 13 nt, Human
acccugccccugc

SEQ ID NO: 2243851 - RNA, 12 nt, Human
acccugccccug

SEQ ID NO: 2243852 - RNA, 14 nt, Human
acccugccccugcc

SEQ ID NO: 2243853 - RNA, 20 nt, Human
acccucgaagcgcgccacuc

SEQ ID NO: 2243854 - RNA, 16 nt, Human
acccucgaagcgcgcc

SEQ ID NO: 2243855 - RNA, 14 nt, Human
acccucgaggcgga

SEQ ID NO: 2243856 - RNA, 21 nt, Human
acccucgaagcgcgccacucg

SEQ ID NO: 2243857 - RNA, 23 nt, Human
acccugagcugaggcagcagugu

SEQ ID NO: 2243858 - RNA, 22 nt, Human
acccugagcugaggcagcagug

SEQ ID NO: 2243859 - RNA, 17 nt, Human
acccugagcugaggcag

SEQ ID NO: 2243860 - RNA, 11 nt, Human
acccugagccc

SEQ ID NO: 2243861 - RNA, 16 nt, Human
acccugagccccuucc

SEQ ID NO: 2243862 - RNA, 17 nt, Human
acccugagccccuuccu

SEQ ID NO: 2243863 - RNA, 11 nt, Human
acccugaggcc

SEQ ID NO: 2243864 - RNA, 13 nt, Human
acccugaggccca

SEQ ID NO: 2243865 - RNA, 19 nt, Human
acccugaggcccagagggc

SEQ ID NO: 2243866 - RNA, 21 nt, Human
acccugaggcccagagggccu

SEQ ID NO: 2243867 - RNA, 16 nt, Human
acccgcuuucuugcug

SEQ ID NO: 2243868 - RNA, 15 nt, Human
acccgcucuggacca

SEQ ID NO: 2243869 - RNA, 12 nt, Human
acccgcucugga

SEQ ID NO: 2243870 - RNA, 13 nt, Human
acccgcucuggac

SEQ ID NO: 2243871 - RNA, 24 nt, Human
acccgccucucccgucagggccca

SEQ ID NO: 2243872 - RNA, 16 nt, Human
acccgccuuuuauaaa

SEQ ID NO: 2243873 - RNA, 19 nt, Human
acccgccuuuuauaaaccu

SEQ ID NO: 2243874 - RNA, 18 nt, Human
acccgcucaucacuggau

SEQ ID NO: 2243875 - RNA, 23 nt, Human
acccggagcuaacacuggccccu

SEQ ID NO: 2243876 - RNA, 22 nt, Human
acccggagcuaacacuggcccc

SEQ ID NO: 2243877 - RNA, 12 nt, Human
acccggaggcca

SEQ ID NO: 2243878 - RNA, 15 nt, Human
acccggaggccacau

SEQ ID NO: 2243879 - RNA, 19 nt, Human
acccgggaagggggcuggg

SEQ ID NO: 2243880 - RNA, 20 nt, Human
acccgggaagggggcuggga

SEQ ID NO: 2243881 - RNA, 17 nt, Human
acccucauguucuuaau

SEQ ID NO: 2243882 - RNA, 15 nt, Human
acccucauguucuua

SEQ ID NO: 2243883 - RNA, 14 nt, Human
acccucauguucuu

SEQ ID NO: 2243884 - RNA, 22 nt, Human
acccgggaagggggcugggaca

SEQ ID NO: 2243885 - RNA, 23 nt, Human
acccucccccaggaggucgaccc

SEQ ID NO: 2243886 - RNA, 23 nt, Human
acccuccccgcaccccccaagcu

SEQ ID NO: 2243887 - RNA, 10 nt, Human
acccuccccc

SEQ ID NO: 2243888 - RNA, 19 nt, Human
acccggaggccacaugagu

SEQ ID NO: 2243889 - RNA, 15 nt, Human
acccgggaggcagag

SEQ ID NO: 2243890 - RNA, 17 nt, Human
acccucauucuacugaa

SEQ ID NO: 2243891 - RNA, 20 nt, Human
acccucaugcugugugacuc

SEQ ID NO: 2243892 - RNA, 17 nt, Human
acccucccucagccccu

SEQ ID NO: 2243893 - RNA, 14 nt, Human
acccucccucagcc

SEQ ID NO: 2243894 - RNA, 12 nt, Human
acccucccucag

SEQ ID NO: 2243895 - RNA, 12 nt, Human
acccuccccucc

SEQ ID NO: 2243896 - RNA, 13 nt, Human
acccuccccuccc

SEQ ID NO: 2243897 - RNA, 12 nt, Human
acccuccccucu

SEQ ID NO: 2243898 - RNA, 13 nt, Human
acccuccccucuc

SEQ ID NO: 2243899 - RNA, 14 nt, Human
acccuccccucucu

SEQ ID NO: 2243900 - RNA, 18 nt, Human
acccuccccucucuugca

SEQ ID NO: 2243901 - RNA, 19 nt, Human
acccuccccucucuugcac

SEQ ID NO: 2243902 - RNA, 23 nt, Human
acccucccucagccccucuugcc

SEQ ID NO: 2243903 - RNA, 20 nt, Human
acccucccucagccccucuu

SEQ ID NO: 2243904 - RNA, 19 nt, Human
acccucccucagccccucu

SEQ ID NO: 2243905 - RNA, 18 nt, Human
acccucccucagccccuc

SEQ ID NO: 2243906 - RNA, 16 nt, Human
acccucccuccgaucc

SEQ ID NO: 2243907 - RNA, 20 nt, Human
acccuccugucuucccaggg

SEQ ID NO: 2243908 - RNA, 22 nt, Human
acccucccuccgauccuuccuc

SEQ ID NO: 2243909 - RNA, 23 nt, Human
acccucccuccgauccuuccucc

SEQ ID NO: 2243910 - RNA, 21 nt, Human
acccuccugucuucccagggu

SEQ ID NO: 2243911 - RNA, 23 nt, Human
acccuccugucuucccaggguag

SEQ ID NO: 2243912 - RNA, 11 nt, Human
acccuccuguu

SEQ ID NO: 2243913 - RNA, 19 nt, Human
acccuccuguugcacccag

SEQ ID NO: 2243914 - RNA, 21 nt, Human
acccuccuuucaccacaugug

SEQ ID NO: 2243915 - RNA, 24 nt, Human
acccuccuguugcacccagcccug

SEQ ID NO: 2243916 - RNA, 20 nt, Human
acccuccuguugcacccagc

SEQ ID NO: 2243917 - RNA, 21 nt, Human
acccuccuguugcacccagcc

SEQ ID NO: 2243918 - RNA, 22 nt, Human
acccuccuguugcacccagccc

SEQ ID NO: 2243919 - RNA, 23 nt, Human
acccuccuguugcacccagcccu

SEQ ID NO: 2243920 - RNA, 22 nt, Human
acccccacucucauuccccagg

SEQ ID NO: 2243921 - RNA, 21 nt, Human
acccccacucucauuccccag

SEQ ID NO: 2243922 - RNA, 16 nt, Human
acccccagcaacccuc

SEQ ID NO: 2243923 - RNA, 13 nt, Human
acccccagcaccc

SEQ ID NO: 2243924 - RNA, 13 nt, Human
acccccagcaacc

SEQ ID NO: 2243925 - RNA, 11 nt, Human
acccccagcaa

SEQ ID NO: 2243926 - RNA, 12 nt, Human
acccccagccug

SEQ ID NO: 2243927 - RNA, 13 nt, Human
acccccagccugc

SEQ ID NO: 2243928 - RNA, 18 nt, Human
acccccagcacccgggcu

SEQ ID NO: 2243929 - RNA, 21 nt, Human
acccccagcacccgggcucag

SEQ ID NO: 2243930 - RNA, 17 nt, Human
ucaggcauaggccuggg

SEQ ID NO: 2243931 - RNA, 16 nt, Human
ucaggcauaggccugg

SEQ ID NO: 2243932 - RNA, 15 nt, Human
ucaggcauaggccug

SEQ ID NO: 2243933 - RNA, 22 nt, Human
acccccagcacccgggcucagg

SEQ ID NO: 2243934 - RNA, 18 nt, Human
ucaggcaggugggaugga

SEQ ID NO: 2243935 - RNA, 21 nt, Human
ucaggcaggaagggcaggaag

SEQ ID NO: 2243936 - RNA, 13 nt, Human
ucaggcaggaagg

SEQ ID NO: 2243937 - RNA, 13 nt, Human
ucaggcagcucaa

SEQ ID NO: 2243938 - RNA, 17 nt, Human
ucaggcaggugggaugg

SEQ ID NO: 2243939 - RNA, 17 nt, Human
ucaggccacggcagccu

SEQ ID NO: 2243940 - RNA, 13 nt, Human
ucaggccacuuga

SEQ ID NO: 2243941 - RNA, 14 nt, Human
ucaggccacggcag

SEQ ID NO: 2243942 - RNA, 16 nt, Human
ucaggccacggcagcc

SEQ ID NO: 2243943 - RNA, 21 nt, Human
ucaggccaccugcccccuucu

SEQ ID NO: 2243944 - RNA, 19 nt, Human
ucaggccaccugcccccuu

SEQ ID NO: 2243945 - RNA, 17 nt, Human
ucaggccaccugccccc

SEQ ID NO: 2243946 - RNA, 13 nt, Human
ucaggccagcugc

SEQ ID NO: 2243947 - RNA, 14 nt, Human
ucaggccagcugcu

SEQ ID NO: 2243948 - RNA, 13 nt, Human
ucaggccaggccc

SEQ ID NO: 2243949 - RNA, 14 nt, Human
ucaggccaggcccu

SEQ ID NO: 2243950 - RNA, 15 nt, Human
ucaggccaggcccuc

SEQ ID NO: 2243951 - RNA, 16 nt, Human
ucaggccaggcccucu

SEQ ID NO: 2243952 - RNA, 17 nt, Human
ucaggguuggccccugc

SEQ ID NO: 2243953 - RNA, 23 nt, Human
ucaggggugugcggccuuuggcu

SEQ ID NO: 2243954 - RNA, 19 nt, Human
ucaggggugugcggccuuu

SEQ ID NO: 2243955 - RNA, 12 nt, Human
ucaggggugugc

SEQ ID NO: 2243956 - RNA, 19 nt, Human
ucaggccaggcccucugcc

SEQ ID NO: 2243957 - RNA, 20 nt, Human
ucagggggguugugaggccu

SEQ ID NO: 2243958 - RNA, 17 nt, Human
ucaggccaggcccucug

SEQ ID NO: 2243959 - RNA, 18 nt, Human
ucaggccaggcccucugc

SEQ ID NO: 2243960 - RNA, 19 nt, Human
ucagguaguugcaauugaa

SEQ ID NO: 2243961 - RNA, 13 nt, Human
ucagguagcugcc

SEQ ID NO: 2243962 - RNA, 16 nt, Human
ucagguauguugccuu

SEQ ID NO: 2243963 - RNA, 15 nt, Human
ucagguauguugccu

SEQ ID NO: 2243964 - RNA, 23 nt, Human
ucaggggucgucaccaccucucc

SEQ ID NO: 2243965 - RNA, 21 nt, Human
ucagguaaucgaccugccucg

SEQ ID NO: 2243966 - RNA, 13 nt, Human
acccgccucuccc

SEQ ID NO: 2243967 - RNA, 18 nt, Human
acccgccucucccgucag

SEQ ID NO: 2243968 - RNA, 21 nt, Human
acccgccucucccgucagggc

SEQ ID NO: 2243969 - RNA, 23 nt, Human
acccgccucucccgucagggccc

SEQ ID NO: 2243970 - RNA, 19 nt, Human
acccgcuaagagggaggga

SEQ ID NO: 2243971 - RNA, 23 nt, Human
ucaggguuggccccugcccggcu

SEQ ID NO: 2243972 - RNA, 18 nt, Human
ucagguaaucgaccugcc

SEQ ID NO: 2243973 - RNA, 20 nt, Human
ucagguaaucgaccugccuc

SEQ ID NO: 2243974 - RNA, 19 nt, Human
ucagguaaucgaccugccu

SEQ ID NO: 2243975 - RNA, 18 nt, Human
ucaggguuggccccugcc

SEQ ID NO: 2243976 - RNA, 19 nt, Human
ucaggguuggccccugccc

SEQ ID NO: 2243977 - RNA, 17 nt, Human
acccuggaaaaugaauc

SEQ ID NO: 2243978 - RNA, 15 nt, Human
acccugcguggggac

SEQ ID NO: 2243979 - RNA, 16 nt, Human
acccugcguggggaca

SEQ ID NO: 2243980 - RNA, 17 nt, Human
acccugcguggggacag

SEQ ID NO: 2243981 - RNA, 20 nt, Human
acccuugccgucuaccugag

SEQ ID NO: 2243982 - RNA, 20 nt, Human
acccuggaccaguggucuca

SEQ ID NO: 2243983 - RNA, 17 nt, Human
acccuggaccagugguc

SEQ ID NO: 2243984 - RNA, 13 nt, Human
acccuuggacuug

SEQ ID NO: 2243985 - RNA, 15 nt, Human
acccuuggacuugag

SEQ ID NO: 2243986 - RNA, 17 nt, Human
acccuuggccugucuca

SEQ ID NO: 2243987 - RNA, 13 nt, Human
acccuuggccugu

SEQ ID NO: 2243988 - RNA, 17 nt, Human
acccuuggcucaauccu

SEQ ID NO: 2243989 - RNA, 17 nt, Human
acccuuggcuugcccac

SEQ ID NO: 2243990 - RNA, 12 nt, Human
acccuuggccug

SEQ ID NO: 2243991 - RNA, 11 nt, Human
acccuuggccu

SEQ ID NO: 2243992 - RNA, 21 nt, Human
acccuuggaggcugucuucuc

SEQ ID NO: 2243993 - RNA, 18 nt, Human
acccuuggacuugaggau

SEQ ID NO: 2243994 - RNA, 20 nt, Human
accgaaaacguggcugcuuc

SEQ ID NO: 2243995 - RNA, 15 nt, Human
ucaggugucccugca

SEQ ID NO: 2243996 - RNA, 23 nt, Human
ucagguggggucacucuggcagc

SEQ ID NO: 2243997 - RNA, 17 nt, Human
ucaggugucccugcacu

SEQ ID NO: 2243998 - RNA, 18 nt, Human
ucaggugucccugcacuu

SEQ ID NO: 2243999 - RNA, 22 nt, Human
ucagguggggucacucuggcag

SEQ ID NO: 2244000 - RNA, 21 nt, Human
accgaaaacguggcugcuuca

SEQ ID NO: 2244001 - RNA, 22 nt, Human
accgaaaacguggcugcuucaa

SEQ ID NO: 2244002 - RNA, 13 nt, Human
ucaguaagccgug

SEQ ID NO: 2244003 - RNA, 21 nt, Human
ucaguaacuuacccuuaggga

SEQ ID NO: 2244004 - RNA, 17 nt, Human
ucaguaagaaaaagaag

SEQ ID NO: 2244005 - RNA, 19 nt, Human
ucaguaagaaaaagaagaa

SEQ ID NO: 2244006 - RNA, 13 nt, Human
ucaguaagacgac

SEQ ID NO: 2244007 - RNA, 21 nt, Human
ucaguaagacgacaaggaaag

SEQ ID NO: 2244008 - RNA, 22 nt, Human
ucaguaagacgacaaggaaagg

SEQ ID NO: 2244009 - RNA, 17 nt, Human
ucaguaaguaucuggag

SEQ ID NO: 2244010 - RNA, 19 nt, Human
ucaguaauaaacuguguuu

SEQ ID NO: 2244011 - RNA, 14 nt, Human
ucaguaauauuuau

SEQ ID NO: 2244012 - RNA, 13 nt, Human
ucaguaauaacuc

SEQ ID NO: 2244013 - RNA, 16 nt, Human
ucaguacccucucagc

SEQ ID NO: 2244014 - RNA, 17 nt, Human
ucaguacccucucagcu

SEQ ID NO: 2244015 - RNA, 19 nt, Human
ucaguacccucucagcucc

SEQ ID NO: 2244016 - RNA, 18 nt, Human
ucaguaauuugaggacaa

SEQ ID NO: 2244017 - RNA, 17 nt, Human
ucaguaauuugaggaca

SEQ ID NO: 2244018 - RNA, 15 nt, Human
ucaguaauuugagga

SEQ ID NO: 2244019 - RNA, 14 nt, Human
ucaguaauuugagg

SEQ ID NO: 2244020 - RNA, 23 nt, Human
ucaguagaaacucuacauaauuu

SEQ ID NO: 2244021 - RNA, 23 nt, Human
ucaguaggugcccagaauaaguu

SEQ ID NO: 2244022 - RNA, 13 nt, Human
ucaguaccuggag

SEQ ID NO: 2244023 - RNA, 14 nt, Human
ucaguaccuggagg

SEQ ID NO: 2244024 - RNA, 15 nt, Human
ucaguaccuggagga

SEQ ID NO: 2244025 - RNA, 16 nt, Human
ucaguaccuggaggag

SEQ ID NO: 2244026 - RNA, 18 nt, Human
ucaguaccuggaggagga

SEQ ID NO: 2244027 - RNA, 18 nt, Human
ucagguuugccugagggc

SEQ ID NO: 2244028 - RNA, 13 nt, Human
ucagguuuggggu

SEQ ID NO: 2244029 - RNA, 17 nt, Human
ucagguuugccugaggg

SEQ ID NO: 2244030 - RNA, 17 nt, Human
ucagguuugaguagagg

SEQ ID NO: 2244031 - RNA, 20 nt, Human
ucagguuguaguaaagaaau

SEQ ID NO: 2244032 - RNA, 19 nt, Human
ucagguuguaguaaagaaa

SEQ ID NO: 2244033 - RNA, 17 nt, Human
ucagguuguaguaaaga

SEQ ID NO: 2244034 - RNA, 23 nt, Human
ucagguugcugguugcugugugg

SEQ ID NO: 2244035 - RNA, 22 nt, Human
ucagguugucugaagucacugc

SEQ ID NO: 2244036 - RNA, 13 nt, Human
ucagguuuuguaa

SEQ ID NO: 2244037 - RNA, 14 nt, Human
ucagguuuuguaaa

SEQ ID NO: 2244038 - RNA, 22 nt, Human
ucaggugucccugcacuugcag

SEQ ID NO: 2244039 - RNA, 12 nt, Human
accgaaacagcg

SEQ ID NO: 2244040 - RNA, 14 nt, Human
ucagguguugccaa

SEQ ID NO: 2244041 - RNA, 18 nt, Human
ucagguuaucgaaauaac

SEQ ID NO: 2244042 - RNA, 17 nt, Human
accgaaacagcgcuggg

SEQ ID NO: 2244043 - RNA, 18 nt, Human
ucagguucuuagugucac

SEQ ID NO: 2244044 - RNA, 15 nt, Human
ucagguugcugguug

SEQ ID NO: 2244045 - RNA, 17 nt, Human
ucagguugcugguugcu

SEQ ID NO: 2244046 - RNA, 19 nt, Human
ucagguugcugguugcugu

SEQ ID NO: 2244047 - RNA, 20 nt, Human
ucagguugcugguugcugug

SEQ ID NO: 2244048 - RNA, 21 nt, Human
ucagguugcugguugcugugu

SEQ ID NO: 2244049 - RNA, 22 nt, Human
ucagguugcugguugcugugug

SEQ ID NO: 2244050 - RNA, 19 nt, Human
ucagguuaucgaaauaaca

SEQ ID NO: 2244051 - RNA, 20 nt, Human
ucagguuaucgaaauaacaa

SEQ ID NO: 2244052 - RNA, 21 nt, Human
ucagguuaucgaaauaacaau

SEQ ID NO: 2244053 - RNA, 23 nt, Human
ucagguuaucgaaauaacaaugu

SEQ ID NO: 2244054 - RNA, 14 nt, Human
ucagguuccauccc

SEQ ID NO: 2244055 - RNA, 16 nt, Human
ucagguucuccuugau

SEQ ID NO: 2244056 - RNA, 16 nt, Human
ucauaaacugugugca

SEQ ID NO: 2244057 - RNA, 15 nt, Human
ucauaaacugugugc

SEQ ID NO: 2244058 - RNA, 14 nt, Human
ucauaaacugugug

SEQ ID NO: 2244059 - RNA, 13 nt, Human
ucauaaacugugu

SEQ ID NO: 2244060 - RNA, 16 nt, Human
ucauaaaccuuaagua

SEQ ID NO: 2244061 - RNA, 18 nt, Human
ucaguuuguccuguagag

SEQ ID NO: 2244062 - RNA, 21 nt, Human
ucauaaacaacuuaauguucu

SEQ ID NO: 2244063 - RNA, 24 nt, Human
ucauaaagcaggcagaacucaucu

SEQ ID NO: 2244064 - RNA, 11 nt, Human
ucauaaaugaa

SEQ ID NO: 2244065 - RNA, 18 nt, Human
ucauaaauaaaguuuguu

SEQ ID NO: 2244066 - RNA, 17 nt, Human
ucauaacuuucauuaaa

SEQ ID NO: 2244067 - RNA, 19 nt, Human
ucauaagacuuugggauag

SEQ ID NO: 2244068 - RNA, 18 nt, Human
ucauaagauauuuuucau

SEQ ID NO: 2244069 - RNA, 21 nt, Human
ucauaagauauuuuucaugau

SEQ ID NO: 2244070 - RNA, 12 nt, Human
ucauaaaugaag

SEQ ID NO: 2244071 - RNA, 14 nt, Human
ucauaaaugaauuu

SEQ ID NO: 2244072 - RNA, 15 nt, Human
ucauaagccaauuuu

SEQ ID NO: 2244073 - RNA, 18 nt, Human
ucauaagccaauuuuucu

SEQ ID NO: 2244074 - RNA, 20 nt, Human
ucauaagccaauuuuucugc

SEQ ID NO: 2244075 - RNA, 21 nt, Human
ucauaagccaauuuuucugca

SEQ ID NO: 2244076 - RNA, 16 nt, Human
ucauaagcgaucacuu

SEQ ID NO: 2244077 - RNA, 22 nt, Human
ucauaagccaauuuuucugcac

SEQ ID NO: 2244078 - RNA, 23 nt, Human
ucauaagccaauuuuucugcacu

SEQ ID NO: 2244079 - RNA, 20 nt, Human
ucauaaguauuucaaauugg

SEQ ID NO: 2244080 - RNA, 15 nt, Human
ucauaaguauuucaa

SEQ ID NO: 2244081 - RNA, 20 nt, Human
ucauaaguauuaugucucuu

SEQ ID NO: 2244082 - RNA, 19 nt, Human
ucaguuugcuagcagaaau

SEQ ID NO: 2244083 - RNA, 20 nt, Human
ucaguuuccuggucuguaga

SEQ ID NO: 2244084 - RNA, 19 nt, Human
ucaguuucaauucagugcu

SEQ ID NO: 2244085 - RNA, 16 nt, Human
ucaguuuccuggucug

SEQ ID NO: 2244086 - RNA, 21 nt, Human
ucauaaaauaaaguauauaua

SEQ ID NO: 2244087 - RNA, 16 nt, Human
ucauaaaauaaaguau

SEQ ID NO: 2244088 - RNA, 17 nt, Human
ucaguuugugugucuua

SEQ ID NO: 2244089 - RNA, 15 nt, Human
ucaguuugugugucu

SEQ ID NO: 2244090 - RNA, 16 nt, Human
ucaguuugugugucuu

SEQ ID NO: 2244091 - RNA, 15 nt, Human
ucaguuuguauauac

SEQ ID NO: 2244092 - RNA, 22 nt, Human
ucagugcuguggccugggcaag

SEQ ID NO: 2244093 - RNA, 12 nt, Human
ucaguuguuuuc

SEQ ID NO: 2244094 - RNA, 19 nt, Human
ucaguuguuagugugucuu

SEQ ID NO: 2244095 - RNA, 23 nt, Human
ucaguuuauccaagguguaacuc

SEQ ID NO: 2244096 - RNA, 15 nt, Human
ucaguuuaauccuuc

SEQ ID NO: 2244097 - RNA, 16 nt, Human
ucaguuuaauccuucu

SEQ ID NO: 2244098 - RNA, 19 nt, Human
ucaguuuaauccuucuagu

SEQ ID NO: 2244099 - RNA, 20 nt, Human
ucaguuuaauccuucuaguu

SEQ ID NO: 2244100 - RNA, 14 nt, Human
ucaguauugaagca

SEQ ID NO: 2244101 - RNA, 18 nt, Human
ucaguauugaagcauuuu

SEQ ID NO: 2244102 - RNA, 17 nt, Human
ucaguauugaagcauuu

SEQ ID NO: 2244103 - RNA, 16 nt, Human
ucaguauugaagcauu

SEQ ID NO: 2244104 - RNA, 15 nt, Human
ucaguauugaagcau

SEQ ID NO: 2244105 - RNA, 15 nt, Human
ucaguauguugucaa

SEQ ID NO: 2244106 - RNA, 16 nt, Human
ucaguauguugucaaa

SEQ ID NO: 2244107 - RNA, 17 nt, Human
ucaguauguugucaaag

SEQ ID NO: 2244108 - RNA, 18 nt, Human
ucaguauguugucaaaga

SEQ ID NO: 2244109 - RNA, 20 nt, Human
ucaguauguugucaaagaga

SEQ ID NO: 2244110 - RNA, 19 nt, Human
ucagugccuuauggaacac

SEQ ID NO: 2244111 - RNA, 20 nt, Human
ucagugccuuauggaacacu

SEQ ID NO: 2244112 - RNA, 22 nt, Human
ucagugccuuauggaacacucu

SEQ ID NO: 2244113 - RNA, 23 nt, Human
ucagugccuuauggaacacucug

SEQ ID NO: 2244114 - RNA, 14 nt, Human
ucaguggcagcugc

SEQ ID NO: 2244115 - RNA, 15 nt, Human
ucaguggcagcugcu

SEQ ID NO: 2244116 - RNA, 19 nt, Human
ucagugcuguggccugggc

SEQ ID NO: 2244117 - RNA, 17 nt, Human
ucagugcuguggccugg

SEQ ID NO: 2244118 - RNA, 16 nt, Human
ucaguggcagcugcuu

SEQ ID NO: 2244119 - RNA, 15 nt, Human
ucagugcuguggccu

SEQ ID NO: 2244120 - RNA, 14 nt, Human
ucagugcuguggcc

SEQ ID NO: 2244121 - RNA, 12 nt, Human
ucagugcugugg

SEQ ID NO: 2244122 - RNA, 13 nt, Human
ucaguggcagcug

SEQ ID NO: 2244123 - RNA, 18 nt, Human
ucagugcucgagacacag

SEQ ID NO: 2244124 - RNA, 19 nt, Human
ucagugcucccucacaugu

SEQ ID NO: 2244125 - RNA, 13 nt, Human
ucagugcucccuc

SEQ ID NO: 2244126 - RNA, 12 nt, Human
ucagugcucccu

SEQ ID NO: 2244127 - RNA, 19 nt, Human
ucaguauugaagcauuuua

SEQ ID NO: 2244128 - RNA, 17 nt, Human
acauuaagccuuccaca

SEQ ID NO: 2244129 - RNA, 21 nt, Human
acauuaaucaaucaucugugu

SEQ ID NO: 2244130 - RNA, 22 nt, Human
acauuaauguuaauucagcacu

SEQ ID NO: 2244131 - RNA, 15 nt, Human
acauuaauguuaauu

SEQ ID NO: 2244132 - RNA, 21 nt, Human
acauuaauguuaauucagcac

SEQ ID NO: 2244133 - RNA, 15 nt, Human
acauuaccuuacugu

SEQ ID NO: 2244134 - RNA, 18 nt, Human
acauuagaacacugcauu

SEQ ID NO: 2244135 - RNA, 16 nt, Human
acauuaccuuacugug

SEQ ID NO: 2244136 - RNA, 19 nt, Human
acauuaccuuacuguggag

SEQ ID NO: 2244137 - RNA, 21 nt, Human
acaugucuuuucuugcaugag

SEQ ID NO: 2244138 - RNA, 22 nt, Human
acaugucuuguacauguguagc

SEQ ID NO: 2244139 - RNA, 20 nt, Human
acauuaagauugaggccugc

SEQ ID NO: 2244140 - RNA, 16 nt, Human
acaugucuuguacaug

SEQ ID NO: 2244141 - RNA, 19 nt, Human
acaugucuuguacaugugu

SEQ ID NO: 2244142 - RNA, 13 nt, Human
acaugucuuguac

SEQ ID NO: 2244143 - RNA, 14 nt, Human
acaugucuuguaca

SEQ ID NO: 2244144 - RNA, 22 nt, Human
acaugucuuaaugaaguuugaa

SEQ ID NO: 2244145 - RNA, 23 nt, Human
acaugucuuaaugaaguuugaau

SEQ ID NO: 2244146 - RNA, 16 nt, Human
acaugucuuaaugaag

SEQ ID NO: 2244147 - RNA, 18 nt, Human
acaugucuuaaugaaguu

SEQ ID NO: 2244148 - RNA, 20 nt, Human
acaugucuuaaugaaguuug

SEQ ID NO: 2244149 - RNA, 21 nt, Human
acaugucuuaaugaaguuuga

SEQ ID NO: 2244150 - RNA, 14 nt, Human
acauguauaauauu

SEQ ID NO: 2244151 - RNA, 23 nt, Human
acauguaauaaaaaguauauguu

SEQ ID NO: 2244152 - RNA, 19 nt, Human
acauguaauaaaaaguaua

SEQ ID NO: 2244153 - RNA, 17 nt, Human
acauguaauaaaaagua

SEQ ID NO: 2244154 - RNA, 17 nt, Human
acaugguuugacucccg

SEQ ID NO: 2244155 - RNA, 20 nt, Human
acaugguugugaccugagga

SEQ ID NO: 2244156 - RNA, 18 nt, Human
acaugguugugaccugag

SEQ ID NO: 2244157 - RNA, 22 nt, Human
acaugguuacaaucauugcuga

SEQ ID NO: 2244158 - RNA, 23 nt, Human
acaugguuacaaucauugcugaa

SEQ ID NO: 2244159 - RNA, 18 nt, Human
acaugguggguccauggg

SEQ ID NO: 2244160 - RNA, 19 nt, Human
acaugguggguccaugggc

SEQ ID NO: 2244161 - RNA, 23 nt, Human
acauggugucuggauucccagga

SEQ ID NO: 2244162 - RNA, 18 nt, Human
acaugguuacaaucauug

SEQ ID NO: 2244163 - RNA, 19 nt, Human
acauggugcuacgccugca

SEQ ID NO: 2244164 - RNA, 20 nt, Human
acauggugccugagaggcag

SEQ ID NO: 2244165 - RNA, 23 nt, Human
acauggugccugagaggcaggca

SEQ ID NO: 2244166 - RNA, 23 nt, Human
acauggugcuacgccugcaugua

SEQ ID NO: 2244167 - RNA, 19 nt, Human
acauguauaauauuuuuaa

SEQ ID NO: 2244168 - RNA, 20 nt, Human
acauguauaauauuuuuaau

SEQ ID NO: 2244169 - RNA, 21 nt, Human
acauguaucuaugcauuuucu

SEQ ID NO: 2244170 - RNA, 18 nt, Human
acauguaucuaugcauuu

SEQ ID NO: 2244171 - RNA, 20 nt, Human
acauguaauaaaaaguauau

SEQ ID NO: 2244172 - RNA, 11 nt, Human
acauguauguu

SEQ ID NO: 2244173 - RNA, 14 nt, Human
acauguauguuuug

SEQ ID NO: 2244174 - RNA, 15 nt, Human
acauguauguuuugg

SEQ ID NO: 2244175 - RNA, 22 nt, Human
acauguauguuuugguaucugu

SEQ ID NO: 2244176 - RNA, 23 nt, Human
acauguauguuuugguaucuguu

SEQ ID NO: 2244177 - RNA, 15 nt, Human
acauguauuauuuca

SEQ ID NO: 2244178 - RNA, 18 nt, Human
acauguauugcacauugu

SEQ ID NO: 2244179 - RNA, 19 nt, Human
acauguauugcacauugua

SEQ ID NO: 2244180 - RNA, 15 nt, Human
acaugucuuaaugaa

SEQ ID NO: 2244181 - RNA, 12 nt, Human
acauguauuugu

SEQ ID NO: 2244182 - RNA, 21 nt, Human
acauguauugcacauuguaaa

SEQ ID NO: 2244183 - RNA, 18 nt, Human
acauggaauaacauguaa

SEQ ID NO: 2244184 - RNA, 14 nt, Human
acauggaaguacua

SEQ ID NO: 2244185 - RNA, 20 nt, Human
acauggaauaacauguaauu

SEQ ID NO: 2244186 - RNA, 19 nt, Human
acauggacccggagcuaac

SEQ ID NO: 2244187 - RNA, 13 nt, Human
acauggacuugua

SEQ ID NO: 2244188 - RNA, 22 nt, Human
acauggacccggagcuaacacu

SEQ ID NO: 2244189 - RNA, 16 nt, Human
acauggacccggagcu

SEQ ID NO: 2244190 - RNA, 13 nt, Human
acauggacccgga

SEQ ID NO: 2244191 - RNA, 12 nt, Human
acauggacccgg

SEQ ID NO: 2244192 - RNA, 21 nt, Human
acaugaggacaugauggagcg

SEQ ID NO: 2244193 - RNA, 22 nt, Human
acaugagcuauuuccauuccag

SEQ ID NO: 2244194 - RNA, 17 nt, Human
acaugaggggacauuuu

SEQ ID NO: 2244195 - RNA, 16 nt, Human
acaugaggggacauuu

SEQ ID NO: 2244196 - RNA, 14 nt, Human
acaugagauuuaua

SEQ ID NO: 2244197 - RNA, 23 nt, Human
acaugagcuauuuccauuccaga

SEQ ID NO: 2244198 - RNA, 23 nt, Human
acaugagcaucaggccaggcccu

SEQ ID NO: 2244199 - RNA, 19 nt, Human
acauggaguauaugucaag

SEQ ID NO: 2244200 - RNA, 15 nt, Human
acauggaguauaugu

SEQ ID NO: 2244201 - RNA, 21 nt, Human
acauggagacuccugcccugu

SEQ ID NO: 2244202 - RNA, 22 nt, Human
acauggagacuccugcccuguu

SEQ ID NO: 2244203 - RNA, 14 nt, Human
acauggacuuguau

SEQ ID NO: 2244204 - RNA, 15 nt, Human
acauggacuuguaua

SEQ ID NO: 2244205 - RNA, 17 nt, Human
acauggacuuguauauu

SEQ ID NO: 2244206 - RNA, 18 nt, Human
acauggacuuguauauuu

SEQ ID NO: 2244207 - RNA, 23 nt, Human
acauggacuuguauauuuguaca

SEQ ID NO: 2244208 - RNA, 15 nt, Human
acauggagacuccug

SEQ ID NO: 2244209 - RNA, 16 nt, Human
acauggagacuccugc

SEQ ID NO: 2244210 - RNA, 17 nt, Human
acauggagacuccugcc

SEQ ID NO: 2244211 - RNA, 15 nt, Human
acauggccaguguga

SEQ ID NO: 2244212 - RNA, 14 nt, Human
acauggccagugug

SEQ ID NO: 2244213 - RNA, 22 nt, Human
acauggccccucccccugccag

SEQ ID NO: 2244214 - RNA, 21 nt, Human
acauggccccucccccugcca

SEQ ID NO: 2244215 - RNA, 14 nt, Human
acauggccuuugcu

SEQ ID NO: 2244216 - RNA, 20 nt, Human
acauggcucuaaaaaguuuu

SEQ ID NO: 2244217 - RNA, 19 nt, Human
acauggugccugagaggca

SEQ ID NO: 2244218 - RNA, 17 nt, Human
acauggccuaugcacau

SEQ ID NO: 2244219 - RNA, 18 nt, Human
acauggccuaugcacaua

SEQ ID NO: 2244220 - RNA, 20 nt, Human
acauggccuaugcacauaug

SEQ ID NO: 2244221 - RNA, 16 nt, Human
ucaaaagcugggcagg

SEQ ID NO: 2244222 - RNA, 23 nt, Human
ucaaaaggugccugugaggcagg

SEQ ID NO: 2244223 - RNA, 13 nt, Human
ucaaaaggugccu

SEQ ID NO: 2244224 - RNA, 14 nt, Human
ucaaaaguauuuuc

SEQ ID NO: 2244225 - RNA, 15 nt, Human
ucaaaaguauuuucc

SEQ ID NO: 2244226 - RNA, 16 nt, Human
ucaaaaguauuuuccu

SEQ ID NO: 2244227 - RNA, 17 nt, Human
ucaaaaguauuuuccug

SEQ ID NO: 2244228 - RNA, 18 nt, Human
ucaaaaguauuuuccugu

SEQ ID NO: 2244229 - RNA, 20 nt, Human
ucaaaaguauuuuccuguaa

SEQ ID NO: 2244230 - RNA, 13 nt, Human
ucaaacagucuca

SEQ ID NO: 2244231 - RNA, 21 nt, Human
ucaaacagucucaggaaauca

SEQ ID NO: 2244232 - RNA, 20 nt, Human
ucaaacagucucaggaaauc

SEQ ID NO: 2244233 - RNA, 20 nt, Human
ucaaagcaccaaaauaagaa

SEQ ID NO: 2244234 - RNA, 18 nt, Human
ucaaagcaccaaaauaag

SEQ ID NO: 2244235 - RNA, 16 nt, Human
ucaaagcaaugcauuu

SEQ ID NO: 2244236 - RNA, 17 nt, Human
ucaaagcaaugcauuuu

SEQ ID NO: 2244237 - RNA, 18 nt, Human
ucaaagcaaugcauuuug

SEQ ID NO: 2244238 - RNA, 19 nt, Human
ucaaagcaaugcauuuugg

SEQ ID NO: 2244239 - RNA, 20 nt, Human
ucaaagcaaggaaacuaugu

SEQ ID NO: 2244240 - RNA, 14 nt, Human
ucaaagcaaugcau

SEQ ID NO: 2244241 - RNA, 15 nt, Human
ucaaagcaaugcauu

SEQ ID NO: 2244242 - RNA, 16 nt, Human
ucaaagcaaggaaacu

SEQ ID NO: 2244243 - RNA, 15 nt, Human
ucaaagcaaggaaac

SEQ ID NO: 2244244 - RNA, 23 nt, Human
ucaaagcaaaugucuuccuggau

SEQ ID NO: 2244245 - RNA, 15 nt, Human
ucaaagcaaaugucu

SEQ ID NO: 2244246 - RNA, 16 nt, Human
ucaaacagaauuuuaa

SEQ ID NO: 2244247 - RNA, 22 nt, Human
ucaaacaguacacuaucuuaau

SEQ ID NO: 2244248 - RNA, 15 nt, Human
ucaaacaguagguug

SEQ ID NO: 2244249 - RNA, 20 nt, Human
ucaaacaguagguuggcagu

SEQ ID NO: 2244250 - RNA, 22 nt, Human
ucaaagauauuuugcuuuguga

SEQ ID NO: 2244251 - RNA, 20 nt, Human
ucaaagauauuuugcuuugu

SEQ ID NO: 2244252 - RNA, 13 nt, Human
ucaaagauauuuu

SEQ ID NO: 2244253 - RNA, 20 nt, Human
ucaaaguguaaacaccauag

SEQ ID NO: 2244254 - RNA, 19 nt, Human
ucaaaguaaaacuugcugc

SEQ ID NO: 2244255 - RNA, 18 nt, Human
ucaaaguaggcaggacca

SEQ ID NO: 2244256 - RNA, 14 nt, Human
ucaaaguaaaacuu

SEQ ID NO: 2244257 - RNA, 19 nt, Human
ucaaagguagccaucaugg

SEQ ID NO: 2244258 - RNA, 21 nt, Human
ucaaagcaccaaaauaagaaa

SEQ ID NO: 2244259 - RNA, 22 nt, Human
ucaaagcaccaaaauaagaaaa

SEQ ID NO: 2244260 - RNA, 13 nt, Human
ucaaauauauuca

SEQ ID NO: 2244261 - RNA, 12 nt, Human
ucaaauacuuua

SEQ ID NO: 2244262 - RNA, 23 nt, Human
ucaaauacuuuaaaggaaaaaau

SEQ ID NO: 2244263 - RNA, 21 nt, Human
acaugacccuaaaucuugacu

SEQ ID NO: 2244264 - RNA, 19 nt, Human
acaugacccuaaaucuuga

SEQ ID NO: 2244265 - RNA, 15 nt, Human
acaugacaacuuugc

SEQ ID NO: 2244266 - RNA, 14 nt, Human
acaugacacagcuu

SEQ ID NO: 2244267 - RNA, 15 nt, Human
acaugagaacaaaca

SEQ ID NO: 2244268 - RNA, 13 nt, Human
acaugagcaucag

SEQ ID NO: 2244269 - RNA, 22 nt, Human
acaugaaaacacauuuuucuua

SEQ ID NO: 2244270 - RNA, 23 nt, Human
acaugaaaacacauuuuucuuag

SEQ ID NO: 2244271 - RNA, 15 nt, Human
acaugaaacagaaac

SEQ ID NO: 2244272 - RNA, 13 nt, Human
acaugaaacagaa

SEQ ID NO: 2244273 - RNA, 15 nt, Human
ucaaauacuuuaaag

SEQ ID NO: 2244274 - RNA, 14 nt, Human
acaugaacauacug

SEQ ID NO: 2244275 - RNA, 19 nt, Human
uauuuguacaguucaguuc

SEQ ID NO: 2244276 - RNA, 12 nt, Human
uauuuguacaua

SEQ ID NO: 2244277 - RNA, 12 nt, Human
uauuuguacaaa

SEQ ID NO: 2244278 - RNA, 15 nt, Human
acaugaaaacacauu

SEQ ID NO: 2244279 - RNA, 20 nt, Human
uauuuguuaaugguuugaau

SEQ ID NO: 2244280 - RNA, 22 nt, Human
uauuuguuaaugguuugaauau

SEQ ID NO: 2244281 - RNA, 17 nt, Human
uauuuguuaaauauuua

SEQ ID NO: 2244282 - RNA, 14 nt, Human
uauuuguuauuuuc

SEQ ID NO: 2244283 - RNA, 12 nt, Human
uauuuguguuuu

SEQ ID NO: 2244284 - RNA, 19 nt, Human
uauuuguguuuuaauuuaa

SEQ ID NO: 2244285 - RNA, 21 nt, Human
uauuuguguuuuaauuuaaac

SEQ ID NO: 2244286 - RNA, 22 nt, Human
uauuuguaucucugaagcaugu

SEQ ID NO: 2244287 - RNA, 23 nt, Human
uauuuguaucucugaagcauguu

SEQ ID NO: 2244288 - RNA, 17 nt, Human
uauuuguauaguugcuu

SEQ ID NO: 2244289 - RNA, 23 nt, Human
uauuuguauaguugcuugccuga

SEQ ID NO: 2244290 - RNA, 12 nt, Human
uauuuguaucuc

SEQ ID NO: 2244291 - RNA, 15 nt, Human
uauuuguaucucuga

SEQ ID NO: 2244292 - RNA, 21 nt, Human
uauuuguauuuuuuugcaagu

SEQ ID NO: 2244293 - RNA, 15 nt, Human
uauuugucuuucagg

SEQ ID NO: 2244294 - RNA, 18 nt, Human
uauuuuaaaaucugucac

SEQ ID NO: 2244295 - RNA, 13 nt, Human
uauuuuaaaauga

SEQ ID NO: 2244296 - RNA, 12 nt, Human
uauuuuaaacaa

SEQ ID NO: 2244297 - RNA, 14 nt, Human
uauuuuaaacaaaa

SEQ ID NO: 2244298 - RNA, 19 nt, Human
uauuuuaaacaaaauagaa

SEQ ID NO: 2244299 - RNA, 14 nt, Human
uauuuuaagacgaa

SEQ ID NO: 2244300 - RNA, 22 nt, Human
uauuuuaagacgaaacauuugu

SEQ ID NO: 2244301 - RNA, 21 nt, Human
uauuuuaaaagauaaauauua

SEQ ID NO: 2244302 - RNA, 17 nt, Human
uauuuguuauuuucagu

SEQ ID NO: 2244303 - RNA, 13 nt, Human
uauuuguuuucau

SEQ ID NO: 2244304 - RNA, 14 nt, Human
uauuuguuuucaug

SEQ ID NO: 2244305 - RNA, 18 nt, Human
uauuuuaaaagaaugauu

SEQ ID NO: 2244306 - RNA, 15 nt, Human
uauuuguuugcauag

SEQ ID NO: 2244307 - RNA, 18 nt, Human
uauuuguuauuuucagua

SEQ ID NO: 2244308 - RNA, 14 nt, Human
uauuuuaaaagaau

SEQ ID NO: 2244309 - RNA, 15 nt, Human
acaucuuucacauug

SEQ ID NO: 2244310 - RNA, 13 nt, Human
acaucuuucacau

SEQ ID NO: 2244311 - RNA, 15 nt, Human
acaucuuucacacuu

SEQ ID NO: 2244312 - RNA, 14 nt, Human
acaucuuucacacu

SEQ ID NO: 2244313 - RNA, 12 nt, Human
acaucuuucaca

SEQ ID NO: 2244314 - RNA, 13 nt, Human
acaucuuuauccg

SEQ ID NO: 2244315 - RNA, 17 nt, Human
acaucuuuaucuguucu

SEQ ID NO: 2244316 - RNA, 20 nt, Human
acaucuuucacacuuccacc

SEQ ID NO: 2244317 - RNA, 14 nt, Human
acaucuuuccuguc

SEQ ID NO: 2244318 - RNA, 15 nt, Human
acaucuuuuuucaca

SEQ ID NO: 2244319 - RNA, 19 nt, Human
acaucuuuuuucacaaauu

SEQ ID NO: 2244320 - RNA, 23 nt, Human
acaugaaaaaaggacaauuucaa

SEQ ID NO: 2244321 - RNA, 24 nt, Human
acaucuuuucuugccucugucccc

SEQ ID NO: 2244322 - RNA, 13 nt, Human
acaucuuggcaca

SEQ ID NO: 2244323 - RNA, 24 nt, Human
acaucuuggcacauuuaagagaca

SEQ ID NO: 2244324 - RNA, 14 nt, Human
acaucuugcucugc

SEQ ID NO: 2244325 - RNA, 19 nt, Human
acaucuuggucagauuuga

SEQ ID NO: 2244326 - RNA, 22 nt, Human
acaucuugcucugcugacagac

SEQ ID NO: 2244327 - RNA, 17 nt, Human
acaucuugcucugcuga

SEQ ID NO: 2244328 - RNA, 19 nt, Human
uaugugguuuccacgauga

SEQ ID NO: 2244329 - RNA, 22 nt, Human
acaggaggacaauucaugaacu

SEQ ID NO: 2244330 - RNA, 14 nt, Human
uauguguaaaaugu

SEQ ID NO: 2244331 - RNA, 17 nt, Human
uauguguaaaaugugaa

SEQ ID NO: 2244332 - RNA, 15 nt, Human
acaucuugcucugcu

SEQ ID NO: 2244333 - RNA, 16 nt, Human
acaucuugcucugcug

SEQ ID NO: 2244334 - RNA, 14 nt, Human
uaugugccagauuu

SEQ ID NO: 2244335 - RNA, 19 nt, Human
uaugugccagauuuaugca

SEQ ID NO: 2244336 - RNA, 20 nt, Human
uaugugggggucuguguguu

SEQ ID NO: 2244337 - RNA, 19 nt, Human
uaugugggggucugugugu

SEQ ID NO: 2244338 - RNA, 18 nt, Human
uaugugggggucugugug

SEQ ID NO: 2244339 - RNA, 17 nt, Human
uaugugcacugucacuu

SEQ ID NO: 2244340 - RNA, 20 nt, Human
uaugugcacugucacuuugc

SEQ ID NO: 2244341 - RNA, 21 nt, Human
uaugugcacugucacuuugcu

SEQ ID NO: 2244342 - RNA, 22 nt, Human
uaugugcacugucacuuugcuc

SEQ ID NO: 2244343 - RNA, 14 nt, Human
uauuuuguaauuau

SEQ ID NO: 2244344 - RNA, 21 nt, Human
uauuuuguaaacucaaaauau

SEQ ID NO: 2244345 - RNA, 19 nt, Human
uauuuugguucuuaguucu

SEQ ID NO: 2244346 - RNA, 16 nt, Human
uauuuuguaauuauug

SEQ ID NO: 2244347 - RNA, 15 nt, Human
uauuuuguauauauc

SEQ ID NO: 2244348 - RNA, 20 nt, Human
uauuuuguaaacucaaaaua

SEQ ID NO: 2244349 - RNA, 13 nt, Human
uauuuuguaaacu

SEQ ID NO: 2244350 - RNA, 21 nt, Human
uauuuugguucuuaguucuca

SEQ ID NO: 2244351 - RNA, 14 nt, Human
uauuuugucuaaaa

SEQ ID NO: 2244352 - RNA, 13 nt, Human
uauuuugugaaga

SEQ ID NO: 2244353 - RNA, 12 nt, Human
uauuuugucuaa

SEQ ID NO: 2244354 - RNA, 13 nt, Human
uauuuugucuaaa

SEQ ID NO: 2244355 - RNA, 17 nt, Human
uauuuuguguuuaggaa

SEQ ID NO: 2244356 - RNA, 20 nt, Human
uauuuuguguuuaggaacua

SEQ ID NO: 2244357 - RNA, 17 nt, Human
uauuuuuauuuguuugu

SEQ ID NO: 2244358 - RNA, 13 nt, Human
uauuuuuauuugu

SEQ ID NO: 2244359 - RNA, 12 nt, Human
uauuuuuaaugg

SEQ ID NO: 2244360 - RNA, 18 nt, Human
uauuuuucaauaaagcau

SEQ ID NO: 2244361 - RNA, 14 nt, Human
uauuuuuaagauaa

SEQ ID NO: 2244362 - RNA, 21 nt, Human
uauuuuuaauauauacuauga

SEQ ID NO: 2244363 - RNA, 15 nt, Human
uauuuuucacaguuu

SEQ ID NO: 2244364 - RNA, 20 nt, Human
uauuuuucaauaaagcauuu

SEQ ID NO: 2244365 - RNA, 11 nt, Human
uauuuuucaua

SEQ ID NO: 2244366 - RNA, 13 nt, Human
uauuuuucauauu

SEQ ID NO: 2244367 - RNA, 14 nt, Human
uauuuuucauauug

SEQ ID NO: 2244368 - RNA, 20 nt, Human
uauuuuuguaauuuuaaaua

SEQ ID NO: 2244369 - RNA, 17 nt, Human
uauuuuuguagagccag

SEQ ID NO: 2244370 - RNA, 19 nt, Human
uauuuuuggcagucugaau

SEQ ID NO: 2244371 - RNA, 20 nt, Human
uauuuuuggcagucugaauu

SEQ ID NO: 2244372 - RNA, 18 nt, Human
uauuuuugguugucaaua

SEQ ID NO: 2244373 - RNA, 20 nt, Human
uauuuuucaugauuuugaaa

SEQ ID NO: 2244374 - RNA, 12 nt, Human
uauuuuucauga

SEQ ID NO: 2244375 - RNA, 15 nt, Human
uauuuuucauauugu

SEQ ID NO: 2244376 - RNA, 19 nt, Human
uauuuuucauauugugcca

SEQ ID NO: 2244377 - RNA, 16 nt, Human
uauuuugauuauugua

SEQ ID NO: 2244378 - RNA, 17 nt, Human
uauuuugauuauuguau

SEQ ID NO: 2244379 - RNA, 14 nt, Human
uauuuugcuggaau

SEQ ID NO: 2244380 - RNA, 18 nt, Human
uauuuugauuauuguauu

SEQ ID NO: 2244381 - RNA, 14 nt, Human
uauuuugcacaguu

SEQ ID NO: 2244382 - RNA, 18 nt, Human
uauuuuacuucuagagau

SEQ ID NO: 2244383 - RNA, 16 nt, Human
uauuuuacuacugugg

SEQ ID NO: 2244384 - RNA, 15 nt, Human
uauuuugcuuuguga

SEQ ID NO: 2244385 - RNA, 13 nt, Human
uauuuugcuuugu

SEQ ID NO: 2244386 - RNA, 20 nt, Human
uauuuugcuuugugauuuuu

SEQ ID NO: 2244387 - RNA, 23 nt, Human
uauuuuggauuguauauuguguu

SEQ ID NO: 2244388 - RNA, 14 nt, Human
uauuuugguacuuu

SEQ ID NO: 2244389 - RNA, 17 nt, Human
uauuuugguacuuuuau

SEQ ID NO: 2244390 - RNA, 20 nt, Human
uauuuuggauuguauauugu

SEQ ID NO: 2244391 - RNA, 16 nt, Human
uauuuuggagaaauua

SEQ ID NO: 2244392 - RNA, 14 nt, Human
uauuuuaaguauug

SEQ ID NO: 2244393 - RNA, 19 nt, Human
uauuuuaauuuaugaguuu

SEQ ID NO: 2244394 - RNA, 22 nt, Human
uauuuuaauaauguuucaaaca

SEQ ID NO: 2244395 - RNA, 23 nt, Human
uauuuuacaauuuuuuaucaugc

SEQ ID NO: 2244396 - RNA, 14 nt, Human
uauuuuacaauuuu

SEQ ID NO: 2244397 - RNA, 14 nt, Human
uauuuuaauaaaca

SEQ ID NO: 2244398 - RNA, 17 nt, Human
uauuuuaauaaacacuc

SEQ ID NO: 2244399 - RNA, 19 nt, Human
uauuuuaauaauguuucaa

SEQ ID NO: 2244400 - RNA, 13 nt, Human
acauuguuuuaaa

SEQ ID NO: 2244401 - RNA, 15 nt, Human
acauuguuuuaaaaa

SEQ ID NO: 2244402 - RNA, 16 nt, Human
acauuguuuuaaaaag

SEQ ID NO: 2244403 - RNA, 17 nt, Human
acauuguuuuaaaaaga

SEQ ID NO: 2244404 - RNA, 18 nt, Human
acauuguuuuaaaaagaa

SEQ ID NO: 2244405 - RNA, 12 nt, Human
acauuguuuugc

SEQ ID NO: 2244406 - RNA, 23 nt, Human
acauugguucuuguauuaagaau

SEQ ID NO: 2244407 - RNA, 22 nt, Human
acauugguucuuguauuaagaa

SEQ ID NO: 2244408 - RNA, 17 nt, Human
acauuguaaauaguauu

SEQ ID NO: 2244409 - RNA, 19 nt, Human
acauuguaaauaguauuug

SEQ ID NO: 2244410 - RNA, 21 nt, Human
acauuguaaauaguauuugag

SEQ ID NO: 2244411 - RNA, 21 nt, Human
acauugguucuuguauuaaga

SEQ ID NO: 2244412 - RNA, 18 nt, Human
acauugguucuuguauua

SEQ ID NO: 2244413 - RNA, 16 nt, Human
acauugguucuuguau

SEQ ID NO: 2244414 - RNA, 14 nt, Human
acauugguucuugu

SEQ ID NO: 2244415 - RNA, 23 nt, Human
acauuggguccugggucuuucau

SEQ ID NO: 2244416 - RNA, 20 nt, Human
acauugggcagcgcccuucc

SEQ ID NO: 2244417 - RNA, 21 nt, Human
acauugggcagcgcccuuccu

SEQ ID NO: 2244418 - RNA, 22 nt, Human
acauugggcagcgcccuuccuc

SEQ ID NO: 2244419 - RNA, 16 nt, Human
acauugguaagaauga

SEQ ID NO: 2244420 - RNA, 15 nt, Human
acauugggaagggga

SEQ ID NO: 2244421 - RNA, 19 nt, Human
acauugggaaggggacccc

SEQ ID NO: 2244422 - RNA, 23 nt, Human
acauugggaaggggacccccgcc

SEQ ID NO: 2244423 - RNA, 17 nt, Human
acauugggaaaucuuau

SEQ ID NO: 2244424 - RNA, 17 nt, Human
acauugggcagcgcccu

SEQ ID NO: 2244425 - RNA, 22 nt, Human
acauuggcaccuaauccaggca

SEQ ID NO: 2244426 - RNA, 21 nt, Human
acauuggcaccuaauccaggc

SEQ ID NO: 2244427 - RNA, 16 nt, Human
acauuggagccugggc

SEQ ID NO: 2244428 - RNA, 20 nt, Human
acauugcuugugccacaccc

SEQ ID NO: 2244429 - RNA, 14 nt, Human
ucaauccucuaagc

SEQ ID NO: 2244430 - RNA, 14 nt, Human
acauugcuaagaug

SEQ ID NO: 2244431 - RNA, 17 nt, Human
acauugcuaagaugcuc

SEQ ID NO: 2244432 - RNA, 18 nt, Human
acauugcuuuacugucaa

SEQ ID NO: 2244433 - RNA, 21 nt, Human
acauugcuuuacugucaaaau

SEQ ID NO: 2244434 - RNA, 23 nt, Human
acauugcuuugaccacucuuccu

SEQ ID NO: 2244435 - RNA, 22 nt, Human
ucaauccccucauucaggaaaa

SEQ ID NO: 2244436 - RNA, 21 nt, Human
ucaauccuaauuucuccuccc

SEQ ID NO: 2244437 - RNA, 15 nt, Human
ucaauccuaccuguu

SEQ ID NO: 2244438 - RNA, 22 nt, Human
ucaauccuaauuucuccucccu

SEQ ID NO: 2244439 - RNA, 23 nt, Human
acauugcguuugaccuuuuaugu

SEQ ID NO: 2244440 - RNA, 15 nt, Human
acauugcguuugacc

SEQ ID NO: 2244441 - RNA, 21 nt, Human
acauugcggacagccacggcc

SEQ ID NO: 2244442 - RNA, 22 nt, Human
acauugcggacagccacggcca

SEQ ID NO: 2244443 - RNA, 19 nt, Human
acauuuuaaugcaccugaa

SEQ ID NO: 2244444 - RNA, 15 nt, Human
acauuuuaaugcacc

SEQ ID NO: 2244445 - RNA, 13 nt, Human
acauuuuaauuca

SEQ ID NO: 2244446 - RNA, 18 nt, Human
acauuuuaaauggacaga

SEQ ID NO: 2244447 - RNA, 17 nt, Human
acauuuaauacagcagu

SEQ ID NO: 2244448 - RNA, 20 nt, Human
acauuuaagagacagucacc

SEQ ID NO: 2244449 - RNA, 22 nt, Human
acauuuaacuuguuuccaaugu

SEQ ID NO: 2244450 - RNA, 16 nt, Human
acauuuaauacagcag

SEQ ID NO: 2244451 - RNA, 17 nt, Human
acauuuaaacuugucag

SEQ ID NO: 2244452 - RNA, 21 nt, Human
acauuguuuugccaacauugc

SEQ ID NO: 2244453 - RNA, 23 nt, Human
acauuuaaauuuuacccuuuaga

SEQ ID NO: 2244454 - RNA, 18 nt, Human
acauuuuacuuuuuccug

SEQ ID NO: 2244455 - RNA, 12 nt, Human
acauuuuguaua

SEQ ID NO: 2244456 - RNA, 15 nt, Human
acauuuuaguucuuu

SEQ ID NO: 2244457 - RNA, 13 nt, Human
acauuuuguauaa

SEQ ID NO: 2244458 - RNA, 16 nt, Human
acauuuuguauaauug

SEQ ID NO: 2244459 - RNA, 19 nt, Human
acauuuuguauaauuguau

SEQ ID NO: 2244460 - RNA, 21 nt, Human
acauuuuguauaauuguaucg

SEQ ID NO: 2244461 - RNA, 15 nt, Human
accaaaaaaguuaca

SEQ ID NO: 2244462 - RNA, 23 nt, Human
acauuuuucuuagggaaggauac

SEQ ID NO: 2244463 - RNA, 13 nt, Human
acauuuuucuuag

SEQ ID NO: 2244464 - RNA, 21 nt, Human
acauuuuucagauauaaaaga

SEQ ID NO: 2244465 - RNA, 15 nt, Human
acauuuuuacaauaa

SEQ ID NO: 2244466 - RNA, 14 nt, Human
acauuuuuacaaua

SEQ ID NO: 2244467 - RNA, 18 nt, Human
acauuuuuaagugcugca

SEQ ID NO: 2244468 - RNA, 15 nt, Human
acauuuuuaagugcu

SEQ ID NO: 2244469 - RNA, 19 nt, Human
ucaauaguaaaagauaaca

SEQ ID NO: 2244470 - RNA, 15 nt, Human
ucaauauuuuccaug

SEQ ID NO: 2244471 - RNA, 16 nt, Human
ucaauauuuuccauga

SEQ ID NO: 2244472 - RNA, 17 nt, Human
ucaauauuuuccaugaa

SEQ ID NO: 2244473 - RNA, 18 nt, Human
ucaauauuuuccaugaaa

SEQ ID NO: 2244474 - RNA, 16 nt, Human
ucaauauuuuuagaua

SEQ ID NO: 2244475 - RNA, 22 nt, Human
ucaauaggaaaaacugauuuuu

SEQ ID NO: 2244476 - RNA, 23 nt, Human
ucaauauuucagauaaucacaau

SEQ ID NO: 2244477 - RNA, 20 nt, Human
ucaauccccucauucaggaa

SEQ ID NO: 2244478 - RNA, 17 nt, Human
ucaauccccucauucag

SEQ ID NO: 2244479 - RNA, 15 nt, Human
ucaauccccucauuc

SEQ ID NO: 2244480 - RNA, 15 nt, Human
ucaauccagcuaugu

SEQ ID NO: 2244481 - RNA, 18 nt, Human
ucaaucauuguacaguuu

SEQ ID NO: 2244482 - RNA, 19 nt, Human
ucaaucaucugugugaaaa

SEQ ID NO: 2244483 - RNA, 14 nt, Human
ucaaucauuguaca

SEQ ID NO: 2244484 - RNA, 15 nt, Human
ucaaucauuguacag

SEQ ID NO: 2244485 - RNA, 16 nt, Human
ucaaucauuguacagu

SEQ ID NO: 2244486 - RNA, 16 nt, Human
ucaaucaucuguguga

SEQ ID NO: 2244487 - RNA, 20 nt, Human
ucaaucaucugugugaaaau

SEQ ID NO: 2244488 - RNA, 15 nt, Human
ucaaucaucugugug

SEQ ID NO: 2244489 - RNA, 22 nt, Human
ucaaucaguauaauucuguacu

SEQ ID NO: 2244490 - RNA, 12 nt, Human
ucaaucacagcu

SEQ ID NO: 2244491 - RNA, 20 nt, Human
ucaaucacagcuuguauuuu

SEQ ID NO: 2244492 - RNA, 14 nt, Human
ucaaucaguauaau

SEQ ID NO: 2244493 - RNA, 15 nt, Human
ucaaucaguauaauu

SEQ ID NO: 2244494 - RNA, 16 nt, Human
ucaaucaguauaauuc

SEQ ID NO: 2244495 - RNA, 21 nt, Human
ucaaucaguauaauucuguac

SEQ ID NO: 2244496 - RNA, 19 nt, Human
ucaaguaauccaccugccu

SEQ ID NO: 2244497 - RNA, 16 nt, Human
ucaaguaagaagacau

SEQ ID NO: 2244498 - RNA, 16 nt, Human
ucaaguaauugugaaa

SEQ ID NO: 2244499 - RNA, 15 nt, Human
ucaaguaauugugaa

SEQ ID NO: 2244500 - RNA, 23 nt, Human
ucaaguaagaagacaugaaccaa

SEQ ID NO: 2244501 - RNA, 17 nt, Human
ucaaguaauucugcugu

SEQ ID NO: 2244502 - RNA, 22 nt, Human
ucaaguaagaagacaugaacca

SEQ ID NO: 2244503 - RNA, 18 nt, Human
ucaaguaagaagacauga

SEQ ID NO: 2244504 - RNA, 16 nt, Human
ucaagugauucuccug

SEQ ID NO: 2244505 - RNA, 22 nt, Human
ucaagugauucucaugccucag

SEQ ID NO: 2244506 - RNA, 21 nt, Human
ucaagugauucucaugccuca

SEQ ID NO: 2244507 - RNA, 17 nt, Human
ucaagugauucuccugc

SEQ ID NO: 2244508 - RNA, 17 nt, Human
ucaauaggaaaaacuga

SEQ ID NO: 2244509 - RNA, 18 nt, Human
ucaauaggaaaaacugau

SEQ ID NO: 2244510 - RNA, 19 nt, Human
ucaauaggaaaaacugauu

SEQ ID NO: 2244511 - RNA, 17 nt, Human
ucaagagggucugagga

SEQ ID NO: 2244512 - RNA, 20 nt, Human
ucaagagggcacugguggcc

SEQ ID NO: 2244513 - RNA, 21 nt, Human
ucaagagggcacugguggccc

SEQ ID NO: 2244514 - RNA, 22 nt, Human
acauuaucgggagcagugucuu

SEQ ID NO: 2244515 - RNA, 19 nt, Human
acauuaucucacuugugcc

SEQ ID NO: 2244516 - RNA, 21 nt, Human
acauuaucgggagcagugucu

SEQ ID NO: 2244517 - RNA, 19 nt, Human
acauuaucgggagcagugu

SEQ ID NO: 2244518 - RNA, 18 nt, Human
acauuaucgggagcagug

SEQ ID NO: 2244519 - RNA, 13 nt, Human
acauuauuugcau

SEQ ID NO: 2244520 - RNA, 16 nt, Human
acauuauuuauucagc

SEQ ID NO: 2244521 - RNA, 18 nt, Human
acauuauuaucaacaaua

SEQ ID NO: 2244522 - RNA, 14 nt, Human
acauuauuugcaug

SEQ ID NO: 2244523 - RNA, 12 nt, Human
ucaagaggcuga

SEQ ID NO: 2244524 - RNA, 17 nt, Human
ucaagcaagauuucaga

SEQ ID NO: 2244525 - RNA, 16 nt, Human
ucaagcagauuggaga

SEQ ID NO: 2244526 - RNA, 16 nt, Human
ucaagauuuugaaugc

SEQ ID NO: 2244527 - RNA, 13 nt, Human
ucaagauuuugaa

SEQ ID NO: 2244528 - RNA, 17 nt, Human
ucaagauuucaggauua

SEQ ID NO: 2244529 - RNA, 19 nt, Human
ucaagauuuugaaugcuuc

SEQ ID NO: 2244530 - RNA, 18 nt, Human
ucaagauuuugaaugcuu

SEQ ID NO: 2244531 - RNA, 21 nt, Human
ucaagcaaacagcuucacaaa

SEQ ID NO: 2244532 - RNA, 17 nt, Human
ucaagcagauuggagaa

SEQ ID NO: 2244533 - RNA, 12 nt, Human
ucaagcagccaa

SEQ ID NO: 2244534 - RNA, 18 nt, Human
ucaagcagcgaccgcccc

SEQ ID NO: 2244535 - RNA, 21 nt, Human
ucaagcagcgaccgcccccuc

SEQ ID NO: 2244536 - RNA, 22 nt, Human
ucaagcagcgaccgcccccucc

SEQ ID NO: 2244537 - RNA, 23 nt, Human
ucaaggauccugagccagauuuc

SEQ ID NO: 2244538 - RNA, 19 nt, Human
ucaaggccucccacaguga

SEQ ID NO: 2244539 - RNA, 17 nt, Human
ucaaggccucccacagu

SEQ ID NO: 2244540 - RNA, 18 nt, Human
ucaaggccucccacagug

SEQ ID NO: 2244541 - RNA, 14 nt, Human
ucaaggccucccac

SEQ ID NO: 2244542 - RNA, 17 nt, Human
ucaaggcaucaugcaga

SEQ ID NO: 2244543 - RNA, 15 nt, Human
ucaaggccucccaca

SEQ ID NO: 2244544 - RNA, 16 nt, Human
ucaaggccucccacag

SEQ ID NO: 2244545 - RNA, 13 nt, Human
ucaaggcacugcc

SEQ ID NO: 2244546 - RNA, 14 nt, Human
ucaaggcacugccu

SEQ ID NO: 2244547 - RNA, 15 nt, Human
ucaaggcacugccug

SEQ ID NO: 2244548 - RNA, 16 nt, Human
ucaaggcacugccuga

SEQ ID NO: 2244549 - RNA, 20 nt, Human
ucaagguggccaaauuauuu

SEQ ID NO: 2244550 - RNA, 18 nt, Human
ucaaggcgugaggauggg

SEQ ID NO: 2244551 - RNA, 19 nt, Human
accaaaaacugaaagugaa

SEQ ID NO: 2244552 - RNA, 17 nt, Human
accaaaaagaccagacu

SEQ ID NO: 2244553 - RNA, 16 nt, Human
accaaauaaaaauauu

SEQ ID NO: 2244554 - RNA, 18 nt, Human
accaaauaaaaauauugu

SEQ ID NO: 2244555 - RNA, 19 nt, Human
accaaaucagcugcuacua

SEQ ID NO: 2244556 - RNA, 16 nt, Human
accaaaucagcugcua

SEQ ID NO: 2244557 - RNA, 11 nt, Human
accaaaugcuu

SEQ ID NO: 2244558 - RNA, 15 nt, Human
accaaaucuggaagc

SEQ ID NO: 2244559 - RNA, 13 nt, Human
accaaaugcuuua

SEQ ID NO: 2244560 - RNA, 19 nt, Human
accaaaugcuuuaaaaacu

SEQ ID NO: 2244561 - RNA, 22 nt, Human
accaaaugcuuuaaaaacuauu

SEQ ID NO: 2244562 - RNA, 13 nt, Human
accaaaucuggaa

SEQ ID NO: 2244563 - RNA, 16 nt, Human
accaacaguuccuuca

SEQ ID NO: 2244564 - RNA, 21 nt, Human
accaacaucccauugcccugg

SEQ ID NO: 2244565 - RNA, 16 nt, Human
accaacauacucccau

SEQ ID NO: 2244566 - RNA, 24 nt, Human
accaacauggagaaacccugucuc

SEQ ID NO: 2244567 - RNA, 12 nt, Human
accaacccagcc

SEQ ID NO: 2244568 - RNA, 23 nt, Human
accaacauggagaaacccugucu

SEQ ID NO: 2244569 - RNA, 16 nt, Human
accaacauggagaaac

SEQ ID NO: 2244570 - RNA, 15 nt, Human
accaacauggagaaa

SEQ ID NO: 2244571 - RNA, 22 nt, Human
accaacaucccauugcccuggu

SEQ ID NO: 2244572 - RNA, 20 nt, Human
accaaccacugcgaccacaa

SEQ ID NO: 2244573 - RNA, 14 nt, Human
accaaauuccuugg

SEQ ID NO: 2244574 - RNA, 19 nt, Human
accaacacgagcaggcuac

SEQ ID NO: 2244575 - RNA, 14 nt, Human
accaacacgagcag

SEQ ID NO: 2244576 - RNA, 21 nt, Human
accaaugccaaaaaaagacag

SEQ ID NO: 2244577 - RNA, 18 nt, Human
accaaugcaugcagccac

SEQ ID NO: 2244578 - RNA, 20 nt, Human
accaaugcaugcagccacug

SEQ ID NO: 2244579 - RNA, 22 nt, Human
accaaugcaugcagccacugug

SEQ ID NO: 2244580 - RNA, 18 nt, Human
accaaugcuuuuaucaaa

SEQ ID NO: 2244581 - RNA, 12 nt, Human
accaaugucuug

SEQ ID NO: 2244582 - RNA, 19 nt, Human
accaaugcuuuuaucaaac

SEQ ID NO: 2244583 - RNA, 13 nt, Human
accaaugucuuga

SEQ ID NO: 2244584 - RNA, 16 nt, Human
accacaagacugcaca

SEQ ID NO: 2244585 - RNA, 20 nt, Human
accacaaagcacaguuugaa

SEQ ID NO: 2244586 - RNA, 18 nt, Human
accacaaauagugcucgc

SEQ ID NO: 2244587 - RNA, 22 nt, Human
accaacccaucagaaggagaag

SEQ ID NO: 2244588 - RNA, 19 nt, Human
accaacccagccgcugccc

SEQ ID NO: 2244589 - RNA, 20 nt, Human
accaacccagccgcugcccg

SEQ ID NO: 2244590 - RNA, 20 nt, Human
accaaucauuuuaauuauua

SEQ ID NO: 2244591 - RNA, 15 nt, Human
accaacccucagagc

SEQ ID NO: 2244592 - RNA, 13 nt, Human
accaacccagccg

SEQ ID NO: 2244593 - RNA, 14 nt, Human
accaacccagccgc

SEQ ID NO: 2244594 - RNA, 15 nt, Human
accaacccagccgcu

SEQ ID NO: 2244595 - RNA, 16 nt, Human
accaacccagccgcug

SEQ ID NO: 2244596 - RNA, 13 nt, Human
accaauccuggac

SEQ ID NO: 2244597 - RNA, 14 nt, Human
accaaugaaaaaau

SEQ ID NO: 2244598 - RNA, 17 nt, Human
accaaugaaaaaaugua

SEQ ID NO: 2244599 - RNA, 12 nt, Human
accaaugcaugc

SEQ ID NO: 2244600 - RNA, 17 nt, Human
accaaugcaugcagcca

SEQ ID NO: 2244601 - RNA, 17 nt, Human
accacacagaggcugcc

SEQ ID NO: 2244602 - RNA, 21 nt, Human
accacaaggcuguugcauggg

SEQ ID NO: 2244603 - RNA, 15 nt, Human
accacacccagccca

SEQ ID NO: 2244604 - RNA, 15 nt, Human
accacaccaaaccuc

SEQ ID NO: 2244605 - RNA, 17 nt, Human
accacaccaaaccucuc

SEQ ID NO: 2244606 - RNA, 16 nt, Human
accacacccagcccac

SEQ ID NO: 2244607 - RNA, 20 nt, Human
accacacccagcccacuucu

SEQ ID NO: 2244608 - RNA, 21 nt, Human
accacacccagcccacuucug

SEQ ID NO: 2244609 - RNA, 23 nt, Human
accacacccagcccacuucugcc

SEQ ID NO: 2244610 - RNA, 21 nt, Human
ucacauggugcuacgccugca

SEQ ID NO: 2244611 - RNA, 16 nt, Human
ucacauggccuaugca

SEQ ID NO: 2244612 - RNA, 21 nt, Human
ucacauggccuaugcacauau

SEQ ID NO: 2244613 - RNA, 23 nt, Human
ucacauguauguuuugguaucug

SEQ ID NO: 2244614 - RNA, 21 nt, Human
ucacaugucaguaccuucaaa

SEQ ID NO: 2244615 - RNA, 13 nt, Human
ucacauguauguu

SEQ ID NO: 2244616 - RNA, 15 nt, Human
ucacauguauguuuu

SEQ ID NO: 2244617 - RNA, 16 nt, Human
ucacauguauguuuug

SEQ ID NO: 2244618 - RNA, 20 nt, Human
ucacauuaauauuugcugac

SEQ ID NO: 2244619 - RNA, 19 nt, Human
ucacauuacuguauauacu

SEQ ID NO: 2244620 - RNA, 19 nt, Human
ucacauuaauauuugcuga

SEQ ID NO: 2244621 - RNA, 16 nt, Human
ucacauuauuugcaug

SEQ ID NO: 2244622 - RNA, 13 nt, Human
ucacauucaggaa

SEQ ID NO: 2244623 - RNA, 15 nt, Human
ucacauuauuugcau

SEQ ID NO: 2244624 - RNA, 17 nt, Human
ucaccagccccagugcc

SEQ ID NO: 2244625 - RNA, 15 nt, Human
ucacagcuucagcca

SEQ ID NO: 2244626 - RNA, 16 nt, Human
ucacagcuucagccag

SEQ ID NO: 2244627 - RNA, 11 nt, Human
ucacagcuccu

SEQ ID NO: 2244628 - RNA, 14 nt, Human
ucacagcuccuccc

SEQ ID NO: 2244629 - RNA, 16 nt, Human
ucacagcuccucccac

SEQ ID NO: 2244630 - RNA, 13 nt, Human
ucacagccuccuc

SEQ ID NO: 2244631 - RNA, 11 nt, Human
ucacagcugcu

SEQ ID NO: 2244632 - RNA, 17 nt, Human
ucacagcuucagccagg

SEQ ID NO: 2244633 - RNA, 19 nt, Human
ucacagcuucagccaggag

SEQ ID NO: 2244634 - RNA, 16 nt, Human
ucacauauugauuucc

SEQ ID NO: 2244635 - RNA, 13 nt, Human
ucacaucacagga

SEQ ID NO: 2244636 - RNA, 13 nt, Human
ucacagcugcuuu

SEQ ID NO: 2244637 - RNA, 17 nt, Human
ucacagcuuguauuuug

SEQ ID NO: 2244638 - RNA, 20 nt, Human
ucacauauugauuuccguua

SEQ ID NO: 2244639 - RNA, 18 nt, Human
ucacauauugauuuccgu

SEQ ID NO: 2244640 - RNA, 16 nt, Human
ucacagccacuuggga

SEQ ID NO: 2244641 - RNA, 23 nt, Human
ucacagcccugcuuaccagauaa

SEQ ID NO: 2244642 - RNA, 20 nt, Human
ucacagccucaagucacucc

SEQ ID NO: 2244643 - RNA, 23 nt, Human
ucacagccagacuggcacaguuu

SEQ ID NO: 2244644 - RNA, 17 nt, Human
ucacagccagacuggca

SEQ ID NO: 2244645 - RNA, 17 nt, Human
ucacagaggcuucuuca

SEQ ID NO: 2244646 - RNA, 12 nt, Human
ucacagaggcuu

SEQ ID NO: 2244647 - RNA, 23 nt, Human
ucacagaccuggagccccugggu

SEQ ID NO: 2244648 - RNA, 22 nt, Human
ucacagagacauuccuccgagc

SEQ ID NO: 2244649 - RNA, 14 nt, Human
ucacagaugggugc

SEQ ID NO: 2244650 - RNA, 15 nt, Human
ucacagaugggugcu

SEQ ID NO: 2244651 - RNA, 16 nt, Human
ucacagccaccccuga

SEQ ID NO: 2244652 - RNA, 19 nt, Human
ucacagagugugcuggagg

SEQ ID NO: 2244653 - RNA, 23 nt, Human
ucacagagacauuccuccgagcc

SEQ ID NO: 2244654 - RNA, 14 nt, Human
ucacagagugugcu

SEQ ID NO: 2244655 - RNA, 15 nt, Human
ucacagagugugcug

SEQ ID NO: 2244656 - RNA, 18 nt, Human
ucacagagugugcuggag

SEQ ID NO: 2244657 - RNA, 21 nt, Human
ucacagaacccuuggagccaa

SEQ ID NO: 2244658 - RNA, 14 nt, Human
ucaauuuaaaccca

SEQ ID NO: 2244659 - RNA, 19 nt, Human
ucaauuuaaacccauuuua

SEQ ID NO: 2244660 - RNA, 21 nt, Human
ucaauuuaaacccauuuuagu

SEQ ID NO: 2244661 - RNA, 23 nt, Human
ucaauuuaaacccauuuuaguca

SEQ ID NO: 2244662 - RNA, 13 nt, Human
ucaauuuaaaaaa

SEQ ID NO: 2244663 - RNA, 13 nt, Human
accacacccagcc

SEQ ID NO: 2244664 - RNA, 12 nt, Human
accacacccagc

SEQ ID NO: 2244665 - RNA, 14 nt, Human
accacacccagccu

SEQ ID NO: 2244666 - RNA, 12 nt, Human
ucaauuuaaaaa

SEQ ID NO: 2244667 - RNA, 21 nt, Human
ucacagagacauuccuccgag

SEQ ID NO: 2244668 - RNA, 20 nt, Human
ucacagaccuggagccccug

SEQ ID NO: 2244669 - RNA, 22 nt, Human
ucacagaccuggagccccuggg

SEQ ID NO: 2244670 - RNA, 15 nt, Human
ucacagaccuggagc

SEQ ID NO: 2244671 - RNA, 17 nt, Human
ucacagaccuggagccc

SEQ ID NO: 2244672 - RNA, 18 nt, Human
ucacagaccuggagcccc

SEQ ID NO: 2244673 - RNA, 19 nt, Human
ucacagaccuggagccccu

SEQ ID NO: 2244674 - RNA, 16 nt, Human
ucacagaccuuugaac

SEQ ID NO: 2244675 - RNA, 12 nt, Human
ucacagaagaau

SEQ ID NO: 2244676 - RNA, 11 nt, Human
ucacagaagaa

SEQ ID NO: 2244677 - RNA, 15 nt, Human
ucaauuuaaauaacc

SEQ ID NO: 2244678 - RNA, 14 nt, Human
ucacagaccuggag

SEQ ID NO: 2244679 - RNA, 22 nt, Human
ucacagaaucauaugauucugc

SEQ ID NO: 2244680 - RNA, 19 nt, Human
accuucaguuaugauuuuu

SEQ ID NO: 2244681 - RNA, 18 nt, Human
accuucauuucaggaggg

SEQ ID NO: 2244682 - RNA, 15 nt, Human
accuuccaagagccu

SEQ ID NO: 2244683 - RNA, 21 nt, Human
accuucauuucaggagggauu

SEQ ID NO: 2244684 - RNA, 19 nt, Human
accuggguaaaugcagcgu

SEQ ID NO: 2244685 - RNA, 18 nt, Human
accuucaauuccugggcc

SEQ ID NO: 2244686 - RNA, 17 nt, Human
accuucagacuuugcuu

SEQ ID NO: 2244687 - RNA, 17 nt, Human
accuucaauuccugggc

SEQ ID NO: 2244688 - RNA, 21 nt, Human
accuggggugugggaggcccg

SEQ ID NO: 2244689 - RNA, 18 nt, Human
accuggggugugggaggc

SEQ ID NO: 2244690 - RNA, 22 nt, Human
accuggggggcaguggugugga

SEQ ID NO: 2244691 - RNA, 21 nt, Human
accuggguaacuagggaagau

SEQ ID NO: 2244692 - RNA, 24 nt, Human
accuggggagugggacagagucug

SEQ ID NO: 2244693 - RNA, 14 nt, Human
accuggggagccag

SEQ ID NO: 2244694 - RNA, 19 nt, Human
accuggggcagucaccugc

SEQ ID NO: 2244695 - RNA, 14 nt, Human
accuggggcugcug

SEQ ID NO: 2244696 - RNA, 15 nt, Human
accuggggaguggga

SEQ ID NO: 2244697 - RNA, 13 nt, Human
accuggggagugg

SEQ ID NO: 2244698 - RNA, 20 nt, Human
accuggggcugcuggccuga

SEQ ID NO: 2244699 - RNA, 15 nt, Human
accuggggcugcugg

SEQ ID NO: 2244700 - RNA, 18 nt, Human
accuggggcugcuggccu

SEQ ID NO: 2244701 - RNA, 19 nt, Human
accuucccagcucucccuc

SEQ ID NO: 2244702 - RNA, 18 nt, Human
accuucccagcucucccu

SEQ ID NO: 2244703 - RNA, 17 nt, Human
accuucccagcucuccc

SEQ ID NO: 2244704 - RNA, 13 nt, Human
accuucccagcuc

SEQ ID NO: 2244705 - RNA, 16 nt, Human
accuuccaagagccug

SEQ ID NO: 2244706 - RNA, 17 nt, Human
accuucccaugcccugg

SEQ ID NO: 2244707 - RNA, 19 nt, Human
accuucccucucaccaucc

SEQ ID NO: 2244708 - RNA, 12 nt, Human
accuuccucacu

SEQ ID NO: 2244709 - RNA, 19 nt, Human
accuuccuucccugggcug

SEQ ID NO: 2244710 - RNA, 22 nt, Human
accuuccuucccugggcugugc

SEQ ID NO: 2244711 - RNA, 18 nt, Human
accuuccugccaccaguc

SEQ ID NO: 2244712 - RNA, 24 nt, Human
accuuccuucccugggcugugcua

SEQ ID NO: 2244713 - RNA, 13 nt, Human
accuuccucgcag

SEQ ID NO: 2244714 - RNA, 15 nt, Human
accuuccucgcagag

SEQ ID NO: 2244715 - RNA, 16 nt, Human
accuuccucacuucca

SEQ ID NO: 2244716 - RNA, 17 nt, Human
accuuccucacuuccau

SEQ ID NO: 2244717 - RNA, 17 nt, Human
accuuccucgcagagag

SEQ ID NO: 2244718 - RNA, 16 nt, Human
accuuccucgcagaga

SEQ ID NO: 2244719 - RNA, 11 nt, Human
accuuccugcc

SEQ ID NO: 2244720 - RNA, 17 nt, Human
accuucgccaccugggu

SEQ ID NO: 2244721 - RNA, 15 nt, Human
accuucgccaccugg

SEQ ID NO: 2244722 - RNA, 15 nt, Human
accuucgggcugugc

SEQ ID NO: 2244723 - RNA, 14 nt, Human
accuucgggcugug

SEQ ID NO: 2244724 - RNA, 17 nt, Human
accuucgggcugugccc

SEQ ID NO: 2244725 - RNA, 16 nt, Human
accuucgggcugugcc

SEQ ID NO: 2244726 - RNA, 18 nt, Human
accuucgggcugugcccg

SEQ ID NO: 2244727 - RNA, 21 nt, Human
accuucguuuacuaugccugu

SEQ ID NO: 2244728 - RNA, 18 nt, Human
accuucuggccucccaca

SEQ ID NO: 2244729 - RNA, 22 nt, Human
accuucuggccucccacagacu

SEQ ID NO: 2244730 - RNA, 19 nt, Human
accuucuggcuuccuucuc

SEQ ID NO: 2244731 - RNA, 12 nt, Human
accuucucugga

SEQ ID NO: 2244732 - RNA, 22 nt, Human
accuucuaggacgccacccagc

SEQ ID NO: 2244733 - RNA, 15 nt, Human
accuucucuggagcc

SEQ ID NO: 2244734 - RNA, 17 nt, Human
accuucucuggagccaa

SEQ ID NO: 2244735 - RNA, 22 nt, Human
accuucucuggagccaagucca

SEQ ID NO: 2244736 - RNA, 23 nt, Human
accuucucuggagccaaguccag

SEQ ID NO: 2244737 - RNA, 14 nt, Human
accuucuccuucac

SEQ ID NO: 2244738 - RNA, 23 nt, Human
accuucguuuacuaugccugugu

SEQ ID NO: 2244739 - RNA, 22 nt, Human
accuucguuuacuaugccugug

SEQ ID NO: 2244740 - RNA, 22 nt, Human
accuucuccuucaccuuugucc

SEQ ID NO: 2244741 - RNA, 22 nt, Human
accuugaggucuuuugacaugu

SEQ ID NO: 2244742 - RNA, 16 nt, Human
accuugcaacacacag

SEQ ID NO: 2244743 - RNA, 15 nt, Human
accuugcaacacaca

SEQ ID NO: 2244744 - RNA, 11 nt, Human
accuugagguc

SEQ ID NO: 2244745 - RNA, 19 nt, Human
accuugaggagucuugugu

SEQ ID NO: 2244746 - RNA, 15 nt, Human
accuugagacagcuu

SEQ ID NO: 2244747 - RNA, 22 nt, Human
accuugaggaggggcagguaaa

SEQ ID NO: 2244748 - RNA, 11 nt, Human
accuucuguag

SEQ ID NO: 2244749 - RNA, 16 nt, Human
accuugacagggcaca

SEQ ID NO: 2244750 - RNA, 19 nt, Human
accuugcaacacacagaca

SEQ ID NO: 2244751 - RNA, 17 nt, Human
accuugcaacacacaga

SEQ ID NO: 2244752 - RNA, 15 nt, Human
accuugcaacuucau

SEQ ID NO: 2244753 - RNA, 19 nt, Human
accuugcaucucauugcuc

SEQ ID NO: 2244754 - RNA, 13 nt, Human
accuuugucccca

SEQ ID NO: 2244755 - RNA, 23 nt, Human
accuugccugaacauccuuccuu

SEQ ID NO: 2244756 - RNA, 24 nt, Human
accuugccugaacauccuuccuuc

SEQ ID NO: 2244757 - RNA, 18 nt, Human
accuugccugaacauccu

SEQ ID NO: 2244758 - RNA, 21 nt, Human
accuugccugaacauccuucc

SEQ ID NO: 2244759 - RNA, 18 nt, Human
accuuuuuuauacauaaa

SEQ ID NO: 2244760 - RNA, 17 nt, Human
accuuuuuuauacauaa

SEQ ID NO: 2244761 - RNA, 16 nt, Human
accuuuuuuauacaua

SEQ ID NO: 2244762 - RNA, 14 nt, Human
accuuuguccccac

SEQ ID NO: 2244763 - RNA, 15 nt, Human
accuuuguccccacc

SEQ ID NO: 2244764 - RNA, 16 nt, Human
accuuuguccccaccg

SEQ ID NO: 2244765 - RNA, 14 nt, Human
accuuuuuuauaca

SEQ ID NO: 2244766 - RNA, 13 nt, Human
accugggaagggg

SEQ ID NO: 2244767 - RNA, 22 nt, Human
accugggaggcggauguugaag

SEQ ID NO: 2244768 - RNA, 20 nt, Human
accuggcuuuucuuucuacc

SEQ ID NO: 2244769 - RNA, 16 nt, Human
accuggcugccauacu

SEQ ID NO: 2244770 - RNA, 13 nt, Human
accugggcaccug

SEQ ID NO: 2244771 - RNA, 18 nt, Human
accugggauucaggaaug

SEQ ID NO: 2244772 - RNA, 19 nt, Human
accugggcaccuggggagu

SEQ ID NO: 2244773 - RNA, 18 nt, Human
accugggcaccuggggag

SEQ ID NO: 2244774 - RNA, 14 nt, Human
accugggcaccugg

SEQ ID NO: 2244775 - RNA, 21 nt, Human
accugggcauacuaauaaagu

SEQ ID NO: 2244776 - RNA, 15 nt, Human
accugggcauaucca

SEQ ID NO: 2244777 - RNA, 21 nt, Human
accuggccccaugucucucag

SEQ ID NO: 2244778 - RNA, 21 nt, Human
accuggccaccugaggugggc

SEQ ID NO: 2244779 - RNA, 23 nt, Human
accuggccccaugucucucagaa

SEQ ID NO: 2244780 - RNA, 12 nt, Human
accuggccucug

SEQ ID NO: 2244781 - RNA, 13 nt, Human
accuggccucugc

SEQ ID NO: 2244782 - RNA, 12 nt, Human
uccacccaccuc

SEQ ID NO: 2244783 - RNA, 18 nt, Human
uccaccaucaagccacca

SEQ ID NO: 2244784 - RNA, 13 nt, Human
uccacccaccuca

SEQ ID NO: 2244785 - RNA, 17 nt, Human
uccacccaggagccccg

SEQ ID NO: 2244786 - RNA, 20 nt, Human
accuggccaccugagguggg

SEQ ID NO: 2244787 - RNA, 22 nt, Human
uccaccccaucccuccccaguu

SEQ ID NO: 2244788 - RNA, 12 nt, Human
uccaccccaucc

SEQ ID NO: 2244789 - RNA, 20 nt, Human
uccaccccaucccuccccag

SEQ ID NO: 2244790 - RNA, 23 nt, Human
uccaccccagugcacccacucug

SEQ ID NO: 2244791 - RNA, 20 nt, Human
uccaccccagugcacccacu

SEQ ID NO: 2244792 - RNA, 22 nt, Human
uccacccauccuaccaaugcau

SEQ ID NO: 2244793 - RNA, 21 nt, Human
uccaccaugggguccuaccaa

SEQ ID NO: 2244794 - RNA, 16 nt, Human
uccacauuguuuuaaa

SEQ ID NO: 2244795 - RNA, 17 nt, Human
uccacauuguuuuaaaa

SEQ ID NO: 2244796 - RNA, 23 nt, Human
uccaccaugggguccuaccaaua

SEQ ID NO: 2244797 - RNA, 20 nt, Human
uccacccaggagccccgagg

SEQ ID NO: 2244798 - RNA, 23 nt, Human
uccaaggagaaacagagacaggc

SEQ ID NO: 2244799 - RNA, 12 nt, Human
uccaaggaguuc

SEQ ID NO: 2244800 - RNA, 21 nt, Human
uccaaggaguuccaugaagac

SEQ ID NO: 2244801 - RNA, 16 nt, Human
uccaaggcagaagcag

SEQ ID NO: 2244802 - RNA, 20 nt, Human
uccaaggaggggcuguaaaa

SEQ ID NO: 2244803 - RNA, 23 nt, Human
uccaaggcagaagcagcagggga

SEQ ID NO: 2244804 - RNA, 16 nt, Human
uccaagggcuucugca

SEQ ID NO: 2244805 - RNA, 19 nt, Human
uccaagggcuucugcaccc

SEQ ID NO: 2244806 - RNA, 21 nt, Human
uccaaggggaaucagaacuca

SEQ ID NO: 2244807 - RNA, 21 nt, Human
uccaagggcuucugcacccuc

SEQ ID NO: 2244808 - RNA, 22 nt, Human
uccaagggcuucugcacccucc

SEQ ID NO: 2244809 - RNA, 22 nt, Human
uccaaggagaaacagagacagg

SEQ ID NO: 2244810 - RNA, 20 nt, Human
uccaaggagaaacagagaca

SEQ ID NO: 2244811 - RNA, 19 nt, Human
uccaaggagaaacagagac

SEQ ID NO: 2244812 - RNA, 16 nt, Human
uccaaggagaaacaga

SEQ ID NO: 2244813 - RNA, 15 nt, Human
uccaaggagaaacag

SEQ ID NO: 2244814 - RNA, 18 nt, Human
uccaacaaaggguuuuaa

SEQ ID NO: 2244815 - RNA, 22 nt, Human
uccaacaaaggguuuuaaugua

SEQ ID NO: 2244816 - RNA, 23 nt, Human
uccaaggaaaccacagcugcugg

SEQ ID NO: 2244817 - RNA, 22 nt, Human
uccaaauguccuccagaagccu

SEQ ID NO: 2244818 - RNA, 20 nt, Human
uccaaauguccuccagaagc

SEQ ID NO: 2244819 - RNA, 19 nt, Human
uccaaauguccuccagaag

SEQ ID NO: 2244820 - RNA, 17 nt, Human
uccaaauguccuccaga

SEQ ID NO: 2244821 - RNA, 13 nt, Human
uccaaauucacaa

SEQ ID NO: 2244822 - RNA, 19 nt, Human
uccaaaugcagcuuuaaaa

SEQ ID NO: 2244823 - RNA, 20 nt, Human
uccaaaaagauuuucagaaa

SEQ ID NO: 2244824 - RNA, 20 nt, Human
uccaaauggcgucuggaagu

SEQ ID NO: 2244825 - RNA, 18 nt, Human
uccaaauggcgucuggaa

SEQ ID NO: 2244826 - RNA, 13 nt, Human
uccaaaaaaauac

SEQ ID NO: 2244827 - RNA, 14 nt, Human
uccaaaaaaauacu

SEQ ID NO: 2244828 - RNA, 15 nt, Human
uccaaaaaaauacug

SEQ ID NO: 2244829 - RNA, 22 nt, Human
uccacauccuuucuaaacaaga

SEQ ID NO: 2244830 - RNA, 19 nt, Human
uccacauccuccacguucu

SEQ ID NO: 2244831 - RNA, 19 nt, Human
uccacaucuacguuuuugg

SEQ ID NO: 2244832 - RNA, 21 nt, Human
uccacaucuacguuuuuggug

SEQ ID NO: 2244833 - RNA, 12 nt, Human
uccacaucugcc

SEQ ID NO: 2244834 - RNA, 13 nt, Human
uccacaucugccu

SEQ ID NO: 2244835 - RNA, 15 nt, Human
uccacaugggagccg

SEQ ID NO: 2244836 - RNA, 14 nt, Human
uccacauuguuuua

SEQ ID NO: 2244837 - RNA, 15 nt, Human
uccacauuguuuuaa

SEQ ID NO: 2244838 - RNA, 14 nt, Human
uccacaucugccuu

SEQ ID NO: 2244839 - RNA, 15 nt, Human
uccacaucugccuua

SEQ ID NO: 2244840 - RNA, 18 nt, Human
uccacaucugccuuaaaa

SEQ ID NO: 2244841 - RNA, 13 nt, Human
uccacauccucca

SEQ ID NO: 2244842 - RNA, 12 nt, Human
uccacauccucc

SEQ ID NO: 2244843 - RNA, 14 nt, Human
uccacaucccggga

SEQ ID NO: 2244844 - RNA, 19 nt, Human
uccaauuccuugcacauag

SEQ ID NO: 2244845 - RNA, 22 nt, Human
uccacauaaggaaacuggguuc

SEQ ID NO: 2244846 - RNA, 21 nt, Human
uccaaugucuuuuuaagcuua

SEQ ID NO: 2244847 - RNA, 18 nt, Human
uccaauguggcaaggaaa

SEQ ID NO: 2244848 - RNA, 15 nt, Human
uccaauuaaggauuu

SEQ ID NO: 2244849 - RNA, 19 nt, Human
uccaauguuuagcaaauac

SEQ ID NO: 2244850 - RNA, 17 nt, Human
uccaauguuuagcaaau

SEQ ID NO: 2244851 - RNA, 17 nt, Human
uccaauuaaggauuuua

SEQ ID NO: 2244852 - RNA, 16 nt, Human
uccaauuaaggauuuu

SEQ ID NO: 2244853 - RNA, 23 nt, Human
uccaagggcuucugcacccucca

SEQ ID NO: 2244854 - RNA, 20 nt, Human
accugcuuggguggagaagc

SEQ ID NO: 2244855 - RNA, 19 nt, Human
accuggaauuguggggcaa

SEQ ID NO: 2244856 - RNA, 18 nt, Human
accugcuuggguggagaa

SEQ ID NO: 2244857 - RNA, 21 nt, Human
accugcuuggguggagaagcc

SEQ ID NO: 2244858 - RNA, 21 nt, Human
accugcuucaugcucagcccu

SEQ ID NO: 2244859 - RNA, 23 nt, Human
accugcuucaugcucagcccuga

SEQ ID NO: 2244860 - RNA, 19 nt, Human
accugcuucaugcucagcc

SEQ ID NO: 2244861 - RNA, 20 nt, Human
accuggaauauauaaccagu

SEQ ID NO: 2244862 - RNA, 21 nt, Human
accugcuggccccucaccugg

SEQ ID NO: 2244863 - RNA, 17 nt, Human
accugcuggguaaacug

SEQ ID NO: 2244864 - RNA, 19 nt, Human
accugcuggccccucaccu

SEQ ID NO: 2244865 - RNA, 17 nt, Human
accugcuggccccucac

SEQ ID NO: 2244866 - RNA, 16 nt, Human
accugcuggccccuca

SEQ ID NO: 2244867 - RNA, 15 nt, Human
accugcuggccccuc

SEQ ID NO: 2244868 - RNA, 14 nt, Human
accugcuggccccu

SEQ ID NO: 2244869 - RNA, 23 nt, Human
accugcugagggaccagccaaga

SEQ ID NO: 2244870 - RNA, 20 nt, Human
accugcugagggaccagcca

SEQ ID NO: 2244871 - RNA, 19 nt, Human
accugcugagggaccagcc

SEQ ID NO: 2244872 - RNA, 13 nt, Human
accugcuggcccc

SEQ ID NO: 2244873 - RNA, 18 nt, Human
accugcugagggaccagc

SEQ ID NO: 2244874 - RNA, 12 nt, Human
accugcucuccu

SEQ ID NO: 2244875 - RNA, 21 nt, Human
accugcgucucauacucaccu

SEQ ID NO: 2244876 - RNA, 16 nt, Human
accugcggugcuaucu

SEQ ID NO: 2244877 - RNA, 16 nt, Human
accugcggcugcugug

SEQ ID NO: 2244878 - RNA, 22 nt, Human
accugcggcugcugugugccuu

SEQ ID NO: 2244879 - RNA, 21 nt, Human
accugcuagacacauuuuuaa

SEQ ID NO: 2244880 - RNA, 13 nt, Human
accugcucccagg

SEQ ID NO: 2244881 - RNA, 17 nt, Human
accugcucccaggccag

SEQ ID NO: 2244882 - RNA, 14 nt, Human
accugccuguagcc

SEQ ID NO: 2244883 - RNA, 11 nt, Human
accugccugua

SEQ ID NO: 2244884 - RNA, 18 nt, Human
accugccuccugccugcc

SEQ ID NO: 2244885 - RNA, 13 nt, Human
accugccuggguu

SEQ ID NO: 2244886 - RNA, 23 nt, Human
accugccuguugggccaggagcc

SEQ ID NO: 2244887 - RNA, 23 nt, Human
accugccucggccucccaaagug

SEQ ID NO: 2244888 - RNA, 21 nt, Human
accugccucggccucccaaag

SEQ ID NO: 2244889 - RNA, 14 nt, Human
accugccuccugcc

SEQ ID NO: 2244890 - RNA, 17 nt, Human
accugccuccugccugc

SEQ ID NO: 2244891 - RNA, 21 nt, Human
accugccugacauuuggagug

SEQ ID NO: 2244892 - RNA, 12 nt, Human
ucauuuuuaauc

SEQ ID NO: 2244893 - RNA, 21 nt, Human
ucauuuuguugcuuuugugaa

SEQ ID NO: 2244894 - RNA, 16 nt, Human
ucauuuuuaaucauga

SEQ ID NO: 2244895 - RNA, 22 nt, Human
ucauuuugguaaaauacuucuu

SEQ ID NO: 2244896 - RNA, 16 nt, Human
ucauuuugcauucaaa

SEQ ID NO: 2244897 - RNA, 17 nt, Human
ucauuuugcauucaaau

SEQ ID NO: 2244898 - RNA, 19 nt, Human
ucauuuuuaguagagacag

SEQ ID NO: 2244899 - RNA, 18 nt, Human
ucauuuuuaaucaugaaa

SEQ ID NO: 2244900 - RNA, 19 nt, Human
ucauuuuuaaucaugaaau

SEQ ID NO: 2244901 - RNA, 22 nt, Human
ucauuuuuccuucccuucucca

SEQ ID NO: 2244902 - RNA, 14 nt, Human
ucauuuuugaauac

SEQ ID NO: 2244903 - RNA, 18 nt, Human
ucauuuuuuuuaagaaaa

SEQ ID NO: 2244904 - RNA, 17 nt, Human
ucauuuuuuuuaagaaa

SEQ ID NO: 2244905 - RNA, 12 nt, Human
ucauuuuuguac

SEQ ID NO: 2244906 - RNA, 15 nt, Human
ucauuuuuguacagu

SEQ ID NO: 2244907 - RNA, 19 nt, Human
uccaaaaagauuuucagaa

SEQ ID NO: 2244908 - RNA, 16 nt, Human
ucauuugucacacacu

SEQ ID NO: 2244909 - RNA, 20 nt, Human
ucauuugguucauuaauucu

SEQ ID NO: 2244910 - RNA, 15 nt, Human
ucauuuucugcauuu

SEQ ID NO: 2244911 - RNA, 14 nt, Human
ucauuuugcauuca

SEQ ID NO: 2244912 - RNA, 15 nt, Human
ucauuuugagcugaa

SEQ ID NO: 2244913 - RNA, 16 nt, Human
ucauuuucugcaagcc

SEQ ID NO: 2244914 - RNA, 18 nt, Human
ucauuuucugcaagccug

SEQ ID NO: 2244915 - RNA, 21 nt, Human
ucauuuucuuaucuucugcaa

SEQ ID NO: 2244916 - RNA, 13 nt, Human
ucauuuucugcaa

SEQ ID NO: 2244917 - RNA, 14 nt, Human
ucauuuucugcaag

SEQ ID NO: 2244918 - RNA, 23 nt, Human
ucauuugggguagcuagaggaac

SEQ ID NO: 2244919 - RNA, 17 nt, Human
accuggagccccugggu

SEQ ID NO: 2244920 - RNA, 18 nt, Human
ucauuugguucauuaauu

SEQ ID NO: 2244921 - RNA, 13 nt, Human
ucauuugcuuuuu

SEQ ID NO: 2244922 - RNA, 14 nt, Human
ucauuugucacaca

SEQ ID NO: 2244923 - RNA, 15 nt, Human
accuggagccccugg

SEQ ID NO: 2244924 - RNA, 16 nt, Human
accuggagccccuggg

SEQ ID NO: 2244925 - RNA, 14 nt, Human
accuggagccccug

SEQ ID NO: 2244926 - RNA, 22 nt, Human
accuggagagcuagaaccugga

SEQ ID NO: 2244927 - RNA, 23 nt, Human
accuggagagcuagaaccuggag

SEQ ID NO: 2244928 - RNA, 23 nt, Human
accuggagaacuagaaccuggag

SEQ ID NO: 2244929 - RNA, 13 nt, Human
accuggagaccag

SEQ ID NO: 2244930 - RNA, 20 nt, Human
accuggagagccagaaccug

SEQ ID NO: 2244931 - RNA, 22 nt, Human
accuggagagccagaaccugga

SEQ ID NO: 2244932 - RNA, 23 nt, Human
accuggagagccagaaccuggag

SEQ ID NO: 2244933 - RNA, 13 nt, Human
accuggagagcua

SEQ ID NO: 2244934 - RNA, 21 nt, Human
accuggagagcuagaaccuag

SEQ ID NO: 2244935 - RNA, 20 nt, Human
accuggagagcuagaaccug

SEQ ID NO: 2244936 - RNA, 15 nt, Human
accugauguguacau

SEQ ID NO: 2244937 - RNA, 22 nt, Human
accugauguguacaucccaugu

SEQ ID NO: 2244938 - RNA, 21 nt, Human
accugauguuaaaauuccauc

SEQ ID NO: 2244939 - RNA, 11 nt, Human
accugauucaa

SEQ ID NO: 2244940 - RNA, 13 nt, Human
accugauguguac

SEQ ID NO: 2244941 - RNA, 21 nt, Human
accugauggcacuuagcuauc

SEQ ID NO: 2244942 - RNA, 19 nt, Human
accugauucaacuaaaaaa

SEQ ID NO: 2244943 - RNA, 11 nt, Human
accugauuuuu

SEQ ID NO: 2244944 - RNA, 20 nt, Human
accugauuuuuuuuccuuuu

SEQ ID NO: 2244945 - RNA, 13 nt, Human
accugcaaaaaau

SEQ ID NO: 2244946 - RNA, 17 nt, Human
accugauuuuuuuuccu

SEQ ID NO: 2244947 - RNA, 16 nt, Human
accugauuuuuuuucc

SEQ ID NO: 2244948 - RNA, 16 nt, Human
accugaggggccucuu

SEQ ID NO: 2244949 - RNA, 14 nt, Human
accugaggcugugg

SEQ ID NO: 2244950 - RNA, 23 nt, Human
accugagggcagaaagguucugc

SEQ ID NO: 2244951 - RNA, 20 nt, Human
accugauccuggaggcccag

SEQ ID NO: 2244952 - RNA, 13 nt, Human
accugauccugga

SEQ ID NO: 2244953 - RNA, 22 nt, Human
accugauccuggaggcccaguu

SEQ ID NO: 2244954 - RNA, 14 nt, Human
accugaggggccuc

SEQ ID NO: 2244955 - RNA, 19 nt, Human
accugaggcuccugugcua

SEQ ID NO: 2244956 - RNA, 12 nt, Human
accugaggcugu

SEQ ID NO: 2244957 - RNA, 16 nt, Human
accugaggcuccugug

SEQ ID NO: 2244958 - RNA, 16 nt, Human
accugcaccucccccc

SEQ ID NO: 2244959 - RNA, 15 nt, Human
accugcaccuccccc

SEQ ID NO: 2244960 - RNA, 14 nt, Human
accugcaccucccc

SEQ ID NO: 2244961 - RNA, 18 nt, Human
accugcaagggcucccca

SEQ ID NO: 2244962 - RNA, 20 nt, Human
accugcaagggcuccccacu

SEQ ID NO: 2244963 - RNA, 15 nt, Human
accugcaaaaaauag

SEQ ID NO: 2244964 - RNA, 15 nt, Human
accugcaaagaucug

SEQ ID NO: 2244965 - RNA, 22 nt, Human
accugcaaagaucuguccucag

SEQ ID NO: 2244966 - RNA, 16 nt, Human
accugcaaagaucugu

SEQ ID NO: 2244967 - RNA, 16 nt, Human
accugccaggaagcca

SEQ ID NO: 2244968 - RNA, 17 nt, Human
accugccaggaagccag

SEQ ID NO: 2244969 - RNA, 20 nt, Human
accugcaccuccccccacug

SEQ ID NO: 2244970 - RNA, 19 nt, Human
accugccaggaagccagca

SEQ ID NO: 2244971 - RNA, 13 nt, Human
accugccucagga

SEQ ID NO: 2244972 - RNA, 18 nt, Human
accugccaggaagccagc

SEQ ID NO: 2244973 - RNA, 18 nt, Human
accugcaccuccccccac

SEQ ID NO: 2244974 - RNA, 17 nt, Human
accugcaccucccccca

SEQ ID NO: 2244975 - RNA, 21 nt, Human
accugccucccuucaugcaug

SEQ ID NO: 2244976 - RNA, 23 nt, Human
accugccucccuucaugcaugga

SEQ ID NO: 2244977 - RNA, 19 nt, Human
accugcaccuccccccacu

SEQ ID NO: 2244978 - RNA, 13 nt, Human
accugccuccugc

SEQ ID NO: 2244979 - RNA, 22 nt, Human
accugccucccuucaugcaugg

SEQ ID NO: 2244980 - RNA, 17 nt, Human
accugccucggccuccc

SEQ ID NO: 2244981 - RNA, 15 nt, Human
ucauaaucuuugcuu

SEQ ID NO: 2244982 - RNA, 14 nt, Human
ucauaaucuuugcu

SEQ ID NO: 2244983 - RNA, 12 nt, Human
ucauaaugacuu

SEQ ID NO: 2244984 - RNA, 16 nt, Human
ucauaauaaguugcau

SEQ ID NO: 2244985 - RNA, 14 nt, Human
accugaaccuagga

SEQ ID NO: 2244986 - RNA, 19 nt, Human
ucauaauaaauaucuguac

SEQ ID NO: 2244987 - RNA, 18 nt, Human
accugaagacucauucuu

SEQ ID NO: 2244988 - RNA, 16 nt, Human
accugaagaaucacaa

SEQ ID NO: 2244989 - RNA, 14 nt, Human
accugaagaaucac

SEQ ID NO: 2244990 - RNA, 11 nt, Human
accugaagaau

SEQ ID NO: 2244991 - RNA, 19 nt, Human
accugaauuuuggcugugu

SEQ ID NO: 2244992 - RNA, 23 nt, Human
accugagcccggaugcuucucca

SEQ ID NO: 2244993 - RNA, 21 nt, Human
accugagcccggaugcuucuc

SEQ ID NO: 2244994 - RNA, 23 nt, Human
accugaggcccuucucuccagcc

SEQ ID NO: 2244995 - RNA, 17 nt, Human
accugagccccaaaagg

SEQ ID NO: 2244996 - RNA, 12 nt, Human
accugagcccca

SEQ ID NO: 2244997 - RNA, 19 nt, Human
accugaccaacauggagaa

SEQ ID NO: 2244998 - RNA, 16 nt, Human
accugagccagccugc

SEQ ID NO: 2244999 - RNA, 18 nt, Human
accugagcaggaccucug

SEQ ID NO: 2245000 - RNA, 17 nt, Human
accugaccaacauggag

SEQ ID NO: 2245001 - RNA, 15 nt, Human
accugaccccugcuc

SEQ ID NO: 2245002 - RNA, 17 nt, Human
accugaccccugacccc

SEQ ID NO: 2245003 - RNA, 19 nt, Human
accugacacucccuugggc

SEQ ID NO: 2245004 - RNA, 12 nt, Human
accugacagaug

SEQ ID NO: 2245005 - RNA, 22 nt, Human
accugacagaugucagccgagc

SEQ ID NO: 2245006 - RNA, 23 nt, Human
accugaagaguggucagaacaga

SEQ ID NO: 2245007 - RNA, 16 nt, Human
accugacaagcacugc

SEQ ID NO: 2245008 - RNA, 17 nt, Human
accugacacucccuugg

SEQ ID NO: 2245009 - RNA, 16 nt, Human
accugacacucccuug

SEQ ID NO: 2245010 - RNA, 17 nt, Human
acgaagggaaaugucuu

SEQ ID NO: 2245011 - RNA, 14 nt, Human
acgaaguguugcau

SEQ ID NO: 2245012 - RNA, 14 nt, Human
acgaauacuuuugc

SEQ ID NO: 2245013 - RNA, 22 nt, Human
acgaauacuuuugcccuuugau

SEQ ID NO: 2245014 - RNA, 14 nt, Human
acgacaaggaaagg

SEQ ID NO: 2245015 - RNA, 14 nt, Human
acgaauauugcuga

SEQ ID NO: 2245016 - RNA, 23 nt, Human
uccagggacagaggccccagccu

SEQ ID NO: 2245017 - RNA, 21 nt, Human
uccagggacagaggccccagc

SEQ ID NO: 2245018 - RNA, 19 nt, Human
uccagggacagaggcccca

SEQ ID NO: 2245019 - RNA, 15 nt, Human
uccagggacagaggc

SEQ ID NO: 2245020 - RNA, 14 nt, Human
uccagggacagagg

SEQ ID NO: 2245021 - RNA, 19 nt, Human
uccagggagcauuuuccuc

SEQ ID NO: 2245022 - RNA, 14 nt, Human
uccagggacugaag

SEQ ID NO: 2245023 - RNA, 20 nt, Human
uccagggaugccaucugugg

SEQ ID NO: 2245024 - RNA, 18 nt, Human
uccagggaguccccuccc

SEQ ID NO: 2245025 - RNA, 17 nt, Human
uccagggccacgugcca

SEQ ID NO: 2245026 - RNA, 14 nt, Human
acgaacuuccaugg

SEQ ID NO: 2245027 - RNA, 23 nt, Human
uccacgcugucuccagaccccca

SEQ ID NO: 2245028 - RNA, 22 nt, Human
uccacgcugucuccagaccccc

SEQ ID NO: 2245029 - RNA, 21 nt, Human
uccacgcugucuccagacccc

SEQ ID NO: 2245030 - RNA, 20 nt, Human
uccacgcugucuccagaccc

SEQ ID NO: 2245031 - RNA, 19 nt, Human
uccacgcugucuccagacc

SEQ ID NO: 2245032 - RNA, 18 nt, Human
uccacgcugucuccagac

SEQ ID NO: 2245033 - RNA, 17 nt, Human
uccacgcugucuccaga

SEQ ID NO: 2245034 - RNA, 16 nt, Human
uccacgcugucuccag

SEQ ID NO: 2245035 - RNA, 15 nt, Human
uccacgcugucucca

SEQ ID NO: 2245036 - RNA, 12 nt, Human
uccacgcugucu

SEQ ID NO: 2245037 - RNA, 22 nt, Human
uccacgagcuguuuacuaggga

SEQ ID NO: 2245038 - RNA, 22 nt, Human
uccacggagccacuccucugac

SEQ ID NO: 2245039 - RNA, 14 nt, Human
uccacggcucuagg

SEQ ID NO: 2245040 - RNA, 22 nt, Human
uccaggcucuuuggggucagcc

SEQ ID NO: 2245041 - RNA, 20 nt, Human
uccacggcucuagguggggc

SEQ ID NO: 2245042 - RNA, 21 nt, Human
uccacggagccacuccucuga

SEQ ID NO: 2245043 - RNA, 20 nt, Human
uccacggagccacuccucug

SEQ ID NO: 2245044 - RNA, 15 nt, Human
uccacggagccacuc

SEQ ID NO: 2245045 - RNA, 14 nt, Human
uccacggagccacu

SEQ ID NO: 2245046 - RNA, 23 nt, Human
uccagggaagcuggccgaggguc

SEQ ID NO: 2245047 - RNA, 23 nt, Human
uccaggcucuuuggggucagcca

SEQ ID NO: 2245048 - RNA, 16 nt, Human
uccaggcugccguggg

SEQ ID NO: 2245049 - RNA, 18 nt, Human
uccaggcugggagagccu

SEQ ID NO: 2245050 - RNA, 14 nt, Human
uccaggcugggaga

SEQ ID NO: 2245051 - RNA, 17 nt, Human
uccaggcugggagagcc

SEQ ID NO: 2245052 - RNA, 23 nt, Human
acgccaggggaaaaucagccugc

SEQ ID NO: 2245053 - RNA, 11 nt, Human
acgccauccca

SEQ ID NO: 2245054 - RNA, 14 nt, Human
acgccaucccagcc

SEQ ID NO: 2245055 - RNA, 15 nt, Human
acgccaucccagccc

SEQ ID NO: 2245056 - RNA, 16 nt, Human
acgccaucccagcccc

SEQ ID NO: 2245057 - RNA, 17 nt, Human
acgccaucccagcccca

SEQ ID NO: 2245058 - RNA, 16 nt, Human
acgcccaacccuuccc

SEQ ID NO: 2245059 - RNA, 18 nt, Human
acgccaucccagccccaa

SEQ ID NO: 2245060 - RNA, 21 nt, Human
acgaggggugucuugggcaga

SEQ ID NO: 2245061 - RNA, 14 nt, Human
acgagguaugaggu

SEQ ID NO: 2245062 - RNA, 18 nt, Human
acgaggggugucuugggc

SEQ ID NO: 2245063 - RNA, 20 nt, Human
acgaggggugucuugggcag

SEQ ID NO: 2245064 - RNA, 18 nt, Human
acgccaggggaaaaucag

SEQ ID NO: 2245065 - RNA, 17 nt, Human
acgagucaauccccuca

SEQ ID NO: 2245066 - RNA, 16 nt, Human
acgaguaauuuauugu

SEQ ID NO: 2245067 - RNA, 15 nt, Human
acgacugcccggcag

SEQ ID NO: 2245068 - RNA, 20 nt, Human
acgacaauagcuuuacccuc

SEQ ID NO: 2245069 - RNA, 19 nt, Human
acgacaaggaaaggcaaau

SEQ ID NO: 2245070 - RNA, 22 nt, Human
acgacaaagccaaacucugcca

SEQ ID NO: 2245071 - RNA, 23 nt, Human
acgaggcccucgggcccagcccc

SEQ ID NO: 2245072 - RNA, 21 nt, Human
acgaggcccucgggcccagcc

SEQ ID NO: 2245073 - RNA, 22 nt, Human
acgaggcccucgggcccagccc

SEQ ID NO: 2245074 - RNA, 22 nt, Human
acgacuucagggcagggcucug

SEQ ID NO: 2245075 - RNA, 20 nt, Human
acgaggcccucgggcccagc

SEQ ID NO: 2245076 - RNA, 14 nt, Human
acgacuucagggca

SEQ ID NO: 2245077 - RNA, 12 nt, Human
acgacugucucc

SEQ ID NO: 2245078 - RNA, 17 nt, Human
acgaccacagggucugc

SEQ ID NO: 2245079 - RNA, 13 nt, Human
acgaccuuuaccu

SEQ ID NO: 2245080 - RNA, 20 nt, Human
acgccgcccuaaaagcacac

SEQ ID NO: 2245081 - RNA, 23 nt, Human
acgcccuccccuccccugcugca

SEQ ID NO: 2245082 - RNA, 20 nt, Human
acgccggggacagaggccug

SEQ ID NO: 2245083 - RNA, 18 nt, Human
acgcccuccccuccccug

SEQ ID NO: 2245084 - RNA, 19 nt, Human
acgcccuccccuccccugc

SEQ ID NO: 2245085 - RNA, 21 nt, Human
acgcccuccccuccccugcug

SEQ ID NO: 2245086 - RNA, 22 nt, Human
acgcccuccccuccccugcugc

SEQ ID NO: 2245087 - RNA, 23 nt, Human
acgcgugcacacaccagagccca

SEQ ID NO: 2245088 - RNA, 20 nt, Human
acgcgugcacacaccagagc

SEQ ID NO: 2245089 - RNA, 21 nt, Human
acgccggggacagaggccugc

SEQ ID NO: 2245090 - RNA, 22 nt, Human
acgccggggacagaggccugcc

SEQ ID NO: 2245091 - RNA, 23 nt, Human
acgccggggacagaggccugccc

SEQ ID NO: 2245092 - RNA, 16 nt, Human
acgcccaugugugagu

SEQ ID NO: 2245093 - RNA, 21 nt, Human
acgccccagauaccagccccu

SEQ ID NO: 2245094 - RNA, 14 nt, Human
acgcccauguguga

SEQ ID NO: 2245095 - RNA, 14 nt, Human
acgcccccacuggu

SEQ ID NO: 2245096 - RNA, 23 nt, Human
acgcccccccccaccccuggggg

SEQ ID NO: 2245097 - RNA, 13 nt, Human
acgcccuauuuuu

SEQ ID NO: 2245098 - RNA, 20 nt, Human
acgcccguccugccuguggc

SEQ ID NO: 2245099 - RNA, 12 nt, Human
acgcccuccccu

SEQ ID NO: 2245100 - RNA, 13 nt, Human
acgcccuccccuc

SEQ ID NO: 2245101 - RNA, 14 nt, Human
acgcccuccccucc

SEQ ID NO: 2245102 - RNA, 15 nt, Human
acgcccuccccuccc

SEQ ID NO: 2245103 - RNA, 16 nt, Human
acgcccccccccaccc

SEQ ID NO: 2245104 - RNA, 14 nt, Human
acgcccccccccac

SEQ ID NO: 2245105 - RNA, 16 nt, Human
acgcccguccugccug

SEQ ID NO: 2245106 - RNA, 18 nt, Human
acgcccguccugccugug

SEQ ID NO: 2245107 - RNA, 19 nt, Human
acgcccguccugccugugg

SEQ ID NO: 2245108 - RNA, 18 nt, Human
acgcuacccgggaagggg

SEQ ID NO: 2245109 - RNA, 21 nt, Human
acgcguguguacacgggacug

SEQ ID NO: 2245110 - RNA, 23 nt, Human
acgcguguguacacgggacugac

SEQ ID NO: 2245111 - RNA, 16 nt, Human
acgcuaaagagcccuu

SEQ ID NO: 2245112 - RNA, 17 nt, Human
acgcuaaagagcccuug

SEQ ID NO: 2245113 - RNA, 16 nt, Human
acgcucucuggccuuc

SEQ ID NO: 2245114 - RNA, 15 nt, Human
acgcucucuggccuu

SEQ ID NO: 2245115 - RNA, 13 nt, Human
acgcuacccggga

SEQ ID NO: 2245116 - RNA, 17 nt, Human
acgcuacccgggaaggg

SEQ ID NO: 2245117 - RNA, 19 nt, Human
acggagucccaccuuggcu

SEQ ID NO: 2245118 - RNA, 18 nt, Human
acggagccccaggccucu

SEQ ID NO: 2245119 - RNA, 21 nt, Human
acggagccccaggccucugug

SEQ ID NO: 2245120 - RNA, 20 nt, Human
acggagcccagcccucccca

SEQ ID NO: 2245121 - RNA, 15 nt, Human
acggagcccagcccu

SEQ ID NO: 2245122 - RNA, 21 nt, Human
acggagccacuccucugacuc

SEQ ID NO: 2245123 - RNA, 18 nt, Human
acgcugaauaaaugucuu

SEQ ID NO: 2245124 - RNA, 19 nt, Human
acgcugaauaaaugucuuu

SEQ ID NO: 2245125 - RNA, 14 nt, Human
acgcugccugcccg

SEQ ID NO: 2245126 - RNA, 15 nt, Human
acgcugccugcccac

SEQ ID NO: 2245127 - RNA, 13 nt, Human
acgcugccugccc

SEQ ID NO: 2245128 - RNA, 12 nt, Human
acgcugccugcc

SEQ ID NO: 2245129 - RNA, 21 nt, Human
acgcuaaagagcccuugccuc

SEQ ID NO: 2245130 - RNA, 18 nt, Human
acgcuaaagagcccuugc

SEQ ID NO: 2245131 - RNA, 20 nt, Human
acgcuaaagagcccuugccu

SEQ ID NO: 2245132 - RNA, 12 nt, Human
acgcugaauaaa

SEQ ID NO: 2245133 - RNA, 13 nt, Human
acgcugaauaaau

SEQ ID NO: 2245134 - RNA, 15 nt, Human
acgcugaauaaaugu

SEQ ID NO: 2245135 - RNA, 16 nt, Human
acgcugaauaaauguc

SEQ ID NO: 2245136 - RNA, 17 nt, Human
acgcucucuggccuucg

SEQ ID NO: 2245137 - RNA, 22 nt, Human
acggcaggacaacgaggaagcc

SEQ ID NO: 2245138 - RNA, 18 nt, Human
acggccagggagaagcuc

SEQ ID NO: 2245139 - RNA, 23 nt, Human
acggccagggagaagcuccucuc

SEQ ID NO: 2245140 - RNA, 17 nt, Human
acggccagggagaagcu

SEQ ID NO: 2245141 - RNA, 13 nt, Human
acggccaggccag

SEQ ID NO: 2245142 - RNA, 21 nt, Human
acggcaggacaacgaggaagc

SEQ ID NO: 2245143 - RNA, 16 nt, Human
acggccaggccagagg

SEQ ID NO: 2245144 - RNA, 13 nt, Human
acggcacccaccc

SEQ ID NO: 2245145 - RNA, 12 nt, Human
acggauuccaaa

SEQ ID NO: 2245146 - RNA, 15 nt, Human
acggauuuauuuuuc

SEQ ID NO: 2245147 - RNA, 23 nt, Human
acggauuagggcauuugagaaau

SEQ ID NO: 2245148 - RNA, 13 nt, Human
acggauuauuuuu

SEQ ID NO: 2245149 - RNA, 16 nt, Human
acggauuauuuuuuca

SEQ ID NO: 2245150 - RNA, 17 nt, Human
acggauuauuuuuucag

SEQ ID NO: 2245151 - RNA, 18 nt, Human
acggauuauuuuuucaga

SEQ ID NO: 2245152 - RNA, 19 nt, Human
acggauuauuuuuucagac

SEQ ID NO: 2245153 - RNA, 20 nt, Human
acggauuauuuuuucagacc

SEQ ID NO: 2245154 - RNA, 21 nt, Human
acggauuauuuuuucagaccg

SEQ ID NO: 2245155 - RNA, 21 nt, Human
acggagucccaccuuggcugc

SEQ ID NO: 2245156 - RNA, 22 nt, Human
acggaugccuuccccugggccc

SEQ ID NO: 2245157 - RNA, 22 nt, Human
acggauuagggcauuugagaaa

SEQ ID NO: 2245158 - RNA, 12 nt, Human
uccaugaaaaug

SEQ ID NO: 2245159 - RNA, 22 nt, Human
uccaugaaaacguuuuauugug

SEQ ID NO: 2245160 - RNA, 21 nt, Human
uccaugaaaacguuuuauugu

SEQ ID NO: 2245161 - RNA, 19 nt, Human
uccaugaaaacguuuuauu

SEQ ID NO: 2245162 - RNA, 18 nt, Human
uccaugaaaacguuuuau

SEQ ID NO: 2245163 - RNA, 15 nt, Human
uccaugaaaacguuu

SEQ ID NO: 2245164 - RNA, 11 nt, Human
uccaugaaaac

SEQ ID NO: 2245165 - RNA, 22 nt, Human
uccaugaagauguagaggagaa

SEQ ID NO: 2245166 - RNA, 14 nt, Human
uccaugaauguauc

SEQ ID NO: 2245167 - RNA, 13 nt, Human
uccaugaauguau

SEQ ID NO: 2245168 - RNA, 12 nt, Human
uccaugaaugua

SEQ ID NO: 2245169 - RNA, 20 nt, Human
uccaugaaucgcuucucuuu

SEQ ID NO: 2245170 - RNA, 15 nt, Human
uccaugaaggcagag

SEQ ID NO: 2245171 - RNA, 18 nt, Human
uccaugaaucgcuucucu

SEQ ID NO: 2245172 - RNA, 19 nt, Human
uccaugaaucgcuucucuu

SEQ ID NO: 2245173 - RNA, 16 nt, Human
uccaugaauguaucag

SEQ ID NO: 2245174 - RNA, 15 nt, Human
uccaugaauguauca

SEQ ID NO: 2245175 - RNA, 21 nt, Human
uccaugaauguaucaggaaau

SEQ ID NO: 2245176 - RNA, 15 nt, Human
uccaucuggcagggu

SEQ ID NO: 2245177 - RNA, 13 nt, Human
uccaucuuuacaa

SEQ ID NO: 2245178 - RNA, 16 nt, Human
uccaucuucuuugcag

SEQ ID NO: 2245179 - RNA, 18 nt, Human
uccaucuuuccugauggc

SEQ ID NO: 2245180 - RNA, 14 nt, Human
uccaucuucagcuu

SEQ ID NO: 2245181 - RNA, 16 nt, Human
uccaucuucagcuucu

SEQ ID NO: 2245182 - RNA, 23 nt, Human
uccaucuucagcuucuucaucuu

SEQ ID NO: 2245183 - RNA, 15 nt, Human
uccaucuucuuugca

SEQ ID NO: 2245184 - RNA, 20 nt, Human
uccaucucuuguuuaaauuc

SEQ ID NO: 2245185 - RNA, 11 nt, Human
uccauccugag

SEQ ID NO: 2245186 - RNA, 14 nt, Human
uccauugugugagu

SEQ ID NO: 2245187 - RNA, 14 nt, Human
uccauuguuugaaa

SEQ ID NO: 2245188 - RNA, 20 nt, Human
uccauuguuugaaacaaaga

SEQ ID NO: 2245189 - RNA, 21 nt, Human
uccauuguuugaaacaaagaa

SEQ ID NO: 2245190 - RNA, 22 nt, Human
uccauugguuuaccugugaaau

SEQ ID NO: 2245191 - RNA, 23 nt, Human
uccauuguaaaccacaaggcugu

SEQ ID NO: 2245192 - RNA, 23 nt, Human
uccauuguuugaaacaaagaagg

SEQ ID NO: 2245193 - RNA, 19 nt, Human
uccauuguuuggagacauu

SEQ ID NO: 2245194 - RNA, 18 nt, Human
uccaugaguuugcccugg

SEQ ID NO: 2245195 - RNA, 19 nt, Human
uccaugagcaccccaaggc

SEQ ID NO: 2245196 - RNA, 13 nt, Human
uccaugagcaccc

SEQ ID NO: 2245197 - RNA, 15 nt, Human
uccaugagcacccca

SEQ ID NO: 2245198 - RNA, 16 nt, Human
uccauuggaucucauu

SEQ ID NO: 2245199 - RNA, 20 nt, Human
uccauugacauguacagaga

SEQ ID NO: 2245200 - RNA, 21 nt, Human
uccauugacauguacagagaa

SEQ ID NO: 2245201 - RNA, 20 nt, Human
uccaugaccuaguuuuccau

SEQ ID NO: 2245202 - RNA, 15 nt, Human
uccaugaguccccug

SEQ ID NO: 2245203 - RNA, 16 nt, Human
uccaugaguccccugu

SEQ ID NO: 2245204 - RNA, 17 nt, Human
uccaugaguccccuguu

SEQ ID NO: 2245205 - RNA, 14 nt, Human
acggccgcuccagg

SEQ ID NO: 2245206 - RNA, 19 nt, Human
acggccugaugcucccucc

SEQ ID NO: 2245207 - RNA, 18 nt, Human
acggccugaugcucccuc

SEQ ID NO: 2245208 - RNA, 15 nt, Human
acggccugaugcucc

SEQ ID NO: 2245209 - RNA, 15 nt, Human
acggccgcuccaggg

SEQ ID NO: 2245210 - RNA, 18 nt, Human
acggccgcuccaggggug

SEQ ID NO: 2245211 - RNA, 14 nt, Human
acggcucacugcag

SEQ ID NO: 2245212 - RNA, 22 nt, Human
acggccugaugcucccuccccu

SEQ ID NO: 2245213 - RNA, 20 nt, Human
acggccugaugcucccuccc

SEQ ID NO: 2245214 - RNA, 21 nt, Human
acggccuucaacugaaaagac

SEQ ID NO: 2245215 - RNA, 19 nt, Human
uccagucugcugcccucca

SEQ ID NO: 2245216 - RNA, 18 nt, Human
uccagucugcugcccucc

SEQ ID NO: 2245217 - RNA, 16 nt, Human
uccagucugcugcccu

SEQ ID NO: 2245218 - RNA, 15 nt, Human
uccagucugcugccc

SEQ ID NO: 2245219 - RNA, 15 nt, Human
acggcucacugcagc

SEQ ID NO: 2245220 - RNA, 22 nt, Human
uccagucugcugcccuccaucc

SEQ ID NO: 2245221 - RNA, 20 nt, Human
uccagucugcugcccuccau

SEQ ID NO: 2245222 - RNA, 19 nt, Human
uccagucuuccugacacuu

SEQ ID NO: 2245223 - RNA, 15 nt, Human
uccagucuuccugac

SEQ ID NO: 2245224 - RNA, 23 nt, Human
uccagucuuccugacacuuuaau

SEQ ID NO: 2245225 - RNA, 22 nt, Human
uccagucuuccugacacuuuaa

SEQ ID NO: 2245226 - RNA, 21 nt, Human
uccagucuuccugacacuuua

SEQ ID NO: 2245227 - RNA, 22 nt, Human
uccaucccuacccccuaagagc

SEQ ID NO: 2245228 - RNA, 20 nt, Human
uccagugaggcucugcccuu

SEQ ID NO: 2245229 - RNA, 18 nt, Human
uccagugaggcucugccc

SEQ ID NO: 2245230 - RNA, 19 nt, Human
uccagugaggcucugcccu

SEQ ID NO: 2245231 - RNA, 17 nt, Human
uccagugaggcucugcc

SEQ ID NO: 2245232 - RNA, 14 nt, Human
uccagugagacagc

SEQ ID NO: 2245233 - RNA, 15 nt, Human
ucccaaagugcuggg

SEQ ID NO: 2245234 - RNA, 20 nt, Human
ucccaaagugcugggauuac

SEQ ID NO: 2245235 - RNA, 16 nt, Human
ucccaaagugcuggga

SEQ ID NO: 2245236 - RNA, 14 nt, Human
uccauuugugugug

SEQ ID NO: 2245237 - RNA, 15 nt, Human
uccauuugcaaggga

SEQ ID NO: 2245238 - RNA, 12 nt, Human
uccauuugcaag

SEQ ID NO: 2245239 - RNA, 14 nt, Human
ucccacaaaggaga

SEQ ID NO: 2245240 - RNA, 23 nt, Human
ucccaauuucagacucccauucc

SEQ ID NO: 2245241 - RNA, 18 nt, Human
ucccaauuucagacuccc

SEQ ID NO: 2245242 - RNA, 17 nt, Human
ucccaauuucagacucc

SEQ ID NO: 2245243 - RNA, 15 nt, Human
ucccaauucacaucu

SEQ ID NO: 2245244 - RNA, 19 nt, Human
ucccaauuaggaaguguaa

SEQ ID NO: 2245245 - RNA, 15 nt, Human
ucccaauuaggaagu

SEQ ID NO: 2245246 - RNA, 14 nt, Human
ucccaauuaggaag

SEQ ID NO: 2245247 - RNA, 20 nt, Human
ucccaauuaggaaguguaac

SEQ ID NO: 2245248 - RNA, 13 nt, Human
ucccacaggcagc

SEQ ID NO: 2245249 - RNA, 21 nt, Human
ucccacaggacauuucucuaa

SEQ ID NO: 2245250 - RNA, 18 nt, Human
ucccacaggacauuucuc

SEQ ID NO: 2245251 - RNA, 17 nt, Human
ucccacaggacauuucu

SEQ ID NO: 2245252 - RNA, 15 nt, Human
ucccacaggcccuuc

SEQ ID NO: 2245253 - RNA, 17 nt, Human
ucccacaggcccuuccu

SEQ ID NO: 2245254 - RNA, 21 nt, Human
ucccacaggcccuuccucucc

SEQ ID NO: 2245255 - RNA, 22 nt, Human
ucccacaggcccuuccucucca

SEQ ID NO: 2245256 - RNA, 23 nt, Human
ucccacagugacucgggcuccug

SEQ ID NO: 2245257 - RNA, 17 nt, Human
ucccacaggcagcuuua

SEQ ID NO: 2245258 - RNA, 14 nt, Human
ucccacaggcagcu

SEQ ID NO: 2245259 - RNA, 15 nt, Human
ucccacaggcagcuu

SEQ ID NO: 2245260 - RNA, 14 nt, Human
acgggguccuucaa

SEQ ID NO: 2245261 - RNA, 16 nt, Human
acggggggccccaguc

SEQ ID NO: 2245262 - RNA, 22 nt, Human
acggggggccccagucagccuc

SEQ ID NO: 2245263 - RNA, 18 nt, Human
acggggcucuucucauuu

SEQ ID NO: 2245264 - RNA, 14 nt, Human
acggggggccccag

SEQ ID NO: 2245265 - RNA, 15 nt, Human
acggggggccccagu

SEQ ID NO: 2245266 - RNA, 14 nt, Human
acgguauuaugcuu

SEQ ID NO: 2245267 - RNA, 17 nt, Human
acgguauuaugcuucuu

SEQ ID NO: 2245268 - RNA, 18 nt, Human
acgguauuaugcuucuug

SEQ ID NO: 2245269 - RNA, 23 nt, Human
acggggggccccagucagccucu

SEQ ID NO: 2245270 - RNA, 18 nt, Human
acgggugggcggcuggag

SEQ ID NO: 2245271 - RNA, 14 nt, Human
acggggaggccaag

SEQ ID NO: 2245272 - RNA, 14 nt, Human
acggggccggccag

SEQ ID NO: 2245273 - RNA, 23 nt, Human
acggggaggccaagugcaggcug

SEQ ID NO: 2245274 - RNA, 15 nt, Human
acggggcucuucuca

SEQ ID NO: 2245275 - RNA, 15 nt, Human
acggggccggccagg

SEQ ID NO: 2245276 - RNA, 18 nt, Human
acggggccggccaggugg

SEQ ID NO: 2245277 - RNA, 12 nt, Human
acggggagaaaa

SEQ ID NO: 2245278 - RNA, 14 nt, Human
acggggacugggga

SEQ ID NO: 2245279 - RNA, 19 nt, Human
ucccacccccuucucugcu

SEQ ID NO: 2245280 - RNA, 17 nt, Human
ucccacccccuucucug

SEQ ID NO: 2245281 - RNA, 20 nt, Human
ucccacccccaucucucccu

SEQ ID NO: 2245282 - RNA, 22 nt, Human
ucccacccccacccccagcuca

SEQ ID NO: 2245283 - RNA, 23 nt, Human
ucccacccccacccccagcucaa

SEQ ID NO: 2245284 - RNA, 22 nt, Human
ucccacccccuucucugcucca

SEQ ID NO: 2245285 - RNA, 15 nt, Human
ucccacccgaugcug

SEQ ID NO: 2245286 - RNA, 16 nt, Human
ucccacccgaugcugc

SEQ ID NO: 2245287 - RNA, 21 nt, Human
ucccacccccuucucugcucc

SEQ ID NO: 2245288 - RNA, 20 nt, Human
ucccacccccuucucugcuc

SEQ ID NO: 2245289 - RNA, 20 nt, Human
ucccacccgaugcugcuuuc

SEQ ID NO: 2245290 - RNA, 17 nt, Human
ucccacccgaugcugcu

SEQ ID NO: 2245291 - RNA, 18 nt, Human
ucccacccgaugcugcuu

SEQ ID NO: 2245292 - RNA, 22 nt, Human
ucccaccaggcugcucagggcu

SEQ ID NO: 2245293 - RNA, 16 nt, Human
ucccacccacauguga

SEQ ID NO: 2245294 - RNA, 15 nt, Human
ucccacccacaugug

SEQ ID NO: 2245295 - RNA, 12 nt, Human
ucccacccaccg

SEQ ID NO: 2245296 - RNA, 19 nt, Human
ucccacccaccgccacaau

SEQ ID NO: 2245297 - RNA, 18 nt, Human
ucccacccacaugugaca

SEQ ID NO: 2245298 - RNA, 22 nt, Human
ucccacccacaugugacacaua

SEQ ID NO: 2245299 - RNA, 11 nt, Human
ucccaccccac

SEQ ID NO: 2245300 - RNA, 14 nt, Human
ucccaccccacaca

SEQ ID NO: 2245301 - RNA, 19 nt, Human
ucccaccaacccucagagc

SEQ ID NO: 2245302 - RNA, 17 nt, Human
ucccaccacagcaggug

SEQ ID NO: 2245303 - RNA, 15 nt, Human
ucccaccacccugag

SEQ ID NO: 2245304 - RNA, 15 nt, Human
ucccaccacagcagg

SEQ ID NO: 2245305 - RNA, 18 nt, Human
ucccaccaaggucuucag

SEQ ID NO: 2245306 - RNA, 17 nt, Human
ucccaccaggcugcuca

SEQ ID NO: 2245307 - RNA, 20 nt, Human
uccuacccugcgcccagucc

SEQ ID NO: 2245308 - RNA, 16 nt, Human
uccguuagcuccugug

SEQ ID NO: 2245309 - RNA, 17 nt, Human
uccguuagcuccugugg

SEQ ID NO: 2245310 - RNA, 13 nt, Human
uccuaccucagcc

SEQ ID NO: 2245311 - RNA, 12 nt, Human
uccuaccucagc

SEQ ID NO: 2245312 - RNA, 20 nt, Human
uccuaccgaaaccuugccuu

SEQ ID NO: 2245313 - RNA, 15 nt, Human
uccguuaaaauacca

SEQ ID NO: 2245314 - RNA, 15 nt, Human
uccguuagcuccugu

SEQ ID NO: 2245315 - RNA, 17 nt, Human
uccgugggacggugccc

SEQ ID NO: 2245316 - RNA, 24 nt, Human
uccgugcuuguuugcucaccuggg

SEQ ID NO: 2245317 - RNA, 16 nt, Human
uccgugggacggugcc

SEQ ID NO: 2245318 - RNA, 23 nt, Human
uccgugggacggugcccaagcca

SEQ ID NO: 2245319 - RNA, 13 nt, Human
uccguuaaaauac

SEQ ID NO: 2245320 - RNA, 13 nt, Human
uccgugcugacag

SEQ ID NO: 2245321 - RNA, 21 nt, Human
uccgugcugacagcugcuccu

SEQ ID NO: 2245322 - RNA, 19 nt, Human
uccgugcugacagcugcuc

SEQ ID NO: 2245323 - RNA, 18 nt, Human
uccgugcugacagcugcu

SEQ ID NO: 2245324 - RNA, 17 nt, Human
uccgugcugacagcugc

SEQ ID NO: 2245325 - RNA, 16 nt, Human
uccgugcuuccucagu

SEQ ID NO: 2245326 - RNA, 21 nt, Human
uccggcccuccuacccugcgc

SEQ ID NO: 2245327 - RNA, 23 nt, Human
uccggcccuccuacccugcgccc

SEQ ID NO: 2245328 - RNA, 14 nt, Human
uccggccuccccuc

SEQ ID NO: 2245329 - RNA, 21 nt, Human
uccggccugaugacagagcga

SEQ ID NO: 2245330 - RNA, 15 nt, Human
uccggcgucagccuc

SEQ ID NO: 2245331 - RNA, 16 nt, Human
uccggcgucagccucc

SEQ ID NO: 2245332 - RNA, 17 nt, Human
uccggcgucagccucca

SEQ ID NO: 2245333 - RNA, 18 nt, Human
uccggcgucagccuccag

SEQ ID NO: 2245334 - RNA, 19 nt, Human
uccggcgucagccuccagc

SEQ ID NO: 2245335 - RNA, 21 nt, Human
uccggcgucagccuccagccu

SEQ ID NO: 2245336 - RNA, 22 nt, Human
uccggcgucagccuccagccuc

SEQ ID NO: 2245337 - RNA, 18 nt, Human
uccggcaguucugggugc

SEQ ID NO: 2245338 - RNA, 14 nt, Human
uccggcccccagag

SEQ ID NO: 2245339 - RNA, 18 nt, Human
uccggcccccagagcgcc

SEQ ID NO: 2245340 - RNA, 23 nt, Human
uccggauuggcuuguguguuuca

SEQ ID NO: 2245341 - RNA, 16 nt, Human
uccggauuuaauuuga

SEQ ID NO: 2245342 - RNA, 15 nt, Human
acuccacuuucauag

SEQ ID NO: 2245343 - RNA, 14 nt, Human
acuccagaaaguga

SEQ ID NO: 2245344 - RNA, 18 nt, Human
acuccagaaagugacaag

SEQ ID NO: 2245345 - RNA, 19 nt, Human
acucgauucauauugaaua

SEQ ID NO: 2245346 - RNA, 21 nt, Human
acucgaggacuguauuuguga

SEQ ID NO: 2245347 - RNA, 23 nt, Human
acucgagaccuuuucaacuuggc

SEQ ID NO: 2245348 - RNA, 19 nt, Human
acucgaggacuguauuugu

SEQ ID NO: 2245349 - RNA, 16 nt, Human
acucgaguuacagaca

SEQ ID NO: 2245350 - RNA, 21 nt, Human
acuccuugugguuuaugucau

SEQ ID NO: 2245351 - RNA, 18 nt, Human
acuccuugugguuuaugu

SEQ ID NO: 2245352 - RNA, 19 nt, Human
acuccuugugguuuauguc

SEQ ID NO: 2245353 - RNA, 20 nt, Human
acuccuugugguuuauguca

SEQ ID NO: 2245354 - RNA, 13 nt, Human
acucgagaacuuu

SEQ ID NO: 2245355 - RNA, 17 nt, Human
acucgagaacuuucauu

SEQ ID NO: 2245356 - RNA, 16 nt, Human
acucgagaccuuuuca

SEQ ID NO: 2245357 - RNA, 17 nt, Human
acucgagaccuuuucaa

SEQ ID NO: 2245358 - RNA, 11 nt, Human
acuccuuccug

SEQ ID NO: 2245359 - RNA, 23 nt, Human
acuccuuccaguguccuuagaac

SEQ ID NO: 2245360 - RNA, 20 nt, Human
acuccuguuacuuaccuaaa

SEQ ID NO: 2245361 - RNA, 23 nt, Human
acuccuugauuuuagccuucucu

SEQ ID NO: 2245362 - RNA, 12 nt, Human
acuccuuagaga

SEQ ID NO: 2245363 - RNA, 17 nt, Human
acuccuguuacuuaccu

SEQ ID NO: 2245364 - RNA, 16 nt, Human
acuccuguuacuuacc

SEQ ID NO: 2245365 - RNA, 18 nt, Human
acuccuguacacugaaua

SEQ ID NO: 2245366 - RNA, 17 nt, Human
acuccuguacacugaau

SEQ ID NO: 2245367 - RNA, 16 nt, Human
acuccuguacacugaa

SEQ ID NO: 2245368 - RNA, 15 nt, Human
acuccuguacacuga

SEQ ID NO: 2245369 - RNA, 13 nt, Human
acuccuguacacu

SEQ ID NO: 2245370 - RNA, 15 nt, Human
acuccuguaauuccu

SEQ ID NO: 2245371 - RNA, 23 nt, Human
acuccuggguugagcuguugccu

SEQ ID NO: 2245372 - RNA, 15 nt, Human
uccuagcagagagac

SEQ ID NO: 2245373 - RNA, 18 nt, Human
uccuagccuuauccucug

SEQ ID NO: 2245374 - RNA, 19 nt, Human
uccuagccuuauccucuga

SEQ ID NO: 2245375 - RNA, 20 nt, Human
uccuagccuuauccucugau

SEQ ID NO: 2245376 - RNA, 21 nt, Human
uccuagccuuauccucugauc

SEQ ID NO: 2245377 - RNA, 22 nt, Human
uccuagccuuauccucugaucu

SEQ ID NO: 2245378 - RNA, 17 nt, Human
uccuagccacucaggag

SEQ ID NO: 2245379 - RNA, 13 nt, Human
uccuagccacuca

SEQ ID NO: 2245380 - RNA, 21 nt, Human
uccuagccaccgccuccuaca

SEQ ID NO: 2245381 - RNA, 21 nt, Human
uccuagccugugccucuggga

SEQ ID NO: 2245382 - RNA, 12 nt, Human
uccuacucugug

SEQ ID NO: 2245383 - RNA, 20 nt, Human
uccuagccacccaccacacu

SEQ ID NO: 2245384 - RNA, 12 nt, Human
uccuagcagaga

SEQ ID NO: 2245385 - RNA, 14 nt, Human
uccuagcagagaga

SEQ ID NO: 2245386 - RNA, 17 nt, Human
uccuaccucagccuaga

SEQ ID NO: 2245387 - RNA, 13 nt, Human
uccuaccucccug

SEQ ID NO: 2245388 - RNA, 16 nt, Human
uccuaccucagccuag

SEQ ID NO: 2245389 - RNA, 14 nt, Human
uccuaccucagccu

SEQ ID NO: 2245390 - RNA, 20 nt, Human
uccuacgucaaacaugaagu

SEQ ID NO: 2245391 - RNA, 16 nt, Human
uccuacuaggcaaaau

SEQ ID NO: 2245392 - RNA, 17 nt, Human
uccuacucccagacacc

SEQ ID NO: 2245393 - RNA, 18 nt, Human
uccuacucccagacaccc

SEQ ID NO: 2245394 - RNA, 15 nt, Human
acucuuccugcaagg

SEQ ID NO: 2245395 - RNA, 23 nt, Human
acucuucugagcaccuacuuaca

SEQ ID NO: 2245396 - RNA, 20 nt, Human
acucuucuuaacuuaaauuu

SEQ ID NO: 2245397 - RNA, 19 nt, Human
acucuucuuaacuuaaauu

SEQ ID NO: 2245398 - RNA, 16 nt, Human
acucuucuugaaauuu

SEQ ID NO: 2245399 - RNA, 15 nt, Human
acucuucuugaaauu

SEQ ID NO: 2245400 - RNA, 13 nt, Human
acucuugaaaaau

SEQ ID NO: 2245401 - RNA, 16 nt, Human
acucuuccugcaagga

SEQ ID NO: 2245402 - RNA, 17 nt, Human
acucuuccagaauccca

SEQ ID NO: 2245403 - RNA, 20 nt, Human
acucuuccgaaaaauccucu

SEQ ID NO: 2245404 - RNA, 21 nt, Human
acucuuccgaaaaauccucuu

SEQ ID NO: 2245405 - RNA, 22 nt, Human
acucuuccgaaaaauccucuuc

SEQ ID NO: 2245406 - RNA, 20 nt, Human
acucuucccccacuccucuu

SEQ ID NO: 2245407 - RNA, 21 nt, Human
acucuucaguuaagccuuugg

SEQ ID NO: 2245408 - RNA, 20 nt, Human
acucuucaguuaagccuuug

SEQ ID NO: 2245409 - RNA, 17 nt, Human
acucuucacaaaaucug

SEQ ID NO: 2245410 - RNA, 21 nt, Human
acucuuauugcccacgcugga

SEQ ID NO: 2245411 - RNA, 16 nt, Human
acucugcuucucugac

SEQ ID NO: 2245412 - RNA, 14 nt, Human
acucugcuucucug

SEQ ID NO: 2245413 - RNA, 15 nt, Human
acucugcuucucuga

SEQ ID NO: 2245414 - RNA, 19 nt, Human
acucuggcagcucagagag

SEQ ID NO: 2245415 - RNA, 20 nt, Human
acucuggcagcucagagagg

SEQ ID NO: 2245416 - RNA, 20 nt, Human
acucugcucugcccuuguuc

SEQ ID NO: 2245417 - RNA, 14 nt, Human
acucugcucugccc

SEQ ID NO: 2245418 - RNA, 12 nt, Human
acucugcuucuc

SEQ ID NO: 2245419 - RNA, 22 nt, Human
acucugcugucuaaccugugac

SEQ ID NO: 2245420 - RNA, 23 nt, Human
acucugcugucuaaccugugacc

SEQ ID NO: 2245421 - RNA, 9 nt, Human
acucugcug

SEQ ID NO: 2245422 - RNA, 14 nt, Human
acucugcugcuuag

SEQ ID NO: 2245423 - RNA, 15 nt, Human
acucugcugcuuaga

SEQ ID NO: 2245424 - RNA, 16 nt, Human
acucuggcagcucaga

SEQ ID NO: 2245425 - RNA, 17 nt, Human
acucuggcagcucagag

SEQ ID NO: 2245426 - RNA, 22 nt, Human
acucgcccgcccacuguccugg

SEQ ID NO: 2245427 - RNA, 16 nt, Human
acucgucugacugugu

SEQ ID NO: 2245428 - RNA, 14 nt, Human
acucguauaugucu

SEQ ID NO: 2245429 - RNA, 14 nt, Human
acucucacauguuu

SEQ ID NO: 2245430 - RNA, 17 nt, Human
acucgcgacaaugcaaa

SEQ ID NO: 2245431 - RNA, 14 nt, Human
acucgcccgcccac

SEQ ID NO: 2245432 - RNA, 15 nt, Human
acucgcccgcccacu

SEQ ID NO: 2245433 - RNA, 17 nt, Human
acucgcccgcccacugu

SEQ ID NO: 2245434 - RNA, 19 nt, Human
acucgcccgcccacugucc

SEQ ID NO: 2245435 - RNA, 12 nt, Human
acucgguuucuc

SEQ ID NO: 2245436 - RNA, 20 nt, Human
acucgcccgcccacuguccu

SEQ ID NO: 2245437 - RNA, 21 nt, Human
acucgcccgcccacuguccug

SEQ ID NO: 2245438 - RNA, 14 nt, Human
acucgguuucucca

SEQ ID NO: 2245439 - RNA, 16 nt, Human
acucgguuucuccaaa

SEQ ID NO: 2245440 - RNA, 15 nt, Human
acucgcgacaaugca

SEQ ID NO: 2245441 - RNA, 16 nt, Human
acucgcgacaaugcaa

SEQ ID NO: 2245442 - RNA, 14 nt, Human
acucugccucugcc

SEQ ID NO: 2245443 - RNA, 12 nt, Human
acucugccucug

SEQ ID NO: 2245444 - RNA, 11 nt, Human
acucugccucu

SEQ ID NO: 2245445 - RNA, 15 nt, Human
acucucauuccccag

SEQ ID NO: 2245446 - RNA, 16 nt, Human
acucugccucugccug

SEQ ID NO: 2245447 - RNA, 16 nt, Human
acucugccugcuuaca

SEQ ID NO: 2245448 - RNA, 18 nt, Human
acucugcucgccuuagca

SEQ ID NO: 2245449 - RNA, 23 nt, Human
acucugacaacagacuucugaaa

SEQ ID NO: 2245450 - RNA, 22 nt, Human
acucugacaacagacuucugaa

SEQ ID NO: 2245451 - RNA, 20 nt, Human
acucugacaacagacuucug

SEQ ID NO: 2245452 - RNA, 18 nt, Human
acucugacaacagacuuc

SEQ ID NO: 2245453 - RNA, 14 nt, Human
acucucauucccca

SEQ ID NO: 2245454 - RNA, 22 nt, Human
acucucaggaucaagaaagugu

SEQ ID NO: 2245455 - RNA, 18 nt, Human
acucucagucucugagca

SEQ ID NO: 2245456 - RNA, 17 nt, Human
acucucagucucugagc

SEQ ID NO: 2245457 - RNA, 17 nt, Human
acucugacaacagacuu

SEQ ID NO: 2245458 - RNA, 13 nt, Human
acucugacaacag

SEQ ID NO: 2245459 - RNA, 19 nt, Human
acucucaggaucaagaaag

SEQ ID NO: 2245460 - RNA, 18 nt, Human
acucucaggaucaagaaa

SEQ ID NO: 2245461 - RNA, 13 nt, Human
acucucagucucu

SEQ ID NO: 2245462 - RNA, 16 nt, Human
acucucagucucugag

SEQ ID NO: 2245463 - RNA, 14 nt, Human
acucucagucucug

SEQ ID NO: 2245464 - RNA, 22 nt, Human
acucucaggaccaaagcuuuca

SEQ ID NO: 2245465 - RNA, 20 nt, Human
uccucuuguaaauaaagccc

SEQ ID NO: 2245466 - RNA, 15 nt, Human
uccucuuuagaguua

SEQ ID NO: 2245467 - RNA, 20 nt, Human
uccucuuuagaguuagacug

SEQ ID NO: 2245468 - RNA, 21 nt, Human
uccucuuuagaguuagacugu

SEQ ID NO: 2245469 - RNA, 18 nt, Human
uccucuuguaaauaaagc

SEQ ID NO: 2245470 - RNA, 19 nt, Human
uccucuuguaaauaaagcc

SEQ ID NO: 2245471 - RNA, 21 nt, Human
uccucuuguaaauaaagcccu

SEQ ID NO: 2245472 - RNA, 21 nt, Human
uccucuuuuaucuuggacuga

SEQ ID NO: 2245473 - RNA, 23 nt, Human
uccucuuuggucuacacugugcu

SEQ ID NO: 2245474 - RNA, 16 nt, Human
uccugaaccugaugcu

SEQ ID NO: 2245475 - RNA, 13 nt, Human
uccugaagaacca

SEQ ID NO: 2245476 - RNA, 23 nt, Human
uccugaagaaccaguccccccac

SEQ ID NO: 2245477 - RNA, 18 nt, Human
uccugaagaaccaguccc

SEQ ID NO: 2245478 - RNA, 16 nt, Human
uccugaagaaccaguc

SEQ ID NO: 2245479 - RNA, 14 nt, Human
uccugaagaaccag

SEQ ID NO: 2245480 - RNA, 21 nt, Human
uccugaaaacccuugccaugu

SEQ ID NO: 2245481 - RNA, 22 nt, Human
uccugaaaacccuugccaugug

SEQ ID NO: 2245482 - RNA, 12 nt, Human
uccucuuguaaa

SEQ ID NO: 2245483 - RNA, 13 nt, Human
uccucuugcucaa

SEQ ID NO: 2245484 - RNA, 14 nt, Human
uccucuugcucaaa

SEQ ID NO: 2245485 - RNA, 17 nt, Human
uccucuugccuccugga

SEQ ID NO: 2245486 - RNA, 19 nt, Human
uccucuugccacugccucu

SEQ ID NO: 2245487 - RNA, 23 nt, Human
uccucugccaccuccccuaucca

SEQ ID NO: 2245488 - RNA, 10 nt, Human
uccucugccu

SEQ ID NO: 2245489 - RNA, 22 nt, Human
uccucugccaccuccccuaucc

SEQ ID NO: 2245490 - RNA, 18 nt, Human
uccucugccaccuccccu

SEQ ID NO: 2245491 - RNA, 12 nt, Human
uccucugccuca

SEQ ID NO: 2245492 - RNA, 11 nt, Human
uccucugccug

SEQ ID NO: 2245493 - RNA, 12 nt, Human
uccucugccugc

SEQ ID NO: 2245494 - RNA, 13 nt, Human
uccucugccugcc

SEQ ID NO: 2245495 - RNA, 14 nt, Human
uccucugccugccc

SEQ ID NO: 2245496 - RNA, 22 nt, Human
uccucugccugccccgccccca

SEQ ID NO: 2245497 - RNA, 15 nt, Human
uccucugccaccucc

SEQ ID NO: 2245498 - RNA, 14 nt, Human
uccucugccaccuc

SEQ ID NO: 2245499 - RNA, 12 nt, Human
uccucugccacc

SEQ ID NO: 2245500 - RNA, 18 nt, Human
uccucugcagugccuugg

SEQ ID NO: 2245501 - RNA, 18 nt, Human
uccucugcagcugaccuc

SEQ ID NO: 2245502 - RNA, 20 nt, Human
uccucugcagcugaccucug

SEQ ID NO: 2245503 - RNA, 13 nt, Human
uccucugcagugc

SEQ ID NO: 2245504 - RNA, 15 nt, Human
uccucugcagugccu

SEQ ID NO: 2245505 - RNA, 14 nt, Human
uccucugaggcuga

SEQ ID NO: 2245506 - RNA, 18 nt, Human
uccucugacucagggcuc

SEQ ID NO: 2245507 - RNA, 23 nt, Human
uccucucuuuguucucagcuccc

SEQ ID NO: 2245508 - RNA, 15 nt, Human
uccucugauacccag

SEQ ID NO: 2245509 - RNA, 13 nt, Human
uccucugaucucc

SEQ ID NO: 2245510 - RNA, 17 nt, Human
uccucugaucuccaugg

SEQ ID NO: 2245511 - RNA, 16 nt, Human
uccucugcagcugacc

SEQ ID NO: 2245512 - RNA, 17 nt, Human
uccucugcagcugaccu

SEQ ID NO: 2245513 - RNA, 16 nt, Human
acugaaaaccucuccu

SEQ ID NO: 2245514 - RNA, 15 nt, Human
acugaaaaccucucc

SEQ ID NO: 2245515 - RNA, 15 nt, Human
acugaaaacaucugg

SEQ ID NO: 2245516 - RNA, 16 nt, Human
acugaaaacaucugga

SEQ ID NO: 2245517 - RNA, 17 nt, Human
acugaaaacaucuggaa

SEQ ID NO: 2245518 - RNA, 18 nt, Human
acugaaaacaucuggaag

SEQ ID NO: 2245519 - RNA, 14 nt, Human
acugaaaacaucug

SEQ ID NO: 2245520 - RNA, 23 nt, Human
acucuuugagauagaagaacugc

SEQ ID NO: 2245521 - RNA, 22 nt, Human
acucuuugagauagaagaacug

SEQ ID NO: 2245522 - RNA, 19 nt, Human
acucuuugagauagaagaa

SEQ ID NO: 2245523 - RNA, 16 nt, Human
acucuuugagauagaa

SEQ ID NO: 2245524 - RNA, 18 nt, Human
acucuuugaaugacaaag

SEQ ID NO: 2245525 - RNA, 18 nt, Human
acucuuugagaaacaaca

SEQ ID NO: 2245526 - RNA, 16 nt, Human
acucuuugagaaacaa

SEQ ID NO: 2245527 - RNA, 22 nt, Human
acucuuucuguauauacuuuuu

SEQ ID NO: 2245528 - RNA, 21 nt, Human
acucuuucuguauauacuuuu

SEQ ID NO: 2245529 - RNA, 13 nt, Human
acucuuugagaaa

SEQ ID NO: 2245530 - RNA, 17 nt, Human
acucuuugaaugacaaa

SEQ ID NO: 2245531 - RNA, 17 nt, Human
acugaaaaccucuccuc

SEQ ID NO: 2245532 - RNA, 19 nt, Human
acugaaaagacucaguguu

SEQ ID NO: 2245533 - RNA, 20 nt, Human
acugaaaaggaggggucugg

SEQ ID NO: 2245534 - RNA, 15 nt, Human
acugaaaaugugcua

SEQ ID NO: 2245535 - RNA, 15 nt, Human
acugaaaaucuaaua

SEQ ID NO: 2245536 - RNA, 16 nt, Human
acugaaaaucuaauau

SEQ ID NO: 2245537 - RNA, 13 nt, Human
acugaaacuuccc

SEQ ID NO: 2245538 - RNA, 19 nt, Human
acugaaaaugugcuauacu

SEQ ID NO: 2245539 - RNA, 23 nt, Human
acugaaaaucuaauauuaaaaau

SEQ ID NO: 2245540 - RNA, 22 nt, Human
acugaaaauucgaaccaggaaa

SEQ ID NO: 2245541 - RNA, 14 nt, Human
acucuuucuguaua

SEQ ID NO: 2245542 - RNA, 20 nt, Human
uccugaccugucucaccaug

SEQ ID NO: 2245543 - RNA, 15 nt, Human
uccugaccugucuca

SEQ ID NO: 2245544 - RNA, 16 nt, Human
uccugaccugaggcuc

SEQ ID NO: 2245545 - RNA, 16 nt, Human
uccugaccucagguga

SEQ ID NO: 2245546 - RNA, 14 nt, Human
uccugaccugaggc

SEQ ID NO: 2245547 - RNA, 19 nt, Human
uccugacccaggccgcagc

SEQ ID NO: 2245548 - RNA, 14 nt, Human
uccugacccagucc

SEQ ID NO: 2245549 - RNA, 15 nt, Human
uccugacccaguccc

SEQ ID NO: 2245550 - RNA, 16 nt, Human
uccugacccagucccc

SEQ ID NO: 2245551 - RNA, 15 nt, Human
uccugaagaauugaa

SEQ ID NO: 2245552 - RNA, 20 nt, Human
uccugaaccugaugcugacu

SEQ ID NO: 2245553 - RNA, 14 nt, Human
uccugaagaggcgg

SEQ ID NO: 2245554 - RNA, 17 nt, Human
uccugaagaggcgggcc

SEQ ID NO: 2245555 - RNA, 19 nt, Human
uccugaagaggcgggccag

SEQ ID NO: 2245556 - RNA, 20 nt, Human
uccugaagaggcgggccagc

SEQ ID NO: 2245557 - RNA, 21 nt, Human
uccugaagaggcgggccagcc

SEQ ID NO: 2245558 - RNA, 22 nt, Human
uccugaagaggcgggccagcca

SEQ ID NO: 2245559 - RNA, 23 nt, Human
uccugaagaggcgggccagccag

SEQ ID NO: 2245560 - RNA, 19 nt, Human
uccugaccacccuccccuc

SEQ ID NO: 2245561 - RNA, 13 nt, Human
uccugaagcugag

SEQ ID NO: 2245562 - RNA, 18 nt, Human
uccugaagcugaggcuca

SEQ ID NO: 2245563 - RNA, 20 nt, Human
uccugaccacccuccccucu

SEQ ID NO: 2245564 - RNA, 12 nt, Human
uccugacccagg

SEQ ID NO: 2245565 - RNA, 13 nt, Human
uccugacccaggc

SEQ ID NO: 2245566 - RNA, 14 nt, Human
uccugacccaggcc

SEQ ID NO: 2245567 - RNA, 15 nt, Human
uccugacccaggccg

SEQ ID NO: 2245568 - RNA, 16 nt, Human
uccugacccaggccgc

SEQ ID NO: 2245569 - RNA, 17 nt, Human
uccugacccaggccgca

SEQ ID NO: 2245570 - RNA, 13 nt, Human
uccucccaccuca

SEQ ID NO: 2245571 - RNA, 14 nt, Human
uccucccaccucag

SEQ ID NO: 2245572 - RNA, 14 nt, Human
acucuugaaaaaug

SEQ ID NO: 2245573 - RNA, 19 nt, Human
acucuugaaaaaugcaugu

SEQ ID NO: 2245574 - RNA, 15 nt, Human
uccucccaccucagc

SEQ ID NO: 2245575 - RNA, 16 nt, Human
uccucccaccucagcc

SEQ ID NO: 2245576 - RNA, 18 nt, Human
uccucccaccucagccuc

SEQ ID NO: 2245577 - RNA, 20 nt, Human
uccucccaccucagccuccc

SEQ ID NO: 2245578 - RNA, 24 nt, Human
uccucccccugccagugccuuacc

SEQ ID NO: 2245579 - RNA, 16 nt, Human
uccuccccucacagcc

SEQ ID NO: 2245580 - RNA, 14 nt, Human
uccuccccucacag

SEQ ID NO: 2245581 - RNA, 17 nt, Human
uccuccccucacagccu

SEQ ID NO: 2245582 - RNA, 18 nt, Human
uccuccccucacagccuc

SEQ ID NO: 2245583 - RNA, 19 nt, Human
uccuccccucacagccucu

SEQ ID NO: 2245584 - RNA, 21 nt, Human
uccuccccucacagccucuga

SEQ ID NO: 2245585 - RNA, 23 nt, Human
uccuccccucacagccucugacc

SEQ ID NO: 2245586 - RNA, 12 nt, Human
uccucccuggcu

SEQ ID NO: 2245587 - RNA, 17 nt, Human
uccucccuggcugcccu

SEQ ID NO: 2245588 - RNA, 18 nt, Human
uccucccuggcugcccug

SEQ ID NO: 2245589 - RNA, 19 nt, Human
uccucccuggcugcccugg

SEQ ID NO: 2245590 - RNA, 21 nt, Human
uccucccuggcugcccuggcc

SEQ ID NO: 2245591 - RNA, 22 nt, Human
uccucccuggcugcccuggccc

SEQ ID NO: 2245592 - RNA, 19 nt, Human
uccucccugggcagaaagu

SEQ ID NO: 2245593 - RNA, 10 nt, Human
uccucccuuc

SEQ ID NO: 2245594 - RNA, 14 nt, Human
uccucccuuagcuc

SEQ ID NO: 2245595 - RNA, 13 nt, Human
uccucccuucugc

SEQ ID NO: 2245596 - RNA, 22 nt, Human
uccucccuuccuuuucccugcu

SEQ ID NO: 2245597 - RNA, 19 nt, Human
uccucccuuccuuuucccu

SEQ ID NO: 2245598 - RNA, 21 nt, Human
uccucccuuccuuuucccugc

SEQ ID NO: 2245599 - RNA, 13 nt, Human
uccucccuuccuu

SEQ ID NO: 2245600 - RNA, 17 nt, Human
uccucccuuccuuuucc

SEQ ID NO: 2245601 - RNA, 18 nt, Human
uccucccuuccuuuuccc

SEQ ID NO: 2245602 - RNA, 22 nt, Human
uccuccccauuagagucagccu

SEQ ID NO: 2245603 - RNA, 13 nt, Human
uccuccccagcag

SEQ ID NO: 2245604 - RNA, 10 nt, Human
uccuccccag

SEQ ID NO: 2245605 - RNA, 21 nt, Human
uccuccccacuuguccgcugg

SEQ ID NO: 2245606 - RNA, 19 nt, Human
uccuccccaaggagacaca

SEQ ID NO: 2245607 - RNA, 23 nt, Human
uccucccccugccagugccuuac

SEQ ID NO: 2245608 - RNA, 20 nt, Human
uccucccccugccagugccu

SEQ ID NO: 2245609 - RNA, 17 nt, Human
uccucccccugccagug

SEQ ID NO: 2245610 - RNA, 15 nt, Human
uccucccccugccag

SEQ ID NO: 2245611 - RNA, 14 nt, Human
uccucccccugcca

SEQ ID NO: 2245612 - RNA, 16 nt, Human
uccuccccagcaggug

SEQ ID NO: 2245613 - RNA, 13 nt, Human
uccucccccugcc

SEQ ID NO: 2245614 - RNA, 21 nt, Human
uccucccaccucagccucccg

SEQ ID NO: 2245615 - RNA, 21 nt, Human
uccuccccaaaucaauacacu

SEQ ID NO: 2245616 - RNA, 19 nt, Human
acucuucuugaaauuuuaa

SEQ ID NO: 2245617 - RNA, 20 nt, Human
uccucuccgcaguuccuguc

SEQ ID NO: 2245618 - RNA, 19 nt, Human
uccucuccccucuaaggcc

SEQ ID NO: 2245619 - RNA, 17 nt, Human
uccucuccccucuaagg

SEQ ID NO: 2245620 - RNA, 11 nt, Human
uccucuccccu

SEQ ID NO: 2245621 - RNA, 17 nt, Human
uccucuccccuaccacu

SEQ ID NO: 2245622 - RNA, 18 nt, Human
uccucuccccuaccacug

SEQ ID NO: 2245623 - RNA, 12 nt, Human
uccucuccugga

SEQ ID NO: 2245624 - RNA, 13 nt, Human
uccucuccuggag

SEQ ID NO: 2245625 - RNA, 14 nt, Human
uccucuccuggagg

SEQ ID NO: 2245626 - RNA, 23 nt, Human
uccucucccauugucccucugcc

SEQ ID NO: 2245627 - RNA, 20 nt, Human
uccucuccccagcccagaga

SEQ ID NO: 2245628 - RNA, 22 nt, Human
uccucucccauugucccucugc

SEQ ID NO: 2245629 - RNA, 20 nt, Human
uccucucccauugucccucu

SEQ ID NO: 2245630 - RNA, 23 nt, Human
uccucuccccagcccagagacau

SEQ ID NO: 2245631 - RNA, 21 nt, Human
uccucuccccagcccagagac

SEQ ID NO: 2245632 - RNA, 17 nt, Human
uccucuccccaugaugu

SEQ ID NO: 2245633 - RNA, 17 nt, Human
uccucuccacugccuuc

SEQ ID NO: 2245634 - RNA, 18 nt, Human
uccucuccacugccuucg

SEQ ID NO: 2245635 - RNA, 18 nt, Human
uccucccuucugcuacug

SEQ ID NO: 2245636 - RNA, 19 nt, Human
uccucccuuggguucugau

SEQ ID NO: 2245637 - RNA, 20 nt, Human
uccucccuuggguucugaua

SEQ ID NO: 2245638 - RNA, 16 nt, Human
uccucccuuguucucu

SEQ ID NO: 2245639 - RNA, 17 nt, Human
uccucccuucugcuacu

SEQ ID NO: 2245640 - RNA, 16 nt, Human
uccucccuucugcuac

SEQ ID NO: 2245641 - RNA, 15 nt, Human
uccucccuucugcua

SEQ ID NO: 2245642 - RNA, 14 nt, Human
uccucccuucugcu

SEQ ID NO: 2245643 - RNA, 19 nt, Human
uccucucccauugucccuc

SEQ ID NO: 2245644 - RNA, 18 nt, Human
uccucucccauugucccu

SEQ ID NO: 2245645 - RNA, 22 nt, Human
uccucucccaucccccugcccu

SEQ ID NO: 2245646 - RNA, 23 nt, Human
uccucucccaucccccugcccuc

SEQ ID NO: 2245647 - RNA, 17 nt, Human
uccucucccaucccccu

SEQ ID NO: 2245648 - RNA, 18 nt, Human
uccucucccaucccccug

SEQ ID NO: 2245649 - RNA, 19 nt, Human
uccucucccaucccccugc

SEQ ID NO: 2245650 - RNA, 20 nt, Human
uccucucccaucccccugcc

SEQ ID NO: 2245651 - RNA, 11 nt, Human
uccucuccagg

SEQ ID NO: 2245652 - RNA, 12 nt, Human
uccucuccaggc

SEQ ID NO: 2245653 - RNA, 14 nt, Human
uccucuccaggcac

SEQ ID NO: 2245654 - RNA, 15 nt, Human
uccucuccaggcacc

SEQ ID NO: 2245655 - RNA, 13 nt, Human
uccucucccaucc

SEQ ID NO: 2245656 - RNA, 14 nt, Human
uccucucccauccc

SEQ ID NO: 2245657 - RNA, 15 nt, Human
uccucucccaucccc

SEQ ID NO: 2245658 - RNA, 16 nt, Human
uccucucccauccccc

SEQ ID NO: 2245659 - RNA, 15 nt, Human
uccucuccuggagga

SEQ ID NO: 2245660 - RNA, 16 nt, Human
uccucuccuggaggau

SEQ ID NO: 2245661 - RNA, 19 nt, Human
uccucucuccagauguuuc

SEQ ID NO: 2245662 - RNA, 16 nt, Human
uccucucucuguguua

SEQ ID NO: 2245663 - RNA, 14 nt, Human
uccucucuccagau

SEQ ID NO: 2245664 - RNA, 15 nt, Human
uccucucugcccuaa

SEQ ID NO: 2245665 - RNA, 14 nt, Human
uccucucugcccua

SEQ ID NO: 2245666 - RNA, 13 nt, Human
uccucucugcccu

SEQ ID NO: 2245667 - RNA, 12 nt, Human
uccucucugccc

SEQ ID NO: 2245668 - RNA, 17 nt, Human
uccucugagccuuggga

SEQ ID NO: 2245669 - RNA, 13 nt, Human
uccucugagccuu

SEQ ID NO: 2245670 - RNA, 12 nt, Human
uccucugagccu

SEQ ID NO: 2245671 - RNA, 17 nt, Human
uccucugacucagggcu

SEQ ID NO: 2245672 - RNA, 16 nt, Human
uccucugacucagggc

SEQ ID NO: 2245673 - RNA, 15 nt, Human
uccucugacucaggg

SEQ ID NO: 2245674 - RNA, 20 nt, Human
uccucucuuuguucucagcu

SEQ ID NO: 2245675 - RNA, 21 nt, Human
uccucucuuuguucucagcuc

SEQ ID NO: 2245676 - RNA, 11 nt, Human
uccucucugcc

SEQ ID NO: 2245677 - RNA, 15 nt, Human
uccucucuuuguucu

SEQ ID NO: 2245678 - RNA, 17 nt, Human
uccucucuuuguucuca

SEQ ID NO: 2245679 - RNA, 19 nt, Human
uccucucuuuguucucagc

SEQ ID NO: 2245680 - RNA, 14 nt, Human
acucagaauauugc

SEQ ID NO: 2245681 - RNA, 14 nt, Human
acucagaauucucu

SEQ ID NO: 2245682 - RNA, 22 nt, Human
acucagaauucucuaguuugau

SEQ ID NO: 2245683 - RNA, 21 nt, Human
acucagaauucucuaguuuga

SEQ ID NO: 2245684 - RNA, 18 nt, Human
acucagaagccugaggcu

SEQ ID NO: 2245685 - RNA, 17 nt, Human
acucagaagccugaggc

SEQ ID NO: 2245686 - RNA, 16 nt, Human
acucagaagccugagg

SEQ ID NO: 2245687 - RNA, 15 nt, Human
acucagaagccugag

SEQ ID NO: 2245688 - RNA, 14 nt, Human
acucagaagccuga

SEQ ID NO: 2245689 - RNA, 13 nt, Human
acucagaagccug

SEQ ID NO: 2245690 - RNA, 18 nt, Human
acucagaagacacugaug

SEQ ID NO: 2245691 - RNA, 20 nt, Human
acucagaagccucuggguca

SEQ ID NO: 2245692 - RNA, 16 nt, Human
acucagaagccucugg

SEQ ID NO: 2245693 - RNA, 15 nt, Human
acucagaagccucug

SEQ ID NO: 2245694 - RNA, 12 nt, Human
acucagaagccu

SEQ ID NO: 2245695 - RNA, 21 nt, Human
acucagaaauuuaauucaugu

SEQ ID NO: 2245696 - RNA, 14 nt, Human
acucagaaauuuuu

SEQ ID NO: 2245697 - RNA, 17 nt, Human
acucaccucugccucaa

SEQ ID NO: 2245698 - RNA, 16 nt, Human
acucaccucugccuca

SEQ ID NO: 2245699 - RNA, 21 nt, Human
acucaccugccccucaacucu

SEQ ID NO: 2245700 - RNA, 14 nt, Human
acucaccugccccu

SEQ ID NO: 2245701 - RNA, 19 nt, Human
acucaccugccccucaacu

SEQ ID NO: 2245702 - RNA, 14 nt, Human
acucagaagacacu

SEQ ID NO: 2245703 - RNA, 15 nt, Human
acucagaagacacug

SEQ ID NO: 2245704 - RNA, 16 nt, Human
acucagaagacacuga

SEQ ID NO: 2245705 - RNA, 17 nt, Human
acucagaagacacugau

SEQ ID NO: 2245706 - RNA, 20 nt, Human
acuccaccaacccaucagaa

SEQ ID NO: 2245707 - RNA, 15 nt, Human
acuccaccaacccau

SEQ ID NO: 2245708 - RNA, 17 nt, Human
acuccacaucugccuua

SEQ ID NO: 2245709 - RNA, 21 nt, Human
acuccaaaccuccuguuagcu

SEQ ID NO: 2245710 - RNA, 22 nt, Human
acuccaaaauguuggucauuuu

SEQ ID NO: 2245711 - RNA, 13 nt, Human
acuccaccaccca

SEQ ID NO: 2245712 - RNA, 15 nt, Human
acuccacccauccua

SEQ ID NO: 2245713 - RNA, 14 nt, Human
acuccaccacccaa

SEQ ID NO: 2245714 - RNA, 14 nt, Human
acuccaccaagccu

SEQ ID NO: 2245715 - RNA, 21 nt, Human
acuccaaacugacucuuaaga

SEQ ID NO: 2245716 - RNA, 13 nt, Human
acuccaaaauguu

SEQ ID NO: 2245717 - RNA, 19 nt, Human
acucauuuuuuuaauuuau

SEQ ID NO: 2245718 - RNA, 16 nt, Human
acucauuuuuuuaauu

SEQ ID NO: 2245719 - RNA, 22 nt, Human
acucaucuuagugccugagagu

SEQ ID NO: 2245720 - RNA, 18 nt, Human
acucaucuuagugccuga

SEQ ID NO: 2245721 - RNA, 19 nt, Human
acucaucuuacuguaccug

SEQ ID NO: 2245722 - RNA, 21 nt, Human
acucaucuuucauuaaaggcu

SEQ ID NO: 2245723 - RNA, 18 nt, Human
acucauugaccugaggcc

SEQ ID NO: 2245724 - RNA, 22 nt, Human
acucauugaccugaggcccuuc

SEQ ID NO: 2245725 - RNA, 12 nt, Human
acucaucuuagg

SEQ ID NO: 2245726 - RNA, 21 nt, Human
acucaucuagguaaauuacag

SEQ ID NO: 2245727 - RNA, 16 nt, Human
acucauugaccugagg

SEQ ID NO: 2245728 - RNA, 17 nt, Human
acucauugaccugaggc

SEQ ID NO: 2245729 - RNA, 19 nt, Human
acucagacaggaaagggaa

SEQ ID NO: 2245730 - RNA, 12 nt, Human
acucagaccuga

SEQ ID NO: 2245731 - RNA, 18 nt, Human
acucagacauuggcaccu

SEQ ID NO: 2245732 - RNA, 14 nt, Human
acucagagggagga

SEQ ID NO: 2245733 - RNA, 21 nt, Human
acucagaucacuacugcaguc

SEQ ID NO: 2245734 - RNA, 20 nt, Human
acucagaucacuacugcagu

SEQ ID NO: 2245735 - RNA, 18 nt, Human
acucagaucacuacugca

SEQ ID NO: 2245736 - RNA, 19 nt, Human
acucagaucacuacugcag

SEQ ID NO: 2245737 - RNA, 15 nt, Human
acucagaucacuacu

SEQ ID NO: 2245738 - RNA, 16 nt, Human
acucagaucacuacug

SEQ ID NO: 2245739 - RNA, 17 nt, Human
acucagaucacuacugc

SEQ ID NO: 2245740 - RNA, 23 nt, Human
acucaucuagguaaauuacaguu

SEQ ID NO: 2245741 - RNA, 16 nt, Human
ucccugacccuguaua

SEQ ID NO: 2245742 - RNA, 23 nt, Human
ucccugacacugcggggcuuggc

SEQ ID NO: 2245743 - RNA, 14 nt, Human
ucccugacccgucu

SEQ ID NO: 2245744 - RNA, 21 nt, Human
ucccugaaucccccuugccac

SEQ ID NO: 2245745 - RNA, 16 nt, Human
ucccugacacugcggg

SEQ ID NO: 2245746 - RNA, 22 nt, Human
ucccugacacugcggggcuugg

SEQ ID NO: 2245747 - RNA, 23 nt, Human
ucccugaaggccccgcccaggcu

SEQ ID NO: 2245748 - RNA, 17 nt, Human
ucccugacccuguauau

SEQ ID NO: 2245749 - RNA, 22 nt, Human
ucccugacccuguauauagccc

SEQ ID NO: 2245750 - RNA, 16 nt, Human
ucccugaccucccucu

SEQ ID NO: 2245751 - RNA, 17 nt, Human
ucccugaccucccucua

SEQ ID NO: 2245752 - RNA, 21 nt, Human
ucccugaccucccucuaauuu

SEQ ID NO: 2245753 - RNA, 14 nt, Human
ucccugacucauuc

SEQ ID NO: 2245754 - RNA, 19 nt, Human
ucccugacucauucugaag

SEQ ID NO: 2245755 - RNA, 16 nt, Human
ucccugacucauucug

SEQ ID NO: 2245756 - RNA, 16 nt, Human
acucaccucuaaaaca

SEQ ID NO: 2245757 - RNA, 23 nt, Human
acucaccuaauguuuaugagcca

SEQ ID NO: 2245758 - RNA, 20 nt, Human
acucaccuaauguuuaugag

SEQ ID NO: 2245759 - RNA, 15 nt, Human
acucaccucugccuc

SEQ ID NO: 2245760 - RNA, 14 nt, Human
acucaccucugccu

SEQ ID NO: 2245761 - RNA, 13 nt, Human
acucaccucugcc

SEQ ID NO: 2245762 - RNA, 11 nt, Human
acucaccucug

SEQ ID NO: 2245763 - RNA, 20 nt, Human
acucaccucccccaucucuu

SEQ ID NO: 2245764 - RNA, 19 nt, Human
acucaccucccccaucucu

SEQ ID NO: 2245765 - RNA, 17 nt, Human
acucaccuaauguuuau

SEQ ID NO: 2245766 - RNA, 16 nt, Human
acucaccuaauguuua

SEQ ID NO: 2245767 - RNA, 19 nt, Human
acucaccccggcagacgcc

SEQ ID NO: 2245768 - RNA, 17 nt, Human
acucaccgaagccacuu

SEQ ID NO: 2245769 - RNA, 18 nt, Human
acucacccccaaggggca

SEQ ID NO: 2245770 - RNA, 17 nt, Human
acucaccccagccccaa

SEQ ID NO: 2245771 - RNA, 17 nt, Human
ucccugaaaauguuuuu

SEQ ID NO: 2245772 - RNA, 20 nt, Human
ucccugaaaacccagagagg

SEQ ID NO: 2245773 - RNA, 19 nt, Human
ucccugaaaacccagagag

SEQ ID NO: 2245774 - RNA, 18 nt, Human
ucccugaaaacccagaga

SEQ ID NO: 2245775 - RNA, 17 nt, Human
ucccugaaaacccagag

SEQ ID NO: 2245776 - RNA, 16 nt, Human
ucccugaaaacccaga

SEQ ID NO: 2245777 - RNA, 15 nt, Human
ucccugaaaacccag

SEQ ID NO: 2245778 - RNA, 15 nt, Human
ucccugaaccauccc

SEQ ID NO: 2245779 - RNA, 14 nt, Human
ucccugaacuggga

SEQ ID NO: 2245780 - RNA, 15 nt, Human
ucccugaacugggac

SEQ ID NO: 2245781 - RNA, 16 nt, Human
ucccugaacugggacc

SEQ ID NO: 2245782 - RNA, 17 nt, Human
ucccugaacugggaccu

SEQ ID NO: 2245783 - RNA, 12 nt, Human
ucccugaagcca

SEQ ID NO: 2245784 - RNA, 15 nt, Human
ucccugaagccagcc

SEQ ID NO: 2245785 - RNA, 17 nt, Human
ucccucuuggucuuccc

SEQ ID NO: 2245786 - RNA, 18 nt, Human
ucccucuuuggcuccccu

SEQ ID NO: 2245787 - RNA, 17 nt, Human
ucccucuucucaagugc

SEQ ID NO: 2245788 - RNA, 13 nt, Human
ucccucuuggucu

SEQ ID NO: 2245789 - RNA, 23 nt, Human
ucccucuuuggcuccccuguacc

SEQ ID NO: 2245790 - RNA, 17 nt, Human
ucccugaaggccccgcc

SEQ ID NO: 2245791 - RNA, 16 nt, Human
ucccugaagccagccu

SEQ ID NO: 2245792 - RNA, 17 nt, Human
ucccugaagccagccuu

SEQ ID NO: 2245793 - RNA, 18 nt, Human
ucccugaagccagccuuc

SEQ ID NO: 2245794 - RNA, 19 nt, Human
ucccugaagccagccuucu

SEQ ID NO: 2245795 - RNA, 18 nt, Human
ucccugaaggccccgccc

SEQ ID NO: 2245796 - RNA, 21 nt, Human
ucccugaaggccccgcccagg

SEQ ID NO: 2245797 - RNA, 22 nt, Human
ucccugaaggccccgcccaggc

SEQ ID NO: 2245798 - RNA, 14 nt, Human
ucccuccccugccc

SEQ ID NO: 2245799 - RNA, 16 nt, Human
ucccuccccugccauu

SEQ ID NO: 2245800 - RNA, 13 nt, Human
ucccuccccugcc

SEQ ID NO: 2245801 - RNA, 14 nt, Human
ucccucccccuugu

SEQ ID NO: 2245802 - RNA, 21 nt, Human
ucccucccccccaugcacugu

SEQ ID NO: 2245803 - RNA, 12 nt, Human
ucccucccccuu

SEQ ID NO: 2245804 - RNA, 16 nt, Human
ucccucccccccaugc

SEQ ID NO: 2245805 - RNA, 14 nt, Human
ucccucccccccau

SEQ ID NO: 2245806 - RNA, 12 nt, Human
ucccuccccccc

SEQ ID NO: 2245807 - RNA, 15 nt, Human
ucccucauuucagga

SEQ ID NO: 2245808 - RNA, 19 nt, Human
ucccucauuucaggagcag

SEQ ID NO: 2245809 - RNA, 23 nt, Human
ucccucauuucaggagcagccuc

SEQ ID NO: 2245810 - RNA, 19 nt, Human
ucccuccccugcccugguc

SEQ ID NO: 2245811 - RNA, 17 nt, Human
ucccuccccugcccugg

SEQ ID NO: 2245812 - RNA, 16 nt, Human
ucccuccccugcccug

SEQ ID NO: 2245813 - RNA, 15 nt, Human
ucccuccccugcccu

SEQ ID NO: 2245814 - RNA, 14 nt, Human
ucccucuucucaag

SEQ ID NO: 2245815 - RNA, 19 nt, Human
ucccucuucucaagugccu

SEQ ID NO: 2245816 - RNA, 22 nt, Human
ucccuccccuggggacagcaag

SEQ ID NO: 2245817 - RNA, 13 nt, Human
ucccucuuucccu

SEQ ID NO: 2245818 - RNA, 11 nt, Human
ucccucuuucc

SEQ ID NO: 2245819 - RNA, 17 nt, Human
ucccucagccccucuug

SEQ ID NO: 2245820 - RNA, 16 nt, Human
ucccucagccccucuu

SEQ ID NO: 2245821 - RNA, 15 nt, Human
ucccucagccccucu

SEQ ID NO: 2245822 - RNA, 14 nt, Human
ucccucagccccuc

SEQ ID NO: 2245823 - RNA, 20 nt, Human
ucccucagucuggcccuucc

SEQ ID NO: 2245824 - RNA, 14 nt, Human
uccccugcacugga

SEQ ID NO: 2245825 - RNA, 21 nt, Human
uccccugauuacaccagccuc

SEQ ID NO: 2245826 - RNA, 12 nt, Human
uccccugaggcu

SEQ ID NO: 2245827 - RNA, 22 nt, Human
ucccucaccuuggcaccagaca

SEQ ID NO: 2245828 - RNA, 15 nt, Human
uccccucuugcccca

SEQ ID NO: 2245829 - RNA, 20 nt, Human
uccccucucuugcacccgcc

SEQ ID NO: 2245830 - RNA, 21 nt, Human
uccccucuugccccaaccccc

SEQ ID NO: 2245831 - RNA, 18 nt, Human
ucccucagucuggcccuu

SEQ ID NO: 2245832 - RNA, 20 nt, Human
acucacauggcuauguuuua

SEQ ID NO: 2245833 - RNA, 15 nt, Human
uccccggcccuacca

SEQ ID NO: 2245834 - RNA, 15 nt, Human
uccccggaguucagu

SEQ ID NO: 2245835 - RNA, 18 nt, Human
uccccgcuucugccugca

SEQ ID NO: 2245836 - RNA, 19 nt, Human
acucacauuuauucugcuc

SEQ ID NO: 2245837 - RNA, 20 nt, Human
acucacauuuauucugcuca

SEQ ID NO: 2245838 - RNA, 23 nt, Human
acucaauauuuuccaugaaaaug

SEQ ID NO: 2245839 - RNA, 23 nt, Human
acucaaucuccccuugcacuaaa

SEQ ID NO: 2245840 - RNA, 14 nt, Human
acucaaugagcucu

SEQ ID NO: 2245841 - RNA, 16 nt, Human
acucacauggcuaugu

SEQ ID NO: 2245842 - RNA, 19 nt, Human
acucacauggcuauguuuu

SEQ ID NO: 2245843 - RNA, 14 nt, Human
acucaaugcacuga

SEQ ID NO: 2245844 - RNA, 12 nt, Human
acucaauauuuu

SEQ ID NO: 2245845 - RNA, 18 nt, Human
acucaauaaaaucaugua

SEQ ID NO: 2245846 - RNA, 15 nt, Human
acucaauaaaaucau

SEQ ID NO: 2245847 - RNA, 15 nt, Human
acucaauauuuucca

SEQ ID NO: 2245848 - RNA, 18 nt, Human
acucaauauuuuccauga

SEQ ID NO: 2245849 - RNA, 21 nt, Human
acucaauauuuuccaugaaaa

SEQ ID NO: 2245850 - RNA, 22 nt, Human
acucaauauuuuccaugaaaau

SEQ ID NO: 2245851 - RNA, 22 nt, Human
uccccggucccuugagaccuca

SEQ ID NO: 2245852 - RNA, 13 nt, Human
uccccguggucuc

SEQ ID NO: 2245853 - RNA, 13 nt, Human
uccccggcucgag

SEQ ID NO: 2245854 - RNA, 17 nt, Human
uccccggcccuaccagc

SEQ ID NO: 2245855 - RNA, 21 nt, Human
uccccggcccuaccagcgccc

SEQ ID NO: 2245856 - RNA, 12 nt, Human
uccccggccuca

SEQ ID NO: 2245857 - RNA, 13 nt, Human
uccccggccucag

SEQ ID NO: 2245858 - RNA, 14 nt, Human
uccccuaaccucau

SEQ ID NO: 2245859 - RNA, 14 nt, Human
uccccucucugcac

SEQ ID NO: 2245860 - RNA, 21 nt, Human
uccccuccuugccuccugugu

SEQ ID NO: 2245861 - RNA, 20 nt, Human
uccccuccuugccuccugug

SEQ ID NO: 2245862 - RNA, 18 nt, Human
uccccuccuugccuccug

SEQ ID NO: 2245863 - RNA, 12 nt, Human
uccccuccuugc

SEQ ID NO: 2245864 - RNA, 20 nt, Human
uccccgugccccgccucccc

SEQ ID NO: 2245865 - RNA, 18 nt, Human
uccccuccuucucccuuu

SEQ ID NO: 2245866 - RNA, 14 nt, Human
uccccuccuucucc

SEQ ID NO: 2245867 - RNA, 20 nt, Human
uccccucugcugcugucccu

SEQ ID NO: 2245868 - RNA, 15 nt, Human
uccccucugcugcug

SEQ ID NO: 2245869 - RNA, 17 nt, Human
uccccucugcugcuguc

SEQ ID NO: 2245870 - RNA, 17 nt, Human
uccccucucuugcaccc

SEQ ID NO: 2245871 - RNA, 19 nt, Human
uccccucucuugcacccgc

SEQ ID NO: 2245872 - RNA, 13 nt, Human
uccccucugcugc

SEQ ID NO: 2245873 - RNA, 14 nt, Human
uccccucugcugcu

SEQ ID NO: 2245874 - RNA, 21 nt, Human
acuauaauguaagcucuacug

SEQ ID NO: 2245875 - RNA, 15 nt, Human
acuaugauuuggaaa

SEQ ID NO: 2245876 - RNA, 16 nt, Human
acuaugcacaauuuaa

SEQ ID NO: 2245877 - RNA, 15 nt, Human
acuaugacugcuccc

SEQ ID NO: 2245878 - RNA, 20 nt, Human
acuaugcauggugccccagg

SEQ ID NO: 2245879 - RNA, 16 nt, Human
acuaugauuuggaaaa

SEQ ID NO: 2245880 - RNA, 24 nt, Human
acuaugcauggugccccaggacca

SEQ ID NO: 2245881 - RNA, 23 nt, Human
acuaugcauggugccccaggacc

SEQ ID NO: 2245882 - RNA, 22 nt, Human
acuaugcauggugccccaggac

SEQ ID NO: 2245883 - RNA, 21 nt, Human
acuaugcauggugccccagga

SEQ ID NO: 2245884 - RNA, 14 nt, Human
acuauaauguaagc

SEQ ID NO: 2245885 - RNA, 13 nt, Human
acuauaauguaag

SEQ ID NO: 2245886 - RNA, 12 nt, Human
acuauaauguaa

SEQ ID NO: 2245887 - RNA, 20 nt, Human
acuagagucugaacagcugu

SEQ ID NO: 2245888 - RNA, 21 nt, Human
acuagagucugaacagcugua

SEQ ID NO: 2245889 - RNA, 14 nt, Human
acuauguaacaugu

SEQ ID NO: 2245890 - RNA, 12 nt, Human
acuaugccugug

SEQ ID NO: 2245891 - RNA, 14 nt, Human
acuauggugccaau

SEQ ID NO: 2245892 - RNA, 20 nt, Human
acuauggugccaauggaacc

SEQ ID NO: 2245893 - RNA, 21 nt, Human
acuauggugccaauggaaccu

SEQ ID NO: 2245894 - RNA, 12 nt, Human
acuauguaucaa

SEQ ID NO: 2245895 - RNA, 13 nt, Human
acuauguugauaa

SEQ ID NO: 2245896 - RNA, 18 nt, Human
acuauucaaacagucuca

SEQ ID NO: 2245897 - RNA, 16 nt, Human
acuauucaaacagucu

SEQ ID NO: 2245898 - RNA, 14 nt, Human
acuauucaaacagu

SEQ ID NO: 2245899 - RNA, 13 nt, Human
acuauucaaacag

SEQ ID NO: 2245900 - RNA, 22 nt, Human
ucccccaccagcuaaggacauu

SEQ ID NO: 2245901 - RNA, 19 nt, Human
ucccccacccccuccccag

SEQ ID NO: 2245902 - RNA, 18 nt, Human
ucccccacccccucccca

SEQ ID NO: 2245903 - RNA, 17 nt, Human
ucccccaaccucagacu

SEQ ID NO: 2245904 - RNA, 22 nt, Human
ucccccaacccccaccccacac

SEQ ID NO: 2245905 - RNA, 14 nt, Human
uccccaucuggguc

SEQ ID NO: 2245906 - RNA, 21 nt, Human
ucccccacccccuccccaggg

SEQ ID NO: 2245907 - RNA, 20 nt, Human
ucccccacccccuccccagg

SEQ ID NO: 2245908 - RNA, 19 nt, Human
ucccccacccccuccccgc

SEQ ID NO: 2245909 - RNA, 22 nt, Human
ucccccacuccucuuauuugcu

SEQ ID NO: 2245910 - RNA, 14 nt, Human
ucccccacugccau

SEQ ID NO: 2245911 - RNA, 13 nt, Human
ucccccagacuuu

SEQ ID NO: 2245912 - RNA, 19 nt, Human
uccccauccuccagcuucu

SEQ ID NO: 2245913 - RNA, 17 nt, Human
uccccauccuccagcuu

SEQ ID NO: 2245914 - RNA, 18 nt, Human
uccccauccuccagcuuc

SEQ ID NO: 2245915 - RNA, 16 nt, Human
uccccaucaucccagc

SEQ ID NO: 2245916 - RNA, 17 nt, Human
uccccaucaucccagcu

SEQ ID NO: 2245917 - RNA, 19 nt, Human
uccccaucaucccagcugc

SEQ ID NO: 2245918 - RNA, 18 nt, Human
uccccaucaucuguggaa

SEQ ID NO: 2245919 - RNA, 14 nt, Human
uccccauccuccag

SEQ ID NO: 2245920 - RNA, 15 nt, Human
uccccauccuccagc

SEQ ID NO: 2245921 - RNA, 16 nt, Human
uccccauccuccagcu

SEQ ID NO: 2245922 - RNA, 14 nt, Human
uccccaucauccca

SEQ ID NO: 2245923 - RNA, 17 nt, Human
uccccaguuugcagaaa

SEQ ID NO: 2245924 - RNA, 15 nt, Human
uccccaguaaaauug

SEQ ID NO: 2245925 - RNA, 22 nt, Human
uccccagguggcugacccaguc

SEQ ID NO: 2245926 - RNA, 14 nt, Human
uccccaguaaaauu

SEQ ID NO: 2245927 - RNA, 22 nt, Human
uccccacugccugcccacccgu

SEQ ID NO: 2245928 - RNA, 20 nt, Human
uccccacugccugcccaccc

SEQ ID NO: 2245929 - RNA, 18 nt, Human
uccccacugccugcccac

SEQ ID NO: 2245930 - RNA, 14 nt, Human
uccccacugccugc

SEQ ID NO: 2245931 - RNA, 19 nt, Human
uccccacugacagccuccc

SEQ ID NO: 2245932 - RNA, 16 nt, Human
uccccacugacagccu

SEQ ID NO: 2245933 - RNA, 15 nt, Human
uccccacugccuacu

SEQ ID NO: 2245934 - RNA, 18 nt, Human
uccccacugccuacugca

SEQ ID NO: 2245935 - RNA, 20 nt, Human
uccccacugccuacugcauc

SEQ ID NO: 2245936 - RNA, 22 nt, Human
uccccacucccuggcucucaga

SEQ ID NO: 2245937 - RNA, 23 nt, Human
uccccacggggccucgggaccuc

SEQ ID NO: 2245938 - RNA, 18 nt, Human
uccccacggccgcuccag

SEQ ID NO: 2245939 - RNA, 19 nt, Human
uccccacggccgcuccagg

SEQ ID NO: 2245940 - RNA, 20 nt, Human
uccccacggccgcuccaggg

SEQ ID NO: 2245941 - RNA, 22 nt, Human
uccccacggggccucgggaccu

SEQ ID NO: 2245942 - RNA, 20 nt, Human
acgguauuaugcuucuugga

SEQ ID NO: 2245943 - RNA, 21 nt, Human
acggucccacacuggugacug

SEQ ID NO: 2245944 - RNA, 16 nt, Human
acggucgccaccuggc

SEQ ID NO: 2245945 - RNA, 18 nt, Human
uccccacgcccuccccuc

SEQ ID NO: 2245946 - RNA, 19 nt, Human
uccccacgcccuccccucc

SEQ ID NO: 2245947 - RNA, 13 nt, Human
acguacacacaca

SEQ ID NO: 2245948 - RNA, 12 nt, Human
acguacacauuu

SEQ ID NO: 2245949 - RNA, 14 nt, Human
acguacacauuuua

SEQ ID NO: 2245950 - RNA, 13 nt, Human
acguacacauuuu

SEQ ID NO: 2245951 - RNA, 22 nt, Human
acuagagggaccucucccaggg

SEQ ID NO: 2245952 - RNA, 15 nt, Human
acuagagucugaaca

SEQ ID NO: 2245953 - RNA, 20 nt, Human
acuagaguuuagcuggaaaa

SEQ ID NO: 2245954 - RNA, 21 nt, Human
acuagagggaccucucccagg

SEQ ID NO: 2245955 - RNA, 20 nt, Human
acuagagggaccucucccag

SEQ ID NO: 2245956 - RNA, 13 nt, Human
acuagaagaugaa

SEQ ID NO: 2245957 - RNA, 23 nt, Human
acuagaagggccaguccugccug

SEQ ID NO: 2245958 - RNA, 18 nt, Human
acuagaagaugaauacaa

SEQ ID NO: 2245959 - RNA, 17 nt, Human
acuagaauucuagugcu

SEQ ID NO: 2245960 - RNA, 14 nt, Human
acuagaagggccag

SEQ ID NO: 2245961 - RNA, 16 nt, Human
acuagaacucuccauc

SEQ ID NO: 2245962 - RNA, 15 nt, Human
acuagaauuuauuca

SEQ ID NO: 2245963 - RNA, 22 nt, Human
acuagaauucuagugcugcuga

SEQ ID NO: 2245964 - RNA, 23 nt, Human
acuagaauucuagugcugcugaa

SEQ ID NO: 2245965 - RNA, 18 nt, Human
acuagaauucuagugcug

SEQ ID NO: 2245966 - RNA, 19 nt, Human
acuagaauucuagugcugc

SEQ ID NO: 2245967 - RNA, 20 nt, Human
acuagaauucuagugcugcu

SEQ ID NO: 2245968 - RNA, 21 nt, Human
acuagaauucuagugcugcug

SEQ ID NO: 2245969 - RNA, 15 nt, Human
acuacgugacugugg

SEQ ID NO: 2245970 - RNA, 15 nt, Human
acuacguuaagggaa

SEQ ID NO: 2245971 - RNA, 18 nt, Human
acuacggaauaguuggcu

SEQ ID NO: 2245972 - RNA, 17 nt, Human
acuaccuugaaaauaag

SEQ ID NO: 2245973 - RNA, 18 nt, Human
acuaccuugguuccccca

SEQ ID NO: 2245974 - RNA, 13 nt, Human
acuaccugucaag

SEQ ID NO: 2245975 - RNA, 15 nt, Human
acuagaacucuccau

SEQ ID NO: 2245976 - RNA, 13 nt, Human
acuagaacucucc

SEQ ID NO: 2245977 - RNA, 15 nt, Human
acuagaaaucugcca

SEQ ID NO: 2245978 - RNA, 15 nt, Human
acuagaacacagaaa

SEQ ID NO: 2245979 - RNA, 14 nt, Human
acuagaaccuggag

SEQ ID NO: 2245980 - RNA, 15 nt, Human
acuagaaccuggagg

SEQ ID NO: 2245981 - RNA, 23 nt, Human
acuagaaccuggagggcuagaac

SEQ ID NO: 2245982 - RNA, 19 nt, Human
acuacuagaugucuuuagg

SEQ ID NO: 2245983 - RNA, 22 nt, Human
uacuuuuauaauaaaaggaaaa

SEQ ID NO: 2245984 - RNA, 19 nt, Human
uacuuuuaugauguauauu

SEQ ID NO: 2245985 - RNA, 21 nt, Human
uacuuuuaaacuguguacaua

SEQ ID NO: 2245986 - RNA, 16 nt, Human
uacuuuuauaauaaaa

SEQ ID NO: 2245987 - RNA, 14 nt, Human
uacuuuuuaaaugu

SEQ ID NO: 2245988 - RNA, 15 nt, Human
uacuuuugcccuuug

SEQ ID NO: 2245989 - RNA, 17 nt, Human
uacuuuugcaugaaaau

SEQ ID NO: 2245990 - RNA, 22 nt, Human
uagaaaaacccugcccccaaau

SEQ ID NO: 2245991 - RNA, 13 nt, Human
uagaaaaagcagu

SEQ ID NO: 2245992 - RNA, 13 nt, Human
uagaaaacugaaa

SEQ ID NO: 2245993 - RNA, 16 nt, Human
uagaaaacauaaucuu

SEQ ID NO: 2245994 - RNA, 16 nt, Human
uacuuuuucauucuuu

SEQ ID NO: 2245995 - RNA, 20 nt, Human
uacuuuuuaaaaucuuuucu

SEQ ID NO: 2245996 - RNA, 16 nt, Human
uagaaaaacccugccc

SEQ ID NO: 2245997 - RNA, 14 nt, Human
aauucauguuucuu

SEQ ID NO: 2245998 - RNA, 11 nt, Human
aauucaugaac

SEQ ID NO: 2245999 - RNA, 14 nt, Human
aauucaugaacuuc

SEQ ID NO: 2246000 - RNA, 17 nt, Human
aauuccaauuauaugag

SEQ ID NO: 2246001 - RNA, 16 nt, Human
aauuccacacccucac

SEQ ID NO: 2246002 - RNA, 16 nt, Human
aauuccacaccuuuua

SEQ ID NO: 2246003 - RNA, 13 nt, Human
aauuccacagcug

SEQ ID NO: 2246004 - RNA, 12 nt, Human
aauuccacagcu

SEQ ID NO: 2246005 - RNA, 14 nt, Human
aauuccacagcugc

SEQ ID NO: 2246006 - RNA, 20 nt, Human
aauuccacaccuuuuauuga

SEQ ID NO: 2246007 - RNA, 22 nt, Human
uacuuuguacaaagaccacaca

SEQ ID NO: 2246008 - RNA, 23 nt, Human
aauucaugaacuucgcaucaaaa

SEQ ID NO: 2246009 - RNA, 17 nt, Human
uacuuugccuuuugcaa

SEQ ID NO: 2246010 - RNA, 21 nt, Human
uacuuugccuuuccauaauca

SEQ ID NO: 2246011 - RNA, 19 nt, Human
uacuuugccuuuugcaaac

SEQ ID NO: 2246012 - RNA, 20 nt, Human
uacuuugccuuuugcaaacu

SEQ ID NO: 2246013 - RNA, 22 nt, Human
uacuuugccuuuugcaaacuuu

SEQ ID NO: 2246014 - RNA, 20 nt, Human
uacuuuggaauacauuucuc

SEQ ID NO: 2246015 - RNA, 12 nt, Human
uagaagaacugc

SEQ ID NO: 2246016 - RNA, 14 nt, Human
uagaagaagugugu

SEQ ID NO: 2246017 - RNA, 21 nt, Human
uagaagaauacaaacauauuu

SEQ ID NO: 2246018 - RNA, 22 nt, Human
uagaagaacauccaaggagaaa

SEQ ID NO: 2246019 - RNA, 18 nt, Human
uagaagaacauccaagga

SEQ ID NO: 2246020 - RNA, 19 nt, Human
uagaaacucaccauguaaa

SEQ ID NO: 2246021 - RNA, 16 nt, Human
uagaacucccuuucaa

SEQ ID NO: 2246022 - RNA, 15 nt, Human
uagaaacauugaaga

SEQ ID NO: 2246023 - RNA, 23 nt, Human
uagaaacaugguuuugaaaugcu

SEQ ID NO: 2246024 - RNA, 14 nt, Human
uagaaaccuuaaua

SEQ ID NO: 2246025 - RNA, 15 nt, Human
uagaaaccuuaauau

SEQ ID NO: 2246026 - RNA, 18 nt, Human
uagaacucccuuucaaca

SEQ ID NO: 2246027 - RNA, 17 nt, Human
uagaacucccuuucaac

SEQ ID NO: 2246028 - RNA, 22 nt, Human
uagaaaacugaaaaucuaauau

SEQ ID NO: 2246029 - RNA, 15 nt, Human
uagaaaacugaaaau

SEQ ID NO: 2246030 - RNA, 16 nt, Human
uagaaaacugaaaauc

SEQ ID NO: 2246031 - RNA, 20 nt, Human
uagaaaacugaaaaucuaau

SEQ ID NO: 2246032 - RNA, 21 nt, Human
uagaaaacugaaaaucuaaua

SEQ ID NO: 2246033 - RNA, 21 nt, Human
uagaaaagaaaaaaaaaauau

SEQ ID NO: 2246034 - RNA, 21 nt, Human
uagaaaaggcuagguacacag

SEQ ID NO: 2246035 - RNA, 22 nt, Human
uagaaaauuuguuauuuugcaa

SEQ ID NO: 2246036 - RNA, 23 nt, Human
uagaaaauuuguuauuuugcaac

SEQ ID NO: 2246037 - RNA, 14 nt, Human
uagaaacauaaaua

SEQ ID NO: 2246038 - RNA, 18 nt, Human
uagaaacauaaauaaaau

SEQ ID NO: 2246039 - RNA, 15 nt, Human
uagaaacacaacuau

SEQ ID NO: 2246040 - RNA, 22 nt, Human
aauuuuaagugcuuuguaaugg

SEQ ID NO: 2246041 - RNA, 16 nt, Human
aauuugucuugccuua

SEQ ID NO: 2246042 - RNA, 20 nt, Human
aauuugugauacaaugcugu

SEQ ID NO: 2246043 - RNA, 19 nt, Human
aauuuuaagugcuuuguaa

SEQ ID NO: 2246044 - RNA, 15 nt, Human
aauuuuaauuuauuu

SEQ ID NO: 2246045 - RNA, 13 nt, Human
aauuuuaauuuau

SEQ ID NO: 2246046 - RNA, 16 nt, Human
aauuuuaaugaagaaa

SEQ ID NO: 2246047 - RNA, 13 nt, Human
aauuuuaaugcua

SEQ ID NO: 2246048 - RNA, 18 nt, Human
aauuugugauacaaugcu

SEQ ID NO: 2246049 - RNA, 17 nt, Human
aauuugugauacaaugc

SEQ ID NO: 2246050 - RNA, 18 nt, Human
aauuuggccugcacuaau

SEQ ID NO: 2246051 - RNA, 16 nt, Human
aauuugggagauauau

SEQ ID NO: 2246052 - RNA, 16 nt, Human
aauuuggauugcuaau

SEQ ID NO: 2246053 - RNA, 18 nt, Human
aauuugggggaaaauuua

SEQ ID NO: 2246054 - RNA, 14 nt, Human
aauuugugauacaa

SEQ ID NO: 2246055 - RNA, 19 nt, Human
uagacauuuguaaauguaa

SEQ ID NO: 2246056 - RNA, 21 nt, Human
uagacauuugcuaugagcugg

SEQ ID NO: 2246057 - RNA, 13 nt, Human
uagacauucuguc

SEQ ID NO: 2246058 - RNA, 16 nt, Human
uagacauucugucgcc

SEQ ID NO: 2246059 - RNA, 14 nt, Human
uagaccaagcuugu

SEQ ID NO: 2246060 - RNA, 14 nt, Human
uagaccaaaauaaa

SEQ ID NO: 2246061 - RNA, 13 nt, Human
uagaccaaaauaa

SEQ ID NO: 2246062 - RNA, 18 nt, Human
uagacauuucucuuacug

SEQ ID NO: 2246063 - RNA, 21 nt, Human
uagacauuucucuuacugcaa

SEQ ID NO: 2246064 - RNA, 23 nt, Human
uagacauuucucuuacugcaaau

SEQ ID NO: 2246065 - RNA, 18 nt, Human
uagaccaagcuuguccaa

SEQ ID NO: 2246066 - RNA, 18 nt, Human
uagacagucucacuuugu

SEQ ID NO: 2246067 - RNA, 13 nt, Human
uagacauaacaaa

SEQ ID NO: 2246068 - RNA, 17 nt, Human
uagacagucccugccaa

SEQ ID NO: 2246069 - RNA, 21 nt, Human
uagacagucccugccaaugga

SEQ ID NO: 2246070 - RNA, 16 nt, Human
uagaauuuuaagugcu

SEQ ID NO: 2246071 - RNA, 21 nt, Human
uagaauuuugguauaaagaaa

SEQ ID NO: 2246072 - RNA, 14 nt, Human
uagacaaauacuca

SEQ ID NO: 2246073 - RNA, 15 nt, Human
uagacaaauacucau

SEQ ID NO: 2246074 - RNA, 16 nt, Human
uagacaaauacucaug

SEQ ID NO: 2246075 - RNA, 17 nt, Human
uagacaaauacucaugu

SEQ ID NO: 2246076 - RNA, 18 nt, Human
uagacaaauacucaugug

SEQ ID NO: 2246077 - RNA, 19 nt, Human
uagacaaauacucaugugu

SEQ ID NO: 2246078 - RNA, 20 nt, Human
uagacaaauacucaugugua

SEQ ID NO: 2246079 - RNA, 21 nt, Human
uagacaaauacucauguguau

SEQ ID NO: 2246080 - RNA, 13 nt, Human
uagaauuugauua

SEQ ID NO: 2246081 - RNA, 22 nt, Human
uagaagggccaguccugccugg

SEQ ID NO: 2246082 - RNA, 22 nt, Human
uagaagggcuagaaccuggaga

SEQ ID NO: 2246083 - RNA, 24 nt, Human
uagaagggcuagaaccuggagagc

SEQ ID NO: 2246084 - RNA, 19 nt, Human
uagaagggccaguccugcc

SEQ ID NO: 2246085 - RNA, 16 nt, Human
uagaaggguuauauuu

SEQ ID NO: 2246086 - RNA, 16 nt, Human
uagaaggucggaggcu

SEQ ID NO: 2246087 - RNA, 19 nt, Human
uagaagguucucuccuccc

SEQ ID NO: 2246088 - RNA, 20 nt, Human
uagaaguaggaagugaaaau

SEQ ID NO: 2246089 - RNA, 21 nt, Human
uagaaggucggaggcuuggga

SEQ ID NO: 2246090 - RNA, 21 nt, Human
uagaaggauguacauuuccaa

SEQ ID NO: 2246091 - RNA, 11 nt, Human
uagaaggccac

SEQ ID NO: 2246092 - RNA, 19 nt, Human
uagaaggccacaugucacc

SEQ ID NO: 2246093 - RNA, 17 nt, Human
uagaaggauguacauuu

SEQ ID NO: 2246094 - RNA, 23 nt, Human
uagaaggagacagagcugguugg

SEQ ID NO: 2246095 - RNA, 17 nt, Human
uagaaggagacagagcu

SEQ ID NO: 2246096 - RNA, 15 nt, Human
uagaaggagacagag

SEQ ID NO: 2246097 - RNA, 15 nt, Human
uagaagacauuuaua

SEQ ID NO: 2246098 - RNA, 17 nt, Human
uagaagcuggaggacua

SEQ ID NO: 2246099 - RNA, 13 nt, Human
uagaagacauuua

SEQ ID NO: 2246100 - RNA, 16 nt, Human
uagaagcuguaguagc

SEQ ID NO: 2246101 - RNA, 10 nt, Human
uagacagagu

SEQ ID NO: 2246102 - RNA, 16 nt, Human
uagacagucccugcca

SEQ ID NO: 2246103 - RNA, 21 nt, Human
uagacacuccccgaagucuuu

SEQ ID NO: 2246104 - RNA, 17 nt, Human
uagacacccauuuucac

SEQ ID NO: 2246105 - RNA, 17 nt, Human
uagacacuggcugccag

SEQ ID NO: 2246106 - RNA, 18 nt, Human
uagacacccauuuucaca

SEQ ID NO: 2246107 - RNA, 19 nt, Human
uagacacuggcugccagcu

SEQ ID NO: 2246108 - RNA, 22 nt, Human
uagacacuggcugccagcuauu

SEQ ID NO: 2246109 - RNA, 18 nt, Human
uagacaauuuauuauggc

SEQ ID NO: 2246110 - RNA, 13 nt, Human
uagacacacauga

SEQ ID NO: 2246111 - RNA, 19 nt, Human
uagacacauaugaggggga

SEQ ID NO: 2246112 - RNA, 18 nt, Human
uagcacacacuuuugguu

SEQ ID NO: 2246113 - RNA, 15 nt, Human
uagcacagacccugc

SEQ ID NO: 2246114 - RNA, 20 nt, Human
uagcacagacccugcccugu

SEQ ID NO: 2246115 - RNA, 21 nt, Human
uagcacagacccugcccugug

SEQ ID NO: 2246116 - RNA, 17 nt, Human
uagcaaucacaacacug

SEQ ID NO: 2246117 - RNA, 21 nt, Human
uagcaauccauguuaguuuuu

SEQ ID NO: 2246118 - RNA, 17 nt, Human
uagcaaguucuagagaa

SEQ ID NO: 2246119 - RNA, 18 nt, Human
uagcaaguucuagagaag

SEQ ID NO: 2246120 - RNA, 19 nt, Human
uagcaaguucuagagaaga

SEQ ID NO: 2246121 - RNA, 21 nt, Human
uagcaaguucuagagaagagg

SEQ ID NO: 2246122 - RNA, 14 nt, Human
uagcacagacccug

SEQ ID NO: 2246123 - RNA, 18 nt, Human
uagcaaguuacagugaug

SEQ ID NO: 2246124 - RNA, 16 nt, Human
uagcaaagauaucuca

SEQ ID NO: 2246125 - RNA, 14 nt, Human
uagcaaacuuugua

SEQ ID NO: 2246126 - RNA, 21 nt, Human
uagcaaaauucuuaaguaugu

SEQ ID NO: 2246127 - RNA, 12 nt, Human
uagcaaacagag

SEQ ID NO: 2246128 - RNA, 15 nt, Human
uagcaaacagaggaa

SEQ ID NO: 2246129 - RNA, 20 nt, Human
uagagggaccucucccaggg

SEQ ID NO: 2246130 - RNA, 22 nt, Human
uagaggcuucuccgccagccuc

SEQ ID NO: 2246131 - RNA, 19 nt, Human
uagagggaccucucccagg

SEQ ID NO: 2246132 - RNA, 15 nt, Human
uagagggaccucucc

SEQ ID NO: 2246133 - RNA, 13 nt, Human
uagaggcuagcuu

SEQ ID NO: 2246134 - RNA, 14 nt, Human
uagaggcuucuccg

SEQ ID NO: 2246135 - RNA, 18 nt, Human
uagaggcuucuccgccag

SEQ ID NO: 2246136 - RNA, 19 nt, Human
uagaggcuucuccgccagc

SEQ ID NO: 2246137 - RNA, 20 nt, Human
uagaggcuucuccgccagcc

SEQ ID NO: 2246138 - RNA, 21 nt, Human
uagaggcuucuccgccagccu

SEQ ID NO: 2246139 - RNA, 23 nt, Human
uagaggcuucuccgccagccucc

SEQ ID NO: 2246140 - RNA, 24 nt, Human
uagaggggaaaagagaugaugaaa

SEQ ID NO: 2246141 - RNA, 14 nt, Human
uagagggaggggcc

SEQ ID NO: 2246142 - RNA, 13 nt, Human
uagagggaggggc

SEQ ID NO: 2246143 - RNA, 23 nt, Human
uagagggaggagaaugagccucg

SEQ ID NO: 2246144 - RNA, 14 nt, Human
uagaggguguguaa

SEQ ID NO: 2246145 - RNA, 22 nt, Human
uagcaaaacgcauggagugugu

SEQ ID NO: 2246146 - RNA, 23 nt, Human
uagcaaaacgcauggagugugua

SEQ ID NO: 2246147 - RNA, 17 nt, Human
uagaggguuccuguaga

SEQ ID NO: 2246148 - RNA, 13 nt, Human
uagaggguuccug

SEQ ID NO: 2246149 - RNA, 23 nt, Human
uagaggggggauuuccagccagg

SEQ ID NO: 2246150 - RNA, 20 nt, Human
uagagggagguguuuaaaga

SEQ ID NO: 2246151 - RNA, 14 nt, Human
uagagggcccuggu

SEQ ID NO: 2246152 - RNA, 23 nt, Human
uagauuuuguuuugcuuuuucug

SEQ ID NO: 2246153 - RNA, 17 nt, Human
uagauuuuguuuugcuu

SEQ ID NO: 2246154 - RNA, 17 nt, Human
uagccacuuaccuucaa

SEQ ID NO: 2246155 - RNA, 16 nt, Human
uagccacuuaccuuca

SEQ ID NO: 2246156 - RNA, 14 nt, Human
uagccacucaggag

SEQ ID NO: 2246157 - RNA, 13 nt, Human
uagccacucagga

SEQ ID NO: 2246158 - RNA, 19 nt, Human
uagccaccccagaaauggu

SEQ ID NO: 2246159 - RNA, 19 nt, Human
uagccaccgccuccuacag

SEQ ID NO: 2246160 - RNA, 22 nt, Human
acaaaucaagcuucaguuuccu

SEQ ID NO: 2246161 - RNA, 20 nt, Human
uagccacauuuggaauacuu

SEQ ID NO: 2246162 - RNA, 13 nt, Human
uagccaaggccaa

SEQ ID NO: 2246163 - RNA, 14 nt, Human
uagccaccaacucu

SEQ ID NO: 2246164 - RNA, 21 nt, Human
uagccacauuuggaauacuuu

SEQ ID NO: 2246165 - RNA, 22 nt, Human
uagccaccaacucuugcagguc

SEQ ID NO: 2246166 - RNA, 13 nt, Human
uagccaccaucuu

SEQ ID NO: 2246167 - RNA, 14 nt, Human
uagccaccaucuuu

SEQ ID NO: 2246168 - RNA, 16 nt, Human
uagccaccaucuuugc

SEQ ID NO: 2246169 - RNA, 18 nt, Human
uagccaccgccuccuaca

SEQ ID NO: 2246170 - RNA, 18 nt, Human
uagccacccaccacacug

SEQ ID NO: 2246171 - RNA, 15 nt, Human
uagcacuggccugca

SEQ ID NO: 2246172 - RNA, 12 nt, Human
uagccaaggcca

SEQ ID NO: 2246173 - RNA, 16 nt, Human
uagccaaacccuuguc

SEQ ID NO: 2246174 - RNA, 21 nt, Human
uagccaacacccaucuguuuu

SEQ ID NO: 2246175 - RNA, 20 nt, Human
uagccaaaugguuuaacuuc

SEQ ID NO: 2246176 - RNA, 13 nt, Human
uagcacugagcaa

SEQ ID NO: 2246177 - RNA, 13 nt, Human
uagcacuggccug

SEQ ID NO: 2246178 - RNA, 20 nt, Human
uagcacuaccacuccugcca

SEQ ID NO: 2246179 - RNA, 16 nt, Human
uagcacuaccacuccu

SEQ ID NO: 2246180 - RNA, 13 nt, Human
uagcaccagggac

SEQ ID NO: 2246181 - RNA, 13 nt, Human
uagcaccagggcu

SEQ ID NO: 2246182 - RNA, 24 nt, Human
uagcacagacccugcccugugggc

SEQ ID NO: 2246183 - RNA, 22 nt, Human
uagcacagacccugcccugugg

SEQ ID NO: 2246184 - RNA, 19 nt, Human
acaaaaucgauuggcuuua

SEQ ID NO: 2246185 - RNA, 24 nt, Human
acaaagguugagauguaaaaggua

SEQ ID NO: 2246186 - RNA, 19 nt, Human
acaaagguauaauuuuaug

SEQ ID NO: 2246187 - RNA, 14 nt, Human
acaaaaucuccucu

SEQ ID NO: 2246188 - RNA, 22 nt, Human
acaaaauaaccaauccuggaca

SEQ ID NO: 2246189 - RNA, 12 nt, Human
acaaaauagaag

SEQ ID NO: 2246190 - RNA, 15 nt, Human
acaaaauagaagcug

SEQ ID NO: 2246191 - RNA, 18 nt, Human
acaaaauagaagcuguag

SEQ ID NO: 2246192 - RNA, 20 nt, Human
acaaaauccagcuaugaaua

SEQ ID NO: 2246193 - RNA, 16 nt, Human
acaaauaauaagcaaa

SEQ ID NO: 2246194 - RNA, 16 nt, Human
acaaauaacaaugugc

SEQ ID NO: 2246195 - RNA, 13 nt, Human
acaaauacucaug

SEQ ID NO: 2246196 - RNA, 21 nt, Human
acaaagguuuuccucuucuau

SEQ ID NO: 2246197 - RNA, 14 nt, Human
acaaaguaauuccu

SEQ ID NO: 2246198 - RNA, 12 nt, Human
uagaggccugag

SEQ ID NO: 2246199 - RNA, 15 nt, Human
uagaggccugaggau

SEQ ID NO: 2246200 - RNA, 23 nt, Human
uagaggccugaggaugagcugga

SEQ ID NO: 2246201 - RNA, 19 nt, Human
uagaggcuuccuucauuuc

SEQ ID NO: 2246202 - RNA, 18 nt, Human
uagaggcuuccuucauuu

SEQ ID NO: 2246203 - RNA, 17 nt, Human
uagaggcuuccuucauu

SEQ ID NO: 2246204 - RNA, 16 nt, Human
uagaggcuuccuucau

SEQ ID NO: 2246205 - RNA, 17 nt, Human
uagagccugccuggagc

SEQ ID NO: 2246206 - RNA, 18 nt, Human
uagagccugccuggagcg

SEQ ID NO: 2246207 - RNA, 12 nt, Human
uagagccugccu

SEQ ID NO: 2246208 - RNA, 13 nt, Human
uagagccugccug

SEQ ID NO: 2246209 - RNA, 16 nt, Human
uagagccugccuggag

SEQ ID NO: 2246210 - RNA, 22 nt, Human
uagagcggagaaaggaagggcu

SEQ ID NO: 2246211 - RNA, 23 nt, Human
acaaauacucuuaggaagagaaa

SEQ ID NO: 2246212 - RNA, 18 nt, Human
acaaauacucauguguau

SEQ ID NO: 2246213 - RNA, 15 nt, Human
acaaauacucuuagg

SEQ ID NO: 2246214 - RNA, 17 nt, Human
acaaauacucuuaggaa

SEQ ID NO: 2246215 - RNA, 14 nt, Human
acaaauacucaugu

SEQ ID NO: 2246216 - RNA, 15 nt, Human
acaaauacucaugug

SEQ ID NO: 2246217 - RNA, 16 nt, Human
acaaauacucaugugu

SEQ ID NO: 2246218 - RNA, 17 nt, Human
acaaauacucaugugua

SEQ ID NO: 2246219 - RNA, 14 nt, Human
uagagccagggucu

SEQ ID NO: 2246220 - RNA, 14 nt, Human
uagagccugaggga

SEQ ID NO: 2246221 - RNA, 16 nt, Human
acaaaaacacagcaag

SEQ ID NO: 2246222 - RNA, 15 nt, Human
acaaaaagcuucccc

SEQ ID NO: 2246223 - RNA, 14 nt, Human
acaaaaagcuuccc

SEQ ID NO: 2246224 - RNA, 15 nt, Human
acaaaaacacagcaa

SEQ ID NO: 2246225 - RNA, 14 nt, Human
acaaaaacacagca

SEQ ID NO: 2246226 - RNA, 18 nt, Human
aauuuuacccuuuagacu

SEQ ID NO: 2246227 - RNA, 15 nt, Human
acaaaaaacuccccu

SEQ ID NO: 2246228 - RNA, 17 nt, Human
aauuuuacccuuuagac

SEQ ID NO: 2246229 - RNA, 21 nt, Human
aauuuuacccuuuagacugua

SEQ ID NO: 2246230 - RNA, 13 nt, Human
acaaaaacacagc

SEQ ID NO: 2246231 - RNA, 12 nt, Human
aauuuuacauuu

SEQ ID NO: 2246232 - RNA, 16 nt, Human
aauuuuaauauuuuau

SEQ ID NO: 2246233 - RNA, 15 nt, Human
acaaaaauugacuca

SEQ ID NO: 2246234 - RNA, 19 nt, Human
acaaaaauucucaguucuc

SEQ ID NO: 2246235 - RNA, 14 nt, Human
acaaaaauuaaaau

SEQ ID NO: 2246236 - RNA, 23 nt, Human
acaaaaaugaacugaaguuucac

SEQ ID NO: 2246237 - RNA, 21 nt, Human
acaaaaauguaaugaucauaa

SEQ ID NO: 2246238 - RNA, 22 nt, Human
acaaaaagguaaaacuuuuuau

SEQ ID NO: 2246239 - RNA, 20 nt, Human
acaaaaagguucucaggugu

SEQ ID NO: 2246240 - RNA, 18 nt, Human
acaaaaaguuuccauaug

SEQ ID NO: 2246241 - RNA, 22 nt, Human
acaaaaaugaaagcaugucuca

SEQ ID NO: 2246242 - RNA, 19 nt, Human
acaaaaaugaacugaaguu

SEQ ID NO: 2246243 - RNA, 13 nt, Human
acaaaaauauaaa

SEQ ID NO: 2246244 - RNA, 12 nt, Human
acaaaaauaaca

SEQ ID NO: 2246245 - RNA, 14 nt, Human
acaaaaauuaggua

SEQ ID NO: 2246246 - RNA, 12 nt, Human
acaaaacaaaug

SEQ ID NO: 2246247 - RNA, 17 nt, Human
acaaaacaacccuagag

SEQ ID NO: 2246248 - RNA, 23 nt, Human
acaaaacacucggcauuucaaau

SEQ ID NO: 2246249 - RNA, 21 nt, Human
acaaaaggguuuaaacugauu

SEQ ID NO: 2246250 - RNA, 15 nt, Human
acaaaacuacaugag

SEQ ID NO: 2246251 - RNA, 22 nt, Human
acaaaaguuucauccuuuucau

SEQ ID NO: 2246252 - RNA, 14 nt, Human
acaaaauaaacaaa

SEQ ID NO: 2246253 - RNA, 12 nt, Human
acaaaauaaaca

SEQ ID NO: 2246254 - RNA, 14 nt, Human
acacagggacuuga

SEQ ID NO: 2246255 - RNA, 16 nt, Human
acacaggcccucccug

SEQ ID NO: 2246256 - RNA, 13 nt, Human
acacaggcccucc

SEQ ID NO: 2246257 - RNA, 23 nt, Human
acacaggcccggcuccaggcucc

SEQ ID NO: 2246258 - RNA, 24 nt, Human
acacaggcccggcuccaggcuccu

SEQ ID NO: 2246259 - RNA, 19 nt, Human
acacaggcccggcuccagg

SEQ ID NO: 2246260 - RNA, 20 nt, Human
acacaggcccggcuccaggc

SEQ ID NO: 2246261 - RNA, 21 nt, Human
acacaggcccggcuccaggcu

SEQ ID NO: 2246262 - RNA, 22 nt, Human
acacaggcccggcuccaggcuc

SEQ ID NO: 2246263 - RNA, 13 nt, Human
acacacagaggaa

SEQ ID NO: 2246264 - RNA, 22 nt, Human
acacacagaggaagagcaggca

SEQ ID NO: 2246265 - RNA, 23 nt, Human
acacacagauuugagcucagccc

SEQ ID NO: 2246266 - RNA, 13 nt, Human
acacacagacaca

SEQ ID NO: 2246267 - RNA, 22 nt, Human
acacacagaaaauauacuguaa

SEQ ID NO: 2246268 - RNA, 21 nt, Human
acacacagaaaauauacugua

SEQ ID NO: 2246269 - RNA, 20 nt, Human
acacacagaaaauauacugu

SEQ ID NO: 2246270 - RNA, 19 nt, Human
acacacagaaaauauacug

SEQ ID NO: 2246271 - RNA, 18 nt, Human
acacacagaaaauauacu

SEQ ID NO: 2246272 - RNA, 17 nt, Human
acacacagaaaauauac

SEQ ID NO: 2246273 - RNA, 16 nt, Human
acacacagaaaauaua

SEQ ID NO: 2246274 - RNA, 15 nt, Human
acacacagaaaauau

SEQ ID NO: 2246275 - RNA, 14 nt, Human
acacacagaaaaua

SEQ ID NO: 2246276 - RNA, 13 nt, Human
acacacagaaaau

SEQ ID NO: 2246277 - RNA, 15 nt, Human
acacacacacaugca

SEQ ID NO: 2246278 - RNA, 21 nt, Human
acacaggcaacugaggcagac

SEQ ID NO: 2246279 - RNA, 12 nt, Human
acacacagccac

SEQ ID NO: 2246280 - RNA, 11 nt, Human
acacacagcca

SEQ ID NO: 2246281 - RNA, 16 nt, Human
acacaggcccggcucc

SEQ ID NO: 2246282 - RNA, 17 nt, Human
acacaggcccggcucca

SEQ ID NO: 2246283 - RNA, 18 nt, Human
acacaggcccggcuccag

SEQ ID NO: 2246284 - RNA, 15 nt, Human
uaguaaaaauacaaa

SEQ ID NO: 2246285 - RNA, 20 nt, Human
uagguuuuuuuccuucugaa

SEQ ID NO: 2246286 - RNA, 13 nt, Human
uaguaaaaauuaa

SEQ ID NO: 2246287 - RNA, 16 nt, Human
uaguaaaaauuaaaaa

SEQ ID NO: 2246288 - RNA, 14 nt, Human
uaguaaucacaguu

SEQ ID NO: 2246289 - RNA, 19 nt, Human
uagguuuuuuuguauagua

SEQ ID NO: 2246290 - RNA, 15 nt, Human
uagguuuuuuuguau

SEQ ID NO: 2246291 - RNA, 15 nt, Human
uagguuuuuauuagu

SEQ ID NO: 2246292 - RNA, 15 nt, Human
uagguuuuuguuugu

SEQ ID NO: 2246293 - RNA, 13 nt, Human
uaguaaaaauaaa

SEQ ID NO: 2246294 - RNA, 16 nt, Human
uaguaaaaauaaaauu

SEQ ID NO: 2246295 - RNA, 15 nt, Human
acacaggucuuuccu

SEQ ID NO: 2246296 - RNA, 16 nt, Human
uagguuuuguuugcua

SEQ ID NO: 2246297 - RNA, 21 nt, Human
uagguuuuguuugcuaucuua

SEQ ID NO: 2246298 - RNA, 23 nt, Human
uagguuuuguuugcuaucuuaau

SEQ ID NO: 2246299 - RNA, 11 nt, Human
acacagggcag

SEQ ID NO: 2246300 - RNA, 15 nt, Human
acacagggacuugaa

SEQ ID NO: 2246301 - RNA, 18 nt, Human
acacagggacuugaaguu

SEQ ID NO: 2246302 - RNA, 16 nt, Human
acacaggucuuuccua

SEQ ID NO: 2246303 - RNA, 14 nt, Human
acacaggucuuucc

SEQ ID NO: 2246304 - RNA, 16 nt, Human
acacagguucacgugc

SEQ ID NO: 2246305 - RNA, 15 nt, Human
uaguaauguuuuaua

SEQ ID NO: 2246306 - RNA, 21 nt, Human
uaguaaugcuacgugugauuu

SEQ ID NO: 2246307 - RNA, 22 nt, Human
uaguaaugcuacgugugauuuu

SEQ ID NO: 2246308 - RNA, 14 nt, Human
uaguaauugacaug

SEQ ID NO: 2246309 - RNA, 14 nt, Human
uaguaauucucagg

SEQ ID NO: 2246310 - RNA, 15 nt, Human
uaguaauucucaggc

SEQ ID NO: 2246311 - RNA, 14 nt, Human
uaguagagacaggg

SEQ ID NO: 2246312 - RNA, 12 nt, Human
uaguaaucauau

SEQ ID NO: 2246313 - RNA, 20 nt, Human
uaguaaugcuacgugugauu

SEQ ID NO: 2246314 - RNA, 15 nt, Human
uaguaaucacaguug

SEQ ID NO: 2246315 - RNA, 15 nt, Human
uaguagagacagggu

SEQ ID NO: 2246316 - RNA, 22 nt, Human
uaguagagacaggguuuugcca

SEQ ID NO: 2246317 - RNA, 13 nt, Human
uaguagagacggg

SEQ ID NO: 2246318 - RNA, 23 nt, Human
uagucacauggccuaugcacaua

SEQ ID NO: 2246319 - RNA, 14 nt, Human
uagucacugagaca

SEQ ID NO: 2246320 - RNA, 23 nt, Human
acaaugcaaaccaucauugaaau

SEQ ID NO: 2246321 - RNA, 19 nt, Human
acaaugcaaaccaucauug

SEQ ID NO: 2246322 - RNA, 21 nt, Human
acaaugcaaaccaucauugaa

SEQ ID NO: 2246323 - RNA, 13 nt, Human
acacaacacacac

SEQ ID NO: 2246324 - RNA, 13 nt, Human
acacaagccacag

SEQ ID NO: 2246325 - RNA, 13 nt, Human
acacaacuauauu

SEQ ID NO: 2246326 - RNA, 14 nt, Human
acacaaaugcaggg

SEQ ID NO: 2246327 - RNA, 14 nt, Human
acacaauacaauaa

SEQ ID NO: 2246328 - RNA, 14 nt, Human
acacacacacacag

SEQ ID NO: 2246329 - RNA, 12 nt, Human
acacaauacaau

SEQ ID NO: 2246330 - RNA, 14 nt, Human
acacaaguaaacau

SEQ ID NO: 2246331 - RNA, 15 nt, Human
acacaaguccuguga

SEQ ID NO: 2246332 - RNA, 16 nt, Human
acacaaguccugugaa

SEQ ID NO: 2246333 - RNA, 14 nt, Human
acacaagccacaga

SEQ ID NO: 2246334 - RNA, 15 nt, Human
acacaagccacagaa

SEQ ID NO: 2246335 - RNA, 16 nt, Human
acacaagccacagaag

SEQ ID NO: 2246336 - RNA, 19 nt, Human
acacaagccacagaagcca

SEQ ID NO: 2246337 - RNA, 14 nt, Human
acacaagcuggaag

SEQ ID NO: 2246338 - RNA, 15 nt, Human
acacaagcuggaagc

SEQ ID NO: 2246339 - RNA, 13 nt, Human
acacaaguaaaca

SEQ ID NO: 2246340 - RNA, 22 nt, Human
acacaagcuuuuuuacacaaau

SEQ ID NO: 2246341 - RNA, 23 nt, Human
acacaaggauagaugcuggccca

SEQ ID NO: 2246342 - RNA, 19 nt, Human
acacaaggauagaugcugg

SEQ ID NO: 2246343 - RNA, 13 nt, Human
acacacacacagg

SEQ ID NO: 2246344 - RNA, 15 nt, Human
acacacacacacagg

SEQ ID NO: 2246345 - RNA, 12 nt, Human
acacacacacau

SEQ ID NO: 2246346 - RNA, 15 nt, Human
acacacacacagcca

SEQ ID NO: 2246347 - RNA, 14 nt, Human
acacacacacagcc

SEQ ID NO: 2246348 - RNA, 14 nt, Human
acacacacacagga

SEQ ID NO: 2246349 - RNA, 14 nt, Human
acacacacacaugc

SEQ ID NO: 2246350 - RNA, 13 nt, Human
acacacacacaug

SEQ ID NO: 2246351 - RNA, 13 nt, Human
acacacacacagc

SEQ ID NO: 2246352 - RNA, 12 nt, Human
acacacacacag

SEQ ID NO: 2246353 - RNA, 17 nt, Human
acacacacacacaugca

SEQ ID NO: 2246354 - RNA, 16 nt, Human
acacacacacacaugc

SEQ ID NO: 2246355 - RNA, 15 nt, Human
acacacacacacaug

SEQ ID NO: 2246356 - RNA, 14 nt, Human
acacacacacacau

SEQ ID NO: 2246357 - RNA, 16 nt, Human
acacacacacacagcc

SEQ ID NO: 2246358 - RNA, 15 nt, Human
acacacacacacagc

SEQ ID NO: 2246359 - RNA, 18 nt, Human
uaggguaaggugccuucu

SEQ ID NO: 2246360 - RNA, 15 nt, Human
uaggguaaggugccu

SEQ ID NO: 2246361 - RNA, 19 nt, Human
uaggguaagugagagaggg

SEQ ID NO: 2246362 - RNA, 15 nt, Human
uagggucucuucagg

SEQ ID NO: 2246363 - RNA, 15 nt, Human
uagggucggaaccca

SEQ ID NO: 2246364 - RNA, 13 nt, Human
uaggguccugggg

SEQ ID NO: 2246365 - RNA, 17 nt, Human
uaggguuauaauaaugu

SEQ ID NO: 2246366 - RNA, 12 nt, Human
uaggguuuaauc

SEQ ID NO: 2246367 - RNA, 19 nt, Human
uaggguuuaauccccagua

SEQ ID NO: 2246368 - RNA, 21 nt, Human
uaggguuuaauccccaguaaa

SEQ ID NO: 2246369 - RNA, 15 nt, Human
uaggguuauaauaau

SEQ ID NO: 2246370 - RNA, 12 nt, Human
uaggguggcccu

SEQ ID NO: 2246371 - RNA, 16 nt, Human
uaggguggagagccac

SEQ ID NO: 2246372 - RNA, 15 nt, Human
uagggugggccuuca

SEQ ID NO: 2246373 - RNA, 14 nt, Human
acaaugacuuuauu

SEQ ID NO: 2246374 - RNA, 13 nt, Human
acaaugacuuuau

SEQ ID NO: 2246375 - RNA, 15 nt, Human
acaaugauauaugga

SEQ ID NO: 2246376 - RNA, 22 nt, Human
acaaugacuuacuguacaugaa

SEQ ID NO: 2246377 - RNA, 19 nt, Human
acaaugacuuacuguacau

SEQ ID NO: 2246378 - RNA, 20 nt, Human
acaaugacuuacuguacaug

SEQ ID NO: 2246379 - RNA, 11 nt, Human
acaaugcaaac

SEQ ID NO: 2246380 - RNA, 16 nt, Human
acaaugcaaaccauca

SEQ ID NO: 2246381 - RNA, 17 nt, Human
acaaugcaaaccaucau

SEQ ID NO: 2246382 - RNA, 18 nt, Human
acaaugcaaaccaucauu

SEQ ID NO: 2246383 - RNA, 14 nt, Human
acaaaucuaugcca

SEQ ID NO: 2246384 - RNA, 15 nt, Human
acaaaucuaugccac

SEQ ID NO: 2246385 - RNA, 21 nt, Human
acaaaucucaagcaaacagcu

SEQ ID NO: 2246386 - RNA, 21 nt, Human
acaaaucuaugccacucagaa

SEQ ID NO: 2246387 - RNA, 18 nt, Human
acaauauuuaaaauuuau

SEQ ID NO: 2246388 - RNA, 14 nt, Human
acaauauuuaaaau

SEQ ID NO: 2246389 - RNA, 13 nt, Human
acaauauuuaaaa

SEQ ID NO: 2246390 - RNA, 10 nt, Human
acaauauuua

SEQ ID NO: 2246391 - RNA, 15 nt, Human
acaauauuguuucua

SEQ ID NO: 2246392 - RNA, 14 nt, Human
acaauauuguuucu

SEQ ID NO: 2246393 - RNA, 19 nt, Human
acaaucagccacauucuag

SEQ ID NO: 2246394 - RNA, 18 nt, Human
acaaucagcuccuuccug

SEQ ID NO: 2246395 - RNA, 22 nt, Human
acaaucagcuccuuccuggaga

SEQ ID NO: 2246396 - RNA, 20 nt, Human
uagccuuagaagucacacag

SEQ ID NO: 2246397 - RNA, 23 nt, Human
acaaucaacucuaauagugcuua

SEQ ID NO: 2246398 - RNA, 19 nt, Human
acaaucaaaggaaaauagu

SEQ ID NO: 2246399 - RNA, 14 nt, Human
acaaucaaaggaaa

SEQ ID NO: 2246400 - RNA, 16 nt, Human
acaauauuuaaaauuu

SEQ ID NO: 2246401 - RNA, 17 nt, Human
acaauauuuuguggcuu

SEQ ID NO: 2246402 - RNA, 15 nt, Human
uagccuuauccucug

SEQ ID NO: 2246403 - RNA, 21 nt, Human
uagccuuagaagucacacagu

SEQ ID NO: 2246404 - RNA, 22 nt, Human
uagccuuccguaacccaacucu

SEQ ID NO: 2246405 - RNA, 20 nt, Human
uagccuuccguaacccaacu

SEQ ID NO: 2246406 - RNA, 16 nt, Human
uagccuuauccucuga

SEQ ID NO: 2246407 - RNA, 17 nt, Human
uagccuuauccucugau

SEQ ID NO: 2246408 - RNA, 18 nt, Human
uagccuuauccucugauc

SEQ ID NO: 2246409 - RNA, 20 nt, Human
uagccuuauccucugaucuc

SEQ ID NO: 2246410 - RNA, 14 nt, Human
uagcgcccaguugg

SEQ ID NO: 2246411 - RNA, 22 nt, Human
uagcgcugccgcaccccagagu

SEQ ID NO: 2246412 - RNA, 21 nt, Human
uagcgcugccgcaccccagag

SEQ ID NO: 2246413 - RNA, 17 nt, Human
uagcgcccaguugggug

SEQ ID NO: 2246414 - RNA, 14 nt, Human
uagcuuuuuaauug

SEQ ID NO: 2246415 - RNA, 15 nt, Human
uagcuuuuuaauugu

SEQ ID NO: 2246416 - RNA, 16 nt, Human
uagcuuuuuaauuguu

SEQ ID NO: 2246417 - RNA, 13 nt, Human
uaggaaaaacuga

SEQ ID NO: 2246418 - RNA, 14 nt, Human
uaggaaaaacugau

SEQ ID NO: 2246419 - RNA, 13 nt, Human
uagcuuuucccuu

SEQ ID NO: 2246420 - RNA, 18 nt, Human
uagcuuuuauuguauaaa

SEQ ID NO: 2246421 - RNA, 15 nt, Human
uagcuuugcucuuug

SEQ ID NO: 2246422 - RNA, 14 nt, Human
uagcuuuuauugua

SEQ ID NO: 2246423 - RNA, 20 nt, Human
uagcuuuauuuuuuaaguau

SEQ ID NO: 2246424 - RNA, 19 nt, Human
uagcuuuauuuuuuaagua

SEQ ID NO: 2246425 - RNA, 22 nt, Human
uagcuuuauuuuuuaaguauuu

SEQ ID NO: 2246426 - RNA, 15 nt, Human
uagcuuucaauuccg

SEQ ID NO: 2246427 - RNA, 15 nt, Human
uagcuuuauucuuca

SEQ ID NO: 2246428 - RNA, 19 nt, Human
uagcuuucccaaauaaacu

SEQ ID NO: 2246429 - RNA, 23 nt, Human
uagcuuucaauuccguagccagc

SEQ ID NO: 2246430 - RNA, 17 nt, Human
uagcuuucaauuccgua

SEQ ID NO: 2246431 - RNA, 11 nt, Human
uagcuuugcuc

SEQ ID NO: 2246432 - RNA, 14 nt, Human
uagcuuugcucugc

SEQ ID NO: 2246433 - RNA, 16 nt, Human
uagcuuugcucugcca

SEQ ID NO: 2246434 - RNA, 15 nt, Human
uagcuuggaaacugg

SEQ ID NO: 2246435 - RNA, 20 nt, Human
uagcuuggaaacuggaugag

SEQ ID NO: 2246436 - RNA, 17 nt, Human
uagcuugcgcauucuca

SEQ ID NO: 2246437 - RNA, 19 nt, Human
uagcuugcgcauucucaug

SEQ ID NO: 2246438 - RNA, 19 nt, Human
uagcuugggaggcuucccc

SEQ ID NO: 2246439 - RNA, 15 nt, Human
uagcuugggacaaau

SEQ ID NO: 2246440 - RNA, 18 nt, Human
uagcuugggacaaaucaa

SEQ ID NO: 2246441 - RNA, 13 nt, Human
uagcuuguauagu

SEQ ID NO: 2246442 - RNA, 17 nt, Human
uagcuuguauaguguaa

SEQ ID NO: 2246443 - RNA, 19 nt, Human
uagcuuguauaguguaaaa

SEQ ID NO: 2246444 - RNA, 15 nt, Human
uagcuuguucccugu

SEQ ID NO: 2246445 - RNA, 18 nt, Human
uagcuuuauuuuuuaagu

SEQ ID NO: 2246446 - RNA, 13 nt, Human
uagcuuuauucuu

SEQ ID NO: 2246447 - RNA, 14 nt, Human
uagcuuuauucuuc

SEQ ID NO: 2246448 - RNA, 16 nt, Human
uagcuuuagacccugg

SEQ ID NO: 2246449 - RNA, 17 nt, Human
uagcuuuagacccuggg

SEQ ID NO: 2246450 - RNA, 18 nt, Human
uagcuuuagacccugggu

SEQ ID NO: 2246451 - RNA, 19 nt, Human
uagcuuuacuguuuguuau

SEQ ID NO: 2246452 - RNA, 15 nt, Human
uagcuuuacccucag

SEQ ID NO: 2246453 - RNA, 14 nt, Human
uagcuuuacccuca

SEQ ID NO: 2246454 - RNA, 21 nt, Human
uagcuucaccccaaucccagc

SEQ ID NO: 2246455 - RNA, 12 nt, Human
uagcuuccauga

SEQ ID NO: 2246456 - RNA, 19 nt, Human
uagcuaagcggaccagccu

SEQ ID NO: 2246457 - RNA, 21 nt, Human
uagcuucuaccaugaacagaa

SEQ ID NO: 2246458 - RNA, 13 nt, Human
uagcuucugcuuu

SEQ ID NO: 2246459 - RNA, 15 nt, Human
uagcuucugcuuuuc

SEQ ID NO: 2246460 - RNA, 16 nt, Human
uagcuucugcuuuucu

SEQ ID NO: 2246461 - RNA, 19 nt, Human
uagcuugaaggaucuguuu

SEQ ID NO: 2246462 - RNA, 22 nt, Human
uagcuucugcuuuucugcccug

SEQ ID NO: 2246463 - RNA, 19 nt, Human
uagcuugauaaagggccaa

SEQ ID NO: 2246464 - RNA, 20 nt, Human
uagcuaagaaauaaaacugu

SEQ ID NO: 2246465 - RNA, 20 nt, Human
uagcuaacauuuuaaauaaa

SEQ ID NO: 2246466 - RNA, 23 nt, Human
uagcuaacauuuuaaauaaaaga

SEQ ID NO: 2246467 - RNA, 20 nt, Human
uagcuaaacggauuccaaag

SEQ ID NO: 2246468 - RNA, 19 nt, Human
uagcuaaacggauuccaaa

SEQ ID NO: 2246469 - RNA, 18 nt, Human
uagcuaaacggauuccaa

SEQ ID NO: 2246470 - RNA, 19 nt, Human
uagggcaguaacauugggu

SEQ ID NO: 2246471 - RNA, 15 nt, Human
uagggcagcuugccc

SEQ ID NO: 2246472 - RNA, 19 nt, Human
uagggcauaaugaugaugg

SEQ ID NO: 2246473 - RNA, 11 nt, Human
uagggcagcuu

SEQ ID NO: 2246474 - RNA, 13 nt, Human
uagggcagcuugc

SEQ ID NO: 2246475 - RNA, 18 nt, Human
uagggcauuugagaaaug

SEQ ID NO: 2246476 - RNA, 16 nt, Human
uagggccaagcccagc

SEQ ID NO: 2246477 - RNA, 23 nt, Human
uagggccaagcccagcacugcuu

SEQ ID NO: 2246478 - RNA, 11 nt, Human
uagggccaggc

SEQ ID NO: 2246479 - RNA, 14 nt, Human
uagggccaggcagg

SEQ ID NO: 2246480 - RNA, 14 nt, Human
uagggcuggaccua

SEQ ID NO: 2246481 - RNA, 14 nt, Human
uagggcuguaaaau

SEQ ID NO: 2246482 - RNA, 23 nt, Human
uagggcuacaaaaccugauguua

SEQ ID NO: 2246483 - RNA, 21 nt, Human
uagggccuggucccugggagg

SEQ ID NO: 2246484 - RNA, 21 nt, Human
uagggccaggcaggugccugg

SEQ ID NO: 2246485 - RNA, 15 nt, Human
uagggccaggcaggu

SEQ ID NO: 2246486 - RNA, 13 nt, Human
uagggguugcuaa

SEQ ID NO: 2246487 - RNA, 14 nt, Human
uaggggucaaagaa

SEQ ID NO: 2246488 - RNA, 17 nt, Human
uaggggucaggcuccau

SEQ ID NO: 2246489 - RNA, 23 nt, Human
uagggguaauauauugcugcugg

SEQ ID NO: 2246490 - RNA, 16 nt, Human
uagggguaauauauug

SEQ ID NO: 2246491 - RNA, 16 nt, Human
uagggggaacucuagc

SEQ ID NO: 2246492 - RNA, 13 nt, Human
uaggggagcaggg

SEQ ID NO: 2246493 - RNA, 23 nt, Human
uaggggacacuucccucuguuuc

SEQ ID NO: 2246494 - RNA, 23 nt, Human
uaggggagggguugccacaggcc

SEQ ID NO: 2246495 - RNA, 16 nt, Human
uagggaaaugaaagaa

SEQ ID NO: 2246496 - RNA, 13 nt, Human
uagggaaaugaaa

SEQ ID NO: 2246497 - RNA, 16 nt, Human
uagggaaaaguucaua

SEQ ID NO: 2246498 - RNA, 13 nt, Human
uagggaaagaaag

SEQ ID NO: 2246499 - RNA, 18 nt, Human
uagggaaaacauuccauc

SEQ ID NO: 2246500 - RNA, 16 nt, Human
uagggaaaacauucca

SEQ ID NO: 2246501 - RNA, 13 nt, Human
uaggcauucugga

SEQ ID NO: 2246502 - RNA, 13 nt, Human
uagggaaaacauu

SEQ ID NO: 2246503 - RNA, 13 nt, Human
uagggaagauaau

SEQ ID NO: 2246504 - RNA, 18 nt, Human
uagggagggcggcagggg

SEQ ID NO: 2246505 - RNA, 13 nt, Human
uagggaacucugg

SEQ ID NO: 2246506 - RNA, 15 nt, Human
uagggauucaggcug

SEQ ID NO: 2246507 - RNA, 18 nt, Human
uagggauguucuggcccu

SEQ ID NO: 2246508 - RNA, 16 nt, Human
uagggauucaggcugc

SEQ ID NO: 2246509 - RNA, 15 nt, Human
uagggcaccaggggu

SEQ ID NO: 2246510 - RNA, 20 nt, Human
uagggcaccagggguuucuc

SEQ ID NO: 2246511 - RNA, 17 nt, Human
uagggaucccucaucug

SEQ ID NO: 2246512 - RNA, 15 nt, Human
uagggaacucugggg

SEQ ID NO: 2246513 - RNA, 19 nt, Human
uagggauggggcugugggg

SEQ ID NO: 2246514 - RNA, 23 nt, Human
uagggaucaaccagcuaagaaaa

SEQ ID NO: 2246515 - RNA, 14 nt, Human
uagggaugaguacc

SEQ ID NO: 2246516 - RNA, 17 nt, Human
uaggaaaaguacauuua

SEQ ID NO: 2246517 - RNA, 19 nt, Human
uaggaaaaguacauuuaau

SEQ ID NO: 2246518 - RNA, 16 nt, Human
uaggaaauaaaaccuu

SEQ ID NO: 2246519 - RNA, 14 nt, Human
uaggaaauaaaacc

SEQ ID NO: 2246520 - RNA, 21 nt, Human
uaggaaacaaagcuuagcagg

SEQ ID NO: 2246521 - RNA, 19 nt, Human
uaggaaagaccauuuuucc

SEQ ID NO: 2246522 - RNA, 16 nt, Human
uaggaaaaacugauuu

SEQ ID NO: 2246523 - RNA, 17 nt, Human
uaggaaaaacugauuuu

SEQ ID NO: 2246524 - RNA, 13 nt, Human
uaggauagcauuu

SEQ ID NO: 2246525 - RNA, 23 nt, Human
uaggaguucacuucaucuucuca

SEQ ID NO: 2246526 - RNA, 22 nt, Human
uaggauaugguggguggacagg

SEQ ID NO: 2246527 - RNA, 19 nt, Human
uaggaucagcccucauuuu

SEQ ID NO: 2246528 - RNA, 21 nt, Human
uaggauccagugauccuuaca

SEQ ID NO: 2246529 - RNA, 20 nt, Human
uaggaucauuuguuggaaug

SEQ ID NO: 2246530 - RNA, 21 nt, Human
uaggaguucgagaccagccug

SEQ ID NO: 2246531 - RNA, 17 nt, Human
uaggaguucgagaccag

SEQ ID NO: 2246532 - RNA, 23 nt, Human
uaggaguucgagaccagccuggc

SEQ ID NO: 2246533 - RNA, 17 nt, Human
uaggaaauaaaaccuuu

SEQ ID NO: 2246534 - RNA, 17 nt, Human
uaggagugugugauuuu

SEQ ID NO: 2246535 - RNA, 21 nt, Human
uaggaguucacuucaucuucu

SEQ ID NO: 2246536 - RNA, 13 nt, Human
uaggauguuuuuc

SEQ ID NO: 2246537 - RNA, 18 nt, Human
uaggauguuuuucaugaa

SEQ ID NO: 2246538 - RNA, 19 nt, Human
uaggauguuuuucaugaaa

SEQ ID NO: 2246539 - RNA, 13 nt, Human
uaggauguugaaa

SEQ ID NO: 2246540 - RNA, 12 nt, Human
uaggauuuaaca

SEQ ID NO: 2246541 - RNA, 21 nt, Human
uaggauuuaacagucauuuaa

SEQ ID NO: 2246542 - RNA, 22 nt, Human
uaggauuuaacagucauuuaaa

SEQ ID NO: 2246543 - RNA, 14 nt, Human
uaggcaggaccugu

SEQ ID NO: 2246544 - RNA, 17 nt, Human
uaggcaggacaugcuga

SEQ ID NO: 2246545 - RNA, 22 nt, Human
uaggcaggacaugcugaagcca

SEQ ID NO: 2246546 - RNA, 15 nt, Human
uaggcaggaccugug

SEQ ID NO: 2246547 - RNA, 12 nt, Human
uaggcaggacca

SEQ ID NO: 2246548 - RNA, 15 nt, Human
uaggcagggauuuga

SEQ ID NO: 2246549 - RNA, 17 nt, Human
uaggcagggauuugagg

SEQ ID NO: 2246550 - RNA, 19 nt, Human
uaggcagggauuugaggag

SEQ ID NO: 2246551 - RNA, 21 nt, Human
uaggcaugagggaucacaggg

SEQ ID NO: 2246552 - RNA, 19 nt, Human
uaggcaucccaggggacca

SEQ ID NO: 2246553 - RNA, 16 nt, Human
uaggcaucccagggga

SEQ ID NO: 2246554 - RNA, 14 nt, Human
uaggcaucccaggg

SEQ ID NO: 2246555 - RNA, 22 nt, Human
uauagcccagccaggccccagg

SEQ ID NO: 2246556 - RNA, 21 nt, Human
uauagccacaucccuuugaaa

SEQ ID NO: 2246557 - RNA, 13 nt, Human
uauagcccagguc

SEQ ID NO: 2246558 - RNA, 16 nt, Human
uauagcuguacaaaua

SEQ ID NO: 2246559 - RNA, 18 nt, Human
uauagcuguacaaauaua

SEQ ID NO: 2246560 - RNA, 22 nt, Human
uauagcuguacaaauauaagaa

SEQ ID NO: 2246561 - RNA, 13 nt, Human
uauagcuguauug

SEQ ID NO: 2246562 - RNA, 14 nt, Human
uauagcuguauuga

SEQ ID NO: 2246563 - RNA, 18 nt, Human
uauagccuaggugacaga

SEQ ID NO: 2246564 - RNA, 23 nt, Human
uauagcaauccauguuaguuuuu

SEQ ID NO: 2246565 - RNA, 12 nt, Human
uauagaugucua

SEQ ID NO: 2246566 - RNA, 21 nt, Human
uauagcuguauugaaucaugu

SEQ ID NO: 2246567 - RNA, 19 nt, Human
uauagcuguauugaaucau

SEQ ID NO: 2246568 - RNA, 20 nt, Human
uauagcuguauugaaucaug

SEQ ID NO: 2246569 - RNA, 19 nt, Human
uauaggaacauaugaaaau

SEQ ID NO: 2246570 - RNA, 12 nt, Human
uauaggagagga

SEQ ID NO: 2246571 - RNA, 15 nt, Human
uauaggaucauuugu

SEQ ID NO: 2246572 - RNA, 23 nt, Human
uauaggaacuuaaauaaugugaa

SEQ ID NO: 2246573 - RNA, 12 nt, Human
uauaggaauuga

SEQ ID NO: 2246574 - RNA, 17 nt, Human
uauaggucacuccuggg

SEQ ID NO: 2246575 - RNA, 14 nt, Human
uauaggucacuccu

SEQ ID NO: 2246576 - RNA, 15 nt, Human
uauaggcaccuacca

SEQ ID NO: 2246577 - RNA, 14 nt, Human
uauaggcuggagaa

SEQ ID NO: 2246578 - RNA, 16 nt, Human
uauaggugcuacaaaa

SEQ ID NO: 2246579 - RNA, 14 nt, Human
uauauauuuuaauu

SEQ ID NO: 2246580 - RNA, 15 nt, Human
uauauauuuauaacu

SEQ ID NO: 2246581 - RNA, 14 nt, Human
uauauauuuauaac

SEQ ID NO: 2246582 - RNA, 11 nt, Human
uauauauuucc

SEQ ID NO: 2246583 - RNA, 22 nt, Human
uauauauuuuugguugucaaua

SEQ ID NO: 2246584 - RNA, 20 nt, Human
uauauauuuuugguugucaa

SEQ ID NO: 2246585 - RNA, 20 nt, Human
uauauccuuucuaacaaaaa

SEQ ID NO: 2246586 - RNA, 16 nt, Human
acacucauugaccuga

SEQ ID NO: 2246587 - RNA, 16 nt, Human
acacucaguuguucaa

SEQ ID NO: 2246588 - RNA, 12 nt, Human
acacucaugcug

SEQ ID NO: 2246589 - RNA, 22 nt, Human
uauaucuauauauaauucugua

SEQ ID NO: 2246590 - RNA, 16 nt, Human
uauaucuauauguacu

SEQ ID NO: 2246591 - RNA, 13 nt, Human
uauaucuaaauug

SEQ ID NO: 2246592 - RNA, 17 nt, Human
uauaucuaaauugaaua

SEQ ID NO: 2246593 - RNA, 18 nt, Human
uauaucuaaauugaauaa

SEQ ID NO: 2246594 - RNA, 13 nt, Human
uauaucuauauau

SEQ ID NO: 2246595 - RNA, 21 nt, Human
uauaucuauauauaauucugu

SEQ ID NO: 2246596 - RNA, 13 nt, Human
uauauauuuauaa

SEQ ID NO: 2246597 - RNA, 22 nt, Human
uauauauugguaacauccuuuc

SEQ ID NO: 2246598 - RNA, 22 nt, Human
uauauauguguguuuaaauaaa

SEQ ID NO: 2246599 - RNA, 14 nt, Human
uauauaugugugug

SEQ ID NO: 2246600 - RNA, 16 nt, Human
uauauauguguaugua

SEQ ID NO: 2246601 - RNA, 17 nt, Human
uauauauguguguuuaa

SEQ ID NO: 2246602 - RNA, 18 nt, Human
uauauauguguguuuaaa

SEQ ID NO: 2246603 - RNA, 14 nt, Human
uauauauguguaug

SEQ ID NO: 2246604 - RNA, 12 nt, Human
uauauaugugua

SEQ ID NO: 2246605 - RNA, 15 nt, Human
uauauaucuaucuua

SEQ ID NO: 2246606 - RNA, 18 nt, Human
uauauaucugcuguccag

SEQ ID NO: 2246607 - RNA, 21 nt, Human
uauauaucugcuguccagaca

SEQ ID NO: 2246608 - RNA, 19 nt, Human
uauauaucugcuucagugg

SEQ ID NO: 2246609 - RNA, 17 nt, Human
uauauaguuuacuauuu

SEQ ID NO: 2246610 - RNA, 10 nt, Human
uauauauaaa

SEQ ID NO: 2246611 - RNA, 22 nt, Human
uauauaguuuauugacaauaau

SEQ ID NO: 2246612 - RNA, 21 nt, Human
uauauaucugcuucaguggag

SEQ ID NO: 2246613 - RNA, 18 nt, Human
uauauaggcaucacauuu

SEQ ID NO: 2246614 - RNA, 21 nt, Human
uauauagguuuuguuugcuau

SEQ ID NO: 2246615 - RNA, 24 nt, Human
uauauagguuuuguuugcuaucuu

SEQ ID NO: 2246616 - RNA, 17 nt, Human
uauauagguugugcaaa

SEQ ID NO: 2246617 - RNA, 12 nt, Human
uauauagguuuu

SEQ ID NO: 2246618 - RNA, 20 nt, Human
uauauagguuuuguuugcua

SEQ ID NO: 2246619 - RNA, 20 nt, Human
uauaacugccuuaaaacuuu

SEQ ID NO: 2246620 - RNA, 19 nt, Human
uauaacuuaaaaaaaugac

SEQ ID NO: 2246621 - RNA, 18 nt, Human
uauaacuuaaaaaaauga

SEQ ID NO: 2246622 - RNA, 19 nt, Human
uauaacugccuuaaaacuu

SEQ ID NO: 2246623 - RNA, 16 nt, Human
uauaacugaaggagaa

SEQ ID NO: 2246624 - RNA, 23 nt, Human
acacuaauuccuuucuauccuac

SEQ ID NO: 2246625 - RNA, 23 nt, Human
uauaacucugcacuacuccucug

SEQ ID NO: 2246626 - RNA, 22 nt, Human
uauaacuuaaaaauguaaauau

SEQ ID NO: 2246627 - RNA, 22 nt, Human
uauaacuuaaaaaaaugacaga

SEQ ID NO: 2246628 - RNA, 20 nt, Human
uauaacuuaaaaauguaaau

SEQ ID NO: 2246629 - RNA, 19 nt, Human
uauaagugauugcugguuu

SEQ ID NO: 2246630 - RNA, 21 nt, Human
uauaacucaucauaaaauaaa

SEQ ID NO: 2246631 - RNA, 20 nt, Human
uauaacucaucauaaaauaa

SEQ ID NO: 2246632 - RNA, 19 nt, Human
uauaacucaucauaaaaua

SEQ ID NO: 2246633 - RNA, 18 nt, Human
uauaacucaucauaaaau

SEQ ID NO: 2246634 - RNA, 17 nt, Human
uauaacucaucauaaaa

SEQ ID NO: 2246635 - RNA, 16 nt, Human
uauaacucaucauaaa

SEQ ID NO: 2246636 - RNA, 17 nt, Human
acacuaauuccuuucua

SEQ ID NO: 2246637 - RNA, 17 nt, Human
acacucaaaucaagaaa

SEQ ID NO: 2246638 - RNA, 18 nt, Human
acacucaaaucaagaaac

SEQ ID NO: 2246639 - RNA, 12 nt, Human
acacuaauuccu

SEQ ID NO: 2246640 - RNA, 21 nt, Human
acacucaaaagcugggcaggu

SEQ ID NO: 2246641 - RNA, 13 nt, Human
acacucaaaucaa

SEQ ID NO: 2246642 - RNA, 15 nt, Human
acacuaaugaggaaa

SEQ ID NO: 2246643 - RNA, 22 nt, Human
acacuaaugaggaaacugcacu

SEQ ID NO: 2246644 - RNA, 14 nt, Human
acacuaagggugua

SEQ ID NO: 2246645 - RNA, 19 nt, Human
acacuaaguuauaguauau

SEQ ID NO: 2246646 - RNA, 23 nt, Human
acacuaaguuauaguauaucugg

SEQ ID NO: 2246647 - RNA, 17 nt, Human
uagucacugagacagcc

SEQ ID NO: 2246648 - RNA, 20 nt, Human
uagucacugagacagcccgg

SEQ ID NO: 2246649 - RNA, 11 nt, Human
uauacaugcca

SEQ ID NO: 2246650 - RNA, 15 nt, Human
uauacaugccaguga

SEQ ID NO: 2246651 - RNA, 18 nt, Human
uauacauaucuuuauuaa

SEQ ID NO: 2246652 - RNA, 15 nt, Human
uauacauaucuuuau

SEQ ID NO: 2246653 - RNA, 21 nt, Human
uauacauaucuuuauuaauca

SEQ ID NO: 2246654 - RNA, 15 nt, Human
uauagaucccccaga

SEQ ID NO: 2246655 - RNA, 22 nt, Human
uauagaugcaagauauuuauau

SEQ ID NO: 2246656 - RNA, 16 nt, Human
uauagaugggaaugaa

SEQ ID NO: 2246657 - RNA, 17 nt, Human
uauagaugggaaugaag

SEQ ID NO: 2246658 - RNA, 19 nt, Human
uauagaugggaaugaagcu

SEQ ID NO: 2246659 - RNA, 13 nt, Human
uauacaugccagu

SEQ ID NO: 2246660 - RNA, 18 nt, Human
uauacauguuuaguauua

SEQ ID NO: 2246661 - RNA, 22 nt, Human
uauacauagcaugacauuucuu

SEQ ID NO: 2246662 - RNA, 16 nt, Human
uauacauagcaugaca

SEQ ID NO: 2246663 - RNA, 22 nt, Human
uauacagaauugugucugcagg

SEQ ID NO: 2246664 - RNA, 15 nt, Human
uauaauuuaacuuca

SEQ ID NO: 2246665 - RNA, 22 nt, Human
uauaauuuaacuucagagggaa

SEQ ID NO: 2246666 - RNA, 19 nt, Human
uauaaguggaggcacuuua

SEQ ID NO: 2246667 - RNA, 14 nt, Human
uauaaguguacaua

SEQ ID NO: 2246668 - RNA, 18 nt, Human
uauaaguggaggcacuuu

SEQ ID NO: 2246669 - RNA, 13 nt, Human
uauaaguguacau

SEQ ID NO: 2246670 - RNA, 13 nt, Human
uauaagugcugua

SEQ ID NO: 2246671 - RNA, 14 nt, Human
uauaagugcuguau

SEQ ID NO: 2246672 - RNA, 15 nt, Human
uauaagugcuguaua

SEQ ID NO: 2246673 - RNA, 16 nt, Human
uauaagugcuguauaa

SEQ ID NO: 2246674 - RNA, 17 nt, Human
uauaagugcuguauaaa

SEQ ID NO: 2246675 - RNA, 19 nt, Human
uauaagugcuguauaaaau

SEQ ID NO: 2246676 - RNA, 20 nt, Human
uauaagugcuguauaaaauc

SEQ ID NO: 2246677 - RNA, 21 nt, Human
uauaagugcuguauaaaauca

SEQ ID NO: 2246678 - RNA, 22 nt, Human
uauacacuuacacuuuaugcac

SEQ ID NO: 2246679 - RNA, 16 nt, Human
uauaauuuaaugcaug

SEQ ID NO: 2246680 - RNA, 11 nt, Human
uauaauuuaau

SEQ ID NO: 2246681 - RNA, 18 nt, Human
uauaauuuaccugaaguc

SEQ ID NO: 2246682 - RNA, 16 nt, Human
uauccccucccaguca

SEQ ID NO: 2246683 - RNA, 22 nt, Human
uaucuaguuuaauuaaucugua

SEQ ID NO: 2246684 - RNA, 16 nt, Human
uaucuauauauaauuc

SEQ ID NO: 2246685 - RNA, 20 nt, Human
uaucuauacauaucuuuauu

SEQ ID NO: 2246686 - RNA, 18 nt, Human
uaucuauacauaucuuua

SEQ ID NO: 2246687 - RNA, 20 nt, Human
uaucuauauauaauucugua

SEQ ID NO: 2246688 - RNA, 21 nt, Human
uaucuauauauaauucuguac

SEQ ID NO: 2246689 - RNA, 13 nt, Human
uaucuauauaugu

SEQ ID NO: 2246690 - RNA, 15 nt, Human
uaucuauauaugugu

SEQ ID NO: 2246691 - RNA, 16 nt, Human
uaucuauauaugugua

SEQ ID NO: 2246692 - RNA, 17 nt, Human
uaucuauauauguguau

SEQ ID NO: 2246693 - RNA, 22 nt, Human
uaucuauauauguguauguacg

SEQ ID NO: 2246694 - RNA, 16 nt, Human
uaucuauauguacuug

SEQ ID NO: 2246695 - RNA, 15 nt, Human
uauccacccagccca

SEQ ID NO: 2246696 - RNA, 14 nt, Human
uauccacccagccc

SEQ ID NO: 2246697 - RNA, 13 nt, Human
uauccacccagcc

SEQ ID NO: 2246698 - RNA, 14 nt, Human
uaucccagaaauua

SEQ ID NO: 2246699 - RNA, 16 nt, Human
uauccccauuucuuuu

SEQ ID NO: 2246700 - RNA, 15 nt, Human
uaucccggcugcccu

SEQ ID NO: 2246701 - RNA, 19 nt, Human
uauccccccccuguauagu

SEQ ID NO: 2246702 - RNA, 21 nt, Human
uauccccccccuguauaguua

SEQ ID NO: 2246703 - RNA, 15 nt, Human
uauccccucccaguc

SEQ ID NO: 2246704 - RNA, 15 nt, Human
uauccccccaucuug

SEQ ID NO: 2246705 - RNA, 17 nt, Human
uauccccccaucuugcu

SEQ ID NO: 2246706 - RNA, 19 nt, Human
uauccccccaucuugcuuc

SEQ ID NO: 2246707 - RNA, 20 nt, Human
uauccccccaucuugcuucc

SEQ ID NO: 2246708 - RNA, 19 nt, Human
uauccaacaucaacaucuu

SEQ ID NO: 2246709 - RNA, 15 nt, Human
uaucagcacgugugg

SEQ ID NO: 2246710 - RNA, 12 nt, Human
uauccacccagc

SEQ ID NO: 2246711 - RNA, 15 nt, Human
uauccaccaccuccc

SEQ ID NO: 2246712 - RNA, 23 nt, Human
uauccacagagagucccacugcc

SEQ ID NO: 2246713 - RNA, 13 nt, Human
uauccaccaccuc

SEQ ID NO: 2246714 - RNA, 21 nt, Human
uauccacagaaacauuuucau

SEQ ID NO: 2246715 - RNA, 22 nt, Human
uauccacagagagucccacugc

SEQ ID NO: 2246716 - RNA, 14 nt, Human
uaucagcacgugug

SEQ ID NO: 2246717 - RNA, 18 nt, Human
uaucagacacucuggcug

SEQ ID NO: 2246718 - RNA, 19 nt, Human
uaucagacacucuggcugg

SEQ ID NO: 2246719 - RNA, 20 nt, Human
uaucagacacucuggcuggu

SEQ ID NO: 2246720 - RNA, 17 nt, Human
uaucagaggccuauaau

SEQ ID NO: 2246721 - RNA, 20 nt, Human
uaucagaggccuauaaugaa

SEQ ID NO: 2246722 - RNA, 16 nt, Human
uaucaccuccccuccu

SEQ ID NO: 2246723 - RNA, 15 nt, Human
uaucaccuccccucc

SEQ ID NO: 2246724 - RNA, 14 nt, Human
uaucaccuccccuc

SEQ ID NO: 2246725 - RNA, 20 nt, Human
uaucaccuccccuccuugcc

SEQ ID NO: 2246726 - RNA, 17 nt, Human
uaucagaauucucagaa

SEQ ID NO: 2246727 - RNA, 13 nt, Human
uaucaccuccccu

SEQ ID NO: 2246728 - RNA, 14 nt, Human
uaucaccucauggc

SEQ ID NO: 2246729 - RNA, 23 nt, Human
uaucaccgugggcucccugacug

SEQ ID NO: 2246730 - RNA, 19 nt, Human
uaucaccgugggcucccug

SEQ ID NO: 2246731 - RNA, 22 nt, Human
uaucacccagaagaaaauagug

SEQ ID NO: 2246732 - RNA, 19 nt, Human
uaucacccagaagaaaaua

SEQ ID NO: 2246733 - RNA, 23 nt, Human
uaucaaauauuagaugugauuua

SEQ ID NO: 2246734 - RNA, 14 nt, Human
uaucacaaaucuua

SEQ ID NO: 2246735 - RNA, 20 nt, Human
uaucacaaaucuuaacuuga

SEQ ID NO: 2246736 - RNA, 16 nt, Human
uaucacaaaucuuaac

SEQ ID NO: 2246737 - RNA, 15 nt, Human
acagacgucccucca

SEQ ID NO: 2246738 - RNA, 15 nt, Human
acagacguaugcuua

SEQ ID NO: 2246739 - RNA, 16 nt, Human
acagacgucccuccac

SEQ ID NO: 2246740 - RNA, 21 nt, Human
uaucaaacuucagcuguacuu

SEQ ID NO: 2246741 - RNA, 20 nt, Human
acagacguaugcuuauuuua

SEQ ID NO: 2246742 - RNA, 21 nt, Human
uaucaaagaccuuguguguau

SEQ ID NO: 2246743 - RNA, 18 nt, Human
uaucaaauauuagaugug

SEQ ID NO: 2246744 - RNA, 19 nt, Human
uaucaaauauuagauguga

SEQ ID NO: 2246745 - RNA, 20 nt, Human
uaucaaauauuagaugugau

SEQ ID NO: 2246746 - RNA, 21 nt, Human
uaucaaauauuagaugugauu

SEQ ID NO: 2246747 - RNA, 21 nt, Human
acagacaggagaaaugcaucc

SEQ ID NO: 2246748 - RNA, 15 nt, Human
acagacaucucugca

SEQ ID NO: 2246749 - RNA, 15 nt, Human
acagacaggcucuua

SEQ ID NO: 2246750 - RNA, 15 nt, Human
acagacaggagaaau

SEQ ID NO: 2246751 - RNA, 14 nt, Human
acagacaggagaaa

SEQ ID NO: 2246752 - RNA, 13 nt, Human
acagacaggcucu

SEQ ID NO: 2246753 - RNA, 17 nt, Human
acagacauucugccagg

SEQ ID NO: 2246754 - RNA, 18 nt, Human
acagaccgaacuguugua

SEQ ID NO: 2246755 - RNA, 19 nt, Human
acagaccgaacuguuguau

SEQ ID NO: 2246756 - RNA, 16 nt, Human
acagaccuaaugcucc

SEQ ID NO: 2246757 - RNA, 14 nt, Human
acagaccuuugaac

SEQ ID NO: 2246758 - RNA, 22 nt, Human
acagaccuggagccccugggug

SEQ ID NO: 2246759 - RNA, 17 nt, Human
acagaccuggagccccu

SEQ ID NO: 2246760 - RNA, 19 nt, Human
acagaccuggagccccugg

SEQ ID NO: 2246761 - RNA, 20 nt, Human
acagaccuggagccccuggg

SEQ ID NO: 2246762 - RNA, 21 nt, Human
acagaccuggagccccugggu

SEQ ID NO: 2246763 - RNA, 22 nt, Human
acacuuuuuuggggauaugcuu

SEQ ID NO: 2246764 - RNA, 23 nt, Human
acacuuuuuuggggauaugcuua

SEQ ID NO: 2246765 - RNA, 22 nt, Human
acacuuuugguuaagucuguuu

SEQ ID NO: 2246766 - RNA, 13 nt, Human
acacuuuugguua

SEQ ID NO: 2246767 - RNA, 22 nt, Human
acacuugguuggguccucacau

SEQ ID NO: 2246768 - RNA, 20 nt, Human
acacuugguuggguccucac

SEQ ID NO: 2246769 - RNA, 17 nt, Human
acacuugguuggguccu

SEQ ID NO: 2246770 - RNA, 20 nt, Human
acacuugccuucuucaccca

SEQ ID NO: 2246771 - RNA, 20 nt, Human
acacuuuucaugugugauuu

SEQ ID NO: 2246772 - RNA, 18 nt, Human
acacuugagaggaugaau

SEQ ID NO: 2246773 - RNA, 18 nt, Human
acacuugccuucuucacc

SEQ ID NO: 2246774 - RNA, 22 nt, Human
acacuuggcccaaguggcagag

SEQ ID NO: 2246775 - RNA, 22 nt, Human
acacuucuucuuggucuuauuu

SEQ ID NO: 2246776 - RNA, 23 nt, Human
acacuucugugagacccccacac

SEQ ID NO: 2246777 - RNA, 14 nt, Human
acacuugagaggau

SEQ ID NO: 2246778 - RNA, 16 nt, Human
acacuugagaggauga

SEQ ID NO: 2246779 - RNA, 21 nt, Human
acacuugagaggaugaaugua

SEQ ID NO: 2246780 - RNA, 20 nt, Human
acacuucugugagaccccca

SEQ ID NO: 2246781 - RNA, 13 nt, Human
acacuuccugucc

SEQ ID NO: 2246782 - RNA, 14 nt, Human
acacuuccugccua

SEQ ID NO: 2246783 - RNA, 18 nt, Human
acacuucccucuguuucu

SEQ ID NO: 2246784 - RNA, 13 nt, Human
acacuuccugccu

SEQ ID NO: 2246785 - RNA, 16 nt, Human
acacuuccuguccaga

SEQ ID NO: 2246786 - RNA, 14 nt, Human
acacuuccugucca

SEQ ID NO: 2246787 - RNA, 19 nt, Human
acacuuccuguccagagag

SEQ ID NO: 2246788 - RNA, 16 nt, Human
acagaaagguuuucuu

SEQ ID NO: 2246789 - RNA, 13 nt, Human
acagaaagcugcc

SEQ ID NO: 2246790 - RNA, 24 nt, Human
acagaaagggcaacaauaaaauag

SEQ ID NO: 2246791 - RNA, 14 nt, Human
acagaaaguggugc

SEQ ID NO: 2246792 - RNA, 22 nt, Human
acagaaaguggugcucaguugu

SEQ ID NO: 2246793 - RNA, 20 nt, Human
acagaaaacgguuaaaacug

SEQ ID NO: 2246794 - RNA, 22 nt, Human
acagaaaacauucugauuugga

SEQ ID NO: 2246795 - RNA, 15 nt, Human
acagaaaauauacug

SEQ ID NO: 2246796 - RNA, 14 nt, Human
acagaaaauauacu

SEQ ID NO: 2246797 - RNA, 13 nt, Human
acagaaaauauac

SEQ ID NO: 2246798 - RNA, 12 nt, Human
acagaaaauaua

SEQ ID NO: 2246799 - RNA, 13 nt, Human
acagacaggagaa

SEQ ID NO: 2246800 - RNA, 11 nt, Human
acagacaggag

SEQ ID NO: 2246801 - RNA, 13 nt, Human
acagaaauguaca

SEQ ID NO: 2246802 - RNA, 19 nt, Human
acagaaaguggugcucagu

SEQ ID NO: 2246803 - RNA, 17 nt, Human
acagaaaguggugcuca

SEQ ID NO: 2246804 - RNA, 18 nt, Human
acagaaaguggugcucag

SEQ ID NO: 2246805 - RNA, 19 nt, Human
acagacauacuaaccagca

SEQ ID NO: 2246806 - RNA, 18 nt, Human
acagacauacuaaccagc

SEQ ID NO: 2246807 - RNA, 16 nt, Human
acacuuaacagaugca

SEQ ID NO: 2246808 - RNA, 14 nt, Human
acacucaugcugaa

SEQ ID NO: 2246809 - RNA, 17 nt, Human
uauaucuauauguacuu

SEQ ID NO: 2246810 - RNA, 13 nt, Human
acacucaugcuga

SEQ ID NO: 2246811 - RNA, 14 nt, Human
acacuuaauacuac

SEQ ID NO: 2246812 - RNA, 16 nt, Human
acacuuacacuuuaug

SEQ ID NO: 2246813 - RNA, 20 nt, Human
acacuguuucaaacuuuacu

SEQ ID NO: 2246814 - RNA, 14 nt, Human
acacuuaacagaug

SEQ ID NO: 2246815 - RNA, 15 nt, Human
acacucaugcugaaa

SEQ ID NO: 2246816 - RNA, 18 nt, Human
acacuguuucaaacuuua

SEQ ID NO: 2246817 - RNA, 17 nt, Human
acacuguuucaaacuuu

SEQ ID NO: 2246818 - RNA, 17 nt, Human
acacucauugaccugag

SEQ ID NO: 2246819 - RNA, 21 nt, Human
acacuuacacuuuaugcacaa

SEQ ID NO: 2246820 - RNA, 18 nt, Human
acacuuacacuuuaugca

SEQ ID NO: 2246821 - RNA, 13 nt, Human
acacuucagagag

SEQ ID NO: 2246822 - RNA, 20 nt, Human
acacuuauuggaacucugcu

SEQ ID NO: 2246823 - RNA, 20 nt, Human
acacuuaaggguuuuagaaa

SEQ ID NO: 2246824 - RNA, 14 nt, Human
acacuuacuguugu

SEQ ID NO: 2246825 - RNA, 23 nt, Human
acacuuacuguuguccuauggga

SEQ ID NO: 2246826 - RNA, 18 nt, Human
acacuucagagagcuggu

SEQ ID NO: 2246827 - RNA, 17 nt, Human
acacuucagagagcugg

SEQ ID NO: 2246828 - RNA, 16 nt, Human
acacuucagagagcug

SEQ ID NO: 2246829 - RNA, 15 nt, Human
acacuucaggcucuu

SEQ ID NO: 2246830 - RNA, 19 nt, Human
acacuucaggcucuucucc

SEQ ID NO: 2246831 - RNA, 22 nt, Human
acacuucaggcucuucuccuuu

SEQ ID NO: 2246832 - RNA, 19 nt, Human
acacuuccaccagccugca

SEQ ID NO: 2246833 - RNA, 15 nt, Human
acacuucccucuguu

SEQ ID NO: 2246834 - RNA, 22 nt, Human
acacuucccucuguuucucuuu

SEQ ID NO: 2246835 - RNA, 14 nt, Human
acacuuccauaauc

SEQ ID NO: 2246836 - RNA, 21 nt, Human
acacuuccaccagccugcacu

SEQ ID NO: 2246837 - RNA, 17 nt, Human
acacuuccaccagccug

SEQ ID NO: 2246838 - RNA, 16 nt, Human
acacuuccaccagccu

SEQ ID NO: 2246839 - RNA, 20 nt, Human
acacuucagagagcugguag

SEQ ID NO: 2246840 - RNA, 19 nt, Human
acacuucagagagcuggua

SEQ ID NO: 2246841 - RNA, 15 nt, Human
acacuuccaccagcc

SEQ ID NO: 2246842 - RNA, 14 nt, Human
uaugggagaaauag

SEQ ID NO: 2246843 - RNA, 22 nt, Human
uauggcccagugucaaguugug

SEQ ID NO: 2246844 - RNA, 16 nt, Human
uaugggaaucaagauu

SEQ ID NO: 2246845 - RNA, 10 nt, Human
uaugggagag

SEQ ID NO: 2246846 - RNA, 21 nt, Human
uaugguaggaacugcugggcu

SEQ ID NO: 2246847 - RNA, 16 nt, Human
uaugggacucaaugca

SEQ ID NO: 2246848 - RNA, 23 nt, Human
uaugggacucaaugcacugacau

SEQ ID NO: 2246849 - RNA, 13 nt, Human
uauggcagugucu

SEQ ID NO: 2246850 - RNA, 19 nt, Human
uaugcucucgcaccuuucc

SEQ ID NO: 2246851 - RNA, 16 nt, Human
uauggcagugucuuuc

SEQ ID NO: 2246852 - RNA, 20 nt, Human
uauggcccuggccuagcaua

SEQ ID NO: 2246853 - RNA, 22 nt, Human
uauggcccuggccuagcauacg

SEQ ID NO: 2246854 - RNA, 21 nt, Human
uauggcccuggccuagcauac

SEQ ID NO: 2246855 - RNA, 15 nt, Human
acagcggaggugugg

SEQ ID NO: 2246856 - RNA, 14 nt, Human
acagcgagaggcag

SEQ ID NO: 2246857 - RNA, 15 nt, Human
acagcgagaggcaga

SEQ ID NO: 2246858 - RNA, 22 nt, Human
acagcgagaggcagagaaagaa

SEQ ID NO: 2246859 - RNA, 19 nt, Human
acagcgagaggcagagaaa

SEQ ID NO: 2246860 - RNA, 12 nt, Human
acagcgcugggu

SEQ ID NO: 2246861 - RNA, 13 nt, Human
acagcggccccug

SEQ ID NO: 2246862 - RNA, 16 nt, Human
acagcggaggugugga

SEQ ID NO: 2246863 - RNA, 18 nt, Human
acagcggcuggacuugga

SEQ ID NO: 2246864 - RNA, 22 nt, Human
acagcuaaucagcauucucacu

SEQ ID NO: 2246865 - RNA, 19 nt, Human
acagcggccccugcauccc

SEQ ID NO: 2246866 - RNA, 15 nt, Human
acagcggccccugca

SEQ ID NO: 2246867 - RNA, 16 nt, Human
acagcggccccugcau

SEQ ID NO: 2246868 - RNA, 18 nt, Human
acagcgagacuccgucuc

SEQ ID NO: 2246869 - RNA, 17 nt, Human
acagcgagacuccgucu

SEQ ID NO: 2246870 - RNA, 20 nt, Human
acagcgacauagcccauccc

SEQ ID NO: 2246871 - RNA, 19 nt, Human
uauggugccaauggaaccu

SEQ ID NO: 2246872 - RNA, 13 nt, Human
uauggugccaaug

SEQ ID NO: 2246873 - RNA, 15 nt, Human
uauggugccaaugga

SEQ ID NO: 2246874 - RNA, 12 nt, Human
uauggugagaug

SEQ ID NO: 2246875 - RNA, 14 nt, Human
uauggugagaugca

SEQ ID NO: 2246876 - RNA, 20 nt, Human
uauggugagaugcagcugga

SEQ ID NO: 2246877 - RNA, 20 nt, Human
uaugguauaaugguugacug

SEQ ID NO: 2246878 - RNA, 13 nt, Human
uaugguauaaugg

SEQ ID NO: 2246879 - RNA, 22 nt, Human
uauggucaacacuuaaggguuu

SEQ ID NO: 2246880 - RNA, 14 nt, Human
uaugguauuugagu

SEQ ID NO: 2246881 - RNA, 20 nt, Human
uauggucaucuuuuucucua

SEQ ID NO: 2246882 - RNA, 15 nt, Human
uauggucauagccca

SEQ ID NO: 2246883 - RNA, 17 nt, Human
uaugccagcucaguccc

SEQ ID NO: 2246884 - RNA, 14 nt, Human
uaugccagcucagu

SEQ ID NO: 2246885 - RNA, 22 nt, Human
uaugccauagcaagauugcuua

SEQ ID NO: 2246886 - RNA, 14 nt, Human
uaugccaugaugga

SEQ ID NO: 2246887 - RNA, 17 nt, Human
uaugccaaagaucacuu

SEQ ID NO: 2246888 - RNA, 22 nt, Human
uaugccacgggaaguuuagaga

SEQ ID NO: 2246889 - RNA, 17 nt, Human
uaugccaugauggaaau

SEQ ID NO: 2246890 - RNA, 12 nt, Human
uaugcccaguuu

SEQ ID NO: 2246891 - RNA, 20 nt, Human
uaugcccaguuucugccucu

SEQ ID NO: 2246892 - RNA, 15 nt, Human
uaugccccauucaac

SEQ ID NO: 2246893 - RNA, 18 nt, Human
uaugcccaguuucugccu

SEQ ID NO: 2246894 - RNA, 14 nt, Human
uauggcagcgaaag

SEQ ID NO: 2246895 - RNA, 18 nt, Human
uaugauauugcauaugca

SEQ ID NO: 2246896 - RNA, 17 nt, Human
uaugauacuugaaaauu

SEQ ID NO: 2246897 - RNA, 15 nt, Human
uaugauauuuucugu

SEQ ID NO: 2246898 - RNA, 22 nt, Human
uaugauauuuucugugccugaa

SEQ ID NO: 2246899 - RNA, 22 nt, Human
uaugcaugaaguaauaugcaca

SEQ ID NO: 2246900 - RNA, 21 nt, Human
uaugcauggugccccaggacc

SEQ ID NO: 2246901 - RNA, 20 nt, Human
uaugcauggugccccaggac

SEQ ID NO: 2246902 - RNA, 18 nt, Human
uaugcauggugccccagg

SEQ ID NO: 2246903 - RNA, 23 nt, Human
uaugcauggugccccaggaccag

SEQ ID NO: 2246904 - RNA, 22 nt, Human
uaugcauggugccccaggacca

SEQ ID NO: 2246905 - RNA, 20 nt, Human
uaugcauggaaaccugaaaa

SEQ ID NO: 2246906 - RNA, 22 nt, Human
uaugcaugguguagaugcccug

SEQ ID NO: 2246907 - RNA, 16 nt, Human
uaugcaugugaagaaa

SEQ ID NO: 2246908 - RNA, 15 nt, Human
uaugcaugugaagaa

SEQ ID NO: 2246909 - RNA, 12 nt, Human
acagcaagucag

SEQ ID NO: 2246910 - RNA, 16 nt, Human
acagcaagucaggguu

SEQ ID NO: 2246911 - RNA, 15 nt, Human
acagauuuuuacaaa

SEQ ID NO: 2246912 - RNA, 14 nt, Human
acagcacagagaag

SEQ ID NO: 2246913 - RNA, 13 nt, Human
acagcacagagaa

SEQ ID NO: 2246914 - RNA, 12 nt, Human
acagcacagcca

SEQ ID NO: 2246915 - RNA, 22 nt, Human
acagcacagagaagacaaaauu

SEQ ID NO: 2246916 - RNA, 15 nt, Human
acagcacagagaaga

SEQ ID NO: 2246917 - RNA, 21 nt, Human
acagcacagagaagacaaaau

SEQ ID NO: 2246918 - RNA, 12 nt, Human
acagauuuguga

SEQ ID NO: 2246919 - RNA, 22 nt, Human
acagauuugagcucagcccugg

SEQ ID NO: 2246920 - RNA, 17 nt, Human
acagauuuugauagcaa

SEQ ID NO: 2246921 - RNA, 19 nt, Human
acagauuuugauagcaaag

SEQ ID NO: 2246922 - RNA, 20 nt, Human
acagauuuugauagcaaagc

SEQ ID NO: 2246923 - RNA, 20 nt, Human
acagauuuugggguuguguu

SEQ ID NO: 2246924 - RNA, 22 nt, Human
acagauuuugggguuguguugu

SEQ ID NO: 2246925 - RNA, 19 nt, Human
uaucuauauguacuuguca

SEQ ID NO: 2246926 - RNA, 13 nt, Human
acagauuugugaa

SEQ ID NO: 2246927 - RNA, 14 nt, Human
acagauuugugaac

SEQ ID NO: 2246928 - RNA, 15 nt, Human
acagauuugugaacu

SEQ ID NO: 2246929 - RNA, 21 nt, Human
acagauuugugaacucagcca

SEQ ID NO: 2246930 - RNA, 22 nt, Human
acagauuugugaacucagccaa

SEQ ID NO: 2246931 - RNA, 17 nt, Human
acagcagccccugcaca

SEQ ID NO: 2246932 - RNA, 15 nt, Human
acagcccccucugcc

SEQ ID NO: 2246933 - RNA, 15 nt, Human
acagcagagguucuu

SEQ ID NO: 2246934 - RNA, 19 nt, Human
acagcacgggggccaagga

SEQ ID NO: 2246935 - RNA, 12 nt, Human
acagcacuacuc

SEQ ID NO: 2246936 - RNA, 13 nt, Human
acagcacuacucu

SEQ ID NO: 2246937 - RNA, 14 nt, Human
acagcacuacucug

SEQ ID NO: 2246938 - RNA, 15 nt, Human
acagcacuacucugu

SEQ ID NO: 2246939 - RNA, 20 nt, Human
acagcacuacucugugccag

SEQ ID NO: 2246940 - RNA, 17 nt, Human
acagcacuacucugugc

SEQ ID NO: 2246941 - RNA, 19 nt, Human
acagcacuggcucucucca

SEQ ID NO: 2246942 - RNA, 20 nt, Human
acagcacuggcucucuccag

SEQ ID NO: 2246943 - RNA, 22 nt, Human
acagcacuggcucucuccagga

SEQ ID NO: 2246944 - RNA, 16 nt, Human
acagccccuccuccau

SEQ ID NO: 2246945 - RNA, 14 nt, Human
acagccccuccucc

SEQ ID NO: 2246946 - RNA, 15 nt, Human
acagcccgggcucug

SEQ ID NO: 2246947 - RNA, 23 nt, Human
acagcccuccaucuaaacugccc

SEQ ID NO: 2246948 - RNA, 16 nt, Human
acagcccgggcucugc

SEQ ID NO: 2246949 - RNA, 14 nt, Human
uaugaaaaauauga

SEQ ID NO: 2246950 - RNA, 18 nt, Human
uaugaaaaacaaaaauaa

SEQ ID NO: 2246951 - RNA, 18 nt, Human
uaugaaaaauaugauauu

SEQ ID NO: 2246952 - RNA, 13 nt, Human
uaugaaaacuuau

SEQ ID NO: 2246953 - RNA, 15 nt, Human
uaugaaaacuuauga

SEQ ID NO: 2246954 - RNA, 17 nt, Human
uaugaaacuuaggaagg

SEQ ID NO: 2246955 - RNA, 24 nt, Human
uaugaagcucaccuguugcuuaca

SEQ ID NO: 2246956 - RNA, 21 nt, Human
acagcccugucagugcagccc

SEQ ID NO: 2246957 - RNA, 20 nt, Human
acagcccugucagugcagcc

SEQ ID NO: 2246958 - RNA, 19 nt, Human
acagcccuucuuuccacag

SEQ ID NO: 2246959 - RNA, 13 nt, Human
acagcccugucag

SEQ ID NO: 2246960 - RNA, 12 nt, Human
acagcccuguca

SEQ ID NO: 2246961 - RNA, 14 nt, Human
acagcccucccgcc

SEQ ID NO: 2246962 - RNA, 15 nt, Human
acagcccucccgccc

SEQ ID NO: 2246963 - RNA, 18 nt, Human
acagcccucccgccccuu

SEQ ID NO: 2246964 - RNA, 21 nt, Human
acagcccucccgccccuuccc

SEQ ID NO: 2246965 - RNA, 22 nt, Human
acagcccucccgccccuucccc

SEQ ID NO: 2246966 - RNA, 20 nt, Human
uaugaagcuuuuaugugaaa

SEQ ID NO: 2246967 - RNA, 22 nt, Human
uaugaagcuuuuaugugaaaca

SEQ ID NO: 2246968 - RNA, 23 nt, Human
uaugaagcuuuuaugugaaacau

SEQ ID NO: 2246969 - RNA, 21 nt, Human
uaugaaggcuguacacugcac

SEQ ID NO: 2246970 - RNA, 16 nt, Human
uaugaaguauauaaug

SEQ ID NO: 2246971 - RNA, 23 nt, Human
uaugaggcauuuguuugaacuga

SEQ ID NO: 2246972 - RNA, 16 nt, Human
uaugaggcauuuggca

SEQ ID NO: 2246973 - RNA, 14 nt, Human
uaugaaguauauaa

SEQ ID NO: 2246974 - RNA, 15 nt, Human
uaugaaguauauaau

SEQ ID NO: 2246975 - RNA, 21 nt, Human
uaugaggcauuuguuugaacu

SEQ ID NO: 2246976 - RNA, 15 nt, Human
uaugaggcauuuguu

SEQ ID NO: 2246977 - RNA, 14 nt, Human
uaugaggcauuugu

SEQ ID NO: 2246978 - RNA, 13 nt, Human
acagcuacacaga

SEQ ID NO: 2246979 - RNA, 21 nt, Human
acagcuaugggagccccaggg

SEQ ID NO: 2246980 - RNA, 17 nt, Human
acagcuaugggagcccc

SEQ ID NO: 2246981 - RNA, 16 nt, Human
acagcuaugggagccc

SEQ ID NO: 2246982 - RNA, 21 nt, Human
acagcucagcuuuuugucuuu

SEQ ID NO: 2246983 - RNA, 23 nt, Human
acagcucaagucuucccugauca

SEQ ID NO: 2246984 - RNA, 20 nt, Human
acagcucaagucuucccuga

SEQ ID NO: 2246985 - RNA, 18 nt, Human
acagcucagaaguuucuu

SEQ ID NO: 2246986 - RNA, 15 nt, Human
acagcuaaugggaca

SEQ ID NO: 2246987 - RNA, 16 nt, Human
acagcuaaugggacac

SEQ ID NO: 2246988 - RNA, 17 nt, Human
acagcuaaugggacacu

SEQ ID NO: 2246989 - RNA, 19 nt, Human
acagcuaaugggacacuaa

SEQ ID NO: 2246990 - RNA, 16 nt, Human
acagcugucccuguca

SEQ ID NO: 2246991 - RNA, 15 nt, Human
acagcugucccuguc

SEQ ID NO: 2246992 - RNA, 18 nt, Human
acagcugucccugucacc

SEQ ID NO: 2246993 - RNA, 14 nt, Human
acagcugucccugu

SEQ ID NO: 2246994 - RNA, 15 nt, Human
acagcuucagccagg

SEQ ID NO: 2246995 - RNA, 17 nt, Human
acagcuucagccaggag

SEQ ID NO: 2246996 - RNA, 18 nt, Human
acagcuucagccaggagc

SEQ ID NO: 2246997 - RNA, 19 nt, Human
acagcuguuuaagaugggc

SEQ ID NO: 2246998 - RNA, 15 nt, Human
acagcuguuuaagau

SEQ ID NO: 2246999 - RNA, 17 nt, Human
acagcuguuuaagaugg

SEQ ID NO: 2247000 - RNA, 14 nt, Human
acagcuguuuaaga

SEQ ID NO: 2247001 - RNA, 14 nt, Human
acagcuguaugauu

SEQ ID NO: 2247002 - RNA, 19 nt, Human
acagcuguaugauucccag

SEQ ID NO: 2247003 - RNA, 20 nt, Human
acagcuguaugauucccagc

SEQ ID NO: 2247004 - RNA, 23 nt, Human
acagcuguaugauucccagccag

SEQ ID NO: 2247005 - RNA, 20 nt, Human
acagcuucucauccugcagg

SEQ ID NO: 2247006 - RNA, 22 nt, Human
acagcuuccccucucuccuccu

SEQ ID NO: 2247007 - RNA, 22 nt, Human
acagcuucagguuaucgaaaua

SEQ ID NO: 2247008 - RNA, 17 nt, Human
acagcuugaccgugagg

SEQ ID NO: 2247009 - RNA, 20 nt, Human
acagcuugaccgugaggcca

SEQ ID NO: 2247010 - RNA, 21 nt, Human
acagcuugaccgugaggccag

SEQ ID NO: 2247011 - RNA, 21 nt, Human
acagcuucagccaggagcugg

SEQ ID NO: 2247012 - RNA, 22 nt, Human
acagcuucagccaggagcuggg

SEQ ID NO: 2247013 - RNA, 13 nt, Human
acagcuucagguu

SEQ ID NO: 2247014 - RNA, 15 nt, Human
acagcuucagguuau

SEQ ID NO: 2247015 - RNA, 20 nt, Human
acagcuucagguuaucgaaa

SEQ ID NO: 2247016 - RNA, 17 nt, Human
acagcuucauuuccugu

SEQ ID NO: 2247017 - RNA, 19 nt, Human
acagcuucauuuccugugu

SEQ ID NO: 2247018 - RNA, 21 nt, Human
acagcuucauuuccugugucu

SEQ ID NO: 2247019 - RNA, 21 nt, Human
acagcuucucauccugcaggc

SEQ ID NO: 2247020 - RNA, 20 nt, Human
acagcuuccccucucuccuc

SEQ ID NO: 2247021 - RNA, 15 nt, Human
acagcuugaccugag

SEQ ID NO: 2247022 - RNA, 17 nt, Human
acagcuugaccugaggc

SEQ ID NO: 2247023 - RNA, 19 nt, Human
acagcuugaccugaggcug

SEQ ID NO: 2247024 - RNA, 21 nt, Human
acagcuugaccugaggcugug

SEQ ID NO: 2247025 - RNA, 22 nt, Human
acagcuugaccugaggcugugg

SEQ ID NO: 2247026 - RNA, 22 nt, Human
acagcuugaccgugaggccaga

SEQ ID NO: 2247027 - RNA, 23 nt, Human
acagcuugaccgugaggccagag

SEQ ID NO: 2247028 - RNA, 18 nt, Human
acaggaaaagcugcugac

SEQ ID NO: 2247029 - RNA, 19 nt, Human
acaggaaaagcugcugaca

SEQ ID NO: 2247030 - RNA, 20 nt, Human
acaggaaaagcugcugacag

SEQ ID NO: 2247031 - RNA, 21 nt, Human
acaggaaaagcugcugacagu

SEQ ID NO: 2247032 - RNA, 11 nt, Human
acaggagaaau

SEQ ID NO: 2247033 - RNA, 15 nt, Human
acaggagagaaaggg

SEQ ID NO: 2247034 - RNA, 14 nt, Human
acaggagaccuggc

SEQ ID NO: 2247035 - RNA, 16 nt, Human
acaggacucugccucc

SEQ ID NO: 2247036 - RNA, 15 nt, Human
acaggacucugccuc

SEQ ID NO: 2247037 - RNA, 15 nt, Human
acaggcagauacagg

SEQ ID NO: 2247038 - RNA, 13 nt, Human
acaggagcuggga

SEQ ID NO: 2247039 - RNA, 19 nt, Human
acaggagagaaaggggaug

SEQ ID NO: 2247040 - RNA, 18 nt, Human
acaggagagaaaggggau

SEQ ID NO: 2247041 - RNA, 22 nt, Human
acaggaaagggaaggccccaca

SEQ ID NO: 2247042 - RNA, 19 nt, Human
acaggaaagggaaggcccc

SEQ ID NO: 2247043 - RNA, 16 nt, Human
acaggaaagggaaggc

SEQ ID NO: 2247044 - RNA, 23 nt, Human
acaggaaaauccucuggcuggcu

SEQ ID NO: 2247045 - RNA, 22 nt, Human
acaggaaccacaagacugcaca

SEQ ID NO: 2247046 - RNA, 18 nt, Human
acaggaaaauccucuggc

SEQ ID NO: 2247047 - RNA, 17 nt, Human
acaggaaaauccucugg

SEQ ID NO: 2247048 - RNA, 16 nt, Human
acaggaaaauccucug

SEQ ID NO: 2247049 - RNA, 22 nt, Human
acagcuugagccgggccccugg

SEQ ID NO: 2247050 - RNA, 23 nt, Human
acagcuugaccugaggcuguggu

SEQ ID NO: 2247051 - RNA, 16 nt, Human
acagcuugagccgggc

SEQ ID NO: 2247052 - RNA, 21 nt, Human
acagcuugagccgggccccug

SEQ ID NO: 2247053 - RNA, 20 nt, Human
acaggaaaauuuuaaaaaua

SEQ ID NO: 2247054 - RNA, 22 nt, Human
acaggcccggcgcgguggcuca

SEQ ID NO: 2247055 - RNA, 23 nt, Human
acaggcccagcauugcugguucu

SEQ ID NO: 2247056 - RNA, 21 nt, Human
acaggcccccuugaguggggu

SEQ ID NO: 2247057 - RNA, 12 nt, Human
acaggcccccuu

SEQ ID NO: 2247058 - RNA, 20 nt, Human
acaggcccagcauugcuggu

SEQ ID NO: 2247059 - RNA, 22 nt, Human
acaggcccagcauugcugguuc

SEQ ID NO: 2247060 - RNA, 22 nt, Human
acaggcccaagagaugaagagu

SEQ ID NO: 2247061 - RNA, 11 nt, Human
acaggcccagc

SEQ ID NO: 2247062 - RNA, 18 nt, Human
acaggcccaagagaugaa

SEQ ID NO: 2247063 - RNA, 12 nt, Human
acaggcccagca

SEQ ID NO: 2247064 - RNA, 13 nt, Human
acaggcccagcau

SEQ ID NO: 2247065 - RNA, 15 nt, Human
acaggcccagcauug

SEQ ID NO: 2247066 - RNA, 18 nt, Human
acaggcccagcauugcug

SEQ ID NO: 2247067 - RNA, 16 nt, Human
acaggcccggcuccag

SEQ ID NO: 2247068 - RNA, 17 nt, Human
acaggcccggcuccagg

SEQ ID NO: 2247069 - RNA, 14 nt, Human
acaggcagcauuua

SEQ ID NO: 2247070 - RNA, 14 nt, Human
acaggcagcagaga

SEQ ID NO: 2247071 - RNA, 12 nt, Human
acaggcagcaga

SEQ ID NO: 2247072 - RNA, 13 nt, Human
acaggcagcagag

SEQ ID NO: 2247073 - RNA, 16 nt, Human
acaggcagccuggaca

SEQ ID NO: 2247074 - RNA, 17 nt, Human
acaggcagcacagagac

SEQ ID NO: 2247075 - RNA, 13 nt, Human
acaggcagcacag

SEQ ID NO: 2247076 - RNA, 17 nt, Human
acaggaggacaauucau

SEQ ID NO: 2247077 - RNA, 20 nt, Human
acaggaggacaauucaugaa

SEQ ID NO: 2247078 - RNA, 14 nt, Human
acaggagcugggau

SEQ ID NO: 2247079 - RNA, 15 nt, Human
acaggaggacaauuc

SEQ ID NO: 2247080 - RNA, 16 nt, Human
acaggaggacaauuca

SEQ ID NO: 2247081 - RNA, 20 nt, Human
acaggcagcuuuaaccauua

SEQ ID NO: 2247082 - RNA, 22 nt, Human
acaggcagccuggacauagaga

SEQ ID NO: 2247083 - RNA, 22 nt, Human
acaggcagcgauggucucagaa

SEQ ID NO: 2247084 - RNA, 21 nt, Human
acaggcagcuggaugagacuu

SEQ ID NO: 2247085 - RNA, 21 nt, Human
uaugucucgugguaggacugu

SEQ ID NO: 2247086 - RNA, 12 nt, Human
uaugucuaaaga

SEQ ID NO: 2247087 - RNA, 16 nt, Human
uaugucuaaagagcuu

SEQ ID NO: 2247088 - RNA, 12 nt, Human
uaugucuauuua

SEQ ID NO: 2247089 - RNA, 13 nt, Human
uaugucuauuuaa

SEQ ID NO: 2247090 - RNA, 19 nt, Human
uaugucucuucugagcuau

SEQ ID NO: 2247091 - RNA, 14 nt, Human
uaugucucuucuga

SEQ ID NO: 2247092 - RNA, 15 nt, Human
uaugucuauuuaagc

SEQ ID NO: 2247093 - RNA, 12 nt, Human
uaugugcacugu

SEQ ID NO: 2247094 - RNA, 21 nt, Human
uaugugauuuuaacucugucu

SEQ ID NO: 2247095 - RNA, 19 nt, Human
uaugugauuuuaacucugu

SEQ ID NO: 2247096 - RNA, 18 nt, Human
uaugugauuuuaacucug

SEQ ID NO: 2247097 - RNA, 16 nt, Human
uaugugauuuuaacuc

SEQ ID NO: 2247098 - RNA, 10 nt, Human
uaugucuguu

SEQ ID NO: 2247099 - RNA, 15 nt, Human
uaugucccuugcugu

SEQ ID NO: 2247100 - RNA, 15 nt, Human
uaugucccuucacau

SEQ ID NO: 2247101 - RNA, 20 nt, Human
uaugucccuucacauaguuu

SEQ ID NO: 2247102 - RNA, 13 nt, Human
uauguccuaagga

SEQ ID NO: 2247103 - RNA, 17 nt, Human
uauguccacuguguaua

SEQ ID NO: 2247104 - RNA, 23 nt, Human
uauguccacuguguauagaagua

SEQ ID NO: 2247105 - RNA, 16 nt, Human
acaggccgcccugcgg

SEQ ID NO: 2247106 - RNA, 11 nt, Human
acaggccuccc

SEQ ID NO: 2247107 - RNA, 13 nt, Human
acaggccucccug

SEQ ID NO: 2247108 - RNA, 15 nt, Human
acaggccugagauuu

SEQ ID NO: 2247109 - RNA, 16 nt, Human
acaggccucccuguuu

SEQ ID NO: 2247110 - RNA, 17 nt, Human
acaggccugagauuuca

SEQ ID NO: 2247111 - RNA, 21 nt, Human
acaggccugagauuucaucug

SEQ ID NO: 2247112 - RNA, 13 nt, Human
acaggcccuuccu

SEQ ID NO: 2247113 - RNA, 23 nt, Human
acaggcccucccuguuccccaga

SEQ ID NO: 2247114 - RNA, 22 nt, Human
acaggcccucccuguuccccag

SEQ ID NO: 2247115 - RNA, 21 nt, Human
acaggcccucccuguucccca

SEQ ID NO: 2247116 - RNA, 18 nt, Human
acaggcccuuuccucagg

SEQ ID NO: 2247117 - RNA, 19 nt, Human
acaggcccuuuccucaggc

SEQ ID NO: 2247118 - RNA, 20 nt, Human
acaggcccuuuccucaggca

SEQ ID NO: 2247119 - RNA, 21 nt, Human
acaggcccuuuccucaggcaa

SEQ ID NO: 2247120 - RNA, 15 nt, Human
acaggcccuuccucu

SEQ ID NO: 2247121 - RNA, 22 nt, Human
acaggcccuuccucuccacugc

SEQ ID NO: 2247122 - RNA, 18 nt, Human
acaggcccggcuccaggc

SEQ ID NO: 2247123 - RNA, 20 nt, Human
acaggcccggcuccaggcuc

SEQ ID NO: 2247124 - RNA, 21 nt, Human
acaggcccggcuccaggcucc

SEQ ID NO: 2247125 - RNA, 22 nt, Human
acaggcccggcuccaggcuccu

SEQ ID NO: 2247126 - RNA, 22 nt, Human
aauuaaguuagggaauggcaca

SEQ ID NO: 2247127 - RNA, 14 nt, Human
aauuaaguuaucuu

SEQ ID NO: 2247128 - RNA, 23 nt, Human
aauuaauaaaaaauggaaagaau

SEQ ID NO: 2247129 - RNA, 15 nt, Human
aauuaauaaucuuau

SEQ ID NO: 2247130 - RNA, 14 nt, Human
aauuaaguaucuga

SEQ ID NO: 2247131 - RNA, 13 nt, Human
aauuaaguaucug

SEQ ID NO: 2247132 - RNA, 11 nt, Human
aauuaauaaau

SEQ ID NO: 2247133 - RNA, 21 nt, Human
uacauuagucauucaauaaau

SEQ ID NO: 2247134 - RNA, 15 nt, Human
uacauucaauguuua

SEQ ID NO: 2247135 - RNA, 15 nt, Human
uacauucauuuagcu

SEQ ID NO: 2247136 - RNA, 13 nt, Human
uacauucauuuag

SEQ ID NO: 2247137 - RNA, 17 nt, Human
uacauuuaugauuuaau

SEQ ID NO: 2247138 - RNA, 12 nt, Human
uacauucuguua

SEQ ID NO: 2247139 - RNA, 15 nt, Human
uacauuuccaaauga

SEQ ID NO: 2247140 - RNA, 23 nt, Human
uacauuuaugauuuaauaaaaua

SEQ ID NO: 2247141 - RNA, 18 nt, Human
uacauuuaugauuuaaua

SEQ ID NO: 2247142 - RNA, 19 nt, Human
uacauuuaugauuuaauaa

SEQ ID NO: 2247143 - RNA, 20 nt, Human
uacauuuaugauuuaauaaa

SEQ ID NO: 2247144 - RNA, 22 nt, Human
uacauuuaugauuuaauaaaau

SEQ ID NO: 2247145 - RNA, 13 nt, Human
uacauuuccuaaa

SEQ ID NO: 2247146 - RNA, 16 nt, Human
uacauuucugaaauga

SEQ ID NO: 2247147 - RNA, 14 nt, Human
uacauuucugaaau

SEQ ID NO: 2247148 - RNA, 22 nt, Human
uacauuucuccuuugauaaaau

SEQ ID NO: 2247149 - RNA, 23 nt, Human
uacauuucuccuuugauaaaaua

SEQ ID NO: 2247150 - RNA, 21 nt, Human
uacauuuccaaauucacaagu

SEQ ID NO: 2247151 - RNA, 16 nt, Human
uacauuuccaaaugaa

SEQ ID NO: 2247152 - RNA, 16 nt, Human
uacauuucccugugcu

SEQ ID NO: 2247153 - RNA, 18 nt, Human
uacauuucuccuuugaua

SEQ ID NO: 2247154 - RNA, 12 nt, Human
uaccagcagagc

SEQ ID NO: 2247155 - RNA, 18 nt, Human
uaccagaugaugggggag

SEQ ID NO: 2247156 - RNA, 22 nt, Human
uacauuucuuagacuacauuua

SEQ ID NO: 2247157 - RNA, 19 nt, Human
uaccagaguuguucugucu

SEQ ID NO: 2247158 - RNA, 15 nt, Human
uaccagauaaaauua

SEQ ID NO: 2247159 - RNA, 18 nt, Human
uaccagccaguaaauggg

SEQ ID NO: 2247160 - RNA, 22 nt, Human
uaccagcagagcaccuuagaca

SEQ ID NO: 2247161 - RNA, 13 nt, Human
uaccagcagagca

SEQ ID NO: 2247162 - RNA, 14 nt, Human
uaccagcagagcac

SEQ ID NO: 2247163 - RNA, 16 nt, Human
uaccaugucacugugg

SEQ ID NO: 2247164 - RNA, 16 nt, Human
uaccaugugccugauc

SEQ ID NO: 2247165 - RNA, 18 nt, Human
uaccagugaaccaaagag

SEQ ID NO: 2247166 - RNA, 14 nt, Human
uaccaugucacugu

SEQ ID NO: 2247167 - RNA, 15 nt, Human
uaccaugucacugug

SEQ ID NO: 2247168 - RNA, 15 nt, Human
uaccaugugccugau

SEQ ID NO: 2247169 - RNA, 11 nt, Human
uaccagugugg

SEQ ID NO: 2247170 - RNA, 15 nt, Human
uaccagugaaccaaa

SEQ ID NO: 2247171 - RNA, 16 nt, Human
uaccagugaaccaaag

SEQ ID NO: 2247172 - RNA, 16 nt, Human
uaccaugccauuuaaa

SEQ ID NO: 2247173 - RNA, 23 nt, Human
uacccccugcaaagcccagcuug

SEQ ID NO: 2247174 - RNA, 19 nt, Human
uacccccugcaaagcccag

SEQ ID NO: 2247175 - RNA, 15 nt, Human
uacccccugcaaagc

SEQ ID NO: 2247176 - RNA, 17 nt, Human
uacccccuccuucagac

SEQ ID NO: 2247177 - RNA, 16 nt, Human
uacccccuccuucaga

SEQ ID NO: 2247178 - RNA, 13 nt, Human
uacccccuccuuc

SEQ ID NO: 2247179 - RNA, 23 nt, Human
uaccauucagugauuacugucaa

SEQ ID NO: 2247180 - RNA, 14 nt, Human
uaccauucagugau

SEQ ID NO: 2247181 - RNA, 16 nt, Human
uaccagguugaaagac

SEQ ID NO: 2247182 - RNA, 15 nt, Human
uaccagguugaaaga

SEQ ID NO: 2247183 - RNA, 14 nt, Human
uaccagguugaaag

SEQ ID NO: 2247184 - RNA, 14 nt, Human
uaccagguguucua

SEQ ID NO: 2247185 - RNA, 22 nt, Human
uaccaggucuccuccaccgcca

SEQ ID NO: 2247186 - RNA, 18 nt, Human
uaccaggucuccuccacc

SEQ ID NO: 2247187 - RNA, 20 nt, Human
uaccaggucuccuccaccgc

SEQ ID NO: 2247188 - RNA, 22 nt, Human
uaccaggccgccccagccucug

SEQ ID NO: 2247189 - RNA, 14 nt, Human
uaccaggucuccuc

SEQ ID NO: 2247190 - RNA, 16 nt, Human
uaccaggucuccucca

SEQ ID NO: 2247191 - RNA, 20 nt, Human
uaccaggccgccccagccuc

SEQ ID NO: 2247192 - RNA, 21 nt, Human
uaccagccuccguauuucaga

SEQ ID NO: 2247193 - RNA, 17 nt, Human
uaccagcgcccgcuggg

SEQ ID NO: 2247194 - RNA, 20 nt, Human
uaccagcgaggaggcuccag

SEQ ID NO: 2247195 - RNA, 18 nt, Human
uaccagcgcccgcugggc

SEQ ID NO: 2247196 - RNA, 19 nt, Human
uaccagcgcccgcugggcu

SEQ ID NO: 2247197 - RNA, 20 nt, Human
uaccagcgcccgcugggcug

SEQ ID NO: 2247198 - RNA, 15 nt, Human
uaccagcgaggaggc

SEQ ID NO: 2247199 - RNA, 13 nt, Human
uaccagcgaggag

SEQ ID NO: 2247200 - RNA, 13 nt, Human
uaccagcugcgcu

SEQ ID NO: 2247201 - RNA, 14 nt, Human
uaccagcugcgcuu

SEQ ID NO: 2247202 - RNA, 21 nt, Human
uaccagcugcgcuugcuuuuc

SEQ ID NO: 2247203 - RNA, 22 nt, Human
uaccagcugcgcuugcuuuucu

SEQ ID NO: 2247204 - RNA, 16 nt, Human
uaccaggaacuauaaa

SEQ ID NO: 2247205 - RNA, 19 nt, Human
uaccagggacugaggggag

SEQ ID NO: 2247206 - RNA, 16 nt, Human
uacagggagcugggac

SEQ ID NO: 2247207 - RNA, 20 nt, Human
uacagggagccuccugccca

SEQ ID NO: 2247208 - RNA, 21 nt, Human
uacagggagccuccugcccag

SEQ ID NO: 2247209 - RNA, 21 nt, Human
uacagggcaugcauuuugcag

SEQ ID NO: 2247210 - RNA, 22 nt, Human
uacagagaggucaagcccagga

SEQ ID NO: 2247211 - RNA, 17 nt, Human
uacagggaugguguuca

SEQ ID NO: 2247212 - RNA, 15 nt, Human
uacagggagccuccu

SEQ ID NO: 2247213 - RNA, 16 nt, Human
uacagggagccuccug

SEQ ID NO: 2247214 - RNA, 17 nt, Human
uacagggagccuccugc

SEQ ID NO: 2247215 - RNA, 18 nt, Human
uacagggagccuccugcc

SEQ ID NO: 2247216 - RNA, 21 nt, Human
uacagguaaggugagggaaua

SEQ ID NO: 2247217 - RNA, 18 nt, Human
uacaggguagcagguacc

SEQ ID NO: 2247218 - RNA, 22 nt, Human
uacaggguagcagguaccacug

SEQ ID NO: 2247219 - RNA, 19 nt, Human
uacaggguagauaaccugu

SEQ ID NO: 2247220 - RNA, 21 nt, Human
aaugugcugaaugguuuucaa

SEQ ID NO: 2247221 - RNA, 22 nt, Human
aauguggcaaggaaaaacaggu

SEQ ID NO: 2247222 - RNA, 21 nt, Human
aauguggccccugaacaagaa

SEQ ID NO: 2247223 - RNA, 20 nt, Human
aaugugcuguguaaaguuag

SEQ ID NO: 2247224 - RNA, 21 nt, Human
aaugugcuguguaaaguuagu

SEQ ID NO: 2247225 - RNA, 12 nt, Human
aaugugcugugu

SEQ ID NO: 2247226 - RNA, 13 nt, Human
aaugugcugugua

SEQ ID NO: 2247227 - RNA, 14 nt, Human
aaugugcuguguaa

SEQ ID NO: 2247228 - RNA, 15 nt, Human
aaugugcuguguaaa

SEQ ID NO: 2247229 - RNA, 16 nt, Human
aaugugcuguguaaag

SEQ ID NO: 2247230 - RNA, 17 nt, Human
aaugugcuguguaaagu

SEQ ID NO: 2247231 - RNA, 18 nt, Human
aaugugcuguguaaaguu

SEQ ID NO: 2247232 - RNA, 19 nt, Human
aaugugcuguguaaaguua

SEQ ID NO: 2247233 - RNA, 15 nt, Human
aauguuagauaguua

SEQ ID NO: 2247234 - RNA, 22 nt, Human
aauguuacugaucaugcauugu

SEQ ID NO: 2247235 - RNA, 17 nt, Human
aauguuagagguuuuaa

SEQ ID NO: 2247236 - RNA, 22 nt, Human
aauguuagagguuuuaaaguga

SEQ ID NO: 2247237 - RNA, 21 nt, Human
aauguuacugaucaugcauug

SEQ ID NO: 2247238 - RNA, 20 nt, Human
aauguuacugaucaugcauu

SEQ ID NO: 2247239 - RNA, 19 nt, Human
aauguuacugaucaugcau

SEQ ID NO: 2247240 - RNA, 18 nt, Human
aauguuacugaucaugca

SEQ ID NO: 2247241 - RNA, 13 nt, Human
aauguuacugauc

SEQ ID NO: 2247242 - RNA, 15 nt, Human
aauguuacauuguuu

SEQ ID NO: 2247243 - RNA, 16 nt, Human
aauguuacauuauuau

SEQ ID NO: 2247244 - RNA, 20 nt, Human
aauguggccuaaaaaugcaa

SEQ ID NO: 2247245 - RNA, 17 nt, Human
aauguggccuaaaaaug

SEQ ID NO: 2247246 - RNA, 15 nt, Human
aauguuacauuauua

SEQ ID NO: 2247247 - RNA, 22 nt, Human
aauguuauguuguguucuaaua

SEQ ID NO: 2247248 - RNA, 14 nt, Human
aauguuauuuaaca

SEQ ID NO: 2247249 - RNA, 21 nt, Human
aauguuauuuguuauuuucag

SEQ ID NO: 2247250 - RNA, 23 nt, Human
aauguuauuuguuauuuucagua

SEQ ID NO: 2247251 - RNA, 13 nt, Human
aauguucaucaau

SEQ ID NO: 2247252 - RNA, 19 nt, Human
aauguuauuuuuuaauuau

SEQ ID NO: 2247253 - RNA, 20 nt, Human
aauguuauuuuuuaauuauu

SEQ ID NO: 2247254 - RNA, 21 nt, Human
aauguucauuguaauguuacu

SEQ ID NO: 2247255 - RNA, 17 nt, Human
aauguucauuguaaugu

SEQ ID NO: 2247256 - RNA, 12 nt, Human
aauguucauugu

SEQ ID NO: 2247257 - RNA, 11 nt, Human
aauguucauug

SEQ ID NO: 2247258 - RNA, 24 nt, Human
aauguucauuguaauguuacugau

SEQ ID NO: 2247259 - RNA, 22 nt, Human
aauguucauuguaauguuacug

SEQ ID NO: 2247260 - RNA, 22 nt, Human
aauguuauuuguuauuuucagu

SEQ ID NO: 2247261 - RNA, 21 nt, Human
aauguuauuuuuuaauuauua

SEQ ID NO: 2247262 - RNA, 12 nt, Human
aauguucaucau

SEQ ID NO: 2247263 - RNA, 21 nt, Human
aauguucaucccaugauguag

SEQ ID NO: 2247264 - RNA, 22 nt, Human
aauguucaucccaugauguagu

SEQ ID NO: 2247265 - RNA, 20 nt, Human
aauguucaucaaugaaugaa

SEQ ID NO: 2247266 - RNA, 16 nt, Human
aauguucaucaaugaa

SEQ ID NO: 2247267 - RNA, 22 nt, Human
aauguuggauuuauaaaugcua

SEQ ID NO: 2247268 - RNA, 19 nt, Human
aauguuggauuuauaaaug

SEQ ID NO: 2247269 - RNA, 23 nt, Human
aauguuggucauuuuauguuaag

SEQ ID NO: 2247270 - RNA, 13 nt, Human
aauguugggacug

SEQ ID NO: 2247271 - RNA, 21 nt, Human
aauguugggacugcuaaauaa

SEQ ID NO: 2247272 - RNA, 17 nt, Human
aauuaaguacuauguau

SEQ ID NO: 2247273 - RNA, 16 nt, Human
aauuaaguacuaugua

SEQ ID NO: 2247274 - RNA, 16 nt, Human
aauuaacuuuuauaaa

SEQ ID NO: 2247275 - RNA, 15 nt, Human
aauuaacuuuuauaa

SEQ ID NO: 2247276 - RNA, 21 nt, Human
aauguuguucauuauuggagg

SEQ ID NO: 2247277 - RNA, 15 nt, Human
aauguuguuauuuaa

SEQ ID NO: 2247278 - RNA, 17 nt, Human
aauguuguauucaguga

SEQ ID NO: 2247279 - RNA, 22 nt, Human
aauguugggacugcuaaauaaa

SEQ ID NO: 2247280 - RNA, 13 nt, Human
aauuaacuuuuau

SEQ ID NO: 2247281 - RNA, 12 nt, Human
aauuaacuuuua

SEQ ID NO: 2247282 - RNA, 16 nt, Human
uaccuguucagugucc

SEQ ID NO: 2247283 - RNA, 20 nt, Human
uaccuguucagugucccggg

SEQ ID NO: 2247284 - RNA, 22 nt, Human
uaccuguuuuguggucagcugu

SEQ ID NO: 2247285 - RNA, 21 nt, Human
uaccuguucagugucccgggc

SEQ ID NO: 2247286 - RNA, 13 nt, Human
uaccuguuccuua

SEQ ID NO: 2247287 - RNA, 20 nt, Human
uaccugugcguuacuaauug

SEQ ID NO: 2247288 - RNA, 16 nt, Human
uaccugugccucggcu

SEQ ID NO: 2247289 - RNA, 12 nt, Human
uaccugugccug

SEQ ID NO: 2247290 - RNA, 18 nt, Human
uaccugauuuuuuuuccu

SEQ ID NO: 2247291 - RNA, 16 nt, Human
uaccugccacucacac

SEQ ID NO: 2247292 - RNA, 19 nt, Human
uaccugccacucacacagc

SEQ ID NO: 2247293 - RNA, 20 nt, Human
uaccugccacucacacagcc

SEQ ID NO: 2247294 - RNA, 21 nt, Human
uaccugccacucacacagcca

SEQ ID NO: 2247295 - RNA, 22 nt, Human
uaccugccacucacacagccag

SEQ ID NO: 2247296 - RNA, 12 nt, Human
uaccugauuuuu

SEQ ID NO: 2247297 - RNA, 18 nt, Human
uaccugaucaaugacaga

SEQ ID NO: 2247298 - RNA, 19 nt, Human
uaccugaucaaugacagag

SEQ ID NO: 2247299 - RNA, 16 nt, Human
uaccugccaggaagcc

SEQ ID NO: 2247300 - RNA, 12 nt, Human
uaccugagacca

SEQ ID NO: 2247301 - RNA, 13 nt, Human
uaccugagaccag

SEQ ID NO: 2247302 - RNA, 20 nt, Human
uaccugacacucccuugggc

SEQ ID NO: 2247303 - RNA, 16 nt, Human
uaccugaggggccucu

SEQ ID NO: 2247304 - RNA, 17 nt, Human
aauuacauguaaaacau

SEQ ID NO: 2247305 - RNA, 14 nt, Human
aauuacauuuguau

SEQ ID NO: 2247306 - RNA, 14 nt, Human
aauuacauaauuuu

SEQ ID NO: 2247307 - RNA, 20 nt, Human
uaccuuacagugagggcuau

SEQ ID NO: 2247308 - RNA, 12 nt, Human
uaccuuacugug

SEQ ID NO: 2247309 - RNA, 13 nt, Human
aauuacauuugua

SEQ ID NO: 2247310 - RNA, 17 nt, Human
aauuacaggaaguacug

SEQ ID NO: 2247311 - RNA, 19 nt, Human
aauuacaggaaguacugga

SEQ ID NO: 2247312 - RNA, 20 nt, Human
aauuacaggaaguacuggag

SEQ ID NO: 2247313 - RNA, 21 nt, Human
uaccugaaaacacugugcaca

SEQ ID NO: 2247314 - RNA, 20 nt, Human
uaccugaaaacacugugcac

SEQ ID NO: 2247315 - RNA, 13 nt, Human
uaccugaaaacac

SEQ ID NO: 2247316 - RNA, 23 nt, Human
uaccugaagcuaucguaaaauua

SEQ ID NO: 2247317 - RNA, 13 nt, Human
uaccugaagucuu

SEQ ID NO: 2247318 - RNA, 14 nt, Human
uaccugaagucuuu

SEQ ID NO: 2247319 - RNA, 17 nt, Human
uaccugacacucccuug

SEQ ID NO: 2247320 - RNA, 16 nt, Human
uaccugaagucuuugu

SEQ ID NO: 2247321 - RNA, 13 nt, Human
uaccugaggggcc

SEQ ID NO: 2247322 - RNA, 15 nt, Human
uaccugaggggccuc

SEQ ID NO: 2247323 - RNA, 21 nt, Human
uacccucaggcauaggccugg

SEQ ID NO: 2247324 - RNA, 22 nt, Human
uacccucaggacaaugucugaa

SEQ ID NO: 2247325 - RNA, 16 nt, Human
uacccuauucucucuu

SEQ ID NO: 2247326 - RNA, 22 nt, Human
uaccucuugagccuugaacuuu

SEQ ID NO: 2247327 - RNA, 23 nt, Human
uacccucaggcauaggccugggu

SEQ ID NO: 2247328 - RNA, 19 nt, Human
uaccucuuuauuuuuugau

SEQ ID NO: 2247329 - RNA, 13 nt, Human
uaccucuuggcug

SEQ ID NO: 2247330 - RNA, 23 nt, Human
uaccucuugagccuugaacuuug

SEQ ID NO: 2247331 - RNA, 15 nt, Human
uacccuagccauucc

SEQ ID NO: 2247332 - RNA, 16 nt, Human
uacccuagccauuccu

SEQ ID NO: 2247333 - RNA, 17 nt, Human
uacccguucacauuuuu

SEQ ID NO: 2247334 - RNA, 23 nt, Human
uacccgggaagggggcugggaca

SEQ ID NO: 2247335 - RNA, 18 nt, Human
uacccccuccuucagaca

SEQ ID NO: 2247336 - RNA, 17 nt, Human
uacccccuccucucugc

SEQ ID NO: 2247337 - RNA, 13 nt, Human
uacccccuucugg

SEQ ID NO: 2247338 - RNA, 12 nt, Human
aauuagagcaga

SEQ ID NO: 2247339 - RNA, 22 nt, Human
aauuagagcagaugaccccucc

SEQ ID NO: 2247340 - RNA, 22 nt, Human
aauuaugucugcugaauaauaa

SEQ ID NO: 2247341 - RNA, 22 nt, Human
aauuaugugccagauuuaugca

SEQ ID NO: 2247342 - RNA, 14 nt, Human
aauuauguuaaacu

SEQ ID NO: 2247343 - RNA, 15 nt, Human
aauuauguuaaacua

SEQ ID NO: 2247344 - RNA, 13 nt, Human
aauuauguuaaac

SEQ ID NO: 2247345 - RNA, 15 nt, Human
aauuaccaaccuguu

SEQ ID NO: 2247346 - RNA, 22 nt, Human
aauuacuuaucauccacauugu

SEQ ID NO: 2247347 - RNA, 18 nt, Human
aauuagaaauuggcugga

SEQ ID NO: 2247348 - RNA, 22 nt, Human
aauuagaaaauguuauuuaaca

SEQ ID NO: 2247349 - RNA, 15 nt, Human
aauuagaauaguguu

SEQ ID NO: 2247350 - RNA, 15 nt, Human
aauuagaagacauuu

SEQ ID NO: 2247351 - RNA, 13 nt, Human
aauuagaagacau

SEQ ID NO: 2247352 - RNA, 14 nt, Human
aauuagaagacauu

SEQ ID NO: 2247353 - RNA, 12 nt, Human
aauuauuguaua

SEQ ID NO: 2247354 - RNA, 13 nt, Human
aauuauugugauu

SEQ ID NO: 2247355 - RNA, 14 nt, Human
aauuauuuaauaaa

SEQ ID NO: 2247356 - RNA, 16 nt, Human
aauuauugugauuucc

SEQ ID NO: 2247357 - RNA, 21 nt, Human
aauuauuuauuaaaugcccag

SEQ ID NO: 2247358 - RNA, 21 nt, Human
aauuauuauuuauauauguau

SEQ ID NO: 2247359 - RNA, 12 nt, Human
aauuauuguaca

SEQ ID NO: 2247360 - RNA, 21 nt, Human
aauuauuguacauuuauaguu

SEQ ID NO: 2247361 - RNA, 11 nt, Human
aauuauuauuu

SEQ ID NO: 2247362 - RNA, 13 nt, Human
aauuauuauuuau

SEQ ID NO: 2247363 - RNA, 16 nt, Human
aauuauuauuuauaua

SEQ ID NO: 2247364 - RNA, 18 nt, Human
aauuauuauuuauauaug

SEQ ID NO: 2247365 - RNA, 14 nt, Human
aauuauguuuauau

SEQ ID NO: 2247366 - RNA, 19 nt, Human
aauuauguuaaacuagcau

SEQ ID NO: 2247367 - RNA, 23 nt, Human
aauuauguuaaacuagcauaucu

SEQ ID NO: 2247368 - RNA, 22 nt, Human
aauuauguuugccacuuugcaa

SEQ ID NO: 2247369 - RNA, 17 nt, Human
aauuauguuuauauaaa

SEQ ID NO: 2247370 - RNA, 18 nt, Human
aauuauguuuauauaaau

SEQ ID NO: 2247371 - RNA, 16 nt, Human
aauuauuaaugaaaau

SEQ ID NO: 2247372 - RNA, 13 nt, Human
aauuauuauucuu

SEQ ID NO: 2247373 - RNA, 21 nt, Human
aauuauuauucuucauaacaa

SEQ ID NO: 2247374 - RNA, 21 nt, Human
aauuauguuuauauaaaugcu

SEQ ID NO: 2247375 - RNA, 17 nt, Human
aauuauuaaugaaaaua

SEQ ID NO: 2247376 - RNA, 22 nt, Human
aauuauuaaugaaaauaagaau

SEQ ID NO: 2247377 - RNA, 20 nt, Human
aauuauuaguuuacaucauu

SEQ ID NO: 2247378 - RNA, 20 nt, Human
aauucagauauauuuuucac

SEQ ID NO: 2247379 - RNA, 13 nt, Human
aauucacaaacuu

SEQ ID NO: 2247380 - RNA, 23 nt, Human
aauucaauuguaaauugaaucag

SEQ ID NO: 2247381 - RNA, 19 nt, Human
aauucaauuguaaauugaa

SEQ ID NO: 2247382 - RNA, 15 nt, Human
aauucagcacugauu

SEQ ID NO: 2247383 - RNA, 20 nt, Human
aauucagcacugauuucaca

SEQ ID NO: 2247384 - RNA, 23 nt, Human
aauucagcacugauuucacaaca

SEQ ID NO: 2247385 - RNA, 11 nt, Human
aauucaguugu

SEQ ID NO: 2247386 - RNA, 23 nt, Human
aauucaucaaauggaagacacau

SEQ ID NO: 2247387 - RNA, 18 nt, Human
aauucaucccaacugucu

SEQ ID NO: 2247388 - RNA, 13 nt, Human
aauucauauucug

SEQ ID NO: 2247389 - RNA, 16 nt, Human
aauucagugcuguacu

SEQ ID NO: 2247390 - RNA, 17 nt, Human
aauucaguuguuagugu

SEQ ID NO: 2247391 - RNA, 22 nt, Human
aauucaguuguuagugugucuu

SEQ ID NO: 2247392 - RNA, 14 nt, Human
aauuauuuuaaaca

SEQ ID NO: 2247393 - RNA, 18 nt, Human
aauuauuuuaaacaaaau

SEQ ID NO: 2247394 - RNA, 15 nt, Human
aauuauuuuaaaaga

SEQ ID NO: 2247395 - RNA, 12 nt, Human
aauucaagaaaa

SEQ ID NO: 2247396 - RNA, 20 nt, Human
aauucaagaaaacaacuuca

SEQ ID NO: 2247397 - RNA, 14 nt, Human
aauucaauuguaaa

SEQ ID NO: 2247398 - RNA, 17 nt, Human
aauucaauuguaaauug

SEQ ID NO: 2247399 - RNA, 17 nt, Human
aauuauuucagaaaugu

SEQ ID NO: 2247400 - RNA, 12 nt, Human
aauuauuugcau

SEQ ID NO: 2247401 - RNA, 14 nt, Human
aauuauuuguguaa

SEQ ID NO: 2247402 - RNA, 12 nt, Human
aauuauuuuaaa

SEQ ID NO: 2247403 - RNA, 15 nt, Human
aauuauuuguguaau

SEQ ID NO: 2247404 - RNA, 18 nt, Human
aauuauuuguguaauaga

SEQ ID NO: 2247405 - RNA, 19 nt, Human
aauuauuuguguaauagaa

SEQ ID NO: 2247406 - RNA, 21 nt, Human
aauuauuuguguaauagaaaa

SEQ ID NO: 2247407 - RNA, 20 nt, Human
aauuauuuauuuauggagga

SEQ ID NO: 2247408 - RNA, 18 nt, Human
aauuauuuauuauuaaga

SEQ ID NO: 2247409 - RNA, 19 nt, Human
aauuauuuauuuaauaaca

SEQ ID NO: 2247410 - RNA, 13 nt, Human
aauuauuucagaa

SEQ ID NO: 2247411 - RNA, 12 nt, Human
aauuauuucaga

SEQ ID NO: 2247412 - RNA, 22 nt, Human
aauuauuuauuaaaugcccagc

SEQ ID NO: 2247413 - RNA, 18 nt, Human
aauggaaccccaccacug

SEQ ID NO: 2247414 - RNA, 16 nt, Human
aauggaaccuccuuuc

SEQ ID NO: 2247415 - RNA, 22 nt, Human
aauggaaccuccuuucucuucu

SEQ ID NO: 2247416 - RNA, 13 nt, Human
aauggaagacaca

SEQ ID NO: 2247417 - RNA, 13 nt, Human
aauggaagacagc

SEQ ID NO: 2247418 - RNA, 20 nt, Human
aaugcuuguggauugagggu

SEQ ID NO: 2247419 - RNA, 18 nt, Human
aaugcuuuaaaaacuauu

SEQ ID NO: 2247420 - RNA, 22 nt, Human
aaugcuuuaaaaacuauuuaac

SEQ ID NO: 2247421 - RNA, 23 nt, Human
aaugcuuuaaaaacuauuuaacu

SEQ ID NO: 2247422 - RNA, 17 nt, Human
aaugcuuggcuucucau

SEQ ID NO: 2247423 - RNA, 16 nt, Human
aaugcuugaaaaaugu

SEQ ID NO: 2247424 - RNA, 21 nt, Human
aaugcuuggcuucucauacgu

SEQ ID NO: 2247425 - RNA, 21 nt, Human
aaugcuucugacuucauagau

SEQ ID NO: 2247426 - RNA, 17 nt, Human
aaugcuucugacuucau

SEQ ID NO: 2247427 - RNA, 19 nt, Human
aaugcuugaaaaaugugca

SEQ ID NO: 2247428 - RNA, 16 nt, Human
aaugcuucuucucagg

SEQ ID NO: 2247429 - RNA, 13 nt, Human
aaugcuugaaaaa

SEQ ID NO: 2247430 - RNA, 23 nt, Human
aaugcugguuuuccuaaaugcag

SEQ ID NO: 2247431 - RNA, 22 nt, Human
aaugcugguuuuccuaaaugca

SEQ ID NO: 2247432 - RNA, 21 nt, Human
aaugcugguuuuccuaaaugc

SEQ ID NO: 2247433 - RNA, 19 nt, Human
aaugcugguuuuccuaaau

SEQ ID NO: 2247434 - RNA, 17 nt, Human
aaugcugucaacuauga

SEQ ID NO: 2247435 - RNA, 22 nt, Human
aaugcuguauuuuaaaagaaug

SEQ ID NO: 2247436 - RNA, 16 nt, Human
aaugcauauuguauua

SEQ ID NO: 2247437 - RNA, 19 nt, Human
aaugcauccauuccucagg

SEQ ID NO: 2247438 - RNA, 13 nt, Human
aaugcauauugua

SEQ ID NO: 2247439 - RNA, 23 nt, Human
aaugcauccauuccucagggaca

SEQ ID NO: 2247440 - RNA, 16 nt, Human
aaugcaucuagauuau

SEQ ID NO: 2247441 - RNA, 16 nt, Human
aaugcaucuguccuca

SEQ ID NO: 2247442 - RNA, 19 nt, Human
aaugcaucuagauuaugga

SEQ ID NO: 2247443 - RNA, 15 nt, Human
aaugcaucuguccuc

SEQ ID NO: 2247444 - RNA, 21 nt, Human
aaugcuggcuguuggcugggg

SEQ ID NO: 2247445 - RNA, 19 nt, Human
aaugcaugcagccacugug

SEQ ID NO: 2247446 - RNA, 19 nt, Human
aaugcaugauuuuguaacc

SEQ ID NO: 2247447 - RNA, 17 nt, Human
aaugcaugauuuuguaa

SEQ ID NO: 2247448 - RNA, 16 nt, Human
aaugcaugauuuugua

SEQ ID NO: 2247449 - RNA, 22 nt, Human
aaugcuggcuguuggcuggggg

SEQ ID NO: 2247450 - RNA, 18 nt, Human
aaugcauguuaggaaaau

SEQ ID NO: 2247451 - RNA, 18 nt, Human
aaugcugggacucagccu

SEQ ID NO: 2247452 - RNA, 18 nt, Human
aaugcugguuuuccuaaa

SEQ ID NO: 2247453 - RNA, 15 nt, Human
aaugcugguuuuccu

SEQ ID NO: 2247454 - RNA, 12 nt, Human
aaugcugggcug

SEQ ID NO: 2247455 - RNA, 20 nt, Human
aaugcuguauuuuaaaagaa

SEQ ID NO: 2247456 - RNA, 21 nt, Human
aaugcuguauuuuaaaagaau

SEQ ID NO: 2247457 - RNA, 21 nt, Human
uacaaugaacccccaugaugu

SEQ ID NO: 2247458 - RNA, 18 nt, Human
uacaaugacuuuauugca

SEQ ID NO: 2247459 - RNA, 14 nt, Human
uacaaugacuuuau

SEQ ID NO: 2247460 - RNA, 16 nt, Human
uacaaugcugugcccu

SEQ ID NO: 2247461 - RNA, 14 nt, Human
uacaaugcugugcc

SEQ ID NO: 2247462 - RNA, 13 nt, Human
uacaaugcugugc

SEQ ID NO: 2247463 - RNA, 22 nt, Human
uacaauuauuuuuacaguucuc

SEQ ID NO: 2247464 - RNA, 18 nt, Human
uacaauuauuuuuacagu

SEQ ID NO: 2247465 - RNA, 17 nt, Human
uacaauucccugcuguc

SEQ ID NO: 2247466 - RNA, 19 nt, Human
aaugcauauccugagccau

SEQ ID NO: 2247467 - RNA, 16 nt, Human
uacaauugaaaugacu

SEQ ID NO: 2247468 - RNA, 14 nt, Human
uacaauugaaauga

SEQ ID NO: 2247469 - RNA, 13 nt, Human
uacaauugaaaug

SEQ ID NO: 2247470 - RNA, 18 nt, Human
uacaauucuacauuguca

SEQ ID NO: 2247471 - RNA, 19 nt, Human
uacaauuauaucaguccuc

SEQ ID NO: 2247472 - RNA, 15 nt, Human
uacaauuauaucagu

SEQ ID NO: 2247473 - RNA, 22 nt, Human
uacaauuaaaaaaaaagaucug

SEQ ID NO: 2247474 - RNA, 19 nt, Human
uacaauuaaagcuguuauu

SEQ ID NO: 2247475 - RNA, 15 nt, Human
uacaauguucauccc

SEQ ID NO: 2247476 - RNA, 18 nt, Human
uacaauuaaaaaaaaaga

SEQ ID NO: 2247477 - RNA, 16 nt, Human
uacaauguucauccca

SEQ ID NO: 2247478 - RNA, 22 nt, Human
uacaauguucaucccaugaugu

SEQ ID NO: 2247479 - RNA, 13 nt, Human
uaauuuuuauuca

SEQ ID NO: 2247480 - RNA, 23 nt, Human
uaauuuuuauucauaagccaauu

SEQ ID NO: 2247481 - RNA, 16 nt, Human
uaauuuuuccuauauu

SEQ ID NO: 2247482 - RNA, 16 nt, Human
uaauuuuugcucuaga

SEQ ID NO: 2247483 - RNA, 15 nt, Human
uaauuuuuguauuuu

SEQ ID NO: 2247484 - RNA, 14 nt, Human
uaauuuuuguaauu

SEQ ID NO: 2247485 - RNA, 22 nt, Human
uaauuuuuuuuuuccuuuuaaa

SEQ ID NO: 2247486 - RNA, 13 nt, Human
uacaaugacuuua

SEQ ID NO: 2247487 - RNA, 21 nt, Human
uacaaaaaaaaaaaaaaauua

SEQ ID NO: 2247488 - RNA, 22 nt, Human
uaauuuuuuucaauauuuauua

SEQ ID NO: 2247489 - RNA, 18 nt, Human
uaauuuuuuugagacaga

SEQ ID NO: 2247490 - RNA, 17 nt, Human
uacagagaggagaaaca

SEQ ID NO: 2247491 - RNA, 16 nt, Human
uacagagaggagaaac

SEQ ID NO: 2247492 - RNA, 22 nt, Human
uacagagaggagaaacacaucu

SEQ ID NO: 2247493 - RNA, 21 nt, Human
uacagagaggagaaacacauc

SEQ ID NO: 2247494 - RNA, 20 nt, Human
uacagagaggagaaacacau

SEQ ID NO: 2247495 - RNA, 18 nt, Human
uacagagaggagaaacac

SEQ ID NO: 2247496 - RNA, 23 nt, Human
uacagagcagacaguuaagagaa

SEQ ID NO: 2247497 - RNA, 19 nt, Human
uacagagcccacgccccca

SEQ ID NO: 2247498 - RNA, 22 nt, Human
uacagagcccacgcccccacug

SEQ ID NO: 2247499 - RNA, 17 nt, Human
uacagagacagaaagca

SEQ ID NO: 2247500 - RNA, 22 nt, Human
uacaccuaacucaccuaacuca

SEQ ID NO: 2247501 - RNA, 12 nt, Human
uacaccuaacuc

SEQ ID NO: 2247502 - RNA, 14 nt, Human
uacacccuuggacu

SEQ ID NO: 2247503 - RNA, 15 nt, Human
uacaccgggccugga

SEQ ID NO: 2247504 - RNA, 17 nt, Human
uacaccgggccuggaga

SEQ ID NO: 2247505 - RNA, 13 nt, Human
uacagacaaagcg

SEQ ID NO: 2247506 - RNA, 14 nt, Human
uacagacaaagcgu

SEQ ID NO: 2247507 - RNA, 15 nt, Human
uacagacaaagcgug

SEQ ID NO: 2247508 - RNA, 14 nt, Human
aauguaauugaaua

SEQ ID NO: 2247509 - RNA, 15 nt, Human
aauguaaugaucaua

SEQ ID NO: 2247510 - RNA, 19 nt, Human
aauguaaucaauguuucuu

SEQ ID NO: 2247511 - RNA, 21 nt, Human
aauguaaugaucauaagucua

SEQ ID NO: 2247512 - RNA, 16 nt, Human
aauguaauugaauaaa

SEQ ID NO: 2247513 - RNA, 16 nt, Human
uacacccuuuuccagc

SEQ ID NO: 2247514 - RNA, 15 nt, Human
uacacccuuuuccag

SEQ ID NO: 2247515 - RNA, 14 nt, Human
uacacccaaagagg

SEQ ID NO: 2247516 - RNA, 17 nt, Human
aaugguuugcaaggaag

SEQ ID NO: 2247517 - RNA, 18 nt, Human
aaugguuugcaaggaagc

SEQ ID NO: 2247518 - RNA, 19 nt, Human
aaugguuugcaaggaagcc

SEQ ID NO: 2247519 - RNA, 14 nt, Human
aaugguuuucaaaa

SEQ ID NO: 2247520 - RNA, 16 nt, Human
aauggauuggauuauu

SEQ ID NO: 2247521 - RNA, 18 nt, Human
aauggauuggauuauuua

SEQ ID NO: 2247522 - RNA, 20 nt, Human
aauggauuggauuauuuaau

SEQ ID NO: 2247523 - RNA, 21 nt, Human
aauggauuggauuauuuaaua

SEQ ID NO: 2247524 - RNA, 19 nt, Human
aauggagucaguuugcagu

SEQ ID NO: 2247525 - RNA, 14 nt, Human
aauggaagacacau

SEQ ID NO: 2247526 - RNA, 18 nt, Human
aauggaagacagcucuua

SEQ ID NO: 2247527 - RNA, 17 nt, Human
aauggaggccauugugu

SEQ ID NO: 2247528 - RNA, 16 nt, Human
aauggaagacagcucu

SEQ ID NO: 2247529 - RNA, 23 nt, Human
aauguaaaggagucaaaacuaca

SEQ ID NO: 2247530 - RNA, 21 nt, Human
aauguaaaggagucaaaacua

SEQ ID NO: 2247531 - RNA, 20 nt, Human
aauguaaaggagucaaaacu

SEQ ID NO: 2247532 - RNA, 16 nt, Human
aaugguuuucaaaaua

SEQ ID NO: 2247533 - RNA, 16 nt, Human
aaugguuuucuugugu

SEQ ID NO: 2247534 - RNA, 12 nt, Human
aauguaaauauu

SEQ ID NO: 2247535 - RNA, 12 nt, Human
aauguaaauaaa

SEQ ID NO: 2247536 - RNA, 15 nt, Human
aauguaagcuguuua

SEQ ID NO: 2247537 - RNA, 16 nt, Human
aauguaagcuguuuau

SEQ ID NO: 2247538 - RNA, 18 nt, Human
aauguaaauauucuauau

SEQ ID NO: 2247539 - RNA, 20 nt, Human
aauguaagggaaacugccag

SEQ ID NO: 2247540 - RNA, 21 nt, Human
aaugcaaaaauuagccgggcg

SEQ ID NO: 2247541 - RNA, 12 nt, Human
aaugcaaaccau

SEQ ID NO: 2247542 - RNA, 17 nt, Human
aaugcacacuagccucu

SEQ ID NO: 2247543 - RNA, 13 nt, Human
aaugcacacuagc

SEQ ID NO: 2247544 - RNA, 17 nt, Human
aaugcacacaaaacaac

SEQ ID NO: 2247545 - RNA, 14 nt, Human
aaugcacacaaaac

SEQ ID NO: 2247546 - RNA, 20 nt, Human
aaugcaaacacacaaaggua

SEQ ID NO: 2247547 - RNA, 15 nt, Human
aaugcacacaaaaca

SEQ ID NO: 2247548 - RNA, 19 nt, Human
aaugauuuuaucugugaau

SEQ ID NO: 2247549 - RNA, 18 nt, Human
aaugauuuccaaagagaa

SEQ ID NO: 2247550 - RNA, 14 nt, Human
aaugauuuuuagau

SEQ ID NO: 2247551 - RNA, 16 nt, Human
aaugauuucauucaau

SEQ ID NO: 2247552 - RNA, 20 nt, Human
aaugauuuccaaagagaaaa

SEQ ID NO: 2247553 - RNA, 20 nt, Human
aaugauuuuaucugugaauu

SEQ ID NO: 2247554 - RNA, 11 nt, Human
aaugcaaacca

SEQ ID NO: 2247555 - RNA, 13 nt, Human
uaauuauuauuaa

SEQ ID NO: 2247556 - RNA, 12 nt, Human
uaauuauuauuc

SEQ ID NO: 2247557 - RNA, 14 nt, Human
uaauuauuauucuu

SEQ ID NO: 2247558 - RNA, 12 nt, Human
uaauuauuauuu

SEQ ID NO: 2247559 - RNA, 13 nt, Human
uaauuauuauuua

SEQ ID NO: 2247560 - RNA, 22 nt, Human
aaugcacuuucuauccucugua

SEQ ID NO: 2247561 - RNA, 13 nt, Human
aaugcaccuggaa

SEQ ID NO: 2247562 - RNA, 11 nt, Human
aaugcacuuuc

SEQ ID NO: 2247563 - RNA, 19 nt, Human
aaugcacguagcugaggcc

SEQ ID NO: 2247564 - RNA, 13 nt, Human
aaugcacuuucua

SEQ ID NO: 2247565 - RNA, 15 nt, Human
aaugcacuuucuauc

SEQ ID NO: 2247566 - RNA, 21 nt, Human
uaauuuauaaaagaauaaaau

SEQ ID NO: 2247567 - RNA, 18 nt, Human
uaauuuuuauauuugaaa

SEQ ID NO: 2247568 - RNA, 19 nt, Human
uaauuuuuauauuugaaau

SEQ ID NO: 2247569 - RNA, 21 nt, Human
uaauuuuuauauuugaaauau

SEQ ID NO: 2247570 - RNA, 15 nt, Human
uaauuuaguuauuga

SEQ ID NO: 2247571 - RNA, 16 nt, Human
uaauuuaguuauugau

SEQ ID NO: 2247572 - RNA, 19 nt, Human
uaauuuaaacaggcccagc

SEQ ID NO: 2247573 - RNA, 14 nt, Human
uaauuuaaacaggc

SEQ ID NO: 2247574 - RNA, 17 nt, Human
uaauuuaaacaggccca

SEQ ID NO: 2247575 - RNA, 20 nt, Human
uaauuuaaacaggcccagca

SEQ ID NO: 2247576 - RNA, 19 nt, Human
uaauuccucaacguauugu

SEQ ID NO: 2247577 - RNA, 11 nt, Human
uaauuuaaaca

SEQ ID NO: 2247578 - RNA, 17 nt, Human
uaauuuaaacaccuccu

SEQ ID NO: 2247579 - RNA, 19 nt, Human
uaauuuaaacaccuccuca

SEQ ID NO: 2247580 - RNA, 20 nt, Human
uaauucccuaucuuuuaguu

SEQ ID NO: 2247581 - RNA, 19 nt, Human
uaauuccuaccucccugca

SEQ ID NO: 2247582 - RNA, 15 nt, Human
uaauucccuaucuuu

SEQ ID NO: 2247583 - RNA, 23 nt, Human
uaauucccauuuugcaaaauuuc

SEQ ID NO: 2247584 - RNA, 21 nt, Human
uaauucccauuuugcaaaauu

SEQ ID NO: 2247585 - RNA, 20 nt, Human
uaauucccauuuugcaaaau

SEQ ID NO: 2247586 - RNA, 20 nt, Human
uaauuuaaaauugugaugug

SEQ ID NO: 2247587 - RNA, 19 nt, Human
uaauuuaaaauugugaugu

SEQ ID NO: 2247588 - RNA, 19 nt, Human
uaauucccauuuugcaaaa

SEQ ID NO: 2247589 - RNA, 18 nt, Human
uaauucccauuuugcaaa

SEQ ID NO: 2247590 - RNA, 17 nt, Human
uaauucccauuuugcaa

SEQ ID NO: 2247591 - RNA, 17 nt, Human
uaauuauuauuuguguu

SEQ ID NO: 2247592 - RNA, 14 nt, Human
uaauuauuauuuau

SEQ ID NO: 2247593 - RNA, 17 nt, Human
uaauuauuauuuauaua

SEQ ID NO: 2247594 - RNA, 22 nt, Human
uaauuauuauuuauauauguau

SEQ ID NO: 2247595 - RNA, 14 nt, Human
uaauuauuauuugu

SEQ ID NO: 2247596 - RNA, 22 nt, Human
uaauuccguagguuauuuucag

SEQ ID NO: 2247597 - RNA, 19 nt, Human
aaugaguuaccuacauuuu

SEQ ID NO: 2247598 - RNA, 19 nt, Human
aaugaggucugaaauggag

SEQ ID NO: 2247599 - RNA, 23 nt, Human
aaugaggugggagguggaagaag

SEQ ID NO: 2247600 - RNA, 21 nt, Human
aaugaguuuuuauggggcuga

SEQ ID NO: 2247601 - RNA, 15 nt, Human
aaugauaaacucucu

SEQ ID NO: 2247602 - RNA, 14 nt, Human
aaugauucaguguu

SEQ ID NO: 2247603 - RNA, 13 nt, Human
aaugauucagugu

SEQ ID NO: 2247604 - RNA, 23 nt, Human
aaugauucaguguuaaaugugau

SEQ ID NO: 2247605 - RNA, 22 nt, Human
aaugauucaguguuaaauguga

SEQ ID NO: 2247606 - RNA, 21 nt, Human
aaugauucaguguuaaaugug

SEQ ID NO: 2247607 - RNA, 13 nt, Human
aaugauuguaaaa

SEQ ID NO: 2247608 - RNA, 14 nt, Human
aaugauuguaaaau

SEQ ID NO: 2247609 - RNA, 20 nt, Human
aaugauuguaaaauagcuug

SEQ ID NO: 2247610 - RNA, 24 nt, Human
aaugauuucagcucacugcaaccu

SEQ ID NO: 2247611 - RNA, 22 nt, Human
aaugauuucaugcuaucucugu

SEQ ID NO: 2247612 - RNA, 13 nt, Human
aaugauuucaugc

SEQ ID NO: 2247613 - RNA, 13 nt, Human
aaugagccuggca

SEQ ID NO: 2247614 - RNA, 12 nt, Human
aaugagccuggc

SEQ ID NO: 2247615 - RNA, 18 nt, Human
aaugaggaggaaggagag

SEQ ID NO: 2247616 - RNA, 12 nt, Human
aaugaggaggaa

SEQ ID NO: 2247617 - RNA, 13 nt, Human
aaugaggcuugcu

SEQ ID NO: 2247618 - RNA, 15 nt, Human
aaugaggcuugcuga

SEQ ID NO: 2247619 - RNA, 18 nt, Human
aaugaggcuugcugagag

SEQ ID NO: 2247620 - RNA, 14 nt, Human
aaugagccuggcaa

SEQ ID NO: 2247621 - RNA, 18 nt, Human
aaugagggccaagaaaga

SEQ ID NO: 2247622 - RNA, 15 nt, Human
aaugaggucagcaug

SEQ ID NO: 2247623 - RNA, 14 nt, Human
aaugagggacugga

SEQ ID NO: 2247624 - RNA, 20 nt, Human
aaugagggacuggaaccagg

SEQ ID NO: 2247625 - RNA, 21 nt, Human
aaugagggacuggaaccaggg

SEQ ID NO: 2247626 - RNA, 16 nt, Human
aaugaggucugaaaug

SEQ ID NO: 2247627 - RNA, 14 nt, Human
aaugagggccaaga

SEQ ID NO: 2247628 - RNA, 16 nt, Human
aaugaggucccaggca

SEQ ID NO: 2247629 - RNA, 15 nt, Human
aaugaggucccaggc

SEQ ID NO: 2247630 - RNA, 19 nt, Human
aaugaggucagcaugucua

SEQ ID NO: 2247631 - RNA, 16 nt, Human
aaugaggucagagccu

SEQ ID NO: 2247632 - RNA, 18 nt, Human
aaugaggucagagccugc

SEQ ID NO: 2247633 - RNA, 14 nt, Human
aaugagaaccaaca

SEQ ID NO: 2247634 - RNA, 17 nt, Human
aaugagaaggaauuuga

SEQ ID NO: 2247635 - RNA, 15 nt, Human
aaugagaaggcagcc

SEQ ID NO: 2247636 - RNA, 22 nt, Human
aaugagagacacacugaagaag

SEQ ID NO: 2247637 - RNA, 12 nt, Human
aaugagaaaucu

SEQ ID NO: 2247638 - RNA, 22 nt, Human
aaugagaaaucuaaaaaacgaa

SEQ ID NO: 2247639 - RNA, 17 nt, Human
aaugagaucaggcucug

SEQ ID NO: 2247640 - RNA, 17 nt, Human
aaugagaucccgccucu

SEQ ID NO: 2247641 - RNA, 19 nt, Human
aaugagagggcaguguuuc

SEQ ID NO: 2247642 - RNA, 17 nt, Human
aaugagagguuccuaag

SEQ ID NO: 2247643 - RNA, 16 nt, Human
aaugagauaguagcau

SEQ ID NO: 2247644 - RNA, 23 nt, Human
aaugagagggcaguguuuccuuu

SEQ ID NO: 2247645 - RNA, 16 nt, Human
aaugagaucaggcucu

SEQ ID NO: 2247646 - RNA, 11 nt, Human
aaugagccugg

SEQ ID NO: 2247647 - RNA, 21 nt, Human
aaugagccuacgcugaagaug

SEQ ID NO: 2247648 - RNA, 24 nt, Human
aaugacuaaaaauauuauaacuua

SEQ ID NO: 2247649 - RNA, 17 nt, Human
aaugacuaaaaauauua

SEQ ID NO: 2247650 - RNA, 20 nt, Human
aaugacuaaaaaacaaagaa

SEQ ID NO: 2247651 - RNA, 17 nt, Human
aaugacuaaaaaacaaa

SEQ ID NO: 2247652 - RNA, 20 nt, Human
aaucuguaucuguagugaga

SEQ ID NO: 2247653 - RNA, 20 nt, Human
aaugacucagaauauugcuu

SEQ ID NO: 2247654 - RNA, 13 nt, Human
aaucuguacaaug

SEQ ID NO: 2247655 - RNA, 23 nt, Human
aaucuguaaacuguguauuccaa

SEQ ID NO: 2247656 - RNA, 15 nt, Human
aaucuguagggcugg

SEQ ID NO: 2247657 - RNA, 21 nt, Human
aaucuguaaacuguguauucc

SEQ ID NO: 2247658 - RNA, 16 nt, Human
aaucuguaaacugugu

SEQ ID NO: 2247659 - RNA, 15 nt, Human
aaucuguaaacugug

SEQ ID NO: 2247660 - RNA, 14 nt, Human
aaucuguaaacugu

SEQ ID NO: 2247661 - RNA, 21 nt, Human
aaugaccuuucaauaggaaaa

SEQ ID NO: 2247662 - RNA, 20 nt, Human
aaugaccuuucaauaggaaa

SEQ ID NO: 2247663 - RNA, 16 nt, Human
aaucuguagggcugga

SEQ ID NO: 2247664 - RNA, 19 nt, Human
aaucuguagggcuggaccu

SEQ ID NO: 2247665 - RNA, 22 nt, Human
aaucuguagggcuggaccuaug

SEQ ID NO: 2247666 - RNA, 15 nt, Human
aaucccagcacuuug

SEQ ID NO: 2247667 - RNA, 18 nt, Human
aaucccacccacauguga

SEQ ID NO: 2247668 - RNA, 17 nt, Human
aaucccacccacaugug

SEQ ID NO: 2247669 - RNA, 20 nt, Human
aaucccaagaucugugcagc

SEQ ID NO: 2247670 - RNA, 18 nt, Human
aaucccagcuacucagga

SEQ ID NO: 2247671 - RNA, 20 nt, Human
aaucccagcacuuugggagg

SEQ ID NO: 2247672 - RNA, 12 nt, Human
aaucccaggaug

SEQ ID NO: 2247673 - RNA, 17 nt, Human
aaucccauuuaaaaaaa

SEQ ID NO: 2247674 - RNA, 13 nt, Human
uaauaaaaaggca

SEQ ID NO: 2247675 - RNA, 18 nt, Human
aaucauaaacugugugca

SEQ ID NO: 2247676 - RNA, 17 nt, Human
aaucauaaacugugugc

SEQ ID NO: 2247677 - RNA, 21 nt, Human
aaucccaaauuugauugauuu

SEQ ID NO: 2247678 - RNA, 20 nt, Human
aaucauaagauauuuuucau

SEQ ID NO: 2247679 - RNA, 17 nt, Human
aaucagugugucuaaau

SEQ ID NO: 2247680 - RNA, 18 nt, Human
aaucagugugucuaaauu

SEQ ID NO: 2247681 - RNA, 22 nt, Human
aaucagugugucuaaauuugaa

SEQ ID NO: 2247682 - RNA, 19 nt, Human
aauccccucauucaggaaa

SEQ ID NO: 2247683 - RNA, 14 nt, Human
aauccccucauuca

SEQ ID NO: 2247684 - RNA, 21 nt, Human
aauccccucccugucaaagcu

SEQ ID NO: 2247685 - RNA, 11 nt, Human
aauccccuccu

SEQ ID NO: 2247686 - RNA, 15 nt, Human
aaucccccuugccac

SEQ ID NO: 2247687 - RNA, 18 nt, Human
aaucccccuugccacccc

SEQ ID NO: 2247688 - RNA, 18 nt, Human
aauccccuccuugggcac

SEQ ID NO: 2247689 - RNA, 18 nt, Human
aauccccuucucaucacu

SEQ ID NO: 2247690 - RNA, 12 nt, Human
aauccccuccuu

SEQ ID NO: 2247691 - RNA, 17 nt, Human
aauccccuccuugggca

SEQ ID NO: 2247692 - RNA, 19 nt, Human
aauccccuccuugggcacu

SEQ ID NO: 2247693 - RNA, 20 nt, Human
aaucccauucauaacuuuca

SEQ ID NO: 2247694 - RNA, 18 nt, Human
aaucccauucauaacuuu

SEQ ID NO: 2247695 - RNA, 15 nt, Human
aauccccaguaaaau

SEQ ID NO: 2247696 - RNA, 16 nt, Human
aauccccaguaaaauu

SEQ ID NO: 2247697 - RNA, 17 nt, Human
aauccccaguaaaauug

SEQ ID NO: 2247698 - RNA, 21 nt, Human
aauccccaguaaaauugccau

SEQ ID NO: 2247699 - RNA, 21 nt, Human
aaucccugggcauugcuuucc

SEQ ID NO: 2247700 - RNA, 23 nt, Human
aaucccugguuuuaaguaucaau

SEQ ID NO: 2247701 - RNA, 19 nt, Human
aaucccugggcauugcuuu

SEQ ID NO: 2247702 - RNA, 17 nt, Human
aaucccugggcauugcu

SEQ ID NO: 2247703 - RNA, 13 nt, Human
aaucccuguuuaa

SEQ ID NO: 2247704 - RNA, 20 nt, Human
aauccucaguuuuugugaaa

SEQ ID NO: 2247705 - RNA, 16 nt, Human
aaucccgauucacccu

SEQ ID NO: 2247706 - RNA, 17 nt, Human
aaucccgccaccuaucu

SEQ ID NO: 2247707 - RNA, 14 nt, Human
aaucccuggcaaag

SEQ ID NO: 2247708 - RNA, 12 nt, Human
aaucuauuuaag

SEQ ID NO: 2247709 - RNA, 12 nt, Human
aaucuauuucua

SEQ ID NO: 2247710 - RNA, 14 nt, Human
aaucuauuuuguaa

SEQ ID NO: 2247711 - RNA, 17 nt, Human
aaucuauuuuguaacuu

SEQ ID NO: 2247712 - RNA, 13 nt, Human
aaucucaaauaac

SEQ ID NO: 2247713 - RNA, 18 nt, Human
aaucugggccagaauuuc

SEQ ID NO: 2247714 - RNA, 12 nt, Human
aaucuguaaacu

SEQ ID NO: 2247715 - RNA, 11 nt, Human
aaucuguaaac

SEQ ID NO: 2247716 - RNA, 11 nt, Human
aaucuauuuaa

SEQ ID NO: 2247717 - RNA, 19 nt, Human
aaucuauuggguucauuau

SEQ ID NO: 2247718 - RNA, 18 nt, Human
aaucuauuggguucauua

SEQ ID NO: 2247719 - RNA, 17 nt, Human
aaucuauuggguucauu

SEQ ID NO: 2247720 - RNA, 16 nt, Human
aaucuauuggguucau

SEQ ID NO: 2247721 - RNA, 15 nt, Human
aaucuauuggguuca

SEQ ID NO: 2247722 - RNA, 16 nt, Human
aaucuauuauacugua

SEQ ID NO: 2247723 - RNA, 17 nt, Human
aaucuauuauacuguau

SEQ ID NO: 2247724 - RNA, 18 nt, Human
aaucuauuauacuguauu

SEQ ID NO: 2247725 - RNA, 12 nt, Human
aaucuauucaga

SEQ ID NO: 2247726 - RNA, 13 nt, Human
aaucuauucagac

SEQ ID NO: 2247727 - RNA, 18 nt, Human
aaucuauucagacaagca

SEQ ID NO: 2247728 - RNA, 19 nt, Human
aaucuauucagacaagcaa

SEQ ID NO: 2247729 - RNA, 18 nt, Human
aaucuaugauuccaggug

SEQ ID NO: 2247730 - RNA, 15 nt, Human
aaucuaugauuccag

SEQ ID NO: 2247731 - RNA, 21 nt, Human
aaucuauggucgggagacagc

SEQ ID NO: 2247732 - RNA, 22 nt, Human
aaucuauuaauagcugccuuaa

SEQ ID NO: 2247733 - RNA, 12 nt, Human
aaucuauuauac

SEQ ID NO: 2247734 - RNA, 16 nt, Human
aaucuaugccaaagau

SEQ ID NO: 2247735 - RNA, 17 nt, Human
aaucuaugccaaagauc

SEQ ID NO: 2247736 - RNA, 18 nt, Human
aaucuaugccaaagauca

SEQ ID NO: 2247737 - RNA, 20 nt, Human
aaucuaugccaaagaucacu

SEQ ID NO: 2247738 - RNA, 14 nt, Human
aaucuaaaagcuuu

SEQ ID NO: 2247739 - RNA, 14 nt, Human
aaucuaaagccagu

SEQ ID NO: 2247740 - RNA, 18 nt, Human
aaucguuauguguguaua

SEQ ID NO: 2247741 - RNA, 17 nt, Human
aaucguuauguguguau

SEQ ID NO: 2247742 - RNA, 16 nt, Human
aaucguuaugugugua

SEQ ID NO: 2247743 - RNA, 15 nt, Human
aaucguuaugugugu

SEQ ID NO: 2247744 - RNA, 23 nt, Human
aaucggaucuggggcucugggau

SEQ ID NO: 2247745 - RNA, 18 nt, Human
aaucggcccacagcuccc

SEQ ID NO: 2247746 - RNA, 22 nt, Human
aaucggcccacagcucccaccc

SEQ ID NO: 2247747 - RNA, 15 nt, Human
aaucgguuuaaacau

SEQ ID NO: 2247748 - RNA, 20 nt, Human
aaucuaucugcuuaugcagu

SEQ ID NO: 2247749 - RNA, 14 nt, Human
aaucuaugaaguau

SEQ ID NO: 2247750 - RNA, 17 nt, Human
aaucuaugaaguauaua

SEQ ID NO: 2247751 - RNA, 19 nt, Human
aaucuaugaaguauauaau

SEQ ID NO: 2247752 - RNA, 20 nt, Human
aaucuaugaaguauauaaug

SEQ ID NO: 2247753 - RNA, 21 nt, Human
aaucggaucuggggcucuggg

SEQ ID NO: 2247754 - RNA, 22 nt, Human
aaucggaucuggggcucuggga

SEQ ID NO: 2247755 - RNA, 14 nt, Human
aaucgcuuaaagau

SEQ ID NO: 2247756 - RNA, 21 nt, Human
aaucgcuuaaagauguuccua

SEQ ID NO: 2247757 - RNA, 12 nt, Human
aaucgcuucucu

SEQ ID NO: 2247758 - RNA, 23 nt, Human
aaucgcuucucuuuugaaacaau

SEQ ID NO: 2247759 - RNA, 20 nt, Human
aauccucuuccucugaggcu

SEQ ID NO: 2247760 - RNA, 18 nt, Human
aauccucuuccucugagg

SEQ ID NO: 2247761 - RNA, 10 nt, Human
aauccugccc

SEQ ID NO: 2247762 - RNA, 12 nt, Human
aauccugccccc

SEQ ID NO: 2247763 - RNA, 11 nt, Human
aauccugcccc

SEQ ID NO: 2247764 - RNA, 11 nt, Human
aauccucuggc

SEQ ID NO: 2247765 - RNA, 18 nt, Human
aauccucucucuguguua

SEQ ID NO: 2247766 - RNA, 13 nt, Human
aauccucuuccuc

SEQ ID NO: 2247767 - RNA, 14 nt, Human
aauccucuuccucu

SEQ ID NO: 2247768 - RNA, 15 nt, Human
aauccucuuccucug

SEQ ID NO: 2247769 - RNA, 17 nt, Human
aauccucuuccucugag

SEQ ID NO: 2247770 - RNA, 14 nt, Human
aaucccuguuuaau

SEQ ID NO: 2247771 - RNA, 21 nt, Human
aauccucucaaccaccuuuca

SEQ ID NO: 2247772 - RNA, 22 nt, Human
uaaguuucaggugacaugugaa

SEQ ID NO: 2247773 - RNA, 17 nt, Human
uaaguuucaguugauuu

SEQ ID NO: 2247774 - RNA, 14 nt, Human
uaaguuauaguaua

SEQ ID NO: 2247775 - RNA, 18 nt, Human
uaaguuuaugucuaaaga

SEQ ID NO: 2247776 - RNA, 17 nt, Human
uaaguuuauuucuuaaa

SEQ ID NO: 2247777 - RNA, 20 nt, Human
uaaguuuaugucuaaagagc

SEQ ID NO: 2247778 - RNA, 16 nt, Human
uaaguuucaggugaca

SEQ ID NO: 2247779 - RNA, 17 nt, Human
uaaguuucaggugacau

SEQ ID NO: 2247780 - RNA, 18 nt, Human
uaaguuucaggugacaug

SEQ ID NO: 2247781 - RNA, 19 nt, Human
uaaguuucaggugacaugu

SEQ ID NO: 2247782 - RNA, 20 nt, Human
uaaguuucaggugacaugug

SEQ ID NO: 2247783 - RNA, 14 nt, Human
uaauaaaaaggcac

SEQ ID NO: 2247784 - RNA, 16 nt, Human
uaauaaaaagauugaa

SEQ ID NO: 2247785 - RNA, 13 nt, Human
uaauaaaaagauu

SEQ ID NO: 2247786 - RNA, 21 nt, Human
uaauaaaaaauggaaagaauc

SEQ ID NO: 2247787 - RNA, 14 nt, Human
uaauaaaaaaugga

SEQ ID NO: 2247788 - RNA, 15 nt, Human
uaauaaaaaauggaa

SEQ ID NO: 2247789 - RNA, 19 nt, Human
uaauaaaaaauggaaagaa

SEQ ID NO: 2247790 - RNA, 20 nt, Human
uaauaaaaaauggaaagaau

SEQ ID NO: 2247791 - RNA, 13 nt, Human
uaaguuucucagc

SEQ ID NO: 2247792 - RNA, 14 nt, Human
uaaguuucucagcu

SEQ ID NO: 2247793 - RNA, 21 nt, Human
uaaguuacacauuuuucagau

SEQ ID NO: 2247794 - RNA, 14 nt, Human
uaagugugugugug

SEQ ID NO: 2247795 - RNA, 14 nt, Human
uaaguuacuucacu

SEQ ID NO: 2247796 - RNA, 14 nt, Human
uaaguguuguaaau

SEQ ID NO: 2247797 - RNA, 21 nt, Human
uaagugugaguaagagcuggu

SEQ ID NO: 2247798 - RNA, 19 nt, Human
uaagugugaguaagagcug

SEQ ID NO: 2247799 - RNA, 23 nt, Human
uaaguauuuauauauuuauaacu

SEQ ID NO: 2247800 - RNA, 13 nt, Human
uaaguauuucaaa

SEQ ID NO: 2247801 - RNA, 17 nt, Human
uaaguguguguuuuuca

SEQ ID NO: 2247802 - RNA, 19 nt, Human
uaaguauuuauauauuuau

SEQ ID NO: 2247803 - RNA, 18 nt, Human
uaaguauuuauauauuua

SEQ ID NO: 2247804 - RNA, 17 nt, Human
uaaguauuuauauauuu

SEQ ID NO: 2247805 - RNA, 15 nt, Human
uaaguauuuauauau

SEQ ID NO: 2247806 - RNA, 14 nt, Human
uaaguauuuauaua

SEQ ID NO: 2247807 - RNA, 13 nt, Human
uaaguauuuauau

SEQ ID NO: 2247808 - RNA, 20 nt, Human
uaaguauuuagguuuuuguu

SEQ ID NO: 2247809 - RNA, 20 nt, Human
uaaguauugcaucuguauaa

SEQ ID NO: 2247810 - RNA, 18 nt, Human
uaaguaccacucaggcca

SEQ ID NO: 2247811 - RNA, 11 nt, Human
uaaguauugca

SEQ ID NO: 2247812 - RNA, 17 nt, Human
uaaguauugcaucugua

SEQ ID NO: 2247813 - RNA, 12 nt, Human
uaaguauuuagg

SEQ ID NO: 2247814 - RNA, 18 nt, Human
uaaguauugcaucuguau

SEQ ID NO: 2247815 - RNA, 19 nt, Human
uaaguauugcaucuguaua

SEQ ID NO: 2247816 - RNA, 21 nt, Human
uaaguauucuuauuuaaugaa

SEQ ID NO: 2247817 - RNA, 17 nt, Human
uaaguaccacucaggcc

SEQ ID NO: 2247818 - RNA, 21 nt, Human
uaaguaauuaucgggaacagu

SEQ ID NO: 2247819 - RNA, 16 nt, Human
uaaguaauucaagaaa
